United States Patent Application Publication US 2008/0034453 A1 - sequence listing, part 6

SEQ ID NO: 45421 - DNA, 291 bp, Zea mays
gtctcagtcacctgcgccgccgcttcgttcgtgtggaggggagaagagaggaaatggcggcgaccgagggcgtgctcctggggatgggcaaccccctcctcgacatctccgccgtcgtcgatgacgccttcctgacaaagtatgacatcaagctgaacaatgctattctcgctgaggagaagcacttgcctatgtatgacgagttggctagcaagagcaatgttgaatatattgccggaggagccacccagaactctatcagggttgcccaatggatgcttcaaactctgg

SEQ ID NO: 45422 - DNA, 291 bp, Zea mays
tgtaaacaaacgattcctcgtatctctcgtcttcctctccaagcattcccttcttccttcttccccactcagggcttattcggttattcccaatacacatagattggattggatgagattagaaaaaattaagaagaagtttgacttgtttgggattcaaacccatctaatccctctcaatccacctctaaccgaacagggcctcagaggggtccgatcctcgtccctgttccactctggatcctgcaacctcctacccctacgacactcgtcttcgtcgccagcgcgcca

SEQ ID NO: 45423 - DNA, 279 bp, Zea mays
tagcacgacctagctcgctgcctccagttcctacaccacgagaagggcctgcctcacggcaacctgaagccgactaacatattcctgactggtcctgatctcactccaaagctggtggattacggcctgcacaggttcatgactccaagtggcgccgccgagcagatactgaacctaggagcgctagggtaccgagccccggagctggcgaacgcggggaaggcggcacccacgttcaaggcggacgtgtacgcgttcggggtggtggtcatggagatg

SEQ ID NO: 45424 - DNA, 286 bp, Zea mays
gtgaggactctggtgctggtcctggaacgaaggattatgtgcatgtgcgcatccagcagcgcaacggcagaaagagtctgactacagtccagggtctgaagaaggagttcagctataacaagatcctcaaggatctgaagaaggaattctgctgcaatggtactgtagttcaggacccagagctaggccaggtcattcagctccaaggtgaccagcgcaagaatgttgctactttcctagttcaggctgggattgcgaagaaagagaacatcaagattcacgggtt

SEQ ID NO: 45425 - DNA, 294 bp, Zea mays
gtattcgacctgtttgcaagaggttcatgcaagatcctatggaaatttatgttgatgatgaggctaaactgacccttcatggtctagttcagcactatatcaaattaagtgaggcagagaagaaccgaaagttgaacgatcttttagatgcactcgacttcaaccaagttgtgatatttgttaaaagtgttagtagagctgcagaactcaacaaattgctctgcgagtgcaatttcccctcaatctgtatacattctggaatgacacaggaagagaggttgacacggtacaaga

SEQ ID NO: 45426 - DNA, 292 bp, Zea mays
tcttctctccgcttccaagatgtcgaagcgagggcgtggaggttcggctggtaacaagttccggatgtcactgggtctaccagtggcagctactgtgaactgtgccgataacactggagccaagaacctgtacatcatttctgtgaagggaatcaagggtcgccttaacaggcttccttctgcctgtgttggtgacatggttatggcaaccgtgaagaagggaaagcctgaccttagaaagaaggtgatgccagctgttattgtgaggcagcgcaagccatggcgccgaaag

SEQ ID NO: 45427 - DNA, 291 bp, Zea mays
gtctacctctcctctcctgtgcgctacagcgagggggaaggggagcgtcgaccgattcgtcccggcctcccgtcccgccgctggcctcgcctgccccgatggcggcggtggcgatccaccagttcgccgagtgcatcacctgccacgcctggagcccggaccagtcgatgattgccttttgtccaaacaaccatgaagtacatatctataaattcttcacagacaagtgggagaaacttcatgttctgtcaaagcatgatcagatggtttcggggatagactggagtaaat

SEQ ID NO: 45428 - DNA, 292 bp, Zea mays
atcgccgccgcttcgttctctaaccttggctcccgctccctccgcaggagcatctcaacaccgccttgaggaccccccaactcgccggctgcagccatggtgaaatattcgacggagccaaccaaccccaccaagtcaaccaaggccatgggccgtgacctacgtgttcacttcaagaacacccgtgagacagcttttgcccttaggaagttgtcactcaccaaggccaaaaggtaccttgaggatgtgattgcccacaagcaggccatcccgttccgcaggtattgtggcg

SEQ ID NO: 45429 - DNA, 286 bp, Zea mays
gtatgttgttaatgacagcggcacaccggcgaaaccaggggaagagattgatgtctacatattttcattgttcaatgagaacaggaaacctggcatcgagtcggagaggaactggggactgttttttcctgataagagctctatctacagccttgattggacgggccgaggcaatgtggatgtgatgactggagcaaacattacaagtgctaatggtacctggtgtattgcttcaactaatgcatcagaaactgatctgcagaatgccctcaactgggcatgtggt

SEQ ID NO: 45430 - DNA, 270 bp, Zea mays
gtcgaggctaagcgcgttactcaggacgaacgacactgatggggcagaagcgacactgaaagagtgggaaacggtgcctcttcgctatcatgatttcagattaatcaacgtaatggtcgatgcctactgcagagaaggtctcgtggagaaggcagtagctctcgtggatggcgccatcaagaaagggaggacaccttacgctaatacctggtataagttggctggtgggtttttcaaaactggtcaggtaccagaagcagtggacatgac

SEQ ID NO: 45431 - DNA, 115 bp, Zea mays
gttggtacccctgttgttccctttgtttgctcccgctatgaaacgagacgagagaagaatgagcaaggtttttgttcgcagctatttttgtccaatgatattgatatgttgttcc

SEQ ID NO: 45432 - DNA, 273 bp, Zea mays
cggcagatagcgcgatcacgcggtcacccgaaagggaatcgggttaagatttcccgagccgggacgtggcggcagacggagacgtttcattagccacttagccgttcccacgacacaatcagcaccaccggtgtcctcgctgccaaggcgcccgcccgctcgtgtgacgagtggcgttcgtccaccgcccattccgcgctcagctctgagggcctcccgcccgccgcggcatcatctccggctcctctcgtcgccacgggtgtcacgaaatga

SEQ ID NO: 45433 - DNA, 286 bp, Zea mays
cttccaaatcccaccagcaaatccccaattcctccgagttcgagcgaccatgtcggggcgtggcaagggcgggaagggtctgggcaaaggcggcgccaagcgtcaccgcaaggttctccgcgacaacatccagggcatcacgaagccggcgatccggaggctggcgaggaggggcggcgtgaagcgcatctcggggctcatctacgaggagacccgcggcgtgctcaagatcttcctcgagaacgtcatccgcgacgccgtaacctacacggagcacgcccgccgc

SEQ ID NO: 45434 - DNA, 216 bp, Zea mays
gtcccctgctccattctcagccgccgccaatcccttcccgtgctccgcaaccgctgagtgagaagaagagatggccggcaagggcgatggcccggctatcggcatcgatctcggcacgacgtactcttgcgtcggcgtgtggcagcacgaccgcgtcgagatcattgccaacgaccagggtaaccgcaccacgccctcgtacgtcgccttcaccga

SEQ ID NO: 45435 - DNA, 283 bp, Zea mays
gtgttttcgcaccagcgccggcacaggcgacgcagcaccgcaccgagctgagccacttagcgagcgagggaacagcctccacggcgaggagagaatggggagaggagggatcggaggcgcggcggccatggccatggccatggagaccgccgatcctgcccgtgcattcgtgaaggacgtcaagcgaatcattatcaaggtgggcacggctgttgtcactggcatgaatggccgattggccatggggaggcgcggttctctctgtgaacaggtgaagcaactg

SEQ ID NO: 45436 - DNA, 293 bp, Zea mays
gtttctccgtgtcgggattaaaccgccgaagggcgtgctgctctacggtccacctggaactgggaagacgctcctagctagagccattgctagcaacattgatgctaattttttgaaggtggtgtcaagtgctatcattgataaatacattggtgaaagtgcacgcttaattcgtgaaatgtttaactatgcacgtgagcatcagccatgcatcattttcatggatgaaattgatgccattggtggccgaagatttagtgagggcacagtgcagatcgtgagattcagaggac

SEQ ID NO: 45437 - DNA, 274 bp, Zea mays
gtcgcatttccttgcaaccgattgcattcccccctcccaacccaagaccgatggcgcccaaggccgagaagaagcccgcggcgaagaagccggcggaggaggagcccgcggcggagaagacgaccgccgggaagaagcccaaggcggagaagcggatccccgctggcaagttcgccggcaaggagggcggcgagggcaagcgtggcaagaagaagggcaagaagagcgtggagacgtacaagatctacatcttcaaggtgctgaagcaggtgca

SEQ ID NO: 45438 - DNA, 282 bp, Zea mays
ctgtcctctgtgctatccgctagggtttatctgctcgaggaatggcgtcggtgcaggtctccggcgcgggggtcggtgccgcggccttctctgtgaaggggaaggcctccaccggtgcgctccggcttcgctctacgttgaccttcggcgaggtctgcccggcgcggcgggcgttccgcggcctcgtcgtcagggccgctaccgtcgtcgcccccaagtatacaacacttaagcccttggctgatagagtgcttgtacagattaactcttccgaggagaaga

SEQ ID NO: 45439 - DNA, 243 bp, Zea mays
ggcaatgttcctcacactaggcttgcggagtacaaggggcatcaaaattgggttaaggtctcaagtgactatctcttgttccctgggggtgggactcagttcaagaatggtgccctccactatattgatactattcagcaggtatattataatcatcccagcatctcatattagtcactccttagacttgtacttgtctgcctcacacttttgagcatcagtgattgatttattgttatacta

SEQ ID NO: 45440 - DNA, 278 bp, Zea mays
gtcgatttctaattctcctcgcgagcccaaaccctaaacctaaacctttcacccgccgccgccgccaccaccagcactgccactccgccaccaccgtcccgaagccccctcccagcgccatcgacttcatctcggattgaagcaatgtcgtcggacgatgaggtcagggaggagaaggagctcgacctctcctccaacgacgttgtcaccaagtacaaggctgccgccgaaatcctcaacaacgctctgaagattgttgtgtctcagtgccagccaaa

SEQ ID NO: 45441 - DNA, 277 bp, Zea mays
gtatgatgtgacaggtacttgatcatgtcgttgaagagcttaaaaaatttgcagttgttcatctgctgcaacgtagatcgatcatctcactgatagggaatgtacagcgatcgtcattgattcttgaaaaggcattcaacgttctgcgaagaaatggtgttaatgtccagatgatctcacaaggggcgtccaaggtgaacatatccttggtagtcaatgacagtgaggcaaaacagtgcgtacaagccctccattcagcgttctttgagaatggatt

SEQ ID NO: 45442 - DNA, 269 bp, Zea mays
gttgcgtctctcgcgcgttaccaagctctcaagttttctcgcgccgacggcaatggatgaggtcaccgaggccgtgaacaacctcaacatctcgggcgtaggggccgcgggcgttgccggggcggaagggcacaagaagaatcgcatccaggtctccaacactaagaagcccctcttcttctatgtcaacctcgccaagaggtacatgcagctgcacaacgagtagagctgtcggccctcggcatggccattgcgacggtggtgacagt

SEQ ID NO: 45443 - DNA, 245 bp, Zea mays
gtccgccgtcgtgcgctcgctacccctctccctcgaggcctttgccggcgaagagcgcccagtcgcccaccaggatgaagtttgttgctgcctacctgcttgctgtcctcgctgggaactccagcccctctgccgaggacttgacagccattctggagtcagttggctgtgaagttgacaatgaaaagatggaactccttctgtcccaactgagcggtaaggacattaccgagctcattgctgct

SEQ ID NO: 45444 - DNA, 269 bp, Zea mays
tggagctcgccggcaacgctgccaaggacaacaagaagacgcgcatcgtcccgcgccacgtgctgctggcgatccgcaacgacgaggagctcgggaagctgctgaccggcgtgaccatcgcccacggcggcgtgttgcccaacatcaacccggtcctgctgcccaagaagacggcggagaaggcgtccacggcgggagaaggaggccaatcgcccagaaggcgccagtcccccagaagcataggttggaagcggatcgtgtgtcagtgt

SEQ ID NO: 45445 - DNA, 267 bp, Zea mays
  unsure (1)..(267): unsure at all n locations
gcggnaaggaaaaccaaccaccactcccaccacgctccgcctccgcctgcgccacagctgccgattcgaaagccctcgtcctgacccctcgcaaaaccctagctccaaccaccatgaagggcaaggccaacgcctccaagaaggatgagggcaggctccgggccggcggcggcggcgcggaacagcgcaagaaggccgccgcgagcgtgaagcccaagcgccctccctccgccttcttcgtcttcatgtctgaattcaggcaggagt

SEQ ID NO: 45446 - DNA, 288 bp, Zea mays
ccctttccttcccctccggctccgcctcctcgaccactccgacaaccccaagcgcctccggcgagctccacctctccaccggctgcggcgagaagcggcgggggctaactaagtctgtaggcggcggcggaggtgatccgggagccggagccgagtctagggcgatggggcagcagtcgctgatctacgcgttcgtggcgcgtggcaccgtggtgctggctgagtacaccgagttcaccggcaacttcaccaccatcgccgcccagtgcctgcagaagctccccgcca

SEQ ID NO: 45447 - DNA, 282 bp, Zea mays
  unsure (1)..(282): unsure at all n locations
gacaaacaccgcaagctaagaagatcccttgctgaattcagagagcacaaacacaaaagcgagtgcaaaaccaaatggctgcctcgacctacttcattcttgttgcctttgcgttggtcacatctcaggccattgcctctgaccctagcccgctccaagacttctgtgttgccgacaaatactctccggttgaaggtaaatggatttgtttgcaaggaccccatggctgtgaacgcagatgacttcttcaaggcagcaaaacttgaccaaccagnggacacc

SEQ ID NO: 45448 - DNA, 287 bp, Zea mays
gtcagacattcaactgatagagaagtttctatcatgatactcatggcatacctttcatacatgatatcaatgctgttggacctgagtggaattcttactgtcttcttctgtggaatagtaatgtcacattacacttggcataatgtgacagaaagttctagggttaccaccaagcatacttttgcaactttatcattcattgcagaaattttcctcttcctctatgttgggatggatgcattggacattgagaagtggaaattagctagtagcagtcctaagaaacc

SEQ ID NO: 45449 - DNA, 285 bp, Zea mays
ggagaatctggcatcacactttctacaatgagctccgtgttgccccggaggagcaccctgtgttgcttactgaggctcctttgaacccaaaggccaacagggagaagatgacccagattatgttcgagactttcaatgttcctgccatgtacgttgcaattcaagcagtcctgtcactctatgctagtggccgtactactggtattgttctcgattctggtgatggtgtgagccatactgtgcccatttatgaaggatatgcccttcctcatgctattctacgtc

SEQ ID NO: 45450 - DNA, 273 bp, Zea mays
gtcggttcacttctccaggtaaggaaagggttcgtactcatggcgccgccgcagccaaagtcgggccttttcgttggcatcaacaagggtcatgtcgtcaccaagcgcgagctgcctccccgcccgtgccaccgcaaggggaaatcaacgaagagggtgtctatggtcaggggcctgatcagagaggttgctgggtttgctccttatgagaagcgtatcactgagcttctgaaggttggcaaggacaagcgtgccctgaagcttgctaagaga

SEQ ID NO: 45451 - DNA, 278 bp, Zea mays
gtgcattcctcccatctcccaagacctcctcagacccgagatgcgcagtgctcgccatggacgccaccggcactggagctggagggaaggcgaagaagggagcggccggtcgcaaggccggcgggccgaggaagaagtcggtgacgaggtccgtgaaggccgggctccagttccccgtcggccgcatcgggcgctacctcaagataggccgctacgcgcagccgtcggcagcggtgcccccgtctacctcgcggccgtcctggagtaactcgccgctg

SEQ ID NO: 45452 - DNA, 233 bp, Zea mays
gccacaccagcagcttcttcgagtcccgccgtcctagccagaagaacgaccgcgcgccgctgacggacgatgggggcacgctctgcagtgcacagccccgggttgcgcacgaacgagctctggttgaacaccaggaactagcagtgcatcggcactgtcagtactcgcagaggtcggcaggtatggcgcaatacagatccatgcgcagcttgaagaagagcgacatctcggtg

SEQ ID NO: 45453 - DNA, 286 bp, Zea mays
gtcggctgccgcagactggtagtagccggcgcgccgtcaccgtatcctcagatcagcggcgagcagaaaccacaccactctactgacgcccgacgagcagtgtaacattttccttcagccatgggtaaggagaagactcacatcaacattgtggtcattggccatgtcgactctggcaagtcgaccaccactggccacctgatctacaagcttggaggtattgacaagcgagtgattgagcaggttcgagaaagaggctgccgagatgaacaagcggtcattcaag

SEQ ID NO: 45454 - DNA, 283 bp, Zea mays
ggagttccccgaccacaccgttcctccgagcccaggagcagacccgcgccaggaggaagtttgttcttttaacaatatgtcgagggaggagaatgtttacatggccaagttggctgagcaggctgaaaggtatgaggagatggttgagtatatggagaaggtggctaagactgtagatgtggaagagctcactgttgaggagcgtaaccttctgtctgttgcatacaagaatgtgattggggctcgccgcgcttcatggcgcattgtttcttccattgaacaa

SEQ ID NO: 45455 - DNA, 269 bp, Zea mays
ggtggcccaaccatggccgtcattgccctcaagtgcccagacattgaggtcgtcgtcgttgacatctccaagccccgcattgaggcctggaacagtgacaccctgccaatctacgagcctggtctcgatgatattgtgaagcagtgcaggggcaggaacctcttcttcagcactgatgttgagaagcacgtcgctgaggctgacattatctttgtctcggtgaacacccccaccaagacccgtgggcttggagctggcaaggctgccga

SEQ ID NO: 45456 - DNA, 276 bp, Zea mays
ttgtaaagtccgtcgtttgaagtacacctggaaatctgcaggttacaatttcaaaaggattaccgaaaggaaggatcagccttgtcgacaatataatccttgtggttgtacatctacatgcggaaagcagtgtccatgtctttcaaatgggacatgttgtgagaaatactgtgggtgtccaaaaatttgcaagaatcgttttcgaggatgtcactgtgcaaagagccagtgtcgcagccgccaatgtccatgttttgcagctgacagggaatgcga

SEQ ID NO: 45457 - DNA, 272 bp, Zea mays
gaggtttggggggaaaaggcctcgcgggtcgcaaaccgctctctgttgatttgggatttgggaggcgctcgagttttcaggtaaaccatagtttagtgacccatggctcgtactaagcaaactgctcgcaagtgcactggagggaaggctcctaggaagcaacttgccaccaaggctgcccgtaagtctgcacccacaactgggggagtaaagaagcctcatcgttaccgccctggaactgttgctcttcgtgaaatccgcaagtatcagaa

SEQ ID NO: 45458 - DNA, 271 bp, Zea mays
ctcccggcggcggcgcaggagcagcagcacccgaggatggtgaagattcctcaagcccggcaaggccgtgatcctcctgcagggccggttcgccggcaggaaggcggtgatcgtgcgcgtgttcgaggagggcacccgcgaccgcccctacggcctctgcctcgtcgccggcctcgccaagtaccccaagaaggtggtccgcaggactcggccaagaagacggttaagaagtcgcgcgtcaagtgcttcatcaagctcgtcaacttcaccc

SEQ ID NO: 45459 - DNA, 269 bp, Zea mays
  unsure (1)..(269): unsure at all n locations
gtccaaactcgtgagcactttctcctcgtccccgacaagccactcgaagccgagatacggccatggactccaccggcaccggagcagcggggaagggaaagaagggagcggccgggcgcaaggtcggcgggccaaggaagaagtcggtgtcgaggtccgtgaaggctgggctccagttccccgtcggccgcatcgggcgctacttgaagaagggccgctacgcgcagctgtncggcaccggcgctcccgtcttactcgncgctgtcctc

SEQ ID NO: 45460 - DNA, 233 bp, Zea mays
gggtcttctacggcatcctgagaatagagaatgcgcagactgcaagtcaaagggtcctcgatgggcaagtgtgaatctaggtatctttatatgcatgacatgttctggcattcatagaagcctgggggtgcacatatctaaggtaagatctgccaccctggatacatggctgccagagcaagttgcatttattacaatcatggagaccgaaaacgcaatcgatattgggaaac

SEQ ID NO: 45461 - DNA, 287 bp, Zea mays
gtcatggccatccccatcgagctatccgaccgggaatccctcgtcaagtctgcgtccacggctctcaactccaaggtcgtctcccagtactccacccttctcttgcccctcgccgtcgacgccgccctctctgtggtggaccccgctcaccctgaccttctcgacctccgggacatccgcatcgtgaagaagcttggtggcaccgtggacgatactgagctcatccctggcctcatctttgacaagaaggctagccatgctgctgggggcccaactcggatggagaa

SEQ ID NO: 45462 - DNA, 284 bp, Zea mays
ggctactccatgtacccaggtctgcgtcgggcccttgccggcgatgagaacccgtcagttccaaagatggctcgtcgtggattgatggaacaggacttaagcaaactggatgtgacgaagcttcaccccctgtcacctgaagttatctcacgccaagcaacaatcaatatgggtaccattggccatgtggctcatggaaagtccactgttgttaaagctaatctggtgttcagactgttcggttcaagaatgagctggaacgtaacattactataaagctgggt

SEQ ID NO: 45463 - DNA, 203 bp, Zea mays
gtctcccagccatgatggctcagaaagacaaagctgtggcaggactaacaaaaggaattgaagggctctttaaaaagaacaaggtgacttatgttaaaggctttggaaaattgtcatccccctcagaagtgtcagttgacttgattgatggtggtagcactgttgtcaaaggcaaaaacataataattgcaactgggtctgat

SEQ ID NO: 45464 - DNA, 251 bp, Zea mays
tcctcgtgctcctcctcaagatctacgccaccaagtcctgctcaggggtgtcgaggaagacgcaggagctgtacatgttggtgttcgtggcgaggtacctcgacctcttcacggactacgtctcgctctacaactcagtgatgaagatggtgttcatcaccagctcggcggcgattgtgtggtgcatgcgccgccacccgcaggtacggaggacttaagacaaggagcaggacacctccgccacgcgtgct

SEQ ID NO: 45465 - DNA, 215 bp, Zea mays
gactctgctggtctccctcttccacctctggtcttggccatggcctccagcgcctcccggttcatcaagtgcgtcacagtgggggacggcgccgtgggaaagacctgcatgctcatctgctacaccagcaacaagttccccactgattacatacccactgtcttcgataacttcagtgcaaacgtggtagtcgacggtaccacggtgaatttggg

SEQ ID NO: 45466 - DNA, 216 bp, Zea mays
gtattgtacaaggggatgttgatgatatgatggctcaaaggttaggggctgttttcatgcctcatggtcttggccacttacttggtattgacacccatgatccaggaggctaccctgagggattggagaggcccaaggatccaggactgagctccttgcggaccacaagagaactgaaagaaggaatggttatcacagtggagccaggctgctatt

SEQ ID NO: 45467 - DNA, 260 bp, Zea mays
gttggttggcttgcgatctcctttgcaaaagactcttcatttctgtatatgggacgcttgcttgaaggattcggtgtcggtatcatttcctatgtggtaccggtatacatagcagagatatctccacaaaacatgagaggggctcttggctctgtgaaccaggtttgcctatacttgcaagcatctcatctatttgtgagttatctgtaacccttggtatcatgtttgcctatttgctcggcttgtttgttccttggagg

SEQ ID NO: 45468 - DNA, 221 bp, Zea mays
gatgcactgtcgagcgagacgcctcgtggggaaatttgcatcagaggggacaccttgttctcgggatactacaagcgagaggacctaaccaaagaagtcttggtcgatggctggttccacacaggagacattggtgagtggcagtctgacggaagcatgaagatcattgaccgcaagaagaacatcttcaagctctcacagggagagtacgttgcggttga

SEQ ID NO: 45469 - DNA, 274 bp, Zea mays
gccggtgcggaagagcgtgtgcgtgaccggcgctggcggcttcgtcgcgtcggagctggtgaagctcctcctctcccggggccaatacgcggtccgcggcaccgtgcgcgaccctggtgctagcaagaatgcccatctcaaggtgctggaaggagctgaggaaaggttgcagcttctcaaggctgatctgatggactacaacagcattgcatcagcagttgccggctgtgagggtgtcttccatgtagccagtcctgtcctttcccatcgaccc

SEQ ID NO: 45470 - DNA, 240 bp, Zea mays
ggaggatctgagtggggatctcgtgagagaagagcgtgaaagtaatgatgagctacaagaagcccgaaaagaactgataaagggtttggaggaagagctaaatggacggacagctatcgggatcaaaagaatgggggaactcgatgaaaagcctttccaaaatgcatgtaagacaaaatacggacaggatgagtacgagatcaaagcagcacgctagtcacaagttggcaggatgaacta

SEQ ID NO: 45471 - DNA, 266 bp, Zea mays
gttgaattcatctctgccctagcaccagccatggcgaacgcagcttcttctctgtatcctactcgccgcctccgcgccgctaatcgtcgccacggccaagaaatccggggacgtgtcggagctccagatcggcgtcaaggttcttatattgatgctatgcctgggtatttgaaatgcagtacaagccggaatcatgcagcattcaagctcacaaaggtgacaaggttaaagttcactaccgtggaaaacttactgagtggacggtt

SEQ ID NO: 45472 - DNA, 294 bp, Zea mays
ctgtgaatgggttagctgggccactacatggccttgcaaatcaggaagcgcttctatggctcaagtctataattcaggaaacagggagcgacgttacgacagaccaactcaaagactatgtctggaagacactgaagagtggaaaggttgttcatggatttggtcatggagttctgcgtaggacggacccacggtatctatgccaaagggagtttgccctgaagtatttgccagaggatccgcttttccaactgctgtccaagttatatgaggtcgtgcctccgatcctcactg

SEQ ID NO: 45473 - DNA, 288 bp, Zea mays
caagggatggcgggccgtggcaaggctatcggcgctggcgccgcgaagaaggcaacgtcgaggagctccaaggccggactccagttccccgtcggcaggattgctaggttcctcaaggcgggcaagtacgctgagcgcgtcggcgccggcgcccccgtgtacctcgccgccgtcctcgagtacctcgcggctgaggttctcgaacttgccgggaacgccgcgagggacaacaagaagacccgcattgtgccgcgccacatccagcttgctgtgcgcaacgacgaggag

SEQ ID NO: 45474 - DNA, 293 bp, Zea mays
gcctgggccaagtcaagtcgtcgtcttgcttgccaatccgtcgctccacctgaacacaccggcgaagaggaggcgaagaagcgatgggcgtgaccaaggaggacgtcgaggcggccatcacctccgctctcagcccttccaatctcgtggtgacggacacgtccggacggtgtggcgcgagctacgagatcgaggtggtgtcggagaagttcgaggggaagcggctgctggagaggcaccggatggtgaacaccgcgctggcgtctcacatggcggagatccacgccgtctcc

SEQ ID NO: 45475 - DNA, 289 bp, Zea mays
ctcgaccgctccgacccccttcctctctccctccgccgccgctgcgcacgcagggaaacagcgacatgggcgtctacacctttgtgtgccgcaacaacggcggcgagtggaccgccaagcagcactccggcgagatcgaggcttccgccgctaccccatacgagctgcagcgccgcctcgtcgctgccgcctccgcggccgactctgcctacggcgtccagtcgtcctgctccatggtcacccccagctccgccgtgttccaggtgatcgtcggtgctgtcggtggtgg

SEQ ID NO: 45476 - DNA, 285 bp, Zea mays
  unsure (1)..(285): unsure at all n locations
gtggcttcatggagctatgcatcagcgtggtgtttttagctgggaaaatcgcatgaaggttgtaacaggcactgcaaaagcgcttgcttaccttcatgaagctattgagccaaaagttgtacatcgagatataaaatcaagcaacatattgattgatgatgaatttaatggcaaagtatctgactttagattggctanacttttgggatcagacaaaagccacattactactagagtgatgggaacatttggatatgttgcacctgaatatgctaatactggaat

SEQ ID NO: 45477 - DNA, 278 bp, Zea mays
aaaagctctggagacagccatgcaacatgttcactatgaggatgagaacactcggtacatttgcattggtcctgtaaacaaggtattaaatatgcttgcttgctggattgaagatccaaactcagaggcctttaaactccacatcccacgagtctatgattacttgtggcttgcttgagatggcatgaagatgcagggctataatggtagccaactttgggatacagctttcatagttcaagccattgtggctaccaaccttaccgaagagtttggtc

SEQ ID NO: 45478 - DNA, 290 bp, Zea mays
ctgccttctgcggctccatttcggcctctgtccctcgcaagtacaatctcacctccaaccatgggtaaagagaagtcccacatcaacattgtggttattggtcatgtcgactctggcaagtcgaccaccacaggacaccttatctacaagcttggaggcattgacaagcgtgtgatcgagaggttcgagaaggaggctgctgaaatgaacaagcggtccttcaagtacgcgtgggtgctcgacaagctcaaggctgagcgtgagagaggtatcaccattgatatcgctct

SEQ ID NO: 45479 - DNA, 281 bp, Zea mays
cgcaccattggatttaacgttgaaactaatgttcttgtactcggcagtttcaacgttaaatccaatggtggggatggtggtgacgatctcgccgagcttgagcttgtagaggatagtggtcttaccagatgcatcgagaccgaccatgagaatcctcatctccttcttggatttaacgttgaaactgtcgagtacaagaacattagtttcactgtttgggatgtcggtggtcaggacaagatccggcccctgtggaggcactacttccagaacacccaggg

SEQ ID NO: 45480 - DNA, 279 bp, Zea mays
tagaacgttaacgccagcactgggaagtgcgggatcgcgatgatggcgtcctacccgacgaagaagggcgcgaaccctcccaggccgtctccaaccccgccaacaccgccggctgcccctgacaatgtctgcgacgagaacttctcgtgctccgcgggcagcacctgctgctgcgcgtttggcttcaggaacgtctgcttggtctggggctgctgccctgtcgagggcgccacctgctgcaaggatcacgccagctgctgcccgccgggctaccctgtc

SEQ ID NO: 45481 - DNA, 274 bp, Zea mays
cgccccacccacaactgctccagatccaggcacggcacggcacggcagccgcgccaacccaagcccgtcttctcttctctctcgtccgtcccgcactcgccgcgacgtgacaagacaacgcgacgcgcgcgcatacgtcgtccaaggcacgcaggggccagccaagccaaccaatcgcgtccgtccgggtctggtggtggccggaatgggcctcctcgatcagctctgggacgagacggtggccggcccgcgaccggactccggcctcggcaag

SEQ ID NO: 45482 - DNA, 285 bp, Zea mays
agaaaatccaggtgttttggatttgtcaattttgaaaatgcagatgctgctgctcaggctgttcaagagttgaatggcaagatattcaatgataaggaactgtatgttggaagagcacagaagaagtctgaaagagagatggagttgaaggagaaatttgaaaagaatgttcaagaggtagctgagaagttccaaaacacaaacttgtatttgaagaacttagaggagaacattgatgatgagaaattgcgtgaactctttgctgagtatggcaatattacttcc

SEQ ID NO: 45483 - DNA, 283 bp, Zea mays
aagatgtcgaagcgaggacgtagtgggtcctccggagcgaaattccggatttccctgggtcttccggtaggagctgtgatcaactgtgctgacaacacaggagccaagaacctgtatatcatctctgtgaagggaatcaagggacggctgaacagacttcctgctcgtggtgtgggcgacatggtgatggccacagttaagaaaggcaaaccagaactaaggaaaaaggtacatcctgcagtggtgattcgacaacgaaagtcatatcgaagagaagacgggg

SEQ ID NO: 45484 - DNA, 274 bp, Zea mays
ccgcctccccgatctcgtcgagaggaagcccaatcccgaaaccgccgccctattccaatggcgcccaaggccgagaagaagcccgacgccaagaagcctgcggaggaggagccggcggcggagaaggccacggcggggaagaagcccaaggccgagaagcggctccccgcgggcaagtccgcaggcaaggagggtggcgagaagaaggggaagaagaaggcaaagaagtcggtggagacgtacaagatctacatcttcaaggtgctgaagcagg

SEQ ID NO: 45485 - DNA, 277 bp, Zea mays
tgattactgaagatgttcagggtaaaaactgcctgactaacttccatggcatggatcttacccgtgacaaaatgtgttccatcgtcaaaacatggcagacaatgattgaagctcacgttgatgtcaagactaccgatggttacttgcttcgtctgttctgtgttggttttactaaaaaacgcaacaatcagatacggaagacctcttatgctcagcaccaacaggtccgccaaatccggaagaagatgatggagatcatgacccgagaggtgcagac

SEQ ID NO: 45486 - DNA, 233 bp, Zea mays
tgctaggctcaaacccaaacttgatgaagtcctgcctaaagctgctgcggttgtctttgttgttgatgctcaagatttcttgtctagcatgcaagctgctgcagagtacctttatgacattctgacaaaggcaactgtagtgaagaaaaaggtccctgtgcttatattctgcaacaagacagataaagttaccgcccactcgaagggattcatcaagaagcagttggagaaag

SEQ ID NO: 45487 - DNA, 278 bp, Zea mays
gtaagatgttcctgcggaggatcctgaccggcgggggcggcctggcggccctgagggcggcgcgcgccgtgaaggagacgacggggatcgtgggccttgaggtggtgcctaacgcgcgagaggttctggtagggctctacgagcgcacgctcaaagagatcaaggccgtccccgaagacgagggttaccgcaaggccgttgaatccttcaccggtcaccgcctccagatctgccaggaggaggaggactggaagcgcatcgaggaccgaatgcgatgc

SEQ ID NO: 45488 - DNA, 278 bp, Zea mays
attctcctaaggaacggattgtaccacctgcagagaaacctgccacaacttctttgagaattgaccgatttgtacgcccatttaccctgaaagctgtgcaggagcttcttggtaaaactggatctgtacaagacttctggatggaccatatcaagactcattgctatgtgacattttcttcggtggatgaagcaatggctactagggatgctgtttacaacctacagtggcccccaaataacggcaataagttggtcgccgaatttgttgatcctcag

SEQ ID NO: 45489 - DNA, 318 bp, Zea mays
ttcagtgcatcgttgtacgctcggtattctgctcgttgctctctcggcattgacacgctctactacttcagctgcaatcgccttgtgtctcaggtgatctcatcgctgactgcttctctgaggttcgatggtgccctcaatgtggatgtgaacgagttccagaccaacctggttccttacccgaggatccacttcatgctctcctcctacgcaccggtgatctcttcttcgattgtcgtccacgatcagctgtctgtggtggagattgccagcggcgcgttcgagccggcttccatgatggtcaagtgcgacccacgg

SEQ ID NO: 45490 - DNA, 287 bp, Zea mays
atcgagccgagcttgatgagaccgaggatgagaagaagaggaaggaggagctgaaggagaagtttgagggtctgtgcaagatcatcaaggaggttctgggcgacaaggttgagaaggttgtggtgtctgaccgtgttgtggactcaccgtgctgccttgtcactggtgagtatggctggacagccaacatggagaggatcatgaaggcgcaggccctgagggactctagcatgtcggggtacatgtcgagcaaaaagactatggaaatcaacccggagaacccaatc

SEQ ID NO: 45491 - DNA, 264 bp, Zea mays
caaatggcaaggccaagtagatgtgccatcacttcggcactggagtgaaaaagaaagtatgattgggtcctgcctaggccccatagatatagctcttttttgagaaggaagagagattaattcagcagcagcttttataaattctttgttgtcatgaagcaggtggttcttttgtagttgatgaaagggatttgtcgtcgctatcgtttacataattcagacaataattgtatattgtgtaattctgagaatcaaagcactgtt

SEQ ID NO: 45492 - DNA, 275 bp, Zea mays
gatcggagcgagctcattctcaactcgactcaagagctctgcctcctccatcttcccttctctttctggacgttgagggcctccggggccacgctgagagatggaggcgaatccgaagaacaccttcacgatcaaagtggaggacgggaagcccgggaaggacggccggctggcggtcggaccggtgttccggagcgttctggccaaggatgggttcccgcagcttgagcctgacatgaagacatcatgggacgtgttcagggtagcagcagtca

SEQ ID NO: 45493 - DNA, 262 bp, Zea mays
gtgctcagtcagatccccgtcccgcatttcctaaggccaggttagttggcattgaagacgatgactgcttctgcagctgctggtgtgcagatggtggctgcacgcccttgcatttcggcctcgccaggaattcttaccgcacgggtttctaggactgattgcatgctcagtaccactgctacattccccaaaatcagctgctcctggcctctaaggtttaagcgcaatgatgttgttgtaagagcaatatcggaagagtgtg

SEQ ID NO: 45494 - DNA, 268 bp, Zea mays
cgctgctcccacctctagcccgacaggtgaagccgccgccgctgcagtgtccatagccaccgcaggagactgagatggggggttttgtcaagacccacaagagcaatgcatacttcaagcgtttccaggtgaagttcaagagaaggcgcgctggcaagacagactacagggccaggataaggctgattaaccaagacaaaaacaagtacaatacacccaaatacagatttgttgtgcgatttaccaacaaggacatcacagcacaaat

SEQ ID NO: 45495 - DNA, 268 bp, Zea mays
cttggaggtgaccgcagctctccggcggaaggcggcgcagatggattccgcggcgacacagtgcttcagctactcctcgttgccggccacgtgggctctgcggcagcggggcggcggtgccagcgtgctccgactctcttcccggcggaccttctcggtctccgcggcggccgggttcgacaaccagaaccgcgagtatgtgatcgtcgggggagggaacgctgcgggttacgcagccaggacgttcgtggagcatggcatggctgac

SEQ ID NO: 45496 - DNA, 266 bp, Zea mays
cccacctctagcccgacaggtgaagccgccgccgctgcagtgtccatagccaccgcaggagactgagatggggggttttgtcaagacccacaagagcaatgcatacttcaagcgtttccaggtgaagttcaagagaaggcgcgctggcaagacagactacagggccaggataaggctgattaaccaagacaaaaacaagtacaatacacccaaatacagatttgttgtgcgatttaccaacaaggacatcacagcacaaatcatat

SEQ ID NO: 45497 - DNA, 265 bp, Zea mays
gccatcggcggcgcaccgaccgccggcgaagggtacagagatgaagacggttagcctcggcgcctctaggccttccactgtcaacttccgcatgccgacgagggacaacctcgtgcctatacgcgtcgacgtcgaggtggacggccagcgctacagggacgccttcacctggaacccgcgagatcccgactcggagataatcagcttcgctaagcggacggccaaggacctcaagctgccggccaatttcgtcccccagatgctc

SEQ ID NO: 45498 - DNA, 266 bp, Zea mays
gctgcagatcaaaaggctctcgcctcggcttggcagtcggcactccctctccaccgcgctgcaggggcgacgcaaggccgagcgctcctcgatccagatccaaggtaggagatgtgtctcacgagaattggcctcgccggcctcgcggtcatgggacagaaccttgccctcaacatcgcggagaaagggttccccatctcggtctacaacaggacgacctccaaggttgggaagaccgtgcagcgtgccaaggtcgaaggaaacct

SEQ ID NO: 45499 - DNA, 269 bp, Zea mays
cttacctcattgagcagaacaaggctcagcttgttgtcatcgctcacgacgtggatccgatcgaacttgttgtgtggcttccagccctgtgcaggaagatggaggtcccttactgcattgttaaaggaaaggctcgccttggatcgattgttcacaagaagaatgcatcagtcttgtgtcttaccactgtcaagaacgaggataagcttgagttcagcaagattttggaggctattaaggcaaacttcaacgacaagttcgatgaggtc

SEQ ID NO: 45500 - DNA, 96 bp, Zea mays
aaggtaccagtcgtggggtccgctcttcggcaagctcttcttcgccttctggatgatcgttcacctgtacccgttcctcaagggtctcatgggtcg

SEQ ID NO: 45501 - DNA, 310 bp, Zea mays
agaagatatggggtcagcagtatcagtagttgaggctgctgctcacaaaggactgctacaatgtattgatactgttatgtctgaggttgaaagattgttgtcttcggaacagaaggctacagattatcgaacaccagatgatggagctgcaccagatcatcggccaactaatgcttgtataagaattgtagcctatctctctcgtgttcttgaggttgcattcagtgcccttgaaggcctcaacaaacagtcctttttgactgagctgggaaatcgcttgcataaggggctgcttaatcattggcagaag

SEQ ID NO: 45502 - DNA, 316 bp, Zea mays
  unsure (1)..(316): unsure at all n locations
cagcattctcgaattccgattcccaatccagcaaaccctaccagccttttgcaaactcagagagggacccgatggcacccaaggcggagaagaagccggcggcgaagaagcccgcagaggaggagcccgcggccccggcggagaaggcccccgctgggaagaagccgaagcgntagaagcggctcccggcgggaaaatccgccggcaaggaaggcggtgttgacaagaaggggcggaagaaggccaagaagagcgtggagacgtacaagatctacatcttcaaggtgctgaagcaggtgcacccggacatcggcat

SEQ ID NO: 45503 - DNA, 304 bp, Zea mays
gtgaagagcaagggggcggagaagcccgccaagggaggaaagggaaggccggcaaggaccccaacaagcctaagagggctcccagcgctttcttcgtgttcatggaggaatttcgcaaggagttcaaggagaagaaccctaagaacaagtctgtcgctgcggtggggaaagctgctggcgacaggtggaaatccctgagcgagtcggacaaggctccctatgtagccaaggctaacaagctcaagctcgagtacaacaaggccatcgctgcctacaacaagggcgagagcactgcagctaagaa

SEQ ID NO: 45504 - DNA, 307 bp, Zea mays
gctggtggtccaaaacttccaatgaaatatggacgtgttgatgtcacagcagctgaacagtgtccgcccgaggggaggcttcctgatgctggcccacgtgatcctgctgaacaccttagggaggtattttatagaatgggccttgatgacaaggaaattgttgcactatctggagcacacacacttggaagagcaaggcctgaccggagtggctggggaaagctagaaacaaaatatactaaggatgggcctggtgagcctggagggcaatcatggacagttgagtggttgaagtttgataatagtt

SEQ ID NO: 45505 - DNA, 307 bp, Zea mays
gaacaaccctgccttccttgccctgaggcagattgaagctgcaagggagatctcccacaccatttcggcctcagccaacaaggtgttcctggactccaacgacctgctgctcaacctccagcagctgaatgtatcgagcaagcagaagaaatgatgtcacaacgttatcccatttcttctgagtttgcagtcagtagtggatgcctttgtaccagacattgtgaggaacgctcggttttggatgtagtttcgccaatcttcctgttatgtggaacttgcgagtatttgctcaaaggcaagcaagctg

SEQ ID NO: 45506 - DNA, 307 bp, Zea mays
ctcgagccgaatagttgatcttgattctcgtcttggcaagactcaggtggtgaccccgattgcaccattgaatcagcaggctggatactactgttctgtatgtgaatgtgttgtcaaatgttcagccaactatttggatcatataaatggcaagaagcatcagagagcactgggcatgtctatgcgtgttgaaagggcatcacttgaacaggtccagaaaaggtttgaggcacttaagaaaaggaaggatccaagtgcctttactgaagaagatttggatgagagaataatgaaacaacagcaagag

SEQ ID NO: 45507 - DNA, 311 bp, Zea mays
ccataaacaagaaaaagaaaagaaaacccctgttgccagcgacagaagaagaaggggccccttctccttggttgcgttgcgcctccctcctgtctgcgtgcgtgcaatcgacgcagaggcgcgggcgctcgcaccaccacaaccacgacccgatggctttcatgcgctcccgctcaaatgcatcttctggcatgggagttgctcctaacattagggagacattcgttgagcttcaaatgaagaaggcattccgatatgttatcttcaaaatcgaagagaagcaaaagcaggtggttgtggagaagacaggg

SEQ ID NO: 45508 - DNA, 328 bp, Zea mays
ctcggcacgcaggctagcagcacagcagcagccagagccatcccctctcctcgctacgcttcgcttcctcggcgccgattcctcctcctcctcctccaccctcgtccgtccccttccggcgcacgagctcgcccgagatggcgaacgcgagatcgggtgtcgctgtgaacgatgagtgcatgctgaagtttggcgagctgcagtcgaagaggctgcaccgcttcataactttcaagatggacgacaagttcaaggagatagttgtggaccaggtcggggatcgcgctaccagctacgatgacttcacaaacagcctccctgagaatga

SEQ ID NO: 45509 - DNA, 308 bp, Zea mays
ctcgagccgggaccttcggcgcccgttcaggatccacatcttcccgagcgagttcttggctgacctcttcctcttcggaccacctccaaggctcttggtgtagcttgccactctcaccaatgaagttttcatgtctgatctcgacattcagatcccaactgccttcgatcccttcgctgaggccaatgctggggactctggtgcggcagcagggtcaaaggactacgtacacgtgcgcatccagcagcgtaatggtcgcaagagcctgactaccgtccagggattgaagaaggagttcagctacagca

SEQ ID NO: 45510 - DNA, 303 bp, Zea mays
accagtctcccatccctgaaaacctcacaaaaccctcgtttgctccccaccaccccgccgcgccgccgcctgtaccagctgcgtcaagatgagtcggcaccctgaggtgaagtgggctcagaggatcgacaaggtttacatcactgtacagttacctgacgcaaaggatgctaaggtcaatttggatccagatggtgtcttcacattctctggcagcgctggtacaaacttgtatgaattgaaactagatctgaatgacaaagtaaacgttgaggctagcaaaataagtgtgggggtcaggtc

SEQ ID NO: 45511 - DNA, 302 bp, Zea mays
atgcttctgaacaaaaggatactattgtgctacctaaactacaaggagagcctctggtacccaaaagtagtgctggtaaaaaaagtgggcgcatcttgcgagctgtcatttttgtgcatggttttcagggccaccatttggatttacgtcttgttagaaaccaatggcttctattggaccctggagctgattgcctaatgtctgaggctaatgaagataaaacatctggagacttcaaagaaatgggtagtaggttggccggggaggtaattaccttcctgaagaagaaaatggataagctt

SEQ ID NO: 45512 - DNA, 303 bp, Zea mays
acggagggacttttgctcgctggacaagtacgtgtgggcgttcgtgaacaacaagccgctgtcgccgagctacaagtacagccggaagatcccggtgaagacgtccaagtcggagtccatcagcaaggacatggtccggcgcggcttccgcttcgtcggacccactgtcatccactccttctgggaggcggtcgggctcaccaacgaccacctcgtctcgtgcccgcgccaccgcgtctgctcctcctcctccgccgccgcccgcgttaataataactgattctgctgacgaccaccaagcaa

SEQ ID NO: 45513 - DNA, 302 bp, Zea mays
agcctggaactggtagttcttccccaggttctgtcaagagaaaaacaactattcttggtcaaaagaataaaagattacggatggataatgaggaatcaatggagttgaagataacatgggaggaagctcaagaattgcttcgccctcctcctaaggccccatccattgttattgttgatggccatgagtttgaggaatatgaggagccaccggtacttggaaggaagacttattttgtagcagataaatcaggttcgaaccatcaatgggcccaatgtgaagattgttccaaatggaggaaa

SEQ ID NO: 45514 - DNA, 295 bp, Zea mays
tcaagttctacacgagctcggtttcggcaatgtcggggcgcggcaagggcggcaagggtctgggcaagggcggcgccaagcgccaccgcaaggtcctgcgcgacaacatccagggcatcaccaagccggcgatccggaggctggctaggaggggcggcgtcaagcgcatctccgggctcatctacgaggagacccgcggtgtgctcaagatctttctggagaacgtcatccgtgacgccgtcacctacaccgagcacgcccgccgcaagaccgtcaccgccatggatgtcgtcta

SEQ ID NO: 45515 - DNA, 307 bp, Zea mays
gctcggcgagatcgtcacaaccatccccaccatcggtttcaatgttgaaactgttgagtacaagaacattagcttcacggtctgggatgtcgggggtcaggacaagatcagacctctctggaggcattacttccagaacacacagggtcttatctttgttgtggatagcaatgaccgtgaccgtgttgttgaagccagagatgagctgcacaggatgctgaacgaggatgagctacgtgatgctgtgctgcttgttttcgccaacaagcaagatcttcctaatgccatgaatgctgctgagatcact

SEQ ID NO: 45516 - DNA, 304 bp, Zea mays
atctgaatgcacagctgagcaagcttacacatggagcaagggacaagcagtgtttgcgactgggagtccatttgatcctgtggagtacaatggcaagatacatgttcccggacaggcaaacaatgcctatatcttcccagggtttggcctcggcgtggtgatgtctggagctatccgcgttcatgacgacatgcttctggcagcatcggaggctctggcccagcaggtcacagaagaaaattttgagaaggggctgatttatcctcccttctcaaacatcaggaagatctctgcccacattgca

SEQ ID NO: 45517 - DNA, 297 bp, Zea mays
actatgatcaccaagataggctcactgcacgtgaagctatggcacatccctacttcctccaagtcagagctgtggagaacagtagaacgagaccacaataatcgttgtctacaccctcgaaatgaagttgttgctaatttctggaacatcataggctaaaaccgttcaataagcatctcgctccaggaatctgggccatgactccgtggcagtgaatcagatagtatgggtcgcatcatgtgggcaaccttggcagatgtttttattgttgtctttaatcttgggactactgtagct

SEQ ID NO: 45518 - DNA, 300 bp, Zea mays
gcggcggcatccgcagcctgctgcagcaggccaacaacacccccgaccgccgcaccatctgcggctgcctcaagaaacgtcgccaacggcgccaacgggagcggcacctacatcagccgcgccgccgcgctgcccagcaagtgcggcgtcgccctgccgtacaagatcagcaccaacgttaactgcaacacgattaattaagtgaggcgtcctgtgcgcgtcccgggcgaggaatgcatgcatggcgctggcggagagtaataaaataatgctactggtattttaagctatatcgaggtg

SEQ ID NO: 45519 - DNA, 295 bp, Zea mays
ccactgagcagttctctcttctccctgctcacttacccacactctcacgttcctcagcatggccacctgcacccgtcagttcacctcctccagctccatgaagagctcctgtggcatcggtggtggctctagccgcatgtcctccgtcctggctggaggatcctgccgggctcccagcacttatgggggcatgtcggtcacctcctctcgcttctcctctggggcagcctgtgggattggaggtggctatagtgggggcttcagcagcagcagttttggtggtggatttggtgga

SEQ ID NO: 45520 - DNA, 297 bp, Zea mays
agagtagtggtaggaaaagctcgtcgccgagtcgccgtacgggggctcggctcgggctgagcgatcggcggccggcgggtactgaggcttacgggcgaggcgatgggccgcctccgtgactggcgagccttcctccaccgcgcgcttgtcctctcgtcgctgctccttctcgcctccggcgaaatcttcttcgaggaacggttcgatgatgggtgggatagccgctgggtgaaatctgattgggagaagagccaaggacaagctggaaccttccgatacacagcgggaacctactct

SEQ ID NO: 45521 - DNA, 278 bp, Zea mays
cctactgtcacacacacacacacacacagacaagtggtttccaaagccaagtgtgtgtactagcaaccagcgggctcgggcggcacaggcagccatcatgtcggaggagaagcaccaccacttcttcaaccaccacaagaaggacgaggagcagcccgccggcgagtacgggtactccgagaccgaggtggtcaccgccaccggcgagggcgagtacgagaggtaccagaaggaggagaaggagcaccagcaccagcagcacctcggcgaggccggcg

SEQ ID NO: 45522 - DNA, 290 bp, Zea mays
ctcggactctgttgccattatagcggccaatgctgttcaatcagttccttactttgcttctggcctgaagggagttgccaggagcatgccaacatcagctgcccttgatgttgttgcgaagaatgtgaatctcaagttctttgaggtgcctactgggtggaaattttttgggaatttgatggatgctggaatgtgctcagtctgtggtgaagaaagctttggcactgggtctgaccacattcgtgagagagatggcatctgggctgtgcttgcatggctttctattattg

SEQ ID NO: 45523 - DNA, 285 bp, Zea mays
ggtggaaggattgagaagcgcaaagaggatctcagcagtggcgtccaaatggcgcataaggacaagttagttttcttggagggatgcagttacaactgtgacttggaggacttgctgagagcttctgctgaagttctcggggaagggagctatggaactgcctacaaggctatactcgaggatggctctactgtggtagtcgagaggctaaaggatgtcgtggcatggaagaaagaatttgagcagcagatggagctcgtagggagggtaggtaaacatgcaaac

SEQ ID NO: 45524 - DNA, 289 bp, Zea mays
tagcagaatcatgcaattatccttcccgatgctgatagagatgctacattgaatgcccttattgctgctggatttggtgcagcagggcaaaggtgcatggcattgagcactgctgtttttgttggcggttcagaatcatgggaggatgaattagtcaaacgtgcaagtggccttgttgttagttcaggaatggttaatgatgcagaccttggtccagtgatcagccgacagcaaaggatcgtatctgtaaattagttcaaagtggtgttgacagtggtgctcgtatatt

SEQ ID NO: 45525 - DNA, 289 bp, Zea mays
agcgtcttcaacatataataaaatctgaggggctcagtgtagatgacggtggcttgacagccctagtgcggttaagcaatggtgatatgaggaaggctttgaatatattgcagtcaacgcacatggcatcccaacaaatcacagaagaagctgtctatctttgcacaggaaaccccatgccaaaagatatcgagcagatagctttttggctattaaatgaaccattttcaaccagcttcaaatatatatctgacatgaagatgagaaaagggctggccttggttgatat

SEQ ID NO: 45526 - DNA, 289 bp, Zea mays
aggaaggaatctttgaggtcaaggccacagctggtgacacccatcttggtggtgacgactttgacaacaggatggtcaaccacttcgtccacgagttcaacaggaagaacaagaaggatatcaccggcaaccccagggctctccggatgctgaggaccgcttgtgagagggcgaagaggactctgtcttccactgcccagaccacgattgagattgactcgctgtatgagggcatcgacttctactccaccatcacccgtgccaggtttgaggagctcaacatggacct

SEQ ID NO: 45527 - DNA, 279 bp, Zea mays
tagattggccttcaagtccttgcaaggatcaaaggttatgatgatgcagctcgagctccggagctttttacaaccactccagcacttgcaataccaaaggctatcgcagatgctggattagagtcatcccgtgttgatttctatgagattaatgaagccttttcggctgttgcgcttgcaaatcaaaagcttcttggaattccttcagaaaagattagtgttcatggaggagctgtatctttaggacatcctctcgggtgcagtggtgctcgcattttg

SEQ ID NO: 45528 - DNA, 277 bp, Zea mays
accgagaagagaccaggccgaagagagacaatcctgaaaccaagccatgggtctgcaggaggaatttgaggagcatgctgataaggcaaagaccttgcctgagaacacgagcgatgagaacaagctgatcctatacgggctctacaagcaagccacggttggagatgtgaataccgatcgtccgggcatattctaccaaaaggacaaggccaagtgggatgcctggaagctgttgaaggcaaatcgaaggatgaggcgatgaatgactacatcaccg

SEQ ID NO: 45529 - DNA, 268 bp, Zea mays
ctctccgcctctgctcccacacccgtgcgtgtccgctccctccggtctgcgctcccacagcctcacccctgcgcccccgccgattcgcgtcgacctttgttggaaggaacgatggagcagaccttcatcatgatcaagcccgactgtgtccatcggggcctgatcgggggcatcatcagtcgcttcgagaagaaagggttctacctcaatgggatgaagttcatgaacgtggaggggtccttcgcgcacagcactacgctgacctttc

SEQ ID NO: 45530 - DNA, 290 bp, Zea mays
tacagatatgctggttatgggaaaaggtaaaatcaacagaagacagagattttcaaagattcctggacaacgtgcaatacaaaacaagtgggatattacgttacgagcgtgtctttggtgaaggttttgtgagcactggtggaatcgagacaacaaaggaatttgtgggcatgctcgatcttaaaccgggccagaaagtacttgatgtcggatgtggaattggaggcggcgacttttacatggctgcaaactatgatgtccatgttcttggtattgatctttcggtgaac

SEQ ID NO: 45531 - DNA, 287 bp, Zea mays
ttttcttgggcgttcttcggcttcgttgtcacaaggttcgagttcgtcaccgtctagtacgactgtgcgagggaggaagaggcgaggagaagatgcagatcttcgtgaagaccctgacggggaagaccatcaccctcgaggtggagagcagcgacaccgtcgacaacgtcaaagccaaaatccaggacaaggaagggattcccccagatcaacagcgactgatattcgctggcaagcagctggaggatggacgcacgctggctgactacaacatccaaaaggagtca

SEQ ID NO: 45532 - DNA, 286 bp, Zea mays
gcaagatggcgggtgaaaaggcggagaagcctgataaaaaggagcagaaacctgcagccaagaaggctggcggtgatgctactgccccccgggcccggcccgctggtgcggtcaaaaagagtagttctaaggctaaaaagttgaggaagagtaagccccattgcagccggaaccctgtcctggtgagaggaatcggcaggtattcccgatctgctatgtattccagaaaggccttgtacaaaaggaaatactctgctgccaagacaaaggttgagaagaagaagaa

SEQ ID NO: 45533 - DNA, 285 bp, Zea mays
gcgaggtgctggcggtgctgctggacaggttctttgacatggagtatgctgagtgcgtgaaggcttttgaggcttatgcaagtgctgcaaagcagatcgatgagctctgtgcattctatgcatggtgtaaagataccggagttgcaaggtcatctgagtacccagaggtgcagcgtgtcaccgataagttgctggagacgctggaagaatttatgagggaccgggcaaagaggcccaagagcccatcaccggagcctgaacctgagcctgtcaaggaagaacctg

SEQ ID NO: 45534 - DNA, 283 bp, Zea mays
gggacataaatcctccagcagggattaggcaggctatggagatgcaggctgaggcagaaaggaaaaaacgcgctcaaatccttgagtcagaagggatgaaacaggcccaaatccttgaatcagaagggaaaaagactgcccagatccttgaatctgaaggagctatgttggatctagcaaaccgtgccaagggtgcggctgaagcaattcttgccaagtcagaagctactgctcgtggaatgagattggtttcagatgcgatgacaactgaaggcagtgccaa

SEQ ID NO: 45535 - DNA, 290 bp, Zea mays
ctcgaggccgctccgccacctcgccactcgcctcttctcgctctcgccaccgggccagggaagggaccatccgatcggctccgtcatggctggagctgctgctctcaatgagggtatcctttcttccgtgtccgagaaaaatgttgctgctcacccatggcatgatttggagataggaccagaggctcctgaagtgttcaattgtgtggttgagattcctagaggcagcaaggttaagtatgagttggacaagatatctggtctgatcaaggtggatcgtgtcctttact

SEQ ID NO: 45536 - DNA, 286 bp, Zea mays
gacgagatcgccccctaccaccatggcgggcgccgtgtcggcgctcttcctgctggacattaaggttcgcgtcctcgtctggcgcgactatcgtggtgatgtctccgcgctccaggccgagcgcttcttcaccaagctcctcgacaaggagggcgactcggaagtccactcgcctgtagtctacgacgacgccggcgtcacgtacatgttcatccagcacaacaatgtcttcctcctcaccgctgctcgccagaactgcaacgcggccagcatcctcctcttcctc

SEQ ID NO: 45537 - DNA, 283 bp, Zea mays
gagctgttcagatgactggagttcacattcatcttctgctggcaacccagacataccgtatgtggttgtctccaagtcatcaattgtgactgctgtatgcaaggagattcttggctgctacaggaagttacttggcattcctgatctgttgaatcaaccaaacatgtcaattctgaagcaacttttgcagactttacagccaactgaaaattttgatgatgttctttccgagttccaaccatctcttgctccttgcaatgttgattacctgtattgtggagca

SEQ ID NO: 45538 - DNA, 281 bp, Zea mays
cgaggataagaagtgtaaaggtgaatctagattcccagcgcaggtgaggatctgcattaggaagctgtgcaagccgttggaagaggattccttcaggccagttttgcaccattatgatgggccacactctcgccttgagctctccatcgcggagacattgtcactgctagacctatgcgggaaggaaggcatctgagctgtcgaggaggtggtggtggttgccttgtgagcttctagtaaataccaatcatctttgtatgttttgtggatggtggttggca

SEQ ID NO: 45539 - DNA, 278 bp, Zea mays
ctcatcaagctcatggccgtggagtccctcgtgtttgcccccttctttgccacccagggtggcctgctcttcaagtacctgtaaaagggacaacaccaagcacacagcagaagtatacgatctcccgaccgaccgtggacaatatcgaataactcctgccaaatcgccagttccttttgtgtactgtgcgctaccgccgcctagctgcactgctgtatttttgtttcaggattgctgctgctgttcgcattcaatctttgggcctcccggagccgccg

SEQ ID NO: 45540 - DNA, 280 bp, Zea mays
ttggatatgagcgattcctagggcctgagatcttcttcaacccagagatatataacaacgacttcaccactcctttgcaagttgttattgacaagtgcatccaatcatctccaatcgacacaaggagggctctttataagaatattgtcctgtctggaggctcgactatgttcaaagatttccacaggaggttacagcgggacctaaagaagatagtggatgcacgggtccgtgcatctaatagccggcttattagtggggatgctaaggcccagcctat

SEQ ID NO: 45541 - DNA, 281 bp, Zea mays
cggttcttcacttatgaggaattgtatcagatcacaaattgcttctcatcacagaacctgctaggggaaggtgggttcggatcagtgtataagggttgcttggctgatggaagagaggttgcggttaagaaactgaaagatggcggcgggcagggggaacgtgagttccatgctgaggtggatattatcagtcgtgtgcatcatcgccatctagtttctcttgtggggtattgcatttcagatgaccagagattgcttgtctacgattttgtgcccaacga

SEQ ID NO: 45542 - DNA, 277 bp, Zea mays
agaagacaaagattggcatcaacgggtttgggcggattggcaggttggtcctgcgaattgcaaccagcagagatgatattgaagttgtggctgtgaatgaccctttcattgatgctaagtacatggcctatatgttcaagtatgattccactcatggcccgtttaaaggttctattcgtgtcgtggatgattcaaccctcgagatcaatgggaagaaggtcacaattacaagcaaaagagatcctgcagagattccatggggtaactttggggctga

SEQ ID NO: 45543 - DNA, 278 bp, Zea mays
ggattccagagagcccctctcgggtagggaagggaaggagaggcgaacggaggcgagatgggggcggccgaatccgtgccggagacctccatacacgaattcaccgtcaaggattgcaacggcaaggaagtgagcctggaaacctacaaggggaaggtcctccttgttgttaacgtcgcctccaaatgtgggttcacggagaccaattacacgcagctgacggagctttatcagaagtacagggacaaagacttcgagatattggcattcccttgcaa

SEQ ID NO: 45544 - DNA, 280 bp, Zea mays
gtttagcgtccgactgctcgctccctgcccctccctctacctctctccctagggtttctaccacgcgcccgcttccgactagcagcgctaggtgcgcctaactccgaccgaggggacaacgagggttttgggacggacggagggagatttgaaggaggcagcggagggccggagaccagaccatgaggccggtgttctgcggcaacttcgaccacgacacccgccagtacgacctcgagcgcctcttctccaagtacgggcccatcagccggatcgacat

SEQ ID NO: 45545 - DNA, 279 bp, Zea mays
aaagactggttgtctctagttgcagttcatagtgatgcatggctcctgtctgttgcattctattttggagctcgttttggatttgacaaagatgccaggagaaggctcttcaccatgattaacaacctgcccactgtttatgaagttgtgacgggggttgctaagaagcaatcgaaagcccccaacggcagcagcaaaagcagcaaacctaactctaaaccatcaaaactgaccaattctaacagtaagcccgcgaagcagcccacccaaaagaagagg

SEQ ID NO: 45546 - DNA, 276 bp, Zea mays
cccaccccgaccgacctaccctaatcggcgatggcgacggtggcgatggacatctcgaagcccactccagtggcgtccggcgacgaggccgcggcggcggcaagagggaggagcggcggagggggcgaggggctgcggcagtactacctgcagcacatccacgacctgcagctccagatccggcagaagacccacaacctcaaccgtctcgaggcccagcgcaatgacctcaactcccgagttagaatgctcagggaagagttgcagttgcttcaa

SEQ ID NO: 45547 - DNA, 273 bp, Zea mays
gaacaccaacacaggctcctgttgccacagctgaaacggcacctccaagtgtccaacctcaggctgctccagctgctacggttgctgctactgatgatgctgatgtgtacagtcaggcagcttcaaaccttgtatctggcaacaatctagaacagactatccaacaaattcttgacatgggtggtcgtacatgggaacgtgatactgttgtttgtgctctacgtgctgcatacaataaccccgagagagctatagactacctgtattctggaa

SEQ ID NO: 45548 - DNA, 249 bp, Zea mays
agcctccgctccgcctcagcgcatcgccctccgcctcagcgtaccgcgacctcatcgatcaccttcaactttcgatgcatggcggtcgtcgatgtcgaaccggaggtttccgccggggctcccaagaagatgacgttccgcaagtacagctatcgcggcgtcgacctagatgcgcttctcgacatgtccacggacgacctcgtccagctcttccccgcgcgcgtcaggagaaagttccagaggggtctg

SEQ ID NO: 45549 - DNA, 249 bp, Zea mays
atcagttctgttcctcttgctgtcaatcccatcactcgttgtgtaccggacatatggaagcatatccatgcaccacaacattgctctcatgtttctctctggttactttgtgaatggtccatactctctgatcaccacagctgttgcaactgatcttggcacccaagacgctatcaagggaaattcacgggcgctgtcgacggtttctgcgataattgacggcactggttctgttggtgcagctctggg

SEQ ID NO: 45550 - DNA, 272 bp, Zea mays
cgtcgcttccagccgccgccgcgtccgcctcgccaagcgcacagccgccgcagcacatcgctctcttgatctcagccatggcggaggtggagcagcaacaggacacgccgaagctcttcaaccgctggaccttcgatgatgtccaggtgaacgacatctcgctgaacgactacctcgctgtgaacgcgacgaagcacgcgatgtacctgccgcacaccgcggggcgctactccaagaagcggttccgcaaggcgcagtgcccgatcgttgag

SEQ ID NO: 45551 - DNA, 275 bp, Zea mays
acaccgggtcgaccgcctcaccaccatcgagcccctcttcgacaccaacaagaacgcatgggagttcgccatcaccaggaagttcgccggaggggacgccgtcaagggaacctaccaggcctccaccaagctgctcggcctcgagtggagcagggactctctcgccggcggctccttcaaggttgcgacgacattcgatttgtcggaccaaagcaaagcaccaaagctaatagcagagagcacgtggaactacgaaatatgaaaaatggaagtgt

SEQ ID NO: 45552 - DNA, 268 bp, Zea mays
actcgaccgcgagcttttagctgacattaaaggagaactatctccagttgacgaaactgaagcatcaagtgcagctgcagaatctgaaggagaggatggtgaacatgaatgggaatcattggatacactgaggaagactagacctgataaagagctcaaagaaaagctgagaaagtcaagccagaaagagataactctcaaggatgacattccattgagggatagggctgagctgtatgaaacgtacctgatgttctgcatcactggg

SEQ ID NO: 45553 - DNA, 265 bp, Zea mays
caaagatgcagcagatgcttcctctaagtgtaatctttcctccggcctactcaatttatgccatggttctttggagatgatatatttttaaccgcgaagatccacagctttatcagtctctgtcaaacgcaataagcgatattaccagacatcaaccttttcgagagatttgcttccgcaatacacatcggctgtataatcatctggcttcagatgttggagattcagagtttgcagcaatgcttgaaactcatagtactgacag

SEQ ID NO: 45554 - DNA, 264 bp, Zea mays
gaagaatgctttagaagtattatgactgagccaattcctggtgtttattcgtttgctatgttgcagcctactttctgtgagatgttattggaggaggtagagaactttgaaaaatgggtccatgctatgaaatttaagataatgaggcctaatacaatgaacaagtatggtgctgtccttgatgattttggcctggaagctatgctgaaccagttcatggaacagttcatagctccaatttctaaagttctttatcctgaggtt

SEQ ID NO: 45555 - DNA, 264 bp, Zea mays
ccctagccctcgcgccgccgcctcctccgccacccagcgctcgagctcctcgcgtcctgcgagcgcgctccgcaacgtcaccatgaagttcaacatcgcgaacccttccaccgggtgccaaaagaagctggaaatcgatgacgaccagaagctgcgtgccttttatgaccgaagatatcccaggaggtcagtggtgatgctctgggtgaggagttcaagggttatgtcttcaagatcatgggtggatgtgataagcaaggcttc

SEQ ID NO: 45556 - DNA, 269 bp, Zea mays
gcaggatgatggatcttggggtgtcagccaatctgactcatcggtcagcaaggatgttctcctatccacgttggcatgtgttcttgcgttgaagagatggaatgttggcagagagaacatttggagaggactgcatttcatcgggaggaatttctctgttgctatggaccagcagttcacttctcctataggtttcaacatcacctttcctggtttgcttaacctcggcattgatatggggttagaattacctgtagacaaactgatgt

SEQ ID NO: 45557 - DNA, 263 bp, Zea mays
gttccttttctaaaagaaaaaaatacagtcgcatctcgcctccagcagggtgagttcgcctcggcagggtgtggcataccatggagagctcgtcgccgtcagtgccgttcccgctgctgcaggcgccggtcgagagcacctaccgcgcctgcaccatcccctaccgtttcccctccgacaacccgcgcaaggccacccctgtcgagatccaatggattgacctctttctcaactctgtcccgtccttcaaacagcgggcggag

SEQ ID NO: 45558 - DNA, 260 bp, Zea mays
agcgcacgtcagatcaggtgcgccgcgcccccctcgcctaagctgcgacgaccatccatcgaacaggaaggatgacgggctccatggatctcccggccaagggcgggttcagcttcgacctgtgccgccggaacaacatgctggagaagaacgggctcaaggtcccgggattcaggaagaccgggacaaccatcgtcggcctcgtctttcaggatggggttgttcttggggcagacacaagggcaactgagggccccata

SEQ ID NO: 45559 - DNA, 233 bp, Zea mays
agacttcaacacgctcgaacgccacccgaagcgtcggcctactggttcagggacatgcttcagaagcattgagatctccagatccgagcctgagcacggaaggtaccattttgttcagcttcgcctagtgtttgggatggcccaatggttcaaatccggctcagtgcctggctaccaaaatgggaacaaaggacagctaccccgatcaattgtgatgttgtgtgtttgtgggt

SEQ ID NO: 45560 - DNA, 257 bp, Zea mays
actcgagcgaattcggctcgaccttttgctcggaacgcacacaccgcccgtcaccgatctccgatcccctcgtcgatccaaagatgcagatcttcgtcaagaccctcactggaaagactatcaccctcgaggtggagtcttctgacaccattgacaacgtcaaggccaagatccaggacaaggagggcatccccccggaccagcagcggctcatctttgctggcaagcagctcgaggacgggcgcacacttgccgac

SEQ ID NO: 45561 - DNA, 258 bp, Zea mays
ggagtcggagggaaccgaaaactcagggtctcgaatttcctaggagcggaggcgatggctgggaagggaggaaaaggattgctcgccgcgaagacgacggcggccaagtcggcggagaaggacaaggggaagaaggcccccatctcacggtcctcccgcgcgggcctccagtttcctgttggacgaatccaccgtcagctgaagcaaaggactcaggcaaatggccgcgttggtgccactgcagccgtctactctgcc

SEQ ID NO: 45562 - DNA, 255 bp, Zea mays
atgaaaggggagagagagagagagaagagagagagaagagagagagagagagaggagtgggagacccgcgagaggctgccgtgtagggaccgtagactcagcgactgcgaaggagggataaggggatggccgggatcggaccgatcaggcaggactgggagccggtcgttgtgcggaagaaggcacccaccgccgccgccaagaaggatgagaaggccgtcaacgccgagcgccgcccgggtgcggagatcgata

SEQ ID NO: 45563 - DNA, 235 bp, Zea mays
gcaggatttgcctcagtagcccagggtatggaaggctgcgttcctagcaacaaagagacaggggcgtatggcatgccatcagccaccaacaatccagatgcctctggtcagtccttcagcgaacggtgaagagctcgaggaagcctccgttgcagtacgatgcctccgaatctgcagactgtggcccaggtggtaagggcgcgaagaagaaaacgaagaaaggaaagcagattga

SEQ ID NO: 45564 - DNA, 242 bp, Zea mays
caatttagaagcgcccctcctcctctcccccatccgtacccaatctaatcgacacccggccgagatgggccgcaagttcttcgttggtggcaactggaaatgcaatggaaccgcagatcaggttgagaagattgtcaaaaccctgaatgacggaaatgttccctcttcagatgttgttgaggtcgttgtcagtcctccttatgtgttcctcccggtgggcaagagccagtgcgccaagagtt

SEQ ID NO: 45565 - DNA, 292 bp, Zea mays
gtcaacctgatcccgttcccgcgcctgcacttcttcatggtggggttcgcgccgctcacctccaggggctcccagcagtaccgcgccctgacggtgccggagcttacccagcagatgtgggacgccaagaacatgatgtgcgccgcggacccgcgccacggccggtacctgacggcgtccgccatgttccgcggcaagatgagcaccaaggaggtggacgagcagatgctgaacgtgcagaacaagaactcctcctacttcgtggagtggatccccaacaacgtcaagtcga

SEQ ID NO: 45566 - DNA, 287 bp, Zea mays
tccagtgtccgccgtcgtgcgctcgctacccctctccctcgaggcctttgccggcgaagagcgcccagtcgcccaccaggatgaagtttgttgctgcctacctgcttgctgtcctcgctgggaactccagcccctctgccgaggacttgacagccattctggagtcagttggctgtgaagttgacaatgaaaagatggaactccttctgtcccaactgagcggtaaggacattaccgagctcattgctgctggcagggagaagtttgcttcagtcccatgtggcggt

SEQ ID NO: 45567 - DNA, 285 bp, Zea mays
gatcaccttcagctttcaatcatggccgacgtcgatgtcgaaccggaggttgccgccggcgctcccaagaagaggacgttccgcaagtacagctaccgcggcgtcgacctagatgcgcttctcgacatgtccacggacgacctcgtccagctcttccccgcgcgcgccaggagaaggttccagaggggtctgaagaggaagcccatggcgctcatcaagaaactgcgcaaggcgaaaaaggatgctcctgctggtgagaagcccgagccagtcaagacacatctc

SEQ ID NO: 45568 - DNA, 281 bp, Zea mays
acgcgaccagtgaggtgcggttggccagccagcggcgaggcaaaccgagcgtacgccatggatcgcgagtcgggctccaagcccggcagcggcggtgccgctccgcccagaatgaggctattgaccggcgggaccgtctccgccgcctggccctcgagaccatcgacctcgccaaggatccctatttcatgcgcaaccacctcggcagctatgagtgcaagctgtgcctgacgctgcacaacaacgaggggaactacctagcccacacgcaagggaagagg

SEQ ID NO: 45569 - DNA, 287 bp, Zea mays
gaagccctcagtcctccctcacacaccgaaccgagcgcaccatgtcgtcggcggctggaggagtgcaggagacggtgcgggcgtcgcacatcctcatcaagcacgagggttcccgccgcaaggcctcctggaaggaccctgacggccgcatcatctccgccaccacgcgcggcgacgccgagcgcgcctcctggacctccgcaaccagattctctccggccaggccaacttcgccgacctcgccgctcggcactccgactgctcgtccgcgcgacgcggtggggact

SEQ ID NO: 45570 - DNA, 295 bp, Zea mays
atgagattaagaacagcagttgatcttttccaactgtgattcaatgtccttcgtggcttttaaaagttcaactgctgttcttaatctcatttggtcagaatatgaactttccaaagccacgaaggacattgaatcacagttggaaaagatctcctctccattgctgattcttcacggagccgcagacatggtaaccgatcctcaggtcagcaaattcctttatgagaaagccagcacccaggacaagaccctcaagctctatgaaggcagctaccattcaatcttagagggagaa

SEQ ID NO: 45571 - DNA, 285 bp, Zea mays
tcgaatatgcctatagcatcagacataattatggaaaagaaggaaaacggacagattacactccatattcatgccaaaatatcatatctgcaacacctggtgttggagatcaccatggatgcccgtttcgacattttgggtacaatttcacccttagttttctatagatgggtactatgcgcttattatttagataggtgctctgaactttctgttagcaatatcagtttgcatttctgatccttacttcactagattactcctgaactttgagggggaagtaag

SEQ ID NO: 45572 - DNA, 273 bp, Zea mays
tcaagaactacgatgaagcaggcaatccacgcagaatccaatgcctaaaatatcttgtccttgccaatatgttgatggaatctgaagtgaatccttttgatggacaagaggccaagccgtacaagaatgatcctgaaatccttgcaatgacaaacctgattgcagcgtaccagaagaatgacatcatggaatttgaaaagatcctgaagagtaatagaagaacaataatggacgatccttttatccgtaactatattgaggacttattgaaga

SEQ ID NO: 45573 - DNA, 278 bp, Zea mays
gtccaaggaggatgcgctctgcaccaagaacatggtcccgggagagtccgtgtacggagagaagcgtgtctccgttcagaatgaggatggaacaaaagtcgaatacagggtgtggaaccccttccgttccaagctggctgctgctgtgcttggtggtgttgacaacatctggattgctcctggtacccgtgtgctgtatcttggtgctgcttctggcacaactgtatctcatgtgtctgatattgtagggccggatggtctggtctacgctgttgagt

SEQ ID NO: 45574 - DNA, 278 bp, Zea mays
agcaccttcccaaaaaaatcccccattttcttcgaggcgaggagagcgtgaaagacagggcaccggcagcgacgatgtcggggcgcggcaagggcggcaaaggtctgggcaagggcggacaaagcgccaccgtaaggtgctccgtgacaacatccagggcatcaccaagcccgcgatccgtaggctggctcggaggggcggcgtgaagcgcatttcggggcttatctacgaggagacccgcggcgtcctcaagatcttcctcgagaacgtcatccgcg

SEQ ID NO: 45575 - DNA, 274 bp, Zea mays
cacctccatcttatccccaactgaagatcccaggtctaaatgccccaatcccccctggtgccagttttggttatagaccaggggagtggggaaagccaccagttgatgagcatggacgtccactctatggagacgtttttggtgttctgcagcaggacgaacctaactacgatgatgaacctgttgatcgcagcaaacactggggagatttggaggaagaggaggaggaagaagaggaagaggaggaagaggaagaaccaatggaagacgagga

SEQ ID NO: 45576 - DNA, 276 bp, Zea mays
ccgtccttttcctttcataaaccccaagccgcgccgcaatagctcgccccctcgttcgccgcctctcctgctcctaccgcagctctccctcaggtttagtgttcgcaatggcggccttcaacaagcttggtggccttctaaggcacagtgctctggtgagcggtatcactggtggctcttctcctgcagtgttcaatgctgcacggctcatgtctaccaagctatttattggtggtcttgactggggtgttgatgacgtgaaactaagagaagcat

SEQ ID NO: 45577 - DNA, 277 bp, Zea mays
ctctcactcctctcggacccccggtggccggtgcagagctgcgcgaccgagaaccgaatctgtgagccatgtcgaccaacaagggcagcgcggccaagggcggcggagggaagaagaaggaggtgaagaaggagacgaagctcgggatggcctataagaaggacgacaacttcggggagtggtactccgaggttgttgttaacagtgaaatgattgagtactatgacatttctggttgttatatattgaggccatgggcgatggaaatctgggagct

SEQ ID NO: 45578 - DNA, 283 bp, Zea mays
agctcctcctcgcgattccaatccacgcacgcctcctccgcttccgcctcgctcaggcttatagtcagtgatggaacacaaggaggcgggctgccagcagccggagggcccaatcctatgcatcaataactgcggcttcttcggcagtgctgcgacgatgaacatgtgctccaagtgccacaaggagatgataacgaagcaggagcaggcccagctggctgcctcctccatcgatagcattgtcaatggcggtgacggcgggaaaggacctgtaattgctgca

SEQ ID NO: 45579 - DNA, 284 bp, Zea mays
atgcagaagagctactgggaggagcactccaagtgcctcactgtcgagtccatgatgctcgactcccgtgccgccgacctcgacaaggaagagcgacccgagatcacgtctttgcttccctcttacaaagggaaatcagttctagaacttggtgctggaacaggacgctttactggagatctggcaaaagaagctgggcacgttctggctctagacttcattgaaagtgtgattaagaagaaccaaagcataaatgggcatcacaagaacataaccttcaggtg

SEQ ID NO: 45580 - DNA, 278 bp, Zea mays
ccacccaccagttcgaagcggaggcgaccggcaacctgcggcggagatgtcaggcaggggcaagggcggcaaggggctcgggaagggcggcgcgaagctcaccggaaggtgctgcgcgacaacatccaggggatcacgaagccggcgatccggaggctggcgaggaggggtggcgtgaagcgcatctccgggctgatctacgaggagacccgcggcgtgctcaagatctttctcgagaatgtcatccgcgacgctgtgacctacacggagcacgcccg

SEQ ID NO: 45581 - DNA, 268 bp, Zea mays
ctacatcatctctggccctgtggtggctaccgtctgggagggcaagagcgtcgtcacaactggccgcaagatcattgcgcgccaccaaccccctggcttctgagcccggcaccatccgtggcgactttgctgtcgtcattggcaggaatgtcattcatggaagtgacagcattgagagtgctaataaggagattgccctgtggtttcccgagggccttgctgattggcagagcagccagcacccctggatctacgggaagtaaacagt

SEQ ID NO: 45582 - DNA, 270 bp, Zea mays
aacgtgggcagtgccaagatacaacttccagtacggcctgagctgggagagagaatcgatcaacggcctaatcgaaagggcgatactagatgctgatgcgagaggtgtcaaggtgctgagcctaggactgctaaaccaggcgaaacagctgaacggcggcggcgagctgttcaggcacaggtatcccaagctcagagttcgcctcgtcgacggaagtggcctagcgactgctgtggtgctcaggagcatccctcgtgacgcgaacaggtt

SEQ ID NO: 45583 - DNA, 281 bp, Zea mays
ttgttctgaatggtcttgataacttggatgctagacgccatgttaatcgcctttgccttgctgctgatgttcctttggttgaaagtggtactactggttttttgggacaggttactgttcatgtcaagggtaaaacagagtgctatgagtgtcaaccaaagcctgtccctaaatcatatcctgtctgcacaattacaagcacaccatcaaagtttgttcattgcattgtttgggcgaaagatctgctttttgcaaaattatttggtgataaaaaacaggat

SEQ ID NO: 45584 - DNA, 277 bp, Zea mays
accagaaggagctctttgtcgcagccgagggcatgtacacgggccagttcgtctactgcggtcgccgcgccaccctctccatcggcaacgtgctgcccctccgcgggatccctgagggtgccgtcgtctgcaacgtcgagcaccacgtcggtgaccgcggtgtcttcgccagggcctctggggactacgccattgtgatcagccacaaccctgacaacggcacatcgaggattaagctgccctctggcgccaagaagattgtccccagcagctgccg

SEQ ID NO: 45585 - DNA, 195 bp, Zea mays
attcggctcgaggctccttggacaggctgtggcagaagaagaaggctgatatcaagcagtagatttgacatctagtttaccaagaattggacactgccttagctatgttttgaattcatgtcactatatgcaatgttgtgatttcagctggtaccttaaatctgaagatttagtatctttgttgggttccttctg

SEQ ID NO: 45586 - DNA, 305 bp, Zea mays
gctctatagaagatatgaaatgtttccactttatcattttccatgcatgcctttatttgatgttctttaggtaaaacctcttatctgggtcgaagcacagattgagaaacattctagaagccgtatagaactcatggtgaaggcaaggagtcagttcaaggaaagaagcacagcaacaaatgttgaaattgaagtgcctgttccttcagatgccacaaacccaaatataagaacttcaatgggttctgctgcatatgctcctgagagagatgcaatggtctggaaagtaaaatcattccctggtg

SEQ ID NO: 45587 - DNA, 296 bp, Zea mays
  unsure (1)..(296): unsure at all n locations
aggcatggccaagtccattcaccatgctcgtgtcttgatcaagcagcgtcacatcagggttggcaggcaaattgtcaacgtcccatcattcatggtgagggtggagtctgagaagcacattgacttttcactgtcaagcccattcggtggaggcccccgcagaanggtgaaaagaaagaatcagaagaaggcaagcggtggcgnggatgctggtgattgagatgaggagtgaggatggacaataatgttacaccagtatagtaatattatctagttttcttgaacttgttcgaatg

SEQ ID NO: 45588 - DNA, 297 bp, Zea mays
gtcctagcgccgccgccgccccaactcgccttgcgtgactgaaagctcgtcggcttccgtccacgcgagaagcgagagcatggacacccaggtgaagcttgctgttgtggtgaaggtgatgggcaggaccggctccaggggtcaggtgacccaggtcagagttaagttcttggatgaccagaaccggctcatcatgaggaatgtcaaggggcccgtccgcgagggtgacatcctcaccctgctcgagtccgagagggaggccaggaggctgcgctgaagccctagcgttcttggtgg

SEQ ID NO: 45589 - DNA, 298 bp, Zea mays
agtgatcatcaccgacatgaactactacccggtgtccaagtaccacttcgacctcagcggcactgcgttcggcaggctggccaagcccggcctcaacgacaagctccgccactccggcatcatcgacatcgagttcaccagggtgccgtgcgagttcccgggcctgaagatcgggttccacgtggaggagtactcgaaccccgtctacttcgcggtgctggtggagtacgaggacggcgacggcgacgtggtgcaggtggacctgatggagtccaagacggcgcgcggcccgccgacg

SEQ ID NO: 45590 - DNA, 299 bp, Zea mays
tgaagtacttgaacaagcagagaagttggactgtaagagatacttgaccccaaaggatatcactgagggatctgccaatctaaatcttgcatttgttgcacaaatattccagcacaggaatggtctgaccagtgacaccaaacaagttaccctcacacagacagcaacacatgatgatgttctattatctagagaagaaagagcctttcgaatgtggatcaacagccttggggttgaatcatatgtgaacaatgtcttcgaagatgttcgcaacggatgggtacttcttgaagtgcttg

SEQ ID NO: 45591 - DNA, 294 bp, Zea mays
agaacttggaagatttgtgatgcttgctaatgagtcagctgaagagatgtatacaagattgaaaaaaatcatcaagaaaattagaagctatggaagtaagagatggacagatcatgaagtggtgaaaataatgctaagggcttattttctaagaaactcggtattatgttttatgataagagatagtcctaattatgagaagatgacgccagaagtagtacttggtagatttatccgtcatgaaatgatggaaaatgaagggcttcttgaagctgaacttggaagatttgtgat

SEQ ID NO: 45592 - DNA, 289 bp, Zea mays
acagaccatcccgttcaagagcaggtcttaagctgccgtggccgtgccgagacatgccagtccgaagaacgggcgtcttcctgtgatgtcttcttgtctgcccacgcctagtttctctgtcgattcctattcgtcgtctcttcagggctggtgctcactgctgcgccgttctgttaaccgaaacaagaactctgtgtattcctgtaccgagctgtgcatgttttttttttctttccatcgtggagaatttaagttattatccgtttgctgcaaggtttgccgtctcatt

SEQ ID NO: 45593 - DNA, 284 bp, Zea mays
cagaagatgaagtgtatagagagatgtcagccgactattgtgacatacaacattctgctaagggcttttgcacaggctggtgacacaaagcaggtagacatgttgttcaaggatctggatgaaagtgtagtatcgcctgacgtatatacttacaatggggtgcttgacgcatacgggaagaatggcatgatcaaagagatggaatctgtgttggtgcggatgaaaagcacgcaatgccgtccagatgtgatcacattcaacatactcatagattcatacgggag

SEQ ID NO: 45594 - DNA, 296 bp, Zea mays
actgacaaatttgcaagcacattcagcgcagacaggactcgcaacttgattgtgaggctgcgccacaatgtcattcgaactggactgcgcaacatcagcatttcttactcaaggatctcccttgctgacattgctaagaagctaagactggactctgagaaccctgttgctgatgcagagagcattgtagccaaggccataagagatggcgcaattgacgccaccatagatcatgcaaatggctggatggtatcgaaggaaaccggtgatgtctactctacaaatgagccacaaat

SEQ ID NO: 45595 - DNA, 295 bp, Zea mays
caccagctctccggctgcctcccccacgagctcggcatgctcaccaaggcggccgtgattgacgccggcatgaaccagctcaccggcccaatcccgtcatctttctcgtgcctaatcagcgtcgagcagctcaacctggccggaaaccgcctctacggtcaggtacccgacgcgctctgcaagcttgctgggcccgctggccgcctcgccaacctcacgctgtccggcaactacttcacatccgccgggccggcatgcgcggcgctgatcaaagacggagtgctggacgtgaaga

SEQ ID NO: 45596 - DNA, 287 bp, Zea mays
tagacggcgattcaggggttcactgagaagattgtgggaatgatgaagatcgaaaacctctttgcatcccaaggtggcccaattatcctcgctcagattgaggatgagtatgggccaggaggcagggagtgtggtgccgcagtgcaggcatatatcaactgggcagcaaagatggcagtcggatttggtactagtgtgccgtgtgtgatgtgcaaggaggatgatgcacctgatccagtgatcaatgcatgcagtggtttctactgtgatgcattttctcctaacaa

SEQ ID NO: 45597 - DNA, 291 bp, Zea mays
cgcggattcctcctccctcgaccgtccccgtccccgtccccttccggcgcgcgagctcgcccgagatggcaaacgcgagatcgggtgtcgctgtgaatgacgagtgcatgctcaagttcggcgagctgcagtcgaagaggctgcaccgcttcctaactttcaagatggacgacaagttcaaggagatcgttgtggaccaggtcggggatcgcgctaccagctacgaggacttcacaaacagcctccccgagaatgactgccgatacgcgatctatgatttcgactttgtca

SEQ ID NO: 45598 - DNA, 286 bp, Zea mays
ctttcttgatggccttcctccctcatgggatgaagaccgtgttaagaaatatctcaaaaagtatggagctattgagaaagtcgaacttgcacgaaacatgccagctgccaagagaaaggattttgggtttgttacatttgatacacatgataatgctgttgcatgtactgaagggatgagtaactctgagatcggtgaaggtgaacacaaggcaaaagtaagggctagactgtcgagaccattgcagagaccacctagaatgaaacatggattgagaggaaatttt

SEQ ID NO: 45599 - DNA, 283 bp, Zea mays
cgcagcactactgctgggaatgcaagccaagtgagcgatggcgctggggccgtcttgctaatgagacgggatgttgctatgaaaaagggtcttccagttcttggtgtctttaggacctttgccgctgttggagttgatccagctgtaatgggtattggtcctgccgttgcaatccctgcagcagtgaaagctgctggccttcagatggatgatattgatcttttcgaaatcaacgaggcttttgcatctcagtatgtctactgctgcaagaagttggaacttg

SEQ ID NO: 45600 - DNA, 286 bp, Zea mays
acgaaaccctagccgccatatctcacgatccactcgagcaccaagccgagggaaggtgaggagcgatggcgcgcggcgtggtgtcggcgaagggcggcgcggtcgcgggcaagaagaaggggtcggtttccttcacgatcgactgcaccaagccagtggaggacaagatcatggaggtcgcctcgctcgagaagttcctgcaggagcgcatcaaggtcgccggcggcaaggctggcaacctcggcgactccgtcaccatctctcgcgagaagaccaaggtcaccgt

SEQ ID NO: 45601 - DNA, 294 bp, Zea mays
tatccgcagtgtccagatggagggtctgacttggggagcatcaaagcttgtgcctgttggatacggcatcaagaagatgactatcatgttgacaattgtcgacgatcttgtgtccatcgacactctaattgaggaccaccttacgcaagagcccatcaatgagtacgtccagagttgcgacattgtggctttcaacaagatctagagttcagtttctgagattgggcaacggcagcggctcagctcgtcaagtttgtgctgggatgccagtttatcccttctagtctattacag

SEQ ID NO: 45602 - DNA, 290 bp, Zea mays
acaccaaccaacaagcaaaaattccccaatcctctcgtctccgcggcgaagatgtcggggcgcggcaagggcggcaagggcctgggcaagggcggcgcgaagctgcaccggaaggtgctgcgcgacaacatccaggggatcacgaagccggcgatccggaggctggcgcggcggggcggcgtgaagcgcatctcggggctcatctacgaggagacccgcggcgtgctcaagatcttcctggagaacgtcatccgcgacgccgtcacctacaccgagcacgcgcgccgtaa

SEQ ID NO: 45603 - DNA, 284 bp, Zea mays
gcattgcaggatggtagtgtttcgatcctcaagtttgaccctcacaaagagaagccagcatctgtgcaacgagcattgtctgttcttgagatggaagttgagcaaataaagaaaggaagttatgatcacttcatgcaaaaagaaatccatgaacagccacattcgttgaaaacaacaatgaggggtagattgaaggatggtggggttgttctaggtggactgaaggaatatctcaagacaattaggcgctgtagaagggtggtatttattggttgtggaacaag

SEQ ID NO: 45604 - DNA, 278 bp, Zea mays
ccacgcagctgaggagctgatcctcaccggcgtcgccatcgtaatcgccttggacagcggcaccagaacctctgcctccgcaggtgcttgctggtatcattacaatctggtagttttagtggttgggcttgacttcctactattcagaaacacagtaccgagaagtctttaggtggggtcaaagatggtgtcgctgaagttgcaaaagcgccttgccgcgagctacctcaagtgtgggaaaggcaaggtgtggcttgacccaaatgaagttagtgaga

SEQ ID NO: 45605 - DNA, 280 bp, Zea mays
tcctgaaggtctccccaagaccacctggttatgcttttgttgagtttgaagatcctcgtgatgctgaggaggcaattgctggacgggatggatacaactttgatggacaccgtctaagagtggaggctgctcatggtggtagaggtaatgcttcctcgcatgatcgttcaagtggctttggtggcggtggtggagcacgtcgtggtgtgtcgagacactcagagtatcgtgttcttgtcactggactgccttcttctgcatcatggcaggatttaaagga

SEQ ID NO: 45606 - DNA, 280 bp, Zea mays
atcaaatcgaagattggattttggaagaagttcaacctcatattccttttctttctccttcgcaagcttattttgcccttctattccttcacccttttctgtatcattcttcccatgacaatgttcattcctgaagccgagctccctgcatgggtcgtgtgctacattccggcaaccatgtccttgctgaacatcctcccagcccccaaatcgttcccgttcattgtcccctatctcctgtttgagaataccatgtcagtaaccaaattcaacgccatgg

SEQ ID NO: 45607 - DNA, 279 bp, Zea mays
caagcggcacacgctcgagactgtgccgtgggagtgggagggtcctcaggtgctgagcagtcgccggcgggaccgcacggtgtcggagatgaaggagagaagcggctccaggacggcggtggacgagcgctacgcgcagtggaagtcgctcatccccgtcctctacgactgggctgccaaccacaacctcgtctggccatccctctcctgccggtgggggccacagtttgagaaagctagctacaagaatcgtcagcggctgtacctatctgaacagac

SEQ ID NO: 45608 - DNA, 218 bp, Zea mays
ctatgtgcgacgtgtcttcatcatggacaactgtgaggagctgatcccagagtggctgagctttgtcaagggtattgttgactctgaggatcttcccctcaacatctctcgtgagactctccagcagaacaagatcctcaaggtcatccgcaagaatcttgtcaagaagtgcgttgagctgttttttgagattgcggagaacaaggaggactacaaca

SEQ ID NO: 45609 - DNA, 290 bp, Zea mays
aagcagctattgtggtcgtccctcagccgcgtcgcaccgcatcgcattctacgattcgaagctctctctgctcgcagccatggcgaagaattacccaaccgtgagcgccgagtacagcgaggccgtcgagaaggccaggcgcaagctccgcgccctcatcgccgagaagagctgcgcgcccctcatgctccgcctcgcgtggcactccgcggggacgttcgacgtgtcgtcgaggaccggcggtcccatcggtactatgaagtgcccggcggacatggctcacggagcca

SEQ ID NO: 45610 - DNA, 220 bp, Zea mays
cgttcaagaaaccaaggcgtccttatgagaaggagcgtcttgatgctgaactgaagctggtcggtgagtatgggctgaggtgcaagcgtgagctttggagggtccagtatgcactgagcaggatccgtaatgctgcaaggcacttgctcacccttgacgagaagaacccccgtcgtatctttgagggtgaggcgcttcttcgccgcatgaaccgctatgg

SEQ ID NO: 45611 - DNA, 271 bp, Zea mays
cttttacagagaaatgtgatatattcagccttggtgttatcatgtgggagctgtgcacattgagtcgcccatgggaaggcatctccccagttcaagtggtgtacgcagttgctaatgaaggttcacggcttgagattcctgaaggacctctcggcaggttaattgcagattgctgggcagagcctgagaatcggccgagctgccaggagatcctaacccgtttgctggactgcgaatacactgtcagctgaaatggaagctgctcgctcgt

SEQ ID NO: 45612 - DNA, 206 bp, Zea mays
gagacggggattccagagagccccgttcgggtagggaagggaaggagaggcgaacggaggcgagatgggggcggccgaatccgtgaccggagacctccatacacgaattcaccgtcaaggattgcaacggcaaggaagtgagcctggaaacctacaaggggaaggtcctccttgttgttaacgtcgcctccaaatgtgggttcacg

SEQ ID NO: 45613 - DNA, 172 bp, Zea mays
ggatggccagacacgtgagcatgctctccttgcgttcacacttggagtgaagcagatgatttgctgctgcaacaagatggatgcaaccactcccaaatactccaaggcacgttatgatgagattgtgaaggaagtctcatcttacctcaagaaagttgggtacaaccctgat

SEQ ID NO: 45614 - DNA, 272 bp, Zea mays
gaaggagtcggagggaaccgaaaactcagggtctcgaatttcctaggagcggaggcgatggctgggaagggaggaaaaggattgctcgccgcgaagacgacggcggccaagtcggcggagaaggacaaggggaagaaggcccccatctcacggtcctcccgcgcgggcctccagtttcctgttggacgaatccaccgtcagctgaagcaaaggactcaggcaaatggccgcgttggtgccactgcagccgtctactctgccgccatcctgga

SEQ ID NO: 45615 - DNA, 217 bp, Zea mays
cgctgctcgaccagtccccgcaccagctcgacaaggcccggcagaaggaggccctcaagggggacaccatcatggagggcgacgccgaggacctcccgttccccaccgactccttcgaccgatacatctccgccggcagcatcgagtactggccagacccacagcgggggatcaaggaagcctacagggtcctgagatttggcgggctagcttgagt

SEQ ID NO: 45616 - DNA, 275 bp, Zea mays
caatcggttcgttcccacaaaccgttgagctcaggagggtccgccgtgagtacaaggcaaaaaagatctctgaggaggaatacgtcactgccatcaaggaggaaatcaacaaggtcgttaagcttcaagaagagcttgacattgatgtgcttgtgcatggcgagcctgagagaaacgatatggttgagtacttcggtgagcagctctccggttttgcgttcactgccaatggctgggtgcagtcttatgggtcgaggtgcaatcaacctccgatc

SEQ ID NO: 45617 - DNA, 194 bp, Zea mays
ctcaagtgccaaggattttattgaagcaataaagaggccagatgctattgctgcgggctatatcggacagtttgtcatcaagcctttgtttggattcctttttggcactcttgcggttgcagttcttaacctcccagctgctctaggcgctggcataatgttggtttcatgcgtgagcggagcacaactttcaa

SEQ ID NO: 45618 - DNA, 272 bp, Zea mays
ccgacattcacgtgcagctgtcgggagcaggcaatggcgccggatctaagcgaactcgccgccgccgctccagcccgtggcgcctacctcgccggcgtcggtgtcgcggtcctcctcgctgcctccttcctcccagtagccgagtcgtcctgcgtgcgagataactcattggtgagagacataagccaaatgccgcaaagggtataggggattgaaggattgtcacatataacagttgctggtgcgctcaatcatgggatgaaggaggtgga

SEQ ID NO: 45619 - DNA, 205 bp, Zea mays
tgtcgaaacggcgcagagcatgacgtctcgcccaatgaaggggatgctgactggcccagtcacaatcctcaactggtccttcgtccggaatgactacctgaggtttgagacttgctaccagatcgctcttgcgatcaagaaggaagtcgaggatctcgaggctggtggtattcaggttatccaaatcgacgaggctgcactgaga

SEQ ID NO: 45620 - DNA, 242 bp, Zea mays
gatccgtgttccgtgtccgcgtccagtgtgtccgctactccgctccccctcagtcctcagttcctcacctagcggtagcgtgcgcgcgggagacgtagatggcggcttcggaggcggcagcggcggcggcaacaccggtgacgccgacagaggggacggtgatcgcgatccacagcctggaggagtggagcatccagatcgaggaggccaacagcgccaagaagctggtggtgattgacttc

SEQ ID NO: 45621 - DNA, 281 bp, Zea mays
gttgttgttgcaggcccagagcgggacgagcaagggaggccaattgacggcaacaagtacaaggggagcatttacatggttttcgagtatatggatcatgacctcactgggcttgctgatagaccaggaatgcggttcactgtgccacagattaagtgttacatgaagcagctgcttacaggcctacactattgtcacgtcaatcaagtcctgcatcgagacatcaaaggatctaacctcttgatagataacgagggtaacttaaagcttgctgattttgg

SEQ ID NO: 45622 - DNA, 276 bp, Zea mays
cggcgggaagctcggccgccggatccggcgtcgtcgttcctcggaacttcaggctcctagaagagcttgaccgtggagagaagggcattggagatgggacagtgagctatggaatggatgacgcagatgacatctacatgcgatcatggactggcactattattggccctcataataccgtccatgagggtcgcatctaccagctgaagttgttctgtgacaaggactaccctgagaagccacatcagttcgatttcattcaagaataaacttaac

SEQ ID NO: 45623 - DNA, 222 bp, Zea mays
ggctcgagatccaaccaagtggataccgatgcttaggaagatctgtatggtacttggtgctagcaccgcatgatcctatgcaatcgagccttctcaatgctacactagaggataaaaacctttcagaaatcccaaatttcaggttattgctgaagcagctggttaccatggaggtccatccagtggacagcaatgtgggaattctctaagcccgattttaaa

SEQ ID NO: 45624 - DNA, 203 bp, Zea mays
ctcgtgtggccgtcgtctcccgttcggaacgccaagccccccctccggcgaaatggcccccaagcgaggtggcagggcgccggtgccggccaagaagaagacggataaagtgacgaaccctctattcgagaagaggccgaagcagttcggcatcggcggcgcgttgccgcccaagaaggacctgcaccggttcgtcaagtggc

SEQ ID NO: 45625 - DNA, 264 bp, Zea mays
actcagtcgcctgcggcgccgcttcgttcgtgtggaggggagaagacaggaaatggcggcgactgagggcgtgctcttggggatgggcaaccccctcctcgacatctccgccgtcgtcgatgacgccttcctgacaaagtatgacatcaagctgaacaatgctattctcgctgaggagaagcacttgcctatgtatgacgagttggctagcaagagcaatgttgaatatattgccggaggagccacccagaactctatcagggt

SEQ ID NO: 45626 - DNA, 163 bp, Zea mays
cccgtcatcgatctcgtttcaaatccatccatcctcgtttcctccgtcccgcagcatctcaaccccatggccaagatcaagatcgggatcaatgggttcggcaggatcggaaagctggtggccagggtggccctgcagagtgacgatgtcgaactcgtcgccg

SEQ ID NO: 45627 - DNA, 299 bp, Zea mays
gtgcaagcattttgagattggtggagacaagaagggcaagggaacatctctcttctaagtttctcatcgcccatctcgatgttggatcgaacctgtgggtctactactgttctaaaaactcgtcaaatttcaatgttactagtagttctgaaagcaggtcatgctgtgtatcaaattccaatgcctgacatttgcgctgagtgtgggttgtcttttggctaaatgaagttttgcaccctgaatcttcattgaatgtgttgtgtgtttgtttgattttgttctgcgattgccttagtcta

SEQ ID NO: 45628 - DNA, 295 bp, Zea mays
ggaaagaatgccattttgaaactaatggatgcagttgatgagtacattcctgatcctgtaaggcagcttgataaggctttcttgatgccgatagaagatgtgttttctatccagggtcgtggaactgttgttactgggcgtgttgagcagggaacaattaatcctggcgaagatgttgagatcttgggtttgacacagagtggtcccttgaagactacagttactggtgttgagatgttcaaaaagatactggaccatggagaggctggtgacaacgttggtcttcttcttcgtg

SEQ ID NO: 45629 - DNA, 298 bp, Zea mays
ggaaggtttgaggtggcccggaaggaaagcaatggcggtaacaagacatttacaagcatggatgaactaatttctgattatgagactggtgctttgcatcctgctgatgtcaaacctgcactggcaaaagcaataaatgaaattttgcagcctgttcgtgatcacttcaacaacaacaacgaagccaaagttctactaaacactgtcaagaagtacagagtaaccagttgaggagcggaaggtgttcatctttagggtgaatgtcgctgattgaaattcttatatgcttattctgtta

SEQ ID NO: 45630 - DNA, 300 bp, Zea mays
catatctcctcgcattttccttgcaaccgattgcctatccccctcccaaccaaagaccgatggcgcccaaggccgagaagaagcccgcggcgaagaagccggcggaggaggagcccgcggccgagaagacgaccgccgggaagaagcccaaggcggagaagcgggtccccgcgggcaagtccgccggcaaggagggcggcgagggcaagcgtggcaagaagaagggcaagaagagcgtggagacgtacaagatctacatcttcaaggtgctgaagcaggtgcacccggacatcggcatct

SEQ ID NO: 45631 - DNA, 299 bp, Zea mays
gagacacccaagaaacacacagaagcgaggagcactacttgttggttggattctcttcagtctagcagctagtccagttaagtttcagacacacatggggagcattggcagaggcacggccaactgcgccaccgtgccgcagccgccgccgtcgacagggaagctcatcacgatcctgagcatcgatggcggcggcatccgcggccttatcccggcgaccatcattgcgtacctcgaggccaagctccaggagctggacggcccggacgctcggatcgccgactacttcgacgtgattg

SEQ ID NO: 45632 - DNA, 282 bp, Zea mays
ggctcgagggatttcattggacatgcactacctcttcatagagatgatcgctatcttgatgaaccggcacttgatacagtgaaaaggatgaaactatattcagagtctcttgcgcgctttcaaggaggctcgccatatatctatccattgtatggtctgggtgagctaccacagggttttgcacgattgagtgctgtttatggtggtacttacatgttaaacaagccagagtgcaaggttgaattcgatatggaggggaaagtgtgtggtgtcacatctgaa

SEQ ID NO: 45633 - DNA, 294 bp, Zea mays
cgtggagtccactggggccttaattgctgtctctaggtatgctagtgctacaccaatcccaccctctgttcttagccgtggtattggctggcagggcatcggtattcttctggatgggctatttgggactggaaatggatcttctgtatcagttgaaaatgctggtttgctagctttgacacgcgttggtagccgaaggtagtgcagatatcagctggtttcatgatattcttttctattctcgggaaattcggagctgtgttcgcctcaattcctgcacccatctttgcagct

SEQ ID NO: 45634 - DNA, 303 bp, Zea mays
aaggaactggtacttccagccggcacggagattcgagcttctgctctatcagcaactccactgggcgctgagggtctgtagcagagcggtgcgatcggggcagaagggagccatgatgagggggcaggcgtggctggcgctgctggtcgtggtagcgctggccttggcggacgcggcggcggggaggttcgtggtggagaagaacagcctcgaggtgacctcccccgacgagctcaagggcaagtacgactgcgccatcggtaacttcggggtgccgcagtacgggggcacctgcacggatgg

SEQ ID NO: 45635 - DNA, 294 bp, Zea mays
gacatccactatgttttcgttgaggctaaacaatggccagcatcccttcagtctatcaaacataggttcagttcacggtgtcaccgagaagcttcagtcaagacatgagaccttgcctgagaaattcgttgagacgctgaagctgatggaacaccgatacggcgcaaaagacttcgagacgagcagcgacacgagtctcctgcagccgggcacattctacctcaccaaggtggactccatgtaccggaggttctattcccagaagccggccgaggaaataggcggcggtaaaac

SEQ ID NO: 45636 - DNA, 293 bp, Zea mays
tcgcgcccgcgcgacaaccgcaaggccggcctcgactccccgcgctgcgaggtcgtctgcggcaacttcctctccatgccgttcccggacgcctccttcgacggcgcctactccatcgaggccacctgccacgcgcccaggctgcaggacgtgtacggcgaggtctaccgcgtgctcaagccggggggactctacgtctcctacgagtgggtcaccaccccgctgtaccgcgccgaggacccggaccacgtcgagtgcatccacggcatcgagcgcggcgaccgctaccgggg

SEQ ID NO: 45637 - DNA, 287 bp, Zea mays
catccatgtccctcatttcagctcaagttccctgttaagccagctgatatcaagaaaagactagatagcttgatcgaccgggagtacctggagcgcgacaggagtaacccccagatctacaactatctggcttgacaacgttttggtggatcgttcccatttcattactatcagaaaaaggcactgtaaattaatttattttccggtttcttgttctttcatgcttttcttctctgggaggaagttgtagttgtagctgctgcaacgtgtttatatagaacaatttt

SEQ ID NO: 45638 - DNA, 293 bp, Zea mays
aacagcttgatagtgggaaaggaactcttcttcacttatgcgatgacgtgatacagcaagaagttaaagaggtcataatttgttactacattttaatggagcagggaaaagccactatacaagatcttgatttacggtgtgaagagctaatcaaagaagagtttggcgcagattgcaattttgatgttcatgatgctataaagaagttagagaagcttagcattgttcatcgggattcgattggaaggatcttatgcgttccgttgaagcgtgcgaatgagatcattggtacg

SEQ ID NO: 45639 - DNA, 141 bp, Zea mays
gttgttggacagagtttcatgctccatcagatccggaagatgattggtcttgctgtagctgtgatgaggaactgtgcacctgaatcaatttatgatgtcgcctttacgcaaggatgtcaatcttaatgtgcctactgcacc

SEQ ID NO: 45640 - DNA, 237 bp, Zea mays
cctctctccatctccctgctcctccgcctccttcttgatccagccaagccagggatcgccatgtcggactcggaggagcaccacttcgaatcgaaggccgacgccggagcgtccaagacctacccgcagcaggctggcaccgtccgtaagaacggcttcatagtcatcaagaaccgcccctgcaaggttgtggaggtttctacctcaaagactggtaagcatggccatgccaaatgc

SEQ ID NO: 45641 - DNA, 299 bp, Zea mays
cctaccagtcgatacatgacttctcaaagcctttgatcaacatgatgaaggctgcaggttgggatcttgatggggctgctagtgcgatcgagcctggtgtggtttacacaagaagggctcacaagaagtttgcttttgaatcctatatttgccaaagaatgttcagtgggttccaagaagagagcttttctatcaaggattctaacatcagtgtttccaatgaggctttcttccaccaattcctcgcggtgcgagccatggatcctctggatgtcctgagccagaaccccgattcagta

SEQ ID NO: 45642 - DNA, 185 bp, Zea mays
gcgtgccgtgggagtgggaggttgcctcaggtgcggacacgtcgccggcgggaccatcggtgtctgagatgaaggagagaggcggctctagggcggcagtggacgagcgctacgcgagtggaagtcgctcatccccgttctctacgactggtttgccaaccacaacctcgtttggccatccctct

SEQ ID NO: 45643 - DNA, 291 bp, Zea mays
  unsure (1)..(291): unsure at all n locations
ccccactccctctcgtcgccgtcctctcccgttcgcaacgccacgctccccaccgccgaaatggccccgaagcgaggtggcagggcaccggtgccggccaagaagaagacggataaagtgacgaaccctctgttcgagaaaaggccgaagcagttcggcatcggcggcgcgttgcctcccaagaaggacctgcaccgattcgtcaagtggcccaaggtcgtgcgcatccagcgccacgtncgcatcctcaagcagcgcctcaaggtgcctccggcgctcaaccagttcacc

SEQ ID NO: 45644 - DNA, 286 bp, Zea mays
ctcgagccggtctccagccaaccgcatccagtccacccccatccccctcgaccccgacaaacccgacccgatggcgcccaaggccgagaagaagccagcggagaagaagccggcggccgaggagaaggcggagaagacgaccgcaggtaagaagcccaagtccgagaagcgcctgccggcctcgaagtcctccggcaaggagggcggcgagaagaaggggaagaagaaggccaagaagagcgtggagacctacaaaatctacatcttcaaggtcctgaagcaggtg

SEQ ID NO: 45645 - DNA, 281 bp, Zea mays
ggtatggcatgtttggtcggtgttgacttcagtgccaagatccttgcatctattgctaagtcatttgaggatgagtattcaaaagaagatggtctatctttgagaaaccttaccttactcttctgctatttgtgcatatttggtgttacctcaagcgatcttgtgtatgatcttctgtcgattctgagcaagcgcttgacagagctagatgtctctacagtgttgaccatcctacagtgctgtggaatgaagctgcggggagatgatccatgtgctatgaa

SEQ ID NO: 45646 - DNA, 283 bp, Zea mays
ggcgggggcggcctggcggccctgagggcggcgcgcgccgtgaaggagacgacggggatcgtgggccttgaggtggtgcctaacgcgcgagaggttctggtagggctctacgagcgcacgctcaaagagatcaaggccgtccccgaagacgagggttaccgcaaggccgttgaatccttcaccggtcaccgcctccagatctgccaggaggaggaggactggaagcgcatcgaggaccgaatcggatgcgggcaggtcgaggagctcatcgaggaggccgagg

SEQ ID NO: 45647 - DNA, 289 bp, Zea mays
ggaagggaggaggtgagccaccggaagcggagacgtgagcactcgaccaaccccgtcgatccggctgcggcgcggcgtgctagatcgctaccgaccatggtggtggaggagatcgccgagggggtgaagaacctaaccgtcaccggagatgcggcggcttcaggcggagaggggcagaggaggggcggcggcggcagcagcaaccgcatccaggtgtccaacaccaaaaaacccctcttcttctacgtcaacctcgccaagaggtatatgcaacagcacggcgatgtag

SEQ ID NO: 45648 - DNA, 291 bp, Zea mays
catatgcaaagcttgtggttatggttctcaagtactcagtggagataacaccaaataaagccagtatactttccaagatcctatctgttacagtgaggtccattcagaaagatgctgaggaaaagaaagcttcatttaatcctcgaccatacttccgattgtttataaattggctctatgatcttactactaccgatggtcaccatgatagttctaattttcaggttttgactgcatttgcaaatgcattccacatgctacaacccttgagagttcctgcctggagctttg

SEQ ID NO: 45649 - DNA, 301 bp, Zea mays
gcggcggcgcggacggacaaggagcaggcggaagaggagttgtgccaaggcacaatgggtatctcgcgtgactcgatgcacaagcgccgagccaccggtggaaagcagaaggcctggaggaagaagcgaaagtatgagcttggtcgccagccagccaacaccaagttgtcaagcaataagacagttaggagggtccgtgttcgtggaggtaatgtgaaatggagggctcttcgccttgatactggtaactactcatggggaagtgaagctgttacccgcaagacgcgtatcctcgacgtgg

SEQ ID NO: 45650 - DNA, 297 bp, Zea mays
ggacatcaggccccagaaaaaagtccgaacgcatctcttctttctactttcttgtaacccaagacgaactcggtgaactctttctcctcgcgcagaccggagcacaatcaaggattccagtccagtcctgccaatggagtgcgttttgggcttggttggccgcgacttcgcggtggtggcggccgacacctccgccgtgcagagtatcctcgtccacaagactgacgaggacaaagtaatggtcctcgactcgcacaagctgttgggcgcttcaggggatgctggtgaccgggtgca

SEQ ID NO: 45651 - DNA, 299 bp, Zea mays
aagacccatttccccgagcgcaagagtaccatggcggcggcggcagtttatggcggcctcaaggggaagcttggcgtcgaggatgcccccgagctgcagctgaatcgcatccgcatcaccctctcatccaagaacgtcaagaacctggagaaagtttgtgcggatttggtaaagggagccaaggataagcatctgagggttaaggggcctgtcaggatccctactaaggttctccacatcaccacccgcaaatccccttgcggtgaaggaacaaacacatgggaccggtttgagttccg

SEQ ID NO: 45652 - DNA, 173 bp, Zea mays
agggtgtctatggtcaggggcctgatcagagaggttgctgggtttgctccttatgagaagcgtatcactgagcttctgaaggttggcaaggacaagcgtgccctgaagcttgctaagagaaagcttggaactcacaagagggcaaagaagaagagagaggagatggcgggcgt

SEQ ID NO: 45653 - DNA, 163 bp, Zea mays
caaggagatcttccttagggagctcatttcaaactcctccgatgccttggataagatcaggttcgagagtttgacggacaagagcaagctggatgcccagccggagctgttcatccacatcgtccctgacaaggccaacaatactctgacaatcattgacagt

SEQ ID NO: 45654 - DNA, 294 bp, Zea mays
gaaagatggaatccttgagtctttagctcgtcgtgtaaaggcgttggaggatgcattcaacaagcttgagggactttcatgtaattaggccgaaggagcaatgtatcttttccctcagattcttctgccacagaaggcaatcgaggctgctaaagctgctaagaaagcgcctgacgctttctacgctctccgtctccttgaatcgactggaatcgtcgtggtccctggatctggatttggtcaagttcctggaacattgcacatcagatgcacgatcctgcgcgcagaagacaa

SEQ ID NO: 45655 - DNA, 252 bp, Zea mays
cttcaagcggaggaacggcggacgcaacaagcacgggcccggccacgccaagtacatacgctgctccaactgcgccaagtgctgtccaaatgataaggctatcaagcggttcttggtgaggaacattgttgagcaggctgctgtgagggacccgcaggaggcttgtgtgcatgatggatatgttcttcccaaattgtacgcaaaggttcatcactgtgtctcatgcgcaatccatgcgcacattgtccgtgt

SEQ ID NO: 45656 - DNA, 294 bp, Zea mays
caagaagttcagcaaccagtacaaggctacgattggggcggatttcctcaccaaggaggtgcagttcgaggacaggctcttcactctgcaaatatgggacactgctggtcaggaaaggtttcagagtcttggcgttgcattctaccggggagcagattgttgtgtcctagccaatgaggtaattcctaagaaatcgtttgataatcttcacaactggcgtgaagagtttctaattcaggcgagcccatcagatcctgacaatttcccttttgttctgttgggtaacaaagttga

SEQ ID NO: 45657 - DNA, 198 bp, Zea mays
gcagctcccatcctctcgctcgccaggagaagcagccgccgttgctgctgccgcgtccacagaatggggggtttcgtgaagacccataagaccaatgcgtatttcaaacgtttccaagtgaaattcaagagaaggcgggctggcaagacagactacagggccaggataaggctgattaaccaagacaaaaacaagtac

SEQ ID NO: 45658 - DNA, 163 bp, Zea mays
cctgtccactttccccgtgcttctccgccgtcgaggccgcgtcccagtgcgaagagactccgactcagatggccagccgctgggtccggcccgaggtgtacccgctgttcgcggcgacgggcgtggccgtcggcatctgcgggtttcagctcttcggaaacat

SEQ ID NO: 45659 - DNA, 139 bp, Zea mays
catcaagcctggtatggttgttacctttggtcctagtggccttactactgaggtgaagtctgttgaaatgcaccatgaggctctccaggaggcccttcctggtgacaatgttggcttcaatgttaagaatgttgctgtg

SEQ ID NO: 45660 - DNA, 172 bp, Zea mays
tagggttttgctgctctccgaccccgagctccgaaggccgcagcatcaggcgcggcccccctcgcgtgtgaccgagctggcgctgccgaatcaggggaccgttgattaccccagcttcaagctcgtcatcgtcggcgatggtggaactggtaaaactacatttgtgaagagg

SEQ ID NO: 45661 - DNA, 273 bp, Zea mays
ggctcgaggggagagattggagggaggccgctgcccaaggcaagagcaaccgcggcgcgcggagagggaggaagggcagacgcagacgggcgaacaagatgagggagatcatcagcatccacatcggccaggccgggatccaggtcggcaacgcctgctgggagctctactgcctcgagcacggcatcgagcacgatggcaccatgcccagtgattcctcggttggcgtcgcacatgatgccttcaacacgttcttcagcgagactggttccg

SEQ ID NO: 45662 - DNA, 272 bp, Zea mays
aaccatctaccagcgactcagcgagcgagagcagcacacacgcagctagctaggagcagcagcagagcagcggcgatggcggcctccatgatctcctcgtcagctctggcggtggcgcctcagggcctgccgcccctcggccgccgcgcctcctccttcgccgtcgtctgctccaagaagaagatcaagaccgacaagccctacgggattgggggtggcctgatcgtcgacgtcgacgccaacgggagataaggccaagggcaaggcgtgta

SEQ ID NO: 45663 - DNA, 285 bp, Zea mays
gtctgtatcccgacgccgccgctaggcgttgcgcctttgcctgcatcactcgctcattcggagggactctcttcgccggcgtcgtaagaagagctggcagagcgtttgacccgtatcgccatagttagcgaggacaagtgcaagcccaagaagtgccgccaggagtgcaagaagagctgccccgtcgtcaagactgggaagctttgcattgaagtgacttcggcgtcgaaactcgctttcatttctgaggaactgtgcatcggttgtggtatctgtgtagagaaa

SEQ ID NO: 45664 - DNA, 281 bp, Zea mays
attctccttagtgagtgggaggacaggatgactcgaggcttattccgctacgatgtcactgcctgtgagaccaaggtcattcctggcaaccttgggtttgttgcacaactcaatgaagggcgccatcttaagaagcgccctactgagtttcgtgtggaccgtgtgctccagccgtttgaccctgccaaattcaatttcacaaaagttggccaggaagaggttctcttccaatttgagaatagtggtggtgatgacagctatttcctgaacaacgctccaat

SEQ ID NO: 45665 - DNA, 276 bp, Zea mays
gttcctgaagatgtcagatcggacaaaagatatgcaggggcatcaaactggacagtaaaggaagttgttgaatcagtgaggaatgactctggcagcattgacatactagtgcattctcttgctaatggcccagaggtaacgaagcctttgttggaaacctcaagaagaggctatcttgcggcaatttctgcatccagttactcctatgtctcattgcatcagcacttccatcctataatgaataccggtggtgctagcatctctctaacatacatt

SEQ ID NO: 45666 - DNA, 276 bp, Zea mays
ctcccctgccgccgccgccatggcacactccaacgtgtggaattcgcaccccaagaactacggccctggatctagggtttgccgtgtgtgcgctaacccccacggcttgatccgaaagtacgggctcatgtgctgcagacagtgcttccgcagcaacgccaaggacattggcttcatcaagtaccgctgaaacttggggagctccaaagcatggcaataatggaagcatggatggggacctaaaagatagcctgtactcttattcttatgataaaa

SEQ ID NO: 45667 - DNA, 272 bp, Zea mays
gcgctcttcagatcagatcggcaagtccaatcccgagcagaggtgcgactcgagcgctcgcgccggtgtccatttcaaagaggaagccgcggtagcactggtagcggcagacgtaaggggaagatgtcgtcggcgttcagcggcgatgagaccgcccctttcttcggcttccttggcgcctccgctgcgctcgtcttctcatgcatgggggcggcgtacgggacagccaagagtggcgttggcgtggcgtccatgggtgtcatgcgcccaga

SEQ ID NO: 45668 - DNA, 277 bp, Zea mays
aataactgtttgttagcgtgacgtgcgtggggagtctggagtcggacggaatcgaaaaggcgaagagtcagtttctcgagttgtctcggagcggaggcgatggctgggaagggagggaaaggcttgctcgacgcgaagactacggcggccaagtccgccgagaaggacaaggggaagaaggccggtatctcacggtcctcccgcgccggcctccagttccctgttgggcgtatccaccgtcagctgaagcaaaggactcaggcaaatggtcgcgttg

SEQ ID NO: 45669 - DNA, 281 bp, Zea mays
ccgaaagcatctcttgtgaacgacgtggatgatgttgagaagcattttccggggacactgactgccatcagagactggttcagagactacaagatacctgatggaaagcctgccaacaaatttggtctcggcaacaagcccgcaagcaaggaatacgccctgaaggtcattcaagagaccaacgaatcatgggagaaattggtaaagagaaatattcccgctggagagctctcgttggcctgattttggcccatggaagccaccacattcttttgaactgc

SEQ ID NO: 45670 - DNA, 276 bp, Zea mays
ccgccgccgctccgcctccgctccgcctcagcgcatcgccctccgccacagcgtaccgcgacctcatcgatcaccttcaactttcaatcatggcggacgtcgatgtcgaaccggaggttgccgccggcgctcccaagaagaggacgttccgcaagtacagctaccgcggcgtcgacctagatgcgcttctcgacatgtccacggacgacctcgtccagctcttccccgcgcgcgccaggagaaggttccagaggggtctgaagaggaacccatggc

SEQ ID NO: 45671 - DNA, 275 bp, Zea mays
caccgatccatttcagccgccgccgcgcgtagcaagcaggagcagcaaggatgccggctggccacgggctgcgctcgcggacgcgcgacctgttcgcgcgccccttccgcaagaagggctacatcccgctcaccacctacctccgcacctacaagatcggcgactacgtcgacgtcaaggtgaacggcgccgtccacaaggggatgccgcacaagttttaccacggccgcaccggtcgcgtctggaacgtcaccaagcgcgccatcggcgtcgag

SEQ ID NO: 45672 - DNA, 272 bp, Zea mays
aaggaactggggatgccagacggtgttttgatgaatggcaagggcgcatataggtataatgactcgctagtgccagatggcattgagcacgagactatcaaagttgagccaggaaaaacataccgtttccgtgtccacaatgttggtgtctccacaagcttgaacttacggattcagaatcacaacatggcccttgttgaaacagaaggttcatacacgatgaagcagaattttactaatctcgacatccacgtgggccagtcttactcatt

SEQ ID NO: 45673 - DNA, 270 bp, Zea mays
  unsure (1)..(270): unsure at all n locations
ctgggatggtgggcggcatgctgctccacctgcgctcactccgccgcttcgagcagagcggcggctggatccgcgctttgctggaggaggccgtgaacgagcgcatgcacctcatgaccttcatggaggtggcgaacganggtggtacgagcgcgcgctcgttatcaccgtccagggcgtcttcttcaacgcatacttcctcggctacctcttgtccccgaagttcgcgcaccgcgtcgtcggctacctggaggaggaggccatccactc

SEQ ID NO: 45674 - DNA, 266 bp, Zea mays
gagttcctgacgccgaagcatcgcaaaccggatcaaggcgaaggggctgcagaagctgcggtggtactgtcagatgtgtcagaagcagtgccgcgacgagaacgggttcaagtgccactgcatgtcggagtcgcaccagaggcagatgcaggtgttcggcatggcccccgaccgcgtcgtcgagggcttctccgaggagttcctcgagtccttcctctccctcatccgccgcgcgcaccgccactcccgcgtcgccgccaccgtcg

SEQ ID NO: 45675 - DNA, 269 bp, Zea mays
ctcgtcaagagaggtgtggctgtgccggaccagtcaagcccatatggtgtccgactgctgatcaaggactacccctatgccgttgacgggctcgtcatctggtgggcgatcgagcggtgggtcaaggagtacctggacatctactaccctaacgacggcgagctccagcgtgacgtggagctgcaggcgtggtggaaggaggtgcgtgaggaggcgcacggcgacctcaaggaccgagactggtggcccatgatggacaccgtccagca

SEQ ID NO: 45676 - DNA, 270 bp, Zea mays
ccgcagtcaaggacactcccacgaagcgtcctggtcatatgcacccaggtagtgatgataatcacgtacctgctcttcgcgttgggccggctcgccacgctctacgtctccgtcgccttactcggcttatgctacggggtcctgctctccgtggtgatctcgacctcgtcggagctcttcgggctgaagcacttcgggaagatatacaacttcatcacgctggcgaacccggtcggcgcgtacctgttcaacaccctcgcggggtacgtc

SEQ ID NO: 45677 - DNA, 263 bp, Zea mays
gggatatgaactcattgaatgcgataaaatatttgtccctgtgcataaagatgtacattggtgtttagcaattataaacgtgaaggaaaatttctttcagtatcttgattcccttggtggcatggatcataatgtaccaaaagtactggctcgatatatttcagaggaagtgaaggacaaaagtaacagagtaatcaacaccagtttgtggcatgaagagctagttgatattcctttacagcggaatgggtgggactgcggta

SEQ ID NO: 45678 - DNA, 264 bp, Zea mays
gagcacccgaggagactccgtgcgaccgaagccagagccagcggaaccgaacgggggtgtgctggagggggacgccgcgctgctggccgagatgcgtgggaggattgacgaggagatccgcaagcttgatgagaaaattgctgatgcggaggagaacttgggtgagagcgaagtccgtgaagcacatcttgccaaatctttgtactttataagggtcggtgagaaggaaaaggccctggaacagcttaaagtcactgaaggaaa

SEQ ID NO: 45679 - DNA, 266 bp, Zea mays
ggatcagctagtcagaattttactcttctgcaagagttctaccagacaacactgaaagcgcttgaagaagcgaaaaatgagagattatggttcaagacaaacttgaagctttgcaaaatttggtttgatataggcgagtacggtcgcatgaacaagatattgaaggaactgcataaatcttgccaaagggaagatggttctgatgatcaaaagaaaggcacacaacttttggaagtctatgctattgaaatacaaatgtacactga

SEQ ID NO: 45680 - DNA, 262 bp, Zea mays
cagggagcgtgccgtgagagtgggaggttgcctcaggtgcggagagtcgccggcgggaccatcggtgtctgagatgaaggagagaggcggctctagggcggcagtggacgagcgctacgcgcagtggaagtcgctcatccccgttctctacgactggtttgccaaccaccagctcgtttggccatccctctcctgccggtggggggcacagtttgagaagctacctacagaatcgtcaacgcctttactatctaacagacga

SEQ ID NO: 45681 - DNA, 297 bp, Zea mays
  unsure (1)..(297): unsure at all n locations
caatgatgtgggaagaagtcaaatcagagaaaggtggtccagctcctaggtatgatcattcggctgctgtttacgctgaccagtatcttctgatctttggtggctcttctcactctacatgcttcaatgatctttacctacttgacttgcaaactctggagtggtctcaacctgatgcccaaggagcacacataactcctagaagtggtcatgctggtgctatgattgatgaaaattggtacattgttggcggtggagataatgcaagtggttcactgatacagntgtaattaatgc

SEQ ID NO: 45682 - DNA, 287 bp, Zea mays
ccacaaccacacgttcacggtagcgagagttatcgtcgtcggcggtgaagatggtgtcgctgaagctgcagaagcggctcgccgctagcgtcctcaagtgtgggaaaggcaaagtctggcttgaccccaatgaagtcagcgagatctccatggctaactcccgccagaacatccggaagttggttaaggatgggtttatcatcaggaagcctcagaaggttcactctaggtcccgtgcaagataggcacatgaggccagcagaagggaaggcatctggatacgcaac

SEQ ID NO: 45683 - DNA, 293 bp, Zea mays
gccaatcatggtgaaggaatcaaacaattcctccgtgaaagtcttcgcaacaccagtgcagaggtcatccagcatggtgcatgtttggggcttgggcttgcagctttgggcacatcagatgaggaaatatatgaggacataaagaatgtcctttacacagacagtgctgttgctggtgaggcagctggtattggcatgggcttgctcatggttgggaccgctagtgaaaaggctagtgagatgcttgcttatgcacatgatacacagcatgaaaagattataaggggtttgtc

SEQ ID NO: 45684 - DNA, 299 bp, Zea mays
cttggtcctcctctggtttggtatctcggttcctcttgtatttgtcgggagctatctgggcttcaagcaacctgccattgaggctccggtgaagacgaacaagatcccgagacaggtccccgagcaagcttggtacatgaaccctgccttcaccattctgattggtggcatacttccgttcggagcagtcttcatcgagctcttcttcatcctgacgtcgatctggcttcatcagttctactacatctttggcttcctgttcctggtgttcattatcctcatcgtcacctgtgcggaga

SEQ ID NO: 45685 - DNA, 226 bp, Zea mays
gcgcatcgtaaatcctagtccatatatggcctatctacaggcacgaggttgtattctcgtggcatcgagtcctgaaattcttacccgggtacaaaagaggacaataatcaatcgtccgcttgctggaaccataagaagaggcaaaacaaaagcagaagacaaaactttagaacaattgcttttgagtgatgaaaagcagtgtgctgaacatattatgctagtagat

SEQ ID NO: 45686 - DNA, 274 bp, Zea mays
ggatcggatttctgcctgtctctgatggacaagctgtaccgcccggacatgaccgttgaggaagcggtagacctcgttgataagtgcattaaggagatccggctgcggctggttgtggcgccccagaacttcgtgatcaagatcgtcgacaaggacggggccagggagtacgcgaggcgtgaactcgtcggcgacagtgcacctgctgaagctgcagctacggttgccgcctgaggcatgatccttgtttgtgttagttgtttgtttctcagcg

SEQ ID NO: 45687 - DNA, 284 bp, Zea mays
tgctgtcctctgtgctatccgctagggtttatctgctcgaggaatggcgtcggtgcaggtctccggcgcgggggtcggtgccgcggccttctctgtgaaggggaaggcctccaccggtgcgctccggcttcgctctacgttgaccttcggcgaggtctgcccggcgcggcgggcgttccgcggcctcgtcgtcagggccgctaccgtcgtcgcccccaagtatacaacacttaagcccttggctgatagagtgcttgtacagattaactcttccgaggagaaga

SEQ ID NO: 45688 - DNA, 203 bp, Zea mays
catatgtctactctgtttgtgcacttctttatggggcattcactggatttcatcctccaatatattttgagacgagcgcaatgataattacatttgtgctatttgggaagtatcttgaagtgctcgcgaaacgaaagacatcagatgctatcaagaagcttgtagagcttgctcctgctacagctattctacttctgaaggac

SEQ ID NO: 45689 - DNA, 256 bp, Zea mays
  unsure (1)..(256): unsure at all n locations
agtccgcgtccagtgtgtccgctactccgctccccctcagtcctcagttcctcaccttcacggtnactagcgcgcgggagacgtagatggcggcttcggaggcggcacggcggcggcaacaccggtgacgccgacagaggggacggtgatcgcgatccacagcctggaggagtggagcatccagatcgaggaggccaacagcgccaagaagctggtggtgattgacttcactgcaacatggtgtcctccgtgccgc

SEQ ID NO: 45690 - DNA, 284 bp, Zea mays
  unsure (1)..(284): unsure at all n locations
aatcgagcgaatcggctcgaggctttatagctgatgaggaaaggcaacaatttgaggagcgtgtccaacatgacttagttactgggtttgggaagaagctcagcagccttctggatagatgtttatcagagtatgacatggaggctatttattttgatgaaggtgtcagaagctcgaaaagacancattttgagtctaaactgttacagcttgtcaatgctgcctcagcaatctcttctaagtcacttagacactagaactttagaagcatttaaggagtactt

SEQ ID NO: 45691 - DNA, 250 bp, Zea mays
cacacagaaaaccctagccgccgccaccgaagcggcctcccaggtaagcaggagcgtccaccccgccgccgtcatgaagcgcaatccccgcgtcacgagctcccgccggaagtgccgcaaggcgcactttacggccccgtcctccgtccgccgcgttctcatgtccgcggggctgtcgacggagctccgcacaagtacacgtgcgctccatccgatcggaagacgacgagtgcagtcgtcgcgcactaaa

SEQ ID NO: 45692 - DNA, 239 bp, Zea mays
attcaaaacgatcatcaagaaaccctactccagttctttctatccttgcgaaggacattagtgacctagctacgaaggagaaaaaattgtacagtccaatactgaagacatggcatcctcttgcttctggtgttgctgttgcaacccttcattcttgttatggaaatgagctgaagcagtttgtagctgggcttacagagctgacccctgatacagttgaagtacttaagtcagcagac

SEQ ID NO: 45693 - DNA, 291 bp, Zea mays
gagaattcttgtggctacagatttagttggcaggggcattgacattgagcgtgtcaacattgtgataaactatgacatgccagactcagctgatacttatttgcacagggttggaagggctggacgttttggcacgaagggacttgcaattacctttgtttcctctgcttcggattctgatgttcttaaccaggtgcaagaaaggtttgaggtagacataaaggaactgcctgagcaaattgacacctcgacctacatgccatcataaatgggaaggacaactgagaggag

SEQ ID NO: 45694 - DNA, 284 bp, Zea mays
gcgtcttgaaaggggagagagagagagagaagagagagagaagagagagagagagagaggagtgggagacccgcgagaggctgccgtgtagggaccgtagactcagcgactgcgaaggagggataaggggatggccgggatcggaccgatcaggcaggactgggagccggtcgttgtgcggaagaaggcacccaccgccgccgccaagaaggatgagaaggccgtcaacgccgcgcgccgcgccggtgcggagatcgataccatgaagaagtacaacgctggta

SEQ ID NO: 45695 - DNA, 276 bp, Zea mays
ccttctctccgcttccaagatgtcgaagcgagggcgtggaggttcggctcgtaacaagttccggatgtcactgggtctaccagtggcagctactgtgaactgtgccgataacactggagccaagaacctgtacatcatttctgtgaagggaatcaagggtcgccttaacaggcttccttctgcctgtgttggtgacatggttatggcaaccgtgaagaagggaaagcctgaccttagaaagaaggtgatgccagctgttattgtgaggcagcgcaa

SEQ ID NO: 45696 - DNA, 289 bp, Zea mays
cttcctcctgaacatggcagtgaactgctcgctgacgcggcggaacatctcctggatggaggtcgagttgccgatgaatgtggaggacatcttcaggccgatgggtgggatgtcgcacacactcgacttcacattgttagggatccactccacaaagtaggaagagttcttgttctgcacgatcagcatttgctcatccacttccttggtgctcatcttcccacggaacatagcagatgccgtgaggtagcgaccgtggcgagggtcagcagcacacatcatgttcttg

SEQ ID NO: 45697 - DNA, 301 bp, Zea mays
gctcgaaggagaagcccactcttggaggcacgcggattaagacacgcaagcgaaacattgcagctcctttggaccctgcatcattctctgatgcaattgtccagatttatctggataatggtggagatctggaactcgtcgccaaaagtattgagtcttccgaccttaacttctcacgttacggtgacaccttttttgaggtcgtttttgttggaagacgcactcagcctggcactgtaaaacctgaagaaggagaccgccagccttattctatgttagattgtgtggcacagcgtgaaac

SEQ ID NO: 45698 - DNA, 287 bp, Zea mays
gactacaacaagttttacgaggctttctccaagaacctcaagcttggcatccatgaggactcgcagaacaggaccaagatcgccgagcttctgagataccactccaccaagagtggtgatgagctgaccagcctcaaggactacgtgaccaggatgaaggagggacagaatgacatctactatatcactggtgagagcaagaaggcagtggagaactcccccttccttgagaagctgaagaagaggggctatgaggttctgtacatggttgatgccattgacgagta

SEQ ID NO: 45699 - DNA, 286 bp, Zea mays
tcttcctcgagttctcctcaaccaaattcaaagtcacagcggcgaaactctcggcgatgtcaggccgcggcaagggcgggaagggtctgggcaagggcggcgccaagcgccaccgcaaggtgctgcgtgacaacatccagggcatcaccaagccggcgatccgcaggttggcgaggaggggcggcgtcaagcgcatctccgggctcatctacgaggagacccgcggcgtgctcaagatcttcctcgagaacgtcatccgcgacgccgtcacctacaccgagcacgc

SEQ ID NO: 45700 - DNA, 282 bp, Zea mays
gaggagtcccgtaagaatgaggaacatgttgcacagatcaaggaataccgtggcaagattgaggctgaattgagcaacatttgtgatggtatcctaaagctgcttgacacgcaccttgtgccttcctccactgccacagagtcgaaggtgttttacctcaagatgaagggtgattatcacaggtaccttgctgagtttaagactggtgctgagaggaaggaatctgcagagagcacaatggtagcttataaggcagctcaggatattgcattggctgaactg

SEQ ID NO: 45701 - DNA, 262 bp, Zea mays
caatcatagcatgctgtagatcttgcttgtgagcaatcacaagcaagatcttccaaatgctatgaatgccgctgcagatcactgataagcttggactgcattcacttcgccgctgtcattggtacattcaaagcacttgtgctacaacgggtgagggattgtatgaacgcctggactggctgtccagcaacattgcaaccaagtcctaaattgtcaagcgaggtttggatcatctaggagcttttggatgatgatgatggtg

SEQ ID NO: 45702 - DNA, 284 bp, Zea mays
aggagagaggcggctctagggcggcagtggacgagcgctacgccagtggaagtcgctcatccccgttctctacgactggtttgccaaccacaacctcgtttggccatccctctcctgccggtgggggccacagtttgagaaagctacctacaagaatcgtcaacgcctttacctatctgaacagaccgatgggagtgtgcctaatactctggttatcgcaaactgtgaagttgtgaaaccaagggttgcagctgctgaacatatctcgcagtttaacgaggaag

SEQ ID NO: 45703 - DNA, 290 bp, Zea mays
agcgcacacacacgcaaccagatctcccccaaatccagccgtcggcacctccgcttcaagatgtcgatctttgtgaaaaccctgactggcaagactatcaccctcgaggtggagtcgtctgacaccattgacaacgttaaggccaagatccaggacaaggagggcatccccccagaccagcagcggctcatcttcgctggcaaacagcttgaggacgggcgcacgcttgctgactacaacatccagaaggagagcaccctccaccttgtgctccgcctcaggggaggcat

SEQ ID NO: 45704 - DNA, 293 bp, Zea mays
ggaccaggtaagcagcagcaggaaccctagcaccgccgcatccgcagccatgggtatcgacctcgttgtgggtaggaggacaaagaagaccaagcgcacagcgctgaagtccgacgatgtttatctcaagctccttgtcaagctctatggtttcttggtcacgaggactaagaccaacttcaatgctgtcattctcaacagggtcttcatgagcaaaaccactcgcccaccaatctccatgcgccgccttgtcaacttcatggtaggaaaggtgaagaacattgctgtgattg

SEQ ID NO: 45705 - DNA, 293 bp, Zea mays
ctggaaccattgacaacataattcagtgcaagctttacaggactggatctgttggttttgtgtctaaatcgggtggcatgtcaaatgagatgtacagcaccattgccagagtgacagatggtatttatgaaggaattgcaattggaggggatgttttccctggatcaactctgtcagaccacattctgcgttttaataacataccacaggttaaaatgatggttgttcttggggagcttggtggaaaagacgagtattcacttgtggaagcattgacacaaggaaaggtccag

SEQ ID NO: 45706 - DNA, 297 bp, Zea mays
gaacaagcgacatgggcgtctacacctttgtgtgccgcaacaacggcggcgagtggaccgccaagcagcactccggcgagatcgaggcttccgccgctaccccatacgagctgcagcgccgcctcgtcgctgccgcctccgcggccgactctgcctacggcgtccagtcgtccttctcggtggtcacccccagctccgccgtgttccaggtgatcgtcggtgctgtcggtggtggtgcaatgatggtgagcggaggtggcggcggcggtgctgctgcaactgggtagtgctgctgcc

SEQ ID NO: 45707 - DNA, 294 bp, Zea mays
tctgcacaacatgctgtcgcagcagaaaacaataatcaattcaatggctgtaaatgaggatggtgtcttggcaactggaggggataatggaagcctgtggttttgggactggaagagtggtcataactttcaacaagatcagactatagtccagcctggatcactggagagtgaggcatgcatatatgccctctcatatgacgtgagcggatcaaggcttgtgagctgtgaggcggataagactataaagatgtggaaagaggacttgacagcgaggcaaagactcatcccatc

SEQ ID NO: 45708 - DNA, 286 bp, Zea mays
gtcctctcctctgtccctctacggtgcttctgctcgccggcccaaaatcgcctcatcgaccacgcccccttccaggctcccgtctccatgggtctcctctcaaacaggattgggagggagagcctcaaggcgggggatcatatctactcctggagggcggcgtgggtctacgcgcatcacggaatatatgtgggcgatgataaggtgatccatttcacaagaggaagaggacaggaggtcggaacaggaactgtcgtcgatattattcttgtgagttccaccccaa

SEQ ID NO: 45709 - DNA, 292 bp, Zea mays
agatgaggttgccattcagaacttgcagacctacaaagagaagaaatttgtggatatcagcaaagaggatctggaattgggtgatgaagaagaagagactaaagaaaccaaacaggagttcactctcctatgtgattgggttaaacaacagcttggcgacaaggttgcgaaggtccaaatatcaaagcgtttaagttcatctccatgtgttctcgtatctggcaagttcggttggtccgccaatatggaaaggctcatgaaggctcaacacttggtgacacatcaagtttgg

SEQ ID NO: 45710 - DNA, 275 bp, Zea mays
gaaacctctcaaaccctagccgcctcctgcaagtttcagagctcaggaatctgcgccatggcgagtgagacggagaccttcgcatttcacgctgagatcaaccagctgctctctcatcatcaacaccttctactccaacaaggagatcttcctccgcgagcttatctccaactcttccgatgcgctggacaagatcaggttcgagagtctcactgacaagagcaagctcgatgcgcagctgagcttttcatccaccttgtcccagacaaggccac

SEQ ID NO: 45711 - DNA, 295 bp, Zea mays
ctgctacttacctttttttacagcagtgcatgttcgtctcatggtgctgcattcagtttacaatgtgtctgaaggatttgaagaccccacccccagatagtggatgggcttttttttacatattgtatgtgtcaacaggtaatcagaaggctggctcagaatcgtgaggctgcacgcaaaagccggctgcggaagaaggcgtacattcagcagctcgagagctgtaagctgaagctttctcagatggaacaggacatgcagcgagcccgtacccagggcctctttcttggaggag

SEQ ID NO: 45712 - DNA, 280 bp, Zea mays
ggatgcagactggatgcttgtcggtgatcttccctgggattattttacctctatctgccggaagctcaaaatcatgaggggctctgatgctgttggaatagctccacgaaccgtcgatcagacaggtcagaacaaataagctttggcctttgcctgcatccaaggaagacatctgagctagctgggagactatgttgaaggctgaagcctgaaatagttgccgggaatcgtcaaaacccgtcaaatgtttagtgtagttttcacgtgtccttgagacatg

SEQ ID NO: 45713 - DNA, 278 bp, Zea mays
aaatcaacccgttcgttcctcccttctcccccctctacccacatcgggcagcctcccccctctctctcaccgctcaggtcaggccaggcccggcgggagagagatccggcgagagacgcggcctcttgctcccctcaacccccttaaagaagcgcatagaagcttcggaaggtgcccctccgcggctcgaaggaggggaggggacgccgcggacaatgacggcgatggaagccgccgtcgacgctatgctcgccgccgcgagccgtgccttcacgagc

SEQ ID NO: 45714 - DNA, 278 bp, Zea mays
cctccttgtgcgtctcagggatcttcctgacattatcatccccccttctcctgtgatgttcccggaggacagagagacatggaatgttcagctcttcagatccatcgatggtggtgctgcttttggcttccccgagactcccgaggaagctgcaagagctgtggcttgtgagtggaaaggatcaaatcatcgaccggagtatccaggatgcatacgtaaacgccatacggagggcgaagaacttcatctacattgagaatcagtacttccttggaagt

SEQ ID NO: 45715 - DNA, 261 bp, Zea mays
agcaggtgatatggttcttgcttctgcttactcgcatgaattgccacgatatggtcttgaagttggtctgaccaactatgcagctgcctactgcactggccttctgttggatcgccgtgtgctcaagacccgtggtttagataaggaatatgacggcaatgttgaggccactggtgaggacttctctgttgagccagctgatgagaggaggcctttccgtgctctcttggatgttggccttattaggactacaactgggaa

SEQ ID NO: 45716 - DNA, 285 bp, Zea mays
gggatggactgggttgttccgtggtaactttgttaatgtcatccgggtagccccaagcaaggcaatcgagctttttgctttcgatacagctaacaagttcttgacccccaaatctggggaggaacggaagatcccagtccctccttcactagtggctggggcatttgcaggtgttagctcaacactgtgtacataccctctggaattgattaagacacggttaactatacagagaggggtgtatgacaatttccttgacgcgattgtcaagatcgtccgcgacga

SEQ ID NO: 45717 - DNA, 280 bp, Zea mays
aagtagtcagtcgtcatcgtctcttccgatcgcctcgagttcattacagttagcgccgctaatcccctccctaatcaccatccatccatccatccggtaggattccccagccatgtcggcgactgcggtgaagtttcccgtggaggcgcctccgaggacagtgaaggtcaccaacgtctctcttagtgcaaccgtgcaagacattaaggagttcttttccttttcaggagatattgaacatgtggagatgcagagtggtgatgagtggtctcaaattgca

SEQ ID NO: 45718 - DNA, 279 bp, Zea mays
ccatcctgacgagggatcccagccaccgccgctagaagaagagctcggcgattcccaggacccgcgagaatatgccgaagcagatccatgagattgaggacttcctcctcaccgcgaggaggaaggatgcccgctcagtgaagatcaagaggagtaaggaagttgtcaagttcaaggagcgctgctccaagtacttgtacacgctctgcgtcttcgatgctgagaaggcaaacaagttgaagcagactcttcccccaggtttgaccgtcgaggaggtct

SEQ ID NO: 45719 - DNA, 273 bp, Zea mays
caagcagaagtggaaggaagcaggcggccaccatggagaagggacgcacgggacagcgcgtcaggctctacgtccggggcaccatcctcggatgcaagacgtccaagtcgaaccagtacgagaccacgtcgctgcattcagatcgagggggtgaacaccaaggaggacgtcgcgaggtacgctggcaagcgcatggcgtacatctacaaggctaagaccaagagcagcgagacccgctacaggtgcatctggggcaaggtcacccgcccgcac

SEQ ID NO: 45720 - DNA, 271 bp, Zea mays
gtagtaactaacttggaagaaggaaaagtactagaccttgatggcaaaatgtggcctgatgcttctgatactgatgcttcctcccactataaggttccgttctcaagaactgtctacattgagaaaactgattttcgcctaaaggactcaaaagactactatgggctagcccctggtaaatctgtcatgctaaggtatgcgttccccataaaatgcacagatgttatctctggagatagtcctgatgatattgttgaaattcgagctgaat

SEQ ID NO: 45721 - DNA, 283 bp, Zea mays
ctcaagtagtatgttaggagagatttcatgtgtgacgaatttgatgatcttcttcccaagtacctgagctttttgaagggtattgttgactcagacacgctgcccctgaacgagtcacgagaagtgcttcaacaacatagcagtctcaagaccatcaagaagaagctgatccgcaaagcccttgacatgatcaggaaacttgctgaagaagaccctgatgagtacagcaacaaggataagacagatgaagagaaaagcgagatggaggagaagaagggccagt

SEQ ID NO: 45722 - DNA, 278 bp, Zea mays
caactcgccgccgccgctgccaacgccgcctgctgccgcagccgccatgggggcgtacaagtatgtgtcggaactatggaggaggaagcagtcggacgtgatgcgcttcgtgcagcgcgtgcgctgcatgggagtacaggcagcagccgtccatcgtccgcctcaccaggcccacccgccccgacaaggcccgtcgtgtcggctacaaggccaagcagggatatgttgtctaccgtgtccgagtgaagcgtggtggcagtaagaggcctgtgcccaag

SEQ ID NO: 45723 - DNA, 269 bp, Zea mays
tcaagaaggaacaaacgggtgaccgtaaggttgcagggtttgtattcatgtgcaatgcaaacactaagaaggagtgctaccagagtcgcttgtatgggatgcctagtgggaagattgaaatggtcaagaagattaggccaggggtcaagctgttcctgtatgattttgacttgaagcttctgtatggcgtgtacaaggcagcatcacatggtgggctgaaccttgtccatgaagcatttaatgggaagttccctgcacaggttaagttt

SEQ ID NO: 45724 - DNA, 269 bp, Zea mays
tccttccctccctccctctccccgcgggccgccagaggcagtttcgccctcgattcgaccccgattcgtccgcccgcgaccgggattccctccgccaagcgcggatctgaacgctgcgctccgtgtcgccgctcgaatccgccatgaagggggccaaatccaagggcgccgccaaggccgatgccaagctggcggtgaacaccaagggggcggacaagcccgccaacggcaggaaacggaacgccggcaaggaccccaacaagcctaag

SEQ ID NO: 45725 - DNA, 270 bp, Zea mays
gtaacatcaacattgcagaggcagaggcaattgatggaggccttattacacctgatcttcaggacgctgacaagcaggatatgtgtttgctctcgcaaaattggaaggatctagtgaagaaagcacgagcaaaacagctccaaccaaatgagtacagctcagggacttttacactgtccaataagggtatgataggagtagatcggattgatgcaatccttccaccatggccaggagctattatggcagtaggagcctcgaaacctacag

SEQ ID NO: 45726 - DNA, 278 bp, Zea mays
catgagatctacaaggacacaacacatggttgatcaactgacagaacttcagaaaaaagaacaaatgttttgtgaagcaaataagtgtcttcgaagaagactggaggagagcaaccaggttatatggcagcatgcgagggagcaaagcgagcggcattctgaagtgcagccgcagcagctcaatggcaataacttcttccatcccctcgaaggagctggtgaacccacccttcagatagggtatccatcagaggcactgactagctcatgcatgacca

SEQ ID NO: 45727 - DNA, 269 bp, Zea mays
tgcagacacatgtaggaatcaagagaatgggagagcttgatctaaaagcattttcaaaggcatgccaaaaggagcgtacagaaaatgcagaagttactgctgcctttctttgttcaaagagggaggctgaaataaaaaatcctgacaggcacccttttagggtcgtcacaattgatggaaaggagatggcaataatcgaggatgatgcaaagcttcgagcactcaaagaagaacatggagaagaaatctatgcaatggtgacaaaggcg

SEQ ID NO: 45728 - DNA, 260 bp, Zea mays
aaacaacaagctagcgcgggacgacggcaccgagaggaagaggactagctttaggccatgggagacgtacacggcggacacgtccattgaccacaccagacaccatgagcccaagacgcagaaggataaggacgcatacaggaccgacaagtcgcagcgcatccccacggacatcttcttccagaggcggatatggagccgggcgatgatgcaggaaaccgaggcagcggagccatgggaggagggcggcagcagctcca

SEQ ID NO: 45729 - DNA, 303 bp, Zea mays
gccgccgccgctgcagtgtccatagccaccgcaggagactgagatggggggttttgtcaagacccacaagaccaatgcgtacttcaagcgtttccaggtgaagttcaagagaaggcgcgctggcaagacagactacagggccaggataaggctgattacccaagacaaaaacaagtacaatacacccaaatacagatttgttgtgcgatttaccaacaaggacatcacagcacaaatcatctctgctagtatagcaggtgatatggttcttgcttctgcttactcgcatgagttgccacgata

SEQ ID NO: 45730 - DNA, 304 bp, Zea mays
tcgacgtccctcgccttcgccgccgaatccgagactccgatctcgggttcaccgcagcgcacagagcagccccgactctcggcccgatccgcgctctcctctccgtcgcttcagtcatggcaggaatggcacctgagggttctcagttcgatgctaagcactatgattctaagatgcaggagctgctgagcaccggtgagactgaggagttcttcacttcatatgatgaagtttttgagagttttgatgatatgggcctccaagagaatcttctgagaggcatttatgcttatggttttgagaa

SEQ ID NO: 45731 - DNA, 303 bp, Zea mays
tctgcccaagactgtaggtgtgcaaaattcatggcttcagacaccggcaagaagctcattcagatcgatgtgagctcggatacagtgtgcccttggtgcttcgtcggtaaaaagaaccttgagaaagcaatggagcaaagcatgggcaagtttgatttcgaggtccgttggcatccattctttctgaaccccgacgcgcctaaggagggcgtcaagaaatctgacttcttcaagatgaagttcggtcctgtccaatatgagggtgcgatgtctcgcatgactgagatatttcgaggactcggg

SEQ ID NO: 45732 - DNA, 297 bp, Zea mays
ggtttcggaaggatcggcaggctcgtggccagggtcgccctgcagagcgaggatgtcgagctcgtcgccgtcaacgaccccttcatcaccacggattacatgacgtacatgttcaagtacgacaccgtgcacggccaatggaagcacagcgacatcgccctcaaggactccaagacgcttctcttcggcgagaagccggtcaccgtctttggcatcaggaaccccgaggagatcccgtggggtgaggctggtgctgagtatgtcgtggagtccaccggtgtcttcactgacaaggac

SEQ ID NO: 45733 - DNA, 291 bp, Zea mays
gttatcgatggaaagggtgctcaatatgagtgtgcaggctaatgtgaacctgataccgaagcatacaaatgacacagaatccctggagcagttttgcaaggatccttagatcaccatctggcattatcatggtgggtgccatgtagggaaggtggttgaccagcattaccgggtgcttggagtttcaggtctccgggtggttgacggctcaatattttctaaatcgccagggaccaaccctcaagctacagttatgatgatgggcagatatatgggagtgaagatcctaag

SEQ ID NO: 45734 - DNA, 289 bp, Zea mays
gcccgctaaatagagtggttgcaaaaatctctactccgaccctcacctaaggcaccgactcgccggggacagagagagagaccgacgcgccggcagatcccaagctcaccctagagggggaagagggcgaccgaaggcggtgatgggtttcatcatggacttcgcggagaatctgatcctccgtctgatggaggacccggacaagcgcgaccaggttcggcgggagcatgtctacaagatgaaggagcggtgcgagcgcactaaggcggcgtggagcctccctctgcgc

SEQ ID NO: 45735 - DNA, 297 bp, Zea mays
ccagggtccacttcgctcgcaaccttccccagccatggcgaccgcgacgcggaggctgctccccgcgctcctcaagaccctagctccagccggcgcgcgcggcctctccaccgagaaggctgttggtgcagccgccgtcgtcggcagccacaccgctaagtggatgcaggacacgagcaagaagtcgccaatggaactgatcaacgaggtacctccgatcaaggttgatggtcgcattgccgtctgtgaaggggcttctgaaggtgttggacttggccacccaattgagtacatctg

SEQ ID NO: 45736 - DNA, 299 bp, Zea mays
ccggaacagagcgaggcgacgccgaggcacctcatctccggcgaagggaaatggcgaccgttccaggggatctgatctggcagattgtgaggaagaacaactccttcctggtgaagcagtttggcaacggcaatgccaaggtgcagttcaccaaggagcccaacaacctctacaatgtacactcctacaagtactctggcttagcaaacaagaaaactgtaacgatccagccagctgctggaaaggactcggctgtggtcctctctactaccaagaccaagaagcagaacacacccgcg

SEQ ID NO: 45737 - DNA, 299 bp, Zea mays
cagcaatcgcaggaaccctagcgccgccgcacccgcaggaatgggtatcgacctcgtcgccggtgggaggaataagaagaccaagcgcactgcgcccaagtctgacgatgtctacctcaagctcctcgtcaagctctaccgtttcttggtcaggaggaccaagagcaatttcaacgctgtcattctcaagaggcttttcatgagtaaaaccaaccgaccaccaatctccatgcgccgccttgtcaagtttatggaaggaaaggagaagaacattgctgtcattgttggcacagtcacag

SEQ ID NO: 45738 - DNA, 298 bp, Zea mays
gccggacaccccgagccgcggcgttaagggcgacatctcggagctgaccgagtccctcacccgccggttcaggggcgttgcctccttcctcgcgccaccgccaactgaaggagagactgaagaggaggaggaggagacagccgccgccgcggaggtgcctcagtccccacggatcgacgggatccggagtgacctggcggagatcgggggcagggtgaagaccggcatctcgatgctgtcgaacgccggcgcggtggcggagatctccaggttcgcgtcatcgttcctgccattcggt

SEQ ID NO: 45739 - DNA, 297 bp, Zea mays
gtggttttcctgcttccgcagcagctgccgtagctactggagcatctggatttgaatttggtgtggacccaaatgtagatccagagttggcactcgccctgtggttgtctatggaagaagaacgagcaaggcaagaggctattgcaaaaaaggctgcagaagatacatctaataccgaaaatatcaatgcctcaagctcaaacagcgattctgttatggctgaagcagaacttgcctcaaatgctgctgctggtgacaagcaagaacagccaaaggatgatgacgatctactacagc

SEQ ID NO: 45740 - DNA, 294 bp, Zea mays
atgaaggcaaaggcacagatctctcatgcccagccagatgatcttattgatttttaccacctgaagagcaggaagggcatgagccagcttgagttggaagatgaggtgcatgatgatttgaaggctgcaactggtgggtttaccaaggatgcagatgacgcaaacaagctcaaccgcattcttcaattgactgggttcagtgatcctgtgtatgctgaagcatttgtaacagttcaccattatgacattgtacttgatgttactgtaattaatcgcacaaaggagacacttcag

SEQ ID NO: 45741 - DNA, 294 bp, Zea mays
ggccagaggtgacctgtgaagatggttcgctactcccttgacccagaaaaccccacgaaatcatgcaagtcaagaggctcaaaccttcgtgttcactttaagaacacccgggaaactgcccaggccatcaagggtatgcatatccgcaaagccaccaagtatctgaaggatgtcactttaaagaagcagtgtgtgccattccggcggtataatggtggagttggtaggtgcgcccaggccaaacagtggggctggacacagggacggtggccaaaaaagagtgctgaatttttg

SEQ ID NO: 45742 - DNA, 286 bp, Zea mays
gtggtattggaactgtccctgttggacgtgttgagactggtgtcattaagcctggtatggttgttacttttgggcctactggtcttactactgaggttaagtccgttgagatgcaccatgaggctctccaggaggcccttctcggtgacaatgttggcttcaacgtgaagaatgttgctgtgaaggatctgaagcgtgggtatgtggcctccaactccaaggatgaccctgccaaggaggctgctagctttacctcccaggtcatcatcatgaaccaccctggaca

SEQ ID NO: 45743 - DNA, 289 bp, Zea mays
gatccgtgttccgtgtccgcgtccagtgtgtccgctactccgctccccctcagtcctcagttcctcacctagcggtagcgtgcgcgcgggagacgtagatggcggcttcggaggcggcagctgcggcggcaacaccggtgacgccgacagaggggacggtgatcgcgatccacagcctggaggagtggagcatccagatcgaggaggccaacagcgccaagaagctggtggtgattgacttcactgcaacatggtgtcctccgtgccgcgccatggctccaatttttgc

SEQ ID NO: 45744 - DNA, 289 bp, Zea mays
ccctttccccttccctccctccctctccccgcgggccgccagaggcaatttcgccctcgattcgaccccgattcgtccgcccgcgaccgggattccctccgccaagcgcggatctgaacgctgcgctccgtgtcgccgctcgaatccgccatgaagggggccaaatccaagggcgccgccaaggccgatgccaagctggcggtgaagagcaagggggcggagaagcccgccaagggcaggaaagggaaggccggcaaggaccccaacaagcctaagagggctcccagcg

SEQ ID NO: 45745 - DNA, 289 bp, Zea mays
cagaacctaccacgagcatcttgccaaaggcgtacttgcggcacaggaggttcccaagtttgtaatggatgaggtctatgacatggagctctacgagtggaccaaggtcgacatctctgatgaggcccagaaggagcgtgtcaatgccatgatcgaggaccaggaaccctttgagggcgaggccttgcttgacgcgaaatgcttcaagtgagtgtgctttatccagagctgtttagccctcgaattggatgtctatgttgatctggtatatcttgctatgaactggtta

SEQ ID NO: 45746 - DNA, 288 bp, Zea mays
gaggaaattccttgaagcgggtggaggcaaatacggattgccgcgtgctaataagaggtcgtggcagcatcaaagatccagcacgggaggaaatgatgcgagggaagccaggatatgagcatctgaatgaacctctccatatattggttgaggcagagctacctgttgacatcattgatgctcggctgatgcaagcccgcgagatccttcaagatctgctaaagcctgtggatgaatcccaggacttcttcaagaagcagcagctccgggagctcgcgatgcttaatg

SEQ ID NO: 45747 - DNA, 287 bp, Zea mays
ggtaatttgaacttatctggtcatctggtgcctgagcttgggaaattggagcatctgcagtacctggaactttacaagaacagcattcaaggaacaatcccttctgagcttggtaatttgaagaatctaataagcttggacttgtacaagaacaacatttcggggacaatacctccttcccttggaaagttgaaatcccttgtattcctgcggctcaatggcaatcatttgactgggccgatcccaagggaactttctggaatatctagtctcaaagttgtcgatgt

SEQ ID NO: 45748 - DNA, 284 bp, Zea mays
ggcatgttcatggtaagagggttctggtggtgaccaacacgaccgtcgcgccgctttacctggacaaggtgacatgggcactcacccacaacaacctgaatgtatcagtggaaagcgtgatcctgcccgacggtgaaaagtacaaaaatatggacacgctgatgaaggtgtttgacaaggcagtcgagtcccgttttgaccgccggtgcacatttgtagcactgggtggtggtgtcattggggacatgtgtggttttgcagctgctgcattcctccggggcgtc

SEQ ID NO: 45749 - DNA, 292 bp, Zea mays
  unsure (1)..(292): unsure at all n locations
gcccactacgagaagcgcctcccggcggccaagtcgtccggcaaagaaggcggcgacaagaagggtaagaagaaggcgaagaagtcggtggagacctacaagatctacagcttcaaggtgctgaagcaggtccaccccgacatcggcatctcttccaaggccatgtccatcatgaactccttcatcaacgacatcatccagnagctcgccggcgatgctgcacagcttgcgcgctacaacaagaagcccaccatcacctctcgggagattcaaacctctgtccgccttgtcc

SEQ ID NO: 45750 - DNA, 192 bp, Zea mays
attcttcccgtcgaaagacggagagaggaaaagggacaagggcaaggcaagagagaggcgtcgtcgtttgatctgctgccggagtgcgaagaggaagaggaagaggagcgccggagttgtaaagatgttcctggtggactggttctatggggtgctggcatcgcttgggctgtggcagaaggaggctaagat

SEQ ID NO: 45751 - DNA, 146 bp, Zea mays
gtggtgaggcgtggtggagcgggatggccccggccgctacgactgagaggcctacgccgagctcgtgcgcatggtggagcgagccggcctccgaatccaggccgtcatgtccttccaccagtgcggtggcaacgtcggcgacacct

SEQ ID NO: 45752 - DNA, 283 bp, Zea mays
ccactttccactgcacctccgctgcccatcgccgtccccgaccgcagcgcaggactgaggatgagtgaagaggataaggctgctgcttctgctgagcagcctaagagggcccctaagctcaatgaaaggatcctctcctctctgtccaggaggtccgtagctgctcatccatggcatgatctcgagatcggtcctggtgctcctgctgtattcaatgttgttgttgagatcacaaagggaagcaaagtcaaatacgagcttgacaagaaaactggactgatta

SEQ ID NO: 45753 - DNA, 278 bp, Zea mays
ggggaagcacgtcattggccttcaaatgggcagcaacagaggggcctcacaggctggcatgacaggctatgggcgaccccggcagatcatcagttagaaagggaaggccagctctgagctgcagcatcctgcttagcctgcctcacccacgcctatataggttcttagcccggacagctttgaggtatcactgggcaaagatgactgcacatgggcagctcacactatcctcagcctcagcacgcttcttaccccagagccaccactgtcctggcccc

SEQ ID NO: 45754 - DNA, 285 bp, Zea mays
ataatcctaagaggcaaacaaacagtctagcttatttgctcagattatataatctaaccccttggattatgataatccataagcaagtgaggaggtgcttatttcagattatttttttctcacttcctcactaccctttcaagtttcctagaaattacccaccattgccattataatctaccgaatcgtttttgcgcctatcggatcggagaagcccgccgcccatcagaaacacgccagataatctgggtagacaaacaggactactcagattatataatccaa

SEQ ID NO: 45755 - DNA, 276 bp, Zea mays
gaaactgcgagagtcggctgaagttgacgtcgctcctgttcaggccatcacgtcaagcaaccggtcacagatctatctttcaaaatggtgaagatctgctgcatcggtgctggctatgtcggtggcccaaccatggccgtcattgccctcaagtgcccagacattgaggtcgtcgtcgttgacatctccaagccccgcattgaggcctggaacagtgacaccctgccaatctacgagcctggtctcgatgatgttgtgaagcagtgcaggggcagg

SEQ ID NO: 45756 - DNA, 298 bp, Zea mays
tgtccctttacttctgatgaactctttcaacacccatgatgacacacagaagattgttgagaagtattccaactccaacatcgaaattcatactttcaatcagagccagtatcctcgcattgttaccgaggacttcttgccacttcccagcaaagggaaatctgggaaggatggctggtatcctcctggtcatggtgatgtgtttccttctttgaataacagcggaaaacttgacatcttattggctcagggcaaggagtatgtctttgttgcaaactcagacaacttgggtgctata

SEQ ID NO: 45757 - DNA, 201 bp, Zea mays
attgtagtcaaggacaaggatcttgtcaaggatgacttcattggccgtgttatatttgatctgaatgaggtcccaaagagagtgccacctgatagcccgttggctccacagtggtatcggttggaagaccgaaatgggcacaaggtgaagggggagttgatgttggctgtttggatgggcactcaagctgatgaagcattc

SEQ ID NO: 45758 - DNA, 194 bp, Zea mays
cagtcctcagttcctcacctagcggtagcgtgcgcgcgggagacgtagatggcggcttcggaggcggcagcggcggcggcaacaccggtgacgccgacagaggggacggtgatcgcgatccacagcctggaggagtggagcatccagatcgaggaggccaacagcgccaagaagctggtggtgattgacttcac

SEQ ID NO: 45759 - DNA, 235 bp, Zea mays
ctacactcccggcggcggcggcggcggcgcacatcggcagcagcatccgaagatggtgaagttcctcaagcccggcaaggccgttatcctcctccatggccgcttcgccggcaggaaggcagttatcgtgcgcgtgttcgaggattgcacccgcgaacgctcctatggccactgcctcgtcgcaggcctcgccaagtacccaaagaaggtgatccgcaaggactccgccaagaag

SEQ ID NO: 45760 - DNA, 259 bp, Zea mays
gaccttgtacgagggaccccttgatgatgtgtatgcaactgctatcagtaactgtgatccagagggtcctcttatgctgtatgtttcaaagatgattcctgcatctgacaagggcaggttctttgccttcggtcgtgtcttctcagggaaggttgctactggtatgaaggttcggatcatgggtcccaactatgtccccgggcagaagaaggatctgtatgtcaagagtgtccagcgtactgtaatctggatgggaaaa

SEQ ID NO: 45761 - DNA, 289 bp, Zea mays
agcgaccacagcgggagaagcagcactctagccgcctgtaaaaccaacctgggaggaagatgctaattaaagtgaagacgctgactggaaaggagattgagattgacatcgaacccacagacaaggtggaacgaatcaaggagcgtgtggaagaaaaagaaggaattcccccacaacagcagcggatcatctacagtggcaaacaaatgaatgatgagaagacagcagctgattaccagattctaggtggttccgtctccacctggtgttggctcttagaggaggtggt

SEQ ID NO: 45762 - DNA, 186 bp, Zea mays
atcaagagcctcctgccacctctgggagtgaagaggaacagcagcagcaggaacccacacaggcagagaatcaagagcctcctgccacctctgggagtgaagaggaacagcagcagcaggaacccacacaggcggagaatcaagagcctcctgccacctctgggagtgatgaggatcacaagcagc

SEQ ID NO: 45763 - DNA, 236 bp, Zea mays
catccgcattccacgcgcactccgctgcctcactccgagactccgccgctgcttccaacttccgttgcgcacgagcgaaacatccggagctagcaagggaggaggaggaggaggcgatggcggggggcggggataaggttgactacgtcttcaaggtggtgctcatcggcgactccgctgtcggcaagtcgcagatccttgcgcgcttcgcccgcaacgagtttagcctcgactcg

SEQ ID NO: 45764 - DNA, 286 bp, Zea mays
  unsure (1)..(286): unsure at all n locations
cagtcagtcacagctcacagcaaacaccgcgaaccgcccccgctcccaaacccgaccgagcaaagcgcaaagccccccaaccgcggatcaatccgcagcatcgatggcgcccaaggcggagaaaaagccggcggcgaagaagcccgcggaggaggagcccgcgaccgagaaggcggagaaggctccggcagggaagaagccgaagcgaagaaacgcctccccgcgggcaagtacggcgccgncgagggcaagaagggcaagaagaaagccaagaagagcgtggaga

SEQ ID NO: 45765 - DNA, 237 bp, Zea mays
gcgcttcaccagatttgagtgccttcgaagtgtacctgcatatgagaaggcgttgagggaagtttttgatcggtgtctagatctttatctatgccctagaacccgcaaaaagcgtataaatattgatcctgagtcactcaagcccaagttaccaagtaaaaaggatttgaggccatacccgaaaacttgttaccttgagttcaagggccatatgagtcctgtgaaatccatttcggt

SEQ ID NO: 45766 - DNA, 289 bp, Zea mays
  unsure (1)..(289): unsure at all n locations
gcaatctctagcagcagatcctcgtgcgaacanaagcgctagccccttcgtactgtcccgatggcccgcacgaagcagacggcgaggaagtccactggcggcaaggcgccaaggaagcagctggccacgaaggcggcgcgcaagtctgccccggcgaccggcggagtgaagaagccccaccgtttccgccccggcaccgtcgcgctccgggagatccgcaagtatcagaagagcacggagctgctgatccgcaagctgccgttccagcgcctggttcgtgagatcgcca

SEQ ID NO: 45767 - DNA, 224 bp, Zea mays
cttcacagcgtatcatcgttttccatcgctcctactcctatcatccagaaaatctgagcggtattgatggcgcccaaggcggagaagaagccggcggcgaagaaggtggcggaggaggagccctcggagaaggcggctccggcggagaacgcccccgcggggaagaagcccaaggcggagaagcggctacctgcgggcaagtccgccggaaaggagggcggcaa

SEQ ID NO: 45768 - DNA, 283 bp, Zea mays
tgaaggccctgctggaactccatatgagaacggagtattcaggatgaagctattattgtcacgcgatttccctcaatctcccccaaaagggttcttcttgactaaaattttccatcctaacatagctactagtggtgagatatgtgtaaacacactgaagaaggattggaatcctggccttggattaagacatgttcttctggttgtgagatgccttctgattgaaccatttcctgaatctgcacttaatgaacaagctgggaagatgttacttgaaaattat

SEQ ID NO: 45769 - DNA, 285 bp, Zea mays
gcaggactcgcttcaagctcctcatctcgcgcaggggggtcgcctgagatcacagagacaatggtgaaggcagttgctgtcctcgccggcactgatgtcaagggcaccatcttcttttcacaggagggggatggtccgaccaccgtgactggaagtatctctggcctcaagccagggctccatgggttccatgtgcacgcgcttggcgacaccaccaacggctgcatgtcgactgggccacacttcaatcctgttggcaaggagcatggcgcaccggaagatgag

SEQ ID NO: 45770 - DNA, 182 bp, Zea mays
gggtaccagtcgtggggtccgctcttcggcaagctcttcttcgccttctgtgtgatcgttcacctgtacccgttcctcaagggtctcatgggtcggcagaaccgcaccccgaccatcgtggttgtctgggcgatcctgctggcgtcgatcttctccttgctgtgggttcgcatcgatccgtt

SEQ ID NO: 45771 - DNA, 195 bp, Zea mays
tgaagatgggagttgaggtgtaccacaacctgaagagcataatcaagaagaagtacggtcaggatgcgacaaacgttggggatgaaggtggttttgcacctaacattcaggaaaacaaagaagggcctgaactattgaaggcagccatagaaaaggctggctacactggaaaggtggtcattggaatggatgttg

SEQ ID NO: 45772 - DNA, 215 bp, Zea mays
gtggccaggaaggtgctgaccaccagcctcggcggcgacctccacagcgcgcgcttcagcgagaaggccctgctcaccgccatcgaccgcgaggcggtgtacgggtactacgacgacccctgcagcgccaactcgcccctgatgaagaagatccgggccgtgctggtggacaacgccctcgccagcggcgagccgagaaggacgccaacgcgtcg

SEQ ID NO: 45773 - DNA, 257 bp, Zea mays
gccaggcataacgactgatgaaattgataaagcagtgcaccaaatgataattgataatggagcatatccttcacctcttggttattgtggatatgcaaagagtgtctgcacttcagtgaatgaatgcatctgtcatgggattccggattctcgtccccttgaggatggagatatcatcaatattgatgttactgtctacctcaatggctaccatggtgatacatctgctacatttctttgcggtgatgttgatgacg

SEQ ID NO: 45774 - DNA, 216 bp, Zea mays
gagggaggcccctgcccaaggcaagagaaaccgcggcgccggagagggaggaagggcagacgcagacgggcgaacaagatgagggagatcatcagcatccacatcggccaggccgggatccaggtcggcaacgcctgctgggagctctactgcctcgagcacggcatcgagcacgatggcaccatgcccagtgattcctcggttggcgtcgcacat

SEQ ID NO: 45775 - DNA, 221 bp, Zea mays
cgcacaccagcacggcagcacctgccctcctcgccgtcgctgcctccctccgcgcgaccgatctaccctccgccgccaccatgtcgctgatcgccggggaggacttccagcatatcctgcgtttgctgaacaccaacgtggatgggaagcagaagatcatgttcgccatgacctcaatcaagggtttcgggcgcgcttctccaacatcgtctgaaagaagg

SEQ ID NO: 45776 - DNA, 196 bp, Zea mays
ctagccctcgcgccgccgcctcctccgccacccagcgctcgagcacctcgcgtcctgcgagcgcgctcacgaacgtcaccatgaagttcaacatcgcgaacccttccaccgggtgccaaaagaagctggaaatcgatgacgaccagaagctgcgtgccttttatgaacgaaggatatcccaggaagtcagtggtga

SEQ ID NO: 45777 - DNA, 183 bp, Zea mays
gcggagggacttttgctcgctggacaagtacgtgtgggcgttcgtgaacaacaagccgctgtcgccgagctacaagtacagccggaagatcccggtgaagacgtccaagtcggagtccatcagcaaggacatggtccggcgcggcttccgcttcgtcggacgcactgtcatccactccttcat

SEQ ID NO: 45778 - DNA, 181 bp, Zea mays
ggcctggaactggtagttcttccccaggttctgtcaagagaaaaacaactattcttggtcaaaagaataaaagattacggatggataatgaggaatcaatggagttgaagataacatgggaggaagctcaagaattgcttcgccctcctcctaaggccccatccattgttattgttgatgg

SEQ ID NO: 45779 - DNA, 158 bp, Zea mays
atgatttgctcagaaccaaagcttgattcccaccgcttcaaggatataatcgatggggcgattgctgaaggtgagctgaagtcaactaaggcgtatgagaaatggtctaaaaagatttcggagatggagccaccaacaaatccattagagaggagagc

SEQ ID NO: 45780 - DNA, 268 bp, Zea mays
ccactgagcagttctctcttcttcctgctcacttacccacactctcacgttcctcagcatggccacctgcagccgtcagttcacctcctccagctccatgaagagctcctgtggcatcggtggtggctctagccgcatgtcctccgtcctggctggaggatcctgccgggctcccagcacttatgggggcatgtcggtcacctcctctcgcttctcctctgaggcaagctgtggggattggaggtggctataagtggggcttcagcag

SEQ ID NO: 45781 - DNA, 237 bp, Zea mays
cgaaaatggtggaaccttgaagagtgcaagtactgcatctcttctgaaagaagctatacatgtcattagttgtggttatgaagacaagactgattggggaaaagagattggctggatctatggatcagttacagaggatattctaactggtttcaagatgcattgtcatggttggcggtcaatttactgcatacctaaaccggcttcattcaaaggttctgcactcctgaatcttca

SEQ ID NO: 45782 - DNA, 272 bp, Zea mays
agctcttccaaagactgcagcgcctcagggcccaggtttcaacagattcttcaaaatgccatcccaaataagagcatgccatggaaaccatgatgcttacatttcacaggtttgcaggggaaaaaaactacttgacaaaggaggacctgagagtgctcatggaaagggagttccctgggtttttggaaaatcaaaaggaccctctggctgtggacaaaataatgaaagacctggaccagtgccgagaatggaaagtgggcttcagagctttc

SEQ ID NO: 45783 - DNA, 303 bp, Zea mays
cactcctaccccacacagaagcggcggcggcggacaaacgcaggcgaaggcgagggtgtgagggaaggagcaccagccatggtgcacgtcaacttctaccgcaactatggtaagacgttcaagaaaccaaggcgtccttatgagaaggagcgtcttgatgctgaactgaagctggtcggtgagtatgggctgaggtgcaagcgtgagctttggagggtccagtatgcactgagcaggatccgtaatgctgcaaggcacttgctcacccttgacgagaagaaccccgtcgtatctttgagggtg

SEQ ID NO: 45784 - DNA, 301 bp, Zea mays
tgcaagaagaaagaatctgggaagtcatcagttttacttgatgtgaagccatgggacgatgagactgacatggccaagctcgaggaagctgtaaggagtgtccagatggaagggctgctctggggcgcatccaagcttgtcccagttggatatggtatcaagaagctgcaaatcatgatgaccatcgtcgacgaccttgtctctgtcgacactctcattgaggactatctgtgcgctgagccagtgaacgagtacgtgcagagctgcgacatagttgccttcaacaagatctaggcgtgac

SEQ ID NO: 45785 - DNA, 299 bp, Zea mays
tgcaagaagaaagaatctgggaagtcatcagttttacttgatgtgaagccatgggacgatgagactgacatggccaagctcgaggaagctgttaggagtgtccagatggaagggctgctctggggcgcatccaagcttgtcccagttggatatggtatcaagaagctgcaaatcatgatgaccatcgtcgacgaccttgtctctgtcgacactctcattgaggactatctgtgcgctgagccagtgaacgagtacgtgcagagctgcgacatagttgccttcaacaagatctaggcgtg

SEQ ID NO: 45786 - DNA, 300 bp, Zea mays
caacttctcagtgttctactacgagatcctcaactcccctgaccgtgcttgcaaccttgcaaagcaggcctttgatgaggcaatctccgaactagacagcctgggagaggagtctacaaggacagcactctgatcatgcagctcctgcgtgacaacttgaccctatggacttccgacaccagcgaggacgccggagatgagatcaaggaagcagctgctgcccccaaagaatccgcccccgagggccagtaagacggatccgatctcccgacctgatgcgtgtctgctgatgtcggggat

SEQ ID NO: 45787 - DNA, 299 bp, Zea mays
gaggccttcagacaagcccctgcgtctcccccttcaggatgtgtacaagattggtggtattggaactgtccctgttggacgtgttgagactggtgtcattaagcctggtatggttgttacttttgggcctactggtcttactactgaggttaagtccgttgagatgcaccatgaggctctccaggaggcccttcccggtgacaatgttggcttcaacgtgaagaatgttgctgtgaaggatctgaagcgtgggtatgtggcctccaactccaaggatgaccctgccaaggaggctgcta

SEQ ID NO: 45788 - DNA, 289 bp, Zea mays
aagaagcaaagcaagtgtctgctcactgagtcctgcgcaagagctcgctctcggagaagaaaacgcggcaggcgagaatggagggaattgcacgtaggagcaagaaagggaaggtgctggtcacaggggcgtcgggcttcggcgactcctggctcgtcatgaagctcctccaggccggctacaccgtccgggcgaccgtgcgcgatcccgcgaacgttgggaagacgaagccattgatggaccttcgcggagcaacggagcgcctgtccatatggaaagccgacctggc

SEQ ID NO: 45789 - DNA, 296 bp, Zea mays
atgaagaggactatttcgggcatgttgggtctgcttccatctgatcagttccgtgtcattgtagaagctctttggaatcccttcttcaagttattggtatcttcaattatgactgggtatactctgcgaaatgctgaatacaggctgtcttttgaaagaaatcttgaactgtctgaagaagttgcagaatgcccaaagagtgatgtcattgaagataatcatcatgacatcaatttgggtacacctgtcactatttttagattagcagaagaagacatgccccaggaccctggaaa

SEQ ID NO: 45790 - DNA, 265 bp, Zea mays
tgaagaatgagaagttctctactcggcttcatctccgtctctgtcttgatggatgttaccatgttcttgacgagtctagaaactacagcagtgacctgagaccaactgccaagcaactctggaagccgtctattggtttgcttgaacttggtgtccttggtgctcaagggattgttcccatgaaaactcgagatggaaaaggttcatcagacacctattgtgttgctaagtatgggtcaaaatgggtaaggacacggaccatcat

SEQ ID NO: 45791 - DNA, 298 bp, Zea mays
agaagatggcagagaagaaccgcaaggatgccgaagattggttcttcaccaagacagaggagctgaaccgcgagtggccaccaacagcgaactggtgcagagcggcaagagcgagatctccgagctccggcgcacgatgcagaacctggagatcgagctgcagtcccagctcagcatgaaagcatccctggagaataacctggaggagaccaaaggccgttactgcatgcagctggcccagatccaggagatgatcggcagcgtggaggagcagctggctcagctgcgctgcgagatg

SEQ ID NO: 45792 - DNA, 301 bp, Zea mays
cccgcatcacctaccaacgccgacaccatgggggccttcgcgaaggaggagcaccagttcctcgccgagctcggcctcgcgcagcctaacccgggcgcgttcgcatgccgtcgcgtggtggcgtctcaggtcccaccgtcacctccacgagcccgaccaacaatcaggtcatcgcagaggtcgtggaggcgtccgtgctcgactacgaggagggcatgcgcgcctgcttcgacgccgctaagacatggatggcgattcctgctccaaagcgacgagagatcgttaggcaaatcggtgatgc

SEQ ID NO: 45793 - DNA, 294 bp, Zea mays
accaaaaggaagctgctagcagcaagcttttcaaacgtaaagagtttaacctggaagaattaggtataggtggattaagcgctggattcactgagcatatgtcgtagggcagtcgcttcaagagtctttccgcctcatgttgtcagtaagtttggcatcaaacatgttaatggtatattgctatatggacctcctggtactggcaagactctaatggccagacaaattggaaagttactgaatggataagatcccaagattgtgaatggacctgaagttctgatcaagtttgtt

SEQ ID NO: 45794 - DNA, 292 bp, Zea mays
ggattcagttggtatcgtggccatttcgcatggttgccgtggcgttggtgcgcgcttctgttgtttggtgaatctagaaccaacatgaggcatagagatcttgaaagatcgtccctcttggttccgtgattgccgaagtcttgaagtgtttacaaggtttccagctggaaatgggggaacaattgaacttatttacatgcagatgtatgccccaacaactttagtccctgcacgtgatttttggacactacgatacacgacaacaatggaagatggcagccttgtggtctgt

SEQ ID NO: 45795 - DNA, 293 bp, Zea mays
cgccaccacagccgccagcagtccatcaccggttcccttcgaatgggccgcaagggacgcaaggctagggtttcgcgcgacgccgacgtcgacggcagcgaggatgagatggccgcacgtcctgccgccgctgcgggcaggagcctctacgagatcttgggagttgagaagactgcttcacaacaagaaataaagaaggcatatcacaaattggctctgcgcctccatccagataagaatcctggggatgaggaagcgaaagagaagtttcagcagctgcagaaggttatatc

SEQ ID NO: 45796 - DNA, 291 bp, Zea mays
ccttcctctccccactccgaaccctagccaccgtgctcacttcccagctcgaacccgccgcgggcgagtccacggcagtgcaggacctgatcctgcggtctaggccgcggcggtgagatggtgatggtgtcaggtggcggagggaacgcgtgggcgaaggagatgaccctccgccgcaggatagccagcatattcaacaagacgcaggaacacttccctactctgaaggactacaacgattatctggaagaagttgaggacatgactttcaacctgatcgaagggatagat

SEQ ID NO: 45797 - DNA, 294 bp, Zea mays
gagcaccggaagcggagacgtgagcactcgaccaaccccgtcgatccggctgcggcgcggcgtgctagatcgctaccgaccatggtggtggaggagatcgccgagggggtgaagaacctaaccgtcaccggagatgcggcggcttcaggcggagaggggcagaggaggggcggcggcggcagcagcaaccgcatccaggtgtccaacaccaagaaacccctcttcttctacgtcaacctcgccaagaggtatatgcaacagcacggcgatgtagagctatccgctcttgggatg

SEQ ID NO: 45798 - DNA, 293 bp, Zea mays
cggctcgaggcacgtacggtctcaggcgcatcggcctcgccgctgcacaacgccggagacgagacgacggcggctgcgggatgacggtcttccacttcctcaactgcgccttcctcaccttcggccctcacgtcgtctactactccgccacgcccctgtcagagtatgatacaatcggcacttctataaaagcagctgctgtttatcttggaactgcgcttgtaaagcttgtttgcttggcaacattgctcaaagtacctgagaatgatagctttgacccctatcaggagtta

SEQ ID NO: 45799 - DNA, 274 bp, Zea mays
aaagcatcatgctgcaggcacagcagcaggtgcaaatgcagaaactcgtataccaactcggaagttgcctgccgacaataggtgtcagcctgacacaggtagtgacagcagatgaactgagagatgatgaggaatacaatgacattgtggaggacatgagggtagaaggacgcaaatatgtcccacataatgccattgcagagtgttttatagtccgaccctatgcaatattggcaatcgggctttaacccacagaagacactattcttttgag

SEQ ID NO: 45800 - DNA, 289 bp, Zea mays
ggctcaccacaccaaccaacaagcaaaaattccccaatcctctcgtctccgcggcgaagatgtcggggcgcggcaagggcggcaagggcctgggcaagggcggcgcgaagcgtcaccggaaggtgctgcgcgacaacatccaggggatcacgaagccggcgatccggaggctggcgcggcggggcggcgtgaagcgcatctcggggctcatctacgaggagacccgcggcgtgctcaagatcttcctggagaacgtcatccgcgacgccgtcacctacaccgagcacgc

SEQ ID NO: 45801 - DNA, 276 bp, Zea mays
agccgccgccgctgctcatctcacatccctcgagaagacgcctgctcctcgccgatcgatacgatggccgtcttctcggacctcaacaccgccgacggcttcaagtccctcgaggctcacctcgccggcaaaacctatgtgtctggtgactccattactaaggatgacattaaggtcttcgccgcggtgccgtcgaagcctggcgctgagtttcctaatgccgctcgctggtacgagaccgtctctgcggctgtagcctcaagattccctggtaag

SEQ ID NO: 45802 - DNA, 287 bp, Zea mays
acggttctagatcgcgagcggccgctcggatctagaactagtgactttcttctcccgtccaccttgcgtactcggcgcgactctcgtggcgcagcacaacctaggcgaccgccgccgcccctacgccacgtgctcgagtctagcctcgtcgattgcttccccagtttaattgatctacaagcttcagaacatgttcaagaatacatttcagtctgggttcctgtccattctttatagcctcgggaccaagccattgcagatatgggataaggaagttgtgaatgggc

SEQ ID NO: 45803 - DNA, 282 bp, Zea mays
ctccagactacgcggcctgctcaccgtccggcgagctacggactcagcagatcaccgtcgctcgagttgtacctgaaggcgcgctcgttgaaccggccgcgagataagggcggcgggaaggcgggcgacgatgccggtggcagcgtcggccatctacttcctcaaccttcgcggggacgtcctcatcaaccgcctctaccgtgatgatgttgggggaaatatggttgatgcgttcagaatgcatatcatgcagacaaaagaacttggcacatgccctgttcg

SEQ ID NO: 45804 - DNA, 289 bp, Zea mays
gtcctctcgcatccgcagcttccccagccagctagggtttgcagatgacgaccgcggcgcgccccacctgggcgccggccaagggcggcaacgagcaggggggcacccgcatcttcggcccctcccagaagttctcctcccgcgacctcgccgcgcacacctccctcaagccaagaaaagacggtcaacagacccaagaggagttacagaagaggaatctcagggaggaacttgaggaacgtgagcgcaacactactcttccaaggataagtcctatgccgaagaaaga

SEQ ID NO: 45805 - DNA, 257 bp, Zea mays
ctctcctcctctccttacacaaccgtccatcgacgctccctccggtctgcgctcccacagcctcacccctgcggtgccgatgattcgcgtcgccctttgttggaatgacgatggagcagaccttcatcatgatcaagcccgacggcgtccagcggggcctgatcggggacatcatcagtcgcttcgagaagaaagggttctacctcaaggggatgaagttcatgaacgtgcagaggtccttctcgcgaagaattagg

SEQ ID NO: 45806 - DNA, 284 bp, Zea mays
caagcggtccttcaagtatgcttgggtgctcgacaagctcaaggctgagcgtgagaggggtatcaccattgatattgctctgtggaagtttgagaccaccaagtattactgcaccgtcattgatgcccctggacaccgtgacttcatcaagaacatgatcactggtacctcccaggctgactgtgctgtccttatcattgactccaccactggtggttttgaggctggtatctccaaggatggccagacccgtgagcatgctctccttgcgttcactcttggag

SEQ ID NO: 45807 - DNA, 284 bp, Zea mays
ccttcctccccaggacgtgatgaatgctctcctggaggctctctttggtggtgtgggtaagggattcaccaaagaggttgtgaagaacaagaagtaccttgcagttgctgtgccagatgagggtgcccagacccttctggttcaggccattgaggcttttggtggtaagtagcaaccctgaggcgctgaaggaggttcccgttgtcctcaaagccctctacgatggagatatcctggacgaggaaaccattgtggactggtacaatgatgctgtcgcagctggg

SEQ ID NO: 45808 - DNA, 313 bp, Zea mays
gataagggcgacctccaggcccttgcgaaccctagcgccgcaccctcccgcccaccgccgtcgccgcccaaccgcagtaaggaggaaggagcaggaagatgccggcggggcacgggctgcggtcgcggacccgcgaccgtgttcgcgcggcccttccgcaagaaggggtacatcccactcaccacgtacctgcgcacctacaagatcggcgactacgtcgacgtcaaggttaacggcgccgtgcacaagggcatgccgcacaagttctaccacggccgcaccgggagcgtctggaacgtcaccaagcgcgcca

SEQ ID NO: 45809 - DNA, 253 bp, Zea mays
ggaggaggggagctctgatcgattcacccaagatgtctgaggtggtggcgatggcggggcaggcctacatgaagcagctgcaggcccacccgctgcgcaccaaggctatcacctccggcgtcctggccggctgcagcgacgccgtcgctcagaagatctccggtgtttccaagctccaactcaggaggctccccctcatcgcgctatatggatttgcatacgcgggaccgtttggacatttcctccacaagct

SEQ ID NO: 45810 - DNA, 301 bp, Zea mays
atggaatctgctggtatcgatgccgctttgatgggtaaaccaaatcgtgagcctcgtgttgttgtacaaactgttagtgaagttgatatcttggacgatgggtatcgttggcgcaaatatgggcagaaagtagtgaaaggaaatcccaacccacggagttactacaagtgcacaaatacaggatgcccggtcaggaagcatgttgagagagcatcacatgacccgaagtcggtgatcacaacatatgaaggaaaacataaccatgaagtccctgtttcccagaatgcaagccatgagatgt

SEQ ID NO: 45811 - DNA, 254 bp, Zea mays
ctcgaggccgctccgccacctcgccactcgcctcttctcgctctcgccaccgggccagggaagggaccatccgatcggctccgtcatggctggagctgctgctctcaatgagggtatcctttcttccgtgtccgagaaaaatgttgctgctcacccatggcatgatttggagataggaccagaggctcctgaagtgttcaattgtgtggttgagattcctagaggcagcaaggttaagtatgagttggacaaga

SEQ ID NO: 45812 - DNA, 308 bp, Zea mays
cagcaagcagccgttccccccaaaaaggccagagctcagcagagccccgcaggcctcaccgccgcaccgaccagaaaccccagtcgatcggcggcggcgatgtcgctgtcctcggtgaagatcggcgaggaggtttggctcacatgcctctcccacgccctcactaccgagaccgaggaggtcatgggcctcctcctcggcgacatcgagctttccagcaagggcgccaccgcccttatatggggagcgtctccgcagatgaggtgcgagcggaagaaggaccgcgtcgaggtcgacccggagcttct

SEQ ID NO: 45813 - DNA, 299 bp, Zea mays
ggaggataagaagtgtaaaggtgaatctagattcccagcgcaggtgaggatctgcattaggaagctgtgcaagccgttggaagaggattccttcaggccagttttgcaccattatgatgggccaaagttgcgccttgagctctccatcgcggagacattgtcactgctagacctatgcgggaaggaaggcatctgagctgtcgaggaggtggtggtggttgccttgtgagcttctagtaaataccaatcatctttgtatgttttgtggatggtggttggcaacgttgtttatttatgcg

SEQ ID NO: 45814 - DNA, 303 bp, Zea mays
gtgaagaatgttgctgtcaaggatctcaagcgtgggtttgtggcctccaactccaaggatgaccctgccaaggaggctgccagcttcacctcccaggtcatcatcatgaaccaccctgggcagattggcaacggctatgcccctgtgctggactgccacacctcccacatcgctgtgcaagtttgctgagctcattaccaagatcgacaggcgctctggcaaggagcttgagaaggagccaaagttcctgaagaacggtgatgctggtatggtgaagatgatacgcaccaagccatggtggtg

SEQ ID NO: 45815 - DNA, 292 bp, Zea mays
caacaaacttgctcgctggactgcccaggctttgcttgctggtgctgacatcatgaagttgggctatgtgtcacgggtgaacccccgtgatcagtacaaccattctgtgctcactgtgatgggatacaagccaagggattttgctgcacatatcaacctcaacactgcaaacatgtggggaatcgtcaagtcaattgtggacatctgcatgaagtttgaagagggcaagtatgtgtttgtcaaagatccagcaaagccacagttgaggatctatgaggtaccatctgatgcg

SEQ ID NO: 45816 - DNA, 295 bp, Zea mays
ccacccggtaaacacatacgtcgtgcatctcgacctcgagacccccgccgccgagcgcgccgaactcgcctctgccatccacgcggaccccgtctacgctaggttccgcaacgtcaaggtcgtcacacgggccaacctggtcacctaccgtggcccgaccatggtggccaacacgctgcacgcggctgccatcctgctgcgcgagggcggtgattgggactggttcatcaacctctcggcctccgattatccgctcgtcacccaggacgatctattgcatgtgctttctgagttg

SEQ ID NO: 45817 - DNA, 283 bp, Zea mays
accaggccaagctgtcggtcgtgcgttcacaaatatatttaaatcttccgccatgaaattatttaaatcttacagttcaggcaccagctaagcctaagatgctgagtttccatatgtgataatgttggactgtcttgttcatatcggtgtggcatatcattatgcttgaggtggtggtatgtaccttctattaggtaggcctcttgacaacttatgtctcagcaggatggctccctctagaattcatgtaacatgtgcattagtttatggggcttcaccaaca

SEQ ID NO: 45818 - DNA, 312 bp, Zea mays
  unsure (1)..(312): unsure at all n locations
ctctcgtgcgagtgacatctaggtttccagacgccttcggtgagtacagggaaggaagtcgccatggctgacgacgaacaggcggagaagaaggaggaggtccccgagcttgctccttttgacccaaccaagaagaagaagaagaagaaggtggtaatacaagagccatcagatgaggtggataacttggcagagaagacagagagcttgactgtaaccgagtctagtgagccaagctttgcgggcatgaanaagaagaagaagaaacatgtggaacttgattcttctcttaccgagaccggagatgttgat

SEQ ID NO: 45819 - DNA, 307 bp, Zea mays
gcctccgctccgcctcagcgcatcgccctccgccacagcgtaccgcgacctcatcgatcaccttcaactttcaatcatggcggacgtcgatgtcgaatcggagttgccgccggcgctcccaagaagaggacgttccgcaagtacagctaccgtggcgtcgacctagatgcgcttctcgacatgtccacggacgacctcgtccagctcttccccgcgcgcgccaggagaaggttccagaggggtctgaagaggaagcccatggcactcatcaagaagctgcgcaaggcgaaaaaggatgctcctgctg

SEQ ID NO: 45820 - DNA, 289 bp, Zea mays
  unsure (1)..(289): unsure at all n locations
cttgcagggagagaaggacgacaagatcatcgccgtctgcgccgacgaccccgagtaccgccactacaacgacatcagcgagctctcccctcaccgcctccaggagatccgccgcttctttgaagactgtacgcgcgcttgctctctctctctctctctgggggcgcgctttctggngnctctctctctctctctatctctcggcgctcgctgtgtgcgcgcgcggtgctctgtgagcgcgcgcgcccctctgtatgagtgcgtgtgtgggtgttgtgtctcgcgctct

SEQ ID NO: 45821 - DNA, 301 bp, Zea mays
ctcgttcctgtcgcgcacgacgacctccacttcacatctcccccggcggcggcgcggtcagttgaacaatggcggactccaaggccacctgggcggtcacgctccgcacccgcaagttcatgaccaaccgcctcctggcccgcaagcacttcgtgcttgaggtgatccaccccggccgcgccaacgtctccaaggcggagttgaaggagaggcttgccaaggcgtacgaggtgaaggacccaaacaccatctttgtcttcaagttccgcacccacttcggagaaggagagtccactggttt

SEQ ID NO: 45822 - DNA, 299 bp, Zea mays; identical to SEQ ID NO: 14333

SEQ ID NO: 45823 - DNA, 299 bp, Zea mays
ggccattgctattcttggtttcaatgagatcatggtgcttattaggaatcccatttatctgttcttgctatttgtgggctacttgatggtcaaagctttggcgatgcagctagatgtcagcagagaattccagaatggagtggttcctggaataatctctgtgtcggtgaagctcctaccagcgatacagaacctggtgaacaaagtggcagccgagcagcaagctgagcaccagcagcagcacccgcaccctcaccctcacactcaggccccaggacccccacagccacagatgcagc

SEQ ID NO: 45824 - DNA, 300 bp, Zea mays
atcctgcgatcctcgaagcctccgccgagcatcgatcatgtcggcctactgcggcaagtacgcggatgagctcatcaagaatgctgcctacatcggcacccctggcaagggtatccttgctgctgatgagtcaactggcaccattggcaagcgcctttccagcatcaatgtcgagaacgtggaggagaaccggcgggctctccgtgagctcctgttctgctgccctggtgccctccagtacatcagcggtgtgatcctcttcgaggagaccctctaccagaagaccaaggatggcaagct

SEQ ID NO: 45825 - DNA, 297 bp, Zea mays
cctccccaaaacacatcctgcgatcctcgaagcctccgccgagcatcgatcatgtcggcctactgcggcaagtacgcggatgagctcatcaagaatgctgcctacatcggcacccctggcaagggtatccttgctgctgatgagtcaactggcaccattggcaagcgcctttccagcatcaatgtcgagaacgtggaggagaaccggcgggctctccgtgagctcctgttctgctgccctggtgccctccagtacatcagcggtgtgatcctcttcgaggagaccctctaccagaag

SEQ ID NO: 45826 - DNA, 296 bp, Zea mays
aaacttcttcctctctggatcttacacgaaacaggactacattgacagcatggaaggtgcaactctctccggcaagcgaacgtcggcctacatctgcggtgccggggaggagctgctggccctccgaaagaagctactcatcgacgacggcgagaaggcgctggggaacgttcaagtcctgcaggctagctgaataacccctcctgcactgcagagaagcttggatctttccaaccacacatacatgctggaatgggcaaaccaaccaaccattggcttttctcgcttcagggtgc

SEQ ID NO: 45827 - DNA, 292 bp, Zea mays
attcatttataattgctactaagacagttagcgcagaagtatatgtttttgactatagcaagcacccatctaagcctccactagatggtgcatgcaaccctgatttacggctgaagggacataattctgaaggatatggcttatcatggagtatttttaaagagggacatttgttaagtgggtctgacgatgctcaaatttgcttgtgggacattaaagcaaatagtagaaacaaaagtcttgacgccttgcagatttttaagcatcatgatggtgtcgttgaagatgttgc

SEQ ID NO: 45828 - DNA, 291 bp, Zea mays
ggaagccagaagaaatcacaaaagaagaatatgctgccttctataagagcttgacaaatgactgggaggagcatctggctgtgaagcacttctctgtggagggtcaactggagttcaaggctgttctctttgttcctaagagggccccctttgatctctttgacaccaagaagaagcaaaacaacatcaagctctatgtgcgcagggtgttcatcatggacaactgcgaagagctgatccctgagtggctgagcttcgttaagggtattgttgactctgaggaccttcccc

SEQ ID NO: 45829 - DNA, 289 bp, Zea mays
gagaaatacttcatacacaaccatttgtcatttacggtgaagtatcacaaggacgataatttggaacattctagaatagtgggatttgatctcaacccacacagtgtcaagcaccaggttgacgataaatggaatggtgtagacacccgcttgagcacttgtgatcctcatgcgagcaaatttgtaataaactctgattctcctcaggaagttgaagttggcaaggaaatcatattcacatatgatgttcgctttgaggagagtgagatcaagtgggcgtcacgctggg

SEQ ID NO: 45830 - DNA, 285 bp, Zea mays
ctgatcatattcctaaggaacatacttaagtatgccctgactgtagatgaactagaaaagatgcgcatgcagcgattcattaagattgatgggatagtcaggaccgatataacctagcctgctgggtttatggatgtcatcagcattgacaagactggagagaacttaccgtctgatactatgacaccaagggtcgctttgctgatcatcgaattacacctgaggaggccaagtacaagttgtgcagcgtgagaatgatctatgtgggcacaacatgaatcccac

SEQ ID NO: 45831 - DNA, 289 bp, Zea mays
  unsure (1)..(289): unsure at all n locations
gcaggatttgcctcagtagcccagggtatggaaggctgcgttcctagcaacaaagagacgggggcgtatggcatgccatcagccaccaacaatccagatgcctctggtcagtccttcagcgaactnatgaagagctcgaggaagcctccgttgcagtacgatgcctccgaatctgcagactgtggcccaggtggtaagggcgcgaagaagaaaacgaagaaaggaaagcagattgacccttctcttcttggtttcaaggtccacagtaaccggatcatgatgggcgaga

SEQ ID NO: 45832 - DNA, 163 bp, Zea mays
ccaccaccaagtgccgggacatcttctgaagtaaatacttccgtatccaagaaggcagctccggaaccttttgatccttttggcgctattccgttgaacaattttgatggacctgacccatttggtggcttcagctcaaatgctggatcatctaccgcagcag

SEQ ID NO: 45833 - DNA, 291 bp, Zea mays
cagcagcagaagagcagccccagagctccagcaataatggccgagaagggcgtgaaggtgttggggatgtgggcgagccccatggtgatcagggtggagtgggcgctgaggctgaagggcgtcgagtacgagtacgtcgacgaggacctcgccaacaagagcgccgacctgctccgccacaacccggtgaccaagaaggtgcccgtgctcgtccacgacggcaagccggtcgcggagtccaccatcatcgtggagtacatcgacgaggtctggaagggcggctaccccatc

SEQ ID NO: 45834 - DNA, 182 bp, Zea mays
agctaagttcgatgatcccagcggcaattgtcttagtcctgcgggtgaatataatttacgcctgggtatcataaaagagttgcaccctgatatacttgccacacatgcaagcagccctcaggtttttgaaggtcacccatttattgttgaagctgggataagcattggtggaaaagatgtta

SEQ ID NO: 45835 - DNA, 293 bp, Zea mays
gtcaagccccgcgttcccagcacccgcaagcctaagcctaccaagctcaggtcgagcatcacgcctgggacggtgctgatcctcctcgcagggcgcttcatggggaagagagtggtgtttctcaagcagctcaagtctggcctgctccttatctctgggcctttcaagatcaatggagtaccgatccgccgtgtgaaccaagacctatgtcattgctaaatcacccaaagttgacatctctggtgttgatgtcgccaagtttgatgacaagtacttggccagggagaagaagc

SEQ ID NO: 45836 - DNA, 288 bp, Zea mays
atcatcgatctcgtttcaaatccatccatcctcgtttcctccgtcccgcagcatctcaaccccatggccaagatcaagatcgggatcaatgggttcggcaggatcggaaggctggtggccacggtagccctgcagagtgacgatgtcgagctcgtcgccgtgaacgaccccttcatcagcaccgactacatgacctacatgttcaagtacgacactgtgcacggacagtggaagcaccatgaagtcaaggtgaaggactccaaaacccttctctttggtgagaaggag

SEQ ID NO: 45837 - DNA, 133 bp, Zea mays
cagccatcaggtgagccaatatgtgtgcatacaaatacatccaggagctgtggaggaagaagcagtccgacgtgatgcgcttccttcgaagggtccgctgctggcagtaccgccagctctctgcgctgcacag

SEQ ID NO: 45838 - DNA, 276 bp, Zea mays
  unsure (1)..(276): unsure at all n locations
cgccgccacccctacaggtaaggaagaggaggagggcaggatgtcgcaccgtaagttcgagcacccgaggcacggctccctcggcttccttcccaggaagcgctcctcccgtcaccgcggcaaggtgaagtcattccctagggatgaccccaacaagccttgccatctcactgccttccttggctacaaggctgccatgactcacattgtccgtgaggttgagaagccaggatccagactccataagaagganacttgtgaggctgttaccatcat

SEQ ID NO: 45839 - DNA, 279 bp, Zea mays
agcaagtgtctgctcactcagtcctgcgcaagagctcgttctcggagaaaaaaacgcgggaggcgataatggagagaggtgccggtgcgagcgagaaagggacggtgctggtcacgggggcgtcgggcttcgtcggctcctggctcgtcatgaagctcctccaggccggctacaccgtccgggcgaccgtgcgcgatcccgcgaacgttgggaagactaagccattgatggaccttcccggagcaacggagcgcctgtcgatatggataagcgacctgg

SEQ ID NO: 45840 - DNA, 284 bp, Zea mays
agagagcttgttccgtccaggcaaccaaaaagcaagttgccccgccgcgcagaggaagaagagagcagaggaggatggctcgtacgaagcagaccgcccgcaagtccacgggaggcaaggccccccgcaagcagctcgccaccaaggcggcgaggaagtcggcgccgacgaccggcggcgtgaagaagccccacaggtacaggctcggaaccgtggcgctgcgcgagatccgcaagtaccagaagagcacggagctgctgatccgcagctgcccttccagcgct

SEQ ID NO: 45841 - DNA, 134 bp, Zea mays
gccggcacgtgcttccaggcagagtgggatgactctgtgcccaagctgcacgatcagctggctgggaagtaggggcgctgcagagcccgcagccccggggaccccacagtacagtcaagtcgtataaagcatgt

SEQ ID NO: 45842 - DNA, 282 bp, Zea mays
aagatcgacaggcggtctggcaaggagcttgagaaggagccaaagttcctgaagaacggtgatgctggtatggtgaagatgataccgaccaagcccatggtggtggagacgttctcagcgtatcctccccttggtaggtttgctgtccgtgacatgaggcagacggttgctgttggagttatcaagagtgtggagaagaaggacccgaccggcgccaaggtgaccaaggcggctgccaagaagaaatgatgcgatcctgcgcctgctttagcaatacctagt

SEQ ID NO: 45843 - DNA, 273 bp, Zea mays
ctggtgctccctgtacctgcctttaatgtgattaatggagagacacatgctggaaacaagcttgccatgcaggagttcatgatcctcccaactggagcctcctcgttcaaggaggccatgaagatgggagttgaggtgtaccacaacctgaagagcataatcaagaagaagtacggtcaggatgcgacgaacgttggggatgaaggtggttttgcacctaacattcaggaaaacaaagaaggccttgaactattgaaggcagccatagaaaag

SEQ ID NO: 45844 - DNA, 261 bp, Zea mays
ctacatcatctctggccctgtggtggccatggtctgggagggcaagagcgtcgtcacaactggccgcaagatcattggcgccaccaaccccctggcttctgagcccggcaccatccgtggcgactttgctgtcgtcattggcaggaatgtcattcatggaagtgacagcattgagagtgctaataaggagattgccctgtggtttcacgagggccttgctgattggcagagcagccagcacccctggatctacgagaagta

SEQ ID NO: 45845 - DNA, 275 bp, Zea mays
cttcgaagcaataaaaaagctactgacctccccaaagtttacattctgttatgatgcgctccatggtgttgctggagcttatgccaaacacatctttgtggaagagcttggtgctgatgaaagctcactgttgaattgtgtcccaaaagaggactttggaggtggtcatccggatcctaacctcacctatgcaaaagagttggttgaacggatgggtcttggaaagtcatcctcaaatgttgaacctcctgaatttggtgctgcagctgatggag

SEQ ID NO: 45846 - DNA, 279 bp, Zea mays
accagaaggagctctttgtcgcagccgagggcatgtacacgggccagttcgtctactgcggtcgccgcgccaccctctccatcggcaacgtgctgcccctccgcgggatccctgagggtgccgtcgtctgcaacgtcgagcaccacgtcggtgaccgcggtgtcttcgccagggcctctggggactacgccattgtgatcagccacaaccctgacaacggcacatcgaggattaagctgccctctggcgcaaataagattgtccccagcagctgccgtg

SEQ ID NO: 45847 - DNA, 279 bp, Zea mays
aacatcttcttttgatagaactattaaattatggaatgctgccgatcctggattctctttgcatacattcactgggcacaacggccaggtcacatcattagattttcatccaaagaaaacagaccttctatgctcttgtgatggcagtggtgaaatccggtactggaatgtgacccagtttgcatgcttgcgtgccataaagggtggtagtgcccaagtccggtttcagcctcatgttggacagttttaagcgcagctgctgataacgtggttccatat

SEQ ID NO: 45848 - DNA, 286 bp, Zea mays
cgtccgccttgcccttcacgaaggcttggtcctcctcctagtatctccactccccccttcacagatccgttcctccagctagggttagcggacctctgcagcgatggcgatcaagctgactaatgcggagaataatatcgcttactacaagacgctgtgcagcctgctcgataagtacaccaaggtgctcatcgccctggccgacaacgtcggttccaagcagctccaggacatccgccggggcctcaggggcgactcggtggtgctcatggggaagaacacgctc

SEQ ID NO: 45849 - DNA, 278 bp, Zea mays
cggctcgacctcgatccgatccaccgagtgcacaccacctttccccactccgatcgaatcgatggccgccgagggcgagaagaagatgataaccctcaaaagctccgatggcgagtagttcgaggtggaagaggcggtggcgatggagtcgcagaccatccgccacatgatcgaggatgactgcgccgacaacggtatccctcttcctaacgtcaactccaagatcctatccaaggtaatcgagtactgcaacaagcacgttcatgccgccgccgccg

SEQ ID NO: 45850 - DNA, 257 bp, Zea mays
cgtccttttcctttcataaaccccaagctgcgccgcaatagctcgccccctcgttcgccgcctctcctgctcctaccgcagctctccctcaggtttagtgttcgcaatggcggccttcaacaagcttgctggccttctaaggcacagtgctctggtgagcggtatcactggtggctcttctcctgcagtgttcaatgctgcacggctcatgtctaccaagctatttattggtggtcttgactggggtgttgatgacg

SEQ ID NO: 45851 - DNA, 246 bp, Zea mays
acattatgggaatttcagccaaaggagctaggtgttggagatgtcatcacaggtggagatctatacgcgactgtctttgagaacacattgatgcagcaccatgttgctcttccaccgggttctatggaggtaataagttacattgcaccagctggtcagtacaaccttcaggacacagtgctagaattggaatttcagggcataaaaaagaattttaccatgcttcaggcatggcctgtgcgttca

SEQ ID NO: 45852 - DNA, 248 bp, Zea mays
aggagggagagttcgaggaccgaggcggcgtcgggcgagatgaagcttaacgtcaagaccctcaagggcaccaacttcgagatcgaggcgagccccgatgcgtcggttgctgacgtgaagaggatcattgagaccactcagggtcagagtacctaccgggcggaccagcaaatgcttatataccaagggaaaattctcaaggatgagaccactttggaaagcaacggagtttctgagaacagcttcct

SEQ ID NO: 45853 - DNA, 267 bp, Zea mays
cgactgtgcgagggaggaagaggcgaggagaagatgcagatcatcgtgaagaccctgacggggaagaccatcaccctcgaggtggagagcagcgacaccgtcgacaacgtcaaagccaaaatccaggacaaggaagggattcccccagatcaacagcgactgatattcgctggcaagcagctggaggatggacgcacgctggctgactacaacatccaaaaggagtcaactcttcatttggtcctcaggcttaggggtggaacaatg

SEQ ID NO: 45854 - DNA, 251 bp, Zea mays
gaggtgatcgcgtgggagcagctgggcatccacagcaagccggtgggcctgctgaacgtggacgggtagtacgacttcctgctggcgttcatcgacaaggcggtggacgacgggttcatcaagccctcccagcgccacatcttcgtcagcgcccccgacggtgcggaactcgtccagaagctggaggggtacgaggccgtgcaggacgaggacccggcgacgcccaggctggggtgggagatcgagcaggt

SEQ ID NO: 45855 - DNA, 133 bp, Zea mays
gtgtggtgttacttcagaaggtgaaactgcgaaatgcaaaaatgttgtctgtgatccttcttacttgcctagcaaggtaaggaagattggaaaagttgcacgtgcaatcgctattatgagccacccaattcca

SEQ ID NO: 45856 - DNA, 282 bp, Zea mays
aagctacccaatctctctctggactgagaagaccactgagaaggaaatttctgatgatgaggatgaggaagataagaaggacgaagagggtaaggttgaggatgttgatgagaaggaagaaaaggaaaagaagaagaagaagatcaaggaggtttctcatgagtggcaattggttaacaagcagaagcctatctggatgaggaagcctgaggatattaccaaggaagagtatgctgctttctacaagagcttgaccaacgactgggaggagcatctcgccgt

SEQ ID NO: 45857 - DNA, 275 bp, Zea mays
caaacgaccgcgaaccacaggtcgaaggcggcggcggcgatggggagcgacacggagacggagaagaaggcctcggtggcgctgatgtccatcgcgaaacccctcgctggaaagaagctctgcaagcggaccctcaagctcgtgcgacgagcctccgaggcgaagtgcctcaagcgcggagtcaaagaggtagtcaagagcattcgccgcgggaacaaaggattgtgtgtgatcgctggaaatatttctcctattgatgtgatacacatgtccga

SEQ ID NO: 45858 - DNA, 275 bp, Zea mays
gcccgggttcagtactgctcagaaattggacaaacttggcatgagaggaagcgacacatgtgaacttgtttttgagaactgctttgtgccacgcgagaatgtcctcggtgaagaaggcaaaggtgtttatgtcatgatgtcagggcttgatctggaaaggcttgtattagctgcgggccctattggccttatgcaggcatgccttgatgttgtacttccatatgttagacagagggagcaattcgggcgtccaattggtgaatttcagttcatac

SEQ ID NO: 45859 - DNA, 244 bp, Zea mays
gaagaggactctgtcttccactgcccagaccacgattgagattgactcgctgtatgagggcatcgacttctactccaccatcacccgtgccaggtttgaggagctcaacatggacctgttcaggaagtgcatggagcctgttgagaagtgcctgagggatgccaagatggacaagagcaccgtccatgacgttgtacttgttggtggctccactaggatccccagggtgcagcaactgctccag

SEQ ID NO: 45860 - DNA, 300 bp, Zea mays
  unsure (1)..(300): unsure at all n locations
ctcctcctcgcctcctctccctagcctccacgacgcaagggagactgacggaaagcgacgcggcgcgagcgagngagggccaaggggaagaggggaagcaccgcaccaggacccttgttcgccgccgccgcctctgatctccgcgaggttgtcaggattcaatatgtcgaccagcacattcgctacttcctgcacgctgttgggcaatgttagaacaacgcaggcctcccagacagcggtgaagagcccttcgtctctaagcttcttcagccaagttacgaaggttccaagcctgaagac

SEQ ID NO: 45861 - DNA, 300 bp, Zea mays
cctccctttccccttccctccctccctctccccgcgggccgccagaggcaatttcgccctcgattcgaccccgattcgtccgcccgcgaccgggattccctccgccaagcgcggatctgaacgctgcgctccgtgtcgccgctcgaatccgccatgaagggggccaaatccaagggcgccgccaaggccgatgccaagctggcggtgaagagcaagggggcggagaagcccgccaagggcaggaaagggaaggccggcaaggaccccaacaagcctaagagggctcccagcgctttcttc

SEQ ID NO: 45862 - DNA, 299 bp, Zea mays
gaagataagaaggacgaggagggcaaggttgaggatgttgatgagaaggaagaaaaggaaaagaagaagaagaagatcaaggaggtttctcatgagtggcaattggttaacaagcagaagcctatctggatgagaaagcctgaggagattaccaaagaagagtatgctgctttctacaagagcttgaccaacgactgggaggagcatctcgccgttaagcacttctctgttgagggtcagcttgagttcaaggctgtcctgtttgtgccgaagagggccccctttgatgtcttcgacac

SEQ ID NO: 45863 - DNA, 301 bp, Zea mays
caaggcttccccgtcacagcgacgttgttaaatagtggccacccattgccgcgttctcttcgctatcccttggttgccgcagcctccaaagccactcccaaacccccgcttccagagccttctcgaagctccccgccgcctcctccactcgcaccgatggcgaaggaaccaatgcgcgtgctcgtcactggcgccgcaggacaaattggatatgccctggttctcatgattgctaggggtgttatgcttggtgcagaccagcctgttattctgcacatgcttgacattccgccagcagctg

SEQ ID NO: 45864 - DNA, 304 bp, Zea mays
aatctccctagcagcagatcctcgtgcaacgccaagcgctagccttcactactgtcccgatggcccgcacgaagcagaccgcgactaagtccactggcggcaaggcgccaaggaagcagctggccaccaaggcggcgcgcaagtctgccccggcgaccggcggagtgaagaagccccaccgtttccgccccggcaccgtcgcgctccgggagatccgcaagtactagatgagcacggagctgctgatccgcaagctgccgttccagcgcctggtgcgtgagatcgcccaggacttcaagaccga

SEQ ID NO: 45865 - DNA, 291 bp, Zea mays
caaatagtgtggacaccctaatcgtcatcccaaatgataagttgctgtctgctgtttctccaaatacacctgtaactgaagcatttaatctggctgatgatattcttcgtcaaggcattcgtggcatatctgatataattacggttcctgggacagttaatgttgattttgctgacgtacgtgctatcatgcaaaatgcagggtcatccttgatgggtatagggactgctacaggaaagtcaagagcaagggatgctgctcttaacgccatccagtcgccgctgcttgata

SEQ ID NO: 45866 - DNA, 290 bp, Zea mays
cgatcccctcgtcgatccaaagatgcagatcttcgtcaagaccctcactggaaagactatcaccctcgaggtggagtcttctgacaccattgacaacgtcaaggccaagatccaggacaaggagggcatccccccggaccagcagcggctcatctttgctggcaagcagctcgaggacgggcgcacacttgccgactacaacatccagaaggagagcaccctccacctggtgctccgcctcaggggaggcatgcagatcttcgtcaagacactcactggcaagactatca

SEQ ID NO: 45867 - DNA, 294 bp, Zea mays
ctacattgataagaaatgtccattcaccggcactgtgtctatcaagggtcgcatcatcgccggaacatgccatcgtgctaagatgaataggaccatcattgttcgtaggaattatcttcacttcgtcaagaagtaccagaggtatgagaagagacactccaacatccctgcgcacatttcaccatgcttccgtgtcaaggaaggagatcatgtgatcattggccagtgcaggccagtgtcgaagactgtaaggttcaatgttgtcaaagttattcctgcaggttcgaagagtgg

SEQ ID NO: 45868 - DNA, 284 bp, Zea mays
gtgcaattttgctcagtagatcatggcgaaagctatgcgatatttggagggaaaggcatagaagtgaacttgtgggatatcacatctagtagtaagacatggtctgctaaatctccccgagcaaatagtcttggcatattcactcgaccttggttcactgctggaaccttcttgtgcaagaatgatcatcgtaaaattgttgcctgcacaaataatcatcaggtccgcttatatgatactgcattgcaaagaagacctgccgtctctgttgattttagggagtc

SEQ ID NO: 45869 - DNA, 287 bp, Zea mays
ccgccgcctcctccgccacccagcgctcgagctcctcgcgtcctgcgagcgcgcgccgcaacgccaccatgaagttcaacatcgcgaacccttccaccgggtgccaaaagaagctggaaatcgatgacgaccagaagctgcgtgccttttatgaccgaatgatatcccaggaggtcagtggtgatgctctgggtgaggagttcaagggttatgtcttcaagatcatgggtggatgtgacaagcaaggcttcccaatgaagcaaggagttttgacttctggtcgtgtc

SEQ ID NO: 45870 - DNA, 287 bp, Zea mays
atgggagaaactgcagcttgcagcgagggttatcgttgccatcgagaacccgcaggacatcatcgtccagtccgcccgcccctatggccagcgtgctgtcctcaagttcgctcagtacactggcgctcatgccatcgctgggaggcacacccctggtaccttcactaaccagctccagacctccttcagcgagcctcggctgctcatccttaccgacccaaggactgaccatcagccaattaaggagtctgctctggggaacatccccaccattgccttctgtgata

SEQ ID NO: 45871 - DNA, 287 bp, Zea mays
ctcagacctcgtttccggggcgcgggagacggagtaccgccgcccgccgacgaagcagagcgacacgaccgcgctgatgtactcgtccggcacgacgggggcgagcaagggcgtaatcctgacacaccgcaacttcatctcggcggcggccatgatgacagcggaccaggacgcgctcggagaggggcccaacgtcttcctctgcttcctgcccatgttccacatcttcggcttgtacgtcatcacgttcgcgcagatgcagcgtggcaattccgtcgtcgtgatgt

SEQ ID NO: 45872 - DNA, 283 bp, Zea mays
gttgatgcaattattgcgaacccaaccgcgtatggacatacacatgtggcagaagcactaaaagtaccaattcatatattctttaccatgccatggaagcctactaatgaatttcctcatcctctttctcgcgtgaagcagcctgctggatatcgactttcttatcaaattgtggactccatgatttggcttggaataagggatatgataaatgagttcagaaagaaaaagctgaagctgcgtccagtaacatatctaagtggttctcagggttctggcaatg

SEQ ID NO: 45873 - DNA, 289 bp, Zea mays
agtggatggtattcgatatttcctttcactgttacagagtcctgcggcatcagttgtgccaaccttaagtctgcacttcttcttgacattattgttctggtcatcacaacgtacactactgtaacatccgtgcaagaacctcaaacttttggaagtgatgaagcacaaaatccaggtgctgaacaggaagctttcctctgggaactttttgggtcattaagatacttcaccctaccaatttggatggtcttaattgtcactgcccttacttggatggcatggtttcctt

SEQ ID NO: 45874 - DNA, 287 bp, Zea mays
ggaacattcaagttatctgtgttactgatggtgagcgaatcttgggacttggagatttgggttctcagggaatgggaattcctgtaggcaaacttgctctatacactgctcttggaggagttcgtccatcagcttgtttgcctatcacaatcgatgttggcacaaataatgagaaactgcttaatgatgagttttacattggactccggcaaaaacgtgcaactggcgaggagtatcatgagcttatggaagagttcatggctgctgttaagcaaatctacggcgag

SEQ ID NO: 45875 - DNA, 290 bp, Zea mays
atggcgtccatcctcgaggtcgatgactgcaggaatcacacatttattcagtttgagccagctcctaggagaggtgaaccagacgtgacgcggaggacacctgattatttcctttgagttatctgccagaccatttttggaatttgcccaatgttggaatagtgatgctagccagtaacaatttttgttggatctatatgataacttaaccgaccagcaacagtaagaaaatgtggaagctgcatctgtcattgcaagaggtgctcgctaacagtaacaggtcgacgact

SEQ ID NO: 45876 - DNA, 186 bp, Zea mays
cgtcgccctcaaattcgttccgtccaggcaaggaagaaatcgagcagccaaggagaggagaagatggctcgtacgaagcagaccgcccgcaagtccaccggaggcaaggccccgcgcaagcagctcgccaccaaggcggcgaggaagtctgcgccgacgaccggcggcgtgaagaagccccacagg

SEQ ID NO: 45877 - DNA, 275 bp, Zea mays
agggagtttacaaggatagcacaattatgatgcagcttctgaaggacaacttagcattgtggacatcagaactaactggaggtgaagcatccaagggtagcgacgatgtggacatggagggttgatacattctccatgttttaaggaaacacagaaagcacgcaaaaatatccaggctgtgatgctagcgaacctgggtcctcaagttttttctgcatcggaactcagaggagccttgtgtatttttctgaagtttctgtcagtctcggggtttt

SEQ ID NO: 45878 - DNA, 298 bp, Zea mays
agctgtcgactacatcatcgatcatgccgagatcgatgttgtcgtcatacaggacaagcaaataaaagagatactgtccccaaactgcaagtctgccaacagactgaaagcattggtggcgttcacttcggcgacaactgaacagaacaaagaagcggatcaaattcggatcaaaatgtatgcctgggacgatttcttgaaagtggggaaggataatcctcgtcaaccttgccctccgcaagcaagtgacatctgcactgtcatgtacacgagtgggacaagcggacagcccaaaggt

SEQ ID NO: 45879 - DNA, 275 bp, Zea mays
agtcaatccgagcttttgctgaggcttctatgacaactgcttatgagaagcaatggccactctaccttagcaccaaaaacacaatcctgaaaaaatatgatggcaggtttaaggacattttccaggaggtctatgaagctgactggaagtccaaatttgaggctgctggaatatggtatgagcatcgtcttattgatgacatggttgcgtacgcgcttagaaccgaagaaggcaatttttggctttcaaagatctcgcttggatatgcgcagagt

SEQ ID NO: 45880 - DNA, 291 bp, Zea mays
cgtcaagtgagacttttcatgtggttgactacgactttggtatcaagcataatattttgagacgattgacatcatatggatgcaaaataacagttgttccagcaaattggcctgcttcagaggtactcaatttgaagcctgatggtgttctttttagcaatggtcctggggatccagctgcagttccctatgctgtgaagacggtacaggaaataattgggaaggttcctgtttttggcatctgtatgggccaccaattgattgggcaggctcttggtgggaagacattta

SEQ ID NO: 45881 - DNA, 291 bp, Zea mays
cccgaaagtaactctatttcttgatcaacatcaacatgtcgcgggaggataatgtttacatggccaagctggctgagcaagcagaacgatacgaggaaatggttgagtacatggagaaggtggctaagactgtagatgtggaagagctcaccgttgaggagcggaacctcttatctgttgcctacaagaacgtaattggggcccgccgtgcctcatggcgcattatctcctccatcgagcataaggaggagtcccgtaagaatgaggaacatgttattcagatcaaggagt

SEQ ID NO: 45882 - DNA, 295 bp, Zea mays
cgagtctccagccaaccgcatccagtccacccccatccccctcgaccccgacaaacccgacccgatggcgcccaaggccgagaagaagccagcggagaagaagccggcggccgaggagaaggcggagaagacgaccgcagtaagaagcccaagtccgagaagcgcctgccggcctcgaagtcctccggcaaggagggcggcgagaagaaggggaagaagaaggccaagaagagcgtggagacctacaaaatctacatcttcaaggtcctgaagcaggtgcaccccgacatcggca

SEQ ID NO: 45883 - DNA, 270 bp, Zea mays
gcaacctccgggaccatcttctcggccatctcctgcttctgggacctgccagcaccgtttttgtggttagctccttcttgccaaccaaccatgagctcccagattcgtcagaattattccaccgacgtggaggcagccgtcaacagcctggtcaatttgtacctgcaggcctcctacagctacctctctctgggcttctatttcgaccgcgatgatgtggctctggaaggcgtgaccacttcttccgcgaattggccgaggagaagcgcg

SEQ ID NO: 45884 - DNA, 226 bp, Zea mays
gtccccgacaagccaatcgaagccgagatacggccatggactccaccggcaccggagcagggggtaaggggaagaagggagcggccgggcgcaaggtcggcgggccaaggaagaagtcggtgtcgaggtccgtgaaggccgggctccagttccccgtcggccgcatcgggcgctacttgaagaagggccgctacgcgcagctgtcggcaccggcgccccgtctact

SEQ ID NO: 45885 - DNA, 288 bp, Zea mays
ggagagttgtatactcatgggtcggtgatgatccttgtgggcatggtgatctacccccctggtctggtgtgacatgttctcagcaaggggattacagagttgtgacggaactggaagtctatgctgtatcaatagttggtcctttcccaacagcagtaactaacctgttggatctaagaagattggatctccacaataacaagttgacaggaccaattcccccacagattggacggttgaaacatctcaggatattgaacctgaggtggaataagcttcaagatgtgc

SEQ ID NO: 45886 - DNA, 291 bp, Zea mays
gcataagctcagccaccctaatgttacaaagtttgttggtgcatctatggggaccacagaccttaagattccatcaaacaattccaatggtgctgcacgtacaaatttgccagcaagagcatgttgtgttgtggtagagtatcttgctggaggaactttgaagcaatatttgataaagaatagccgacggaagcttgcttataaagttgtggtccagcttgcattggatttggccagaggattgagctatctgcactccagaaagattgtacatcgggatgtgaaaagcga

SEQ ID NO: 45887 - DNA, 290 bp, Zea mays
cacttactctcgtgcgctctccgtgggagcgaggactcgcagccggcgcacggcaggttctcctagatctccggcatcatcagtaacaaatggctgacggtgaggacattcagccccttgtttgtgacaatggaactggcatggtcaaggctggttttgctggtgacgatgcgccaagggctgttttcccaagcattgtcggacgcccccgtcacactggtgtgatggttggcatggggcagaaggatgcgtatgttggtgacgaggcccagtccaagaggggtatcctg

SEQ ID NO: 45888 - DNA, 245 bp, Zea mays
aaccctttcgcctccgccgccgccgccgccgcctgatagctccagcgccctcgccgtcggctgcccggctgccgtcctcccgctacgagctaggcatctccttcgccgatccagcatgggtaagacacgtggtatgggagctgggcgcaactcaagacccacaggaggaaccagaggtgggctgacaaagcctacaagaagagccatcttggcaacgagtggaagaaaccctttgctggatcatc

SEQ ID NO: 45889 - DNA, 270 bp, Zea mays
tgtcgcgccgccgccgccgccgaaacagcacatcgctctctcgatctcagccatggcggaggtggagcagccccaggacgcggtgaagctcttcaaccgctggaccttcgacgatgtccaggtgaacgatatctcgctgaacgactacctggctgtgactgcggcgaacacgcgacattcctgccgcactccgcggggcgctactccaagaagcggttccgcaaggcgcagtgcgccatcgtcgagcgcctcaccaactcgctcatgatg

SEQ ID NO: 45890 - DNA, 285 bp, Zea mays
ggccgagcatgaggcgccatcatgggagtggacatccgccataacaaggaccgataggttcggcgcaaggagcccaagagccatgatatctacccaaggctgttggtcaagttatacaggtttctggccagaagaaccaactccacattcaaccaggttgtgttgaagaggttgtttatgagtcgcaccaagcggccgcctctgtccctttcccggatgatccggaagatgaagcttcctggccgggaaaacaagacggcccgtggtgtggggaccataactgat

SEQ ID NO: 45891 - DNA, 284 bp, Zea mays
gacgcgcaggtcagtacaatgagaggatcgatgttctgcggcggagatctccggtggtggatgttggccatcttcttcctctgcacactaattgctgccgcggatgagcgcgtcgtcacccatctccccggcttccagggaccactccccttccagctccgaactgggtacgtggaggtggacgaggacaatggcgtccgcctcttctactacttcaccctctccgagggctcctcagccgacgacccggtcatgctctggctcagcggcggccccggatgcac

SEQ ID NO: 45892 - DNA, 289 bp, Zea mays
  unsure (1)..(289): unsure at all n locations
aggcgttccctccgagttgcagatctggcacatcacgtggtggtgagggcgacgaggaagagccaatgttcgaccccgcgtggtgccacctgcagcttgtttatgagctcctgctgaaatttatcggatcctcgtccttggacgcgaaggtagggaagaagcactttgatcactcattcatcgtgaagctccttaatcttcttgactccgaggatccaagagaaagggattgcttgaagactattctgcacagggtatatgggaagtcatggtacaccgtctntcatcc

SEQ ID NO: 45893 - DNA, 296 bp, Zea mays
ctcgtctgctcgcatttcctcccaatccatcccgcctccaaacccgaactccaagtcgccccgcatcgatggcgcccaaggccgagaagaagcccgcggcgaagaagccggcggaggaggagcccgctgccgagaaggcgccggccgggaagaagcccaaggcggagaagcgtgtcccagcaggcaagtccgccggcaaggagggcggcgagggaaagaggggccggaagataggcaagaagagcgtggagacctacaagatctacatctttcaggtgctgaagcaggtgcacccg

SEQ ID NO: 45894 - DNA, 289 bp, Zea mays
agagaagtgcaaggaagcaggcggccaccatggtgaagggacgcacgggacagcgcgtcaggctctacgtccggggcactatcctcggatacaagaggtccaagtcgaaccagtacgagaccacgtcgctcgttcagatcgagggggtgaacaccaaggaggacgtcgcgtggtacgctggcaagcgcatggcgtacatctacaaggctaagaccaagagcagcgagacccgctacaggtgcatctggggcaaggtcaccggcccgcatcgcaactcgggcgtcgtcgc

SEQ ID NO: 45895 - DNA, 153 bp, Zea mays
ctcagagatgcgcctggagaaggacaggttctctgtcaacctggatgtgaagcacttctccccagaggaactcagagttaaggtgttgggagatgtgattgaggtgcatggaaaacatgaagagcgccaggatgaacatggtttcatctccag

SEQ ID NO: 45896 - DNA, 291 bp, Zea mays
tatgcattaggctatggcgcaggtgcccttctccaaagtgggaagacaggacttatttcctcggttggcaaccttgcggctccagttgaagaatggactgttggtggaacagcattaacatcactgatggatgttgagaggaggcacggcaagttcaagccagtgatcaagaaggctatggtcgaacttgatgctgcacctttcaagaaatatgcatcgatgcgtgatgagtgggccatcaagaacagatacatcagccctggccgcatccagttcagtggacctggaagt

SEQ ID NO: 45897 - DNA, 213 bp, Zea mays
tgcattcacacactcgattccgctgctctctccctcttcctctcccctgcggcggaccataaaccctaggcctcgccgtcgtcggaggcgccgccgcgatgtcgcactttggaaggacgggtccgccggacatccgcgacaccttctcactgctcgtcctcaacatcagcttccgaaccacggccgacgaccttttcccgctcttcgagcgct

SEQ ID NO: 45898 - DNA, 286 bp, Zea mays
atcgagccgcccgctcagtcacaaagcctcagatctcagtcgccagcaccgccgcttcgtacctgtggaggggagaagacaggaaatggcggcgactgagggcgtgctcttggggatgggcaaccccctcctcgacatctccgccgtcgtcgatgacgccttcctgacaaagtatgacatcaagctgaacaatgctattctcgctgaggagaagcacttgcctatgtatgacgagttggctagcaagagcaatgttgaatatattgccggaggagccacccagaac

SEQ ID NO: 45899 - DNA, 266 bp, Zea mays
cgaagacaagatgaaggagcttgaggggatctgcaaccccatcatcgcgaagatgtaccagggagagggcgcgggcatgggcgctgctgctggcatggatgaggatgcccagtctggtgggagcggtgctggtcccaagatcgaggaggtggattaagttggttagtgttcgaggtttggtttggtgaggtgtgaagtgcctgaactctgatggttgtatgtgaggtgtggtcgcaatagctgcggcctgtggtgaacttctcaga

SEQ ID NO: 45900 - DNA, 193 bp, Zea mays
tgaaactgatgaggacaagaaggcagctgatgagcgtgctgccgctggcaaggcctcttctgagaagatagaaagtggtaaatcctccgtccttatggatgtaaaaccatgggacgatgagactgatatgaagaagctggagtaggctgtccgcagtgtccagatggaggggctgacttggggagcatcgaag

SEQ ID NO: 45901 - DNA, 279 bp, Zea mays
ctcgagccgcaaccacttactctcgtgcgctctccgtgggagcgaggactcgcagccggcgaacggcaggttctcctagatctccggcatcatcagtaacaaatggctgacggtgaggacattcagccacttgtttgtgacaatggaactggcatggtcaaggctggttttgctggtgacgatgcgccaagggctgttttcccaagcattgtcggacgcacccgtcacactggtgtgatggttggcatggggcagaaggatgcgtatgttggtgacgag

SEQ ID NO: 45902 - DNA, 278 bp, Zea mays
agtgattcttatgcagatgcagatcttcgtcaagaccctcactggaaagactatcaccctcgaggggggagtcttctgacaccattgacaacgtcaaggccaagatccaggacaaggagggcatacccccggaccagcagcggctcatcttcgcaggcaagcagctcgaggacgggcgcacacttgccgactacaacatccagaaggagagcaccctccaccttgtgctccgcctcaggggtggcatgcagatcttcgtcaagaccctcactgggaag

SEQ ID NO: 45903 - DNA, 275 bp, Zea mays
aacaaacaaggcttcccaatgaagcaaggagttctgacttctggtcgtgtccgccttctgctccacagaggcactccctgcttccgcggttatggcaggcgtaatggtgagcgcaggaggaagtctgtccgtggttgtattgtgagccaagacctatctgttatcaacttggtaattgttaagaagggtgagaacgatctgcctggtttaactgacactgagaagccaaggatgaggggtcccagaagggcctccaagatcaggaagctgttcaa

SEQ ID NO: 45904 - DNA, 279 bp, Zea mays
acggagtcattccacaggcgaatggctcagcgcgtgttaggttgggggccactgaaataatcgctagtgtcaaggctgaactaggaaaaccaagcattcttcaccctgacaaaggaaaagttgctatttttgtcgactgtagtccaaccgctgagcctctgtttgagggtagaggctctgaagaattgtctgctgagctctctgtttccctgcaaagatgcttgttgggtggtaaaagcggtgctggtgctgcaattgatctgtcatccctaattgttg

SEQ ID NO: 45905 - DNA, 227 bp, Zea mays
ccccatctcccagatccaattcgcgagttctccctcctctgcggccatggcgcgctctgtggagaagacctcgtctggacgggagtacaaggtcaaggatctctcgcaggcggacttcggccgcctcgagattgagctggccgaggtcgagatgcgcggcctcatggcgtgccgcgccgagttcggcccgtccaagcccttcgccggcgctaggatctcggggtctc

SEQ ID NO: 45906 - DNA, 281 bp, Zea mays
acacactcgagaactccatttcgatctcatttgaaatcaacccatcctcgtttcctccgtctagcagcctctcaccctcatggccaagatcaagatcgggatcaatgggtttggcaggatcggaaggctggtggccagggtggccctgcagagcgacgacgtcgagctcgtcgccgtgaacgaccccttcatcagcaccgattacatgacctacatgttcaagtatgacactgtgcacggacagtggaagcaccatgaggtcaaggtgaaggactccaaga

SEQ ID NO: 45907 - DNA, 278 bp, Zea mays
ccgacgagcagccgacgctaaagcttggtccggtgagcttcagagaaggggcgggtacgtcaagatgcagatcttcgtgaagaccctgacgggaaagaccatcaccctcgaggtcgagagcagcgatacaatcgacaatgtcaaggccaagatccaggacaaggaaggtatcccgccggaccagcagcgactaatcttcgcggggaagcagctcgaagacggccgcaccttggccgactacaacatccagaaggagtccacccttcaccttgttcttc

SEQ ID NO: 45908 - DNA, 280 bp, Zea mays
actacaaggagaagcaccccaatgtgaagcaagtctccctgattggcaaggctggtggtgacaagtggaagtccctgtctgatgccgagaaggctccctacgtgtctaaggcagagaagctcaaggctgagtacaccaagaagatcgacgcttaatccaacaagcagtctggagaccccacggcgtctggtgattccgacaagtccaagtccgaggtgaacgacgaggacgaggagggtgacgagtgatgtatgacggatgaaactctgtccaagtgttt

SEQ ID NO: 45909 - DNA, 277 bp, Zea mays
tgacaatgaaaggatggaactgctgctgtcccaactgagcggtaaggacatcaccgagctcattgccgcgggcagagagaagtttgcttcagtcccatgtggcggcggcggtgtggctgttgcggcaggtgcacctgctgctggcggactgctcctgcagctgaggcaaagaaagaagagaaggtggaagagaaggaagaaagcgatgatgatatgggcttcagcctcttcgactaggttgcacagtcatcacagtattgtttcgggcagtgaaatc

SEQ ID NO: 45910 - DNA, 276 bp, Zea mays
tccagggccgtgagtagagcggtggtggtgtcgtcggaggcattggcagctcgagactgagttcaagaatcagcatgattcttcagacgctcatcaggttcgcctctgtcagtcgttcagccgtctcagtccatttgcggaggaacattggtgttacagcagtggcatttaataaggaacttgatcctattcagaaactctttgtggacaagattatagaatacaaatctaagcgacagacatctggaggacctgttgatgctagtgcagagtatc

SEQ ID NO: 45911 - DNA, 279 bp, Zea mays
aagcaatctcgtccccaaacaagcaaccaccgcctccccgatctcgtcgagaggaagcccaatcccgaaaccgccgccctattccaatggcgcccaaggccgagaagaagcccgccgccaagaagcctgcggaggaggagccggcggcgtagaaggccacggcggggaagaagcccaaggccgagaagcggctccccgcgggcaagtccgcaggcaaggagggtggcgagaagaaggggaagaagaaggcaaagaagtcggtggagacgtacaagatct

SEQ ID NO: 45912 - DNA, 276 bp, Zea mays
atctcgtccacccgtcatcctcctagctcctctactcgccagtcgccatgggcaagattaagatcggaatcaacggcttcggaaggatcggcaggctcgtggccagggtcgccctccagagcgaggatgtcgagctcgtcgccgtcaacgaccccttcatcaccacggactacatgacctacatgttcaagtacgacaccgtccacggccactggaagcacagcgacatcacactcaaggactccaagacccttctcttcggtgacaagccggtca

SEQ ID NO: 45913 - DNA, 271 bp, Zea mays
caacaacacccagatctgcccgagcccgcgacagcccttcccgcatctccctctggtccggtcacaggagctccgagacctctccaatggcggttaagatctacgttgtgtactattccatgtatgggcatgttggcaaactagctgatgagatcaagaaaggtgccttatctgttgaatgtgttgaggctaaaatatggcaggtccctgaaattctctctgaagaagtgcttggaaagatgggcgcgccccctaagcccgacgtgccagt

SEQ ID NO: 45914 - DNA, 278 bp, Zea mays
ccgcctcacccgcaagccccgcctcatcgcgctcctcaggcgcttcccgggcgtcttcgacgtcgtcgaggagggcgtctactccctccgcttccgcctcacgccggccgccgagcgcctctacctcgacgagctccgcctcaggaacgagtccgagggcctcgccgtcgccaagctccgcaagctgctcatgatgtcgcaggagaagcgcatcctcatcgagaaggtcgcgcacctcaagcacgacctcggcctcccgcccgagttccgcgacaccg

SEQ ID NO: 45915 - DNA, 273 bp, Zea mays
gccactccctgacatcgagaccggctgcccgaccccggtccggcgatccctctgcacccctttctttgcgctgccagccccaatctctcgcatccctgtcaaccatggcggcgtcagaggcggaggcgcggtgcgtgtgtgtcccagaaggagcaggacatacagatgatgctcgcagccgacgtccacctcggcaccaagaactgcgatttccagatggagcggtatgtctttaagcgtcgcaccgacggcatctacatcatcaacctgggc

SEQ ID NO: 45916 - DNA, 270 bp, Zea mays
cattgacgaggagatccgcaagcttgatgagaaaattgctgatgcggaggagaacttgggtgagagcgaagtccgtgaagcacatcttgccaaatctttgtactttataagggtcggtgagaaggaaaaggccctggaacagcttaaagtcactgaaggaaaaactgtagctgttggccaaaagatggatcttgtgttccacactttgcagattggttttttctacatggattttgatctgatatcaaaatccatcgataaggcaaagaa

SEQ ID NO: 45917 - DNA, 272 bp, Zea mays
caacaacacccagctctgccccagcccgccacaggagttcccgcatctccctctggtccggtcacaggagctccgagacctctccaatggcggttaagatctacgttgtgtactattccatgtatgggcatgttggcaaactagctgatgagatcaagaaaggtgccttatctgttgaaggtgttgaggctaaaatatggcaggtccctgaaattctctctgaagaagtgcttggaaagatgggcgcgccccctaagcccgacgtgccagtc

SEQ ID NO: 45918 - DNA, 272 bp, Zea mays
taacctccgccatcatgggtcgcatgcacgctcccgggaagggcctgtcgcagtcggcgctgccctaccgccgtagcgtgcccacgtggctgaagttgacgtctgacgacgtgaaggaacaaatttacaagtaggccaagaaaggcctgactccttcccagataggcgtgattctgagggactcacatggtgtggcagaggtccgttttgtgaccggaaataaaatcttgagaatccttaagtccaaaggccttgcccctgatcttcctgag

SEQ ID NO: 45919 - DNA, 269 bp, Zea mays
gcaaaagggcgtgtttgagactagcggaccgaccttgaagttgaagttgaaaaggtcggcctgcgcggcgatggatgtcaagtgccggcgtctggaggggaaggtggccatcgtgacggcgtccacgatggggatcggcctcgccatcgccgagcgcctcggtctggagggcgccgccgtcgtcatctcctcccgcaagcagaagaacgtgaacgaggcggtggaggggctcagggccaagggtatcaccgcggttggtgccgtctgcc

SEQ ID NO: 45920 - DNA, 221 bp, Zea mays
cactcatccacagctcccaccggcattcctgtctcgtatcctctctcgccgctccgatggcccgcacgaagcaaacagcgaggaagtcggccccggccaccggcggcgtgaaaaagccccaccgcttccgccccggcaccgtcgcgctccgcgagatccgcaagtaccagaagagcactgagctgctcatccgcaatctccccttccagcgcctcgtccgc

SEQ ID NO: 45921 - DNA, 301 bp, Zea mays
ctgccctcctcgccgtcgctgcctccctccgcgcgaccgatctaccctccgccgccaccatgtcgctgatcgccggggaggacttccagcatatcctgcgtttgctgaacaccaacgtggatgggaagcagaagatcatgttcgccatgacctcaatcaagggtgtcgggcgccgcttctccaacatcgtctgcaagaaggccgacatcgacatgaacaagagggccggcgagctgacgcctgatgagctggagcgcctgatgacggtcgtggccaaccctaggcaattcaaggtgccgga

SEQ ID NO: 45922 - DNA, 297 bp, Zea mays
acgtaaggcgaaggagtagcagcagcaggcggcgccgagtagcggctccccatctcgagcttgccaccatggctagaggattgaagaagcatttgaagaggctcaatgcccccaagcattggatgctggacaagcttggcggacttttgctcccaagccatcttctggacctcacaagtctagggagtgcctgccactgatcctcatcatcaggaacaggctcaagtatgctcttacataccgtgaggtcatttccatcctgatgcaacgccatgtacttgttgatggcaaggtcag

SEQ ID NO: 45923 - DNA, 299 bp, Zea mays
aactacctcgatagattccactccacgtaccaaaggctgaaggcagagcttggatgactcagctcttggcagtggcttgcttgtctttggcttcgaaaatcgaagagacttttgtgccactccccttggatttgcaggtagcggaggcaaagtttgtttttgagggaaggaccataaaaaggacggagcttctggtgctaagcaccttaaagtggaggatgcatgctgttactgcttgctcatttgttgaatactttcttcataaattgagtgatcatggtgcaccctccttgcttgca

SEQ ID NO: 45924 - DNA, 332 bp, Zea mays
ttctgtgtacggaacgtagactccattcgactcgagcgaattctgctcgacacacactcgagaactccattacgatcccatttgaaacgaacccatcctcgtttcctccgtctagcagcctctcaccctcatggccaagatcaagatcgggatcaatgggtttggcaggatcggaaggctggtggccagggtttccctgtagagcgacgacgtcgatctcgtcgtcgtgaacgtgccactcatcagcactgattacatgacgtacttgtacaagtatgacactgtgcacggacagtggaagcaccatgaggtcaaggtgaaggactccaaga

SEQ ID NO: 45925 - DNA, 303 bp, Zea mays
caccgcaactccgcaactccgcaacctcctccttcccaccccttctcacgcgattcaagcgtttcccattcggagccctaatcctctctttccatactcgcggaagccaccaccaccggcaggggaagcggaaggggagcacctcgggccaggcaagatggtgcttgcgcagctgggcgggagcatctcccgcgccctggcgcagatgagcaacgccacggtgatcgatgagaaggtgctcaacgactgcctcaactagatctcgcgcgctctcctacaggccgatgtccagttcaagatggt

SEQ ID NO: 45926 - DNA, 299 bp, Zea mays
atcgagccgcgcttcctcccgttagactaggttaggctagggtgtcgaccagctcgcggacatggtggccttcaggttccatcagtaccaggtggtggggcgcgcgctgccgacgcccggcgacgagcaccccaagatctaccgcatgaagctctgggccaccaacgaagtccgcgccaagagcaagttctggtacttcctgaggaagttgaagaaggttaagaagagcaacggtcaggtcctggccatcaacgagatcttcgagcgtaacccgacgacgatcaagaactacggcatct

SEQ ID NO: 45927 - DNA, 296 bp, Zea mays
atcccgtcctgtccttccacccggcggcttaaaccctagttctcactcccatcgccgcttcagctccgccgctgcagatggagttctggggtctcgaggtcaagcctggttccactgttaagtgtgagcctggatatggctttgtgctgcacctttcccaggctgctcttggggaatcgaagaagagtgataatgccttgatgtatgtcaaaattgatgatcagaaacttgccattggaaccctctctgttgacaagaacccacacattcaatttgatctgattttcgataaagag

SEQ ID NO: 45928 - DNA, 299 bp, Zea mays
atctaagacaaaagtcactactcttccaaatggcgtcaagatcgcctcggagacatcatcgagcccagcagcacgtgtgggtctgtacattgactgtggttccatttacgaaacacccgcttcatctggagtatcacatctgttggagagaatggccttcaagagcacagtgaagtggactcacttacggttagttcgtgaggtagaagccattggaggaaatgtctctgcatcagcttcccgtgaacaaatgaggtatacctatgatgcattgaagagctatacaccagaaatggttg

SEQ ID NO: 45929 - DNA, 296 bp, Zea mays
taccgccgttgctgctgccgcgtccacagaatggggggtttcgtgaagactcataagaccaatgcgtatttcaaacgtttccaagtgaaattcaagagaagacgggctggcaagacagactacagggccaggataaggctgattaaccaagacaaaaacaagtacaacacacccaaatacagatttgttgtgcgatttaccaacaaggacatcactgcccaaatcatatctgctagtatagcgggtgatatggttcttgcttctgcctactcgcatgagttgccacgatatggtct

SEQ ID NO: 45930 - DNA, 241 bp, Zea mays
ccgagccgcagtaggcagcggcgcgggccaggagcagaccagcacccagcagccctcgtcgggcggcggcagctgcagcttcaccacccgccgcctttccccgtctcctctgcctctgcctctccccctaacccccttccatttctccaccccaccccgctcccgcttccgcttcctcgccacttagttcgttccgcacccgcagccgcgtctgcgttcgcattgggggcacgcaatggag

SEQ ID NO: 45931 - DNA, 409 bp, Zea mays
  unsure (1)..(409): unsure at all n locations
cactggatctggagctcaagaagttcatggactcttgctcggagtgtgctaagaatcgcactttgattaagtcatacctctaccagatactccgtggcgttgcgtactgccattctcatagagttcttcaccgagatttgaaacctcagaacttgttgatagatcggcgtaataatgcgctgaagcttgcagactttggggttagccagggcatgtggaattcctgtccgtacatgtactcatgaggtagtgacattatggtacagagctccagaaatccttcttngagcgagacagtattccacaccagttgacgtatggtctgtgggctgtatctttgctganatggtgaacgtaaagccactatcgctgggtgatctgagatcgacgaactgttcnaagatatcag

SEQ ID NO: 45932 - DNA, 449 bp, Zea mays
  unsure (1)..(449): unsure at all n locations
gtgcctcagcgncgtagctcngcagtcagctcgagagacgcacaccagcacggcagcacctgcgctcctcgccgtcgctgcctcgctccgcgcgaccgatctactctccgccgccaccatgtcgctgatcgctcgggaggacttccagcatatcctgcgtttgctgaacaccaacgtggatgggaagcagaagatcatgttcgccatgaccttcatcgaaggtgtcgngcgccgcttctccgacatcgtctgcataaaggccgacatcgacatgaacaagagggccggcgagctgacgcctgatgagctggagcgcctgatgacggtcgtggccaccctaggctattcaggtgcctgactggttcctcacgagatagaagatactaagacngctagttctcgcaggtcgtctccaacgcccttgatatgaactcanggacgacttgaga

SEQ ID NO: 45933 - DNA, 310 bp, Zea mays
  unsure (1)..(310): unsure at all n locations
cctcaaccanattcagagtcacagcggcganactctcggcgatgtctggccgcggcaanggcgngaanggtctgggcaagggcggcgcaagcgcaccgcaagtgctgcgtgacaacatccagggcatcaccaagccggcgatccgcaggttggcgangatgggcggcgtcaagcgcatctccnggctcatctacgtagagactcgcggcgtgctcgagatcttcctcgagaacgtcatccgcgacgccgtcacctacaccgagcacgctcgcctgcagactgtgactgccatggacgttgtctacgctct

SEQ ID NO: 45934 - DNA, 429 bp, Zea mays
  unsure (1)..(429): unsure at all n locations
cagtacatacgagatggtccgcttaattgagcagcaactgtcctgtcttggctgttgacattgccggtaacataaatggatggaacaaaaaagctgcagaactaacagggttacctgtaatggacagcatagggaggcctctgatagatcttgttgttgctgattctgttgaagtcggtaagcagattttggactcagctttacaaggaattgaagnagcaaatctgganatgcagcttagaacattccatgaacaggagtgttgtggtccagttatcttgatgattaactcctgcntgtagtcggatctntcagagaaagtcattggagtttgctttgtagcacaagatntgaccaggcagaagatgattatggataagtatactaggatacgaggagactatgttgctataatacagaaccccagtg

SEQ ID NO: 45935 - DNA, 439 bp, Zea mays
  unsure (1)..(439): unsure at all n locations
gtgatgcagcggagtaactcggaatcagctcgagcaatntgacacgcgtccatcacacatatctggtgcgcttaattggttattgtgttgagagttgcttatttcttgtttatgaatttattgagaacggaaacctaagctcagatnttgaatctactagtcnatgatncncgttcataacccgtcncatgcagatgctagcttagggtatgaagctctctcatggaccagtagagtgcaaattgcccttgattcagcaaggggtctagagtatatacatgagcacactgttccagtgtatgtgcatcgagatatcaagtctgcanatatcctgatagacagagacttacgagcanaggttgcagatcttcgactgacantactttcagaaattggaactacatcacagtcactccgctcactacgagttgttggtaca

SEQ ID NO: 45936 - DNA, 324 bp, Zea mays
  unsure (1)..(324): unsure at all n locations
cctgtatatcatctccgtgatagcgatcaanggactgctgaacagacttcgcgctgctggtgtgggtgaattggtgatggccacagtcaagaaaggcanaccagagctcagagaaaaggtacatccagcagtggtcattcgacaacgatagtcataccggtagaatagatgcggtgttctttatgttgatgataatgcaggagtcatagtgaacaatataggcgagatgaaaggtctgccatacgagaccagtagcaaggagtgtgcagacttgtggccctgattgcatccaatgctgcacattgcatgatctccagatatttg

SEQ ID NO: 45937 - DNA, 261 bp, Zea mays
ctgattcagcgtacgtagctcggcatctgctcgacactcgccttcttcttcgaggccgtgcggcgcgagtactaccacgccatccgggtcaacttcttcttcgcgccgtggatcgcctgcctcttcctcgccatcggcgtgccgccgtccgtgagcactgagcccctgccgcagtggctctggtacgcgctcatggcgctcgtgctcttcgatgagtctcagatctacggccagtggatgtaccgctggcaagagcgcctg

SEQ ID NO: 45938 - DNA, 191 bp, Zea mays
cgagagcacacacacgcaaccagatctcccccaaatccagccgtcggcacctccgcttcaagatgcagatctttgtgaaaaccctgactggcaagactatcaccctcgaagtggagtcgtctgacaccattgacaacgttaaggccaagatccaggacaaggagggcatccccccagaccagcagcggctc

SEQ ID NO: 45939 - DNA, 194 bp, Zea mays
agagggaaccgaaaactcagggtctcgaatttcctaggagcggaggcgatggctgggaagggaggaaaaggattgctcgccgcgaagacgacggcggccaagtcggcggagaaggacaaggggaagaaggcccccatctcacggtcctcccgcgcgggcctccagtttcctgttggacgaatccaccgtcagct

SEQ ID NO: 45940 - DNA, 264 bp, Zea mays
ccaccctcctgctcctcctcccacggtcccgccatttcgtcccccgctcaccaactcaaaccccctccgctctcaaaccctaaccctagccctagcccgctcccggcggaccgacaatgccgaaggaggtcggcggggcggcggacgaagaggagttccgcgccgaggtggaggagcgcctcatcaacgaggagtacaagatctggaagaagaacacacccttcctctacgacctcgtcatcacccacgcgctcgaatggccct

SEQ ID NO: 45941 - DNA, 267 bp, Zea mays
atgcgctgagttttgaaggtggcgagggatctttgctgcggggttctatttgttctcagtgatttttggcaaacactctttggttagattaagaatcatggaaaggtacaaattgatacggaagataggtgatggaacctgtgggaatgtttttatggcttctaatgtagaaactaatgaaattgctgctgttaaaaaaatgaagagaaaattgtgtcattgggaagaatgtattagtctgcgagaagtgaatgcccttcagaaact

SEQ ID NO: 45942 - DNA, 210 bp, Zea mays
accaatccactgagggttcggtttcattatggccatcctgatgtcttcgatcgtcttttccacgttacgaggggcgatgtcagtaaagcatccaaaattatcaatcttagtgaggacatctttgcaggattcaattccacattgcgcgaagacactgttactcaccatgaatacatgcaagttggcaactgaagggatgtaggtctcaat

SEQ ID NO: 45943 - DNA, 264 bp, Zea mays
gcgtcgacgactgggctaccggcgcctccaccctccgcctggtgtccttcgccgtcgacgagcgcacaccagggtacagtacgtattgctcgtgatttgtgtaactacggagcaagctgcatacagcacaagatagaagatgggtatccttgagaggatcaaggagattgaggccgagatggctcggactcagaaaaataaagcaacagaatatcatcttggacaactgaaggcaaaactagcagagttgaggacacaactatt

SEQ ID NO: 45944 - DNA, 279 bp, Zea mays
cttttgatggtttcttgctggtgcttcttgctggtgggcctttgcgtactttcacccgtcaagactctcagataatagaagatgacttcagggccctcagagatctgtacttagcagatggggatggtttgccagaggaattagttgacaaggcatcctcccaggtcaagaatgtcctgcccctctttcgagcagactctgaaagtctcattgagcgattcaaacgcatgatggttgaatcgaatcggcctgcgtccaagaacaggttaccattgcctc

SEQ ID NO: 45945 - DNA, 305 bp, Zea mays
attgcacagactcggagcaagataggcctagctggttacaagccaagaacaagtagagcggtagagggaaaatatatctggagagggaaacaatggcgggcgaggacggtcttaaggtcctcggcctgcaggtgagcccgttcgtgctccgcgtgtgcttggcgctgaacatgaaaggagtgagttacgagtacgtcaaggaggacatatccaacaagagtgagctcctgctcaagtccaacccggtgcacagaaagtgcccgtgctaatccacaacggtaagcccatctgcgagtcactcgtca

SEQ ID NO: 45946 - DNA, 256 bp, Zea mays
tagggttttgctgctctccgaccccgagctccgaaggccgcagcatcaggcgcggcccccctcgcgtgtgaccgagatggcgctgccgaatcaggggaccgttaattaccccagcttcaagctcgtcatcgtcggcgatggtggaactggtaaaactacatttgtgaagaggcatctcactggagagtttgagaagaaatatgaaccaaccattggtgtggaagttcatccgttggatttcaccactaactgtggt

SEQ ID NO: 45947 - DNA, 266 bp, Zea mays
acaagacgcacggccaccaccgccggccgggaagcaagctcaaaccctaatcgccgtccgccggcgacgccagcacgatggcccgctacgaccgcgccatcaccgttttctcccccgacggccacctcttccaggtggagtacgctctcgaggccgtccgcaagggcaacgccgccgtgggcgtccgcagcacggacaccgtcgtcctcggcgtcgagaagaagtccacacccaagctccaggactccaggtccgtgcgcaagatc

SEQ ID NO: 45948 - DNA, 306 bp, Zea mays
gttcaggaaaaagaacaactgcatgtatgatcgagtttttcaccaggcctttatgctttggacagcttgccctgcatgctatttctcatctgcttgagagatacatttaaacaagacaagagaaaatttaaagatccaagaagattgtatgcacctgggcgaatgtatcatatcgttgagaggaaattttgcaggtaatgtatcatgtcattgcaaatagtatcttcccctgcttgcgaattgctcttttctttttttatgtcataaatgatataaacgaaaacctactcttctagtatatgggag

SEQ ID NO: 45949 - DNA, 296 bp, Zea mays
gaagcgtgcggagagaccgaagaagcgggagagatggctcgtaccaagcagactgctcgcaagtccacgggagggaaggctcccaggaagcagcttgccaccaaggctgcccgtaagtctgcccccaccactggtggagtgaagaagcctcaccgctaccgccctggaactgttgccctccgtgagatccgcaagtatcagaagagcactgagctgctgatcaggaagctgcccttccagaggctcgtcagggaaattgcacaggacttcaaaactgatttgcgtttccagagcca

SEQ ID NO: 45950 - DNA, 293 bp, Zea mays
ggtagcgctcctgcaaacatggtgaacgttcctaatacacgccggacattctgcaagaaatgtgggaagcacgaagcccacaaggtgacgcagtacaagaagtgcaaggattctttgtatgcccagggaaagcggcgtgatgacgttagacagagtggctacggccggcagactaagcccattttccgctgaaagtctataactacgaagaagattgtgctgagacttgagttcgtggagcccaactgcagatctaagagtatgctggcgattaagagatgcaagcgttttga

SEQ ID NO: 45951 - DNA, 291 bp, Zea mays
ctgcagctgtcgggagcaggcaatggcgccggatctaagcgaactcgccgccgccgctccagcccgtggcgcctacctcgccggcgtcggtgtcgcggtcctcctcgctgcctccttcctcccagtagccgagtcgtcctgcgtgcgagataactcattggtgagagacataagccaaatgccgcaaagcagctatgggattgaaggattgtcacatataacagttgctggtgcgctcaatcatgggatgaaggaggtggaagtgtggcttcagacaataagtccaggtca

SEQ ID NO: 45952 - DNA, 232 bp, Zea mays
tagcgtcgccgtcgcctcggcgctcgccgccaccgccgtcccagccctcgtccaggcgcgcggccaccgcatcgagaccgtcccagagatgcccctggtcatctccgactctgcggagtccatcgagaagagctcccaggcgctaaagatcctcaagcaggtcggcgcctacgccgacgccgagaaggccaaggactccgtcggcatccgccccggcaagggtaagatgcgc

SEQ ID NO: 45953 - DNA, 297 bp, Zea mays
aagcaaggggttccatcattgaataagccgactatacgtggtgatcatctgttcactgttaaagttgcaatacccaagcgcataagtgggcgtgaaagggaattactggaggaacttgcatctttgagtaatggtggctttgctcgaacagatgccaagccaaaacctgcccagccaaaacgtgtacatctagagaaagaagttggtgctagccaagaagatacagacaaatctaaagcagcgggtgattggttgaagaaacttacagattttgctgggtcaattgctaatggtgct

SEQ ID NO: 45954 - DNA, 318 bp, Zea mays
ggcagcacaaactattggagtgaaagcaatgatggtgccaattactgctgggatcttgtctgctttaaggagagtattagctcggcgtgtttctctcaagaatcaacttaaaaggcggctccatgctataactattgcttctgctacttgtttcctttttccgtttgccatgtgggatacgatcctaggttcggcatctgacagcattgttaaattacaactaccaagttgggcatactttagtactgttttatttggaatggtgcttatattctatgttgacaatgttgctgaagaaaagttgcatctggtcttctc

SEQ ID NO: 45955 - DNA, 318 bp, Zea mays
ccagccgccaccaggtgcagagtctttcgtcatctcttctccggcgaagaacccccagtcgcccaccagatcacttgttaaactttgttgaggggtgatggcggtttctttcgcaaacctcagctccgaggcagggcttaagaagcttgatgagtaccttctcactcgcagctacatcactggctaccaagcttccaaggatgacttggctgtctacacttcgttttcgtctgctccctcgtccaagtatatcaacgtagcaaggtggtttaatcacattgatgcgctcgtgaggctgagcggaattactgcagaggg

SEQ ID NO: 45956 - DNA, 318 bp, Zea mays
  unsure (1)..(318): unsure at all n locations
ctgatcattttcctaaggaacagacttaagtatgccctgactggagatgaagtaaaaaagatttgcatgcagcgattcattaagattgatgggaaagtcaggaccgatataacctaccctgctgggtttatggatgtcatcagcattgacaagactggagagaacttccgtctgatctatgacaccaagggtcgctttgctgttcatcgaattacacctgaggaggccaagtacaagttgtgcanagtgagcaagatctttgtgggcacaaaaggaatcccacatctggtgacgcatgatgcccgtactattcgatac

SEQ ID NO: 45957 - DNA, 307 bp, Zea mays
gcagcgttggcgggccttgtagcgaggagggggtgcggaggcgcggcgactgttcgcgggatgagcttcggcggcacagctccctcgcatcaggtgcgaagaggccgttcgagtacgggagaacgcatgtggtgaggcccaagggcacgcacaaggccaccattgtctggctccatggacttggggacaatggagccagctggtctcaactactggaaactcttccccttcctaatataaaatggatatgccccactgcaccttcaagacccgtgtcagtgtttggcgggttcccctccacagcatg

SEQ ID NO: 45958 - DNA, 306 bp, Zea mays
attcatttataattgctactaagacagttagcgcagaagtatatgtttttgactatagcaagcacccatctaagcctccactagatggtgcatgcaaccctgatttacggctgaagggacataattctgaaggatatggcttatcatggagtatttttaaagagggacatttgttaagtgggtctgacgatgctcaaatttgcttgtgggacattaaagcaaatagtagaaacgaaagtcttgacgccttgcagatttttaagcatcatgatggtgtcgttgaagatgttgcttggcacttgaggc

SEQ ID NO: 45959 - DNA, 304 bp, Zea mays
ggaggttggaagtgaaacagttatagacaaaagtaaatccatcaaaacttggctgatgcagatctttgaggaaagtggtaacagtgacattgaaggtgttgactccagcaatgcatgttatggcgggacagcagccctactgaattgtgtgaattgggtcgaaagtaattcctgggatggccgttatggtcttgtcgtttgcacggatagcgcggtttatgccgaaggccagctcgtccaacaggaggtgctgctgctatagcaatgctcattggtcctaatgctccaatttccttcgagagca

SEQ ID NO: 45960 - DNA, 310 bp, Zea mays
atccgctcccctacctctccagcatctcccgtctccgtcgtctcgtctctgctcctcacctcgccgccagccatgggcaagatcaagatcggaatcaacggtttcggaaggatcggcaggctcgtggccagggtcgccctgcagagcgaggatgtcgagctcgtcgccgtcaacgaccccttcatcaccacggattacatgacctacatgttcaagtacgacaccgtgcacggccaatggaagcacagcgacatcaccctcaaggactccaagacgcttctcttcggcgagaaccggtcaccgtctttgg

SEQ ID NO: 45961 - DNA, 310 bp, Zea mays
gcggcgtgttcaaatcccacaatcttcttgtagcacaccactgtcttcgtccaactcggcggcgatgtctgggcgcggcaagggcggcaaggggctgggcaagggtggtgcgaaacgccaccgtaaggttctccgcgacaacatccagggtatcacgaagccggcaatccggaggctggcgaggaggggcggcgtgaagcgtatctccgggcttatctacgaggagacccgcggcgtgctcaagatcttcctcgagaatgtcatccgcgacgcgatcacctacaccgagcacgctcgccgcaagaccgtc

SEQ ID NO: 45962 - DNA, 313 bp, Zea mays
gaaggcatgaaaaagaagggaatccgtgtgcctgggattggtcacaggattaagagcagagacaacagggataagcgtgtgcagcttctacagaaatatgctcacacacatttcccttcagtcaagtacatggaatacgctgttcaggttgagacctacaccttgtcaaaagccaacaatttggttatgaatgtcgatggtgcgatcgggtcccttttcttggatcttctatctggaagtggaatgttcaccaaacaggagatcgatgagattgtggagatcggttatctcaatgggctctttgtgcttgcac

SEQ ID NO: 45963 - DNA, 303 bp, Zea mays
cgttgtttgagtagcaacaggctcacaattccgattcagattctgaggaagagatggttgaaggcaacttgaccatccctgacagaaaggagagctatgaacttccatcgcaagctgatctcatacgtcaggcttttgctggtgatgatgttgaagctgaatttgagaaagacaaaatggatgttttaaatgaggagaatcctgaacctgaaaagcctgctacttgttcctggctggggccagtggacagacatccaacagataagaggacttccctcatggatgataaaagaacatgaagtt

SEQ ID NO: 45964 - DNA, 304 bp, Zea mays
ggcaccaccactgacctgggacagcgaatcgacaatgccgtcttctgtctcgtggggcatcctcctgctggcaggcctgtgctgcctggtctgtgtctccctggctgaggatccccagggagatgctgcccagaagacagatacatcgcaccatgatcaggatcacccaaccttcaacaagatcacccccaacctggctgagttcgccttcagcctataccgccagctggcacaccagtccaacagcaccaatatcggcttctccccagtgagcatcgctacagcctttgcaatgctctccctg

SEQ ID NO: 45965 - DNA, 307 bp, Zea mays
ccccaagcgaggtggcagggcgccggtgccggccaagaagaagacggataaagtgacgaaccctctgtttgagaagaggccgaagcagttcggcatcggcggcgcgttgccgcccaagaaggacctgcaccggttcgtcaagtggcccaaggtcgtgcgtatccagcgccagcgccgcatcctcaagcagcgcctcaaggtaccaccggcgctcaaccagttcacccgcaccctcgacaagaacctcgctacgaacctgtttaagatgcttctcaagtaccggcctgaagacaaggcgtgccagaag

SEQ ID NO: 45966 - DNA, 306 bp, Zea mays
cactgccgcgccgccaccccctacaggtaaggaagaggagggcaggatgtcgcaccgtaagttcgagcacccgaggcacggctccctcggcttccttcccaggaagcgctcctcccgtcaccgcggcaaggtgaagtcattccctagggatgaccccaagaagccttgccatctcactgccttccttggctacaaggctggcatgactcacagtgtccgtgaggttgagaagccaggatccaaactccataagaaggaaacttgtgaggctgttaccatcattgaaacccctcctcttgtcattgt

SEQ ID NO: 45967 - DNA, 296 bp, Zea mays
ctcgttccatttccccatctcccagatccaattcgcgagtgctcgctcctctgcggccatggcgctctctgtggagaagacctcgttgagacgggagtacaaggtcaaggatctctcgcaggcggacttcggccgctgcgagattgagctggccgaggtcgaaatgcccggcctcatggcgtgccgcgccgagttcggcccgtccaagcccttcgccggcgctaggatctcggggtctctccacatgaccatccagaccgccgtcctcatcgagaccctcaccgcgctcggcgccg

SEQ ID NO: 45968 - DNA, 296 bp, Zea mays
acacactcgagaactccatttcgatcccatttgaaatcaacccatcctcgtttcctccgtctagcagcctctcaccctcatggccaagatcaagatcgggatcaatgggtttggcaggatcggaaggctggtggccagggtggccctgcagagcgacgacgtcgagctacgcgccgtgaacgaccccttcatcagcaccgattacatgacctacatgttcaagtatgacactgtgcacggacagtggaagcaccatgaggtcaaggtgaaggactccaagacgcttctctttggtg

SEQ ID NO: 45969 - DNA, 298 bp, Zea mays
cctctccccgcgggccgccagaggcaatttcgccctcgattcgaccccgattcgtccgcccgcgaccgggattccctccgccaagcgcggatctgaacgctgcgctccgtgtcgccgctcgaatccgccatgaagggggccaaatccaagggcgccgccaaggccgatgccaagctggcggtgaagagcaagggggcggagaagcccgccaagggcaggaaagggaaggccggcaaggaccccaacaagcctaagagggctcccagcgctttcttcgtgttcatggaggaatttcgca

SEQ ID NO: 45970 - DNA, 295 bp, Zea mays
accagcaggagctctttgtcgcagccgagggcatgtacacgggccagttcgtctactgcggtcgccgcgccaccctctccatcggcaacgtgctgcccctccgcgggatccctgagggtgccgtcgtctgcaacgtcgagcaccacgtcggtgaccgcggtgtcttcgccagggcctctggggactacgccattgtgatcagccacaaccctgacaacggcacatcgaggattaagctgccctctggcgccaagacgattgtccccagcagctaccgtgctatgattcggcaggt

SEQ ID NO: 45971 - DNA, 293 bp, Zea mays
aaaccctcctccagtgctcttttcttctagccgccgccgcaaccgcttgctagcgctctgcgctctcatcctcgcgtccgtggaaggtcgtctcgacatggcctccgagacggagacgttcgccttccaggcggagatcaaccagctgctatcgctcatcatcaacaccttctactccaacaaggagatcttccttagggagctcatttcaaactcctccgatgccttggataagatcaggttcgagagtttgacggacaagagcaagctggatgctcagcggagctgttcat

SEQ ID NO: 45972 - DNA, 294 bp, Zea mays
agccggatctaagcgaactcgccgccgccgctccagcccgtggcgcctacctcgccggcgtcggtgtcgcggtcctactcgctgcctccttcctcccagtagccgagtcgtcctgcgtgcgagataactcattggtgagagacataagccaaatgccgcaaagcagctatgggattgaaggattgtcacatataacagttgctggtgcgctcaatcatgggatgaaggaggtggaattgtggcttcagacaataggtcgaggtcaaaggacgcaaatccagaggcattcctgtg

SEQ ID NO: 45973 - DNA, 250 bp, Zea mays
gcgggcagcagcacacagccccatcccaatcctagtcgatcttcttcccctcctcaagaaaagaagctgaaccatggggaagagaaagtcagctgctaagccacctcctaagaagcggatggacaagcttgacactgtcttttcctgcccattctgcaaccacgggagtagtgttgagtgccgaattgacatgaagaatctgattggcgaacatcttgtagaatctgtcaggaaaacttcagcacaactg

SEQ ID NO: 45974 - DNA, 256 bp, Zea mays
caacctcctctgcttccgagatctctccccacctcccggtccgctagcagatagcgggggccagagagatcgagatccggaggcgctacgccacccatcagcgtctgcggcaatggcgggcacggtgacggtcccggggtcgtcgaaaccctccacgccgctgctcaaggacgagctcgacatcgtgatcccgacgatccgcaacctcgacttcctcgagatgtggaggctcttcttccagcctaccactcatcat

SEQ ID NO: 45975 - DNA, 290 bp, Zea mays
gacacccagctcatcgcccacgacaaggaggtctacgacatcgcctggggcggcgcgggggtctttgcctccgtctccgccgacggctctgttcgcgtctttgatttacgggacaaggagcactccacaatcatttatgagtctggttcaggtggcagcagcggcggcggttccaactctggcgccggagatggtgggactgcgtccccgacaccactcgtgaggttgggctggaacaagcaggacccaaggtacatggccaccatcatcatggacagccccaaggtggt

SEQ ID NO: 45976 - DNA, 298 bp, Zea mays
gagagagagacggtcccgcagcggcggaggcggagatgggggcgtcggatctagaccggcagatcgagcagctgaagcggtgcgaaccgctcacggaggcggaggtcaaggcactgtgcctcaaggccatggagatcctcatcgaggagagtaacgtgcagcgcgtcgacgctcccgtcaccatttgtggggacatacatggacagttctatgacatgaaggagctgttcaaagttggaggtgactgcccaaagacaaactatttgttccttggggattttgttgaccgaggatttta

SEQ ID NO: 45977 - DNA, 245 bp, Zea mays
cgtccctcgccttcgccgccgaatccgagactccgatctcgggttcaccgcagcgcacagagcagccccgactcccggcccgatccgcgctctcctctccgtcgcttcagtcatggcaggaatggcacctgagggttctcagttcgatgctaagcactatgattctaagatgcaggagctgctgagcaccggtgaaactgaggagttctccacttcatatgatgaagttttagagagtttgatga

SEQ ID NO: 45978 - DNA, 180 bp, Zea mays
gagatctctccccacctcccggtccgctagcagatagcgggggccagagagatcgagatccggaggcgctagcgccacccatcagcgtctgcggcaatggcgggcacggtgacggtcccggggtcgtcgaaaccctccacgccgctgctcaaggacgagctcgacatcgtgatcccgacg

SEQ ID NO: 45979 - DNA, 258 bp, Zea mays
ctcgaggccgctccgccacctcgccactcgcctcttctcgctctcgccaccgggccagggaagggaccatccgatcggctccgtcatggctggagctgctgctctcaatgagggtatcctttcttccgtgtccgagaaaaatgttgctgctcacccatggcatgatttggagataggaccagaggctcctgaagtgttcaattgtgtggttgagattcctagaggcagcaaggttaagtatgagttggacaagatatc

SEQ ID NO: 45980 - DNA, 263 bp, Zea mays
gggacataaatcctccagcagggattaggcaggctatggagatgcaggctgaggcagaaaggaaaaaacgcgctcaaatccttgagtcagaagggatgaaacaggcccaaatccttgaatcagaagggaaaaagactgcccagatccttgaatctgaaggagctatgttggatctagcaaaccgtgccaagggtgcggctgaagcaattcttgccaagtcagaagctactgctcgtggaatgagattggtttcagatgcgatg

SEQ ID NO: 45981 - DNA, 299 bp, Zea mays
ctccctctcgtcgccgtcctctcccgttcgcaacgccacgctccccaccgccgaaatggccccgaagcgaggtggcagggcaccggtgccggccaagaagaagacggataaagtgacgaaccctctgttcgagaaaaggccgaagcagttcggcatcggcggcgcgttgcctcccaagaaggacctgcaccgattcgtcaagtggcccaaggtcgtgcgcatccagcgccagcgtcgcatcctcaagcagcgcctcaaggtgcctccggcgctcaaccagttcacccgcaccctcgaca

SEQ ID NO: 45982 - DNA, 276 bp, Zea mays
ctgagatgcctccgctggaggatgacgccggcgaaagcaagatggaggaggtcgactaagcttcggatcactgtcgtttatccctaattacatatgataagctacatcttgactactgtttgaggttttccgcacgttaacggttctcctgccggccaggcaatgagtttgttgtatagctatatggtactctgttttacagtttgttcttgttatctgtaatcctactagtatagtacatgttctacaaaaaaaaaaaaaaagggcggccgccga

SEQ ID NO: 45983 - DNA, 285 bp, Zea mays
gaaacgaccgcgaagcacaggtcgaatgcggcggcggcgatggggagcgacacggagacggagaagaaggcctcggcggcgctgatgtccatcgcgaaacccctcgctggaaagaagctctgcaagcggaccctcaagctcgtgcgacgagcctccgaggcgaagtgcctcaagcgcggagtcaaagaggtagtcaagagcattcgccgcgggaacaaaggattgtgtgtgatcgctggaaatattgctcctattgatgtgattacacagtgttcagatactatg

SEQ ID NO: 45984 - DNA, 285 bp, Zea mays
gcaccagcagcagcagcagaagagcagcgcctgagctccagcaataatggccgagaagggcgtgaaggtgttggggatgtgggcgagccccatggtgatcagggtggagtgggcgctgcggctgaagggcgtcgagtacgagtacgtcgacgaggacctcgccaacaagagcgccgacctgctccgccacaacccggtgaccaagaaggtgcccgtgctcgtccacgacggcaagccggtcgcggagtccaccatcatcgtggagtacatcgacgaggtctggaa

SEQ ID NO: 45985 - DNA, 289 bp, Zea mays
gaggactggcacctatcgccagctcttccatcctgagcagctcatcagtggcaaggaggatgcagccaacaacttcgctcgtggtcactacaccattggcaaggagattgttgacctgtgccttgaccgcatcaggaagcttgcagataattgcactggtctccagggcttcctcgtcttcaacgctgttggtggaggaacgggctctgggcttggttctctcctcctggagcgcctgtctgttgactatggcaagaagtccaagctcggtttcaccgtgtacccatcc

SEQ ID NO: 45986 - DNA, 235 bp, Zea mays
gtacgcaaccccgactcacaagcacgtcgtctacgactggtttagcgccacgttccacacaacacactatcttgccacctctgctgagagcgagaagagatggcaggcaagggtgatctgccggcaatccgcatcgatctcggcacgacgtactcttgcgtcggcgtctggcagcacgaccgtgtcgagatcatcgccaacgaccagggtaaccgcaccacaccctcgtacgtcg

SEQ ID NO: 45987 - DNA, 225 bp, Zea mays
ggctggcaggttagccctgacctctatggagacaacaacaccaggctgttcacatattggactagtgatgcataccaagccacaggttgctacaacatgttgtgctctggtttcattcagataaacagcgaggttgccatgggggctagtatcttccccatctcgaactacgcgggctcccaatatgatattagcatcctgatctggaaggttagcatttagcag

SEQ ID NO: 45988 - DNA, 268 bp, Zea mays
ggccgataaacaatacaacatagccctactccctgcctaacaaaaactcataatcatctagtctgaactgtgatggatatcccatgcgtaattttgttatactgaattcgttaagtttgcaggacatgctcttgatattctttcacgagcaccactctggagagagggtcttgactatcggcatggtacaggccatggaattggatcttatttgaatgtccatgagggtcctcatctaattagcttcagaccttctgctcgaaatgta

SEQ ID NO: 45989 - DNA, 309 bp, Zea mays
cacacacacggcaaccaagatgctcactccaaatccagaacgtcggacacctcacgctgtcaagatcgcagatcaaccgtgaaaaccctgactggccagactatcactctcgaggtggagtcgtctgacaccattgacaacgttaaggccaagatccaggacaaggagggcatccccccagaccagcagcggatcatcttcgctggcaaacagcttgaggacgggcgcacgcttgctgactacaacatccagaaggagagcaccctccaccttgtgctccgcctcaggggaggcatgcagatcttcgtg

SEQ ID NO: 45990 - DNA, 280 bp, Zea mays
  unsure (1)..(280): unsure at all n locations
ctcgaaccctctcgcgcttggcttgctttcactctccagggccccactcccacctcgccgccgcagccatggcgatcacagcgccaactcccgacatcctcggcgagcgccagtccggccaggacgtccgcacgcagaacgtgatggcttcgccngcggtggccaacatcgtcaaatcctcgctcggccccgttggtctcgacaagatgctagtggacgatatttgtgatgttacaatcactaatgattgagcaaccatacttaagatgctgggaattga

SEQ ID NO: 45991 - DNA, 229 bp, Zea mays
tgaacggatcaagtatcaaggtcttcatcatggatccagctacttggagcacctcaatttcttgtctgctataagggctcaaggtgcatccggaccatctgtgaacttaagtgacggcctactatctgttgccgtcggtgtggctgggcaattatcaatcgagcagggccggtttgtaaccatggaagaggtcttaggtttgtagcctggtgatattcaggcctctaat

SEQ ID NO: 45992 - DNA, 231 bp, Zea mays
accatatcaaacatggttgagaaagtaccttcattcaaaggaggtggaacattgtggtttactgacctgacgactccagattctctttacatcttgcctatgttaacaggactgaacttcttggccacagtggagcttaacttgcaagaaggaatggagggaaatcctatggctggtaaaatgaagtacttttctagaggagaacctgttttgacagtcccatttacaatg

SEQ ID NO: 45993 - DNA, 265 bp, Zea mays
acaaactggataaatgtgtgaaaagtggagcaaagatagttctgtctcggctagctattggtgatcttggaacacagtattttgcagatcgagacattttctgtgctggccgtgtcactgaagaagatttgcaacgtgttgctgcagcaactggtggaactgttcaaacttctgtaaataatgtcatcaatgatgtactcgggttcctgtaaggtattcgaggaaaagcaagtaggcaatgaaagattcaacatatttagtggct

SEQ ID NO: 45994 - DNA, 162 bp, Zea mays
tagctgcaccaagaagacacatgaatgggacaagactatcattgaatacaagacgaataagccatctcgcctgccattccttgacattgcacctctggacatcggtggtactaaccaagaattccgtgtggaggttgcccctgtctgtttcaaataagtgaa

SEQ ID NO: 45995 - DNA, 302 bp, Zea mays
caggagacgaaagggagttttgagaagcataaatggctcctaaagccgctcctgtcaagaagggtgatgccaaggcccaggccttgaaggtggccaaggctgtgaagtctggggcaggcaagaagaagaccaagaagattcgcacatctgtaacatttcaccagcccaagaccctgaagaaggccagggacccgaagtacccaagaatcagcactactggaagaaacaagcttgatcagtaccaaatcctcaagtaccccctcaccacagaatctgcaatgaagaagattgaagataacaac

SEQ ID NO: 45996 - DNA, 296 bp, Zea mays
atacatttcagtctgggttcctgtccattctttatagcctcgggaccaagccattgcagatatgggataaggaagttgtgaatgggcacattaaacgaccccaagatgaagatatccaatctaatgtacttgaaattgttggaacaaatgtacagtcaacttacatcacatgcccagctgatccttctgctactcttgggattaagcttccatttctggctattattgtgaaaaatcttaagaaatacttcacgtttgagatccaagttctggatgacaagaatgtccgacgtcga

SEQ ID NO: 45997 - DNA, 234 bp, Zea mays
gctgtagcaaatcggactgatgcttgtttcatccgtgtaattggaagtgagttagttcagaagtatgtcggcgaaggtgctcggatggtcagggaacttttccagatggcccgctcaaagaaagcgtgcattgtattcttcgatgaagttgatgctattggtggtgctcgttttgatgatggggtgggtggcgacaatgaggtgcagcgtacaatgttgggaaatagtaaacca

SEQ ID NO: 45998 - DNA, 271 bp, Zea mays
acgcggcgagttcaaatcccacaatcttcttgtagcacaccactgtcttcgtccaactcggcggcgatgtctgggcgcggcaagggcggcaaggggctgggcaagggcggcgcgaaacgccaccgtaaggttctccgcgacaacatccagggtatcacgaagccggcaatccggaagctggcgaggaggggcggcgtgaagcgtatctccgggcttatctacgaggaaacccgcggcgtgctcaagatcttcctcgagaatgtcatccgcg

SEQ ID NO: 45999 - DNA, 179 bp, Zea mays
cagccgacgaagggtacccggccttcgtgctcgtcaacagggtcagcggcgacgccatcaagcactcccagggcgagggccaccccgtcaagctcgtgccctactaccccggctaccatgacgagtcggtgctatggacggagagacgcgacgtcggccatggcttccgctcaggccgc

SEQ ID NO: 46000 - DNA, 294 bp, Zea mays
cgcgacactcgaactcgaatccctcatccagcctggcgctggcgtcgccggtcgccgccgctcgattgcctccgcctgaatatcccttgccccataaggcctgaccttgaaagcctcgcctcttgatcccggcggcggcggaggggagggcgatgccgaagcggacgacacacacctactcgagcgaggacgcactgccggagggccccgagtccgaccttttcgtatactactgcaagcactgcgcctcacatgtcctcatcaccgatacccaattgcagaaaatgcccaagc

SEQ ID NO: 46001 - DNA, 293 bp, Zea mays
aggtgatgggatggcggatatggcattccgttgcattcaggaaatggatattgacaacaggatgacgctctatcaacatattgtcttaagtggaggaagtaccatgtaccctggtctgccaagtcggttggagaaagaaattcttgaccgttatcttgatgtagttttgaagggaaacaaagatggcctaaagaaattacgactgcggatagaggatcctcctcggagaaagcacatggtgtatctgggaggtgcagtgcttgctgggatcatgaaggatgcacctgagttct

SEQ ID NO: 46002 - DNA, 259 bp, Zea mays
ctgcttccgagatctctccccacctcccggtccgctagcagataccgggggccaacgagatcgagatccggaggcgctagcgccacccatcagcgtctgcggcaatggcgggcacggtgacggtcccggggtcgtcgaaaccctccacgccgctgctcaaggacgagctcgacatcgtgatcccgacgatccgcaacctcgacttcctcgagatgtggagggccttcttccagccctacccactcatcatcgtgcagga

SEQ ID NO: 46003 - DNA, 214 bp, Zea mays
cacactacacctcccgaactccgcactacaagtttcgcttctcgtcgcgacgactgggcgagaccgacgccgccgccgccgcctgagttctttagaaatggctgatggtgaggacatctagtctcttgtctgcgacaatggcactggaatggtcgaggctggctttgctggcgacgctgcaccaaggggtgttttccctaggattgttggccgt

SEQ ID NO: 46004 - DNA, 245 bp, Zea mays
tcggagggatggaccccgagaagcgcggctacgagctccaaaattttgtggcgcatgatgcggaagttaggtccctgtctattggcaaaaagtctaggcgtgtgttcatcaccggtggcaatgatcgcaaggtcaaactgtgggccatttgcaagcaaactccagttctgaccttgtccggccacactactgcagtggaggctgtgcagtgtgattcagcagaggtgctttttcttgctggctcg

SEQ ID NO: 46005 - DNA, 189 bp, Zea mays
atgctggtgctgtttttgcagatgcatgcttgaagggtctcaatggagttccggatattgttgagtgctcttttgttcaatcaactgtaacagagcttccattctttgcatctaaggtaaggcttgggaagaatggagttgaggaagtgcttggattaggtgagctgtcggactttgagaaagaagggt

SEQ ID NO: 46006 - DNA, 306 bp, Zea mays
ggcaaccaacagccacagcctagcagaaaggttgaggagggagaagattagcgagaggatgaagctgctgcaggacctcgttcctggctgcagcaaagtcactgggaaggcggtgatgcttgacgagatcatcaactatgtccagtccctgcaaagacaagtcgagttcttatcaatgaagctcgcaacggtaaacccaaggctcgacctcaacatagaagggcttctatcgaaagatcttctccgcttccctggcgttccttcgtcttcccttggattctccccggaaatgatgcacccacagct

SEQ ID NO: 46007 - DNA, 303 bp, Zea mays
tagtgactggcgaggcaaaagcgcaaacgcgaccacagacagagcgcgcttcaaggccttttttttttgagataacaaggaggagaggaggagagggcggtcacgatcacctgggtgaaggcgaggcagatcttcgacagccgcggcaaccccaccgtcgaggtggacgtgggcctcagcgacggcagctacgcgaggggggccgtacccagcggcgcatccactggaatatatgaggccttggagttgagggatggaggatctgattatcttggcaagggtgttcttaaggctgtcagcaac

SEQ ID NO: 46008 - DNA, 303 bp, Zea mays
ctgatacacaagacgctgagactgaactgcaggacgaaaccatgaagagcctgatccttctagccatcctggccgccttagcgatagtaactgtgtgttatgaatcacatgaaagcatggaatcttatgaacttaatcccttcattaagaggagagatgcaaataccttcatatcccctcagcagagatggagagctagagtccacgagaggatccgagagcgctctaagcctgtccacgagctcaatagggcagcctgtgatgactacagactttgcgaacgctacgccatggtttatggat

SEQ ID NO: 46009 - DNA, 242 bp, Zea mays
taccacaagataggccaacgtgctgaagaggctcttgctgatccttaattcaagaatatagccagtgtggatagagagccttctgcacaggctgtcacaaagcttgaatttgaattcgagaggcggagagttacaaaggaagacataagggagcttatatatagggaaattcttgagtatcatccaaagatgctgagggagtttcttgagggcactgagtcaagtggattcatgtaccctag

SEQ ID NO: 46010 - DNA, 301 bp, Zea mays
ctcgtgtccgccgctacacgcgccgccggaaccctagcctccgccgccacaggcagccgggatggagaaaggagcctcggaggcgtcgcccccttgcgctcgctgcggcaagcccgctcagcttcaatgccccaagtgtgtcgaacttaagttaccgcgtgagaacgcagctttctgcacacaggattgttttagggcagcatggagctctcacaaatctgttcacccaaagcctggtgcaccggcatcccagcagtctccagaaggttggaaatattgtttgagaaaagggcgggaacgt

SEQ ID NO: 46011 - DNA, 300 bp, Zea mays
agcgagtgtctgctcactcagtcctgcgcaagagctcgttctcggagaaaaaaacgcgggaggcgataatggagagaggtgccggtgcgagcgagaaagggacggtgctggtcacgggggcgtcgggcttcgtcggctcctggctcgtcatgaagctcctccaggccggctacaccgtccgggcgaccgtgcgcgatcccgcgaacgttgggaagacgaagccattgatggagcttcgcggagcaacggagcgcctgtccatatggaaagccgacctggcggaggaatgcagcttccacg

SEQ ID NO: 46012 - DNA, 302 bp, Zea mays
  unsure (1)..(302): unsure at all n locations
acntcgagccgattcggctcgagagcgcaccactcgcatcgtgtgctcagtcagatcccagtcccgcatttcctaaggacaggttagttggcattgaagacgatgactgcttctgcagctgctggtgtgcagatggtggctgcacgcccttgcatttcggcctcgccaggaattcttaccgcacgggtttctaggactgattgcatgctcagtaccactgctacattccccaaaatcagctgctcctggcctctaaggtttaagcgcaatgatgttgttgtaagagcaatatcggaagagtg

SEQ ID NO: 46013 - DNA, 291 bp, Zea mays
cgattgatgaagagtgctattggtgagggcatgacacgtcgagaccattcggatgtatctaatcagctttatgccaactatgctattggaaaggatgttcaggccatgaaggctgtcgttggagaggaggcactctcgtctgaggatctgctttacttagagttccttgacaagtttgagaggaagtttgtgacacaaggagcatatgacacacggaacatcttccagtcactcgatcttgcatggacattgcttcggatcttccctcgcgaacttctccaccgtattcca

SEQ ID NO: 46014 - DNA, 289 bp, Zea mays
gcgaaaccggaacactcttttcaacgttgatgatcatcagcacatagagaacggcaacctcggaaatatgaagcggtttcaattcagagagctccaggctgcaacagaaaacttcagcagcaagaacatattaggaaaaggcgggtttggtattgtttaccgggggcagcttccagatggaagtcttgtagccgtcaagaggctcaaagatggtaatgctgcaggcggggaagcacagtttcagactgaagtcgagatcccaagcttagcagtgcacaggaacttcttc

SEQ ID NO: 46015 - DNA, 306 bp, Zea mays
gacatttccaatgcaaatacctatccatctacaaaggatgcagtaccttgcattctcatcattcttgggattgatagcgtgtctcttttggaatgtcatagcaactacaacagcatggattaaaggggaaggtgttatgatctggctgcttgccattatctacttcatatctggtgcgcctggggcttatgtgctatggtatcgacctctttataatgcaatgagaactgagagcgctttgaagtttgggtggtttttcctattttacatgattcatataatcttctgtgtgtgggcagctgtggc

SEQ ID NO: 46016 - DNA, 263 bp, Zea mays
aaactccgccatcatgggtcgcatgcacgctcacgggaagggcctgcgtcagtcggcgctgccctaccgccgtagcgtgcccacgtggctgaacttgacgtctgacgacgtgaaggaacaaatttacaagttggccaagaaaggcctgactccttcccagataggtgtgattctgagggactcacatggtgtggcacaggtccgttttgtgaccggaaataaaatcttgagaatccttaagtcaaaaggccttgcccctgatc

SEQ ID NO: 46017 - DNA, 277 bp, Zea mays
gttttgcggcatcatggctgcccttcggcctctggtgaagcccaagatcgtcaaaaagaggaccaagaagttcatcaggcaccagtcggaccgatatgtgaaaattaagcgaaactggcggaaacccagaggcatcgacaacagggtgcggagaagattcaagggccagatcctgatgcccaatattggatacgggagtaacaagaaaaccaagcacatgctgcctagcggcttccggaagtttctggtccacaatgtcaaggagcttgaagtgctg

SEQ ID NO: 46018 - DNA, 302 bp, Zea mays
gcaggactcgcttcaagctcctcatctcgcgcaggggggtcgcctgagatcacagacacaatggtgaaggcagttgctgtcctcgccggcactgatgtcaagggcaccatcttcttttcacaggagggggatggtccgaccaccgtgactggaagtatctctggcctcaagccagggctccatgggttccatgtgcacgcgcttggcgacaccaccaacggctgcatgtcgactgggccacacttcaatcgctgttgcaaggagcatggcgcaccggaagatgaggaccgccatgccggtga

SEQ ID NO: 46019 - DNA, 306 bp, Zea mays
ccttcatcaacgacatcttcgagaagctcgccgcggaggccgccaagctcgcccggtacaacaagaagcccaccatcacctcccgcgagatccagacctccgtccgcctcgtcctccccggcgagctcgccaagcacgccgtctcggagggtaccaaggccgtcaccaagttcacctcgtcttagcccccttgtagtaggcgtcgttgttgtctgcttctcaagcaagcactgtgatgtgccgcttctcatggtagtagtggtggttggctggtgtgtgtaagtggtgcagtggcttttgcctgtg

SEQ ID NO: 46020 - DNA, 303 bp, Zea mays
agcattttgaatccatgcagaaagattttggcatacatcccactacagagcattatgcaagcattgttactatgcttggacagtctggctacattgtcgaggcttatgaattcgtggaacggatgcctgtggaaccaagcattgaggtatgggaaaatttgatgaacatgtgtcgacttaatggctttttagagcttggagatcgttgtgctcagatcatagagtgcttggattcttctaggctgaatgaacagtctaaaatgggtctgttccctgtcgatgtgtcagatcttgcaaaggaaa

SEQ ID NO: 46021 - DNA, 303 bp, Zea mays
cttcggatccgcattcagcgcaccaggtgtgaaggaagggggacgcggaggaagatggggctcgcgttcgggaagctcttcagccggctcttcgccaagaaggagatgcggatcctcatggtcggcctcgacgccgccggtaaaaccaccatcctctacaagctcaagctcggcgagatcgtcaccaccatccccaccatcggtttcaatgttgaaactgttgagtacaagaacattagcttcactgtctgggatgtcgggggtcaggacaagatcagacctctttggaggcattacttccag

SEQ ID NO: 46022 - DNA, 309 bp, Zea mays
caacaaggtcgttaagcttcaagaagagcttgacattgatgtgcttgtgcatggcgagcctgagagaaacgatatggttgagtacttcggtgagcagctctccggttttgcgttcactgccaatggctgggtgcagtcttatgggtcaaggtgcgtcaagcctccgatcatctacggtgacgtgagccgccccaaccccatgaccgttttctggtcgaagacggcacagagcatgacgtctcgcccaatgaaggggatgctgactggcccagtcacaatcctcaactggtccttcgtccggaatgacca

SEQ ID NO: 46023 - DNA, 288 bp, Zea mays
accgcggtctgctcgttcgatctgtgcagcagatctgaggtcccgggcgaccgtgaagcagcttcaatcgtcggcatggcgctcgtattgcatagtggggctggaaacaagaatgccttcaaagcacttattgctgcagaatacagtgggatcaaggttgagttcaccagggtttttgagatgggtgtctcaaacaagacccctgagtttcttaagatgaacccccttgggaaggttcctgttctggagactcctgatggccctgtttttgagagtaatgctatcgcg

SEQ ID NO: 46024 - DNA, 296 bp, Zea mays
aaccagaggctcttaggggactgcctcttgcgcctcctatggttggcccacctgcttatccatactttcaagcccagcctgaacctgaacctcagcctgatcctgagcctgatgcggaagaggaacgtgtcaagctgctcaagcagatagagttctacttcagcaaggagaacctatgctcagatgtgtacctgaggcagcagatggatggtcagggctgggttgatttatctcttatagctggcttcaaaaaggtccaagggctgaagaaggacctacaatatataaaagagacg

SEQ ID NO: 46025 - DNA, 298 bp, Zea mays
ccaactcgccgtctgccttctgcgcctccatttcggcctctgtcccttgcaagttcaatctcacctccaaccatgggtaaagagaagtcccacatcaacattgtggttattggccatgtcgactctggcaagtcgaccaccacaggacaccttatctacaagcttggaggcattgacaagcgtgtgatcgagaggttcgagaaggaggctgctgaaatgaacaagcggtccttcaagtacgcgtgggtgctcgacaggctcaaggctgagcgtgagacaggtatcaccgatgatatcg

SEQ ID NO: 46026 - DNA, 298 bp, Zea mays
caagcattgcaaggagggcactgagagctctattttctggtcttctattggtggaaagcagagttatacaaatagaaatgctgcacctgatgttgttattagagagcctcatttgtataccttctctctgaggaatgggaagctggaggttactgaaattttcaatttttcacaagatgatctgttgaccgaagacatgatgatacttgatacacactgtgaggtttttgtttggatgggtcagtgtgtggagacaaaagaaaaacagaaagcatttgacattggccagaaatacgta

SEQ ID NO: 46027 - DNA, 298 bp, Zea mays
cgcagtcccatcctctcgctcgccaggagaagcagccgccgatgctgctgccgcgtccacagaatggggggtttcgtgaagacccataagaccaatgcgtatttcaaacgtttccaagtgaaattcaagagacggcgggctggcaagacagactacagggccaggataaggctgattaaccaagacaaaaacaagtacaacacacccaaatacagatttgttgtgcgatttaccaacaaggacatcactgcacaaatcatatctgctagtatagcgggtgatatggttcttgcttctg

SEQ ID NO: 46028 - DNA, 300 bp, Zea mays
ggaccggaatgcccgcaacagccaccagtacacctgcaagcacaaggatccaacccctcagagcaccgagaacaagccgccgtcagcaccgccacagccacaagccttccagccggccttcacccaacccaaccaggcactgaacagtctggatttcagcctgcccatggacgggcagaggtccatcgccgagctgatgaacatgtacgacaacaacttcgtgccgaacaagaacccgagcagcgacacgtcgccgtcatggagaggccaaacgcgatgccccagcagaggatccagatg

SEQ ID NO: 46029 - DNA, 301 bp, Zea mays
agctccgtcgtcgcgtgccatcctagggtttctttccccgtcggcgcctccccagatttggccgccgccgccgctgacccaggttgtcttgatggcgcccgctgtagaagccgtgaaggagacaggcaccttccagaaggttcctgccttgaacgaaaggatactgtcatccatgtccaggaggtctgttgctgcacacccttggcatgatctggagataggtcctggtgctccaaccatattcaactgcgtcattgagataccaaggggcagcaaggttaaatatgaacttgacaagaaa

SEQ ID NO: 46030 - DNA, 304 bp, Zea mays
  unsure (1)..(304): unsure at all n locations
ccacttcccaaacccaaccggcggcgcacatcgctaccaccgtccaaagatggtgaagttcctcaagcccggcaaggccgttatcctcctccagggccggttcgccggccggaaggcgtngatcgtgcgcgttttcgaggagggcacccgtgatcgtccctacgggcactgcctcgtcgcgggcctcgccaagtaccccaagaaggtgatccgcaaggactccgccaagaagacggccaagaagtcccgcgtcaagtgcttcatcaagctcgtcaacttcacgcacctcatgcccacccgctac

SEQ ID NO: 46031 - DNA, 296 bp, Zea mays
ggcagagttgctgattctatgcttgtgaatactgcacttatgttgatctatatcactaagttcttttggtgggaatctggatattggtgtactatggacattgctcatgatagagctggtttctatatctgctggggatgcttggtatgggttccatccatatatacttcccctggaatgtaccttgtaaaccaccctttgaatttgggcccccagctagcactctcaattctgctagctggaatgttgtgcatatacataaactatgattgtgaccgtcagcgccaagaatttcg

SEQ ID NO: 46032 - DNA, 294 bp, Zea mays
ctcgagccggtcctctctgagtcaagcttgtttatctatcctctgaagattgtcatcaacacctgtggcactaccaagctcctgctcaccattccaagaatccttgagcttgctgaagagctgtctatgccacttgctgctgtgaagtactcccgtgggacgttcatctttcctggtgcacagccagccccccacaggagcttctctgaggaagttgctgcacttaaccgctactttggcggcctgaaatctggtggtaatgcttatgtgattggagatccagcaagacctgga

SEQ ID NO: 46033 - DNA, 294 bp, Zea mays
  unsure (1)..(294): unsure at all n locations
cancatcaagccccagactgaccgctgggtgttccccgagaccaacactggcatcattgtccttgctgagggtcgcctgatgaaccttgggtgtgctactggccatcctagctttgtcatgtcctgctcattcactaaccaggtcattgcccaacttgaactgtggaaggagaagagctctggcaagtatgagaagaaggtgtatgtgctccccaagcaccttgatgagaaggttgctgctctccacttgggcaagcttggtgccaagctgaccaagctcaccaagtctcaggc

SEQ ID NO: 46034 - DNA, 291 bp, Zea mays
cacagtttgtataagatggcccaaaatttgacctcaagtgagcaggaggtaatgaaactcttcgacttatttcaaaattaccatgtgagaagaacagacaaattggatgtccaggaaacaaaaagggtgttgagagaattttgtccaaattttatgaaggcattgaatgcaagtggtattaagatactgaatgacttggagaaggagataacccttgatgagatttgggacatgattggaagaatggccatggcgtacaataagaagaacagcaatgccctcaaagattag

SEQ ID NO: 46035 - DNA, 289 bp, Zea mays
tggcctgggtgtgttcagaacacatgtgctcacagggcttgcccgctgcatcttggttcagtgaacgagggtaggatccagtgcccttaccatggttgggagtactctactgatgggaaatgtgaaaaaatgccatcaacaaatatgctcaacgtgcacatccagtcattgccatgctttgagcaggaaggaatgggggtgcatggcctagggggaggatggcgactaggttcatcgatggcggcaagcagctcgtgttcgaccacgcgacacagttcttcaccgcgag

SEQ ID NO: 46036 - DNA, 299 bp, Zea mays
cttcgactcctttctggagcagctagggttccgtcctcgatccgatccgccgagtgcacaccacctttccccactccgatcgaatcgatggccgccgagggcgagaaaaagatgataaccctcaaaagctccgatggcgaggagttcgaggtggaagaggcggtggcgatggagtcgcagaccatccgccacatgatcgaggatgactgcgcgacaaaggcattccttctccatagggtaatctccaagatcctatccggggtaatcgagtactgcaacaagcacgtacatgccgcggc

SEQ ID NO: 46037 - DNA, 295 bp, Zea mays
cgttacaagggcccgacggcggtgtcgtcgccatcctgcgcagagttgaaatatatccccacaataaagaagaaagaatcgcaagaacatggggtacaactgcacctggtttaccctatgttgatgaggctattgcgtcagctgggaactggctgatcggtggcgatctggaggtgttggaacccatcaaatacaatgatggtcttgatcactacagactttcacctcggcaacttaggaaggagtttgacaagcggggggctgatgctgtgtttgccttccagttgagaaacca

SEQ ID NO: 46038 - DNA, 296 bp, Zea mays
cgcctctcgagtctcgtccacccgtcgtcctcctagctcctctactcgccagtcgccatgggcaagattaagatcggaatcaacggcttcggaaggatcggcaggctcgtggccagggtcgccctccagagcgaggatgtcgagctcgtcgccgtcaacgaccccttcatcaccacggactacatgacctacatgttcaagtacgacaccgtccacggccactggaagcacagcgacatcacactcaaggactcaaagacccttctcttcggtgacaagccggtcaacgtctttgg

SEQ ID NO: 46039 - DNA, 296 bp, Zea mays
tagctccaggagctcaaagacgccatttctggtggatcaacacagagtatgaaagatgccatggctgctctgaaccaggaggtgatgcagattggccaggcaatgtataaccagcctggtgccagtgctgctgggcctactcctggtgctgaggccggacctacgcctggtaccggaccaacgcagaatgatggggatgtcattgacgcagacttcacagatagcaattgaggggtgattgatgcatggccatgtgttgagcaaggttggcgttaaggagtgaacaaattgttcct

SEQ ID NO: 46040 - DNA, 290 bp, Zea mays
agtagcgagacttatcgtcgtcggcggcgaagatggtgtcgctgaagctgcagaagcggctcgccgcgagcgtcctcaagtgtgggaaaggcaaagtctggcttgaccccaatgaagtcagcgagatctccatggctaactcccgccagaacatccggaagttggttaaggatgggtttatcatcaggaagcctcagaaggttcactctaggtcccgtgcaagaagggcacatgaggccaagcagaagggaaggcactctggatatggcaagcgcaggggtaccagggag

SEQ ID NO: 46041 - DNA, 288 bp, Zea mays
ctcgaccgatctcattccactccgacattcacgtgcagcagtcgggagcaggcaatggcgccggatctaagcgaactcgccgccgccgctccagcccgtggcgcctacctcgccggcgtcggtgtcgcggtcctcctcgctgcctccttcctcccagtagccgagtcgtcctgcgtgcgagataactcattggtgagagacataagccaaatgccgcaaagcagctatgggattgaaggattgtcacatataacagttgctggtgcgctcaatcatgggatgaaggag

SEQ ID NO: 46042 - DNA, 289 bp, Zea mays
agttccccgaccacaccgttcctccgagcccaggagcagccccgcgccaggaggaagtttgttcttttaacaatatgtcgagggaggagaatgtttacatggccaagttggctgagcaggctgaaacgtatgaggagatggttgagtatatggagaaggtggctaagactgtagatgtggaagagctcactgttgaggagcgtaaccttctgtctgttgcatacaagaatgtgattggggctcgccgcgcttcatggcgcattgtttcttccattgaacaaaaggagga

SEQ ID NO: 46043 - DNA, 280 bp, Zea mays
aattttgacacgcgtccatcacacaaatctggtgcgattaattggttattgtgttgagagttgcttatttcttgtttatgaatttattgagaacggaaacctaagccagcatttgcactctactggaccatgagagaacttcataacccgtcccatgcagatgctggcttaggttatgaacctctctcatggaccagtagagtgcaaattgcccttgattcagcaaggggtctagagtatataccttggcacactgttcccgtgtatgtgcatcgagata

SEQ ID NO: 46044 - DNA, 285 bp, Zea mays
agctgctgctcctggcctgctacgacctcacggccacctctgtacctgtcccactagactagctgcagctagcgcctctttccctcgccgccgccccctatccgagagcgacgagcatggcgcactccctcgccgcctccttctcgccggccgccgcgcgcgccaggtgacaaatgtgatttcaagccggagctcggtttccttccagagccacaggatgacttctgtatccatccgttcaagaccaagttctcttcggttcaagatttgctgttcggctaagaa

SEQ ID NO: 46045 - DNA, 285 bp, Zea mays
cggctcgagtccactcctaccccacacagaagcggcggcggcggagcaaacgcaggcgaacgcgagggtgtgagggaaggagcaccagccatggtgcacgtcaacttctaccgcaactatggtaagacgttcaagaaaccaaggcgtcacttatgacaaggagcgtcttgatgctgaactgaagctggttggtgagtatgggctgaggtgcaagcgtgagctttggagggtccagtatgcactgagcaggatccgtaatgctgcaaggcacttgctcacccttga

SEQ ID NO: 46046 - DNA, 280 bp, Zea mays
agtcaggatactgggaaatatgtctttggtgttgatgacactctgaaggctcttgaaatgggtgctgtcgagaccctgattgtgtgggaaaatctggatatcaacagatatgtgatcaagaacagtactactggggaaattattataaaacatctgaacaaagagcaggaagctgaccagagcaatttccgtgacccatctaccaatactgatctcgaagttcaggaaaaaatgtctctcctggaatggtttgccaatgaatacaagaagtttggttgct

SEQ ID NO: 46047 - DNA, 302 bp, Zea mays
cggtctgctcgttcgatctgtgcagcagatctgaggtcccgggcgaccgtgaagcagcttcaatcgtcggcatggcgctcgtattgacatagtggggctggaaacaagaatgccttcaaagcacttattgctgcagaatacagtgggatcaaggttgagttgaccaaggattttgagatgggtgtctccaacaagacccctgagtttcttaagatgaacccccttgggaagggttcctgtttctgagactcctgatggccctgtttttgagagtaatgctatcgcacgctaatgttgctcgc

SEQ ID NO: 46048 - DNA, 287 bp, Zea mays
cctcgagccgaatcggctcgaggtcgccctcaaattcgttccgtccaggcaaggaagacatcgagcagccaaggagacgagaagatggctcgtacgaagcagaccgcccgcaagtccaccggaggcaaggccccgcgcaagcagctcgccaccaaggcggcgaggaagtctgcgccgacgaccggcggcgtgaagaagccccacaggtacaggcccgggacggtggctctgcgcgagatccgcaagtaccagaagagcacggagctgctgatccggaagttgccctt

SEQ ID NO: 46049 - DNA, 284 bp, Zea mays
ggtggaagggtgcccttgatggaattggtggccatagttccaatgtttgtggaggactttggtgaagggcgcccttggtgtaatcttattgactgttgtagatgatgaagttgcaagttaatgtatttgagtacttcgactcacgtcagcttattgtttgtggcaaccatttccgcagaattcgagaagtggagttgaagcgtgactatgcattcattgaattcagtgacccccgtgatgctgatgatgcacagtacaacctagatggcagggacgtcgatgga

SEQ ID NO: 46050 - DNA, 282 bp, Zea mays
caattccagtgagtacgtaggaagagatccgcttcatgataaaccccgaattgattgtgggtatgctattcttgtcttgtatggaagataacgacgctatagaaatctttggtgcagaacggttctcacagtatatgggttatggttcctcctttcgctttgtcggtgactatttagataccaaaccctttgattcgatgggcagacggagaactaggattgtggctatcgatgctttggactgtccagctaggttacactacgaatctggctgtctcctaa

SEQ ID NO: 46051 - DNA, 283 bp, Zea mays
cgcctcgtgtggccgtcgtctcccgttcggaacgccaagccccccctccggcgaaatggcccccaagcgaggtggcagggcgccggtgccggccaagaagaagacggataaagtgacgaaccctctattcgagaagaggccgaagcagttcggcatcggcggcgcgttgccgcccaagaaggacctgcaccggttcgtcaagtggcccaaggtcgtgcgtatccagcggcacgccgcatcctcaagcagcgcctcaaggtaccaccggcgctcaaccagttca

SEQ ID NO: 46052 - DNA, 278 bp, Zea mays
ctcgagccgattaaaagggcatgttaggattgtggcaaatgtacacacagtgcctaaggttagtcgttcgaattgaataactaaccttaggcaaaaaagttaggcaaagtgtggcaactgaggtaatgaaccaaacataccttaagactgactactctttatagatgaagcagcatcaagggacgcctgattgttttaagcttggaggccgttgaaagtcctcatgagagcagttcgtttattccaacttttagttttaatccctcttcacattctgg

SEQ ID NO: 46053 - DNA, 280 bp, Zea mays
aatttctcatcttttgaaagttgaacaagagcaaaacctaaagatgcaagaacgggatttaacaattcagtcactacagactaaactcaagtccattgagtctcagcttaatgaagccctcaatgctagcgatgctagatcaactattgggtctgaatctgcttcagtaatatcttccccaaagataacagaatcaactgctgactcatcttcagtgacgaaaaggcttgaggaggaattggcaaaaagggatgcccttattgagaaattacatgaagag

SEQ ID NO: 46054 - DNA, 261 bp, Zea mays
gttacttgaatcaggttcccaggacagacaataccttggacaaattttgcagtactctctggataagctgcgaaaactgtcttctcctgtgaaggaacacgagatgaagaagagtcatgatacattgttgggagaattggtcgaagatctaaatccaattataaagatccaaattcatttgttctttgcgttatcaagggtttgcgactcactatggaggaattacaggctctaaaaacagaagttactagagcacgcatc

SEQ ID NO: 46055 - DNA, 242 bp, Zea mays
cttcccggtgtggatgttgccaacgtcgagcgcctcaacctactagaccttgcccccggtggccaccttgggcgctttgtgatctggacccagagcgcgttcaataagctcgaggaggtgtatgggagctatgacgccccgtcgcagaagaagaagggcttcgtgctgcccaggtcagcattggacatcttaggcctcggcagcacgaagcctaagatgtccaacctgactgggcaggatca

SEQ ID NO: 46056 - DNA, 290 bp, Zea mays
cagcggtccaccaagcgaaccgggatcaaagatcattcatacctacattaaagataaacattacagtggaataacttttggggataagtcacgtgtaggtagaggaggaatgacagctaaagtgaaggctgcttttgtggcttcgaacagtggcacacctgttgttattacaagtggatttgcatctcagagcattgttagagtcctccaaggagagaagattggtactctcttccataaggatgcaagtctgtgggagccatccaaggatgttagtgctcgtgagatgg

SEQ ID NO: 46057 - DNA, 246 bp, Zea mays
gtcagttctggtactggtatcctctcttgtatttcatcagcctggccttctcgccaacagccttcattgggctcaactctgatttgaaagtgccaaagtttgaattcctgtcgcatgctaaaccgtctctctttgagtatcccaaaccgacaactcagcagactacaacttcaacagtgaagctgccagcagccattctgtcaacttatgcgagggcaaaatctagggcaaagaaggacgcagaaa

SEQ ID NO: 46058 - DNA, 99 bp, Zea mays
ggtgcagggaagctatctgtccaccagaccagcactagcagccgctcactccagccattagccgcagctagcaaacaaatggccaccgtcctgagcagc

SEQ ID NO: 46059 - DNA, 275 bp, Zea mays
gagcgagggacccggggcggaagaagagagagaagacgtctctctcctctcggcgtccacgttccccaacctctcgtctgctgcctgcctgcctgcctgcctgcaaaaaggagtttgtcatggcgtctaagcgcatcctcaaggagctgaaggacctgcagaaggacccccccacatcatgcagtgcaggtcctgctggtgaggacatgtttcattggcaagcaacaattatgggaccacctgacagtccctatgctggtggtgtttttttagtg

SEQ ID NO: 46060 - DNA, 279 bp, Zea mays
ggcgcacaggacgacaagtgcctccccgtccagtacctcgaggcgatccggggcctccaggccgcggggttcgctcccgcccgcaccatccacatctcgcttgtccccgacgaggagatcggtggcgcggatgggttcgacaagttcgcccgatcggaggagttccgcgccctcaacatcgggtttatgctcgacgaggggcaggcgtcgccgacggacgtgttcagagttttctacgcggacaggctgttgtgaaggccgtcgtaaaggcggcggggg

SEQ ID NO: 46061 - DNA, 245 bp, Zea mays
aggagtccctggaacatctggagaccttcaagcgggagaacaaaaacctgcaggaggagatctccgacttgactgagcagttgggttccagcggaaagactatccatgagctggagaaggtccgaaagcagctggaggccgagaagatggagctgcagtcagccctggaggaggccgaggcctccctggagcacgaggagggcaagatcctccgggcgccactggaattcaaccagatcaaggca

SEQ ID NO: 46062 - DNA, 290 bp, Zea mays
tacaaggttgctagtcatccgaatatatacgtgttggacactcctggtgtgctttcgccgagatttgcagatgatggttctggccccaggctagccttgacaggagctatcaaggactccttgttggaggattacgatactgtacagttccttcttgcgattgtgaactcagggaaggaatataggaagtgggagaagctgaataaagcaggagataccttttcttgtggcaacacagtcacgtccagggggcacaacagtatagagcaatatgcttcagatcacactca

SEQ ID NO: 46063 - DNA, 239 bp, Zea mays
ggccaggccaagcaggaggtggaacataagaagaagaagctggaggcgcaggtgcaggagctgcagtccaagtgcagcgatggggagcgggcacgggcggactcaatgacaaagtccacaagctgcagaatgaagttgagagcgtcacagggatgcttaacgaggccgaggggaaggccattaagctggccaaggacgtggcgtccctcagttcccagttccaggacacccaggagctg

SEQ ID NO: 46064 - DNA, 279 bp, Zea mays
tgattaaaacaatctaccggagccttttccccatgatcttgttgagaagttagaagaatacctggataaacttgaagggcaactcgtggacttgtcttccttattgatcgatcaccggctggtcgatgcatatcaatacagtaccgatatcctgcaaagcactatttttacacaacagtatgtggaacgtgttcttatcctaacgagagagacaagatgaaatgctgtagcattgaatatagtcatccaaagcagtcatcccaggcttttgtctatgga

SEQ ID NO: 46065 - DNA, 292 bp, Zea mays
cttgtctccgtttgctggactcgcgtttcacccactggatggtattctgcaagcgataccgcatgtgcttgcgctcttcctcctcccaacgcacttcaggacgcacatcgctctcgtgttcttggagggcgtgtggacgacaaacatccacgactgcattcacggcaaggtatggccagtcatgggcgctgggtatcacaccatccaccatacgacttaccgccacaactatggccactacaccgtctggatggactggatgtatggtacgctccgtgagccagatgatatc

SEQ ID NO: 46066 - DNA, 283 bp, Zea mays
cgaggagctctgccggacccgcgcgctcgccgccttccacctcgaccccgcccgctggggcgtcaacgtgcagccctactcggggtcccccgccaatttcgcggcatacacggggctgctccagccgaacgacaggatcatggggctcgacctgccgtccgggggccacctcacccacgggtactacacggcgagtggcaagaagatttctgcaacctccatctacttccagagcctgccgtataaggtgagctccgacaccgggtacgtcgactacgataag

SEQ ID NO: 46067 - DNA, 291 bp, Zea mays
ctgtcattctcaaggcatcatgcatcgagatgtcaagcaccataatgtaatgatagatcatgagcttcgaaaacttcggttgatagactggggcttagctgagttctaccatccaggcaaggaatacaatgtccgtgttgcatcgaggtatttcaagggacctgaactccttgttgatttacaagactatgattattctttagacatgtggagtcttggttgcatgtttgctggaatgatatttcgcaagtaacattcttttatggccatgacaaccatgaccaacttgtg

SEQ ID NO: 46068 - DNA, 295 bp, Zea mays
tgacaccaagaagaagcaaaacaacatcaagctctatgtgcgcagggtgttcatcatggacaactgcgaagagctgatccctgagtggctgagcttcgttaagggtattgttgactctgaggaccttcccctcaatatctctcgtgagactcttcagcagaacaagatcctgaaggtgatcaggaagaaccttgtgaagaagtgtgttgagctcttctttgagattgctgagaacaaggaggactacaacaagttttacgaggctttctccaagaacctcaagcttggcatccac

SEQ ID NO: 46069 - DNA, 294 bp, Zea mays
ggcaaaacggatccgtaacttcgggaaaaggaagaggacaaggagatgactctggaggaatttgagaaaataagagaggagaagaggaaagcactacttgcattgaaggctgaggagaggaaagttgaagttgacaaggatttgcagtctctgcagccactttcaaacaagaaagaaaatgatgaagttttcattaagctgggttctgacaaggataagaagaaggaaaatgctgagcgtgatgagcgtgccaagaagtcggtgagcatcaacgagttcctgaaacctgctgaa

SEQ ID NO: 46070 - DNA, 271 bp, Zea mays
ctgcaccactaccgcctcctccgcgtcacccctctcgtcgcatcttgcggcgaccggcggcggatcgtccgatgcgcacgcgtaacactggggctcttcaccgtgacgaagaaggccaccacccccttcgaaggccagaagcccggtacctccggcctacgcaagaaggttactgtattccagcagcctcattatctgcagaacttggtccagtcaacattcaactgccttcctgcagaccaagtaaaaggtgcaccattgttgtctctgg

SEQ ID NO: 46071 - DNA, 291 bp, Zea mays
ctaagcttattcgagcttgtgatgaacagcagcactggaaagaacttacctacctgtacatacagtatgatgaatttgacaatgctgccaccactattatgaaccactctccagatgcatgggatcatatgcagttcaaggatgtttgcgttaaagttgcgaatgttgagctatactacaaggcagttcacttctatttgcaggagcatcctgatctcatcaatgatatgctgaatgtgcttgcacttcgtttagatcataccagagttgtagacataatgcgcaaggctg

SEQ ID NO: 46072 - DNA, 286 bp, Zea mays
catccgagagacctcacaagccgccacgccaggtccccatcccatcgaggcgcctgccccacccccgccctgctcccgcccggtagtagtagcagagcctcgccgccgctgccgagaatagatggggttcgtgtccttcgtcgggcgggtgctcttcgtcgccgctttcctcctctgcgcctaccaggagtttaatgaatttggcgctgatggtgggccagcagctaaggcccttcagcccaagttcaatgtgtttgtaaaagatatctctgcacatctgggagta

SEQ ID NO: 46073 - DNA, 290 bp, Zea mays
gcacgcagagccgcagagatccgtcacactgcaagttttgaaaactgaactgtaagatggcatcagcagagctttcccgtgaggaaaatgtgtacatggcgaagtcgccgagcaggcagagaggtacgaggaaatggttgagttcatggagaaggtagcgaaaactgttgactcggaggagctcactgtggaggagcgcaacctcctgtctgttgcatacaagaacgtcattggagcccgtcgtgcctcatggcgcatcatctcctccatcgagcagaaggaggagggtc

SEQ ID NO: 46074 - DNA, 276 bp, Zea mays
tgttcatcatggacaactgcgaagagctgatccctgagtggctgagcttcgttaagggtattgttgactctgaggaccttcccctcaatatctctcgtgagactcttcagcagaacaagatcctgaaggtgatcaggaagaaccttgtgaagaagtgtgttgagctcttctttgagattgctgagaacaaggaggactacaacaagttttacgaggctttctccaagaacctcaagcttggcatccatgaggactcgcagaacaggaccaagatcg

SEQ ID NO: 46075 - DNA, 284 bp, Zea mays
ctcgctcctcacaggctcatctcgctttggatcgattggattcgtaactggtgagggactgagggtctcggagtggattgatttgggattctgttcgaagatttgcggaggggggcaatggcgaccgcggggaaggtgatcaagtgcaaagctgcggtggcatgggaggccggcaagccactgtcgatcgaggaggtggaggtagcgcctccgcaggccatggaggtgcgcgtcaagatcctcttcacctcgctctgccacaccgacgtctacttctgggaggc

SEQ ID NO: 46076 - DNA, 286 bp, Zea mays
gatgccacctccgaagatgaggatgacagcggaggcgaggaagaggaggaagaggaagatcacgaaaacacgctgtgtggttcttgtggtgacaactacggacaggatgagttctggatatgctgcgatgcgtgcgagacttggttccatggcaagtgtgtcaagatcactcctgccaaggccgaacacatcaagcactacaagtgtccgaactgcagcggtagtggcaagagagcccgagcatgatgatgctggatatatccatctctcatgcctgacttgatgt

SEQ ID NO: 46077 - DNA, 289 bp, Zea mays
ggaaaatgtctcgaacaatatcaaattcagtaatgtgtatgtgaagaatctgtccgatactgttactgatgatgagttgaaggagatgtttggaaaatatggaaccataacaagtgctgttgttatgcgggatagtgatggaaattctaggtgttttggatttgtcaattttgaaaatgcagatgctgctgctcaggctgttcaagagttgaatggcaagatattcaatgataaggaactgtatgttggaagagcacaaaagaagtctgaaagagagatggagttgaag

SEQ ID NO: 46078 - DNA, 282 bp, Zea mays
ccaactcgccgtctgccttctgcgcctccatttcggcctctgtcccttgcaagttcaatctcacctccaaccatgggtaaagagaagtcccacatcaacattgtggttattggccatgtcgactctggcaagtcgaccaccacaggacaccttatctacaagcttggaggcattgacaagcgtgtgatcgagaggttcgagaacgaggctgctgaaatgaacaagcggtccttcaagtacgcgtgggtgctcgacaagctcaaggctgagcgtgagacaggt

SEQ ID NO: 46079 - DNA, 262 bp, Zea mays
aagaaaactagaaaagcctcctcccgaccgcaacgcccctcatctccctcgaccccgacatccccgacccgatggcgcccaaggcggagaagaagccagcggagaagaagccggcggccgaggagaaggcggagaagacgaccgcaggaagaagcccaaggccgagaagctcctgcccgcgtccaagtcctccggcaaggaaggcggcgagaagaaggggaagaagaaggccaagaagagcgtggagacctacaagatctac

SEQ ID NO: 46080 - DNA, 279 bp, Zea mays
ggtgcactggttctccattctcaactccctattcatcgagctcttcttcatcatgtcatgcatatggatgggtcgtgtgtactatgtctttgggttcctcttcgtcgtcttgctgctcctggttattgtctgtgctgaagtttccctggttcttacttacatgcacctgtgtgttgaggattggaagtggtggtggaagtcattcttctcatctggatcggtggcaatctacattttcttgtactccatcaactatcttatttttgacctcagaagcct

SEQ ID NO: 46081 - DNA, 282 bp, Zea mays
ccgcgacgtcgccatgatctcgccggagaggagttcgtcacagagcccgcggtcgcaggcggtggcgggggcgccattcctgtggatatctgtcatggatcccgtcaagatgggcaccggcgtgcaggcctacatctcctaccgcgtcatcaccaagaccaacctccctgaatttgagggaccagagaaaattgttattcgacgctatagtgattttgaatggttgcatgatcggcttgctgagaggtacaaaggcgtttttatacctccccttccggagaa

SEQ ID NO: 46082 - DNA, 282 bp, Zea mays
gcacctctctccatctccctgctcctccgccttcttcttgatccagccaagccagggatcgccatgtcggactcggaggagcaccacttcgaatcgaaggccgacgccggagcgtccaagacctacccgcagcaggctggcaccgtccgtaagaacggcttcatcgtcatcaagaaccgcccctgcaaggttgtggaggtttctacctcaaagactggtaagcatggtcatgccaaatgccactttgttgccatagatatattcaacgggaaaaagctcgaa

SEQ ID NO: 46083 - DNA, 252 bp, Zea mays
tgctaaaacatctaaacacagggattatgaggaaaggtcgcactattatgatgctctattagcagctgaatcacgggctgagaaagcaaagaaaggagtgcattctcaaaaagaatctcctgtgatgcatataacagatttaacaactgtatctgcaaagaaggccaaagatttccttcccttcttgcagaggaacagaaggcattctgccgttgttgaatatgtttttagtggccaatcgttcaaactaac

SEQ ID NO: 46084 - DNA, 278 bp, Zea mays
cgtgcaggacctgcttctgctggacgtcacccctctgtccctgggtctggagactgctggaggagttatgacagtgctgatcccgaggaacaccaccatccccaccaagaaggagcaggtattctccacctactcggacaaccagcccggtgtcctgatccaggtctacgagggtgagaggacccggacacgcgacaacaacctgctgggcaagttcgagctctccggcatcccccctgcaccccgtggtgtgccacagatcaccgtgtgctttgaca

SEQ ID NO: 46085 - DNA, 280 bp, Zea mays
ctccgctcctcacctcgccagccatgggcaagatcaagatcggaatcaacggtttcggaaggatcggcaggctcgtggccagggtcgccctgcagagcgaggatgtcgagctcgtcgccgtcaacgaccccttcatcaccacggattacatgacgtacatgttcaagtacgacaccgtgcacggccaatggaagcacagcgacatcgccctcaaggactccaagacgcttctcttcggcgagaagcggtcaccgtctttggcatcaggaaccccgaggag

SEQ ID NO: 46086 - DNA, 284 bp, Zea mays
tgaacgacaggacccaaaccccaattccacaatgaggccgtcgctgatgagatccacctcccagctcctccgccgccggagctactcctccgcatccgggcagcccgagcggaaggtggccatcctcggggcggcggggggcatcgggcagccgctgtcgctgctcatgaagctcaacccactcgtctcctccctctcgctctacgatatcgccggcaccccaggtgtcgcggccgacgtctcccacatctaatcccccgccctggtgaagggtttcatgggtg

SEQ ID NO: 46087 - DNA, 261 bp, Zea mays
cgatctgccacctcgccgtctcgcacgttcctttccccaactccccagcgcctctccgcgccgcggtccagatccaggttgttcagcatgggtctggtgaaggaaggcgtcgacatggaggagggaaccctagagatcggcatggagtacaggactgtatctggtgtggccggggctctggttatcttggataaagtaaagggcccaaagtaccaagaaattgtaaacatccgacttggagatggcaccactcgccgtggt

SEQ ID NO: 46088 - DNA, 204 bp, Zea mays
gactggcgaggcaaaagcgcaaacgcgaccacagacagagcgcgcttcaaggccttttttttttgagataacaaggaggagaggatgagatggcggtcacgatcacctgggtgaaggcgaggcagatcttcgacagccgcggcaaccccaccgtcgaggtggacgtgggcctcagcgacggcagctacgcgaggggggccgtac

SEQ ID NO: 46089 - DNA, 252 bp, Zea mays
ctcgagcgcccaattctaagcgagacggggcacaggaagaggagagcctaaaaccctaaccccccgaatcggatccggccgccggagcgcggaaccccaccccggccgccatggagatgggagggatgagcgacgctgagcggctgttcttcttcgagatggcctgcaagaactccgaggtcgcgtacgagcagaaccccagcgacgccgacaacctgacgcggtggggcggcgcgctgctggagctgtcgc

SEQ ID NO: 46090 - DNA, 270 bp, Zea mays
gccgccaccaggtgcagagtctttcgtcatctcttctccggcgaagaacccccagtcgcccaccagatcacttgttaaactttgttgaggggtgatggcggtttctttcgcaaacctcaactccgaggcagggcttaaaaagcttgatgagtaccttctcactcgcagctacatcactggctaccaagcttccaaggatgacttggctgtctacacttcgttttcggctgctccctcgtccatgtatatcaacgtagcaaggtggtttaa

SEQ ID NO: 46091 - DNA, 244 bp, Zea mays
atcgccgctgcgccgtctcctccgctcccgtcgtccggaaagatggcgtcccacattgttggataccctcgcatgggcccctagagggagctcaagtttgcacttgagtacttctgggatgggaagagcaacgctgaggatctggagaacgttgctaccgacctcagggccagtatctggacgcagatagatgatactgggatcaagtacatccccagcaacacactctcgtatatgaccaggt

SEQ ID NO: 46092 - DNA, 269 bp, Zea mays
gtacctttctgagatccaaagtagccagccctcgaaatctgagctggaacagtacctggacgaatccctcactccacgtatccaggagtttgatatcctgaactggtggaagctaaacacggtcaagtttccaaccctctctaaaatggcccgtgatatcttggccattccagtgtccatggtaagcagtggcagctctatattctgtgctggaacaggaagtcacatgctcgatgactacagaagctctctgcggcctgagattgtgg

SEQ ID NO: 46093 - DNA, 260 bp, Zea mays
agcttccgatgcgccggagctcgcacgcgatgggagcgcaacggtctcggcagctgctgcttctgctgctcgcggcggcggcggcggaggcgcgcttcgttgtggagaagaacagcctgatggtgacgtcgccgacttcgttgcggggacggacacgacgcgctatagggaacttcggaatcccacagtacggcgggagcatggcgggcgacgtcgtctaccctaaggacaacgccaaggcttgcgacgattcgacggca

SEQ ID NO: 46094 - DNA, 243 bp, Zea mays
gctggatgttccagtagacaagtatcctaactacaaagcttgttggtcgtttattggaggccgcgaggtaactccctgaaaagggttgaagcttcaacccaatgtagagtttacattcgaggacggggttctgtgaaagactctgttaagagtttccagcagatatggttgatgtgcgtcttaatcaagctgtgtccatcctagaggatcttcttaaaccaattgacgagtccatgggctact

SEQ ID NO: 46095 - DNA, 278 bp, Zea mays
ggagctaaaatggttgagattggaaactatgattctttttatgagatgggcattgagttctcctctgagcagatactgaagctaacaagggaaacaaggaagatgcttccagacatcaccttatcagtaacagttcctcacacacttagtttgccagatcagatgagactagcagagctactcgaagaggaaggagctgatataatccaaactgagggtgggaaatgttctagcccgacaaaacctggagtgcttggattgattgaaaaggcaacacc

SEQ ID NO: 46096 - DNA, 161 bp, Zea mays
gggagtagtcgacgcgccgtcactgaatcctcagatcacggctagtcgtaatcacgccactctgctgactcccggcgagcagtgtaacattttccttcagccatgggcaaggagaagactcacatcaacattgtggtcattggacatgtcgactctggcaa

SEQ ID NO: 46097 - DNA, 197 bp, Zea mays
ctcaaccataccagcagcgccgcagtgacgaggaggcggagtagagtggcggactacctcgacactccactgcaaccatgggtatctccgtgattcgatgcacaagcgcgggccacggtggaaagcagaagacgtggcgcaagaagcgaaagtatgagcttggacgccagcctgctaacaccaaactgtctagcaat

SEQ ID NO: 46098 - DNA, 218 bp, Zea mays
ctagtcggaaggtttcgaggaactcccgggctctaggagatcggaacgatgatgggagggcgcgctctgctgctgctcctggtctcggcgctgctcgttcagatccgcgcctctgacccgctgctacacgagccgtttgatgaggacttcgagggtagatagatcgtctgcaagaaagatcaataccaaggtgtatggacgcatgccaagagtaatgg

SEQ ID NO: 46099 - DNA, 248 bp, Zea mays
ctgaaggaaaagtgcctctatgggaggctttatgtgaaaagcacaatgcagtgatagagctgttagtagagagtggtgcagagctatcatctggagacacggccttgtatgcttgcatcgctgttgaggaaaatgatgctgagttgttgctggaacacggagctgacgtcgacaagcaagacagtaatggctggtcgccaagagatctagctgatccgcaatgccatgatgacattcaggctctcttc

SEQ ID NO: 46100 - DNA, 206 bp, Zea mays
ttccaaccattggtatttctgttgatcaccgccgcaagaacaaatcccttgagggactgcaggccaatgtccagaggcttaagacatacaaggccaagctggttatcttcccaaggcgtgcacacaaggttaaggctggtgactctactccagaggagcttgccaccgctacccaggtccagggtgactacatgccatttactcgt

SEQ ID NO: 46101 - DNA, 159 bp, Zea mays
ggctcgaggtcatgggagcatggtgaaccagagtgtaccccttatggatccgattgtgccacgttttggtagtgtccatgagaatatgcctcaagctggaggaagtatgaggagcacattgtttccaaactttggaagtatgttcagtgtcacagatca

SEQ ID NO: 46102 - DNA, 271 bp, Zea mays
tcagcatcctcccgtctccatcgtctcgtctccgctcctcacctcgccagccatgggcaagatcaagatcggaatcaacggtttcggaaggatcggcaggctcgtggccagggtcgccctgcagagcgatgatgtcgagctcgtcgccgtcaacgaccccttcatcaccacggattacatgacgtacatgttcaagtacgacaccgtgcacggccaatggaagcacagcgacatcgccctcaaggactccaagacgcttctcttcggcgag

SEQ ID NO: 46103 - DNA, 305 bp, Zea mays
gcatcttcttgtgcagtgccagcctcgtctcatagacaagatggtgatggtcggtgtaaacggatttggccgtatcggacgcctggttaccagggctgccttctcttgtgacaaagtggacattgttgccatcaacgaccccttcattgacctcaactacatggtctacatgttccagtatgactctacccacggcaagttcaacggcacagtcaaggctgagaatgggaagctggtcatcaacgggaaacccatcaccatcttccaggagcgagatcccgctaacatcaaatggggtgatgctg

SEQ ID NO: 46104 - DNA, 260 bp, Zea mays
ttgagcagcagtctagggggtgtttgggaacaaagtttttctgcagttttggaagaatacaaatactgcagtattctcaaatactgcagtattctcaaatactgcagtattatatacataatggtgtttggcaagctgggtaaaatctatgttttcaaaactgaagtattgcaaatactatagttgttttaaggcattctaaacagttctgcggacctcagttttcaaaactgcggtactataaactacggtattgtcat

SEQ ID NO: 46105 - DNA, 299 bp, Zea mays
gccgccaccaggtgcagagtctttcgtcatctcttctccggcgaagaacccccagtcgcccaccagatcacttgttaaactttgttgaggggtgatggcggtttctttcgcaaacctcagctccgaggcagggcttaaaaagcttgatgagtaccttctcactcgcagctacatcactggctaccaagcttccaaggatgacttggctgtctacacttcgttttcgtctgctccctcgtccaagtatatcaacgtagcaaggtggtttaatcacattgatgcgctcgtgaggctgagcg

SEQ ID NO: 46106 - DNA, 297 bp, Zea mays
ggactggagatccaccactccaccagtccggtccatctgctggacctcgattggtttcttcttacctaggaacatccggggatgtcgactcctgcgaggaagaggctgatgagggatttcaagcggttgatgcaggaccctccggccggcataagtggcgccccgcaggataacaacataatgctgtggaatgctgtcatatttggacctgatgataccccgtgggatggaggtacgtttaagctgactctccagtttaatgaagaatatccaaacaaaccaccaactgtgcgattt

SEQ ID NO: 46107 - DNA, 294 bp, Zea mays
gggttttgctgctctccgaccccgagctccgaaggccgcagcatcaggcgcggcccccctcgcgtgtgaccgagatggcgctgccgaatcaggggaccgttgattaccccagcttcaagctcgtcatcgtcggcgatggtggaactggtaaaactacatttgtgaagaggcatctcactggacagtttgagaagaaatatgaaccaaccattggtgtggaagttcatccgttggatttcaccactaactgtggtaagatcaggttctactgctgggataccgcaggcaagagaa

SEQ ID NO: 46108 - DNA, 294 bp, Zea mays
gcggattcctcctccctcgaccgtccccgtccccgtccccttccggcgcgcgagctcgcccgagatggcaaacgcgagatcgggtgtcgctgtgaatgacgagtgcatgctcaagttcggcgagctgcagtcgaagaggctgcaccgcttcctaactttcaagatggacgacaagttcaaggaggtcgttgtggaccaggtcggggatcgcgctaccagctacgaggacttcacaaacagcctccccgagaatgactgccgatacgcgatctatgatttcgactttgtcactgc

SEQ ID NO: 46109 - DNA, 290 bp, Zea mays
tagccctgggagcagaaagaaggtcataacagcaaccgctagacaaatagagagtttgatccgtctcagcgaagagttagcccgaatgcggttctctgaagtggtcgaggtgcgggatgttgtggaggcattcaggcttcttgaagtcgccatgcagcagtctgcgacggatcatgcaactggtacgattgatatggatctgatcatgacggggatatccgcaagcgaaaggcagaggcgggagaacctcgttgccgcaacccgtaacctgattgcggagaaaatgcagc

SEQ ID NO: 46110 - DNA, 291 bp, Zea mays
attctattggacagctgaaggagtttgagggcaagaagctcgtctctgccaccaaggagggcctgaagctggacgagagtgaggatgagaagaagcgcaaggaggagctcaaggagaagtttgagggcctctgcaaggtcatcaaggaggtgctgggcgacaaggtggagaaggtggtggtctccgaccgcgttctggactccccctgctgcctggtgaccggcgagtacggttggaccgccaacatggagcggatcatgaaagcccaggcgctgagggactccagcatgt

SEQ ID NO: 46111 - DNA, 289 bp, Zea mays
aagcaatttgttgagatctcatcaataaaccagcgaattttgttatctggtccagcaggttccgagatttatcaggaaacattggtaaaggcacttgccaaacattttagtgctagactccttgtggtggattcacttttgctgcctggggcaccttcaaaggatccagaattccagaaagtagttgggaaggctgataaatcaggggataaggcagctgccgagaagtttgcaatatatcagaagcatcgttcttcgttggcagacctgttcacttcaggaggccagc

SEQ ID NO: 46112 - DNA, 292 bp, Zea mays
ataggctcaagaatgtacaaagggaaagagaagaaaagctagctagattcctcaaggaattcctctctcagtatgttcgtggagacaaagaaggatttgctaatcgtgccgaagctgaggcaaagaagctctcatgcacttcatctgggttggatattcttcgcaccattggatatgtctattctcgacaggcagcaaaggagcttggcaagaaggccatgtacctaggagtgccattcgtagccgagtgggtcaggaacaagggtcatctgtggaagtcacagatcaccgc

SEQ ID NO: 46113 - DNA, 290 bp, Zea mays
cgcctcgtgtggccgtcgtctcccgttcggaacgccaagccccccctccggccaaatggcccccaagcgaggtggcagggcgccggtgccggccaagaagaagacggataaagtgacgaaccctctattcgagaagaggccgaagcagttcggcatcggcggcgcgttgccgcccaagaaggacctgcaccggttcgtcaagtggcccaaggtcgtgcgtatccagcggcagcgccgaatcctcaagcagcgcctcaaggtaccaccggcgctcaaccagttcacccgca

SEQ ID NO: 46114 - DNA, 279 bp, Zea mays
ctcgagccgtgaaatatatgtatgggttggacgggtaacgcaaatggaggatagaaaatctgccactaaagcagttgatgaattcctcattaatcaaaagcgtccaaagacaacgagggtaactcaagtgattcaaggttatgagagtcatgctttcaagtccaagtttgaatcgtggccagtgggtaatgctgctgggaaccctggcacagaggaagggcggggaaaagttgccgctttattgaagcaacaacgcgttgatcccaaggagctgcaaaa

SEQ ID NO: 46115 - DNA, 282 bp, Zea mays
ggccaagggcgacaaccagagctggaagatcgtcccctggtaaatgtgctgttctgtggctgcactggtcatcaccatgatctggagctttgaaggcatagccacctgtggtcagcaactgctgccgtgttgctagaataaagttggtggcgatcgatcgatcgatctttggtgatgggtgtccctccctgtgtgtttgtgtttagttccagtcgtttgtgaggaagtcagttatgtttgagtgagaggggtacttcgctcttcggttaactctgtacttgt

SEQ ID NO: 46116 - DNA, 286 bp, Zea mays
attatacaaagagcggtacatactcttcacatgctcccatgttcttgtaagaaattctggaacctctttcacttgcagcctatgcgtgatcagaagggtgatgttcaatacttcattggggttcaattggatggaactgagcgtgttcgagaggctgctgcaaaagatggtgccatactggttaagaaaactgcagacaatattgatgaggctgcaaaggagcttccggatgctaatttgagacctgaggatctatgggctaatcactcaaaaccagtcttgccaa

SEQ ID NO: 46117 - DNA, 284 bp, Zea mays
attgccatctgggatctactattacaaaggttgatatattcagagatgctgcagtgcttatggtgaattatgtcgatgaaattcgagcacaaggttttaagttggagtacctgaatattggaggtggtttgggaatagattaccatcataccgatgcagtcttacctacacctatggatctcatcaacactgtacgagaattagttctctctcaagatcttactcttattattgaacctggaagatccttgattgctaatacttgctgcttcgtcaatagagta

SEQ ID NO: 46118 - DNA, 278 bp, Zea mays
gctcgccgcggctccgaatggcaacttccccgaaccccgcgacgattcaccgagccggcgcccagtgacccttccagaagcttccagaaggtcaccgccatggccgcgcccttcttttccactcctttccagccctacgtctaccagagccagcaaggatctgtgacggcgtttcagatatccggtggagatgtgcaggtcctgcaggtgatgctgaagtctcaggagaagctgactgcaaaaccaggtacaatgtgctacatgtctgggaacatgca

SEQ ID NO: 46119 - DNA, 272 bp, Zea mays
gttccaactcctgagcactttctcctcgtccccgacaagccaatcgaagccgagatacggccatggactccaccggcaccggagcagggggtaaggggaagaagggagcggccgggcgcaaggtcggcgggccaaggaagaagtcggtgtcgaggtccgtgaaggccgggctccagttccccgtcggccgcatcgggcgctacttgaagaagggccgctacgcgcagatgtcggcaccggcgcccccgtctacctcgccgctgtcctcgaat

SEQ ID NO: 46120 - DNA, 276 bp, Zea mays
gcgcctctacatttcttctctctctgctcctccgcctccgcctgatccatccaagacagggatcgccatgtcggactcggaggagcaccacttcgaatcgaaggccgacgctggggcgtccaagacctacccgcagcaggctggcaccgtccgtaagaacggcttcatcgtcatcaagaaccgtccctgcaaggttgtggaggtttctacctccaagactggtaagcatggccacgccaaatgccactttgtcgccatagacatattcaatgggaa

SEQ ID NO: 46121 - DNA, 277 bp, Zea mays
taccaaagggatcggcttctccgtatggtgaagggtctccgaccaaaactagtgacgttggtggagcaggacgcaaatactaacactaccccattcccttccaggttccgggaggtctatgactactattcggcactttttgattcactggatgccacccttccaagggaaagcccagatagaatgaacgtggagcgccagtgcctcgcacgggaaatcgtcaacatcttagcttgtgaaggccctgaccgtgtggaaaggtatgaagtggctggga

SEQ ID NO: 46122 - DNA, 278 bp, Zea mays
gaagccgccgccgctgcagtgtccatagccaccgcaggagactgagatggggggttttgtcaagacccacaagagcaatgcatacttcaagcgtttccaggtgaagttcaagagaaggcgcgctggcaagacagactacagggccaggataaggctgattaaccaagacaaaaacaagtacaatacacccaaatacagatttgttgtgcgatttaccaacaaggacatcacagcacaaatcatatctgctagtatagcaggtgatatggttcttgctt

SEQ ID NO: 46123 - DNA, 276 bp, Zea mays
ccctacgaatcttccaacccctccgacgatgccttccgcgccggcgctcgtccccgcgtgcgagctgcaggagccgttgctggcggagtcgtccgaccgcttctccatgttcccgatccggtacccgcagatttgggagttctacaagaaggcggtggcgtccttctggactgccgaggaggtggacctctccgcggacgcgcgccactgggacgcggccctctcccccgacgagcgccacttcatctcccacgtgctcgccttcttcgccgcctc

SEQ ID NO: 46124 - DNA, 275 bp, Zea mays
gcctgacacaatggcaaaatgcactgttgatggcaatctcatcacagcagcgacttataattctcatcccgaattcatcagcctatttgtcaaagcactcggaggttcagtggcaggctcagataagagaatactgttcctatgtggggactacatggaggattatgaggtcatggtcccattccaggctctccaagctcttggctgccatgtcgatgccgtttgccccgacaagggagctggggagacgtgcccgacagccattcatgatttcg

SEQ ID NO: 46125 - DNA, 270 bp, Zea mays
gcagcattatcagggagcgtgccgtgggagtgggaggttgcctcaggtgcggagaggtcgccggcggcgaccatcggtgtctgagatgaaggagagaggcggctctagggcggcagtggacgagcgctacgccagtggaagtcgcgcatccccgttctcgacgactggtttgccaaccacaacctcgtttggccatccctctcctgccggtgggggccacagtttgagaaagctacctacaagaatcgtcaacgcctttacctatctgaa

SEQ ID NO: 46126 - DNA, 270 bp, Zea mays
gatcacactcgtagagagatacgcgcaatatccccaaaccctagctcccgatctcgcttcgcgacccctcgcgtcttcttcgacatgaccgtcggcggcgccccggcgggccggatcgtgatggagctgtacgccaacgaggtgcccaagaccgcggagaacttccgcgcgctgtgcacgggcgagaagggcgtgggcaagtccgggaagccgctccactacaagggctccaccttccaccgcgtcatccccgagttcatgtgccagggc

SEQ ID NO: 46127 - DNA, 266 bp, Zea mays
gggcttcctggtcttcaatgccgttggtggtggcactggctctggccttggttctctcctccttgagcgcctgtctgtggagtacggcaagaaatccaagctgggcttcactgtgtacccatctccccatgtgtcaacctctgttgtggagccttacaacagcgtgctctccactcactcactcctggagcacactgatgtctccatcctgctcgacaacgaggccatctatgacatctgcaggcgctccctcgacattgagaggc

SEQ ID NO: 46128 - DNA, 263 bp, Zea mays
gagaagtgtcgatggaggccggggcctagcggaggccgttgggaatgttgatgccggagggagcgatgagagggatgcagattctagcggcggtgacgcttcggggaaggttttcgtagggggtgtagcctgggagacaactgaagaaacattcacaaagcattttcagaagtatggagctataactgcttctgtgatcatgaaggacaagcatactaggatgcctcgtggatttggatttgttacattttccgatccgtctg

SEQ ID NO: 46129 - DNA, 258 bp, Zea mays
gccaagagttcttcttgtttaggcaaaggcaaaagcaggagcaaaaaggtttcgttggcgatggcgagctcgtggacgcttcctgaccacccgaagctccccaaggggaagccggtggctgtcgtcgtgctggacggatggggcgaggccaaccccgaccagtacaactgcatccatgtcgctcagactcctgtcatggactcgttaaagaatggtgctcctgagaaatggagactagtgaaagctcatggaacagct

SEQ ID NO: 46130 - DNA, 318 bp, Zea mays
gaaagacagaaagacaaggggcaggaagaaatcgagcctcactcgatccatcgcctcgccgcagcacacacgaggccggcggcgccatggccatgaagctggacatgtccgcgctcgagaccaacttcgccaacctgaccgcctccgccggcgacgacacgtacttctccgccgaggcccccgacgtgccgtccatggtgctccccatctgcgacgacttcgacggcttccaggcggccaccaaggatatggtgaagaataagaaggggacgaccacgcttgccttcatcttcgacaagggcgtcatcgtcgccgctg

SEQ ID NO: 46131 - DNA, 307 bp, Zea mays
ggatttctttgtcacactgcatggcatattagctgagaaggaagaagttgctgagttgcaacctgtacctgatgctcatgtacctgtattgaaatttaagttccgtgggatatcaattgaccttctctatgctagcatctctctttcagtgataccagcggatttcgatatttctcaaggatctgtactttgtgatgttgacgaagcaactgtgcgaagtcttaatggttgcagagtggcggatcagattcttcggcttgttccaaatgttgagaatttccggacaacactcagatgcttgaagtac

SEQ ID NO: 46132 - DNA, 309 bp, Zea mays
gcctgctgcacccgcacttccgctacaccatggagatcaacgcgctggccagggaggcgctcatcaacgccgacggcatcatcgaggagtccttctggccgggcaagtacgccgtcgagctcagctccgtggcgtacggcgcgacgtggcagttcgacacggaggcgctgcccaacgacctcatcaagcgcgggctggccgtgcgcggggaggacggggagctggagctcaccatcaaggactacccctacgcccacgacgggctcctggtctgggactccatcaggcagtgggcgtccgagtacgtca

SEQ ID NO: 46133 - DNA, 307 bp, Zea mays
tggaacttggatgtgccagaaccaacatggtttattctaagtggacatcgcctgctgagaaaagagtatagggctatacttagacgtttgagaggtagagtttgcagggattcacatcactggtctttccaagcaacacaccttgtcaccactgagatgcgcagaactgaaaaattcttcgcagctgctgcggctggcaggtggatactgaagcctgattacttgactgctagcaatgaggctggcaagttcttagaggaagagccatttgagtggcacggtgaaggccttaatatcggtgatacga

SEQ ID NO: 46134 - DNA, 309 bp, Zea mays
ccggacgcgagctcgcggaccgtgaaccgggccataatggctgagctggtccgcctctaccgctcgtccgacctggggatgcggctcccggcctacgacggccgcaagaatctctacaccgccgggaccctcccgttcgacgctcgcgagttcgtcgtgcggctcaccgatgaggacgacggcaccggcgtcccgcctcgggagagggagtacagggtcgccatcaagttcgccgcgcgcgccgacctccaccacctcaggcagttcatcgccggacggcaggcggacgcgccgcaggaagccctacag

SEQ ID NO: 46135 - DNA, 310 bp, Zea mays
tgtcgttggaagagagacgacggcggccatggcgacctccttccaggggacgaccaccaagtgcaccgcctgcgacaagacggtgtaccttgtggacaagctcaccgccgacaaccgcatctaccacaaggcctgcttccgctgccaccactgcaagggcaccctcaagctcgccaactacaactccttcgagggagtgctctactgcaggcctcacttcgaccagctgttcaagaggacagggagcttggacaagagcttcgaaggaactccgaaggttgtcaagccagaaagaaacgttgggaatgag

SEQ ID NO: 46136 - DNA, 309 bp, Zea mays
ggccggcatcatccgtctcgtctcgtctcgcctctcctctccttttcccccctccctgcacagcgccgctcaccgtcaccggaccacagcagcgatcgatggctgaggtacacaacgagcggcccgtggggatggtgggcggcgtccgggacgcgccggtgggccgcgagaacgacctcgaggccatcgagctcgcgcgcttcgcggtcgccgagcacaacagcaagaccaacgcgatgctggaattcgagaggctggtgaaggtgaggcacatggtcgtggccgggaccctgcaccacttcaccgtcg

SEQ ID NO: 46137 - DNA, 307 bp, Zea mays
gaggttctgggtgacaaagttgagaaggtggtggtgtctgatcgcgttgtggactcaccgtgctgccttgtgactggcgagtatgtctggaccgccaacatggagaggatcatgaaggcacaagccctgagggactcgagcatggcgggctacatgtcgagcaaaaagacaatggagatcaacccagagaaccctatcatggatgagatccgcaagcgtgccgaggctgacaagaatgacaagtcagtcaaggatctcgtgatgctgctgttcgagactgctctcctgacctccggcttcagcctgg

SEQ ID NO: 46138 - DNA, 299 bp, Zea mays
acagaagcggcggcggcggacaaacgcaggcgaaggcgagggtgtgagggaaggagcaccagccatggtgcacgtcaacttctaccgcaactatggtaagacgttcaagaaaccaaggcgtccttatgagaaggagcgtcttgatgctgaactgaagctggttggtgagtatgggctgaggtgcaagcgtgagctttggagggtccagtatgcactgagcaggatccgtaatgctgcaaggcacttgctcacccttgacgagaagaaccccgtcgtatctttgagggtgaggccttctt

SEQ ID NO: 46139 - DNA, 295 bp, Zea mays
ccagaaatacgtacgacatgccgtggcctttgaaggtatttctcctgatgtgcctctctataaagtcaatgaagggaatgaaccttgcttcttcaggacatacttctcctgggatagcgcacgatccgtgattcatggaaactcttttgagaagaaactttcagttcttttcggaatgcgttcagagggtggcaataagggctcaggtgatggtgggccactcaaagggcatcagccttggccgctctttcatctgcattgaatccatcgtcgcaaggaaaacagtcagatgaga

SEQ ID NO: 46140 - DNA, 297 bp, Zea mays
  unsure (1)..(297): unsure at all n locations
cgacaagatctggaacaacgggcccatcagcttccagctggagtggttccagcaggtcgcgtccgccgagtgcggcgnggggcaggcgcacaggccgactgcaagagctacctggccaactccctgttcgtgttcggcgagttcggcggcaacgactacaacgccatgctgttcggcaactacagcgcggaccaggccagcacgtacacgccgcaggtcgtggccgccgtcgccagcggcgtcgagaagctggtggccatgggcgccaccgacatcgtggtgcccggcgtgctcccc

SEQ ID NO: 46141 - DNA, 302 bp, Zea mays
gtactatgctactagggctgcactaggtcttacattccaatggagctcccctgttgctttcattacatgcttcgtgacactatttgctttggtcattgctataaccaaagatctccctgatgttgaaggagatcgcaagtatcaaatatcaactttggcaacaaagcttggtgtcagaaatattgcattccttggatctggtttattattagcaaactatattgctgctattgctgtagcttttaccatgcctcaggctttcaggtgcactgtaatggttcctgtgcatgctgtccttgctg

SEQ ID NO: 46142 - DNA, 302 bp, Zea mays
actgagataacccatctacagcagcaaattgatgaagctaaacttcggaaatcaaagctagagaagaaactgaaacagaggggcctacttaacagggagtcagaggaatctgacgaagaagagaactacttttccattgaattgacaccaagtttgtttacatctgccgtcgataatgcctaccagtcgatacatgacttctcaaagcctttgatcaacatgatgaaggctgcaggttgggatcttgatggggctgctagtgcgatcgagcctggtgtggtttacacaagaagggctcacaa

SEQ ID NO: 46143 - DNA, 288 bp, Zea mays
  unsure (1)..(288): unsure at all n locations
aaagctgccaagaaggagaggctcttgaagagggcccaggctgaaaacgaggggaaaactgttgagtcaaagtattctattgntgtgaagtacggccttaaccatgtgacttacctcatcgagcagagcaaggcccagctggttgtcatagctcatgatgttgatccgatcgagctggtcgtgtggctcccggccctttgcaggaaaatggaggttccatactgcattgtcaagggaaaagcacgccttggatcgatcgttcacaagaagactgcatctgttctttgc

SEQ ID NO: 46144 - DNA, 294 bp, Zea mays
ggagaaggtgacatgaaggagtttgtacccaagaagctgccatctgtgcatcttggggttgatgagattggcacagttaactatgagattggaaatcttattaagtggagaaagaactttggaaatgttgtgatgatcatgcacgttagtgggcctgtggatcgcacagcacttgagtggaggctgctttatggaaggattttcaagacggttatcattcttgctgagcagagcaatgcagagcttgctgttgaacgctgcatgctgtcacacgcttataagtatttgcccagg

SEQ ID NO: 46145 - DNA, 241 bp, Zea mays
ctaagttacattgcaccagctggccagtacaacctgcaggacacagtgctagaattggaatttcagggcataaaaaagaaatttaccatgcttcagacatggcctgtgcgttcaccaaggcctgttgcatcgaagcttgctgcggatacacctcttctgacagggcagcgtgtactggatgcactattcccctcggttctgggaggcacttgtgcaatcccaggagcatttggctgtggaa

SEQ ID NO: 46146 - DNA, 205 bp, Zea mays
gtccaagctcctccagttagaatcgacagccaagcaaaatatggtgctctggcccgaggtgatggcgccatttacttgcgctttccacacaaaggttatagcgagaaaatatgggaccatgcagcaggctcaattgtcgtgacagaagctggaggcatagtgacagatgctgcgggaaacgacttggatttctccaagggagatt

SEQ ID NO: 46147 - DNA, 327 bp, Zea mays
cacgatactcaggcactcggctcgacgactttagccgccgccgctgctcatctcacatccctcgagaagacgcctgctcctcgccgatcgatacgatggccgtcttctccgacctccacaccgccgacggcctcaagtccctcgaggctcacctcgccggcaaaacctatgtgtctggtgactccattactaaggatgacattaaggtcttcgccgcggtgccgtcgaagcctggcgctgagtttcctaatgccgcccgttgtacgagaccgtctctggggctgtagcctcaagattccctgtaaaggctgttggtgtaaatctccc

SEQ ID NO: 46148 - DNA, 204 bp, Zea mays
gtgaccctccctcagccgcgtcgcgtcgcatcctacgatccaaagctctctctgctcgcagccatggcgaagaactacccgaccgtgagcgccgagtacagcgaggctgtggagaaggccaggcgcaagctccgagccctcatcgccgagaagagctgcgccccgctcatgctccgcctcgcgtggcactccgcggggacgttc

SEQ ID NO: 46149 - DNA, 238 bp, Zea mays
caatgatgcttttggcacggcacacagagctcatgcttcaaccgaaggagttaccaagtatttgaagcctgctgttgctggggtcctcatgcagaaggaacttgactaccttgttggagctgttgccaacccaaagaagccatttgccgctattgttggtggatccaaggtctcaagtaagattggtgtcattgagtcgttgctggcgaaggtcgatatcctcatccttggtggtggt

SEQ ID NO: 46150 - DNA, 288 bp, Zea mays
ctgggagttgtgatccttatgttgaggtgaaactaggaaattataagggccagactgggcatttcgagaagaagaacaacccggagtggtatcaggtctttgcctttgcaaaggagcgcatccagtcatcagttgtggagattctggtcaaggacaaggatcttgtcaaggatgacttcattggacgtgttatatttgatttgaatgaggtcccaaagagagtgccacctgatagcccattggctccacaatggtatcggttggaagaccgcaatgggcacaaggtga

SEQ ID NO: 46151 - DNA, 276 bp, Zea mays
tgcagatcagcaacttcgccagcatctggttcatctccctcttcatctcgatcttcgccacgggcatcctggagatgaggtggagcggggtgcgcatcgacgagtggtggaggaacgagcagttctgggtgatcgggggcatctccgcgcacctcttcgccgtgttccagggcctgctcaaggtgctggccggcatcgacaccaacttcaccgtcacctccaaggcctcggacgaggacggcgacttcgcggagctgtacatgttcaagtggacga

SEQ ID NO: 46152 - DNA, 287 bp, Zea mays
cggcattgcagttgccgctcttggtatgctgagcacaatcgcaactggtcttgctattgatgcttatggtcccatcagtgacaatgctggtggtattgctgagatggctggaatgagccacagaatccgtgagagaactgatgctcttgatgctgctggcaacacaactgctgctattggaaaggggtttgccattggttcagctgctcttgtgtccctggcgctttttggtgcctttgtaaacagcctggagaaaaggtctcgaggtcctctcccccaaggttttc

SEQ ID NO: 46153 - DNA, 280 bp, Zea mays
tctgtctaccgtccgataccccaagcaccagcgcggcggcggcgaccatggctgtcggaaagaacaagaggatctccaagggaaagaagggtggcaagaaaaagaccgtcgaccctttctctaagaaggattggtatgacatcaaggcaccgtcggtgttcagtgtgcgcaacatcgggaagactctcgtatccaggacacagggtaccaggattgcttctgaggctctagcacagagtctctgaggtttgcctagctgatcttcagggcgacgaggatc

SEQ ID NO: 46154 - DNA, 265 bp, Zea mays
ggctggtcaacttcggttggtgagagcggaaagcttgtggatgttgggtggccatctgtctgggtcaggattgcaacccagtgggcgacggcaggtctgttcatatggtcgcttgttgcacccatcctctttcccgacagggaattctaagttcaaccacggtaagcctggagcatcaaacgtgtctactgtggtagctaatatatcctatcaagtatgttgcctttaaaacatgctccgagcgtggatggcaaaaactcggtgt

SEQ ID NO: 46155 - DNA, 286 bp, Zea mays
cgaccggcccgggcgacgcggccggcaccaccaacaggttcgccgaggatgagctcaacatcttcgacgcagacttcgtcaatgtagagcactccaccctcttggacctcatcctggctgcaaactacctggacatcaaggggctcctgaacctggcacgccaaaccattacagacttgatcaatgggaagatgcctgaggaggtctgcaagaccaacatcaagaacgacttgaccatcccttccacgtcggccttggccaccacaatgccctcctccgagcgaaa

SEQ ID NO: 46156 - DNA, 284 bp, Zea mays
ctcgtctgctcgcatttcctcccaatccatcccgcctccaaacccgaactccaagtcgccccgcatcgatggcgcccaaggccgagaagaagcccgcggcgaagaagccggcggaggaggagcccgctgccgagaaggcgccggccgggaagaagcccaaggcggagaagcgtgtcccagcaggcaagtccgccggcaaggagggcggcgagggaaagaggggccggaagaagggcaagaagagcgtggagacctacaagatctacatcttcaaggtgctgaag

SEQ ID NO: 46157 - DNA, 284 bp, Zea mays
  unsure (1)..(284): unsure at all n locations
ctcccccaaatccacccgtcggcacctccgcttcaagatgcagcttgttgtgaaaaccctgactggcaagactatcaccctcgaggtggagtcgtctgacaccattgacaacgttaaggccaagatccaggacaaggagggcatccccccagaccagcagcgtcntctctttgctggcaaacagcttgaggacggccgaacccttgtgactaaaacattccagaaggagagcaccctccaccttgtgctccgtctccggggaggcatgcagatctttgtgaaaa

SEQ ID NO: 46158 - DNA, 298 bp, Zea mays
gggctctagaagcaatcaggcgagcggcggctgcggcgcgatgggagagcaggtcgtgacggagcgtatccagcggaactggaggaggccaacgctaccgtccaacagcacctcgccggcatccaggaccacgtcaacttcaccatgcagcaagcatacttcaagtgcgcatatgattgcttcgatcggcgccgtactcaggaagcgatcaacaattgtgtggagaattgtggtatgcctgtccttgctgtcaacaatgtttttgagagtgagatggccaagtttcaggaacggttga

SEQ ID NO: 46159 - DNA, 128 bp, Zea mays
gtgaccactaagcacaatgatgatgagcagtacgtgtgggagtctcaggctggtggctccttcactgtcgcacgtaatatctctggggagcaacttggcaggggtacaaagatgaccctctacctcaa

SEQ ID NO: 46160 - DNA, 176 bp, Zea mays
gaattgtatactcagcacgtgcttataagataccagaatgtactagaactgctactgggactccgttggtacagttgctacctttatctgatggagagcggataacctccatcattcctgtgagtcaatttcgtgagaaccaatatctagtgatgctcaccgttaatggctatatc

SEQ ID NO: 46161 - DNA, 301 bp, Zea mays
ccagccgccaccaggtgcagagtctttcgtcatctcttctccggcgaagaaccccctctcgcccaccagatcacttgttaaactttgttgaggggtgatggcggtttctttcgcaaacctcaactccgaggcagggcttaaaaagcttgattagtaccttctcactcgcagctacatcactggctaccaagcttccaaggttgacttggctgtctacactttcgtttcggctgctccctcgtcctagtatatcaacgtagcaaggtgggtttatcacattgatgcgctcgtgaggctgagc

SEQ ID NO: 46162 - DNA, 171 bp, Zea mays
  unsure (1)..(171): unsure at all n locations
ctccaaccattggtatttctgttgatcaccgccgcaagaacaaatcccttgagggactgcaggncaatgtccagaggcttaagacatacaaggccaagctggttatcttcccaaggcgtgcacacaaggttaaggctggtgactctactccagaggagctttgcaccgcta

SEQ ID NO: 46163 - DNA, 157 bp, Zea mays
cggtgccctggactctcgcttacagctagtgctatttcgatagcagaagttgcacgggtcgatgcgagctggtccacatttattctagtgcactcctcgttggctatgtccacaattgccctttgtggatctgaggctcaaaagcagaaatacttac

SEQ ID NO: 46164 - DNA, 217 bp, Zea mays
ctccaggtaaggaaagtgttcgtcctcatggcgccgccgcagccgaagtcgggcctcttcgtgggcatcaacaagggccatgtcgtcaccaagcgcgagctgcctctgcgcccgtcccaccgcaaggggaaagcaacgaagagggtgtccatggtcaggggcctgatcagagaggttgctggctttgctccttatgagaagcgtatcaccgagcttc

SEQ ID NO: 46165 - DNA, 245 bp, Zea mays
  unsure (1)..(245): unsure at all n locations
cgacttgatattctcttcttttgggtagcaaggatggtgatgatgggaatgcaacttggtggtgacgtgccatttcagaaggtttatttacatcctatgattcgggatgcacatggccgaaagatgtcaaaatcacttggtaacgttgttgaccctcttgaggtgataaatggcatgtcactggatggtcttctgaaacgtttggaangaggcaatctggatccaaatgaattaaacattgcaag

SEQ ID NO: 46166 - DNA, 203 bp, Zea mays
gtgttcttgcgcgtacgcgtacacagccccgatccgaatcgtcctcctcgtgagcctcgccgatcccccactcccctcgcctcgcttcaagatgcagatctttgtgaagaccctcaccggcaagactatcaccctcgaggtggagtcttctgacaccattgacaatgtcaaggctaagatccaggacaaggagggcatccctc

SEQ ID NO: 46167 - DNA, 175 bp, Zea mays
gctctctctgctcgcagccatggcgaagaactacccgaccgtgagcgccgagtacagcgaggctgtggagaaggccaggcgcaagctccgagccctcatcgccgagaagagctgcgccccgctcatgctccgcctcgcgtggcactccgcggggacgttcgacgtgtcgtcgagg

SEQ ID NO: 46168 - DNA, 187 bp, Zea mays
ggagtttgttcctgagtcactacatcgtgtgctgaagcactacagcaatatgaaccagaggatgccgcttatttatgttaaattatatacctaccagatatttcgaggtttagcctatattcacacagtacctggtgtttgccacagggatgtgaaaccacagaatcttttggttgatccattgact

SEQ ID NO: 46169 - DNA, 334 bp, Zea mays
caataagctcgagctcgagccgctcgagccgtgcagatgcaacctatgacttcaagtatggagttagagctgtagcagggagacggaaggtcatcagccagagaaaccattggcagggtggctgcaggagctcttgcaaagaaaattctaaagctcaaatcaggagtggagatcttggcatttgtttctaaagtgcaccaagtcgtacttccagaagatgcagttgattatgagactgtaaccttggaacatatagagagcaacatcgttagatgtcctgatccagaatatgcagagaagatgattgctgccattgatacggtacgagttagag

SEQ ID NO: 46170 - DNA, 311 bp, Zea mays
aatgctgttgatgtgcttgaagggaggcaatatcgcttacaacacccctgggttggaattgtcaatcgctcacaagctgatatcaacaagaatgtcgatatgctctcagcaagacgcaaagaaaaagagtactttgagagtagtcctgaatatggtcacttggcacataaaatgggtgcagagtatcttgccaagcttctgtcacagcatttagaggctgtgatcagggcaaaaattccaagtattatagctatgattaacaaaacaattgatgaaatagaagcccagttggatcgacttggtaggccaat

SEQ ID NO: 46171 - DNA, 62 bp, Zea mays
ccgccacctccgtggctgtggctaccttcccggctgcccgggctccaatggtttccacacaa

SEQ ID NO: 46172 - DNA, 309 bp, Zea mays
cacgctgtggctcacaacacaaggggtcacaccatgcgcccattgatgcgtcctcgttgggctaggcagcacaacatcgacagaagcagaatgtaaaggtatacttctggcaacggcctatacagccattgatcgtgtagtttgaaacaccgttcaagggattttcatttttcaaagggaaattagctcattttcccttgtaaaaatgaaatttttttaggaaaatggtgttcccaaactagccctaagtattgctgttgcccaagttaaacaaaaaaacgtgtctattattgggctctgtttgtttac

SEQ ID NO: 46173 - DNA, 303 bp, Zea mays
ctggaggtgtgaaaaccattggaaactatgcctcggtactgaaagcacaaaagattgcaaaggggaaaggatattctgatgtcctttatttggatgctgttcatgacaaatatcttgaagaagtctcttcctgcaatatttttgttgtgaaagacaatgttatttctacgcctgccattaaaggaacaatacttcctggtataacgaggaaaagtatcattgaagttgctcagagcaaaggtttcaaggttgaggagcgtctggtgtgtgtagatgagttgattaacgctgatgaagttttct

SEQ ID NO: 46174 - DNA, 306 bp, Zea mays
gcttcatcggctcgcacctcgtggacaggctcatggagaacgagaagcacgaggtcattgttgctgataactttttcaccggttcaaaagataacctgaagaagtggatcggacacccaagatttgagctcatccgccatgatgccactgagccacttcttgtggaggttgaccagatctatcaccttgcttgccctgcttcaccaatcttctacaagcacaatcctgttaagaccatcaagacaaatgttattggtaccctgaacatgctgggacttgcaaagagagttggagctaggattttgt

SEQ ID NO: 46175 - DNA, 309 bp, Zea mays
gacagtgtggcacgtttcttggaatcacgtggaatgttggaggaagccctcgagatagcaactgacactaattacagatttgacctggctgtgcaacttggtcgacttgaaattgcgaaggcgattgctaccgaggcgcaaagtgagtccaagtggaagatattaggggagttagctatgtcaagtggaaagcttgagatggcagaggagtgtcttctacatgctatggacctcagtggtttgttgcttttgtattcttcccttggggatgctgaaggcattaacaaattggcatctgtagccaaagaa

SEQ ID NO: 46176 - DNA, 301 bp, Zea mays
tgcagatcagcaacttcgccagcatctggttcatctccctcttcatctcgatcttcgccacgggtatcctggagatgaggtggagcggggtgggcatcgacgagtggtggaggaacgagcagttctgggtgatcgggggcatctccgcgcacctcttcgccgtgttccagggcctgctcaaggtgctggacggcatcgacaccaacttcaccgtcacctccaaggcctcggacgaggacggcgacttcgcggagctgtacatgttcaagtggacgacgctccttatcccgcccaccatcat

SEQ ID NO: 46177 - DNA, 301 bp, Zea mays
ctcgagccgccccaccaccgagggtgaggtaaccgggctacttatcgcagcgctctttgctgcgacagcataccagctcaatcacctcaacctggactggagcgtacatgcttcgcttcaagcagtactttgcagaagccgtagaggagcagaaggatatcatgagacggcatggcgacaagatcgatcatgacatcctggcagagatggatgtcctctaccggtgcatcaaggaggcccttcgtctccacccgccgctgattatgttgcttcgccaatcacacagtgacttcaccgtgac

SEQ ID NO: 46178 - DNA, 293 bp, Zea mays
gtgcagagcaggtttcagttgataacaaacctgtgtaaattcttggtcactattgcagtatcatcactagcatgaagttttcgccagatggacggttcattgctactgctgatagggacttcaaaatacgagtcacattattcccaaagaatcctctaaaaggggcccatgaaatacagagcttttgccttgggcatacagactttgtatcatgcatcaccttcactagcatatctgaaaaccagagtttccttatatcaggaggaggtgattcaactgttcgcctgtgggac

SEQ ID NO: 46179 - DNA, 297 bp, Zea mays
gtaggtggccggacggtggtgggctcgccaattcaactccgcatctgaatcggcactcggcagcgcgccagctccatagtgtaggaggaggtgatggcgctcacaagaatcggtcttgctggccttgcggtcatggggcagaaccttgccctcaacattgcagagaaagggttccccatctctgtgtacaacaggacaacctccaaggtggacgagaccgtgcagcgtgccaaggcagaaggaaaccttcccgtctacggcttccatgaccccgcgtcctttgtgaactccattcag

SEQ ID NO: 46180 - DNA, 300 bp, Zea mays
gtgaagagcaaggaggcggagaagcccgccaagggcaggaaagggaaggccggcaaggaccccaacaagcctacgagggctcccagcgctttcttcgtgttcatggaggaatttcgcaaggagttcaaggagaagaaccctaagaacaagtctgtcgctgcggtggggaaagctgctggcgacaggtggaaatccctgagcgagtcggacaaggctccctatgtagccaaggctaacaagctcaagctcgagtacaacaaggccatcgctgcctacaacaagggcgagagcactgcagct

SEQ ID NO: 46181 - DNA, 300 bp, Zea mays
  unsure (1)..(300): unsure at all n locations
cacgtgcacccactgcctcttcccttctcgcttggaaactctagtctcgcctcgggttgcaatggaccccaactgaccctgtgccgctggtgtctcctgcacctgcgccactcctggcacctgcanagagtgcaaatgcacctcctgcaagaagagcttcccctactgctgccctgtgggctgtgccaagtgtgcccagggctgcatctgcaaaggggcatcggagaagtgcagctgctgcacctgatgtcgggacagccctgctcccaagtacaaatagagtgacccgtaaaatccagg

SEQ ID NO: 46182 - DNA, 303 bp, Zea mays
gaaacctctcaaaccctagccgcctcctgcaagtttcagagctcaggaatctgcgccatggcgagtgagacggagaccttcgcatttcaggctgagatcaaccagctgctctcactcatcatcaacaccttctactccaacaaggagatcttcctccgcgagcttatctccaactcttccgatgcgctggacaagatcaggttcgagagtctcactgacaagagcaagctcgatgcgcagctgagcttttcatccaccttgtcccagacaaggccacgaacacgctctccatcatcgacagcg

SEQ ID NO: 46183 - DNA, 296 bp, Zea mays
acgcatttgtgctacgagggcttttgcaatggcggcttcggggttcggcggcggcgaggcgttccggctctcggccgcaccaggggccggcttactgaagctgcacaagggcgacatcaccctctggtccgtcgactgcgccaccgacgccatcgttaatgctgctaatgagcgaatgttaggtggcggaggtgttgatggagctatacatcaagctgctggaccagagctagtgcaagcatgcaggataattccagaggtcaaaccaggagttcgttgtcctactggagaagcta

SEQ ID NO: 46184 - DNA, 295 bp, Zea mays
caccaaacaagtgccagcgccctctcgcagtcgccgcaatggagagcaccttcatcatgatcaagcctgacggcgtccagaggggcctcattggtgagatcatcagccgttttgagaagaagggcttctacctcaaggccttgaagcttgtcaacgtggagaggtcgtttgccgagaagcactacgccgatctcgcctccaagcccttcttccagggcctcgtggactacatcatctctggccctgtggtggccatggtctgggagggcaagagcgtcgtcacaactggccgcaa

SEQ ID NO: 46185 - DNA, 294 bp, Zea mays
ataatgctgcaaggcacttgctcacccttgacgagaagaaccctcgtcgtatctttgagggtgaggcacttcttcgccgacatgaaccgctatgggctgcttgctgagggtcagaacaagcttgattatgttcttgccctcaccgctgagaacttcctcgcaaggcggcttcaaacacttgtcttcaaggctggcatggccaagtccattcaccatgctcgtgtcttgatcaagcagcgtcacatcagggttggcaggcaaattgtcaacgtcgcatcattcatggtgagggtg

SEQ ID NO: 46186 - DNA, 292 bp, Zea mays
acggcgtccatgacggtaccgagatcgtgctctggaagtggtgcgagggcgacaaccagcgctggaagatcctcccttggtgaacgaacgaaagaaactactagctggtaccctaataataattctgctggctgcggcgatcccaaaataaaagaggccgggtgcgatgcatctcggacttctcgagtggtgtttgcgtcagacagccagccactgtggggctagtgttccaacatttgtcagcctgcttgcgcgaggaaggggggtcactgactcaagagaagggcctggt

SEQ ID NO: 46187 - DNA, 264 bp, Zea mays
acgccgaccagcacctacgccccgcctgaagtgccctcgagggtcgccgccttgttcctcaccatcccctatgccttcttcctaccggagctggtgtttgggatctgggtgtggactctggtggctgccacacacgtggcataccccctgctgcacggatgggtcgtgtatgtctcgctcacgtcattcctcgtctccctgatgctcctgctgccctacatattcgggttttacaaacgatttgactcctggagagtactggac

SEQ ID NO: 46188 - DNA, 293 bp, Zea mays
acacgatggctcccgcaaagaagggtggcgagaagataaacggccgttctgccatcaacgaagtgataacccgagaatacaccatcaacattcacaagcgcatccatggagtgggcttcaagaagcgtgcacctcgggcactcaaagacattcggaaattagccatgaaggagatgggaactccagatgtgcgcattgacaccaggctcatcgaagctgtctgggccaaaggaataaggaatgtgccataccgaatccgtgtgcagctgtccagaaaacgtaatgaggatgaa

SEQ ID NO: 46189 - DNA, 287 bp, Zea mays
aaacgatacaggaatacgatacgccgctcgcctgaatcgagaccaccaccgctcccgctctgcctcacctcgccgactagagtttttgccgccgcggatctcgccgtccccgccatggatacgtcgggctcctccgcagccgccggcgacgccccgaccaccggggagcaccggatggggaccaccattgtcggggtctgctacgagggtggcgtcgtcctcggcgctgattccagaaccagcactggaatgtatgtagccaaccgtgcttcagacaagattaccca

SEQ ID NO: 46190 - DNA, 292 bp, Zea mays
agggtagagatcgaagatctaggtcacgttcaagaagcaagcgagttagtggattcgacgccccacccccgcaagcaatgggttcaacatttccagttattccaaccccaagtcagttaccaggctcttcgcttcccaacattggtggcatgtttccaaacatgctccctttcggtgttgctgggcagttcaatccccttgtcatccagccacaagcaatgactcaacaggctactcgtcatgctcggcgtgtttatgtcggtggccttcctccatctgctaacgaacagac

SEQ ID NO: 46191 - DNA, 290 bp, Zea mays
gctgtttgctgtttttcgtttctcccgttcacctggcatccacgctcgattccgccgttttccgcatccacggagccaggcgaccgccgccgcttccctactcacccttggccggcgacgacgagcgccaccacggcaggatgacgacgctgaggaacctcaagatcaagacgtcgacgtgcaagaggatcgtgaaggagctgcgctcgtacgagaaggaggtggagaaggaggcggccaagaccgccgacatgaaggagaagggcgctgatccctacgacctcaaacag

SEQ ID NO: 46192 - DNA, 288 bp, Zea mays
gtccccgcgccgcctgctcccggatcccaccgaaacaaccatggccggcggtcccgcggcggtctcgttcctgaccaacatcgcgaaggtggctgcggggctcggagccgcggcctcgctcgcctccgcgtcgctctacaccgtcgacggcggcgagcgcgccgtcatcttcgaccgtttccgcggggtgctcccggagaccgtcggcgagggcacccatttcctcgtgcactggctgcagaagcccgtcatcttcgacatccgcacgcgcccgcacaacttctcctc

SEQ ID NO: 46193 - DNA, 284 bp, Zea mays
  unsure (1)..(284): unsure at all n locations
atttccatctggagctactgccttgccctcatgggatctaagacatggcacccaagaaggccaagagaagggcagcagcagaagggagctccaatgttttctccatgttnttccagactcagatccaggagttcaaggaggctttcactgtaagagctcagaacagggatggcattattgacaaggaggatcttcgggacacctttccggccatgggccgtctcaatgtgaagaatgaggaactcgacgccatgatgaaggaagccagtgggcctatcaacttc

SEQ ID NO: 46194 - DNA, 281 bp, Zea mays
cttgtgaaaaaggttctcaagacaaacgtacaggctctcgtagaattgaacgtgatcaagaaccttgccggttcagctgttgctggagctcttgggggtttcaatgcccatgcaagtaacattgtggcagccatcttcattgctactggtcaggaccctgcacagaacgtggagagttcccagtgcatcaccatgttggaagctataaatgatggcaaagatctccacatctctgttactatgccatctattgaggttggcacagttggtggaggcacgca

SEQ ID NO: 46195 - DNA, 284 bp, Zea mays
ctaccgcagctctccctcaggtttagtgttcgcaatggcggcacttcaacaagcttggtggccttctaaggcacagtgctctggtgagcggtatcactggtggctcttctcctgcagtgttcaatgctgcacggctcatgtctaccaagctatttattggtggtcttgactggggtgttgatgacgtgaaactaagagaagcatttagcagctttggagaggttactgaagcgagggtgatcacagacagggagactgggaggtcaagaggctttggctttgtg

SEQ ID NO: 46196 - DNA, 283 bp, Zea mays
ctcggaggcgacactcgaactcgaatccctcatccagcctgtcgctggcgtcgccggtcgccgccgctcgattgcctccgcctgaatatcccttgccccataaggcctgaccttgaaagcctcgccacttgatcccggcggcggcggaggggagggcgatgccgaagcggacgacacacacctactcgagcgaggacgcactgccggagggccccgagtccgaccttttcgtatactactgcaagcactgcgcctcacatgtcctcatcaccgatacccaatt

SEQ ID NO: 46197 - DNA, 294 bp, Zea mays
ctcgagccgcgcaacacctgctcctcgcccccttctctcagaggcgacgcctcgggcgctcctatcctggcccgtctccggtccccccggaccgtcggggaggcagccggccgtcacagaagcccgatccggaccccgcgagagatccttgatatacctgatggctcatgattgatgagcctctttatccaattgctgtactgattgacgagctcaagaatgacgacatccagttgcgtctaaactccattagaagactttcaacaattgcacgggctcttggagaagaaagaa

SEQ ID NO: 46198 - DNA, 287 bp, Zea mays
ctctaacgccgccatggggcgtatgcacagccgcgggaagggtatctcgtcgtcggcgctgccgtacaagaggacgcctcctacctggctgaagaccgccgcctccgacgtggaggagatgatcacaaaggcagcgaagaagggacagatgccgtcgcagatcggcgtcctgctccgtgaccagcacggtatcccccttgtcaagagtgtcaccggcagcaaaatcctccgcatcctcaaggcccatgggctggcacccgaaatcccggaggacctgtacttcctca

SEQ ID NO: 46199 - DNA, 287 bp, Zea mays
ggagcacggaggcgaaggaggaggagcagcagcagcaggcggcgccgaggagcggcatcccactcagtgcttgcaaccatggctaggggattgaagaagcacttgaagaggctcaatgcgcccaagcattggatgctcgacaagcttggcggagcttttgctcccaagccatcttctggacctcacaagtccagggagtgccttcctctgatcctcatcatcaggaacaggctcaagtatgctctgaactaccgtgaggtcatttctatcctgatgcaacgccatgt

SEQ ID NO: 46200 - DNA, 289 bp, Zea mays
acgagcactcgccgccactcaccagcaaattcccaagccgccccttcccccatctctttcgcgccccatttgatcgattcctgatggcgcccaaggccgagaagaagcccgcggagaagaagccggcggaggagaaggccgagaagaagccaagggcggagaagcgcgtgccgagcaaggagggcggcgagaagaagggaaagaagaaggcgaagaagagcgtcgagacgtacaagatctacatcttcaaggtgctcaagcaggtgcacccggacattggcatctcgtc

SEQ ID NO: 46201 - DNA, 282 bp, Zea mays
acacaatctcgcgttcagctcctctccagtctctccgcctcccgcttacttctctgactctgtcctctttcgtttctttcttgtcggcgacggctggcggctggggtgctgcgccgctctcaccttcaccgccgacgagcattcacaagtagtggtctcttactggtggcggcgtagaggtgacgaaaaagccttgacaatgagcagcataggcacaggttatgatctgtctgtcaccaccttctctcccgatggccgcgtcttccaggtcgagtatgccac

SEQ ID NO: 46202 - DNA, 283 bp, Zea mays
ctcagtcgcctgcgccgccgcttcgttcgtgtggaggggagaagacaggaaatggcggcgactgagggcgtgctcttggggatgggcaaccccctcctcgacatctccgccgtcgtcgatgacgccttcctgacaaagtatgacatcaagctgaacaatgctattctcgctgaggagaagcacttgcctatgtatgacgagttggctagcaagagcaatgttgaatatattgccggaggagccacccagaactctatcagggttgcccaatggatgcttcaaa

SEQ ID NO: 46203 - DNA, 276 bp, Zea mays
cggggaagcacgggcgcaacggcttcgacgacgacaacgtcaaccctttcgcgggaggaagtgttccacctgccaccaattctcgtctctcacctctatcacatgaaccggctgatttctacaatgtggacattcctctcgactcatcaaaggatctgaagaaaaaggagaaagaactccaggctatggaggctgagctaaacaaaagagaacgggaattgaaaaggaaggaagaggcggcatcccgagctggcgttctgatagaagagaaaaact

SEQ ID NO: 46204 - DNA, 275 bp, Zea mays
acaacatgaagtcaagggctgggagaggctttacccttgaggagttgaaggctgcgggcattccaaaaaggcttgctccaaccattggcatttctgtggatcaccgccgcaagaacaaatcccttgaggggctgcaggccaatgtccagaggcttaagacatacaaggccaagctggttatcttcccaaggcgtgctcgcaaggtcaaggctggtgactctactctggaggagttaccactgctacccaggtacagggtgactacatgccaatta

SEQ ID NO: 46205 - DNA, 275 bp, Zea mays
ggacaagaagttccagaacgtgtccaaggagggactgaagctgggcaaggactcgaagctcaaggacctcaaggagtcgttcaaggagctgactgactggtggaagaaggccctggagagtgagaacgtggactcggtgaagatcagcaaccggctgcacgacaccccctgcgtcgtggtcacctccaagtacgggtggagcgccaacatggagaagatcatgcaggcgcagaccctgtcggactcgagcaagcaggcgtacatgcgcggcaaga

SEQ ID NO: 46206 - DNA, 285 bp, Zea mays
gcaagagattgatgagctatgtgatgagtgggagccagagctgctatgccctccaatcaaggagggggccaaaatagatgctctaacattggaaagtgccgttggaccacctacgattgttaattgttgatggtaaagaagttgtgaactttgcatcagcatgaggtctggagtctagacacagcgttgcaaactgaggtttaatcatcttagcaactacggtacgtgaccctgaccgcgtgattgttgcgaaacaacgacaacctcggtctacaccttaaaggt

SEQ ID NO: 46207 - DNA, 295 bp, Zea mays
atcaatgagaagacctgcaatgctctcctcttgaaggtgaaccaaatcgggtctgtgaccgagagtatcgaagctgtcaggatgtccaagcgcgccggatggggagtgatggcaagccacaggagtggcgagacagaggacaccttcattgctgacctctcagttggcctgtctacgggccaaatcaagacgggagccccttgccggtctgagcgcctggccaaatacaaccagctgctcaggatcgaggaagagctcggtgatgccgcggtctacgccggagcaaagttcaggg

SEQ ID NO: 46208 - DNA, 292 bp, Zea mays
cgtgggatgctcgaactggcactgacccagctgttaaggttgagaaagctcacagtggagatgttcattgtgttgattggaatccccttgatgttaactatatcttaactggttctgccgataactctgtccgaatgtgggatcgtcgcaatctgggttcgggaggagctggttctccaattcacaaatttgagggccataaagctgctgttctttgtgttcagtggtcacctgacagagcatctgtttttggaagttctgcagaagatggtttcttaaatgtttgggacca

SEQ ID NO: 46209 - DNA, 288 bp, Zea mays
cagcaggtgattgggcttctgtcatcataaagtatgtattggacagagcaacagttctactcactgatcaccatgtggcttctaactacagcatgcggaatcgatctctatggcaggcatcattcgacgccttttttgggctgcttacacagtactgcatgagtaagtttgatcgtgtggttcatactgcccaattgcaacctgctgctgcaaccgttataaccagggaaatgccagtagagcttctgcgtgccagcctccctcataccaatgaggctcaacgcaagc

SEQ ID NO: 46210 - DNA, 286 bp, Zea mays
agaccaagcagaccacagcaagaagcgtagtcgtcgccggaaggaaaggcgcggacaagatgtcgtggcaggcgtacgtcgatgagcacctgatgtgcgagatcgaaggacaacatctcagcgccgccgccatcgtcggtcacgacggcagcgcttgggcgcagtccgagagcttccccgagttaaagcctgaggaggttgctggtatcataaaggactttgatgaacctggtactcttgcaccaactggtcttttcgttggaggtacaaagtacatggtgatcca

SEQ ID NO: 46211 - DNA, 303 bp, Zea mays
cgcggtcgtaagggatgaggatttttggtccgcacgctcctgctcctgactcaccgctgttcgctctcgccgaggaacaagtcggtcaggaagcacgcgcgcaacagccatggcttttaaggataccggaaaaacacccgtggagccggacgtggcaattcaccgaattcgaatcaccctatcaagccgcaacgtaaaataccttggaaaaggtgtgtgctgacttgataagaggcgcaatagaaaagaatctcaaagtgcaaggaccagttcgaatgcctaccaagactttgagaatcacta

SEQ ID NO: 46212 - DNA, 290 bp, Zea mays
cagaagtgcagcagaacgatcggatctagcagaattctctcaacctcatcggcggcggcgaagagcgtgcggatcggagatggagacaagcgggtggaggaggagagcggcggcgcgggcctcctggagccccgccacggtgtacctgtggctcgcgctcgccgcagcagcactgacgctcgcccaggctaagaaggacctaacggaggttacccacaaggtctacttcgatgtcgagattgacggcaagcccgcaggtcggattgtcatggggctttttgggaagactg

SEQ ID NO: 46213 - DNA, 286 bp, Zea mays
cgagtcctttggtttctccagccaactgagggccgcaacctctggtcaggcgttcccccagtgtgtctttgaccattgggacatgatgggctcagatcctttggaggccggctcccaggctgctcagctggtgctggatatccgcaagaggaagggtctcaaggaacagatgacccctctttctgagtttgaggacaagctctaaaatttttggctgttggtgatactgtttcatctgccggtttaatcatcaattcgtctactgtaatagcagcgacttcaatat

SEQ ID NO: 46214 - DNA, 285 bp, Zea mays
gttcaagcggaggaacggcggacgcaacaagcacgggcgcggccacgtcaagtacatacgctgctccaactgcgccaagtgctgtccaaaggataaggctatcaagcggttcttggtgaggaacattgttgagcaggctgctgtgagggacgtgcaggaggcttgtgtgcatgatggatatgttcttcccaaattgtacgcaaaggttcatcactgtgtctcatgcgcaatccatgcgcacattgtccgtgtccgctctcgtgagaacaggaggaaccgtgagcc

SEQ ID NO: 46215 - DNA, 288 bp, Zea mays
ccagagttgaatcctgggatagacttagctgttactgttttgacaacgggattctggccaagctacaaaacttttgacataaaccttcctgccgagatggtgaaatgtgtagaggttttcaaggagttctatcaaacaagaacaaagcacaggaagctgacatggatttattccttgggaacctgcaacatcaatgctaagtttgatgctaaacctattgaacttattgttacaacatatcaggctgcattgctactactgtttaatggatctgacaggcttagttat

SEQ ID NO: 46216 - DNA, 290 bp, Zea mays
gcgccaagaagcgtaagaagaagacgtacaccaagcccaagaagatcaagcacaagcacaagaaggtcaagctctccgtgctgcagttctataaggtggacgacaccactagcaaggtgacccgcctccgcaaggagtgccccaacacagagtgcggcgcgggcgtcttcatggccaaccacttcgaccgccactactgcggcaagtgcggcctcacctatgtctacaaccagaaggcgtgattgcttgccccgatttgctttatccgcctaccctatcgagcatccagc

SEQ ID NO: 46217 - DNA, 290 bp, Zea mays
caccttccttccccagcaaaggctcaaaagtatcgtgtggagaacttgtacgagggaccccttgatgatgtgtatgcaactgctatcagaaactgtgatccagagggtcctcttatgctgtatgtttcaaagatgattcctgcatctgacaagggcaggttctttgccttcggtcgtgtcttctcagggaaggttgctactggtatgaaggttcggatcatgggtcccaactatgtccccgggcagaagaaggatctgtatgtcaagagtgtccagcgtactgttatctg

SEQ ID NO: 46218 - DNA, 291 bp, Zea mays
tgatattccaccttccttccccagcaaaggctcaaaagtatcgtgtggagaacttgtacgagggaccccttgatgatgtgtatgcaactgctatcagaaactgtgatccagagggtcctcttatgctgtatgtttcaaagatgattcctgctcctgacaagggcaggttctttgccttcggtcgtgtcttctcagggaaggttgctactggtatgaaggttcggatcatgggtcccaactatgtccccgggcagaagaaggatctgtatgtcaagagtgtccagcgtactg

SEQ ID NO: 46219 - DNA, 293 bp, Zea mays
gcggcggcggaggatgatcaagaacagggagtccgccgcgaggtcccgagcgcgcaaacaggcttatacaatggagttagaagccgaagttcagaaactcagagagcagaatcaggaactggagaggaaacaggcagaaattatggaaatgcagaacaacgaggtatcagaaatgttgaaggatccattcggacggaagaaacggctgtgcttgcgaagaacgttgacggccccctggtgacgattgcctagaacagcacatgacttgcacttgctacgtacctgcaggggcg

SEQ ID NO: 46220 - DNA, 290 bp, Zea mays
agtttgatgaatgaggataaacgctgccgccctatactcttccactctgatggtccgaatgcaggagatcaagaaccattccctgtgggatcaaatgtccgttccaggcctggaaggtccaggattttgagctgggaacaaaaccaccaggacattgtgtctgatcataccaaaggtggaactccgagcagggctggtggcactccaggttacatcgccacggatactgatcatacggctgttgattgacgaacttgcgacaacacccgacattctgacaattgcaatcc

SEQ ID NO: 46221 - DNA, 283 bp, Zea mays
cagcgacatcaccctcaaggactccaagacgcttctcttcggcgagaagccggtcaccgtctttggcatcaggaaccccgaggagatcccgtggggtgaggctggtgctgagtatgtcgtggagtccaccggtgtcttcactgacaaggacaaggctgctgcacatctgaagggtggtgccaagaaggttgttatctctgccccaagcaaagatgcacccatgtttgttgttggtgtcaatgaggacaagtacacctccgatgttaacattgtttccaatgct

SEQ ID NO: 46222 - DNA, 286 bp, Zea mays
gtgatgtatatagctttggcgtactcataatggagatcatcactggtagatctcctgtagactacacaagagcagctggagaggtcaacttggttgagtggctcaagaccatggttgccgagaggaaagcggaggaagttctggacccaaagatggctgaaaagccttctcccaaaacgctgaaacgggcgctcctggtcgcgcttcgctgtgtcgaccctgatgcgaacaagaggcctaaaatggggcatgtgattcacatgctcgagatggacgatctcctctt

SEQ ID NO: 46223 - DNA, 278 bp, Zea mays
agatggatgcaaccactcccaaatactccaaggcacgttatgaagagattgtaaaggaagtctcatcctacctcaagaaagttgggtacaaccctgataagattgcatttattcccatttctggttttaagggtgacaacatgattgaaaggtccaccaaccttgactggtacaaaggcccaaccctgcttgaagctcttgaccagatcaccgagcccaagaagccttcagacaagcccctgcatctgcacctccaggatgtgtacaagaatggtggt

SEQ ID NO: 46224 - DNA, 221 bp, Zea mays
  unsure (1)..(221): unsure at all n locations
atngctcacacacgcaaccagatctcccccaaatccagccgtcggcacctccgcttcaagatgcagatctctgtgaaaaccctgactggcaagactatcaccctcgaggtggagtcgtctgacaccattgacaacgttaagggcaagatccatgtcaacgattgcatccgcgcagattagtagcggctcatcttcgctggtaaagcactttaggacaggtg

SEQ ID NO: 46225 - DNA, 297 bp, Zea mays
cttgctaccagatcgctcttgcgatcaagaaggaagtcgaggatctcgaggctggtggtattcaggttatccaaatcgacgaggctgcactgagagaagggctgccgctccgcaaggctgagcatgcattctacttggactgggctgtccactccttcagaatcaccaactgcgagatccaggacaccacccagatccacacccacatgtgctactccaacttcaacgacatcatccactcgatcatcgacatggacgcggacgtgatcaccatcgagaactcgcggtccgacgaga

SEQ ID NO: 46226 - DNA, 317 bp, Zea mays
gcgctgcagcgaacgaactcggaatcggctcaactcggcgaatcggctcaggaagggggagcgcaacacacgcggtcgccgggaacacagagagagagaaagggcgagctagcgagcgagatccccctctcccgctgccggatccgatctgacctgacctcgtcgccgcctgccgtgggagggagaagaggaagaggaggcggaggcggcggagatggcaccggtgtcagcgctcgccaagtacaagctcgtcttcctgggggaccagtccgtcggcaagacgagcatcatcacccgcttcatgtacgacaagttcg

SEQ ID NO: 46227 - DNA, 295 bp, Zea mays
ccctaaccctagctgcagtgccactaccgcccgcttgcccggtctccggagaggaagccgacccaagcaacgatgccgtccgggtcagcgacgcaatttcggtacacgcagacgccgtccaaggtgctgcacctgcggaacatgccgtgggcatgcaccgaggaggagctcgtcgagctctgcaaacccttcggcagggtcgtaaacaccatgtgcaacgtcggcgccaaccgtaaccaggcattcgtcgagtttgcagatcaaaaccaggcaatttcaatggtgtcctattatg

SEQ ID NO: 46228 - DNA, 447 bp, Zea mays
  unsure (1)..(447): unsure at all n locations
agctgctttagcgtactaactcgnaatcgactcgacagcacagacacctccgccacctccactctcgaatcgttcccaccatggcgtcgcagcngatcctcgcgtcattcgcacgcagctcgagcgaggcactcgggagggacncgcatgcctccggacgtnggaccgtatgcactacatgacataaggatcccccagctcccagtganangggtcaaccattcggnggtcggcggccttacgtcggaccgagggaagggaagctcctagtgctgaacgtggtcaggcgcgccgagcanatgttgatcaataatccgtcacgtgtcaaggagtacctacaatcacagtcatgctgaattcataactgacgctaacttatcttgcgtgacagctgctatcagagataggtctacgtcatgctacggtctgtcttagatcgagtgatct

SEQ ID NO: 46229 - DNA, 376 bp, Zea mays
  unsure (1)..(376): unsure at all n locations
caacaagcanangtacgggcacaccactggccangaagcaagctcanacgctaaccgcctgcgacgccagcacgatggcacgctacgaccgcgcgatcaccgtcttctcgcccgacggccacctcttccangtcgagtacgccctggangccgtccgcaagggcacacgcggccgtcggcgtccgcggcacggacaccgtcgtcctcggtgtggagaagaagtcaacccccaagctccaggactccaggtccgtgcgcaagatcgcgtgcctggacacgcacatcgctctggcatgcgcggggctgaaagcggtcgcacgcgtgctcatcagcagcgcgcaggtcgagtgccagagctacgacttcaccgtcgaga

SEQ ID NO: 46230 - DNA, 329 bp, Zea mays
  unsure (1)..(329): unsure at all n locations
tgtcagcgacgactcgatcgctcacatagcgacgcacgccacttctcacaacattcagccaagnactcngacctccgcttcaagatncanacctctctgncaacctcnactggcnatactatcaccctcgaagttgagtcgtctgacaccattgacaacgttaacgccaacgattcagaccacgaatgcgatccgcccataccagcatcgactcatcttcgctggcaaacagcttgaggatcagcgcacgcttgctgactacaacatccaganagagagcacactccaacttgtgctccgcctcagcggaggcatgcagatcttcgtga

SEQ ID NO: 46231 - DNA, 354 bp, Zea mays
  unsure (1)..(354): unsure at all n locations
tcatcgcgagtctccagctaccgcatcaaatcnacncncatccncgtcgaccccgacaaacncgacccgatggcgctcaaggccgagaagaagccagcggagaagaagccggcggccgaggagaaggcggagaagacgaccgcacgtaagaagcccanttccgagaagcgcttgccggcctcgaagtcctccggcaaagatggcggcgagaatgaagggaagaagaaggccaagaagagcgtggagacctancaaatctacatcttcaaggtcctgaagcangtgcaccccgacatcggcatctcctccaaggccatgtcgatcatgaactccttcatcgacgacatattcgag

SEQ ID NO: 46232 - DNA, 387 bp, Zea mays
  unsure (1)..(387): unsure at all n locations
tgcgatctctagcagcagatcctcgtgcgacgnagcgctacaccttcgtactgtcncgatggcgcgcacgaagcagacggcgaggaagtccactggcggcaangcgccaaggaagcagctggccacgaaggcggcgcgcaagtctgccccggcgaccggcggaattgaagaagcccaaccgtttccgccccgcaccgtcgcgctccgngagatccgcaagtatcagaagagcacggagctgctgatccgcaagctgccgttccagcgcctggttcgtgagatcgctcangacttcaagaccgaccttcgcttcgagagctccgccgtcgctgcgctgcnnagagcgtccgaggcctacctcgtcgggctctgtcgagacacaaactc

SEQ ID NO: 46233 - DNA, 391 bp, Zea mays
  unsure (1)..(391): unsure at all n locations
gcgtttcagcgtagtanctcggattcgctcgacagacagcaccagcagcctcgtcggggcagcggcactgcagcttcaccagccgccgcctatcgccgtctcctctgcctctgcctctccccctaacgcacttccatttctccacgcgcacccgctcgcgcttccgcttcctcgacacttagttcgttcccgaaccgaagcggcggctgcgttcgcattgggggcacgcaatggagcagtacgagaangtggagaagatcgggganggcacgtacggggtggtgtacaaggcgctggacaaggccaccaacgagacgatcgcgactcagaagatccgcctcgagcanngagatcgaggcgtctcgtccacagccatcagcgagatctctct

SEQ ID NO: 46234 - DNA, 191 bp, Zea mays
cgtgaatcaggcgtcggagggccccctcaagggcatcgtgggctacactgagcaccaggtggtctcctctgagttcaacagcgacacccactcctccacctttgacgctggggctagcattgccctcaacgacgactttgtcaagctcagttcctggtatgacaacgaatttggctacagcggcagggtgg

SEQ ID NO: 46235 - DNA, 253 bp, Zea mays
caccactttaccgagcttgcaagtgggcaatcaacacagcccacattatctgcctatggaggtttgcaacgatagttgaacgacagcgttactcaaagcgactcaatgagaaacaaatcactgctctactgatagtgacctgccagtgccctcaagagcgtgagtggacatattacagactgcgcatcacaatacgtactatggagaatcgtatgcaccagaataccgtatgagaatttctgaacgccttgct

SEQ ID NO: 46236 - DNA, 291 bp, Zea mays
attcctcgcgcggcgaccacccgattcgaagcgtgcggagagaccgaagaagcgggagagatggctcgtaccaagcagactgctcgcaagtccacgggagggaaggctcccaggaagcagcttgccaccaaggctgcccgtaagtctgcccccaccactggtggagtgaagaagcctcaccgctaccgccctggaactgttgccctccgtgagatccgcaagtatcagaagagcactgagctgctgatcaggaagctgcccttccagaggctcgtcagggaaattgcacag

SEQ ID NO: 46237 - DNA, 286 bp, Zea mays
ggaaggagggagagagcacgggggcttgatcgaagatggatgccggagcaaaggtggtgaagaaggccgcggcggggcgtcgcggcgggggcggccccaagaagaagccggtctctcgctccgtgaaggccggcctccagttccccgtaggccgtatcggccgctacctcaagcagggtcgctactcccagcgtgtcggcaccggcgcccccgtctacctcgctgccgtcctcgagtacctcgccgccgagctcctcgagttggcggggaacgcagcgcggacaac

SEQ ID NO: 46238 - DNA, 286 bp, Zea mays
ggcaatatcatcttctctagatgcattttacagattttcccggccacatactgtcataggaacagcattaagcatagtctcagtttcccttctagctgtccagagcttgtctgatatatcacctttgttcctcactggtttgctggaggcagtggtagctgcccttttcatgaatatctatattgttggactgaaccagttattcgacattgagatagacaaggttaacaagccaactcttccattggcatctggggaatacaccttgcgactgggggtgcaatag

SEQ ID NO: 46239 - DNA, 285 bp, Zea mays
cgaggagagacagatacagatcgcgcgctcagatgtcgtcggactcctcgtcgtgggcgcgcgccctggtgcagatctcgccctacaccttctccgccatcggcatcgccgtctccatcggcgtctcggtcctcggcgcggcatggggtatcttcatcacggggagcagcctcatcggggccgccatcaaggcgcccaggatcacatctaagaacctcatcagtgtcatcttctgtgaggctgttgcaatttatggtgtaattgtggcaatcatcctccagacaa

SEQ ID NO: 46240 - DNA, 281 bp, Zea mays
caacaggcatgccgaacggtggcggcaagaggtggctgctgctgctgccgctgtcgcggtgggttctcctcctcggcagcctccagctcccggcggccggcggcacgtcgtcacgcgcatggcgggttcgacgggccacttccgttctacctcgaaaccgggtacgtggaggtggacgagcagcaaggtgtgcagctcttctactacttcgtttgctcggagcgcgacccctacgaggacccgctgctgctgtggctgtccggcggcccaggctgctccgg

SEQ ID NO: 46241 - DNA, 283 bp, Zea mays
gtgaaagaggcaattcgtttcattactggtttgctcaggagctctggtaacaaagacaaagatgaggacaaagttgagccaatggagaaattgctgagccactgcaaggagatcgcggaccaggtcaatgatcttggggcttctgtatacccaccacaagactcgtctgagatggagctcgctataaaaagactgtacaatggcatcaacgggatgcgcaaggaaatagggaacctcggtggcgcacctgagagcacctttgccgcccttgaaggattcgaaa

SEQ ID NO: 46242 - DNA, 286 bp, Zea mays
  unsure (1)..(286): unsure at all n locations
cgctgaccggagcggaaccatggctcgatcggtgaccgggatctgtctgggtgttatctctctcgacgtcgagcctgacaatcacatggctcccccaatgccagtgtagtctcgtcagccaccggagaatccgatcaccatcttcctcaactgctacgcccctcagttccanccacctcagatagaaattgagctactgaagaatggaaagaagataccaaatatcgagatgtcagatctgtccttcagcaagnactgagtctttctacatcctggctcacactga

SEQ ID NO: 46243 - DNA, 285 bp, Zea mays
caccggatcgggagcggccaaaatgaagtttaatcccttcgtgacttacgaccgatgctatgatcgcaaaaggcatttcaatgcaccttcccacattcgaaggaagactatgtcttcccctctttccaaagagctgagacagaagtacaacgtgcgatccatgcccatccgaaaggatgatgaagttcaggttgtacgtggacactataaaggtcagcaaattggcaaagtagtccaggtttacaggaagaaatatgttatctacattgaacgggtgcagcggga

SEQ ID NO: 46244 - DNA, 271 bp, Zea mays
attgactcaaccactggtggttttgaggctggtatctccaaggatggccagacccgtgagcatgctctccttgctttcacacttggtgtgaagcagatgatttgctgctgcaacaagatggatgctactacacccaagtattcaaaggcccgttatgatgagattgtgaaggaagtctcttcctacctgaagaaggttggatacaaccctgataagatccacttcgttccaatctctggttttgaaggtgacaacatgattgagaggtcca

SEQ ID NO: 46245 - DNA, 292 bp, Zea mays
tgaaattgctgctggaattgctgcccgtgatgggtttcatgcaagcggagataacatctttctaacagatggagcaagcccagcagtgcacatgatgatgcagttgttaataagttctgagagcgatggcattctctgccctattccacagtacccactgtactctgcatcgattgctcttcacggtggttcccttgttccttatttccttaatgaagagacagggtggggactcgatgttgatgagctgaagaaacaactggaggaggctcgatctaagggcatcactgtc

SEQ ID NO: 46246 - DNA, 161 bp, Zea mays
tgctttagagagtattaagatctacactgcgattagtgatggaacaatcaatctagttgacaagttcttcgagatgcaaagaaatgatgctgttagggcacttgatgtatacaaaagagcaactaaccaggctgaacgactttcagaggtttatgaagtgt

SEQ ID NO: 46247 - DNA, 149 bp, Zea mays
tgttcttcgaggagcacgaggactacaagtacaccgggctcgcgtggctgttcctgggcgtcccgaccagcgacaccctgctgtacaaggaggagctggagaagatgaaggagatggcgcccgacaacttccggctggacctcgccgtg

SEQ ID NO: 46248 - DNA, 234 bp, Zea mays
cgacatcttcgagaagctggccggcgaggcgccaagctcgcgcgctacaacaagaagcccaccatcacctcccgcgagatccagacctccgtgcgcctcgtgctccccggcgagctcgccaagcacgccgtctctgagggcaccaaggccgtcaccaagttcacctcctcctaggcttgcacgctcgccctttgtaggcttctcttgtgttgatgttcgccttgtgttgtagtt

SEQ ID NO: 46249 - DNA, 218 bp, Zea mays
gtttgcctcttctccctcttgccggtcccgaataaagagcagcagcgcaagaggtcggtagagcgagaagaaggcaatggcggccgagagcttccttttcacctcggagtccgtgaacgaggggcacccgacaagctgtgcgaccaggtcgcaaacgccgtgcttgacgcatgcctcgcgcaggaccccgacagcaaggtggcctacgagacctgcac

SEQ ID NO: 46250 - DNA, 196 bp, Zea mays
cggaccggaacgacaggaagggttcaactatgagcgccgtggcggtttcgtcgtcgctgaacccggacgcgccgctcttcatcccggcggcgctgctgcaggtggaggacttctcgccgcagtcgtgggacctcatcaccaccactacctggttccgcgaccactgatcccgcgagcgcgcccacctggacgaaat

SEQ ID NO: 46251 - DNA, 117 bp, Zea mays
caaaggtgaatgacgaatggctggaacgcgagtgcaaagggaaggtgggcattttccccaaagtttttgttgaagactgcgcaactacagatttggaaagcactcggagagaagtct

SEQ ID NO: 46252 - DNA, 225 bp, Zea mays
catggcctatatgttcaagtatgattccactcatggcccgtttaaaggttctattcgtgtcgtggatgattcaaccctcgagatcaatgggaagaaggtcacaattacaagcaaaagagatcctgcagagattccatggggtaactttggggctgaatatgttgtagaatcttctggtgtcttcacgacgactgataaagcatcaccacacttaagaggtggtgc

SEQ ID NO: 46253 - DNA, 180 bp, Zea mays
ctctgaagctcccctttcatatctgagaagaaaaatgtgcaaaaccctacatggcacactgctcctactggccatctttgtgctgtttctgaatttcagccatgcaactgcaaaacgtaccaggagaggtatggacattttggagaaaacttcatagacaaaaacaactggagggtgtat

SEQ ID NO: 46254 - DNA, 94 bp, Zea mays
gtcgtggcaggcgtacgtcgatgagcacctgatgtgcgagatcgaaggacaacatctcagcgccgccgccatcgtcggtcacgaggcagcgctt

SEQ ID NO: 46255 - DNA, 201 bp, Zea mays
caaggagcttggaactgtgatgcgctcccttggccagaaccccactgaagcagagctgcaggacatgatcaacgaggttgatgctgatggcaatgggaccattgacttcccagagttcctgaacctgatggcaaggaagatgaaggacaccgactccgaggaggagcttaaggaggcctttcgcgtcttcgacaaggacca

SEQ ID NO: 46256 - DNA, 221 bp, Zea mays
agggccgcgccctcgtggtcgcggcacagctctccgcgaggtacatcatgggtcggcacctgcctgataaagccatagacctggtggacgaggcctgcgccaatgtgagggtgcagctcgacagccagccggaggagattgtctaacctggagaggaagagaatccagcttgaggtcgagctccacgcgctcgagaaggagaaggacaaggccagcaaacc

SEQ ID NO: 46257 - DNA, 164 bp, Zea mays
cagagacaggcgtcttcgtactcgcctatctccgcgactcaaagctttccccaattcccccccttctcccatttctcaccaccgccgccgctccccccgttcaacaacaccatgagggagtgcatctcgatccacatcggccaggctggtatccaggtcggaaa

SEQ ID NO: 46258 - DNA, 229 bp, Zea mays
ggacaagatccggcccctgtggaggcactacttccagaacacccagggcctcatttttgttgtagacagcaacgacagagagcgtgttgttgaggccagagatgagctccaccggatgctgaatgaggacgagctccgtgatgctgtgcttttggtgtttgcaaacaagcaagatctgcctaatgccatgaacgctgctgaaatcaccgataagcttggcctgcactcc

SEQ ID NO: 46259 - DNA, 166 bp, Zea mays
acttgcattccagtatctcgaagatctcaaaaatgaatttgagagagtcaatggcagccaaattgaaactgctgcaaggccatatgcatttattagatttgatgcattcatacagaagaccaagaaactgtatttggataccagaacccagaggaaccttgctaag

SEQ ID NO: 46260 - DNA, 220 bp, Zea mays
ctaatccagtaactcgcatcttcctgcgtcatccaagttctagcagcgcacgctacggtttcgacaatgtcggggcgcggcaagggcggcaagggtctgggcaagggcggcgccaagcgccaccgcaaggtcctgcgcgacaacatccagggcatcaccaagccggcgatccggaggctagctaggaggggcggcgtcaagcgcatctcggggctcatct

SEQ ID NO: 46261 - DNA, 304 bp, Zea mays
cttcggaaaggctgctcaccttgttgactccacaaaccaagttggccatttccagaaggtcctgacggctatcgggaacttctgtatttgctcaattgctgtggggatgtttgttgagatcattgtcatgtatcctatccagcacagggcttaccgccctgggatcgacaacctcctcgtccttctcattggaggcatccccataaccatgccgaccgtcttatctgtaactatggctattgggtcccatcgtttgtctcaacagggggctatcacaaaaagaatgactgcaatcgaggagatg

SEQ ID NO: 46262 - DNA, 309 bp, Zea mays
tctcgccttcttccccaccccaccctaccctggcacccacgcgctcttcagatcagatcggcaaggccaatcccgagcagtggtgcgaaacctcgagcgctcgcgccggtgaccataacaaagaggaagccgcggtagcactggtagcggcagcagtaagggggagatgtcgtcggcgttcagcggcgatgagaccgcccctttcttcggcttccttggcgcctccgctgcgctcgtcttctcatgcatgggggcggcgtacgggacagccaagagtggcgtcggcgtggcgtccatgggtgtcatgcg

SEQ ID NO: 46263 - DNA, 299 bp, Zea mays
ctgacgcccgacgagcagtgtaacattttccttcagccatgggtaaggagaagactcacatcaacattgtggtcattggccatgtcgactctggcaagtcgaccaccactggccacctgatctacaagcttggaggtattgacaagcgagtgattgagaggttcgagaaagaggctgccgagatgaacaagcggtcattcaagtatgcgtgggtgcttgacaagctcaaggctgagcgtgagagcggtattacaatagatattgccctgtggaagttcgagaccaccaagtactactgc

SEQ ID NO: 46264 - DNA, 299 bp, Zea mays
gccggcggcatcttcgagatgaccgtattcccgcgcaagtacgccatcgagatctcctccaaagtctacggcagctggaacttcaccgagcaggccctccccgacgacctcatcaagcgaggcatggccgttccagatccgtcgagcccctacaaggtgcggctgctgatcgaggactacccgtacgcctcggacgggctggccgtgtggcacgccatcgagcagtgggtgacggagtacctggccatctactaccccaacgacggcgtgctgcaggccgacgtggagctgcaggcgtg

SEQ ID NO: 46265 - DNA, 264 bp, Zea mays
cgcgaggatatgacttttgaagaagctgttaagctggttgagaagtgcttgttgatagctgacctgtaccggtacagcaacatatagcaagcacttctcaaccagcttaacagcttcttcaaaagtgcttgctggtcttgctgtaccgtgacaggtcatctatcaacaaattccagattgccaagatcacaactgtaggatctatcatctacccaccatattccttgaagacctactggggcttctctcactttgaaaacccag

SEQ ID NO: 46266 - DNA, 293 bp, Zea mays
gacggaaatcaacctgcgccgctgccttctccgttctcgccgtcgcctccgcctccgctgccgccgcgcaggtcagggtcatgtcgatcttcgagtacaacgggagcgccgtggtggcgatggtggggaagaactgcttcgcgatcgccagcgaccgccgcctcggcgtgcagctgcagacgatcgccaccgacttccgacgggtgttcaaggtccacgacaagctctacatcgggctctcggggctcgccaccgacgcccagacgctgtatcagcggctggtgttcaggcac

SEQ ID NO: 46267 - DNA, 288 bp, Zea mays
cacttctcgccttctctaatctctttgcctccctccaccaccagtccaccaccactgctacccaaccctcgcttccccataccctagccaagggacacggtggccggcgatggacggcgacggaggaggcgctggtgcgctgcaccaatacacgcgctcacccgaggacgtcttccgcgatttccgcgcgcgccgagccggcatcgtcaaggcgctcaccacggatgtggagaagttctatcagcagtgcgatccagagaaagagaacttgtgcctttatggtttgcc

SEQ ID NO: 46268 - DNA, 282 bp, Zea mays
tgcaagtttaatcttcgcctccagccatgggtaaggagaagtctcacatcaacattgtggttattggccacgtcgactctggcaagtcgacaaccaccggccacctgatctacaagcttggaggcattgacaagcgtgtgatcgagaggtttgagaaggaggccgctgaaatgaacaagcggtccttaaaatatgcttgggtgcaagacaagctcaaagctgagcgtgagaggggtatcaccattgatattgctctgtggaagtttgagaccaccaagtact

SEQ ID NO: 46269 - DNA, 269 bp, Zea mays
gttgaagtcgtgatggccaatgattgcattggtgaagaagttgagaagttggctgccgctttgccagaaggtggagttctgctcctagagaatgttagattctacaaggaggaagagaagaacgaacctgagtttgctaagaagctagcatctgttgctgacctttatgtcaatgatgcttttggcacggcacacagagctcatgcttcaaccgaagagttaccaagtattgaagcctgtgttgccggctcctctgcagaggaactgac

SEQ ID NO: 46270 - DNA, 294 bp, Zea mays
gacgcatcggctgccgcagactggtagtagccggcgcgccgtcaccgtatcctcagatcagaggcgagcagaaaccacaccactctactgacgcccgacgagcagtgtaacattttccttcagccatgggtaaggagaagactcacatcaacattgtggtcattggccatgtcgactctggcaagtcgaccaccactggccacctgatctacaagcttggaggtattgacaagcgagtgattgagaggttcgagaaagaggctgccgagatgaacaagcggtcattcaagtatg

SEQ ID NO: 46271 - DNA, 299 bp, Zea mays
cttaggaagaaggtgatgccagctgtcattgtgaggcagcgcaagtcatggcgccgaaaggatggtgtctacatgtactttgaagacaatgctggagtgattgtgaacccaaagggagagatgaaaggctctgccatcactggacccatcggaaaggagtgtgctgatctgtggcctaggattgccagcgcggcaaatgcgattgtctagtggaatcagttgatcgaaatttacttcaaataacatttgtttgtgttgcgaattgggaagagagtttttagttagacgagcttttgatg

SEQ ID NO: 46272 - DNA, 282 bp, Zea mays
catttgtcaggctggaaatctatctgatttctacgagaattgccggggtttagaacttgcgaggaattttcagtttcccactctgagggagccgccacaaacatttcttgcaactatggaggagtatgtgaaggaggctccacgcatggtcccagttcgagaacccctggaacttcctgagaggcttcttcttacatacaaacctgaagaatcggaggacattcctgagcctgcttctgttgaagaggaaaatgcaccagttgaagagctgttctggtacca

SEQ ID NO: 46273 - DNA, 290 bp, Zea mays
gacaacttcaaggttcttcgtatggtaccagggaggatcgaagaattaaatataatggcaatgttaaccttcgagctggtactaacaaaatcgcactactgagtgttgcttgcggattgccgaatgttggagtgcattatgagacgtggaacaccggcgtcggtggtcctgtcgtgcttcatgggttggatgaaggttcgcgagaccttacttggcagacctggtcctatcaggttggcctgaaagcgagcagatgaatctgaactccctagaaggctcaggctcagttg

SEQ ID NO: 46274 - DNA, 293 bp, Zea mays
ctccccactgaacaggtgactggcgaaataccctttcagatcactgagatatcctcagaatgggcttattgtactgaggacacaaaggtccttgtggttggatgtttccatgagaactacagacatctggctgggaccaatctcttctgtgtcattggtgaccagtgtgttgatgcaaatattgttcaaactggcgtttaccgtttcattgctagaccacatgctcctggacgagtcaatctttatttgactttggatgggaaaacaccaatcagtgaggttttgagttttca

SEQ ID NO: 46275 - DNA, 318 bp, Zea mays
tttgctccatcattatgatacctaatctatagatgtcagactttagggacattttgccatggtattggtattctggagcgcagtatcctagggataaaagccgttcattgctcatagtacgtgatacttcagccagccttgatagaccaaagtctgcaatctttggtaccatttgatcatgtactagtatgttggcaggtttaagatccatgtgaatgatgtcccttaagtctgacatctatagtttaggtgtcataatgctggagctggtgaccgggagctaggaggagccggacattactaatgtacttcgacggt

SEQ ID NO: 46276 - DNA, 320 bp, Zea mays
gacggattgtgctgtaaagcgtgatggcagcgtttccggcgatggcccgagccgactacgactacctcatcaaactgctcctcatcggtgacagcggtgttggaaaaagttgtctcctgttacggttttcagatggatcattcaccactagcttcattaccactattggcattgacttcaagataaggactgtcgagttggatggcaaacggattaagttgcagatctgggacactgcaggccaagaacgtttccgcacgattactactgcttactacaggggagcatgggcatctgcttgtgtacgatgtcacagacga

SEQ ID NO: 46277 - DNA, 311 bp, Zea mays
ggacaccatggctccgatgaagctgtacggggcggtgatgtcgtggaacgtgacgaggtgcgcaacggcgctggaggaggctggctccgactacgagatcgtgcccatcaacttcgccaccgccgagcacaagagccccgagcacctcgtccgcaacccgtttggtcaggttccagctctgcaggatggtgacttgtacctcttcgaatcacgcgcaatctgcaagtacgctgctcgcaaaaacaagccagagctgttgagggaaggaaacctcgaggaggcagcaatggtggatgtttggatcgaggtgg

SEQ ID NO: 46278 - DNA, 312 bp, Zea mays
gagtcggaatccctggtggataacataaaatttgatcatggatatactgctaaaagtcctgcgatcgtgaatgtaagctcattcgtcctcacatgctacatctcttacatacatccagttgtggtttttgagaagtgtggttccttgattcttgctcttgtttgtagctactcgagattttgtcagaattcacccctgagcagcagcatgcgttctgccagtttgtaaccggtgctcctcggcttccacatggtggattggctgcccttagccccaagcttactatagttaggaagcatccttcaagtgctg

SEQ ID NO: 46279 - DNA, 307 bp, Zea mays
tgccctcaaggcctcaaggcatcgccggcgccgcaacttcgctgaggaagcccgcacccctgcccggatccgatggccaacagcaacctcccgcggcggatcatcaaggagactcagcggctgctcagcgagccagcaccggggatcagcgcgtcgccctcggaggagaacatgcgctacttcaacgttatgatccttgggccggcgcagtcgccctatgaaggtggagtttataaccgaactctctttacctgaggaatatccaatggctgccccaaaggttaggtttctgacaaagattatcacc

SEQ ID NO: 46280 - DNA, 305 bp, Zea mays
ttttaatcctcactctaagatacatggcggtccatcggatgaagagaggcatgttggagacctgggcaatgtggctgctggaaaggtcggtgtggccaatgtgtccattgaagatcgtgtgatctcactctcaggagagcattccatcattggccgtactatggtggtccacgagaaacaagatgacttgggcaaaggtggaaatgaggaaattccaaggcttgaaatgtctggaagcgctttggcttgtggtgtgattgggattgcccaataaacattccctatgtggtctgagtctcagactc

SEQ ID NO: 46281 - DNA, 214 bp, Zea mays
cactgcattttatccttcctggtgctctgtccacctctctcgctctgggcctccgccgccgccctaagccacgtgctgaggctttcgttggtctcttcgccggcgacgagcacccagcagttctgtagaaatggctgatggtgaggacatccagcctcttgtctgcgacaatggcactggaatggtcaaggctggttttgctggcgatgatgca

SEQ ID NO: 46282 - DNA, 210 bp, Zea mays
gcgccgtgacgacgttaaggcaatcgtgctcactggtgctggaggcaagttctgtggaggatttgatatcaacgttttcacaaaggttcatcagactggggatgtatcacttatgccggacgtatccgtcgagcttgtgtcaaacatgatgaaagagggaaaaaacctttgtgttgcacatataggtgctctattgtggggtggcccaaa

SEQ ID NO: 46283 - DNA, 314 bp, Zea mays
tatcaggttctgaaaagggtttctgaggaacactgggtgatcttcacatgggccatgcgctcaataaaatcctcaaggattttataaatcgctacaagctgcttcagaatcataaagtgtcctttgttcctggttggtattgccacggccttctaatagaactaaaaggtggcttgtgcgaacgaggcgtggcaatcgatgctgcatggcaaacccaaaaatcttcaaaagcctaggcaaaagtagtaactaaagatacatcaccttgtccagtttttctgcttttacttcgactatatgtcattgtgccacaa

SEQ ID NO: 46284 - DNA, 308 bp, Zea mays
aactaaaacccgcgatctgaagcgactagtcgaaggcggcggcggcgatggggagcgaccaggagacggagaagaagaagaccccggtggcactaatgcccatcgcgaacccctcgcaggaaagaagctctgcaagcggaccctcaagctcgtgcgacgagcctctgaggccaagtgcctcaagcgcggagtcaaagaggtagtcaagagcattcgccgcgggaacaaagggttgtgtgtgattgctggaaatatttctcctattgatgtgattacacacgttccaatactatgtgaggaatctaatg

SEQ ID NO: 46285 - DNA, 291 bp, Zea mays
ggcctctgctgctgcgacggctacgatggggacggggaaggtggtttgcgtcaccggcgcatcagggtacatcgcgtcctggattgtcaggctcctactcgaccgcggctacaccgtccgcgccaccgtgcgagacaccgctgacccaaagaaaacattgcacctgactgcgttggatggtgctaaggataggctgcacttatttaaagctagcctgcctagagaaggttctttcgatgctgcagttcatcgatgcgacactgtatttcatactgcctctcccttttatca

SEQ ID NO: 46286 - DNA, 241 bp, Zea mays
tagccctgggagcagaaagaaggtcataacagcaaccgctagacaaatagagagtttgatccgtctcagcgaagattagcccgaatgcggttctctgaagtggtcgaggtgcgggatgttgtggaggcattcaggcttcttgaagtcgccatgcagcagtctgcgacggatcatgcaactggtacgattgatatggatctgatcatgacggggatatccgcaagcgaaaggcagaggcggg

SEQ ID NO: 46287 - DNA, 188 bp, Zea mays
gtcatcgggtacaagcaccagacggacgcggcggcgtcgggccccgacgcggcgtgcggcggcgtgggcatcctcggcatcgcgtgggccttcggcggcatgatcttcatcctcgtctactgcaccgccggcatctcaggtgggcacatcaacccggccgtgaccttcggcttgtccctggcgaggaa

SEQ ID NO: 46288 - DNA, 297 bp, Zea mays
ccgactacaacattcagaaggagagcaccctccacttggtgttgcgtctcaggggcggcatgcagatatttgtgaagactctgactggcaagactatcacccttgaggtcgagtcttctgataccatcgacaatgtcaaggccaagatccaggacaagtagggcatccctccggaccagcaacgggtcattttgccgggaaacaagttgaggacgggcgcacgctggccgactacaacattcagaaggagagcacctccacttggtgctgcgtctcaggggtggcatgcagatcttc

SEQ ID NO: 46289 - DNA, 294 bp, Zea mays
ccgcgctgcaatccaacctggcgccgccgaacccttctctcgcccggtgctcccgaagccgaacccttctctcgcccggcctgccgtagtcctccactccgccggatcctctctcagctcgagcggtcttggagatccgtccgtcccgggatcatttggcgcggaggtttggcctgggaaatcggcaaacatacgtgcacttctggtcggcttatcgcgggcaaggggatccttagcagaggctggacgatgtgcttccacgaggccatcaattctagcactcctggggcacat

SEQ ID NO: 46290 - DNA, 147 bp, Zea mays
ctagcaagtactatgtgactatcattgatgccccatgttacagagactttatcaataacatgattacagggacatctcatgctgactgtgctgtcctgattgttgctgctggtgttggtgaatttgaagctggtatctccaagaatg

SEQ ID NO: 46291 - DNA, 189 bp, Zea mays
ccaccttcctcgccgcctcactccctctgcagaggtcgcagatccgtccggttagacgaagccgcccgcacccatggcctccggtgagctcgcctgcacctacgccgccctcatcctcagcgacgacggcatcgccatcaccgccgagaagatcgccaccatcgtgaaggcggccaacatcaaggtcga

SEQ ID NO: 46292 - DNA, 285 bp, Zea mays
gctgtagcaacaatggggatgcttagcactgcagggtatgttctcaccatggacatgtttggtcctatagctgacaacgctggtggtattgttgagatgagccagcagcctgaaagtgtgagggaaatcacagatgttctagatgctgtgggcaacacaactagagtctattacgaaagttttcccaatgggtcaacacatttgggtttcctcctcctgtttagtgcatataaggaagaagtagcttcttttgctcaattgccattcaaggaggttgatctagca

SEQ ID NO: 46293 - DNA, 266 bp, Zea mays
gcatcagcaagcaagttcctcaattacttcgttaagcaaattgttccagcattcgagaagattcctgaagaaaagaaactggatttgctcaagactattgcttcaagttcaccgtacgcgacagcccaagattcacgtcagctgcttccatcggtggtccagttactcaacaaatatatgcccggaaaaaaggtggcctatctcccccatttttgtgtaaacttgctgtacacttatcatcatttggctcataagactccaaacac

SEQ ID NO: 46294 - DNA, 119 bp, Zea mays
caacgattccgtcaccaagagcaagtttgacaacctgtatggttgccgccactcactccctgatggtctgatgagggccaccgacgttatgatcgccggtaaggttgccgtggtctgcg

SEQ ID NO: 46295 - DNA, 288 bp, Zea mays
cgttggtattacttgaggctacttcagacacgcaaggtacttcaatcgccaccggcaacagtggaaatggaattgagaaccgtgtcttggataaacaaattattgactggaagcttaccttacatcaaataggccttgatgttctgcgcactgaccgcaccatggtattttatgagaacaaagataacatttcaaagttgtgggatattcttgctgtctatgcatggatcgacaaagaagttggttattgtcaaggaatgagtgatttatgttcacccatgatagtgc

SEQ ID NO: 46296 - DNA, 309 bp, Zea mays
cgactccaatcgcaattcgcaattcccagccccattccccgtcgcgcggtcggaagcaccaccagctaccagggatgtctggcgaggaggaggagaacgccgcggagctcaagatcggcgaagagttcctcaaggccaagtgcctgatgaactgcgaggtggcgatcatcctggagcacaagtacgagcagatccagcagcacgcgtcgtcggagtcggacccgtcgtcgcaggtgtcgcaggtgttcgagaagtcgctgcagtacgtgaagcgcttcagccgctacaagaaccccgacgccgtgcgcc

SEQ ID NO: 46297 - DNA, 320 bp, Zea mays
gtggagttgattgatcgattgcagccatgagtaagttgcattccgagcttctcaaggattgcatctcccagatagttcaggatgccaagaagaataggaagttcactgagactgttgagcttcagattagtctgaagaattatgatccacaaaaggacaagcgtttcagtggctctgttaagttgcctcacatccctcgtccaaagatgaaggtgtgcatgcttggtgatgcccagcacgttgaggaggctgagaagatgggacttgactacatggatgttgaggccctcaagaaaatgagcaagaacaagaagcttgtt

SEQ ID NO: 46298 - DNA, 321 bp, Zea mays
cggcgtcgtctgctccgggctgctgttctgcgcctccacaaggctttggcctctgttgtaagccatgggtaaggagaagtcccacatcaacattgtggttattggccatgtcgactctggcaagtcaaccaccaccggccacctgatctacaagcttggaggcattgacaagcgtgtgattgagcggttcgagaaggaagccgctgaaatgaacaaacggtccttcaagtacgcttgggtgcttgacaagctcaaggctgagcgtgagagaggtatcaccattgatatcgctctgtggaagtttgagaccaccaagtacta

SEQ ID NO: 46299 - DNA, 309 bp, Zea mays
catcttcccacttcagcccccaaacccgaacactcgcaatcgcaagtcgcaaatatctgtcgccgtctcgccagcagcaccaatcgcctcctaggactcgaccgccatggcgagccaaggcgagccgtcttcctccgatccgaagggaagaacgattactcgacgccgatcctggagaggaagaagtcgccgaaccggctggtggtcgacgaagccaccaatgatgacaactccgtcgtcgctctgcacccggacaccatggagaagctccagctcttccgcggtgacacggtcacgctcaaaggtaag

SEQ ID NO: 46300 - DNA, 303 bp, Zea mays
gtctgggacaccatggctccgatgaagctgtacggggcggtgatgtcgtggaacgtgacgaggtgcgcaacggcgctggaggaggctggctccgactacgagatcgtgcccatcaacttcgccaccgccgagcacaagagccccgagcacctcgtccgcaacccgtttggtcaggttccagctctgcaggatggtgacttgtacctcttcgaatcacgcgcaatctgcaagtacgctgctcgcaaaaacaagccagagctgttgagggaaggaaacctcgaggaggcagcatggtggatgttt

SEQ ID NO: 46301 - DNA, 295 bp, Zea mays
tctcatttgaaatcaacccatcctcgtttcctccgtctagcagcctctcaccctcatggccaagatcaagatcgggatcaatgggtttggcaggatcggaaggctggtggccagggtggccctgcagagcgacgacgtcgagccgtcgccgtgaacgaccccttcatcagcaccgattacatgacctacatgttcaagtatgacactgtgcacggacagtggaagcaccatgaggtcaaggtgaaggactccaagacccttctctttggtgagaaggaggttgcagtgtttggct

SEQ ID NO: 46302 - DNA, 312 bp, Zea mays
ctcgagccgattcggctcgagcgacgcgccgtcactgaatcctcagttcacggctagccgtgatcacgccactctgctgaagcccggcgagcagtgtaacattttccttcagccatgggcaaggagaagactcacatcaacattgtggtcattggacatgtcgactctggcaagtcgaccaccactggccacctgatctacaagctcggcggtattgacaagcgtgtgattgagaggttcgagaaagaggccgcggagatgaacaagcggtcattcaagtatgcctgggtgcttgacaagctcaaggccgag

SEQ ID NO: 46303 - DNA, 284 bp, Zea mays
gaggttttgggcccgtctactatggccgtttggaagatgacactgaggttgctgtcaagatgcgttctgaatcatcgtcacatgggcttgatgaatttttagctgagagcttgacaaaggtgcatcacaggaatctagtgtctttgattggttactgctgggaggaagatcatttggcgctggtttatgagtacatgcctcagggcagtctttttgatcatctgagaggtttgtgctatggaaagtctattgagtattgatttaggcataaccagttacgttgc

SEQ ID NO: 46304 - DNA, 314 bp, Zea mays
gcctgctccattctcagctgccgccaatcccttcccgtgctccgcaaccgctgagtgagaagaagagatggccggctagggcgatggcccggctatcggcatcgatctcggcacgacgtactcttgcgtcggcgtgtggcagcacgaccgcgtcgagatcattgccaacgaccagggtaaccgcaccacgccctcgtacgtcgccttcaccgactccgagcgcctcatcggagatgcggccaagaaccaggtcgccatgaaccccatcaacaccgtctttgatgccaagcgtctcatcggcaggaggttcagtg

SEQ ID NO: 46305 - DNA, 313 bp, Zea mays
ctcccaccccgcagcatccccacgccaccacacctcgtcgcgtcgcgtcgtcaccggcgtgaagatggtcgggccaggcctctacaccgagatcggcaagaagaccagggatctgctgtacaaggactaccagactgaccacaagttcaccctcactacctacacctccaatggcgtcgctgtaactgcttctagcacaaagaaagctgacctgatccttggcgagatccaatcacagataaagaacaagaacatgaccatagatgtgaaagcaaactcggagtcaaatatcattacgacaattactgttgat

SEQ ID NO: 46306 - DNA, 303 bp, Zea mays
gcagcagccaaaacctacctagccgccgccgcaggaccccccatcgccgcaaagatgcagatctttgtgaagactctgacggggaagaccatcactttggaggtggagtcctcggacaccattgacaatgtgaaggccaagatccaggacaaggagggcatccccccggaccagcagcggctcatcttcgccggcaagcagctcgaggacggtcgcaccctcgccgactacaacattcagaaggagtccaccctccactggtgctccgactcgcggtggcgccaagagctgtagaagagacgt

SEQ ID NO: 46307 - DNA, 308 bp, Zea mays
gcatcacgaggcttttgctgacgttgatcccgcacttccgggaggtggttctgatggccttcgagtgcccacattgtggtgagaggaacaacgagattcagtttgctggacaactccaacccaagggatgctgctacagcttggaggttccgttggggcagagtgagatgctgaatcgtcaggtcgtgaagtctgattcagcgattatcaagattccagagctcgactttgagatccctccagaagctcaacgtggaacactttctactgtatgcttcatttctttctgtatttgttttgttgggaaa

SEQ ID NO: 46308 - DNA, 304 bp, Zea mays
gcaagtactatgatcttgtcactggcttttacgaatatggatggggcgactcattccatcttgctggcgggtcagctacatatacataccttgctctagttattactatctatcgacgaaacagcatccgttgtatctcagttgagatgtcgagttgctctagatcaaagttttggtaattttacagcttcagtcccatactcccatgcttgtatttcagatatccgggtgagacttcccgtgaagccattaagcggcaccagcattttttggcactacaattggggctcagataggtatgaag

SEQ ID NO: 46309 - DNA, 270 bp, Zea mays
tcggaaagggaaaacgccaccacacgcggatcgaattaggctctccgagtctccggttccctcctctcggcggcggctcaggtccctctccatctccggcgtggcgcttggcgtctgacctcaacaagcaagaaagcaaatggcaggcggcagggttgcgcatgccaccctcaagggcccgagtgtggtgaaggagatcttcattggactgaccctgggtctgatcgcgggaggcatgtggaagatgcaccactggaacgagcagaggaa

SEQ ID NO: 46310 - DNA, 307 bp, Zea mays
cagcgccggcagtcgccgtcatcgatcgatcgccggaaaactaacccctaacgatgtctggagccggcgaggaggacaagaagcccgcggagggcggcgcccacatcaaccttaaggtcaagggacaggatggcaatgaggtgttctttcgcataaagaggtccacccagctgaagaagctgatgaacgcttattctgcaccgcgcagtgtgcggacatgagagctctcgcgttcctgtttgatggccgcagcttcgcggcgagcagacccctgatgagctggagatggaggacggcgacgagatcg

SEQ ID NO: 46311 - DNA, 307 bp, Zea mays
  unsure (1)..(307): unsure at all n locations
acgaattacnctcggtgccctccctctcggcggcggcggcgcaagtccccttcatctccggcgcggcaaatggcaggcggcagggttgcacatgctaccctcaagggccccagcgtggtgaaggagatcttcattggactgaccctgggtctgatcgctggaggtatgtggaagatgcaccactggaacgagcagaggaaaactagatccttctacgacatgcttgacaagggccagatcgtcgtcgtcgtcgaggagtagttcccacgtgtcacctcagaagtttttttttccagttgtttttgaa

SEQ ID NO: 46312 - DNA, 268 bp, Zea mays
tgttattcttataaagttcaaggaacaatcccttctgagcttggcaatttgaagaatctaataagcttcgacttgtacaagaacaacatttcggggacaatacctcctgcccttggaaagttgaagtcccttgtattcttgcgtctcaatggcaatcatttgactgggcccatcccaagggaactcgctggaatatctagtctcaaagttgttgatgtttcaagtaatgatttgtgcgggacgattcccacgtctgcaccatttgagc

SEQ ID NO: 46313 - DNA, 355 bp, Zea mays
  unsure (1)..(355): unsure at all n locations
gcagggtgcagcgtacgtagtcgcatccgctcgagcggagaacgcgcaagcgtcnaggttcgagacgccagcacgctctcgcagtacagcagcattatcagggagcgtgccgtgggagtgggaggttgcctcaggtgcggactagtcgccggcgagcgacatcggtgtctgagatgaaggagagaggcggctctagggcggcaatcgacgagcgctacgcgcagtggaagtcgctcatcaccgttctctacgactggtatgcaaacacaacctcgtttggacatgcatctcctgccagtaggggacacagttgagaagctactacaagatcgtcacgcattactatctgacagac

SEQ ID NO: 46314 - DNA, 440 bp, Zea mays
  unsure (1)..(440): unsure at all n locations
gtgcagcgtagntagctcgntagtcagctcgagtggtctcacacatgttggcaggagagagagagaggcagagggagagattggatggaggcccatgcacaaggcaagagaaccgcggcgcgcggagagggaggaagggcagacgcagacgcagacgggcgaacaagatgagggagatcatcagcatccacatcggcccaggacgtgatcccangtcggcaacgcatgctgngagctctactgcatcgagcacggcatcgagcacgatggcaccatgcacagtgattcctcggttggcgtcgcacatgatgccttcaacacgttcttcagcgagactggttccggcaagcatgtgcatcaggccatcttcgtcgaccttgagcacactgtcatcgacgaggttcgcactggctcgtacagccagctcttccactcagagc

SEQ ID NO: 46315 - DNA, 313 bp, Zea mays
  unsure (1)..(313): unsure at all n locations
ccacgctgaggatnacaatcctgaaaccaagccatgggtctgcaggaggaatttgaggagcatgctgagaaggcanagagcttgcctgagaacacgagcactgagaacaagctgatcctatacgggctctacaagcaagccacggttggagatgtgaataccgatcgtcagagcatattctaccaaaggacagggcaagtgtgatgcctggatgctgttgaaggcgatcgtaggatgaggcgatgaatgactacatcacctaggtgaagcagctccaggaggaggctgccgcctcttangagtctcttaatag

SEQ ID NO: 46316 - DNA, 223 bp, Zea mays
gctgtgcaaggtcatcacggaggttctgggtgacacagttgagaaggtggtggtgtctgatcgcgttgtggactcaccgtgctgccttgtgactggcgagtatggctggaccgccaacatggagaggatcatgaaggcacaagccctgagggactcgagcatggcgggctacatgtcgagcaaaaagacaatggagatcaacccagagcacgctatcatggat

SEQ ID NO: 46317 - DNA, 363 bp, Zea mays
  unsure (1)..(363): unsure at all n locations
ctctcacgtagtagtcggatcggctcatgacggcgcttcgtatcgctatctcgcgactagagctttcccaattcgccccttctcacatttatcaccaccgccgccgctgcccacgttcaacaacaccatgagggagtgcatctcgatccacatcggccaggctggtatccaggtacggaacgcgtgctgggagctgtactgcctcgagcatggcattcaggctgatggccagatgcccggtgacaagaccattggggggagtgatgatgctttcaacaccttcttcagtgagactggcgctgggaagcacgtccaccgtgcatgttttgttgacattgagccnactgtcatcgatgaggtgag

SEQ ID NO: 46318 - DNA, 330 bp, Zea mays
ggaactgctgcgattttaacagtagagcttgatgctgctcttggcgggcgtgctgttcagtaccgagaagtacaaggacatgaaacagaaaaattcctgtctgatcttagaccatgcatcatgccacagccaggaggagtggcatctggattcaaccatgttgagtgtcatgagcaggattacaagacccacttatatgtctgccatgggaagcatgttgttcatgttaacgaggttccctttgctcgatcatcccttaatcatgatgacatatttattttggatacgaagtccaattttccattcagtggctcaaatcatccatcagag

SEQ ID NO: 46319 - DNA, 320 bp, Zea mays
gtatatatcaacagaaggcacttgatatcaatgaaagggagctgggtcttgatcatccggaaactatgaagagttatggggatttatctgccttgtactaccgccttcaacacattgaaatggctctaaagtatgtcaaccgtgcgctatatctgcttcagttttcatgtgggctttcacaccctaattcagctgccacctacataaacgtagctatgatggaagaaggcatgggaaatgttcatgttgctcttcgatacttgcatgaagccctgaagtgcaataagaggttgctaggagctgatcacatccagactgct

SEQ ID NO: 46320 - DNA, 326 bp, Zea mays
ctgttgctcctctctctctctctccctctccatttgggtcccccttctctttctcatggcggcggcggcggcgtcgacgccgcagggagtggcggacggcggggcatcccggcagcggccttcgttgaggacgttgaggcctacctccgccaggtcgggctcgacgtcaattccgcgctcgcttttctccaggaaaggctgcagcagtacaaaatagtggagatgaagcttctagcacaacaaagggatcttcaggcaaagattcctgatatagagaagtgcttggatattgttacaacattacaagctaaaaaggatttgggtga

SEQ ID NO: 46321 - DNA, 307 bp, Zea mays
gagcaccagagcttttattgaactcctctgaatatactgctgccattgatgtgtggtctgtgggctgtatatttatggaactgatggaccgaaaacccttgtttcctggaagagaccatgtccatcagctacgtctactaatggagctcattggaacaccgaatgaggctgatcttgattttgtaaatgaaaatgcaagaagatatatccgccaacgtccctgtcatgctagacagtccttccctgaaaaatttccacatgtacaacctttagacattgacctagtggaaaagatgctaacttttga

SEQ ID NO: 46322 - DNA, 298 bp, Zea mays
ggcaccacggccaccacggccagaacccgccggcgcacggcggcgtgcaccagcccaccttcaagatcttctgcaaggtcgacgaggggtactgcctcaccgtccgcgacggcaacgtggtgctggttcccgccaacccgcgcgacgagcaccagcactggtacaaggacatgcgcttcagcacccaggtcaaggacgaggagggcacccctgcgttcgccctcgtcaacaaggccactgggctcgccatcaagcactccctcggccagtcccacccggtgaagctggtgccgttcaa

SEQ ID NO: 46323 - DNA, 328 bp, Zea mays
tctcggccacaccctcaccgcccgcgtcatctccgcccgcaccgtcctcgacaagccctccacgcacatcggccgcacccgcgtcgcagagtgcctcgtcggagacagcaccggcaccgtcctcgtcaccgcccgcaacgaacaggttgaccttctgaagccagatacaacagtgatcttccgcaacgctaagattgacatgttcaagggtaccatgaggctggtggtggacaagtgggggcggattgaggtgactcagcctgctgatttcaaggtgaaccaagacaacaacatgtcgctggtggagtacgagctggtggatgtggac

SEQ ID NO: 46324 - DNA, 311 bp, Zea mays
acgggggcttgatcgaagatggatgccggagcaaaggtggtgaagaaggccgcggcggggcgtcgcggcgggggcggccccaagaagaagccggtctctcgctccgtgaaggccggcctccagttccccgtaggccgtatcggccgctacctcaagcagggtcgctactcccactgtgtcggcaccggcgcccccgtctacctcgctgccgtcctcgagtacctcgccgccgagctcctcgagttggcggggaacgcagcggatgacaacaagaagaaccggatcatcccgcgacacgtactgctggcgat

SEQ ID NO: 46325 - DNA, 308 bp, Zea mays
cgccggcgtgctcgtgatctcaacccaaggcgtgcatccgctccggtcacccgtcgctccacgcaaccatgtcgaggaggaagaccagggagcccaaggaggagaacgtcacccttggacccactgtccgtgaaggagagtatgtctttggtgtcgctcacatctttgcatccttcaatgacaccttcattcatatcactgatttgtctgggagggaaactctggttcggatcaccggtggcatgaaggtgaaggctgaccgtgacgagtcgtcaccttacgctgctatgcttgctgctcaagacgtc

SEQ ID NO: 46326 - DNA, 286 bp, Zea mays
ggatcactggtattattaagaggccaaagatttctggagcacagcttgtagccatcctacctctggctattgttcatactatgggcaatctcttcaccaacatgagccttgggaaagttgcagtgtcatttacgcacaccatcaaggctatggagcctttcttttctgttattctttctgcaattttccttggcgagttacctactatttgggtagtatcatctcttcttccaattgttggtggtgttgcattggcatctcttactgaggcatccttaactgggct

SEQ ID NO: 46327 - DNA, 228 bp, Zea mays
  unsure (1)..(228): unsure at all n locations
ccgactatttcgggtaaaccaaaaagcgagtccaaggacaaagagaagaagcatacacagcataaagacacngagagggacaacgacaaggaccatacgaagcacgaacatcggcataaagatcggagtaaggacaaagataaagacaaagacaaggataagaaaaaagatcagagtggtcatcatgactctgattcaacgaaacatcatgaaaagcagaggaagcac

SEQ ID NO: 46328 - DNA, 286 bp, Zea mays
gattctctgcaaggtggtcaatgtagaacttagagctgaaactgattctgatgaagtttatgctcaaattatgctgcaaccagaagcagatcaaagtgagcccaccagcccagattctgagccaccggagcctgaaagatgcaacgtctattccttctgcaagaccttgactgcttcagatacaagtacccatggtggattctctgtcctcaggaggcatgctgaagaatgtttgccccaactggacatgactcagaatccaccatggcaagaactgctggctaaa

SEQ ID NO: 46329 - DNA, 285 bp, Zea mays
cagccaacgaagctaggtgttggagatgtcatcacaggtggagatctatacgctactgtttttgagaacacattgatgcagcaccatgttgctcttccaccgggttctatggggaaaataagttacattgcaccagctggccagtacaacctgcaggacacagtgctagaattggaatttcagggcataaaaaagaaatttaccatgcttcagacatggcctgtgcgttcaccaaggcctgttgcatcgaagcttgctgcggatacacctcttctgacagggcag

SEQ ID NO: 46330 - DNA, 258 bp, Zea mays
ctctttcgccggcgcgtaggaagagatggcagagcgtttgacccgtatcgccatcgtcagcgaggacaagtgcaagcccaagaagtgccgccaggagtgcaagaagagctgccccgtcgtcaagactgaaatgtccatttgatgccattgaaatcatcaaccttccaaaagacttggaaaaggataccactcaccgatatgggcctaataccttcaagttgcacagattgcctgtacccaggcctggtcaggtttggg

SEQ ID NO: 46331 - DNA, 271 bp, Zea mays
gcgcccaggacatcccccctgaagttattctagcgatttctggctacacaaacatggcgggtgtcaaggaatgtgttgggcacgagagggttaagcactacgctgacaaaggcataacaatttggagcggtaacgacgacgagtgccacgattctaagtggaaacatggcgctactggggtcatttccgttaccagcaacttgttcccgggctcatgcacagcctcatgtacaaaggcgagaacgccacgctgaacgagaagctgtcgccc

SEQ ID NO: 46332 - DNA, 280 bp, Zea mays
ctcatatgttaatgcaccattgcagaaggagctgttggctgatgaggtggggaacacagctgcattcctggtttcttcattggcttctgccatcaccggctcgactgtttatgttgacaatgggctcaatacaatggggcttgcaattgacagccctaccataacgtcatagatgtggtgttgtaaataagacgacctttcctgctgcattgcggtatcatccttgaataaagatcatagttagttataaatatgagaggtaagggcaggaaagggggaa

SEQ ID NO: 46333 - DNA, 286 bp, Zea mays
gctctccagcatctcccgtctccgtcgtctcgtctctgctcctcacctcgccgccagccatgggcaagatcaagatcggaatcaacggtttcggaaggatcggcaggctcgtggccagggtcgccctgcagagcgaggatgtcgagctcgtcgccgtcaacgaccccttcatcaccacggattacatgacctacatgttcaagtacgacaccgtgcacggccaatggaagcacagcgacatcaccctcaaggactccaagacgcttctcttcggcgagaagcggtc

SEQ ID NO: 46334 - DNA, 280 bp, Zea mays
gttacttctccctccgccgccactcccctcccattcaccgccaccgccaattccataccgtcctccgccacctctgctgagagcgagaagtgatggcaggcaagggtgatgggccggcaatcggcatcgatctcggcacgacgtactcttgcgtcggcgtctggcagcacgaccgtgtcgagatcatcgccaacgaccagggtaaccgcaccacaccctcgtacgtcgccttcaccgactccgagcgcctcatcggagatgcggccaagaaccaggtcgc

SEQ ID NO: 46335 - DNA, 279 bp, Zea mays
gcatccactggtggtgcccgggtttctaggtgacagtcttagttgaggaacacacttgtacttccagtgctagaaggaagaccacgagtcctactagctcttgggtagcatcaaaggctggttttttctctgcacaggttgaggacatcacaaacactcacaatagacatgtagtgaagtcatatttgcatgagtgtacatgcctcgagtggcagcacaccggcaaaccttgcccacatgcattggccttgattataacacaggagagtgtggatgtgg

SEQ ID NO: 46336 - DNA, 273 bp, Zea mays
gagtactctctcaacttatggacagattgtctaactatgctgcctcaagtgctgaactgttgccagagttcttgcaagttgaagcttttgctaagttcagtaatgctattggaaaggtgatagaagcccaacctgacatgccagttgttggagccataactctatatgtatcacttctgacctttactctccgtgtacatcctgatcggcttgattatgttgaccaagtgctgggtgcatgtgtcaagaaacttcaggcaaggcaaaactgaa

SEQ ID NO: 46337 - DNA, 136 bp, Zea mays
gtgagaaactttcagtgagcgccttctgcaggcggagacttgcaacagttatggtgaagctcaagtttgcagagcaccttaaggaggctgtgacgtacatcgaacaggggcacgtgcgtgtcggtccagatgcagt

SEQ ID NO: 46338 - DNA, 266 bp, Zea mays
gtttgtgaagcgacacagtctccagatgtgaagataaggcaggctgcttttgagtgtttggtggctatctcgtctacttattatgataagctggcaacatacatgcgggatatatttaatataactgcaaaagctgtgaggggagatgaggagtcagttgcgctccaggctattgaattctggagttccatatgtgatgaggaaatcgacattctggatgagtacagcagtgaatttacagctgattctgatgttccttgctacta

SEQ ID NO: 46339 - DNA, 277 bp, Zea mays
gtgattactatgagtactttggccctgattatactcttcatatccaaccaaaaagtgttgaaaacctgaataccacaaaggacttggagaacataaagaacatgatattggagaacctgtcaaagatagaacatgttcccagcactcaattccatgacagaccgtcagaccctgaagctccagaggagaaagaggaggacatggacaagaggccacctcagcgcagcagattatggagcggaggagcttacgactctgatacagaggatcctgacag

SEQ ID NO: 46340 - DNA, 273 bp, Zea mays
gtttatggaggcaggagacctcgacaaggctttaatgtattataaggaagctgttaagcttaagccatctttcgctgatgcatatcttaatcaagggaatgtttataaggctttgggaatgcctcaagatgccattatgtgttatcaacgtgcactgcaggcacgtcctgactatgctatggcttatggtaatcttgctactatttactatgagcaaggccagcttgatatggcaattcgttgttacaatcaagctatagtctacgacccaca

SEQ ID NO: 46341 - DNA, 273 bp, Zea mays
ggagcaggatgtcgatatcgagaaccagtattacaactctaaaggtttggttgagacagacccagagggtgcacttgctggttttgatcaagtagtcagtatggagcctgaaaaagctgaatggggatttaaagctcttaaacaaactgtcaagctttactataagctgggaaaatacaaagaaatgatggatgcctatagagagatgttaacatacataaaatctgctgtcacccggaactacagtgagaaatgtataaacaacataatgga

SEQ ID NO: 46342 - DNA, 273 bp, Zea mays
cccactgcctcgtgtggccgtcgtctcccgttcggaacgccaagcccccctccggcgaaatggcccccaagcgaggtggcagggcgccggtgccggccaagaagaagacggataaagtgacgaaccctctgtttgagaagaggccgaagcagttcggcatcggcggcgcgttgccgcccaagaaggacctgcaccggttcgtcaagtggcccaaggtcgtgcgtatccagcgccagcgccgcatcctcaagcagcgcctcaaggtaccaccgg

SEQ ID NO: 46343 - DNA, 266 bp, Zea mays
ctgctccattctcagccgccgccaatcccttcccgtgctccgcaaccgctgagtgagaagaagagatggccggcaagggcgatggcccggctatcggcatcgatctcggcacgacgtactcttgcgtcggcgtgtggcagcacgaccgcgtcgagatcattgccaacgaccagggtaaccgcaccacgccctcgtacgtcgccttcaccgactccgagcgcctcatcggagatgcggccaagaaccagtcgccatgaacccctcaa

SEQ ID NO: 46344 - DNA, 272 bp, Zea mays
cctcgcgcgcgggagccctcccgcgtgcccacgcggaggatcccgtcgcggctggtgcactaccacctcctctccattcgccactcccacgtgctctctcgcgcgtcccctcgaccatagatagggtttgctcccttccttcctcgccgcccgatttgatctcgtcccttccgggctccggctaggctgctccgtctctcctcctccgccatgttctcgcacggcgctgattccgcccacgacgccgggaccgttggcgtcacagcggcgtc

SEQ ID NO: 46345 - DNA, 273 bp, Zea mays
gtcgggcgtgcctcaagtgctgcggcgtctgccctgcgtgccggcgggcagtgccggcaaccagcagacctgcggcaagttctacaccgactggaccacgcacggcaacaaaatcaagtgcccgtgactccttgtgcttgatgagagcagcatgagtccatgggcggcgggcgcgccactgcccacactggcgcgcacgttttgtatgatccgaccccgtcggcgtagatgtgcgagcctgtagctatctagcttagatgtacgaggttgatg

SEQ ID NO: 46346 - DNA, 191 bp, Zea mays
aaaccattgtggactggtacaatgatgctgtcgcagctgggaaggactcccaggttgtcaagaatgccaagccgttcgtcgagtggctccagagtgccgagtctgatgaagagggtgacgacgagtgaagaggccacgctgctctactgctaatggccgaacttgataatataattcacataagttggttt

SEQ ID NO: 46347 - DNA, 221 bp, Zea mays
ctgaggttaaggccccaaagattgaagaagcttctcaatctggagatcgcatatttgccagccctcttgctcgtaaactggctgaagataacaatgtcccactatcaagtgtgaaaggtactggtcctgatgggcgtattttgaaggcagacattgaagattacttggccaagggtgggctgagggaggcttttgcagctccagggttaggttacgttgat

SEQ ID NO: 46348 - DNA, 286 bp, Zea mays
gacttgcaactctatgtaaggttgcaatcggatctaggcagctatggttctgaaagtgatcaagagattgccaaatccatgctttctgactgcaggacaaaagtagggattaacgatcatcgagtgcttgatgttattgcctctgcactttctaatttcattgagatgggcaaggatgtaatagtgaaggagctgactgagttgttcacgcctgaagagatgcctctgtttgggtcgaattcagcacttgactgggccaacttcaatgcacaagcattttctgatg

SEQ ID NO: 46349 - DNA, 284 bp, Zea mays
gtgcagatggatcaaaggctactggtgccttcatcttgacagcgagccataacccaggtggtcctaaggaggacttcgggatcaaatacaacatgggaaatggtgggcctgctcctgaatctgttaccgacaagattttctctaatacaacgacaatctctgaatacctcatctctgaagacctaccagatgttgatatttctgttgtcggtgtcaccagcttcagtggacccgaaggcccctttgatgtggatgtttttgactctagtgtagattacataaag

SEQ ID NO: 46350 - DNA, 280 bp, Zea mays
ctcttgtcaagtacataaagggagttggaaacatgagccatgagcaatggcggtcgttccataacgacaagaagacagcggaggcacggaacttccttgatggtgacctgatcgagtcgttccttgaccttagccggagcaagatggaggtggtgtccaaggctatgggcgtttcggtggaggatctgtccaagattgtggaagagctgacgaggcttcactagtacatggatacgcagaagctttgcttgtaacttgatgcatgtacatcctctttttg

SEQ ID NO: 46351 - DNA, 287 bp, Zea mays
gactagttctagatcgcgagcggccgctcgcgatctaagcgaaactatagggtacccccaaatgaagcaagggatgacagtgctaacagcagcgagggtcacaacgtgtcagcctcgatgatggatgcaatgaaaaagataaacaaggataaggtgaaagcggccctggagaagcggagatcaaaaggtgacctttcgagaaaggttgatgtgatggatgatgatgacctcattgagagggagctggaacatggcgtggagttggcggttgaggatgagaaggtcaa

SEQ ID NO: 46352 - DNA, 286 bp, Zea mays
tgatgatattcagggaacagcttctgtggttcttgctgggcttattgcagcacaaacattacttggtggttcattggcagatcacacttaccttttccttggtgctggagaggctgggacaggtatagctgaacttatagctcttgagatctcacgtcagacgaaagctcctatagaggagtgccgcaagaaaatctggcttgttgattcaaagggcttgattgtcagtacacgaaaggagtcccttcaacacttcaagaaaccatgggctcatgagcataaacca

SEQ ID NO: 46353 - DNA, 229 bp, Zea mays
gataaaacagggacgcttacagaaggaaaaccagtagtgacttctattgcttctctggcatatgaggagacagaggtccttcgtcttgctgctgcagtggagaaaacagcattgcacccaattgcaaatgctataatgaacaaggctgaactactcaagttggatattccgatcacaagtggtcagcttacatcgcctggatttggttgtttggctgaagtagatggga

SEQ ID NO: 46354 - DNA, 285 bp, Zea mays
gccacccctacaggtaaggaagaggaggagggcaggatgtcgcaccgtaagttcgagcacccgaggcacggctccctcggcttccttcccaggaagcgctcctcccgtcaccgcggcaaggtgaagtcattccctagggatgaccccaagaagccttgccatctcactgccttccttggctacaaggactggcatgactcacattgtccgtgaggttgagaagccaggatccaaactccataagaaggaaacttgtgaggctgttaccatcattgaaacccctct

SEQ ID NO: 46355 - DNA, 282 bp, Zea mays
caaaaaagctgaaggaactagagaaagaagcttacagattggcaggcaagaatttctctctaaatgctactgctgatatcgcagacattctatatacacacctaaaattgccagttccaaaaggctgtgagaaagggaagctgcatcctagcactgacaagcagtctttggaccacctaagggatcaacaccccattatcccattaattaaggaacacagaacattagcaaaactgttaaatggcacgttgtggtccatttgttcacgtgctcaattgtgca

SEQ ID NO: 46356 - DNA, 198 bp, Zea mays
tgttggatggtataacagtggatgtctccctgcatgacccgattgcgttcagaaaggagttggatggtataacagtggatgtctcccttcaatggtcctctgattcctactctgatacagtgctaggatacgcaaacagtatccgcactattgatggtggtactcatattgatggtctaaaggcttcattgacgagaa

SEQ ID NO: 46357 - DNA, 219 bp, Zea mays
ggtgaagccgccgccgctgcagtgtccatagccaccgcaggagactgagatggggggttttgtcaaggcccacaagaccaatgcgtacttcaagcgtttccaggtgaagttcaagagaaggcgcgctggcaagacagactacagggccaggataaggctgattaaccaagacaaaaacaagtacaatacacccaaatacagatttgttgtgcgatttac

SEQ ID NO: 46358 - DNA, 271 bp, Zea mays
  unsure (1)..(271): unsure at all n locations
gcaggcgcacggcgcaccgcacacctcactgccgctcccttctcgtctcctctcctctcctctcctcggcggatccggcaccgacccaccgcccctctgctcgctccttccgccggaatcgctgctcctctctgtgctgtcgatttgtgcggcgactgttagtttggttcggtcccatccttctgttgatcaatggctgacggtgaggatatccagccacttgtgtgtgacaatggcactggaatggtcaaggctngctttgctggtgatg

SEQ ID NO: 46359 - DNA, 279 bp, Zea mays
aggactctcatacctgcaccatgactgtaagcccgtgatcgtccatcgagatgtgaagtcgaacaacatcttgctcgacgcggagtatggtgccaagattgcagattttggtgttgcaaggactattggggatggcccggctaccatgtccatgattgcagggtcttgtggatacattgctcctgagtatgcctacactctccatgtcactgaaaagagtgacatatatagctttggtgtggtgatccttgagctcgttaccggaaagaagccgctggc

SEQ ID NO: 46360 - DNA, 269 bp, Zea mays
gagagatatatatggtattgatgaaaagagggttgctagcttggtaagggaggataaagtggacatacttgtggaacttactggtcacacagcaaataataagttagggacaatggcatgccgacctgctcctattcaggttacctggattggctaccccaacacaacaggtttgccaacaatagactaccgaatctcagactcattgactgatccacctatgacaaaacaaaagcatgttgaggagttggtgcgccttcctgaaagct

SEQ ID NO: 46361 - DNA, 260 bp, Zea mays
acggatcgtaagcatgaggctgttgtgaacgaattctattccagagtgttaaacaatggcgacatatatagagctgattatgaaggactttattgtgtgagctgtgaagagtacaaggatgaaaaagagctattggagaacaattgttgccctgtgcatctgaagccttgtgttgaaagaaaagaagataactatttctttgccttgtcaaagtaccaacataaattggaagagctactgacaagaaatcctgattttgt

SEQ ID NO: 46362 - DNA, 201 bp, Zea mays
aacaaggatatcttcctgagggagctcatatctaatgcctctgatgcgttggataagattaggttcctttctcttactgataaggaagttctaggtgaaggggacactgcaaagcttgagattcagattaagttggacaaagagaagaaaatcctctccattcgggataggggtattggtatgaccaaggaagatcttatt

SEQ ID NO: 46363 - DNA, 282 bp, Zea mays
ccgagtcatgactgtttcctttcacaagtatggggattttttccctggtactggacatatcactgacgttggggcagccgaagggaagcattatgctctgaatgttcccctgagtgatggtatcgatgacaccacctttcgtggtctgtttcaatgcatcattaagaaagttatggaggtttatcagccagacgtggttgtcctccaatgcggagctgactctttggctggagacaggttaggttgcttcaacctgtctgtgaagggtcatgctgactgcct

SEQ ID NO: 46364 - DNA, 277 bp, Zea mays
catcccctcttccctttctagccttccacccttcatccacccgccgctcctcgagcacccccgtcccgcgccgcctccggctccggcgagatgtcacgcttcggtcgatccggcccgccgccgccgatccgcgacacgtactcactcctcgtcctcaacatcaccttccgcacaactgctgatgacctcttccctctcttcgacaagtacggcgagattgtcgacatctacatcccaagggacggccggactggtgactcgcgcggttcgcgttcgt

SEQ ID NO: 46365 - DNA, 240 bp, Zea mays
cctcggtctcggataccccgagatctccgtcggcaaggctcctccgatctggcagagcatgcaggagcaggagctgctggcggaggaactcttctccttctggctgaaccggagcccggacgcggacgcagcgtccggcggcgagctcgtcttcggcggcgtcgaccctgcgcacttcagcgggaacaacacttacgtccccgtctcccgcaagattactggcagttcgacatgggggac

SEQ ID NO: 46366 - DNA, 253 bp, Zea mays
aatcctcttcctcgagttctcctcaaccaaattcaaagtcacagcggcgaaactctcggcgatgtctggcagcggcaagggcgggaagggtctgggcaagggcggcgccaagcgccaccgcaaggtgctgcgtgacaacatccagggcatcaccaagccggcgatccgcaggttggcgaggaggggcggcgtcaagcgcatctccgggctcatctacgaggagacccgcggcgtgctcaagatcttcctcgag

SEQ ID NO: 46367 - DNA, 279 bp, Zea mays
aaaaggtcagaaccgaaaccttaaccttattcggcgactatggcggcggcaccggcaggcggcggccctcgggcattgtcccagcgggagcaggacatccagatgatgctcgccgccgatgtccacctcggcaccaagaactgcgacttccaggtggagcgctacgtgtacaagcgccgcactgatggtatctacattattaaccttggaaagacctgggacaagcttcagttggccgccagggtcatcgttgccattgagaatccgcaggacattatc

SEQ ID NO: 46368 - DNA, 277 bp, Zea mays
gtttttaagatgagcaagcagtaccttgcaaatgttgcactcaaaataaatgttaaggttgggggaaggaatactgtacttttagatgctttgtcaaggagaatcccccttgtcagtgacagaccgaccataatatttggtgctgatgttacccatccacatcctggagaagattccagtccttccattgcagccgttgttgcttcgcaagactggcccgaggtcacgaaatacgctggactagtgagtgcgcagcccatcgccaggagctgataca

SEQ ID NO: 46369 - DNA, 264 bp, Zea mays
aatccttcaagcgcaactgcctcctcctcgtcgtccggtcgtgagaagggatggcgggccgtggcaaggctatcggcgctggcgcgcgaagaaggcaacgtcgaggagctccaaggccggactccagttccccgtcggcaggattgctaggttactcaaggcgggcaagtacgctgagcgcgtcggcgccggcgcacccgtgtacctcgccgccgtcctcgagtacctcgcggctgaggttctcgaacttgccgggaagccgcg

SEQ ID NO: 46370 - DNA, 291 bp, Zea mays
aacccagcaaacaccaatgctcttatcttgaaagaatttgctccatctattccagagaagaacgttacttgcctgacccgtctggaccacaacagggctcttggccagatttctgagagacttaatgtccaagttagtgatgtgaagaatgttatcatctggggtaaccactcgtcctctcagtaccctgatgttaaccatgccacagtgaagacttccactggggagaagcctgttcgtgagcttgtctctgatgacgagtggcttaatggtgaattcatcacaactgtc

SEQ ID NO: 46371 - DNA, 257 bp, Zea mays
gaacgactgtgttggctgcaaaagtaaagtgttctgcaacaaatcagaggctgtgagcaagattgcatcgctgcaggagttcattcctcatgatttcgacgccagtgaccatgggacctcaagcttccctgtatgtgcagtgcataggattggcatccttgacattagaatcttcaacactgacaggcatgctggaaatcttctggtcaagaagctggtcctggcgccgaaattttggagagcagccagaactcatc

SEQ ID NO: 46372 - DNA, 255 bp, Zea mays
ccgccaagcgcggatctgaacgctgcgctccgtgtcgccgctcgaatccgccatgaagggggccaaatccaagggcgccgccaaggccgatgccaagctggcggtgaagagcaagggggcggagaagcccgccaagggcaggaaagggaaggccggcaaggaccccaacaagcctaagagggctcccagcgctttcttcgtgttcatggaggaatttcgcaaggagttcaaggagaagaaccctaagaacaagtc

SEQ ID NO: 46373 - DNA, 279 bp, Zea mays
caggttatggtcctggagaaaactttattcaggtcagttcaaggattactagctgtgagcagagtgtgataatggctcctagcgctatcgcaagaggagttggtccaccaggatatacgcctggagaacaccagggcaatggggctccatggaatacaagctatgagcgaagaccgtttacgagtcctacgactagctcaagagaagtcggacctccaggatatgggcctgaagaaaaccaaggcagtggcatttcctgtaatacaagcagagagcaat

SEQ ID NO: 46374 - DNA, 280 bp, Zea mays
tgaaaggggagagagagagagagaagagagagagaagagagagagagagagaggagtgggagacccgcgagaggctgccgtgtagggaccgtagactcagcgactgcgaaggagggataaggggatggccgggatcggaccgatcaggcaggactgggagccggtcgttgtgcggaagaaggcacccaccgccgccgccaagaaggatgagaaggccgtcaacgccgcgcgccgcccggtgcggatatcgataccatgaagatgtacaacgctggtacga

SEQ ID NO: 46375 - DNA, 227 bp, Zea mays
atactcgagcgaattcggctcgagtgtggctaaatctaatctaaatgggaaggtctttccatcaaccattggtaataacgtcacagtaggtcatagtgctgtgttacaaggatgcacggttgaggatgaggcttttgttggcattggggcaaccctattagatggtgttgttgttgaaaagcacggaatggtggctgctggagccctcgtacgacagaatactagga

SEQ ID NO: 46376 - DNA, 280 bp, Zea mays
acctgatgctgtacaagaggcttcgacttctgatatggaagatgcttcaacatctagtggtgggcagagatcatattcctgtcaagctagtcttgacgagaagcaaaatgcttttgtgaaattctcagagaagcacagaagattgctgaatgcattcatccatcaaaaccctggattactggagaagtcattctcgctgatgttaaaaattcctcgcctgattgattttgacaacaaacgtgcatatctcgggtctaaaatcgagcatcagtatgatcat

SEQ ID NO: 46377 - DNA, 271 bp, Zea mays
ttcccgtcctgtccttccacccggcggcttaaaccctagttctcactcccatcgccgcttcagctccgccgctgcagatggagttctggggtctcgaggtcaagcctggttccactgttaagtgtgagcctggatatggctttgtgctgcacctttcccaggctgctcttggggaatcgaagaagagtgataatgccttgatgtatgtcaaaattgatgatcagaaacttgccattggaaccctctctgttgacaagaacccacacattca

SEQ ID NO: 46378 - DNA, 282 bp, Zea mays
gcacgacgcacgcagagccgcagagatccgtcacactgcaagttttgaaaactgaactgtaagatggcatcagcagagctttcccgtgaggaaaatgtgtacatggcgaactcgccgagcaggcagagaggtacgaggaaatggttgagttcatggagaaggtagcgaaaactgttgactcggaggagctcactgtggaggagcgcaacctcctgtctgttgcatacaagaacgtcattggagcccgccgtgcctcatggcgaatcatctccatcgatagag

SEQ ID NO: 46379 - DNA, 284 bp, Zea mays
ctcttcgaggacaccaacctctgcgctccgcgagatccgcaagtaccagaagagcactgagctgctcatccgcaagctccccttccagcgcctggtccgcgagatcgcgcaggacttcaagacggacctgcggttccagtcgtcggcggtggcggcgctgcaggaggccgcggaggcgtacctggtggggctcttcgaggacaccaacctctgcgccatccacgccaagagggtcaccatcatgcccaaggacatccagctcgcccgccgcatcaggggcgaga

SEQ ID NO: 46380 - DNA, 277 bp, Zea mays
gagcgacacgggcggcggtcaccgcgcgtctgccgaggccatcaaggctgccttcacccaggagttcggcgacgactaccaggtatttgtcactgatctgtggactgaccacactccatggccattcaatcaactgcctaggagctatagttttttggtgaaacatggacccttgtggaagatgacatactatggtactgcaccgcgtgtagtccatcagcctcattttgctgcaacatccacattcatagcaagagaagtggcaaaaggtctaatg

SEQ ID NO: 46381 - DNA, 264 bp, Zea mays
gtgaggatccagttgggtgagggctctgctggtcaggtcacaaggaacatgcttgcaaatgagggtgtccgttctttctacaagggtttgtccgccggattgctgaggcaagcgacgtacacgactgctcgtcttggatcctttagggttctaactaacaaagcagttgaaaagaatgaagggaagccattgcctctatttcagaaagcttttattggtctgactgctggtgcaattggtgcttgtgttggtagtcctgctgat

SEQ ID NO: 46382 - DNA, 228 bp, Zea mays
agcctcgtgtggcagtcgtctcccgttcggaacgccaagcccccctccggcgaaatggcccccaagcgaggtggcagggcgccggtgccggccaagaagaagacggataaagtgacgaaccctctgtttgagaagaggccgaagcagttcggcatcggcggcgcgttgccgcccaagaaggacctgcaccggttcgtcaagtggcccaaggtcgtgcgtatccagcgc

SEQ ID NO: 46383 - DNA, 268 bp, Zea mays
ccaatgcctaggacgctgcctttatatacatggtgtacctggcactggcaagactatgagtgtacttgctgttatgaggaggctgagatctgaatttgattctggaactctgaggccatattgttttatcgaaattaatggtcttaaattagcatctccagagaatatctacaaggttgtatatgaacagttgagtgggcatagggttgggtggaaaaaggctcttcactatttaacagaacatttttcaggtggtactaaaattgga

SEQ ID NO: 46384 - DNA, 175 bp, Zea mays
ctcctggttgtggtaagaccttgttggcaaaggcaattgccaacgagtgccaggctaacttcatcagtgtcaagggtcctgagttgcttaccatgtggtttggtgagagtgaagccaacgaccgtgaaatttttgacaaggctcgtcaatctgctccttgtgtcctcttctttga

SEQ ID NO: 46385 - DNA, 231 bp, Zea mays
gccctctccgccatggacgcacagcgagccctccttgacgagctcatgggcacagctcgcaacctaacggaggaggagaagaaggggcacaaagagctgaagtgggacgatccggacgtgtgcggcccttacatggttcggttctgtcctcacgaccttttcgtcaacaccaagagcaatatcgggccgtgctcgaggatccacgatccgaagctcaaggaaagctttgag

SEQ ID NO: 46386 - DNA, 287 bp, Zea mays
atggtacttcccacacctaaagcttgacaaactcatatgtacctatccttggaacaattccgaactgacagagacagaaaaaatggatcgtttgggattagttgatttcttgaagggtctccttgaatttgatccaaataagagatggtcaccattgcaggctctataccatccattcataacaggcaaatcgttcaccggtccatatgaacctgtacctgagaccacaagaattcctgttgttcgtgctgcagcaattgatcacaatcctggagggggccatggct

SEQ ID NO: 46387 - DNA, 299 bp, Zea mays
atctccgctccggctgcgctctgccttgctttcctgcgacctgctctagcgcgacgagagaggtacggcggccgatctggcggcgcaggcggagggctcggccggggccggcaagtcggcgccgaacatggggaggggccgggtcgagctcaagcggatcgagaacaagatcaaccgccaggtcaccttcgccaagcgccgcaacggcctgctcaagatagcgtacgagctctcggtgctctgcgacgctgaggtcgcgctcatacatctctccaaccgcggcaagctctacgagttct

SEQ ID NO: 46388 - DNA, 171 bp, Zea mays
ctcgtccccgacaagccaatcgaagccgagatacggccatggactccaccggcaccggagcagggggtaaggggaagaagggagcggccgggcgcaaggtcggcgggccaaggaagaagtcggtgtcgaggtccgtgaaggccgggctccagttccccgtcggccgcatcg

SEQ ID NO: 46389 - DNA, 301 bp, Zea mays
ggtgttttcactgaccaggagaaggctgcagctcacttgaagggtggtgccaagaaggttgtcatctctgctcctagcaaggatgcccccatgtttgtcgttggtgtcaacgagaaggagtacaagtctgacattaacattgtctccaatgctagctgcacaaccaactgccttgctcctcttgctaaggtcatcaatgacaagttcggtatcgttgagggtctgatgaccactgtccatgccatcactgctacccagaagactgttgatgggccctcgtctaaggactggaggggtggaa

SEQ ID NO: 46390 - DNA, 167 bp, Zea mays
gaaagatgttatgtcgaaaaatgtttcaatctacaaatcccaagcatctgcccttgaagcccatgcagctcccaactgcaaggttctggtggttgccaacccagcaaacaccaatgctcttatcttgaaagaatttgctccatctattccagagaagaacgttactt

SEQ ID NO: 46391 - DNA, 167 bp, Zea mays
ctggagagacaggacctatggtcaatgaagaagatatccagcacatagtatcttcatggactggcatccctgtggagaaggtttccagcgatgaatctgataagcttcttaagatggaagagactttgcacaagcgtgtcattggccaagatgaggctgtggtagca

SEQ ID NO: 46392 - DNA, 299 bp, Zea mays
cgaagagaagctgaggcctagcgccgcacccgccgccgcatcagccatcagccatggcgatggccgctcgcctcgtctcgcgctcccgtcagctacattcggttcaagcagcttttgcgaatggaggtgccactcaagttcgctcctttgccaaggatgcagctccagctgaccgtcctcctgttggtggggatgatctcctgaagggcatattctttgaggtaaagaagaagtttgagacagctctcggcgtccttaaaaaggaaaagatcactattgatccagatgacccagcggca

SEQ ID NO: 46393 - DNA, 139 bp, Zea mays
gccagcgtgctgtcctcaagttcgctcagtacactggcgcccatgccatcgctgggaggcacacccctggtacattcactaatcagctccagacctccttcagcgagcctcgactgctcatccttactgacccaaggac

SEQ ID NO: 46394 - DNA, 301 bp, Zea mays
aatcgcgtgatgttgtctcttggtccgcggtgatatcaagccacgcgcaccatggctgtgcaagggatgctttatgcgttttcaatgaaatgctggatgcgaaggtggcaccgcctaacgagatcacttttctcagcatccttactgcatgtagtcatggaggattggttgatgagggactcaggtattatggaattatgaatgatgaatatggattgagcccaaccataaagcattgcacctgtgttgttgatcttcttggacgagccgggaggttagccgatgctgaggctttcataag

SEQ ID NO: 46395 - DNA, 283 bp, Zea mays
cgcgcgacgagtaccagcactggatcaaggacatgcgccacagcaacagcgtcaaggacgaggaatggtacccggccttcgcgctcgtcaacagggtcaccggcgaggccatcaagcactcccagggcgagggccaccccgtcaagctggtgccctacaaccccggctaccaggacgagtcggtgctgtggacggagagccgcgacgtcggccacggcttccgctgcgtccgcatggtcaacaacatctacctcaacttcgacgccttccacggcgacaagga

SEQ ID NO: 46396 - DNA, 295 bp, Zea mays
aggtgatgagaagtatcttgggatggttaacatgattggtacccacttcgaggaaaaccatgtcgctactggatttggaaatcatatggcaatcccgatactccgtgctgaatggcgcgatgatatgacttttgaagaagctgttaagctggttgagaagtgcttggtggtcttgctgtaccgagacagatcatctatcaacaaattccagattgccaagatcacaagtgaaggatcaaccatctacccaccatattccttgaagacctactggggcttcactcacttcgaaaac

SEQ ID NO: 46397 - DNA, 246 bp, Zea mays
gttaagagccttaaaaatggcatcgtggttaatattcttgggatgggcgctgctgttctcggcatgcaagctactgttggtgctttggtagcaaaagctctcacaacctctgcagtaccctattatcaggctgctggccaaagccctgtcttggctttagatgttttcctagttcaggcttcagcgaacaccatcctgtcgcatttccttggggtggcgagctccctggagctgctgcgctcggtg

SEQ ID NO: 46398 - DNA, 218 bp, Zea mays
ccggcgccgccgccgccaccgccgccgccccgaggccccatcccagcgcaaccgacttccgcatcggattgaagcaatgtcgtcggacgacgaggtcagggaggagaaggagctcgacctctcctccaacgatgtcgtcaccaagtacaagactgccgccgaaatcctgaacaacgctctgaagctggttgtgtctgagtgcaagccaaaagcaaaga

SEQ ID NO: 46399 - DNA, 172 bp, Zea mays
gcgaaaaaggataggaatcctcttgtgtcctggccgtcggccgtcgctgcgtcgttccagatttggggaaggaaatccggcaccgagattcgagtcgaaaaggacatcatttgctagatggcgcgtaccaagcagaccgctcgcaagtccactggaggaaaggctccaagga

SEQ ID NO: 46400 - DNA, 210 bp, Zea mays
cccagcaccagtccccaattatttggcctccgtcagagaggggagaaagacccgttcgaggcggcggcgatgtcggggcgcggcaagggcggcaagggtctgggcaagggtggagccaagcgccaccggaaggtgctccgcgacaacatccagggcatcaccaagccggcgatccggaggctggctcggaggggcggcgtgaagcgcatc

SEQ ID NO: 46401 - DNA, 311 bp, Zea mays
caacgagaagagcggcggcgcgggcggacaaggagcaggcggaggaggagctgtgccaagccacaatgggtatctcacgcgactcgatgcacaagcgccgtgccaccggtggaaagcagaaggcctggaggaagaagcgaaagtatgagcttggtcgccagccggccaacaccaagttgtcaagcaataagacagtgaggagggtccgtgttcgtggaggtaacgtgaagtggagggctcttcgccttgatactggtaactactcatggggaagtgaagctgttacccgcaagacccgtatcctcgacgtg

SEQ ID NO: 46402 - DNA, 213 bp, Zea mays
tccaactctcgtggcgccccagggcgttcctgcacaagggtttcctgtcggatgcggagtgcgaccacctcatcgcgctggccaaggacaagctggagaagtctatggtggccgataacgagtccggtaagagtgtccagagtgaggtgcgcaccagctccggcatgttcctcgagaggaagcaggatgaagtagtaacgagaatagaggaga

SEQ ID NO: 46403 - DNA, 300 bp, Zea mays
gcgagtcggggtaaggaggctcatgagacaactaaataacatgccgtcttcggttatctcaagccacagcatgcatcttggagtcctagcaactgcatctcatgccatctccactggaactctcttttctgttttctacaaacccagaacaagtagatctgaatttgtcgttagtgtaaacaagtacctcgaagctaagaatcacaagatgtctgttggtatgaggtttaaaatgagatttgagggtgatgaatcccctgaaagaagattcagtgggacaattattggtatgggatgcat

SEQ ID NO: 46404 - DNA, 300 bp, Zea mays
ctcgccccagcgacgcggcctcccgtagaccgagcaaggcaacccaccactgagaggcacgcagaggagcaggaagccggagaccaagatgtcgtcggtgttcagcggcgatgagacggcccccttcttcggtttcctcggcgccgcgccgccctcgtcttctcatgcatgggcgcacgtacgggaccgcgaagagcggcgtcggcgtggcgtcgatgggtgtgatgcggccggagctcgtcatgaagtccatcgtgcccgtggtcatggctggtgtgctcggtatctacgggctcatca

SEQ ID NO: 46405 - DNA, 305 bp, Zea mays
gctgaagccaaacttcctcggcacaaagttcacaatatttgacagccagcctcctcccgacgctgtagcgctgccaaacaacagaccgagcaaaaggcagtcgaagcaagtgtcaccgagactgccactaggcaactacaacgtcgccacggtcacgtatgagctcaccgtcctgcgcaacagggggccaaggagaatgcagtgcaccatgcactcgataccagccgagtgcatccaggagggcgggaaggccccaacacctaccggtaccgtccagccgcttgacgagccagtgcccaccttac

SEQ ID NO: 46406 - DNA, 303 bp, Zea mays
atcccgatcagcaattcctacctctccctaagagagctagaagtatcctggtagctggaagtcatgctagcaatttggggtaccagtgtggtggatggtcaatccaatggatgggggacagtggtaatatcacaactgggacaacaattcttgatgcgataaagtctaccgttgctgactcgacgtctgttgtctactctgagaaccccgatgacagtttcatgaagcacaatgacttctcattcgctatcgtcgttgttggcgagccaccatacgctgaaacagttggcgatacaccgacct

SEQ ID NO: 46407 - DNA, 284 bp, Zea mays
tgtcgttgttgaaaagcatgggatggtagctgctatgccaacaaaagcctcatcctcaaccgtgcatccttgtgacacagcactgtgacctcttgtgcatgtggcaccgtctgatctaagtgggaaagtctttccaacaatcattggtaataacgtcacaataggtcacagtgctgtgttacaaggatgcacggttgaggatgaggcttttgttggcatgggggcaaccctattagatggtgtcgttgttgaaaagcatgggatggtagctgcaggctcccttg

SEQ ID NO: 46408 - DNA, 192 bp, Zea mays
actcgagcgaattcggctcgacaactcctgaacactttctactcgtccccgacaagacaatcgaagccgagatacggccatggactccaccggcaccggagcagggggtaaggggaagaagggagcggccgggcgcaaggtcggcgggccaaggaagaagtcggtgtcgaggtccgtgaaggccgggctcca

SEQ ID NO: 46409 - DNA, 299 bp, Zea mays; identical to SEQ ID NO: 45981

SEQ ID NO: 46410 - DNA, 290 bp, Zea mays
gtggatcatcctgtcggcgtgcgccgtggtgcagctccccgtgtacctgttcacggagccgctgctggtggcgctggggcaggacccggacatctcggcggtggcggggaccgtggcgctctggtacatccccgtgctcttctccttcgtctgggccttcccgctgcagatgtacctgcaggcgcagatcaagaacatgatcatcacgtacctcgccatgctcaacctcggcctccacctcgccctgtcctggctcgcggccgtccacctccgcctcggcctcgccggcg

SEQ ID NO: 46411 - DNA, 297 bp, Zea mays
cctctctcctgtgggcgctccctctcccccgcccccaaatcatcgcgcctccctcgccacgcctcacagggccggttgcgtaggagaaaggagaaaggaaggaggggaggcggtcgtcgggcgagatgagcgactccttctgccccgactgcaagaagcatacggaggtggcgttcgaccactcggcgggggacatggtgtgcaccgagtgcggcctcgtcctcgaggcgcactccgtcgacgagacctccgagtggcgcaccttcgcgaacgagtccaacgacaacgaccccgtcc

SEQ ID NO: 46412 - DNA, 295 bp, Zea mays
catcgagatcaaggaggtcggcgacggcaacctcaacttcgtctacatcgtgcagtccgaggccggcgccatcgtcgtcaagcaggcgctcccgtacgtgcgctgcgtgggggactcgtggcccatgacgcgggaggcgcctacttcgaggcctccacgctgcgggagcacggccgcctgtgcccggagcacacccccgaggtgtaccacttcgaccggaccttgtcgctgatggggatgcgctacatcgagcccccgcacatcatcctccggaagggcctcgtcgccggtgtcg

SEQ ID NO: 46413 - DNA, 296 bp, Zea mays
atcgcaattaaaaagctccttaataacatgggtcaggcagaaaaggagttcagggttgaggttgaggcaattgggcacgtcaggcataagaatcttgtacgccttctaggatactgtgtcgagggtatccacaggatgcttgtgtacgagtatgtgaataatgggaacttagaacagtggcttcatggtgcaatgcgtcacacggtgttcttacttgggaggcccggatgaaagtcgttcttggaattgccaaggcgcttgcttatttacatgaagccatagaaccaaaagttgta

SEQ ID NO: 46414 - DNA, 237 bp, Zea mays
cggcagacggcacacacaccacaccacacctcctcgcttccactccgctcgtctgacatctcgtcccgtcctttcgtttcgaagcctcgcgagccccgacgatggccaccgccgcggtgtcggtcgacgagaagctcgacaagcttcgcgccgaggtcgccaagctcgaccagatcagcgagaacgagaagtccgggttcatcagcctcgtgtcacgatatctcagtggaaacgcgg

SEQ ID NO: 46415 - DNA, 302 bp, Zea mays
ggcatccgcagagagtttgttccgtccaggcaaccaaaaagcgttgccccgccgcgcagaggaagaagagagcagaggaggatggctcgtacgaagcagaccgcccgcaagtccacgggaggcaaggccccccgcaagcagctcgccaccaaggcggcgaggaagtcggcgccgacgaccggcggcgtgaagaagccccacaggtacaggcccggaaccgtggcgctgcgcgagatccgcaagtaccagaagagcacggagctgctgatccgcaagctgcccttccagcgcctggtgcgcga

SEQ ID NO: 46416 - DNA, 290 bp, Zea mays
gtccaaggtcttctacctcaagatgaagggttactaccacaggtaccttgctgagttcaagtcaggtgcagagaggaaggatgctgcggagagcaccatgaatgcctacaaagctgctcaggatattgctcttgctgatctggctccaacccaccccatcaggctcgggcttgctctcaacttctcagtgttctactacgagatcctcaactcccctgaccgtgcttgcaaccttgcaaagcaggcctttgatgaggcaatctccgagctagacagcctgggagaggagt

SEQ ID NO: 46417 - DNA, 287 bp, Zea mays
cagcttcgcagcccgcgcccctaaaaccctagccccggcggatcgcggggcgcctctggtcccagcgacgcggatcaaggacgggagcgctggcgcctcaggaatgttctcaaagagtggtggtaaggatgggagtaggcttagcggctgtagtagtcgagcctcttcagcttccatgcctccaagtgtgaagactgaatgtgaaatcctgcaatccgccaatgttaagatcttcaccttcaataatctcaaggcagccacaaggaatttccgtcctgatagtgttc

SEQ ID NO: 46418 - DNA, 282 bp, Zea mays
gaaggcgaccctccctccttcgctccttccgcgccgcctcccggccgtcgccgccatggtgaagtactcgcaggagccgggcaaccctaccaagtcggctaaggccatgggcagggatctgagggtccacttcaagaacacaagggagacagcctttgcgcttcgcaagttgtctttgaccaaggctaagcgataccttgaggatgttattgctcacaagcaggcaattcccttccggagatactgtgggggtgttggtcgcaccgcgcaagctaagtcgcg

SEQ ID NO: 46419 - DNA, 297 bp, Zea mays
ttaaggttgatcgagtcctttactcatcagttgtataccctcacaattatggtttcattccaaggactacttgtgaagacaatgacccaatggatgtgttggtcctgatgcaggagcctgttgttcctggttcgttcctgagagctagagcaattggccttatgcccatgattgaccagggtgaaaaggatgacaagataatagcagtatgtgctgacgatcctgaataccgtcactacaacgacatcagcgagctgtctcctcaccgcctgcaagagatcaagcgcttctttgaag

SEQ ID NO: 46420 - DNA, 141 bp, Zea mays
ggacagagaaggcaccaccagcactaggcccttattctcaggccatcaaagcaaataatcttgtgtttgtttctggagttcttggcttgaatcccgagaccaggaagtttatctctgaaaatgttgaggagcaaactgagc

SEQ ID NO: 46421 - DNA, 102 bp, Zea mays
gaaagactacggtctcaccacggataacatcaagggcatacttgtgaacatgttcgaagcagccatcgagacatcattcctggtgctggagtaatccatgag

SEQ ID NO: 46422 - DNA, 102 bp, Zea mays
gtcagagtgtgcaaatggtggcaaatggactgctgattttcacctattcaaggctggagtagagccaacctttgagaccatgtggcttgaaacgttgatggc

SEQ ID NO: 46423 - DNA, 262 bp, Zea mays
gagaatccccaagcaaacaaacagggtagagggagaggagaggagaggagaggagaggttgggtctgggacaccatggctccgatgaagctgtacggggcggtgatgtcgtggaacgtgacgaggtgcgcaacggcgctggaggaggctggctccgactacgagatcgtgcccatcaacttcgccaccgccgagcacaagagccccgagcacctcgtccgcaacccgtttggtcaggttccagtctgcagatggtgactgta

SEQ ID NO: 46424 - DNA, 286 bp, Zea mays
tattggcatttgagggctatgagaagcgcctcgagatcacgttctctgacgcgcctgtctttgaggacccttgtggtcgtggcctgcgcgccctctcccgtgagcagatcgactcgtttctggatctcgcacggtgcaccatagtgtcacagctctccaacgagagcttcgactcatatgttcactccgagtccagcctctttgtgtatccccacaaggttgttctgaagacctgtgggacgacgaagctgctgctcgccattcctcgcatccttgagcttgctgc

SEQ ID NO: 46425 - DNA, 291 bp, Zea mays
ctagcattggtgccgagaagttgcaagatcagatgaacgagctaaagattagagatgataaggaagttgaagcaaccataattaatgggaaagggactgaaactgggcacataattgtcaccactactggtggcaagaatggtcaaccaaaacagacagtgagctacatggctgagcgcattgtaggtcaaggttcttttgggattgtacttccagctaagtgtttggagacgggtgagactgttgccataaagaggttcttcaggataagcgttacaagaatgtgagttg

SEQ ID NO: 46426 - DNA, 266 bp, Zea mays
tgtaggtgttcgtgggaatcaggtatcacttcttaacattgttgttgaattgaagaaatgctgcaaccatccattcttgtttgaaagtgccgatcatggttatggtggagatagcatcggtgatcggaataaagttgaacgtattgttatgagtagtggtaaactgtcttgttggacaaactattggtgagactgcgggagcactaaccatcgtgtgcttatattctcacagatggttaagcatgttggacatccttgcagaatac

SEQ ID NO: 46427 - DNA, 285 bp, Zea mays
ctcgctcccggattcagcgtcgggcaagattaagatcggaatcaacggcttcggaaggatcggcaggctcgtggccagggtcgccctccagagcgaggatgtcgagctcgtcgccgtcaacgaccccttcatcaccacggactacatgacctacatgttcaagtacgacaccgtccacggccactggaagcacagcgacatcacactcaaggactccaagaccttctcttcggtgacaagcggtcacgtctttggcatcaggaccctgaggaaatccgtggggtg

SEQ ID NO: 46428 - DNA, 292 bp, Zea mays
  unsure (1)..(292): unsure at all n locations
gcattctcgaattacgattcccaatccagcaaaccctaccagccttttgcaaactcagagagggacccgatggcacccaaggcggagaagaagccggcggcgaagaagcccgcagaggaggagcccgcggccccggcggagaaggcccccgctgggaagaagccgaagggnaagaagcggctcccggcgggaaaatccgccggcaaggaaggcggtgttgacaagaaggggcggaagaaggccaagaagagcgtggagacgtacaagatctacatcttcaaggtgctgaagc

SEQ ID NO: 46429 - DNA, 291 bp, Zea mays
  unsure (1)..(291): unsure at all n locations
gttgaggagataattggggagaatgttcgtgccatctgcagaggtgatagctgcaagttccatgctgctgggagagaagacattgatgtacggatgcttggatctggtcgtccatttctagttgaagtactgaatgttcgatccattccatctgaaactgaagttcaacaaattgaagagagaattaacaactctgaaaagaaatatgtcatagttcgaaatctcaagttggtagataatgaaatatggaccatgatgcgtgaaggagnagcagagaaacagaagcagtac

SEQ ID NO: 46430 - DNA, 292 bp, Zea mays
ccctgaagagcgcaagtccagcttctcttctgaaggaagctatacatgttatcagctgcggctacgaagacaagaccgactggggaaaagagattggctggatttacggatcgatcacagaggatatcttgactggatttaagatgcactgccatggctggcggtctatttactgcatcccgaagcggcctgcattcaaaggttctgcgcctctgaacctttccgaccgtcttcaccaggtccttcgctgggcccttgggtccgtcgaaatttcttcagcaagcatgcccat

SEQ ID NO: 46431 - DNA, 277 bp, Zea mays
cggcaatgaagtacaagtcggaaggtcatgacatggtcatcattgctggctccgagtacggcagtggcagctctcgtgactctgctgccaagggaccaatgctactgggtgtcaagtcggtgtcggtacagagcttcgagcggatccaccggagcaacttggtggggatggggatcattcctctctgctttagagcaggagaggatgccgattcactcggcctcaccggacgtgagcactacaccatccacctccctaccagcagcgccgagctcag

SEQ ID NO: 46432 - DNA, 281 bp, Zea mays
gatcaggaaactggagcaaagtactgcccacttgaccatgttgcaatgaatcaaaatgaggagctatttactgttagcaacagttcactttcagagtttgctgttcttgggtttgaattgggttactccatggagaaccctaattcattggtactttgggaagcacaatttggcgattttgccaatggtgcacaagtgatgtttgaccatttttgagcagcggcgaggcaaatggttgcggcaaccggcctgttgttcgttgcctctggtatgtggccagg

SEQ ID NO: 46433 - DNA, 266 bp, Zea mays
ctcgagccgctcgagccgttcagcaccttcttcagccagactggtgctgggaagcacgatccccgtgacatcttcgttgatctagaacccactgtgatcgatgaggtgcgcactggcacgtaccgccagctcttccaccctgagcagctcatcagtggcaaggaggatgcagctaacaatttcgcccgtggccattacacaattggcaaggagattgttgatctgtgccttgaccgtatccgcaagcttgctgacaactgcaccgg

SEQ ID NO: 46434 - DNA, 280 bp, Zea mays
gtcttgtcaagtacataaagggagttggaaacatgagccatgagcaatggcggtcgttccataacgacaagaagacagcggaggcacggaacttccttgatggtgacctgatcgagtcgttccttgaccttagccggagcaagatggaggtggtgtccaaggctatgggcgtttcggtggaggatctgtccaagattgtggaagagctgacgaggcttcactagtacatggatacgcagaagctttgcttgtaacttgatgcatgtacatcctctttttg

SEQ ID NO: 46435 - DNA, 282 bp, Zea mays
tcgatccaacccaagccacgcctcggcgacaggccgacagcccacgagcgagatccaacccaagttccgacgccgcgggcgagaccgatcagatccacctcagccgtctcggatggcgtcacatcggcggcggtgcggatgctccccgacggcggcgctgacgacgaagagcggtggctcgccgagggcatcgccggcgtccagcaaaacgccttctacatgcaccgcgccctcgattccaacaacctcaaggactcactcaagtactcggcgacgatgctc

SEQ ID NO: 46436 - DNA, 281 bp, Zea mays
gtaccgtccgagaccccaagcaccagcgcggcggcggcggcggcgtgcgaccatggctgtcgggaagaacaagaggatctccaagggaaagaagggtggcaagaaaaagaccgtcgaccctttctctaagaaggattggtatgacatcaaggcaccgtcggtgttcagtgtgcgcaacatcgggaagactctcgtatccaggacacagggtaccaggattgcttctgagggtctgaagcacagagtctttgaggtttgcctagctgatcttcagggcgacg

SEQ ID NO: 46437 - DNA, 251 bp, Zea mays
gatccctgaaaattaaggacaagagtcatgccccaggttccatcatttctgtggcacgggaggctgctagaaagagggttgaagaggcatctgcagctgcaaaacgtgctgaaaacttggatgccatattgaaaacaaccgagcttgccgcggaggctgtgttcagggcaggaaccattattggaatgggagaaccactaccttttaccctaagagcgcttttggaagcagggccaaatggctattggaag

SEQ ID NO: 46438 - DNA, 292 bp, Zea mays
gagtagcagcagcaggcggcgccgagtagcggctccccacctcgagtttgccaccatggctagaggattgaagaagcatttgaagaggctcaatgcgcccaagcattggatgctggacaagcttggcggagcttttgctcccaagccatcttctggacctcacaagtctagggagtgcctgccactgatcctcatcatcaggaacaggctcaagtatgctcttacataccgtgaggtcatttccatcctgatgcaacgccatgtacttgttgatggcaggtcaggacagaca

SEQ ID NO: 46439 - DNA, 213 bp, Zea mays
ttgttaccccggctctccgcccctccttctcgcggcgctcgagggaccatggccgatcctcgcgtgagatagatcaagatcaagaccggcgtggtgaagcggttggtcaaagaaaaagtgatgtatgaaaaagaggcaaaacaacaagaagaaaagattgaaaaaatgagagctgaagacggtgaaaattatgacattaaaaagcaggcagag

SEQ ID NO: 46440 - DNA, 207 bp, Zea mays
cgtggattcaaatgttgatctgcatgttgctgctaagaggattgttgttggcaaatggggatgcaacaacggccaagcatgcattgctccagattacatcataacgacaaaatcatttgcaccggagctggtggcctctttcaaaagagttttggaaaggttctatggggaggatcctctgcaatcagcagacttgtctcgtattgt

SEQ ID NO: 46441 - DNA, 202 bp, Zea mays
tgatgcatacgcagaacttgaatctgtactttctggattgaatgtgcttgttgagacttactttgctgatgttactgctgagtcctacaagaccctaacatccctgagcagtgtgactgcttatggttttgatcttgtccgtggaacccaaactcttgggcttgtcacgagtgctggtttccctgctggaaagtacctcttt

SEQ ID NO: 46442 - DNA, 278 bp, Zea mays
gaaacctctcaaaccctagccgcctcctgcaagtttcagagctcaggaatctgcgccatggcgagtgagacggagaccttcgcatttcaggctgagatcaaccagctgctctcactcatcatcaacaccttctactccaacaaggagatcttcctccgcgagcttatctccaactcttccgatgcgctggacaagatcaggttcgagagtctcactgacaagagcaagctcgatgcgcagctgagcttttcatccacttgtcccagacaggccagaac

SEQ ID NO: 46443 - DNA, 244 bp, Zea mays
gtcaaagcagaagattttttccgaggagtttgaacttgttactcaagctctttttacagatccaagtgaccaaagtggatggttctatcacctctggcttttagctcaaacatctagtccagataacccacagctgattgcttcatggccttctaatgctgcaaagctcagtttctcttttatcaaggaaaaggctgagcagcacacactgtcatccgtctggtcaaggactgtacccattgtt

SEQ ID NO: 46444 - DNA, 279 bp, Zea mays
gtcaattggaggaggtggtggaagcagcaggggaagaaggcaaaggaggggagaagatgtagtccactcacttaaagtttctctggaagatctttacaatggaatctcaaagaagctctctctttcgcgcaatgtcatctgctccaagtgcaagggcaagggctcgaagtctggtgcttcaatgaggtgccctgggtgcacaggctcaggtatgaacgtcaccattcgtcagctggggccttccatgatacagcagatgcagcagccttgcaacgagtg

SEQ ID NO: 46445 - DNA, 229 bp, Zea mays
ggagtctgaagtgaatccttttgatggacaagaggccaagccgtacaagaacgatagtgaaatccttgcaatgacaaacctgattgcagcgtaccagaagaacgacatcatggagtttgaaaagatcctgaagagtaatagaagaacaataatggatgatccttttatccgtaactatattgaggatctgttgaagaacatcagaacccaagtgctgctacagcttatt

SEQ ID NO: 46446 - DNA, 268 bp, Zea mays
gatctcggtaacatttgttaacaaggatggctcagaaaagacaatacgtgttccagttggaatgtccatgttagaagctgctcatgaaaatgacatagagcttgaaggagcatgtgagggttcacttgcgtgttctacttgtcatgtaatagtaatggatgtaaactactataacaaattagaagatccagcagatgaagaaaatgatatgcttgacacttgctttgggctcacagagacatctcgcctcggctgccaagtgatcgcg

SEQ ID NO: 46447 - DNA, 225 bp, Zea mays
atacaagcacacacgtgctgctgaacgtgtggatccttcttaactctctatgggaaagcagggcttcctggtcttcaatgcagttggtggaggcactggctctggccttggttctctactccttgagcgcctgtctgtggagtacggcacgaaatccaagctgggcttcactgtgtacccatctccccaggtgtacacctctgttgtggagccttacaacagcgt

SEQ ID NO: 46448 - DNA, 253 bp, Zea mays
atccgtggccaacctcgccgagtcgctgtccacgctcatatggatcgcctccgcgctgcacgccgccgtcaacttcggccagtacggctacgcggcgtacatgcccaaccgccccacccggtgccgccgcttcgtgccgctgccggactccccggagatggcgcactggaggccgacccggacaggttcttcctcgacacggtgcccgaccgcttcaccgccacgctcgggctcacgctcatcgaggtgctct

SEQ ID NO: 46449 - DNA, 260 bp, Zea mays
gatcggcacctcgccgtcctcgtgtgcaatccccagctctcctcgcccctccctcccaaactccagcggccccccctgaccaagctccggggacggatggacggaggagccggctttccgggcacgcagccggtctcccgctcgccggaggacgtcttccgggactaccgcgcgcgccaggccggcctgatcagggcgctcaccaccgatgtggagaagttctacgtgatgtgcgacccagagaaggagaacttatgttt

SEQ ID NO: 46450 - DNA, 190 bp, Zea mays
agtacaactctcatcctcactccccccactcgcccgcatcttccggtcttcctcatggcgtcgagcgacctcgccgagagcctcctccccggcggcgggggcggagctccgcctcacatgacgactacgaggagcgcgcgtacgactccgaggacacgatctccatcgccgtgtcggattccgacggcga

SEQ ID NO: 46451 - DNA, 220 bp, Zea mays
  unsure (1)..(220): unsure at all n locations
acaaaacctacctagccgccgccgcacganncccacatcgccgccaagatgcagatctttgtgaagactctgacggggaagaccatcactttggaggtggagtcctcgacaccattgacaatgtgaaggccaagatccaggacaaggagggcatccccccggaccagaagcggctcatcttcgccggaaacagctcgaggacggtcgaccctcgccgact

SEQ ID NO: 46452 - DNA, 269 bp, Zea mays
cagatgttgacttccatatcgacagttgatgatctaaattaccctgaaaagacagagacctattatgtagtcaacgttccatacatattttctgcttgttggaaggtactatcagttacagccaacgctcggacctacggtttttagtaatttttttagcagaaaggaactgatgacagttaatttgagcatgccgctaggttgtgaacaccctctttctgtactctactgcataaggatacaccactgcggctgctcaattaactgtc

SEQ ID NO: 46453 - DNA, 278 bp, Zea mays
ggaaccctgctaacgatgacaacacgttcatagaagacaactcgttgccatcattctcaaaggctgttaatcagcgcgacgctgaccttgtctacttctggcagaagtaccggaaattggcagacagctcacatgagaaaaatgaagctcggagggagttgcttgaagtgatggcccacaggtctcatgttgacagcagtgttgagctcattggaagccttctctttggctctgaggagggtccaagggttctgaaagccgtccgtgcagctggtgag

SEQ ID NO: 46454 - DNA, 261 bp, Zea mays
gttcggaacgcacacacacacaaccagatgtcccccaaatccacccgtcactacctccgcttcaagatgcagatctttgtgaaaaccctgactggcaagactatcaccctcgaggtggagtcgtctgacaccattgacaacgttaaggccaagatccaggacaaggagggcatccccccagaccagcagcggctcatctttgctggcaaacacttgaggacgggcgcaccttgctgactacaactccaaaggagagcacct

SEQ ID NO: 46455 - DNA, 294 bp, Zea mays
gcagcagacacctccgccacctccaccctcgaatcgttccccaccatggcgtcgcagggatcctccgtcttcgccgcactcgagcaggccccggaggaccccatcctcggagtgaccgttgcctacaacaaggatcccagccccgtgaaggtcaacctcggggtcggcgcctaccggaccgaggaagggaagcccctagtgctgaacgtggtcaggcgcgccgagcaaatgttgatcaataatccgtcacgtgtcaaggagtacctaccaatcaccggtctggctgaattcata

SEQ ID NO: 46456 - DNA, 249 bp, Zea mays
atcttccgttctcaaaccaacctaggcaattggccgcagcctctcaccctcgcgagtcccgacctcccgcagccgccgcacagatggcacccaaggcggagaagaagccggcggccaagaagcccgcggaggaggagcccgcgacagagaaggtggagaaggctccggcggggaagaagcccaggccgagaagcgcctcccgggggcaagtccaggagggcggcggggcaagaggggaaaaagaggcga

SEQ ID NO: 46457 - DNA, 244 bp, Zea mays
gtgaaccttatcaaggaataccgtgcgaagatcgaggctgaactgagcaatatctgtgatggcatcctgaagctgcttgactcccacctagtgccttcttctactgctgctgaatcaaaggtcttctacctcaagatgaagggtgactatgcacaggtatcttgcggaatttaagactggtcctgagaggaaggaatctgctgagagcacgatgatggcctacaaggctgctcaggacattgcg

SEQ ID NO: 46458 - DNA, 232 bp, Zea mays
gtccctattaactgcattcactcactattatatcgataagggctatgacggtattgtgctcgagtcctggtcaagatgggctatttatggtgtgctggatgaccaagagctacgttacatggcacttgaatttgttaagcagctgggagaggttttgcattcagtcaattccaaaatcaagtagccaccatttggaattaatttatgttattccagctccaggattgcaaag

SEQ ID NO: 46459 - DNA, 285 bp, Zea mays
aacatccagaaggagagcaccctccacctggtgctccgcctcaggggtggtatgcagatttttgtgaagacattgactggcaagaccatcaccttggaggtggagtcgtctgacacaatcgataatgtcaaagccaagatccaggacaaggagggcattccaccggaccagcagcgcctgatctttgctggcaagcagctggaggatggccgtaccctcgccgactacaacatccagaaggagagcaccctccaggtggtgctccgcttgcgaggtggtatgcag

SEQ ID NO: 46460 - DNA, 275 bp, Zea mays
gaagaggtttgatgaatgcccgttatctcccttgtcactgaaaggtgttaaggctgctgggtatgaacagatgactgctgttcaggaggctactcttcctattatacttcaagggaaggatgtactagccaaagcaaagacaggaactggaaaaactgtagctttcttgctaccagcaattgaagttgtttcgaaattgccacctgttgatcgtgatctaaagaaacctcccatcagtgttgtagtagtgtgccctacacgtgagcttgctgatc

SEQ ID NO: 46461 - DNA, 305 bp, Zea mays
  unsure (1)..(305): unsure at all n locations
cggacgnaaggcgaaggagtagcagcagcaggcggcgccgagtagcggctccccatctcgagcttgccaccatggctagaggattgaagaagcatttgaagaggctcaatgcccccaagcattggatgctggacaagcttggcggagcttttgctcccaagccatcttctggacctcacaagtctagggagtgcgtgccactgatcctcatcatcaggaacaggctcaagtatgctcttacataccgtgaggtcatttccatcctgatgcaacgccatgtacttgttgatggcaaggtcaggaca

SEQ ID NO: 46462 - DNA, 284 bp, Zea mays
ggtcaatatagtgatcttctaaggctttttgattatggaggttttcctcctgaagctaattatctattcttaggtgattatgttgatcgaggcaaacaaagtttggagactatatgccttcgtcttgcttacaaaatcaagtaccctgagaacttttttcttctgaggggcaatcatgaatgtgccttaattaacagaatataatggatttatgataaatgcaagcgtcgatttaatgtgcggctatggaaggtcttcacagaatgttttaacactctacctgt

SEQ ID NO: 46463 - DNA, 287 bp, Zea mays
agtgccactcgctggagcggctcgaaatcactggctgccctatgatcacggacaagggcctcgtcgctgtggctcagggttgcccggaactgaagtcgctcaccatcgaggcctgctccggcgtggctaacgagggtctcaaggcaattggccggtgctgcgccaagctacaggcggttagcgtcaagaactgcgcacatgtcgacgaccagggtgtgtctggcctcgtctgctctgcgacacctcgttggcaaaggtccggcttcagggtttgaacatcctgatgc

SEQ ID NO: 46464 - DNA, 292 bp, Zea mays
actcgatccatcgcctcgccgcagcacacacgaggccggcggcgccatggccatgaagctggacatgtccgcgctcgagaccaacttcgccaacctgaccgcctccgccggcgacgacacgtacttctccgccgaggcccccgacgtgccgtccatggtgctacccatctgcgacgacttcgacggcttccaggcggccaccaaggatatggtgaagaataagaaggggacgaccacgcttgccttcatcttcgacaacggcgtcatcgtcgccgctgattccagggccagc

SEQ ID NO: 46465 - DNA, 295 bp, Zea mays
ggctgaccccaagaagtaccgcaagatgaaggagaggcttgtcggcgtctctgaggagaccaccacgggtgtcaagaggctctaccagatgcaggagaccggcgccctcctcttccctgccattaacgtcaacgattccgtcaccaagagcaagtttgacaacctgtatggttgccgccactcgctccctgatggtctgatgagggccactgacgttatgatcgccggaaaggttgccgtggtctgcggatacggtgatgtcggcaaaggttgtgctgctgccctcaagcaagct

SEQ ID NO: 46466 - DNA, 294 bp, Zea mays
gcttcccgtgcagcgccctccctctacgttcccccatttcctgtgttggcggcgatggcgcggcacttcgtgctcaacaccggcgccaagatcccctccgtggggctcggcacctggcagtctgaccccggcgtcgttggcaacgctgtctacgccgccgtcaaggcgcgttaccgacatatcgattgtgccagagtttacggcaacgaaaaggagattggtttggcgctgaagaagctatttgaagagggtgtagtgaagcgagaagatctgtttatcacctctaagctatgg

SEQ ID NO: 46467 - DNA, 276 bp, Zea mays
cttgagctcgcaacttctcttattgagaaggcgaaggcaaagggggtttctcttttgcttcccactgatattgtagtagcggacaagtttgcagccgatgctgagagcaagattgtccctgccactgctatccctgatgactggatgggacttgatgttggccctgatgccacgaaaaccttcaacgaagcattcggacaccaccaagactgttatttggaacggccccatgggagtgtttgagttcgagaagttgcagctggaactgagcgatgc

SEQ ID NO: 46468 - DNA, 289 bp, Zea mays
gtgatcacgcgcgtcacccgaaagggaatcgggttaagatttcccgagccgggacgtggcggcagacggcgagagcggtctgcacggcggggcctgcgccgactacatggtcgtcgccacaggccgctccgattggcacgtccgtaacatcgcgcaggcgctcctctacaagataaagcaaaagcagaagggctctgatagaatattgatgccaagtgtagaaggtcagcaagcgggaaaatgggttgtcattgattctggaagcataatcatccatgcacttgaagaa

SEQ ID NO: 46469 - DNA, 286 bp, Zea mays
ggcgtgctgggcatcgcctggggcttcggcggcatgatcttcgtcctcgtctactgcaccgccggcatctcggggggccacatcaaccccgccgtcaccttcggcctcttcctggcgcgcaaggtctccctggtgcgcgcgctgctctacatcgtggcgcagtgcctcggcgccatctgcggcgtcggcctcgtcaaggcgttccagagcgcctacttcgacaggtacggcggcggcgccaactcgctcgcctccggctactcccgcggcaccggcctcggcgccg

SEQ ID NO: 46470 - DNA, 244 bp, Zea mays
tgtgcccgcggccgcgcccgcgccactcacatcgtgatcgagacgacccgcgtcctccgcggtccgcgcccgtgcaccatctcgcctcgcattcccgaaagtatctgtattccttgatcaacatgtcgcgggaggagaatgtttatatggccaagctggctgagcaagcagaacggtacgaggaaatggttgaatacatggagaaggtggctaagaccacagatgtgcaagagctcactgttga

SEQ ID NO: 46471 - DNA, 293 bp, Zea mays
gttaacatcagcagcatgctgggtcgcatggccaacccagcccgctcaccatactgcatcaccaagtttggggtagaggctttctcggactgcctacgctatgagatgcaccctctgggtgtgaaggtcagtgtggtggagcctggcaacttcatagctgccaccagcctctatagccctgagcgtatccaggccattgccaagaagatgtgggatgagctgccagaggtcgtccgcaaagactatggcgagaagtacttcgatgaaaagattgccaagatggagacctactg

SEQ ID NO: 46472 - DNA, 290 bp, Zea mays
gttggtctttgctttgtggtggatggctttccaccactcgctgaattcactgaggtgcttgctaagatctatgagaaactcaaagaagtgggagagaaatttgaagttgtagctgtatccttggacagtgaagagtcatcatttaatgagagttttgcaaagatgccttggcttgcaattcctcaaggtgacattaagtgtcagacgctggttcgttactttgagcttagttctcttccaacactagttctgattggccctgatgggaagacactgaacaacaagtcgcc

SEQ ID NO: 46473 - DNA, 285 bp, Zea mays
gagcaatgcagaacattttcagtaagagtgcaaaatacagtctgtttgatccttgcaaagagatggcatacattcctttggatgaggatatgaaggtgaaaggtaaagcggctattgatgttgtgtgcaaccccttggggaaatctggaggtgctctgatccagcagttcatgatcctgtcattcggttctctcgcgaactcgacaccctaccttggcggaatactcctggtgatcgtccttgcatggctgggtgctgtaaggtccctcgacctgcagttctctt

SEQ ID NO: 46474 - DNA, 254 bp, Zea mays
tgaacatgaagcagcctctcgtgctgcccgcgcaccggtcgccccaggaccaggaaggaccccgaggcggaggtgcgccatgggcacaactacgtgccccgcgacgagcagttctcggaggtcaagcagctcacgttcggggccacgacgctgcgctcgggcctgcacgcgatgctcccggccatcaggacgatgctcatcaagagggagctgcgcttcccgcacttcccggccatcgacgacctctacagcga

SEQ ID NO: 46475 - DNA, 271 bp, Zea mays
ggcatggacgtcgtcaaggccatcgagaaggtgggtacccgcaacggctccacctccaaggtggtcaaggtcgctgactgcggagagctctcctagatctctctgatctggtctgttcggccgccctccctccgtcatcgtcgactccccctgcgtccgttcctttggatctgaataagatggtggtgatctgagtggtggtcttagtttatcatgtatcgctcgcagtttaatttagcggtttaggtgtggatctgtgaacccctggcgc

SEQ ID NO: 46476 - DNA, 278 bp, Zea mays
gtagcagcaggcggcgccgagtagcggctccccatctcgagcttgccaccatggctagaggattgaagaagcatttgaagaggctcaatgcccccaagcattggatgctggacaagcttggcggagcttttgctcccaagccatcttctggacctcacaagtctagggagtgcctgccactgatcctcatcatcaggaacaggctcaagtatgctcttacataccgtgaggtcatttccatcctgatgcaacgccatgtacttgttcgatggcaggtc

SEQ ID NO: 46477 - DNA, 244 bp, Zea mays
  unsure (1)..(244): unsure at all n locations
agtcgagcgaattcggctcggcaggacaaggagggcatacctccggaccagcaagggcntctttttgccggaaagcagctcgaggacgggcgcacgctggccgactacaacattcagaaggagagcaccctccacttggtgctgcgtctcagaggtggcatgcagatcttcgtgaagacacttactggcaagacgatcacccttgaggtggagtcctcagacaccattgacaacgtcagagcca

SEQ ID NO: 46478 - DNA, 281 bp, Zea mays
gcgagcaagcaggcttcgagaacaagggggagggggaggaccaagcgaaagggggaactagagcaagatgggcggcgaactgctgcttgcgctcctcctcgtctctgctgctgccgcccctcaggtacttggagttggcaatggagacaatcacatgagaatcatccaggaggacatcattgagacagtcaacaaccatcccagtgctgggtggacagcctcacgtaatccttacttttcaaactataccattgcgcaatttaagcacatacttggagtga

SEQ ID NO: 46479 - DNA, 234 bp, Zea mays
  unsure (1)..(234): unsure at all n locations
gtcaaactagtctctggtgtgcattagaggatcctgcaaaatatctgatcacgttcatggcattttcagaaatggcaacacttattgcaccaagcatatcaacttaccttccacaggcatggagaggtgcatttgttctgtcttttgtatggttccttcagaggtggaaaaccaacttcattgctaaagctatgaccanactagatgcctcaagtgttgatcgcgacaggatat

SEQ ID NO: 46480 - DNA, 284 bp, Zea mays
gcagtgagtaacacgtcagggagtgccagcacggaggaaggccgagggaaagttacagcactcttgaagcagaaaggtgttgatgtcaaaggaatctcaaaaactagtgtgccagtaaatgacgaagttcctcctttgctggatggcggtggaaagcttgaggtttggtgtattgatggcagtgccaagactgctcttccaaaggaagaacttggaaaattctacagcggagactgctatgttgttctctacacttatcattctgctgacaaaaaagaagagtt

SEQ ID NO: 46481 - DNA, 221 bp, Zea mays
  unsure (1)..(221): unsure at all n locations
gcctaccgttcggggtggtggcatccgggattcgtccacacccaggcacataaaagccgcctctcgccgccgactgcaaaccctcgtttttctctctcctgcgctgcgccgtccttcacctccgccgccgaatccgagactctgatctcgggttcaccgcagcgcacagagcacccccgactcncgtcccgatccgcgctctcctctacgacgcttcagtc

SEQ ID NO: 46482 - DNA, 280 bp, Zea mays
tcatctgcgacgacttcgacggcttccaggcggccaccaaggatatggtgaagaataagaaggggacgaccacgcttgccttcatcttcgacaagggcgtcatcgtcgccgctgattccagggccagcatgggcggttatatatcctcacaaaccgtgaggaaaattattgaaataaatccttacatgctggggacaatggctggaggtgctgctgattgctcattttggcataggaacctaggaaccaagtgtcgtctccatgagctttcaaacaagcg

SEQ ID NO: 46483 - DNA, 255 bp, Zea mays
ggaattaagggaccgagaaatggagcttaaggctcaaattacagccattattgacaagagcaaggaaatgattaaagcagagactgaatctggtgaagtcggtccgcttgttactgaggcagacattcaacatattgtctcctcttggactggaattcctgtggagaaagtgtcatcggatgagtctgaccgcctcctaaagatggaagagacgctgcatacacgtatcattggacaggatgaggctgtcaaagc

SEQ ID NO: 46484 - DNA, 281 bp, Zea mays
gtcatatctgaagggatttactgatggaacaatgattgtaggtgagttcagtggtagaaaggttcaggaagcgaaaccgctgattaaaagtaagcttttggaagaaggcacagctgtgttgtatagtgagccggagaagaaggtcatgtctagatctggtgatgaatgtgttgttgccctcactgatcagtggtatataacttatggcgaggctgaatggaagcagaaggcagtcaaatgtttggaccgcatgaatacattctcaactgaaacccgcaatg

SEQ ID NO: 46485 - DNA, 277 bp, Zea mays
gtacgcatgggagttcgccatcaccaggaagttcgccggaggggacgccgtcaagggcacctaccaggcctccaccaagctgctcggcatcgagtggagcagggactctctcgccggcggctccttcaaggttgcgacgacattcgatttgtcggaccaaagcaaagcaccaaagctaatagcagagagcacgtggaactacgaaatatgaaaaatggaagtgtccttctcatatcatacatactgcttgattgctgtatcctcctgaactatggag

SEQ ID NO: 46486 - DNA, 276 bp, Zea mays
gagctcgcgaaggaacgctgttcgcaattccggcgccggcaccatgagtaagctgcagagtgattctctgagggacgcgattgcctcaattaccaatgattcccgtgagaagcagcgcaaatttgttgaaaccattgagctacaaattggactgaagaactatgaccctcaaaaggacaagcgcttcagcggttctgttaagctgcctcacatccctcgccctaagatgaaggtttgcatgcttggtgatgctcagcatgttgaggaggcagagag

SEQ ID NO: 46487 - DNA, 275 bp, Zea mays
gccacaccccgtgtcgaaaccccagggcgccaagcttcccgcgggccaccgccgctgccgatgccggtgccgaagccgatggagaggaagcaagccgcctacagcaacctcgatgagaggtacgcgatccagggggagaagtaccaggggcagcagtacagccatatctacttcacgcgcctccaccacatgcggaatctcctccacgccctcgtcccctcctggaagccgcaactccctgtcactacagtgttaggacttgaagaaggaaagga

SEQ ID NO: 46488 - DNA, 268 bp, Zea mays
tgaatatatggtaaattcatggttcatcgaccattcatcaggaaagcaattaacaacatattctacaggtttatattcgaaacagagaaacataatggtgttgcagagttgttggagatcctgggcagtattatcaatgggtttgccactccgcttaaggaagagcacaaattattccttgttcgtgcattgatccctcttcacaagccaaaatgtgtatctatgtaccatcagcagctatcatattgcatcatacagtttgttgaga

SEQ ID NO: 46489 - DNA, 288 bp, Zea mays
tctcgagccgcaccaactctccccaatccagcagccctcgagtcaggtcccccacccctcagtgcgacgaaggtaagatgttcctgcggaggatcctgaccggcgggggcggcctggcggccctgagggcggcgcgcgccgtgaaggagacgacggggatcgtgggccttgaggtggtgcctaacgcgcgagaggttctggtagggctctacgagcgcacgcacaaagagatcaaggccgtccccgaagacgagggttaccgcaaggccgttgaatccttcaccggtc

SEQ ID NO: 46490 - DNA, 304 bp, Zea mays
ggcgcacagcacacgaacacacaccgcgcccagctccgaggtgatcttccggcggccggcgagatgagccgtggcacaggcgcgggctatgaccgccacatcaccatcttctcccccgagggacgcctgtaccaagtcgagtacgcgttcaaggcggtgaagtcggcgggtgtcacgtcgatcggcgtccgcggcgcgtactccgtctgcgttgttacgcagaagacagtcccggataagttgctggatcagacgagcgtgacacacctgttcccgatcaaccaatacgtcggattgcttgcca

SEQ ID NO: 46491 - DNA, 238 bp, Zea mays
tcgagggcagggaatgtgaggatgcggaacccaaggccagggagcctaacaagagggagatgagcctggaggagaagaacatgctcagggtgcggctggagagtttgcccgaagagaagatgcataatgtgctacagattgtgcgcaagaggaacaacaatccggagatgctgggggatgagatcgagcttgatattgatgagatggatgttgagacacgtgggagcttgatcgtttc

SEQ ID NO: 46492 - DNA, 239 bp, Zea mays
gtgttctgattcacctgctccaatggctgttctttctgctgctgatgcttccccggtctcagctatcgggtttgagggctatgagaagcgccttgagatcacattctctgaggcacctgtctttgtggaccctcatgggcgtggtttgcgtgccctctccagggcccagattgactctgttctggatcttgcacggtgcacaattgtgtctgagctctccaacaaggatttcgactcat

SEQ ID NO: 46493 - DNA, 294 bp, Zea mays
gcggtcgtccctcagccgcgtcgcaccgcatcgcattctacgattcgaagctctctgctcgcaggggaccatggcgaagaactacccaaccgtgagcgccgagtacagcgaggccgtcgagaaggccaggcgcaagctccgcgccctcatcgccgagaagagctgcgcacccctcatgctccgcctcgcgtggcactccgcggggacgttcgacgtgtcgtcgaggaccggcggtcccttcggtaccatgaagtgcccggcggaactggctcacggcgccaacgcggggctgga

SEQ ID NO: 46494 - DNA, 282 bp, Zea mays
caagaggacttgcgcacagggcaaagcttgatgacaatgctagactactcgacttcacccagaagcttgaggctgcctgcgttggagccgtcgagtctgggaagatgaccaaggaccttgcccttctcgttcacggatcttcaaatatcacgaggagccattacctgaacacggaggagttcattgacgctgttgctgacgagctcagatcgaggctggcagccaactcgaacctttgaaatccttgccgaagttgtggtgctttcctgcgcgacgctttcg

SEQ ID NO: 46495 - DNA, 275 bp, Zea mays
gccaaatgaaagcctctatgagcagaagcccgaggaaccagctcccgtcctgccatcatcggtgattgagagtactacaactaggagcaaatcacatacttcccgatttgattacgttgaaaatgcacctgctcttaagaatgggaatagctcagaaggcaaccacatgagtggacatgttgcacccccaatgtcgtcaaacttctttgctgaatttgggatggacagtggatatcagaaaaaatctacgtccagttcatccaagtgcagatcga

SEQ ID NO: 46496 - DNA, 228 bp, Zea mays
gggcgccctcccagttcgtctattaaaggggaaccagtgaaccacccgatgcaacttgcgtagagagttgggcgcagagaatccccaagcaaacaaacagggtagaggtagagggagaggagaggagaggagaggagaggagaggttgggtctgggacaccatggctccgatgaagctgtacggggcggtgatgtcgtggaacgtgacgaggtgcgcaacggcgctgg

SEQ ID NO: 46497 - DNA, 251 bp, Zea mays
cgcattctcgccggtgctgctgcaattaacgccgcctccggccaaccacccgaaacctacctccgccaacgtcgtcgccaccgtcaacatggcgagccaaggggagccctcggcctctgcttccgatccgaaggagaagaaggacttctcgacggcgatcctggagaggaaaaagtcaccgaaccgccttgtcgtcgacgaggccaccaacgacgataactccgtcgtcgctctgcaccctgacaccatgg

SEQ ID NO: 46498 - DNA, 292 bp, Zea mays
  unsure (1)..(292): unsure at all n locations
ggtctggagtctttgaatccaaaagagctccaacaactagagcagcagctgncgagctcactgaagcacatacagattcaagaaagagccaccttatggccgagtcaatttctgagcttcagaagaaggagaggtcactgcaggaggagaacaaggctctacagaaggaactttcagagaggcagaaggcggttcgctagcnnnnnnnnnnnnnnnnnnnnnnnnnnntgggaccagcagacacagttccagtccagacagctcatcgtcttcttcttcngatgaggcagga

SEQ ID NO: 46499 - DNA, 102 bp, Zea mays
caattgcggtggccaccacttccaatccactccccgcgttcgcctcgccgagctgttcttgctctgtcctctctccaactccacgatttgttccacacaaca

SEQ ID NO: 46500 - DNA, 271 bp, Zea mays
accgccgcaaggactcgcgacggacggagcaacggaggaagcaactacgcggcagccatggtgaacgttccgaaaaccaagaagacctactgtaagaacaaggaatgcaggaagcacaccctgcacaaggttacccagtacaagaaaggtaaggatagcctttcagctcaagggaagcgacgttatgaccgcaaacagtctggatatggtggtcagacaaagcctgttttccacaagaaggcaaaaacaacaaagaagattgtgctgaagc

SEQ ID NO: 46501 - DNA, 276 bp, Zea mays
catatccgctcccctacctctccagcatcctcccgtctccgtcgtctgcgtctccgctcctcacctcgccagccatgggcaagatcaagatcggaatcaacggtttcggaaggatcggcaggctcgtggccagggtcgcctggagagcgaggatgtcgagctcgtcgccgtcaacgaccccttcatcaccacggattacatgacgtccatgttcaagtacgacaccgtgcacggccaatggaagcacagcgacatcgccctcaaggactccaagac

SEQ ID NO: 46502 - DNA, 281 bp, Zea mays
gtcggctgcttctccaagccggaggcaaggtcatggacagttgaaggatcagtcagatggaggaacatatttggttatggtgacatctgggatgcttcgggagcatatgggtgggaccagtcatcagagataagcattggagtatccttaccaagattgagatcgataccaaccccctcgactgctcgggcatcactcttgtctcatgactggctgaaattttcatcatacaaggaacgtctgcttggcatatcctttggtttgctttcggacatgcacca

SEQ ID NO: 46503 - DNA, 189 bp, Zea mays
acgagattgttgaattcatctctgccctagcaccagccatggcgaacgcagcttcttctctgtctcctactcgccgcctccgcgccgctaatcgtcgccacggccaagaaatccggggacgtgtcggagctccagatcggcgtcaagtacaagccggaatcatgcagcattcaagctcacaaaggtgac

SEQ ID NO: 46504 - DNA, 206 bp, Zea mays
gggtggtggtggatcccatgctgatccatttgacattttctcatcattctttggaccctcttttggaggaggtggtggaagcagcaggggaagaaggcaaaggaggggagaagatgtagtccactcacttaaagtttctctggaagatctttacaatggaatctcaaagaagctctctctttcgcgcaatgtcatctgctccaagt

SEQ ID NO: 46505 - DNA, 312 bp, Zea mays
tcaacgcgtacgtaacgtaagtattcagctcgatgatgatgatgaccttgatctttttggtgatgaaaatgaggaggacaagaaggcagctgatgagcgtgctgccgctgccaaggcctcttctaaaaagaaagaaagtggtaaatcctccgtccttatggatgtaaaaccatgggacgatgagactgatatgaagaagctggaggaggctgtccgcagtgtccagatggagggtctgacttggggagcatcaaagcttgtgcctgttggatacggcatcaagaagatgactatcatgttgacaattgtcga

SEQ ID NO: 46506 - DNA, 265 bp, Zea mays
gggccgcccgcgatctagaactagattttccttcagccatgggtaaggagaagactcacatcaacattgtggtcattggccatgtcgactctggcaagtcgaccaccactggccacctgatctacaagcttggaggtattgacaagcgagtgattgagcaggttcgagaaagaggctgccgagatgaacaagcggtcattcaagtatgcgtgggtgcttgacaagctcaaggctgagcgtgagagaggtattacaattgatattg

SEQ ID NO: 46507 - DNA, 261 bp, Zea mays
ggccgccgctcgctcgctcgctgcagctacgcacgcacgcgcctgctcctccccttagcttccacaaggctcgactcggccggcggcgatggcgcggaagaagatccgggagtacgactccaagcgcctcctccgggagcacctcaagcgcctcgccggcatcgacctccagatcctctccgcgcaggtcacacagtcaacggatttcactgagcttgcaaaccaggagccgtggctctactctatgaagttggttgtgaa

SEQ ID NO: 46508 - DNA, 272 bp, Zea mays
gggggctcatgatgccagtgtctgtgagctcaatggcagcagatgtgatccgtgggtactgggcgcaacggatcttgtgggagattggtggatatgtggctttctatccacctactatttacaggaaggactatattcaggcatacccatttgcagaagagaaggatcttcatgtgaatgttggtcggttgatcaagttcctgaatgagtggaggtcaaacaagaggacactctttgagaagattcttgatttgagttatgccaggctgagg

SEQ ID NO: 46509 - DNA, 278 bp, Zea mays
ggagagcagcccggaggagggggagcaagcagcagccgtcggtggaagatgtcgtacctgctgccgcatctgcactcggggtgggcggtggaccaggccatcctcgccgaggaggagcgcctcgtcatcatccgcttcggccatgactgggacgagacctgcatgcagatggatgaagtgctagcagcagtagctgagaccataaagaactttgcggtcatctaccttgttgacatcacagaggtccctgatttcaacaccatgtatgagctgtacga

SEQ ID NO: 46510 - DNA, 240 bp, Zea mays
ccaaggtggccctcacatccaccagattgctgcacttgctgttgctctacagcaaactatgctcgcctggcttcaaggcctatgcaaagcaattgaaggccaatgctgttgcaattggaaactatctcatgagcaagggctacaagatggtgactgatggaactgagaaccaccttgttctctgggatctccgcccccttggcttgactggaaacaaggtcgaaaagcatgtgatctttg

SEQ ID NO: 46511 - DNA, 246 bp, Zea mays
gtcttgccggcgatgagaacccgtcagttccaaagatggctcgtcgtggattgatggaacaggacttaagcaaactggatgtgacgaagcttcaccccctgtcacctgaagttatctcacgccaagcaacaatcaatatgggtaccattggccatgtggctcatggaaagtccactgttgttaaagctatatctggtgttcagactgttcggttcaagaatgagctggaacgtaccattactataa

SEQ ID NO: 46512 - DNA, 247 bp, Zea mays
aaacctctcaaaccctagccgcctcctgcaagtttcagagctcaggaatctgcgccatggcgagtgagacggagaccttcgcatttcaggctgagatcaaccagctgctctcactcatcatcaacaccttctactccaacaaggagatcttcctccgcgagcttatctccaactcttccgatgcgctggacaagatcaggttcgagagtctcactgacaagagcaagctcgatgcgcagctgagctt

SEQ ID NO: 46513 - DNA, 273 bp, Zea mays
gatatattgccggaggagccacccagaactctatcagggttgcccaatggatgcttcaaactcctggtgcaacaagttacatgggatgcattggaaaggacaagtttggtgaggaaatgaagaaaaacgctcaagctgcaggagttactgctcattactacgaggatgagactgctcctactggcacatgtgctgtatgtgttgttggtggtgaaaggtcattgattgcacatctgtcagcggcaaactgttacaaatctgagcatctaaaga

SEQ ID NO: 46514 - DNA, 199 bp, Zea mays
cggcaatgaagtacaagtcggaaggtcatgacatggtcatcattgctggctccgagtacggcagtggcagctctcgtgactctgctgccaagggaccaatgctactgggtgtcaagtcggtgatggcaaagagcttcgagcggatccaccggagcaacttggtggggatggggatcattcctctctgctttaaagcagg

SEQ ID NO: 46515 - DNA, 191 bp, Zea mays
cgcatcctcaaggagctgaaggacctgcagaaagacccccccacatcatgcagtgcaggtcctgctggtgaggacatgtttcattggcaagcaacaattatgggaccacctgacagtccctatgctggtggtgttttcttagtgaacattcatttcccgccagattaccccttcaaacctcaaaggtttct

SEQ ID NO: 46516 - DNA, 247 bp, Zea mays
gttgcgtctctcgcgcgttaccaagctctcaagttttctcgcgccgacggcaatggatgaggtcaccgaggccgtgaacaacctcaacatctcgggcgtaggggccgcgggcgttgccggggcggaagggcacaagaagaatcgcatccaggtctccaacactaagaagcccctcttcttctatgtcaacctcgccaagaggtacatgcagctgcacaacgaagtagtcctgtcggccctcggcatg

SEQ ID NO: 46517 - DNA, 307 bp, Zea mays
tgcggcattggtatgaccaagtcagaccttgtgaacaaccttggtaccattgcgcggtcaggcacgaaggaattcatggaggcacttgctgctggtgctgatgtgtccatgattggccagtttggtgtcggtttctactctgcctaccttgttgcagagagggttgtcgtgaccactaagcacaatgatgatgagcagtacgtgtgggagtctcaggctggtggctccttcactgtcgcacgtgatacctctggggagcaacttggcaggggtacaaagatgagcctctacctcaaggatgatcagt

SEQ ID NO: 46518 - DNA, 314 bp, Zea mays
tcggaacgcacacacagcccggtccccgatctccgatcccctcgtcgatccaagatgcagatcttcgtcaagaccctcactggaaagactatcaccctcgaggtggagtcttctgacaccattgacaacgtcaaggccaagatccaggacaaggagggctttcccccggaccagcagcggctcatccttcgcggcaagcagctcgaggacgggcgcacacttgccgactacaacatccagaaggagagcaccctccaccttgttctccgcctcaggggaggcatgcagatcttcgtcaagaccctcactggaaa

SEQ ID NO: 46519 - DNA, 310 bp, Zea mays
tatgcagatggatcaaaggctactggtgccttcatcttgacagcgagccataacccaggtggtcctacggaggactttggtatcaaatacaatatgggaaatggtggacctgcccctgaatccgttaccgacaagattttctctaatacaacgacaatctctgaatacctcatctctgaagaccttccagatgttgatatttctgttgtcggtgtcaccagcttcagtggacccgaaggcccctttgatgtggatgtctttgactctagtgtaaattacataaagttaatgaagacaatttttgacttcg

SEQ ID NO: 46520 - DNA, 309 bp, Zea mays
atgatgtgtggatcattggctttaaacatgtgtggagttgcctgtggtagactagatttgtgttatgagataggatttggtggtccatgggatgttgctgctggtgctgtaattcttcaggaagccggtggccttgtttttgacccaagcggcggagagtttgatttgatgtcgcgaagaatggcaggatcaaacagcttgctgaaggataagttcgtcaaggaactgggggatactaattgaaacaaatgttagtattattcgtggaacagattaagacaataaggttgccccgccgcatggtgatta

SEQ ID NO: 46521 - DNA, 310 bp, Zea mays
cggaaaccccaaacccaacctcatctcttttctcggcctctaccgccccctcgatcggtcggccggtcagctatgacgccgggaagctcggccgccggatccggcgtcgtcgttcctcggaacttcaggctcctagaagagcttgaacgtggagagaagggcattggagatgggacagtgagctatggaatggatgacgcagatgacatctacatgcgatcatggactggcactattattggccctcataataccgtccatgagggtcgcatctaccagctgaagttgttctgcgacaaggactaccctg

SEQ ID NO: 46522 - DNA, 225 bp, Zea mays
ggaagtgaccctgccaccgagccatcgcggacccagagagcttcagcggagggagtcggagcgcacgctcagcaccatggcccagacgcccgcattcaacaagcccaaagtagagctgcacgtccacctggatggagccatcaagccagaaaccatcttgtactatggcaagaagagaggaatcgacctcccggcagatacagtggagggactacgcaacattat

SEQ ID NO: 46523 - DNA, 306 bp, Zea mays
ctcatccccgacccccgcaccgcagcgtaaaccctagtccccggcggcgaccttgcggcctccgctgcgctctgactggtgcgcgtttagacgaggagctgcggcggccaagaccaatcgaccatggctacccgtatccagtttgagaacaactgtgaaattggtgttttctccaagctgacaaatgcttactgtctggtagcgattggagggtcagagaacttctacagtgcctttgaggctgagcttgcagatgccatccctgtggtcaagacctctattggtggcactagaataataggccga

SEQ ID NO: 46524 - DNA, 307 bp, Zea mays
ggcgcacagcacacgaacacacaccgcgcccagctccgaggtgatcttccggcggccggcgagatgagccgtggcacaggcgcgggctatgaccgccacatcaccatcttctcccccgagggacgcctgtaccaagtcgagtacgcgttcaaggcggtgaagtcggcgggtctcacgtcgatcggcgtccgcggcgcggactccgtctgcgttgttacgcagaagaaagtcccggataagttgctggatcagacgagcgtgacacacctgttcccgatcaccaagtacgtcggattgcttgccactg

SEQ ID NO: 46525 - DNA, 288 bp, Zea mays
atgcaatttcagtttgctggggcagcacaatcacttggagctggtgccattctagtaaacccttggaatattacagaagttgcagactcaatacggcatgctttaacgatgccatccgatgagagagagaaacgacacagacacaactacgcacatgtcacaactcacacggctcaagattgggctgaaacttttgtattgtgagtttctcatttccatggcccaatatcattcggtggaccaagccccttcacttataattttgtttgcaactcaagttttctggtc

SEQ ID NO: 46526 - DNA, 300 bp, Zea mays
atcgtggactccaacttccggttcgacacccaggcatacgagcgcaacggcccgctctacctcagcaccttcttcgccgtcacctacggggtcggcttcgcgtccctcaccgccacggttgtgcacgtcttcctcttccacgggagcgagatctggcagctgagcaggtcagcgttccaagagaagaaggtggacgtgcacacgaggctgatgaggaggtacaggcaggtccccgagtggtggttcatctgcatcctcgtcgccaacgtcgccgtcaacatattcgcctgcgagtactac

SEQ ID NO: 46527 - DNA, 296 bp, Zea mays
ggagagtcgtcactgacagccccgtgtacgacggccgtggcgccgacgcccgcctcgtggctcgcatacagggagtcacggtcctggtcggtaacgcagacgccttgttcaccatggtgttcgaaaccgacaggctaaagggctccacgctcgtcatcaacggaatggtcacggatgacccagacgaatgggcgatctacggcggaaccggggtgttcgccatggccaccggtgtcatgaagagaagatacttgccggcggtagcaacgacgggaactctgacgagcttgccctgg

SEQ ID NO: 46528 - DNA, 299 bp, Zea mays
gtcgcttccagccgccgccgcgtccgcctcgccaagcgcagcagccgccgcagcacatcgctctcttgatctcagccatggcggaggtggagcagcaacaggacacgccgaagctcttcaaccgctggaccttcgatgatgtccaggtgaacgacatctcgctgaacgactacctcgctgtgaacgcgacgaagcacgcgatgtacctgccgcacaccgcggggcgctactccaagaagcggttccgcaaggcgcagtgcccgatcgttgagcgccttacaaactccctcatgatgcac

SEQ ID NO: 46529 - DNA, 287 bp, Zea mays
ggaaaaccctgcccggaccttcgttgcagcgctacgagcttcgacgggccgctcgatctccacctctgaagtggctgcttgtgatctagatctgaaagctgcagtggttgacagctgagtgtgaaactgtgaatcgaagatgagcgtggtgggcttcgacctcggcaatgagagctgcatcgtggcggtcgcgcggcacgcgcatcgacgtggtcctcaacgaggagtccaagcgcgagacacccgccatcgtctgcttcggggacaagcagcggttcatcggcacc

SEQ ID NO: 46530 - DNA, 296 bp, Zea mays
ggtaaggcaagatgtacaccgcgaggaagaagatccagaaggataagggccttgagccctccgagttcgaggactccgtcgcccaggctttcttcgacctggagaacggtaaccaggagctcaagagcgacctcaaggacctttacatcaacggtgctatccagctggatgttgccgggagcaggaaggctgttgtgatccacgtcccataccgcttgcgtaaggccttcaggaagatccatgtcaggatcgtcagggagctggagaagaaattcagcggcaaggatgtggtaatt

SEQ ID NO: 46531 - DNA, 296 bp, Zea mays
gtcagccacaccgtgccaatctacgaaggttatgcccttcctcatgccatcctgcgtcttgaccttgctgggcgtgacctgactgacagcctgatgaagatcctcaccgagagaggttactccttcaccaccacggccgaacgggaaatcgtacgggacatcaaggaaaagcttgcatacgtggctcttgactatgatcaggagctggagaacgccaagagcagctcatctgtggagaagagctacgagctgcctgatggccaggtgatcaccattggggcggagaggttccgatg

SEQ ID NO: 46532 - DNA, 301 bp, Zea mays
cgaagtggcccgcccaggaaatggcgtcgatgcagagctggcgcaaggcctacggcgccatcaaggacaccacaaccgttagcctcgccaacctcaactcggacttcaaggatctggatgtggcgatcgtgaaggcgactaatcacgtggagtgcccacccaaggagcgacacctgcgaaaggttgttgctgcgacatccatcgccaggcctagggcggatgtcgcctactgcatccacgctcttgcccgccgtcttgccaagacccgcaactggattgttgctctgaaagcacttgtagt

SEQ ID NO: 46533 - DNA, 311 bp, Zea mays
  unsure (1)..(311): unsure at all n locations
cggagcacaagagccaggagagtgggaaaatgcacgcttgcggacacgacgtgcacacgacaatgcttctgggggctgccagaatactccaggatcgcaagagcgacctaatggtaactgatgcttaattaacccggtcaattccacacagnttcgtgttgtnactccacgttcccatgcgtatgccgtcgacgaggtgttcttgcttgcttcttgtgctcaccatgcanggcaccgtgaagcttgtattccagccggcagaggagggccnaggcggcgcgtactacgtgctgcaagaaggcgtccttgac

SEQ ID NO: 46534 - DNA, 304 bp, Zea mays
  unsure (1)..(304): unsure at all n locations
ctctgctcgcatttcctcccaatccatcccgcctccaaacccgaactccaagtcgccccgcatcgatggcgcccaaggccgagaagaagcccgcggcgaagaagccggcggaggaggagcccgctgccgagaaggcgccggccgggaagaganccaaggcggagaagcgtgtcccagcaggcaagtccgccggcaaggagggcggcgagggaaagaggggccggaagaagggcaagaagagcgtggagacctacaagatctacatcttcaaggtgctgaagcaggtgcacccggacatcggcat

SEQ ID NO: 46535 - DNA, 300 bp, Zea mays
cattagagggagcgccctgcccaagcaaagagaaaccgcggcgcgagaagagggaggaagggcagacgggcgagcaggatgagagagatcatcagcatccacatcggccaggccgggatccaggtcggcaacgcctgctgggagctctactgcctcgagcacggcatcgagcccgatggcaccatgcccagtgataccacggttggcgtcgcacatgatgccttcaacacgttcttcagcgagaccggttctggcaagcatgtgccgagggccatcttcgtcgaccttgagcccactgtc

SEQ ID NO: 46536 - DNA, 296 bp, Zea mays
ctgaaatctttgggaagaacccaagcaaaggagtcaatccagatgaagctgtggccatgggtgctgcacttcagggtggcattctccgtggagatgttaaggagcttcttcttcttgatgttactcccctgtcactaggtattgagacgctcggtggtatcttcaccagattgatcaacagaaacactacaatccccacaaagaaaagtcaggtgttctcaactgctgctgacaaccagacccaagtgggtatccgggtgttgcaaggtgagcgtgaaatggctacagacaacaag

SEQ ID NO: 46537 - DNA, 263 bp, Zea mays
ctggaagggttttgattcgcatgaaggacaggttttcaatgctgttcagccgagatgctgactctatgcccagggtgtggacaggaaaggaggacataaaagctataactaaaaccgctcgctcagcttccatgaagttgctttctacaatggctgcaattcggttggaggaggatggtgataacattgagaacactctttccgttgctcttgttgacacctcaaaacctgggactactgataggagtatccaattgacggat

SEQ ID NO: 46538 - DNA, 266 bp, Zea mays
cacggagattccttgcccccttttcccttccccatcgtcgaaaccctagccccgcctcgccgccggcacgccggatcggtcggcgccatgtccaaggccagggtctacgccgacgtcaacgtgctgcgccccaaggagtactgggattacgaggcgctcaccgttcaatggggtgagcaggatgactatgaagttgtcaggaaggtcgggacaggaaaatacagtgaagtatttgagggtattaatgttaacaataatgagaaatg

SEQ ID NO: 46539 - DNA, 293 bp, Zea mays
gacgagtccaaggaggggatcgatggcgagttccaggagaagaaggctgatctccagcccaaggtcgtcgagatctacgagtctgcccctgcaccactcaaggtcctgatcaaggagaggagcaaggtgtccgggatcaagaagaactccgccgcaatcaccaagttcttcgaggagctggccaagatcgaattccctggagccaagcaagtgagcgacggcatctccaaggccggcccggccctgctgtccggccccatcttcgccacgttcgagaaggtctccacgctgct

SEQ ID NO: 46540 - DNA, 305 bp, Zea mays
tgtggccgtgtggttccagaaccgccgcgcgcgttggaagactaagcagctcgagaccgactatgaccgcctcaaggctgcctacaacgcgctcgccgctgaccaccagggcctcctggccgacaacgatagcctccgggcacaggtgatctgcctaacagagaagctgcaaggcaaggagacatccctgtcggcaaccatcgctgcccaagaggtcgaccagccaaacgaacacaccacaggcactgagaaattgctggcgcacagctcaaggacgacctgcacagcagctgcggttgcactga

SEQ ID NO: 46541 - DNA, 294 bp, Zea mays
cactggcaggcaaccatcatgggtcctcctgatagtccatatgctggaggtgttttcttagtgaacattcatttccccccggactaccctttcaagcctccaaaggttagcatcactttattatagagttaaattttcttttcgtattttgttttctttattggaagatgaaaagtgttgttctgtcagtctacgaatgggtttctagctgagttggttaggtggctctattagtactcctgaagtcttgggtttgactcttcatgagagtgagtttaggctggaggtacaaaa

SEQ ID NO: 46542 - DNA, 299 bp, Zea mays
aggaggagatggcggtcacgatcacctgggtgaaggcgaggcagatcttcgacagccgcggcaaccccaccgtcgaggtggacgtgggcctcagcgacggcagctacgcgaggggggccgtacccagcggcgcatccactggaatatatgaggccttggagttgagggatggaggatctgattatcttggcaagggtgttcttaaggctgtcagcaacgtaaacaacattattggaccagcgattgttggaaaggaccccactgagcaggttgagattgacaacttcatggtccaacag

SEQ ID NO: 46543 - DNA, 294 bp, Zea mays
aacgtaggctggcgctgcagatcaaaaggctctcgcctcggcttggcagtcggcactccctctccaccgcgctgcaggggcgacgcaaggccgagcgctcctcgatccagatccaaggtaggagatggctctcacgagaatgcgcctcgccggcctcgcggtcatgggacagaaccttgccctcaacatcgcggagaaagggttccccatctcggtctacaacaggacaacctccaaggttgatgagaccgtgcagcgtgccaaggtcgaaggaaacctcccagtgtttggttt

SEQ ID NO: 46544 - DNA, 246 bp, Zea mays
ctgaggctatgaaaaaggttgggcggcagggagtggtcacacttgaagaaggaaagagtgctgaaaataacctctattctgttgagggaatgcagtttgaccgtggctatatttctccctactttgtgactgacagtgaaaaaatgacagtcgaatatgagaactgcaagcttctccttgtggacaagaaaattaacaatgccagagatcttatcactatcctggaggatgctattagaagtggat

SEQ ID NO: 46545 - DNA, 250 bp, Zea mays
  unsure (1)..(250): unsure at all n locations
ccgnaacagagcgaggcgacgccgaggcacctcatctccggcgaagggaaatggcgaccgttccaggggatctgatctggcagattgtgaggaagaacaactccttcctggtgaagcagtttggcaacggcaatgccaaggtgcagttcaccaaggagcccaacaacctctacaatgtacactcctacaagtactctggcttagcaaacaagaaaactgtaacgatccagccagctgctgaaaaggactc

SEQ ID NO: 46546 - DNA, 298 bp, Zea mays
agcaggggggagaggggaggggaggggaggcattcgtgctccttttttccttcctactgtacgagtacaggactgcgctgcctgtctctcctcgcctgctgccgacttcgcggcctcgtcgccctgccatgtccaccatggacgaaggctacgggcctacttgggacagcgacgacgaatacgacaacttcatacgcaagatgaacccgccaaggatcgtcatcgacaacgagtcctcggcggaggccacaattgtaagggtagatagcgcgaatgaatacgggatattgctggaagt

SEQ ID NO: 46547 - DNA, 294 bp, Zea mays
cgcacacagccaaaccatcctcctctccgccgcccgccgcagcagcacccaccgggcaagatgaagacgatcctggcgtcggagacgatggacatcccggagggcgtcatggtcacggtggccgccaagctggtcacggtggagggccccccgcggcaagctcacccgcaacttcaagcacctcaacctcgacttccagctgcaggaggccggccgcaagctcaaggtggacgcctggttcggcacccgccgcaccatggccgccatccgcaccgccatctcccacgtccagaa

SEQ ID NO: 46548 - DNA, 291 bp, Zea mays
atctctctacctctacctaccggagcagggagcacgccgcacgagccctttccgccgccgccaaaatggtgaacgttcctaagaccaagaagacctactgcaagaacaaggagtgcaagaagcacactctccacaaggttactcagtacaagaagggtaaggatagcctgtctgctcagggaaagcgccgttatgaccgcaagcagtcaggatatggtggccagaccaagcctgtcttccacaagaaggccaagaccaccaagaaaatcgtgttgaagctgcagtgccaga

SEQ ID NO: 46549 - DNA, 276 bp, Zea mays
ctcgatgctggcgatcaatctactgcatgcctaagcgaccagctttcaagggatctgctcctatcaacctttcggatcgtttgaatcaagtgcttcggtgggctcttggttccattgaaattcttttcagcaggcattgtcccatatggtatggctatggaggtcggcttaaattcctggagagatttgcttatatcagcacaacaatttatccactcacatcaatcccgctcctcctgtactgcatattgccagcagtgtgtcttctcactggga

SEQ ID NO: 46550 - DNA, 282 bp, Zea mays
gttggagcaagcattgcagttctggaagcaagagtttatcaaaggaaagatggacccagacaagtttgataaaggttactcttacaatatccgacatagctttggaaaggaaggcaagaggacagactatacgccattcagttgcatgaagattatcctgaccaacccaccaagccagggggatttccatgggtgcccattccgtcacagtgatgcagagctgctgaagcagaagatgcagacctacaagatccctgcctcggggatcagccagattttgga

SEQ ID NO: 46551 - DNA, 241 bp, Zea mays
tctcacaacccagtcgctcaaaaccctagagctctcgcctgctcgcctccgccgccggagcgagctccccatcttcatccgtcaaccatggcgacccagatcagcaagaagaagaagttcgtcagcgacggtgttttctacgccgagctcaatgagatgctgacgcgggagctggcggaggatggctactctggcgtggaggtgcgcgtcacgccgatgcgcacggagatcatcatccgcg

SEQ ID NO: 46552 - DNA, 229 bp, Zea mays
gttcgatggtgccctcaatgtggatgtgaacgagttccagaccaacctggttccttacccgaggatccacttcatgctctcctcctacgcaccggtgatctcttctgcgaaggccttccacgagcagctgtctgtggcggagatcaccagcagcgcgttcgagccggcttccatgatggtcaagtgcgacccacggcacggcaagtacatggcttgctgcctgatgtac

SEQ ID NO: 46553 - DNA, 287 bp, Zea mays
atccaggtcgcggcgctgcacggcgtctccgcgaggcccggggagcccggcgagaccggggtgtgggtcggggaccgcaaaatcggcgccatcggggtcaggatctcctccgggttcacgtggcacggtctggcatttaacattgaccccgacctggagtacttcgagcacataatgccatgcggcatcgccggcaagggggtgacgtcgctgcggcgggaggtgggggacggagcggactcccggccgacggggtcatccacgaccagctcgtggggtgcttggcg

SEQ ID NO: 46554 - DNA, 188 bp, Zea mays
ccggcccaaaatcgcctcatcgaccacgcccccttccaggctcccgtctccatgggtctcctctcaaacaggattgggagggagagcctcaaggcgggggatcatatctactcctggagggcggcgtgggtctacgcgcatcacggaatatatgtgggcgatgataaggtgatccatttcacaagagg

SEQ ID NO: 46555 - DNA, 281 bp, Zea mays
  unsure (1)..(281): unsure at all n locations
gcncgatctcgcggtgctggtagcggtgaaaatatctgagatcgagtgaagctagcttttcatcgatatggcgcttgtactgcatgctggcagtagtaacaaaaatgcattcaaagcactaattgccgcggattacagcggcatcaaggttgagttggtaaaagactttcaaatgggggtttccaacaaaacaccagagttcctcaagatgaaccctattgggaaggttcctgtcctggagacaccgatggtcctgtctttgagagcatgcattgcaagat

SEQ ID NO: 46556 - DNA, 246 bp, Zea mays
gaaagatcgttcctgaaatacaaagtgatgggcaggtaaaggttgatatgggcgagcctatcctttctggactagacatccccacaaaactgctagctaccaagaacaaagctgttgttcaagctgaattggcagttgagggcttaacatggcatgtcacatgtgttagcatgggaaaccctcactgtgtcacatttggtgcaaatgagttaaaggtattgcaggtcgacgatttaaaacttagcg

SEQ ID NO: 46557 - DNA, 247 bp, Zea mays
gtactgatgctcttgatgctgctggcaacacaactgctgctattggaaaggggtttgccattggttcagctgctcttgtgtccctggcgctttttggtgcctttgtcagcagagctggagtgaaggtcgtcgacgtcctctcccccaaggttttcattggtttgattgttggagccatgcttccgtactggttctctgccatgaccatgaagagtgttggaagcgctgccctgaagatggtggagga

SEQ ID NO: 46558 - DNA, 295 bp, Zea mays
ggcggcggcaccggcaggcggcggccctcgggcattgtcccagcgggagcaggacatccagatgatgctcgccgccgatgtccacctcggcaccaagaactgcgacttccaggtggagcgctacgtgtacaagcgccgcactgatggtatctacattattaaccttggaaagacctgggacaagcttcagttggccgccagggtcatcgttgccattgagaatccgcagacattatcgtgcagtctgctaggccctatggccagagggctgtcctcaagtttgcgcagtacactg

SEQ ID NO: 46559 - DNA, 176 bp, Zea mays
gctcccagcactgctgcacagaatctaggctcagagcttgagatctcaagatgggagatgaggagaagcgcaacagggccatcacggcccggagacagcacctgaagagtgtgatgctccagatcgcggccacagagctggagaaagaggaaagccgccgcgaatccgagaagcag

SEQ ID NO: 46560 - DNA, 231 bp, Zea mays
tggagacaatcacatgagaatcatccaggaggacatcatcgagacagtcaacaaccatcccagtgctgggtggacagcctcacgtaatccttacttttcaaactataccattgcgcaatttaagcacatacttggagtgaaaccagcaccacagaatgcactaagcaatgttcctgtcaaaacttattcaagatcactggaacttccaaaagagtttgacgctagatctgc

SEQ ID NO: 46561 - DNA, 228 bp, Zea mays
cctgcgtcccctgcccaccatggccacccaccgcctagtaatggtccgccacggtgagagctcatggaaccaagagaaccgtttctgtggctggtttgatgcagaactgagtgagaagggggcagaggaggccaagcggggggccactgccatcaaagatgccaagatagagtttgacatctgctacacgtcggtgctgaagcgggctatccgcaccctttggaccat

SEQ ID NO: 46562 - DNA, 176 bp, Zea mays
gggaagcaaagtcaaatacgagcttgacaagaaaactggactgattaaggttgatcgagtcctttactcatcagttgtataccctcacaattatggtttcattccaaggactctttgtgaagacaatgacccaatggatgtgttggtcctgatgcaggagcctgttgttcctggtt

SEQ ID NO: 46563 - DNA, 252 bp, Zea mays
catcgctggaatgcagccgccaaaatgtagtttaatcccttcgtgacttctgaccgatgcaagaaccgcaaacggcatttcaatgcaccatctcacattcggaggaagatcatgccttctccgctttccaaagaactgagacacaagtataatgttcggtctatgcccattcgaaaggacgacgaagttcaggttgttcgaggacacaacacaggccagcagattggcaaagtggtccaagtgtacaggaag

SEQ ID NO: 46564 - DNA, 189 bp, Zea mays
gcttcgaagcagcaaaagacgaactctaggtcacaagtgtttcctgcaatttatctgcttcatccatgatcctgctggtgctggactactacaattctcagcactagttgtaataaagccagtgcgcttttcatgtataattctgtattgtggctcgcgaaaataaaatttggcaacggtttatgaact

SEQ ID NO: 46565 - DNA, 280 bp, Zea mays
aatagatcttgatatggagaatgttgataaatcaagtattaagaagaagaaaagaaaactagaactgaataaggccattttggcatgatgatcggttcaaagaaatgtttgagaataaggattttgaaattgatgaagaatcaaaagaatacctcgcacttcatcctcaggcagccacaaaggagcctcgcctgattgaagaacattttgatagtgttagcgaggacgatcaacaatctgatggtaacatatctgacactctagcggaatctgacagtga

SEQ ID NO: 46566 - DNA, 266 bp, Zea mays
gggatagcgatggaaaatccaggtgttttggatttgtcaattttgaaaatgcagatgctgctgctcaggctgttcaagagttgaatggcaagatattcaatgataaggaactgtatgttggaagagcacagaagaagtctgaaagagagatggagttgaaggagaaatttgaaaagaatgttcaagaggtagctgagaagttccaaaacacaaacttgtatttgaagaacttagagggagacattgatgatgagaaattgcgtgaa

SEQ ID NO: 46567 - DNA, 237 bp, Zea mays
agctcagtctcttccactctcccttgacctgtctccttcacctgctgattgctgtgccgctccgctccgctccggtggcatctgcatctgcatctccatccctcgatctgtcttctctcagggtggaataagcgtgacaatggaggctccacccgtggcgctgttcgacaccctcaaggcagccaaaccgttcttcttgttggctggtcccaacgtgattgaatcggaggagcacgt

SEQ ID NO: 46568 - DNA, 235 bp, Zea mays
cctgctcctaccgcagctctccctcaggtttagtgttcgcaatggcggccttcaacaagcttggtggccttctaaggcacagtgctctggtgagcggtatcactggtggctcttctcctgcagtgttcaatgctgcacggctcatgtctaccaagctatttattggtggtcttgactggggtgttgatgacgtgaaactaagagaagcatttagcagctttggagaggttactga

SEQ ID NO: 46569 - DNA, 197 bp, Zea mays
taggctgtagatctttttagttcagcttctgaagaaatacaaggctaaattgactacaggcatacttacctagatttctcaaaacttgaagtgaatgtccgtacaagtacaggaagtcagcaagttgtgaaaacatgcccagcagccatggggtttgcctttgctgctggaaccacagatggtcctggagcttttga

SEQ ID NO: 46570 - DNA, 230 bp, Zea mays
caagaacctcaagcttggcatccacgaggactccacgaacaggaccaagattgctgagctcctgaggtaccactcgaccaagagcggggatgagctgaccagcctcaaggattatgtgaccaggatgaaggagggccagaacgacatcttctacatcactggtgagagcaagaaggctgtggagaactccccgttccttgagacgctgaagaagaggtgctatgaggtcc

SEQ ID NO: 46571 - DNA, 199 bp, Zea mays
ctcccggcggcggcgcaggagcagcaacacgcgaagatggtgaagttcctcaagcccggcaaggccgtgatcctactgcacggccggttcgccggcggaaggcggtgatcgtgcgcgtgttcgacgagcgcaccgcgaccgcccctacggccactgcctcgtcgccgacctcgccaagtacgccaagatggtggtccgc

SEQ ID NO: 46572 - DNA, 291 bp, Zea mays
actggtacaagggtccaaccctgcttgaggctcttgaccagatcaccgagcccaagaggccttcagacaagcccctgcgtctgcccctccaggatgtgtacaagattggtggtattggaactgttccggttggtcgtgtggagactggtgtcatcaagcctggaatggttgtcaccttcggtccaactggcctgaccactgaggtgaagtctgttgagatgcaccacgaggctctccaggaggcccttcctggtgacaacgttggcttcaatgtgaagaacgttgctgtga

SEQ ID NO: 46573 - DNA, 198 bp, Zea mays
gcgccgcggccggccccccggctccggcaagaagaagcagttcgaggccctgggttcctggggcatcgctttcacccctcacatcctcgccgtcaaggcaggcgaggatgttgcttcaaaaataatgacattctcacagcaaggccctcgcacagtctgcatcctctcggcgaatggcgcgattagcaacgttacgct

SEQ ID NO: 46574 - DNA, 274 bp, Zea mays
gctatggccactgctctaggatttcgctgcctttaccgaacgcgacctgcgacgctcggtcggtacgtcgataggctgtggaggagcccgagtcgggggcaccggctttctccggctgacgatgagttataccagcggacgcgtatctctttgctgcaaaacgagttccctcaggccgtatacatcgacagctacaatagcagaggtttcactatcaacggaaaccgcgtgtttggaccttgtgcgctgctcccacagaccgtggtccagtgga

SEQ ID NO: 46575 - DNA, 65 bp, Zea mays
gcaatttcttggcacaagtttatgacgtgatctagtgagcattatgctactcagagtaccaaata

SEQ ID NO: 46576 - DNA, 250 bp, Zea mays
cattcctcgcgcggcgaccacccgattcgaagcgtgcggagagaccgaagaagcgggagagatggctcgtaccaagcagactgctcgcaagtccacgggagggaaggctcccaggaagcagcttgccaccaaggctgcccgtaagtctgcccccaccactggtggagtgaagaagcctcaccgctaccgccctggaactgttgccctccgtgagatccgcaagtatcagaagagcactgagctgctgatc

SEQ ID NO: 46577 - DNA, 218 bp, Zea mays
gttttcttaccttacaagctttttcttccgccgccgcctcagccctcgccccgcgctgctgtactctctcacctccttcgccgttgtctaccagatcatcccatggcgtcggagaagaagcagtcgaacccgatgcgggagatgaaggtccagaagctcgtgctcaacatctccgtcggcgagagcggtgatcgcctcacccgcgccgcaaaggtact

SEQ ID NO: 46578 - DNA, 241 bp, Zea mays
ttgagatcaaatcctctccaaattccacacaacatattattttttagagagagtgatttgcttgtgttctttcgagctcttgcgcttggattgctttcttctttcttgatcctttctttgcaatcaaactcacttgtaattgaggcaagagacaccaaacttgtggtggtccttgtgggaactttgtgttccaagtgattgagaagagaaagctcactcgatccgtggatcgtttgagaga

SEQ ID NO: 46579 - DNA, 265 bp, Zea mays
ccctcgggcagctcatcggcgacgacaccttcgcgctgccgttctggaactgggatacgccggccggcatggtggtgccgccactcttcaaggactccatgggcaacccgctgtacgaccccaacaggaacccgtcgaacgtcgacgcgctggtggacttagactacctcaacgacaggaatgcggagcccatccctttcaagggcccacgggacgaaaagtacaaggaacttgtgaacaagaacctgtgcaccgtatacaccca

SEQ ID NO: 46580 - DNA, 135 bp, Zea mays
agaaggttggatacaaccctgataagatcaccttcaaaaccagagcttggcacgactgcactcttatcagggttgtatccaaccttcttcaggtaggcagcggcttccttcctgttgaaggttggatactacctg

SEQ ID NO: 46581 - DNA, 263 bp, Zea mays
gaagaagataaagctcacaggcacaccatgcaagatatttaagaagactgcactaatcaagggaatgttcacatccgatttagaggttgctaggtttgaaggtgctgccattcggactgtaagtggaatccgaggacaggttaaaaaggcagcaaagattgagccaggagatatgttgaagagaaaaggggaaaatacagaaggaatcgcaagatgtacatttgaggacagaattcttatgagtgacattgttttcctgcgtg

SEQ ID NO: 46582 - DNA, 219 bp, Zea mays
caaagacgggctcatccacaaggaggagttccagctcgccttgttcaggaacagcaggagagcgaacctctttgcagacagggtcttcgatctgttcgatctcaagcggaacggagtcatcgatttcgaggagttcgtgcggtcgctcagtgtgttccaccctaaagcagatacgtcggagaagacggcgttcgctttcaagctgtatgatctgagggg

SEQ ID NO: 46583 - DNA, 183 bp, Zea mays
gtagttcttcagttaggcaggagggcacaggaggaggaagatggcgtcgaagaggatccagaaggagctcaaggatcttcagaaggaccctcccacctcgtgcagtgcaggtcctgttggtgaagatatattccactggcaggcaacaataatgggtccatctgatagcccatattctggtgg

SEQ ID NO: 46584 - DNA, 214 bp, Zea mays
tgccgccgccgccgccgccgccgcgatgtctcgccgctatgacagccgcacgacgatcttctcgccggaggggcgtctctaccaggtggagtacgcgatggaagcgatcggcaacgccgggtcagccctcgggatcctagcggccgacggcgtggtcctcgtcggcgagaagaaggtgacctcaaagctcctcaagacctggtgctccgccgag

SEQ ID NO: 46585 - DNA, 219 bp, Zea mays
gtagccgcctcgctttctcctcttccgccccaccccggtgaggcgctgatccatcgcctcggacagcggctccagaacctccgcgttgcagaaacacagtagcgagaactattcggtggggccgaagatggtgtcgctgaaggtgccaaagcgcctcgccgcaagcgttctcaagtgtgggaaaggcaaagtgtggcttgaccccaatgaagttagtga

SEQ ID NO: 46586 - DNA, 203 bp, Zea mays
ctcgagctgaattcggctcgaggtccgccgtcgtgcgctcgctacccctctccctcgctgcctttgccggcgaagactgcgcccagtcgcccaccaggatgaagtttgttgctgcctacctgcttgctgtcctcgctgggaactccagcccctctgccgaggacttgacagccattctggagtcagttggctgtgaagttgac

SEQ ID NO: 46587 - DNA, 207 bp, Zea mays
gtctttctgtgagggtgtttcgacgcgctgggcggtttgttccttcatcgcattcgttaacaggtcaaaatgcaaatcttcgtgaagaccctgaccggcaagaccatcaccctagaggtggagcccagtgacaccatcgagaacgtgaaggccatgatccaggataaagagggcatcccccctgaccagcagaggctcatctttgcc

SEQ ID NO: 46588 - DNA, 294 bp, Zea mays
ggcgaggaaggagggagagagcacgggggcttgatcgaagatggatgccggagcaaaggtggtgaagaaggccgcggcggggcgtcgcggcgggggcggccccaagaagaagccggtctctcgctccgtgaaggccggcctccagttccccgtaggccgtatcggccgctacctcaagcagggtcgctactcccagcgtgtcggcaccggcgcccccgtctacctcgctgccgtcctcgagtactcgccgccgagctcctcagttggcggggaaccatcgcggacaacagaaga

SEQ ID NO: 46589 - DNA, 297 bp, Zea mays
ctcgagccgcgccgcctaggagcattcacgttggtggcgggcggtggctcggttcctcagctccaccgcacctccaagaatccacctccacgactgagctgacggctcggcggcgccatggcggttcaccggctccaaccttccctctctggcctacagtgctccaccgcccggtcgccagtgctcctccatgggccacggctgacgggtgcacgcaccggcaggagaggtggatttggtggacctagattcgatgtgcagagagcgacttggaggtggctgacatcttcaagcact

SEQ ID NO: 46590 - DNA, 284 bp, Zea mays
gggctcgtagggttggtgaggtctccggtctctgcaactcttccacagattggatccaggttgttccttacgtggggtgtcttgtggagttttcctgagacccagtcacaccttcttgttactaccctggtcataagctggtctatcactgagatcatcagatactctttctttggaacgaaggaggcatttggctttgcgccttcctggttattatggcttaggtacagcacctttatgttgttgtatcctactggtatctctagtgaagttggtctgatcta

SEQ ID NO: 46591 - DNA, 298 bp, Zea mays
gtgctgtcatccaaggtgtacgacgtggcaatcgagtcaccgctgcagctcgcctccaagctctcccaccgcctcggggtcaacctctggatcaagcgcgaggacctgcagccggtgttctcattcaaattgcggggagcatacaacatgatggcaaagctctcccgtgagcagttagagaggggcgtcatctgctcctctgctggaaaccatgcccagggcgttgctctttctgctcagagactgggttgtgatgctgtcatcgtcatgcccgtgacgacaccagaaatcaagtgga

SEQ ID NO: 46592 - DNA, 299 bp, Zea mays
gtctgcagcccccaactacccccagcctcggaaggaaccttccagaagcgcaagactctaaaggccgtcgccttcccattcttcctcgccgcgggggtcgcctgagatcacataaacaatggtgaaggctgttgctgtgcttggtagcagcgatggtgtcaagggcaccatctttttcacccaagagggagatggccctaccgctgtcaccggaagtgtctctggcctcaagcctggcctccatgggttccatgtacatgcacttggtgacaccaccaatggatgcatgtcaactggac

SEQ ID NO: 46593 - DNA, 297 bp, Zea mays
gtccaagtatacccagagaaggggacagttgccttttctgctggtctgcatggatgggcctttacactcactaactttgcgaagatgtatgcatctaagtttggagttgatgaatctaagatgatggagaggctatggggtgagaatttctttgaccctgccacaaagaaatggaccaccaagaacacaggttctcctacctgcaagagcggatttgttcagttctgctacgagccaatcaagcaaatcatcaaaacctgcatgaatgcaccaaaggagaaatttgtggccctgttg

SEQ ID NO: 46594 - DNA, 287 bp, Zea mays
gtctccagttgcacccagacaagaacaagtcggttggtgcagaggttgccttcagacttatctcggaggcatggagtgtattgtctgacaagagtagaaagatgctttatgatcagaagaggagagaccattgtgtggcgagtgtgtccaacggtttgtatgcttatgattatgatacaaagctcagtaagcgagcacgaaaaaatgccgttgcctctgcctcagcagctgttgaggctactactcgtcttgcaggggctgacacatctggacatcatgcaacagct

SEQ ID NO: 46595 - DNA, 290 bp, Zea mays
  unsure (1)..(290): unsure at all n locations
gtgtaaagagtgcgaagaagcagtagcaaaaggattccattctcgtgttcttggagtggtccatcgatcgagctccgtgagagagatagcaagcaatggcgacagcagggaaggtgatcaagtgcagagccgccgtggcgtgggaggccggcaagccgctgtccatcgaggaggtggaggtggcgccgccgcagccatggaggtgcgtatcaagatcctctacaccgcgctctgccacaccgacgtctacttctgggaggccaaggggcanaccccggtgttcccgagga

SEQ ID NO: 46596 - DNA, 291 bp, Zea mays
gtgagcgagctgcagtaggcagcggcgcgggcgaggagcagaccagcacccagcagccctcgtcggggggcggcactgcagcttcaccagccgccgcctttccccgtctcctctgcctctgcctctccccctaacccccttccatttctccaccccaccccgctcccgcttccgcttcctcgccacttcgttcgttccgcacccgcagccgcggctgcgttcgcattgggggcacgcaatggagcagtacgagaaggtggagaagatcggggagggcacgtacggggtggt

SEQ ID NO: 46597 - DNA, 292 bp, Zea mays
cggctcgagcccgtcgcatcccatcccactaccacgcatctcgtcgtccgccgattcgatccagttcttccaacccaggggctgtgatggcgacgaagaggagcgtgggcaccctcggcgaggcggatctgaaggggaagaaggtgttcgtgcgcgccgacctcaacgtccctctcgacgacgcccagaagatcaccgacgacacccgcatccgcgcctccgtccccaccatcaagttcctcctcgagaagggcgccaaggtcatcctcgccagccacctgggtcgtccaaa

SEQ ID NO: 46598 - DNA, 194 bp, Zea mays
gccgcggaagccagcacctcaaagccatggcgtaagtggaccacctcgctgccgagagggccaccgcgcgcttcgacgtcgaggagatgaaggttgcgtgggccggctcacgccacgccgtccacgtcgccgaccgcatggcgcgcctcgtcgcatccgaccctgtcttccgcaaggataacaggaccatgctc

SEQ ID NO: 46599 - DNA, 279 bp, Zea mays
ctaatggagtcgaaaggtggcaagaagtctagtagtagtagtagtaatttcatgtacgaagctccccttggctacaagatcgaggacgttcgcccagccggaggaatcaagaagttccagactgctgcttattccaactgcgtccgccagccatcctgatatcgcctcacatgcaattcgcggtagagtaggattttaattcagttttcctcttgtgtcggtagttttccgttggctctggctgccttcctctgcttctgagattccaacttgtcttgc

SEQ ID NO: 46600 - DNA, 286 bp, Zea mays
tgaactaaaggaagaagttcaagaagcaccaagagtgaaaatgttgcattgcccaagcaaggcaatggacattgagaacgagatccaagttctgtgtgatcaactggctaaaaaatcttcagattctcttcgccttttgaaagagttggagctgcatcgaagttacggggaaaatgacatgcccttgtatgaactaaagggtctagaaactttaggctcaacgttgcacatagttgttcacgactgtgcctctgtagatttctggaacagttcaatccagtggttt

SEQ ID NO: 46601 - DNA, 278 bp, Zea mays
gcagcagcgagtccgtacgagggatatatacctgcacaccccaaggcatttggaagaacgaagaggatggagagaaaatgccccggtgtctgccagtatgtgggaagcctgtcaaccccgtgacacagaagcagcgcatcatcggagggctgaaagccaatccgggcaacttcccctggcgagcattcaccaatatccacgggcgagggggcggggccctgcttggagaccgctggatcctcacggcagcccacaccatctaccctaaggaacacaac

SEQ ID NO: 46602 - DNA, 283 bp, Zea mays
gttggcttctcctccccctccggttcgggttcgggttcgtgaggttctccggggttcggtttcgtgggtgggcggatcgagatggcggcgtcggatgttgagtaccgctgcttcgtcggcggcctcgcctgggccacggacgaccactccctccacaacgccttcagcacctacggcgaggtcctcgagtccaagatcatcctcgatcgggagacgcagaggtcccgcggcttcggcttcgtcaccttctccacggaggaggcgatgcggaacgccatcgagg

SEQ ID NO: 46603 - DNA, 287 bp, Zea mays
cgtgatgatcggcgacggtaagtcccgcttcaccatcagcgggcagcccatcttccacttcgtcgggacgtccaccttcagcgagtacaccgtcatccacgtcggctgcctggccaagatcaaccccgaggcgcctctcgacaaagtctgcatcctcagctgtggtatctcgaccggccttggcgcgacactgaatgtggcgaaaccagccaagggctcgacggtggcgattttcgggcttggggctgtaggcttgctgctatggaaggtgctagactggctggtgc

SEQ ID NO: 46604 - DNA, 134 bp, Zea mays
ctccttttgtcctctttagaagccaccatggagctcagtgatggggagtggcagatggtgctgaacatctgggggaaagtgtagggcgaccttgctggccatggacaggaagtcctcatcagtctatttaaggc

SEQ ID NO: 46605 - DNA, 297 bp, Zea mays
gctgaatgaaagagaccactcacgctgctgctgtgtcaggtcagcgacgagacttttgctccagctgccggggaccatccaaaaccagccattatagatcaaatcaagtagagttcaagtgctaggaaataattcattgcatggtgtatctttgccgtgatccatcccttcgctgagcacatggttgcatacgtcctgttcgccatccccatgctgtcgactctctacatggggaacgcctccgtcctgggcatcgtgctctacatcgcctacatcgacttcatgaacaactggggc

SEQ ID NO: 46606 - DNA, 285 bp, Zea mays
ctggggcgatgatggatacttcaagatcataaggggcagaaatgaatgtggcatcgaggagggcgttgttgctggaatgccatccacaaagaatatggttccaaacttcggcggtgccgttggaagagctatagtttaatggttacgtttgcatggcctcaaatgctgttggaattagctaaagtaattttaaaatgcaattgttaaagggccacgatggtgtatgtattttgtacactagctcatttcaaaggtcgttatgttgctggtgccacatcactttgg

SEQ ID NO: 46607 - DNA, 291 bp, Zea mays
  unsure (1)..(291): unsure at all n locations
cgcagatntcaacctcaggctcaaggagactgtggcgagcctccggaagacgcaccctgatgccgcgttcacctacgtcgacgtctacaccgccaacgttaagctcatcagccaggccaagaagctcggcttcgacgaccctctgctgacctgctgcgggtacggcggcggccggtacaacttagacctgagcgtcggctgcggcgggaagaagcaggtgaacgggacgtcggtggtggtggggaagtcgtgcgagataccctccaagagggtgagctgggacggcgtgca

SEQ ID NO: 46608 - DNA, 204 bp, Zea mays
ggaaaataagactaaagaaattgttagattaaatggtgtgtatcagaggatccttaccagtgccggtgtgacaatgattgaaggggcaggcagtctagttgatgctcatactgttgaagttagccagcctgatggttcaaagcaaaggtatacagcgacgacattttgatcgcgactggtagccgtgctcaacgtgtcaacata

SEQ ID NO: 46609 - DNA, 273 bp, Zea mays
  unsure (1)..(273): unsure at all n locations
cctctcgtcgccgtcctctcccgttcgcaacgccacgctccccaccgccgaaatggccccgaagcgaggtggcagggcaccggtgccggccaagaagaagacggataaagtgacgaaccctctgttcgagaaaaggccgaagcagttcggcatcggcggcgcgttgcctcccaagaaggacctgcaccgattcgtcaagtggcccaaggtcgtgcgcatccagcgccacgtncgcatcctcaagcagcgcctcaaggtgcctccggcgctcaa

SEQ ID NO: 46610 - DNA, 290 bp, Zea mays
tgttgattgccaatgggagggaatgtcctgagaagacagttctgaaggatgggctctcattggagattagaagagctctagattcttgcgtttgtaacgccgtgccagtactcatatcaaacttgaggttgcagataccggtttcaaaactggagattactctgggctacttgattgacacaatgtcgtttgttgacgccctgccttctctgcgatcgaggcagtggcaggctgtggttctggtaatgcttgacgcgctctctgttcaccagcttcccgcccttgctcca

SEQ ID NO: 46611 - DNA, 220 bp, Zea mays
cctaacctgtcccgggtgcatcagtgctctcggctagcccggtctacctactcttcaccgctcgcccgccggcccactccccaccgcagccatggacgccatcaagaagaagatgcagatgctgaaactggacaaggagaatgccatcgaccgcgcagagcaggccgatgccgacaagatgcaagctgaagaccgatgcaagctactggaggaagagcag

SEQ ID NO: 46612 - DNA, 272 bp, Zea mays
ctcagccgcgtcgcaccgcatcgcattctacgattcgaagctctctctgctcgcagccatggcgaagaattacccaaccgtgagctccgagtacagcgaggccgtcgagaaggccaggcgcagctccgcgccctcatcgccgagaagagctgcgcgcccctcatgctccgcctcgcgtggcactccgcggggacgttcgacgtgtcgtcgaggaccggcggtcccttcggtactatgaagtgtccggcggaactggctcacggcgcaaacgc

SEQ ID NO: 46613 - DNA, 290 bp, Zea mays
tcagcttttccatcacaggattatccggtgcggtggtcctgttgaggatgatatggccaacatcattgtagcacagctgctctacctggacgctattgatcccactaaggatatccttatgtatgtgaattcaccaggagggtcagtgacagctggaatggctatatttgatacaatgaagcacatcaggcctgatgtatccactgtttgtatcggactagctgctagtatgggagcttttctacttagtgctgggaccataggaaagcgatacagcttaccatactcga

SEQ ID NO: 46614 - DNA, 254 bp, Zea mays
  unsure (1)..(254): unsure at all n locations
caactcctgagcactttctcctcgtccccgacaagccaatcgaagccgagatacggccatggactccaccggcaccggagcagggggtaaggggaagaagggagcggccgggcgcaaggtcggcgggccaaggaagaagtcggtgtcgaggtccgtgaaggccgggctccagttccccgtcggccgcatcgggcgctacttgaagaagggccgctacgcgcagctgtncggcaccggcgcccccgtctacctcg

SEQ ID NO: 46615 - DNA, 287 bp, Zea mays
gctgacagcaaagcaaagcttgagaggcgtttctcaaaaacgcgccgtcgccgtttatgtccccctttttctttgagaaaattcgcccgcgagatctttagtttcagaccccgtgtggattagtcgctgtcacgatcgaagcggggcgccaattgcggtggccaccacctccaatccactccccgcggtggcctcgccgagctgttcttgctccgtcctccctccaactccaagatttgtttcgcacccgattcctgagcttccgcggcgcttcttgctgaaaagaa

SEQ ID NO: 46616 - DNA, 290 bp, Zea mays
ccaaatcctcccacccggtttagccggctccgctgccaccgccgcgactccacctctgtcgccaccatggtcaagtccaaggccatcagggtccacgagctgggcggccccgaggtgctgcggtgggaggaggtggaggtcggggagcccggtgaaggggagatccgcatcaggaccaccgccgtcggcgtcaacttcatcgacatctactttcggaagggggtctacgccgcgcccaccatgctcttcactccaggaatggaagccgttggcgtcgtcaccgctgttgg

SEQ ID NO: 46617 - DNA, 264 bp, Zea mays
gtcaagggcaggttctttgccttcggtcgtgtcttctcagggaaggttgctactggtatgaaggttcggatcatgggtcccaactatgtccccgggcagaagaaggatctgtatgtcaagagtgtccagcgtactgttatctggatgtgaaagaagcaagagtcggttgaggatgttccgtgtggtaacactgttgctatggttggtctggatcagttcatcacgaagaatgctacactcactaatgagaaggagactgacgct

SEQ ID NO: 46618 - DNA, 283 bp, Zea mays
atcacaactcgtaggcagcgagcgtctctcctcttcctctcccacgcaccgcgccaaggaaggcagagagagatcgccgctcctcttctctacgtcggtggtgcggttgaccgccctcctcgagcgagatctcgctgcagtccctcgagatctggtcacagatctatccgacaagatggtgaagatctgctgcatcggtgctggctatgtcggtggcccaaccatggcggtcattgccctcaagtgcccagacattgaggttgtcgttgttgacatctccaag

SEQ ID NO: 46619 - DNA, 182 bp, Zea mays
ctgccttgccctcagaggatctaagacatggcacctaagaaagccaagagaagggcagcagcagaagggagctccaatgttttctccatgtttgaccagactcagatccaggagttcaaggaggctttcactgtaattgatcagaacagggatggcattattgacaaggaggatcttcggga

SEQ ID NO: 46620 - DNA, 195 bp, Zea mays
tggttaaaccatgggtgaagacaagccttgcccctggatcaggagttgtcacaaagtacttgcttcagagtggtcttcaagaatacctcaaccagcaaggattccatatcgttggctatggctgtaccacttgcattggaaactctggtgatctcgatgaatccgtatcaactgccattacagaaaatgatgttg

SEQ ID NO: 46621 - DNA, 139 bp, Zea mays
cgggttcgtgaggttctccggggttcggtttcgtgggtgggcggatcgagatggcggcgtcggatgttgagtaccgctgcttcgtcggcggcctcgcctgggccacggacgaccactccctccacaacgccttcagcac

SEQ ID NO: 46622 - DNA, 185 bp, Zea mays
cacaaacaagagcttaaactgtcacagtacaaggatatcgagaagcgatatactaatcaatttctccagcttaagacaactgaaatggcaaacaaggacttggacagatattatactgctttagacaaggctcttatgcggttccacagcatgaagatggaggagataaataaaataatcaagga

SEQ ID NO: 46623 - DNA, 179 bp, Zea mays
ggcccttgatgctggtctggaacacgccctcctgggttctgtagtgactgtagacaggtatgcagctgccgagggtttctataaactagctatggcctatgcacccgttccagatcttcacattatgtggttgcttcatctgtgtgatgcacaccaggagatgcaatcatgggctgaag

SEQ ID NO: 46624 - DNA, 174 bp, Zea mays
agcagatcaaggtctggttccagaaccgcagatgccgcgagaagcagcggaaggaggcctcgcgcctgcagactgtgaaccggaagctgactgcgatgaacaagctgttgatggaggagaatgacaggctgcagaagcaggtctcccgactcgtgtacgagaatggatacatgc

SEQ ID NO: 46625 - DNA, 187 bp, Zea mays
cgcctccgacatcctactttcgtcctcacgagtgaccgataatccgccggcgctaagatgttggtttatcaagatctcctatctggcgacgagctcctgtcggattcattcacctacaaggagctcgagaacggcgtcctgtgggaggtcgttggaaagtgggtcacccaaggtcctgttgtcgtag

SEQ ID NO: 46626 - DNA, 135 bp, Zea mays
gcaaggctccgatttgcacatgcagaaactgttgttccttttagctgccttcttggtctttttcttgaaggtccagaaattgagaagatacagagagaggaagcattggacctaccccctttgccgccacaggga

SEQ ID NO: 46627 - DNA, 312 bp, Zea mays
tggtggttccaatctcggcagggatttacccacgcccaaggagatttgcaaggggctcgacaagtatgtgattgggcaggacagagccaagaaggtgctatctgttgcagtttacaaccactataaacggatataccatcaatctttacaaaagggatttgggtggttttgatggggaagctgatgacgacaacaatgtggatctagagaaaagctatgtcctgataatgggacctactggctctggtaaaactttacttgcaaagacattagctcgttttgtgaatgtaccattgtaattgctgatgcaac

SEQ ID NO: 46628 - DNA, 246 bp, Zea mays
gacgaaccctctgttcgagaaaaggccgaagcagttcggcatcggcggcgcgttgcctcccaagaaggacctgcaccgattcgtcaagtggcccaaggtcgtgcgcatccagcgccagctgtcgcatcctcaagcagcgcctcaaggtgcctccggcgctcaaccagttcacccgcaccctcgacaagaacctcgctaccaacctgttcaagatgcttcttaagtaccggcccgaagacaaggctg

SEQ ID NO: 46629 - DNA, 176 bp, Zea mays
gattacgttacgagcgtgtctttggtgaaggttttgtgagcactggtggaatcgagacaacaaaggaatttgtgggcatgctcgatcttaaaccgggccagaaagtacttgatgtcggatgtggaattggaggcggcgacttttacatggctgcaaactatgatgtccatgttctt

SEQ ID NO: 46630 - DNA, 174 bp, Zea mays
gccaggagcaaggattgcatttattggagacggaccattcagagctgagctcgagcagatgttctcaggtatgccggtggtgttcacgggcacgttgcaaggggaggagctatcacaggcctatgccagtggggatgtgtttgtgatgccttccgagtcagagacactggggtt

SEQ ID NO: 46631 - DNA, 171 bp, Zea mays
ggcgaggaaggagggagagagcacgggggcttgatcgaagatggatgccggagcaaaggtggtgaagaaggccgcggcggggcgtcgcggcgggggcggccccaagaagaagccggtctctcgctccgtgaaggccggcctccagttccccgtaggccgtatcggccgcta

SEQ ID NO: 46632 - DNA, 222 bp, Zea mays
ggactccaaagccgtcgccttcctatccatcccttcctcgccgcgggggtcgcctgagatcacataaacaatggtgaaggctgttgctgtgcttggtagcagcgatggtgtcaagggcaccatcttcttcacccaagagggagatggccctaccactgtcaccggaagtgtctctggcctcaagcctggcctccatgggttgcatgtgcatgcacttggtga

SEQ ID NO: 46633 - DNA, 131 bp, Zea mays
gagatggatgttacaagccgtgaattggcaccagcaattactttgttacagttatacttgagttcatccaagcctgtgcttcgatttgctgctgtccggactctcaataaggttgctaggacacgacctct

SEQ ID NO: 46634 - DNA, 249 bp, Zea mays
tgcagctcctgccacggtgacccatcggccaagcgccgcttcctgatcctgccttccttgctgtcaggccgtgtgtatgttctcgacacagcgacagacccaagggcgccatccttgcataaggtggttgagtctgaggacattgctgagaatactgggcttgggttccctcacacgtctcattgccttgcgtctggcgacattatgatttcttgccttggggacaaggaggggaatgcagctggcaat

SEQ ID NO: 46635 - DNA, 288 bp, Zea mays
gggcgagcaaaggcaagtacaccattgggcttgggcaagattgcatggccttttgcagcgaggtggaggatgtcatctcaatgagtttgacggttgtcaattctctgctgaaaaaatacaagattgatcccaagctaattggtcgacttggaggtgggaagtgaaacagttatagacaaaagcaaatccatcaaaacttggctgatgcagatttttgaggaaagtgataatactgacattgaaggtgttgactccagcaatgcatgttatggtgggacagcagcccta

SEQ ID NO: 46636 - DNA, 289 bp, Zea mays
ggcaacatagttcactgttgaggaccattttgatcaatggggagaccagagttcctgtgtacacagtcttggaggtgtatcgagtttcagacatggagcttgtaagagttcttcctagtgtaggagaggaagtcaatgttgcatgttttcatccttcccctggatcaggtcttgtttatgggactaagcaagggaaggttaggtttcttcggcaccatggtgcatcattcacttactggggagaacgttcatgaggtattactttcctaccattgaaggcgtgtatgga

SEQ ID NO: 46637 - DNA, 267 bp, Zea mays
acctattccttctcccagccgtcgagctgcccaacccagagcaccagcagccctcaccttcttcctctcggccggtccttcaaacgagcccgctcgtcttggagccgccgccggtctcgttctggacgaacgttcaaggagattgcatttgtggatgctctaatggagtcgaaaggtggcaagaagtctagtagtagtagtagtaatttcatgtacgaagctccccttggctacaagatcgaggacgttcgcccagccggaggaatc

SEQ ID NO: 46638 - DNA, 281 bp, Zea mays
gttccctccgcggctccgccttccgccgcgaacacgccgctgtctcgaccccttgtgctcctccttcagcgagatggcggagattgagataaaggcagcacctgctgacttccgcttccctacaacaaaccaaacaaggcattgttttactcgctatgtcgagtaccacaggtgtttgaatgccaaaggggatgatgctggtgtttgcgaaaaatttgccaagtactacaggtccctttgccctggagaatgggttgagaaatggaacgagcagagggagc

SEQ ID NO: 46639 - DNA, 285 bp, Zea mays
cgcccccatccgcatcaacacggggctcactctcttcacgctcacgctcgtgctcgtgcccgcaatggacctcatctacgtcaaggggagggccgggctgtacggagcgttcgatgtgactgtcgccgccacggctctgtgcggggtcgccgacgcgctcgtgcaaggaggcgtcatcggcttcgcgggggagctgcccgaacggtacatgcaggccgtcgtcgccggaaccgccgcctcaggagtgcttgtctcggcactgagagtcttcaccaaggcactgta

SEQ ID NO: 46640 - DNA, 283 bp, Zea mays
cttgctctgtcctctctccaactccacgatttgttccacacaaggtaggagtctatccgcagcgcttcttgctgaaaaagggaactccgagttctccagctctggatcggcagagagcggtggttccttttgcggactctgaggtccagttcttgtttttgatttgtctcatcaacccaccagtcgggctgcaggcttagagctggaaggaataatttgactagagaaatggggcagtgttgcagcagagctacggccccggactctggacggggaagtgcca

SEQ ID NO: 46641 - DNA, 274 bp, Zea mays
gttccatgttactgcagagcgtcccaccggcagtactggtccgatttctgagggagcatagatctgaatgggccgattacaatattgatgtgtatttggcttcatcactgaagaccagtgcgtgctcacttcctgggttgcgacccatgagattttctggggggcagatgatcatgccacttgctcacacagtggagaacgaggagattcttgatattgtccgccttgaaggacaactcttactcatgatgaagccctctttcagggactccac

SEQ ID NO: 46642 - DNA, 283 bp, Zea mays
ggagtaattactgaactagttggagaactgcatcttgaggggtctgtgaaaacaacaaaattgaagatcacatggctagcagatatagaggagctagttcccctttacattggttgaatttgattacctacatcagcaagaaaaagctagaggaagacgaggacttcctcgacaatctcaacccttgcactcgacgggaaatcccagcccttggagatgcgaacatgaggaacatcaagcgtggagaggtcatacagctcgagaggaaaggctactataggtg

SEQ ID NO: 46643 - DNA, 278 bp, Zea mays
ggaattctgagtggcgacaaggagggtcttcttcagctcccaagtgacaaagccctgctgagcgaccctgtcttatatgatatcaaaagagaaatatgctgcagatgagaaggcattctttgatgactacaaagaggcccaccacaagctctacgaactggggtatgctgatgcttaaatgtccatatcctggagcgggacacaaactgctgcctgtatggactcgtgcgattcagggtgaaccatcagattgtctagtgtactctttgtaataattt

SEQ ID NO: 46644 - DNA, 278 bp, Zea mays
gtccgactcgtcagacgtcagccagcagttcgaaaccaaggatcgatccaggagcttccggaaggctaggcgcgcgcgcacgtcgaggtgctggtgccggtgccgcccatggatcgggctcgcggatccgcgttcctgatcggcgtcctgctcgcaggatccttgttcgcgttttcagttgctaaagaggagaccaagaagctcgggaccgtgatcggtatcgatctcggtaccacctactcctgtgtcggtgtgtactagaacggtcatgtcgagat

SEQ ID NO: 46645 - DNA, 237 bp, Zea mays
caaaacagctgtaattgtaggaaaagttgcaatcacaaaaaacccttgtctccatcctggtgatgtcagagtacttgaagctgtatatgaccctggattggatgctaggggtcttattgattgtgttgtatttcctcagagaggggaaaggcctcatccgaatgaatgctccgggggcgatttggatggcgacctcttctttattacttgggatgacaaactgattccggaaaaggt

SEQ ID NO: 46646 - DNA, 275 bp, Zea mays
ctcgcgtctctttcctattcgcgccgccgccgctgctgcaagcgcgactcgccgtcgtccgaatagtacactctaacgccgccatggggcgtatgcacagccgcgggaagggtatctcgtcgtcggcgctgccgtacaagaggacgcctcctacctggctgaagaccgccgcctccgacgtggaggagatgatcacaaaggcagcgaagaagggacagatgccgtcgcagatcggcgtcctgctccgtgaccagcacggtatcccccttgtcaag

SEQ ID NO: 46647 - DNA, 269 bp, Zea mays
gcgaccacagacagagcgcgcttcaagggcttttttttttgagataacaaggaggagaggaggagatggcggtcacgatcacctgggtgaaggcgaggcagatcttcgacagccgcggcaaccccaccgtcgaggtggacgtgggcctcagcgacggcagctacgcgaggggggccgtacccagcggcgcatccactggaatatatgaggccttggagttgagggatggaggatctgattatcttggcaagggtgttcttaaggctgtc

SEQ ID NO: 46648 - DNA, 155 bp, Zea mays
caccagccgccgccatgtcgaagcgaggcaggggaggttcggcggggaacaagttccgcatgtcgctgggtctgccggttgccgcgacggtgaactgcgcggacaacacgggcgccaagatcctctacatcatctccgtcaagggcatcaagggc

SEQ ID NO: 46649 - DNA, 280 bp, Zea mays
cctctccgcacacaccctccctacctcgccgtcgccgtcgcatctgccatgggggcgtacaagtacgtctcggagttatggagaaggaagcaatccgacgtgatgcggttcgttcaacgcgtgcgctgttgggagtacaggcagcagccggccatcgtccgactcacaaggcccacccgccccgacaaggcccgccgcctcggcttcaaggccaagcaggggtatgttgtttaccgcgtccgtgtgaggcgtggtggcaggaagaggcctgtgccgaagg

SEQ ID NO: 46650 - DNA, 272 bp, Zea mays
gtccttgctcgtatgcaccacctacagcagctgcttgacaggttccttgcttgcggccccaccggtggggcgaagacagcaggatggtgctggttgcgctgtatcagattgtgagggagagcttgcagctctacgccgatatctgcgaggtgctggcggtgctgctggacaggttctgtgacatggagtatgctgagtgcgtgaaggcttttgaggcttatgcaagtgtctgcaagcagatcgatgagctctgtgcattctatgcatagtgt

SEQ ID NO: 46651 - DNA, 216 bp, Zea mays
gtgtgaatgggttagctgggccactacatggccttgcaaatcaggaagcgcttctatggctcaagtctataattcaggaaacagggagcgacgttacgacagaccaactcaaagactatgtctggaagacactgaagagtggaaaggttgttcatggatttggtcatggagttctgcgtaggacggacccacggtatctatgccaaagggagtttg

SEQ ID NO: 46652 - DNA, 293 bp, Zea mays
cgcctccctcccgcaccccggccttctctgcctcccactcactcgacgccttcggcgccgccgccgccgggatgaagaaccccgacttcactgcagacaaagcgctcgccaaggacttcctgtccaacttcgtcggccctcacggcgaccccaagtacctgaacatcctgcaagatgtcgccaacagcgagatacgcgcggtccagatcgagctggacgacctgtttcatcacaaggacgtcgatgaggagttcctgcagcgtgtcactgagaacacgcggcgctacgtcggc

SEQ ID NO: 46653 - DNA, 297 bp, Zea mays
tgatagacagggcacggcagcgacgatgtcggggcgcggcaagggcggcaaaggtctgggcaagggcggagaaagcgccaccggaaggtgctccgtgacaacatccagggcatcaccaagcccgccatccggaggctggctcggaggggcggcgtgaagcgcatttcggggcttatctacgaggagacccgcggcgtcctcaagatcttcctcgagaacgtcatccgcgacgccgtcacctacaccgagcacgcacgccgcaagactgttaccgccatggacgtcgtctacgcgctc

SEQ ID NO: 46654 - DNA, 282 bp, Zea mays
cttcctcacccgcccgcgccccgtgtacctgctcgacttcgcctgctacaagccggagtcggagcgcaagtgcacgcgcgagaccttcatgcactgctccaagctcaccggatccttcacggacgagaacctcgagttccagcgcaagatcctcgagcgctccggcctcggcgaggacacctaccttccccccgccgtgctccgggtgccccctaacccgtgcatggacgaggcgcgtaaggaggcgcgcgccgtcatgttcggcgccatcgaccagctgct

SEQ ID NO: 46655 - DNA, 296 bp, Zea mays
cttggagctgcgggatgtaacagcataacagatgctggtatatctgctctggctgatggctgtcatcacataaaatcactagacataagcaaatgcaacaaagttagtgatcctggagtctgtaagatcgctgaggtttcttcatcatgcttggtgtcaataaagctattggactgcagcaaggtgggagataagtccatctattcgttagctaagttttgcagtaacctagagactcttgtcattggtggatgtcggaacattagcgatggctccatacaagcacttgctcttgc

SEQ ID NO: 46656 - DNA, 284 bp, Zea mays
atgctctctaccgtccgagaccccaagcaccagcgcggcggcgggggcggcggcgaccatggctgtcggaaaagtcaagaggatctccaagggaaagaagggtggcaagaaaaagaccgtcgaccctttctctaagaaggattggtatgacatcaaggcaccgtcggtgttcagtgtgcgcaacatcgggaagactctcgtatccaggacacagggtaccaggattgcttctgagggtctgaagcacagatctttgaggtttgcctagctgatcttcagggcga

SEQ ID NO: 46657 - DNA, 275 bp, Zea mays
  unsure (1)..(275): unsure at all n locations
ggagtacgaggaggaggaggaagaagaggaagagacctaagtcattctccgcagtgcttggtacagatatgatattncttgtatcgctgttagtactcgtcagtttgaggttcgtgtggtgatgcttgctaggtactagatgggtggtattccaccaattggcctgaagatgtcctccacattcgttggcaactcaacctccatccaagagatgttccgccgcgtcagcgagcagttcacggccatgttcaggaggaaggctttcttgcactggt

SEQ ID NO: 46658 - DNA, 221 bp, Zea mays
gtcgccgtcctctcccgttcgcaacgccacgctccccaccgccgaaatggccccgaagcgaggtggcagggcaccggtgccggccaagaagaagacggataaagtgacgaaccctctgttcgagaaaaggccgaagcagttcggcatcggcggcgcgttgcctcccaagaaggacctgcaccgattcgtcaagtggcccaaggtcgtgcgcatccagcgcc

SEQ ID NO: 46659 - DNA, 283 bp, Zea mays
tgtctacctcaacttcgacgccttccacggcgacaaggaccacggcggcgtgcgcgacggcaccaacatcgtgctctggaagtggtgcgagggcgacaaccagcgctggaagagtctcccctggtaaatgtgctgttctgtggctgcactggtcatcaccatgatctggagctttgaaggcatagccacctgtggtcagcagctgctgccgtgttgctagaataaagttggtggcgatcgatcgatcgatctttggtgatgggtgtccctccctgtgtgtttg

SEQ ID NO: 46660 - DNA, 315 bp, Zea mays
acgagttctacaacaacgggctgacctccaacctggcgggcagccgcaacccgagcctggactacgggttcaagggcaccgagatcgccatggcgtcctactgctccgagctccagtacctggccaaccccatcaccaaccacgtccagagcgcggagagcacaaccaggacgtgaactccctcggcctcgtctccgccaggaagaccgccgaggcggtggacatcctcaagctcatgtcgtccacgtacatggtcgcgctgtgccaggccgtggacctgcgccacctcgaggagaacctcaagagcgccgtcaa

SEQ ID NO: 46661 - DNA, 308 bp, Zea mays
ttcaagtctcaggccgactacatcagcgtgccgatcgagggtccctacaagcctgcccactaacggtactaggcagccagcacacggcttgcagctcactcgggccgttgtgtgctatgaagttcgctacactggcctgtcagttatcttttgcatgcatatgcattatcatatacgcagtcgcgtagcaaggtttccttatggttatcgcttgagctgagggggagggaaggagctgtttgcttttgctgaagaatatggtgtagtcggctggggtgaggcgatgtgcgttgccagatacattttgt

SEQ ID NO: 46662 - DNA, 270 bp, Zea mays
cgccgtctgccttctgcgcctccatttcggcctctgtcccttgcaagttcaatctcacctccaaccatgggtaaagagaagtcccacatcaacattgtggttattggccatgtcgactctggcaagtcgaccaccacaggacaccttatctacaagcttggaggcattgacaagcgtgtgatcgagaggttcgagaaggaggctgctgaaatgaacaagcggtccttcaagtacgcgtgggtgctcgacaatctacgggctgcgcgtgag

SEQ ID NO: 46663 - DNA, 231 bp, Zea mays
cagacgacgagatggccgatgcggaggacgccgccgccgcgcgccgacgggccgccataaccgactaccgcaagaagctgctcaactgcagggagctcgagtcgcgcgtcggcaccgtgagagaaagccttaaaaatgcaaagagggattttaccaagactgaagacgacttgaaatctctgcagagcgtggggcaaataattggagaggctctccgacctcttgataatg

SEQ ID NO: 46664 - DNA, 285 bp, Zea mays
gctcaatcgacatagagaggcccaactactccaacttgaatcgccttgtgcctcaggtgatctcatcgctgacagcgtctatagaggtgacgatgtccgagctcaatgtggatgagaacgagttccagaccaacctggtaccttacccgaggatccacatcatgctcacatcctacgcaccggggatctcttctaaaaaggccttcaacgagcagctgtatgtggcggagatcaccagcagcgcgttcgagccggcttccatgagggatcagtacgaaccacagc

SEQ ID NO: 46665 - DNA, 307 bp, Zea mays
gttgggcgcagagaatccccaagcaaacaaacagggtagagggagaggagaggagaggagaggagaggttgggtctgggacaccatggctccgatgaagctgtacggggcggtgatgtcgtggaacgtgacgaggtgcgcaacggcgctggaggaggctggctccgactacgagatcgtgcccatcatcttcgccaccgccgagcacaagagccccgagcacctcgtccgcaacccgtttggtcaggttccagctctgcaggatggtgacttgtacctcttcgaatcacgagcaatctgcaagtacg

SEQ ID NO: 46666 - DNA, 173 bp, Zea mays
ctcgagccgtgccaattaatcttcctgtcatcaatcaagtgttcagtagcaaccgggcaattataataccccacacatctcctttggcgcggattcgacctcttacagggcgatatgttccaccagaagtggctgaagtccgtgtacctcttctcaacctttaaaacttcaaa

SEQ ID NO: 46667 - DNA, 305 bp, Zea mays
ctcccccgtaccaaacaaacctcaccgagtcgcaactcgcaaggacagtgaaaacgcccaaacgagcgcgggcacgccaaccaaagcggcgaacgcgaaggaaggaaggaaggaagcaagcaaagcagcagccatggggcttgactactacaagatcctgggcgtcgacaagggcgccaccgacgacgacctcaagaaggcctaccgcaagctcgccatgaagtggcaccccgacaagaaccccaataacaagaaggaggccgagaacaagttcaagcagatctcggaggaatacgatgtcctca

SEQ ID NO: 46668 - DNA, 267 bp, Zea mays
  unsure (1)..(267): unsure at all n locations
gtgaaatacaaactgtaaatatcaagacagtcggtgcaggttttgaagccacagatggagaaagattacccttggctgtaaaagagttaggaagctgtgatttgtacccacagagcttgaagcataaccctaatggacggttcgttgttgtatgtggagatggcgagtacataatttatactgccctggcctggaggaatagatcatttgggtctgcactggaatttgtttggtcatcagaaggagnatatgcaattagggaaagta

SEQ ID NO: 46669 - DNA, 301 bp, Zea mays
atggtcaaccacttcgtccaggagttcaagaggaagaacaagaaggatatcactggcaaccccagggctctccggaggctgaggaccgcttgtgagagggcgaagaggactctgtcttccactgcccagaccacgattgagattgactcgctgtatgagggcatcgacttctactccaccatcacccgtgccaggtttgaggagctcaacatggacctgttcaggaagtgcatggagcctgttgagaagtgcctgagggatgccaagatggacaagagcaccgtccatgacgttgtacttg

SEQ ID NO: 46670 - DNA, 251 bp, Zea mays
ctccgcctccgctgccggtcgccgactccgaaactccgacagtccgaccacaaggtcttgtgcgggatccacagaaggatgagtgaagaggataagactgctgcttctgctgagcagccgaagagggcccctaagctcaatgaaaggatcctctcttctctgtccaggaggtccgtagctgctcatccatggcatgatcttgagatcggtcctgatgctcctgctgttttcaatgttgttgttgagatcac

SEQ ID NO: 46671 - DNA, 310 bp, Zea mays
cgcaggcggtggccgacgtcctcttcgcgctgccgcccaacgaggaccgcgacggccccattatccacctcccgccgcccaccttcagactcccgcgggagaagcatctacccaagcccaagccaccgaccaagtgggagctgtttgcaaaggcgaaaggaattaccaagcgcaaaaagaacaagcgtgagtgggatgagcaaactcaatcctggaaacggactcatggctatgaccgtgttaatgatgacaaagacattccaatcattgaagccaaattgactgatgagcctggtgttgatccattgcg

SEQ ID NO: 46672 - DNA, 322 bp, Zea mays
aagagaacgaaagaaggaaggtacaagggaaggaagttcagttcagtatgtcatttctttggatatcaggctcgaggatctacaccatcaaatttcgactgtgactatgcttatgctcttggacgtatctccctgcatatgattgcagttggattgactggctacatggcaactgtggctaatctgaaagaccctgttgacaaatggagatgtgctgctgctcctttaactgcgatgatgagtgtgaagaggcatttacgtggccctggagcaatccctatagggaggccttccattcaccccttctccaattgactgaaag

SEQ ID NO: 46673 - DNA, 315 bp, Zea mays
gtaagagtgatgtctatagctttggggttgttctgttggaagctattacaggtagagatccaattgattatgatcgccctacaaatgaggtaaacctggttgactggcttaaaatgatggttgccaacagacgttctgaacaagtggtggacccaaaccttgagagaaggccttcgacaaaggagctgaaacgtgcccttttgactgctctgaggtgtatcgatttgaatgctgagaagaggcctagcatggaccaggtggtccggatgttggattctaacgaactcatacctccagaggaaaggagacaccgac

SEQ ID NO: 46674 - DNA, 286 bp, Zea mays
tcgtacgtccccgatctccgatcccctcgtcgatccaaagatgcagatcttcgtcaagaccctcactgtatagactatcaccctcgaggtggagtcttctgacaccattgacaacgtcaaggccaatatccaggacaaggagggcatccccccggaccagcagcggctcatctttgctggcaagcagctcgaggacgggcgcacacttgcctgatacaacatccagtaggagagcatcctccagcttgtgctccgcctcaggtgaggcatgcagatcttcgttaag

SEQ ID NO: 46675 - DNA, 307 bp, Zea mays
  unsure (1)..(307): unsure at all n locations
ctgcagttccncgaccacaccgttcctccgagcccaggagcagccccgcgccaggaggaagtttgttcttttaacaatatgtcgagggaggagaatgtttacatggccaagttggctgagcaggctgaaaggtatgaggagatggttgagtatatggagaaggtggctaagactgtagatgtggaagagctcactgttgaggagcgtaaccttctgtctgttgcatacaagaatgtgattggggctcgccgcgcttcatggacgcttgtttcttccattgaacaaaaggaggagtcccgtaagaacg

SEQ ID NO: 46676 - DNA, 305 bp, Zea mays
atcccctcctcctcctccctgtccctggacgccggcgccggcgtcggctcctcatcgtccgcgggtaaggagactgaagtggtgaacgcggaagaaggttgtcattttgctaagttaaagttagatcattggagcaatgccgccccataagatcgagacggggcaccaagatgtggtgcatgatgtcgccatggattactatggcaagcgcctagctacatcctcctctgataatacaataaagatcattggcgtaagtggaacctcacaccagcagcttgcaactttgagtggacacagggccc

SEQ ID NO: 46677 - DNA, 308 bp, Zea mays
atgaaaaggagagtcctaaagttgatcctagaggtatattccatggccatgacagtactgttgaagatgttcagttctgcccttccagtgcgcaggagttttgtagtgtgggtgatgatgcttgtcttattctgtgggatgctcgaactggcactgacccagctgttaaggttgagaaagctcacagtggagatgttcattgtgttgattggaatccccttgatgttaactatatcttaactggttctgccgataactctgtccgaatgtgggatcgtcgcaatctgggttcgggaggagctggttct

SEQ ID NO: 46678 - DNA, 311 bp, Zea mays
ccgtcggttcacttctccaggtaaggaaagggttcgtactcatggcgccgccgcagccaaagtcgggccttttcgttggcatcaacaagggtcatgtcgtcaccaagcgcgagctgcctccccgcccgtgccaccgcaaggggaaatcaacgaagagggtgtctatggtcaggggcctgatcagagaggttgctgggtttgctccttatgagaagcgtatcactgagcttctgaaggttggcaaggacaagcgtgccctgaagcttgctaagagaaagcttggaactcacaagagggcaaagaagaagaga

SEQ ID NO: 46679 - DNA, 311 bp, Zea mays
ctattctcagccgccgccaatcccttcccgtgctccgcaaccgctgagtgagaagaagagatggccggcaagggcgatggcccggctatcggcatcgatctcggcacgacgtactcttgcgtcggcgtgtggcagcacgaccgcgtcgagatcattgccaacgaccagggtaaccgcaccacgccctcgtacgtcgccttcaccgactccgagcgcctcatcggagatgcggccaagaaccaggtcgccatgaaccccatcaacaccgtctttgatgccaagcgtctcatcggcaggaggttcagtgatgc

SEQ ID NO: 46680 - DNA, 312 bp, Zea mays
atattgagaaccgtgtcttggataaacaaattattgactggaagcttaccttacatcaaataggccttgatgttctgcgcactgaccgcaccatggtattttatgagaacaaagataacatttcaaagttgtgggatattcttgctgtctatgcatggatcgacaaagaagttggttattgtcaaggaatgagtgatttatgttcacccatgatagtgctactccacaatgaagcagatgcattttggtgctttgagagattgatgcgtagactgcgaggtaatttcagatgcacacaacagtctgttgggg

SEQ ID NO: 46681 - DNA, 310 bp, Zea mays
  unsure (1)..(310): unsure at all n locations
gtagcactcggtcccagcaacatccagggccacactaacgccttcgctttccacagaacatataacgggcgngnnnnnacggggcttcgaggtggtatatatgaccgagcccgtcgacgagtacagtgtgcagcagctcaaggaatttgatgggaagagcctggtctcagttaccaaggagggtctggagctgcctgaagatgaggaggagaagaagaagatggaagagagcaaggcaaagtttgagaacctctgcaagctcatgaaagaaatcttagataagaaggttgagaaggtgacaatctccaat

SEQ ID NO: 46682 - DNA, 308 bp, Zea mays
caacccagcgccggcagtcgccgtcatcgatcgatcgccggaaaactaacccctaacgatgtctggagccggcgaggaggacaagaagcccgcggagggcggcgcccacatcaaccttaaggtcaagggacaggatggcaatgaggtgttctttcgcataaagaggtccacccagctgaagaagctgatgaacgcttattgtgcaccgccagttctgtggacatgaatgctcattgcgttcctgtttgatggccgcagcttcgcggcgagcagacccctgatgagctggagatggaggacggcgacga

SEQ ID NO: 46683 - DNA, 59 bp, Zea mays
ccgccacctccgtggcagtggctaccttcccggctgcccgggctccaatggtgtccaca

SEQ ID NO: 46684 - DNA, 304 bp, Zea mays
ctccgctcggccaccagctttgaccgcctcccctcccctcctctcctgtgttcctccataccccactccccccgcaggagcggcgcggcggcggcaaaggcaaaggcaaaggcaagatgttcgggcgcgcgccgaagaagagcgacaacaccaagtactatgagatcctcggggtgcccaagtcggcgatcccaggacgacctcaagaaggcctaccgcaaggccgctatcaagaaccaccccgacaagggcggtgaccccgagacattcaaggagctcgcacaagcctatgaggttttgagtg

SEQ ID NO: 46685 - DNA, 302 bp, Zea mays
ataaaataacctggcagctgctgcaaaagattctgatggtgcattctttaaaagattggatagctttcagccatgtgacatacatgaactgaaacctggaacacacttctttgctgtctacggtgacaacttcttcaagagcgctagttatactatagaggttgtatgtggtgaatcttttcctgccgaaaaggagatgctacgaaatgtggaggccaagatactcacaaaacgagctgaactttccaaatttgagtcagagtatagggaggttttggcgaagttcactgaaatgaccagca

SEQ ID NO: 46686 - DNA, 250 bp, Zea mays
ggttcatggaacgatatgctcctactgcaaaagatcttgcttctcgtgatgttgtttcaagatcaatgacaatggaaattagagaaggacgtggtgtagggccattgaaggatcacatttatttgcatctgaaccatctgccgcctgaggttctcaaagaaaggctccctggtatttctgaaactgctgctatttttgctggtgttgacgtcaccaaggagcccattccagttttgcctactgtgcacta

SEQ ID NO: 46687 - DNA, 276 bp, Zea mays
gtacagaagctctcgatctcaccgacaccgaggaagaagagatcaatggcgtccgagcagggagtcgtgatcgcgtgccacagcaaggctgagttcgacgcccacatgaccaaggcccaggaagccggcaagctggtggtcatcgacttcactgccgcctggtgcggtccatgccgcgccatcgccccactgttcgtcgaacacgccaagaagttcactcaggtcgtcttcctgaaggtggacgtggacgaatgaaggaagtcaccgcggcctacg

SEQ ID NO: 46688 - DNA, 272 bp, Zea mays
  unsure (1)..(272): unsure at all n locations
cagcaagcaagttcctcaattacttcgttaaacaaattgttccagcatttgagaaaattcctgaagaaaagaaactggatttgctanagaacattgcttcaagttcaccatatgctgcagcacaagattcacgtcagctgcttccatctgttgttcagttactcaagaagtatatgcctgggaagaaggtggaagatatcaaccataattatgttgagtgcttgctatacacttttcatcatttggctcacaagactccaaacacaacggac

SEQ ID NO: 46689 - DNA, 236 bp, Zea mays
tgctggctgaaccagtgggcttgttcacgttcatttggactcggtactcgaattccatgggatgagcagttccttgtagaatctctttctgattctaccctatacatggcttattatacagttgcacaccttttgctaaatggtaatatgtatgggaaagaaatatcttcagtaaggccagaagaaatgacagatgaagtctggggattccgtgtttgtgatggaccggcaccaaa

SEQ ID NO: 46690 - DNA, 282 bp, Zea mays
atggcaatgagagatgctggtgtctcacaacctgttccaattggggcactagccactgcgcttgctaacgcctcaccagatcagcaaagactgatgcttggtgagaacctgtatcctcttgttgaacagctggagcgtgagcaggctgccaaggtcactggcatgcttttggagatggaccagacggaggttcttcacctgctggagtcgccagatgctctcaaggctaaggttgctgaagccatggaggttctccgctcaagccagcatctccagcagagc

SEQ ID NO: 46691 - DNA, 287 bp, Zea mays
cagcgctggatcaaggacatgcgccacagcaacagcgtcaaggacgaggaatggtacccggccttcgcgctcgtcaacagggtcaccggcgaggccatcaagcactcccagggcgagggccacccggtcaagctggtgccctacaaccccggctaccaggacgagtcggtgctgtggacggagagccgcgacgtcggccacggcttccgctgcgtccgcatggtcaacaacatctacctcaacttcgacgccttccacggcgacaaggaccacggcggcgtgcgcga

SEQ ID NO: 46692 - DNA, 274 bp, Zea mays
cgatccggcagatccgtctgggcaacgccaaggacacgcgcgggaccgcttacgttgtctacgaggacatctacgacgccaagaacgccgtcgaccacctctccggcttcaacgtcgccaaccgctaccttatcgtgctctactaccagcccgccaagatgtccaagaagtcggatatcaagaagaaggaggacgagatcaccaggctccaggagaagtacggaatcgggtccaagacgcccggcccgggctccagcgactgagcggccaaggt

SEQ ID NO: 46693 - DNA, 285 bp, Zea mays
cacagcgtatcatcgttttccatcgctcctactcctatcatccagaaaatctgagcggtattgatggcgcccaaggcggagaagaagccggcggcgcagaaggtggcggaggaggagccctcggagaaggcggctccggcggagaaggcccccgcggggaagaagcccaaggcggagaagcggctacctgcgggcaagtccgccggcaaggagggcggcgacaagaagggtaggaagaaagcgaagaagagcgtggagacctacaagatctacatgcttcaggtc

SEQ ID NO: 46694 - DNA, 279 bp, Zea mays
ggcaagatcaagatcggaatcaacggtttcggaaggatcggcaggctcgtggccagggtcgccctgcagagcgaggatgtcgagctcgtcgccgtcaacgaccccttcatcaccacggattacatgacgtacatgttcaagtacgacaccgtgcacggccaatggaagcacagcgacatcgccctcaaggactccaagacgcttctcttcggcgagaagccggtcaccgtctttggcatcaggaaccccgaggagatcccgtggggtgaggctggtgct

SEQ ID NO: 46695 - DNA, 268 bp, Zea mays
ttttcaagaaagtaatgtggcatgtaggtgacccaatgccccacgaggaatctgtggcatcagcagcggttggttctgcaatcaaagtaaaagctgctgccattgttgtgttcacattctcagggagagctgcgaggttagttgccaagtataggccaacaatgccaattttagcagttatcttcccacgtgaaggatccgatccatcaaagtggcgttcttatggcacaacacatgcaagacaatgtttcgcagtgagaggcgtgta

SEQ ID NO: 46696 - DNA, 251 bp, Zea mays
acaccctcgaggtacctccattcgcagtcggccgtgtcctcggagccgcgggagatggcggatcaggagaccgtagctgtggttgatgcacctaccccggttcttggggaaccgatggacctgatgactgccctgcagctcgtcatgaagaagtcaggtgctcatgatggccttgtgaagggtcttcgtgaggctgccaaagccatcgagaagcatgccgctcagctctgcgtgcttgccgaggactgcga

SEQ ID NO: 46697 - DNA, 242 bp, Zea mays
ttacctacgaataatgtatctgcgtaattaattactatctgtcttgtgtcctagtagctgttttaaaacccttaattaattttattatgggcgagctagctcaagagtggagtcataaaaccgcatggatggtgaggtattgtatagtacctgtgtaagacaagcttggctggtttttttattttatattttaatctgtttgctcaagacaaaacaaaaaaaaaaaaaaagggcggccgccg

SEQ ID NO: 46698 - DNA, 269 bp, Zea mays
ggcagacggttgctgttggagttatcaagagtgtggagaagaaggacccgaccggcgccaaggtgaccaaggcggctgccaagaagaaatgatgcgatcctgcgcctgctttagcaatacctagttttcatcatcacaagttttgtttgtgatcgttgctgttatcgtgtgaactgttgagatctgttagcatgtgcacttttatctatttatttggtaccatcttgctatttcaccttttccaatacaagaatgctctaagacctata

SEQ ID NO: 46699 - DNA, 320 bp, Zea mays
agcacacgaacacacaccgcgcccagctccgaggtgatcttccggcggccggcgagatgagccgtggcacaggcgcgggctatgaccgccacatcaccatcttctccccggagggacgcctgtaccaagtcgagtacgcgttcaaggcggtgaagtcggcgggtgtcacgtcgatcggcgtccgcggctcgactccgtctgcgttgttacgcagaagaaagtcccggataagttgctggatcagacgagcgtgacacacctgttcccgatcaccaagtacgtcggattgcttgccactggccttacagctgatgctaggt

SEQ ID NO: 46700 - DNA, 313 bp, Zea mays
aaacattctccaatatttcaccgaacgccgtgaatgctgtcacgtggggtgttttccctggcaaggagattatccagcctacggttgtggatcatgcaagttttatggtttggaaggacgaagcatttgaaatctggactcgggggtggggttgcatgttccctgagggtgattcatcgagggagctactagagaaggttcggaagacctactacctggtcagcctcgttgacaacgactacgtccagggggacctgtttgctgccttcaagatctgattatgctctcatggtctgtattgttgtatggttgg

SEQ ID NO: 46701 - DNA, 311 bp, Zea mays
gaagactctgactggcaagactatcacccttgaggtcgagtcttctgataccatcgacaatgtcaaggccaagatccaggacaaggagggcatccctccggaccagcagcggctcatttttgccggcaagcagctcgaggacacgcgcacgctggccgactacaacattcagaaggagagcaccctccacttggtgctgcgtctcaggggtggcatgcagatcttcgtgaagacacttactggcaagacgatcacccttgaggtggagtcctcggacaccatcgacaatgtcaaggctaagatccaggaca

SEQ ID NO: 46702 - DNA, 295 bp, Zea mays
cgctctggctggaaggtttggagaaactccccggctcgaggagatcgtgacattgagaggacgatgggagggcgcgcgctcctcctcctcctcctggtctcggcgttggtctttcagatccacgcctccgacacgctgctgtacgagccgttcgatgaggactttgacgggagatgggtcgtctccaagaaggatgactaccacggtctctgcaggcatgccaagagtgatggtcatgaggactatggcctccttgttagtgacaacgcaaggaaatacgccataatcaaggagc

SEQ ID NO: 46703 - DNA, 319 bp, Zea mays
cttgcaatcacaacgaacaaaagctctcgatctcaccgacaccgaggaacaagagatcaatggcgtccgagcagggagtcgtgatcgcgtgccacagcaaggctgagttcgacgcccacatgaccaaggcccaggaagccggcaagctggtggtcatcgacttcactgccgcctggtgcggtccatgccgcgccatcgccccactgttcgtcgaacacgccaagaagttcactcaggtcgtcttcctgaaggtggacgtggacgaatgaaggaagtcaccgcggcctacgaggtcgaggcgatgccgaccttccacttc

SEQ ID NO: 46704 - DNA, 302 bp, Zea mays
cgctaaggaaaggaggatcttttttcttagaacaaagcataagacattgctgagctatatgaaagacatggagatcgaacctgatgtaacctgttacacagtattgattgatggacagtgcaaatcagaatatctagatgaagcacgtgaattgtttgatgagatgttagcgaaaggacttacccctgatgtttacgtgtacacagctcttataaatggacactgtagccagggagaaatagctaaggctgaagatcttttacaagaaatgacagataaggggatgaagccagatgtactga

SEQ ID NO: 46705 - DNA, 306 bp, Zea mays
ggattcctcttaatggaaaccagtgtggatttgctgagtcagttgatgtaggtggtcagccaaatgctttgaaccttgcacttcaaaaacctgaatttgcactggtcactactgattctgggattgtattgctgcacaactcaaaagtcatttctacaaccaaagttaactataccatcacttcatcttcggtgtctcctgatgggacagaagctgttgtgggtgctcaagatgggaaactgagaatctattccatcagtggtgatacacttacagaagaagctctgcttgagaagcaccggggtg

SEQ ID NO: 46706 - DNA, 302 bp, Zea mays
ggctcagtatatgacaaaaaacaaagggtttttcctggcggcaccaacagagattgccattcaaagaaagcagcttaaggaaatcatcttctcacttctacctgcatgcacagaacctgatttggatactggaacacctttcagagctcaggcaataatcgcgaatcctcctgcttatggtcatctacacatagcagaagcacttggagcacctctgcatatcttcttcacttttccatggacgccaactaatgaattcccacatccattggcacgaatgcctcaaagtgcaacttataggc

SEQ ID NO: 46707 - DNA, 306 bp, Zea mays
ggcaaagtacatcatcgaggctgccaatcaccccacagatccagaggcagacgagatcctgtcaaagaaaggcgtcctcatcctccccgacatactggccaactctggtggcgtcacagtgagctacttcgagtgggtacaaaacatccaggggttcatgtgggacgaagagaaggtaaacgcggagctgcggacgtacatgacgcgcgccttcggggacgtgaagcagatgtgccggagccacagctgcgacctccgcatgggcgccttcacgcttggcgtcaaccgcgtcgcgcgcgccaccgt

SEQ ID NO: 46708 - DNA, 306 bp, Zea mays
atccagccgccaccaggtgcagagtctttcgtcatctcttctccggcgaagaacccccagtcgcccaccagatcacttgttaaactttgttgaggggtgatggcggtttctttcgcaaacctcaactccgaggcagggcttaaaaagcttgatgagtaccttctcactcgcagctacatcactggctaccaagcttccaaggatgacttggctgtctacacttcgttttcggctgctccctcgtccaagtatatcaacgtagcaaggtggtttaaccacattgatgcgctcgtgaggctgagcgga

SEQ ID NO: 46709 - DNA, 302 bp, Zea mays
ctcagaacagaagccatcaaaagcgaggctgcgagagcggagagagagagagagagagagagagagagagagagagagagtgagggacgcgccgacgccgagtcctctctccatcctgtgactggcgctgtttccgacaggatgtctctcacgaagacggagtacgagcgtggggtgcacaccttctctccggaggggcggctgttccaggtcgagtacgccatcgaggccatcaagttgagatacactgagatcggtgtgaagacaaaggatggtgttgttctcgccgtagagacacgcgt

SEQ ID NO: 46710 - DNA, 296 bp, Zea mays
ggagaattcctcccttgccccgccgtcgcatcctcttcgaagttcgaatcgaatcgcgccgcgatcacccacctcatggcggacaaggagcctgtcgtggagcggccagaggcgggtgaggaggaggaggacgcctcagccgccgccgccgcgggggaggaggaggacacgggcgcccaggtggctcccatcgtgcggcttgaggaggtagccgtcaccaccggcgacgaggacgaggacgtcctgctcgacatgaaggcgaactgtaccgattcgacaaagacggtaaccaatgg

SEQ ID NO: 46711 - DNA, 296 bp, Zea mays
gttctttgcaagtaaatggcaggtatggtattgagcaggagtacaccctcctccagaaggacaccaactggccccttgggtggcccatcggtggcttccccggccctcagggtccttactactgtggaatcggcgccgaaaagtcgttcggccgcgacatcgtggacgcccactacaaggcctgcttgtatgcgggcatcaacatcagtggcatcaacggggaggtgatgccagggcagtgggagttccaagtcgggccttccgtgggtatttcttcaggcgaccaggtctgggtc

SEQ ID NO: 46712 - DNA, 303 bp, Zea mays
gagaatctgaaggatgcatcctcattcttggctgagtggcaaaatatcaccaagggcttcagtgaagacaggctcttgattgcggggactaactcctccgaccttcagcagatcctgagcctactcgaatccaacaaagacttgctgttgactagctcatacctgtctgattccggttctactggggagcatacaaaatccttagtcacacagtatttgaatgccactggcaatcgctggtgcagctggagtttgtctcaggcaaggctcctgacttccttcttgccggctcaacttctccga

SEQ ID NO: 46713 - DNA, 298 bp, Zea mays
aaaagaagttgcaattacaaatcttacaaactacctcacgaaagaaaacagagctgaggagctgcgtaatcttttgacgcagctcagaccattttttgcagttattcctaaggcaaagactgcaaaaattgtccgtggaataattgatgctgtcgccaagatacctggaacatcagatcttcagatttcactctgcaaggaaatggtagaatggacccgtgcagagaagcgtactttcctccggcaacgtgtggaggcaagttagcagctctcctgttagagaatcaggagtatactg

SEQ ID NO: 46714 - DNA, 264 bp, Zea mays
acccgttgcatccggctaccgcagcgtcgccaaccgtcacagccggtacactccctccgctaccattgggaagacacgcggtatgggagctgggcgcaactcaagacccaccgcagtaaccagacgtgggctgacaaagcatacaagcgtagccacttgggcaacgagtggaagaaaccttttgctggatcatctcacgccaatggcatcgatctcgagaagattggtattgaggccaagcagccgaactctgcaatccgtaag

SEQ ID NO: 46715 - DNA, 298 bp, Zea mays
  unsure (1)..(298): unsure at all n locations
cgcatcccggcagtggcgacgaatctcgcggggcggaggtggtggcgcgacagaggcggtgtcgactccgacgaactcgcaccgancggtggatacgcaccagcagcaccggcgcactccaccgacgttcatatttaaggacttggtttggatagttctactcgtcaacaaaagtgattaaaaatggtggttcttgcagcttcaatcgtttcaaagtcggggaaagcacttgtttcaagacagtttgttgacatgtctcgcataagaattgaaggattacttgctgcgttcccgaaac

SEQ ID NO: 46716 - DNA, 294 bp, Zea mays
ttactattttcaccttgtttgccacaaagacagaggcatccctgttacgcatgctaaagggttcacctgatgtttacttaagtggccccatacagaagtatataacagacaggggtggtaggtttcacttaaggtggggatgcagagaggttctctatgagaaatcacctgatggagagacctatgttaaaggccttctcctcaccaaggctacaagtagagagataatcaaagctgatgcatacgtcgcagcctgtgatgttccgggtatcgaaagattacttcgatcagaat

SEQ ID NO: 46717 - DNA, 233 bp, Zea mays
gatcactggtacctcccaggctgactgtgctgtccttatcattgactccaccactggtggttttgaggctggtatctccaaggatggccagacccgtgaacatgctctccttgcgttcacccttggagtggggcagatgatttgctgctgcaacaagatggatgcaaccactccgaaatactccaaggcacgttatgatgagattgtgaaggaagtctcatcctacctcaaga

SEQ ID NO: 46718 - DNA, 256 bp, Zea mays
cttgaagaacatgttccccagtgagaaagagatagttgttaaaagtcaaatccttgctggtggccgagggctgggaactttcaaaagtgggctgcaaggaggtgtccatattgttaaggctgaggaagctgaaagcattgcacgtaaaatgttaggccagattctggtaacgaaacaaactggtccggagggatagattgtgagcaaagtctacttgtgtgagaaactgtctctcactaatgtgatgtattttgca

SEQ ID NO: 46719 - DNA, 272 bp, Zea mays
atcccgtcgcatcccatcccactaccacccatctcgtcgtccgccgattcgatccggttcttccaacccaggggcagtgatggcgacgaagaggagcgtgggcaccctcggcgaggcggatctgaaggggaagaaggtgttcgtgcgcgccgacctcaacgtcccgctcgacgatgcccagaagatcaccgacgacacgcgaatccgcgcctccgtcccaccatcaagttcctcttcgagaaggcgccaggtcatcccgccactactgggtc

SEQ ID NO: 46720 - DNA, 290 bp, Zea mays
cgcagttggaacgaagaggtatgatgctcattcaggaggggagcgtgagattcaaagaactatgttggagctgctgaatcagctagatggttatcactcacgtggagatgttagggtcattctagcaactgaccgcattgaaagccttgatccagccttgcttcggccaggccgtatagaccggaggattgagtttcctctaccagatattaaaactagacgacgcatcttccagatacacacatcgaaaatgacattagctggtgatgtgaacttggaagagtttgtta

SEQ ID NO: 46721 - DNA, 290 bp, Zea mays
gggttttgctgctctccgaccccgagctccgaaggccgcagcatcaggcgcggcccccctcgcgtgtgaccgagatggcgctgccgaatcaggggaccgttgattaccccagcttcaagctcgtcatcgtcggcgatggtggaactggtaaaactacatttgtgaagaggcatctcactggagagtttgagaagaaatatgaaccaaccattggtgtggaagttcatccgttggatttcaccactaactgtggtaagatcaggttctactgctgggataccgcaggcaag

SEQ ID NO: 46722 - DNA, 272 bp, Zea mays
ggaagaccaaggctgagaaggacccaaacaagcccaagaggcctccgagcgcgttcttcgtcttcatggaggagttcaggaaggactacaaggagaagcaccccaatgtgaagcaagtctccctgattggcaaggctggtggtgacaagtggaagtccctgtctgatgccgagaaggctccctacgtgtctaaggcagagaagctcaaggctgagtacaccaagaagatcgacgcttacaacaacaagcagtctggagaaccacggcgtctg

SEQ ID NO: 46723 - DNA, 253 bp, Zea mays
cttatattgagaaagaggatagcaagaagttgaaacagaaacagcgtgagcgtatgctgcccaagatgggcaaaatggatatagattatcaggttttgcatgacgcgttcttcaaatatcagacaaaacccaagctgtctagtcatggtgatctgtattatgaaggcaaagaatttgaggttaaactgagggaaatgaagccaggcatgctgtctcgtgagcttaaagatgctcttggtatgcctgatggcgc

SEQ ID NO: 46724 - DNA, 278 bp, Zea mays
agcttaggacggcgactgcgctccttgtatgctgtcagcatcgctactacggagagtccatgcctttcggtagcaaagccaaggcgtacagcgactccaagtccctggcgtatctcacggccgagcaggcgcttgctgactttgctgtgctgctcactgacctcaagaggaacctatcggcagagggcagccccgttgtgctctttgggggctcatacggtggaatgctagctgcttggatgagactcaaatatccccatattgctattggggctctc

SEQ ID NO: 46725 - DNA, 273 bp, Zea mays
gatcagaccgcgagcggccggccttaatatccccaaaccctagctcccgatctcgatggcgaaccctcgcgtcttcttcgacatgaccgtcggcggcgccccggcgggccggatgcgtgatggagctgtacggcaacgaggtgcccaagaccgcggagatattccgcgcgctgtgcacgggcgagaacggcgtgggcaagtccgggaagccgctccactacaagggctccaccttccaccgcgtcatccccgagttcatgtgacagggcggcg

SEQ ID NO: 46726 - DNA, 300 bp, Zea mays
aagatcagattgagcgtgttactcagattttgggcaggcggacaaagaacaacccctgcctaattggagagcctggtgttggaaagactgctattgctgaggggcttgctcagcgtattgctaattgggatgttcctgaaacaattgaaggaaagaagagcgtcggctccatggacgaggacgatgacagtcccgcctccggctccggtcgccataagaagaagttgcgcctcatcatgggcctccacgacggatcagcaaaggttcaaacaggaatatctctgaacaccttgggctctc

SEQ ID NO: 46727 - DNA, 306 bp, Zea mays
tgtgagtcttgctgagttgcagcatgatgacgttgcatttagaatattcaagtcgattactgaagatgttcagggtaaaaactgcctgactagcttctatggcatggatcttacccgtgacaaaatgtgttccatggtcaaaaaatggcagacaatgattgaagctcacgatgatgtcaagactaccgatggttactcgcttcgtctgttctgtgttagttttactaaaaaacgcaacactcggttacggaagacctcttatgctcagcaccatcaggtccgccaaatccggaagaatatgttggt

SEQ ID NO: 46728 - DNA, 298 bp, Zea mays
ctccaaggatggccagacccgtgagcatgctctccttgctttcacacttggtgtgaagcagatgatttgctgctgcaacaagatggatgctactacacccaagtattcaaaggcccgttatgatgagattgtgaaggaagtctcttcctacctgaagaaggttggatacaaccctgataagatccacttcgttccaatctctggttttgaaggtgacaacatgattgagaggtccaccaaccttgactggtacaagggcccaaccctacttgaggctctggacttgatcaatgagcca

SEQ ID NO: 46729 - DNA, 285 bp, Zea mays
gtccaaggaggatgcgcgccgcaccaagaacatggtcccgggagagtcagtgtacggagagaagcgtgtctccgttgagaatgaggatggaagaaaagtcgtatacagggtgtggaaccccttccgtaccagagctggatgctgctgtgcttggtggtgttgactacatctggattgctctcgttagacgtgagctgtatcttggtgctgcttctggcacaactgtatctcatgtgtctgatattgtagggccggatggtctggtctacgctgttgagttctctc

SEQ ID NO: 46730 - DNA, 179 bp, Zea mays
ggcatcactcgctcattcggagcccctctcttcgccggcgtcgtacgtagagatggcagagcgtttagatcccgtatcgccatagttagcgaggacaagtgcaagcccaagaagtgccgccaggagtgcaagaagagctgccccgtacgtcaagagctgggaagcttatgcatctgaag

SEQ ID NO: 46731 - DNA, 263 bp, Zea mays
ccccctgtcccgctaggattcccccgaaaccctcccccaaaaccccagagcggagaagagcgcaagatgttcggcttcgggcaccacggccaccacggccagaacccgccggcgcacggcggcgtgcaccagcccaccttcaagatcttctgcaaggccgacgaggggtactgcctcaccgtccgcgacggcaacgtggtgctggcccccgccaacccgcgcgacgagcaccagcactggtacaaggacatgcgcttcagcac

SEQ ID NO: 46732 - DNA, 285 bp, Zea mays
ctttcgtcctcacgagtgaccgataatccgccggcgctaagatgttggtttatcaagatctcctatctggcgacgagctcctgtcggattcattcacctacaaggagctcgagaacggcgtcctgtgggaggtcgagggaaagtgggtcacccaaggtcctgttgatgtagacattggtgccaatccatccgccgagggtggtgaggacgaaagcgttgatgacacagccgtgaaggtggttgatattgttgacacattccgtctacaggagcaactccttttga

SEQ ID NO: 46733 - DNA, 267 bp, Zea mays
gtcgttgcggaggcaggaagagagacgacggcggccatggcgacctccttccaggggacgaccaccaagtgcaccgcctgcgacaagactgtgtaccttgtggacaagctcaccgccgacaaccgcatctaccacaaggcctgcttccgctgccaccactgcaagggcaccctcaagctcgccaactacaactccttcgagggagtgctctactgcaggcctcacttcgaccagctgttcaagaggacagggagcttggacaagagc

SEQ ID NO: 46734 - DNA, 292 bp, Zea mays
ggaacacatcaaacttttctccacacgtctcaatattcctaagcttattcgagcttgtgatgaacagcagcactggaaagaacttacctacctgtacatacaatatgatgaatttgacaatgctgccaccactattatgaaccactctccagatgcatgggatcatatgcagttcaaggatgtttgtgttaaagttgcaaatgttgagctatactacaaggcagttcacttctatttgcaggagcatcctgatctcatcaatgatatgctgaatgtgcttgcacttcgttta

SEQ ID NO: 46735 - DNA, 272 bp, Zea mays
cgagatctctccccacctcccggtccgctagcagatagcgggggccagagagatcgagatccggaggcgctagcggcacccatcagcgtctgcggcaatggcgggcacggtgacggtcccggggtcgtcgtaaccctccacgccgctgctcaaggacgagctcgacatcgtgatcccgacgatccgcaacctcgacttcctcgagatgtggaggcccttcttccagccctaccacctcatcatcgtgcaggaggcgatcgaccaagaccatc

SEQ ID NO: 46736 - DNA, 276 bp, Zea mays
atggaatgaccgaacttaatgatggaaaaccaagaaagattaagaatgcaagaccttattcttttactctagaagaagacaccacctcatatggcacttatattggaggtggtattgtcactcaggtgaagccaccgaagttcttaaattcaaaaccttgaaggaggcaatcaaggagccaggagaatttctcatgagtgatttctccaagttcgaccgcccacctcttttgcatttggccttccagctttggacagtttaggactgaattgacac

SEQ ID NO: 46737 - DNA, 272 bp, Zea mays
ccaaggccgacgcatggacggcgctgtggaccataagcctgcacaagatcttcgcggccatcgccatgggcatcgcgctgctccggatgctgcccaaccggcccctcctctcctgcttcgcctacgccttcgcgttcgccatctccagccccgtcggcgtcggcatcggcatcattatcgacgccaccacgcagggccgggtggccgactggatcttcgccgtctccatgggcctcgccacgggcatcttcgtctacgtctcaatcaaccac

SEQ ID NO: 46738 - DNA, 263 bp, Zea mays
ggaaaccgtccaccagcaaagtttcctgttcctctaccaccatcaccttcaatgaaggatgacgagattcttgctccatctcaggagctgagcaagcaagggtgtatcctggaggctgttattgaagcaagtgctactgaaattatcaatctcatggatagcctaaatgaatgggacagtaaagtgggcgatggtgactgtggaagcacaatgtatagaggtgcaacagctattcttgaagatatgaaaaagcgttaccctat

SEQ ID NO: 46739 - DNA, 293 bp, Zea mays
gtttgttagcgtgacgtgcgtgaggagtctggagtcggacggaatcgaaaaggcgaaaactcagtgtctcgagtttcctcggagcggaggcgatggctgggaagggagggaaaggcttgctcgccgcgaagactacggcggccaagtccgccgagaaggacaaggggaagaaggccccaatctcacgctcctcccgcgccggcctccagttccctgttgggcgtatccaccgtcagctgaagcaaaggactcaggcaaatggtcgcgttggtgccaccgcagccgtctactcc

SEQ ID NO: 46740 - DNA, 298 bp, Zea mays
tggtgtttcagttgctccaaaatttacccaagttgaaggaaggatccttcaagccccaaagctgaaagccggcaatggtgatgatatcttttcacgaaatggacggtggaatttcactaataggaagttttatgaaacctgctctgtgaataagtgggcggtcgttaatttctctgcacgttgtgatgttcggaatcttatccgtgacctgatgaggaatgcatctgcaaagggaattcaaatggaggaaccttttgatgtgtttgaagagagtccctctatgaggcgtgcacctgtg

SEQ ID NO: 46741 - DNA, 289 bp, Zea mays
cactgccgcgccgccaccccctacaggtaaggaagaggagggcaggatgtcgcaccgtaagttcgagcacccgaggcacggctccctcggcttccttcccaggaagcgctcctcccgtcaccgcggcaaggtgaagtcattccctagggatgaccccaagaagccttgccatctcactgccttccttggctacaaggctggcatgactcacgattgtccgtgaggttgagaagccaggatccaaactccataagaaggaacttgtgaggctgttaccatcattgaaacc

SEQ ID NO: 46742 - DNA, 290 bp, Zea mays
gtcagctctccggctgcctcccccacgagctcggcatgctcaccaaggcggccgtgattgacgcgggcatgaatcagatcaccggcccaatcccgtcatctttctcgtgcctaatcagcgtcgagcagctcaacctggccggaaaccgcctctacggtcaggtacccgacgcgctctgcaagcttgctgggcccgctggccgcctcgccaacctcacgctgtccggcaactacttcacatccgccgggccggcatgcgcggcgctgatcaaagagggatgctggacgtga

SEQ ID NO: 46743 - DNA, 286 bp, Zea mays
gcgagatcgtgcgcgcctccgagatctccacgaagttgtggtaacatggggctcaccttcacgaagctcttcagccggctcttctccaagaaagagatgaggatccttatggttggtctcgatgcagctggtaagaccaccatcctctacaagctcaagctcggagaaatcgtgaccaccatccctacaatcgggtttaatgtggagactgttgaatacaagaacattagcttcactgtctgggatgttggaggtcaggacaagatcaggccattgtggaggcact

SEQ ID NO: 46744 - DNA, 287 bp, Zea mays
ggctgccgctagggttttagtgcttctctcccggcggcgcctccacatctcgtctctcagatcgggaggcgaaaccaaggcatacatatacatatttgcagtgactccatcataacaagtagagttggtgaagttcacggctgaagagctccgtgccatcatggacaaaaagaacaacatccgtaatatgtctgttattgctcatgtggaccatggcaagtctacacttacagattcccttgtggcagctgctgggattattgcccaggaagttgctggtgatgttc

SEQ ID NO: 46745 - DNA, 286 bp, Zea mays
gcattttatccttcctggtgctctgtccacctctctcgctctgggccgccgccgccgccctaagccacgtgctgaggctttcgttggtctcttcgccggcgacgagcacccagcagttctgtagaaatggctgatggtgaggacatccagcctcttgtctgcgacaatggcactggaatggtcaaggctggttttgctggcgatgatgcaccaagggcggttttccctagcattgttggccgtcctcgccacactggtgtcatggtagggatgggacagaaggacg

SEQ ID NO: 46746 - DNA, 274 bp, Zea mays
cctgaaggtccccccaagaccacctggttatgcttttgttgagtttgaagatcctcgtgatgctgaggaggcaattgctgaacgggatggatacaactttgatggacaccgtctaagagtggaggctgctcatggtggtagaggtaatgcttcctcgcatgatcgttcaagtggctttggtggcggtggtggagcacgtcgtggtgtgtcgagacactcagagtatcgtgttcttgataactggatgccttcttctgcatcatggcaggattta

SEQ ID NO: 46747 - DNA, 263 bp, Zea mays
  unsure (1)..(263): unsure at all n locations
ctcgagttctcctcaaccacattcaaagtcacagcggcgaaactctcggcgatgtctggccgcggcaacggcgtgtaaggggtnngcaagggcggcgccaagcgccaccgcaaggtgctgcgtgacaacatccagggcatcaccaagccggcgatccgcagttcggcgangaggggcggcgtcaagcgcatctccgggctcatctacgaggagacccgcggcgtgctcaagatcttcctcgagaacgtcatccgcgacgccgt

SEQ ID NO: 46748 - DNA, 299 bp, Zea mays
gaggaagcgagaggcgaggggagagaaagttctcgagctagacgagcgccgtgcgaggagagaagcgagatgagcggtgaggcggcggccgtgggcggaggcgaaggagaggcgaatggcatcccgccgaacgtcaccatctatatcaacaacctcaacgagaagatcaagctagaagaacttaagaagtccctaacagccgttttttcccagtttgggaaaattcttgatgtgcttgctttcaaactttgaagcataaaggtcaacttgggttgtcttcgagatgtcgcatcactact

SEQ ID NO: 46749 - DNA, 306 bp, Zea mays
gtctcgtacgcgcgttcgtgaactcggctcgcggatgaagaagcagttcttcgccgagatatatacgaccgcccacctactatgaattgggggaaaggtcgtgtcaccttgcttggtgattctgtccatgctatgcagccaaatctgggccaaggtggctgcatggctattgaggatggttaccagctggctgtagagctagagaatgcctggcaagagagtgtcaaaactgaaactcctatagacatagtttcctccttgaggcgctacgagaaagagagaaggctgcgtgttgctattatacat

SEQ ID NO: 46750 - DNA, 303 bp, Zea mays
  unsure (1)..(303): unsure at all n locations
aagnaccaccgatcgctcctctccactttccacattccagttccactccgcctccgctgccggtcgccgactccgaaactccgacagtccgaccacaaggtcttgtgcgggatccacagaaggatgagtgaagaggataagactgctgcttctgctgagcagccgaagagggcccctaagctcaatgaaaggatcctctcttctctgtccaggaggtccgtagctgctcatccatggcatgatcttgagatcggtcctgatgctcctgctgttttcaatgttgttgttgagatcacaaaggga

SEQ ID NO: 46751 - DNA, 280 bp, Zea mays
gatgaagcctggtccggattccattggaatcatcgctgtttcgcacaattgtagtggcgtacagcccgagcttgcggcctagtgagccttgagcccacaaaggtcgcggagatcctcatggatcgcccttcttggtaccgcgattgtcggtgtgtggatattctccatgttatccctacgggtactggtggaactatcgagcttatctacatgcagacttacgccccgacaactttggcggcacgcgcgacttttggatctcgatacactagtgtcttga

SEQ ID NO: 46752 - DNA, 301 bp, Zea mays
ccttgtaccagtcaaggttggtggacctctggtcttactactgaggttaagtccgttgagatgcaccatgaggctctccaggaggcccttcccggtgacaatgttggcttcaacgtgaagaatgttgctgtgaaggatctgaagcgtgggtatgtggcctccaactccaaggatgaccctgccaaggaggctgctagcttcacctcccaggtcatcatcatgaaccaccctggccagattggcaatggctatgccccagttctggactgcaacacctcacacattgttgtcaagtttgctg

SEQ ID NO: 46753 - DNA, 255 bp, Zea mays
gctcggcaagctgctgtctggcgtcaccatcgcgcacggcggtgtcctccccaacatcaacccggttctcctgcccaagaaggtggcggagaaggcgtccagcggcggcagcaaggagagcaagtcccctaagaaggccgccaagtccccaaagaaggcagccaagtccccgaagaaggcttagaaattagtcacttcactagcgctctgctgtagcatgttcgtgtttagatctgtggaacttatgtgttccag

SEQ ID NO: 46754 - DNA, 243 bp, Zea mays
  unsure (1)..(243): unsure at all n locations
cacttggaaagattggggcgctcatttgctgggaaaataaaatgccacttttgaggacagcgctgtatggtaaaggtattgagatatactgtgcccccactgctgactccaggcctgtttggcaagcctccatgacacacattgctttggaggggggatgctttgtcttgtcagcaaaccaattctgccgcaganaggactatcctcccccaccggagtatgagtttgctggtttaggtgaag

SEQ ID NO: 46755 - DNA, 298 bp, Zea mays
acgagaagagcggcggcgcgggcggacaaggagcaggcggaggaggagctgtgccaagccacaatgggtatctcacgcgactcgatgcacaagcgccgtgccaccggtggaaagcagaaggcctggaggaagaagcgaaagtatgagcttggtcgccagccggccaacaccaagttgtcaagtcataagacagtgaggagggtccgtgttcgtggaggtaacgtgaagtggagggctcttcgccttgatactggtaactactcatggggaagtgaagctgttacccgcaagacccgta

SEQ ID NO: 46756 - DNA, 273 bp, Zea mays
gttccaaccatattcaactgcgtcattgagataccaaggggcagcaaggttagctatgaacttgacaagaaaactggactgatcaaggtggaccgtgtgctgtattcatcagttgtttaccctcacaactatggattcattcctcgcacgctttgtgaagacagtgatcctttggatgtactggttataatgcaggagcctgtcatcccaggctgtttcctacgtgcgaaggccatcggctttatgccgatgattgatcagggagaggcagat

SEQ ID NO: 46757 - DNA, 286 bp, Zea mays
ccgtacccaatctaatcgacacccggccgagataagccgcaagttcttcgttggtggcaactggaaatgcaatggaaccgcagatcaggttgagaagattgtcaaaaccctgaatgaaggaaatgttccctcttcagatgttgttgaggtcgttgtcagtcctccttatgtgttcctcccggtggtcaagagccagctgcgccaagagttccaagttgctgctcagaactgctgggtgaagaagggaggtgcatcactggtgaaattatgctgaatgctcgtcaac

SEQ ID NO: 46758 - DNA, 250 bp, Zea mays
agcaccttcccaaaaaatcccccattttcttcgaggcgacgagagcgtgaaagacagggtacacggcagcgacgatgtcggggcgcgtgcaagggcggcaaaggtctgggtcaaggcggtcaaagcgccaccgtaaggtgctccgtgacaacatccagggcatcaccaagcccgccatccggaggctgctctcggaggtggcggcgtgaagcgcatttcgggggcttatctacgaagaaacccgcggcgt

SEQ ID NO: 46759 - DNA, 281 bp, Zea mays
aacaggtgacattaatgttttcgctcagatgattgacgacgcggaaggcctggaaaaaatcgagaacctacagagccatgataataatgaaatctatgaaaaggctgtgaagcttcttgagacttactggatggaggaggaagatgatgcaatggctactgctggggaagctgctcctgctgtttttgactttagccaaggtggcaaccctcctggtggtggtttgaacctcaactgaatacagtatttgaccaaaagggtgttaattccctcatgacaac

SEQ ID NO: 46760 - DNA, 276 bp, Zea mays
ttggtattgcaaatgtgagatgccgtacaaccccgatgacctcatggtgcagtgcgatgcttgcaagcactggttccatccatcttgtgtggctatgaccattgaacaggccaaaaagctagatcactttgtttgctcagactgtttcaaagaaaatggttcaaagagactttcaaatgcatatgccacttcaccaaattttgagcctaaggctgaaccaaaaaggcagaggaggtaacaaactgtgagtggtaacatccatatgggtaaggggag

SEQ ID NO: 46761 - DNA, 268 bp, Zea mays
attgacctttgcttcgccaatgaggatgaagctagagaggttatagggggaggtctggaatcagatccagaggaggcgcttgcgttcttgggcaagtattgcaaatgggctgtggtcacacttgcttcaaagggatgcatggcaaagcatggcaaacaggtcgttcaagtgccggccatcggggagagcaacgcgatggacacaactggagcgggcgacctgttcgcgagcgggttcctgtacgggctggtgaaggggttgccgctgg

SEQ ID NO: 46762 - DNA, 126 bp, Zea mays
gtttcagttcatcgattcagttcttgcctgaggatccaggaagaggacagcaatgggagaacgtgcaggtgaccgtgtcctgagccgcctccacagcgtcaaggagcgcattggcgactcactctc

SEQ ID NO: 46763 - DNA, 276 bp, Zea mays
catttctgactgccatgagaccaagcttctggagaggatggcggccagtgtcgagtgcttgtccgagaaggttagggactgtttccttgacctgggctgcttcccggaggacaagaagatccccctcgacgtcttgatcaacatctggatggagatccatgaccttgatgagccagatgcttttgccatcttggttgagctttcgatcaagaaccttcttaccctcgttaacgatgcacagaacaaggctggagatctgtacagtagctaccatga

SEQ ID NO: 46764 - DNA, 271 bp, Zea mays
cggcacgattctcctcctccgtccgcgtagctctcggtttcggcgatgtcggggcgcggcaagggcggcaaggggctgggcaagggcggcgccaagcgccaccgcatagtgctgcgcgacaacatccagggcatcacgaagccggcgatccgtaggctggccaggaggggcggcgtcaagcgcatttctgggctcatctacgaggagacccgcggcgtgctcaagatcttcctcgagaacgtcatccgcgacgccgtcacctacaccgagc

SEQ ID NO: 46765 - DNA, 270 bp, Zea mays
gtcggaatagtcctggacttcaactggtacgaggctcttacaaactcacctgatgaccaagcagcagcccaaagagccagggacttccacattggctggtttgttgatccattgataaacggacactatccacagataatgcaagatctcgtgaaggagaggctgcccaggttcactcctgagcaggctaaactggtgaagggctcggcagactacatcggtatcaacgagtacacatccagctacatgaaggggcagaagctggtccag

SEQ ID NO: 46766 - DNA, 276 bp, Zea mays
caccactcgcatcgtgtgctcagtcagatccccgtcccgcatttcctaaggccagttggcattgaagacgatgactgcttctgcagctgctggtgtgcagatggtggctgcacgcccttgcatttcgagcctcgccaggaattcttaccgcatcggtttctaggactgattgcatgctcagtaccactgctacattccccaaaatcagctgctactgggctctaaggtttaagcgcaatgatgttgttgtaagagccatatcggaagagtgtggcc

SEQ ID NO: 46767 - DNA, 265 bp, Zea mays
ggaaaatggctccgcttctcgctgctgccatgaaccacgctgcagcccatcctggccttaggagccacctagtaggacccaacaatgagagtttctcacggcaccacctgccgtcttcttctccacagagcagcaagcgaaggtgtaaccttagctttactacacgatctgcaagagtaggcagccaaaatggagtccaaatgttgagcccctcggaaatcccacaaagggactggttcctctctgacttcaccttcggtgccgc

SEQ ID NO: 46768 - DNA, 216 bp, Zea mays
atagggaagtttgcattgcttgatcgtctacttccaaaactgcagagagctggtcacagggttctgcttttctctcagatgacgaaactgcttgatgttttagaaatatatttgcaaatgtacaatttcaagtacatgaggcttgatggatccacgaagactgtagatcgaaggaggttactggcagattttaataagaaggattcggaatatttc

SEQ ID NO: 46769 - DNA, 270 bp, Zea mays
ctcgagccgctccgagcctcagttcgcatccacgcgcgccgccgccgcctcgccggtcgacgctcaccgcgcaccatggcggaacaggtaatgctactgagaaggctttcctcaagcagccaaaggttttcctcagctcaaagaaatctggcaagggtaagaagcctctccagggcggcaaccgtttctggaagagcattggccttggcttcaagactcccagggaagcaatcgaagggacctacattgacaagaaatgcccattcactg

SEQ ID NO: 46770 - DNA, 258 bp, Zea mays
ggtatcctgttaaaggagcaaggggccaggggtttcttcaggggatgggtgcctactttgcttggttacagtgctcagggggcttgcaagtttggcttctatgagttctttaagaagtattactcggacattgcagggcctgagtatgcccaaaagtacaagactctaatctacctcgcaggatctgcatctgctgaggtaattgctgatgtggctctctgcccttttgaagctgtgaaggtacgtgtgcagacacaa

SEQ ID NO: 46771 - DNA, 299 bp, Zea mays
cgcccaaaccaggtcaagagaacctgctatgctcaggcatcccagattcggcagattcgccgcaagatggttgagattatgatcaaccaggcttctacatgtgaccttaaagaacttgtttctaagttcattccggaagttattggcaaagagattgagaagtctacctccagcatcttcccacttcaaaacgtcttcatccgcaaggtgaagatactcaaggcccccaagtttgatctcgggaagttgatggaggttcatggcgactacaaagaggacgttggtgtgaagcttgagag

SEQ ID NO: 46772 - DNA, 302 bp, Zea mays
ggaagatgtaagataccccccgagtagaccatctcagggtggctatggtgcatataacgcatacatttcagctgctaccaggtatgcaactttgggtgcaccaacactgtatgatcatcctggatcagcctatggaagagggtactatggatcctctcaagcagtgggcaagaagatatttgttggtagacttccacaagaagcaaacacggatgacctaagacattactttggcagatttggtcgaatcgtagatgcgtatattccaaggaccccaaagaagtggccaccgaggttttggg

SEQ ID NO: 46773 - DNA, 125 bp, Zea mays
aggaggagcccgtggagctcgagcccggcgccttcgtccccgttgacctccgccgcgccaatcccaacggcctcgagtttgacaacctctacctcgacatgaatgggatcatccacccatgcttc

SEQ ID NO: 46774 - DNA, 298 bp, Zea mays
gggtttttaccaaagcatgctcggtcaagaagagataggcttgagatatctgctcgtgaagctgctacacaaatattctatgttcctccccatggcattcagcagtttcttgttgatgctgcttcatcttttggcgattccaggcattgtgttgtcgcaagggagatcacaaaaatacatgaagagttttggcgtggaactttaggtgacgcaaatgaagcttttgcaactcgacaaccaaagggagacataacagtgctcatagaggggatgttaatttcggctgacgagattccat

SEQ ID NO: 46775 - DNA, 265 bp, Zea mays
ctgctttggagctcactagggtgctcagatcgaagcggcaggttgtgaccgggacgctgcatgacctgatactggaggcagctgatgctgtaagaaagagtctgtacatagcgaaagtctcagtgaagccgtgggaggatttcaagtccgttgtcgagtatcgccttgctggagactctgaatctgaacccgagccttctgttgcgtctgataaaggctctgggcaaggagttgtcaagctctctcttgaagcagacatcataca

SEQ ID NO: 46776 - DNA, 286 bp, Zea mays
gccaccgcagagactgagatggggggttttgtcaagacccacaagagcaatgcatacttcaagcgtttccaggtgaagttcaagagaaggcgcgctggcaagacagactacagggccaggataaggctgattaaccaagacaaaaacaagtacaatacacccaaatacagatttgttgtgcgatttaccaacaaggacatcacagcacaaatcatatctgctagtatagcaggtgatatggttcttgcttctgcttactcgcatgagttgccacgatatggtctcg

SEQ ID NO: 46777 - DNA, 283 bp, Zea mays
atggcatgctatgttcttctaggcctatgcgtattgggcctgctgcaaacaagaaagctactgttgttcaggagaaagtaccaagtgctcagggagttcagtctgacaatgatcctaacaatacaaccatttttgttggtggtcttgaccccaatgtcactgaagatatgttgaaacaagttttcaccccttatggggacgtagtccatgttaagattcctgttggcaaaagatgtggttttgttcaatatgctaacagatcttcggcagaggaggcattggt

SEQ ID NO: 46778 - DNA, 248 bp, Zea mays
ctcgagcgcaagatcctctgcaaggtggtcaatgtagaacttagagctgaaactgattctgatgaagtttatgctcaaattatgctgcaaccacaaacagagcgtagtgagcccaccagcccagatcctgaaccacctgagcctgaaagatgcaacattcattccttctgcaagaccttgactgcttcagatacaagtacccatggtggattctgagtcatgtccagttggggcaagaactagtggct

SEQ ID NO: 46779 - DNA, 297 bp, Zea mays
cttacggctgctgatgccagcgggggtgtgacggtgaaactctgcgacggggctggatcgtcttgcgagcgctgggtgttccgcaacgacggcaccatcttcaacaccggcaccgggatggtcttggacgccaggccatctgcgggggctaatgctactgctagccaagtcatcgtgtcgcccgccactgggagtcccacccagcagtggacgctcatgctgtgatctcatctacggctcatgagtcatgactgtgggggcagggcagtactgcactgcaacagctagctggtgtgt

SEQ ID NO: 46780 - DNA, 289 bp, Zea mays
aagggggatggccttggcgctgagattgttggcaccttcatcctggtgtacaccgtcttctcggccaccgatgccaagaggaacgccagggactcccatgtccccatccttgccccactgccaattgggttcgcggtgttcctggtccaccttgccaccatccccatcaccggcaccggcatcaacccagctagaagacttggcgccgccatcatctacaaccgggatcatgcgtggagcgaccattggatcttctgggtcggacccttcatcggcgccgccctggctg

SEQ ID NO: 46781 - DNA, 293 bp, Zea mays
catctgtgtactttgtggcaaattgccttattgatatgtactcgaagtgtggtgatgttgatactgctagaaatgtatttgatagcatgcctaaaaggaatgaagtatcttggacttcaatgatgtcagggtatggaatgcatggtcgtggtaaggaggctttagacatatttgacacgatgcagaaggcaggctttgttcctgatgatatttccttcctggttcttctttacgcttgtagccattctggcatggtggatcaaggtctgaattactttgatatcatgcgcagg

SEQ ID NO: 46782 - DNA, 291 bp, Zea mays
ttgggaaggacaagcttgtcgtatcaacttcctgctcgctcatgcacaccgctgtggatcttgtgaacgagactaagcttgacagcgagattaagtcttggcttgcttttgctgcccagaaggttgttgaggttgatgctcttgctaaggcattggctggtcaaaaggatgaggcttacttcgcagcaaatgctgctgctcaggcctcgaggaaatcctcaccccgtgtgaccaatgaagaagtccagaaggctgctgctgctctcaagggctctgaccaccgccgtggga

SEQ ID NO: 46783 - DNA, 287 bp, Zea mays
ctcccaactgatgagactcttgtggcccagatcaaggaagggtttgaaagtggcaaggatcttgttgtgactgtccagtctgctatgggggaggagcagatctgcgcgctgaaggatgttggccccaagtaacttccctgccttggaatactgtatctcaaaacctaaatcgaaaaaagaagtgtatcaaggattgctacagagacatccatctggcttgagctggcttttgctatgtcaaacacaagtgcagggatcgctgggtgttgcacgtgtctgcattatct

SEQ ID NO: 46784 - DNA, 290 bp, Zea mays
gggggagctgctccatggcaagaaaggtggccatctccactgggacactcgctacaagatcgccgtcgaggccgccaaggggctcagctacctgcaccacgattgctcgccgccgatcctgcaccgcgatgtcaaatcgaacaacatcctgcttgattccgatttcgaagcacacgttgctgatttcgggctcgtcaagttcttgcacgactctggcgcatcacagtgtatgtctgccattgctggctcctatggctatattgccacagagtacgcatacgccctcaagg

SEQ ID NO: 46785 - DNA, 289 bp, Zea mays
ctggcgaggcaaaagcgcaaacgcgaccacagacagagcgcgcttcagggccttttttttttgagataacaaggaggagaggaggagatggcggtcacgatcacctgggtgaaggcgaggcagatcttcgacagccgcggcaaccccaccgtcgaggtggacgtgggcctcagcgacggcatctacgcgaggggggccgtacccagcggcgcatccactggaatatatgaggccttggagttgagggatggaggatctgattatcttggcaagggtgttcttaaggctg

SEQ ID NO: 46786 - DNA, 292 bp, Zea mays
cggctcgagggagcatgtccgggagcagcaggcccaagtcgagaaagaagacttcagtgacatggtggcggacatgctgccaaacagaagcaaaagaaacggaaagctcagccccaggacagtcgtgggggcagcaagaaatacaaggagttcaaattttaggtccttctcacatacctggccttcctttaggccctttgtatgtctgggctttctatgtgggttcctgaagctagttctgtactcactaggcttgtcacttcctgttcttattttagacttgtcttgtaaa

SEQ ID NO: 46787 - DNA, 312 bp, Zea mays
cattcagcaaacaagcaaaggtacggccaccaccaccggccaggcagcaagctcaaaccctaaccgccggcgacgccagcacgatggcccgctacgaccgcgcgatcaccgtcttctcccccgacggccacctcttccaggtcgagtacgccctggaggccgtccgcaagggcaacgccgccgtcggcgtccgcggcacggacaccgtcgtcctcggtgtcgagaagaagtcaacccccaagctccaggactccaggtccgtgcgcaagatcgcgtgcctggacacccacatcgctctggcatgcgcggggc

SEQ ID NO: 46788 - DNA, 302 bp, Zea mays
cagcgtatcatcggtatccatcgctcctactcctatcatccagagaatctgagcggtattgatggcgcccaaggcggagaagaagccggcggcgcagaaggtggcggaggaggagccctcggagaaggcggctccggcggagaaggcccccgcggggaagaagcccaaggcggagaagcggctaactgcgggcaagtccgccggcaatgagggcggcgacaagaatggtaggaagaaggcgaagaagagcgtggagacctacaagatctacatcttcaagggtctgaagcaggtgcaccccg

SEQ ID NO: 46789 - DNA, 307 bp, Zea mays
  unsure (1)..(307): unsure at all n locations
caaaagagcccgcctctctagtaggcgtaagatgtcccatcctcaaagctgaaaatataacatgccaaaattgtctagcgaaactgcaagagcacaagaggtgcaagatagtttcttgctcttgatcacataatggacagaccaccgggtgcggtagtcctttcctctgaagtctatccacagtccaacatttattccttatcgccagccatacaaaaaatttgcatttggggggtgcccacgacttccagacccattaccatccctggaaagnaatagctcccataaacaacgccgaataacaaga

SEQ ID NO: 46790 - DNA, 216 bp, Zea mays
ccccgatcccgctcgctcgctcgccgccagttgtccagcagctcggatcgtctcatacctcggcgaaaatgagagagatcttgcacatccagggagggcaatgtggcaaccagatcggtgccaagttctgggaggtcgtgtgtgacgaacacggcattgacactacaggtcggtacactggcacttctgaccttcagttggagcgcgtcaatgtcg

SEQ ID NO: 46791 - DNA, 249 bp, Zea mays
  unsure (1)..(249): unsure at all n locations
tgtgagagatatgaactccatcacaaactgcgatacacagatgatgctttaattgctgctgcacagttgtcttatcagtatatcagtgatcgtttcctgcctgacaaggccattgacttgattgatgaagctggatcccgtgttaggctgaggcatgcccagctccctgatgaagccaaatgtatggacnaagagctgcgacagataaccaagcagaaaaacgaggctgtacgcggccangattttgag

SEQ ID NO: 46792 - DNA, 303 bp, Zea mays
catacctccgcgctcccgcccagctagggtttccccgatatccccgcattctcaaccgccgccgtcgccgagagcggcgacacgatgttggagctgcggcttgtgcacgggagcatcctcaagaaggtcctggaggcgatccgcgagctggtcaacgacgccaacttcgactgctccggcaccgggttctcgctgcaggccatggactcgagccacgtcgacctcgtcgcgctgctcctacgcgccgaggggttcgagcactaccgctgcgaccgcaacctctccatgggcatgaacctcaac

SEQ ID NO: 46793 - DNA, 304 bp, Zea mays
catgctggaaaccgagtatctggttcagcctcttgggcgggctgaagacgaagagcactcgagcgactttgaaccggaagaaaacggtgacggtgccgacgatgaggagatcgatgaagaggacgatgacggtgaggactctgtggaggcgcagacatctacgaagacgaagaaggtcagcgacgaagaagtagaagacgacgacgatggggatgatgatggtgacgatgatgacgatgggaggtcaccgatcaagcgatagtatggttagctctagttttgtagctgtgtccttgggtgtttg

SEQ ID NO: 46794 - DNA, 293 bp, Zea mays
catcgactctggcaagtcgaccaccaccggccacctgatctacaagcttggaggcattgacaagcgtgtaatagagaggtttgagaaggaggctgctgagatgaacaagcggtccttcaagtatgcttgggtgctcgacaagctcaaggctgagcgtgagaggggtatcaccattgatattgctctgtggaagtttgagaccaccaagtattactgcaccgtcattgatgcccctggacaccgtgatcatcatcagaacatgatcactggtacctcccaggctgactgtgctg

SEQ ID NO: 46795 - DNA, 296 bp, Zea mays
gtctgctcactcagtcctgcgcaagagctcgctctcggagaaaaaaacgcgggatgcgataatggactgacttatctgtgcgagcgagaaagggaaggtgctggtcacgggggcgtcgggcttcgtcggctcctggctcgtcatgaagctcctccaggccggctacaccgtccgggcgaacgtgcgcgatcccgcgaacgttggggagacgaagccattgatggaccttcccggagcaacggagcgcctgtccatatggaaagccgacctggcggaggaaggcagcttccacgacg

SEQ ID NO: 46796 - DNA, 303 bp, Zea mays
agcatggtaaaaaggttgtgtgtggaactccaagtggagcgctcttattatattcatggggatactttaatgattgcagtgaccgctttctcggacacacgcagtctgtggatacaatgctgaagctggatgaagacactttggtttctggatcatcagatggtgtgatcagattagtgggcatcctacctaataggataaaacagccacttgctgaacattcagaataccccattgaggcccttgctttgtcaacgacaagacatatgtaagcagcatctcacatgataagatgctgaagct

SEQ ID NO: 46797 - DNA, 294 bp, Zea mays
atccaatctagaagcacccctctccctctctctctcttcgccgtccgaagctccgcaccccaatctaatcgacacctcaccgagatgggccgcaagttcttcgtcggtggcaactggaaatgcaatggaaccacagatcaggtcgagaagattgtcaaaaccctgaatgaaggacaggttcccccttcagatgttgtggaggtcgttgtcagccctccttatgtcttccttcctgtggtcaagagccagctgcgccaagagttccatgttgctgctcagaactgctgggtgaag

SEQ ID NO: 46798 - DNA, 298 bp, Zea mays
cctccgtccgcgtactctcggtttcggcgatgtcggggcgcggcaagggcggcaaggggctgggcaagggcggcgccaagcgccaccgcaaggtgctgcgcgacaacatccagggcatcacgaagccggcgatccgtaggctggccaggaggggcggcgtcaagcgcatttctgggctcatctacgaggagacccgcggcgtgctcaagatcttcctcgagaacgtcatccgcgacgccgtcacctacaacgagcacgctcgccgcaagaccgtcaccgccatggatgtcgtctacgc

SEQ ID NO: 46799 - DNA, 292 bp, Zea mays
agcctttggaatggaatacttgcatagcaaaaacattgtgcactttgacttgaaaagtgacaatttgcttgttaatttaagggaccctcagcgtccaatatgcaaggttggtgatcttgggctttcaaaagtgaagtgtcagaccctcatatctggaggtgtccgaggaacacttccatggatggccccagaacttctgaatggtagcagcagcttggtctcagaaaaggttgatgtattctcttttgggattgttctctgggaactgctaacaggagaagaagcatatgca

SEQ ID NO: 46800 - DNA, 302 bp, Zea mays
cctcgtaccatttcgatccaatggcgccgacgtcgaagctgtcgacgggcatcaagcgcgcttcgcggtcgcacgcgtaccatcgccgtgggctgtgggccatcaaggccaagaacggcggcgccttccccaaggccgacaaggccgccgccgccgtggaacccaagttctaccctgccgacgacgtcaagccccgcgttcccagcacccgcaagcctaagcctaccaagctcaggtcgagcatcacgcctgggacggtgctgatcctcctcgcatggcgcttcatggggaagagagtggtg

SEQ ID NO: 46801 - DNA, 300 bp, Zea mays
gcaatctctagcagcagatcctcgtgcgaacaaagcgctagccccttcgtactgtcccgatggcccgcacgaagcagacggcgaggaagtccactggcggcaaggcgccaaggaagcagctggccacgaaggcggcgcgcaagtctgccccggcgaccggcggagtgaagaagccccaccgtttccgccccggcaccgtcgcgctccgggagatccgcaagtatcagaagagcacggagctgctgatccgcaagctgccgttccagcgcctggttcgtgagatcgaccaggacttcaaga

SEQ ID NO: 46802 - DNA, 283 bp, Zea mays
atagcagccgccgtcatgtcgaagcgaggtacgggaggttcggctgggaaccagttccgcatgtcactgcgtctaccggtggctgcgacggtgaactgcgcggataacacgggcgccaagaacctctacatcatctccgtccagggcatcgagggtcgcctcaaccgtgtcccgttcgcctgtctcgtcgacatggtcatggtcaccgtaatcacgggaaagcccgatctcaggtaggaagtggtgcctggcgtcatcgtcctgcagcgcaatcgtagcgtcg

SEQ ID NO: 46803 - DNA, 297 bp, Zea mays
gataaagaagagaaagctaccagggcttacaatttagctgctctcaagtactggggaaccacaacgactacaagttttccagtatttgcatatatttcagttcacttctcaagaattatactttttttcctttatcactgcttcctttggatattatacgatttatttttcatgcttagatcagcaactatgagaaggacctggaagagatgaataatatgtgacgacaagaatatgttgcgtcacttagaaggaacgcgcggtcaaaatcaagatttcaggaaaagcagtggattt

SEQ ID NO: 46804 - DNA, 328 bp, Zea mays
cttacgagtctgcaacttcggctccagctcagctcccatatccgctcccctacctctccagcatcctcccgtctccgtcgtctcgtctccgctcctcacctcgccagccatgggcaagatcaagatcggaatcaacggtttcggaaggatcggcaggctcgtggccagggtcgccctgcagagcgaggatgtcgagctcgtcgccgtcaacgaccccttcatcaccacggattacatgacgtacatgttcaagtacgacaccgtgcacggccaatggaagcacagcgacatcgccctcaaggactccaagacgcttctcttcggcgag

SEQ ID NO: 46805 - DNA, 298 bp, Zea mays
ctcccagaagtcacgcaccaaacaccaccaccaaagaaggcgagaacgctccccttcccctccagtctccaggaccgtctcctcgcctgctcatctaccgctgctccccttctctgggctcggagaatcggagagaagcgcgcgcgaccatggcgtccagcgcctctcggttcatcaagtgcgtcacggtcggcgacggtgccgtgggcaagacatgtatgctcatctgctacaccagcaacaagttccccactgactacatacctacggtgttcgacaatttcagtgcgcatgtagt

SEQ ID NO: 46806 - DNA, 297 bp, Zea mays
aaaccagaccaccaaacaagtgccagcgccctctcgcagtcgccgcaatggagagcaccttcatcatgatcaagcctgacggcgtccagaggggcctcattggtgagatcatcagccgttttgagaagaagggcttctacctcaaggccttgaagcttgtcaacgtggagaggtcgtttgccgagaagcactacgccgatctcgcctccaagcccttcttccagggcctcgtggactacatcatctctggccctgtggtggccatggtctgggagggcaagagcgtcgtcacaactg

SEQ ID NO: 46807 - DNA, 282 bp, Zea mays
gcaggagcaataagatttggtctggaccagattttaaacgactctgctggtcgtcgaatctctatccggcgtgcgaattaactgaatagggtttcgttggcgatggcgagctcgtggacgcttcctgaccacccgaagctccccaaggggaagccggtggctgtcgtcgtgctggacggatggggcgaggccaaccccgaccagtacaactgcatccatgtcgctcagactcctgtcatggactcgttaaagaatggtgctcctgagaaatggagactagtg

SEQ ID NO: 46808 - DNA, 294 bp, Zea mays
ccggatgtttatgagtgcacatttgttcagtctgagataactgacctgccattcttcgcatcaagagtcaagttgggcaagaatggtgttgagtccgtcatttctgccgacctccagggaatgactgagtatgaggccaaggcacttgaggcgctgaaggccgagttgaaggcaagcattgagaagggtattgctttcgtgaacaaacagcgggaagctgctgcatctgtttgaggcgaacaagtgaaacagaaggaacaatcgtcttgaatggcttttaagttttgcagccta

SEQ ID NO: 46809 - DNA, 284 bp, Zea mays
gaacgcaagcagtgattattacatcgtggccagtgctaggtttgtgaacgaatcgctttggaccagagtcaccggtgttgcaattttgcaatattcaaattcaaagggaaaagcatctggtcctcttcctgatccaccaaatgatgagtatgacaaaactttttcaatgaaccaggcacgttccatcaggatgaacgtgagcactggtgctgctcgtccgaatcctcaaggatcatttcactatgggtctatcaatgtgagccaagtttacaagctgaggaatg

SEQ ID NO: 46810 - DNA, 281 bp, Zea mays
ccctcactctcctccgaagccatcgtccacgtcccagcctccccggactctaggggcagaagctgcagcgtcgagatggtgaaggggcgcacggggcagcgcgtgaggctctacgtccggggcaccgtccttggatacaagcggtccaagtcgcaccagtacgagactacgtcgctggtgcagatcgagggggtgaacaccaaggaggacgtcgcgtggtactgcgggaagcggatggcctacatctacaaggccaagacctagagcagcggcacccacta

SEQ ID NO: 46811 - DNA, 283 bp, Zea mays
catcgacctagctcgctgcctccagttcctacaccacgagaagggcctgcctcacggcaacctgaagccgactaacatattcctgactggtcctgatctcactccaaagctggtggattacggcctgcacaggttcatgactccaagtggcgccgccgagcagatactgaacctaggagcgctagggtaccgagccccggagctggcgaacgcggggaaggcggcacccacgttcaaggcggacgtgtacgcgttcggggtggtggtcatggagatgctgacg

SEQ ID NO: 46812 - DNA, 291 bp, Zea mays
ggagaagcagccgccgttgctgctgccgcgtccacagaatggggggtttcgtgaagactcataagaccaatgcgtatttcaaacgtttccaagtgaaattcaagagaaggcgggctggcaagacagactacagggccaggataaggctgattaaccaagacaaaaacaagtacaacacacccaaatacagatttgttgtgcgatttaccaacaaggacatcactgcccaaatcatatctgctagtatagcgggtgatatggttcttgcttctgcctactcgcatgagttgc

SEQ ID NO: 46813 - DNA, 290 bp, Zea mays
ggaaggatggcgggaaagttataatcggtgacattatgattgaccactctgggcctatgctggaaactcagctcctgatggacatcggcatgatgaccatgacaacaggacgacagcacgacgaaaaagaatggcgtcagtcttcaccaaagcagggttcagcgaatacaagatcctgaaggaatttggacctcgtgttgccttcgaagtctatccgtgagatatatatttacatacatatgtatgcatatgggttgcgggctttggcatgaccatgtcataaataaatg

SEQ ID NO: 46814 - DNA, 284 bp, Zea mays
gcaaagcaagtgtctgctcactcagtcctgcgcaagagctcgctctcggagaaaaaaacgcgggaggcgataatggagggaggtgccggtgcgagcgagaaagggaaggtgctggtcacgggggcgtcgggcttcgtcggctcctggctcgtcatgaagctcctccaggccggctacaccgtccgggcgaccgtgcgcgatcccgcgaacgttgggaagacgaagccattgatggaccttcccggagcaacggagcgcctgtccatatggaaagccgacctggc

SEQ ID NO: 46815 - DNA, 279 bp, Zea mays
ctcttgccttggctattgttccaaaagatggggcttccacaaccggtaacactgcatttcaagataaggggtttgatcctacaggatgggaactcgcccttgttaccgcaccgagcaacacgacttcatctgcgtctgtcggtcaattgggtggtggatttgacaagctcattttggacagcctttatgatgacggggcctacaggcagaggcaacagcaacaggtgtatggttcagcagtgcctaatccattcatgtcaaatgatcctttcgtgatgt

SEQ ID NO: 46816 - DNA, 285 bp, Zea mays
  unsure (1)..(285): unsure at all n locations
cccaccctacgaatcttccaacccctccgacgatgccttccgcgccggcgctcgtccccgcgtgcgacatgcaggagccgttgctggcggagtcgtccgaccgcttctccatgttcccgatccggtacccgcagatttgggagttctacaagaaggcggtggcgtccttctggactgccgaggaggtggacctctccgcggacgcgcgccactgggacgcggccctctcccccgacgagcgccacttcatctcccacgtgctcngcttcttcgccgcctccgacg

SEQ ID NO: 46817 - DNA, 305 bp, Zea mays
ctttccccgagctctcgaaaccctaggtgcgtgccgaccggcggcggcggcgaggtgatggcgatggacccggacgcggtggcgaaagcttcgtggagcactactaccggacgttcgacaccaaccgcgcggcgctggtggggctgtatcaggagacctccatgctcaccttcgagggccagaagttccagggcccatccgccattgccggcaagctcggatctcttcccttccaggcctgcgagcaccagatcgtcaccgtcgactgccagccgtcggggccccagggaggcatgctcgtcttc

SEQ ID NO: 46818 - DNA, 304 bp, Zea mays
cgctcctgttcctccataccccacccccccgcaggagcggcgcggcggcggcggcggcaaagccaaaggcaagatgttcgggcgcgcgccgaagaagatcgacaacaccaagtactacgagatcctcggggtgcccaagtcggcgtcccaggacgacctcaagaaggcctaccgcaaggcagctatcaagaaccagcccgacaagggcggtgaccccgagaagttcaaggagctcgcacaagcctatgaggttttgagtgatccagagaaacgtgagatttatgatcagtatggtgaagatgcc

SEQ ID NO: 46819 - DNA, 295 bp, Zea mays
  unsure (1)..(295): unsure at all n locations
caaaccacacaccccacctaccccggccggaccgtcaggcagcacagcatggacctcgccctcctagagaaggccctgctgggcctgttcgccgcggctgtggtggccatcgccgtggccaagctgaccggcaagcggtaccgcctcccaccggggcccccgggcgcccccgtggtgggaaactggctgcaggtgggcgacgacctgaaccaccgcaacctgatggccatggcgaacggnttcggcgacatcttcctgctgcgcatgggcgtgcgcaacctggtggtggtgtcga

SEQ ID NO: 46820 - DNA, 294 bp, Zea mays
gaattctctaagcacgaatttgaaaacgagaagaatctgctaggaggagctttgggtgccaaagctgcagaagatttgaagctaagaataattgaacataatatcttggttgtgtctaagtactattcgagggttaccataaagaggcttgctgatctgctctgcctgagtttgcaggaggcagagaagcatctttcagacatggtgaactcaaaatctctgactgcgaagatcgacaggccgatgggagttgtgagcttccgggtagttcaggactgcaacggcacacttaac

SEQ ID NO: 46821 - DNA, 295 bp, Zea mays
cgtcatcgatctcgtttcaaatccatccatcctcgtttcctccgtcccgcagcatctcaaccccatggccaagatcaagatcgggatcaatgggttcggcaggatcggaaggctggtggccagggtggccctgcagagtgacgatgtcgagctcgttgccgtgaacgaccccttcatcagcaccgactacatgacctacatgttcaagtacgacactgtgcacggacagtggaagcaccatgaagtcaaggtgaaggactccaaaacccttctctttggtgagaaggaggttgct

SEQ ID NO: 46822 - DNA, 296 bp, Zea mays
gaagaatgttgctgtgaaggatctgaagcgtgggtatgtggcctccaactccaaggatgaccctgccaaggaggctgctagctttacctcccaggtcatcatcatgaaccaccctggccagattggcaatggctatgccccagttctggactgccacacctcacacattgctgtcaagtttgctgagctcgttaccaagattgataggcgatccggcaaggagctggagaaggagcccaaatttctcaagaacggtgatgctggtatggtgaagatggttcccactaagcccatgg

SEQ ID NO: 46823 - DNA, 294 bp, Zea mays
ggatagaagcttggagcctcgtgtctccgattttggcctcgcgaggctgcttgtagacagtgctgcccacgttaccaccgtcgtcgcgggcacctttggatacctagcaccagagtactagcaaaacgggcatgctactgagaaatcagacgtgtatagctttggagtgcttatgctggagctagtgaccggaaagaggccgaccgattcttgcttcatcaagaagggactgaacattgttggctggctgaacaccctaactggggagcaccggctggaggatatcatcgatga

SEQ ID NO: 46824 - DNA, 290 bp, Zea mays
caccgcgtgcgaaccaagcagaccacagcaagaagcgtagtcgtcgccggaaggaaaggcgcggacaagatgtcgtggcaggcgtacgtcgatgagcacctgatgtgcgagatcgaaggacaacatctcagcgccgccgccatcgtcggtcacgacggcagcgcttgggcgcagtccgagagcttccccgagttaaagcctgaggaggttgctggtatcataaaggactttgatgaacctggtactcttgcaaccactggtcttttcgttggaagtacaaagtacatggt

SEQ ID NO: 46825 - DNA, 141 bp, Zea mays
caagaatgaagggcatgatactattatcctggcaggtgccgagtatgggagtagtagctctcgggattgtgctgcagagggcccaatgcttcagggagtgaaggctgtgatagcacagagctttcataggattcaccgcag

SEQ ID NO: 46826 - DNA, 276 bp, Zea mays
gagccactcaacgtcgagatcgagacgacccgagtccgccgcgcccgtgcaccaccgaccgtcgaactcccgaaagtaactctatttcttgatcaacatcaacatgtcgcgggaggataatgtttacatggccaagctggctgagcaagcagaacgatacgaggaaatggttgagtacatggagaaggtggctaagactgtagatgtggaagagctcaccgttgaggagcggaactcttatctgttgcctacaagaacgtaattggggcccccgtg

SEQ ID NO: 46827 - DNA, 279 bp, Zea mays
agagaggcgaggaaggagggagagagcacgggggcttgatcgaagatggatgccggagcaaaggtggtgaagaaggtcgcggcggggcgtcgcggcgggggcggccccaagaagaagccggtctctcgctccgtgaaggccggcctccagttccccgtaggccgtatcggccgctacctcaagcagggtcgctactcccagcgtgtcggcaccggcgccagcgtctacttcgctgccgtcctcgagtacctcgccgccgagttcctcgagttggcgggg

SEQ ID NO: 46828 - DNA, 281 bp, Zea mays
ggtctttccgttacccggcggctttaaaccctagttcccattccatcttcgtttccgctccgccgccgtcgatggagttctggggtctcgaggtcaaacctggatccactgtcaagtgtgagcctggacatggctttatcctgcacgtttcccaggctgcccttggggaatcaaagaaaagtgacagtgccttaatgtatgtcaaagttgatgacaagaagcttgccattggaacgctctctatcgacaaatacccacagatttaattcgatttggttttc

SEQ ID NO: 46829 - DNA, 287 bp, Zea mays
caccaacacaccgcgcgcgtcctcatcctcacttcaggtctgcagcccccaactacccccagcctcggaaggaaccttccagaagcgcaagactctaaaggccgtcgccttcccattcttcctcgccgcgggggtcgcctgagatcacataaacaatggtgaaggctgttgctgtgcttggtagcagcgatggtgtcaagggcaccatctttttcacccaagagggagatggccctaccgctgtcaccggaagtgtctctggcctcaagcctggcctccatgggttc

SEQ ID NO: 46830 - DNA, 288 bp, Zea mays
gcacaagcgcactctagcaatggcttctgaggttgtccgccctagcgacgccgagctactaaaggcacaagccgacatatggcggctcagcctctcctacctcacgcccctgtcactgaggtgcgccgtggagcttggcatccctacggcgatctaccgccatggcggggctgcctcagccgctgagctggtcacggcgctgtctctcccctccactaagctgccgttcctccgccgcctgctgcggctcctcgccgcgtcgggcgtgttcaccgtcgacaagcagag

SEQ ID NO: 46831 - DNA, 291 bp, Zea mays
catttctgcatccccctcccgccgcgccgcctcaccgccgccggagaagatgggtcgcgtgatccgcgcgcagctaagggtgcggggtccgtgttcaagtcccacacccaccaccgcaagggccccgcccgcttccgctccctcgacttcggcgagcgcaacgggtacctcaagggcgtcgtcaccgacgtcatccacgaccccggccgtggcgcgccgctcgccaaggtcactttccgccacccattcaggtacaagcaccagaaggagctctttgtcgcagccgagggc

SEQ ID NO: 46832 - DNA, 284 bp, Zea mays
actttgacaacaggatggttaaccactttgtccaggagttcaagagaaagaacaagaaggatatcactggcaacccgagggctctccggaggctgaggacctcttgtgagagggccaagagaactctgtcttccactgcccagaccaccattgagattgactcgctgtacgagggcattgacttctactccaccatcacccgtgccaggtttgaggagctcaacatggacctgttcaggaagtgcatggagcctgttgagaagtgcctgagggatgccaagatg

SEQ ID NO: 46833 - DNA, 225 bp, Zea mays
ctgccgcttcgcagctcctctctctgttcttcctcctcctcctcactgcttgtgatgccatctactgcgacgaagacgactgctacgacctcctaggggttaagcaggacgcgaacggtcagacatcaagaaagcgtactacaagctctctctcaaacaccacccggacaagaatccgatccggagtcgcggagctcttcgtcaagatcgccaatgcttacgaga

SEQ ID NO: 46834 - DNA, 283 bp, Zea mays
accgtccgtaagaacggcttcatcgtcatcaagaaccgtccctgcaaggttgtggaggtttctacctccaagactggtaagcatggccacgccaaatgccactttgtcgccatagacatattcaatgggaaaaagcttgaagatattgttccttcatcacacaactgtgacattccgcatgtgaaccgtactgagtatcagctgattgatatttctgaggatggatttgtgagccttcttacttcagatggcaacactaaggatgatcttagactcccaactg

SEQ ID NO: 46835 - DNA, 282 bp, Zea mays
ggaatttgaagagagatatgatcaaatctttaatgtgaacaatatatttgattccaaagagttatctgttggtagagctgccttatcaagtcttctgggtggtgttggctacttctatgggcagtccaaaattgcactcccgaaaggttttacaacaaaaaatggggataagtacatatcatattggcctgctgcataatatacagctgtccccaagccggtctttcttcccaaggggatttctgtgggatgagggcttccatcagtaagtcatttggcgtg

SEQ ID NO: 46836 - DNA, 278 bp, Zea mays
ctcgagccgctcgtgggccacccgtcttgttgaggcccctaagaccgacctggacttctggcaagttcttttcccggttgctgtggcgcatacaattggccatgttgctgctacagtgagcatgtctaaggtggcagtgtcattcacacacataattaaaagcgcagaacctgcattcagtgttttggtgtcaaggttcttccttggggagacgtttccaattccagtatatctttctcttcttccaatcattggtggttgtgctctagctgctgtca

SEQ ID NO: 46837 - DNA, 283 bp, Zea mays
cgcccgtccccgatctccgatcccctcgtcgatccaaagatgcagatcttcgtcaagaccctcactggaaagactatcaccctcgaggtggagtcttctgacaccattgacaacgtcaaggccaagatccaggacaaggagggcatccccccggaccagcagcggctcatctttgctggcaagcagctcgaggacgggcgcacacttgccgactacaacatccagaaggagagcaccctccaccttgtgctccgcctcaggggaggcatgcagatcttcgtca

SEQ ID NO: 46838 - DNA, 212 bp, Zea mays
agcacgttgcgccgacaggatgggcaagtgacgtggacttcgtactgctaggaagctccgtagtcaccgacgagaccagaagtggcatgataaacagtataagaaagctcatttgggcacagcctaaaggccaacccttttggaggtgcttctcatgctaaaggaatcgtgctggaaacagtaggagatgaacgcaaacagccaaattctgc

SEQ ID NO: 46839 - DNA, 226 bp, Zea mays
agataaggaatatgagggcaatgttgaggccactggtgaggacttctctgttgaaccagctgatgagacgatgcctttccgtgctctcttggatgttagcctgtatgaggactacaactgggacccgagtcgttggtgccatcaagtgatctttggatggtggcctgtatatgcagcacaccgataagagatatgctgctttcaacaacgatgacaagcagctgta

SEQ ID NO: 46840 - DNA, 288 bp, Zea mays
ggccctaccgctgtcaccggaagtgtcaccaccctcaagcatggaaaaactggaatacataaaaatgcaactggtgacaccaccaatagatgcatgtcaactgagacacactacatccctgcgagcaaggatcatggggcaccagaacatgagaaccgccatgctacttgatcttggaaacgtgacagctgcgagcagatggtgtagctaatatcaatgtcaccgacagccagatcaacatgactgggccaaactcaatcattggcagagctgttgttgttcacgctg

SEQ ID NO: 46841 - DNA, 295 bp, Zea mays
tctgcttccattctgttcaagttagcgccgctaatccgctccctattcaccatccaatccaatcggcttcccccaggcacccatggcgacggcggtggaggttcccgtggaggcgccggtgaggacagtgaaggtcaccaatgtctctcttagtgcaactgtgcaagacattaaggagttcttttccttttcaggagatattgatcatgtggagatgcagagtggtgatgagtggtcccaagttgcatatgtcactttcaaagatgcacaaggcgcagaaacagcacttcttctt

SEQ ID NO: 46842 - DNA, 294 bp, Zea mays
cttgaagaacatgttccccagtgagaaagagatagttgttaaaagtcaaatccttgctggtggccgagggctgggaactttcaaaagtgggctgcaaggaggtgtccatattgttaaggctgaggaagctgaaagcattgcacgtaaaatgttaggccagattctggtaacgaaacaaactggtccggagggaaagattgtgagcaaggtctacttgtgtgagaaactgtctctcactaatgagatgtattttgccatcacccttgataggaaaactgctggtccgctcattat

SEQ ID NO: 46843 - DNA, 296 bp, Zea mays
gttccagctagctaggagagagctttatttaggcggcggcaacaagatgaacaggaagccaggagactgggactgcagggcgtgccagcacctcaacttcagccgtcgggacgcatgccagcgctgcagtgaaccacgtggagttggtgatacgtagcggcggtggtggcgacttgggtcggcgtggtggttcctccttcggcggtggctttggtgctggctctgatgtccgccctggtgactggtactgctcctgcggcgcacacaacttcgccagccgctccaactgcttcagg

SEQ ID NO: 46844 - DNA, 293 bp, Zea mays
tggcagggaacgcggcgaaagacaacaagaagacgcgcatcatcccgcgccacgtgctcctggcgatccgcaacgacgaggagctcgggaagctgctggccggcgtcaccatcgcgcacggtggcgtcctccccaacatccactccgtgctcctgcccaagaaggcggcggagaaggcggccagcggcggcagcaaggagcccaagtcccccaagaagggcgccaagtcccccaagaaggcttagaaagtagggtcttcatttgcgctgtgtgctgtagcatgttcgtgtcta

SEQ ID NO: 46845 - DNA, 292 bp, Zea mays
aagcccggtacctccggcctccgcaagaaggttactgtattccagcagcctcattatctgcagaactttgtccagtcaacattcaatgcccttcctgcagaccaagtaaaaggtgcaaccattgttgtctctggtgatggccgctatttctcaaaagatgctgttcagatcataacaaaaatggctgctgccaatggagtaagacgtgtttgggttggacaaaacagtctcatgtctactcctgctgtatctgctgtcatccgtgaaagaattggtgcagatggatcaaagg

SEQ ID NO: 46846 - DNA, 291 bp, Zea mays
gttaatgagggtttcactggggatacacaaggaagacatcgagtctgccatcaggacgtaccatctgatgtcccagcgctggtttactcatgcttcaccgacgcttttcaatgctggcacgccgaggccccaattaagcagctgttttcttatatgcatgaaagatgacagcattgagggatactatgaaaccctgaaagagtgtgctgtaataagcaaatctgctggaggaattggtgtctcagttcataatatccgtgctactgggagttatattcgaggaacaaatgg

SEQ ID NO: 46847 - DNA, 290 bp, Zea mays
cgcacaccagcacctgccctcctcgccgtcgccgcctccctccgcgcgaccgatctaccctccgccgccaccatgtcgctgatcgccggggaggacttccagcatatcctgcgtttgctgaacaccaacgtggatgggaagcagaagatcatgttcgccatgacctcaatcaagggtgtcgggcgccgcttctccaacatcgtctgcaagaaggccgacatcgacatgaacaagagggccggcgagctgacgcctgatgagctggagcgcctgatgacggtcgtggccaa

SEQ ID NO: 46848 - DNA, 292 bp, Zea mays
aacctctcaaaccctagccgcctcctgcaagtttcagagctcaggaatctgcgccatggcgagtgagacggagaccttcgcatttcaggctgagatcaaccagctgctctcactcatcatcaacaccttctactccacctatgattacctcctccgcgagcttatctccaactcttccgatgcgctggacaagatcaggttcgagagtctcactgacaagagcaagctcgatgcgcacctgcagcttttcatccaccttgtcccagacaaggccacgaacacgctctccatc

SEQ ID NO: 46849 - DNA, 293 bp, Zea mays
cgctcgctagctaggatttccaccaatggcggcgcccaccacctcccgccgcggccccggcggcgcgcgcaacatggacgacgagaacctaaccttcgagacctccccgggggtcgaggtcgtcagcagcttcgaccagatgggcatcaaggacgacctgctacgcggcatctacggctacggtttcgagaagccctccgccatccagcagcgcgccgtgctccccatcatcaacggccgcgacgtcatcgcgcaggcccagtccggtaccggcaagacgtccatgatctccc

SEQ ID NO: 46850 - DNA, 287 bp, Zea mays
ctctgttacttctccctccgccgccactcgcctatcattcaccggcaccgccaattccataccgtcctccgccacctctgctgagagcgagaagagatggcaggcaacggtgatgtgccggaaatcggcatcgatctcggcacgacgtactcttgcgtcggcgtatggaagcacgaccgtgtcgagatcatcgccatcgacaagggtaaccgcaccacaccctcgtacgtcgccttcaccgactccgagagcctgatcggagatgcggccaagaaccacgtcgccat

SEQ ID NO: 46851 - DNA, 285 bp, Zea mays
agcacttgttccagctagctaggagagagagctttgtttaggcggcggcaagatgaacaggaagccaggagactgggactgcagggcgtgccagcacctcaacttcagccgtcgggatgcatgccagcgctgcagtgaaccacgtggagttggtgatcgtagcggcggtggtggcgacttgggtgggcgtggtggttcctccttcggcggtggctttggtgctggctctgatgtccgccctggtgactggtactgctcctgcggcgcacacaacttcgccagccg

SEQ ID NO: 46852 - DNA, 285 bp, Zea mays
ccgcgccacctacctcggcgtcacgagcaggccgcagagggagaggaggctcggtgacaggtacctggccggcgacaacgaggacctgccggagtccgtcgactggcgggccaagggcgccgtcgcgtacgtcaaggaccacggcagctgcggcagatgctgggctttctcaacaatagctgctgtggaaggcatcaaccagattgttactggcgacatgatctccttgtctgagcatgagcttgttgactgcgacacttcatacaaccatgggtgcaatggcgg

SEQ ID NO: 46853 - DNA, 284 bp, Zea mays
cactcctaccccacacagaagcggcggcggcggagcaaacgcaggcgaaggcgagggtgtgagggaaggagcaccagccatggtgcacgtcaacttctaccgcaaccattctaagacgttcaagaaaccaaggcgtccttatgagaaggagcgtcttgatgctgaactgaagctggtcggtgagtatgggctgaggtgcaagcgtgagcctttggagggtccagtatgcactgagcaggatccgtaatgctgcaggcacttgctcaaccttgacgagaagaacc

SEQ ID NO: 46854 - DNA, 283 bp, Zea mays
gtcctgttggtgaggacatgttccattggcaagcgaccatcatggggccttcggacagcccatttgcaggtggggtattcttggtgaacattcacttcccaccggattaccctttcaagccaccaaaggtgtctttccgcaccaaggttttccacccgaacatcaataccaacggcagcatttgccttgacattcttaaggaacagtggagccctgctttaactatctcaaaggttctcctgtcaatctgctcactgctcagggactcaaaccctgatgatcc

SEQ ID NO: 46855 - DNA, 207 bp, Zea mays
actgattggagtgtcagagccatctctgccacaaacttgtatcatcgtgtattttatagttatgtcaattctgatgatataaaggagactcgctacacttacattatgccaaagaacatattgaagaaattcatatgcatagcagatctgcggacacaaattgctggatttttgtatgggctgagtccacaggacaatcctcaagtc

SEQ ID NO: 46856 - DNA, 234 bp, Zea mays
ctcgtgaaaatcctccgcagcttgatgagcatttctcgaaaccaatgaaagagtttgtctcactatgtttaaagaagaatccagcagagaggcctagtgccaaggagcttcttaagcatcgtttcagagaatatgcccgattgtctccagggctttaggagcgaataagagagcggcatgatttgcagcaagaagcgtggatgcaagacaggatggggcaacactggatgggga

SEQ ID NO: 46857 - DNA, 294 bp, Zea mays
tcgtgggtttcagtacgcccagcgaaatgcaggacatcgggaggacatgccgttgtgtgcgctgctgttagcttcagaccatgcattgacattcacaagggaaaagttaaacagattgttggctctactcttcgggatttagcaaatgatagcatggaacttgtgacaaactttgaatcagacaaatctcctgcagaatttgctaaattttataaagcagatgaacttctaggaggacatgttataatgcttggcgcaaatccttcaagccaggctgctgcactggaggcacta

SEQ ID NO: 46858 - DNA, 204 bp, Zea mays
ctcgagcgcgcgagccccggccgtccggttcccatctgcacgccgcgccgccgagactcaaggccattttggaggacccagcgaactttgacaccctggctatggtgtttaacaggtcgagcagatttggaaggctgcagggagtgaagtgtgcgattgcagggaggaacctttacatgaggttcagctgcagcacaggggatg

SEQ ID NO: 46859 - DNA, 277 bp, Zea mays
caccctccaccttgtgctccgtctcaggggaggcatgcagatctttgtgaaaaccctgaccggcaagactatcaccctcgaggtggagtcctctgacaccattgacaacgtcaacgccaagatctacgacaatcagggcatccctccagaccagcagcggctcatctttgctgggaagcagcttgaagacggtcgcacgcttgccgactacaacatccagaaggagagcaccctccacttggtgctgcgcctcaggggaggcatgcagatcttcgtg

SEQ ID NO: 46860 - DNA, 118 bp, Zea mays
tgttgttaggaagagaatcaagctcagtgctgagaaggctatcttcatatttgtgaaaaacacccttccaccaacagctgctctgatgtcttcaatctatgaagagatcaaggacgag

SEQ ID NO: 46861 - DNA, 220 bp, Zea mays
agcttatatatgctagagagggtgcaaaggatatgatggataggtcatgttctgatttaccgtggcatgttagccttgaggttgatgggaaaaacattgaaattccggaggatgcagaaggtgtgattgtaatgaatatccctagctacatgggtggtgtggatctgtggcaaaacgacaatgaccataatgatgatttcagattgcaatcaatccatga

SEQ ID NO: 46862 - DNA, 238 bp, Zea mays
caccaagccgataccctaaccctcgcccttctcgatgtcggccgccaccaccggcccagccccttcagtagccactccgatggcgccccctccgtcctacccggcctcctccacggcctcttcctccatctccgcgtccgccgaggaggaggacgacctctatggccgcctcaaatcgctccaacgccacatggagttcgtcgaaatccaggaggagtacgttacagacgagcacaag

SEQ ID NO: 46863 - DNA, 199 bp, Zea mays
cgatccgccgccatcgcttcaagcagcgaaccctagccgccctcagcgacggattgcagatctcccagccatgacgttcaagcggaggaacggcggacgcaacaagcacgggcgcggccacgtcaagtacatacgctgctccaactgcgccaagtgctgtccaaaggataaggctatcaagcggttcttggtgaggaac

SEQ ID NO: 46864 - DNA, 275 bp, Zea mays
aaaattggttactgccaccacacgtcgaaattctccaaatagtatagattccaagattcatcacaacaatcttatcaacaatattctggcaaagatagaaggtaatcttgcccaggctgaggatgccattatgctagataaggatggctttgtatcagaaacaaacgcaacaaatatttttatggtcaaaaagggaattgtattgacacctcatgctgactattgccttccaggcattacgcgagcaactgtcatggatcttgtggtgaaagaaa

SEQ ID NO: 46865 - DNA, 282 bp, Zea mays
ataccactcccaaacccccgcttccagaaccttctcgaagctccccgccgcctcctccactcgcaccgatggcgaaggaaccaatgcgcgtgctcgtcactggcgccgcaggacaaattggatatgccctggttcccatgattgctaggggtgttatgcttggtgcagaccagcctgttattctgcacatgcttgacattccgccagcagctgaagcccttaatggtgttaagatggagttggttgatgctgcgtttcctcttctgaagggagttgttgcta

SEQ ID NO: 46866 - DNA, 282 bp, Zea mays
  unsure (1)..(282): unsure at all n locations
gaagagatggttgagtatatggagaaggtggctaagactgtagatgtggaagagctcactgttgaggagcgtaacctcttgtcggtcgcatacaagaatgtgattggggctcgccgtgcttcatggcgcattgtctcttctattgaacagaaggaggagtcccgtaagaacgaagagcatgtgaaccttatcaaggaataccgtgcgaagatcgaggctgaactgagcaatatctgtgatggcatcctgaagctgcttgactcncacctagtgccttcttct

SEQ ID NO: 46867 - DNA, 282 bp, Zea mays
cccaacgagccgtcacagcttgccattgacctgaatgctcagggtctggctcgctacgccatcatctgccaggagaacggtctggtgccaattgttgagcctgagatccttgttgatggccctcatgacattgatcgctgcgcttacgtcactgagacagtccttgctgcctgctacaaggctctcaacgagcaccatgtcctcctggagggtaccctcctgaagcccaacatggtgactcctggctccgactctaagaaggtgacacctgaggtgatcgcc

SEQ ID NO: 46868 - DNA, 154 bp, Zea mays
gatgcactgtcgagcgagacgcctcgtggggatatttgcatcagaggggacaccttgttctcgggatgctacaagcgagaggacctaaccaaagaagtcttggtcgatggctggttccacacaggatacattcttcgagtggcagtctcacgga

SEQ ID NO: 46869 - DNA, 283 bp, Zea mays
gacggcaggaagaccgaagaccgagccgtgcggtggctcgggatgggaacgggacaggaccccaaaatctcagatccttcctgcccgcacgcccgtgcccgtcgacgctacttcttgacggccgagcttaacctccgtgctctcctcctccagggggatctgatacgccacaggctgcgcgatggtgctgtcggtcttcggctacggctccctcatctggaactccggcttcgatttcgatgacaaaatcctcggcttcatcaatggctacaagcgcaccttt

SEQ ID NO: 46870 - DNA, 302 bp, Zea mays
tgaatggttttgatggtacagatacacattactttcacagtggtccacgtggccatcactggatgtgggattctcgcctatttaactatgggaactgggaagttttaagatttcttctctccaatgctagatggtggctcgaggaatataagtttgatggtttccgttttgatggtgtgacctccatgatgtacactcaccacggattacaagtaacatttacggggaacttcaatgagtattttggctttgccaccgatgtagatgcagtggttaacttaatgctggtaaatgactattca

SEQ ID NO: 46871 - DNA, 296 bp, Zea mays
cacgccgtcgctagcgcctgccgcggcgaacttctgtgctccccggcgccgggctcgggtcgtcgtcggccaggaagatggctggcggcttcagggtactgcatctggtcaggccttttctggctttcttgccagaggtgcagagcgcggataggaagataccgttcagagaaaaagttatatacactgttatttccctcttcattttcctggtctgcagccagctcccactctatggcattcattcaacaactggagctgatcctttctactggatgcgtgttatcctcgcatca

SEQ ID NO: 46872 - DNA, 297 bp, Zea mays
gggaaaacaagccgtcggttctactcccggaaggtgtcgccaaaggtctcctccagcacctacaacatagcgcaggtttcatatgagctgaatgtcttgggtactcggggccctaggcggatgaactgtgttatgcactccatccctacctcgtgccttgaggctggtggcagtgttcccagccagctggacagcatccttgctcgctccactgatgagtcatttggcagcatttccttctccaaatcatctgttgtggaccggtctatgcgtttcagcagctcaagattctccgac

SEQ ID NO: 46873 - DNA, 295 bp, Zea mays
ctcgttcagtggcaagagtttgctggccagaatcctgactgtcttgagcatctggctgccagctcaggcacaggctcttctgactttgagcagctggaacagatcctgtaatgtattccccaggtgaagtatatatgcctggatgtggcaaatggctactctgaacactttgttgaatttgtaaaagatgtacggaagcgcttcccccagcacaccatcatggcagggaatgtggtaacaggagagatggtagaagagctcatcctttctggggctgacatcatcaaatgtggga

SEQ ID NO: 46874 - DNA, 293 bp, Zea mays
atcttctccggcaccggcagcgcccaaatccggcaatccgctgctccgaatggactcaggttacaatccccggacggtggaggaggtgttccgggacttcaagggccgtcgtgccgggataatccgcgcgctcaccactgatgcggaggatttcttcaagcaatgcgacccggaaaaagaaaacttgtgcctgtatgggtttcctaatgagagctgggaagtaaatttgcctgctgaagaggtgccacctgacctcccagaaccagcattaggcataaactttgcaagagatg

SEQ ID NO: 46875 - DNA, 294 bp, Zea mays
acccgctttccccgcctcacctcccccccgctcctgcgcctccataccccacccccccgcaggagcggcgcggcggcggcggcggcaaagccaaaggcaagatgttcgggcgcgcgccgaagaagagcgacaacaccaagtactacgagatcctcggggtgcccaagtcggcgtcccaggacgacctcaagaaggcctaccgcaaggcagctatcaagaaccaccccgacaagggcggtgaccccgagacattcaaggagctcgcacaagctcagcaggttttgagtgatccag

SEQ ID NO: 46876 - DNA, 293 bp, Zea mays
gccgagctgacgcaaacatgcagatctttgtgaagaccctcactggcaaaaccatcacccttgaggtcgagcccagtgacaccattgagaatgtcaaagccaaaattcaagacaaggagggtatcccacctgaccagcagcgtctgatatttgccggcaaacagctggaggatggccgcactctctcagactacaacatccagaaagagtccaccctgcacctggtgttgcgcctgcgaggtggcattattgagccttctctccgccagcttgcccagaaatacaactgcgac

SEQ ID NO: 46877 - DNA, 281 bp, Zea mays
  unsure (1)..(281): unsure at all n locations
ctcgaagcaccgaaccagcggctgcggcggcggcggtgcggcaagtgttgaccatggcggagtaaagcggttgtcggagagccgtgacctgacgcggattgcgcggatncggcgcactcccacatccgggggctagggttggactcgtccatggaggcgcgcgatacctcggagggcatggtcgggcagctccacgcgcgccgcgcctcggggctcatactccagctcatccgccagggcaagatcgccggccgcgctgtgctccttgcgggccagcccgg

SEQ ID NO: 46878 - DNA, 286 bp, Zea mays
gcacggcaacacgctgacggcggccgtgatccttaacgagatccccagcaacgtgagggaggtgttcctgaccggcgccacctccagagctcggcagggccatcgcgctctacctctgcaggaagaagatcagagtcctgatgttcacggtgtcgtcggagaggttcgtgaagatccagagggaggcgccgccggagtaccagcagtaccttgtgcaggtgaccaagtaccaggccgcacagaactgcaagacttggatcgtgggcaagtggctgtcgccgcgtga

SEQ ID NO: 46879 - DNA, 285 bp, Zea mays
gcaagatggcgggtgaaaaagttgagaagccagatactaaagagaagaaacccgaagccaagaaggttgatgctggtggcaaggtgaaaaagggtaacctcaaagctaaaaagcccaagaaggggaagccccattgcagccgcaaccctgtccttgtcagaggaattggcaggtattcccgatctgccatgtattccagaaaggccatgtacaagaggaagtactcagccgctaaatccaaggttgaaaagaaaaagaaggagaaggttctcgcaactgttacaa

SEQ ID NO: 46880 - DNA, 286 bp, Zea mays
ctcgagccgcgccgccgctgccgtttcgcgcaccgtaccctagccctcgtcagcggcaccttcagcgtcctccagccatgacgttcaagcggaggaatggcggacgcaacaagcacgggcgcgagccacgtcaagtacatccgctgctccaactgcgccaagtgctgccccaaggataaggctatcaagcggttcttggtgaggaacattgttgagcaggctgccgtgagagatgtgcaggaggcctgtgtacatgatggatatgttctacccaaattgtatgcaa

SEQ ID NO: 46881 - DNA, 272 bp, Zea mays
gccgcctcaccgcctctctcaatctgataccgcagatccgtcgtccggtgagtggaagccgcacgaacccatggcctccggcgagcttgcctgcacctacgccgctctcatcctcagcgacgatggcatcgccatcaccgccgagaagatcgccacgatcgtgaaggcggccaacatcaaggtcgagtcctactggccggccctcttcgccaagctcctggagaagcgcaacgtcgaggacctcatcctctccgttggatctggtggcggag

SEQ ID NO: 46882 - DNA, 274 bp, Zea mays
cgcgacggcaacgactggggcgaccgtcgctgccgccctacttgccggttgctcggatcttcttcggcccgttagccgtcgacgagcaccaccagggcaaccagatacttcagtggcttcgcaaggatgtcctggtgcactattgagtctgatcctggtgtgttcactgagctgattcagcaaatgcaagtgaaaggtgtacaggtggaagagctttactctctcgatgtgggctctcttagtcaactgcggccagtatatgggctaatttttc

SEQ ID NO: 46883 - DNA, 271 bp, Zea mays
cgaccgcctgcgcagggtcagccaccagggctacagcactgaggccgagttcgaggagcccagggtgattgacctgtgggacctggcgcagtccgccaacctcacggacaaggagctggaggcgttccgggaggagctcaagcacttcgaagccaaaatcgaggagcacaaccactaccagaagcagctggagattgcgcacgagaagctgaggcacgcagagagcgtgggcgacggcgagcgtgtgagccgcagccgcgagaagcacgcc

SEQ ID NO: 46884 - DNA, 268 bp, Zea mays
acggatcactatgatcctaacaatgcaacccacaaaaggatcaaggatgaaattgagcttggcaatggcctgccagatatcagaagcactcggcaatgtctccaggcagtaaaagacgccgggtttgaggttgtttgggataaggatcttgctgaagattctcccttgccttggtacttgcccttggatccaagccgattctccctgagtagcttccgtttgacttctgtgggacgcatgattacccgcacaatggtcaaggccctgg

SEQ ID NO: 46885 - DNA, 271 bp, Zea mays
cggtggccggacggtggtggcatcgccaattcaactccgcatctgaatcggcactcggcagcgcgccactccatagtgtaggaggaggagatggcgctcacaagaatcggtcttgctggccttgcggtcatggggcagaaccttgccctcaacattgcagagaaagggttccccatctctgtgtacaacaggacaacctccaaggtggacgagaccgtgcagcgtgccaaggcagaaggaaaccttcccgtctacggcttccatgaccccg

SEQ ID NO: 46886 - DNA, 272 bp, Zea mays
caataatgtctattactgtgtgggaactgcatatgttatacctgaagaaaatgaaccaaccaagggccgaatccttgtatttgcagttgaagatggaagtttgcaattaattgtggagaaagaaaccaaaggagcagtttattcgttgaatgcattcaatgggaaattgttggctgctatcaaccagaagattcaattatacaagtggatgtcgcgcgaggatggttcacatgagctgcaatctgagtgtggccaccatgggcacatacttg

SEQ ID NO: 46887 - DNA, 275 bp, Zea mays
ccgttagcgaatcactcaattcccaaaatttatggtgccatgaagcctactgctgtatttgttcctctagaagaaattctaaaaagtgggaacttcgagcttgtgacaaaggagatatttggtccattccaggtagtcacagaatactctgaggatcagcttgagttggtcttagaagcctgcgaaaggatgaatgcgcatctgacagctgcagttgtctcaaacgacccgctattcctgcaggatgtacttgggagatccgttaacgggacaac

SEQ ID NO: 46888 - DNA, 255 bp, Zea mays
cctagccccttccctccctccctctccccgcgggccgccagcggcaattatcccctcgattcgaccccgactcgtccgcccgcgaccgggattccctccgccaagcgcggatctgaacgctgcgctccgtgtcgccgctcgaatccgccatgaagggggctcaaatccaagggcgccgccaaggccgatgccaagctggcggtcaagagcaatacggcggagaatctcgccaacggcacgaaacggatcgccggc

SEQ ID NO: 46889 - DNA, 266 bp, Zea mays
gcccccagtgccccaagccaggtgtcatcctcctaaccaagagaggccggcagatctgtgctgaccccaataagaagtgggtccagaaatacatcagcgacctgaagctgaatgcctgaggggcctggaagctgcgagggcccagtgaacttggtgggcccaggagggaccaggagcctgagccagggaaatggccctgccaccctggaggccacctcttctaagagtcccatctgctatgcacagccacattaactaactttaat

SEQ ID NO: 46890 - DNA, 267 bp, Zea mays
gctagctagttctatagctgctgtcgtcgtcgtcatcggcggcggcggcgctgttcttagaggataaggttgtcctagcggagagggagctagccaggatttcggttgagatcaagagggggagcaggcggcggcggcggcgatggggcgcgggaaggtgcagctgaagcggatcgagaacaagatcaaccgccagtgaccttctccaagcgccgctcggggctgctcaagaaggcgcacgagatctccgtgctctgcgacgccgag

SEQ ID NO: 46891 - DNA, 269 bp, Zea mays
gtcggattgataacttcattgatggtctatctgctctgctggacgagctcaatgaagagacttttgagcaccatagaagtggtttaatagctgataaactggaaaaggaaccttcacttagctaccaaactagtgattattggtctcagatcgctgataaaaggtacatgtttgatatgtcaaaactggaagctgaagagcttaagacagttcagaaggctgatgttatagcttggtacaacacatacataagatcatcgtccccaaag

SEQ ID NO: 46892 - DNA, 261 bp, Zea mays
actcgagcgaattcggctcgagtctcattctcatccccgacccccgcaccgcagactaaaccctagtccccggaggcgaccttgcggcctccgctgcgctctgactggtgcgcgtttagacgaggagctgcggcggccaagaccaatcgaccatggctacccgtatccagtttgagaacaactgtgaaattggtgttttctccaagctgacaaatgcttactgtctggtagcgattggagggtcagagaacttctacagtg

SEQ ID NO: 46893 - DNA, 268 bp, Zea mays
tgcatcgctaagcccttggtgagaggattaggccagttcttaccgtgaacaagatggacaggtgcttccttgagcttcaggatcagggtgaggaagcttatcagacttgctcccgtgttattgagaatgccaatgtcatcatggcaacatatgaagataagctccttggtgatgtccaagtatacccagagaaggggacagttgcacttttctgctggtctgcatggatgggcctttacactcactaactttgcgatgatgtatgcat

SEQ ID NO: 46894 - DNA, 278 bp, Zea mays
agttgggccgcttggtcaaggacatgaagatcaagtccctggaggagatctatctcttctccctgcccattaaggaatcagagatcattgatttcttcctgggggcctctctcaaggatgaggttttgaagattatgccagtgcagaagcagacccgtgccggccagcgcaccaggttcaatgcatttgttgctatcggggactacaatggccacgtcggtctgggtgttaagtgctccaaggaggtggccaccgccatccgtggggccatcatcctg

SEQ ID NO: 46895 - DNA, 273 bp, Zea mays
catgaatctacttctgatccttacctttgttgcagctgctgttgctgccccctttgatgatgatgacaagatcgttgggggctacatctgtgaggagaattctgtcccctaccaggtgtccttgaattctggctaccacttctgcggtggctccctcatcagcgaacagtgggtggtgtcagcaggtcactgctacaagtcccgcatccaggtgagactgggagagcacaacatcgaagtcctggaggggaatgaacagttcatcaatgcggc

SEQ ID NO: 46896 - DNA, 266 bp, Zea mays
gaggaattcggtatagaagatgcacacctagaagatatcatccatgacgttgatcaggacaatgatggtcggatcgactacaacgagtttgtaacaatgatgcagaagggaaataacccactagggaaaaaggggcactgccagatgagctttggtcttagagaagcattgaagcttggctaagtggcatgatcaatcctgtgtgaagtgccattcggcttcatatgccaactttagctgatgaaactaagtccgtgaatttggga

SEQ ID NO: 46897 - DNA, 262 bp, Zea mays; identical to SEQ ID NO: 44487

SEQ ID NO: 46898 - DNA, 242 bp, Zea mays
attacggatcactatgatcctaacagtgcaacccacgataggagcaaggatggtcttgagcttggcaatgtcctgccagatattagaagcactcggcaatgtctccaggcagtataagacgccgggtatgaggttgtttgggatcaggatcttgctgtagaatctcccttgccttggtacttgcccatggatccaagccgattctccctgagtagcttccgtctgacttctgtgggacgcat

SEQ ID NO: 46899 - DNA, 272 bp, Zea mays
atctcgccttccgaggaaactcaccagcccaccacagacccgagcggaagaagccatgtccgggcgcggtaagggtggcaaggggctcggcaagggcggcgcgaagctcaccggaaggtgctgcgcgacaacatccagggcatcaccaagccggcgatccggcggctggcgaggaggggcggcgtcaagcgcatctcggggctcatctacgaggagacccgcggcgtgctcaggatcttcctcgagaacgtcatccgcgacgccgtcaccta

SEQ ID NO: 46900 - DNA, 275 bp, Zea mays
gtggatgtggatgatgcagagcaggatgatatggttaaagagcaccgcaagcggaaagagtttgaagtttttgttgtggtctggataaagatgcaacagaaaatgaccttaagaaggtttttggtgaagttggtgagatcactgaagttcgtctgatgatgaaccctgccacaaagaagaataaaaggctttgccttcctgcgatatgcaactgtagagcaagcaaggcgtgctgtttcagagctaaagaatccactggtgcggggtaacaatgt

SEQ ID NO: 46901 - DNA, 300 bp, Zea mays
gtaagcctcagttccgccggcgtgcgaggggttcgatctgggttagcctctcacgatgccgccagcccccaagtccggcgacgccctcttcgccagcgtggatcgcgtcaatgcggactgttcacgctcacgtacggcgccatagtgcggcagctgctcacggatctggaggaggtcgaggaggtcaacaagcagctcgatcaaatgggttacaacattggaacacgattggttgatgagttcttagcgaagtcaaatgtatcaaggtgtgttgacttcaaggagactgccgatgttatt

SEQ ID NO: 46902 - DNA, 304 bp, Zea mays
cttccctccgccggatccactgtctactttggtcctcatccccatccccgcacaccatcagtccccgcaaacatcacgctgacaaggaacatccaccgcgctcgccgccaacaacttctacaccatccaccggaggtgctggagaacatgcaggcgccggtcaagaaccccacgatcctcgtgatcgcgtcgaccgcgtagctgcaggaggctgatgaagtgttgtttggcttcccgacgaggtacggcgccatggctgcgcaaatgaaggccttcttcgactccaccggctcactctgggagg

SEQ ID NO: 46903 - DNA, 302 bp, Zea mays
agtcgtctgctccgggctgctgttctgcgcctccacaaggctttggcctctgttgtaagttttaagcttcacctccagccatgggtaaggagaagtcccacatcaacattgtggttattggccatgtcgactctggcaagtcaaccaccaccggccacctgatctacaagcttggaggcattgacaagcgtgtgattgagaggttcgagaaggaagccgctgaaatgaacaaacggtccttcaagtacgcttgggtgcttgacaagctcaaggctgagcgtgagagaggtatcaccattgat

SEQ ID NO: 46904 - DNA, 297 bp, Zea mays
acacgctcctcacctcgcggcgactcttgccaggcattcctccgcgaaaaacgcatccgctccaaggggagttgatcgagaagcgttggtggacatgggtcagatccagtactccgagaagtacttcgacgacacctacgagtacaggcacgtcgtcctcccgcccgaggtcgccaagctcctccccaagaaccgtctcctgtccgagaacgagtggcgcgcgatcggagtgcagcagagccgcgggtgggtgcactacgcgatccaccgcccggagccgcacatcatgctgttccg

SEQ ID NO: 46905 - DNA, 299 bp, Zea mays
gccaggcctgcacccaaagcttccggagaattcctcccttgccccgccgtcgcatcctcttcgaagttcgaatcgaatcgcgccgcgatcacccacctcatggcggacaaggagcctgtcgtggagcggccagaggcgggtgaggaggaggaggacgcctcagccgccgccgccgcgggggaggaggaggacacgggcgcccaggtggctcccatcgtgcggcttgaggaggtagccgtcaccaccggcgaggaggacgaggacgtcctgctcgacatgaaggcgaacctgtaccgatt

SEQ ID NO: 46906 - DNA, 301 bp, Zea mays
ttttcgtcacccctgacgctcgacgcctctcctcctctcctcccccacccgtccatcgcccctccctccggtctgcgctcccacagcctcacccctgcgcccccgccgattcgcgtcgccctttgttggaaggaacgatggagcagaccttcatcatgatcaagcccgacggcgtccagcggggcctgatcggggacatcatcagtcgcttcgagaagaaagggttctacctcaaggggatgaagttcatgaacgtggagaggtccttcgcgcacagcactacgctgacctttccgacaag

SEQ ID NO: 46907 - DNA, 301 bp, Zea mays
cgttttgaagcacactccaatcaacaattctgccgatacttgttctacttgggtaaaatcaggacaatccagttggagtacaccgatgctaaagaaagcctcctgcaagctgctcgtaaggcaccaataacagcctgtggttttcggattcagtgcaacaaatgggctatcatagtgaggctgctgcttggagagattcctgagaggactgttttcatgcagaaaggaatgaagaaagctctgataccttattttgagctcacaaatgctgtcagggttggggaccttgaactgttcaggg

SEQ ID NO: 46908 - DNA, 289 bp, Zea mays
cccggatcgcccgggtcgtgctgcaacatgaggacatcaccaccaagattgagggtgactggaagcggctcaacacactgatgcattatcaggtgatagggggtgtcttttcccctcttcagcttcccagaatgttctcttcccgctaagccttgctctaaggcctcaaaagtctacaaaggattttcctctccctgctttcctcctcatgctggagcatagaacagggattcttagctatggctgcccattggaattactgagggaactgatagaaaacgtgagtgac

SEQ ID NO: 46909 - DNA, 286 bp, Zea mays
atgagtggaaccaggaattggatgagatgactgagctagaggagaaggactaccaatccagggcctcctccctcaacatatccggcgaggaggcgtggaagaggagggcagcgatgagcggtagcggttctgctgctagaaccccatcgtccccacctcacggtgatggcttcgccattgggagctcatcttctgctgggttggatgtgggtgccggcggacagatgactgctgcccagaggatgatggccaagatgggatggaaggaaggtcaggggcttggcaa

SEQ ID NO: 46910 - DNA, 289 bp, Zea mays
ataggattggtggtgctcttgcatggagttctttgctttcttctagaagccgtgataggagcatcctccaccatgatatccgtgctcaagaagattatgttagcaagcttaccgggcacaaatctgaggactatggcgcatcacagtgtatgtctgcaattgctggctcctatggctatattgctccaggaatgcatatacccctaaggtcaatgagaagagcatgtctacacctttggtgtcgtgcttcttgagctggtcaccggaaagaagccagtaggtgagtttt

SEQ ID NO: 46911 - DNA, 290 bp, Zea mays
gctgccgcgtccacagaatggggggtttcgtgaagactcataagaccaatgcgtatttcaaacgtttccaagtgaaattcaagagaaggcgggctggcaagacagactacagggccaggataaggctgattaaccaagacaaaaacaagtacaacacacccaaatacagatttgttgtgcgatttaccaacaaggacatcactgcccaaatcatatctgctagtatagcgggtgatatggttcttgcttctgcctactcgcatgagttgccacgatatggtcttgaagtt

SEQ ID NO: 46912 - DNA, 289 bp, Zea mays
gggcacatctcacaaaaacctgacctacgagctggtgcagaaaggtccggcgacggatgtgtccggacgtcccgtatccacagcgacgaacgcgtcgaacccgtggtggctgacgttcgagaaggccatcgcctccgcgggtggggagctgtctaagcctgagatcctgtcttcgaccacggactcacgctttgcgaggcagctgggcatccctgccctcgggttttctccgatgaccaggacgccgatactgctacatgaccataacgagtttctggaagacagagtg

SEQ ID NO: 46913 - DNA, 294 bp, Zea mays
agcatgtctggttattctgctccccaagtctgtgcatccacctctgttttcacatatccagattcattgttctacaactttgaagaagaccggtcatataataagtttgaacgaggacagatatgggctctttacagtgattttgatggccttcccaaatactatggttgggttacaaaagttgattcagatccatttggagtgcacctgacttggctggaagcttgccctcgatcagagcatgagaacacatggttagagcatgacttacccgtgagctgtgggacatttaaa

SEQ ID NO: 46914 - DNA, 105 bp, Zea mays
gccatgaaggccgagttcaacatcacgcttatccaccccaaggacctgacagtcctgtccaacatgcttcccaaaggtcccagcaccccacttccagaagacccc

SEQ ID NO: 46915 - DNA, 283 bp, Zea mays
ccgtcgtctgctccgggctgctgttctgcgcctccacaaggctttggcctctgttgtaagttttaagcttcacctccagccatgggtaaggagaagtcccacatcaacattgtggttattggccatgtcgactctggcaagtcaaccaccaccggccacctgatctacaagcttggaggcattgacaagcgtgtgattgagaggttcgagaaggaagccgctgaaatgaaaaaacggtccttcaagtacgcttgggtgcttgacaagctcaaggctgagcgtg

SEQ ID NO: 46916 - DNA, 293 bp, Zea mays
agcaagctcaaaccctaaccgccggcgacgccagcacgatggcccgctacgaccgcgcgatcaccgtcttctcccccgacggccacctcttccaggtcgagtacgccctggaggccgtccgcaagggcaacgccgccgtcggcgtccgcagcacggacaccgtcgtcctcggtgtggagaagaagtcaacccccaagctccaggactccaggtccgtgcgcaagatcgcgtgcctggacacccacatcgctctggcatgcgcggggctgaaggcggacgcacgcgtgctcatc

SEQ ID NO: 46917 - DNA, 293 bp, Zea mays
ggagaaatggagaacggcggcggcaaaggcgacgttcccaacgatgcgaacgaacattgccctggaacgcattggaggaggcggggaaggcggatgcctgcgctgggtgccccaaccagcagatttgcgccaccgcccccaagggccccgatcccgatgtggttgctattgttgagaggttggctactgtgaaacacaaattattagttttgtctggaaagggaggtgttggaaagagcacattctcagcccaactctcctttgccttagctgaaatggaccatcaggttggc

SEQ ID NO: 46918 - DNA, 287 bp, Zea mays
ctcggccaggtctccctctccccggctctccgccttcctcttccagtccccgcgcgcgagatcgccgccccgtgtgggccctagatcccgatggcctcgcgccgccgcaccctgctcaaggtcatcatcctcggcgatagtggggttgggaagacttccttgatgaaccaatatgtgaacaagaagttcagcaatcagtacaaggctacgatcggcgcggatttcctcaccaaggaggtgcagttcgaggacaggctcttcactctgcaaatatgggacactgctgg

SEQ ID NO: 46919 - DNA, 289 bp, Zea mays
ggccaccaccattccttccccaactctgcaggctgctcgtcgccctccctccacgccggacgcgccccgatccagatccaggggcgtaacatggcatcaaaacgtatcctcaaggaattaaaggacctgcaaaaggaccctccaacgtcatgcagtgctggtcctgctggtgaggatatgttccactggcaggcaaccatcatgggtcctcctgatagtccatatgctggaggtgttttcttagtgaacattcatttccccccggactaccctttcaagcctccaaagg

SEQ ID NO: 46920 - DNA, 287 bp, Zea mays
caggagtaccggggacgacgatgtagcgataaagatcctgtactgtgggatgtgtcactctgaccttcacagcatcaagaacgagtggcacaacgccacgtaccccatggtccctggtcacgagatcgccggagtggtgacgcaagtgggcaagaacgtgaccagcttcaaggccggggaccgcgtcggcgtgggctgcatggtgaactcgtgccagtcgtgcggcagtgcgacgaggacttcgagaacagctgccgggccgtcatcttcacctacaactccgtcga

SEQ ID NO: 46921 - DNA, 209 bp, Zea mays
ccctcccattcaccgccaccgccaattccataccgtcctccgccaactctgctgagagcgagaagagatggcaggcaagggtgatgggccggcaatcggcatcgatctcggcacgacgtactcttgcgtcggcgtctggcagcacgaccgtgtcgagatcatcgccaacgaccagggtaaccgcaccacaccctcgtacgtcgccttca

SEQ ID NO: 46922 - DNA, 272 bp, Zea mays
ccttagtcgcgatcaggccccaaggactcgagatgaagtcgagggcacggtccaccgccggcgactccaggctctcggtgaggaagaccaaggctgagaaggacccaaacaagcccaagaggcctccgagcgcgttcttcgtcttcatggaggagttcaggaaggactacaaggagaagcaccccaatgtgaagcaagtctccctgattggcaaggctggtggtgacaagtggaagtccctgtctgatgccgagaaggtccctacgtgtcta

SEQ ID NO: 46923 - DNA, 189 bp, Zea mays
ctctccttttgctcggaacgcacacacagcccggtccccgatctccgatcccctcgtcgatccaagatgcagatcttcgtcaagaccctcactggaaagactatcaccctcgaggtggagtcttctgacaccattgacaacgtcaaggccaagatccaggacaaggagggcattcccccggaccagcag

SEQ ID NO: 46924 - DNA, 160 bp, Zea mays
ctctccccacctcccggtccgctagcagatagcgggggccagagagatcgagatccggaggcgactacgccacccatcagcgtctgcggcaatggcgggcacggtgacggtcccggggtcgtcgaaaccctccacgccgctgctcaaggacgagctcgac

SEQ ID NO: 46925 - DNA, 261 bp, Zea mays
ccgcaagcgacgacggggagatgtttctgcgacggatcctgaccggcggaggtggcctggcggcgctgagggcggcgcgcgccgtgaaggagacgacggggatcgtcggccttgaggtggcgcccaacgcgcgggaggttctcatcgggctctacacgcgtacgctcaaggagatcgaggccgtccccaaagacgagggctaccgcaaggccgttgagtccttcaccaatcaccgcctccagatctgccaggaggaggacg

SEQ ID NO: 46926 - DNA, 220 bp, Zea mays
ttatccgggaggtggtggctgtataatactgctttccaaatcattatgcgggtctcataatggatctgatctgaagaatgctttgcttcatgagatgattcatgcctatatttgcatcaaagacaataacagtaaccatagtgatcatggtgcaaaatttcagaaactgatgaatacaatcaatttgagttctgtagctgatccccatcgaccagttgat

SEQ ID NO: 46927 - DNA, 265 bp, Zea mays
caaatctcaaatcacccggagagaactcgctcgcgaaggctgaactcatggctcgcgtcttcgttgggaacctggatccgcgtgtcacgacgcgggagattgaggacgagttccgcacgtttggggttctgaagagtgtatgggttgctaggaaaccaccagggtttgccttcattgacttcgatgaccgcaggatgcacaagatgccattcgcgatttggatggtaagaatggttggagggttatctgtaaccaaaatggtggt

SEQ ID NO: 46928 - DNA, 189 bp, Zea mays
ggaccaggtaagcagcagcaggaaccctagcaccgccgcatccgcagccatgggtatcgacctcgttgccggtgggaggaacaagaagaccaagcgcacagcgccgaagtccgacgatgtttatctcaagctccttgtcaagctctaccgtttcttggtcaggaggaccaagagcaacttcaatgctgt

SEQ ID NO: 46929 - DNA, 267 bp, Zea mays
attacggatcactatgatcctaacaatgcaacccacaaaaggatcaaggatgaaattgagcttggcaatggcctgccagatatcagaagcactcggcaatgtctccaggcagtaaaagacgccgggtttgaggttgtttgggataaggatcttgctgaagattctcccttgccttggtacttgcccttggatccaagccgattctccctgagtagcttccgtttgacttctgtgggacgcatgattacccgcacaatggtcaaggcc

SEQ ID NO: 46930 - DNA, 171 bp, Zea mays
ctttctgctgagctcaggaaatcccctctggtctccccgtcccccattccacccgccgccgccgacgcgccgcgcctgttcaagatgaatgtggagaagctcaagaagatggcgggtgctgtgcgcactggaggaaagggcagcatgcgcaggaagaagaaggcagcccac

SEQ ID NO: 46931 - DNA, 281 bp, Zea mays
ggaggaagcaactacgcggcagccatggtgaacgttccgaaaaccaagaagacctactgtaagaacaaggaatgcaggaagcacaccctgcacaaggttacccagtacaagaaaggtaaggatagcctttcagctcaagggaagcgacgttatgaccgcaaacagtctggatatggtggtcagacaaagcctgttttccacaagaaggcaaaaacaacaaagaagattgtgctgaagctgcagtgccagagctgcaagcactactctcaacacccgatcaa

SEQ ID NO: 46932 - DNA, 154 bp, Zea mays
gtgttcactagcaatctcaaacagacaccatggtgcatctgactcctgaggagaagtctgccgttactgccctgtggggcaaggtgaacagtggatgaagttggtggtgaggcgctgggcaggctgctgatggtctactcttggactaagaggt

SEQ ID NO: 46933 - DNA, 263 bp, Zea mays
ggccaaacgatacaggaatacgatacgccgctcgcctgaatcgagaccaccaccgctcccgctctgcctcacctcgccgactaacgtttttgccgccgcggatctcgccgtccccgccatggatacgtcgggctcctccgcagccgccggcgacgccccgaccaccggggagcaccggatggggaccaccattgtcggggtctgctacgagggtggcgtcgtcctcggcgctgattccagaaccagcactggaatgtatgtag

SEQ ID NO: 46934 - DNA, 182 bp, Zea mays
caggtttgacctacagccgcccgggagaagatggctgccccagcagtgtccgggctctcccggcaggtgcgatgcttcagtacctctgtggtcagaccatttgccaagcttgtgaggcctcctgttcaggtatacggtattgaaggtcgctatgccacagctctttattctgctgcatcaaa

SEQ ID NO: 46935 - DNA, 183 bp, Zea mays
gtggactggggaaaattgcaaagctcataaatgctgggaaaattgattcctctgaattgattaccatgaagacactaaaggaaacaggtgccattgggaagcaaataaaagatggaattcgtttaatgggccgtggagcagaagaaatcaaatggcctattcaccttgaggtgtcaagggcaa

SEQ ID NO: 46936 - DNA, 173 bp, Zea mays
acgcctcgtccgcgagatcgcgcaggacttcaagacggacctgcggttccagtcctcggccgtagcggcgctgcaggaggccgcggaggcgtacctggtggggctcttcgaggacaccaaactctgcgccatccacgccaagagggtcaccatcatgcccaaggacatccagc

SEQ ID NO: 46937 - DNA, 294 bp, Zea mays
caagcagcagcccaaagagccagggacttccacattggctggtttgttgatccattgataaacggacactatccacagataatgcaagatctcgtgaaggagaggctgcccaggttcactcctgagcaggctaaactggtgaagggctcggcagactacatcggtatcaacgagtacacatccagctacatgaaggggcagaagctggtccagctggcgcccagtagctactctgccgattggcaggttcaatatgtttttgcacgcaatggcaaaccgattggaccacaggcg

SEQ ID NO: 46938 - DNA, 297 bp, Zea mays
cccgtcgcatcccatcccactaccacccatctcgtcgtccgccgattcgatccggttcttccaacccaggggctgtgatggcgacgaagaggagcgtgggcaccctcggcgaggcggatctgaaggggaagaaggtgttcgtgcgcgccgacctcaacgtccctctcgacgacgcccagaagatcaccgacgacacccgcatccgcgcctccgtccccaccatcaagttcctcctcgagaagggcgccaaggtcatcctcgccagccacctgggtcgtccaaaaggtgtcaccccaa

SEQ ID NO: 46939 - DNA, 299 bp, Zea mays
ctgctgctctagcaatcatgacccttcatggccgtcacatatatggacaagcaatcaaggtgaactgggcatacgcaagtacacagagggaggatacgtcggggcatttccatatttttgttggtgatttaagttctgaagtgaatgatgcaactctttatgcctgtttctcagcatatccttcttgttctgatgctcgagtcatgtgggacaacaaaactggacgttccaggggttatggttttgtctccttccgtaatcaacaggaagctgaaactgctataactgaaatgactgga

SEQ ID NO: 46940 - DNA, 293 bp, Zea mays
catcgagcgcaaccagctgctctcactccccacccacacctactactccaacaaggacatcttcctccgcgagcttatctccaactcttccgatgcgctggacaagatcaggttcgagagtctcactgacaagagcaagctcgatgcgcacctgagcttttcatccaccttgtcccagacaaggccacgaacacgctctccatcatcgacagcggcatcggcatgaccaagtccgaccttgtcaacaacctcggtaccatcgccaggtccgggaccaaggagttcatggaagc

SEQ ID NO: 46941 - DNA, 290 bp, Zea mays
cactgtccaaaccttcttctctcctgtcaacagtggcccgccccccaactatgagatgctcaaggaggagcacgaggtggctgtgctgggggcgccccacaaccctgctcccccgacgtccaccgtgatccacatccgcagcgagacctccgtgcccgaccatgtcgtctggtccctgttcaacaccctcttcatgaacccctgctgcctgggcttcatagcattcgcctactccgtgaagtctagggacaggaagatggttggcgacgtgaccggggcccaggcctatg

SEQ ID NO: 46942 - DNA, 290 bp, Zea mays
ccttgagcagagggaggctgggtctaccatggatgttgttgctgcacaaacaaaagcaattgctgagaagatcaaggactggagcaacgtagttgttgcctatgaaccagtttgggctattggaactggtaaagttgccaccccagctcaggctcaggaagtgcacgcctccctgagggattggctaaagaccaatgccagccctgaggttgctgaatctactaggatcatctacggaggctctgtaactgctgcgaactgcaaagagctagcagcacagcctgatgtcg

SEQ ID NO: 46943 - DNA, 287 bp, Zea mays
catcgttctcaagatcaatggggaggacaccagcatcattagcccaacccttggattcaacatcaagaccatcaagtaccacaaatactctttgaacatatgggatgttggaggtcagaagacaatcaggtcttactggagaaactactttgagcagactgatggattagtttgggctgttgatagttcagacataaggaggcttgatgattgccgtgctgaactccacaatctcttgaaagaagagagactagttggagcttcattgttggtttttgcaaataagc

SEQ ID NO: 46944 - DNA, 293 bp, Zea mays
gaaatcgcctcagttcttccgtccaaggatctcggtccgaaccctgaccaggcagtcaggcacccaccccaatgctatgtccaaacttcagtcagattcgtcaggcaaacccaccacaccttgggtctgtttggttcagcttttttctgaccagcttttctgaaaatctggctgtgggaagaatctggttgtgaggagaatctgagtatcattacgattacgcgtggaggaggataaagttgttcgtagggctcaggatctagaaagtgacggtttcctactattacaacgac

SEQ ID NO: 46945 - DNA, 292 bp, Zea mays
gtttgttccgtccaggcaaccaaaaagcgttgccccgccgcgcagaggaagaagagagcagaggaggatggctcgtacgaagcagaccgcccgcaagtccacgggaggcaaggccccccgcaagcagctcgccaccaaggcggcgaggaagtcggcgccgacgaccggcggcgtgaagaagccccacaggtacaggcccggaaccgtggcgctgcgcgagatccgcaagtaccagaagagcacggagctgctgatccgcaagctgcccttccagcgcctggtgcgcgagatc

SEQ ID NO: 46946 - DNA, 288 bp, Zea mays
ccagaatcgcctgacacctgaagaaatcgaaaggatggttaatgatgctgagaagattgctgaggaagacaaaaagctcaaggagcgcattgatactagaaatgagttggaaagctatgcctattctctaaagaatcagattggagataaagaaaagctgggaggtaaactttcctctgaagataaggagaccatggaaaaagctgtagaagaaaagattgaatggctggaaagccaccaagatgctgacattgaagacttcaaagctaagaagaaggaactggaaga

SEQ ID NO: 46947 - DNA, 282 bp, Zea mays
aatgaaactcaaaatccagtagaggttgtgaggccttgtggtgcatgcaatggatctgaaatgttgcttaagcgaagggcgagtggtgaatttatggttgggtgccgaagttatccacaatgtagaaacgtggtatggctcccaggatctctttcagaagcggctgtaactaatcaagtttgtcctatctgcgcaccaggccctgtttataagattcaattcaagttccgtcggagggatattccaccaaatttcgatgttgatcacctaggttgtgttggt

SEQ ID NO: 46948 - DNA, 280 bp, Zea mays
gggaaaagacttcaaactgtgaagttgcctgttgataaaacaacttcatgctgctttggagggaagaattactctgaaatgtatgtgacctgcgcccgggatgggatggaccccgagggtctattgaggcaacctgaagctggtggaattttcaagataactggtctgggggtcaaaggaattgctccctactcctatgcgggatgaggacaggtcttctttcctgccagagggagctctgaagacaactagagaattctgggcctgaaatttcaatcta

SEQ ID NO: 46949 - DNA, 282 bp, Zea mays
gttgatataccggatgctactgatgtattggcagttataattgcacgagctattgtcgatgaaattttgcctcctgttttcctcactcgagctagggcactacttccagaattttccaagggcattcaagttctgcaggttgttgaaaagaactatttgtcagctccccaccatgcagaattagttgaacgcaaatggggtggaagcacacactctactgtagaagaagcaaaaagtaagattaagaatattctaagagaatatattgagaatgaagacata

SEQ ID NO: 46950 - DNA, 283 bp, Zea mays
ggtgctgcttccaggtggccatggcctcatggttcgtgggtatcgtccggttataaatactctcgcaaaaggcttagatatacgcctcaaccataaggttgtggaaattgttcgccataggaacagggtagaggttaccgtaagcagcggccaaacgtttgttgcggatgctgctgtggtcactgttccgttgggtgtcctgaaagcgaaaaccattaaattcgagccgaggctgccagagtggaaagaggaagcgatcagagaacttacggttggagttgag

SEQ ID NO: 46951 - DNA, 292 bp, Zea mays
gaaaacctccaaggctccaaccctagccgcgatccgacaacgcctccatccctagccgactgctgcaagcttcagagctcaagagtcagggcgccatggcgacagagacggagaccttcgcctttcaggctgagatcaaccagctgctctcactcatcatcaacaccttctattccaacaaggagatcttcctccgggagctcatttccaactcttccgatgcgttggacaaaatcaggttcgagagcctcactgacaagagcaagctcgatgcgcaccggagctgttcatc

SEQ ID NO: 46952 - DNA, 276 bp, Zea mays
agggactggagagagcatcaatgagaaggaccgctgtccagggtgcaagggtgagaaggtcattcaagagaagaaggttcttgaggttcatgttgagaaggggatgcaacacaaccagaagatcaccttccctggtgaagctgatgaagcgcctgatactgtcactggagacattgtattcgtcctccagcagaaggatcactccaaattcaaaagaaagggtgaagatctcttctatgagcacaccttgtctctgaccgaagcactatgtgggtt

SEQ ID NO: 46953 - DNA, 273 bp, Zea mays
gtgactaccttggtgttaaagtccatgcatgcgttggaggaacatctgttcgtgaggaccaaaggattctcgccagtggtgtgcatgttgttgttggtacacctggtcgtgtgtttgacatgctgcgtagacagtccctccgccctgataacatcaagatgtttgttcttgatgaagctgatgaaatgctttctcgtggtttcaaggatcagatttatgacatcttccagcttctgccatccaagattcaggttggagtcttctctgctacca

SEQ ID NO: 46954 - DNA, 274 bp, Zea mays
ccccaacgacggcgtgctgcgggcggacgtggagctgcaggcgtggtggaaggaggcgcgcgatgtcaggcacgccgacctcaaagacgcgcactggtggcccaagatgcagacggtggccgagctggtcaaggcctgcaccaccatcatctggatcgcgtcggcgctccacgcggccgtcaacttcgggcagtacccgtacgccgggtacctcccgaaccgcacgtccgtcagccggaagccgatgccggcgccgggcagcgacgagtacgcg

SEQ ID NO: 46955 - DNA, 278 bp, Zea mays
ccgacatcctactttcgtcctcacgagtgaccgataatccgccggcgctaagatgttggtttatcaagatctcctatctggcgacgagctcctgtcggattcattcacctacaaggagctcgagaacggcgtcctgtgggaggtcgagggaaagtgggtcacccaaagtcctgttgatgtagacattggtgccaatccatccgccgagggtggttaggacgaaaaccttgataacacagccctgaaggtggttgatattgttgacacattccgtctac

SEQ ID NO: 46956 - DNA, 287 bp, Zea mays
ctccctagcaatctctagcagcagatcctcgtgcgaacaaagcgctagccccttcgtactgtcccgatggcccgtacgaagcagacggcgaagaagtctactggcggcaaggctccagagaagcagctggccacgaaggcggcgcgcaagtctgccccggcgaccggcggagtgaagaagcccaaccgtttccgcaccgacaccggggcgctccgggagatccgcaagtatcagaagagcacggagctgctgatccgcaagctgccgttccagcgcctggttcgtga

SEQ ID NO: 46957 - DNA, 274 bp, Zea mays
gattgagattgactcgctgtatgagggcatcgacttctactccaccatcacccgtgccaggtttgaggagctcaacatggacctgttcaggaagtgcatggagcctgttgagaagtgcctgagggatgccaagatggacaagagcaccgtccatgacgttgtacttgttggtggctccactaggatccccagggtgcagcaactgctccaggacttcttcaacggcaaggagctgtgcaagaacatcaaccccgatgaggctgtcgcctatggt

SEQ ID NO: 46958 - DNA, 271 bp, Zea mays
ctcagctcccatatccgctcccctacctctccagcatcctcccgtctccgtcgtctcgtctccgctcctcacctcgccagccatgggcaagatcaagatcggaatcaacggtttcggaaggatcggcaggctcgtggccagggtcgccctgcagagcgaggatgtcgagctcgtcgccgtcaacgaccccttcatcaccacggattacatgacgtacatgttcaagtacgacaccgtgcacggccaatggaagcacagcgacatcgccctc

SEQ ID NO: 46959 - DNA, 208 bp, Zea mays
gaaagactacggtctcaccacggataacatcaagggcatacttgtgaacatgttcgaagcagccatcgagacatcattcctggtgctggagtactccatgatcgagctgatgaaacaacggcacgtcctgggcaagctcaagaagaggtaaggacggcgacgcccgacgccgcatggtgatcgaggaggacctgagccggatgccata

SEQ ID NO: 46960 - DNA, 264 bp, Zea mays
ctcttcgccgctgccgccaccgctccaccgggcagccagccagccatggatgaggagtacgacgtgatcgtgcttggcacggggctcaaggagtgcatcctcagtggtctcctttccgtcgacggcctcaaggttttgcatatggacagaaacgactactatggaggagattccacctcgctcaaccttaatcagctctggaagaggtttagaggggaagacaagcccccagcacatctagttgcaattagagactacaatgtg

SEQ ID NO: 46961 - DNA, 269 bp, Zea mays
agacgatgtcgacggaaaggattatgcatgaatgcattagaaaattgtctggaaatcatgatgatcctgatgaggagaacattgaagcattaagcaaattgatgagtacaattggtgatatgattgatcatgtaaaggcacaggagcacatggatgcctattctagtatgatgcagataatgtcaacaaatcagaagttgtctcctcgtgtaaggtccatgatgagatactcaatcgacctgaggaggaataaatggcagcaaaggcgt

SEQ ID NO: 46962 - DNA, 281 bp, Zea mays
ccgatgctggcaccccacgtggcccgcgaggacacatccgtggacggatacgacgtgctcgctggcacggtcttgttcatcaacgtgtgggcaatcggccgcgaccctggactgtgggacgcgccggaggagttccggccggagcggttcgtcgagagcaagatcgacgtgaggggccatgacttccagctgctgccgttcggctctggccggcgaatgtgccccgggatcaacctcgcgctaaaggtgatggctttgagtcttgccatctgctacacggc

SEQ ID NO: 46963 - DNA, 104 bp, Zea mays
taacatccagaatgagagcaccctccacctggtgctccgcctcaagggtggtatgcagatttgtgtgaagacattgactggctagaccatcaccttggaggggg

SEQ ID NO: 46964 - DNA, 300 bp, Zea mays
agagccaataaagtccaatttgaaggttgttaatcgccacaaccatgacacaatttctatggctgtgattgacaagatgggccacatagcagttgggacatcaaccaatggcgctacatttaaaattccaggaagggtgggcgatggaccaataccaggatcttcttcatatggtgatgatgaagttggcgcttgtggagcaactggtgatggtgatattatgatgcgcttccttccatgctaccaagtggtagagagcatgcgacaagggatggatcctcgagacgctgccacagatgc

SEQ ID NO: 46965 - DNA, 293 bp, Zea mays
acagtcttgttccatccaatccccatggtgttttccaaaggagaaggttcacacatagtggaccccgaaggcaacaaatacattgattttctctctgcttattctgcagtcaatcagggtcattgccatccaaaagtcctgagagctttgatagaacaggcagaaaggcttactctcagttctagagctttctacaatgataagttcccaatctttgcggaatatctgacaagcatgtttggatatgacatgatgttgccgatgaatactggtgctgaaggagttgaaactgc

SEQ ID NO: 46966 - DNA, 294 bp, Zea mays
tacggaggtgccggaactcagttcggcatgccgccttttcaacaaccccctatcatcacacatccggtgtctggacaatcattggaccgcctcactgcagcggcggatggatcacagggttctgcaacttctgtccaagaccaattgatgccattgggtgtgataggagggcaaatgatgtcgtgggcacctcgccatccaggcatttggccaccgatgcaaacacagatgtcaccgccgatgccgtggggatttcctcctcgtgggcagtcacaatcaccaggattgccctca

SEQ ID NO: 46967 - DNA, 297 bp, Zea mays
cggacacgacgcacgcagagccgcagagatccgtcacactgcaagttttgaaaactgaactgtaagatggcatcagcagagctttcccgtgaggaaaatgtgtacatggcgaactcgccgagcaggcagagaggtacgaggaaatggttgagttcatggagaaggtagcgaaaactgttgactcggaggagctcactgtggaggagcgcaacctcctgtctgttgcatacaagaacgtcattggagcccgccgtgcctcatggcgcatcatctcctccatcgagcagaaggaggagg

SEQ ID NO: 46968 - DNA, 309 bp, Zea mays
tttgattgcaaaacaggaattcagtgacccccgtgatgctgatgatgcgcagtacaacctagatggcagggaagtcgatggaagccgtattattgttgaatttgctaaaggagttcctcgtggttctggtggttcacgtgagtacatgggaagaggacctccaccaggaacaggtcgttgttttaactgtggaatggatggtcactgggcaagggactgcaaggctggtgactggaagaacaaatgctaccgctgtggtgaatcgggccatatagagagaaattgccagaacagtccaaggaatctcag

SEQ ID NO: 46969 - DNA, 291 bp, Zea mays
cccctggacaccgtgacttcatcaagaacatgatcactggtacctcccaggctgactgtgctgtccttatcattgactccaccactggtggttttgaggctggtatctccaaggatggccagacccgtgaacatgctctccttgcgttcacccttggagtgaagcagatgatttgctgctgcaacaagatggatgcaaccactcccaaatactccaaggcacgttatgaagagattgtgaaggaagtctcatcctacctcaagaaagttgggtacaaccctgataagattg

SEQ ID NO: 46970 - DNA, 301 bp, Zea mays
ctcgcattgcattgcattccttcagttcagtagtgtgctctgacagtgagatggcgagcgtgaaggttttcgggtcacccacctcggcggaggtcgcccgcgtgctcatgtgcctcttcgagaaggaggtggagttccagctgatccgcgtcgacgcctaccgcggcaccaagcgcatgccccagtacctcaagctgcagccgcaaggcgaggcgctcaccttcgaggacgagagcctcaccctctccgactccagggggatcctccgccacatctcccacaagtacgcgaacagggcaac

SEQ ID NO: 46971 - DNA, 288 bp, Zea mays
gcaggaggcggacaaggtaagcagcaatcgcaggaaccctagcgccgccgcacccgcaggaatgggtatcgacctcgtcgccggtgggaggaataagaagaccaagcgcactgcgcccaagtctgacgatgtctacctcaagctcctcgtcaagctctaccgtttcttggtcaggaggaccaagagcaatttcaacgctgtcattctcaagaggcttttcatgagtaaaaccaaccgaccaccaatctccatgcgccgccttgtcaagtttatggaaggaaaggagaa

SEQ ID NO: 46972 - DNA, 292 bp, Zea mays
ggcaaccccagggctctccggaggctgaggaccgcttgtgagagggcgaagaggactctgtcttccactgcccagaccacgattgagattgactcgctgtatgagggcatcgacttctactccaccatcacccgtgccaggtttgaggagctcaacatggacctgttcaggaagtgcatggagcctgttgagaagtgcctgagggatgccaagatggacaagagcaccgtccatgacgttgtacttgttggtggctccactaggatccccagggtgcagcaactgctccagg

SEQ ID NO: 46973 - DNA, 292 bp, Zea mays
gtgtgataccaaaccccagcagcagtgtccaatactgcaacgcttgaggagtcttctaccatgcgaccacccccaagagcccctcctgagacatgaagccgtgcattgacaaaaacagctgcatgttgatatctgggtgatggagacacaccaggggcaattgcccactcccagcgtccatctctatgcttagcaagcccatatgcacttgatagtggcacactattggcatcccttccaccacaaagcaaaaggaggccatcagaacgggcactagcagatctagcaagat

SEQ ID NO: 46974 - DNA, 291 bp, Zea mays
caaaccctaaacctaaacctttcacccgccgccgccgccaccaccagcactgccactccgccaccaccgtcccgaagccccctcccagcgccatcgacttcatctcggattgaagcaatgtcgtcggacgatgaggtcagggaggagaaggagctcgacctctcctccaacgacgttgtcaccaagtacaaggctgccgccgaaatcctcaacaacgctctgaagattgttgtgtctcagtgcaagccaaaagtcaagattgttgacctttgcgagaagggcgactctttc

SEQ ID NO: 46975 - DNA, 268 bp, Zea mays
  unsure (1)..(268): unsure at all n locations
actgcaaccgcagcccgatcgctcgcctccgctccggcagcgagctctatctctcgcgacgagtagcagctgccaccgacgcacgcagaccgggcaataaatattggtattggtagtgtgatatctataagaagtcaagatggtgaagttcacagctgaagagctccgcgctatcatggacaaaaagaacaacattcgtaacatgtctgccaccccccctctggancatggcaagtctacgcttacagattcccttgtggcagctgct

SEQ ID NO: 46976 - DNA, 282 bp, Zea mays
agacatcgtctgaaaaatcatgaatgtgctcttgctcgcacactagtttcaggatatcagatccgccgcagactacttttaactggcactccaatccaaaatagcctacaagaactgtggtctttgcttaactttattctgcccaatatttttaattcatctcagaattttgaggaatggtttaatgcaccatttgcatgtgatgttagtcttaatgatgaggaacagctattaatcatacatcgtctgcatcaagttttgcgtccatttttgctgaggagg

SEQ ID NO: 46977 - DNA, 281 bp, Zea mays
cagaatgttatccaaaggaaatattttgattggccatagcttacatagagatttatgcgccttaaagattgattactctcaagttattgatacagcatacatatttaagtatgcaaatttaccaactactgcatcaccttccttgaacagtccgtgcaaggctattttggggtattcagttcgagaagaaggagaaccacataattgcttgaaggatgcagaagctgcgatgaatctagttcttgcaaagcttaagaatgagtttaatgaccccattgaaa

SEQ ID NO: 46978 - DNA, 278 bp, Zea mays
cggttttgttttatggccctcctggctgtggcaagactctgttggccaaggcaatcgctaatgaatgccaggctaacttcatcagtgtgaagggtcctgaactgctcaccatgtggtttggtgagagcgaggccaatgtccgtgagatttttgacaaggctaggcagtctgctccgtgtgtcctcttctttgatgagctcgactccattgctactcagagaggaagcagtgttggtgacgcgggcggtgctgctgacagggtgttgaaccagctgctt

SEQ ID NO: 46979 - DNA, 174 bp, Zea mays
ccacaactttgattggctattccatgcaagggctctgcaaatacggcttttatgacgtcttcaaagccttatatagcaacatacttggtgaggagaacacctatctgtggcgtacatcactgtatctagctgcttctgccagtgctgagttctttgctgacattgccctggctc

SEQ ID NO: 46980 - DNA, 190 bp, Zea mays
gaagcaggggctagacgcggatcggcgagcatgaggggcggcggcggcggcgggatgatggacgatgaagagagggtgggccatgcggagatcccgaccagtttcggtcccgagctgcgcgcctgcctccgatgccgcctcgtcaagacctacgaccagttcagggagaacggctgcgaaaactgcccgt

SEQ ID NO: 46981 - DNA, 286 bp, Zea mays
atttaacccaaaagactccatatctttattgtgcgatccagggaagcactagcaaaggtgttggtatcttttgggttaaatgtaacttgcatcacatagtgagaatgcccttcgaatatttgagtacacacccagcctttatcccaatcccacagcttaatcagcatgtcatcggacgatgatatcacaaagggctgggttggatgaacagccacacatctaatgtaatcagtgtgagcttcaaaaaccttgaccttgtccattgtgttatagttgtacacacgga

SEQ ID NO: 46982 - DNA, 198 bp, Zea mays
gcaatctctagcagcagatcctcgtgcgaacaaagcgctagccccttcgtactgtcccgatggcccgcacgaagcagacggcgaggaagtccactggcggcaaggcgccaaggaagcagctggccacgaaggcggcgcgcaagtctgccccggcgaccggcggagtgaagaagccccaccgtttcggcccgggaacgg

SEQ ID NO: 46983 - DNA, 157 bp, Zea mays
ctaagatgcaggagcacgcggggagcgacaagtcgtgcgtgtggcagcgctggacttcgccgacgggagctcaaagaggagatgtttgctatccgttttggatctgtcgagagtgagcacctagaaccatatcttacctgcctcttaatcccttctt

SEQ ID NO: 46984 - DNA, 276 bp, Zea mays
ctcgagccgctcgctttggatcgattggtttcgtaactggtgacggactgagggtctcagagtggattgatttgggattctgttcgaagatttgcggaggggggcaatggcgaccgcggggaaggtgatcaagtgcaaagctgcggtggcatgggaggccggcaagccattgtcgatcgaagaggtggaagtagcccctccgaatacaatggaggtgcgcgaaaagatcctcttcacctcgcgctgacacaccgttttctatttgtgggaagccaa

SEQ ID NO: 46985 - DNA, 183 bp, Zea mays
cagaaatatggagggtggttaagcgcgaagatggcggacttgtttacagactatgctgacttctgttttaagacctacggcgatcgcgtaaagcactggtttacattcaatgagccaaggatagtagcgctacttggctatgacacagggtcaaatcctcctcaaaggtgcaccagatgcgct

SEQ ID NO: 46986 - DNA, 272 bp, Zea mays
ctttagaaatggctgatggtgaggacatccagcctcttgtctgcgacaatggcactggaatggtcaaggctggttttgctggcgacgatgcaccaagggctgttttccctagtattgttggccgtcctcgccacactggtgttatggtagggatgggacagaaggatgcgtatgttggcgacgaggcacagtccaagagaggtattctcacgctcaagtatccgatcgagcatggtattgtgaactactgggatgacatggaaaaagtctgg

SEQ ID NO: 46987 - DNA, 264 bp, Zea mays
ggcgctcggtgttgataccgtgccagtacttgttggaccagtctcgtacctgttgctctcaaagcccgccaagggtgtggagaagggattccctcttctttcccttcttagcagcatcctcccagtctacaaggaggtcattgctgagttgaaggcagctggggcttcatggattcagtttgatgagcccactcttgtcctcgaccttgattctgacaaattggctgcattctctgctgcatacgcagaacttgaatctgtact

SEQ ID NO: 46988 - DNA, 281 bp, Zea mays
gcagaccccagcagaagaagcgaagtcgtcgccggagcaggaggaagagcgaggagcaacatgtcgtggcaggcgtacgtcgatgaccacctgctgtgcgacatcgaaggccagcacctcagcgccgccgccatcgtcggccacgacggcagcgtctgggcacagtccgagaacttccccgagttaaagcctgaggacggtgctgggatgataagagacttcgatgacccggaaatcttgcaccaactggtctttttgttggaggtacgaatacatggtga

SEQ ID NO: 46989 - DNA, 270 bp, Zea mays
tcagaaggctttctttgatgactacaaagaggcccacctcaagctctccgaactggggtttgctgatgcttaaatagaccctatcttggagtgataacttctgctgcctgtatggaatcatgtggtcttttgcatctggagtcaatgtgaacaagcagattgtcgtattgtctttctcgtaataaatttgtcgatgttgagcccttagctgttggtggtacattggtacttcgtcgatgcttgaattgggaccctttgtcggtttcccag

SEQ ID NO: 46990 - DNA, 201 bp, Zea mays
gttgccagggctcaggcatgaaagtcactattcgtcagctgggcccttccatgatacagcagatgcagcagccttgcaatgagtgcaaagggactggagagagtctcaatgagaaggaccgctgtccagggtgcaagggtgagaaggtcattcaagagaagaaggttcttgaggttcatgttaagagggggatgcaacaca

SEQ ID NO: 46991 - DNA, 275 bp, Zea mays
ggagggaaccgaaaactcagggtctcgaatttcctaggagcggaggcgatggctgggaagggaggaaaaggattgctcgccgcgaagacgacggcggccaagtcggcggagaaggacaaggggaagaaggcccccatctcacggtcctcccgcgcgggcctccagtttcctgttggacgaatccaccgtcagctgaagcaaaggactcaggcaaatggccgcgttggtgccactgcagccgtctactctgccgccatcctggagtacttgactgc

SEQ ID NO: 46992 - DNA, 299 bp, Zea mays
actcagattgcttcaactgcctgcctattgcagcgctcattgatgacaagatactgtgcatgcatggtggtctctcaccagaatggactagtttggatcagataaaggatattgagaggcctgctgagattcctgattatggtctcttgtgtgatctgctttggtctgatcctagtcctgatggagaagggtggggggagagtgacagaggtgtttcgtgtacgtttggtgcagataagctcgtagagtttttggagaagaacgatctcgaccttatatgccgagctcatcaggtagtt

SEQ ID NO: 46993 - DNA, 162 bp, Zea mays
acaaactcagatacagacatcatggtgcacctgactgatgctgagaaggctgctgttaatggcctgtggggaaaggtgaaccctgatgatgatggtggcgaggccctgggcaggctgctggttgccaacccttggacccagaggtacttggatagcttgggg

SEQ ID NO: 46994 - DNA, 297 bp, Zea mays
cgtcggttcacttctccaggtaaggaaagggttcgtactcatggcgccgccgcagccaaagtcgggccttttcgttggcatcaacaagggtcatgtcgtcaccaagcgcgagctgcctccccgcccgtgccaccgcaaggggaaatcaacgaagagggtgtctatggtcaggggcctgatcagagaggttgctgggtttgctccttatgagaagcgtatcactgagcttctgaaggttggcaaggacaagcgtgccctgaagcttgctaagagaaagcttggaactcacaagagggc

SEQ ID NO: 46995 - DNA, 298 bp, Zea mays
agtccgcatacgcctttccacactcgaaactggtcgtgtgtacacccactcgtatcctcttctggttctacattcgtcgggggtcaaaaagatgggcgaactgcacctggcaattcgattttcctcaacatctctggtaaacatgttgtacctgtattctaggcccttgcttccaaaaatgcactatgtgcgcccaatacctgtgcttcaggttgatatgctacgccatcaagctgtccagattgtggctgcccgacttagccggatggagccacctttgagaaaggaagttgttgaa

SEQ ID NO: 46996 - DNA, 294 bp, Zea mays
atatccccaaaccctagctcccgatctcgatggcgaaccctcgcgtcttcttcgacatgaccgtcggcggcgccccggcgggccggatcgtgatggagctgtacgccaacgaggtgcccaagaccgcggagaacttccgcgcgctgtgcacgggcgagaagggcgtgggcaagtccgggaagccgctccactacaagggctccaccttccaccgcgtcatccccgagttcatgtgccagggcggcgacttcacccgcggcaacggcaccggcggcgagtccatctacggcgaga

SEQ ID NO: 46997 - DNA, 286 bp, Zea mays
ctcgagcggtgtccatagccaccgcagagactgagatggggggttttgtcaagacccacaagaccaatgcgtacttcaagcgtttccaggtgaagttcaagagaaggcgcgctggcaagacagactacagggccaggataaggctgattaaccaagacaaaaacaagtacaatacacccaaatacagatttgttgtgcgatttaccaacaaggacatcacagcacaaatcatctctgctagtatagcaggtgatatggttcttgcttctgcttactcgcatgagtt

SEQ ID NO: 46998 - DNA, 301 bp, Zea mays
ctaccagcgactcagcgagcgagagcagcacacacgcagctagctaggagcagcagcagagcagcggcgatggcggcctccatgatctcctcgtcagctctggcggtggcgcctcagggcctgccgcccctcggccgccgcgcctcctccttcgccgtcgtctgctccaagaagaagatcaagaccgacaagccctacgggattgggggtggcctgaccgtcgacgtcgacgccaacgggagaaatggcaagggcaacggcgtgtaccagttcgtcgacaagtacggcgcgaacgtcgacg

SEQ ID NO: 46999 - DNA, 282 bp, Zea mays
atacgagcccgttcgcgagatcggggcgggcaacttcggggtggccaacgctgatgaggaacaaggacacgagggagctggtggccatgaagttcatagagcgaggaaacaggatcgacgagaacgtgttccgcgagatcgtgaaccaccgctccctccgccaccccaacatcatccggttcaaggaggtggtgctgactcccacgcaccttgcgatcgtgatggagtacgctgcgggcggggagctgttcgagcgcatctgcgacgccgggcggttccacg

SEQ ID NO: 47000 - DNA, 235 bp, Zea mays
ctgcattctcgaattacgattcccaatccagcaaaccctaacagccttttggaaactcagagaagggaccggatggaacccaaggcggagaagaagccggcggcgaagatgcccgcagaggaggagcccgcggccccggcggagaaggcccccgctgggaagaagccgaagggaagaaagcggctcccggcgggaaaatccgcggcaaggaaggcggtgttgacaggaaggggcg

SEQ ID NO: 47001 - DNA, 297 bp, Zea mays
ccgccacttagcacccaggccgccactacgtcaagcacaccacaacctccgcctcccccaccccctccagagaagactcactttggtggcctcaaagacgaggatcgcattttcaccaacctctatggtctgcatgacccttttctgaaaggcgcgatgaagagaggtgactggtataggaccaaggatttggtgatcaagggggcagactggatagttaatgaaatgaagaaatcaggtcttcggggtcgtggaggtgcaggttttccttctggtctcaaatggtcctttatgccc

SEQ ID NO: 47002 - DNA, 295 bp, Zea mays
ccccaagcccttgccgccgcagctgccgcagccagcaacgaaccgtacataggcagggacgaagcgatggagggagccaatggagtcggtgggtcggagtccgagcggaagccgctgtcagaggtggtcggcgactgcgtccagcgctggttccaggacgcgtacaaggaggcgcgcaaaggagacatcgccaaccaggtgcttgtagcgcagatgttcttctcgggttatgggacccccaagaacgagtacaagggaaaacaatggatggatagagcatcaaggttcaggtctt

SEQ ID NO: 47003 - DNA, 293 bp, Zea mays
gaagattcttagtatacaagtgtacggtggtctccattctgccgagtacgaaaccatagtgcaaaatgctccgccaccgccgtcgtgtgagataactgatatttatggcttcaggaggtcgaggcctttatatggatcattcaggggaggcgttggtcagatgaagctatagttcaacattttctcatcattctgtaaaattctgaaaaagagtcatctttctgttcaactgcatctacgttgattgttttttcattgcgaacactctagtaggccatttatctacggttttt

SEQ ID NO: 47004 - DNA, 290 bp, Zea mays
ggcggcggtgtcggcagctgctgtagcgaagagagtttggcgcgatgtctcacaccattttgctggtacagcctaccaagaggccagaaggcagaacttatgctgactacgaatctgtgaatgaatgcatggaaggtgtttgtaaaatgtatgaagaacatctgaaaagaatgaatcccaacagtccctctatcacatatgacatcagtcagttgtttgatttcatcgatgatctggcagacctcagctgcctggtttaccgagctgatacccagacataccagccttat

SEQ ID NO: 47005 - DNA, 284 bp, Zea mays
tttggaggcccttcaagggactggattggtatttatgaggactgttccaaaattttatatgaagaaattgattacatcaatgaaggaaagaatgcggacaagtttcggcgggatttcagaaatataaagtgggttcgcgtgccacttatcatgtgggactacacaactgaaaaggtgctaaccctggagtatgcccctggtattaaaataaacaatttggatgtgcttgacaaccggggttatagtcgctcactaattgcatcacgtgcaatagaatcttacct

SEQ ID NO: 47006 - DNA, 288 bp, Zea mays
ggcgcacagagtctggtgtctcttgctccgaccccgttggcgactgagacgcgatccccttctcctgcactgccgtcctccgtcgctgcgatgcctcggtattactgtgactactgcgacacctacctgacccatgactcgccatctgtccggaaacaacataatgctggatacaaacacaaggcgaatgttcgaacctactatcagcaatttgaggagcagcaaactcaaagtttaattgatcaaagaatcaaggagcatcttggacaagctgcagctttccaagca

SEQ ID NO: 47007 - DNA, 289 bp, Zea mays
cgggtggtgctatcagtacccatctccccaggtgtcaacctctgttgtggatccttacaacagcgtgctctccactcactcactgctggagcacactgatgtctccatcctgctcgacaacgaggccatctatgacatctgcaggcgctccctcgacattgagaggcccaactactccaacttgaatcgccttgtgtctcaggtgatctcatcgctgactgcttctctgaggttcgatggtgccctcaatgtggatgtgaacgagttccagaccaacctggttccttac

SEQ ID NO: 47008 - DNA, 296 bp, Zea mays
cgaagccgtcgcggccactactgacgctttcaggctcaggcgctcagctctagcaatggctgcctccaccatggcgatctcctccacggcgatggccggtacccccatcaaggtgggctccttacgcgacggccgcatcaccatgcgcaagaccgtgggcaagcccaaggtggcggcgtccggcagcccctggtacggccccgaccgcgtcaagtacctcggccccttctccggcgagcccccgcgctacctcaccggcgagttccccggcgactacggctgggacaccgccgggc

SEQ ID NO: 47009 - DNA, 294 bp, Zea mays
acgaaagcctcagatctcagtgaccagcgccgccgcttcgttcgtgtcgaggggagaagaggaaatggcggcgagcgagggcgtgctcctggggatgggcaaccccctcctcgacatctccgccgttgtcgatgacgccttcctagcaaagtatgacatcaagctgaacaatgccattctcgctgaggagaagcacttgcctatgtatgatgagttggctagcaacagcaatgttgaatatattgctggaggagccacccagaactctatcagggttgcccaatggatgcttca

SEQ ID NO: 47010 - DNA, 289 bp, Zea mays
tggagggtgtagaagagaagaagaaggaggttgctgctgtgccagaaacccttaagaaaaagcgagggggtttcgcagagctgaagatcaagcgcctgagaaagaagtttgcccaaaagatgcttcgaaaggcaaggaggaagcttatctatgaaaaagcaaagcactatcacaaggaatataggcagatgtacagaactgaaattcgaatggcgaggatggcaagaaaagctggcaacttctatgtacctgcagaacccaaatgggcgtttgtcatcagaatcagggg

SEQ ID NO: 47011 - DNA, 287 bp, Zea mays
caactagaaaaggctcctcccgaccgcaacgcccctcatctccctcgaccccgacatccccgacccgatggcgcccaaggcggagaagaagccagcggagaagaagccggcggccgaggagaaggcggagaagacgaccgcaggaagaagcccaaggccgagaagcggctgcccgcgtccaagtcctccggcaaggagggcggcgagaagaaggggaagaagaaggccaagaagagcgtggagacctacaagatctacatcttcaaggtgctgaagcaggtgcaccc

SEQ ID NO: 47012 - DNA, 280 bp, Zea mays
ctcaaccaaattcaaagtcacagcggcgaaactctcggcgatgtctggccgcggcaagggcgggaagggtctgggcaagggcggcgccaagcgccaccgcaagtgctgcgtgacaacatccagggcatcaccaagccggcgatccgcaggttggcgaggaggggcggcgtcaagcgcatctccgggctcatctacgaggagacccgcggcgtgctcaagatcttcctcgagaacgtcatccgcgacgccgtcacctacaccgagcacgcccgccgcaaga

SEQ ID NO: 47013 - DNA, 274 bp, Zea mays
ccatggaggcatgagctccgccgcctcaccgtctctcgccgatctcccccaaaccctagcctcgacctgaccgccagcgggcccgcaggccggagaaggagtcggagtcgcccccacccacccaccctctgccgcgggcggggagcgggcggcggacgagatgccgtcgcacggggatctggaccggcagatcgcgcactgcgcaactgcaagtacctgcccgaggcggaggtcaaggtgctctgcgagcaggccaaggccatcctcatggagg

SEQ ID NO: 47014 - DNA, 289 bp, Zea mays
cgcgggtctgtctcttgcttcaacagtgtttggacggaacagatccggggactctcttccagcctccgaccgccctccgatttcctctccgcttgcaacctccgggaccatcttctcggccatctcctgcttctgggacctgccagcaccgtttttgtggttagctccttcttgccaaccaaccatgagctcccagattcgtcagaattattccaccgacgtggaggcagccgtcaacagcctggtcaatttgtacctgcaggcctcctacacctacctctctctgggg

SEQ ID NO: 47015 - DNA, 259 bp, Zea mays
cgctccagccgcttcaccgcgccgccaccgccaccgcgaggatgccgttcaagaggttcgtggagatcgggcgcgtggccctggtgaactacggggaggactatggccgtctcgttgtcatcgtcgatgtggtcgaccagaacagggcacttgtggatgcccctgatatggtcaggtgccaggtgaacttcaagcggctctcacttactgacatcaagattgacatcaaacgtgtccccaagaagacagccctgatcaa

SEQ ID NO: 47016 - DNA, 275 bp, Zea mays
ccactttcgatctcgtactcgatggcagcgacttggttggccgagcgcgcaccggtcagggaaaaactttggcttttgtcttgcccatattggagtctttggttaatggggcaaacaaggcatctagacggactgaacatggcaggaccccaagtgttctcgttctactaccaacaagagagctggccaatcaggtgcacgctgactttgagttttatggtgcaacatttgggctctctgcatgttgtgtgtatgggggatcaccttatcgtcct

SEQ ID NO: 47017 - DNA, 281 bp, Zea mays
catcaacaccaccatctacccgctcacgtccctcccgctcctcatttactgtatcctgcctgccatctgcctgctcacggggaagttcatcatcccagagatcagcaacttcgctagtatctggttcatctctctcttcatctcgatcttcgccacgggtatcctggagatgaggtggagcggcgtgggcatcgacgagtggtggaggaacgagcagttctgggtcatcggaggcatctccgcccacctcttcgccgtcttccagggcctcctcaaggtgc

SEQ ID NO: 47018 - DNA, 273 bp, Zea mays
gtgcctgcatccctcatcgctcggctcaatcgctgatcagttctgcggccggcgacgtgtgctagctcacgacgacgacatgggctcggcggtgaagatcgggacgtggggcggcgacggcgggagcccctgcgacatcacggtggcgccgcggcggctggagagcatcaccatccgctggggcaaggtcctcgactggatcgccttctcctaccgggaccagagcgggaagctgcacaccgcgggcccctggggcggcaacggcaaaggaga

SEQ ID NO: 47019 - DNA, 277 bp, Zea mays
cggcaagatggcagtgcaaatatccaagaagaggaagtttgtgcgtgatggcatcttcaaagctgaactgaatgagtttcttactcgggagctggctgaagatggctactctggagttgaggtgcgagtgacaccaaccaggacagaaatcattatcttagccaccagaacacagaatgttcttggtgagaagggccggcggattcgggaactgactgctgtagttcagaagaggtttggctttccagagggcagtggagagctttatgctgaaaag

SEQ ID NO: 47020 - DNA, 278 bp, Zea mays
ggcaatgttttagaaattgccaccaggattccatatgaaccctatacagtttgagaaggatgatgataccaatttccacatggacttgatcgctggctttgccaacatgcgggctaggaattacagcattcctgaagttgacaaattgaaggcaaagttcatagctggaagaatcatcccagccatcgccacctcaactgcaatggccaccggccttgtctgcctggagctttacaaagtccttgctggtgggcacaaggttgaagactaccggaaca

SEQ ID NO: 47021 - DNA, 269 bp, Zea mays
gcatccgcagttcccccgcgcccgagacgcaaccccgcgccaggagtaagtttgttcttttatcgatattatcgatatggcgagggaggagaatgtctacatggccaagctggctgagcaggccgaaaggtatgaagagatggttgagtatatggagaaggtggctaagactgtagatgtggaagagctcactgttgaggagcgtaacctcttgtcggtcgcatacaagaatgtgattggggctcgccgtgcttcatggcgcattgtct

SEQ ID NO: 47022 - DNA, 312 bp, Zea mays
caacaaggaacctagtccagaggttttgaacatcatcaataccctttgctcagatagtagaaacatcgtttttcttgtcagtggtagagacaaagatacgttaggaaagtggttctcctcatgtccaaaattggggattgcagctgaacatggttacatcttgaggtggtctagcaaagaagaatggcaaacatgcacccaggccatggactttggatggatgcaaatggcaaagccagtgatgaatttatatacagaagcaactgatggatcctacattgagagaaaagaaagtgccttggtgtggcacat

SEQ ID NO: 47023 - DNA, 312 bp, Zea mays
tcgtaaataaccttcactatagaaaacatgaaatataccactccattttgcaatgtgacctggtcctggtgtaacagcttttataacataaatttcccttcaccttctctgttcgtacagaattatggtgcattctttgacctggtaggtgatggaattactggcccagtaaaactgagtggactaaacggtgcgctcgatctgtcttctgcagaatggacatatcagattggactcagaggagaagatttgcacctatatgatccttcagaagcttcaccagaatgggtctcagccaatgcttatccaatc

SEQ ID NO: 47024 - DNA, 312 bp, Zea mays
ctacaagtggctgctttacaactgcccagaaaagggtatacagcttgatggagaacaactcttatcctcgtttcttggagtcagaattctaccaggacttgtgtaaaaagccacaaatcaccacagagcctcatgctacatgaaatgtaaaagggagcccagaaatggaggacatttcattctttttcctgaggggaaggactgtgacctgccataaagactgaccttgaattcagcctgggtgttcaggaaacatcactcagaactattgattcaaagttgggtagtgaatcaggaagccagtaactgact

SEQ ID NO: 47025 - DNA, 307 bp, Zea mays
ccactggcctgtatctcactttcacgttgacatcagtcgcagaaaaggttcaatcatttatgacggcactgagagcgttatctcataaagacttccattgtggctcatatgcaacaagcgagcaggtggctgctgctggagatttgtgcgcgatatgccaagagaagatgcacgttcccatccttttgcgctgcaaacatgtcttctgtgaagattgtgtgtccgaatggttcgagagggagcggacttgcccgctgtgcagggcactggtgaagccagcagacctccggtcgttacgtgacggttc

SEQ ID NO: 47026 - DNA, 314 bp, Zea mays
agtgaacagccccgctgtggattcccagagaagaatttatcagtgaatttggagaatttgacaggagggcagaggcaatggtgggaattcaaatcacagcacatggataaggttctgtttttcaagatgggcaaattctacgaactatttgagatggatgcacatgttggagcaaaggatcttgatcttcagtacatgaagggtgaacagccccactgtggattcccagagaagaatttatcagtgaatttggagaagttagctgagaagggttatcgagttctggttgtcgagcaaactgaaacgcctgacca

SEQ ID NO: 47027 - DNA, 312 bp, Zea mays
accactgaacaaactcaagggtaaagaacttgaacttcttctggctatactccccgacaacaatggtccgttatatggtgacatcaaacgtatttgtgaaactgatttgggattgatatcacaatgttgcttaaccaagcatgtttttaagatcagcaaacagtacttggcaaatgtctcactgaaaattaatgttaagatgggaggaagaaacactgtgctcctggacgcaataagttggagcattcctttggtcagtgacatcccaactattatatttggtgcagatgtaacacaccctgaaaccgggga

SEQ ID NO: 47028 - DNA, 310 bp, Zea mays
agcaggaagaagcgacctcgcagatcacgagatgggcctacgtcagtggcagctgtcatccagcggtgggctgagcgcaacaagcatttggagtatgaggaatctgaggaggcaaagcgaccaagaaaagcacctgcaaagggttcaaagaagggctgtatgaagggaaaaggggggcctgacaatactcaatgtggataccgtggagtgaggcagcgtacttgggggaagtgggttgctgaaataagagagccaaatcgtgtcgacagactctggctgggtaccttcccaaccgcggaggatgcagcta

SEQ ID NO: 47029 - DNA, 308 bp, Zea mays
agaccaggtaagcagcagcaggaaccctagcaccgccgcatccgcagccatgggtatcgacctcgttgccggtgggaggaacaagaagaccaagcgcacagcgccgaagtccgacgatgtttatctcaagctccttgtcaagctctaccgtttcttggtcaggaggaccaagagcaacttcaatgctgtcattctcaagaggctcttcatgagcaaaaccaatcgcccaccaatctccatgcgccgccttgtcaagttcatggaaggaaaggagaagaacattgctgtgattgttggcacagtcacag

SEQ ID NO: 47030 - DNA, 307 bp, Zea mays
atcgagcgcgaagaagccccaagcaagcgacactcttgtcatctccgcgccagatacctgtttatgagctcgaaggagaagcccactcttggaggcacgcggattaagacccgcaagcggaacattgcagctcctttggaccctgcatcattctctgatgcaattgtccagatttatctggataatggtggagatctggaactcgtcgccaaaagtattgagtcttccgacctcaacttctcacgttacggtgacaccttttttgaggtggttcttgttggaggacgcactcagcctggcactgtaa

SEQ ID NO: 47031 - DNA, 303 bp, Zea mays
catgttgattgggttaatgatgccattatagttggagacaagcttgtttcctgctcctcagacactacaataaaggtgtggaattgcttctctgatggtgcctgtaccaggactctccgccggcattctgattacgtgatttgtcttgctgctgctgagaataatagcaatattgtagcctctggtggtcttggtggtgaggttttcatttgggaccttgatgctgctcttgctcctgtagccaaatctgtggatgcaaaagaggatgaggttcctaatggaaactccgggcctgctttgaca

SEQ ID NO: 47032 - DNA, 302 bp, Zea mays
cttctccttggttgcggtgcgcctccctcctgtctgcgtgcgtgcaatcgacgcagaggcgcgggcagtcgcaccaccacgaccacgacccgatggctttcatgcgctcccgctcaaatgcatcttctggcatgggagttgctcctaacattagggagacattcgtcgagcttcaaatgaagaaggcattccgatatgttatcttcaaaatcgaagagaagcaaaaccaggtggttgtggagaagacaggggctactactgaaagctatgatgactttttggcctctctcccagagaatgac

SEQ ID NO: 47033 - DNA, 303 bp, Zea mays
cgtgttccactgcctcttctcttctcgcttgggaactccagtctcacctcggcttgcaatggattccaactgctcctgcgaggctggtggctcctgcgcctgcgccggctcctgcaagtgcaaaaactgcaaatgcacctcctgcaagaagagctgctgctcctgttgccccctgggctgtgccaagtgtgcccagggctgcatctgcaaaggggcgtcagagaagtgcagctgctgtgcctgatgtcgggacagccctgctgtcagatgagaacagaatgacacgtataatccaggattttt

SEQ ID NO: 47034 - DNA, 273 bp, Zea mays
ggagaaggcgtccagtggcgggagcaaggaggcaaagtcgcccaagaaggccgctaagtcccccaagaaggcatagactgactgtccggtgtgatctgatgtttagcagtaccttgttaccagtatgcggtgatgcgtaggctgtagatgggacgaatgtgctggtgtgtgtatgtgtcctatctacagcctacgcatcaccgcatactggtaacaaggtactgctgcaagttgccctttgctatttaaaatggaagaagaaatgccccggtt

SEQ ID NO: 47035 - DNA, 285 bp, Zea mays
agcgagccgtgctgaaatcaagtggggaggtgcaaagcatgatccatctgatgaggatgacagcagaaggatgcaccctaggctgtcctttaaggctttcctcgaggttgtcaagatgaagagtttgccatggagtgactacgagatggatgctattcactcgttgcaacttattcttagaggtacactgaacgatgccttgaagccggcccagtcatctggtttagataaccagattggtgatctcaaacttgatgggctcgccgaactgcaagcggtgacaag

SEQ ID NO: 47036 - DNA, 289 bp, Zea mays
agattgggcgcagagaatccccaagcaaacaaacagggtagaggtagagggagaggacaggagaggagatgagaggcgaagttgggtctgggacaccatggctccgatgaagctgtacggggcggtgatgtcgtggaacgtgacgaggtgcgcaacggcgctggaggaggctggctccgactacgagatcgtgcccatcaacttcgccaccgccgagcacaagagccccgagcacctcgtccgcaacccgtttggtcaggttccagctctgcaggatggtgacttgtac

SEQ ID NO: 47037 - DNA, 269 bp, Zea mays
gccctgaacgaccacttcatcaagctcgtctcttggtacgacaacgagtggggctacagcaaccgcgtcgtcgacctgatccgccacatgttcaagacccagtagagagagatatttctgcctccctatcgtgggtcgtccccaatggcctttggtcgcagacatctttgctgcttgtctatgctgagaataaatgtgaacggtgcccctggacgctggatccatgctggttttggacacgttgtctttttgtgttaaacttatctgct

SEQ ID NO: 47038 - DNA, 285 bp, Zea mays
ctacacttacagattcccttgtggcagctgctgggattattgcccaggaagttgctggtgatgttcgcatgactgatactcgtgcagatgaagccgagcgtggcatcacaatcaaatctactggtatctctctttattatgagatgactgatgagtcactgaagaactacaagggtgagagggatggtaaccaatacttgatcaaccttatagactcacccgggcacgtcgatttttcttcggaagtcacagctgctcttcgcatcaccgatggtgctctggttg

SEQ ID NO: 47039 - DNA, 177 bp, Zea mays
tcctactcgaccgcggctacaccgtccgcgccaccgtgcgagacaccgctgacccaaagaaaacattgcacctgactgcgttggatggtgctaaggataggctgcacttatttaaagctagcctgctagaagagggttctttcgatgctgcagttcatggatgcgacactgtatttc

SEQ ID NO: 47040 - DNA, 248 bp, Zea mays
cgccgcagcagcatctgcatctctcgcccacctccgctccgcctactgctgctggtggtagggaggcggagaaggaggcccttgcgcccgcccgccggccggatcagagccgtagcaaccaccacccatggcggacgtgcacgaacctttggtgcgccgtaagaggaagaaggttttggtggactacttgatgaacttccgatggatcctcgtgatctgcgtggtccctcctatttcaactctggtct

SEQ ID NO: 47041 - DNA, 201 bp, Zea mays
agaggagctgacccggccgctccgggaggcggaggagttcctgacgacagtggaggcgcactcaactccattactaacaccgggccaaccatgggagctttcatctcttcagctgcagataaaactggagtcgtcgatatgtccgacgatgaacaagaagaaggcagcggcatggaggcagaagcagccctgggcatcgat

SEQ ID NO: 47042 - DNA, 277 bp, Zea mays
cccatctctccccctctccctctccctctcgtggccacgactgccgctgccgccctacgccaggtgtccaggtcatctccggcccattcgccggcgacgagcaccccactagatcgaccgagctatggacggcctgtggcatctgggggacgagctccgcgggcagcccaaggtggtggaggaccgccagtggtcgctcatgacgtccaagctggcagagatcaccaggtccaggggcgagaggacgaacgacctcgactacggcagatgaacgccg

SEQ ID NO: 47043 - DNA, 223 bp, Zea mays
catgaatccactcctgatccttacctttgtggcagctgctcttgctgccccctttgatgatgatgacaagatcgttgggggctacaactgtgaggagaattctgtcccctaccaggtgtccctgaattctggctaccacttctgtggtggctccctcatcaacgaacagtgggtggtatcagcaggccactgctacaagtcccgcatccaggtgagactggga

SEQ ID NO: 47044 - DNA, 279 bp, Zea mays
gctttacggatggggatggaacaagttcggacaagtcggagtcggcaacaacgacgaccacagctcccccggacaagtcagttttccagaggatcagaaaatctcccaggttgcatgcggatggaggcatactctggccctctccgagaagaaaaatgtcttctcctgggggaggggcactagcggacagctcggcaacggtgaaatagtcgacaggaacacgcctgtgctgatcgatgccctgagctcagacggttctgcctgcaagaagctggagtc

SEQ ID NO: 47045 - DNA, 232 bp, Zea mays
cctggcacccacgcgctcttcagatcagatcggcaaggccaatcccgagcagtggtgcgaaacctcgagcgctcgcgccggtgaccataacaaagaggaagccgcggtagcactggtagcggcagcagtaagggggagatgtcgtcggcgttcagcggcgatgagaccgcccctttcttcggcttccttggcgcctccgctgcgctcgtcttctcatgcatgggggcggcgt

SEQ ID NO: 47046 - DNA, 272 bp, Zea mays
agtacaccacaagctttcgcttggagtcggacgatttgccttttagaaatgacatccggcctgtgattcaggtcaaaagtagtgcacactcaatgatgggatttgccaatgatgctttcgtaggatgcgcacgtggaagcaagcaggtgaagggtttcatgtttgaaaaacccgttgatctgaaagtaggtgtgaaccatgttgtattgctgtcgtcaactatgggaatgaaggacagtggtggtgaacttgctgaagtaaagagtggcatt

SEQ ID NO: 47047 - DNA, 232 bp, Zea mays
atggagtctggagacgacgtgcagaaatggcacctcgaaaggggaaggaaaagatctcagaacagttcatcagcctcggacctcaggtggctgaaggagagaatgtatttggtgtctgccatatctgtgcatccttcaatgacacttttgtccatgtcactgatctttctggcaaggaaaccatctgccgtgtgactggggggatgagggtagggggacgccgagatgcatc

SEQ ID NO: 47048 - DNA, 271 bp, Zea mays
attacagtagtgatttaaggccaactgcaaagcctctgtggaaacctagcattggcattcttgaactgggtatattgacagcacagggcctgttgccaatgaagaccaaggatgggcgtggcacaactgatgcatattgtgttgcaaagtatggacaaaaatgggtgcgtaccaggactataatcgatagtttcactcccaaatggaatgaacagtacacctgggaggtgtatgatccatgcactgtggtcacaattggtgtattcgacaa

SEQ ID NO: 47049 - DNA, 268 bp, Zea mays
cacaactttgcaacgacttgtgtctgccgggtccccaagcatctgagggaggagcaagtgatagaatgtgtccattgcggctgcaggggttgtgccagcggtgactaatcttgtcatcatgttgttgggctcacgactcatcatcaccatcctgaccacattggatgtctcgtgagcatggatcggctacggtgattagcatgaatgtgttgtggtaactagtgggaagaccaaattccctgatggttggatgcttccaactgctatg

SEQ ID NO: 47050 - DNA, 265 bp, Zea mays
atctcgtcgcgacgactgggcgagaccgccgccgccgccgccgcctgagttctttagaaatggctgatggtgaggacatccagcctcttgtctgcgacaatggcactggaatggtcaaggctggttttgctggcgacgatgcaccaagggctgttttccctagtattgttggccgtcctcgccacactggtgttatggtagggatgggacagaaggatgcgtatgttggcgacgaggcacagtccaagagaggtattctcacgct

SEQ ID NO: 47051 - DNA, 154 bp, Zea mays
agctatgaaaatcctgtggtgtctcgaattaatatgagaatacaagatctaacaggactagatgtttccacagcagaggaattacaggtagcaaattatggagttggaggacagtatgaaccccattttgactttgcacggaaagatgagccag

SEQ ID NO: 47052 - DNA, 234 bp, Zea mays
gatatctttaaggggatcaatttgaagcttctcgcctttgagaacatgttgaggacacatcccaagtggcaggggagagcagtgttagtgcagattgctaacccagcccgtggaaggggtaaagatctggaagccatccaggctgagattgaggagagctgccagcggatcaatggagactttggccagtcagggtatagccctgttgtttccaccgccggatatgtcaaatgt

SEQ ID NO: 47053 - DNA, 254 bp, Zea mays
gcgagaagttccccgacgagaagttcgtgcgcaagcacaccgcccccggtgtgctctccatggccaacgccgggcccaacaccaacggctcccagttcttcatctgcaccgtcgcgaccccttggctcgacggcaagcacgtgcgtcttcggccaggtcgtcgagggcatggacgtcgtcaaggccatcgagaaggtgggcacccgaaagggctccacctacggggtcaaggtcgctgctttgtgggagactct

SEQ ID NO: 47054 - DNA, 255 bp, Zea mays
gatgactcgcgatgtcgctcctagaattggctatcagaaaccatcactgattgaatctagatttgttcctgctcttcacggggagaacacaaaaatgtcagctagtgacgcaaattcggcgatatacgtgacagataatgctaaagacatgaagccaaaggtctgcactgctataaagtttgactgtttagctggagaaatatcaggctacccattttagttggcccaattaagttatgacgaaagcggttatta

SEQ ID NO: 47055 - DNA, 296 bp, Zea mays
ggcgattaacgatgaggggatgccaatttaccagaggcctttcatgaaggggaagctgtacatccatttcacggtggagttccccgactcgctggcaccagagcagtgcaaggctctcgagacagtacttccaccaaggccttcatccaagctgacagacatggagatagatgaatgcgaggagacgactatgcatgatgtgaacaacatcgaggaagagatgcgcaggaagcaagctcacgctgcccaggaggcgtacgaggaggacgacgagatgccgggcggagccagagagt

SEQ ID NO: 47056 - DNA, 298 bp, Zea mays
  unsure (1)..(298): unsure at all n locations
atccagcaaaccctaccagccttttgcaaactcagagagggacccgatggcacccaaggcggagaagaagccggcagcgaagaagcccgcagaggaggagcccgcggccccggcggagaaggcccccgctgggaagaagccgaagggnacgaagcggctcccggcgggaaaatccgccggcaaggaaggcggtgttgacaagaaggggcggaagaaggccaagaagagcgtggagacgtacaagatctacatcttcaaggtgctgaagcaggtgcacccggacatcggcatctcctcc

SEQ ID NO: 47057 - DNA, 291 bp, Zea mays
cagcctaaaaaccctagcccccgaatcagatccgaccgcccgccggagcgcggaaccctgcccccggccgccatggagatgagcgatgcggacggctgttcttcttcgagatggcctgcaacaactccgaggtcgcgtacgagcagaaccccaacgacgccgacaacttgacgcgatggggcggacgctgctggagctatcgcaactgcgtaacggccccgacagcctcaagctcctccaagatgcggaagccaagctggaggaggcactgcaaattgatcccaacaagtc

SEQ ID NO: 47058 - DNA, 294 bp, Zea mays
gccagtccagaggcaggtggtgaagcgtgaggagctcttcatcgtcagcaagctgtggtgcacgtaccatgagaaggccctgggccaagcccgaggacccttctctcctggaggatcccaggatcaaggcgatcgcagccaagcacaatagaactacagcccaggtcctgatccggttccccatgcagaggaacttggtggtgatccccaagtctgtgacaccagaacgcattgctgagaactttaaggtctttgactttgaactgagcagccaggatatgaccaccttactca

SEQ ID NO: 47059 - DNA, 297 bp, Zea mays
  unsure (1)..(297): unsure at all n locations
ccagccgaggttccncaaacacgcacagcacacgaacacacaccgcgcccagctccgaggtgatcttccggcggccggcgagatgagccgtggcacaggcgcgggctatgaccgccacatcaccatcttctccccggagggacgcctgtaccaagtcgagtacgcgttcaaggcggtgaagtcggcgggtgtcacgtcgatcggcgtccgcggcgcgactccgtctgcgttgttacgcagaagaaagtcccggataagttgctggatcagacgagcgtgacacacctgttcccgatc

SEQ ID NO: 47060 - DNA, 294 bp, Zea mays
ctcgccgtctgccttctgcgcctccatttcggcctctgtcccttgcaagttcaatctcacctccaaccatgggtaaagagaagtcccacatcaacattgtggttattggccatgtcgactctggcaagtcgaccaccacaggacaccttatctacaagcttggaggcattgacaagcgtgtgatcgagaggtttgagaaggaggctgctgaaatgaataagcggtccttcaagtacgcgtgggtgctcgacaagctcaaggctgagcgtgagagcggtatcaccattgatattg

SEQ ID NO: 47061 - DNA, 287 bp, Zea mays
gcgcgactgagcaaggcggaagcagcgatggagcggctgcagcggatctttggcgcctccggcatggggcagccgccgacggactcgccgctgctcgactcttccgagcaggtctacatctcctccctcgcgtttctcaagatgctcaagcacgggagggccggcgtgcccatggaggtcatgggtctcatgctcggcgagttcgtcgatgactacaccgtcatggtcgtcgacgtcttcgccatgccgcagagcgggactggggtcagcgtcgaggccgtcgacca

SEQ ID NO: 47062 - DNA, 289 bp, Zea mays
gtgaaggtttacaaatcagggtccctcgggagatcgctcgacatcaccagattcggcagctactacgagttgcgtgtcgagctcgagcggttatttggtctcgaaggccaactggaggaccctgcaagatcaggctggcagcttgtattcgtcgaccgggaaaacgatgttcttctcctcggcgacgacccgtggcaggagtttgtgaatagcgtagggtgcataaagatcctctcgccgcaagacctgcagcagatggcccgcggcggcggaggtgaccttctgtctg

SEQ ID NO: 47063 - DNA, 293 bp, Zea mays
gaaaactagaaaagcctcctcccgaccgcaacgcccctcatctccctcgaccccgacatccccgacccgatggcgcccaaggcggagaagaagccagcggagaagaagccggcggccgaggagaaggcggagaagacgaccgcagggaagaagcccaaggccgagaagcggctgcccgcgtccaagtcctccggcaaggagggcggcgagaagaaggggaagaagaaggccaagaagagcgtggagacctacaagatctacatcttcaaggtgctgaagcaggtgcaccccga

SEQ ID NO: 47064 - DNA, 289 bp, Zea mays
gcagcagccagctccatccatcctctttcccctcctcgcttcgcttcctcggcggattcctcctccctcgaccgtccccgtccccgtccccttccggcgcgcaactcgcccgagatggcaaacgcgagatcgggtgtcgctgtgaatgacgagtgcatgctcaagttcggcgagctgcagtcgaagaggctgcaccgcttcctaactttcaagatggacgacaagttcaaggagatcgttgtggaccaggtcggggatcgcgctaccagctacgaggacttcacaaaca

SEQ ID NO: 47065 - DNA, 290 bp, Zea mays
  unsure (1)..(290): unsure at all n locations
cagttatttaggattgaaggactaanaagtgtcttctttggaccagatttcatcactgtcacaaaggataatgaagaattagactggaatttactgaaaccagatatttatgcaacaatcatggacttctttgcatctggcttactcctggttactgaggaaacaccttcaggagaagcaggatctgaagaagatgatgaagttgtggcaatgattaaggaattgttagatactagaatacggccaactgtgcaggaagatggaggggatgtaatctacaaaggctttga

SEQ ID NO: 47066 - DNA, 284 bp, Zea mays
cgcgctatatgtctcgtctatctccaacgagctcaggatccctgtcaggtacctgcgagaggataagcctcacgggtcagctggagggctctacatctttagagattacatcatggaagacagcccgtcacacatagttctgcttaactgcgacgtctgttctagcttcccccttccagacatgctggaggcccataaaaaatatggaggaatgggtactttactagtcaacaaggtatctgcagagtcagctaaccagtttggcgagttggtagctgatcctg

SEQ ID NO: 47067 - DNA, 280 bp, Zea mays
  unsure (1)..(280): unsure at all n locations
tagttggcgagttggagcaggtcgggtcagncggtgagtcattcccagccggcatctgagagcttggtcttgacctcgacagagatcgccatggacgcatcggcggaggtggaccacctcgccgccgagaggtcggccgcgcgcttcgacgtctatgcgatgaaggttgactgggctggctcgcgacacgccgtcgaagtcggcgaccgcatggcccgactcgtcgcgtctcaccctgtcttccgcaaggataacaggaccatgctctccaggaaggact

SEQ ID NO: 47068 - DNA, 287 bp, Zea mays
attgacctttgcttcgccaatgaggatgaagctagagaggttatagggggaggtctggaatcagatccagaggaggcgcttgcgttcttgggcaagtattgcaaatgggctgtggtcacacttgcttcaaagggatgcatggcaaagcatggcaaacaggtcgttcaagtgccggccatcggggagagcaacgcggtggacacaactggagcgggcgacctgttcgcgagcgggttcctgtacgggctggtgaaggggttgccgctggaggagtgctgcatggttgg

SEQ ID NO: 47069 - DNA, 284 bp, Zea mays
ccgccattcttctctatatgatgtagcctcaaaatcttctgcctctgtaactacaagaaacagatttggtcccgtcgattgtgctggcatccatatatcttcttgcggacatgctgtgcatcaggaatgtcatgaccgatatttgttctccttgaaacaaagatatgtccggagacttggttttgaaggtggtcatatagttgatcctgatttgggagaaatgctttgtccagtatgtcgcagatttgcaaattccattctcccagcatccactgatttctcgg

SEQ ID NO: 47070 - DNA, 167 bp, Zea mays
cggcggcctccgcgcgcacggcggctacaagctgcccaagcactgcgacaacaacgaggccggctgggtcgtcgagcccgacggcaccacctaccgctcaggaagcaagcccatggaacgcatggatcccatcggttgctccgtgtcaccaagcccatgttcctcgt

SEQ ID NO: 47071 - DNA, 257 bp, Zea mays
ccaagacagggatcgccatgtcggactcggaggagcaccacttcgaatcgaaggccgacgctggggcgtccaagaactacccgcagcaggctggcaccgtccgtaagaacggcttcatcgtcatcaagaaccgtccctgcaaggttgtggaggtttctacctccaagactggtaagcatggccacgccaaatgccactttgtcgccatagacatattcaatgggaaaaacttgaagatattgttccttcatcacaca

SEQ ID NO: 47072 - DNA, 204 bp, Zea mays
ggacaaatgataggttgaggcgtgcagacagagaggacagcgttaggcgaactgtttatgtctctgaacttgatcatactgtgacagaggagagacttgctgatatctttgctacctgtgggcatgttgttgattgccgaatttgtggtgatccccactcagttcttaggtttgcatttattgagttctctgatgaagagggta

SEQ ID NO: 47073 - DNA, 265 bp, Zea mays
ctttctcctccagcaagtaaaccccgtttccacaacgtcacagcaccgccgtcatgccgaccgtaagcgtgaaatggcagaaggagctctttccaggcatagagattgacactagccagcctccgattgttttcaagactcagttgtacacactaactggtgtgccacctgaacgccaaaaaattatggtgaagggaggaatattgaaggacgatgcagattggtctactttgggagtgaaagatggccataattgatgatgata

SEQ ID NO: 47074 - DNA, 171 bp, Zea mays
agccctgatagtttagaaaacatcccagaaaagtggaccccagaagtcaagcatttctgtcccaacgtgcccatcatcctggttgggaataagaaggatcttcggaatgatgagcacacaaggcgggagctagccaagatgaagcaggagccggtgaaacctgaagaaggc

SEQ ID NO: 47075 - DNA, 268 bp, Zea mays
tgcatcctcatatgtgcttttgcaggaaggttttcgtagggggtgtagcctgggagacaactgaagaaacattcacaaagcattttcagaagtatggagctataactgattctgtgatcatgaaggacaagcatactaggatgcctcgtggatttggatttgttacattttccgatccgtctgtgcttgacagggttctagaggatgaacatgtcatagatggaaggacggttgaagtcaaaaggactgttccaaagagctgtcgtcg

SEQ ID NO: 47076 - DNA, 274 bp, Zea mays
ggcgcctgggaccctctgactacttcggggagattgcactgctgctgaaccggccccgggcggccactgtcgtggcccgggggcccctcaagtgtgtgaagctggaccggccccgcttcgagcgtgtgctggggccctgctctgagatcctcaagaggaacattcagcgttacaacagcttaatctccctcaccgtctgagcacagctcccgccctgcagccccagctccccagtgtggtggccgtgccctgctcgtctgtgtcgggggccggg

SEQ ID NO: 47077 - DNA, 267 bp, Zea mays
cccatctcggtctacaacaggacgacctccaaggttgatgagaccgtgcagcgtgccaaggtcgaaggaaacctccccgtgtttggtctccacgaccccgcgtccttcgtgagctccatccagaagccccgtgtcgtcatcatgctcgtcaaggctggggcgccggtggaccagaccattgccacgctcgcggcgcacctggatcagggggactgtatcgtcgatggtggcaacgagtggtacgagaacacggagaggaaggagaag

SEQ ID NO: 47078 - DNA, 262 bp, Zea mays
gtgatgctgtccactgaggagactgagaagaagaaacatgcaacccacaaagatggcactgctaatggttcagcaaaagaaatacctgatgaaaagcctgccgtcactaagcctagtccctataaagaactgattggagacatcaaggctagcctgggaagtgctcccacacctacccagctcaaggctatgctggcctcctcgacccttccttccaggacgtgatgaatgctctcctcgaggctctctttgacggtgtggg

SEQ ID NO: 47079 - DNA, 262 bp, Zea mays
cgactggctcgccgcgctcccaagggcgctcgtcgcggggttcgtcaagaccgacaaggattttcaaactaaagctcattcctcggggacaaccgtgacacttgccataattgatggctccgttgtaactgttgcgtccgttggtgactcacgttgtgtccttgatgctgcgggatccatctactatttgtcggctgaccaccgctttgacgctaatgaagaagaggttggacgtgtaaccgaatgcgcaggtgaattggaa

SEQ ID NO: 47080 - DNA, 223 bp, Zea mays
ggacggcaagccactgtcgatcgaggaggtggaggtagcgcctccgcaggccatggaggtgcgcgtcaagatcctcttcacctcgctctgccacaccgacgtctacttctgggaggccaaggggcagactcccgtgttccctcggatctttggccacgaggctggaggtatcatagagagtgttggagagggtgtgactgacgtagctccgggcgaccatgtc

SEQ ID NO: 47081 - DNA, 280 bp, Zea mays
gccaaccaaagggctggatctaggaagcagctttttctaaaagctgactttctcacagtgcaaatctgaaagcacccctaaacctgcttttagtgacttttcggatggaactgtgaaaacatatatcgaagaacttttaacgacttttagtgatttccaccaaacggtttttagctttttaacgactcacagcctacagcagctttttccacagctcacagcccacagcaactgtttttcacagcaacagcttcacccaacagaccctataataccatgg

SEQ ID NO: 47082 - DNA, 276 bp, Zea mays
atgaaatgcctgtctcaggccctgcataccttccaaaatgacatccacgtctaccccatctggctgtgcccgttcatcctgcccagccagccaggacttgtgcatcccaagggagatgaggctgaactctacgtggacatcggggcatatggggagccacgggtgaagcacttcgaggccaggtcctgcatgaggcagctggagaagtttgtgcggacgtgcacgggttccagatgttatacgccgattgctatatgaaccgggaggaattctggg

SEQ ID NO: 47083 - DNA, 274 bp, Zea mays
aacgattccgtcaccaagagcaagtttgacaacctgtatggttgccgccactcgctccctgatggtctgatgagggccactgacgttatgatcgccggaaaggttgccgtggtctgcggatacggtgatgtcggcaagggttgtgctgctgccctcaagcaggctggtgcccgtgtcattgtgaccgagatcgacaccatctgtgccctccaggctctgatggagggtcttcaggtccttctcttggaggacgttgtctctgaagctgacatct

SEQ ID NO: 47084 - DNA, 262 bp, Zea mays
gttcgtgcgaaggcgaccctccctccttcgctccttccgcgccgcctcccggccgtcgccgccatggtgaagtactcgcaggagccgggcaaccctaccaagtcggctaaggccatgggcagggatctgagggtccacttcaagaacacaagggagacagcctttgcgcttcgcaagttgtctttgaccaaggctaagcgataccttgaggatgttattgctcacaagcaggcaattcccttccggagatactgtgggggtg

SEQ ID NO: 47085 - DNA, 307 bp, Zea mays
cacaacccagtcgctcaaaaccctagagctctcgcctgctcgcctccgccgccggagcgagctccccatcttcatccgtcaaccatggcgacccagatcagcaagaagaagaagttcgtcagcgacggtgtttactacgccgagctcaatgagatgctgacgcgggagctggcggaggatggctactctggcgtggaggtgcgcgtcacgccgatgcgcacggagatcatcatccgcgccacgcgcacgcagaacgtgctcggcgagaagggccgcagatcagggagctacctccgtcgtccagaag

SEQ ID NO: 47086 - DNA, 309 bp, Zea mays
actccaaacacttgcgccgccgctgcctcacaggtaaggccgccatggtctccggttcgggcgtgtgcgcgaagcatccgtggtcgacgcgcgccaccacatgctgggccgtctctcctcgatcatagccaaagagctgctcaatgggcagaaggtggtcgtcgtccgctgcaaggagatctgcatgtcgggcggcctcgtccgtcagaagatgaagtacctccgcttcctccgcaagcggatgaacaccaagccgtcccacgggcccatccacttccgggcccccgccaagatcctgtggcgcaccat

SEQ ID NO: 47087 - DNA, 297 bp, Zea mays
tgctcatttctgctgtgtggcttcttttctatggacaaccaccatatcattcactctgcatcgcacagttgtaaaacacaaaactgatgttgaagaatttggatctattttccacttatatgtgtggggaacttcactatctaccactgtattacgttcgataggaagtgactacggaagaccaggcacctggtgctggattcagcagggaagcatggcaaaggtcctacatttaataaccttttatcttccactttggggtgccattttgtacaatgggtttacatactatgaagt

SEQ ID NO: 47088 - DNA, 308 bp, Zea mays
ctggaatggtaaaaccgctagttgacattctttggtttacatggagaatgaagcttttatctggacgaagaggagttgctatactgtatgcttacatgctactgggtttgggctttcttagagctatatcccctgacttcggtcatctctcaggccaagaacaagaacttgaaggaacattcaggttcatgcactcgagactgcggacacatgctgaatcaattgctttctttggtggtggttcaagagaaaaagcgatggttgatgctatattcgtcaagttaattaaccactcaaagattcttttg

SEQ ID NO: 47089 - DNA, 275 bp, Zea mays
tgaaggagcaggaagatgccggcagggcacgggctgcagtcgcggacccggactgttcgcgcggcccttccgcaagaaggggtacatcccgctcaccacgtacctgcgcacctacaagatcggcgactacgtcgacgtcaaggttaacggcgccgtgcacaagggcatgccgcacaagttctaccacggccgcaccgggagcgtctggaacgtcaccaagcgcgccattggcgtcgagatcaacaagcaggttaacggtcgcatcatcaggaagc

SEQ ID NO: 47090 - DNA, 298 bp, Zea mays
ggtgaagtcagtgctgagatgctcgtcaaccttggtgttccctgggtcattcttggacactctgaaaggagagctctgctgggagaatcaaatgaatttgttggagacaaggttgcgtatgccctgtctcagggactaaaggtcattgcatgtgttggtgagacccttgagcagagggaggctgggtctaccatggatgttgttgctgcacaaacaaaagcaattgctgagaagatcaaggactggagcaacgtagttgttgcctatgaaccagtttgggctattggaactggtaaag

SEQ ID NO: 47091 - DNA, 302 bp, Zea mays
cgaaaaggtgatcctgcaatttgggaaggtggctaaggacatgttcaccatggactaccgttacccactgtcagccttccaggccttcgcgatctgcctgagcagcttcgacaccaagctggcctgcgaatgaagccaccagtcatggctcaaagtcaaggacgatctgtctgtttcacgaagacggtggccccaaattttgctgggccaccattctgttgtatgttgttgatgccttcttaacttacctaggaagctgcgtttagacattttgcacctgatctacagctgctgctgtgttt

SEQ ID NO: 47092 - DNA, 299 bp, Zea mays
gaagatctccagggaaatctctgacgccagtgggaagacgatcccagtggaagagatcctaacgatcgacgtgaagccggggtggaagaagggcaccaagatcacgttcccggagaagggcaacgagacgcccaacacgatcccggcggacctcgtcttcatcatcgacgagaagccgcacccggtgttcacccgcgacggcaacgacctggtggtgacccagaagatcccgctggcggaggccctgacggggtacaccgcgcacgtgacgacgctggacgggcgcagctgacggtgcc

SEQ ID NO: 47093 - DNA, 301 bp, Zea mays
attgcatagtaacgagtcttgactggtctaaaaagttccctttgcatcagtcaccactttggaattttcaaaataggcagggcagtaattgcagttacatatataagaccaactacatcgactccaccctgcctgctgaggccgtgtttgcagcggaagtggagaagctcaaggcggatcagttcaagcccgcggagcaggtgacgttggagccctacgagcgtgaccatgcatgtgttgtgggtgggtacagggtgcccaagaagcagaaggccacctcttaggatcggaatccgtgctc

SEQ ID NO: 47094 - DNA, 302 bp, Zea mays
ttcaaactcttggccgccgcctcgctctctgttcgccgcgccccgccgcagaaatggcgctgccgaatcagcaggttgtggattaccccagcttcaagctcgtcatcgttggcgacggtggaactggcaaaaccacatttgtgaagaggcatcttactggcgagtttgagaagaaatatgagcccaccattggtgttgaagttcaccctctcgattttagcactaactgtggcaaaattcgtttctattgctgggacactgctgggcaagaaaagttcggtggcctcagggatggctactac

SEQ ID NO: 47095 - DNA, 303 bp, Zea mays
ggcctacacgccgccgcttgtgccgccgccatgtccctagtgatccccgagaagtttcagcacatcctgcgagtactcaacaccaacatcgatgggcggcggaaaatagccttcgctatcactgccattaagggtgtggggcggagatacgctcatgtggtgttgaggaaagcagacattgacctcaccaagagggctggggagctcacggaggacgaggtggagcgtgtgatcaccatcatgcagaacccacgacaatacaagatccctgactggttcttgaacagacagaaggacgtgaag

SEQ ID NO: 47096 - DNA, 304 bp, Zea mays
actgtctgtccatcaaacttgacatatctggctcagcatccattgtttgagcagataaaagagctcagtgaagacataattgttcccgaatactgttacgctggtggaggtgaactccaatcacttaatgcttggtttggtccagagggtacagtgacaccattgcaccatgatccgcatcacaacatcttagctcaggtattgggcaggaagtatattagactctatcctgctttcatagctgaggacttgtatccacacacagagactatgttaagcaataccagtcaggtagatgttgaca

SEQ ID NO: 47097 - DNA, 297 bp, Zea mays
caatctccccagcaatccctagcagaagccttccatcctcactcgctcgatggcccgcacgaagcagacggcgaggaagtccaccggcggcaaggcgccgaggaagcagctggcgactaaggcggcccgcaagtctgcccctgcgaccggcggagttaagaagccccaccgcttccgccccggcaccgtcgcgctccgggagatccgcaagtaccagaagagcacggagctgctgatccgcaagctgccgttccagcgcctggtgcgggagatcgcgcaggacttcaagaccgacct

SEQ ID NO: 47098 - DNA, 295 bp, Zea mays
tcgccccccacggacctgaaccgagaaccgttaccgccgccggagaagcgccgctcgctcaggaggacagccatggcgccggagccggaggatgatattatgaacgagaagaatccccgcccgctcgacgaggatgacatcgcgctcctcaaaacctatggactggggccgtattcgactagcattaagaaggtcgagaaggagatcaaggaaatggccaagaaaatcaacgacctctgtgggataaaggagtctgatacagggctggctccacctagccagtgggatttggttt

SEQ ID NO: 47099 - DNA, 294 bp, Zea mays
gcaccttcccaaaaaaatcccccattttcttcgaggcgaggagagcgtgaaagacagggcaccggcagcgacgatgtcggggcgcggcaagggcggcaaaggtctgggcaagggcggacaaagcgccaccgtaagtgctccgtgacaacatccagggcatcaccaagcccgcgatccgtaggctggctcggaggggcggcgtgaagcgcatttcggggcttatctacgaggagacccgcggcgtcctcaagatcttcctcgagaacgtcatccgcgacgccgtcacctacaccg

SEQ ID NO: 47100 - DNA, 294 bp, Zea mays
gaaacgacttaggagctggaacgacatctaggagctttacgacagaagagatctctaaacattccacaaggaaggactgttggatcattatcaaggacaaggtctatgatgtcactccttatgtagaggaacatccaggcggagatgccattctaaataatgctgggggtgattccacggagggcttttttgggccacagcatggcactagggtcttcgatatcatcgaggatttctgcatcggtcagttgaaggcttcatgatgatgacaggatagtttgtattgaatttatt

SEQ ID NO: 47101 - DNA, 296 bp, Zea mays
cgcgcgtgccgagactctgaggccttgcacccccacgatcccgtacgatggccgtcaagaagatcgcgatcttcggcgccactggccagaccgggctcaccaccctggcgcaggcggtgcaagcaggttacgaagtgacagtgctggtgcgggactcctccaggctgccatcagaggggccccggccggcccacgtggtgctgggagatgttctgcaggcagccgatgtggacaagaccgtggctgggcaggacgctgtcatcgtgctgctgggcacccgcaatgacctcagtccc

SEQ ID NO: 47102 - DNA, 177 bp, Zea mays
aatccttcaagcgcagctgcctcctcctcgtcgtccggtcgtgagaagggatggcgggccgtggcaaggctatcggcgctggcgcgcgaagaaggcaacgtcgaggagctccaaggccggactccagttccccgtcggcaggattgccaggttcctcaaggcgggcaagtacgcgga

SEQ ID NO: 47103 - DNA, 295 bp, Zea mays
  unsure (1)..(295): unsure at all n locations
gcaagacggatctgcaagcgcacntcaaggagcttaaatcggagctctccctcctacgcgtcgccaaggtcaccggcggggctcccaacaagctctccaaaatcaagattgtgcgcacctccatcgctcgcgtgctcaccgttatctcgcagaagcagaagtcggcgctgcgtgaggcgtacaagaagaagaagcttctcccgctcgatctccgccccaagaagacccgcgccattcgcaggcgcctcaccaagcaccagctctccttgaagaccgagagggaaaagcagcgtga

SEQ ID NO: 47104 - DNA, 289 bp, Zea mays
ctaagattgataggttagatgaagcttacatgctttttgaggaagcaaaatcaaaaggaatagaattgaatgttattgtgtatagctctctcatcgatgggtttggaaaggttggtaggatagatgaagcttatttgatattagaagagatgatgaagaagggtttggcaccaaatgtttacacatggaacagccttatggatgctttagtgaaagctgaagaaatcaatgaagcacttatttgtttccagtcaatgaaggaaatgaaatgttccccaaacacttacac

SEQ ID NO: 47105 - DNA, 291 bp, Zea mays
agagacaggcgtcttcgtactcgcctatctccgcgacccaaagcgttcccccttctcccattcttctctcatttctcaccaccgccgccgctaccccctttcgacaacaccatgagggagtgcatctcgatccacatcggccaggccggtatccaggtcggaaacgcgtgctgggagctgtactgcctcgagcattccattcaggctgatggtcagatgcccggtgacaagaccattgggggaggtgatgatgctttcaaacacttcttcagtgagctggcgctgggaagc

SEQ ID NO: 47106 - DNA, 245 bp, Zea mays
aaggatgttcaggccatgaaggctgtcgttggagaggaggcactctcgtctgaggatctgctttacttagagttccttgacaagtttgagaggaagtttgtgacacaaggagcatatgacacacggaacatcttccagtcactcgatcttgcatggacattgcttcggatcttccctcgcgaacttctccaccgtattccagcaagaccttggaccagtactatagccaggatgcctcgcactga

SEQ ID NO: 47107 - DNA, 201 bp, Zea mays
ccgttttcgtgctcacacacccaaaccttagtcgcgatcaggccccaaggactcgagatgaagtcgagggcacggtccaccgccggcgactccaggctctcggtgaggaagaccaaggctgagaaggacccaaacaagcccaagaggcctccgagcgcgttcttcgtcttcatggaggagttcaggaaggactacaaggag

SEQ ID NO: 47108 - DNA, 197 bp, Zea mays
gtctggagacgacgtgcagaaatggcacctcgaaaggggaaggaaaagaaggaagaacaggtcatcagcctcggacctcaggtggctgaaggagagaatgtatttggtgtctgccatatctttgcatccttcaatgacacttttgtccatgtcactgatctttctggcaaggaaaccatctgccgtgtgactggtgg

SEQ ID NO: 47109 - DNA, 227 bp, Zea mays
ccaacatggtgttcagtcgcttcgtggaggatggccgggtggcctatgtctcctttggacctcatgccggaaaattagtcgcgattgtagatgttattgatcagaacagggctttagtcgatggaccttgcactcacgtgaggatacaggccatgcctttcaagtgcatgcagctcactgatgtcatcctcaagtgtccgcacagtgcccaccagaagtatgtccga

SEQ ID NO: 47110 - DNA, 291 bp, Zea mays
ctcgaaccctctcgcgcttggcttgctttcactctccagggccccactcccacctcgccgccgcagccatggcgatcacagcgccaactcccgacatcctcggcgagcgccagtccggccaggacgtccgcacgcagaacgtgatggcttgcggggcggtggccaacatcgtcaaatcctcgctcggccccgttggtctcgacaagatgctagtggacgatattggtgatgttacaatcactaatgatggagcaaccatacttaagatgttggaagttgagcatccagccg

SEQ ID NO: 47111 - DNA, 242 bp, Zea mays
tctcgagcgaattcggctcgaggcgcctcaaagaagggtatatcaaggagggcagcatcgtgagcgtgatgggtgttgttcaaaggaatgagaacgtgctgatgatcgttcctccggctgaacccatctccactggctgccaatgggccaaatgcatcctcccgaccagcctcgacggtctggtcctgagatgcgaggacacgtctgacctggatgtggtaccagtctagttggttccggcg

SEQ ID NO: 47112 - DNA, 206 bp, Zea mays
gcagcatatgtggagcatgcaaatgcaattcctaaatggacggggttactgcctaaatctggaaacatggtaattaatacggaatggggaagctttaaatccggcaagcttcctctctcagaatacgacaaagccatggactttgaaagtttgaaccctggagagcagatatacgaaaaaatgatctctggcatgtatctgggaga

SEQ ID NO: 47113 - DNA, 248 bp, Zea mays
gacggataaagtgacgaaccctctattcgagaagaggccgaagcagttcggcatcggcggcgcgttgccgcccaagaaggacctgcaccggttcgtcaagtggcccaaggtcgtgcgtatccagcggcaggccgcatcctcaagctccgcctcaaggtaccaccggcgctcaaccagttcacccgcaccctcgacaagaacctcgctacgaacctgtttaagatgcttctcaagtaccggcctgaaga

SEQ ID NO: 47114 - DNA, 266 bp, Zea mays
cgggaagcactttagcgcctactcttccctgatttatcaccagagattccacaccggagagaaaccctataaatgtaatgactgcgggaaagccttcagtgatggctcaatccttatccgacatcgtcggactcacaccggagagaagccatttgagtgcaaggaatgtggcaaaggctttacacaaagttctaaccttatccaacatcagagaattcacactggagagaaaccctataaatgtaatgaatgtgagaaagctttca

SEQ ID NO: 47115 - DNA, 279 bp, Zea mays
cggctcgaggtataaaggagtctgatacagggttggctccacctagccagtgggatttggtttcagataaacagatgatgcaagaagaacaaccgttacaagtggcaaggtgtacaaagatcataagccctaatacggatgatgccaaatatgttataaatgtaaaacaaatcgcaaaatttgttgttggactgggggataaagtgtctccaactgacatcgaggaagggatgatggtcggtgttgatcgcaacaagtaccagattcaaatccctcttc

SEQ ID NO: 47116 - DNA, 284 bp, Zea mays
gctcaggggagcggaggagacgcctgccctagtccacctcacgcacatgaccgacctgcagtcggtctaccacctgcggatcggcttcgcctccgtggcgtccagaccgtctgccaccggctccatgtggtacatgtgggtgctgtggcccgtggcgtggctgtccatggcgctcgcgtgggcctacgggtcctccgcgttcgtcgtcgagaggatcaaactcgggaagctgaggatgcaaacgtgggcagtgccaagatacaacttccagtacggcctgagct

SEQ ID NO: 47117 - DNA, 305 bp, Zea mays
ccacatcagaacacatactattggcatatggtcggcaacatagttcactgttgaggaccattttgatcaatggggagaccagagttcctgtgtacacagtcttggaggtgtatcgagtttcagacatggagcttgtaagagttcttcctagtgtaggagaggaagtcaatgttgcatgttttcatccttcccctggatcaggtcttgtttatgggactaagcaagggaaggttaggtttcttcggcaccatggtgcatcattcacttgctggggagaacgttcatgagatttagaggcatgtgct

SEQ ID NO: 47118 - DNA, 298 bp, Zea mays
tggggagaccgtttatattgaaaggcttggaaaggttgaccctagcaaacttatgaatgtcacaacgatggatcgatatgtgcgataccatgtgaaggagtttgagaggagcttcttgattaaatttccagcttgctctgttgctgcaaaaaggcacattgattccagcacaacaattctggatgtccagggcgtgggtttgaaaaatttcagcaaaactgcacgtgaattaattcagcgactgcagaaaattgacaatgataactacccagagactctataccaaatgtttattgtc

SEQ ID NO: 47119 - DNA, 298 bp, Zea mays
atcaaggccattggccgatgctaaccgaatcaagatcaagaaggcattacggggcgtaaaagttgaggtcacgcaccgggggaatgtaaggcgcaagtatcgcatatctgggctcacaacacagccaactcatgaactgattttcccaattgatgaacaaatgaatatgaaatctgtcgtggagtacttcaaggaaatgtatggtttcaccattcagcatcctcatcttcctcaacttcaggttggaaaccaaaagaaggcgaactatttaccaatggaggcctgcaagatcgttgaa

SEQ ID NO: 47120 - DNA, 301 bp, Zea mays
gcccaatcccgaaaccgtcgccgtattccaatggcgcccaaggccgagaagaagcccgccgccaagaagcctgcggaggaggagccggcggcggagaaggccacggcggggaagaagcccaaggccgagaagcggctccccgcgggcaagtccgcaggcaaggagggtggcgagaagaaggggaagaagaaggcaaagaagtcggtggagacgtacaagatctacatctttaaggtgctgaagcaggtgcacccggacattggcatctcgtccaaggccatgtccatcatgaactccttca

SEQ ID NO: 47121 - DNA, 317 bp, Zea mays
cggtcactcggcacgcaggctagcagcacagcagcagccagagccatcccctctcctcgctacgcttcgcttcctcggcgccgattcctcctcctcctcctccaccctcgtccgtccccttccggcgcacgagctcgcccgagatggcgaacgcgagatcgggtgtcgctgtgaacgatgagtgcatgctgaagtttggcgagctgcagtcgaagaggtgcaccgcttcataactttcaagatggacgacaagttcaaggagatagttgtggaccaggtcggggatcgcgctaccagctacgatgacttcacaaaca

SEQ ID NO: 47122 - DNA, 304 bp, Zea mays
agctccaatccgccgctccactccaagtcacacggaggcagccatcgtagcctcgcccgactccgcttcccctgttctttgggcatggagctgatcacaaatgtcaccgagtacgagaagctcgcgaaggagaggctgccgaagatggtgtacgactactacgcctccggcgcagaagatcagtggacgctcaaggagaaccgggaggccttctccagaattctgtttaggccacgggtactgatcgacgtctcccgtatcgacatggccacaaacattctgggcttcagcatttccatgccta

SEQ ID NO: 47123 - DNA, 298 bp, Zea mays
aggagatcggcttcatcgtctactccatcggcaagccgctcgacgcctggctcaaggacatgcccgcggtcgcctaatcccacccccctcacccatggattggattccgggaaggaagaggagagaagctggttgaccgttctttattacagtttgtttttgcaggctacgctaccgattttctcttgtgtcaggcataaaaaaaggttggacgggctgctagtattccctgctgtttggtgttttcgtatcggaggacgtctgtagatgtacaattcctcagggcccttgtgttcgg

SEQ ID NO: 47124 - DNA, 298 bp, Zea mays
ctcgagaactccatttcgatctcatttgaaatcaacccatcctcgtttcctccgtctagcagcctctcaccctcatggccaagatcaagatcgggatcaatgggtttggcaggatcggaaggctggtggccagggtggccctgcagagcgacgacgtcgagctcgtcgccgtgaacgaccccttcatcagcaccgattacatgacctacatgttcaagtatgacactgtgcacggacagtggaagcaccatgaggtcaaggtgaaggactcaaacacccttctctgtggtgagagggg

SEQ ID NO: 47125 - DNA, 298 bp, Zea mays
ctagggtttttgattttagccgccgccgctgctcatctcacatccctcgagaagacgcctgctcctcgcctatcgatacgatggccgtcttctccgacctccacaccgccgacggcctcaagtccctcgaggctcacctcgccggcaaaacctatgtgtctggtgactccattactaaggatgacattaaggtcttcgccgcggtgccgtcgaagcctggcgctgagtttcctaatgccgcccgctggtacgagaccgtctctgcggctgtagcctcaagattccctggtaaggctgt

SEQ ID NO: 47126 - DNA, 296 bp, Zea mays
acaaggttgtcaagatccaagaggagcttgacattgatgtgcttgtgcatggagagccagagagaaatgacatggttgagtacttcggtgagaaattatctggttttgcgttcactgccaacggatgggtgcaatcctatggatcacgctgtgtgaagccacccattatctatggtgatgtcagccggccgaaccccatgactgttttctggtccaagatggcacagagcatgacccctcgtcccatgaagggaatgttgactggtccggtcacaatcctgaactggtcattcgtc

SEQ ID NO: 47127 - DNA, 294 bp, Zea mays
aagatgagcactcctcaaaatcagatgatgacatggatgaccttgaagagttggatatctcgtcgtgtttcatgtgtgacctcaagcatgacaccatagaagactgcatggtccatatgcataagaagcatgggtttttcatacctgacagtgaatacttgaaggatcccagtggtcttcttacttatgttggactgaaggtgaagcgtgattttatctgcctctactgcaatgacagatgccagtccttcttcagtctagaggctgtcaggaagcacatggatgcaaaggggc

SEQ ID NO: 47128 - DNA, 297 bp, Zea mays
agaccgttaccgccgccggagaagcgccgctcgctcaggaggacagccatggcgccggagccggaggatgatattatgaacgagaagaatccccgcccgctcgacgaggatgacatcgcgctcctcaaaacctatggactggggccgtattcgactagcattaagaaggtcgagaaggagatcaaggaaatggccaggaaatcaacgacctctgttggataaaggagtctgatacagggctggctccagctagccagtgggatttggtttcagataagcagatgatgcaagaagaac

SEQ ID NO: 47129 - DNA, 288 bp, Zea mays
caattgtcggttcttcacttatgaggaattgtatcagatcacaaattgcttctcatcacagaacctgctaggggaaggtgggttcggatcagtgtataagggttgcttggctgatggaagagaggttgcggttaagaaactgaaagatggcggcgggcagggggaacgtgagttccatgcttaggtggatattatcagtcgtgtgcatcatcgccatctagtttctcttgtggggtattgcattcagatgaccagagattgcttgtctacgattttgtgcccacgaca

SEQ ID NO: 47130 - DNA, 264 bp, Zea mays
aaatgaactctaccaattggcctccgttgcatattgcttgcttctagcctggtgcagtgaatatttaggattgagtcttgagttggggtcatttcttgctggtgttatgatatcaaccacagattttgctcatcatactatggagcaggttgaagccattcgcaatctatttgcagcactcttccttgcaagcattggaatgctcatacatgttaagtcctggtggaatcatgttgacatattacttgcagctgttatactcgt

SEQ ID NO: 47131 - DNA, 291 bp, Zea mays
aaatgaggcagcaagctcacgagacagggagggccgcagctatacccatcacggtgaggcagctagaagccatcatccgtttgagtgaatctcttgcaaagatgagattgacaagtgtggctacaccggagcatgtcgaagaggcattcagactgttcaatgtctccaccgttgatgctgcaagatccggaatcaatgagcatttgaacctgtcaccggagatcgcaaatgaaatcaagcaagcggaggcacaaataaagagaagaatgggcatcggcagccacatatccg

SEQ ID NO: 47132 - DNA, 299 bp, Zea mays
ccgccggctgcttagaggacaggaaaggacggtcccgtctctcccgatacgcttccgaagcggtcgcggagcaggtcggacggtccgccaggaagatggggttgagctccatcgtcatgaaggtgaaaggggcttcgttcttcaagaagaagaagaaggtgatcctgagcttcagagaagggttccgaggcgaaagggtgagggaccaatctcctatcatgtacatccacgacgtgacccagcttcctcacaatgggtgccggctccccaagcagcgccgggtgtagtttcggagtgga

SEQ ID NO: 47133 - DNA, 279 bp, Zea mays
aaagaagaagtcagcttggcggagtgggcgttgcactgccagaagaagggcattcttgaccagattgtcgacccctacctgaagggaaagatagccccacagtgcttcaagaagttcgccgagacagccgagaagtgtgtttctgatcagggcatcgacggccctacgatgggtaatgtgctctggaacctgaatttcccccttaagatgcaggaaggcgcagaagagagcggaacctttgcctgcggtatgtcagacgagggcgctcccttgatggtc

SEQ ID NO: 47134 - DNA, 280 bp, Zea mays
ctcttcctctcctccatctctcaacgcctggggctcaccgcacctcccctcctcgccgcggatcccccactactccggtagaaaatggctgacgctgaggatatccagcccctcgtctgcgacaacggaactggcatggtcaaggctgggttcgccggcgacgacgctccgagggccgtcttccccagtatcgttggtcgcccgctcaacagcggtgtgatggtggggatggggcagaaggatgcctacgtcggcgacgaggcgcattccaagaggggta

SEQ ID NO: 47135 - DNA, 288 bp, Zea mays
ccaactcgccgtctgccttctgcgcctccatttcggcctctgtcccttgcaagttcaatctcacctccaaccatgggtaaagagaagtcccacatcaacattgtggttattggccacgttgactctggcaagtcgaccaccacaggacacctgatctacaagcttggaggcattgacaagcgtgtgatcgagaggtttgagaaggaggctgctgaaatgaacaagcgggtcttcaagtacgcatgggtgctcgacaagctcaaggctgagcgtgagagaggtatcacc

SEQ ID NO: 47136 - DNA, 291 bp, Zea mays
gtaatgtgcgagatgtgaggaattccatatttgtgtggcgaggcaagccgtgcgacaagtgccagatgtacgatgaaatgattgaatcggagagcgtcaccgtttgtgtggattatcaagtcaggcaaataacggtcacttggtcgtggaagggcttcttattgcagtcatagtgttccagctctccaggaagagttacaaaccaccagagaagccactcactgaaaagtgccgctggaccacatacgattgttgatggtaaagaagtgtgaactttgcatcagcaaacta

SEQ ID NO: 47137 - DNA, 265 bp, Zea mays
atcgccgctgcgccgtctcctccgctcccgtcgtacggaaagatggcgtcccacattgttggataccctcgcatgggccccaagagggagctcaagtttgcacttgagtctttctgggatgggaagagcaccgctgaggatctggagaaggttgtaccgacctcagggccagtatctggaagcagatggctgatcctgggatcaagtacatccccagcaacactttctcgtactatgaccagagccttgacaccactgccatgct

SEQ ID NO: 47138 - DNA, 275 bp, Zea mays
cggagtaccggtacgacacgacggagctggtacacgagggcaaggacggcgcctcacgctgggtcgtccgccccaagtccgtcaagtacaacttccggaccagaaccgccgtccccaagctcggggtgatgcttgtggggtggggaggcaacaacgggtccacgctgacggctggggtcattgccaacagggaggggatctcatgggcgaccaaggacaaggtgcagcaagccaactactacggctccctcacccaggcctccaccatcagagtc

SEQ ID NO: 47139 - DNA, 250 bp, Zea mays
ctctcaagagtttgggtgggacaaggatcttgccaagaagatttggtgcttcggacctgagaccaccggcccaaacatggttgttgatatgtgcaagggagtgcagtatctcaatgaaatcaaggattctgttgtggctggtttccagtgggcatcgaaggagggtgcactggctgaagagaacatgcgcgggatttgcttcgaggtctgtgatgtcgttcttcatgccgatgctatccaggggggtggt

SEQ ID NO: 47140 - DNA, 246 bp, Zea mays
agagttggacctgccagatgccccagaaaaagccccacgtcctcctgcacaagctgttgacccattctcaaaatttgggccaaaggcagagatatcacatatattccgcgcaccagagaagaggccacccaaggagctctcgctagcgttcacgggtctcacgcttctgccgtttattggattcttgatagggctcgttcgtcttggagtgaacttgaagaacttcccgtccttgccaggaccggc

SEQ ID NO: 47141 - DNA, 282 bp, Zea mays
  unsure (1)..(282): unsure at all n locations
catatatgtgtagtaaaaaataagcgtatagattcagatattattgccaaggcaactcagatgaagattataatgcagtatggtgttgggttagaaggtgttgatgtaaatgctgctacagaacacaaaatcaaagttgcacgaatacctggaagtacgacaggaaatgctgtctcttgcgcagaaatggcaatctatcttactctaggcattctgcgtaagcanaaggagatggatactgctgtgaccgggaaagaccttggtgttccagttggagataca

SEQ ID NO: 47142 - DNA, 277 bp, Zea mays
ctctctgcctttctaaaagtgcggcgactggttgggctgccgccgactgccggggccttcgccgacctcttcgccggcgaagaggtcccatcaggagaaggagtagatcgtcgacccagaaccctcgctgatggcgactttcgcgaaacctgagaacgcgctgaaaagagccgaagaattaatccatgttggtcaaaagcagtcagccctgcaggctttacatgatctcattacctcgaaaaggtacaggtcatggcagaagcctctcgaaaagatc

SEQ ID NO: 47143 - DNA, 234 bp, Zea mays
caccacctcgcctgcgatcttcgtagcctccgtcgcgtcgagcatcgatcatgtcggcctactgcggaaagtacaaggatgagctcatcaagaatgctgcctacattggcacccccggcaagggtatccttgctgctgatgagtccactggcaccattggcaagcgcctttccagcatcaatgtcgagaacgttgaggagaaccgccgtgccctccgtgagctcctattctgct

SEQ ID NO: 47144 - DNA, 272 bp, Zea mays
ctcgagccgcccaaggcgaggcgttgaaacccttaaccctcttccacctcgaagcggcgcgaccgagggagagtgtgagtggactcaggaggcggcgggcgaaatgaagcttaacgtcaagaccctcaagggcacaaacttcgagatcgaggcgacccccgatgcgtcgtgttcctgaggtgaagaggatcatcgaaactactcagggtcagagtacctacccagcagaccagcaaatgctcatataccaagggaaaattctgaaggatgag

SEQ ID NO: 47145 - DNA, 268 bp, Zea mays
cctcaacaggcttgtgtcccaggtcatctcatccctgactgcttccctgaggttcgatggtgctctgaacgttgatgtgaacgagttccagaccaacctggtgccctaccctaggatccacttcatgctttcgtcctacgctccagtcatttctgctgagaaggcctaccacgagcagctgtccgtggccgaaatcaccaacagcgccttcgagccatcctccatgatggccaagtgcgacccccgccatggcaagtacatggcatgc

SEQ ID NO: 47146 - DNA, 270 bp, Zea mays
atggggcggagcctggtcatatcatagtgaccagcattgatgggagaactgggcaggcaaagcagaccattagttacatggctgagcgggtggtaggtcatgggtccttcggaaccgttttccaggccaagtgtcttgaaactggtgagaccgtagctataaaaaaggttcttcaagacaagagatacaagaatcgtgagctgcaaaccatgcgagtgcttgaccacccaaatgtggtggctctaaagcactgtttcttctcaaagactg

SEQ ID NO: 47147 - DNA, 280 bp, Zea mays
ccttgcctccgatccccaattcctccttcggatctcgcattcagcgcacgcaggtgtgaaggaagggggacgcggaggaagatggggctcgcgttcgggaagctcttcagccggctcttcgccaagaaggagatgcggatcctcatggacggcctcgacgccgccggtaaaaccaccatcctctacaagctcaagctcggcgagatcgtcacaaccatcccaacaatcggtttcaatgttgaaactgttgagtacaaagaacataagcttcactgtctgg

SEQ ID NO: 47148 - DNA, 265 bp, Zea mays
atctcctcaaccaaattcaaggtcacagcggcgaacctctcggctatcatgtctggccgcggcaagggcgggaagggtctgggcaagggcggcgccaagcgccaccgcaaggtgctgcgcgacaacatccagggcatcaccaagccggcgattcgcaggttggcgaggaggggcggcgtcaagcgcatctccgggctcatctacgaggagacccgcggcgtgctcaagatcttcctcgagaacgtcatccgcgacgccgtcacct

SEQ ID NO: 47149 - DNA, 257 bp, Zea mays
attaaccctcgttcctgtcgcgcaccacgacctccacttcacatctcccccggcggcggcgcggtcagttgaacaatggcggactccaaggccacctcggcggtcaccctccgcacccgcaagttcatgaccaaccgcctcctggcccgcaagcaattcgtgcttgaggtgatccaccccggccgcgccaacgtctccaaggcggagttgaacgagaggcttgccaaggcgtacgaggtgaaggaccaaacaccatc

SEQ ID NO: 47150 - DNA, 286 bp, Zea mays
aggtgatctgcatgtgcctgtgatctactgctggctgcatcacctcaatagtctacctgggggcgtatgacagcgaggaggcagctgctcgtgcctatgacctcgcagctctcaagtactggggtcctgagactctgctcaacttccctgtggaggattactccagcgagatgccggagatggaggccgtgtcccgggaggagtacctggcctccctccgccgcaggagcagcggcttctccaggggcgtctccaagtacagaggcgtcgcaggcatcaccacaac

SEQ ID NO: 47151 - DNA, 300 bp, Zea mays
acaggcttcgagaacaagactgcagggggagggggaggaccaagcgaaaggggaactagagcaagatgggcggcgcactgctgcttgcgctcctcctcgtctctgctgctgccgcccctcaggtacttggagttggcaatggagacaatcacatgagaatcatccaggaggacatcatcgagacagtcaacaaccatcccagtgctgggtggacagcctcacgtaatccttacttttcaaactataccattgcgcaatttaagcacatacttggagtgaaaccagcaccacagaatgcac

SEQ ID NO: 47152 - DNA, 288 bp, Zea mays
aaagtgaggggccaaacctgtcatcagtgccggcagaaaactcttggtcatcatacaagctgctgtaaatgccagattgttcaagggcagttctgtggagattgtttgtatatgaggtatggtgagaatgtgttagaagttaagaagaatcctaactggatatgtccagtttgccgtggcatctgtaattgcagcatatgcagaaccaagaaaggatggttcgctactggttctgcctataggaaggtggttggacttgggtacaaatctgtggcacactttttaatt

SEQ ID NO: 47153 - DNA, 290 bp, Zea mays
actgacagcgaggtggctcccgtgcagcgaccttgccacctcgtcgtcttcggcaccctcttcccctccccgctcgctggcgccttcggctccccccaagaaaccgttgattggtgcttctactggttctaccggaattgcgacgagcagtggtgctggtgcagcgatgagcaggagcaactggctgtcgaggtgggtcagctcctgctccgatgacgccaagacggcgtttgcggctgtgaccgtgccacttctctacgggtcgtccctggccgagccgaagtccatcc

SEQ ID NO: 47154 - DNA, 288 bp, Zea mays
aagggaacgtggaaaagtgagctccaaagtttatttgtcatacatgggggaagcttacaaaggtacactgataccactaattatcttggctcaaaccatgttccaagttcttcagattgcgagcaactggtggatggcatgggcaaacccacaaacagaaggagatgctcccaagacagatagtgtggtccttctggttgtttatatgtcccttgcctttggaagttcactatttgtgttcatgagaagccttcttgtggctacctttggtttagcagctgcccagaa

SEQ ID NO: 47155 - DNA, 288 bp, Zea mays
actgatacaagagctgagtggatcattgctgctcagggatgcttccgacaaaatttaacggttgtaacaatatatgcatctcttggtgataatgcattggtgcattcactaaatgagacacaggtttcaactctgatatgtgattcgaagcaacttaagaagatacctgcaatcagctctaaactgcagagtcttaggcgtattatctatattgaggatgaacctgtcgaggctgagacactgaaccaagtgaagcatttgacaacattgtctttcactgaagtagag

SEQ ID NO: 47156 - DNA, 284 bp, Zea mays
aatggttttgcagaatctgctccggagagagcccttgaagcttgttgatgggggtcagtctcagagaacctttgtctacatcaaggatgctatcgaagctgtagtgctgatgattgtatgttgctgcgtttatctctggctccttgtttttatgcactaatccaatgaggctgaactcttgttgtcaattgcaaaaggaaaatcctgctcgagccaatggccacatcttcaatgttgggaatccgaacaatgaagttaccgttagggagttggcccaaatgatg

SEQ ID NO: 47157 - DNA, 285 bp, Zea mays
ataagaagcagaaatgcatacataaaagatatgcttaccagattgtgctaaaaaccttggatttgctgcgatcgatgccttcccttgttgatgtggatgttccaaacggtggacattttacagtttgcggtgatgtgcatggccagtactttgatttgctcaacatatttgacctcaatggccttccatcagaagaaaatccttacctcttcaatggcgattttgtggaccgaggatctttctccgttgaagtcatactcaccctttttgctttcaagtgcctct

SEQ ID NO: 47158 - DNA, 284 bp, Zea mays
tgcagatcttcgtgaagacacttactggcaagacaatcacccttgaggtggagtcctcggacaccattgacaacgtcaaggccaagatcaggcgctgttggtccggtgggatgccctccttgtcctggatcttcgccggcaagcagctggaggatggtcgcactcttgcggattacaacatccagaaggagagcaccctccacctggtgctccgcctcaggggtggcatgcagatctttgtgaagacattgactggcaagaccatcaccttggaggtggagtcg

SEQ ID NO: 47159 - DNA, 279 bp, Zea mays
ccgcgtccagtgtgtccgctactccgctccccctcagtcctcagttcctcacctagcggtagcgtgcgcgcgggagacgtagatggcggcttcggaggcggcagcggcggcggcaacaccggtgacgccgacagaggggacggtgatcgcgatccacagcctggaggagtggagcatccagatcgaggaggccaacagcgccaagaagctggtggtgattgacttcactgcaacatggtgtcctccgtgccgcgccatggcatcaatttttgctgatat

SEQ ID NO: 47160 - DNA, 290 bp, Zea mays
ccaaagccgagcaaacaaaacgatatgccgctgccctgaaccgagaccaccaccgctctgcctcgcctcgcctcagctcacctcacctcgccgactagggttttgtaccgccgtggatctcgccgtccccgccatggacgtctcgcacgcgggatcctccgtcgccggcgaggctccgacgaccggggagcaccggatggggactaccatcgtcggggtctgctacgagggcggcgtcgtcctgggcgccgattccaggaccagcactggaatgtatgtagcaaccgtgc

SEQ ID NO: 47161 - DNA, 291 bp, Zea mays
agttaatggcatagagtttgccagtggaggacctaagacaacttggggttctgttcgtgcagcaatgggacacccagaaccctttaagcttgattatgtttcaataggaaatcaagaatgttggatgctctactatagaggaaattaccaaaagttttactcagcgattaaatctgcctacccagacatcaacattatatcaagttgtgataggccaactatttcgccatccaaccctgccgatctttatgatgttcatgtctacacctcttcgactaatatgttttcaaa

SEQ ID NO: 47162 - DNA, 290 bp, Zea mays
ctcttcctgcgacggaagcaaacactgcccgagacatagacagcgggacgtcgagatggccgacggggaggacgccgccgccgcgcgccgccgggccgccatcacagactaccgcaagaagctgctcaactgcagggagctagagtcgcgcgtcggcaccgtgagagaaagccttaaaactgcaaagaaggattttaccaagactgaggacgacttaaagtctctgcagagtgtggggcaaataattggagaagtactccgacctcttgataatgaacgctttatcgtga

SEQ ID NO: 47163 - DNA, 283 bp, Zea mays
aggatgagagctctgcaaaggagtttagcttgcgtttactttgtgctgctgcaaatgtggggggtgtaattgggaagggtggtggaattatcaaacagattaggcaggagtctggggctttaatcaaagtggctagctccaattcagaccctgatgatgactgcataattacagtttctgcgaaagagttctttgaagatcctgtatctccaacaattgatgctgcagttcgtttgcagcctagatgcagcgagaaaagtgatttagaatcagctgagcagtc

SEQ ID NO: 47164 - DNA, 283 bp, Zea mays
ctctcctctctccgtcgccgcctcgggccaaaccctacgcagggagttgattgatcgattgcagccatgagtaagttgcattccgagcttctcaaggattgcatctcccagatagttcaggatgccaagaagaataggaagttcactgagactgttgagcttcagattagtctgaagaattatgatccacaaaaggacaagcgtttcagtggctctgttaagttgcctcacatccctcgtccaaagatgaaggtgtgcatgcttggtgatgcccacacgttga

SEQ ID NO: 47165 - DNA, 282 bp, Zea mays
cagttttcggtatgcctatctaaagggttaggcgcacccatcggatcagttgttgttggttcagaggccttcatcgacaaggctagaattcttaggaagaccctaggcggtgggatgaggcaggttggagttctttgtgccgctgcctatgttgctgttcgtgacaccgtgggaaagcttgcggatgatcacaggaaggctaaagccttggcagagggcctgaagaaaattaaacagcttacggtggattcgtcttcagtcgagaccaatatggtgttcttc

SEQ ID NO: 47166 - DNA, 280 bp, Zea mays
acctgggggcaaggtccttatcagtgactactgcaggagtcctgggaaaccatcagaggaatttgcagcgtacattaagcagagaggttatgacctacatgctgtggaggcttatggacagatgttgaagagtgctggttttcgtgatgtcattgctgaggatcgaactgatcagttccttggtgttttagataaggagttagctgaatttgaaaagaacaaggacgatttcctgtctgacttcacccaggaggactacgatgatatcgtgaacggttgg

SEQ ID NO: 47167 - DNA, 282 bp, Zea mays
  unsure (1)..(282): unsure at all n locations
agcattcgttccaactcctgagcactttctcctcgtccccgacaagccaatcgaagccgagatacggccatggactccaccggcaccggagcagggggtaaggggaagaagggagcggccgggcgcaaggtcggcgggccaaggaagaagtcggtgtcgaggtccgtgaaggccgggctccagttccccgtcggccgcatcgggcgctacttgaagaagggccgctacgcgcagtnngtcggcaccggcgcccccgtctacctcgccgctgtcctcgaataa

SEQ ID NO: 47168 - DNA, 282 bp, Zea mays
aagcggcggcgcgggcggacaaggagcaggaagacgaggagttgtgccaagccacaatgggtatctcgcgtgactcgatgcacaagcgccgagccaccggtggaaagcagaaggcctggaggaagaagcgaaagtatgagcttggtcgccagccagccaacaccaagttgtcaagcaataagacggtgaggagggtccgtgttcggggaggtaatgtgaaatggagggctcttcgccttgatactggtaactactcatggggaagtgaagctgttacccgca

SEQ ID NO: 47169 - DNA, 276 bp, Zea mays
ctttaaggttggtgatgactgtagacaagatgtgctggcgctgcaagtgattgctctattaagggatgtatttcaagctgtcggattaaacctgtatctttttccatatggtgttttgcctactggaccaggccgaggcataattgaggtggtcccagatactcgaagtagaaatcaaatgggtgaaacaactgatggtggtttattagagatatttcagcaagattatggtcctgtaggttcaccttcttttgaaactgctcgagagatgttatg

SEQ ID NO: 47170 - DNA, 256 bp, Zea mays
agatgcccttaaggaaggaatgggtggtggtggatcccatgctgatccatttgacattttctcatcattctttggaccctcttttggaggaggtggtggaagcagcaggggaagcaggccaagggagtgaagaagatgtagtccacccacttaaagttcctctggaagatctttacaatggaatctcaaagaagctctctctttcgcgcaatgtcatctgctccaagtgcaaggtgcaggcctcgaagtctggtgc

SEQ ID NO: 47171 - DNA, 263 bp, Zea mays
agggatctggaagtcatgtccgcaatctggtgggcctgttcagtttccaggattcaacggggaattaatttgtccgatgtatcatgagttgtgtactactgtaccagttccaatgactggccaatgtccaaagtcatgcagttttaacggtgactgcattgatggaacctgtcactgctttcctggttttcatggccatgactgcagcagaagatcttgcccagacaagtgcagtaaccatggtacatgcaaagctaatggga

SEQ ID NO: 47172 - DNA, 278 bp, Zea mays
ccgtcgtctgctccgggctgctgttctgcgcctccacaaggctttggcctctgttgtaagttttaagcttcacctccagccatgggtaaggagaagtcccacatcaacattgtggttattggccatgtcgactctggcaagtcaaccaccaccggccacctgatctacaagcttggaggcattgacaagcgtgtgattgagaggttcgagaaggaagccgctgaaatgaacaaacggtccttcaagtacgcttgggtgcttgacaagctcaaggctga

SEQ ID NO: 47173 - DNA, 277 bp, Zea mays
cgaggttttgaacatcatcaatacactttgctcagatagtagaaacatcgtttttcttgtcagtggtagagacaaagatatgttaggaaagtggttctcctcatgtccaaaattggggattgcagctgaacatggttacttcttgaggtggtctagcgaagaagagtggcaaacatgcactcaggccatggactttggatggatgcaaatggcaaagccagtgatgaatttgtatacagaagcaactgatggatcctacattgagacaaaagaaagt

SEQ ID NO: 47174 - DNA, 294 bp, Zea mays
  unsure (1)..(294): unsure at all n locations
aggccaggccatgtcgaggttctggaagccagggacgtcgnagccgagcatcctactcgtcgacgacgaggagggcggagtcgtcttcctgccctcctccagctccgtctcctcctccggctttggttacgcgagtctagagagacagcggcaacggctgccggtgtacaagtaccgcaaagccattctctacctcgtggagcggcacccaccaccattgtcgtcggtgagactggcagcggcaagtcgacgcagatccttcagtacctgaatgaggcttgtgggctgactttg

SEQ ID NO: 47175 - DNA, 302 bp, Zea mays
agacttaagcttgagacacggcttcaagttcttgagggtagagaacttgggaaatctgctggttccacaaaggggaagcccaagatagaagtgtatgaaaaggaccggaagcagggtgctggggctttaacaactcctgctaagacatacaaccctgcagctgatctggtacttactgaagaaacaccaaagaagtcagaattggcttcaaagaagaggaaacatcatgaggttcaaactgaaccatcggcagagcttgcagagggagcagtccaggaggataggaagaagaagaaaaagac

SEQ ID NO: 47176 - DNA, 292 bp, Zea mays
agcaggtgctgaggaaactgagagctggaggtggtttttgaccacagtaaggtctcttcctcagtctgctgaacctgaaacttaccagatgattcaggatgaaatggtcagtgccatgcgtgatgataggagcttgggttgttctgaacttagcagatggctaacaatggcacaaataatggcctccagctttggcgagaagagtctttctttggagcactggcagatggtgaaggagcttgagaggcttagaaagcagaggatgcaatgagaatgcctcatcattagcatg

SEQ ID NO: 47177 - DNA, 251 bp, Zea mays
cagagccgatcccgatccagcgaggcggcgaccctccctcctccccttgcttcgctcgtccagccctgaccacccgcatccccgtcagtcatggcagcggcacaggcggaggcgcggtgcgtgcgctgtcccagaaggagcaggacatacagatgatgctcgccgccgacgtccaccttggcaccaagaactgcgatttccagatggagcgctatgcctttaagcgccgcaccgacggcatctacatcatc

SEQ ID NO: 47178 - DNA, 217 bp, Zea mays
cttacagataccgtgctgctgtgctgatggacaaccacaaacagaaagaggcgatcgcgcgactgaccaaggccatcgccttcaaggcggacctgaacctgctccacctgcgcgcggccttccacgagcacgtgggcgacgtctcgagcgccctccaggactgccgcgcggccctctcggtggaccccaaccaccaggagatgctggagcttcacca

SEQ ID NO: 47179 - DNA, 289 bp, Zea mays
acctctgttacttctccctccgccgccactcccctcccattcaccgccaccgccaattccataccgtcctccgccacctctgctgagagcgagaagagatggcaggcaagggtgatgggccggcaatcggcatcgatctcggcacgacgtactcttgcgtcggcgtctggcagcacgaccgtgtcgagatcatcgccaacgaccagggtaaccgcaccacaccctcgtacgtcgccttcaccgactccgagcgcctcatcggagatgcggccaagaaccaggtcgccat

SEQ ID NO: 47180 - DNA, 300 bp, Zea mays
ttctcctcaaccaaattcaaggtcacagcggagaacctctcggctatcatgtctggccgcggcaagggcgggaacggtctgggcaagggcggcgccaagcgccaccgcaaggtgctgcgcgacaacatccagggcatcaccaagccggcgattcgcaggttggcgaggaggggcggcgtcaagcgcatctccgggctcatctacgaggagacccgcggcgtgctcaagatcttcctcgagaacgtcatccgcgacgccgtcacctacaccgagcacgcccgccgcaagactgtcacggcc

SEQ ID NO: 47181 - DNA, 295 bp, Zea mays
gttccatatggcttcctgcaggatggcactcctccttggcttgctgctgctagtagtagcttcgcccgcgatcgctgatgacgactccggtatctactaccagctggctcttatgtggccaggagcatactgcgagcagaccagcgctgggtgctgcaagccgaccaccggcgtctcgccggcgcgcgacttctacataacgggcttcaccgtccttaacgcgaccaccgacgctgcagtgacgggatgcagcaacaaagttccttacgaccctaacctgattaccggcatccaa

SEQ ID NO: 47182 - DNA, 293 bp, Zea mays
ctcacggttagcggtgcctacaagagtgcccgaacaaagacacaactccattgccgtgttgaccgctctgggcttgttggtggagctccttggattagtgtcccatatcctttccaatggggggccccaacatttgatgctggtgaatcatttgcaatgatggtggccgcatttgttgctcttgttgagtcatctggggccttcattgctgtgtcaagatatgcaagcgcgactatgatacctccttcagttcttggtcgtggcattggttggcagggcatcggtactttact

SEQ ID NO: 47183 - DNA, 295 bp, Zea mays
ctcgccttccgaggaaactcaccagcccaccacagacccgagacggaagaagccatgtccgggcgcggtaagggtggcaaggggctcggcaagggcggcgcgaagctcaccggaaggtgctgcgcgacaacatccagggcatcaccaagccggcgatccggcggctggcgaggaggggcggcgtcaagcgcatctcggggctcatctacgaggagacccgcggcgtgctcaagatcttcctcgagaacgtcatccgcgacgccgtcacctacactgagcacgcccgccgcaagac

SEQ ID NO: 47184 - DNA, 293 bp, Zea mays
agagaccttgattaaaaattgtggtgattttgttcatatgcaagtagctgagaaggatatgcttcatgaaatggtgaagatagctaagaagaagcctgactatcacgtcaaagagaagatattaattctgatagacacttggcaagaagcttttggtggtgcccgtgcaagatatccccagtattacgcagcatatcaagagatgctgcgtgctggagctgtatttcctcaaaggccggagagtactgtgccaatctatactcctccacagacacagcctctacggaactatc

SEQ ID NO: 47185 - DNA, 292 bp, Zea mays
  unsure (1)..(292): unsure at all n locations
acgagcgagggaacagcctccacggcgacgagagaatggggagaggagggatcggaggcgcggcggccatggccatggccatggnagaccgccgatcctgcccgtgcattcgtgaaggacgtcaagcgaatcattatcaaggtgggcacggctgttgtcactggcatgaatggccgattggccatggggaggctcggttctctctgtgaacaggtgaagcaactgaattttcaagggtatgaggtgattctggtaacctcaggagctgttggtgttgggaggcagaggctcc

SEQ ID NO: 47186 - DNA, 294 bp, Zea mays
cagcaacacctgatgagatacaaaaaaacctatcagtatgatgctgtgtttgctcttggcttcgtcactgtctatgatcagctcatggaagggtaccccagcaatgaggacaaggattccatcttcaaggcatatataacagcattaaatgaagatctttatcaatacagagctgatgcactaaagatggaagagtgggcacgttcccagaacggtagttccttagttgatttttcttccagagatggagaaatcgaggctattctgaaagatatatcagaaagggccaagggt

SEQ ID NO: 47187 - DNA, 294 bp, Zea mays
  unsure (1)..(294): unsure at all n locations
ctcgagccgcgatcccagcatccgagagagctccacaggccaagtccccatcgccgcggacgcttgccccacctctcccccgcccggtagtagcctcgccgccgttgccgagatggggttcgtgtccttcgtcgggagggtgctcttcgtcgccgctttcctcctctccgcctaccaggagtttaatgaattcggtgctgatggtggaccagcagctaaggcccttcggaccaaattcaacgtgtttgtcaanaatgtatctgctcatctgggagtagctgtgccacacattga

SEQ ID NO: 47188 - DNA, 288 bp, Zea mays
ggcggttgccgacccgtcgagcccgtacaaggtacggctgctggtggaggactacccgtacgcgtcggacgggatggccatctggcacgccatcgagcaatgggtgacggagtacctcgccgtctactaccccaacgacggcgtgctgcgggcggacgtggagctgcaggcgtggtggaaggaggcgcgcgaggtcgggcacgccgacctcaaggacgcgccctggtggcccaagatgcagacggtggccgagctggtcaaggcctgcaccaccatcatctggatcgc

SEQ ID NO: 47189 - DNA, 291 bp, Zea mays
gtcctgtccacccactctctcctcgagcacactgatgttgctgtcctgctcgacaatgaggccatctatgacatctgccgccgctcccttgacattgagcgcccaacctacaccaacctcaacaggcttgtctcccaggtcatctcatccctgacggcttccctgaggttcgatggtgctctgaacgttgatgtgaacgagttccagaccaacctggtgccctacccgaggatccacttcatgctttcgtcctacgctccagtcatttctgctgagaaggcctaccacgag

SEQ ID NO: 47190 - DNA, 288 bp, Zea mays
ccgcagaagtgcagcagaacgatcggatctagcagaattctctcaacctcatcggcggcggcgaagagcgtgcggatcggagatggagacaagcgggtggaggaggagagcggcggcgcgggcctcctggagccccgccacggtgtacctgtggctcgcgctcgccgcagcagcactgacgctcgcccaggctaagaaggacctaacggaggttacccacaaggtctacttcgatgtcgagattgacggcaagcccgcaggtcggattgtcatggggctttttgggaa

SEQ ID NO: 47191 - DNA, 288 bp, Zea mays
ccccaacatcaaatccctcccatctcttcccctccgccgccgtctctgctctccaagatcgcgatggcgtcagaaaagaagcagtcgaacccgatgcgggagatcaaggtgcagaagctcgtgctcaatatctccgttggagagagtggagatcgactcacccgcgccgccaaggtgttggagcagttgagtgggcagtctccggttttctccaaggcaaggtatactgtgaggtctttcggtattcgtcgtaatgagaagattgcatgctacgttacggtcaggggt

SEQ ID NO: 47192 - DNA, 287 bp, Zea mays
  unsure (1)..(287): unsure at all n locations
caaagtttacaactatatcttgatacagctgttgagcagcttaaagttgctacagagctttgcctttggcaggaagccttccgatccgtggaagatatccatggtgggatnagcatggtgaagaaaatgccaaaaccttctatcttggtggagggtantgaaagctgaccgaaatcttctgggtatctgatagccacctttatcatgcgtatgcgtggctcaagcttttcaacctgcgaaagaactacaataaaaacttgtctcagaaggatctacaattaatagca

SEQ ID NO: 47193 - DNA, 284 bp, Zea mays
aataggtcctcgacacagttcagcagagatgctggctctatgcccaaggtgtggacaggaaaggaggacataaaagccataactaaaactgttcgctcagttgtacgccagatgctaatatttaatactctatatatagaatactgttgaagacgcttctaaagcactagagtattgtagcactgatggaaggccttcgatgaaatgtttccctgaaagttgcatactacatcgctgaagcactacaatattgtaacactgagggaaggcctttgtatcatgac

SEQ ID NO: 47194 - DNA, 283 bp, Zea mays
cccgtttctgtcacaaatcgccactaaaaccctagccttccgccatggccacctcccctgccgcctcgtcctcctccgctccgaccgcctccgcggtggcggcggctacgatggctgttgaggccaccgacgggccggtgctcagcgtagtatcgaagcgtctccgcgcactgcggaagaagtacaaccgaatcacgcagatggaggagtcgctcgccgccggcaagacgctcgaccgagagcaggaggaggttctccgctccaagcccgtcgtcgccgctct

SEQ ID NO: 47195 - DNA, 295 bp, Zea mays
aacgagagcaagaaagtatcaaaacccgagagcaatggaggcggtggggaagagcgtgtgcgtgaccggcgcgggcggcttcatcgcgtcatgtctggtgaagctcctcctctgccggggccaatacaaggtccgcggcaccgtgcgcgaccctggtgctagcaagaatgctcatctcaaggtgctggaaggggctggggaaaggttgcagcttgtcaaggctgatttgttggactacagcagtgttgcatcagcaattgccggctattagggtgtctccatgtagctagccctg

SEQ ID NO: 47196 - DNA, 307 bp, Zea mays
atttcaggttattactgaagcagctggtcaccatggaggtgatacagtggacaagtctgtgggaattcttcaaggaggaatatgagaaggagaaggatcttgggggagctttgggtgccaaagcttcagaagatttgaggctgaggattatcgaacataatatcttggttgtatccaagtactatgcaagggttaccctcaagaggcttgccgatcttctttgcctgactttgcaggaggcagagaagcatctctcagacatggttaactcgaaatctctagtggcaaagatcgacaggccgatggg

SEQ ID NO: 47197 - DNA, 194 bp, Zea mays
cgaggattttgatttcgcagaactggatgatgtgctgcgctactaccctcagggctaccatggtgtggaccgcgaaggccggcccgtgtacattgagaggctagggaaggtagatcccaacaaactcatgcagatcacgtctgtggatcgctacatcaagtaccatgtccaggagtttgagagagccttcaggg

SEQ ID NO: 47198 - DNA, 189 bp, Zea mays
gcgaaggaggaggagcagcagcagcaggcggcgccgaggagcggcatcccactcagtgcttgcaaccatggctaggggattgaagaagcacttgaagaggctcaatgcgcccaagcattggatgctcgacaagcttggcggagcttttgctcccaagccatcttctggacctcacaagtccagggagtg

SEQ ID NO: 47199 - DNA, 200 bp, Zea mays
gccgccaccaggtgcagagtctttcgtcatctcttctccggcgaagaacccccagtcgcccaccagatcacttgttaaactttgttgaggggtgatggcggtttctttcgcaaacctcaactccgaggcagggcttaaaaagcttgatgagtaccttctcactcgcagctacatcactggctaccaagcttccaaggatg

SEQ ID NO: 47200 - DNA, 233 bp, Zea mays
agagttgccatgatttttttttacttaccattctgcaatcatccttgcttccaaacacagcacgctaatacaggtgcgtacttgtgcaggactggtagagggaaggtttccttggcagccatcactctagatgattaccttccaatgcgaacactgaagtgaagaaccggtaacttgtttatttctaaaagaatgctgacaatactatttcatctgaatttttggcagtattt

SEQ ID NO: 47201 - DNA, 300 bp, Zea mays
agcactgcttcttctcaacaacgagcagggacgagttgtttctaaaccttgtcatggaatttgtccccgagaccctgtaccgtgtcctgaagcactacagcaacgcgaaccagaggatgcctcttatctacgttaagctctacatgtatcagcttttcagaggcctagcctatattcataatgtaccaggagtctgccatagggatgtaaagccacaaaacgttttggttgatcctctcacccaccaggtcaagctctgtgactttggtagcgcaaaagtcctggttcctggtgaaccga

SEQ ID NO: 47202 - DNA, 197 bp, Zea mays
ctacacaaaagcaaattctcaaggttgttgtcacggaagttcttggtggtgggaagttttatgttcagacaatgggtgaccagagggtggcttcaattcaacagcagcttgcatctttgaaacttaaagatgcgccggtcattggtgcttttaatcctgtgaagggagagatagtcctcgcacaatttagcgttgac

SEQ ID NO: 47203 - DNA, 301 bp, Zea mays
catctccacctctcctccggctagggtgttcacgcctgccgcggcgaagcttctgccctccccggcgtcgcgctctggtcgtcgtcggccgggaagatggctggcggcttcagggtacttcatctggtcaggccctttctggctttcttgccagaggtgcagagcgcggataggaagataccattcagagaaaaagttatctacactgttatttctctcttcatttttctggtgtgcagccagctcccactctatggcattcattcaacgactggagctgatcctttctactggatgcgtg

SEQ ID NO: 47204 - DNA, 308 bp, Zea mays
aactcgccgtctgccttctgcgcctccatttcggcctctgtcccttgcaagttcaatctcacctccaaccatgggtaaagagaagtcccacatcaacattgtggttattggccacgttgactctggcaagtcgaccaccacaggacacctgatctacaagcttggaggcattgacaagcgtgtgatcgagaggtttgagaaggaggctgctgaaatgaacaagcggtccttcaagtacgcatgggtgctcgacaagctcaaggctgagcgtgagagaggtatcaccattgatatcgctctgtggaagt

SEQ ID NO: 47205 - DNA, 305 bp, Zea mays
accgaatcgtcctcctcgcgagcctcgtcgatcccccactcccctcccctcgcttcaagatgcagatctttgtgaagaccctcaccggcaagactatcaccctcgaggtggagtctactgacaccattgacaatgtcaaggctaagatccaggacaaggagggcatccctcctgaccagcagcggcttatcttcgccggcaagcagcttgaggacggccgcacacttgctgactacaacatccagaaggagtcaacccttcatttggtgctgcgccttaggggaggcatgcagatctttgtcaag

SEQ ID NO: 47206 - DNA, 232 bp, Zea mays
cccgacctcctccgccacagacccgtttccccgctagagttatcgttcctctgcagcgatggcgatcaagcggaccaaggcggagaagaagatcgcgtacgacaagaagctgtgcagcctgctcgatgagtacaccaaggtgctcatcgccctcgccgacaacgtcggctccaagcagctccaagacatccgccggggcctcaggggcgactcggtggtgctcatgggaaaa

SEQ ID NO: 47207 - DNA, 244 bp, Zea mays
atcgttggaagagagacgacggcggccatggcgacctccttccaggggacgaccaccaagtgcaccgcctgcgacaagacggtgtaccttgtggacaagctcaccgccgacaaccgcatctaccacaaggcctgcttccgctgccaccactgcaagggcaccctcaagctcgccaactacaactccttcgagggagtgctctactgcaggcctcacttcgaccagctgttcaagaggacaggga

SEQ ID NO: 47208 - DNA, 215 bp, Zea mays
atctcgtcttgtgttgttcggagcgggcagcagcacacagccccatcccaatcctagtcgatcttcttcccctcctcaaggaagaaaagaagctgaaccatggggaagagaaagtcagctgctaagccacctcctaagaagcggatggacaagcttgacactgtcttttcctgcccattctgcaaccacgggagtagtgtaaagtgccgaattga

SEQ ID NO: 47209 - DNA, 294 bp, Zea mays
ccctgctgcgcgctactcgcccgatctcgcggtgctggtagcggtgaaaatatctgagatcgagcgaactagcttttcatcgatatggcgcttgtactgcatgctggcagtagtaacaaaaatgcattcaaaacactaattgccgcggattacagcggcatcaaggttgagttggtaaaagactttcaaatgggggtttccaacaaaacaccagagttcctcaagatgaaccctattgggaaggttcctgtcctggagacacctgatggtcctgtctttgagagcaatgcaatt

SEQ ID NO: 47210 - DNA, 305 bp, Zea mays
  unsure (1)..(305): unsure at all n locations
ggagcaaaaaaaattcgtgtgcacatccttaccgatgggcgtgacgttttggatggaagcagcgttggtttcgtggagaccctagagaatgatcttttggagcttcgaggcaagggtattgatgcacagattgcatctggtggtggaaggatgtatgttaccatggaccgttatgagaatgactggtgatgtnggttaaaacgtgtgctggagcatgctcccaggtgctncccggagaagcacccctacaaatgtcaaatagtggccacttgagggctggtgaaaaacaagtgaagaagcaccag

SEQ ID NO: 47211 - DNA, 273 bp, Zea mays
aagaagtattccaactccaacatcgaaattcatactttcaatcagagccagtatcctcgcattgttaccgaggacttcttgccacttcccagcaaagggaaatctgggaaggatggctggtatcctcctggtcatggtgatgtgtttccctctttgaataacagcggaaaacttgacatcttattggctcagggcaaagagtatgtctttgttgcaaactcagacaactggggtgctatagtcgacatcaagatcctaaaccatctgatcaat

SEQ ID NO: 47212 - DNA, 290 bp, Zea mays
acaaccaccgcctccccgatctcgtcgagaggaagcccaatcccgaaaccgtcgccgtattccaatggcgcccaaggccgagaagaagcccgccgccaagaagcctgcggaggaggagccggcggcgtagaaggccacggcggggaagaagcccaaggccgagaagcggctccccgcgggcaagtccgcaggcaaggagggtggcgagaagaaggggaagaagaaggcaaagaagtcggtggagacgtacaagatctacatctttaaggtgctgaagcaggtgcacccgg

SEQ ID NO: 47213 - DNA, 284 bp, Zea mays
catctcattcggcgccgcggcaccccctgctcgtcactcgcgatggcccggatcaaggtgcacgagctgcgcggaaagagcaagacggatctgcaagcgcagctcaaggagcttaaatcggagctctccctcctacgcgtcgccaaggtcaccggcggggctcccaacaagctctccaaaatcaagattgtgcgcacctccatcgctcgcgtgctcaccgttatctcgcagaagcagaagtcggcgctgcgtgaggcgtacaagaagaagaagcttctcccgct

SEQ ID NO: 47214 - DNA, 293 bp, Zea mays
acgaccgcgagtggaactgtggaagcgtcgagcttttttcttctttgtactgctagcgcaagaagaagggaaacgagaggagggcggcgatggcgaagaggctgctcccgtcgctgaaccgggtgctggtggagaagctggtgcagcccaagaagaccgccggcggcatcctcctcccggaaacatccaagcagctgaatgctgctaaagtggtggctgttggccctggtgagcgcgacaaggcaggcaatctgatcccagttgctctgaacgaaggcgacactgttcttctg

SEQ ID NO: 47215 - DNA, 293 bp, Zea mays
acaaaggaagcactgaccagcacgcttacattcagcagctgagagaaggtgtacacaacttctttgttacttttatcgaggtcttgcgtgacaggcctgctggtcatgattgggagcttgaacctggagtcacatgtggtgactatttgtttaggatgttgcagggaacacgttctgctctttatgcaaatgaccgtgaatctatctctgttactgtgcaagaggtaactcctagagctgttggagcactggttgcactttatgaacgtgctgtggggctttatgcttctttg

SEQ ID NO: 47216 - DNA, 292 bp, Zea mays
caagacttccgtccgagtctgagctcatctccgcgcgctgccgccgccgccgcagccgctcgacgcccaccgcgcaccatggcggaacagaccgagaaggcttttctcaagcagcctaaggtgttcctcagctcaaagaaatctggcaagggtaagaagccaggcaagggtggcaatcgattttggaagagcattggccttggtttcaagactcccagggaagcaattgaagggacctacattgacaagaaatgtccattcactggaaccgtttctatcagaggcagaatta

SEQ ID NO: 47217 - DNA, 294 bp, Zea mays
acacttggttgctagcgatgttgtgtctgggccactgatctccttttcaggcgtcgagagagtggggaatatcgttcaggcgttgaggatcacaggccacaacggatttccagtggtcgatgagccacctctatcagaggctccagaacttgttgggcttgtgctcagatcccatctgctggtcctgctgaaaggtaagggctttatgaaagagaagatgaaaaccagcggtagcttcgtgctggaaagatttggtgccttcgattttgccaagtcaggctcagggaaaggcct

SEQ ID NO: 47218 - DNA, 300 bp, Zea mays
atgctccattctcagccgccgccaatcccttcccgtgctccgcaaccgctgagtgagaacaagagatggccggcaagggcgatggcccggctatcggcatcgatctcggcacgacgtactcttgcgtcggcgtgtggcagcacgaccgcgtcgagatcattgccaacgaccagggtaaccgcaccacgccctcgtacgtcgacttcaccgactccgagcgcctcatcggagatgcggccaagaaccaggtcgccatgaaccccatcaacaccgtctttgatgccaagcgtctcatcggca

SEQ ID NO: 47219 - DNA, 301 bp, Zea mays
acaatcccttcccgtgctccgcaaccgctgagtgagaagaagagatggccggcaagggcgatggcccggctatcggcatcgatctcggcacgacgtactcttgcgtcggcgtgtggcagcacgaccgcgtcgagatcattgccaacgaccagggtaaccgcaccacgccctcgtacgtcgccttcacgaactccgagcgcctcatcggagatgcggccaagaaccaggtcgccatgaaccccatcaacaccgtctttgatgccaagcgtctcatcggcaggaggttcagtgatgcgtctgt

SEQ ID NO: 47220 - DNA, 288 bp, Zea mays
aatgctggtttggacagcgctgagttgatctctcagctccgagctgagcaccacaaagagaactgcactgctggaatcgatgtcatcactggcaccgttggggacatgcaaaggctggggattcaagagtcgttcaaggtgaagcaggccatactcctgtctgcgacggaggccgcggagatgatcctcagggtcgatgagatcataagctgtgccccacgcagaagagaggataggatgtgattagacacgctgtttctcggtgtagtggggatgcttgttacccta

SEQ ID NO: 47221 - DNA, 74 bp, Zea mays
gcgaagttgtatgaaaatcacttaatgtatgacgctaatgtgacaattaattttgcaaaggtgagatatttacc

SEQ ID NO: 47222 - DNA, 293 bp, Zea mays
gcgtcagagcccgatcccgatccagcgaggcggcgaccctccctcctccccttgcttcgctcgtccagccctgaccacccgcatccccgtcagtcatggcagcggcagcaggcggaggcgcggtgcgtgcgctgtcccagaaggagcaggacatacagatgatgctcgccgccgacgtccaccttggcaccaagaactgcgatttccagatggagcgctatgcctctaagcgccgcaccgacggcatctacatcatcaaccttggcaagacatgggagaaactgcagcttgca

SEQ ID NO: 47223 - DNA, 287 bp, Zea mays
acgcattcctcccatctcccaagacctcctcagacccgagaagcgcactgcagacatggacgccaccggcactggagctggagggaaggcgaagaagggagcagccggtcgcaaggccgtcgggccgaggaagaagtcggtgacgaggtccgtgaaggccgggctccagttccccgtcggccgcatcgggcgctacctcaagaagggccgctacgcgcagccgatcggcagcggtgcccccgtctacctcgcggtcgcctggagtactcgccgctgaggtctggagt

SEQ ID NO: 47224 - DNA, 296 bp, Zea mays
aggagctcaagaacggccgcctcgccatgttttccatgttcggcttcttcgtccaggccatcgtcaccggcaagggcccgctcgagaacctcgctgaccacatcgctgacccagtcaacaacaacgcatgggcctacgccaccaacttcgtccccggcaactaagctcaacggctatgctatgcaacttcattgtctttcggatcggagagggtgtacgtacgtggattgattgatgctgcgagatgcatgtgtgtcttttgtttcacgttgcattgcataggcaagtcgagatga

SEQ ID NO: 47225 - DNA, 263 bp, Zea mays
attgcaccttcttctacaaataccccggccggccgcagcgttcccgaatcgagcggtgactggcgaggcaaaagcgcaaacgcgaccacagacagagcgcgcttcaaggccttttttttatttgagataacaaggaggagaggaggagatggcggtcacgatcatctgggtgaaggcgaggcagatcttcgatagccgcggaaaccccaccgtcaaggtgaacgtgggcctaagcaacggaagttacgcaaggggggccgtac

SEQ ID NO: 47226 - DNA, 281 bp, Zea mays
caagaaaccaccgccgagcccaaccgcacaagcgcgcgaggcaggagagagagagaggcggggaccaaaacaatggaggggaaagaggaggacgtgcgcctgggcgccaacaagttctcggagcgccacccatcgggacggcggcgcagggcgcgctgacgacaaggactacaaggagcccccgccggcgccgctgttcgagcccggggagctcaagtcctggtccttctaccgcgcgggcatcgccgagttcgtcgccaccttcctcttcctctacatca

SEQ ID NO: 47227 - DNA, 288 bp, Zea mays
agccggcctacaaccgttttcgtgctcacacacccaaaccttagtcgcgatcaggccccaaggactcgagatgaagtcgagggcacggtccaccgccggcgactccaggctctcggtgaggaagaccaaggctgagaaggacccaaacaagcccaagaggcctccgagcgcgttcttcgtcttcatggaggagttcaggaaggactacaaggagaagcaccccaatgtgaagcaagtctccctgattggcaaggctggtggtgacaagtggaagtccctgtctgatgc

SEQ ID NO: 47228 - DNA, 273 bp, Zea mays
aggccaaggaggcggcggttctggccgccgagctagtgcagctcagggcgaagatctccgcgttagagtctcgcattgcagagcagaacctggagttcaagaccaagaatgatgcaatcgaaacactgaatatgattgtcaaggaaaagtcacagaagattgctactatgcagaatgaagtaacttccctcgaggccatagggtctttagctgcagaggagcaggcaagcaaggcgaatgcactggctattgagctcaagaagcagaccgaga

SEQ ID NO: 47229 - DNA, 290 bp, Zea mays
ctagtcctctgttacttctccctccgccgccactcccctcccattcaccgccaccgccaattccataccgtcctccgccacctctgctgagagcgagaagagatggcaggcaagggtactgggccggcaatcggcatcgatctcggcacgacgtactcttgcgtcggcgtctggcagcacgaccgtgtcgagatcatcgccaacgaccagggtaaccgcaccacaccctcgtacgtcgccttcaccgactccgagcgcctcatcggagatgcggccaagaaccaggtcgc

SEQ ID NO: 47230 - DNA, 311 bp, Zea mays
atttgctccactgacctcgcggggctcccagcagtaccgcgctctcaccgtgccagagctgacccagcagatgtgggactccaagaacatgatgtgtgctgctgaccctcgtcatggccgctacctcacggcatctgctatgttccgtgggaagatgagcaccaaggaagtggatgaacagatgctgaacgtgcagaacaagaactcttcctacttcgtggagtggatccccaacaacgtgaagtcgagtgtgtgtgacattccaccaattggcctgaagatgtcctccacattcgttggcaactcaacct

SEQ ID NO: 47231 - DNA, 307 bp, Zea mays
  unsure (1)..(307): unsure at all n locations
caaacacacaccagcccagctccgagagatcatccggcggccggcgagatgagccgcggcacgggcgcgggttatgaccgccacatcaccattttctcncctgagggacgcctgtaccaagtcgagtacgcgttcaaggcggtgaagtcggcgggtgtcacgtcgatcggcgtccgcggcgcggactccgtctgcgtcgtcacccagaagaaagtcccggacaagttgctggatcagacgagcgtgacacacttgttcccgatcaccaagtacgtcggattgcttgccactggcctcacagctgatg

SEQ ID NO: 47232 - DNA, 304 bp, Zea mays
agacccactgagcaggttgagattgacaacttcatggtccaacagcttgatggaacctccaatgagtggggctggtgcaaacagaagcttggagcaaatgccatccttgcggtttcacttgctgtgtgcaaagctggagctatggtgaagaagattcctctttaccagcacatcgcaaatcttgttgggaacaaaactctggtgctccctgtacctgcctttaatgtgattaatggagggtcacatgctggaaacaagctgtgccatgcaggagttcatgatcctcccaactggtgcctcctcg

SEQ ID NO: 47233 - DNA, 305 bp, Zea mays
ctcgagccgctctctgatttttggcgagcagaacatacctgagacgacaggtagaagacgactgactgcctcgagcagcagagatcagggaggccgagggcgggatgacgatccggttcgtgctgttcgtcaacaagcagggccacacgcggctggcgcagtactacgagcacctctccctcgacgagcgacgggccctcgagggcgagatcgtccgcaagtgcctcgcccgcactgaccagcagtgttcgtttgtggagcaccggaactacaaggtcgtttacaggcgctacgcctcccttttt

SEQ ID NO: 47234 - DNA, 302 bp, Zea mays
cgaaggagtagcagcagcaggcggcgccgagtagcggctccccatctcgagcttgccaccatggctagaggattgaagaagcatttgaagaggctcaatgcccccaagcattggatgctggacaagcttggcggagcttttgctcccaagccatcttctggacctcacaagtctagggagtgcctgccactgatcctcatcatcaggaacaggctcaagtatgctcttacataccgtgaggtcatttccatcctgatgaagcgccatgtacttgttgatggcaaggtcaggacagacaagac

SEQ ID NO: 47235 - DNA, 224 bp, Zea mays
  unsure (1)..(224): unsure at all n locations
ccaccctcgtctccgcgcccgcgcccgctcccgcgccactcacatcgtgatcgagacgacccgcgtcctccgcggtccgcgcccgtgcaccatctcgcctcgcattcccgaaagtatctgtattccttgatcaacatgtcgcgggaggagaatgtttatatggccaagctgtgctgagcaagcagnaacgtgtactgaggaatnatggttgatatactatggag

SEQ ID NO: 47236 - DNA, 300 bp, Zea mays
aacgatagcaagcctagagacagagctctcagctgcaagatcgctgcaagaatccctgctgaacggctcccctgtcgcggaagagtataaagtttctgaatcaatcgggaggcgaaagtaccttatggtgatagggatcaacaccgcattcagcagccgcaagaggagagactccatacgttacacctggatgccccaaggtgaaaagaggaaaaagcttgaagaagagaaggggatcattattcggttcgtcattggccacagtgctatatcaggtagaattgttgatagatcaatcga

SEQ ID NO: 47237 - DNA, 306 bp, Zea mays
acgcggtgaaggaggatgaggttaagatttctgtcccccccgcgccggtcatggggttaccgggcggagcggagggcgtgagtgtgcctggcggcggaggcgggagggaacggaagcggcagcttgtgagtacagtggatcgcgctcgctctgctatccagcgagagatacgaatgataaaaaaccgcgagtctgctgccaggtcacgggagaggaagcaggcctatatcgccgagctagaatacatggtaacgcggctcgcggaggagaaagctgagttgctgagacaacaggaagagcagttcc

SEQ ID NO: 47238 - DNA, 294 bp, Zea mays
atgggtgaacaggtgacaacaccccaagtcaatgaggatgatttgacacttgagaggcttgaagattttcggtctcaactccaggagcttgagaaagagaagagtaataggctggagaaggttcttgagtatgtaattatggtacatgatctttgtactgtcttggggatggattttctcagcacagtgactggagttcaccccactttagatgactctgttggcgacaactgtaagagcattagtgatgatacattatcaaaacttgacaagacggtagctacacttaatgaa

SEQ ID NO: 47239 - DNA, 298 bp, Zea mays
atgggagcggttgttgcacagaaaagaagagtggtgtgaagagatatgcagcagtaataaaaaagacaattcattacggaggactcggttgaataactctgatgccgtatatgttcaggatttagtgacggaggtgcagagggcactatgccgtacgttcctgaacttcactggcaacatcgaggaagaaagtgagctggaaaccctcatagacatgcagcttgtggagctccgcaaggtgttcaggataccccataagcctttcgatgaaacgcagggccctacctccaagaagctc

SEQ ID NO: 47240 - DNA, 293 bp, Zea mays
cttcaacgcatctcaggatcttgcttcaccatctgatagtgatggccatgggacgcatacagcatccattgctgctggcaatcatggaattcctgttgttgtggctggacatcaatttggaaatgcaagcggcatggctcctcgtgcacacattgctgtctataaagctctttacaaaagctttggtggttttgctgctgatgttgtggctgcaatagatcaggcagctgaagataatgttgacattatcagcttgtccattactcctaatcggaggcctcctggactcgcaa

SEQ ID NO: 47241 - DNA, 291 bp, Zea mays
acgacgcacgcagagccgcagagatccgtcacactgcaagttttgaaaactgaactgtaagatggcatcagcagagctttcccgtgaggaaaatgtgtacatggcgaactcgccgagcaggcagagaggtacgaggaaatggttgagttcatggagaaggtagcgaaaactgttgactcggaggagctcactgtggaggagcgcaacctcctgtctgttgcatacaagaacgtcattggagcccgccgtgcctcatggcgcatcatctcctccatcgagcagaaggaggag

SEQ ID NO: 47242 - DNA, 289 bp, Zea mays
agctgataaaccacggtgttccggacgatgtgatggaggcgatgaaggccagcacccagtcattcttcgcgcttcctgcggaggccaagcagcagtaccgtcagcaggcaggacagctggaggggtacggccagctgttcgtcgtctccgaggaccagaagctggactgggccgacgtcctctacctcaacacgcagccgcccgagcaccggaacctcagcttctggcctgctggtgagagcttcaggcagacgctggacacctactccgccgccgtcaagcacgtcgc

SEQ ID NO: 47243 - DNA, 289 bp, Zea mays
atattctgcaactttcaaactttaaggatgactcaagtccaattgcttgggattgttctgcctgggtgcgcacatatggtttgtttttggaagaaaggttggagtgcttcagagttctgaagtatgatgttgaagctgagcgtttgtccaaacaaggtcaaggtcctgaaaagggtcacagtagaaccagagagttggattcacaggatctgttagagcagctgccagcattgcagcagttactataccgactcgttggatgtcggcctgaaggagctgcaaataataa

SEQ ID NO: 47244 - DNA, 264 bp, Zea mays
agcctctgtcccttgcaagttcaatctcacctccaaccatgggtaaagagaagtcccacatcaacattgtggttattggccatgtcgactctggcaagtcgaccaccacaggacaccttatctacaagcttggaggcattgacaagcgtgtgatcgagaggtttgagaaggaggctgctgaaatgaacaagcggtccttcaagtacgcgtgggtgctcgacaagctcaaggctgagcgtgagagaggtatcaccattgatattc

SEQ ID NO: 47245 - DNA, 285 bp, Zea mays
caccaaccaaactccactgtctccaactctccatcgcgtctgctacgcctctcctgcaggacgaccaatggcttccaggaagttcttcgtgggtggcaactggaaatgcaacggtactggcgaggacgtgaagaagatcgtcaccgtgctcaaccaagccgaggtgccctctgaagacgtcgtcgaggtggtggtgagtccgcctttcgtttttctgcagcaggtcaaggggctgctgcggctggacttcgccgtcgcagcgcagaactgctgggtgcgcaaggg

SEQ ID NO: 47246 - DNA, 294 bp, Zea mays
atgtggttaagcgtgatgatttgtttatcacctctaaactatgggctgctaatcatgcacctgaagatgtggaagagggaatcgacaccacacttcaagatttgcagcttgactacttggacttgtacctcatccatggtccaatccgcatcaaaaaaggaactagcacgatgacccctgaaaactttctccatacagatatccctgctacatgggcagcgatggagaagttatacgactctggcaaagctcgtgcaatcggcgtgagtaacttctcttgtaagaagctgcatg

SEQ ID NO: 47247 - DNA, 293 bp, Zea mays
caggacaaggagggcattccaccggaccagcagcgcctgatctttgctggcaagcagctggaggatggccgtaccctcgccgactacaacatccagaaggagagcaccctccacctggtgctccgcttgcgaggtggtatgcagatctttgtgaagaccttgactggcaagaccataaccctggaggttgagagctccgacaccatcgacaacgtgaaggcaaagatccaggacaaagagggcatccccccagaccagcagcgtctgatcttcgctggcaagcagctggagga

SEQ ID NO: 47248 - DNA, 294 bp, Zea mays
acggctctcggctggactgcaggcctccgacctgcctgccagcgccacctgccagccaaggctgacctcctgctcagcacacagccaggccgtgaggagggctcccctcttaagctggaacgcctgaaactggagcctcacgaagggctgctgctccgcttcccctacgcggcctgacttcagcctgacatggacccactacccttctcctttccttcccaggccctttggcttctgatttttctcttttttaaaaacaaacaaacaaactgttgcagattatgagtgaacccc

SEQ ID NO: 47249 - DNA, 224 bp, Zea mays
acgttgaactgctgtggtttggactagagtatggaccaatttatctcagacatctgccccaagaaggacgtactcgaaaccttcaccgtgaagtcctgtcctgatgccatcaaagaggtcttcgacaataaattccacatcatcggcgcacccggcatcggcattgccgtggtcatgatatttggcatgatcttcagtatgatcttgtgctgtgctatccgcag

SEQ ID NO: 47250 - DNA, 295 bp, Zea mays
  unsure (1)..(295): unsure at all n locations
acatccattctccagcgcacganagtaaacatgtctgaccgggcaaagatgtcgtggcaggcgtacgtggacgagcacctgatgtgcgagatcgagggccaccacctcgcggcggcggccatcgtcggccacgacggtgccgcctgggcgcagagcacggcgttccccgagttcaagaccgaggacatggccaacatcatgaaggacttcgacgagccagggcacctcgcgccgacaggcctgttcctcggacctaccaagtacatggtcatccaaggcgagcctggtgccgtca

SEQ ID NO: 47251 - DNA, 286 bp, Zea mays
tgggagtgtcaacaacagacattgttggacggatgcttctttgtgttagagagagatcatctgatgcacataatcattcttcactacaaaggcagttcagtagcggacatggtcagaaagtcgatgatactggatctggaactggtacaagagtatctcatttccttcccacatctaggcgaatagttcagttctcaaatagcaggggtccaggtccagattctcgaatagtttacatggatggtgcttttgatctgttccatgctggacacgtcgagatattacg

SEQ ID NO: 47252 - DNA, 289 bp, Zea mays
  unsure (1)..(289): unsure at all n locations
agtgtacaaattattgcagcttcgaaacgaatttgtattgccaattgtcgtgaatgtatcttctacttgggagtaaatcaccaaccacttattgtaggggataaccataaattacaagttgccccatttaatacttattatccacaactcggggaacatttggcacaagttggtgtggatcctaatgtcaacaagtgggaccaaccttttgtgttgggagttgttgatctgcatgactcattatctcatcctgccgnggtttctgatgtccaggctgagtccaccactt

SEQ ID NO: 47253 - DNA, 286 bp, Zea mays
tcagatttccaccaccaccgccgaaccgccccgaacctcctcccctctcgcgctatggcccagactgttgtgctcaaggttggcatgtcctgtgagggctgtgttggagctgtcaagcgggtcctcggcaagatggaaggcgtcgagtcctacgacgtagacatcatggaacagaaggtcaccgtgaagggcaatgtgacacctgacgccgtcctgcaaactgtttccaagactggcaagaagacttcgttctgggaggctgaggccgtgacaagtgaatccgcca

SEQ ID NO: 47254 - DNA, 285 bp, Zea mays
acgtgcccggttcgaggagctcaacatggacctcttccgcaactgcatggagcccgtggagaagtgactccgcgacgccaacatggacaagagcagcgtgcacgacgtcgttctcgtgggcggctccactcgcatcccccgcgtgcagcagctgctccaggacttcttcaacggcaaggagttgtgcaagagcatcaacccagacgaggctgtcgcgtacggagcggccgtccaggcgccatcctcactggcgagggcaatgagaaggttcaggatctgctcctg

SEQ ID NO: 47255 - DNA, 215 bp, Zea mays
accaggaggagctggacacggtgctcaaaaccatcgagacgttcccgccggtggtgttcgccggagaggcgcgccacctcgaggagcgcatggccgaggccgccatgggccgcgccttcatcctccagggcggcgactgcgccgagagcttcaaggagtaccacgccaacaacatccatgacaccttccgtatcctgctgcagatgggcgccgtg

SEQ ID NO: 47256 - DNA, 213 bp, Zea mays
  unsure (1)..(213): unsure at all n locations
actagctagctagcagggggggaaatggctccacttctcgccgcagccatgaaccacgctgcacatccagtccttagaagccatctaggacccaacaatgagagtttctcacgacaccacctatcttcttcaccgcaaagcagtaagcgaaggtttaaccttagctttacgccacgatctgcaagagtaggcaatcanaatggagtccattgt

SEQ ID NO: 47257 - DNA, 273 bp, Zea mays
aggagatcaagggggagctcgccctcgtgccccagtccccagacaagtcgctcgcgcgccacaagttcgtcgatgactgcgaggccgccctcaacgagcagatcaacgtggagtacaacgcctcgtatgcataccactccctcttcgcctacttcgaccgcgacaacgtggctctcaaaggatttgccaagttcttcaaggaatccagcgacgaggagagggagcacgctgaaaagctcatggagtaccagaacaaacgtggaggcagggtga

SEQ ID NO: 47258 - DNA, 210 bp, Zea mays
acggcgatacttgtcgcctggagaagaaggaaggaggagcagtccgagtttatatcatgaccttgggtgtactggcaccgtatcggggtcttggtattgggacaaagctgctgaatcatgtgttcgatctctcagcaaagcaaaacatctccgagatatacttgcatgttcagaccaacaacgatgatgcaattgctttctacaagaagt

SEQ ID NO: 47259 - DNA, 284 bp, Zea mays
aatacacaacatctattgatatatggtcagctggatgtgttcttgctgagcttcttcttagtcaaccattatttcctggggaaagtgctgtggaccagctggttgagattatcaaggttttgggcaccccaacacgagaggaaattcgttgtatgaatcccaactatacagaattcaagtttcctcagataaaagcatgtccatggcacaagatcttccacaagagaatgcctccagaagcaatagatcttgtttcccgtcttcttcagtattcgccgaatctg

SEQ ID NO: 47260 - DNA, 236 bp, Zea mays
cagccagctcgcgaaaataatgaagagccgcagcatggcatcatcggccgcgctcttggtgctagccctcgcgctagtggcggccaccgccccacaggtagcggaggcaaagaagaagagagcggcggagagcggcgaggcggcggaggcgaagaagatccaggacgacttctgctcgacgctgtgcgagggcaagaaggggacggacctggtcgtgtgcaaggagtcctgcgcgc

SEQ ID NO: 47261 - DNA, 284 bp, Zea mays
  unsure (1)..(284): unsure at all n locations
attcatccagaccagcagagtatgatctttgcgggcaagcagctggaggatggccgcactctcgcggactacaacatccagaaggagagcacgcttaaccttgttctccgtctcaggggtggtatgaagatctttgtgaagagactgggtgganaaaccataaccctggaggttgagagctcggacaccatcgacaatgtgaaggcgaagatccaggacaaggagggcatccccccggaccagcagcgtctgatcttcgccggcaaacagctggaggatggccg

SEQ ID NO: 47262 - DNA, 223 bp, Zea mays
cacgacaagatggcatgcacaaacaatgcgatgagagccttgttcctcctggtcctcttctgcatcgtgcatggtgagaaggaagagtcaaagggcatcgatgcgaaagcgtccgggcctggtgggtccttcgacatcaccaagttgggcgcctccggcaatggcaagacagacagcacgaaggctgtgcaggaggcatgggcatcggcgtgcggcggcactg

SEQ ID NO: 47263 - DNA, 284 bp, Zea mays
cgctccgttcgagtggagcgcacaggcaccggccggcgaccagagagggagcggatcgaggggactcggcttgagaggaggagatggaccgcaaggatgtcgggatcctcgccatggacatctacttcccgccctcctgcgtgcagcaggaagcacttgaggcccatgatggggcgagcaaaggcaagtacaccattgggcttgggcaagattgcatggccttttgcagcgaggtggaggatgtcatctcaatgagtttgacggttgtcaattctctgctgaaa

SEQ ID NO: 47264 - DNA, 282 bp, Zea mays
atcctggtgtcgccatgggccgccgacccgcccgttgttaccggtattgtaagaacaagccgtacccaaagtctcgcttctgccgaggtgtccctgatgccaagattcccatttttgacctggggcggaaaaaggcaaaagtggatgagtttccgctttgtggccacatggtgtcagatgaatatgagcagctgtcctctgaagccctggaggctgcccgaatttgtgccaataagtacatggtaaaaagttgtggcaaagatggcttccatatccgggtgc

SEQ ID NO: 47265 - DNA, 273 bp, Zea mays
gtcaaacctcaagttgtatgttagaagagtgttcatctctgatgaatttgatgaccttcttccgaagtatctcagcttcttgaggggtattgttgactcagacacactgccgctgaatgtgtcacgagaaatgctccagcaacataacagtctgaagactatcaagaagaagctgatccgcaaagctcttgacatgattaggaaacttgctgaagaagaccctgatgagtacagcaacaaggataagacagatgaagagaaaaatgagatgga

SEQ ID NO: 47266 - DNA, 279 bp, Zea mays
cgagctctcacagtgccggaactcacccagcaggtcttcgatgccaagaacatgatggctgcctgtgacccccgccacggccgatacctcaccgtggctgctgtcttccgtggtcggatgtccatgaaggaggtcgatgagcagatgcttaacgtgcagaacaagaacagcagctactttgtggaatggatccccaacaatgtcaagacagcagtctgtgacatcccacctcgtggcctcaagatggcagtcaccttcattggcaatagcacagccatc

SEQ ID NO: 47267 - DNA, 283 bp, Zea mays
acagatcagatcggcaaggccaatcccgagcagtggtgcgaaacctcgagcgctcgcgccggtgaccataacaaagaggaagccgcggtagcactggtagcggcagcagtaagggggagatgtcgtcggcgttcagcggcgatgagaccgcccctttcttcggcttccttggcgcctccgctgcgctcgtcttctcatgcatgggggcggcgtacgggacagccaagagtggcgtcggcgtggcgtccatgggtgtcatgcgcccagagctcgtcatgaagtc

SEQ ID NO: 47268 - DNA, 285 bp, Zea mays
ccatcattgaaacccctcctcttgtcattgttgggctcgtggcatatgtgaagactcctcgtggcctccgcacactcaactctgtttgggcccaacatcttagtgaagaagtgaggagaaggttctacaagaactggtgcaagagcaagaagaaggctttcacaaagtatgctctcaaatatgaaaatgatgctggcaagaaggaaattcagctgcagcttgagaagatgaagaaatatgcttctgttatccgtgtcattgctcatacccagattaggaagatga

SEQ ID NO: 47269 - DNA, 289 bp, Zea mays
gtcatcgccaaagacgtcatcccggcgaactggagacccgatgccgtctacacttccaacgtccaattctactagactttgaattcccttcgattcatccggcacagcgggctatggaccttcagcagcaagctaattaagttggcagcatgcaccgctaaccttatatactactgagacttccaaattctagtatatgtaatccttttgttcgggttcatgatcgaattccaaagagtggaaaacaagcaaaaggttaaatatacatgccatttttggaggcattttt

SEQ ID NO: 47270 - DNA, 274 bp, Zea mays
atcgcaaatatgtctccggaatatagtgcaatatgggattcttcccagttgatggaaagacgctggactatttgaagcttactggccgaagtgatgatacagtggccatggttgagtcctacctgcgtgcgaataagatgttcgttgatcacagccaggttgacgctgaaagggtatactactcctatctagaacttaacttggaagaggtagaaccatgtctatcaggaccaaaacggcctcatgatcgagtgacattgaagaatatgaagtc

SEQ ID NO: 47271 - DNA, 277 bp, Zea mays
accaacgccaactccgccattgagatcagaaacttcctcggggagaagaaggtcaggaaggttgatatgcttgaaggtgtgaccatcttgcgttcagagaaggtcaaggatgagcttgttcttgaaggcaatgatgttgagcttgtctctcgctccgctgctctcataaaccagaaatgccatgtcaagaagaaggatatccggaagttcttggacggtatctatgtgagtgacaagggccccatctttgatgagcaatgagctgccctttgttcct

SEQ ID NO: 47272 - DNA, 282 bp, Zea mays
aagcactgaagaaggctgcgcgaggccgaggcacgtcgtcctagaccatctctacatcgagaagggctggggcgcacatccgttggtggccctcagctacacccacaggttccgctccaagtacgtgacctgcgtcctgtacaaggccatcgagcggtagcatgaccattgctgtgttgtgggccggcaactatagctagatgtggtggacttagcatttcattcaggtttagaagtctctcctgcataattcgttcatctgctaaactaaagaggtgggtg

SEQ ID NO: 47273 - DNA, 282 bp, Zea mays
cgacaagatggcgtgcacaaacaatgcgatgagagccttgttcctcctggtcctcttctgcatcgtgcatggtgagaaggaagagtcaaagggcatcgatgcgaaagcgtccgggcatggtgggtccttcgacatcaccaagttgggcgcctccggcaatggcaagacagacagcacgaaggctgtgcaggaggcatgggcatcggcgtgcggcggcactgggaagcagacaatcctcatacccaagggtgacttccttgtcggacaactcaacttcacagg

SEQ ID NO: 47274 - DNA, 231 bp, Zea mays
  unsure (1)..(231): unsure at all n locations
cccacctcccggtccgctagcagatagcgggggccagagagatcgagatccggaggcgctagcgccacccatcagcgtctgcggcaatggcgggcacggtgacggtctcgnggtcgtcgaaacccttcacgccgctgctcaaggacgagctcgacatcgtgatcccgaccgatcgcaaactcgacttctcgagatgtggaggccctctttcagccctacactcatatcgtg

SEQ ID NO: 47275 - DNA, 282 bp, Zea mays
tggagtagtgctaccgctgacaaggcgagtgtgggagcaggggaagcatcggcgcgagctgctggttcttttgaagactctgctcagctatcaagagtgacgaaggatcatacgcacatggtgaacggaagcccccgagaaatccaaagccatcagagttgcagtggaaggagtcgtatcaaggttcaaatgcatggaaatgacgtgtgcagagctgtggatttgggaaatctggatgggtacgagcagctgatgggtgagtgagtgatgtttgagatcaaa

SEQ ID NO: 47276 - DNA, 277 bp, Zea mays
gaagaatgtcctcatctttgaccttggaggtggtaccttcgatgtctccctccttacaattgaggaaggtatctttgaagtcaaggccacagctggcgacacccatcttggtggtgaggactttgacaacaggatggttaaccactttgtccaggagttcaagagaaagaacaagaaggatatcactggcaacccgagggctctccggaggctgaggacctcttgtgagagggccaagagaactctgtcttccactgccgacacattgagattgact

SEQ ID NO: 47277 - DNA, 285 bp, Zea mays
gcggggacaggctcacgctggcggacgtctgcctcttcacgacgctcatccgattcgatctcgtctacaacacgctgttcaggtgcaccaggcggaagctggccgagtaccctagcctccatgcctacacgcgcgacatctaccagatgcccaaggtcgccgagacgtgcgacatggaggccatcatggcaggatacttcaagacactcttccccctcaaccccggcgggatccagccacacccgccggccacctgcgatagagcgctcttgaggccgcatggta

SEQ ID NO: 47278 - DNA, 295 bp, Zea mays
ttcggctcgagcgcctaattgagggcattaacacgcacagcggttaccatttcccgttcagcccttgcaggctgattccattctacggaggggctgcataccatgactaccatcactatgcaggaggccgtagccaaagcaactttgcacccctgttcacctactgtgattatttatataggacagacaaaggctacagataccacaagctaaagcaagagaagctgaagagtctagcagaaaatagtgcggataaaggaggcaactactctcacgaagggaaaaagaacagata

SEQ ID NO: 47279 - DNA, 282 bp, Zea mays
agagcggcaccatggcggtcgggaagaacaagcgcctgacgaaaggtggcaagaagggagccaagaagaaagtggttgatccattttctaagaaagactggtatgatgtgaaagctccagcaatgttcaatattaggaacatcgggaaaacactagttacaaggactcaaggaaccaaaattgcatcagatggcctcaagggtcgtgtgttcgaagtgagtcttgcagatctacagaacgatgaagttgcatttagaattcaagctaattactgaggatgtt

SEQ ID NO: 47280 - DNA, 278 bp, Zea mays
agcgaggaaaaccgtgtgctattagccatggtcaaccccaccgtgttcttcgacattgccgtcgacggcgagcccttgggccgcgtctcctttgagctgtttgcagacaaggtcccaaagacagcagaaaattttcgtgctctgagcactggagagaaaggatttggttataagggttcctggtttcacagaattattccagggtttatgtgtcagggtggtgacttcacacgccataatggcactggtggcaagtcactagggagaatttgaagatg

SEQ ID NO: 47281 - DNA, 276 bp, Zea mays
cgcaaaggctctcctaggtggcctatcggcgatcctcgtcgtggcggtggtcgtcggtgtggtcgccaccgtcacgcgctccggcaagaaggccggcgacaacttcacggtcacgggggatgcttcccttgccacgtccggcaagtcggtcaagtccctgtgcgcgcacaccctatacaaggagtcgtgcgagaagacactgtcccaggccaccaatggcaccgagaaccccaaggaggtgttccacagcgtgcaagtggcgctggagtcggtcca

SEQ ID NO: 47282 - DNA, 278 bp, Zea mays
gtcgccgtcagcccctcattcccttccgaccgcatgtggcgcaatggcaaggagatctcgctattaggaggaaggtttcagagctgccccagagaaatcagaaagcgtgctcgtgactttgaggacaaggagaagggcgtcaagatcaagacagaggactgggacaagttgcatgttcacatagcctcgtacaacaacttccccactgctgctggtttggcctcttcagctgctggccttgcctgtttcgttttacctggaaagctgatgaatgcgaa

SEQ ID NO: 47283 - DNA, 278 bp, Zea mays
gcgaggcaaacttgatttggaatctgaaccatggccaagtatctctgatagtgctaaggatttagtccgtaagatcgctatccgcgatcctacaaagaggttcactgctcatgaggttttatgtcatccatggattgttgatgatgctgtcgcacctgataagcctattgattctgctgttttgtcaaggctgaaaaacttttctgcaatgaacaagctcaagaagatggcattgagggtgattgctgaaagtctatctagagagattgggggtttga

SEQ ID NO: 47284 - DNA, 276 bp, Zea mays
ggacgtcgaggacgaagaagaggacgaggaaggcaacaagcgcgtcgtcgtgcttggcccccaggtccccctcaaggaacagctcgagctcgacaaggacgatgagagcctgaggaggtggaaggagcagctccttgggcaggtcgacaccgagcagctaggagaaactgcggagccagaggtcacggtgctggacctgacgatcctgtcgccgggcagaccggacctggtccttcccatcccgttccaggcgagcaagggctatgcgtttgctct

SEQ ID NO: 47285 - DNA, 316 bp, Zea mays
gggtggtttgcttaggcgcagacgggtgaagcggagccaacatgggccagtacgcccggagctagggttctgtcgcaagaagcttatggtgagccccgcgggagaccccttcggagaaatgctccgtctcgaaccaatgagctcgaagctgcatcgagcgcagtatgaggctccggagacaatacgtcgaggtactggagcggtcaaattgtaccctgagcctgcgatccgcaagggccgcgccgggtaactagctcgacgctgtgagtgagacaggacgccacgggcgtctttcgaagggcgacgccctgtctgc

SEQ ID NO: 47286 - DNA, 273 bp, Zea mays
caaggcctctggacagtctgaggaagacatgctgcagtgcttcattgattccaagtacaagaatgggcgccccaccaccgagggtgaggtaaccgggctacttatcgcagcgctctttgctggacagcataccagctcaatcacctcaacctggactggagcgtacatgcttcgcttcaagcagtactttgcagaagccgtagaggagcagaaggatatcatgagacggcatggcgacaagatcgatcatgttcgggcagagatggatgtcct

SEQ ID NO: 47287 - DNA, 283 bp, Zea mays
  unsure (1)..(283): unsure at all n locations
tccagcgcctccacattcctcgccgcctcactccctctgaggtcgcagatccgtccggttagacgaagccgcccgcacccatggcctccggtgagctcgcctgcacctacgccgccctcatcctcagcgacgacggcatcgccatcaccgccgagaagatcgccaccatcgtgaaggcggccaacatcaaggtcgagtcctactggccggcgctcttcgctaagctcctggagaagcgcagtntgaggatctaatcctctccgtgggctctggtggcgctgct

SEQ ID NO: 47288 - DNA, 278 bp, Zea mays
atcgttatcctcctcgatcttaattacaggtcatagctaagcaggtctgacaggatgtcgtggcagacatacgtcgatgagcacctgatgtgcgagatcgagggccaccacctgacctccgctgccatagtcggccacgacggcgccgtttgggcccagagcaccgcattcccacagttcaagacagaggagatgaccaacatcatgaaggacttcgacgagcccgggttccttgccccgaccggcctcttcctcggccacaagtacatggtcatcca

SEQ ID NO: 47289 - DNA, 275 bp, Zea mays
cctccaagtgcggcgtcacatcccctacaccatcagcaactccaccgactgccccagggtgaactaaaacctagaccacgcgcgacgacggccgcctgatcgatcgaccaaccattccgccgtcgccgccggccggatcatcgatcgtcgtcatgatgatatctatcaatctacgcgtgatgatcgatggctacttgtctactgctatgtactactaaataaaatctctccgtgtgtgcacgtacgcttgcaggatggtagcatgtatgtacgac

SEQ ID NO: 47290 - DNA, 273 bp, Zea mays
ctcaggtttggggggaaaaggcctcgcgggtcgcaaaccgctctctgttgatttgggatttgggaggcgctcgagttttcaggtaaaccatagtttagtgacccatggctcgtactaagcaaactgctcgcaagtccactggagggaaggctcctaggaagcaacttgccaccaaggctgcccgtaagtctgcacccacaactgggggagtaaagaagcctcatcgttaccgccctggaactgttgctctgtaaatccgcaagtatcagaaga

SEQ ID NO: 47291 - DNA, 272 bp, Zea mays
gcgtcatctacccctgggagacgtttcaaggactgcgagcgataggatgtggactcactgtatcattcgcgttctccatactgatcaacctcttcctcagttatcccactcagccgggatggttaccttctcctttgctgtccatccgtatagacaacatccacaagggtaagcacgggagtgattctgaaacttacgacactgaagggaggtttgatccatcaaagttcgatgctatattcagtaagtgccgaacccatcctaatgctcta

SEQ ID NO: 47292 - DNA, 276 bp, Zea mays
aggacacgccgcacgagccctttccgccgccgccaaaatggtgaacgttcctaagaccaagaagacctactgacaagaacaaggagtgcaagaagcacactctccacaaggttactcagtacaagaagggtaaggatagcctgtcttctcagggaaagcgccgttatgaccgcaagcagtcaggatatggtggccagaccaagcctgtcttccacaagaaggccaagaccaccaagaaaatcgtattgaagctaggccagagctgcaagcactact

SEQ ID NO: 47293 - DNA, 276 bp, Zea mays
cgagtctcgtccacccgtcatcctcctagctcctctactcgccagtcgccatgggcaagattaagatcggaatcaacggcttcggaaggatcggcaggctcgtggccagggtcgccctccagagcgaggatgtcgagctcgtcgccgtcaacgaccccttcatcaccacggactacatgacctacatgttcaagtacgacaccgtccacggccactggaagcacagcgacatcacactcaaggactccaagactttcttcggtgacaagccggtca

SEQ ID NO: 47294 - DNA, 273 bp, Zea mays
cacaagatggcgtgcacagacaatgcgacgagagccttgttcctcctggtcctcttctgcatcgtgcatggtgagaaggaagaggaccagggcatcgatgcgaaagcgtccgggcctcgtgggtccttcgacatcaccaagttgggcgcctccggcaatggcaagacagacagcacgaaggctgtgcaggacgcatcggcatcagcgtgcggcggcactgggaagcagacaatcctcataccccagggcgatcctgtcggacaactcaacttc

SEQ ID NO: 47295 - DNA, 270 bp, Zea mays
  unsure (1)..(270): unsure at all n locations
agcgcacgcttgccgactacaacatccacaccgaccgcancctccacttggtgctgcgcctcagaggaggcatgcagatcttcgtgaagaccctgaccggcaagactatcaccctcgaggtagagtcttcagacaccatcgacaacgtcaaagccaagatccaggacaaggagggcattcccccagaccagcagcggctcatctttgctgggaagcagcttgaggatggacgcagcttgccgactacaacatcagaggagagcaccctcc

SEQ ID NO: 47296 - DNA, 276 bp, Zea mays
ccaatggaactgtcaggactgcacttgacactgggtgcggggtggctagctggggagcttatttgttgaagaggaatgtcttggccatgtcgtttgccccgagagattcacacgaggcacaagtgcagtttgctctggagagaggtgtccctgctgttattggcgtccttggtacaataaaacttccctatccatcgagggcctttgacatggcccattgttccaggtgcttgattccatggggagcaaatgagatgtacatgatggaagttgata

SEQ ID NO: 47297 - DNA, 278 bp, Zea mays
ggattgtgggcgagtgcgtgcgttcgtgcagccacagacaggcgtccggccaccatgtctttcaccggcacgcaggacaagtgcacggcgtgcgacaagaccgtccacttcatcgacctcctcacggccgacggcgccatctaccataagacatgcttcaagtgcagccactgcaaaggggtcctctcgatgtgcagctactcctccatggacggtgtgctgtactgcaagacccacttcgagcagctcttcaaggacgggagcttctccaagaactt

SEQ ID NO: 47298 - DNA, 271 bp, Zea mays
cgacatgatgctgtaagggatctagagaggaagcttctggagttgcaacagatattcatggacatggcagttcttgttgaggcgcaaggagacatgatcaacaacatcgagacccatgtctcgaacgccaccaaccacatacagcaaggtgtgagcgcgctccagaacgcgaagaaactgcagaggaattcgaggaagtggatgtgctacgccatcatcatactgctggtgatagtcgtggtcattacgcgcagtcatccagccatggaag

SEQ ID NO: 47299 - DNA, 272 bp, Zea mays
ccagcttccttccagtcgccatgcgtgatcttaggaaatatgctcctgatgataaagatggtggttgggaggatgttggagggctagatgaagcagtaactatcattaaagagactcttgaattgccgtcaaaatacccaaatatctttaccagggcacctgtgcggttgcggtcaaacattctcctgtatggaccacctggatgtggtaaaactcacattgtgagagctgcggctgctgcttgttcttcgttcatttcagtcaagggtcca

SEQ ID NO: 47300 - DNA, 274 bp, Zea mays
atttttcaaatgactctgagaagctcaggcaggctttaggttttgattatctgaatgaagccaatgctagcagcaagagtattgcacctttcggggttgcacttactggcagccatgcctttttaaatggcaatttctctgcttctaggcccacaaatggtcctttgaagatggagctcccttcactccaagatactgaatctgatccaaatagctggctcaagtatactgtggctcctgcaatgcagccttgattagtagatccttacctgca

SEQ ID NO: 47301 - DNA, 270 bp, Zea mays
cacaaagaagtcactcaaggatgttgtcacagagaatgaatttgaaaaacgtcttcttccagatgtcatccctccagatgagattggtgttacctttgaggatattggagcattagaaaatgtcaaggaaactttgcaggagttagttatgcttcctttgcaaaggcctgagttgttctccaaaggacaacttatgaagccatgtaaagggatattgctttttggtccacctggcaccggtaagaccatgctgcaagctgttgcaacaga

SEQ ID NO: 47302 - DNA, 278 bp, Zea mays
cctctcgtcgccgtcctctcccgttcgcaacgccacgctccccaccgccgaaatggccccgaagcgaggtggcagggcaccggtgccggccaagaagaagacggataaagtgacgaaccctctgttcgagaaaaggccgaagcagttcggcatcggcggcgcgttgcctcccaagaaggacctgcaccgattcgtcaagtggcccaaggtcgtgcgcatccagcgccagtgtcgcatcctcaagcagcgcctcagtgctccggcgctcaaccagttca

SEQ ID NO: 47303 - DNA, 290 bp, Zea mays
gtggccgtggccgtggccgtgcgcaaaaaaacaaaccatcctcgattcgaccggaggggaaggagacgcgccgggagaagggggaagagacgcggcgaccatgtctccgatctgggtgttcgggtacggctcgctgatctggaacccaggcttcgcctacgacgaccgcgtcgtcggctttgtcagggactaccgccgcgtcttctaccaagggagcacggaccacaggggcacgccgcagttccccgggaggaccgtcacgctcgagcaccagcccggagcgacttgct

SEQ ID NO: 47304 - DNA, 293 bp, Zea mays
actgcaaacattggtggacctcttcctattaccagacctctggaccctccagacagacctgttgcttacatccctgagaacacttgcgatccacgtgcagctatctgtggtgtacatgacagccaagggaaatggttgggtggtatgtttgacaaagacagctttgtggagacatttgaaggatgggccaaaacagtggttactggcagagcaaagcttggagggattcctgtgggcgtcatagctgtggagacacacgacctgatgcagatcatccctgctgatccaggtca

SEQ ID NO: 47305 - DNA, 286 bp, Zea mays
ggtggaaaaggccacagaaatttggaacatcatctcaaatggtggttacttatatgtttgcggtgatgccaagggaatggctagagatgtacacaaaatgcttcatacaatagtccaagagcagggatctttggataactccaaaaccgagagctatgtaaagagcctgcagatggaaggaaggtacctccgtgatgtatggtgacacatcacctcaaataagccatagctctagcgtgtggaagtaagctggcttgcgtgtatgaatgtctatgccacccatcgt

SEQ ID NO: 47306 - DNA, 296 bp, Zea mays
gcaggccggcgcacctgttcctggacgagctgggcgtgggctacgacgaggccgaggactacgtggtggtcaagcacgcggcgctgttcaacgtcaccgtgatgagccggctcctggcgcggcccaacgtgaagctgttcaacgccgtggcggtggagcgcctgatcgtgcggcgggggcgcgtcggcggcgtggtcaccaactgggcgctcgtgtccatgaaccacgacacgcagtcgtgcatggaccccaacgtgatggaggccaaggtggtggtcagctcctgcggccacgac

SEQ ID NO: 47307 - DNA, 292 bp, Zea mays
ccaagatgggtgcatacaagtacatccaggagctatggagaaagaagcagtctgatgtcatgcgctttcttctgagggtccgctgctggcagtaccgccaactctctgctctccacagggctccccgccccacccggcttgataaaccgcgccgactgggctacaaggccaagcaaggttacgttatatataggattcgtgttcgccgtggtggccgaaaacgcccagttcctaagggtgcaacttacggcaagcctgtccatcatggtgttaaccagctaaagtttgctcg

SEQ ID NO: 47308 - DNA, 176 bp, Zea mays
cctgcagtcatctcctccatcaccaccaccaagctcaacaacagccagctcgcgaaaataatgaagagccgcagcatggcatcatcggccgcgctcttggtgctagccctcgcgctagtggcggccaccgccccacaggtagcggaggcaaagaagaagagagcggcggagagcgg

SEQ ID NO: 47309 - DNA, 169 bp, Zea mays
gatttacatacctgtgatgaattggtttctaatggtcatgtgcatcatcatcgtggcaacttttaggagtaccaatgatattgccaatgcatacggcattgctgaagttggcgtcatgatggttagcactgcactggtgactttggtgatgcttcttatatggcaaacc

SEQ ID NO: 47310 - DNA, 261 bp, Zea mays
gagatcccaggaagtcctgcagcacttgcaaccacatttctcacctttgtgttgaatctggccttttctttgagcgttcttggttttatgattatgcatatttcacttgtttctgctaatacaacaacaattgaggcatatgagaagaagacaactccacattggctatatgatcttggccggaagaggaattttgctcaggtttttggaaatgacagaaaatattggttcatccctgaatactcagaggaggttttgaga

SEQ ID NO: 47311 - DNA, 292 bp, Zea mays
gacgcaacgatgctcatccccaagggcgactacctggtgggccctctctacttcagtggcccgtgcatgggggacatcaccatccagctcgatggcatcctgctgggatccaacgacctggccaagtacacggcgagttggatccaggtgtcgcacgttaacaacatcgtcatcaacggctccggcacgctcgatggccagggcaccgcagtatataccaagagcaagaccgacgtcgtcaaggcgatgccactcacactagtgttgttctacgtgaccaacggcactgttt

SEQ ID NO: 47312 - DNA, 296 bp, Zea mays
cgcaggtctccgtccacgcgctcgccgccggcaagaaggtcatcctcttcggcgtccccggcgccttcaccccgacctgcagcaaccagcatgtgccaggcttcatcacacaggctgagcagctcaaagccaagggtgtagacgagatcctgcttatcagcgttaacgaccccttcgtcatgaaggcgtgggcgaagacctaccccgagaacaagcacgtgaagttcctcgccgacggatctggagcgtacaccaaggcgctcgacctcgagctcgatctcacggacaaagggctg

SEQ ID NO: 47313 - DNA, 207 bp, Zea mays
  unsure (1)..(207): unsure at all n locations
gtggaacgtgttatagacatgtttgcagatgatgacactgttactgaacttgatttggatagcccgacagagggcttcacatcaattgcagaacgcattgaggacatacctgaangaaaacttgtgattgttgtcgatgatgattcaagggaaaatgaaggagtctgataatggctgcctccttggttaccccataggctatggctt

SEQ ID NO: 47314 - DNA, 283 bp, Zea mays
ccgaaatcccgttgcgtctctcgcgcgttaccaagctctcaagttttctcgcgccgacggcaatggatgaggtcaccgaggccgtgaacaacctcaacatctcgggcgtaggggccgcgggcgttgccggggcggaagggcacaagaagaatcgcatccaggtctccaacactaagaagcccctcttcttctatgtcaacctcgccaagaggtacatgcagctgcacaacgaagtagagctgtcggccctcggcatggccattgcgacggtgatgacagtagc

SEQ ID NO: 47315 - DNA, 284 bp, Zea mays
agaaggagcatcccaagttcaagagaaagggcgatgacctcttctacgagcacacactgatcttgactgtgatctctgtgtggcttccagtttgttctgactcacttggataacaggcagctgctgatcaaatcgaaccccggcgaagttgtgaagcctgattctttcaaggcaatcaacgatgaaggcatgcccatgtatcagaggcccttcatgaagggcaagctgtacatccacttctcggtggagttcccggactcgttgagcccggagcagtgcaagac

SEQ ID NO: 47316 - DNA, 206 bp, Zea mays
gagatcccaggaagtcctgcagcacttgcaaccacatttctcacctttgtgttgaatctggccttttctttgagcgttcttggttttatgattatgcatatttcacttgtttctgctaatacaacaacaattgaggcatatgagaagaagacaactccacattggatatatgatcttggccggaagaggaattttgctcaggtttt

SEQ ID NO: 47317 - DNA, 197 bp, Zea mays
aacaactccttgcacgtcttgatgtttgcatgggtgggagggttgctgaagagctgatctttggggaagacaatgttacaactggggcaagaaatgaccttcacactgcaacagagcttgcccagtacatggtatcgaactgtgggatgagtgatgctatcggtcctgtgcatgtgaaagaacgaccaagcatagag

SEQ ID NO: 47318 - DNA, 208 bp, Zea mays
  unsure (1)..(208): unsure at all n locations
tcctaaaggcgagattaaaaacctgcctaagggagccacagtggttgattatgcttatctgatccatactgaaatcggcaacaanatgattgcagcaaaggtgaatggcaatctggtttcaccaatccatgtacttgcaaatgctgaagtggtggagattataacttatgataaattatctagtaagtatgcattccagcgtcaccag

SEQ ID NO: 47319 - DNA, 308 bp, Zea mays
gtagctgcagcgtagtaggtcggtgcgggcgctgctcctcgcgcacccggaggtcgagttcctctggtggatggactctgacgccatgttcaccgacatggcgttcgagctcccgtgggagcgctacgggccatacaacctgatcatgcacggctgggacgagatggtctacgacgacaagaactggattgggctcaacaaggtcagcttcttgctgcgcaactgccagtggtcgcttgatatgctggatacctgggcgccaatggggccaaagggccctgtccgcatcgaggccggcaaggtgctga

SEQ ID NO: 47320 - DNA, 211 bp, Zea mays
ggagaagctgggggttgacaaatggtgcttccatgatagggatattgcccctgatgggaaaactctcgaagaaacaaatgctaacttggatgagatagttgagctggcaaagcagctcaagggtgagaccaatataaagccattgtggggtactgcacagctctttatgcatcctcgttacatgcacggagctgctactagcccagaggtt

SEQ ID NO: 47321 - DNA, 207 bp, Zea mays
gcttggacgacaggaaaggacggtcccgtctctcccgatacgcttccgaagcggtcgcggagcacgtcggacggtccgccaggaagatggggttgagctcaatcgtcactgaggtgaaaggggcttcgttacttcagaagaagaagagggtgatcatgagctttcagagaaaggttccgaggcgaaagggtgatggccaatctccta

SEQ ID NO: 47322 - DNA, 191 bp, Zea mays
gatatggcgtgtatagacaatgcaatgagagccttgttccttttagcgctcttctgtgtcgtgcatggtgagaaggcaaagtcaaaggacaacgatgcaaaagcgtccgggcccggtgggtccttcgacatcaccaagttgggcgcctccggcaaatggaagacggatagcacgaaagcttgtgcaagaag

SEQ ID NO: 47323 - DNA, 283 bp, Zea mays
cggggacagccccaacacggatggcatccacatgggcgactcatccgggatcaccatcaccaacaccgtcattggcgtcggcgacgactgcatctccatcggccctgggacctccaaggtgaacatcactggcgtgacctgcggccccggccacggcatcagcatcggcagcctagggcggtacaaggacgagaaggacgtcacggacatcaacgtcaaggattgcactcttaagaagacaatgttcggcgtcggcatcaaggcgtacgaggacgccgcctcc

SEQ ID NO: 47324 - DNA, 283 bp, Zea mays
gcaagttgcactggctccagctgctgcacttccacatcggctccatgatcccgacgacggggaaagtgtacgacccggtgagcgaggccgctggcatctactgcaacctggtgaacgagcacggcgccaagtggttggccacgctggactgcggcggcgggctcggggtcgactacgacgggacccgttcaggcgactccgaaatgtcggtggcatacgggatacaggagtacgcctccgccgtcgtgcaggcggtgcggctcaagtgcgactacaaaggcgt

SEQ ID NO: 47325 - DNA, 287 bp, Zea mays
gcggagaactaccactggcaatggacttcattcttctctgctgcttccactgcggtgtatgtttacctatactccatatattattaccacatgaagaccaagatgtctggattcttccagaccagcttctatttcggctacactctaatgttctgcctaggcttaggaacactatgcggtgccgtcgggtatcttggatcgacattgtttgtgaggaggatctacaggaacataaagtgtgactaagtgaagataatatcgccccattttgggtcagcgcagagaaa

SEQ ID NO: 47326 - DNA, 160 bp, Zea mays
tgggcgagtgcgtgcgttcgtgcagccacagacaggcgtccgggcaccatgtctttcaccggcacgcaggacaagtgcacggcgtgcgacgagaccgtccacttcatcgacctcctcacggccgacggcgccatctaccataagacatgcttcaagtgca

SEQ ID NO: 47327 - DNA, 267 bp, Zea mays
acgtacttccgttgcggcgctacgagcttcgacgggcctcgatctccacctctgaagtgactacttgtggtctagatctgaagctgtagtggtcaccagcttagtgtgaatcgaagatgagcgtggtggggttcgacctcggcaatgagagctgtatcgtggcggttgcgcggcacgtggcatcgacgtggttctcaacgaggagtccaagcgcgagacacccgacatcgtttgcttcggggacaagcaccggttcatcggaaccgc

SEQ ID NO: 47328 - DNA, 283 bp, Zea mays
cacgtctcgcccatcccgccactgctgctctccagagtccaggcgacccaggctgcgcggtcgctcggtgttgttagtcccgaccgccgccggccatggcatcaaacggcatcgccccaagagatgtaatgtgttgttggcgttgcacgcacccctttgggtggattccttggtgccttgtcttccttgcccgcaacaaagcttggttctatagcaattgaagctgctctgaaaagagcaaatgtggatccggccctcgtgcaggaggtctttttcggaaacg

SEQ ID NO: 47329 - DNA, 284 bp, Zea mays
ggcgatgaatgagtccatcgctttatcagatactgagaagcaactgcgacatgagaagcactatcggtatatctgctcacacgacgttgcctattggtctaagagcctatattcaagatttcgagagaagctgtagggaccattttaggagaaaatgttggggtattggactaggatttggatttagagtggttgcacttgaccgcaatttcaaaaagcttaccgtagattctattgttgcggattacaagaagtcaaagagcaggatcatactactagactat

SEQ ID NO: 47330 - DNA, 156 bp, Zea mays
acctcctctgctctcccccacctcccggtccggcagcagagagcgggggtgcagagagatcgagatccggaggccgcgagtgggagcgccaccacaagcgactgcggcaatggcgggcacggtgaaggtcccggggtcgtcgaccccctccacgca

SEQ ID NO: 47331 - DNA, 274 bp, Zea mays
tgcccaaggaccagatcggcagcttcttctattaccccagcatcggcatgcagcgggcggcgggcgcatacgggctcatcagcgtccacagccgtgacctgatcccggtccccttcgacacgccggcagacgaattcccggtcctcgtcggcgactggtacaccaaggaccacaccgtcctggccaataacctggacgccggcacggggatcgggcggccgcgtggctcgtgatcaacggcaagaacgagaaggacgcgtcgaacccgcccatg

SEQ ID NO: 47332 - DNA, 156 bp, Zea mays
atgactgggagggactttttgagtccatcactggctatggtcggggtgggtcgtccatggctctcttcggaagagttggtggaggtatcaacacaaaggctgctgatgttggtgccgatcttgttggaaaggtcgagaggaacattcctgaggatg

SEQ ID NO: 47333 - DNA, 161 bp, Zea mays
gctctacccgcgtggcgcgtccagcgtctgctgcgcggtttgccaggccatcaccaccgtgccgccaccaggattggagatggctcagcttatatgtggtggctgtcgaactttgctgatgtatactcgcagtgcagacaccgtaaggtgttcatgttgca

SEQ ID NO: 47334 - DNA, 274 bp, Zea mays
ctgactatgatgctcccacacagctggtcaagcccaaggagaggaatgagaggtatgttgatgctgtcatgacaatccccaagggaaccttgttccccatgtgtggcatgaaccttgccttcgacagggatctcattggccctgctatgtactttggtctcatgggtgatggccagcccatcggtcgctacgacgacatgtgggcaggatggtgtgtgaaggtcatctgcgaccacctgagcctgggagtcaagactggcctgccatacatctg

SEQ ID NO: 47335 - DNA, 226 bp, Zea mays
gcgcctcggaggcgttcagctgcttcaagatgaagctgaacatctccttcccagccactggctgccagaaactcattgaagtggacgatgaacgcaaacttcgcactttctatgagaagcgtatggccacagaagttgctgctgacgctctgggtgaagaatggaagggttatgtggtccgaatcagtggtgggaacgacaaacaaggtttccccatgaagcaggg

SEQ ID NO: 47336 - DNA, 285 bp, Zea mays
tgggaatattatgatatatgaagagaccagacaagtcaccttgattgactatgagtatgcgagttttaacccagttgcattcgacattgctaatcacttctgtgagatggctgctgattaccatacagcaacaccacatgtgttggattttacgaaatatcctgacactggggagcagagaagattcgttgaggcataccttagctctgcaggtgaaaagccaacggatggggaagttgaagaactgctagggttgattgcaaagtacactcttgcgagccatct

SEQ ID NO: 47337 - DNA, 223 bp, Zea mays
ccaagatgacaaagaaaagaaggaacaatggtcgtgccaaaaagggccgcggccacgtgcagcctattcgctgcactaactgtgcccgatgcgtgcccaaggacaaggccattaagaaattcgtcattcgaaacatagtggaggccgcagcagtcagggacatttctgaagcgagcgtcttcgatgcctatgtgcttcccaagctgtatgtgaagctacatta

SEQ ID NO: 47338 - DNA, 222 bp, Zea mays
actataactgaatacctcggtattggatcataccgtaaatggccagaggagaaacgccaagaatggctactatcggaacttaatggaaagaggccattatttggtccggaccttcccaagtcagatgagattgctgatgttctagatactttccacgtattagctgaacttccatcagacagctttggtgcatatgtaatatctatggcgactgctccctca

SEQ ID NO: 47339 - DNA, 278 bp, Zea mays
acgaggcaattggtctcaagtccatgtgttcagtgacaacaagtcatctgtcaactccattgcatgggctccgtatgaggttgggctttgccttgcctgtgcatcttcaggtggaagaatatccatcttgacgatgcgagctgatgggggttgggatactgcaaccattgagcgagcacatcctgttggtgcgactgccatatcctgggctcctgcaacagattcaatagctggcacaggggagtttgtttacaagcttgtctcaggagggtttgact

SEQ ID NO: 47340 - DNA, 127 bp, Zea mays
cagtgggatcgagttgtttcactgcacgagcacatcctccggcgaccaccggcctccctctaccgtcctctagcgaccgaccaacgcgccgagcgaagatgtcgtggcagacgtacgtggacgagca

SEQ ID NO: 47341 - DNA, 174 bp, Zea mays
actcaagggagcattggatggaggcctggatattcctcacagcgagaagaggtttgctggattcaagaaggacgacaagcagttggatgctgatacccaccgcaggtacatctatggtggccatgttgctgactacatgaagaaccttgctgaagaggagccagaaaagtacca

SEQ ID NO: 47342 - DNA, 139 bp, Zea mays
atttgcaagagcctttcaaagatccaacaaagagaaaggtaatgcatggtgcggatcgtgatataatgtgtactccagcgggacttccacatctatgtgtgcaatctttttgacacaggacaggcttcaagggtcttac

SEQ ID NO: 47343 - DNA, 284 bp, Zea mays
atacgatgcactatcaagtttcttcaaaatcttgactacatcacctgatgaaaacggcaaggtctatgtctcaactgtacaagccaataattatccaatcacttgcacgcaatggcatcctgagaaagccatttttgagtggaggaaaccaatgatcccacacagcgaagatgcagtacaggttactcaacattttgccaatcattttatcagccaagcacgcaagtctccaaacaggcctcctgccgacaaagtgctggataacttaatttacaactacagtc

SEQ ID NO: 47344 - DNA, 217 bp, Zea mays
cgacaagatggcgtgcacaaacaatgcgatgagagccttgttcctcctggtcctcttctgcatcgtgcatggtgagaaggaagagtcaaagggcatcgatgcgaaagcgtccgggcctggtgggtccttcgacatcaccaagttgggcgcctccggcaatggcaagacagacagcacgaaggctgtgcaggaggcatgggcatcggcgtgcggcggc

SEQ ID NO: 47345 - DNA, 180 bp, Zea mays
gagctcagttgggccgacattgaccacctgcagacacacttccgctgccagtgctacttgggctggagtggtgagcaatgccagtgggaccataggcaggcagctggaggtgccagcgaggcctgggctgggtcccacctcaccagtctgctggctctggcagccctggcctttacctgg

SEQ ID NO: 47346 - DNA, 135 bp, Zea mays
cgacaagatggcgtgcacagacaatgcgatgagagccttgttcctcctggtcctcttctgcatcgtgcatggtgagaaggaagagtcaaagggcatcgatgcgaaagcgtccgggcctggtgggtccttcgacat

SEQ ID NO: 47347 - DNA, 226 bp, Zea mays
tggagatgatgtatacaataattgcagatgagctcaagtcaatggacaataaggacatgcgccctgaagattacttgagcttcttttgtcttggaaaccgggaagaaccaccatctaatggcagcccagaatcagagaaatctacagatataaagtgcagtgggattagctacaaaatatcgacggttcatgatctatgttcatgcaaaaggaatgattgtggatg

SEQ ID NO: 47348 - DNA, 273 bp, Zea mays
gtgatttgaaataattgggaataaatagttcgtgaatccctgaagcgtgcatatatatattcctgccaagataaaggtaatggagtcgtcacgcaggttccagccggccgtcatcctgcttctcctgctcattgtgtccaccgatatggcacaggcaagggaatgcgagaagtacagtgagcgatttgttggggcatgcatgatcgcagacaactgcgccaatgtgtgccgcggtgagggcttcttggccggcaagtgcagcaccttccgccg

SEQ ID NO: 47349 - DNA, 198 bp, Zea mays
agatccgtgagactgttttaacaaagttagatcttaaagtagtacccttatttaatgagaatgatcccatcagtacccggagacagccatatgaggattcatctggtatattctgggataatgacagtctagcagctctgttggcagcagaacttaatgctgatcttcttatcatgcttagagatgtggaaggactct

SEQ ID NO: 47350 - DNA, 271 bp, Zea mays
cagctgctcctggcctctaaggtttaagcgcaatgatgttgttgtaagagcaatatcggaagagtgtggcccgcagggcttcccattgatctcagaggtaaaagggcattcattgctggagttgctgatgataatggctatggatgggcaattgcgaaggcacttgctgcggctggtgctgaaattcttgtgggtacatgggtgccggcacttaacatatttgagacaagtctgaggcgtggaaagtttgatgaatcacggaagctgccag

SEQ ID NO: 47351 - DNA, 113 bp, Zea mays
ggagcgcacacacacacaaccagatctcccccaaatccacccgtcggcacctccgcttcaagatgcagatctttgtgaaaaccctgactggcaagactatcaccctcgaggtg

SEQ ID NO: 47352 - DNA, 293 bp, Zea mays
cgacaagatggcgtgcacaaacaatgcgatgagagccttgttcctcctggtcctcttctgcatcgtgcatggtgagaaggaagagtcaaagggcatcgatgcgaaagcgtaccgggcctggtgggtccttcgacatcaccaagttgggcgcctccggcaatggcaagacagacagcacgaaggctgtgcaggaggcatgggcatcggcgtgcggcggcactgggaagcagacaatcctcatacccaagggtgacttccttgtcggacaactcaacttcacaggcccttgcaag

SEQ ID NO: 47353 - DNA, 200 bp, Zea mays
ccatccgcttcttctcttcggttcagctctcgagtttccaggatgaaggtaatagctgcctacctgcttgctgttctgggtggaaacacttccccgactgctgatgatgttaagagcattctggaatcagttggtgctgaagctgatgaagaaaaactagagttcctgctcacagaactcaaagacaaggacataacaga

SEQ ID NO: 47354 - DNA, 223 bp, Zea mays
cgcagaatcttgaaaagcccagagatccaaagagcccttcgagcaccacgcaagaagatccatcgcagagtcctaaagaagaacccactgaaaaacttgagaatcatgttgaagctaaacccatatgcaaagaccatgcgccggaacaccattcttcgccaggccaggaatcacaagctccgggtggataaggcagctgctgcagcagcggcactacaagcca

SEQ ID NO: 47355 - DNA, 285 bp, Zea mays
gcaaatggttgatgatgcacggctacctttgagccgtatcgtgccaatttcctcaaaccagctcaacctttaccgggtagtgatcattctccgtcttatcatcctgtgcgtcttctttcagtatcgtgtcagtcatccagtgcgtaatgcttatggattatggctagtatctgttatctgcgaggtctggtttgccttgtcttggcttctagatcagttcccaaaatggtatccaatcaaccgtgagacatatcttgacaggcttgcattgaggtatgatagaga

SEQ ID NO: 47356 - DNA, 224 bp, Zea mays
ccccaacttaacgccgaccggaggccggagagaccggctcagcctcgctccgccgccgctggcgaacatgtccatggcggctatcttcgtcttcctcatcgtgtccgcgctgcagctgctcgatcgctacctcgacctcgccagaaagagcggaggacttagtgatgagcagatcaaagtgcggcttgaaatcaagcaacttctcaaggaggctgatcagttgt

SEQ ID NO: 47357 - DNA, 218 bp, Zea mays
tgtcgcttgtccctaattggattgtgcacagaaagctactacaccccttccggaagcaggtgggtgggtccattttatcagccaaacttgcatttgagagaggttgggctattaatgttggtggaggatttcaccattgttcggcagatgaagggggtggattttgtgcatacgctgacatctccctctgcatccattttgcttttgtccgtctaaat

SEQ ID NO: 47358 - DNA, 219 bp, Zea mays
cagaaacaacaagactgacagcgacgatgatgccacagctgcgtacctcgtcgcgctggtcctcgtggccacggccatagccgccgctccctgcgttgggtttgtcgtcaccggccgcatctactgcgacaactgccgcgccgggttcgagacaaacgtgtcccacgccatccaaggcgcgacggtggagatggagtgccgccacttcgagtcgcagca

SEQ ID NO: 47359 - DNA, 209 bp, Zea mays
agccaagatgcctgaggaaacccagacccaagaccaaccgatggaggaggaggaggttgagacgttcgaccttcaggcagaaattgcccagttgatgtcattgatcatcaatactttctactcgaacaaagagatctttctgagagagctcatttcaaattcatcagatgcattggacaaaatccggtatgaaagcttgacagatccca

SEQ ID NO: 47360 - DNA, 125 bp, Zea mays
ctaccaccggacagaagaataagatcacgatcaccaacgataagggacggctaagtaaggaggagatcgagaagatggtgcaggaggcagagaagtacaaagccgaggacgaggaacaccagaag

SEQ ID NO: 47361 - DNA, 231 bp, Zea mays
cttgaatcgccttgtgtctcaggtgatctcatcgctgactgcttctctgaggttcgatggtgccctcaatgtggatgtgaacgagttccagaccaacctggttccttacccgaggatccacttcatgctctcctcctacgcaccggtgatctcttctgcgaaggccttccacgagcagctgtctgtggcggagatcaccagcagcgcgttcgagccggcttccatgatggt

SEQ ID NO: 47362 - DNA, 215 bp, Zea mays
caacaagatggcgtgcacaaacaatgcgatgagagccttgttcctcctggtcctcttctgcatcgtgcatggtgagaaggaagagtcaaagggcatcgatgcgaaagcgtccgggcctggtgggtccttcgacatcaccaagttgggcgcctccggcaatggcaagacagacagcacgaaggctgtgcaggaggcatgggcatcggcgtgcggcg

SEQ ID NO: 47363 - DNA, 225 bp, Zea mays
caacaagatggcgtgcacaaacaatgcgatgagagccttgttcctcctggtcctcttctgcatcgtgcatggtgagaaggaagagtcaaagggcatcgatgcgaaagcgtccgggcctggtgggtccttcgacatcaccaagttgggcgcctccggcaatggcaagacagacagcacgaaggctgtgcaggaggcatgggcatcggcgtgcggcggcactgggaa

SEQ ID NO: 47364 - DNA, 134 bp, Zea mays
gccgccactcactccctgatggtctgatgagggccaccgacgttatgatcgccggtaaggttgccgtggtctgcggatacggtgatgttggcaagggttgtgccgctgcactcaagcaggctggtgcccgtgtc

SEQ ID NO: 47365 - DNA, 215 bp, Zea mays
atttgtcttactatcgctctatccccaaaagtttggaacgttctacagctcataagcttatgttagccatgctaaaccatgatgaaaggtttctagagccatcgccacattcactgcagaagttgactcttcagtcagttaaagatgctgtcatgaaccagtttgtgggtagcaacatggaggtcagcattgttggtgatttcactgaagaagaa

SEQ ID NO: 47366 - DNA, 135 bp, Zea mays
ctccctccctcacacaaataataaggaaaggtcccgccctatttcctccgacatccacaaggggggaggggaaaacacgtacattcacccggcggcaataatggcctcggttccggctccggcgacgacgaccgc

SEQ ID NO: 47367 - DNA, 189 bp, Zea mays
aggaagtacaagttggaatgggtccaggaggtgagcttaggtatccgtcatacccaactgagaagctaaatcagccaggcagttcatctgaacttggggaatttcaatgttatgataagtttatgcaagcttcgttgagtgctcgtgcacagatttttgggttacaacagtggggcaatggcggttcaa

SEQ ID NO: 47368 - DNA, 133 bp, Zea mays
aggcaagcattattgcaggatctgctttagagcagctaaaaagctatattcatcagtcagcaaatgaaataccaaggacgattggtgaagcaattccaatgaaggcaacctttttttataacatatacaatgg

SEQ ID NO: 47369 - DNA, 267 bp, Zea mays
tcgaggaattcggctcgagggctgatggctcgtccaggccaaggcagtcgctggagcaggcccggcgcaacaagatgtcgcgcgcgcaggacggcatcctcaagtacatgctcaagatgatggaggtgtgccgcgcgcaggggtttgtgtatgggatcattccggagaagggcaagccagtgagtggtgcctccgacaacctccgtgcgtggtggaaggagaaggtccgcttcgaccgcaacggaccggccgccattgccaagtacc

SEQ ID NO: 47370 - DNA, 208 bp, Zea mays
gtgatttgaaataattgggaataaatagttcgtgaatccctgaagcgtgcatatatatattcctgccaagataaaggtaatggagtcgtcacgcaggttccagccggccgtcatcctgcttctcctgctcaggaatgcgagaagtacagtgagcgatttgttggggcatgcatgatcgcagacaactgcgccaatgtgtgccgcggtg

SEQ ID NO: 47371 - DNA, 263 bp, Zea mays
cgtgatctcaacccaaggcgtgcctccgctccggtcacccgtcgctccacgcaaccttgtcgtccagcaagaccagggagcccaaggaggagaacgtcacccttggacccactgtccgtgaaggagagtatgtctttggtgtcgctcacatctttgcatccttcaatgacaccttcattcatatcactgatttgtctgggagggaaactctggttcggatcaccggtggcatgaaggtgaaggctgaccgtgacgagtcgtca

SEQ ID NO: 47372 - DNA, 262 bp, Zea mays
ggcgcccgcaagctcgtggcggatcatctcctccatcgagcagaaggaggaaggccgcgggaacgaggcgcacgccgcatccatccgcgcctaccgctccaagatcgaggccgagcttgcccgcatctgcgacggcatcctcgcgctcctcgactcccacctcgtcccatccgccggcgggccgagtccaaggtcttctacctcaagatgaagggtgactaccacaggtaccttgctgagttcaagtcaggtgcagagagga

SEQ ID NO: 47373 - DNA, 209 bp, Zea mays
  unsure (1)..(209): unsure at all n locations
cataaccacaacctcttctcccctgtttcctctcgtgcgttctccgcagagcgaggagggctcgcggcacggcagggtctccggtgtttttgttccagaatctgtagcaaatggctgacggcgangacatccagccccttgtttgtgacaatggaactggcatggtcaaggctggttttgctggtgacgatgcgccaagggctgttttc

SEQ ID NO: 47374 - DNA, 177 bp, Zea mays
gatggcatcagcagagctttcccgtgaggaaaatgtgtacatggcgaagtcgctgagcaggcggagaggtacgaggagatggttgagttcatggagaaggtagccaagactgttgactcggaggagctcactgtggaggagcgaaacctcttgtctgttgcatacaagaacgtcatt

SEQ ID NO: 47375 - DNA, 267 bp, Zea mays
gaatacgaacgtcgtacgagaacctttctccctcctccacctttctccttttcttgccacggcaaaacaccttcgccggcgagagcatggcgatggcgtaccgtgtcctggaggtcaccctggtgtcggcaaatgacctcaagaaagtgtcgctcttctcccggactcgcatctacgccgtggcttccatctccggattcgacctcagcatcccttcccacagcacccaagcagaccacagcaacggctgcaacccctgctggaacg

SEQ ID NO: 47376 - DNA, 203 bp, Zea mays
tgattatccttcgcaatcatatctcacgaatccttcaacgccacttcaaaggaaagccatattatgttgatatcattgacttgttcaacgaggttgagttcaagacagcttcagggcaaatgttggatcttatcactacccacgagggtgaaaaggatctaactaaatataacttgacagttcaccgccgcatcgttcagtac

SEQ ID NO: 47377 - DNA, 177 bp, Zea mays
gggatcctgaagccgttccgctatatctcaaccatcatggatggtaaggaggctgaaatgcaaattgggttcccgacggatgtaaaacacgtggcacacatcggttgggatggtcctggctccaccaacaacaataacaacaacagcaacaacaatagtggcggagacctagctgga

SEQ ID NO: 47378 - DNA, 205 bp, Zea mays
ttggcattgacatcgacaataaaaagtttgatgttgcaaagaactttggagttacagaatttgttaacccaaaagagcatgacaaaccgatacagcaggtcctggtcgatcttacagatggcggcgtggattacagctttgagtgcattggaaatgtttcggttatgagggctgcactggaatgctgccacaagggctggggaac

SEQ ID NO: 47379 - DNA, 169 bp, Zea mays
ccaacgggacggtaagatctcgctgtcggagctgacggaggcgctacggacgctggggtccacctctgccgacgaggtgcagcgcatgatggccgagatcgacaccgacggcgacggctgcatcgacttcaacgagttcatcaccttctgcaacgccaacccggggctc

SEQ ID NO: 47380 - DNA, 260 bp, Zea mays
gtctcatcagcgaccctgttttctctttctggtttaaccgacatgctgatgaaggagaaggtggtgaaattgtgtttggtggaatggattctagccactacaagggtgatcacacgtttgtcccagtcactcggaagggatactggcagttcaacatgggtgatgtcctggttgatggaaagtccactgggttttgtgccggtggctgtgcagccatcgcagattctggaacttccttgcttgctggccccacagccata

SEQ ID NO: 47381 - DNA, 263 bp, Zea mays
gtttcatcgtgttcaagatcaacgagaacgtgcagcaggtggtggtggacaggcttgggggaccaggtgaaagctacgatgcgttcagggcctgctttcccgccaacgagtgccgctacgcggtgtttgattttgactttgtcactgatgagaactgccagaagagcaagatcttcttcatctcttgggccccagatgcatcgagggtgagaaacaagatgttgtacgcaagctccaaggaccggttcaagagggagctcgac

SEQ ID NO: 47382 - DNA, 176 bp, Zea mays
ggagaggaggcactctcgtctgaggatctgctttacttagagttccttgacaagtttgagaggaagtttgtgacacaaggagcatatgacacacggaacatcttccagtcactcgatcttgcatggacattgcttcggatcttccctcgcgaacttctccaccgtattccagcaaa

SEQ ID NO: 47383 - DNA, 170 bp, Zea mays
ggtccaacgtgttgtggaaatattaaagcttttcaacactaggacttgccaacttgttctcggtgcaggagccatgcaggtgtctggacttaaatcaattacgtccaaacatttagctttggcgagtcaaatcattagttttatgcattctttaattccagatatcaggg

SEQ ID NO: 47384 - DNA, 275 bp, Zea mays
ctccaaggagcgcaccgcggaggccagcgaagatgcccgggctcacggcaccgtccgactacgcggaggagccgccgcgtcacccggccctcaagatcaactccaaggagccattcaatgctgagcctctccgatcagagctagtcgcatcttacatcaccccagtggatttcttctacaagaggaatcatggacccatccctaaagtcgaggacctctcaagatacgctgtttccatttctggtctcgtcaacaagtccattcagctatcgatg

SEQ ID NO: 47385 - DNA, 272 bp, Zea mays
gacactgctgttcttctctcgggggcaacaatcgtggatcgtgctgtcattataagtcccgctgagaactatcagctgcctctggaagcacacaaacaattatcgggagcaaacgtctctactgaatcagcagtaaggaaggcagaagatgttgtgagcagcatgctggccaagggcttcgtcctcagcaaagacgctctcaacttggcgagatcatttgacgagcgtcacaacatcctatccaacgccactgccactgttgcatccctaga

SEQ ID NO: 47386 - DNA, 271 bp, Zea mays
gctaaaggtgtgattaagaaagttgtagactgggaagaatcacgctcgttcttctataaaaggctacggaggaggatcgcagaagatgttcttgcaaaagaaataaggcagatagtcggtgataaatttacgcaccaattagcaatggagctcatcaaggaatggtaccttgcttctcaggccacaacaggaagcactggatgggatgacgatgatgcttttgttgcctggaaggacagtcctgaaaactacaaggggcatatccaaaagc

SEQ ID NO: 47387 - DNA, 282 bp, Zea mays
gtgggatcgagttgtttcactgcacgagcacatcctccggcgaccaccggcctccctctccgtcctctagcgaccgaccaacgcgtcgagcgaagatgtcgtggcagacgtacgtggacgagcacctgatgtgcgagatcgagggccaccacctcacgtcggcggccatcgtcggccacgacggcgccacctgggctcagagcaccgcattccccgagttcaagcccgaggagatggctgccatcatgaaggatttcgacgagccggggcaactcgccccga

SEQ ID NO: 47388 - DNA, 274 bp, Zea mays
ctcacctcccggtccgctagcagatagcgggggccagagagatcgagatccggaggcgctagcgccacccatcagcgtctgcggcaatggcgggcacggtgacggtcccggggtcgtcgaaaccctccacgccgctgctcaaggacgagctcgacatcgtgatcccgacgatccgcaacctcgacttcctcgagatgtggaggcccttcttccagccctaccacctcatcatcgtgcaggacggcgacccgaccaagaccatcaaggtccccga

SEQ ID NO: 47389 - DNA, 276 bp, Zea mays
gcacacaccgcccgtccccgatctccgatcccctcgtcgatccaaagatgcagatcttcgtcaagaccctcactggaaagactatcaccctcgaggtggagtcttctgacaccattgacaacgtcaaggccaagatccaggacaaggagggcatccccccggaccagcagcggctcatctttgctggcaagcagctcgaggacgggcgcacacttgccgactacaacatccagaaggagagcaccctccaccttgttctccgcctcaggggaggca

SEQ ID NO: 47390 - DNA, 270 bp, Zea mays
ctagaagcttgctcctgagtatgaaagacttggtgcaagttttaagaaagctaaatctgtcttgattgctaaggttgattgtgatgagcacaagagtttgtgcagcaagtatggagtttccgggtatccaacaatccaatggttcccgaaaggatccttggagcccaaaaagtatgaaggacaacgcactgcagaagcccttgctgaatttctcaatactgaaggaggcacaaatgtaaagctggcaaccattccttcaagtgttgtggt

SEQ ID NO: 47391 - DNA, 273 bp, Zea mays
cagacgacgagatggccgatgcggaggacgccgccgccgcgcgccgacgggccgccataaccgactaccgcaagaagctgctcaactgcagggagctcgagtcgcgcgtcggcaccgtgagagaaagccttaaaaatgcaaagagggattttaccaagactgaagacgacttgaaatctctgcagagcgtggggcaaataattggagaggttctccgacctcttgataatgaacgctttattgtgaaggccagcagtggtccccgatatgtgg

SEQ ID NO: 47392 - DNA, 269 bp, Zea mays
tgggttcccagcccgtgcgcccgcctgtcgcagtcgcaccgcagccgccggccatggcctgcctcaccgacctcgtcaacctcaacctctcggacaccacagagaagatcatcgccgagtacatatggatcggtggatctggcatggatctcaggagcaaagccaggaccctcccgggcccggtgaccgatcccagcaagctgcccaagtggaactacgacggctccagcaccggccaggcccccggcgaggacagcgaggtcatcctg

SEQ ID NO: 47393 - DNA, 271 bp, Zea mays
tatcctccatcaccaccaccaagctcaacaacagccagctagcgaaaataatgaagagccgcagcatggcatcatcggccgcgctcttggtgctagccctcgcgctagtggcggccaccgccccacaggtagcggaggcaaagaagaagagagcggcggagagcggcgaggcggcggaggcgaagaagatccaggacgacttctgctcgacgctgtgcgagggcaagaacgggacggacctggtcgtgtgcaaggagtcctgcgcgctctc

SEQ ID NO: 47394 - DNA, 153 bp, Zea mays
agattctcggccaacttcaccatcccaacttggttttactgcttggattttgtcctgaaattggatgccttgtgtatgaatacatggagaacgggagcttagaagatctacttatcaacgataaagggcagccactccattggtttcttcggt

SEQ ID NO: 47395 - DNA, 265 bp, Zea mays
  unsure (1)..(265): unsure at all n locations
ccggcgacctacaggtcctcgtcttcacggtgactttcctcgccggggtcttccaggtctccttcggcctcttcaggctggggtttctcgtggatttcctgtcgcacgctgccatcgtggggttcatgggcggggcggccatcgtgatcgggatgcagcagctcaaggggctgcttggcctcgcccatttcaccaacagcaccgatgttgtttctgtcctcaaggctgtctgctctgcactacgacatgacncgtggcacccggg

SEQ ID NO: 47396 - DNA, 266 bp, Zea mays
aatcaacagaagacagagattttcaaagattcctggacaacgtgcaatacaaaacaagtgggatattacgttatgagcgtgtctttggtgaaggttttgtgagcactggtggaatcgagactacaaaggaatttgtgggcatgctcgatcttaaaccgggccagaaagtacttgatgtcggatgtggaattggaggcggcgacttttacatggctgcaaactatgatgtccatgttcttggtattgatctttcggtgaacatggtt

SEQ ID NO: 47397 - DNA, 264 bp, Zea mays
tggtcaaccgcggcactacttctggtcgctcggcgcgcgggcgttctacttctcctgccccgtcttcctctggctattcggccccatcccgatgttcgtggcgtgcgtcgcactggtctgcgcgctctacttcctcgacgtgtgcaaggactgggaggaggaggaaggcgacggccatggccaccgctgtacgagtgatgacgagaggagggcaacaacacaagggaaggatgcagagcagcaagtgtagagatggatgtgcta

SEQ ID NO: 47398 - DNA, 264 bp, Zea mays
atccttttctcggcacctcgcgggtctcccgtccgccccgtcccgcattcgtatcctctcctcactctcgccgccgccgcttcccctgcgccccgagccaagatgaatgttgaaaagctcaagaagatggcaggtgctgtgcgcactggggggaagggtagcatgcgcaggaagaagaaggcagtccacaagactacgaccacagatgataagaggcttcagagcaccctgaaaagaataggagtgaacaccattcctggtatt

SEQ ID NO: 47399 - DNA, 263 bp, Zea mays
gtattccattgctcgtggacaaaagattccactgttttctgctgctgggctccctcacaatgaaattgctgctcagatttgtcgtcaggctggtcttgtgaagacattggagaaaggaaagcatgctgagggtggtgaagatgacaactttgctattgtgtttgctgctatgggagtgaacatggaaacagctcaattcttcaaacgtgattttgaagagaatggttccatggagcgggtcacctttttctgaatctggctaa

SEQ ID NO: 47400 - DNA, 264 bp, Zea mays
ggaaaacccccaacattaattgagagagatgaaagcctggataagtttgacccagtaaaactaaagaaacttcgcccaagtttcaaggagaatggtggtacagttacagctggaaatgcttctagtataagtgatggagctgctgcattagttttagtgagtgggcagaaggctcaagagcttggccttcaagtccttgcaaggatcaaaggttatgctgatgcagctcaagctccggagctttttacaaccactccagcactt

SEQ ID NO: 47401 - DNA, 223 bp, Zea mays
gcatcgatcacgacaagatggcgtgcacaaacaatgcgatgagagccttgttcctcctggtcctcttctgcatcgtgcatggtgagaaggaagagtcaaagggcatcgatgcgaaagcgtccgggcctggtgggtccttcgacatcaccaagttgggcgcctccggcaatggcaagacatacagcacgaaggctgtgcaggaggcatgggcatcggcgtgcgg

SEQ ID NO: 47402 - DNA, 279 bp, Zea mays
cctgtgccacctcgccgccgtcatgacaacagggtcaacaccgggttcgcccccctctcaaggctctcagagaaaacgaggttctacaaaagattctgttgccttgtacgcatgcaatgctacaagtgctacaaatggcgtactgttccaaaagaagaattcgagacactccgtgagaacttcaccaaggatccatggttctgcagcagacggccagactgctcctgcgaagacgatgctgacatcgagtacgacagcagccgtatctgggttctggac

SEQ ID NO: 47403 - DNA, 279 bp, Zea mays
gccgccaccaggtgcagagtctttcgtcatctcttctccggcgaagaacccccagtcgcccaccagatcacttgttaaactttgttgaggggtgatggcggtttctttcgcaaacctcaactccgaggcagggcttaaaaagcttgatgagtaccttctcactcgcagctacatcactggctaccaagcttccaaggttgacttggctgtctacacttcgttttcggctgctccctcgtccaagtatatcaacgtagcaaggtggtttaaccacattga

SEQ ID NO: 47404 - DNA, 280 bp, Zea mays
ccacaagcgagcgagggacccggggcggaagaagagagagaagacgtctctctcctctcggcgtccccgttccccaacctctcgtctgctgcctgcctgcctgcctgcctgcaaaaaggagtttgtcatggcgtctaagcgcatcctcaaggagctgaaggacctgcagaaggacccccccacatcatgcagtgcaggtcctgctggtgaggacatgtttcattggcaagcaacaattatgggaccacctgacagtccctatgctggtggtgttttttta

SEQ ID NO: 47405 - DNA, 282 bp, Zea mays
tctcagatccaccgactcgctctgagtctctgaccgccccttccgtcgtccccgttcgaaggcgcggcaagcgagcgattcagccagattcgattcgacatgaatcccgagtacgactaccttttcaaacttctgcttattggtgattctggtgttgggaaatcatgcttgcttctcagatttgcggatgattcatatttggacagctacatcagcacaattggggttgattttaaaattcggacagtagagcaagatgggaagaccataaaacttcaaatt

SEQ ID NO: 47406 - DNA, 278 bp, Zea mays
atcgatcacgacaagatggcgtgcacaaacaatgcgatgagagccttgttcctcctggtcctcttctgcatcgtgcatggtgagaaggaagagtcaaagggcatcgatgcgaaagcgtccgggcctggtgggtccttcgacatcaccaagttgggcgcctccggcaatggcaagacagacagcacgaaggctgtgcaggaggcatgggcatcggcgtgcggcggcactgggaagcagacaatcctcatacccaagggtgacttccttgtcggacaact

SEQ ID NO: 47407 - DNA, 273 bp, Zea mays
tgtgaaggctttctttgatgactacaaagatgcccacctcaagctctccgaactggggtttgctgatgcttaaatagaccctatcttggagtgatacattctgctgcctgtatggaatcatgtggtcttttgcatctggagtcaatgtgaacaagcagattgtcgtattgtctttctcgtaataaatttgtcgatgttgagcccttaggctgttgttggtacattggtacttcgtcgatgcttgaattgggaccctttgtccgttttcctaga

SEQ ID NO: 47408 - DNA, 277 bp, Zea mays
gcagaccccagcagaagaagcgaagtcgtcgccggagcaggaggaagagcgaggagcaacatgtcgtggcaggcgtacgtcgatgaccacctgctgtgcgacatcgaaggccagcacctcagcgccgccgccatcgtcggccacgacggcagcgtctgggcacagtccgagaacttccccgagttaaagcctgaggaggttgctgggatgataaaggacttcgatgaacctggaactcttgcaccaactggtctttttgttggaggtacgaagtaca

SEQ ID NO: 47409 - DNA, 277 bp, Zea mays
cgcccagcgtcggagatctccgccgccatggagacgctggccagcgccatgcggcgcgagatccgccggtccaaggccccgccctcctcctctgcttcctccgccctcgcctcgggcagggtccctctcgtcatggccttcctctcctgcctcgcctggctctacgtcgccggccgtttgtggcaggacgcgcagacccgggcgatcctgtccggcctcctcgagaagagctctaccagcgtcccgaagtgctctcggtggaggacaagcttaggaa

SEQ ID NO: 47410 - DNA, 272 bp, Zea mays
tggggagcttcgaccgattcgtcccggcctcccgtcccgccgctggcctcgcctgccccgatggcggcggtggcgatccaccagttcgccgagtgcatcacctgccacgcctggagcccggaccagtcgacatgatcagatggtttcggggatagactggagtaaatcatccaacaaaatcgtaacagtttcacatgatagaaattcatatgtttggacacaagaaggatctgattgggtacctaccctggttattctaaagttaaatcgtg

SEQ ID NO: 47411 - DNA, 261 bp, Zea mays
cacttttactctcctaacatcatggccttggggaggggctcaatggaccacaattccctctgcgcagagcccgaccccacaattaacgtccaccttatggacaagtacacattctatgtcatcgaaattttagaagagattactccagctaaccaaactaacatgcataacctttttcaagtgtgtcccaaaagcctactgtgtgtctacccctggacatcgtactgaccttttccagcgatatcctaaaaacgtcctgat

SEQ ID NO: 47412 - DNA, 271 bp, Zea mays
tcgacaagatggcatgcacaaacaatgcgatgagagccttgttcctcctggtcctcttctgcatcgtgcatggtgagaaggaagagtcaaagggcatcgatgcgaaagctgtccgggcctggtgggtccttcgacatcaccaagttgggcgcctccggcaatggcaagacagacagcacgaaggctgtgcaggaggcatgggcatcggcgtgcggcggcactgggaagcagacaatcctcatacccaagggcgacttccttgtcggacaac

SEQ ID NO: 47413 - DNA, 273 bp, Zea mays
cattcgttccccttctcgcctccacgagccttcacaaattgccctctcagctcttctcctaatctcactctagccctagccaaatcccagacccatcccagccctagcgacaccaaccagctcgccagcgaccatggggaacccggagaagctgatgaatcagatcttcgacctcaagttcacctccaagtcgctgcagcggcaggcgcgcaagtgcgagaaggaggagaaggagcagaagctcaaggtcaagaaggcgatcgagaagggcaa

SEQ ID NO: 47414 - DNA, 272 bp, Zea mays
gatggttgcagcatcaaagcttcgggctgttcagacgaggactgaaaattcacgcggcttgtggcagccgttcaccgcccttcttggggacgctcctagtgttgacgtcaagaagaatgtgattgtggccattacctctgataagggactctgtggtggtatcaattcaacctcggtgaaagttagcagggcccttcacaaactgacatctggtccagaaaaagaaagcaagtatgttatattaggagaaaaaggcaaagttcagctgttgc

SEQ ID NO: 47415 - DNA, 272 bp, Zea mays
cgaacgtcgtacgagaacctttctccctcctccacctttctccttttcttgccacggcaaaacaccttcgccggcgagagcatggcgatggcgtaccgtgtcctggaggtcaccctggtgtcggcaaatgacctcaagaaagtgtcgctcttctcccggactcgcatctacgccgtggcttccatctccggattcgacctccgcatcccttcccacagcacccaagcagaccacagcaacggctgcaacccctgctggaacgccgtggtaca

SEQ ID NO: 47416 - DNA, 272 bp, Zea mays
tcgctgaaattgttagcaaaagcacgttactctctagcaacctttgagggggaggaaattgttattgtgtcgcaggttttggcgcacgaggtcaacattgggtatgagcacatgggcaatcaacaagtcatgaaactaaacggaaccacaataaagaatatccatcaccttgctcatcttgtggacacctgtaaagacaagttcctgacgttcgaattcgaagacgacttccttgttgttttgcatcgagaagaagcggatgctgcatcatc

SEQ ID NO: 47417 - DNA, 221 bp, Zea mays
cagcctgctcgttctctcaatggtgctggcctttgtcctgctagtagatcacttagcacccaggccgccactacgtcaagcacaccacaacctccgcctcccccaccccctccagagaagactcactttggtggcctcaaagacgaggatcgcattttcaccaacctctatggtctgcatgacccttttctgaaaggcgcgatgaagagaggtgactggta

SEQ ID NO: 47418 - DNA, 200 bp, Zea mays
tgagaatattgaggagattgctttgaagatctctcaacttcctttggcttcaggcaagcaaaagaggattgctgtgattactcaaggtgctgatccagtggttgttgctgaggatgggaaggtgaaaacgttccctgtgatcctattgcccaaggagaagcttgttgacacaaacggcgcaagtgatgctttcgttggag

SEQ ID NO: 47419 - DNA, 233 bp, Zea mays
ctagtcccctgctccattctcagccgccgccaatccctaccggtgctccgcaaccgctgagtgagaagaagagatggccggcaagggcgatggcacggctatcggcatcgatctcggcacgacgtactcttgcgtcggcgtgtggcagcacgaccgcgtcgagatcattgcccacgacccaggtaaacgcaccacgcctcgtacgtcgccttcacgactcgaggactcatcga

SEQ ID NO: 47420 - DNA, 73 bp, Zea mays
caattgcggtggccaccacttccaatccactccacgcgtcaacctcgccgagctgttcttgctctgtcctctc

SEQ ID NO: 47421 - DNA, 167 bp, Zea mays
cagcagcatccatcgcgtgcgtacattaatctaagcgatcttcatccagccttctgctctgctccctcgaaatggaggcgacgagcaaggcgatggcttcaggcctcctcgttctgctgcttctcatcaacacaggctttgtcctgcccgtccattccgaggactgc

SEQ ID NO: 47422 - DNA, 242 bp, Zea mays
tgtgccccgctgatagcagaggcaaagaagaagagagtcgccgccgccgccgccgaggagaagaaggtgcaggacaacttctgctcgacgctgtgcgagggcaggaaggggatggacctggtggtgtgcaaggagtcctgcgacctctcacagcgctccaacctggtgctgtacggacggatccagtgcaagggcaagtgcaccgagcagaaaggtcatcacgcgccgcagatgaaagtgtg

SEQ ID NO: 47423 - DNA, 231 bp, Zea mays
tcgacaagatggcatgcacaaacaatgcgatgagagccttgttcctcctggtcctcttctgcatcgtgcatggtgagaaggaagagtcaaagggcatcgatgcgaaagcgtccgggcctggtgggtccttcgacatcaccaagttgggcgcctccggcaatggcaagacagacagcacgaaggctgtgcaggaggcatgggcatcggcgtgcggcggcactgggaagcaga

SEQ ID NO: 47424 - DNA, 82 bp, Zea mays
ctcacgactgatggctacatccttgagggtaaagagctcgagttctacatgaagaagctccagaggtagaaggtcaagggtg

SEQ ID NO: 47425 - DNA, 281 bp, Zea mays
tgtggtctttgcgccaccgctttagggcttattcgtttctgtcggattgcaccagaatcgttccagctaatcaaagtttatataaattagagaagcaatccggtcaggaatcgttccaacccactaatccggcacaaacgaacaaggccttaggaaaattgctgctaaattgtgtgcgttaccctgtttgtgctgttgttgtaggctggttccggtgccggcgctttgctcagtgctgtgcacgggtttaacacagggatccttttgtccagaagcatgtc

SEQ ID NO: 47426 - DNA, 290 bp, Zea mays
gggttgcccaatggatgcttcaaattcctggtgcatcaagttacataggttgcatcgggaaggataagtttggtgaggagatgaaaaaaaatgcacaagctgctggtattaatgcccattatcatgaggatgataatgctccaacgggcacatgtgctgtttgtgttgttggtggagaaaagtcacttattgctaacctgtctgcggcaaactgctataagtctgaacatctgaaagaacctgagaattgggcactgttgagaaggcaaatatattacattgtggatttt

SEQ ID NO: 47427 - DNA, 282 bp, Zea mays
atcgatctcgtttcaaatccatccatcctcgtttcctccgtcccgcagcatctcaaccccatggccaagatcaagatcgggatcaatgggttcggcaggatcggacagctggtggccagggtggccctgcagagtgacgatgtcgagctcgtcgccgtgaacgaccccttcatcagcaccgactacatgacctacatgttccagtacgacactgtgcacggacagtggaagcaccatgagtcaaggtgaaagactccaaacccttctcctttgtgagaagga

SEQ ID NO: 47428 - DNA, 166 bp, Zea mays
gcgaccaccaagcagagcaagccagtgaggtctctcagagcgtagccagccagctacaatggcggggaacgcgctagccaactatgtccaggtctacgtcaggctcccgctggatgtcatcactgtcgacaacacgttcgagaaggaggacgagacgagggcgcac

SEQ ID NO: 47429 - DNA, 268 bp, Zea mays
gtagtcgaggaggctcaacgtgcaataaatgctgctcatgtggaggctgtaagtgctgagaatggtataggtcttgtcaagctaatgggtcggcacagtggttttattgcacattatgctactctggctagcagggacgtggattgttgcttgatcccagaatcaccgttctatttggaaggcgaaggcggactttttagatacattagaaaacgtttgaaggacaatggtcatatgggtatcgtgttgctgaaggtgctggacagaa

SEQ ID NO: 47430 - DNA, 269 bp, Zea mays
agcaaacctgcagtcatctcctccaccaccaccaccaagctcaacaacagccagctcgcgaaaataatgaagagccgcagcatggcatcatcggccgcgctcttggtgctagccctcgcgctagtggcggccaccgctccacaggtagcggaggcaaagaagaagagagcggcggagagcggcgaggcggcggaggcgaagaggatccaggacgacttctgctcgacgctgtgcgagggcaaaaaaggggacggacctggtcgtgtgca

SEQ ID NO: 47431 - DNA, 223 bp, Zea mays
caataagatggcgtgtatagacaatgcaatgagagccttgttccttttagcgctcttctgtgtcgtgcatggtgagaaggcaaagtcaaaggacaacgaaggcaaagcgtccgggcacggtgggtccttcgacatcaccaagttgggcgcctccggcaatggcaagacggatagcacgaaggctgtgcaagaggcgtgggcatcagcgtgcggcggcaccggg

SEQ ID NO: 47432 - DNA, 257 bp, Zea mays
tggatgggtggccagcattatctatacatggtgataaagctcaagctgaacgggactatgttcttgcagagtttaagagcggcaagagccccataatgtctgccacagatgtggcagcacgtggtcttgatgtgaaggacataaagtgtgtgataaattatgattttccaacaactcttgaagattatattcacaggataggtcgaactggccgtgctggtgctagcggaactgcatttacttttttcacacacgca

SEQ ID NO: 47433 - DNA, 256 bp, Zea mays
  unsure (1)..(256): unsure at all n locations
tcgggcgatggcatggcgggcgagcctgtctcgaagcctaaaggagatccgcgtcctcttctgtcagtcctccccggccagcgccgccgcccgtgagttcgtgaagaagaactatggtgacatcaaggctcgcaacccctcnctcaccttccttgtccgcgagtgctccggtgtccagccccagctctgggcgcgctacgatatgggtgtggagagatgcgtgaacttggatggcctgatcggagcacagattgat

SEQ ID NO: 47434 - DNA, 308 bp, Zea mays
tggaggccaaggtggtggtcagctcctgcggccacgacgggcccttcggcgccaccgggtcaagaggctccaggacatcggcatgatcagcgccgtgcccgggatgaaggcgctcgacatgaacgccgccgaggacgagatcgtgcgcctcacgcgcgaggtcgtgcccggcatgatcgtcaccgggatggaggtcgcagagatcgacggcgccccgaggatgggcccgacgttcggcgccatgatgatctccggccagaaggcggcgcacctggcgctgaaggcactgggcaggctcaacgccgtgg

SEQ ID NO: 47435 - DNA, 299 bp, Zea mays
ctgacccgtgcacaagggcatgccgcacaagttctaccacggccgcaccgggagcgtctggaacgtcaccaagcgcgccattggcgtcgagatcaacaagcaggttaacggtcgcatcatcaggaagcggatccatgtccgcgtggagcatgtgcagccctcccgttgcacagaggagttccgcctgaggaaagccaagaatgaccagctcaaggcggatgccaaggcccgcggtgaggtgatcagcaccaagaggcagcctgtgggacccaaacctggcttcatggtcgagggtgcta

SEQ ID NO: 47436 - DNA, 279 bp, Zea mays
cgacaagatggcgtgcacaaacaatgcgatgagagccttgttcctcctggtcctcttctgcatcgtgcatggtgagaaggaagagtcaaagggcatcgatgcgaaagcgtccgggcctggtgggtccttcgacatcaccaagttgggcgcctccggcaatggcaagacagacagcacgaaggctgtgcaggaggcatgggcatcggcgtgcggcggcactgggaagcagacaatcctcatacccaagggtgacttccttgtcggacaactcaacttcac

SEQ ID NO: 47437 - DNA, 300 bp, Zea mays
aaggttggttcagaagttgctcgtcgcgctaaaggtttaggaatgcatgtgcattgcacatgatccatacgcttctgctgatcgggcccgtgcaattggagttgagctagttagtatggaggaggccatgacaactgctgacttcatctcattgcacatgcctcttacccctgcaacaaacaagatgctcaacgatgaggcctttgctaagatgaagtatggtgttcgcattataaatgttgcacgcggtggtgtgattgatgaagatgctctagtcagggctcttgattcaggaatagt

SEQ ID NO: 47438 - DNA, 291 bp, Zea mays
gataccattctcgaggaattcgaattcgaagaagctgataaggtggcagaatgctaccctcaaggttaccatggggttgataaggaaggcaggcctgtctactttgaacggcttggacagatcgatgtgaataggctaatgcaggtcactacaatggatcgctttgtcaagaaccatgtcaaggagttcgagaagaactttgctgttaagttcccagcttgctcaatcgccgcgagcaccatattgaccagagcacaacaattcttgacgtgcaaggagtggggatgaagc

SEQ ID NO: 47439 - DNA, 301 bp, Zea mays
tatttcgaataacacagttgagcgcgacgatgggatccctcgctaataacatcatggtcgtgggtgtcgtccttgcagcgctcgtcgccggcgggtcatgcgggcccccgaaggtgccgcccggtcccaacatcaccaccaactacaacggcaagtggctcaccgccagggccacctggtacggtcagcccaacggtgccggcgctcctgacaacggcggtgcgtgcgggatcaagaacgtgaacctgccaccctacagcggcatgacggcgtgcggcaacgtccccatcttcaaggacgg

SEQ ID NO: 47440 - DNA, 299 bp, Zea mays
cactcgcccaaaaccgtagcgccctcgcctgctcgccgccgccgtcgttgcgagctccccatcttcctccgttaaccatggcgacccagatcagcaagaagaagaagttcgtcagcgacggcgtgttctacgccgagctcaatgagatgctgacgcgggagctcgcggaggacggctactccggcgtggaggtgcgtgtcacaccgatgcgcacggagatcatcatccgcgcaacggcacgcagaacgtgctcggcgagaagggccgcaggatcagggagctcacgtctgtggtccaga

SEQ ID NO: 47441 - DNA, 277 bp, Zea mays
cagcaatcggaattctctgcgatttctctagatctcgactatcccccactagttttggttcctcctttcgttcgagagagcgattctggtggcaatggcgaagagcgatggtccggcgatcgggatcgacctcggcaccacctactcgtgcgtcggcgtgtggcagcacgaccgggtggagatcatcgccaacgaccaggggaaccgcaccacgccgtcctatgtcggcttcaccgacaccgagcggctcatcggcgacgctgccaagaaccaggtc

SEQ ID NO: 47442 - DNA, 298 bp, Zea mays
gtcacaataagatcgcgtgtatagacaatgcacttcgagcattgttccttttagcgctcttctgtgtcgtgcatggtgagaaggcaaagtcaaaggacaacgatgcaaaagcgtccgggcccggtgggtccttcgacatcaccaagttgggcgcctccggcaatggcaagacggatagcacgaaggctgtgcaggaggcgtgggcatcagcgtgcggcggcaccgggaagcagacgatcctcatccccaagggcgacttcctcgtcggaccactcaacttcacaggcccatgcaaggg

SEQ ID NO: 47443 - DNA, 290 bp, Zea mays
gtcagaaaagtaccagagccacttcagtgcgtacattaagaagggagttgaggctgaggaaattgaagccctgtacaagaaggttcatgctgccatccgtgctgatccttcggttgttaagtcaaccaagcagccaccaaaggagcataagaggtacaaccccaagaagctgacatatgagcagaggaaggccagcctcattgaaaggctcaaccaactcaactcctccggtggtgctgatgacgacgatgaggacgacgagtaaagtttagtgccatcgaagtggtgct

SEQ ID NO: 47444 - DNA, 295 bp, Zea mays
cggcgtctacggcctggactacgagggccacggccgctccgacgggctgcagggctacgtgccggatttcgacgcgctggtgctggactgcgacgagtacttcacctcggtggtggcggcggcggcgcagtcgcagtccaaggacgcccaccaacttccccggttcctgctcggggagtccatgggcggcgccgtggctctcctcctccaccgccggcgccccgagtactggagcggcgccgtgctggtggcgcccatgtgcaagatcgccgacgacatgcggcctcacccgctg

SEQ ID NO: 47445 - DNA, 294 bp, Zea mays
tctcgagcgaattcggctcgagtgcggtcgtccacatccttgtctctcctcctcgacgtgcccaacctgattgttcatcaaccaagaggaagaaaggaaggaagggaccggaagcatcagccatgtcgaactcggcgtcgggaatggccgtctgtgatgaatgcaagctcaagttccaggagctcaaggcaaagaggagcttccgcttcatcgtgttcaagatcaacgagaacgtgcagcaggtggtggtggacaggctaggggagccaggcgagagctacgacgccttcacgg

SEQ ID NO: 47446 - DNA, 292 bp, Zea mays
gacggtggccaaggacggcagcggcgacttcaggaccatcaacgcggcgctggccaaggtgccgctgaagagcgccaccacgtacgtcatgtacgtgaaggccggcaagtacagggagtacgtgtccgtggcccggaacgtgacgaacctggtgatggtcggcgacggcgccaccaagacggtgatcacgggccacaagagcttcatgatgaacatcaccaccaaggacacggccacgatggaggcgatcgggaacgggttcctgatgcgcggcatcggcgtgaagaacacg

SEQ ID NO: 47447 - DNA, 234 bp, Zea mays
cccaagaagacggcggagaaggcgtccagtgtggggaacaaggaggcaaagtcgcccaagatggccgccaagtcccccaagaaggcatagactgactgtctggagtgatctgatgtttagcaggaccttgataccagtatgcggtgatgcgtaggctgtagatgggtcgaatgtgcttgtgtgtgtatgtgccctgctgcaagttgccctttgctatttaaaatggaagaagaa

SEQ ID NO: 47448 - DNA, 286 bp, Zea mays
atcggatctgagacgagacgagtcccctccccccacctcgcctcacccaaccggaacgaacaagttacaatctcatcccaaccccgcctcgaccggatctcgtcggactcggatccgcccgaccaccccgcgccgccgcagatcaaagaagatggcagctgtcgacacattcctcttcacctcggagtctgtgaacgagggacaccctgacaagctctgtgaccaggtctcagatgccgttcttgacgcttgccttgctgaggaccctgacagcaaggttgcttgt

SEQ ID NO: 47449 - DNA, 277 bp, Zea mays
gctaccctcgtcgtcgtctcactcaccccgccttcacgcctccctcaccaaataaggtccagctcttttccgacattcacaggggggacaggaaatcagcggccatggcctcgattccggcgacgaccttcgccgtcatcttatccgtcctcttctgtgccgcggctggcaccgccgtcgacaacgacctccccgactacgtcatccagggccgcgtctattgcgacacctgccgcgccgggttcgtgaccaatgtcaccgagtacatcgcgggcgc

SEQ ID NO: 47450 - DNA, 268 bp, Zea mays
gtcgcctcaccgcgtctctcaatctgctcccgcagatccgtcgtccgatgagtgggggtctcacgaacccatggcctccggcgagcttgcctgcacctacgccgctctcatcatcagcggcgatggcatcgccatcaccgccgagaggatccccacgatcgtgcatgcggccaccatcgacgtcgagtcctactggccggccctcttcgccacgctcctggagaagcgcaacgtcgaggagctcatcctctccgttggatctggtggc

SEQ ID NO: 47451 - DNA, 284 bp, Zea mays
agaccagagaaatcgtcgaggccctaagcagaccgagcagtgaatcaaaagaacttactttcgccacgaagtatgctcaaccattttgtgctcagtatatggcttgcctatggaagcacaacctatcgtactggaggaaccctcagtacaccgcagttagattcttctacacagttattatttccttgatgtttgggacaatttgctggaaattcggttctagaagggggacccaacatgatatattcaatgcgatgggtgccatgtatgcagcggtgctgttc

SEQ ID NO: 47452 - DNA, 312 bp, Zea mays
atttcgaataacacaggtgagcgcgacgatgggatccctcgttaataacatcatggtcgtgggcgccgtccctgcggcgctcgtcgccggcgggtcgtgcgggcccccgaaggtgccacccggccccaacatcaccaccaactacaacggcaagtggctcaccgctagggccacctggtacggtcagcccaacggtgccggcgctcctgacaacggcggtgcgtgcgggatcaagaacgtgaacctgccaccctacagcggcatgacggcgtgcggcaacgtccccatcttcaaggacggcaagggctgcgg

SEQ ID NO: 47453 - DNA, 270 bp, Zea mays
cttctgcggactggcaatgtaagcgttctccatcggagggcgacgatctacggggcggttgttggcggggtcgcgggaatggagcacgtgttcggagggaagtttaagcttgggaagaagatcgggagcggatccttcggcgagctctatcgcggcgtcaacatacagagcggcgaggaggtggctatcaagttggaatctgtaaaatcaaggcatcctcagcttcattatgagtcgaaactatacatgcttctccaagggggaactgga

SEQ ID NO: 47454 - DNA, 302 bp, Zea mays
actgcccctactacaactgcgagcacaagtacgtgtccggggtgactctcaatgacattcacttcaagaacatcaagggcacggcgacgacgccggtggcggtgttgctccggtgcggtgtgccgtgcaggggtctggtgctgcaggacgtggaccttaggtacaaggggcagggtggtacatcggccaagtgcgagaacgccaaggccaagtaccttggctaccagtttcccaaaccctgcccctaggtgccggtgcttatccggccgtattttagctcatctctgtccactctctggtgt

SEQ ID NO: 47455 - DNA, 321 bp, Zea mays
  unsure (1)..(321): unsure at all n locations
cttcagacgaccagcaggaggtacgagcaagaccacctaggaggcctctctctctctctccccagccacccccgtagcgagagggagggcggaagaggatgagcgcgtccaggttcataaagtgcgtcacggtcggggacggcgccgtcggcaagacctgcatgctcatctcctacacctccaacaccttccccaccgactatgttccgacagtgtttgataacttcagtgccaacgttgtggttgatggtaatactgtcaactcggcctctgggacactgcaagtcaagnagattacaacagactgagaccactgagcta

SEQ ID NO: 47456 - DNA, 283 bp, Zea mays
cgcgagttgcttgcctccctagagcagatgcggggtagcagcggaccctccaatacagaagggactactgaggggtgcagctgatttagtggcacctactatggcacctagtgcggaggcgactgtggacgcggaggctgaggaaactgccgtagaactggacgatggagaggagacatcgggagcagacgcttctacagaggaggctgacacacaggctgcgccacggcgtgccatcaggtatcgtcggtccctcacattgaaaccttctaaacccttcgat

SEQ ID NO: 47457 - DNA, 305 bp, Zea mays
gtgacattgtggcagtggacattaaggagaagggctctgacacgtacgagcctctaaagcactcctggggtgccatctggaggaaggacagcgacaagccaatcaagggacccatcaccgtccgactcaccaccgagggaggcactaagactgtctacgacgacgtcatacccaccgactggaagcccaacaccgcctacaccaccaaataaactaaccaaataataatatgtatcaaatgacatacttgatagacctttatttttattttttattcaataaaaggatataaggtgcatgacaac

SEQ ID NO: 47458 - DNA, 305 bp, Zea mays
tgtaatttcagatttcagagcgcgcaagaacccttttgaccaccggcgccgccgccgcgaagccaagccaaactgagtaagcagctatggagggatccgccgccgctccgctccgcacgcgcatctgcatcatcgggagcggtcccgctgcgcacacggcagccatctacgcggcccgcgcggagctcaagcctgtgctcttcgagggctggatggccaacgacatcgccgcgggcgggcagctcaccaccaccaccgacgtcgagaacttcccgggcttccccaacggcatcatgggcgccgac

SEQ ID NO: 47459 - DNA, 301 bp, Zea mays
cataagatggcgtgtatagacaatgcaatgagagccttgttccttttagcgctcttctgtgtcgtgcatggtgagaaggcaaagtcaaaggacaacgatgcaaaagcgtccgggcccggtgggtccttcgacatcaccaagttgggcgcctccggcaatggcaagacggatagcacgaaggctgtgcaggaagcgtgggcatcagcgtgcggcggcaccgggaagcagacgatcctcatccccaagggcgacttcctcgtcggaccactcaacttcacaggcgcatgcaagggcgacgtga

SEQ ID NO: 47460 - DNA, 270 bp, Zea mays
tgatgagtttgtcatccacagtccaactctcacgtccagcaaatggtggcctggtggcttggggaaagcttccacccatgcagtggtgtacgctcggttgataactgaaggaaaggactatggcatacatggtttcattgtgcaactgcgaagcttagaggatcactccccacttcctggtgttaccctcggtgatattggtggaaagttcggtagtggtgcatataacagtatggataatggtgttcttcgatttgaccatgtgcgcat

SEQ ID NO: 47461 - DNA, 299 bp, Zea mays
gttgagctcttctttgagattgcagtgaacaaggaggactacaacaagttttacgaggctttctccaagaacctcaagcttggcatccatgaggactcgcagaacaggaccaagatcgccgagcttctgagataccactccaccaagagtggtgatgagctgaccagcctcaaggactacgtgaccaggatgaaggagggacagaatgacatctactatatcactggtgagagcaagaaggcagtggagaactcccccttccttgagaagctgaagaagaggggctatgaggttctgta

SEQ ID NO: 47462 - DNA, 304 bp, Zea mays
tggacaagcttcagttggccgccagggtcatcgttgccattgagaatccgcaggacattatcgtgcagtctgctaggccctatggccagagggctgtcctcaagtttgcgcagtacactggtgcccatgccattgctggcaggcacactcctggtacattcaccaaccagttgcaaacctccttcagtgagccacgccttcttatcctgactgacccgaggactgatcatcagcccattaaggagtctgcccttggaaacattcccaccatcgccttctgtgatactgattcccctatgcgcta

SEQ ID NO: 47463 - DNA, 302 bp, Zea mays
ggcgcggctgacgaccccaacctccccgactacgtcatccagggccgcgtgtactgcgacacctgccgcgtcgggttcgtgaccagcgtcaccgagtacatcgcgggcgccaaggtgaggctggagtgcaggcacttcggcaccggcaagctcgagcgcgccatcgacggggtcaccgacgcgaccggcacctacacgatcgagctcaaggacagccacgaggaggacatctgctcagtggtgctggtggccagcccgcgcaaggactgcgacgatgtccaggcgctcagggaccgcgccgg

SEQ ID NO: 47464 - DNA, 267 bp, Zea mays
gtctagttctaggggatatcatgcagtggactcctgatggatatgtcgctgttgtcacaatgtttaattatcaacaatttcggcatatcggcgcacctggttggcagcttgggtggacatgggcaaagaaggaggttatatggtcaatggttggggctcagaccactgaacagggcgactgctcaaagttcaagagcagcccaccccattgctgcaagaaagatccaacaattgtcgatttacttcccagcactccatacaacatgc

SEQ ID NO: 47465 - DNA, 287 bp, Zea mays
gccacagctgcgtagctcgtcgcgctggtcctcgtggccacggccatagccgccgctcccggcgttgggtttgacgtcaccggccgcatctactgcgacaactgccgcgccgggttcgagacaaacgtgtcccacgccatccaaggcgcgacggtggagatggagtgccgccacttcgagtcgcagcaggtccacgacaaggcggaggcgacgacgggcccctgcggctggtaccagatggagatcagcggcgaccaccaggacgagatctgcgacgtgcgcctgct

SEQ ID NO: 47466 - DNA, 293 bp, Zea mays
gcagagcggcatttcgaataacacaggtgagcgcgacgatgggatccctcgctaataacatcatggtcgtgggcgccgtccttgcggcgctcgtcgccggcgggtcgtgcgggcccccgaaggtgccacccggccccaacatcaccaccaactacaacggcaagtggctcaccgctagggccacctggtacggtcagcccaacggtgccggcgctcctgacaacggcggtgcgtgcgggatcaagaacgtgaacctgccaccctacagcggcatgacggcgtgcggcaacgtc

SEQ ID NO: 47467 - DNA, 283 bp, Zea mays
gtgagcagcaagatgtcgtggcaggcgtacgtcgatgaccacctgctgtgcgacagcgaaggccagcacctcagcgccgccgccatcgtcggccacgacggcagcgtctgggcacagtccgagagattccccgagttaaagcctgaggaggttgctgggatgatagaaggactttgatgaacctggaactcttgcaccaactggtctttttgttggaggtacgaagtacatggtgatccaagtgaactggattgtcatccgagaagaaggcatggaggcttac

SEQ ID NO: 47468 - DNA, 285 bp, Zea mays
ggtcgatcccaatcgagcccaccaagccgataccctaaccctcgcccttctcgatgtcggccgccaccaccggcccagccccttcagtagccactccgatggcgccccctccgtcctacccggcctcctccacggcctcttcctccatctccgcgtccgccgaggaggaggaggacctctatggccgcctcaaatcgctccaacgccacatggagttcgtcgaaatccaggaggagtacgttaaagacgagcagaagaacctgaagcgcgaactccttcgtgcgc

SEQ ID NO: 47469 - DNA, 289 bp, Zea mays
ctccatcaccaccaccaagctcaacaacagccagctcgcgaaaataatgaagagccgcagcatggcatcatcggccgcgctcttggtgctagccctcgcgctagtggcggccaccgccccacaggtagcggaggcaaagaagaagagagcggcggagagcggcgaggcggcggaggcgaagaagatccaggacgacttctgctcgacgctgtgcgagggcaagaaggggacggacctggtcgtgtgcaaggagtcctgcgcgctctcccagcagtccaacctggtgctg

SEQ ID NO: 47470 - DNA, 283 bp, Zea mays
gccgccgccgccgccgaaacagcacatcgctctctcgatctcagccatggcggaggtggagcagccccaggacgcggtgaagctcttcaaccgctggaccttcgacgatgtccaggtgaacgatatctcgctgaacgactacctggctgtgactgcggcgaacacgcgacattcctgccgcactccgcggggcgctactccaagaagcggttccgcaaggcgcagtgcgccatcgtcgagcgcctcaccaactcgctcatgatgcacgggcgcaacaacggca

SEQ ID NO: 47471 - DNA, 217 bp, Zea mays
ctgcaagttttgaaaactgaactgtaagatggcatcagcagagctttcccgtgaggaaaatgtgtacatggcgaactcgccgagcaggcagagaggtacgaggaaatggttgagttcatggagaaggtagcgaaaactgttgactcggaggagctcactgtggaggagcgcaacctcctgtctgttgcatacaagaacgtcattggagcccgccgtg

SEQ ID NO: 47472 - DNA, 189 bp, Zea mays
gcacagacaatgcgatgagagccttgtacctcctggtcctcttctgcatcgtgcatggtgagaaggaagagtcaaagggcatcgatgcgaaagcatccgggcctggtgggtccttcgacatcaccaagttgggcgcctccggcaatggcaagacagacagcacgaaggctgtgcaggaggcatgggcat

SEQ ID NO: 47473 - DNA, 171 bp, Zea mays
ggcaaagcggaagttgcggttggcctcgtcctcctcttctccgtcgcggctcagatctctgcgtgcggcgatggcgtcgttctcggaggctccccccgggaacccgaaagccggcgagaagatctttaagaccaagtgcgcgcagtgccacacggtcgacaagggcgccgg

SEQ ID NO: 47474 - DNA, 275 bp, Zea mays
ctttacctggagcactgctgcggtcaaaaggactgaaccggataggaaatctgttggtgcccaatgacaactattgcaagtttgagaactggatcatgccactcttcgaccagatgctacaggagcaatctactgagaatgtttggacaccgtcgaaggtgatagcgcgccttggcaaagaaataaatgatgaaagctcctatctttattgggcatacaagaataacatccctgtatactgcccagcattgactgatggatcacttggagacatg

SEQ ID NO: 47475 - DNA, 294 bp, Zea mays
atcaaacgcactctcctccgccgccgcccgaggcaagatggttctccagaacgacatcgaccttctcaacccgccggcagagctcgagaagctcaagcacaagaagaagcgcctcgtccagtcccccaactcattcttcatggatgtcaagtgccagggatgcttcagcataaccacggttttcagccactcccagactgttgttgtgtgcccaggctgccaaactgttctctgccagcccacgggaggaaaggcgaggctcacggagggctgctctttccgccggaaaggaga

SEQ ID NO: 47476 - DNA, 299 bp, Zea mays
cttcgacctgagccacggctctgcccaggttaagggccaacgcaagaaggtggccgacgcgctgaccaacgccgtggcgcacgtggacgacatgcccaacgcgctgtccgccctgagcgacctgcacgcgcacaagcttcgggtggacccggtcaacttcaagctcctaagccactgcctgctggtgaccctggccgcccacctccccgccgagttcacccctgcggtgcacgcctccctggacaatttcctggcttctgtgagcaccgtgcggacctccaaataccggtaagctggag

SEQ ID NO: 47477 - DNA, 252 bp, Zea mays
tgcaatctgtgtagttcttgccatgactttaagaagaaagcctgatgtactggtaaatgttatgccaaagataatgggaaacaataaatatctgggacaggaaaagcttcccatcattgtctgggttattgctcaggcctctcaaggtgacctagtgtctggacatgttttgctgggctcattctctatttcccacattatgtgcgaagtcaagtgggaatccccttgcaagaaatttggttttgcagttgc

SEQ ID NO: 47478 - DNA, 244 bp, Zea mays
gagctcctggactaggcttagtctgcagtgatattgtgaaaggagttcctgcaatttttggtcattttctgacctcactccctgcgatacactcgataattgtatttgtgtgtatcaggaatgtgccagttccggtggttcctcaaagtgaaaggttccttttccaacgtgtatgctcaaggggctatcacttgttccgctgtatagcgagatacgggtataaagacaagaagcaggagcacca

SEQ ID NO: 47479 - DNA, 220 bp, Zea mays
cgatcacgacaagatggcgtgcacaaacaatgcgatgagagccttgttcctcctggtcctcttctgcatcgtgcatggtgagaaggaagagtcaaagggcatcgatgcgaaaatctccgggcctggtgggtccttcgacatcaccaagttgggcgcctccggcaatggcaagacagacagcacgaaggctgtgcaggaggcatgggcatcggcgtgcggc

SEQ ID NO: 47480 - DNA, 99 bp, Zea mays
tcacaaaggatgctggtcgcattgctggccttgatgttgaaaggatcatcaatgaacctacagcagctgctctgtcttatggaatgaacaacaaggaag

SEQ ID NO: 47481 - DNA, 236 bp, Zea mays
cgatcacgacaagatggcgtgcacaaacaatgcgatgagagccttgttcctcctggtcctcttctgcatcgtgcatggtgagaaggaagagtcaaagggcatcgatgcgaaagcgtccgggcctggtgggtccttcgacatcaccaagttgggcgcctccggcaatggcaagacagacagcacgaaggctgtgcaggaggcatgggcatcggcgtgcgccggcactgggaagcaga

SEQ ID NO: 47482 - DNA, 291 bp, Zea mays
ccgggatcaccatcaccaacaccgtcattggcgtcggcgacgactgcatctccatcggccccgggacctccaaggtgaacatcaccggcgtgacctgcggccctggccacggcatcagcatcggaagcctagggcggtacaaggacgagaaggacgtcacggacatcaacgtcaaggattgcactcttaagaagacgatgttcggcgtccgcatcaaggcgtacgaggacgccgcctccgtgctcaccgtctccaagatccactacgagaatatcaagatggaggactcag

SEQ ID NO: 47483 - DNA, 120 bp, Zea mays
gaaagcttttgtgcaacaagcggaagtacttcttgctgatgggaaattaacagaggctaaggctgaccagcttgctaagattcaaaagcaggtcggtttgcctactgaacatgcacagaa

SEQ ID NO: 47484 - DNA, 164 bp, Zea mays
gttgtgagtatcatgtggtcgttagtgcaggtgcaggtgctggtggcggtggcattagcatttctggtaggcggtgcctggtgtggtcctcccaaggttcccccgggtaagaacatcacagccaaatatggtagtgattggctagatgccaaggcgacatggta

SEQ ID NO: 47485 - DNA, 151 bp, Zea mays
gcgcactttcatcgccatcaagcccgacggcgtccaaagaggcctgatttctgagattgtgaaccgattcgagagaaaaggctacaagcttgttgccatcaagctgattgtcccatccaaaggattcgctgagaagcactaccatgatctc

SEQ ID NO: 47486 - DNA, 278 bp, Zea mays
agaaaagttagagaagataaagcagttacttctccaggcaatgcttgtaaatatgtggctccagaagtcctgcgaaatgaagagtatgataccaaagtggatgtgctctcattcgctctgatacttcaggagatgattgaaggatgccttccttattatgataagaaaaatgatgaaattgagaaggcacataattctaaagaaaggcctccttttcgagctcctccaaagcattatgcacatgggttaagagagtctgatgaacagtgctggagcga

SEQ ID NO: 47487 - DNA, 269 bp, Zea mays
ttttgtttggtgagccattgactcctcttatgaccaagtttgggatgacgcctttgcttgcggcagtctatgttggagcaatgcagaacattttcagtaagagtgcaaaatacagtctgtgtgatccttgcaaagagatggcatacattcctttggatgaggatatgaaggtgaaaggtaaagcggctattgatgttgtgtgcaaccccttggggaaatctggaggtgctctgatccagcagttcatgatcctgtcattcggttctctc

SEQ ID NO: 47488 - DNA, 235 bp, Zea mays
tcttcatcgacgcggatctcctcatcctgaggaacatcgatttcctgttcgcgctgccggagatcacggcgacggggaacaacgcgacgctcttcaactcgggagtgatggtcatcgagccttcgaactgcacgttccggctactgatggagcacatcgacgagataacgtcgtacaacggcggggaccaggggtacctgaacgagatattcacgtggtggcaccggatcccgaa

SEQ ID NO: 47489 - DNA, 104 bp, Zea mays
gaaacctcgaggaggcagcaatggtggatgtttggatcgaggtggaggctaaccagtacaccgctgcactgaatcccatcctcttccaggtcctcatcagtccg

SEQ ID NO: 47490 - DNA, 240 bp, Zea mays
cgaggcttgtgctcgctagtgccatggctctttgcttcaagcagaaaaactatgcaactgcggcacactttgctaggatgcttcttgagaacagccctcaggaggcccaagcaaagaaggcccgacaggtgctgcaagcatgccatgacaaggacgattcccaccaactgaactatgacttcagaaatccattcgttgtttgtggcgctacgtatgttcctatctatcgtggccaaaagg

SEQ ID NO: 47491 - DNA, 202 bp, Zea mays
cgttgggcgcagagaatccccaagcaaacaaacagggtagagggagaggagaggagaggagaggagaggttgggtctgggacaccatggctccgatgaagctgtacggggcggtgatgtcgtggaacgtgacgaggtgcgcaacggcgctggaggaggctggctccgactacgagatcgtgcccatcaacgtcgccaccgcc

SEQ ID NO: 47492 - DNA, 216 bp, Zea mays
cttgggtcttatgtcttgctttgtcaaggctgctgtttctgcacttcaaaaccagccaattgtcaatgctgtcattgatggtgatgacatcatatacagagactacgtagacatcagtgttgctgttggcacttccaagggccttgtggttcctgttatccgagatgctgataccatgaactttgctgacattgagaaagggataaacaaccttgc

SEQ ID NO: 47493 - DNA, 144 bp, Zea mays
caagtggccgtccatgtgggatgcgtatctgaagatggatggtgccaaggtccactggttctcgatcatgaactcgatgatggttgtcttcttcctggctggtattgtgtttgtactattcttgaggacggttcgaaaggatct

SEQ ID NO: 47494 - DNA, 159 bp, Zea mays
ctcgagcgcagcgcgcgaagatgcaagactgggcgccggacttcgtctcgctggacactcttcatcctgctgtcgccgggcctgctgttccagatgccgggcaagtgccggatcatcgagttcggcaacttccagaccagcgccatctccatcctcgtc

SEQ ID NO: 47495 - DNA, 147 bp, Zea mays
cggcgcctgggcatgggcagcaacatcgtacccgtccaccaccctgctgggcgacaacaagaccggcgagatgggcggcctgaacatcgacgagctgatcgagaaggccgacgggttcgcgggggtgttcccggagcacaagtacga

SEQ ID NO: 47496 - DNA, 262 bp, Zea mays
aattctagggttttactgctctccgaccccgagctccgaatgccgcagcatcaggcgaggcccccctcgcgtgtgaccgagatggcgctgccgaatcaggggaccgttgattaccccagcttcaagctcgtcatcgtcggcgatggtggaactggtaaaactacatttgtgaagaggcatctcactggagagtttgagaagaaatatgaaccaaccattggtgtggaagttcatccgttggatttcaccactaactgtggta

SEQ ID NO: 47497 - DNA, 183 bp, Zea mays
ctgcaaccccaactacctggccgtgctggtgaagtatgtggcggacgacggcgacatcgtgctgatggaaatccaggacaagttgtcggctgagtggaagcccatgaagctctcttggggcgccatctggaggatggacactgccaaggcgctcaagggccccttctccatccgcctcaccag

SEQ ID NO: 47498 - DNA, 243 bp, Zea mays
agtggtgaaagtggtggacatatgtggcctgctgcaagagcatatgacaaagaagcttatgagaaacatttggatattatttataggggtattcctgatgctaagttgtggtttgtggtatgggataattgtaaccatcggtttgtggtgaaggcacaattgcatgagtgttcatgtcttgagtggcagcacactgggaagccatgtcaacatgctttggccttgataacagctcaaaaggct

SEQ ID NO: 47499 - DNA, 167 bp, Zea mays
taaaatggaggcgacgagcaaggcgatggcttcaggtctcctcgttctgctgcttctcatcaacacaggctttgtcctgcccgtccattccgaggactgctgggccgacacccgcgtcatctgcaccaagacgcacaactgccgggacgacacttgcgcggggcgcg

SEQ ID NO: 47500 - DNA, 212 bp, Zea mays
agtatggtactagagcatctgtatttataaaaatgaagaaaccagctgctgccattcgtgctttctgagagtggattcagcactattgcattggtaaggtgttcaatccactctcagcaatcatgtatggtactagagcatctgtgtttatacaaatgaagaaaccagctgctgccattcgtgatgccaatgctgctctagagatcaaccca

SEQ ID NO: 47501 - DNA, 214 bp, Zea mays
gtgccgttccacactgatgctgcgcaggcgctggggaagatcccgattgatgtgaacaggatggggattgggctcatgtccttgtccggccacaagatttatggccccaagggcgtgggggccctctaccttcgtcgccgccctcgcatcagggtggaaccacagatgaatggtggtgggcaggagcgtggcatccgcagtgggactgttccta

SEQ ID NO: 47502 - DNA, 111 bp, Zea mays
caacagccagctcgcgaaaataatgaagagccgcagcatggcatcatcggccgcgctcttggtgctagccctcgcgctagtggcggccaccgccccacaggtagcggaggc

SEQ ID NO: 47503 - DNA, 198 bp, Zea mays
agccatccctcactctcctccgaagccatcgtccccgtcccagcctccccggactccaggggcaaaagctgcagcgtcgagatggtgaaggggcgcacggggcagcgcgtgaggctctacgtccggggcaccgtccttggatacaagcggtccaagtcgaaccagtacgagactacgtcgctggtgcagatcgagggg

SEQ ID NO: 47504 - DNA, 308 bp, Zea mays
atctgtcagcgccacaggtgaccggaaaaccacggccggcgttcctgcttctctacccggtccgaattgctgaccggatcaacccgagaccttgcaggattatcgatctgattgcggcatgatccgcttcatcctgctgcagaaccggcaggggaagacgcgactggccaagtattacgtcccgctcgaggactcggaaaagcacaaggttgaatacgaggtacaccggctcgtggtcaatcgggaccctaagttcaccaacttcgtcgagtttcgcacacacaaagttatctacaggagatatgctg

SEQ ID NO: 47505 - DNA, 309 bp, Zea mays
cagaagaagagctggagggcatacttgataaagttttggtcatgtttcggtttatacaaggcaaagatgtatttgaggcattctacaagaaagatctagctaagaggttgctgcttgggaagagcgcatcaatagatgctgaaaaatcgatgatcacaaaactcaaaactgagtgtggaagtcagtttaccaataagctggagggaatgttcaaggacattgaattatccaaagaaataaacgattcattcaggcaatcatctcaagctaggacaaagcttccctcaggcattgaaatgagtgttcatg

SEQ ID NO: 47506 - DNA, 190 bp, Zea mays
gtcaaccccaccgcagcacagcgccggcaaccgccgccatcgatcgatcgcccggaaactgacctctaccgatgtctggagccggcgaggaggataagaagcccgcggagggcgacgcccacatcaaccttaaggtcaagggacaggatggcaatgaggtgttctttcgcataaagaggtccacccagct

SEQ ID NO: 47507 - DNA, 295 bp, Zea mays
cgggaagagcaccaaggaccttcggcgcccgttcaggatccacatcttcccgagcgagttcttggttgacctcttcccccttcggaccacctccaaggctcttggtgtagcttgccactctcaccaatcaagttttcatgtctgatctcgacattcagatcccaactgccttcgatcccttcgctgaggccaatgctggggactctggtgcggcacagggtcaaaggactacgttcacgtgcgcatccagcagcgtaatggtcgcaagagcctgactaccgtcacaggattgaag

SEQ ID NO: 47508 - DNA, 304 bp, Zea mays
ctcgaacgcaggtctgaggcagaagcaagtcatcttcgtcaccagcaacaggaggagcggcggcggcaggaggcacggaggggcaaggagcttccaggtctcgtgctccgtcgacaagccggtggtgattggcctggcggcagactcagggtgcggcaagagcaccttcatgcgccggctcaccagcgtcttcggtggcgccgcggagccgcccaagggcgggaacccggactccaacacgctcatcagtgacaccacgacagtgatatgcctcgacgactaccattccctggacaggaacggc

SEQ ID NO: 47509 - DNA, 307 bp, Zea mays
cgagcagtccgggaaccgcaggccatgcggccgtgtttctccacggcggtcccggagccggcgcgtcgcccggcaacaggaggtgatttgacccgcagttctacaggatcgttctgcttgaccagaggggtgcaggcagaagcactccccatgcttgtttagagcagaacactacttgggacttggttgctgacattgagaagctcagggagcatcttggcatccctgaatggcaggtgtttggtggttcatggggaagcaccttggcacttgcctacagccaggagcaccctgataaggtcactgg

SEQ ID NO: 47510 - DNA, 316 bp, Zea mays
caccatctctggtgacgttgacactaaggcgattgagaagagcacgaaagttggcctatccttggtgctcaagcactgaagtgccgagtgtttttgggctctaggaatttattttcggttcagttggattggaataaacatggtctggagtcatctttgcggcaccattttgatcttgaactatatatttttttcactctctgcatgatcaatttcataggaaaatattaggattaattgactttatgtttcaattctcagcgccctgttaataattctgttgattgagaccaattgttaaacttgtgaaatatat

SEQ ID NO: 47511 - DNA, 303 bp, Zea mays
aggggcacaccccagatcgaggtgaccttcgaggtggacgccaacggtatcttgaacgtgaaggcggaggacaagggcacgggcaagtcggagaagatcacgatcacgaacgagaaggggcggctgagccaggaggagatcgaccgcatggtgcgggagtcggaggagttcgcggaggaggacaagaaggtgaaggagcggatcgacgcccgcaaccagctggagacgtacgtgtacaacatgaagaacacggtgggcgacaaggacaagctcgcggacaagctggaggcggaagagaaggag

SEQ ID NO: 47512 - DNA, 299 bp, Zea mays
atttgaagcattaactgagatacagaatttattgaaggacaccgctgatcaagcactggctgttagagagagcttaattgttgctgcgagcaatcgctttttcactcttatcccttctattcatcctcatattatacgggatgaggatgatttgatgatcaaagcgaaaatgcttgaagctctgcaggatattgaaattgcttcaaagatagttggcttcgatagcggcagtgatgaatctcttgatgataaatatatgagacttcactgtgacatcaccccgctggctcacgatagtg

SEQ ID NO: 47513 - DNA, 297 bp, Zea mays
gtgctaaaaaccttggatttgctgcgatcgatgccttcccttgttgatgtggatgttccaaacggtggacattttacagtttgcggtgatgtgcatggccagtactttgatttgctcaacatatttgacctcaatggccttccatcagaagaaaatccttacctcttcaatggcgattttgtggaccgaggatctttctccgttgaagtcatactcaccctttttgctttcaagtgcctctacccaaaagctatgtaccttgcaagaggaaatcatgaaagcaagagcatgaacaaa

SEQ ID NO: 47514 - DNA, 199 bp, Zea mays
gctgtttggacgcaggttgccaaagcccagttacgtgaaggtctggtcagtgaagcaggggagtccttcagtcgtgcagatgacgctgcacacttccttgatgtcatccgtgcagccgaggaagctaatgtgtacaatgatttagtgaagtaccttctgatggtaaggcaaaaggcacgggaacccaaagtcgatggag

SEQ ID NO: 47515 - DNA, 270 bp, Zea mays
gccatgatgctgttaggattcagaaggttgcagtatatccagggaatgttttggctctctatatgtccaagccacctggattcaggtatcggagtgggcagtatatcttcataaaatgcagtgatgtctctccatacgaatggcagccattttcgagtacatcagcaccatgagatgattatcttagtgtccacattcgcacaaggggtgattggacttcacgtcttaggactgtcttctctgaggcatgcctgcctccatctgatggag

SEQ ID NO: 47516 - DNA, 186 bp, Zea mays
ctgcaggcaattccagtcaagtgagtgatggtgctggagctgttcttctcatgaaaagatctgtggctctgaagaaagggctgcccattcttggtattttcaggagctttgcagctgttggagtggatccagctgttatgggcgttggtcctgctgtggccattcctgctgctgtgaagtctgcag

SEQ ID NO: 47517 - DNA, 291 bp, Zea mays
caacttcacaagcccatgcaagggcgacgtgaccatccaggtgaatggcaatctgctggcgaccacggacctaagccagtacaaggatcatggtaattggatcgagattctacgcgtggacaaccttgtcatcaccggcaagggaaagctcgacgggcaggggccagccgtgtggagcaagaactcctgcgtcaagaagtacgactgcaagatccttcccaactcgctggtgatggacttcgtgaacaacggggaggtgtccgggatcacgctgctcaactccaagttctt

SEQ ID NO: 47518 - DNA, 291 bp, Zea mays
gggcgcagagaatccccaagcaaacaaacagggtagaggtagagggagaggagaggagaggagaggagaggagaggttgggtctgggacaccatggctccgatgaagctgtacggggcggtgatgtcgtggaacgtgacgaggtgcgcaacggcgctggaggaggctggctccgactacgagatcgtgcccatcaacttcgccaccgccgagcacaagagccccgagcacctcgtccgcgaaccgtttggtcaggttccagctctgcaggatggtgacttgtacctcttcg

SEQ ID NO: 47519 - DNA, 289 bp, Zea mays
gttaggtttatgtctatggtgcaaaggacaagtgcgttgaaaaagaacaaaggaaagcagatctgtgagcctgatcaaatagattcaggtaaatggttggatgtgcctaaagagaaccgtctagctactcttgacatttttgctggctgtggaggtttatcagaagggctgcagcaagctggtgtatcttttacaaaatgggcgattgaatacgaagagcctgctggtgaagcatttaataaaaatcatccagaggctgtggtctgtgtagataactgcaatgtgattc

SEQ ID NO: 47520 - DNA, 231 bp, Zea mays
ctcccatcgctatcgaccgggtcctcgagcgcgggagatggaggatcaggagaccccagttgcagttgaggcccctaccccggtccttggggagccgatggacttgatgactgctctgcagcttgtcatgaagaagtcgggtgctcatgatggccttgttaagggtcttcgtgaggctgccaaagcaattgagaagcatgctgctcagctttgcgtgcttgcggaggactg

SEQ ID NO: 47521 - DNA, 246 bp, Zea mays
actcgatcacaacaagatggcgtgcacaaacaatgcgatgagagccttgttcctcctggtcctcttctgcatcgtgcatggtgagaaggaagagtcaaagggcatcgatgcaaaaggatccgggcctggtgggtccttcgacatcgccaagttgggcgcctcctgcaatggcaagacagacagcacgaaggctgtgcatgaagcatgggcatcggcgtgcagcggcactgggaagcagacaatcct

SEQ ID NO: 47522 - DNA, 296 bp, Zea mays
cgcaaatgtctggaaaacatttacagatctatttgattacttccccttgactgcattggtcgagtcagaaatattttgtttgcatggtggattatcgccatccattgagaccctcgacaacatccgcaacttcgaccgtgtccaagaagttcctcatgaaggtccaatgtgtgatcttctgtggtctgatccagatgatcgatgtggttggggtatttctccacgtggtgctgggtatacctttggacaggatatatcagagcagttcaaccataccaatagcctaaggcttattg

SEQ ID NO: 47523 - DNA, 290 bp, Zea mays
cggtgctagccctcgcgctagtggcggccaccgcccacaggtagcggaggcaaagaagaagagagcggcggagagcggcgaggcggcggaggcgaagaagatccaggacgacttctgctcgacgctgtgcgagggcaagaaggggacggacctggtcgtgtgcaaggagtcctgcgcgctctcccagcagtccaacctggtgctgtacggcaggatccagtgcaagggcaagtgcaccgagcagaagggcatcacggcgccggccatgaaggtctgccaggaggagtgcg

SEQ ID NO: 47524 - DNA, 291 bp, Zea mays
cacagatcacacacactcgagaactccatttcgatctcatttgaaatcaacccatcctcgtttcctccgtctagcagcctctcaccctcatggccaagatcaagatcgggatcaatgggtttggcaggatcggaaggctggtggccagggtggccctgcagagcgacgacgtcgagctcgtcgccgtgaacgaccccttcatcagcaccgattacatgacctacatgttcaagtatgacactgtgcacggacagtggaagcaccatgaggtcaaggtgaaggcctccaaga

SEQ ID NO: 47525 - DNA, 285 bp, Zea mays
caggtacaagatacaacaagactgacagcgacgatgatgccacagctgcgtagcctcgtcgcgctggtcctcgtggccacggccatagccgccgctcccggcgttgggtttgtcgtcaccggccgcatctactgcgacaactgccgcgccgggttcgagacaaacgtgtcccacgccatccaaggcgcgacggtggagatggagtgccgccacttcgagtcgcagcaggtccacgacaaggcggaggcgacgacgggccccggcggctggtacaggatggagatc

SEQ ID NO: 47526 - DNA, 285 bp, Zea mays
agaagttcctagtgacagtggtattacattcaatgttgcacccaagatgaaggcgcttcaaattgctgagaaagctagggacgctctcctaagtggaaagtttgaccaggtacgtgtcaacctgccaaatggtgacatggttggtcacactggggatattgaggccaccgttgttgcttgcaaggcagctgatgaagctgttaagatcattctggatgctgtcgagcaagttggtggtatttaccttgttactgccgatcatggcaatgctgaggatatggtgaa

SEQ ID NO: 47527 - DNA, 289 bp, Zea mays
gacgatgggatccctcgctaataacatcatggtcgtgggtgtcgtccttgcagcgctcgtcgccggcgggtcatgcgggcccccgaaggtgccgcccggtcccaacatcaccaccaactacaacggcaagtggctcaccgccagggccacctggtacggtcagcccaacggtgccggcgctcctgacaacggcggtgcgtgcgggatcaagtacgtgaacctgccaccctacagcggcatgacggcgtgcggcaacgtccccatcttctaggacggcaagggctgcggc

SEQ ID NO: 47528 - DNA, 182 bp, Zea mays
gagccatacagaaacctggagagtttgttgtaacgtttccccgagcttatcattctggtttcagccatggtttcaattgtggtgaggcagtaaattttgctacgggcgaatggtttcctctaggagcagttgccagtcaacattatgcacttcttaagaggataccagtattaccttatgag

SEQ ID NO: 47529 - DNA, 286 bp, Zea mays
ctcccgaatagcttggtgctggattttgtgacgaacgtccagatccgcggcatcacgctgctcaacagcaagttcgtccacctcaacaatcttcgagtgcaagaacgtgctgatcgacaaagttacggtcaatgccctcggcgacagctccaacacggacggcatccacatcggcgactccagcaacgtgaccatcagcagcaccaccatcggcgtctgcgaacactgcatctccatcggccccgggagcatgatgatccgcatccatggcgtcaagtgcggccca

SEQ ID NO: 47530 - DNA, 272 bp, Zea mays
attattctcgatttcaggttctgagtttgtggagatgtttgtaggtgttggtgcttccagagtacgtgaacttttcaagacagccaaggagaacgctccttacatagtgtatgtcgatgaaattgatgctgttgtacggcatagaggtacaggtattggtggtggaaatgaatgatagggagcagactctaaatcaataactaactgggatggatggttttgagggcaacaccggaattacggtattgctgccactatccatctgacatctt

SEQ ID NO: 47531 - DNA, 291 bp, Zea mays
cattacggatcactatgatcctaacaatgcaacccacaaaaggctcaatgatgaaattgagcttggcaatggcctgccagatatcagaagcactcggcaatgtctccaggcagtaacagacgccgggtttgaggttgtttgggataaggatcttgctgaagattctcccttgccttggtacttgcaccttggaaccaagccgattctccctgagtagcttccgtttgacttctgtgggacgcatgattacccgcacaagggtcagtgccctggagtacgttggtcttgctc

SEQ ID NO: 47532 - DNA, 117 bp, Zea mays
cgcacaccagggtcgaggtcacggacgtctccgaagccgttcgcacgcacgccgacgcactgatgctttccggcgagtcggcaatggggaagtacccggacaaggctctcagcgtac

SEQ ID NO: 47533 - DNA, 210 bp, Zea mays
cgcgaggtggcagggcaccggtgccggccaagaagaagacggatatagtgacgaaccctctgttcgagagaatgccgagcagttctgcatcggcggcacgtttcctcccaagaaggacctgcaccggttcgtcaaggggcccaaggtcgtacgcatccagcgccaggtgcgcatcctcaaacagcgcctcaaggtgcctccggcgctcaa

SEQ ID NO: 47534 - DNA, 280 bp, Zea mays
actaaatgccgaggtgatggaacttgacctgctctccctcgactcggtcgtaaaatttgctgatgcttggacagctcgtatggcaccgctgcacgtgttgatcaacaatgctgagctcttcgctataggagaaccccaacatttttccaaggatggacatgaagaacacatgcaagtgaaccatcttgcacctgcattactggcgatgctgcttataccttcccttctccgaggttctcccagcagaattgtaaacgttaattcaatcatgcacagtgta

SEQ ID NO: 47535 - DNA, 281 bp, Zea mays
attcactgctgatctttttctgtgggatgtttatcactgttgatggcttcaacaaaacgggcataccgaacacactatgggagttagtggaaccatattcacgaatcgatagtgctagaggtgttgcacttcttgctgtggtgattcttatcctgtcagacgtggcctctaatgttcctacagtcctattgctcggtacaagagtggctgcatcagcggcttcgatttctcatggttcagagatgaaagcctggctcatcctggcatgggtcagcaccgtg

SEQ ID NO: 47536 - DNA, 282 bp, Zea mays
gactcagcgagctagagcagcacacacgcagcttgctattagcagcagcagagcagcggcgatggcggcctccatgatctcctcgtcagctcttgcggttgctcctctgggcctgacgcccctcggccgtcgcgcctcctccttcacagtcgtcttcgccaagaagatgatctataccgacaagccctacgtgattgtggggtggcctgatcgtcgacgtcgacgccaacgggtattaggggtcaaggcaatggcgtgtaccatttcgtcgtcaagtacggc

SEQ ID NO: 47537 - DNA, 270 bp, Zea mays
gtatagacaatgcaatgagagccttgttccttctagcgctcttctagcaccgtgcatggtgagaaggcaaagtcaaaggacaacgattcaaaagcgatcgggcccggtaggtcctgcgacatcaccaagttgggcgcatctggcaatggcaagacggatagcaccaaggctgtgcaggaggcgtgggcatcggcgtgcggcggcaccgggtaagcagacgatcctcatcaccaagggcgacttcctcgtcggaccactcaacttcacagg

SEQ ID NO: 47538 - DNA, 276 bp, Zea mays
agggcgacaacatgattgcaaggtccaccaaccttgactggtacaaaggcccgaacctgattgagcgtcttgaccatatcaccgagcccaagagaacttcggacaagcccctgcgtctccccctgcaggatgtgtacaagattggtggtattggaactgtaccggttggtcgtgtggagactggtgtcatcaagcctggtaaggttgtaaccttcggtcctactggcctgactactagaggtgaagtctgttagaatgctccacgaggctcttcaa

SEQ ID NO: 47539 - DNA, 278 bp, Zea mays
aactgaaaacagccgagcgatctcctctccctctccctctccgatccattctccagcgcacggagtaaacatgtctgaccgggcaaagatgtcgtggcaggcgtacgtggacgagcacctgatgtgcgagatcgagggccaccacctcgcggcggcggccatcgtcggccacgacggtgccgcctgggcgcagagcacggcgttccgcgagttcaagaccgaggacatggccaacatcatgaaggacttcgacgagccagggcacctcgcgccgacag

SEQ ID NO: 47540 - DNA, 277 bp, Zea mays
caacgtggagagctcactcgtgatgaaacaactatcattacaggagctttggagctgactcaaaagattgcaaaagctgccatgactcctatatctgaaaccttctcacttgacataaatgctaagctggacttacacacaatgggtatgataatgactagagggcataagtcgtgttcctatatactctgggattccaagcaatattattggccttatattggtaaaaaacttgattacttgccgagctgaggatgaagtgcccattcgtaatgtt

SEQ ID NO: 47541 - DNA, 287 bp, Zea mays
ctatctctaataggtcaagaccagccgcttcttgtggaagttgaccaaatctatcaccttgcttgccctgcttcaacaatcttctacaagcacgaccctgttaagaccatcaagacgaatgttattggtaccctgaacatgctaggacttgcaaagagagttggagctaagtcagtgttcatcatgccattgattcttccagcgcctcatgtgaaaaactcaattacagaatttatttttgaattgcaggattttgttgacatcaacctctgaagtttatggtgatc

SEQ ID NO: 47542 - DNA, 278 bp, Zea mays
ccgatcgccagcaggatcaaggagatccggtcgtacccgctgtaccgcttcatccgccaggacctgcggcgccgtgtacctgaccggcgagaagctcaagtcccccggcgaggagtgcaacaaggtgttcctggccctcagcgagggcaagctcatcgaccccatgctcgactgcctcaaggagtgggacggcaagcccctgcccatctgctgaggagtgaggaggagggcgccaccggtgccaagaggcaagaccgcaagaggaggagttgacatga

SEQ ID NO: 47543 - DNA, 263 bp, Zea mays
ccaatccttcccctctcatcccgggcaccggggaaaattttgcccatagaaaccctagggcgtcggatcacaagctagggcagaatttactgcgactccggctgaaggacgctgaggcacctatgtcggacgacactggccgcactatacccaagttcggcgcatgggacgtgaacaacccggcctcagccgacgggttcacggtgatcttcagcaaggccagggatgagaagaaagccccggcccaaggccacatcagggac

SEQ ID NO: 47544 - DNA, 273 bp, Zea mays
actcgagacgagttcggctcgaggtacccgtcagcccctctcgttacgactccgccttcgactccaaccgcgtgcactccaaccctcctccaggaaagcgagagcttctgcataagaacaacaaatcaaaagcgtgatcagctcggtgccaacaaaacctcaacaaccaagtttcatgtctgatctcgacgtccagcttccatctgcctttgatccgtttgctgaggcaaatgctgaggactctggtgctggtcctggaacgaaggattatgt

SEQ ID NO: 47545 - DNA, 277 bp, Zea mays
ggaaaaaactgaagaggatctaaaatcactgcaaagtgttggtcaaattatcggtgaagtgcttcgacctttggacaaggaacgatttattgtcaaggctagcagcggaccacgttatgttgttgcctgccgaagtaaagttgacaatcaaaagttgattgctggtacacgagttgttcttgacatgacaacacttaccattatgcgcattctgccacgtgaggtcgaccctgtggtttacaacatgctacatgtagatcctggcaatgtaagttac

SEQ ID NO: 47546 - DNA, 273 bp, Zea mays
gagagagagagatggatgaggagtacgacgtgatcgtgttggggacggggctcaaggagtgcatcatcaacggcctcctctacgtcgatggcctcaaggtccttcacatggacaggaatgactactacggaggagaatcttcgtccctgaatctaaccaagctctggaacaggttcaagggcaacgacagccctcccgagcacctgggcgtcagaaagagttcaacgtcgacattgtgcccaagttcatgatggcacacggcgcgctggtccg

SEQ ID NO: 47547 - DNA, 282 bp, Zea mays
gagcagcatttcgagtaacacagttgagcacgacgatgggatccctcgctaataacatcatggtcgtgagcgacgtccttgcggcgcttgtactcggcaggtcgtgcgggcccccgaaggtgccgcccggccccaacatcaccaccaactacaacggcaagtggctcaccgccagggccacctggtacggtcagcccaacggtgacggcgactcctgacaacggcggtgcgtgcgggatcaagaacgtgaacctgccacccaacagcggcatgacggcgtgc

SEQ ID NO: 47548 - DNA, 273 bp, Zea mays
gtctcagcccggggtctgctgcgtctggtggtggtgaaggggagaaattcgtgagatctgttccggatcaggcgtgcgaactcgggaatcaggggtttcacacatagcttcgtcgatttgaatttgatgtactaatggagtctaagggtggcaaaaagtctagcagtagtcgttctatgatgtatgaagctccccttggctacagcattgaggacgttcgacctgccggagggtgaagaagttccagtctgctgcttactccaactgcgcgaa

SEQ ID NO: 47549 - DNA, 273 bp, Zea mays
atctgcacaatcctaccgtgttgtcaaggaaaatgcagatgatgctttctatgagctgcagaatccccagcagcagatccaggcctacgtctttgatgttgttcgggccatagtgccgagaatgaatctggacgatctctttgagcagaagaacgatgtggccaaagctgtattggaggagcttgaaaaggtgatggcagattatggttacagcattgagcacattctcatggttgatatcatccctgacgctgctgttcgtaaggcaatgaa

SEQ ID NO: 47550 - DNA, 270 bp, Zea mays
acgtcgatgagcggtgggtgagcagacagaggaaaggccgcacatctgacgccgtgcttagctgccccgcctgtttcactaccctgtgcttagattgccagatgcatgagaagtacgtaaaccagtaccgtgcgatgttcgttcgcaactgcaagatcaagactgaccaggtcctgcgagagggcaagagcaagaggaagaaacgcagaggaggaagtgctggtgatccagctgctgcatctgaaggcgaaagcaaagggcagtcctacc

SEQ ID NO: 47551 - DNA, 270 bp, Zea mays
cttctccgatccatcaacaatcgccgagagcgatcgagagataaataaagatgaagaaagtggcatcatcgtcagccgttctcttcgtgctagccctgacgctagtttgtgccccgctgatagcagaggcaaagaagaagagagtcgccgccgccgccgccgaggagaagaaggtgcaggacaacttctgctcgacgctgtgcgagggcaggaaggggatggacctggtggtgtgcaaggagtcctgcgacctctcacagcgctccaacc

SEQ ID NO: 47552 - DNA, 276 bp, Zea mays
cgatcagtccgggaaccgcaggccatgcggccgtgtttctccacggcggtcccggagccgtcacatcgcccggcaacaggaggttctttgacccgcagttctacaggatcgttctgtttgaacagaggggtgcaggcagaagcactccccatgcttgtttagagcagaacactacttgggacttggttgctgacattgagaagctcagggagcatcttggcatccctgaatggcaggtgtttggtggttcatggggaagcaccttggcacttgcct

SEQ ID NO: 47553 - DNA, 269 bp, Zea mays
acagcattgacatcactgatggatgttgagaggaggcacggcaagttcaagccagtgatcaagaaggctatggtggaactcgatgctgcacctttcaagaaatatgcatcgttgagggatgagtgggccatcaagaacagatacatcagccctggccccatccagttcagcggccctggaagcgatgactcgaaccacaccttgatgctggaactcggtgctgagttatagagacgcgtccttcacttatttttgttcttacagttttg

SEQ ID NO: 47554 - DNA, 258 bp, Zea mays
acaagatcgtgctcatggtgctgcccatcttcttgtccaccatcatgctcaactgctgcctgacgcactgttccaccttctcggtcgagcaatcggccaccatggacacgcgcgtgggcagcctcaccgtgccgccggtgtcgctccccgtcttccctgtcacgttcatcatcatcctcgcgcccgtctacgatcacgtcatcgtcccgttctcgcgccgcgtcactgggaccgagatgggcatcacacacctccagc

SEQ ID NO: 47555 - DNA, 265 bp, Zea mays
gggaaaggaggatctgaacttctcatgcagcatacttgttctatgaaagacttgagttgggtaaagtgcaactatcaattctgtatttagtgaagagaagtccaaaactgatgcttttagctcagcaaccactaatgtgcgggaaatcattggggatgttgatggtgtcaagattaggatcattgatacacctggccttcgtcccaacgttatggaccaaggatcaaacagaaagattcttgctgctgtcaagagatataccaag

SEQ ID NO: 47556 - DNA, 266 bp, Zea mays
tgtccgccgggctgtcgacggagctccgccacaagtacaacgtgcgctccatctcgatctgcaaggatgacgaggtgcttctcgtgcgcggcatctacaaggtccgcgaggggaaggttgtgcaggtctaacgccgccgctgggttatccacgtcgagcggatcacccgcgagaaggtgaacggtctccaccgtgaacgtgggcatccatccctccaaggtgatcgtcactatgctgatgctcgacaatgaccgcaatgcgctcct

SEQ ID NO: 47557 - DNA, 259 bp, Zea mays
acaccatgcagaacgactacggctcgctggacctccacatcggccagtgcctgtagttcctcgacaccgccgaccagaatcccggcgactacctgctggcggtgtccacccggttcatcaaggaggtgaacagcatcacggccgtgatccgctacaagggctccaacgccccgccgccggccaaggtgccggagaaccccagcggatggacgtggtccatcaaccagtgcaggtccttccgctggaacctgacggcgag

SEQ ID NO: 47558 - DNA, 267 bp, Zea mays
cagagaacagtgggatcgagttgtttcactgcacgagcacatcctccggcgaccaccggcctccctctccgtcctctaacgaccgaccaacgcgtcgagcgaagatgtcgtggcagacgtacgtggacgagcacctgatgtgcgagatcgagggccaccacctcacgtcggcggccatcgtcggccacgactacgccacctgggctcagagcaccgcattccccgagttcaagcccgaggagatggctgccatcatgaaggatttcg

SEQ ID NO: 47559 - DNA, 262 bp, Zea mays
cagaaaacagtgggatcgagttgtttcactgcacgagcacatcctccggcgaccaccggcctccctctccgtcctcaagcgaccgaccaacgcgccgagcgaagatgtcgtggcagacgtacgtggacgagcacctgatgtgcgagatcgatggccaccacctcacgtcggcggccatcgtcggccacgacggcgccacctgggctcagagcaccgcattccccgagttcaagcccgaggagatggctgccatcatgaagga

SEQ ID NO: 47560 - DNA, 266 bp, Zea mays
gctgacgacaccaccgtgtggtcgacaaaataaaaaggagagagagagagatggctctgtcgtctcgccgtatggccgccgcaccattcttcgtcgtcgtccttctcgtcctcgtggcggcagagaggacgatgggcagggtggtggtggaagagacgctctgcttgtcgcagagccatgccttcaaaggcgtgtgcctcagcaacaccaactgcgacaacgtatgcaagacggagaagttcacaggcggcgagtgcaagatggac

SEQ ID NO: 47561 - DNA, 266 bp, Zea mays
aacgagattcagtttgctggacaactccaacccaagggatgctgctacagcttggagagttccgttggggcagagtgagatgctgaatcgtcaggtcgtgaagtctgattcagcgattatcaagattccagagctcgactttgagatccctccagaagctcaacgtggaacactttctactgtggaagggattattatgcgagctgtggatgagctgcaggctcttcaagatgaacggaagaaagtggatcctcagaaggccgaag

SEQ ID NO: 47562 - DNA, 262 bp, Zea mays
tgaactatgagccaagaagggttaagtgcaagtacgactccaaggtcaccttccaccttgagaaggggtgcggccccaactacctggcactgctggtcaagtacgtcgacggcgacggtgacattgtggcagtggacgtcaaggagaagggctccgacacgtacgagcctctgaagcactcctggggcgccatctggaggaaggacagcgacaaaccgcttaagggacccctcaccgtccgcctcactaccgagggaggcac

SEQ ID NO: 47563 - DNA, 261 bp, Zea mays
acgagtacaaaaattgatgccttgagggaggatataagaaacatgattgagcacgatggttctgccaaagggattgtcttcagccagttcacatcattcttggatttgattcagttttccttggagaggtccggcattaaatgtgtccagttgaatggagccatgaacattaccgaaaagggaagagccatagacaccttcacccatgatgcagactgcagggtcttcttgatgagcttaaaagctggaggagtcgctctg

SEQ ID NO: 47564 - DNA, 261 bp, Zea mays
ctcagagagatcgcaccatggggctgtctcctgccgacaagaccaacgtcgaggccgcctggggtaagagtcgcggcgcacgctggcgagtatggtgcggaggccctggagaggatgttcctggccttccccaccaccaagacctacttcctgcacttcgacctgagccacggctctgcccaggttaagggccacggcaagagggtggccgacgcgctgaccaacgccgtggcgcacgtggacgacatgcccaacgcgctg

SEQ ID NO: 47565 - DNA, 265 bp, Zea mays
gtgtggtacgagccgctgaccaagtccgtggaggacgagtacgcggcgcaccgggctcggatgttcacccttggctggttcctgcaccccatcacctacggccactacccggagacgatgcagaagatcgtcatggggaggctgcccaacttcaccttcgagcagtctgccatggtcaaaggctcagcggactacgtcgccatcaaccactacaccacgtactacgccagcaacttcgtcaacgccacagagaccatctaccgca

SEQ ID NO: 47566 - DNA, 132 bp, Zea mays
cagtcaaagggcatcggtgcgatacgtccgagcatggtgagtccttcgacatcaccaagttgggcgcctccggcaatggcaagacagacagcacgaaggctatgcaagaggcatggccatcggcgtgcgacg

SEQ ID NO: 47567 - DNA, 257 bp, Zea mays
cagtaagatggcgtgtatagacaatgcaatgagagccttgttccttttagcgctcttctgtgtcgtgcatagtgagaaggcaaagtcaaaggacaacgatgcaagatcgtccgggcccggtggatccttcgacatcaccaagttgggtgcctccgacaatagcaagacggatagcacgaaagctatgcaggaggcgtgggcatcagcgtgcggcggcaccgggaagcagacgatcctcatccccaaaggcaacttcc

SEQ ID NO: 47568 - DNA, 273 bp, Zea mays
aaaggcggtactctcatctcttacgaaggaagagttcagcttttggagattgcccaagtacctgatgagcatgtgaatgagtttaaatcaatcgagaagtttaagatattcaacactaacaacttgtgggtgaaccttaaagctgtcaagagactagtagaggctgaggcacttaagatggaaattattccaaaccccaaggaagttgatggtgtgaaagtccttcaacttgaaactgcagctggtgcagctattcgtttctttgacaaagcg

SEQ ID NO: 47569 - DNA, 274 bp, Zea mays
cgatgaatctgcagaacgcattaccgataagcaaattatcgagtggaagctgacattacatcaaattgggcttgacgtcctacggactgatcgcaccatggtattctatgagaacaaagaaaacctttccaaattatgggatattctagccgtgtatgcatggattgacaaagatgttggttactgccaaggaatgagtgatttgtgctcaccaatgatagttctactaaacgatgaagcagatgcattttggtgctttgagaaattgatgcgt

SEQ ID NO: 47570 - DNA, 128 bp, Zea mays
caccaacgtgtatgcttacatctcaataatcgctctaattgtttgcattccacctgcattgatctttgaagggcccaagctaatgcagcatggatttagtgatgccattgcaaaagtaggtaggacaa

SEQ ID NO: 47571 - DNA, 251 bp, Zea mays
cgatcacgacaagatggcatgcacaaacaatgcgatgagagccttgttcctcctgttcctcttctacatcgtgcatgttgaggaggaagagtcaaagggcatcgatgcgaaagcagccgggcctggtgggtccttcgagatcgccaagttgggcgcgtccggcaatggcaagacagacagcacgaaggctgtagcaggaagcatgggcatcggcgtgcagcggcactgggaagcatacaatcctcataccg

SEQ ID NO: 47572 - DNA, 268 bp, Zea mays
ggctactaatgtcgagaatcctgatgttagtactcttaagttgacttctgtgtacattgcaattggactcttctcggtgttcttcttgctatttagatcattagcagttgttgttcttggggtcaagacatcaagatccttattttctcagttactaaactcattattccgtgcaccaatgtccttttatgattctacccctcttggaagaatacgtagccgggtttcttcagatctgagtattgttgaccttgatattccgtttggc

SEQ ID NO: 47573 - DNA, 267 bp, Zea mays
gagcaaccctatctcttccccactccgctcctcgctcaccctctcaccaaatccttctcctccgcgccgccacagccgggcgcgcctccccgatcgagatccaggagatatgcctcgttatgatgatcgccatgggaatacacgcttgtatgttggaagattggcccctcgcacccgttcccgcgacctagaatatcttttcagcaaatatggaagaatacgtgaagtggagttgaagcgtgactatgcattcattgaattcagtga

SEQ ID NO: 47574 - DNA, 272 bp, Zea mays
acttcaccaaggacttcaagggcagcgtgcccggcttcaaggtcgacaccgtcgacaccaccggcgccggcgacgccttcgtcggctccctcctcgtcaacgtcgccaaggacgactccatcttccacaacgaggagaagctccgcgaggctctcaagttctccaacgcctgcagcgccatctgcaccaccaagaagggcgccatcccggcgctgcccacggtcgctaccgcccaggacctcatcgccaaggccaactagatggccgcacgc

SEQ ID NO: 47575 - DNA, 235 bp, Zea mays
ccaagggcaccgtggtggtgacggccaccaacgaggccccgccgccggtgagcgggcagaagggcgagcactttgacctcaccataccggcgttcctcaagatcgccgaggagaaggccggcatcgtgcccatcacctaccgcaaggtggcgtgcgagaggaaaggcggcatccggtacacgatcacagggaaccagcactacagcgaggtgaaggtgaccaacgtgagcggcgc

SEQ ID NO: 47576 - DNA, 263 bp, Zea mays
cgacaagatggcgtgcacaaacaatgcgatgagagccttgttcctcctggtcctcttctgcatcgtgcatggtgagaaggaagagtcaaagggcatcgatgcgaaagcgtccgggcctggtgggtccttcgacatcaccaagttgggcgcctccggtaatgggcaagacagacagcacgaaggctgtgcaggaggcatgggcatcggcgtgcggcggcactgggaagcagacaatcctcatacccaagggtgacttccttgtc

SEQ ID NO: 47577 - DNA, 182 bp, Zea mays
ctcgagaactccatttcgatctcatttgaaatcaacccatcctcgtttcctccgtctagcagcctctcaccctcatggccaagatcaagatcgggatcaatgggtttggcaggatcggaaggctggtggccagggtggccctgcagagctacgacgtctagctcgtcgccgtgaagagcccg

SEQ ID NO: 47578 - DNA, 128 bp, Zea mays
gacaagatggcgtgcacagacaatgcgatgagagcctggttcctcctggtcctcttctgcatcgtgcatcgtgagaaggaagagtcaaagggcatcgatgcgaaagcgtccgggcctggtgtgtcctt

SEQ ID NO: 47579 - DNA, 265 bp, Zea mays
agcaactgaaaacagccgagcgatctcctctccctctccctctccgatccattctccagcgcacagagtaaacatgtctgaccgggcaaagatgtcgtggcaggcgtacgtggacgagcacctgatgtgcgagatcgagggccaccacctcgcggcggcggccatcgtcggccacgacggtgccgcctgggcgcagagcacggcgttccccgagttcaagaccgaggacatggccaacatcatgaaggacttcgacgagccaggg

SEQ ID NO: 47580 - DNA, 264 bp, Zea mays
gggagacgggagaaccagggagcggaggcgtgcgtgctgcggcctgcggcctgcaggaccagagatcggggactgagctagggtctgggactgggaggcggagatgtcgacgccggcgaggaagcgcctgatgcgggacttcaagcggttgcagcaggacccgcccgccggcatcagcggcgcgccgcacgacaacaacatcatgctctggaacgccgtcatattcgggccggatgacacgccgtgggacggaggcacgttcaa

SEQ ID NO: 47581 - DNA, 265 bp, Zea mays
gaaagcaagacacaaaagcctgttgttgcattcattgctggacttacggcacccccaggccgtcgcatggggcatgctggagctatcgtggcaggaggaaagggtactgcccaggacaaaatcaaggcactcagagaggctggtgttaccgttgtcgagtcaccagcgaagattggttctcccatgtttgagatcttcaaacagcgtggaatggtagaatagacacagtggtacagtagagagacattgagaaaccgctttttgt

SEQ ID NO: 47582 - DNA, 71 bp, Zea mays
gccttgttcctcctggtcctcttctgcatcgtgcatggtgataaggaagagtcaaagggcatcgatgcgaa

SEQ ID NO: 47583 - DNA, 240 bp, Zea mays
agcagagcaagccagtgaggtctctcagagcgtaccagaccagctacaatggcggggaacgcgctagccaactatgtccaggtctacgtcatgctcccgctggatgtcatcactgtcgacaacacgttcgagaaggaggacgagacgagggcgcactagaagaagctgacggaggcgggcgccgacggggtcatgatcgacgtctggtgggggctggtgggaaggaaggaccgggagtct

SEQ ID NO: 47584 - DNA, 180 bp, Zea mays
agcaagtttgacaacctgtatggttgccgccactcgctccctgatggtctgatgagggccactgacgttatgatcgccggaaaggttgccgtggtctgcggatacggtgatgtcggcaagggttgtgctgctgccctcaagcaggctggtgcccgtgtcatcgtgaccgagatcgacccc

SEQ ID NO: 47585 - DNA, 109 bp, Zea mays
gcgtcgatcacgacaagatggcgtgcacaaacaatgcgatgagagacttgttcctcctggtcctctactgcatcgtgcatggtgagaaggaagagtcgaagggcatcga

SEQ ID NO: 47586 - DNA, 307 bp, Zea mays
cgtcgagtgatgctagtccgcgctcgctcattacagtgaggtacagttgtcgatgtgatcgaacgaggtaacttcgatcgacgatggacccttgatgaaggagcagagcatgaagtggaatattccccagccgaacttgctgtcaaaacagttgaagccctggctgcgccacccaaagatacagaaaggcagctgtctaaaaaggagttgaaaaagagggaactagcagaacttgatgcagtattggctgagctgggactttctggggaatcaaccagcgctgcacaggatgctgagaaggaaggtg

SEQ ID NO: 47587 - DNA, 109 bp, Zea mays
atcccatccgcacctctctccatctccctgctcctccgccttcttcttgatccagccaagccagggtatcgcatgtcggactccggaggagcaccacttcgaatcgaag

SEQ ID NO: 47588 - DNA, 69 bp, Zea mays
gagccttgttcctcctggtcctcttctgcatcgtgcatggtgagaaggaagagtcaaaggggaacgatg

SEQ ID NO: 47589 - DNA, 200 bp, Zea mays
ctccatttcgatctcatttgaaatcaacccatcctcgtttcctccgtctagcagcctctcaccctcatggccaagatcaagatcgggatcaatgggtttggcaggatcggaaggctggtggccagggtggccctgcagagcgacgacgtcgagctcgtcgccgtgaacgaccccttcatcagcaccgattacatgaccta

SEQ ID NO: 47590 - DNA, 121 bp, Zea mays
tgtctctgaagctgacatcttcgtgaccaccactggcaacaaggatatcatcatggttgaccacatgaggaagatgaagaacaatgccattgtctgcaacattggccactttgacaatgaa

SEQ ID NO: 47591 - DNA, 301 bp, Zea mays
gatgggatccctcgctaataacatcatggtcgtgggtgtcgtccttgcagcgctcgtcgccggcgggtcatgcgggcccccgaaggtgccgcccggtcccaacatcaccaccaactacaacggcaagtggctcaccgccagggccacctggtacggtcagcccaacggtgccggcgctcctgacaacggcggtgcgtgcgggatcaagaacgtgaacctgccaccctacagcggcatgacggcgtgcggcaacgtccccatcttcaaggacggcaagggctgcggctcatgctacgaggtg

SEQ ID NO: 47592 - DNA, 304 bp, Zea mays
cgacgagaagctactgtccgtgttccgcgagggtgtgaagtacggagctggaatcggtccaggtgtctacgacatccactcgcccaggatcccctccaccgaggagatcgcggaccgcgtcaacaagatgctcgccgtgctcgacaccaacatcctctgggtgaaccctgactgcggtctcaagacacgcaagtacacggaggtgaagcctgccctgaccaacatggtctccgccaccaagctcatccgcacccagctcggcagcgcgaaatgagtcagatttggtagatccatggtttgttga

SEQ ID NO: 47593 - DNA, 299 bp, Zea mays
attgattcggctaggagccaagactcttgtggttccaggaaacctcccaattggatgcatcccagactatctgatgatattcaagagcaataaggaagaggattatgaaccacagacaggttgtcttaggtggatgaacgagttctcacagtatcacaacaaggttcttgtggagcagctcaagaagcttcgcaagcttcatcctggagcaaccatcatctatgctgattactatggagctgctatggaaattttcctttcccctgaacaatatgggatcgaatatcccctagtggctt

SEQ ID NO: 47594 - DNA, 211 bp, Zea mays
caagctcagcgaccaccaagcagagcaagccagtgaggtctctcagagcgtaccagccagctacaatggcggggaacgcgctagccaactatgtccaggtctacgtcatgctcccgctggatgtcatcactgtcgacaacacgttcgagaaggaggacgagacgagggcgcactgaagaagctgacggaggcgggcgccgacggggtcatg

SEQ ID NO: 47595 - DNA, 299 bp, Zea mays
gtatgtgccgtatgcacagcgaaaaggacaggagccaagaaggaagaatcggcggcacccctggtggtgctgctggaggcagcggcgggacgttcgacatctccaagctcggcgcgaccagcgacggcaagacggactgcacaaaggcagtccaggacgcgtggacgtcagcggtcgaagcgaccggaagcgccacggtggtgatccccaagggcgactacctggtcggccctcttcacttcactgggccatgcaagggcagcagcatcgccatccagctggatggcaacctgctggga

SEQ ID NO: 47596 - DNA, 294 bp, Zea mays
ggcgcacggggcgaagatggcggcggacgacaggaggcgctgagggagttcgtgtcggtgacgggcgccgaggaagaccgggcccgcttcattctcgagtcggccggctgggacttgcagatcgcgctacaagcttttatggaggacggaggggatgaagacattgtgaccatttcgcaggcaacgcccagttcagtgtccagaggcacagcccccagtgataatagagtgacatccgtcagagacctcattcatgaccaagatgaagatgaggaggaagaggaaggccagagg

SEQ ID NO: 47597 - DNA, 296 bp, Zea mays
gccgaccgccggcgagcccctcctcctccacgacacgcgcttccccggctatcatggattcagatccatcatcacagaacccaacagatatgactgcatttgtccagaacctccttggacagatgcaaacaaggttcgagtccatgtcgcagaacattgtgtcaaagatagatgaaatgggaaccaagattgatgagctcgagcagagcatcaacgatctcaaagctgagatgggcactgagacgccggtcaagaagcctgatgagccaaagcctgctgactctgcctaacttggg

SEQ ID NO: 47598 - DNA, 278 bp, Zea mays
agagctgggcagtgaagtggatatcactgaaggagataggaagccagactacactgcttacgttgccatgatccctcagtgcataaaggaggaagacaccccttcagataatgatagtggcatctgtatgagcccagagtcctatctggggtctcctcagcacagcccctctaccacgggctctccaaataggagcctcccatctccaggtgttctctgtgggtctgcccgtcccaaaccttacgatcctcctggagagaagatggtagcagcaaaag

SEQ ID NO: 47599 - DNA, 233 bp, Zea mays
caacaatgcgatgagagccttgttcctcctggtcctcttctgcatcgtgcatggtgagaaggaagagtcaaagggcatcgatgcgacagcgtccgggcctggtgggtccttcgacatcaccaagttgggcgcctccggcaatggcaagacagacagcacgaaggctgtgcaggaggcatgggcatcggcgtgcggcggcactgggaagcagacaatcctcatacccaagggcg

SEQ ID NO: 47600 - DNA, 290 bp, Zea mays
cgaagatgttcgcaatggatgggtacttcttgaagtgcttgacaaggtgtctcatggatctgtcaattggaagttggcatcaaaacctccaattaaattgccatttagaaaactggagaattgcaatcaagttgtaaaaattgggaagcagttaaagttttctttagtaaatctagctggaaacgatattgttcagggaaacaagaaattgattgttgcacttctgtggcaattgatgagattcaatatcctccagctgttaaacaaactgagattccactcccaagggt

SEQ ID NO: 47601 - DNA, 292 bp, Zea mays
gcggtacgctgtccatggctaactacgggcccgactccaatggctcccagttcttcatcaccaccgtagacgaaaaccggttgcccaagaagctggacgggcgccacgtggtgttcggcaaggtggtgaaagggatggacgtcgtgcgcaagatcgaagccgagggccagctcaccggcgtgcccaaggccaaggtcgtcatagccaacagcggccagctgccagcgcccgccgccgccggccatcgtgacctctgatcgatgacgaggagaacgactcacgatccatcaat

SEQ ID NO: 47602 - DNA, 315 bp, Zea mays
gtactgaggagcagcagaaaaagtggttaccaatggcttacaagttccaaataattgggtgctatgctcagactgaactcggtccgggccaaacgttcagggccttgaaacaactgccacatttgatccaaagactgatgagtttgtcatccacagtccaactctgacctccagcaaatggtggcctggtggcttggggaaagcttccactcatgcagtggtgtatgctcggctgataactgaaggaaaggactatggtatacatggtttcattgtgcaactgcgaagcttagaggatcactcccctcttcctgg

SEQ ID NO: 47603 - DNA, 306 bp, Zea mays
ccaagctcaacaacagccagctcgcgaaaataatgaagagccgcagcatggcatcatcggccgcgctcttggtgctagccctcgcgctagtggcggccaccgcaccacaggtagcggaggcaaagaagaagagagcggcggagagcggcgaggcggcggaggcgaagaagatccaggacgacttctgctcgacgctgtgcgagggcaagaaggggacggacctggtcgtgtgcaaggagtcctgcgcgctctcccagcagtccaacctggtgctgtacggcaggatccagtgcaagggcaagtgca

SEQ ID NO: 47604 - DNA, 311 bp, Zea mays
acgtgttgagactggtgtcattaagcctggtatggttgttacttttgggcctactggtcttactactgaggttaagtccgttgagatgcaccatgaggctctccaggaggcccttcccggtgacaatgttggcttcaacgtgaagaatgttgctgtgaaggatctgaagcgtgggtatgtggcctccaactccaaggatgaccctgccaaggaggctgctagctttacctcccaggtcatcatcatgaaccaccctggccagattggcaatggctatgccccagttctggactgccacacctcacacattg

SEQ ID NO: 47605 - DNA, 307 bp, Zea mays
aggcgacgaggccgccgagcgcgaggtgtcggtgaccaccttcagctgggaggagattcagaagcataacctgcgcaccgacaggtcgctggtcattgaccgcaaggtttacaacatcaccaaatggtccatccagcacccggggggccagcgggtcatcgggcactacgctggagaagatgcaacggatgccttccgcgccttccacactgacctggaattcgtgggcaagttcttgaaacccctgctgattggtgaactggcccggaggagcccagcaggacacggcaagaactcaagatactga

SEQ ID NO: 47606 - DNA, 309 bp, Zea mays
gccagtcagaagaggaaccggggagcggcagctgcagcagccgagggcggacacgcgaggcatggatagataccaaagggtagagaagcctcggaatgacacgccaatcagccagaatgagatcagaatcactactcaggggaggatgaggaactatatcagctatgggatgtcgctgcttgaggaaaatggacatgatgagattagtatcaaggccatgggacgggccatagataagacagttatggttgttgaattgatcaagagaacggttggaggtcttcatcagaacactgctactgaatctgt

SEQ ID NO: 47607 - DNA, 302 bp, Zea mays
gcagacttcaatcttttgaaccaagcaccagatatggcagctcgtctccattcaactcgtgtattgggaacttttggatatcatgcacctgagtatgctatgactggccagctgacacaaaaaagcgatgtctacagctttggcgtggtccttttggaacttttgactggaaggaaaccagtagatcacacaatgcctcgaggacaacaaagtttagtcacatgggctactccaaggttgagtgaagacaaggtgaagcaatgtgtagatcccaggttgaagggagaatatctccaaaggga

SEQ ID NO: 47608 - DNA, 182 bp, Zea mays
aatgcacaaacaatgcgatgagagccttgttcatcctggtcctcttctgcatcgtgcatggtgagaaggaagagtcaaagggcatcgatgcgaaagcgtccgggcctggtgggtccttcgacatcaccaagttgggcgcctccggcaatggcaagacagacagcacgaaggctgtgcaggag

SEQ ID NO: 47609 - DNA, 307 bp, Zea mays
gaagtattaattccgctcaatttggatgaaatcagcattaagcttcggccgaacagcagtggcagccaaactgtccagatggcgcgtgctctactgtcagctcgccattctggtgagcggatactgcggtgctggggcggtggcactggatgggctgtggaagatactaaggacaagatcactaagctattggaggaatacaacactggtggtgacctaggagaagcctgcagatgcatccgtgatcttgggatgcccttcttcaaccatgaggtggtaaagaaggcactggtcatggcgatggaga

SEQ ID NO: 47610 - DNA, 286 bp, Zea mays
agatgacatggagagaatctggcatcatactttctacaacgagcttcgtgttgcaccagaggagcaccctgtgttgctcaccgaggctcctttgaacccagaggccaacagggagaagatgacccaaattatgtttgagactttcaatgttcctgccatgtatgttgcaatccaagcggtgctctcactctaagctagtgggcgtactactggtattgtactcgactctggtgatggtgtgagccacactgtgcccatttacgaaggatatgcccttcctcatgcc

SEQ ID NO: 47611 - DNA, 261 bp, Zea mays
atcagcgaccagcaagcagagcaagcaagtgaggtctctcagagcgtaacagccagctacaatggcggggaacgcgctagccaactatgtccaggtctacgtcatgctcccgctggatgtcatcactgtcgacaacacgttcgagaaggaggacgagacgagggcgcactgaagaagctgacggaggcgggcgccgacggggtcatgatcgacgtctggtggaggctggtggaagggaaggagcctggagtctacgactgg

SEQ ID NO: 47612 - DNA, 308 bp, Zea mays
caaaggaaaatatgttgtgttcttcttttaccctcttgacttcacctttgtgtgccccacggagatcattgctttcagtgatagggcagaagaatttaagaaactcaactgccaagtgattggtgcttctgtggattctcacttctgtcatctagcatgggtcaatacacctaagaaacaaggaggactgggacccatgaacattcctttggtatcagacccgaagcgcaccattgctcaggattatggggtcttaaaggctgatgaaggcatctcgttcaggggcacttttatcattgatgataagg

SEQ ID NO: 47613 - DNA, 171 bp, Zea mays
acttcaacgagtacgtgctggaggggagcgcgccggtgctcccggagacgcagcggctgttcaagaagctcgtctcgctgggcatcaagccggtgttcctgacgggccgcaccgaggaccagacggccatcaccgtcaccaacatccgccgccaggggtactccggctgga

SEQ ID NO: 47614 - DNA, 309 bp, Zea mays
gaaaaggccgaagcagttcggcatcggcggcgcgttgcctcccaagaaggacctgcaccgatacgtcaagtggcccaaggtcgtgcgcatccagcgccagagtcgcatcctcaagcagcgcctcaaggtgcctccggcgctcaaccagttcacccgcaccctcgacaagaacctcgctaccaacctgttcaagatgcttcttaagtaccggcccgaagacaaggctgccaagaaggagaggcttctgaagagggcccaggctgagaatgaaggaaaaactgttgaatccaagaaaccaattgttgtgaa

SEQ ID NO: 47615 - DNA, 306 bp, Zea mays
agccatcaaggccaagaacagcggcgccttccccaaggccgacaaggccgccgccgccgtggaacccaagttctaccctgccgacgacgtcaagccccgcgttcccagcacccgcaagcctaagcctaccaagcacaggtcgagcatcacgcctgggacggtgctgatcctcctcgcagggcgcttcatggggaagagagtggtgtttctcaagcagctcaagtccggcctgctccttatctctgggcctttcaagatcaatggagtaccgatccgccgtgtgaaccagacctatgtcattgctac

SEQ ID NO: 47616 - DNA, 302 bp, Zea mays
gatgatgacgagcttgcgcacataaaaaaggagtacaaggagggaaggatgttgactggtgaagtgaagcaacggcttattgcagttctatctgagattgttgctagacaccagagagctagagctcaagtgaccgaagagatggtcgatgcattcatggcagtgaggcctcttcccaatatgtttggctgagcatcacggcgacaacttgaacaaacatttttgttatcagggagaattttaagagtctttagaattgtcgtgccaccataagtatcccctgtgttttacttcttcgggat

SEQ ID NO: 47617 - DNA, 250 bp, Zea mays
atgtgttgttggcaatggagcagtcatccatgttccagggttctttggagaaattgatggtcttgagtccaatggagtccgctgcggtggaaggatactggtatccgaccgggcacatctgctgtttgatctgcaccaggctgtggatggacttagggaagcagagcttgaaaattcatttatagggacaactaagagaggcattggtccttgttactccagcaaggtaactcgaaatggactgcgggtt

SEQ ID NO: 47618 - DNA, 262 bp, Zea mays
atcgatcacgacaagatggcgtgcacaaacaatgcgatgagagccttgttcctcctggtcctcttctgcatcgtgcatggtgagaaggaagagtcaaagggcatcgatgcgaaagcatccgggcctggtgggtcattcggcatcaccaagttgggcgcctccggcaatggcaagacagacagcacgaaggctgtgcaggaggcatgggcatcggcgtgcggcggcactgggaagcagacaatcctcataccaaagggtgact

SEQ ID NO: 47619 - DNA, 290 bp, Zea mays
atcgggatggaagctgccggcatccacgagaccacctacaactccatcatgaagtgcgacgtggatattaggaaggacctgtacggcaacatcgtcctctccggtggcaccaccatgttccctgggatcgctgacaggatgagcaaggagatcactgccttggctcccagcagcatgaagatcaaggtggtcgctcctccagagaggaagtacagtgtctggatcggaggatacatccgggcatctctgagcaccttccagcagatgtggatcgacaacgccgtatacga

SEQ ID NO: 47620 - DNA, 303 bp, Zea mays
cggagaggccatgagctcggcgcaggatccgttctacatcgttagggaggagatccaggagtcgattgataaattgcaaagtaacttccaccgctgggagcaaactgcttcaaacacaggagaatatgttcatctgacaaaggagcttctgaccagctgtgaaagcatcgagtggcaggtagatgagctggaaaagacaatctcagttgcatcaagggatccatcatactatggacttgatgaagttgaactttccagacgaagaaactggactggttctgctcataagcaggttggtacagt

SEQ ID NO: 47621 - DNA, 294 bp, Zea mays
acgtcggagccgacgcgggaggagagcgtgtacatggccaagcttgcggagaggcggagcggtacgaggagatggtcgagttcatggagcgcgtcgcgcgctacgccggggcaaccggcggcggggacgagctctcggtggaggagcgcaagctgctgtccgtcgcctacaagaacgtcatcggcgcccgcaggcctcgtggcggatcatctcctccatcgagcagaaggaggaaggccgcgggaacgaggcgcacgccgcatccatacgcgcctaccgctccaagatcgaggc

SEQ ID NO: 47622 - DNA, 271 bp, Zea mays
agatcacgccgtccgtcgaggtaaggtcagcatggtgagggtcagtgtgctcaacgatgcgctcaagtccatgtacaacgctgagaagattggcaagaggcaggtcatgatcaggccgtcatccaaggtcatcatcaagttcctgacggtcatgcagcgccatggctacattggagagttcgagtatattgatgaccaccgatcgggcaagattgtggtcgaactcaacgggaggctgaacaagtgcggcgtcatcagccctcgctttgat

SEQ ID NO: 47623 - DNA, 303 bp, Zea mays
atttgcagccagaacacaggtgtcgtgaaaactacccctaaaatccagaatgggaaatgaaaagactcatatcaacattgtcgtcattggacacgtagattcgggcaagtacaccactactggccatctgatctataaatgcggtggcatcgacaaaagaaccattgaaaaatttgagaaggaggctgctgagatgggaaagggctccttcaagtatgcctgggtcatggataaactgaaagctgagcgtgaacgtggtatcaccattgatatctccttgtggagatttgagaccagcaagta

SEQ ID NO: 47624 - DNA, 303 bp, Zea mays
taacggtacgctgtccatggctaactacgggcccgactccaatggctcccagttcttcatcaccaccgtagacgaaaaccggttgcccaagaagctggacgggcgccacgtggtgttcggcaaggtggtgaaagggatggacgtcgtgcgcaagatcgaagccgagggccagctcaccggcgtgcccaaggccaaggtcgtcatagccaacagcggccagctgcaagcgcccgcagccgccggccatcgtgaccactgatcgatgacgaggagaacgactcacgatccatcaatccggtcgat

SEQ ID NO: 47625 - DNA, 292 bp, Zea mays
cagtcgtatcgtatccgctcctcacctcgccatccatgggcaagatcaagatcggaatcaacggtttaggaaggatcggcaggctcgtggccagggtcgccctgcagagcgaggatgtcgagctcgtcgccgtcaacgaccccttcatcaccacggattacatgacgtacatgttcaagtacgacaccgtgcacggccaatggaagcacagcgacatcgcactcaaggactccaagacgcttctcttcggcgagaagccggtcaccgtctttggcatcaggaacccgaggag

SEQ ID NO: 47626 - DNA, 291 bp, Zea mays
agaggatgaacatgtcatagatggaagaacagttgaagtcaaaaggactgttccaaaagaggaaatgtcatcgaaagacggtcctaagacaaaaaagatctttgtaggtggtattccaccatctcttaccgaagataaattaaaggaggacttctcatcgtatgggaaggtggttgagcatcagattatgcttgaccatagcactggacgctcacgtggacttggattggtcacatttgaaagctgagatgctgttgaaacggttatgtcagaggggagaatgcatgatct

SEQ ID NO: 47627 - DNA, 214 bp, Zea mays
gcagattaggagccactcctatcatggaacttatgattgcagcgagaaaagcagttcctgagttgcaattggtgtatggcattgctgttgacagagtctacactggcacacttatgacatcacttgatatggcaggattatctattaccattatgaagtccggcgaaagcattttgaagagacttgatgctcccactagagctgccagcttggc

SEQ ID NO: 47628 - DNA, 244 bp, Zea mays
gttaaatacattgagtggattcttgagaatgcaccgattactatttttgagaatcatgagctggccagcattgtgctggattacaaaagggagtgtgtccgcgatagtgtgctgcagtcacacacctctgtccatgaggattgcaacattgagtctggagaaacaaccttgcactgtgagcatgtgctgagccttgaatcaggtccgaccatagtgaaggcacagaccatgtggaggcctaagg

SEQ ID NO: 47629 - DNA, 300 bp, Zea mays
ccaagctcaacaacagccagctcgcgaaaataatgaagagccgcagcatggcatcatcggccgcgctcttggtgctagcactcgcgctagtggcggccaccgccccacaggtagcggaggcaaagaagaagagagcggcggagagcggcgaggcggcggaggcgaagaagatccaggacgacttctgctcgacgctgtgcgagggcaagaaggggacggacctggtcgtgtgcaaggagtcctgcgcgctctcccagcagtccaacatggtgctgtacggcaggatccagtgcaagggca

SEQ ID NO: 47630 - DNA, 297 bp, Zea mays
accttgttcctcctggtcctcttctgcatcgtgcatggtgagaacgaagagtcaaagggcatcgatgcgaaagcgtccgggcctggtgggtccttcgacatcaccaagttgggcgcctccggcaatggcaagacagacagcacgaaggctgtgcaggaagcatgggcatcggcgtgcggcggcactgggaagcagacaatcctcatacccaagggcgacttccttgtcggacaactcaacttcacaggcccttgcaagggcgacgtgaccatccaggtcgatggcaatctgctggcg

SEQ ID NO: 47631 - DNA, 243 bp, Zea mays
taaagcagctcctccgggggcggcgaactactcctcgtcgccaaaaccctagccctgcttctttgccatggcgagcagcgctagccaggcgagcctcctgctccagaagcagctcaaggatcttgcgaagaaccccgtggatgggttctccgccgggcttgtagacgacagcaacatcttcgagtggcaggtcaccatcatcggaccgcctgacaccctatatggtggaggctagttcaatgc

SEQ ID NO: 47632 - DNA, 191 bp, Zea mays
acactgcacctccgctgcccatcgccgtccccgaccgcagcgcaggactagtatgaggataaggctgctgcttctgctgagcagcctaagagggcccctaagctcaatgaaaggatcctctcctctctgtccaggaggtccgtagctgctcatccatggcatgatctcgagatcggtcctggtgctcctgc

SEQ ID NO: 47633 - DNA, 150 bp, Zea mays
ggaaggttagagtagaattgccagacgcatatccttacaaatccccacgcgtcagataagatatatcacccaaatgtcgatgaaatgtctggttcagtctgtttggatgtcatcaaccagacttggagcccaatgtgtgatctggtcaat

SEQ ID NO: 47634 - DNA, 104 bp, Zea mays
acgaccccaagctcatcacctggtctccggtgtgtcgcaacgatgttacgattgaagttcctggtgggccctgacggtgtgcccctacgcaggtacagccgccg

SEQ ID NO: 47635 - DNA, 289 bp, Zea mays
catgaacgtcgtgccgacggcagccgagatctacaccctcggcgtgggacacggcatcggcatataccacgactggtgtgaggcattctcaacttatccaagaacatacgaactcatacatgccacaggcatcttcacactctacaaggacaggtgcagaatggaggacatcctgctggagatggatcggatcctgcgcccagagggaaccgtgatcctccgcgacgacgtcgaggtcctgctcaaggtgcagaggacggtgaaggggatgcgttggaagacgctgctg

SEQ ID NO: 47636 - DNA, 288 bp, Zea mays
gcactccacagttctatatctcaatcatgcaattgcagattttgccgaccgtcaatgcctggtgatctgaaggttgtttgcttcacaaattcaggcacggaggcaaatgagcttgcactgatgattgcacggctttacactggttgcaatgacattatctctcttaggaatggataccatgggaatgctgctggaacaatgggtgctactgctcaatccaattggaaattcaatgttgtccagacgggagtacaccatgcgcttaatccagaccccttcagaggtgct

SEQ ID NO: 47637 - DNA, 265 bp, Zea mays
aaagaagcctgtaccggattttagcttctatgatcgttctgctccaattaagactatatttgcctccttcaaaggttcttgatgctgatgtgacagacagtgttattggagaagggtgtgttattaaacattgcacaatcaatcattccgtagttggactccgttcctgcatttctgaaggtgcagttatagaggactctttgctaatgggtgcagactattacgagactgagaatgataagaatgcactttctgagactggtgg

SEQ ID NO: 47638 - DNA, 150 bp, Zea mays
acaagatggcgtgcacagacaatgcgatgagagccttgttcctcatggcttccagacatggtgagaacgaagagtcaaagggcatcgatgcgaaagcatccgggcctggtgggtccttcgacatcaccaagttgggcgcctccggcaatg

SEQ ID NO: 47639 - DNA, 286 bp, Zea mays
agtgacaacaaggagaggcatgtttgcatccctctggatgttctggaagcagtattggcaaaggaaaagaagcttgagaaggacattgagaatgagaatggaggtgctggggtctattctgcaagtatcaagaaacattatattttggccaatgatgaatggaaggaggatattcttccagagatactggatggtcacaatgttgccgattttctggatccagatatcattgtaaggtgtgaagagttggaaagggaggaagggcttcgtctggtaggacaagctg

SEQ ID NO: 47640 - DNA, 283 bp, Zea mays
gtttctttgtgcgaggtgaatgtacaagaggagctgagtgccctacgatagtctgaaactggggagttatctcagcacaacattaaagatcgctactatggagttaatgatccagttgcactgaaacttttgagcaaggcaggtgagatgccatccctgacaccaccagatgatgagactatagggaccctctacattggcggactcgatagcagaataaccgagcagggtttgagggatcagttttatgcccatggtgagatcgagtccataaggatggtac

SEQ ID NO: 47641 - DNA, 276 bp, Zea mays
tcggatgctacctgctccaagagcacatcaaggcgtcaggtggatcagacctagaagggcaatggtgtgtcgaactccatcggcatcctcctgctcttcatctaccctgtctgggccggtgtgctgcaagtcctgtaggcacccaccattgcctcagtgtttcccctgtgcggtccaggcgtccagctccgttcccgttcgtgcccgtgcaaatgctccctctatggtgatccgtgatcctgtgtcacgagtaggtgatgtttttatgtgtgcttg

SEQ ID NO: 47642 - DNA, 274 bp, Zea mays
caccttgtcgctacagtcggcaaattcagcgtcatttggaattttacagcagccaaccatgagtgctaccgtgatcagcagggcctcaagagctgctactgctacaaagttgtactcaaggatgaatcaatcgtcgacagccgcttcatgcacgagaagtttgcgacgagtgactctcctgaagctccgctcgttgtcgctacgccaatgaaagtcagctccttcagtatagcaaatcgacgctgactccggagctcttttcaccagttgtgca

SEQ ID NO: 47643 - DNA, 196 bp, Zea mays
ctggtcttactactgaggttaagtacgttgagatgcaccatgaagttccagttcccggtgacaatgttggcttcaacgtgaagaatgttgctgtgaaggatctgaagcgtgggtatgtggcctccaactccaaggatgaccctgccaaggaggctgctagcttcacctcccaggtcatcatcatgaaccaccctgg

SEQ ID NO: 47644 - DNA, 283 bp, Zea mays
gaagcgcaactataagctgaagctgcaaggggagaaccctggaagaagtacgcatcgcaacagaggttttcgaggtcacgccttccctgtacatggttgagctgcgcaagtccaacggcgacacccttgaattccacaagttctaccacaacatctcaaatggactgaaggacgtgatgtggaagccggagagcggcatcgtggaaggcgacgaggcgcggcaaaggaggtccccgtgatggggtctgcaaccaagttttagaagtagcgctgcagataacta

SEQ ID NO: 47645 - DNA, 285 bp, Zea mays
accccatctgtattcatcttcccgccatctgatgagcagttgaacgacgctgttgtgtgcctgctgaataacttctatcccagacaggccagagtacagtggaaggtggataacgccctccaatcgggtaactcccaggagagtgtcacagagcaggacagcaaggacagcacctacagcctcagcagcaccctgacgctgagcaaagcagactacgagaaacacagactctacgcctgcagagtcacccatcagggcctgagctcgcccgtcacaaagagcttc

SEQ ID NO: 47646 - DNA, 281 bp, Zea mays
ccacaatccaaggacaccgagcagcaggcggcggaagcaacgcgtatcggctggagtccagttttgctcggatcgccgctgggatccgccggccggcgaacggggaagggaagaggggcggagattggagagtacaagcaggggaagatgtcagacgcgctgatcaacggcctcgcaggcaccggcggcgggatcatcgcccagctccttacctacacgctccagaccgtgaacgcgcggcaacagacggagcgcgaccctccaagccgggttcaaagacg

SEQ ID NO: 47647 - DNA, 263 bp, Zea mays
atcgagccgatcgatcacaacaagatggcgtgcacaaacaatgagagatttcatcctgagtcctcttctgcatcgtgcatggtgagaaggaagagtcaaagggcatcgatgcgaaagtatccgggcctggtgggtccttcgacatcaccaagttgggcgcctccggcaatggcaagacagacagcacgaaggctgtgcaggaagcatgggcatcggcgtgcggcggcactgggaagcagacaatcctcatacccaagggtgac

SEQ ID NO: 47648 - DNA, 298 bp, Zea mays
ctcaagtttacacgcagcatgcatacatgagaccccttggagtagttgctatggtcggcagggagaaaaatgcccaactattcaaatgcgaccctgctggtcacttctttggacataaggcaactagtgccgggctcaaggagcaggaagcaataaattttctggagaagaaaatgaaggatgacccgaaattcacctatgacgaaactgtgcagattgcaatatctgcgttgcaatcagttctccaggaagatttcaaggccactgagatcgaagttggtgttgtgacgaaagatgt

SEQ ID NO: 47649 - DNA, 275 bp, Zea mays
gagcgagtatggagagatgatccttgagttgctcatatccgcagcaagagtgtgcactcagattggtctctgtgtatttgatggtgcccattctgtcagcaatccaattgaatctgttgttgagaaacagaagcgtggttctgatcttttctgtactgcttgtgagatggctgttgtctggatacagaatcagctccgtgagaacaagacaaaagaactcattttgaattatgctaatcagctctgtgagcgtatccctagccccaatggcgagt

SEQ ID NO: 47650 - DNA, 242 bp, Zea mays
ggacctcttgtgagagggccaagagaactctgtcttccatccacactgagattgactcgctgtacgagggcattgacttctactccaccatcacccgtgccaggtttgaggagctcaacatggacctgttcaggaagtgcatggagcctgttgagaagtcctgatggatgccaagatggacagagcagcgtcatgatgtgaccttgttggtggctcactaggatcccagggtgcacagtgct

SEQ ID NO: 47651 - DNA, 278 bp, Zea mays
caaagattcaggtttactcacgtcatccagcagagaatgaagtcatcaattgctatgtgtctgggtttcatccatccgacattgaagttgacttactgaagaatggagagagaattgaaaaagtggagcattcagacttgtctttcagcaaggactggtctttctatctcgtgtactacactgaattcacccccactgaaaaagatgagtatgcctgccgtgtgaaccatgtgaccttgtcacagcccaagatagttaagtgggatcgagacatgtaa

SEQ ID NO: 47652 - DNA, 275 bp, Zea mays
gatcgggattgtgggcgagtgcgtgcgttcgtgcacaagcgctgcacaccatgtctttcaccggcacgcaggacaagtgcacggcgtgcgacaagaccgtccacttcatcgacctcctcacggccgacggcgccatctaccataagacatgcttctagtgcagccactgcaaaggggtcctctcgatgtgcagctactcctccatggacggtgtgctgtactgcaagacccacttcgagcagctcttcaaggagaccgggagcttctccaagaac

SEQ ID NO: 47653 - DNA, 273 bp, Zea mays
actaaagaaaatggcccttagggttattgctgagagttcggagatcgcggggttaaaagaaatgttcaaaatgattgacagtgacaacagtggtcatatcacattggaggaactaaaaactggcttgcagagagttggtgctaatttgatggattcggaaatcaatgctctaatggaagctgcagatatcgacaacagtggcacaattgattacggggagttcattgctgcaactttgcatatagacaaagttgaaaaggaggataagctctt

SEQ ID NO: 47654 - DNA, 272 bp, Zea mays
agataaaagaattattggagactcgtattcgaccagcttaagcggtgacattgaataccgaggattcgacccagaaacaggaacagttaagcttaaaatgcaaggagcctgcagcggctgtccaagttcgtcagtcacattgaagtctgggatagaaaacatgcttatgcactatgtgcctgaggtgaaaggagtagaacaggagttcgatggtgatgaggaagctgaagtggctggatagatcgagagagtttttacaggttttgagggtc

SEQ ID NO: 47655 - DNA, 277 bp, Zea mays
gaggaggagatcgctgcgctggagaacgagttctcagggatcgcggggattttgccataacgatctccagtatgggaacatcatgatcgacgaagagacgaggctactgaccatcattgactacgagtatgcaggttttaacccagttgcttatgacatcgcaaaccatttctgtgaaatggccgcagactaccattcagaaaagcctcacatattggactacagcaaatatccagataccgatgagcggaacaatgtgtgcggacatacctgagct

SEQ ID NO: 47656 - DNA, 179 bp, Zea mays
agcagccaggcagccatggcgcccaccgtgatgatggcctcgtcggccaccgccgtcgctccgttccaggggctcaagtccaccgccagcctcaccgtcgcccgcagctcctccagaagcctcggcaacgtcagcaacggcggaaggatccggtgcatgcaggtgtggccggcttacgg

SEQ ID NO: 47657 - DNA, 173 bp, Zea mays
actattattgctttcaatcataaggacaaacttggaagagataagcttgtcactgttgaagatattgtccgtcagcattgggcgacatatggtcgccattattacacacgctatgactatgagaatgtcgatgctggggctgctaaggcgctgatggcaaacctaataagcat

SEQ ID NO: 47658 - DNA, 174 bp, Zea mays
cgcaaaggccggcgccaacttcccgctgtccacgcgcaccgttacggccatctccgaggtggaggcgttcgcgctgcgcgctgacgagctcaagttcgtggcggggcagttccggcgcctgcacagcaagcagctgcagcagaccttccgcttctactcgcaagaatggcgcac

SEQ ID NO: 47659 - DNA, 170 bp, Zea mays
cgacaagatggcatgcacaaacaatgcgatgagagccttgttcctcctggtcctcttctgcatcgtgcatggtgagaaggaagagtcaaagggcatcgatgcgacagcgtccaggcctggtgggtccttcgacatcaccaagttgggcgcctccggcaatggcaagacag

SEQ ID NO: 47660 - DNA, 177 bp, Zea mays
acagaaccgccatcttccagtaattcgccaaaatgacgaacacaaagggaaagaggagaggcacccgatatatgttctctaggccttttagcaaacatggagttgttcctttggccacatatatgcgcatctataagaaaggtgatattgtagacatcaagggaatgggtactgttc

SEQ ID NO: 47661 - DNA, 172 bp, Zea mays
ctggaggctggtagtcagactccagttacttttgtcgtggaccagaagcgtcatcacaccaggttgtttgctaataatcacaatgataatcgtgctgtcgataaaagcgggaacatactgcctggcaccgtggtggactcgaagatctgccatccaactgagtttgatttct

SEQ ID NO: 47662 - DNA, 308 bp, Zea mays
cctcgccgcctcactccctctgcagaggtcgcagatccgtccggttagacgaagccgcccgcacccatggcctccggtgagctcgcctgcacctacgccgccctcatcctcagcgacgacggcatcgccatcaccgccgagaagatcgccaccatcgtgaaggcggccaacatcaaggtcgagtcctactggccggcgctcttcgctaagctcctggagaagcgcacgctagaggatctaatcctctccgtgggatctggtggtggcgctgctcgagttgctgcttccgcgccagctaggggtgctgc

SEQ ID NO: 47663 - DNA, 304 bp, Zea mays
ctgcggcggacacggaggcgaaggaggaggagcagcagcaacaggcggcgccgacggagcggcatcccactcagtgcttgcaaccatggctaggggattgaagaagcacttgaagaggctcaatgcgcccaagcattggatgctcgacaagcttggcggagcttttgctcccaagccatcttctggacctcacaagtccagggagtgccttcctctgatcctcatcatcaggaacaggctcaagtatgctctgaactaccgtgaggtcatttctatcctgatgcaacgcatgtacttgttgatg

SEQ ID NO: 47664 - DNA, 168 bp, Zea mays
actgatcatgaaggcgggaatgtcagtgctcatactggtcatctggttgggagtgctctgtcagatccttatctttctttcgcagcggctctaaatgggctagctgggccactgcatggtcttgctaatcaggtagtgcttttatggatcatatctgtaattgaggaa

SEQ ID NO: 47665 - DNA, 172 bp, Zea mays
cgtctgacaacaatataacagcactcccagcggagctggatgtgcttgaagctaacctgcaagtgctgaaactggatggaaatccgctaagaagcataagacgaactctgttggagagaggaacgaaagcagttctcaagtacctcaaagaagaattgccgtctgaataata

SEQ ID NO: 47666 - DNA, 172 bp, Zea mays
gcgacgcagcctcccgtagaccgagcaaggcaacccaccactgagaggcacgcagaggagcaggaagccgtagaccaagatgtcgtcggtgttcagcggcgatgagacggcccccttcttcggtttcctcggagccgccgccgccctcgtcttctcatgaatgggcgcaggt

SEQ ID NO: 47667 - DNA, 172 bp, Zea mays
cagaaaacagtgggatcgagttgtttcactgcacgagcacatcctccggcgaccaccggcctccctctccgtactctagcgaccgaccaacgcgtcgagcgaagatgtcgtggcagacgtacgtggacgagcacctgatgtgcgagatcgagggccaccacctcacgtcggc

SEQ ID NO: 47668 - DNA, 173 bp, Zea mays
tggagacaactgaacctgatgtctgtttgcgcgaagatatcgagacaaatgaatgtttggagaacaatggtggttgctggttagataaggctaccaatgtttctgcatgcaaggataccttccgtggtcgtgtctgcgaatgccctattgtgaatggtgtgaagtttatcggt

SEQ ID NO: 47669 - DNA, 160 bp, Zea mays
cagaagctttactggatctggaggactagcgcttcacagggatcgccatgtcggactcggaggagcaccacttcgaatcgaaggccgacgccggagcgtccaagacctaaccgcagcaggctggcaccgtcagtaagaacggcttcatcgtcattaagaa

SEQ ID NO: 47670 - DNA, 169 bp, Zea mays
cgatgaacttggatgatgcctttgagcagaagaatgaaatcgccaaagctgtagaaaatgaacgtgaaaaggcaatgtctatgtatggatacgctcttgtgcagactctgattgttgatattgagcctgatgagcatgtgaagagagctatgaatgagctcaatgcagc

SEQ ID NO: 47671 - DNA, 166 bp, Zea mays
tcacgacaagatggcgtgcacaaacaatgcgatgagagccttgttcctcctggtcctcttctgcatcgtgcatggtgagaaggaagagtcaaagggcatcgatgcgaaagcgtccgggcctgatgggtccttcgacatcaccaagttgggcgcctccggcaatggg

SEQ ID NO: 47672 - DNA, 164 bp, Zea mays
ctgaccgagaagttcagcgtattcttatggagctactcaatcagatggatgggtttgatcaaacagtcaatgtgaaggttataatggcaactaatcgggcagacactctagatcctgctttgttgcgtcctggtagacttgacaggaaaattgagttccctctg

SEQ ID NO: 47673 - DNA, 166 bp, Zea mays
ggaatgccacatggacactatcaaacttctgccgtgggaagccacaaccgaactttcatcaagtcaaaccagcattgccagcacttcagcaacttatccactctcaggatgaggaggtcctaactggtgactgttcggctctatcatacctatctgatgggactaa

SEQ ID NO: 47674 - DNA, 293 bp, Zea mays
ctcctccatcaccaccaccaagctcaacaacagccagctcgcgacaataatgaagagccgcagcatggcatcatcggccgcgctcttggtgctagccctcgcgctagtggcggccaccgccccacaggtagcggaggcaaagaagaagagagcggcggagagcggcgaggcggcggaggcgatgaagatccaggacgacttctgctcgacgctgtgcgagggcaagaaggggccggacctggtcgtgtgcaagactcctgcgcgctctcccagcagtccaagctggtgctgta

SEQ ID NO: 47675 - DNA, 165 bp, Zea mays
gtctcgcgttgcgttgcatgtagatccaatcagacaggcatcgcttgattggaagagacggattaaaatagttgatggtatagcccagggactcctgtacctccacaatctctcgagcgtacgcatcacccacagggactttgcagcgggtaacatcctgttaga

SEQ ID NO: 47676 - DNA, 283 bp, Zea mays
atgggtacaaggcggctgaggtcaccaaggcctgcaacaccacctgcgccaaggagaagcagcctctgctcagcgagaactgcaggaggtcctgcacccctcctccttcctgaacgcagagcacgcccgccggtcgtcgtcttctgcctgcttgcgtgacactgaatcactgatacatcatacatgcatgcatgggatgcgatgacgatttgatgcatgcatgcatgggtatacctaccaatttgatgaccgacgatgtatagtttcgtcgactgcttcatac

SEQ ID NO: 47677 - DNA, 287 bp, Zea mays
atttgtttgatgcttaaaggtctgatccgactgagaacgatagtgtagagggtctcaggccaaatgcacggggccctggtcttgttaccttcgggcccgacagagttatggagttctgcaacaacaatgacctgcagttgaatgtgcgagcacacgagtgcgcgatggatggcttcgagcgtttcgctcaaggtcacctgatcactcttttctcagcgacaaattactgcggaacggcaaacaacgcaggagcgatcttagttctcggaagggatctggtcgttgtt

SEQ ID NO: 47678 - DNA, 281 bp, Zea mays
cgcccgactcgagccgatgatggtctacttattgatgcaaactctggaaagacagttcattccaaaaaaggacatcgggactactcatttgcatcggcttggagccctgatgggcgaacatttgctaccggcaaccaagacaagacatgccgaatctgggacgtgaggaacctttcaaaatccgtccatgtgttgaggggtaaccttggagccatccggtccatccgcttcacctcggatggccagttcatgtccatggctgaacctgctgactttgtgca

SEQ ID NO: 47679 - DNA, 282 bp, Zea mays
acagttcctacagttgtaaccagagcagagcctcacaaccaggttataattcatccgactcaagcaagggtcctcactatccgggagaacgcaaggttacagggcttccccgattactaccgattgtttggcccgatcaaggagaagtacattcaagtcgggaacgcagtgactgtccctgttgcccgggcactgggctaacgtctggggcaagcctacctgggtgaatctgaggggagtgaccctctgtaccagctgcctccaagtttcacctctgttgga

SEQ ID NO: 47680 - DNA, 279 bp, Zea mays
aagctcaacaacagccagctcgcgaaaataatgaagagccgcagcatggcatcatcggccgcgctcttggtgctagccctcgcgctagtggcggccaccgccccacaggtagcggaggcaaagaagaagagagcggcggagagcggcgaggcggcggaggcgaagaagatccaggacgacttctgctcgacgctgtgcgagggcaagaaggggacggacctggtcgtgtgcaaggagtcctgcgcgctctcccagcagtccaacctggtgctgtacggc

SEQ ID NO: 47681 - DNA, 161 bp, Zea mays
gataaacactggaacaaccttgttgagagtgccaaggagcgaaattgcttattcaaggtccccaagccattgaccgcattctttgcagaggataacctgaagactatgaaggtggaaaggcgtcctccgccagagatgaatgctcgagtactggaagagat

SEQ ID NO: 47682 - DNA, 272 bp, Zea mays
caagacagaacatggatgtgaatatgagaaccatgtggtcgtcgatgcgggtacatgttacaatggctgtagcgttagtgttcttagtaagcggcgcatggtgcggtcctcccaaagtccccccaggcaagaacatcacggccacctatggcaaagactggatggacgctaacgcgacatggtatggcaaaccgacgggtgccggtcccgacgacaacggtggcagctgcgggtacaaggacgtgaacaaaccccccttcaatagcataggc

SEQ ID NO: 47683 - DNA, 278 bp, Zea mays
ctcatatgaccctgaccggttcggtcccggaagggaggaggacaaggctgcaggtgccttctcgtacatctccttcggtggtggcaggcatgggtgcctcggtgagcccttcgcctaccttcagatcaaggcgatctggacgcacctactgaggaactttgagttcgagctggtatcgccgttcccagagaacgactggaacgccatggtggttggcatcaagggcgaggtgatggttaactacaagaggcggaagcttgtcgtggacaactaagatt

SEQ ID NO: 47684 - DNA, 283 bp, Zea mays
ccgttgtgctctctctcttcattcgttcccggcctcaccccgagccagtcgtctcgctagggtttcgccgccgccgccatgcctcgccgcagctcaggaaggtctgccccacgcccagctccccgtgctgcttcactgaggaacccgccacagccagcacgccaggctcctcctccagctcctgttcgagatggtggtggctccatgtttggaggaattgggtccaccattgctcaaggtatggcgtttggcacgggtagtgccatggcacacagggctgttg

SEQ ID NO: 47685 - DNA, 204 bp, Zea mays
caagacaactgttctggagctgacgtacaactatggagtcacagaatacagcaagggcaatgcatatgctcaggttgccattggcaccaatgatgtgtacaagagcgccgaggcggttgatctggcgaccaaagaactagcgtggcaagatttatgcggcagccaggagcctctacactgggatcaacactacagatcgcctct

SEQ ID NO: 47686 - DNA, 271 bp, Zea mays
tcgagatcctaggcatgaatttcgggtgcgtcctcgcggctctgtccgacgccaagatccccgacaagggctgcctgctcccgctcatctctaagctgctcggctacgccatcgtcgccgcatccaccaccgtgaagcttccccagatactgaaaattttgaagcatggaagtgttagaggactaagtgtggcatcctttgaacttgaggttgtcggctacacaattgctttggcatattgtattcataaaggacttcccctttcagctta

SEQ ID NO: 47687 - DNA, 274 bp, Zea mays
cgatccatgtccctcatttcagctcaagttccctgttaagccagctgatatcaagaaaagaatagagagcttgatcgaccgggagtacctggagcgcgacaggagtaacccccagatctacaactatctggcttgacaacgttttggtggatcgttcccatttcattactatcagaaaaaggcactgtaaattaatttattttccggtatcttgttacttcatgcttttactctctgggaggaagttgtagttgtcagctgctgcaacgtgttt

SEQ ID NO: 47688 - DNA, 271 bp, Zea mays
gtcaagcctgttcgaggtggaccaagagcagaaggccagcaactcgcggttcatgacccagaaaccggcgtcggcgatagtgtcaaagctggagcagatcgctgagacagagcgcttcatggtgaagaaacaggacgggctggtgaagctgcaggggtccaagcaagggaggaaggggcagctcgcgatcgacgccgagatcttcgaggtgacaccggcctttcacgtcgtcgaggtgaagaagtcggcaggcgacacgctggagtatgag

SEQ ID NO: 47689 - DNA, 275 bp, Zea mays
ctcatggccaagatcaagatcgggatcaatgggtttggcaggatcggaaggctggtggccagggtggccctgcagagcgacgacgtcgagctcgtcgccgtgaacgaccccttcatcagcaccgattacatgacctacatgttcaagtatgacactgtgcacggacagtggaagcaccatgaggtcaaggtgaaggactccaagacccttctctttggtgagaaggaggttgctgtgtttggctgcaggaaccctgaggagatcccatggggttc

SEQ ID NO: 47690 - DNA, 282 bp, Zea mays
cgtgcgacggcaagaaggggacggacctggtcgtgtgcaaggagtcctgcgcgctctcccagcagtccaacctggtgctgtacggcaggatccagtgcaagggcaagtgcaccgagcagaagggcatcacggcgccggccatgaaggtctgccaggaggagtgcgacaaggcgtacgtggtgaaggcggccgaggtcaccaaggcctgcagcgtcacctgcgccaaggagaagaacccgcgcctcagcgagaactgcaagaggtcctgcacccctcctcctt

SEQ ID NO: 47691 - DNA, 272 bp, Zea mays
aggtggtgtctgatcgcgttgtggactcaccgtgctgccttgtgactggcgagtatggctggaccgccaacatggagaggatcatgaaggcacaggccctgagggactcgagcatggcgggctacatgtcgagcaaaaagacaatggagatcaacccagagaaccctatcatggatgagctccgcaagcgtgccgaggctgacaagaatgacaagtcagtcaaggatctcgtgatgctgctgttcgagactgctctcctgacctccggcttc

SEQ ID NO: 47692 - DNA, 275 bp, Zea mays; identical to SEQ ID NO: 42402

SEQ ID NO: 47693 - DNA, 277 bp, Zea mays
ctcgtcttcgtctccaggtttcgcgggggccaaggtttctgccggagcagtcgcggtctgcgctgcggcacggcgacgaggtggggatggagtaccgcgacaagctcgtgctggcgcccatggtccgcgtgggcaccttgccatttaggctactggctgctgaatatggtgctgatattacttatggagaagagcattattgatcacaaattcttgaagtgtgagcgtgttacaaatgaatctcttgggactactgattttgtggagaaagggactg

SEQ ID NO: 47694 - DNA, 277 bp, Zea mays
gcagcagatagctccatccatcctctttcccctcctcgcttcgattcatcggcggattcctcctacatcgaaagtccccgtccccgtccacttcaggcgagcagctagcccgagatggcaaacgcgagatcgggtgtcgctgtgaatgacgagtgcatgctcaagttcggcgagctgcagtcgaacaggctgcaccgcttcctaactttcaagatggacgcaaagtttaaggagatcgttgtggaccaggtcggggatcgcgctaacagctacgagg

SEQ ID NO: 47695 - DNA, 266 bp, Zea mays
ggacctagccatgatcaccgggcagtggctcgtcaagactcgtgagggaaacaccatcggtatcgcagtcaacctccgcggtatgataatgtacaacttcctggataggctcatcaaccttgggctccctaggaccatggacttgctgggtgtcaaccccaacagcttcgacgggcacggcaactacagccttggcctccgtgatcagggcgtgttcccggagatcccgtacgatgtgggcgggaagaagtacggcatggacgtgt

SEQ ID NO: 47696 - DNA, 271 bp, Zea mays
atccaagcacaatgatgcaaatggagaaggtggtcgtgatgggtgcaatgacaactacagctggaactgtggcattgaaggagaaacaaatgatttgaatgtgctaagtcttcgttcaaggcaaatgaagaacttccatgtggcattgcatgatttcccagggtactccaatgatgctgatgggagatcaatatggtcacacacgttatggaaacaacaatagctatggacatgatactcacataaataattttcagtggggccagttgga

SEQ ID NO: 47697 - DNA, 275 bp, Zea mays
ctcctctccctctccctctccgatccattctccagcgcacgtagtaaacatgtctgaccgggcaaagatgtcgtggcaggcgtacgtggacgagcacctgatgtgcgagatcgagggccaccacctcgcggcggcggccatcgtcggccacgacggtgccgcctgggcgcagagcacggcgttccccgagttcaagaccgaggacatggccaacatcatgaaggacttcgacgagccagggcacctcgcgccgacagcctgttcctcggacctac

SEQ ID NO: 47698 - DNA, 273 bp, Zea mays
gtgcgcgggcgacaaggtgacgggcctgctcctgcgcaacgtgtactgcgcgctctcccagcagtgcaaactggtgctgtacggcaggatccagtgcaatgtctagtgcaccgagcaccaggtcatcacggcgccggccatgaaggtctgccaggtggagttcgacaaagcgtacgtcgtgaaggagggcgaggtcaccaaggcctacagcttcacctgcggcaatgagaagaacccgcgcctcagcgagaactgcaagatgtcctgcacccc

SEQ ID NO: 47699 - DNA, 272 bp, Zea mays
gaggagaatatcaagatgccgttcgctgagtcctccatcttgatattctcgtagtggatcttggagacggtgagcacggaggactcagccaaccccatcttcatcgacatgaagtactgccccaacaagttgtgtactgccaacggcgcctccaaggtcaccgtcaaggatgtcaccttcaagaacatcaccggcacctcctccaccccggaggccgttagcctgctctgcactgccaaggtcccatgcaccggcgtcaccatggatgacgt

SEQ ID NO: 47700 - DNA, 268 bp, Zea mays
gtgctattggtgagggcatgacacgtagagaccattcggatgtgtctaatcagctttatgccaactacgcaattggaaaggatgttcaggccatgaaggcagtcgttggagaggaggcactctcgtctgaggatctgctttacttagagttccttgacaagtttgagaggaagtttgtgacacaaggagcatacgacacacggaacatcttccagtcactagatcttgcatggacattgcttcggatcttccctcgcgaacttctcca

SEQ ID NO: 47701 - DNA, 276 bp, Zea mays
atcgagctttcgttatcctcctcgatcttaattacaggtcatagctaagcaggtctgacaggatgtcgtggcagacatacgtcgatgagcacctgatgtgcgaggtcgagggccaccacctgacctccgctgccatagtcggccacgacggcgccgtttgggcccagagcaccgcattcccacagttcaagacagaggagatgaccaacatcatgaaggacttcgacgagccccggttccttgccccgaccggcctcttcctcggccccaccaagt

SEQ ID NO: 47702 - DNA, 298 bp, Zea mays
ctccctcccccccgcctccactaccccactcccaggcgccgcagcggagtcgccggcgggatgacgacgcgcttcaagaagaaccgcaagaagcgcggccacgtgtccgccgggcacggccgcatcggcaagcacaggaagcatcccggaggtcgcggtaacgccggtggcatgcaccaccaccgcatcctcttcgacaagtaccatcccggctacttcggtaaggtcggcatgcgctacttccacaagctccgcaacaagttctactgccccgcggtcaacatcgagcgcctctggt

SEQ ID NO: 47703 - DNA, 289 bp, Zea mays
gtaattgcagttgtgagtatactggctgcatgtgatgaatctggctcccttgcccttggtaagaggattcaccggcatgtgcgccagaggaagctgagtagatcaaccctggtatgcaatgccctgatggacatgttctgcaagtgtggatgtgttaaccgagccgactacatatttgacactgagattgttgaaaaggatttagtgtcatggaacattataattggagggtttgcaatgcatggcccaggtgaaaaggcgctggaactcttcgcacaaatggagcagc

SEQ ID NO: 47704 - DNA, 296 bp, Zea mays
cgaccctcagacagaaggtattgttctcattggtgaaattggaggtacggctgaggaggatgctgcgacattcatccaggaaagcaaaacacaaaagcctgttgttgcattcattgctggacttacggcacccccgggccgtcgcatgggtcatgctggagctatcgtggcaggaggaaagggtactgcccaggacaaaatcaaggcactcagagaggcaggtgttaccgttgtcgagtcaccagcgaagattggctctaccatgtttgaaatcttcaagcagcgtggaatggtag

SEQ ID NO: 47705 - DNA, 295 bp, Zea mays
gacggataaagtgacgaaccctctattcgagaagaggccgaagcagttcggcatcggcggcgcgttgccgcccaagaaggacctgcaccggttcgtcaagtggcccatggtcgtgcgtatccagcggcagcgccgatcctcaagcagcgcctcaaggtaccaccggcgctcaaccagttcacccgcaccctcgacaagaacctcgctacgaacctgtttaagatgcttctcaagtaccggcctgaagacaaggctgccaagaaggagaggcttctgaagagggcccaagctgaga

SEQ ID NO: 47706 - DNA, 295 bp, Zea mays
gcagcagccaagttatcttgcaagaagcgcctggccaaacatgtgttggatgtgacaggtgttacgattgatccaactagccttttcgatatacagattaagcgcatacatgagtacaagagacagctcctaaacatattgggagctgtttacagatacaaaaaattaaagggaatgagtgcagaagagaagcagaaggtcacaccgcgcactgtcatgataggagggaaagcgtttgcaacatacactaatgccaaaagaatagtgaaattggtgaatgatgttggtgctgttg

SEQ ID NO: 47707 - DNA, 295 bp, Zea mays
gaaataaagagggagaggcgaaaacaatctaacagggagtctgcaaggagatctagattacgcaagcagcaagagtgcgaggacttagcccggaaggtagctgacctaacgaccgagaacagcgctctcagagcagaacttgacaacctcaagaaggcttgtcaagacatggaagcagaaaattcacgtctgttgggtggggtggctgacgcccaggtaccaagtgtcacgaccacactgggaatgagcatcgagccgccgaagttgcagctgcagctgcagcagcatcatgatg

SEQ ID NO: 47708 - DNA, 294 bp, Zea mays
gttagacaagaggatgcgccttctgtgcttgagaggcatttccatgatttgcaaaagaaatacggagctgtcttagctgttgatcttgtcaatacaggtggcggtgagggtcgcctccgtgaaaaatatgcaaaatctattgaacctattcttagtgaagatataagatatgtgcacttcgacttccaccgagtttgtggtcatattcactttgagcgcctttctcagctatatgatcagatccaggactatcttcagaaacataagtacttccttataaatgatacaggagag

SEQ ID NO: 47709 - DNA, 295 bp, Zea mays
ggaggcaaagatgataggggattcctgtggaggattggatcagaagagggtgccctggagctgactggacataaggatactgtcggcacagtggctttcagttcagatggaaatttgttggcttgtggaagttttgatgggcaaataaatgtgtggaatacagctacacgaactctcaagggaacccttgagggttccgggtcaggttttgagtggcttaaatggcattctcggggacatttgataatcgcaggatcagaggattgtaatgtatggatgtggaatgccgaccata

SEQ ID NO: 47710 - DNA, 263 bp, Zea mays
gttcaagcggaggaacggcggacgcaacaagcacgggcgcggccacgtcaagtacatacgctgctgcaactgcgacaagtgctgtcgaaaggatgaggctatcaagcggttcttggtgaggaacattgttgagcaggctgctgtgagggacgtgcaggaggcttgtgtgcatgatggatatgttcttcccaaattgtacgcaaaggttcatcactgtgtctcatgcgcaatccatgcgcacattgtccgtgtccgctctcgtg

SEQ ID NO: 47711 - DNA, 291 bp, Zea mays
aagctgcatcatatgagttcacaacgcttacttgcattcctggaattgttcattacaatgataccaaaatccagcttcttgatcttcctggtatcattgaaggagcttctgaaggcaaggggcgtggtaggcaggttattgctgttgcaaagtcatcagatcttgtgctgatggttctggatgcctcaaagagtgaaggacatcgtcaaatattaactagagaactggaagctgttggactccgtcttaacaaaaggcctccccagatatacttcaagaggaagaagacgg

SEQ ID NO: 47712 - DNA, 290 bp, Zea mays
agctgtgccacacattgagttgaagcatgtgattgctgctacaattggtcttaagggtcttggaagcctcctttttattttgagcagctctctcggtgcttatctcctgctgctgtaccttgctttgatcactcctatcatccatgacttctacaactacgatatggagaaggcagaatttgcaggcctctttgcgaagttcacccaggatttggcgctgatcggagctctgctcttctttctgggcatgaagaactccatcccgaagcggcagggcggcaagaagaagg

SEQ ID NO: 47713 - DNA, 293 bp, Zea mays
gcatcgatcacaacaagatggcatgtatagacaatgcaatgagagccttgttccttctagcgctcttctgcaccgtgcatggtgagaaggcaaagtcaaaggacaacgattcaaaagcgtccgggcccggtgggtccttcgacatcaccaagttgggcgcctctggcaatggcaatacggatagcacgaaggctgtgcaggaggcgtgggcatcggcgtgcggcggcaccgggaagcagacgatcctcatccccaagggcgacttcctcgtcggaccactcaacttcacaggc

SEQ ID NO: 47714 - DNA, 292 bp, Zea mays
aggtcatgcgggaggaggaattcgcgccggtaaagaacgccagcggcgcaacgtatgacacccctgatagcgcgaagtcatgctgctccgcctccacagcagatgggtagtcgctgctggcggcttcttgacgcactctgtgcccttgtatatgacaggcgtcgaagtttctccgctctcctcctacgccggggagaacctggaagccatctgccgtgggcgaacgttccatgcgccgagcgagatctcgttttaggaggtagacctgttcatgggactggagtagcagttg

SEQ ID NO: 47715 - DNA, 160 bp, Zea mays
cagcgactaatgttttccgtgttaaagaggatgttcgacctatattctgggccaacagaccaaagagctatcttaaaaggacattaggttgggatcagtatccccatggacggtggggtgattctcggaacccatcatatggagcacttactgaccacca

SEQ ID NO: 47716 - DNA, 291 bp, Zea mays
tgcacaggtccccgaggaagcaagagagcttgacaaggagctcaaacaagtcacgaaacagaagaatgaagctgttcgaagccaggattttgagaaggctggggaattgagagaccgtgaaatggaattgaaggcccagataacagccctcattgacaagagcaaggaattgagcaaagcagaggaagagtctggagagacaggacctatggtcaatgaagaagatatccagcacatagtgctgctcagggatggcatccctgtggagaaggtttccagcgatgaatctga

SEQ ID NO: 47717 - DNA, 285 bp, Zea mays
aagacatctcgttttggaaatgcatttcatctgtgtcgtgagattttacgacttacgaagttggctattgatgctaatatccagttccgtctgggaaatgtggatgccttccagttggctgatggtctgcactatatattttctcatgttggacagttaactggtatgtataggtacaagtaccgattgacgaggcggtcgatggggagggcgacggtgacgaggacgacgatggggaaggcggtgacgaggaggatgatgatgaggaggtggatggtgatgaga

SEQ ID NO: 47718 - DNA, 157 bp, Zea mays
ggagccgcaaaccaagcaggataattttctatcgagatggtgtcagtgaggggcagtttagccaggtcttgctttatgaagtggatgcaattcgaaaggcgtgtgccagcttggaagagggctaccttcctcccattacattcattgtggtgcaaaa

SEQ ID NO: 47719 - DNA, 282 bp, Zea mays
tcgtgaatccctgaagcgtgcatatatatattcctgccaagataaaggtaatggagtcgtcacgcaggttccagccggccgtcatcctgcttctcctgctcattgtgtccaccgatatggcacaggcaagggaatgcgagaagtacagtgagcgatttgttggggcatgcatgatcgcagacaactgcgccaatgtgtgccgcggtgagggcttcttggccggcaggtgcagcaccttccgccgccgctgcatctgcactaggcagtgctaaacaagatcgc

SEQ ID NO: 47720 - DNA, 283 bp, Zea mays
tgccgagtgcccgattacaatcagccatcgccaccacctccctccgcggctccgccttccgccgcgaacacgccgctgtctcgaccccttgtactcctccttcagcaagatggtcgagattgagataaaaacagcacctgctgacttccgtttccctacaacaaaccaaacaaggcattgttttactcgctatgtcgagtaccacaggtgtttgaatgccaaaggggatgatgctggtgtttgcgaaaaatttgccaagtactacaggtccctttgccctgga

SEQ ID NO: 47721 - DNA, 282 bp, Zea mays
caccaatctattgctcaaggtttctgtcaaaggaaacaatggcaatgagtcttctgttactgttcggttgtatggaccaaatacagacttggtgattgatcggaaaagggaattgcaggcgataccgtatctctcagctgcagggttcggggctcggctgcttggaatgtttgaaaatggagtagttcagtcattcatctatgctcgaacactgtcacctgcagacatgaaagaacctaaaatagcagctgaaattgccaaggagctacgcaaatttcatca

SEQ ID NO: 47722 - DNA, 281 bp, Zea mays
gggaaactggaggaagttattcttataacaagcatccttattgttgcctttttcacaacattgacaaagctacatccgaagatgaagccgtatgagtatggattccgtgtgttcttgttgacattctgttacgttatggtctctgggtacaacactgggaaattcactgatacagctacaagcagatttatattgattgctattggtgctgctgtcagtcttggaatcaatgtaggcatctacccaatctgggcgggagaggatttgcataacttgatagg

SEQ ID NO: 47723 - DNA, 280 bp, Zea mays
aaaacatggctgtgcatgtaagcaccatgtggtcgtcgatgcaggcacaggtggcgatagctatggcgttggcgtggctggtgagcggcgcctggtgcggtcctcccaaggtcccccctggcaagaacatcacagccacctatggccaggactggctggacgctaaagcgacatggtatggcaagccgacgggtgccggtcccgatgacaacggcggcggctgcgggtacaaggacgtgaacaagccccccttcaatagcatgggcgcgtgcggcaacat

SEQ ID NO: 47724 - DNA, 281 bp, Zea mays
atccaagattcatgtgcttggttcgaactaccagagcaggcttcttgaagtaatggattcgagtgagctgccagaattccttggcggttcatgcacatgtagtgacaagggtggttgtcttggatcgaacaaagggccgtggaatgatccttatatattgaagctgatccacaatttggaagctggatgcgtgagggaaatcaaacctgtttctgagggggaagaaagaaacagctcatcctttcggttggaacagatgaaatggcagggcttgctaagtg

SEQ ID NO: 47725 - DNA, 271 bp, Zea mays
atttgttgcggatttgtcgtatgctgatagatatgaaatactgatggcattcgttgggattcctggggtcgattcgttgagcaccgtaccgcataccagccatggatttggaatactggaaaccatgaaatagagtacaggcctgcatctgggagaaacttctgtattcacgccatatttgcataggtacatgactccatatttagcatcaaagagcagttctcctatgtggtatgctgtcaggcgtgcatctgctcacatcatcgtgttg

SEQ ID NO: 47726 - DNA, 282 bp, Zea mays; identical to SEQ ID NO: 47721

SEQ ID NO: 47727 - DNA, 284 bp, Zea mays
cgaacggcttcagcgacctgatgtcgatgacctcggggtcgtaccccttgttcaccagcgtcttggcagcctgcatcacgtggtacctcatgcgggagtacgttgtggtcacgtgctcacctggccgcaccatctccgcctcctccaggcagcagcatgtactcctcgtcggggattttctccttcaggttgtacaagaggacgtgctcaaacagcaccacggggttctcgctccttatggccgccttcatcaggccctttgcgttgtaaggagtggagcaggc

SEQ ID NO: 47728 - DNA, 281 bp, Zea mays
ctgccgtgtagggaccgtagactcagcgactgcgaaggagggataaggggatggccgggatcggaccgatcaggcaggactgggagccggtcgttgtcggaaagcacccaccgccgccgccaagaaggatgagaaggccgtcaacgccgcgcgccgcgccggtgcggagatcgataccatgaagaagtacaacgctggtacgaacaaggcggcatccagcggtacatccctcaacaccaagcgcctcgacgacgacaccgaaaacctcgcccatgagcgag

SEQ ID NO: 47729 - DNA, 279 bp, Zea mays
gacaagcctatgggttggcgccacttcactgctgaaagagatgttgagttcaaagctttgctcttcattccaccgaagctccgtatgatctctatgcagtctaaacagcaacaagtcaaacctcaagttgtatgttagaagagtgttcatctctgatgaatttgatgaccttcttccgaagtatctcagctttttgaggggtattgttgactcagccacactgccgctgaatgtgtcacgagaaatgctccaacaacatagcagtctgaagactatcaa

SEQ ID NO: 47730 - DNA, 277 bp, Zea mays
tactgacctcatcaagaaagtcagcaccaactgtcttgtcatgcaaaatcacagatatggtatatcaccaaggcgatatcgagagaacgatgcacatagtctcaaaatcttgactacatcacctgatgaaaacggcaaggtctatgtctcaactgtacaagccaataattatccaatcacttgcacgcaatggcatcctgaggtaatttagttgtagctgtttcaggagttccacatttagtgttcttattggttcttccttttctcttgtgcactg

SEQ ID NO: 47731 - DNA, 268 bp, Zea mays
cgaaatggtgaagctgaccacggcgatgtgctgggagttggtggcgaagaccagggacaccgtcgacctggtcggactcgtcatctcgaccgatagacaacgtctgctatgataggaggccggagaaggagccggcactgtgcgagccctccgacgatcccaacgctgcatggaacatacagttccgggcgtgtatgcaccgtgttcccgaggaccagtcagtgcgtggcgcccggtggccggtgctctggccggcgaggctgcggaa

SEQ ID NO: 47732 - DNA, 280 bp, Zea mays
cccaattctcacgcgctcgccgcctaggagccttcacgttggcggcgggcggcagctcggttcctctcctccaccgcacctccaagaatccacctctcttctcgatcgctcggtcgcgccatggcagttcaccggctccaaccttccccatccggcctacagtgctccaccgtccggtcgccagtgctcctccatgggccacggctgacgggtgcacgcaccggtatgcatcccttgctgctctaattctcgacgctctagctcgtgtaccagatgtgca

SEQ ID NO: 47733 - DNA, 278 bp, Zea mays
gagctgcaggaaacgcctagcggaccacaaccgccgccgccggaagtcaaagccatcggatgctgatgccggagacaagaaaagggcacatgcgataacccgcagctaaagacaaagcagagagtagcagcaagaacatggatatcggagatgggttgggcgcacagatactgggaagtgcactcttgtccaaggaacatgatcaagccatggatcttggagaggtggtgaaagaagcagtggatcccaaggggaaggcatcaatgcaacagcattac

SEQ ID NO: 47734 - DNA, 274 bp, Zea mays
gggattggtgcggaaatatgcatgtctgttgtagaggacagctttgagtatcttgatgcaccagtcgagaggattgctggagctgatgtgcccagcgacgtgcaaccttgagaggatggctgttccacaggtcgatgacatcgtccgggcagccaagcgtgcttgctacagggcagcagtaccgatggcagcaaccgcctagtccagcagaaccctgcatgttgcatttctttgtctacttttactgtccgtgctccagaaagacgtgtcgcat

SEQ ID NO: 47735 - DNA, 269 bp, Zea mays
ggcgcacaaccagttgtcagtccgtttgaagctgttggagttaaccctaaagttggtggaatagagattgattcttgttcagaactagtgtactgacttgcaattggagatgtagcagcgttccccctggcagatgtacaatagcattgctcgagtggaaaatgtggatcatgctcggaagtccgcacaccactgtatagagacgctcctaacatcccagacaaaagcgtatgactaccttccatacttctactcgtgggtttttgagt

SEQ ID NO: 47736 - DNA, 276 bp, Zea mays
aagtctccttcctttctcccgtcgcctccgcctccgccttcagtttagcctccaagcaggggcgccgcgcggggtattctgtccgtcgttgaggtagggtcattgcaccgggggagcggagatgaagccggttgctggggatcgtggtgtcgaagaagatgcagaagtcggtggtggttgcagtggaccgtctcttccacaacaaggtatacaaccgctacgtcaagcgcaccgccaagttcatggcacacgacgatgacgactcctgcaacattg

SEQ ID NO: 47737 - DNA, 277 bp, Zea mays
cgtccgcgtccagtgtgtccgctactccgctccccctcagtcctcggttcctcacctagcggtagcgtgcgcgcgggagacgtagatggcggcttcgagggagcggcggcggcaacaccggtgacgccgacagaggggacggtgatcgcgatccacagcctggaggagtggagcatccagatcgaggaggccaacagcgccaagaagctggtggtgattgacttcactgcaacatggtgtcctccgtgccgcgccatggctccaatttttgctgata

SEQ ID NO: 47738 - DNA, 274 bp, Zea mays
gtacttggatcgagattctacgtgtggataacctggtcatcaccggcaagggaaaccttgacgggcagggcccatacgtgtggagctagaactctgacagaagtacgactgcaagaaccttcccaattcgcttgttatggacttcgtgaataacggggaagtgtccggggtcacgctgctcaactccaagttcttccacatgaacatgtaccggtgcaaggacatgctgatcaaggacgtgaccgtgactgcgctcggggatagccccaacacg

SEQ ID NO: 47739 - DNA, 279 bp, Zea mays
tgaagatgggagttgaggtgtaccacaacctgaagagcataatcaagaagaagtacggtcaggatgcgacaaacgttggggatgaaggtggtttcacacattccaggaaaacaaagaaggccttgaactattgaaggcagccatagaaaaggctggctacactggaaaggtggtcattggaatggatgttgctgcttctgaattcttcggtgagaaagacaagacttatgatcttaatttcaaggaggagaacaacgatggctcaaacaaaatttcagg

SEQ ID NO: 47740 - DNA, 272 bp, Zea mays
gtatattcttggtctgaagatggaactcaagagaaaggcattgagggatgatgtgacccgccaacaggagttggctgcttacttcacaaattcactcgagaattcatatgaggcttgtgctttctagcgccatggctctttgcttcaagcagaaaaactatgctactgcagcacactttgcaaggatgcttcttgagaatagccctcaagaggctcaagcaaggaaggctcgacaggtgctgcaagcttgtcaggataaggatgattctcac

SEQ ID NO: 47741 - DNA, 276 bp, Zea mays
aaactagaaaaggctcctcccgaccgcaacgcccctcatctccctcgactccgacatccccgacccgatggcgcccaaggcggagaagaagcagcgttaaagccggcggccgaggagaaggcggagaagacgaccgcagggaagaagcccaaggccgagaagcggctgcccgcgtccaaatcctccggcaaggagggcggcgagaagaaggggaagaagaaggccaagaagagcgtggagacctacaagatctacatcttcaaggtgctgaagcag

SEQ ID NO: 47742 - DNA, 274 bp, Zea mays
agtgggatcccagccaccgccgctagaagaagagctcggcgattcccaggtcccgcgagaatatgccgaagcagatccatgagattaaggattcctcccgcgaggaggaaggatgcccgctcagtgaagatcaagaggagtaaggatgttgtcaagttcaaggtgcgctgctccaagtacttgtacacgctctgcgtcttcgatgctgagaaggcaaacaagttgaagcaatctcttcccccaggttcaaccgtcgaggaggtctgattggata

SEQ ID NO: 47743 - DNA, 234 bp, Zea mays
gacaaatccatcaaatccctcaattgaacttagtcctgagttcaagaaggttgcggagcttccttggtcgcttcaagtcgatacctagcattcactgacagcttgaaggtttccggtgatgtttggttcggttctggacttgtattgaaggggacagtgaccatcactgcaaaacctggcgtcaagctagaaatcccagacggagcagtgattgggaatacggatatcagtggc

SEQ ID NO: 47744 - DNA, 267 bp, Zea mays
catcgatcacgacaagatggcgtgcacaaacaatgcgatgagaaccttgttcctcctggtcctcttctacatcgtgcatggtgagaatcctaacggcatcgatgcgaacgcgtccgggcctggtgggtccttcgacatcaccaagttgggcgcctccggcaatggcacgacagacagcacgaaggctgtgcaggaggcatgggcatcggcgtgcggcggcactgggaagcagacaatcctcataaccaagggtgacttccttgtcgg

SEQ ID NO: 47745 - DNA, 265 bp, Zea mays
ggcaatgagaggggtcaagcatcttcttgttcggaaaactgttccaaatgggttggtatttgttggggagcttccatttggacgaatgcgtagtcctaaaatggatcacctggtgtgttttcttcctggtacccttgctcttggtgcaactaaaggtatcaccaagagaaaagctcttgagactaatttgttaactgatgaagatatagaaaatctgcagcttgctgaagatcttgccaaaacatgtgttgagatgtacttcgtg

SEQ ID NO: 47746 - DNA, 241 bp, Zea mays
tcggagcgcacacacacgcaaccagatctcccccaaatccagccgtcggcacctccgcttcaagatgcagatctttgtgaaaacctactcaactatcaccctcgaggtggagtcgtctgacaccattgacaacgttaaggccacgatccaggacaaggagggcatccccccagaccagcagcggctcatcttcgctggcaaacagcttgaggatgggcgcaccttgctgactacaacatcc

SEQ ID NO: 47747 - DNA, 273 bp, Zea mays
aggatcttgaagatgcaactgcaatatctgcaccagatgcccatgctgaagcctgggaaactcttaaaggttcatcatgcattttgatactgagattggggatcgtggaatttcagggatgatattggctgcaaaatatgctcgtgagaatagagttccatatcttggtatttgcttgggcatgcagatatcagtgattgagatttccagacatgtcctgggactggaagatgcagacagtgaggagtttaacaaggatacaccgaatcatgt

SEQ ID NO: 47748 - DNA, 253 bp, Zea mays
agctgacgacaccaccgtgtggtcgacaaaataaaaaggagagagagagagatggctctgtcgtctcgccgtatggccgccgcacaaccgcgtcgtccttctcgtcctcgtggcggcagagaggacgatgggcagggtggtggtggaagagacgctctgcttgtcgcagagccatgccttcaaaggcgtgtgcctcagcaacaccaactgcgacaacgtatgcaagacggagaagttcacaggcggcgagtgc

SEQ ID NO: 47749 - DNA, 261 bp, Zea mays
acaggacctcaaaatctcagatccttcctgcccgcccgcccgtgcccgtcgacgcgtcgttcttgccggccgcgccccacctcgtctcccctccagggggatcggatacgccacaggctgcgcgatggtgctgtgggtcttcggctacggctccctcatctggaaccccggcttcgacttcgacgacaaaatcctcggcttcatcaagggctacaagcgcacctttaatctcgcttgcattgaccacagaggcacaccgga

SEQ ID NO: 47750 - DNA, 269 bp, Zea mays
tgacgtccagtgtactgtactggaagtcaaggttgttgaaggccatggtactacaattgatgttgttttggtcaatggtatactccatacgaaaaatagttgtttgtggcatgcagggacccattgtgacaactgtacgggctttgttaacaccacacccaatgagagagcttcgagttaagggcacctacatacatcataaggagatcagagctgcacaaggagtcaaaatatctgctcagggtctcgaacatgcaattgcagggaca

SEQ ID NO: 47751 - DNA, 272 bp, Zea mays
caacaagatggcgtgcacaaacaatgcgatgagagccttgttcctcctggtcctcttctgcatcgtgcatggtgagaaggaagagtcaaggatcagcgaaagcgtccgggcctggtgggtccttcgacatcaccaagttgggcgcctccggcaatggcaagacagacagcacgaaggctgtgcaggaggcatgggcatcggcgtgcggcggcactgggaagcagacaatcctcatacccaagggtgacttccttgtcggacaactcaacttc

SEQ ID NO: 47752 - DNA, 213 bp, Zea mays
cctgaaactttcaaatttgtcgcttggccttagctcccgctcccaggtctcactattacttttgtgtgtgtgtgtgtgaattagtagtatctctagatacgctaattcgatttgagacagtttcttgcgacttcgcgacagaaacaactcactggtgagagacataagccgaatgcagcagcgcaactacgggagggaaggattctcgcatat

SEQ ID NO: 47753 - DNA, 297 bp, Zea mays
ctggtggttttgaggctggtatctccaaggatggccagacccgtgaacatgctctccttgcgttcacccttggagtgaagcagatgatttgctgctgcaacaagatggatgcaaccactccgaaatactccaaggcacgttatgatgagattgtgaaggaagtctcatcctacctcaagaaagttgggtacaaccctgataagattgccttcgttcccatttctggttttgagggcgacaacatgattgagaggtccaccaaccttgattggtacaaaggcccaaccctgcttgagg

SEQ ID NO: 47754 - DNA, 294 bp, Zea mays
gaaacagttaagaattcatatataagagtgcatatatatatataatcctgccaagacaaaggtaatggagtcgtcacgcatgttccagccggccatcatcctgcttctcctgctcattgtgaccaccgatgtggcgcaggcggcgagggaatgcgagaaggacagcgagcgattccttggggcatgcatggcgtcggacaactgcgccaacgtgtgccgcggtgagggcttctccggcggcaggtgcagcaccttccgccgccgctgcatctgcactaagccgtgctaaattaa

SEQ ID NO: 47755 - DNA, 291 bp, Zea mays
gcatcgatcacaataagatggcgtgtatagacaatgcaatgagagccttgttccttttagcgctcttctgtgtcgtgcatggtgagaaggcaaagtcaaaggacaacgatgcaaaagcgtccgggcccggtgggtccttcgacatcaccaagttgggcgcctccggcaatggcaagacggatagcacgaaggctgtgcaggaggcgtgggcatcagcgtgcggcggcaccgggaagcagacgatcctcatccccaagggcgacttcctcgtcggaccactcaacttcacag

SEQ ID NO: 47756 - DNA, 232 bp, Zea mays
gttgaggagagtggaaatttatgaattcagccgaatgaatatggtttacactcttctaagcaagcgaaagcttctttggattgtacaaaacaagaaggtcgaagattggacagacccacgttttcccactgtccaaggcatagtacgtcggggcttgaaggttgatgcattgatacagtttatactccaacagggtgcttcaaaaaatctgaatctcatggaatgggataaa

SEQ ID NO: 47757 - DNA, 234 bp, Zea mays
cgacaagatggcgtgcacaaacaatgcgatgagagccttgttcctcctggtcctcttctgcatcgtgcatggtgagaaggaagagtcaaagggcatcgatgcgaaagcgtcagggcctggtgggtccttcgacatcaccaagttgggcgcctccggcaatggcaagacagacagcacgaacgctgtgcaggaggcatgggcatcggcgtgcggcggcactgggaagcagacaat

SEQ ID NO: 47758 - DNA, 231 bp, Zea mays
gcaaggggagcaacatcgccatccagctggatggcaacctgctgggatcaaacgacctggacaagtacacggcgagctggatcgaattgtctcacgttaacaacatcgggatcaccggctcgggcacgctggacggccaggggaccgccgtttatagcaagagcaagaccgacaacgtgaaggcgatgcccaacacactggtgctgtttcacgtgatcaacgccactgtcg

SEQ ID NO: 47759 - DNA, 97 bp, Zea mays
agcaagctcactggcatgtccttccgggttcccaccgtggatgtgtcagttgttgacctcactgtcagaatcgagaagggggcctcttacgaggaaa

SEQ ID NO: 47760 - DNA, 229 bp, Zea mays
gtcacggatatcaacgtcaaggactgcacgcttaagaagacggccaacggcgtccgcatcaaggcgtatgaggacgccgcctccgtgctcaccgcctccaagatccactatgagaatatcaagatggaggactcgggctaccccatcatcatcgacatgaagtactgccccaacaagttatgcaccgccaatggtgcctccaaggtcaccgtcaaggacgtcaccttca

SEQ ID NO: 47761 - DNA, 291 bp, Zea mays
ggccatggcggacgcaccccttctcccccctgcctcgcgcgcggcggccgagatggtgctgagcgcctgagcctgccctcctacgggctcactggcacgctctccacggccatcggtaacctcacgttcctgcgtatgctaaacctgagctccaattgattccgcggggaggtcccagcgaccatcgttcgccttgcgcatctgcaggcgctagaccttagctacaacgccttctctgaattccagagctgcgattcccgaggccatggagcagcagacaatatccattgc

SEQ ID NO: 47762 - DNA, 289 bp, Zea mays
tccagatgagtgacctgggacatctctccttctacctggggattgaggtgcaccagggagactccgggatcacacttcgacagaccgactatgccagagccagacgcattgttgagctggctgggctcaccgactgcaacccagctctcactccgatggaggagaggctcgaagctgagtcgcgacacacgacggaggacgtggatgttactcagtaccggcgtcttgtggggagccttcgctacctcgtccacacacggcctgacttggcatactccgtcggctacgt

SEQ ID NO: 47763 - DNA, 288 bp, Zea mays
ataatgctgatggcaacacaacattagtcttgaagaagactgaagctttcttcaagactaatgctgatggcaacacaacatattccaaggaaatgacgaagctctctggtatctctgaaattatccctgagaaggagatctgtgattttgacttcgaaccctgcggctactccatgaatgcaatccatggctctgcgttctccacgatccatgtgacgcctgaggatgggttcagctacgccagttatgaggttatgggcttggatgccactgccctgtcttacggtg

SEQ ID NO: 47764 - DNA, 289 bp, Zea mays
catttcgaataacacagttgagcgcgacgatgggatccctcgctaataacatcatggtcgtgggtgtcgtccttgcagcgctcgtcgccggcgggtcatgcgggcccccgaaggtgccgcccggtcccaacatcaccaccaactacaacggcaagtggctcaccgccagggccacctggtacggtcagcccaacggtgccggcgctcctgacaacggcggtgcgtgcgggatcaagaacgtgaacctgccaccctacagcggcatgacggcgtgcggcaacgtccccat

SEQ ID NO: 47765 - DNA, 231 bp, Zea mays
gacaagatggcatgcacaaacaatgcgatgagagccttgttcctcctggtcctcttctgcatcgtgcatggtgagaaggaagagtcaaagggcatcgatgcgaaagcgtccgggcctggtgggtccttcgacatcaccaagttgggcgcctccggcaatggcaagacagacagcacgaaggctgtgcacgaggcatgggcatcggcgtgcggcggcactgggaagcagaca

SEQ ID NO: 47766 - DNA, 280 bp, Zea mays
cctcctcgatcttaattacaggtcatagctaagcaggtctgacaggatgtcgtggcagacatacgtcgatgagcacctgatgtgcgagatcgagggccaccacctgacctccgctgccatagtcggccacgacggcgccgtttgggcccagagcaccgcattcccacagttcaagacagaggagatgaccaacatcatgaaggacttcgacgagcccgggttccttgccccgaccggcctcttcctcggccccaccaagtacatggtcatccaaggcgag

SEQ ID NO: 47767 - DNA, 284 bp, Zea mays
gcaaggaagactgccactagcccaagttcaggatggcgatgaaggttcaaatttatcagctgaggaaaagcatctgtatgagacattcataaaggacagtatccctccctggttggcaggatctggttacattggccttgcagcaatatcgattgcaaccgtcccaatgatctttccgcagatcaagtggtaccttgtcctctcggcatacgttgttgctcccctcctcgctttctgcaactcatatggcactggactaacggactggaatcttgcgtctacat

SEQ ID NO: 47768 - DNA, 283 bp, Zea mays
atcatccccgacccccgcaccgcagcgtaaaccctagtccccggcggcgaccttgcggcctccgctgcgctctgactggtgcgcgtttagacgaggagctgcggcggccaagaccaatcgaccatggctacccgtatccagtttgagaacatctgtgaaattggtgttttctccaagctgacaaatgcttactgtctggtagcgattggagggtcagagaacttctacagtgcctttgaggctgagcttgcagatgccatccctgtggtcaagacctctattg

SEQ ID NO: 47769 - DNA, 223 bp, Zea mays
gtcatcgatctcgtttcaaatccatccatcctcgtttcctccgtcccgcagcatctcaaccccatggccaagatcaagatcgggatcaatgggttcggcaggatcggaaggctggtggccagggtggccctgcagagtgacgatgtcgagctcgtcgccgtgaacgaccccttcatcagcaccgactacatgacctacatgttcaagtacgacactgtgcacg

SEQ ID NO: 47770 - DNA, 236 bp, Zea mays
ccgtcatcgatctcgtttcaaatccatccatcctcgtttcctccgtcccgcagcatctcaaccccatggccaagatcaagatcgggatcaatgggttcggcaggatcggaaggctggtggccagggtggccctgcagagtgacgatgtcgagctcgtcgccgtgaacgaccccttcatcagcaccgactacatgacctacatgttcaagtacgacactgtgcacggacagtggaag

SEQ ID NO: 47771 - DNA, 139 bp, Zea mays
  unsure (1)..(139): unsure at all n locations
tggagcangaagatgcaggcagagcacgggactcagtcgcggacacgcgacatgttcgcgcggcncttccgcaagaaggggtacatcacgctcaccacgtacctgcgcacctacaagatcggcgactacgtcgacgtca

SEQ ID NO: 47772 - DNA, 242 bp, Zea mays
  unsure (1)..(242): unsure at all n locations
tagcaactcgacatgcaagcgctacttccacaaccgcctgaaacctgcanagcttacctggacagcaatgtacaggaagcagcacaagaaggatatccatgctgaagcagtaaagaagaggcgccgcgccaccaagaagccatactccangtcaattgtgggtgcttccttggaagtaatccagaagaagagagctgagaagccagaggtccgcgatgctgctagagaagctgctcttcgtg

SEQ ID NO: 47773 - DNA, 123 bp, Zea mays
  unsure (1)..(123): unsure at all n locations
cagcacacctacatattgtcgcgcagtctcccccgcatcgtcgccanagatgcagatctttgtgaagactctgtacgggaagaccatcactttggagggtgagtcctcggacaccatcgacaa

SEQ ID NO: 47774 - DNA, 192 bp, Zea mays
tgtctctctggactgatcttgctactacgactggccacgagcttttggacatggttgccagttcgcctgttgttgcgctaacgagcctacacgtatctgacttccacggcgtgtactcttcaactattggcagcagtactctcgagattaatcctgcactgcctgaggctaagaatctgcagtcctggtatg

SEQ ID NO: 47775 - DNA, 392 bp, Zea mays
  unsure (1)..(392): unsure at all n locations
tgattcactggaggtaacatggggtgtgagagtgcacatttcaagctaagccacgagatgactcaattgctggatccatctggaactatgaagagtgatacatggaaccaatttctcaggttgtgtgtcaaaggatacctagcagcaaggaggcatatgaatgggattttaagtacagtcaacctaatggtggacagtggccttccttgctttagcaggggagatcctatcaataatcttcggaagcggtttcatccagagatgaatgaacgtgaggccgctaacttcatggtacgaacatgtgctgatgcttacaacaagtggactaccgcagggtatgacttgattcagtacttgcangcaggtattgagacatagttttgttctcgttt

SEQ ID NO: 47776 - DNA, 179 bp, Zea mays
ttcacatgttggttcaagctggagtgagctcaataccaattgtggatgagaacgactcgctgcttgacacttactctagaagtgacatcacagccctagctaaagacaaggtctacacacatgttcgcctggatgagatgaccattcatcaggctttacagcttggacaagatgccaat

SEQ ID NO: 47777 - DNA, 139 bp, Zea mays
  unsure (1)..(139): unsure at all n locations
aggaccggcacgctgcgctggggcgtcatccagctcggcncgctgtggatcatcttcgcgcggtccatgatcatccagctctcgcaggagctgctcatgagcagcgacaagaccatcgacgggcgcggcgtcgaggtgc

SEQ ID NO: 47778 - DNA, 272 bp, Zea mays
gttcacatatatgacatatccacatacaggcctagcaatcacagaaggaattacagagtgtctcaaagagtgggggatcaaagagaagatgtttactatcacattagataatgtttctaacaatctgtcagtgcgtgagcttcgagaaagtgggctatttggaggcgatcttcgtattgtccaatgttgtgcacacatattgattctcttagttcaagatggaatggcaattgctcatggagcaatctataagattcgtgagctggtcagac

SEQ ID NO: 47779 - DNA, 160 bp, Zea mays
  unsure (1)..(160): unsure at all n locations
atcgatcncaacaagacatcaacaagaatgtggacatgattgctgctaggcgtagagagcgagagtattttgcatctacaccagaatataagcacatggcttctaggatgggatctgaatatttaggaaagatgctttcaaagcatttggaacaagtgat

SEQ ID NO: 47780 - DNA, 427 bp, Zea mays
  unsure (1)..(427): unsure at all n locations
gacacagacgacagatgactgttgtgagtaggatggggtcattagtgcaggtgcaggtgctggtggcggtggcactagcatttctggtaggcagtgcctggtgtggtcctcncaaggttcccccgggtaagaacatcacggccanatatggtagtgattggctagatgccaaggcgacatggtatggcaagccgacaggtgctggccccgacgacaatggtggcggctgcgggtacaaggacgtgaataaggcccctttcaacagcatgggcgcgtgtggcaacgtcnccatcttcaaggacggtctaagttgtggatcctgcttcgagatcaagtgcgacaagccagtggaatgctctggcaagcccgtggtggtgtacattacggacatngactacgagcccattgcggcgtaccactttcgact

SEQ ID NO: 47781 - DNA, 179 bp, Zea mays
gctccgtgatctggtctggtgagatcggggatcggaccgtcgactcggcgagacatggcggactggggccccgtggtggtgggcgtggtgctgttcgtgctgctctcgccgggcctgctctgcgagctgccgggcacccaccgccacgtcgacttcggcggcttccacaccaacggcaa

SEQ ID NO: 47782 - DNA, 208 bp, Zea mays
gaaggatctcaagcgtggttttgtggcctcaaactccaaggatgaccctgccaaggaggctgccagcttcacgtcccaggtcatcatcatgaaccaccctggccagatcggtaacggctatgccccagtgctggactgccatacctcccatattgctgtcaagtttgctgagctgattaccaagatcgacaggcgttctggcaaggag

SEQ ID NO: 47783 - DNA, 221 bp, Zea mays
ggcacgcgtgctgggaactttactgcctcgagcacggcatccagcctgatggccaagtgcctggagataagaccgcgggacatcacgatgatgccttcagcaccttcttcagccagactggtgctgggaagcacgttccccgtgcaatcttcgttgatctagaacccactgtgatcgatgaggtgcgcactggcacgtaccgccagctcttccaccctgag

SEQ ID NO: 47784 - DNA, 227 bp, Zea mays
cccagatccacacccacatgtgctactccaacttcaacgacatcatccactcgatcatcgacatggacgcggacgtgatcaccatcgagaactcgcggtccgacgagaagctgctctccgtgttccgtgagggtgtcaagtacggcgcgggcatcggccccggtgtctacgacatccactcccccaggatcccgtcggccgaggagatcgccgaccgcatcgacaag

SEQ ID NO: 47785 - DNA, 228 bp, Zea mays
cctctcaaaccctagccgcctcctgcatctttcagagctctggaatctgcgccatggcgagtgagacggagaccttcgcatttcaggctgagatcaaccagctgctctcactcatcatcaacaccttctactccaacaaggagatcttcctccgcgagcttatctccaactcttccgatgcgctggactagatcaggttcgagagtctcactgacaagaaaaagctcg

SEQ ID NO: 47786 - DNA, 290 bp, Zea mays
acctggtgctgtacggcaggatccagtgcaagggcaaatgcaccgcgcagaagggcatcacggcgccggccatgaaggtctgccaggaggagtgcgacaaggcgtacgtggtgaaggcggccgaggtcaccaaggcctgcagcgtcacctgcgccaaggagaagaacccgcgcctcagcgagaactgcaagaggtcctgcacccctcctccttcttgaagcgaaccccttgaaatgaatgaaccatgcatgcatgcatgcatgtatgcatgcgccggggtgacgtggcgt

SEQ ID NO: 47787 - DNA, 224 bp, Zea mays
cgacggagctgttccccaagatcttccccgagcagtacaagagcatcgagaccgtcgagggcgacggcaagtcggccggcaccgtccgcctcctcaagtacaccgaggcggtgccgatgctgacgttcgccaaggagaagcttgagacggcggacgacgagaacaaggtggtgtcgtacagcgtggtggacggcgagctggcggacttctacaagaacttcaag

SEQ ID NO: 47788 - DNA, 283 bp, Zea mays
atggggttattcttattcctgagggccttgtggagagtattcctgaactatatgctctgcttcaggaaatccatggcctccatggcaaaggtgtttctgttgagaatatctcttctcagctttcaccttgggcatctgcactctttgagtttttgcccccttttatcaggaagcagctactactacatcctgaatctgatgattcagctcaactttcccagattgagactgaaaagctgctagcccagttagttgagactgagatcaacagacgtttgaagga

SEQ ID NO: 47789 - DNA, 193 bp, Zea mays
catcaaggagttcaaggaaaaaaacaaggtggacaaggtagtcgtgctgtggacggcgaacaccgagaggtacagcaacgtggttgcagggcttaacgacaccatggacaagctcctggcttcgttggacaagaacgaagcagagatctcgccatccaccttgtatgcgatacctgtgtcctcgagggtgtcc

SEQ ID NO: 47790 - DNA, 283 bp, Zea mays
aagcttgctgacaactgcaccggcctccagggcttcctggtcttcaatgccgttggtggtggcaccggctctggccttggttctctcctccttgagcgcctgtctgtggagtacggcaagaactccaagctgggcttcactgtgtacccatctccccaggtgtcaacctctgttgtggagccttacaacagcgtgctctccactcactcactgctggagcacactgatgtctccatcctgctcgacaacgaggccatctatgacatctgcaggcgctccctcg

SEQ ID NO: 47791 - DNA, 208 bp, Zea mays
  unsure (1)..(208): unsure at all n locations
agagggtcatcgagtcgcttgggctgcagccggtccgggactcnctggtggggacggtggagcagcgcgtcatctccggcgggcagcggaagagggtcaacgtcggcctggagatggtgatggagccgtcggtgctgatcctggacgagccgacgtctggactggacagcgcatcctcgctgctcctgctccgcgccctccgccgcga

SEQ ID NO: 47792 - DNA, 224 bp, Zea mays
gatgactgcagttgagatgcttgatgatgaagtctacgttggggcggagaatagctataacctattcacggtgcgcaagaacagcgatgcggcgacagatgacgaaagggccaggcttgaggtggtgggagagtaccaccttggggagtttgtgaacagattccgccacggttcactggtgatgcgccttccagactcggatatagggcagatccctacggtca

SEQ ID NO: 47793 - DNA, 233 bp, Zea mays
agcccttcttcagcgcagacttactcagtttatccttggacagcaagttcccttctctctgtggctttctcttgcccctgtggtcattggtgtttcaatggcatcccttactgagctttcattcaactggactggcttcatcaatgccatgatatcaaacatctcattcacttacaggagcatttattccaagaaagctatgactgacatggatagcaccaacgtgtatgctt

SEQ ID NO: 47794 - DNA, 222 bp, Zea mays
atcgaagtgaacaagcaaggaagagccatggcgagcgagcacgcggcggggggcgaggctaagcatgaccagaagcagagcactgatggacaaggcgaaggggttcgttgtggagaagatcgcgcacatccccaagcccgaggcgacgctggacggcgtgacgttcaagggcctgagccgggagtgcatcacgctgcacagcagcgtgaacgtgtccaaccc

SEQ ID NO: 47795 - DNA, 221 bp, Zea mays
ctgtcctcgcgtctcccttcccagatccatcgactcgcgcggtccgcccctcccgtcgtccccgttcgaaggtgttgattcggcagggagcgatttgattcgacatgaatcccgagtacgactaccttttcaaacttctgcttattggtgattctggtgttgggaaatcatgcttgcttctcagatttgcagacgattcttatttggacagctatatcagc

SEQ ID NO: 47796 - DNA, 227 bp, Zea mays
agaagacattccgccccaagaagagcgctccatcaggtagcaagggagcacagctccgaaagcacatagatgccactctcggcagtggaaaccttagggaagctgtgaggttgcctcctggagaggatatcaatgaatggcttgcggtgaatactgtggatttctttaaccaagttaatatgctgtatggcacactcacagaattttgcacacctgagagctgtccg

SEQ ID NO: 47797 - DNA, 218 bp, Zea mays
ggaaggccgcgggaacgaggcgcacgccgcatccatccgcgcctaccgctccaagatcgaggccgagcttgcccgcatctgcgacggcatcctcgcgctcctcgactcccacctcgtcccatccgccggcggcccgagtccaaggtcttctacctcaagatgaagggtgactaccacaggtaccttgctgagttcaagtcaggtgcagagaggaagga

SEQ ID NO: 47798 - DNA, 216 bp, Zea mays
ccacaacctcttctcccctgtatcctctcgtgcgatctccgcaggacgaggagggctcgcggcacggcagggtctccggtgtttttgttccagaatctgtagcaaatggctgacggcgaggacatccagccccttgtttgtgccaatggaactggcatggtcaaggctggttttgctggtgacgatgcgccaagggatgttttcccaagcattgtt

SEQ ID NO: 47799 - DNA, 206 bp, Zea mays
gcggcatttcgaataacacaggtgagcgcgacgatgggatccctcgttaataacatcatggtcgtgggcgccgtccttgcggcgctcgtacgccggcgggtcgtgcgggcccccgaaggtgccacccggccccaacatcaccaccatctacaacggcaagtggctcaccgctagggccacctggtacggtcagcccaacggtgccg

SEQ ID NO: 47800 - DNA, 122 bp, Zea mays
caagcactcgtttatcgaggtgttcctggacgtgccgcttcaagtgtgcgaaccagctgaccccaaaggcctctacaagctcgcacgcgccggcaaaatcaaagggttcaccggcatcgacg

SEQ ID NO: 47801 - DNA, 216 bp, Zea mays
ccaggccgacaacgccgtccctggcgccgagaacgagctcgcctcgggcgctgccagcccccattccttgcaggagctgcaggacactacgctgggctcactgctctcagcgcttatgcagcactgcgagcccccacagcggcgctacccgctcgagaagggcgttcctccaccgtggtggcctaccggcgacgaggagtggtggccggaactcgg

SEQ ID NO: 47802 - DNA, 280 bp, Zea mays
gtcagaagaggaaccggggagcggcactgcagcggccgagggcggacacgcgaggttcaagattatccggtttaaagacatcagaagaggctgcggcatggatagataccaaagggtagagaagcctcggaatgacacgccaatcagccagaatgagatcagaatcactactcaggggaggatgaggaactatatcagctatgggatgtcgctgcttgaggaaaatggacatgatgagattagtatcaaggccatgggacgggccataaataagacagtt

SEQ ID NO: 47803 - DNA, 275 bp, Zea mays
cttgtcttccagccaggagaagaaggctacggcggcgcttaccatgttctcagagaaggtgtcctggatgacgtgtctgccattttcggcttgcatgtggatccaggacttcctgtaggcaccgtttcgtccaggccagggccgtttctagcagcagcaggtagatttctggtgacggtcactggaaaaggcggacatgctgcagggccacaggatgctgtggatcccattgttgcggcatcctctgccatcgtcagccttcagcttcttgttgc

SEQ ID NO: 47804 - DNA, 88 bp, Zea mays
tggaagaaccaaggccgccacacccaagagtccaccaagcaatccaacgagatcaccccgtcgacactatcctcggtgacattcataa

SEQ ID NO: 47805 - DNA, 221 bp, Zea mays
gatttgttgtgctatttaccaacaaggacatcacagcacaaatcatctctgctagtatagcaggtgatatggttcttgcttctgcttactcgcatgagttgccacgatatggtcttgaagttggtctgaccaactatgcagctgcctactgcactggccttctgttggctcgccgtgtgctcaagacccgtggtttagataaggaatatgagggcaatgtt

SEQ ID NO: 47806 - DNA, 305 bp, Zea mays
ggaggagctccgcgcggtgctgccccaggaggtggaggccgcccgcgtggtcgtcgccgagggcaccgcccccgtggcgaaccggatcgcggacagccggtcgttcccgctgtacccgttcgtgcgcgaggagctcggctgcgtgttcctgaccggcgagaggctcaagtcccccggcgaggagtgcaacaaggtgttcgtcggcatcagccagggcaagctcgtggaccccatgctcgagtgcctcaaggagtgggacggcaagccgctgcccatcaacgtcaagtaaagaacgccaaggagaa

SEQ ID NO: 47807 - DNA, 229 bp, Zea mays
gattctacgtgtggataacctggtcatcaccggcaagggaaaccttgacgggcagggcccagccgtgtggagcaagaacttctgcaccaagaagtacgactgcaagatccttcccaactcgctggtgatggacttcgtgaacaacggggaggtgtccggggtcacgctgctcaactccaagttcttccacatgaacatgtaccagtgcaaggacatgctgatcaaggac

SEQ ID NO: 47808 - DNA, 255 bp, Zea mays
gagtggaccaaggtggacatctctgatgaggcccagaaggagcgtgtcaatgcgatgattgaggaccaggagccctttgagggcgaggccttgcttgacgcgaaatgcttcaagtgagtgtgcttgcctggagacagaactgtttagcccttgaatttgcctatggaagagtttgcccttttactagtgtcgatgttgatctggtataccttgctatgaactggttaaagtttgtgctggtttgggattttttgt

SEQ ID NO: 47809 - DNA, 194 bp, Zea mays
cgacaagatggcatgcacaaacaatgcgatgagagccttgttcctcctggtcctcttctgcatcgtgcatggtgagaaggaagagtcaaagggcatcgatgcgaaagcgtccgggcctggtgggtccttcgacatcaccaagttgggcgcctccggcaatggcaagacagacagcacgaaggctgtgcaggagg

SEQ ID NO: 47810 - DNA, 296 bp, Zea mays
tagcgaagaatgcagctgggctcccatatttgtgaggcagtcaaatttcaagttacctgctgacccatccactccgattatcatgattggtcctgggacagggctggctccctttaagaggtttcttgcaggaaaggttagcactgaaacaatctggagcagaactgggcacttcaatccttttctttggatgcaggaaccgtaatatggactacatatatgaagatgagctgcaaactttccttgaggagggggcgctttctgagctaattgttgcattctctcgggaagggcca

SEQ ID NO: 47811 - DNA, 297 bp, Zea mays
cagttatcaacaatggagcaaacttgtttgaagtagatagtcagaagtgggttaggagagtgtcatattataagaactcgcttggtgtgaagcttgggagcacaacatacgcaatgtcatggacatgaatgcattctttggaggattcgcagccgctataatatctgatcctgtatgggttatgaatgttgttcctggtcagaagccattgacacttggagttatttatgataggggccttataggggtttatcatgactggtgtgaaccattctcaacgtatcctcgtacctatga

SEQ ID NO: 47812 - DNA, 255 bp, Zea mays
gatccagcagatggtgcggttcatccgccaggaggccgacgagaaggccaacgagatctccgtctccgccgaggaggaattcaacattgagaagttgcagcttgttgaagctgagaaaaagaagatcaggcaagagtatgaacgcaaagagaagcaggttgaagtacgcaagaaaattgagtactctatgcagttgaatgcttctcgcatcaaagttcttcaggctcaggatgatctagttaacaaagcggaagg

SEQ ID NO: 47813 - DNA, 273 bp, Zea mays
gaaacaacaagactgacagcgacgatgatgccacagctgcgtacgctcgtcgcgctggtcctcgtggccaaggccatagccgccggtcccggccggtgggtttgtcgtcacgggctgatttactgcgacgactgccgcgccgggttcgagacaaacgtgtcccaggccatccaaggcgcgacggtggagatggagtgccgccacttcgattcgcagcaggtccacgacaagggggaggcgacgacgggccccggcggctggtacaagatggag

SEQ ID NO: 47814 - DNA, 296 bp, Zea mays
cctggaggaagaagcgaaagtatgagcttggtcgccagccagccaacaccaagttgtcaagcaataagacggtgaggagggtccgtgttcggggaggtaatgtgaaatggagggctcttcgccttgatactggtaactactcatggggaagtgaagctgttacccgcaagacccgtatcctcgacgtggtctacaatgcatcaaacaatgagcttgtgaggacacaaacccttgtgaagagtgccattgtgcaagttgatgctgccccattcaagcagtggtacctcactcactat

SEQ ID NO: 47815 - DNA, 273 bp, Zea mays
aggcggcctctctctctctctccccagccacccccgtagcgagagggagggcggaagaggatgagcgcgtccaggttcataaagtgcgtcacggtcggggacggcgccgtcggcaagacctgcatgctcatctcctacacctccaacaccttccccaccgactatgttccgacagtgtttgataacttcagtgccaacgttgtggttgatggtaatactgtcaacctcggcctctgggacactgcaggtcaagaggattaccacagacttaga

SEQ ID NO: 47816 - DNA, 300 bp, Zea mays
tgacaataaaggagactacttctgagtgggaacttctgaatgatgtgaaggctgtatggcttcgcagcccaaaggaggttactgatcgataatactcgaagttttaccactcactagccaaggacttcggtgatgacaagcctatgggttggagccacttcactgccgaaggagatgttgagttcaaagctttgctctttattcccccgatatctccacatgatctctatgagagttactacaacagtaacaagtcaaacctcaagttgtatgttaggagagttttcatctctgacgaat

SEQ ID NO: 47817 - DNA, 292 bp, Zea mays
aaggacgtggtgtagggccattgaaggatcacatttatttgcatctgaaccatctgccgcctgaggttctcaaagaaaggctccctggtatttctgaaactgctgctatttttgctggtgttgacgtcaccaaggagcccattccagttttgcctactgtgcactacaatatgggtggtatcccaacgaactaccatggggaggtagtggatatcaagggtgataatccagatgctgttatccctggtctaatggctgctggtgaagcagcctgtgcatctgtccatggtgc

SEQ ID NO: 47818 - DNA, 220 bp, Zea mays
gggtaccagtcgtggggtccgctcttcggcaagctcttcttcgccttctggtgtgatcgttcacctgtacccgttcctcaagggtctcatgggtcggcagaaccgcaccccgaccatcgtggttgtctgggcgatcctgctggcgtctatcttctccttgctgtgggttcgcatcgatccgttcactacccgcgtcactggcccggatactcgaacgtgt

SEQ ID NO: 47819 - DNA, 299 bp, Zea mays
ccaccaccaagctcaacaacagccagctcgcgaaaataatgaagagccgcagcatggcatcatcggccgcgctcttggtgctagccctcgcgctagtggcggccaccgccccacaggtagcggaggcaaagaagaagagagcggcggagagcggcgaggcggcggaggcgaagaagatccaggacgacttctgctcgacgctgtgcgagggcaagaaggggacggacctggtcgtgtgcaaggagtcctgcgcgctctcccagcagtccaacctggtgctgtacggcaggatccagtgc

SEQ ID NO: 47820 - DNA, 120 bp, Zea mays
ccggactggttcctcaacaggaagaaggattacaaggacggcaggttctcgcaggtcgtctccaacgcccttgatatgaagctcagggacgaccttgagaggctcaagaagatcaggaac

SEQ ID NO: 47821 - DNA, 180 bp, Zea mays
acattgagccaaagaatgccctgggcaaacaattcaagaaattgtttagcatgaataatgttaagcttcactttacagatggtgcacttagaataattgccaaaaaggcaatgtcaaaaaatacaggtgcacggggtttaagaactatccttgagaatattctcatggattctatgtatg

SEQ ID NO: 47822 - DNA, 268 bp, Zea mays
cgaaggttcttgcctcgttgggaagggatggcgtcggaggtggaggacgaggcggcgacgcgctggctcgccaacggtgcagccgacgtccgccggaggagggaccaggcgaaggcaattctgtccacgcaggccgtcaggatcgccaccaaggccgagcagcatgagcgcttcatctttaaggtcacacacttgctgggtgttcttggatttgggggattttgctacctcttgggtgccagaccacaggatgtgccatatgtgtact

SEQ ID NO: 47823 - DNA, 303 bp, Zea mays
cacctcacgtcggcggccatcgtcggccacgacggcgccacctgggctcagagcaccgcattccccgagttcaagcccgaggagatggctgccatcatgaaggatttcgacgagccggggcacctcgccccgaccggcctgatactgggaggcaccaagtacatggtcatccaaggcgaacctggagctgtcatccgtggcaagaagggatccgggggcatcactgtgaagaaaacagggcagtcactcatcattggcatctacgacgagccgatgactcccgggcagtgcaacctggtggtg

SEQ ID NO: 47824 - DNA, 197 bp, Zea mays
aatcgatcacaataagatggcgtgtatagacaatgcaatgagagccttgtaccttttagcgctgctctgtgatctgcatggtgagaaggcaaagtcaaaggacaacgatgccaaaacatccggagcacgtgggtccttcgacatcaccaagttgggacgcctcggaaatggcaagacggatagcacgaaagctgtgc

SEQ ID NO: 47825 - DNA, 285 bp, Zea mays
agcgacatttcgaataacacagttgagcgcgacgatgggatccctcgctaataacatcatggtcgtgggtgtcgtccttgcagcgctcgtcgccggcgggtcatgcgggcccccgaaggtgccgcccggtcccaacatcaccaccaactacaacggcaagtggctcaccgccagggccacctggtacggtcagcccaacggtgccggcgctcctgacaacggcggtgcgtgcgggatcaagaacgtgaacctgccaccctacagcggcatgacggcgtgcggcaa

SEQ ID NO: 47826 - DNA, 297 bp, Zea mays
gatcacgacaagatggcatgcacaaacaatgcgatgagagccttgttcctcctggtcctcttctgcatcgtgcatggtgagaaggaagagtcaaagggcatcgatgcgaaagcatccgggcctgatgggtccttcgacatcaccaagttgggcgcctccggcaatggcaagacagacagcacgaaggctgtgcaggaggcatgggcatcggcgtgcggcggcactgggaagcagacaatcctcatacccaagggcgacttccttgtcggacaactcaacttcaaaggcccttgcaag

SEQ ID NO: 47827 - DNA, 120 bp, Zea mays
caaccctgtgaattcaactgtaccgattgctgctgaggttttcaagaaggctgggacatatgatgagaagaagttgtttggcgtgaccacccttgatgttgttcgtgctaagactttcta

SEQ ID NO: 47828 - DNA, 290 bp, Zea mays
  unsure (1)..(290): unsure at all n locations
ggtcgccggcctgcagggcgacgtcccagcgaacaccccacgggcgtccccttcgtcggcggggcaagaaggtagccggaggtggcagncattcgtcggcgacggcggcaccaccaggggcatcaacgagaacaacacggtgctgagcttccacgacctcatgcggatccacatgccgccctacgacaacgccgtcatcaacggcatatcctccgtcatgatctcctactccagctggaacggggtcaagatgcacgagaacaagttcctcatcaccgacacgctcaaga

SEQ ID NO: 47829 - DNA, 283 bp, Zea mays
ctctccgcgcaggtcacacagtcaacggatttcactgaggttgcaaaccaggagccgtggctctcatctatggagttggttgtgaaacctgacatgctctttgggaaacgtgggaagagtgggcttgtggccctcaacctagatcttgcccaagttcgccaatttgtcaaggagcggttgggagttgaggtcgagatgggtggctgcaaagctccaattacaaccttcatagttgaaccatttgtgccacatgaccaagagtactacctttcgattgtatctg

SEQ ID NO: 47830 - DNA, 235 bp, Zea mays
catggcaggaaaaatcaagaacagttgacgttgaagaggaggaagaatcaaaaggtgaagaggctactgaagaatcaaaaagtgaagaggctactgagggtgaaaagcagaaaaagaagaaaaccataactgagaagtactgggactgggaattggctaatgaaacgaagcccatatggatgaggaatccaaaggacgttgagaaaactgagtacaatgaattctacaggaagac

SEQ ID NO: 47831 - DNA, 141 bp, Zea mays
cactggtggtacaacgttccaaaccatgcagctgagctcactgccggatactacaacctagatgacagagctggctacagaaccatagcacacatgctcacaaggcatcgtgctagcatgaacttcacttgtgctgagatg

SEQ ID NO: 47832 - DNA, 279 bp, Zea mays
agatgagggacagtgaacagagttcagaggcgaaaagtgcacctgaggaactggttcaacaggtgctgagtgctggatggagagagggcctaaatttggcatgtgaaaatgcactcaaccgatatgatgcaacagcttacaacaccatcctcaggaatgcaagacctcaaggcatcaacaagaatggccctccagaacacaagttgcacggattcacctacctccgagtatctgatgaactgttccaggaacagaactacaccactttcaaaacttttg

SEQ ID NO: 47833 - DNA, 86 bp, Zea mays
ctggggcgatgatggatacttcaagatcataaggggcaacgatgaatgtggcatcgaggagggcgttgttgctggaatgccatcca

SEQ ID NO: 47834 - DNA, 252 bp, Zea mays
ctcgagccgccctccctccctcacacaaataataaggaaaggtcccgcccttttcctacgacatccacaaggggggaggggaaaacacgtacattcacccggcggcaataatggcctcggttccggctccggcgacgacgaccgccgccgtcatcctatgcctatgcgtcgtcctctcctgtgccgcggctgacgacccgaacctccccgactacgtcatccagggccgcgtgtactgcgacacctgccgcg

SEQ ID NO: 47835 - DNA, 98 bp, Zea mays
aggcggccaagctggcgcggtacaacaagaagcctaccattacgtcccgcgagatccagacctccgtccgcctcgtcctccccggcgagctcgccaag

SEQ ID NO: 47836 - DNA, 195 bp, Zea mays
acctgcagtcatctcctccatcaccaccaccaagctcaacaacagccagctcgcgaaaataatgaagagccgcagcatggcatcatcggccgcgctcttggtgctagccctcgcgctagtggcggccaccgccccacaggtagcggaggcaaagaagaagagagcggcggagagcggcgaggcggcggaggcgaa

SEQ ID NO: 47837 - DNA, 92 bp, Zea mays
gactcgccttaattagttcgctttgcttttgaggttgactcgaccattttgctgtagcgtgaattgcatggacatgcaacgctccaatggcc

SEQ ID NO: 47838 - DNA, 285 bp, Zea mays
ggcgaagaagatccaggacgacttctgctcgacgctgtgcgagggcaagaaggggacggacctggtcgtgtgcaaggagtcctgcgcgctctcccagcagtccaacctggtgctgtacggcaggatccagtgcaagggcaagtgcaccgagcagaagggcatcacggcgccggccatgaaggtctgccaggaggagtgcgacaaggcgtacgtggtgaaggcggccgaggtcaccaaggcctgcagcgtcacctgcgccaaggagaagacccgcggctcagcgag

SEQ ID NO: 47839 - DNA, 94 bp, Zea mays
acctcgcatccacccgcacccaactcgcaactggctccacaccaaacctccagtcatctcctgcatcaccaccaccaagctcaacaacagccac

SEQ ID NO: 47840 - DNA, 184 bp, Zea mays
ctcccggcgatcgcgaccgagttcctgctgctcatggtggcgctggacaagctctacttcacgccgctaggcaagttcatggatgagcgggacgccaagatccgcggtgagctcggcgatgtcaagggcgcctccgaggaggtgaagcagctggaggaccaggcggcggccatcatgaaggcgg

SEQ ID NO: 47841 - DNA, 169 bp, Zea mays
ctgcaccaggctgtggatggacttagggaagcagagcttgaaaattcatttatagggacaactaagagaggcattggtccttgttactccagcaaggtaactcgaaatggactgcgggtttgtgatttacgacacatggacacttttggggatagcttgacatctattc

SEQ ID NO: 47842 - DNA, 228 bp, Zea mays
aagtatatcattggtggatgtgcttattcactgtcagcaatccaaaatggcattctacgtggcaaccaaaggccaccgtacaacattgccaaacctttcgggcagaaagaccgaagatccaaggtggcccttccataccatgaacctcttgttcactttgctttggtatgtggcaccaaatctggacctgcacttaggtgttactcaccaggggatatcgataaagat

SEQ ID NO: 47843 - DNA, 125 bp, Zea mays
ccttaagcacaagaatcctaagactggaaagtatgttgagcatcatctcaaattcccaccatctgtcccatatgacaagctctctcatgtctacacggctatcttgaagccagacaatgaggtca

SEQ ID NO: 47844 - DNA, 125 bp, Zea mays
tggttaatcggagagttgttcaaaaagaaaatgttgacagacaggattatgcatgagtgcattacaaaattgtttggaaattgtgatgatcccgatgaggagaacattgaagcactatgcaaatt

SEQ ID NO: 47845 - DNA, 297 bp, Zea mays
ggcacggcgttcggcgccatggccaagaagggcgaggaggagaagctgcgcaaggcgggcatcatcgacatgcagttccgaagggttaagtgcaagtacgactccaaggtcaccttccaccttgaaaaggggtgcggccccaactacctggcgctgctggtcaagtacgtcgatggcgacggtgacattgtggcagtggacgtcaaggagaagggctctgacacgtacgagcccctgaagcactcctggggcgccatctggaggaaggacagcgacaaaccgcttaagggacccctc

SEQ ID NO: 47846 - DNA, 297 bp, Zea mays
agaggagggaggaaggagatcgcgagcagccggagccggaggcgagaggatgaagacgttcgacccgtggccggtcttcttccgccgggagtggaagcgcaactggccctttctcacggggttcgccatcaccggcttcatcatcaccaagatgacggccaacttcaccgaggaagacctcaagaactccaagttcgtccaggaacacaagaagcgctgaccaaccgggtggagtcgtccgaatcgcctgcggatgaaatttgccccctatttttcctgtcttttttttatctagag

SEQ ID NO: 47847 - DNA, 271 bp, Zea mays
cttcccggtgtggatgttgccaacgtcgagcgcctcaacctactagaccttgcccccggtggccaccttgggcgctttgtgatctggacccagagcgcgttcaataagctcgaggaggtgtatgggagctatgacgccccgtcgcagaagaagaagggcttcgtgctgcccaggtacacattggacatcttaggcctcggcagcacgaagcctaagatgtccaacgctgactgggaggatcatcaactctgacgaggtgcagtctgtggtg

SEQ ID NO: 47848 - DNA, 296 bp, Zea mays
agcagctcctaatctttcattgaagggaacaccatactggatggctcctgaggttgttcgggctacactcgataaaagtgcaggttatgatcttgctgttgatatttggagccttggctgcacaatcattgagatgtttacaggaaagccaccttggagtggtcttgaagggccggctgcaatgtttaaggtgttgcgcacggacccaccaattccagataacctgtcccctgaagggaaggattttctgagatgctgcttcaagagaaaccctactgagcgaccaacagcaaaca

SEQ ID NO: 47849 - DNA, 292 bp, Zea mays
tgaggttgtggttcacatgcccagccttgtcactggagatgagcctgatcatgaccgtgatggtgaggatgaggacacggcgggagatgacaatgacgaagatgaaggccagaagcctgaacagtcaagcattcctctcacagtcactatatccaagggtgacggtcctgttcttgaattcacctgcactgcctatcctgacgaggtcatcatcgactccatgtctgtgacacaacaatcaggggatgatgaacgtgacatgattgcatatgagggtcctgatttcaatgac

SEQ ID NO: 47850 - DNA, 224 bp, Zea mays
cgaataacacaggtgagcgcgacgatgggatccctcgctaataacatcatggtcgtgggcgccgtccttgcggcgtcgtcgccggcgggtcgtgcgggcccccgatagtgccacccggccccaacatcaccaccaactacaacggcaagtggctcaccgctagggccacctggtacggtcagcccaacggtgccggcgctcctgacaacggcggtgcgtgcggg

SEQ ID NO: 47851 - DNA, 213 bp, Zea mays
ctcccgctccgctcctgcttggtcgagatcacttcgccgacgccgctttcgagatctccgggtggagcaagcgagcaaaggcagcagccatgtcgctccgcgtgctgaaccctaacgccgaggtgctcaacaagtcggcagcgctgcacatgaacatcaacgccgccaagggcctccaggacgtgctcaagaccaacctcggccccaagggca

SEQ ID NO: 47852 - DNA, 289 bp, Zea mays
acgcgcctcagcgagaactgcaagaggtcctgcacccctcctccttcttgaagcgaaccccttgaaatgaatgaaccatgcatgcatgcatgtatgcatgcgccggggtgacgtggcgttcagctcaggcgctgagcgagtctatacgtacgtcgtcaccggctggccacgcatgcgataaccatctgatatggacggaactatatattgtattcctattaatctggcattttctaagctaattgtttttttccaaatataccgtcgatggaactccaaatgtaatgtc

SEQ ID NO: 47853 - DNA, 290 bp, Zea mays
gagatcgtgacagagctggtcatcgtaggcatcgctcccgctccccttctaagagtcgtgaccgtgaccgcagatctagatctcgttcacgctctcgatcaaagagcaagcgcgtgagtggttttgaccaagcacctccacaacatgcacttcctattgttgctgctggtgctatccctggtcagcttcctggtatcactgctcctattcccggggttggggtgcttccgaacttgtataatttggctgcaggacagttcaacccccttgttattcagccacaagccatg

SEQ ID NO: 47854 - DNA, 291 bp, Zea mays
ctcaagagcacaggtctgaatgaagagcagatgaggcaggttcgcgtcggagacaattgccatcgccagctaaacaagatacttgccgacttggatcaagataacatcactgacaagtcaagctgcttggatttggatatggctgaatttgtgttgcaagatgtggtggtgtctgctgtaagtcaagtgctgataggttgccaggctaaaggtatcagagttgcttgcaacctgccagagagatccatgaagcaaaaggtttacggggatggtatccgactccagcagatc

SEQ ID NO: 47855 - DNA, 287 bp, Zea mays
acgcacacacacacaaccagatctcccccaaatccacccgtcggcacctccgcttcaagatgcagatctttgtgaaaaccctgactggacagactatcaccctcgaggtggagtcgtctgacaccattgacaacgttaaggccaagatccaggacaaggagggcatccccccagaccagcagcggctcatctttgctggcaaacagcttgaggacgggcgcacgcttgctgactacaacatccagaaggagagcaccctccaccttgtgactccgtctacaggggtg

SEQ ID NO: 47856 - DNA, 273 bp, Zea mays
aaagctctcgatctcaccgacaccgaggaagaagagatcagtggcgtccgagcagggagtcgtgatcgcgtgccacagcaaggctgagtttgacgcccacatgaccaaggcccaggaagccggcaagctggtggtcatcgacttcactgccgactggtgcggtccatgccgcgccatcgccccactgttcgtcgaacacgccaagaagttcactcaggtcgtcttcctgaaggtggacgtggacgaatgaaggaagtcaccgcggcctacgag

SEQ ID NO: 47857 - DNA, 283 bp, Zea mays
ggatggcgtcggaggtggaggacgaggctgcgaccgctgctcgccaacggtgcagccgacgtccgccggaggagggaccaggcgaaggcaattaacgtccacgcaggccgtcaggatcgccaccaaggccgagcagcatgagcgcttcatctttaaggtcacacacttgctgggtgttcttagatttgggggattttgctatctcttgggtgccagaccacaggatgtgccatatgtgtactgcctgttctatgtcatatttgttccgctccgctggatttac

SEQ ID NO: 47858 - DNA, 69 bp, Zea mays
tgtcccacatcgtctccttcctcctcgtccacccattcctccgctcttccttaattcctcatttcctcc

SEQ ID NO: 47859 - DNA, 289 bp, Zea mays
ctcaaggcggccatggccatcaacgccgacgtcatcgcggagatggagatccccgaggagtatatcgagtccctgccgaagaacggaaggtccattcttggagactccatgtacaagatcataaccgacgacgtcttcgaccccaacgagctcctgcagtccgtggacctgtcgacggagcacaagatcgtggacctcaaggaccggatcgaggcctccgtcgtcatctggcaccggaagatcagcaacaagctctcgtggggcaccgccggcgtcagctgcgagaagc

SEQ ID NO: 47860 - DNA, 280 bp, Zea mays
  unsure (1)..(280): unsure at all n locations
aattttccagttcaatggttccagctcatgcattcaagaaagagcaaaagctcttgaagttgtacagtatatcaaagatactttccatgacggcaagtgcgaagttgcaggggttgaggatggaaaattgatggccagcgtgganactggtgaattttgggctttgtttggtggttatgctccccttccaagaaaggcaccttctgaagataaagggcgagacaagaaaattgtcatcaaattgatatgcctcaaacaagggaaattgggagccaattaa

SEQ ID NO: 47861 - DNA, 255 bp, Zea mays
cgcgagaatacgtgcgtgcagccacaggcacgagtcggcaccatgactactttcaccggcacgcaggacaagtgcgcggagtgcgacaagaccgtccacttcatcgacctcctcacggccgacggcgtcacctaccataagagcgtgcttcaagtgcagccactgcaaagggatcctctcgatgtgcagacactctgccatcgacggcgtgctgtactgcaggacccacttcgagcagctcgtcaaggagaccgg

SEQ ID NO: 47862 - DNA, 287 bp, Zea mays
agatcagcgaccaccaagcagagcaagccagtgaggtctctcagagcgtaccagccagctacaatggcggggaacgcgctagccaactatgtccaggtctacgtcatgctcccgctggatgtcatcactgtcgacaacacgttcgagaaggaggacgagacgagggcgcagctgaagaagctgacggaggcgggcgccgacggggtcatgatcgacgtctggtgggggctggtggaagggaaggagccgggagtctacgactggagcgcctacaggcaggtgttcaa

SEQ ID NO: 47863 - DNA, 287 bp, Zea mays
gaaggacttgcagccttggattgctagagatgacgaacaaggtcagaagatgtggagagtcaaccagcgtatagtgaagcttatagctgagcttatgaggaaccatgacagccctgaagcgttggtgatactcgctagtgcctccgaccttctacttcgtgctaccgatggaatgctcgtcgatggtgaagcttgtactttgccacagcttgagcttctggaagtgaccgctcgggctgtccatcttatcatcgaatggggagattcaggtttatcagttgcagatg

SEQ ID NO: 47864 - DNA, 288 bp, Zea mays
ggaggcatgggcatcggcgtgcggcggcactgggaagcagacaatcctcatacccaagggtgacttccttgtcggacaactcaacttcacaggcccttgcaagggcgacgtgaccatccaggtggatggcaatctgctggcgaccacggacctaagccagtacaaggaccatggtaattggatcgagattctacgtgtggataacctggtcatcaccggcaagggaaaccttgacgggcagggcccagccgtgtggagcaagaactcctgcaccaagaagtacgactg

SEQ ID NO: 47865 - DNA, 291 bp, Zea mays
gcgagcgagagcagcacacactgcacgcagctagctaggagcagcagcagcggcggcgatggcggcctccatgatctcctcgtcagctctggcggtggcgcctcagggcctgccgcccctcggccgccgcgcctcctccttcgccgtcgtctgctccaagaagaagatcaagaccgacaagccctacgggattgggggtggcctgaccgtcgacgtcgacgccaacgggagaaagggcaagggcaagggcgtgtaccagttcgtcgacaagtacggcgcgaacgtcgacgg

SEQ ID NO: 47866 - DNA, 288 bp, Zea mays
ctaccagcgactcagcgagcgagagcagcacacactgcacgacgctagctaggagcagcagcagcggcggcgatggcggcctccatgatctcctcgtcagctctggcggtggcgcctcagggcctgccgcccctcggccgccgcgcctcctcattcgccgtcgtctgctccaagaagaagatcaagaccgacaagccctacgggattgggggtggcctgaccgtcgacgtcgacgccaacgggagaaagggcaagggcaagggcgtgtaccagttcgtcgacaagtac

SEQ ID NO: 47867 - DNA, 292 bp, Zea mays
atcagcgccgtgcccgggatgaaggcgctcgacatgaacgccgccgaggacgagatcgtgcgcctcacgcgcgaggtcgtgcccggcatgatcgtcaccgggatggaggtcgccgagatcgacggcgccccgaggatgggcccgacgttcggcgccatgatgatctccggccagaaggcggcgcacctggcgctgaaggcactgggcaggcccaacgccgtggacgggaccatccccgaggtgtcgccggcgctgcgcgaggagttcgtgattgcgtccaaggacgacgagg

SEQ ID NO: 47868 - DNA, 279 bp, Zea mays
gaaagaatctcggaattggctcattcgggaaggtgaaaattgcggaagatatcagcactggacacaaggtggcaatcaagaaactcaaccgccgtaaaatcagaagcatggagatggaagagaaagttaaaagagagattaagatattgaggttatttatgcatccacatattatccgcctctatgaggttatagacacaccggctgataattatgttgttatggagtatgttaagtgtggggaatctttgattactagtttagaaggtaggctcagga

SEQ ID NO: 47869 - DNA, 282 bp, Zea mays
atccgactggcattggacgcttgacaccaagaccccgctcaagtatcccctctgcatccgcttcgctgtcaagtctggtggctaccgcatcgccgacgacgtcatcccctccaatttcaaggccggcaccacctacaagaccaccctcagcatctgattagcctcttatgacgaataatattttgagagagctcatctggaccatgtgccagcgagctaatatttaatttttttctttggttatattgaggcaccacacgagccaagaaaaaagttatgcta

SEQ ID NO: 47870 - DNA, 289 bp, Zea mays
cagtcatctcctccatcaccaccaccaagctcaacaacagccagctcgcgaaaataatgaagagccgcagcatggcatcatcggccgcgctcttggtgctagccctcgcgctagtggcggccaccgccccacaggtagcggaggcaaagaagaagagagcggcggagagcggcgaggcggcggaggcgaagaagatccaggacgacttctgctcgacgctgtgcgagggcaagaaggggacggacctggtcgtgtgcaaggagtcctgcgcgctctcccagcagtccaa

SEQ ID NO: 47871 - DNA, 292 bp, Zea mays
caagactcatgatgctccggctgctcagttcgctcctccttgtggccgttgcctcaggctatggcccagcttcctctcactcttccaggcgcgttgtccatggcgaggatgcggtcccctacagctggcgcctggcaggtttccctgcagtatgaggtaagtggaagcttctaccacacgtgtggcggtaactcatcgcccgcggttgggttgtgactgccggccactgcatctcgatggatctggcctacgaggtggtgttgggtgagtacaacttgatgtgaaggagggc

SEQ ID NO: 47872 - DNA, 265 bp, Zea mays
catggtttcccagcacggggtgactgcccctgccgggatccacaacctgttctccttgataagcaagaggatagcgatgaaggggttcatccagagcgattccgtgcacctgttcccgcagttcgtcgatgacatcaccaggcattacagagacgggaagatcgtgtatgtggaagacatgagcgttgggctggagagtgggccggcttccttcgtcggtctgttcagcggtaaaaatgttggcaagcaagtcgtctgtgtgtcg

SEQ ID NO: 47873 - DNA, 224 bp, Zea mays
cagagcagcagtctagggggtgtttgggaacaaagtttttctgcagttttggaagaatacgaatactgcagtattctcaaatactgcagtattctcaaatactgcagtattatatacataatggtgtttggcaagctgggtaaaatctatgttttcaaaactgcagtattgcaaatactatagttgttttaaggcattctagccctagctctgggcctcagttt

SEQ ID NO: 47874 - DNA, 282 bp, Zea mays
ggagcgtccgtccaacatctgggagaggcagtacctcggcgagcagctgtacgtgagcgtcatctcgccggagcggtcgctcagggacgagtacaacatgccggagaccagcctccgctgcggcaaggtcgtcggcctgccgatgccaccgtcctaccgcgccgtctagagcgtcgaccgatcgcgcacggtgctgtacacaactaaaggagagcgagaggggactttttctcgcgtttccttctctagccagccttgtctgtcccctcctcgtttattctc

SEQ ID NO: 47875 - DNA, 280 bp, Zea mays
ggagaagatgacccaaatcatgtttgagactttcaatgttcctgccatgtatgtcgccatccaggctgtgctttccctgtacgccagtggacgtacaactggtattgtattggactctggtgatggtgtcagccacacagtgccaatctatgaaggttatgcccgtcctcatgccatcctacgccttgaccttgctgggcgtgacctgactgacagcctgatgaagatcctcactgagagaggttactccttcaccacctctgctgaacgcgaaattgta

SEQ ID NO: 47876 - DNA, 278 bp, Zea mays
cgacgagaagctactgtccgtgttccgcgaaggtgtgaagtacggagctggaatcggtccaggtgtctacgacatccactcgcccaggatcccctccaccgaggagatcgcggaccgcgtcaacaagatgctcgccgtgctcgacaccaacatcctctgggtgaaccctgactgcggtctcaagacacgcaagtacacggaggtgaagcctgccctgaccaacatggtctccgccaccaagctcatccgcacccagctcggcagcgcgaaatgagtca

SEQ ID NO: 47877 - DNA, 280 bp, Zea mays
tttcctcgttcccaatcatcttgccgcgcgccgcacgtagctagggtttcgtcctgtcgttgcacccgcattactagcattcaatccacgccaatggctgagaagaagatggttacgctcaggagctccgaccacgaggagttcgaggttgaggaggcggtggcgatgaagtcagagatcatccgtctcttgatcgaggacgactgcgccgacaacgccatcccgcttcccaacgtggattccaagactctcgccctggtcatcgagtactgcaacaagc

SEQ ID NO: 47878 - DNA, 280 bp, Zea mays
gttcctgttgggcgtgttgagactggtatcatcaagcctggtatggttgttacctttggtcctagtggccttactactgaggtgaagtctgttgaaatgcaccatgaggctctccaggaggcccttcctggtgacaatgttggcttcaatgttaagaatgttgctgtgaaggatctgaagcgtgggtatgtggcctccaactctaaggatgaccctgccaaggaggctgctagcttcacatcccaggtcatcatcatgaaccaccctgggcagattggca

SEQ ID NO: 47879 - DNA, 286 bp, Zea mays
gacaagatggcgtgcacaaacaatgcgatgagagccttgttcctcctggtcctcttctgcatcgtgcatggtgagaaggaagagtcaaacggcatcgatgcgacagcgtccgggactggtgggtccttcgacatcaccaagttgggcgcctccggcaatggcaagacagacagcacgaaggctgtgcacgaggcatgggcatcggcgtgcggcgtcactgggaagcagacagatcctcatacccaagggtgacttccttgtcggacaactcaacttcacaggccct

SEQ ID NO: 47880 - DNA, 283 bp, Zea mays
gatcatcctgctgatttatacgactaccatgtctataatgattctaagactttgttcaacatgaagagcacatttgacagaacatctcgtagtggacccaaggcttatgtaagtgagtacgctgtttggagaggtgatgcaggtagaggaagtcttcttgcttcattggcagaagctgctttccttactggactggagaagaatagtgacattgtttccatggcaagttacgcgccactattcgtaaacgacaatgaccagacgtggaacccagacgcaatcg

SEQ ID NO: 47881 - DNA, 282 bp, Zea mays
ggagaagcagccgccgttactgctgccgcgtccacagaatggggggtttcgtgaagacccataagaccaatgcgtatttcaaacgtttccaagtgaaattcaagagaaggcgggctggcaagacagactacagggccaggataaggctgattaaccaagacaaaaacaagtacaacacacccaaatacagatttgttgtgcgatttaccaacaaggacatcactgcacaaatcatatctgctagtatagcgggtgatatggttcttgcttctgcctactctc

SEQ ID NO: 47882 - DNA, 249 bp, Zea mays
ctgaagtgaagaaaatccagaatggtgaaagtctctatatagggaacatgaattatcaccacaagccattacgtgatgggaaatgggctgttacttacgaggaatggccagaagaggattatcccatctatgcaaatggtcctggatatgttatatcctctgatattgcaggttccattctatcggaatttttaaagcataaattaaggcttttcaaaatggaggatgtgagcatgggcatgtgggtag

SEQ ID NO: 47883 - DNA, 276 bp, Zea mays
agccagagctggcatagactatgattcatcctatgggaaggctcgcccaaatgataccattctgaagcttcaaaggacagcaccatattacaagaggaacagagctcatgtttgcagtttctttgtgcgaggtgaatgtacaagaggagctgagtgcccttatcgtcatgagatgcctgaaactggggagttatctcagcagaacattacagatcgctactatggagttaatgatccagttgcactgaaacttttgagcaaggcagtgagatgcat

SEQ ID NO: 47884 - DNA, 275 bp, Zea mays
cacactgaaaacagccgagcgatctcctctccctctccctctccgatccattctccagcgcacaaagtaaacatgtctgaccgggcaaagatgtcgtggcaggcgtacgtggacgagcacctgatgtgcgagatcgagggccaccacctcgcggcggcggccatcgtcggccacgacggtgccgcctgggcgcagagcacggcgttccccgagttcaagaccgaggacatggccaacatcatgaaggacttcgacgagccagggcacctcgcgcc

SEQ ID NO: 47885 - DNA, 237 bp, Zea mays
cacaccttctacaacgagctccgcgtggctcccgaggagcaccccgtcctcctcaccgaggcgcccctgaaccccaaggctaacagggagaagatgacccagatcatgtacgagaccttcaacacccccgctatgtacgtcgccatccaggccgtgctctctctgtatgccagtggccgtaccacaggtcatctggtcgaatcgggagatggtgtgagcaaaccgtacccatctacg

SEQ ID NO: 47886 - DNA, 299 bp, Zea mays
cacgtgttgagactggtgtcattaagcctggtatggttgtcacttttgggcctactggtcttactactgaggttaagtccgttgagatgcaccatgaggctctccaggaggaccgtcccggtgacaatgttggcttcaacgtgaagaatgttgctgtgaaggatctgaagcgtgggtatgtggcctccaactccaaggatgaccctgccaaggaggctgctagctttaccgcccaggtcatcatcatgaaccaccctggccagattggcaatggctatgcccagttctggactgccaca

SEQ ID NO: 47887 - DNA, 296 bp, Zea mays
gagctcctggactaggcttagtctgcagtgatattgtgaaaggagttcctgcaatttttggtcattttctgacctcactccctgcgatacactcgataattgtatttgtgtgtatcaggaatgtgccagttccggtggttcctcaaagtgaaaggttccttttccaacgtgtatgctcaaggggctatcacttgttccgctgtatagcgagatacgggtataaagacaagaagcaggagcaccatagcgtatttgagcgtcttctgattgaaggcttgagaaattctacaaagaga

SEQ ID NO: 47888 - DNA, 294 bp, Zea mays
cggacatcaacgtcaaggattgcactcttaagaagacgatgttcggcgtccgcatcaaggcgtacgaggacgccgcctccgtgctcaccgtctccaagatccactacgagaatatcaagatggaggactcagccaaccccatcttcatcgacatgaagtactgccccaacaagttgtgtactgccaacggcgcctccaaggtcaccgtcaaggatgtcaccgtcaagaacatcaccggcacctcctccaccccggaagccgttagcctgctctgcactgccaaggtcccatgca

SEQ ID NO: 47889 - DNA, 299 bp, Zea mays
aggaaattggcatgaagaaaaagaaagaagaagatccaaagaagaaaaagccaaagaggaagcctctttttgtgaagaacggtgcaattgttgtttgccgcattcaggtgaataacttgatatgcatagagaagttctctgatttccctcagcttggaaggtttacacttagaactgaaggaaagacggtagctgtaggcaaagttgttgatattccgcctgctggtagcccaacattctgagcttaagtcaattttgaacaggatggataatcatgaagcagtgcgttcgcttaagat

SEQ ID NO: 47890 - DNA, 293 bp, Zea mays
caggagatgccaccaggaacctctcccagcagtgcctgaacgcgcttgctaatgttgtgcctggtcttattggaggcagtgctgatcttgcatcctccaacatgactctgctgaagatgtttggtgacttccagaaggatacagctgaagagcgcaatgtccgctttggagtcagagagcacggaatgggcgccatttgcacaggcattgctctgcacagcccagggtttgttccgtactgtgctacagtctttgtcttcactgtttacatgagaggtgccatgaggatctcg

SEQ ID NO: 47891 - DNA, 292 bp, Zea mays
ctggtcctcctcaagagagttcctcctaagggagaaaacttgattgtcgttggaacaacaagcgaggttggcttcctagaatctgttggaatgtgtgacgtgttctctgtgacctaccatgttcccaaactgaaaaaggaggatgccacaaaggtattgcatcatcttgatgtgttcgatgacggagatcttgacgcagcagcagaagcactggacgatatgccaatcaagaagttgtacacacttgttgagatggctgctcaggggccaaccggaggaagtgctgaagcga

SEQ ID NO: 47892 - DNA, 299 bp, Zea mays
gctcggtgctgaccttgtcaggatcgacgcccactccatgtgctcgcccggcttctcctgcgactccgcctaccaggtcacgtacatcgtgcgcggcagtggccgcgtccaggttgttgggatcgacggcacgcgagtgctcgagtacccgcgccgagggaggctgcctcttcatcgtgccaaggttcttcgttgtctcaaagatcgccgacgaaaccggcatggagtggttctccatcatcaccacccccaacccaatctttagccacttggcgggccggacatcggtgtggaaggca

SEQ ID NO: 47893 - DNA, 324 bp, Zea mays
gctgcggcggcaggagtggattcggctcacgttgcgcagataggggaggatgggattgtgccgccatatttaatctccatggagggccgccggttcagtctcggtgaccggtccagaaggaagaggagcgagtagggtagacgtgaggtggaagctttgggctcgggatcatgcgaatcgatgggaattcggcgccggagtaaaagcaccgccatggttccacctcgtatcgtggttggcattgcccctgcctccataaacgcggcgagaacacgtgtcacctgaagagcaagttggtacctggaatctcatgtgtcaggtcaa

SEQ ID NO: 47894 - DNA, 294 bp, Zea mays
cccagaagtatgtccgacaagcctggcagaaggcagacatcaatacaaaatgggcagccacacgatgggccaagaagattgaagccagagaaaggaaagccaagatgacagattttgatcgttttaaagttatgaaggcaaagaatatgaggaacagaataatcacgaatgaagttaagaagcttcaaaaggcagctctcctgaaagcttctcccaaaaaagcacctggtactaagggtactgctgctgctgctgctgctgctgctgctgctgctgctgctgctgctgctgctg

SEQ ID NO: 47895 - DNA, 290 bp, Zea mays
taggcacttcaggaggctcttccgggtgacaatgttggcttcaacgtgaagaatgttgctgtcaaggatctcaagcgtgggtttgtggcctccaactccaaggatgaccctgccaaggaggctgccagcttcacctcccaggtcatcatcatgaaccaccctgggcagattggccacggctatgcccctgtgctggactgccacacctcccacatcgctgtcaagtttgctgagctcattaccaagatcgacaggcgctctggcaaggagcttgagaaggagccaaagtt

SEQ ID NO: 47896 - DNA, 293 bp, Zea mays
gaaatgggcggtggtaaacttttctgcacgatgcaatgtcagggctcttgtccgggatctcatcaagtgtggaggcatgaagggcattatggttgatgctcctgttgctgtatttgatgagaatccttcaatgagacggtcacctgctataagaagggttgaagacatgtttgaacaagtgaaaactaagcttcctggagcaccaaagtttcttttgtgtgttctagctgaaaggaagaattctgatatttatgggccttggaagaagaaatgccttgctgaatttgggatcg

SEQ ID NO: 47897 - DNA, 296 bp, Zea mays
cggatcaagaacgtgaacctgccaccctacagcggcatgacggcgtgcggcaacgtccccatcttcaaggacggcaagggctgcggctcatgctacgaggtgagatgcaaggaaaaacctgagtgctcgggcaatccagtcacggtgtacatcactgacatgaactacgagcctatcgctccctaccacttcgacttgagcggcaaggccttcggctccctggcaaagcccgggctcaacgacaagattcgccactgcggcatcatggacgtcgagttcagaagggtgcgatgcaa

SEQ ID NO: 47898 - DNA, 297 bp, Zea mays
cgagctgtgcaagaacatcaaccccgatgaggctgtcgcctatggtgctgctgtccaggctgccatcctgagcggtgagggcaatgagaaggtgcaggacctgcttctgctggacgtcacccctctgtccctgggtctggagactgctggaggagttatgacagtgctgatcccgaggaacaccaccatccccaccaagaaggagcaggtattctccacctactcggacaaccagcccggtgtcctgatccaggtctacgagggtgagaggacccggacacgcgacaacaacctgct

SEQ ID NO: 47899 - DNA, 308 bp, Zea mays
cacatccgcgttaccccctctcccttggtttcctctcccaccaccaacccccatcccggttatctccgccgccgcccgctttgggaaggcgcgacgaaggcaggcgagaggctccagccggacgaggaggaaagaggagcagcagggccggaggagagatgttcctgtgggactggttctacggggtgctggcctccctcggactgtggcagaaaggaggcgaagatcctcttcctcggcctcgacaacgccggcaagaccacgctgctccacatgctcaaggacgagcggttggtgcagcaccagcc

SEQ ID NO: 47900 - DNA, 288 bp, Zea mays
ggcaatcttctacaattccaccagctactgggcccagtttgtgtggggtggtgcgtggatgtactttgccacagggaacaattcatacctcacggttgccactgccccaggaatggcaaagcatgctggagcctactggtttggacgtccaaactatggagtatttacctgggatgacaaacttccaggagctcaggttcttctcagcaggttgcgactcttcctaagtccagggtacccttacgaagaaatactgaggacattccacaaccaaaccgacaatgttat

SEQ ID NO: 47901 - DNA, 274 bp, Zea mays
gagagagagagatggatgaggagtacgacgtgatcgtgttggggacggggctcaaggagtgcatcatcagcggcctcctctccgtcgatggcctcaaggtccttcacatggacaggaatgactactacggaggagaatcttcgtccctgaatctaaccaagctctggaacaggttcaagggcaacgacagccctcccgagcacctgggcgtcacaacgagtacaacgtcgacatggtgcgcaagttcatgatggcaaacggcacgctggtccgc

SEQ ID NO: 47902 - DNA, 304 bp, Zea mays
cagacggcatttcgaataacacaggtgagcgcgacgatgggatccctcgctaataacatcatggtcgtgggcgccgtccttgcggcgctcgtcgcccgcgggtcgtgcgggcccccgaaggtgccacccggccccaacatcaccaccaactacaacggcaagtggctcaccgctagggccacctggtacggtcagcccaacggtgccggcgctcctgacaacggcggtgcgtgcgggatcaagaacgtgaacctgccaccctacagcggcatgacggcgtgcggcaacgtccccatcttcaagg

SEQ ID NO: 47903 - DNA, 292 bp, Zea mays
gctcgatcttaaaccgggccagaaagtacttgatgtcggatgtggaattggaggcggcgacttttacatggctgcaaactatgatgtccatgttcttggtattgatctttcggtgaacatggtttcatttgcaattgaacgtgccattggacgcaagtgctctgttgaattcgaagttgctgattgcaccacaaaggattacccagaaaatagttttgacgtcatctacagccgtgacaccatccttcacatacaagacaagcctgctctgttcagaagcttcttacaatgg

SEQ ID NO: 47904 - DNA, 276 bp, Zea mays
cgaagtatcaagcttcatacgcaacaggtcttaaggcacatatgcatgctctgaagactagcgagaggaaagacaagaagaagactgcagatgctgagaaggcaattgagaccgcacgcaagaagcagaatgaagcagcttcatagatatcgtcacggctcaagtcatgagacgctcacagaactcagtgtgtcttctcctgtatgttgtctaccgccagactagttagagtgtcgtgaagtcatacttatctggttttgattcgaattcgtgtct

SEQ ID NO: 47905 - DNA, 168 bp, Zea mays
  unsure (1)..(168): unsure at all n locations
ntgtgaggtagagtcggatcgtcgagcggatcgcagacacatcgacacgtcacggcacgatcacgacaaggagagcattctaacagaccagcagcgtctcatctatgctggatagcagcttgatgacgcgcgcacgcttgccgactacaacatccagtaggagagcac

SEQ ID NO: 47906 - DNA, 275 bp, Zea mays
  unsure (1)..(275): unsure at all n locations
agcgngctgcagctgcaggccatcatgtcgtgccactagtgcggcggcaacgtcggagacgtcgtcaacatcacgatcacgcagtgtgtgcgngacgtcggcatgagcaacaacgacatcttctacagcaaccggacgtgtgtgacgaacatcgagtagctcatgcttggagtggacgaccagcatctcttcactgngagatactgcattcagctgtagtctgattacatgaagagcttcagcgagaccatggcagacttactggatgctggtgt

SEQ ID NO: 47907 - DNA, 254 bp, Zea mays
  unsure (1)..(254): unsure at all n locations
ctaggtnatgctgctctcacgacacgagctccgacggcgcagcatcaggcgcggcactctcgcgtgtgatcgagatggcgctgccgaatcaggggaccgttgattactacagcttcaagctcgtcatcgtcggcgatggtggaactggtacgactacatgtgtgaagaggcatctcactggagagtatgagaagatatatgcaccaaccattggtgtggaagtcatccgttggatgtcacactaactgtggtag

SEQ ID NO: 47908 - DNA, 272 bp, Zea mays
  unsure (1)..(272): unsure at all n locations
cgacaagatggcgtgcacacacaatgcgatgagagcttgttcctcctggtcctcttctgcatcgtgcatggtgagaaggaagagtcagagggcatcgatgcganagcagtccgcggctggtgcgtccttcgacatcgacaagttgagcgcctccggcaatggcangacagacagcacgaaggctgtcgcagaggcatgagcatcggcgtgcggcggcactgngacgcagacaatcgtcatacgcagggtgacttccttgtcggacaactcaa

SEQ ID NO: 47909 - DNA, 148 bp, Zea mays
  unsure (1)..(148): unsure at all n locations
cgacggagcacgacgcacgcagagccgcagagatccgtcacactgcaagttttgaanactgaactgtaagatggcatcagcagagctttcacgtgacgaagatgtgtacatggcgaactcgccgagcaggcagagaggtacgaggaaa

SEQ ID NO: 47910 - DNA, 151 bp, Zea mays
  unsure (1)..(151): unsure at all n locations
cagcagctgcgccaagagttccatgttgctgctcagaactgctgngtgaagaagggaggtgctttcactggtgaagtcagtgctgagatgctcgtcaaccttggtgttccctgggtcattcttggacactctgaaaggagagctctgctgg

SEQ ID NO: 47911 - DNA, 265 bp, Zea mays
  unsure (1)..(265): unsure at all n locations
tgatgaatgctctcctcgaggctctctgtgacggtgtgngcatgtganttgcanaggaggtcgtgaangacgagaagtaccttgcagttgctgtgccagatgagngtgcacagacgctgctggttcaagccatcgaggctgntggcagcaagtgcaacccgaggcgctgacggtacgtcgcagttgtcctgacagcgctgtacgacggagatatcctggaggaggataccgttgtggactggtacaacgctgctgtcgcagctgg

SEQ ID NO: 47912 - DNA, 265 bp, Zea mays
  unsure (1)..(265): unsure at all n locations
ctgcagtcatctcctccatcaccaccaccaagctcaacaacagtcagctcgcgagnataatgaagagccgcagcatggcatcatcggccgcgctcttggtgctagcactcgcgctagtggcggccaccgcagcacaggtagcggaggcaaagaaggagagagccgcggagagcggcgagccggcgaggcgaagacgtccaggacgacttctgctcgacgctgtgcgagggcaagaaggagacggacctggtcgtgtgcaaggagt

SEQ ID NO: 47913 - DNA, 312 bp, Zea mays
  unsure (1)..(312): unsure at all n locations
naaccatagcgcgntgcagcgtacgcagtcgnaatcggctcgagctctacttggtgctgcagctcagntgaggcatgcacatcttcgtgnagacactgaccggcaagactatcacgcttgaggtggagtcttcagacaccatcgacaacgtcaaggccaagatccaggacaaggagngcatcacaccggaccagcagcgtatgatcctcgnctggacacaagtctgaggatggccgcactcttgcggattactacatccagaaggagagcactctgcacctggtgctccgtctcaggagtggcatgcagatc

SEQ ID NO: 47914 - DNA, 258 bp, Zea mays
  unsure (1)..(258): unsure at all n locations
ctagacgagatcgctgcgctggagaacgagtctcaggcgagtgcgagcgcgtaggattctgccataacgatctccagtatgtccttttcatgatcgacgaagagacgaggctactgaccatcattgactacgagtatgcaggttntaacgcagttgcttatgacattcgcaaccattcctgtgacatggcagcagactaccattcatganagcctcacatattggactacagcacatatcagataccgctgagcggag

SEQ ID NO: 47915 - DNA, 146 bp, Zea mays
cagcaccccgatgatccgtcaggcgtggtagaacgcgtgcgaggcgacgggggtacagaagatcgtcatcacgccgggcaactacctgacgggcgggctggagctgaaggtgccctgcaagtcatccatcatcatccgtctcgacg

SEQ ID NO: 47916 - DNA, 244 bp, Zea mays
aacaagatggcgtgcacaaacaatgcgatgagagacttgctcctcatggtcctcttctgcatcgtgcatggtcgagaaggaagagtcaaagggcatcgatgcgaaagcgtccgagccttgtgggtccttcgacatcaccaagttgagcgcctccggcaatgtgaagacagacagcacgaaggctgtacagcaggcatgagcatcagacatgcggcggcacttggaaagcgacaatcctcatacc

SEQ ID NO: 47917 - DNA, 279 bp, Zea mays
agcaaacctgcagtcatctcctccaccaccaccaccaagctcaacaacagccagctcgcgaaaataatgaagagccgcagcatggcatcatcggccgcgctcttggtgctagccctcgcgctagtggcggccaccgccccacaggtagcggaggcaaagaagaagagagcggcggagagcggcgaggcggcggaggcgaagaagatccaggacgacttctgctcgacgctgtgcgaggtgcaagaaggggacggacctggtcgtgtgcaaggatcctgc

SEQ ID NO: 47918 - DNA, 278 bp, Zea mays
caaacgtttccaagtgaaattcaagagaaggcgggctggcaagacagactacagggccaggataaggctgattaaccaagacaaaaacaagtacaacacacccaaatacagatttgttgtgcgatttaccaacaaggacatcactgcccaaatcatatctgctagtatagcgggtgatatggttcttgcttctgcctactcgcatgagttgccacgatatggtcttgaagttggtctgaccaactatgcagctgcctactgcactggccttctgttgg

SEQ ID NO: 47919 - DNA, 271 bp, Zea mays
gtctacgccgcgcccaccatgcccttcaccccaggaatggaagccgttggcgtcgtcaccgctgttgggcctggcctcactggcaggaaggtgggcgatgttgttgcatatgccggcaaccccatgggctcctatgctcaggagcagatccttccagcggctgtcgctgttcctgttcaactttcggtgattcctaagcaagccgcttctgtgatgctaaggccttacccccatgttctgcttcgccgggtattccaaggttagagagtgg

SEQ ID NO: 47920 - DNA, 251 bp, Zea mays
tgctgacactgatttaagtgttgtcgttgctgagaagtctggagagaaatcaaatgatgaagtgaaaagtcagctatctcatatccttccaacttctcgccggatcatgcagttttcaaatgggcaggctccttcgccaggtgctcgtgttgtctatgtagatggcacatttgatcttttccacgctggccatgttgagttcctcaggagtgccagacaacttggtgactttctcttgtgggtatctatga

SEQ ID NO: 47921 - DNA, 285 bp, Zea mays
caccggaaccgccatcttccagtaattcgccaaaatgacgaacacaaagggaaagaggagaggcatccgatatatgttctctaggccttttagaaaacatggagttgttcctttggccacatatatgcgaatctataagaaaggtgatattgtagacatcaagggaatgggtactgttcaaacaggaatgcctcacaagtgttaccatggcaatactaggaaagtctacaatgttaccccgcatgctgttggcattgttgtaaacaaacaagttaagggcaagat

SEQ ID NO: 47922 - DNA, 158 bp, Zea mays
catgtcttcaatctaaagataaatgtgggatcgactgcaaatgataaacctatacctgctccagatcctgaagtttcgcatataagcccccctctttcgttcattaagggtgtgttgccgaaatatttccactctgagtggtcagtagctcagttcac

SEQ ID NO: 47923 - DNA, 278 bp, Zea mays
ccggagtagggcgaaccgcgaggcgagcaagctatgggcgcgccgaagcagaagtggacgtcggaagacgaggatgcgctccgccgtggcgttcgcaagcacggcgccggcaaatggcggaccatccagaaggacccccagttcagcccgatcctctcctcccgctccaatattcgacctcaaggacaaatggaggaatttacgtttcagtggcaagtggattgggatcgagtagggtacgggttccaaagataactggatcctcatcttcaacatca

SEQ ID NO: 47924 - DNA, 205 bp, Zea mays
cgagatttgtcgttggactgggggataaagtgtctccaactgacatcgaggaagggatgagggtcggtgttgatcgcaacaagtaccagattcaaatccctcttccaccaaaaattgacccaagtgttaccatgatgaccgtgtggggaaagccagatgtgacgtacaatgtgcctggtggctacaaggagcagattgagaaaag

SEQ ID NO: 47925 - DNA, 189 bp, Zea mays
cttcgtgaagaccctgaccggcaagactatcaccctcgaggtacagtcttcagacaccatcgacaatgtcaaggccaagatccaggacaaggagggcatcccaccggaccagcagcgtttgatcttcgctggcaagcagctggaggatggccgcacccttgcggattacaacatccagaaggagagcac

SEQ ID NO: 47926 - DNA, 225 bp, Zea mays
cctcgccgcctcactccctctgcagaggtcgcagatccgtccggttagacgaagccgcccgcacccatggcctccggtgagctcgcctgcacctacgccgccctcatcctcagcgacgacggcatcgccatcaccgccgagaagatcgccaccatcgtgaaggcggccaacatcaaggtcgagtcctactggccggcgctcttcgctaggctcctggaaaagcgc

SEQ ID NO: 47927 - DNA, 274 bp, Zea mays
gtgatttgaaataattgggaataaatagttcgtgaatcgcggaactgtgcatatatacattcctgccaagataaaggtaatggagtcgtcacgcaggttccagccggccgtcatcctgcttctcctgctcattgtgtccaccgatatggcacaggcaagggaatgcgagaagtacagtgagcgatttgttggggcatgcatgatcgcagacaactgcgccaatgtgtgccgcggtgagggcttcttgggccggcaggtgcagcaccttccgccg

SEQ ID NO: 47928 - DNA, 281 bp, Zea mays
gataatgaatccaaagaccaaaaacatccgattgtatgtcaaaagagtgttcatatcagatgattttgatggcgagctgtttcccagatacttgaactttgtgaaaggtgtagttgactcaaatgatctccctctcaatgtttctcgtgagatccttcaagaaagtagaattgtcagaattatgcgtaagagacttgttaggaagacatttgacatgattcaagagattgccgagaaggatggcaaagaggactacaacaaattctaggagagctttggca

SEQ ID NO: 47929 - DNA, 264 bp, Zea mays
cccaacttggggcaggattgagtgctgcagcagggcccattggcaggaccagtgaaaagggatctgggatatgctacacttacagctgcagcaaaggtgccttcgttggtgtttcactggaagggaatgtggtgacaactagaatggaaaccaatctccgcttctacggtgatgcataccagacggcaacccatatcctgtttgggagggtggagcggccccgagctgctcagcccttgtttgctagccgatttagggcttctt

SEQ ID NO: 47930 - DNA, 176 bp, Zea mays
gaagatttgacctgggtgatgcagactatcttaggtatcatggtatgcaagagtttgatcaggcaatgcaacatcttgagcaaaaatatgaattcatgacatctgatcaccagtatatttcccggaaacatgaggaggataaggtgattgtgttcgaaaagggagatttggtattt

SEQ ID NO: 47931 - DNA, 285 bp, Zea mays
gcgcctccgctgcccatcgccgtccccgaccgcagcgcaggtgaggatccaaccccaacaaacttccaggcgacggactgaggatgagtgaagaggataaggctgctgcttctgctgagcagcctaagagggcccctaagctcaatgaaaggatcctctcctctctgtccaggaggtccgtagctgctcatccatggcatgatctcgagatcggtcctggtgctcctgctgtattcaatgttgttgttgagatcacaaagggaagccaagtcaaatacgagcttt

SEQ ID NO: 47932 - DNA, 268 bp, Zea mays
attgtgttctgattcacctgctccaatggctgttctttctgctgctgatgcttccccggtctcagctatcgggtttgagggctatgagaagcgccttgagatcacattctctgaggcacctgtctttgtggaccctcatgggcgtggtttgcgtggcctctccagggcccagattgactctgttctggatcttgcacggtgcacaattgtgtccgagctctccaacaaggatttcgactcatatgtcctctctgagtcaacttgttta

SEQ ID NO: 47933 - DNA, 200 bp, Zea mays
gtcggagagggcgtgaccgagctcgcgccaggcgaccacgtcctcccggtgttcaccggcgagtgcaaggagtgcgcccactgcaagtcggaggagagcaacatgtgcgacctcctcaggatcaacgtcgaccgcggcgtgatgatcggcgacggtaagtctcgcttcaccatgagcgcgtagcccatcttccaggacgt

SEQ ID NO: 47934 - DNA, 215 bp, Zea mays
ctcgacggctacgccttcttcggcgtcgggatggggcctggaccgtggtcgccggagatgaggaagacgtacaacctactggacacggtgagccggcacacgatccaggtgtacccgcggtcatggacggcgatcatgctgacattcgacaacgcgggcatgtggagcgtccggtccaacgtctgggagcggtactacctcggggagcagttcta

SEQ ID NO: 47935 - DNA, 93 bp, Zea mays
cgaccttggcaagcgttgcgccaagtactacgaggcaggtgcccgctttgccaagtggcgcgctgttctcaagattggccctaatgagccatc

SEQ ID NO: 47936 - DNA, 255 bp, Zea mays
acatcttggtggagacactatatctgtaacaaaaggcgttgtgtcgcgcattgaggtcactccatatgcacatggaacatcagatcttcttggcattcaaattgacgcagccataaatcctggaaacagtgggggaccagcctttaatgatcaaggggagtgcattggtgtggcatttcaggtgtacaggtcagatgaagctgaaaatattggatatgttattccaactacagttgtatcccatttcctaaatga

SEQ ID NO: 47937 - DNA, 278 bp, Zea mays
caagacaactgttctggagctgacgtacaactatggagtcacagaatacagcaagggcaatgcatatgctcaggttgccattggcaccaatgatgtgtacaagagcgccgaggcggttgatctggcgaccaaagaactaggtggcaagattttgcggcagccagggcctctacctgggatcaacactaagatcgcctcttttgttgatccagatggctggaaagtggttctggttgacaacaccgacttcctcaaggaactccactgaaggctcggga

SEQ ID NO: 47938 - DNA, 268 bp, Zea mays
cataaccacaacctcttctaccctgtttcgtctcgtgcgttctccgcagagcgaggagggctcgcggagggcagggtctccggtgtttttgttccagaatctgtagcaaatggctgacggcgaggacatccagccccttgtttgtgacaatggaactggcatggtcaaggctggttttgctggtgacgatgcgcccaaggctgttttcccaaccattgtgggacgcccacgtcacactggcgtgatggttggcatggggcagaaggat

SEQ ID NO: 47939 - DNA, 273 bp, Zea mays
actgggtccacgcagctgttccaggccgtgctatacgcgatctcgcctgcaagtgacggcacgcccatcgacgtcgtctcgccggcgccttactactcgtgttacccagttgcgtcgagctttctaaactctgggctctaccgttggggtggtgacgccaatacatttgccggcgacgacaccagctgtgttgaggtcgtctgctcgccaaacaaccctgacggtggcatccgacatgccgtcgtcaagtccaaatccagcaaggcgatctat

SEQ ID NO: 47940 - DNA, 219 bp, Zea mays
caggaggaagcgcatgtgaacatttgtgcatttgtcggacgttcagatctggactcacgatgctttcggtaaaacttgcctctgctctgatccacctccaccttcaacgacttggcaccctcgaagaccaatcctgcaagcaattctttgttccaagaagacattgaggccctcacaaagaagacacaagatggtgggacaaaagtggttgaagcaaag

SEQ ID NO: 47941 - DNA, 218 bp, Zea mays
gatccacttgcctccagttcatgggaaagggttggcgaggagaagactttaattacccctgtgcagtgcaaaaatttgtggaggcaattcaaggctgaaactgaatatacagtgactcaagccttagctgctcaggaagcaaataagaggaacaacaactggctaccacctccatgggcacttgctgcaatggctattctgggattcaacgagttcat

SEQ ID NO: 47942 - DNA, 177 bp, Zea mays
ccaagtcccagcgaacccgcgtgcaacctgtcccgactctagccgcctcttcagctcgccatggatcccaactgctcctgcgccgccggtgactcctgcacctgcgccggctcctgcaaatgcaaagagtgcaaatgcacctcctgcaagaaaagctgctgctcctgctgccctgtg

SEQ ID NO: 47943 - DNA, 274 bp, Zea mays
  unsure (1)..(274): unsure at all n locations
cggaggnngcagcagcacacagccccatcccaatcctagtcgatcttcttcccctcctcaaggaagaaaagaagctgaaccatggggaagagaaagtcagctgctaagccacctcctaagaagcggatggacaagcttgacactgtcttttcctgcccattctgcaaccacgggagtagtgttgagtgccgaattgacatgaagaatctgattggcgaacatcttgtagaatctgtcaggaaaacttcagcacactgttaatgcactcactgag

SEQ ID NO: 47944 - DNA, 123 bp, Zea mays
ccatatagatgcaggcaagacagcaactactgagcgcgttctgtattacactggagtgaactacaagattggcgacgttcatgacggaacagctagcatagactggatggaccaagcacaaga

SEQ ID NO: 47945 - DNA, 181 bp, Zea mays
gagtacataagctgccggttataaatagcagcaatgacttaaagacagctctacaaaagatgggtgccataccatcaagcaaaatactggcagtcgaggtcctgtggactccgcaaaatgagaatgacacattgtccgagcgagagctccttgaagattcaccgctcttaaggcctctgta

SEQ ID NO: 47946 - DNA, 307 bp, Zea mays
tcaatcccgctcctccgccgcctcgcgtccacccttcctcttggcgcgctccgatccaagagatggcggtgccgctgctgacaaagaagatcgtgaagaagcgggtcaagcagttcaagaggccccatctcgaccgctataagtgcctaaagccaagctggcgcaggccaaagggtattgactcccgtgtcaggaggaagttcaagggatgcaccttgatgcccaacattggttacggctctgacaaatcaaccaggcactacctccccaataagttcaagaagtttgtggtgcacaatgtctctga

SEQ ID NO: 47947 - DNA, 303 bp, Zea mays
ggccacgaatatctcggtcgccaattgctgtatactcttaccttcgccttcgccgccgccgccgtacagtctagagagaaccggcacagccgccgcagtccgcagatgtcgatcgtggtggcatcggaggtcgcgaccgctctcgcgagccgcggcgcggtcgtcgccctcgagtccaccatcatctgccacggtatgccgtacccgaagaatctccagatggccatggaggtagaggccatcatcagggacaacggggctatccctgcaaccatagccgtcctggacggagtcgctcacgtc

SEQ ID NO: 47948 - DNA, 310 bp, Zea mays
ctctcacccggcgccgcgccgccaccgccgccgccccgaggccccatcccagcgcaaccgacttccgcttacgattgaagcaatgtcgtcggacgacgaggtcagggaggagaaggagctcgacctctcctccaacgatgtcgtcaccaagtacaagactgccgccgaaatcctgaacaacgctctgaagctggttgtgtctgagtgcaagccaaaagcaaagattgttgacctttgtgagaagggtgactctttcataagagagcaaactgggaatgtctacaagaatgcaaagaggaagattgaaagg

SEQ ID NO: 47949 - DNA, 305 bp, Zea mays
gacaagatggcatgcacaaacaatgcgatgagagccttgttcctcctggtcctcttctgcatcgtgcatggtgagaaggaagagtcaaagggcatcgatgcgaaagcgtccgggcctggtgggtccttcgacatcaccacgttgggcgcctccggcaatggcaagacagacagcacgaaggctgtgcaggaggcatgggcatcggcgtgcggcggcactgggaagcagacaatcctcatacccaagggcgacttccttgtcggacaactcaacttcacaggcacttgcaagggcgacgtgaccat

SEQ ID NO: 47950 - DNA, 308 bp, Zea mays
cgatagttctagctctcttcttagttggagaaatcgggggcaatgactacaacggacctcttctttctggagttcccttcgaggaaattcgcgccatcactccgagtgttgttgcgaaaatttcttctacaatcagcgaattgattcagctaggagccaagactcttgtggttccaggaaaccttcctattggatgtgtcccaaaatatctgatgatattcaagagcaataagaaagaggattatgatccacagacaggttgtcttagatggatgaacgagttctcacagtaccacaacaagcttctt

SEQ ID NO: 47951 - DNA, 310 bp, Zea mays
caatgtaaaagcacagcggattaacattctacatcatatactctcttctaagtgcttggaaacaacatcagtattcattttataattcttgagttatagaaatcgccgctcaattaagagggatccgcaataagttaagtgagttatgcaatgagctcaattcaaattccttcaaattctctaacaccccgtttggatcatttgaattgaattacattctaataatagttatttaggcatatatcgattaagataattcgattttatataaacatatattgtatactatcattagcaagatatcggagat

SEQ ID NO: 47952 - DNA, 260 bp, Zea mays
tcagcaacggctaccactacatggagggcgagacgatgagggtgcagttcgagcgctggatcgtcgccgccaaggccgacctcgtcgtcgccggccacgtccacgcgtacgagcgcagcaccgcgtgtccaacgtcgcctacgatatcttcaacgcccggtgcacgcccgaccggacaagggacgcgcccgtctacgtcacggtaggcgatggcggcaacatcgagggcatcgcggacaacttcacgcagccgcagccga

SEQ ID NO: 47953 - DNA, 284 bp, Zea mays
gacggcgtgcggcaacgtccccatcttcaaggacggcaagggctgcggctcatgctacgaggtgagatgcaaggaaaaacctgagtgctcgggcaatccagtcacggtgtacatcactgacatgaactacgagcctatcgctccctaccactttgacttgagcggcaaggccttcggctccctggcaaagcccgggctcaacgacaagattcgccactgcggcatcatggacgtcgagttcagaagggtgcgatgcaagtaccccgccgggcagaagatcgtgt

SEQ ID NO: 47954 - DNA, 298 bp, Zea mays
agactggaaaaaagaggaataacaaatccgtgcatacttgcttatcagagccgagttggaccagtggaatggctgaaaccgtacactgatgagacaattattgagcttgggcagaaaggggtaaagagcctgcttgctgttcccattagttttgttagcgaacacattgaaactttggaagaaatcgatgtggagtacaaagagttggctttggaatctggcatcaagcactggggacgggttccagcactaggttgcgaacccacattcatttcggatcttgctgatgctgttattg

SEQ ID NO: 47955 - DNA, 301 bp, Zea mays
gtcatcaaggacctggtggtcgacatgaccaacttctacaaccagtacaagagcgtcgagccgtggctcaagcgcaaggtcccgccgccgcagctaggcaaggaggtcccgcagaccaaggccgaccgcgccaagctcgacggcatgtacgagtgcatcctctgcgcctgctgctccacctcctgcccatcctactggtggaaccccgaggagtacctcggcccagccgcgctgctccacgccaataggtggatacaggacagccgtgaccagttcaccaaggagcgcctggacgccatca

SEQ ID NO: 47956 - DNA, 306 bp, Zea mays
gaaggagagggatgcacaccacttgcgtgcgctgcttcctcctgcagttgttcctcaagaactcccgattaagaagatcatgcacaacctgcggcagtaccaggtccctttgcagcgctatatggccatgatggaccttcaggagaggaacgagaggcttttctacaagcttttaattgataacgtggaggagctgcttcctgtggtttatacaccaactgtaggtgaggcctgccagaagtatgggtccatctttcgacaaccacagggtctgtatgtcagcttgagggacaaggggaaggtcct

SEQ ID NO: 47957 - DNA, 98 bp, Zea mays
cgaattcgatggcggccaacttcgggaacaagatccgcaacgccaagctggatcttcttggagatgtaggcgctggcaaatctagcttggttcttcgg

SEQ ID NO: 47958 - DNA, 298 bp, Zea mays
cggcacaaggaggacgccaacaggcgcctcgagtgggccaccttgaacctggagcgcggcgtcgtcgtgagcgagacgacgaagggcgacggcaatggcaatgcaggccggaaggcgccgataagcatcgtccggctcttcttggcctgcatggtctccggcggcatccagtacggctgggcgctgcagctctccctcctctcgccctactctcagactcttgggatctcgcacagctacgtgtctctgacatggatctgcgggcctatcgccggatttgtggtgcaaccatcgtggg

SEQ ID NO: 47959 - DNA, 302 bp, Zea mays
ctgcagtcatctcctccatcaccaccaccaagctcaacaacagccagctcgcgaaaataatgaagagccgcagcatggcatcatcggccgcgctcttggtgctagccctcgcgctagtggcggccaccgccccacaggtagcggaggcaaagaagaagagagcggcggagagcggcgaggcggcggaggcgaagaagatccaggacgacttctgctcgacgctgtgcgagggcaagaaggggacggacctggtcgtgtgcaaggtagtctgcgcgctctcccagcagtccaacctggtgctg

SEQ ID NO: 47960 - DNA, 296 bp, Zea mays
gcttctcgttggatcgaacagctagggtcgccaagatgttcgggcgcgcgccgaagaagagcgacaacacacggtactacgagatcctcggggtctccaaggacgcgtcccaggatcgcctcaagaaagcctaccgcaaggccgccatcaaggaccaccccgacaagggcggcgatcccgagaagttcaaggagctagctcaggcttatgaggtcctcagtgatcctgaaaagcgggagatttatgatcaatatggtgaggatgccctcaaggaaggaatgggaggtggtggaggg

SEQ ID NO: 47961 - DNA, 297 bp, Zea mays
agcggcccattcgacctccctcgacccaccccctcgtctcgtctcgtctcgtctcgtccacctccccagcggcgcgtgcgcgtgaagcttgaggcaatccccgctccgtctagcggccctgcgcaatcagtcagggttccatggccaacagcaacctcccgcgccgaatcatcaaggagacgcagcggctcctcagcgaaccagcgccggggattagcgcgtcgccgtcggaagagaacatgcggtacttcaatgtcatgatccttggccccgcacagtcaccctatgaaggtggag

SEQ ID NO: 47962 - DNA, 302 bp, Zea mays
agatctttcccccgtcctccctcgccttcgccttcgccggcaggagatttccaccaccaccgccgaaccgccccgaccctcctcccctctcgcgctatggcccagactgttgtgctcaaggttggcatgtcctgtgagggctgtgttggagctgtcaagcgggtcctcggcaagatggaaggcgtcgagtcctacgacgtagacatcatggaacagaaggtcaccgtgaagggcaatgtgacacctgacgccgtcctgcaaactgtttccaagactggcaagaagacttcgttctgggaggc

SEQ ID NO: 47963 - DNA, 299 bp, Zea mays
cggcaagctcatggccgagcggcatatcaccgtggaggcggtcttccaagccaccatgatcctggtcaccaccgggcgcgtgatagcggatgcgtgtagcatgacgacggacatcgccaaaggcgctgaggccgtctcgtcggtgttcgtcaatcctcgaccgccagacgaagatcgacccggacagccctgaggggtacaagccggagaagctcatcggagaggtggaagctgtaggggttgatttcgcgtacccatccaggccagacgtgatcatcttcagaggattctccttgagc

SEQ ID NO: 47964 - DNA, 301 bp, Zea mays
aagatggcgtgtatagacaatgcaatgagagccttgttccttttagcgctcttctgtgtcgtgcatggtgagaaggcaaagtcaaaggacaacgatgcaaaagcgtccgggcccggtgggtccttcgacatcaccaagttgggcgcctccggcaatggcaagacggatagcacgaaggctgtgcaggaggcgtgggcatcagcgtgcggcggcaccgggaagcagacgatcctcatccccaagggcgacttcctcgtcggaccactcaacttcacaggcccatgcaagggcgacgtgacca

SEQ ID NO: 47965 - DNA, 302 bp, Zea mays
ggcgtgatcactagcacggaggggaggaagagcatgctgaagctggctgagaggatggtgacgagcttctgcggtggcgtgacggcctcagccgcgcaccagtggacgacgctgtccggcagtggtgctgacgacgtccgtgtcatgaccaggaagagcgtcgacgaccctggcaggccgccgggcatagtcctcaatgctgccacctctttctggctccctatcacacccaagcgtgtcttcgacttcctccgtgacgaaagctctcgcagcgagtgggacatcctctccaatggcggcgt

SEQ ID NO: 47966 - DNA, 302 bp, Zea mays
caagtttgccagggagacaggagacatccaaacgctttcacatgttgatataaagattattgctttggcttacatgttagaagctgagatccatgggactagccatttgcgagagaccctcctcctctgcatgaggtgaatgtcagaaagctgtcagaagctcaaatgcctggttggggctctaatgtgcctaacctgaaagagtgggaagagttggatcagatgtctgaagctggtggcgatatcaattctcgaatacttcctctgaaggatattgagagtcaagatatcctgatgtgtga

SEQ ID NO: 47967 - DNA, 290 bp, Zea mays
gcacaaaggcaaccttctacaactgcacaattgaaggtggacaaggcgccctgtatgaccagatggggctgcactacttcaagtcctgcaccatcaggggcaccatcgacttcatctttggctctgccaagtccttttacgaggactgcgccattgtttccgtgaacaacatggaggagatcatgaccttgcctgtggcaccacctcaacttgacattcacgacaatccaatcaaggttgccccagggaagggaggcttctccttcaagacatgtaccatcaccggggaa

SEQ ID NO: 47968 - DNA, 293 bp, Zea mays
gcgcgaggagaaggagcggcggcgcacgagcgcgaggcgcgggtgatcccggacacggacgccggcctcgtcgagttcttcctcgacaccgacgcgcgcgagatcgagatcgagatcggcaggctgcggcccaggctcagccaggacttcttcggccacgtctcgcgcgagatagcgcagatcaaatttgcagtcaccaggacagcggagatggaagacagactgatcgagctggaggcgatgcagaaggttcttctcgagggagttgaggcgtacgacaagttgcagaacga

SEQ ID NO: 47969 - DNA, 295 bp, Zea mays
ggaaaccctagccgccatatctcacgatccactcgagcaccaagccgagggaaggtgaggagcgatggcgcgcggcgtggtgtcggcgaagggcggcgcggtcgcgggcaagaagaaggggtcggtttccttcacgatcgactgcaccaagccagtggaggacaagatcatggaggtcgcctcgctcgagaagttcctgcaggagcgcatcaaggtcgccggcggcaaggctggcaacctcggcgactccgtcaccatctctcgcgagaagaccaaggtcaccgtcacctctgac

SEQ ID NO: 47970 - DNA, 294 bp, Zea mays
ctagaaataaagcagctcctccgcggggcggcgaactgctactcatcgccaaaaccctagccccgatccggtcgaggagcactacttcttggcatggcgggcacccctagccaggcaagcctcctgctccagaagcagctcaaggatcttgcgaagaaccccgtggatgggttctccgcagggcttgtagacgatagcaacgtcttcgagtggcaggtcaccatcatcggcccgcccgacaccctatatgatggaggctacttcaatgcaataatgacccttccccagaactat

SEQ ID NO: 47971 - DNA, 297 bp, Zea mays
cttaattgcgccactgctcgttatcctcctcttgcattgcatagcaggtcgtagttgagcagcagcaaccactgcacaggatgtcgtggcagacgtacgtcgatgagcacctcatgtgcgagatcgagggccaccacctgagctctgccgccatagtcggccacgacggcgccgtttgggcccagagcaccgcattcccacagttcaagccagaggagatgaccaacatcattaaggacttcgacgagcctgggtttctggccccgatcggcctcttccttggccccaccaagtaca

SEQ ID NO: 47972 - DNA, 296 bp, Zea mays
cgacggagcacgacgcacgcagagccgcagagatccgtcacactgcaagttttgaaaactgaactgtaagatggcatcagcagagctttcccgtgaggaaaatgtgtacatggcgaactcgccgagcaggcagagaggtacgaggaaatggttgagttcatggagaaggtagcgaaaactgttgactcggaggagctcactgtggaggagcgcaacctcctgtctgttgcatacaagaacgtcattggagcccgccgtgcctcatggcgcatcatctcctccatcgagcaagagga

SEQ ID NO: 47973 - DNA, 297 bp, Zea mays
atgggcgttccaccagtgagggcgaggtaaccgggctacttatcgcagcactctttgctgggcagcacaccagctctatcacctcaacctggactggagcatacatgcttcggttcaagcagtacttcgcagaggctgtagaggagcagaaggatgtcatgaaacggcacggcgacaagattgatcatgacatcctcgcggagatggacgtcctctaccggtgcatcaaggaggccctccgtctacacccgccgctaatcatgttgcttcgtcaatcacacagcgacttcaccgtga

SEQ ID NO: 47974 - DNA, 302 bp, Zea mays
tcgcattggggtgaacctgctgaacttgcacatggtgatattataactctagggacttcatctaaactatctgttcaaattacactgcaaaatcaacgagttcctgctggtgttggtatggcatccgatccaatggtggcacgtagaagtggaaagaaacttctaatggaagacataagcttttgccagtgtcctctgcagggtgttgaacattttgggctctttggaatttttgatggacatggtggggatggagctgccaaagctgtcagcaagattcttccagaaaatctgggatacat

SEQ ID NO: 47975 - DNA, 294 bp, Zea mays
tgtacgtgttctgctgctcctacgcccacaacgtcgcgcccaaaggcaagttcatcgccttcgtctccaccgaggccgagaccgacaagcctgagatcgagctcaagcccgggatcgacctgcttggccctgtagaggagaccttcttcgacatctacgacagatatgaacccgtcaacaaccctgacgacgactgctgtttcctcacaaatagctatgactccaccacccattttgagacgacggtcaaggatgtgctcgccttgtacaacaagatcacgggaaaggagcttg

SEQ ID NO: 47976 - DNA, 290 bp, Zea mays
gtcatcaccaaatgcgtcatcccggcgaactggagactcgatgccgtctgcacttccaacgtccacttctactagactttggattcccgtcgcgtcatccggcaagcgggctatggaccttcagcagcaagctaattaagttggaagaatgcaccgctagccttatatactactgagacttccaaattctagtagatgtactccttttgttcgggttcatgatcgaagtccaaagcgtggaatacaagctgaaggctatatatacatgccatttttggaggcattttttt

SEQ ID NO: 47977 - DNA, 305 bp, Zea mays
actgcatctccatcggccccgggacctccaaggtgaacatcaccggcgtgacctgcggccctggccacggcatcagcatcggcagcctagggcggtacaaggacgagaaggacgtcacggacatcaacgtcaaggattgcactcttaagaagacgatgttcggcgtccgcatcaaggcgtacgaggacgccgcctccgtgctcaccgtctccaagatccactacgagaatatcaagatggaggactcagccaaccccatcttcatcgacatgaagtactgccccaacaagttgtgtactgccaac

SEQ ID NO: 47978 - DNA, 307 bp, Zea mays
cgacttgttccaggatggactaagcccatctgcattggaaggcatgccttcggtgatcaataccgagctaccgatgcagttctgaaggggcctgggaagctgaagctagtttttgagggaaaagaagaacagattgatctggaggtattcaacttcactggtgctggaggagttgccttgtctatgtacaacaccgacgagtcaatccgagcttttgctgaggcttctatgacaactgcttatgagaagaaatggccactctaccttagcaccataaacacaatcctgaaaaaatatgatggcaggt

SEQ ID NO: 47979 - DNA, 292 bp, Zea mays
ggagagaggagaggcgcagagcatcgacgatggcgagcggcacatgaagagggagatcagcgagacccacgacaccctccgcttcggcctcaatgccggcgtcaaggccgacctcgcgccgccgcacccgctccagtccagcatccaatcggaggccaagttctgggcggacaagaagaagtttgggacagaggccatctacggatccgccttgaacatccgcaaggatctcgatgcccaaatcctctcaaggttccaaaggccccctggtgctttgccatcatctctgctt

SEQ ID NO: 47980 - DNA, 295 bp, Zea mays
aacagatatgtgatcaagaacagtactactggggaaattattataaaacatctgaacaattagcaggaagctgaccagagcaatttccgtgacccatctaccaatactgatctcgaagttcaggaaaaaatgtctctcctggaatggtttgccaatgaatacaagaagtttggttgctcgctggagtttgtgacaacaagtctcaggagggatcccagttctgtagaagatttggtggcattggtggcatgttgctaatacagctggataaccggtcttttgatgagctttctga

SEQ ID NO: 47981 - DNA, 292 bp, Zea mays
ggagacgagaggaggaggggaggtgcgccaccggaagcggaaacctcgggtgtcgtcgaccaacctcgtcgatccggttgcgacgcggtgtgctagaataactaccgaccatggtagaggaggagatcaccgagggcttgaagaacctcaccgtcaccggagacgcggcggcttcgggcggagaagggcagaggaggggcggcggcataagcagcaaccgcatccaggtgtccaacaccaagaagcccctcttcttctacgtaaacctcgccaagaggtatatgcagcagca

SEQ ID NO: 47982 - DNA, 289 bp, Zea mays
agctcagcgaccaccaagcagagcaagccagtgaggtctctcagagcgtaccagccagctacaatggcggggaacgcgctagccaaccatgtccaggtctacgtcatgctcccgctggatgtcatcactgtcgacaacacgttcgagaaggaggacgagacgagggcgcactgaagaagctgacggaggcgggcgccgacggggtcatgatcgacgtctggtgggggctggtggaagggaaggagccgggagtctacgactggagcgcctacaggcaggtgttcaagct

SEQ ID NO: 47983 - DNA, 293 bp, Zea mays
atggaactaaactcagacaccctcctcttcctaactactatcatctcagcggctatccttgttgtgtgctcacttagccgccgcaaaccttcaccaggccccaagaagaagcggcctccaggcacatggcgtctccccttgatcggaaacctcctccacctagccacctcgcagccgcacgtcgcgctacgggatctggccaggaagcacggacccgtcatgtacctgcgtctgggccagatcgacgccgtcgtgatctcctcgcccgcggcggcacaggaggtgctccggga

SEQ ID NO: 47984 - DNA, 292 bp, Zea mays
cgacaagatggcgtgcacagacaatgcgatgagagccttgttcctcctggtcctcttctgcatcgtgcatggtgagaaggaagagtcaaagggcatcgatgcgaaagcgtccgggcctggtgggtccttcgacatcaccaagttgggcgcctccggcaatggcaagacagacagcacgaaggctgtgcaggaggcatgggcatcggcgtgcggcggcactgggaagcagacaatcctcatacccaagggcgacttccttgtcggacaactcaacttcacaggcccttgcaag

SEQ ID NO: 47985 - DNA, 289 bp, Zea mays
aggttccttcaatttttaatcgaacaaaggcaacttgttttgcttatgggcaaactggcagtggaaagacatataccatgcgtccccttcctcttaaggcttcccaagatatcttgaggttaatgcaccatgcatatcgaaatcaaggatttcaattgcatgttagcttctttgagatatatggtgagcaattatttgaccttctcaatgataggagcaaactttgcatgagagaggatgcaagcaaaaggtttgtattgttggtttgcagagtatagagtgtccgtgt

SEQ ID NO: 47986 - DNA, 289 bp, Zea mays
tggaagctgacatggatttattccttgggaacctgcaacatcaatgctaagtttgatgctaaacctattgaacttattgttacaacatatcaggctgcattgctactactgtttaatggatctgacaggcttagttattctgagattgtaacacaattaaacctgtcagatgatgatgtagtgcgtttgctccattctctttcttgtgcgaagtacaagatccttaacaaggaaccggctagtagatccatctctcccaatgatgtttttgagttcaattcaaagttta

SEQ ID NO: 47987 - DNA, 256 bp, Zea mays
agggtctgggcaaaggcggcgccaagcgtcaccgcaaggttctccgcgacaacatccagggcatcacgaagccggcgatccggaggctggcgaggaggggcggcgtgaagcgcatctcggggctcatctacgaggagacccgcggcgtgctcaagatcttcctcgagaacgtcatccgcgacgccgtaacctacacggagcacgcccgccgcaagaccgtcaccgccatggacgtcgtctacgccctcaagcgcca

SEQ ID NO: 47988 - DNA, 284 bp, Zea mays
tgacaacgtcaaggccaagatccaggacaaggagggcatccctccagcgcagcagcggctcatctttgctgggaagcagcttgaggacgggcgcacgcttgccgactacaacatccagaaggagagcaccctccacttggtgctgcgcctcagaggaggcatgcagatcttcgtgaagaccctgaccggcaagactatcatcctcgaggtagagtcttcagacaccatcgacaacgtcaaggccaagatccaggacaaggagggcattccctcagaccagcagc

SEQ ID NO: 47989 - DNA, 284 bp, Zea mays
aggtcatgcgggaggaggaattcgcgccggtaaagaacgccagcggcgcaacgtatgacacccctgatagcgcgaactcatgctgctccgcctccacagcagatgggtagtcgctgctggcggcttcttgacgcactctgtgcccttgtatatgacaggcgtcgaagtttctccgctctcctcctacgccggggagaaactggaagccatctgccgtgggcgaacgttccatgcgccgagcgatttttcgtggcgacgagtagacctgttcatgggactggagt

SEQ ID NO: 47990 - DNA, 281 bp, Zea mays
attcctccctgtctccgccctcttctgactcccgtaggccgtggtgccgccgccgactgctgggactgcccaacaccaagtgcccaggtcatcttcgggccattcgccggcgacgagcaccaccaggtgtgccacgttgaccgagctatggacagcctgtggcatctaggggacgagctccgcgcgcagcccaacgtggtggaggaccgcagtggtctctcatgacgtccaagctggcggagatcaccaggtccaacggcgataggatgaacaccgtccct

SEQ ID NO: 47991 - DNA, 286 bp, Zea mays
ccccaactcgtccagagttagttgtagctatagacctggttgttgtagcgcacgcagtagccataggaaatacggctgcttgctgccaagatgagtggcggcgccaaggcctacgccgccgtcgtcctgatcaggatcatgtactccggcatgcacgtcatgagcaaggtggccctggatcagggcatgaacccgctggtgttcctgttctaccggcataccactgccgcgctcgttctcatccctgtcacctttgttgtcgagaggcggaaagctaagccggtta

SEQ ID NO: 47992 - DNA, 283 bp, Zea mays
cgccaacgaggtgcccaagaccgcggagaacttccgcgcgctgtgcacgggcgagaagggcgtgggcaagtccgggaagccgctccactacaagggctccaccttccaccgcgtaatccccgagttcatgtgccagggcggcgacttcacccgcggcaacggcaccggcggcgagtccatctacggcgagaagttccccgacgagaagttcgtgcgcaagacaccgcccccggtgtgctctccatggccaacgccgggcccaacaccaacggctcccagttct

SEQ ID NO: 47993 - DNA, 285 bp, Zea mays
cacaggaaacacacgagggagttactgaagatggcattgaagatgcctttgaggttcttggtgagattcaggaaattgtgcaaacagggctttgggtaggcgattgcttcatttacacgagttctgtgaacagattacattattatgttggaggagaaatagtcaccattgcccacttggacaggacgatgtatctcctaggctacattcctaaagacaacaggctttatctgggggataaagaattgaacatcattagctattccctgctggtttcagtcctgg

SEQ ID NO: 47994 - DNA, 222 bp, Zea mays
tgaagagcggcggcgcgggcggacaaggagcaggcggaggaggagttgtgccaagccacaatgggtatctcgcgtgactcgatgcacaagcgccgagccaccggtggaaagcagaaggcctgctcgaagaagcgaaagtatgagcttggtcgccagccagccaacaccaagttgtcaagcaataagacggtgaggagggtccgtgttcggggacgtaatgtg

SEQ ID NO: 47995 - DNA, 288 bp, Zea mays
gaatttgttgaagacctacgaggtcatggtaaagaagttccagtcccagatccagactagagacactgagataacccatttacagcagcaaattgatgaagctaaacttcggaaatcaaagctagagaagaaactgaaacagaggggcctacttaacagggagtcagaggaatctgacgaagaagagaactacttttccattgaattgacgccaagtttgtttacatctgctgtcgataatgcataccagtccatacatgaattttcaaagcctttgatcaacatgat

SEQ ID NO: 47996 - DNA, 285 bp, Zea mays
atttcgaataacacaggtgagcgcgacgatgggatccctcgttaataacatcatggtcgtgggcgccgtccttgcggcgctcgtcgccggcgggtcgtgcgggcccccgaaggtgccacccggccccaacatcaccaccaactacaacggcaagtggctcaccgctagggccacctggtacggtcagcccaacagtgccggcgctcctgacaacggcggtgcgtgcgggatcaagaacgtgaacctgccaccctacagcggcatgacggcgtgcggcaacgtccc

SEQ ID NO: 47997 - DNA, 284 bp, Zea mays
gtctacgcgcctttcaagagcctcgtgcctatggttgaccccaactctatcgtgtttggtggatgggacatcagcaagctgaacatggccgacgccatggccagggccaaggtcctagactttcacctccagaagcagctcaggccctacatggaatccatgctgccactccctggcattttcaacccagacttcgtcgccgcaaaccaaggtgcccgtgctgacaatgtcatcaagggcaccaagaaagagcaggtggagcagatcaagaaggacatcaagga

SEQ ID NO: 47998 - DNA, 284 bp, Zea mays
ctcgagccggttcggcggagacggcctggtgttcctgcagaagatcaacttctacccgccgtgcccgcagccggagctcacgctcggcgtcgcgccgcacaccgacatgagcacgctcaccgtcctcgtgcccaacgaggtgcaggggctccaggtcttcaaagatggtcaatggtacgaggccaagtacgtgcccgacgcactcatcgtccatgtcggcgatcagatcgagattttcagcaacggggcatacaaggcggtgctgcaccgtacgacggtgaaca

SEQ ID NO: 47999 - DNA, 285 bp, Zea mays
cggctactccttcaccaccaccgctgagcgggaaatcgtgagggacatgaaggagaagctcgcctacatcgccctggactacgaccaggagatggagaccgccaagaccagctcttccgtggagaagagctacgagctccccgacggacaggtcatcaccatcggcgccgagcgcttccgctgccccgaggtcctcttccagccatccttcatcgggatggaagctgccggcatccacgagaccacctacaactccatcatgaagtgcgacgtggatattaggaa

SEQ ID NO: 48000 - DNA, 282 bp, Zea mays
caataagatggcgtgtatagacaatgcaatgagagccttgttccttttagcgctcttctgtgtcgtgcatggtgagaaggcaaagtcaaaggacaacgatgcaaaagcgtccgggcccggtgggtccttcgacatcaccaagttgggcgcctccggcaatggcaagacggatagcacgaaggctgtgcatgaggcgtgggcatcagcgtgcggcggcaccgggaagcagacgatcctcatccccaagggcgacttcctcgtcggaccactcaacttcacagg

SEQ ID NO: 48001 - DNA, 285 bp, Zea mays
accgtgctcggctcgcccacggcactggacatccttcctccgcacaaagtacccgaaaaacgcccattaaaccaaataaaaggtaatttaacacgagaacggtcacccatttttactatggtttggtgttcgaaaaacaaacaaaaataaaaccaaaaaaaaaggaatgcaacacgaggacttcccaggaggtcacccatcctagtactactatcgcccaagcacgcttaacttcggagttctgatgggatccggtgctttagtgctggtatgatcgcatccgtc

SEQ ID NO: 48002 - DNA, 280 bp, Zea mays
cgacatcctactttcgtcctcacgagtgaccgataatccgccggcgctaagatgttggtttatcaagatctcctatctggcgacgtgctcctgtcggattcattcacctacaaggagctcgagaacggcgtcctgtgggaggtcgagggaaagtgggtcacccaaggtcctgttgatgtagacattggtgccaatccatccgccgagggtggtgaggacgaaagcgttgatgacacagccgtgaaggtggttgatattgttgacacattccgtctacagg

SEQ ID NO: 48003 - DNA, 281 bp, Zea mays
ggagcacgccgcacgagccctttccgcagccgccaaaatggtgaacgttcctaagaccaagaagacctactgctagatcaaggagtgcaagaagcgcactactcgacaaggttactcagtacaagaacggtatcgatagcctgtctgcccatggaaagcgccgttatgaccgcaagcagtcaggttatggtggccagaccaagcctgacttccacaagaaggccaagaccaccatgaaaatcgtattgaagctgcagtgccagagctgcaagcactactca

SEQ ID NO: 48004 - DNA, 277 bp, Zea mays
gaatctcgtgtattcattgggaatctcaacactcttgtggtcaagaaatctgatgtggaggcaatcttttcgaagtatggcaaaattgtgggctgctctgttcataaaggctttgccttcggtcagtatgttaatgagagaaatgcccggactgctgtagcaggagaggatgtcagaatgattgctggccaggtgttagatattaacctggctgcagagccacaagtgtaccgaggaaaagcaggtgtgaaacgatctgcagcggagatgtacggct

SEQ ID NO: 48005 - DNA, 279 bp, Zea mays
gatggccgtgtcattatttggaaggaggatgcacgaggcaattggtctcaagtccacgtcttcagtgacaacaagtcatctgtcaactccattgcttgggctccgtatgaggttggcctctgccttgcctgtgcatcttctggtggaagaatatccatcttgacgatgcaagctgacgggggttgggatactgcaaccattgagcgagcacatcctgtcggtgcgactgccatatcctgggcccctgcaacagcgtcactagctggtgcaggggagctt

SEQ ID NO: 48006 - DNA, 278 bp, Zea mays
ggaggagttcagcatcgagaagctgcagctggtggagtcggaaaaacggagggtgcggcaggagtacgagcgcaaggagaagcaggtggacgtccgcaggaagatcgagtactcgacggagctgaacgcggcgcgcatcaagctgctgcgggcgcaggacgacgggacgaccgggatgaaggagagcgccggcgacgcgctgctccgcgtcaccaaggacgccaacgcctacaagagggtcctcaagggcctcatcgtgcagagcctgcttcgcctga

SEQ ID NO: 48007 - DNA, 280 bp, Zea mays
aacagatccagcaatacagtacaaggcataccctgattacgcgttggatatggggttaattacaaaaacacaatttaacaggatcaataaaatagttccaacttgtgaattcgctgtcaagctttgtggtacttctggaaccgtaacttgccttgctgcgtactttgcctgcaatacaatattcagtgccatcaggacaatcataggcaataaaaattattatgacatcaggaaaccatgcatcggaagcctatgctatgatttctctaatttggagaaa

SEQ ID NO: 48008 - DNA, 278 bp, Zea mays
ggcggcacaagaacggctacggcggctacctcatcgaggaggaggaggggctcaacgaccacaacgtcgtcgtcaagtgcgccgagatccagaccgctatctccgaagggcaacatcgtttcttttcactgagtaccaatatgttggtatcttcatgtccatctttgctgttgtgatcttcctcttccttggttcggttgacggattcagcacgaagagccagccctgcacctatagcaaggacaagtactgcaagcctgcactgttcactgcactct

SEQ ID NO: 48009 - DNA, 280 bp, Zea mays
gtagttctgggacgaccagaactcgcagatgcagtgggtgaagcccctcaaccttgcgcactcaaggcagccatgcagaagcggctcaagtccgtcgtgtcacgctacgccggcaaggtcatccactgggacgtggtgaacgagaacctgcacttcaacttcttcgagacgaagctgggccccatggcgtcggcacagatctaccagcaggtggggcagctggaccgcaatgccatcctattcatgaacgaattcaacacgctggagcagcccggcgatc

SEQ ID NO: 48010 - DNA, 281 bp, Zea mays
gcctcagcgcatcgcccgccgcgacctcatcgatcaccttcagctttcaatcatggcggacgtcgatgtcgaaccggaggttgccgccggagctcccaagaagaggacgttccgcaagtacagctaccgcggcgtcgacctagatgcgcttctcgacatgtccacggacgaccttgtccagcttttccccgcgcgcgccaggagaaggttccagaggggtctgaagaggaagcccatggcgctcatcaagaagctgcgcaaggcgaaaaaggatgctcctg

SEQ ID NO: 48011 - DNA, 263 bp, Zea mays
cgtacacatacccaagatgccaccccattgactcttggccaagaattcagtggctacactacacaggtcagatatggaattgaccgcattaattgtacattacctcggatgtaccagcttgctcaaggtggaactgcagttggaactggcttgaacaccatagaaaggacttgatacgaaaatagctgctgcagtggctgacgaaacaaacctatcctttgtgacagcagagaacaagtctgaagctttggaagcacatgacg

SEQ ID NO: 48012 - DNA, 278 bp, Zea mays
cgcagttccccgaccacaccgttcctccgagcccaggagcagccccgcgccaggaggaagtttgttcttttaacaatatgtcgagggaggagaatgtttacatggccaagttggctgagcaggctgaaaggtatgaggagatggttgagtatatggagaaggtggctaagactgtagatgtggaagagctcactgttgaggagcgtaaccttctgtctgttgcatacaagaatgtgattggggctcgccgcgcttcatggcgcattgtttcttccatt

SEQ ID NO: 48013 - DNA, 283 bp, Zea mays
ctcgagcaggttcggcggagacggcctggtgttcctgcagaagatcaacttctacccgcctagcccgcagccggagctcacgctcggcgtcgcgccgcacaccgacatgagcacgctcaccgtcctcgtgcccaacgaggtgcaggggctccaggtcttcaaagatggtcaatgggacgaggccaagtacgtgcccgacgcactcatcgtccataggggcgatcagatcgagattttcagcaacggggcatacaaggcggtgctgcaccgtacgacggtgaac

SEQ ID NO: 48014 - DNA, 278 bp, Zea mays
caaggcaaccaaaccatctcgattctcgactcgtggggaagtttcgctctcgccggcgtcgacggcctagggttcgaggaacgtccgtccgtccgtccggggaaggagcggtagggaggcggagatgatcgaggtggtgctcaacgaccgcctggggaagaaggtgcgggtcaagtgcaacgaggacgacaccatcggcgacctcaagaagctggtggcggcgcagacggggacgcgccccgagaagatccgcatccagaagtggtacaacatctaca

SEQ ID NO: 48015 - DNA, 278 bp, Zea mays
gagatacaagaagtttgctgatctcttggagtccttcaatgctgataccgtgcatgtgctaaatgaatctatcaagcagaagaggaaaatcctggtcgaaggcggacaagcaattatgctggatattgattttggcaattatccatatgtgacttcttctagtccttcagctggcgggatatgcacaggcctagggattgctccaagggcaattggcgacctgattggagtggtcaaagcttacacatctagagttggctctggccctttcccaactg

SEQ ID NO: 48016 - DNA, 296 bp, Zea mays
gagcgttgtttgctcttaaagtttgtgacaagctgttcacgagctccactgcttggattcaagtacttgcaaccttctttcacaattcataaggttccatgtgatgtaacactttgggcatcaattggaggccaagatgtagatcgtcttccatctgcttccacatgctacaatacgctcaagcttcctacatacaagcggtcaagcacgctaaggagcaagctgctttacgccataagctcaaatactggatttgaactctcgtagaggtatattcagtggttttgtaaccctgc

SEQ ID NO: 48017 - DNA, 292 bp, Zea mays
gtctttataggatcagaaggcccatgaagctattttgaaggtgttagaccttcagtgcgcgagtaaagttgctcgagaaccccaattgtctgaatggactgaaagagtcagcagatgtgacagattgaaatctccggttaggattgcaatggttggaaagtatactggcctgtcagactcctacctatctgttataaaggctcttttgcatgcgtcggttgctttggacaggaaacttgtggtggactgggttccttcctgtgatcttgaagattctacagcaaaagagact

SEQ ID NO: 48018 - DNA, 293 bp, Zea mays
cgacaagatggcgtgcacagacaatgcgatgagagccttgttcctcatggtcctcttctgcatcgtgcatggtgagaaggaagagtcaaagggcatcgatgcgaaacgtccgggcctggtgggtccttcgacatcaccaagttgggcgcctccggcaatggcaagacagacagcacgaaggctgtgcaggaggcatgggcatcggcgtgcggcggcactgggaagcagacaatcctcatacccaagggcgacttccttgtcggacaactcaacttcacaggcgcttgcaaggg

SEQ ID NO: 48019 - DNA, 258 bp, Zea mays
tcggatgctacctgctccaagagcacatcaaggcgtctggtggattcaggaacgccttcatgaagggcaatggtgtgtcgaactccatcggcatcctcctgctcttcgtctaccctgtctaggccggtgtgctgcaagtcctgtaggcacccaccattgcctccgtgtttcccctgtgcggtccaggcgtccagctccgttcccgttcgtgcccgtgcaaatgctccctctatggtgatccgtgatctgtgtcacgat

SEQ ID NO: 48020 - DNA, 196 bp, Zea mays
tggatgctcgacaagcttggcggagcttttgctcccaagccatcttctggacctcacaagtccagggagtgccttcctctgatcctcatcatcaggaacaggctcaagtatgctctgaactaccgtgaggtcatttctatcctgatgcaacgccatgtacttgttgatggcaaggtcaccactgacaagacctccc

SEQ ID NO: 48021 - DNA, 291 bp, Zea mays
gaataatactgcttctgatattcttcatcgaatggcatcagtatttgagaggatgcatgcatctattgcatcaaattctgctataggaacaactttgcttcagggtgaagagaacattggccagtttctatacctcgagggcatcgagtattatatgtggaacacatatgatgttcatttttatgcatcattttcactgatcatgttgtttccaaagcttcaactcagcgtccagagagactttgctgctgctgttatgatgcatgatcctgaaaagctgaggatcttgca

SEQ ID NO: 48022 - DNA, 298 bp, Zea mays
aggggcggaagaagagagagaagacgtctctctcctctcggcgtccccgttccccaacctctcgtctgctgcctgcctgcctgcctgcctgcaaaaaggagttagtcattgcgtctaagcgcatcctcaaggagctgaaggacctgcagaaagacccccccacatcatgcagtgcaggtcctgctggtgaggacatgtttcattggcaagcaacaattatgggaccacctgacagtccctatgctggtggtgttttcttagtgaacattcatttcccgccagattaccccttcaaacc

SEQ ID NO: 48023 - DNA, 292 bp, Zea mays
cacaagcgcactctagcaatggcttctgaggttgtccgccctagcgacgccgagctactaaaggcacaagccgacatatggcggctcagcctctcctacctcacgcccctgtcactgaggtgcgccgtggagcttggcatccccacggcgatctaccgccatggcggggctgcctcagccgctgagctggtcacggcgctgtctctcccctccactaagctgccgttcctccgccgcctgctagggctcctcgccgcgtcgggcgtgttcaccgtcgacaagcagagcacgg

SEQ ID NO: 48024 - DNA, 283 bp, Zea mays
gtaatctaacgagttcatttctactcaaggaccacttgccaatacaattgaggatttttggcagatggtatatgagaaccactgtcctgtgattgttatgctcaccaaatttgatggtcttaagtgtgatgagtatctaccattgagcaagggacaggctgtttttggaaaatttaccattaagatcacaaagttcaggaaagatggtcagttattgttgcgtggtgtggagattcgacaggatgaggtgaatatatataagtcagatgaagtgcgatctctt

SEQ ID NO: 48025 - DNA, 288 bp, Zea mays
aacaagatggcgtgcacaaacaatgcgatgagagccttgttcctcctggtcctcttctgcatcgtgcatggtgagaaggaagagtcaaagggcatcgatgcgacagcgtccgggcctagtgggtccttcgacatcaccaagttgggcgcctccggcaatggcaagacagacagcacgaaggctgtgcaggaggcatgggcatcggcgtgcggcggcactgggaagcagacaatcctcatacccaagggtgacttccttgtcggacaactcaacttcacaggcacttgc

SEQ ID NO: 48026 - DNA, 280 bp, Zea mays
ggctcgaggagcgacatttcgaataacacacttgagcgcgacgataggatccctcgctaataacatacatggtcgtgggtgtcgtccttgcagcgctcgtcgccggcgggtcatgcgggcccccgaaggtgccgcccggtcccaacatcaccaccaactacaacggcaagtggctcaccgccagggccacctggtacggtcagcccaacggtgccggcgctcctgacaacggcggtgcgtgcgggatcaagaacgtgaacctgccaccctacagcggcat

SEQ ID NO: 48027 - DNA, 287 bp, Zea mays
ctccactttccacattccagttccactccgcctccgctgccggtcgccgactccgaaactccgacagtccgaccacaaggtcttgtgcgggatccacagaaggatgagtgaagaggataagactgctgcttctgctgagcagccgaagagggcccctaagctcaatgaaaggatcctctcttctctgtccaggaggtccgtagctgctcatccatggcatgatcttgagatcggtcctgatgctcctgctgttttcaatgttgttgttgagatcacaaagggaagca

SEQ ID NO: 48028 - DNA, 287 bp, Zea mays
gccacgggtggtgatcatgctcgtcaaggccggcgacacagttgtgcagaccatcgcgacgctcgcagctcacttggagcagggcgactgcgtcatcgatggggggaacgagtggtacgagaacacggagaggagggagaaggccatggaggagcgcggcctcctgtatcttggcatgggtgtctctggaggagaggagggtgcccgcaacggcccgtccttgatgcccggaggctcgttcgaggcttacaagtacgtcgaagacattgtcctcaaggtggctgctc

SEQ ID NO: 48029 - DNA, 283 bp, Zea mays
atggcgtgcacagacaatgcgatgagagccttgttcctcctggtcctcttctgcatcgtgcatggtgagaaggaagagtcaaagggcatcgatgcgaaagcgtccgggcctggtgggtccttcgacatcaccaagttgggcgcctccggcaatggcaagacagacagcacgaaggctgtgcaggaggcatgggcatcagcgtgcggcggcactgggaagcagacaatcctcatacccaagggcgacttccttgtcggacaactcaacttcacaggcgcttgca

SEQ ID NO: 48030 - DNA, 281 bp, Zea mays
caaacacaagtcgtcgtaggcagcgagcctctctgctctcccacgcatcgcgccaaggaagagagagagatcgccgctccccttctcggcgtcggtggtgcgggtgccctccctcctcgagcgagatctgtctggtcacagatctatctgacaaaatggttcagatctgctgcatcggtgctggctatgtcggtggcccaaccatggccgtcattgccctcaagtgcccagacattgaggtcgtcgtcgttgacatctccaagccccgcattgaggcctgg

SEQ ID NO: 48031 - DNA, 131 bp, Zea mays
caagcaggttactttccacaggaagaagaatctgcagtactatgaactgtctgcgcagcgcatctacaacgtcgacagaggtttcctggaccttgcgaggaagctggatggcgaaccgaaccatgacattg

SEQ ID NO: 48032 - DNA, 272 bp, Zea mays
cggctcgagagcatcgatcacgacaagatggcgtgcacagacaatgcgatgagagccttgttcctcctggtcctcttctgcatcgtgcatggtgagaaggaagagtcaaagggcatcgatgcgaaagcgtccgggcctggtgggtccttcgacatcaccaagttgggcgcctccggcaatggcaagacagacagcacgaaggctgtgcaggaggcatgggcatcggcgtgcggcggcactgggaagcagacatcctcatacccataggcgat

SEQ ID NO: 48033 - DNA, 280 bp, Zea mays
tagggaaccgtgttgttctatttggtggggaaggtgttaacatgcagccgatgaatgacacgtttgtattggatttaaacgctagccatccagagtggaggcatataaatgtgagcgcagtcctccaggtcgctggggccatactctgtcatgcttaaatggctcttggttggttgtttttggtggatgtggaaggcagggtctgcttaacgatgtattcatgttggatttggatgcagaacaaccaacctggcgtgagatgcctggagttgcaccccca

SEQ ID NO: 48034 - DNA, 170 bp, Zea mays
agcggaacacgggaacggcggaagcaaacaactagaaattccccagcccggttctttgcgtgcggttgatctcgtcggaggcccggccgcggttccccaatccgccatcgaattcgatggcggccaacgccgggaataagatccgcaacgccaagctggttcttcttgga

SEQ ID NO: 48035 - DNA, 266 bp, Zea mays
catcgatcacgacaagatggcgtgcacagacaatgcgatgagagccttgttcctcctggtcctcttctgcatcgtgcatggtgagaaggaagagtcaaagggcatcgatgcgaaagcatccgggcctggtgggtccttcgacatcaccaagttgggcgcctccggcaatggcaagacagacagcacgaaggctgtgcaggaggcatgggcatcggcgtgcggcggcactggcaagcagacaatcctactacccaacggcgacgtcc

SEQ ID NO: 48036 - DNA, 281 bp, Zea mays
cctgtggcacttgggctgtttgaatctgaaagtaaggatagttggaaatggttcatggagaagttgcagacagctataggatcaccccatggtctagtaatatccacagatgcaggaaaaggcatagacagtgcattaaccaatgccttcaacaatggtgttgagcaccgagaatgtgtgagacacctatttaagaattttcagaaaaggtttcatggtgaagtgtttgaaagaaacctttggccagcagcaagagcatataggaggacagtccatgataa

SEQ ID NO: 48037 - DNA, 292 bp, Zea mays
ttttattgtcagaacaaagccgcagagatgatttggtatctctaggctatgtgcttttgtattttctccgaggaagccttccttggcagggactaaaagccgcaacaaaggcacagaagtatgacaagatatgtgagaaaaagatatcgactcctatcgaggtcttatgcaaatcctgtccggtccagttttcatcttacttccattattgccattcattggcatttgatcagcgacctgactatgcatttgtgaagcgacttttccgtgacttgtttatcagccaagatta

SEQ ID NO: 48038 - DNA, 284 bp, Zea mays
gatgtactggaccttggtgccatcgcaaacccaatgttcaagctgaaggggcctacaatgctgcaaggcagctacagccctgcgtttcccctgaagcaccagcagaaggacatgaggttagcgcttgctctgggagatgagaacgccgtcgccatgcccgtctcagcagctgccaatgaggcgttcaagaaggcgaggagcctggggctgggagaccaggatttttcggcggtctatgaggttgtgaagggcgcgggtggttctggatctggccagccgtgata

SEQ ID NO: 48039 - DNA, 292 bp, Zea mays
agcagagattggtccgctacgatgctggcctggaggtctatgcttatcaagatccattggagatatcgatgtttggcgaatttattgtccctgttccatatgtgaagcaagtgaagttgtcaaatgctggaggaagacttattattgcttcagatggcatttgggatgcattatcctcagaagccgctgctaagtcttgcagaggtttgcctgctgagcttgccgcaaagcaagttgttaaggaggcactcaggacaagagggctaaaggatgatacaacttgcattgttgt

SEQ ID NO: 48040 - DNA, 293 bp, Zea mays
cgaaagatgactgtcgtgagcatcatgtggtcattagtgcaggtgcaggtgctggtggcggtggcactatcatttctagtaggcggtgcctggtgtggtcctcccaaggttcccccaggaaagaacatcacagccaactatggcagtgattggctagatgccaaggcaacatggtatggcaaccttacgggtccggcccccgacgatagtggcggatgtgggtacacagggacgtgaacaaggcccctttcaacagcatgggcgcatgtggcaacgtccccatcttcaaggat

SEQ ID NO: 48041 - DNA, 296 bp, Zea mays
gggtaacaaagttgatgtagaggcgcaccatgcctttaaagggaacatcccgtactttgagacgtctgctaaggatggaacgaacgtggaagatgccttccagtgtattgtaaagaatgctctgaagaatgaaccggaggaagatttgtaggtccaataccgtggatatgtggtaggtaccaaccgggctcagagatcatctggctgctgttaagacatgaggcatccacgaggcgtggtgatcatcatcggctatgcagtgaccaaacaatacctcaacattgctgggcctccat

SEQ ID NO: 48042 - DNA, 149 bp, Zea mays
cgacaagatggcatgcacaaacaatgcgatgagagccttgttcctcctggtcctcttctgcatcgtgcatggtgagaaggaagagtcaaagggcatcgatgcgaaagcgtccgggcctggtgggtccttcgacatcaccaagttgggcg

SEQ ID NO: 48043 - DNA, 296 bp, Zea mays
gacatgggataagctccagctcgcggcgagggttattgttgccattgagaacccgcaagacatcatcgtcccattcggcccgcccctacggccagcgtgctgtcctcaagttcgcgcagtacactggcgcccatgccatcgctgggaggcacacccctggtaccttcaccaatccgctcaagacttctttctcccgagcttgcctggttatcccttactgacccaaggactgaccatcagccaatcaaggagtctgctctggggaacatcccgaccattgccttctgcgacactga

SEQ ID NO: 48044 - DNA, 294 bp, Zea mays
caataaagcagctcctccgggggcggcgaactactcctcgtcgccaaaaccctagccctgcttctttgccatggcgagcagcgctagccaggcgagcctcctgctccagaagcagctcaaggatcttgcgaagaaccccgtggatgggttctccgccgggcttgtagacgacagcaacatcttcgagtggcaggtcaccatcatcggacgcctgacaccctatatgatggaggctacttcaatgcaataatgaccttcccccagaactatcccaacagcccgccatcagtaaga

SEQ ID NO: 48045 - DNA, 296 bp, Zea mays
aacagcagagcagaggtcaacaagacgagacaagagaatgcctgtgagcaggatcgccgtgggtgctccgggcgagctgtcccaccccgacaccgccaaggccgccgtcgccgagttcatctccatgctcatcttcgtcttcgccggctcaggatcgggcatggccttcagtaagctcacggacggcggcgccaccactcccgccggcctcatcgccgcgtctctggcgcacgccctcgccctcttcgtggccgtctccgtgggtgccaacatctccggcggccacgtgaaccctg

SEQ ID NO: 48046 - DNA, 295 bp, Zea mays
cgagaatggagccaggaagttctggatacatggaacgggagcattagggtgcatgcctcagaagctttctatgccgagggatgacgacagcgacctcgatgagcatggatgcatcgcaagcattaataatgtctgcaagaagttcaattccttgctaattgaagctttggacgagctgcgtttgcccctgaaaagttcgtctatcgcctttggtggatatgcgcgctatcaagtatgatcttgttgccaaccacacgatatatgggattgagaagccattgatgacatgttgtgg

SEQ ID NO: 48047 - DNA, 285 bp, Zea mays
ggagattcatatcgccgaagggtgttcttcaagtacgagaaaaggattaggacgcgcaccccccagagaagatctttgagtacttcgcatccgtccacagcccggaaggtgagatgcacatgttacctacggacctgatgagggcagttgttcccattttccccccatcggagtccaaaattgtcagggaagggagattgaggggggagcgccaccctggcgagctacaatgtgccccgtctgactttttcatgttattcgatacaatgctgatggagtcatctc

SEQ ID NO: 48048 - DNA, 236 bp, Zea mays
aaagcttttggttctgatgattttcggaagattcccaatggtgtaaatggtcttgaggaacggatgcatatcactttgggacagcatggccgagactggcaagatttctgtaaccgactatgtcagagtgacaagcacagaatgcgccaagaccttcaacatattccctcggaaaggagcaatcctggaaggatctgacgcagatatcataatcctgaaccctgaaaggagctttg

SEQ ID NO: 48049 - DNA, 290 bp, Zea mays
cctgccgtcgtctgctgcggactccgcctccagtttggtctgtttcttgcaagttgatcttgtggtagttcccactactgtcaccatgcagaacgaggagggtaagactgtggacctctatgtccccaggaagtgctcggccacaaacaggatcatcactgccaaggaccatgcctctgtccagatcaacattggccacttggatgcgaatggcctgtatgatggtcacttcacaacgtttgctctctctgggtttgaccgtgctcagggcgacgcagacagctccttgg

SEQ ID NO: 48050 - DNA, 291 bp, Zea mays
gctgcgtcatcagccccgtcgtcttctggatcttctacaaggcgtacgacatcgggatggaggaaggctacccggcgccgtacgccaagatctaccggggcatcgcgctgctaggcgtcaacggctggaaccagctgcccaagtactgcctccgcttctgcctcgccttcttcctgctcgccgtcgccatctgcgcgctcaaggaggtggccaaggcgcggcggtggtgggtgcaggactacatcccgagcgcgctgggaatggcggtgcccttcttcctcggctcgttct

SEQ ID NO: 48051 - DNA, 256 bp, Zea mays
gccacagctgcgtacctcgtcgcgctggtcctcgtggccacggccatagccgccgctcccggcgttgggtttgtcgtcaccggccgcatctactgcgacaactgccgcgccgggttcgagacaaacgtgtcccacgccatccaaggcgcgacggtggagatggagtgccgccacttcgagtcgcagcaggtccacgacaaggcggaggcacggagcggcccggcggctggtacacgatggagatcagcggcgacca

SEQ ID NO: 48052 - DNA, 281 bp, Zea mays
caagcatcgatcacaataagatggcgtgtatagacaatgcaatgagagccttgttccttttagcgctcttctgtgtcgtgcatggtgagaaggcaaagtcaaaggacaacgatgcaaaagcgtccgggcccggtgggtccttcgacatcaccaagttgggcgcctccggcaatggcaagacggaaagcacgaaggctgtgcaggaggcgtgggcatcagcgtgcggcggcaccgggaagcagacgatcctcatccccaagggcgacttcctcgtcggacca

SEQ ID NO: 48053 - DNA, 292 bp, Zea mays
cgaggtagttattgccggtcttgatcgtgctgtgttgaacatgaagaagggcgaggttgctcttgtcacaatttcctcctgaatatgcatttggttcaactgagtcaaagcaggatcttgctgttgttccacctaacagcacagtaatatatgaagttgagcttatttcatttgtgaaggacaaggagtcgtgggacttgaacaatgaagagaagattgaggctgctggtaagaagaaagaggaagggaatgcattgttcaaatcgggcaaatatgctagagcttccaagcg

SEQ ID NO: 48054 - DNA, 285 bp, Zea mays
ttagcaatgagctctcctctcaagctgacattggttcaccacagtaccacgctgtaatgagattgttggcagcgagtcagctgatcaatcaggcagtaggtgatgctctgagtggtttgctttaagtagaggcaatttaacagttaaaggaagggcaattcaagaatggtgtggactatatagtgatttgcccagtagacaactgaaagtgaaagttaaagatcgaagtgtggattgtcacaacagatgcagagacaaaagttagccaaccttctagtttgcaag

SEQ ID NO: 48055 - DNA, 290 bp, Zea mays
gcatcgatcacgacaagatggcgtgcacagacaatgcgatgagtgccccgttcctcctggtcctcttctgcatcgtgcatggtgagaaggaagagtcaaagggcatcgatgcgaaagcgtccgggcctggtgggtccttcgacatcaccaagttgggcgcctccggcaatggcaagacagacagcacgaaggctgtgcaggaggcatgggcatcggcgtgcggcggcactgggaagcagacaatcctcatacccaagggcgacttccttgtcggacaactcaacttcaca

SEQ ID NO: 48056 - DNA, 297 bp, Zea mays
aagatggcgtgtatagacaatgcaatgagagccttgttccttttagcgctcttctgtgtcgtgcatggtgagaaggccaactccaaaggacaacgatgcaaaagcgtccgggcccggtgggtccttcgacatcaccaagttgggcgcctccggcaatggcaagacggatagcacgaaggctgtgcaggaggcgtgggcatcagcgtgcggcggcaccgggaagcagacgatcctcatccccaagggcgacttcctcgtcggaccactcaacttcacacgcccatgcaagggcgacgt

SEQ ID NO: 48057 - DNA, 285 bp, Zea mays
cagcggcatttcgaataacacaggtgagcgcgacgatgggatccctcgttaataacatcatggtcgtgggctgccgtccttgcggcgctcgtcgccggcgggtcgtgcgggcccccgaaggtgccacctggccccaacatcaccaccaactacaacggcaagtggctcaccgctagggccacctcctacggtcagcccaacggtgccggcgatcctgacaacggcggtgcgtgcgggatcaagaacgtgaacctgccactctacagcggcatgacggcgtgcggc

SEQ ID NO: 48058 - DNA, 262 bp, Zea mays
gtcatctcctcctcctcagaaacccaccaaccccgtccagccgcccgctgtctcggccgtcgccgccgccgccgccgccctatcccggtccttcaggggacgcaggttggccatggccttcaacaagatcaaggtcgccaaccccatcgtcgagatggacggcgatgagatgaccagggtgttctggaaatctatcaaggacaagcttatattccctttcgtagacctcgacatcaaatattttgacctcgggcttccacac

SEQ ID NO: 48059 - DNA, 293 bp, Zea mays
cgagcctctctcctcttcctctcccacgcaccgcgccaaggaaggcagagagagatcgccgctcctcttctctccgtcggtggtgcggttgaccgccctcctcgagcgagatctcgctgcagtccctcgagatctggtcacagatctatccgacaagatggtgaagatctgctgcatcggtgctggctatgtcggtggcccaaccatggcggtcattgccctcaagtgcccagacattgaggttgtcgttgttgacatctccaagccccgcattgaggcatggaacagggacc

SEQ ID NO: 48060 - DNA, 287 bp, Zea mays
atcgaggagaaggcaagcaggcagagaaagagagagagagagatagatggatgaggagtacgacgtgatcacgttggggacggggctcaaggagtgcatcatcagcggcctcctctccgtcgatggcctcaaggtccttcacatggacaggaatgactactacggaggagaatcttcgtccctgaatctaaccaagctctggaacaggttcaagggcaacgacagccctcccgagcacctgggcgtcacaaagagtacaacgtcgacatggtgcccaagttcatgat

SEQ ID NO: 48061 - DNA, 284 bp, Zea mays
gaagattaggccaggggtcaagctgttcctgtatgattttgacttgaagcttctgtatggcgtgtacaaggcagcatcacatggtgggctgaaccttgtccatgaagcatttaatgggaagttccctgcacaggttaagtttaagattgctaaagattgccgtcctctccctgagagtagtctcaagcaagccatcaaggaaaattacaatgcaaagagcaaatttgatccagagctcaccacaaaacaagtccaaaggttacttttgctgtttaagcctgtta

SEQ ID NO: 48062 - DNA, 287 bp, Zea mays
gtcaagcaacgtcaccttcgacaacctgagagaccgctaccacacgcaatgcgaccccaggctgaacgcgtcccagtccctggagctcgccttcatactcgccgagaagcttaggaagcggaggatgcggcggtcgtcggtggcgtctgggctcggcggcagcatcttgcccttgccgccctttggcttttgatgtcttgcacgctggctgtgtgcatgcagggtgcagtgcaggggtgtggtaggagaatcttacgttgtcgtttgccttgctatgtagtatgtaa

SEQ ID NO: 48063 - DNA, 263 bp, Zea mays
gtcatctcctcctcctcagaaacccaccaaccccgtccagccgccggctgtctcggccgtcgccgccgccgacgccgccctatcccggtccttcaggtgatacaggttggccatggccttcaacaagatcaaggtcgccaaccccatcgtcgagatggacggcgatgagatgaccagggtgttctggaatctatcaaggacaagcttatattccctttcgtagacctcgacatcaaatattttgacctcgggcttccacacaa

SEQ ID NO: 48064 - DNA, 294 bp, Zea mays
cgagcctctctcctcttcctctcccacgcaccgcgccaaggaaggcagagagagatcgccgcccctcttctctccgtcggtagtgcggttgaccgccctcctcgagcgagatctcgctgcagtccctcgagatctggtcacagatctatccgacaagatggtgaagatctgctgcatcggtgctggctatgtcggtggcccaaccatggcggtcattgccctcaagtgcccagacattgaggttgtcgttgttgacatctccaagccccgcattgaggcatggaacagcgacac

SEQ ID NO: 48065 - DNA, 286 bp, Zea mays
ctcgaagagaaggcaagcaggcagagaaagagagagagagatatagatggatgaagagtacgacgtgatcgtgttgagggacggggctcaaggagtgcatcatcagcggcctcctctccgtcgatggactcaaggtccttcacatggacaggaatgactactacggaggagaatcttcgtccctgaatctaaccaagctctggaacaggttcaagggcaacgacagccctcccgagcacctgggcgtcacaaagaggacaacgtcgacatggtgcccaagttcatg

SEQ ID NO: 48066 - DNA, 214 bp, Zea mays
gtggtgagtccgcctttcgtttttctgcagcaggtcaaggggctgctgcggctggacttcgccgtcgcagcgcagaactgctgggtgcgcaagggcggcgccttcaccggcgagatcagtgctgagatgctggtaaacctgcaggtgccctgggtcattttgggacattctgagcgcagagctctgttgggtgaatccagtgattttgttgctg

SEQ ID NO: 48067 - DNA, 176 bp, Zea mays
actggagctgtcatccgtggcaagaagggatccgggggcatcactgtgaagagaacagggcagtcactcatcattggcatctacgacgagcccatgactcccgggcagtgcaacctggtggtggaaaggctgggcgactacctgctcgaacaggggatgtaatgacaaccccttcc

SEQ ID NO: 48068 - DNA, 177 bp, Zea mays
aaacctatgatgagatcaaggctaccctctgcctcgactttgaccgcagccttgatctcatcataggtggcagacttctcaagcctaacagtcagagggtagcctcaagggcaaactgggttatgtcgaggaggaccttgtttccaccgatttccagggtgacagcaggtctagcat

SEQ ID NO: 48069 - DNA, 264 bp, Zea mays
atagagctcaacaccatttcagcatcatttcctgggcttggttccttagttagtgatcttcacaggtccttaattaaacaatatgggacttctttaagtctagaacacaagagggttcctgcaaatgcggctagcactcaattttctgaagcattggcccaagcatggtctgagtttaatattgacagtgctgtaattatgatgattgttcagccagaagagagaaatatgtatgatcaatactggctttccaaacatttgcaa

SEQ ID NO: 48070 - DNA, 217 bp, Zea mays
tgtcagataacagtgggatcgagttgtttcactgcacgagcacatcctccggcgactaccggcctccctctccgtcctctagcgaccgaccaacgcgtcgagcgaagatgtcgtggcagacgtacgtggacgagcacctgatgtgcgagatcgagggccaccacctcacgtcggcggccatcgtcggccacgacggcgccacctgggctcagagcac

SEQ ID NO: 48071 - DNA, 206 bp, Zea mays
  unsure (1)..(206): unsure at all n locations
gtctttaggaatgatgttgcagcagcagcgaagaagaagaaggcagaaggcgaggcgccacgantgcgggtgctaggaacaaaggcaaccttctacaactgcacaattgaaggtggacaaggcgccctgtatgaccagatggggctgcactacttcaagtcctgcaccatcaggggaaccatcgacttcatctttggctctgccaa

SEQ ID NO: 48072 - DNA, 247 bp, Zea mays
tcgaggagacgctcaagcgcctcgtctcgcagctcggcaagtcgcgggaggaggtcttcgacgcgctcaagagccagaccgtcgacctcgtcttcaccttccaccctacacagtccgtgaggaggtctcttctccagaagcacggcaggatccgtaactgcctgcgagactctatgccaaggacatcactgctgacgacaagcaggagcttgatgaggcacttcagagggagattcaagctgctttt

SEQ ID NO: 48073 - DNA, 291 bp, Zea mays
ctgcaagcagcgagtacatacatactaggcagccaggcagccatggcgcccaccgtgatgatggcctcgtcggccaccgccgtcgctccgttccaggggctcaagtccaccgccagcctccccatcgcccgccgctcctccagaagcctcggcaacgtcagcaacggcggaaggatccggtgcatgcaggtgtggccggcctacggcaacaagaagttcgagacgctgtcgtacctgccgccgccgtcgacggacgacctgctgaagcaggtggactacctgctgcgcaac

SEQ ID NO: 48074 - DNA, 224 bp, Zea mays
cgcgcctctacatttcttctctctctgctcctccgcctccgcctccgcctgatccatccaagacagggatcgccatgtcggactcggaggagcaccacttcgaatcgaaggccgacgctggggcgtccaagacctacccgcagcaggctggcaccgtccgtaagaacggcttcatcgtcatcaagaaccgtccctgcaaggatgtggaggtttctacctccaag

SEQ ID NO: 48075 - DNA, 228 bp, Zea mays
caacatcattcccagcagcactggagctgctaaggctgttggcaaagtgcttcctgtccttaacggaaagttgactggactgtctttccgtgtcccaaccgtcgatgtttctgttgttgatttgactgttaggcttgagaagtcagcaacctatgatgagatcaaggctgcggtcaaggccgaggcagaaggtagcctcaagggcatcctgggttacgttgaggagga

SEQ ID NO: 48076 - DNA, 283 bp, Zea mays
gaccttgttagcaagagcattgctgtccagactgagattggaggagtggctattagaataggtgggatggctaaaggttctggaatgattcacccaaatatggcaacaatgcttggtgttttgaccacagatgctcaagtcagcagtgatgtctggagagaaatgatccggatgtcagtgagtagaagtttcaaccaaattacagtggatggtgatactagtaccaatgactgtgttattgctatggcaagtgggttgtctggtttatctggaattcaaagtc

SEQ ID NO: 48077 - DNA, 217 bp, Zea mays
aggctgataacccactttatggatcttcactgattgattatgcccatattgagcaatggattgactttgctgcaacagagattgatgcaaacattggaaagtggttgtacccacggatggggttttatccccatgctggtgtggtagaagaatcaactattgctgccttgaagagagcattgggttctctgagcacccatcttgcatcaaacacatt

SEQ ID NO: 48078 - DNA, 284 bp, Zea mays
agaggaagtccccgagctccaggacatgggtggcccagtcgaaggtggtttcagcgttgcgttcgaccccctcgacggctccagcattgtcgacaccaacttcaccgtgggaaccatcttcggagtctggcccggcgacaagctgaccggagtgaccggcggcgaccaggtcgctgccgcgatgggcatctacggccctcgcacgacctacattgtcgccctcaaggattgccctgggacgcacgagttcctcctcctcgacgaaggtaaatggcagcatgtga

SEQ ID NO: 48079 - DNA, 240 bp, Zea mays
ctcgagcgctttccttgctccgtctcgtcgttgtcttcccttttttttttcatcagccacctctctccctcgctagagcaaaaaccttgccacgaatcgccgacactccaacccggaagaggcaacgaggtgactccgcgcctcggtcatgggtgacagccaatactccttctcgcttaccactttcagcccgtcgggaaagcttgtgcagatagagcacgcgctcacggctgtcggatc

SEQ ID NO: 48080 - DNA, 244 bp, Zea mays
caagcaggcagagtctgcacctcctattccgaaaaaggctgctccttctaaggagccaaaggcaaaggatgtcaagaaggaggctccaaaggaggcccccaagccaaaggtggttgaggcaccagcagaagaggaagcaccaaagccaaagccaaagaatcctcttgacttgctgccaccaagcaagatggtccttgatgactggaagaggctatactcaaacacaaagactaacttccgggag

SEQ ID NO: 48081 - DNA, 206 bp, Zea mays
agcccaggatcctgggtgatttcacagctttcgccgacttctgcttcaagacgtacggcgaccgggtgaagaactggttcaccatcaacgagccgaggatgatggcccagcatggctacggcgacggcttcttcccccccgccagatgcaccggctgccagttcggcggcaactccgccaccgagccgtacatcgccggccaccac

SEQ ID NO: 48082 - DNA, 209 bp, Zea mays
cttctctccttttgctcggaacgcacacaccgcccgtccccgatctccgatcccctcgtcgatccaaagatgcagatcttcgtcaagaccctcactggaaagactatcaccctcgaggtggagtcttctgacaccattgacaacgtcaaggccaagatccaggacaaggagggcatccccccggaccagcagcggctcatctttgctgg

SEQ ID NO: 48083 - DNA, 145 bp, Zea mays
tcgcagtctagaactattccagatgtgggctggcttctcctccccctcttaccaagtcctcctcgggttagggttccttagggttttgtggaggggcgatggcggcggctgatgtggagtaccgttgcttcgtcggcgggcttgc

SEQ ID NO: 48084 - DNA, 294 bp, Zea mays
atcgccttcaggaaggcaggagaggaggccaagggagccgcattggccagcgacgccttctttccctttgcctggaatgatgccgtcgaggaggcgtgccagaacggcatcggcatcatcgcccagccaggaggcagtaagaaggacgaggacgccgtcgcgtgctgcaacaagtatggtgtgtcgctcgtcctcaccggcgtcaggcacttcaagcattagccgtcatgccccatggctggtcatcttagcttagggagtcacggaaaaaaaaacaagcttcgaaggctgcag

SEQ ID NO: 48085 - DNA, 308 bp, Zea mays
ccaagatccaggacaaggagggcatccctccagaccagcagcggctcatttttgccggcaagcagctcgaggacgggcgcacgctggccgactacaacattcagaaggagagcaccctccacttggtgctgcgtctcaggggcggcatgcagatcttcgtgaagactctgaccggcaagactatcacccttgatacccgagtcttctgataccattgataatgtcaaggccaagatccaggacaaggagggcatccctccggaccagcagcggctcatttttgccggcaagcagctcgaggacgggcg

SEQ ID NO: 48086 - DNA, 308 bp, Zea mays
ctgtgattggtatcgatctcggaaccacctactcctgtgtgggtgtgtacaagaacggtcatgtcgagatcatcgccaatgaccagggtaaccgtatcacaccctcatgggttgccttcaccgatagcgagaggctcatcggtgaggctgccaagaaccaggcggctgtcaaccctgagaggaccatctttgacgtcaagcgtctcatcggaagaaagtttcaggataaggaagtccagagggacatgaaacttgtcccctacaagattattaacaaggatggcaagccatacattcaggtcaagatc

SEQ ID NO: 48087 - DNA, 217 bp, Zea mays
gaatataataaagcacgagcacgcatcttcaatggttctgtttctgcagattctgatgctgcaagtgttttgggaactctttgcactggcagagatgagtcagtaaatgttgaaccttctgttgatgaaatcaaagtcagcacgatgaacaaccgttccagagttgctgttttcaaggatactcaaaaggatcgcagtgacccagattatgatcgaa

SEQ ID NO: 48088 - DNA, 305 bp, Zea mays
  unsure (1)..(305): unsure at all n locations
ctggcaccgcacagcagcggcggcgtnatgcggggtcgactcctctggccgggctgacgcatgcgtgaccaggcgcgggtccggggtcacctcctgcatgctggactgctaccagccgctggtcgacctggaccccgtggagctgcccgtctgcctcctcaagtgcaccaacgacgccatggtctgcgccaccggctgccccgtcaccgggaacgtctagctagcttgctatagctagcccatcattatatatatatacttactcatcttaattattaaccccgccatttatttatttaactagc

SEQ ID NO: 48089 - DNA, 210 bp, Zea mays
cttgaggacttcaaatatgaggagaactccaaaaaagcagtacaatgcttgaacaatatggtgactgatgcactgattcatgctgaagagtgccttcagtacatgtcagccttgaaggatcatgccattttccgtttttgtgcaataccccagataatggcaattggaacatgtgctctttgctacaataacgtgcatgtctttagaggg

SEQ ID NO: 48090 - DNA, 297 bp, Zea mays
cgagtcgtcaccttacgctgctatgcttgctgctcaagatgtcgcacagcgctgcaaggagcttggcattactgcactgcacattaagcttcgtgccaccggaggcaacaagaccaagacccctggacctggtgcccagtctgccctcagggcgcttgctcgttccgggatgaaaatcggacgcattgaggacgttaccccggtccccacggacagcactcgcagaaagggcggtaggaggggaaggaggctgtaggcgtctcttctgcgtgccatttgctggctcttgtcgggtgg

SEQ ID NO: 48091 - DNA, 231 bp, Zea mays
atcacgacaagatggcgtgtacaaacaatgcgatgagagccttgttcctcctggtcctcttctgcatcgtgcatggtgagaaggaagagtcaaagggcatcgatgcgaaagcgtccggacctggtgggtccttcgacatcaccaagttgggcgcctccggcaatggcaagacttccagcacgaaggctgtgcaggaggcatgggcatcggcgtgcggcggcactgggaagc

SEQ ID NO: 48092 - DNA, 254 bp, Zea mays
gcggcacacttcctttgcggctgttgctgtaatacctattcttggggataccactagccggtaccagatcaaagattctgatcttaggatagaacgtttccgatctggtggccctggtggtcagcatgccaacactacagagagtgccattcgaattgtgcacattccgactggtataagtgcaacatctcaaaatgaaagatcacagcacatgaacaaggcatcagcaatggcagtgctccaatctcgtcttg

SEQ ID NO: 48093 - DNA, 300 bp, Zea mays
acaacagccagctcgcgaaaataatgaagagccgcagcatggcatcatcggccgcgctcttggtgctagccctcgcgctagtggcggccaccgccccacaggtagcggaggcaaagaagaagagagcggcggagagcggcgaggcggcggaggcgaagaagatccaggacgacttctgctcgacgctgtgcgagggcaagaaggggacggacctggtcgtgtgcaaggagtcctgcgcgctctcccagcagtccaacctggtgctgtacggcaggatccagtgcaagggcaagtgcaccg

SEQ ID NO: 48094 - DNA, 294 bp, Zea mays
ctcctcgcctttccccacatctcatcttcgtctgtgttcttgcgcgtacgcgtactcagccccgatccgaatcgtcctcctcgcgagcctcgccgatcccccactcccctcccctcgcttcaagatgcagatctttgtgaagaccctcaccggcaagactatcaccctcgaggtggagtcttcttctcccattgacaatgtcaaggctaagatccaggacaaggagggcatccctcctgaccagcagcgccttatcttcgccggcaagcagcttgaggacggccgcacacttgc

SEQ ID NO: 48095 - DNA, 302 bp, Zea mays
tagctgggagcacgtcatctccaagagcagcgacgacgtctcctacaaggcctggtgcgacaaccccacggctggccctcctaaatatctgagtattacaacatacgagaactgctcggcagagcagctgagggacttctacatggataatgagtacagaatggagtgggataacactgtcaaaaaacatgagcagctgcagtatgacgagaacagtggggtggaggtagggcgaacaattaagaagtttccacttctaacaccaagagagtacatattggcatggcgagtctgggaagcaa

SEQ ID NO: 48096 - DNA, 289 bp, Zea mays
ctctctcgtggagacgactgggccgccgtcgttgctgccctacgcggctacacccacgtcttcttcgggcccttagccgcgacgagcgccaccagggagtagaagaggttaaccttctggttggaaacgatgtacttcgaaggctatggcttccgtggaagtactttcgagcagacatatcgctgctatcctgcgtctttcatcgacaagccacaacttgaggccggtgacaaaattataatgccaccatcagctctggatcgtcttgcatctctgcatattgaatacc

SEQ ID NO: 48097 - DNA, 233 bp, Zea mays
atggtctggtgccaattgttgagcctgagatccttgttgatggccctcatgacattgatcgctgcgcttacgtcactgagaccgtccttgctgcctgctacaaggcgctcaacgagcaccatgtcctcctggagggtaccctcctgaagcccaacatggtgactccaggctccgactccaagaaggtgacccctgaggtgattgctgagtacaccgtccgtaccctccagagg

SEQ ID NO: 48098 - DNA, 244 bp, Zea mays
ggaaggaaccttccagaagcgcaagactctaaaggccgtcgccttcccattcttcctcgccgcgggggtcgcctgagatcacataaacaatggtgaaggctgttgctgtgcttggtagcagcgatggtgtcaagggcaccatctttttcacccaagagggagatggccctaccgctgtcaccggaagtgtctctggcctcaagcctggcctccatgggttccatgtacatgcacttggtgacac

SEQ ID NO: 48099 - DNA, 212 bp, Zea mays
tggggacgccttcttcggcgcactgggaggccaggacgacgccaccgccgaggaggacgagcaggagatgcgggaggcgttcaaggtcttcgacgtcgatggcgacggcttcatctccgccgctgagctgcaggaggtgctcaagaagctcgggctccccgaggccagcagcatggccaacgtccgggagatgatctgcaacgtcgaccgcg

SEQ ID NO: 48100 - DNA, 251 bp, Zea mays
gcagcgcgaagcagagatccaatggcggcggcggaggggcagtgggtgctcatggcaacggggcggacgccgactaacattgcggtgatcaagtactgggggaagcgggacgaggcgctcatcctccccatcaacgacagcatcagcgtatcgctcgaccctgaccatctctccgccaccaccactgtcgccgtcagcccctcattcccttccgaccgcatgtggctcaatggtcaggagatctcgctatt

SEQ ID NO: 48101 - DNA, 227 bp, Zea mays
gtaatggctcttcaggttgagagtgaatttcaaaaggcttatgacaatggattgccaaagtcaaagttttgggagcctacttatgaagactgcttaaatttgattgctcggcttccaccagtggcttcttatgtttaccggagaattttcaagagtgggaaatcaatagaagccgataattctttggactatgcggcaaatttctcacacatgcttggttttgacga

SEQ ID NO: 48102 - DNA, 235 bp, Zea mays
ggaccttcggcgcccgttcaggatccacatcttcccgagcgagttcttggttgacctcttcctcttcggaccacctccaaggctcttggtgtagcttgccactctcaccaatcaagttttcatgtctgatctcgacattcagatcccaactgccttcgatgccttcgctgaggccaatgctggggactctggtgcggcacagggtcaaaggactacgtacacgtgcgcatccagc

SEQ ID NO: 48103 - DNA, 184 bp, Zea mays
atttcgaataacacaggtgagcgcgacgatgggatccctcgttcataacatcatggtcgtgggcgccgtccttgcggcgctcgtcgccggcgggtcgtgcgggcccccgaaggtgccacccggccccaacatcaccaccaactacaacggcaagtggctcaccgctagggccacctggtacggt

SEQ ID NO: 48104 - DNA, 240 bp, Zea mays
ctcccggcccccgcgaacaacttcctgcttgcacgcaagccactccgaggccaagtctagggtttgggaatctgtaggaggggagaggggagcgcgctcagggtcagggaggcgaagatgatcgaggtggtgctgaacgaccgcctggggaagaaggtgcgggtgaagtgcaacgaggacgacaccatcggcgacctcaagaagctggtggcggcgcagacggggacgcgccccgagaag

SEQ ID NO: 48105 - DNA, 225 bp, Zea mays
cgacaagatggcatgcacaaacaatgcgatgagagccttgttcctcctggtcctcttctgcatcgtgcatggtgagaaggaagagtcaaagggcatcgatgcgaaagcgtccgggcctggtgggtccttcgacatcaccaagttgggcgcctccggcaatggcaagacagacagcacgaaggctgtgcaggaggcatgggcatcggcgtgcggcggcactgggaa

SEQ ID NO: 48106 - DNA, 240 bp, Zea mays
cagagcagcatttcgagtaacacagttgagcacgacgatgggatccctcgctaataacatcatggtcgtgggcgccgtccttgcggcgcttgtcgtcggcgggtcgtgcgggcccccgaaggtgccgcccggccccaacatcaccaccaactacaacggcaagtggctcaccgccagggccacctggtacggtcagcccaacggtgccggcgctcctgacaacggcggtgcgtgcgggat

SEQ ID NO: 48107 - DNA, 208 bp, Zea mays
tcagcgatgagttcaagcgtgtgatcgggtctctccgcgggcatgatgacaagatacgcatagttctcaacaaggccgaccaagttgatgcacagcagctgatgatcatgtacggagcactgctgtggtcgctcgggaaagtcctgaacacaccagaagtcatgcgtgtctacataggttcattcaacgacaagccgatcagggagac

SEQ ID NO: 48108 - DNA, 110 bp, Zea mays
aagcagagcaagccagtgaggtctctcagagcgtagcagccagctacaatggcggggaacgcgctagccaactatgtccaggtctacgtcatgctcccgctggatgtcat

SEQ ID NO: 48109 - DNA, 228 bp, Zea mays
cctgcagtcatctcctccatcaccaccaccaagctcaatcaacagccagctcgcgaaaataatgaagagccgcagcatggcatcatcggccgcgctcttggtgctagccctcgcgctagtggcggccaccgccccacaggtagcggaggcaaagaagaagagagcggcggagagcggcgaggcggcggaggcgaagaagatccaggacgacttctgctcgacgctgtg

SEQ ID NO: 48110 - DNA, 238 bp, Zea mays
gtataattgggaataaatagttcgtgaatccctgaagcgtgcatatatatattcctgccaagataaaggtaatggagtcgtcacgcaggttccagccggccgtcatcctgcttctcctgctcattgtgtccaccgatatggcacaggcaagggaatgcgagaagtacagtgagcgatttgttggggcatgcatgatcgcagacaactgcgccaatgtgtgccgcggtgagggcttctt

SEQ ID NO: 48111 - DNA, 122 bp, Zea mays
cagctggacatcgacaacccgcagagcatccgcgcgctgcgtgactttctgcttcatgagtacggaggactgaacgtgctggtcaacaatgcgggcatcgccttcaaagttgttgaccccac

SEQ ID NO: 48112 - DNA, 168 bp, Zea mays
ggacaagattcgggaatatcattgcagactgttcttgaattaggctcaaccatcccaatttttggagtttgcatgggtctgcaatgcattggagacgcatttggaggaaagattatccgtgctccttctggagtgatgcatgggaaaagctctccagtttattacgat

SEQ ID NO: 48113 - DNA, 230 bp, Zea mays
gtagctcccctgcctcatgcccatcaaatcgttaaacttgttagatcggtaggcagagagaggccagactgatgggaatggcagcgaaggagcactttgtgcttgttcatggtgaagggcatggagcctggtgctggttcaagctccgctggctccttgagggcgctggctatcatgttacatgcatcgacctagccggaggcggcggcgatcctactgaccccaacaca

SEQ ID NO: 48114 - DNA, 185 bp, Zea mays
tgtgccacctccctacaaaacactggttaatgtttatggtggccccagtgtccagcttgttagtgattcatggatgtgtacagttgacatgagagctcaatatctacggagcaagggtatattagtttggaagatggataatcgaggatcggcaaggcgagggctgcattttgagggacaactga

SEQ ID NO: 48115 - DNA, 220 bp, Zea mays
actttgcaaggatgcttcttgagaatagccctcaagaggctcaagcaaggaaggctcgacaggtgctgcaagcttgtcaggataaggatgattctcaccaactgaagctatgatttagaaatccatttattgtttgcggtgctacatatgttccaatctaccgtggccaaaaggatatttcttgcccatactgtggatcccggtttgctccttccatcga

SEQ ID NO: 48116 - DNA, 225 bp, Zea mays
tcgacatcaccaagttgggcgcctccggcaatggcaagacagacagcacgaaggctgtgcaggaggcatgggcatcggcgtgcggcggcactgggaagcagacaatcctcatacccaagggcgacttccttgtcggacaactcaacttcacaggcccttgcaagggcgacgtgaccatccaggtggatggcaatctgctggcgaccacggacctaagccagtaca

SEQ ID NO: 48117 - DNA, 226 bp, Zea mays
gtcctcggacaccattgacaacgtcaaggccaacatgcaggacaaggagggcattccaccggaccagcagcgcctgatctttgctggcaagcagctggaggatggccgtaccctcgccgactacaacatccagaaggagagcaccctccacctggtgctccgcttgcgaggtggtatgcagatctttgtgaagaccttgactggcaagaccataaccctggaggtt

SEQ ID NO: 48118 - DNA, 235 bp, Zea mays
gttttcagagcagtccgatcggactcccagatgttcaagatctcagggttcacgctgtcgactgccatgccgttgtccgagacactccagcttctgcagctcggcaagatcccagcgaccgacttcgacgccctcatctgtggcagcggcagcgaggtgtactatcctggcacggcgaactgcatggacgctgaaggaaagctgcgcccagatcaggactatctgatgcacatca

SEQ ID NO: 48119 - DNA, 222 bp, Zea mays
ggagaaggtggctaagactgtagatgtggaagagctcactgttgaggagcgtaacctcttgtcggtcgcatacaagaatgtgattggggctcgccgtgcttcatggcgcattgtctcttctattgaacagaaggaggagtcccgtaagaacgaagagcatgtgaaccttatcaaggaataccgtgcgaagatcgaggctgaactgagcaatatctgtgatgg

SEQ ID NO: 48120 - DNA, 236 bp, Zea mays
aaggctggttactatgacatagggattggtgctggtttggaatccatgtccataaattccattgcttgggaaggacaagttaacccaaaaataagcgcattccagaaagcacaggattgtcttctgcccatgggaattacttctgaaaatgttgcccatcgatatggtgtaaccaggcaagagcaagatcaggccgccgctgagtctcataggagagctgctgcagccacggcctc

SEQ ID NO: 48121 - DNA, 221 bp, Zea mays
cagatccaagaagagggaagagcaccaaggaccttcggcgcccgttcaggatccacatcttcccgagcgagttcttggttgacctcttcccccttcggaccacctccaaggctcttggtgtagcttgccactctcaccaatcaagttttcatgtctgatctcgacattcagatcccaactgccttcgatcccttcgctgaggccaatgctggggactctgg

SEQ ID NO: 48122 - DNA, 228 bp, Zea mays
ccttcctccccaggacgtgatgaatgctctcctggaggctctctttggtggtgtgggtaagggattcaccttagacgttgtgaagaacaagaagtaccttgcagttgctgtgccagatgagggtgcccagacccttctggttcaggccattgaggcttttggtggtaaatgcaaccctgaggcgctgaaggaggttcccgttgtcctcaaagccctctacgatggaga

SEQ ID NO: 48123 - DNA, 180 bp, Zea mays
aaccccgtcatcgatctcgtttcaaatccatccatcctcgtttcctccgtcccgcagcatctcaaacccatggccaagatcaagatcgggatcaatgggttcggcaggatcggaaggctggtggccagggtggccctgcagagtgacgatgtcgacctcgtcgccgtgaacgacccttca

SEQ ID NO: 48124 - DNA, 293 bp, Zea mays
gtgacttccttgtcggacaactcaacttcataggcccttgcaaggtcgacgtgaccatccaggtggatggcaatactgtggcgagcacggatctaagacagtacaaggatcatggtaattggatcgagattctatgcgtggataacctggtgctcatcggtaagggaagacttgacgggacagggccagccgtgttgagaaagatctcctgcaccaagaagtacgactgcaagatccttcccaactcgctggtgatggacttcgtgaacaaatgggacgtgtccggggtcacg

SEQ ID NO: 48125 - DNA, 281 bp, Zea mays
atcacgacaagatggcgtgcacaaacaatgcgatgagagccttgttcctcctggtcctcttctgcatcgtgcatggtgagaaggaagagtcaaagggcatcgatgcgaaagcgtccgggcctggtgggtccttcgacatcaccaagttgggcgcctccggcaatggcaagacagacagcacgaaggctgtgcaggacgcatgggcatcggcgtgcggcggcactgggaagcagacaatcctcatacccaagggtgacttccttgtcggacaactcaacttc

SEQ ID NO: 48126 - DNA, 215 bp, Zea mays
tggcggcttcggaggcggcacggcggcggcaacaccggtgacgccgacagaggggacggtgatcgcgatccacagcctggaggagtggagcatccagatcgaggaggccaacagcgccaagaagctggtggtcattgacttcactgcaacatggtgtcctccgtgccgcgccatggctccagcttttgctgatatggccaacaagtgcacaaatg

SEQ ID NO: 48127 - DNA, 274 bp, Zea mays
acaaaaagatagtggtctaccatagagggcacatgttccctaattggcctagagcatagcggctcattatccttccacctctggtggcgggcggtactcgctgctctgtgaagccagcctcacgcaatgtccgccactttaggtgttaggatgcaaaggcattcgccaaggcacccgaaacccactacacaacttggaatgggtgctccacagtttgtagcactagacccaagcacatgcaccacaattgacatccacacttccttattgcccg

SEQ ID NO: 48128 - DNA, 170 bp, Zea mays
tcaccatccaatccaatcggcttccccttggtcaccatggcgacggcggtggaggttcccgtggaggcgccggtgaggacagtgaaggtcaccaatgtctctcttagtgcaactgtgcaagacattaaggagttcttttccttttccggagatattgatcatgtggagat

SEQ ID NO: 48129 - DNA, 284 bp, Zea mays
  unsure (1)..(284): unsure at all n locations
ggcaggaaacactgttcaagtaatttttgacagtggaagctcctatacgtacctcccaaatgaaatatatgaaaaccttgttgcagcaatcaaatatgcgtcacccggctttgtccaagagccatcagatcggacattacctttatgctggaaagctgatttccctgtgaggtatctggaagatgtcaaacagttcttcgagcccttgaactntcacttcgggaagaaatggcttttcatgtctaaaacattcactatttctcctgaggattactggattatta

SEQ ID NO: 48130 - DNA, 135 bp, Zea mays
gttctatgagaacaaagaaaacctttccaaattatgggatattctagccgtgtatgcatggattgacaaagatgttggatactgccaaggactgagtgatttgtgctcaccaatgatagttctactatacgatga

SEQ ID NO: 48131 - DNA, 128 bp, Zea mays
gggacatggatgacacccaaggtagttatcgacaaggcagttgatttcaagaaacctgtatatgaggacgcattgaaacactttgccccctacctgcagtcagatccagccgcttcatcatagacgat

SEQ ID NO: 48132 - DNA, 283 bp, Zea mays
cctcgagccgaatcggctcgagcaaggtcgacggcaaggagaggtacgccttcaacggcgtatcccacgtggacccggaaaaccccgtcaagctcgccgagtacttcaacgccagcgacggcgtgttcaagtacaacctcatcggggacgtgccgccctccaacacggcccccaccaagatggcacccaacgtcatcagcgccgagttccgcacgttcattgaggtggtcttcgagaaccccgagaagagcatcgacaccatccacatcgacggctacgcttc

SEQ ID NO: 48133 - DNA, 293 bp, Zea mays
ctaccaaatagctcttgcaatcaaaaaggaggttgaggatcttgaggctgctggtattcaggtgatccagatcgatgaggcagctctaagggagggtctgccactacgcaagtcagagcatgcattctacctggactgggctgtccactctttcaggatcaccaactgcggagtccaggacaccacccagatccacacccacatgtgctactccaacttcaacgacatcatccactccaccatcgacatggatgccgatgtgatcacgatcgagaactcccggtctgacgaga

SEQ ID NO: 48134 - DNA, 293 bp, Zea mays
atcacgacaagatggcgtgcacaaacagtgcgatgagagccttgttcctcctggtcctcttctgcatcgtgcatggtgagaaggaagagtcaaagggcatcgatgcgaaagcgtccgggcctggtgggaccttcgacatcaccaagttgggcgcctccggcaatggcaagacagacagcacgaaggctgtgcaggaggcatgggcatcggcgtgcggcggcactgggaagcagacaatcctcatacccaagggtgacttccttgtcggacaactcaacttcacaggcccttgc

SEQ ID NO: 48135 - DNA, 289 bp, Zea mays
cttaattgcgccactgctcgttatcctcctcttgcattgcattgcaggtcgtagttgagcagcagcaaccactgcacaggatgtcgtggcagacgtacgtcgatgagcacctcatgtgcgagatcgagggccaccacctgagctctgccgccatagtcggccacgacggcgccgtttgggcccagagcaccgcattcccacagttcaagccagaggagatgaccaacatcattaaggacttcgacgagcctgggtttctggccccgatcggcctcttccttggccccac

SEQ ID NO: 48136 - DNA, 146 bp, Zea mays
  unsure (1)..(146): unsure at all n locations
ccgactacccggccgtcgttctgcgcgtcttcacagcttacctcgatctcatgcgcacgctgcaggacacgtaccagctggagcctgcaggctcccatggcgtgtgggnggttgatgattaccatttcctgccgttcatatttggg

SEQ ID NO: 48137 - DNA, 166 bp, Zea mays
gcgccacgtcgccgagacgctcgaggtcgacctcgagtacgtctaccagcggattggctggccgctctaccgcaagtacggactcgccttcgaggccttcaagctcatcgttgcacgtccctgacgctatcctcgacgtactcacctatgaggaaaaggaggtcgg

SEQ ID NO: 48138 - DNA, 140 bp, Zea mays
gctcaacaacagccagctcgcgaaaataatgaagagccgcagcatggcatcatcggccgcgctcttggtgctagccctcgcgctagtggcggccaccgccccacaggtagcggaggcaaagaagaagagagcggcggaga

SEQ ID NO: 48139 - DNA, 282 bp, Zea mays
caggactcgtaatttgattgtgaggctgcgccataatgtcattcgaactggactgcgcaacatcagcatttcttactcaaggatctcccttgctgacattgctaagaagctaagactagactctgagaaccctattgctgatgcggagcgcattgtagccaaggccataagagatggcgccattgacgccaccatagatcatgccaattggctggatggtatccaaggaaactggtgatgtctactaaacaaatgagccacaaattgcattcaactccagga

SEQ ID NO: 48140 - DNA, 98 bp, Zea mays
aacgacacatcttggaattggctcctatgctgaatagtctgaggagaaacgccaggattggctgttgtctgaactgaggggcaaacgtccattgtttg

SEQ ID NO: 48141 - DNA, 239 bp, Zea mays
gacaactcaacttcacaggcccttgcaagggcgacgtgaccatccaggtggatggcaatctagtggcgaccacggacctaagccagtacaaggaccacggtaattggatcgaaattctacgcgtggataacctggtcatcaccggcaagggaaaccttgacgggcatggcccagctgtgtggagcacgaactcctgcaccatgaagtacgactgcaagatccttcccaatcgctgggga

SEQ ID NO: 48142 - DNA, 176 bp, Zea mays
accaacggcggcatgtaagatctcgctgtcggagctgacggcgtcgctacggacgctggggtccagctctgccgacgaggtgcagcgcatgatggccgagatcgacaccgacggcgacggctgcatctacttcagcgagtgtcatgaccttctgcaacgcaacccggggctcatgt

SEQ ID NO: 48143 - DNA, 181 bp, Zea mays
aggtaagcagcaatcgcaggaaccctagcgccgccgcacccgcaggaagtgggtatcgacctcgtcgccggtgggaggaataagaagaccaagcgcactgcgcccaagtctgacgatgtctacctcaagctcctcgtcaagctctaccgtttcttggtcaggagaccaagagcaatttcaa

SEQ ID NO: 48144 - DNA, 168 bp, Zea mays
atttggcacaaaatgcatttaccccatatgataagttctgcccattctacaaatccgtttggatgatgcgcaatattattcacttcaacacattggcaaatcaggctgtggagcgggcagctggtactgatggccaaaagataacatacggtgtcataaaacaccgtt

SEQ ID NO: 48145 - DNA, 167 bp, Zea mays
gatgacgcctgggcagtgcaacatggtggtggaaaggctgggcgactacctgcttgaacagggcatgtaactactacgtaccagctggaatgcatgtcgacgacgatagtttcgagtttcgacttccaataatagtaacaacaaagcaaaggccttcctcccggcgt

SEQ ID NO: 48146 - DNA, 177 bp, Zea mays
atcacaataagatggcgtgtatagacaatgcaatgagagccttgttccttttagcgctcttctgtgtcgtgcatggtgagaaggcaaagtcaaaggacaacgatgcaaaagcgtccgggcccggtgggtccttcgacatcaccaagttgggcgcctccggaatggcaagacggatag

SEQ ID NO: 48147 - DNA, 167 bp, Zea mays
gcggacgacggcgacatcgtgctgatggaaatccaggacaagttgtcggctgagtggaagcccatgaagctctcttggggcgccatctggaggatggacactgccaaggcgctcaagggccccttctccatccgcctcaccagcgagtccggcaagaaggtcatcgc

SEQ ID NO: 48148 - DNA, 175 bp, Zea mays
gggcaagaccgtcatgacccaggaagagcgatacgaatccctgcggcactgcaagtgggttgatgaggtcattcctgatgcaccgtgggttctcacacaggagtttattgataagcatcagattgactatgttgctcatgatgcgctgccttatgctgatactagcggaacagca

SEQ ID NO: 48149 - DNA, 174 bp, Zea mays
agcgccgcgcttgcgtttccttctcttcgcttccaagatgtcgaagcgacggcgtggaggttcggctggtaacaagttccggatgtcactgggtctaccagtggcagctactgtgaactgtgccgataacactggagccaagaacctgtacatcatttctgtgaagggaatcaa

SEQ ID NO: 48150 - DNA, 178 bp, Zea mays
cacaacatcaacaacaagacggccttcaccaaccgcaccgactacggcaagggcgagcgagaggcgcagtgggccacggcacagaggacgctgcacggcctcaaccaggccaccgccacctccgacctcttcggcgacaaccagggctaccgcgagctgtcggagctcgccgagcagg

SEQ ID NO: 48151 - DNA, 174 bp, Zea mays
gctgaaaatttgtctgaagatgaaattgcaggattgaaagagatgttcaaaatgctggacactgacaatagtgggcagatcacgttggaggaactaaaaattggtttgaagagagttggtgctaacttaaaggactcagaaattacaacactaatggaagcggcagatattgat

SEQ ID NO: 48152 - DNA, 179 bp, Zea mays
aggaagagtcaaagggcatcgatgcgaaagcctccgggcctggtgggtccttcgacatcaccaagttgggcgcctccggcaatggcaagacagacagcacgaaggctgtgcaggaggcatgggcatcggcgtgcggcggcactgggacgcagacaatcctcatacccaagggcgacttc

SEQ ID NO: 48153 - DNA, 181 bp, Zea mays
agcgggcagcagcacacagccccatcccaatcctagtcgatcttcttcccctcctcaaggaagataagaagctgaaccatggggaagagaaagtcagctgctaagccacctcctaagaagcggatggacaagcttgacactgtcttttcctgcccattctgcaaccacgggagtagtgttg

SEQ ID NO: 48154 - DNA, 183 bp, Zea mays
gcgtacctgtgtagtcaccggcaagtggtgccttgacgggcattgcccagccgtggagagcaagaactccgacaccagagattaagactgcatgatcgtgtccaactcgctggtgatggacgtcgtgaacaccggggatagatccgggatcacgctgctcaactccaagttcttccacagtac

SEQ ID NO: 48155 - DNA, 183 bp, Zea mays
agctcagcgaccaccaagcagagcaagccagtgaggtctctcagagcgtagccagccagctacaatggcggggaacgcgctagccaactatgtccaggtctacgtcatgctcccgctggatgtcatcactgtcgacaacacgttcgagaaggaggacgagacgagggcgcactgaagaagctg

SEQ ID NO: 48156 - DNA, 186 bp, Zea mays
ctcccggcgtcagacgcgcatctccagcaatggcggacgagaaacttgccaagctgcgcgaaccaccgccggcctcacgcagatcagcgagaacgagaagtccggcttcctcagcctcgtcggccgctacctcagcggcgacgaggagcacatcgagtgggccaagatccacacgcccaccgacga

SEQ ID NO: 48157 - DNA, 178 bp, Zea mays
caacaagatggcatgtatagacaatgcaatgagagccttgttccttctagcgctcttctgcaccgtgcatggtgagaaggcaaagtcaaaggacaacgattcaaaagcgtccgggcccggtgggtccttcgacatcaccaagttgggcgcctctggcaatggcaagacggatagcacg

SEQ ID NO: 48158 - DNA, 177 bp, Zea mays
ggtgtctgcgatcacctctctctctttctttcttctgaccataataagctactcccaggatggagtcactttgcgcaatttacaatagctcttattaataaagacccttcgtgatctaagtattctgatacactgcatcggttttggaagaaagagcatgattgggggtggaaaaag

SEQ ID NO: 48159 - DNA, 180 bp, Zea mays
ggagaaggagtgggtcgcccacgtggaccccggagtgctcatcaccttcctctcgctgccgcggggcggcaatgggctgaagcgcatccgattcagccgtgaaatgttcaacaaatggcaagcacaaagatggtggaccgaaaattacgagaaggtcatggagctttacaacgttcagaa

SEQ ID NO: 48160 - DNA, 170 bp, Zea mays
atttggagatgttgttccaactaagctggagcagccatttatattgaggacgccagatatgtcagccatgcatcatgactcttcgcatgacctcaaaactcttggatctaaactgaaggatatagttggggtcgcagatacttccctggaagtaagatacattactcgtc

SEQ ID NO: 48161 - DNA, 178 bp, Zea mays
ggcgcacttgcacacccttacttggcatcacttcatgacataagtgatgagccagtctgctcaatgcccttcagcttcgacttcgagcagcatgcattatctgaagaacagatgaaggatctgatctaccacgaggctcttgcattcaacccagattaccagtagccaaagttcggtt

SEQ ID NO: 48162 - DNA, 179 bp, Zea mays
cccctggctcaggcccgatgggaagacccaggtgacagtggagtaccgcaacgagggtggcgccatggttcccatccgtgtgcacacagtcctcatctctacccagcacgacgagacagtcaccaacgacgagattgctgctgacctgaaggagcacgtcatcaagccagtcatccccg

SEQ ID NO: 48163 - DNA, 181 bp, Zea mays
aaaggagggtacagatggtgaagaagaagccaggagagcgtacaaggctgctagggaggaatcagaccatgctgcagaggcagctgtgggagaaaaggtctcttcagctttgattgatagggttgatgctatgcttcaaaagttagaaaaggagattgatgatgttgatgctcgaattggc

SEQ ID NO: 48164 - DNA, 168 bp, Zea mays
ggtggttgtggtcaaccgttcagtggaaagggtggatgccatccgcgaggagatgaaaggtatcgagattgtgtacaggcctctttcagagatgtacgaagctgctgctgaagctgatgtcctattcacgagcactgcatctgaaaccccattgttcacaaaagagca

SEQ ID NO: 48165 - DNA, 177 bp, Zea mays
gccgaagagatgacttggaatctcttggatatgtactcatgtacttcctgaggggcagccttccttggcaaggtcttaaagcaggaacaacgaagcaaaagtatgagaaaattagcgagaagaaagttgcaacatcaattgaggctctatgccgtgggtatcctactgagtttgcat

SEQ ID NO: 48166 - DNA, 139 bp, Zea mays
agctagagcggccttcctcgccaggtgcaaggccaactccgaggctaccctcggcacctacaagggtgatgctgccgccgacaccgagagccttcacgtcaaggactacaagtactgagttgcttctctttgcgatccc

SEQ ID NO: 48167 - DNA, 285 bp, Zea mays
acgattggattgttgttaaacactattgctatcttctaccgatcattagcagctataccatttggcacaatggttgtcatgtttattctttgggctttcatctccttcccgttggttctattggggactgtagttggtagaaattggagtggtgctcccaacaacccgtgtcgtgtgaaaacgatcccgcgccttgattctgaaaagaagtggtaccttacaccttctgttatttcactgatgggtggacttctccccttcggcagcatcttcattgagatgtac

SEQ ID NO: 48168 - DNA, 282 bp, Zea mays
ggtacggtcagcccaacggtgccggcgctcctgacaacggcggtgcgtgcgggatcaagaacgtgaacctgccaccctacagcggcatgacggcgtgcggcaacgtccccatcttcaaggacggcaagggctgcggctcatgctacgaggtgagatgcaaggaaaaacctgagtgctcgggcaatccagtcacggtgtacatcactgacatgaactacgagcctatcgctccctaccacttcgacttgagcggcaaggccttcggctccctggcaaagcccg

SEQ ID NO: 48169 - DNA, 294 bp, Zea mays
gccgaaacaactcttacttagttcaagttctacacaacgaagtcccagtttcaatgcctgggtgcggcaacaaagatttctgtccgttcgaggagttcaaggagaaaattgtgaaaccgcacctgaagcacgactacaacatgatatgcaaggtcaaatccccagcggcaagcgaggagcctgcctcgtacgcctacagggtgtccagtttcttcctaggactcctctacgcaaaagggtaccgcggtgtgggcgccgcaggcgtcaagactgagctgtaggcgtcaagactag

SEQ ID NO: 48170 - DNA, 288 bp, Zea mays
caggacatatggtggtactggaattggattgagcatcagcaaatgtcttgttgaactaatgggtggtcagataaactttgtcagccgaccacatgttgggagtacgttcacatttactgcggttctcaaaagatgtgacagaagcgctattggtgacagtaagcctgttatgttgcatcctcttccatccagtttcaaaggtttatctgcactattggttgatagaagaccagtaagagctactgtaactaagtatcacttgcaaaggctggagattgcctgtgagtt

SEQ ID NO: 48171 - DNA, 288 bp, Zea mays
acttcctcatgccatcctgcgccttgaccttgctgggcgtgacctgactgacagcctgatgaagatcctcactgagagaggttactccttcaccacctctgctgaacgcgaaattgtaagagacatcaaggaaaagcttgcatatgtggctcttgaatacgaccaggagctcgagaatgccaagagcagctcatctgtggagaagagctacgagctgcctgatggtcaggtgatcaccattggggcagagaggttcagatgccctgaggtcctcttccagccttcctc

SEQ ID NO: 48172 - DNA, 291 bp, Zea mays
acacaccttctataacgaactccgtgttgcgactgaagagcaccctgtgctgctgaccgaagccccactcaacccaaaggctaacagggagaagatgacccaaatcatgtttgagactttcaatgttcctgccatgtatgtcgccatccaggctgtgctttccctgtacgccagtggacgtacaactggtattgtattggactctggtgatagtgtcagccacacagtgccaatctatgaaggttatgcccgtcctcatgccatcctgcgacttgaccttgctgggcgtga

SEQ ID NO: 48173 - DNA, 289 bp, Zea mays
aggtaagcagcaatcgcaggaaccctagcgccgccgcagccgcagaatgggtatccaactcgtcgccggtgggaggaataagaagaccaagcgcactgcgcccaagtctgacgatgtctacctcaagctcctcgtcaagctctaccgtttgctggtcaggaggaccaagagcaatttcaacgctgtcattctcaagaagcttttcatgagtaaaaccaaccgaccaccaatctccaggcgcgccttgtgcagtttaatggaggaaaggagaagaacattgctgtcattg

SEQ ID NO: 48174 - DNA, 292 bp, Zea mays
aggttcaaagcttgtcggatgtggatcagccatcccaacacttggcgtttcaaatgatgacctttcaaaaatagttgagacgtcagatgaatggattgcagctcgaactgggattcgtaacaggcgagttctttcaggagatgaaacattgcgggggctctcaataaaagcagctcaaagggcacttgcaatggccaaagtaaaagctgaagatgatgaccttgttctcctttgtacatctactccagatgatttgtttggaggtgccactcaggtgctgacagactggggt

SEQ ID NO: 48175 - DNA, 285 bp, Zea mays
cgatggcatgcacaaacaatgcgatgagagccttgttcctcctggtcctcttctgcatcgtgcatggtgagaaggaagagtcaaagggcatcgatgcgaaagcgtccgggcctggtgggtccttcgacatcaccaagttgggcgcctccggcaatggcaagacagacagcacgaaggctgtgcaggaggcatgggcatcggcgtgcggcggcactgggaagcagacaatcctcatacccaagggcgacttccttgtcggacaactcaacttcacaggcccttgca

SEQ ID NO: 48176 - DNA, 286 bp, Zea mays
agtgtactggagaggaggtgctcttctgaagacaatcactcctccagggtttcatctgaagctccctttgatcacccagtacgagccaatacaggttacacttcaaacagaccaggtcagagatattccttgtggaaccaaaggtggtgtttactcagctttgacaagatagaggtcgtgaaccgccttcgcaaagagtttgtgcatgaaaacctactgcactatggtgtgcactatgacgagacatggatatatgataaaatccatcatgagatttatcagttct

SEQ ID NO: 48177 - DNA, 128 bp, Zea mays
ctgtttttataagttgcatgaacacagcaaacccaacaagggctatggtcatcctggttaattgcaatcaaagccctttgatggtttgctgaacttataagttgcatgaacacaacttctgtttggtt

SEQ ID NO: 48178 - DNA, 294 bp, Zea mays
ctgataacccactttatggatcttcactgattgattatgcccatattgagcaatggattgactttgctgcaacagagattgatgcaaacattggaaagtggttgtacccacggatggggttttatccccatgctggtgtggtagaagaatcaactattgctgccttgaagagagcattgggttctctgagcacccatcttgcatcaaacacattccttgttgggcattcagtgactctcgcggatatcgtgatgacatgcaatctctgtatgggatttagccgtatcttgacta

SEQ ID NO: 48179 - DNA, 279 bp, Zea mays
aaaggttttcgtggagcctggttcgaggcgactgttgttaaagctgtcggcagcaagttcctcgtggagtatgctacgctgaaggccgatgacgggaccaagcctctgaaagaatctggagggcaaggtctgatgtgccactgatggattcaaactacttgacgaggtcgatgccttctgcaacgacgcgtggtgggtcggtgtggtatccaaggtcctcggcgagaagaggtgcacggtctacttcaggccttggaaggaagagatggagttcgagca

SEQ ID NO: 48180 - DNA, 243 bp, Zea mays
tcctccatcaccaccaccaagctcaacaacagccagctcgcgaaaataatgaagagccgcagcatggcatcatcggccgcgctcttggtgctagccctcgcgctagtggcggccacagcgccacaggtagcggaggcaaagaagaagagagcggcggagagcggcgaggcggcggaggcgaagaagatccaggacgacttctgctcgacgctgtgcgagggccagaaaggggacggacctggt

SEQ ID NO: 48181 - DNA, 291 bp, Zea mays
aagaaatcctagaagtagcacagccaaaattggagccatttcccttcgacaaggacaccgacctaccagtttaaacactccaatgatgcaaactacaggaagaatcacgagacacttaaaaaatcaagacaaatagtaagcctattgtcgagcagtagtctattaactaaataaaatgctgtgaggagcatattataatcgcatattgccctaataatattgtgttgttaaacctgaggcttgatggttatctgatgagttgtaataatagccttggtcttccgttgtatg

SEQ ID NO: 48182 - DNA, 134 bp, Zea mays
acgatcacgacaagatggcatgcacaaacaatgcgatgagagccttgttcctcctggtcctcttctgcatcgtgcatggtgagaaggaagagtcaaagggcatcgatgcgaaagcgtccgggcctggtgggtcc

SEQ ID NO: 48183 - DNA, 279 bp, Zea mays
tgcttccagaaggacatcctgcacctggtgtacatctgcgagtgcaatggcctgcccgaggtggccaactactggaagcaggtgatcaagatcaacgactagccgaagagccggttcgtgaaccgcgtcgtgtcgtccatgttcaacaccgttgccggcaacaagatcgccgtcctcggcttcgccttcaagaaggacaccggcgacaccagggagaccccggccatcgatgtctgcacaggctgctgggtgacaaggcccagatcagcatctacgacc

SEQ ID NO: 48184 - DNA, 288 bp, Zea mays
cgacaccaacatcctctgggtgaaccctgactgtggtctcaagacacgcaagtacacggaggtcaagcccgccctgaccaacatggtctcggccaccaagctcatccgcacccagcttgccagcgcgaaatgaggtcgtttgatagctccatggtctgatagcgcggaatgagccagttgttttgaataatttgggtgttaccccctgttccatggtgttagtgttaggttagcctctcattggtgggatacgccgttacaagatgtgttctaagtttggagtgtgtg

SEQ ID NO: 48185 - DNA, 184 bp, Zea mays
gcgctcagcaacggcgtctcctacgccgtcaacctcgtggtactggcgctgtacgtgaggctgtcgggcgcgtgcagggagacatggaaaggcttctcgcgggaggcgtttaaggacctgtggcgattcgccgagcttgcctggccgtccgccatgatgatctgcttggagtggtggtcgtttg

SEQ ID NO: 48186 - DNA, 176 bp, Zea mays
atcttcgtgaagacgctgacagggaagaccatcaccctcgaggtcgagagcagcgacaccatcgacaatgtcaaggccaagatccaggacaaggaagggatcccgccggaccagcagcggctgatctttgccgggaagcagctggaggatggcgcacccttgcggactataacatc

SEQ ID NO: 48187 - DNA, 171 bp, Zea mays
caaacaatgcgatgagagccttgttcctcctggtccactcctgcatcgtgcatggtgagaaggaagagtcaaagggcatcgatgcgaaagcgtccgggcctggtgggtccttcgacatcaccaagttgggcgcctccggcaatggcaagacagacagcacgaaggctgtgc

SEQ ID NO: 48188 - DNA, 168 bp, Zea mays
gaccatcaccttggaggtggagtcgtctgacacaatcgataatgtcaaagccaagatccaggacaaggagggcattccaccggaccagcagcgcctgatctttgctggcaagcagctggaggatggccgtaccctcgccgactacaacatccagtaggagagcaccct

SEQ ID NO: 48189 - DNA, 174 bp, Zea mays
cccgaagaagatcggcgaggacattgccaaggagacggccaaggactggaagggcctgcgcgtcaccgtcaagctcactgtccagaaccgccaggccaaggtctccgtcgtcccctccgccgccgcgctcgtcatcaaggcgctcaaggagcccgagagggacaggaagaaggt

SEQ ID NO: 48190 - DNA, 172 bp, Zea mays
ggcgcaggatccgttctacatcgtccgggaggagattcaggagtcgattgataaattgcaaagtaacttccaccgctgggagcaaactgcttcaaacacaggagaatatgttcatctgacaaaggagcttctgaccagctgtgaaagcatcgagtggcaggtagatgagctg

SEQ ID NO: 48191 - DNA, 184 bp, Zea mays; identical to SEQ ID NO: 48185

SEQ ID NO: 48192 - DNA, 161 bp, Zea mays
atcttcgtgaagacgctgacagggaagaccatcaccctcgaggtcgagagcagcgacaccatcgacaatgtcaaggccaagatccaggacaaggaagggatcccgccggaccagcagcggctgatctttgccgggaagcagctcgagaatgagtgcactct

SEQ ID NO: 48193 - DNA, 175 bp, Zea mays
cgaacgcaatcaattcactcaaacctcttccccaaatcttcgattagattctcgttgacaagaagactagaaccgaacctgaccatgtcgctgatccgccgcagcaacgtgttcgatcccttctccctcgacctctgggacccctttgagggcttccccttcggctccggcagca

SEQ ID NO: 48194 - DNA, 174 bp, Zea mays
caggcctgtcactctagtcgggttctcgctgggggctcgtgtggttttcaagtgcctgcaggagttagcgcactgggaaataatgtggggatcgttgagagggcggtgctcatcggtgcgccggtctcagttcaaggtgagatgtgggagcctgccaggaagatggtcgccgga

SEQ ID NO: 48195 - DNA, 207 bp, Zea mays
acgcacgagaacacacactccgaatccggctcgaggcaagaccacctaggaggcctctctctctctctccccagccaaccccgtagcgagagggagggcggaagaggatgagcgcgtccaggttcataaagtgcgtcacggtcggggacggcgccgtcggcaagacctgcatgctcatctctacacctccaacaccttccccaccga

SEQ ID NO: 48196 - DNA, 173 bp, Zea mays
gcgccactgctcgttatcctcctcttgcattgcattgcaggtcgtagttgagcagcagcaaccactgcacaggatgtcgtggcagacgtacgtcgatgagcacctcatgtgcgagatcgagggccaccacctgagctctgccgccatagtcggccacgacggcgccgtttggg

SEQ ID NO: 48197 - DNA, 189 bp, Zea mays
tttacatggctgcaaactatgatgtccatgttcttggtattgatctttcggtgaacatggtttcatttgcaattgaacgtgccattggacgcaagtgctctgttgaattcgaagttgctgattgcaccacaaaggattacccagaaaatagttttgacgtctctacagccgtgacaccatccttcacat

SEQ ID NO: 48198 - DNA, 173 bp, Zea mays
tgtgaacagctgagccgcaacaccgtcttatcttgagtggcacacctattcagaataatgtgttggagttatggtctttatttgacttccttatgcctgggtttcttggaacagaaaaacaattccaagctgcatatggaaaacctggctagctgccaaagattctaaatgtt

SEQ ID NO: 48199 - DNA, 173 bp, Zea mays
gggggcaaacgctgctccgttcccgggtgcaccaagagtgcacgcggtcgctctgattgctgtgtgaagcacggtggtggcaagcgttgcaggttcgatgggtgtgacaagagcgcacaggggaacactgacttctgcaaggctcatggaggcggcaagcgatgcgcttggag

SEQ ID NO: 48200 - DNA, 189 bp, Zea mays
caagatggcatgcacaaacaatgcgatgagagccttgttcctcctggtcctcttctgcatcgtgcatggtgagaatgaagagtcaaagggcatcgatgcgaaagcgtccgggcctggtgggtccttcgacatcaccaagttgggcgcctccggcaatggcaagacagacagcacgaaggctgtgcagga

SEQ ID NO: 48201 - DNA, 175 bp, Zea mays
gcggcgctcaagacccggctgggcatccccatcatctacggcatcgacgccgtgcacggcaacaacgacgtctacaacgccaccatcttcccccacaacgtcggcctcggcgccaccagggacccccgcctcgtcaagcgggtcggggaggccacggcgcacgagaccagggcca

SEQ ID NO: 48202 - DNA, 85 bp, Zea mays
cacaacgagaccgtcaccaacgacgagatcgccgccgacctcaaggagcacgtcatcaagcccgtgatccctgagaagtacctcg

SEQ ID NO: 48203 - DNA, 313 bp, Zea mays
  unsure (1)..(313): unsure at all n locations
ccaagctcaacaacagccagctcgcgaaaataatgaagagccgcagcatggcatcatcggccgcgctcttggtgctagccctcgcgctcgtggcggccaccgccccacaggtagcggaggcaaagaagaagagagcggcggagagcggcgaggcggcggaggcgaagaagatccaggacgacttctgctcgacgctgtgcgagggcaagaaggggacggacctggtcgtgtgcaaggagtcctgcgctctctcccagcagtccaacctggtgctgtacggcaggatccagtgcanaggcaaatgcaccgagca

SEQ ID NO: 48204 - DNA, 197 bp, Zea mays
acgtatccgccggcggaagcggaagcggaaggaagtagtcggccaccatggtgaagggacgcacggggcagcgcgtcaggctctacgtccggggcaccatcctcggatacaagaggtccaagtcgaaccagtacgagaccacgtcgcttgtgcagatcgagggggtgaacaccaaggaggacgtcgcgtggtacgct

SEQ ID NO: 48205 - DNA, 307 bp, Zea mays
cgatcacaacaagatggcatgtatagacaatgcaatgagagccttgttccttctagcgctcttctgcaccgtgcatggtgagaaggcaaagtcaaaggacaacgattcaaaagcgtccgggcccggtgggtccttcgacatcaccaagttgggcgcctctggcaatggcaagacggatagcacgaaggctgtgcaggaggcgtgggcatcggcgtgcggcggcaccgggaagcagacgatcctcatccccaagggcgacttcctcgtcggaccactcaacttcacaggcccatgcataggcgacgtg

SEQ ID NO: 48206 - DNA, 306 bp, Zea mays
gttcaccgacctcaccgaggaggagttcaaggacacatatcttatgaagctcgacgagcagccccctgcagctgaggccatgggaccgaccgtcggcaccatgagcacagcaggcatgtccaacggcaacaacaccggcgaggctcccaacagtgtggactggaggaccaagggagcagtgacgcgggtcaaggaccagcaacaatgtggctcttgctgggcgtttgcaacggtggcgtccatcgaaggtgtgcaccagataaagacaggtcgtctggtgtcgctgtcggagcaagagatcgtgga

SEQ ID NO: 48207 - DNA, 302 bp, Zea mays
caacaagatggcatgtatagacaatgcaatgagagccttgttccttctagcgctcttctgcaccgtgcatggtgagaaggcaaagtcaaaggacaacgattcaaaagcgtccgggcccggtgggtccttcgacatcaccaagttgggcgcctctggcaatggcaagacggatagcacgaaggctgtgcaggaggcgtgggcatcggcgtgcggcggcaccgggaagcagacgatcctcatccccaagggcgacttcctcgtcggaccactcaacttcacaggcccatgcaagggcgacgtga

SEQ ID NO: 48208 - DNA, 306 bp, Zea mays
cgcttgttctcttcggttcagttctcgagtttccaggatgaaggtaatagctgcctatctgcttgctgttctgggtggaaacacttccccgactgctgatgatgttaagagcattctggaatcagttggtgctgaagctgatgaagaaaaactagagttcctgctcacagaactcaaagacaaggacataacagaagtgattgcagctggaagggaaaggttatcctctgtgccttcaggtggtggtgcaattgacatgggagctccagcagctgtagctggcggtggcgcacacctgctgaagag

SEQ ID NO: 48209 - DNA, 300 bp, Zea mays
gaagatcgcatgctatgtgacggtgcggggtgagaaggcaatgcagctgctggagagtggcttgaaggtgaaggagtacgagctgctgaggaggaacttcagtgacactggctgctttggatttggtatccaagagcacattgatcttggcatcaagtatgatccatctactggtatctacggcatggacttctacgtcgtccttgagcgtgctgggtaccgtgtcgcccgtcgccgcagtgcaagtcccgtgttgggatccagcacagggtcactaaggaggacgccatgaagtggttc

SEQ ID NO: 48210 - DNA, 313 bp, Zea mays
aaggactggaggggtggaagggctgctagtttcaacatcattcccagcagcactggagctgctaaggctgttggcaaagtgcttcctgtccttaacggaaagttgactggaatgtctttccgtgtcccaaccgtcgatgtttctgttgttgatttgactgttaggcttgagaagtcagcaacctatgatgagatcaaggctgcggtcaaggccgaggcagaaggtagcctcaagggcatcctgggttacgttgaggaggaccttgtttccaccgatttccagggtgacagcaggtctagcatctttgatgcta

SEQ ID NO: 48211 - DNA, 319 bp, Zea mays
catctaccagcgactcagcgagcgagagcagcacacacgcagctagctaggagcagcagcagagcagcggcgatggcggcctccatgatctcctcgtcagctctggcggtggcgcctcagggcctgccgcccctcggccgccgcgcctcctccttcgccgtcgtctgctccaagaagaagatcaagaccgacaagccctacgggattgggggtggcctgaccgtcgacgtcgacgccaacgggagaaagggcaagggcaagggcgtgtaccagttcgtcgacaagtacggcgcgaacgtcgacggatacagcccaatct

SEQ ID NO: 48212 - DNA, 315 bp, Zea mays
tggctatccagaatctgagctcctacaaggataagaaatttgtggacattagcaaggaagatttggatttaggtgataacaatgaggaaagagagaaggagataaagcaggagttcagccaagcctgtgactggataaagaatcgcttgggtgacaaggttgcacgtgttgacatatctaatcgtctcaggtcatcgccatgtgttcttgttgcagcgaagtttggttggtcagccaatatggaaaggctgatgagagcacagtctatgggtgatacagcctctttggatttcatgcgttcgaggaaagtttttg

SEQ ID NO: 48213 - DNA, 317 bp, Zea mays
gctgacgacaccaccgtgtggtcgacaaaataaaaaggagagagagagagatggctctgtcgtctcgccgtatggccgccgcaccattcttcgtcgtcgtccttctcgtcctcgtggcggcagagaggacgatgggcagggtggtggtggaagagacgctctgcttgtcgcagagccatgccttcaaaggcgtgtgcctcagcaacaccaactgcgacaacgtatgcaagacggagaagttcacaggcggcgagtgcaagatggacggcgtcatgcgcaagtgctactgcaagaaggtctgctagggcatgaccggc

SEQ ID NO: 48214 - DNA, 296 bp, Zea mays
cacacacaaccagatctcccccaaatccacccgtcggcacctccgcttcaagatgcagatctttgtgaaaaccctgactggcaagactatcaccctcgaggtggagtcgtctgacaccattgacaacgttaaggccaagatccaggacaaggagggcatccccccagaccagcagcggctcatctttgctggcaaacagcttgaggacgggcgcacgcttgctgactacaacatccagaaggagagcaccctccaccttgtgctccgtctcaggggaggcatgcagatctttgtga

SEQ ID NO: 48215 - DNA, 321 bp, Zea mays
cgatcacgacaagatggcgtgcacagacaatgcgatgagagccttgttcctcctggtcctcttctgcatcgtgcatggtgagaaggaagagtcaaagggcatcgatgcgaaagcgtccgggcctggtgggtccttcgacatcaccaagttgggcgcctccggcaatggcaagacagacagcacgaaggctgtgcaggaggcatgggcatcggcgtgcggcggcactgggaagcagacaatcctcatacccaagggcgacttccttgtcggacaactcaacttcacaggcccttgcaaaggcgacgtgaccatccaggtgga

SEQ ID NO: 48216 - DNA, 317 bp, Zea mays
gaaacaccggagagcgccgagatgagagagatgggggaccggccgtagcagggctcgaccttgtcgtcgtcccgttccgggcatgcgcccgctcgtgggagccacaccaacgttgaaccaaagcggtgaggtcacgagaatctgaagaccaacttggtacctgggatctcaagtctaaggcaagttgtgcccttgatcacttttctttacctaataatgttcctgttaaccactgtgacatgctcaggttaatttgatggaacccaataggtgtccctagcattatttattccctaccttgcaaacaaaggcactat

SEQ ID NO: 48217 - DNA, 312 bp, Zea mays
catttggcttcatgtctcctgcatcgagaggaatgttgttgacagggatgatagtcttttatatgttacttggaattgtgtctgggtatgctgctgtcaggctctggaggactttaaaaggaacgtccgagggatggaggtctgtctcctggtcaactgcttgtttcttccctggcattgtcttcattgtcctcactgtgttaaacttcatgctgtggacaagaaatagtactggagcccttcccatctcacttttctttggccttttgtccttgtggttctgtgtctccgtgccacttacccttttaggtg

SEQ ID NO: 48218 - DNA, 316 bp, Zea mays
gaagaaggggcctgtttttactgatcctaagttgaaatggtatgagccccaatccttcttactcggatcagaatactttcttcatgcatatgggccaatttatgctttatcagctgacgtggtggctagcttggttgctttgaggaacaacagtttccgtatgtttagcaacgaggacgttacaattggatcgtggatgcttgctatgaacgtcaaccatgagaacacacatgcgctctgtgaacctgactgcacggagtcttcagttgctgtttgggacattccaaaatgctcagggctatgcacccagaggtaa

SEQ ID NO: 48219 - DNA, 311 bp, Zea mays
acgagaagcatgctgatgctgggactgacatcgaggaagaagaggaggacgaagatggccacaagcgtgtcgtcgttcttgggccccaagtccccctcaaggaacagctcgagcttgacaaggatgatgagagcctgaggaggtggaaggagcaactcctcgggcaagtcgacaccgagcagctcggagagactgcggagccggaggtgaaggtgctcaacctgaccatcctgtcaccggggcggccagatctagtgctaccgatcccgttcgaggccgacgacaagggctatgcgtttacgctcaaggat

SEQ ID NO: 48220 - DNA, 309 bp, Zea mays
ggaagatggaggaagggttattgattgatacatcccgtgcacttggtggcaccatccgggcgattgcagctgactcgaggcttttagtgagtggaggaactaatgcctatattcagtgttggagggccgttgaaggcaatggtcaattatttcacatctctggaagtggtaccgaccagaatgcggagtttcgcctctggggtcatgaaggtcctgtgacttgtcttgccctggattcactgaggatttatagtggttcttgggacatgactgttcgtgtttgggacagagaccagatggagtgtgtgc

SEQ ID NO: 48221 - DNA, 308 bp, Zea mays
cccgaagatgccgcccggtcccaacatcaccaccaactacaacggcaagtggctcaccgccagggccacctggtacggtcagcccaacggtgccggcgctcctgacaacggcggtgcgtgcgggatcaagaacgtgaacctgccaccctacagcggcatgacggcgtgcggcaacgtccccatcttcaaggacggcaagggctgcggctcatgctacgaggtgagatgcaaggaaaaacctgagtgctcgggcaatccagtcacggtgtacatcactgacatgaactacgagcctatcgctccctacc

SEQ ID NO: 48222 - DNA, 298 bp, Zea mays
  unsure (1)..(298): unsure at all n locations
aggggtctttgagaaggtgacagaatctcctggacaggtttacatcttgaagtttaagcaagacagcagaaaattcttcttctggatgcaggaaccaaatgctgatggggactcccagacttgcatgcaagttaatgcctacataaatcgatcantagatgctgaggctgatcttcgagtacctattgaagcagaaatgtctgaagatacggctgatgatgatatctcttccagagctgggaatctagttgagagcatgaccgctgatttggctggtgaagtgacgtctgctgctgga

SEQ ID NO: 48223 - DNA, 92 bp, Zea mays
aagtaccatgctttccttgcatctgaggctatcattaagcaaattcctcgtcttcttggtcctggtcttaacaaggcaggaaaattccctac

SEQ ID NO: 48224 - DNA, 298 bp, Zea mays
cgtctcgccctcggcttcttcctcccctccctgaccgctgccgcgacctctcggcgaaaccctaacctaccttagaccccgccgccgccgccgcccaagggagagagagacttgcacatcaaagggcgtccgatggggaagaagaagaagcgcgtcgataaggtcttctgctactactgcgaccgcgagttcgacgacgagaagatcctcgtccagcaccagaaggccaagcacttcaagtgccacgtatgccacaagaagctctccaccgcctctggcatggccatacacgtcctcc

SEQ ID NO: 48225 - DNA, 298 bp, Zea mays
tccttctggacgagaatttcgaggctaaggtcgcggatttcggacttgccaagctgaccacagacaccaacacgcacgtctccacgcgtgtcatgggaactttcgggtatttggccccggagtacgcgtcgagcggcaagctcaccgacaagtcggacgtgttctccttcggcgtcatgctcctggagcggatgtgctcctctgccgcggcggccgtccgccactcagccaagcggcggcccaagatgaaacagatcgtccgtgctctggaaggggacgcgtcgctggacgacctgaa

SEQ ID NO: 48226 - DNA, 175 bp, Zea mays
ctttgggaagacaaatggggagtgcctatctgcccaaatgacaaagatatggcgccaccaagtaatatagttctttttggccctttttttcgtctacattcgaagaaatcataatgaatgttgacatacatacaaaaaacattcataaattaattaatggatgcatgtttaatct

SEQ ID NO: 48227 - DNA, 219 bp, Zea mays
cacatctccatgtccacctgcgaggacggcctcatcgacgtcgtgcagagctccacggagatcaccatctccaactgccacttcaccaaccacaacgacgtcatgctcttcggcgccaggactactggccgcagaccagatcatgcagatcaccgtcgccttcaaccacttcggcaggggcctggtgcatcggatgccaaggtgccgctggggcttctt

SEQ ID NO: 48228 - DNA, 291 bp, Zea mays
gcagaggtcgtttgctgagacccactacgccgatctcgcctccaagcccttcttccagggcctcgtggactacatcatctctggccctgtggtggccatggtctgggagggcaagagcgtcgtcacaactggccgcaagatcattggcgccaccaaccccctggcttctgagcccggcaccatccgtggcgactttgctgtcgacattggcaggaatgtcattcatggaagtgccagcattgagagtgctaataaggagattgccctgtgggttccccgagggccctgctg

SEQ ID NO: 48229 - DNA, 296 bp, Zea mays
gacacggcctacttactgctctatgtggatgacattgtactcactgcctcctctgctggaatcctcaagtacatcattgaagctctccaacgtgaatttgccatgatggacatgggtcagctacatcactttctgggaatttctgtgacacactctgcagatggcctgttcctttctcagcggcagtacagtcaggatattttggagcgcaccgggatgagtgcgtgcaagccgtgcagcacgcctgttgatctacactccaaactatctgctgatggaccacatgttgctgacgc

SEQ ID NO: 48230 - DNA, 177 bp, Zea mays
cgcattcgaccccaaggagaaagtatggacaaggttccctccggaaggctcgaaatacactcctccacacagttcgtgcgacttcagatggaaggactactgcccgcaagtattccggacgttgcgcaactgttcaaggtcgatgccgcggactacatgctgtctctctgtggagac

SEQ ID NO: 48231 - DNA, 291 bp, Zea mays
aacaagatggcatgtatagacaatgcaatgagagccttgttccttctagcgctcttctgcaccgtgcatggtgagaaggcaaagtcaaaggacaacgattcaaaagcgtccgggcccggtgggtccttcgacatcaccaagttgggcgcctctggcaatggcaagacggatagcacgaaggctgtgcaggaggcgtgggcatcggcgtgcggcggcaccgggaagcagacgatcctcatccccaagggcgacttcctcgtcggaccactcaacttcacaggcccatgcaag

SEQ ID NO: 48232 - DNA, 290 bp, Zea mays
ctcatggattcacgtactccggccatccggttgcctgtgctgtggccattgaagctctgaaactttatcgcgaaagggacattcccggccatgtcaagcaaatcgccccaaagttccaggacgggattagggcgctggcagacagtccgattataggggagatacgtggcttggggatgattatggggaccgaattcacaaacaacaagtcaccgactgatctgttccctgccgaatggggggttggtgccatcttcggcgaagagtgccagaagcgcggcatgctggtc

SEQ ID NO: 48233 - DNA, 292 bp, Zea mays
caaactgacaaggacgatatggtgcgtacctcgtcgcgctgatcctcgtcgccacggccgtagccgccgtggccacagccgcaccctcgccggggtttgtcgtcaccggccgcgtctactgcgacaactgccgcgccgggttcgagaccaacgtctcccacgccatcgaaggcgcgacggtggagatggagtgccgtcacttcgagtcgcaggaggtccacgacaaggcggaggcgacgacggacgccggcgggtggtacaggatggagatcagcggtgaccaccaggacga

SEQ ID NO: 48234 - DNA, 293 bp, Zea mays
gtctgtgcgaaggcgaccattccttcttcgctccttcgccgccgctatggttaagtactcgcaggagccgggcaaccctaccaaatcggccaaggccatgggaagggacctgagggtccacttcaagaacacaagggagacagcttttgcgcttcgcaagctgcctttgaccaaggctaagcgataccttgaggatgttattgctcacaagcaggcaattcccttccggagatactgtggaggtgttggtcgcaccgcacaagcaaagtctcgccactccaatgggcagggtc

SEQ ID NO: 48235 - DNA, 224 bp, Zea mays
tggaaggaaagggaacgggaggaagaagagaggagggaagaggaagaagagcgggccaggaaggagcgggagaaacagcggaggagagagaaagaggaggaggagcgtgcacggagacgcgagcgaggagaggcagcgggaggaggaagaaagagagagggaagaggaagaagaacggaggagggaggaggaagaaggtggaggcggacgtggtgacgagccag

SEQ ID NO: 48236 - DNA, 290 bp, Zea mays
gacatttcgaataacacagttgagcgcgacgatgggatccctcgctaataacatcatggtcgtgggtgtactccttgcagcgctcgtacccggcgggtcatgcgggcccccgaaggtgccgcccggtcccaacatcaccaccaactacaacggcaagtggctcaccgccagggccagctggtacggtcagcccaacggtgccggcgctcctgacaacggcggtgcgtgcgggatcaagaacgtgaacctgccaccctacagcggcatgacggcgtgcggcaacgtcccca

SEQ ID NO: 48237 - DNA, 288 bp, Zea mays
cgcttcgtgagaacttcactaaggatccatggttctgcagcagacgaccagacagctcttgtgaagacgatgctgacattgagtacgacagcagccgcatctgggttttggacaagcccaacataccaaagcctccaccagagacggagaggctagtggttatgaggggcgactacagcaaaatggacacatattatgtcatgcccaatgggaagcgtgcaaggtgtgctggtgatgtggataagtttctggaggcaaatccggagtacaaagaccgcatatctgctt

SEQ ID NO: 48238 - DNA, 224 bp, Zea mays
atcatgccaagacaaacatgttgatagaagatactgcatggcaacctgtttggcaaaaggaaattgaatcatcaccttttctaaggaaggcaattatttttggctatggccctatcaggccatggatgtctattgctcactggttgatttggcactttgatctaaaaaaattcagaccaaatgaagttccaagggttaagataagcttagcatgtgtgtttgca

SEQ ID NO: 48239 - DNA, 146 bp, Zea mays
cgaaaactctcccttgaaggtcatagattttggcttgtctgactttgtgaagccagatgaaagactaaacgacattgttggaagcgcatactatgttgctccagaggtcctccacagatcttatgcctacatcttgctctgtgggg

SEQ ID NO: 48240 - DNA, 284 bp, Zea mays
cacagatcacacacactcgagaactccatttcgatcccatttgaaatcaacccatcctcgtttcctccgtctagcagcctctcaccctcatggcaaagatcaagatcgggatcaatgggtttggcaggatcggaaggctggtggccagggtggccctgcagagcgacgacgtcgagctcgtcgccgtgaacgaccccttcatcagcaccgattacatgacctacatgttcaagtatgacactgtgcacggacagtggaagcacatgaggtcaaggtgaaggact

SEQ ID NO: 48241 - DNA, 280 bp, Zea mays
cgccaatgcaactgttatatatgttccaccaccatttgccgccgccgctataatggaggcaatggaggctgagctcgaccttgccgtctgcattacagaaggaatacctcagcatgacatggtgaaagtgaaggctgcactaaacagccagtctaaaactcgattgattgggccagattgccctggtatcattaagcctggtgagtgtaaaattggaatcatgccaggttacatccacaagcctgggcgtattgggatcgtatctcgttctggtactttg

SEQ ID NO: 48242 - DNA, 113 bp, Zea mays
gatgcatgttctagcggtcacattgctggatacggtggtgatgtgtggttcccacagccagcaccaaaggatcacccctggcgctacatgccaaaccatgccatgacccctca

SEQ ID NO: 48243 - DNA, 104 bp, Zea mays
tcgacaagatggcatgcacaaacaatgcgatgagagccttgttcctcctggtcctcttctgcatcgtgcatggtgagaaggaagagtcaaagggcatcgatgcg

SEQ ID NO: 48244 - DNA, 157 bp, Zea mays
gtgagaaggaagagtcaaagggcatcgatgcgaaagcgtccgggcctggtgggtccttcgacatcaccaagttgggcgcctccggcaatggcaagacagacagcacgaaggctgtgcaggaggcatgggcatcagcgtgcggcggcactgggaagca

SEQ ID NO: 48245 - DNA, 178 bp, Zea mays
gagggatcttgctacattggttgttgcttatggaataagcattaaccttgtcgaggtgacatggaaatcaaaactgaaagcacagttctcaagcccgaatgaatattcttcattcatgggcgatttctcaactgccaccggcatagctacatttacaatgatgttgttaggaagagtg

SEQ ID NO: 48246 - DNA, 209 bp, Zea mays
caagaaaactggactgattaaggttgatcgagtcctgtactcatcagttgtataccctcacaattatggtttcgttccaaggaatctttgtgaagacaatgacccaatggatgtgttagtcctgatgcaggagcctgttgttcctggttcgttcctgcgagcaagagcaatcggccttatgcccatgattgaccagggtgaaaaggatg

SEQ ID NO: 48247 - DNA, 177 bp, Zea mays
agctccgctacggcttcaacggcatctcccacagggacaccgagacccccctcaagctcgccgagtacttcaacgtcaccgacggggtgttcagctacaaccagatgggcgacgtgccccccgccgttaacgggccactccatgtcatccccaacgtcatcaccgccgagttccgga

SEQ ID NO: 48248 - DNA, 256 bp, Zea mays
cagcgccgcgcttgcgtttccttctcttcgcttccaagatgtcgaagcgagggcgtggaggttcggctggtaacaagttccggatgtcactgggtctacgagtggcagctactgtgaactgtgccgataacactggagccaagaacctgtacatcatttctgtgaagggaatcaagggtcgccttaacaggcttccttctgcctgtattggtgacatggttataacaaccgtgaagaagggaaagcatgaccttag

SEQ ID NO: 48249 - DNA, 310 bp, Zea mays
tgaaattcgaatggcgaggatggcaagaaaagctggcaacttctatgtacctgcagaacccaaattgacgaatgtcatcagaatcagaggtatcaatggagtgagcccaaaggttcgaaaggtgttgcagcttcttcgccttcgtcaaatcttcaatggaacctttgtgaagctcaacaaggcttcgattaacatgctgaggattgtagagccatatattgcatgggggtacccaatctgaagtcagtaaatggactaatctacaagcgtggttatggcacaatcaatgagaagcgaattgctttgacag

SEQ ID NO: 48250 - DNA, 265 bp, Zea mays
cgcatgttcatggaagatgtcccaactttcaaatttggtggtctggcttggctcttccttggtgttgcgaactctgacagccttctctatgatgaagagttcacaaactaccttcaacagtatccagacaatttcaggtacgacaaagcgctaagcagggagcagaagaacaagagcggcgggaagatgtacgtgcaggacaagatcgaggagtacagcgacgaaatcttcagactgctagatggcggtgcgcacatctacttct

SEQ ID NO: 48251 - DNA, 154 bp, Zea mays
ggcggcggacggaaggcgaaagagtagcagcagcaggcggcgccgagtagcggctccccacctcgagcttgccaccatggctagaggattgaagaagcatttgaagaggctcaatgcgcccaagcattggatgctggacaagcttggcggactt

SEQ ID NO: 48252 - DNA, 115 bp, Zea mays
cgctgagttcaagatcgtgctcaccatcatccgcgacgggctcaaggctgaccccaagaagtaccgcaagatgaaggagaggcttgtcggcgtctctaaggagaacatcacgggt

SEQ ID NO: 48253 - DNA, 177 bp, Zea mays
taggagaacaagcatgaatatgtcgaccgggtagcagagcatcgattgaccactgccatcaggcctcagattaatgccttcctggaagggtttaatgaactcattccacgggagctgatatctatcttcaacgacaaagagcttgagcttctgattagtggtcttccagatattgac

SEQ ID NO: 48254 - DNA, 217 bp, Zea mays
gcgagctttccaacagtatggtatgctacagcaaaacgcttggaggccacagagaggactacctgaaaattcagtctcgattctccgggcttggctttttgaacacttccttcacccgtatccaaaagattctgaaaagctaatgttatcgagacaaactgggttgacaagaagtcagatttcaaactggttcatcaatgcccgtgtccggctgtgg

SEQ ID NO: 48255 - DNA, 292 bp, Zea mays
cgaggagatcccgtggggtgaggctggtgctgagtatgtcgtggagtccaccggtgtcttcactgacaaggacaaggctgctgcacatctgaagggtggtgccaagaaggttgttatctctgccccaagcaaagatgcacccatgtttgttgttggtgtcaatgaggacaagtacacctccgatgttaacattgtttcaaatgctagctgcaccacaaactgacttgctccacttgctaaggtcattcatgacaactctggcattattgagggcttgatgaaactgtacatg

SEQ ID NO: 48256 - DNA, 151 bp, Zea mays
gaagctcagtttagctgcccctcttggttttcagctggggccaagaacatgattaccagaattcttgatcccaatcctacaactagaatcacgatttctcagatactggagcatccttggttcaaaaaggggtacaagcctcctgtttttg

SEQ ID NO: 48257 - DNA, 255 bp, Zea mays
cagaccaccaaacaagtgccagcggcctctcgcagtcgccgcaatggagagcaccttcatcatgatcaagcctgacggcgtccagatgggcctcattggtgagatcatcagccgttttgagaagaagggcttctacctcaaggccttgaagcttgtcaacgtggagaggtcgtttgccgagaagcactacgccgatctcgcctccaagcccttcttccagggcctcgtggactacatcatctgcagccctgtggt

SEQ ID NO: 48258 - DNA, 295 bp, Zea mays
gtagttctgttcctccccactcactcctgcgcttcctcgccgcgcggttccttctcactgatcctcctttggcttcgcggttcatggcgatgtggagggccgccgctaggcagctggtcgaccgggcgctcggctcaagggccgcgcacacgtctacaggcagcaaaaagttagtcggggtgttctacagtgccggggagtatgccgacaagaaccccaacttcgtcggctgcgtcgagggtgcactcggcatccgcggctggctcgagtcgcagggccatcagtacattgtcac

SEQ ID NO: 48259 - DNA, 301 bp, Zea mays
gaaaccggagaccatgttggtgtatatgcagaaaattctgttgagactgtggaggaggctgaaagctacttgacctttctccagatacagtcttctccatccatgcagatgcagaagatgggtctcctcgtaaaggaggaagttccttggccccacctttcccatctccatgtactttgcggactgcgcttctacgatatgctgatctactcaatccaccgaagaaggctgctttgcttgctttagcttctcatgcatctgatccagctgaagctgaacgacttaggttcttggcctctcc

SEQ ID NO: 48260 - DNA, 300 bp, Zea mays
gtcagatcaggtgcgccgcgccctcctcgcctaagctgcgacgaccatccatcgaacaggaaggatgacgggctccatggatctcccggccaagggcgggttcagcttcgacctgtgccgccggaacaacatgctggagaagaacgggctcaaggtcccgggattcaggaagaccgggacaaccatcgtcggcctcgtctttcaggatggggttgttcttggggcagacacaagggcaactgagggccccatagttgctgataagaactgtgagaaaatccactttatggcaccgaatat

SEQ ID NO: 48261 - DNA, 279 bp, Zea mays
gttaacgaacttttggagaaatgccacccattgggcatgtttgacagcattgcatcacttgctgttgctcaaaacatgcgtgagctttatagattggttctagtcgatacaccactggccccttacttctcagattgcattacatctgaggatttggatgacatgaatattgagattatgaggaacactctctacaaagcatatcttgaggacttctacaaattttgccagaaactaggtggtgcaacagctgagacatgtgtgatctcctttcatttg

SEQ ID NO: 48262 - DNA, 116 bp, Zea mays
tgatcaccattgagaactcgcggtccgacgagaagctgctctccgtgttccgcgaggacgtcaagtacggcgcgggtatcggcaccggtgtctacgacatccactcccccaagatc

SEQ ID NO: 48263 - DNA, 280 bp, Zea mays
aatattcttcccgtcgaaagacggagagaggaaaagggacaagggcaaggcaagagagaggcgtcgtcgtttgatctgctgccggagtgcgaagaggaagaggaagaggagcgccggagttgtaaagatgttcctggtggactggttctatggggtgctggcatcgcttgggctgtggcagaaggaggctaagatcctcttccttggcctcgacaacgccggaaacaccccctcctcaaatgctgaggacgacggtcgtacacaccagccgacgcatacc

SEQ ID NO: 48264 - DNA, 219 bp, Zea mays
gttcttttaacaatatgtcgagggaggagaatgtttacatggccaagttggctgagcaggctgaaaggtatgaggagatggttgagtatatggagaaggtggctaagactgtagatgtggaagagctcactgttgaggagcgtaaccttctgtctgttgcatacaagaatgtgattggggctcgccgcgcttcatggcgcattgtttcttccattgaac

SEQ ID NO: 48265 - DNA, 236 bp, Zea mays
ccctcatgctctgattgtgcgtcgctacctctccctgctggacacggccgtggagctggagctcccaggataccggggtccccgccttccccgaaggcagcaagtgcccatctttccccagcctctcatcaccgaccgtgcccgctgcaagtacagtcacaaggacatagtagctgaggggttgcgccagctgctgggggaggagaaataccgccagacctgactgtgcctccagg

SEQ ID NO: 48266 - DNA, 99 bp, Zea mays
tatccaggacaaggagggcatccctccggaccagcagcggctcatttttgccggcaagcagctcgtggacaggcgcacgctggccgactacaacattca

SEQ ID NO: 48267 - DNA, 116 bp, Zea mays
cagactctcctcagtaactatagttttaatgttccttgggaggatagaaaaaatatatccttggttttcttgaacagataacatttcaggtgtgcttctgaagagagatttcgttg

SEQ ID NO: 48268 - DNA, 106 bp, Zea mays
gtctcttcggcggcgacgagcacccaccagcagttctgtagaaatggctgatggtgaggacatccagcctcttgtctgcgacaatggcaccggaatggtcaaggct

SEQ ID NO: 48269 - DNA, 240 bp, Zea mays
gcgggacaccgggtgtagaaggcggtcgcggcgggcagtggcggcagaatgttggctaccagggtatttagcctagttggcaagcgagcaatttccacctctgtgtgtataaaagctcatggacaagttgtgcagagcgaagacttttcgctcccagattatatggatcggcgtgacaaccccttgccggaggctgcccatgtcaagcacctgtctgccaaccagaaggcactgaaagag

SEQ ID NO: 48270 - DNA, 286 bp, Zea mays
agccgccatatctcacgatccactcgagcaccaagccgagggaaggtgaggagcgatggcgcgcggcgtggtgtcggcgaagggcggcgcggtcgcgggcaagaagaaggggtcggtttccttcacgatcgactgcaccaagccagtggaggacaagatcatggaggtcgcctcgctcgagaagttcctgcaggagcgcatcaaggtcgccggcggcaaggctggcaacctcggcgactccgtcaccatctctcgcgagaagaccaaggtcaccgtcacctctgac

SEQ ID NO: 48271 - DNA, 100 bp, Zea mays
ggtatggaaatgcaaatgtctggaaaacctttacagatctattggattacttccccttgactgcattggtcgagtcagagatattttgcttgcatggtgg

SEQ ID NO: 48272 - DNA, 107 bp, Zea mays
actcgagcgaatcggctcgaggcgcctcgtcctccccggggagctcgccaagcacgacgtctccgagggcaccaaagccgtcaccaagttcacctcgtcctaggctg

SEQ ID NO: 48273 - DNA, 139 bp, Zea mays
ggcagaaggaatatctcggtgccatttgctcctgcacatgctttggaggccagcggggctggcgctgtgacaactgccgcaaacctcagggtgaacccagtcccgaaggcactactggccagtcctacaaccagtattc

SEQ ID NO: 48274 - DNA, 140 bp, Zea mays
cgccagtcgtagccgcgttctcgtcccggggaccaaacttcctgaccctggagatcctcaagccggatgtcatcgcgcccggcgtgaacatcttggcggcatggagcggcgacgccagcccgtcgagcttgtccagcgac

SEQ ID NO: 48275 - DNA, 277 bp, Zea mays
gccgccgcccccagtccccgatccgaagctgtgcctcgtaccatttcgatccaatggcgccgacgtcgaagctgtcgacgggcatcaagcgcgcttcgcggtcgcacgcgtaccatcgccgtgggctgtgggccatcaaggccaagaacggcggcgccttccccaaggccgacaaggccgccgccgccgtggaacccaagttctaccctgccgacgacgtcaagcccgcgttcccagcacccgcaagcctaagcctaccaagctcaggtcgagcatc

SEQ ID NO: 48276 - DNA, 276 bp, Zea mays
gtaaagagtgcgaagaagcagtagcaaaaggattccattctcgtgttcttggagtggtccatcgatcgagctccgtgagagagatagcaagcaatggcgacagcagggaaggtgatcaagtgcagagccgccgtggcgtgggaggccggcaagccgctgtccatcgaggaggtggaggtggcgccgccgcaggcatggaggtgcgtacaagatcctctacaccgcgctctgcacaccgacgtctattctgggaggccaggggcaacccggtgttcc

SEQ ID NO: 48277 - DNA, 208 bp, Zea mays
agtggaggtagatggtgtttgtgatgaaccggccagtgagaatactgttgagggaaaagaaccagacgctaaaggagttccagacttttggcttactgccatgaaaacaaacgaggttttgtctgaggagatacaagagcgcgatgaagccgctttgaaatatctaaaagatatcaagtggtctagaatcgaggatcctaagggtttc

SEQ ID NO: 48278 - DNA, 86 bp, Zea mays
gaggccgccgcccagaccgcctcaccttccacgcctccggtgcccaaggccaggccaacagttttgaggtggtaatggcggaccag

SEQ ID NO: 48279 - DNA, 124 bp, Zea mays
gggacttctaaaaggaactatgtctggaaggctgtggtccaaggccatttttgctggctataagcggggtatccggaaccaaagggagcacacagctcttcttaaaattgaaggtgtttacgcc

SEQ ID NO: 48280 - DNA, 272 bp, Zea mays
cactggtgagggcatggatgagatggagttcaccgaagctgagagcaacatgaacgatctggtgtccgagtaccagcagtaccaggatgccactgctgatgaggaggcggaatatgaggacgaggaggccatccaagacgagtaagggtggtttgggccgccacatttgtacccttgtttcctgtcattccggggcttgcctatggtttgcttgttgtattcgctcaagttatgcggtatgtagtagtaccttcgtgcgtagatgctgtatg

SEQ ID NO: 48281 - DNA, 271 bp, Zea mays
caaaagaatgactcggaatgctcactgagatacatcatggtcatcaaggtttccgatcctactggcgaacatgggtctctgtgttcaacgagcatgcagagaagatcattggctgcagcgccgacgagcttgatcggatcaggaaagaggagggggacgacagttatgttctgaagctcaaggaagccacctgggttcctcacctgttccgcgtcagctcacacagcatgaatacaataacgagaaaaggcagagaatcactgtgaggagt

SEQ ID NO: 48282 - DNA, 194 bp, Zea mays
caagaccctaacatctctgagcagtgtgactgcttatggttttgatcttgtccgtgcttgggcttgtcacgagtgctggtttccctgctggaaagtacctctttgctggtgttgtggatggacgcaacatctgggctgatgatcttgctacatctctcagcactctcaagtctcctgtagtctttgtttgggaa

SEQ ID NO: 48283 - DNA, 247 bp, Zea mays
ctcgctctcgctctcagacgactgggccgccgccgcttggtgctgaggctttggtggcggcgacgagcacccaccagcagttctgtagaaatggctgatggtgaggacatccagcctcttgtctgcgataatggcaccggaatggtcaaggctggttttgctggcgacgatgcaccaagggcggtttttcctagcattgttggccgtcctcgccacactggtgtcatggtagggatgggacagaagg

SEQ ID NO: 48284 - DNA, 164 bp, Zea mays
acttgatttgattaaccactacaaactgctgccacaccatgatttcttttgcaacactggcaatatcagatacacattatcttcacaatattgtgggagacactgaaattcgaaaaggagaaggaatggagttagatcaacttgttcagaatgcatatatgagg

SEQ ID NO: 48285 - DNA, 161 bp, Zea mays
  unsure (1)..(161): unsure at all n locations
ccgcagggcagngttctgtcctcagccgcagtccctgatttggagttgtatgagaactcacgcctcccagatagaactacttgagacaagctctacgcaggaacctctcaacgcttcggaggccttttgcccaatagactgcatggtacaagtggtgtttc

SEQ ID NO: 48286 - DNA, 258 bp, Zea mays
caccaactggtgatggaaggttacaagtggcacttcaatgagacggtgctcactgacacaactactgctaccgctgtgggaatgtggcagccatcttggagctggacgagcatctccagaaagatttcatcatctttgaggctgctccccaagagacacggggcatccctcgaatgaagccgtggccgactacttcctggtgaccccgccggcccctgccccctcaaacccttctgggcctcgcaccactgtgatctg

SEQ ID NO: 48287 - DNA, 234 bp, Zea mays
atgaagttaaagtaaagattcctgaagagctaaaaccgtggcttgttgatgacttaccaggcaaaaacagctcttttatcttcctgccaagaagaatgtggattccattcttgaggattatgcaaattacaagaaatctcgtggaaacacagataataaggagtatgcggttaatgaagttgtggcagggataaaagattatttcaacgtaatgttgggtaccagctacccaat

SEQ ID NO: 48288 - DNA, 223 bp, Zea mays
acccgaggccttcgccgagctcaaggtgaaggagctcaagaacggccgcctcgatgttcggcttcttcgtccaggccatcgtcaccggcaagggcccgctcgagaacctcgctgaccacatcgctgacccagtcaacaacaacgcatgggcctacgcaaccaacttcgtcccgggcaactaagctcaacggctatgctatgcaacttcattgtctttcggatc

SEQ ID NO: 48289 - DNA, 235 bp, Zea mays
agttgctcgtcgcgctaaaggtttaggaatgcatgtgattgcacatgatccataatcgggcccgtgcaattggagttgagctagttagtatggaggaggccatgacaactgctgacttcatctcattgcacatgcctcttacccctgcaacaaacaagatgctcaacgatgaggcctttgctaagatgaatatggtgtccgattataaatgttccaccgggggtgtgattgatga

SEQ ID NO: 48290 - DNA, 170 bp, Zea mays
cggaggagaagaaacttacgaggattccctagtaacggcgagcgaaccggcttgagaatcgggcggcctcgccgccaattgtagtctggagaggcgtcctcagcgacggaccgggcccaagttctctggaaagggacgcctgggagggtgagagccccgtccggcccgga

SEQ ID NO: 48291 - DNA, 204 bp, Zea mays
agcggcaccatcaggtaagccaagatgggtgcatacaagtacatccaggacagaagcagtctgatgtcatgcgctttcttctgagggtccgctgctggcagtaccgccagctctctgctctccacagggctccccgccccacccggcctgataaagcgcgccgactgggctacaaggccaagcaaggttacgtaatatatagga

SEQ ID NO: 48292 - DNA, 195 bp, Zea mays
ggtacggccaccaccaccggccaggaagcaagctcaaaccctaaccgccggcgatggcccgctacgaccgcgcgatcaccgtcttctcccccgacggccacctcttccaggtcgagtacgccctggaggccgtccgcaagggcaacgccgccgtcgggttccgcggaacggacaccgtcgtcctcggtgtggaga

SEQ ID NO: 48293 - DNA, 191 bp, Zea mays
caaggcaaaggaggggagaagatgtagtccactcacttaaagtttctctggaatggaatctcaaagaagctctctctttcgcgcaatgtcatctgctccaagtgcaagggcaagggctcgaagtctggtgcttcaatgaggtgccctgggtgccagggctcaggtatgaaagtcaccattcgtcagctggg

SEQ ID NO: 48294 - DNA, 181 bp, Zea mays
taggtgatgctggaccaaaaggtgggcctcctggagatctctttgtttgcctgagccatcagatatcaagatggatggtataaacttgtattcaactgtgtcaataagctatcttgaagctattttgggcactgttatgcaagtcagaactgttgatggaaccagtgaccttcgaatacct

SEQ ID NO: 48295 - DNA, 205 bp, Zea mays
cagtcttcccgcgtccgccgattcctcctccttggtcgccgcgtccttgaaaaatggccacacccttcctagcacatgagaagatctggttccacaagttcaaatatgacgacgcagaaaggagattctacgagcagatgaacgggcctgtggcaggtgcctcccgccaggagaacggcgccacgtgatcctccgtgacattgcg

SEQ ID NO: 48296 - DNA, 214 bp, Zea mays
cggctcgagggggaagtgaaactgtgtgagaagatggcccagtttgattgcagagacccaacctaaaaaggacacaccacggaaagagaagggttcacgggaagagaagcagaagccccaggctgagcggaaggaggagaaaaaggcggctgcccctgctcctgaggaggagatggatgaatgtgagcaggcgctggctgctgagcccaaggcc

SEQ ID NO: 48297 - DNA, 247 bp, Zea mays
accgccgccgctgcagtgtccatagcaccgcagagactgagatgggacacgcacaagagcaatgcatacttcaagcgtttccaggtgaagttcaagagaaggcgcgctggcaagacagactacagggccaggataaggctgattaaccaagacaaaaacaagtacaatacacccaaatacagatttgttgtgcgatttacaaacaaggacatcacagcacaaatcatatctgctagtatagcagtga

SEQ ID NO: 48298 - DNA, 158 bp, Zea mays
acacagacaagtggtttccaaagccaagtgtgtgtactagcaaccagcggcagcaggcagccatcatgtcggaggagaagcaccagcacttcttcaaccaccacaagagggacgaggagcagcccgcaggcgagtacgggtactccgagaccgaggtg

SEQ ID NO: 48299 - DNA, 220 bp, Zea mays
ggaccgggccgccggtccgcctcacggcgagaaccgaccggctcgacccatgcgctcctggccttaactggccgggtcgtgcctccggcgccgttactttgaagaaattagagtgctcaaagcaagccatcgctctggatacattagcatgggataacatcataggattccggtcctattgtgttggcattcgggatcggagtaatgattaatggggaca

SEQ ID NO: 48300 - DNA, 244 bp, Zea mays
cataactgctctttatagtcttgctttctgttgattactatgagcattgttgtattcaaagttctgagctatccttaactaactggtgctgtccgaagtggggtgcacaaaagcttttggatttgatattacagctgcttgtagtgggtttttagtcggcttaatcacagctactcgctttatcaaaggcggaggttttcagaatgtcttagtagttggtgcagatgctctttcaaaatacggg

SEQ ID NO: 48301 - DNA, 230 bp, Zea mays
gaagtccgtgtactgcacgccgacacggccggcgttcaaggggtcgcttgtctgatcgtctccaccaggtgctgcgttgggcgctggggtccgtggagatcttcatgagccgccactgcccgctctggtacgcctacggcggccggctcaagtggctggagcgcttcgcctacaccaacaccatcgtgtatcccttcacctccatcccgctcttcgcctactgcacaatc

SEQ ID NO: 48302 - DNA, 232 bp, Zea mays
cggtgctgatggtggaccagcagctaaggcccttcggcccaaatttcaaaaatgtatctgctcatctgggagtagctgtgccacacattgagttgaagcatgtgattgctgctacaattggtcttaagggtcttggaagcctcctttttattttgagcagctctctcggtgcttatctcctgctgctgtaccttgctttgatcactcctatcatccatgacttctacaacta

SEQ ID NO: 48303 - DNA, 141 bp, Zea mays
caacagtgtcctgtccacccactctctcctcgagcacactgatgttcgacaatgaggccatctatgacatctgccgccgctcccttgacattgagcgcccaacctacaccaacctcaacaggcttgtgtccaaggtcatct

SEQ ID NO: 48304 - DNA, 203 bp, Zea mays
cattgagcgcccaacctacaccaacctcaacaggcttgtctcccaccctgacggcttccctgaggttcgatggtgctctgaacgttgatgtgaacgagttccagaccaacctggtgccctacccgaggatccacttcatgctttcgtcctacgctccagtcatttctgctgagaaggcctaccacgagcagctgtccgtggcc

SEQ ID NO: 48305 - DNA, 258 bp, Zea mays
cttggtgagagcgatatgagtgtcccaggtcaatgctcatcccagccacaatttatcggaggagtaaccgctccaatggccccggcactcctcttatcgaaagcatagatgttgatcaaattgttattccagagaaaaacagttggaagaacttattctcatacatagggcctggatttctcgtcacaattgcatatattgatcctggaaactttgagacggatctacaggctggagcacagtacaaatatgagttct

SEQ ID NO: 48306 - DNA, 189 bp, Zea mays
ccctccgacacccaagccgatcccaccgacgtacactcccacacgccaccaagccgcccacctacactccgacgccgccggtgtctcacacccccagcccgccgccaccatactactagaaagcgatgcttacaataccacactgctgtaactctctggagtatttaggtgttctccattattagaagt

SEQ ID NO: 48307 - DNA, 202 bp, Zea mays
attgctttgaacggcaactttgtgaagcttgtgtcctggtacgaggatacagcacccgagtggtcgacctgatccgccacatgaacatcaccaagtaaatgaacaaactgatgaaaacatgcaaagagtgatgaaagcatgcagagagagttgtgtttcttccccggaagtcgctccgagattaaattttcctaaccggatt

SEQ ID NO: 48308 - DNA, 182 bp, Zea mays
acgcatgcgcatgttacgtacccgcggaattcgtgtgagcaggcggagaagaagatcgcgtacgacaagaagctgtgcagcctgctcggtgagtacaccaagggacggttgtcgtaagcagctccaggacatccgccggggtgcgaaagggcgactcggtggtgagcagcgtgaagaacacg

SEQ ID NO: 48309 - DNA, 149 bp, Zea mays
tgcagcgaatgggcgccccaccaccgagggtgaggtaatcgggctacttatcgcagcgctctttgctggatctgaccaggctggagcgtacatgcttcgcttcaagcagtgtgctgcagaagccgtagaggcgcctaaggatatcatga

SEQ ID NO: 48310 - DNA, 152 bp, Zea mays
gttctagatcgcactcgcgtctctttcctagtcgcgccgccgccgatgctgcaagcgccagctgtttgtactacggccactggggcgtcatgcatcagccgcgggaagtgcgtatctacgtcgtcggcgctgtcgtgtcaagagtgacgcct

SEQ ID NO: 48311 - DNA, 138 bp, Zea mays
ccctgaaggctgggcaggtggtgacgatctcggctacaggagctggggccacccacagccgtttgcgatccacctggggctgcgggaacagcctgcgtagtggctctcatcaactccactggtgactaagtggccatg

SEQ ID NO: 48312 - DNA, 137 bp, Zea mays
cttgaaggatgggacagtggtcctgctttttgaagtgagacttcagaatggccttgaatctcgagcaacgaccaggatgctggatgggatgccaaggattgtggataatgagactccatacactaggcgtttttggt

SEQ ID NO: 48313 - DNA, 175 bp, Zea mays
acccaaccggcggcgcagatcgctaccaccgtccaaagatggtgaagttcctcaagcccggcaaggccgttatcctcctccagggccggttcgccggccggaagtgcgcgttttcgaggagggcacccgtgatcgtcactaggggcactgcctagtcgagggcatagcaaagtaa

SEQ ID NO: 48314 - DNA, 159 bp, Zea mays
tgatgtaactggttcagaattcgagctattcatggggttcttgcgaagcttgagcatattcgggtgatctgctcctagacagtcctctcaagaactaattgaaaacaggctgatatgtattcacaattcaacgtttctgacattgaccacattgagagg

SEQ ID NO: 48315 - DNA, 283 bp, Zea mays
ctgtacaaccagattgctacgaacaccttggagcgagtggctcctctgacacatgctgtgggcaatgtgttgaagcgtgtgtttgtcattggcttctcaatcgttgtttttggagcacacaaactggaattggcacgtccattgccatagctggtgttgctatgtactcttacattaaggctaagattgaagaggagaaaaggaaaaagagcgcatgatgagctgactgctgtgaatattttaccttctgcgtctgggacacaacaacaacatcgtcgacaat

SEQ ID NO: 48316 - DNA, 174 bp, Zea mays
gatggagccgttcgtgatcgccaccaaccggcagctcagcgtgacgcaccccgtgcacaggctgctgctgccgcactaccgcgacaccatgaacatcaacgccagaagctcatcaacgccggcggcatcttcgagatgaccgtattcccgcgcaagtacgccatcgagatctcc

SEQ ID NO: 48317 - DNA, 172 bp, Zea mays
agctgacagcattcgggccgagatgtctcgctccgtggccttagctgtgctcgcgctactctctctatctggcctggaggctatccagcgtactccaaagattcacgtcatccagcagagaatggaaagtcaaatttcctgaattgctatgtgtctgggtttcatccatccg

SEQ ID NO: 48318 - DNA, 138 bp, Zea mays
ggcagccatcaggtaagccaagatgggtgcatacaagtacatccaggagctatggagaaagaagcagtctgatgtcatgcgctttcttctgagggtccgctgcgccagctctctgatctccacagggctccccgccca

SEQ ID NO: 48319 - DNA, 235 bp, Zea mays
catcatcatcgcgcacatcatcaccttctcgttctactgcatcatcatcccggcaaccatcttcgtacccgaggtccgcatacccaagtggggctgcgtctacccatcaccctcctcaactctgtcggcactcccaggtctttccacctgcttttcttctgggtcgccttcgagaacgtcatgtccctgcacagaacaaaggcaacgctgatcggcttgctggaggcaggcaggg

SEQ ID NO: 48320 - DNA, 272 bp, Zea mays
ggcgcacagaatccccaagcaaacaaacagggtagaggtagagggagaggagaggagaggagaggagaggagaggttgggtctgggacaccatggctccgacggggcggtgatgtcgtggaacgtgacgaggtgcgcaacggcgctggataaggctggctccgactacgagatcgtgcccatcaacttcgccaccgccgagcacaagagccccgagcacttcgtccgcaacccgtttggtcaggttccagctctgcaggatggtgacttgta

SEQ ID NO: 48321 - DNA, 132 bp, Zea mays
gtgcctttctcaagaaagaataattcaatttcaggccactccatgtccaaaagaaccaaataaagagatgattaatgatggcgcttcctggacaatcattaggcagagtatacattttatgagggaatgggc

SEQ ID NO: 48322 - DNA, 202 bp, Zea mays
atcgagcgcatcctcctctccgccgcacgccgcacgcagaagcagcacccaccgagatagatgaagacgatcctggcgtcggagacgatggacatcccgcggtcacggtggccgccaagctggtcacggtggagggcccccgcggcaagctcacccgaaacttcaagcacctcaacctcgacttccagctgcaggaggccgg

SEQ ID NO: 48323 - DNA, 244 bp, Zea mays
agacaaaggaagtactgccatttcctctgaagctcagcagaatggagagtatccagagaccttcccagcattgagaacttaattcttgaaggcattcctagggatctcaaattacataaaagcattgactgctttttcagtgggactacagcggtggcagtgatcaagcaggaacacaatcttataattggaaatttgggggattcaagagctgtcttaggcaccagagatgaaaataaccagc

SEQ ID NO: 48324 - DNA, 167 bp, Zea mays
cggcttcgttgtcacaaggttcgagttcgtcaccgtctagtacgactgtgcgagggaggaagaggcgaggagaagatgcagatcttcgtgaagacccgaccatcaccctcgaggtggagagcagcgacaccgtcgacaacgttaaagccaaaatccaggacaaggag

SEQ ID NO: 48325 - DNA, 132 bp, Zea mays
cgacgacgtcatcgagatcaagcccttcgccgacaagagtactttctccagagatggcttaagcaccatgactactgctggttatgatgcccctgcagcaaaaggaagaggaagaatcaatacaggggtatc

SEQ ID NO: 48326 - DNA, 271 bp, Zea mays
tcggaatcaacggtttcggaaggatcggcaggctcgtggccaggatcgccctgcagagcgaggatgtcgagctcgtcgccgtcaacgaccccttcatcacatgacctacatgttcaagtacgacaccgtgcacggccaatggaagcacagcgacatcaccctcaaggactccaagacgcttctattcggcgagaagccggtaaccgtctttggcatcaggaaccccgaggagatcccgtggggtgaggctggtgctgagtatgtcgtggag

SEQ ID NO: 48327 - DNA, 167 bp, Zea mays
aaccagtaccgcacccgttcggcccaggcaaagttagccctcaccatgccggtcaaaggaggcaccaagtgcatcaaatacctgctgttcggattttctggcttgccgggattgctgtccttgccattggactatggctccgattcgactctcagaccaagagcatc

SEQ ID NO: 48328 - DNA, 251 bp, Zea mays
ctcgctagctaggcgtttccaccaatggcggcgcccaccacctcccgccgcggccccggcggcgcgcgcaacatggacgatgaaaacctcaccttccgggggtcgaggtcgtcagcagcttcgaccagatgggcatcaaggacgacctcctccgcggcatctacggctacggcttcgaaaagccctccgccatccagcagcgcgccgtcactcccatcatcaacggccgcgacgtcatcgcgcaggcccag

SEQ ID NO: 48329 - DNA, 187 bp, Zea mays
gcgaagtcgtcgccggagcaggaggaagagcgagcagcaagatgtcgtggcaggcgtacgtcgatgaccacctgctgtgcgacatcgtaggccaaccgccgccatcgtcggccacgacggcagcgtctgggcacagtccgagaacttcaccgagttaaagcctgacgaggttgctgggatgatacag

SEQ ID NO: 48330 - DNA, 269 bp, Zea mays
  unsure (1)..(269): unsure at all n locations
agactgtagttctgttcctccccactcactcctgcgcttcctcgccgcgcggttccttctccctgatcctcctttggcttcgcggttcatggcgatgccgctaggncagctggtcgaccgggcgctcggctcaagggccgcgcacacgtctacaggcagcaaaaagatagtcagggtgttctacaaggccggggagtatgccgacaagaaccccaacttcgtcggctgcgtcgagggtgcactcggcatccgcggctggctcgagtcgc

SEQ ID NO: 48331 - DNA, 174 bp, Zea mays
ggcagcggctgcagcgctctcgtcttctgcggctctcgttgccctctccttttcgtttccggaaacatggcctccggtgtggctgtctctgatggtgtcatcaaggtgttcaacgacatgaaggtgcgtaagtcttcaacgccagaggaggtgaagaagcgcaagaaggcggtg

SEQ ID NO: 48332 - DNA, 287 bp, Zea mays
  unsure (1)..(287): unsure at all n locations
aacacgtgcattgatacatanactcgaaattcaactcgagatgaaagttacaattatatttattctagataatcctagaaatagaaaaaacacacaatataccaacattatggaacacttaaattcacccatcttaatactagaaatcttttacatacagagattaaatctaactctgagaatagaaccatgattaaaaacatgataaaggagggaaaaattattccatcagaaataactataaaactattacaggagacaatgataaaaaatgaaaatgacaaatt

SEQ ID NO: 48333 - DNA, 295 bp, Zea mays
ggcggcagccatcaggtaagccaagatcggtgcatacaagtacatccaggagctatggacaaagacgcagtctgatgtcatgcgctttcttctgagggtccgctgctggcagtactgccagctctctgctctccacagggctctccgccccacccggcctgataaagcgcgccgactgggctacaaggccaggcaatgttacgtgatatataggattcgtgttcgccgtggtggccgaaaacgcccagttcctaagggtgcacttacggcaagctgtccatcatggtgttaacag

SEQ ID NO: 48334 - DNA, 256 bp, Zea mays
atggatttgtacaagaagaaatgtgaaggtcccctaagaacaggaatcaggacagggattataagtggcatcggttttggagtttcctttttcttgctgtttggggtctatgcagctagcttctatgccggtgctcggcttgtcgaggacaggaagacaacctttcctaaagttttcagggtttttcttgctcttgcaatggcggcaattggagtgtcgcaatcaagtacccttacatcggattcttccaaagcaa

SEQ ID NO: 48335 - DNA, 185 bp, Zea mays
gttaagcagggagttgatttatccgctgcagccatgagtaagttgcagtctgagtctgtcaaggatgccatctcccagattgttggggatgccaaggagaagaataggaagttcactgagactgtggaacttcagattggtctgaagaattatgatccacagaaggacaagcgtttcagtggctc

SEQ ID NO: 48336 - DNA, 272 bp, Zea mays
gaagcgagaagaccagaaggtgagaagagagagagagagtgtgtgtgatcggtacaaggatcaccgctgtgcctgcgcgtgctgcttcaccgaatcgagtcagatcctgtccgaatccgagctaagggatggcaaccggtagtgaagcctcgaaggcagctgaggctgtggttgactggcataaacacgacagcaagaggatgctccatgcggtttaccgtgttggggatctggaccgcacaatcaagtactacacggaatgctttgggatg

SEQ ID NO: 48337 - DNA, 255 bp, Zea mays
gggaagatggcggacattcagactgagcgtgcctaccaaaagcagccgaccatctttcaaaacaagaagagggtcctgctgggagaaactggcaaggagaagctcccgcggtactacaagaacatcggtctgggcttcaagacacccaaggaggctattgagggcacctacattgacaagaaatgccccttcactggtaatgtgtccattcgagggcggatcctctctggcgtggtgaccaagatgaagatgcag

SEQ ID NO: 48338 - DNA, 286 bp, Zea mays
ggcgatcaataaactcctagtccagtcgccatgggtcatttcacagaggaggacaaggctactatcacaagcctgtggggcaaggtgaatgtggaagatgctggaggagataccctgggaaggctcctggttgtctacccatggacccagaggttctttgacagctttggcaacctgtcctctgcctctgccatcatgggcaaccccaaagtcaaggcacatggcaagaaggtgctgaattccttgggagatgccataaagcacctggatgatctcaagggcactt

SEQ ID NO: 48339 - DNA, 288 bp, Zea mays
gtgacgcatgtgctccattgattgccaccctgccattggaggtccgcgcaaagataggtggtttcattagagctgtattttctgttttccaagacttggatttctcatttcttgagatgaacccattcaccttggtaaatggtgaaccgtatcctctggatatgagaggagaactagatgacacagctgctttcaaaaacttcaataagtggggcaatattgtgtttcccctaccatttggaagagttctcagtccctccgaaagttttatccatgaactggatgaga

SEQ ID NO: 48340 - DNA, 296 bp, Zea mays
gacggtggctggggagcccatggtggtggcgctttctccggcaaggacccaaccaaggttgacagcagcggagcctatgtcgcaaggcaggctgccaagagcatcgtcgccagcggccttgctcgccgcgccatcgtccaggtgtcttacgccatcggcgtgcccgagcctctctccgtgttcgtcgacacgtacggcaccggcgcgatccccgacaaggagatcctcaagattgtcaaggagaacttcgatttcaggcctggcatgatcatcatcaaccttgacctcaagaaagg

SEQ ID NO: 48341 - DNA, 285 bp, Zea mays
ctctgtcccctaggtatggaatcttgcggcatccacgagaccaccttcaactccatcatgaagtgtgacgtggacatccgcaaagacctgtacgccaacacggtgctgtcgggcggcaccaccatgtacccgggcattgccgacaggatgcagaaggagatcaccgccctggcgcccagcaccatgaagatcaagatcatcgcacccccagagcgcaagtactcagtgtggatcggcggctccatcctggcctcactgtccaccttccagcagatgtggattagc

SEQ ID NO: 48342 - DNA, 277 bp, Zea mays
gacaaagataccttgggaaagtggttctcctcatgtccaagattggggattgcagctgaacatggttacttcttgaggtggtctagagaagaagagtggcaaacatgcactcaggcattggacttcggatggatgcaaatggcgaagcagtgatgaatttatatacagaagcaactgatggatcctacattgaggccaaggaaagtgccttggtgtggcaccatcaggatgctgacctaggctttggatcctcacaggcaaaggagatgcttgatca

SEQ ID NO: 48343 - DNA, 205 bp, Zea mays
gcgcgactcaaagcttcttccaggtcctaccggcgatgctggagctccacaccattacgtcgacacaatgatggagtgtatctcgatctacatcggacaagtcggtatcgaggtcggtaacgagtgctgggaggtctaatggttcgagcatggcattcaggctgttggtgcagatgccaggtgataagaccattgggggttgtga

SEQ ID NO: 48344 - DNA, 190 bp, Zea mays
cagcattcgggccgagatgtctcgctccgtggccttagctgtgctcgcgctactctctcttttcggcctggaggctgatccagcgtactccaaagattcaggtttactcacgtcatccagcagagaatggaaagtcaaatttcctgaattgctatgtgtctgggtttcatccatccgacattgaagttga

SEQ ID NO: 48345 - DNA, 254 bp, Zea mays
cgcattcgttccaactcctgagcactttctcctcgtccccgacaagccaatcgaagccgagatacggccatggactccaccggcaccggagcagggggtaaggggaagaagggagcggccgggcgcaaggtcggcgggccaaggaagaagtcggtgtcgaggtccgtgaaggccgggctccagttccccgtcggccgcatcgggcgctacttgaagaagggccgctacgcgcagctgtccggcaccggcgcccc

SEQ ID NO: 48346 - DNA, 291 bp, Zea mays
gcggacgcggcggcaagatggcagtgcaaatatccaagaagaggaagtttgtcgctgatggcatcttcaaagctgaactgaatgagtttcttactcgggagctggctgaagatggctactctggagttgaggtgcgagttacaccaaccaggacagaaatcattatcttagccaccagaacacagaatgttcttggtgagaagggccggcggattcgggaactgactgctgtagttcagaagaggtttggctttccagagggcagtgtagagctttatgctgaaaaagtgg

SEQ ID NO: 48347 - DNA, 177 bp, Zea mays
cagacaagtggtttccaaagccaagtgtgtgtactagcaaccagctagctcgggcggcacaggcagccatcatgtcggaggagaagcaccaccacttcttcaaccaccacaagaaggacgaggagcagcccgccggcgagtacgggtactccgagaccgaggtggtcaccgccaccg

SEQ ID NO: 48348 - DNA, 259 bp, Zea mays
gtcttacagcttgaggaatgcaaccgtgttactcttgttggtattcttgctttcctcaactgcagccagaagttcagggctctctctttggtgaaatgcatggggatcaaggatatctgctctgtgccacaacttcctttttgccgttcacttcgtttccttacaattcaggagtgcccaggtttcaacaatgcaagcttggccgtggtagggatgatttgccctcagttggagcaggttgacttgagtggtcttggtg

SEQ ID NO: 48349 - DNA, 182 bp, Zea mays
gccgggttgtatttggaaacgcggagtgagtttttccgtgctgtgtatgggctacaatggacacccagaaggacgttcaacctccaaagcagcaaccaatgatatatatctgtggagagtgtcacacagaaaatgaaataaaatctagggatccaatcagatgcagagaatgtggatacaga

SEQ ID NO: 48350 - DNA, 188 bp, Zea mays
ggccatcgcctcttggtttggcttcatcaacataaagctcatagccaccaccaatgtcagagccactgagctcaagggctttagacacagagtcctgatccttgaagtctatgtaagccattccttttattgcaccagattcatgatcagtcgggatagagacccttgtcatctcaccacaatcacta

SEQ ID NO: 48351 - DNA, 274 bp, Zea mays
gtcccaactgcaaggttctggtggttgccaacccagcaaacaccaatgctcttatcttgaaagaatttgctccatctattccagagaagaacgttacttgcctgacccgtctggaccacaacagggctcttggccagatttctgagagacttaatgtccaagttagtgatgtgaagaatgttatcatctggggtaaccactcgtcctctcagtaccctgatgttaaccatgccacagtgaagacttccactggggagaagcctgttcgtgagct

SEQ ID NO: 48352 - DNA, 285 bp, Zea mays
cgccgccaccaggcgcagcgtctttcgtcatctctcctccggccaagaacccccagtcgcccaccacatcacttgttcaactttgttgaggggtgatggcggttcctttcgcaaacctcagatccgaggcagggcttacaaagcttgatgagtaccttctcactcgcagctacatcactggctaccaagctctccaaggctgagcttggctgttctagacttgtttttgtctgctacctcgtccaagtacatcaacgtagcaaggtggtttaatcacattgatgc

SEQ ID NO: 48353 - DNA, 314 bp, Zea mays
cgcagcaacaacaagttcacctacaactgcgacggtcacactttcaattacctcgtggaagacggattcacatactgtgttgttgctgttgaatcggtggggcaacaaattcctattgctttcatggatagggttaaggaggatttcacaaaaaggtatggtggtgggaaagctgctactgctgcagctaacagcctcaatcgagagtttggatcaaaacttaaagaacacatgcagtattgtgtggatcaccctgaagaggttagcaagctggccaaagtgaaggcgacggtttcagaagtcaagggtgttat

SEQ ID NO: 48354 - DNA, 299 bp, Zea mays
accacctgcaactacccgagaccatcgacgagcatcttcctgcatctgcaatggctgccgctaccgtgtccgtcccccgcatcaagctgggctcccaggggctagatgtctccgcgcagggcctcggctacatgggcatgtccggcttctacggtccgcacaaacccgatcctgacatgatcaagctcatccaccacgccgtggccgaaggggtcaccctccttgacacctccgacatgtacggcccgcacaccaacgagatcctgctaggcaaggtgtttcaacgcggtgtaaaggag

SEQ ID NO: 48355 - DNA, 319 bp, Zea mays
cgcacatcagctccatcgtttatccctggacgtccattcctctcctggcttactgtaccttgcctgccatctgcctgctcacggggaagtttatcacaccagagcttaccaatgtcgccagtatctggttcatggcacttttcatctgcatctccgtgaccggcatcctggaaatgaggtggagtggcgtggccatcgacgactggtggaagaacgagcagttctgggtcatcggaggcgtttcggcgcatctgttcgcggtgttccagggcctgctgaacgtgttcgccggcatcgacacgagcttcatcgtgacgtc

SEQ ID NO: 48356 - DNA, 301 bp, Zea mays
gtcgctccgggcagtgcctgtgccacaccagcgacgtccccggcaagctgatatacgggcagtactgcgagtgtgacaccatcaactctgagcgctacaacagccaggtctgcggcggcccggggccggggctctgcttctgcgggaagtgccgctgccaccgcggctttgagggctcagcgtgccagtgcgacaggaccactgagggctgcctgaacccgcggcgtgttgagtgtagtggtcgtggccggtgccgctgcaacgtatgcgagtgccattcaggctaccagctgcctctgtg

SEQ ID NO: 48357 - DNA, 311 bp, Zea mays
  unsure (1)..(311): unsure at all n locations
cgnctcggaggcgttcagctgcttcaagatgaagctgaacatctccttcccagccactggctgccagaaactcattgaagtggacgatgaacgcaaacttcgtactttctatgagaagcgtatggccacagaagttgctgctgacgctctgggtgaagaatggaagggttatgtggtccgaatcagtggtgggaacgacaaacaaggtttccccatgaagcagggtgtcttgacccatggccgtgtccgcctgctactgagtaaggggcattcctgttacagaccaaggagaactggagaaagaaagagaa

SEQ ID NO: 48358 - DNA, 309 bp, Zea mays
ctagtcccctgctccattctcagccgccgccaatcccttcccgtactccgcaaccgctgagtgagaagaagagatggccggctaagatccatggcccggctatcggcatcgatctcggcacgacgtactctagcgtcggcgtgtggcagcacgaccgcgtcgagatcattgccaacgaccagggtaaccgcaccacgccctcgtacgtcgccttcaccgactccgagcgcctcatcggagatgcggccaagaaccaggtcgccatgaaccccatcaacaccgtctttgatgccaagcgtctcatcggca

SEQ ID NO: 48359 - DNA, 302 bp, Zea mays
catttctccgatccgcccaggccaccatggcggaggatgctacgagcagccacccgtcacgctacgtcaagctcaccaaggaccaggacgcccccgccgaggacatccgccccggcgagctcaaccagccagttcacgtcccgcagctcgaaggccggaggtgtagcgagtgcggtcaggtcctgcccgagagctacgagccgcccgccgacgagccctggaccaccgggatcttcggatgcaccgatgacccagagacctgccgaactggattgttttgcccctgcgtgctgtttgggcgc

SEQ ID NO: 48360 - DNA, 304 bp, Zea mays
cttgaaggaaaaactgttgggactgttggggctggtcgtattggaaggctcttgcttcagcgtcttaagccctttaactgcaacctgctttaccatgacagacttcagattgacccagagcttgagaaagaaattggggccaaatttgaggaggacctggatgctatgcttccaaagtgtgatgtgattgtaatcaacacacctcttacggagaaaacaagaggcatgtttaacaaagagaggattgcaaagatgaagaaaggtgtaattgttgtgaataatgctcgaggagcaatcatggatg

SEQ ID NO: 48361 - DNA, 302 bp, Zea mays
agcaaggtgatgttgttgtgttgcctgcatttggagctgctgtggaggagatgtatacgctaaatgagaagaaggtgcagattgttgatacgacatgcccttgggtttcaaaggtctggaatatggtcgaaaaacacaagaagagtgaatatacttcaattattcatggaaagtattcccatgaagaaactgttgccactgcttcttttgcaggaaagtacatcattgtgaagaatatggcagaggcaacctatgtgtgtgattatatacttggtggccaacttgatgggtctagctcaaca

SEQ ID NO: 48362 - DNA, 307 bp, Zea mays
gacccaaggcatgggaagtacatggcttgctgcttgatgtaccgtggtgatgttgttcccaaggatgtcaatgctgcagtcgcaaccatcaagaccaagagaactgtccagtttgtggactggtgccccaccggattcaagtgtggcatcaactaccagccaccgtctgttgtccctggaggcgacctggcaaaggtccagcgtgccgtgtgtatgatcagcaacaacactgccgttgctgaggtgttctcgcgcatcgatcacaagttcgaccttatgtacgccaagcgggcgttcgttcactggt

SEQ ID NO: 48363 - DNA, 311 bp, Zea mays
gtccaccctccgccgccggcgtctctccaaaacccaaccaaaccctagatccgccgcactcagttccggtgagaccctcctttccagcgataatgccgaacctcgagtgccggatgtatgagcagcggttcccggaggtggacgccgcggtgatgatccaggtgaagcacatcgctgacatgggcgcgtacgtctcgttgctcgagtacaacaacatcgagggcatgatcctcttctccgagctctcccgccgtcgtatccgctccatctcctccctcatcaaggttggccgccaggagcccgccatcgtg

SEQ ID NO: 48364 - DNA, 304 bp, Zea mays
tactccaccgaattcggctcgagcaccactctactgacgcccgacgactagtgtaacattttacttcagctcatgggtaaggagacagactcacattctcattgtggtcattggccatgtcgactctggcaagtcgaccaccactggccacctgatctacaagcttggaggtattgacaagcgagcgattgagcggttcgagaaagaggctgccgagatgaacaagcggtcattcaagtatgcgtgggtgcttgacaagctcaaggctgagcgtgagagcggtattacaattgatattgccctg

SEQ ID NO: 48365 - DNA, 295 bp, Zea mays
  unsure (1)..(295): unsure at all n locations
aacagccgactcgcaagatggcgccgcagaaagacaggaagcccaagaagtcaacctggaggtttaatttggaccttactactccagtagaagatggaatttttgattctggaaattttgagcaatttctacgggagaaggttaaagtcaatggcaaaactggaaatctcgggaatgttgttcacattgaacgcttcaagaataaaatcacagttgtttctgagaaacagntctctaaaaggtatttgaaataccttaccaagaaataccttaagaagaacaatcttcgtgattg

SEQ ID NO: 48366 - DNA, 300 bp, Zea mays
ctgcaagagtgacaatcctgatgctgcctggtacacacagatggaagcctgtgttactccactgcctgaagtgagcaaccagggagaagtggctgggggagcggtggagaaatggccagagagggcgttcttggttccccccaggatcaaaaggggcatgattccaggactggacgccaagaagtttgacgaggacaagaagctttgggagaagagggtggcctactacaagcgcaccataccaattgcagagaacaggtacagaaatgtgatggacatgaacgccaacatgggtgggtt

SEQ ID NO: 48367 - DNA, 297 bp, Zea mays
gaatgctctcctggaggctctctttggtggtgtgggtaagggattcaccaaagaggttgtgaagaacaagaagtaccttgcagttgctgtgccagatgagggtgcccagacccttctggttcaggccattgaggactttggtggtaagtgcaaccctgaggcgctgaaggaggttcccgttgtcctcaaagccctctacgatggagatatcctggacgaggaaaccattgtggactggtacaatgatgctgtcgcagctgggaaggactcccaggttgtcaagaatgccaagccgtt

SEQ ID NO: 48368 - DNA, 295 bp, Zea mays
gagggaactatgttgcaggagttgccctgggcagatgcgttgagggcgcgtatgaaagtgcctcgcaaatatctgacttcttgaccaagtatgcctacaagtgatgaaagaagtggagcgctacttgttaatcgtttatgttgcatagatgaggtgcctccggggaaaaaaagcttgaatagtattttttattcttattttgtaaattgcatttctgttcttttttctatcagtaattagttatattttagttctgtaggagattgttctgttcactgcccttcaaaagaatttt

SEQ ID NO: 48369 - DNA, 298 bp, Zea mays
ccgcgatctgaagcgactagtcgaaggcggcggcggcgatggggagcgaccaggagacggagaagaagaagaccccggtggcactaatgcccatcgcgaacccctcgcaggaaagaagctctgcaagcggaccctcaagctcgtgcgacgagcctctgaggccaagtgcctcaagcgcggagtcaaagaggtagtcaagagcattcgccgcgggaacaaagggttgtgtgtgattgctggaaatatttctcctattgatgtgattacacacgttccaatactatgtgaggaatctaat

SEQ ID NO: 48370 - DNA, 296 bp, Zea mays
ctcgagccgcgcaatcctacacgggatacgagctcaccagcatgcatgccattcgggcaagacataatccatatgtgcaagccaggagcaggatagatcagctcaagaggctagggcatagcgtggataaggtcgaattcatcttgatggatgggactttcatgtccttaccagctgaatatcgtgattatttcatcagaaatcttcatgatgctttatcgggtcacacttctgcaaatgttgaggaggctatttgttattcggaacatagtgctgtcaaatgtattggtatgacg

SEQ ID NO: 48371 - DNA, 270 bp, Zea mays
cagcgatgtctccaccaccgctgctgcaacccctgctgctgatgctgcctctgctgaatgtggagccttccggggccacactgagccgcatccctcttcatcgagtccaacctggacgcaggatcctgaacctactgaggggatggagagaaccaggagagctccccaagttgggggccccatcccctggggacaagcccatcttcgtacctctctcgaactacagggatgtgcagtattttggggaaattgggctgggaacgcctccac

SEQ ID NO: 48372 - DNA, 301 bp, Zea mays
tggtcagtgacgattgagaaacccgtagtcggagcagaggaggggtagaggatggtgttcggtcaggtggtgatcggcccgccgggctccggcaagaccacctactgcaacggcatgtcgcagttcctctccctcctcggcaggaaagttgcggttgtcaatttggaccctgcaaatgacgcattgccatatgagtgtgccataaacatcgaggacctcataaaactcagtgatgtcatgtctgagcattcgcttggccctaatggagggcttgtgtattgcatggattacttggagaaga

SEQ ID NO: 48373 - DNA, 278 bp, Zea mays
gccaaggagttttcggtggctcagctgggtaaccggggatcaccatggtgggctcattggtggggaagaagatcgtgtctgtaacggggaacgccaagaagctggaggaggtcgttcagattctaggcgataagtttccatgcactttggtggcacagagaattgacctgccggagtaccagggggagccggatgagatttccatgcagtgatgtcaggaggcagttcgccaggtacaggggcccgtgctggttgaggacattgtctgtgcatcaatg

SEQ ID NO: 48374 - DNA, 299 bp, Zea mays
ggagagtacgtggaggagcagccatggcttcatcggtggccgccgcggcgagcacattcctgggcacccgcctggcggacccggcgccacagaacgggcgcatcgtggcccggttcgggttcgggttgggcggcaaggcgaagcctgctccgaagaaggtggcgaagacatcgacctcctctgaccggccgctgtggttccccggcgccgtggcgccgactacctggacggctcgctggtcggcgactacgggttcgacccgttcggtctcgggaacccgtggagtacctgcattcgag

SEQ ID NO: 48375 - DNA, 299 bp, Zea mays
gcgataatgaagactattctcagcaatcagacagtcgacattccagaaaatgtcgacattactctgaagggacgcacagttatcgtgaagggctccagaggaaccctgcggagggacttcaatcacatcaatgtagaactcagccttcttggaaagaaaaaaaagaggctccgggttgacaaatggtggggtatcagaaaggaactggctaccgttcggactatttggagtcatgtacagaacatgatcaagggtgttacactgggcttccgttacaagatgaggtctgtgtatgctca

SEQ ID NO: 48376 - DNA, 299 bp, Zea mays
gagacccaagcagctggaggctctgtgtgtgggtcgctgatttcttggagcctgaaaagaaggagcagcgactggacccagagccatgtggctgtgccctctggccctcaccctcatcttgatggcagcctctggtgctgcgtgcgaagtgaaggacgtctgtgttggaagccctggtatccccggcactcctggatcccacggcctgccaggcagggacgggagagatggtgtcacaggagaccctggccctccaggccccatgggtccgcctggagaaacaccatgtcctcctggga

SEQ ID NO: 48377 - DNA, 290 bp, Zea mays
aaagtaacgaaaccacaaataaaaactcagctgagacagtttctggtttcctatatgatatgctgcaaaaagaggtaatttctttgagaaagtcatgccatgaaaaggatcagattctaaaagataaagatgatgctattgagatgttagcaaagaaagtagacaccttaaccaaagcaatggaagtggaggctagaaaggtcagacgagaggttgcagccatggagaaagaagttgcagcaatgcgtgccagtaaagaacaagaaaccagagccaagctgcttggtacg

SEQ ID NO: 48378 - DNA, 275 bp, Zea mays
atggactgaaaatatcatactagtaaggtgttactagtagaacacgatgcaggagaatcgtgctagaaaagatgtctacaacagtgagtactaccacttccgcgcgcctgagtgcagctgcgctggatgtcccccgaggccatcctggagggtgacttctctgaccacggtctgatgtctgggccttcggtgtgctgatgtgggaagtgtatacacatggagagatgccccatggtgggcaggcagatgatgaagtactggcagatctgcaggct

SEQ ID NO: 48379 - DNA, 287 bp, Zea mays
gttcgatctgtgcagcagatctgaggtcccgggcgaccgtgaagcagcttcaatcgtcggcatggcgctcgtattgcatagtggggctggaaacaagaatgccttcaaagcacttattgctgcagaatacagtgggatcaaggttgagttgaccaaggattttgcgatgggtgtctccaacaagacccctgagtttcttaagatggagccccttgggaaggttcctgttctggagactcctgatggcactgtttttgagagtaatgctatcgcacgctatgttgctc

SEQ ID NO: 48380 - DNA, 258 bp, Zea mays
agagagcgagctgagtggttgtatggtcgcgtctcggataccggtagcgcttgcagcatggctgaccaactgactgaagagcagattgcagaattcaaagatgctttttcactatttgacaaagatggtgatggaactataacaacaaaggaattgggaactgtaatgagatctcttgggcagaatcccacagaagccgagttacaggacatgattaatgaagtagatgctgatggtaatggcacaattgacttccct

SEQ ID NO: 48381 - DNA, 287 bp, Zea mays
gttcgttgggcggtgctggtttttcgctcgtcgactgcggctcttcctcgggcagcggaagcggcgcggcggtcggagaagtggcctaaaacttcggcgttgggtgaaagaatatggcccgaaccaagcagactgctcgtaagtccaccggtgggaaagccccccgcaaacagctggccacgaaagccgccaggaaaagcgctccctctaccggcggggtgaagaagcctcatcgctacaggcccgggaccgtggcgcttcgagagattcgtcgttatcagaagtcg

SEQ ID NO: 48382 - DNA, 290 bp, Zea mays
gcgcaggatcaaggtgaaaaggagaaccccatgcgggaacttcgcatccgcaaactctgtctcaacatctgtgttggggagagtggagacagactgacgcgagcagccaaggtgttggagcagctcacagggcagacccctgtgttttccaaagctagatacactgtcagatcctttggcatccggagaaatgaaaagattgctgaccactgcacagttcgaggggccaaggcagaagaaatcttggagaagggtctaaaggtgcgggagtatgagttaagaaaaaacaa

SEQ ID NO: 48383 - DNA, 285 bp, Zea mays
gtcttgccagtgtcaagcaccagggtgacgataaatgtaatggtgtagacactcgcttgagcacttgtgatcctcatgcgagcacatttgtaataaactctgattctcctcaggaagttgaagttggcaaggaaatcatattcacatatgatgttcgccttgaggagagtgagatcaagtgggcgtcacgctgggacacctacctgttgatgaccgatgatccgattcactggttgtctattgtgaactctctcatgatcgtgattatcctatcaggcatggttg

SEQ ID NO: 48384 - DNA, 170 bp, Zea mays
cagagacccaagcagctggaggctctgtgtgtgggtcgctgatttcttggagcctgaaaagaaggtaactgggcatatgagggacagatggagtgagtcagagcagcgactggacccagagccatgtggctgtgccctctggccctcaccctcatcttgatggcagcctc

SEQ ID NO: 48385 - DNA, 290 bp, Zea mays
cccggatcgagggagggcacgcagacgcggaggagggaggatgagtctcttcgggcttggacggaaccagaagacattccgccccaagaagagcgctccatcaggcagcaagggagcacagctccgtaagcacatagatgccactctcggcagtggaaaccttagggaagctgtgaggttgcctcctggagaggatatcaatgaatggcttgctgtcaataccgtggatttctttaaccaagttaatatgctgtatggcacgctcacagaattctgcacacctgagagct

SEQ ID NO: 48386 - DNA, 288 bp, Zea mays
caactgagaagagatgcgcctgcgcctgcgcctgcgggaaagggagaacatggtggggaagaagaggggtgttatctccccgctggaccatctcgctgggctgctggaggtgcgcgtggtgaggggagtggacctcgccatccgcgacctccgatccagcgacccctacgtcgtccttcgcatcggcaaggcgcagaaagtgaagacgcgagtggtcaagaagagcatcaatccggaatggaacgaagaactcaccctctctattgaagaccctgcagttcctattag

SEQ ID NO: 48387 - DNA, 288 bp, Zea mays
cggctctgcaacgttgtccatggcatatgctggtgctgtttttgcagatgcatgtttgaagggtctgaatggagttccagacattgtagagtgctcttttgtgcaatcaactgtgacagagttgccattctttgcctccaaggttcggctcggcaagaatggagtggaggaagtgcttggtctgggtgagctcaacgagttcgagaagaaggggctggaaaacctcaagggcgagctcaagtcttccatcgacaagggtatgcaatttgcccacgggaactaggcact

SEQ ID NO: 48388 - DNA, 155 bp, Zea mays
gccaccaatgggccccggggccagcgacctgacagttacaggactgaagtctttctccagcccctccctctgcagcctgaacaccctgctagcaggaacctcacgcctaccacatgcctcgagcacaggcaaccttggcctcctctgcagaagtg

SEQ ID NO: 48389 - DNA, 288 bp, Zea mays
ggcggctgcggcggacacggaggcgaaggaggaggagcagcagcagcaggcggcgccgaaggagcggcatcccactcagtgcttgcaaccatggctaggggattgaagaagcacttgaagaggctcaatgcgcccaagcattggatgctcgacaagcttggcggagcttttgctcccaagccatcttctggacctcacaagtccagggagtgccttcctctgatcctcatcatcaggaacaggctcaagtatgctctgaactcacgtgaggtcatttctatcctgatg

SEQ ID NO: 48390 - DNA, 288 bp, Zea mays
cgttcctctccgccccgcttgcgccgcgcctccgcccccgtctcctgtgagatcagctccggcggcacgcggatatgactacttcaaggcgtcttgctgacaggaagagtgcaaagttccagaagaacatcacaaagaggggttctgtgcctgagaccacggtgaaaaagagcaatgactaccctgttggacctatagttcttggattcttcatttttgtggtcattggatcatccttgttccagataatcaggacagcgacaagcggtgggctggcctgaattcact

SEQ ID NO: 48391 - DNA, 152 bp, Zea mays
gttgggcgcagagaatccccaagcaaacaaacagggtagagggagaggagaggagaggagaggagaggttgggtctgggacaccatggctccgatgaagctgtacggggcggtgatgtcgtggaacgtgacgaggtgcgcaacggcgctgga

SEQ ID NO: 48392 - DNA, 283 bp, Zea mays
aggaatttgcaagggcggagtgcagattcaacatggggctctgttagggctgcaatggggcaccctgaacctttcctggtcaaacatgtcgcaattggaaatgaagattgcgggaaaaagttctaccgtggtaattacctcaaattctacaatgctataagagaggctatccagacattcagctgatttcaaactgtgatggttcatctagaccacttgaccatcctgcggattagtatgattgacatgtctatactgattctaagactttgtttaacatgag

SEQ ID NO: 48393 - DNA, 261 bp, Zea mays
catcatagatcattgatttcttcctgggggcctctctcaaggatgaggttttcaagattatgccagtgcagaagcagactcgtgccggccagcgcaccaggttcaaggcatttgttgctatcgcggactacaatgggcacgtcggtctgagtgttaagtgctccaaggaggtggtcaccgccatccgttgggagatcatcctggccaagctctccatcgtacgcgtgcgcacaggctactggtgggaacaagatcggcaag

SEQ ID NO: 48394 - DNA, 279 bp, Zea mays
ctacatcagcacaattggagttgactttaaaattaggacagaagagcaagacgggaagaccataaagcttcaaatttgggatactgctggacaagagcgcttcaggacaatcactagcagctactaccgcggagctcacggaatcattattgtatatgacgtgacagaccaagaaagcttcaataatgtgaagcaatggttaaacgagattgaccgttatgcaagtgacaatgttaacaagctccttgttgggaacacgagcgatctaactgctaacaa

SEQ ID NO: 48395 - DNA, 280 bp, Zea mays
gccaaccggaacaatgacgccctgcgccaggcaaagcaggagtccactgagtaccggagacaggtgcagtccctcacctgtgaagtggatgcccttaaaggaaccaatgagtccctggaacgccagatgcgtgaaatggaagagaactttgccgttgaagctgctaactaccaagacactattggccgcctgcaggatgagattcagaatatgaaggaggaaatggctcgtcaccttcgtgaataccaagacctgctcaatgtcaagatggccttgacat

SEQ ID NO: 48396 - DNA, 148 bp, Zea mays
cggctcgagcctgcagcaagatggatgtgggcagcaaagaggtcctgatggagagcccgacggttctggagatgagcattggggcgccggaagcccagcaacgcctggccctgagtgagcacctggttaccactgccaccgtctccat

SEQ ID NO: 48397 - DNA, 201 bp, Zea mays
agatattcccacggccaactgctggccctcttcgccccattgtgcaatgccagactctcaagtacaacatgaagtcgagggctgggagaggatttacccttgaggagctgaaggctgccggcattccaaagaagcttgccccaaccattggcatttctgtggatcaccaccgcaagaacaaatatctcgagggactgcagg

SEQ ID NO: 48398 - DNA, 242 bp, Zea mays
acatgccttgtattgcaaagagcctgtggctacgagttctgagctcttgtcctatatgcatcttacttatgagatctgtccattcttcaagttcggttacatgtctgccaatggtgccatagctgaagcggttaagggggaagacattattcacatcatcgattttcaaatcgctcagggtagtcagtggaactgtacaggcccttgcttcaaggcctgggaggcgaccatacctaaggatc

SEQ ID NO: 48399 - DNA, 279 bp, Zea mays
tccctcaccgacgaactcggaatttcacctccttcgccatcatcccatcgcgtcggagaagaagcagtcgaacccgatgcgggagatgaaggtccagaagctcgtgctcaacatctccgtcggcgagagcggtgatcgcctcacccgcgccgccaaggtactggagcagctgagtggccagtcaccggtcttctccaaggcaaggtacactgtgagcgtgggaccggcgcaatgagaagatcgcatgctatgtgacggtgcggggtgagaaggcagaga

SEQ ID NO: 48400 - DNA, 254 bp, Zea mays
gccgatccgagcgcggcccagcggctcagagtccagggggagggagctcgcggcggctgaggaaggcgttcaccaccgtcgcggtgagtgctcccagtcaagcgcctcttccttcgtagtgtcaacaattccgccccgcgcccgcgcggatctgattgtctcgatcgtccaatcgagcggatttcattgaggaagtgggtctcctttgggaagctgttcagccgcctcttcgccaagaaggagatgaggatgct

SEQ ID NO: 48401 - DNA, 256 bp, Zea mays
acgaaaccacgcgcacccgagcccttccaaaccctaagctcgcctcccctcccccccaaacaccaccgcgcacctatggcgaagtacggcgagggcgacaagcggtggatcgtggaggagcgcgccgacggcaccaacgtccacaactggcactgggcggacgcgactgcctggagtggtcacgcgcgcggctctcctgctcgcgggcctcaccatcctcgacggcgagggcggcctcagtctccgcaccgtgctt

SEQ ID NO: 48402 - DNA, 278 bp, Zea mays
ctagcaggaagtaagctcggcattcaaagtcatagaagagtattgtattgttgcaccagatacagaaatattctgtgagggtgagcctattaagagggaggatgaggaaagactcgatgaagttggctatgatgatgttggtggagttagaaagcagatggcccaaatcagagaactggttgaacttcccctgcgtcacccccagcttttcaatcatgtgtgaagccaccaaagggaatattgctgtatgggcctcctggctctggcaagacccgtgt

SEQ ID NO: 48403 - DNA, 125 bp, Zea mays
tacagaaggtggtggatctggatgactatgctcaggaggacgaggactacgaggagaagctgaagaaggaaactgtggcgctgttcttcttagcaacatatggggatggagagccaactgataac

SEQ ID NO: 48404 - DNA, 242 bp, Zea mays
caccagaaacagaaaaggaacgccagtgcggcgacaatgaccggcagtggaagcacgggcgccaatggcaagagccagagctccagggccaaggcaatgctgctcgccttgggcaagagctgtcctgaccaagttctgcctcaggagaaggttgtggagagctacctccaagaaagcagctgcgacgatcccgcacagcagcttcagcccctttgcacgactacaacagtgaaaaccaggtg

SEQ ID NO: 48405 - DNA, 255 bp, Zea mays
gtgcagggcgcgagccccaagaggctgacctacgacgagatccagagcaaaacgtacatggaggtgaagggcacgggcacggcgaaccagtgcccgaccatcgacggcggcgtggagtcgttcccgttcaaggccggcaagtaccagatgaagaagctgtgcctggagccgacgtccttcaccgtcaaggcggggctccaagaacgccccgcgcgatttccagaggaccaagctcatgacccgcctcacgtacat

SEQ ID NO: 48406 - DNA, 225 bp, Zea mays
gtctccacatgctcgtggttggctcggcgcgctgcaagacggtgaagagagacgtgaaagcattgaatgagatcaaatcttcactaggctggagagttgtatactcatgggtcggtgatgatccttgtgggcatggtgatctacccccctggtctggtgtgacatgttctcagcaaggggattacagagtggcgaactggaagtctatgctgtatcaatagttgg

SEQ ID NO: 48407 - DNA, 256 bp, Zea mays
cgtcttctccctcccaaatcggatctccaggccggcagaagttgagcggactgactggtcactgtagttcgatcgaatccgagtagggctgatacagttcgattcggcgggaggcatggcgtccgaaaagcacttgaagtacgtcatcctcggcggcggcgtcgcggcggggtccgcggcgcgggagttcgcacaggagttaagcctggggagcttgcaatcatctccaaggaggctgtggctccttacgagagca

SEQ ID NO: 48408 - DNA, 252 bp, Zea mays
aggaattctagggtcgaccccgagctccgaatgccgcagcatcaggcgcggcccccctcgcgtgtgaccgagatggcgctgccgaatcaggggaccgttgattaccccagcttcaagctcgtcatcgtcggcgatggtggaactggtaaaactacatttgtgaagaggcatctcactggagagtttgagaagattaccaccattggtgtggaagttcacccgttggatttcaccactaactgtggtaagagc

SEQ ID NO: 48409 - DNA, 252 bp, Zea mays
agacgagtcccacattcctgggctctaccgtgtcgtccatggcatcgatgttttcgatcccaagttcaacattgtctcccctggagcagacatgagtgtttactacccgtatacggaaaccgacaagagactcactgccttccatcctgaaatcgaggagctcatctacagcgacgtcgagaactccgagcaagtcgtgaaggacaagaagaagccgatcatcttctcgatggcgcgtctcgaccgcgtgag

SEQ ID NO: 48410 - DNA, 254 bp, Zea mays
agctgcgctgcgcccgccgccgaatccgagactctgatctcgggttcaccgcagcgcacagagcacccccgactcccgtcccgatccgcgctctcctctacgacgcttcagtcatggcaggaatggcacccgagggttctcagtttgatgctaagcactatgattctaaaatgcaggagctgctgagcactggtgcgggagttcttcacttcatatgatgaagtttttgaaagttttgatgacatgggcctttt

SEQ ID NO: 48411 - DNA, 254 bp, Zea mays
agccggcatgaagatcgtcagggagttgaacgagcacccgcgtcgggagttcacgacggaggacgagacggacagcgacgacatgggcgacgagtacaccgacgacggcgaggaaggcgaagacgacggcaaaatgcagtacaggatacagttccagaggccgaacccgggcggcaccaacaccgcgccacaacgacggacgacggctgcgccacggtgccgacttcggctccgaccagcaccttcctcgcagg

SEQ ID NO: 48412 - DNA, 249 bp, Zea mays
  unsure (1)..(249): unsure at all n locations
gctcgagcagtctcccgcagcagatcctcgtgcgaacanagcgctagccccttcgtactgtcccgatggcccgcacgaagcagacggcgaggaagtccactggcggcaaggcgccaaggaagcagctggccacgaaggcggcgcgcaagtctgccccggcgaccggcggagtgaagaagccccaccgtttccgccgacgtgcgctccgggagatccgcaagtatcagaagagcacggagctgctgatcc

SEQ ID NO: 48413 - DNA, 246 bp, Zea mays
agaggctaaggtgagcattcctctactgaagaatctaaaccggagaactgttgatgttttggcatcacgactgtacttctattactcttatgtgtatgagcttaccaacagccttgctgaaatccgtgggaatttgcttgctctacacagaatggcaactttgcatcttgacgagcttggccaggaaacacttatctcctccttcgcaattacctccactacaatttgtatgatcaggcagaaaag

SEQ ID NO: 48414 - DNA, 250 bp, Zea mays
aggaaacctccgcctcctgcaagtttcagagctcaggaatctgcgccatggcgagtgagacggagaccttcgcatttcaggctgagatcaaccagctgctctcactcatcatcaacaccttctactccaacaaggagatcttcctccgcgagcttatctccaactcttccgatgcgctggacaagatcaggtgattcactgacaagagcaagctcgatgcgcgcctgagcttttcatccacttgtcacga

SEQ ID NO: 48415 - DNA, 246 bp, Zea mays
agacggagcagccgcagagatccgtcacactgcaagttttgaaaactgaactgtaagatggcatcagcagagctttcccgtgaggaaaatgtgtacatggcgaactcgccgagcaggcagagaggtacgaggaaatggttgagttcatggagaaggtagcgaaaactgttgactcggaggagctcactgggacgcaacctcctgtctgttgcatacaagaacgtcattggagcccgccgtgcctca

SEQ ID NO: 48416 - DNA, 253 bp, Zea mays
agtatgtatgttatcaagtcaattggtgaggcagatgtgcacaaatcgataaagtatggtgtatggtcaagttcctccaatggaaacatcaagctagatagcgcattcagggatgctgacaggatatcaaggaggcattctactaagtgtccagtattcttgttcttctctgtgaatgggagtgggcactcgtgtggtgagatggttggtcctgttgattttcacaaggacatggacttctggtgtcagagct

SEQ ID NO: 48417 - DNA, 112 bp, Zea mays
agtggaacttcggcggcttcccagtttggttgaagtatgtaccgggcatcagcttcatgacagacaacgaacctttcaagacggccatgcagggtttcactgagaaaattgt

SEQ ID NO: 48418 - DNA, 137 bp, Zea mays
aatccccaaagcctccgacccccttcctctctccctccgccgccgctgcgcacgcagggaacaagcgacatgggcgtctacacctttgtgtgccgcaacaacggcggcgagtggaccgccaagcagcactccggcga

SEQ ID NO: 48419 - DNA, 219 bp, Zea mays
ctgtgttggacgctttgccatccacaaagcttgtcacttctgtgaagctgcctgactacaattctggaaaggtggagctgcaatacttccatgagaatgcaacttttgctactgttgttggcacgaagccgactcctgtgattgatcttcctgggacagtaggtgctcaaggagttgcatttggtgcagaagctgggtatgacactgctacaggaaaat

SEQ ID NO: 48420 - DNA, 96 bp, Zea mays
cttcgccttctgggtgatcgtacacctgtacccgttcctcaagagtctggtggggaggcagaacaggacgccgacgatcgtcatcgtctggtccat

SEQ ID NO: 48421 - DNA, 301 bp, Zea mays
ccgctcccctacctctccagcatctcccgtctccgtcgtctcgtctctgctcctcacctcgccgccagccatgggcaagatcaagatcggaatcaacggtttcggaaggatcggcaggctcgtggccagggtcgccctgcagagcgaggatgtcgagctcgtcgccgtcaccgaccccttcatcaccacggattacatgacctacatgttcaagtacgacaccgtgcacggccaatggaagcacagcgacatcaccctcaaggactccaagacgcttctcttcggcgagaagcggtcacgt

SEQ ID NO: 48422 - DNA, 276 bp, Zea mays
ccgacatcgtcccttcgtccccacgagcaaccgataatccgccggcgttgagatgttggtttatcaggatctcctatctggcgacgagctcctgtcggattcattcacctacaaggagctcgagaacggcgtcctgtgggaggtcgagggaaagtgggtcacccaaggtcctgttgatgtggacattggtgccaatccatccgccgagggtggtgaggacgaaagcgttgatgacacagctgtgaaggtggtgatattgtttgacacattccgtct

SEQ ID NO: 48423 - DNA, 97 bp, Zea mays
ctctgctctcccccacctcccggtccggcagcagagagcgggggtgcagagagatcgagatccggaggccgcgaattgtagcgccaccaccagcgac

SEQ ID NO: 48424 - DNA, 89 bp, Zea mays
gaaatagaagaacaatggaacttgtatgatggttttgaagtcatgcttgcgaggaagctccgtgcgttagtcaagcgtggtgctaactg

SEQ ID NO: 48425 - DNA, 155 bp, Zea mays
gcatctacgacccccaggtgacggaggaccagatccagcgggacctagccatgaacaagttcgactgggaccacccgatgcacctgcagccgacgagcccgacggccgtgaagcaggtgagctgcgtgtgggacgcgtacgaggccaccaagggt

SEQ ID NO: 48426 - DNA, 181 bp, Zea mays
gtggtctacaatgcgtcaaacaatgagcttgtgaggacacaaacccttgtgaagagtgccattgtgcaagttgatgctgccccattcaagcagtggtacctcactcactatggagttgacattggtaggaagaagaaaacccctgctgcaaagaaggataatgctgagggacaagaggttg

SEQ ID NO: 48427 - DNA, 218 bp, Zea mays
attccacatccgtccgctgcattcctgctctctcgctctcctcgctctcagaccacagttgccgccgccgccgccctaagccatggtgctgaggctttcgttggcctcttcgccggcagcgagcacccaccagcagttctgtagaaatggctgatggtgaggacatccagcctcttgtctgcgacaatggaaccggaatggtcaaggctggttttgcc

SEQ ID NO: 48428 - DNA, 213 bp, Zea mays
ggaaggtctcatctgttgacaaaattagtaaaggctggcaagaagagtacgactcttcatccaagcagtgtatgcacgggccaaaatgcaaactcggaagcaattgcacagtgggtagaaggttgcaggagattaatatattgggtggtctaatacttcctgtatggggtgcagtaagcaaaggcactggctaagcaggcacggcagattcac

SEQ ID NO: 48429 - DNA, 302 bp, Zea mays
cgcacctctctccatctccctgctcctccgccttcttcttgatccagccaagccagggatcgccatgtcggactcggaggagcaccacttcgaatcgaaggccgacgccggagcgtccaagacctacccgcagcaggctggcaccgtccgtaagaacggcttcatcgtcatcaagaaccgcccctgcaaggttgtggaggtttctacctcaaagactggtaagcatggtcatgccaaatgccactttgttgccatagatatattcaacgggaaaaagctcgaagatattgttccttcgtcac

SEQ ID NO: 48430 - DNA, 291 bp, Zea mays
ccgactgctccccctcccccgcaccagcctcaagccctcaaggcctcaaggcatcgccggcgccgcaacttcgctgaggaagcccgcacccctgcccggatccgatggccaacagcaacctcccgcggcggatcatcaaggagactcagcggctgctcagcgagccagcaccggggatcagcgcgtcgccctcggaggagaacatgcgctacttcaacgttatgatccttgggccggcgcagtcgccctatgaaggtggagtttttaagcttgaactctttttacctgagg

SEQ ID NO: 48431 - DNA, 289 bp, Zea mays
cagatccccgtcccgcatttcctaaggccagttggcattgaagacgatgactgcttctgcagctgctggtgtgcagatggtggctgcacgcccttgcatttcggcctcgccaggaattcttaccgcacgggtttctaggactgattgcatgctcagtaccactgctacattccccaaaatcagctgctcctggcctctaaggcttaagcgcaatgatgttgttgtaagagcaatatcggaagagtgtggcccgcagggcttcccattgatctcagaggtacaagggcat

SEQ ID NO: 48432 - DNA, 284 bp, Zea mays
  unsure (1)..(284): unsure at all n locations
accagccgccgtcatgtcgaagcgaggtaggggaggttcggctgggaacaagttccgcatgtacatgggtctaccaggtggcggccacggtgaactgcgcggacaacacgggcgcgaagaacctctacatcatctccgtcaagggaatcaagggccgcctcaaccgcctcccgtacgctatcccangcgacatggtcatggccaccgtcaagaagggaaagcccgacctcaggaagaaagtgatgcctgccgtcatcgtccgccagcgcagcgtangggttcgc

SEQ ID NO: 48433 - DNA, 287 bp, Zea mays
cggagatgtttggaaaatatggaaccataactagtgctgttgttatgcgggatagcgatggaaaatccaggtgttgtggatttgtcaattttgaaaatgcagatgctgctgctcaggctgttcaagagttgaatggcaagatattcaatgataaggaactgtatgttggaagagcacagaagaagtctgaaagagagatggagttgaaggagaaatttgaaaagaatgttcaagaggtagctgagaagttccaaaacacaaacttgtatttgaagaacttagaggag

SEQ ID NO: 48434 - DNA, 289 bp, Zea mays
ctcatgttcgcccagttctccgagctggtcaacgagttctacaacaacgggctgacctccaacctggcgggcagccgcaacccgagcctggactacgggttcaagggcaccgagatcgccatggcgtcctactgctccgagctccagtacctggccaaccccatcaccaacgacgtccagagcgcggacagcacaaccaggacgtgaactccctcggcctcgtctccgccaggaagaccgccgaggcggtggacatcctcaagctcatgtcgtccacgtacatggtcgg

SEQ ID NO: 48435 - DNA, 286 bp, Zea mays
cggaatggaggtcgccgagattgacggcgcccccaggatgggcccgacgtttggcgccatgatgatctccggccataacgcggcgcacctggcgctcaaggccctgggcaggcccaacgccgtggacgggaccatgtcgccgccgttgcgcgaggagttgatgattgcgtacaaggacgacgaggtcgtggacgcctgagtgcggcaagcagagaggaggatcgacgccagcagcgtcttatcttaattgccttgttgttcaatgatgaatcgatcgaattccctt

SEQ ID NO: 48436 - DNA, 263 bp, Zea mays
cgtcatcacttctgtggagtctggagggaatgcagccagaggcggtctgaaaaccggggaccaggtcctgtacacaagcagcttcttcggagacgagctgtggcctgcggataagcttgggttcaccaagacagccatccaagcgaagtcagactccgtctacttcgtcgtgagcaggggtgccgaagttgacgtgaagcgcctacctaagaggccggcgcaccccggtttggacggaagctgactgattcacaaaaggagag

SEQ ID NO: 48437 - DNA, 171 bp, Zea mays
cctccttttgctcggaacgcacacaccgcccgtccccgatctccgatcccctcgtcgatccaaagatgcagatcttggtcaagaccctcactggaaagactatcaccctcgaggtggagtcttctgacaccattgacaacgtcaaggccaagatccaggacaaggagggca

SEQ ID NO: 48438 - DNA, 281 bp, Zea mays
tcgtgttgtggatggacgcaacatctgggctgatgatcttgctacatctctcagcactctccagtctcttgaggctgttgttgggaaggacaagcttgtcgtatcaacttcctgctcgctcatgcacaccgctgtggatcttgtgaacgagactaagcttgacagcgagattaagtcttggcttgcttttgctgcccagaaggttgttgaggttgatgctcttgctaaggcattggctggtcaaaaggatgaggcttacttcgcagcaaatgctgcagctc

SEQ ID NO: 48439 - DNA, 285 bp, Zea mays
atgactctgttggcgacaactgtaagagcattagtgatgatacattatcaaaacttgacaagacggtagctacacttaatgaagataagaagttgcgtctaagcaagcttcaagaactcgctggtcagctctatgatctttgggatctcatggatgcccccaaggaagaaaggcgcatgtttgatcatgtgacctgcaacagatcagcatctgtggatgaagtcacagcacctggatctcttgctctagatttaattgaacaagctgaggttgaggttcaaaggt

SEQ ID NO: 48440 - DNA, 290 bp, Zea mays
gaccagttccccagtcttgctccctgcagtcctccctcctccatctccagcgttgtgttctgactcacctgcaccaatggctgttctttctgctgctggtgctcccccggcctcagctatcgggtttgagggctatgagaagcgccttgagatcacattctctgaggcacctgtctttgtggacccccatggcagcggtttgcgtgccctctccaggtcccagattgactctgttctggatcttgcacggtgcacgatcgtgtccgagctctccaacaaggattttgact

SEQ ID NO: 48441 - DNA, 280 bp, Zea mays
cattgccaagagtcaaatgactggctttggcggtgttgttagttttgaggttgctggagactttgatgctacgaggaaattcattgattctgttaaaataccctatcatgcgccttcttttggaggctgtgagagcataattgatcagcctgccatcatgtcctactgggattcaaaggagcagcgggacatctacgggatcaaggacaacctgatcaggttcagcattggtgtggaggatttcgaggatcttaagaacgatctcgtgcaggccctcgag

SEQ ID NO: 48442 - DNA, 283 bp, Zea mays
cgtgaagctggaggaggtcgccgttaccaccggagaggaggacgaggacgcgctcctggacatgaaggcgagctctaccggttcgacaaggaggggaaccagtggaaagagcgcggcacaggcactgtgaagctgctcaagcacaaagacaccgccaaggtccgcctcgtcatgcgtcaggcgaagacgcttaagatctgcgccaaccatctcgtggtggcgacgactaagatgcaggagcacgcggggagcgacaagtcgtgcgtgtggcacgcgctggact

SEQ ID NO: 48443 - DNA, 284 bp, Zea mays
ggctcccttctccagttctccttgcttgcgtcttcccggtcccgtctgcgtgcgtgcgatcgacgcagaggcgcctgcgctcgcaacaagccgatccgatggccttcatgcgctcccgctcaaatgcatcttctggcatgggagttgctcctaacattagggagacgtttgtcgagctccaaatgaagaagacattccgatatgttatcttcaaaatcgaagaaaagcaaaagcaggtagttgtggagaagacaggggccactactgaaagctatgatgatttt

SEQ ID NO: 48444 - DNA, 281 bp, Zea mays
ctcacgagcgattgcggcggcggaagtaagaggcgatggggcactccaacgtgtggaactcgcaccccaagaactacgggcccggatcccgcgtctgccgggtctgtgcgaaccctcatggactgatcaggaagtacgggctgatgtgctgcaggcagtgcttccgcagcaacgccaaggacattggcttcatcaagtaccgctgaagtcagctgggcgggctatctgaatgccatctcttggacagtgtagtagaggcgatgccacaattttaattactg

SEQ ID NO: 48445 - DNA, 281 bp, Zea mays
ggtcaaaagtctctatcactggagacttctattggaatgtggcagttgctatttgctgaaaggaactggcctcttctggatcattggtgtcagtttttacaggtcagacacaataaagccatatctagagacacatggtcccagctgctggaatttgtgaagacgaccgatccacagttatccaactacgacgacgaaggtgcctggccctacctcatagacgaatttgtggaatatctgactgagaacggactcgtccagcgtaaaagatgaacaacggg

SEQ ID NO: 48446 - DNA, 280 bp, Zea mays
cagcctcccagcgtcgtccccggcggtgacctggccaaggtgcagcgtgccgtgtgcatgatctccaactccaccagtgttgtggaggtcttctcccgcattgaccacaagttcgacctcatgtacgccaagcgcgccttcgtgcactggtacgtcggtgatggtatggaggagggcgagttctccgaggctcgtgaggatctggctgcgctcgagaaggactacgaggaggtcggtgctgagtttgacgagggtgaggacggcgacgagggtgacgagt

SEQ ID NO: 48447 - DNA, 281 bp, Zea mays
gaacgcaggcagaggcaccataccagtcaaccaccaccgcttcgttctcctcccacaccgctcgacttcgcctccttctggttcccatcttctatcatccccgagctccagttctccacacctcacgtctataaataataaataaggcgcccgcggtgcccatcaattcgtgtcaccgcgtcccgagagcgcaaatcattccgcgcgacgcaaaaaccctagcccagccagcgatccctctcatggcaaccaccaccaccaggcgagcctcctcctccaga

SEQ ID NO: 48448 - DNA, 282 bp, Zea mays
tgcggcggcgcgggcggacaaggagcaggcggaggatgagttgtgccaagccacaatgggtatctcgcgtgactcgatgcacaagcgccgagccaccggtggaaagcagaaggcctggaggaagaagcgaaagtatgagcttggtcgccagccagccaacaccaagttgtcaagcaataagacagtgaggagggtccgtgttcgtggaggtaatgtgaaatggagggctcttcgccttgatactggtaactactcatggggaagtgaagctgttacccgcaa

SEQ ID NO: 48449 - DNA, 277 bp, Zea mays
tatgcatctaagtttggagttgatgaatctaagatgatggagaggctatggggtgagaacttctttgatcctgccacaaagaaatggaccaccaagaacacaggttctcctacctgcaagagaggatttgttcagttctgctacgagccaatcaagcaaatcatcaaaacctgcatgaatgaccacaaggagaaattgtggcccatgttgcaaaagcttaatgttaccatgaaggctgacgagaaggagttgattggcaaagctttgatgaagcgtg

SEQ ID NO: 48450 - DNA, 307 bp, Zea mays
cggcctgttcaactgcgagccgggccagctctgcgccgggcccaacaacagcacccgcttcacggccagcaacaacaacgtctccttcgtcttcccgcggaccgactccctcctccacgcgcactacttcacgacccccggcgtcttcaccaccgacttcccggcgcacccgccggtgcagttcgactacacggcgcagaacgtcagccaggccctgtggcagccggtccccgcgaacaagctgtacccgctcaggttcggctccgtggtgcagctcgtcctgcaggacaccagcatcgtcacgccc

SEQ ID NO: 48451 - DNA, 251 bp, Zea mays
caccaagcagaccacagcaagaagcgtagtcgtcgccggaaggaaaggcgcggacaagatgtcgtggcaggcgtacgtcgatgagcacctgatgtgcgagatcgaaggacaacatctcagcgccgccgccatcgtcggtcacgacggcagcgattgggcgcagtccgagagcttccccgagttaaagcctgaggaggttcctggtatcataaaggactttgatgaacctggtactcttgcaccaactggtc

SEQ ID NO: 48452 - DNA, 298 bp, Zea mays
cacctgaaggagagcagcccggaggagggggagcaagcagcagccgtcggtggaagatgtcgtacctgctgccgcatctgcactcggggtgggcggtggaccaggccatcctcgccgaggaggagcgcctcgtcatcatccgcttcggccatgactgggacgagacctgcatgcagatggatgaagtgctagtagcagtagctgagaccataaagaactttgcggtcatctaccttgttgacatcacagaggtccctgatttcaacaccatgtatgagctgtacgacccttcgacagt

SEQ ID NO: 48453 - DNA, 298 bp, Zea mays
catacaggaaacaatggcctcctccaacctgcttcggaagttggagcttgtggacacgctgcagcgtctcggggtggactaccgctactacgaggagatcgaccagttgcttcgctctgtctacgacgacggcgacaaggatggaggcggctccgacgatctctacctcacctcgctgcggttctacttgctcaggaagcatgggtatacaacctcttcagatgtgttcgagaaattcagggacgagcgcgggagcgtctcgagcgacgatgccagctgcttgctcatgctgtatgac

SEQ ID NO: 48454 - DNA, 304 bp, Zea mays
cgctcctcgccccgcccccttctctcagcggcgacgcctcgggcgttcctaccctgccccctctccggacccccacgccgtcggcgaagcagccgggcaagagcccgatccagaccccgcgagcactccttgatatacctgatggctatgattgatgagcctctgtacccaattgctgtactgattgatgagcttaagaatgaggacatccagttgcgtctaaactccattagaagactttcgacaattgcacgggctcttggagaagaaagaccaggaaggagctgattccctttcttagtga

SEQ ID NO: 48455 - DNA, 299 bp, Zea mays
aaaaaaagggcgaaacgaggccaccagctcaccgccgagcggaagcgacgccgagcaaccaacccctctcctcgtccgccgccgtctccccggaccatgtccatggccgcctcctcccggctgctctgggcgtcccgcgccgccgcctacctcaagatctccaccttccccagggccttctccaccgtgctgaaggatctgaagtatgctgacactcatgaatgggtgaaagttgagggtgattcagcaaccgtggggattactgaccatgcccaggatcatttgggtgatgttgtttt

SEQ ID NO: 48456 - DNA, 191 bp, Zea mays
acggagcacgacgcacgcagagccgcagagatccgtcacactgcaagttttgaaaactgaactgtaagatggcatcagcagagctttcccgtgaggaaaatgtgtacatggcgaactcgccgagcaggcagagaggtacgaggaaatggttgagttcatggagaaggtagcgaaaactgttgactcggagg

SEQ ID NO: 48457 - DNA, 144 bp, Zea mays
ctgaaaactcgagggaatactccaaagtatgggcttatattccactcctcctttattggccgtgcttcaaccaagaacaagggcagaatggctcgttacctggcaaacaaatgctcgattgcttcacgcattgactgctactcg

SEQ ID NO: 48458 - DNA, 305 bp, Zea mays
cgcgcatcgctctcacgctcgcgtcaccggagctctccagaaccgaaccccaactgcccaagggcgagcgatccgaacccctcggcggcttcgtcaacgacgccgagaacactttgaggaatggctgaagaggatgtccagccccttgtgtgtgacaatggcactggaatggtcaaggcgggtttcgctggtgacgacgcaccgagagctgtctttcctagcattgtaggcaggccacgccacactggtgtgatggtgggcatgggccaaaaggatgcatatgtgggcgatgaagctcagtccaa

SEQ ID NO: 48459 - DNA, 297 bp, Zea mays
cgcggatcgaattaggctctccgagtctccggttccctcctctcggcggcggctcaggtccctctccatctccggcgtggcgcttggcgtctgacctcaacaagcaagaaagcaaatggcaggcggcagggttgcgcatgccaccctcaagggcccgagtgtggtgaaggagatcttcattggactgaccctgggtctgatcgcgggaggcatgtggaagatgcaccactggaacgagcagaggaacactagggtccttctatgacatgcttgacaagggccaaatcagcgttgtcg

SEQ ID NO: 48460 - DNA, 249 bp, Zea mays
gactctaaggccgtcgccttcccattcttcctcgccgcgggggtcgcctgagatcacataaacaatggtgaaggctgttgctgtgcttggtagcagcgatggtgtcaagggcaccatctttttcacccaagagggagatggccctaccgctgtcaccggaagtgtctctggcctcaagcctggcctccatgggttccatgtacatgcacttggtgacaccaccaatggatgcatgtcaactggaccaca

SEQ ID NO: 48461 - DNA, 240 bp, Zea mays
cagcccggtccccgatctccgatcccctcgtcgatccaagatgcagatcttcgtcaagaccctcactggaaagactatcaccctcgaggtggagtcttctgacaccattgacaacgtcaaggccaagatccaggacaaggagggcattcccccggaccagcagcggctcatcttcgctggcaagcagctcgaggacgggcgcacacttgccgattacaacatccagaaggagagcaccct

SEQ ID NO: 48462 - DNA, 238 bp, Zea mays
caggacaagtggaacggctccttctctgttaagtggcacattgtcaaggacgtgcccaacaatattctcaagcacatcatcctggagaacaatgagaacaagcctgtcacaaacagccgtgacactcaggagatacgcctcgaacaaggccttcagatgctcaagatattcaaggatcatgtcagcaaaacttccatcctcgacgactttgccttctatgagagccgccagaagttga

SEQ ID NO: 48463 - DNA, 293 bp, Zea mays
aggtgatcttggtcagagctttgattccaatgttacgctcacccattatgagtccaatgcaaaagcacagggagttctttttgttggggacttgtcatatgcagataactacccatatcatgataatgtgagatgggatacgtgggcaagatttgtagaaaggagcgtcgcgtaccagccttggatctggactgctggaaatcatgagatagatttcgctcctgaacttggtgaaacaaagccattcaagccattcagccataggtaccccacaccctacaaggcttctggta

SEQ ID NO: 48464 - DNA, 297 bp, Zea mays
gtgctcctttgattgcaacccttccattggaggcacgcggaaaaattggtgacttcattaaaggagtgtttgccgtcttcctagacttggatttctcatttcttgagatgaatccgttcaccatggtcaatggggagccatatcctctggacatgagaggagaactagatgacacagcagctttcaagaacttcaagaagtggggaggtatagaatttcctctaccttttggaagagtactcagccctacagatagtttcatccatgaactagatgagaagacaagtgcctctctga

SEQ ID NO: 48465 - DNA, 292 bp, Zea mays
caccctccttcctctcctccctcttaggcggcggcggcggggagccggcggcgactgtgaaatctatcttcatataccctatcaagtcctgcaagggtcttgccgtgtcacaggcgcgcatcacctccactgggttccggtgggatcggcagtgggtggtggtgaacgccaaagggcgagcatacacccagagagtggagcccaagcttgctctggtccaggtggagttgccgccggaggcttcgctgagaactggcagcccacgcccgacgaccacctggttatcagagca

SEQ ID NO: 48466 - DNA, 267 bp, Zea mays
cacctccaaccatgggtaaagagaagtcccacatcaacattgtggttattggccacgttgactctggcaagtcgaccaccacaggacacctgatctacaagcttggaggcattgacaagcgtgtgatcgagaggtttgagaaggaggctgctgaaatgaacaagcggtccttcaagtacgcatgggtgctcgacaagctcaaagctgagcgtgagagaggtatcaccattgatatcgctctgtggaagtttgagaccagcaagtact

SEQ ID NO: 48467 - DNA, 285 bp, Zea mays
aaaccctagagccgccggcccggtcgcgctaggcacaaatctcaaatcacccggagagaactcgctcgcgaaggctgaactcatggctcgcgtcttcgttgggaacctggatccgcgtgtcacggcgcgggagattgaggacgagttccgcacgtttggggttctgaagagtgtatgggttgctaggaaaccaccagggtttgccttcattgacttcgatgaccgcaggatgcacaagatgccattcgcgatttggatggtaagaatggttggacggttgagctg

SEQ ID NO: 48468 - DNA, 295 bp, Zea mays
cacaactcgtaggcagcgagcgtctctcctcttcctctcccacgcaccgcgccaaggaaggcagagagagatcgccgctcctcttctctccgtcggtggtgcggttgaccgccctcctcgagcgagatctcgctgcagtccctcgagttctggtcacagatctatccgacaagatggtgaagatctgctgcatcggtgctggctatgtcggtggcccaaccatggcggtcattgccctcaagtgcccagacattgaggttgtcgttgttgacatctccaagccccgcattgaggg

SEQ ID NO: 48469 - DNA, 288 bp, Zea mays
gacctcttctccttgcgccgccgccgctgctgccgccgccatgtcgaagcgcgggaggggagggacggcggggaacaagttccgcatgtcgctgggtctccccgtcgcagcgaccgtgaactgcgcggacaacacaggcgccaagaacctctacatcatctccgtcaagggcatcaagggtaggctcaaccgcctgccgtcccgcctgcgtcggtgacatggtcatggccaccgtcaagaaaggtaagcccgacctcaggaagaaggtcatgccagccgtcatcgtcc

SEQ ID NO: 48470 - DNA, 187 bp, Zea mays
cgcagatcgcggaagcccagcggctcagagtccagggggagggagctcgcggcggctgaggaaggcgttcaccaccgtcgcggatttcattgaggaagagatggggctctcctttgggaagctgttcagccgcctcttcgccaagaaggagatgaggattctcatggtcgggctcgatgccgccggt

SEQ ID NO: 48471 - DNA, 299 bp, Zea mays
  unsure (1)..(299): unsure at all n locations
caagcacaagcgcactctagcaatggcttctgaggttgtccgccctagcgacgccgagctactaaaggcacaagccgacatatggcggctcagcctctcctacctcacgcccctgtcactgaggtgcgccgtggagcttggcatccccacggcgatctaccgccatggcggggctgcctcagccgctgagctggtcacggcgctgtctctcncctccactaagctgccgttcatccgacgcctgctacggctcctcgccgcgtcgggcgtgttcaccgtcgacaagcagagcacggagg

SEQ ID NO: 48472 - DNA, 287 bp, Zea mays
  unsure (1)..(287): unsure at all n locations
ccagtggctgctagccgagacggggatagattgacagacaggcgcgcagatcgcgacgccgtcgtcgtcgctttgctccagcttcgcctccctgcggaccgcctccatcggccacccccgtggcatcgcctcctccacgcccagtcaaggcattccatgtgagggcatcagctcgggttcacaaattctcaaagagtgacatcatcgtgtccccttcgattctgtctgcaaactttgcgaacttggtgatcaggtanaagctgtggaggtggcaggatgcgactgga

SEQ ID NO: 48473 - DNA, 290 bp, Zea mays
ggaccgtcttgtagcagagaaaagagaaaagccagaatcaatgaatgcatttgctcttatttcgaggtcacagggcttcaaccttggaaatttgtttgagaaggagatgatgggaatggtaaagagggaaccatctttcacgtctcaatgtacagcacaggagatcatgtcaaaaatagaggatgcatgtgggccacttggtttcaacgtgcggaaacaaaattacaagatgaaattgaaaggtgacaaatccggaagaaaaggccacttatctgttgcaactgaggttt

SEQ ID NO: 48474 - DNA, 221 bp, Zea mays
gtgattgtgaatcccaagggtgagatgaaaggttctgcaatcactggacctatcggcaaggagtgtgctgacctttggcctaggatcgctagtgcagcaaatgccatcgtttgagagcttgttggaatgtgtttagacttgagtatgatcatctcattgtgtgttgcagctgttgtaagggtgctattggacttgatggctccttttatgtttggtcactc

SEQ ID NO: 48475 - DNA, 309 bp, Zea mays
gcggaaatggtggccttcaggttccatcagtaccaggtggtggggcgcgcgctgccgacgcccggcgatgagcaccccaagatctaccgcatgaagctctgggccaccaacgaggtccgcgccaagagcaagttctggtacttcttgaggaagttgaagaaggttaagaagagcaacggccaggtcctggccatcaacgagatctttgagcgtaaccccccgacaatcaggaactacggcatctggctgcgctaccagagcagaaccggctaccacaacatgtacagggagtaccgcgacacaaccctg

SEQ ID NO: 48476 - DNA, 107 bp, Zea mays
catagttagttgtttagtattaatatgtggaatagagtcatcccactaaatttgatgaatggacccatgatgcaccccttcattttggataaagtgattcattaaac

SEQ ID NO: 48477 - DNA, 137 bp, Zea mays
gagacgaaaggcggcaacgggcgctacctcaagacggcggcctacgggcactttgggagggacgaccccgacttcacctgggaggtggtgaagcccctcaaggcggagaagccgtcttctgcatgaggcgcctcctc

SEQ ID NO: 48478 - DNA, 246 bp, Zea mays
ctttcggtgacggtcatatctgcagaggagttgccacctatggacattggtggcaaggctgacccatttgtggtcctgtacttaaagaagggagaaaccagaaagaagacgagggttgtgacagacacgttaaatccaatacggaaccagcatttgatttcatggtagaagatgcactgcatgatttgctcatggtggaagtatgggaccatgatacatttggaaaggattacatagggaggtgca

SEQ ID NO: 48479 - DNA, 129 bp, Zea mays
gaagtttggagtcgagaaatttgacccgctgaatgaggaatttgatcctaacaggcattgtgcagactttcacaattcctgatccttcagaaccaccgtggaccgttgcttctgtagtaaaggtgggct

SEQ ID NO: 48480 - DNA, 129 bp, Zea mays
accggtgacagcaggtcgagcatcttcgacgccaaggccgggattgccctgaacgaccacttcatcaagctcgtctcttggtacgacaacgagtggggctacagcaaccgcgtcgtcgacctgatccgc

SEQ ID NO: 48481 - DNA, 143 bp, Zea mays
  unsure (1)..(143): unsure at all n locations
acncgacctcaggaagaaagtgatgcctgccgtcatcgtccgccagcgcaagtcgtggcgtcgcaaggacggtgtctacatgtacttcgaagataatgctggagtgattgtgaatcncaagggtgagatgaaaggttctgcat

SEQ ID NO: 48482 - DNA, 297 bp, Zea mays
gtccctgttgttggtggtcatgcgggtatcactatcctgccgttgttctcacaggccacccctgcaaccaacgcattgtctgatgaagacatcaaggctctcaccaagaggacacaggatggtggaactgaagttgtcgaggcaaggctgggaagggctctgcaaccttgtccatggcgtatgctggtgctgtttttgcagatgcatgcttgaagggtctcaatggagttccggatattgttgagtgctcttttgttcaatcaactgtaacagagcttccattctttgcatctaagg

SEQ ID NO: 48483 - DNA, 203 bp, Zea mays
caagtctgaggctgctgagtaccagaagcttcttgcccagaggctgaaggaacagagagaccgccggagcgagagcttggccaagaggaggtccaagctatctgccgccgccaaggcttctgctgccacctctgcttaagaatgttcagtgttttgggatctttgtaaggtctatcttgtaacggcaaaagtgttttgggatc

SEQ ID NO: 48484 - DNA, 194 bp, Zea mays
atttatttttgagttcatgcggtctttatttatttccatgtacgctgcttcctcgtatacccactttaaatttgtaccatgcatgcatgttccttatgatacactcacctctttttgttaaaaaaagaaaagaagagaaaaaaaaaaaaagaggggggccccaaaaaagggagcgcgcggccggggaatttatt

SEQ ID NO: 48485 - DNA, 204 bp, Zea mays
ggctgctcgatatgttcaacgctgggggcgccgttgaggagtgcgacgtgatcagcaatgtcggcggcaaggccatggctctcagggttcgcgggtgcggtcggttcggcgcttactgctcgcaccagccggcgaggtgtcattggactcggcggaagtggagttcagctacgatgccgacaccggcgtcgtgtccgtcgacct

SEQ ID NO: 48486 - DNA, 111 bp, Zea mays
caaggtgctagaggtgtacgaggcacgcctgaccaagtgcaagtaccttgctggagacttcctcagcctcgccgacctgaaccatgtgtctgtacatctctgcctgttcgc

SEQ ID NO: 48487 - DNA, 112 bp, Zea mays
ggcacgatgagcacggacgaggtcagcgaagggctggggctgcacgacctcaggaacaggatctggcacatacaggggacctgcgcgctccgcagcgagggcctctacgacg

SEQ ID NO: 48488 - DNA, 309 bp, Zea mays
acgagagctcggatcggtcggccaagatccgttggaggcaagaagccggtggcacctgtgaaacctgcagctgaggcgaagaagcccaaggccacagtgaccgacggtgctggaagcagtggcgacaaggatgagaaagaggacgaaaaggaggagacagcaggcccacgtcggaggacccgaggatgacatagagacctatttttgatgtgtttggatgttctggcgcctgcttattttgaggactcttaatatttctgagtgtataataggaacttgtgtcacctctgcggcttccctgctgcttat

SEQ ID NO: 48489 - DNA, 296 bp, Zea mays
cggtcgaagcagatgggaagagatccatggtgttgttaacaagacccaagctttctcaaatgtgtttgtgggatgctcactgatagatatgtacatgcggtgtgggaaagttgatgaagctcgaagagtcttcgacgccatgccagagcacaacttagtaacatggaaagtatgattacaggatttacacaaaatggccgcagtgaagaggctttgaaatacatgttcctaatgcaacaagaaggttatgttgttgatgaatttgtgctttcgacagttttgtcgtcatgtggaga

SEQ ID NO: 48490 - DNA, 318 bp, Zea mays
cgcacggagcgtagtaactcggaatcggtcgaatgatcttgttctagaggctgtgtggacaacaaacatccacgactgcattcatggcaagatatggccagtcatgggtgctggatatcacaccattcaccatacgacttaccgtcacaactatggccactacaccatctggatggactggatgtttggtacgctcaatgagccagaagatatcctcaagaaggcttgagtttctcggagctgtggtattcctatggtgctgctgctggaactgctcgatctgttcccagtgtttctaatccgttgagcctgttcagc

SEQ ID NO: 48491 - DNA, 298 bp, Zea mays
cggtcgagaccgctgctgagcttcgacatgtcatgaccaacctaggtgagaagctgacggacgaggaggtggatgagatgattcgtgaagccgacgtggacggtgatggccagatcaactacgaggagttcgtgaaggtgatgatggccaagtgagatgatgtgcctgttttgaagctagttcctctcttgatggtagtagctagtctagtgttggagactgactgcatttggtccgccttgttcctctcgctgcatcaatggacatatccgtttgttttctcccaagggattttacc

SEQ ID NO: 48492 - DNA, 292 bp, Zea mays
  unsure (1)..(292): unsure at all n locations
gagccttacncgagagtcgaatcggtcagactcgtccatattcgtggaggtggacatcgtgctgccgtcgaacatgcccctgcgggaggctcacgacatcggcgagagcagaacaaganagctggagcgcctgccagagatcgagcgcgcgtttgtccacctcgactacgaattcacccaccgccccgagcacgccttgtcccacgagaaatagcatgctaggaccgaactgatgcagcaggcggaaggacacggcttcgtaatcgtaactgaaacaattttagttgtagcc

SEQ ID NO: 48493 - DNA, 288 bp, Zea mays
aataggagtggccaagagctgtatctgtagtgaattcttcatcagagaaactgggtggtgcaactgtggttgccactgcagttgttcctgatgaagtggacaagatcaagggcattctggtacaatggagtgatattgaccatgttaacctcattctgacataggtgggactggcttcacacccagagaagtcacaccggaagcaacaaaaatggtgatacagaaagaagcgcctggtctcacatttgttatgcttcaagaaagtttgaagattacaccattcgcaat

SEQ ID NO: 48494 - DNA, 319 bp, Zea mays
gcgtgagcgtacgagctcggatcggtcgaagggatccgcaagacgaggagctcgggaagctgctgaccggcgtgaccatcgcccacggcggcgtgttgcccaacatcaacccggtcctgctgcccaagaagacggcggagaaggcgtccagcggcgggagcaaggaggccaagtcgcccaagaaggccgccaagtcccccaagaaggcatagggttgagaggcggatccgatgttgtcatgtgtaggttgtaagcgggcaatgtgattggctgtgtatctgcttcgctcaagttgctttatgtcattcctaatggaata

SEQ ID NO: 48495 - DNA, 290 bp, Zea mays
acgggcttgtgcagcaatggccaagatcaaggctcgagatcttcgcgggaagaagaaggaggagctgctggaaacagctggacgacctgaaggtggagctgtcccagctgcgcgtcgccatagtgacaggcggtgcggcctccaagctctctaagatccgagtcgtccggaaatccattgcccgtgttctcacagttattaaccagactcagaaagaaaacctcaggaaattctacaagggcaagaagtacaagcccctggacctgcggcctaagaagacacgtgccatg

SEQ ID NO: 48496 - DNA, 303 bp, Zea mays
gtcctgacgcgtagtatgtcggattcggctcacttgtcttccggcgagctcgccaagcacgctgtctctgaaggcaccaaggccgtcactaagttcacatcatcttagatttgaggtagtagctattgggtggcgttggtagttgtgtctcaatttgtctgctactaatagtggtaggagtatccatgtgagttgggttgcggtaagaattacagagaaactggtaatatgtttgaaattgctttttgtggatgtggaaaaaaaaaaaaaaaaaaatgaagaaaaaaaaaaaagggggggccc

SEQ ID NO: 48497 - DNA, 283 bp, Zea mays
agacaccgtctcctttgtgaccctgaacaaggttggtggattcctgcagcggatggacctgtgccgcaagtacgcctttgggaagatgctcgtgataggctctgagccacccttcaagctgaagggcctttggctcttccgtggccaggatgttcccaagttgtaatggacgaggtctatgacatggagctctacgagtggaccaaggtggacatctctgatgaggcccagaaggagcgtgtcaatgcgatgattgaggaccaggagccctatgagggcgagg

SEQ ID NO: 48498 - DNA, 286 bp, Zea mays
  unsure (1)..(286): unsure at all n locations
aaggnggaggcgggatcgggccgatcaggcaggactgggagccggtggttgtgcggaagaaggcacccaccgccgctgccaagaaggatgagaaggccgtcaacgccgcgcgccgctccggcgcgcagatcgagaccatgaagaagttcaacgctggtatgacaaggcggcgtccagcggcacatccctcaacaccaagcgcctcgacgacgacacagagaacctcgcccatgagcgagttccaagtgacctgaagaaaaatctcatgcaagcaaggctcgataag

SEQ ID NO: 48499 - DNA, 287 bp, Zea mays
caagaagcaaacacggatgacctaagacattactttggcagatttggtcgaatcgtagatgcgtatattccaaaggaccccaaaagaagtggccaccgaggttttgggtttgtcaccttcgctgatgagggtgtggcagaacgggtatctcgtagaagccatgaaattctgggccatgaggttgcaatagacacagctgcaccacttgagaatgattcagctggtggtggttacattgatcccatggacctttacggagcttatggttcaatgagaccttttggcag

SEQ ID NO: 48500 - DNA, 314 bp, Zea mays
tcgtgcagcgtagtaagctcgaattcgctcggagaacatcgaggttgcagtgatgacaaagaaggatggtctccgggaacttgaggaggctgagattgatgaatatgttgctgagatagaggcagagaaggctgcagctgaggctgcaaagaagggtggtcctagggacacctagtccctgtattgtggtatcctccctttgtgtgtcttgtttttatgttccatagcaccatcttaattgttttagaagaaggatgcttatatggctgtggctgccttgtgacttgtgtgggtctgtgggctgcggggtagtt

SEQ ID NO: 48501 - DNA, 281 bp, Zea mays
gtggcattttcgttggtggtgttcagttgtcgcggttgctggtcatgaacagccaagatgctgcggaatctgctggctcttcgtcagattgggcagaggacgataagcactgcttctcgcaggcattttaaaaatagagttccggagaagcaaaaatgttccaggaggatgatgaaattccactgtatctaaagggtggggtagctgatgccctcctgtatagagccaccatgattcttacagttggtggaacagcatatgccatatatgagctggctgtg

SEQ ID NO: 48502 - DNA, 276 bp, Zea mays
agcggtgtgcatgatctccaactccaccagcgtcgtcgaggtgttctcccgcatcatcagcaagttcgacctcatgtacgccaagtgcgcgttcgtgcactggtacgtcggtgagggcatggatgagggggaattctccgaggcacgcgaggacctgtccgccctggagaaggactacgagttaggtcgccgcatgagggcggtagtgatgacggtgacgacgatgaggaatactgatctgcttgcatgaatctgtttggctgtcgagccaggttg

SEQ ID NO: 48503 - DNA, 313 bp, Zea mays
cgcgctcgagcgacgagctcgaatcggctcgagctctcccaccccgcagccgccgcgcaggtagccctagcacccgagacgagcaggatctgcccagttgctcttgcggtagttcccccaactgtcaccatgcagaacgaggagggtaagactgtggacctctatgtccccaggaagtgctcggccacaaacaggatcatcactgccaaggaccatgcctctgtccagatcaacattggccacttggatgcgaatggcctgtatgatggtcacttcacaacgtttgctctctctgggtttgtccgtgctcagg

SEQ ID NO: 48504 - DNA, 313 bp, Zea mays
acgcctgtaaggtagtactcggattcggctcgaagcttcatggtcgataactgctccacaactgctcgtttgggatctaggaagtgggcaccacgcttcgattacatcttgacccaacaggcgtttgtgactgttgacaagaaagcaccgatcaaccaagacctcatcagcaacttcatgtctgacccgtccacggtgccatcgaagtctgcgctcaggtgaggcccactgttgacatctcagtgaccgctgatgctgatttcgtacgtccagagcttcgacagtcttcataagcttgtatggatccgcagtg

SEQ ID NO: 48505 - DNA, 308 bp, Zea mays
atcgatgcaagcgagagctcgaatcgccgaaggacatggagggtgtagaagagaagaagaaggaggttcctgctgtgccagaaacccttaagagaaagcgaaggaatttcgcagagctgaagatcaagcgcctgagatagaagtatgcccaaaagatgcttcgaaaggcaaggaggaagcttatgcatgaaaaagcaaagcactatcacaaggaatataggcagatgtacagaactgaaattcgaatggcgaggatggcaagaaaagctggcaacttctatgtacctgcagaacccaaattggcgttt

SEQ ID NO: 48506 - DNA, 294 bp, Zea mays
agaagagggcgagagtgaaacttgagttctctgctccggagaggctgggagaaaggactacatgacttacttgatgtcagactcttacttgggctgcgatcaggagtatgaattcaccgtagatgtcaaggatgctggaggggattgatgatgaagactgtgacactatgtcgcatagaagtagaattgagtgtgtactgtaacgcgatattggaacattctgtgttgtaacctcgaacatgtggaagctgtaacttattttgcatgttgaccggtgcactttgggcgttgctg

SEQ ID NO: 48507 - DNA, 292 bp, Zea mays
agcccattcaagcagtggtacctcactcactatggagttgacattggtaggaagaagaaaacccctgctgcaaagaaggataatgctgagggacaagaggttgaggcagcagctgaggaaacgaaaaagagcaaccatgtcacgaggaagcttgagaagcgcaaggagggacgtacccttgacccacacattgaggagcaatttggcagtggacggttgctggcatgcatttcttcccgccctggacagtgtggccgagctgatgggtacatccttgagggtaaagagcttg

SEQ ID NO: 48508 - DNA, 293 bp, Zea mays
agccggtgagctgacgcctgaagagctggagcgcctgatgacggtcgtggcgaaccctaggcagttcaaggtgccggactggttcctcaacaggaagaaggattacaaggacggaaggttctcacaggtcgtctccaacgccctcgacatgaagctcagggacgacctcgagaggctcaagaagatcaggaaccaccgtggtctgcgtcactactggggcctccgtgtccgtggccagcacaccaagaccactggcaggcgcggaaaaactgttggtgtctccaagaagcgat

SEQ ID NO: 48509 - DNA, 139 bp, Zea mays
gttgacatccttgcagttgtcgcgtgaacaagtaatctatgatggcaatgtttgcctggtcatgaagtattattactttcgttgaaaccgtgatgctattaagacttaatttttttatggaacatcgaatgtaaggcat

SEQ ID NO: 48510 - DNA, 288 bp, Zea mays
attgagacacattacctgaatgagcaggtgaaagccatcaaagaattgggtgaccacgtgaccaacttgcgcaagataggagcgcccgaatctggcttggcggaatatctctttgacaagcacaccctgggagacagtgataatgaaagctaagcctcgggctaatttccccatagccgtggggtgacttccctggtcaccaaggcagtgcatgcatgttggggtttcctttaccttttctataagttgtaccaaaacatccacttaagttctttgatttgtaccatt

SEQ ID NO: 48511 - DNA, 287 bp, Zea mays
aaaggcgtccagcggcgggagcaaggaggccaagtcgcccaagaaggccgccaagtcccccaagaaggcatagggtttggaggcggatccgatgttgtcatgtgtaggttgtaagcgggcaatgtgattggctgtgtatctgcttcgctcaagttgctttatgtcattcctaatggaataggaaatgccgtgtttcttacgtctgcttttggttctgcattctactgaaaaagcgtacgataattaacacattcacctttgaagaatcacgattgaaaagtacatta

SEQ ID NO: 48512 - DNA, 290 bp, Zea mays
tcggaagccggctggtggagatcgagaagcggatcaggacgatgaacgacagcccgacgttgaagaaccggaaggtgccggtggagatgccgtacatgctgctgtaccccaacacgtcggatgtcaccggcgagaagggcgaggggctcactgccatgggcattcccaacagcatctccatatgagcctcctcactgcctgagcggatggtttgtagatgttctgttacgctgtgtgtaatgtgtcgtttattcgttggttttgtcagtctcagggtagggaatggagat

SEQ ID NO: 48513 - DNA, 285 bp, Zea mays
ctttgtaaagaccctgactggaaaaaccataaccctggaggatgagagctcggacaccatcgacaatgtgaaggcgaagatccaggacaaggagggcatccccccggaccagcagcgtctgatcttcgccggcaaacagctggaggatggccgcaccctagcagactacaacatccaaaaggagagcaccctccaccttgtgctccgtctccgtggtggtcagtaagtcatgggtcgtttaagctgccgatgtgcctgcgtcgtctggtgccctctctccatatg

SEQ ID NO: 48514 - DNA, 285 bp, Zea mays
aggaacgctttcggtggcttcaagagccggacccaggtcccatggcttgttgacaagtacatgaaaaaggaaattaaggtggacgagtacattacgcacaacatgaacctggctgacatcaacgacgccttccacctgctgcacgaaggtggctgtctgcgttgtgtgctggcaatgcagatttgaaattcctaagctaagcagtttttgttttggaactagaactcctttttgcctcgttaggcctggacccgctgtataatgctatgttgtgttggatggctg

SEQ ID NO: 48515 - DNA, 281 bp, Zea mays
gcactggcaatctctgcatcaaggaagtccatgactacctgaaaagcctttgccctgatctccatattaccagaggtgaacatgatgaggatgctcgatacccagagactaagacacttacaattggtcagtttaagcttgggctgtgccatggccatcaggttgttccatggggcgacctggactccctggcgatgctccagcggcagctgacgtggacatcctggtgaccgggcacacgcaccagttcaaggcatataagcacgagggaggcgtggtga

SEQ ID NO: 48516 - DNA, 285 bp, Zea mays
actggacagaagaagcaggactatgagaagactaaggcaaacttagataagaaggagagcacaagctcaaagaaggctaagactgaggatgaggatggctcgaagtcagaggttgatgacgaggatggcagcagtgacgaggaaaacgatgacgatgagtaaacagtctccaaggtcacgaggtagcaaatcgagtgttaggtccccaattagcttactgttttgctgcctttaaatgttaagttgtttcaaacaggtgtttatgaaggggatctattagtttcg

SEQ ID NO: 48517 - DNA, 282 bp, Zea mays
aagcagtcgaccggttcctcggagcacgatgaagtttgttgctgcctacctgcttgctgtcctcgctgggaacgccagcccctccgctgacgatttgactgccattctggagtcagttggctgtgaagttgacaatgaaaagatggaactcctgctgtcccaactgagcggtaaggacatcaccgagctcattgccgcgggcagggagaagtttgcttcagtcccatgtggtggcggcggtgtcgctgttgcggcactgcacctgctgctggcggactgctt

SEQ ID NO: 48518 - DNA, 278 bp, Zea mays
gaacgcgcgcgtcggctactacaagcagtactgccagcagctccgcgtcgacccagggcccaacctcacttgctaggcgacggcgtccacgttgtacccatggctcctgctagtgctagctcgtccacaataaatgctcggcgtcgcaccctcgcgaaaagtaaaccaagagtttactgactagtacgagctagctagcatgcagtaataataatcatcgtaataatactatacaacgattgggcggagccactttgttcgacctgattgattattga

SEQ ID NO: 48519 - DNA, 284 bp, Zea mays
gattcaggtttatcagttgcagatggtctttcaaatctgctgaagtgccgtctatcaaccaccatccgctgcctttctcacccaagtgcacacgtgcgcgcactcagcatgtctgtcctccgcgacatcctgagcaacggatccgtgaaccccaacaagacaatccaaggggaacagcagcggaacggcatccagagcccgtcctaccggtgcctggccgcagcatcatcaactggcaagcggacgtcgagaggtgcatagagtgggaagcccacagccgccgc

SEQ ID NO: 48520 - DNA, 280 bp, Zea mays
agctccacaaactctcccccaattgggaaggacccttcaatgtgacgggaatatgccgacccaggtgtgtccgccttgccacaactgaaggagtgtctcttcccaatccctggaacatagagcatctccataagttctacccatagaagcaaaactgggggattgagtttttcttcctttgtaactgggttgcgcatatgtgtatgtcaatccggtgaggtccgccctcgtaaacctggcctcttggtctacacccatgtatatcaagttataaggaaga

SEQ ID NO: 48521 - DNA, 285 bp, Zea mays
aagaagccatctatcggaacggtcgtagcggttggcccaggccccctggacgaggatggcgagaggctcgcgctgtccgtctccgcggggagcactgtcctgtactccaagtacgccggcagcgagttcaagggcgccgacggcacgaactacatcgtgctgagggcgtcggatctgatggccgctctctcctgaactgggcttgggctggaggacgaacgaggtgcaggtgcaggagcaggcttagcaataccgtagattcctcgcggctttcccgtcccctcc

SEQ ID NO: 48522 - DNA, 281 bp, Zea mays
agcgtggcggacgtgctgttcggcgactacgggttcacggggaagctgccgcggacgtggttcaagtcggtggaccagctgcccatgaacgtgggcgacgcgcactacgagccgctcttcccgttcggcttcggactcaccaccaagggcacgaagtgagtgagtgtgaggcgctctgatgggatgtggcctgtgagtgagctgtgtattcgtgggcggacgtgaggctctttggctttcgaattggttgggggtgacgggcggcgagtcgtgtacgccgc

SEQ ID NO: 48523 - DNA, 281 bp, Zea mays
cgaatggtgacaacatgctggagccaagtgataacatgccttggttcaagggatggaaagtcacccgtaatgatggcaatgccagtagaaccacgctgcttgaagctctggactgcatcctaccaccaactcgtccaactgacaagcccttgcgcctgcctctccaggatgtctacaaaattggtggtattggtactgttcctgttggccgagtggagactggtgttctcaaacccggtatggtggtcacctttgctccagtcaacgttacaacggaagta

SEQ ID NO: 48524 - DNA, 280 bp, Zea mays
gtcctctatataatgcaatgaggactgatagcgcattgaagtttggattgttcttcttgctttacgtgttccacattcttttctgcgtattttctgctgtggctcctcctgttgtatttgaaggaaaatcattggcaggatttttgccagcaattgatcttattagcgtgaatgctttggttgggatattctactttgttggatttggactgttctgtctggaatcattgcttagcatctgggtcatccagcaagtgtacatgtacttccgtggaagtgg

SEQ ID NO: 48525 - DNA, 282 bp, Zea mays
attataagatcatcgcctcactggtttatagtatacagaccttttctgtatttcatccgatataatcctacaggtgctgtgtcattcataggtgatatatactaaccctgaatagtatacaaaagaaaccatgcatagcaacgactactttgctacgaagaatgactcctttcctgcatctttcatagttctgttaaatatgtttgtacatcgcgtctttttcaaaactagttcttaagaacagactcgatgcaagtgtttctgttctgggaggtattggag

SEQ ID NO: 48526 - DNA, 279 bp, Zea mays
atgtcgtctatgttactgatgatggtcaggaacagcagtacaatgtgcctcaagtcaagggtcatcgacttagaggtgggccacagatgattcagctgagcttggatggcaagaggatatacgtgacaaactcacttttcagccgatgggatgagcagtttttcggtgatgatcttgtcaagaaaggctccacatgttgcagatcgatgtcgacaccgagaaaggaggcctggctgtcaaccccaacttcttcgtcgattttggcaccgagcctgatgg

SEQ ID NO: 48527 - DNA, 294 bp, Zea mays
cggctcgagccaatggctctaagcaagatgaagcatttgatcttccatctgatgattcgactgacaatgattttgaccccaatatgcctgaagagcatgtggctagtaaggaagaaggatcttctgaagaggaagaggatgatgacggaggatcagactctgacgtctctgacttcttaacctgttctgatgatttggaacctttgatagataaaaagaaggttgatgacctgggattaccttctgaagattcagaggatgatgactatgatccagcaggtcctgattcggata

SEQ ID NO: 48528 - DNA, 284 bp, Zea mays
actcgagcgaattcggctcgagcaaagacctattcacatggaccgggtatggtgtgacccagtgtggtggtagaccgatgcagacaaaagagcccgaaaagaagaagggttccactgtcaaagacaaggagaaggtcaagaggatgagggggcaatcgtcacatgcatcatggaagagtgaaaccgagatggctcttcggcaacaattcgactgataactagttagggtgcccaatatttagatggagtactgggtaaactgtacgctgcgaaaacctttttta

SEQ ID NO: 48529 - DNA, 288 bp, Zea mays
cacagactcagagagaacccaccatggtgctgtctcctgccgacaagaccaacgtcaaggccgcctggggtaaggtcggcgcgcacgctggcgagtatggtgcggaggccctggagaggatgttgctgtccttccccacgaccaagacctgcttcccgcacttcgacctgagccgcggctctgcccaggttaagggccacggcaagaaggtggccgacgcgctgaccaacgcggtgtggcacgtggacgacatgcccaacgcgctgtccgccctgagcgacctgcacg

SEQ ID NO: 48530 - DNA, 285 bp, Zea mays
cagaaaggaggcgaaaccagcacgaacagcattgcttcgatctttgcatggacaagaggacttgcccacagggcaaagctcgacgacaacgctagactactcgacttcgctctcaaactcgaggctgcttgcgttgagaccgtggagtccgggaagatgactaaagatctggcgattcttgtccatggatcttccagcgtcacgagaagccattacctgaacaccgaggagttcatcgacgcatcgctactgagctccgatcaagactgggagccacctgagcct

SEQ ID NO: 48531 - DNA, 284 bp, Zea mays
catgaccttagtgaccgctaccacacccactgtgacccaaggctgaacgcctcccagtccctggagctcgccttcatcattgcagagaggctcaggaagaggaggatgcggtcggggctcaacaacagcctgcctctgccaccactggctttctaagtagccgaagctgaacagagaaggtagaggggatagttgcggcgactcgaaagattacgcctgtttatttgttgatgcttggtgtggaggcctggtgggtgctcttggcacaagttacatgctgggga

SEQ ID NO: 48532 - DNA, 281 bp, Zea mays
cttttgatggcacccatggtgtcagcgctggaattcggagcgtagtggatgatgaagctgggaaatcaaatggtggtctcaagagtgatccaatgtgcaatgcttgtgagatggctgtggtatggatgcagaaccaacttgcccagaacaagacacaggagctcatcctgaactacattaatcagctttgcgagcgtcttccgagtccgatgggagaatcagccgtggactgtggcagtcttgcgtccatgcctgacattgcgttcaccattggaggcaag

SEQ ID NO: 48533 - DNA, 289 bp, Zea mays
gcggcggctacggcggtggcaaccgtggcggcggctacggcaactccgacgggaactggaggaactgagcggtgggggccggggcggccaagttatcctgttcgctaccgtgatgtttaccctagtccagagggtttatcttcgttcgtgtcgtgtttgttgttgcccatctgtgtttttgattgcaaggtcgctctgtgtcagttgttagtgctgtgttcatcctcggtttcagcagacccatgcatcaaacagcatggactgcggatcgatggatgctgttaccccc

SEQ ID NO: 48534 - DNA, 280 bp, Zea mays
cgccaagaagattgtacccagcagctgccgtgctatgattgggcaggttgctggtggacgcaggactgagaagccgatgctcaaggctggtaacgcgtaccacaagtaccgtgtgaagaggaacagctggcccaaggtgcgtggtgtggccatgaaccctgtggagcatccccacggaggaggtaaccaccaacacatcggtcacgcctctactgtccgccgagacgctccccctggccagaaggttggtctcattgccgctaggaggactggaaggctc

SEQ ID NO: 48535 - DNA, 226 bp, Zea mays
acagaatcacagctaggcaagcacttgagcacgagtacttcaaggaccttgagatggtacagtgacctgctaaatgtgcttggcgctgctttggcatttgtaattgtatgagctgagtcgctcattcctttttatgggcgtctgtactctctcattctctctgcatttttgtcgttcagctggatattttgaatctggtgtgttttgagatgtattaaggaatatc

SEQ ID NO: 48536 - DNA, 286 bp, Zea mays
cgcacataaaaaaggagtacaaggagggaaggatgttgactggtgaagtgaagcaacggcttattgcagtgctatctgagattgttgctagacaccagagagctagagctcaagtgaccgaagagatggtcgatgcattcatggcagtgaggcctcttcccaatatgtttggctgagcatcacggcgacaacttgaacaaacatttttgttatcagggagaattttaagagtctttagaattgtcgtgccaccataagtatcccctgtgttttacttcttcgggat

SEQ ID NO: 48537 - DNA, 270 bp, Zea mays
cacaagggtggcttcaaggcaagcgtgccaaatctagaggacgtggttgtaatggagggagtgagccacttcatcaaccaggagaaacccaacgaggtctctgatcacatctgcgagttctttagcaagttctgatacgtattggaaaaatctcaaggagccgttatatgattctgagctactcgtgtttttatgtcaaaaaaatgcggttgcgagtgtcaccatacaaatatacgatctaaataaaattcgtctgtctcacctttttac

SEQ ID NO: 48538 - DNA, 278 bp, Zea mays
cccaaatctacgccatctccaaggacctcgccgcctacatctccatcaaccagccgatcctgcacaggttcgcgaacgaggacgtctcgctgggggcgtggctgatcgggctcgaggtcgagcacgtcgacgaccggagcatgtgctgcgcgacgcctccagactgcgagtggaaccagcgagccgggaacgtgtgcgtggcgtccttcgactggtcgtgcagcggcgtctgtaagtcggtggaccggatgcgccacatccacaaggcgtgcggcgaa

SEQ ID NO: 48539 - DNA, 277 bp, Zea mays
cctcctgctcgtgttggtctggttgctccagttgatgttgttgtgccccctggcaacactgggctggatccgtcacagacctctttcttccaggtgcttaacatccccaccaagattaacaagggtaccgtggaaattatcacccctgtggagctgatcaagaagggtgacaaggtgggctcgtccgagtctgccctgctcgccaagctgggtatccgccccttctcgtacggcctccaggtcaccagtgtctacgaggatgggtccgtgttcagcc

SEQ ID NO: 48540 - DNA, 279 bp, Zea mays
ccagttggaatttgggggtgcaaggactgtgggaaggtgaaggctggtggtgcttacaccatgaacactgctagtgcggtcaccgtcaggagcacgatccgccgcctgagggagcagactgaagcatgatatagctctttatattattggggtttcctgtagttgctcttgtcaggcatgttgtgggggccttatctagtggaaatgtggaatcactgtactggctgttttgccgagacaatgctccttatatttggtttatgctctaggatctcaaag

SEQ ID NO: 48541 - DNA, 232 bp, Zea mays
gttagataggaatcacagctaggcaagcacttgagcacgagtacttcaaggaccttgagatggtacagtgacctgctaaatgtgcttggcgctgctttggcatatgtaattgtatgagctgagtcgctcattcctttttatgggcgtctgtactctctcattctctctgcatttttgtcgttcagctggatatttgcaatctggtgtgttttgagatgtattaaggaatatc

SEQ ID NO: 48542 - DNA, 287 bp, Zea mays
agaaggtcaggaaggtggacatgcttgatggcgtgaccatcctccggtccgagaaggtcaaggatgagctcatccttgacggaaacgacgtcgagctcgtatctcgctccgccgccctcatcaaccagaaatgtcatgtgaagaagaaggatatccgaaagtttttggacggtatctatgtgagcgacacacgggcgtcatcgaagaggagcagtgagcgacagagtagccgaaatgccaggagatgaatatgaatgtcgtttgagttgcaattttgtgagattgga

SEQ ID NO: 48543 - DNA, 278 bp, Zea mays
gctgcctggaggcgggctcctcgtgtaccagagcttctgtgctgctgaagacgctgttgctacctcgcccaaatctgtattcaactgctttgacggcgagaacgtggagagtgctcctcctcctatgaagaaggactacaagctggctaatcttctctgctgggaggaggaagcggatgccatggaggagaaggcgggagtgcttgatgagtaagacgggcttctggggtcgatttgcttctgagttgtttattttatatcgtcgcaatttcgtggtt

SEQ ID NO: 48544 - DNA, 278 bp, Zea mays
aaggaatcctgttgactacagccgatcttccaatgaggtcaatcttgttgaatggcttaaaacaatggtggccaatcggagggcagaggaagtggctgatccaagcttagaggctagacccagtatccgggctctcaagcgggctcttttggtggcactgaggtgtgttgatcctgactctgaaaagagacctaagatgggccaggttgttaggatgcttgagtcagaagaagtaccataccgggaggatcggagaaatcgtagaagtcgcactggaa

SEQ ID NO: 48545 - DNA, 82 bp, Zea mays
cgtgtttagcagcagcagcaggtgtattgtgcgggtatgtaatggtattgcaactatattgggtgtacaaccataatacatg

SEQ ID NO: 48546 - DNA, 272 bp, Zea mays
cgcggcggccactgttcagaagaaaaacacgagggtgcttgctctgagagcaaacgggatgacacacatgttggagctatcagaacgggtgatctgttggcctcagaagttgctggcagctgggcagtggaaacagctccatctgtcaatggggagaacgaatctccaaggagcttgggagatgctacagagcgagatgaagatggaggtagcgtggcagctgatgctttgctaactttggtgaactcagagggccaggcggctgggagcca

SEQ ID NO: 48547 - DNA, 219 bp, Zea mays
agcagagcagccagcacccctggatctacgagaagtaaacatggaaagtttcacatcaaaccttgagagccagaggaagcatgtcaccatttgtgctttagcaatgttttcgaaaagattatgatctgtatcttggaaccttatttcaatggaccaaatttctttctttgccaaaaaaaaaaaaaaaaaaaaaaaaaaaaaaaaaaaaggggggggccc

SEQ ID NO: 48548 - DNA, 275 bp, Zea mays
cttaacgccgccgcggagctgctccgcgcccccgacgccggtcaacccggagcaggagcaagaggggttcggaatggccaagtctaagaaccacacggcgcataaccagtcgttcaaggcgcacaagaacggcatcaagaagcccaagcgccaccgccagacctccaccaaggggatggaccccaagtttctgaggaacttgaggtactcaaggaagggcaataagaagagttgtgaggctgagtcagaggagtgagatgatgcctgagtttgtg

SEQ ID NO: 48549 - DNA, 275 bp, Zea mays
caacgtctgaggttatcaataagctcctagtccagacgccatgggtcatgtcacagaggaggacaaggctactatcacaagcctgtggagcaaggtgaatgtggaagatgctggaggagaaaccctgggaaggctcctggttgtctacccatggacccagaggttctttgacagctttggcaacctgtcctctgcatctgccatcatgggcaaccccaaagtcaaggcacatggcaagaaggtgctgacttccttgggagatgccataaagcacc

SEQ ID NO: 48550 - DNA, 276 bp, Zea mays
cctttgacccaccatttgtcagggttctgtctccagtcctctctggagggtatgttctgggcggaggggccatctgcatggaacttctcaccaaacagggctggagcagtgcctactccatcagactcagtgatcatgcagatcagtgccacactggtgaaggggaaagcacgagtgcagtttggagccaacaaatctcaatacagtctgacaagagcacagcagtcctacaagtccttggtgcagatccacgagtcaaacggctggtacacaccc

SEQ ID NO: 48551 - DNA, 174 bp, Zea mays
atgtgtttttgattgcaaggtcgctctgtgtcagttgttagtgctgtgttcatcctcggtttcagcagacccatgcatcaaacagcatggactgcggatcgatggatgctgttacccccgtcaggctttattctaagttaatcttaaggaaaaaatggtgcttcttggtgctgc

SEQ ID NO: 48552 - DNA, 300 bp, Zea mays
caggcagagtttgatgctccagacgacgcctacatccttgacgcggccgagactgccggtgtggagttgccatactcgtgccgtgctggggcttgctccacctgtgccggcaaatcgagtctggttcggttgaccagtcggatggatccttccttgatgacgggcagcaggaggaaggttatgtgctgacatgcgtctcctacccaaagtcagactgcgtcatccacacccacaaggaaggcgacctgtactagggctagggctttccaatttggcgagggacaaaaaatgctctcgagt

SEQ ID NO: 48553 - DNA, 305 bp, Zea mays
ctagctcccgatctcgatggcgaaccctcgcgtcttcttcgacatgaccgtcggcggcgccccggcgggccggatcgtgatggagctgtacgccaacgaggtgcccaagaccgcgagaacttccgcgcgctgtgcacgggcgagaagggcgtgggcaagtccgggaagccgctcaactacaaggatttgggcttccaccgcgtcatccccgagttcatgtgcaagggcggcgacttcacccgcggcaagagcaccggcggcgagtcgatctacggcgagaagttccccgacgagaagttcgtgcg

SEQ ID NO: 48554 - DNA, 265 bp, Zea mays
gctagagttgcctagcaatttggtacggggaagtggcagtggacgtgaacaatgtcaagttttgagcatttgaattgctccttggacctgatatgctgccaatgaagctgctaggttagcatcgggaacaagtggaaggaacttctggactacaaggactccattggattcattgttcatgacgatgcaaagaagatggacaaaggcctgaagaaccgttacacggtttgatcctgatgctggaatccagagagttgtagcagta

SEQ ID NO: 48555 - DNA, 301 bp, Zea mays
ttacaggatcatcactgccaaggaccatgcctctgtccagatcaacattggccacttggatgcgaatggcctgtatgatggtcacttcacaacatttgctctctctgggtttgtccgtgctcagggcgatgcagacagctccttggacaggctgcggcagaagaagaaggctgatatcaagcagtagattttacatctagtttaccaagaattggacactgccttagctatgttttgaattcatgtcactatatgcaatgttgtgatttcagctggtaccttaaatctgaagatttagtat

SEQ ID NO: 48556 - DNA, 299 bp, Zea mays
gcgggctacatgtcgagcaaaaagacaatggagatcaacccagagaaccctatcatggatgagctccgcaagcgtgccgaggctgacaagaatgacaagtcagtcaaggattcgtgatgctgctagtcgagactgctctcctgacctccggcttcagcctggatgaccccaacaccttcggcaaccggatccacagcatgctcaaactcggtctgagcatcgatgaggacgagcctgtagaggcagaggctgagatgcctcagcttgaggacgacgctggtgaaagcaagatggaggag

SEQ ID NO: 48557 - DNA, 303 bp, Zea mays
agctaacttcactgatgttgctaccacattcaatggcatcatccgagccttaagggagaaggaatccaagttgaaggcttcaagaatgcacatttatgtccgccgaggtggtcaaattaccaatctggactggctaaaatgcgtaagcttggtgcagaactcggcgttccaattgaggtgtatgggccagaagcgactatgactggaatctgcaaacaagcaattgaatgcatcagagctacacgtaatcagagcgtactctggggtagtttgggatctgcacacacgcaattgaatgtgtca

SEQ ID NO: 48558 - DNA, 298 bp, Zea mays
cgacatcttcgagaagctggcggcggaggcggccaagctggcgcggtacaacaagaagcctaccattacgtcccgcgagatccagacctccgtccgcatcgtcctccccgcgagctcgccaagcacgccgtctccgagggcaccaaagccgtcaccaagttcactagctcctaggcgagcgatgcgacgtgcactcgtctcctcttcttaacatagtgcaatagtagtacggttaggtgtgttgccgtggtggtagttgccgctgtgtttgcttactgggctagagtcggttgatgtg

SEQ ID NO: 48559 - DNA, 259 bp, Zea mays
agttaagtggacaaaagcatacaggcatttgcatggcaaggacatgacccaggatacaacctttgagtttgagaggaagaggaacaggcccgagcgctacgaccgcaattgacggagcagaccctgaaggctatcccgcttattacaaagattaggcatgatcgtatggaaaaacacatctcaaacagacataaacctggtaaacgcaaggagatggaaaaggattccaaggagctggagcaggacatcgccatgctcc

SEQ ID NO: 48560 - DNA, 297 bp, Zea mays
ctgggaacgtgtctttggtgccctcaagggagctttggatgatggcctggatattcctcacagcgagaagaggtttgctggtttcaagaaggatgacaagcagctggatgctgatatccatcgcaagtacatctatggtggccatgttgctgactacatgaggaacctcgctgaagaggagccagagaagtaccagtctcacttcagtgagtacattaagaagggaattgaggctgatgacatggaagctctgtacaagaaggtccatgctgccatccgtgctgatccttctgtggt

SEQ ID NO: 48561 - DNA, 295 bp, Zea mays
cggctcgagagacaaccaagatggagcccttgagatcactgtcagtggtgagaagtacaggtgcctccgcttctccaaggcgaagaaatgagaaatggactggcactgactggaccaacacatgctctgtagtcagctaaatctagccacctagtcttgcaagacccttattttgattcaaattgcattctctattcttgtacaggaaatcctggaatgccgttaatagaatagcggatacttatgccaggactgtcttgtttataaaaaaaccgggctgctagagcagctgcaa

SEQ ID NO: 48562 - DNA, 309 bp, Zea mays
gtttgctcttcgtgagagaagggtgcacgttacccaggaggacttcgagatggcagtggccaaggtgatgaagaaagacacggagaagaacatgtccctgcgcaagctctggaagtgaggtaccgtgcccacctttcacggcctccccggaagctagtggcagtgccgtcatatccatatcttttaccaaagcagtggaatggtgtaacggcaatgctctggacaatgttatctcaagttgcgccgcgcatgcttatgtttaaaattttccttataacggctgtagtgtgttgttgcaaagttgattgg

SEQ ID NO: 48563 - DNA, 295 bp, Zea mays
gcggcgactgggtacctcccgactgttttaaacggctcgtctcccggcgccggcaagtttgggtacctgaagattcggcgccggtccacgtcgccgtctgattgaagagaagaagaaggaagagctctgctcggtaggccgtaccctcacggtcgtattgatcgtatcgtatcccacgcactacgcccaagatgccaataaatgggacagattgatcggcaataataatactagtagccatagaaaactctagtgataagctgcgaaacaacttgtatgtcgaagaaaatatttg

SEQ ID NO: 48564 - DNA, 289 bp, Zea mays
tggagtctgagaagcacattgacttttcactgtcaagcccattcggtggaggccccgcaggaagggtgaagagaaagaatcagaagaaggcaagcggtggcggggatgtggtgatgaggatgaggagtgaggatggacaagtagtgttacaccaatataataatattatctagttttcttgaacttgttcgaatgatgagtgcttagctgtgtgatctgacgcagagtcccctgtgctgactctgtgtcatggatggtccatttatcttgtggtatgatcagcctttac

SEQ ID NO: 48565 - DNA, 301 bp, Zea mays
gcttcgagatcaacatgaacaatggaagcacaagtacgggaatccatgtagaagcgtgaagatttttcggtgccaattgccacggaataatgccttctactcagctcaactccaaagcatgatggctctaacaaaccactctgtctaggaggtagtgttgtcttctgtagagtggcagttgacagtatatatcctgcactagatgttgtataaatatgcgaaattgtaaatgtttgatactgacttctgcttctcctgatttcttgatatggtcatttattacattagtagtttctgtcag

SEQ ID NO: 48566 - DNA, 287 bp, Zea mays
caacgtttctgagctggagttgctcatgatccacaacaggacctactgcgctgaaattgctcacaacgtgtccactaagaagcgcaaggagatcgtggagcatgctgcgcactcgacattgtggtcacgaacaagcttgctaggctccgcagccaggaggacgagtagtctggtttcttgtcttaacgtagaactggatgttgccattcctttctgtaggaaactactttgcttgtgtcatgttagtactgaaaaccaggatcactcctacctttttgcaatcagta

SEQ ID NO: 48567 - DNA, 161 bp, Zea mays
gtaagcatgtgaacttccgatgttgccacatgctggatcagtctgaataagtaagtatgcagctctaggtggtcagctgcgtctaccacaatgagcatgacgtatggagaaatatctgtgaacccattttgtttatgaataagatttgtttttttcgagtt

SEQ ID NO: 48568 - DNA, 111 bp, Zea mays
aaataaacaattgagcggttcattaaagtttgaactcaaataacatgttctttgtaagcatatgtaccgtacctctacgtgagataaagttggtgaattagcatcgaaaaa

SEQ ID NO: 48569 - DNA, 318 bp, Zea mays
gctgcgcactgtctgatgctcagaactcatcactcttcgtaaagattttggtgattgagatcttcggcagcgctctgggactgttcggtgtcattgtgggcatcattatgtcatctcaagcgacatggccagcaaaagcttgattttcaccatttgtagctctgtaaattattcagatggagtgtatcgaaatgtgcatgtggtctaactgcattttcatgttccttttatgtggcgtcttttttggcagaacacgaaatgcggcgcgcgtaccgccaccgattgtagagttgctattcttactgccggagtactcca

SEQ ID NO: 48570 - DNA, 307 bp, Zea mays
caagggcaccatgagactggcggtggacaagtggggccggaccgacctgactgattcttctgttttcaaggtgaatgaagacaacaacatgtcactggtggagtacgagctggtggatgtggatgaagaggagtgagctgaagcgatattgcattgccatctgttgggccaagtcgtgctgcggatatgtatttccagctaaaggagggcggtagcgtttaggcttctatctagttatttattattattattatcctggaaggctggcgattgggacggttagttttaagaccatcctaaagaagca

SEQ ID NO: 48571 - DNA, 308 bp, Zea mays
  unsure (1)..(308): unsure at all n locations
cggctcgaggcgcttcgcccactcgctccagccgcttcaccgcgccgccaccgccaccgcgaggatgccgttcaagaggttcgtggagatcgggcgcgtggccctggtgaactacggggaggactatggccgtctcgttgtcatcgtcgatgtggtcgaccagaacagggcacttgtggatgcccctgatatggtcaggtgccaggtgaacttcaagcggctctcacttactgacatcaagattgacatcaaacgtgtcnccaagaagacagccctgatcaaggcgatggaggaagctgatgtgaaga

SEQ ID NO: 48572 - DNA, 237 bp, Zea mays
cgaagatgctttgcgacgtttgattgaagttgttatgccagagaattagtactcctttcattcttttttatttgttgtgttttagttcaaaaatgaagtagcgagcgacaaatattcgagaacagagttagtaggcagatttagagggttgttgattgatgcatccgtgggggtgcttctgcttggttgattgacagaaacaaaaaggaaagagagcagcaagggatggttgggtgc

SEQ ID NO: 48573 - DNA, 309 bp, Zea mays
caactcttacttcaaggaacttctgagtggtgataaggagggccttcttcagctcccaagtgacaaagccctgctgagtgaccctgtcttccgccctcttgtcgagaaatatgctgcggatgagaaggctttctttgatgactacaaagaggcccacctcaagctctccgaactggggtttgctgatgcttaaatagaccctatcctggagtgatacattctgctgcatgtggtcttttgcatctggagtcaatgtgaacaagcagattgtcgtattgtctttctcgtaataaatttgtcaatgttgag

SEQ ID NO: 48574 - DNA, 303 bp, Zea mays
agcatttgttgcgattggagcaaccatggtaggaagcatcacgttcttgaaaaaagagggtgactacgtccgcaaaggagatgagtttgggtatttctcctttggagggagtacagtgatatgcgtcttcgagaaggacgccatccaatttgacgctgatctcgtggcaaacagcgaaaggtcactggagacccttgtttctgttggtatgaccctgggcatctcgacaaggaacaaggagatgcaagtcccggatctgcagaaagtttcgctcggatgacagacagagctgtaaactgtgtg

SEQ ID NO: 48575 - DNA, 298 bp, Zea mays
ctccagagtgccgagtctgatgaagagggtgacgacgagtgaagaggccacgctgctctactgctaatggccgaacttgataatattatttcaataagtttgttttgcttgcctggtgtcggtgtttaaaactgttaattgtcgtgtggcgcacatactcttctgttgctgcatgtgtcgtcgtcagtttggttgtctgttggatgtcacagtttattatggattgctgatatacaagtatttgtttcggatgtgttgtataaccgttcgggatgtaacttttatgattgcactgttg

SEQ ID NO: 48576 - DNA, 303 bp, Zea mays
tgcttgattgttccaggtattagcagtcgaccggttcctcggagcacgatgaagtttgttgctgcctacctgcttgctgtcctcgctgggaacgccagcccctccgctgacgatttgactgccattctggagtcagttggctgtgaagttgacaatgaaaagatggaactcctgctgtcccaactgagcggtaaggacatcaccgagctcattgccgcgggcagggagaagtttgcttcagtcccatgtggtggcggcggtgtcgctgttgcggcactgcacctgctgctggcggactgcttc

SEQ ID NO: 48577 - DNA, 87 bp, Zea mays
ctttcattgactaatctagtgactagtcagttatgggtttaatgtttggctttggttttataaaaccccacaaaaaaacaaaaaaca

SEQ ID NO: 48578 - DNA, 290 bp, Zea mays
ggctcgagtatcaactgccggaacaacaaaacgttgcttggtcgcgtgcgagccttcgatcggcaatgcaacatggttcttgagaacgttagggagatgtggaccgtggtaccgaagaccggtaaaggcaagaagaaggctctcccggtgaacaaggacaggttcataagcaagatgttcctccgcggggattcggtcatcatcgtcctcaggaacccgaaatgagtaacctgtacacgtagagagtctgtttgctaagcagtacgttgtgctattgggggtaaggtgta

SEQ ID NO: 48579 - DNA, 302 bp, Zea mays
aaccggaagctctggaagcaccgtgactgaccttggggttgtaggcagaggcgtcaaacgagctagcatcaagccgatctctgctgaacctgctgctaagaaacctgcacttgattcaccatctcaacaaggtgacagcagcatcaactctgaggttgttcctgcaacgcagactggagacgagtcagtatctaagtaaattacaatttcattagccctactgtaatgttaacttgctggaacatagtagctgctatgtaaacgcttaagaagggactgctggggccatagactcatcgtga

SEQ ID NO: 48580 - DNA, 300 bp, Zea mays
gaacccggtgacccctgccgccgcaaatggcaaggccaagtagatgtgccatcacttccgcactggagtgaaaaagaaagtatgattgggtcctgcctaggccccatagatatagctcttatttgagaaggaagagagattaattcagcagcagcttttataaattctttgttgtcatgaagcaggtggttcttttgtagttgatgaaagggatttgtcgtcgctatcgtttacataattcagacaataattgtatattgtgtaattctgagaatcaaagcactgtttgtgttatagcat

SEQ ID NO: 48581 - DNA, 302 bp, Zea mays
gacgcatacttcatcgtgtaactcatcatggtgcacaaggccctgtacatgcagtcttgagcgagaactgggttgtttatcattattttaatctgcgagctcacagatttgaaatggcggtgattgagatatatgatcaatctagggcggacaataaagatgtcatgaagctcatacttgggaagcataatctttcagcaccaattacatcatacgcccgccctgaggtggcagtaaaatcccagtcatactttttcacccattcagtaaaagcaatggcagttacacaaacggctaagggg

SEQ ID NO: 48582 - DNA, 307 bp, Zea mays
gatggtgggcaacaaatccgacctgatccacttgagagctatctctgaggacgaaggcaaagcgttggctgagaaggaagggctgttcttcctcgagacgtcagctatggaggccatcaacgtggaggaagccttccagactattatcacggaggtgtatggcatcgtcaacaggaaagcgctggccgccaaggaagcagcagccacagctgccccattgccttcacagggcaaaaccatcagcattgacagcaatgcaggaaatacaaagaaggcatgctgctctacatgaataaaaaagatgtaa

SEQ ID NO: 48583 - DNA, 80 bp, Zea mays
ggctatggcatgaactcaaaccatcttatgagggtgaaacctgtgtctaatttctaagacagaaaaaaaaggagagagaa

SEQ ID NO: 48584 - DNA, 301 bp, Zea mays
ggatgtcccaatcaaatacctgaacttcttccttgaagatgatgacgagcttgcgcacataaaaaaggagtacaaggagggaaggatgttgactggtgaagtgacgcaacggcttattgcagttctatctgagattgttgctagacaccagagagctagagctcaagtgaccgaagagatggtcgatgcattcatggcagtgaggcctcttcccaagatgtttggctgagcatcacggcgacaacttgaacaaacatttttgttatcagggagaagtttaagagtctttagaattgtcgtg

SEQ ID NO: 48585 - DNA, 274 bp, Zea mays
cgaacaccgtaccatttggatctcctactggtcccagtgcgacgccgctcttggccagaagctggcttctaggctgaacctgaagccgagcatgtaagatcgacgaggaagaaagcaggcaccggtggccaaggatgcaacgcaacatggagcgtgtgatgtttacaccaatataattgaataaacaggggatgtgcgcgtagtcgtacttatgctgatgctgatggtcggtggtcgattatatatactggaacttctggtgtatgctcttctc

SEQ ID NO: 48586 - DNA, 134 bp, Zea mays
agggatattacctcatgctgataatttggcccacattggtggatttgcttctgggttgcttattggatttgtgctgctggaaagacctcaatttgggttgatggacacgcagcgagctacctcagactagtcaa

SEQ ID NO: 48587 - DNA, 303 bp, Zea mays
cgagaaattcgaggtgccagcgaagatcgtgctgttgcctgaaccgtggacgccggagtccgggctggtgaccgcagcgcttaaactgaagagggagcaaataaaggccaaattcaaaggcgatctggacaagctctaccactgaagaagcgacagaggacggtttaatttgcacctactgcttccagacgcttgcggtgccaaaagctgcctggatggaacttttactgacctgcacgagtggtgtgtgtgtgtgtatcccagctgctgatacacaggagcttcgttcttctgtgactgtga

SEQ ID NO: 48588 - DNA, 299 bp, Zea mays
attcggcgaacaatgtgatcattgaggaggtgaacaagggcctgaacccaggaatggtggttctgcttgtggttgcaagcttcctgctgctcttctttgtggggaactatgcgatgtatgtgtatgcgcagaagacgctcccgccaaagaagaagaagccggtgtcgaagaagaagctgaagagggagaagaaaaagcagggggtctctgcgccgggagagtaaacggccatgctgcggatcctcccgtccagagctcctattcacatgattattaaggaaaaaatttatatatatata

SEQ ID NO: 48589 - DNA, 300 bp, Zea mays
gtcgtgaccaccaagcacaacgatgacgagcagtacgtgtgggagtcccaagcgggcgggtcgttcactgttactcgtgacacgtcaggggagcagcttggcaggggcactaagatcacactgttccttaaggacgatcagctggagtaccttgaggagcgtcgcctcaaggatctggtcaagaagcactctgagttcatcagctaccccatctcccgtggactgaaaagacaacagagaaggaaatttctgacgacgaagacgaggaagagcagaaagatgctgaggaaggaaaggttg

SEQ ID NO: 48590 - DNA, 302 bp, Zea mays
tgaggcgaagaagcccaaggccacagtgaccgacggtgctggaagcagtggcgacaaggatgagaaagaggacgaaaaggaggagacagcaggcccacgtcggaggacccgaagggagacatagagacctatttttgatgtgtttggatgttctggcgcctgcttattttgaggactcttaatatttctgagtgtataataggaacttgtgtcacctctgcggcttccctgctgcttatttgtttttacatggttagaccaggaaccttcacgatagacagaatttagttcttgttggtcaa

SEQ ID NO: 48591 - DNA, 296 bp, Zea mays
cgctgacgggggacggcggtgcggcgtccatggccggcttctccgcgcgcgggtggtgggtctcgaaggaggatggcaacgcggtgcaactgaaggtgccgatgccagggctggggaaggagcacgtgaagatgcgggtggagaaggacgccctggtgatcaagggggaggccggcaaggacctcgagggcgacgacgacaagggcccggcgcgtacagctaccgcatcggcctctcctcccaggctttcaagatggaccagatcaaggctgacatgaagaacggcgtgctcaggg

SEQ ID NO: 48592 - DNA, 299 bp, Zea mays
gtcagtcacttgatgggaaacatacaatttttgggagggtatgcagaggaatggaaattgttaaacgccttggaagtgtgcagactgacaataatgacaggcctatccatgaagtgaaaatcttgcgagccgttgtcaaagactgaagcattatccagatgtaactccgagtgttggtttaggctttaataatggccatgttcatgtaagtggtgctttgcgaaaaggtgaaaagtgcagctagttccagcctatatgactatggtctctcgatgtggctgacctgaacacctacctga

SEQ ID NO: 48593 - DNA, 303 bp, Zea mays
tgatgcattcccatgattatgtttccaaaaggttagcattagttggagatgctgctcatactgtccaccccttagccggccaaggtgtaaacttgggctttggtgatgctgctgctttagcaaaagttattgctgagggagtttcagtgggctcggatgttggggatctgactttgctacagcggtcatgagaaggagaggaaggctgccaatgtggcgtggcagcagtgctagatggttttcagaagatgtactctgttgatttggggccccttaatgtaatgagaactgctgcgttccacg

SEQ ID NO: 48594 - DNA, 296 bp, Zea mays
cagtctttggctgggattcccttgcttgtccttggcaacaaaattgacaagtcagaagcgctttcgaagcaggccttggttgatcaacttggactggaattgataaaggaccgggaggtttgttgctacatgatctcgtgtaaggattctgtgaacatagacgtcgtcatcgactggcttatcaagcactctagaacagcgaagtaggctttctgtgtgtttgtatcgcttgatgcacggtgttttatcttttgtgaatctgcgcttcccagaagcctggttccttggtccccatg

SEQ ID NO: 48595 - DNA, 294 bp, Zea mays
cttttgatggcacccatggtgtcagcgctggaattcggagcgtaatggatgatgaagctgggaaatcaaatggtggtctcaagagtgatccaatgtgcaatgcttgtgagatggctgtggtatggatgcagaaccaacttgcccagaacaagacacaggagctcatcctgaactacattaatcagctttgcgagcgtcttccgagtccgatgggagaatcagccgtggactgtggcagtcttgcgtccatgcctgacattgcgttcaccattggaggcaagaagttcaagctga

SEQ ID NO: 48596 - DNA, 278 bp, Zea mays
acagcttgctgatgacaagaccgcaaaggactacaacatcgagggtggatctgtcctccatcttgtccttgctctgaggggtggttactagtctaaacctgatgaatatcagtcagataaactgttgtgttggctgcgaaatgtgcaggcctgatgttgaacttgcaaggagatagtaacaaattatcagctttgcgcctttgcccagtggaaggggctctcttccaagttattgtctgatatggaattgttccagattatcatgtctcggcgtttac

SEQ ID NO: 48597 - DNA, 287 bp, Zea mays
caagaaatctcagtggcaagacgtaattgatctgaatcttactggcgtcttcctttgtacacaggctgcaacaaaagtaatgatgaaaaagagaaagggaaaaattatcagcattgcatctgtagttggtcttactggcaatgttggccaagctaattatagcgcaccaaggctggagtgattggtttcacaaaaacagttgccgggagtatgcaagcagaaatatcaatgtgaatgctattgcaccagggttcattgcatctgatatgactgccgaacttggagaa

SEQ ID NO: 48598 - DNA, 278 bp, Zea mays
gtggatgaaccggcattagaatatctcgctgccttcgcagatgagtttttggttcatggtgttgatgtggagggcaaaaggttagggattgatgaggaacttgtggaactattggggcatcattcaccaatcccagtaacttatgctgggggtgtgtcaacaatggatgacctagagaggataaagaaggcaggcaaaagtcgagtagatgtaactgttgggaatgctctagatatatttggaggagatttaccctacaaagatgttgtcctttggca

SEQ ID NO: 48599 - DNA, 307 bp, Zea mays
cccaatggatcggataggattacatcatatccgctacaggagttaaagccaacaaaatccattgaagacaatgctgagataaaggcatggcttgctttggggacgagatcaaagaagaagggtggtggaaagaagaagaaaggcaagaaaggagatgcagcaggagatcccatggaggcgacaaacgatgctacaagccaagaataattctgatttttggaattactgcacccagcattttctctcttgtttcttcgctgcatctgatggtgttatattacattcagttgcgaaaaatgaatacttt

SEQ ID NO: 48600 - DNA, 244 bp, Zea mays
aaccgtttgtatcgtttcgtgttcattgtagtagtagcccatctgtgtttatgaccgcaagcacgctcctctgatgttgttagtgatgtctacagaaagaaaaaggaaagaaaaagggagaggaagaaggaaagaggaaagaagaaaaaaggaagagaagaaaaaggagagagagtagaggaagaagaggaagcgaagggtaggggagagggctaggcggaggagagaggagaggaaggagagg

SEQ ID NO: 48601 - DNA, 306 bp, Zea mays
ccaacagctcctctcgcgcagggggcgcctgatagtgatgtgctctaggggagatgccgcggctgtgtgccctagcggtgggtcgtgcagagtcattgaagttccacaggttgcagactgtctccagccagtgatcaacataattccattacagttgctcgcgtaccatctgactgttctccggggattcgacgtggaccaaccaaggaatctggcgaagagcgtgaccacgcagtagggagaggtagatgagatgtttgtattgtagttaattgtccttgctcttgaggtggctagtacgtagca

SEQ ID NO: 48602 - DNA, 309 bp, Zea mays
tccacgagcagctgtctgtggcggagatcaccagcagcgcgttcgagccggcttccatgatggtcaagtgcgacccacggcacggcaagtacatggcttgctgcctgatgtaccgcggcgacgtggtgcccaaggacgtgaacgccgcggtggccaccatcaagacgaagcgcaccatccagttcgtggactggtgcccgacggggttcaagtgcggcatcaactaccaggcgccgacagtggtgccgggtgccgacctcgccaaggtgcagcgcgcggtgtgcatgatctccaactccaccagcgtcg

SEQ ID NO: 48603 - DNA, 307 bp, Zea mays
gtgtttacaagggagaagcagagaagatccttatggtgaagaaagcggaggcagaagcagaggcgaaatatctttctggtgtcggtatcgctaaacagcggcaggcgataaccgacggccttagagagaacatcctgaacttctcacactcggtgtcgggcaccagcgcgaaggaggtcatggacctgatcatggtcacgcagtacttcgacaccattcaggagctcggggacggctccaagaacaccacgatcttcataccccacggaccaggccacgtgaaggacatcagcgagcagatccgcga

SEQ ID NO: 48604 - DNA, 298 bp, Zea mays
tctgaagcgactagtcgaaggcggcggcggcggcgatggggagcgacctggagacggagaagaagaagaccccggtggcgctgatgcccatcgcgaacctctcgctggaaagaagctctgcaagcggaccctcaagctcgtgcgacgagcctctgaggccaagtgcctcaagcgcggagtcaaagaggtagtcaagagcattcgccgcgggaacaaagggttgtgtgtgattgctggaaatatttctcctattgatgtgattacacacgttccaatactatgtgaggaatctaatgtt

SEQ ID NO: 48605 - DNA, 302 bp, Zea mays
gtgagcaagtttgggatcagcaacgtgtatctgggatttgcatcagtatgtgcccttgcagttctgtacatagctgggaatgtggtcgagaccaaggggagatcacttgaagagattgaaagggagctaagtgtagcagaatgatgtacttttgctagtcatgctgtggcgccgttttggttatcgagaatgcaaccaagcgctcaaccgagcatccttggacctggagactctttctagtttcatgtagttttagaaataagcgaacggcaagagtaccaatcttaggtgacttggtgtgg

SEQ ID NO: 48606 - DNA, 302 bp, Zea mays
gccagagatgagctccacaggatgctgaacgaggatgagctacgtgatgctgtgctgcttgtttttgccaacaagcaagatcttcccaatgccatgaatgctgctgagattactgacaagcttggattacactccctgcgccaggacactggtacatccagagcacttgtgccacaactggcgagggtctgtatgaaggcctggactggctgtccagcaacattgcgagcaaggcttgaggcctaccttgaatgtcaaccgcgaactgactaggagctccggatgtatcatggaaactcagg

SEQ ID NO: 48607 - DNA, 304 bp, Zea mays
caaggctgaggagaggaaagttgaagttgacaaggatctgcgttctctgcagccactttcaaacaagaaagaaaatgatgaagttttcattaagctgggttctgacaaggataagaagaaggaaaatgctgagcgtgatgagcgtgccaagaagtcggtgagcatcaacgagttcctgaaacctgctgaaggagaaaggtactacggcggccgtggccgtggaagggggggccgtggggatcgtggtggttttagaggcggatacggagggggatacagtcgtggcccagctgctgctgctcca

SEQ ID NO: 48608 - DNA, 301 bp, Zea mays
gaaaatcaaggacccagaggctaagaagcctgaggactgggatgacaaggagtacattcctgaccctgaggacaagaagccagagggctatgatgatattcccaaggaaattcctgaccctgatgctaagaagcctgaggactgggacgatgaggaagatggtgaatggactgcccctaccattcccaacccagaatacaagggaccatggaaacaaaagaaaatcaagaacccgaactaccagggtaaatggaaggcacctatgattgacaacccagatttaaggatgatccatacttta

SEQ ID NO: 48609 - DNA, 300 bp, Zea mays
cctggtggaggtactggcggtggatacggtggaggtgcaggagcaggaagtggctctggaggcggctatggtggaggcgctggtggaggctacggtggtggtgctggcgctggtagtggcagtggccttggctctggcggcggtggaggttatggtggtggtgccggaggcggaggcggaggtggtcgtggaggtggcatcggcggcggtgtgtgattcaacctcttacatccatgcatggcgtgtgcatgcaagtgctcgacgcactcctcttgcagtttcaggcatgcgtggagtcaa

SEQ ID NO: 48610 - DNA, 298 bp, Zea mays
tggaaccctgaggggacatttgtttccatgggtgtgtattccgatggttcatatggtgttccttccggacttatttactcattcccagtaacatgcagtggtggtgaatggaaaatcgttcaaggtatgatcgttgtagtgttgaaagtaaagacttgacacagctatttggtgcctttgttcgttgtagtttttgtcatagatagctagatgttgcagtttcttcggtagctcttggtgtctgaaattctgcatgtgcagttataattggcctaaatgatttcaataagatcttgcc

SEQ ID NO: 48611 - DNA, 295 bp, Zea mays
aaactgtacttgtggcagggctgaggccgaggagaaggttgggaagctggagctcactgcggacagatcaataaccctcagtcagcttgtggcagttgtgggttagctgatgccttccgctgtggaacctgtccctacagaggtcttccaccattcaagcctggcgagaaggtttccttgtctggcaacttccttgctgctgacatatgatggcatcgccaacatcggcaaaacaaggagacgcgggtacctacgttgttagtcgactgaactgcattccaaatagcttctgtta

SEQ ID NO: 48612 - DNA, 214 bp, Zea mays
ctcgagcaccaagccgagggaaggggaggagcgatggcgcgcggcgtggtgtcggcgaagggcggcgcggtcgcgggcaagaagaaggggtcggtttccttcacgatcgactgcaccaagccagtggaggacaagatcatggatgtcgcctcgctcgagaagttcctgcaggagcgcatcaaggtcgccggcggcaaggctggcaacctcggcg

SEQ ID NO: 48613 - DNA, 297 bp, Zea mays
gtgaaccgccgccgacgcagcagcaggagacgcgccaaggagagcccgcaaggaggcgactatgagggccaagtggaagaagaagcgcatgaggaggctgaagaggaagcgccgaaggatgaggcagagatccaagtaggctgatggggattgtggatggtggtgtcggcatagttgtgttacgtttcttcgatgcgtgagttcatggagagatgtcacatcctagttcgtcgtcaccgtttgccatgggtccaatggctcgtcttggaaacctgcacttcagtaggccatctatcg

SEQ ID NO: 48614 - DNA, 295 bp, Zea mays
aggcgttgcactgccagaagaagggcattcttgaccagattgtcgacccctacctgaagggaaagatagccccacagtgcttcaagaagttcgccgagacagccgagaagtgtgtttctgatcagggcatcgaccgcccttcgatgggtgatgtgctctggaacctggagttcgcccttcagatgcaggaaggcgcagaagagagcggaagccttggctgcgggatgtcagacgagggcgccccattgatggtcgggaagaaggatccgaacgacccatcgatcgagtcaagcac

SEQ ID NO: 48615 - DNA, 296 bp, Zea mays
gacaacatcctgtatggcaaggacggggccacggaggccgaggtcgtcgaggcggccaagctggcgaacgcgcactcgttcatcagctcgctgccggaggggtacaagaccaaggtcggggagcgcggcgtgcagctgtcgggcgggcagaagcagcgcatcgcgatcgcgcgcgccatcgtgaaggacccggccatcctgctgctggacgaggcgacgagcgcgctggacgtggagtcggagcgcgtcgtgcagcaggcgctgaacagggtgatgaggaaccggaccaccgtgat

SEQ ID NO: 48616 - DNA, 282 bp, Zea mays
aaagttcctgaagaacggtgatgctggtatggtgaagatgatacccaccaagcccatggtggtggagacattctcagcgtatcctccccttggtaggtttgctgtccgtgacatgaggcagacggttgctgttggagttatcaagagtgtggagaagaaggacccaaccggcgccaaggtgaccaaggctgctgccaagaagaaatgatgcgatcctgcgcctgctttagcaatacctagttttcatcattacaagttttgtttgtggtcgttgctgttatt

SEQ ID NO: 48617 - DNA, 138 bp, Zea mays
ctagttcctctcctgatggtagtaactagtctagttttggagactgcctgcttttggttgtgtcttacgcctatccttgcgtcaatggacatatccgtttgttttcaaccaagggattttaccatgtctgtaatttcg

SEQ ID NO: 48618 - DNA, 293 bp, Zea mays
agctgcctcctctatcgacagcatcgtgaacggcagcgacgccgtcatggagccggttgttgctggcagcaacacggtagtagctgttgcccaagttgagttgcaaacaatgaacgtgcagcagcccgctgatgttgccggacccagcgagggggtggcggcgatctccaaaggggggaaggtagggccgaaccggtgcagcgcctgcaggaagagggttggacttacgggattcaactgccggtgtgggaacttgtactgcgcactccaccgctactccgacaagcacgact

SEQ ID NO: 48619 - DNA, 117 bp, Zea mays
  unsure (1)..(117): unsure at all n locations
tgtcgtgagtcgtgactgagttgggntatctggaccagttgtgttctcgttacccaaaactatcgtgcgaccgcatatggcttaatcatgaataaatgttgtttgaatttgaactaa

SEQ ID NO: 48620 - DNA, 274 bp, Zea mays
cgactttgctgtcgacattggcaggaatgtcattcatggaagtgacagcattgagagtgctaataaggagattgccctgtggttccccgagggccctgctgattggcagagcagccagcacccctggatctacgagaagtaaacatggaaagtttcacatcaaaccttgagagccagaggaagcatgtcaccatttgtgctttagcaatgttttcgaaaagattatgatctgtatcttggaaccttatttcaatggaccaaatttctttctttg

SEQ ID NO: 48621 - DNA, 148 bp, Zea mays
caagatcttggtgggcaacaaggtcgatatggatgcgaacggagtggtctccacagctcaaggtcagaagctcgcagatgaatacgggatcaagtttttcgagacgagtgcgaaaacgaaccgatatgtggagcaggtattcttcgcc

SEQ ID NO: 48622 - DNA, 288 bp, Zea mays
tggctgtggtatggatgcagaaccaacttgcccagaacaagacacaggagctcatcctgaactacattaatcagctttgcgagcgtcttccgagtccgatgggagaatcagccgtggactgtggcagtcttgcgtccatgcctgacattgcgttcaccattggaggcaagaagttcaagctgatgccagagcagtagtccctgaaggttggtgaaggacaggctgcccagtgcatcagcggattcacagctatggatatcccaccaccccgtggatcttgggtgatgt

SEQ ID NO: 48623 - DNA, 289 bp, Zea mays
atactggtgtgttcatcaatggccgagaacttcaccagaaggacatggacttacttgtgggtcgagggcttcccgattctcctgatagatcatacagagttgagatttctggtaaagtatccgacgaagtatctggtgaagagctttattgccttggcaaactcgcaccaacggtggagaagatgaagcgcgggttcgggatgcgagtcccaaggatcattcagtgaagttggttcacatcgagaagcagaggctctgaaagttgtgtgcttgtggtatccattgctaa

SEQ ID NO: 48624 - DNA, 291 bp, Zea mays
caggtacttcagacatgagcgagacgcgcaagaattcaaactacagcaagtgggagttagttccgtttgagaagctgagaagagaagcgcaagaacaccatatccaaatgggtggcgtgtctctatacaagatggacggaaacaagttggatgatcttgtctgtgtgaggcatcagcgttcatcaagttaagaccgtggccgcctaagcctagttgtttggacgctgaattgatttcatggtggatctgaaaggatgctagacagcaagagcgatgaagcagctctgctgt

SEQ ID NO: 48625 - DNA, 280 bp, Zea mays
atatacttggatcctttgttaacatcaaggtcgcgcgggattcgctttgcagtctcatcttgggttcacctgctggcaaagtgtattctaagctaagggctgtatcagctaggttggcggaaaggtattaaattagattggttttgcttgtaccatgtaacggttgcagttttgctcacagtatgttttactaccggatttgtgtgctcggggatgctgggagatttaaattggtgtgtacatgtgctcttgtgccaccacaatctattgattttgatga

SEQ ID NO: 48626 - DNA, 185 bp, Zea mays
gtgaaagactgcttgatgatttgcgggtttgttgctgtgtaaaaaaaggtcccatggctcccagaagaccatgaaggttcggatctatcatgtaattccttgttatctgccaattatgtatggagtatggacatgtgttgcgctgttcaacttactactacaaataagtaatcgatatgttccct

SEQ ID NO: 48627 - DNA, 270 bp, Zea mays
gttggaatttggggatgcaaggactgtgggaaggtcaaggctggcggtgcttacaccatgaacactgctagtgcagtcactgtcaggagcacgattcgtcgcttgatagagcagactgaagcatgatttagcttgctacatcagggttctcctagttgctgttgtcgggaatgttgagctcctctagttggatcacgagactggctaaaagttgggtgctaagatttgtagttggttaccgttgtgaatttctcaagtgatatttgtctc

SEQ ID NO: 48628 - DNA, 142 bp, Zea mays
ataggagcttatgtcacctctgcggcttcccccgctgctgatttgtttacaatggttagaccaggacccttcacgagcgtagaatttagttcttgttggtcatttatgtgctgtgcctgacggtgttcaatcagatagaggt

SEQ ID NO: 48629 - DNA, 283 bp, Zea mays
ctggatcagctgagaagatgctttgaaagtacaatttgcagctgacaagagatctaacacctgatcagtaaaacaacatgatagagatcttatctgactggttgggaacatcagatagcctgttgcatcaaattcaggagaaaatcaaatgggctgacacaatgagtgatgtgaacaagaagcaccagaaagaatttgaagacagagtggaagaggccaaaaaatcaattaagaagttgaacaatttaagcaggcagacatcgacatgacgactacctctctg

SEQ ID NO: 48630 - DNA, 282 bp, Zea mays
ggaagcaccgtgactgaccttggggttgtaggcagaggcgtcaaacgagctagcatcaagccgatctctgctgaacctgctgctaagaaacctgcacttgattcaccatctcaacaaggtgacagcagcatcaactctgaggttgttcctgcaacgcagactggagacgagtcagtatctaagtaaattacaatttcattagccctactgtaatgttaacttgctggaacatattagctgctatgtaaacgcttaagaagggacatagactcatcgtgagct

SEQ ID NO: 48631 - DNA, 279 bp, Zea mays
gtggcagggctgaggccgaggagaaggttgggaagctggagctcactgcggagcagatcaataaccctcagtcagcttgtggcagttgtgggttgggtgatgccttccgctgtggaacctgtccctacagaggtcttccaccattcaagcctggcgagaaggtttccttgtctggcaacttccttgctgctgacatatgatggcatcgccaacatcggcaaaacaaggagacgggggtacctacgttgttagtcgactgaactgagcttctgttagcca

SEQ ID NO: 48632 - DNA, 277 bp, Zea mays
cgccgaaatccccaagtttgtcatggatgaggtctatgacatggagctctatgagtggaccaaggtcgacctctctgatgaggcccagaaggagcgggtcaatgccatgatcgaggaccaggagccttttgagggcgaggccttgctagatgcaaaatgcttcaagtgagcctcatctctttggagtgctgctcaggaaagagttgtttaggtttttgggtctaattctaaaacagctatgaatgttagttttgatctggggtgctgtgttgagact

SEQ ID NO: 48633 - DNA, 280 bp, Zea mays
cgatttgtctttgcagacaataagctaacttcattcaatattgggcctgacgatttgggcaagaaatttagaagtgattgcgtgattgaaagaattataatcctcggtttacgatccggagtgaagaaggctattattgagcctggaaatcaagaactagaaattgaatcagggccaattagtttaaggagtggttccagcccagtcgcgccaacaatccggaggcccaatgtttgcattgcagacagttggactataaggaggtaggccattcacatct

SEQ ID NO: 48634 - DNA, 278 bp, Zea mays
gaaggaggagaaagatcttgtggctcagcagaacatgtatgcgcaactgcttcctcttgccctgcctgctccgccaatgcccggcatgggtggccctccacctccgatgggcggaatgggcatgcctccgatgggcgggatgggcatgccgccgatgggccctggtccgatgccagcattcgggatgccaccaatgggaagctactgagatgtcttttttggcagagagcttaaatgatgatttgatatgttcctgtgtagaaacctcattggagttg

SEQ ID NO: 48635 - DNA, 289 bp, Zea mays
agctcgagccgtgagttgcaaacaatgaacgtgcagcagcccgctgatgttgccggaagcagcgagggggtggcggcgatctccaaaggggggaaggtagggccgaaccggtgcagcgcctgcaggacgagggttggacttacgggattcaactgccggtgtgggaattgtactgcgcactcaccgcggctccgacaagcacgactgcaattcgactaccggactgctgccagggacgccattgccaaggctaatccggtggtgatagcagacaagctcgacaagatct

SEQ ID NO: 48636 - DNA, 307 bp, Zea mays
tgtaacaagaaggtgactgaagcttttgggtctggatactggtgcgaggggtgccaaaagaattactctgagtgctcgctgagatacatcatggtgatcaagctctccgatcccactggcgaggcttgggtgtctgtgttcaatgagcatgcagagaagatcattggctgcagcgccgacgagcttgatcggatcaggaaagaggagggggacgacagctaagatctcaagctcaaggaagccacctgggttcctcacctgttccgtgtcagcgtcacgcagcatgaatacatgaacgagcaagagg

SEQ ID NO: 48637 - DNA, 302 bp, Zea mays
cgtcatcacataaattttgaagaacgttttagaatgagttgaggcgcttacacaaactttcattccggcctcttgttccatagtttttcttgcatgttacatctcaccgatgaataaaatgtatgtatcagacttgtctcgtttttttgcccatccaagcagcaaattagccgctggcacagcatgcggtaataatcttgtcacagtgctgtaattgggagcgtttttcttgttagaagtgtttctggtttgtttgagcatttgcgtatcgatttttctttctgaagagtataaattatttt

SEQ ID NO: 48638 - DNA, 216 bp, Zea mays
gcgctatttaccagaggcccttcatgaaggggaagctctacattcatttcacggtggagttccccgactcgctggcaccagagcagtgcaaggctctcgagtcggtacttccgccagagccttcgtccaagctgacagacatggagatagatgaatgcgaggagacaccatgcatgatgtgaacaacatcgaggaagagatgcgcaggaagcggct

SEQ ID NO: 48639 - DNA, 160 bp, Zea mays
agaacttccagaagtgggcagctgtggtggtgccttctggagaagagcagagatacacatgccatgtacagcatgaggggctgccgaagcccctcaccctgagatgggagccatcttcccagtccaccatccccatcgtgggcattgttgctggcctggc

SEQ ID NO: 48640 - DNA, 300 bp, Zea mays
  unsure (1)..(300): unsure at all n locations
agatagttctagaccgccatcgagataaggaacttcctcggcgagaagaaggtcagaaaggtggacatgcttgacggcgtgaccatcctccgctccgagaaggtcaaggacgagcttattctcgatggcaacgacgtcgagttagtctctcgctccgccgccctcatcaaccagaaatgccatgtcaagaagaaggatatcaggacatntttggatggtatctatgtgagcgacaagggtgtgatcgaagaggagcagtgaaggacaagttatcgtttgagttggatgcatcgtttggtt

SEQ ID NO: 48641 - DNA, 293 bp, Zea mays
  unsure (1)..(293): unsure at all n locations
cccgtggttgcgcctgtgtctgcagccatggcggtgacagcctccacctgcggctgcgctatnggggagaggagcgacgggctggtgacacggcgcgacgccgaggacgttgggtcagtggtagttagacccgagaggaggctggaccacgcgtggatggtgtactccacgctgaagatgggcagcgctgaggctgtcgcgagcgagatgtgcgaggctctgctggccatgctcgttgagattggcaggaagaaattttgctgaccatctggtcatctggagttctccatggt

SEQ ID NO: 48642 - DNA, 174 bp, Zea mays
  unsure (1)..(174): unsure at all n locations
gtctcttgttgaacagctggagcgtgagcangctgccaaggtcactggcatgcttttggagatggaccagacggaggttcttcacctgctggagtcgccagatgctctcaaggctaaggttgctgaagccatggaggttctccgctcagcccagcatctccagcagagcaatgc

SEQ ID NO: 48643 - DNA, 288 bp, Zea mays
tgttctgatcctgaccagggtatcgctctgagaggactgttcatcattgacaaggagggagtgattcagcactctaccattgaacaaccttgccatgttgtcgcagtgtggacgagaccatgaggacccttcaggcattgcagtacgtccaggagaacccagacgaggtctgcccggccggttggaagccaggggagaggtccatgaagcccgacccaagggaagcaaagagtattcgcggccgtgtagactcgccgctttgagaactttgctcgtttttgtcaggtg

SEQ ID NO: 48644 - DNA, 294 bp, Zea mays
ccttccaccgcgtcatctccgagttcatgtgccagggcggcgacttcacccgcggcaacggcaccggcggcgatccatctacggcgagaagttcgccgacgagaagttcgtgcgcagacaccgcccccggtgtgctctccatggccaacgccgggcccaacaccaacggctcccagttcttcatctgcaccgtcgcgactccttggctcgacggcaagcacgtcgtcttcggccaggtcgtcgagggcatggacgtcgtcaaggccatcgagaaggtgggcaccgctacggctc

SEQ ID NO: 48645 - DNA, 301 bp, Zea mays
cttacatcaaaaaatacatcaagaatctcactgctgtgttggagccagagaaagcggatgagttcaaaaagggtgtcgagggtgcaaccaagtttctccttagcaagctgaaggacctccaattttttgttggtgagtccatgaaggatgatgcgtctgtggtattcgcctattacaaggatggtgccactaatccgacattcctctatttctctcatggtcttaaggagatcaagtgctaggcgtgcggcgacattagttacccatgttgggtactatctatgtactattattatatcca

SEQ ID NO: 48646 - DNA, 171 bp, Zea mays
atgatgcattgttttcatcgatgttgattttattgtaagatggaatgttgtaccaaacctgaacagatcactttgttgtgattcagtgtgcggctatggcctatggatttgtacttgttggactcaaaaaaaaaaaaaaaaataaaaaaaattgtaatacgataaaaatta

SEQ ID NO: 48647 - DNA, 300 bp, Zea mays
tgttggctgtgaagttgacaatgaaaagatggaactcctgctgtcccaactgagcggtaaggacatcaccgagctcattgccgcgggcagggagaagtttgcttcagtcccatgtggtggcggcggtgtcgctgttgcggcagctgcacctgctgctggcggactgcttctgcagctgaggcaaagaaagaagagaaggtggaagagaaggaagaaagcgatgatgatatgggcttcagcctcttcgactaggctgcacagtcatcacagtattgttttgggcagtgaaaccagaggaaa

SEQ ID NO: 48648 - DNA, 296 bp, Zea mays
tggcgcaagatggtctggcagggggtgccgcggacatcagggacagccaccggaaggtccgggacagctacgacgggctcatcatccagaggaacatggccctgttcttctcgggtggcgacaggaaggagctcaagctgcgtgtcaccgggcggatctggaaggaacaatgagcttgatgggtcagctagtacgtctgtcccgctccgctgctgccctgaactcatgaatcgcatcgcaaagagcttttgccagtcgtaggaatgggcgactctgtggttcgttctgtgttttca

SEQ ID NO: 48649 - DNA, 292 bp, Zea mays
atcgcatgaggaggctgaagaggaagcgccgaaagatgaggcagagatccaagtaggctgatggggattgtggatggtggtgtcggcatagttgtgttacgtttcttcgatgcgtgagttcatggagagatgtcacatcctagttcgtcgtcaccgtttgccatgggtccaatggctcgtcttggaaacctgcacttcagtaggccatctatcgtggtttctagctatatccagagttttgtgctaagacaaatcagtcagtcgttttgtgaacctattatgatggagcttt

SEQ ID NO: 48650 - DNA, 292 bp, Zea mays
ggacattaccgagctcattgctgctggcagggagaagtttgcttcagtcccatgtggcggtggcggtgtggctgttgtggcagctgcccctgctgctggcggcgctcctgcagctgaggcgaagaaagaagagaaggtggaggagaaggaagaaagtgatgacgacatgggcttcagcctcttcgactaagcctgtgcaatagtcaagagtattgtttttgagtcgcggaagcagagggaagaaaaatcgtagtcatgtttggactttaactttgttttatgttggaaagta

SEQ ID NO: 48651 - DNA, 293 bp, Zea mays
gtccggtgagtggaagccgcacgaacccatggcctccggcgagcttgcctgcacctacgccgctctcatcctcagcgacgatggcatcgccatcaccgccgagaagatcgccacgatcgtgaaggcggccaacatcaaggtcgagtcctactggccggccctcttcgccaagctcctggagaagcgcaacgtcgaggacctcatcctctccgttggatctggtggcggagtgctccagttgctgctgccgcacctgctggtggtgctgcggctgctgctgccccggctgtcga

SEQ ID NO: 48652 - DNA, 291 bp, Zea mays
ggaggatgcgtgtgctgaggcgccttctccgcaagtatcgtgaggccaagaagattgacaagcacatgtatcatgacatgtacatgaaggtcaaaggtaacgccttcaagaacaagagggtgcttatggagagtatccacaagtccaaggctgagaaggccagagagaagacactttctgaccagtttgaggccaagcgcgccaagagcaaggcgagccgtgagaggaagatcgctaggagggaggagaggttggcccagggtccacgagaaataacaccacctgtctcat

SEQ ID NO: 48653 - DNA, 291 bp, Zea mays
  unsure (1)..(291): unsure at all n locations
ggcggtggtgttcgtcttctctctcctcgattgttgcgcgctcatcttcctctcggtctacttcataattacattgtctgatttagaatgtgattacattaatgctagatcatgttgctcaaaattaaacaagtgggtaattccagaattgattggccataccattgtcactgtattactgctcatgtcattacaaaggntcatcttccttctcaacttacctgttgccacttggaatatatatcgatacattatggtgccgagtggtaacatgggagtgtttgatccaac

SEQ ID NO: 48654 - DNA, 275 bp, Zea mays
ggaaccgcgtgtccgcgcacaggcgcgggagcggaagaaggcgtacctgacggagctggaggcgaaggccaatgggcctggtcgctccgcaatgcggacatggagcagcgggtgtccacgctccagaacgagaacaacacgctccgccagattctgaagaacacgacggcgcacgcgagcaagaggtccggcggcggcggcggcggtggcggcaaaggcggagacggcgtcaagaagcaccacctcgccaagagctagtgagaaacgagagaggg

SEQ ID NO: 48655 - DNA, 289 bp, Zea mays
ggaaggtttggatcgaggcataatagcttgttccggagcattgcttcatcaaagaattttaaatgctgttgatgcgagctggaactcatcaacactatgaaccaaacaataaggtcttaggagagaatggcctcatgttggtcatagcatggtaaggtacattggaaaactgatttaagtattcattgtggtgctgttgtgactatgggggtaacaccgtaacagtgcagcatataggatagtaatagattgtctgctcatataaacaagaagaagtctcttgaggctg

SEQ ID NO: 48656 - DNA, 273 bp, Zea mays
ccatcaccttggaggtggagagctctgacaccattgacaatgtgaaggccaagatccaggacaaggagggcattcccccagaccagcagcgtctgatctttgcgggcaagcagctggaggatggccgcactctcgcggactacaacatccagaaggagagcacccttcaccttgttctccgcctcagaggtggtatgcagatctttgtaaagaccctgactggaaaaaccataaccctggaggttgagagctcggacaccatcgacaatgtga

SEQ ID NO: 48657 - DNA, 283 bp, Zea mays
atcgagtccaccggaagcatgcccccggaggtgctgttcacagaagccgtgaagattttggaagagaagtgcgcgagggtcatatctgagctatcctgagaggccggcggcactgtgcagcactggagttagagtaaaccagctcaggctgcagtatctgctgtttttgatggagacaagtgtgcgccattaaacattttttttgtggtgttggatatttgggtcagcaaatgtaagctgtttatatcatgtaacgcatgtaatgttagattaaactgtggca

SEQ ID NO: 48658 - DNA, 191 bp, Zea mays
ccggatttggattggggtctatgcttggcatcgcgtcgtatcgaaactcagctgctgtttcgctgagtaatgtacatttccctggtaatggtacttgtggactcagatgcttttaaaaaaaaaagtattaaagattatgcacatgcaaaagcagacacgtaccggccagacctccaggttcaaggcatttg

SEQ ID NO: 48659 - DNA, 282 bp, Zea mays
ccggaaggaggtttctcctcctcgcgacgatcccagtcctaatagtcgcgctactcgtcctggtggtgtccaacatcgtggacgtgggggacgtggcgcacgcggcgctctccacggccagcgtcatagtatccttctgcttcttcgtcatggggttcgggcccgtccccaacatcctctgcgcagagatcttccccaccacggtccgcggtgtctgcatcgccatctgcgcactggccttctggctcggtgacatcatcgtgacgtatcatctccccgtga

SEQ ID NO: 48660 - DNA, 287 bp, Zea mays
gaacgaccgtgttctaatcaaggttgctgaagctgaagacaaaactccaggaggcctactgcttacggaaactgccaaggagaagccatctatcggaacggtcgtagcggttggcccaggccccctggacgaggacggcgagaggctcgcgctgtccgtctccgcggggagcactgtcctgtactccaagtacgccggcagcgagttcaagggcgccgacggcacgaactacatcgtgctgagggcgtcggatctgatggccgttctctcctgaactgggcttgggc

SEQ ID NO: 48661 - DNA, 299 bp, Zea mays
ggagggcaaggttgaggatgttgatgagaaggaagaaaaggaatagaagaagaagaagatcaaggaggtttctcatgagtggcaattggttaacaagcagaagcctatctggatgaggaagcctgaggatattaccaaggaagagtatggctgctttctacaagagcttgaccaacgactgggaggagcatctcgccgtgaagcacttctctgttgagggtcagcttgagttcaaggctgtcctgtttgtgccgaagagggcccctttgacctctttgacaccaggaagaagccgaaca

SEQ ID NO: 48662 - DNA, 289 bp, Zea mays
actgctctgagaaaatggttgcatcagcctttactgttgatttggacaagcctctagtattccaggttggccatctagaggagcagtatcaggagtgggttcaccagccgattgtttgcaaggaagggccacgattttttgaaaatgatatattggagttcttaacacgcacgaaatggtgggcagttcctcttatctggttgcctattgtatgttggtgcctgagtacttctatcaagatgggcaatactatcacagatgtagctatgatgattgggtttgggatatt

SEQ ID NO: 48663 - DNA, 289 bp, Zea mays
cgccgttgttgctgggactgcagcgttggcgggccttgtagcgaggagggggtgcggaggcgccgcgactgttcgcgggatgagcttcggcggcagagctccctcgcatcaggtgcgaagaggccgttcgagtacgggagaacgcatgtggtgaggcccaagggcacgcacaaggccaccattgtctggctccatggacttggggacaatggagccagctggtctcaactactggaaactcttccccttcctaatataaaatggatatgccccactgcaccttcaagac

SEQ ID NO: 48664 - DNA, 291 bp, Zea mays
cacaggctgaccccaccaacagcaagcgaaaatctcccgatcccctctagtctccgcggcgaagatgtcggggcgcggcaagggcgggaagggcctgggcaagggcggacgaagcgcaccggaaggtgctccgcgacaacatccaggggatcacgaagccggcgatccggcggctggcgcgcaggggcggcgtgaagcgcatctccgggctcatctacgaggagacccgcggcgtcctcaagatcttcctggagaacgtgatccgcgacgccgtcacctacaccgagcacg

SEQ ID NO: 48665 - DNA, 289 bp, Zea mays
gaagaaaaggaagaggacaaggagatgactctggaggaatttgagaaaataagagaggagaagaggaaagcactacttgcgttgaaggctgaggagaggaaagttgaagttgacaaggatctgcgttctctgcagccactttcaaacaagaaagaaaatgatgaagttttcattaagctgggttctgacaaggataagaagaaggaaaatgctgagcgtgatgagcgtgccaagaagtcggtgagcatcaacgagttcctgaaacctgctgaaggagaaaggtactacg

SEQ ID NO: 48666 - DNA, 292 bp, Zea mays
gcaatttcgccctcgattcgaccccgattcgtccgcccgcgaccgggattccctccgccaagcgcggaactgaacgctgcgctccgtgtcgccgctcgaatccgccatgaagggggccaaatccaagggcgccgccaaggccgatgccaagctggcggtgaagagcaagggggcggagaagcccgccaagggcaggaaagggaaggccggcaaggaccccaacaagcctaagagggctcccagcgctttcttcgtgttcatggaggaatttcgcaaggagttcaaggagaag

SEQ ID NO: 48667 - DNA, 298 bp, Zea mays
cagaagcttgctattggaaccctctctattgaaaaatacccctagatagaaattgatttggttttcaataaagagtgtgagctgtcacacacatcgaaaactacacgtgtatttttctttggttacaaggttgagcaaccaatcgaggaagatgaataatggatcttgattctgaagatgaagagaaggagctaaacattccagtaatcaaggaaaatggcaaaggtgatgggaaggaggaccagagaagtgaagagaaggcagttgctgcagcttcaaaatcaagtcttgggcttga

SEQ ID NO: 48668 - DNA, 303 bp, Zea mays
  unsure (1)..(303): unsure at all n locations
aaacgatgaaaattcagatgttcggcaggctgctgtctatggtgtgggtgtatgtgccgagtttggtggtcatgtttttcgccctctagtaggagaggccttatcaaaattaaacaatgttataaggcatcctgatgcacgacttcctgataatatcatggcatatgacaatgctgtttcggcgcttggaaaaatatgccaatttcatcgggatggtattgatgcagctcaggttgttccagcctggcttagctgcttgcctatanaagacgacaaggttgaagctanagttgtacatggaca

SEQ ID NO: 48669 - DNA, 289 bp, Zea mays
ggaagattgaaaggggcattgctttcccaacctgtgtttctgtgaacaacacagtctgccacttctccccgcttaccacagatgatgcagttctggaagaaaatgatatggttaaaattgacatggggtgtcatattgatggctttattgctgtggtggcacatacacatgtaattgcaaatgggcctgtcacaggaagagcagctgatgttcttgctgctgccaacacagcagcagaagttgcaatgaggcttgtcagacctgggaagaagaataaggatgttactga

SEQ ID NO: 48670 - DNA, 282 bp, Zea mays
cccactcttcgcctcctttctggagcagctagggttccgtcctcgatccgatccgccgagtgcacaccacctttccccactccgatcgaatcgatggccgccgagggcgagaagaagatgataaccctcaaaagctccgatggcgaggagttcgaggtggaagaggcggtggcgatggagtcgcagaccatccgccacatgatcgaggatgactgcgccgacaacggtatccctcttcctaacgtcaactccaagatcctatccaaggtaatcgagtactgc

SEQ ID NO: 48671 - DNA, 288 bp, Zea mays
gctcctccatggccatggccatggcccgaccttgtgctttccttctcttcttcctagttcttttctcctacgacggatccggtcctgcgagcagcaggaggactaggaggagtggcgtcgcgcaggccacgcagagagtcttcctgtatccacaggctcccaaggtctcctccatcgtgagcagcaagtacaggaccgcgtaccacttccagcctcccaagaactggatcaacgatccaaatggaccaatgtactacaatggtatctaccaccagttctaccagtaca

SEQ ID NO: 48672 - DNA, 298 bp, Zea mays
gagtcctctgggagaagtggttgaacagggcataacacgggtgtagaacgccacagatgcagttggaattgtgctgaaagagctaaagaggcaaagttctttgggtatgtttcacctcctagtggccgtggatggaatcaatgctctttggggaagaaccactctgaaaagagaagataaaagcccgattgcccccgaggaattagcacttgttcacaacttgaggaaaatgatgaagaatgattgcaatggaggcgccattgtgtcggctttgagccagactgggtctctctttaag

SEQ ID NO: 48673 - DNA, 300 bp, Zea mays
tgcgctcgctacccctctccctcgaggcctttgccggcgaagagcgcccagtcgcccaccaggatgaagtttgttgctgcctatctgcttgctgtcctcgctgggaactccagcccctctgccgaggacttgacatccattcttgagtcagttggctgtgaagttgacaatgaaaagatggaactccttctgtcccagctgagcggtaaggacattaccgagctcattgccgccggcagggagaagtttgcttcagtcccatgtggcggtggcggtgtggctgtcgcggcactgcccctg

SEQ ID NO: 48674 - DNA, 285 bp, Zea mays
  unsure (1)..(285): unsure at all n locations
agcctccaccctccagcgcctccaccttcctcgccgcctcactccctctgaggtcgcagatccgtccggttagacgaagccgcccgcacccatggcctccggtgagctcgcctgcacctacgccgccctcatcctcagcgacgacggcatcgccatcaccgccgagaagatcgccaccatcgtgaaggcggccaacatcaaggtcgagtcctactggccggcgctcttcgctaagctcctggagaagcgcagtnatgaggatctaatcctctccgtgggatctgg

SEQ ID NO: 48675 - DNA, 284 bp, Zea mays
tgatgattcacctgcccaagtgaatgttgaaggagatgtttcagagaaaaaagtagaagttcaagaccagaatgaagtgggtgggatgccctcacgacaagaggaggaggcagcaattaagaaaaagtatggaggaatattgcccagaaagactccacttatatctaaggatcatgaacgtgcttactttgattctgctgattgggctctaggaaagcaaggtggtgttcccaacaagcctaaaggtcctcttgaggcactccgacccaagcttcagcctacgc

SEQ ID NO: 48676 - DNA, 281 bp, Zea mays
ggagcggaggcgatggctgggaagggaggaaaaggattgctcgccgcgaagacgacggcggccaagtcggcggagaaggacaaggggaagaaggcccccatctcacggtcctcccgcgcgggcctccagtttcctgttggacgaatccaccgtcagctgaagcaaaggactcaggcaaatggccgcgttggtgccactgcagccgtctactctgccgccatcctggagtacttgactgccgaggttctggagctggctgggaacgctagcaaggatctgaa

SEQ ID NO: 48677 - DNA, 284 bp, Zea mays
gaggcgggttggcttctcctcccccaccggttcgtgttcaggttctggttcgtgggcgagagggaagagatggcggcgtcggacgttgagtaccgttgcttcgttggcggcctcgcctgggccaccgacgaccactccctcaacaacgccttcagcacctacggcgatgtcctcgagtcgaagatcatcctggatcgggagacgcagaggtcccgcggcttcggcttcgtcaccttctccacggaggacgcgatgcgcagcgccatcgagggcatgaacggcaa

SEQ ID NO: 48678 - DNA, 285 bp, Zea mays
gtcctagcgccgccgccgccccaactcgccttgcgtgactgaaagctcgtcggcttccgtccacgcgagaagcgagagcatggacacccaggtgaagcttgctgttgtggtgaaggtgatgggcaggaccggctccaggggtcaggtgacccaggtcagagttaagttcttggatgaccagaaccggctcatcatgaggaatgtcaaggggcccgtccgcgagggtgacatcctcaccctgctcgagtccgagagggaggccaggaggctgcgctgaagccctag

SEQ ID NO: 48679 - DNA, 287 bp, Zea mays
aaggtaagagatgatctcagttctccagtcttcaccataaacaggagatatattgaggactgctctttcaagaagttccactgaaggtgcttttattgtttcgaagaacacgtccgaaggtaagggcagcccctgtgctgctgacttagctagcaaatcagcatgctcattttgtcctcgagggatatttttgacagaaaatccctcgaaggaagcttcaatccttcggaccgtgtctagatatttttcaagcttcggatctttagccttacagctcttgtcaatat

SEQ ID NO: 48680 - DNA, 288 bp, Zea mays
  unsure (1)..(288): unsure at all n locations
tgcgctcatttctgcatccccctcccgccgcgccgcctcaccgccgccggagaagatgggtcgcgtgatccgcgcgcagtnnaagggtgcggggtccgtgttcaagtcccacacccaccaccgcaagggccccgcccgcttccgctccctcgacttcggcgagcgcaacgggtacctcaagggcgtcgtcaccgacgtcatccacgaccccggccgtagcgcgccgctcgccaaggtcactttccgccacccattcaggtacaagcaccagaaggagctctttgtcgc

SEQ ID NO: 48681 - DNA, 292 bp, Zea mays
ctaccaccaacggaacacgggaacggcggaagcaaacaactagaaattccccagcccggttccttttcgtgcggtttgatctcgtcggaggcccggccgcagttccgccatcagccatcgaattcgatggcggccaacttcgggaacaagatccgcaacgccaagctggttcttcttggagatgtaggcgctggcaaatctagcttggttcttcggtttgtcaagggacagtttgttgaattccaggaatcaacaatcggagcagctttcttttcccagaccttagcggtaa

SEQ ID NO: 48682 - DNA, 301 bp, Zea mays
caagactcccagggaagcaattgaagggacctacattgacaagaaatgtccattcactggaaccgtttctatcagaggcagaattattgctggaacatgccacagtgctaagatgaacagaaccatcattgttcgcaggaactatctccactttgttaagaaataccagaggtatgaagagaggcactccaacattccagctcacatctccccatgcttccgtgtgaaggaaggcgaccatgtcatcattgggccatgcaggcccctatcagagaactgtgagttcaatgtcgtcaaagtc

SEQ ID NO: 48683 - DNA, 269 bp, Zea mays
ggaacttctgagtggtgataaggagggccttcttctgctcccaagtgacaaagccctgctgagcgaccctgttttccgccctcttgtcgagaaatatgctgtggatgagaaggctttctttgatgactacaaagaggcccacctcaagctctccgaactggggtttgctgatgcttaaatagaccctatcttggagtgatacattctgctgcctgtatggaatcatgtggtcttttgcatctggagtcaatgtgaacaagcagattgtc

SEQ ID NO: 48684 - DNA, 277 bp, Zea mays
caggctcaccacaccaaccaacaagcaaaaattccccaatcctctcgtctccgcggcgaagatgtcggggcgcggcaagggcggcaagggcctgggcaagggcggcgcgaagcgtcaccggaaggtgctgcgcgacaacatccaggggatcacgaagccggcgatccggaggctggcgcggcggggcggcgtgaagcgcatctcggggctcatctacgaggagacccgcgcgtgctcaagatcttcctggagaacgtcatccgcgacgccgtcacct

SEQ ID NO: 48685 - DNA, 281 bp, Zea mays
ggagcaccagccatggtgcacgtcaacttctaccgcaactatggtaagacgttcaagaaaccaaggcgtccttatgagaacgagcgtcttgatgctgaactgaagctggttggtgagtatgggctgaggtgcaagcgtgagctttggagggtccagtatgcactgagcaggatccgtaatgctgcaaggcacttgctcacccttgacgagaagaacccccgtcgtatctttgagggtgaggcacttcttcgccgcatgaaccgctatgggctgcttgctga

SEQ ID NO: 48686 - DNA, 282 bp, Zea mays
gcaagggttgcccaggggaaatattattacctccctaatgcttcagatgctgtaatttctgctgccaccaagaccgccctgacagacttgaagagctcatgattttgcagcagcggcacccgttttctgtaccttttgatagggatggtgaaccttcattcatgcagtaatttttgcgtaggcctctacaatgacagggggaaacaaacccgagcatggcatcgtgtaaagtgttaaggtccaatggcctcctgtccacgtttggcgatgtaaatcctccgt

SEQ ID NO: 48687 - DNA, 283 bp, Zea mays
atccagaaggataagggccttgagccctccgagttcgaggactccgtcgcccaggctttcttcgacctggagaacggtaaccaggagctcaagagcgacctcaaggacctttacatcaacggtgctatccagctggatgttgccgggagacggaaggctgttgtgatccacgtcccataccgcttgcgtaaggccttcaggaagatccatgtcaggatcgtcagggagctggagaagaaattcagcggcaaggatgtggtaattgttgccacaaggaggatcg

SEQ ID NO: 48688 - DNA, 288 bp, Zea mays
caaccccaagcaaacaaacagggtagagggagaggagaggagaggagaggagaggttgggtctgggacaccatggctccgatgaagctgtacggggcggtgatgtcgtggaacgtgacgaggtgcgcaacggcgctggaggaggctggctccgactacgagatcgtgcccatcaacttcgccaccgccgagcacaagagccccgagcacctcgtccgcaacccgtttggtcaggttccagctctgcaggatggtgacttgtacctcttcgaatcacgagcaatctgca

SEQ ID NO: 48689 - DNA, 292 bp, Zea mays
gccactcgaagccgagatacggccatggactccaccggcaccggagcagcggggaagggaaagatgggagcggccgggcgcaaggtcggcgggccaaggaagaagtcggtgtcgaggtccgtgaaggctgggctccagttccccgtctacctcgccgctgtcctcgaatacctcgccgctgaggttctggagctcgccggtaatgctgccagggacaacaagaagactcgcattattccgcgccacgtgcttctggcgatccggaacgacgaggagctcgggaagctgctgg

SEQ ID NO: 48690 - DNA, 296 bp, Zea mays
aacgtagcaaggtggtttaatcacattgatgcgctcgtgaggctgagcggaattactgcagagggccaaggtgtgaaggttgaatcgtcagcagttccttcagccccaactccagatgttgctgaagcacaggccccagttgctgaggaggacgacgacgatgatgttgacctttttggtgaggagaccgaagatgagaagaaggctgctgaagagcgtgctgcagctgccaaggcttctggcaagaagaaagaatctgggaagtcatcagttttacttgatgtgaagccatggga

SEQ ID NO: 48691 - DNA, 276 bp, Zea mays
ggcccacccgccccgctccttgcctccgatccccaattcctccttcggatctcgcattcagcgcagcaggtgtgaaggaagggggacgcggaggaagatggggctcgcgttcgggaagctcttcagccggctcttcgccaagaaggagatgcggatcctcatggtcggcctcgacgccgccggtaaaaccaccatcctctacaagctcaagctcggcgagatcgtcaccaccatccccaccatcggtttcaatgttgaaactgttgagtacaagaa

SEQ ID NO: 48692 - DNA, 281 bp, Zea mays
ctcccccacctcccggtccggcagcagagagcgggggtgcagagagatcgagatccggaggccgcgagtgggagcgccaccaccagcgactgcggcaatggcgggcacggtgacggtcccggggtcgtcgaccccctccacgccgctgctcaaggacgagctcgacatcgtgatcccgacgatccgcaacctcgacttcctggagatgtggcggcccttcttccagccctaccacctcatcatcgtgcaggacggcgacccgaccaagaccatcaaggtgc

SEQ ID NO: 48693 - DNA, 323 bp, Zea mays
tatctttgcttcacaaaaccacttggaacatattaaggtgtaaacaccaacctaccttatagtaatgaaagatgtgcatctgaaatgaaccttattaagggtctttcctctcagtctaccactagcttgtttcaccattctaattcacgggatctccaattacatagaacaggttaccactatgataaactttaggtgggtctcaggccatctcaatcgatgcactattatcacactacgtgatagccccttagtaaattgatctatcagatttttagacatatagacatagtccaacgcgattactccggagtttttcaatt

SEQ ID NO: 48694 - DNA, 245 bp, Zea mays
agacggaatcgaaaaggcgagaactcagtgtctcgagtttcctcggagcggatgcgatggctgggaagggatggaaaggcttgctcgccgcgaagactacggcggccaagtccgcagagaaggacaaggggaagaaggccccaatctcacgctcctcccgcgccggcctccagttccctgttgggcgtatccaccgtcagctgaagcaaaggactcaggcaaatggtcgcgttggtgcaccgcag

SEQ ID NO: 48695 - DNA, 242 bp, Zea mays
agcacgattctcctcctccgtccgcgtagatctcggtttcggcgatgtcggggcgcggcaagggcggcaaggggctgggcaagggcggcgacaagcgccaccgcaaggtcctgcgcgacaacatccagggcatcacgaagccggcgatccgtaggctggccacgaggggcggcgtcaagcgcatttctgggctcatctacgcggagacacgcggcgtatacaagttcttcctcgagaacgtc

SEQ ID NO: 48696 - DNA, 317 bp, Zea mays
  unsure (1)..(317): unsure at all n locations
tattgttggagatcttgaaaaaattccaggcttcaggattccaaaaccaattctacaaaacctactttttgacaattgagcaagagatttttgcagtcctcacagacacattccacaaacctggtttcaagcttcatgtttcggtgctgcaacacttgttttgtgcggttgatggtctaacggagcctctatgngacgcgtcttctgtaccttaccaatatacggataatgctatgtttgttcgagattacaccataaagctcttagggacatcatgtcctaacatgacagtaaccgaggtgacaaagtttgtagat

SEQ ID NO: 48697 - DNA, 196 bp, Zea mays
attttgctgctctccgaccccgagctccgaaggccgcagcatcaggcgcgccccccctcgcgtgtgaccaagatggcgctaccgaatcaggggaccgttgattaccccagcttcaagctcgtcatcgtcggcgatggtggaactggtaaaactacatttgtgaagaggcatctcactggaagagtttgagaatgaa

SEQ ID NO: 48698 - DNA, 302 bp, Zea mays
agctgatcttcagggcgacgaggatcaagcttacaggaaaatcaggctccgtgctgaagatgtgcagggcaggaatatgatcacaaactttatagggcatggattttaccactgataaactcagatccctagagaagaagtggcagacattaatcgaagcccatgttgatgtcaagacaaccgacaactacatgttgcgtttgttctgcatcggcttcaccaagaggcgcccataccaggtcaagagaacctgctatgctcaggcatcccagatccgtcagtaagtccgtaagatggttgag

SEQ ID NO: 48699 - DNA, 220 bp, Zea mays
acaactcgacctccatccaggagatgttccgccgcgtcagaagcagttcactgccatgttcaggaggaaggccttcttgcattggtacacgggtgagggcatggatgagatggagttcactgaggcagagagtaacatgaatgacctggtggccgagtaccagcagtaccaagacgccacagctgaggatgaggagtacgaggaggaagaagaggaagat

SEQ ID NO: 48700 - DNA, 293 bp, Zea mays
aacctcgtatcgtgccactttctcagtcacctccagacaacgtctaccgctcgcgctctactcgcgttcggtaaggtcgtttagccatggcctcggagacggagacgttcgcctgccaggcggagatcaaccagctgatctcgctcatgcatcaacacgttctactccaacaacgagatcttcctcatggagctcatctccaactcctccgatgacttggacaagatcatgcttgagagtttgacggacaagaccaagctggatgtacagccagagctgttcatctacattgt

SEQ ID NO: 48701 - DNA, 324 bp, Zea mays
  unsure (1)..(324): unsure at all n locations
atcctcccggacggccactgccagtgnaccaaacactggcacatncagggttcaccannnnnnnnnnnnnnnnnnnnnnnggagcatnanggggtccnctagtcacggtggnattccagatcctggtgaacaacctgcccaccgcgaagtgcaccgtggagtcggtggagaccgtcagcaaantgctatcctgcaccatccagaagatcaagtctgcgctccaggccagatcgtaacgcctagngtttagcggnatttngaantggntcngggcngcgggtcncannaanaggcncggtgtnggnggntnccgtnnnaaatgtt

SEQ ID NO: 48702 - DNA, 233 bp, Zea mays
agtatgggtgggacaaggacctggccaagaagatttggtgttttggacctgagaccactggcccgaacatggttgtagatatgtgcaagggagtgcagtatctcaatgaaatcaaggattctgttgtggctggtttccagtgggcatcaaaggagggtgcactggctgaggagaacatgcgtggaatttgctttgaggtctgtgatgtccttcttaatgctgatgctatccac

SEQ ID NO: 48703 - DNA, 241 bp, Zea mays
cacaggctgaccccaccaacagcaagcgaaaatctcccgatcccctctagtctccgcggcgaagatgtcggggcgcggcaagggcgggaagggcctgggcaatggcggacgaacgccaccggaaggtgctccgcgacaacatccaggggatcacgaagccggcgatccggcggctggcgcgcaggggcagcgtgaagcgcatctccgggctcatctacgaggagacccgcggcgtctcaag

SEQ ID NO: 48704 - DNA, 208 bp, Zea mays
aagctgcatcaacgtgtcttccttcccgcggtctctccacagcctcccagatccggcggccatggcaaggaacccgtgctgcaccgtcttcataggtaacttggatgacaaggttcctgagagggttctgtatgaaattcttattcaggtaggtcgtgttgtagacctacacatacctcgtgacaaggaaactagccgaccagaaggc

SEQ ID NO: 48705 - DNA, 238 bp, Zea mays
tactggacatccagagttgaatcctgggatacacttagctgttactgtattgacaacgggattctggcgcagctacagaacttttgacataaaccttcctgccgagatggtgaaatgtgtacaggttttcaaggagttctatcaaacaagaacaaagcacaggaagctgacatggatttattccttgggaacctgcaacatcaatgctaagtttgatgctaaacctattgaacttatt

SEQ ID NO: 48706 - DNA, 159 bp, Zea mays
cgataatccgccggcgttgagatgttggtgtatcaggatctcctatctggcgacgagctcctgtcggattcattcacctacaaggagctcgagaacggcgtcctgtgggaggtcgagggaaagtgggtcacccaaggtcctgttgatgtggacattggt

SEQ ID NO: 48707 - DNA, 325 bp, Zea mays
gtcgtttgatcccagcggggagctctagttccgccaagcgtgcgtaccggcgtccggatccgggaccgaagatgacggagtccctggtgcggaacaagccggggatggccagcatcaaggagatgccggtggtgcaggacgggccgccgccgggcggtttcgcgcccgtgcgcttcgcccgccggatccccacctcggggcccagcgccaccgccatctacctcaccaccttcggtgctttcgcatatagcatgtaccagataggccaggggaacaatgtccgctgggcgctcatagaagagaataatgcttgtcgcagtgctat

SEQ ID NO: 48708 - DNA, 228 bp, Zea mays
ggttttactgggttctgcaccagatcctcgcatacaaagtgactttacaaatttggccagtaagctgcatggtgaataccatggccgagtgaagctatgtctaacctatgacgagccactgtcacatttgatatatgctggcgcagacttcattctcgttccttccatcttcgaaccttgtggtctaacacagcttattgctatgcgctatggatccatcccagttgt

SEQ ID NO: 48709 - DNA, 193 bp, Zea mays
agactttcaagaagccaaggcggccgtatgagaaggagcgcctagatgctgagctgaagctggttggtgagtatggcctgcagtgcaagcgcgagctgtggcgcgtgcagtatgccctgagccgtatcaggaatgcagccagggagctgctcaccctggatgagaagaacccacgccgtatctttgagggcga

SEQ ID NO: 48710 - DNA, 314 bp, Zea mays
ggaagaatcggtggagactcttctttgagtgaggccggtgagctttattcaaggaagcttgcgagctttgtggagaagcgactgaaatccgagcggactgcctctatatggactagcacactccagagaacaatattaacagcacatcggatcattggatttccaaagatacaatggcgtgctcttgatgagatcaatgctggggtctgtgatgggatgacatacgatgaaataaagaaaagtaaacctgaagaatatgaatcacgaagataagacaagctgaggtatcgttatccgagagggagatcctatct

SEQ ID NO: 48711 - DNA, 153 bp, Zea mays
aagatacgctgagagaaggatacaggttcattctttccgaggaagatgagatggattctacttgggagaaaaggctggtcaaacgttactatgacaagctgtttaaggagtattgcattgctgatatgacccagtataaaaaaggcaagattg

SEQ ID NO: 48712 - DNA, 227 bp, Zea mays
agcttcacttgggtattctttttgcaggataagtctgaaacccaaggaaccctcaagcgcttcctaaggagagctcaaaacgagtttgagctcaaggtgaaaaaggtaaggagcgacaatgggtccgagttcaagaaccttcaagtggaggagttccttgaggaggaagggatcaagcacgagttctccgctccctacacaccacagcaaaatggcgtggtagagag

SEQ ID NO: 48713 - DNA, 212 bp, Zea mays
acagatgtgacctaacacagccgccgctccaactcgccttgcgtgactgaaagctcgtcggcttccgtccacgcgaggagcgagagcatggacacgcaggtgaagcttgctgttgtggtgaaggtgatgggcaggaccggctccaggggtcaggtgacccaggtcagagttaagttcttggatgaccagaaccggctcatcatgaggaatgt

SEQ ID NO: 48714 - DNA, 262 bp, Zea mays
actgctcgtagccggctgcacccgcggccccggccagtccatcccctcgctcgatccccaactccagcaggcagatcagatacatccatccattcgcggaccgagaaggaaaggaaagggttgaactatgagcgccgtggcggtttcgtcgtcgctgaacccggacgcgccgctcttcatcccggcggcgctgctgcaggtggaggacttctcgccgcagtggtgggacctcatcaccaccactgcctggttcagcacaatg

SEQ ID NO: 48715 - DNA, 310 bp, Zea mays
accgccgccaccccttcaacacaacctccgcccacggccgtaggggagggagggccggaggaagcgaccgagcaacccaccgccggagatgcagatcttcgtgaagacgctgacggggaagaccatcacgctggaggtcgagagtagcgacaccgtcgccaacgacaaggcgaagatacaggacaaggaaggcatcccgccggaccagcagcggctcattttcgccgggaagcagctagaggacgaccgcaccctggccgactacagcatccagaaggactccacgctgcacctggtgctccggctccgc

SEQ ID NO: 48716 - DNA, 181 bp, Zea mays
acaagcaaccaccgcctccccgatctcgtcgagaggaagcccaatcccgaaaccgtcgccgtattccaatggcgcccaaggccgagaagaagcccgccgccaagaagcctgcggaggaggagccggcggcggagaaggccacggcggggaagaagcccaaggccgagaagcggctccccgc

SEQ ID NO: 48717 - DNA, 306 bp, Zea mays
gttggtttccaaagtccgtatttatcaccatgtggttggtggtgttctaaacccgaatgctgcgtaccttatccttcgaggcatgaaaacacttcatctccgtgtgcaatgtcagaataacactgctcttcggatggcccagtttttagaggaacatctaaagattgcccgtgtctactatcctggcttgcctagccaccctgaacatcacattgccaagagtcaaatgactggctttggtggtgtggttagttttcaggttgctggagactttgatgccacaaggaaattcatcgattctgttaa

SEQ ID NO: 48718 - DNA, 307 bp, Zea mays
ctgccgtctccaccgccgccgcagccagcgtcaccggagggaactgccgtctcccttgctccacgcgatgaacaccgacatcaccgcctcgactaagccggagtacccggtggtggatcggaacccggccttcaccaaggtggtcggcaacttctctgcgctcgactacatgcgcctctccaccatctccgccgtctccgtcaccgttggctacctctccgggatcaagccggggatccggggcccgtcgatggtcacgggcggcctcatcggggtcatgggagggttcatgtacgcctaccagaac

SEQ ID NO: 48719 - DNA, 160 bp, Zea mays
agcgcagagaatctccaagcaaacaaacagggtagagggagaggataggagaggagaggagaagttgggtctgggacaccattgctccgatgaagcggtacgtggcggtgatgtcgtggaacgtgacgatgtgcgcaacggcgctggaggaggctggctc

SEQ ID NO: 48720 - DNA, 184 bp, Zea mays
ctcgagccgctagcacccgtccccacaatcctccgacgatgcctgccgcaccgacgctattgcccccctgcgacgcggaggagccgatgctggcggagtcctccgaccgcttctccatgttcccgatccgtggcccgcagatctgggagttctacaagaaggcggtggcctccttctggacggc

SEQ ID NO: 48721 - DNA, 305 bp, Zea mays
cgatccaactcctgagcactttctcctcgtccccgacaagccaatcgaagccgagatacggccatggactccaccggcaccggagcagggggtaaggggaagaagggagcggccgggcgcaaggtcggcgggccaaggaagaagtcggtgtcgaggtccgtgaaggccgggctccagttccccgtcggccgcatcgggcgctacttgaagaagggccgctacgcgcagcgtgtcggcaccggcgcccccgtctacctcgccgctgtcctcgaatacctcggcgctgaggttcttgagctcgctgg

SEQ ID NO: 48722 - DNA, 302 bp, Zea mays
ctgtctgtctgtcgctctcgctctcagacgactgggccgccgacgcttggtgctgaggctttggttggtctcttcggcggcgacgagcacccaccagcagttctgtagaaatggctgatggtgaggacatccagcctcttgtctgcgacaatggcaccggaatggtcaaggctggttttgctggcgacgatgcaccaagggcggtttttcctagcattgttggccgtcctcgccacactggtgtcatggtagggatgggacagaaggatgcatatgttggcgatgaggcacagtccaagaga

SEQ ID NO: 48723 - DNA, 305 bp, Zea mays
attgagaaggggatgcaacacaaccagaagatcaccttccctggtgaagctgatgaagcgcctgatactgtcactggagacattgtattcgtcctccagcagaaggatcactccaaattcaaaagaaagggtgaagatctcttctatgagcacaccttgtctctgaccgaagcactatgtgggttccaatttgttcttacacatctggacaacaggcagcttctcatcaaatcagaccctggtgaagttgttaaacctgaccaattcaaggcgattaatgatgaggggatgccaatttaccagag

SEQ ID NO: 48724 - DNA, 305 bp, Zea mays
cggatgtcgcaccgtaagttcgagcacccgaggcacggctccctcggcttccttcccaggaagcgctcctcccgtcaccgcggcaaggtgaagtcattccctagggatgaccccaagaagccttgccatctcactgccttccttggctacaaggctggcatgactcacattgtccgtgaggttgagaagccaggatccaaactccataagaaggaaacttgtgaggctgttaccatcattgaaacccctcctcttgtcattgttgggctcgtggcatatgtgaagactcctcgtggcctccgcac

SEQ ID NO: 48725 - DNA, 306 bp, Zea mays
cctcgcccgcccaaatacaaaagcctcagatctcagtgaccagcgccgccgcttcgttcgtgtcgaatagagaagagaggaaatggcggcgagcgagggcgtgctcctggggatgggcaaccccctcctcgacatctccgccgttgtcgatgacgccttcctggcaaagtatgacatcaagctgaacaatgccattctcgctgaggagaagcactcgcctatgtatgatgagttggctagcaacagcaatgttgaatatattgctggaggagccacccagaactctatcagggttgcccaatggat

SEQ ID NO: 48726 - DNA, 299 bp, Zea mays
ctagaaaagcatacaattatctggacatacatcgattttctgatagtccatacctaaccagagaggtgtttccagcactgatacacgtcttttggcttctttgtgatttggtggaaacacttcgctgatcaaattcaagagctcgttgtaacaattgttcgagaacatggtcttggatttagtagtcataagtcgagacacgaaagcgaggatggaaactgttatgtgtttgtgcaactgctcttctgcaaccttaatgaggttgaagaaatttttaacctcttaaggtggtggcacct

SEQ ID NO: 48727 - DNA, 303 bp, Zea mays
catatatctgatggtgatcttacttctaataatactcatgtggttgcattctgaagcagctcctgttgtcgacagtgcaacccagcgtctcctggaggaaaataatcagttgcttaaccagatttctgcaaataatgaaacattcaagacagtggagaacacagatctttttctccgcacgagtaacaacatcaaaacaattttaagcagaatgagcgaaacgcctggtatcatgagtcagatgcccccattgcctttatccataaacgaagaccatataaattctcttattcaactgaacag

SEQ ID NO: 48728 - DNA, 303 bp, Zea mays
accgccagtttgctatggcgaacggcatcatctccaagaagttacacgagcagagaagcgacgggaacgtcatagagcttagtgtccatgcttactgcccgctgctcaaagggaaaaggggcggtgctgtgacaaaggttgggccatggggcggaagcggagggtctccaatggagctgacagagacggagacgcccatgcgtctggagagcatcaccgtcagcagcggcgtggccgtcaactccatctcattctcctacgtcgactctgccggccacaagcgctctgctggtccctggggtg

SEQ ID NO: 48729 - DNA, 304 bp, Zea mays
acaacacgcgcctcgatcctcctcgcccctccggcctctcctcccctccctgcacccgcacctgcggagaacgccgcaagctagctgcagaggagcgagacagtagcaggaggaggacgagaggaagaagagatggcgggctgtgatggagccaagtcgtcggcgtccatggaggaagaggcatgcgcggagaagaagtacggagggatcgcacccaagaagcccttgatatccaaggaccacgagcgcgcctacttcgattctgcggactgggtgctgggcaagcaagccgcgaacagcagca

SEQ ID NO: 48730 - DNA, 297 bp, Zea mays
cagttctgccggctgttggactgccagaagctctccctggaagcatgcacccacgccgcccagaacgagaggctgccgttgcgcgtggtggagcaagtcctcttcttcgagcaactccagctaagaacctcgatcgcagggtgcctgctggtctcggacaacctcgaaggctccaggcctctgcggagcggcattgccacatccggcgaggctggaggctgggccacggctgtccgagagaaccaggtcctgaaggtcggcatggacaacatgcggacgcggctggccgagctggag

SEQ ID NO: 48731 - DNA, 302 bp, Zea mays
aagctcgaccccagcaacgagggcctcaaagccgggctccaggacgccaagaaagccgccgccgcccctccgcgccgcgcgtcgtccggccccgacgccatcggccagatgttccagggccccgagctgtggagcaagatcgcgtccgacccctccacgcgcgccacccttaacgagcccgattttatgcatatgatgcgcgaagtgcagaggaaccccagcagcatcagtatgtatctctccgatccccgcatgatgcaggtgctcagcctcatgcttaatgtcaagatccagagacccgg

SEQ ID NO: 48732 - DNA, 101 bp, Zea mays
atttcgcctgaagatcaccctgtgctgctgaacgaggctcctctcaacccctaggccaacagagagaaaatggcgcagattatgtttgaaatcttcgtatg

SEQ ID NO: 48733 - DNA, 296 bp, Zea mays
cgaagaagcgaaagtatgagcttggtcgccagccagccaacaccaagttgtcaagcaataagacagtgaggagggtccgtgttcgtggaggtaatgtgaaatggagggctcgtcgccttgatactggtaactactcatggggaagtgaagctgttacccgcaagacccgtatcctcgacgtggtctacaatgcatcaaacaatgagcttgtgaggacacaaacccttgtgaagagtgccattgtgcaagttgatgctgccccattcaagcagtggtacctcactcactatggagtt

SEQ ID NO: 48734 - DNA, 293 bp, Zea mays
atttaccatccacaatcttgagtttggagcgcatcacattggcaaggcaatggcacattgtgacaaagctacaactgtatccgatacatactcgaaggaagtggccggacatggagctattgcagctcactactataaattccatggaattcgaaatggaattgatcctgatatttgggatccatatactgacaaatttattccggtccattatacatcagagaatgttgttgagggcaagagtgctgcaaaaaaggcattgcagcagacattgggattacagcaaactgata

SEQ ID NO: 48735 - DNA, 298 bp, Zea mays
aaggaatcttacggttacaaaatatatgaagcagcctatttttgtgtattatgaacttgataacttctatcagaaccataggagatatgtaaagagccgaaatgatgcgcaactaagagatgctagtaaagctaaccagacatccgcttgtgaacctgagaagaccacagctaatgggcaaccaattgttccttgcggccttattgcttggagcttgtttaatgatacatataatttcactcgtggtaatgagaacttgacagtggacaagaaagacatctcctggaagagtgatagg

SEQ ID NO: 48736 - DNA, 187 bp, Zea mays
cacaaaccgttgagctcaggagggtccgccgtgagtacaaggcaaaaaagatctctgaggaggaatacgtcactgccatcaaggaggaaatcaacaaggtcgttaagcttcaagaagagcttgacattgatgtgcttgtgcatggcgagcctgagagaaacgatatggttgagtacttcggtgagca

SEQ ID NO: 48737 - DNA, 291 bp, Zea mays
ctcaaattcgttccgtccaggcaaggaagaaatcgagcagccaaggagaggagaagatggctcgtacgaagcagaccgcccgcaagtccaccggaggcaaggccccgcgcaagcagctcgccaccaaggcggcgaggaagtctgcgccgacgaccggcggcgtgaagaagccccacaggtacaggcccgggacggtggctctgcgcgagatccgcaagtaccagaagagcacggagctgctgatccggcagttgcgcttcagcggctgtccgtgagatcgctcaggacttc

SEQ ID NO: 48738 - DNA, 197 bp, Zea mays
aatggaaatggaggtttacttgagcgcatgaagaacacatcagttgatgttattgggcttgactggacagtggacatgactgatggaaggaggcgccttggtaatggcattagtgtacaagggaatgtggatccagcatttttgttctcaccattaccagtactgactgatgaaatccatagggttgtgtaagcagc

SEQ ID NO: 48739 - DNA, 296 bp, Zea mays
acgctgttggagcacttgtcgtgtatgatgtgacacgccatgtgacctttgagaatgtggagaggtggttaaaggagctccgggatcacactgatgcaaacattgtcaacatgcttgttggcaacaaagctgatctgcgacaccttagagctgtatccgtggatgatgccaagggcttcgccgagatggaaagcacattcttcatggaaacatccgcactggagtccatgaatgtcgagagcgctttcaccgaggtcctaactcagatctatcgtgtggtcagcaagaaggccctt

SEQ ID NO: 48740 - DNA, 293 bp, Zea mays
cggtttctatgagcggtcccctgatttgctagaggctgcagtagctcacatccagttggtcattgtaaccaagttcatttcgaaggtgcagcaggacattcctggacctggagtgaaggaacagctccagaacctttgcaatgtctatgccctctacattctccacaagcacctgggcgacttcctggcaaccgggtgcatcacacccaagcagggagcgctggcaaacgagcagctgggcaagctttaggcacaggtgcgtccaaatgctgttgcgctggttgatgccttca

SEQ ID NO: 48741 - DNA, 180 bp, Zea mays
cggatgccagattttatgtaataaaatcctacactgaagatcacattcacaagagcataaagtataatgtttggggcagcactcccagagacaacaaaaagttaaatgctggttatcatgaggcaaaagcgaaggaagatcattgtcctattttcttgtttctctcggttaatagcagcg

SEQ ID NO: 48742 - DNA, 291 bp, Zea mays
cgcgtgttgtcggtagtgaacttattcaaaagtaccttggggatggtcccaagctagtcagagaattgtttagggtggctgatgaactttctccctcaatagtcttcattgatgagattgacgcagttggaacgaagacgtatgatgctcattcaggaggggagcgtgagattcaaagaactatgttggagctgctgaatcagctagatggttttgactcacgtggagatgttaaagtcattctagcaacaaaccgcattgaaagtcttgatccagccttgcttcggccag

SEQ ID NO: 48743 - DNA, 291 bp, Zea mays
cgtttgctctagggtttttgccacgccgccgccgctctgccccttccaccccaccgatataccaagatgacggcgcaggctgcggaggagctcgccgcccagatcgagcagcagaagctcgaggagcagaagaccgaggcagaagaggttgtggtggaggaggatgacgaggatgatgaggatgacgatgatgatgacaaggatgatgatgaactggatggacaagaaggggatgggagtggcaagtcgaagcaaagcaggagtgagaagaagagccgcaaggccatgctg

SEQ ID NO: 48744 - DNA, 286 bp, Zea mays
aattaatgttccccgctcaaggtttctcccagtgaaggctacatctgatctgttgcttgtgcagtctgatctttacaccttggttgatggctttgtcatccgcaacccatccagagcgaatccagctaacccttcaattgagcttggacctgagttcaagaaggttgccaatttccttgctcggttcaagtccatccccagcatagttgagcttgacagcttgaaggtttctggtgatgtctggtttggctctggaattacactcaagggcaaggtgacaattatc

SEQ ID NO: 48745 - DNA, 291 bp, Zea mays
cgccacccctacaggtaaggaagaggaggagggcaggatgtcgcaccgtaagttcgagcacccgaggcacggctccctcggcttccttcccaggaagcgctcctcccgtcaccgcggcaaggtgaagtcattccctagggatgaccccaagaagccttgccatctcactgccttccttggctacaaggcaggcatgactcacattgtccgtgaggttgagaagccaggatccaaactccataagaaggaaacttgtgaggctgttaccatcattgaaacccctcctcttgt

SEQ ID NO: 48746 - DNA, 215 bp, Zea mays
cattgtaggaggaattgatgaggttgcagttagaagcaactgctaaatcaaaacagctgactgaggttcatggagcatggttaccaccttggttagcgacacactatgctcgttacatggaggttgtctcaggtcactggaattatcatggaaaacctgctgtgcagaatgttttgcataaggcatcagaaaactcagcacatgcagagatgtgg

SEQ ID NO: 48747 - DNA, 291 bp, Zea mays
ctggaggttgagagctccgacaccatcgacaacgtgaaggcgaagatccaggacaaagagggcatccccccagaccagcagcgtctgatcttcgctggcaagcagctggaggatggccgcaccctagcagactacaacatccagaaggagagcactctccacctggtgctccgcctccgcggtggtcagtaagccatgggtcatttaagctgctgctgtacctgggtatctgcgtcgtctggtgccctctggtgtacctctatatggatgtcgtcgtctaataaacatctg

SEQ ID NO: 48748 - DNA, 291 bp, Zea mays
ctcgagccgatttccgtcttcccgtgggatcccagccgccgccgcaagaagaagagctccgggacttccaggtgtcgcgagaagatgccgaagcagatccacgagatcaaggatttccttctcaccgcgaggaggaaggatgcccgatcagtgaagatcaagaggagcaaggatgttgtcaagttcaaggtccgctgttccaagtacttgtacacccttcgcgtattcgacgctgagaaggcaaacaagttgaagcaaatctctccccccaggcttgagcgtccaggaggt

SEQ ID NO: 48749 - DNA, 281 bp, Zea mays
gctcctccaggacgtgtacaagattggtggtattggaactgttccagttggtcgtgtggagactggtgtcatcaagcctggaatggttgtcaccttcggtccaactggcctgaccactgaggtgaagtctgttgagatgcaccacgaggctctccaggaggcccttcctggtgacaatgttggcttcaatgtgaagaacgttgctgtgaaggatctcaaacgtgggtacgtggcctccaactctaaggatgaccctgccaaggaggctgctagcttcacct

SEQ ID NO: 48750 - DNA, 286 bp, Zea mays
acgatgtcgcaccgtaagttcgagcacccgaggcacggctccctcggcttccttcccaggaagcgctcctcccgtcaccgcggcaaggtgaagtcattccctagggatgaccccaagaagccttgccatctcactgccttccttggctacaaggctggcacgactcacattgtccgtgaggttgagaagccaggatccaaactccataagaaggaaacgtgtgaggctgttaccatcattgaaacccctcctcttgtcattgttgggctcgtggcatatgtgaaga

SEQ ID NO: 48751 - DNA, 288 bp, Zea mays
caaaagaagaaaaagaagatcaaggaggtttctcatgagtggtcattggtcaacaagcagaagcccatatggatgaggaagccagaagaaatcacaaaagaagaatatgctgccttctataagagcttgacaaatgactgggaggagcatctggctgtgaagcacttctctgtggagggtcaactggagttcaaggctgttctctttgttcctaagagggccccctttgatctctttgacaccaagaagaagcaaaacaacatcaagctctatgtgcgcagggtgttc

SEQ ID NO: 48752 - DNA, 283 bp, Zea mays
caccattgatattgctctgtggaagtttgagaccaccaagtattactgcaccgtcgttgatgcccctggacaccgtgacttcatcaagaacatgatcactggtacctcccaggctgactgtgctgtccttatcattgactccaccactggtggttttgaggctggtatctccaaggatggccagacccgtgagcatgctctccttgcgttcactcttggagtgaagcagatgatttgctgctgcaacaagatggatgcaacgactcccaaatactccaaggcg

SEQ ID NO: 48753 - DNA, 284 bp, Zea mays
agataatcttgacattgatgctagcaatgggaactgtcttgaagctcatgcgtttcttcaactcctggcaacctttggtatttctgctgaattcaatgaagatgacttgtgcaaattgcttccatatgtcagtcgtcgtcgtcagacacctgaactttgtcgattgcttgggttgtcgcagaaaatgccaggtgtcattgaagttctggtggaaagtggaagacctattgatgcaattaatttggcttatgtgtttgagcttactgaacaatttgaaccagtac

SEQ ID NO: 48754 - DNA, 288 bp, Zea mays
cgggtgtggatttggcggtttgcttgtagggctctcgcctctcttcccagatacgctcatgattggcatggagctcagggacaaggtaacggagtatgtgaaggagaggattttagctctaagagctgcaaacccaggacagtatgataacatatccgttgtccgcacgaactcgatgaaatacattccaaattacttcagaaaggctcagctcaccaagatgttcttcctgttccccgatccccacttcaaggagaagaaccacaggaggagggttatcagcatgca

SEQ ID NO: 48755 - DNA, 285 bp, Zea mays
ctcgagccgatttgatttacaaaatattcccccctgaaataaaggacactcctgaagccaccagcattagctgccgagaagctaaagaacatgggtccagtaacaaaaaatgaatgggtcatgattgggacgatgcttcttgcagtctcactatggatttttggggaaactattggcgtatccagcgttgttgctgcaatgattggactctcaatacttcttgtgcttggagtgctgaactgggaggattgtttgaatgagaagtctgcatgggacaccctagct

SEQ ID NO: 48756 - DNA, 286 bp, Zea mays
accgctgttaggttctaccaggagaccttcggcgtccctccggccacgcgagctcgccgaaatggtcgcccacaggttccatcagtaccaggtggtgggtcgcgcgctgccgaccccaaccgatgagcaccccaagatctaccacatgaagctctgggccaccaacgaggttcgcgccaagtccaagttctggtacttcctgagaaagctcaagaaggtgaagaagagcaatggccagatgcttgccatcaacgagatctttgagcgcaacccgaccaccatcaag

SEQ ID NO: 48757 - DNA, 284 bp, Zea mays
cagatccctaagtttcgatccactgtcccagtggatttgggactgcgatggaggagcagttcatcctccgcgtgccgccatccgtcgcagagcggatcgagcgcctcaacaatgaatccgccgcctcctcctccaaccccgacgaggcctccctggacctctccttctcagaggatggaagaaatggcacatttatgatcggtaatgagagctttcctgcttctctcttggatctacctgctgtggtggagtcatacaaaacatatgatgattctgtactaatt

SEQ ID NO: 48758 - DNA, 287 bp, Zea mays
ctcgcatcgcattcgcagcctttgctgcatcacaccaccgcgaaaccccagcagccgcatcgatggcgcctaaggcggagaagaagccggctgcgaagaagccagcggaggaggagcccgctgccgcgaaggccccggcggggaagaagcccaaggccgagaagcgcctcccggcggccaagtcgtccggcaaagaaggcggcgacaagaagggtaagaagaaggcgaagaagtcggtggagacctacaagatctacatcttcaaggcgctgaagcaggtccacccg

SEQ ID NO: 48759 - DNA, 125 bp, Zea mays
ctttcattcagtggtcccctctgggaacctacatggcaacggttcataggcagggatcacaggtgtggggcggtgaaaatggcttcgagcgtttgatgcgttttgctcattccatggtgaaactg

SEQ ID NO: 48760 - DNA, 294 bp, Zea mays
tgagaaatagttgttcgggccatagtgccgagaatgaatctggacgatctctttgagcagaagaacgatgtggccaaagctgtattggaggagcttgaaaaggtgatggcagattatggttacagcattgagcacattctcatggttgatatcatccctgacgctgctgttcgtaaggcaatgaacgacataaatgcagcccagaggcttcaactggcaagtgtttacaagggagaagcagagaagatccttatggtgaagaaagcggaggcagaagcagaggcgagatatctt

SEQ ID NO: 48761 - DNA, 292 bp, Zea mays
cccgacccgatggcgcccaaggccgagaagaagccagcggagaagaagccggcggccgaggagaaggcggagaagacgaccgcaggtaagaagcccaagtccgagaagcgcctgccggcctcgaagtcctccggcaaggagggcggcgagaagaaggggaagaagaaggccaagaagagcgtggagacctacaaaatctacatcttcaaggtcctgaagcaggtgcaccccgacatcggcatctcctccaaggccatgtccatcatgaactccttcatcaacgacatattcg

SEQ ID NO: 48762 - DNA, 288 bp, Zea mays
agcgctgccatcatctacaacagggatcacgcctggaacgaccattggatcttctgggtcggccccttcattggcgctgccctggctgccatctaccaccaggtgatcatcagagccatcccgttcaagagcaggtcttaagctgccgtggccgtgccgagacatgccagtccgaagaacgggcgtcttcctgtgatgtcttcttgtctgcccacgcctagtttctctgtcgattcctattcgtcgtctcttcagggctggtgctcactgctgcgccgttctgttaac

SEQ ID NO: 48763 - DNA, 287 bp, Zea mays
catagggtcatcaacacagatctccatgtttgtggtaataataataggaattccataataatacatagtgtaacagatacaacaactaccctactctggttttacaattttgtctgtcattagccaaatcatgttttagacagtagataccacctttttccaataattgttctggtattcttttgcatgatcttcagattccattctgcgtggtaattggctggatgatgggacaagaaatggacttgaattttcaactgttcgagacagcgactctctttataact

SEQ ID NO: 48764 - DNA, 280 bp, Zea mays
agttctcaacgacgtctgccggcagtgctcctgctcctcctcctccttcccggccgccgcgcgagcttgggttagtgtctcttctaagcggagacctgtgagaggagccatcatcatggccgctgttgagactgttgtcctcaaggttgctatgtcatgcgagggttgcgccggggcggtcagaagagtgctctccaagatggaaggagttgaaaccttcgacatagacctcaaggagcagaaggtgacagtcaaaggcaatgtcaagcctgaggacgtc

SEQ ID NO: 48765 - DNA, 282 bp, Zea mays
accgagcgaatcggctcaggctttatagctgatgaggaataccaacaatttgatggaacctgtccaacatgactttgactactgggtttgggaagaagctcagcagccttctggatagatgtttatcagagtatgacatggaggctatttattttgatgaaggtgtcagaagctcgaaaagacaacaacttgagtctaaactgttacagcttgtcaatcctgcctatcaatctcttctaggtcacttacctactagaactttagaagcatttaaggagtact

SEQ ID NO: 48766 - DNA, 186 bp, Zea mays
cgtacatcaaggcatgagcctcacttccagagcttgacgcagggacatgttcttctccgtgtctttcttcatcaccttggccactgccatctcgaagtcctcctgtgtaacgtgtaacggcatgctacggaccttttgcgacgtgccttgcatgcctgtgtttaaaggtttccttataacggttct

SEQ ID NO: 48767 - DNA, 281 bp, Zea mays
cctagggtttttgattttagccgccgccgctgctcatctcacatccctcgagaagacgcctgctcctcgccgatcgatacgatggccgtcttctccgacctccacaccgccgacggcctcaagtccctcgaggctcacctcgccggcaaaacctatgtgtctggtgactccattactaaggatgacattaaggtcttcgccgcggtgccgtcgaagcctggcgctgagtttcctaatgccgcccgctggtacgagaccgtctctgcggctgtagcctcaag

SEQ ID NO: 48768 - DNA, 278 bp, Zea mays
cgaaggtctcctgacacggcgcgcgtgaggagcaagatgatctacgccagctccaaggagaggttcaagcgggagctggacggcattcaggtggatctccaggccaccgactccgccgaggttggccttgacgtcatccagggccgtgcaagctgaggatgcccagcgatgaactgcccatgccagaggatgtatgagcatcatcagttcagatgagaacttgactgggcgggctatgtaaaaactgcatccaccgcagtgatgaaatcaatctaatc

SEQ ID NO: 48769 - DNA, 276 bp, Zea mays
cgctcttctgcagcagcaccacctctcgtcctcccggcgtcatcgtcgccgccctgatctccgcagccggcgtgtggcggagatccatccgtgcttgaactgactccttccttagctacaagtacctattatcaaccatgtttggacgcatgccaaggaagagtagtaacaataccaagtattacgaggatcttggtgtgtctaagaccgcaagtcaggatgagcttaagaaagcatacagaaaagctgccataaaaagccatcctgataagggtg

SEQ ID NO: 48770 - DNA, 280 bp, Zea mays
cccaccgcagccgtctactccgctgccatcctggagtacttgactgccgaggttctggagctggactgggaatgctagcaaggatctgaaggtgaagcgtatcacccctcgaccatttgcagctagccattcgtggagacgaggagctggacaccctcatcaagggcaccatcgcaggcggaggtgtcatcccgcacattcacaagtccctgatcaacaagtcctccaaggagtgaagactaggggatgtgcatctttagtttaaactggacttctttgc

SEQ ID NO: 48771 - DNA, 273 bp, Zea mays
ctttgaatttgcatgtaaagatggcagaggatatggtagcgagaagtgctgtatcgtgtggcctaggcgaccttggcctggcaccatacgtgaactcaaggaagatgtgccaagctttgaatgtgctcacagggttggatttactagggagtgatgcgttcaggggtccaaccgcaggtacacgagtacagaactcaccagtacagagcactgcaagcctagagagtctggataaccgaaagtccaacgaggtgaccagttgcgcggcggaca

SEQ ID NO: 48772 - DNA, 280 bp, Zea mays
cactctcctcagtaactatagtttttttgttccttgggaggatagaaaaaatatatccttggttttcttgaacagataacatttcaggtgtgcttctgaagagagatttcgttgaacaggatgaatgcattggcagcaaccagcaggaacttcaagcaggcagctaagctgctgggcctcgactccaagctggagaagagcttgctcattccattcagggagatcaaggttgaatgcacaatcccaaaagatgatggaactttggcatcctatgttggat

SEQ ID NO: 48773 - DNA, 220 bp, Zea mays
ctgagtccaagtggaagatattaggggagttagctatgtcaagtggaaagcttgagatggcagaggagtgtcttctacatgctatggacctcagtggtttgttgcttttgtattcttcccttggggatgctgaaggcattaacaaattggcatctgtagccaaagaacaaggaaagaacaatgttgctttcctttgtttcttcatgctagaaaagctgga

SEQ ID NO: 48774 - DNA, 283 bp, Zea mays
gatgcgctccatggcatctggaggtggtgttcccactgatgaagagcaggcgactgggttggagagggagatcatgctggctgcaaagaagggactggacccatacaatgtactggccccaaagggagcttcaggcaccagggaagaccctaatttagtcccctccatctccaacaagagaatagtaggctgcatctgtgaagaggaaaacagcgtcgtctagttttggctgcagaaagggcgcgaccccaagagatgcccccgctgtggagcccagtacaag

SEQ ID NO: 48775 - DNA, 116 bp, Zea mays
cgagctcttacggagatgaatggcaaaatggttggaagcaagcccctttatgtagctcttgcgcagcgtaaagaagacagaaaggcaaagctacaggcacaattttcacaaatgcg

SEQ ID NO: 48776 - DNA, 245 bp, Zea mays
  unsure (1)..(245): unsure at all n locations
gcgagacgagtacacgtctgacgatccccccatggtaatttatgtcaacacgcacgccattctggatgcccgcagganaggagcgagaaccgccgcagctcaggggggcgataaggaggcctcacagggacctagagtgattgttgtggggccaacagattctggaaaaagtactctctgcaaaatgcttcttagctgggctgccaaactgggctggaagctacgtatgtcgatttagatattgg

SEQ ID NO: 48777 - DNA, 205 bp, Zea mays
gatgtgacatttgcagcgtggaaatcaccgacgacgcgcagcggtgaccgcacacccgttccgtcggagcactgcgttcctcttcggcaatgagggtactggactttcacaaaaagagtgcgagatctgtgacttctttgtctacatccctcagtatggtggtggaactgcatctctcaacgttactgttgcagcttcaattgtt

SEQ ID NO: 48778 - DNA, 280 bp, Zea mays
cgaaaacaatggagccggtgcggaagagcgtgtgcgtgaccggcgctggcggcttcgtcgcgtcggagctggtgaagctcctcctctcccggggccaatacgcggtccgcggcaccgtgcgcgaccctggtgctagcaagaatgcccatctaaaggtgtctggaagaagctgaggaaaggtgccacctcctcaggctgatctgatggactacaacagcattgcatcagcagttgccggctgtgagggtgtcttccatgtagccagtcctgtcctttccca

SEQ ID NO: 48779 - DNA, 207 bp, Zea mays
aacaagcgtgagtacaaccgcaaagttcgtgaggttgtggagcagagctggacagctgattaaaactttagagctggacagccgattaaaactttattggcttcaccagatggtgcaggtatgtctccacctttcctaggttcctaggtctgttttattgacttaaccgttaaaaatcgccaggtatcgttgtgttcttgtggttca

SEQ ID NO: 48780 - DNA, 133 bp, Zea mays
agcgcatctccgggctcatctacgaggagacccgcggcgtcctcaagatcttcctggagaacgtgatccgcgacgccgtcacctacaccgagcacgcgcgccgcaagatcgtcacagccatggacgtcgtcta

SEQ ID NO: 48781 - DNA, 282 bp, Zea mays
gacaactctctctaccgtccgataccccaagcaccagcgcggcggcggcgaccatggctgtcggaaagaacaagaggatctccaagggaaagaagggtggcaagaaaaagaccgtcgaggcctttctctaagaaggattggtatgacatcaaggcaccgtcggtgttcagtgtgcgcaacatcgggaagactctcgtatccaggacacagggtaccaggattgcttctgagggtctgaagcacagagtctttgaggtttgcctagctgatcttcagggcgac

SEQ ID NO: 48782 - DNA, 169 bp, Zea mays
gcggcgaccacccgattcgaagcgtgaggagagaccgaagaagcgggagagatggctcgtaccaagcagactgctcgcaagtccacgggagggaaggctcccaggaagcagcttgccaccaaggctgcccgtaagtctgcccccaccactggtggagtgaagaagcctc

SEQ ID NO: 48783 - DNA, 263 bp, Zea mays
ctcgcatcgcattcgcagcctttgctgcatcacaccaccgcgaaaccccagcagccgcatcgatggcgcctaaggcggagaagaagccggctgcgaagaagccagcggaggaggagcccgctgccgcgaaggccccggcggggaagaagcccaaggccgagaagcgcctcccggcggccaagtcgtccggcaaagaaggcggcgacaagaagggtaagaagaaggcgaagaagtcggtggagacctacaagatctacatcttc

SEQ ID NO: 48784 - DNA, 130 bp, Zea mays
ggattttattgacatcaacctctgaagtttatggtgatccacttgagcatcctcaaactgaggcctactggggcaatgttaacccgattggtgttaggagttgttatgatgagggtaagcgtgtagcaga

SEQ ID NO: 48785 - DNA, 204 bp, Zea mays
gattaagaaagttgtagactgggaagaatcacgctctttcttctataaaaggctacggaggaggattactgaagatcttcttgcaaaagaaataagacgaataattggtgacaacttcacgcaccaatcggcgatggagcttatcaatgaatggtacctggactctcaggccaacacagggaagcactgctggatgggatgatg

SEQ ID NO: 48786 - DNA, 310 bp, Zea mays
ccatctcttcgactcctttctggagcagctagggttccgtcctcgatccgatccgccgagtgcacaccacctttccccactccgatcgaatcgatggccgccgaaggcgagaagaagatgataaccctcaaaagctccgatggcgaggagttcgaggtggaagaggcggtggcgatggagtcgcagaccatccgccacatgatcgaggatgactgcgccgacaacggcatccctcttcctaacgtcaactccaagatcctatccaaggtaatcgagtactgcaacaagaacgtacatgccgccgcagccg

SEQ ID NO: 48787 - DNA, 308 bp, Zea mays
cgcggagtcggagggaacgaaaactcagggtctcgaatttcctaggagcggaggcgatggctgggaagggaggaaaaggattgctcgccgcgaagacgacggcggccaagtcggcggagaaggacaaggggaagaaggcccccatctcacggtcctcccgcgcgggcctccagttttctgttggacgaatccaccgtcagctgaagcaaaggactcaggcaaatcgccgcgatggtgccactgcagccgtctactctgccgccatcctggagtacttgactgccgaggttctggagctggctgggaac

SEQ ID NO: 48788 - DNA, 312 bp, Zea mays
cgccaggcgcacagcacacgaacacacaccgcgcacagctccgaggtgatcttccggcggccggcgagatgagccgtggcacaggcgcgggctatgaccgccacatcaccatcttctcccccgaaggacgcctgtaccaagtcgagtacgcgttcaaggcggtgaagtcggcgggtgtcacgtcgatcggacgtccgcgagcgcgactccgtctgcgttgttacgcagaagaaagtcccggataagttgctggatcagacgagcgtgacacacctgttcccgatcaccaagtacgtcggattgcttgccact

SEQ ID NO: 48789 - DNA, 309 bp, Zea mays
cgcaagaaaactagaaaaggctcctcccgaccgcaacgcccctcatctccctcgaccccgacatccccgacccgatggcgcccaaggcggagaagaagccagcggagaagaagccggcggccgaggagacggcggagaagacgaccgcaggaaagaagcccaaggccgagaagcggctgcccgcgtccaagtcctccggcaaggagggcggcgagaagaacgggaagaagaaggccaagaagagcgtggagacctacaagatctacatcttcaaggtgctgaagcaggtgcaccccgacatcggcatat

SEQ ID NO: 48790 - DNA, 305 bp, Zea mays
ccaccacctccctccgcggctccgccttccgccgcgaacacgccgctgtatcgacaccttctcctcctccttcagcacgatggcggagattgagataagaacaacacatgatgacttccgacttccctacaacaaaccaaacaaggcattgttttactcgctatgtcgagtaccacaggtgtttgaatgccaaaggggatgatgctggtgtttgcgaaaatttgccaagtactacaggtccctttgccctggagaatgggttgagaaatggacgagcagacggagaacgggagtttccaggactc

SEQ ID NO: 48791 - DNA, 307 bp, Zea mays
gcagatatattagttgagagaccatctcaatatgctcgtagggtagaagatattacgctcatattcaagaacttacatcatcttctcaattccttacgacctcatcaggcaagggccacattgattcacatgcttgagagccaaattcggcaccgcaaggaagcaattgaagatataaagcatttcctatttgcttgtatccaccttccatcaactagcactacatcgtctgtaaaaaacatacactaggggatatatcattgtgatctcatccatcaccaaggcaaaaaggaggagggaggagcgc

SEQ ID NO: 48792 - DNA, 312 bp, Zea mays
ccgcggaggccgccaagctcgcccggtacaacaagaagcccaccatcacctcccgcgagatccagacctccgtccgcctcgtcctcaccggcgagctcgccaagcgagccgtctcggagggtaccaaagccgtcaccaagttcacctcgtcttagccggcttgttgtaggcgtcgttgttgtctgcttctcaagcaagcactgtcatgtgccgcttctcatggcagtagtggtggaaggctggtgtgtgtaagtggtgcactggcttttgcctgtgttgtcgatttagtcatggtggtaatgtattgctaaa

SEQ ID NO: 48793 - DNA, 191 bp, Zea mays
cgccttcagctgatgtagcgaagcaggtcggaattaggatgactcttggccaaggtacagagacgtgtgtgcatgctgagcaataccacagctgttgccgaggtctgggatcgcatggaccacaagtttgacctgatgtatgtcaagcagtgcccagctgggggtcactaaagttacccttgtacttgcag

SEQ ID NO: 48794 - DNA, 303 bp, Zea mays
cattcctttatccgtggaatcgggataacaagaagtgacgacagcttaattcgtgttgatcgtctagaataccacatcagggaagagcttaacaaaacagcccctcgaaccatggttgtattgcgtcctctaaaggtggtaataactaacttggaagaaggaaaagtactagaccttgatgggaaaatgtggccagatgcttctgatactgatgcttcctctcactataagcttccgttctcaagaactgtctacattgagaaaactgattttcgcttaaggactcaaaagactactagggtg

SEQ ID NO: 48795 - DNA, 305 bp, Zea mays
ctttgtgacaccgtcggactctgttgccattatcgcagccaatgctgttcaatcaattccttactttgcttctggactgaagggagttgccaggagcatgccaacatctgctgcccttgatgttgttgcaaagaatttgaaccttaagttctttgaggtgcctactggatggaagttttttgggaatttgatggatgctggaatgtgctcaatctgtggtgaagaaagctttggcactgggtctgaccacattcgtgagaaggatggcatctgggctgtgcttgcatggctttcaattattgctt

SEQ ID NO: 48796 - DNA, 297 bp, Zea mays
gagggccaccgacgttatgatcgccggtaaggttgccgaggtctgcggatacggtgatgttggcaagggttgtgccgctgcactcaagcaggctggtgcccgtgtcattgtgaccgagatcgaccccatctgcgccctccaggctctgatggagggtcttcaggtccttcccttggaggacgttgtctcggaagctgacatcttcgtgaccaccactggcaacaaggatatcatcatggttgaccacatgaggaagatgaagaacaatgccattgtctgcaacattggccactttga

SEQ ID NO: 48797 - DNA, 304 bp, Zea mays
aggtctgcagcccccaactacccccagcctcggaaggaaccttccagaagcgcaagactctaaaggccgtcgccttcccattcttcctcgccgcgggggtcgcctgagatcacataaacaatggtgaaggctgttgctgtgcttggtagcagcgatggtgtcaagggcaccatctttttcacccaagagggagatggccctaccgctgtcaccggaagtgtctctggcctcaagcctggcctccatgggttccatgtacatgcacttggtgacacctaccatggatgcatgtcaactggaccac

SEQ ID NO: 48798 - DNA, 298 bp, Zea mays
acatgattgagaggtccaccaaccttgactggtacaaaggcccaaccctgcttgaggctcttgaccagatcaccgagcccaagaggccttcggacaagcacctgcgtctgcccctccaggatgtgtacaagattggtggtattggaactgtaccggttggtcgtgtggagactggtgtcatcaagcctggtatggtagtcacctttggtccaactggcctgactactgaggtgaagtctgttgagatgcaccatgaggcgcttcaggaggctcttccgggcgacaatgttggcttcaa

SEQ ID NO: 48799 - DNA, 306 bp, Zea mays
aggcgacagctgaaagacctgtacaagtcctttgtttctgagtaccctatcgagtcgatcgaagacccatttgatcaggatgactggagcacttatgccaaactcactgatgagattggacagaaagtgcagattgtaggagatgatcttctcgttaccaaccccaccagggtcgccaaggccatcaatgagaagacctgcaatgctctcctcttgaaggtgaaccaaatcgggtctgtgaccgagagtatcgaagctgtcaggatgtccaagcgcgccggatggggagtgatggcaagccacagg

SEQ ID NO: 48800 - DNA, 309 bp, Zea mays
ccgaaacctcgctaaagcccgatgaactgagcctcctgaagagaatatgcgaagcgtactacctcccggactggtgctcaccttcagagtatgtgaacatatgcaagtcactgtctctcgaggatatcaagacagctgactggtcggagaacgtggccccgttttggcccgccgtgataaaatcagcgctaacatggaagggcttcacctctctgctgacgaccggatggaagacgatcagaggcgcgatggtgatgccgctaatgatccagggctacaagaagggcctcatcaaattcaccatcatca

SEQ ID NO: 48801 - DNA, 296 bp, Zea mays
gagcatgatatatcaaacacttatgaaaatccatctcctatgattgttgatgaggctatgctagaaaaagtacttgggcctcctagatttgatgacagagaagctgcagatcgtgtagcaagcccaggagtctcagttggccttgtctggacttcggttggtagggaagttcagtttgtggaggctacagccatggtgggtaagggtgacttgcatttgactgggcagcttggtgatgttattaaggagtcagcgcactagctttgacatgggtgagagcaagagctgctgacctc

SEQ ID NO: 48802 - DNA, 294 bp, Zea mays
atctggtcatacaacgacgtctacactgatggacggcccacgcagggtggattcgcctccaccatggtcgtcgaccagaagtttgtggtgaagatcccggcgggtctggctccggagcaagcggcgccgctgctgtgcgctggcgtgacggtgtacagcccgctgaagcactttgggctgacgaccccgggcctccgtggcggcatcctgggcctcggcggcgtgggccacatggcgtgaaggtagccaaggccatgggccaccacgtgacggtgatcagctcgtcgtccaaga

SEQ ID NO: 48803 - DNA, 299 bp, Zea mays
ggacggcgacggcgacgtggtgcaggtggacctgatggagtcgaagacggcgcgcggcccgccgacggggcggtagacgccgatgcgcgacttctggggctccgtctggcgcatggacaccaatcaccgcatgcagccgcccttctccatccgcatccgcaacgagtccggcaagacgctcgtcgccaacaacgtcatcccggccaactggcgccccaacaccttctaccgctccttcgtccagtacagctaaccgatcgggatccgtgccctgcccgcaattggagctggctggctgg

SEQ ID NO: 48804 - DNA, 295 bp, Zea mays
ggagtctggagacgacgtgcagaaatggcacctcgaaaggggaaggaaaagaaggaagaacaggtcatcagcctcggacctcaggtggctgaaggagagaatgtatttggtgtctgccatatctttgcatccttcaatgacacttttgtccatgtcactgatctttctggcaaggaaaccatctgccgtgtgactggtgggatgaaggtaaaggcagaccgagatgaatcctcaccatatgctgctatgttggctgcccaggatgtggcccagaggtgcaaggagctgggtatca

SEQ ID NO: 48805 - DNA, 335 bp, Zea mays
cacagctgatgcagcgcagtaggtcggaatcggctcgagatcagaagagcggcggcgcgagcggacaaggagcaggcggaagaggagttgtgccaagccacaatgggtatctcgcgtgactcgatgcacaagcgccgagccaccggtggaaagcagaaggcctggaggaagaagcgaaagtatgagcttggtcgccagccagccaacaccaagttgtcaagcaataagacggtgaggagggtccgtgttcggggaggtaatgtgaaatggagggctcttcgccttgatactggtaactactcatggggaagtgaagctgttacccgcaagacccg

SEQ ID NO: 48806 - DNA, 286 bp, Zea mays
cgcattcctcccatctcccaagacctcctcagacgcgagaagcgcagtgctcgccatggacgccaccggcactggagctggagggaaggcgaagaatggagcggacggtcgcaaggccggcggggcgacggaagaagtcggtgacgaggtccgtgaaggacgggctccagttcgccgtcggccgcatcgggcgctacctcaagaagggccgctacgcgcagcagtcggcagcggtgccccgtctacctcgcggcgtcctggagtactcgccgctgaggtctggagc

SEQ ID NO: 48807 - DNA, 302 bp, Zea mays
ctcaggttcaagaacaccctcgtccgacgccgccgctcctccggctacgacccctgcacggagacctacgccgagaggtactacaacaggatggacgtgcagagggcgatgcacgccaacaccacggggatcccctacagatggactgcctgcagtgatgtgctgatcaagacatggcaagattcagagttctccatgctgccgacgtacaagaagctgatgaaagcaggactgaggatatgggtgttcagcggcgacacagattcagtcgtcccggtgaccgcgacgaggttcgccatcag

SEQ ID NO: 48808 - DNA, 299 bp, Zea mays
gccatggcctgcctgcacgaccacagctgcgaggatcacaactgcgccgccgactggtcgctctacaaccacatcgacgtccccaaggtggtggctctcaacgaatcggtgcccgggagcgtcaagtccgtcttcaagccctgggagcagcgccttgacacctcggggggtttttcggagagtaatgagggtgaccctgagctacttattttcatcccgttcacatcagatgttaagatcaagagcatttctgttgttggtggtgctgatggaacaagcccgtcaagaatgagagcgtt

SEQ ID NO: 48809 - DNA, 294 bp, Zea mays
agaaaatgaacaagaacaagaagcttgttaagaggcttgccaagaagtaccatgctttcttggcatcagaggccatcatcaagcagattccccgtcaccttggtcctggtctcaacaaggcaggcaagttcccgaccctggttactcaccaggaatccctcgagtccaaggtgaacgagactaaggcaaccgtcaagttccagctcaagaaggttctttgcatgggtgttgccgttggcaacttggcgatggaggagaagcagatccagcagaacatccagatgagcgtcaatt

SEQ ID NO: 48810 - DNA, 295 bp, Zea mays
gcctccgacatcctactttcgtcctcacgagtgcccgataatccgccggcgctaagatgttggtttatcaagatctcctatctggcgacgagctcctgtcggattcattcacctacaaggagctcgagaacggcgtcctgtgggaggtcgagggaaagtgggtcacccaaggtcctgttgatgtagacattggtgccaatccatccgccgagggtggtgaggacgaaagcgttgatgacacagccgtgaaggtggttgatattgttgacacattccgtctacaggagcaactcct

SEQ ID NO: 48811 - DNA, 306 bp, Zea mays
gaacagagaccagaaagagtaaaaccttttatgacaggggctgcagaacaaatcaagcacatccttgctaatttcaaaaactaccagttctttattggtgaaaacatgaatccagatggcatggttgctctattggactaccgtgaggatggtgtgaccccatatatgattttctttaaggatggtttagaaatggaaaaatgttaagaaatgtggcaattattttggatctatcacctgtcatcataactggcttctgcttgtcatccacacaacaccaggactgaagacaaatgggactgatgt

SEQ ID NO: 48812 - DNA, 285 bp, Zea mays
ttcacaggctcaccacaccaaccaacaagcaaaaattccccaatcctctcgtctccgcggcgaagatgtcggaggcgcggcaagggcggcaagggcctgggcaagggcggcgcgaagctcaccggaaggtgctgcgcgacaacatccaggggatcacgaagccggcgatccggaggctggcgcggcggggcagcgtgaagcgcatctcggggctcatctacgaggagacccgcggcgtactcaagatcttcctggagaacgtcatccgcgacgccgtcacctaca

SEQ ID NO: 48813 - DNA, 307 bp, Zea mays
caatattcctaagcttattcgagcttgtgatgaacagcagcactggaaagaacttacctacctgtacatacaatatgatgaatttgacaatgctgccaccactattatgaaccactctccagatgcatgggatcatatgcagttcaaggatgcttgtgttaaagttgcaaatgttgagctatactacaaggcagttcacttctatttgcaggagcatcctgatctcatcaatgatatgctgaatgtgcttgcacttcgtttagatcataccagagttgtagacataatgcgcaaggctggtcaattg

SEQ ID NO: 48814 - DNA, 311 bp, Zea mays
gtctggcagagaagatgctggctggtgaggtgaaagaaggtgactctgccatcgttgatgtggattcagatggcaaggtgatagtcctgaatggtggtagcggtgttgctgagccactggaacctgctctcagtacctaaccgaggtcaaaatcatcattggtccgaaatatggccttctttacaagtcagctgggtttctcgtgatggtaaaaactagactgacattacttggccgcccattagttgctttatctttcgtttattttcttttttgttggaagtgaggcagtagggttgctatggaaatga

SEQ ID NO: 48815 - DNA, 305 bp, Zea mays
ccaatttacagcgtctccctcctattctgtagcgcgacggcaccactaaaacctagcagaggctcgtgccgccaccgccagccgcaacaaggaaggaaccaggaacacgatgcccaagtccaagcgcaaccgcccagtgaccttatcgaagaccaagaagaagccaggtttggagcgcaagggcaaagtagtcgccgagataaaagatgccgtggacaagtacaccagcgcctatgtttttacctacgataacatgaggaatcagaagctcaaggacctcagggagcagctcaagtcttctagca

SEQ ID NO: 48816 - DNA, 300 bp, Zea mays
gttgcacatgtcgagctatattacaaggcagttcacttttatttgcaagagcatcctgatctcatcaatgatatgctaaacgtgcttgcacttcgtttagatcacgccagagttgtagacataatgcgcaaggctggtcagttgcatcttgtaaaaccatatatggttgcagttcagagtaacaatgtatctgccgtgaatgaagccatgaatgagctttatgtcgaagaggaggactacgaaagactccgtgaatcagttgacatgcatgacaactttgaccagattggtcttgcccag

SEQ ID NO: 48817 - DNA, 300 bp, Zea mays
catttgttagcagaactgatgctgaagaagcactacaaggattaaatggatcactcattggaaagcaggcagttcgcctttcatgggtccgcagcccatcgcataagcagtctaggggtgactccgtcaacaggaggaacaacatgtactatggcacaccattctacggcggatatggctatgcctccccggtgccacacccaaacatgtacgctgcagcgtatggcacgtacccgctatatggcaaccagcagctagtgagctagagagctcccctccgacgtgtcccctctgacggga

SEQ ID NO: 48818 - DNA, 298 bp, Zea mays
agagcggcggcgcgggcggacaaggagcaggcggaggaggagttgtgccaagccacaatgggtatctcgcgtgactcgatgcacaagcgccgagccaccggtggaaagcagaaggcctggaggaagaagcggaagtatgagcttggtcgccagccagccaacaccaagttgtcaagcaataagacagtgaggagggtccgtgttcgtggaggtaatgtgaaatggagggctcttcgccttgatactggtaactactcatggggaagtgaagctggtacccgcaagacccgtatcctcg

SEQ ID NO: 48819 - DNA, 304 bp, Zea mays
ccaattcgccggctggattctgagcctcgatttcggtctctgtcgcttgcaatgtcaatctcacctccaaccatgggtatggacaagtctcacatcaacattgtggttattggccatgtcgactctggcaagtcgaccaccacaggacaccttatctacaagcttggaggcattgacaagcgtgtgatcgagaggtttgagaaggaggctgctgaaatgaacaagcggtccttcaagtacgcgtgggtgctcgacaagctcaaggctgagcgtgagagaggtatcaccattgatattgctctgt

SEQ ID NO: 48820 - DNA, 305 bp, Zea mays
ggcgcacagaatctggtgtctcttgctccgaccccgttggcgactgagacgcgatccccttctcctgcactgccgtcctccgtcgctgcgatgcctcggtatcactgtgactactgcgacacctacctgacccatgactcgccatctgtccggaaacaacataatgctggatacaaacacaaggcgaatgttcgaacctactatcagcaatttgaggagcagcaaactcaaagtttaattgatcaaagaatcaaggagcatcttggacaagctgcagctttccaagcaggtgcccctttcaacca

SEQ ID NO: 48821 - DNA, 300 bp, Zea mays
cgttttgcaggtctcgaggtcaagcctggttccactgttaagtgtgagcctggatatggctttgtgctgcaactttcccaggctgctcttggggaatcgaagaagagtgataatgccttgatgtatgtcacaattgatgatcagaaacttgccattggaaccctctctgttgacaagaacccacacattcaatttgatctgattttcgataaagagtttgagctgtcgcacacatcaaaaactaccagcgtcttcttcactggctacaaggttgaacagccattcgaggaagatgaaatg

SEQ ID NO: 48822 - DNA, 295 bp, Zea mays
agcgtgggggactgctattacgaactaagtgtcgagattatcgaagtgtgcctggcgctgaagcatcggaatggagtttagatgagtttggaggaactacatcaacaggtgttgaagggaaggggcaagttcgcccaggatgtcagtcaagatgacctgatcagagccatcgagaaactaaaggcacttggcactggcttcggcatcatccctgtgggcagcacatacctcattcagtctatgccagctgagctcagtaaggatcacaccgtggagctgcagcttgcagagaaga

SEQ ID NO: 48823 - DNA, 296 bp, Zea mays
ggttttactgggttctgcaccagatcctcgcatacaaagtgactttacaaatttggccagtaagctgcatggtgaataccatggccgagtgaagctatgtctaacctatgacgagccactgtcacatttgatatatgctggcgcagacttcattctcgttccttccatcttcgaaccttgtggtctaacacagcttattgctatgcgctatggatccatcccagttgttcggaaaactggaggcctgtacgacaccgtttttgatgtcgacaatgataaggatcgggctcaagcac

SEQ ID NO: 48824 - DNA, 301 bp, Zea mays
ctcccgagccaagatgaatgttgaaaagctcaagaagatggcaggtgctgtgcgcaccggggcgaagggtagcgtgcgcaggaagaagaaggcagtccacaagactacaaccacagatgacaaacggcttcaaagcaccttgaaaagaataggagtgaacagcattcctggtattgaagaggtcaacatctttaaggatgatgttgttattcagtttgtaaatcctaaagtgcaagcgtcaattggtgctaatacatgggtggtcagtggaactccacagacaaagaagctgcaagatctg

SEQ ID NO: 48825 - DNA, 291 bp, Zea mays
  unsure (1)..(291): unsure at all n locations
cggagtngctgatccgcaagctgccgttccagcgcctggtgcgggagatcgcgcaggacttcaagaccgacctacgcttccagagctccgctgtctccgcgctgcaggaggcggctgaggcctaccttgtcgggctcttcgaggacaccaacctctgcgccatccacgccaagcgcgtcaccatcatgcccaaggacatccagcttgcccgccgcatccgcggggagagggcctaagcgtcatattctctgacatcagtgcccgatcagaagatgtagagatgtgctgggt

SEQ ID NO: 48826 - DNA, 292 bp, Zea mays
cggacagcctcctccagctggagggtctgacttggggagcatcaaagcttgtgcctgttggatacggcatcaagaagatgactatcatgttgacaattgtcgacgatcttgtgtccatcgacactctaattgaggaccaccttacgcaagagcccatcaatgagtacgtccagagttgcgacatagtggctttcaacaagatctagagttcagtttctgagtttgggcaacggcagcggctcagctcgtcaagtttgtgctgggatgccagtttatcccttctagtctatta

SEQ ID NO: 48827 - DNA, 293 bp, Zea mays
caatattcctaagcttattcgagcttgtgatgaacagcagcactggaaagaacttacctacctgtacatacaatatgatgaatttgacaatgctgccaccactattatgaaccactctccagatgcatgggatcatatgcagttcaaggatgtttgtgttaaagttgcaaatgttgagctatactacaaggcagttcacttctatttgcaggagcatcctgatctcatcaatgatatgctgaatgtgcttgcacttcgtttagatcataccagagttgtagacataatgcgca

SEQ ID NO: 48828 - DNA, 292 bp, Zea mays
gattaccaagatcgacaggcgttctggcaaggagcttgagaaagagcccaagttcttgaagaacggcgatgctggtatggtgaagatgattcccaccaagcccatggtggtggagacattctcgtagtatcctccccttggtaggtttgctgtccgcgacatgaggcagacagttgctgttggagtcatcaagagtgtggagaagaaggacccgaccggcgccaaggttaccaaggcagctgccaaaaagaaatgatgcaacctgtcgttaatcctgtatctgcttttgcaa

SEQ ID NO: 48829 - DNA, 292 bp, Zea mays
ggagcattcgagaagccgaagaaaattcgaagacgaggagcagctacactgcggacggacttcgggcatggagggccagttccaggttggcaaggaggaggtcatccaagcatggtacatggacgacagtgaagaggaccagaggcttcctcatcatcgcgagcccaaagaattcatccctctcgacaaactttccgaactaggaatattaagctggcgcctaaatgctgatgattgggagaatgatgagaacctcaagaaaattcgtgaagccaggggttactcttacatg

SEQ ID NO: 48830 - DNA, 285 bp, Zea mays
  unsure (1)..(285): unsure at all n locations
caagtcttctggtggtttgtcagaggtcgaaattgagaagatggtgaaggaggcagagctacattctcagaaggaccaggaaaggaagtctcttattgatctcaagaactctgcagataccacgatctacagcattgagaagagtgtcagcgagtacaaggacaaggtccctgctgaagtcaccaaggagatcgagtctgctgtctctgatctgagggcagctatggctgaggacgatctggacagnatcaagcagaagctggaagcagcaaacaagctgtttca

SEQ ID NO: 48831 - DNA, 293 bp, Zea mays
gccaactctctctaccgtccgataccccaagcaccagcgcggcggcggcgaccatggctgtcggaaagaacaagaggatctccaagggaaagaagggtggcaagaaaaagaccgtcgaccctttctctaagaaggattggtatgacatcaaggcaccgtcggtgttcagtgtgcgcaacatcgcaaaatactctcgtatcccaggacacagggtaccaggattgcttctgagggtctgaagcacagagtctttgaagtttgcctagctgatcttccaggcgacgaggatcaag

SEQ ID NO: 48832 - DNA, 295 bp, Zea mays
cgagctcttacggagatgaatggcaaaatggttggaagcaagcccctttatgtagctcttgcgcagcgtaaagaagacagaaaggcaaagctacaggcacaattttcacaaatgcgtcctgttgcaatggcgccttcagtaggtcctcgcatgcccatgtttccacctggtgtccctggagttggtcagcagctgttctatggtcagccaccaccagccttcatcaaccctcaggctggatttgctttccagcaacctctgatgcctggtatgaggcctggtggtccaatgccga

SEQ ID NO: 48833 - DNA, 298 bp, Zea mays
agcctgcagccctccatccacgaactcccgttctccatttccagccatggcggtgtcgatcgagctcaccaaggagtacggctacgtcgtgctggtgctggtggcctatgtcttcctcaacctttggatgggcttccaggtcggcaaggcccgcagaaagtacgaggtgttctaccccaccatgtacgccatcgagtcggtcaacaaggacgccaagctcttcaactgcgtgcagtgggggcacagaactctctagagtggatgcgcgttttcttcgtcatactgctgctgggcggtc

SEQ ID NO: 48834 - DNA, 292 bp, Zea mays
cccaagtgacaaagccctgctgagcgaccctgtcttccgccctcttgtggagaaatatgctgcagatgagaaggcattctttgatgactacaaagaggcccacctcaagctctccgaactggggtatgctgatgcttaaatggtccatatcctggagcgggacacaaactgctgcctgtatggactcgtgcgattcagggtgaaccatcagattgtctagtgtcatctttgtaataaatttatctgttcttggtactttgtctatggttgaatcggaacccatttccgtttg

SEQ ID NO: 48835 - DNA, 286 bp, Zea mays
ggcggagtgacggtggaggttcgcggctctaacggggctttctacaagggatttatcaaagatgttcatgaagactcccttacagttgtttttgaaaataattggcaaccagaacgccaggttccatttaatgaagttagattagcaaaaccacctgatataaaaaaagaaattagtgaaggagatgaagtagaggtatattcaagagcaaatgaccaagagccatgtgggtggtggttggctaaagttcggatgatgaaaggagaattcttatgacattgatatg

SEQ ID NO: 48836 - DNA, 304 bp, Zea mays
agcagtctgtgatggacaagatctccgagaagttccacggcggggactcctcgtcgtcgtctgactcggacgacgagaagaagaaggggtcttcttcggcgtcggcgacggaggccatgaaagccaagatctaccgtctcttcggccgcgagatgcccgtccactctgtcctcggcggcggcaagcccgccgatcttgtcctatggaggaacaagaagatctcaggcggggtactcgctggtgccacggccatctggctcctgttcgaggttatggagtaccatctcctcaccttggtgtgcca

SEQ ID NO: 48837 - DNA, 265 bp, Zea mays
cactgccgcgccgccaccccctacaggtaaggaagaggagggcaggatgtcgcaccgtaagttcgagcacccgaggcacggctccctcggcttccttcccaggaagcgctcctcccgtcacggcggcaaggtgaagtcattccctagggatgaccccaagaagccttgccatctcactgccttccttggctacaaggctggcatgactcacattctccgtgcagttgagaagccaagatccaaactccataagaacgaaactgtg

SEQ ID NO: 48838 - DNA, 271 bp, Zea mays
atactcagacccttcgaccaggagtcaaattgactttatcagctttaatcgatgggaagaacttcagtgcaggaggtcacaaggttggcttgggatttgaactggaagcttaatgtggtttgaggaaagcatcagatttgtccctggaagtgaagagaaatgaacccactatgttttggccttaaaattcttctgtgaaatttcagaagtgtgaactttttattcttccaaagaattgtaatcctgcccacactgaagtctagggttgcga

SEQ ID NO: 48839 - DNA, 290 bp, Zea mays
ggctgcaccagttctactacatctttgggttcctcttccttgtgttcctgattctcatcgtgacatgtgctgagatctcgattgtactatgttacttccagctctgcagcgaagattacctgtggtggtggaggtcgtacttgacttctggttcctctgcactctacctcttcttgtatgcaaccttctacttcttcacaaagcttgagatcaccaagtttgtctcagctgttatgtacttcggttacatgctcattgcctcgtacgccttcttcgccattgacggcaca

SEQ ID NO: 48840 - DNA, 290 bp, Zea mays
ggacaaccttggaggagataagcttgtcactgttgaagatattgtccgtcagcattgggccacatatggtcgccattattacacacgctatgactatgagaatgtcgatgctggggctgctaaggagctgttggcaaccctagtaagcatgcagtcatcactttctgatgttaacaagttgatcaaggagatccggtctgatgtttctgaagtagttgcagctgacgagtttgagtacaaggatccagttgatggctctgtgtccaagcaccagggcatccgatacctct

SEQ ID NO: 48841 - DNA, 289 bp, Zea mays
ctcatatacctgctgctcgccccgacgcgcatcaactcccgccgccgccccttcctctccgtcgctcgcctcgcgcctacgccaccacctctgccatggccccgaagaaggataaggccccgccgccgtcgtccaagccggccaagtccggaggcgggaagcagaagaagaagaagtggagcaagggtaagcaaaaggagaaggtcaacaacgctgtgctcttcgaccaggccacctatgacaagttgctctccgaggtgcccaagtacaagcagatcaccccatccgt

SEQ ID NO: 48842 - DNA, 293 bp, Zea mays
ccaagacctcctcagacccgagaagcgcagtgcggccatggacgccaccggcactggagctggagggaaggcgaagaagggagcggccggtcgcaaggccggcgggccgaggaagaagtcggtgacgaggtccgtgaaggccgggctccagttccccgtcggccgcatcgggcgctacctcaagaagggccgctacgcgcagcgcgtcggcagcggtgcccccgtctacctcgcggccgtcctggagtacctcgccgctgaggtcctggagctcgccggcaacgctgccaagg

SEQ ID NO: 48843 - DNA, 232 bp, Zea mays
caagggggagggcatccgctgcatcatccgcatggagaactagatttcgctgtctagtttgtgatctggcctgggcttggggttaataaaagaggcaatgctagcctgccctttcgatgaggaggtacatacacgctggcgatggaccgcgcttgtgtgtcgcgttcagtttggcttttgccaagcagtagggtagcttcccgtgtcggtaattatatggtatgaaccatca

SEQ ID NO: 48844 - DNA, 294 bp, Zea mays
caagaagttcgagccgaaataccgcctcatcaggaatggtcttgctactaaggttgagaagtcccgcaatcaaatgaaagagcggaagaacagggccaagaagatccgcggtgtcaagaagaccaaagctggtgacgccaagaagaagtaaacgttcgtttacatttgtattactgttctgggctctgggtggtctagctgcaatgtcataattatggtcgtgttaggttttgttccacccttggcactgaagtgattttttgtaattcctcggcactgaagtgaattttgtca

SEQ ID NO: 48845 - DNA, 204 bp, Zea mays
tcgggatcaaggagccagagagcgggacgcagcgagcgttccgccggagatcgacaccgtagctaaggtttcatgcgccgagctgcggtggacgagatgtcgacgccggcgaggaagcagctcatgcaggacttcaggcgcctgcagcaggacccgcccgccgggatcagcggcgcgccgcacgacaacaacatcatgctctgg

SEQ ID NO: 48846 - DNA, 246 bp, Zea mays
ctccagtttcattctttattgacattatccagcttgctacgttgcatgttaccatccttcactggttaatctcatcgttatattcaagacaaattcagacagtagcatcattgtggcgtcttttcagagggcgcaaatggaatcctcttaggcagaggttagatagttatgactacacagttgaacagcacgtggttggttccctgttgtttacaccaatcctacttcttatacctacaacttctg

SEQ ID NO: 48847 - DNA, 153 bp, Zea mays
agctcttgcgcaggtaaagaagacagttaggtcaagctacaggcacaattttcacaaatgcgtcctgttgcaatggcgccttcagtaggtcctcgcatgcccatgtttccacctggtgtccctggagttggtcagcagctgttctatggtcag

SEQ ID NO: 48848 - DNA, 263 bp, Zea mays
tgtaaattggggcaagcaattacgccttctggttgtagacataggtgaggccgcacttgctttatccgccaacctatcaagcattcagatgttggttactcaaattgtatctcatttagatctgtctgaggttgaaacttaaatggagcagtagtatctatcatattggtacccctgttactgagtataattttgttttcatatccatccttacagacgattgcagaaaataaataaaatgggtatgcgcgtgaaacttaaat

SEQ ID NO: 48849 - DNA, 249 bp, Zea mays
gtcaactgttggcgcacaagcaacagcaaaattgtttgctgccacttctcttcagatggcaagattttggctagtgtaggacatgaaaagaaggctgtactttggaacatggaaaattttcagacacagtatacaccagaagagcatgcccttattatcactgatgtccgtttcaggcctaactctagtcagctggcaacatcttcttttgatagaactattaaattatggaatgctgccgatcctgga

SEQ ID NO: 48850 - DNA, 331 bp, Zea mays
taacagtcgaagagaagtcctaccataagtcatgcttcaaatgctcccacgggggctgcgcgattacaccttccaactatgcagccttggagggcatcctctactgcaaacaccatttctcccaacttttcaaggagaagggaagctacaaccacttgatcaagtgcgcgtccgtcaagcgcgctgctgaagcacagccagaacaaccggcctctgattcctcctcctgaccacgccatttaaacagtgggggtttggaggcgagagagttgggaagcctcctgtttctacttaaaaccgcgtgatgtatgttattccatctatgccccga

SEQ ID NO: 48851 - DNA, 322 bp, Zea mays
atcaggccaaaaggacggagaccagcttaggcgaaacgcagacgtagtggagatcctgaggaagaccaggttcccgcacgttcacggagcaggtgaagagaagtcaccggagacgatcctggatcacgatcgtgttatttggcttggggacctgaactaccggatcgcgctttcctaccgctcggtgaaggctttggttgagatgcacaactggaagcagttgctggaaaaggaccagcttcgcatagagcaaaggtttggccgggtcttcgcgggctggagagaagggaggatctacttcccgctcacctacaagtactcg

SEQ ID NO: 48852 - DNA, 257 bp, Zea mays
atcactggtgagagcaagaaggcagtggagaactcccccttccttgagaagctgaagaagaggggctatgaggttctgtacatggttgatgccattgacgagtatgctgttggtcagctcaaggagtttgagggcaagaagcttgtacttgccaccaagaagggtctaaacttgatgagactgaggacgagaagaagaggaagaaggaactgaaggagaaatttaaggggctgtgcaaggtcatcaaggaggttctg

SEQ ID NO: 48853 - DNA, 320 bp, Zea mays
gagagacgcacatctatctgtcaagcgacgccgcggcctcgatcagagtcggaggcgaacacccccatggcggcggctggcggcggcgcaggagggaaggtatccttcaagatcatcctcacctccgaccccaagctccctttcaaagtgttcagcgtgcccgaagcggcgccctttaccgcggtgctcaagtacgccgcggaggagttcaaggtcccgccccagaccagcgccatcatcaccaacgatggaattggcatcaacccccagcaaagtgcaggcaacgtgtttctgaaacatggttcggagctgcgtctcat

SEQ ID NO: 48854 - DNA, 319 bp, Zea mays
gattttagccgccgccgctgctcatctcacatccctcgagaagacgcctgctcctcgccgatcgatacgatggccgtcttctccgacctccacaccgccgacggcctcaagtccctcgaggctcacctcgccggcaaaacctatgtgtctggtgactccattactaaggatgacattaaggtcttcgccgcggtgccgtcgaagcctggcgctgagtttcctaatgccgcccgctggtacgagaccgtctctgcggctgtagcactcaagattccctggtaagctgttggtgtaaatctgcctgcaggatcagctcctg

SEQ ID NO: 48855 - DNA, 309 bp, Zea mays
gtccaacaccagccgccgccatgtcgaagcgaggcaggggaggttcggcggggaacaagttccgcatgtcgctgggtctgccggttgccgcgacggtgaactgcgcggacaacacgggcgccaagaacctctacatcatctccgtcaagggcatcaagggccgcctcaaccgcctcccgtccgcctgcgttggcgacatggtcatggccaccgtcaagaaggggaagcccgacctcaggaagaaggtgatgcccgccgtcatcgtccgccagcgcagccgtggcgccgcaagacggtgtctacatgtac

SEQ ID NO: 48856 - DNA, 282 bp, Zea mays
ccatccgcacctctctccatctccctgctcctccgccttcttcttgatccagccaagccagggatcgccatgtcggactcggaggagcaccacttcgaatcgaaggccgacgccggagcgtccaagacctacccgcagcaggctggcaccgtccgtaagaacggcttcatcgtcatcaagaaccgcccctgcaaggttgtggaggtttctacctcaaagactggtaagcatggtcatgccaaaggccactttgttgccatagatatattcaacgggaaaaag

SEQ ID NO: 48857 - DNA, 301 bp, Zea mays
ctctcagcggcgacgctcggggttcctaccctgcactctccggacccacgccgtcggcaagagccgggcaagagcccgatccagaccccgcgagcaatccttgatatacctgatggctatgattgatgagcctctgtacccaattgctgtactgattgatgagcttaagaatgaggacatccagttgcgtctaaactccattagaagactttcgcccattgcacgggctcttggagaagaaagaaccaggaaggagctgattccctttcttagtgaaacaatgacgatgaagatgaggtgc

SEQ ID NO: 48858 - DNA, 312 bp, Zea mays
ctgtaccgcggtctgtctcttgcttcaacagtgtttggacggaacagatccggggactctcttccagcctccggaacgccactccgaatttacttcttccggttggaaaccttcggggacaatttcttgggcaatttctggctcctgggacttgcaagcaccgtttttgtggttagctccttcttgccaaccaaccatgagctcccagattcgtcagatttattccaccgacgtggaggcagccgtcaacagcctggtcaatttgtacctgcaggcctcctacacctacctctctctgggcttctatttcga

SEQ ID NO: 48859 - DNA, 302 bp, Zea mays
cccagacccagcagctattgtggtcgtccctcagccgcgtcgcaccgcatcgcattctacgattcgaagctctctctgctcgcagccatggcgaagaattacccaaccgtgagcgccgagtacagcgaggccgtcgagaaggccaggcgcaagcaccgcgccctcatcgccgagaagagctgcgcgcccctcatgctccgcctcgcgtggcactccgcggggacgttcgacgtgtcgtcgaggaccggcggtcccttcggtactatgaagtgcccggcggaactggctcacggcgccaacgc

SEQ ID NO: 48860 - DNA, 300 bp, Zea mays
agcgccctcgcgccgccgacctcttcagcctcgcagcacaccgccgccagcccgagtgaccgctgcagcctagggtttccgtcggcgatggcgggtaaaggaaggaaaggtcctcttggcggcaagaacgacggccggccaaaaccaccgacaaggacaaggacaggaagaaggcccccgtgtcgcgctcctcccgcgccggcctccagttcccggtgggtcgcatccaccgccagctcaagtcgcgtgcctctgcgcacggccgcgtcggggccaccgccgccgtctattccgccgcca

SEQ ID NO: 48861 - DNA, 291 bp, Zea mays
atcctcaccgtcatgggcgtctccaagtccacctccaagtgcgccaccgtctgcatccagggcatcgcctggtccttcggaggaatgatcttcgcgctcgtctactgcaccgccggcatctccggaggacacatcaacccagctgtgactttcgggctgttcttagccaggaagctgtccctgactagggccctcttctacatcatcatgcaatgcctgggtgccatctgtggagctggagtggtgaagggcttccagcagggactttacatgggcaacggtggtggcgcc

SEQ ID NO: 48862 - DNA, 294 bp, Zea mays
cttcattgaagttggtacaatggtatctccaaccatttatgctcgacgctgcttatcatatctgatgaatgacatgccacaggaggcattgaatgatgcagtgcatgctctggtaatatctccgacatggtcaacagcattctatcttcaggcagcagcacttttatcacaaggcatggagaatgaagcccaagaagcactcagggatggttatagcctagagcaaagtagcagcggtggacattgagtgtgaacagatttgtagtcccccaaatgcacataatttcaggtgct

SEQ ID NO: 48863 - DNA, 276 bp, Zea mays
caatcgaggatggagtacgagcttgctgggccagaaatgtctctctttgaaccattgggcagagcggtagggaagcgatgaaggatggatccattaccaacccctgttgaccgtcatgccattggatgacacaaccaaacatcgtttgccagaaggtcgggcaaaaacatgccagtccgtggcgaggtggggcggggcatcgaccatccactcggggagcataacctggcgcgcgaaccaccgacgcgcttcggagccgcggagcctggaggcggc

SEQ ID NO: 48864 - DNA, 274 bp, Zea mays
ggagaaggcgtccagtggcgggagcaaggaggcaaagtcgcccaagaaggccgctaagtcccccaagaaggcatagactgactgtccggtgtgatctgatgtgtagccagaccttgtcttccagtatgcagtgatgcgtaggctgtagatgggacgaatgtgctggtgtgtgtatgtgtcctatcgacagcctacgcatcaccgcatactggtaacaaggtactgctgcaagttgccctttgctatttaaaatggaagaagaaatgcctggttt

SEQ ID NO: 48865 - DNA, 288 bp, Zea mays
gagagctgcttgagaagatgactcaaatggaggagagtatggcccaatataagcaacaagtacagcaacagatgcaacaaatgcaaaattggatgctacatcagatgtacggaggtgccggaactcagttcggcatgccgccttttcaacaaccccctatcatcacacatccggtgtctggacaatcatcggaccgctccactgcagcggcggatggatcacagggttctgcaacttctgtccaagaccaattgatggcatcgggtgtgataggagggcaaatgatgc

SEQ ID NO: 48866 - DNA, 290 bp, Zea mays
agcctgcagccctccatccacgaactcccgttctccatttccagccatggcggtgtcgatcgagctcaccaaggagtacggctacgtcgtgctggtgctggtggcctatgtcttcctcaacctttggatgggcttccaggtcggcaaggcccgcagaaagtacaaggtgttctaccccaccatgtacgccatcgagtcggagaacaaggacgccaagctcttcaactgcgtgcagagggggcaccagaactctctagagtggatgcccgttttcttcgtcatactgctgc

SEQ ID NO: 48867 - DNA, 318 bp, Zea mays
caaaaccctcgctcgctccccaccaccccgccgcgccgccgcctgtaccagctgcgtcaagatgagtcggcaccctgaggtgaagtgggctcagaggatcgacaaggtttacatcactgtacagttacctgacgcaaaggatgctaaggtcaatttggatccagatggtgtcttcacattctctggcattgctggtacaaacttgtatgaattgaaactagatctgaatgacaaagtaaacgttgaggctagcaaaataagtgtgggggtcaggtccatattctgtatcgtagaaaaagctgaagccaaatggtggaa

SEQ ID NO: 48868 - DNA, 308 bp, Zea mays
ccatccgatccccccttcgcaaccaaaaccccaactcgccccgcatcgatcgctttctattttgagtttttatcttctgtgaagattgtggctgaggatgtgcccgctgccgataaggcgcccgccgggaagaagccgaagcgacgaagcgggtccccgctggtaagtccgctgccaaggaatgcggcgatggcaagaggggcaagaagaagggcaagaagagcgtggagacctacaagatctacatcttcaaggtgctgaagcaggtgcacccggacattggcatctcctccaaggccatgtccatc

SEQ ID NO: 48869 - DNA, 311 bp, Zea mays
gttgagatgcaccacgaggcgcttcaggaggctcttccgggtgacaatgttggcttcaacgtgaagaacgtagctgtcaaggatctcaagcgtgggtttgtggcctccaactccaaggatgaccctgccaaggaggctgccagcttcacctcccaggtcatcatcatgaaccaccctgggcagattggcaacggctatgccccagtgctggactgccacacctcccacattgctgtcaagtttgctgagctcattaccaagatcgacaggcggtctggcaaggagcttgagaaggagccaaagttcctgaa

SEQ ID NO: 48870 - DNA, 305 bp, Zea mays
cctagttcgaacgcgccgccgtcaccgtcgtcgctcgcactctccgcacgcatcggagcgagagtaggggcgtgtcggcggtgaaagcgactgcgtcagccatggcggacgaggagcattcggagaggagagaggaggcctccgagcttgccccctatcgacccgaccaagaagaagaaaaagaagaaggttgtactccaagaaccttctgatgaagtggacaagcttgcagagaagacagaaacactggcagtcgcagaacccgctgaacttaacttcactggaatgaagaagtaaaagaagaa

SEQ ID NO: 48871 - DNA, 300 bp, Zea mays
gtgactgggcgtgtctggaagggaaccgctttcggtggcttcaagagccggacccaggtcccatggcttgttgacaagtacatgaaaaaggaaattaaggtggacgagtacattacgcacaacatgaacctggctgacatcaacgacgccttccacctgctgcacgaaggtggctgtctgcgttgtgtgctggcaatgcagatttgaaattcctaagctaagcagtttttgttttggaactagaactcctttttgcctcgttaggcctggacccgctgtataatgctatgttgtgttgga

SEQ ID NO: 48872 - DNA, 297 bp, Zea mays
gttggacttggccacccaattgagtacatctgccttgatctggaggcacctaatgtgtgcaagtactgtggtctccgttatgttcaagttcaccatcactaaattgggaagatactgccgtctaccgctgcagaagctgagttgaggagtttatgtgcacacacatttgttccacaatgttctgtagtgtactttgtactatgcttgcgggcaaaatattacctttgatgatcatcctcttctcgggcgatcgtttattaatcctgtcttagtatggttcatttttctacagatgaa

SEQ ID NO: 48873 - DNA, 300 bp, Zea mays
atcgcggcgtgttcaaatcccacaatcttcttgtagcacaccactgtcttcgtccaactcggcggcgatgtctgggcgctgcaagggcggcaaggggctgggcaagggtggtgcgaaacgccaccgtaaggatctccgcgacaacatccagggtatcacgaagccggcaatccggaggctggcgaggaggggcggcgtgaagcgtatctccgggcttatctacgaggagacccgcggcgtgctcaagatcttcctcgagaatgtcatccgcgacgcggtcacctacaccgagcacgctcg

SEQ ID NO: 48874 - DNA, 295 bp, Zea mays
gtcccacccggtgaagctggtgccgttcaacccggagtaccaggacgagtcggtgctgtggacggagagcggcgacgtgggacagggcttccgctgcgtccgcatggtcaacaacatctgcctcagcttcgacgccttccacggcgacaagggccacggcggcgtgcgcgaccggcaccaacatcgtgctctggaactggtgcgagggcgacaaccagcgctggaagatcgtcccctggtaaatgtgctgttctgtggctgcactggtcatcaccatgatctagagctttgaagg

SEQ ID NO: 48875 - DNA, 154 bp, Zea mays
ctcaggcgcaacgcaacaacacaaggcggcggttatagcctctactgctgcgacggctacgatggggacggggaaggtggtttgcgtcaccggcgcatcagggtacatcgcgtcctggattgtcaggctcctattcgaccgcggttaaaccgtc

SEQ ID NO: 48876 - DNA, 293 bp, Zea mays
atggtgtgcagataaagaaacccatagaggtatcagcaccaaaatatatggagtatctgatggattggattgaaggccagcttgacgatgaatccatatttcctcaaaaacttggcacaccattcccaccaaacttcaaggaagtagtgaagacaatattcaagcgcttgtttcgtgtttatgcccacatctaccactctcatttccagaagattgttagccttaaagaggaggcccatctcaatacctgtttcaagcacttcattctgtttacaaatgagtttggcctgatt

SEQ ID NO: 48877 - DNA, 304 bp, Zea mays
gttctatgagggtggtgcagcagccattttcccagatgcatgggaaccatttagagattttattcctgaggatgaaaggacttgtttcgtagatgcttataacaaaaggttaacttcctctgatcctattgttcaggttgaagctgctaagcgctggacgatgtgggagatgatgactgcgcaacttatccaaaacaatgataacattaaacgaggagaagatgatgaattttcactggcatttgcaaggattgaaaaccactactttgtgaataagggatttttaccctcggactcattccta

SEQ ID NO: 48878 - DNA, 185 bp, Zea mays
gttatattaccatgatgcttgctaggtactagatgggtggtattgcttatgaatgcgatgttgtcgtgacagaactgcatttcattttgtattatggttgttcaagatgttatattaccatgaggcgaggtagcttgactgattgttgctatattttatgctgcagttcaagtgatttatgtggt

SEQ ID NO: 48879 - DNA, 289 bp, Zea mays
gatcaatgagccgaagaggccttcagacaagcccctgcgtctccccctacaggatgtgtacaagatctggtggtattggaactgttcctgttgggcgtgttgagactggtatcatcaagcctggtatggttgttacctttggtcctagtggccttactactgaggtgaagtctgttgaaatgcaccatgaggctctccaggaggcccttcctggtgacaatgttggcttcaatgttaagaatgttgctgtgaaggatctgaagcgtgggtatgtggcctccaactccaa

SEQ ID NO: 48880 - DNA, 288 bp, Zea mays
cgccggcatgcttgtgatctgaacccaagtcgtgcctccgctccggtcacccgtcgctccacgcaaccatgtcgaggaggaagatcagggagcccaaggaggagaacgtcacccttggacccactgtccgtgaaggagagtatgtctttggtgctgctcacatctttgcatccttcaatgacaccttcattcatatcagtgatttgtctgggacggaaactctgagttcggatcaccggtggcatgaaggtcaaggctgaccgtgacgagtcgtcaccttacgctgct

SEQ ID NO: 48881 - DNA, 278 bp, Zea mays
tgaaggggttggaggtcagaaaggtgctggaggctcccgaggaggtcaagtgcgtgcccatgaagaatgtgctcgagcccggtgacatccccacgcttgctgagctcgggctcactgcgccaccagccatgtcacacgactcaaaacctgctgttggctctactctcattggtggtgagacagaagctctggagaggttgaagaagtttgctgcagaatgctctatgcagccaaacaaagtagacaaaagcaatacccaagatagcatatatggtgct

SEQ ID NO: 48882 - DNA, 315 bp, Zea mays
taaatgctattgttgctcaaagcctattgacatacctagatggagtggaacctttaagatagatggaaaggaccacatatcactggctggacatttgtcatccaaatcttgtgagaaagtgtggaaattgtcatcattgccgaaggtggttcaagtgacaaaggttcctagaatggcagtgtggcctaagatatttaaagcatcagaacccagtggtgacaatattggcctatatttcttccctcctgaaatgaggcacgatgaagaactagatcaactagttaatgaagtcatggataaagatttgatcttgcg

SEQ ID NO: 48883 - DNA, 299 bp, Zea mays
gtctctgatgacgagtggcttaatggtgaattcatcacaactgtccaacagcgtggtgctgcaatcattaaagcgataaagttctccagtgctctctcggctgctagctctgcttgtgaccacatacgtgattgggttcttggaacacctgagggtacatttgtttcatatggtgtgtactctgatggttcatacggtgttccttctggactcatttattcattcccagtaacatgcagtggtggtgaatggaaaatcgttcaaggcctcccgattgatgagttctcaaggaagaagat

SEQ ID NO: 48884 - DNA, 303 bp, Zea mays
caagaaaactagaaaagcctcctcccgaccgcaacgcccctcatctccctcgaccccgacatccccgacccgatggcgcccaaggcggagaagaagccagcggagaagaagccggcggccgaggagaaggcggagaagacgaccgcaggaagaagcccaaggccgagaagcggctgcccgcgtccaagtcctcaggcaaggagggcggcgagaagaaggggaagaagaaggccaagaagagcgtggagacctacaagatctacatcttcaaggtgctgaagcaggtgcaccccgacatcggca

SEQ ID NO: 48885 - DNA, 305 bp, Zea mays
cattcgtccaaactcgtgagcactttctcctcgtcccccacaagccactcgaagccgagatacggccatggactccaccagcaccggagcagcggggaagggaaagaaaggagcggccgggcgcaaggtcggcgggccaaggaagaagtcggtgtcgaggtccgtgaaggctgggctccagttccccgtcggccgcatcgggcgctacttgaagaagggccgctacgcgcagtggtacggcaccggcgcccccgtctacctcgccgctgtcctcgaatacctcgccgctgaggttctggagctcg

SEQ ID NO: 48886 - DNA, 232 bp, Zea mays
ggccgacgcgctgaccaacgccgtggcgcacgtggacgacatgcccaacgcgctgtccgccctgagcgacctgcacgcgcacaagcttcgggtggacccggtcaacttcaagctcctaagccactccctgctggtgaccctggccgcccacctccccgccgagttcacccctgcggtgcacgcctccctggacaagttcctggcttctgtgagcaccgtgctgacctccaat

SEQ ID NO: 48887 - DNA, 293 bp, Zea mays
ggattaacttcatcaaagtgttgacagaacacgaggatgcattcgacgtgctgtactgcatagcgttcgagatgatggacgcccagtggctagcaatgcgagcctcgtacatgcagttcaaagaggtgctggaggccacaaggcagcagctcgagagggagctctccctggaggatctcaatagcatccatgacctccctgcctgcaaccttttgtacaaatagtactaatggtagttagattactgtgatacagtcaaaaggaaatttgtatgatgatcaggttgcatgtaa

SEQ ID NO: 48888 - DNA, 292 bp, Zea mays
acactgatgaaaacagtggagctgggccgtcggtacttcccgaactgctcgcaggtgctggacaagttcctggaggaagatctgccggaaggtctggaccagttctacctccagaggggcacagccgatagtcagaaggtgaagaggatgcgcttctgcgagctgaaagaggacgtgctgaaggcgtttagcaaggacaaggcggacggcagcgtgttctcgggcctgtcctcgtcgtcgtcgtgctcgccgccccagaagtatgcccagaggtgatcaaggcaccagtttt

SEQ ID NO: 48889 - DNA, 292 bp, Zea mays
agaatagatgctgttgatgcaagcactgtgaagcgtgttgcaaaccgcttcatcttggatcggtcccatcgcagcaatagcaacatcctgatcaaaaatgaagctattgctgcgatgggaccgatccaaggacttccagaccacaactggttcagacgccggaactacatgctccgttactaagatcaatctgccggtgtaccatgtttacggtgtgcaaggacaaagataaaatttgcctctttcggcgtcagtatatcaaggcctcagcactgcacatcgcttgctgcga

SEQ ID NO: 48890 - DNA, 236 bp, Zea mays
agcggtctcctccgcccgttgccttcgtcccctccatctccggctgcgtcgccggcgagcccgacaccgcgaatctgatccgccgacaaggcgcgagggaacagatggggcttacgttcaccaagccgttcagccggctgttcgccatgaaggagatgcggatcctgatggtgggactcgacgccgccggaaagaccaccatcctctacaagctgaagctatgcgatatcgtcacc

SEQ ID NO: 48891 - DNA, 309 bp, Zea mays
agaatacgatacgccgctcgcctgaatcgagaccaccaccgctcccgctctgcctcacctcgccgactagcgtttttgccgccgcggatctcgccgtccccgccatggagacgtcgggctcctccgcagccgccggcgacgccccgaccaccggggagcaccggatggggaccaccattgtcggggtctgctacgagggtggcgtcgtcctcggcgctgattccagaaccagcactggaatgtatgtagccaaccgtgcttcagacaagattacccaattgacagacaatgtgtacgtttgtcgctctg

SEQ ID NO: 48892 - DNA, 309 bp, Zea mays
ggccaatccgaaatctcgagctttcgcgccggcgaccacagcaaagaggaggccacagcacgacagcgccccagggttcctactctcgtcgcagcggcagcagtgaggggaagatgtcgtcggtgttcagcggcgatgagaccgcccccttcttcggcttccttggcgccgccgccgctctcgttttctcatgcatgggggcggcgtacgggacggccaagagtggcgtcggcgtggcgtccatgggtgtcatgcgcccagagctcgtcatgaagtccatcgtgcacgtggtcatggctggtgtgctcg

SEQ ID NO: 48893 - DNA, 314 bp, Zea mays
atgggaatgtaattcccagcattaaagctctaaccttctataaatccagtacatttgaagttgatgttttgtatgtggacacatgcgactcgcaaattccacagaagataagcactcacacaattggacctttccaaccctccaaaggtgagagggccaaactgaaagttaaagtgcgtctcaacatccacgggattgtcacagttgattcagctatgatgctggaggaggataaggcagttccagtctcatctgctaatgaagctccaaaggatactacaaagatggacacagatgatgcaccaagtgatcct

SEQ ID NO: 48894 - DNA, 301 bp, Zea mays
acgggcttcttctcggccttgggcgccatcagtcttgggttgggaggggggaaggagccggcagaggaggagaccgcggcggagaagacgatcgccgggaagaagcccaaggcggagaagcggatccccgctggcaagtccgccggcaaggagggcggcgagggcaagcgtggcaagaagaagggcaagaagaacgtggagacgtacaagatctacatcttcaaggtgctgaagcaggtgcacccggacatcggcatctcctccaaggccatgtcgatcatgaactccttcatcaacgaca

SEQ ID NO: 48895 - DNA, 296 bp, Zea mays
acttggcgtccgcctcatcccgccgccaggagaaccggctcggtcggttcgtcgaagatcccggatctgctctaccacgaggtctttcggcggagtattgtctcgcgaggagtagcgagccaaggtctggtcgcctgttcaggagagtttcgagaagctgaaatggctcctaaagctgctcctgccaagaagggtgatgccaagacccaggccttgaaggttgccaaggctgtgaagtctgggtcagtaaagaagaccaagaagatccgcacgtccgtgacatttcaccgcccaag

SEQ ID NO: 48896 - DNA, 281 bp, Zea mays
ccgatctccgatcccctcgtcgatccaacatgcagatcttcgtcaagaccctcactggaaagactatcaccctcgaggtggagtcttctgacaccattgacaacgtcaaggccaagatccaggacaaggagggcattcccccggaccagcagcggctcatctacgctggcaagcagctcgaggacgggcgcacactagccgactactacatccagaaggagagcacactccaacttgtgcatccgctcatgggtggtatgtagatcttcgtgaagacactc

SEQ ID NO: 48897 - DNA, 297 bp, Zea mays
agctggcccaaaaccgccacgccagccagaacccaactcaaggggttcgaagatgccacctccgaaggatgaggatgacagcggaggcgaggaagaggaggaagaggaagatcacgaaaacacgctgtgtggttcttgtggtgacaactacggacaggatgagttctggatatgctgtgatgcgtgcgagacttggttgcatggcaagtgtgtcaagatcactcctgctaaggcgcgacacatcaagcactacaagtgtccgactgcagcggtagtggcaagagagcccgacatgat

SEQ ID NO: 48898 - DNA, 313 bp, Zea mays
gcagatcatcagcatcggtatgattgttacctctgcattaatcatatggaagggtttgatagttttcacggggagcgagtcaccagttgtagtggtgctctcgggtagcatggagcctggatttaaaaggggtgatatcctgtttttgcatatgagcaaagatcctattcgcacaggagaaatagttgttttcaatatcgatggtcgtgagattccaattgtccaccgagtgattaaggtccatgaacgtcaggacactgcagaagtggacatcctcaccaaaggtgacaataattttggggatgaccgacta

SEQ ID NO: 48899 - DNA, 289 bp, Zea mays
agccgccgccgctgctcatctcacatccctcgagaagacgcctgctcctcgccgatcgatacgatggccgtcttctccgacctcaacaccgccgacggcctcaagtccctcgaggctcacctcgccggcaaaacctatgtgtctggtgactccattactaaggatgacattaaggtcttcgccgcggtgccgtcgaagcctggcgctgagtttcctaatgccgcccgctggtacgagaccgtctctgcggctgtagcctcaagattccctggtaaggctgttggtgtaa

SEQ ID NO: 48900 - DNA, 293 bp, Zea mays
tgacagatacagatcgcgcgctgagatgtcgtcggactcctcgtcgtgggcgacgcgcctggtgcagatctcgccctacaccttctccgccatcggcatcgctgtctccatcggcgtctcggtcactcggcgcggcatggggtatcttcatcacggggagcagcctcatcggggctgccatcaaggcgcccaggatcacatctaagaacctcatcagtgtcatcttctgtgaggctgttgcaatttatggtgtaattgtggcaatcatcctccagacaaagcttgaaagtgtg

SEQ ID NO: 48901 - DNA, 295 bp, Zea mays
cgtactcgtgcgcctcgcttcgcttttcctccgcaaccatgtctgacaaacccgatatggctgagatcgagaaattcgataagtcgtaactgaagaagacagagacgcaagagaaaaatccactgccttccaaagaaacgattgaacaggagaagcaagcaggcgaatcgtaatgaggcgtgcgccgccaatatgcactgtacattccacaagcattgccttcttattttacttcttttagctgtttaactttgtaagatgcaaagaggttggatcaagtttaaatgactgtgct

SEQ ID NO: 48902 - DNA, 294 bp, Zea mays
gaagcctataggcacatgaaatttgaaggaggtgttcacagagtacaaagagtgccaaagacagaaaagcaaggccgggtccatactagcaccatgactgtagcaatattaccccagcctactgagattaatctggtgattaatccgaaagatttgagaattgacactaagcgagccagtggagctggggggcagcatgtaaataccacggacagtgctgtccggatagttcatcttccaacaggtgttgtttctgaatgtcaacaagagagatctcagctgagaaataaagag

SEQ ID NO: 48903 - DNA, 298 bp, Zea mays
cggcagtcctgtccagtggtgcagctgcctgccttcagccttccctctctttcgcgacccccccggagccggagcagagatcgccagctctaccggcgcggaggcatggcgggggccggagacaaggtggactacgtcttcaaggtggtgctgatcggagactcggcggtgggcaagtcgcagatcctcgcccgcttcgcccgcaacgagttcagcctcgactccaaggccaccatcggcgtcgagttccagacccgcaccctcgtcatcgaccacaggagcgtcaaggcccagatct

SEQ ID NO: 48904 - DNA, 297 bp, Zea mays
atcaatcgcgaatattttgcagaagagcatgataggagggccagagctggcatagactatgattcatcctatgggaaggctcgtccaaatgatacaattctgaagctacagaggacagcaccatattacaagaggaacagagctcatgtttgcagtttctttgtgcgaggtgaatgtacaagaggagctgagtgcccttatcgtcatgagatgcctgaaactggggagttatctcagcagaacattaaagatcgctactatggagttaatgatccagttgcactgaaacttttgagc

SEQ ID NO: 48905 - DNA, 295 bp, Zea mays
agaaccgtagccagacatgggactggaggacgagcaaaagatgcttaccgaatccggagatcctgaggaggaggaagaggaagaggaggaattagtggatcccctaacaacagtgagagagcaatgcgagcagttggagaaatgtgtaaaggcccgggagcggctagagctctgtgatgagcgtgtatcctctcgatcacatacagaagaggattgcacggaggagctctttgacttcttgcatgcgagggaccattgcgtggcccacaaactctttaacaacttgaaataaatg

SEQ ID NO: 48906 - DNA, 293 bp, Zea mays
agatctcctccaaagtctacggcagctggaacttcaccgagcaggccctccccgacgacctcatcaagcgaggcatggccgttccagatccgtcgagcccctacaaggtgcggctgctgatcgaggactacccgtacgcctcggacgggctggccgtgtggcacgccatcgagcagtgggtgacggagtacctggccatctactaccccaacgacggcgtgctgcaggccgacgtggagctgcaggcgtggtggaaggaggcgcgcgaggtcgggcacgccgacctcaaggac

SEQ ID NO: 48907 - DNA, 289 bp, Zea mays
atgaagtccactatcctagggaaatatcactacatactttacattattgtcctggcaatgcagcccaggatgcttttaactgtcgatgaggatctgaagcccctctcagtacctgtccgcgttgggcaagctgtggacgtggttggtcaggcaggaaggcctaagacaattaccggctttcagacacactccacaccagtcttgcttgcagcaggggagagagctgaactagcaactgaaaaatacatcccactgactccggtattagagggctttgtgattttgaaga

SEQ ID NO: 48908 - DNA, 288 bp, Zea mays
agtaagtccaagaagggtcagtatgaagggccagatatggacttagctgcaatgcttgaaagggatgttctggattctactccaggagtaagatgggatgatgttgccggacttagtgaggccaaacgactcctcgaggaagcagttgtgcttcctctctggatgcctgaatattttcagggtattcgtcgaccttggaaaggagttcttatgtttggtccaccaggcacgggaaagactcttttggcaaaggcagtggccaccgaatgtggaacaacattctttaat

SEQ ID NO: 48909 - DNA, 292 bp, Zea mays
tcagagagagagagagagacgggagacccattaccaatgccaagaacaagaaaccagagaggacagccgcgaatacaatccgaatcccctccaaaaacccaccataccgtctcccccatctgcaagaacaagatcaggagagcatcctagggggaagaaacaggagggggacaaagaagcccagaaagaccaactgaccacacaaaaaggtggcatctttgtgtcaccgaggcaccgccgatcacagaccaaagcccgctcctctggtccatcccaagcgtacagcagccga

SEQ ID NO: 48910 - DNA, 292 bp, Zea mays
ccgctgcagtgtccatagccaccgcagagactgagatggggggttttgtcaagacccacaagagcaatgcatacttcaagcgtttccaggtgaagttcaagagaaggcgcgctggcaagacagactacagggccaggataaggctgattaaccaagacaaaaacaagtacaatacacccaaatacagatttgttgtgcgatttaccaacaaggacatcacagcacaaatcatatctgctagtatagcaggtgatatggttcttgcttctgcttactcgcatgagttgccacg

SEQ ID NO: 48911 - DNA, 292 bp, Zea mays
ctcaagaaaatgactggcttcaatgccttttggtttacgcaccacctatttgttattgtgtatgcactgctcgttgtccatgggatctgcttatatctaagcaggaaatggtataagaaaacgacctggatgtaccttgctgtccctgtgctcttgtatgtaagtgagcgcattcttcggctatttaggagccatgacgctgttaggattcagaaggttgcagtgtatccggggaatgttttggctctctatatgtctaagccacctggattcaggtaccggagtgggcagt

SEQ ID NO: 48912 - DNA, 286 bp, Zea mays
  unsure (1)..(286): unsure at all n locations
acgattcgaaccatccagtctccgtgtccagtcgagtctcagcaaggaagatgtaggggaaaggaaagaagncgttcggcggtggcggcagcggtgagcccgcggccaagcgccaggccgcgagggacgatggcccctccgaatccgctgaagacggtaccgtcgtagccgagatatcgaagaacaagaaggtgtccgttaggagctggaaaggcagggtcttcgtcgacttacgcgagttctacttcaaggacggcaagactctccccacccgcaaaggtatatc

SEQ ID NO: 48913 - DNA, 280 bp, Zea mays
cgcctacaaggaggaggctgccggcgcctttgatagtgacatgtcacgctcacggggctacgccggcttcggcagcggcgtgcgcccgtaccaaccgccccggttggaagtctggagactggatctgcaccaggtccggttgcaacgagcacaacttcgctagcaggatggaatgtttcaggtgcaacgcgccacgggactccggtagcgctgccacgacgacctacgaaaactacttgcactgaggtgtaggtagagcaaagtttacagctatagcgcg

SEQ ID NO: 48914 - DNA, 290 bp, Zea mays
cgaccagctgatattgatagttttgttcatcatttatccgataatcacgtatttccaaacaaagttttggtggactgcacagcagatacaagtgttgcatcccactattataattggttaaagaagggtattcatgtcatcacaccaaataagaaagcaaattctgggccacttgatcagtacctgaaattgcggactctgcaacgtgcctcgtacactcattacttttatgaagcaactgttggtgctggcctcccaatcattagtaccttgcgaggtcttctggagac

SEQ ID NO: 48915 - DNA, 166 bp, Zea mays
ctcgagccagctcgtgaggccacccgtcttgttgaggcccctaagaccgacctggacttctggaaagttcttttcccggttgctgtggcgcatacaattggccatgttgctgctacagtgagcatgtctaaggtggcagtgtcattcacacacataattaaaagcg

SEQ ID NO: 48916 - DNA, 318 bp, Zea mays
caatggaatgttgcggaccaggaggctgacagaggaactacgtgtccctttcgaacggttcggccctgttcgggatgtttacctgccaagagattatcacactggggagccaagaggatttgggttcgtggagttcgttgatgcttatgacgcttctgaggcacagtaccacatgaatcgccagatgtttgctgggcgtgaaataactgttgtacttgctgcggatacacggaaaaggcctgaggacatgcgtagacgaactggaccaagaggttattctggtcatgaagggcgtcgtccgaatcgtcatggtgcagg

SEQ ID NO: 48917 - DNA, 319 bp, Zea mays
gcaactcactcacggtcttggagatccgtccgtcccgggatcatttggcgcggaggatctggcctgggaaaatggcaaacatacgtgcacttctggtcggcttatcgcgggcaaggggatccttagcagaggctggacgatgtgcttccacgaggccatcaattctagcatctctgggcgcacattacaagatccccatgccagcccgctggttctcatctacagggcttcctccacatctggtggtcggaatgccagcactatctcctactatgaatcaaggtaacatcgcgaaatggagaaaacaggaaggggacaa

SEQ ID NO: 48918 - DNA, 309 bp, Zea mays
aaccagcaagccaatcatcagatggtctgcctgacatccgtcctgctttcagacatgaaatgagaacaatggtgaaagaacagcagaagagtagtcgcagatatggtgtgatcaagtgtgatccactggtccggcaaggcttggatagaacagcaaagcacatggtcattccgtacatgcctatgttgattcccccaatctgttggacaggatatgacaaaggagcacacctctttttaccatcatatgtaatgcgcacccatggtgctcggcaacagagggacgctgttaaaagagctccaagggaac

SEQ ID NO: 48919 - DNA, 184 bp, Zea mays
atccatttcggcatttccaacgccttcgccctaccagccacgtcgtttcgaggccgatcgaccgagcagcagcagctggtggcaatggcggcggcggcggaggtcgtgctgctggacttctgggtgagccccttcgggcagcgctgccggatcgcgctggcggagaagggcgtggcctacgagt

SEQ ID NO: 48920 - DNA, 185 bp, Zea mays
acctgaacggcggcggcgagctgttcaggcacaggtatcccaagctcagagttcgcctcgtcgacggaagtggcctagcgactgctgtggtgctcaggagcatccctcgtgacgcgaacaggttctcctccacgcgggcccttctaagatagcgtgcgccacggccgctgcgttgtgcgagaggg

SEQ ID NO: 48921 - DNA, 316 bp, Zea mays
acaccagctgatattgatagttttgttcatcatttatccgataatcacgtatttccaaacaaagttttggtggactgcacagcagatacaagtgttgcatcccactattataattggttaaagaagggtattcatgtcatcacaccaaataagaaagcaaattctgggccacttgatcagtacctgaaattgcggactctgcaacgtgcctcgtacactcattacttttatgaagcaactgttggtgctggcctcccaatcattagtaccttgcgaggtcttctggagacgggtgacaagatactgcgtattgagg

SEQ ID NO: 48922 - DNA, 182 bp, Zea mays
atcatctgaaagagatatttgggaactttggtgaagtggtgaatgtggagctatcaatggaccgaatggttaaccttcctcgtggctatggatatattgaattcaagaagagagctgatgctgagaaggctctactttacatggatggtggtcaaattgatggaaatgttgttaagttgagg

SEQ ID NO: 48923 - DNA, 314 bp, Zea mays
atccgaaagcttgtttggtgcaatgtggtttatgccatggaacatctggtgattttagaaagactgtgaagggtcaatgggttcatgctttctgtgctgagtggctgttggagacaacattcagaagagggcaacataatccagtcgacggaatggagaggcttcatcacaaggataaagatacatgctctatatgccaccgctgtgttggtgcatgcttgaagtgctgtacattagattgtcaagttacttttcatccttcatgtgctagagatgctggtctttacatgaatacaaaaagattgggtaatatg

SEQ ID NO: 48924 - DNA, 313 bp, Zea mays
aacttccgaagctggcggacgtggacctgttcctccggatcatctgcgccaaggccaagggcgtcacaagcggtgggacagcctcttcaacgagctgctgtccgagtacgcgctctccggcggcaagcagggcgaccacaactctgaagacttcgtgcacctcttgctgtcgctgcagaaagactacggtctcaccacggataacatcaagggcatacttgtgaacatgttcgaagcagccatcgagacatcattcctggtgctggagtactccatgagcgagctgatgaacaaccgccacgtcctggccaag

SEQ ID NO: 48925 - DNA, 229 bp, Zea mays
acgagctccgaatgccgcagcatcaggcgcggcccccctcgcgtgtaaccgacgatggcgacgccgaatcaggggaccgttgattaccccagcttcaagctcgtcatcgtcggcgatggtggaactggtaaaactacatttgtgaagaggcatctcactggagagtttgagaagaaatatgaaccaaccattggtgtggaagttcatccgttggatttcaccactaact

SEQ ID NO: 48926 - DNA, 214 bp, Zea mays
gtcaagtcaaataacatacttcttgactccaacttcgaagctcatgtggccgactttggtcttgcgaaattcttgcaggactcaggggcatctgaatgcatgtcagccatagctggctcatatggctacatagcgccagaatacgcatacacactgaaggtcgatgagaagagcgacgtctatagcttcggcgtcgtgctacttgagctcgtca

SEQ ID NO: 48927 - DNA, 309 bp, Zea mays
gccagaagttcccaatcatgccttttactgctagggcattagaagagaagcgtgcgcgtttaggcttggtggaatgcatgaaccatgaactattgcagccgtaccctgtacttcatgagaagccaggcgatcttgttgcacacataaagttcactgtgctgctgatgcccaatggatcagataagataacatcacatcctctacaggagttaaagcccaccaaatccattgaagacaatgcagagataaaggcatggcttgctttggggacgaaatcaaagaagaagggtggtgggaagaagaagaaag

SEQ ID NO: 48928 - DNA, 310 bp, Zea mays
atcctctcgcatccgcagcttccccagccagctagggtttgcagatgacgaccgcggcgcgccccacctgggcgccggccaagggcggcaacgagcaggggggcacccgcatcttcggcccctcccagaagttctcctcccgcgacctcgccgcgcacacctccctcaagccaagaaaagacggtcaacagacccaagaggagttacagaagaggaatctcagggaggaacttgaggaacgtgagcgcaacactactcttccaaggataagtcctatgccgaagaaagagaccggcggaaaagctctagc

SEQ ID NO: 48929 - DNA, 127 bp, Zea mays
tacgcgaactccttcgtgcgcaggaggaggttaagcggatccagtctgtaccgctagtcattggccagtttatggagatggtcgacggcaacaacggcatcgtgggctctaccactggcagcaacta

SEQ ID NO: 48930 - DNA, 296 bp, Zea mays
agtgtgcaggcccgtcgtgcacaaacccgtacaagtaccgcgactccaagacgctgctccctctctgcagcctggcgtgctacaaggctgtccagggccgccctcctgaccagcgaaccgacgctgcccaggggagtggaggtggccaggaaagcgctgggaagcaagcatgatgaatctagctacctgacgcgattgaaccgtgaccgtcagttggctggagaagtgtatgttaacatgtccagctcgctggtgtgtggtttctttggcggtatctacaaccacctgacaaagat

SEQ ID NO: 48931 - DNA, 309 bp, Zea mays
gcggagtctagactcgagagcaacctcgacctcccggatctctctcccacccacgcctcgtcggcgccgtcgtctgctgcagcgatggcctcccccgacctgctcttcaatctgcggaacctcttctacctgggcgcctaccaggcagccatcaacaacagcgacgtcccgggcctcgacgccgacgccgccgctgagcgcgacgccatcgtcttccgctcctacatcgccctcggctcctaccagctggtgatcagcgagatcgactcgtcggccgctacctcgctgcaggccgtgaagctgctcgcg

SEQ ID NO: 48932 - DNA, 133 bp, Zea mays
cgaggcctgctgggaacgggacttctaaaaggaactatgtctggaaggctgtggtccaaggccatttttgctggctataagcggggtctccggaaccaaagggagcacacagctcttcttaaaattgaaggtg

SEQ ID NO: 48933 - DNA, 249 bp, Zea mays
tatcaaggcaggtgctgatattgttagtgtccactgtgaacagacatcgaccatccatttgcaccgaacagtcaatcagattaaaagtctaggagcaaaggcaggagttgttttgaatccagcgactccactcactgcaattgattatgttcttgatgttgtcgccctggtgctgattatgtctgtaaatcctgggtttggtggccagagctttatcgagagtcaagtaaagaaaattgcagaactgag

SEQ ID NO: 48934 - DNA, 238 bp, Zea mays
cttcttcccgcggtctgctcgttcgatctgtgcagcagatctgcggtcccgggcgaccgtgaagcagcttcaatcgtcggcatggcgctcgtattgcatagtggggctggaaacaagaatgccttcaaagcacttattgctgcagaatacagtgggatcaaggttgagttgaccaaggattttaagatgggtgtctccaacaagacccctgagtttcttaagatgaccccccttggaa

SEQ ID NO: 48935 - DNA, 211 bp, Zea mays
agcaaacaaacagggtagaggtagagggagaggagaggagaggagaggagaggagaggttgggtctgggacaccatggctccgatgaagctgtacggggcggtgatgtcgtggaacgtgacgaggtgcgcaacggcgctggaggaggctggctccgactacgagatcgtgcccatcaacttcgccaccgccgagcacaagagccccgagca

SEQ ID NO: 48936 - DNA, 208 bp, Zea mays
ggctcgagtaaagctcctccattgcgccgccgccactctcctttacgaggaggcggaccaggtaagcagcagcaggaaccctagcaccgccgcatccgcagccatgggtatcgacctcgttgccggtgggaggaacaagaagaccaagcgcacagcgccgaagtccgacgatgtttatctcaagctccttgtcaagctctacggtttc

SEQ ID NO: 48937 - DNA, 300 bp, Zea mays
cttagaagttttgaactatttgggtgcactagatgatgaaggtaatctgacacagttaggtgagatgatgagcgagtttcccctggatccacaaatgtcgaagatgctcgtcatcagtccaaaatacaactgttcgaatgaacatcttatcagtatctgccatgctgtcagcacccaattgcttcctccggcctagggatgctcaaaaggctgctgatgaggcgaaggcgcgatttggacacattgacggggaccatctgacgcttcgaatgtatacctcgctacaaacaaaacaatgaa

SEQ ID NO: 48938 - DNA, 127 bp, Zea mays
caagaaggggatgccagcggcaagtcaaagcaaagcaggagtgagaagaagagccgcaaagccatgctgaagcttggcatgaagcccatcactggtgtcagccgtgtcactgtgaagaaaagcaaga

SEQ ID NO: 48939 - DNA, 312 bp, Zea mays
acaatcttgaacctgacaaagtcatcatgtttgtcgagaacagacctttcaatgaccagaggtatttcttggacgatgagaagctcaagagccttggatgggctgagcgcaccccatgggaagaaggcttaaaaaaggcaatggagtggtatgtagcaaaatctgattattggggtgatgtttctggggccttactgcctcatccaaggacattgatgatgccagggtgcgagggctcagaggagattaagagaatactcagccggtttaataacattcaaacaaaggtcggttcacatcagtaatgctccg

SEQ ID NO: 48940 - DNA, 310 bp, Zea mays
aaagcacccgtcctgtcccctcgcaaaaccctagctccagccaccatgaagggcaaggctgacacctccaagaaggacgagggcaggctccgggcgggcggcgcgccggaaagcgcaagaaggccgccgcgagcggcaagcccaagcgcccgccctccgccttcttcgtcttcatgtctgaattcaggcaggagtatcaggcgctgcaccctggcaacaagagcgttgcgaccgtgagcaaggcagcaggggaaaagtggcgtgctatgtcagatcaagagaagcaaccatatgtggaccaagctgggca

SEQ ID NO: 48941 - DNA, 277 bp, Zea mays
agggcaggatgtcgcaccgtaagttcgagcacccgaggcacggctccctcggcttccttcccaggaagcgctcctcccgtcaccgcggcaaggtgaagtcattccctagggatgaccccaagaagccttgccatctcactgccttccttggctacaaggctggcatgactcacattgtccgtgaggttgagaagccaggatccaaactccataagaaggaaacttgtgaggctgtaaccatcattgaaacccctcctcttgccatggttgggctcgt

SEQ ID NO: 48942 - DNA, 308 bp, Zea mays
agcgcggtggagacgctgtgcgggcaggcgtacggcgcgcacaagcaccgcatgctgggggtgtacctgcagcgctcgacggtgctgctcatggccaccgccgtaccgctgaccgtcgtctacgccttctcggagcgcatcctggtcctcctcggcgagtcggagcgcatctccagggccgccgccgtcttcgtctacgggctcatcccgcagatcttcgcgtacgcgccaacttccccatccagaagttcctgcaggcgcagagcatcgtggcgcccagcgcttacatctccgtggccacgctggcg

SEQ ID NO: 48943 - DNA, 287 bp, Zea mays
agtttccgcgcgcgagatcgccgccccgggtgggctctagatcccgatggcctcgcgccgccgcaccctgctcaaggtcatcatcctcggcgacacggggttgggaagacgtctttgatcaaccaatatgtgaacaagaagttcagcaaccagtacaaggctacgattggggcggatttcctcaccaaggaggtgcagttcgaggacaggctcttcactctgcaaatatgggacactgctggtcaggaaaggtttcagagtcttggcgttgcattctaccggggagc

SEQ ID NO: 48944 - DNA, 309 bp, Zea mays
ctgatgctcttgatgctgctggcaacacaactgctgctattggaaaggggtttgccattggttcagctgctcttgtgtccctggcgctttttggtgcctttgtcagcagagctggagtgaaggtcgtcgacgtcctctcccccaaggttttcattggtttgattgttggagccatgcttccgtactggttctctgccatgaccatgaagagtgttggaagcgctgccctgaagatggtggaggaggtccgcaggcagttcaacactattcctgggttgatggaggaaacagccaagcccgactacgctt

SEQ ID NO: 48945 - DNA, 300 bp, Zea mays
cgctggtgaacaggacccgtcgccatgggccgtgtgatccgtggacagaggaagggcgccgggtctgtgttccgcgcgcacgtgaagcaccgtaaaggcgctgcgcgctgcagtcccgtggatttcgctgagcggcacggctacatcaagggcatcgtcaaggacatcatccacgacccgggccgcggcgcgcccctcgccaaggtggtcttccgggatccgtatcggtttataaagcggacggagctgttcattgccgccgagggcattcacacgggccagtttgtgtattgcggcaag

SEQ ID NO: 48946 - DNA, 297 bp, Zea mays
ctttatctttatctttactccgatctttatgccgatgttacgtgtttcttctgctccttctccttgtctctatctttctctttgtgtttcttatgtttcttcactttatccttggacttgaccttggatttcccagatatggttggtgtacctttttcagcagaaggcaagtctactggtgcagtttctcgcagctgaaatgcttgtcctagtgtttccatgtcaaatggctgaatgtaagcagtcttctcacttgaacatgagttctgaaagagttggtccaactccatcccttcc

SEQ ID NO: 48947 - DNA, 301 bp, Zea mays
caacagcgccttcgagccatcctccatgatggccaagtgcgacccccgccatggcaagtacatggcatgctgcctcatgtaccgtggtgatgtggttcccaaggacgtgaacgctgctgtggccacaatcaagaccaagcgcaccatccagttcgtggactggtgcccgactggcttcaagtgcggaatcaactaccagcctcccagcgtcgtccccggcggtgacctggcaaaggtgcagcgtgccgtgtgcatgatctccaactccaccagtgttgtggaggtcttctcccgcattgac

SEQ ID NO: 48948 - DNA, 306 bp, Zea mays
gaagccctcagtcctccctcacacaccgaaccgagcgcaccatgtcgtcggcggctggaggagtggaggagacggtgcgggcgtcgcacatcctcatcaagcacgagggttcccgccgcaaggcctcctggaaggaccctgacggccgcatcatctccgccaccacgcgcggcgacgcgcagcgcgcctcctggacctccgcaaccagattctctccggccaggccaacttcgccgacctcgccgctcggcactccgactgctcgtccgcgcgacgcggtggggacttaggtacctttgggaggag

SEQ ID NO: 48949 - DNA, 299 bp, Zea mays
acgctcaaggagccagagagggaccgcaagaaggtcaagaacatcaagcacagcggcaacatcagcctcgacgacgtcatcgagatcgccaggaccatgaggcacaggtccatggccaaggaattggccggcaccgtcaaggagatcctcggtacctgcgtcacgtcgggtgcaccgtcgacggcaaggaccccaaggacctgcagcaggatattgacgacggcgaggtggacatcccgtccgcttaagaaggattggtctcgaggactgtgttatctttgctgatgaacccattctct

SEQ ID NO: 48950 - DNA, 294 bp, Zea mays
ctcctcgctacgcttcgcttcctcggcgccgattcctcctacctcctcctccaccctcgtccgtcccgttccggcgcgcgagcacgcccgagatggcgaacgcgagatcgggtgtcgctgtgaacgatgagtgcatgctgaagtttggcgagctgcagtcgaagaggctgcaccgcttcataactttcaagatggacgacaagttcaaggagatagttgtggaccaggtcggggatcgcgctaccagctacgatgacttcacaaacagcctccctgagaatgactgccgatacg

SEQ ID NO: 48951 - DNA, 190 bp, Zea mays
tatctcctccccacctctccttccctccacccgtgccgtcgcctcgcctatccgatctgccacctcctcccgtctcgcacgttccttcccaactccgcagcgtagcctctccgcggcgcgatccagatccaggtttttcagcatgggcctggtgaaggaaggcatcgacatggaggagggaacccttgag

SEQ ID NO: 48952 - DNA, 292 bp, Zea mays
agcgtggactactccctggcgcactgatccaggtgatcatcctgctcgccaccggggcaagaacggcggcggctacctggcgtccaagtacatggtgatcggcttccacgccgccatcctgctcagccacgccgtcatcaacagcctccccatcaccttcctctcctttttcggccagttcgccgcggcctggaacatgctaggtgtgtttgtcctgatggttgccgtgccgaccgttgccaccgagagggccagcgccgagttcgtgttcacccacttcaacaccgacaac

SEQ ID NO: 48953 - DNA, 295 bp, Zea mays
gcgatgtggagggccgccgctagcagctggtcgaccgggcgctcggctcaagggccgcgcacacgtctacaggcagcaaaaagatagtcggggtgttctacaaggccggggagtatgccgacaagaaccccaacttcgtcggctgcgtcgagggtgcactcggcatccgcggctggctcgagtcgcaggtccatcagtacattgtcaccgatgacaaggaaggccccaactgtgaactggagaagcacattgaagacatgcatgtcctgattaccaccccattccacccagctta

SEQ ID NO: 48954 - DNA, 100 bp, Zea mays
cccgccaacatgggccgcgttcgcaccaaaaccgtgaagaaggcggcccgggtcatcatagaggagtactacacgcgcctgggcaacgacttccacacga

SEQ ID NO: 48955 - DNA, 309 bp, Zea mays
gccgccaaggtgctcggtccttccgaggaagctaaggctgcgttggggtgaggccctcacttcatccggcgactagcaccgcgtccggcagcgccagccctacactcgcccgcgccatggcctctgtctccgagctcgcctgcatctactcggccctcattctgcacgacgatgaggtttcggtcacggaggataagatcaatgccctcattatagcagccggtgtagatgttgagctttttggcctgcttgtatgcaaaggcctggccacgtcaccctgggagctcactgcatgtaggggcggtgact

SEQ ID NO: 48956 - DNA, 316 bp, Zea mays
tgcctccccaactattggttcaaaaatatcaagagcaagtagagccagtgcagctactgtgcatggaaatgagaatgatgttgaagagctagagatgttgctggaggcatatttcatgcaagttgatggcacattaaacaaattgacaacgttaagagagtacatcgatgacacggaagattacatcaatatccagcttgataaccaccgtaatcagttgatccagctagagttattcttgagttctggtaccgtctgtctgtcgctgtactcattagttgctggagtctttggtatgaatattccgtatacctgg

SEQ ID NO: 48957 - DNA, 312 bp, Zea mays
  unsure (1)..(312): unsure at all n locations
tctggagttggtcagcagctgttctatggtcagccaccaccagccttcatcaaccctcaggctggatttgctttccagcaacctctgatgcctggtatgaggcctggtggtncaatgccgaactttatgatgcctatggttcagcaaggacagcaaccacagcgtcctgctggtagacgtgctggtggaatgcagcagcccatgccaatgggtggtcagcaacaggtgttccctagaggtggtcgtggctatcgctatcctactggacgtggaatgcctgatcctggcatgcacagtgttggtgctgtgatg

SEQ ID NO: 48958 - DNA, 299 bp, Zea mays
gcggcgtgagaagccatgagcagcaaagtctctcgcgacaccctgtacgaggcggtgcgggaagtcctgcacgggaaccagcgcaactccgcaagttcctggagacggtggagttgcagatcagcttgaagaactatgatccccagaaggacaagcgcttctcgggcaccgtcaggcttaagtccactccccgccctaagttctctgtgtgtgtcctgggggaccagcagcactgtgacgaggctaaggccgttgatatcgcccacatggacatcgaggcgctgaaaaaactcaacaag

SEQ ID NO: 48959 - DNA, 305 bp, Zea mays
gatgtttggtgacttccagaaggatacagctgaagagcgcaatgtccgcttcggagtcagagagcacggaatgggcgccatttgcaacggcattgctctgcacagcccagggtttgttccgtactgtgctacattctttgtcttcactgattacatgagaggtgccatgaggatctcggccctgtctgaagccggagtcatctatgtcatgacccacgactctattggtctcggagaagatggcccgacccatcagcccatcgagcacctggtgagcttccgtgcgatgccgaacatactgatgc

SEQ ID NO: 48960 - DNA, 313 bp, Zea mays
gtcgcttccagccgccgccgcgtccgcctcgccaagcgcagcagccgccgcagcacatcgctctacttgatctcagccatggcggaggtggagcagcaacaggacacgccgaagctcttcaaccgctggaccttcgatgatgtccaggtgaacgacatctcgctgaacgactacctcgctgtgaacgcgacgaagcacgcgatgtacctgccgcacaccgcggggcgctactccaagaagcggttccgcaaggcgcagtgcccgatcgttgagcgccttacaaactcgctcatgatgcacgggcgcaacaacg

SEQ ID NO: 48961 - DNA, 284 bp, Zea mays
  unsure (1)..(284): unsure at all n locations
tataatctccaccaggtcatatcagtccgcttgacttaggcgccaaatatgctgataaactgggaccaggcttacaggagtactgcaagacatacccagaaaattattgcttagcccagcttatctattggtatagccagaattcagaacctgaatctagattaacaagagctagaaaaggttgcatgtcgttgccagatgtctcatccttctatgtgaagtctgcanaaccatcacaagagcgagcttatggacacagaactgtgagattcatgttatcgcgc

SEQ ID NO: 48962 - DNA, 301 bp, Zea mays
  unsure (1)..(301): unsure at all n locations
cagtcttcgcgcgtccgccgattccncctccttagtcgccgcgtccttggctggcgtcagaaaaatggctacaaacttcctagcacatgagaagatctggttcgacaagttcactcatgacgacgcagagaggagattctacgagcagatgaacgggcctgtggcaggtgcctcccgccaggagaacggcgccacgtgatcctccgtgacattgcgagagcagagagagcatcagaaatcctggctggaagtcaggcacgggtcctcagcggcaccagcgagaccacggtgactcgtcgtc

SEQ ID NO: 48963 - DNA, 307 bp, Zea mays
gtggccacaatcaagaccaagcgcaccatccagttcgtggactggtgcccgactggcttcaagtgcggaatcaactaccagcctcccagcgtcgtccccggcggtgacctggccaaggtgcagcgtgccgtgtgcatgatctccaactccaccagtgttgtggaggtcttctcccgcatcgaccacaagttcgacctcatgtacgccaagcgcgccttcgtgcactggtacgtcggtgagggtatggaggagggcgagttctccgaggctcgtgaggatctggctgcgctcgagaaggactacgagg

SEQ ID NO: 48964 - DNA, 304 bp, Zea mays
gtcacaattacaagcaaaagagatcctgcagagattccatggggtaactttggggctgaatatgttgttgaatcttctggtgtcttcacgacgactgataaagcatcagcacacttaaagggtggtgcaaagaaagtggtgatatctgcaccatcagctgatgctcccatgtttgtagttggagttaatgagaatagctatgatccaaagatgaatgttgtttctaatgcaagttgcactaccaactgccttgctccacttgccaaggttgtccatgaggaatttggcatcgtggagggcctta

SEQ ID NO: 48965 - DNA, 303 bp, Zea mays
aagcaatagataagtgtattggtgatccagatgcagatgaggaaaaccatgttctgaaagctgaacaggatgcacagattggcaagggttctcgtggtgatgttaccatcttaccaactctggtaatcaacaatagacaatacagagggaagcttgacaaaggagcagttcttaaagcactttgtgctggctttagggaaaccaccgagccagccgtttgcttgagtgatgatatacaaacaaacgagtgcctagagaacaatggtggctgttggcaagataaggctgccaacatcactgcat

SEQ ID NO: 48966 - DNA, 298 bp, Zea mays
ctcttccgctccaagctagcagcagcaatcctgggtggtgtggaccagatccacatcaaaccgggggctaaggttctctacctcggggctgcctcgggcaccacggtctcccatgtctctgacatcgttggtccggatggtctagtctatgcagtcgagttctcccaccgctctggccgtgacctcattaacttggccaagaagaggaccaacatcattcctgtgatcgaggatgctcgacacccacacaaataccgcatgctcatcgcaatggtggatgtgatctttgctgatgtgg

SEQ ID NO: 48967 - DNA, 299 bp, Zea mays
taccccgcagttcccggacatgatcctctccgcctctcgagataagaccatcatcatgtggaaactgaccatggatgagaccaactatggaattccacagcgtgctctgcgtggtcactcccactttgttagtgatgtggttatctcctcagatggccagtttgccctctcaggctcctgggatggttccctgcgccttcgggatctcacaacgggcaccaccacgaggcgatttgtgggccataccaaggatgtgctgagtgtggccttctcctctgacaaccggcagattgtctctg

SEQ ID NO: 48968 - DNA, 299 bp, Zea mays
gacaaatccaacatcaaccgacagttggaggtatacacaagcggaggtgaccctgagagtgtggctggggagtatgggcggcactccctctacaaaatgcttggttacttcagcctggtcgggcttctccgcctgcactccctgttaggagattactaccaggccatcaaggtgctggagaacatcgaactgaacaagaagagtatgtattcccgtgtgccagagtgccaggtcaccacatactattatgttgggtttgcatatttgatgatgcgtcgttaccaggatgccatccgggt

SEQ ID NO: 48969 - DNA, 298 bp, Zea mays
gaatataatcatggatatcatgcagactagtgactcttcacatcatggaattgtagaaaatagcccgtacagaattccatatgacagacatgcagaaggtggtcaacttggtgcttcatggtattttagtagaaaagaaatagaggagaattccctttcgaggagagacggcattgatctgaagaaagagtcttatcttcgcaagtcatattgcacatttctgcaggatttggggatgagacttaaagtacctcaagtgacaattgctactgctatagtgttctgtcatcggttcttt

SEQ ID NO: 48970 - DNA, 297 bp, Zea mays
ctggagcagacatgagtgtttactacccgtatacggaaaccgacaagagactcactgccttccatcctgaaatcgaggagctcatcaacagcgacgtcgagaactccgagcacaagttcgtgctgaaggacaagaagaagccgatcatcttctcgatggcgcgtctcgaccgcgtgaagaacatgacaggcctggtggagatgtacggcaagaacgcgcgcctgagggagctggcgaacctcgtgatcgtcgccggtgaccacggcaagagtccaaggacagggaggagcaggcgga

SEQ ID NO: 48971 - DNA, 294 bp, Zea mays
ccagttcatgttgctgctgatctgctatcccaggcagaacatggtccagatagtcaggttgttctagttgttgctggagacggtgttgatctgggtgccattgaggcagaagttagcaagcagtgcaacgcgcttccaagaggtgaattcgcctcaaaagcacttagccacagcttcactgtgttcgcgaaagatatggttgaggcgatatcattctcaaatctgtatgcccctgagcatttgatcatcaacgtaaaggatgctgagcagtgggaggagttcatcgaaaacgca

SEQ ID NO: 48972 - DNA, 295 bp, Zea mays
ctcagacagtagacttgcagacgttgtacaacatagaaggctgggatgcgtacgcgttggcttttcaggcgacggaagagcaggcacatcttcaattcatgaaccctggcatggaggatgatccaacttgtggtcctatcctagacaacgttgccgtcaagaagctcttcaccccagacaaaccaaaggataacgtggtgctgaatggagactttgaggagggtccatggatgttccccaacacgagcttcggcgtgctgctcccaactaaccttgacgagcaaacgtctgccat

SEQ ID NO: 48973 - DNA, 191 bp, Zea mays
accggacgggttgtgcctggaggtggagcggaagatggtcagtaggacagaaggtaacattgatgactcgctcattggtggaaatgcctccgctgaaggccccgagggcgaaggtaccgaaagcacagtaatcactggtgtcgatattgtcatgaaccatcacctgcaggaaacaagtttcacaaaagaag

SEQ ID NO: 48974 - DNA, 323 bp, Zea mays
agtaccatggccttaaacaaccttcattccgaagtaatcgaactaaggaacgaaggtcttgagaaagataaaatattaaactcattgctaaataaaataacagaagacgaagctacttccaaagcccaagctgaagcccagaagtgcgaaattgaagatcttcagaaacagctagctgaagcgaagttaaagtgtgcaattgccgaagctgaccaagacgccagtaactattagaaaaattattgggagaagacagttgtagaactccggtcttcaaaagagacatgctacgaaaaatccatagaatgtgtgcaaaaaaataa

SEQ ID NO: 48975 - DNA, 328 bp, Zea mays
gcgctctcttccaggacatcaagaagccagctgaagatgagtggggtaaaaccccagacgccatgaaagctgccatggccctggagaaaaagctgaaccaggcccttttggatcttcatgccctgggttctgcccgcacggacccccatctctgtgacttcctggagactcacttcctagatgaggaagtgaagcttatcaagaagatgggtgaccacctgaccaacctccacaggctgggtggcccggaggctgggctgggcgagtatctcttcgaaaggctcactctcaagcacgactacgagccttctgagcccagcgacttctg

SEQ ID NO: 48976 - DNA, 321 bp, Zea mays
ggcaactgggcgaattcacatgttgcaaaattctctgcgatggattcaacttacagcttgcctgataatgttgcaatgcttacccttcaggagcttgaagatggaagtgttctccttcggtttgctcatctatatgaggccggggaggacaaggatctttcgtctttagcgagtatcgacctcaagagagtgttcccggagaagaagattggcaaggtcatcgagacaagcttatcggcaaaccaagaacgcgcaccatggagaagaagcgtttgatatggaaggcgcaaggttctgcggctgacgagaaggtggttcggg

SEQ ID NO: 48977 - DNA, 206 bp, Zea mays
caagatcgtcaaaaagagaaccaagaagttcatccggcaccagtcagacagatatgtcaaaattaagcgtaactggcggaaacccagaggcattgacaacagggttcgtagaagattcaagggccagatcttgatgcccaacattggttatggaagcaacaaaaacacaaagcacatgctgcccagtggcttccggaagttcctgg

SEQ ID NO: 48978 - DNA, 326 bp, Zea mays
atctccctagcagcagatcctcgtgcaacgcaaagcgctagccttcctactgtcccgatggcccgcacgaagcagacggcgaggaagtccactggcggcaaggcgccaaggaagcagctggccaccaaggcggcgcgcaagtctgccccggcgaccggcggagtgaagaagccccaccgtttccgccccggcaccgtcgcgctccgggagatccgcaagtaccagaagagcacggagctgctgatccgcaagctgccgttccagcgcctggtgcgtgagatcgcacaggacttcaagaccgaccttcgcttcaagagctccgccgt

SEQ ID NO: 48979 - DNA, 273 bp, Zea mays
gccagtacatggagggcttcaacgacgagctggaagccttcaaggagcgtgtgcggggccgtgccaagctgcgcatcgagaaggccatgaaggagtacgaggaggaggagcgcaagaagcggctcggccccggcggcctggaccccgtcgaggaactccagaagtgcttcgatgtgaaggacgtgcagatgctgcaggacgccatcagcaagatggaccccaccgacgcaaagtaccacatgcagcgctgcattgactctggcttctgggtcc

SEQ ID NO: 48980 - DNA, 182 bp, Zea mays
cgaaggccggaacccacctgctgcgcacctgcaagcctcgagtggagctcttccacggccgcggtggagatggcggcgaatctggaggacgtgccgtcactggatctgatgcacgagctgctccgccgcatgaagtgcagctccaagcccgacaagcgcctcatcctcatcggtccacctgg

SEQ ID NO: 48981 - DNA, 169 bp, Zea mays
gcaggctgagttcttgaagaaagccccaggagttaagcatgttgagagagacatgaaggtacagaaattgactacacacacacctcaatttcttggattgccaactggggtatggtcaacaggaggtggacttgatagagctggtgaagatgttgtgatcggtatcgtg

SEQ ID NO: 48982 - DNA, 325 bp, Zea mays
tagaagcaccaaagccaaagccaaagaatcctcttgacttgctgccaccaagcaagatggtccttgatgactggaagaggctatactcaaacacaaagactaacttccgggaggttgccatcaaaggtttctgggacatgtacgacccagagggctactctttgtggttctgtgactacaagtacaatgatgagaacaccgtctcctttgtgaccctgaacaaggttggtggattcctgcagcggatggacctgtgccgcaagtacgcctttgggaagatgctcgtgataggctctgagccacccttcaagctgaagggcctttg

SEQ ID NO: 48983 - DNA, 326 bp, Zea mays
cgaacggagagttcgacctagcacgcccggccgccgccgcagcccgcaatggcgtcccttttcaaggaccccagcaagctctcggcgtacagggaccgccggttcaaggggacgcaggaggagtatgaggcggcgctgcttgcgtcgacaacgctgtacatcggtaatatgtccttctacaccacggaggagcaggcctacgagctcttctcccgcgccggcgagatcaagaagatcatcatggggctcgacaagaactccaagaccccatgcggtttctgctttgtactgtactactctagggaggatgctgaagatgctgtcaa

SEQ ID NO: 48984 - DNA, 209 bp, Zea mays
cttgctcgccttcacccctcgccgccgccgccgccgtcgccgtcgcaagcgacgatgctcgacatcaacttgttccgcaccgacaagggcggcaacccagaccttattcgcgagtcccagcgcagtcggttcgcctccgtcgagctcgtcgacgaggtcatcgccctcgacaaggcatggcgcgaaaggcagttcgagctggacaagat

SEQ ID NO: 48985 - DNA, 324 bp, Zea mays
tgtctgtctgtcgctctcgctctcagacgactgggccgccgccgcttggtgctgaggctttggttggtctcttcggcggcgacgagcacccaccagcagttctgtagaaatggctgatggtgaggacatccagcctcttgtctgcgacaatggcaccggaatggtcaaggctggttttgctggcgacgatgcaccaagggcggtttttcctagcattgttggccgtcctcgccacactggtgtcatggtagggatgggacagaaggatgcatatgttggcgatgaggcacagtccaagagaggtattctcacgctcaagtaccc

SEQ ID NO: 48986 - DNA, 321 bp, Zea mays
ggttaacatcactattcctgttcctcaaggaacaaaatcaagatttgtggtcgttgatataaagaagaaccatctgaaggttgttctgaagggccagccacctatcattgatggtgagctctataagccagttaaggttgatgattgcttctggagcatagaggatggaaaaactctttccatttgcttacaaagcacaaccaaatggagtggtggaagtctgttataaagggtggccctgaagttgatacccaaaaggtggaacctgagaacagcaaactctctgatttggatcctgagactagacaaactgtggagaag

SEQ ID NO: 48987 - DNA, 320 bp, Zea mays
aatctttgggctctcattatggatgcagggactggtttcacatcccaagtatatgaactgtcacccatattccttcataaggattggattatggagcagtgggaaaataactactacatcagtgccatagctggtgcaatgaatgggagttccttggtggtcatgtcaaaaggaactccttacactcagcagtcttacaaagttagtgaatcattcccctacaagtggatcaacaagaaatggaaagaaggttttcatgttacatcaatgacaactgcaggaagccgctggggtgtagttatgtcaaggaactctggata

SEQ ID NO: 48988 - DNA, 319 bp, Zea mays
gcttcaaactggtggcaatctatctgttcttggcgaagtggggggttcttcgaaggacaataatataaacaatgcaaaaaacccggaggaattaaagccattgtctttgtctcagggggaaattgttttcaacattgggaaaagtgtagttgagaataaatctgattctcttgcattcagacgtcctggactacaaaaagaaggatcaaaggtcgtctatggtgttccaaaacatggaaagaagaagaagtttatggaagtaagcaaacattatgatgcaggccaatctgacaagatttctgagggcaattcatctaac

SEQ ID NO: 48989 - DNA, 189 bp, Zea mays
gaaacattgaactgattgatctcaaggtccgctacaaggacgatctaccattagttcttcatggtgtaagttgtatgtttcctggcgggaaaaagattgggattgtagggcgtactggaagcggtaaatctactcttattcaggcccttttccgcctaattgagcccactggagggaagattataattg

SEQ ID NO: 48990 - DNA, 318 bp, Zea mays
cgctctctcggtggaagttggcgacgactgggcgaccgccgccgccgtacgccaggtgctcaggtctccgtcagacccttcgccaggtcttcttcggcggcgagcaccgccagggtgtgcacccaatcttcttcactgggtcctccgctgcttctagtcacgcatctaaatccggagttgccagcattcgcttgaggtgccggaccacagcacaccatcatgcaggctagcgataggttcaacataaactctcagcttgagcatcttcaagccaaatatgttggtacagggcatgctgatttgtctagatttgaatgg

SEQ ID NO: 48991 - DNA, 316 bp, Zea mays
gcggtctgctcgttcgatctgtgcagcagatctgaggtcccgggcgaccgtgaagcagcttcaatcgtcggcatggcgctcgtattgcatagtggggctggaaacaagaatgccttcaaagcacttattgctgcagaatacagtgggatcaaggttgagttgaccaaggattttgagatgggtgtctccaacaagacccctgagtttcttaagatgaacccccttgggaaggttcctgttctggagactcctgatggccctgtttttgagagtaatgctatcgcacgctatgttgctcgcttgaaggatgacaacc

SEQ ID NO: 48992 - DNA, 315 bp, Zea mays
gccctggacagcagcagcgaactcgaggccgctccgccacctcgccactcgcctcttctcgctctcgccaccgggccaggggcgggaccatccgatcggctccgtcatggctggagctgctgctctcaatgagggtatcctttcttccgtgtccgagaaaaatgttgctgctcacccatggcatgatttggagataggaccagaggctcctgaagtgttcaattgtgtggttgagattcctagaggcagcaaggttaagtatgagttggacaagatatctggtctgatacaggtggatcgtgtcctttactcctc

SEQ ID NO: 48993 - DNA, 291 bp, Zea mays
gtgggaagagcggcctcgtggctctcaacttggatttcgatcaagtcaaggagtttgtcaaggagcggctgggggttgaggttgagatgggtggctgcaaggctccaatcacgaccttcatcgtcgagccatttgtgccacatgatcaagagtactacctttcgattgtctcagagaggttgggcagcaccatcagcttctcagagtgtggagggattgagatcgaggagaactgggacaaggttaagactattttccttcctactgagaagcccatgacgtctgattcat

SEQ ID NO: 48994 - DNA, 307 bp, Zea mays
gattaatttgatcgttgaggataaatttcaccgtgccagccctggtggaactggaggtgtgaaaaccattggaaactatgcctcggtactgaaagcacaaaagattgcaaaggggaaaggatattctgatgtcctttatgtggatgctgttcatgacaaatatcttgaagaagtctcttcctgcaatatttttgttgtgaaagacaatgttatttctacgcctgccattaaaggaacaatacttcctggtataacgaggaaaagtatcattgaagttgctcagagcaaaggtttcaaggttgaggag

SEQ ID NO: 48995 - DNA, 310 bp, Zea mays
ggccttctgtcatcttcagggagtagtgcatcgtgatttgaagccagagaattttctcttcacaacaagagatgaaagcgctcctatgaagttgattgactttggtctgtcagattttattagaccagatgaaaggctcaatgatattgttggaagtgacttattatgttgctccagaggttctacacggatcatacagtcatggaagcagacatttggagtataggtgttataacatacattctgctctgtggcagtcggccattctgggcaaggacagaatctgggatcttccggtccgtattgaggg

SEQ ID NO: 48996 - DNA, 295 bp, Zea mays
gttgggcaagctgtgagaccaaagaccggagtagtagggaggcaggcacaaacaagactgatgttgtctgtggtccccaggatcggctgagagccctggtggtgatccgcatcatcttcgggatcctgtttgccatcctcttggtgctgatctttatcaaaaaggtggccaagaagccaaccaataaggcttccgaccccgagcaggaaccccaggagatcaattttcccgacgtatcttcctggactacaacactgctgctccagtgcaggagactatagctggatgctatcgg

SEQ ID NO: 48997 - DNA, 299 bp, Zea mays
cttccttcccaggtccggtcagctcgggactcgggagcggcagtcccaaccatacgtccatatccccctcccaacaaaaaaaaaactcccatcaatggcgatctgaatcaaccaaggcatctggaagcttggacatggagcggatcctcaagtccgccagggagtcgggctccctgaacctctccaatcgctccctcagggagatacccaaggaggtttacaacaacttggacactggcagccaggatgagaaatggtgggagggagtggacctccaaaagctcattctggctcacaat

SEQ ID NO: 48998 - DNA, 300 bp, Zea mays
ccgtcgccgcctcgggccaaaccctacgcagggagttgattgatcgattgcagccatgagtaagttgcattccgagcttctcaaggattgcatctcccagatagttcaggatgccaagaagaataggaagttcactgagactgttgagcttcagattagtctgaagaattatgatccacaaaaggacaagcgtttcagtggctctgttaagttgcctcacatccctcgtccaaagatgaaggtgtgcatgcgtggtgatgcccagcacgttgaggaggctgagaagatgggacttgacta

SEQ ID NO: 48999 - DNA, 300 bp, Zea mays
ctgtcacagcgccgacgcttcccaattccttccaatcggcacctcgccgtcctcgtgtgcaatccccagctctcctcgcccctaccctcccaaactccagcggccccccctgaccaagctccggggacggatggacggaggagccggctttccgggcacgcagccggtctcccgctcgccggaggacgtcttccgggactaccgcgcgcgccaggccggcctgatcagggcgctcaccaccgatgtggagaagttctacgtgatgtgcgacccagagaaggagaacttatgtttatatgg

SEQ ID NO: 49000 - DNA, 295 bp, Zea mays
ccaactcgccgtcgtcttctgcggttctgccgtctacgcctccaatttggcctctctcccttgcaagtttaagcttcaccttcaaccatgggtaaggagaagtcccacatcaacattgtggtcattggccacgtcgactctggcaagtcgaccaccaccggccacctgatctacaagcttggaggcattgacaagcgtgtaatagagaggtttgagaacgaggctgctgagatgaacaagcggtccttcaagtatgcttgggtgctcgatcagctacaagctgagcgtgagaggg

SEQ ID NO: 49001 - DNA, 289 bp, Zea mays
  unsure (1)..(289): unsure at all n locations
gtcgatttctaattctcctcgcgagcccaaaccctaaacctaaacctttcacccgccgccgccgccaccaccagcactgccactccgccagcaccgtcccgaagccccctcccagcgccatcgacttcatctcggattgaagcaatgtcgtcggacgatgaggtcacggaggagaaggagctcgacctctcctccaacgacgttgtcaccaagtacaaggctgccgccgaaatcctcaacaacgctctgaagattgttgtgtctcagtgcaagccanaagtcaagattg

SEQ ID NO: 49002 - DNA, 295 bp, Zea mays
ccagatccgggaggaccgcaaggggtacaaggccggcgcgctgcgggcggggatgaggcacgcgtacgtgcgcgactgcgagtacgtggccatcttcgacgccgacttccagcccgacccggactacctcaagcgcaccatcccctacctcgtccacaacccggagatcgccctcgtccaggcgcgctggagattcgtgaacgcggacgagtgcctgatgacgaggatgcaggagatgtccctggactaccacttcaccgtggagcaggaagtgagctcctccgtctgcgccttc

SEQ ID NO: 49003 - DNA, 304 bp, Zea mays
cgctcgagccgaatcggctcgagcgcagttcccccgcgcccgagacacaaccccgcgccaggagtaagtttgttcttttatcgaggattatcgatatggcgagggaggagaatgtctacatggccaagctggctgagcaggccgaaaggtatgaagagatggttgagtatatggagaaggtggctaagactgtagatgtggaagagctacactgttgaggagcgtaacctacttgtcggtcgcatacaagaatgtgattggggctcgccgtgcttcatggcgcattgtctcttctattgaacag

SEQ ID NO: 49004 - DNA, 303 bp, Zea mays
gctggacgcgccgctgaacgagatcaacgtgcacgtgtaccagaacacgatcctgccgatgcagcgcggcgggttcgtctccaaggacgcacgggcgacgccgttcacgctcgtggtcgcgttcccgttcggggcgacgcaggccgacgcggagggcgcggtgtaggtggacgacgacgagcgcccggagatggtgctcgccgaagggcaggcgtcgtacgtgcgcttccacgcgagcgtgcgcggtaaggctgtgacggtgcggtcggaggtgctgatgggaagctacagcctgcacaaggg

SEQ ID NO: 49005 - DNA, 312 bp, Zea mays
gtcaggtagcgtcagacattccagtgcgtgcctggcaagtggcaaactcgagctgtctagtcctcggttcgcgaatcttccacagagaggcagacggcaggactcgcttcaagctcctcatctcgcgcaggggggtcgcctgagatcacagagacaatggtgaaggcagttgctgtcctcgccggcactgatgtcaagggcaccatcttcttttcacaggagggggatggtccgaccaccgtgactggaagtatctctggcctcaagccaggctccatgggttccatgtgcacgcgcttggcgacaccacca

SEQ ID NO: 49006 - DNA, 308 bp, Zea mays
cttctgcggttctgccgtctacgcctccaatttggcctctctcccttgcaagttcaagcttcaccttcaaccatgggtaaggagaagtcccacatcaacattgtggtcattggccacgtcgactctggcaagtcgaccaccaccggccacctgatctacaagcttggaggcattgacaagcgtgtaatagagaggtttgagaaggaggctgctgagatgaacaagcggtccttcaagtatgcttgggtgctcgacaagctcaatgctgagcgtgagaggggtatcaccattgatattgctctgtggaa

SEQ ID NO: 49007 - DNA, 299 bp, Zea mays
ctccaccctcaacagtggcaagaagagcctggagactgaacacaaggccttgaccagtgagattgcactgctgcagtccaggctgaagacagagggctctgatctgtgcgacagagtgagcgaaatgcagaagctggatgcacaggtcaaggagctggtgctgaagtcggcggtggaggctgagcgcctggtggctggcaagctcaagaaagacacgtacattgagaatgagaagctcatctcaggaaagcgccaggagctggtcaccaagatcgaccacatcctggatgccctgtagc

SEQ ID NO: 49008 - DNA, 309 bp, Zea mays
ttcgcagttgccgctcttggtatgctgagcacaattgcaactggtcttgctattgatgcttatggtcccatcagtgacaatgctggtggtattgctgagatggctggaatgagtcacagaatccgtgagagaactgatgctcttgatgctgctggcaacaccactgccgctattggaaagggatttgccattggttcagctgctcttgtgtctctggcgctttttggtgccttcgtcagcagagctggagtgaaggttgtcgatgtcctctcccccaaggttttcattggtttgattgttggagccatg

SEQ ID NO: 49009 - DNA, 316 bp, Zea mays
acaaaaccatagacggagaagaagaaaagattatttttcaagaaagcagaaaacccatctcctgcatatgctttgggtgaaattgatgaaggtgctccaggtgctgatatcgagaaggccggaatcgtaaatcaacagaaactagagaagaaatttgggcagtcttctgtttttgtcgcatcaacacttcttgagaacggagggaccctgaagagcgcaagtccagcttctcttctgaaggaagctatacatgttatcagctgcggctacgaagacaagaccgactggggaaaagagattggctggatttacggat

SEQ ID NO: 49010 - DNA, 317 bp, Zea mays
cccaaatgctacaaattaacagacaaaacagtcattggatgtagcggatttcatggagactgtattacgctgacaaagatctattgaagcaagactaaagatgtataagcattccaataataaggccatgactacgggggcaattgctgcaatgctgtctacaatcctgtattcaaggcgcttctttccatactatgtttacaacatcatcggtggacttgatgaagaaggaaagggggctgtatacagctttgatccagtagggtcttaccagagagactccttcaaggctggaggctcagcaagtgccatgctac

SEQ ID NO: 49011 - DNA, 325 bp, Zea mays
cgacgagatggacgttgcggaggacgccgccgccgcgcgccgacgggccgccataaccgactaccgcaagaagctgctcaactgcagggagctcgagtcgcgcgtcggcaccgtgagagaaagccttaaaaatgcaaagagggattttaccaagactgaagacgacttgaaatctctgcagagcgtggggcaaataattggagaggttctccgacctcttgataatgaacgctttattgtgaaggccagcagtggtccccgatatgtggtcggttgccgaagtaaagtagacaaggagaagttgacatctggaactcgtgttgta

SEQ ID NO: 49012 - DNA, 302 bp, Zea mays
cggctcgagatttctctgagggctccttccttccttgttggcgatgaggaggcacgggtggcagctaccctaccatcctctccatgtggtggcgatacggtcttcctggcgctcggattcgctttctacgtcttctttgttccctttgttggtggagataggctgcagtatttgctcatgggcctctataccccactgatcacctgcgttatcctattatatatatggtgtgctggaacagatcctggtgatccaggcattttcttaaattcaaaaaggccacctgaaaagcaaggaagttc

SEQ ID NO: 49013 - DNA, 305 bp, Zea mays
cctcctcatactttaccgcaaagcgcgcaccacgaattgcacctacccatttcgctaatctccctccacgagccgaccaaatcgaatcgaatcgcgcgcagcctccgcgtcacgattgctggcgatggcgagcctcaccctgccgccggcgccccccaacccacggcaggacgccatcgacctccaaaaggccttcaaagggtttggctgtgacagtacaacagtgataaacatacttactcatcgcgattcagtgcagcgtggactcattcaacaggaatacagggctatgtatcatgaggaac

SEQ ID NO: 49014 - DNA, 307 bp, Zea mays
ctgggaatagagtaacttgccgtgattggttccagctaaccctgaatgaaggactgaccgttttcagggatcaggagttctcttcagatcttggctgtcgtacggtaaaacgtattgctgatgtctccaaacttagaatctatcaattccgacaggacgccgggcctatggcacatcctatccgtccccattcttatatcaagatggactacttctatactgttacggtttacgagaatggtgctgaagttgtcagaatgtacaagaccatgtttggagcatcagggttccgaaagggcatggatct

SEQ ID NO: 49015 - DNA, 308 bp, Zea mays
ctagtaatgggaactgtcttgaagctcatgcatttcttcaactcctggcaacctttggtatttctgctgaatataatgaagatgacctgtgcaaattgcttccatatgtcagtcgtcgtcgtcagacacctgaactttgtcgattgcttgggttgtcacagaaaatgccaggtgtcattgaagttctggtgaaaagtggaagaactattgatgcaattaatttagcttacgtgtttgagcttactgaacagtttgaaccagtgcaactgcttaaagcatatctgagggatgttaagaaactgtcacat

SEQ ID NO: 49016 - DNA, 313 bp, Zea mays
acaatttagaagcgaccctcctcctctcccccatccgtacccaatctaatcgacacccggccgagatgggccgcaagttcttcgttggtggcaactggaaatgcaatggaaccgcagatcaggttgagaagattgtcaaaaccctgaatgaaggaaatgttccctcttcagatgttgttgaggttgttgtcagtcctccttatgtgttcctcccggtggtcaagagccagctgcgccaagagttccaagttgctgctcagaactgctgggtgaagaagggaggtgcattacactggtgaaattagtgctgaga

SEQ ID NO: 49017 - DNA, 298 bp, Zea mays
gcagttttgcgtgcagcggcggacaggagatatggcgtcggaggccaaggacgtgggcatcctcgccatggacatctacttcccgcgcaactgcgtgctccaggaagagttggaaacacatgatggcgtgagcaaagggaagtataccattgggcttgggcaggaaagtatggcattttgcactgaagttgaggatgttatttcgatgagcttgacagcggtgaagtccctcctgaaaaattataacattgacccaaagtgcattggacgtttggaagttggcagtgaaaccgtaata

SEQ ID NO: 49018 - DNA, 296 bp, Zea mays
ggtcaagccaggttccatcaagccccaccagaaggtggaggcccaggtttacatcctcagcaaggaggaaggtggccgccacaagccctttgtgtcccacttcatgcctgtcatgttctccctgacttgggacatggcctgtcggattatcctgcccccagagaaggagcttgccatgcccggggaggacctgaagttcaacctaatcttgcggcagcaatgatcttagagaaaggccagcgtttcaccctgcgagatggcaaccggactattggcaccggtctagtcaccaacac

SEQ ID NO: 49019 - DNA, 301 bp, Zea mays
gtaacctgcgcgattctattcttgcgacggaagcaaaatctgcacgagagacagacgacgagatggccgatgcggaggacgccgccgccgcgcgccgacgggccgccataaccgactaccgcaagaagctgctcaactgcagggagctcgagtcgcgcgtcggcaccgtgagagaaagccttaaaaatgcaaagagggattttaccaagactcgaagacgacttgaaatctctgcagagcgtggggcaaataattggagaggttctccgacctcttgataatgaacgcttgtgaaggccag

SEQ ID NO: 49020 - DNA, 299 bp, Zea mays
gaaaggtatgagatgtgaggatgatttctgatagagattcaagacgttccaaaggaattgcttatgtggagttcgtcgatgttagctcagtgcctctagcaataggattaactggccaacgagttttaggcgtgccaatcatagtacaggcatcacaggcagaaaaaaacagagctgcagcaatggcaaacaatttacaaaagggaagtgctggacctatgaggctttatgtgggctcattacacttcaacataactgaagatatgcatcgtgggatctttgagcctttgagagattga

SEQ ID NO: 49021 - DNA, 300 bp, Zea mays
cactagcaaccgtccccacaatcctccgacgatgcctgccgcaccgacgctgttgcccccctgcgacgcggaggagccgctgctggcggagtcctccgaccgcttctccatgttcccgatccgtttcccgcagatctgggagttctacaagaaggcggtggcctccttctggacggcggaggaggttgacctctctgccgacgcccggcactgggacgaggcgctgtcccccgacgagcggcacttcatctcccacgtgctcgccttcttcgctgcctccgacggcatcgtgctcgagaa

SEQ ID NO: 49022 - DNA, 294 bp, Zea mays
acgtttgtcaccaccttgataaaaacattccagaagatgtagcatttgccgagtctagaattcgagctgaaacaattgctgctgaggacatattgcatgacatgggagccataagtattatatcatctgattcacaggccatggggcgcgttggagaggtgataacccgaacatggcaaactgcaaacaagatgaaggtacaaagaggtagtttacctggatctggtgacgctaatgccgccccggacagtgacaacctccgtataagaagatacatagcaaaatacacaataa

SEQ ID NO: 49023 - DNA, 269 bp, Zea mays
catagctcctcccgcctcaccacgcctcgggctccctcccattcccagcgctgtccatgagcaccaccaacatggctatcgcagacatgagttctttgctgacctccctagcggaagaaagcaaattccttgcagttatgcaataggctttaggaaaaaaagactgcaaccaacggaaatcaataggagttgaagagattaaactgactttgttttggctgattttgtagttctgtatgtattttagaatctcatctcacctaactgag

SEQ ID NO: 49024 - DNA, 291 bp, Zea mays
accctaacagcacaaaggaaggagagagaaatggcaaccgcagaactgggtttcaaaaagcaattaactaaggaggagaagtttgaaaagaggaagcagagacttgctacaatcggagaggatctctttggcgattgctgctgatcaaccatttcgcttccctgccacatttacatttgtggtcagagcattctcagttctagatggtactgggaaaggccttcatcctaggtttcatattacagagattgctaagccctgagtactttttgcattactagcatctgaata

SEQ ID NO: 49025 - DNA, 284 bp, Zea mays
atttatgcaaagaggcgtatatatgccggtgaggaaatcacatataattacaaatttccattggaggaaaaaaagataccgtgccattgtggttctcggaggtgtcgtggatcaatgaactaagaaggccatcttttgaggttgctgcaacacttaagattcttggctgtgtgcaactcatcaatcaggatttacatcaatatcaaaatatggagtgcacgaacatgctggacagcaagaacaaactgccgcattatacttatttaagctatattggtcagact

SEQ ID NO: 49026 - DNA, 267 bp, Zea mays
ccataccccactccccccgcaggaacagcgcgtcggcggcaaaggcaaaggcaaaggcaagatgttcgggcgcgcgccgaagaagagcgacaacaccaagtactcatgagatcctcggggtgcccaagtcggcgtcccaggacgacctcaagaaggcctaccgcaaggccgctatcaagaaccaccccgacaaaggcggtgaacccgagaagttcaaggagctcggacaaggctatgaagtttttgtgagacccagaaacgtcgaga

SEQ ID NO: 49027 - DNA, 280 bp, Zea mays
tgcagagagatcgagatccggaggccgcgagtgggagcgccaccaccagcgactgcggcaatggcgggcacggtgacggtcccggggtcgtcgacccctccacgccgctgctcaaggacgagctcgacatcgtgatcccgacgatccgcaacctcgacttcctggagatgtggcggcccttcttccagccctaccacctcatcatcgtgcaggacggcgacccgaccaagaccatcaaggtgcacgagggcgtcgactacgagctctacaaccgcaacga

SEQ ID NO: 49028 - DNA, 289 bp, Zea mays
aagaaggacgaggagggcaaggttgaggatgttgatgagaaggaagaaaaggaaaagaagaagaagaagatcaaggaggtttctcatgagtggcaattggttaacaagcagaagcctatctggatgaggaagcctgaggatattaccaaggaagagtatgctgctttctacaagagcttgaccaacgactgggaggagcatctcgccgtgaagcacttctctgttgagggtcagcttgagttcaaggctgtcctgtttgtgccgaagagggccccctttgacctctttg

SEQ ID NO: 49029 - DNA, 296 bp, Zea mays
cgctcaaccatggcggactccaaggccacctcggcggtcaccctccgcactcgcaagttcatgaccaaccgcctgctggcccgcaaacaatttgtgcttgacgttatccaccccggccgcgccaacgtctccaaggcggagttgaaggagaggcttgccaagatgtacgaggtgaaggaccccaacaccatcttcgtcttcaagttccgcacccacttcggtggaggcaagtccactggcttcggcctcatctacgataacctcgagtctgccaagaagttcgagcccaaataccg

SEQ ID NO: 49030 - DNA, 288 bp, Zea mays
gaggaaagcactacttgcattgaaggctgaggagaggaaagttgaagttgacaaggatttgcagtctctgcagccactttcaaacaagaaagaaaatgatgaagttttcattaagctgggttctgacaaggataagaagaaggaaaatgctgagcgtgatgagcgtgccaagaagtcggtgagcatcaacgagttcctgaaacctgctgaaggagaaaggtactatggcggccgtggccgtggaaggggccgtggggagcgtggtggttttagaggcggatacggagg

SEQ ID NO: 49031 - DNA, 287 bp, Zea mays
accgctgcttcaagaaaccaccgagagcccaaccgcacaggcaggagagagagcagggagccagggacagtagcgtggggccggggagcaacgatggaggggaaggaggaggacgtgcgcctgggcgccaacaagttctcggagcgtcacccatcggcacggcggcgcagggcgccggcgccggggcacgacgacaaggactacaaggagcccccgccggcgccgctgttcgagcccggggagctcaagtcctggtccttctaccgcgcgggcatcgccgagttcgt

SEQ ID NO: 49032 - DNA, 286 bp, Zea mays
acgcgcgccgcaatagctcgccccctcgttcgccgcctctcctgctcctaccgcagctctccctcaggtttagtgttcgcaatggcggccttcaacaagcttggtggccttctaaggcacagtgctctggtgagcggtatcactggtggctcttctcctgcagtgttcaatgctgcacggctcatgtctaccaagctatttattggtggtcttgactggggtgttgatgacgtgaaactaagagaagcatttagcagctttggagaggttactgaagcgagggtga

SEQ ID NO: 49033 - DNA, 282 bp, Zea mays
atttgatgcagacagtgagcaaatcaaacaaaactggctatgaatcactactgagggtatatagggaaaccgatctaagccaggagaaagttcgtgtgttaggttctttggcatcatcccctgaccatgatgttgtccgtgaagtattgaatttcatattgtcacctgaggtgaggaatcaggacgcaatatttttgctaagaggggtgagttcaggggcacacgaggtagcatggcaatggctgaaggaaaactgggattacatattgggagcctactctg

SEQ ID NO: 49034 - DNA, 282 bp, Zea mays
catgaatcaaagaaagccaaaaaacctgcacttgttgccaagtcttccatcttactagatgtgaaaccttgggatgatgagacagatatggcgaaattagaggagtgcgtcagaagcattcaagcagacggcttagtctggggctcatctaaactagttccagtgggatacggaattaagaaacttcaaatacagtgtgtagttgaagatgataaagttggaacagatatgctggaggagcagatcactgcttttgaggactatgtgcagtccatggatgtg

SEQ ID NO: 49035 - DNA, 282 bp, Zea mays
accgccgcctcctccgccacccagcgctcgagctcctcgcgtcctgcgagcgcgctccgcaacgtcaccatgaagttcaacatcgcgaacccttccaccgggtgccaaaagaagctggaaatcgatgacgaccagaagctgcgtgccttttatgaccgaagatatcccaggaggtcagtggtgatgctctgggtgaggagttcaagggttatgtcttcaagatcatgggtggatgtgataagcaaggcttcccaatgaagcaaggagttttgacttctggtc

SEQ ID NO: 49036 - DNA, 214 bp, Zea mays
caaatccttcgatcgcgcagccgcccgccctctcgcagctctctccgatggcccgcacgaagcagacggcgaggaagtcaactggcggcaacgcgccgcggaagcagctggccaccaaggcggcgcgcaagtcggctccggccaccggcggcgtgaagaagccgcacaggttccgccccggcaccgtcgctctccgcgagatccgcaagtacca

SEQ ID NO: 49037 - DNA, 292 bp, Zea mays
ctcaagaacgtcgccaacggcccaacgggagcggcacctacatcagccgcgccgccgcgctgcccagcaagtgcggcgtcgccctgccgtacaagatcagcaccaacgttaactgcaacacgattaattaagtgaggcgtcctgtgcgcgtcccgggcgaggaatgcatgcatggcgctggcggagagtaataaaataatgctactggtattttaagctagatcgaggtgtgcctgtctctagtcatttattatggtgtttaggaatcgtcgtctacacagttcgtaacggt

SEQ ID NO: 49038 - DNA, 315 bp, Zea mays
  unsure (1)..(315): unsure at all n locations
aaatgatttcttagtttctgctgctgtagctgagtttaaagggcctgttgtatttggtgttgttcgtctggcccaagtaaacatggagttggctagagttgaagccacatttagtggtctatcacctggtaaacatggatggtcaataaatcagtttggggatttgacaagaggtgcagaaagcactggcaatgtctataatccaccagatcatttatctgataagccacttggtgacctgggaacactagaagcntgagagaacggggaagcccatttctcaagaccgaagagaaattgagagtggttgacttg

SEQ ID NO: 49039 - DNA, 319 bp, Zea mays
  unsure (1)..(319): unsure at all n locations
ggcaggagcggcgatccattccacacaactatcaacgcgcttgccccagcccgccgcaggagttgccagatctgctccggtcacaggagctccgactccgagccctctccaatggcggttaaggtctacgtcgtgtactattccatgtatggacatgttggcaaactagctgaagagatccagaaaggtgcctcgtctgttgaaggtgttgaagctanaacatggcaggtccctgaaaccctccctgaggaagtgcttggaaagatgggcgcaccccctaagcctgacgtgccagtcatcacgcggcaagaactcgcag

SEQ ID NO: 49040 - DNA, 206 bp, Zea mays
gtcaaagggctgtagcattactgaaacagtcacagttgaccctgggtcaataattccactgttgggcctcacacagtaccggtgaggcacggtagtcttcactttgaaacacacttttctatccgatggatttcgcaatttaagatttgtagtgactacatctgtgaaggggcctttgaatttgaggtctatgggcgggtcgagga

SEQ ID NO: 49041 - DNA, 320 bp, Zea mays
attgtactcgactctggtgatggtgtgagccacactgtgcccatttacgaaggatatgcccttcctcatgccattcttcgtttggatcttgctggtcgggacctcacagactccctcatgaaaattctcactgagaggggttactccttcacaacctcagccgagcgagaaattgtaagggacatcaaggagaagctagcatatatagcccttgactatgagcaagagttggaaactgccaagaacagctcttcagttgaaaagagctatgagctacctgatggacaagtaatcaccattggtgcagagagattcaggtg

SEQ ID NO: 49042 - DNA, 316 bp, Zea mays
cgacgaatcttccgaatctctcggtggcgatggcgctctccgaccgctcccgcgagtcgctcctcccgagcttcctctacgcctcctcggcgcgctctttcgctgccacaggagccgccgcgcgcctccctgtctcctccccagcgcctgccacggctggagcaggaggcggcgtgccgttctcgatccaggcgcccaaggagaagatcgagatgtactcgccggccttctatgccgcctgcactgccggaggaatcgccagctgcgggctcacccacatggccgtcacgcctctcgacctcgtcaagtgcaatat

SEQ ID NO: 49043 - DNA, 317 bp, Zea mays
gcaatctctagcagcagatcctcgtgcgaacaaagcgctagccccttcgtactgtcccgatggcccgcacgaagcagacggcgaggaagtccactggcggcaaggcgccaaggaagcagctggccacgaaggcggcgcgcaagtctgccccggcgaccggcggagtgaagaagccccaccgtttccgccccggcaccgtcgcgctccgggagatccgcaagtatcagaagagcacggagctgctgatccgcaagctgccgttccagcgcctggttcgtgagatcgcccaggacttcaagaccgaccttcgcttccag

SEQ ID NO: 49044 - DNA, 316 bp, Zea mays
gcaccttcccaaaaaatcccccattttcttcgaggcgaggagagcgtgaaagacagggcaccggcagcgacgatgtcggggcgcggcaagggcggcaaaggtctgggcaagggcggagcaaagcgccaccggaaggtgctccgtgacaacatccagggcatcaccaagcccgccatccggaggctggctcggaggggcggcgtgaagcgcatttcggggcttatctacgaggagacccgcggcgtcctcaagatcttcctcgagaacgtcatccgcgacgccgtcacctacaccgagcacgcacgccgcaagactg

SEQ ID NO: 49045 - DNA, 310 bp, Zea mays
aagatatacaatgtgcgtggggaatcatgcatttgtttgagagtgaaggtgcgatatctagttatactcactgtgaactggatccttcctttcttctgggattaagctgtggtatcattccttttgcaaaccacaattttgctcggagggtattgtaccaatctgaaaaacactcgcaacaagctattgggtactcaacgacaaatccacacatcagagttgatactctttctcatcaactatattatcctcagaggcctcttttcaaaacagttatagccgactgtcttggcagatcagattatgcttc

SEQ ID NO: 49046 - DNA, 295 bp, Zea mays
ccagcagctcttgcggtcgtccctcagccgcgtcgcaccgcatcgcattctacgattcgaagctctctgctcgcaggggaccatggcgaagaactacccaaccgtgagcgccgagtacagcgaggccgtcgagaaggccaggcgcaagctccgcgccctcatcgccgagaagagctgcgcacccctcatgctccgcctcgcgtggcactccgcggggacgttcgacgtgtcgtcgaggaccggcggtcctttcgtacaatgaatgccggtggaactggctcaggcgcaacgcggg

SEQ ID NO: 49047 - DNA, 305 bp, Zea mays
cccaaaccctagctcccgatctcgatggcgaaccctcgcgtcttcttcgacatgaccgtcggcggcgccccggcgggccggatcgtgatggagctgtacgccaacgaggtgcccaagaccgcggagaacttccgcgcgctgtgcacgggcgagaacggcgtgggcaagtccgggaagccgctccactacaaggactccaccttccaccgcgtcatccccgagttcatgtggcagggcggcgacttcacgcgcggcaacggcaccggcggcgagtccatctacggcgagaagttccccgacgagaa

SEQ ID NO: 49048 - DNA, 322 bp, Zea mays
ttagtatctcgcctcacaccacacagctagcagacagccagacacgcgctgctttctgatctctccccggatcggaggctcctcccaacataccaccctgccagccgcgccgccacgtccacgccggccggccaccaagcaagcatggatatggtttcgcagtccgagcacctgtgctacgtccgctgcacctactgcaacaccgtgctcgcggttggggttccatgcaagaggctgatggacacggtgactgtcaagtgcggccactgcaacaacctctcctacctcagtccacggccccccatggtgcagccgctctcgc

SEQ ID NO: 49049 - DNA, 304 bp, Zea mays
gatgaccttctgccggctgctgaaccggtgtggcgaggcggcgcggacctgcccctgggcgccaggtgtttcggggtgcgggtctcgccgaccggggagaaggtcacgcacactggccaggtttatgatgataaagactacaggagaattcggtttgtaggtcgttcgaaagaggtgaatgaaaactttgccattgatttgatagcagagcagcccgtgagcgaggtggagactcgggtgatagcgtgcgatggcggcgggggagctcttggccacccaaaagtgtatataaacttggacaaag

SEQ ID NO: 49050 - DNA, 305 bp, Zea mays
gagaaactccccggctcgaggagatcgtgacattgagaggacgatgggagggcgcgcgctcctcctcctcctcctggtctcggcgttggtctttcagatccacgcctccgactcgctgctgtacgagccgttcgatgaggactttgaggggagatgggtcgtctccaagaaggatgaataccaaggtgtgtggaggcatgccaagagtgatggtcatgaggactatggcctccttgttagtgagaaggcaagcaaatacgccataatcaaggagcttgatgagccagttaccttgaaggatggga

SEQ ID NO: 49051 - DNA, 308 bp, Zea mays
gaaggagtcggagggaaccgaaaactcagggtctcgaatttcctaggagcggaggcgatggctgggaagggaggaaaaggattgctcgccgcgaagacgacggcggccaagtcggcggagaaggacaaggggaagaaggcccccatctcacggtcctcccgcgcgggcctccagtttcctgttggacgaatccaccgtcagctgaagcaaaggactcaggcaaatggccgcgttggtgccactgcagccgtctactctgccgccatcctggagtacttgactgccgaggttctggagctggctgggaa

SEQ ID NO: 49052 - DNA, 301 bp, Zea mays
agtaaagcatttgctgagatgattttcaagcatggccttgttcattgtgatccccatgctgccaatatgatggtccgaccaatgccacaagacagcagaaaactttttggatggaaaaggccacagctggttcttcttgaccacggcctctacaaagagcttgattataatactaggataagctacgcttctctttggaaggcacttgtctttgctgatgcgaaagcgattaaggagaacagtgccaaactgggtgctggggaggatcttcatgcactctttgctaggggtctcactatga

SEQ ID NO: 49053 - DNA, 285 bp, Zea mays
caggaagaagcagaacaacatcaagctctatgtgcgacgtgtcttcatcatggacaactgtgaggagctgatcccagagtggctgagctttgtcaagggtattgttgactctgaggatcttcccctcaacatctctcgtgagactctccagcagaacaagatcctcaaggtcatccgcaagaatcttgtcaagaagtgcgttgagctgttttttgagattgcggagaacaaggaggactacaacaagttctatgaggccttctccaagaacctcaagcttggcat

SEQ ID NO: 49054 - DNA, 295 bp, Zea mays
cggatctgcgcttccagagccatgccgtgcttgctctgcaggaggcagcagaggcctacctggttggtctcttcgaagataccaatctgtgcgcgatccatgccaagcgcgtgaccatcatgcccaaggacattcagctggcaagaaggatccgtggcgagagggcgtaagtctgtcgacgggaggaagaactctgcgctcgttttgtgtgttcgcctctctcaccctgtaagttttgtgagaagatgatctagtaaactgtacttggcctgtttgactgtagccgcagtagcat

SEQ ID NO: 49055 - DNA, 227 bp, Zea mays
cagaaggacaagcgtttcagtggctctgttacgttgccccatatccctcgtcccaagatgaaggtgtgcatgcttggtgatgcccagcatgttgaggacgccgtgaagatgggacttgactacatggatgttgaggctctcaagaaaatgaacaagaacaagaagcttgttaagaggcttgccaagaagtacaatgctttcttggcatcagagtgcatcatcaagca

SEQ ID NO: 49056 - DNA, 294 bp, Zea mays
ctcgccgtctgccttctgcgcctccatttcggcctctgtcacttgcaagttcaatctcacctccaaccatgggtaaagagaagtcccacatcaacattgtggttattggccatgtcgactctggcaagtcgaccaccacaggacaccttatctacaagcttggaggcattgacaagcgtgtgatcgagaggtttgagaaggaggctgctgaaatgaacaagcggtccttcaagtacgcgttggtgctcgacaagctcgaggctgagcgtgagacaggtatcaccattgatattg

SEQ ID NO: 49057 - DNA, 277 bp, Zea mays
cccagatccacacccacatgcgccagtccaacttcaacgacatcatccactcgatcatcgacacggacgcggacgtgatcaccatcgagaactcgcggtccgacgagaagctgctctccgtgttccgtgagggtgtcaagtacggcgcgggcatcggccccggtgtctacgacatccactcccccaggatcccgtcggccgaggagatcgccgaccgcatcgacaagatgctggccgtgctggacaccaacatcctctgggtgaaccccgactgcgg

SEQ ID NO: 49058 - DNA, 286 bp, Zea mays
cgtaaacccttctctcttcttcccgcggcctgctcgttctatctgtccagcagacttgaggttccgagcggccggaaaccagcggcaaccgtcggcatggcgctcgtattgcaatctggggctggaaacaaaaatgccttcaaggcacttattgctgcagaatacagtgtggtcaaggttgagttgaccaaggactttgagatgggtgtctcgaacaagactcctgagtttctaaagatgtactcccttgggaaggttcctgttctggagactcctgatggccctg

SEQ ID NO: 49059 - DNA, 258 bp, Zea mays
tcaaaaggtcacctttgcagttggaggcatttgagaaatgtgctaaagaatgtggtctagaccctaaaaagaccctttccttggatgttgctactagatggaactctacatatatcatgattagagatgccatttactataagaatgcttttgatcgtctggctaaaaaagataaggacaaatatggtcacatcaatccttcaagcactgattggttgaatgcaacaaatattagccagtggtttgaaaaactctatg

SEQ ID NO: 49060 - DNA, 274 bp, Zea mays
ctttaccgcggcaaggaccacgtggacctggcccgcgacttcacctacatcgacgatattgtcaagggctgcctcgcctccctggaaacggccggcaacagcaccggcaccggcggcaagaagcgcgggccggcgccctacaggatcttcaacctcggcaacacctctcccgttacggtgcccaacctggtgtccatcctggagaagcacctccgcgtcaaggccaagaagaacgtggtcgagatgcccggcaacggcgacgtgcccttcacgc

SEQ ID NO: 49061 - DNA, 278 bp, Zea mays
ctgctttccagtgctatggagaatatgttagtggttcaatcactgatgagcaaagaaagaacgtcctccgcaattcatgtccaggagcaggtgcctgtggtggtatgtacacagcaaacactatggcatctgctatcgaaactttgggcatgagtcttccatacagttcttcgacacctgctgaggacccactaaaactagaagagtgccgtcttgctgggaagtatcttttagagttgctaaagatggatttgaagcctaaggacattatcactgag

SEQ ID NO: 49062 - DNA, 302 bp, Zea mays
cccaaggtcatcgagtccatccgccgcaataaggacttcctcaaaggcggcctcgctactcccgtatgctggtggctgtgctcctcgctcaactgtgcagctccggaacgactcgacctctacgacgcgctcgtcaactgtttcaacctccctggtatgcgctaccaggcacgacaacgtggacatcgtcgtcattcgggacaacagtgagcggcgagtactcgcgagctcgagcatgaggtcgttcctggcgtcgtagatactctcaaggtgatagcacgattctgctctgaaagcattgc

SEQ ID NO: 49063 - DNA, 300 bp, Zea mays
ccactcgccactctcacgtctcgcccatcccgccactgctgctctccagagtccaggcgacccaggctgcgcggtcgctcggtgttgttagtcccgaccgccgccggccatggcatccaacggcatcgccccaagagatgtatgtgttgttggcgttgcacgcacccctttgggtggtttccttggtgccttgtcttccttgcccgcaacaaagcttggttctatagcaattgaagctgctctgaaaagagcaaatgtggatccggccctcgtgcaggaggtctttttcggaaacgtctt

SEQ ID NO: 49064 - DNA, 298 bp, Zea mays
aagaaaagctgggaggtaaactttcctctgaagataaggagaccatggaaaaagctgtagaagataagattgaatggctggaaagccaccaagatgctgacattgaagacttcaaagctaagaagaaggaactggaagaaattgttcaaccaattatcagcaaactctatggaagtgcaggccctcccccaactggtgaagaggatacagcagacaaagatgagttgtagacactgatctgctagtgctgtaatattgtaaatactggactcaggaacttttgttaggaaaaaattga

SEQ ID NO: 49065 - DNA, 295 bp, Zea mays
ggacgcacaccagcacggcagcacctgccctcctcgccgtcgctgcctccctccgcgcgaccgatctaccctccgccgccaccatgtcgctgatcgccggggaggacttccagcatatcctgcgtttgctgaacaccaacgtggatgggaagcagaagatcatgttcgccatgacctcaatcaagggtgtcgggcgccgcttctccaacatcgtctgcaagaaggccgacatcgacatgaacaagagggccggcgagctgacgcctgatgagctggagcgcctgatgacggtcgt

SEQ ID NO: 49066 - DNA, 294 bp, Zea mays
gattttagccgccgccgctgctcatctcacatccctcgagaagacgcctgctcctcgccgatcgatacgatggccgtcttctccgacctccacaccgccgacggcctcaagtccctcgaggctcaccccgccggcaaaacctatgtgtctggtgactccattactaaggatgacattaaggtcttcgccgcggtgccgtcgaagcctggcgctgagtttcctaatgccgcccgctggtacgagaccgtctctgcggctgtagcctcaagattccctggtaaggctgttggtgta

SEQ ID NO: 49067 - DNA, 295 bp, Zea mays
ccaccagcctcgtcgttaggacgtaaggcaagacacccaggggcgagccagtgagtacagagagtagccttacgtagcgaactcagagcaagcgagggtacggtcaaggggggtgatggcgctgtctcgacgtatggcggctcccgtcctcgtcctcatgctcctcctcgtcgccacagagctggggacgaccaaggtggcggaggcgaggcactgcctgtcgcagagccaccggttcaagggcctgtgcatgagcagcaacaactgcgccaacgtgtgccagaccgagaacttc

SEQ ID NO: 49068 - DNA, 298 bp, Zea mays
gtccgcgagaagagcctccacgacggctgggacgccgacctcgagtgccatgtcatcaacgaggacctggtgtgcgacgagcttgaggacatgatggaagaaggtggcatactagtagattaccacggatgtgatttctttccagaacgttggtttgacctcgtagttgtgctccagactgacaactcaattctgcatgatcgcctgacgggtagaggttacatgggttccaaactcgccaacaacatagagtgcgaaatcttccaagtgctcctcgaggaggcgagggagagctaca

SEQ ID NO: 49069 - DNA, 289 bp, Zea mays
gactagttctagatcgcgggaaaacttcatgctgcagatgccaaacttgcagaggcaaaccgcaagaactctcaagctgaccgtgatttagaagaggcggaagctcgtcaacgtagactggagaaggagaaactgtattttgagacagagcggaaggcccgagaaaagcaacttaaggagcaagaggaatcactgcaggaatgggagaaaaagctgaaggaaagtcagaatagacttaatgagttgcagagatctataaatgagcgagaggagagagcaaataagaatg

SEQ ID NO: 49070 - DNA, 285 bp, Zea mays
ctctcgtgcgctctccgtgggagcgaggactcgcggccggcgcacggcaggttctcctagatctccggcatcatcagtaacaaatggctgacggtgaggacattcagcaccttgtttgtgacaatggaactggcatggtcaaggctggttttgctggtgacgatgcgccaagggctgttttcccaagcattgtcggacgcccccgtcacactggtgtgatggttggcatggggcagaaggatgcgtatgttggtgacgaggcccagtccaagaggggtatcctga

SEQ ID NO: 49071 - DNA, 287 bp, Zea mays
gaaaatgtgaagataatcaattttgataatatccttcagtatcccttacagcttctaggacattatcaaaattgattatcttcacattttctccaatgcgaagataatcaattttgataatgtccaagaagcagtaagggagaagaacgatattttactcaaaagtggaattgtcacggtgattaaagatgctttaattcctagtggaacaatcatataaagtcagccaaaaacatgtatataaggttgggtagcatcatatggtgatcgccaatgcgcatcaagtt

SEQ ID NO: 49072 - DNA, 289 bp, Zea mays
  unsure (1)..(289): unsure at all n locations
cacccacccactcgcttcagccgcctccgccgcgcgtacaagcaggtggagacaggatgccggctggccacggcctgcgctcgcggacgcgcgacctcttcgcgcgccccttccgcaagaagggctacatcccgctcaccacctacctcctctcctactatatctgttatttcttctattncaaggtgatctgcgccgtccacaaggcgatgccgcacaagttctaccacggccgcaccggtcgcgtctcgaacgtcaccaagcgcgccatcggcgtcgaggtcaacaa

SEQ ID NO: 49073 - DNA, 250 bp, Zea mays
atgggatgttctctcaaataaggaggctgtcgacatagtagcatcagccccatctcgtgcgacggcagccagggcccttgttgactgtgctgtcaggtcatggaggttgaagttcccaacatccaagagcgatgactgtgctgttgtctgcttatgcttgggtcacgagaagtcggccgactcggttcaagggagtgaacccaatgtggagacagcagaacccaccgtggaggtttccagttccacacat

SEQ ID NO: 49074 - DNA, 273 bp, Zea mays
ggccgctgctaatcagatgcgcaacttcctggttcgagcctcctgccgccttcgcttggaacctgggaaagaatatgtgatcatgggtctggatggggccacctatgacctcgagggacacccccagtacctgctggactcgaatagctggatcgaggagatgccctctgaacgcctgtgccggagcacccgccagcgggcagcctgtgcccagctcaacgacttcctccaggagtatggcactcaggggtgccaggtgtgagggctgccctc

SEQ ID NO: 49075 - DNA, 292 bp, Zea mays
gataaataagacagatggatagatagctaagatagatccacaggaaatgcaatcagtatgtcaaagagacatctgcactcacattttcattgcagcattgttcacaatagccaagatatggaatcagccgaagtgtccatcaacagatacatgaataaagacaatatggtatatatatcatatacatatatacagcggcatatattcagctttactcagaaggatatcctgttatttgtgacgacataggtgaatctggaggatgttaagttaagtgaaatatgccaggcac

SEQ ID NO: 49076 - DNA, 309 bp, Zea mays
cggagcagcagcagcaggcgagcgccgaggagcggcatcccactcagtgcttgcaaccatggctaggggattgaagaagcacttgaagaggctcaatgcgcccaagcattggatgctcgacaagcttggcggacttttgctcccaagccatcttctggacctcacaagtccagggagtgccttcctctgatcctcatcatcaggaacaggctcaagtatgctctgaactaccgtgaggtcatttctatcctgatgcaacgccatgtacttgttgatggcaggtcaggactgacaagactaccctgctgg

SEQ ID NO: 49077 - DNA, 302 bp, Zea mays
ccttcagacctgacctctcaaatcaaaccgggaccgggtggcctcttgccctcttccgttccgtctcattctcatccccgacccccgcaccgcagcgtaaaccctagtccccggcggcgaccttgcggcctccgctgcgctctgactggtgcgcgtttagacgaggagctgcggcggccaagaccaatcgaccatggctacccgtatccagtttgagaacaactgtgaaattggtgttttctccaagctgacaaatgcttactgtctggtagcgattggagggtcagagaacttctacagtg

SEQ ID NO: 49078 - DNA, 300 bp, Zea mays
ctctctctggcctgctgcttcctgataatcgaccagttccccagtcttgctccttgcactcctccctcctccatctccagcattgtgttctgattcacctgctccaatggctgttctttctgctgctgatgcttccccggtctcagctatcgggtttgagggctatgagaagcgccttgagatcacattctctgaggcacctgtctttgtggaccctcatgggcgtggtttgcgtgccctctccagggcccagattgactctgttctggatcttgcacggtgcacaattgtgtccgagct

SEQ ID NO: 49079 - DNA, 304 bp, Zea mays
cgccagttactgcctttggagatgaccttaaagctaggttggcaactgagacattatttactatagctaacagatatggggattatatacgcaccggctggaggaatgtattggattgcatcctgaggctgcataaacttgggcttctccctgcccgtgttgctagtgatgcagctgatgattccgaacttcctgctgaagcagtccaacgaaaggctgctcctagttcagttcccccatctcatattccagtgatgggcacacctcgcaaatcatccggactcatgggaagatttagtcagct

SEQ ID NO: 49080 - DNA, 300 bp, Zea mays
accaaattcaaggtcacagcggcgaacctctcggctatcatgtctggccgcggcaagggcgggaagggtctgggcaagggcggcgccaagcgccaccgcaaggtgctgcgcgacaacatccagggcatcaccaagccggcgattcgcaggttggcgaggaggggcggcgtcaagcgcatctccgggctcatctacgaggagacccgcggcgtgctcaagatcttcctcgagaacgtcatccgcgacgccgtcacctacaccgagcacgcccgccgcaagactgtcaccgccatggacgtt

SEQ ID NO: 49081 - DNA, 295 bp, Zea mays
ggcgtggtttgcgtgccctctccagggcccagattgactctgttctggatcttgcacggtgcacaattgtgtctgagctctccaacaaggatttcgactcatatgtcctttctgagtcaagcttgtttatctatcctctgaagattgtcatcaagacctgtggcactaccaagctcctgctcaccattccaagaatccttgagcttgctgaagagctgtctatgccacttgctgctgtgaagtactcccgtgggacgttcatctttcctggcgcacagccagccccccacaggag

SEQ ID NO: 49082 - DNA, 293 bp, Zea mays
tgaattccctacgcgcccgcctccaatcccgccagtccggcggcgacccagggatccatggagaggtacgaactgctcaaggacatcggttccggcaacttcggggtggcgcggctgatgcggaacaaggacaccaaggagctcgtcgctatgaagtacatcccgagggggctcaagattgacgagaatgtggcgagggagatcataaaccaccgctcgttgcggcaccccaacatcatccgcttcaaggaggtcgtgctcacgcccacgcacctcgctatcgtcatggagta

SEQ ID NO: 49083 - DNA, 293 bp, Zea mays
tgattttgtggatgcaggttggccatcttgaggaacggtaccaggaatgggttcaccaaccgatcgtcagcaaggagggtccacgctttttcggaaatgatgtcctggagttcttgactcgcacgaagtggtgggctgtgccaactatatggctgcctgttgtctgctgcctgctcgtgaaatctattctgatgggtcatactgttcaggacgtagctatgatggctctgtttgggatatttatttggacgctgatcgaatacactttgcaccgcttcctgttccacatcgag

SEQ ID NO: 49084 - DNA, 289 bp, Zea mays
caggttctgcacaatcaggagtatcaggcctgatagtacctgcagcaactgtaggagcactgggttacggttatatgtgctggaaggggatctcgttctcagatctaatgtatgtcaccaagcgcaacatggcaaatgctgtttcaagcatgactaaacatttggagcaagtgcaaagttctcttgctgctgctaaaaggcatttgacacagcgcattgaaaagttggacgataaattggatcagcaaaaggctctatctggacaaataagaaatgatgttactgatgc

SEQ ID NO: 49085 - DNA, 290 bp, Zea mays
gaggaagaggcatgcgcggagaagaagtacggagggatggcacccaagaagcccttgatatccaaggaccacgagcgcgcctacttcgattctgcggactgggtgctgggcaagcaagccgcgaacagcagcagcagcacgaggaccgcagccgcggtcgagtctctgaagcccaagctgaagagaacgccgcaccaccagctgccgcctcgtaagcccacctgcgcttccagttgagacgcatggccacgcgtcgcagctgctggaggaggagctcggtcagagtcaag

SEQ ID NO: 49086 - DNA, 285 bp, Zea mays
cacccaatgtcgcgtgcggccactagatttttcctgacgcggtgtctgctcccacttcccctcctctcccccaggtggcggcacggcggcggggtagcatttgtgctacgagggcttttgcaatggcggcttcggggttcggcggcggcgaggcgttccggctctcggccgcaccaggggccggcttactgaagctgcacaagggcgacatcaccctctggtccgtcgactgcgccaccgacgccatcgttaatgctgctaatgagcgaatgttaggtggcggag

SEQ ID NO: 49087 - DNA, 286 bp, Zea mays
gtcctctgttacttctccctccgccgccactcccctcccattcaccgccaccgccaattccataccgtcctccgccaaatctgctgagagcgagaagagatggcaggcaagggtgatgggccggcaatcggcatcgatctcggcacgacgtactcttgcgtcggcgtctggcagcacgaccgtgtcgagatcatcgccaacgaccagggtaaccgcaccacaccctcgtacgtcgccttcaccgactccgagcgcctcatcggagatgcggccaagaaccaggtcg

SEQ ID NO: 49088 - DNA, 287 bp, Zea mays
gagcgcaacaccatccacccaccagttcgaagcggaggcgaccggcaacctgcggcggagatgtcaggcaggggcaagggcggcaaggggctcgggaagggcggcgcgaactcacccggaaggtgctgcgcgacaacatccaggggatcacgaagccggcgatccggaggctggcgaggaggggtggcgtgaagcgcatctccgggctgatctacgaggagacccgcggcgtgctcaagatctttctcgagaatgtcatccgcgacgctgtgacctacacggagcac

SEQ ID NO: 49089 - DNA, 290 bp, Zea mays
ggtgcggaaggacaggggcaaccactggtgggagaagttcaggagcttcaagaaagacgcgaggagccaagagttctactcgctgccgttcaatctgaacaagttcttcccgtcggtctgatctcaaatggcgccgccgacgaatcaattctggaagcaacccttgttcatatgggcgttaatgaggaacataattctgctggtctggccagtggaagcttctgtgtctccattgttggtcaattttgtgtgttttcggacgagatgggagtaattgaactgtagaaatt

SEQ ID NO: 49090 - DNA, 228 bp, Zea mays
agaagcgtaagaagaagacgtacaccaagcccaagaagatcaagcacaagcacaagaaggtgaagctctccgtgctgcagttctataaggtggacgacgccactggcaaggtgacccgcctccgcaaggagtgccccaacacagagtgcggcgcgggcgtcttcatggccaaccacttcgaccgccactactgcggcaagtgcggcctcacctatgtctacaaccaga

SEQ ID NO: 49091 - DNA, 279 bp, Zea mays
gccgcacgctgcctggagttactgtaaaagacgtgaaccagcaggagttcgtcagagctctggcagccttcctcaaaatgtccgggaagctgaaagtccccgaatgggtggataccgtcaagctggccaagcacaaagagcgtgctccctacgatgagaactggttctacacgcgagctgcttccacagcgcggcacctgtacctccggggtggcgcgggggttggctccatgaccaagagctatgggggacgtcacagaaacggcgtaatgcccagcc

SEQ ID NO: 49092 - DNA, 185 bp, Zea mays
gttatgatatcaacgtcacatttcatgattgaaatctaggtggtctcgtggatgccgggacgttccatcccgatcagcgacggctggaaaagcacctctgggcatctacgagaccacctacaactcaatcatgaaatgtgacgttgatatcaggaaggacctttacgggaatatcgtcctcagtg

SEQ ID NO: 49093 - DNA, 163 bp, Zea mays
cgggaagctcactggcatggccttccgtgtccccactgccaacgtgtcagtggtggacctgacctgacgtctacaaaaacctgccgaatatgatgacatcaagaaggtggtgaagcaggcgtcggagggccccctcaagggcatcctgggctacactgagcac

SEQ ID NO: 49094 - DNA, 168 bp, Zea mays
ccctctcaggtgataggcatgcacttcttcaaccctcctccggtaatgaaactgatcgagattatccgaggagccgatacgtcagatgaggtgtttgctgcggtcagatctttctccgaaagactcgggaagtccgttatatgctcgcaagattacccaggattcatc

SEQ ID NO: 49095 - DNA, 215 bp, Zea mays
cagtctccctagcaatctctagcagcagatcctcgtgcgaacaaagcgctagccccttcgtactgtcccgatggcccgcacgaagcagacggcgaggaagtccactggcggcaaggcgccaaggaagcagctggccacgaaggcggcgcgcaagtctgccccggcgaccggcggagtgaagaagcccaccgtttccgccccggcaccgtcgcgct

SEQ ID NO: 49096 - DNA, 260 bp, Zea mays
gctcctcaggcagataatgcttccaagattgaagctccttcaaaaggacctgtccagttgcacaaggcaaaagctgctctcgatgctgatgatgattatgaggccgagcccccgaaggagaaggcaaagcctacgggggctgatgtggcgaagttgaaagagatgaagaggcaggaggagattgagaagaacaagcttgccttggagaggaagaagaggcaggctgagaagcaggcagaaaaactgtggcccgagcacag

SEQ ID NO: 49097 - DNA, 166 bp, Zea mays
ggagttgtgagtttccaagccccagctcactctgaccacttctctgcctgcccagcatcatgaagggccttgcagctgccctccttgtcctcgtctgcaccatggccctctgctcctgtgcacaagttggtaccaacaaagagctctgctgcctcgtctatacctc

SEQ ID NO: 49098 - DNA, 177 bp, Zea mays
atttcgatcccatttgaaatcaacccatcctcgtttcctccgtctagcagcctctcaccctcatggccaagatcaagatcgggatcaatgggtttggcaggatcggaaggctggtggccagggtggccctgcagagcgacgacgtcgagctcgtcgccgtgaacgaccccttcatca

SEQ ID NO: 49099 - DNA, 260 bp, Zea mays
agctgtacacctgtgccattgcattgaaccaacaaaatgccatttactattgcaacagggctgctgcatatacccttcttaatatgaacaacaaagctattgaggactgcctgaagtcaattgaaattgaccctcactacagcaaagcatatagccgactcggatctgcttattttgctatggggaattatcacgatgctctgtacaagggatacttgaaagccgccgagcttgatcccagtaatgaaaatgtcaggcag

SEQ ID NO: 49100 - DNA, 101 bp, Zea mays
cgacgaatctcctctcggcgcggaagatcacccctgtctcaaatggcggcgcacgatcggcgagcccctcttctccctcggtggccgtacggcacggcgac

SEQ ID NO: 49101 - DNA, 237 bp, Zea mays
atctctgaagctgacatcttcgtgaccaccactggcaacaaggatatcatcatggttgaccacatgaggaagatgaagaacaatgccattgtctgcaacattggccactttgacaatgaaattgatatgctcggccttgagacctaccctggcgtcaagcgcatcaccatcaagccccagactgaccgctgggtgttccccgagaccaacactggcatcattgtccttgctgagggt

SEQ ID NO: 49102 - DNA, 231 bp, Zea mays
caggaaatggcggcgactgagggcgtgctcttggggatgggcaaccccctcctcgacatctccgccgtcgtcgatgacgccttcctgacaaagtatgacatcaagctgaacaatgctattctcgctgaggagaagcacttgcctatgtatgacgagttggctagcaagagcaatgttgaatatatcgcgggaggagccacccagatctctatcagggtcgcccaatggatg

SEQ ID NO: 49103 - DNA, 129 bp, Zea mays
gctcatcagtggcaaggaggatgcagctaacaatttcgcccgtggccattacacaattggcaaggagattgttgatctgtgccttgaccgtatccgcaagcttgctgacaactgcaccggcctccaggg

SEQ ID NO: 49104 - DNA, 277 bp, Zea mays
tgcagcgccgcctggatcgagcagccgagcgactaagcgaagactcccttttccccgagcacaagagaaccatggcggcggcggcagtttacggcggcttcaaagggaagcttggcgtcgaggatgcccccgagctgcagctcaaccgcatccgcatcacactctcatccaagaacgtcaagaacttggagaaagtttgtgcggatttggtaaagggagccaaggacaagcatttgagggttaagggacctgtccggatccctactaaggttctcca

SEQ ID NO: 49105 - DNA, 309 bp, Zea mays
cgtctacaatgcatcaaacaatgagcttgtgaggacacaaacccttgtgaagagtgccattgtgcaagttgatgctgccccattcaagcagtggtacctcactcactatggagttgacattggtaggaagaagaaaacccctgctgcaaagaaggataatgctgagggacaagaggttgaggcagcagctgaggaaacgagaaagagcaaccatgtcacgaggaagcttgagaagcgcaaggagggacgtacccttgacccacacattgaggagcaatttggcagtggacggttgctggcatgcatttc

SEQ ID NO: 49106 - DNA, 307 bp, Zea mays
agctggcaggcacatgacacatcgccccagccccaagtccaaagccgcgagaggcaggggcgcacaaaaccctagccgccttcccgtccttttcctttcataaaccccaagccgcgccgcaatagctcgccccctcgttcgccgcctctcctgctcctaccgcagctctccctcaggtttagtgttcgcaatggcggccttcaacaagcttggtggccttctaaggcacagtgctctggtgagcggtatcactggtggctcttctcctgcagtgttcaatgctgcacggctcatgtctaccaagcta

SEQ ID NO: 49107 - DNA, 305 bp, Zea mays
gaccgacgcctctccgacgagcaactcaaccccccaccgcgcacgcgagagccggatccccacgatggcgacgatccagcaccaggcgaaaccggcggtggcggcggcgcgagcacgactactggcggtgggcagcgcgcgatggacctctacgagaagctggagaaggtcggagaggggacctacgggaaggtgtacagggcgcgggagaaggcgacggggcggatcgtggcgctgaagaagacgcggctccccgaggacgacgagggcgtgccccccaccgcgatgcgcgaggtctccttgct

SEQ ID NO: 49108 - DNA, 302 bp, Zea mays
ggtgaaaagaagatacttagcataaaaatttccaaccatcaattttacaagcttttacctgtaaaagttgaccaggaacagctagatgagttggaactggaagctaaaatacaaggaacaaaaatatctaatgtctgcgtccaggttgctgaaactggtcagagtgagtcactctactgtaataactgtaagctctcgatgagccgattattaaggtgctgtccaacatgcccgtttaagctgtgcctaagttgctgtcagaagatacgtgaaggaaacacgtcggacaacacccctgaaga

SEQ ID NO: 49109 - DNA, 299 bp, Zea mays
gcgcgaagttaagccaccatgtggacgagggctttagcgacggtgctgttcgtggcaggcgccgcgctgctcggcgtcggcgtcggcggcgccagcgcgcagcagggcgtgtggagcatcatcactcgtcccatgttccagagcgtgctgagccaccgcggcgatagcgggtgccagggcgccttctacacctacgacgccttcatcgaggccgccagcaagttccccggcttcggcaccaccggcgacgagcagacgcgcaggcgggagctcgccgccttcttcggccagacgtccca

SEQ ID NO: 49110 - DNA, 298 bp, Zea mays
gagctgatggcaaacctagtaagcatgcagtcatcactttctgatgttaacaagttgatcaaggagatccggtctgatgtttctgaagtagttgcagctgacgagtttgagtacaaggatccagttgatggctctgtgtccaagcaccagggcatccgatacctcttcggagatggttcacgactggtgttccgtctatccggaaccggttctgttggtgccaccatccgtgtctacatcgagcaatacgagaaggattcctccaagaccggcagggattcacaggaggcccttgctc

SEQ ID NO: 49111 - DNA, 294 bp, Zea mays
ggcctacgcgcagaaccacctccaccgcgacgcggtcgaggtctacgtccgcatgcttaggtgcctcccgcacccttcgactgctggcttctccgtcggcgaccggttcacgtacccgttcctcctcaaggcctgcggcgcgctcgctgcttctcggctcggcaggcaggtgcacgcgcacgtggcaaggtccgggtgcgagtcacacgctgtcgtacagaactccctgatcgagatgtacacgcgctgcggggatctgtcgaccgcacgcaaggcgttcgatggaatgcggga

SEQ ID NO: 49112 - DNA, 297 bp, Zea mays
gaaggtgtccacggtggtttgatcaacaagaaatgttatgaaatggcctcccaccttcggcgttcccagtactgacctcgtctgtcccttccccttcaccgctccccacagctttgcacccctttcctccccatacacacactaaccattttattttttgggccattaccccataccccttattgctgccaaaaccacatgggctgggggccagggctggatggacagacacctccccctacccatatccctcccgtgtgtggttggaaaacttttgttttttggggtttttttttt

SEQ ID NO: 49113 - DNA, 298 bp, Zea mays
atccccgagtcgacaggccacaaatcccaattccaaaaccttttctccgtcccatcgccggcgatcttctccttcgccgccaatggatctctccgctgtccaggctgccctctccgacaagtcctactccaccctcgcctccctctgcgacgaacttctcctccaggccgcgtcccagggattcaccaccgacgaatggccctactctgtccacctgcttgcccacctctacatcaatgacctgaacagcgcgcggttcttctggaagtcgttgccgcaggaggtcaaggacacgcgg

SEQ ID NO: 49114 - DNA, 296 bp, Zea mays
gaagataggaaaaaggcccgaatatttagttcaagggactttgtaccctgatgtaattgaatcatgcccacctcctgggagtggaaggacacattcccacaccatcaaaagccatcacaacgtaggtggccttccaaaagatatgaaattaaaacttattgaaccactcaagctcctattcaaggacgaggtgcggaagttggggggtattttgaatgtcccagattcatttttgaagcgacacccatttcctgggcctggtcttgcagtacgtgtcctaggtgatgttacacaag

SEQ ID NO: 49115 - DNA, 295 bp, Zea mays
ctcgagccgcataaatcaggaaatattgacgatggaagcaatggcgacgtagctgctgaacattatcatcgatacaaggacgacatagaaatgatgcattcgattggtctcagctcctacagattctcattgtcgtggtcgagaattcttccaaagggtcgcttcggaggtgttaatcaggcaggcgttaaattctacaatagcctcatcaacggactgctagaaaaagggatacaaccatttgtgacgatcaaccactatgacatacctgaagaactccaagaaagatacaatt

SEQ ID NO: 49116 - DNA, 292 bp, Zea mays
aagggactgaactccaagcttctggatatcaggagctacctggaaaaagtcgccacaggcaagctgcccatcaaccaccagatcatctaccagctgcaggacgtcgtcaacctgctgccagatgtcagcctgcaggagttcgtcaaggccttttacctgaagaccaatgaccagatggtggtagtgtacttggcctcgctgatccgttccgtggtcgccctgcacaacctcatcaacaacaagattgccaaccgggatgcagagaagaaagaacggcaggagaaagaagaga

SEQ ID NO: 49117 - DNA, 286 bp, Zea mays
ggatcttcgaggccgtcctacagctgctgctccctgggaagcgcttcgaagggcccatctcgcctgccgggaacgtgccggtctacaaggcaaatggcttacaagcatatgcagtgaccttgataacttaccttggtttgtggtggttcggtatatttaaccctgcaatagtgtatgatcacttgggggagatatactctgctcttgtttttggaagctttgtattctgtatttttctctacataaagggccatgtatttccatcttcatctgactctggatcctc

SEQ ID NO: 49118 - DNA, 306 bp, Zea mays
aaactgttcaatcagatgcaagtctgcttgcatctggcaagctacaaagttctgtacatgtggaaaagtatatggatgaggtggagagttcaaaaatttggattgactctggctcatgttgccttgcactctactcaaaattgagtccacatcaagttttgacgcttcaatcaccaattgcccttccaaaggctgttaagaaccccacagaactggatggattgaggaaggcgcatattcgagatggtgccgctgttgtacagtaccttgcttggctggataatcagatgccagagaactatggag

SEQ ID NO: 49119 - DNA, 243 bp, Zea mays
gtttgtttctggagttcttggcttgaatcccgagaccaggaagtttatctctgaaaatgttgaggagcaaactgagcaggttatgaaaaacatgggcgagatattgaaagctagtggtgctagctattcttcagttgtgaagacaacgatcatgttggctgatctgcaggatttcaataaagtacacgagatctatggcaaatatttcccggcgccacacctgcacgatcaacctaccaggtg

SEQ ID NO: 49120 - DNA, 217 bp, Zea mays
gcgggaccggcgatggagcggctgcagcggatctttggcgcctccggcatggggcagccgccgacggactcgccgctgctcgactcctccgagcaggtctacatctcctccctcgcgcttctcaagatgctcaagcacgggaggggccgcgtgcccatggaggtcatgggtctcatgctcggcgatttcgtcgatgactacaccgtcaaggtcgtcg

SEQ ID NO: 49121 - DNA, 262 bp, Zea mays
agcgcctttccagcatcaatgtcgagaacgtggaggagaaccggcgggctctccgtgagctcctgttctgctgccctggtgccctccagtacatcagcggtgtgatcctcttcgaggagaccctctaccagaagaccaaggatggcaagccttttgtcgatgtcctcaaggagggaggcgtcctccctggcatcaaggtcgacaagggcaccattgaggttgttggcaccgacaaggagaccaccacccagggccacgatga

SEQ ID NO: 49122 - DNA, 248 bp, Zea mays
aaggtcctgggcaggaccggttctcagggacagtgcacgcaggtgcgcgtggaattcatggacgacacgagccgatccatcatccgcaatgtaaaaggccccgtgcgcgagggcgacgtgctcacccttttggagtcagagcgagaagcccggaagttgcgctgagcttggctgctcgctgggtcttggatgtcgggttcgaccaccttggcgaatggaatggtctgtcaaaatctgttctttttttt

SEQ ID NO: 49123 - DNA, 296 bp, Zea mays
cagccttaatggacacgaattcgatttcatccatgatgttaataaaaaacacaatgagtttgtgggtaactggaacaaaaacgcggtgcatgtcaacctgtttgagacccctgtggaggctcagtacgtgagattgtaccccacgagctgccacacggcctgcactctgcgctttgagctactgggctgtgagctgaacggatgcgccaatcccctgggcctgaagaataacagcatccctgacaagcagatcacggcctccaggagctacaagacctgggggttgcatctcttca

SEQ ID NO: 49124 - DNA, 294 bp, Zea mays
taagcttttatgaacttctggaggccattgtcgatcagccaccaccttctgcacctgcagatcagttctctccagaattctgctcatttatctcctcttgcatacagaaagatccggctcagaggatgtctgcttcagaactcttgaatcacccttttttgaagaagttcgaggataaggacttaaacctggggattcttgtggagaacctggaacctccaatgaatatacccgaatagcctgtcgtttttagtgatgaagcctttgttgtgccttcagggtttggcctcgaag

SEQ ID NO: 49125 - DNA, 281 bp, Zea mays
ctgaggtgcaccggaggtaagtcggtgccacttctgccctggcccccaagatcggccccctgggtctgtctccaaaaaaagttggtgatgacattgccaaggcaacgggtgactggaagggcctgaggattacagtgaaactgaccattcagaacagacaggcccagattgaggtggtgccttctgcctctgccctgatcatcaaagccctcaaggaaccaccaagaggccgaaagaaacagaaaaacattaaacaccgtgggaatatcacttttgatgag

SEQ ID NO: 49126 - DNA, 280 bp, Zea mays
tggacacaaacaaggttccatctgcctgtctggcttggatttggtgcagcgataaagcacatcatgcagaaggacatcaggaacatccatatactgagagaaatgtacaatgagtggcaattcttcagggtcacccttgatttgcttgagatggttttcgcgaagggagacccgggaatcgcagctgtgtacgacaaattgctagtggctgatgatttgcaatctttcggcgagcaactgaggaagaactatgaggagacaaaagagctactccttcagg

SEQ ID NO: 49127 - DNA, 135 bp, Zea mays
gctccaggggagacaatgttgaacttgggatcgaaaaccgacaagagactcactgctcatccagatcgagagtcatctaaggacgtcagactcgcacactcggctagacagaaagcgtcactccgaggggccacg

SEQ ID NO: 49128 - DNA, 286 bp, Zea mays
  unsure (1)..(286): unsure at all n locations
ggctcgaggagcggcttaaaccctagttctcactcccatcgccgcttcactntccgccgcagcagatggagttctggggtctcgaggtcaagcctggttccactgttaagtgtgagcctggatatggctttgtgctgcacctttcccaggctgctcttggggaatcgaagatgagtgataatgccttgatgtatgtcaaaattgatgatcagaaacttgccattggacacctctctgttgacaagaacccacacatacaatttgatctggttttcgataaagagtt

SEQ ID NO: 49129 - DNA, 322 bp, Zea mays
  unsure (1)..(322): unsure at all n locations
gagctgctcatccggaagctgcccttccagaggttggtgagggagatcgcgcaggatttcaaaaccgacctgaggtttcagagcgcaccatcggtgcgctgcaggaggctagcgaacgtagcctggtgggtctgttcgaagataccaacctgtgtgccatccacgctaagagagtcaccatcatgcccaaagacatccagttggctcgccggatacggggagagagagcttaagtgaaggcagttnttatggcgttttgtagtaaattctgtaaaatactttggtttaatttgtgactttttttgtaagaattgtttataat

SEQ ID NO: 49130 - DNA, 318 bp, Zea mays
cacagactcagagagaacccaccatggtgctgtctcctgccgacaagaccaacgtcaaggccgcctggggtaaggtcggcgcgcacgctggcgagtatggtgcggaggccctggagaggatgttcctgtccttccccaccaccaagacctacttcccgcacttcgacctgagccacggctctgcccaggttaagggccacggcaagaaggtggccgacgcgctgaccaacgccgtggcgcacgtggacgacatgcccaacgcgctgtccgccctgagcgacctgcacgcgcacaagcttcgggtggacccggtcaact

SEQ ID NO: 49131 - DNA, 317 bp, Zea mays
atcaactttaagggaagttctaaggacaagttccctttggaaggatcatgtgcaaacctacacacagcacattggtgactttaactaccaacggttagcagactttggtgctgctatctctggtgccaacaagttgctttgccaggaagttcttgaggaattggatgtatacaagcgtttgaagttgacccttgagttagtaaaaaaggagatggagattagtaagctacagcaatccatagcaaaagcaattgaagaaaagattagtggagatcagcgacgttatttattgaacgagcaacttaaggcaatcaaga

SEQ ID NO: 49132 - DNA, 318 bp, Zea mays
tgaaaaggttctcgtacagccggtatatgaagaataagcttgatacatttgtgaactttccgatccatgacctcaatatgagcaagtatgtgaagcctacatcaagaggtgaccagcaccccgtgtatgaactctatgcagtgataaatcattatggcggtctcggtggtggacactactctgcatatgcgaagctagttgaagaggacaattggtatcattttgatgacagtcatgtttcctctgttaatgaggatgagatcaggcgatctgcagcatatgttcttttctaccgacgagttggaggttcaagtacag

SEQ ID NO: 49133 - DNA, 316 bp, Zea mays
ctcgccttggatcgattggtttcgtaactggtgagggactgagggtctcggagtggattgatcttgggattctgttcgaagatttgcagacgggggcaatggcgaccgcggggaaggcgacgaagtgcaaagctgcggtggcatgggaggccggcaagccactgtcgatcgaggaggtggaggtagcgcctccgcatgccatggaagtgcgcgtcaagatcctcttcacctcgctctgccacaccgacgtctacttctgggaggccaaggggcagactcccgtgttcgctcggatctgtggccacgaggctggagg

SEQ ID NO: 49134 - DNA, 320 bp, Zea mays
gtccagtgtttgtgatatccctccgcgtggcctctccatggcctccaccttcattggcaactccacgtccatccaggagatgttccgccgtgtgagcgagcagttcactgctatgttcaggaggaaggctttcttgcattggtacactggtgagggcatggatgagatggagttcaccgaagctgagagcaacatgaacgatctggtgtccgagtaccagcagtaccaggatgccactgctgatgaggaggcggaatatgaggacgaggaggccatccaagacgagtaagggtggtttgggccgccacatttgtaccctt

SEQ ID NO: 49135 - DNA, 321 bp, Zea mays
cccgcgtccgtcccaccgtcgcaagccagccacctccctgagaggcctgaccgtgatttcggcgtggcatccaaaggcggtcaagattcgagaggccggaggaaccaagcgtagggcctccgaccccacgtcgtcgtccgcgcgcgccgcccgccgtcgcagggagatgggggccgattactacaaggtcctcggcgtcgaccgcggcgccacgcacgacgacctcaagaaggcctatcggaagctcgccatgcgatggcaccccgacaagaactccaccaataagaaggaggcagaaaccaagttcaaggagatctctgt

SEQ ID NO: 49136 - DNA, 312 bp, Zea mays
  unsure (1)..(312): unsure at all n locations
gagcgctttgaggtacaagggctgcagcctaatggtgaggagatgaccctcaaacagttcctcgactattttagtacagagcacagattagagatcaccatgctgtcccagggcgtgtccatactctattccttcttcatgccagctgccaagctacaatgaacggttggatcagccgatgacagagattgtgagccgtatgtcgaagcgaaagctgggtcgccacgtgcgggcgctggtgcttgacttgtggtgtggtgaggagancggcgatgatgtcgatgttccctatatccgatacaccaggcgatg

SEQ ID NO: 49137 - DNA, 306 bp, Zea mays
caagcgccaagctgctgtgctgtgccgtgggtggcggcggcgggagtggaagtggaaccgcagccggtgctgtgattgacgcgcacagcagctggatttggtcatgcgtcaccagagcatggccaccgtctgcgagagcgaggacgcgctggggtcgtcggagtcggatcccgcgaggccggcgcgcccgcgcggcaagaggagccgcgccgccgaggtgcacaacctctccgagaataggaggaggagcaggatcaacgagaagatgaaggcgttgcagaccctcatactcaactcgagcaagac

SEQ ID NO: 49138 - DNA, 310 bp, Zea mays
tgcgggagtgatgtcgaccactttatgagctttcccccctgctattttggggtttatccctttagattcgctctagttatggcggatcttgacatggagcattaggaatttctttcgtcgaaggcggcgcggcgccaggtcgtggcatgcgcaccatttgccggtcgtggcgcgaggtcaccaaggaggtggtgaagacgctcgaggagtgtggcaggattaccttccccatatcccttaagcagccggggcctcgtgaaatgccggtccagtgttttgtgaggagagagagggcaacatccacatatct

SEQ ID NO: 49139 - DNA, 313 bp, Zea mays
aaggaataactttgcagtgggctacaggactggggacttccagctacacactaatgtcaatgatgggacagaatttggaggatcaatttatcagaaagtttgtgaagatcttgacacttcagtaaaccttgcttggacatcaggtaccaactgcactcgttttggcattgcagctaaatatcagttggatcccactgcttccatttctgcaaaagtcaacaactctagcttaattggagtaggctatactcagactctgaggcctggtgtgaagcttacactctctgctctggtagatgggaagagcattaat

SEQ ID NO: 49140 - DNA, 315 bp, Zea mays
atcgcgtggtacgctggcaagcgcatggcgtacatctacaaggctaagaccaagagcagcgagacccgctacaggtgcatctggggcaaggtcacccgcccgcacggcaactcgggcgtcgtccgcgccaagttcaagtccaacctcccgcctgagtccatggggcgcaaggtcagagtgttcatgtacccgagcagcatctaaggtttttgttggagtaaaggtggactctaaatggccatgcttagttcttctctctgagcttaaaatgccatgtgttggcaacttagattgttcatgtactgaaacctgttg

SEQ ID NO: 49141 - DNA, 315 bp, Zea mays
attgctttcagtgatagggcagaagaatttaagaaactcaactgccaagtgattggtgcttctgtggattctcacttctgtcatctagcatgggtcaatacacctaagaaacaaggaggactgggacccatgaacattcctttggtatcagacccgaagcgcaccattgctcaggattatggggtcttaaaggctgatgaaggcatctcgttcaggggcctttttatcattgatgataagggtattcttcggcagatcactgtaaatgacctccctgttggccgctctgtggatgagactttgagactagttcag

SEQ ID NO: 49142 - DNA, 309 bp, Zea mays
gttggcagaacccattatacggttgcttcctgttgcgcttggccttttatatcttggaaaacaggatagtgtggaggctaccgcagtgttctctaaaacatttgatgagaagatagggaagtactgtgatgtaacacttatgtcactggcatatgccgggacaggaaatgtgcttaaggttcagaaacttcttggcatttgctcacagcatcttgagaaaggtgaaacacaccaagggccagctgtcctagggattgctcttattgctatggctgaagaattaggtcccgtaatggctgtacgttcact

SEQ ID NO: 49143 - DNA, 308 bp, Zea mays
ctcactccgagttcctaaaagcagccagcaacttgagggataactaccgatttgcacatacgaatgttgagttcctggtgaacgagtatgatgataatggagagggtatcatcttatttcgtccttcacatctcactaacaagtttgaggacaagactgtggcatatacagagcaaaaaatgaccagtggcaaaattaaaaagtttatccaggaaaacatttgtggtatctgccctcacatgacaggagacaataaagatttgatacagggcaaggacttacttattgcttactatgatgtggactat

SEQ ID NO: 49144 - DNA, 307 bp, Zea mays
agcgcacagctctcctcatcggcgcacccgagctcgccctctccttcctcatcgaggcccgagtcctgctctgatggcgaccgacgtggctgagactcccgcgccgttggtggatgcggcccctgaggcgcccgcggacaccccggcggcgcctgctgttgacgcgaaccggccaaggccaagaaggccacagcgccgaagaagcgcgccagcccgacccatccgccgtacgccgagatggtctcggaggcgatcgcgtcgctcaaggagaggacggggtccagcagctttgctattgccaagttct

SEQ ID NO: 49145 - DNA, 142 bp, Zea mays
acgccacctgctgcgccgatcacctgcactgctgaccgcaagacactgtgtgtgacgtgatccagagtacgtgcctctccaaggagaacgctaccacggacctcgtcactaagctgcgtgagcacacagtgggggatgggag

SEQ ID NO: 49146 - DNA, 311 bp, Zea mays
ctagtcctctgatacttcacccagcgccgccactcagctcccattcaccgccaccgccaattccataccgtcctccgccacctctgctgagagcgagaagagatggcaggcaagggtgatgggccggcaatcggcatcgatctcgggacgacgtacacttgcgtcggcgtctggcagcacgaccgtgtcgagatcatcgccaacgaccagggtaaccgcaccacaccctcgtacgtcgccttcaccgactccgagcgcctcatcggagatgcggccaagaaccaggtcgccatgaagcccatcaacaccgt

SEQ ID NO: 49147 - DNA, 299 bp, Zea mays
attgagcgtgctgctatcaatgctcctgtacagggcagtgcagctgatgttgctatgtgtgcaatgcttgagatagacaggaatactcgtcttaaggagcttggttggacgctactcttgcaggtgcatgatgaagtgatactggaagggccttcagagtctgcggagtgtgccaagtccatagttgttgagtgcatgtctaagcccttctatggcaccaatatcctgaaggtcgaccttgctgttgatgccaagtgtgcacagaattggtatgcggccaaatagacctgttaagtgtc

SEQ ID NO: 49148 - DNA, 300 bp, Zea mays
gccgtggacgacgactgcaagcgccggttcctggagctcaaggccaagaggacgcaccgcttcatcatctacaggatcgacgagaagaagaagatggtggtggtggagcaggtgggcaagcccgtgctcggctacgacgacttcgccgccagcctccccgccaacgagtgcaggtacgccatcttcgactacgacttcgtcaccgaggagaactgccagaagagcaagatcttcttcatcgcctggtctcctgacacggcgcgcgtgaggagcaagatgatctacgccagctccaaggag

SEQ ID NO: 49149 - DNA, 297 bp, Zea mays
ctctctctaccgtccgataccccaagcaccagcgcggcggcggcgaccatggctgtcggaaagaacaagaggatctccaagggaaagaagggtggcaagaaaaagaccgtcgaccctttctctaagaaggattggtatgacatcaaggcaccgtcggtgttcagtgtgcgcaacatcgggaagactctcgtatccaggacacagggtaccaggattgcttctgagggtctgaagcacagagtctttgaggtttgcctagctgatcttcagggcgacgaggatcaagcttacaggaaa

SEQ ID NO: 49150 - DNA, 295 bp, Zea mays
gggaaaacgatgttcttctcctcggcgacgacccgtggcaggagtttgtgaatagcgtagggtgcataaagatcctctcgccgcaagacctgcagcagatggcccgcggcggcggaggtgaccttctgtctgcgcctggagcgaggatgctgcagggcagtgtctgtgacgactattctgcaggccacgacgtgcagaacctcaccggcagcattgcgcctgtggtgcctctggactactgaagaggactgaggcgaaggccgggatctgaagctctgaaccaaaaccggcaatc

SEQ ID NO: 49151 - DNA, 297 bp, Zea mays
ctcgagccggatccgcaaggccaatcccgagcagtggtgcgaaacctcgagcgctcgcgccacgtgaccataacaaagaggaagccgcggtagactggtagcggcagagtaagggggagatgtcgtcggcgttcagcggcgatgagaccgcccctttcttcggcttccttggcgcctccgctgcgctcgtcttctcatgcatgggggcggcgtacgggacagccaagagtggcgtcggcgtggcgtccatgggtgtcatgcgctcagagctcgtcatgaagtccatcgtgcccgtgg

SEQ ID NO: 49152 - DNA, 311 bp, Zea mays
agacgactctggcaagtcgacaaccaccggccacctgatctagaatcttggaggcattgacaagcgtgtgatcgagaggtttgagaaggaggccgctgaaatgaacaagcggtcctttaagtatgcttgggtgcttgacaagctcaaggctgagcgtgagaggggtatcaccattgatattgctctgtggaagtttgagaccaccaagtactattgcaccgttattgatgcccctggacaccgtgactttatcaagaacatgatcactggtacctcccaggctgactgtgctgtccttatcattgactcca

SEQ ID NO: 49153 - DNA, 288 bp, Zea mays
gtggggtgccaccctcccacaagggctgggctgagacccagctgagtgcagcgtggcgtttccctttctgggggggcctgaggtcttgtcacctggtcctgtgcccccacaggaaccagaggtaggatgggagggggaacgagagcctctttctccccagagcccccggcccaggcctgttgatccgcgccccaggacccccgtctttgcagagcccgaggagcctcccctgtcccctcgggcagatctgttgtgtctctcttcccacctggcagcctcagctctgtg

SEQ ID NO: 49154 - DNA, 289 bp, Zea mays
aacccaccctccatggtcttcaagcagatggagcaggtggctcagttcctgaaggcggctgaggactatggggtcatcaagactgacatgttccagactgtttatctctttgaaggcaaagacatggcagcagtgcagaggaccctgatggctttgggcagcttggcagtgaccaagaatgatgggcactaccgtggagatcccaactggtttatgaagaaagcgcaggagcataagagggaattcacagagagccagctgcaggagggaaagcatgtcattggccttc

SEQ ID NO: 49155 - DNA, 288 bp, Zea mays
ggccgcggggctctccagaacatcatccctgcctctactggcgctgccaaggctgtgggcaaggtcatccctgagctgaacgggaagctcactggcatggccttccgtgtccccactgccaacgtgtcagtggtggacctgacctgccgtctagaaaaacctgccaaatatgatgacatcaagaaggtggtgaagcaggcgtcggagggccccctcaagggcatcctgggctacactgagcaccaggtggtctcctctgacttcaacagcgacacccactcctccacc

SEQ ID NO: 49156 - DNA, 225 bp, Zea mays
cgaagcgacgagcagccgacgctaaagcttggtccggtgagcttcagagaaggggcgggtacgtcaagatgcagatcttcgtgaagaccctgacgggaaagaccatcaccctcgaggtcgagagcagcgatacaatcgacaatgtcaaggccaagatccaggacaaggaaggtatcccgccggaccagcagcgactaatcttcgcggggaagcagctcgaagacg

SEQ ID NO: 49157 - DNA, 295 bp, Zea mays
aaagattttagctttcaagatgctgatgtccttaaaccagacatacttgctcctggcaatctcacatgggctgcatgggcgcctaatggaacagatgaatcaaattatgctggtgaaggatttgcaatggtttctggaactagcatggctgcgccgcatattgctggcattgcagcactgataaagcagaagaacccaaagtggagcccctcagcaataaaatctgccctgatgacaacggccaatacactggacaaagggagccatcctcttagagcgcacagtacaccgcatc

SEQ ID NO: 49158 - DNA, 298 bp, Zea mays
  unsure (1)..(298): unsure at all n locations
ctcgagccgcaattcgcttcgaacagggcagaggtgagacttgagagaaggaagaaggccatgtcgtcggcggcgcacagcagcagaaggcggcggcagcggagcaggaggaggtggagcacgggccattccccatcgagcagctccaggcttctggaatagctgcattggatgtgaagaagctgaaagattctggtctccacactgtggaggctgtggcttacactccaaggaaagatcttctgcagattcaagggataagtgaagctanagctgacaagataattgaagcagcatc

SEQ ID NO: 49159 - DNA, 292 bp, Zea mays
ccagccgccaccaggtgcagagtctttcgtcatctcttctccggcgaagaacccccagtcgcccaccagatcacttgttaaactttgttgaggggtgatggcggtttctttcgcaaacctcaactccgaggcagggcttaataagcttgatgagtaccttctcactcgcagctacatcactggctaccaagcttccaaggatgacttggctgtctacacttcgttttcggctgctccctcgtccaagtatatcaacgtagcaaggtggtttaaccacattgatgcgctcgtg

SEQ ID NO: 49160 - DNA, 285 bp, Zea mays
atgaaccagatgtacctcaaggggagcaatgccaattccaatgtcaatgcgttcaagatgaatgttggagtcaacaagtactccaatagtccaaacgggaaagacgccaatgggaaaaacaatggcggcagtggcggcaacaacaacaatgggagcgccaacggcacttctgtggctgacaagcgcttcaagacattgccgacgagtgagatgctaccgaggaatgaagtccttggtggatacatctttgtctgcaacaacgataccatgcaggaggatctcaag

SEQ ID NO: 49161 - DNA, 285 bp, Zea mays
tacgaacttatcactggctccgtgccttacagccacattggctgccgtgaccagattatcttcatggtgggccgtggctatctgtccccggacctcagcaaaatctccagcaactgccccaaggccatgcggcgcctgctgtctgactgcctcaagttccagcgggaggagcggcccctcttcccccagatcctggccacaattggagctgctgcaacggtcactccccaagattgagcggagtgcctcggaaccctgcttgcagcgaaggcaggccgattagtt

SEQ ID NO: 49162 - DNA, 296 bp, Zea mays
gaatattcagttagcagattgaatgcagatgtcctggagcaatttataactgagaactacactgcttccagaattgttctagctgcatcaggtgttgatcatgatgaattggtatctattgccgaaccccttctgtctgacattcccagtgtatctggaacaacaaggccaaaatcaacctacattggtggagaatacagaagaagtgcagattcatcgaacacagacgttgcattggcattcgaggtcccaagtggttggctcaaagaaaaagattgtgtcactgtatcagttct

SEQ ID NO: 49163 - DNA, 239 bp, Zea mays
ggacaagaagattcacgtgtacggctattccatggcctatggtcctgcccagcacgccatttcaactgagaaaatcaaagccaagtaccccgactacgaggtcacctgggctaacgacggctactgagcactcccagcccggggcctgctgcctccagcagccacttcagagcccccgcctttgcctgcactcctcttgcaggggctggcctgcctgctcctgcggcaagctctggtga

SEQ ID NO: 49164 - DNA, 298 bp, Zea mays
ctcgagcgagaatttgctgcttgatgctgcaggaaatctctaagtttctgacttaggtttaagtgctttaaccgagcaagtgaaggctgatggtctgcttcatacaacatgtggaacccccaattatgttgcccctgaggtgatcgaggatggaggctatgatggtgcaactgcagatatctggtcttgcggagtaatcctctttgttcttcttgctggatatttacctttcgaggatgacaacatcatcgccctatacaagaagatttcagaagctcagtttagctgcccctcttgg

SEQ ID NO: 49165 - DNA, 122 bp, Zea mays
cccactccctctcgtcgccgtcctctcccgttcgcaacgccacgctccccaccgccgaaatggccccgaagcgaggtggcagggcaccggtgccggccaagaagaagacggataaagtgacg

SEQ ID NO: 49166 - DNA, 248 bp, Zea mays
cagaaatgctctgctcaatctgttctattcatgcacaagaattggtcttctagtggtctgcttcgagatatgaagaaactttctgaaagaaggaagcttgaagatttaacaattggtccagtccttacagttactacagaagccatgatagagcacatgaacaaccttctcaaaattagaggatcgaagggtctgtatggtggtgaaccgttaggggatcactcaattcccaaaatttatggtgccat

SEQ ID NO: 49167 - DNA, 288 bp, Zea mays
ccataatgcttttgatcttcttgcaagatatggcaccactcaccttgtattcaatgatgatattcagggaacagcttctgtggttcttgctgggcttattgcagcacaaacattacttggtggttcattggcagatcacacttaccttttccttggtgctggagaggctgggacaggtatcgctgaacttatagctcttgagatctcacgtcagacgaaagctcccatagaggagtgccgcaagaaaatctggcttgttgattccaaaggcttgaatgtcagtacacg

SEQ ID NO: 49168 - DNA, 285 bp, Zea mays
taaatcccgaagtgacatgacagttgaagagaggattgcagctgcagacaggagaaagattgagggcaatgcatatttcaaagaaaagaagcttgaggaggccatgcagcaatatgaaatggcgattgcatacatgggagatgatttcatgtttcaattatttggaaagtacagagacatggccttggctgtgaaaaatccatgccatctcaatatggctgcatgcctgatcaaactagagagattcgatgaagctattgcgcagtgtagcattgttttgacaga

SEQ ID NO: 49169 - DNA, 284 bp, Zea mays
caaccagctgctcaggatcgaggaagagctcggtgatgccgcggtctacgccggagcaaagttcagggcaccagtggagccctactaagaaaggaagaggatgaggatgttttcttgtggagctatactagctcgctgctgccttttgttacaatgtttgtacggtcgcaataaatgtatggtcgtgtttgctcgagagctactcaggtgattttgtcgtgggagcaccagaagcagaaaagaacccttttttttcaatctctctagattctgacgagtggtgg

SEQ ID NO: 49170 - DNA, 271 bp, Zea mays
cccaaaccggtgcgcaacctgtaggaagcgtgttgggttgacgggttttaactgccgatgcgggaacacgtactgttcgatgcaccgctactccgacaaacacgactgccagttcgactatcgaactgcagctagggacgctatcgccaaggccaatccagtggtgaaggcggagaagcttgacaagatctgaggcgggggcattgggtaacgaagaatggttgcgatctgcaagaattcagcatgtctctttgctgctttatcattgaac

SEQ ID NO: 49171 - DNA, 251 bp, Zea mays
tggagccggtgcggaagagcgtgtgcgtgaccggcgctggcggcttcgtcgcgtcggagctggtgaagctcctcctctcccggggccaatacgcggtccgcggtaccgtgcgcgaccctggtgctagcaagaatgcccatctcaaggtgctggaaggagctgaggaaaggttgcagcttctcaaggctgatctgatggactacaacagcattgcatcagcagttgccggctgtgagggtgtcttccatgta

SEQ ID NO: 49172 - DNA, 322 bp, Zea mays
gtgaaagatgcctactgcttgctgaacttcggggacagtattactacagatcacatttcacctgcaggaagcatacacaaagacagtcctgctgccaagtatttgatggagcgtggtgtggaccggaaggacttcaactcatatggtagccgtcgtggtaatgatgaagtaatggcaaggggaacgtttgcaaacattaggatcgtgaacaagtttttgaacggagaagttggacccaagaccattcatgttcctactggggagaagcttctgtttttgatgcggccatgagatacaaatctgagggccatgctactataat

SEQ ID NO: 49173 - DNA, 319 bp, Zea mays
caatccttcaagcgcaactgcctcctcctcgtcgtccggtcgtgagaagggatggcgggccgtggcaaggctatcggcgctggcgcgcgaagaaggcaacgtcgaggagctccaaggccggactccagttccccgtcggcaggattgccaggttcctcaaggcgggcaagtacgcggagcgcgtcggcgccggcgcccccgtgtacctcgccgccgtcctcgagtacctcgcggctgaggttctcgaacttgccgggaacgccgcgagggacaacaagaagacccgcattgtgccgcgccacatccagcttgctgtgcg

SEQ ID NO: 49174 - DNA, 314 bp, Zea mays
ggccacgacgggacgtgcgatctcaaactgaaaaatacaagggttgtatccatagattcgttcgagcgtgtgcccatcaactacgagagagcgctgcagaaggccgtggcgcaccagcctgttagtgccagcattgaagcatctcggcgcgcgttccagctctacagttctggcatcttcgacgggagatgcgggacgtacctggaccacggtgtgacggtggtggggtacggcagcgagggcggcaaggactactggatcgtgaagaactcgtggggcaccagtggggcgaggccgggtacgtccggatggcg

SEQ ID NO: 49175 - DNA, 320 bp, Zea mays
cagagacccagccatggcgatctcccagatctcacgcatattcctggccatccttctcgtggccgccgccttcgccgccgccccagctgcgcttgcggacggcgacgacgtggtagcccttaccgaatccacgttcgagaaggacgtcggacaggaccgcggcgccctcgtcgacttctatgcgccctggtgtggtcactgcaagaagcttgctcctgagtatgaaagacttggtgcaagttttaagaaagctaaatctgtcttgattgctaaggttgattgtgatgagcacaagagtttgtgcagcaagtatggagttt

SEQ ID NO: 49176 - DNA, 318 bp, Zea mays
cggctcgagcggacctaggtcgcggcgacatggccaaacgtaccaagaaagttgggatcgtcggtaaatacgggacccgctatggggcctccctccggaaaatggtgaagaaaattgaaatcagccagcacgccaagtacacttgctctttctgtggcaaaaccaagatgaagagacgagctgtggggatctggcactgtggttcctgcatgaagacagtggctggcggtgcctggacgtacaataccacttccgctgtcacggtaaagtccgccatcagaagactgaaggagttgaaagaccagtagacgctcctct

SEQ ID NO: 49177 - DNA, 318 bp, Zea mays
acaacacctccagcaaccattacaagctttggtgttgctacccctgtttcaattaccacatcgaccaccccttctggtgctgcaaggagcacacctctgagacctgtgaggatgtctcctggctcccatcagtaatacagcacgccaccaaaaaagcgtgagggtgaacttccaactccaatgtccttagagcaagcagtggaggcctttgagaacttgggtgtatatcctgagattgagcagtggcgagatagtctcaggcagtggttttcttcagttgtgatgaacccacttgtacaataaatcaaaacaagccat

SEQ ID NO: 49178 - DNA, 317 bp, Zea mays
  unsure (1)..(317): unsure at all n locations
ccgntggaagcttccggttggatgggatccctcctgcacctcgtggtgtcccacaaattgaagtgaagtttgatattgatgcaaatgggatactctcagttgctgccattgataagggcactggaaagaaacaggacatcaccatcactggtgctagtacgttacctaaggatgaggttgagagaatggtagaagaagccgataagtttgccaaggaggacaaagagaagagagatgcaattgacacaaaaaatcaggccgattctgtggtctaccagactgagaagcaactgaaggagcttggcgataaagtcccc

SEQ ID NO: 49179 - DNA, 313 bp, Zea mays
  unsure (1)..(313): unsure at all n locations
cgcgccggcgccggcaatggaggccgtggcgcgcagcgcgactacctttggcggttcgtggcggagacagagtggtacaacgaggttgtcctcagcgccgtggcccaggcgactggtggcgcggcctgccgcacccggtgcagtcatggatgcgcaactgcgtcggcggttacctcctctatttcatctctggtttcctctggtgcttcgtcatctactactggaagcgccacgcctacatccccaaagatgccatccccacaaatgaagctatgaagaagcaaatagttgtagcatcgnaagctatgccttt

SEQ ID NO: 49180 - DNA, 318 bp, Zea mays
gtcttcttctcccgtccaccttgcgtgctcgcgcgcgagtactcgtggcgcagcaaagctaggcgaccgccgccgcccctacgccacgtgctcgagtctagcctcgtcgattgcgtcgccagtttaattgatctacaagcttcagaacatgttcaagaatacatttcagtctgggttcctgtccattctgtatagcctcgggaccaagccattgcagatatgggataaggaagttgtgaatgggcacattagacgaccccaagatgaagatatccaatctaatgtacttgaaattgttggaacaaatgtacagtcaac

SEQ ID NO: 49181 - DNA, 314 bp, Zea mays
ccactctctcgatccaaagccagatcggcacgacgagcagagggccccccggagcggcgcggagcaatggcggcgggataccgggcggaggacgactacgactacctcttcaaggtggtactgatcggcgactccggcgtcggcaagtccaatctgctctcacgcttcacgcgcaacgagttcagccttgagtccaagtccaccatcggcgtcgagttcgccacccgctctctccaggtcgacggcaaggttgtcaaggcccagatttgggacactgctggccaggaacgatatcgtgctattactagtgcgta

SEQ ID NO: 49182 - DNA, 316 bp, Zea mays
ctagtcctctgttacttctccctccgccgccactcccctcccattcaccgccaccggcaattccataccgtcctccgccacctctgctgagagcgagaagagatggcaggcaagggtgatgggccggcaatcggcatcgatctcggcacgacgtactcttgcgtcggcgtctggcagcacgaccgtgaccagatcatcgccaacgaccagggtaaccgcaccacaccctcgtaaggtcgccttcaccgactccgagcgcctcatcggagatgcggccaagaaccagggtcgccatgaaccccatcaacaccgtctt

SEQ ID NO: 49183 - DNA, 311 bp, Zea mays
agcgatcagcgcagattccttccacgctccccctcctttccaggtcccctcgcccgcgctctcagatctcgcgcgcctcccacaagggaaaccttgagccatgggcacagttgtggatgccgctccagcagttgtggctgaggtcactgagaacatgttgggtggcaagaaagttacagttgtatttgttctaggtggtcctggaagtggaaaaggcacacagtgtgccaacatcgtggagcactttggattcacccatcttagtgctggagatcttctgcgtgcagagattaaatctggctctgagaacg

SEQ ID NO: 49184 - DNA, 313 bp, Zea mays
gctgcctccgcctctcgagtctcgtcgacccgtcatcctcctagctcctctactcgccagtcgccatgggcaagattaagatcggaatcaacggcttcggaaggatcggcaggctcgtggccagggtcgccctccagagcgaggatgtcgagctcgtcgccgtcaacgaccccttcatcaccacggactacatgacctacatgctcaagtacgacaccgtccacggccactggaagcacagcgacatcacactcaaggactccaagacgcttctcttcggtgacaagccggtcaccgtctttggcatcaggaa

SEQ ID NO: 49185 - DNA, 309 bp, Zea mays
accaccactgctaccatcggttccccaaaccctagccaagggacacggtggccagcgatggacggcgacagagaaggcgctgcggcggtgcaccaccacgcgcgctcccccgaggacgtcttccgcgatttccgcgcgcgccggccggcatcgtcaaggcactcaccacggatgtggagaagttctatcagcagtgcgatccagagaaagagaacttgtgcctttatggtttgccaaatgagacttgggaggttactcttccagctgaggaagtacctcctgagcttccagaaccagcactgggcataa

SEQ ID NO: 49186 - DNA, 307 bp, Zea mays
  unsure (1)..(307): unsure at all n locations
ggagccagtcttggggcccgcttctaccggcagatcgaaagacatccggggatcatcgctgtgatcggcttaatctgcctgggcatgggcagcgctgcgctttacttgnctggactcgcccttcgcagccccgacgtctgctgggacagaaagaacaacccggagccctggaaccgcctgagccccaatgaccaatacaagttccttgcagtttccactgactgcaagntgctgnagaaggaccggccagacttctaagccaggctgggctgccagtgccatgcaagccacagccagccagcccatc

SEQ ID NO: 49187 - DNA, 307 bp, Zea mays
gcctccttcccgctgccgccgtctcagcgagcgagactgagctgtgcttagtaagccatgtcgctgcgcccgagcgagcgggtcgaggtgcggcggaaccgctacaaggtggcggttgacgcggaggaggggcggcggcggcgcgaggacaatatggtggagatccgcaagagccgccgcgaggagagccttctcaagaggcgccgcgaggggctccaggcccaggtccctgcccctccctcgggggtcgagaagaagcttgaaagcctcccagctatggtcagtggggtttattcggatgacaata

SEQ ID NO: 49188 - DNA, 305 bp, Zea mays
atcgatctcgtttcaaatccatccatcctcgtttcctccgtcccgcagcatctcaaccccatggccaagatcaagatcgggatccatgggttcggcaggatcggaaggctggtggccagggtggccctgcagagtgacgatgtcgagctcgtcgccgtgaacgaccccttcatcagcaccgactacatgacctacatgttcaagtacgacactgtgcacggacagtggaagcaccatgaagtcaaggtgaaggactccaaaacccttctctttggtgagaaggaggttgctgtgtttggctgcag

SEQ ID NO: 49189 - DNA, 305 bp, Zea mays
ccattttcctcaaagccctcagagaagcctgttccaaatgcgactcttcaagtcactggcgctgttggttggagaagagagggacttgtgtacaagaagaatgaggttttcttggacatagttgagagtgtaaaccttcttatgtcttcgaaagggagtgttctaagatgtgatgtgacgggaaagattcttatgaaatgcttcctttctggaatgcctgatctgaagctgggattaaatgacaagattggacttgaaaaagaggcccaactaaagtccagaccagcaaagagtgggaagactat

SEQ ID NO: 49190 - DNA, 305 bp, Zea mays
gtgctcgtgatctcaacccaaggcgtgcctccgctccggtcacccgtcgctccacgcaaccatgtcgaggaggaagaccagggagcccaaggaggagaacgtcacccttggacccactgtccgtgaaggagagtatgtctttggtgtcgctcacatctttgcatccttcaatgacaccttcattcatatcactgatttgtctgggagggaaactctggttcggatcaccggtggcatgaaggtgaaggctgaccgtgacgagtcgtcaccttacgctgctatgcttgctgctcaagacgtcgcac

SEQ ID NO: 49191 - DNA, 295 bp, Zea mays
cacataacacaactagtgaaggatacatcagacaagcttaaacaagctagcgaggcggatcatcgcgttgaagtcagcgctaccaaaaagattgctgatgcaaagctagctaaagatttccaagcagtcctaaaagaattccagaaagctcaacgattagcagtagagagagaagctgcatatgcaccttttattactcaagcgggcctgccacagagctacaactcaagtgaagtgaacaatggtgctgataagttggcagagcagcgcacgcagcttctagaatctagaaggc

SEQ ID NO: 49192 - DNA, 291 bp, Zea mays
ggagaataagcatgaatatgtcgaccgggtagcagagcatcgattgaccactgccatcaggcctcagattaatgccttcctggaagggtttaatgaactcattccacgggagctgatatctatcttcaacgacaaagagcttgagcttctgattagtggtcttccagatattgacttggacgatttgaaaacaaatacagaatattctggctacagcatagcctctccagtcgtccagtggttctgggaaatcgttcaggggttcagcaaggaagacaaagctcggttcct

SEQ ID NO: 49193 - DNA, 290 bp, Zea mays
gctgaatatcaatccaaagatcttggtctactagttgaggatacaacagtggagcagcttggcatagctcggaaagttacaatctcaagttcctcgacgaccattatagcagatgctgctagcaaagacgatatccaggccagaatcgcgcactgaagagagagctttctcagacggactcgacgtatgactctgagaagttggcagagagaattgcaaagctttctggtggagttgctgtggttaaggttggagcatcgaccgaggcagagctagaggaccgcaagctc

SEQ ID NO: 49194 - DNA, 290 bp, Zea mays
gaccgtcgccgcgccgccatcatggtcaccagccttgtgcagcctatcaagctggtcatggtcaccaaggtcctgggcaggactggttctcaggggcagtgcacgcaggtgcgcgtggaattcatggacgacacgatccgatccatcatccgcaatgtaaaaggccccgtgcgcgagggcgacgtgctcacccttttggagtcagagcgagaagcccggaggttgcgctgagcttggctgctcgctgggtcttggatgtcgggttcgaccacttggccgatgggaatggt

SEQ ID NO: 49195 - DNA, 288 bp, Zea mays
cgcgtggtctacgccgagtgacagagacgctcaggctgtgttctcaggatgaccgagtgggagacagcagcaccagcggtggcagagaccccagacatcaagctctttgggaagtggagtagcgaagatgtgcagatcaatgacatttccctgcaggattacattgcagtgaaggagaagtatgccaagtacctgcctcacagtgcagggcggtatgccgccaaacgcttccgcaaagctcagtgtcccattgtggagcgcctcactaactccatgatgatgcacggc

SEQ ID NO: 49196 - DNA, 292 bp, Zea mays
gtctcgtccacccgtcgtcctcctagctcctctactcgccagtcgccatgggcaagattaagatcggaatcaacggcttcggaaggatcggcaggctcgtggccagggtcgccctccagagcgaggatgtcgagctcgtcgccgtcaacgaccccttcatcaccacggactacatgacctacatgttcaagtacgacaccgtccacggccactggaagcacagcgacatcacactcaaggactccaagacccttctcttcggtgacaagccggtcaccgtctttggcatcag

SEQ ID NO: 49197 - DNA, 289 bp, Zea mays
ggcgcttcgggagccgcggcttatggtgcagacatggccaagtccaagaaccacaccacacacaaccagtcccgaaaatggcacagaaatggtatcaagaaaccccgatcacaaagatacgaatctcttaagggggtggaccccaagttcctgaggaacatgcgctttgccaagaagcacaacaaaaagggcctaaagaagatgcaggccaacaatgccaaggccatgagtgcacgtgccgaggctatcaaggccctcgtaaagcccaaggaggttaagcccaagatcc

SEQ ID NO: 49198 - DNA, 287 bp, Zea mays
cgcgccgccgccaccgcaagagtatctcaactctgccccgagacctcccccctcgctggtctcagccatggtgaaatattcgacggagccgaccaaccccaccaagtccgccaaggccatgggccgtgacctacgtgttcacttcaagaacacacgtgagacagcttttgcccttaggaagttgtcactcaccaaggccaaaagttaccttgaggatgtgatcgcccacaagcaggccatcccgttccgcagtattgtggtggtgttgggcgtactgctcaggctaa

SEQ ID NO: 49199 - DNA, 284 bp, Zea mays
atcggaccatcaaagaagcatcccaaagttgatgagcaggtaccattacctgatagtcatctctcttgtattcttgaatttgatggtgcctctaaaggaaatccagggaaagccggtgctggagcaataataaggcaggtagatggttccgtgattgctcaactacgtgagggtctgggcattgcaaccaacaatgctgctgaatatcgtgcattgatcctagggctaacatatgcagccaagaaagggttcaagtatattcgtgctcaaggcgactctaagct

SEQ ID NO: 49200 - DNA, 288 bp, Zea mays
gctgaagctgcccatggcacggttacccgtcatttccgtgtccaccagaaaggaggcgaaaccagcacgaacagcattgcttcgatctttgcatggacaagaggacttgcccacagggcaaagctcgacgacaacgctagactactcgacttcgctctcaaactcgaggctgcttgcgttgagaccgtggagtccgggaagatgactaaagatctggcgattcttgtccatggatcttccagcgtcacgagaagccattacctgaacaccgaggagttcatcgacgca

SEQ ID NO: 49201 - DNA, 286 bp, Zea mays
cagatgttcatggacaacaatggaagcactgaagatatgggtcctcgaccttttcctgtcaaggaggttcataaaatagcagtactagatattaggttagctaatgctgatcgtcatgctgggaatattctagtgtgcaaggagagagaaggtggcaactacaagctgattccaattgatcatggttactgcttgccagagaaggtggttaatatctgttacaatacgtatttggttcatctgcttgcaccttatttgtttcatatggctgattagaaacttacgt

SEQ ID NO: 49202 - DNA, 297 bp, Zea mays
cctggggtttgtccgtcagcttcatcagcatcatacttctacccatcgtggggaacgccgcggagcacgccggagcaatcatttttgctctcaagaacaagctggacattaccctcggagtagcgttggggtcggcgacccagatctccatgtttgtggtgccgctgagtgtcattgtagcttggatcgcgggtattcaaatggatcttgacttcaagctcatagagaccggctctctcttcgtctcagtaatagtgacagcattcaccctccaggatggttcgtcacactacctca

SEQ ID NO: 49203 - DNA, 282 bp, Zea mays
gtcagtgagtactaccagaatagaggatgcttcagtgaacttattgctctcatggagagtggtcttggacttgaacgtgcacacatgggcatcttcacagaattgggagttctgtatgctagataccgctctgagaagcttatggagcacatcaaacttttctacacccgtctcaatattcctaagcttattcgagcctgtgatgaacagcagcactggaaagaacttacctacctgtacatacagtatgatgaatttgacaatgcagtcaccactattatg

SEQ ID NO: 49204 - DNA, 282 bp, Zea mays
gccccaactacccccagtctcggaagagaactatccagaagcgcaagactccaaagccgtcgccttcctatccatcccttcctcgccgcgggggtcgcctgagatcacataaacaatggtgaaggctgttgctgtgcttggtagcagcgatggtgtcaagggcaccatcttcttcacccaagagggagatggccctaccactgtcaccggaagtgtctctggcctcaagcctggcctccatgggttccatgtgcatgcacttggtgacacgaccaatggctg

SEQ ID NO: 49205 - DNA, 287 bp, Zea mays
tcctgccgccgcctcccagaccgtctcctccgctccagccgggatgccgacggtgaacgtcggccggagatcgtcctcatggactgccattaggtcccaacctacacacacgttgagttcgaggcgctctgcttcgagttcggcatcgagctggacgatgtgacgacggagaaggctattatcaagaaggagaagcacctcgaggacgacagtgaggtggacgaagatgacgaggtcatctacaacatagaggttgccgccaacagatatgatttgctatgtcttga

SEQ ID NO: 49206 - DNA, 254 bp, Zea mays
gtcttcgccgcagagtccgtgactccgatctcgcgttcacagcagcgcacatcttctttccgacacccggctcgatcctcgctctcctctccgtcgcttcagtcatggcaggaatggcacctgagggttctcagttcgatgctaagcactatggttctaagatgcaggagctgctgatcatcggtgagactgatgaattcttcacttcatgtggtgaagttttggagagcttgactgatatgggcctccaagag

SEQ ID NO: 49207 - DNA, 286 bp, Zea mays
tcctcctcctcgttctactcgccgccccttctagaatcatccagaggcgtgccggtgaagcgcgagatgcggtgaggcatggcgatgcagacgggggtcgcgacctccaaggtcctcatcctcgtcggtgcagggatgacgggctcgatcctgctgcggaatggccgcttatctgatgtgttgggagaactccaggagattatgaagggtgtaaatcaaggaacttcttcgggtccctatgacattgcacttattcaagctcagattcggaatttagcccaagaag

SEQ ID NO: 49208 - DNA, 322 bp, Zea mays
agcaaacagcaaggaagtcgaccggcggcaaggccccccggaagcagctggccactaaggctgcgcgcaagtcggccccggccaccggcggcgtgaagaagccccaccgcttccgccccggcaccgtcgcgctccgcgagatccgcaagtaccagaagagcactgagctgctcatccgcaagctccccttccagcgcctcgtccgcgagatcgcgcaggacttcaagactgatctgaggttccagtcctccgccgtcgcggcgctgcaggaggccgccgaggcgtacctggtggggctcttcgaggacaccaacctttgcgc

SEQ ID NO: 49209 - DNA, 314 bp, Zea mays
ctcccgtctccgtcgtctcgtctccgctcctcacctcgccagccatgggcaagatcaagatcggaatcaacggtttcggaaggatcggcaggctcgtggccagggtcgccctgcagagcgaggatgtcgagctcgtcgccgtaaacgaccccttcatcaccacggattacatgacgtacatgttcaattacgacaccgtacagggccaatggacgcacagcgatatcgctctaaaggactccaagacgcttctcttcggcgagaagccggtcaccgtctttggcatcaggaaccccgaggagatcccgtggggt

SEQ ID NO: 49210 - DNA, 310 bp, Zea mays
ctcgctttggatcgattggtttcgtaactggtgagggactgagggtctcggagtggattgatttgggattctgttcgaagatttgcggaggggggcaatggcgaccgcggggaaggtgatcaagtgcaaagctgcggtggcatgggaggccggcaagccactgtcgatcgaggaggtggaggtagcgcctccgcaggccatggaggtgcgcgtcaagatcctcttcacctcgctctgccacaccgacgtctacttctgggaggccaaggggcagactcccgtgttccctcggatctttggccacgaggct

SEQ ID NO: 49211 - DNA, 312 bp, Zea mays
gtctgccttctgcgcctccatttcggcctctgtcccttgcaagttcaatctcacctccaaccatgggtaaagagaagtcccacatcaacattgtggttattggccacgttgactctggcaagtcgaccaccacaggacacctgatctacaagcttggaggcattgacaagcgtgtgatcgagaggtttgagaaggaggctgctgaaatgaacaagcggtccttcaagtacgcatgggtgctcgacaagctcaaggctgagcgtgagagaggtatcaccattgatatcgctctgtggaagtttgagaccacca

SEQ ID NO: 49212 - DNA, 309 bp, Zea mays
gagaaagaagaaaggcatagcagcgggcagcggcatgggcaccagccccgtcatccctgcgacgatgctcttcgtcgctcttcttgtcgctgtctgcttcggcgccaccgccgccaggtccagccacgcccgccacaccgacgccgacgacgcgattcgtctccccagcagctttggcgctggtgctcgaccgtggaattgctgcgactccgctatcaaggacgcctccctgccggcgtggcgctgcaacgacgtggtggacaagtgctccgccgactgccaggactgcgaggcgtcgccggccggcga

SEQ ID NO: 49213 - DNA, 306 bp, Zea mays
ccaatctagaagctcccctctccctccctccctctctctctctctcttcgccgtccgaagctccgcacccaatctaatcgacacctcaccgagatgggccgcaagttcttcgtcggtggcaactggaaatgcaatggaaccacagatcaggtcgagaagattgtcaaaaccctgaatgaaggacaggttcccccttcagatgttgtcgaggtcgttgtcagccctccttatgtcttccttcctgtggtcaagagccagctgcgccaagagttccatgttgctgctcagaactgctgggtgaagaag

SEQ ID NO: 49214 - DNA, 299 bp, Zea mays
cggaaccacacacagcccggtccccgatctccgatcccctcgtcgatccaagatgcagatcttcgtcaagaccctcactggaaagactatcaccctcgaggtggagtcttctgacaccattgacaacgtcaaggccaagatccaggacaaggagggcattcccccggaccagcagcggctcatcttcgctggcaagcagctcgaggacgggcgcacacttgccgactacaacatccagaaggagagcaccctccacctggtgctccgcctcaggggaggcatgcagatcttcgtcaaga

SEQ ID NO: 49215 - DNA, 301 bp, Zea mays
gttttgctgctctccgaccccgagctccgaaggccgcagcatcaggcgcggcccccctcgcgtgtgaccgagatggcgctgccgaatcaggggaccgttgattaccccagcttcaagctcgtcatcgtcggcgatggtggaactggtaaaactacatttgtgaagaggcatctcactggagagtttgagaagaaatatgaaccaaccattggtgtggaagttcatccgttggatttcaccactaactgtggtaagatcaggttctactgctgggataccgcaggcaagagaagtttggtgg

SEQ ID NO: 49216 - DNA, 309 bp, Zea mays
tgggaaggttcctgttctggagactcctgatggccctgtttttgagagtaatgctatcgcacgctatgttgctcgcttgaaggatgacaaccctctttttgggtcttcccgtattgaacaagcccacgttgagcaatggatggattttgccgcaacagaagttgatcctggtgttgcatggtacttgtatccaaggcttgggtacctcccttatgttagcacaactgaggaaacagctatttcttcattgaagaggtcgcttggtgctctgaacacacaccttgcttcaaacacataccttgttgggca

SEQ ID NO: 49217 - DNA, 307 bp, Zea mays
cccacgaggaattcccaacaatcttatgccctatgttcagcaagttgcggttggtaggaggccagctctaacagttttaggaaatgactatgcaacaagagatgggactggggtccgagattacatccatgtggttgaccttgctgacggacatattgctgcattgcagaagctttttgagaactctagcatagggtgtgaagcgtacaaccttggaaccggaagaggtacatctgtgctggagattgttaaagcatttgagaaggcttctgggaagaaaatacctctgatttttggtgaaagacgc

SEQ ID NO: 49218 - DNA, 305 bp, Zea mays
cacaattcctcctgaatatgcatttggttcaactgagtcaaagcaggatcttgctgttgttccacctaacagcacagtaatatatgaagttgagcttatttcatttgtgaaggacaaggagtcgtgggacttgaacaatgaagagaagattgaggctgctggtaagaagaaagaggaagggaatgcattgttcaaatcgggcaaatatgctagagcttccaagcgatatgagaaggctgccaagtacattgagtacgacacttcgttcagtgaagatgagaagaagcaatccaagcaactgaaga

SEQ ID NO: 49219 - DNA, 267 bp, Zea mays
cgtccagctcctgtggagatctcctatgagaacatgcgttttctgataactcacaaccctaccaatgctactctcaagaatttcacagaggaacttaagaagtatggagtgacgactttggtacgagtttgtgatgctacatatgataaagctccagttgatcaagaatgaatccacgttctagattggccatttgatgatggagttcactccctaatcagatagtagatgattggttaaacctgtctaaaacccaatttcgtgaaa

SEQ ID NO: 49220 - DNA, 290 bp, Zea mays
gcctccgacatcctactttcgtcctcacgagtgaccgataatccgccggcgctaagatgttggtttatcaagatctcctatctggcgacgagctcctgtcggattcattcacctacaaggagctcgagaacggcgtcctgtgggaggtcgagggaaagtgggtcacccaaggtcctgttgatgtagacattggtgccaatccatccgccgagggtggtgaggacgaaagcgttgatgacacagccgtgaaggtggttgatattgttgacacattccgtctacaggagcaa

SEQ ID NO: 49221 - DNA, 294 bp, Zea mays
cgtgcacccactgcctcttcccttctcgcttgggaactctagtctcgcctcgggttgcaatggaccccaactgctcctgtgccgctggtgtctcctgcacctgcgccagctcctgcaagtgcaaagagtgcaaatgcacctcctgcaagaagagctgctgctcctgctgccctgtgggctgtgccaagtgtgcccagggctgcatctgcaaaggggcatcggagaagtgcagctgctgcgcctgatgtcgggacagccctgctcccaagtacaaatagagtgacccgtaaaatc

SEQ ID NO: 49222 - DNA, 295 bp, Zea mays
aaacaaatcaacaatgagaaaaacaaccccattaaaaactgggcaaaggccatgaatagacctttctcaaaagaatacatacatgtggcaataagcatatgaaaaaaatggttaatatcgctaatcattaaggaaatgcaatcaaagccacaatgagataccatctcagacctgtctgaatgggtattatcagaatgggtattattaaaaaatcaaaacatagatgctagtgaggctgcagagaaaagcaaatacttatacactgctggtgggaatgtaaattaattcagccatt

SEQ ID NO: 49223 - DNA, 295 bp, Zea mays
gttccacctcttccatgaaacatggatcgcttcgtgtaacagttcaaggcgaagttattgaacactcctttggagaggagcacttgtgctttagaactttgcaacgctacactgcagctactcttgagcatggcatgcatcctccaatttcccccaagccagaatggcgtgctctgatggatgaaatggctgttgtagcaactaaagaatatcgatcaattgtctttcaagagccacgcttcgttgaatacttcagatcggctacgcctgagactgaatatggcaggatgaatat

SEQ ID NO: 49224 - DNA, 296 bp, Zea mays; identical to SEQ ID NO: 31030

SEQ ID NO: 49225 - DNA, 298 bp, Zea mays
cggctcgagccccatcccagaggagtttctcaggaccttggctggaggcacaggaggcccagctcctttcccagccttggcaatgccagctgtaccagggggagaggcttcttggagcagcagtgtacttcacagagctgtctagcccaggtgcccaacgctctgggagagccccaggtgccctcccagcaggccacctcctgctgtttctcatccttggtgtcctttctctgctccttttggtgactggagcctttggctttcacctttggagaagacaggtgagccagggacatgg

SEQ ID NO: 49226 - DNA, 301 bp, Zea mays
tgttctccccgtctccgcccgcactcgctcgtccgcgcgcaggaaggttgacctgtcgggggccggcgagcccggtaagtaagagtgaaaatggatggaagtagtaaagggagtgggcattctgaagcattaaggaactacaacctgggaagaactttaggtatcggtacatttggaaaagtgaagattgcagagcataagcttactggacatagggttgctataaagatcatcaactgccgccaaatgagaaatatggacatggaagagatagcaaagagagaattcaagatattgaagt

SEQ ID NO: 49227 - DNA, 307 bp, Zea mays
ggaatcacgcctcgaagatggctccggttttgtaaccctgagttgagtgaaatagtcacaaaatggctaaagtcagatcagtggacaagtaatcttgatctgctcactggacttcgcaaatttgcagatgatgaaaagcttcatgctgagtgggcagcagccaagttatcttgcaagaagcgcctggccaaacatgtgttggatgtgacaggtgttacgattgatccaactagccttttcgatatacagattaagcgcatacatgagtacaagagacagctcctaaacatattgggagctgtttaca

SEQ ID NO: 49228 - DNA, 303 bp, Zea mays
agctgacgcaaacatgcagatctttgtgaagaccctcactggcaaaaccatcacccttgaggtcgagcccagtgacaccattgagaatgtcaaagccaaaattcaagacaaggagggtatcccacctgaccagcagcgtctgatatttgccggcaaacagctggaggatggccgcactctctcagactacaacatccagaaagagtccaccctgcacctggtgttgcgcctgcgaggtggcattattgagccttctctccgccagcttgcccagaaatacaactgcgacaagatgatctgccg

SEQ ID NO: 49229 - DNA, 304 bp, Zea mays
cagatcttgtcttcataacagctgggatgggagggggtactggatctggtgctgctccagttgttgcccagatatcaaaggaagctggttatcttactgttggtgttgtcacctatccattcagtttcgagggccgtaagcgctctgtacaggcattggaagcactagagaagctggaaaagagtgtagacacacttattgtgattccaaatgataagttattagatgttgcggatgaaaacatgcccttgcaagatgcatttctccttgcagatgatgtccttcgtcagggtgttcaaggaat

SEQ ID NO: 49230 - DNA, 300 bp, Zea mays
cccgtttctcccttctctgggctcggagaatcggagatggcgtccagcgcctctcggttcatcaagtgcgtcacggtcggcgacggtgccgtgggcaagacatgtatgctcatctgctacaccagcaacaagttccccactgattacatacccacggtgttcgacaatttcagtgcaaatgtcgttgtggatggcaccacggtgaatttgggcctgtgggataccgcaggcaggaagattacaaccgactgaggcctctaagctaccgtggtgcagatgttttcgtgcttgcattctcac

SEQ ID NO: 49231 - DNA, 299 bp, Zea mays
gcaggtctgaagggtgctggcatgggcacaggagattactcaaacccgtttgatctctttgagtccctgtttgaagggtttggtggaatgggtggaatggggggtggccgtgctgctcggaacagaccaatgcaaggtgatgatgagagctacaatctggtactcaatttcaaggaagctgtgtttggtgtggagaaggagattgagataaccagattggaaggctgtaacacctgcgacggaagtggtgccaagccaggtacaaaggcaacgacatgtaaaacttgtggaggtcaggg

SEQ ID NO: 49232 - DNA, 296 bp, Zea mays
atctatgagggctatgccttgccccatgccatcatgcgtctggatctggctggccgagatctcactgactacctcatgaagatcctgacttttcttcggctattccttcgttactactgctgagcgtgagattgtccgggacatcaaggagaaactgtgttatgtagctctggactttgaaaatgagatggccactgccgcatcctcatcctcccttgagaagagttacgagttgcctgatgggcaagtgatcaccatcggaaatgaacgtttccgctgcccagagaccctgttcc

SEQ ID NO: 49233 - DNA, 296 bp, Zea mays
catcaccaaatgggatccttttattccgagaggttagcaagataatcgtggcttacgggtcacgaattctattgcttcctaatggcacagacatttatggaagtaaatacaaaggcatatggatctcactgactgttctttcaagggctttgtgtgggaattatgtcaattttggcgtatttgagctctatggtgacagagcacttgctgatgcccttgatatatctctgaagatgaccctctcagttccattatctgatatattggcattcaaaaagctgtcgaaagcgtacttt

SEQ ID NO: 49234 - DNA, 300 bp, Zea mays
gaacgatcggatctagcagaattctctcaacctcatcggcggcggcgaagagcgtgcggatcggagatggagacaagcgggtggaggaggagagcggcggcgcgggcctcctggagccccgccacggtgtacctgtggctcgcgctcgccgcagcagcactgacgctcgcccaggctaagaaggacctaacggaggttacccacaaggtctacttcgatgtcgagattgacggcaagcccgcaggtcggattgtcatggggctttttgggaagactgttcctaagacagcagagaacttc

SEQ ID NO: 49235 - DNA, 298 bp, Zea mays
  unsure (1)..(298): unsure at all n locations
cacagctcacagcaaacaccgcgaaccgcccccgctcccaaacccgaccgagcaaagcgcaaagccccccaaccgcggatcaatccgcagcatcgatggcgcccaaggcggagaaaaagccggcggcgaagaagcccgcggaggaggagcccgcgaccgagaaggcggagaaggctccggcagggaagaagccgaagcgtnagaaacgcctccccgcgggcaagtccggcgccggcgagggcaagaagggcaagaagatagccaagaagagcgtggagacctacaagatctacatctt

SEQ ID NO: 49236 - DNA, 291 bp, Zea mays
cacagaagcggcggcggcggagcaaacgcaggcgaaggcgagggtgtgagggaaggagcaccagccatggtgcacgtcaacttctaccgcaactatggtaagacgttacagaaaccaaggcgtccttatgagaaggagcgtcttgatgctgaactgaagctggtcggtgagtatgggctgaggtgcaagcgtgagctttggagggtccagtatgcactgagcaggatccgtaatgctgcaaggcacttgctcacccttgacgagaagaacccccgtcgtatctttgagggt

SEQ ID NO: 49237 - DNA, 291 bp, Zea mays
agctgctctcgtccctagaaataaagcagctcctccgcggggcggcgaactgctactcatcgccaaaaccctagccccgatccggtcgaggagcactacttcttggcatggcgggcacccctagccaggcaagcctcctgctccagaagcagctcaaggatcttgcgaagaaccccgtggatgggttctccgcagggcttgtagacgatagcaacgtcttcgagtggcaggtcaccatcatcggcccgcccgacaccctatatgatggaggctacttcaatgcaataatga

SEQ ID NO: 49238 - DNA, 288 bp, Zea mays
cggactgtggtggacagtgagggccggacagagactacagtaacccgacacgaagcagatagcagtcctaggggtgatccagaatcaccaagacctccagccctggatgatgccttttccatcctggacttattcctgggacgttggttccggtcccggtagccttgttaaccctcagaggccttcaagtcctttccacctctcacccattgcccaccattaataagcttagcttctcttgccacctcaggggcttggatatgtggaatagtgaactggggccatgtc

SEQ ID NO: 49239 - DNA, 293 bp, Zea mays
aagaagcagatctcgtgctctatgcagttgacaaaccgaacagatgactacatcggctttaaggttaagacgacgagcccgaagaagtactgtgtccggcccaacagcggcatcgtgccacctcggtccaccagcgatgtcattgtgacaatgcaagcacaaaaggaggcgccaccggacatgcagtgcaaggacaagtttcttgtgcaaagtgtcgttgtggcggaagggaccttagtcaaggacatcactggcgatatgtttaccaaagaatcagctaatgtggtggatga

SEQ ID NO: 49240 - DNA, 294 bp, Zea mays
ggcaaacgcggctgcgagctcggcgcccctctcccactccccagcagccgccagcccgcacacccctccctcgcgcgctcagggtttcggaatggaagccgaggcggcggccaagaggacgcgggacagcggggaggacgccgccgcggcggggatctccgccgtcatcccgggaaagttctccgagatcagccccatgtggcccggtgaggcgcactctttgaaggtggacaaggtgctgttccaagggaagtcagactaccaaagcgttatggtctttcagtcctctacgta

SEQ ID NO: 49241 - DNA, 294 bp, Zea mays
ccagagcagtgcaaggctctcgagacagtacttccaccaaggccttcatccaagctgacagacatggagatagatgaatgcgaggagacgactatgcatgatgtgaacaacatcgaggaagagatgcgcaggaagcaagctcacgctgcccaggaggcgtacgaggaggacgacgagatgccgggcggagccagagagtgcagtgcgcgcaacagtaagcagactatcatcaaggcaattgggaggggtggtgccttaaagcatgggagtgatctctggttttgctgtcgccga

SEQ ID NO: 49242 - DNA, 309 bp, Zea mays
ctcgagccgcgctcaagttctcgcgcccagagccaaatttttctccactcaatcactgcagccatggacgccagcggagccggtagcaaggcgaagaagggggcggctgggcgcaaggctggcggccccaggaagaagtcggtgtcgcggtccgtcaaggccgggctgcagttccccgtcggccggatcgggcgctacctcaagaagggccggtacgcgcagccggtgggcaccggcgcccccgtctatctcgccgccgtgcttgagtacctcgccgccgaggtgctggagcaggccggcacgcggcga

SEQ ID NO: 49243 - DNA, 313 bp, Zea mays
cgacgatgaccggactgtgtgccgggagatccgccacaactccacgggctgcctgctgatgatggaccagtgtgacaagtgccgggagatctagtctgtggactgttccagcaataacccctcccaggctaagctgcggctggatctcgacgaatccctccaggtcgctgagacgttgaccaggacatacaacgagctgctaaagtcctatcagtggaagatgctcaacacctcctccttgctggatcagctgcacgagcagtttaactgagtgtcccggctggcaagcctcacgcaaggcgatgaccagtac

SEQ ID NO: 49244 - DNA, 317 bp, Zea mays
ggccgccgagcgggtcgcacatgcggacctctccctcgacgccgccttcttcgacggcctctcgctgcagggaggcggcggcggcgggggggtaagagggggcgtggcggggcacaagaggagcggctccatggacggggacacctcgccgttcgagggcgagtcggcgccgccgtccgtgctgccggactacgccaagaaggccgtgcccgacgacaagctcgccgagctcgcgctcctcgatcccaagcgcgccaagaggatcctggcgaaccggcagtccgcggcgaggtccaaggagaggaagatcaagtaca

SEQ ID NO: 49245 - DNA, 316 bp, Zea mays
cactggcaaccccagggctctccggaggctgaggaccgcttgtgagagggcgaagaggactctgtcttccactgcccagaccacgattgagattgactcgctgtatgagggcatcgacttctactccaccatcacccgtgccaggtttgaggagctcaacatggacctgttcaggaagtgcatggagcctgttgagaagtgcctgagggatgccaagatggacaagagcaccgtccatgacgttgtacttgttggtggctccactaggatccccagggtgcagcaactgctccaggacttcttcaacggcaaggag

SEQ ID NO: 49246 - DNA, 315 bp, Zea mays
caaccccagtttctctcatcaaatgcctgagatccatcaagaaacacgcctttgttgcatctccctatcctgtcatcataacacttgaagaccacctcccctctcaactccaggagaaagttgccaagatggttgttgaagtatttggcaacatactgtactacccgccagacgacacccatgagctcaaagaattaccatcacctgaacaactcaaaggacgtgtcctcctctcaacaaagccccccaaggagtacctcgaaaccaagcttagtgactccacgaaggagggtgatgctgacctccatcttggca

SEQ ID NO: 49247 - DNA, 315 bp, Zea mays
agcagccgagcgactaagcgaagactcccttttccccgagcacaagagaaccatggcggcggcggcagtttacggcggcttcaaagggaagcttggcgtcgaggatgcccccgagctgcagctcaaccgcatccgcatcacactctcatccaagaacgtcaagaacttggagaaagtttgtgcggatttggtaaagggagccaaggacaagcatttgagggttaagggacctgtccggatccctactaaggttctccacatcaccactcgcaagtccccttgcggtgaaggaacaaacacatgggatcggtttga

SEQ ID NO: 49248 - DNA, 249 bp, Zea mays
cccagcacgacgagacagtcaccaacgacgagattgctgggtagagatgaggactgtgtgcacacggatgggaaccatggcgccaccctcatctctacccagcacgacgagacagtcaccaacgacgagattgctgctgacctgaaggagcacgtcatcaagccagtcatccccgagcagtacctcgacgagaagacaatcttccacctcaacccgtctggccgcttcgtcatcggcggacctcacggc

SEQ ID NO: 49249 - DNA, 297 bp, Zea mays
ccacaatatggcggataaggagaagaagcattatgtggagcagctgtggacttgtccaagtacatcgacaagacgatccgggtaaagttccagggaggccgcgaaccagtggaatcctgaagggcttcgacccactcctcaaccttgtgctggacggcaccattgagtacatgcgagaccctgacgaccagtacaagctcacggaggacacccggcagctgggcctcgtggtgtgccggggcacgtccgtggtgctaatctgcccgcagacggcatggaggcctcccccaccccttc

SEQ ID NO: 49250 - DNA, 85 bp, Zea mays
attcgacagccagtaccacttctcttgccagtgcacagctgacctgattgccatgaaccacaccgatttcatcatcaccagcaca

SEQ ID NO: 49251 - DNA, 310 bp, Zea mays
atttcatacacaaaggctgtggagctcttgaaaaatgttaccgacaagaagtttgacaacaaagttgaatggggaattgatttagcctctgagcatgaaaggtatttaacagaggatatatttaagaagccagttattgtctataactatccgaaaggaataaaggcattttatatgagactcaatgatgatgacaagacggtggctgcaatggatgttcttgtgcctaaggttggtgaattgattggtggaagccaaagggaggaacggttagatgttctgaaacagaggatacttgatgctggcctgc

SEQ ID NO: 49252 - DNA, 308 bp, Zea mays
cgccgatccgagcgcgcagatcgcggaagcccagcggctcagagtccagggggagggagctcgcggcggctgaggaaggcgttcaccaccgtctcggatttcattgaggaagagatggggctctcctttgggaagctgttcagccgcctcttcgccaagaaggagatgaggattctcatggtcgggctcgatgccgccggtaagaccaccatcctctataagctcaagctcggcgagatcgtcaccaccatccccaccattggattcaatgttgaaactgttgagtacaagaacattagcttcaccgt

SEQ ID NO: 49253 - DNA, 304 bp, Zea mays
ctcgaacccgagaggacccctaacaccaaaacgcccccggaggcagctaggagagctcgaatcaccagccatgtcggagcacgacctcacggcgctgatggcggcgcagctggaccgccacctggtgttccccctgctggagttcctccaggagcggcagctctactcggagtcggagatcctggaggccaagatccgcctcctcagcggcaccaacatggtcgactacgccatggacatccacaagtccctctacggcaccgacgacgtgcccgaggacatggtgaagcgccgcgccgaggtc

SEQ ID NO: 49254 - DNA, 301 bp, Zea mays
cccacacagaagcggcggcggcggacaaacgcaggcgaaggcgagggtgtgagggaaggagcaccagccatggtgcacgtcaacttctaccgcaactatggtaagacgttcaagaaaccaaggcgtccttatgagaaggagcgtcttgatgctgaactgaagctggtcggtgagtatgggctgaggtgcaagcgtgagctattggagggtccagtatgcactgagcaggatccgtaatgctgcaaggcacttgctcacccttgacgagaagaacccccgtcgtatctttgagggtgaggcg

SEQ ID NO: 49255 - DNA, 299 bp, Zea mays
cggagctctccttcccggtctcctccgcccgttgccttcgtcccctccatctccggctgcgtcgccggcgagcccgacaccgcgaatcggatccgccgacaaggtgagagggaagagatggggctcacgttcaccaagctgttcagccggctgttcgccaagaaggagatgcggatcctgatggtgggactcgacgccgccggaaagaccaccatcctctacaagctgaagtccgccgaatcttaacaacaatccccacaatgggtttcaatgttgaaactgtggagtacaagatcatc

SEQ ID NO: 49256 - DNA, 302 bp, Zea mays
cgtctgctcgcatttcctcccaatccatcccgcctccaaacccgaactccaagtcgccccgcatcgatggcgcccaaggccgagaagaagcccgcggcgaagaagccggcggaggaggagcccgctgccgagaaggcgccaaggccgggaagaagcccaaggcggagaagcgtgtcccagcaggcaagtccgccggcaaggagggcggcgagggaaagaggggccggaagaagggcaagaagagcgtggagacctacaagatctacatcttcaaggtgctgaagcaggtgcacccggacatc

SEQ ID NO: 49257 - DNA, 301 bp, Zea mays
gttgcagagtccagagtccagacgccagacgccctctacttctcttctctctagttatacatttcaaactcttggccgccgcagcggtctctgttcgccgcgccccgccgcagaaatggcgctgccgaatcagcaggttgtggattaccccagcttcaagctcgtcatcgttggcgacggtggaactggcaaaaccacatttgtgaagaggcatcttactggcgagtttgagaagaaatatgagcccaccattggtgttgaagttcaccctctggattttagcactaactgtggcaaaatt

SEQ ID NO: 49258 - DNA, 305 bp, Zea mays
gggagggccaggatcctattgttgagggtatagaggacaaaagtgctgcatggacattccttccaaaagagaagtggtgaggagatccaagtcctaagatataagcatggggagaagtatgaaccacactatgattacttcactgacaatgttaacactgtccgtggtggtcatcgctacgctactgttcttttgtacttaactgatgtaccagaaggaggggaaacggttttccccttggctgaggagcccgatgatgctaaagatgcaaccttgtcagaatgtgctcagaaaggcattgcagt

SEQ ID NO: 49259 - DNA, 301 bp, Zea mays
caacatcttagcgaagaagtgaggagaaggttctacaagaactggtgcaagagcaagaacgatgctttcacaaagtatggctctcaaatatgaacatgatgctggcaagaaggaaattcagctgcagcttgagaagatgaagaaatatgcttctgttatccgtgtcattgctcatacccagattaggaagatgaagggtttgaagcagaagaaggctcacctgatggagattcaggtcaatggtggtaccattgctgacaaggtggactatggctacaaattctttgagaaagaggtccct

SEQ ID NO: 49260 - DNA, 299 bp, Zea mays
gtctcctggacaacgaggctatctatgacatatgcaggaggtcccttgacatcgaaaggccaacctacacacacttgaacaggctgatctcacagatcatatcatctctaaccacctccctgagtattgatggtgctatcaatgtggatgtcaccgagttccagaccaaccttgttccatacccacgtatacatttcatgctttcctcatatgcccctgtaatctctgctgagaaggcttaccatgagcagctctctgttcctgaaatcaccaatgccgtctttgagccctcaagcatg

SEQ ID NO: 49261 - DNA, 301 bp, Zea mays
gtctgggttctatgacctccaattggctagagatgagtacaggctctcttgtggtgcagcaggcatgaaccgtgatctgttgtggcgatttatggatgtccagaccaggcttatcacccccatttgcccacactatgctgagcacgtgtggcagaagatcatgaagaaagaaggctttgcaataaaagctggctggccagccgcggacaccccggatcccacactgagaattgcaaataaatacctgcaggattccatagttttgatgaggaaactgcttcagaagcaagagtctggttct

SEQ ID NO: 49262 - DNA, 299 bp, Zea mays
tacttaatgtggttgatgtttcgtatggtggcgagaacggtttcaaccaagctattgaattatctgctgagattctagcaaatgtgaaattcattcaagaaaagaagttaattggcaagtattttgaagagatcagtcaggatactgggaaatatgtctttggtgttgatgacactctgaaggctcttgaaatgggtgctgtcgagaccctgattgtgtgggaaaatctggatatcaacagatatgtgatcaagaacagtactactggggaaattattataaaacatctgaacaaagag

SEQ ID NO: 49263 - DNA, 303 bp, Zea mays
cgatcaccaacaccgtcattggcgtcggtgacgactgcatctccatcggccccgggacctccaaggtgaacatcaccggcgtgacctgcggaccctggccacggcatcagcatcggcagcctagggcggtacaaggacgagaaggacgtcacggacatcaacgtcaaggcttgcactcttaagaagacgatgttcggcgtccgcatcaaggcgtacgaggacgccgcctccgtgctcaccgtctccaagatccactacgagaatatcaagatggaggactcagccaaccccatcttcatcgac

SEQ ID NO: 49264 - DNA, 299 bp, Zea mays
ccgaggttaaggattctctggttaagaacataaggaggaggatgacaccacagcctctcaagatccgtgctgatatagagatgaaatgcttccagtttgatggagtgctccatattaagcaagctatgaagacagctgaagctgcgggcaatgataactgtcctgtgaagattaagctagttgctcctccactttatgttttgaccacacagacccttgacaaggatcaaggcatttcagttctcactactgcagtcaaggcttgtacagcagagattgacaagtaccaaggaaagtta

SEQ ID NO: 49265 - DNA, 282 bp, Zea mays
agccgccgccgctgctcatctcacatccctcgagaagacgcctgctcctcgccgatcgatacgatggccgtcttctccgacctccacaccgccgacggcctcaagtccctcgaggctcacctcgccggcaaaacctatgtgtctggtgactccattactaaggatgacattaaggtcttcgccgcggtgccgtcgaagcctggcgctgagtttcctaatgccgcccgctagtacgagaccgtctctgcggctgtagcctcaagattccctggtaaggctgtt

SEQ ID NO: 49266 - DNA, 299 bp, Zea mays
caagagtgtatgcagcaagtatggagtttctgggtaccccacaattcaatggtttcccaaaggttccctggagccaaagaagtaatgagggtcaacgttctgtggaagcccttgcagaatttgttaacagcgaacaggtaccaatgtcaagatagctgccattccttcaagcgtcgtggttctgacttcagagacctttgactcaattgtccttgatgaaaccaaagatgtccttgttgagttttatgccccatggtgtggtcactgcaagcatcttgctccgatttatgagaagctgg

SEQ ID NO: 49267 - DNA, 298 bp, Zea mays
tacttaatgtggttgatgtttcgtatggtggcgagaacggtttcaaccaagctattgaattatctgctgagattctagcaaatgtgaaattcattcaagaaaagaagttaattggcaagtattttgaagagatcagtcaggatactgggaaatatgtctttggtgttgatgacactctgaaggctcttgaaatgggtgctgtcgagaccctgattgtgtgggaaaatctggatatcaacagatatgtgatcaagaacagtactactggggaaattattataaaacatctgaacaaaga

SEQ ID NO: 49268 - DNA, 301 bp, Zea mays
gcaaacagcttgagcttgccaggacgttccagtttcctactctcaggcagccacccgcatcgtttcttgcaacgatggaagagtacatcagagaagcaccccgaccctcgatcaagagtgaggagagcgaggagccgaagctactgacctacgagcaagaagctccagaggaacccgaaaatgctgtggaagaggagaaagaagaaccgagtcaaaaaccagaacctcagcctgtgcctgatccagaaccccacccacagcaaacgactggagatctactaaacctggaagcagaggtgaa

SEQ ID NO: 49269 - DNA, 258 bp, Zea mays
gtttcccccctctcatgtcccctcctcctcccgctgcccctggctccccaagcctcgacgcccggctaaggtttttgcctccttcccgccgccgctgtgtcagcgagcgagaccgaggggtagagaaagagcggtgcttagccacccatgtcgctgcgtccgagcgcgcgggtcgaggtacggcggaaccgctacaaggtggcggttgacgcggaggatgggcggcggcggcgcgaggacaatatggtggagatccgc

SEQ ID NO: 49270 - DNA, 296 bp, Zea mays
agcgatcccaagaaacgtgcaatctatgatcagctaggagaagaagggctccaggggcagccgccccacggagcaagaggttctggagcattccccttcttccctagcggggctcattccaccgctccccattttaatcacaggagtgcggatgatatatttaaggagttctttggatcccctggcatgggtggcatgagagcggaaccaggattccagaggtcaatgtttggcaacgatatcttctcttcacgctttggcgctgagggttccacaagtatgcagcagccaccacg

SEQ ID NO: 49271 - DNA, 297 bp, Zea mays
cataaacaaaacccagtccgttgttcttcccccggcacgcctagcgccagtcagcaaccttccactccctccctccggcgccatggcgcgaaagaagatccgggagtacgactccaagcgcctcctcagggagcacctcaagcgcctcgcgggcatcgacctcaccatcctctccgcccagatcacgcaatcaacggacttcgcagagcgtgtgagccagcagccatggctgtccaccatgaagctagtggtgaagcccgatatgctgttcgggaagcgtgggaagagcggcctcgt

SEQ ID NO: 49272 - DNA, 297 bp, Zea mays
gccttgtgcctcctggtcctcttctgcatcgtgcatggtgagaaggaagagtcaaagggcatcgatgcgaaagcgtccgggcctggtgggtccttcgacatcaccaagttgggcgcctccggcaatagcaagacagacagcacgaaggctgtgcaggaggcatgggcatcggcgtgcggcggcactgggaagcagacaatcctcatacccaagggtgacttccttgtcggacaactcaacttcacaggcccttgcaagggcgacgtgaccatccaggtggatggcaatctgctggcg

SEQ ID NO: 49273 - DNA, 298 bp, Zea mays
gcatcgatcacgacaagatggcgtgcacaaacaatgcgatgagagccttgttcctcctggtcctcttctgcatcgtgcatggtgagaaggaagagtcaaagggcatcgatgcgaaagcgtccgggcctggtgggtccttcgacatcaccaagttgggcgcctccggcaatggcaagacagacagcagcgaagctgtgcaggaggcatgggcatcggcgtgcggcggcactgggaagcagacaatcctcatacccaagggtgacttccttatcggacaactcaacttcacaggcccttg

SEQ ID NO: 49274 - DNA, 290 bp, Zea mays
gggtgcggtgcaagtaccccgctgggcagaagatcgtgttccacatcgagaagggctgcacacccaactacctggccgtgctggtgaagtttgtggcggacgatggcgacatcgtgctgatggaaatccaggacaagttgtcggctgagtggaagcccatgaagctctcttggggcgccatctggaggatggacactgccaaggcgctcaagggccccttctctatccgcctcaccagcgagtccggcaagaaggtcatcgctaaagacatcatcccggcgaactggaga

SEQ ID NO: 49275 - DNA, 292 bp, Zea mays
atcgactccccgaggctcttacagaaacgctcaactacctgaagcggagatcaactgctgacaagtccttttcatatgaggtattgattgtcgatgatggtagcactgatgggacctctaaagtcgctttcagttttgtaaagaaacacaagattgataatgttagagttcttctgacttggaagaaatcatgggaaaggtgaagcagtccgaaaaggaatgcttcattcacgtggtgaactattactcatgcttgatgctgatggtgcaactaaagtgaccgatttggaaa

SEQ ID NO: 49276 - DNA, 291 bp, Zea mays
cacatttatctctgacaagaaggcatttggaggtagcacccccaagactgtttctgagaaggagtggtggcaagccacagacaccaagttccaggcctggcctcgcactgctgggccaccggttgtcatgaaccccatcagccgccagaacttcatcgtcaagtccactgagtaggtttgggctggagaagctggttctgcgacttggtgccgccatgaagccagagttccttttctaaggtcttaatcaattgtaataaaacgaaatacagtcaggatttttttgtgatt

SEQ ID NO: 49277 - DNA, 295 bp, Zea mays
aattttggtgaagatgagcagattgatgcaagagagctgcaagagagaatgcaggttgttcaaaaggatcgggaagaaaaacttgcagagacactgaaaaaccggctacacatctatgtgcaaggaaataaggcagaattcatccagcatgctgaagcagaggtgtccaaacgtagaaatgcagcatatggagttgttatgttgaacactattggctatgtatattcaaggcaagctgcaaaagaacttggaaagaaagtgatgtttttgggtgttccatttattgccgaatggt

SEQ ID NO: 49278 - DNA, 278 bp, Zea mays
gcagcaatgagactgacagcgacgatgatgccacagctgcgtagctcgtcgcgctggtcctcgtggccacggccatagccgccgctcccggcgttgggtttgtcgtcaccggccgcatctactgcgacaactgccgcgccgcgttcgagcacaacgtgtcccacgccatccaaggcgcgacggtggagatggagtgccgccacttcgagtcgcagcaggtccacgacaaggcggatgcgacgacgggccccggcggctggtacacgatggagatcagc

SEQ ID NO: 49279 - DNA, 295 bp, Zea mays
attgaaatccaagccctattctacatggctttaagatgtgctctccaaatgctcaagccagagggtgaagggaaggatttcatagaaaagatagggcaacggctacatgcactaacttaccacatgaggaattacttctggctagattttcaccagctgaataacatatacagatacaaaacagaagagtattcccacacagctgtgaacaagtttaatgtcattccggattccattcctgattgggtgtttggtttcatgccatgtcgaggaggctactttcttggcaacgtca

SEQ ID NO: 49280 - DNA, 304 bp, Zea mays
gaacgttatcaagctcaaggagatcgtcacctccccaggcccagagcgggacgagcaagggaagccaattgaccgttaacaagtacaaggggagcatttacatggttttcgagtatatggaccatgatctcaccgggcttgctgatcggccaggaatgcggttcactgtgccgcagattaagtgttacatgaggcagctgcttacaggcctgcactattgtcatgtcaaccaagttctgcatcgagatatcaaaggatctaaccttttgatagacaatgagggtaacttgaagcttgctgattt

SEQ ID NO: 49281 - DNA, 307 bp, Zea mays
agcgagactcctgtgtgtcttcttttctctgtgaatgcaagtggccagtttgtcggacttagctgaagataggtgagtcagtgttagaagtgggacaaaacagtagagcattggcaacaggacaaatggactggttgtatccctgtcaagtggcacattgtgaaggatgttccaaacagcttgctgaagcacatcattcttgagaacaatgaaaacaagccagtgacgaacagcagagatacacatgaggtgaagcttgagcaaggccttcaagtgcttaagattttcaaggatcatgtctgcaaga

SEQ ID NO: 49282 - DNA, 301 bp, Zea mays
ccccactcttcgcctccgttctggagcagctagggttccgtcctcgatccgatccgccgagtgcacagcacctttccccactccgatcgaatcgatggccgccgagggcgagaagaagatgataaccctcaaaagctccgatggcgaggagttcgaggtggaagaggcggtggcgatggagtcgcagaccatccgccacatgatcgaggatgactgcgccgacaacggtatccctcttcctaacgtcaactccaagatcctatccaaggtaatcgagtactgcaacaagcacgtacatgcc

SEQ ID NO: 49283 - DNA, 291 bp, Zea mays
gtcatcgatctcgtttcaaatccatccatcctcgtttcctccgtcccgcagcatctcaaccccatggccaagatcaagatcgggatcaatgggttcggcaggatcggaaggctggtggccagggtggccctgcagagtgacgatgtcgagctcgtcgccgtgaacgaccccttcatcagcaccgactacatgacctacatgttcaagtacgacactgtgcacggacagtggaagcaccatgaagtcaaggtgaaggactccaaaacccttctctttggtgagaaggaggtt

SEQ ID NO: 49284 - DNA, 290 bp, Zea mays
agaagacgacggtggacgtgtgggcgagcctcaagactcgtttcgtcggggcggattgggtcatgacggcgcgcctccccacgctcaagggggagttcgacaagctatgcatggaagatagagagcagttggacgactacgctgacaaaataagcggcatgtcgcgcgttacgtcgggcttggcacgatgctcgacgacgacgccatggtgaagaagctcctcaacaccatcctggatcggctcttcccagccgttgcgggcatcgagcagttctgcaacgtcgagatga

SEQ ID NO: 49285 - DNA, 292 bp, Zea mays
caattggccatgttgctgctacagtgagcatgtctaaggtggcagtgtcattcacacacataattaaaagcgcagaacctgcattcagtgttttggtgtcaaggttcttccttggggagacgtttccaattccagtatatctttctcttcttccaatcattggtggttgtgctctagctgctgtcacagagctgaactttaatatggttggatttatgggtgccatgatatccaaccttgcatttgttttccgcaacatcttctcgaagaggggcatgaaggggaagtccgt

SEQ ID NO: 49286 - DNA, 302 bp, Zea mays
gtacgaagccctcagtcctccctcacacaccgaaccgagcgcaccatgtcgtcggcggctggaggagtggaggagacggtgcgggcgtcgcacatcctcatcaagcacgagggttcccgccgcaaggctcctggaaggaccctgacggccgcatcatctccgccaccacgcgcggcgacgccgagcgcgcctcctggacctccgcaaccagattctctccggccaggccaacttcgccgacctcgccgctcggcactccgactgctcgtccgcgcgacgcggtggggacttaggtacctttg

SEQ ID NO: 49287 - DNA, 289 bp, Zea mays
gcgaaaaggacaggagccaagaaggaagaatcggcggcagcacctggtggtgctgctggaggcagcggcgggacgttcgacatctccaagctcggcgcgaccagcgacggcaagacggactgcacaaaggcagtccaggacgcgtggacgtcagcgtgcgaacgaccggaagcgccacggtggtgatccccaagggcgactacctggtcggccctctcaacttcactgggccatgcaagggcagcagcatcgccatccagctggatggcaacctgctgggatcaaacga

SEQ ID NO: 49288 - DNA, 303 bp, Zea mays
tagtcgacgagctgatcgccgaactggaccagatgtgtgacttcgatggtgagctgaagagtccttgcaggaactggttggtcgtctacactgacaacgaaggcgacatgatgctggtcggcgacgacccctggaatgagttctgtgacatggtccacaagatcttcatctacacaagggaggaagtggagaggatgaacccaggtgccctaaactcgaggctcgaagactgcctgtctgactcgctgggaagagggctggcttccaaagagccccggagcggcccctcgacttcggctgtcg

SEQ ID NO: 49289 - DNA, 288 bp, Zea mays
cgcatttcgaataacacaggtgagcgcgacgatgggatccctcgctaataacatcatggtcgtgggcgccgtccttgcggcgctcgtcgccggcgggtcgtgcgggcccccgaaggtgccacccggccccaacatcaccaccaactacaacggcaagtggctcaccgctagggccacctggtacggtcagcccaacggtgccggcgctcctgacaacggcggtgcgtgcgggatcaagaacgtgaacctgccaccctacagcggcatgacggcgtgcggcaacgtccc

SEQ ID NO: 49290 - DNA, 288 bp, Zea mays
ggcatttcgaataacacaggtgagcgcgacgatgggatccctcgctaataacatcatggtcgtgggcgccgtccttgcggcgctcgtcgccggcgggtcgtgcgggcccccgaaggtgccacccggccccaacatcaccaccaactacaacggcaagtggctcaccgctagggccacctggtacggtcagcccaacggtgccggcgctcctgacaacggcggtgcgtgcgggatcaagaacgtgaacctgccaccctacagcggcatgacggcgtgcggcaacgtccc

SEQ ID NO: 49291 - DNA, 291 bp, Zea mays
gatgggtgatattgtgcacacactgacaaataggaggtggttagagaagtgtgtaacttatgctgaaagtcatgatcaagcattagtcggcgacaagactattgcgttttggttgatggacaaggatatgtatgatttcatggccctcgatagaccttcaactcctaccattgatcgtgggatagcattacataagatgattagacttatcacaatgggtttaggaggagagggctatcttaatttcatgggaaatgagtttggacatcctgaatggatagattttccaag

SEQ ID NO: 49292 - DNA, 292 bp, Zea mays
gatgggtgatattgtgcacacactgacaaataggaggtggttagagaagtgtgtaacttatgctgaaagtcatgatcaagcattagtcggcgacaagactattgcgttttggttgatggacaaggatatgtatgatttcatggccctcgatagaccttcaactcctaccattgatcgtgggatagcattacataagattcttagacttatcacaatgggtttaggaggagagggctatcttaatttcatgggaaatgagtttggacatcctgaatggatagattttccaaga

SEQ ID NO: 49293 - DNA, 330 bp, Zea mays
cgtccttttgagtctcatgcaaaccgaggattcggctcgagcttggagacttctgtctgaagaaatatggaataatttctatgcctgatgttttctaccatcgcatcacggataaggatgaatttgttgtgctggcgactgacggggtgtgggatgtgctttccaatgctgaagctgttagcatcatcagcaatgctccttcacaggcctcagcagctcgatttctggttgaatcggctcacagggcatggaggacacggtaccccacatcaaaaactgatgattgtgctgttgtttgcctctttctgaaaacagaagcagcaagtacat

SEQ ID NO: 49294 - DNA, 288 bp, Zea mays
cgctctggttggaaggtttggagaaactccccggctcgaggagatcgtgacattgagaggacgatgggagggcgcgcgctcctcctcctcctcctggtctcggcgttggtctttcagatccacgcctccgacccgctgctgtacgagccgttcgatgaggactttgaggggagatgggtcgtctccaagaaggatgaataccaaggtgtgtggaggcatgccaagagtgatggtcatgaggactatggcctccttgttagtgagaaggcaaggaaatacgccataatc

SEQ ID NO: 49295 - DNA, 283 bp, Zea mays
ctccattttctggtcgcctcctccgccactgccatctccctcctctgtcctccgtaccactcgtcttcgtctagccgccgaccgccaccaccatggcacccggcctctacaccgacatcggcaagaagaccagagatctgctgtacaaggactacaacacgcaccagaagttctgcctcaccacctcctcccccaatggcgtcgcaatcacagccgcaggaacaaggaaaaatgagtccatctttggtgagcttcacacccagattaagaacaagaaattgac

SEQ ID NO: 49296 - DNA, 288 bp, Zea mays
gtttcgagaaactcccggctcgaggagatcgtgacattgagaggacgatgggagggcgcgcgctcctcctcctcctcatggtctcggcgttggtctttcagatccacgcctccgacccgctgctgtacgagccgttcgatgaggactttgaggggagatgggtcgtctccaagaagcatgcataccaaggtgtatggaggcatgccaagagtgatggtcatgaggactatggcctccttgttagtgagaaggcaaggaaatacgccataatcaaggagcttgatgagc

SEQ ID NO: 49297 - DNA, 282 bp, Zea mays
cgcaccttagagccattgttagtttcggagattttgcaagcgagatgaaagcggaagctgagagattgggcgtctcctgcttttcttgggaagagttttcttcaatgggaaaacaagactaccaacttcccaataaacgtaaggaagatatctgtacaatcatgtataccagcggaacaactggagatcccaaaggtgtgataatcacaaacaaagctatcgttgctggtgttatgaccacagaacacctcctcaaagagaccgataaagtgatcacagaag

SEQ ID NO: 49298 - DNA, 162 bp, Zea mays
cgacgagctgatcgccgaactggaccagatgtttgacttcgatggtgagctgaagagtccttgcaggaactggttggtcgtctacactgacaacgaaggcgacatgatgctggtcggcgacgacccctggaatgagttctgtgacatggtccacaagatctt

SEQ ID NO: 49299 - DNA, 285 bp, Zea mays
acctgccgcgccatggctccaatttttgctgatatggccaagaagtccccaaatgttgttttcctgaaagttgatgtggatgaaatgaagaccattgctgagcaattcagcgtagaggccatgccaacattcctgttcatgagggagggcgacgtcaaggacagggtcgttggcgcataaaggaagagctagcaaggaagcttgaactacacatggcctcgtagatcagtgatgccgtaatgtagtattcgcctaaataagaggacgcctcgcctcaactctgag

SEQ ID NO: 49300 - DNA, 281 bp, Zea mays
aactgcccgcgttcccgtgcccgtactaaaaataaataacggactgccatctcctcgtgcactccgccaaccgccgccgccactcgccactctcacgtctcgcccatcccgccactgctgctctccagagtccaggcgacccaggctgcgcggtcgctcggtgttgttagtcccgaccgccgccggccatggcatccaccggcatcgccccaagagatgtatgtgttgttggcgttgcacgcacccctttgggtggtttccttggtgccttgtcttccttg

SEQ ID NO: 49301 - DNA, 280 bp, Zea mays
cacggctcagagtccagggggagggagctcgcggcggctgaggaaggcgttcaccaccgtcgcggattccattgaggaagagatggggctctcctttgggaagctgttcagccgcctcttcgccaagaaggagatgaggattctcatggtcgggctcgatgccgccggtaagaccaccatcctctataagctcaagctcggcgagatcgtcaccaccatccccaccattggattcaatgttgaaactgttgagtacaagaacattagcttcaccgtttgg

SEQ ID NO: 49302 - DNA, 295 bp, Zea mays
cgccatctgctatcagcgaggacgaaggcacaaacccctcacctccctcaaaccctagccctcgctctcccgcttgttcccgtcaccgccatcatgggctcagatgcggacatggaggactacgggttcgagtactctgacgaagagccggaggagcaggatgtcgacattgagaaccagtattacaactccaaaggtttggtcgagacagacccagagggtgcacttgctggttttgatcaagtggtcagtatggagcctgaaaaggctgaatggggatttaaagctcttaaac

SEQ ID NO: 49303 - DNA, 118 bp, Zea mays
accaaaaacacatcctgcgatcctcgaaccctccgccgagcatcgatcatgtcggcctactgcggcaagtacgcggatgagctcatcaagaatgctgcctacatcggcacccctggca

SEQ ID NO: 49304 - DNA, 284 bp, Zea mays
gtctccttgcccgcggcgccgctcgccgtttgcccctcgtctccgcaccgcgcgctgttgtccatccttgtgcagcaaaaatgacggctggctacattgttggctcactggtcggatcctttgccattgcatacctgtgtgacacatttatctctgacaagaaggcatttggaggtagcacccccaagactgtttctgagaaggagtggtggcaagccacagacaccaagttccaggcctggcgccgcactgctgggccaccggttgtcatgaaccccatcagc

SEQ ID NO: 49305 - DNA, 281 bp, Zea mays
cgctcggctctcgcccgcttgctttctctcccccgctccagcttatggcggaggcggcgcagcagccggcggcggcatcggggacatcctcgccacgagcgatcgggccttcctcgtccgcaactccggtgagcaggtgaagatcagcagcgttgaggcgagccctgtggccatctacttctccgcctcatggtgcccgccatgcaggaggttcacgcccaagcttattgaagtatacgcgaaactggcctcacagggcaagagcttcgaggtcgtctttg

SEQ ID NO: 49306 - DNA, 281 bp, Zea mays
cgatctcgtttcaaatccatccatcctcgtttcctccgtcccgcagcatctcaaccccatggccaagatcaagatcgggatcaatgggttcggcaggatcggaaggctggtggccagggtggccctgcagagtgacgatgtcgagctcgtcgccgtgaacgaccccttcatcagcaccgactacatgacctacatgttcaagtacgacactgtgcacggacagtggaagcaccatgaagtcaaggtgaaggactccaaaacccttctctttggtgagaagg

SEQ ID NO: 49307 - DNA, 292 bp, Zea mays
gttgcctttggacccgctgtgcagggaagcatcttgagcggcgagggtggtgacgagaccaaagatatcctcctccttgatgtggctcccctcaccctgggtatcgagaccgtcggtggagtcatgaccaagttgatcccgaggaacactgtcatcccgaccaagaagtcgcaggtgttcaccacctaccaggaccagcagaccactgtctccatccaggtctttgagggtgagcgcagtatgaccaaggactgccgtcttctcggcaagttcgacctcaacggcattgcgc

SEQ ID NO: 49308 - DNA, 278 bp, Zea mays
cgacaagatggcgtgcacagacaatgcgatgagagccttgttcctcctggtcctcttctgcatcgtgcatggtgagaaggaagagtcaaagggcatcgatgcgaaagcgtccgggcctggtgggtccttcgacatcaccaagttgggcgcctccggcaatggcaagacagacagcacgaaggctgtgcaggaggcatgggcatcagcgtgcggcggcactgggaagcagacaatcctcatacccaagggcgacttccttgtcggacaactcaacttca

SEQ ID NO: 49309 - DNA, 279 bp, Zea mays
ggttgaaagattgttgtcttcggaacagaaggctacagattatcgaacaccagatgatggagctgcaccagatcatcggccaactaatgcttgtataagaattgtagcctatctctctcgtgttcttgaggttgcattcagtgcccttgaaggcctcaacaaacagtcctttttgactgagctgggaaatcgcttgcataaggggctgcttaatcattggcagaagttcacatttagtcccagtggtggcctacggttgaaacgtgacataactgaata

SEQ ID NO: 49310 - DNA, 292 bp, Zea mays
accaacgtcccaaagctgggggtgatgctcgtcggatggggcggcaacaacgggacgacgctcacggccggggtgatcgccaacagggaagggatttcgtgggagacgaaagagaaggttcacaaggccaactacttcggctccctgacgcaggcttccaccatcagggtcggctcccacaacggggaggaggtctacgcgcctttcaagagcctcgtgcctatggttgacaccaactctatcgtgtttggtggatgggacatcagcaagctgaacatggccgacgccatgg

SEQ ID NO: 49311 - DNA, 248 bp, Zea mays
atggacttgagttcagtgatgtatacacagctcttggaagtgaggttacttttgttgaagctcttgaccagctgatgcctggatttgatcctgaaattgcaaaattagcccagagagttcttatcaatcctcggaaaattgactatcacactggtgtttttgcaagcaagattactcctgcaaaggatggaaaacctgtgctcatcgagcttattgatgcaaagacaaaggagcacaaagagaccctt

SEQ ID NO: 49312 - DNA, 248 bp, Zea mays
aggagggtcccttacatctaccctctatacggtctgggagagctccctcaggcctttgcccgcctgagcgctgtttacggtggcacgtacatgctgaacaagccagaatgcaaggtcgagtttgatgagagtggaaaagcgtatggagtcacttctgaaggggagaacgccaagtgcaagaagatcgtctgcgatccttcgtatttgccagacaaggtgaagaaggttggaagggtggcccgcgcgat

SEQ ID NO: 49313 - DNA, 255 bp, Zea mays
aaggcagagaaagagagagagagagagagatggatgaggagtacgacgtgatcgtgttggggacggggctcaaggagtgcatcatcagcggcctcctctccgtcgatggcctcaaggtccttcacatggacaggaatgactactacggaggagaatcttcgtccctgaatctaaccaagctctggaacaggttcaagggcaacgacagccctcccgagcacctgggcgtcagcaaagagtacaacgtcgacatgg

SEQ ID NO: 49314 - DNA, 245 bp, Zea mays
tggggactttcgcgagcacggtgcacctgagcgggagactctggctcgctagcatgatgatcggctcgggaagcctgctgatggcgcgccggcctcaagttcatccctgtcgatccgggcagtgaaggctcgtctgaccgccacgatgggtaccagcccatccccaccggccccaacgccgtgtgatttccaagaagacctcctgccatccttcttgatttttatttccttctatagaaacaata

SEQ ID NO: 49315 - DNA, 247 bp, Zea mays
aataaagcatcgatcacaacaagatggcatgtatagacaatgcaatgagagccttgttccctctagcgctcttctgcaccgtgcatggtgagaaggcaaagtcaaaggacaacgattcaaaagcgtccgggcccggtgggtccttcgacatcaccaagttgggcgcctctggcaatggcaagacggatagcacgaaggctgtgcaggaggcgtgggcatcggcgtgcggcggcaccgggaaacagac

SEQ ID NO: 49316 - DNA, 251 bp, Zea mays
actgtatgctagtattatttgaagactgggacttgtaaatttggttccaattgcaaatatcaccatcctaagcaagatggatctgtgcagtctgttatattaaacaacaatggattccctctacgtccgggtgagaaagaatgctcctactatatgaagactgggcaatgcaagtttggttctacatgtagatttcatcatccagaatttggtggtattccggtaacccctggcatatatccagcattaca

SEQ ID NO: 49317 - DNA, 302 bp, Zea mays
gacgaccagcaggaggtacgagcaagaccacctaggaggcctctctctctctctccccagccacccccgtagcgagagggagggcggaagaggatgagcgcgtccaggttcataaagtgcgtcacggtcggggacggcgccgtcggcaagacctgcatgctcatctcctacacctccaacaccttccccaccgactatgttccgacagtgtttgataacttcagtgccaacgttgtggttgatggtaatactgtcaacctcggcctctgggacactgcaggtcaagaggattacaacagact

SEQ ID NO: 49318 - DNA, 307 bp, Zea mays
gcgaacgcgtgcatgcgcagacgttgaggtcgagggacacggtgtctctgagcttcatcggagagcgacccgccaccgccacgcttggccgcaagccgagaagagtgccgggccgggagaccggacgattattgatccgtagcagattcgctaatggcggatacggcggacatggagcggatcttcaagcggttcgacaccaacggcgacggtaagatctcgctgtcggagctgacggaggcgctacggacgctggggtccacctctgccggacgagtgcagcgcatgatggccgagatcgacaccg

SEQ ID NO: 49319 - DNA, 307 bp, Zea mays
atgggatcgagttgtttcactgcacgagcacatcctccggcgaccaccggcctccctctccgtcatctagcgaccgaccaacgcgacggcgccacctgggctcagagcaccgcattccccgagttcaagcccgaggagatggctgccatcatgaaggatttcgacgagccggggcacctcgccccgaccggcctgatactgggaggcaccaagtacatggtcatccaaggcgaacctggagctgtcatccgtggcaagaagggatccgggggcatcactgtgaagaaaacagggcagtcactcatca

SEQ ID NO: 49320 - DNA, 299 bp, Zea mays
aggttaggtacctatcctagccgtgtttgcaggcctttcagattgaaccgattacttcaacggtgtcatacatgattggtagggatgtgatggagggagggggcaatgcaggtgcagcataataccctggttgtatttggcttgggagtaagtggatgttagcaatagtggagcatgtgtgggaagcggaggccgatgacagctcttacgttatcaaggaacaaacttatcctgagaaagtgctcacacgtggaacacagactactctttatttgagagatgatgacaagtatgagttt

SEQ ID NO: 49321 - DNA, 243 bp, Zea mays
gagtgatcctcagaaagtttgggtggggagttgcagctacaatcacgcctgcagtgttactcctcacaggagttgggttcttctcactgattttgtttggtgagccattgactcctcttatgaccaagtttgggatgacacctttgcttgcggcagtctatgttggagcaatgcagaacattttcagtaagagtgcaaaatacagtctgtttgatccttgcaaagagatggcatacattcctt

SEQ ID NO: 49322 - DNA, 289 bp, Zea mays
atttgaacgaaccccttcagattgtcttggaggactgtcttatggaagttgttagaggaattaatgacgtacggccactctatgatatgatggcaatcacattggagaatttgccttctatgccaactgttgccagagcaacccttggaagcttgctgatcatttcacacataatctcgttgacatcagtatcttccaacaatctgatggtatttccagaagcacttctccagcagatactgaagtccatgttacatactgatatggatactcgtgtgggagacaccac

SEQ ID NO: 49323 - DNA, 310 bp, Zea mays
cctgagcgctccgcccctcgccgttaccgcgacgcttcggcctctggctccaccgcctgcctccgtggctccgtgacgagacacgacgccgagaggtcacccccacaccgcgccgaggccaccccgcttgggattgtgaggtaaagcgtgatggcagcgccaccggcgagggcccgagacgactacgactacctcatcaaactgctcctcatcggtgacagcggagttggaaaaagttgtctcctgttacagttctcagatggatcattcaccactagctttattcacactattggcattgacttcaaga

SEQ ID NO: 49324 - DNA, 238 bp, Zea mays
cacaagatggcgtgcacaaacaatgcgatgagagccttgttcctcctggtcctcttctgcatcgtgcatggtgagaaggaagagtcaaagggcatcgatgcgaaagcgtccgggcctggtgggtccttcgacatcaccaagttgggcgcctccggcaatggcaagacagacagcacgaaggctgtgcaggaggcatgggcatcggcgtgcggcggcactgggaaccagacaatcctca

SEQ ID NO: 49325 - DNA, 245 bp, Zea mays
atcaagtgggcttctcgctgggacacctacttgttaatgatagatgatcaaattcactggttttctattgtgaactctctcatgatcgtactcttcttatctgggatggtggcaatgattatgctccgcaccctttatagagatatctctaggtacaatcagcttgaaactgaagaagaagcccaagaggagacaggatggaagcttgttcatggagacgtattccgccctcctgcaaactccga

SEQ ID NO: 49326 - DNA, 297 bp, Zea mays
ggaattcactccgatcgggtgagttagtttgcagccaagatgaacgacgccgacgtcgggaagcatgtggagcagatggaacggttcatcctgcaggaggccgacgagaaagccagcgagatcagtgttgccgccgaggaggagttcagcaccgagaagctgcagctggtggagtcggaagaacggagggtgcggcaggagtacgatcgcaaggagaagcaggttgacgtccgcagaagatcgagtactcgacggagctgaacgcggccgcatcaagctgctgcgggcgcaggacga

SEQ ID NO: 49327 - DNA, 299 bp, Zea mays
atcttaaagagaaagataacggcagttctccagaatcttcaccattgaaagacaaaacaacagcagacgatgattcgtaccaatgtttgcttggttctgcaagcgatgtgcgtgatccaataactactccggtgtggttcttgttaatttctttgcctaaccagaaagaagatccacaactgcctcagttatcaaagagttacatgagaatcaaagaccgcagtttgcagatttcttctgtacagaggtacatcatgaagaagctggatctagctaatgaaaacgaggtggagatcatc

SEQ ID NO: 49328 - DNA, 299 bp, Zea mays
acaatgatagggaacgtgttgttgaggctagagatgagctccacaggatgctgaatgaggatgagccgcgtgatgccgtgctgcttgtatttgcaaacaaacaagatcttcccaatgctatgaatgctgctgaaattactgacaagcttggtctgcattctcttcgccagcggcactggtacatccagagcacttgtgctacatctggtgaagggttgtatgaggggcttgattggctttccaacaacatcgccaacaagtcttgaagcttttcagcagggctcctagcaagaggaaga

SEQ ID NO: 49329 - DNA, 244 bp, Zea mays
cgttgatggtccttcaatgaaggattggagaggaggacgtggtgctggccaaaacataattcctagctccactggtgcagcaaaggctgttggaaaagttatgcctgagctgaatggaaagctcactggcatggccttccgagttccaaaaacaaatgtctctgttgtggacttgacatgccggattgagaaaaacgcctcctatgatgatgtgaaagcagccatcaaggcggcatcagagggt

SEQ ID NO: 49330 - DNA, 245 bp, Zea mays
  unsure (1)..(245): unsure at all n locations
atccttagagaacacaaagagttttcttcaacaacttgtgttgcatttgcacctgcttcttgcatgacatgggaattagcagaatcaggcaagcattttgtgacaacggttatcaatggacttgatacagtaggaatcagatcagctncattgacaaccgttgtcaatggagctgatctggttcccactgtatcaactgcatctattgatgatctccgttctgaggtaacagcttcatcatggtt

SEQ ID NO: 49331 - DNA, 256 bp, Zea mays
tagagatcgatggaggacttctatgaggcaaggatagacgacgttgacggagagaaagttggaatgtttggtgtgtatgatggtcatggaggagtcagagcagctgagtacgttaagcagcatcttttcagcaatttaatcaaacacccaaagttcatcactgataccaaggccgctattgctgaaacttacaaccgcacagattcagaatttctgaaagctgatagcactcaaactcgagatgctggctcaactg

SEQ ID NO: 49332 - DNA, 241 bp, Zea mays
agaacgtgctggtaaggtgaaatgcctgggaagtccagacaggactggcagtgtcacaattgttggagccgtctctcctccaggtggtgatttttcagaccctgttacctctgcaaccctcagtattgttcaggtcttctggggtttagataaaaagctcgctcaaaggaagcatttcccatctgtgaattggctcatttcctattcgaaatactccaaggcccttgagtccttttatgag

SEQ ID NO: 49333 - DNA, 242 bp, Zea mays
actagatcttttgctagctgagacacaaccaacgaagatctgttcccaggttggtctgtgcacttttgatggcactcatggtgtcagcgctggaattcggagcgtagtggatgatgaagctgggaaatcaaatggtggtctcaagagtgatccaatgtgcaatgcctgtgagatggctgtggtatggatgcagaaccaacttgcccagaacaagacacaggagctcatcctgaactacatta

SEQ ID NO: 49334 - DNA, 302 bp, Zea mays
agacgacgaggagcacgaggtttacggccaggagatccctgaggacggcgatatggacggcgctgacgttgatatggccgccgccggggacgacgcggcgaagcttcaggagcttgacgagatgaagcgcaagctgaaggagatggaggaggaggccgccgccctccgcgatatgcaggccaaggtcgccaaggagatgcaaggaggtgaccctagtatatctacagctgaggcgaaggagcaggtggatgcacggtctgtgtatgttggaaatgttgattatgcttgcaccccagaagaag

SEQ ID NO: 49335 - DNA, 291 bp, Zea mays
acatcctgaaacctgtgtcatagacgaagagccaaacaactgtgatgcagctcggggttggaagttgacactgctctgcttgggcctgttcatgtttgctgttggggagggctgcatgcgtgcctgcgtaccacccctcggtggagatcagttcagcgacagtggacccaaagaaaccgcagctcaagagtacgttcttgaccaggcttaagctcgcaaactctctcggagcgatgattggattggccttcttagtgtggattgagaataactggggctgggacatcgggt

SEQ ID NO: 49336 - DNA, 295 bp, Zea mays
agtttttgaaagggaagtgactcaagaccaagtaattctgatggctgctagagcctcccgaatagaaaatcaagatgctattgatactgctatagttggcatgctagctgatccaaaagagcgccgtgctggtattcaagaggttcatttccttccatttaatcctacggacaaaagaactaccttgacatacattgatagtgatgggaagatgtaccgtgttagtaaaggtgcgccagagcagattctcaaactcgcctacaataagttggagatagaacgaagagttcatgct

SEQ ID NO: 49337 - DNA, 299 bp, Zea mays
acctgatcctgccaacttggagaagttccttggaactataccaatgatgttcaatgttgttatcctttctcctcatggctacttcgctcagtccaatgtgcttggataccctgacactggcggtcaggttgtgtacattctggatcaagtccgtgctttggagaatgagatgcttctgaggattaagcagcaaggccttgatatcactccgaagatcctcattgttaccaggctgttgcctgatgctgctgggactacgtgcggtcatcggctggagaaggtcattggtactgagcaca

SEQ ID NO: 49338 - DNA, 300 bp, Zea mays
ccacgcggccaccgaggccaagcgccacttgatgaggcgacgacggagaacaccatgtccggcgaccacagggtactgaccacgggcctcatcggcacgttcgatgagatccaagacgggcgcacggggtgccgcccagcgacttccccaagtggctgccggccacccagcggaggctcctgcagcagacccagaagcctaacacggtggtcgcacaggacgggagcggcgacttcaagaccatcaccgaggccatcaccgccgtggccaacaccttcgaggggcgcttcgtcatctacg

SEQ ID NO: 49339 - DNA, 309 bp, Zea mays
ggtggaagcatctgatttggcaaacttccttaccatggatcggaatgggggttaccgaggttcacaaactcttctaagatctgtattatcagagaaacaagagctgtgcttctctgttgtctcattgctctggcagaagctcatagcttctcctgaaatgcagatgtctgcagaaagtacatcagctcaccaaggatggaggaaggttgttgatgcatttgtgatgtcgtttcagcctcacctaccaaggcatcagctgctatcgttctccaggccgagaaggacttgcagccttggattgctagagat

SEQ ID NO: 49340 - DNA, 293 bp, Zea mays
agctgacgacaccaccgtgtggtcgacaaaataaaaaggagagagagagagatggctctgtcgtctcgccgtatggacgccgcaccattcttagtcgtcgtccttctcgtcctcgtggcggcagagaggacgataggcagggtggtggtggaagagacgctctgcttgtcgcagagccatgccttcaaaggcgtgtgcctcagcaacaccaactgcgacaacgtatgcaagacggagaatttcacaggcggcgagtgcaagatggacggcgtcatgcgcaagtgctaatgcaa

SEQ ID NO: 49341 - DNA, 237 bp, Zea mays
agaggacgatgggcagggtggtggtggaagagacgctctgcttgtcgcagagccatgccttcaaaggcgtgtgcctcaacaacaccaactgcgacaacgtatgcaagacggagaagttcacaggcggcgagtgcaagatggacgacgtcatgcgcaagtgctactgcaagaaggtctgctagggcatgaccggcagcaagccccagccgtacggctggttgatccggttgcacaccg

SEQ ID NO: 49342 - DNA, 314 bp, Zea mays
  unsure (1)..(314): unsure at all n locations
tctttccgctcgcgcccanggcccagggccgagcaacctggtgctccgcccctcgccgttacagcggcgcctcggcctccggttccacagcgtctgcctgcctgcgcggccctgtcgaccgttaccgcgacacgacgccgagagatcacccgccccccgcatcgtgtccgccccgcttgggattgtgaggtaaagcgtgatggcagcgccgccggcgagggctcgagccgactacgactacctaatcaaactgctcctcatcggagacagcggcgttggaaaaagttgcctcctgttacggttttcagatggat

SEQ ID NO: 49343 - DNA, 178 bp, Zea mays
tggacgtgctggaggattaccacctgacgagcatcacgctagactaccgccgggagtgccgtcagtcgcagctgctcgagtcgctcaccagcatgacgacctcgtcgtcggcgccggccgagccgccgctgacgtcgagactgtgcggctctgacctgtacagcacacacctgatacg

SEQ ID NO: 49344 - DNA, 309 bp, Zea mays
  unsure (1)..(309): unsure at all n locations
gttctcaaacccggtatggtggtcacctttgctccagtcaacgttacaacagaagtaaaatctgtcgaaatgcaccatgaagctctgacagnagctcttcctggggacaatgtgggcttcaatgtcaagaatgtgtctgtcaaggatgttcgtcgtggcaacgttgctggtgacagcaaaaatgacccaccaatggaagcagctggcttcactgctcaggtgattatcctgaaccatccaggccaaataagcgccgggtatgcccctgtattggattgccacacggctcacattgcgtgcaagtttgct

SEQ ID NO: 49345 - DNA, 269 bp, Zea mays
  unsure (1)..(269): unsure at all n locations
aacacaaccacaaggagcaagaggtagacagagctgctcgctgagagtgtgctgtgctttgctcatcgaccgaccgatcgatctcggcatggcggactgggggccagtgctgatcgggctggtgctcttcatcctgctctccccgggcctgctcttccagatccccggcaagggccggatcatcgagttcggcaacttccagaccagcggcctctcnatcctcatccaggccgtcatctacttcgcctcctcgcatcttcctctcgcgt

SEQ ID NO: 49346 - DNA, 287 bp, Zea mays
agttcggagcgcacacacacacaaccagatctcccccaaatccacccgtcggcacctccgcttcaagatgcagatctttgtgaaaaccctgactggcaagactatcaccctcgaggtggagtcgtctgacaccattgacaacgttaaggccaagatccaggacaaggagggcatccccccagaccaccagcggctcatctttgctggcaaacagcttgaggacgggcgcacgcttgctgactacaacatccagaaggagagcaccctccaccttgtgctccgtctca

SEQ ID NO: 49347 - DNA, 295 bp, Zea mays
ctcggttgcacagttgctgctgtttctgcatccaatctgcccacacgtaaatgggacaagaggtatccgataaaactggaaagcaaggaatctggtatttgcagggggagcaaggtatgctatgtttatgcagacacctcttgggagaaggaatcatggtgtaaagcactccgtcttgcttctactacggacaaggacaaactcaaatcccatgaaatgctgacccaagagttccgcagttacatgtcctctctgaaagctggatacccttcctttctgggaccctcgacactct

SEQ ID NO: 49348 - DNA, 294 bp, Zea mays
actgtatgctagtattatttgaagactgggacttgtaaatttggttccaattgcaaatatcaccatcctaagcaagatggatctgtgcagtctgttatattaaacaacaatggattccctctacgtccgggtgagaaagaatgctcctactatatgaagactgggcaatgcaagtttggttctacatgtaaatatcatcatccagaatttggtggtattccggtaacccatgtcatatatccagcattacaatcagcatctgtgccctccccccttacatatgcttcaaattgg

SEQ ID NO: 49349 - DNA, 293 bp, Zea mays
cgacgtcgtcaaggccatcgagacggtgggcacccgccacgcctccacctccaaggtggtcaacgtcgctgactgccgacagctctcctagatctctctgatctggtctgtccggccgccctccctccgtcatcgtcgactccccctgcctcagttcctttggatctgaataagatggtggtgatctgagtggtggtcttagtttatcatgtatcgctcgcagtttaatttagcggtttaggtgtggatctgtgaaccccatggcgcctctgcttgattcgtgtttcacctgt

SEQ ID NO: 49350 - DNA, 294 bp, Zea mays
aacctgcagtcatctcctccaccaccaccaccaagctcaacaacagccagctcgcgaaaataatgaagagccgcagcatggcatcatcggccgcgctcttggtgctagccctcgcgctagtggcggccaccgccccacaggtagcggaggcaaagaagaagagagcggcggagagcggcgaggcggcggaggcgaagaagatccaggacgacttctgctcgacgctgtgcgagggcaagaaggggacggacctggtcgtgtgcaaggagtcctgcgcgctctcccagcagtcca

SEQ ID NO: 49351 - DNA, 292 bp, Zea mays
accccaacatcaccaccaactacaacggcaagtagctcaccgctagggccacctggtacggtcagcccaacggtgccggcgctcctgacaacggcggtgcgtgcgggatcaagaacgtgaacctgccaccctacagcggcatgacggcgtgcggcaacgtccccatcttcaaggacggcaagagctgcggctcatgctacgaggtgagatgcaaggaaaaacctgagtgctcgggcaatccagtcacggtgtacatcactgacatgaactacgagcctatcgctccctacca

SEQ ID NO: 49352 - DNA, 288 bp, Zea mays
cgtgctcgacagatcggtagcgggaagggctatgtggacatgtccactgttgacgctgcaacttcgaccaagattagcgaggcagttaaacaaaaagggggagctttccttgaagctccagtttcagggagcaagaagccagctgaagatggccaattggtcattcttgctgcaggggacaagccattgtatgatggtatgattcctgcatttgatgtactggggaagaagtcattctttctgggagagattggaaatggggcaaagatgaagcttgtggtcaacatg

SEQ ID NO: 49353 - DNA, 287 bp, Zea mays
cacacactcgagaactccatttcgatcccatttgaaatcaacccatcctcgtttcctccgtctagcagcctctcaccctcatggccaagatcaagatcgggatcaatgggtttggcaggatcggaaggctggtggccagggtggccctgcagagcgacgacgtcgagctcgtcgccgtgaacgaccccttcatcagcaccgattacatgacctacatgttcaagtatgacactgtgcacggacagtggaagcaccatgaggtcaaggtgaaggactccaagaccctt

SEQ ID NO: 49354 - DNA, 291 bp, Zea mays
gaaggagaagctcgcctacatcgccctggactacgaccaggagatggagaccgccaagaccagctcttccgtggagaagagctacgagctccccgacggacaggtcatcaccatcggcgccgagcgcttccgctgccccgaggtcctcttccagccatccttcatcgggatggaagctgccggcatccacgagaccacctacaactccatcatgaagtgcgacgtggatattaggaaggacctgtacggcaacatcgtcctctccggtggcaccaccatgttccctgggat

SEQ ID NO: 49355 - DNA, 290 bp, Zea mays
  unsure (1)..(290): unsure at all n locations
atcggcttcgtttgtcgtcgtcgtaagctgcagctagtgtggactggagatccaccactccaccagtccggtccatctgctggacctcgattggtttcttcttacctaggaacatccggggatgtcgactcctgcgaggaagaggctgatgagggatttcaaccggttgatgcaggaccctccggccggcataagtggcgcccgacagataacaacataatgctgtggaatgctgtcatatntggacctgatgataccccgtgggatggaggtacgtttaagctgactct

SEQ ID NO: 49356 - DNA, 291 bp, Zea mays
cgacaagatggcgtgcacaaacaatgcgatgagagccttgttcctcctggtcctcttctgcatcgtgcatggtgagaaggaagagtcaaagggcatcgatgcgaaagcgtccgggcatggtgggtccttcgacatcaccaagttgggcgcctccggcaatggcaagacagacagcacgaaggctgtgcaggaggcatgggcatcggcgtgcggcggcactgggaagcagacaatcctcatacccaagggtgacttccttgtcggacaactcaacttcacaggccttgcaag

SEQ ID NO: 49357 - DNA, 288 bp, Zea mays
acggcgttcggcgctggtctccgcgcactctctgcagatttctacaagacgtcgtgccccgacgccgagaagatcatcttgggcgtcgtcgagaagcggttcaaggcggaccccggcaccgccgccggcctcctccgcctcgtcttccacgactgcttcgcaaacggctgcgacgcgtccatcttgatcgaccccatgtcgaaccaggcctccgagaaggaggcgggccccaacatctccgtcaagggctacgacgtgatcgaggagatcaagacggagctggagaag

SEQ ID NO: 49358 - DNA, 285 bp, Zea mays
agcacaggcaactatgccagtgcactgttcctcacagcagctaaatctaatgcattggacaaagttgaatctgagattaaagactattgtagaggcttccaagaagagcccgttgttttctcaattcataaaggacttgtcagttccaaaagcgaccagggtgaaggctatagccgaaatatttgctgacgctgggttttcagatgttacaaagaatttcttggctgtcctggcggacaatggcaggctgaaatatattgaacgcattgcggagagatttgttga

SEQ ID NO: 49359 - DNA, 287 bp, Zea mays
acatcgatcacgacaagatggcgtgcacaaacaatgcgatgagagccttgttcctcctggtcctcttctgcatcgtgcatggtgagaaggaagagtcaaagggcatcgatgcgaaagcgtccgggcctggtgggtacttcgacatcaccaagttgggcgcctccggcaatggcaagacagacagcacgaaggctgtgcaggaggcatgggcatcggcgtgcggcggcactgggaagcagacaatcctcatacccaagggtgacttccttgtcggacaactcaacttc

SEQ ID NO: 49360 - DNA, 287 bp, Zea mays
  unsure (1)..(287): unsure at all n locations
ctactctctaggcatctggataatcttcttctaactgatgatacacgcctttttcatgttgactttgcttttatccttgggcgagacccaaagccatttccgccaccgatgaagttgtgtaaggaaatggttgaggccatgggtggtgcagaaagccaatattacacaaggttcaagtcctactgctgcgaacantacaacattctgaggaagtccagcagtctcattttgaatctattcaagctgatggagcgatcaggcattccagacatctctgccgatgaaag

SEQ ID NO: 49361 - DNA, 289 bp, Zea mays
cccatccaagaccattcctgaccctgatgacaagaagccggaggactgggatgagagagctaaaattcctgatccagatgcagtaaagcctgatgactgggatgaggatgccccgatggaaattgtggatgatgaagccaccaagcctgagggatggttggatgatgaacctgaggagattgatgatcactgaggcagccaagcctgaggactgggacgatgaggaggatggtgaatgggaggcgccaaagattgacaaccccaagtgtgaagaggcacctggatgtgg

SEQ ID NO: 49362 - DNA, 283 bp, Zea mays
agctcagcgaccaccaagcagagcaagccagtgaggtctctcaacgcgtacctagccagctacaatggcggggaacgcgctagccaactatgtccaggtctacgtcatgctcccgctggatgtcatcactgtcgacaacacgttcgagaaggaggacgagacgagggcgcactgaagaagctgacggaggcgggcgccgacggggtcatgatcgacgtctggtgggggctggtggaagggaaggagccgggagtctacgactggagcgcctacaggcaggtgt

SEQ ID NO: 49363 - DNA, 285 bp, Zea mays
cgaataacacaggtgagcgcgacgatgggatccctcgctaataacatcatggtcgtgggcggcgtccttgcggcgctcgtcgccggcgggtcgtgcgggcccccgaaggtgccacccggcaccaacatcaccaccaactacaacggcaagtggctcaccgctgaggccacctggtacggtcagcccaacggtaccggcgctcctgacaacggcggtgcgtgcgggatcaagaacgtgaacctgccaccctacagcggcatgacggcgtgcggcaacgtccccatc

SEQ ID NO: 49364 - DNA, 284 bp, Zea mays
acgaccatgatggttcaactgggctgagtactgacagcttagtggaagcgggttatcctggtgctgctgcactccgtgaagtcgtgtgtggcatggtggccattaagatctcttccaaaaattttatcttctggttccgatcacacacaacaaaggagatcaagtggagtggggctaagcatgaaccgtttgacgcagatgacaatggcaggaagatgcatccacgatcttcattcaaggccttcttggaggtggttaaatggagaagtgttccctgggaggat

SEQ ID NO: 49365 - DNA, 293 bp, Zea mays
atccgcctccgcctccgcctccctagggttttgctctcggctcgtcggatccagttcgggggatcctccatggcgtcgcgtccgtcgctgaagtcgaagcccaagggcaagggcgggaagaaggccaccgctgacgacgaggacgccaccgcggcggcgaccacggtgaggctcatgaaggagtggaccacgtggacgatgaagaaggcgaaggtggtggcgcactacggcttcatccccctcgtcatcgtcatcggcatgaactccgagcccaagcactccgtcttccagct

SEQ ID NO: 49366 - DNA, 291 bp, Zea mays
acaccatatttgaaacagttaagaattcatatataagagtgcatatatatatataatcctgccaagacaaaggtaatggagtcgtcacgcatgttccagccggccatcatcctgcttctcctgctcattgtgaccaccgatgtggcgcaggcggcgagggaatgcgagaaggacagcgagcgattccttggggcatgcatggcgtcggacaactgcgccaacgtgtgccgcggtgagggcttctccggcggcaggtgcagcaccttccgccgccgctgcatctgcactaag

SEQ ID NO: 49367 - DNA, 279 bp, Zea mays
gcctctacgagcctgtcaaatccttctacgtcggcaaagaccacgttggggatgtccctttgtccaagaagatagccgccggcttcacaactggtgccatcgctatcagcatcgccaaccctactgaccttgtcaaggtcaggctccaggccgagggcaagcttgcgcctggtgtgccacgccgctacactggcgcaatggatgcttattccaagattgctagacaggaaggggttgccgctctgtggactggccttggaccaaatgtagcgcggaatg

SEQ ID NO: 49368 - DNA, 289 bp, Zea mays
cctcgagccgaatcggctcgagctgctcgccggcccaaaatcgccacatcgaccacgcccccacccaggctcccgtctccatagcggtctcctctcaaacaggattgggagggagagcctcaaggcgggggatcatatctactcctggagggcggcgtgggtctacgcgcatcacggaatatatgtgggcgatgataaggtgatccatttcacaagaggaagaggacaggaggtcggaacaggaactgtcgtcgatattattcttgtgagttccacaccagaacgaagc

SEQ ID NO: 49369 - DNA, 281 bp, Zea mays
aatctcttcggtgctagagaaatataggccgccgcctcctcctcattcggtgaaaggtgggcggttagggttgggagatctcgtgactcacgacacgagcagcagaattcgtcgagggccgctggttgctgcgagaagtccgggccttcgtgggatcttgaaaattgaatgttctaatggagtccaagggtggcaagaagaagtctagcagtagtcgttcctccctgatgtacgaagctccccttggctacagcatcgaggatatccgccctgcaggcggc

SEQ ID NO: 49370 - DNA, 282 bp, Zea mays
atgaagccgccgccgctgcagtgtccatagccaccgcaggagactgagatggggggttttgtcaagacacacaagagcaatgcatacttcaagcgtttccaggtgaagttcaagagaaggcgcgctggcaagacagactacagggccaggataaggctgattaaccaagacaaaaacaagtacaatacacccaaatacagatttgttgtgcgatttaccaacaaggacatcacagcacaaatcatatctgctagtatagcaggtgatatggttcttgcttct

SEQ ID NO: 49371 - DNA, 282 bp, Zea mays
actctttgatctgcatattacttcatacttactgcaacatttgaaagatgcagatcaaagagcagtttaaaaaaaagcaaaaagaaggaaacaaacggtttagtcccctatgcagcaacgagcaatgtcgtgacacccagtagttgcagcttgtcccgagcaacgacattcattgtgaggaagcggtccacgtaggaaaccgcaaggaggagtgtttctgcgtgaagcttgaattctttagccacctccaccaaccagtcgacaaggacagccctcattttg

SEQ ID NO: 49372 - DNA, 280 bp, Zea mays
acaagatggcgtgcacaaacaatgcgatgagagccttgttcctcctggtcctcttctgcatcgtgcatggtgagaaggaagagtcaaagggcatcgatgcgaaagcgtccgggcctggtgggtccttcgacatcaccaagttgggcgcctccggcaatggcaagacagacagcacgaaggctgtgcaggaggcatgggcatcggcgtgcggcggcactggagagcagacaatcctcatacccaagggtgacttccttgtcggacaactcaacttcacagg

SEQ ID NO: 49373 - DNA, 276 bp, Zea mays
gaagagccgatcatggtgtcgcagttcatgatggagctgcaggggctcaagacggtggacggcgaggatccgcccaggattctccacttcaacccgcgcctccgcggcgactggagcggcaagccggtgatcgagcagaacacctgctatcgcatgcagtggggcactccgctccgctgcgaaggctggaggtcacgtgccgacgaggagactgtggatgggttggtgaagtgtgagaagtggattcgggatgatgaagggcggtctgaggagtca

SEQ ID NO: 49374 - DNA, 283 bp, Zea mays
  unsure (1)..(283): unsure at all n locations
atgctctgtccacctctctcgctctgggccgccgccgccgccctaagccacgtgctgaggctttcgttggtctcttcgccggcgacgagcacccagcagttctgtagaaatggctgatggtgaggacatccagcctcttgtctgcgacaatggcactggaatggtcaaggctggttttgctggcgatgatgcaccaagggcggttttccctagcattgttggccgtcctcgccacactggtgtcatggtnaggatgggacacaaggacgcatatgttggcgat

SEQ ID NO: 49375 - DNA, 280 bp, Zea mays
gcacaatctggtacaggaaagacagcaaccttctgttctgggatcttgcagcagctggactatggcctggttgaatgccaggccctggtccttgctcccacccgtgagcttgcacagcaaatcgagaaagtcatgcgcgcgcttggtgattaccttggtgttaaggtccatgcatgtgtgggaggaacatccgtccgtgaggaacaaaggattcttggcagtggtgtgcatgttgttgttggtacacctggtcgtgtgtttgatatgctgcgcagacagt

SEQ ID NO: 49376 - DNA, 277 bp, Zea mays
attgaagagtgcaagtactgcttctcttttgaaagaagctatacatgtcattagttgtggttatgaagacaagacagactggggaaaagagattggctggatctatggatcagttacagaagatattctaactggtttcaagatgcattgtcatggttggcggtcaatttactgcatacctcaacgggttgcattcaaaggttctgcacctctgaatctttcagatcgtcttcaccaggtgcttcggtgggctcttgggtctattgagatcttcttc

SEQ ID NO: 49377 - DNA, 277 bp, Zea mays
aagctcgagcccagcagtccaacctggtgctgtacggcaggatccagtgcaagggcaagtgcaccaagcagaagggcatcacggcgccggccatgaaggtctgccaggaggagtgcgacaaggcgtacgtggtgaaggcggccgaggtcaccaaggcctgcagcgtcacctgcgccaaggagaagaacccgcgcctcagcgagaactgcaagaggtcctgcacccctcctccttcttgaagcgaaccccttgaaatgaatgaaccatgcatgcatgc

SEQ ID NO: 49378 - DNA, 265 bp, Zea mays
ggctcgagagctcctcctcgcgattccaatcaccgcacgcctcctccgacttccgcctcgctcaggcttaacagtcagtgatggaacacaaggaggcgggctgccagcagccggagggcccaatcctatgcatcaataactgcggcttcttcggcagtgctgcgacgatgaacatgtgctccaagtgccacaaggagatgataacgaagcaggagcaggcccagctggctgcctcctccatcgatagcattgtcaatggcggtga

SEQ ID NO: 49379 - DNA, 274 bp, Zea mays
gcacgcaccgcggccacagcctcgcgtcgtcgccccacagccacgcgagccttcgccgatccgcgagcgcagatcgccgaagccaggcggcggagagggagctcgaggcggcggaggaaggcgttcgccacagtcgctgatttccctggggaagagatgggtctctactttgggaagctgttcagcagcctcttcgccaagaaggagatgaggattctcatggtcgggctcgatgccgccggtaagaccacatcctctacaagctcaagctcgg

SEQ ID NO: 49380 - DNA, 300 bp, Zea mays
cctggatatgttatatcctctgatattgcaggttccattctatcggaatttttaaagcataaattaaggcttttcaaaatggaggatgtgagcatgggcatgtgggtagagcggttcaacaacaccagacttttaaatatgtccacagcatcaaattttgtcaatttggatgcatagatgattattacactgcacactaccaatcaccaaggcagatgttgtgtttgtgggacaaactgcaggctggaaaagcccaatgctgcaatatgagatagcaagaatggatgtggtggtactggt

SEQ ID NO: 49381 - DNA, 125 bp, Zea mays
ctcaacttcacaggcccttgcaagggcgacgtgaccatccaggtggatggcaatctgctggcgaccacggacctaagccagtacaaggaccatggtaattggatcgagattctacgtgtggataa

SEQ ID NO: 49382 - DNA, 204 bp, Zea mays
ggagatttcagtacgaggatgaggttaggaagaatccactaaactacgactcatggtttgattatatcagcgctggaggagagtgttgggaataaggacaggatcagggaggtgtacgagagggccattgcaacgtgccccctgcagaggagaagcgatactggcagaggtacatatacctctggattaactatgcactctatg

SEQ ID NO: 49383 - DNA, 155 bp, Zea mays
cgccacgcggcgaccatgtctccgatctgggtgttcgggtacggctcgctgatctggaacccaggcttcgcctacgacgaccgcgtcgtcgctttgtcagggactaccgccgcgtcttctaccaagggacacggaccacaggggcacgccgcagt

SEQ ID NO: 49384 - DNA, 95 bp, Zea mays
catgcgcgggcatgtattaggttgcgtgtggcatgtgagacacttaagaaggtactgagtgccaacccagaggacccactgaacattgagtgctt

SEQ ID NO: 49385 - DNA, 121 bp, Zea mays
ggatgatgtcttccttagtgttccttgcattttgggacagaatggaatctcagaccttgtgaaggtgactctgacttctgaggaagaggcccgtttgaagcagagtgcagatacactttgg

SEQ ID NO: 49386 - DNA, 297 bp, Zea mays
taaaaagttgtggcaaagatggcttccatatccgggtgcggctccaccccttccacgtcaaccgcatcaacaagatgttgtcctgtgctggggctgacaggctccaaacaggcatgcgaggtgcctttggaaagccccagggcactgtggccagggttcaaattggccaagttatcatgtccatccgcaccaagctgcagaacaaggagcatgtgattgagtgcctgcgcagggccaagttcaagtttcctggccgccagaagatccacatctcaaagaagtggggcttcaccaagt

SEQ ID NO: 49387 - DNA, 101 bp, Zea mays
catcgatcacgacaagatagcgtgcacaaaccctgcgatgagagccttgttcctcctggtcctcttctgcatcgtgcatggtgagaacgacgagtcaaagg

SEQ ID NO: 49388 - DNA, 290 bp, Zea mays
aacagagcgaggcgacgccgcggcacctcttctccggcgaagggaaatggcaaccgttccaggggatctgatctggcaggttgtgaggaagaacaactccttccttgtgaagcagttcggcaacggcaatgccaaggtgcagttcaccaaggagccgaacaacctctacaacatccactccgtcaaacactcgggtttggcgaacaagaagactgtgacgatccagccagctgcaaaggactcggctgtggtcctctctactaccaagaccaagaagcagaacgcacctg

SEQ ID NO: 49389 - DNA, 261 bp, Zea mays
gccgcaatcaaataaataaatataaacacgccgccgccatcaatggcgatgtcgcgcttcgggcgctccgggcagccggagaaccgcgaatctttctccctcctcgtcctcaacgtctccttccgcacacggctgacgatctcttcccgctcttcgatcgatacggctaggtcttagacatctacatcacgcgcgaccacaggactgtggatccgcgagggttcgcgttcgtgaggtacaattacgaggatgaggcgcggg

SEQ ID NO: 49390 - DNA, 301 bp, Zea mays
gagcagacggtgaaggacctgcagcaccgtctggacgaggctgagcagctggcgctgaagggcggcaagaagcagatccagaaactggaggcgagggtccgtgaacttgaaggagaagttgaaaacgaacagaagcgcaatgttgaagctatcaagggtctgcgcaaacatgagagaagagtgaaagaactcacttaccaaactgaggaagaccgcaagaacgttctcaggctccaggaccttgtggacaaactgcaatcaaaggtcaaagcatacaagagacaagccgaggaaccggagg

SEQ ID NO: 49391 - DNA, 288 bp, Zea mays
gacaatgtcatcaagggcaccaagaaagagcaggtggagcagatcaagaaggacatcaaggagttcaaggaaaaaaacaaggtggacaaggtagtcgtgctgtggacggcgaacaccgagaggtacgcaacgtggttgcagggcttaacgacaccatggacaagctcctggcttcgttggacaagaacgaagcagagatctcgccatccaccttgtatgcgatacctgtgtcctcgagggtgtccgttcgtcaatggaagcctcagaacacttcgtgcctaggctgat

SEQ ID NO: 49392 - DNA, 295 bp, Zea mays
cggcctcatctccgacgccacctaccgcgtgttcacctccgcctgcaactactcccgctacgtcaccgagtactacggcggctcgctgtcgccgctgtgcgcccgggtgatgatccaggtgacgccgagaccagccgcttcgtcgacaagtacgacgtcacgctcgacgtctgcctctcgtcggtgctctcccagtccaagatcctctcgccgcacgagcaagtcgggcagcggatcgacgtgtgcgtagaggacgagacggtgaggtacctcaaccgccgggacgtgcaggcgg

SEQ ID NO: 49393 - DNA, 285 bp, Zea mays
agaaggaagagaaagaaaagaagaaaaagaagatcaaggaggattctcatgagtggtcattggtcaacaagcagaagcccatatggatgaggaagccagaagaaatcacaggagcaagatatgctgcttctataagagcttgacaaatgactgggaggagcatctggctgtgaagcacttctctgtggagggtcaactggagttcaaggctgttctctttgttcctaagagggcccctttgatctctttgacaccaagaagaagcagaacaacatctagctctat

SEQ ID NO: 49394 - DNA, 285 bp, Zea mays
gtgcccctctgccacctcgccgtcggcatgacaacagggtcgaccccgggttcggccccctctcagagaaaaggaaattctaccaaggattccgttgccttgtacgcggtgcaatgctataagtgctacaaatggagtacggttccaaaagaagaatttgagacgcttcgtgagaacttcactaaggatccatggttctgcagcagacgaccagacagctcttgtgaagacgatgctgacattgagtaccacagcagccgcatcttgggtttggacaagccaaca

SEQ ID NO: 49395 - DNA, 293 bp, Zea mays
gcctagaagaggaaggaagaacagagataagcgacaacgcgtccctcctcgccttcctcccgcctcgagctcttcccggagcaaccggagccacagacgtcaggacagcctagcgcgttccacgcggtatgcagaaccagatcatgtgccatgcttgccggacccttctgctctacccgcgtggcgcgtccagcgtctgctgcgcggtttgccaggccatcaccaccgtgccgccaccaggattggagatggctcagcttatatgtggtggctgtcgaactttgctgatgtat

SEQ ID NO: 49396 - DNA, 275 bp, Zea mays
tgcataagctcacaacagagctgcattcgagctactggatcaacctatttgcagacgaaagcgggtcatttcccgaggtgaaagcagactatatcgcatccacgtcatggcaaagggcactccaatacctgacgatgctgttaccttcgacgacaaggatcctcttgtagctagagtggtcagccagaaggaaaccagccagacacggactgtgtggagccctggttctgaattctctctttgcaattgctcgtggtcgatgcagggtaactatg

SEQ ID NO: 49397 - DNA, 291 bp, Zea mays
caacagagctaagagcggcaaattcaaggctgcagcaggagaatgcacatcttattaggcgactggaggttacacgcctaccccctgtacccaagcccagaactagtatggaggtagaagcattggaggaggctgatcggttgaagcaagaaactgataggttggctaaagaggttgaacaacttcagagtggcaggtttgcagatgtcgacgaattggtatatctgaactggataatgcctgcctacggtatgagctgagaaacaggatgcccatcagggaagactgttg

SEQ ID NO: 49398 - DNA, 279 bp, Zea mays
cggatctcgctcggccatcgggactgtacaaggacgagagggagaagagaacagcggattcatcaccgccaggcgtcaggtcagagtgtgttaagacaagatggtggcgaatggcgacgcactgctagagggagtgcggcggcactgcaagcctgcgcaggcgtaggaccacaagcggtgctgctgctggcggaggtggtgccagctcgatgctccagttttacaccgatgaggctgcgagccgcaaaatgtcaccaaacaccgttctgatcatgagca

SEQ ID NO: 49399 - DNA, 286 bp, Zea mays
gttaaagtccatgcatgcgttggaggaacatctgttcgtgaggaccaaaggattctcgccagtggtgtgcatgttgttgttggtacacctggtcgtgtgtttgacatgctgcgtagacagtccctccgccctgataacatcaagatgtttgttcttgatgaagctgatgaaatgctttctcgtggtttcaaggatcagatttatgacatcttccagcttctgccatccaagattcaggttggagtcttctctgctaccatgccacctgaagcccttgagattaccg

SEQ ID NO: 49400 - DNA, 292 bp, Zea mays
ctcctcaccatggactggacctggaggatcctctttttgcgtggcagcagccacaggtgcccactcccaggtccaactggtgtagtctggagctgaggtgaagaagcctggggcctcagtgaaggtctcctgcaaggcttctggatacaccttcaccgactactttatgaactggatgcgcccagcccctggacaaaggcttgagtggatgggatggatcaacgctggcaatggtaacacaaaatattcacagaagctccagggcagagtcaccattaccagggacacatct

SEQ ID NO: 49401 - DNA, 288 bp, Zea mays
ctcctctccctctcgctctccgatccattctccagcgcagcaagctaaacatgtctgaccgggcaaagatgtcgtggcaggcgtacgtggacgagcacctgatgtgcgagatcgagggccccacctcgcggcggcggccatcgtcggccacgacggtgccgcctgggcgcagagcacggcgttccccgagttcaagaccgaggacatggccaacatcatgaaggacttcgacgagccagggcaactcgcgccgacaggcctgttcctcggacctaccaagtacatggt

SEQ ID NO: 49402 - DNA, 283 bp, Zea mays
  unsure (1)..(283): unsure at all n locations
tcgaataacacaggtgagcgcgacgatgggatccctcgttaataacatcatggtcgtgggcgccgtccttgcggcgctcgtcgccgcgggtcgtgcgggcccccgacgntgccacccgggccaacatcaccaccaactacaacggcaagtggctcaccgctagggccacctggtacggtcagcccaacggtgccggcgctcctgacaacggcggtgcgtgcgggatcaagaacgtgaacctgccaccctacagcggcatgacggcgtgcggcaacgtccccat

SEQ ID NO: 49403 - DNA, 135 bp, Zea mays
ctgcagtcatctcctccatcaccaccaccaagctcaacaacagccagctcgcgaaaataatgaagagccgcagcatggcatcatcggccgcgctcttggtgctagccctcgcgctagtggcggccaccgccccac

SEQ ID NO: 49404 - DNA, 152 bp, Zea mays
gcgggcagcagcacacagccccatcccaatcctagtcgatcttcttcccctcctcaaggaagaaaagaagctgaaccatggggaagagaaagtcagctgctaagccacctcctaagaatgggatggacaagcttgacactgtcttttcctgc

SEQ ID NO: 49405 - DNA, 287 bp, Zea mays
ccacggcatcagcatcggcagcctagggcggtacaaggacgagaaggacgtcacggacatcaacgtcaaggattgcactcttaagaagacgatgttcggcgtccgcatcaaggcgtacgaggacgccgcctccgtgctcaccgtctccaagatccactacgagaatatcaagatggaggactcagccaaccccatcttcatcgacatgaagtactgccccaacaagttgtgtactgccaacggcgcctccaaggtcaacgtcaaggatgtcaacgtcaagaacatca

SEQ ID NO: 49406 - DNA, 272 bp, Zea mays
cgttcgagaaggaggacgagacgagggcgcagctgaggaagctgacggaggcgggcgccgacggggtcatgatcgacgtctggtgggggctggtggaagggaaggagccgggagtctacgactggagcgcctacaggcaggtgttcaagctggtgcaggaagccgggctgaaactggaggccatcatgtcgtgccaccagtgcggcggcaacgtcggcgacgtcgtcaacatcccgatcccgcaataggtgccggacgtcggcaaaagcaaa

SEQ ID NO: 49407 - DNA, 285 bp, Zea mays
tgcagaatgggcagaagatcacattccctggcgaactgcaccacgcgcctgatactgccactggagatatcatctttgtactccagcagaaggagcatcccaagttcaagagaaagggcgatgacctcttctacgagcacacactgatcttgactgaatctctgtgtggcttccagtttgttctgactcacttggataacaggcagctgctgatcaaatcgaaccccggcgaaattgtgaagcctgattctttcaaggcaatcaacgatgaaggcatgcccatgt

SEQ ID NO: 49408 - DNA, 133 bp, Zea mays
tgttgggcgcagcgaatccccaagcaaacaaacagggtagaggtacagggagacgcgaggagaggagaggagcggagaggttgggtctgggacaccatggctccgatgaagctgtacggggcggtgatgtcgt

SEQ ID NO: 49409 - DNA, 286 bp, Zea mays
tggaatttacctctaaatgccactgaaactcaactggaggctgcattcaagaagtttggtaccatcaagcaaaatggcattcaagtcagaagcaataagatccaagggttctgttacggatttgttgagtttgaggattctacatctgtccagagtgctatagaggcttcccctgtgatgattggtggtcgtcaatgttacattgaggaaaagaggacacctggttcacgaggctccagcagaggtggcaggtttgtaccaggcaggggcaacaacttcagaagtg

SEQ ID NO: 49410 - DNA, 151 bp, Zea mays
agcccttccaatctcgtggtgacggacacgtccggagggtgtggcgcgagctacgagatcgaggtggtgtcggagaagttcgaggggaagcggctgctggagaggcaccggatggtgaacaccgcactggcgtctcacatggcggagatcc

SEQ ID NO: 49411 - DNA, 256 bp, Zea mays
cggctcgaggtctacaagagccctgcttcagatacttacatagttattggggcagccacgatcgaagatttatcccagcaagcacaactagcagctgctgagaaattcaaagttcaaggtgaagctgtctcaaacattcaagaaaacacacagactccaactgtacaagaggagagtgaagaggaagaggtcgatgaaacaggtgtagaagttaaggacatagaattggtcatgtcacaagcaaatgtgtcgagag

SEQ ID NO: 49412 - DNA, 287 bp, Zea mays
gcatgggtgaatagcgatctgaaatggcttctgatcaatcgatatttgttggcgatctagctgctgatgtcactgatgaaatgctgctggaacttttctccagcaagtaccgctcggtgaaaggagctaaagttattattgatgcaaacacaggccgttccaggggctatagatttgtcaggtttggagacgacaacgaccaatctcatgccatgtctgaaatgaatggtgtatagtgctctacgaggccaattcgtataagactgcgaatccccaaagatcttcag

SEQ ID NO: 49413 - DNA, 282 bp, Zea mays
  unsure (1)..(282): unsure at all n locations
cacatttatctctgacaagaaggcatttggaggtagcagcccaagactgtttctgagaaggagtggtggcaagccacagacaccaagttccaggcctggcctcgcactgctgggccaccggttgtcatgaaccccatcagccgccagaacttcatcgtcaagtccactgagtaggtttgggctggagaagctggttctgcgacttggtgccgccatgaagccagagttccttttctaaggtcttaatcaattgtaataaaacganatacagtcaggattttt

SEQ ID NO: 49414 - DNA, 250 bp, Zea mays
ccgtcatcgatctcgtttcacatccatccatcctcgtttcactccgtcccgcaacatctcaaccccatggcaaagatcaagatcgggatcaatgggtatcagcaggatcttaaggctgcttgccatcatagccctgcagtctgacgatgtctagctcgtcaccgtgaacgagcccttcatcagcaccgactacatgacctacatgttcaagtacgacactgtgcacggacaatagacagaccatgtagtc

SEQ ID NO: 49415 - DNA, 262 bp, Zea mays
gactaaggggccaattctatgatcacctccaagaccaaacggctgggttttatggttgccgttgtgctgctcaacctattcatgtccaactgaatttggccacctattttgtggaggtggtaaacactacagctgatgaactcaaagacatggctgtcgagatttcagtgtgggatctagatggtgcatgcccctattacaaagttaccggggaaatagttataccgccaaagcaagtggagcaaattatcgggatgaaata

SEQ ID NO: 49416 - DNA, 283 bp, Zea mays
ccaccatcgccgtcgggacgactgcgtctccatcggccccgggagcaagaccatccgcgtgaagggcgtcaagtgcggcccgggccacggcggcagcgtcggcagcctggggcggtacaaggacgagaaggacgtggaggacgtgaaggtgacggggtgcacgctcgccggcaccaccaacggcctgcgcatcaagtcgtacgaggactccaagtcgtcgctccaagccaccaagttcctgtaccaggacgtcaacatggacaacgtctcctaccccatcatc

SEQ ID NO: 49417 - DNA, 281 bp, Zea mays
catgcccatcaaatcgttaaacttgttagatcggtaggcagagagaggccagactgatgggaatggcagcgaaggagcactttgtgcttgttcatggtgaagggcatggagcctggtgctggttcaagctccgctggctccttgagggtgctggctaccatgttacatgcattgacctagccggaggcggcgtcgatcctactgaccccaacacaatccggtcgttccagcagtacgacaagccactcatagacctcatttcaaccttgccggagggggag

SEQ ID NO: 49418 - DNA, 145 bp, Zea mays
gctccatgagggagcacgccgatctactcaactccgtccgagacgacatcaccgagtccagggcctccggtggcatgtcgccaagagtgcatttgctcagggaacgagcttccattcatggcagcatcaaccagattgatgaggt

SEQ ID NO: 49419 - DNA, 280 bp, Zea mays
gagaggaggtagcaacaccgactgcttaatctcttccttttcctcttcctatctccagcgcatcccaagaggcggaaagggaggatcgtggagcggcgaattattatttgtttccccaagatgtcttctccaagcaagcgccgggagatggacctcatgaagctgatgatgagcgactacaaggtggagatggtgaacgatgggatgcaggagttctttgttgaatttcgtgggcctaacgaaagcatttatcaaggaggtgtatggacagttagagtag

SEQ ID NO: 49420 - DNA, 294 bp, Zea mays
gaaacaagcgcacaagatcaaatacctcgccgccaacaatggcctccaggtcctccatcctgctcgccatggtgatgctggctgcgctattcgttgttggtttgtgcaccacccccctcaccttccaggtcggcaagggatccaagcctggccacctgatcctcacccccaatgttgccaccatatccgacgtggagatcaaagagcacggtggcgatgacttctcctttacgctcaaggagggcccgactggcacctggacgctcgacaccaaggccccgctcagtaccccct

SEQ ID NO: 49421 - DNA, 300 bp, Zea mays
cgaacccatagctgacgacaccaccgtgtggtcgacaaaataaaaaggagagagagagagatggctctgtcgtctcgccgtatggccgccgcaccattcttcgtcgtcgtccttctcgtcctcgtggcggcagagaggacgatgggcagggtggtggtggaagagacgctctgcttgtcgcagagccatgccttcaaaggcgtgtgcctcagcaacaccaactgcgacaacgtatgcaagacggagaagttcacaggcggcgagtgcaagatggacggcgtcagcgcaagtgctactgca

SEQ ID NO: 49422 - DNA, 296 bp, Zea mays
cgatcaccaacaccgtcattggcgtcggtgacgactgcatctccatcggccccgggacctccaaggtgaacatcaccggcgtgacctgcggccctggccacggcatcagcatcggcagcctagggcggtacaaggacgagaaggacgtcacggacatcaacgtcaaggattgcactcttaagaagacgatgttcggcgtccgcatcaaggcgtacgaggacgccgcctccgtgctcaccgtctccaagatccactacgagaatatcaagatggaggactcagccaccccatcttca

SEQ ID NO: 49423 - DNA, 297 bp, Zea mays
ctcgcgtctctcgtccccctcagatccaccgactcgctctgagtctctgaccgccccttccgtcgtccccgttcgaaggcgcggcaagcgagcgattcagccagattcgactcgacatgaatcccgagtacgactaccttttcaaacttctgcttattggtgattctggtgttgggaaatcatgcttgcttctcagatttgcggatgattcatatttggacagctacatcagcacaattggggttgattttaaaattcggacagtagagcaagatgggaagccataaaacttcaaat

SEQ ID NO: 49424 - DNA, 296 bp, Zea mays
gacgaaagatgactgtcgtgagcatcatgtggtcattagtgcaggtgcaggtgctggtggcggtggcactatcatttctagtaggcggtgcctggtgtggtcctcccaaggttcccccaggaaagaacatcacagccaactatggcagtgattggctagatgccaaggcaacatggtatggcaagcctacaggtgccggccccgacgacaatggtggcggatgtgggtacaaggacgtgaacaaggcccctttcaacagcatgggcgcatgtggcaacgtcccatcttcaaggatg

SEQ ID NO: 49425 - DNA, 225 bp, Zea mays
agccaagtcgtcggcgtccatggaggaagaggcatgcgcggagaagaagtacggagggatcgcacccaagaagcccttgatatccaaggaccacgagcgcgcctacttcgattctgcggactgggtgctgggcaagcaagccgcgaacagcagcagcagcacgaggaccgcagccgggtcgagtctctgaagcccaagctgaagagaacgccgcaccaccagctg

SEQ ID NO: 49426 - DNA, 303 bp, Zea mays
gaagctccgtagctaaattcaaatattacaaacacaaaagtggagtgcagaaccaaaatggctgcctcgaccgtccttctcgttgcttttctagcattggtcacttctcatgccattgcctctgatcctagcccgctccaagacttctgtgttgccgacaaagactctccagtgaaggtgaatggatttgtttgcaaagaccctatggctgtgaacgctgacgacttcttcaaggctgcaaaacttgatcagccaagggacaccaccaaaagcaaggtgggatcgaagttactttgatcaatg

SEQ ID NO: 49427 - DNA, 309 bp, Zea mays
ccaagctcaacaacagccagctcgcgaaaataatgaagagccgcagcatggcatcatcggccgcgctcttggtgctagccctcgcgctagtggcggccaccgccccacaggtagcggaggcaaagaagaagagagcggcggagagcggcgaggcggcggaggcgaagaagatccaggacgacttctgctcgacgctgtgcgagggcaagaaggggacggacctggtcgtgtgcaaggagtcctgagcgctctcccagcagtccaacctggtgctgtacggcaggatccagtgcaaggcaagtgcaccga

SEQ ID NO: 49428 - DNA, 300 bp, Zea mays
agctgctgctcttggcctgctacgacctcacggccacctctgtcctgtcccactagactagctgcagctagcgcctcttcccctcgccgccgccccctatccgagagcgacgagcatggcgcactccctcgccgcctccttctcgccggccgccgcgcgcgccaggtgacaaatgtgatttcaagccggagctcggtttccttccagagccacaggatgacttctgtatccatccgttcaagaccaagttctcttcgtttcaagatttgctgttcggctaagaggagacagtcgacaagg

SEQ ID NO: 49429 - DNA, 276 bp, Zea mays
cgacgagcacccaccagcagttctgtagaaatggctgatggtgaggacatccagcctcttgtctgcgacaatggcaccggaatggtcaaggctggttttgctggcgacgatgcaccaagggcggtttttcctagcattgttggccgtcctcgccacactggtgtcatggtagggatgggacagaaggatgcatatgttggcgatgaggcacagtccaagagaggtattctcacgctcaagtacccgattgagcacggtattgtgagcaactgggat

SEQ ID NO: 49430 - DNA, 300 bp, Zea mays
caccttcgaggggcgcttcgtcatctacgtgaaggccggcacgtataaggagtacgtcaccgttcccaagaacatggccaacatcttcatgtacggcgacgggccgacacagacggtggtcaccggcgacaagagcaacgcaggcggcttcgctatcttcgcctcagccaccttctctgctgagggcaacgggttcatctgcaagtcgatggggttcgtcaacacggcggggccggaggggcaccaggcggtggcgatgcacgtgcagggcgacaagtcggtgtctacaactgccggttc

SEQ ID NO: 49431 - DNA, 310 bp, Zea mays
cacccgcctccactcccccctcccaggtgctgcccaggtaagtcggcggcggcgatgacaacgcgcttcaagaagaaccgcaagaagcgcggccacgtgtccgccgggcacggccgcatcggcaagcacaggaagcacccgggaggtcgcggtaacgccggtggcatgcaccaccaccgtatcctcttcgacaagtaccatccgggctacttcggcaaggttggcatgcgctacttccataagctccgcaacaagttctactgcaccgcggtcaacatcgagcgcctctggtgatggtgcccaccgacaa

SEQ ID NO: 49432 - DNA, 303 bp, Zea mays
agcagccgcagggcgagctcgcggcgctgatggcggcccaggtagcgcacatctgacagcgatgtgcggtctgcagctgcagcagccaggtccctgcccttgcaacgcagctgccggcagtgtctactactgaggaaactatgtactgtagtaataatgtaatggagccgctgactagctacctatagggctatagctagttcactcgtttagcggcgatgagtaacggagtgtcacccatcaccatgggtggcagtgtgagcaatgacctgaatgcaccattgaaaggaacggaataatata

SEQ ID NO: 49433 - DNA, 295 bp, Zea mays
cagatacctcatggacgatcaggagaatgagaatgagcacgagaagcatgctgatgctgggactgacatcgagaaagaagaggaggacgaagatggccacaagcgtgtcgtcgttcttgggccccaagtccccctcaaggaacagctcgagcttgacaaggatgatgagagcctgaggaggtggaaggagcaactcctcgggcaagtcgacaccgagcagctcggagagactgcggacacggaggtgaaggtgctcaacctgaccatcctgtcaccggggcgccagatctagtgc

SEQ ID NO: 49434 - DNA, 295 bp, Zea mays
agctgatcggcgagtatgggctccggaacaaacgtgaggtctggagggtcaaatttaccctggccaagatccgcaaggccgcccgggaactgctgacgcttgatgagaaggacccacggcgtctgttcgaaggcaacgccctgctgcggcggctggtccgcattggggtgctggatgagggcaagatgaagctggattacatcctgggcctgaagatagaggatttcttagagagacgcctgcagacccaggtcttcaagctgggcttggccaagtccaccaccacgctcgcgtg

SEQ ID NO: 49435 - DNA, 285 bp, Zea mays
gacagtcagacgggtatggatttgttgagttcttttctcatgcatcagcagagaaagctcttcagaatttgactggtcatgtgatgccaaacactgaccggccattgaaattgaactgggcatcgtatagcatgggtgaaaagcgatctgaagtggcttctgatcactcgatatctgttggcgatctagctgctgatgtcactgatgaaatgctgatggagcttttctccagcaagtaccgctcggtgaaaggagctatagttattatcgatgcaaaacaggccg

SEQ ID NO: 49436 - DNA, 299 bp, Zea mays
tgatcttcttgaacagcttatttggttacctgtccttgcttattattattaagtggtgtacggggtcaaaagcagatctataccatgttatgatctacatgttccttagcccaacagatgagcttggtgaaaaccagttgtttagtggccagaagacagtgcagcttgttctacttctgcttgctctggtgtctgtgccttggatgttgattccaaaacctcttctattgaagaagcaacatcagcaaaggcatcaaggtcaccagtacgcaatgcttcagggcgtgatgaatcagtgg

SEQ ID NO: 49437 - DNA, 272 bp, Zea mays
ggcacaacgtgttctgggacgaccagaactcgcagatgcagtgggtgaagccctcaaccttgcgcactcaaggcagccatgcagaagcggctcaagtccgtcgtgtcacgctacgccggcaaggtcatccactgggacgtggtgaacgagaacctgcacttcaacttcttcgagacgaagctgggcaccatggcgtcggcacagatctaccagcaggtggggcagctggaccgcaatgccatcctattcatgaacgaattcaacacgctgga

SEQ ID NO: 49438 - DNA, 293 bp, Zea mays
ccttttctctcctcctcgccggcccaacctgattgttcttcaaccaagaggaagaaaggaaggaagggaccggaagcatcagccatgtcgaactcggcgtcgggaatggccgtctgtgatgaatgcaagctcaagttccaggagctcaaggcaaagaggagcttccgcttcatcgtgttcaagatcaacgagaacgtgcagcaggtggtggtggacaggctgggggggccaggagagagctacgacgccttcacggcctgcttccccgccaacgaggccgctacgccgtgttc

SEQ ID NO: 49439 - DNA, 218 bp, Zea mays
acatccgtagccgccgtgcctcgatttcgtcttttcccctctgctcgagtacgagcggctactcccggcggcggcggcggcggcggcgatgagcgcggtgaacatcaccaacgtggcggtgctggataaccccaccgccttcctcaatcccttccagtttgagatttcctacgagtgcctcgtgcccctcgacgacgatctggagtggaagcttatat

SEQ ID NO: 49440 - DNA, 297 bp, Zea mays
ctaccctcgtcgtcgtctcactcaccccgccttcacgcctacctcaccaaataaggtcccgcccttttccgacattcacaggggggacaggaaatcagcggccatggcctcgattccggcgacgaccttcgccgtcatcttatccgtcctcttctgtgccgcggctggcaccgccgtcgacaacgacctccccgactacgtcatccagggccgcgtctattgcgacacctgccgcgccgggttcgtgaccaatgtcaccgagtacatcgcgggcgccaagtgaggctggagtgcaat

SEQ ID NO: 49441 - DNA, 295 bp, Zea mays
ctcgatctggaattatgactgcagaaactggtacttaccgttggatggccccagaggtcattgagcacaaaccctatgatcacaaggctgatgtttttagttttggaattttgatgtgggaactactcacagggaagattccttatgagtacctgactccactacaagccgctgttggtgtggtgcagaagggattacggcctacaattccaaagcatactcacgcaaagctttccgagcttcttcagaaatgctggcagcaggaccctacccaaagaccagattctccggaata

SEQ ID NO: 49442 - DNA, 288 bp, Zea mays
aggccttcaacatgattgatcagaacagagatggcttcatcgacaaggaagatttgcatgatatgcttgcttctctagggaagaatcccactgatgcataccttgatgccatgatgaatgaggccccagggcccatcaatttcaccatgttcctgaccatgtttggtgagaagttaaatggcacagatcctgaagatgtcatcagaaacgcctttgcttgctttgatgaagaagcaacaggcaccattcaggaagattacctaagagagctgctacaaccatggggga

SEQ ID NO: 49443 - DNA, 285 bp, Zea mays
ggtctgccaatgatcacccttccactagagaaaatggcaaccagagtagctggttccatctgcgtactactgggattggggaggagatgattgttagcagcatgaagaagtatgaagatagagcagtagaactagcgctgaatccggtgaagcttcaagcgctgactaacaagctcaaggaagttcgtaatgcctgcccgttgtttgatacagctcgatgggtgcgcaaccttgaaagggcatactacaagatgtggaacctttactgctccgtcgccacccgga

SEQ ID NO: 49444 - DNA, 208 bp, Zea mays
gagactttccacttcaaaggccacgagcacctaacccttctgggatgaaacctccaggaccatttatgaggcctggatctatgagtctcccaagattttacccagcagggagagcacgtggaattccacacagatttgctggacatgaatcttatcagaacatggggccacagagcatgaatgttcaggtaactcaacacagaactga

SEQ ID NO: 49445 - DNA, 307 bp, Zea mays
gtcagaaaacagtgggatcgagttgtttcactgcacgagcacatcctccggcgaccaccggcctccctctccgtcctctagcgaccgaccaacgcgccgagcgaagatgtcgtggcagacgtacgtggacgagcacctgatgtgcgagatcgagggccaccacctcacgtcggcggccatcgtcggcaacgacggcgccacctgggctcagagcaccgcattccccgagttcaagcccgaggagatggctgccatcatgaaggatttcgacgagccggggcacctagcaccgaccggcctgatactg

SEQ ID NO: 49446 - DNA, 234 bp, Zea mays
gttaatttcttgcctaggccgggtgagcaaggaagacattgaacgtatggtccatgaagctgcgaagtacgaagctggaagatgagcagcagagggacaaggtgtcatccaagaattcacttgagtactatgccttcaacatgaacgcaactgttggagatgagagacttcaaggcaagattaacgatgacgacaaacagaatattctggacaagtgtaatgaaattatcaact

SEQ ID NO: 49447 - DNA, 210 bp, Zea mays
gcaaaaaggtgacattccattagataattcgctgcttaggcaagtatcaagcctcgtaagaaggctaccagctatggagtcacagaaattccaagacgacttcttaatggaatacaacgacactctcctcatgacctaccttgcaatggtcactaaatgttcaagcacaatgaacgagttggtcgagaagataaacacgagctatgagag

SEQ ID NO: 49448 - DNA, 299 bp, Zea mays
catggatcaggttgaccaagcggggatgctgaaacaatctggctgtgtgcttcctgcattgagcgatgccattgacagtgtgctttcctcagctgatcatttttcaaatgactctgagaagctcaggcaggctttaggttttgattatctgaatgaagccaatgctagcagcaagagtattgcacctttcggggttgcacttactggcagccatgcctttttaaatggcaatttctctgcttctaggcccacaaatggtcctttgaagatggagctcccttcactccaagatactgaat

SEQ ID NO: 49449 - DNA, 304 bp, Zea mays
accaaatacttacatgaaagtgaatgtgcctgaggagtctcggaacggagaaaccagtccccgaaccaaaatcacgtggatgaaagcagaagactcatctaaagttagtggtggaacacctatcaaaattgaagatccagatcagtttgttcctttaaacacaaacccgaatgaggtactagaaaagagaaataagattcgggaacaaaatcgatatgacttgaaaacagcaggaccacaatctcagttgcttgctggaattgttgtggataagccaccttctactatgcaatttgaagatgat

SEQ ID NO: 49450 - DNA, 303 bp, Zea mays
gaacaagaactcgtcctactttgtggagtggattcctaacaacgtcaaatcgagcgtttgtgacatcccccctcgtggcctctccatgtcttccaccttcgtgggtaactccacctcgattcaggagatgttccggcgtgtaagtgagcagtttacggccatgttcaggaggaaggccttcttgcactggtacacaggcgagggcatggatgagatggagttcactgaggctgagagcaacaggagcggatcgtctccgagtatcatcagtatcaggatgctacagccgatgaggaggccgac

SEQ ID NO: 49451 - DNA, 203 bp, Zea mays
gaagtcaatagcagccagccgtgaagagagtgatgtatttgttacgaataataatgggaacatggccaaagttttagctggacggaggcgatacatgggccacaagagaactattcacccgaatgcacagaaactcaatgtactatttcaaacacggaatcaattgagctgggataccttttcacggaaggtacagagagtta

SEQ ID NO: 49452 - DNA, 299 bp, Zea mays
gagatcgcgagcagccggagccggaggcgagaggatgaagacgttcgacccgtggccggtcttcttccgccgggagtggaagcgcaactggcccttcctcacggggttcgccatcaccggcttcatcatcaccaagatgacggccaacttcaccgaggaggacctcaagaactccaagttcgtccaggaacacaagaagcgctgaccaaccgggagtcgtccgaatagcctgcggatgaaaaattagccccctatttatcttgtctttttttttatctagatgcgtgcactctattgta

SEQ ID NO: 49453 - DNA, 295 bp, Zea mays
ccagtcagaaaacagtgggatcgagttgtttcactgcacgagcacatcctccggcgaccaccggcatccctctccgtactctagcgaccgaccaacgcgtcgagcgaagatgtcgtggcagacgtacgtggacgagcacctgatgtgcgagatcgagggccaccacctcacgtcggcggccatcgtcggccacgacggcgccacctgggctcagagcaccgcattccccgagttcaagcccgaggagatggctgccatcatgaaggatttcgacgagccggggcactcgccccga

SEQ ID NO: 49454 - DNA, 200 bp, Zea mays
gatccgtcctgcaaatctcctctcatacttctccaccggatccctgtaagattcccggagatgtcggacgaggagcaccagttcgagtccaaggccgacgccggcgcctccaagacctacccgcagcaggccggcaccatccgcaagaacggctacatcgtcatcaagggacgtccctgcaaggttgttgaggtctccac

SEQ ID NO: 49455 - DNA, 242 bp, Zea mays
agactatcaagaagaagctgatccgcaaagctcttgacatgattaggaaacttgctgaagaagaccctgatgagtacagcaacaaggataagacagatgaagagagaaatgagatggaggagaagaagggccagtacgccaagttctggaatgagtttggcaaatcaatcaagctgggtatcattgaagacgcaactaacaggaaccgccttgcgaagcttcttagatttgaaagtaccaag

SEQ ID NO: 49456 - DNA, 295 bp, Zea mays
cctcaaaggatttgccaagttcttcaaggaatccagcgacgaggagagggagcacgctgaaaagctcatggagtatcagaacaaacgcggaggcagggtgaggctccagtcgattgtggcgcctttgaccgagtttgaccaccccgagaaaggcgatgctctgtacgctatggagctgactctggctctggaaaagctggttaatgagaagctgcacagcctgcatggtgtggcaacaaggtgcaatgatcctcagctgatagacttcatcgagagtgagttcatcgaggagcag

SEQ ID NO: 49457 - DNA, 293 bp, Zea mays
tgcacaaacaatgcgatgagagccttgttcctcctagtcctcttctgcatcgtgcatggtgagaaggaagagtcaaagggcatcgatgcgaaagcgtccgggcctggtgggtccttcgacatcaccaagttgggcgcctccggcaatggcaagacaggcagcacgaaggctgtgcaggaggcatgggcatcggcgtgcggcggcactgggaagcagacaatcctcatacccaagggtgacttccttgtcagacaactcaacttcacagtgccttgcaagggcgacgtgaccat

SEQ ID NO: 49458 - DNA, 206 bp, Zea mays
cgtgtatagactatgcaatgagatccttgatcctttaagtgctcttctgtgtcgtgcatagtgagaaggcaaagtctttggacaacgatgcaaaatctaccgggtccggtgtgaccatcgacatcaccatgttgggcgcatttggcattggcaatacggatagcacgtatgctgtgcagtatgcgctggcatcagcgtgcggcggc

SEQ ID NO: 49459 - DNA, 242 bp, Zea mays
actgttcgatgctcagctcacccctttgggttggaaccaagtcgatggtctgcgggacatgtgaagaaaagtgggcttgcagagaagattgaattggttattacttcccctttactgaggactatgcaaactgcagttggggtctttggtggtgaaaagtatactgatggtgtaaatgcacctccactaatggttgaaaatgctggacacagtggacgtccactgtttcagtttgaatgccc

SEQ ID NO: 49460 - DNA, 286 bp, Zea mays
gacacactgatgtcttgattcgataacgacacatcttggaattggctcctatgctgaatagtctgaggagaaacgccaggattggctgttgtctgaactgaggggcaaacgtccattgtttggttcagatcttcctcagactgaagagactgctgatgttttaggcacatttcatgtccttgcagagctatcctgcagattgctttggcgcgtatatcatctctatggcaactgccccatccgatgtgcttgcgatcgagcttttgcagcgtgagtgccatgtaaa

SEQ ID NO: 49461 - DNA, 280 bp, Zea mays
cagcgcgtaggccgcacgatgcctggagttactgtaaaagacgtgaaccagcaggagttcgtcagagctctggcagccttcctcaaaaagtccgggaagctgaaagtccccgaatgggtggataccgtcaagctggccaagcacaaagagcttgctccctacgatgagaactggttctacacgcgagctgcttccacagcgcggcacctgtacctccggggatggcgctggggttggctccatgaccaagatctaggggggacgtcagagaaacggcgtc

SEQ ID NO: 49462 - DNA, 281 bp, Zea mays
cacgaccaagcgtagtagctaggaatcggctcacgatctgtgcagcagatctgaggtcccgggcgaccgtgaagcagcttcaatcgtcggcatggcgctcgtatagcatagtggacgtggaaacaagaatgccttcaaagcacttattgctgcagaatacagtgggatcaaggttgagttgaccaaggattttgagatgggtgtctccaacaagacccctgagtttcttaagatgaaccccttgggaaggttgctgttctggagactctgatggcctgttt

SEQ ID NO: 49463 - DNA, 181 bp, Zea mays
aataaagcatcgatcacaacaagatggcatgtatagacaatgcaatgagagccttgttccttctagcgctcttctgcaccgtgcatggtgagaaggcaaagtcaaaggacaacgattctaaagcgtccgggcccggtgggtccttcgacatcaccaagttgggcgcctctggcaatggcaa

SEQ ID NO: 49464 - DNA, 292 bp, Zea mays
tgggaaggacaaggagggcttcaagaccattgagatgacggagaagttctactgccgctcaaaggacatatatgagatcttgatggatgagaacagatggaaagggtttacgcagagcaatgcgaggatcagcagagaggttggaggggaatttagcctcttcgacgggtccatcactggcgtcaacgaggagctgcaggaagggaagctgattgcacaaaagtggcggtttggaagctggcctgacggcttgtactcctcggtccggttggtgtttgatgagcccgagtct

SEQ ID NO: 49465 - DNA, 231 bp, Zea mays
atcgatcacaataagatggcgtgtatagacaatgcaatgagagccttgttccttttagcgctcttctgtgtcgtgcatggtgagaaggcaaagtcaaaggacaacgatgcaaaagcgtccgggcccggtgggtccttcgacatcaccaagttgggcgcctccggcaatggcaagacggatagcacgaaggctgtcgcaggaggcgtgggcatcagcgtgcggcggcaccgg

SEQ ID NO: 49466 - DNA, 269 bp, Zea mays
cacacactcgagaactccatttcgatcccatttgaaatcaacccatcctcgtttcctccgtctagcagcctctcaccctcatggccaagatcaagatcgggatcaatgggtttggcaggatcggaaggctggtggccagggtggccctgcagagcgacgacgtcgagctcgtcgccgtgaacgaccccttcatcagcaccgattacatgacctacatgttcaagtatgacactgtgcacggacagtgaaacccccatgaggtcaaggtg

SEQ ID NO: 49467 - DNA, 290 bp, Zea mays
gttcggagcgcacacacacacaaccagatctcccccaaatccacccgtcagcacctccgcttcaagatgcagatctttgtgaaaaccctgactggcaagactatcaccctcgaggtggagtcgtctgacaccattgacaacgttaaggccaagatccaggacaaggagggcatccccccagaccagcagcggctcatctttgctggcaaacacttgaggacgggcgcagcttgctgatgacaacatccagaaggagagcaccctccaccttgtgctccgtctcaggggag

SEQ ID NO: 49468 - DNA, 285 bp, Zea mays
gccatatttgaaacagttaagaattcatatataagagtgcatatatatatataatcctgccaagacaaaggtaatggagtcgtcacgcatgttccagccggccatcatcctgcttctcctgctcattgtgaccaccgatgtggcgcaggcggcgagggaatgcgagaaggacagcgagcgattccttggggcatgcatggcgtcggacaactgcgccaacgtgtgccgcggtgagggcttctccggcggcaggtgcagcaccttccgccgccgctgcatctgcat

SEQ ID NO: 49469 - DNA, 286 bp, Zea mays
gggttttgatgctctccgaccccgagctccgaagtccgcagcatcaggcgcggcccccctcgcgtgtaaccgagatggcgacgccgaatcaggggaccgttgattaccccagcttcaagctcgtcatcgtcggcaacggtggaactggtaaaactacatttgtgaagaggcatctcactggagagtttgagaagaaatatgaaccaaccattggtgtggaagttcatccgttggatttcaccactaactgtggtaagatcaggttctactgctgggataccgcagg

SEQ ID NO: 49470 - DNA, 295 bp, Zea mays
gcggatactccttcaccaccaccgctgagcgggaaatcgtgagggacatgaaggagaagctcgcctacatcgccctggactacgaccaggagatggagaccgccaagaccagctcttccgtggagaagagctacgagctccccgacggacaggtcatcaccatcggcgccgagcgcttccgatgccccgaggtcctcttccagccatccttcatcgggatggaagctgccggcatccacgagaccacctacaactccatcatgaagtgcgacgtggatattaggaaggacctgta

SEQ ID NO: 49471 - DNA, 271 bp, Zea mays
caacaaagctcgttgttgaagatatttgccgggatatctaccgttcagatcctgaatggaagatcattttacttaggtacttcaatccagttggtgctcatcctagtggatatcttggcgaggacccacgaggaattcccaacaatcttatgccctatgttcagcaagttgcggttggtaggaggccagctctaacagttttaggagatgactatgcaacaagactgggtatgggctccgagattacatccatgtggttgaccttgctgac

SEQ ID NO: 49472 - DNA, 223 bp, Zea mays
agcaaggatacagaaggcttatagatagttctttaagctactttaagggtccagctgaagcgtctgttgatgcggtccatttggtcttaaaagagcttgttcggagatcgattgcagcaacagaggaattgaagcgatttccaacacttcaatcggatatagcagctgctgcaaacgaaagcctggaaagattccgcgtagatggacggaagactgttcttcg

SEQ ID NO: 49473 - DNA, 276 bp, Zea mays
gctctcccccacctcccggtccggcagcagagagcgggggtgcagagagatcgagatccggaggccgcgagtgggagcgccaccaccagcgactgcggcaatggcgagcacggtgacggtcccggggtcgtcgaccccctccacgccgctgctcaaggacgagctcgacatcgtgatcccgacgatccgcaacctcgacttcctggagatgtggcggcccttcttccagccctaccacctcatcatcgtgcaggacggcgacccgaccaagaccat

SEQ ID NO: 49474 - DNA, 248 bp, Zea mays
tgtttcttgtccatatctccggaatggacaccctggcacgtggcctccgcaacgttgccaagctgattgaggatggttcccacgatgatcttgtccgcaagcggtaccagagctttgatagtgatatcggtgccttgatcgaggctgggaaaggagactttgagacgctagaaaagaaggttctagagtggggtgagcccactgttgcatccggcaagcaggaactggcggagattctgttccagtct

SEQ ID NO: 49475 - DNA, 258 bp, Zea mays
gatggcgtgtatagacaatgcaatgagagccttgtaccttttagcgctcttctgtgtcgtgcatcgtgagaaggcaaagtcaaaggacaacgatgcaaaagcgtccgggcccggtgggtccttcgacatcaccaagttgggcgcctccggcaatggcaagacggatagcacgaagctgtgcaggaggcgtgggcatcagcgtgcggcggcaccgggaagcagacgatcctcatccccaagggcgaattcctcgtcgga

SEQ ID NO: 49476 - DNA, 229 bp, Zea mays
  unsure (1)..(229): unsure at all n locations
cacaggcccttgcaagggcgacgtgaccatccaggtggatggcaatcagctggcgaccacggacctaagccagtacaaggaccatggtaattggatcgagattctacgcgtggataacctggtcatcaccggcaagggaaaccttgacgggcagggcccagctgtgtggagcancatactctgcaccaagaagtacgactgccagatccttccaaactcgctggtgatg

SEQ ID NO: 49477 - DNA, 269 bp, Zea mays
cccatgttcctcctggtcctcttctgcatcgtgcatggtgagaaggaagagtcaaagggcatcgatgcgaaaggtccgggcctggtgggtccttcgacatcaccaagttgtggcgcctccggcaatggcaagacagaccgcacgaaggctcgtgcaggaggcatgggcatcggcgtgcggcggcactgggaagcagacaatcctcatacccaagggtgacttccttgtcggacaactcaacttcacaggcccttgcaagggcgacgtga

SEQ ID NO: 49478 - DNA, 278 bp, Zea mays
gaggttatcaataagctcctagtccagacgccatgggtcatttcacagaggaggacaaggctactatcacaagcctgtggggcaaggtgaatgtggaagatgctggaggagaaaccctgggaaggctcctggttgtctacccatggacccagaggttctttgacagctttggaaacctgtaccctgcctctgccatcatgggcaaccccaaagtcaaggcacatggcaagaaggtgctgacttccttgggagatgccataaagcacctggatgatctc

SEQ ID NO: 49479 - DNA, 277 bp, Zea mays
cgatctcgtttcaaatccatccatcctcgtttccaccgtcccgcagcatctcaaccccatggccaagatcaagatcgggatcaatgggttcggcaggatcggaaggctggtggccagggtggccctgcagagtgacgatgtcgagctcgtcgccgtgaacgaccccttcatcagcaccgactacatgacctacatgttcaagtacgacactgtgcacggacagtggaagcaccattctctcaaggtgaaggactccaaaacccttctctttggtgag

SEQ ID NO: 49480 - DNA, 214 bp, Zea mays
gcaagttactgtggaagcaattcaaatcagaaactgagttcaccattacacaagcagtatccacacagcaagctcacaggcgtggtaatagtaagctgcctcctccttgggcaattgtggccattgctattcttggtttcaatgagatcatgacgcttcttaggaatcccatttatgtgtttttgctatttgtgggctacttgatggtcaagct

SEQ ID NO: 49481 - DNA, 209 bp, Zea mays
aggaagtggtggaagcagcaggggaagaaggcataggaggggagaagatgtagttcacccacttaaagtttctctggaagatctttacaatggcacctcaaagatgctctctctttcgcgcatgtcatctgtccagtgcacgggaagggttcgagtctagtgcctcatgaggtcctggttaccaggctcaggcatgtagtcactattcg

SEQ ID NO: 49482 - DNA, 282 bp, Zea mays
aagattgatgtgtaccagaatgcgcgtgcatgcattaggttgcgtgtggcatgtgagagacttaagaaggtactgagcgccaacccagaggccccactgaacattgagtgtttgatggatgagaaggatgtgcggggttttattaaaagggaggagttcgaacagatcagtgcctcggtgctggaacgcgtgaacggaccactggaaaaggccttggctgaagctgggttgactactgacaatgtgcactttgttgaggttgttggatctagttctcgtgtt

SEQ ID NO: 49483 - DNA, 279 bp, Zea mays
ccatccttcacatacaagacaagcctgctctgttcagaagcttcttcaaatggctaaagcccggcggcaaagtcctaatcagcgactactgtaagaatcctggaaaaccatcagaagaatttgctgcgtacattaagcagagaggctatgaccttcacgacgtgaaggcttatggacagatgctgaaggatgctggttttcataatgtcatcgcggaagatcgcactgagcagttcttgaatgttctacagagggagataggtgaagttgaaaagaaca

SEQ ID NO: 49484 - DNA, 264 bp, Zea mays
ctgtggcagaattgtccgcaaggagaaatctggccaggttgccaggaataggctttttgtactctgagcttgtacaaggcatcccacccatacttcctcacttgatagaacgggtacttccatccattcagttctcgtgattatctcaataaagtacttaccgatcagcaatatagaaacaagcgagaggttcctctaccggtatgtgaagccaagagattaccggctattccgatgtgtggtgcgctatggatccaatgataa

SEQ ID NO: 49485 - DNA, 301 bp, Zea mays
gtgatttgaaataattgggaataaatagttcgtgaatccctgaagcgtgcatatatatattcctgccaagataaaggtaatggagtcgtcacgcaggttccagccggccgtcatcctgcttctcctgctcattatgtccaccgatatggcacaggcaagggaatgcgagaagtacagtgagcgatttgttggggcatgatgatcgcagacaactgcgcacatgtgtaccgcggtgagggcttcttgagccggaagtgcagcaccttccgccgcagctgcatctgcactaggcaatgctaaa

SEQ ID NO: 49486 - DNA, 178 bp, Zea mays
caacaagatggcgtgcacaaacaatgcgatgagagccttgttcctcactggtcctcttctgcatcgtgcatggtgagaaggaagagtcaaagggcatcgatgcgaaagcatccggacctggtgggtccttcgacatcaccaaattgggcgcctccggcaatagcaagacagacagcac

SEQ ID NO: 49487 - DNA, 294 bp, Zea mays
gaccaacaagcaggattaccattttcttaagcctaacatggcagaagatgcagctgagaaccttttgttttcaaagacaactactgcaaaggtgtggttaattggggatggtctagatgcttctgagcagtttaaggcacagaaagggacacagtttatcccatattcacagtttccaccaagaatggcacgcaaggccacctgcacctactcgacaactcctgcaatggttgtacctaaaacactacagaatgtgcactcctgtgagaattggctgccaaggagggtcatgag

SEQ ID NO: 49488 - DNA, 184 bp, Zea mays
cactgatatatgtctatatcgcgttggctgttggaagctccttctgcgtcctcctaagagcgatgtatcttgtaacagcctcatataagacagcgactctattattcgacaagatgcacatgtccatattcagagccgctatgtacttctttgattccaatcagagtggacgcgtcctgaacag

SEQ ID NO: 49489 - DNA, 185 bp, Zea mays
tggcattttgtttacagagtcagcgttgaagggctcccacttcattgaattgtgcgctcagcggcatattcctttgattttcattcaaaacattactgggttcatggtcggatcaaagtctgaagctagtggaattgccaaagctggagcaaagatggtcatggcagtttcctgtgctaaggttc

SEQ ID NO: 49490 - DNA, 300 bp, Zea mays
gtgactcggatgaatttaacagatgggaagctggccaagttttggcacgtaagttgatgctcagtctcgtagctgatttccagcaacagaaaacactggttctaaatccgaaatttgttgatgggattagatcaattctgcgcaacacaagcttggataaggaattcaatgcgcaagcactaactttgcctggtcaaggggagattatggatatgatggcagttgcagatcctgatgcagttcatgctgtccgtaactttattacgaaggagcttgccgtgcaacttaaagatgatcttc

SEQ ID NO: 49491 - DNA, 190 bp, Zea mays
atcagataatgcttgatcatagcactgggcgttctagagggtttggttttatcacatttgaaagtgaagattctgttgaaagggtcatatcagaggggagaatgcgtgatcttggtgggaagcaggttgaaataaagaaggctgaaccaacgaaacatggatctgaccacagcggtgatgggagatcaaa

SEQ ID NO: 49492 - DNA, 200 bp, Zea mays
acgacaagatggcgtgcacagacaatgcgatgagagccttgttcctcctggtcctcttctgcatcgtgcatggtgcgaaggaagagtcaaagggcatcgatgcgaaagcgtccgggcctagtgggtccttcgacatcaccaagttgggcgcctccggcaatggcaagacagacagcacgaaggctgtgcaggaggcatgg

SEQ ID NO: 49493 - DNA, 273 bp, Zea mays
  unsure (1)..(273): unsure at all n locations
ctcctctccctctccctctccgatccattctccagcgcaggnacgtaaacatgtctgaccgggcaaagatgtcgtggcaggcgtacgtggacgagcacctgatgtgcgagatcgagggccaccacctcgcggcggcggccatcgtcggccacgacggtgccgcctgggcgcagagcacggcgttccccgagttccagaccgaggacatggccaacatcatgaaagacttcgacgagccagggcacctcgtcgcgaacaggctagttcctcgga

SEQ ID NO: 49494 - DNA, 294 bp, Zea mays
acgccgccgcctcagccctcgccccgcgctgctgtactctctcacctccttcgccgttgtctaccagatcatcccatggcgtcggagaagaagcagtcgaacccgatgcgggagatgaaggtccagaagctcgtgctcaacatctccgtcggcgagagcggtgatcgcctcacccgcgccgccaaggtactggagcagctaagcgagccatcaccgatattctccaaggcaaggtacactgtagagtcgtttaggatccggcgcaatgagaagatcgcagctatgtgacggtgc

SEQ ID NO: 49495 - DNA, 246 bp, Zea mays
gacaagatggcgtgcacaaacaatgcgatgagagccttattcatcctggtcctcttctgcatcgtgcatggtgagaaggaagagtcaaagggcatcgatgcgaaagcatccgggcctggtaggtccttcgacatccacaagttgggcgtctccggcaatggcacgacagacagcacgaaggctgtgccggacgcatgggcatcggcgtacggcgacactgggaagcagacaatcctcatacccaag

SEQ ID NO: 49496 - DNA, 295 bp, Zea mays
  unsure (1)..(295): unsure at all n locations
cgncgtctgccttctgcgcctccatttcggcctctgtcccttgcaagttcaatctcacctccaaccatgggtaaagagaagtcccacatcaacattgtggttattggccatgtcgactctggcaagtcgaccaccacaggacaccttatctacaagcttggaggcattgacaagcgtgtgatcgggaggttcgagaaggaggctgctgaactgaccagcggtccttcaagtacgcgtgggtgctcgacaagctcaggctgagcgtgagagcggtatcaccatgatatcgctctgt

SEQ ID NO: 49497 - DNA, 296 bp, Zea mays
aacaagatacgagtgggactgtagctttcgtcacggtagtttagttgaagaggttgatggtcacactgcaatactatatcataggttgcagctgcactggtgcccaatgttagtttggcctcgggatctttgttatgctcgatattggcgtcgtaatgatgctggaagttaagttgtgctgttaccggtctatagaacatcctaattgtggtcggcaacgaggatttgtgagggcattcattgaaagtggaggtttcaagatttctcctctacagtgtcacaatggaagacctcgt

SEQ ID NO: 49498 - DNA, 280 bp, Zea mays
cgttatcctcctcttacattacaggtcatagctaagcaggtctgacaggatgtcgtggcagacatacgtcgatgagcacctcatgtgcgagatcgagggccaccacctgacctccgctgccatagtcggccacgacggcgccgtttgggcccagaacaccgcattcccacagttcaagacagaggagatgaccatcatcatgaaggacttcgacgacccgggttcctggccccgaccggtctcttcctcggtcccaccagtccatggtcatccaggcgaa

SEQ ID NO: 49499 - DNA, 232 bp, Zea mays
cctcgagcgaatcggctcacgcgacaataatgacgagccactgcatggcatcatcagccgcactcttggatgctcaccctcgcgctagtggcggccaccgccccacaggtagcggaggcaaagaagaagagcagcggcggagagcggcgaggcggcggcggcgaagaagatccaggacgacttctactcgacgctatacgaagggcaagaacgggacgaacctggtcgtgtg

SEQ ID NO: 49500 - DNA, 203 bp, Zea mays
gttggagaagccatgactactctgccagacaatttcaagcctcacagggctgtgaagaagatttttgatctacggcgtcagatgatcgcgactggagaaggcattgattggagagttggtgaagcacttgcttttgatactcttataattgcggggacccatatcaggttaagtggtcaggatgttaagaggggtacatttag

SEQ ID NO: 49501 - DNA, 288 bp, Zea mays
aggagacagcaagaagggttgctaaccttcagcttgaatgcaagatccagatcgatgtggaaagttttatagaatctttccgacccgacataatggaagcggtgtattcatgggccagagggtcgaagttctaccaaatcatggagatgacccaagtgttcgaaggaagcctgatcagggccatcaggaggctggaggaggttctgcagcagctgattctggcatccaagtccattggggaaacggattagaagcaaaactcgagaggcggtcacaagatcagaggga

SEQ ID NO: 49502 - DNA, 308 bp, Zea mays
acttgatctcccaatacttgtagtgctggatgaagcttatattgagttttcaagccttcagtcaagaatggcatgggttaagaagcatgataatttgattgttctccgaacatttagcaaacgggcaggtttagctggtcttcgtgtgggttatggtgcatttcctctgagcattatcgagtatttgtggcgggccaagcagccctataatgtttctgtggccgcagaagtttcagcatgtgcagctttacagaatccaacttatctggagaatgtgaaaaatttactggtaaaagaaagggagaggt

SEQ ID NO: 49503 - DNA, 239 bp, Zea mays
atatggcgacgagggtgacgagtactagacgctctactggcgcggcgtcgtcgggcttgtgtgccactgctatcctgtgatctgccctgagtggctcctatcgtgttatgttactgtcggttcttatctatctgtcgttgtgtggtttacaacttacgttgtaagaacttattcccccgctttgctactgggttattaagtttggcgttattgttttcttgcaaaaaaaagaacaaaaa

SEQ ID NO: 49504 - DNA, 303 bp, Zea mays
tgggatctgcatcgccgtgtgctccctcaccttctggatctgcgacatcatcgtcaccaactctctccctgtgatgctcagaaccatcggcctcgcgggtgtatttggctcctacgccttcgtctgctgcttgtcgctcgtcttcgtgtacctcagggtgcccgagaccaaggggttcccgctcgaggtcataatcgagttcttcaacgtgggtgccaaagctcagaagccggagcagcatgaagaggaggagaaccacgactaacccgtatatatttggattcattaataataatgtttttt

SEQ ID NO: 49505 - DNA, 241 bp, Zea mays
agtttggatgcaatagtggagaatgaacataagaggctgcttgcaaggaagtccatcattgaaaaacgtaaagaagagcttgagcgtcaaatattggagaaggaaaaagaagaagaaaaaaagagaatgagcagtcaaaagaaaactgtggatgaggaaagggtgaggactctcaatgaacagaggcagagggagcaggaccggattcgtagagagatagaggaaaaaaataaagcagaag

SEQ ID NO: 49506 - DNA, 300 bp, Zea mays
ggaacgtctgaggttatcaataagctcctagtcctgacgccatgggtcatttcacagaggaggacaaggctactatcacaagcctgtggggcaaggtgaatgtggaagatgctggaggagaaaccctgggaaggctcctggttgtctacccatggacccagaggttctttgacagctttggcaacctgtcctctgcctctgccatcatgggcaaccccaaagtcaaggcacatggcaagaaggtgctgacttccttgggagatgccataaagcacctggatgatctcaagggcactttgc

SEQ ID NO: 49507 - DNA, 301 bp, Zea mays
ttcgacgcgtctcttccacagccgcaacctctatccctcgtcgggtatcgtctctcccacacccctctgccccaacccagaaaaaccctcgaaaagcggcggcggcgcgacatggcggaggtcgaggctgcagctgctgcggttgcggcggcgacccctgaagtggcgacggtgaccgagggcggagcgctacggaggcgaagggtccgcataagctgcaccgccagtggaccttctggtacgacatccagtccaagcccaagcccggcgctgcgtggggcactccctcaaaaaggcgtac

SEQ ID NO: 49508 - DNA, 295 bp, Zea mays
gatcaatgaagtgcttgacagagcgaaagttgaagccggaaagttggatctggagtctgtaccatttgacctgagatccatccttgatgatgtcatctcattattttcttcaaagtcaagagagaagggaattgagcttgctgtatatgtctctgaaagagttcctgcactcttgttgggtgatcctggaaggtttcggcagataattacacatttagtgggcaactcaattaagttcacagaacggggacatattttgtacaagttcatctggcagatcactcaaatcttgcaa

SEQ ID NO: 49509 - DNA, 296 bp, Zea mays
gccaaagaattccctcccctagccgccgccgccgctcgtctccctgagaggtgccgggaccgaggaactggccgagttctaggtagagaatcggtcttgcttgtctcagcacggggtctgctgcgtctggtggtggtgaaggggagaaattcgtgagatctgttccggatcaggcgtgcgagctcgggaatcaggggtttcacacatagcttcgtcgatttgaatttgatgtactaatggagtctaagggtggcaaaaagtctagcagtagtcgttccatgatgtatgaagctccc

SEQ ID NO: 49510 - DNA, 293 bp, Zea mays
ggacctaggtcgcggcgacatggccaaacgtaccaagaaagtcgggatcgtcggtaaatacgggacccgctatggggcctccctccggaaaatggtgaagaaaattgaaatcagccagcacgccaagtacacttgctctttctgtggcaaaaccaagatgaagagacgagctgtggggatctggcactgtggttcctgcatctggacagtggctggcggtgcctggacgtacaataccacttccgctgtcacggtaaagtccgccatcagaagactgaaggagttgaaagacc

SEQ ID NO: 49511 - DNA, 299 bp, Zea mays
ggccggcatcatccgtctcgtctcgtctcgcctctcctctccttttcccccctccctgcacagcgccgctcaccgtcaccggaccacagcagcgatcgatggctgaggtacacatacgagcgccccgtggggatggtgggcggcgtccgggacgcgccggtgggccgcgagaacgacctcgaggccatcgagctcgcgcgcttcgcggtcgccgagcacaacagcaagaccaacgcgatgctggaattcgagcagctggtgaaggtgaggcaccaagtcgtggccgggaccctgcacca

SEQ ID NO: 49512 - DNA, 298 bp, Zea mays
gtacatccaggtggctttatttgggccagtgaaaaaacaggattcaggcatttatatgttcatggcaatgatggagcatgcttaggacctctcacacaaggtgattggatggttgagcacattgctggtatcaatgagagtaatggacttatatatttcactggaacattggatggaccattggagacaaatctctaccacaccaatctctttccagattggagccttcccttgcaaacccctaaaaggctgactcgtggaactggccggcattcagtaattctcgaccatcagttgc

SEQ ID NO: 49513 - DNA, 297 bp, Zea mays
ggcggcgacatggtgctcgaggcgacgatgatctgcatagacaactcggagtggatgcggaacggcgactacgccccgtcgcggttccaggcgcaggccgatgccgtcaacctcatatgcggtgccaagacccagtcgaacccggagaacacagtaggcgtgatgacgatggccgggaagggcgtccgcgtgcatgtcactcccaccagcgacctcgggaagattctcgcctgtatgcacgggttggaagttggtgctgaggcaaattggctgcggcaatccagttgctcacttgcg

SEQ ID NO: 49514 - DNA, 300 bp, Zea mays
cacgcgtgacacttctccgccgcctccgccgcagacgccctcgcgatgcgctacgtcgcctcctacctgctggctgccctagggggcaactcctcccccagcgccaaggacatcaagaagatcttggacagcgtgggtatcgaggcggacgacgaccggctcaacaaggttatcagtgagctgaatggaggaaacattgaagacgtcattgcccagggtattggcaagcttgccagtgtacctgctggtggggctgtagcgtctctgctgcaccaggctctgcagcccctgctgctggtt

SEQ ID NO: 49515 - DNA, 280 bp, Zea mays
ggctcgaggtaaaatcacttccaggaataataattgatgagaagaatgttgtttcatctactggtacactgtgcttgtcagagatcccgaaaaaactggtggtaatcggagcaggttatattggccttgagatgggttcagtctggaaccgccttggttcagaggtcactgttgttgaatttgccccggatatagtaccatcaatggatggcgaggtcaggaagcagttccaacgcatgctagaaaaacagaaattcaagttcatgctcaagacaaggtt

SEQ ID NO: 49516 - DNA, 296 bp, Zea mays
ggcacgtccatgtcgtgcccgcacgtctccggcgtcgctggcctgatcaagaccctccacccggactggagccccgccgcgatcaagtcggcgatcatgacaagcgcgacggtgctggacgcggagatgaagccgatcctgaactcgtcctacgccccggcgacgccgttcagctacggcgccggccacgtgttcccgagccgcgcgctggacccagggctcgtgtacgacatgaccgtcgtggactacctcgacttcctctgcgcgctcgggtacaacgcgacggccatgaggac

SEQ ID NO: 49517 - DNA, 285 bp, Zea mays
ctcaaagccaagcaacagcagcagcttccctagcaacaccttgcccctgagctcatgggatccctgggccccacagtgagcttgagcatcatggccaggccaggcggccagcagccggcggagatggagaggaagaaggacagcggtgtcttcttcggtgggggctgcggcttccggatgccgctgcactacccgcgctacaagaaggcggactacgagagcatgccggagtggcgcgtcgactgcctgctccgcgagtacggccttcccgccgacggcgacgtc

SEQ ID NO: 49518 - DNA, 287 bp, Zea mays
gtgaaagttcaacaaattatagtcgatgctggaatttacttgtcagggaggaccaacttctttcgaggaacacagaaacgagcagctcctgaggcttttaagttctttacaggcatttcttgctctctgtgcttgctttgttttcattggtcttaataatttcctcaccaatttatctcctccgtaataggttctccatgggtcatattaaaccggcaatttatagagtactgcattcttgcttgggagaatctccctaggattcttctcatgtacttcaacaatgt

SEQ ID NO: 49519 - DNA, 288 bp, Zea mays
gaagaactatgctgaatgggttgttaattctgagtatgactggccacaacactgttcgtcttgcaattctgttctcgaaggtggaactgaagaaacaacacgattgggttgctttcatgtggtacacaccaaatgcttgatatcacatatccaaagttttcctacccaaacagcaccagatggatacgtctgcccctcctgttctgcacccatatggccaccttctagcattaaagatacaggttcgcgccttcacactgaactgaaagaagcgatagtccagactgg

SEQ ID NO: 49520 - DNA, 294 bp, Zea mays
cacggcaccttccgctccaagcttcagccaagccggagatggcggggagcctgcaccttcccgtggtggacctcgcgttgccggatctccgcgccgccgctgaatccatccgacaggcgtgcgtggagcacgggttcttctacgtgaccaaccacggagtggaccgcggcctgctcgaggcggtgttcgcggagagcaagaggttcttcgacctgcctatggaggataagatggcgctactcaggggcgcaaaccaccggggttacacgccgccctacgccgagaagctcgacg

SEQ ID NO: 49521 - DNA, 292 bp, Zea mays
gtgatgggcatctctcgggacaactggcacaagcgccgcaaaaccgggggcaagagaaagccctaccacaagaagcggaagtatgagttggggcgcccagctgccaacaccaagattggcccccgccgcatccacacagtccgtgtgcggggaggtaacaagaaataccgtgccctgaggttggacgtggggaatttctcctggggctcagagtgttgtactcgtaaaacaaggatcatcgatgttgtctacaatgcatctaataacgagctggttcgtaccaagacctggt

SEQ ID NO: 49522 - DNA, 292 bp, Zea mays
ctcgagccgcgtactatgagcaggtccttgtcaccagtgccatgctcggcgctgtccccgaacgctactcatggactggaggagagattgggtttgacacctacttctccatggccaggggcaacgccactgtccctgctatggagatgaccaagtggtttgacaccaactaccactttattgtccctgaattgggcccaaacaccaagttctcctatgcttctcacaaggctgttaacgaatatacggaggctgaggcgctcggtgttgatcacgtgccagtacttgttgg

SEQ ID NO: 49523 - DNA, 293 bp, Zea mays
catttcgaataacacagttgagcgcgacgatgggatccctcgctaataacatcatggtcgtgggtgtcgtccttgcagcgctcgtcgccggcgggtcatgcgggcccccgaaggtgccgcccggtcccaacatcaccaccaactacaacggcaagtggctcaccgccagggccacctggtacggtcagcccaacggtgccggcgctcctgacaacggcggtgcgtgcgggatcaagaacgtgaacctgccaccctacagcggcatgacggcgtgcggcaacgtccccatcttc

SEQ ID NO: 49524 - DNA, 297 bp, Zea mays
cgccgacgccgcgccgccgcagcaactgtcaccgtcgctatggcccgtatcaaggtgcacgagctccgggggaagagcaagacggacctgcaggcgcactcaaggagctgaagtctgagctctccctcctccgcgtagccaaggtcaccggcggcgcacccaacaagctctccaagatcaaggtggtgcgcacctctatcgcgcgcgtgctcacagtgatctcgcagaagcagaagtcggcgttgcgggaggcgtacaagaagaagaacctgctccccctcgacctccgccctaaga

SEQ ID NO: 49525 - DNA, 293 bp, Zea mays
gtcctccatcaccaccaccaagctcaacaacagccagctcgcgaaaataatgaagagccgcagcatggcatcatcggccgcgctcttggtgctaggcctcgcgctagtggcggccaccgccccacaggtagcggaggcaaagaagaagagagcggcggagagcggcgaggcggcggaggcgaagaagatccaggacgacttctgctcgacgctgtgcgagggcaagaaggggacggacctggtcgtgtgcaaggagtcctgcgcgctctcccagcagtccaacctggtgctgt

SEQ ID NO: 49526 - DNA, 253 bp, Zea mays
gagattctttgtgacaccgtcggactctgttgccattatcgcagccaatgctgttcaatcaattccttactttgcttctggcctgaagggagttgccaggagcatgccaacatctgctgctcttgatgttgttgcaaagaatttgaaccttaagttctttgaggtgcctactggatggaagttttttgggaatttgatggatgctggaatgtgctcaatctgtggtcgaagaaagctttggtactgggtctga

SEQ ID NO: 49527 - DNA, 291 bp, Zea mays
ggaggaacactgaggtctcagctccagagtttcctgatttctgtcttggacaacagaacaacccacagggactgcctcaacatgaagctggtgtttctattcttgttggtcaccatccccatttgctgctatgccagtggttctggctgcagtattctagatgaagttattagaggtacaattaactcaactgtgactttacatgactatatgaaattagttaagccatatgtacaagatcattttactgaaaaggctgtgaagcaattcaagcagtgttttctagatcag

SEQ ID NO: 49528 - DNA, 250 bp, Zea mays
gttgagagcaagatgggtcaccagcagctgtactggagccacccgcgaaaattcggccagggttctcgctcttgtcgtgtctgttcaaaccggcacgtctgatccggaaatatggcctcaatatgtgccgccagtgtttccgtcagtacgcgaaggatatcggtttcattaagttggactaaatgctcttccttcagaggattatccggggcatctactcaatgaaaaaccatgataattctttgtatat

SEQ ID NO: 49529 - DNA, 288 bp, Zea mays
caagaggtttcaggtgaggaacatcgtggaacaggcggccatcagggacgtccaggaagcatgcgtctatgatggctacgtcctcccgaagctgtacgccaaggtgcaccactgcgtctcgtgcgcgatccacgctcacatcgtccgcgtccgatcccgtgagaagcgcagggaccgcaagccgccggagcgcttcaggcgcagggaggataggcctgctggtggacaaggaggcccccgccctggtcctggtgctgctgctccagctccagcacctgttgctgctcg

SEQ ID NO: 49530 - DNA, 294 bp, Zea mays
caccctccacttggtgttgcgtctcaggggcggcatgcagatatttgtgaagactctgactggcaagactatcacccttgaggtcgagtcttctgataccatcgacaatgtcaaggccaagatccaggacaaggagggcatccctccggaccagcagcggctcatttttgccggcaagcagctcgaggacgggcgcacgctggccgactacaacattcagaaggagagcaccctccacttggtgctgcgtctcaggggtggcatgcagatcttcgtgaagagacttactggcaa

SEQ ID NO: 49531 - DNA, 213 bp, Zea mays
cgcatcgatcacaataagatggcgtgtatagacaatgcaatgagagccttgttccttttagcgctcttctgtgtcgtgcatggtgagaaggcaaagtcaaaggacaacgatgcaaaagcgtccggacccggtgggtccttcgacatcacaaagttgggcgcctccggcaatggcaagacggatagcacgaaagctgtgcaggatgcatgggca

SEQ ID NO: 49532 - DNA, 297 bp, Zea mays
catccaatctagaagcacccctctccctctctctctcttcgccgtccgaagctccgcaccccaatctaatcgacacctcaccgagatgggccgcaagttcttcgtcggtggcaactggaaatgcaatggaaccacagatcaggtcgagaagattgtcaaaaccctgaatgaaggacaggttcccccttcagatgttgtggaggtcgttgtcagccctccttatgtattccttcctgtggtcaagagccagctgcgccaagagttccatgttgctgctcagaactgctgggtgaagaa

SEQ ID NO: 49533 - DNA, 292 bp, Zea mays
agctgaccgttttttgtggtgtactccgtgccatcatgtccgtcctgacgccgctgctgctgcggggcttgacaggctcggcccggcggctcccagtgccgcgcgccaagatccattcgttgccgccggaggggaagcttgggatcatggaattggccgttgggcttacctcctgcttcgtgaccttcctcctgccagcgggctggatcctgtcacacctggagacctacaggaggccagagtgaaggggtccgttctgtccctcacactgtgacctgaccagccccaccgg

SEQ ID NO: 49534 - DNA, 262 bp, Zea mays
ggtgatttgataaagtgggataaagccaaggttggctactatgtaggggttgatattgctgaaggctcgataaaagattgcatgactcgctacaatggtgacacagatcaacaaagaaggaaaaggttcagtttccctgcacggcttatttgtactgattgctatgaggctcgtttggatgaatatttatatgaggatgctccgtttgatatatgtagctgtcagtttgctttacactattcatggtcaactgaagcacgcg

SEQ ID NO: 49535 - DNA, 286 bp, Zea mays
cgacaagatggcgtgcacaaacaatgcgatgagagccttgttcctcctggtcctcttctgcatcgtgcatggtgagaaggaagagtcaaagggcatcgatgcgaaagcgtccgggcctggtgggtccttcgacatcaccaagttgggcgcctccggcaatggcaagacagacagcacgaaggctgtgcaggaggcatgggcatcggcgtgcggcggcactgggaagcagacaatcctcatacccaagggtgacttccttgtcggacaactcaacttcacaggccct

SEQ ID NO: 49536 - DNA, 196 bp, Zea mays
gctagcactcctaatggaaataagaagctggatgctgggtaccgagaggctcaggagaaatccaatgactgcccggtgttcttgtttttctctgtgaacacaagtggtcagtttgttggtgttgctgaaatggttggtcctgttgactttgataagactgtggagtattggcaacaagacaagtggaatggttgtt

SEQ ID NO: 49537 - DNA, 294 bp, Zea mays
aaatcctgcctggtggaggacaatgtttggaattgctgtagttccatccattctgctggctgtaggaatggccttttcgcctgaacgccctcgttggctattccagcaaggaaaggttactcaagcagaattagctgtaaaaagactgtatggaaaagaaatggttaccgaaattatgtttgatctgagagctagtggccaaagttcttcggagtccgaagccggctggattgatcttttcagcaagcgttactggacagttgtgagtgtgagggcaacactgtttttgttccg

SEQ ID NO: 49538 - DNA, 289 bp, Zea mays
ctgacatacttccagcttgctgctgaagaccatgagtggtggtggaggtcattcctatgcggaggatcaactggatttttcgtatacggctactgcctgtactactactatgcgcgatcggatatgtctggcttcatgcagacatctttcttctttggctacatggcctgcatctgctatgcattcttcttgatgcttgggatggtgggcttccgtgcctccttgttctttgtccgccacatatacaaatctatcaagtgtgagtgagctgttgttggaagatcaagag

SEQ ID NO: 49539 - DNA, 287 bp, Zea mays
ggtcgtagttgagcagcagcaaccactgcacaggatgtcgtggcagacgtacgtcgatgagcacctcatgtgcgagatcgagggccaccacctgagctctgccgccatagtcggccacgacggcgccgtttgggcccagagcaccgcattcccacagttcaagccagaggagatgaccaacatcattaaggacttcgacgagcctgggtttctggccccgatcggcctcttccttggccccaccaagtacatggtcatccaaggcgagcccggcgctgtcatccgcg

SEQ ID NO: 49540 - DNA, 267 bp, Zea mays
  unsure (1)..(267): unsure at all n locations
ggcagttaagatgcgatcgcggcgatggcatctctcggcgtgctnngcgtgctcctgctgtccagcctctcccgctgctcagccgaggcctgcctggagccccagatcaccccttcctactacacaacttctgacgctgtaatttcaattgagaccgtcttcattgtggagatctccctgacatgcaagaacagggtccagaacatggctctctatgctgacgtcggtggaaaacaattccctgtcactcgaggccaggatgtgggg

SEQ ID NO: 49541 - DNA, 286 bp, Zea mays
gaagggcgtcaagtgcggcccgggccacggcatcagcgtcggcagcctggggcggtacaaggacgagaaggacgtggaggacgtgaaggtgacggggtgcacgctcgccggcaccaccaacggcctgcgcatcaagtcgtacgaggactccaagtcgtcgctcaaggccaccaagttcctgtaccaggacgtcaccatggacaacgtctcctaccccatcatcatagaccagaagtactgccccaacaacatctgcgtcaagtccggcgcctccaaggtggccgtc

SEQ ID NO: 49542 - DNA, 290 bp, Zea mays
agcaaccggtccaacactttcacgctcaggcgctcagctctagcaatggctgcctccaccatggcgatctcctccacggcgatggccggtacccccatcaaggtgggctccttcggcgagggccgcatcaccatgcgcaagaccgtgggcaagcccaaggtggcggcgtccggcagcccctggtacggccccgaccgcgtcaagtacctcggccccttctccggcgagcccccgagctacctcaccggcgagttccccggcgactacggctgggacaccgccgggctgtc

SEQ ID NO: 49543 - DNA, 280 bp, Zea mays
gatcctcaccggcgtcgccatcgtaatcgccttgagaagcacgctcatctagttcgactttcgctgtggaatacctatggaacctactgctagtagatttagtggttgggcttgacttcctactattcagaaacacagtaccgagaagtctttaggtggggtcaaagatggtgacgctgaagttgcaaaagcgccttgccgcgatctacctcaagtgtgggaaaggcaaggtgtggcttgacccaaatgaagttagtgaaatctccatggcaaactcccg

SEQ ID NO: 49544 - DNA, 288 bp, Zea mays
tgatatacgagtacatggaaaatgggagccttgagatgtggctcaggaaccgggctgatgccatcgaaacacttggatggccagaccgcctgaagatatgtattggttctgcccgcggtctttcgttcctgcatcacggttttgtgccccatatcatccaccgtgacatgaagtcaagcaacattctattggacgagaactttgagccaagggtctctgattttggccttgcaaggataatcagtgcatgcgagactcatgtcagcactgacattgctggtacatttg

SEQ ID NO: 49545 - DNA, 291 bp, Zea mays
agaaaagataaggcgaacgatgtccacctagaaaccctagttcgaacgcaccgccgtcaccgtcgtcgctcgcgctctccgcccggatcggagcgagagtaggggcgtgtcggcggtgaaagcgactgcgtcagccatggcggacgaggagcattcggagaggagagaggaggcctccgagcttgcccccttcgacccgaccaagaagaagacaaagaagaaggttgtcatccaagaaccttctgatgaagtggacaagcttgcagagaagacagaaacactggcagtcgc

SEQ ID NO: 49546 - DNA, 288 bp, Zea mays
caagtcgcctccccctactgtaggccgctgctgctcctctcctcccatctcaccacacaccgcagccccagcaagatcgcgcggaggccatggcgaagacatagccttcctccgccggcgccaagccgaccgcggctgccactgcgcctgcgccgccggttacagtgcactcggcgctggtcacctacacctccatgctcgcgctcctctccctctgcccgcacttcgtcatcctcctgtggtacacgatggtgcacgcgcgacggatcggtggtgcggacttacgag

SEQ ID NO: 49547 - DNA, 289 bp, Zea mays
ccctcaccacagccgccacgccatggccgaggagaccgacaccaggcctgcctccgcgagctcccgaggccgccccgcgcccgaggacgacgacagggaggagggcgagatcaccgacatcgcctgcgctccttccccgcccgccacgcacccgctcgagcactcctggaccttctggttcgacaacccgcagagcaagtccaagcaggccgcctgggggagctccatccgcccaatacacaccttctccaccgtcgaggaattctgggggctttacaataacattaat

SEQ ID NO: 49548 - DNA, 229 bp, Zea mays
gtccgtgtcaagcgtggcggcaggaagaggcctgtgccgaagggtattgtctatggcaagcccaagcaccagggtatcacccagctcaagttccagaggaacaagaggtctgttgctgaggagagggctggacgaaagcttggtggactcagggttctcaactcctactgggtgaatgaggatagcacctacaagtacttcgagatcatcctggttgatgtggctcaca

SEQ ID NO: 49549 - DNA, 274 bp, Zea mays
cctcggagggcattcaaggcctgccttttatgcctcatccagcaagcccccaagctgttttaattgatccttttagaaagggtcttctggaccagatagaatactatttcagtgatgccaatttgtgcaaggacctatacttgcggcaacgcatggatgaccaaggttgggtgccattacccctgattgctgggtttccccaggtccagaagattactaacaatattcagtttatcttggaaacagtcatgctatctaacgttgtggaagtgca

SEQ ID NO: 49550 - DNA, 284 bp, Zea mays
ccagcattcctcgattgggaggtcaaagagcagctccagaacataaaatctgaaatagctgatgcgtctgctaatcctcaaggtctacttctggaggcccttcattcggttggatattccggggcactggcaaaacctttgatggcttcagaatctgctgtaaaccggttggatgttagcagcttggaggaatttgttgctgaacattacactgctcccaggatggttcttgcagcatcaggagttgatcatgatgcgctgatttcagttgtagaaccactctg

SEQ ID NO: 49551 - DNA, 287 bp, Zea mays
ccgacatccccgacccgatggcgcccaaggcggagaagaagccagcggagaagaagccggcggccgaggagaaggcggagaagacgaccgcagggaagaagcccaaggccgagaagcggctgcccgcgtccaagtcctccggcaaggagggcggcgagaagaaggggaagaagaaggccaagaagagcgtggagacctacaagatctacatcttcaaggtgctgaagcaggtgcaccccgacatcggcatatcctccaaggccatgtccatcatgaactccttcatc

SEQ ID NO: 49552 - DNA, 244 bp, Zea mays
ctcgagccgcgtactatgaccaggtccttgacaccactgccatgctcggcgctgtccccgaacgctactcatggactggaggagagattgggtttgacacctacttctccatggccaggggcaacgccactgtccctgctatggagatgaccaagtggtttgacaccaactaccactttattgtccctgaattgggcccaaacaccaagttctcctatgcttctcacaaggctgttaacgaata

SEQ ID NO: 49553 - DNA, 224 bp, Zea mays
ccatcgatctccccccagcggcgaggagagccggcggccacaggaaggagaaatggcttccgcacacaacgctctctgggtgtttttcatcctagccgtggtatgtgccgtatgcacagcgaaaaggacaggagccaagaaggaagaatcggcggcagccctggtggtgctgctggaggcagcggcgggacgttcgacatctccaagctcggcgcgaccagcga

SEQ ID NO: 49554 - DNA, 203 bp, Zea mays
gagacatgaaaaacccttcaaaaaatcagtgaatccaggagctgttttttgaaaagattaagaacatagactgctagcttgactaacaaagaagaaaagagagaagaatcaaatagacacaataaaaaatgataaaggggatatcaccactgatcccaaagaaatagaaactgccatcagagaatactataaacaactctacg

SEQ ID NO: 49555 - DNA, 283 bp, Zea mays
atctcctccatcaccaccaccaagctcaacaacagccagctcgcgaaaataatgaagagccgcagcatggcatcatcggccgcgctcttgttgctagccctcgcgctagtggcggccaccgccccacaggtagcggaggcaaagaagaagagagcggcggagagcggcgaggcggcggaggcgaagaagatccaggacgacttctgctcgacgctgtgcgagggcaagaaggggacggacctggtcgtgtgcaaggagtcctgcgcgctctcccagcagtcca

SEQ ID NO: 49556 - DNA, 201 bp, Zea mays
gtacaggtgccctctgtgcctattcagcaattccctactgaagactggagcgctcagcctgccacggaagactggtctgcagctcccactgctcaggccactgaatgggtaggagcaaccactgactggtcttaagctgttcttgcataggctcttaagcagcatggaaaaatggttgatggaaaataaacatcagtttct

SEQ ID NO: 49557 - DNA, 292 bp, Zea mays
gcaaaaatgacccaccaatggcagcagctggcttcactgctcaggtgattatcctgaaccatccaggccaaataagcgccggctatgcccctgtattggattgccacacggctcacattgcatgcaagtttgctgagctgaaggcaaagattgatcgccgttctggtaaaaagctggaagatggacctagattcttgacgtctggtgatgctgacattgttgatatggttcctggcaagcccatgtgtgttgagagcttctcagactatccacctttgggtcgctttgctgt

SEQ ID NO: 49558 - DNA, 280 bp, Zea mays
ctaccagattttgtagagccatctaagacaaaagtcactactcttccaaatggcgtcaagatcgcctcggagacatcatcgagcccagcagcatctgtgggtctgtacattgactgtggttccatttacgaaacacctgcttcatctggatggtcacatctgttggagagaatggccttcaagagcacagtgaatcggactcacttacggttagttcgtgaggtcgaagccattggaggaaatgtctctgcatcagctatccgtgaacaaatgagctata

SEQ ID NO: 49559 - DNA, 292 bp, Zea mays
tctagcgactgaagcagcatggccaagccgtgtggggtgcgcctgagcggggaagcccgcaaacaggtggaggtcttcagacagaatcttttccaggaggctgaggaattcctctacagattcttgccacagaaaatcatatacctgaatcagctcttgcaagaggactccctcaatgtggctgacttgacttccctccgggccccactggacatccccatcccagaccctccacccaaggatgatgagatggaaacagataagcaggagaagaaagaagtccctaagtgtg

SEQ ID NO: 49560 - DNA, 298 bp, Zea mays
tgtttcttgtccatatctccggaatggacaccctggcacgtggcctccgcaacgttgccaagctgattgaggatggttccctagatgatcttgtccgcaagcggtaccagagctttgatagtgatatcggtgccttgatcgaggctgggaaaggagactttgagacgctagaaaagaaggttctagagtggggtgagcccactgttgcatccggcaagcaggaactggcggagattctgttccagtctgcccctatagatggtgccatgtccataggtccaggaataagcaagggtgc

SEQ ID NO: 49561 - DNA, 285 bp, Zea mays
ccgcgccggcgtcctgctcaccaggaacgttggcatctccgacagcctgcgccccgccaacccgctaggctacttcaaggacgtgccgctacccgtctgcgccgcgctgctcaagcagctggactcggacgacgacgacgaccagtaaactataccacggcggcgtcgcggacatgctgcacaaaactacaacgatacagagcgaacgcatggcatggatagcagtatctacggccacggcacgctcgagcgcgccatcgacggggtcaccgagcgacgggacct

SEQ ID NO: 49562 - DNA, 275 bp, Zea mays
atttcgaataacacaggtgagcgcgacgatgggatccctcgctaataacatcatggtcgtgggcgccgtccttgcggcgctcgtcgccggcgggtcgtgcgggcccccgaaggtgccacccggccccaacatcaccaccaactacaacggcaagtggctcaccgctagggccacctggtacggtcagaccaacggtgccggcgctcctgacaacggcggtgcgtgcgggatcaagaacgtgaacctgccaccctacagcggcatgacggcgtgcg

SEQ ID NO: 49563 - DNA, 292 bp, Zea mays
tcgacggccaaccgcgccaccctgccgcggcagccatggtgcatgttaacttctaccgcaactatgggaagactttcaagaagccaaggcggccgtatgagaaggagcgcctagatgctgagctgaagctggttggtgagtatggcctgcggtgcaagcgtgagctgtggcgcgtgcagtatgccctgagccgtatcaggaatgcagccagggagctgctcaccctggatgagaagaaccacgccgaatcttgagggcgggcgctcctcgccgatgacagtatgtctcttgt

SEQ ID NO: 49564 - DNA, 194 bp, Zea mays
tagcttagcagcgattgttcttgccatcaaacttgggatggataggaaaaaggctatctcctccgttacaaccctctccgatgttgaggggctatgtgtttcttttgctgggagagaaggttcatctgatcctgcagtagctgtgaagaaacttctgcatgaggacccatatacagctggagaaatagagaaaa

SEQ ID NO: 49565 - DNA, 310 bp, Zea mays
aacaggttcatcaagaccgccgcatacggccactttggccgtgacgacgccgacttcacctgggaggtggtcaagcccctaaagaaggcatccgcttaagaatgtattgggaagttcactggacatgaggttcatcttcgtctggctctgctgatacctgcaaggattgctgctgctgctgccgcccctggatgtgtgtttgatcagtgactggctgctctgctccatagaagatgaatgaagagagagatggtgaagaaggctttggcaaatggcaattgccgcagcaagccatgtcggcgccactgac

SEQ ID NO: 49566 - DNA, 309 bp, Zea mays
atacttggtgatcatgttgaccagaagggttcaattgttctaccagagaagctaagatttgatttctctcatggaaaacctgtccagcctgaagatctgaggaaaatcgagttcatagtgaaccagcaaataaaggacgagctgggtgtgtatgcacttgaaataaaactagaggatgcgaacgcataaatggtcttcgtgctgtgtttggtgaaatctaccctgatccagtaagagttgtatcagttggtcgcaaagttgaagatctgcttgcagatcctgatagcaaagagtggctatccatatcga

SEQ ID NO: 49567 - DNA, 304 bp, Zea mays
agaagccgcaaaaactgccctggaccgaggtggctacgatgggctgttcctaggagggaactatgttgcaggagttgacctgggcagatgcgttgagggcgcgtatgaaagtgcctcgcaaatatctgacttcttgaccaagtatgcctacaagtgatgaaagaagtggagcgctacttgttaattgtttatgttgcatagatgaggtgcctacgggaaaaaaaagctttaatagtattttttattcttattttgtaaattgcatttctgttcttttttctgtcattaattacttatattttag

SEQ ID NO: 49568 - DNA, 309 bp, Zea mays
atttgtttgtcaagaaggtgaacctatgctgtgctgtgtatgacttcgcggatccaactaagaacctcaaggagaaggaggtgaagcgtcagacacttatggagcttgttgattacatcacttctgcgaatggcaagttctcagaggttgtcatgctggagatcacaaagatggtgtcgattaatttgttccggagctccagccccacccctcgtgagaacaaggccattgaaggggttgatctggaggaggacgagcctctcatggatcctgcatggtcgcacctgcagatccgtgtatgaggttttc

SEQ ID NO: 49569 - DNA, 180 bp, Zea mays
taggctgtctggttcgagcgcgattgtttgtgctgctctaagctgccttcttgacttctataatgtcagacatctaataaaagttgaaatgagacctaatctgattctcaatgctgagaaagagcttgggattgttgctggacttcaggaccgagtggcacaggtttatggtggactagt

SEQ ID NO: 49570 - DNA, 307 bp, Zea mays
cgagtactctgctctcaaggatagcgccctctactcgtgggcggagctgagcccagggtccttcttcctccgcctcggcggcctgtgcctcgtgaccttcactgtgctcgcggctccaattgcagccgcaagcttcaatccaggaaaggatccactcaagttcgtgctagcagctgggatcgggacgctgcttctggtgtcactggcggttctcaggatatacctggggtggagctacgttggtgatcgcctgctgtcagcggtggtaccgtacgaagaaaccggatggtacgacggccagatgtgg

SEQ ID NO: 49571 - DNA, 305 bp, Zea mays
aaaagatttttctccgctgtttccaaagatcttgccatacctctatgatacggaggtagtaagtgaagatgcaattttgagatgggcggaagagaaagaacatgctgatgagtctgataaagtttttgttaaacagtcagaggcttttattcagtggctcaaggaagcggaagatgaggatgacgaagaagaggaataaccctggagttgagctggcactcgaattctttcatgcattgtgagcgcaggatctgatttgagtgggtctctcggtgagttctcgcgagcagcaagttttgcaacct

SEQ ID NO: 49572 - DNA, 305 bp, Zea mays
aaggatgaagaagaaaatcataaaaaaggtcttggaggagatcgaaaaaaagaaccgcgagacgcaagccagcaacaacgccgtggaagatgcggtgatcgaggtcgggccagtcgagacgttcctgaatcagatcctgaacgagaagccgatgcgtttcagctccgagcaactggcggcctgcacccggaactactcgtcggagctgggatccggcggctacggcacggtctacaagggtgagctcccgaacggcctgctggtggccgtgaaggtgctcaaggtgtccatgaacaagaaggtgc

SEQ ID NO: 49573 - DNA, 248 bp, Zea mays
aaagtcagttggattttgactacatggcctaattgtcaatgcgatttgcacaatctgatgaacaagatattactccctccgtatctttttatttgtcgctggatagtgcaattttacactatccagcgacaaataaaaagaaacggaggaagtattatggagcagcagacaaagaaagtcatcgagctaaatccactcatgtagctaatggtgtggactactatctgctgctgtatagcctgcgacga

SEQ ID NO: 49574 - DNA, 301 bp, Zea mays
actattgaggtatacatggatgtgaggagccaaattgaagatcaaattcggggatttagcgaaccagtatcagacaaacttcttccagatcttgctcctcaagagcagcatgtattgactctagttctggatctgaacgagactcttgtatactcagattggaagcgtgagacaggatggaggacctttaagaggccaggagtggatgcttttcttgaacatctcgggaggttttatgaaattgttgtgtattctgatcagcttagtatgtatgttgatcctgttgttgataggctggatc

SEQ ID NO: 49575 - DNA, 300 bp, Zea mays
cgcagagaactgagccaacggaagaaaaaaaagctactacagcaatggccggaggagacgacctgaagctgctgggcctgtgggcgagcccatacgtgctgcgggtgaagctcgcgctcagcctcaagggcctgagctacgagaacgtggaggaggatctgagggacaagagcgagctcctgctcaagtccaaccccgtgcaccagaaggtcgccgtgctgatccacggcggcaagcccgtctgcgagtcgcaggtcatcctgcagtacatcgacgaggccttcgccggcaccggcccgt

SEQ ID NO: 49576 - DNA, 302 bp, Zea mays
agacttctggctctactacacagcctacttctgtggagccactgttggtctcgtatacagcaacaacctgggccagatcgcgcagtcactgcaccagcaatcgcagctcaccatgttactcgctgtgtactcatcctgctccttcttcggccgacttctctctgcgctccccaacttgcctcacaggatggtatcacttgctcggacagggtggctcgctgctgcattggtgcccatgccaatggcattcttcctgatgtggaaacaacaggacgtaggcgctctggtagcaggaacagcga

SEQ ID NO: 49577 - DNA, 299 bp, Zea mays
agacggtcaagcgcctgcactcgtgcccactttcggagaaggcgttcagggcagagatgggtcggatggggcagctgcggacatcctaacatcgtgccactgctgggcttctgtgttgtcgaggacgagaggctgctggtgtataagcatatggagagtggggctctttcatcggtgatgaagaagccaggggaagcgccgctggattgggcaacgcgacttaggatcgccgtgggggcagcaagggggcttgcgtggctgcaccatgggttccaggttccgcagattcaccagaattt

SEQ ID NO: 49578 - DNA, 298 bp, Zea mays
cagaaaagcaacactgtgtatccatcctgacaaggtgcagcaaaagggtgcaaatctccaacagaaatatatcgctgagaaggtttttgatctccttaaggaggcgtggaacaaactcaactctgaagagctcttctaaacagcctcatctctgaacatagggtcgcccctcagggtctgcacaaggtactctcggaagaaactcacaagctggagtggcttgaggttggtcggggggaacatgaagcgacaagcgaaacctgagctatggttgttgtaatcaccgatgtttgtttca

SEQ ID NO: 49579 - DNA, 301 bp, Zea mays
atcctcctcctcctcctacctcctccaaggaagacgaccggccccaggcgttggaggtggtcaccctagcgtgcgggctcgtcggcggcgacagcatccagacgtacctgtggggcagctacgccgcgatcgtcgcgccgctgacggggcaggcggtcagtcacaacgccctcctcttcttgcaggcgctgctgggctccgtgccgctggtgcacgtggaggacgtctgcgaggcccacgtcttctgcatggagcaggagtccatggccggccgcttcctctgcgccgacgggtaccccaa

SEQ ID NO: 49580 - DNA, 294 bp, Zea mays
agcagtgtcttccgcccgggctaccaccatgccgaagcagatccacgagatcaaggacttcctgctgactgcgcggcggaaggacgcacggtcggtgcggatcaagcgggccaaggacgccgtcaagttcaaggtgcgctgctccaggtacctctacaccctctgcgtccacgacgccgacaaggccaacaagctcatgcagtcgctcccgccaggtctgactgtccaggagatttaagtttgtaggtgggctccattgctgtgtttgaatgaattatgaagtttgagtttggg

SEQ ID NO: 49581 - DNA, 313 bp, Zea mays
caggcatctaatttcgaggatttttgttggcgatcctgctacgcgaataacaatccctgaaatccggaatcatagttggttcctgaagaaccttcctgctgatctgatggatgatgatagcaagaggaaccaataatgaggagcctgacaagccaatgcagaccatggatcagatcatgcagattttaacagaggccaccataccacctgcctgttctcgcagtataaatgtcctagctgatggactggacatggatgacgacatggatgatcttgattccgactcagatcttgatgttgacagcagcggtga

SEQ ID NO: 49582 - DNA, 212 bp, Zea mays
aaggaatctgctttacactaaagcctgattttaagtttcttgaggttgcctatccatatgtagcaaagcgtctgttgacagatccaaaccctgctcttcgtgaaacgctgatttcaggtgtaatccaaggatggggcattccagtggaaacgactagaaaaccttatagttcttgccaaggagaatgtgtccaagatgagtagcaaccccgc

SEQ ID NO: 49583 - DNA, 211 bp, Zea mays
gcgccacacaccaacctcagcacaccaaggagagtacgtggaggagcagccatggcttcatcggtggccgccgcggcgagcacattcctgggcacccgcctggcggaccccggcgcacagaaacgggcgaatcgtggcccggttcgggttcgggttgggcggcaaggcgaacttgctccgaagaaggtggcgaagacatcgacctcctctg

SEQ ID NO: 49584 - DNA, 199 bp, Zea mays
tatcgcatcggcgtcggggaggcacctgtgcgtccactccatctgccactggagcgacttcgccgccaaagtcgccgagctctaccccgactacaaagtgcccaagttccccatggacacccagcctgggctggtgagacatgaagtggggtccaagaagctcaccgggctgggggtttaaattacccccatggagaag

SEQ ID NO: 49585 - DNA, 198 bp, Zea mays
cgtatttgtcccgcggcggcctcttcgtcccgcaaggtcgccccacctagatccggccacgccgcacgttccccttttccgccgcagcgatggtgtacgtggattcctgggacgagttcgtggagcggtccgtgcagctcttccgcgccgacccctacaccacccgctacgtgatgaagtatcggcactgcgagggga

SEQ ID NO: 49586 - DNA, 194 bp, Zea mays
aaagaggaactctttgatcaaagcttgggaagagaatgagaagacaaaagctgagaacaaggctgctaagaaagtatccgctattctttcatgggaaaacacaaagaaagcaaacatagaagctgaactgaagaagattgaggaacaactggaaaagaagaaggctgaatatgcagaggaagatgagaacaagg

SEQ ID NO: 49587 - DNA, 150 bp, Zea mays
ctatgagattctcaactcacccgatcgcgcctgcagtcttgcaaagcaggcttttgacgaggccatctcggaactggacaccctgagcgaggtgtcctacaaggacagcactttgatcatgcagctccttcgtgataacttgaccctatg

SEQ ID NO: 49588 - DNA, 214 bp, Zea mays
ctgtgctacattctttgtcttcactgattacatgagaggtgccatgaggatctcggccctgtctgaagccggagtcatctatgtcatgacccacgactctattggtctcggagaggatggcccgacccatcagcccatcgagcacctggtgagcttccgtgcgatgccgaacatactgatgctcccgcctgctgattgcaacgagactggcgga

SEQ ID NO: 49589 - DNA, 233 bp, Zea mays
cgcagatgacctttgggtacagcagggatgatgtgggaaagttcattcccgtctatcttgctcagggcattctccaacatgaccccttcgaggtcctggaccagatgggagtgggcgagctggtgaagcttgctacagagaggggccgcaaagctaggcctaacttgaaggtgggcatttgtggagaacacggtggagagcctcctctgtagcctcttcgcgaaagctgggct

SEQ ID NO: 49590 - DNA, 144 bp, Zea mays
cgagcggcgcaagggcgtgccgtggacggaagaggagcacaggttgttcttgttggatctggacaagttctgcaagggcgactggcggacgatctcgcgcaacttcgtcatctcgcggacgccgacgcaggtggcgagccacgc

SEQ ID NO: 49591 - DNA, 276 bp, Zea mays
aacaatgttgagtgttggtctcactccaaatatagtaacctacaattctcttatatatggtctctgcaagtctggggagttatccagggctgtcagtctttttaagaagttgtggacaaagggtatatcccctaatgctatcacatataatacattaattgataagcattgcaaggatggttacataaccgagggctttaaaataaagcaaaggatgattgagggaagtaatccacctaatcgtttccaccaatccaaaactgattattggccccg

SEQ ID NO: 49592 - DNA, 282 bp, Zea mays
gatccctcgacaatggcactccaggcagcctacgagtacctgcagcaggccgtcggccatggcgcgtggtcgtccacgcagacgctgacgctgctgctcatcgccgtacccaccgtactactgctgctagcgtccctcgccaagagcacgtcgtcgtccggtaggggcaagccgccgctccctccctcgccgctctgcgacctccccatcgtgggggcactacaccaaatcgggccccagacccacatctcgctccaggagcttgtggccaagtacgggcac

SEQ ID NO: 49593 - DNA, 210 bp, Zea mays
  unsure (1)..(210): unsure at all n locations
cagaaacaacgcattgccatagctcgtgcgcttgttagacagcctcatattttgcttttggatgaagccacgtcagctctggatacagaaagtgaaaaggctgtccaagaagccctggacaaagccagagaaggccgcacctgcattgtgattgctcaccgcctgtccancatccagnatgcagacttaatagtgggtgttcagaatggc

SEQ ID NO: 49594 - DNA, 257 bp, Zea mays
  unsure (1)..(257): unsure at all n locations
gttgccactttgcacagtgccgatcgagctcgcagccactatatagcacgcaccctgctcaagcatcttttccttacccagaaagatcgcactacccggcgctcgcgcggctttctttcccaactccgacgaaggctagctacaccacctggtgcgggctcgtctccatcgcccgccacncgctccgtcgtcgtcgtccccgccgcgccgatcccgaaatcgaatgggagcctggcgtccgaaaagaaagtggtcgg

SEQ ID NO: 49595 - DNA, 86 bp, Zea mays
ggagatagagacatgggctgttagtccccgtggagcaggttggctgtttggatcgcgagtaacagcagagttcaactttgttaatg

SEQ ID NO: 49596 - DNA, 126 bp, Zea mays
gtccgaatggtgcgccaccaggcaggccgccgcgcccaggccgcccaccgtctccatggtcgtccgcgcctccgcctacgccgatgagctcgtggagaaccgtaaaacgattgcgttggcgggggg

SEQ ID NO: 49597 - DNA, 239 bp, Zea mays
gctttgagcagcatgaggccccaggctcaagatcatttttcactgagattatagcctcaatttcggacataaagttttcgaaggatgggaggcatcttctcagtcgcgactacatgactctgaaggtctgtacatgtaacttctgatactttaaatttagataaatttgcatctggacatggcaaagagatgagaccctttgttgttttaccatggttcctttttgccaatattctatg

SEQ ID NO: 49598 - DNA, 198 bp, Zea mays
cacctacgcaacaccagacgctccagcagtccagcactcggagctcgcgcgcccgacggcccaccatgatcatccccaagaagaaccgcaatgagatctgcaagtacctcttcaaggagggcgtgctgtatgccaagaaggactacaacctggcgaagacccacagattgatgtgcccaacctccaggtgatcaagct

SEQ ID NO: 49599 - DNA, 146 bp, Zea mays
cgaagaagcccaaggccgcggagacggacggtgctggaagcagtggtgacaaggatgagaaagaggatgaaaatgaggagacaagcccacgttcgaggacccgaagggagaccttgaactgtttttgaactgttttaactcctcct

SEQ ID NO: 49600 - DNA, 157 bp, Zea mays
ggagatgaatgagctcaagctcaaggagatcaagaacggcaggctcgccatgctcgccatcctcggttacttcatccaggggctcgtcaccggcgtcggcccgttccagaacctgctcgaccacctcggccgacccgtcaacaacaacgtgctcacc

SEQ ID NO: 49601 - DNA, 105 bp, Zea mays
acgacgcacgcagagccgcagagatccgtcacactgcaagttttgaaaactgaactgtaagatggcatcagcagagctttcccgtgaggtcaatgtgtacatggc

SEQ ID NO: 49602 - DNA, 86 bp, Zea mays
gcataagcacaaggagcgcctcggcgaggtgggcgccctcgcgggcagcgcctttgctctgtacgaggggcacgtgcgaagaaaga

SEQ ID NO: 49603 - DNA, 119 bp, Zea mays
tgtgcgggtgaagtgcaacgaggacgacaccatcggcgacctcaagaagctggtggcggcgcagactgggacgcgccccgagaagatccgcatccagaagtggtacaacatctacaagg

SEQ ID NO: 49604 - DNA, 112 bp, Zea mays
ttccccggcgactacggctgggacaccgccgggctgtccgccgaccccgagaccttcgccaagaaccgcgagctggaggtgatccactcccgctgggccatgctcggcgcgc

SEQ ID NO: 49605 - DNA, 98 bp, Zea mays
aactctagcggccttcaagtctcgctacgtagcagtgcaataaaaaaagcagccgcaatggcgagcagcaccatggccctctcctccacagccttcgc

SEQ ID NO: 49606 - DNA, 173 bp, Zea mays
atggcgtcgtccatgctctccgctaccaccgtgccactccagcaggggggcggcctgtccgagttctccgggctcaggagctccgcgtcgctgcccatgcgccggaatgccaccttcgacgacttcatgtccggcggtctcttcaaggaccaaggcggtcggcacgagcggcg

SEQ ID NO: 49607 - DNA, 100 bp, Zea mays
aaggaggagaacaacgatggctcaaacaaaatttcaggcgacagctgagagacctgtacaagtcctttgtttctgagtaccctatcgagtcgatcgaaga

SEQ ID NO: 49608 - DNA, 118 bp, Zea mays
gtgagatattgagattgaagccactagtgatcttccacctgagaaactttttcttgggcaagactgagaaagacagggaagaagcaatggaccctggaagtaatgggttttgacccag

SEQ ID NO: 49609 - DNA, 111 bp, Zea mays
tgctggggcgtccaagacctacccgcagcaggctggcaccgtccgtaagaacggcttcatcgtcatcaagaaccgtccctgcaaagttgtggaagtttctacctccaagac

SEQ ID NO: 49610 - DNA, 195 bp, Zea mays
cattgatgcttttctatatgtgccagtgtggattttatatctatagcatcggtgctcttgttgcttgggaaacccgcagaaaagattttgctgtaatgatgtctcatcatgtaataacatctactctaattggagtttcatatctgactggatttttccgaattgggaccatcattctcgctcttcatgatgcaa

SEQ ID NO: 49611 - DNA, 274 bp, Zea mays
caggtgttaggattcagacttagaataatactaggtgagtgcccgtgcgttgcaacggaaccgtataataatacgataacttaggtacatatgtgttatattgcaatgagaaaaaatattttggaatccatttgtgatcccatccatacataaatttggttatgttaatccaataacatacatcaattccatgctacagattttcctccttctccttggttaatccgacaatggtgcgtttccagacccgttgcctcacggttttgcaaagagt

SEQ ID NO: 49612 - DNA, 121 bp, Zea mays
gggtctgctggaccccatcgacggcgtgctcctccaggagctcatccgctatggcgagttcgcccaggccacctacgacagcttcgactacgaccgcttctccccctactgcggcagctgc

SEQ ID NO: 49613 - DNA, 114 bp, Zea mays
ctccttccgcctcgggctcaaccgcttcgccgacctcaccaacgacgagtaccgcgccacctacctcggcgtcagtagcaggccgcagagggagaggaagctcggtgacaggta

SEQ ID NO: 49614 - DNA, 103 bp, Zea mays
ctccactccagcactgaacacttgattgattcagtaggtagctagctagctgaatcacaatggatcctaccaagttccgtccgtccagtagccacgacacgac

SEQ ID NO: 49615 - DNA, 247 bp, Zea mays
atcggcatgatcagcgccgtgcccgggatgaaggcgctcgacatgaacgccgccgaggacgagatcgtgcgcctcacgcgcgaggtcgtgcccggcatgatcgtcaccgggatggaggtcgccgagattgacggggcccgaggatgggcccacgttcggcgcaagatgatctcggccaaaagcggcgcactggcctgaagcactgggcaggccaacgcgtggacggacatcgcgagtgtcgcggcgc

SEQ ID NO: 49616 - DNA, 147 bp, Zea mays
cgcggactcaaggcgcactaaaggacgcgctgtacggcacggagcggggcctgcgggcgtccagcgagtcacgagccaaagtgctggagctcatcacgcaagtcgagacggcgaaacccaagccgggttctaaggaaggggttaagg

SEQ ID NO: 49617 - DNA, 92 bp, Zea mays
tgtcgaccgcgaaggcgcggggaagcacatccaggcgggggccaagaaggtgctcatcacggcgcccggcaagggcgacatccccacctacg

SEQ ID NO: 49618 - DNA, 100 bp, Zea mays
ggttattgcaggccgtgagacaggaaaggttggagaagtcacacgccttttcaagcacaacagcacggtgatcgtgaaggacctgaacttgaagtcgaag

SEQ ID NO: 49619 - DNA, 110 bp, Zea mays
gaggaagctgttggtgctggagttggcggcggcagcagtggtaataagatgccaactcttgaggagtatggaactaatttaacaaaattagcagaggaaggaaaattaga

SEQ ID NO: 49620 - DNA, 122 bp, Zea mays
cctgaattgacagagatgcaagcccgggccatttttgaagctgctatagcaatgaccaaccagggtgttcaagtgttcccagagataatggttcctcttgttggaacaccacaggaacttgg

SEQ ID NO: 49621 - DNA, 298 bp, Zea mays
atgaatcaactgcacctcttgaccgcttctactccaccgcctgctgctccgctagtcttcttcaaccttgtgatgcttcagccccccgcccctggtattgatcgctcagcacaaagcgtcgtacttggataggagaaaacaattctagacagtcgacagagagagagaaaaaaaaaatagagaactgagagatcgaggacaaagggggagaggagatgtctcggggcggtaccacggggagctgggccagaggatcgatacgtcttcaaggtggtgctcatcggtgactccgctgtgg

SEQ ID NO: 49622 - DNA, 295 bp, Zea mays
cgctcatcaatcgccagaggagttgttgatcgaggtgagtgaggttgaaaagcacaccatcgtcatggacggcggatactacggcggtcgcgatcagcgctacagcggcgggtactacggcggcggtggcatcgcaacgccggggtacgctccggcggtcccgtacgggatgtcgcaggtgaacatcgagggcaacgggtgcgggcgggcgctgccgccgcagccgaccgtgaaggtgtactgccgcgccaaccccaatacgccatgagcgtccgcgacgggaaggtggtgctgg

SEQ ID NO: 49623 - DNA, 295 bp, Zea mays
gttcgacttcctgtcgcacctccccgagagcctgcacaccttcttcttcctcttcgacgacgtgggcgtgccgtccgactaccgccacatggaagggttcggcgtgaacacgtacacgttcgtgagcgcggcggggaaggcgcagtacgtcaagttccactggaagccgacgtgcggcgtgcggtgcatcctgacggacgaggaggcggcgctggtcgggggacggaaccacagccacgcgacgcaggacctgtacgctccatcgcggcggggagcttcccggagtggacgctgt

SEQ ID NO: 49624 - DNA, 297 bp, Zea mays
ataagaaatggatatcaagatttgatgtgtggccatatctggaaacatttgctgaggatgctgctggtgaaattgctgctgaattacaaggtactccagacttcataattggaaactacagtgatggaaatcttgtggcatcgttgctatcttacaagatgggaattacccagtgcaacattgctcatgctctggaaaagactaagtatccagattcagacatattttggaagaatttcgatgagaagtaccatttctccttcagttcacggctgatataattgctatgaacaatgc

SEQ ID NO: 49625 - DNA, 295 bp, Zea mays
gattctagggttttgctgctctccgaccccgagctccgatagccgcagcatcaggcgcgccccccctcgcgtgtgaccgagatggcgctgccgaatcaggggaccgttgattaccccagcttcaagctcgtcatcgtcggcgatggtggaactggtaaaactacatttgtgaagaggcatctcactggagagtttgagaagaaatatgaaccaaccattggtgtggaagttcatccgttggatttcaccactaactgtgtaagatcaggttctactgctgggataccgcaggcaa

SEQ ID NO: 49626 - DNA, 295 bp, Zea mays
acaaacccttgtattccaaaaggggaatgcaattcctagcactaaagctcttaccatctttaaatccagcacatttgaagttgatgttttgtatgtcgacccagataactcacaaattccacaaaaaataagcacttacacaattggccctttccaaacctccaacggagagaaggccaaactgaaagtgaaagtgcgtctcaacatccatgggaccgttacagttgattcggtgataatgctggaggaggatgtggaattccagtctcatctgcaaatgaagctccaaacgata

SEQ ID NO: 49627 - DNA, 299 bp, Zea mays
ggcatccgcagagagtttgttccgtccaggcaaccaaaaagcgttgccccgccgcgcagaggaagaagagagcagaggaggatggctcgtacgaagcagaccgcccgcaagtccacgggaggcaaggccccccgcaagcagctcgccaccaaggcggcgaggaagtcggcgccgacgaccggcggcgtgaagaagccccacaggtacaggcccggaaccgtggcgctgcgcgagatccgcaagtaccagaagagcacggagcgctgatccgcaagctgcccttccagcgcctggtgcgc

SEQ ID NO: 49628 - DNA, 298 bp, Zea mays
ccggcgactatggcttcgacccgctgggcctctcggacccggagggcaccgtggggcttcatcgagcccaagtggctggcctatggcgaggtgatcaacggccgctacgccatgctgggcgcggtgggcgccatcgccccggagatcttcggcaagatgggcatcatccccccggagaccgcgctgccgtggttcaagacgggcgtcatcccgcccgcgggcacctacaactactgggccgactcctacacgctcttcgcttcaacatggcgctcatgggcttcgccgagcaccgccg

SEQ ID NO: 49629 - DNA, 299 bp, Zea mays
cataaacaagatagacaaggagggagctaatgcagaacgagttatgcaagaactttcccaaattgggataatgccagatcatgtggggtggtgataccccaatgatcgagataagtgctcttactggggataatgttgatgaacttctggaaactgtcatgcttgttgcagagttgcaagaattaaaggcaaatccacataggaatgcgaagggcactgttattgaagcatgccttgacaaggccaaagggcctcttgctacttagttgttcagaatggaaccctaaacaaagctgata

SEQ ID NO: 49630 - DNA, 290 bp, Zea mays
gacgagtgtcaagtgagcctgaaacttgcggtgtcactggctggtatagcctgagtgtgagtgagtgatcgagctagctgagctccgatcctcgctagctagctaggataccgccataccacaagtcttcttcacaagtttaggagtgacagcaacaagagatctcgatggcctctgccaccgtgctcaagtcctccttccttcccaagaagtccgaatggggcgccaccaggcaggccgccgcgcccaggccgccaccgtctccatggtcgtccgcgcctccgcctacg

SEQ ID NO: 49631 - DNA, 293 bp, Zea mays
ggttcgacttcctgtcgcacctccccgagagcctgcacaccttcttcttcctcttcgacgacgtgggcgtgccgtccgactaccgccacatggaagggttcggcgtgaacacgtacacgttcgtgagcgcggcggggaaggcgcagtacgtcaagttccactggaagccgacgtgcggcgtgcggtgcatcctgacggacgaggaggcggcgctggtcgggggacggaaccacagccacgcgacgcaggacctgtagactccatcgcggcggggagcttcccggagtggacgc

SEQ ID NO: 49632 - DNA, 290 bp, Zea mays
gcgctcatcaatcgccagaggagttgttgatcgaggtgagtgaggttgaaaagcacaccatcgtcatggacggcggatactacggcggtcgcgatcagcgctacagcggcgggtactacggcggcggtggcatcgcaacgccggggtacgctccggcggtcccgtacgggatgtcgcaggtgaacatcgagggcaacgggtgcgggcgggcgctgccgccgcagccgaccgtgaaggtgtactgccgcgccaacccaactacgccatgagcgtccgcgacgggaaggtgg

SEQ ID NO: 49633 - DNA, 220 bp, Zea mays
accaccgccgcctgacccggaccgcgtccgtggggccgcgccgggccgccccggtgggactggccgtgcggtgcgagaagagcgacaagcagaagatgcagccgctcgccgcgctcgtgccccgcgagcagcgcttcatgttcgagggagacgagctctgcggccccgacatatggaatacaacctggtatcctaaggctgcagatcatgtaactaccga

SEQ ID NO: 49634 - DNA, 221 bp, Zea mays
ctcaccttttcgctgtactcactcgccacacacaccccctctccagctccgttggaactccggacaacagcaggcgcggggcggtcacgtagtaagcagctctcggctccctctccccttgctccatatgatcgtgcaacccatcgagctacgcgcgtggactgccttccctgggtccgcgcaggaggggatcggagagatgacggcatccgtttccaggg

SEQ ID NO: 49635 - DNA, 296 bp, Zea mays
caaccatctaccagcgactcagcgagcgagagcagcacacacgcagctagctaggagcagcagcagagcagcggcgatggcggcctccatgatctcctcgtcagctctggcggtggcgcctcagggcctgccgcccctcggccgccgcgcctcctccttcgccgtcgtctgctccaagaagaagatcaagaccgacaagccctacgggattgggggtggcctgaccgtcgacgtcgacgccaacgggagaaagggcaaggcaagggcgtgtaccagttcgtcgacaagtacggcgc

SEQ ID NO: 49636 - DNA, 288 bp, Zea mays
ggaggtcgccgagattgacggcgcccccaggatgggcccgacgtttggcgccatgatgatctccggccagaaggcggcgcacctggcgctcaaggccctgggcaggcccaacgccgtggacgggaccatgtcgccgccgttgcgcgaggagttgatgattgcgtacaaggacgacgaggtcgtggacgcctgagtgcggcaagcagagaggaggatcgacgccagcagcgtcttatcttaattgccttgttgtcaatgatgaatcgatcgaattcccttgggttagct

SEQ ID NO: 49637 - DNA, 295 bp, Zea mays
gagcattggggtcctttcctgtcattttcttgacaagctcctgaacagctggtattctagttgagccaccaacaagaataacctcatcaatatctttgaattgcaactttgcatctctaagggcattgtccacaggggtcctcagcctgtcaaggagatctgagcatagctcttcaaatttagccctggtaagagtagtctcaatatgcttgggaccatctgcagtagctgtaataaaaggcaagctcatgtttgtttggtcaaagatgacagttccatctttgccttctcagct

SEQ ID NO: 49638 - DNA, 294 bp, Zea mays
tacacacatacatagtttcttctactacacgacgacaaacatggggaagcctgcgaagatcggagagtggggtggatacgccggcgatcgtcgggatctgagggctactccggaccggctgatcgaggtgaaggtcacggcggacaacagcagctgcatccgctccatctccttcatctacatcggagccgatggcaaaccgtacgaggaggggccatggggtttcggccatgctggcacggagtacaagattgattgtgcaggttcgacgagagcttgacggagatctccggg

SEQ ID NO: 49639 - DNA, 292 bp, Zea mays
agggaatttcggttggacggtctggagaaccaggttactgcattggagaacgagtgttcaggtgattaccagtggattggtttctgtcacaatgatcttcagtatggcaatatcatgattgatgaagagaccaacgtgctgaccatcattgattacgagtatgcaagcttcaacccagttgcatatgacattgctaaccatttctgtgagatggcagcagactatcattcatcaaagcctcatatactggactacagagatatccagatgttgacgagcagaagcgttttgt

SEQ ID NO: 49640 - DNA, 294 bp, Zea mays
aggtggtttgcgtgtaaatccaaacctgtatgtggatggaaaggtttgcttaagtctcttaaatacttggaccggcagagggaacgaagtgtgggacccatcatcatcaagtattctacaagtactggtttcacttcagggattggttctcaatgaaaaaccctattttaatgaggctgggtacgagaagcaagttggtactgttgaaggggagaagaatgcagtgccgtataatgagaatacgtacctgctgagcgtaaatccatgctgtatatattgagacggcctcctttg

SEQ ID NO: 49641 - DNA, 296 bp, Zea mays
atggcgtcgtccatgctctccgctaccaccgtgccactccagcagggagacggcctgtccgagttctccgggctcaggagctccgcatcgctgcccatgcaccggaatgccacctccgacgacttcatgtccgccgtctccttcaggacccacgcagtcggcacgaacagcgggccgcggcgggcgccgacggaggcgagctgaaggtggccatcaatgggttcggccgcatcgggcgctacttcctgcggtgctggccgggcgcggcgacgcctcgcccctcgacgtcatcgcct

SEQ ID NO: 49642 - DNA, 288 bp, Zea mays
atccctcatctgcaccagaacctccaccaccaattgacgaaccattcaaagccttgggtgttgattacacaggagatgttgtgattccaagcttggagagtcataatgtccgtcagctttatccaaagggtcccaatattgacttcaagaaggagcttaggaccctcaacagagagcttcaattgcatattttggagctggcagatatattagttgagagaccatctcaatatgctcgtagggtagaagatttacgctcatattcaagaacttacatcatcttctcaa

SEQ ID NO: 49643 - DNA, 217 bp, Zea mays
cgtggccaccccgcgcgccggcggcagccccatccgcgcgtccatctcctcctcccccaccccgccctacgacctgacgtccttccggttcagccccatcaaggagtccatcgtgtcacgcgagatgacccggcgctacatgacggacatgatcacccacgccgacaccgacgtggtgatcgtgggcgccgggtccgcgggcctgtcctgcgcgtac

SEQ ID NO: 49644 - DNA, 284 bp, Zea mays
gcttgcttgcttcctttcgaaagtccttgcgtcacactcgccgatcgatcgagtctctccggattccagagaggcccaactgccgaagccatcgatcgccgccacctcttcgagcagaatagttgagaatggctgacgaggatatccagcctatcgtatgtgacaatggcactggaatggtcaaggccggtttcgctggtgatgatgcgccaagagctgtcttccccagcattgtgggaagaccacgccaaccggtgtcatggtcggcatgggccaaaaggatg

SEQ ID NO: 49645 - DNA, 286 bp, Zea mays
ctcgagccgaatcggctcgaggcgggttcaacctccccgaccccaaggagttcgcgtccagcatctacaagtcggtgcagaagggcctggacctgagccccgacgcgaccgtggaggaggacgacgaggcagaggagcagccggaggtggaggagaaggagccggagccggagccgtcgtcctacgacaaggacgagctttaggctttcggatttgttttcaagtctagctagctcccgctttactaggaagtgatgatatcggtgactgcctggttcaagtcacg

SEQ ID NO: 49646 - DNA, 290 bp, Zea mays
ctcgaaagctggcaagaagttcttcaacatgttgcctggagagatcgttcttgcttcgcttgacggatttgggaagatctgcgacgccgtggaggtggccggaaagaacgttttgtccacgtcgtcaactgtgacgaccgggctagtatctcacaggtacggagacaaagccgccgccgcaacgaacgaagggctggacgccgccgggcacgccatcgggacggcatgggccgtgttcaagatccggcaggccttaaccccaagagcgtcctcaaacccacggcgctggc

SEQ ID NO: 49647 - DNA, 289 bp, Zea mays
ggtggttgatattgttgacacattccgtctacaggagcaacctccttttgacaagaaatcatttgtctcttacataaaaaaatacatcaagaatctcactgctgtgttggagccagagaaagcggatgagttcaaaaagggtgtcgagggtgcaaccaagtttctccttagcaagctgaaggaccttcaattttttgttggtgagagcatgaaggacgaagcgtccgtggtattcgcctattacaaggatggtgcactaatccgacattcctctatttctctcatggtc

SEQ ID NO: 49648 - DNA, 290 bp, Zea mays
ccaaggcatatagttccccacttgaagatcctggaatcagcgctgcagaaaagaagcttattgctagtcagagcacagcaggcgaacctgttaaaacaattccatggagattaatactatcaaaaccacctgtttgggcacttatagtttctcatttctgccataactggggaactttcattttgctcacatggatgcccacatactacaatcaggttctgaaattcaacctcatggaatctggccttatctgtgtcttccctggttcaccatggcggtttctgcaaatg

SEQ ID NO: 49649 - DNA, 290 bp, Zea mays
ttcttcagggtcacctggacctgctggagatggttttcgccaagggagaccccggcattgcggcttgtatgacgagctgcttgtggcggaagaactcaagccctttgggaagcagctcagggacaaatacgtggagacacagcagcttctcctccagatcgctgggcacaaggatattcttgaaggcgatccattcctgaagcaggggctggtgctgcgcaacccctacatcaccaccctgaacgtgttccagcctacacgctgaagcggataagggaccccaacttcaa

SEQ ID NO: 49650 - DNA, 289 bp, Zea mays
gcttcctgcaggatggcactcctccttggcttgctgctgctagtagtagcttcgcccgcgatcgctgatgacgactccggtatctactaccagctggctcttatgtggccaggagcatactgcgagcagaccagcgctgggtgctgcaagccgaccaccggcgtctcgccggcgcgcgacttctacataacgggcttcaccgtccttaacgcgaccaccgacgctgcagtgacgggatgcagcaacaaagtccttacgaccctaacctgattaccggcatccaaggcct

SEQ ID NO: 49651 - DNA, 284 bp, Zea mays
gctttgagagacagcatccctgaagagattgcagaagcactatttgagataacactccctcggtcttcgggtgatgtgtttccaagaacagatgctggtatagttcttgcggttgctgatagattggatagcctagttggattgtttggagctggatgccagccaagttctaccaatgatccatttggacttcgaagggtctcttatggattggtccaaatattagttgagaacaaaaagagctttgcctcagacgagctctcaccttattggcaggggtgcaa

SEQ ID NO: 49652 - DNA, 215 bp, Zea mays
ccgacatcccgacctatgtcgtcggcgtcaacgagggcgactacgaccacagcgtcgcggacatcatcagcaacgcgtcctgcacgaacaactgcctcgcgccattcgtcaagatcttggacgaggagttcggaattgtcaaggggaccatgacgacgacgcactcgtacaccggcggccagaggctgctggacgcgtcccaccgcgacctccgg

SEQ ID NO: 49653 - DNA, 290 bp, Zea mays
ccgacttctccgggctcaggccggggtcgtgctccgtcgagcgtctgccgcgcgggcaggcgtccttctccgacgtccttggcgcgcagtcgtcgccaacgccaccggggagaacgccgtgagggcgcccgcagaggcgaactcgaaggtggcgatcaacggcttcggccgcatcggccggaacttcctccggtgctggcacggccgcgacgactcgcagatcgacgtcgtcgtcgtgaacgacagcggacgctcaggaacgcgtcccacctcctcaagtacgactcgat

SEQ ID NO: 49654 - DNA, 287 bp, Zea mays
cacactttgatcacacacaggaagttgagatcagaaaaatgcaggctgccgctactgccgccgggttctcggccgtgctgcccgccaagggcaggccggcggcgaggagcagggtggtggcccgtgtccccgccacaaggaggagcgtccgtgtagctgccgtcgtcgcgaccgaggccgcgcagatcgactacagctcaagcgtctcggtgttcccgatggaggcctgcgacctgcttggtggcgacgctgcaacgtgcccatgttcccggaggccaagcccgcct

SEQ ID NO: 49655 - DNA, 285 bp, Zea mays
cagcaggcgctcgaccgtctcttgccgtatcagaggtctgacttcgaaggcattttccgtgctatggatggactcccggtgaccatccgactcctggaccctcccctccacgagttccttccagaagggaacatcgaggacattgtaagtgaattatgtgctgagacgggagccaaccaggaggatgccctcgcgcgaattgaaaagctttcagaagtaaacccgatgcttggcttccgtgggtgcaggcttgtatatcgtaccctgaattgacagagatgcaag

SEQ ID NO: 49656 - DNA, 287 bp, Zea mays
atcggctatgattttagttcactgttggacagtcaggagggtgttgatgtcattcttaatgtgggaggagagaggtttcatgcccataagttagtgttggctgcacggtctcatgtattcagatctcaattttttgatgatgaatctgatggagagaagagtgaggttaatgagactgatgaactaaaagagttttctattgatgatatggagccaaatgttttcaaggcaatgcttcacttcatctataggatacccttgttgatgatgatgagttgggcgcgtca

SEQ ID NO: 49657 - DNA, 180 bp, Zea mays
ctttctgacattattattcccccttctcctgtgatgttcccggaggacagagatacctggaatgttcagctctttagatccattgacggcggtgctgcttttggcttccccgagactcctgatgaagctgcaagagctgggcttgtgagtggaaaggatcaaatcatcgaccggagtatc

SEQ ID NO: 49658 - DNA, 180 bp, Zea mays
cgaggacgaggtggatgtggaggtcggggagtacgttgagccgcccgaggaggccaaggtctacgtcggaaacctgccctacgacgtcgacagcgagcgcctcgctcagctcttcgaccaggccggcgtcgtcgaggtcgcagaggtcatttacaacagagaaacagatcaaagtcgtgg

SEQ ID NO: 49659 - DNA, 298 bp, Zea mays
tgttgatgctgtcatgacaatccccaagggaaccttgttccccatgtgtggcatgaaccttgccttcgacagggatctcattggccctgctatgtactttggtctcatgggtgatggccagcccatcggtcgctacgacgacatgtgggcaggatggtgtgtgaaggtcatctgcgaccacctgagcctgggagtcagactggcctgcaatacatctggcacagcaaggctagcaaccccttcgttaacttgaagaaggaatacaagggcatcttctggcaggaggacatcatcccct

SEQ ID NO: 49660 - DNA, 298 bp, Zea mays
gaagcatctgcatcaacaatccgaagagctcacgcagtccatcctatcactgcagtacagcttgaatggtcattatggtctagagatgcggaagaagatataattcccacttgcagagaacttggaattggaattgtagcttacagtccactaggcagagggtttttttgtagtggagcaaaactagttgactcactgtcagagcaggacttccgcaagcatatgcctagacttcaaccagagaatattgtcaagaatgctaagatattcgagcatgtgaatgcaatggcagctaaaa

SEQ ID NO: 49661 - DNA, 224 bp, Zea mays
agggcttcatcaatgccatgatatcaaacatctcattcacttacaggagcatttattccaagaaagctatgactgacatggatagcaccaacgtgtatgcttacatctcaataatcgctctaattgtttgcattccacctgcattgatctttgaagggcccaagctaatgcagcatggatttagtgatgccattcaaaagtaggtttgacaaagtttgtcagtg

SEQ ID NO: 49662 - DNA, 224 bp, Zea mays
caaggctcagctcgttgtcatcgctcatgatgtggatccgattgaactggttgtttggcttccagccctgtgcaggaagatggaggtcccatactgcattgttaaaggaaaggctcgccttggatcgatcgttcacaagaagactgcatcagtcttgtgtctgaccactgtcaagaacgaggacaagcttgagtcagcaagatcttggaggctattaaggcgaa

SEQ ID NO: 49663 - DNA, 222 bp, Zea mays
  unsure (1)..(222): unsure at all n locations
tgaaaggatctgctatcactggacctattggcaaggagtgtgctgacctttggcccaggattgctagtgcagcaaatgctattgtctgatactactggttgagatagttttattgtgatccattttaaccttttctgcacttcaacatctgtggaaatttacttgattaatgtactaaggganaagacgcttagcgcacaattagaataggccgaactgtgc

SEQ ID NO: 49664 - DNA, 157 bp, Zea mays
gggttcgtgaggttctccggggttcggtttcgtgggtgagcggatcgagatggcggcgtcggatgttgagtaccgctgcttcgtcggcagcctcgcctggggcacggacgaccactccctcgacaacggcttcagcacctacggcgaggtcctcgag

SEQ ID NO: 49665 - DNA, 295 bp, Zea mays
aacaaaaatggtgatacagaaagaagcgcctggtctcacatttgttatgcttcaagaaagtttgaagattacaccattcgcaatgctatcccgggccacagctggaatcagaggatcaacacttatcatcaacatgcctggcaacccaaatgctgtggcagaatgcctggaagcactcctcccagcgctcaacacgccctgaagcagatcaagggtgacaagagggagatgcaccctcgcaacactccacatgccgcagcggcgcctgtggaccagtgggagcggacttcagagc

SEQ ID NO: 49666 - DNA, 222 bp, Zea mays
cgtctcccttttgcgtgacaaagaaagagagcgagaagcagtcgccatgtctggcatcatccacaagatcgaggagaagctccacatggggggcgaccacaagaataaggaggaggagcaccacaagaaggccgaggagcaccacaagaaggaggagggggagcaccacaagaaggacggcggggagcacagaaggcatcgtggagaagatcaaggacaaga

SEQ ID NO: 49667 - DNA, 294 bp, Zea mays
cccacgacgggctcctggtctgggactccatcaggcagtgggcgtccgagtacgtcaacgtctactacaagtccgacgaggccgtggccgccgaccccgagctgagggcgttctgggacgaggtgcgcaacgtggggcacggcgacaagaaggacgagccgtggtggcccgtgctggacacccgcgacagccggtggagacgctgaccaccatcatgtgggtcacctccggccaccactcggccgtcaacttcggccagtaccacttcgccggctacttccccaaccggccgac

SEQ ID NO: 49668 - DNA, 222 bp, Zea mays
  unsure (1)..(222): unsure at all n locations
tggttttcatttggattggtcagtgcgtggaatcaaaagagaaacagaaggcatttgatattggccagaaatacgtggagcatgcaaattctattgatgatctttctccatatgcaccactatataaagttatggaagggaatgagccatgcttcttcaagacatatttctcttgggataacacaaaatctttgttcatgganattccttccagaagagact

SEQ ID NO: 49669 - DNA, 221 bp, Zea mays
tctggcttttggccaggatggttctgcagatgaggggcactatcctccctgggcacaagtgggaagtcatggttgatctgttcttctacagagacccagaggaagcgaaggagcaggaggaggaagctgctgcggcccctgagtttgctgcagtcactgattaccaaggagctgatcagtggggtggtgacgtggactctgatgtggctgcacacctgttg

SEQ ID NO: 49670 - DNA, 220 bp, Zea mays
ggactcgatccccaacagcccgagcctgaggttcttcgacgtggtggaccgcgccaaggcgtccctggaggcgcggtgccccggcgtggtgtcctgcgccgacatcctcgccttcgcggccagggacagcgtcgtgctcaccggcggcctcggctacaaggtgccgtccggacgccgtgacggccggatatcaatgccacgcaggccctgaacgagctgc

SEQ ID NO: 49671 - DNA, 298 bp, Zea mays
atatctagctatagtagctcccttgagaagcatttgccggaggagccatgtctgaggagaagcaccaccaccacctgtttcaccaccgcaagccagaggaggagggcgcctccggcgaggtcgactacgagaagaaggagaagcaccacaagcacatggagaagctcggcgagctcggcgccatcgccgccggcggtacgccctgcacgagaagcacaaggccaagaaggacccagagaacgagcacgggcaccgggtcaaggaggaggtggccgccgtcgccgccgtgggctccgcg

SEQ ID NO: 49672 - DNA, 294 bp, Zea mays
  unsure (1)..(294): unsure at all n locations
catggtcttatccgggatgctgagggtcgaaaaatgtcgaagacattagggaatgtcattgatcccctagataccatcaaagagtacgggacagatgctttgagatttacactatctttgggcactgcaggccaggacctcaatctctctacagaaaggttgacgtcaaataaggctttcacaaacaagcgtggaacgcagggaaatttttgttacagaacttgcctgatanaaatgatgtctctgcatgggatgtcttgttatctaataagttcgactcagaaacatcactcc

SEQ ID NO: 49673 - DNA, 209 bp, Zea mays
cgcagtcctgcatggaccccaacgtcatggaggccaaggtcgtggtcagctcctgcggccacgacgggcccttcggcgccaccggcgtcaagaggctccaggacatcggcatgatcagcgccgtgccggggatgaaggcgctcgacatgaacaccgccgaggacgagatcgtgcgcctcacgcgcgaggcgttcccggcatgatcgtca

SEQ ID NO: 49674 - DNA, 292 bp, Zea mays
cccgcaacctatcgacccaatctcgtccgacccggcgcgtcgtcccctccagatctccgtcgccctctccaggtagcagaaactgttctgctgcagtctgacaaagtggagggcttaggagcttctgcttcttttatgtctgaacaatctttgctttatttgggattgttgggagagtactctcgtgcaataggaaaaggcacaaggttccgtcacactgcatgcgtcaagagactgtctggttttcttgttctgatttgtcatttgctggtgctcaaagccggcttggttt

SEQ ID NO: 49675 - DNA, 294 bp, Zea mays
gtcgccctcaaattcgttccgtccaggcaaggaagaaatcgagcagccaaggagaggagaagatggctcgtacgaagcagaccgcccgcaagtccaccggaggcaaggccccgcgcaagcagctcgccaccaaggcggcgaggaagtctgcgccgacgaccggcggcgtgaagaagccccacaggtacaggccgggacggtggctctgcgcgagatccgcaagtaccagaagagcacggagctgctgatccggaagttgcccttcaagcgcctggtccgtgagatcgctcagga

SEQ ID NO: 49676 - DNA, 216 bp, Zea mays
  unsure (1)..(216): unsure at all n locations
ggaaagcagcttgagctggaaggcgtggactccttcaagaagagctttgacagcctactcgtgagcctgcaggagaagggcaacagcctcaagatggcgagtgtgtaaagctgagaagattgggtacctgcgagtgaacgattttactaaatanaatgctagcttgctggctctcctcttagtttttacgctgtactttgctctcaattttctgag

SEQ ID NO: 49677 - DNA, 215 bp, Zea mays
ctatggttcagaaagcaatggactacattgatttgacaccagacattgacacacgcgtcgagctaatcaaaacactgagcagcgtctctgctggcaaaatttatgttgagatagagagagcaagattgatcaaaaggcttgcaaatatcaaagaggagcagggaaagattgacgaggctgctgatttgatgcaagagttgctgtcgaaacatttg

SEQ ID NO: 49678 - DNA, 202 bp, Zea mays
gttcatcgaacgctacggcaaccccgtccgccgtgacgagctcaccttcaacgccacaagattgaacggcccatcggaccagatctacgtgttctttcctaatgaggcaaagcccggggtgaagacaatcaggaactacgtcgagaagatgaagaacgagaacgtcttcgccggcatactcgtggtcagcaggcgctcagcg

SEQ ID NO: 49679 - DNA, 206 bp, Zea mays
agcgatccgaagctcaatcaattcactcaaacctcttccccaaatcttcgattagattctcgttgacaagaagactagaaccgaacctgaccatgtcgctgatccgccgcagcaacgtgttcgatcccttctccctcgacctctgggacccctttgagggcttccccttcggctccggcagcagcagagtctcttcccctcgttcc

SEQ ID NO: 49680 - DNA, 206 bp, Zea mays
tgatgatacagtggatttcgttggacatgcacttgctcttcatagagatgatcgttatctcgatgaaccggcacttgatacagtgaaaaggatgaaactatatgcagactctcttgcacgctttcaaggaggctcaccttatatctatccactatatgggttgggtgagctaccacagggttttgacgactgagtgctgtttatgg

SEQ ID NO: 49681 - DNA, 288 bp, Zea mays
ccacgtcgcagctcgccggcctctccctctccgcgggcgccgcaactccaaccgccgtcgccttcctcccaaagaggcagcagctccagcccattgtcgcgcggcgggtgtgccctttcacgggcaagaagacgaaccgggcgaacaaggtgtccttctccaaccacaagacgaagaagcagcagttgtgaacctgcagtacaagaagctgtggtgggaggctggcaagcgcttcgtcaagctgcgcctctccaccaaggcgctcaagaccatcgagaagcacggtct

SEQ ID NO: 49682 - DNA, 284 bp, Zea mays
gctcaaggccctgggcaggcccaacgccgtggacgggaccatgtcgccgccgttgcgcgaggagttgatgattgcgtacaaggacgacgaggtcgtggacgcctgagtgcggcaagcagagaggaggatcgacgccagcagcgtcttatcttaattgccttgttgttcaatgatgaatcgatcgattcccttgggttagctttattattgttgttgttattattaatttgactcgctatagtgtgtcgtgttcatagcaccaccaccgcgccatcgacatgcca

SEQ ID NO: 49683 - DNA, 286 bp, Zea mays
  unsure (1)..(286): unsure at all n locations
ctcaaagatctcaagaaagagttctgctgcaatggtacagtggtccaggacccagaacttggacaggtcattcagctccagggtgatcagaggaagaacgtctcgaatttcctcgtccaggccggcattgtgaagaaggagcacatcaagattcatggtttctgagcaaccgccgggtccatagcaaaccaacctgcatgcaggngcagcttattatatataatatctgaggtggagcatatctatctggctgtgtactgcaagcaggcctagtatcgcgctgcgc

SEQ ID NO: 49684 - DNA, 298 bp, Zea mays
  unsure (1)..(298): unsure at all n locations
cccaaacacaatcatttattcgtcgatagcttccgctctctccggagaaggtaggattaacaaggtcattcagatgtttgagaacatccaagatgccacagtaaggtccgatgcagtgctctacaacgcagttatttcttcgctctgcaaaagaggggaaactgaccgcgctattgagtttttggcatatatgtgtccagtggatgcgttcccaatgaatctacctacactatccttatccgaggcttagcgagtganggatttgtanaggaggcgcaagagatactgactgagctgt

SEQ ID NO: 49685 - DNA, 305 bp, Zea mays
tgttaatgaacattttgtatgtttctcctgtgttgatggtgaactttatgagcttgatggacgaaaatcacaacccacatcccatggcccttcatcacctgaaaccttgttgcaggatgctgcaaaagtcatcaaagctagaattgcagagaaccctaactcgatgaacttcaacgtcatggctctttcaaagaagtgaagtgtactgtgatggatggattttctttggcagaatacgggcctctttccctttcgcttccgctgagctgagctgcaccgagtggaaggtttgattaggcacacat

SEQ ID NO: 49686 - DNA, 309 bp, Zea mays
cgatgacttggctgtctacacttcgttttcggctgctccctcgtccaagtatatcaacgtagcaaggtggtttaaccacattgatgcgctcgtgaggctgagcggaattactgcagagggccaaggtgtgaaggttgaatcctcagcagttccttcagccccaactccagatgttgctgaagcacaggccccagttgctgaggaggacgacgacgatgatgttgacctttttggtgaggagaccgaagatgagaagaaggctgctgaagagcgtgctgcagctgccaaggcttctggaagaagaaagaa

SEQ ID NO: 49687 - DNA, 308 bp, Zea mays
  unsure (1)..(308): unsure at all n locations
agcagatccgtcgttgccggaacccacgctcgccggctgcgaatgcatctgtagcctgctcttcgtccacacggacaattggacgagctagactctgcgtcgccggcgatggggtgctccttctcagggctgaacgcactgtacgacaccgtcggcggtcggggtggtgacgtctgggttaacgactaccacttccgcgtgctccgcagctcggcgatgccggccctgcgggctcgtcggtcttcctcgtcaaggaggtcgtcgccgccgcaaccgcctccgacggcacggctgngcagagcccggcg

SEQ ID NO: 49688 - DNA, 289 bp, Zea mays
ctggatctggatttggccaagttcctggaacatggcacgtcagatgcacgatcctgccgcaggaagataaaatccccgcggtgatcacccgcttcaaggctttccatgaggcgttcatggctgagtaccgtgactgaactgttacagtggctgagtaccaccgtgtagaccgaaacaaaataaagctcccccctctctctgtgtctgtgcgtgtgtgtgaactgatctctgaatggacgaacaatgtactctgttggcgcctttaatggcaattgaggaaattttgatc

SEQ ID NO: 49689 - DNA, 297 bp, Zea mays
ggcaaggaggtcaccaagaaggtcggcctcgtctaccagctcaacatcgcccccaagaagatcggcgttgatgaggagatcttcgtggtcgacctcaagaagggcgaggtcaccaaagggccgtaccagggaaagccggatgccactttctccttcacggacaacgatttccttggaatcgccaccggcaagacgaatccgcagattgcattcattcgaggggcgattaaaatcaaggggagcatcagtgcggcgcagaagttcacccctgacatcttccccagcctgctaagctgt

SEQ ID NO: 49690 - DNA, 298 bp, Zea mays
gtctcgatgatgttgtgaagcagtgcaggggcaggaacctcttcttcagcactgatgttgagaagcacgtcgctgaggctgacattatctttgtctcggtgaacacccccaccaagacccgtgggcttggagctggcaaggctgccgacctcacctactgggagagcgctgcccgcatgattgcggatgtctccaagtctgacaagattgttgttgagaagtccactgtccctgtcaagaccgctgaggctattgagaagatcttgacgcacaacagcaagggctcaactaccagatc

SEQ ID NO: 49691 - DNA, 302 bp, Zea mays
ctccaacgcagcaagcagacacagggacaggcaggcagcgagtgcaaccgcgagagcgatcagcgatgggctccttcttctcgaccttagtgacgccccctccgcccgccgccgacgacccgaactgcgccgtggtggccgcgcactccaaggccacctacgacgagcagtgggcggcccacaagagcagcagcaagctgatggtgatcgacttctcggcgtcctggtgcgggccctgccgcttcatcgagccggccttcaaggagctggcctcccgcttcaccgatgcatcttcatcaagg

SEQ ID NO: 49692 - DNA, 302 bp, Zea mays
ctcgagcgcaaccatctaccagcgactcagcgagcgagagcagcacacacgcagctagctaggagcagcagcagagcagcggcgatggcggcctccatgatctcctcgtcagctctggcggtggcgcctcagggcctgccgcccctcggccgccgcgcctcctccttcgccgtcgtctgctccaagaagaagatcaagaccgacaagccctacgggattgggggtggcctgaccgtcgacgtcgacgccaacgggagaaagggcaagggcaagggcgtgtaccagttctcgacaagtacggc

SEQ ID NO: 49693 - DNA, 303 bp, Zea mays
ggcgcgacacgctcttctgcgaggtggctccgaacccgccgccgcgggaggagctgccggagccactgaggaacgtgatgctggagtacggcgcggcggtgacgaagctggcgcggttcgtgttcgagctgctgtccgagtccctcggcatgcccagcgaccacctgtacgagatggagtgcatgcagaacctgaacgtggtgtgccagtactacccgccgtgcccggagccgcaccgcaccgtgggcgtcaagaggcacacggaccctggctttcttcacatcctcctgcagacggcatggg

SEQ ID NO: 49694 - DNA, 238 bp, Zea mays
gcgcgacacctgccgcgagatcgggttcacctccgacgacgtgggcctcgacgccgaccgctgcaaggtgctggtgaacatcgagcagcagtcccccgacatcgcgcagggcgtgcacgggcacttcacgaagcggcccgaggagatcggcgcgggcgaccagggccacatgttcgggtacgccaccgacgagacccccgagctgatgccgctgagccacgtggctggcaccaagctg

SEQ ID NO: 49695 - DNA, 289 bp, Zea mays
gttccttcggaggagagcaaggaatgcagctgggctccgatatttgtgaggcaatcaaacttcaaactacccgctgatccttcagtaccgattatcatgattggccctgggaccggtcttgcacccttccgtggcttcttgcaggaaagacttgctcaaaaagaatctggagctgagcttggtcgatctgtgttcttctcttggatgcagaaacagcaagatggacttcatctatgagggcgagctgaacaatttcgttgagcaaggagcactgtctgagcggttcttg

SEQ ID NO: 49696 - DNA, 292 bp, Zea mays
ataaagcagctcctccggtgggcggcgaactactcctcgtcgccaaaaccctagccctgcttctttgccatggcgagcagcgctagccaggcgagcctcctgctccagaagcagctcaaggatcttgcgaagaaccccgtggatgggttctccgccgggcttgtagacgacagcaacatcttcgagtggcaggtcaccatcatcggaccgcctgacaccctatatgatggaggctacttcaatgcaataatgaccttcccccagaactatcccaacagcccgcatcagtaag

SEQ ID NO: 49697 - DNA, 288 bp, Zea mays
cactcccaagccagtacccacagtcctacgagcagtcgcacgcaagtgtcaagagacaaaacggtcgacatggctcgcacgcaatctgccgtagcggtcgccgtggtggccgcggtgctgctgctggcagcggcggcgacgacctcggaggccgccatcacctgcgggcatgtgagctccgccatcgcgccctgcctctcctacgcccgcagcacggggtccggcccctccgcgtcctgctgtagcggcgtcaggaacctcaagagcgcgcgccacaccggcgcgaca

SEQ ID NO: 49698 - DNA, 292 bp, Zea mays
gcggcctgaacatgatgttccagctcgcgacgacgctgggcatcttcacggcgaacctgatcaactatggcacgcagaacatcaagccgtgggggtggcggctgtcgctgggcctcgcagcggtgccggcgctgctgatgacgttgggcgggctctttcttccggagactcccaacagcctcattgagcgctggcgcgtggaggagggtcggcgcgtgctggagcgcatccggggcacggccgacgtggacgccgagttcacggacatggtggatgcgagcgactggccaac

SEQ ID NO: 49699 - DNA, 156 bp, Zea mays
  unsure (1)..(156): unsure at all n locations
gcttacttcgcagcagatgctgctgctcatgcctcgaagaaatcctcaccccgtngtgaccaatggagaagtccaaaatgctgctgctgctctcaacggctctgaccatcgccgtgggaccaacgtatagtgctagattagatgcccagcaaagaa

SEQ ID NO: 49700 - DNA, 301 bp, Zea mays
ccgatccccaattcctccttcggatctcgcattcagcgcacgcaggtgtgaaggaagggggacgcggaggaagatggggctcgcgttcgggaagctcttcagccggctcttcgccaagaaggagatgcggatcctcatggtcggcctcgacgccgccggtaaaaccaccatcctctacaagctcaagctcggcgagatcgtcaccaccatccccaccatcggtttcaatgttgaaactgttgagtacaagaacattagcttcactgtctgggatgtcgggggtcaggacagatcagacctc

SEQ ID NO: 49701 - DNA, 294 bp, Zea mays
ccgccgcagaggcgcgcctctgggcctaccccgatgtatagcaacttcaaggagcaggcgatcgagtacgtcaagcaggcggttcaggaagacaatgccggcaactacgtcaaggcgttccctctctacatgaacgcgctcgagtacttcaagacccatctcaagtacgagaagaaccccaagatcaaggaggccatcaccgccaagttcaccgagtacctccgccgcgccgaggagatccgggccgtcctcgacgatggcggcgcggggccggggggcaacggacgtgacgca

SEQ ID NO: 49702 - DNA, 300 bp, Zea mays
cctgggtcgccgagtacaggaagtggatggacagggcgggccacggcatgccctactacttcggccacagcaccctgtcgccgccgcccgtgccggccgtcgtggagcaggcgcccgcagggccgtcgcggggatctcggcctcgttcccggccaagggcggcgtcggcatggtgcacgcgcccaacccgaccaacaggtacttccgccacgtcgtgcactgcaagggttgcagggcaaccgtcaaaaagtacacctcgttgaagaccgtgttcgcggccctcgcgcggcggccctatcg

SEQ ID NO: 49703 - DNA, 302 bp, Zea mays
tctgggctggcttttggagtgcaatggcttcaaatgttacctttcaatcccgaaatgtattgagcaagaagctcatggttaagaaagaggaatccttggacaaccttaatctcttctctatcattacagtgatgtcatttttccttttggcccctgttaccttctttacagaaggtgtcaaaattactcctacatttttgcaatctgctggtctgaatgtaaaccaagtccttacaaggtgtcttttcgctggactgtgtttccatgcataccaacaggtgtcttacagattttggcgatgg

SEQ ID NO: 49704 - DNA, 250 bp, Zea mays
ctctcatggttcaccaactggatctgcatcatccttggagtgcttctgatggtgctggcgccgattggagggctccggcagatcattatcagcgccaagacatacaagttctaccagtaaacattgcacgattatcgtccaaaaacataccagttctaccagtaactgacagacaagtcttaggccatatataccatgttaccatcagctgacacaggttctggattctgttccatgagggctccaactc

SEQ ID NO: 49705 - DNA, 280 bp, Zea mays
gtgcgagggcgacaaccagcgctggaagatccagccctactactgaaccaacggatgatatgaccatcgcgcccatcgatcgtgcacatgcatgcatacgtactagcagaataacaggggtcttatctcccgaggcgtcttttgcatgcatgccagcagttgcatagataaagcaggagcgagacaaagggtgttcatgtatattgcagctgtatcactgtatgtatgtgccattgtgccttgtaataatacatataataataaagttgctcggaggtat

SEQ ID NO: 49706 - DNA, 290 bp, Zea mays
ctctcatggttcaccaactggatctgcatcatccttggagtgcttctgatggtgctggcgccgattggagggctccggcagatcattatcagcgccaagacatacaagttctaccagtaaacattgcacgattatcgtccaaaaacataccagttctaccagtaactgacagacaagtcttaggccatatataccatgttaccatcagctgacacaggttctggattctgttccatgagggctcccaactccttgtttaatttggcacgacaaaaagctgcaccgggtgc

SEQ ID NO: 49707 - DNA, 296 bp, Zea mays
cgacgcgtacgtagcacagtccattattgccgtctcccttttgcgtgacaaagaaagagagcgagaagcagtcgccatgtctggcatcatccacaagatcgacgagaagctccacatggggggcgaccacaagaataatgaggaggagcaccacaagaaggccgaggagcaccacaagaaggtggagggggagcaccacaagaatgacggcggggagcacaaggaaggcatcgtggagaagatcaaggacaagatcaccggcgagcacggcgacaagtccgggaccacaaggagaa

SEQ ID NO: 49708 - DNA, 297 bp, Zea mays
agcaaccacgggcggactcggagcgtcctcctcctcccgtctataaattcccctccttttcttcctccatatataggggccatcagatccaagaagagggaagagcaccaaggaccttcggcgcccgttcaggatccacatcttcccgagcgagttcttggttgacctcttcccccttcggaccacctccaaggctcttggtgtagcttgccactctcaccaatcaagttttcatgtctgatctcgacattcagatcccaactgccttcgatcccttcgctgaggcaatgctgggga

SEQ ID NO: 49709 - DNA, 293 bp, Zea mays
ccggattcggcaagggtggtggtcttggcggcggcgatggccttggcggtggaagtgggcatggcatgggtgccggattcggcaagggtggtggtcttggtggcggcggcggcggaggtggtggcggcggcggcggtgggtttggcaaaggatttggctttgggtttggcaaaggcagcgggttcggtggtggtggcggcggtgggggcggcggcggcatcggtgatcaccattgatacgtcagcatgcagcatacgtctcctatggttctatcacttactttgtattcgttc

SEQ ID NO: 49710 - DNA, 290 bp, Zea mays
tgtgttgcctaatatccatatagctgactgtggccataagattggactgaatggcgttgataatgggcggatttggtttcagaatatacgtgttcctcgtgagaacttgcttaatttggttgctgatgttttgccagatgggcgatatgttagcatgatagataatccagatcagaggtttgcagctttcctatctccgcttacacttggtcgagtaaacattgcagttaactcagtctacatttcaaaggtcagcctagcaattgctgtgagatacagtttgtcaagag

SEQ ID NO: 49711 - DNA, 252 bp, Zea mays
ggcaagaccgccgtgccggcggtgctgcggacgtcgggcaccctgtggggcgacggctcggacacgttcgccgccgtctgctcgcggcgcggcgagaagggcatcaaccaggactgctccatcgtctgggagggattcgggtgccaggagggcaccatcttctgcggcatcttcgacggccacggcacgtgggtgcactacgtggccaaggtggtgcgcgactcgctgccgccgtcgctgctgtgccactgg

SEQ ID NO: 49712 - DNA, 290 bp, Zea mays
cggctcgagcgcgcctccactcccccctcgcaggcgctggccaggtaagtcggcggcggcgctgacaacgcgcttcaagaagaaccgcaagaagcgcggccacgtgtccgccgggcacggccgcatcggcaagcacaggaagcacccgggaggtcgcggtaacgccggtggcatgcaccaccaccgtatcctcttcgacaagtaccatccggggtacttcggcaaggttggcatgcgttacttccataagctccgcaacaagttctactgccccgcggtcacatcgagcg

SEQ ID NO: 49713 - DNA, 269 bp, Zea mays
cgccgacaaaaccagaccaccaaacaagtgccagcgcactctcgcagtcgccgcaatggagagcaccttcatcatgatcaagcctgacggcgtccagaggggcctcattggtgagatcatcagccgttttgagaagaagggcttctacctcaaggccttgaagcttgtcaacgtggagaggtcgtttgccgagaagcactacgccgatctcgcctccaagcccttcttccagggcctcgtggactacatcatctctgggcctgtggtgg

SEQ ID NO: 49714 - DNA, 296 bp, Zea mays
ggcgaggctcctcctatagagccgttggatagtcaactgagcttagatgatctagacgttataaaagtgatcgggaaaggtagcagcggaaatgtgcaattggtccgccacaaatttactggccagttttttgctctgaaggttattcaactaaatattgatgagagtatacgcaaacagattgccaaggagttgaagataaacttatcaacacagtgccaatatgttgttgtgttctatcagtgtttctatttcaatggtgccatttctattgttttggaatacatggatgtggc

SEQ ID NO: 49715 - DNA, 290 bp, Zea mays
tgcgcctccatttcggcctctgtccctcgcaagttcaatctcacctccattcatgggtaaagagaagtcccacatcaacattgtggttattggtcatgtcgactctggcaagtcgaccaccacaggacaccttatctacaagcttggaggcattgacaagcgtgtgatcgagaggttcgagaaggaggctgctgaaatgaacaagcggtccttcaagtacgcgtgggtgctcgacaagctcaaggctgagcgtgagagaggtatcaccattgatatcgctctgtggaagt

SEQ ID NO: 49716 - DNA, 292 bp, Zea mays
tcaatgtcatggctagtcaaggtgagcattactatactatgaggcatacactgtttgagatctacaccaagtacgtgccgatcaagcacatcgctagaggagcttacggaatcgtctgctcatctgttaaccgcgagaccaatgaggaagtcgcgataaacaagatacacaacgtctttgacaaccgtgtggatgcgctaatgacgctgagatagctgaaactccttcggcacctgaggcacgagactgctattgctctcaaggacatagtgatgcctgcgcatagaatgag

SEQ ID NO: 49717 - DNA, 285 bp, Zea mays
ttttcacttttcgtgaacttgcagctgccactaagcacttcagacaagagtgcttattgggtgacggaggttttggtcgtgttcataaaggacgtttggagaatggacaggttgttgcagtgaagctacttgatcgcaatggccttcaaggaaacacggagtttctggctgagcgtctaatgcttagtctgatgcaccatgacaatctagtaaacttaattggatactgcgctgatggagaccaacgtcttcttgtatacgagtttatgccattgggatcacttg

SEQ ID NO: 49718 - DNA, 284 bp, Zea mays
tgctagagtcgacaatgtcgctcgtgaggcgcacaacgtgttcgaccccttctccatggacctctgggaccccttcgacaccatgttccgctccatcgtcccgtcggcgacctccaccaactccgagactgccgccttcgccagcgcccgcatcgactggaaggagacgctcgaggcgcacgtgttcaaggccgacctctccggcgtcaagaaggaagaggtcaaggtcgaggtcgaggacggcaacatgctggtcatcagcggccagcgcagcatggagaagg

SEQ ID NO: 49719 - DNA, 284 bp, Zea mays
gctgcattgcattgcaggccccgccgtctccgtggggcgaccttgaggaggtgctggcgcgcgcggcgaccaaggaccgcacggtgatcatgacgcagatcaacgcggcgtggacgcgcccgggctcgctgctggacctcttcttcgagagcttccgcacgggggaaggcggcgtggcgcgcctcctggaccacctggtcatcgtcaccatggacccggccgcctacgagggctgcagggccgtgcacagccactgctacttcctccgcacgggcaacggcgtc

SEQ ID NO: 49720 - DNA, 284 bp, Zea mays
tagagatcgtatatgtagcggctcctttgatgagaaatcacaggagctttatgagttctgcctagaccagggttatgcagaccgtaacctgattgcaaagtggaaaaagccaggttacgagcgcctttgttgcctccggtgcatacaaacacgtgaccacaacttcgcaacgacatgcgtctgccgcgtccccaagcatctgagggaggaacaggtgatagaatgtgtccactgcggctgcaggggttgtgccagcggtgactaatcttgtcatcatgttgttg

SEQ ID NO: 49721 - DNA, 281 bp, Zea mays
cggatggcgaaggtggcggcggggttgggcgtggcggcgtccgcagcctccacgtccttctacacggtggacggcggagagcgcgccgtcatcttcgatcgcgtccgcggcgtgctcccgcgtacgatgtcagagggcacccatttgctggtccccatccttcagaagcccttcattttcgacatccgcactcgccctcacagcttctcctccacctccggcaccaaggacctccagatggtcagcctcacgctccgcgtcctgtcgcgacccgacgtcga

SEQ ID NO: 49722 - DNA, 284 bp, Zea mays
cagcgacgccccaaccgacgagcaactgctggcgtacgctgagctgcccagacatggccgctacatggcggaggtgttcgccgtgcgcatcctcgccaccgccggacgagacccgccgccccatggcaccatcactttctacggcggccactgctgcagcgatttcatttacagctggagtccactggaagatggagaagacacctcgaagcaaacctgcgacagccagggtaacctcgtgctaactgggccatcatgggccacctcggcatacagtccaattg

SEQ ID NO: 49723 - DNA, 281 bp, Zea mays
tctgctcgagctcgaccgatcgtcccttcgtccccacgagcaaccgataatccgccggcgttgagaatttggtttatcaggatctcctatctggcgacgagctcctgtcggattcattcacctacaaggagctcgagaacggcgtcctgtgggaggtcgagggaaagtgggtcacccaaggtcctgttgatgtggacattggtgccaatccatccgccgagggtggtgacgacgaaagcgttgatgacacagctgtgaaggtggttgatattgttgacaca

SEQ ID NO: 49724 - DNA, 280 bp, Zea mays
gctgtgctggcctcatcaacccttcctccccaggacgtgatgaaggctctcctggaggctctctttggtggtgtgggtaagggattcaccaaagaggttgtgaagaacaagaagtaccttgcagttgctgtgccagatgagggtgcccagacccttctggttcaggccattgaggcttttggtggtaagtgcaaccctgaggcgctgaaggaggttcccgttgtcctcaaagccctctacgatggagatatcctggacgaggaaaccattgtggactggt

SEQ ID NO: 49725 - DNA, 280 bp, Zea mays
attgcgtgcttcgcttaaggcatatatacagacttggataatgtatgtgcagatataaattgaatgagtgttgggtcactacatgtaacatgctattattgtaattaacaggtggcaacaaggtgcaatgatcctcagctgatagacttcatcgagagtgagttcctcgaggagcaggtggaagccataaataaggtctccaagtatgtcgcacagctgaggagagtgggcaacaaggggcacggttagtctgttgctaataaacttggtttcatctgct

SEQ ID NO: 49726 - DNA, 282 bp, Zea mays
ccgacatcgtcccttcgtccccacgagcaaccgataatccgccggcgttgagatgttggtttatcaggatctcctatctggcgacgagctcctgtcggattcattcacctacaaggagctcgagaacggcgtcctgtgggaggtcgatggaaagtgggtcacccaaggtcctgttgatgtggacattggtgccaatccatccgccgagggtggtgaggacgaaagcgttgatgacacagctgtgaaggtggttgatattgttgacacattccgtctacagga

SEQ ID NO: 49727 - DNA, 287 bp, Zea mays
cggatggcgaaggtggcggcggggttgggcgtggcggcgtccgcagcctccacgtccttctacacggtggacggcggagagcgcgccgtcatcttcgatcgcgtccgcggcgtgctcccgcgtacgatgtcagatggcacccatttgctggtccccatccttcagaagcccttcattttcgacatccgcactcgccctcacagcttctcctccacctccggcaccaaggacctccagatggtcagcctcacgctccgcgtcatgtcgcgacccgacgtcgaacacct

SEQ ID NO: 49728 - DNA, 282 bp, Zea mays
cggcactgtcactagctagttgctctactagagggcgggtatagagctgcctgcaatccgccgctgagaagggaggatcggaagcgacgatgaggtcgtttgctcctgtctttctgtcggcggtcgtggcctggctggagctggcgggcaccgcgcagggcggcaacttctaccaggacacagagatgacctggggcgatggccgcagcaaggtagtggacggcgggcgcgggctggacctgacgctggaccgcacgtccggctccgggttccagtccaaga

SEQ ID NO: 49729 - DNA, 295 bp, Zea mays
taaaagaacagctcgccgcggctccgaatggcaacttccccgaaccccgcgacgattcaccgagccggcgcccagtgacccttccagaagcttccagaaggtcaccgccatggccgcgcccttcttttccactcctttccagccctacgtctaccagagccagcaaggatctgtgacggcgtttcagatatccggtggagatgtgcaggtcctgcaggtgatgctgaagtctcaggagaagctgactgcaaaccaggtgcaatgtgctacatgtcctgggatatgcagatggaca

SEQ ID NO: 49730 - DNA, 279 bp, Zea mays
gcagaatgcaaggaatgcaagttttgcaagagcggaaagaccaacctctgtggtaaggtccgaagtgccacaggcgtaggtgtcatgatgaatgatatgaagagcaggttctctgtaaatggaaaacccatttaccatttcatggggacatcaacattcagccagtacactgtggtgcatgatgtcagtgttgcaaagatcaacccacaggcacccttagataaagtctgcctgctcggttgtggtgttcctactggtcttggagcggtgtggaatact

SEQ ID NO: 49731 - DNA, 279 bp, Zea mays
gctccccttggctacagcattgaggacgttcgacctgccggatcgtagaagaagttccagtctgctgcttactccaactgcgcgaagaagccatcctgatatcccttttggcttcctcattctagtagtttaggatttcttttctgacactttgattctgaccaatctctctggcctgctgcttcctgataatcgaccagttccccagtcttgctccttgcactcctccctccatctccagcattgtgttctgattcacctgctccaatggctgttctt

SEQ ID NO: 49732 - DNA, 277 bp, Zea mays
cgccggagctcgacaaggacgaccgacgacgcacgcggagatccggcgtactgcaaattttgaaaactgaactgtaagatggcatcagcagagctttcccgtgaggaaaatgtgtacatggcgaactcgctgagcaggcggagaggtacgaggagatggttgagttcatggagaaggtagccaagactgttgactcggaggagctcactgtggaggagcgaaacctcttgtctgttgcatacaagaacgtcattggagcccgccgcgcctcatggcg

SEQ ID NO: 49733 - DNA, 278 bp, Zea mays
gagtgcagtctctctctctgcgccctgcgctctgcgccgccgccatggaggacgacgatgactgccctcctctcgccgttgagctccctccgcgggtgccgtccccgtcccctccagagcaatctccctcagacgcctcgccagttggcgtcaccgtcatcaccggctacctcggggctggcaagtcgacgctagtcaactacattctgaatgagcaacatgggaagagaattgccgtgatactaaatgagtttggagaggaaattggggtcgagagg

SEQ ID NO: 49734 - DNA, 219 bp, Zea mays
tgccgcccgtcgtgcaccgcgacgtcaagaccaccaacatcctcctggacgccgactaccacgtcaaggtcgccgacttcggcctctcccgcctcttccccctcgacgtcacgcacgtctccaccgctccgcaggcacgccagtgtatggtgatccagagtaccaccagtgctaccagctgacggacaatagcgacgtgtacagcttcggggtggtcct

SEQ ID NO: 49735 - DNA, 279 bp, Zea mays
ccgcgatccgctcccctttcttccttccccggattcgcggcgatctagccggcggcgggcggcgcagcgatggcggggcaaaaccagcggctcaacgtcgtgccgacggtgacgatgctcggcgtcatgaaggcgcggctcgtcggcgccacccgcggccacgctctgttgaagaagaagtccgacgcgctcacggtccagttccgcgccatcctcaagaagatcgtagccgccaaggagtccatgggcgatacgatgcgcgcctcctccttctccctc

SEQ ID NO: 49736 - DNA, 294 bp, Zea mays
cacctccaacctggccggcagccgcaaccccagcctggactacggcttcagagcgcaccgacgatcggcatggcctcctactgctccgagctccagtacctggcgaaccccatcaccaaccacgtgcagagcgcggagcagcacaaccaggacgtgaactccctgggcctcgtctacggcaggatagacgccgaggcgatcgacatcctgaagctcatgtcgtccacctacatcgtggcgctgtgccaggccgtggacctgggcacctcgaggagaacatcaaggcgtcggtga

SEQ ID NO: 49737 - DNA, 288 bp, Zea mays
  unsure (1)..(288): unsure at all n locations
tgtanatggagaagtggaggtagatggtgtttgtgatgaaccggccagtgagaatactgttgagggaaaagaaccagacgctaaaggagttccagacttttggcttactgccatgaaaacaaacgaggttttgtctgaggagatacaagagcgcgatgaagccgctttgaaatatctaaaagatatcaagtggtctagaatcgaggatcctaagggtttcaagctggattttttctttgatacaaacccattcttcaagaattctgtcctgacaaaaacgtaccacat

SEQ ID NO: 49738 - DNA, 285 bp, Zea mays
agagtacgagaagaagtatgcagatgatgcagcaaccttgaaaagtatcatcacgggggagttacccactggctgggttgatgctcttcctaaatacactccagagagcccaggagatgccaccaggaacctctcccagcagtgcctgaacgcccttgctaatgttgtgcctggtcttatcggaggcagtgctgatcttgcatcctccaacatgactctgctgaagatgtttggtgacttccagaaggatacagctgaagagcgcaatgtccgcttcggagtcag

SEQ ID NO: 49739 - DNA, 286 bp, Zea mays
cgctcatgcacaccgctgtggatcttgtgaacgagactaagcttgacagcgagattaagtcttggcttgcttttgctgcccagaaggttgttgaggttgatgctcttgctaaggcattggctggtcaaaaggatgaggcttacttcgcagcaaatgctgctgctcaggcctcgaggaaatcctcaccccgtgtgaccaatgaagaagtccagaaggctgctgctgctctcaagggctctgaccaccgccgtgggaccaacgttagtgctagattggatgcccagca

SEQ ID NO: 49740 - DNA, 286 bp, Zea mays
cttttccgcgccgccggttcgtgccaaaaccctactccctacaaaatgcagcggcgcctaagctgaaatcggtgaatcgtgcgccgcggcgaagagagaactcgaactcggcaggacttgtgcggaataggaggggagcggccgagcggtggtcagagagggagatagagatcatcaggtttgccatgtcctccagggctggcggcggcaagccgttgtggtctgcctccaccatcgtcgccaaagtcgcgagtgggtaacacatcctcaggatcgatggctactc

SEQ ID NO: 49741 - DNA, 280 bp, Zea mays
cgggaggcgccaaagattgacaaccccaagtgtgaagaggcacctggatgtggcgagtggaagaggccaatgaagcagaatcctgcttacaagggcaagtggcatgcacctatgattgacaaccccaactacaagggaatctggaagcctcaggagatccccaaccctgagtactttgagcttgacaagcctgactttgatccaattgctgctattgggattgagatctggacaatgcaggatggcatcctgtttgacaatatcttgattgctgacgatg

SEQ ID NO: 49742 - DNA, 284 bp, Zea mays
cgcgaactgaggactcccgagaggccgagaccaccccgatgtccgccatggagaccgacatcaacgcgccgccgcccgccccagccggcgagggatcctccgtggtcggtccgtcctcctcatcctcccgcaagcccaacaagcgcttcgagatcaagaagtggaacgccgtcgcgctctgggcatgggatatcgtcgtcgacaactgcgccatctgccgcaaccacatcatggatctatgcatcgagtgccaggcgaaccaagctagcgcgaccagcgaggag

SEQ ID NO: 49743 - DNA, 280 bp, Zea mays
gtcccgtccgcgccggccgacgccgccttttcgtccccgcgtcacgtcgcggctccactgagcgtgcgtgtcaccggcgggaggcaagggcaggcggtggtggcgatggcgtccgctgacgcgcgcttggcggggatcgcctcctccatccgcgtcatccccgacttccccaagccagggatcatgttccaggacatcacgacgttgctgctcgataccaaggcgttccgtgacaccatcgagctctttgtcgagcggtacaaggaccaagggatcaccg

SEQ ID NO: 49744 - DNA, 280 bp, Zea mays
tgccgcccgtcgtgcaccgcgacgtcaagaccaccaacatcctcctggacgccgactaccacgtcaaggtcgccgacttcggcctctcccgcctcttccccctcgacgtcacgcacgtctccaccgctccgcatggcacgcgatggtatgttgatccagagtaccaccagtgctaccagctgacggacaagagcgacgtgtacagcttcggggtggtcctggtggagctcatctcgtccaagccggccgtcgacatcacccggcaccgcagcgagatcaa

SEQ ID NO: 49745 - DNA, 281 bp, Zea mays
cctcgttcctctagccgtctcgcgcaccacagcctccatttctcctccgacggcggtgcggctagctcaaccatggcggactccaaggccacctcggcggtcaccctccgcactcgcaagttcatgaccaaccgcctgctggcccgcaaacaatttgtgcttgaggttatccaccccggccgcgccaacgtctccaaggcggagttgaaggagaggcttgccaagatgtacgaggtgaaggaccccaacaccatcttcgtcttcaagttccgcacccactt

SEQ ID NO: 49746 - DNA, 285 bp, Zea mays
  unsure (1)..(285): unsure at all n locations
gaggagtaaggatgttgtcaagttcaaggtgcgctgctccaagtacttgtacacgctctgcgtcttcgatgctgagaaggcaaacaagttgaagcaatctcttcccccaggtttgaccgtcgaggaggtctgattggatacatggcaacgccgagttgaactacccaagcttctttatcagtagcagagcatgctactctatgtacttttggaacctaagctattagacctgtcagntgtggatgtctggatcttgcatttttggagaaataccaatttacctcg

SEQ ID NO: 49747 - DNA, 291 bp, Zea mays
ctcgagccgctctcttccagcttccaccacaagcgccgccgcagccggtgcctgctccttcccgatccccgaggcaaagctgcgactccgcaaccgccgccatggcgttcgagaagatcaaggtctccaacccaatcgtcgagatggacggtgatgagatgaccagggtattctggcagtctatcaaggacaagcttatcctcccatttctggacctggacatcaagtactatgatttggggatactgcaccgtgaagcaactgatgacacggtcacagtggaggctgcag

SEQ ID NO: 49748 - DNA, 182 bp, Zea mays
ccacacagaagcggcggcggcggagaaacgcaggcgaaggcgagggtgtgagggaaggagcaccagccatggtgcacgtcaacttctaccgcaactatggtaagacgttcaagaaaccaaggcgtccttatgagaaggagcgtcttgatgctgaactgaagctggtcggtgagtatgggctg

SEQ ID NO: 49749 - DNA, 295 bp, Zea mays
gtctcgcaccacaagcgagcgagggacccggggcggaagaagagagagaagacgtctctctcctctcggcgtccccgttccccaacctctcgtctgctgcctgcctgcctgcctgcctgcaaaaaggagtttgtcatggcgtctaagcgcatcctcaaggagctgaaggacctgcagaaagacccccccacatcatgcagtgcaggtcctgctggtgaggacatgtttcattggcaagcaacaattatgggaccacctgacagtccctatgctggtggtgttttcttagtgaaca

SEQ ID NO: 49750 - DNA, 294 bp, Zea mays
gtgctctgaacgttgatgtgaacgagttccagaccaacctggtgccctacccgaggatccacttcatgctttcgtcctacgctccagtcatttctgctgagaaggcctaccacgagcagctgtccgtggccgaaatcaccaacagcgccttcgagccatcctccatgatggccaagtgcgacccccgccatggcaagtacatggcatgctgcctcatgtaccgtggtgatgtggttcccaaggacgtgaacgctgctgtggccacaatcaagaccaagcgcaccatccagttcg

SEQ ID NO: 49751 - DNA, 296 bp, Zea mays
tgccgcgccgccaccccctacaggtaaggaagaggagggcaggatgtcgcaccgtaagttcgagcacccgaggcacggctccctcggcttccttcccaggaagcgctcctcccgtcaccgcggcaaggtgaagtcattccctagggatgaccccaagaagccttgccatctcactgccttccttggctacaaggctggcatgactcacattgtccgtgaggttgagaagccaggatccaaactccataagaaggaaacttgtgaggctgttaccatcattgaaacccctcctcttg

SEQ ID NO: 49752 - DNA, 296 bp, Zea mays
ctcgaaccgaaaccggagccaaagccagagccccaacctaagccagagcctaagcatgagccgaaaccagaaccaaagccagagccacaaccaaagcctgagcctaaaccagaaccaaaaccagagccaaagccagagcctaagcccgaaccaaaaccagagccaaagcctgagcctaaacccgaaccaaggccagaacctaagccagagccaaagcctgagccgaaaccgaaaccagatccaaagccagagccacaaccagagccagagcctaagccagaaccaaaaccagagcc

SEQ ID NO: 49753 - DNA, 292 bp, Zea mays
caaccagacttggagcccaatgtttgatcttgtcaatgtgttcgaggtcttccttccacaacttctgttatatcctaatccttctgatccattaaatggagatgcagctgcgttgatgatgcgtgatcgccctgcttacgaacaaaaagttaaagagtactgtgaaaaatacgccaaaccaggggatgctggtgtcaccccagaagagcagtccagtgacgaagagctgagtgaagatgaagacgactcgggtgatgaggagataatgggcaaaccagacccatagtcaagt

SEQ ID NO: 49754 - DNA, 277 bp, Zea mays
ctcgagcgctcgagccgcccgtccagtgttcaccggtggaaaactcaagggctacaagaagaacctggtactctacaccaactacgggaagcagcggaagccggagaagacaaactgggtgatgcatcagtaccacctagggtccgatgaggaggagaaggacggcgagctcgtcgtctccaaggtgttctaccagacgcagccgaggcagtgcggcagcggttcggcgacggctaaggacgccatcccgctcgcttgcaacgcagcgactgaccac

SEQ ID NO: 49755 - DNA, 295 bp, Zea mays
  unsure (1)..(295): unsure at all n locations
tcggatctgagacgagacgagacgggcccccctcccctcaaccggaacttgttttaccccatctcatccccctgactcccgncacccacccgnccgcggcctccgccggatctcgtcggactcggatccgcccgaccacgaccaccccgcgtcgccgccgcgcacagcagcagatcagagaagatggccggactcgacaccttcctcttcacctcggagtccgtgaacgagggacaccctgacaagctctgcgaccaggtctcagatgctgttctggacgcttgccttgctgagg

SEQ ID NO: 49756 - DNA, 295 bp, Zea mays
ggaggggctactggggaaacaagatcggccagccgcacactgtgccctgcaaggtcaccggcaagtgcgggtccgtcaccgtgcgcatggtgccggcgcccagggggtccgggattgtcgctgcccgcgtgcccaagaaggtcctccagttcgccggcattgaagatgtctttacctcgtcccgtggctccaccaagacactcggtaacttcgtcaaggcaacctttgattgtctgatgaagacctacggcttcctcactcctgagttctgggccgagaccaagtatgccaagac

SEQ ID NO: 49757 - DNA, 296 bp, Zea mays
gccttctgcgcctccatttcggcctctgtcccttgcaagttcaatctcacctccaaccatgggtaaagagaagtcccacatcaacattgtggttattggccacgttgactctggcaagtcgaccaccacaggacacctgatctacaagcttggaggcattgacaagcgtgtgatcgagaggtttgagaaggaggctgctgaaatgaacaagcggtccttcaagtacgcatgggtgctcgacaagctcaaggctgagcgtgagagaggtatcaccattgatatcgctctgtggaagt

SEQ ID NO: 49758 - DNA, 294 bp, Zea mays
ggggagggcaggaagaccgaagaccgagccgtgcgggggctcgggacgggaacgggacaggaccccaaaatctcagatccttcctgcccgcccgcccgtgcccgtcgacgcgtcgttcttgccggccgcgcctcacctccgccctctcctcctccagggggatcggatacgccacaggctgcgcgatggtgctgtgggtcttcggctacggctccctcatctggaaccccggcttcgacttcgacgacaaaatcctcggcttcatcaagggctacaagcgcacctttaatctcg

SEQ ID NO: 49759 - DNA, 288 bp, Zea mays
cgactccaacagcgacacgggcggcgtggcggcggtcatggggatccgcatcgcgccgccggagggcagggcctacttccaccaccccacggggcggctctccgacggacgcgtcatcctcgacttcatctgtgagagcctgggcatgccgcacctgagtccgttcatgaagccgctgggctccaacttctccaacggcgtcaacttcgccattgcagggtccacggccatgccgggagtaaccaccttctcgctggacgtgcaggtggatcagttcgtcttcttcaa

SEQ ID NO: 49760 - DNA, 92 bp, Zea mays
  unsure (1)..(92): unsure at all n locations
gcacacacaccgcgtcttcgtactcgcctatctccgcgactcaaaccctgtaccaacttcccncctttctcccacttctcaccaccgctgcc

SEQ ID NO: 49761 - DNA, 247 bp, Zea mays
gattggcgaggctcctccggaactcggaaacgcatgcgacgacggacgttgccggtactttcggttatgtggctcctgagtacgcaatgacatgccgcgtgtcggacaaggcagacgtgtacagctatggagtggtgctgctggagctgatttcagacaagaaggcgctggacccgtcgttttctccatacggaaacggcttcaacatcgtcagctgggctgtgaggcttatccagagaggcagggt

SEQ ID NO: 49762 - DNA, 284 bp, Zea mays
cctgggctctaccgtgtcgtccatggcatcgatgttttcgatcccaagttcaacattgtctcccctggagcagacatgagtgtttactacccgtatacggaaaccgacaagagactcactgccttccatcctgaaatcgaggagctcatctacagcgacgtcgagaactccgagcacaagttcgtgctgaaggacaagaagaagccgatcatcttctcgatggcgcgtctcgaccgcgtgaagaacatgacaggcctggtcgagatgtacggcaagaacgcgcg

SEQ ID NO: 49763 - DNA, 288 bp, Zea mays
agctttcatttccaggtggcagagcgggctctgtttctctggaacaatgaccatattgaaaccctaattaagcaaaactacaaggtgctgttaccgatcatctatccagcactcgagagaaactccagagatcactggaaccaagctgtccgtagcctgacactgaacgtacgcaagatcttctcagaccatgattccacattcttcggggagtgcgtccagaggttcagtgacgaggagctcaagcaggcggaatctgattcaaaacgagacgccatgtggaagcgc

SEQ ID NO: 49764 - DNA, 290 bp, Zea mays
atcgccgctgcgccgtctcctccgctcccgtcgtccggaaagatggcgtcccacattgttggataccctcgcatgggccccaagagggagctcaagtttgcacttgagtctttctgggatgggaagagcaccgctgaggatctggagaaggttgctaccgacctcagggccagtatctggaagcagatggctgatgctgggatcaagtacatccccagcaacactttctcgtactatgaccaggtccttgacaccactgccatgctcggcgctgtccccgaacgttactc

SEQ ID NO: 49765 - DNA, 291 bp, Zea mays
gttgactggccgcagatcattggggccaccaggccttgggaggcagcccccggtaccattcgtggggactacgccgtggaagtcggcaggaatgtcatccatggaagcgactccgtggagaacgggaagaaggagatcgctctctggttccctgaaggtgtggcacagtggaagagcaaccttcatccctggatctacgaggcttgagcagttgagcttggatgccttgcctgctccatggaaaccagagttttgtttgagtattatctgttggctctggctgaagagtca

SEQ ID NO: 49766 - DNA, 287 bp, Zea mays
gaagacctataccgagactacggacgggtcgactattgatgacaaggagactgccatcgtgtggtgctacgaggacgccgatccagatttcggatcctgccaggccaaggagctccacgaccatctggagagcgtgcttgcaaacgagccggtctcagtgaaagctggactcaacctcgtcgaggtgaagccacaggtagtataaaaagcctgcctgccgctgctcacaacagcaactgctactgttgattcagttagcgacgtgtctgtctgtctgtctgtcgtgc

SEQ ID NO: 49767 - DNA, 280 bp, Zea mays
ggaatttgtccccgagaccctgtaccgtgtcctgaagcactacagcaacgcgaaccagaggatgcctcttatctacgtcaagctctacatgtatcagcttttcagaggcctagcctatattcataatgtaccaggagtctgccatagggatgtaaagccacaaaacgttttggttgatcctctcacccaccaggtcaagctctgtgactttggtagcgcaaaagtcctggttcctggtgaaccgaacatatcttacatatgctctcgttattatcgtgct

SEQ ID NO: 49768 - DNA, 283 bp, Zea mays
gtctcgcaccacaagcgagcgagggacccggggcggaagaagagagagaagacgtctctctcctctcggcgtccccgttccccaacctctcgtctgctgcctgcctgcctgcctgcctgcaaaaaggagtttgtcatggcgtctaagcgcatcctcaaggagctgaaggacctgcagaaagacccccccacatcatgcagtgcaggtcctgctggtgaggacatgtttcattggcaagcaacaattatgggaccacctgacagtccctatgctggtggtgttt

SEQ ID NO: 49769 - DNA, 284 bp, Zea mays
cggcacgagctctatcccccgcgacgagcagcagctgccaccgacgcacgcagaccggggaataaatattggtattggtagtgtgatatctataagaagtcaagatggtgaagttcacagctgaagagctccgtgctatcatggacaaaaagaacaacattcgtaacatgtctgtcattgctcatgtggaccatggcaagtctacgcttacagattcccttgtggcagctgctgggattattgcccaggaagttgctggtgatgttcgcatgactgatactcgt

SEQ ID NO: 49770 - DNA, 286 bp, Zea mays
ggagggcaggaagaccgaagaccgagccgtgcgggggctcgggacgggaacgggacaggaccccaaaatctcagatccttcctgcccgcccgcccgtgcccgtcgacgcgtcgttcttgccggccgcgcctcacctccgccctctcctcctccagggggatcggatacgccacaggctgcgcgatggtgctgtgggtcttcggctacggctccctcatctggaaccccggcttcgacttcgacgacaaaatcctcggcttcatcaagggctacaagcgcaccttta

SEQ ID NO: 49771 - DNA, 288 bp, Zea mays
gcaggataaggagaagaaagtgctcatgttggtgatccctctgcaggttgcagctaacattgctgctgctgtagttggcgagaccgggccattcttgcagggatgggtgacatggaaccagatcttcttgtttgttgatgtcgcttgctgctgtgccgtgctcttcccagttgtgtggtcgatgcgttcgctgcgggagtcatccaagacagacggcaaggcagccagaacccttgccaagctcatgctcttccgccagttctatgttgtcgtgattggatatctgta

SEQ ID NO: 49772 - DNA, 281 bp, Zea mays
cagctgaggagctgatcctcaccggcgtcgccatcgtaatcgccttggacagcggcaccagaacctctgcctccgcaggtgcttgctggtatcattacaatctggtagttttagtggttgggcttgacttcctactattcagaaacacagtaccgagaagtctttaggtggggtcaaagatggtgtcgctgaagttgcaaaagcgccttgccgcgagctacctcaagtgtgggaaaggcaaggtgtggcttgacccaaatgaagttagtgagatctccatg

SEQ ID NO: 49773 - DNA, 173 bp, Zea mays
  unsure (1)..(173): unsure at all n locations
cagagcgagaacgagtacgtaagataggaattaagatagagagcanatacaacacaaggacaataaaaagagctagtagtggaaaagaagatgttagggaacataggaaagataaccatcataggagacatgaagggcagcaacaagaatgcgcaaataaagggcaacgtggt

SEQ ID NO: 49774 - DNA, 282 bp, Zea mays
cgcgcccaggcgcacatcaagctcggcaactacactgaggctgtggcggatgctaacaaagcaattgagcttgatcctatgatgcataaagcttactaccggaaaggtgctgcatgcattaagcttgaagaataccaaactgcaaaggctgctcttgagttgggttcttcttatgcatcaggcgattcaaggtttgctcgtctattgaaggaatgtgatgagcgcatcgctgaggaatctagccaggcaccagtaaagaatgttgaggctactgtggctgct

SEQ ID NO: 49775 - DNA, 283 bp, Zea mays
cactcactcactcactcacacagcaaatacccacagtccacactccacagcaagaaccgaagatgttcggaaacatcggaaagatcccgatcattggcgacctgacgggcagcaacaagaatgcgcacctcaagggcaacctggtgctcatgcgcaagaccgtgctcggcttcgacgtcaccagcatcgccggctccctcatggacggcctcggcgagttcctcggccgcggcgtcacctgccaactcgtcagctccaccgtcgtcgaccccaacaacgggaa

SEQ ID NO: 49776 - DNA, 284 bp, Zea mays
caagcctgccgtcactaagcctagtccctatgaagaactgattggagacatcaaggctagcctaggaagtgctccgacccctacccagctcaaggctgtgctggcctcatcaacccttcctccccaggacgtgatgaatgctctcctggaggctctctttggtggtgtgggtaagggattcaccaaagaggttgtgaagaacaagaagtaccttgcagttgctgtgccagatgagggtgcccagacccttctggttcaggccattgaggcttttggtgggaagt

SEQ ID NO: 49777 - DNA, 288 bp, Zea mays
gggattgtgagcccagtgaaaaaccagggccactgtggatcatgctggaccttcagcactactggtgcacttgaggctgcatatacccaggcaactggcaagcccatctctctctctgagcaacagcttattgactgtggttttgcattcaacaatttcggatgcaacggaggccttccatcccaggcctttgaatacatcaaatacaatggtggccttgacactgaggaatcttacccttaccaaggtgtcaatggaatctgcaagtttaagaatgagaatgttgga

SEQ ID NO: 49778 - DNA, 331 bp, Zea mays
  unsure (1)..(331): unsure at all n locations
cgcgtacctcggcgccaggttccccgcctcncggagaaggggaaccgccgtgggggagaggtaccgccacggcggtggcgccgaggagctgccggagagcgtcgactggagggagatgggcgccgttgcgccgtcaagaaccaggggcagtgcggaagttgctagcgtttctctgcagtaagctcagtagaaagcgttaaccaaattgttactggtgagatggtgaccttgtccgagcaggagcttgtagagtgctcgactgatggagggaacagcggctgcaatggtgggcttatggatgccgcatttgattttatcataaagaacgggg

SEQ ID NO: 49779 - DNA, 301 bp, Zea mays
  unsure (1)..(301): unsure at all n locations
ggcaggcggcggccctcgggcattgtcncagccggagcaggacatccagacgatgctcgccgccgatgtccacctcggcaccaagaactgcgacttccaggtggagcgctacgtgtacaagcgccgcactgatggtatctacattattaaccttggaaagacctgggacaagcttcagttggccgccagcgtcatcgttgccattgagaatcggcagacattatcgtgcagtctgctaggccctatggccagatggctgtcctcaagtttgcgagtacactggtgccatgcccatgctgca

SEQ ID NO: 49780 - DNA, 322 bp, Zea mays
ggaacattcggctgtggtacgttcatcattgagggggaagatttcattgcagagaatatcacgtttgagaactcagctccccagggctctgggcaggccgttgcagtccgggtaaccgcagataggtgtgctttctacaactgccggttcctcggttggcaagacacattatacttacactacgggaaacagtacttaagagactgttatattgaaggccattgtgacttcatctttggtaactctgtcgcccttatggagcattgccatatccattgcaaagcagcgggatacatcactgctcatagccggaagtccacat

SEQ ID NO: 49781 - DNA, 322 bp, Zea mays
gcggatctacagccaccttggtcaccggcggcgatggcgagttccaagtccggcatccctatcaaggcagaacaagattcggatggctcggcacaaagcacagctgatatgacggcttttgtgcaaaaccttcttatgcagatgcaaaccaggttccaagctatgtcggagaacatcatttcaaagatagatgaaatgggtgcgagaattgatgaattggaacagagcctcaatgacctcaaggctgagataggcggtgaaggcatgtcgacgccatctaagatgaaggaagagtcaagaccttcagacagctccgcttgag

SEQ ID NO: 49782 - DNA, 154 bp, Zea mays
  unsure (1)..(154): unsure at all n locations
ggcgcgggcatcggcccggtgtctacgacatccactcccccaggatcccgtcggccgaggagatcgccgaccgcatcgacaagatgctggccgtgctggacaccaacatcctctgggtgaaccccgactgcggcctcaagacncgcaagtacac

SEQ ID NO: 49783 - DNA, 155 bp, Zea mays
gggatctgaatattcaaacggaaaacggccacattggcatgccaactaatatctgctgtgtcgttgtggagtaccttcctggtggtgcactaaaatcatttctgataaagaacaggagaaagaagctagcttttaaggtcgttgttcaaatcgct

SEQ ID NO: 49784 - DNA, 302 bp, Zea mays
ctgacatacattgatggtgatgggaaaatgtatcgtgttagtaagggtgcacctgagcagattctccacttggctcacaataagtcagatatagagaggagagtacatgctatgattgataaatttgcagagcgtggacttagatcacttgctgtagcatatcaggaagtgcctgacgggaggaaagaaagtcctggtggtccatggcacttcgttggtctcatgccactttttgaccctccaagacatgacagtgctgaaacaattagaagggcactcaacccttggtgtaatgttaagat

SEQ ID NO: 49785 - DNA, 311 bp, Zea mays
cgccgctgcgccgtctcctccgctcccgtcgtccggaaagatggcgtcccacattgttggataccctcgcatgggccccaagagggagctcaagtttgcacttgagtctttctgggatgggaagagcaccgctgaggatctggagaaggttgctaccgacctcagggccagtatctggaagcagatggctgatgctgggatcaagtacatccccagcaacaccttctcgtactatgaccaggtccttgacaccactgccatgctcggcgctggtccccgaacgctactcatggactgggagagagattggg

SEQ ID NO: 49786 - DNA, 157 bp, Zea mays
gtccgccgacaactctctctaccgtccgataccccaagcaccagcgcggcggcggcgaccatggctgtcggaaagaacaagaggatctccaagggaaagaagggtggcaagaaaaagaccgtcgaccctttctctaagaaggattggtatgacatca

SEQ ID NO: 49787 - DNA, 315 bp, Zea mays
  unsure (1)..(315): unsure at all n locations
ccaatttgatgaagcttcgttctgattataaagatgaatttgtcacaaagcatggtgtanaattgggtcttatgtcttgctttgtcaaggctgctgtttctgcacttcaaaaccagccaattgtcaatgctgtcattgatggtgatgacatcatatacagagactacgtagacatcagtgttgctgttggcacttccaagggccttgtgggtcctgttatccgagatgctgataccatgaactttgctgacattgagaaagggataaacaaccttgcaaagaaagcaactgagggggcgctctcaattgatgaca

SEQ ID NO: 49788 - DNA, 320 bp, Zea mays
ggcaggcggcggcctcgggcattgtcccagcgggagcaggacatccagatgatgctcgccgccgatgtccacctcggcaccaagaactgcgacttccaggtggagcgctacgtgtacaagcgccgcactgatggtatctacattattaaccttggaaagacctgggacaagcttcagttggccgccagggtcatcgttgccattgagaatccgcaggacattatcgtgcagtctgctaggccctatggccagagggctgtcctcaagtttgcgcagtacactggtgcccatgccattgctggcaggcacactcctggtaa

SEQ ID NO: 49789 - DNA, 321 bp, Zea mays
cctctagatcgcgagccgccgcccgcgatctagactcgcctacggctgctgcgagctggagaacgccacctgctgtgaggaccactcgagcctgctgcccgcacgactaccccgtctgcaacatccgggacgggacctgccgtaagagcgctaacagcccgatgatggtgaaggctctgcaacgcaagccggcgatgtatactggcggcggcggcgacggtcagcaaagcgtgacgagcagctggtgacgaaatgagactgtggtgttgcgtggcgtgtactgttcatcgttcagacagatgacttgctggcaatgctgtg

SEQ ID NO: 49790 - DNA, 313 bp, Zea mays
tactcgagcgattcggctcgagcagccccttaaccctcgttcctctagccgtctcgcgcaccacagcctccatttatcctccgacggcggtgcggctagctcaaccatggcggactccaaggccacctcggcggtcaccctccgcactcgcaagttcatgaccaaccgcctgctggcccgcaaacaatttgtgcttgaggttatccaccccggcggcgccaacgtctccaaggcggagttgaatgagaggcttgccaagatgtacgaggtgaacgaccccaacaccatcttcgtcttcaagttccgcacccac

SEQ ID NO: 49791 - DNA, 316 bp, Zea mays
  unsure (1)..(316): unsure at all n locations
agtgccgtgcctgatagagcacagttcaatagagacgatttccctgttcagtatgatgctgcaaagttctttgtcattaaatcgtacagtgaggatgacatccacaagagtgtanaatacaatgtgtgggcaagcacaaccaatggaaacaagaagctcgatgctgcttatcaagaagctcagtcgaagggttctgcgtgccctatattcttgtttttttcagtgaatacaagtgggcagtttgttggtgttgctgaaatgacaggggctgtcgattttgagaaaaccctggggtattggcaacaggacaagtgga

SEQ ID NO: 49792 - DNA, 317 bp, Zea mays
cgagagctagctagagggccgtgaaaatgccgatcaataggatcgccctggggagccaccaggaggtgtaccacccgggcgccctcaaggcggcgttcgctgagttcatctccaccctcatcttcgtcttcgccggctcaggctccggcatggccttcagcaagctgaccggcggcggcccgacgaccccggcgggcctgatcgcggcggcggtggcgcacgcgttcgcgctgttcgtggcggtgtctgtgggcgcgaacatctccggcgggcacgtgaaccctgccgtgaccttcggcgccttcgtgggcggcaaa

SEQ ID NO: 49793 - DNA, 314 bp, Zea mays
  unsure (1)..(314): unsure at all n locations
cggctcgagctagccagtgggatttggtttcagataaacagatgatgcaagaagaacaaccgttacaagtggcaaggtgtacaaagatcataagccctaatacggatgatgctaaatatgttataaatgtaaaacaaattgcaaagtttgttgttggactgggggataaggtgtctccaactgatatcgaggaanggatgagggtcggtgttgatcgcaataagtaccagattcaaatcgctcttcccaccaaaattgacccaaagtgtaccatgatgactgtgggaggaaagctagatgtgacgtacaatgat

SEQ ID NO: 49794 - DNA, 292 bp, Zea mays
ctctccttccaactcttgtttctgcaacgccagggcgcaaccatgggtcagcagcagcaagggccggcggccaggcggatggccacgctcgcctcccacctgcgccatccctccgtctctcaccctcagatggaagatgttcccctcttgaggggatccaattgccgtgcaaaaggtgcggcgccaggcttcaaagtcgcgatcttgggtgcagcaggtgggattgggcagccacttgcgctattgatgaagatgaaccctcttgtttcggtgctccatctatacgatgtcg

SEQ ID NO: 49795 - DNA, 306 bp, Zea mays
  unsure (1)..(306): unsure at all n locations
cgtacagcgagaaggcggccgggaaggcgtacccgggctgcgacgccatcccctgcgaccagttcgaggtggcgttccaggccgtggagctgtggatcgccgaccgcgccgtgctccccgtggagaactcgctngggcgcagcatccaccgcaactacgacctgctgctccggcaccggctccacatcgtcggggaggtgcagctccccgtgcaccactgcctgctggcgctgcccggggtgcgcaagaagtgcctgacccgcgtgatcagccacccgctagcgctggcgcagtgcgagcacacgc

SEQ ID NO: 49796 - DNA, 313 bp, Zea mays
tatatctctagccaacacacacataatactctccattccattccattccatctcaaaggatagaataatgggcggtctctccaccaagcttttcgtggtcctcctcctgctcgttcgttacaccgggacgcaaggcgggccggtgactatggtgtcggcgaggaagtgcgagtcgcagagcttccgcttcaagagaccttgctcgagggacgccaactgcgcaaacgtctgcctgaccgaagtttcaccggcggcgtgtgcaagggcctacgcaaccgctgcttctgcacgagggactgctagtactgcctcg

SEQ ID NO: 49797 - DNA, 318 bp, Zea mays
  unsure (1)..(318): unsure at all n locations
aaatcttccgttctcaaaccaacctaggcaattcgccgcagcctctcaccctcgcgagtcccgacctcccgcagccgccgcacagatggcacccaaggcggagaagaagccggcggccaagaagcccgcggaggaggagcccgcgacagagaaggtggagaaggctccggcggggaagaagcccaaggccgagaagcgcctcccggcgggcaagtccaaggacggcggcgagggcaagaaggggaaaaagaaggcgaagaagtccgtggacacctacaagatctacatcttcaangtgctgaagcaggtgcaccccga

SEQ ID NO: 49798 - DNA, 267 bp, Zea mays
tctactgccaccgccccgacgcgtccacgcccgtcgaggagacggtgcgcgccatgaactgggtcatcgaccagggctgggccttctactggggcacctccgagtggtccgcgcacagatcaccgaggcctgggccgtcgccaaccgactcgacctcgtcggacccatcgtcgagcagcccgagtacaacctcttctccagacacaaggttgagtctgagttcttgccactttacagcacctatggcattggtttgactacatggag

SEQ ID NO: 49799 - DNA, 318 bp, Zea mays
cgacgtcgcctccaccctgctccgcacccacttccacgactgcttcgtcaggggctgcgacgcgtcagtgctgctcaacgcgacgggcggcagcgaggcggagaaggacgcggcgcgcaacctgacgctgcgcggcttcggcttcatcgaccgcatcaaggcgctgctcgagaaggagtgccccggcgtggtgtcctgcgccgacatcgtcgcgctcgccgcccgcgactccgtcggcgtcatcggcggtccgttctggagcgtgccgacggggaggcgcgacggcaccgtgtccatcaagcaggaggcgctggacca

SEQ ID NO: 49800 - DNA, 313 bp, Zea mays
cacaaaccagcagcaggcagagcaacgactagctgccaggggtgctagcaagagtgcaacaatggccaccgcgctgtccttcaaggccttggcactggccgcgctcctctccgtggtcgtcgtcacctctggcgctcgcgccgagcaacagctcaagcgcaacgccaccaccgcctcgcaggacagatccttgttgtcctacagcagtggctggctgccggccaaggccacctggtacggcgcccccaccggcgccggccccgtcgacaacggtggtgcgtgcgggttcagggcaccaccagtacccgtctcg

SEQ ID NO: 49801 - DNA, 154 bp, Zea mays
gtcccgccgacaactctctctaccgtccgataccccaagcaccagcgcggcggcggcgaccatggctgtcggaaagaacaagaggatctccaagggaaagaagggtggcaagaaaaagaccgtcgaccctttctctaagaaggattggtatgac

SEQ ID NO: 49802 - DNA, 139 bp, Zea mays
cctcactcccgttccatttccccatctcccagatccaattcgcgagttctccctcctctgccgccatggcgctctctgtggagaagacctcgtctggacgggagtacaaggtcaaggatctctcgcaggcggacttcgg

SEQ ID NO: 49803 - DNA, 152 bp, Zea mays
cgttcgcctcttctcctccctcctgccgggtccttaataaagagcagcagcgcaagaggttggtagagcgagcgagaagaaggcaatggcggcggagagcttcctgttcacctcggagtccgtgaacgaggggcacccagacaagctgtgcg

SEQ ID NO: 49804 - DNA, 273 bp, Zea mays
ggcgatgtcgcgcttcgggcgctccgggcagccggagaaccgcgaatctttctccctcctcgtcctcaacgtctccttccgcactacggctgacgatctcttcccgctcttcgatcgatacggcaaggtcttagacatctacatcgcgcgcgaccacaggactggggatccgcgagggttcgcgttcgtgaggtacaattacgacgatgaggcgcgggatgccattgacgggcttgatgggatgaggtttgatgggcgtgcgctcatggtgca

SEQ ID NO: 49805 - DNA, 309 bp, Zea mays
  unsure (1)..(309): unsure at all n locations
atgaacttcatgcaccgccacgaggaggtcgactacttcccctccaggtacgacgccgtcaggaacgcgccgaggtacccgatcccgaccgcccacatcgccggccgccgagagaagactgtgattagcaaggagaacaacttcaagcagcccggggagaggtaccgcgcgatggacccagcatagcaagagcggttcataaccagatgggtcgacgcgctctccgacccncgcctcacccacgagatcaggaccatctggctctcaactggtctcaggccgacaggtctctgggccagaactcgcgag

SEQ ID NO: 49806 - DNA, 307 bp, Zea mays
ggcttatcttcaccatgagtgcagtccacgaataatccacagggatgtgaagtcaaagaatatcctcctagacaaagactacgaggctcatcttgctgactttggtattgccaagagcttgtgtgtgtcgaagacgcacacatcaacgtacgtgatgggcaccattggctacattgacccggagtatgcacggacatcccggatcaacgagaaatcggatgtgtacagctacggcattgtcttgctggagctgcttaccggcaataagcctgtcgacgacgagtgcaaccttcaccactggatccta

SEQ ID NO: 49807 - DNA, 312 bp, Zea mays
ccgccacccagcgctcgagctcctcgcgtcctgcgagcgcgctccgcaacgtcaccatgaagttcaacatcgcgaacccttccaccgggtgccaaaagaagctggaaatcgatgacgaccagaagctgcgtgccttttatgaccgaaggatatcccaggaggtcagtggtgatgctctgggtgaggagttcaagggttatgtcttcaagatcatgggtggatgtgataagcaaggcttcccaatgaagcaaagagttttgacttctggtcgtgttcgtcttctgctccatagaggcactccctgcttcgtgg

SEQ ID NO: 49808 - DNA, 308 bp, Zea mays
  unsure (1)..(308): unsure at all n locations
tggaccagccgaaagctgccctggagatgctgaggagattcacgcaagggaaactgaagcaggaaccgctccctgagacgatggccttgaangcggcgatgtgactggcgtggacgtcgtgattggaagaagggagtctcttaattactaggtggtccgaggtgtcgttcaagcgagcgtgtgtcgatcactgagctgctgaagcttgttgtttccattggctcatcgatggatgctgttgataagaagttcaatgctgggaaccctgtctgtctgctgctcttgtaaagcatctcatgtatacaccc

SEQ ID NO: 49809 - DNA, 160 bp, Zea mays
  unsure (1)..(160): unsure at all n locations
tagtacagtccgagctcccagcaccagtcnccaattatttggcctccgtcagagaggggagaaagacccgttcgaggcggcggcgatgtcggggcgcggactgggcggcaagggtctgggcaagggtggagccaagcgccaccggaaggtgctccgcgac

SEQ ID NO: 49810 - DNA, 301 bp, Zea mays
  unsure (1)..(301): unsure at all n locations
cgttattctgaagggtanaacttgcacaaggcagctttgatattacaacaatggatagattcaagttgattaaggaagttggcgatgggacttttgggagtgtatggcgtgctatgaataaacagaatggcgaagttgttgctgttaagaagatgaagaaaaaatattatccttttgaggaatgtatgagtctacgtgaagtaaagtctttgcggcgcatgaatcatcctaacattgtgaagctcaaagaggttatcagggaaaatgatatattatacttcataatggaatacatggagtg

SEQ ID NO: 49811 - DNA, 149 bp, Zea mays
ccgtggcagcacccctgaagaaaaagcaacacttgaagcccgtttcatccgagaagtaaatatgatgtgtaaagtgaaacatgagaatcttgtcaagtttattggagcttgcaaagaaccattgatggtgatcgttagtgagctactac

SEQ ID NO: 49812 - DNA, 316 bp, Zea mays
ttatcatcctcaacgccatggccgtgctgatgctcccgctctacctcttcgccacccctatcctgcgcttcttccaccaggacgccgagattgccgcgctcgccggccgcctagcgctctacatgatcccgcagctcttcgcctacgccttcaacttccccatccagaagttcctgcaggcgcagagcaaggtgatggccatggcggtcgtgtcggtggcggcgctgctgctccacgtcgccatcagctggctcctcatggggcccatggggatggggatcgtcggcctggccgtcgcgctcaacgcgtcttggtg

SEQ ID NO: 49813 - DNA, 315 bp, Zea mays
ctcgagccgattcggctcgagggacgagcgggagtgggacacgcccatggagttcgtgccggagcgattcctgtcaggcggcgacggcgagggcgtcgacgtgactggcagcagggagatcaagatgatgccctttggcgccgggcggcggatttgcgccgggctcggcatcgccatgcttcacttggagtacttcgtcgccaacttggtcagggaattcgaatggaaagaggtggccggcgacgaggtggatttgtctgagacgcgcgagttcaccaccgtcatgaagaaaccgctccgcgcgcagctggtgcg

SEQ ID NO: 49814 - DNA, 318 bp, Zea mays
tgagcattggccttggcttcaagactcccagggaagcaatcgaagggacctacattgacaagaaatgcccattcactggaactgtttctatcagaggcagaattattgctgggacatgccacagtgctaagatgaacagaactatcattgttcgcaggaactacctccactttgtaaagaaataccagaggtatgagaagaggcactccaacattcctgctcacatctctccatgcttccgtgtgaaggaaggtgaccatgtcatcattggccagtgcaggcccctgtcaaaaactgtgaggttcaatgtcgttaaag

SEQ ID NO: 49815 - DNA, 315 bp, Zea mays
ggttttgagaaacgatttagtgtcctgcacatatccaatatgatacttgctattgggagtatgattttccatgccaccttgcaacttctcctacaacagagtgatgagactcctatggtttgggagatccttctctacatgtatgtcctctattcaccggactggcactacaggagcacaatgccaactttcctgttcctgtatggtgctgcctttgccgtagtacatttctttgcccggttccaagtcgtattcaagctgcattacgttggcctctgcttgctctgcatcccccggatgtacaagtactacata

SEQ ID NO: 49816 - DNA, 317 bp, Zea mays
cggccactccctagcacatcaaaccctagctccgcccagcccccaaccatgtcggcgatgatgcaaccgcagatcatcctgctcaaggagggcacggacacgtcgcaggggcgcgctcaggtggtgagcaatatcaacgcgtgcacggcggtgggcgacaccgtgcggaccacgctggggcctcgggggatggacaagctcatccacgacgacaagggcggagtcaccatctccaacgacggcgccaccatcatgcgcctcctcgacatcgtgcaccccgccgccaaaatccttgtcgacatcgccaagtcgcagga

SEQ ID NO: 49817 - DNA, 315 bp, Zea mays
cgccgagggcctgggcctgtcgcgcgaggaggcctgccacaacctcctcttcgccaccaccttcaacagctacggcggcctcaaggtgctgttcccgggcctgctggccaacgtggccagcggcggcgagaagctccacgagcggctggtggccgagatccgcggcgccgtggccgacgccggcggcaaggtcaccctcgcggcggtggagaggatggagctggccaagtcggtggtgtgggagtcgctgcgcctggacccgcccgtcaagttccagtacgggcacgccaagaaggacctgctggtggagagcca

SEQ ID NO: 49818 - DNA, 216 bp, Zea mays
ggtagagccaggccacctggaccagcttctccatcctcagtttgagaacccgtcggcgtacaaggatcaagtcattgccactggtctgccagcctcacctggggctgctgtgggccaggttgtgttcactgctgaggatgctgaagcatggcattcccaagggaaagctgctattctggtaagggcagagaccagccctgaggacgttggtggcat

SEQ ID NO: 49819 - DNA, 315 bp, Zea mays
caacaaggcagcagcacaagcaagaaccacacctcctcccttcgcctgtgatcatgtcgtcttgctgcggcggcaagtgcgggtgcggctccagctgctcctgcggcagcggatgcaacggctgcggtatgtaccctgacgtggagaccgccgccaccagcagcgtcaagaccacggtcctcgccgcgccgaccaccaaggccagcgccggcggcttcgaggcggccaccgagggcggcggctgcgactgcaacacctgcaagtgcggcaccagctgcggctgctcctgctgcagctgcaactgagctggcccgg

SEQ ID NO: 49820 - DNA, 310 bp, Zea mays
gcagcctccaaagccactcccaaacccccgcttccagaaccttctcgaagctccccgccgcctcctccactcgcaccgatggcgaaggaaccaatgcgcgtgctcgtcactggcgccgcaggacaaattggatatgccctggttcccatgattgctaggggtgttatgcttggtgcagaccagcctgttattctgcacatgcttgacattccgccagcagctgaagcccttaatggtgttaagatggagttggttgatgctgcgtttcctcttctgaagggagttgttgctacaactgatgttgtggaag

SEQ ID NO: 49821 - DNA, 311 bp, Zea mays
ctgtgatcgatgaggtgcgcactggcacgtaccgccagctcttccaccctgagcagctcatcagtggcaaggaggatgccgctaacaatttcgcccgtggccactacacaattggcaaggagattgttgatctgtgccttgaccgtatccgcaagcttgctgacaactgcaccggcctccagggcttcctggtcttcaatgccgttggtggtggcactggctctggccttggttctctcctccttgagcgcctgtctgtggagtacggcaagaaatccaagctgggcttcactgtgtacccatctccccag

SEQ ID NO: 49822 - DNA, 312 bp, Zea mays
  unsure (1)..(312): unsure at all n locations
tagggttttgctgctctccgaccccgagctccgatagccgcagcatcaggcgcggcccccctcgcgtgtgaccgagatggcgctgccgaatcaggggaccgttgattaccccagcttcaagctcgtcatcgtcggcgatggtggaactggtaaaactacatttgtgaagaggcatctcactggagagtttgagaagaaatatgaaccaaccattggtgtggaagttcatccgttggatttcaccactaactgtggtaagatcaggttctactgctgggataccgcanggcaagagaagtttggtggcctcag

SEQ ID NO: 49823 - DNA, 312 bp, Zea mays
gtctgggacaccatggctccgatgaagctgtacggggcggtgatgtcgtggaacgtgacgaggtgcgcaacggcgctggaggaggctggctccgactacgagatcgtgcccatcaacttcgccaccgccgagcacaagagccccgagcacctcgtccgcaacccgtttggtcaggttccagctctgcaggatggtgacttgtacctcttcgaatcacgagcaatctgcaagtacgctgctcgcaaaaacaagccagagctgttgagggaaggaaaccacgaggaggcagcaatggtggatgtttggatcgag

SEQ ID NO: 49824 - DNA, 153 bp, Zea mays
agcacgccatcagcagctagcgcgctcctcgagcccagcagagaaaggccggcctacccactctctctctctctctctccagtctccaccggcagcgctaatcgtaatagccatgggctccaccgccggcgacgtggccgcggtggtggacga

SEQ ID NO: 49825 - DNA, 309 bp, Zea mays
gtctactaatcatggggagctcaaaagctgagatcccacctgagaagtccatcaccctgtcctaccttatggccccaaggctggctcgccgtggtggagttgacgagccctttgcatgggaaagcagagagtttctaaggaagctttgtatagggaaggaggtcacattcagagtggattatacggctcctaatattggacgagaattcggaactgtttatctaggtgacaagaatgttgcgtactcagtaatttctgctggatgggcaagggtaaaggagcaaggcccaaaggggggcgaacaaaatt

SEQ ID NO: 49826 - DNA, 308 bp, Zea mays
tcctcactcctcaccatttcccaaaccctacccatacccccgccgccgccgccatgccgcccaagctcgacccgtcgcaggtggtggaggtcttcgtccgggtgacgggcggcgaggtcggcgcggcgtcgtccctggcgcccaagatcggcccgctcggtctctccccgaagaagatcggcgaggacattgccaaggagacggccaaggactggaagggcctgcgcgtcaccgtcaagctcactgtccagaaccgccaggccaaggtctccgtcgtcccctccgccgccgcgctcgtcatcaaggcg

SEQ ID NO: 49827 - DNA, 307 bp, Zea mays
caaggcaccacacctcttcttcttcttcctcctcctcctagcacagctagcgcctgctccccttcgcctgtgatcatgtcttgcagcagcggcaagtgcgactgtggctccagctgctcctgcggcagctcatgcaactgcatgtcccctaacgtggagaccgccgccgccagcagcatcaagaccacggtcctcgccgcgccgaccaccaaggccagcgccggcggcttcgaggcggccaccgagggcggcggctgcgactgcaacacctgcaactgcggcaccagctgcggctgctcctgctgca

SEQ ID NO: 49828 - DNA, 306 bp, Zea mays
gaggaggccatggacgaaggagccaagtagaaagctagcaggcaccgcaaccaacggtaaagctggtggtcgagcaagttttaatttgtcaagagcgagctcatggaggatggcagtgctccaagacgggctactccggcccccacccgcaggagcagatctgccgacttccacaatttttcagaaaggaggaggagggacaggatcaacgagaaactgagggcgttgcaggagcttcttccaaactgcaccaagaccgacaaagtttccatgctagatgaagcgatcgactacctaaaatccctc

SEQ ID NO: 49829 - DNA, 301 bp, Zea mays
gccgctcctgggcggcgccccgacgcggcggtggtggacaagcacgcggacagctcgccaaggtgctcgacgtgtacgaggcgcacctcgcccgcaacaagtacctcgccggggacgagttcacgctcgccgacgccaaccacgcgtcctacctgctctacctcagcaagacccccaaggccgggcttgtcgcagcccgcccccacgtcaaggcctggtgggaggccatcgtcgcccgccccgcgttccagaagaccgtcgccgccatccccatgcccccgccgccctcctcctcggcttg

SEQ ID NO: 49830 - DNA, 303 bp, Zea mays
gaacattctttacaactgctgttgttgcggtggtattgagggggctgattgagttctgtcgtagtggaaaatgtggtctctttgggcaaggtggattgatcatgtttgatctcagttcaactgttgcagtctacagtactccagatctaattgcaattatagtccttgggataattggtggaatctttggaggcctcttcaactatctgttggacaagatcctccgagtttatagtattatcaacgagagaggtgctccattcaagatccttctcactataacaatatcaataatcacatcaa

SEQ ID NO: 49831 - DNA, 300 bp, Zea mays
gtttttgagaagcagaaagcgctcattttgatcggagagagattgcttcttacaactattcgatttgatttcaacattcagcatccttatagaccacttcttgatgccatgcaaaatcttggcatcaatcaaaaagaagtgaaacaagtagcatggaactttgtgaatgactggcttaaaacaacattgtgtctacagtataaaccccagtacatagctgctggttccctttatctggctgcaaagcttcacaatatcaagcttcccttgcatggagcgcatgtttggtggcaccaattt

SEQ ID NO: 49832 - DNA, 121 bp, Zea mays
gcaagatgaagttgatcctatggtatctgtgatgaaagttgagaaagcgcctttggaatcttatgctgacattggtggactggatgctcagattcaagaaattaaagaggcagttgagctt

SEQ ID NO: 49833 - DNA, 254 bp, Zea mays
gctggcacgatgtactatctcactattgaagtgaaggatggcgaagtcaataagcttctcgaacaccaaaaggccaatgctcttctggggttcgagaagcttgtgaaggccaagacacaagtggttgctggcacgatgtactatctcactattgaagtgaaggatggcgaagtcaataagctctatgaagctaaggtctgggagaagccatgggagaacttcaagcagctgcaggatttcaagcctgttgaaga

SEQ ID NO: 49834 - DNA, 297 bp, Zea mays
ccggcagggaggacaagcctcagccgccacctgagggccgtcttcctgatgccaccaagggttctgaccacctgaggcaagtctttggcaagcagatgggtttgagtgatcaggacattgttgccctctctggtggccacaccttgggaaggtgccacaaagagcggtctggttttgagggggcctggactacgaaccctttggtctttgacaactcttacttcaaggaacttctgagtggcgacaaggagggccttcttcagctcccaagtgacaaagccctgctgaacgaccctg

SEQ ID NO: 49835 - DNA, 249 bp, Zea mays
gcagttggatctcagatcggtgatcacataaacaatggtgaaggctgttgctgtgcttggtagcagcgatggtgtcaagggcaccatctttttcacccaagtgggagatggccctaccactgtcaccggaagtgtctctggcctcaagcctggcctccatgggtttcatgtgcatgcgcttggtgacaccaccaatggctgcatgtcaactggaccacactacaatcctgcgagcaaggaacatggagc

SEQ ID NO: 49836 - DNA, 299 bp, Zea mays
gttgccaacccaaagaagccatttgccgctattgttggtggatccaaggtctcaagtaagattggtgtcattgagtcgttgctggcgaaggtcgatatcctcatccttggtggtggtatgatctacacattttacaaggcacaaggatattctgttggaaaatctctcgtggaagaggataaacttgagctcgcaacttctcttattgagaaggcgaaggcaaagggggtttctcttttgcttcccactgatattgtagtagcggacaagtttgcagccgatgctgagagcaagattgt

SEQ ID NO: 49837 - DNA, 292 bp, Zea mays
ccggcgtcgggccccaaccaggtgttcaagatcttctgccgcgccaacgagaactactgcctggccgtccgcgacggcgccgtcgtgctggccccggtcaaccccaaggacgaccaccagcactggtacaaggacatgcgcttcagcacccgggtcaaggacgaggaaggcatgccggcgttcgcgctcgtcaacaaggccacggggctcgcaatcaagcactccctcggccagtcccacccggtcaagctcgcgcctttcagcccggaccaggaggacgcgtcggtgctgt

SEQ ID NO: 49838 - DNA, 303 bp, Zea mays
ctcttcttcttcttcctcctcctcctagcacagctagcgcctgctccccttcgcctgtgatcatgtcttgcagcagcggcaagtgcgactgtggctccagctgctcctgcggcagctcatgcaactgcatgtcccctaacgtggagaccgccgccgccagcagcatcaagaccacggtcctcgccgcgccgaccaccaaggccagcgccggcggcttcgaggcggccaccgagggcggcggctgcgactgcaacacctgcaactgcggcaccagctgcggctgctcctgctgcagctgcaact

SEQ ID NO: 49839 - DNA, 306 bp, Zea mays
gcaggctccatcaccagctcagccagcagctgcaccaccagtgcagtcatctgccgcctctgcaaggcctaatgcaaatcctctgaacctttttcctcagggtgtcccaagtggtggggccaatccaggtgttgttccagctgcaggatctggtgcccttgatgccttgcgacagcttccacagtttcaagcactgcttcagttggtccaggctaatcctcaaatcttgcagccaatgcttcaagaactaggcaaacaaaacccacaaatcctgcgtttgattcaggaaaatcaagctgagtttgt

SEQ ID NO: 49840 - DNA, 305 bp, Zea mays
cggctcgaggtcttctccgcgaaatcttcctctgtctgtcgtgtctttgttctggtcgtttcccgattcggtagttggcttggggatttcactgcaagtctagggattttctgtagggaagttgatcgagaagtcttggtagacatggagcagatccagtactccgagaagtacttcgacgacacctatgaatacaggcacgtcgtcctcccgcccgaggtcgccaagctcctccccaggaacatccttctctccgagaagcagtggcggttggtgggtgtgcagcagagccgcgggtgggtgca

SEQ ID NO: 49841 - DNA, 308 bp, Zea mays
gttgatcgaggtgagtgaggttgaaaagcacaccatcgtcatggacggcggatactacggcggtcgcgatcagcgctacagcggcgggtactacggcggcggtggcatcgcaacgccggggtacgctccggcggtcccgtacgggatgtcgcaggtgaacatcgagggcaacgggtgcgggcgggcgctgccgccgcagccgaccgtgaaggtgtactgccgcgccaaccccaactacgccatgagcgtccgcgacgggaaggtggtgctggcgccggcgaaccccaaggacgagtaccagcactgga

SEQ ID NO: 49842 - DNA, 304 bp, Zea mays
aagaaatcgcgggaagcaaggacaccgtggggcagtacgagtcccacatcgcgttcactcttcctgggctctaccgtgtcgtccatggcatcgatgttttcgatcccaagttcaacattgtctcccctggagcagacatgagtgtttactacccgtatacggaaaccgacaagagactcactgccttccatcctgaaatcgaggagctcatctacagcgacgtcgagaactccgagcacaagttcgtgctgaaggacaagaagaagccgatcatcttctcgatggcgcgtctcgaccgcgtgaa

SEQ ID NO: 49843 - DNA, 295 bp, Zea mays
ctcttcacctcggagtctgtgaacgagggacaccctgacaagctctgtgaccaggtctcagatgccgttcttgacgcttgccttgctgaggaccctgacagcaaggttgcttgtgagacctgcaccaagaccaacatggtcatggtctttggtgagatcaccaccaaggccaatgttgactacgagaagattgtcagggagacctgccgcaacattggttttgtgtcaaacgatgttgggcttgacgccgaccactgcaaggtgctcgtgaacattgagcagcagtcccctgata

SEQ ID NO: 49844 - DNA, 294 bp, Zea mays
ctcatgtccgccgggctgtcgacggagctccgccacaagtacaacgtgcgctccatcccgatccgcaaggacgacgaggtgcaggtcgtgcgcggcacctacaagggccgtgaggggaaggtggtgcaggtgtaccgccgccgctgggtcatccacgtcgagcggatcacccgcgagaaggtgaacggctccaccgtgaacgtgggcatccacccctccaaagtgatcgtcaccaagctgaagctcgacaaggaccgtaaagctctcctcgaccgctaagcccgggtgcgcgcc

SEQ ID NO: 49845 - DNA, 287 bp, Zea mays
  unsure (1)..(287): unsure at all n locations
aggatgagggggagcaatggcagagccgggccagcagttgctgcggtcgttcgtggaggtggcagcgggctcgcacttccctatccagaacctgcccttcggggtcttccgccggcgggggtcgccaccgcaggctccgcgccccggggtggccatcggggacttcgcgctcgacctcgccaccgtcgccgacgcgggtctcttcgacgggcccgcgctctccggctccccgtgcttccaccagnagacgctcaacatgttcttggggatgggccgccggcgtggag

SEQ ID NO: 49846 - DNA, 300 bp, Zea mays
ccgcattctcgcgtcggcttgcttttaactgaatccagcccaccgcttctcgcacgtcgccatggacgcggtcgattctgtggtggatcccctccgcgacttcgccaaggacagcgtccgcctcgtcaagcgctgccacaagcctgaccgcaaggagttcaccaaggtggcagcgcggacggcgatagggttcgtcgtcatgggcttcgtcggcttcttcgtcaagctcatcttcattcccatcaacaacattatcgtcggttccggctaggctcagggcgcgactagcatgggagtagt

SEQ ID NO: 49847 - DNA, 295 bp, Zea mays
tgcctcgccgctgttccccgcaacctatcgacccaatctcgtccgacccggcgcgtcgtcccctccagatctccgtcgccctctccaggtagcagaaactgttctgctgcagtctgacaaagtggagggcttaggagcttctgcttcttttatgtctgaacaatctttgctttatttgggattgttgggagagtactctcgtgcaacgaggaaaaggcacaaggttccgtcccactgcatgcgtcaagagcctgtctggttttcttgttctgatttgtcatttgctggtgctcag

SEQ ID NO: 49848 - DNA, 295 bp, Zea mays
gattcttccttttattgagcttgaccttaaggaaattgcacaaactttttctaagtttgcctgcaatgcgcataccatatgtgaccctgaacttaggcctcttgggactggactgtaccctgtcatatccattattaaccacagttgtgtaccaaatgcagttttgatatttgatggtaggacagcatatgttcgtgcattgcaaccgataaataaagatgaagaggtatctataagctacattgagactgcggcagtcaccaagaagagaaacaatgatctgaaacagtacttc

SEQ ID NO: 49849 - DNA, 287 bp, Zea mays
tgtttaccattcctccccaaaacacatcctgcgatcctcgaagcctccgccgagcatcgatcatgtcggcctactgcggcaagtacgcggatgagctcatcaagaatgctgcctacatcggcacccctggcaagggtatccttgctgctgatgagtcaactggcaccattggcaagcgcctttccagcatcaatgtcgagaacgtggaggagaaccggcgggctctccgtgagctcctgttctgctgccctggtgccctccagtacatcagcggtgtgatcctcttc

SEQ ID NO: 49850 - DNA, 292 bp, Zea mays
cgcaccgacaccaatacgccatgggttccatcatggagcaacgctgcaacaacgatccgcaggcgctgctcgacgctcagctcgagctctggcacagcacgttcgcgttcatcaagtccatggcgttcaagtcggcgctggagctcggcatcgccgacgccatccactgccacggcggcaccgccacgctcacccagatagccaccaaggccgcgctccacccgtccaagacaccgtgcctgcgcaggctcatgcgcgcgctcacagtcgccggcatcttcagcgtcgccaa

SEQ ID NO: 49851 - DNA, 289 bp, Zea mays
ctcggatccgcccgaccacgaccaccccgcgtcgccgccgcgcagcagcagcagatcagagaagatggccggactcgacaccttcctcttcacctcggagtccgtgaacgagggacaccctgacaagctctgcgaccaggtctcagatgctgttctggacgcttgccttgctgaggaccctgacagcaaggttgcttgcgagacctgcaccaagaccaacatggtcatggtctttggtgagatcaccaccaaggccaatgtcgactacgagaagattgtcagggagaca

SEQ ID NO: 49852 - DNA, 290 bp, Zea mays
cgctctctaccgtccgagaccccaagcaccagcgcggcggcgggggcggcggcgaccatggctgtcggaaagaacaagaggatctccaagggaaagaagggtggcaagaaaaagaccgtcgaccctttctctaagaaggattggtatgacatcaaggcaccgtcggtgttcagtgtgcgcaacatcgggaagactctcgtatccaggacacagggtaccaggattgcttctgagggtctgaagcacagagtctttgaggtttgcctagctgatcttcagggcgacgagga

SEQ ID NO: 49853 - DNA, 156 bp, Zea mays
gggcgatggcgagcgtggagggcaagagggatacggtgctggtcaccggcgccacggcttcatcggatcgatcctcgtcggcctcctcctcgaccgctgctacaacgtccacgccagcgtcctcaaccccgatgacaaggcggagacggagcacct

SEQ ID NO: 49854 - DNA, 285 bp, Zea mays
ccgctcccctacctctccagcatcctcccgtctccgtcgtctcgtctccgctcctcacctcgccagccatgggcaagatcaagatcggaatcaacggtttcggaaggatcggcaggctcgtggccagggtcgccctgcagagcgaggatgtcgagctcgtcgccgtcaacgaccccttcatcaccacggattacatgacgtacatgttcaagtacgacaccgtgcacggccaatggaagcacagcgacatcgccctcaaggactccaagacgcttctcttcggcg

SEQ ID NO: 49855 - DNA, 292 bp, Zea mays
atgaaccaggacaaggtcctcatggagagctggtactatctcaaggacgcggtgctggacggcggcatcccgttcaacaaggcgtacgggatgacggcgttcgagtaccacggcacggactcgcgcttcaaccgcgtgttcaacgagggcatgaagaaccactcggtgatcatcaccaagaagctgctggacttctacacgggcttcgagggcgtgtcgacgctggtggacgtgggcggcggcgtgggcgccacgctgcacgccatcacgtcccgccacccgcacatctccg

SEQ ID NO: 49856 - DNA, 293 bp, Zea mays
tgtgcattgctgctggctggtgagaacttggataactttggcgatgtaaagaacattcttgtcgaaatgggaacatactttcaagttcaggatgattatttagattgtttcggtgatcctgaattcattggcaagatcggaactgacattgaagactacaagtgttcctggctagtcgtgcaagctcttgaacacgctgatgagaagcaaaagaacattctgtttgaaagttatggaaagtctgatccagcgtgtgttgcaaaggtgaaggacttgtacaaagagcttaaact

SEQ ID NO: 49857 - DNA, 301 bp, Zea mays
ctccattatttgcttgatccttgacgagcgggagagagagagagaggaagacgagaggcagcgaaggaaacagtagttcttcagttaggcaggagggcacaggaggaggaagatggcgtcgaagaggatccagaaggagctcaaggatcttcagaaggaccctcccacctcgtgcagtgcaggtcctgttggtgaagatatattccactggcaggcaacaataatgggtccatctgatagcccatattctggtggagttttcctagttacaatccattttcctcccgattatcctttcaaa

SEQ ID NO: 49858 - DNA, 179 bp, Zea mays
ggtcgcccaggacaacgagagcgaggagctgaagcagacggcgaggctggtgtaccagacggcccttatggagagcgggttcaacctccccgaccccaaggagttcgcgtccagcatctacaagtcggtgcacaagagcctggacctgagccccgacgcggccgtggaggaggaggacg

SEQ ID NO: 49859 - DNA, 242 bp, Zea mays
ctggagccggcccaaggtggaggtggaattcttgatggggcagtttgagcgagcgatccgcgaaagctactgaatttttgagagaaggaattcggctacgcgtaatcggcgactcctcaaggctgccggtttctcttcagaggaccgcgagataagccgagaaggccacgcggaacaactcgcagctcgatatagcactggcaatcagctacagcaggcgggatggacgtagtgcaggcgtg

SEQ ID NO: 49860 - DNA, 298 bp, Zea mays
ctcaaatcttgcagccaatgcttcaagagctaggtaaacaaaacccacaaattttgcggttgattcaggaaaatcaagctgagtttctccgcttggtgaatgaatctcctgagggtggtcctggagggaacatactaggtcaactggcagctgctgtgccacaaacgctgacagttaccccagaggaacgggaggctatccagcggctcgagggaatggggttcaaccgtgagcttgtgctagaagttttctttgcatgcaacaaggacgaagagcttacagccaactaccttctgga

SEQ ID NO: 49861 - DNA, 302 bp, Zea mays
ttcccaaatggtttcccacttaggttgaaaatgatgatttgattgcctacggcctgatcccagaatttattgaaaggttgccaataacagttggcctgaccaatcttagtgaagagcaattggttcaagtagtaaatttctttgattttataatttaaagcaatatttcttaagattaccatctcaaatatttccaccacctcaaaatattagaaattctctttgcaggtgctcatggagcccaaaaacgcaataggaaagcaatacaagaagctattcaaaatgaatgatgttagtttgtg

SEQ ID NO: 49862 - DNA, 159 bp, Zea mays
gcagcccaacatcactattggcattctggtctccgttgtcgtcgtgttcgttaccgttctcttcaagatcctgtttggaggcaagaagccggtggcacctgtgaaacctgcagctgaggcgaagaagcccaaggccacagtgaccgacggtgctgaaag

SEQ ID NO: 49863 - DNA, 247 bp, Zea mays
ctagcatataggagcaacgagcaaggacctgagaaggtaggcgcattctgcaggatgaaatgaagtaatagaataggtaaattaggcctgaatagatagaacatgtcaagtgtcgcctcagaatgactagactaaactggtcaccattgatttacagcttgttcgctgcggcttgtctgcggctgaatccggctgcggctggggcttatagagtatgtctccccctatggattgaagctgcagcagt

SEQ ID NO: 49864 - DNA, 261 bp, Zea mays
agcgaagacctaccccgagaacaagcacgtgaagttcctcgccgacggatctggagcgtacaccaaggcgctcgacctcgagctcgatctcacggacaaagggctgggcgtgcgctcgaagaggttcgctctcctggccgacgacctcacggtcaccgtcgcaaacatcgaggaaggcgggcagttcacgatctccggcgctgaggagatcctgaaggcgctttagaagctccgtctcctctagaagccgcagcaacgatc

SEQ ID NO: 49865 - DNA, 209 bp, Zea mays
aaaaaagatttcaaaaaagccaagcaagtgttggtgcgcaatattaatttgttagagtgatgaattcatattgcgaggggctactgttgggggccttcaacttctgaaggtcctcaaaaacatagatttgacagatgttttccaggtgaaatatgtgaacaggtatcttcagattcggatcatggccatacagagaatggtcaggacga

SEQ ID NO: 49866 - DNA, 292 bp, Zea mays
atctggtgctggtcctggaacgaaggattatgtgcatgtgcgcatacagcagcgcaacggcagaaagagtctgactacagtccagggtctgaagaaagagttcagctataacaagatcctcaaggatctgaagaaggaattctgctgcaatggtactgtagttcaggacccagagctaggccaggtcattcagacctcaggtgatcagcgcaagaatgttgctactttcctagttcaggctggcgttgcgaagaaagagaacatcaagattcacgggttctaagggactgta

SEQ ID NO: 49867 - DNA, 129 bp, Zea mays
tgcagaagatgctgcgtctagatcccagcaagaggatcaccgcccgctccgccctcgagcacgactacttcagggacctcgagcacgcctagcaggatatggatggatggatgaaccgtttcccctccc

SEQ ID NO: 49868 - DNA, 275 bp, Zea mays
caagagttcagttcatcgagctgttgtcaatgctgagcatgcccgcttatcagtagcaacattttatgatccatcaaaatcaaggaaaatatgcagtgccccgcagcttgtgagtgagaatgaaccacaaaagtatcgggatgtaatttatggtgactatgtctcatcttggtatagcaaaggtccagagggcaagcgaaagatgggcgctctcgatcattgcggattagggccagggtgtggcttaaaacagggttggaccactcatctgtttt

SEQ ID NO: 49869 - DNA, 202 bp, Zea mays
ccgccgccatgtctaccgcccagtcactcaaatccgtggactacgaggtgttcggaagagtgcagggtgtttgcttcagaatgtatacagaagatgaagctaggaaaataggagtggttggctgggtgaagaataccagcaaaagcaccgtgacaagcccagtgcaggggccagaagacaaagtcattcccaattaggcttt

SEQ ID NO: 49870 - DNA, 285 bp, Zea mays
caactctccccaatccagcagccctcgagtctggtcccccacccctcagcgcgacgaaggtaagatgttcctgcggaggatcctgaccggcgggggcggcctggcggccctgagggcggcgcgcgccgtgaaggagacgacggggatcgtgggccttgaggtggtgcctaacgcgcgacaggttctggtagggctctacgagcgcacgctcaaagagatcaatgccgtccccgaagacgatggctaccgcaaggccgttgagtccttcaccggtcaccgcctcca

SEQ ID NO: 49871 - DNA, 226 bp, Zea mays
agaccgtggcgccgacaggatgggcaagtgtcgtggacttcgtactgctaggaagctccgtagtcaccgacgagaccacaagtggcatgatagatagtataataaagctcatttggagcaagccctaaagcgccacccctttatggaggtgcttctgcatgaaaaaggactcgtgctggaaaaagtaggagttgaagccaaacagccaaattctgccagtgggaat

SEQ ID NO: 49872 - DNA, 286 bp, Zea mays
ctgattggattaccccttctgattgacaactatgtgccccctttggagggactgcctatcttcattcttcgactagccactgaggtgaattgggacgaagaaaaggaatgttttgaaagcctcagtaaagaatgcgctatgttctattccatccggaagcagtacatatctgaggagtcgaccctctcaggccagcagagtgaagtgcctggctccattccaaactcctggaagtggactgtggaacacattgtctataaagccttgcgctcacacatctgcctct

SEQ ID NO: 49873 - DNA, 288 bp, Zea mays
ctgctcctttcttggaaaagctggttcagaaagatattgaggtcctttacctcattgagccaattgatgaggttgccattcagaatttacagacatacaaagagaagaagttcgttgatattagcaaagaggatttggaattgggtgatgaagatgaggacaaggagaaagaaagcaagcaggagtatactcttctatgcgactggataaagcaccgcttggcgataaagtcgccaaggtccagatctcgaagcgactcagctcttctccatgcgttcttgtttctgg

SEQ ID NO: 49874 - DNA, 275 bp, Zea mays
caggcgctggacgaggactggaggagcgccgagaaagacgttgacctgccgttgttcgatctggcggcggtcctggcagctacgggcagcttctccgcgagcaacaagatcggcgaaggcgggtttggtcctgtctacatgggaaagctggaggatgcagcagaactagccgtaagagctctcccggacgtggatgaagggggcggtggagttcaagaacgaggtgaactgatcgccaagctccagcaccggaacctctcaggtgctcggctgtg

SEQ ID NO: 49875 - DNA, 268 bp, Zea mays
ccactggtcaaatacttgtaatttgtgggcgtaataagaagctggtcaatcgattgcaatccataaattggaaagttccagttcaggtgaaaggctttgttacaaagatggaagaatgtatgggtgcttgtgattgtatcattacaaaggcaggacctggtacaattgcagaggcaatgatccgtggcttaccaattattctaaatgattatattgctggacaggaagctggcaatgtcccctacgttgttgaaacgggtgttgggaa

SEQ ID NO: 49876 - DNA, 238 bp, Zea mays
ctgaccagcaccatggcggttggcaagaacaagcgccttacgaaaggcggcaaaaagggagccaagaagaaagtggttgatccattttctaagaaagattggtatgatgtgaaagcacctgctatgttcaatataagaaatatcggaaagacgctcgtcaccaggacccaaggaaccaaaattgcatctgatggtctcaagggtcgtgtgtttgaagtgagtcttgctgatttgcaga

SEQ ID NO: 49877 - DNA, 299 bp, Zea mays
ggctgaagcagacatatttcctgaggtggatagcacttggaagacatttcatgagatacagaagcttttgagcaaaaccaacgggaaggttattgctgatgttatgaccccagcgcctctcgtggtgcgtgaaacaactaaccttgaagatgctgcaaggttatccttgtgactaagtaccgcaggcttccagtggtcgatagctcaggcaaactggttgggatcattacaagagggaacgtcgtccaagccgccctcgaaatcaagaaaaaggttgaagggacactctgatatgacta

SEQ ID NO: 49878 - DNA, 292 bp, Zea mays
ctcggggaagccctactccgcgcggtacataggcagcctcgtcggcgacttccaccgcactcttctctacggagggatctacgggtaccccagggacaagaagagcaagaacggcaagctgcggcttctctacgagtgcgcccccatgagcttcatcgtgagcaggccggtggcaagggctctgacggccaccagagaattcttgacatcacacctacagagatccaccaaagagtgcctctgtacattgggagcgtggaggaagtggacaaggtggagaattcctggcttg

SEQ ID NO: 49879 - DNA, 292 bp, Zea mays
tctgagaagtgtatatggggctcaagctactggtgccagaacacagagacagcagcccagtgcaatgctgtcgagcattgcaaacgccatgtgtggaactaggaggaggaatattccatcttggcagaaaccacagcattggtctttttctacttgtggtctgggggaatgaacgcacagatctgtttgactttgttataaaaatagggctcccccacctcccccatttctgtgtcctttattgtagcattgctgtctgcaatggagcccctagcccctggcagacatagct

SEQ ID NO: 49880 - DNA, 294 bp, Zea mays
  unsure (1)..(294): unsure at all n locations
ggacggaacggtcgtcatctggacagcagcaaaagaaggtgagcagtgggacggccgggtgctgtatgatttcagaacccccgtttggaggctgtcgtggtcactgactgggaacatactggcggtttccgacggcaacaacaatgtgaccctgtgaaggaagctgtggatggcgaatggcagcaagtgacgactgttgagccataggtccataggtctctcgagttatttctcgcctgtattttctanataataattgtagttttcgtgtaaggtanagttatgccctttggg

SEQ ID NO: 49881 - DNA, 293 bp, Zea mays
gccgtacttggacattatccgactgcttcgggatcattcagccctaccgattgctgcttaccaggtctcgggcgagtactcgatgatcaaagccggcggggccctgggcatggtggacgagcagaaggtgatgatggagtcgctcatgtgcctgcgcgagccggcgccgacgtcatcctgacctacttcgcccgtcacgccgccgcggtgctgtgcggcatggggcccaagtaggaggcgaggcccgcccgccattcctgccctgcactgtcattgtggagttgagcgatgag

SEQ ID NO: 49882 - DNA, 293 bp, Zea mays
cgacagtcagccgcatcttcttttgcgtcgccagccgagccacatcgctcagacaccatggggaaggtgaaggtcggagtcaacggatttggtcgtattgggcgcctggtcaccagggctgcttttaactctggtaaagtggatattgttgccataatgaccccttcattgacctcaactacatggtttacatgttccaatatgattccacccatggcaaattccatggcaccgtcaaggctgagaacgggaagcttgtcatcaatggaaatgccatcaccatcttccaggag

SEQ ID NO: 49883 - DNA, 288 bp, Zea mays
ctgacgaagaagagaactacttttccattgaattgacgccaagattgtttacatctgctgtcgataatgcataccagtccatacatgaattttcaaagcctttgatcaacatgatgaaggctgcaggttgggatcttgatggggctgccaatcgatcgaacctggtgtagtttacacaagaagggctcacaagaagtttgcttttgaatcctatatttgccaaagaatgttcagtgggttccaagaggagagcttttctatcaaggattctaacatcagtgtttccaa

SEQ ID NO: 49884 - DNA, 294 bp, Zea mays
tggagagacaacagctcataccccagaaggaggccaggagttgtgagtttccaagccccagctcactctgaccacttctctgcctgcccagcatcatgaagggccttgcagctgccctccttgtcctcgtctgcaccatggccctctgctcctgtcacaagttggtaccaacaaagtcctctgctgcctcgtctatacctcctggcagattccacaaaagttcatagttgactattctgaaaccagcccccagtgccccaagccaggtgtcatcctcctaaccaagagaggccg

SEQ ID NO: 49885 - DNA, 278 bp, Zea mays
gcggagacggtgagcaaggtgatggacatcgtgaagcagcagctggcgctggcggcggacgtggggctgacggcggagaccaagttcacggacctcggcgccgactcgctggacacggtggagatcgtcatgacgctggaggaggagttaagatcaccgtcgaggaggacaatgtccagagcatcgccaccatccaggacgccgccgacctcatcgacaagctcgtcgaccagaagccacgagacagcgactgattgtcgacgcgaggacacccaaat

SEQ ID NO: 49886 - DNA, 279 bp, Zea mays
  unsure (1)..(279): unsure at all n locations
tcccgcaacggctccacctccaaggtggtcaaggtcgctgactgcggacagctctcctagatctctctgatctggtctgttcggccgccctccctccgtcatcgtcgactccccctgcgtccgttcctttggatctgaataagatggtggtgactgagtggtggtcttagtttatcatgtatcgctcaatgnntaatttagcggtttaggtgtggatctgtgaaccccatggcgcctctgcttgattcgtgtttcacctgttatgttctgagattcatg

SEQ ID NO: 49887 - DNA, 275 bp, Zea mays
ctggaaggcccggtgagcaaggaggggtttgagagcgctctgtacatgatggacatcggccacaacgacatggttggtgtggcgcacacaccgtccgatcagtgggacaagaagatcacagagatcgtcggcgaggtcagacaagccatctgatcctgtacgacaacggagcgaggaagttctggatccacggcacgggcgccctggggtgcctgccgccgcttgtggtgcagaagacgagggcgagcaggacaagcacggctgcctcgccggcg

SEQ ID NO: 49888 - DNA, 275 bp, Zea mays
gcacaacaagtagtcaaagcatctagctcgttacaagtggctcttgtcgcctacaattttgccttcttccaagtcttgtttgaagttgctctctgcgaagagccggtagagaagttaatatcgtctagcaatggaccgggtgacgaaatggcttctcagcgcgcggtggtcatcttcagcacgagctcctgctgtatgtgccacacggtgacgcgcctgttccgcgagctcggggtgaacccgacggtggtggagctggacgaagaccccagggg

SEQ ID NO: 49889 - DNA, 286 bp, Zea mays
tgaaaacattggttgtgtgatgaccggaatgacagctgacagcagatcccaggtacagagggcacgctatgaggcagctaactggaaatacaagtatggctatgagattcctgtggacatgctgtgtaaaagaattgccgatatttccaggtctacacacagaatgctgaaatgaggcctcttggttgttgtatgattttaattggtatagatgaagagcaaggccctcaggtatataagtgtgatcctgcaggttactactgtgggtttaaagccactgcagcgg

SEQ ID NO: 49890 - DNA, 277 bp, Zea mays
gcgcgcattcttcgacgtgcatgatcaagaaggaagtcacccaggaggcatccaccttgaaatgactgggcagaacgtgaccgagtgcattggtggatcacggactgtgaccttcgatgacctgatcgaccgctaccacacccacgtgacccaaggctgaacgcctcccagtccctggagctcgccttcatcattgcagagaggctcaggaagaggaggatgcggtcggggctcaacaacagcctgcctctgccaccactggctttctaagtagccg

SEQ ID NO: 49891 - DNA, 240 bp, Zea mays
ggcgagatggcagtgcaaatatccaagaagaggaagtttgtcgctgatggcatcttcaaagctgaactgaatgagtttcttactcgggagctggctgaagatggctactctggagttgaggtgcgagttacaccaaccatgacagaatcattatcttagccaccagaacacagaatgttcttggtgagaagggccggcggattcgggaactgactgctgtagttcagaagaggtttggct

SEQ ID NO: 49892 - DNA, 281 bp, Zea mays
cagcgatggctcagacagctcgggtttgtggagtctcgtcagcaacccaagcagccctgacttcactcccctcaattcgttctccgcctttggaaactcttttaatctaactggtgaagttttcagcaaactcggattatctcgtcgtgcaatcaggcctcacagaggatctggaacgagtttaatagtggcccttcatacctttgggagtcgccagcgacagatcccagtccttcctggccagccagttccggctccccgacccacacagccacatcggt

SEQ ID NO: 49893 - DNA, 279 bp, Zea mays
tgtgactctcaccattcggcttcttatgcacggaaaggaagtaggaagcatcattgggaagaaaggggagtcggttaagaggatccgcgaggagagtggcgcgcggatcaacatctcggaggggaattgtccggagagaatcatcctctgaccggccccaccaaatccctctttaaggctttcgctatgatcatcgacaagctggaggaagatatcaacagctccatgaccaacagtaccgcggccagcaggcccccggtcaccctgaggctggtggtg

SEQ ID NO: 49894 - DNA, 284 bp, Zea mays
attgaatatggagatgatgattgtggattgtctgatgaacgcacactttcacttgtttcccttagaaacccgaaatctggacacggtgattcacattctgctgctgttcgtattcaaaacaagttcagaggatggaaaggaagaaaagagtttatgcttatccggcagaaaattgtgaagatacaggcccatgtacgtggacatcaggtaaggaaaaactatcggaaggtagtctggtctgttggcatcgtggagaaagtcatactgaggtggaggagaaaggg

SEQ ID NO: 49895 - DNA, 199 bp, Zea mays
gtgatgacagctatttcctgaacaacgctccaatcattgctgttgatcgggctccaaatgttattgctatcaatgtaagcccaattgaatatggacatgtgcttctcattcctcgtgttctggaccgcctgcctcagaggattgatccagagagcttcttgcttgcactgcaaatggcagccgagggaggtagcccata

SEQ ID NO: 49896 - DNA, 279 bp, Zea mays
ttacaagggagaagcagagaagatccttatggtgaagaaagcggaggcagaagcagaggcgaaatatctttctggtgtcggtatcgctaaacagcggcaggcgataaccgacggccttagagagaacatcctgaacttctcacactcggtgtcgggcaccagcgcgaaggaggtcatggacctgatcatggtcacgcagtacttcgacaccatcaaggagctcggggacggctccaagaacaccacgatcttcataccccacggaccaggccacgtgaa

SEQ ID NO: 49897 - DNA, 277 bp, Zea mays
gagatgtttggatgtaccaatgattacccaccagatgatatcgagaaaataagatgctacgtgtgtaaccagaagggccatctatgttgttccgacttctctgacgattgtccgaaacaaattagctgttataattgtgcccaatctggtcattctggtctgggatgtgccaaacgcagggaaaccagtgctgtcacaactccaaccttatgcttcaaatgtggcgaggaaggtcacttcgcacgtggctgcacaaagaacgccaagtccgatcggt

SEQ ID NO: 49898 - DNA, 192 bp, Zea mays
cccaacccctacactcccggcggcggcgcaggagcagcagcaccagcacccgaggatggtgaagttcctcaagcccggcaaggccgtgatcctcctgcagggccggttcgccggcaggaaggcggtgatcgtgcgcgtgttcgaggagggcacccgcgaccgcccctacggccactgcctcgtcgccggcct

SEQ ID NO: 49899 - DNA, 276 bp, Zea mays
agtttgatttagagggacctgttccaaatgagtcaaacacagatttcaggtttattccattcagtgggggtcctcggaaatgtgttggagatcaatttgctctcctagaagcaatagtggcacttgcagttgtgttgcagaagatggatatgcagcttgtgccagatcaaaagattaacatgactactggagctacaattcatacaaccagtggactatatatgaatgtaagcctgcgtaaagttcagcaagaagctgagttagcgctgagcgaat

SEQ ID NO: 49900 - DNA, 195 bp, Zea mays
ctctacttcacgccgctaggaagttcatggatgagcgggacccaagatccgcggtgagctcggcgatgtcaagggcgcctccgaggaggtgaagcagctggaggaccaggcggcggccatcatgaaggcggcgcgcgccgagatcgcggcggcgcctaacaagatgaagaaggagaccaccgcggacctggaggc

SEQ ID NO: 49901 - DNA, 275 bp, Zea mays
ggcccgcagtggtacacgacgcggcggcgcatggcgcgcgcggaaggataccaggtttgaggtgccgtgaggtcggccgcagccatcatcagatcgcgcgccgtgaggtcgtctgcggccatcaacgatctgggcttcctcagctcgtccgccaagttggaggcgcagaactctgcgaaggccgtaaggaggaggtcgtgcgcgtcgtccgcagggatcggagcgagaggagatgcgccgagtagtaagcggaggcgagcttctcttcgctaacg

SEQ ID NO: 49902 - DNA, 273 bp, Zea mays
ggctttatcatcttagctggacaagctctcaaggccacgtatggactgttcagtgatgatggagttctgaaactcccttactgcattgcgatatcaggattcgtctgtgctcttttcgccattggaatcccttatttatctgccctcaggatttggttggggttctccacgcttttcagcctcatgtatattgtgatagcagttgtgctgtcgtcgagagatgggataaccgcacctgcaagggattacagcatccccaaatcatcgcagtca

SEQ ID NO: 49903 - DNA, 215 bp, Zea mays
gcctcatagacaaccagaaacatggtgcggttgatgtggggttaagttcttccttgccagcggcaaatggccgtcgtgaaaagaaaaatagcaagaatgctattattgggaccgaagtggtcactgcatctcttgggttccttacaaattttgaggatgtctacaggttgtgggcatttgctgcaaaatttcttgattcatcatttcttgagcaa

SEQ ID NO: 49904 - DNA, 271 bp, Zea mays
ggcccctcagagttttccgttggcgtgagcatcttcggcgggcgtggccatgccgggacatggggaaaggcacttggtgcagaggtctatgactgcaacaacatggtggagcaggagctgcctggaggcgggctcatcgtgtaccagagcttctgtgctgctgaagacgctgttgctacctcgcccaaatctgttttccactgctttgacggcgagaacgtggagagtgctcctcctcctatgaagaaggactacaagctggctaatcttc

SEQ ID NO: 49905 - DNA, 262 bp, Zea mays
ataggattggtgatctaggatgcaagtcgttgtaaaagaataagaactatggaaagccatcgcatgcgtgtaggtgctcttgcatggagttctttgctttcttctagaagccgtgataggagcatcctccaccatgatatccgtgctcaagaagattatgttagcaagcttaccgggcacaaatctgaggactatggcgcatcacagtgtatgtctgcaattgctggctcctatggctatattgctccaggaatgcatatac

SEQ ID NO: 49906 - DNA, 225 bp, Zea mays
tttgagattctaaacaccctccatccgagtccagctgtttgtggcttgcccactgaagaggcacgccaattcatacgggattgtggtatgcccaaatttgattattctgttcgaacatagcctttctgaaattagacacatactaactaggtttttggatattctgacagaaatttttgaccgtggaatgtatgccggtcctgttggctggtttggaggagctga

SEQ ID NO: 49907 - DNA, 272 bp, Zea mays
tggacctgatggcctcgggaacgtagatcttcctgatcccactatcaagaaagtggaggaaagtgctaccgacttcttggttgataaggtctcgcgatttcctggagaggtctctgtgctcgccttgggtcctctgacaaacatagcattggccatcaagaaggatccctcattcgtgaaaaacgttaagaagatcgttgtgctgggtgaaacgttctttgcggctggaaatgccactccttccgctgaagcaaatatccacagtgatccgg

SEQ ID NO: 49908 - DNA, 271 bp, Zea mays
ggagcacgaggcagacaagaaggaggacgacctcgaagccatgaacgcagaggaggactcactgaggaacgggggagaggaggaggacgaagatgaggacctggaagaggaggaagaagaggaagaggaggatgacgatcaaaagcccaagagacgcggccccaaaaagaagaagatgactaaggctcgcctggagcgttttaaattgagacgctgatagctaacgcccgggagcggaaccgcatgcacggactgaacgcggcgctagaca

SEQ ID NO: 49909 - DNA, 236 bp, Zea mays
cacctcacggctgaccttcccgacggcctccagctaccatcttgattctcgaggacgagcccggtgcgtaagagtctgccatggccagcgagaataaggtctttgggttcgaggaagtcgccaagcacaacgtcaccaaggactgctggatcatcatcgccggcaaggtgtatgacgtcactccgtttatggatgagcatcctggtggagacgaggttttgctagctgtaaccggg

SEQ ID NO: 49910 - DNA, 271 bp, Zea mays
cacacctcagactctcaagctcatacaagctcacaagcaatacatcccacagtggagtagggtattacgctccggcggcccgaactactctaaatccttgtgtgttcttgcgttcttcccgttcattccaacgatcaagcaaaacgcctaagcccctcctcatctcaggatttagggcgggtgcactccgccacccggccggagatttactctccgacagtatacaacacaaacggtggccgacatcgaagataaaagtcatgcaagttta

SEQ ID NO: 49911 - DNA, 206 bp, Zea mays
ctgaagagaggatcacaatcagatggactttcaaaaaattcaacgaaggcaacacgagagagatactggacccgttgctggaagatcacgtggacgatgaggtgcttgaaaagctccttagcctggctttccaatgcgctgccccgacacgggacgaccggccgaccatgaaggaatttggggagcagctgtgggagataaggaaa

SEQ ID NO: 49912 - DNA, 264 bp, Zea mays
gttcaattgtttcatgatacacatgtgttggttattggaggggaacggtggtgttctgtgttaggtttcacgacatatctctgtggagcagattggcatatgtgaaattgataagacggtggtagatgtaagatctcgcttcctgtatgtgcataatactgtgcagtgaccactgatattatgttttattgacttttagatgtttgagagcattgctttctgttagatttctctgaacaccaataatttggtctatgtgtcttt

SEQ ID NO: 49913 - DNA, 269 bp, Zea mays
cggctcgagagcaagcaagcagcgagtacatacatactaggcagccaggcagccatggcgaccaccgtgatgatggcctcgtcggccaccgccgtcgctccgttccaggggctcaagtccaccgccagcctccccatcgcccgccgctcctccagaagcctcggcaacgtcagcaacggcggaaggatccggtgcatgcaggtgtggccggcctacggcaacaagaagttcgagacgctgtcgtacctgccgccgctgtcgacggacga

SEQ ID NO: 49914 - DNA, 265 bp, Zea mays
gggttcgcttgattccttgagaagggtgaaagaaactgtgaaggaggttggtgctgggctagagtgtggtattggggtagatgacttcgatgaatgggaggaaggtgacatcatagaggcattcaataccgtgaataaggcaagaaccctcgaggaggcctctgctaccgtgactgccgcactcaaggatgcaggggtccagctgtagaattggcaacacgctgatactcttttttattaatggctgaagctgttgtgagctgga

SEQ ID NO: 49915 - DNA, 270 bp, Zea mays
atcatagcaaagctcggttgcggatcagttgcaggtttgctaggtcagacaataacataccccctagatgttgttaggcgacaaatgcaggttcaagccctttcgtcatccagccttgtgggtagaggaacatttgaaagcctggttatgatagcgaaacagcaaggctggcgacaacttttctcaggattatctatcaactatttaaaggtggtgccatcagtagccataggatttactgtttacgactcaatgaaggtctggctaaaa

SEQ ID NO: 49916 - DNA, 198 bp, Zea mays
gaaggtgctagaggtgtacgaggcacgcctgaccaagtgcaagtaccttgctggagacttcctcagcctcgccgacctgaaccatgtgtctgtacatctctgcctgttcgctacgcactacgcatctgtgctcgacgcctacccgcatgtgaaggcctggtggtctggtctgatggagaggccgtctgtccagaaggt

SEQ ID NO: 49917 - DNA, 270 bp, Zea mays
cgtacctgctgccgcatctgcactcggggtgggcggtggaccaggccatcctcgccgaggaggagcgcctcgtcatcatccgcttcggccatgactgggtaccctcctgcatgcagatggatgaagtgctagcagcagtagctgagaccataaagaactttgcggtcatctaccttgttgacatcacagaggtccctgatttcaacaccatgtatgagctgtacgacccttcgacagtgatgatcttcttccggaacaagcacatcatga

SEQ ID NO: 49918 - DNA, 261 bp, Zea mays
ggcggtttctccgagacgcgccagggcgaggttcgcttcccggagatccccaccaatatcctcgagaagatctgccagtacttctattggtcgcctcattattccagtggcaaggaaacagcagagtttctgatcgaacccgagatcaccctggagctgatgatggccgcaaactacctggacacttgatgaggagcctgatggatctaaccctaggaaccgtttggttgtgaaatttgaaaaggtaatgtaaacgttatc

SEQ ID NO: 49919 - DNA, 183 bp, Zea mays
gagaatacatactggcagagcaaccctagaaatgggaaaaatttggcaaagccatgaatcggtcctcgcacctcaccacagataagataactcattggagagaaatcttacaagtatgaatactgtgccaaagcctaagaacttcctcaattcttaatagatataagattattcctactggag

SEQ ID NO: 49920 - DNA, 183 bp, Zea mays
gcatgagtttggatgtggccagtcactgtctgcacctccacagttctgtggtccgaggcagtgagagtcacaagatgatcgacttgtccgggaatccggtgcttcggatctactacacctcgaggcctgctctgttcaccttgtgtgctgggaatgagctcttctactgcctcctttacctgt

SEQ ID NO: 49921 - DNA, 182 bp, Zea mays
caacgaggtcgatgctgatggcaacggcaccatcgatttcccagagtttctcaaccttatggctcgcaagatgaaggacaccgactctgaggaagagctcaaggaggccttccgtgtgtttgacaaggaccagaacggcttcatctcggccgccgagctccgccatgtcatgacaaatcttg

SEQ ID NO: 49922 - DNA, 258 bp, Zea mays
gcggccgtgggaggcgcgtcgttcgacgtcgtcctcgacaacaacggcaaggacctcgacgccgtcaagccggtggcggactgggccaagacggccggcgtggggcagttcctgttcatcagcagcgcgggcatctataagccgacggaggagccgccgcacgtggagggggacgccgtgaaggagagcgccggccacgtgggcgtggagaagtacatcgcggagagttcggcagctgctgggcgtcgttccggccgc

SEQ ID NO: 49923 - DNA, 262 bp, Zea mays
aattgaagcatagttgtgcagaacccttccttgctcaacaaattgatcaaattttaccttagatcttcgaaatagagcttcatagaaatccttctcagcctcagataaaacacagtattttacttcaatgtttgcagggggtaaattaaggattggcctgccctccttgtctgtgcaatttttagtccttcctcgcattattggcttcaaaatggactgcagtagctttaagcccctttcatcaccttcttcatatggtttc

SEQ ID NO: 49924 - DNA, 259 bp, Zea mays
gcccgggccgacaacgaggccgccgcagctgaggcggcggaaggggagggtgccgtggccaccaagcccaaggccgagaagccgccgccgatcgggcccaagaggggcgccaaggtgaagatccttaggagggagtcctactggtacaacgggatcggcaacgtcgtcaccgtcgatcaggatcccaacacccgctacccggtggttgtgcggttcaacaaggtgaactacgccggcgtgtccaccaacaactacgcct

SEQ ID NO: 49925 - DNA, 266 bp, Zea mays
cactgtagcagaagctgcggaagattggatacttgatgatatcaaaggtctccttggccgttgcaacttcagggatgacatgctggatagaaaagttcagtttttaagtggtggagagaaggcaaggcttgcattttgcaagttcatggtgactccatctactctactcatcttggatgaaccgacaaaccatcttgatatcccatcaaaagaaatgcttgaggaggcaatatcagaatatacaggcaccgtcataacagtttctc

SEQ ID NO: 49926 - DNA, 106 bp, Zea mays
ggacattcaataatttatgtttgcaagcacgttgctcaaactcaccaaaacatcgagggatgccttttgactttggcatttacagcattttcgtttggcattaatc

SEQ ID NO: 49927 - DNA, 261 bp, Zea mays
aggaactcctgcaataacttcatctatggaggctgccggggcaataagaacagctaccgctctgaggaggcctgcatgctccgctgcttccgccagcaggagaatcctcccctgccccttggctcaaaggtggtggttctggcggggctgttcgtgatggtgttgatcctcttcctgggagcctccatggtctacctgatccgggtggcacggaggaaccaggagcgtgccctgcgcaccgtctggagctccggagatgac

SEQ ID NO: 49928 - DNA, 262 bp, Zea mays
  unsure (1)..(262): unsure at all n locations
cttgcctctgataagcgcagattacggcgcatctgaaggatgggctggtgctaatataaaccccacacttccacctgaacaggtgacatacgctgttctccctcagaccggttattttgagttcattcctttggaggtggagaatagtgcctcctccattcactacttagaatcagaaccagttggcctgactgaagttaaggttggtcaanactacgaagtcgtgataactaccttcggaggtctataccgctaccggcta

SEQ ID NO: 49929 - DNA, 253 bp, Zea mays
agctgctttgccattgggaacccttatggatatgaacacactctaactactggggttattagtggattggggagggaaataccatctcccaatgggagagcgatccgtggggctatacagacagatactgctataaatgctggtaactcaggaggcccacttattgactcttatggccatgtaattggtgtcaatactgctacattcacacgtaaaggatctgggatctcgtccggggtgaacttcgccatcc

SEQ ID NO: 49930 - DNA, 286 bp, Zea mays
cagctccaagtggtgaagatccacgtccccggacctctgtacatgacagaggaagaggcacatggcgttgtttcatcgggacattctgtgccgaggccagcgggcacgagattggccgcctcgtacgtcaacttctacatcgccaatggtgggatcatagcgccttccttcggcgacaggtgggacgaggagcgctatgcggttctccagaaggcattccccgatcacgaggtggtgatggtcgaaggcggacgggagatcgcgctgggaggtgggaacattcact

SEQ ID NO: 49931 - DNA, 285 bp, Zea mays
ctcgcctgcggccaagaaatacaatatgttcgtcgcgcagattgcttgcgcggcctttggcgtattagccctctcgttgtttgggcctggctggttagcgagaggcgccgctctttcagcctgcatagcattcatgatcatcacgggtacctcgcatcctccagctgcgagcttgcccctcttgtttatcgatggccccaagtttcacagtttgcagctttggtacgcgcttttccctggagctgcaggctgcatcgtcctttgcttgattcaagaggtggtggt

SEQ ID NO: 49932 - DNA, 161 bp, Zea mays
gtcatctctagcaaatccgatgtgtacagctttgggatgctactattggagatgacgggcgggcgaagaaacgcagatcctcatgcaggaagctccagtcaagcatactacccatccttggtgtacaagcagctgagccagggtgatgcgaacaggatcag

SEQ ID NO: 49933 - DNA, 141 bp, Zea mays
tcagagttggtgctaacttgaaggactcagaaattacaacactaatggaagcggcagatattgataacagtggttccatcgactatggagagttcctagctgcaactttacatctgaacaaagtcgatcgagaagacaacc

SEQ ID NO: 49934 - DNA, 276 bp, Zea mays
agcgaccgcgacgctgaggctgctccccgcgctcctcaagagcctagctccagccggcgcgcgcggcctctccaccgagaaggctgttggtgcatccgacgtcgtcggcagccacactgctaagtggatgcaggacacgagcaagaagtcgccaatggaactgatcaacgaggtacctccgatcaaggttgatggtcgcattgctgtctgtgaaggggcttctgaaggtgttcgacttggccacccaatcgagtacatctgccttgatctggaggc

SEQ ID NO: 49935 - DNA, 279 bp, Zea mays
caaataacagagaaggctgatgtatactctttcggggttgtgttagtggaacttgtcactggtcggaaggctgttgacattaatcgaccaaagggtcagcagttactaactgaatgggcacgcccattcttggaggagtatgcaattgacgagctcatagacccacgactcggagagcgctactctgaaaatgaggtgtactgcatgctgcacgcggcaaacttgtgcataagacgcgacccacattcaaggcctcgcatgtcccatgttcttcgcatt

SEQ ID NO: 49936 - DNA, 213 bp, Zea mays
cctccctcgacgagctgaagacaatagtggggcacgtcatcgtgatgatcctgctggtgaagatgttcgagaggagcaagatggtgacaatcgccacggggctggacctcctcagctactcgatctgcatcttcttgtcgtcggcctctctctacatcctgcataacctccacaagggcgacgacaatgaggagttaggagagtgcaatataa

SEQ ID NO: 49937 - DNA, 156 bp, Zea mays
ctgagcttcaaggccttaacaaacaagaaaccgccgatcgatttggtaaagaacaagttcatgaatggcgtcgcagttatgatattcctcccccaaatggtgagagccttgagatgtgtgcagagagagcagttgcttatttcaaagaccaaatta

SEQ ID NO: 49938 - DNA, 220 bp, Zea mays
tcaagggaggaaaaggattgctcgccgcgaagacgacggcggccaagtcggcggagaaggacaaggtggaagaaggcccccatctcacggtcctcccgcgcgggcctccagttccctgttggacgaatccaccgtcagctgaagcaaaggactcaggcaaatggccgcgttggtgccactgcagccgtctactccgccgccatcctggagtacttaactg

SEQ ID NO: 49939 - DNA, 258 bp, Zea mays
gccattagcacctgcagttccttccagacctgcacccccaatgacagagaagcaagcctctcctgcccccactccagttactgaggctccagctttctcccctaatcctcagagcctcggctttcaagatccagaagttgatgcacatgccatatatgtgcgaagtctgccattaaatgccacaccacaacaattagaggaagagttcaagagatttggaaccattaaacatgaaggcatccaagttagaagcaacaa

SEQ ID NO: 49940 - DNA, 259 bp, Zea mays
gcaccaacggcttcgacgacaagatgaagctggtgcatggcgggtacggcgtggtgtaccgcgccaccgtgcccggggacaacggccgcagcatggaggtggccgtcaagcagttctccggcgccaacaccaaggggcaggaggacttcctcgccgagctcggcatcatcaagcgcctccgccaccggaatctcgtcaagctcatcggctggtgccaccaggacggcgtgctgctgctggtgtacgactacatgccaca

SEQ ID NO: 49941 - DNA, 174 bp, Zea mays
cgtgaagctgtggtgctgctgcagctgccgggactgcaagctgctggtgtatgagtacatggcgaacggcagcctgggggacgtgctgcacagcagcaaggcggggttgctggactgggcgacgcggtacaaggttgcgctggatgcggcggaggggctgtcctacctccacca

SEQ ID NO: 49942 - DNA, 154 bp, Zea mays
ctggaattggcacgtccattgccatagctggtgttgctatgtaatcttacattaaggctaagattgaagaggagaaaaggaaaaagagcgcatgactgctgtgaataatattatcgggaccttcctcggacacaacatcgtcgacaatcacgac

SEQ ID NO: 49943 - DNA, 194 bp, Zea mays
gccgggaagctggggaccagtatcgccggcggcgagctctcttaccccgacctggtcatcaggaccagcggcgagctgcggctgagcaacttcctgctgtggcagtccgcattcgcggagctcttcttctctgacgtcatgtggccggattttggggaggacgagtacctcggggccttgcgttcctaccagac

SEQ ID NO: 49944 - DNA, 161 bp, Zea mays
accgggaagctggggaccagtatcgccggcggcaggctctcttaccccgacctggtcatcaggaccagctgcgagctgcggctgagcaacttcctgctgtggcagtccgcattcgcggagctcttcttctctgacgtcatgtggccggattttggggagga

SEQ ID NO: 49945 - DNA, 271 bp, Zea mays
gagacgcgttcctaaacttaacaggcctccggatcaaaggaaagcgctgttgcgtgggcttaccacacagctgctgaagcatgggaggataaagactacaaagccaagggcaaaggcaatgaggaagtatgtcgagaagatgatcacgttggcaaaggatggatctcttcacaagaggagacaggctctggcatttatttatgagaagcatatcgtccatgccttgtttgctgaggttgcagacaggtatggagaccgagaaggtggctac

SEQ ID NO: 49946 - DNA, 95 bp, Zea mays
ctttgctccagtcaacgttacaacggaagtacaatctgtcgaaatgcaccatgaagctttgagtgaagctcttcctggggacaatgtgggcttca

SEQ ID NO: 49947 - DNA, 267 bp, Zea mays
atcagagccaaaaatccgttcagggaacacaggctgtgccggatccatatagcttacttggactgttgagtttaataagaatgaaagagcctggaccaacaactcttgctttagggattgatttgacctcgttggggttgaatttgaactcccaagataatctttacaagacatttggctctccgtggtcaagcgagccagctgtaggagaacctgattatcagatcccagcttgtttctctgcagagccaccaccagcactgcaac

SEQ ID NO: 49948 - DNA, 154 bp, Zea mays
cgggcccttcgacaggcaacagagtatgacctgcgccgtcaaggcactgtccccagctccaaaggtgtcttgtcgagatcatagcatcgcagtttggacgaacgcatatcttccactgcagcgcacatcaatgagaggaaaactgcagagtaga

SEQ ID NO: 49949 - DNA, 263 bp, Zea mays
tgcgcctctacatttcttctctctctgcacctccgcctccgcctgatccatccaagacagggatcgccatgtcggactcggaggagcaccacttcgaatcgaaggccgcggctggggggtcaaggccttgccggaacaggctggaacgtccgttagaaagggtcatcggcatcaagaaacggcctgcaaggtttttggaggttctaactccaagactggtaagcatggccacgccaaatgccactttgtcgccatagacatat

SEQ ID NO: 49950 - DNA, 236 bp, Zea mays
ctctctgctgcgcccccctatcgtgcgtgattctatccaggattctagggttcgttcgcctcgtctcgcgatggacaagggcagcgtcgtcgtgcccccggcccctgccgccgccgccgcgaagaaggccaagcgcttcgagatcaagaagtggaacgccgtctctctctgggcctgggacatcgtggtggacaactgcgccatctgccgcaaccacatcatggacctttgcatcg

SEQ ID NO: 49951 - DNA, 165 bp, Zea mays
tgcgcctctacatttcttctctctctgctcctccgcctccgcctgatccatccaagacagggatcgccatgtcggactcggaggagcaccacttcgaatcgaaggccgacgctggggcgtccaagacctacccgcagcaagctggcaccgtccgtaagaacggct

SEQ ID NO: 49952 - DNA, 243 bp, Zea mays
ctgaaactgaaatggcattggtggtgaagcggtaccgatgtacgcactccgtgagctgtgcttgcctcaagggccatgtcagggaggatgcaatgtatctcgtgtttaaacacatgaactggaacccgaagatgattgctatcttatcaagtgtatgtaagtggttcgatgaatttgccaagagggtgctctggaagggaattctgccatgccaggcaccaaagatgatgaaggatttgcact

SEQ ID NO: 49953 - DNA, 257 bp, Zea mays
ggcacgcgatggaagagcttgtttccatggggctggtgcgcagcattggaatcagcaactacgacatcttcctcaccagagactgcctggcctacgccaagataaagccggcggtgaaccagatcgagacgcacccctacttccagcgcgactcacttgtcaagttctgccagaagcacgggatctgcgtgaccgcgcacaccccgctgggtggctccaccgccaacgccgagtggttcgggacggtctcgtgcctg

SEQ ID NO: 49954 - DNA, 256 bp, Zea mays
gcctgtttcttggtccgcaaatggttggagaagcagtaaaaggaggtttgctcattgcggaagtcatgtcagccaagggatacaaagttgaaccacttccgagggttcctcgtcatgatattgtgcaggcagtggagcttggcagcagggaaagactcatagcattctgtgaagtagtgcaacaaacttgtccagtaggatctttcatcaaaccaactgctggggaaacgcctggctatgcttcagaggtcatttt

SEQ ID NO: 49955 - DNA, 254 bp, Zea mays
ctgaagcacagagtctttgaggtttgtctagctgatcttcagggtgacgaggatcaggcttacaggaaaatcaggctccgtgctgaagatgtgcaaggcaggaatgtgctcacaaacttctggggcatgaattttaccaccgataagctcagatctctagtaaagaagtggcagacattgattgaagcccatgttgatgtcaagacaaccgacaactacatgctgcgtttgttctgcattggttttaccaagag

SEQ ID NO: 49956 - DNA, 240 bp, Zea mays
gaccggaagcacatcgcccacccacccgctgcgtcccgctcaccaagtcaccactcaccagccttgctgcgcgcgtcctcccacccgccgcccgtagccatgtcggtgacgctgcacacgaacctgggcgacacaagtgcgaggtgttctgcgaccaggtgccccgcacggcgaagaacttcctggccctctgcgcaacggctactacgacggcaccgtgttccaccgaaacatcaaggg

SEQ ID NO: 49957 - DNA, 124 bp, Zea mays
gcaagatgaagcccaacatcatctttgtactttccctgctcctcatcttggagaagcaagcagctgtgatgggacaaaaaggtggatcagaaggccgattaccaagtgaattttcccaatttcc

SEQ ID NO: 49958 - DNA, 263 bp, Zea mays
  unsure (1)..(263): unsure at all n locations
caccgacggagggacggcagcgttggaccgcgactcgctcctgtcattattcacggatttgtttgctgcaggaagtgatacgagctccagcacagtggaatgggcactgacggagttgcttagaaacccagtcccaatggctaaaacgtgcgatgagctcctggcagccactggcgcggcaagaaacattgaagaatctgaaatcgagcagctgccctacctccaagccgtggtanaagaaacttttcggctgcatcctcccg

SEQ ID NO: 49959 - DNA, 266 bp, Zea mays
gtaagaccatgcttgccaaagctgttgcaacagaggctggtgctaattttatcaacatatcaatgtcaagcattgcttcgaagtggtttggagagggagaaaaatatgtgaaagctgttttttcacttgcaagcaaaatttctcctagtgttattttcgtggatgaggttgatggcatgcttggtagacgtgagaatccaggggaacatgaggccatgcgcaagatgaaaaatgagtttatggtgaactgggatggtcttaggaca

SEQ ID NO: 49960 - DNA, 264 bp, Zea mays
cttgattgtcagtacacgaaaggagtcccttcaacacttcaagaaaccatgggctcatgagcataaaccactcagcaacctcttagatgctgttaatgctatcaaaccaacagtgttgattggcacatccgggaaggggcaaactttcacaaaagacgttgttgaagcaatctcctcatttaacgagagaccaatcattcttgccctatcgaacccaacatcacaatctgaatgcacagctgagcaagcttacacatggagcaa

SEQ ID NO: 49961 - DNA, 262 bp, Zea mays
cgactcggtcgcttcaccactccactcgccgcagcgcgccgggcgccgccgaggggatcggagcaagatgttcttccacatcgtgctggagcggaacatgcagctgcacccacgacacttcgggccgcacctccgcgacaactcgtttccaagctcatcaaggacgtcgagggcacctgcagcgggcggcacgggttcgttgtggcgatcacgggtgtggaggacatcggcaaggggctcatccgggaaggcacgggatacg

SEQ ID NO: 49962 - DNA, 260 bp, Zea mays
catctcctcgcatttcttcccatcccccttcgcaacccaaaccccaactcgccccgcatcgatggtgcccaatgtcgagatgatgcccgctgtcaagaagccggcggaggaggagcccgcggccgagaaggcgccgccgggaagaagccgaacggtagacgcgggtccccgcaggcaagtccgctgccaacgagggcggcgagggcaagaggggcaagaagaagggcaagaagagcgtggagacctacaagatcaacatc

SEQ ID NO: 49963 - DNA, 179 bp, Zea mays
ggagtcgcgggtgcgcgcaggccgtgagtgtgcgcttttgagagtcgcggcgccccgagcccggccgccgcccgccggcatgagctacgaccgcgccatcaccgtcttctcgcccgacggccacctcttccaagtggagtacgcgcaggaggccgtcacgaagggctcgaccgcggttg

SEQ ID NO: 49964 - DNA, 226 bp, Zea mays
tgggcgtctccaagtccacctccaagtgcgccaccgtcggcatccagggcatcgcctggtccttcggcggcatgatcttcgccctcgtctactgcaccgccggcatctccggcgggcacatcaacccggcggtgaccttcgggctgttcctggcgaggaagttgtccctcaccagggcggtgttttacatcatcatgcagtgcctgggcgcaatttgcggcgcggg

SEQ ID NO: 49965 - DNA, 261 bp, Zea mays
tagtcaatagacttgggagcaaatgtgcatggctacttcgcttggtctctgctggataactttgaatggtacgccggctacaccgaacgttatggcattgtctacgtcgaccgcaaaaataactacacgcgctacatgaaggagtcagccaagtggttaaaagagttcaatactgcgaagaagcctagcaagaagattattacgccagcttaaaaacatgggacctcgtgatgtgggtacggtgccacccatgaaataaat

SEQ ID NO: 49966 - DNA, 249 bp, Zea mays
gagagatgggataaccgcacctgcaagggattacagcatccccaaatcatcgcagtcaactcgagtcttcactacgataggttccatagcagaccttgtgtttgcttacaacaccggcatgctgccagatcttcaggcaaccatcaggcctcctgtggtgaagaacatggagaaagctctatggttccagttcaccattggctccttgcctctctatgctgtagtttttgtgggttactgggcttatgg

SEQ ID NO: 49967 - DNA, 178 bp, Zea mays
caaattcttgatgttgtcacattaagcacccatgagacggggagaaacgtagtggactcctaatttttatggccaggtatgacgaattggctagcaagagcaatgttgaatacattgctggaggagccactcaaactctatcagggttgcccaatggatgcttcaaattcctggtgca

SEQ ID NO: 49968 - DNA, 183 bp, Zea mays
ctgatgctcttgagagaatcattgctggccctgagaagaaaaatgctgttgtttccgaggagaagaagaggctcgtcgcttaccatgaggctggccatgcccttgtcggcgccctcatgccagagtatgatccagtagccaagatttccatcatccctcgtggccaggctggtggactcacat

SEQ ID NO: 49969 - DNA, 259 bp, Zea mays
cgaacttagcaagagggcacatgaagccgaagaacaggcgagcgagaaggtagcagaagcactggcacaggtagtgtcggcaaaggaatcagaagcaatgagcctggagagcctaaaggaagcgtccgatgaaatggacgagaagaaggaagctcttgagatcgccttggagagagccgggagggcgaacgaagggaagcttggcgcggacaggagcttaggaaatggagagccgaccacgagcagcgccgcagagctc

SEQ ID NO: 49970 - DNA, 137 bp, Zea mays
gccctgaatgttgacctgacagaattccagaccaacctggtgccctacccccgcatccacttccctctggccacatatgcacctgtcatctctgctgagaaagcctaccatgaacagctttctgtagcagagatcac

SEQ ID NO: 49971 - DNA, 264 bp, Zea mays
gggacagtatgcactccgcaaactgtaccatgagagtccacgactcatttgtgttctatacacttctcccacatgtggtccttgacagaaccttaaaaccaattttgagcaaggccatggccgatacggccaattttgttcatcttgttgaaattgacatcgaggaggatcctgaaatagcagaagctgcaggcatcatgggaacaccttgtgttcaattttttaagaacaaagaaatgctcaggactgtatcgggtgtgaaaa

SEQ ID NO: 49972 - DNA, 254 bp, Zea mays
gccacgggaccttcaggatgaacgcgctggcgtacttcacgctcctgtcggggttctacatggcgtggaacatcggggcgaacgatgtcgcgaacgccatggggacgtcggttgggtccggagctctgacgctccggcaggcggtgctgaccgccgcggtgctcgagttctccggcgcattcctcatggggacccatgtcaccagcaccatgcagaagggaatcctggttgcgtctgcgttccaagggaaggac

SEQ ID NO: 49973 - DNA, 246 bp, Zea mays
cgagaacctcgctgaccacatcgctgacccagtcaacaacaacgcatgggcctacgccaccaacttcgtccccggcaactaagctcaacggctatgctatgcgacttcattgtctttcggatcggagagggtgtacgtacgtggattgattgatgctgcgagatgcatgtgtgtcttttgtttcacgttgcattgcataggcaagtcgaattaatgatttgggcgttgtacactaagatgaaccat

SEQ ID NO: 49974 - DNA, 268 bp, Zea mays
ccaatgctggccactggtgggacaatggttgctgctattgacttgttaatcgagtgcggagttactagcaagcagattaaagttatatctgctattgcatcacctcctgccctgcaaaagctcaataacaagttccctgggctccacgtgtacacaggaatgattgatccagaagtaaatgagaaagggtattgttctaaacttatcagctcattgcaaaactcatggagaacatattagtaattattattgctgcataaatacccca

SEQ ID NO: 49975 - DNA, 245 bp, Zea mays
cggatctgcatctcatcgctgcaaggtgtttttggagggttctggtggcaaaagttactcaaaggaagcgaggctaatagggtgtgatccagcatatgatcttgcggttctgaagatagatgctgacagggaccagctgaggcctgctctgattggcacagcacggagtttgcgagttgggcaaagctgctttgccattgggaacccttatggatatgaacacactctaactactggggttatta

SEQ ID NO: 49976 - DNA, 107 bp, Zea mays
cgttgccatgcttggctttgccgcatcactacttggagaggccattaccgggaagggcatccttgcgcagctgaacctggagactggcatccccatctacgaggcgg

SEQ ID NO: 49977 - DNA, 260 bp, Zea mays
gcggataagggaccccaacttcaaggtgacgccccagacgccgctgtcgaaggagttcgccgacgagaacaagcccgccggactggtcaagctgaacccggcgagcgagtacccgcccggcctggaagacacgctcatcctcaccatgaagggcatcgcgaccggcatgcagaacactggctaggcggcttctcttcactcacctgcagagtgcaccgcaataatcagcttccggatggtggcgttttgtcagttttgga

SEQ ID NO: 49978 - DNA, 248 bp, Zea mays
ggaagatcgtattcttgctctccaggagagaaagcgggagatggttgcttctgcgtttggagaagacaaatctggttcccgacagactcgattgaccgttgaagacctgaattatctgtttatggtgtagaatcgctcctgagagtgagcagttttgctcattggattggtgttagacgtgtgagataaaatgttctctgaagaagtaccaaaggctttcattgggggatatgtagtcctggaagctt

SEQ ID NO: 49979 - DNA, 261 bp, Zea mays
gtggagcaggagctgcctggaggcgggctcctcgtgtaccatagcttctgtgctgctgaagacgctgttgctacctcgcccaaatctgttttccactgctttgacggcgagaacgttggagagtgctcctcttcgagtgaaaagggcgtaaaagtggataaagcttctgtgttgggaggtagaagcggatgccatggaggagaaggcgggattcctgatgagtaaaaggggcttctgggtgcgatttgctactgagttgtt

SEQ ID NO: 49980 - DNA, 265 bp, Zea mays
tagatcgcgagcggcattggctatcgtgactcatgtactcaaagttggtgtaaaatttgtggcgaagatatttcggggtaaagatacgagtctcctgtactgccagctaaaactgttcttctcgcaagttacgcttgcgaagcaaaaagtagccggaactcaagcatcgaggcgtttgcggtctgtgagaactactcacctcctgaagggttcaaggaggaagacctataccacctgctagagaaagtgggtactccctcaggag

SEQ ID NO: 49981 - DNA, 256 bp, Zea mays
caaaggtttctgggacatgtacgacccagatggctactctttgtggttctgtgactacaagtacaatgatgagaacaccgtctcctttgtgaccctgcacaaggttggtggattcctgcagcggatggacctgtgccgcaagtacgcctttgggaagatgctcgtgataggctctgagccgacgcgcaagctgaagggcctttggcgcttccgtggccaggatgttcccaagtttgtaatggacgaggtctatgac

SEQ ID NO: 49982 - DNA, 149 bp, Zea mays
ggctcttgcactaggattgtcaactttaatgcctcccacatcaccaccgacccctactgggtggctgccagggccacttggtacggtgcgccaaccggcgctggcccctatgacaacggtggtgcttgtgggttcaagaatgtgaccct

SEQ ID NO: 49983 - DNA, 262 bp, Zea mays
ggaacgagcagttctgggtgatcgggggcatctccgcgcacctcttcaccgtgatccagggcctgctcaaggtgctggccggcatcgacaccaacttcaccgtcacctccaaggcctcggacgaggacggcgacttcgcggagctgtacatgttcaagtggacgacgctactgatcccgcacaccatcatcctgatcacaacctagtcggcgtcgtcgccggcatctcctaagctatcaacagcggataccagtcgtggggc

SEQ ID NO: 49984 - DNA, 273 bp, Zea mays
gccgacgcccgttgccttctcaccacaaatcctccaatttcttgtcttctccgcgaaatgttcctctgtctgtcgtgtatttgttctggtcgtttcccgattcggtagttggcttggggatttcactgcaagtctagggattttctgtagggaagttgatcgagaagtcttggtagacatggagcagatccagtactccggaagtactacgacgacacctatgaatacaggcacgtcgtcctcccgcccgaggtcgccaagctcttcccaagg

SEQ ID NO: 49985 - DNA, 167 bp, Zea mays
cgatggtgtctcctgtcactcattctgtgggcaactgtgttaaacgtgttgtggtcattgtaacatcagtgctgttcttcaggacacctgtttctcctatcaactctctcggtactgcgattgcacttgccggagttttcctgtactcacagctcaagcgacttaag

SEQ ID NO: 49986 - DNA, 118 bp, Zea mays
ctcaagcacaagcacaagacggtgaagctctccgtgctgcagttctataaggtggacgacgccacaggcaaggtgacccgcctccgcaaggtgtgccccaacacagagtgcggcgcgg

SEQ ID NO: 49987 - DNA, 130 bp, Zea mays
cgcgctcttcctgccggagaccaagaacgtgcccatcgaggagatggtgctcgtgtggaaggcgcactggtactggggccgcttcatccgcgacgaggacgtgcacgtcggcgccgacctcgagatgccc

SEQ ID NO: 49988 - DNA, 144 bp, Zea mays
ggccaaagctctcaaaaccatgaaaaggcaaagaaggtgctccttatagtaaagccacattatggatttggtgagaagggtagaccaacagttggagaggaaggtgttgtgatgagcatcatcttgttctacatcatcactaat

SEQ ID NO: 49989 - DNA, 234 bp, Zea mays
ggctctgcagaactcggtgctgaagacatggcaagggcgccctgagaacgtggaggcagcgcagaaggccctgctggtgcgcgcaaaggccaactcgctggcccagctcggtcgctacactggtgcgggcgagagcgatcatgccaagaaaggcatgttccagaagggctacacctactaatgtgccagcgagagtttccatgacataataataattgtagcgttttggtgtta

SEQ ID NO: 49990 - DNA, 266 bp, Zea mays
gtactgctgtggccagccctgccttccagcagggcaatcagatgttcctagatcgagcactgtgaagatatattgtccgaaatgcgaagaacttaactatccaagatccaagtaccaaggcaacatcgatggatcatactttgggacgacattccctcatcttttcctgatgacttactcgcacttgaagccgcaaagccgtcacagcaatacactccaagggttttcggcttcaaacttccaaagccgtcatgacagagttgtag

SEQ ID NO: 49991 - DNA, 272 bp, Zea mays
caacattctgccttagcaataaggtccagtggccgttatctcttgtaatttcaaggaaggctttgacaaaataccaattgatctttcgcctattgttccactgcaagcatgttagtcgccagctgtgtgcagcatggcaaatacaacaagcattccggtctgtcaagattctagggacaccaattctgcggtcatcaattctttgtcgtagcatgctcaagtttgtaaatagccttttgcattatctaacatttgaggttcttgaaccaaat

SEQ ID NO: 49992 - DNA, 228 bp, Zea mays
gacgagagggggaagaaggtggccatcgaggggctcaaggccaagaccaagtacgtcaggtgccagataggcaggaggatgaagcttcgcctcacgccggagataaggttcatcgaggatgagtctatggagcgtggaagcaggatccttgctatacttgacaaactaaaggaggaaagggagcaacaagaaggaaaagatggagaggcagatgatgattcatatata

SEQ ID NO: 49993 - DNA, 272 bp, Zea mays
cagaaaaatgggcagatgcacatgatggtaacttgccttcaactaggcaagagaaaaaggaatttaaggatctaattcgagcccatatgcttaatgtagatgaagaaaattacaaagaagctgtggactcttcatataaagtatcagtcactccaggaatcaataatgagattcgtcagataattgatgatgactctgcggaagtcaattcctcatcgtcagatttttggactttagtggctgctttaaaggagtttattgcaaaggagggc

SEQ ID NO: 49994 - DNA, 278 bp, Zea mays
acaataagaggtgatcagcagcactttgttcgcagagatgagctacaggctgcttggaagatcttcactcctttgctgcatgacattgacgacggcaagctgaaggccctcccgtatgaacctggcagccggggacccaaggaagccgacgaattgagcgcgagagttggatacgtgcagacccacggttacatatgggtaccgccgacccttgcatagaagagaatacgaattgtttgtacctaggaagatccgagtgtcctacaataaagctgtgc

SEQ ID NO: 49995 - DNA, 277 bp, Zea mays
ctgtgtttccatgcataccaacaggtgtcttacatgattttggcgatggtgtctcctgtcactcattctgtgggcaactgtgttaaacgtgttgtggtcattgtaacatcagtgctgttcttcaggacacctgtttctcctatcaactctttcggtactgcgattgcacttgccggagttttcctgtactcacagctcaagcgacttaagcccaagccgctgacggcttaaatagggattgtattttccatctctttgtgttaatggagttaaacac

SEQ ID NO: 49996 - DNA, 275 bp, Zea mays
gccgaacccaccggtgtcagccgacgtcttgcatcagtggaaaggattctgtactctaatcgcgaacgcttactatgtcaaaggaatggcatggttgccagtgaaaaccttgcagctggaacagatggctgtcacaggaagttcagagaaaccatcagtagttgctagccgcatgcagttagttttcagcacattagaggtagtcagcccacagtggccaagagtgtgattagatgaaagcaataccatcaaacaaaggtctgcagttttattct

SEQ ID NO: 49997 - DNA, 277 bp, Zea mays
agcgctgctgacgaagaagatcgtgaagaagcgggtcaagcagttcaagaggccccacctcgaccgctacaagtgccttaagccaagctggcgcaggccaaagggtattgactcccgtgtcaggaggaagttcaagggatgcaccttgatgcccaacattggttatggttctgacaagtcgaccaggccctacctccccaacaagttcaagaagtttgtggtccacaacgtttctgagctagagttgctcatgatgcacaacagacctatgcgctga

SEQ ID NO: 49998 - DNA, 283 bp, Zea mays
cttgatcagctggacagtgtactagcaaatgaaccagtctctgtcaagagtggccagttcattgttgaagtcaaaccacagggaataagcaaaggcatagttgctgagcggatacttgcatcagtgaaggagagaggaaagcaggctgatttcttattgtgcatcggcgatgataggtctgatgaggacatgtttgaaaatattgctgatatcactgggcggactttggttgctccaagaacagcactgtttgcgtgcactgtgggacaaaaaccaagcaaag

SEQ ID NO: 49999 - DNA, 275 bp, Zea mays
cggctcgagtttttttttttggtgaaaaaggaaattttcactttagagatacaattccttggacctgtctcgaatgcacataatgtgaatccattacaactcaacaaacgtgcttattattttactacaccccacgcaattcttactgccacacgtctaagactcatgcattcttggataggaggcggcggcggcacagtaactagctagctagacggccctaggaacaaggtagagcggctcgttcctgcgaagctcagcccgaacgtctcgtc

SEQ ID NO: 50000 - DNA, 240 bp, Zea mays
tccagagggacgtccctgctgctgtgcctgctgttgtcttcctctctggtggacagagcgaggaggaggccacccgcaacctcaatgccatgaacaagctcagcaccaagaagccgtggtccctgtctttctccttcggccgtgccctccaggcgcgcaccctcaaggcctgggctggcaaggtggagaacctggagaaggctagagctgccttcctcgccaggtgcaaggccaactctg

SEQ ID NO: 50001 - DNA, 277 bp, Zea mays
cctccgtccggccggcatcggcagtgcaggatggctctgaggatgtgggcgcgctcagccgccaatgcgctcaagctctcggcgggcggcgccagagcccgggctgctgccttctctatctccaggttcttctccactgttcacgatgggttgaagtacactcagtctcacgaatgggtcaagacgacgggcgacgtcgccaccgttggcatcacggaccatgctcagggccacctgggagaggtggtgttcgtggagctgccggaacccggcacga

SEQ ID NO: 50002 - DNA, 110 bp, Zea mays
gatgaagcccaacatcatctttgtactttccctgctcctcatcttggagaagcaagcagctgtgatgggacaaaaaggtggatcaaaaggccgattaccaagttgaattt

SEQ ID NO: 50003 - DNA, 265 bp, Zea mays
atggagggtaagaaatcgtcaccttcgggaattatttgcctctgccccaggtgtggtatcagctgaagttatcttccataccaccactccgagacgatctgctggctacgcgtttgtttctttttcttcgaaagagagcgcaggggccgccatatctgctttcaacggaaagatattgatgggacggcccattaacgtgatgttcaaagatgaaaatggtgaaaagaatgaaccttcttctgtcccaaagaaggccgaggtggaa

SEQ ID NO: 50004 - DNA, 270 bp, Zea mays
cagaaacttttggctgtggttggagatgatcgagatgctcttcttgtggattcacgaaatggaaaggtaacctctaccctagttggccatctggactactcatttgctacggcatggcacccggacagccggacattcgcgaccgggaaccaggacaaaacctgccgcatctgggacacccgaaacttgtcgacttcacttgcagtactgcggggcaacatcggcgcgatccggtgcatccgctactcctccgataggcggttcctggtg

SEQ ID NO: 50005 - DNA, 269 bp, Zea mays
gaagctttccacagacaaaccgaacctgtgattgattattactccaagaagggcttagtggtgaacctgcctgcagagaaaccaccgaaggaagtgactgctgaggtgcagaaagccctctcgtgatgaaatgtccactcttgaggttaaacatgacatctaccaaaacccctttgtttgggtttcttcaaaatttgcactaggccaacatcatgaggttttttattttcagtatccttattgtgcggatgcaccattttttgttatca

SEQ ID NO: 50006 - DNA, 279 bp, Zea mays
ccgccaccgaccccaagcgcaacgctcgcgactcccacgttccggtgctggcgccgcttccgatcgggttcgctgtgttcatggtgcacctggcgacgatcccgatcactggcaccggtatcaacccggcgaggagcctcggcgccgccgtcgtgtacaacaacagcaaagcctggagcgaccagtggatcttctgggtgggcccgttcatcggagcggcgatcgcagcgctataccaccagatcgtcctccgcgccacgccagggggtacggctcctt

SEQ ID NO: 50007 - DNA, 274 bp, Zea mays
ccagaacctgctcgaccacctcgccgaccccgtcaacaacaacgtgctcaccagcctcaagttccactagaacgtggtgcatcagcatacctgctgctgccgccgccgccgccagttgtttgctgtggaaagctagatgcatgcgtgttgtaaaggaacctgaagcgttgcatcggtcatgattcatgcatggccagcctgctgcctgtaacaacaaactagtattgatcttattgagaccggaaactgtattgcacatggtaaatcaatgtac

SEQ ID NO: 50008 - DNA, 281 bp, Zea mays
agtgcgcgtcaactgcgtgtccccctatgccgtgcccacggcgctgtcgatgccgcacctgccccagggcgcgcgcgcagatgacgcgctcaaggacttcctggcctttgtcggcggcgaggccaacctcaagggcgtcgacgccatgctcaaggacgtcgcccaggcggtgctctacctggccagcgacgaggcgaggtacgtcagcgcggtcaacctcatggtggtcggaggcttcacagccgtaaacaataacctcagggcgtttgaggattagttga

SEQ ID NO: 50009 - DNA, 273 bp, Zea mays
atccgagttcgtctcaaaggcatcgcctttcttcctggcagcagagagagagatggcatcctcctcgaccacgaatacatcagatggtggtgcaaagtcatcgtcttgcccgagaggacaatggcgacccggcgaggacgagaagctgaagcagctcgtcgagaagtacgggccgcagaactggaactccattgcagaaaagctggaggggagatcaggcaaaagctgccggctccggtggttcaaccagcttgaccctcggatcaacaagcg

SEQ ID NO: 50010 - DNA, 279 bp, Zea mays
aggaagagcagtgcttgaaggtgcttcagtccaagttcgacagccaaagccgctccttctcacccgatcaggaaatcgcagaagctctgaaggagtgccccatcgggcaggaaatgaacctgaagcaggttcagaagctgtgcatgcccttcatcaagctgaagaaggacgaggcaagggaggttggaactcaggcgctggacttgaagcttccgttcggtgagatggatgttctccgggagaacttggagctgatcaagaggcagctgggccttgagc

SEQ ID NO: 50011 - DNA, 278 bp, Zea mays
acctgttcgctacgccctacgcatctgtgctcgacgcctacccgcatgtgaaggcctggtggtctggtctgatggagaggccgtctgtccagaaggtcgctgccctgatgaagccatctgcttgaaacggttgccctgtcaatcggtgaatggaataagccaagtctgttctgggttgtttgcttgttcagtgatgtgtctttctatgacgaaagttgagtgcctatgtgtgagcatgcttgcttgtaacgagaccttgaattgttcagaaatgagca

SEQ ID NO: 50012 - DNA, 278 bp, Zea mays
agaattggcacgtccattgccatagctggtgttgctatgtactcttacattaaggctaagattgaagaggagaaaaggaaaaagagcgcatgactgctgtgaataatattatcgggaccttcctcggacacaacatcgtcgacaatcacgacctacttctataccttgttttgttttcatcttgagtcagtcggtccattgtttgttcccagtctggtgattaaaagtctgcaaattctgtttgtggaattggcagcgatacaaatttggcttcttta

SEQ ID NO: 50013 - DNA, 260 bp, Zea mays
aaaagagccattgcactcctggttgtttaactcatatgtatccttttgcagggatttgccattggttcagctgctcttgtgtctctggcgctttttggtgccttcgtcagcagagctggagtgaaggttgtcgatgtcctctcccccaaggttttcattggtttgattgttggagccatgcttccctattggttctctgccatgaccatgaagagtgttggaagtgccgcactaaagatggtggatgaggtccgcagaca

SEQ ID NO: 50014 - DNA, 279 bp, Zea mays
attcccaagatcgttgtcttcctcaacaagaaggacatggtcgacgacgaggagctgctcgagctcgtcgagctggaagtccgcgagctgctcagcaactatgagtacgacggcgacgaggtgccaatcgtcgctggctccgccctcaaggcgctcgaggccctcatgggcaaccctaccctgaagcgcggcgacgatgactgggtggactgcatcttcaagctagtagattctgtggattcctacattccagtgccacagcggcagaccgacctcccg

SEQ ID NO: 50015 - DNA, 278 bp, Zea mays
agatggagatgctgctggggatgcccctcccggtgactcccggcttggagaagggcttgagcagctcgtacggcacgatcccggcgccgcagcggttcttgaggtccaggttgttgttgcactcgtcgatgaacccctcgatctccttcatcgtgccgccgaacttctcgaacgccgccttcaccatgggctccgccagccacgacggctccgcgaactcccccatgtactcctcgtcgggcgagtgcgacgagaggatgtccagcgtcgtcatgacc

SEQ ID NO: 50016 - DNA, 284 bp, Zea mays
agagtcgcggctgcggccgtcgacgcacgaggaggtggtgcgctaccatcaaggactccttcctcgcgctccacacgcgcacccacgccaaggctctggaagaggtcgagaaaaatatgtcatccttgagattgttgatctttggtgatggagaagtcgaaccagatgaagagcaggtcctgcaaataacccttgagatttgcaaggaggacgtcatttccctgatcgtccaggatctgccttccttgggctggggagtaagaaaagatctggctatctgctgg

SEQ ID NO: 50017 - DNA, 278 bp, Zea mays
agaacgtgtttcagtgatcgaacgcacaaatttaagatatctatctcaactgccagaaccagttgacttggtgacactagacctatcatttatctccattctcttggtcatgcctgctgttatcaaagtaatgaaaacggattctacattgataacacttatcaaccctcaatttgaagcacgtagatcacaggtaggaggtggtgggattgttcgagatcctttggttcatcaagaggtactggatagaataatttcaggcgtggaagaattttgat

SEQ ID NO: 50018 - DNA, 278 bp, Zea mays
ctcagcgccgtcgtctggttcctctacggcctcctcatcaaggacaaatacgtcgcgcttccaaacatcctggggttcaccttcggcgtggtccagatggtgctctacgtgttgtacatgaacaagacgccggtggcggcgactgccgagggcaaggatgccggcaagctttcctcagctgcagacgagcacgtcctcgtcaacatcgccaagctcagcccagccctcccggagaggagctccggggtgcacccagtcacccagatggcgggcgttcc

SEQ ID NO: 50019 - DNA, 280 bp, Zea mays
caaaaagaaacaaaagcctacggcgatcgatcgagaagctggtcatcgtcaggatgtcatcgccgcagtcagcagcgccgcccgtgaagctgatcacggcgttcggcagcccgttcgcccaccgcgtggaggtggcgctcgctctcaagggggtgccgtacgagctggtcgtggaggacctagccaacaagagcgagctgctgctcacgcacaacccagtccaccagtcggtccctgtcctcctccacggtgaccgcgctgtctgcgagtccctcgtcat

SEQ ID NO: 50020 - DNA, 276 bp, Zea mays
aacagcaggtcgagcatcttcgacgccaaggccgggatcgctctgaacgaccacttcgtcaagctcgtctcgtggtacgacaacgagtggggctacagcaaccgcgtcgtcgacctgatccgccacatgttcaagacccagtagaggggttttttccccctgcttctcatggatggttgctgcttgtgtatgccgagaataaatgtggatggcgcgtgcctctgggtcgccaggttcatgctgagtctggacatgtgttgcacttttgcttccctt

SEQ ID NO: 50021 - DNA, 274 bp, Zea mays
ccaatttcctcaaagttcttcaactggcaagaggttgaaaagtataaaagctttggtggcgttcgcattgaaagtgatgtgtatgtgacggctcaaggatgccggaacctcacaaactgcccgagagagacctgggagatcgaggctgtaatggctggcgcaccatggcctctgccggcttcaagttctatggtggtagcagcagagaatagcaatgacatatctatagcgtcgtaattttctctatgctcaatccatatcccgagttgaaaca

SEQ ID NO: 50022 - DNA, 269 bp, Zea mays
aatttcttgtcttctccgcgaaatgttcctctgtctgtcgtgtatttgttctggtcgtttcccgattcggtagttggcttggggatttcactgcaagtctagggattttctgtagggaagttgatcgagaagtcttggtagacatggagcagatccagtactccgagaagtactttgacgacacatatgaatacaggcacgtcgtcctcccgcccgaagtcgccaagctcctccccaggaacatccttctctccgagaagcagtggcgg

SEQ ID NO: 50023 - DNA, 272 bp, Zea mays
actcccgtttacgtgcacacctccaaaccctcatcacgatccggctccaaggtctcgagatgaagtcgagggcgaggtccggcggtggcgactccaggctctcggtgaggaagaccaaagttgagaaggacccaaacaagcccaagaggcctccgaccgcgttcttcgtcttcatggaggagttcaggaaggactacaaggagaagcaccccaatgtgaaacaagtctcagtgattggcaaggctggtggtgacatgtggaagtccttgtct

SEQ ID NO: 50024 - DNA, 274 bp, Zea mays
aacagtgactccccagcatctcctcctcaataggaatgctttatttcagggtggcttgcagccacacaattattgcttgccagtactgaaaagagagactcatagacaagctattgtgtctgctgtaacaaatgggagtagacggtacttccttggtactgacagcgctccccatgataaacggaacaaagagtgttcctgtggatgtgctgggatatatagcgctcctgttgccttgtctctttatgtgaaggtatttgaagaggctggtgcc

SEQ ID NO: 50025 - DNA, 277 bp, Zea mays
atcaaagctccctctgggtcctgcttactaccccaaggatatagctagcgaacaccctgagagattttttgttggtgaaatagtgagggaaaagatttttgttcagtacaggcaggaaattccttattcatgccaggttaatgttgtcagttacaaaagtcggcctgctgccaaggacttcattcaagttgagatacttgtggagaaagaatcacaaagaggcattatactagggaaggatggcaatagcataaagatgctggcaaccgcatcgagg

SEQ ID NO: 50026 - DNA, 132 bp, Zea mays
agcaagatgaagcccaacatcatctttgtactttccctgctcctcatcttggagaagcaagcagctgtgatgggacaaaaaggtggatcaaaaggccgattaccaagtgaattttcccaatttccacacaac

SEQ ID NO: 50027 - DNA, 179 bp, Zea mays
atttgaaaacaaatacagaatattctggctacagcatagcctctccagtcgtccagtggttctgggaaatcgttcaggggttcgcaaggaagacaaagctcggttcctccagttcgtcactggcacttcaaaggtaccgttggaaggttttagtgaacttcaagggatctctgggccac

SEQ ID NO: 50028 - DNA, 177 bp, Zea mays
acggaccatccctcagcgaaccagcaccggggattagcgcgtcccgtcggaagagaatatgcggtacttcaatgtcatgatcctggcccgcgcagtcaccctatgaaggtggagttttcaagcttgaactattcttgcctgaggaatatccaatggctgccccaaaagttagatttc

SEQ ID NO: 50029 - DNA, 177 bp, Zea mays
gctgctgcgcccaagcccaagccgaagttcgaggatggtatcttcggcagtccggcgggatcggtttcaccaaggagaacagctgttcgtcggccgcgttgccatgcttggctaacgcgccatcgctacttggagaggccattaccgggaagggcatccttgcgcagctgaacctcg

SEQ ID NO: 50030 - DNA, 180 bp, Zea mays
ttttaaaaacatagtacaagattaattcaaaaaccattcgaattcaacagtgcttgacaggacccataacaacatgatatattaaacccaaactacgcgtcgccaaaagagatacaggtgttctgttccaagaaactactaccattgcaacaaaacaaaacaaagcaaaaaggattatca

SEQ ID NO: 50031 - DNA, 181 bp, Zea mays
taagtgccagaaattgatccagaagcaatcaagttcaaggaaatccttgaggcccagaaagaggattccttggagaacgatagcctgttggtccaatgccacttccacgcgtagaagggcatattagttatggtggtgcacttaggcctggagaaggtgacgcaattgcacagtatgttca

SEQ ID NO: 50032 - DNA, 180 bp, Zea mays
tgactgaactataatcaagatatccataggcagaggattattaattggatagataacactggaggactttgtgccgccatttgtttcacgacaaagggcattcttcaggaagctgtcaaaggagagttgtggcgtttgcgagattcagaaggaaaaccacctggtgtgatgggatggtgg

SEQ ID NO: 50033 - DNA, 177 bp, Zea mays
caccggtgacagcaggtcgagcatcttcgacgccaaggccgggattgccctgaacgaccacttcatcaagctcgtctctggtacgacaacgagtggggctacagcaaccgcgtcgtcgacctgatccgccacatgttcaagacccagtagagagagatatttctgcctccctatcgt

SEQ ID NO: 50034 - DNA, 176 bp, Zea mays
ccatcatcctctttgtcctttccgagctccttatcttggagaagcaagcagctgtgatgggacaaaaaggtggatcaaaggccaattgccaagcggatacttcccaatttccacatggacaacaccctcagcacttctttggacaaaaagaccaataacatactaaatccaaaggc

SEQ ID NO: 50035 - DNA, 175 bp, Zea mays
cgaatcccaccggtgtcagtgacgtcttgcatcagtggaaaggattctgtgctctaatcgcgaacgcttactatgtcaaggaatggcatggttgccagtgaaaaccttgcagctggaacgatggctgtacaaggaagttcagagaaaccatcagtagttgctagccgcatgcagt

SEQ ID NO: 50036 - DNA, 179 bp, Zea mays
agtccgagaagatcgggtactggaggtacatcaccatcttcaggcacctcaaggcgaacccggagtaccaggtgtacccctcttcaagtacttcgagaactggtgccaggacgagaacaggcacggcgacttcttctctgccctgctcaaggctcagccgcagttcctcaatgactgga

SEQ ID NO: 50037 - DNA, 178 bp, Zea mays
cggccgccgccgccgtcttcgcgcaccgtaccctagccctcgtcagcggcggcttcgagctcatccagccatgacgttcagcggaggaatggcggacgaacaagcacgggcgcggccacgtcaagtacatccgctgctccaactgcgccaagtgctgccccaaggataaggctatcaa

SEQ ID NO: 50038 - DNA, 174 bp, Zea mays
gcagaagttgcggttggcctcgtcctcctcttctccgtcgcggctcagatctctgcgtgcggcgatggcgtcgttcctggaggctccccccgggaacccgaaagccggcgagaagatctttaagaccaagtgcgcgcatgccacacggtcgacaagggcgccggccacaagcaa

SEQ ID NO: 50039 - DNA, 172 bp, Zea mays
ctgctcctttcttggaaaagctggttcagaaagatattgaggtcctttacgtcattgagccaattgatgaggttccattcagaatttacagacatacaaagagaagaagttcgttgatattagcaaagaggatttggaattgggtgatgaagatgaggacaaggtgaaagaa

SEQ ID NO: 50040 - DNA, 170 bp, Zea mays
ttcgttcgttcagttcatccgtgttcttgttcgcgaggtcgagagagaggatgtcgtgctgcggaggcaactgtgggtgcggctccggctgcaagtgcggcaacggctgctgagggtgcacaagatgtacccggacatggctgagcaggtgaccaccaccaccacccagg

SEQ ID NO: 50041 - DNA, 276 bp, Zea mays
ctctcccacaatctgagtttggtgatcctggtaccccagaacctgaaacatcgtcttgaagacatggaacaggctctcagcccttctgttttcaaggccatcatggagaaactggagatgtccaagttccagcccactctcctaacactaccccgcatcaaagtgacgaccagccaggatatgctctcaatcatggagaaattggaattcttcgatttttcttatgaccttaacctgtgtgggctgacagaggacccagatcttcaggtttctgcg

SEQ ID NO: 50042 - DNA, 266 bp, Zea mays
cagcgattcgtctcctctgctcttatctccgctgtgcctgtgcctgacttttcctcctcttcgtcccctcccacccgcaaccgcacagagaaaggggaggaggctctctacccagcgcacccgagcacccctccccccggatcgggacccctgctctgcgcaatccacccatggcggaggaatcaggccgccccttgccaaagtttggcgattgggatgttaatgatccagcttccgcagacggattcactgtcatattcaacaaa

SEQ ID NO: 50043 - DNA, 273 bp, Zea mays
gtgcggcatccatcccattagcattggatgaggctgttcgcagtggcaaggtgaagactggtgatattattgccgcatcaggttttggcgctggacttacctggggttcagctattgtcaaatggggctaattattctacgtgagccataacaacatcaatgagatcttcataggccttggggacctacatctatttggtctctccccccttccacccattttctgtgcaacatttttctatcgcatgtgtcggtcttccttgcacatgaaaa

SEQ ID NO: 50044 - DNA, 271 bp, Zea mays
ggcatggcagggtgcgagtcgcaaatgagctcggcgcagggagcggcaaaggtgcgcgcttcgccatcgtggtgtccatcacgacgtccgtggtgatcggcctcgtcttctggtgcctcatcctctacttcgacgacaagatcgcgcttctcttcacgtccagcgcggtcgtgctcgacgccgttcaccacctgtccgtgctgctcgcattcaccatcctgctcaacagtgtgcagcccgtcctctcaggcaagccgctgaacgacccgtc

SEQ ID NO: 50045 - DNA, 274 bp, Zea mays
cgaccggtcggtggccgcggactcgtggtcgatcaagagcgactacggcagcaccctcgacgacgatcagcgttactccgacaccgccgaggtcctcctagcctcctcctccgcctcctctgatgccgcgccctccacgacggttgccgtccacccctcctccgacttcagcttcgacaaggatgtccatgactccagctacgttgagcctcctcttgctgggcttgcagaattttcaggatggtgcttacgctgaggatcttgcaaatttcca

SEQ ID NO: 50046 - DNA, 273 bp, Zea mays
caactccccacgcaaagccgccgccgttccctctcgtcttccccagttcccctacgccggtaatcccacgtcctatcagccgccgatccagccttgcttccatccatccatccatccatctcgtcgcttctctctgttccgcgtgcgatcgagtagatcaaaaggaggaggaggatggcgaggagttcgttcaagttggagcaccccttcgaaaggaggcaagctgaggctaaccgcatcagggagaaataccctgacagaatccctgtcatt

SEQ ID NO: 50047 - DNA, 270 bp, Zea mays
tcacggtgctgttcgcgtacctgatcgtgcggcacggctgacgatggtgacggtgaacgccgtggcgctgctgacggtgggcgccgtcgtgctgggcctgcatgtctcctctgaccgccccgcgggcgtcaccaggagtcagtactggctgggcttcacgctcaccctgggcgccgcggtgctgtacgggctgttcctgccgctggtcgagctcacctacttgtgcgccgcggggggcggacgcccgtgacgtacgcgctagtggtggag

SEQ ID NO: 50048 - DNA, 273 bp, Zea mays
ctaccagcgactcagcgagcgagagcagcacacactgcacgcagctagctaggagcagcagcagcggcggcgatggcggcctccatgatctcctcgtcagctctggcggtggcgcctcagggcctgccgcccctcggccgccgcgcctcctccttcgccgtcgtctgctccaagaagaagatcaagaccgacaagccctacgggattgggggtggcctgaccgtcgacgtcgacgccaacgggagaaagggcaagggcaagggcgtgtaccag

SEQ ID NO: 50049 - DNA, 270 bp, Zea mays
tgggtgtaccgcacgggggtgttcctgctggtgtgcgtgctgttccgcctcacctgcaaactccagatcctgcgcttcgagggcatctaccgcatgttcgacgtcgaggcgcgccccaccgccgctgagatcttcgcggagcaccgccgcatccgcacgcagctgctcgccaccagcctttggtacagggtgttcatcctctgctgcctcgtcaccatcaccatcagccagctcggcgcgctcatcgtggtcctctcgtcaagggacgcc

SEQ ID NO: 50050 - DNA, 271 bp, Zea mays
gcatatccaaaagcttagggctcaaaaagtgtctcattcgctctctgatcttgctgactccagttcagatctgcaagcattctcgcagggtctttctacgctattagataagatggatccctctcagagagcgaagtttgttcaggaagtcaagaaggtccttgattgatgataccaacacatccaactcaatgtgtgcatgtcacatctttttgttatatcaaatacatagaaggatattgcttggtcttgattgatcatgtctgattta

SEQ ID NO: 50051 - DNA, 271 bp, Zea mays
gtcactacaaaggcagttcagtagtggacatggtcagaaagttgatgatactggatctggaactggaacaagagtatctcattttcttcccacatctaggcgaatagttcaattctcaaatagcaagggtccaggtccagattctcggatagtttacatagatggtgcttttgatctgttccatgctggacatgtcgagatcttacgacttgctcgagaacttggagattttttgcttgtggggattcacacagatcagatcataagtgca

SEQ ID NO: 50052 - DNA, 217 bp, Zea mays
gtccggcgggatcggtttcaccaaggagaacgagctgttcgtcggccgcgttgccatgcttggctttgccgcatcgctacttggagaggccattaccgggaagggcatccttgcccagctgaacctcgagacgggcatccccatctacgaggcggagctctcctcctgttcttcatcctcttcaccctccttggcgccatcggcgctctcggggacc

SEQ ID NO: 50053 - DNA, 265 bp, Zea mays
gtggtggactcctccgtcgccggcctcggtggctgcccgtacgcgaagggtgcgtcggggaatgtggcgacggaagatgtggtgtacatgctcaacgggctgggcgtcaagacgggcgtcgacctgggcaaggtgatggccgccggcgagttcatctgcaggcacctgggacgccagtctgggttcaaggcagcgaccgctctgagcaaagttaccgcgaacgcctccaagctctgacaatataccatgatcccctactgcagat

SEQ ID NO: 50054 - DNA, 268 bp, Zea mays
gtcgctacgtgagcctgagggaagagagggtggaggaagtgggggaggatgagcgaggagaggccggtgccgcggcgggagagcccgtggggtctgcctgagggcgacacgcgccagcccaaggctcaccgctgtaacgaccgcgccgaggacgtcgtccaggcttgctttgaagggaacccattcaagacagttccaggcccatttaagctcttctggcaatgcatgcgctcaaaacctggggaggaaccaaccgagccctatacct

SEQ ID NO: 50055 - DNA, 269 bp, Zea mays
cgagattggagcctttagaacatacccaaaagattacaagccaccagatgagcctgtatctgagtatcagactattccactcaacaagatagatgattttggtgtccattgcaaatcgtactatgctttggatataacttatttcaagtcatccctggattctcacctccttgatctgctctggaacaaatactgggtcaacacgctatcttcatcatcatctctgggcaacagagattatgttgcactgcagatctttgatttagctg

SEQ ID NO: 50056 - DNA, 267 bp, Zea mays
caagaagctgctcaagatgaagaaggtgaagccgtacatcccggatttcaaactggcgttcgagcacttctgcatccacgccggcggccgtgccgtgctggacgagctggagagcaacctggcgctcacggattggcacctgcagccgtcgcggatgacgctgcaccggttcgggaacacgtccagcagctcgctctggtacgagctggcctacagcgaggccaaggggaggatccggcgccgccaccgggtgtggcagatcgcgtt

SEQ ID NO: 50057 - DNA, 267 bp, Zea mays
aagaggagctgtgggagctcctgaagaaggacaacacctacgtctacatgtgtgggttgaaaggcatggagaagggtatcgatgacattatggtgtcactggctgaaaaagacggaatcgactggttcgactacaagaagcagctgaagaggggagatcaatggaatgtggaggtctactaattgctgaattttgcagctgacattttgtgttgtgcctatctgtaagtgaggccagggtgtactgcgtatataatgtagatagtga

SEQ ID NO: 50058 - DNA, 267 bp, Zea mays
gaatcaggcagggagctctcccattcgcatcccaggccaacctcaaccccaatccaatccgttgcaggtcgcaagatggctccgcgtgatgaccaccagccccaggaggaggaggaggaggacaccgaaggcgtcgtcaagctcatcagcgccgagggcttcgaattcgtcgtcgacaagaaggccgccatggtctccaacaccctacgcaacatgctcacatcgccaggcggtttctccgagacgcgccagggcgaggttcgcttc

SEQ ID NO: 50059 - DNA, 259 bp, Zea mays
ctgaccagcaccatggcggttaggcaagaacaagcgccttacgaaaggcggcaaaaagggagccaagaagaaagtggttgatccattttctaagaaagattggtatgatgtgaaagcacctgctatgttcaatataagaaatattggaaagacgctcgtcaccaggacccaaggaaccagaattgcatctgatggtctcaagggtcgtgtgtttgaagtgagtcttgctgatttgcagaatgatgaagttgcatttaga

SEQ ID NO: 50060 - DNA, 266 bp, Zea mays
tgatgatatgctttggagatctcctggcactcctgtttttactgccccggagtgctgtcaaggttcagcctaccatggtagagcatctgatacatgggcagttggtgtcactttatattgtatggtctctgggcactatccatttctgggggatacattgcaggaaacttatgataagattgccaatgatcctgtggaaatacctggcgatgtgaatccccaacttgccgatttgctcctaaggcttctctgcaaagatccaggag

SEQ ID NO: 50061 - DNA, 153 bp, Zea mays
ccgtagtccctctcctctggaggtattcgcagtcgaccgtgtcctcggagcacgatgaaggttgttgctgcctacctgcttgctgtcctcgctgggaatgccagcccctccgctgaggatttgactggcattctggagtcagttggctgtgaa

SEQ ID NO: 50062 - DNA, 263 bp, Zea mays
gaagaagttcctgaggaggattacatgctgccgttatccgaggcagaagtgattagggaaggaagtgatataacgcttgttggatggggagctcagcttgcggtgctgaaagaagcctgtggagatgctgcaaaggatggggtgtcttgcgagctcatcgatctgaaaacactcgtatcatgggacaaggaaacggtagaggcctcggtgaagaagaccgggaagctcgtcgttagccacgaggctccagtcaccgggggctt

SEQ ID NO: 50063 - DNA, 183 bp, Zea mays
cgcaggcgcaccaacgcctgctccaattcccaaagcttctggaaaacacctactcgtctctcatcccttccccgccgtcgcgtcctcttcgaactgaatcgcgccgcgatcacccaccttatggcggacaaggagcctgtcgtggagcgatccgaggcgtctgaggaggaggacgcctccgcc

SEQ ID NO: 50064 - DNA, 266 bp, Zea mays
ctcagcggcaggaacattggttccctcaagatgctcacacccaggacgctgaacctgtacgacatactcgacgcacgcaagctcttctttactcctgctgctgtagactacctcaactccaggtacggagccagtgtttccgatgactactatactgatgacgaggatgatggcgaggaggaactggtcgagcaagaagcagaagaaggcaccactgcagatgctgctccagatgcaactgaagagggcgaggcagacagcagctc

SEQ ID NO: 50065 - DNA, 260 bp, Zea mays
aaagaaacagcatcagataacgaaacggtcaggtagaaaccagacacaacggacttcacaaggtaatacatgagttcaacagggcacaatggtcctcaaaagtccattcatacttgtgacttgactggttatttaggtgataacgatttggggtccggcacattcaccagtttggccagcttttagccttgcttctagcccatggcatacttctgtgtccaggagcgtgcggtggactcatacttggccctgtcggtctt

SEQ ID NO: 50066 - DNA, 267 bp, Zea mays
gcagttttagtgggtacaagatctacccgggacacgggcggcgctacgccaggaccgatgggaaggttttccagtttcttaatgccaaatgtgagtccgcattcctttccaaaaggaaccctcggcaaattaactggactgtcctctacagaagagaacacaagaaaggacagtcggaagaaattcaaaagaaaagaacccgccgtgcagtcaagttccagcgggccatcacaggcgcttctctggctgatataatggccaagagga

SEQ ID NO: 50067 - DNA, 259 bp, Zea mays
tctgccccctcctcacacacaagctccacaaccgcagcatggagctgattcgagtcgtaagctggtgcagtgcagccttccaaatagctaactgtgcttctctcatcggccacaatcagagtcctctcaaactgaccggtctccttgtcgttgatcctgaagtaggtcgagatttccatggggcagactgtgtctttgggcacgaagcagaaggacccgtcgctgaacaccgctgagttgagagcggcatagtagttgt

SEQ ID NO: 50068 - DNA, 268 bp, Zea mays
gtaggaagaagaaaacccctgctgcaaagaaggataatgctgagggacaagaggttgaggcagcagctgaggaaacgagaaagagcaaccatgtcacgaggaagcttgagaagcgcaaggagggacgtacccttgacccacacattgaggagcaatttggcagtggacggttgctggcatgcatttcttcccgccctggacagtgtggccgtgctgatgggtacatccttgagggtaaagagcttgagttctacatgaagaagctaca

SEQ ID NO: 50069 - DNA, 265 bp, Zea mays
attggtattcttgagacagatgatgtgaaggacatgaagcctctcaatgaccgtgttctcatcaaggttgcagaagccgaagacaaaactcctgggggccttatcctcactgaaacaactaaagagaagccgtccataggaacggttgtagctgttggcccgggtcctctggacgaggaaggcaagataaagccactgtcagtgtcggcgggcagcacagtgctgtactccaagtatgcagggagtgagttcaagggcgcggatg

SEQ ID NO: 50070 - DNA, 252 bp, Zea mays
gaacggattaaaaagagcgaactgaattgcttgctgagaagaaatgcgttgcccatcttacaggagaggggaatgcattctgtgatcttccggaagataccatgctaccaggagaagtgtagtttagttacagaagcaacagcagcggaatgcatttgccaatacattagctgagacttgaaacatctgcttgccagatgcagcaactacttttatatatatatgtgtatattcaataattgtgccacacga

SEQ ID NO: 50071 - DNA, 250 bp, Zea mays
gctgcgaagagagccgctgctcgtacgtcggcagcttccacgagctccagaggcacacccagcaaaagcatccggactcgcgcccttccgcgatcgaccctgctcgccgggccgattgggagaacctgcagcggtcttccgacgtggtagatgtcctgagcacaatacacgcgcaggttccaaacggtgtggttcttggagactatgtcatcgagtacggggacggtgacgaagctggagacgacgacta

SEQ ID NO: 50072 - DNA, 257 bp, Zea mays
atacagaaggatacggtcacaatcttaccttcctcactataaagggagccggacatgctgtgcccgagtacaagcccaaggaggctctcgcgttctacagtcgctggctggcaggagagaagttctaagaagaccaggaccattacagatttcacaagccttcagttattcgtcgctcatcggacaattactgtgtgcatggactcagagtagatgtatgcagatcagatccgttcactcggctgtgtaacctctgt

SEQ ID NO: 50073 - DNA, 262 bp, Zea mays
gcaaagcataccccaaaatccccaaaccctagcgaactcggcacggcggcgatggcagcggcgggcctgcggaaggggaacgcgcgcctcccacccgaagtgaaccgggtgctgtacgtgcggaatctgccgttcaacatctcgagcgaggagatgtacgacatcttcggcaagtacggcgccattcggcagatccggctgggcaacgccaaggacacgcgcggcaccgcctacgtcgtctacgaggacatatacgacgcca

SEQ ID NO: 50074 - DNA, 252 bp, Zea mays
caggagtacatcatccgtcagaaggagctgcaggaccgggtggctagggcggccgggcgggagtccaaggaggagctcatgcgggtgcgcaaggagatcgtcgacttccacggcgagatggtgctgctcgagaactacagcgccctcaactacacaggattggttaagattctcaagaaatatgacaagagaactggagccctgatccggctgcctttcattcagaaagttcttcagcagcctttcttcacc

SEQ ID NO: 50075 - DNA, 250 bp, Zea mays
agcgaatggtcctttggatgtgtggctgcatcatattcccagaggagggcggagcttgattgggcaatgagaatgagagctgccacaactcttgctcagggaattgcgttcttgcacgacaaggtaaagccgcagtggtgcaccgtgacatccgtgcaagcaacgtcctactcgacgaggaattcgggtcgcatctgatgggggtggggctttcgaagttcgtgccgtgggaggtgatgcacgagagaac

SEQ ID NO: 50076 - DNA, 259 bp, Zea mays
atcatcgtgacgtacactctccccgtgatgctgaacgtcgtcgggctcgccggcgtctttggggtgtacgccgtcgtgtgcgtcctagccctcgcgttcgtgttcgtcaaggtgcccgagacgaagggcatgcctctcgaggtcatcaccgagttcttctccgttggggcaaagcaagccaaggaagaggaggaggaggaggccagggaaggttgatcacccggacggccggacccagttaccggcaccgcttgtgggg

SEQ ID NO: 50077 - DNA, 260 bp, Zea mays
cgcgcgacgcctttctgggcgacttcttcaacggcgcgctcgcgtcagagactcggttcctcatggacatagccatccgcggatccccccaggtgttcgcgggaatagcatcgctagtggacgccggcggtggcaccggcgcacatcccaagcggtggctgcagcattcccggacacccggtgcacggtgctggagcttccgcaggtggtagacgctgctccgattgatgggccggttcgctttgtcggaggtgacatga

SEQ ID NO: 50078 - DNA, 253 bp, Zea mays
gcccaaacaaccaacgcaaagaccatgggtcctgttcctctgcccactaagcggagagtctattgtgtgctcaactctcctcacgtgcacaaggattcacggttccattttgagatccggacgcatcagcggctgattgatatcatgtatccaactgcccaaacaattgattcattgatgcaactccagctccctgccggtgtggatgttgaggttaagctatgattctgttggagctaaacttttccaagtt

SEQ ID NO: 50079 - DNA, 140 bp, Zea mays
gcattcccgatttccgattcccaatccagcaaaccctaccagccttttgcaaactcagagagggacccgatggcacccaaggcggagaagaagccggcggcgaagaagcccgcagaggaggagcccgcggccccggcgga

SEQ ID NO: 50080 - DNA, 259 bp, Zea mays
ggaccaggtaagcagcagcaggaaccctagcaccgccgcatccgcagccatgggtatcgacctcgttgccggtgggaggaacaagaagaccaagcgcacagcgccgaagtccgacgatgtttatctcaagctccttgtcaagctctaccgtttcttggtcaggaggaccaagagcaacttcaatgctgtcattctcaagaggctcttcatgagcaaaaccaatcgcccaccaatctccatgcgccgccttgtcaagttc

SEQ ID NO: 50081 - DNA, 255 bp, Zea mays
cggacgcacgcgtgctcatcaaccgcgcgcgggtcgagtgccagagacaccgactcaccgtcgaggaccccgtcaccgtcgagtacatcacccgctacatcgctgggctgcagcagaagtatacacagagtggtggagtccgccctttcggcctctccacactcattgtcggcttcgacccctacaccgacaagccagcgctgtaccagaccgatccttctggtaccttctctgcttggaaggcgaacgccacgg

SEQ ID NO: 50082 - DNA, 251 bp, Zea mays
gttgccttgcggacaatgtggcttgcatcagaggactaccctttattgctcgggtcagctgatctaggagtgtcgttgcatacatcttcgtcagggctggacctaccaatgaaggtggttgatatgtttggatgcggattgcctgtttgtgctgcttcattctcctgcattgaggagcttgtaaaagtaaacaaaaatggtcttcttttctcaacatcttcggagcttgctgatgaacttatgatgctctt

SEQ ID NO: 50083 - DNA, 256 bp, Zea mays
caacaaggccatcgctgcctacaacaagggcgagagcactgcagctaagaaggctcctgccaaggaggaagaggaggaagatgaagaggagtctgacaagtccaagtcggaggtcaatgacgaggatgatgaagaggtagtgaggaggatgaagatgatgacgagtgatggagctcctcgagacaatggaccgtgcttcatccaacaatggagcggctacacaaggccccgtggcgatcacaaaaaaggagcctat

SEQ ID NO: 50084 - DNA, 247 bp, Zea mays
ccgatacaggaatctggccagaatcccctagtttcagtgaccacgggatgcctccggttcccaaaagatggagagggcaatgccaaggaggagacgccaactcaccgtcaaacttcacctgcaacaggaaggtaataggaggcagatattacctcagcggataccaaacagaagagggtggcgccatcaagttcgtatctccaagggacagctcggggcatggcagccacactgcctcgatagcggc

SEQ ID NO: 50085 - DNA, 244 bp, Zea mays
tgcaattggtggtgctcgttttgatgatggggttggtggtgacaatgaggtgcagcgtacaatgttggaaatagtaaaccaacttgatgggtttgatgcaagagggaacatcaaagttctcatggccactaataggcctgataccttggatcctgcacttctgcgccctggtcgcttggacagaaaggtggaattcgggctacctgacttggagggccgtacccaaattttcaagatccataca

SEQ ID NO: 50086 - DNA, 269 bp, Zea mays
cgtccgtgtccacgaggacatgcttctcgccgcctcgaaagcgctagctgatcaggccacacaggacaacttcgagaagggctccatcttcccacccttcaccagcatcagaaagatctctgcgcacatcgctgcagccgtggctgcaaaagcctacgagctcggtctggcgacccgtctgcctcccccctgcgacctggtgaaatatgcagagaactgcatgtacactcccgtctaccgcaactaccggtagtgcttcggggggatca

SEQ ID NO: 50087 - DNA, 281 bp, Zea mays
attggttaaccttagccaagaaaacaatgctgctcatctgcaggatcaaagtctatttgagacagggatgcagacaagatatcgcagtgttccatctgtttccactccaggtggtccttctgtccagatgcaggactcacaggagcatgaacttggatcagattgggaaaccacaaaggatgcaactatatcattagacatgagaacacctcttagccattttccacctttccgctttggggttgagttcgaggatgtgcacaggctgctgatggtcaggt

SEQ ID NO: 50088 - DNA, 281 bp, Zea mays
cgacgatgcgctcgccggacggcaagaagctggacatgctagcggaggaggacctcggcagcatgcactacctcaaggcgaccatcaaggagacgctgcgcctgcacccgccggcgccgttcctcctcccgcactactccaccgccgactccgagatcgacggctacttcgtcccagccgggacgcgcgtcctcgtcaacgtgtgcgctctggagggaccgcacgacgtgggagaagccggaggaggttcatgccggagcggttcgtcaggaaccgggcgc

SEQ ID NO: 50089 - DNA, 279 bp, Zea mays
cccccagtcgcccaccagatcacttgttaaactttgttgaggggtgatggcggtttctttcgcaaacctcaactccgaggcagggcttaaaatgcttgatgagtaccttctcattcgctgctacatcactggctaccaagcttccaaggatgacttggctgtctacacttcgttttcggctgctccctcgtccaagtatatcaacgtagcaaggtggtttaaccacattgatgcgctcgtgaggctgagcggaattactgcagaggccaaggtgtgaag

SEQ ID NO: 50090 - DNA, 278 bp, Zea mays
aggcaacttccccacatccgtcactgatccccagccaatgggcaaggtcggcatgtgcttccaccctgatcaagacaggatcatcacagtccgggaatgtgctcggtcacagggctttcctgacagctatgaatttgcgggcaacatccagaacaagcaccggcagattggcaatgccgtgcccccgcctcttgcctatgcacttgggaggaagctgaaggatgccgttgacaagcgtcaggaagccagcgcatgcgtgcctgcacatgagaagtttt

SEQ ID NO: 50091 - DNA, 275 bp, Zea mays
acctttcctctcttctcccgtccggccgtcccctcttccgcggcaaccccggcgcggcatggcgagcccgtcctcctcatctttcccgtcccggaaggccctgagcaagatcgcctgcaggcgcctgcagaaggagctaacggagtggcaggtcaacccgcccgccggcttcgagcacagggtcaccgacaacctccagaggtgggtcgtcgatgtagccggggcaccaggcacgctctacaccggcgagacctacaaactgcaggtgatttctc

SEQ ID NO: 50092 - DNA, 280 bp, Zea mays
cttggttggactgttctaccatctgtataaccagattgctacaaacaccttggagcgagtggctcctctgacacatgctgtcggcaatgtgttgaaacgtgtttttgtcatcggtttctcaatcattgtttttggcaacaaaattagcacacaaactggaattggcacgtccattgccatagctggtgttgctatgtactcttacattaaggctaagattgaagaggagaaaaggaaaaagagcgcatgactgctgtgaataatatatcgggaccttcct

SEQ ID NO: 50093 - DNA, 276 bp, Zea mays
gtagctgctcatccatggcatgatcttgagatcggtcctgatgctcctgctgttttcaatgttgttgttgagatcaacagcgaagcaaagttaaatatgagcttgacaagaaaactggactgattaaggttgatcgagtcctgtactcatcagttgtataccctcacaattatggtttcgttccaaggactctttgtgaagacaatgacccaatggatgtgttagtcctgatgcaggagcctgttgttcctggttcgttcctggagcaagagcatc

SEQ ID NO: 50094 - DNA, 279 bp, Zea mays
tccgactactcgctcgctccgccccggcgtcccgccctcagccgccgccgtcgccccctccctcggttcgcctcgtcgtcgtcatgggcaaggcctccaaggacaagagggacatctactaccggaaggccaaagaggaaacgctggagagctcgcagcgccttcaagctcctccagatagaccaggagttcaacatcttccatggagtgaagcatgtggttgacctgtgtgctgctcccggaagttggagccaggttttgagcggaacctgtatgtac

SEQ ID NO: 50095 - DNA, 168 bp, Zea mays
atcacggggaaggctgctgcgcccaagcccaagccgaaggttgaggatggtatcttcggcacgtccggcgggatcggtttcaccaaggagaacgagctgttcgtcggccgcgttgccatccttggctaggccgcatcgctactggagaggccattaccgggaagggca

SEQ ID NO: 50096 - DNA, 282 bp, Zea mays
cttcgccgaggaggaaggcatcgacctgcccttctcctgccgtgcggggtcctgctcctcctgcgccggcaaggtcgtctctggctccgtcgaccagtccgaacagagcttcctcaacgacaaccaggtcgccgacggttgggtgctcacctgcgctgcgtaccccacctccgacgtcgtcatcgagacgcacaaggaggatgacctcctataattctagctagctatacaccgccagggcccgtcgtcttgtgccaccacatgcataccgcccgcgcagga

SEQ ID NO: 50097 - DNA, 276 bp, Zea mays
ctgcaactggaacaacgccgggatgcgcgagttcgcgagcgacgtcgcgcatgcccggtggtggaaggtgcacgacaggatgccccggaagctccagtcctactgcctgctgaggtcgcggcagaaggccaggctggagtgggaccggaggcaggccgagaaggccaactctcaagatggccactggcgcctcaacgtcacggacaccaggctcaagacgtgctttgagaagttctgcttctgggagagcatgctctggcattgggcgaaaacagt

SEQ ID NO: 50098 - DNA, 258 bp, Zea mays
gatttcgcgagcggcgagataaagcaagcgtcgacgcttttcgactgcgacgtgaccctggacgactatctgctgaagagctactacaagacggcctccctgatcgcggcgagcacgaggtccgccgccatcttcagcggcgtgggcagcggcgtgtgcgagcagatggacgagtacgggcggaacctgggtctggcattccaggtgggtggacgactcctggacctgacgcagtcggcgtacgagctcgtgaagccg

SEQ ID NO: 50099 - DNA, 124 bp, Zea mays
acgacgccgagcagaagaacgagaggaaggccatgaaggagctgggcctcgccagggcccgggagttgggctggcccaacacgtacgtcttcaccaaggcgctaggggagatgatgctggcccg

SEQ ID NO: 50100 - DNA, 272 bp, Zea mays
gtgttttcttactacaaaactttccccatgccaataacttctcataggtttggttctattgacccgataactggacaagtgacaaatgaagacaaccagcaatttgtgtccagtgtttgctggagagggaagtcaaacatggtagtggctgccaactccagtggtagcatcaaagtgcttgagcttgtgtgaatgaacgagagtcatattggagaagaaggttctagtgttgccatgcgggcctgcgatgctttcggcccttgggcactaaa

SEQ ID NO: 50101 - DNA, 273 bp, Zea mays
cggcaacgtcgtcaccgtcgatcaggatcccaacacccgctacccggtggttgtgcggttcaacaaggtgaactacgccggcgtgtccaccaacaactacgccttggacgaggtcttagaggtgaaatgagtggggccggccggctcaagggctccgcgctagctaccgtgtgattgatttgtagtagttgtgaaatgaggctgtgaagctgcatgctgtgctggctagcgtcacaacatcgatcctatgtgtaatacataatccacataatc

SEQ ID NO: 50102 - DNA, 278 bp, Zea mays
ctgtttgggatgttggtggccaggacaagatcaggcccctgtgagaggcactactttcagaacacacagggacttatttttgttgtagacagcaacgacagggaacgtgttgttgaggctagagatgagctccacaggatgctgaatgaggatgagctgcgtgacgctgtgctgcttgtatttgcaaacaaacaagatcttcccaatgctatgaatgctgctgaaattactgacaagcttggtctgcattccctgcgacagcgcactggtacatccag

SEQ ID NO: 50103 - DNA, 273 bp, Zea mays
cggcgagcatcccgatcatgttgttgtcatcaagtatgtgccgtatgtgggagacagtaagagggctatggacgagtacacatcagagatcttcatgggcggcaagagcaccatcgtgctgcacaacacctgcgaggactcgctcctcgccgcaccgatcatcctcgatctggtgctcctgcctgagctcagcaccaggatccagttaaaacctgagggaacggacaagttccactccttccacccggtggccaccatcttagctacctcaca

SEQ ID NO: 50104 - DNA, 272 bp, Zea mays
gaagaaaagagtttatgcttatccggcagaaaattgtgaagatacaggcccatgtacgtggacatcaggtaaggaaaaactatcggaaggtagtctggtctgttggcatcgtggagaaagtcatactgaggtggaggagaaagggaaggggtctgcgaggtttccaacctgagaaacaacttgaaggtccatcatggcagatccaacctgcaaaggctgaggctgaggatgaatatgacttcttgaaggatggcaggaacaggctacaggca

SEQ ID NO: 50105 - DNA, 268 bp, Zea mays
gcgcggacgcccaccagcagctgcccccttgctgtcgccgcctctccgcgcgaccgatctaccgccgccgccaccatgtcgctgatcgcccgcgagaacttccaacatattctgcgtctgctgaacaccaacgtggatgggaagcagaagatcatgttcgccatgacctccataaagggtgttgggcgccgcttctccaacatcgtctgcaagaaggccgacatcgacatgaacaagagggccggtgagctgagcctgaagagctgga

SEQ ID NO: 50106 - DNA, 269 bp, Zea mays
gcgggaagaaggcgcagatgggctcgagctcacagacgatcgcatcaaagctaccgtcaaggacatgatagcggctgcaactgaaacatcgtcccaaacgctggaatggaccatggccgaactcattgccaacccgcgggtgatgagcaagctccaaggcgagatagcgcgagtcgtcagcgccgatcagacgaccatcgctgaagcgggactgaacaaaatggggtacctgagggcagtgttcaaagaggtgcttggctccacccacc

SEQ ID NO: 50107 - DNA, 119 bp, Zea mays
gcccaacatcatctttgtactttccctgctcctcatcttggagaagcaagcagctgtgatgggacaaaaaggtggatcaaaaggccgattaccaagtgaattttcccaatttccacaca

SEQ ID NO: 50108 - DNA, 180 bp, Zea mays
gaaaataatggaaaagtcacagacgaagcatacgaagatgacagtgatcacggtgaaaccctatgtggaacctgtggtgggatatacaacgcggatgagttttggatcgggtgtgacatgtgcgagcgatggtaccatggcaagtgtgtcaagataactcctgccaagcagagagcataa

SEQ ID NO: 50109 - DNA, 180 bp, Zea mays
acacaaggcttcaggttgtccctctgctagcatcaaggtcacaggcactcaggtatctttccgtcgcgctggggctatctgtggggaacatgtatctgatcaccggggaacatggcgacaccgatctagaggagatgctatccgggctacacaagaccgtgatcgtccgtggcgtcaccg

SEQ ID NO: 50110 - DNA, 202 bp, Zea mays
aggctggccccagcagtggtgccggtgctgctcccgttcatgatgctgatgacttcatgtacgctctgatggttcagatccatgttgctcaagctgtgtgtaggcctcctggttcaggtatatcagtagttgaaggtacgctattgccagagctctttgattctgtctgcatcaaaacagaatatgctggagcaagtagaaa

SEQ ID NO: 50111 - DNA, 195 bp, Zea mays
gtgcatgagcgagtaagccggaattcggtcagcttgtgagtatggcatattacttcctgagttatgcgggattcgaatggtgtcagcagaggttctggatttgttgctttcaaatctgctgaagatgctaaccgagctcttacggagatgaatggcaaaatggttggaagcaagcccctttatgtagctcttggc

SEQ ID NO: 50112 - DNA, 177 bp, Zea mays
gtttggcaagctggctaaaatctatgttttcaaaactgtagtattacaaatactatagttgttttaaggtattctaaacttaggtctggacctcagttttcaaaactgcggtattgtaaactgcggtattgtcatgactaaagtatactgtagtatttcaaaaactgtggttttcaa

SEQ ID NO: 50113 - DNA, 176 bp, Zea mays
accaaaaacaatagtcgatgtcggatgtggcattggtggtagctcaaggtacttggcgaagaaatacggagcgcagtgcactgggatcacgttgagccctgttcaagccgagagaggaaatgctctcgctgcagcgcagggttgtcggatcaggttactctgcaagttgctgatgc

SEQ ID NO: 50114 - DNA, 180 bp, Zea mays
agctggaagactgcaggtagataaagcaatgatgaatgagttgaaagaagtaaaaaaagcagtgaatcctacagaagttcttcttgtggttgatgccatgactggccaagaagctgcagggttggtcagctccttcaatgatgagattggtataactggtgctatactgacaaaactgga

SEQ ID NO: 50115 - DNA, 182 bp, Zea mays
gggaggcgaagatgatcgaggtggtgctgaacgaccgcctggggaagaaggtgcgggtgaagtgcaactgcgacgacaccatcggcgacctcaagaagctggtggcggcgcagacgtggacgcgccccagaagatccgcatccagaagtggtacaacatctacaaggaccacatcacgctca

SEQ ID NO: 50116 - DNA, 176 bp, Zea mays
actttgtgtcactggtgagcatatggaactttcttggtcgtgttggaggtggctacttctctgagatcattgtcagggaacgtacatacccaaggcacatagcattggcagttgctcagatcgtgatggctgctgggcatttcctctttgctatggcttggcctggaactatgtac

SEQ ID NO: 50117 - DNA, 175 bp, Zea mays
ccagatctacgacgtcacccagagcagaatgttctatggactggcggacttacgcctgttcgccgtcaaagatgccagcagagctctagcgagatgtcgttcgagccacaggacctcaccggcgacatctcgggcctaggtccgtttgagctcgacgccctgcaggactgggagt

SEQ ID NO: 50118 - DNA, 175 bp, Zea mays
gatggactcatcatggctgctcgccacaagaagtacaaacacatccagggtgtccagttccacccggagagcatcatcacccctgaaggcaagaaaatcatcctcaacttcatcagattcattgaggagctggagaagcagcgttcctaatctaggggaggtatatgggacgggt

SEQ ID NO: 50119 - DNA, 171 bp, Zea mays
cctggtcagctgaattctgacctccggaagcttgcagtgaacctgatccccttcccacgtctgcacttcttcatggttggatttgctccactgacctcgcggggctcccagcagtaccgcgctctcaccgtgccagagctgacccagcagatgtgggactccaagaacatg

SEQ ID NO: 50120 - DNA, 175 bp, Zea mays
ctgccctgcaaaagctcaataacaagttccctgggctccacgtgtacacaggaatgattgatccagaagtaaatgagaaaggttttatagttccaggactgggggatgctggcgacagaagctttgccacataatcagactgcccaatttgattgggtcagtgttcgacctgcga

SEQ ID NO: 50121 - DNA, 173 bp, Zea mays
aggacaccacgaccattggggaagggaagatgttctctcctggtaatctgagggcgacattcgataaccctgagtacgacaagctcatcaactactacgtcaaggagaagtacacattgcgctacactggaggaatggttcccgatgtcaaccagatcatagtgaaggagaag

SEQ ID NO: 50122 - DNA, 170 bp, Zea mays
gctattcagaggagcttcctggtgtctgctgacatggcacatgctttacatcccaactatatggacaagcatgaggagaaccaccagcctaaattgcatggaggacttgtgatcaagcacaatgccaatcaacgatgtgctactaatgctgtgacagcatttatttttcg

SEQ ID NO: 50123 - DNA, 287 bp, Zea mays
gaggaggagagcacgcatgatgacagatggtttcaacagttgccgaaacgtcgtgtgcaatttcactgaaggagctatgtactctttcccccaaatacgtctgccaccgagagctattgaggcggcaagaagagccggcaaatcagcggacgtcttctactgcctcaagctcctggaggcgacaggaatctccactgttccgggctctggttttgggcaaaaggaaggggtgttccaccttcggaccactatccttccagcggaggaagacttcactgccatcatgt

SEQ ID NO: 50124 - DNA, 277 bp, Zea mays
ctcaaatagcaagctggcacaggtaaaattcagtagcatgcttcacaagaaaattcctgcagaggctggcatcggtgtagtttgcgcttctcctggaattgtcgacacgaacgttgcaagagctcttcctaagattgtcgtagccgcgtaccatttgattccctacttcatatttgacgctcaagaaggttctaggagtgcactgtttgcagcatccgatccccaagtcccggaatactgcgagacgctcaagtcggaggactggccagtttgtgcc

SEQ ID NO: 50125 - DNA, 277 bp, Zea mays
atcacccatggccgttggcgttgtcttccggattttgggccactacactggtcagcctcttcttggagctaaagttgtagcctccatgctgatgtttgcgacggtcgctgggattctcatggcactcttgcttgaacactgctggcggcgcctgggataatgcaaagaagtacattgagactggcgctcttggtggcaagggcagcgagtcccacaaggctgcggttactggcgacacggttggagacccattcaaagacactgctggaccgtcgct

SEQ ID NO: 50126 - DNA, 283 bp, Zea mays
ctgctcgcaaaaacaagccagagctgttgagggaaggaaacctcgaggaggcagcaatggtggatgtttggatcgaggtggaggctaaccagtacaccgctgcactgaatcccatcctcttccaggtcctcatcagtccgatgcttgggggaaccaccgaccagaaagttgtggatgagaaccttgagaagcttaagaaggtgctagaggtgtacgaggcacgcctgaccaagtgcaagtaccttgctggagacttcctcagccacgccgacctgaaccatgt

SEQ ID NO: 50127 - DNA, 220 bp, Zea mays
ctcccgaagcactggtcattggagtagtcgccttgttggtgttcggccccaagggtctagcagaggtaaattacctgcgtctacaagccttgtcagctttctgttcttgccttcttggggctattcactcgttaagtcgttaatgtgcttgggtggtgctagtaattgagaacactgatcgacaagattgacctataggtatggtatggaatttcaatcc

SEQ ID NO: 50128 - DNA, 267 bp, Zea mays
gcgttgcgtcttggggagagtgagagaagtgggagacccgcgagaggctgccgtgtagggactagggaccgtagagtaagcgacagcccaggagggagagggggatggccgggatcgggccgatcaggcaggactgggagccggtggttgtgcggaagaaggcacccaccgccgctgccaagaaggatgagaaggccgtcaacgccgcgcgccgctccggcgcgcagatcgagaccatgaagaagttcaacgctggtatgaacaagg

SEQ ID NO: 50129 - DNA, 267 bp, Zea mays
gttcattttaacttcagagagcacacaatatatgttcgatgccgcccctatctcaaggaattcttggatagggttgccagcgtgtttgagacaattattttcactgctagtcaaagcatttatgcggacaacttctcaatgttcttgatcccaaaagaaagttgttccgtcaacgtgtttatcgtgaatcttgtgtctatgtggagggaaactacatgaaggatctgacagtacttggacgtgacttaactcgcgtaatgattgttg

SEQ ID NO: 50130 - DNA, 277 bp, Zea mays
cggacaggtcgacttctactacaaacagttcccggagaacatgcgcacgtcgcgggggccatgctcttcctggcattcgccatcgccagctacgccagcggcctcatggtcagcgtcgtgcaccggaccaccggaggccccgacggccgccccgactggctggcgcaggacctcaaccagggccacgtcgacctctactacctgctcatagccgccatggcggcggtcaacctagtctacttcgtcgcctgcgcgcgctggtacaggttcaagaacc

SEQ ID NO: 50131 - DNA, 270 bp, Zea mays
gacaacatttgaagaaagtcggttaaatgaagcagatgtcggtgacaaacaaaaatggctgaaagaggggatggactgcaatttgttgtactggaatgggaagatcattgatttcgacctcccaatcactgtgaggctgactgtaactgatactgacccaggggcaagtgatagtgcgcaaggaggaacaaagcctgcaaccctggaaactggagctgttgtcactgtgccctcttttgtgaacgtaggcgatgatattctggtggattc

SEQ ID NO: 50132 - DNA, 269 bp, Zea mays
cacccgcgttgtcgaccaggacaagtatccccacatgctgtcagtgcggaactgcttcatccggggctcggtggtgcggtacgtgctgctcccgcaggacggcgtggacgtggacatcctgcacgacgccaccaggagggaggcgcgcggaggctgatcggcatcggcatcggcccccctcacctgtgctgcttctcccccggggaggagattgatctgccttgccctgatctcgtctggttgtacgaaacatatgctgatctgagtgg

SEQ ID NO: 50133 - DNA, 271 bp, Zea mays
atccgaagctcaatcaattcactcgaacctcttccccaaattttcgattagattctcgttgacaagaagactagaaccgaacctgaccatgtcgctgatccgccgcagcaacgtgttcgatcccttctccctcgacctctgggacccctttgagggcttccccttcggctccggcaacagcagcagtatcttccactcgttcccgcggaccagctcggagaccgcggccttcgctggcgcgcggatcgactggaaggagactccagaggcg

SEQ ID NO: 50134 - DNA, 270 bp, Zea mays
ggaacgagcagttctgggtgatcgggggcatctccgcgcacctcttcgccgtgttccagggcctgctcaaggtgctggccggcatcgacaccaacttcaccgtcacctccaaggcctcggacgaggacggcgacttcgcggagctgtacatgttcaagtggacgacgctcctgatcccgcacaccaccatgctgatcatcaacctggtcggcgtcgtcgccggcatctcctacgccatcaacagcggataccagtcgtggggcccgctct

SEQ ID NO: 50135 - DNA, 266 bp, Zea mays
cggatacttgctgagaaggtctcatacatattccgggatccagaaatttcggacatcgtgatctaccgggtacccccaggacttcaggtttatggctacagctcaggtgatgtgttcatctagagagttgtggccaagggaggagactatgttgaagtgcgtgatggcaagctgtttgttaatggagtagttcaggatgaggattttgtgctggagccacacaactacgagatggaaccagtgcttgtgccggacagttatgtgtt

SEQ ID NO: 50136 - DNA, 265 bp, Zea mays
cggctcgaggcgtcgtcgaggtgttctcccgcatcaacagcaagttcgacctcatgtacgccaagcgcgcgttcgtgcactggtacgtcggcgagggcatggaggagggggagttctccgaggcacgcgaggacctggccgccctggagaaggactacgaggaggtcgccgcagagggcggcagtgatgacggtgacgaggaggaggaatactgatctgcttgcatgaatctgtttggctgtcgagccaggttgtggtgttgaaa

SEQ ID NO: 50137 - DNA, 292 bp, Zea mays
agccaaccaggaggatgccctcgcgcgaattgaaaagctttcagaagtaaacccgatgcttggcttccgtgggtgcaggcttggtatatcgtaccctgaattgacagagatccaagcccgggccatttttgaagctgctatagcaatgaccaaccagggtgttcaagtgttcccagagataatgttcctcttgttggaacaccacaggaactggggcatcaagtgactcttatccgccaagttgctgagaaagtgttcgccaatgtgggcaagactatcgggtacaaagttg

SEQ ID NO: 50138 - DNA, 291 bp, Zea mays
tgtggttgctcttgccaacggatgtccgcacctgcgctcgctgggcctctacttctgccagaacatcacggaccgcgccatgtactccctcgcaaacagccgcgtgaagagcaagcgtgggaggtgggatgcagtgaaagacgggctcgcgaacctcaacatcagccagtgcaccgccctgagcccccggcggtgcaggccgtctgcgactccttcccggcgctgcacacctgccccgagaggcactccctcatcatcagtggctgcctcagcctcacgtcagtccactgc

SEQ ID NO: 50139 - DNA, 294 bp, Zea mays
gactgaagaggagaagaaggctgctgaagaacgtgctgcggctgccaaggcttctggcaagaagaaagaatctgggaaatcgtcagttttacttgatgtgaagccatgggacgatgagactgacatggccaagctcgaggaagctgttaggagtgtccagatggaaggactgctttggggcgcatcaacacagtcccagttggatatggcatcaagaagctgcaaatcatgatgaccattgtcgatgaccttgtctctgttgacactctcatcgaggaccactctgcgctgagc

SEQ ID NO: 50140 - DNA, 293 bp, Zea mays
ctcggtgaactctttctcctcgcgcacaccggagcacaatcaaggattccagtccagtcctgccaatggagtgcgttttgggcttggttggccgcgacttcgcggtggtggcggccgacacctccgccgtgcagagtatcctcgtccacaagactgacgaggacaaagtaatggtcctcgactccacaagctgttgggcgcttcaggggagcctggtgaccgggtgcagtttacggagttcatacagaagaacctccacctgtaccagttccgcaacaccatcccgctgtcaa

SEQ ID NO: 50141 - DNA, 291 bp, Zea mays
ggttaactatgcttggacaacggtgcctacataccctagcggagttattgggttcatgctttgctccaccgaagggcctgctgttgatttccagcaccctgttttcaacatcgaggaggatgagcatcctatgaaatcaaagggaccccttaagttctacaactcggagatccacacggcatattctgtttgccttgggttgcaaagagggtaatcgagtcaaaagcgaactagatgtgaagggtatctccaagggctaagtaccttaggcgcgcaacacagaatttgtgt

SEQ ID NO: 50142 - DNA, 283 bp, Zea mays
cgagcgcaccggcgagaaccagttcgtggtgatggacgcgaggtcgccgcagctggacatcgtcgccgaggtgcagctgccagcgcgcgtcccctatggcttccacggcatgtttgtcacgcaggccgagctccaggcgcagagcaatgatcaaagcaccgaacactcgtccagtgactcgtgctggggatctgtagcacatgattccaggagaaacacacacaaacacccatcaggtgcatactgaatagattgtagtaagaacaactctaggccacatagc

SEQ ID NO: 50143 - DNA, 285 bp, Zea mays
gggaggagcagatctgcgcgctgaaggatgttggccccaagtaacttccctgccttggaatactgtatctcaaaacctaaatcgaaaaaagaagtgtatcaaggattgctacagagacatccatctggcttgagctggcttttgctatggcaaacacaagtgcagggatcgctgggtgtgcaccgtgtctgcattatgtggttacattctggaccctgtattttctatgcttttatgcccctactgtttagtattaattatcaataaatttgtttgggacggttg

SEQ ID NO: 50144 - DNA, 287 bp, Zea mays
cttgcaatcacaacgaacacaagctctcgatctcaccgacaccgaggaagaagagatcaatggcgtccgagcagggagtcgtgatcgcgtgccacagcaaggctgagtttgacgcccacatgaccaaggcccaggaagccggcaagctggtggtcatcgacttcactgccgcctggtgcgtccatgccgcgccatcgcctacatgttcgtcgaacacgccaagaagttcactcaggtcgtcttcctgaaggtggacgtggacgaagtgaaggaagtcaccgcggcct

SEQ ID NO: 50145 - DNA, 289 bp, Zea mays
catgaagttgtcacgggaactgccaagaagcaaaccaaggagaaaactcccagaagcagcagcaagagcaataaagctggcccaaaaccgccacgccagccagaacccaactcaaggggttcgaagatgccacctccgaaggatgaggatgacagcggaggcgaggaagaggaggaagatgagatcacgaaaacacgctgtgtggttcttgtggtgacaactacggacaggatgagttctggatatgctgtgatgcgtgcgaaacttggttccatggcaagtgtgtcaa

SEQ ID NO: 50146 - DNA, 300 bp, Zea mays
  unsure (1)..(300): unsure at all n locations
cgcggagagatcaagcagatcgccattggcaccgacgatgtctacaggaccgcggaggcggcgaactngtccggaggccaggtggtgcgggagccggggcccttgccagggatcaacaccaagatcacagccatcctggaccctgatggctggaaattggtcttcgtcgacaacatcgacttcgccaagaactggagtagccacgccaacgacctcagacaccctgcaacaggattaattctttttcgaaaacaagaacgggcattatatatacagattgaggcacctcctactgtgaaa

SEQ ID NO: 50147 - DNA, 299 bp, Zea mays
gttattgttttattacataaattcggtcaaacttgagatcctttgactctccaagaaagtttgaacaacctataatttgggactgagaatatatataggaactcaattgttggtagcataaacgaaatagttgcgattcataccgcaatgagcaagccatactccaccgatgaaaatatgactccaaaaatgctcccatgcatgctagaaagtccagtttgtcaactttccagataaggtaagccgattcatagtcaattaaaccaagcactgctgatatgatgatcgaggaaaggatg

SEQ ID NO: 50148 - DNA, 289 bp, Zea mays
gggaaaaatattttcttggtgctgttaaggatttgtcaatagcagagtctgctgtaccaccagttgattcaagtgttgagacagaagtcagaaatgcggtcagaaaagtagagatgaagagcaaagaatgtgcctatcaagcatggttagggtactacaactcgaacaagaccattggtcggataagtccagacttgttcaccttgcagaagagttcagccaaagcatgggtcttgcagttcctccagccataccgagaaacattcttcgcaagatgggccttaacaat

SEQ ID NO: 50149 - DNA, 281 bp, Zea mays
ccctagcgcgcgccactctccctggcagccgccgccaggaagcctccactccttctccctcttctcacctccccttgctcttctctggccgacgccacttgcgtgtgcaggcaggcaggccctggcgtccgcgcatcctcttctggccaggagctcccccacgcagccgctgctctctcacgtcctctattccttcccatccccgatctcccccaatccgagcagaccggttgtcgcttgctcatggcgtcaggctggttgcttcctcaaagcgagcggcg

SEQ ID NO: 50150 - DNA, 288 bp, Zea mays
gcgctgcaaggagcttggcattactgcactgcacattaagcttcgcgccaccggaggcaacaagaccaagacccctggacctggtgcccagtctgccctcagggcgcttgctcgttccgggatgaaaatcggacgcattgaggacgttaccccggtccccactgacagcactcgcagaaaggcggtaggaggggaaggaggctgtaggcgtctcgtctgcgtggcatttgccggctcttggccggtggccattatgaagctagccctctctgggtggtgttgctgttc

SEQ ID NO: 50151 - DNA, 237 bp, Zea mays
gcggccacgacgccgcccgtcgccgccgatccctttcgaccgctcgggtctccctgctccttcgcctttcctcgtgaaatccagcgaccgaatccgatcgccttggcgcaggcgttcgatgggcaaccactaccagacgctgggtgtccggcaggacgccaccaaggctgaggcaaggctgccttccgtcgcagcgcgctacgcgaccaccctgaccgccacgccggctccaccgac

SEQ ID NO: 50152 - DNA, 272 bp, Zea mays
atcgaacataatatcttggttgtatccaagtactatgcaagggttacgctcgagaggcttgctgatcttctttgcctgactttgcaggaggcagagaagcatctctcagacatggttaactcgaaatctctagtggcaaagatcgacaggccgatgggagttgtcagcttattacgacccaagacagcaatggcacactgaactcatgggccacgagcctagagaagcttctggacctcgttgagaagagctgccacgagatacgataaaga

SEQ ID NO: 50153 - DNA, 285 bp, Zea mays
cgctcctgagtcctgtccaccctgccaccgccgacgccgcgccgccgcagcaattgtcaccgtcgctatggcccgtatcaaggtgcacgagctccgggggaagagcaagacggacctgcaggcgcagtcaaggagctgaagtctgagctctccctcctccgcgtaccaaggtcacggcggcgcacccaacaagctctccaagatcaaggtggtgcgcacctcgatcgcgcgcgtgctcacagtgatctcgcagaagcagaagtcggcgttgcgggaggcgtacaa

SEQ ID NO: 50154 - DNA, 280 bp, Zea mays
aaagaatatcccaaataagtatacctccaagatgctcttggctgctattgatgaaagtcataagggcacttatgattttatttacttgccaattgattttaagaataaatgtaatgtcggctatgctttcatcaacatgaccaatcctcagcatatcattccgttttatctagttttaatggtaaaaagtgggagaagtttaacagtgagaaggtggcatcacttgcttatgccagaatccaagggaaaacagccctgattgctcatttccagaactcta

SEQ ID NO: 50155 - DNA, 173 bp, Zea mays
ggaggatgtgccccggcatggcgtttgcgcaggcaagcatggagctcgtgcttgcagcgctcctgtaccatttcgactggaagctgcctggtgggatgctgccgagtgaattggacatggcggaggagatgggcatcactgcccgaaggaagcgcgacctttacctgcatcca

SEQ ID NO: 50156 - DNA, 172 bp, Zea mays
ggttccttgaagatcatcagttcatcatcctatagtaagctaaatgatgaaagaaaacccctgtacattacatggaaggcagaccggctattggctccattgctccaacgtctgctttggctggcttgcctcgatgcaccggatgcagtgaggaatccagtcgaacgacatt

SEQ ID NO: 50157 - DNA, 160 bp, Zea mays
ggaagagttcaccctcacagttcaaaagcgtggaggtgtgctcatccaaaaatggggcagatcatcagctgcatcgaccgctgtttcgatagtggatgctattagatccctcgtaactcctaccccagaaggtgactggttttctacaggggtttatacg

SEQ ID NO: 50158 - DNA, 174 bp, Zea mays
cagacccagcagctattgtggtcgtccctcagccgcgtcgcaccgcatcgcattgctacgattcgaagctctctctgctcgcagccatggcgaagaattacccaaccgtgagcgccgagtacagcgaggccgtcgagaaggccaggcgcaagtccgcgccctcatcgccgagaa

SEQ ID NO: 50159 - DNA, 164 bp, Zea mays
tgccaagcactgcattctatgagggaattggtctggacaccaaaaattcgacatgcatgtgatcatcgagaccaaccgcacaacggcgaggatcttccctgctgtcctagacgtcgagaacccagagttcaagaggaagcttgacaggatggttgagatcaacc

SEQ ID NO: 50160 - DNA, 295 bp, Zea mays
gaagacatcccttgcatttctgctgttgttgtaggtctccttgctgatccagagccaaaaattcagtacaccctgaaggccattggaggaagcctaactgcagttcctggactttctgacatgattgatgacactgtcgattcaattgtttctgatatgctcttgtggccacacaggcatgttgttcaacttggtgtcaatgttgatacgagtgacttggagcttaaacctccaggaagactttctgttactgtggtaaaagcaacttctttgagaaataaggcgatgatcggta

SEQ ID NO: 50161 - DNA, 330 bp, Zea mays
catcgatcgagcgtacgtggctcggaatcggtgccacgacccctcggcctggccgacgaccccgaggccttcgccgagctcaaggtgaaggagctcaagaacagtcgcctcgccatgttttccatgttcggcttcttcgtccaggccatcgtcaccggcaagggcccgctcgagaacctcgctgaccacatcgctgacccagtcaacaacaacgcatgggcctagccgatcaacttcgtccccggcaactaagctcaacggctatgctatgcgacttcattgtctttcggatcggagagggtgtacgtacgtggattagttgatgctgcg

SEQ ID NO: 50162 - DNA, 295 bp, Zea mays
cgagaacctcgcttcccgcttcatgaccgacgtgcaggtcgccgaggcgcgggccttctacggcttccagatcgccatcgagaacatccacgcggagatgtattcgctgctgctcgagacctacatccgcgagcacgtcgagaaggaccgcctgttccgcgccatcgacaccgtgcccgcggtccggcgcaaggctgactgggccatgcgctggatcgacggcggggagcgcttcgctgagcgcatcgttgccttcgcctgcggcgcgggcatattcttctcggggtccttctgc

SEQ ID NO: 50163 - DNA, 293 bp, Zea mays
cggctcgagtgtaccgctgccacaccatcaagaactgcacgcatgcctgccccaagggcctggaaacgcggcgaagcagatgcgacacgatcaagaagctccagttggacgcctgacagcgggcatgccttcccttcaagacgaacatggaacaaaacctgtgaaaaattgcccttcttttgcgccgtggttttctacctgacaaataattcccgatttgggggcctcctggaggtagtgtagggagtgaataactgctacagcatttcatttttatgccgtatcgaatttgg

SEQ ID NO: 50164 - DNA, 285 bp, Zea mays
ctgtgtttccatgcataccaacaggtgtcttacatgattttggcgatggtgtctcctgtcactcagtctgtaggcaactgtgttaaacgtgttgtggtcattgtaacatcagtgctgttcttcaggacacctgtttctcctatcaacgctctcggtactgcgattgcacttgccggagttttcctgtactcacagctcaagcgacttaagcccaagccgaagacggcttaaatagggattgtattttccatctctttgtgttaatggagttaaacacttctatgt

SEQ ID NO: 50165 - DNA, 179 bp, Zea mays
ggtgaagcttgtcgggcctgaaggtgaagagcacgagtttgatgctccagacgacgcctacatccttgacgcagccgagactgccggtgtggagttgccatactcgtgcgctgctggggcttgctccacctgtgccggcaaaatcgagtctggtgcggttgaccagtcggatgggtcct

SEQ ID NO: 50166 - DNA, 286 bp, Zea mays
cttccatcctaatatcaacagcaatggaagtatatgccttgacattcgcaaagagcagtggagccctgctttggacaatttctaaggtcctgctctccatctgctccctgctgaccgaccccaacccggacgaccctcttgtcccggagattgcccacatgtacaagacggaccggcgcaagtacgagtcgacggcccgcagctggacgcagaagtacgcgatgggctgacgaacgctttcctgctcgtctgggcgccattgttcccttggatttgttgttggtcg

SEQ ID NO: 50167 - DNA, 251 bp, Zea mays
agtagttgccagggagggagatgttgttgaggttcatgaaggaaaactcgttgtgaatggtgaggctagaaatgaagaatgcattcttgagccaccttcttatgacatgaatcctgtgcaagtaccagaaaactctgtttttgtgatgggagataaccgaaacaacagctacgattcacatgtgtggggccctcttccagcaaaaaacatattggggagatcaatttttcggtattggcctcctggtcgaa

SEQ ID NO: 50168 - DNA, 200 bp, Zea mays
cgcatgaggcgtacggagtggaaccagacataatgaccttagcgaaccactggccaacggcattcccatcggcgttgtcctggtgaaggagaagatcgccgcagccataaactacggcgaccacggcaatacgtttggcggcgggcctctcgcctgccagaccgcgataacggtgttcgacaagatcacgagacccggtt

SEQ ID NO: 50169 - DNA, 239 bp, Zea mays
ccgacgcggagtacgcagacttctcctccaaggttctgcacttgaaaggtgacaggcaggacttcgaattcgtgaagacaagcttggctgccaatggatacgatgtggtttacgacatcaatggacgtgaggctgtgcaagttgagcccataattgaggccttgcctaaccttgaaacagtacatctattgctcatcggcaggagtgaacctgaattcgacattcctccgcatggaagg

SEQ ID NO: 50170 - DNA, 176 bp, Zea mays
ctcgccgaccacatcgccgaccccgtcaacaacaacgcctgggcttacgccaccaacttcgtccccggcaagtgagcgagggcatgatgcttgcatgcgtgtaccgtagacgtaccgtattcctacgtactgcaggttgcaccagtatttgtgaagggagctgtgcgtgggaccca

SEQ ID NO: 50171 - DNA, 149 bp, Zea mays
ggccgaggaggacggcatcgacctgccctactcctgccgcgcggggtcctgctcctcctgcgccggcaaggtcgtctccggctccgtggaccagtcagaccagagctacctcgacgacggccagatcgccgccggctgggtgctcacct

SEQ ID NO: 50172 - DNA, 119 bp, Zea mays
gcccaacatcatctatgtactttccctgctcctcatcgtggagaagcaagcagctgtgatgggcgaaaaaggtggatcaaaaggccgattaccaagtgaattttcccaatttccacaca

SEQ ID NO: 50173 - DNA, 227 bp, Zea mays
acaccatcggcgacctcaagaagctggtggcggcgcagacggggacgcgccccgagaagatccgcatccagaagtggtacaacatctacaaggaccacatcacgctcaaggactacgagatccacgacgggatggggctcgagctctactacaactaggcgccctgaccccaaccgtgccctgatgtaaggttaatccgaattactgagtcatgggtgcgcttccag

SEQ ID NO: 50174 - DNA, 105 bp, Zea mays
cgtggtgctcgttttgatgatggggttggtggtgacaatgaggtgcagcgtacaatgttggaaatagtaaaccaacttgatgggtttgatgcaagagggcacatc

SEQ ID NO: 50175 - DNA, 186 bp, Zea mays
atggaggaagatgaccaagttttcgacctagcgctagaagcaagattgcatgctgcggaaacgatcaagcagagccggcaagaactgatcgtggttgcgtcattggtggaacgcataccaaatcttgcggggctgacgagaacgtgcgaggtcttcagagcagccggtctggttgttgccgacaag

SEQ ID NO: 50176 - DNA, 153 bp, Zea mays
  unsure (1)..(153): unsure at all n locations
gccaagcccgccgcggctccgaagccgaagcctgccgccgccaagccgaagggnaccaccgctggtgcctcccacccgaccttacttcgagatgatcaaggaggctatcacggcgctcaaggagaggaccggctccagctcgcaagcgatcgc

SEQ ID NO: 50177 - DNA, 181 bp, Zea mays
aggtgtatgtagctttgtagtgtaaatctcttaaggcttgttcggatgattggaggggattgatatggattgagagagattttaatttactatggattgaaacttcctcaattcatatggattggactagaaccgaacatggtctaagggagcattatttgccattgattttgcacctgat

SEQ ID NO: 50178 - DNA, 148 bp, Zea mays
caagcccgccggactggtcaagctgaacccggcgagcgagtacccgcccggcctggaagacacgctcatcctcaccatgagaggcatcgccgccggcatgcagaacactggctaggcggcttctcttcactcacctgcaaagtgaacc

SEQ ID NO: 50179 - DNA, 193 bp, Zea mays
catcagtgctgggctcgattaccctggcgttggacccgagcacagtttcttgaaggacattggacgtgccgaatacgatagtgtgactgaccaggaggcactggatgctttcaagcgcgtgtctcggttggagggcatcatccctgccctggagacctccaaggggctggcctaccttgagaagctctgcccg

SEQ ID NO: 50180 - DNA, 105 bp, Zea mays
cggagaccgagtacgggaggatgaacatcggcagccggccagccaagaggaggcccggcggcggcatcacgaccctgcgcgccatcccctggatcttctcgtgga

SEQ ID NO: 50181 - DNA, 251 bp, Zea mays
atatggcacacacttctattcgtttcggcatgggtcgctttaccactgacgaagaggtggacagagcaattgagcttactgtgcatcaggtgaagaagctccgtgacatgagcccactctatgagatggcaaaggctggcattgacctcagagcctcgagtggtcacaacattgaggcagttttcatgacaaagggacacgaaaacgtcgtacggtgcgcataacataagcttatggtgctgctggtgaat

SEQ ID NO: 50182 - DNA, 136 bp, Zea mays
ttcttgtcgccggtccgaggagtcttgtggggcagcagcggcggcagcagcaaagcaagctgcagagtgggaggatgttcggtgcccggtgtgcatggaccacccgcacaacgccgtcctgctggtctgctcctca

SEQ ID NO: 50183 - DNA, 264 bp, Zea mays
ggcggcgcaaaacaccaacacgtcttctctccggttgcgaggagggtataggatttcgccgcggcgagatgtcggcgtacgacgaggtggagatcgaggacatggagtggaacgcggatctgaaggcgtacacgtacccgtgcccctgcggcgacctcttccagatcacgctcgacgacctccgcaaagaagaggagattgcgcgctgcccgtcgtgttctctcttcctcaccgtcgtttacaacgccgaggactttgctgacg

SEQ ID NO: 50184 - DNA, 267 bp, Zea mays
gtcgccgtcgtctagacgtcttcacgcactggaaaggttaaagtccgacatcaatggcgaacatcatcctgatctcatcatgtgccggaagcagcctggcatcgcgattggccgcctttgcgagaaatgtgatggcaagtgtgttgtctgcgactcgtacgtgcgcccatgtacgcttgtccgggtctgcgacgagtgcaattatggttcgttccagggaaggtgtgtgatctgtggaggagtcggcatctcagacgcttactactg

SEQ ID NO: 50185 - DNA, 256 bp, Zea mays
ggtcaggacagttatttcactcaccaaggaggaggagaaagaactcaaggaaaccttgcaggatatccttggggaaaacaaaactattttggttggacagaagattgactacagcatcatgggaggattagtgattgaattcgggcagaaggtgcttgatatctcaatcaggaacagggcgaacaaatggaggcgttcttgaggcaaccacttgacttctaacagccttttggataaaagaagcatcatcggaatg

SEQ ID NO: 50186 - DNA, 263 bp, Zea mays
ttttgactcgcgtggagatgttaaagttattctagcaacaaaccgcattgaaagtcttgatcctgctttgcttcggccaggccgtatagaccggaagattgaattccctctcccagatattaaaactagaagacgcatcttccagattcacacatcaaaaatgacattagctgacgatgtgaacttggaagagtttgttatgaccaaagatgagttctcgggcgctgatattaaggccatctgcacggaggctggattgctcg

SEQ ID NO: 50187 - DNA, 253 bp, Zea mays
caatgggatgctgagggtacaagttgcagccttgtcctggaagacaaccctcttgttgatttcgttgagctccctgacacttgccaaggccttcagtattgcactttgttaagtgcagttattaggggggcattggaaatggtgtctatgaaggcggaggtgacatgggtgcgtgacatgcttcgcggggacgatgcctatgagatgcgggtgaagcttatcaagcaagtcccggaggaatacccctacaagg

SEQ ID NO: 50188 - DNA, 260 bp, Zea mays
cgcatggtcaacaacatctacctcaacttcgacgccttccacggcgacaaggcccacggcggcgtccatgacggtaccgagatcgtgctctggaagtggtgcgagggcgacaaccagcgctggaagatcctcccttggtgaacgaacgaaagaaactactagctggtaccctaataataattctgctggctgcggcgatcccagaatgaaagaggccgggtgcgatgcatctcggacttctcgagtggtgtttgcgtcag

SEQ ID NO: 50189 - DNA, 260 bp, Zea mays
acctaacgtaccctcttccgcgccgccatgtctgggaggaagaagacgcgggagcccaaggaggagaacgtgacgcttggccccgctgtccgccgaggagaacacgtctttggcgttgcgcacatcttcgcctccttcaacgacactttcatccatgtgacggatctgtctggaagggagacgctcgtccgcatcactggtggcatgaaggttaaagctgatcgtgatgagttctcgccttatgctgctatgcttgcctc

SEQ ID NO: 50190 - DNA, 259 bp, Zea mays
cgccgtcatcgatcgatcgccggaaaactaacccctaacgatgtctggagccggcgaggaggacaagaagcccgcggagggcggcgcccacatcaaccttaaggtcaagggacaggatggcaatgaggtgttctttcgcataaagaggtccacccagctgaagaagctgatgaacgcttattgtgaccgccagtctgttgacatgaatgctcattcgttcctgtttgatggccgcaggttcgcggcgagcagacccctg

SEQ ID NO: 50191 - DNA, 254 bp, Zea mays
gctgctcgcccgatctcgcgctgccggcagcgatctgagatcgagcgaactaagctttttcatcgagatggtgcttgtactgcatgctaacagtggtaacaagaatgcattcaaaacactaattgccgcagaatacagcggtgtcaaggttgagttggtgaaggactttcaaatgggtgtctccaacaacactccagagttcctcaagatgaaccctattgggaagattcctgtcctggagactcctgatggtc

SEQ ID NO: 50192 - DNA, 199 bp, Zea mays
attggtgctcttgtcaaggttgatgatactgaagtcatcagttttttgctgcaaactgaaataattcctctgtgcttgcgaaccatggagatgggtagtgagctatccaaaactgtggcaactttcatcgtccaaaagattcttctagatgatgttgggctgcgctacatttgcgccactgctgagcgtttctttgccg

SEQ ID NO: 50193 - DNA, 262 bp, Zea mays
tgcaagctactacactgggactttcaacacggtgaacagatcggccgacgggcgctacgtggctgtgtccagccgagggaacttctatctgacgtgggagcccgggcagccgttctggcaaccccacaacagggcggtggcacggaggattcagaacatggggtggagagcggacggtggactttggctgctggtgcgcggtggtggcctcttcctcagcagaggaaccgggataactgaagattttgaggaggtgcaggtg

SEQ ID NO: 50194 - DNA, 206 bp, Zea mays
agcagaacgggaagacgaggaggtacaagttgacactgagagtgatgacgaagagcaacaaatctacaatcctctcaagttgccgatgggttgggatggcaaacctatcccctactggctgtacaagctacatggccttgggcaggaattcaagtgtgagatatgtggaaaccatagctattgggggcgaagggcttatgagcgtc

SEQ ID NO: 50195 - DNA, 255 bp, Zea mays
gctggaaacagtggcggcggtgccggggatggtgggcggcatgctgcttcacctgcgctcgctccgccgcttcgagcacagcggcggctggatccgggcgctgctggaggaggcggagaatgaacgcatgcacctcatgaccttcatggaggtggccaagcccaagtggtacgagcgcgcgcttgtcctcgccgtgcagggcgtcttcttcaacgcctacttcctcggctacctcatctcccccaagttcgcgca

SEQ ID NO: 50196 - DNA, 255 bp, Zea mays
gggttttacaggaatagatgacccttatgaagcaccactgaattgtgagattgagatcaaagaggtagatggtgtatgccctccgcctgctgagatggcagggcaagttgttacttaccttgaggagcaaggcttcctgcacgagtaggctgaatccaagcaacatctggggaagatttcagtaagactagcgcagaataagtcaaaggcgctggcagttacggtatagcagttgcatagattggcctcaatgcc

SEQ ID NO: 50197 - DNA, 284 bp, Zea mays
ccactatctggatgtcaggatgtgggaggattttgacaagggccatgtcgccggcgctcggaatgttccctactacctctccgtcactccgcatgggaaggagaagaatccccagtttgtggatcaggtttccgcgctctacgccaaggaccaaaacttgattgtgggttgccgctctggcatccggtccaaatacccccatgcagacctcctcacgcggtgatttatgccaattcccattggctccgtacatgggcggtgctacgattgttggtgcaagtggt

SEQ ID NO: 50198 - DNA, 205 bp, Zea mays
tattgaagcacattatttatttggtgctgaatatgatgacattgagattgtgattcacccacagtctatcatacactctatggttgaaacccaggcttcatctgtcctagctcagttgggatggccagatatgcggttaccaatcttatacaccttatcatggccagatagaatctattgctctgaggtcacctggccccgtctg

SEQ ID NO: 50199 - DNA, 285 bp, Zea mays
caacaccgtaccatttggatctcctactggtcccagtgcgacgccgctcttggccagaagctggcttctaggctgaacctgaagccgagcatgtaagctcgacgaggaagaaagcaggcaccggtggccaaggatgcgacgcaacatggagcgtgtgatgtttacaccaatataattgaataaacaggggatgtgcgcgtcgttgtactatgctgatgctgatggtcggtggtcgattatatatactggaacttctggtgtatgctcttctcttctggggagacg

SEQ ID NO: 50200 - DNA, 260 bp, Zea mays
gaaacagttgatgttgatccacctaaggaaagtgcagcagatgataatgagagatgtgtgggtgaatcatcacctggtcatttggaagatcagaagggagagaatgctggtagatcaagtagttctggaagctctagcagtgactcgggttcatcctctagtgatacggacacagatagttcatcagcagatggttctgatgctgggcaacacccagaacgtagcatctataagccagatgttgatgggggcactggaaa

SEQ ID NO: 50201 - DNA, 285 bp, Zea mays
atgaagcttctagcacaacaaagggatcttcaggcaaagattcctgatatagagaagtgcttggatattgttgcaacattacaagctaaaaaggatttgggtgaggcactcatagctgatttcgaattgtccgaggggatctactcccgtgcgaaaattgaggatactgactcggtgtgcctgtggttgggtgcaaatgtgatgctgagtactcttgcgatgaggccaatgccctcttgaagaaaaacttggaaaatgccaaggccagcttagaagtccttgttg

SEQ ID NO: 50202 - DNA, 286 bp, Zea mays
cttccgttctcaaaccaacctaggcaattcgccgcagcctctcaccctcgcgagtcccgacctcccgcagccgccgcacagatggcacccaaggcggagaagaagccggcggccaagaagcccgcggaggaggagcccgcgacagagaaggtggagaaggctccggcggggaagaagcccaaggccgagaagcgcctcccggcgggcaagtccaaggagggcggcgagggccagaaggggcaaaagaaggcgaagaagtccgtagagacctccaagatctacatct

SEQ ID NO: 50203 - DNA, 201 bp, Zea mays
gttcgatgggctgccctacctgctgtccctgctcaactgctgcatctgcctctggtacggcctcccgtgggtctccgacggcggcagggccctcgtcgccaccgtcaactgcaccggcgccctgttccagctcgcctacatctcgctcttcatcttctacgccgacagcaggaccactcggctcaaggtcgcggggcttct

SEQ ID NO: 50204 - DNA, 142 bp, Zea mays
ggatcaacccgtcgtgcgttgtttcattttgtgatgaatgggagagagggtattgtaaagattgatcaacccgtcgtgcttacgtctcgttaattaggagagctaccgctcggatttggtgatttgtaatatatgaaccagt

SEQ ID NO: 50205 - DNA, 264 bp, Zea mays
gaagaaattgctggaacagcttttcagcacttcgaacaagagggcaaccgagttatatcagttgaggagttagcacaggaactaaatctcgcgccgacacattactccattgtgcaagactggatcagaaaatcggacggcaagcttaactttcttgggttcaccaaatttttgcacggtgtcacgatacggggttcaaatacaaacgacaccaaacagatgcaaactgtattcgcttctaatttgaagactctcatcgattat

SEQ ID NO: 50206 - DNA, 286 bp, Zea mays
atcttggcgagctacctactatttgggtagtatcttctcttcttccaattgtaggtggtgttgcattggcatctcttactgaggcatcctttaactgggctggcttttggagtgcaatggcttcaaatgttacctttcaatcccgaaatgtattgagcaagaagctcatggttaagaaagaggaatccttggacaaccttaatctcttctctatcattacagtgatgtcatttttccttttggctcctgttaccttctttacagaaggtgtcaaaattactcctac

SEQ ID NO: 50207 - DNA, 277 bp, Zea mays
tgagaaaggacaaggaagacatgtatatccattcagaatgttcagtaagttacaatgctcagagaggctgctccttgatggggggtatggatatgcagacggcaagcaaagatttggtctgtactgttcatggggatgccaagttccacaatctgccttggaacagtattggaggtggcatttctgttactaagtttggcaacaagtactttgctggggctaagttagaagactctgttaccattgggagacgagttaaactggtagccaagccggt

SEQ ID NO: 50208 - DNA, 277 bp, Zea mays
attcgatgctagctccctctatataaagagcactcgctccttgatccaaacagacacaggcagcagccattgcttgccctgcatctctcctagctaggtgtcttctcttgctgagtgaagataaaacaatgggttcgtcctggaccgagagtcaaaacaatctcttcgagcgtgcgctggcagtatatgacaaggacacaccagaccgctggcacaacgttgcgcgggcagtcggctgcggcaagacagccgaggacgtgaagaggcactacaagta

SEQ ID NO: 50209 - DNA, 275 bp, Zea mays
cgatctcggtctcggactacggttgagcgaagtcgtcactgtaatctactgatctgcaaatggcggacgcggaggcgacggtcgggcgactgatgctgtactcgtactggcgcagtcgtgctcccaccgtgcccgcatcgctctcaatctcaaaggtgtggattacgagtacaaggcggtgaaccttctcaagggcgagcagtctgatccagaattcgtcaagcttaatcctatgaagttcgtccctgcgttggttgatggcagttctgtaatac

SEQ ID NO: 50210 - DNA, 272 bp, Zea mays
gtgagagcatatgctgctgccagaggagtaagatcagatcaaattgtattcacagacgttgccatgaaaaatgagcatatacgacgcagtgccctggcagaccttttcctggacactcccctctgcaatgcacacacaacaggcactgacatactgtgggctggtctgccaatgatcacccttccactagagaaaatggcaaccagagtagctggttccctctgcgtactactgggcttggggaggagatgattgttagcagcatgaagaag

SEQ ID NO: 50211 - DNA, 279 bp, Zea mays
caggttttagtgccattgtggaatcatgcaagggcctcaggcggctttctgtttcaggccttctcacggacagtgtatttaaatccatcggggcacatgctgaccgtcttgagatgctctcgattgccttcgccgggaacagtgatttgggcctccattacatcctatcgggctgcaagagcttgaagaagctagagattagggactgcccatttggtgacaagcccttgctggcaaacgctgccaagctggagacaatgcgatccctttggatgtcga

SEQ ID NO: 50212 - DNA, 85 bp, Zea mays
attgagaagatggtgaaggaggccgaactacattctcagaaggaccaggaaaggaagtctcttattgatctcaagaactctgcag

SEQ ID NO: 50213 - DNA, 275 bp, Zea mays
ctggaggaagatgaccaagttttcgacctagcgctagaagcaagattgcatgctgcggaaacgatcaagcagagccggcaagaactgatcgtggttgcgtcattggtggaacgcataccaaatcttgcggggctgacgagaacgtgcgaggtcttcagagcagccggtctggttgttgccgacaagagcgttcttcaggataagcagttccggctgatcagtgtgaccgctgagaaatggctgcctgtgacggaggtccccgtggacagcgtgaa

SEQ ID NO: 50214 - DNA, 280 bp, Zea mays
cagtgaccgagatgctgttcatcatccgcggcaagctggaaagctccacgacagacggtggccggacgggtttcttcaactcgatcaccctgaagcccggcgacttctgtggcgaggagctcctcggatgggcgctcgtccccaagcccaccgtcaacctgccactgtccacccggacggtgaaggcggttctcgaggtcgaggcgttcgctctccgggccgacgacctgaggttcgtcgccagccagttcaggcgcctccacagcaggaagctgcagca

SEQ ID NO: 50215 - DNA, 271 bp, Zea mays
acaagctcaagctcgagtacaacaaggccatcgctgcctacaacaagggcgagagcactgcagctaagaaggctcctgccaaggaggaagaggaggaagatgaagaggagtctgacaagtccaagtcggaggtcaatgacgaggatgatgaagagggtagtgaggaggatgaagatgatgacgagtgatggagctcctcgagacaatggaccgtgcttcatccaacaatggagcggctacacaaggccccgtggcgatcacaaaaaaggag

SEQ ID NO: 50216 - DNA, 276 bp, Zea mays
gcattgtggtgaattttgcagctgtgcaagacaaggatcacaaattcttgacaaaaacagtggaagaagcataccgaggagtcgattgcggtgacggaggtctatttggagcagttgtcgtccgcaatgatgaagtggtagttagttgccataacatggttctgaagcacactggccctactgcgcatgctgaagtaactgcaattagaggcttgcaaaaagctcgggaaaatcgagctctctgactgcgaaatttacgcgtcctgcgagccatgc

SEQ ID NO: 50217 - DNA, 273 bp, Zea mays
ataggctatcactgtggacaatggaacacagtttgactccgaagctttcagggatttctgtgaccaaattggtacgaagatccatttcgcatcagtcagagcacccggagtcaaatggactcgttgaaagagccaacggcattataatgacaggaataatgaagctaatcttcaatcaactcagaggaaaatggccagatcagctaaccaaactggtgtggagccacaacacgacaacatcaagatctacaggcttcactccattcaagttgt

SEQ ID NO: 50218 - DNA, 272 bp, Zea mays
atgggcgtctgggaagacatcttactgtgtgaccaagggtgttcctcgtccctccgttccaagacaaaacaaacctcgccgtgtggacttgtactactctagctggtgcatccgtccagttgagtcgagaaaaggcgacggtgcaatgagtgcatgcgaggtgctcttgttccaccacgaagacatcggggattccatgggagatcgcgaagcttggcgtccggcaggggatgtggggctgcgtcaagaggatagatcctggccttcgggcg

SEQ ID NO: 50219 - DNA, 271 bp, Zea mays
tcaagaacggccgcctcgccatgttttccatgttcggcttcttcgtccaggccatcgtcaccggcaagggcccgctcgagaacctcgctgaccacatcgctgacccagtcaacaacaacgcatgggcctacgccaccaacttcgtccccggcaactaagctcaacggctatgctatgcgacttcattgtctttcggatcggagagggtgtacgtacgtggattgattgatgctgcgagatgcatgtgtgtcttttgtttcacgttgcattg

SEQ ID NO: 50220 - DNA, 265 bp, Zea mays
caccctcctcatgtacatacgcggcgcgacgagcgtgcagtgttcttgctgccacactgtgaacctggctatggaagcaaatcaagtcgcgcatgtgaactgcgggaactgccgcatgctgctcatgtaccagtacggggctcggtccgtgaagtgcgcggtctgcagttttgtgacatcggttggaacctcacctggtgcagagcagaagcccagcagctgagctgatagtgtccctgaaagtgctgtgagaccacctatgaaa

SEQ ID NO: 50221 - DNA, 271 bp, Zea mays
tattgttccagcagtaactgagcttattgctgctcaatttctatggctagactatgacgaccgcacaaaacccatttatctgtatataaactccactggaactatggacgaaaataacgagcttgttgcatctgaaactgatgcttatgcaattgctgattttatcaatcgaagtaaatccaaggtttacacaatcaatcttagcatggcatatggtcaggctgcgatgcttctttcccttggtgtcaagggcaaaagaggagtgctgccg

SEQ ID NO: 50222 - DNA, 271 bp, Zea mays
ctctttccccgagctctcgaaaccctaggtgcgtgccgaccggaggcggcggcgaggcgatggcgatggacccggacgcggtggcgaaagccttcgtggagcactactaccggacgttcgacaccaaccgcgcggcgctggtggggctgtatcaggagacctccatgctcaccttcgagggccagaagttccagggcccatccgccattgccggcaagctcggatctcttcccttccaggcctgcgagcaccagatcgtcaccgtcgactg

SEQ ID NO: 50223 - DNA, 268 bp, Zea mays
cgactcagcgagcgagagcagcacacactgcacgcagctagctaggagcagcagcagcggcggcgatggcggcctccatgatctcctcgtcagctctggcggtggcgcctcagggcctgccgcccctcggccgccgcgcctcctcattcgccgtcgtctgctccaagaagaagatcaagaccgacaagccctacgggattgggggtggcctgaccgtcgacgtcgacgccaacgggagatagggcaagggcaagggcgtgtaccagtt

SEQ ID NO: 50224 - DNA, 265 bp, Zea mays
tagcgaactacgaagtttggaaagggatcaagtagagagcgacctaacgtttgctggctttgcggtcttcaactgccctataaggggtgactctggtgctgttttacaagaactcggacaatcttcccatgacttggtcatgatcaccggagaccaagcgttgactgcctgtcatgttgctagccaagtacatatatcttccaaacctgttttgatcttgacacggatacagactggcggttttgagtgggtttcgccagatgaa

SEQ ID NO: 50225 - DNA, 268 bp, Zea mays
caggacttcaagaccgacctccgcttccagagctccgccgtcgccgcgctgcaggaggcgtccgaggcctacctcgtcgggctcttcgaggacaccaacctctgcgccattcacgccaagcgcgtcaccatcatgcccaaggacatccagctcgcccgccgtatccgtggggagagggcctaggcgtcgtcccggtggaggtggaagtagtagtggccgtttctgtcatcactgtctggctagaaggtgtagagatgtgccgggttct

SEQ ID NO: 50226 - DNA, 266 bp, Zea mays
ggcaattgctagcactcgtacaagaagcaaaccccgcagagatcttaattactagctagtcgcttaattcgatccttcacatggagcatgtggcaaggctggcatcgcagcgtgcagtggtgatcttcagcacgagctcctgctgcatgtgtcacactgtgacgcagctgttccgcgagctaggggtgaacacgatggtggtggagttggacaaggacccgcgggggaacgagatggagaaagggctggccaggctactgggccgc

SEQ ID NO: 50227 - DNA, 268 bp, Zea mays
accagttgatacatgtcttgtgacttgtgaagtgtgttcctatctgcatcaccttccttcgccttgcaaccctttggctagttcattcatacgaatggattattctaatttgcgtcgccaagctgcatccatgaaaaagactctctttgatcaggggtacctagatgagcaattttgccaggtggaagacttgcaggatgaagctagtcctaatttcgcggaagaggttgtcactttgtttttcaaggactcggccaggctaatatca

SEQ ID NO: 50228 - DNA, 277 bp, Zea mays
cgggcccttggtgtcgaaatggggttccgctacgttgcgtctgggccaatggtccggtcttcctacaaggcaggtgaattctacatcaaggctatgatcgaagcggacgatgccaagggaaccgctgcagactcaagtgcataaccgcgctagcacctcccggccccacccaccccttgacttggttgtgctgcaaataagctcttcactgcttttgtagtcagagacatgtcgattttttttgtaaccacacattcacttctattttttttttgtc

SEQ ID NO: 50229 - DNA, 274 bp, Zea mays
cggacctaggtcgcggcgacatggccaaacgtaccaagaaagtcgggatcgtcggtaaatacgggacccgctatggggcctccctccggaaaatggtgaagaaaattgaaatcagccagcacgccaagtacacttgctctttctgtggcaaaaccaagatgaagagacgagctgtggggatctggcactgtggttcctgcatgaagacagtggctggcggtgcctggacgtacaataccacttccgctgtcacggtaaagtccgccatcagaag

SEQ ID NO: 50230 - DNA, 272 bp, Zea mays
aacaggtgcagttgcagaaacttgtgtatcaagttggagcgcttcctacaaaggttgtatgcctcacacaggtggtaactgcagatgaattgaaagatgatgaagagtatgaggacattatggaagacatgaggctagaagcaggcaaatatggtaatttggtgaaagttatcatcccacgccctgaccccagcggacagccagttgtaggagttgggaaggtgttcctggaatatgcagatatcgatggtgctgccaaagcaaagacagcg

SEQ ID NO: 50231 - DNA, 270 bp, Zea mays
ctcagtgctgcagcaactccagactgaggtctaccgaggggctcaaacactctacgtgcccaattgtgaccatcgagcgctctaccggaagcggcagtgccgtgcctcccaggggcagcgccgaggtccctgctggtgtgtggatcggatgggcaagtccctgccagggtctccagatggcaatggaagctcctcctgccccactgggagtagcggctaaagctgggggatagacgggctgcagggccactggaaggaacatggagctgt

SEQ ID NO: 50232 - DNA, 242 bp, Zea mays
gctagttgcaagcaccagccgaccaccaaacgatagcgcacgcggacaatttaacagcatcaggtttaggccctgctgccgtcgtcgagcgcccgggccaccgcacacctgaaagcaatggagatcgtcgccacgcgctccccggcctgctgcgccgccgtgtccttctcccagtcgtacaggcccaaggcgtccaggccgccgaccacgttctacggcgagtcggtgcgggtgaatacggc

SEQ ID NO: 50233 - DNA, 266 bp, Zea mays
ttggaagcttaatttcatgtgaatccttccatgctgatgtacatgctggaaacctatggttgctccgtgatgggcgaattggttttattgattttgggattgttggtcgaatatctccaagaacttgggcagctatggaggtctttttggcttcttttgcaactgaggattatgatgctatggcctctgccctctctgaaatgggtgctacagggaatgatataaatactaatgaatttgcaaaggacctgcgaaagatattctca

SEQ ID NO: 50234 - DNA, 244 bp, Zea mays
aagacggcctccagcttcgtaggcttgccctcgcctacaaggtgccaattatcacaaccgtcgacggcgcacgtgcctccatagatgccatcaagagcttgaaggacaagtcgattgagatcctcgccttgcaagattacttccagactgccgatgcttcggcagatttacaagcagcggcacagaccaccccttagtgctgtcttccttttccatgtactgtgatcctagctcgagccaaaac

SEQ ID NO: 50235 - DNA, 258 bp, Zea mays
ggaatatgtggtctttacgaaaggaaaatcagaaacatcaacccgatggtcaggaacttgacttatgatatcggtgacctgtacaacttcatcgatggcctgaccgacataagtgcactggtgtacgacgattcacttcacgctttcctgccgtattgaccgccattggataaaccagaagtggtttcagcacttgaagcggctggcgcacagtagggtatcatcaccgctggcttttgacgtgcatgcgtcgtgggg

SEQ ID NO: 50236 - DNA, 262 bp, Zea mays
aaggctgctcggggtaacagcagctcaatatttatccggggctttgataaaaatctttcagaggatgcgatccggagctctctcgaacaacattttagtgattgtggtgagatgacaagggtctctatcccgactgatcatgaatctggtgcaataaaaggaatggcttacatagacttcaaggatcaggactctgtgtctaaagcccttgagctcagtggctctgacattggtggtggctatgagctttatgttgatgaag

SEQ ID NO: 50237 - DNA, 267 bp, Zea mays
atcgaagctgccaaaacaaccaacgcaaagaccatgggtcccgttcctctgcccactaagaggagagtctattgtgtgcttaactctcctcacgtgcacaaggactcacggttccatttcgagatccggacgcatcagcggctgattgatatcatgtatccagctgcccaaacaattgattcgttgatgcaactccagctcactgccggtgtggatgttgaggttaagctatgattctgttggagctgaacttttcgaagtttgatg

SEQ ID NO: 50238 - DNA, 266 bp, Zea mays
ggggaagggcgcgctggcgcagctcaacatcgagacgggggtgcccatcaacgagatagagccgctcgtcatcttcaacgtcctcttcatcttcatcgccgccatcaaccccggcaatggcaggttcatcatcggcgaggaagactgctaggctgctggctgctgctgctggcctcggacatgagtcgtgtgcgtttacttttacctgtgactgtgcgtctcggtgcgcgcgcgtaagtgctttgctgtgtatcaattactcgtga

SEQ ID NO: 50239 - DNA, 266 bp, Zea mays
caagcccgccggactggtcaagctgaacccggcgagcgagtacccgcccggcctggaagacacgctcatcctcaccatgaagggcatcgccgccggcatgcagaacactggctaggcggcttctcttcactcacctgcagagtgcaccgcaataatcagcttccggatggtggcgttttgtcagttttggatggaaatgccgaactggcagcgtctgttttccctatgcatatgtaatttcctgcctctttatattcactcttgtt

SEQ ID NO: 50240 - DNA, 251 bp, Zea mays
gtttcgctgccccgattcgccacgaagccgcactgtgagagcgggacgcggcccgttgtcctcggcttgtacgcaatccttccgtcgctgcgaactcgatccctcgtgttcgccatggcccccagcgtcgccgtggacaaccacaaccccaaggtcttgaaatgtgagtatgcagtccgtggccagattgtcatccatgctcagcgcctgcagcaacaactacgaacacaaccaaggtctcttccttttga

SEQ ID NO: 50241 - DNA, 260 bp, Zea mays
ctgtgctcgagtgtaaggtcagttcgtaatacaatcaatctgcgtggaacaatttgatatccttagatatgttagtgagatcatttcgacaatgaaagttgagaacagaagttacaatgtcagtgcccatttttttttgttttgttattagatgctaacgccgtgccacaaatcagctcgtgaatttgaacccagattttcaaatacagaaatttaagtgattttgagaggaaaaaaaaaaaaaaaaaaaaaaaaaataa

SEQ ID NO: 50242 - DNA, 149 bp, Zea mays
cggggtcgacgagctatcaagaaggctcgtggcctagatcagtggccctcattgcactttggagggtgcgctggtttaccatctccccaagtgggagagtggacgtcataatttgtggtagaggggtacgcgttcgcgcggcccctgtt

SEQ ID NO: 50243 - DNA, 258 bp, Zea mays
cctgctcagctcagggcgcaacaaaaccctcctccctaactgccccctcgcagacgagacgcgtgtagctagggttttggcctcgccgcgcacgcctcctgaagcttctagacgttcgatgaggaggagaggctcccgccgccgccgcagccatggcgtccaccaaggtgcagcgtatcatgacccagcccatcaacctcatcttccgtttcctccagagcaaagcgcgcatccagatctggctcttcgagcagaagg

SEQ ID NO: 50244 - DNA, 260 bp, Zea mays
aaaatggacatgttcaagtagttcaattggtataaagggaacaattggatatattcctccagaatacggagtaggtggccatgcatcaacatgtggggatgtttatagttttgggattgtgttgttggagattttgacgagtaaaaggccaacagaccctatgttcgaagatggcttaaacatcatcaactttgtggagaacaactttccgaatcaaatatttcaagtcattgacgctcacctcctggaagaatgcagga

SEQ ID NO: 50245 - DNA, 261 bp, Zea mays
tcgccgtgcaggccgccgccaccggcaaggggccgctcaacaactgggccacccacctgcgcgacccgctccacactaccatcttcgacacgttcggagggtcctcttaagcccgccattgctccgccccgtccatcgaccggaacgtgttcttggattaattaactacgatctctatgagcctggggatggatcaacccgtcgtgcgtggtctcgttttgtgatgagtgcggagagagaggatgacaagatcgatccttt

SEQ ID NO: 50246 - DNA, 260 bp, Zea mays
attccaatttccaagagagacagagagagcgtgtggatttgggggagcttcttcactggagagtggagagctccggtagcgaggcgaaggaaggaagagggaggaggggaatcagagaggtctccccgatggcggactggggccccgtgatcgtagcgacggtgctgttcgtggtcctcacgccggggctgctctgcacgctgccgggccggggccgcgtcgcagagttcggcagcatgcacaccagcggcctggccatc

SEQ ID NO: 50247 - DNA, 258 bp, Zea mays
attttgtccaacatagcagtaccccaagatcccagttttgatgatatacagcgtgaccgggagtgcgtcatgtgcttgagtgaggagatgtccgtggtgttcctcccttgcgcccaccaggtggtctgtgccaaatgcagcgacctccatgagaagcaagggatgaaggaatgcccttcatgccggacccccatccagcgcagggtgcgcgcccgccccgcaggttgctagatttcacatataccatttggattttat

SEQ ID NO: 50248 - DNA, 171 bp, Zea mays
cggctaacaggggcccgagctatggcttaagccgagacgtgcaggagaagatcgagcagacgtatgatgcggccctggagaagaagctggtggactggatcatcctgcagtgcgccgaggacatagagcacccgccccccgagcagccccagtttcagaacatggttaatg

SEQ ID NO: 50249 - DNA, 258 bp, Zea mays
ctgcaactggaacaacgccgggctgcgcgagttcggaacgacgtcgcgcatgcccggtggtggaaggcgcacgacaggatgccccggaagctccagtcctactgcctgctgaggtcgcggccgaaggccaggctggagtgggaccggaggcaggccgagacggccaactctcaagatggccactggcgcctcaacgtcacggacaccaggctcaagacgtgctttgagaagttctgcttctgggagagcatgctctgg

SEQ ID NO: 50250 - DNA, 261 bp, Zea mays
cgcgggacgcaagatccgcggtgagctcggcgatgtcaagggcgcctccgaggaggtgaagcagctggaggaccaggcggcggccatcatgaaggcggcgcgcgccagatcgcggcggcgcttaacaagatgaagaaggagaccaccgcggagctggaggccaagctggacgagggacgcagccgtgtggaggccgagctcgtagaggcgctcgccaacctcgaggcgcagaaggaggaggctgttcaggcgctcgacgcc

SEQ ID NO: 50251 - DNA, 266 bp, Zea mays
ggactaaacactggtgcagctggtgtcgatggccctgctgcaaattcagttaaaaggaagaggaagaaccagttcaggggtatccgccggcgcccgtggggcaaatgggctgctgagatcagagatcctacgcaagggcgtgcgcgtctggctcggtacattcaactctcccgaagaagctgccagagcttacgacgccgaggcacgcaggatccgcggcaagaaggctaaagtcaacttcccggatgaggttcctacggcggttt

SEQ ID NO: 50252 - DNA, 263 bp, Zea mays
gcgaacgcgcgcacagcagctgctgcaggtctccttccatggcgaaggacatcgaagcatcggggcccgacgccgacgagttctcggccaaggactacaccgaccctccgccggcgccgctcgtcgacgcggatgagctcaccaagtggtccctctaccgcgcggtcatcgccgagttcatcgccacgctgctcttcctctacatcaccgtggccaccgtcatcgggtacaagcaccagacggacgcggcggcgtcgggcccc

SEQ ID NO: 50253 - DNA, 261 bp, Zea mays
cagaaacttttggctgtggttggcgatgatcgagatgctcttcttgtggattcacgaaatggaaaggtaacctctaccctagttggccatctggactactcatttgctacggcatggcacccggacagccggacattcgcgaccgggaaccaggacaaaacctgccgcatctgggacactcgcaacttgtcgacttcacttgcagtactgcggggcaacatcggcgcgatccggtgcatccgctactcctccgataggcgg

SEQ ID NO: 50254 - DNA, 258 bp, Zea mays
cggagtgagttacgagtacgtcgaggaggacgtatccaacaagagtgagctcctgctcaagtccaacccggtgcacaagaaggtgcccgtgctcatccacaacggtaagcccatctgcgagtcacccgtcatcatgcagtacgtcgacgagctgttcgccggccggccgatcctcccaaccgacccctatcggagcgccactgctcgcttctgggctgcctacgccgacgacaagctgttcccagcgtggtacggcat

SEQ ID NO: 50255 - DNA, 207 bp, Zea mays
cggctcgagcttgtttgcgaggtcgagagagagaggatgtcgtgctgcggaggcaactgtgggtgcggctccggctgcaagtgcggcaacggctgcggagggtgcagcaagatgtacccggacatggctgagcaggtgaccaccaccacccaggctactcatcatgggtgtcgcaccatccaaggggcacgccgagggcgggttcga

SEQ ID NO: 50256 - DNA, 261 bp, Zea mays
gtcgtcgtcgcctacgtcgtcgtcgcgctctgctacttccccgtcgcgctcatcggctactgggcgttcggcaacagcgtccaggacaccatcctcatcacgctcagcaagcccaggtggctcatcgcgatcgccaacatgatggtcgtcatccacgtcattggcagctaccagatctacgccatgccagtgtttgacatgatagagacggtgctggtgaagaagctgcgcttccctcccggtctgacactgcgtctcatc

SEQ ID NO: 50257 - DNA, 259 bp, Zea mays
ggcatgagtgatggacattctggttggctgcccctgtctctttatggcaattcacacacttccagttcggccaagtcccacactactggtagctatgcttcatctttgccctccaacctgtgccgccatttctcttttgctgagatcaaggctgcaacaaacaactttgatgagtccctcatcctcggtgtgggtggatttggcaaagtttaccgtggtgaggttgatgggggaacgactaaggtggctatcaagcgtg

SEQ ID NO: 50258 - DNA, 256 bp, Zea mays
ctactgaaggggtaactatggctgggtatggtttcgggatcccgatcagccgactctacgctcggtattttggcggcgacctgcaaatcatctacgatggaaggatacggtaccgatgcttacctccacttgtcgaggctgggagattcagaggagcccttgccttgacgacatatttttgtggacctccagtaccactcttctcctgtcaatatgtggctcgatcttcttgtaatccagtgctggcctcgaccta

SEQ ID NO: 50259 - DNA, 258 bp, Zea mays
caagtcgccctcggtatcatggttcctcaagaaggcagcaggaatcgaaaccgccagcactacgcccaagccacgtgaatgtatcgtccctcaccctccgccacgtatacgagattgcaaagttgaagcaggctgaccccttctgcaagcacatctctcttgaggcgctgtgcaagtccatcattggcacagccaactctatgggtattgcgattgttaaggatctatgagcagcaatgccagccttttagtcatgaa

SEQ ID NO: 50260 - DNA, 260 bp, Zea mays
cattgggatgctgagggtacaagttgcagccttgtcctggaagacaaccctcttgttgatttcgttgagctccctgacacttgccaaggccttcagtattgcaatttgttaagtggagttattaggggggcattggaaatggtgtctatgaaggcggaggtgacatgggtgcgtgacatgcttacgcggggacgatgcctatgagatgcgggtgaagcttatcaagcaagtcccggaggaatacccctacaaggatgatg

SEQ ID NO: 50261 - DNA, 260 bp, Zea mays
cccaccccctgctcacccacccgtcccctcctgctcgcccatggctcccatcgctgtcggcgacgccctccccgacggccagctcgggtggttcgacgagaacgaccagctgcagcaggtctccgtccacgcgctacgccgccggcaagaaggtcatcctacttcggcgtccccggcgccttcaccccgacctgcagcaaccagcatgtgccaggcttcatcacacaggctgagcagctcaaagccaagggtgtagacga

SEQ ID NO: 50262 - DNA, 258 bp, Zea mays
ctggattactgatcctatgcatggaaacaccatcaaggccccttgtggcctgaagactcgtccattcgactcaattctggctgaagtgcgcgcattcttcgacgtgcatgatcaagaaggaagtcacccaggaggcatccaccttgacatgactgggcagaacgtgaccgagtgcattggtggatcacggactgtgaccttcgatgacctgagcgaccgataccacacccactgtgacccaaggctgaacgcctccca

SEQ ID NO: 50263 - DNA, 257 bp, Zea mays
ctggtgaactaccagccgtaccaaatgggcaggatgcggttcctgtggggcgcggacgccgaggagttcaggccggacaggtggctggacgacgccggcgtcttcgtccccgagagccccttcaagctcacggctttccaggcgggccctcgcgtctgcttgggaaaggaattcgcgtacagacagatgaagatcttcgcggctgtgcttctctacctgttcaggtttgagatgtgggatgccaacgctaccgtggg

SEQ ID NO: 50264 - DNA, 253 bp, Zea mays
tctggattcagcgccattggatgcagaaaaaatcgagtccattgaccttgcatgtccattgtgtcgtggcaaggtgaaagggtggacagtggtagaaccagctcgaagctacctcaatggaaaaaagagaacatgcatgcaagacggttgctcattcgtggggacctacaaggagctaccgcaagcatgtcaagttggaacaccctcttgcaaagccaagggaagttgatcctgtccttgagcaaaaatggag

SEQ ID NO: 50265 - DNA, 251 bp, Zea mays
gctgctcacccgatctcgcgctaccggcagcgatctgagatccaacgaactacgctttttcatcgagatggtgcttgtactgcatgctcacagtggtaacaaaaatgcattcaaaacactaattgccgccgaatacagaggtgtcaggttgagttggtgaaggactttcacatgggtgtctccaacaatcatacagagttcctcacgctgaaccctattgggaagattcctgtcctggagactcctgctgg

SEQ ID NO: 50266 - DNA, 255 bp, Zea mays
cgcgtctggttcacggccggctcccagatcttcagcgagggcgggctggactacctcggcaaccccagcctgatccacgcgcagagcatcctcgccatctgggcctgccaggtcgtgctcatgggtgccgtcgagggctaccgcattgccggcgggccgctcggcgaggtcgtcgacccgctgtaccctggcggcagcttcgaccccctcggactggccgacgaccccgaggccttcgccgagctcaaggtgaag

SEQ ID NO: 50267 - DNA, 255 bp, Zea mays
gcaagctactacactgggactttcaacacggtgaacagatcggccgacgggcgctacgtggctgtgtccagccgcgggaacttctatctgacgtgggagcccgggcagccgttctggcaaccccacaacagggcggtggcacggaggattcagaacatggggtggagagcggacggtggactttggctgctggtgcgcggtggtggcctcttcctcagcagaggaaccgggataactgaagattttgaggaggtg

SEQ ID NO: 50268 - DNA, 149 bp, Zea mays; identical to SEQ ID NO: 50242

SEQ ID NO: 50269 - DNA, 249 bp, Zea mays
cacaagtaaaatgttgggatcttgaacaaaacaaggttattaggtcctaccatgggcatctgagtggtgtttactgcctagctctccatccaacaattgatatcttactgactggtggccgggattcagtttgcagggtgtgggacatcagaacaaaagcacatgtttctgctttaacagggcatgacaacactgtctgttcagtgtttgctcgtcctacggatcctcaagttgttactggttcacatg

SEQ ID NO: 50270 - DNA, 278 bp, Zea mays
cagtggagagagcgagctgagtggttgtgtggtcacgtctcggaaaccagtagcgcttgcagcatggctgaccaactgactgaagagcagattgcagaattcaaagaagctttttcactatttgacaaagatggtgatggaactataacaacaaaggaattgggaactgtaatgagatctcttgggcagaattgcacagaagcagcgttagaggacatgattaatgaagtagatgctgatggtaatggcacaattgacttccctgaatttctgacaat

SEQ ID NO: 50271 - DNA, 275 bp, Zea mays
ctgcagttgtagctatgcttgctaaatcaggtttcacggcggcatttacactgatttttgtatctgatattggagataagacgtttttcattgctgcacgactcgcgatgcagtatcaaagagcactggttttacttgggttcatggctgctctctccctgatgactattgtgagtgttatacttggacggattttccagtctgtgccagcacagttccaaacaacgctacccatagggggttattctgcaggtgctctgcttgcattctttggt

SEQ ID NO: 50272 - DNA, 242 bp, Zea mays
gccctatccatcccatcaacctcagctaaggtccccagcggcggcgaggcgatggcggcgctgtgacggtgtacggaccgatgctctcatcagctgtggcccgcgtggcggcctgcctcctggagaaggacgtgccgtgccagatcgagccggtggacatgtccaagggctagcacaagtcgccgtccttcctcaagctccagcccttcggacaggtccctgccttcaaggaccacctcaca

SEQ ID NO: 50273 - DNA, 269 bp, Zea mays
gaagaagaatatagaagagatacaaggggaagacagctatccatagggccaacaactgctgatgttcaatgggaagggcttgaaagatgagaggacattggaagagaataaagtcaatgaggataggtttctagttgtcatgcttagtaagggtaaaacatctggttcaactggaacttcatcttcccagcactcaaacactcctgcaacaaggcaggcacctcctctaggggccccacaacaagctcctcaacccccggtggcaccaa

SEQ ID NO: 50274 - DNA, 266 bp, Zea mays
gatgattcatcgatagtggctgaggcgagagtctccaagtgtcgtctgttcgctcgtggtgggaattccgctgagcgagcgagtgaatcctcctcttcctagccccggcgtgaggagcgccggcgatgtcgaccggcggcaggaagatgaggacggcgtgcgtgaccggaggcaacgggtatatcgcctcggcgctcatcaaggtgctgctggagaagggctacgccgtcaagacgacggtcaggaaccctgatgacatggagaag

SEQ ID NO: 50275 - DNA, 263 bp, Zea mays
cggaacgggcagaggatgtggctggtccggagaacgacctcgtacctctacggcttcgtcgacaccgtcagggactcgctggggctgtccaagatgggcttcgtggtgtcgtccaaggtgagcgacgaggacgaggccaagaggtacgatcaggagatgatggagttcgggacggcgtcgcggagtacgtgatcgtcgcggccgtcgcgctgctcaacctcgtgtgcctggcagggatggcggcggcactggatgtgttcttc

SEQ ID NO: 50276 - DNA, 264 bp, Zea mays
cggctcgagggccacttcagcaagcgtcccgaggagattggagctggtgaccagggacacgtgttcgggtatgcgaccgatgagacccctgagttgatgcccctcagccatgtccttgccaccaagctaggtgctcgtctcactgaggtccgcaagaacggaacctgcccctggctcaggcctgatgggaagacccaggtgacagtcgagtaccgcaatgagggtggtgccatggtccgcgtgcgtgtccagaccgtcctcatt

SEQ ID NO: 50277 - DNA, 265 bp, Zea mays
cagcgactcagcgatcgagagcagcacacactgcacgcagctagctaggacgagcagcagcgtcggcggtggcggcctcgatgatctccgcgtcagctctggcggtggcgcctcagggcctgccgcccctcggccgccgcgcctcctccttcgccgtcgtctgctccaagaagaagatcaagaccgagaagccctacgggattgggggtggcctgaccgtcgacgtcgacgccaacgggagaaatggcaagggcaagggcgtgta

SEQ ID NO: 50278 - DNA, 259 bp, Zea mays
agcgagaatgaagactattctcagcaatcagactgtcgacattccagaaaatgtcgacattactctgaagggacgcacagttatcgtgaagggccccagaggaaccctgcggagggacttcaatcacatcaatgtagaactcagccttcttggaaagagaaaaaagaggctccgggttgacaaatggtggggtaacagaaaggaactggctagcgttcggactatttgtagtcatgtacagaacatgatcaagggtgtt

SEQ ID NO: 50279 - DNA, 257 bp, Zea mays
tagctctggcggaatgctgtgatgtaggccaatgcagtcctggattgggtctactgcatcatgcgatctggagtagacagccaaaggggactatcctctggaggctgcacggcatgagcagctgattgcgcgtgaggcagatgctgccatctaccacttgcaattatgtgatgaactccgccgcctggcctcgttaccagctaccccacagaagccaccgccgtgggttccgttgatgcctccttcaagttctgcag

SEQ ID NO: 50280 - DNA, 262 bp, Zea mays
cagagggagatatttgtagtgcaggagtgattctgtacatacgtctttgtggtgtccccccattcggggcagaaacggaacagggtgtgtctcaggcaatcattcgatctgtcattgatttcaaaagagatccatggccaaaggtgtgtgataacgccaaagaccttgtcagagaaatgctgaatccggaggcaaaacgacgattgacagctcaccaagtgcgtttgtcagccatggttgcagaacattaagaatgctccaa

SEQ ID NO: 50281 - DNA, 287 bp, Zea mays
atctgttgaccggactcatcttgctgaattccaccagatagcgggacttatctgtgattatgggttgacacttggtgatctgattggtgctttagaggatttcttctcaagtctaggcatgtccaagctgcgtttcaagcctgcctacaatccatatactgaacccagcatggaaattttcaggtaccatgatagtttgaagatatgggtggacattggtaattcaggcctgttcatgccagagatgttgcttcccatgggactgccagaaggtattactgttattg

SEQ ID NO: 50282 - DNA, 254 bp, Zea mays
cacagtggaatggagagctcggtctgaatctgcacaggagctgatgctgagtggtgtcgggggcttcatgctaggcctactcttccttggggccgagctgttcatctacttcaggaatcagaaaggacactctgaacttcagccaacaggattcctgagctgcaatgcagatgaccagattcatggaagaaccttctgtcgcagctttgcagactgttaagcgttcctgcttggacgttattcttccacaagag

SEQ ID NO: 50283 - DNA, 248 bp, Zea mays
gtctggaagctctatttgagcagctactactccagaacaaccgtcaaggcccaccacctgctccacagtcagctattgactccatgcctgtggtaaagataaatcgcaggcatcttgacgaagatccacagtgtgcaatttgcaaagacaaattcgaggttggagcagaggcgcgggagatgccgtgcaagcacttataccatactgactgcatcatcccctgagctggttcagcacaattcctgccc

SEQ ID NO: 50284 - DNA, 288 bp, Zea mays
gacaagttgttgctggcacgatgtactatctcactattgaagtgaaggatggcgtagtcaagaagctttatgaagctaaggtctaggcgaagccatgggagaacttcaagcagctgcaggaattcaagcctgttaaaaagggtgctagcgcctaaggatctgtcgtctcactgtgcaatttactgcctaaagcgcaaaactaagttacagaataaggcgctacttcgtaacatgccagagcatgcaccctcgcgtaatttcataaaatcacagggctcttaatgtaat

SEQ ID NO: 50285 - DNA, 284 bp, Zea mays
tggccgcgcacctatctggcaagcgacgccgcggcctcgatcggtgtcggaggcgaacacccccatagcggcggctggcggcggcgcaggagggacggtatccttcaagatcatcctcacctccgaccccaagctccctttcaaagtgttcagcgtacccgaggcggcgcccttcaccgcgatgctcaaatacgccgcggaggagttcaaggtcccgccccagaccaatgccatcatcaccaacgatggcattgagctcaacccccagcaaaatcaggcaacgt

SEQ ID NO: 50286 - DNA, 234 bp, Zea mays
cggggccctgactcacaagatcactcacctgtccacactacagataaaatctctaaacgtcaagtgcctgacgaccccgtagcacgcttcaaggcacatttattacttcgtagacgaacccgaagactcggagccccctgccatattcacaaatgacaccttgtttatagctaactacggagaattctataaaaagactacagataagatatgtaaagctctactaaaaatctt

SEQ ID NO: 50287 - DNA, 138 bp, Zea mays
gtaatttatataaactttgattagctggaacgattccgggtgcaatccgacggaaacgaacaaggccttactaatttttcatccctgcggacggaagcttgatttctccgttggtgatgctacaaatgtgatcagatc

SEQ ID NO: 50288 - DNA, 250 bp, Zea mays
gtccttcctgcggccgaacactctttgaccttcaggaaatcagcgctgagattagcgaaaagacctctcatctgccaggtgtttcgatcgctatcatggattatattatcaatggaccaggagcgctgtgtgatgccgatttcggatacgttggcggcgctcccggaaagatcgacctttatattggcacgaccgttatgcagcgcgccatcgccatggacggtgcaactgacgccttgatccagctgat

SEQ ID NO: 50289 - DNA, 107 bp, Zea mays
gtatcgttgggcggccctcttggttgcccgtgccgggatttgcgctcaaagcggtgctaggagaaggcgcttctgtggtgttggaaggacaaaaggttgttccggcg

SEQ ID NO: 50290 - DNA, 104 bp, Zea mays
gtctcagtgaccgaagtctcatttggaactctgacttgatagagaccctggaactggaaaatctgttgataaacgcatgcataactatgtattcggcagaggct

SEQ ID NO: 50291 - DNA, 120 bp, Zea mays
agtggcggggaacttccccgagtggacgctctacatccagaccatggaccccgagatggaagaccgcctcgacgaactggacccgctggacgtgacctagacgtggcccgaggacgagtt

SEQ ID NO: 50292 - DNA, 116 bp, Zea mays
tgacttcccacgctgctgtggtcgcacgtgggtgggggaaatgctgcgtctcgggatgctcaagcattcgcgtaaacgatgcggagaagctcgtgacgatcggaggccatgtgctg

SEQ ID NO: 50293 - DNA, 136 bp, Zea mays
ggagttcttgcaagtcggccaggatgtctcaggctgagtttgagaaagctgcagaggaggttaggcaccttaagaccaagccatcggatgaggagatgctgttcatctatggccactacaaacaagcaactgtggg

SEQ ID NO: 50294 - DNA, 279 bp, Zea mays
ggcatactttcctggggaataatgtggcctctaattggcaaccagaaggggaattggtacgacgccagtctcccagaaagcagtctccatggactgcagggttacagggtttttatatccatcgcaataattcttggagacggcctgtacaacttcgtgaaggtgctcattcgcaccaccgcggggttcatatcgatgatgaagaaaaacagcacgcttccggtttcaaacaatgcagccccatcactgaaggtgtttccttcgatgacgaacgccgca

SEQ ID NO: 50295 - DNA, 249 bp, Zea mays
tgtaggatattcctggactgactgatcctacagtgagtcgctgcctgggccacagaagagctagcagaatccgcaaacttttcaattgctctaaagaagatgatgtccgccagtatgttgtaaggaaggccttaaataaagatggtaagaaacctaggaagaaagcacccaagattcagcgtcttgttactccacgtgtcctggagcacaaacggcggcgtattgctctgatatgcgcgtaccaagatt

SEQ ID NO: 50296 - DNA, 271 bp, Zea mays
gtcggagatggcagaggtggaggagacactgaagcgactgcagagccagaagggagtgcagggaatcatcgtcgtgaacacagaaggcattcccatcaagagcaccatggacaaccccaccaccacccagtatgccagcctcatgcacagcttcatcctgaaggcacggagtcaccgtgcgtgacatcgacccccagaacgatctcaccttccttcgaattcgctccagaaaaatgaaattatggttgcaccagataaagactctttcctg

SEQ ID NO: 50297 - DNA, 274 bp, Zea mays
tgctgaaattattgtttctcctcctgttgtgtccttccgtgaaaccgttcttgagaagtcctgccgcactgttgtgagcaagtcacctaacaagcacaaccgtctgtacatggaagcgcgccccctggaggagggtcttgctgaggcaattgatgatggccgcattgggccacgtgatgatcctaaggtgcccccccagatcctctctcaagagtttgggtgggcaaggatcttgccaagaagatttggtgcttcggacctgagaccaccggcc

SEQ ID NO: 50298 - DNA, 265 bp, Zea mays
gtgctggccacccaaggccacacccaggtgctgattcaccagctgagccgtcgccgcagccagagtccgttccgccgcagccacggacaggtgcagcgagtggccttccaccctgcccggcccttcctgttggtggcgtcccagcgcagcaccgcctctaccacctgctgcgccaggagctcaccaagaagctgatgcccaactgctagtgggtgatcagcctgcggtgcacccctgcagtgacaacgtcatctgtgggagctac

SEQ ID NO: 50299 - DNA, 271 bp, Zea mays
ttcactaaccaggtcattgcccaacttgaactgtggaaggagaagagctctggcaagtatgagaagaaggtgtatgtgctccccaagcaccttgatgagaaggttgctgctctccacttgggcaagcttggtgccaagctgaccaagctcaccaagtctcaggccgactacatcagcgtgccgatcgagggtccctacaagcctgcccactaccggtactaggccacggcttgcagctcactcgggccgttgtgtgctatgaagttcgcta

SEQ ID NO: 50300 - DNA, 281 bp, Zea mays
cacgagtgcttctcctggacgaagccaccagtgccctggatgctgaaagcgaatatcttgtacaggatgcaatggactccttgatgaaagggaggactgtccttgtgatagcccaccggctctcgaccgtcaagagcgccgacaccgtcgccgtcatctccgacggcctaatcgtggagagcggcacgcacgacgaactcctggaccgcgacggcatatacacggccttggtaagaggcagctgcaggggccgaagtttgaggccaccagcagcatcagcg

SEQ ID NO: 50301 - DNA, 277 bp, Zea mays
ggttcatcgggctagatgttgagcatatcgatgaccggagactttgctgtggcactccgcctgattgcgaatggaaagctcaggcggggaacgtctgcgccgcgtcgttcgactggaggtgcagcggcatatgcaactccgagggaaggatctgggaggtccacaataagtgcgctgaaggcgagaaggcgctgtggaacgccactttctagcacacacacacaataaaaaaggaagcagcagcagaagctgctatataatagatcaaaccatttgg

SEQ ID NO: 50302 - DNA, 270 bp, Zea mays
tatcggcagccggccagccaagaggaggcccggcggcggcatcacgaccctgcgcgccatcccctggatcttctcgtggacccagaccaggttccacctgccccgtgtggctgggagtcggcgccgcattcaagttcgccatcgacaaggacgtcaggaacttccaggtcctcaaaggatttatacaacgagtggccattcttcagggtcaccctggactgctggaatggttttcgccaagggagacccggcattgcggcttgtatgacg

SEQ ID NO: 50303 - DNA, 270 bp, Zea mays
gtcgaactggcgcaaccgaccgccgccgcggctgcggtgaccaccgctgagcaggctcaggatctcatcgacgccgctaggtacgacgacttggaggacgtcgtcgccctgttctccgctggtgtctcgctggactccacagattcgcaaggccgcacagctcttcacatggcttctgttaatggtcaccttgctgtggtggaatacttgattcaaaatggacgaatgttaatgccaccaacatggagaagaacacaccactccactggg

SEQ ID NO: 50304 - DNA, 266 bp, Zea mays
gctccctcgacgagctgaagacaatagtggggcacgtcatcgtgatgatcctgctggtgaagatgttcgagaggagcaagatggtgacaatcgccacggggctggacctcctcagctactcgatctgcatcttcttgtcgtcggcctctctctacatcctgcataacctccacaagggcgacgacaatgaggagtgaggagagtgcaatataatgccgatctgtagctctatgacagaagagataatggttaggcttgggttcagc

SEQ ID NO: 50305 - DNA, 277 bp, Zea mays
tgtgtgttccatctctgttggggtggttggtgatatttgccgtgccttggaagataaaattttgcccttctgtgatcgcattatgactgttcttcttaaggacctatcaagctctatgctcaatcggtctgtgaagcctccgattttctcatgctttggagatattgctcttgctattggtgagaattttgagaaatacctaccatatgccatgccgatgcttcaagggctgctgaacttcttggtactcttgatcagagtgatgatgatatggttg

SEQ ID NO: 50306 - DNA, 261 bp, Zea mays
ggaaccgtgaaggcttggcccgcaggtaccgtaacccgaagccagcgtggtcggtcttcagggaagcgagctttgggcacggcgagctaaagatcgtgaactccacccatgcccactggacctggcacagaaacgacgacgaagagccggtgagaaccgatgacgtgtggataaactctcttgctggttcagggtgcatccaggagggcagctgtgacctgagtcgaggaagatcctgatgtctgcttgatgcttagcagt

SEQ ID NO: 50307 - DNA, 257 bp, Zea mays
gtaccggatcatgagcggcgccaccaccatgtccttcctctcgctctccaacaccatcaccatctccggcagcttctacctctacgcctgcatcgccgccgcagggtgggtgttcatgtacttcttcctgccggagacgatgggcaagagcctggaggacacctgaagctcttcggcatggtccgcgacgacgaggacgtcagcgacatccgtcgtccgtgcccactaagaagccgtctactgagctgagtgctcag

SEQ ID NO: 50308 - DNA, 184 bp, Zea mays
gtatatctgagcagcctccgctcaaaataccgatcaggacaaacaatgctgaatcgtggttgcttacgacataccttgacgaagagctcaggatctccagaggcgatggcagcagcatctttgtgctgttcaaggagggaagtactcttctatactgagatcgcaatcccgagtcgatgatcgt

SEQ ID NO: 50309 - DNA, 182 bp, Zea mays
  unsure (1)..(182): unsure at all n locations
tgccatcttccagtaattcgccaaaatgacgaacacaaagggaaagaggagaggcacccgatatatgttctctaggccttttagaaaacatggagttgttcctttggccacatatatgcgaatctataagaaaggtgatattgctgancatcagggaatgggtactgttcaaaaaggaatgc

SEQ ID NO: 50310 - DNA, 170 bp, Zea mays
gtcattcgagaaggcttctgggaagaaaatccctctggtgttcgctgggcgaagacccggatgacgcagagatcgtctacgccgcatatgccaaggcagagaaggagctcaaatggacggccaagtacgggatcgaggagatgtgcagagatctctggacctgggcgagc

SEQ ID NO: 50311 - DNA, 180 bp, Zea mays
ttgtagtcgcggagacggggtgctggtttgcgtcgtagtctcctgcagcgtctggggtttccgttgcagtcctcggaaccaggactcggcgtggctagcgagttatggcgacgaagccgtgtgcgtgctgaagggcgacggccagtgcagggcatcatcaatttcgagcagaaggaaagt

SEQ ID NO: 50312 - DNA, 182 bp, Zea mays
gtgatcttcacgttttacaaggcacaaggtctccctgttggtgcttcattggtcgaggaagacaaactcgagcttgcgacgtctctccttgcaaaggctaaggaaaagggcgtctcccttatgctgccaactgatgttgtcattgctgacaagtttgcccctgatgctaacagccagattgt

SEQ ID NO: 50313 - DNA, 174 bp, Zea mays
gcacgtctccaccgctccgcggcacgccagggtatgttgatccagagtaccaccagtgctaccagctgacggacaagagcgacgtgtacagcttcggggtggtcctggtggagctcatctcgtccaagccggccgtcgacatcacccggcaccgcgcgagatcaacctggccag

SEQ ID NO: 50314 - DNA, 179 bp, Zea mays
gtagattctcaaggacttcaagaagggcttggtgcaaaacaaggacatagagaacctgagggcggaggtcgagaagttcgccacttcatttgacatgcctggcttcagggtgtctgacatgaagtacacagactagactgctgctgacttgggtgcatacgttgctcctgttacagtga

SEQ ID NO: 50315 - DNA, 251 bp, Zea mays
ggctctgcagaactcggtgctgaagacatggcaagggcgccctgagaacgtggaggcagcgcagaaggccctgctggtgcgcgcaaaggccaactcgctggcccagctcggtcgctacactggtgagggcgagagcgatgatgccaagaaaggcatgttccagaagggctacacctactaatgtgccagcgagatgtttccatgacataataataattgtagcgttttggtgttataaggattagtatttt

SEQ ID NO: 50316 - DNA, 156 bp, Zea mays
cgcccgtcgccgcctaccgcgagctcatcaacggggacctcgtcgtcgacgacaaggacatcggctactactagctgcgcttgttcacctgcttgcactgtgcatatatattgctgctgccgagctgggcgcttggatagtacgtcgggaaacatg

SEQ ID NO: 50317 - DNA, 277 bp, Zea mays
atccccagctgctttcgataagcttttcaatgacaagattcaggataaccttgcgctggtatacctgtcaagcatcacaaggacacaaatcagcatcgccgagaagttgaacactgctgctcaggcgctgtgactttggttgtggcagatctatctggttgaaacgtggatgtttggcctacgtgaccaattggtgacagggatgcattttttgttatttgttataaaaaatgggagagctggcaggaaagaaaagggttagtcaatgatgggatcc

SEQ ID NO: 50318 - DNA, 128 bp, Zea mays
caagatgaagcccagcatcatctttgtactttccctgctcctcatcttggagaagcaagcagctgtgatgggacaaaaaggtggatcaaaaggccgattaccaagtgaattttcccaatttccacaca

SEQ ID NO: 50319 - DNA, 274 bp, Zea mays
ccgcagccttcggtctgaacgtcgaggcgaactgacgccgaccacggacttcttcctggccacggggttcaacgtcgaagaagtcagcctcattgcgaacaggttcgggatcgatcacacgcttagcctggaggagaacctgctccccaagtacgagttcttcctggcgatggagtacccgaggtgcgagctcgtcaagttcccgcagtactttgggtacagcctggaccggcggatatagccacggtacacgaggatcactgggtgttaggtg

SEQ ID NO: 50320 - DNA, 275 bp, Zea mays
acgtggacccttttgaaataaaggaaagcaaccggcctaccaaaatgaagcttccacagttggaaccagatgagagaagcgtgacaaacataaaagaaagtgtccgggactttgttgtcggcagtggtgaatatgtgatcaaagattttaagttcactgttaaccaagcagtgcgaccagtggagaagcgcattgataaattgatgaaaaagaatgataagagtaagaaaagccaggacgacaactgggtgagtgcagcaacaccagagaggcct

SEQ ID NO: 50321 - DNA, 272 bp, Zea mays
agaagagctgcttcctcaggaagaggaggaaccggtggaggccgaggagtctgaggaggaatctgagtacgagacagactctgaggatgagcagatgggcatggacatggtgaagcccgttttcataccaaagtcacagagagagaccatcgcggaggcgaacggctggaggaggaggaacggcagcttgaggagctggtcaagaagaggctggaggctaggaagatcgagactagacagattgtggtcgaagagattagaaaggaggagca

SEQ ID NO: 50322 - DNA, 119 bp, Zea mays; identical to SEQ ID NO: 50107

SEQ ID NO: 50323 - DNA, 273 bp, Zea mays
ctcgcttgctaagaagtatgaggaactgtatcagcaaaatggtgtcaaattcataaagggagctcttatcgaaaaacttggagctggctctgatggaagggtgtcttctgcagtacttaaggatggatctgtagttgaagctgatacagtaattgttggtataggagcaaaaccagttgtcagcccgtttgaagctgttggagttaaccctaaagttggtggaatagaggttgattccttgttcagaactagtgtacctggcatctttgcaat

SEQ ID NO: 50324 - DNA, 270 bp, Zea mays
acggttggctgcttcgtctcgcactgcggctggaactccaccatagaggccatggcgtccggcggcgtgcccatagtcggcgtgccggactcgtttgaccagcccacgaacgcgtacttggtggaggaagagtggggggttgccatcagaacggggcgaaacagcgacggcgtgttgtcagggacagagttggcaagatgcattgagctcgtcatgggcgacggtgcaagagcagtggcgataagggagaggatgaagggcttgataacg

SEQ ID NO: 50325 - DNA, 130 bp, Zea mays
acaagatgaagcccaacatcatctttgtactttccctgctcctcatcttggagaagcaagcagctgtgatgggacaaaaaggtggatcaaaaggccgattaccaagtgaattttcccaatttccacacaa

SEQ ID NO: 50326 - DNA, 271 bp, Zea mays
ctgctctttccctaacgaaggtagccatggcggggagaggtaaggcgatcggctcatgcgccgccaagaaggccacgtccaggagctccaaggctggcctccagttccccgtgggaaggatcgccaggttcctcaaggccggcaagtatgccgagagagtcggcgccggcgcccctgtctacctcgctgccgtgctcgagtatcttgctgctgaggttcttgagctggccggcaatgcggcacgtgacaacaagaagacccgcatcgtacc

SEQ ID NO: 50327 - DNA, 268 bp, Zea mays
actttgcacgaactgggtggccctcaagtggctactccgaaacagatcagggaggtgatgcaagtggacgggcttacaaacgatgaagtgaaaagccatctccagaagtaccggttgcacaacagaagatcctcccccggcgcggcggcggctccggtgagccagtcgatcatgctgttggatggcgtctgggctgctcaggagcaaagcagcggctcgcagtccgggtctcggcagggctcgctccagttctccagggcaggtatgg

SEQ ID NO: 50328 - DNA, 267 bp, Zea mays
atttttggaacaatagcagctataagtcgaaaagtagtggccgatgagcttcaagtttttgacccagaaggggccatgtgcctcgctgttcaccaaacacattacatgccaaagcgatggcgtggtaaagagaacagcgaacttgtccggagagaatttgagacattatttccgtatactataatcatgctacttgaagagatggcctccattttcatcactccttacttgcttatttctgaggtaccaaagcgagttgatgacatt

SEQ ID NO: 50329 - DNA, 272 bp, Zea mays
tacaggttattccacgccaactttgcgataatgctggatttgatgccactgacgttctcaataagctgaggcagaaacatgcatctggtgaaggtgctaattatggtgtagacataaacactggcggaattactgattcctttgcaaactttgtttgggaacctgctgttgtaaagatcaatgctataaatgctgcaaccgaagcttcctgccttaattcttagcgtcgaccgcgacagtgataaacccaaagttcggagagcgcacaaggt

SEQ ID NO: 50330 - DNA, 120 bp, Zea mays
gcccaacatcatctttgtactttccctgctcctcatcttggagaagcaagcagctgtgatgggacaaaaaggtggatcaaaaggccgattaccaagtgaattttcccaatttccacacaa

SEQ ID NO: 50331 - DNA, 99 bp, Zea mays
ccgccggcaccgggacctgtctgacaatcatgacatcatctccatgaagctgttccagctgatggtggagcacacgcccgacgaggagagcatcgactg

SEQ ID NO: 50332 - DNA, 279 bp, Zea mays
  unsure (1)..(279): unsure at all n locations
ctcacttctggcctacgtcagcgcgtcggcgtcaccggacctcctgccgatcaagaagggacctcaggagccgccgcagccgggcccgcgcggcaagatctaagctcagctactccatttgcatggtctagtagtagcttgctttgtactgctagcgccggtcgatccgtcgcaatcgtcatggatcactcccaacctgntttgacacgctgtacaaaattgggtatattcgccatgctgctattgtgtactctttggcatacatacaataactaaaat

SEQ ID NO: 50333 - DNA, 274 bp, Zea mays
gggcaatgctcggaggacgtctaagatttgttctttgtggtggtgcacctctgtcaagtgacacacaaagatttatgaatatatgtctaggtgtcccagtgggtcaaggctatggattgactgaaacttgtgctggagcagctttcactgaatgggatgatacaaatgtgggtcgtgttggtccaccacttccttgctgctatgtgaagcttgtctcatgggaagaaggtggttacaagatttctgattctccgatgccgagaggagaggtcgt

SEQ ID NO: 50334 - DNA, 151 bp, Zea mays
gccagcggcaggataccaaagccttacaggacttcctcctcagtgtgcagatgtgcccaggtaatcgagacacttactttcacctgcttcagactctgaagaggctagatcggagggatgaggccactgcactctggtggaggctggaggc

SEQ ID NO: 50335 - DNA, 229 bp, Zea mays
cgccaccaacttcgtccccggcaactaagctcaacggctatgctatgcaacttcattgtctttcggatcggagagggtgtacgtacgtggattgattgatgctgcgagatgcatgtgtgtctttagtttcacgttgcattgcataggcaagtcgagatgatgagttggcgttgtacactaagatgaaccatgtttgtgcaatagtggtggtttttgtttcctgctggtt

SEQ ID NO: 50336 - DNA, 270 bp, Zea mays
gcgagcagcggcggcggcgcggagagacgcatcggaggttttcctggtttcggaccccagcggcggatggtgaaatcctccctgcagcggatcctcaatagccactgcttcgccagagagaaggaagggagtaaacccagcgccaccatccacgccagccgcaccatgccgttcctaagcttggaagccgggggggatcggcagttaggttcccaggggctccctccagtgctgtagtaacccgggtccggggcctcggtggtgctcctg

SEQ ID NO: 50337 - DNA, 272 bp, Zea mays
tgctgtcaagggtgcagcacaagaacctcgtcaagtttattggggcctgcctagaacctgtcatggtggtcgtgacagagctactagtggggggctcgttgcgcaagtatttggtcagtctccgacctaggagccttgagcctcgtgtagcagtggggtttgcattggacattgcccgagctatggcatgcttacatgcacatgggatcattcatcgtgatcttaagcctgagaatctgttgctgactgcagaccagagaacagtaaaactt

SEQ ID NO: 50338 - DNA, 145 bp, Zea mays
cttgatcacctggaaagtgtactagcaaatgaaccagtctctgacaagagtggccagttcattgttgaagtcaaaccacagggaataagcaaaggaatagttgctgagaggatacttgcatcagtgaaggagagaggaaagcagg

SEQ ID NO: 50339 - DNA, 274 bp, Zea mays
agcaggttgaggagaagttttcaaaagatacagatataatgctagtgtgccagaaaggacttagatcacttgccgcctgtgaacagctgtacaatgctggttttgaaaatttgttctgggtacaaggaggccttgaagctgccgaagaggaggattttgaaagggaaggttcccagcctttcaagcttgctgcaattggagggatttctgaattctttgggtggacggaccagcaacgcgcgcaggctgcaaaggaagggctgggataccggct

SEQ ID NO: 50340 - DNA, 125 bp, Zea mays
tgaagcccaacatcatctttgtactttccctgctcctcatcttggagaagcaagcagctgtgcatgggacaaaaaggtggatcaaaaggccgattaccaagtgaattttcccaatttccacacaa

SEQ ID NO: 50341 - DNA, 279 bp, Zea mays
cttgatcacctggaaagtgtactagcaaatgaaccagtctctgtcaagagtggccagttcattgttgaagtcaaaccacagggaataagcaaaggaatagttgctgagaggatacttgcatcagtgaaggagagaggaaagcaggctgatttcttattgtgcatcggcgatgataggtctgatgaggacatgtttgaaaatattgctgatatcactgggaggaatttggttgctccaagaacagcactgtttgcgtgcactgtgggacaaaaaccaagc

SEQ ID NO: 50342 - DNA, 271 bp, Zea mays
ctgagaaggcagcaggctcggtgtccaagagcacgcagttgagtacgcctggtgcctggtgcggacaagtacaatgatgacatccgtaaaggcatcgtgctgctcgaggagctgctgcccaaagggagcaaggaggaacagcgggattacgtcttctacctggccgtggggaactctcggctcaaggaatacgagaaggccttaaagtacgtccgcgggttgctgcagacagagccccagaacaaccaggccaaggaactggagcggctca

SEQ ID NO: 50343 - DNA, 270 bp, Zea mays
cgatggagcagaccttcatcatgatcaagcccgacggcgtccagcggggcctgatcggggacatcatcagtcgcttcgagaagaaagggttctacctcaaggggatgaagttcatgaacgtggagaggtccttcgcgcagagcactacgctgacctttccgacaagcctttcttccccgggttggtggagtacatcatttccggccccgtggtggcgatggtgtgggaggggaaggacgtcgtgttgactggccgcaggatcattggggc

SEQ ID NO: 50344 - DNA, 272 bp, Zea mays
tccagaggaccgtccctgctgctgtgcctgctgttgtcttcctctctggtggacagagcgaggaggaggccacccgcaacctcaatgccatgaacaagctcagcaccaagaagccgtggtccctgtctttctccttcggccgtgccctccaggcgagcaccctcaaggcctgggctggcaaggtggagaacctggagaaggctagagctgccttcctcgccaggtgcaaggccaactctgaggctaccctcggcacctacaagggtgatgct

SEQ ID NO: 50345 - DNA, 270 bp, Zea mays
ccgcgcctggcctggccgggaccatgtgcgcgtcccgggacgactggcgctgtgcgcctccatgcacgagttttccgccaaggacatcgacgggcacatggttaacctggacaagtaccggggcttcgtgtgcatcgtcaccaacgtggcctcccagtgaggcaagaccgaagtaaactacactcggctcgtcaacctgcacgcccgatacgctgagtgtggtctgcggatcctggccttcccgtgtaaccagttcgggaagcaggagcc

SEQ ID NO: 50346 - DNA, 272 bp, Zea mays
agatgggactacaactgcaggcaattccagtcaagtgagtgatggtgctggagctgttcttctcatgaaaagatctgtggctctgaagaaagggctgcccattcttggtgttttcaggagctttgcggctgttggagtggatccagctgttatgggcgttggtcctgccgtggccattcctgctgctgtgaagtctgcaggccttgagattggagacattgatttgtttgaactgaatgaggccttcgcctctcagtttgtctattgctgca

SEQ ID NO: 50347 - DNA, 269 bp, Zea mays
ctcaaatcagccattgactgatgatcattgccagtacttcttgtatcagttgctacgagggctaaaatatgtgcactcagcaaatatattgcaccgcgatctgaagccgagcaatttgttcctaaatgcaaattgtgacctcaagattgcagactttgggcttgcaaggaccacttcagagacagatctcatgacagagtatgtggtcactcgttggtaccgggcaccagagctgctgttgaactgttcacagtatactgctgccattg

SEQ ID NO: 50348 - DNA, 265 bp, Zea mays
cacttctccaggtaaggaaagggttcgtactcatggcgccgccgcagccaaagtcgggccttttcgttggcatcaacaagggtcatgtcgtcaccaagcgcgagctgcctccccgcccgtgccaccgcaaggggaaatcaacgaagagggtgtctatggtcaggggcctgatcagagaggttgctgggtttgctccttatgagaagcgtatcactgagcttctgaaggttggcaaggacaagcgtgccctgaagcttgctaagag

SEQ ID NO: 50349 - DNA, 264 bp, Zea mays
agaccttgcgctgccccccgcgctgccctggcggacgcgcctcaagatgggccgcatcgcctactggcgcaactccctcgtcgtccgcgtgctcaccatgctccgggtcgcgcccaagggcgtctccgaggtgcacgagatgctctacgagaccgcgcacacctcacccgctgcggcgagaccggcatcttcacgcccatgcacatggtgctcctccgcaagcccgccgccgccgcctccaccgaggaggccaactagtgtaag

SEQ ID NO: 50350 - DNA, 128 bp, Zea mays
agcaagatgaagcccaacatcatctttgtactttccctgctcctcatcttggagaagcaagcagctgtgatgggacaaaaaggtggatcaaaaggccgattaccaagtgaattttcccaatgtccaca

SEQ ID NO: 50351 - DNA, 268 bp, Zea mays
cgatttccccttaacacaacacagaggaagcaggcggcggcgatcgggcgatggcatggcgggcgagcctgtctcggagcctaaaggagatccgcgtcctcttctgtcagtcctccccggccagcgccgccgcccgtgagttcgtgaagaagaactatggtgacatcaaaactcgcaacccgtctctccgcttccttgtccgcgagtgctccggtgtccagccccagctctgtgcgcgctacgatatgggtgtggagagatgcgtgaa

SEQ ID NO: 50352 - DNA, 267 bp, Zea mays
agaagagcactgagctgctgatcaggaagctgcccttccagaggctcgtcagggaaattgcacaggacttcaaaactgatttgcgtttccagagccatgcggtgcttgccctccaggaggctgctgaggcataccttgttggcctgtttgaggacaccaacctgtgcgccatccatgctaagcgtgtgaccatcatgccaaaggacattcagctggcaaggaggatccgcggcgagagggcctaatcgccacctcaaacatcgtgac

SEQ ID NO: 50353 - DNA, 267 bp, Zea mays
ggagaaccaagtgaagagcaaggttactgtcaagggtcacctgcacacctacaggttctgtgacaacgtgtggaccttcatcttgacagacgcaagcttcaagaacgaggaggccacggagcaggtgggcaaggtgaagattgtggcatgtgattccaaattgctcggacaataggcctgtgtaccctcgaggtcaaggaaggaagcttttaagtgcggcggggcggggtctgtctgcgcgtcactgtacacgcctaggctaccgcc

SEQ ID NO: 50354 - DNA, 272 bp, Zea mays
gaagctttccacagacaaaccgaacctgtgattgattattactccaagaagggcttagtggtgaacctgcctgcagagaaaccaccgaaggaagtgactgctgaggtgcagaaagccctctcgtgatgaaatgtccactcttgaggttaaacatgacatctaccaaaacccctttgtttgggtttcttcaaaatttgcactaggccaacatcatgaggttttttattttcagtatccttattgtgcggatgcaccattttttgttatcacac

SEQ ID NO: 50355 - DNA, 151 bp, Zea mays
acctgatgatcaagggatgctgtgtgggtccaaagaagagggtggtgaccctccgccagtccctcctgaagcagacttcccggctggcgctggaggagatcaagctcaagttcatcgacacatcgtccaaatttgggcatggtcgcttcca

SEQ ID NO: 50356 - DNA, 245 bp, Zea mays
aggtgcgcgtcaactgcgtgtccccctatgccgtgcccacggcgctgtcgatgccgcacctgccccagggcgcgcgcgcagatgacgcgctcaaagacttcctggcctttgtcggcggacgaggccaacctcaagggcgtcgacgccatgcccgaggacgtcgcccaggcggtgctctacctggccagcgacgaggcgaggtacgtcagcgcggtcaacctcatggtggacggaggcttcacagc

SEQ ID NO: 50357 - DNA, 282 bp, Zea mays
agaaggaactaggggacaaggtctcggtgcgacgtcaaggggaaggtcgagtcgaagctgcaagagctcaaggatgctgttgctggtggctccacacagacgatgaaggacgccattagtgcattgaaccaggcggtcatgcagattgggtagtccctctacagccagcagggtgccccaggcgccggacctggtccagctgatgcttctgctggttcagcggcgggcacttccgagaaaccaggtgacgatggcgatgtaattgacgcagatttcactgac

SEQ ID NO: 50358 - DNA, 188 bp, Zea mays
attggatgatgggacaaaggatggacttgaattttcagctatttgagacagcaactctcttcataacagtgcttgtagtagcatttatgctacaggatgggactgcgaactacttgaaaggacttatgctgatcctatgttatctaatagttgctgccagtttctttgttcatgttgatccacaatca

SEQ ID NO: 50359 - DNA, 113 bp, Zea mays
agcccaacatcatctttgtactttccctgctcctcatcttggagaagcaagcagctgtgatgggacaaaaaggtggatcaaaaggccgattaccaagtgaattttcccaattt

SEQ ID NO: 50360 - DNA, 138 bp, Zea mays
ccatcaaggtcatgacgacgctggacatcctctcgtcgcactcgcccgacgaggagtacatgggggagttcgcggaccgtcgtggctggcggagccatggtgaaggcggcgttcgagaagttcggcggcaggatgaag

SEQ ID NO: 50361 - DNA, 185 bp, Zea mays
gagcgagacgaaggaggtgatcgggaaggtgcggtcgacgatcaacctggacaagtcggacccgagcgtggcggacgcggtggcggagtccgggagctgtccaactcgtgggtggccaagtaccggcgggagaagtcgctgctggggcggccgtcgttccgggagatgtactcggcgctcaacgc

SEQ ID NO: 50362 - DNA, 186 bp, Zea mays
aaaggcttctctggttgcattagcttcttatgcttcagatcctgctgaggctgatcgtctgaggttcttggcctctgctgctggcaaggatgagtatgcccaatgggttgtggcaagtcagagaagcctgttggaagtcatggcagagttcccttcggcaaagcctccactaggagtcttctttgc

SEQ ID NO: 50363 - DNA, 155 bp, Zea mays
catgtacctgaatgactgccaacgcactgcattctatgagggaattggtctggacaccaaagaattcgacatgcatgagaacattgagaccaaccgcacaacggcaaggatcttccctgctgtcctagacgtcgagaaccccgaatgcaagagga

SEQ ID NO: 50364 - DNA, 178 bp, Zea mays
aaaattggcctcaggatggttcagaacggtgacatagttttgaacaaggtgttcgtccctgacgaagaccggttgccaggcatcaactcgtttcaggacatcagcaaggtgctcgccaattcacgcattatggtggcatggcaaccggttggcatatcaatgggggacatctacatgt

SEQ ID NO: 50365 - DNA, 124 bp, Zea mays
atgcatctgagttcctgattgttgtatcccagtttcttctgtgagtggaatcgcgaggaagaaggatgtcgtgctgcggaggcaactgcgggtgcggcgccggctgcaagttcggcacggctgc

SEQ ID NO: 50366 - DNA, 217 bp, Zea mays
actcccgtttacgtgcacacctccaaaccctcatcacgatccggctccaaggtctcgagatgaagtcgagggcgaggtccggcggtggcgactccaggctctcggtgaggaagaccaacgctgagaaggaccagtacaagcccaagaggcctccgaccgcgttcttcgtcttcatggaggagttcaggaaggactacaaggagaagcaccccaatgt

SEQ ID NO: 50367 - DNA, 182 bp, Zea mays
cggctcgaggccgtcggctacggcacagagaacggcaaggactactggatcgtgaagaacacctggggcagcagctggggcgagtccggctacgtcaggatggagcgcaacatcaaggcgtccagcggcaagtgtggtatcgccgttgagccgtcgtaccctctgaagaagggcgccaaccc

SEQ ID NO: 50368 - DNA, 269 bp, Zea mays
attaatgatcaacgacctttaagaccagacgaggcagagctttttgaaaagtcagcacaaaatgcttatgcattgtttcgtgataaagcagccatgtcgcgatcaatgagtgttgatcagatggagagtgttgctcaaggacgagtgtggagcggccatgatgcgttttcaagagggttggttgattcagtaggtggactctcacaagctcttgctattgcaaaacagaaagctaatatacccaaggataagaagatccagctagttgg

SEQ ID NO: 50369 - DNA, 270 bp, Zea mays
atcaaagctccctctgggtcctgcttactaccccaaggatatagctagcgaacaccctgagagattttttgttggtgaaatagtgagggaaaagatttttgttcagtacaggcaggaaattccttattcatgccaggttaatgttgtcagttacaaaagtcggcctgctgccaaggacttcattcaagttgagatacttgtggagaaagaatcacaaagaggcattatactagggaaggatggcaaaagcataaagatgctggcaaccgc

SEQ ID NO: 50370 - DNA, 131 bp, Zea mays
agcaagatgaagcccaacatcatctttgtactttccctgctcctcatcttggagaagcaagcagctgtgatgggacaaaaaggtggatcaaaaggccgattaccaagtgaattttcccaatttccacacaa

SEQ ID NO: 50371 - DNA, 230 bp, Zea mays
ggcccgaggacaagaggcaggagtggctgctgtcggatgtccagcttcaccagggagagcccgaacgtgaacacctggcgcaggaggtccaggaggctcccgtccgcgatggccttgtcgccgcagtcacacagtgatttgtagcacagctcaagtggctcaaggaactcttcgatactggtaaatgacgattccgctgaaatttcagaaactccagttctagatcgcga

SEQ ID NO: 50372 - DNA, 161 bp, Zea mays
aggacacaacatcgtcgacaatcacgacctacttctataccttgtttagttttcatcttgagtcagtcggtccattgtttgttcccagtctggtgattaaaagtctgcaaattctgtttgtggaattggcagcgatacaaatttggcttctttaagtaaat

SEQ ID NO: 50373 - DNA, 281 bp, Zea mays
tagtggcgggaaggtgagcatggacgagacgttcgggctgatgcttcgcaggaacgagccgctctaccttgttcctagggccgtctagctagctagttactgtgccgccgccgcctcctatccaagaatgcatgagtcttagacgtgtggcagtaataattgcgtggggtgtagtaaaataataagcacgttttctgagttgtaatggattcacattatgtgcattcgagacaggtccaaggaattgtatctctaaagtgaaaatttcctttttcaccacg

SEQ ID NO: 50374 - DNA, 285 bp, Zea mays
taccaccactggaccacgccgggcaaccacatcggcttcgtcgtcatgtacgccttcaccttcttcttcgccaacttcgggcccaacagcaccaccttcatcgtgcccgccgagatcttcccggcgcgcctgcgctccacctgccacggcatctccgccgcctcggggaaggccggggccatcatcggcgcgttcggcttcctgtacgcggcgcagaaccaggacaagagcaagacggacgccggctaccccgcaggcatcggcgtgcgcaactcgctctacgtc

SEQ ID NO: 50375 - DNA, 284 bp, Zea mays
aacggtacttccttggtactgacagcgctccccatgataaacggaacaaagagtgttcctgtggatgtgctggaatatatagcgctcctgttgccttgtctctttatgtgaaggtatttgaagaggctggtgcccttgataaactagaagcatttacaagcttcaatggccctgatttttatggcctcccaaggaacacttcaaagattatcttgagaaagaatgcctggaaagttcctgctacttataaacacagttcaggggagattgtgcctatgtttaat

SEQ ID NO: 50376 - DNA, 287 bp, Zea mays
gaagagagatcagcgacttaacaacaataatggccaccgccatagttcccacggacgccgagctgctgcaggcgcaggccgacctgtggcgccacagcctctactacctgacatccatggcgctcaagtgcgcggtggagctccacatcccgaccgccatccacaacctaggcgggtctgccacgctgccggacctcgtggccgcgctgtccctgccagcggccaagctcccgttcctcgggcgcgtgatgcggctgctggtcacgtcgggcgtcttcgcgtcgtcc

SEQ ID NO: 50377 - DNA, 285 bp, Zea mays
cggagtcgatgcggctgtacccgccggtgccggtgaactcgctgctggcggagacggacgacgtcctgccggacggcacagccgtgcgtgcagggtggttcgtggcgtacaattcatatgggatggggcggatggagtcggtgtggggcgacgacgcgcgggaataccggccggagcggtggctgaaccccagcgacgggatgttccggccggacagccccttccggttcgtggcatttcacgcggggccgaggctttgtctgggcaaggagatggcgtacatcc

SEQ ID NO: 50378 - DNA, 284 bp, Zea mays
actacctgtatgactttccattccttggagatgacagcactatcaccgtggacaacaaccgtgtcgatccactatacaagcatatttttccacccgaagtggcacctcatttgtccttcatcggattgccttagaaagttatccccttcccactgtttgaactccaaagtaagtgggttgctagagttctatcaggacggattaatcttccatccgaagacaggatgatggaagatgtgaaggctttctatttgaaactagaagcacatggatggcctaagaga

SEQ ID NO: 50379 - DNA, 281 bp, Zea mays
accacttctcgatgtctctggccaaatcctccgctagcccggtataagaatgcggggttagcttcgaaagcttcgatcgaacctcctccggtatgtctagaccattaatgaattgctgcatgctgtccttggtgacagcttggcctctcgtcagttccttcagcttctcgtaaggttcaggtatcccatatcttcgcatcacctacaatgagtaatagcagtaacatgatacgtctgatgcacgcacaataagcacttgctgacagcaaccaaaacagaat

SEQ ID NO: 50380 - DNA, 283 bp, Zea mays
ctgatgctcgccaaaggaaggaaatcacagaggagttcttcagttacaggagcctggcgcgaagtctctgggatgattattccgcttatgaacactgggccaagatcgaggttccaaaagacaaggacgaacttgccgaactccaggcccggctgaggaagcgtttccctgtcgatgcatataacaaggcacgtatggagctggaccccaacaaggtgctctcaaacgccaagttggagaagatgttcccagtggtggagcctgctcaccagacaaagtaata

SEQ ID NO: 50381 - DNA, 283 bp, Zea mays
accagttcgtggactggtgcccgactggcttcaagtgcggaatcaactaccagcctcccagcgtcgtcccaggcggtgatctggccaaggtgcagcgtgccgtgtgtatgatctccaactccaccagtgttgtggaggtcttctcccgcattgaccacaagttcgacctcatgtacgccaatcgcgccttcgtgcactggtacgtcggtgagggtatggaagaaggcgagttctccgaggctcgtgaggatctggcggcgcttgagaaggactacgaggaggt

SEQ ID NO: 50382 - DNA, 283 bp, Zea mays
attggatgcagagtacggacgcggcgccaaggtgaaccagaaggtagacgtgtacagcttcggcgtggtgctgctggagctggcgaccgggagggtagccaacgacagcagcaaggacgccgctgactgctgcctggtggagtgggcgtggcggaggtacaaggcgggggaccctctccacgacgtcgtggacgagaccatccaggacagggccgtttacatcgacgacgccgtagccatgttcaagctcggggtcatgtgcaccggggacgacgcgccgtcc

SEQ ID NO: 50383 - DNA, 284 bp, Zea mays
attggatgcagagtacggacgcggcgccaaggtgaaccagaaggtagacgtgtacagcatcggcgtggtgctgctggagctggcgaccgggagggtagccaacgacagcagcaaggacgccgctgactgctgcctggtggagtgggcgtggcggaggtacaaggcgggggaccctctccacgacgtcgtggacgagaccatccaggacagggccgtttacatcgacgacgccgacgccatgttcaagctcggggtcatgtgcaccggggacgacgcgccgtccc

SEQ ID NO: 50384 - DNA, 281 bp, Zea mays
acaggccaagaacgtttccgcacaattaccactgcctactacaggggagcaatgggcatcttacttgtgtatgatgtcacagacgagtcatctttcaataacataagaaattggatcagaaacattgaacaacatgcttcggataatgtgaacaaaattctggtggggaataaagctgatatggttgaaagcaaacgggctgtgcccacttcaaagggacaagctctcgcagacgaatatgggataaagttctttgaaacgagcgcaaagacaaacctgat

SEQ ID NO: 50385 - DNA, 281 bp, Zea mays
accctgggaactctggcaccttgggctgtggaacgctcttgaaagtccttcaaatctggagtctgtcatcctaagaaatctggccagtgccttagatactagaaaccttagtgccagagtgactggcagtgtccagggaagaagatatgttgtcctgacacttgtagcatcagatgcctcgatcctgttgacatcccagacccatcaaggaagaagcctgggaagtgtccagtgacttatggccaatggttgatgcttaagccccccaatttctgtgagat

SEQ ID NO: 50386 - DNA, 276 bp, Zea mays
cttttgcagttccgtggtcccatacttctaccccacgtacctgctcattctactggtcttgagggaaaggcgcgatgaggcgaggtgctcgcagaagtacagggagatctgggcagagtactgcaagctcgtgccgtggaggatcctgccttatgtgtactgaagagacggtagaaaccaaggcagctcatggccctgggccagctgtaaaccttattttgtttgcccttaaccagttggtgaatgttgatgtagcactcggtaaactgtgaccgt

SEQ ID NO: 50387 - DNA, 278 bp, Zea mays
tggactatggggtcatcaagactgacatgttccagactgttgacctcgctggaggcaaagacatggcagcagtgcagaggaccctgatggctttgggcagcttggcagtgaccaagagtgatgggcactaccgtggagatcccaactggtttatgaagaaatcgcaggagcataagagggaattcacagagagccagctgcatgagggaaagcatgtcattggccttcagatgggcagcaacagaggggcctcccaggccggcatgacaggctacgga

SEQ ID NO: 50388 - DNA, 278 bp, Zea mays
actggttttactgtccattgtctcagggtagcgatgctttttcacagtctggcctgtattcaaatcaccaagacataggaccacgttatgcgggggtacttctcggactgtcaaacactgctggcgttctggcaggagtttttggtactgctgccactggctacattcttcagaaaggttcttgggatagtgtgtttaaggtgtctgttgtgttgtacatagtaggaacggtggtttggaatgtcttttcaactggagagaaaattctcgaataagct

SEQ ID NO: 50389 - DNA, 276 bp, Zea mays
cgggcagacactctagatcctgctttgttgcgtcctggtagacttgacaggaaaattgagttccctctgccagaccggcgtcagaagaggcttgtttttcaagtttgcactgccaaaatgaacctgagcgatgaggttgatttgacagattatgtttccagaccggataagatcagtgctgctgatattgctgctatctgccaagaggctggcatgcatgctgtccgcaaaaaccgatatgtcatcctccccaaggactttgaaaagggctaccga

SEQ ID NO: 50390 - DNA, 276 bp, Zea mays
gtgctgggaggggtcctggcgggccacatctccgaccgcctgaacgcgcgcgcgatcacggccgcgagcttcacttactgcgcgatccccgcgctcttcctgtaccgcacgtacgggagcatgtcgatggcgtggaacgtctcgctcatgttcgtcacggggatgttcgtgaacgggccctacgcgctgatcacgacggcggtgtcggccgacctcggcacgcacagctcgctcaacggcaactcccgggcgctggccaccgtgacggcgatcatc

SEQ ID NO: 50391 - DNA, 276 bp, Zea mays
aagggaaccataccagagcggcagaggcttcccctccgctccccagtcccacccgcaccctagccctcagcaaaccctaaccgctcgtcgccatgaaggacacctcgttcaaggccaccggcgccaagcgcaagaaggtcggcggcgccaagcgcgggctcacccccttcttcgcgtttttggctgagtttaggccgcagtacctggagaagcaccctgagctcaagggcgtaaaggaggtgagcaaggcggctggggagaagtggcgctctatgt

SEQ ID NO: 50392 - DNA, 278 bp, Zea mays
aagggaaccataccagagcggcagaggcttcccctccgctccccagtcccacccgcaccctagccctcagcaaaccctaaccgctcgtcgccatgaaggacacctcgttcaaggccaccggcgccaagcgcaagaaggtctgcggcgccaagcgcgggctcacccccttcttcgcgtttttggctgagtttaggccgcagtacctggagaagcaccctgagctcaagggcgtaaaggaggtgagcaaggcggctggggagaagtggcgctctatgtcg

SEQ ID NO: 50393 - DNA, 278 bp, Zea mays
caataatttaatgatatctcttgcccacaagttcacgaacttgcaagttctcactctccggcaaaacaaacctcagcttgaagacagtgccgtagaggctgttgccaactactgccatgacctacgtgagtcagacctcagcagaagcttcaggcttagtgaccgctccttgtatgagctggcccatggatgcccacggcttacaagactgaacattagtggatgttccagtttcagcgacactgcgttgatttaccttacctgccgctgtaaaaacc

SEQ ID NO: 50394 - DNA, 124 bp, Zea mays
tccttcgtctgttgccttcttcgcgaaggctgggctggattacgtttcttgctcccctttcagggttccgattgctaggctagctgcagctcaggtgcttgtctgaggctgcctcctcgttggc

SEQ ID NO: 50395 - DNA, 294 bp, Zea mays
cgcgcggacgcccaccagcagctgcccccttgctgtcgccgcctctccgcgcgaccgatctaccgccgccgccaccatgtcgctgatcgccggcgaggacttccaacatattctgcgtctgctgaacaccaacgtggatgggaagcagaagatcatgttcgccatgacctccataaagggtgttgggcgccgcttctccaacatcgtctgcaagaaggccgacatcgacatgaacaagagggccggtgagctgacgcctgaagagctggagcgcctgatgacggtcgtggcgaa

SEQ ID NO: 50396 - DNA, 139 bp, Zea mays
cgatcatcgagcagaagatcaaggccaaggtggagaagacacaaaactgaggccaggaagcaatttttctaccaccattatctatatatatagcgtctccaatctcattccatttttttatcctttcactcagtgagcc

SEQ ID NO: 50397 - DNA, 228 bp, Zea mays
tgctactgctggaacagttcctttcaggcatggcgagcgcattggcttcagttatctggtttctcagaaatatactggcgagaaagctcttgttaaagttctgcgtgattcaaaagttcatgaatttaaaataaggctagcaactcacaaacgactcgttgcggctcatgtgaagggcaggccgccgtcatattacatagttgctggttttgattttgcagctgtttc

SEQ ID NO: 50398 - DNA, 277 bp, Zea mays
tggtgagcgacttcgaggccgggctggagtacgccgtggccgaggccgtgctcgacaagcggcaggcggcgacagcgacggcggaagtggaggacagctgggagtaccttgtcaaatgggtcgacattgaggaggccacgtgggagcccgccgagaacgtggacaccgagctcgtgcagaagttcgagcagcagcagtcggggtctgcaggcggtgattgatggcggcacactgcgccaccgtcgccgcagtgatagagttacttgatgaaggtgat

SEQ ID NO: 50399 - DNA, 297 bp, Zea mays
ctgcaactggaacaacgccgggatgcgcgagttcgcgagcgacgtcgcgcatgcccggtggtggaaggtgcacgacaggatgccccggaagctccagtcctactgcctgctgaggtcgcggcagaaggccaagctggagtgggaccggaggcaggccgagaaggccaactctcaagatggccactggcgcctcaacgtcacggacaccaggctcaagacgtgctttgagaagttctgcttctgggagagcatgctctggcattggggcgaaaacagtaacaggacgaagagcgtccc

SEQ ID NO: 50400 - DNA, 271 bp, Zea mays
cttcctttcgctcttcccgctgctccgcccctctctgtcttctcagcagtgggagcagctctcctgccacagctcctcacccccttgagatgttcgcctgctccaagtttgtctccactccctccttggtcaagagcacctcacagctgctgagccgtccgctcatctgcagtggtgctgaaacgaccggagatactgacagatgagagcctcagcagcttggcagtctcatgtccccttaactcattgtctctagccgcagcttcaaaac

SEQ ID NO: 50401 - DNA, 133 bp, Zea mays
gcgccagtccaaccaagtcagcacccgcgcgcggcaaggagttcacgcccatggcgagcaccaacatggcgtcggccacctcgcggttcatgctggccgcgggcgtgcccaccgccagtagcggcacggccgc

SEQ ID NO: 50402 - DNA, 188 bp, Zea mays
gatcaacagtattattacagagccatgctatgtgaacattactagtagcagtgctcataaaagctacaatcccatctcccttttttttccagtcatgtaaaacttccaaactgctccatggttcaaaactctgttcttcaatacatcatcaattatcgattaaaaaaaaaaaaaaaaaaagggggggc

SEQ ID NO: 50403 - DNA, 137 bp, Zea mays
gtagctgctcatccatggcatgatcttgagatcggtcctgatgctcctgctgttttcaatgttgttgttgagatcacaaagggaagcaaagttaaatatgagcttgacaagaaaactggactgattaaggttaaccg

SEQ ID NO: 50404 - DNA, 264 bp, Zea mays
cggcggggaccatggcgggctccccagaccaggagggcttcttcaatctgctgagccacgtgcagggcgaccggatggagggacagctgttcactgcaagccgggccgggccagaccaccaagagccagagcgaccccacccccgagatggacagcctcatggacatgctggccagtacccagggccgccgcatggatgaccaacgtgtgacagtcacaacctgcccggcttcaagcccgtggggtccaaggacggagcacaaa

SEQ ID NO: 50405 - DNA, 285 bp, Zea mays
ggagcaaggtggagcaggtcgtcggcgacgccgacatcaaggacagggcgcgggtgctcaaggacgaagcccaccggtgcgtcgccgaaggagggtcctcgaacgacaacttcaaaaagctcgtgaatctgctcagtgaatgatgagaaccgggagactgggagcatcgtgtccagtgtcctggcgttgtaaatgttggtgcacttagggcttgtttggtttgatggctaacttgtcatattttacctaacttttgtgtctaaagttagttcttcaattcgaacg

SEQ ID NO: 50406 - DNA, 156 bp, Zea mays
ggcaacttccccacatccgtcactgatccccagccaatgggcaaggtcggcatgtgcttccaccctgatcaagacaggatcatcacagtccgggaatgtgctcggtcacagggctttcctgacagctatgaatttgcgggcaacatccagaacaag

SEQ ID NO: 50407 - DNA, 198 bp, Zea mays
atcgccgtcaagtttgctgagctcattaccaagatcgacaggcgatctggcaaggagctcgagaaggagcccaagttcctgaagaacggtgatgctggtatggtgaagatgattctcaccaagcctatggtggtggagacattctccgcgtatcctcccctgggtaggtttgccgtccgcgacatgaggcagacggtt

SEQ ID NO: 50408 - DNA, 184 bp, Zea mays
gcggaccctttgccttcgccactgctcagcgtctgcacatccctacaatggctaaaacagcaatggcctacaaggaaaaaatgaagagctgtccatgctgtcactgatctgctcttgcttttacccggaacctcgcaacatcaacatctatacttacgatgatatggaagtgaagcaaatcaac

SEQ ID NO: 50409 - DNA, 181 bp, Zea mays
aggtgatagaatataccctgctgaacttccaatcaaatatgctgggtactccacatgcttccggaaggagtgcgcttcgcatggagggacacagctggtatcttcagagtccaccagtttgaaaaaatcgaacaattctgcctctacaagcccaaatgacaacgattcttgggagatgcat

SEQ ID NO: 50410 - DNA, 177 bp, Zea mays
aggaactgttcgaaggggcaagacagagaaggaagatcaaatgcaagagcaacaactgttaatgatgaaaaacagtgtgccggcataatgcttgtggacttgggaaggaatgatgttggcaacgtatccaaaccaggatcagtgaaggtggagaagttgatgaacattgagagatac

SEQ ID NO: 50411 - DNA, 180 bp, Zea mays
gctctgtggcttataaacagggattcaaaggagcagagggacatctatgggatcaaggacaacctgatcaggttcagcattggatggaggattttgaggaccttaagaatgatcttgttcaggccctcgagaagatataagctccaatccatttgcattaataaagttatgaggtgatgg

SEQ ID NO: 50412 - DNA, 172 bp, Zea mays
gacaaggcttcaggttgtccctctgctagcatcaggtcacaggcactcaggtatcttccgtgcgtgggggtactgtggggaacatgtatctgatcaccggggaacatggcgacaccgatctagaggagatgctatccgggctacacaagaccgtgatcgtccgtggcgtcac

SEQ ID NO: 50413 - DNA, 171 bp, Zea mays
caacatgaaggtgctccttgccgccgccctcatcgcggggtccgtcttcttcctgctgctgccgggaccttctgcggccatgagaagaagaaggggcccaagtcaccgtcaaggcattttgacctacgaattggagatgaagatgtaggccgggtgatctttggtctcttc

SEQ ID NO: 50414 - DNA, 182 bp, Zea mays
gccatcctggagtacttgactgccgaggttttggagctggccgggaacgctagcaaggatctgaaggtgaagcgtatcacccctcccacctacagttggccattcgcggagacgaggagctggacaccctcatcaagggcaccatcgcaggtggacggcgtcatcccgcacatccacaagtc

SEQ ID NO: 50415 - DNA, 174 bp, Zea mays
atcaaacgtgactatttggtggaacattcgacgactcaggttcctgatttcttgaatgccaaaattgatggaagacagtgaaagaagtcattaaggataccaagtggttagaggaagagttcaccctcacagttcaaaagcgtggaggtgtgctcatccaaaaatggggcagat

SEQ ID NO: 50416 - DNA, 177 bp, Zea mays
agggaggcgaagatgatcgaggtggtgctgaacgaccgcctggggaagaaggtgcgggtgaagtgcaagcgcgacgaaccatcggcgacctcaagaagctggtggcggcgcgagagagacgcgcccgagaagatccgcatccagaagtggtacaacatctacaaggaccacatcacg

SEQ ID NO: 50417 - DNA, 168 bp, Zea mays
cagaacagaaccatcgatcgagcttggttgctcggcagcagctagcaatggccgccaagggaggtgatgagctgagctgctgggcgtgtgggacagcccgtacgtcaacagggtccagatcgtgctcaacctcaagggcctcagctacgagtacgtggaggaggacct

SEQ ID NO: 50418 - DNA, 170 bp, Zea mays
gtttggcaagctggctaaaatctatgttttcaaaactgtagtattacaaatactatagttgttttaaggtatctaaacttaggtctggacctcagttttcaaaactgcggtattgtaaactgcggtattgtcatgactaaagtatactgtagtatttcaaaaactgtggt

SEQ ID NO: 50419 - DNA, 172 bp, Zea mays
agacgtggctctttattcgtgagttttccatttacctccgctgaacctagagcttcagacgccctatggccggcctcgacccaaccggcggccttgagcgctgagcaagcaaaggcctctcctcgcggaggtgatccaggcgttctccgccccggagaatgcagtgcgcatg

SEQ ID NO: 50420 - DNA, 168 bp, Zea mays
agcgccgctccttcttctgccgctcctggtgctgcttgtgtgctcgtttggtgcggacctggtacctctttgtgaagcggcactgagagagactccggcgctcgccatggccgacgaaaagcccaaggaaggagtcaagactgagaacaacgatcatattaatttgaa

SEQ ID NO: 50421 - DNA, 120 bp, Zea mays
gcccaacatcatctttgtactttccctgctcctcatcttggagaagcaagcagctgtgatgggacaaaaagtggatcaaaaggccgattaccaagtgaattttcccaatttccacacaac

SEQ ID NO: 50422 - DNA, 197 bp, Zea mays
gagcaatgagacccgctacaggtgcatctggggcaaggtcacccgtccgcacgaaaactcgggcgtcgtccgtgccaagttcatgtccaacctcccgcctgagtccatggggcgcaaggtcagagtgttcatgtacccgagcagcatctaaggttttgttggagtaaagatggactagaaatggccatgtgtttatt

SEQ ID NO: 50423 - DNA, 195 bp, Zea mays
cgtagtccctctcctctggaggtattcgcagtcgaccgtgtcctcggagcacgatgaaggtagttgctgcctacctgcttgctgtcctcgctgggaatgccagcccctccgctgaggatttgactggcattctggagtcagttggctgtgaagttgacaatgaaaggatggaactgctgctgtcccaactgagcg

SEQ ID NO: 50424 - DNA, 192 bp, Zea mays
agagagcattgcttactctggtatagcactcaacctggtcgtgtaccttggaaaccggtctccatggaaccaccgcctccaatgcagcgaacgtcgatgcgtggaacggcgccacgtttcttacgccggtccttggagcctttcttgctgatacatactgggggaagtacaagaccgcagctatctccataa

SEQ ID NO: 50425 - DNA, 191 bp, Zea mays
caagaagctgctcaagatgaagaaggtgaagccgacatcccggatttcaaactggcggttcgagcacttctgcatccacgccggcggccgtgcgtgtctggacgagctggagagcaacctggcgctcacggattggcacatggagccgtcgcgatgacgctgcaccggttcgggaacacgtccagcagctc

SEQ ID NO: 50426 - DNA, 193 bp, Zea mays
ggagattggagcctttagaacatacccaaaagattacaagccaccagatgagcctgtaactgagtatcagactattccactcaacaagactacacaattttggtgtccattgcaaatcgtactatgctttggatataacttatttcaagtcatccctggattctcacctccttgatctgctctggaacaaata

SEQ ID NO: 50427 - DNA, 193 bp, Zea mays
agcatatccaaaagcttagggctcaaaaagtgtctcattcgctctctgatcttgctgaactcaagttcagatctgcaagcattctcgcagggtctttctacgctattagataagatggatccctctcagagagcgaagtttgttcaggaagtcaagaaggtccttgattgatgataccaacacatccaacaca

SEQ ID NO: 50428 - DNA, 192 bp, Zea mays
tgcgagaatgaagactattctcagcaatcagactggcgacattccagaaaatgtccacataactctgaagggacgcacagttatcgtgaagggccccagaggaaccctgcggagggacttcaatcacatcaatgtagaactcagccttcttggaaagaaaagaaagaggctccgggttgacaaatggtgggg

SEQ ID NO: 50429 - DNA, 191 bp, Zea mays
aggctcttcgacttcatgcccacccgctggggctacttcgtcggcaacgtcagccccgccccggatggacttccgctggttcgcgctcggcaactgcgtcgccatcctcgcctcgctcgccacgcccgaccaggccgccgccatcatggacctcatcgaggagcgctgggaggacctcgtcggcgagatgc

SEQ ID NO: 50430 - DNA, 187 bp, Zea mays
cggaacttccaggcttgcctgcacaactcttggattgagcaggcagcaacttgcctgggagattaagctggaagaagacatgtataagggaggaaaagctgaccagcaagaagaacgtcggagacaaaagcagatgaaggttctgaagaaggagctgcgccacctgctgtcccagccactgtttacg

SEQ ID NO: 50431 - DNA, 280 bp, Zea mays
ctgacaggttcgagcatggcgtgtccaatgccgctgccaaacaccccaatgccctgctgtccttcacccaggggcctagggcttgcatcggccagaacttcgcgatgcttgaggcccgtatcgggatcgccatgatccttcagaggttctcgtttgagctctcgccaaactatgtccatgcacccaaggaagcggtcacccttatgcccaggttcgggcttcccatcatcctgaggaaccttcacgattgagatgtgctaccataaatatatatacgcac

SEQ ID NO: 50432 - DNA, 274 bp, Zea mays
agctgctcttgtgacgttgtggagatggggagcgtcctggggctgtgctccatggcgagctggataccatgtttgtgtggaagtgccccgtgtttgctatgccgatgctgtcctagtggaaacaactccactgtaactagattgatctatgcacttttcttgcttgttggagtatgtgtagcttgtgtaatgttgataccaggaatggaagaacaactgaataagattcctggattttgtgagaatgagataggtgttgtcccttgtaacattt

SEQ ID NO: 50433 - DNA, 272 bp, Zea mays
agcttaaaggactgctggccttcctggtgaagcctctgctgccaaggctgtcagctttcctgagcaacatgaagtctcgttcggctggaaaactctgggaactgcagcacgagatcgaggtgtaccgcaaaaccgtgattgcccagtggagggcgctggacctggatgtggtgctgacccccatgctggcccctgctctggacttgaatgccccaggcagggccacaggggccgtcagctacactatgctgtacaactgcctggacttccct

SEQ ID NO: 50434 - DNA, 272 bp, Zea mays
acggcgcacaaccagtcgttcaaggcgcacaagaacggcattaagaagcccaagcgccaccgcgagacctccaccaaggggatggaccccaagttcctgaggaacctgaggtattctaggaagggcaacaaaaagagtggtgaggctgaagctgaggagtaggaaggaaagcatggctttgtttcctctgttcttagctcagttccacctttaggacctggggttttgttaaagatggaacttaagttggtgttactgtatgatggcaagga

SEQ ID NO: 50435 - DNA, 286 bp, Zea mays
acgtgctggtaaatgtgtaggcgatggggcgggacggagacgtttggccacatccagagaagtttatgccagaacgattcctgggaatgcctacggactgtagaggtggagacttcgaactcataccgtttggtgcaggacgcaggatctgtcctgggattgccactggtcagcaggatagagcatctggtccttgcatcgttgttgaatcagtatcagatggaggcttcacgccgatgtcgaaagagaagtgagtgacgacatggctggtagtttggtgtcactc

SEQ ID NO: 50436 - DNA, 225 bp, Zea mays
ccaaggagagtacgtggaggagcagccatggcttcatcggtggccgccgcggcgagcacattcctgggcacccgcctggcggacccggcgccacagaacgggcgcatcgtggcccggttccggttcgggttgggcggcaacgcgaagctgctccgaagaaggtggcgaagacatcgacctcctctgaccggccgctgtggttccccggcgccgtggccccgacta

SEQ ID NO: 50437 - DNA, 272 bp, Zea mays
agaccaggtaagcagcagcaggaaccctagcaccgccgcatccgcagccatgggtatcgacctcgttgccggtgggaggaacaagaagaccaagcgcacagcgccgaagtccgacgatgtttatctcaagctccttgtcaagctctaccgtttcttggtcaggaggaccaagagcaacttcaatgctgtcattctcaagaggctcttcatgagcaaaaccaatcgcccaccaatctccatgcgccgccttgtcaagttcatggaaggaaagg

SEQ ID NO: 50438 - DNA, 291 bp, Zea mays
ctgacaggttcgagcatggcgtgtccaatgccgctgccaaacaccccaatgccctgctgtccttctcacaggggcctagggcttgcatcggccagaacttcgcgatgcttgaggcccgtatcgggatcgccatgatccttcagaggttctcgtttgagctctcgccaaactatgtccatgcacccaaggaagcggtcacccttatgcccaggttcgggcttcccatcatcctgaggaaccttcacgattgagatgtgctaccataaatatatatacgcactgccacttcct

SEQ ID NO: 50439 - DNA, 277 bp, Zea mays
tgctcatcgaccacgacccggacatctggggaggcgacgcgcgcgagtttaggcccgataggttctccgagggcgtgtccagggcctccaaggaccccggcgcgttcctcgcgttcggttggagcccgcgcatctgcatcggccagaacttcgcgctgctggaggccaagatggcgctctgcatgatcctccagcgtatggagttcgggctcgcgccatcctatgctcatgcgccgcataccatgataaccttgcatcctatgcacggtgcgcactt

SEQ ID NO: 50440 - DNA, 266 bp, Zea mays
gtaaagctctgaaccgacctgatcacctggtggtgttcatgttctcggcggagtggaacggaccctgcaaggcgatgaagaaaccgttcagggacatggccagggctagaaagatgcaggccgtattctgcttggtggacatcgacaagcttaaagatgctgtggcgcacagttccaagtggagttgctgccgacgttcgtgctgtacaagaacggcatacagaaagggagggtcgttggcgccaaggtggacgacctcagagccg

SEQ ID NO: 50441 - DNA, 267 bp, Zea mays
agcggaccgaccgcttaaacggctgctcgtgccgattcttgtacctgagaaatgctgagcgaccaacttttcgttcagtgggacttgcttcacgtcccctgcctcaagattctcctcagcaaaggcctggggctgggcattgtggctggctcacttctagtaaagctgccccaggtgtttaaaatcctgggagccaagagtgctgaagggttgattctccagtctgtaatgctggagctagtggcattgactgggaccatggtctac

SEQ ID NO: 50442 - DNA, 286 bp, Zea mays
cgtcacgaaccggtggagaaacttcatgaagaggcagatcaagagggccaggatgttttttgaggaggcagagagaggggtaactgagctctcacaggctagcagatggccagtatgggcttccctgttgttgtacaggcagatcctggatgagatcgaagccaacgactacaacaacttcacgaagagggcgtatgttggtaaagggaataagttgctagcacttcctgtggcatatggaaaatcgctactgctcccatgttcattgagaaatggccagacctag

SEQ ID NO: 50443 - DNA, 275 bp, Zea mays
acttgatatgcatagagaagttctctgatttccctcagcttggaaggtttacacttagaactgaaggaaagacggtagctgtaggcaaagttgttgatattccgcctgctggtagcccaacattctgagcttaagtcaattttgaacaggatggataatcatgaagcagtgcgttcgcttaagatacttttttttgacaagtgagattagttgttgaggttagattttttttcagtccatcttgagaatggtctatgcctttatggtttaggcta

SEQ ID NO: 50444 - DNA, 269 bp, Zea mays
ctcagcggactggtccacccggagttgagtcggagtggcgagctggcagtacgggctctggagcagttcgacactgtggcggaggccatgctgataatacacaagaaggggattgtcaatgaacagtttctgctgcagcggctggcagacggggccatcgacctctatgccatggtggtggttctctcgagggcctcaagatccctgagtgagggccaccccacggcccagcatgagaaaatgctctgtgacacctggtgtatcgaggc

SEQ ID NO: 50445 - DNA, 252 bp, Zea mays
tgctgcgaagagagccgctgctcgtacgtcggcagcttccacgagctccagaggcacacccagcaaaagcatccggactcgcgcccttccgcgatcgacactgctcgccgggccgattgggtgaacctgcagcggtcttccgacgtggtagatgtcctgagcacaatacacgcgcagggtcccaacggtatagttcttggagcccatgtcatcgagtacggggacggtgacgatgcgtgtggacgactacta

SEQ ID NO: 50446 - DNA, 276 bp, Zea mays
tctgccgccgaggcctgggtggccctgaaccgtctccctctggtgccctcggtcaccagggacgtcctccccactgccgcacagctctctgccaggtacaattcggcggtgcgtgatggtgccaagcgcgggaacgccgtggccacctatcacccgctggtgcccactgagcggctcgcccgcgtgttcaggtaccccgtggctgacgttgctgcagcaccagagatgcagcccattccttcccagtagaagatgaaatggaatgtgaactgcata

SEQ ID NO: 50447 - DNA, 268 bp, Zea mays
gtccacggagggcaccgggctgagcctcgggctcagcaacaacctgctggggtggatcctcctgggggtcttcggcctcatctggtccctctacaccatctacacctctgacctcgacgaggacgaggagtccggtggcctctcgctctagatccacctcctctcctgttaatgatctgaatgtacacatggtggtggtcatcggtgtaaatttagacatggctatttgcatctaagatccatcctctcctgttaataatgtttggag

SEQ ID NO: 50448 - DNA, 257 bp, Zea mays
ctgaacagattgggcaggcagggtcaactgcagggccacagcagcagcaaccagctggagccccccagcctggggcagtcccaccaggggttcccacccctggaccccatggcccctcaccgttccccaaccaacaaactcctccctcaatgatgccaggggcagtgccaggcagcgggcacccaggcgtggcggcccaaagccctgccattgtggcagctgttcagggcaacctgttgcccagtgccagcccactg

SEQ ID NO: 50449 - DNA, 101 bp, Zea mays
aacgcgagctgatgactcgcgcttactaggcattcctcgttgaagggggacaattgcaatgatctatccccatcacgatgaaatttcccaagattaccggg

SEQ ID NO: 50450 - DNA, 286 bp, Zea mays
ctgctgtatcttggcagatagcttccgtagagtggtgcgtttgatctttgttgtgtcatcactcttttcaaatgtgataagcacactggctctacccatcattccgatttttgctgtgattttcttccacgacaagatggatggagtgaagattattgctatgttgatggccatctggggattcgtttcatatggatatcaattatatgtcagtgacaagaaggctaggaagacttcagtcagtgtggaggagaattcctaagtgcttgttggtggcctgttacat

SEQ ID NO: 50451 - DNA, 273 bp, Zea mays
caaaccctttgattcgatgggcagacggagaactaggattgtggctatcgatgctttggactgtccagctaggttacactacgaatctggctgtctcctaagggaagtgaacaaggcattttgtggatttttcgatcaatcgaaacaccatctctatgcgaacttttccaggatttgcacaacaaggatgacttttcaagcatcaattccagtgagtacgtaggagtttcaacaggaaactggggttgtggtgcttttggtggaaacctgaaa

SEQ ID NO: 50452 - DNA, 178 bp, Zea mays
atgctcgcaaaaacaagccagagctgttgagggaaggaaacctcgaggaggcacgcatggtggatgttttgatcgaggtggaggctaaccagtacaccgctgcactgaatcccatcctcttccaggtcctcatccgtccgaagcttgggggaaccaccgaccagaaaatggtggatga

SEQ ID NO: 50453 - DNA, 166 bp, Zea mays
ggaggactggccattttgtgcctgcatgaactatgactgtagtccgatgaatgcgtcttacaggagcgcacaatcttgagacctcgcagctggtctgggagaagacactggagatggtcggcgttccgccggatgccctggagaagctcatcgccggagaatcagt

SEQ ID NO: 50454 - DNA, 251 bp, Zea mays
cgttgtggtccaggaaggtcaagtctccaacctagtgttgggttacgctcactgtggaatggttgtagcagctcgatggattgcaaaacaagccattctgtgcctgagtaaagcaatcgagcaattcccagaatagggggtgaagagcatgggacattcaatgggagctgggattgcaacaatagcaacatacatccttcgcgagaatgagaagctggcatcatccacttgtattgcatttgggcagctgc

SEQ ID NO: 50455 - DNA, 241 bp, Zea mays
gttcgagacggcgctgctcacttctaggctttagcctcgacgatcccaacacctttggcagccgcatccaccgcatgctcaagctgggcctgagcatcgacgaggacgaggaggctccggaggctgacaccgacatgccccctctggaggatgacgctggcgagagcaagatggaggacgtcgactaagatgggtttattcttatgggaggaaaaaaaaacccggggtgtttctggggttt

SEQ ID NO: 50456 - DNA, 279 bp, Zea mays
aaccggaatcacccagactggaacaggattgcagagtttctggatgatgttgccagaaggatgcggcaagaaggccatgatcctaagaaaaagtatgctctgatgggtgccgatgatgcagtgcatgacgaggcactatgtgggcacagcacaaagctcgccgtcgcattcggtgtgctgaatttaccggagggacggccaattcgtgtgacaaaaaactcaaaagtctgcagccactgccatgaggctgccaagttcatatcgaagatgtgcaacaga

SEQ ID NO: 50457 - DNA, 170 bp, Zea mays
ggttaactatgcttggacaacggtgcctacataccctagcggagttattgggttcatgctttgctccaccgaagggcctgctgttgatttccagcaccctgttttcaacatcgaggaggatgagcatcctatgaaatcaaagggaccccttaagttctacaactcggaga

SEQ ID NO: 50458 - DNA, 263 bp, Zea mays
gcgtttattaggtcatctggagaactgttacaggagtataagggcgatacgtgcaagttcttcaagatggattcctgtctgacgaatgatgatgcatttgttgttggcgggtctgaggatggttatattttcttctgggagttggtggatgcacctgttgttgcaagattcagggcacataattctgtggtaactagcatcagttaccacccaacaaaggcctgcatgttgacgtcttctgtggatggctctattcgtgtttg

SEQ ID NO: 50459 - DNA, 258 bp, Zea mays
gaaaggggaagcccgccgccgccccggcccccagaaccagcagatcgggacctctgttctgcgcaatccatccatggcggaggaatcaggccgtcccttgccaaagtttggtgaatgggatgtcaacgatccggcttccgcagacggatttactgtcatattcaacaaagccagagatgagaagaagggtgggaatggtcaagacacagactcaccttccaaggaccccaggactgagagggtggagtcttatgctgc

SEQ ID NO: 50460 - DNA, 177 bp, Zea mays
ctgaaggttggtgaaggacaggctgcccagtgcatcagcggattcacagctatggatatcccaccaccccgtggccctctctggatcttgggtgatgtcttcatgggcgtctaccacaccgtcttcgactatggcaagctgagggttggcttcgcagattcggactaagggatatgg

SEQ ID NO: 50461 - DNA, 105 bp, Zea mays
ctcgagcagacggtctccgacctcgagaagctggagaacatcttcgccgacgaggccgtcgccgagttcttcgacaatcccaccgtcccgctcgacgagaaggcc

SEQ ID NO: 50462 - DNA, 136 bp, Zea mays
cgctgtccttctccttcggccgcgcgctgcagcagagcaccctcaagaagtgggtcggcaagaaggagaacgtcgccgccgcgcatgccaccttcgtcatccgctgcaaggccaactccgaggccgcgctgggcaa

SEQ ID NO: 50463 - DNA, 207 bp, Zea mays
ccgcttcgtgccccgctccgtggacgccctcgccgcctcgtccggcaccgtgatcgccgagggccacgagaggggttgctactgggtgcacgcctggaccgtgggacccgatggggtgatcacccagctccgtgagtacttcaacaccgacctcaccgtcacccgcctcgccgccgccgtcgccgccaagtgcgtctggcagagccg

SEQ ID NO: 50464 - DNA, 100 bp, Zea mays
agaagatcattgccgtcggagagtccgacgaaatccccctagtgaagaacctgaagaggattcctcttgtcgcctctctggtgtccgagatcatcgccgc

SEQ ID NO: 50465 - DNA, 175 bp, Zea mays
caggcacagcttgctcagatgatcaatgagaagccacaggtgatccaggagtatgagtcaggcaaggcaattcccaaccagcagatcattggcaagctcgagagggccctgggaacgaagctgcgtggcaagaaataaccaggagcagcatagggaagacaaggcaaactgtctg

SEQ ID NO: 50466 - DNA, 261 bp, Zea mays
cggtgttctgtactataccccacaaattcttgagcaagctggtgtggcagttattctttccaaatttggtctcagctcggcatcagcatccatcttgatcagttctctcactaccttactaatgcttccttgcattggctttgccatgctgcttatggatctttccggaagaaggtttttgctgcgaggcacaatgccaatcttgagggcatctctagttatcctggttgtgtccattcgtattgatttgggtacactagc

SEQ ID NO: 50467 - DNA, 102 bp, Zea mays
caactgggtgaaggcgcaggagtgggcggccgtccccggcgggcaggctacgtacctaggcgccccggtgccgtggggcacgctgccgaccatcttggcggt

SEQ ID NO: 50468 - DNA, 138 bp, Zea mays
ggcaaagcaaaatacaatgcttcgattgattcactggtgtggaagatcaggaaattccctgggcagactgaggcaactatgagcgcagacgtggagttgatttctactatgggtgaaaagaagtcatggaacagacca

SEQ ID NO: 50469 - DNA, 244 bp, Zea mays
gaaagaatcgcctaccagaggaatgacgatgatgaagaggaggcagcccgggaacggcgccgccgagcccgacaggaacggctgcggcagaagcacggaggaagaatccttgggacaggtgaccgaccaggtggaggtgaatgcccagaacagtgtgcctgacgaggaggccaagacaaccaccagcaacactcaagtggaaggggatgatgaggccgctttcctggagcgcctggctcgacgt

SEQ ID NO: 50470 - DNA, 250 bp, Zea mays
cgagggcccgtgatcgatgaggccgcgctggtggagcacctcaaggctaaccccatgttccgcgttggcctcgatgtctttgaggatgagccttacatgaaacctggactcgctgacatgaagaacgccgtcgtggtaccgcacatcgcatcagcctccaagtggacacgcgagggaatggcaaccctgtctgctctcaacgttcttggtaagatcaagggggaccctgtatgggggaaccccaatcagg

SEQ ID NO: 50471 - DNA, 112 bp, Zea mays
gcccaacatcatctttgtactttccctgctcctcatcttggagaagcaagcagctgtgatgggacaaaaaggtggatcaaaaggccgattaccaagtgaattttcccaattt

SEQ ID NO: 50472 - DNA, 279 bp, Zea mays
gcgccaccccgtgccatcgggctgcgtccgctaacgaccgcccgttcgcgcagggcccagggtgtgggagggagcaatggtcgctgggatggaggcggaggaaggggtgatggcgacggacttcttctggtcgtacacggacgagccgcacgcgtcgcgccgccgggagatcctggccaagtacccgcagatcaaggagctcttgggccgggaccgggggcttccctcaaattggtttggtcgtgtcccttcactatggactgctacatcctccgtgac

SEQ ID NO: 50473 - DNA, 284 bp, Zea mays
acccagacacaagtcttcactccttcctgcgagccctgaggaagccttctttccccaggggtggccaacaagggtccttcctatggcatgagccgcgaagtgcagtccaaaatcgagaagaagtatgacgaggagctggaggagcggactggtggagtggatcatagtgcagtgtggccctgatgtgggccgcccagaccgtgggcgcttgggcttccaggtctggctgaagaatggcgtgattctgagcaagctggtgaacagcctgaccctgatggctcaag

SEQ ID NO: 50474 - DNA, 286 bp, Zea mays
gttcaattcctccttaagcaagctggcattgataagagaacaggcgacttgtatgggaaccgtgatctgttaaatattgctcgcaatatggctcgtgggcttaagggagttgagaatgtctacacccaacaccagcctcttttgttccaaacgatggaaggaattgttaaagggagattgcgagatgctgactatccacttgttggcaatcatttccagcagggcaggcctcaagatgttgtcatattcattgttggagggacaacttacgaggaagcaagtcggt

SEQ ID NO: 50475 - DNA, 258 bp, Zea mays
cgaaaggaaacaaggtgaacgtgggagtgaagtacgcagagaagcaggagcggaaattcgagccggggaagctaagagaagggcggaacatcattgggctgcagatgggcaccaccaagtttgccagccagcagggcatgacggcctatggcacccggcgccacctctacgaccccaagctgggcacagaccagcctctggaccaggcgaccatcagcctgcagatgggcaccaacaaaggagccagccaggctggca

SEQ ID NO: 50476 - DNA, 280 bp, Zea mays
gcaagatgaagcccaacatcatctttgtactttccctgctcctcatcttggagaagcaagcagctgtgatgggacaaaaaggtggatcaaaaggccgattaccaagtgaattttcccaatttccacacggacaaaaggcacagcactattctggacaaaaaggcaagcaacaaactgaatccaaaggcagtttttctattcaatacacatatcatgtagatgccaatgatcatgaccagtcccgaaaaagtcagcaatatgatttgaatgccctacataa

SEQ ID NO: 50477 - DNA, 281 bp, Zea mays
cccacctggcgtgcgctgtggcagggatcatgtccgacgccaacatcctcatcaacaccgcccgcctccacgcccagcgctcacgcgtctcctaccaggagcccatccccgtcgagcagctcgtccagtccctctgcgacaccaagcagggttacacccagtttggtggcctccgcccctttggggtctccttcctattcgccggttgggacaagcaccacggtttccagctctacatgagcgccccatctggcaactacggcgggtggaagccgcgctgt

SEQ ID NO: 50478 - DNA, 125 bp, Zea mays
ccaagcgagatgaagcccaacatcatctttgtactttccctgctcctcatcttggagaagcaggcagctgtgatgggacaaaaaggtggatcacgaggccgattaccaagtgaattttcccaatt

SEQ ID NO: 50479 - DNA, 274 bp, Zea mays
tcgctgtccttctccttcggccgcgcgctgcagcagagcaccctcaagacgtgggtcggcaagacggagaacgtcgccgccgcgcaagccaccagcgtcgtccgctgcaaggccaactccgaggccgcgctgggcaagtacgccggctccggcgccggggacgccgccgcctccgagagcctgtacgtcaaggggtacaagtactaaagccgccactgctgactgtgccgacccaatccttgtgtcccacgtcgcagcgctcggactgtgccga

SEQ ID NO: 50480 - DNA, 122 bp, Zea mays
gcaagatgaagcccaacatcatctttgtactttccctgctcctcagcttggagaagcaagcaggtgtgatgggacaaaaaggtggagcaaaaggccgattaccaagtgaattttcccaattt

SEQ ID NO: 50481 - DNA, 259 bp, Zea mays
tcgataaagcatctcctccgggggcggcgaactactcctcgtcgccaaaaccctagtcgtgcttctttgccatggcgagcagcgctcaccaggcgagcctcctgctccagaagcagctcaaggatcttgcgaagaaccccgtggatgggttctccgccgggcttgtagacgacatcgacgtcttcgagtggcaggtcaccatcatcggaccgcctgacaccctatatgatggaggctacttcaatgcaataatgacctt

SEQ ID NO: 50482 - DNA, 234 bp, Zea mays
gctggtgatcacctcggtgaagcggtggcagaaggggcagagagagttcaagcgcatctgccgcagcatccgcgagctgcagtgctagtcccggcatcctgatggctccgacaggcctgctccagagcacggctgagcatttctgctccgggatctcagctcccgttccccaagcacactcctagctgctccagtctcagcctgggcagcttccccctgccttttgcacgtttg

SEQ ID NO: 50483 - DNA, 173 bp, Zea mays
tgtggcagtcaatctgatgagggacctcttgccaccaaagtacggcaaatgggttccattaccaatggcaatgggggttcccttcctagttggtgcgagctttgccatcgacatgtgtgtggggagcttgatggtcttcatctggcacatcattgacagaagtaaagcatctt

SEQ ID NO: 50484 - DNA, 252 bp, Zea mays
tcgacgatgtcgcagtgaaaatagaaaggagtgtgaacgagatcctcttcagggcattgactctcctggcaatcactgcactgaagtttgcatgagcagtcgtcacgattttataggtttgtcgatgcagttgtgatatactcacctatgtctatgtggttcacgagtgtagacgtgtagtactgctttctgtaggcccaagttccacctgcccaaaccatggttatagcttcccagttctcattgatctcg

SEQ ID NO: 50485 - DNA, 195 bp, Zea mays
tggacattcctagcgcgtggcagatgcctcagggtggtatagatgcaggggacgaaccaagggcggctgccttcagggaattgagagaagagactggtgtcacatccgcagagatcgtggctgaggctcccgtcgggttaacatatgatttcccgccagatgtcgaaaccaaactgaatgccctgtggggaacga

SEQ ID NO: 50486 - DNA, 187 bp, Zea mays
tggctcattcatcgaaacgcaaatcatagagacaggaaaataaaagggagttttgatcagatcgatataagggaggatcccttacctgatttgaatttcatcctccgttagataggatatgctctaagtcttcccgtactttcctataatgactgcggcgattttgtccattttgcgaattcctatt

SEQ ID NO: 50487 - DNA, 165 bp, Zea mays
aggcgctgtcaatggtgcagcacaataaactcgtcaagtatatttgggcctacctagaagcagtcatagtggtcgtgacagagctactcgtggggggctcattacgcaagtatttggtcagtctacgacctatgagccttgagcctcgtgtagcagtggtgtttg

SEQ ID NO: 50488 - DNA, 259 bp, Zea mays
tcgaagatcattgccgtcggagagtccgacgaaatccccctagtgaataacctgaagaggattcctcttgtcgcctctctggtgtccgagatcatcggcgcctacctcatgccccccatcgagtctggctcggttgatttcgccgaatttgagccccggctcgtttactgattctgtacagagatttatccttgagttattcaccctgaaagacaagctgctggtgctttctgccgaaggggccttggatgaatggtga

SEQ ID NO: 50489 - DNA, 261 bp, Zea mays
ctcgcttgcgaagaggtatgagggactgtatcagcgaaatggtgtcaaattcataaatggagctcttatcgaaaaacttggagctggctctgatggaagggtgtcttctgcagtacttaagggtggatctgtagttgaagctgatacagtaattgttggtataggagcaaaaccagttgtcagcccgtttgaagctgttggcagtcaacctaaagttggtggaatagaggttgattcccggttcagaactagtgtacctgg

SEQ ID NO: 50490 - DNA, 160 bp, Zea mays
gtcacagggcatggaagcactgcagcaatctttggcagagactttggctggatctctcggtccagcaggttcttcaggaaatgtggcaaactacatgggtcagatggccatggccatgggcaaactcgggacgctagagcattttcgtcgccaagccgac

SEQ ID NO: 50491 - DNA, 165 bp, Zea mays
ctccgcaccgcgctcgacctcatcttcgaggaagggctggacaacgtcgtgaggaggcacaaccgccttgggacagccaccaggctcgccgtcgaggcgtgggggctcagcaactgctgccagaaggaggagtggttcagcgacaccgtcaccggcgtcgtcgtg

SEQ ID NO: 50492 - DNA, 298 bp, Zea mays
acctgcttggtggcgacgcgtgcaacgggcccatgttcccggaggccaagcccgcctcggcggcggcggcggcgagcaggagtgtggtcggggtggacagggactacctgtcctacgacgagccaaagacggtgttcccgggcgaggcgtgcgatgaccttggcggcgagttctgcgaggcgccgtaccaggacggcgtctccaaggagctggcgcacgcctgaagaccctgatccatccatttctgtacaccacgctatgtacgtatgtgtagcagatggtttacatctacgtgtta

SEQ ID NO: 50493 - DNA, 295 bp, Zea mays
aaaggaattcctcctgatcagcagagactgatctttgctggcaagcagctggaagacggacgtactttgtctagactacaatattcagaaggagtctactcttcatcttgtgttgacacttcgtggtggtgctaagacaaggaagaagaagtcttacaccactcccaagaagaataagcacaagagaaagaaggttaagctggctgtcctgaaatattataaggtggatgagaatggcaaaattagtcgccttcgtcgagagtgccttctgatgaatgtggtgctggggtgttta

SEQ ID NO: 50494 - DNA, 292 bp, Zea mays
agctgtgcaacggtggtggatactaccattactcctactctgttgtacgtggatgtgaccgtatagtccccgtggacatctacgtccctgggtgcccaccaactgctgaggcactgctgtacggtgttcttcagctccaaaagaagatcaacaggcgtaaggatttccttcactggtggaccaagtgaagcatgcttctgctgttgctcgcttgctacgtttctttgcactcgacctacctgtcttatctgaaataaggacggactttgctcggattcacaaatttgttgtg

SEQ ID NO: 50495 - DNA, 300 bp, Zea mays
atggaaacaacaggacgtaggcgctctggtagcaggaacagcgatggttggcctgagctcaggattcatcttcgccgcagcagtgtcagtgacatccgagctctttggaccaaacagcatcggtgtgaaccacaacatcctgatcaccaacatcccgctggggtcactcctctatgggcagatcgccgccatggtgtacgacgcgaatggacaaaggatgacactgatggataatcgcactggcatcattgacaccatgattgtgtgcatgggggtgaagtgctactcgaccaccttcct

SEQ ID NO: 50496 - DNA, 297 bp, Zea mays
  unsure (1)..(297): unsure at all n locations
accaatccagggcctcctccctcaacatatccggcgaggaggcgtggaagaggagggcagcgatgagcggtagcgcttctgctgctagaaccccatcgtccccacctcacggcgatggcttcgccattgggagctcatcttctgctgggttgggtgtgggtgccggcggacagatgactgctgcccagaggatgatggccaagatgggatggaaggaaggtcaggggcttggcaagcaagagcagggcatcaccgcgccactagtggccaagaagaccgataagaggggangagtta

SEQ ID NO: 50497 - DNA, 284 bp, Zea mays
acgccaccccgtgccatcgggctgcgtccgctaacgaccgcccgttcgcgcagggcccagggtgtgggagggagcaatggtcgctgggatggaggcggaggaaggggtgatggcgaaggacttcttctggtagtacacggacgagccgcacgcgtcgcgccgccgggagatcctggccaagtacccgcagatcaaggagctcttcggcccggatccgtgggccttcctcaagattggtttggtcgtgtcgcttcagctatggactgctacattcctccgtgacg

SEQ ID NO: 50498 - DNA, 294 bp, Zea mays
acgatatcgtgttcagcatgccatgcagatcgaagggtgatggtgattacgaactagctagtgatgtgttgatggacgattttctctgggaacggattaaaaagagcgaactgaattgcttgctgagaagaaatgcgttgcccatcttacaggagaggggaatgcattctgtgatcttccggaagataccatgctaccaggagaagtgtagtttagttacagaagcaacagcagcggaatgcatttgccaatacattagctgagacttgaaacatctgcttgccagatgcagca

SEQ ID NO: 50499 - DNA, 295 bp, Zea mays
caacccgatgtagatgtttccccgattgtgcctgctctcaagaattttttcgatgatgcactaaatgcaacagtgagtgagttgaacttcaagacaatagttgatggcctaggtgctgttctctatcagtacccattcaatgtaccagcatactatgcattgatactgcgatcgctcaccgtactggaacgtttagcactctatgtttttccctgattttaaggtgcttgctgcatcatacccttactttgcgaaaaggctactgactgatcccaacccatatctcagagatgct

SEQ ID NO: 50500 - DNA, 287 bp, Zea mays
acgccggctatgcccctgtattggattgccacacggctcacattgcatgcaagtttgctgagctgaaggaaaagattgatcgccgttctggtaaaaagctggaagatggccctaaattcttgaagtctggtgatgctgccattgttgatatggttcctggcaagcccatgtgtgttgagagcttctcagactatccacctttgggtcgctttgctgttcgtgatatgagacagacagttgcggtgggtgtcatcaaagcagtggacaagaaggctgctggagctggc

SEQ ID NO: 50501 - DNA, 290 bp, Zea mays
caacccgatgcgggagatcaaggtgcagaagctcgtcctcaatatctccgtcggggagagcggcgaccgtctcacccgcgccgcaaaggtgctcgagcagctcagcggccagacccccgtcttctccaaggcgaggtacacggtgcggtcgttcggcatccggcgtaacgagaagatcgcctgctacgtcacggtgaggggcgagaaggccatgcagctgcttgagagcggcctcaaggtcaaggagtacgagctgctcaggaggaacttcagcgacaccgggtgctttg

SEQ ID NO: 50502 - DNA, 290 bp, Zea mays
aagcaacctaacattttgttgccgaccttgtttatatttctttggcaagcaacaccgcagtcagattctgctatgtttttcttcatcacaaataagcttggattcactccggagtttctagggcgcgtgaagcttgtaacctcttttgcatccctgcttggtgttgggctctacaactattttctgtaggaagttgctctgaggaagatttttcttgtgacaaccattataggttcagctcttgggatgacacaggtgcttcttgtaactgggctaaatcggcagcttgg

SEQ ID NO: 50503 - DNA, 290 bp, Zea mays
gcggagacgagacgagacgaggcgacgcgagtacgcgaggagtcgaggtaggatcggggctcaggcaagatgaacaggaagccaggagactgggactgcagggcgtgccagcacctcaacttcagccgccgagacatatgccagcgctgcagcgagccacgtggagttgctgatcgtggcggcggagagggaggaggcgactacgccagcttcggtggccgcggtggctcctccttcggcggcggctttggcgctgctggctctgacgtccggcctggtacttggtactg

SEQ ID NO: 50504 - DNA, 283 bp, Zea mays
atcggccccatcgccaacgtgccctacttccgccgagtggctgccgctcacaagatacaccacatggacaagtttgagggcgtcccgtatgggctgttcctgggaccaaaggagctggaggaggtcggtggcctggacgagctggaaaaggagctcgcgcgaatcggccggaccagctgatggattcgtccggattccggcgcggcgatctccgctccgctccgtgattccggcgcagcctcgtggttggggagccgacgaccagaacctccagaagggattt

SEQ ID NO: 50505 - DNA, 286 bp, Zea mays
accttcgtccgtagcagaccaggaacgcccaaggcgctagcgtctccaagatggtgctgcaaaacgacattgacttactcaatccaccggcagagcttgagaagctaaagcacaagaagaagcggctagtccagtcccccaactccttcttcatggatgtcaagtgccagggctgtttcagcataaccactgtgttcagccactcccagactgtggttgtgtgcccaggctgccaaactgttctgtgccaacctaccggtgggaaggccaggctcaccgaggggtg

SEQ ID NO: 50506 - DNA, 279 bp, Zea mays
acattattcacagcaattaatactctttagtccggtttagtcactggaaccaaacgggttactttagcgcctaatctttagtcactaaaatttagtttagtgactaaaggaaccaaacagggcctaaagatacaatagatggacatcaccgtgctttaaatgcctactcactagaccataaatgcagcaatatgccgtagtccgtagacatgtagaattactcatgcatgttgtattttacaaaaggcatcttacataaactatattttgccccttaat

SEQ ID NO: 50507 - DNA, 286 bp, Zea mays
agcaaaccatcctagctggactccaccatcaactgagtacatgcattctcgtttgtgctgtcaaatatgcaaagttgatatcattggtacagacaatttacttgtttgtgatgcttgcgagaggggagtacacttgaaatgccttcatcagtatggcaataagggcgtccccaaagctgagtggcattgttctgcatgcctgactcagagtaagggaaaacccttgccaccaaaatatggcaaggttacaaggactgtagttgcatcagagactgctccacctggt

SEQ ID NO: 50508 - DNA, 283 bp, Zea mays
atgcgcctttcttcgtgacaaggttccgggaggctctgttcttctactcggccttgtttgatgcgctggacgcgaccaccccaagagacagcaaccagaggatgctgatcgaggagaacctcttcgggagggctgccctgaatgtcattgcgtgtgagggcacagaccgagtggagcgccctgagacgtacaaacaatggcaggtgcggaaccaacgagcaggcttgaagcagcagccattgaaccctgatgtcgtgcaggtagtgcggaacaaggtcaagga

SEQ ID NO: 50509 - DNA, 286 bp, Zea mays
ataggaaccagagtgcaggacgctgagaagcttgtgcagtctgcaaagcatctatcagaaaaacatttctttgcaaatagcctgaaacccgtgaaggagaatcgtgtgcatggcccattagagaatatctctgtgcatctgagtccaagagaggccttctttacagagaagaggagagtgaaaatcgatggacagccttggtgaaatctgtggtgagctaatatgcccgtatccacctggtatcccagttctgattccaggcgaggtaggtaaccatgattcactg

SEQ ID NO: 50510 - DNA, 118 bp, Zea mays
cccaacatcatctttgtactttccctgctcctcatcttggagaagcaagcagctgtgatgggacaaaaaggtggatcaaaaggccgattaccaagtgaattttcccaatttccacaca

SEQ ID NO: 50511 - DNA, 260 bp, Zea mays
atgtgctctccatggccaacgccgggcccaacaccaacggctcccagttcttcatctgcaccgtcgcgaccccttggctcgacggcaagcacgtcgtcttcggccaggtcgtcgagggcatggacgtcgtcaaggccatcgagaaggtggagacccgcaacggctccacctccaaggtggtcaaggtcgctgactgcggacagctctcctagatcgctctgatctggtctgttcggccgccctccctccgtcatcgtcga

SEQ ID NO: 50512 - DNA, 255 bp, Zea mays
acttccctactgcgaggaaggccatctggtatttcgaaggaatctatgcgtactcccctcagataccaggtgttcgtttcccaggattaacccatcctggtatagtgggaactgcaccgtcagccgaacttcttaatatacggaacgagagggagaaaagattggccgagacaagcccacagacccttaaactgtgtgaagtgctgcaccagaggcctcttgctaatttaccgacccctgagaactgcttacttg

SEQ ID NO: 50513 - DNA, 256 bp, Zea mays
accaactccatgttcccgccgatccaccagtgccccaatggacacacgctgtgttccacatgcaaggccagagtacacaaccgttgccctacctgcaggcaagagctgggcgacatcaggtgtctggcgctggagaaagcgccgagtcgctggagctcccctgcaggtactactcgctggggtgcccggagatcatgcctgactacagcaagataaagcacgaggcgcagtgcggcctgagaccgtacaactgccc

SEQ ID NO: 50514 - DNA, 253 bp, Zea mays
agaaactcatttcaagtggcacgagaatatggctgtacagtggtgatatggatgcagtgtgctcattcatttcaacacaatatgtgctggccaatcttgggcttcctatagaagcagcttggcgtccatggcacgtgacaatgaggttgctggctacgtcattgggtataaagggctggtcttcgcgacggtcagaggagctgggcacatggtgccatactaccagcctcgcagggcattggcattattctcg

SEQ ID NO: 50515 - DNA, 250 bp, Zea mays
agcttcttcccataggctgaaggaatagagaccgccacaatgagagcttggccaagagaagatccaaccgccaaggcttcctctggcacctccgcttaagaatgttcagtgcttttgagatgttttcaagacctatcttgttactgcttaggtaccttatgctgctatagcagtgttgcaattgcccctgtacttgacagatttgcattagatgctcaagctatagagggtaggttcctaattgtgacca

SEQ ID NO: 50516 - DNA, 234 bp, Zea mays
ccgacaccgtcaccgccgtcgtcgtgccgcccaacatcgacagcgccgaggtcgtcaggcacgcgtggaagcggtacaacctcagcctcggcctcggcctcaacaaggtcgccgggaaggtcttcaggatcggccatccggcaacctcaacgagctgcaacttctgggatgtctgagcggtgtggcgatggtgctcaaggatgtggggtacccagtgaaactaggtagcggcgt

SEQ ID NO: 50517 - DNA, 248 bp, Zea mays
ccgctcgaggcccgcgcagaacggcaagacgcacttcgacgccggcgacgagcgcgccaaggagttcgcggccctgctcaagtccaacgaccccgtgggcttcaacctcgtcgacgtcctcgcctggggctcctcggccacatcgtcgcctactacatcctcgccacctccagcaacggatacgaccccaacttcttctgagcggtcgtcgaggatgtattctacagacagccgtgtgcgtgcgtgtg

SEQ ID NO: 50518 - DNA, 252 bp, Zea mays
cagcctagtgtccccaaagaaaaatatcctgagcctctacaggcaagcgatgagaaaatatatctgggacctcatggagctccaccatctcaagcaaagcagcaggagctgaacaccgttggccgcaagcagcggtccggaacaaactgaaggaagcagataggaaattctccggcaatgctcaggagaacaagatggagagcctaagggagctgctgggtgctagaggtggtactggtaccagcctgccaa

SEQ ID NO: 50519 - DNA, 253 bp, Zea mays
ctggtttggctctggaattacactcaagggcaaggtgacaattatcgccaagcctggagtgaagttggagattccagatggagacgtacttgagaacaaggatgtcaatggccctgaggatctttaagcaatgtttatcatcaccagttttcccaaggacatgtcacaggaactgccaagcctaatcactcctactgagctctatattttgtaattttcatgtgcattccgattccgctgtgagggtcatgtg

SEQ ID NO: 50520 - DNA, 253 bp, Zea mays
aggtgaaggagctcaagaacggccgcctcgccatgttttccatgttcggcttcttcgtccaggccatcgtcaccggcaagggcccgctcgagaacctcgctgaccacatcgctgacccagtcaacaacaacgcatgggcctacgccaccaacttcgtccccggcaactaagctcaacggctatgctatgcgacttcattgtctttcggatcggagagggtgtacgtacgtggattgattgatgctgcgagatg

SEQ ID NO: 50521 - DNA, 248 bp, Zea mays
tgagcttggtagggagcgtctggctccagaccatcaacggccccaacgccgacttcgccgtctactcgtcgcagctcaaggagaccaagggcatctcgcaggtgcagctcaacttcctcgccttcgcctccgacgccggcaagctcttcggctggctcgcgggtgtggccgcgctgcgcctcccgctctgggtggtggcgctgaccggggccacgttcggcctcgtcgggtacggcgtccagttcctg

SEQ ID NO: 50522 - DNA, 246 bp, Zea mays
caaattcttgatgttgtcacattaagcacccatgagacggggagaaacgtagtggactcgtaatttttatggccaggtatgacgaattggctagcaagagcaatgttgaatacattgctggaggagccactaaaactctatcagggttgcccaatggatgcttcagattcctggtgcatcaagttacattggttgcatcgggaaggataagtttggtgaggagatgaaaaaaaatgcacaagctgc

SEQ ID NO: 50523 - DNA, 240 bp, Zea mays
acgaattcggtcattatgttagattggcaactcatgtcaattttcgtacttttgtgaagtcagctggcattgatttttacccattgggtggtgatcctctcattatggctcagtatatgacaaaaacaaagggtttttcctggcggcaccgacagagattgccattcatagaaagcagcttaacgaaatcatcttctcacttctacctgcatgcacagaacctgatttggatactggaac

SEQ ID NO: 50524 - DNA, 244 bp, Zea mays
agcccatgggttggcgccggagatcccggaggatctctacttcctcattaagaaggccgtggcgattaggaagcatctggagaggaacaggaaggacaaggactccaaattcagactcattcttgttgagagcaggatccaccgccttgcccgctactacaagcgtaccaagaagctcgcacccacctggaagtacgagtcaaccacggcgagcactctggtggcctaagtgatatcctctgat

SEQ ID NO: 50525 - DNA, 245 bp, Zea mays
cgaggggagacgttacgccatgcatggcctaagaagctttgtgcacgacaagactcctgagatcatgcctgcagttaacaagttcttcactgaccctaagtgaagcatgttgattggcatactactactacacttgctactggggattttacactttgctggcaactcaatatgttatagacatccatgacctctaaaagtactttgagcgcttggtgatgacttggtatctgtatgatggtgga

SEQ ID NO: 50526 - DNA, 247 bp, Zea mays
ccggggttccggttccgccacacggacgaggagctcgtggtgcagtacctccggcgcaaggccatcggcgtgccgctccccgccgccgtcatccccgtcttccgcgacctctacagccgcgacccctgggacgtcgtcgccgtctctgcccctgatacgaggagcgagggggagaaatacttcttcgtggtgcggccggcgaccggcggcaagagcagcggcgctggtactggtagcagggcggccg

SEQ ID NO: 50527 - DNA, 240 bp, Zea mays
agcgactcagcgagcgagagcagcacacactgcacgcagctagctaggagcagcagcagcggcggcgatggcggcctccatgatctcctcgtcagctctggcggtggcgcctcagggcctgccgcccctcggccgccgcgcctcctccttcgccgtcgtctgctccaagaagaagatcaagaccgacaagccctacgggattgggggtggcctgaccgtcgacgtcgacgccaacgggag

SEQ ID NO: 50528 - DNA, 237 bp, Zea mays
cgactcctcatctgtatgctcgcctccgggaccctgctcagcaagtgcggaaaacagcggggctggtgatgacccacctgatcctcaaggacatggtgaaggtgaaggggcaggtcagcgagatggcggtgctgctcatcgaccccgagcctcagattgctgccctggccaagaacttctctaatgagctctcccacaagggcaatgcaatctataatctccttccagatatcatca

SEQ ID NO: 50529 - DNA, 105 bp, Zea mays
gggccagactctcgggtacaaagttggaacaatgattgagctacccagggcaggtactagtggctgatgagatagcggagcaggctgcattcttctcctgcggaa

SEQ ID NO: 50530 - DNA, 122 bp, Zea mays
gcactgcagcccagcgcaaactatttgctgaactgggaatagttgctgacgaattacctgttgaccagttcatcctccttgggaggctgctttacatggctccttcagatggaaaatgggga

SEQ ID NO: 50531 - DNA, 174 bp, Zea mays
gttcagctcgtcgtgggacatccgcgcgacaccgacgttcttcttcctcaagaacgagcagcaggtggacaagctggtcggcgccaacaagcctgcgctggagaagaaagtggccgccgtcgccgacgcggccggcagcaaggcagtgtagtgtagtgtagtttaggcaaagac

SEQ ID NO: 50532 - DNA, 205 bp, Zea mays
cgtgcgcatccacccgccggcgccgttcctcctgccgcacttctccacccacgactgcgagatcaacggctacaccatccccgccggcacgcgcgtcatcgtcaacgcgtgggcgctcgccagggacccgacgtgctgggacaaggccgaggagttcttcccggagcgcttcctggaacaaggccgcgacgccgaggccgacatg

SEQ ID NO: 50533 - DNA, 133 bp, Zea mays
cgacatggtcaaggtcgtcgcctggtacgacaacgagtgggggtacagccaacgcgtggttgatctggcgcacctggtggcggccaagtggcccggcgcggcggcggccggcagcggcgaccctctggaggac

SEQ ID NO: 50534 - DNA, 149 bp, Zea mays
gcctctcctcctccagagctcgtcgccaccggccaccgccaccctcgatcacgccgtccgtcgaggtaaggtcagcatggtgagggtcagtgtgctcaacgatgcgctcaagtccatgtacaacgctgagaagatcggcaagaggcagg

SEQ ID NO: 50535 - DNA, 186 bp, Zea mays
catctcgccgtcaccacccccaatccagcaaacgcaaaccccatctcgccgccgccgccgccgcgatgtctcgccgctatgacagccgcacgacgatcttctcgccggaggggcgtctctaccaggtggagtacgcgatggaggcgatcggcaacgccgggtcagccctcgggatcctagcggccg

SEQ ID NO: 50536 - DNA, 194 bp, Zea mays
caagtgtgttccatctctgttggggtggttggtgatatttgccgtgccttggaagataaaattttgcccttctgtgatcgcattatgactgttcttcttaaggacctatcaagctctatgctcaatcggtctgtgaagcctccgattttctcatgctttggagatattgctcttgctattggtgagaatttgag

SEQ ID NO: 50537 - DNA, 189 bp, Zea mays
tggctgctgagtaccagaagcttcttgcccagaggctgaaggaacagagggaccgccggagcgagagcttggccaagaggaggtccaagctttctgccgccgtcaaggcttctgctgccacctctgcttaagaatattcagtgttttgggatctttgtaaggtctatctcgttacagcgaaagtgcctc

SEQ ID NO: 50538 - DNA, 127 bp, Zea mays
gcaagatgaagcccaacatcatctttgtactttccctgctcctcatcttggagaagcaagcagctgtgatgggacaaaaaggtggatcaaaaggccgattaccaagtgaattttcccaatttccaca

SEQ ID NO: 50539 - DNA, 115 bp, Zea mays
cggctcgagcaagttttcaggacctttggctacaacctcagttgccactaatgcaaaatttgaaattagaagccgcaagcgtgtgcagatcaaatttgatgaagggactgttggt

SEQ ID NO: 50540 - DNA, 127 bp, Zea mays
cggctcgagcaagttttcaggacctttggctacaacctcagttgccactaatgcaaaatttgaacttagaagccccaagcgtgtgcagatcaaatttgatgaagggattgttggtacaccacagttg

SEQ ID NO: 50541 - DNA, 124 bp, Zea mays
gcaagatgaagcccaacatcatctttgtactttccctgctcctcatcttggagaagcaagcagctgtgatgggacaaaaaggtggatcaaaaggccgattaccaagtgaattttcccaatttcc

SEQ ID NO: 50542 - DNA, 273 bp, Zea mays
accatggccccctttgagcccctggcttctggcatcctgttgttgctgtggctgatagcccccagcagggcctgcacctgtgtcccaccccacccacagacggccttctgcaattccgacctcgtcatcagggccaagttcgtggggacaccagaagtcaacccgaccaccttataccagcgttatgagatcaagatgaccaagatgtataaagggttccaagccttaggggatgccgctgacatccggttcgtctacacccccgccatggag

SEQ ID NO: 50543 - DNA, 184 bp, Zea mays
gtggtgatcaatgagcaatgtggttacttgatgcgaacgaaggtttcttcatcagacgaaggtggcgtactgcagggtttgctgttttggatagcctatacttgactggcaagtgagataacaaaaggagcggcggctacatacaccgtcaatggatcatcatgtcctccatttagatcgacac

SEQ ID NO: 50544 - DNA, 116 bp, Zea mays
gttcggctacgacgtcggcatctcaggtggtgtgacgtcgatggacgacttcctgggcaagttcttcccggcggtgctgcggaagaaactggaggacaaggagagtacctactgca

SEQ ID NO: 50545 - DNA, 266 bp, Zea mays
ggagacgcatccagcctccagcagagggctccagagatcgagcaagatgaaggagggcacggcgaactgtgtggacatcctcatcgccatcatcctgcccccactcggcgtcttcctcaagttcggatgcaaggtcgagttctggctctgcctcttgctcaccttcctcgcctatcttccggggatcatctatgcgatctacgccatcaccaaggactagcgcggttccagttgggtgagagctgcaggctcctcctcttctcagc

SEQ ID NO: 50546 - DNA, 115 bp, Zea mays
gcccaacatcatctttgtactttccctgctcctcatcttggagaagcaagcagctgtgatgggacaaaaaggtggatcaaaaggccgattaccaagtgaattttcccaatttcca

SEQ ID NO: 50547 - DNA, 116 bp, Zea mays
ctggtttggctctggaattacactcaatgggcaagtgacaattatcgccaagcctggagtgaagttggagattccagatggagacgtacttgagaacaaggatgtcaatggccctg

SEQ ID NO: 50548 - DNA, 256 bp, Zea mays
tggagatgtgcgccgacgactacgtgcagaagatgaccttcgacagctacctctacaagcgcgtcgtgccgggcaacccgctcgacgacatcaagctcgccgtcaacaccatcggcagcctcgtcagggccaccgcactgcgccgggagatggagaaggtcaccttgtgagccgccgcccgcgacgtctttgccgtcgaactggtgtcgcagctgatcggccggtgtattagtagagatttgcggctgatcgggtt

SEQ ID NO: 50549 - DNA, 262 bp, Zea mays
ataactttctgctgggcccctggctggaaagtgcaaaaagccttgctataactgaaaaggaacgccagcagtacgagtggaacgccagaacacaggtgacgatgtggtatgacaacacggagaccgagcagagtaaactgcatgactacgccaataagttttggagcgggctgctgaagagactatatcttccaagggcgtcaaagtacttcgcctacttaacgaggagcctgcaagagaaccggagcttccagctggagga

SEQ ID NO: 50550 - DNA, 259 bp, Zea mays
gtttttcggtgatgatcttgtcaagaagggctcccacatgttgcagatcgatgtcgacaccgagaaaggaggcctggctgtcaaccccaacttcttcgtcgattttggcaccgagcctgatggtcctgccctggcccacgagatgagatatcctggtggggactgcacctctgatatatggatctgaggtcaaggattcggcgtaattaacaggctgctggagaatccctgttgttgtatgcactgtaattaacatggt

SEQ ID NO: 50551 - DNA, 78 bp, Zea mays
attgaggcaaccctctcgagagccaaattcgaggaactatgttcagaccttatagacaggcttaaaactcctgttaat

SEQ ID NO: 50552 - DNA, 258 bp, Zea mays
gccgctacgccgtcttcgacttcgacttcgtcaccgtcgacaactgccagaagagcaagatcttcttcatcgcctggtcaccggcggcgtcgaggatcagggccaagatcctgtacgcgacatcgaagcaaggcctgcggcggctgctggacggggtccactacgaggtgcaggccaccgacccctccgagatgggcttcgacgtcatcagaggccgcgcgcaatgaggcccccgctgcgctctgctcctatttacgt

SEQ ID NO: 50553 - DNA, 256 bp, Zea mays
cgcgtgcgaaccaagcagaccacaacaagaagaagcgtaatcgtcgccggaaggaaaggcgcggacaagatgtcgtggcaggcgtacgtcgacgagcacctgatgtgcgagatcgaaggacagcatctcagcgccgccgccatcgtcggtcacgacggcagcgtttgggtgcagtcagagagcttccccgagttaaagcctgaggaggttgctggtatcataaaggactttgatgaacctggtactcttgcaccaa

SEQ ID NO: 50554 - DNA, 257 bp, Zea mays
ggaggtcccaaacctgttatttacagggattttaagacatcgaatgttctacttgatgtggagtacaacgcaagactatctgatttcggtttagcataagctggtcctcagggtgataaaactcatgtatctactcgggttgttggtatctatggttatgctgcaccagagtatgtaatgacagggcacttgacatctaagagtgatgtttatagcttcggagttgtgctactcgagatgttgactgggagaagatc

SEQ ID NO: 50555 - DNA, 120 bp, Zea mays
gaagtccatcatcctctttgtcctttccctgctccttatcttggagaagcaagcagctgtgatgggacaaaaaggtggatcaaaaggtcacttgctaagcggatcttcccaatttccaca

SEQ ID NO: 50556 - DNA, 259 bp, Zea mays
atcgaatcgtctcgctcgtggctgccctactcgtgctgcttgccctcgccgccgtttcctccacgcgcaggcacaaaaggagtccgtggctgacaacgccgggatgttggcaggcggcatcaaggacgtgccggcgaacgagaacgacctccagctccaggagctcgcgcgcttcgccgtcaatgagcacaaccaaaaggccaatgctcttctggggttcgagaagcttgtgaaggccaagacacaagttgttgctggc

SEQ ID NO: 50557 - DNA, 276 bp, Zea mays
tgaaacagttgatgttgatccacctaaggaaagtgcagcagatgataatgagagatgtgtgggtgaatcatcacctggtcatttggaagatcagaagggagagaatgctggtagataaagtagttctggaagctctagcagtgactcgggttcatcctctagtgatacggacacagatagttcatcagcagatggttctgatgctgggcaatcacccagaacgtagcatctataagccagatgttgatgggggcactggaaaccataacaccttag

SEQ ID NO: 50558 - DNA, 243 bp, Zea mays
gggagttcgggagggacgctcctaaccccaacgcgctcaacagattgaaagagatgacaatggtgttgttcgagaccttgaggctctactcgcctgctctcttcatgcaaaggaagaccctggccgacatgaccgtggggccaataaaactgcccaaaggcactgcaattgtgatacccattccgatcatgcatcgagacaagcaggcatggggcgacgacgcagacgagttcagtccgatga

SEQ ID NO: 50559 - DNA, 274 bp, Zea mays
gagttcaagatcgcagtcctgcccattctgccgtgacaacctgaagaagacctgtcctagtgacctgtggatatatgttgaggaccaagatgtggtcgacatggagacggtgtcgagcgagaacctcagacggctgttcatgtacataagcaagctgcctctgattgtcccagacgtcatcttcagcgtgtatgattcccacatcaaatgatttccgacgcgaccttctcgacgaccttcagccagtgcccagctccagttaatcttatgcccc

SEQ ID NO: 50560 - DNA, 178 bp, Zea mays
gacttgttatggatttaaaccgactcaatctcacttaatccacatggattgagagcgaaccgaacaaaccgtaatatgtgtgttcttggggtggaattttggatggtaatgtacaaggacgagtggattaatttacagtgatgtcggaggaccgacaagggttgcagtagctccacgc

SEQ ID NO: 50561 - DNA, 273 bp, Zea mays
cccatacttctggcaggcctcaccaacagttggtgtgtaaacaaaaggaagcagctccaccacattatcaattaaaagcttgtagaaaagcctctcgtccgtttcctgaaggttcatcatagctatataccgctgcaaaagggtctggtactgccgcagggtgttcatgaacttcttaatttggagttcctgagatagtactgccggaggaagcagtccacgcaagtagtgtccatccctttcctcctctgtgaaagcagagaccttgttgtg

SEQ ID NO: 50562 - DNA, 271 bp, Zea mays
cctcaaatcggcgctcatgacaactgcacttaccaccgacaacaacgggatcccgatacaagcagatggaaacccagtaaagatcgccgacgctttcgattacggagcagggtttgtcaacccaaccaaggctgacgatcccgtctcatatacgacatccaaccgtcagattacctcatcctcttctactgcacgggagggttgggtaccaacgacagctgcacgacacctagggcatctgttgtagacctcaaccttccgtcgatcgcaa

SEQ ID NO: 50563 - DNA, 268 bp, Zea mays
ctcgacaatggcactccaggcagcctacgagtacctgcagcaggccgtcggccatggcgcgtggtcgtccacgcagacgctgacgctgctgctcatcgccgtacccaccgtactactgctgctagcgtccctcgccaagagcacgtcgtcgtccggtaggggcaagccgccgctccctccctcgccgccgggcaccctccccatcgtggggcacctacaccacatcgggccccagacccacatctcgctccaggagctggtggccaag

SEQ ID NO: 50564 - DNA, 265 bp, Zea mays
  unsure (1)..(265): unsure at all n locations
cgcttaacaagatgaagaaggagaccaccgcggagctggaggccaagctggacgagggacgcagccgtgtggaggccgagctcgtagaggcgctcgccaacctcgaggcgcagaaggaggaggctgttaaggcgctcgacgcccagatcgcctcgctcagtgatgagatcgtcanaaaaaggtgctcccatccgcgtgatgaaaccaaaccggccctgccttatcctatgactatagttacatgaacatcataaattaatgataa

SEQ ID NO: 50565 - DNA, 265 bp, Zea mays
acagaacatactcctatactgaagcgctgagaagtagataagaataataatatggggttcagtgaggcacaggaagagctcgtcctccgttcatggaaagccatgaagagcgactccgagtcgactgctcttaagttcttcctcaggatcttttgagatcgcgccgggtgccaagcagatgttctccttcctgcgcgacgccggcgacgcgccgctggagaaacaccccaagctcaaggcccacgccgacaccgtcttcgttatg

SEQ ID NO: 50566 - DNA, 84 bp, Zea mays
cgtgactgggtcactaacgtggagaccacacactatatattgggctctgttgctggcccgcacccgtacccgatgatggtgagg

SEQ ID NO: 50567 - DNA, 226 bp, Zea mays
gtcttaagttccaagacaaggacgattctcaccaactgaactatgacttcagaaatccattcgttgtttgtggtgctacatatgttcctatctatcgtggccaaaaggacgtttcctgcccatactgtggatcccgatttgttccttccatcgaagggcagctttgtaccatatgtgagcttggtgcggttggggcagatgcttcaggtctcctctgctctccaac

SEQ ID NO: 50568 - DNA, 267 bp, Zea mays
aagggaagttgatcgagaagtcttggtagacatggagcagatccagtactccgagaagtactacgacgacaactatgaatacaggcacgtcgtcctcccgcccgaggtcgccaagctcctccccaggaacatccttctctccgagaagcagtggcggttggtgggtgtgcagcagagccgcgggtgggtgcactacgcgatccaccggccggagccgcacatcatgctgttccgccgcccgatcaactaccagcagcaggaggagga

SEQ ID NO: 50569 - DNA, 266 bp, Zea mays
  unsure (1)..(266): unsure at all n locations
ggctcgtggcgccgacaggatgggcaagtgtcgtggacttcgtactgctaggaagctccgtagtcaccgacgagaccagaagtggcatgataaactatttaacaaagcntctttgggcacagccctaaaggccaaccctttggaggtgcttctcatgccaaaggaatcgtgctggaaaaagtaggagttgaagccaaacagccaaattctgccattaggaagtgtgtaagggtccagctgatcaagaatggcaagaaaatcacagc

SEQ ID NO: 50570 - DNA, 148 bp, Zea mays
gtgcccagaggtggcctgggatattttcctattctgactatgtggcgccgtggggcagaacttcatcttcttaaccatcagccggtttggctctcttactaacacaacaatcactaccacccgtaaattcatgagcattgtggtttca

SEQ ID NO: 50571 - DNA, 262 bp, Zea mays
ctctcgtgggcgctgccatcgcggccttctaccaccagtacatcctccgggctggcgccatcaaggccctcggctccttcaggagcaacgcgtgatgagcggggcttggctgtggagcaatggcgggcgacctacggcggggggccgtgagcgaggagaatgccatcattcatcgatcgacttgggtgccggtggttggttcgggtcgccttttttttgtttcagcagctgctgcgttgcgcgcgtgcgtgagatttggttt

SEQ ID NO: 50572 - DNA, 263 bp, Zea mays
cagaagggtatcgcatgggctggagtgatgaaatactgggcttcgattgtggtgggcagcagtgggtttctgaaaactgcttccccactggaaccctagcaaagccaagtatgaaggatcttgattatatagataagctgctgcagttgattgaaaaggaggagatacccgcacctggacctattgagcagcgttggactgcccgcagcaagagcccgatgagcccggcatcaagctctgaagaagatgatgtattttcatgg

SEQ ID NO: 50573 - DNA, 190 bp, Zea mays
tgaaaaataataccggagctggaaagagctgcaaagagcgtaggtcgggacttctcgacgttcatcatgaccgacaacacctgtggtcctgagcctcctcttgtggagagaatcgagaaatctggggtgaagggagagaagccttcgtcagggaggtaagggaattcgagaagaaggttgaagagctgga

SEQ ID NO: 50574 - DNA, 181 bp, Zea mays
gacggggccaaggaactgcttttgctgcctccatcccacccatgagggctgcaggcactacaaaagagctgatctactgagaattctggaaaacaaggtctgggctctagcagtgtggcacttccgacagagcacgtgaccgtccagggggaagcagccattgtcatctgcctcaatcgac

SEQ ID NO: 50575 - DNA, 138 bp, Zea mays
agtttcacgttgcattgcataggcaagtcgagatgatgagttggcgttgtacactaagatgaaccatgtttgtgcaatagtggtggtttttgtttcctgctggttaattgttgatatccattaatttgtttttcttct

SEQ ID NO: 50576 - DNA, 195 bp, Zea mays
tccaaggaccagtttatgtcggaactggctgtgttttcaaccgaacagctctatatggttatgagcccccaattaagcagaagaagggtggtttcttgtcatcactatgtggcggtaggaagaaggcaagcaaatcaaagaagggctcggacaagaagaagtcgcagaagcatgtggacagttctgtgccagtat

SEQ ID NO: 50577 - DNA, 185 bp, Zea mays
acggctatgagcctgctgcagcgggcttcggtcgccgctctgacagctctgtctggccgccgcgctggcactaggctcggagtcggaagttttctcacacggagctttccgaagactgtcgctcctgtgcggcacagtgtggaccatggcaagagactgtttgtcatcaagccttccttatacta

SEQ ID NO: 50578 - DNA, 187 bp, Zea mays
cttttacgacgaccggccggtgcagtacttcgtgtaccagctgctccggggctaaagtacgtgcactcggcgaacgtcctgcacagggacctgaggccgagcaacatgctgctgaacgcctagtgcgacctgaagatcggggacttcgggctggcgaggaccacgacggagaccgacttcatgatgg

SEQ ID NO: 50579 - DNA, 182 bp, Zea mays
attgacaaggaggatcttcgggacacctttgcggccatgggcccctcaatgtgaagaatgaggaactcgacgccatgatgaaggaagccagtgggcctatcaacttcactgtcttcctgaccatgtttggggagaagctgaagggtgcggaccccgaggatgtgatcactggagccttcaag

SEQ ID NO: 50580 - DNA, 188 bp, Zea mays
ggaggtgtcttcagttcattctccagtcccgctgctgttttgcctcccactactccatcatgtccttcagtgctgaccagattgccgaattcaaggaggcatttctcctcttcgacagaaccggtgaatgcaagatcaccttaagtcaggtgggcgacgtcctccgggctctgggcaccaatcccaca

SEQ ID NO: 50581 - DNA, 182 bp, Zea mays
ccaatgctggccactggtgggacaatggttgctgctattgacttgttaatcgagtgcggagttactagcaagcagattaaagttatatctgctattgcatcacctcctgccctgcaaaagctcaataacaagtcccctgggctccacgtgtacagaggaatgattgctccagatgtatatga

SEQ ID NO: 50582 - DNA, 285 bp, Zea mays
ggtcgtcgagggcatggacgtcgtcaaggccatcgagaaggtgggcacccgcaacggctccacctccaaggtggtcaaggtcgctgactgcggacagctctcctagatctctctgatctggtctgttcggccgccctccctccgtcatcgtcgactccccctgcgtccgttcctttggatctgaataagatggtggtgatctgagtggtcgtcttagtttatcatgtatcgctcgcagtttaatttagcggtttaggtgtggatctgtgaaccccatggcgcctc

SEQ ID NO: 50583 - DNA, 160 bp, Zea mays
ggcgtcgcggccacgtgcgctaaggtacctgtcgatacaatggggcatcgacctgtccaaggtgtccgtgctcgtgggcgacaagggcgacaccgaccgcgaacggctgctccctggcctgcacagaacgctggtcctgccggagctagtttgccacggc

SEQ ID NO: 50584 - DNA, 148 bp, Zea mays
ggggcctcaggagctgagctcaaggccgtctgcacagaggctggaatgtttgctcttcgtgagagaagggtgcacgttacccaggaggacttcgagatggcagtggccaaggtgatgaagaaagacacggagatgaacatgtccctgc

SEQ ID NO: 50585 - DNA, 122 bp, Zea mays
tctggtggccaaatcctccatcctcttggatgttaaaccttgggatgatgagacagacatggcccagctagagacttgtgtgcgttccatccaattggacggactggtttggggggcctcaa

SEQ ID NO: 50586 - DNA, 151 bp, Zea mays
ttgccccaaaaattactgaactgctgtcttttgctatgcttgtaagatcatcatcaagaatttcccaactgtttctagcgcacctccagtttattgcctgtgtgaagcaaaaggagcatccaattcgtcttggccatgggtctgtagttag

SEQ ID NO: 50587 - DNA, 98 bp, Zea mays
gtaggctgaaggagcaatgtaccttttccctcagatccatctgccacataaggcaattgaggctgataaagctgccaagaaagcacctgatgcattct

SEQ ID NO: 50588 - DNA, 258 bp, Zea mays
gtctccgccttccgccgcgaacacgccgctgtctcgaccccttgtcctcctccttcagcaagatggcggagattgagataaaaacagcacctgctgacttccgcttccctacaacaaaccaaacaaggcattgttttactcgctatgtcgagtaccacaggtgtttgaatgccaaaggggatgatgctggtgtttgcgaaaaatttgccaagtactacaggtccctttgccctggagaatgggttgagaattggaacg

SEQ ID NO: 50589 - DNA, 152 bp, Zea mays
gaagatgttgtcctgtgatggggctgacaggctccagacaggtatgcgtggtgcctttgggaagccccagggcacagtagccagggttcacattggccaagtcatcatgtctatgcgaaccaagctgcagaataaggaacatgtgattgagg

SEQ ID NO: 50590 - DNA, 137 bp, Zea mays
gatgcggtggacgccttcttaaccgcagtggccaccaaccagccacccaagatctttgtggcacacagcaagtttgtcattcttagtgcacgtaagcttgtgttcattggggacacactgtcacggcaggcaaaggc

SEQ ID NO: 50591 - DNA, 270 bp, Zea mays
tgataatgtttgcccttgagcgttccattgggtgtaagtgcttagttgagtttgaagttgttgtcgcaccacaaagacatacccagaccacatgtttgatgtcatctacagtcgtgacactatccttcatatacaagataaaccctccttgtttaaaagtttcttcaaatggctgaaacctgggggaaaggttctaatcagtgattactgcaagagtcctggaaaaccatcagaagagtttgcaacatacattaagcagaggggttatga

SEQ ID NO: 50592 - DNA, 274 bp, Zea mays
gtaaatactatgtcaaaatagacccacaaggagaaggagctcggtggcgtcggacatttggccaggaaatatactcccctctccttcttgctttcacagagcaggatggaggcaactgggcgaattcacatgttgcaaaattctctgcgatggattcaacttacagcttgcctgataatgttgcaatgcttacccttcaggagcttgaagatggaagtgttctccttcggtttgctcatctatatgaggccggggaggacaaggatctttcgtc

SEQ ID NO: 50593 - DNA, 267 bp, Zea mays
  unsure (1)..(267): unsure at all n locations
gtttgtaattgctgatgcaacaacattgacccaggcagggtatgtaggagaagatgtagaatctatattatacaagttactcacggtggcagattttaatgtgcaagcagcacaacaagggatggtgtacatagatgaagttgataagcccacaaaaaaggctgaaagtctcaccattagcagagccgtatctggtgaaggtgttccgcaggcattgctganaatgctggaaggcacgatagtcaacgttcctgagccaggagcaag

SEQ ID NO: 50594 - DNA, 151 bp, Zea mays
tgtctatctggaaggcacactgctgaagcccaacatggtcacccctggccatgcttgcacccagaaattttccaatgaggaaattgccatggcaaccgtcacagcacttcgtcgaacagtgccccctgccgtccctggggtcactttcctg

SEQ ID NO: 50595 - DNA, 263 bp, Zea mays
tgagccatatcattaagcaaattgggatgtttactttcactgggctgaatagcgaacaagtcgcattcatgaggcaggaataccacatttatatgacatctgatgggaggatcagcatggccggtttgagcatgaggactgtgacccatcttgcagatgccatacacgctgcagttactcaactgaaatgaggatagtatcgcagctttcgtgaataaaacctgaatcacccacaacaatgttctaagtactcagccagtggt

SEQ ID NO: 50596 - DNA, 242 bp, Zea mays
tgaaagcatcaaggccagtatcgaggccaggaaaccagattttgatgcctttattgatccgcagaagcagtatgctgatgctgtgattgctgttctgcagacccagttgattcccgacgacaacgaaggaaaagtgctgcgtgttaagctcatcatgacagcaggggtgaagaacttcaaaccggtttatctctttgaagaaggatcgaccgtcagctgggtgccttgtggaagacagctca

SEQ ID NO: 50597 - DNA, 274 bp, Zea mays
  unsure (1)..(274): unsure at all n locations
atgaaacattcaagacagtggagaacacagatctttttctccgcacgagtaacaacatcaaaacaattttaagcagaatgagcgaaacgcctggtatcatgagtcagatgcccccattgcctttatccataaacgaagaccatataaattctcttattcaactgaacagactggttgcatcatatggcacaacaagcatttcccatcatacgaagcaagagccatgaagctagtctactaaacccagggaaaaaagagaggaccantggccgga

SEQ ID NO: 50598 - DNA, 273 bp, Zea mays
ggtgctgcgcaacccctacatcaccaccctgaacgtgttccaggcctacacgctgaagcggataagggaccccaacttcaaggtgacgccccagccgccgctgtccaaggagttcgccgacgagaacaagcccgccggactggtcaagctgaacccggcgagcgagtacccgcccggcctggaagacacgctcatcctcaccatgaagggcatcgccgccggcatgcagaacactggctaggcggcttctcttcactcacctgcagagtgcac

SEQ ID NO: 50599 - DNA, 136 bp, Zea mays
tgaaacaataataccggagctggaaagagctgcaaagagcgtaggtcgggacttctcgacgttcatcatgaccgacaacacctgtggtcctgagcctcctcttgtggagagaatcgagaaaactgtggtggaagga

SEQ ID NO: 50600 - DNA, 265 bp, Zea mays
gaagagtaaaggaactcacctaccagaccgaggaggaccgcaagaacgtgctgaggctgcaggacctagtggataaattacagactaaagtgaaagcctacaagagacaagcagaggaggctgaggaacaatccaacgtcaacctggccaagttccgcaagatccagcacgagctggaggaagccgaggagcgggccgacatcgccgagtcccaggtcaacaagctgcgggtgaagagccgagaggttcacaccaaagtcataag

SEQ ID NO: 50601 - DNA, 268 bp, Zea mays
gatcactctctgctgaagacgcagtttgctgcatctgtcttgcaaaatatgcgcacaatgatgagctccgtgaacttccatgtgcacactgtttccacaaggactgtgttgataaatggctcaagataaatgcactttgccctctgtgcaaatctgagatagtgagctcgtctggtatctctgatgcccgccaatcagaccagaacaccgttcctgtgcaggagatcgaaatgcattaggttggtctgttcccgcagcttatcacata

SEQ ID NO: 50602 - DNA, 269 bp, Zea mays
ctacacggccggcggtaagaagatctccgccacctcgatctactttgagagcctgtcgtacaaggtgagcgccgcaacggggtacatcgactacgagaagctcgaggagaaggcacttgacttccgccccaagctcatcatctgcggtggcagtgcgtacccgagggactgggattacgccaagctcagggccgtcgccgacaaggtcggggccctgctgctctgcgacatggcgcacatcagcgggctcgtcgccgcgcaggaagctg

SEQ ID NO: 50603 - DNA, 269 bp, Zea mays
agctgttgaccggactcatcttgctgaattccaccagatagagggacttatctgtgattatggtttgacacttggtgatctgattggtgtattggaggatttcttctcaagtctaggcatgtccaagctgcgtttcaagcctgcctacaatccatatactgaacccagcatggaaattttcagtgaccatgatggtttgaagaaatgggtggaagttggtaattcaggcatgttcaggccagagatgttgcttcccatgggactgccag

SEQ ID NO: 50604 - DNA, 217 bp, Zea mays
gttgcaatcagttctccaggaagatttcaaggccactgagatcgaagttggtgttgtgagaaaagatgaccgcgttttcagagctctcacgacagaggagatcgatcagcacctgacggcaattagtgaacgtgactgagatgtcatatgctgcacatttcagcgctgcacacactgcgccgtgccattgtgtatcggcagtcattaagtttcatag

SEQ ID NO: 50605 - DNA, 176 bp, Zea mays
cataaacatatcgatgtcaagcatctcttcgaaggttgatggtgaatttgccagatgcatcaaataggataaaatatcttagtgtaatactagccaaggaagatttggcagacgacgttgaatctagaaactatagctatcctgacagaagggtactcaggcagtgatctcaagaa

SEQ ID NO: 50606 - DNA, 290 bp, Zea mays
tggagatgtgcgccgacgactacgtgcagaagatgaccttcgacagctacctctacaagcgcgtcgtgccgggcaacccgctcgacgacatcaagctcgccgtcaacaccatcggcagcctcgtcagggccaccgcactgcgccgggagatggagaaggtcaccttgtgagccgccgcccgcgacgtcagtgccgtcgaaatggtgtcgcagctgatcggccggtgtattactagagatttgcggctgatcgggttaatttaggccaacatgcgtgggcagtgggcgcgg

SEQ ID NO: 50607 - DNA, 138 bp, Zea mays
cggcctctgagcagatcgtctctccttgttcgcccagctcgctcagctccttccagcaaccatgtctgacaaacccgatatggctgagatcgagaaattcgataagtcgaagttgaagaagacagagacacaagagaa

SEQ ID NO: 50608 - DNA, 285 bp, Zea mays
cgccatttcgttcgagaagggctgctacatcgggcaggagcttatcgcgcggacgcaccatcgcggtgtcatccggaagcgcctaatgccaatgaagttcgtcgacgggaatgggcaagaactcgagcaggccgtcgctccaggctcggaggtcgtggacgaggcttcaggcaagaacgtcggggcagtgagcaccgctctgggctcccgcgggatgggcctgctacggctcgaagaagcactgaaaccgggctcggccctccgcgccggctgcaacagggacgt

SEQ ID NO: 50609 - DNA, 150 bp, Zea mays
cagactgttgttgtgtgccctggctgccaaactgtcctctgccaacccacaggaggaaaggcaaggctcactgagggctgctctttccgcagaagggagactagagcggatgtggtcttcaagttttgctctatgccagatactagcgtc

SEQ ID NO: 50610 - DNA, 166 bp, Zea mays
cagcatcagaaggttccaaatgaactgttggagcatgccaaagctgctgcccaggctgctcttgaggagatggatgccgactaagagacacgatgatttgcccaatcttggttttttcggtggtgttgatatctctgatccctttgggggggggggaccactaggg

SEQ ID NO: 50611 - DNA, 149 bp, Zea mays
tggcctcagaagctttgtgcacgacaagacccccgagatcatgccagctatcaacaagttctttactgaccccaagtgaagcaaagcagctttggttggccgctgatgacgatggttctgctactagttgcccttggggattgtgtacc

SEQ ID NO: 50612 - DNA, 284 bp, Zea mays
ggcccatgggttggcgccggagatcccggaagatctctacttcctcattaagaaggccgtggcgattaggaagcatctggagaggaacaggaaggacaaggactccaaattcagactcattcttgttgagagcaggatacaccgccttgcccgctactacaagcgtaccaagaagctcccacccacctggaagtacgagtcaaccacggcgagcactctggtggcctaagtgatatcctctgatggcttggtctttagcacctatgagcttgttctagatatga

SEQ ID NO: 50613 - DNA, 281 bp, Zea mays
tttacccaaatcttggtgcttccatatgttggcaaggaactgaatatgatcatcatgcttccggacgagaccactgacttgagaacggtggagaaagaactcacttacgagaagttcgtagaatggacgaggctggacatgatggatgaagaggaggtggaagtgtccctcccgcggtttaaactagaggaaagctacgacatggagagtgtcctgcgcaacctgggcatgactgatgccttcgagctgggcaaggcagacttctctggaatgtcccagac

SEQ ID NO: 50614 - DNA, 246 bp, Zea mays
ggcgcattcatccaaggagtaggcttctttacaaacgaggagtacacaacaaactctgaggggttggtcatccacgatggcacatggacgtacaagatccccacagtcgacaccatcccaaagcagttgaacgttgagctgatcaacagcgcccgtgaccagaagcgtgtcctctcttccaaagcatccggcgagcctccgcttcttctagctgcctcggtgcactgcgcaatgagggaggccatc

SEQ ID NO: 50615 - DNA, 278 bp, Zea mays
tggacaagttgtaccacccggacatgactgttgaggaagcagtagatcttgttgacaagtgcatcaaggagattcggctgcgattggttgtcgcgcctcagaactttgttatcaagattgttgacaaggacggggcgagggagtacgccaggcgtgaactcgtcggtgacaatgcacctcctcgaagctgcaaccgcagttgttgctgcctgaggcatgaactcgtttgaggttggaatgtgttagttgtttctcagcgatgctacttatgcgatcac

SEQ ID NO: 50616 - DNA, 278 bp, Zea mays
caccgccttcgtctgctcccgcgagaacttgagccgccccaaggccgaggtcgactacatgatgggcttgtccgagtggctgataggcgacaacatcgacaagctctcgaggcaggggatccgactgcaggtgatcggcgacgccgcgaagatgccagcctctctgcggagcgcagcgccgcaggccgacgaggccacgaggcaaaactcgcagctgcacgtgatgctggccatctgctacagcgggcgatgggacatggtccaggcgtgccgggagc

SEQ ID NO: 50617 - DNA, 283 bp, Zea mays
cctccttaccgcggccgtgagggagaacgcggctcggccgtagcggagctgcgagttacagaatgtctgaaggggacaatgggggagaatccgtccatgggaaaccttcggtggtgtacagatttttcacaagacttggacagatttatcagtcctggctagacaagtccacaccctacacggctgtgcgatgggtcgtgacactgggcctgagctttgtctacatgattcgagtttacctgctgcagggttggtacattgtgacctatgccttggggatcta

SEQ ID NO: 50618 - DNA, 277 bp, Zea mays
caaatttccaatgacttgccatatcattagcatcagaggctccataaagcagctctgctagaattaactgattcactgtcaaggtcaaacatcactatgatattgctgagatggtccaatcagtgacaatgctggtggtattgttgagatggcaggcatgagccacaaaatctgagagaacttatgctcttggtgctgctgacaacacaactgttgctattagatagggatttgccattggttcaggtgctcttgtgtccctagtgctgttttgtgc

SEQ ID NO: 50619 - DNA, 268 bp, Zea mays
ggcgggaatcaccctgtctgtgatctccgtagtggacgtgtagacataagtgcacagaaccataactacgcagttgccccagaatcactcccagaaggagcaaaagtaactcacgtcaatctcaacgataatagttgcgctggcctccagtactccaagatgaagcttatgtctctccagtaccatcccgagtcttctccaggtccgcatgactccgacacagccttcggcgagtttatagagctcatgaagcgcaacagattgtcag

SEQ ID NO: 50620 - DNA, 266 bp, Zea mays
agctacctacctgcttgctgttctgggtggaaacacttccccgactgctgatgatgttaagagcattctggaatcagttggtgctgaagctgatgatgaaaaactagagttcctgctcacagaactcacagacaaggacataacagtagtgattgcaactggaagggaaaggttatcctctgtgccttcaggtggtggtgcaattgacatgggagctccagcagctgtagctagcggtggcgcacacctgctgaagaggcaaagaa

SEQ ID NO: 50621 - DNA, 262 bp, Zea mays
tcgtcaccggcaaggggcccctcgagaacctgctcgaccacctcgacgaccccgtcgccaacaacgcctgggtctacgccaccaagttcgcaccagggtcttaagctagctaccgggccgcggcgtgccaggacattgtgttgtacactactcgtttctgtcgtgatctgtaccatgaacgaatgcaaatattcttgtgctctcccaaaaaaaaaaaaaaaaaacccaaaaacaaaccaaaaaaaaaacaacaaaacaacac

SEQ ID NO: 50622 - DNA, 263 bp, Zea mays
gtgtggcaatgcttcagcacttcctgaaccttctgcagtttctgcattaccacagctgcaagatgtttacctaagacgaatgaaactccatgaatttcctaatggtttgctgggcctaaaactgcttaggattcatgacctgagtcagaatcaccttacaactgtgccggagggcatcaagaatttcactgcactcattgagcttgatctgtctgacaacaatataacagcactcccagcggactggaattgcttgaagctaa

SEQ ID NO: 50623 - DNA, 272 bp, Zea mays
aaggtcatcagggaagccggtcctgtcaagggcggcgagaccgtcatcgccttcgtggaggaccccgacggctacaaattagagatcatcgagaggcctggaactccggaacccttatgccaggtgatgctccgcgtcggcgaccttgaccgtgccataagcttctatgagaaggcctgcggcatggaactgctccggaagcgagatagccctgagtcccagtacacagtggcaatgatgggttacggccctgaagacaaggacgcggtgct

SEQ ID NO: 50624 - DNA, 264 bp, Zea mays
cataaacatatcgatgtcaagcatctcttcgaaggttgatggtgaatttgccagatgcatcaaataggagagaaattcttagtgtaatactagccaaggaagatttggcagacgacgttgatctagaaactatagctaacctgacagaagggtactcaggcagtgatctcaagaatctgtgtattactgctgcacaccgtcctattagggagattcttgaaaaggaacagacggagagagcttcagcagaagcagaaaatagat

SEQ ID NO: 50625 - DNA, 259 bp, Zea mays
gccggcatcatccgtctcgtctctcctctcctctcctttttccccctccctgcacagcgccgctcaccgtcaccggaccacagcagcgatcgatggctgaggtacacaatgagcggcccgtggggatggtgggcgacgtccgggacgcaccggtgggccgcgagaacgacctcgaggtgaaggaggccggcggcggcgaaaagaagctgtacgaggccaaggtgtgggagacggcgtgggagaacttcaagcagctgca

SEQ ID NO: 50626 - DNA, 263 bp, Zea mays
ataggatctcaagtggggagagcagtcagacgacgtgttcgatgctctagctggagacttcatgaagcccaggatacaggaggtggaccagctcctcaagcttggcgtcaatgtcaccatctacagcggacagctcgacctcatctgcgcgaccaaaggcaccatggactgggttcagaagctcaagtgggacgacctcaacagtttcctgagctctcccagaacgcccatctactgcgacaaggaggggcagtccggcaccc

SEQ ID NO: 50627 - DNA, 274 bp, Zea mays
cgccccttcctctacgtcgctcgcctcgcgcctgcgccaccacctctgccatggccccgaagaaggataaggccccgccgccgtcgtccaagccggccaagtccggaggcgggaagcagaagaagaagcagtggagcaagggtaagcaaaaggagaaggtcaacaacgctgtgctcttcgaccaggccacctatgacaagttgctctccgaggtgcccaagtacaagcagatcaccccatccgtcctctccgagcgtctcaggattaatggatc

SEQ ID NO: 50628 - DNA, 110 bp, Zea mays
agccacctcccaggtgccgcccaggtacgtcgccggcggcgatgacgacgcgcttcaagaagaaccgcaagatgcgcggccacgtgtccgccgggcacggccgcatcggc

SEQ ID NO: 50629 - DNA, 264 bp, Zea mays
tgggggcaatgatctccaacctggcattcgtcgtccggaccatcttctccaagaaggggatgaagggcaagtccgtgagcgggatgaactactacgcctgcctctccatcatgtcgctggtgatcctcactgcccttcgccgtcgccatggaggggcccaaggtgtgggcagcgggctggcagacagcagtcgccgagatcggtcccaacttcgtctggtgggtggcggcgcagagcgtgttctaccacttgtaaaacaggtgc

SEQ ID NO: 50630 - DNA, 271 bp, Zea mays
ccggcgtgctcgtgatctcaacccaaggcgtgcatccgctccggtcacccgtcgctccacgcaaccatgtcgaggaggaagaccagggagcccaaggaggagaacgtcacccttggacccactgtccgtgaaggagagtatgtctttggtgtcgctcacatctttgcatccttcaatgacacattcattcatatcactgatttgtctgggagggaaactctggttcggatcaccggtggcatgaaggtgaaggctgaccgtgacgagtcgt

SEQ ID NO: 50631 - DNA, 270 bp, Zea mays
cggctcgagaatgcatcatgttttcaggtgaagatggcagaggactcagtgaagcgggtaactggcatgaacacattgttccctgccgtgtctgatatgtcgtccctcagcatgccattcaatggctccccatccgactccgcctctgatgccgccgtacccatccaagatgacctgaacagttacttcgccaatccaagcgagatcggaggcagcaacggttacatgccagatatagcttcctcggctcaagaggacgcgatttcgtca

SEQ ID NO: 50632 - DNA, 269 bp, Zea mays
acgccatcttccttgagactcctgcgccatgagagcgaagtggcggaagaagagaatgcgcaggcttaagcgcaagagaagaaagatgaggcagaggtccaagtaaaccatcttgtgcacccacgaagcctgcgggagcagaagtaagggatgctgaagcccggaacaagtggttggactgtatgctgctgtcggtaataagtctcagtagacccggaatgtcaccttaccgagatcagcagggaaaatgactaccttcctcacaacca

SEQ ID NO: 50633 - DNA, 131 bp, Zea mays
tgggccatccaatcgggatgtctggagctcggattgttgttcacttggctcatgccttgaagcacggagaattcggtctggctagtatttgcaatggtagaggaagggcttccgccgtgctgattgagaag

SEQ ID NO: 50634 - DNA, 265 bp, Zea mays
ctcccatccgagtgtctcctcctccgccgccgccgccgccgctaccgtcgtctccgcccgccgaggccatgccgtcccacaagaccttccggatcaagaagaagctggccaagaagatgcgccagaaccgccccatcccctactggatccgcatgcgcaccgacaacaccatcaggtacaacgccaagcgcaggcactggcgtcgcaccaaactcgattctgagcggtggaagaaatgtagctaatgacgcttggggggtatagg

SEQ ID NO: 50635 - DNA, 265 bp, Zea mays
ctctgccttcctgcctgcttccctccctccgtgagatccccgatcgggttgccatggcggaccagctcaccgacgaacagatcgccgagttcaaggaggccatcagcctcttcgacaaggacggcgacggctgcatcaccaccaaggaacttgacactgtgatgcgctcattggggcagaaccctactgaggctgagcttcaggacatgatcaatgaggttgatgctgatggcaatggaaccatcgactttcctgagtttctcaa

SEQ ID NO: 50636 - DNA, 263 bp, Zea mays
caacaacaagaagctgcttggccgggttcgtgcttttgatcgccactgtaacatggtgctcgagaacgtgcgggagatgtggacagaggtccccaagactggcaagggcaaaaagaaaactctgcctgtgaacaaggatagattcatcagcaagatgttcctcaggggcgactcggtcatcatcgtgctgaggaaccccaagtgatcgcccaaccggaagccaggtctctgttgaaaactgtagcttatgatgtatgttgggg

SEQ ID NO: 50637 - DNA, 233 bp, Zea mays
atctgccttcctgcctgcatccctccctccgtgagatccccgctcgggttgccatggcggaccagctcaccgacgaacagatcgccgagttcaaggaggccttcagcctcttcgacaaggacggcgacggctgcatcaccaccaaggaacttggcactgtgatgcgctcattggggcagaaccctactgaggctgagcttcaggacatgatcaatgaggttgatgctgatggc

SEQ ID NO: 50638 - DNA, 267 bp, Zea mays
caccactccactcgccgcacgcgccgggcgccgccgaggggatcggagcaagatgttcttccacatcgtgctggagcggaacatgcagctgcacccacgacacttcgggtcgcacctccgcgacaagctcgtttccaagctcatcaaggacgtcgagggcacctgcagcgggcggcacgggttcgatgtggcgatcacgggtgtggaggacatcggcaaggggctcatccgggaaggcacgggatacgtcaccttccccgtcaagta

SEQ ID NO: 50639 - DNA, 264 bp, Zea mays
aggaggcgtcgactgggacgccgtcatcgacgccgaggccaggagaaggaaatggctcgaagactacccggaggcgacgagcacatacgatgccggcgtcttcgacacctccattatcccgtggtgggcatggatgaagcggttccaccttcctgaagccgagaagctaaacggtcgcgccgacatggttggcatcttcatggcctacttcgtggacagcttgacaggcgtgggcatcgtcgaccagatgggcaacttcttctg

SEQ ID NO: 50640 - DNA, 187 bp, Zea mays
cggaggcgtcgactgggacgccgtcatcgacgccgaggccaggagaaggaaatggctcgaagactacccggaggcgacgagcacagacgatgccgtcgtcttcgacacctccattatcccgtggtgggcatggatgaagcggttccaccttcctgaagccgagaagctaaacggtcgcgccgccatg

SEQ ID NO: 50641 - DNA, 260 bp, Zea mays
ctccagagctcatgttcatccatggaggccataccagcaagatctctgatttctcctggaacccctgcgaggactgggtggttgctagcgtcgctgaggacaacatcctccagatatggcagatggctgagaacatctaccatgacgaagatgatctgccaattagcgatgagccggcaaaaacttcttgaagcaacacatcacaaaaggaatcttaactcctatcgactgttggtgctcctagatcggaaccctgctcg

SEQ ID NO: 50642 - DNA, 259 bp, Zea mays
gcttcgggtacctcgacccggagtacttccggcggcagagctgacggagaagtcggacgtctactcgttcggggtcgtgctgttggaggtcctgtgcgcgcggcccgccctgagcccctcgctccccaaggagcaggtgagcctggccgactgggcgctgcactgccagaggaagggcgtgctcgggcagatcatcgacccgcacctgcaggggcaggtctccccgcagtgcttcctcaagttcgcggagaccgcggag

SEQ ID NO: 50643 - DNA, 264 bp, Zea mays
tgcattgatctttgaagggcccaagctaatgcagcatggatttagtgatgccattgcaaaagtaggtttgacaaagtttgtcagtgacctattcttggttggactgttctaccatctgtataaccagattgctacaaacaccttggagcgagtggctcctctgacacatgctgtcggcaatgtgttgaaacgtgtttttgtcatcggtttctcaatcattgtttttggcaacaaaattagcacacaaactggaattggcacgtc

SEQ ID NO: 50644 - DNA, 261 bp, Zea mays
gcgtgttcttccaggacttcggcgagtccatgatcaagatgggcaacgctggcgtgctcatcggtgctgctcagggggagatcaggaagaaatgctacatcgtcaactaactagctagttattatatagccaagctagctatactacgaaagcttttaatttgtttgtttgccgcaacggaattgtagcttgctgtattaattaatcaatcagttctctacatatgttatttgcatgcttatgtatagcctattattaatg

SEQ ID NO: 50645 - DNA, 260 bp, Zea mays
gtatagttagttattattacatggcggcgtcgttattattattattacatgcatgcaatgcaaggagagcgtgcgtacgtggtgcattaattgctgactatactagtacgactcgacgagtgcatcctccttgtgcgtctggatgacgaggtccgaggtggggtaggcgatgcaggtgagcacaaagccctcggcgacctggtcgtcgtcgaggaagctctggtcgaactggttgacggagccggagacgatcttgccga

SEQ ID NO: 50646 - DNA, 151 bp, Zea mays
caacatcaaaaccctcccatctcttcccctccgccgccgtctctgctctcaagatcgccatggcgtcagaaaagaagcagtcgaacccgatgcgggagatcaaggtgcagaagctcgtgctcaatatctccgttggagagagtggagatcg

SEQ ID NO: 50647 - DNA, 151 bp, Zea mays
cggctcgagcaagttttcaggacctttggctacaacctcagttgccactaatgcaaaatttgaaattagaagccccaagcgtgtgcagatcaaatttgatgaagggattgttggtacaccacagttgaccgactccattgtgctaccagag

SEQ ID NO: 50648 - DNA, 149 bp, Zea mays
gtgtgctctccatggccaacgccgggcccaacaccaacggctcccagttcttcatctgcaccgtcgcgaccccttggctcgacggcaagcacgtcgtcttcggccaggtcgtcgagggcatggacgtcgtcaaggccatcgagaaggtg

SEQ ID NO: 50649 - DNA, 147 bp, Zea mays
acgcgacctcgccgtcgccgcagccttggccatgtcgatcttcgagtataatgggtccgccgtggtggcgatggtgaggaagaactgtttcgcgatcgccagcgaccggcggctgggcgtgcagcttcagaccatcgcgacggactt

SEQ ID NO: 50650 - DNA, 147 bp, Zea mays
ggcttcttcagtggcatgcagtggcttcttggacgtgggatgcacaggatgagacatgtggcatatgcaggatggcttttgatggctgctgtcctgactgtaagttccctggtgatgattgcccactcatttggggtgtctgcaacc

SEQ ID NO: 50651 - DNA, 118 bp, Zea mays
tatgcgcatccacccgccggcgccgttactcctgccgcacttctccacccacgactgcgagatcaacggctacaccatccccgctggcacgcgcgtcatcgtcaacgcgtgggcgctc

SEQ ID NO: 50652 - DNA, 138 bp, Zea mays
ttgttgagaacctcgccgaccacctcgctgaccctgtcaacaacaacgcctgggcctacgctaccaacttcgtccccggcaagtgagcgagggcatatacatacttgtatgcgtgtaccgtagacatacgtattcgta

SEQ ID NO: 50653 - DNA, 235 bp, Zea mays
acttccctactgcgagggaggccatctggtatttcgaaggaatctatgcgtactcccctcagataccaggtgttcgtttcccaggattaacccatcctggtatagtgggaactgcaccgtcagccgaacttcttaatatatggaacgagagggagaaaagattggccgagacaagcccacagacccttaaactgtgtgaagtgctgcaccagaggcctcttgctaatttaccgac

SEQ ID NO: 50654 - DNA, 140 bp, Zea mays
tgcaggtctgatgtgtacagttacggggttatcctgtgggaacttgttactcagaagataccctgggaaaatctgaactcaatgcaggtcattggtgcagtgggttttatgaaccaaaggttggatatcccaggtgaagt

SEQ ID NO: 50655 - DNA, 270 bp, Zea mays
gtaagattgaagaggagcaaaggaaaaagagcgcatgactgctgtgaataatattatcgggaccttcctcggacacaacatcgtcgacaatcacgacctacttctataccttgttttgttttcatcttgagtcagtcggtccattgtttgttcccagtctggtgattaaaagtctgcaaattctgtttgtggaattggcagcgatacaaatttggcttctttaagtaaatccggttggcggtacacagcggtattaattcacctgtaact

SEQ ID NO: 50656 - DNA, 157 bp, Zea mays
aggactacccctacgcccacgacgggctcctggtctgggactccatcaagcagtgggcgtccgagtacgtcaacgtctactacaagtccgacgaggccgtggccgccgaccccgagctgagggcgttctgggacgaggtgcgcaacgtggggcacgg

SEQ ID NO: 50657 - DNA, 272 bp, Zea mays
ggcgcattcatccaaggagtaggcttctttacaaacgaggagtacacaacaaactctgaggggttggtcatccacgatggcacatggacgtacaagatccccacagtcgacaccatcccaaagcagttgaacgttgagctgatcaacagcgcccgtgaccagaagcgtgtcctctcttccaaagcatccggcgagcctccgcttcttctagctgcctcggtgcactgcgcaatgagggaggccatcagagccgcccagtaggaattctcggt

SEQ ID NO: 50658 - DNA, 129 bp, Zea mays
gtttgctgagacatgctctctccatagagcatcgtcctccggtacaactgcacttacagcaatggtttttggaaggtctcttctggtcgctaatgccggtgaatgtagggcggttatttcccggtgtgg

SEQ ID NO: 50659 - DNA, 263 bp, Zea mays
cggtggagagccttcctctgcggccttcttcgcgaaggctgggctggattacgattcttgctccacctttcagggttccgattgctaggctagctgcagctcaggtgcttgtctgagggtgcctccacattgaaccaccggattgcctgctgatggtggatgtggtgatccacagtatgatcgcagagccatgctatgtgaacattaactagtagcagtgctcataaaagctacaatcccatgtcctttttttccccagtcag

SEQ ID NO: 50660 - DNA, 134 bp, Zea mays
ggcatgaagctggtcacttcttgatagcttcgttgcttggagtgcttccaaaaggatacacaatcacaagcttagatacacttatgaatcaaggatcgcttaatgtgccagctggcagcagcttttgtggacta

SEQ ID NO: 50661 - DNA, 130 bp, Zea mays
ggcgcatgcaggacgaagcgtccgtggtattcgcctattacaaggatggtgccactaatccgacattcctctatttctctcatggtcttaaggagatcacgtgctagattagttacccatgttgggtact

SEQ ID NO: 50662 - DNA, 139 bp, Zea mays
tcttgatggagaaggccggcgggtacagcagcgacggcaagcagtcggtgctggacagggtgatcaacgagctcgacgagcggacccaggtggcctacgggtccaagaacgagatcatccggttgcaggagaccctcta

SEQ ID NO: 50663 - DNA, 164 bp, Zea mays
tgctgatttgatctctcagctacgagctgagcaccacaaagagaactccactgctggaattgatgtcatcacaggcactgttggggacatgcaaaagctagggattcaagagtcgttcaaggtgaagcaggccattcttctgtctgtaacagaggctgccgaga

SEQ ID NO: 50664 - DNA, 213 bp, Zea mays
cgctgatttgatctctcagctacgagctgagcaccacaaagagaactccactgctggaattgatgtcatcacaggcactgttggggacatgcaaaagctagggattcaagagtcgttcaaggtgaagcaggccattcttctgtctgcaacagaggctgccgagatgatcctcagggtcgatgagatcataacctgtgccccgcgcagaagaga

SEQ ID NO: 50665 - DNA, 124 bp, Zea mays
tcgatcagatccctcgacaatggcactccaggcagcctacgagtacctgcagcaggccgtcggccatggcgcgtggtcgtccacgcagacgctgacgctgctgctcatcgccgtacccaccgta

SEQ ID NO: 50666 - DNA, 116 bp, Zea mays
cgaagggtcatccctatgcacaagcttgggatgatgcacttagcaaggcaaggtttgagtttagatggcttgaccaatttgctttatctctggatccaacgactgctatggctttc

SEQ ID NO: 50667 - DNA, 148 bp, Zea mays
acgagtgttcactcatgcaatcaacaaggatctgaaagctgaccccaaggatgagtttctttcaacactgcgggcgatcatccggtgcttcaactgccctgacagatacttcgagaaagtcattcgactggctcttggaggcatgggc

SEQ ID NO: 50668 - DNA, 119 bp, Zea mays
atcgccgtcaagtttgctgagctcattaccaagatcgacaggcgatctggcaaggagctcgagaaggagcccaagttcctgaagaacggtgatgctggtatggtgaagatgattcccac

SEQ ID NO: 50669 - DNA, 142 bp, Zea mays
tatggccaagttgtaatgttatccactcatccatatggttgccgagttattcagagggttctagagcactgtgatgatcctaagacacagcaaataatgatggatgagattctccagtctgtttgcttgctagctcaggacc

SEQ ID NO: 50670 - DNA, 102 bp, Zea mays
gttcaacagtattattacagagccatgctatgtgaacattactagtagcagtgctcataaaagctacaatcccatctcccttttttttccagtcatgtgaaa

SEQ ID NO: 50671 - DNA, 138 bp, Zea mays
gtgttcttggattaattaactacgatctctatgagcctggggatggatcaacccgtcgtgcgtggtctcgttttgtgatgagtgggagagagaggatgacaagatcgatcctttgttaatggagatctcgttaattag

SEQ ID NO: 50672 - DNA, 102 bp, Zea mays
gacgagcagctggccttctgcccgggcctcatcgtccctggtatctactactccgacgacaagctgctgcagaccaggatcttctcctactccgacacgcag

SEQ ID NO: 50673 - DNA, 272 bp, Zea mays
gtagaatcttataatttggcttgcattctcactcttcccccataccaaagaaaaggatatgggaagttcctgattgctttctcatatgaactttccaagaaggaaggtaaagttgggacaccggagcgccctctttctgatcttggtctgctcagctatagaggttattggactagagtgcttctggaaattctaaagaaacataagggtaacatatctataaaggaactcagcgacatgacggcaataaaagccgatgacatcttgagcac

SEQ ID NO: 50674 - DNA, 115 bp, Zea mays
gtaagtattactatgctgttgggattggacaaactgtgaggtagttttggtttttgacccctccaaaaagcggcacagatgttccatatacactcggtctcataggtgatcttgg

SEQ ID NO: 50675 - DNA, 135 bp, Zea mays
cgtgctcgagcgctggcgcgctcaacatcgagacgggggtgcccatcaacgagatagagccgctagctctcttcaacgtcctcttcttcgtcatcgccgccatcaaccccggcaatggcaggttcatcatcggcg

SEQ ID NO: 50676 - DNA, 169 bp, Zea mays
gagtttcgtgtggaccgtgtgctccagccgtttgaccctgccaaattcaatttcacaaaagttggccaggaagaggttctcttccaatttgagaatagtggtggtgatgacagctatttcctgaacaacgctccaatcattgctgttgatcgggctccaaatgttattg

SEQ ID NO: 50677 - DNA, 167 bp, Zea mays
gtttggtgcttgctttcattatcaggaagagaaagccattggacggggaatccttcccttgcttcagcgtgctacgttggttcagacctttggacagaagaaccatgtctgcctgaaggatgggtccatcacgatcccgccatatgcgcctcctaagaaaatgcaga

SEQ ID NO: 50678 - DNA, 120 bp, Zea mays
gcccaacatcatctttgtactgtccctgctcctcatcttggagaagcaagcagctgtgatgggacaaaaaggtggatcaaaaggccgattaccaagtgaattttcccaatttccacacga

SEQ ID NO: 50679 - DNA, 289 bp, Zea mays
ggacaatggtgtccgagctttgttgaggggctgcaccaagcttcggaggtttgctctgtacttgagaccaggagggctctcagatgcaggtctcggctacattggacagtgcagcggaaacaaccagtacacgcttctcggtaatgttggggaaactgatgatggattgatcagcttcgcattgggttgcgtaaacctgcgaaagcttgaactcaggagttgctgcttcagcgagcgagcactggcccttgcaatactacatatgccttccctgaggtacgtatgggtt

SEQ ID NO: 50680 - DNA, 286 bp, Zea mays
attcgcggaacggattcattcttttgcttcgtcgagttgcttagtgggttcagagacaacttctgccagaaactggacaacagtgctgttggcattcgaggtacactagccaagttatcacagcttgtagcaaagtatgatggagaactccagcaacatctggaaataactacggaagttaatccccagttctacgcattcagatggataaccttactgctgacccaggaattcaacttcgccgacaccattcacatctgggacacactattaagtgatcctggtg

SEQ ID NO: 50681 - DNA, 288 bp, Zea mays
agctcttgaagcgtgtgcacatccattctttgatgagttgcgagagccacatgcgaggttgccaaatggacggccatttcctccactgttcaactttaaacaggaactagcaaatacctccccggagctcatcaacaggctgatcccagaccatgctaggcggcatcttgggctcactttattgcccaccgctggaccataggcgaaggctctatggtgtttaaaccttgctctttctgattcttcgttgtgccataggcaattcaaggtgtagaatctgaccattat

SEQ ID NO: 50682 - DNA, 281 bp, Zea mays
  unsure (1)..(281): unsure at all n locations
cctgaaccggtgcaaggacgccggcgtggtgcacatcctcgggaacaccatcgtacgcgcgcggacggactcgggcgtcgtgaagaagctcgcagtcgactacatgtacgccttcatgaggaggatgtgcagggagaacagcgtcatcttcaacgtgcctcatgagagcctgctcaatgtcgggcagatatactacatctgaatgtctatctgatgggagatagtgaggggcttgtacttcttcttctnttaagatataaatccctagtcttttttgggta

SEQ ID NO: 50683 - DNA, 201 bp, Zea mays
agtgtcctcacattgatgagcccttagactgctacctcaacggtcggcgagatctagctttactaaagctccgctggcaacccagtggatgcagtatcccaagattgaacccaaccgatatgttggagaggctgagaggaaaaagactggtgttcgttggtgattcgctcaataggaacatgtgggaatcccttgtgtgta

SEQ ID NO: 50684 - DNA, 284 bp, Zea mays
cgccatctgggcctgccaggtcgtgctcatgggtgccgtcgagggctaccgcattgccggcgggccgctcggcgaggtcgtcgacccgctgtaccctggcggcagcttcgaccccctcggcctggccgacgaacccgaggccttcgccgagctcaaggtgaaggagctcaagaacggccgcctcgccatgttttccatgttcggcttcttcgtccaggccatcgtcaccggcaagggcccgctcgagaacctcgctgaccacatcgctgacccagtcaacaaca

SEQ ID NO: 50685 - DNA, 164 bp, Zea mays
tgccatgcttggctttgccgcatcgctacttggagaggccattaccgggaagggcatccttgcgcactgaacctggagacgggcatccccatctacgaggcggacccctcctcctgttcttcatcctcttcaccctccttggcgccatcggcgtctcggagacc

SEQ ID NO: 50686 - DNA, 283 bp, Zea mays
atttggttttagggactaaatagattctaaagtcattaaatacattgtccaaagactcaaatacccttagaatatactcataatattagttatctataaaaaggtaagggcaacatgataattatgagcttttagtctcttttagcacctatgtgaaggactaaagactaaatcattttagtccatattttagtcctagtgtttggcaaaaaagggactaaaagagactaaaaactagagactaatctttagttcctctaaccaaacacccccttagaaaccg

SEQ ID NO: 50687 - DNA, 282 bp, Zea mays
ccgagccagacccagaagaaggggagccggaggtagaaagaccagagaagatggcgaccaccgagccggcggcggtgaggctggtggcctccttcgccagcccgttcgtccaccgcgccgaggtggccctgcgcctcaaaggggtgccctacgagctcatcctggaggacctggccaacaagagcaagctgctgctggcacacaaccccgtgcacaaactcgtgcccgtactcctccacggcgacagggccatctccgagtcgctcgtcatcctcgagtacg

SEQ ID NO: 50688 - DNA, 138 bp, Zea mays
aattgattcttttaataaccactcaatttatttctaaaccaatgtctgaaggttataagcactccttgttcgattaatcgccactaccacatgttcagtgtctatgtttggtaatgcttgccgttgattacaggactg

SEQ ID NO: 50689 - DNA, 277 bp, Zea mays
ctcgagcatagcttctctgcctctctctcacctcctctcctctagaccactcctttgtccaaagcttcgagatggctcagcagaaggtggtggtcagggttccaaccatgacagatgacaagatcaagcagaaggccatcgaagctgttgcggacatttacggtattgactccatagcagcggatctgaaggagaacaagatgaccatcataggcgagatggatgcagtagcgattgccaagaagttaaagaagattggaaagattgacattgtgtc

SEQ ID NO: 50690 - DNA, 279 bp, Zea mays
aattgattcttttaataaccactcaatttatttctaaaccaatgtctgaaggtaataagcactccttgttggattaatcgccactaccacatgttcagtgtctatgtttggtaatgcttgctgttgattacagggctgcttccgagggtccactcaagggtatcatgggttatgtggaggaggatctggtttctaccgacttccttggtgacagcaggtcgagcatcttcgacgccaaggccgggatcgctctgaacgaccacttcgtcaagcttgtct

SEQ ID NO: 50691 - DNA, 275 bp, Zea mays
attgtttagcatgaataatgttaagcttcactttacagatggtgcacttagaataattgccaaaaaggcaatgtcaaaaaatacaggtgcacggggtttaagaactatccttgagaatattctcatggattctatgtatgagatcccagatgcaaaatctggggagaagcgaatcgatgcagtggttgtagatgaagatgcagtaggatcagtggaccaacctggctgcggactaagattctttacggtgatggtgctttggatcaatatctatc

SEQ ID NO: 50692 - DNA, 185 bp, Zea mays
aaagaccactatgttagcgacaccggagacgtagtgtactaccaaactgactcgaaaacgaacacctctgcacaaaaatctgattgacacagactatagaacgtagcgtattcttcatttttatcaggcaggctgtgcctgaagacctggccaggctcctgagacctctgattggtgtgtgtgtg

SEQ ID NO: 50693 - DNA, 274 bp, Zea mays
agtccgtcgtgctcttcgccagcctgtgcctagccctctcccactacctcctcgagaaagaagccccagagacagagaccatcgcaagcaccatcatctccttcatcatgagcgtcttctggatctcgaccacggccggagagctcctgagctgcctcgccgcggtcggagccaacatggacttccctcccgccattctcggcatgacggtcctggcgtgggggaactccgtgggcgacctcgtcgcggacgtggcgctggccagggctgggca

SEQ ID NO: 50694 - DNA, 158 bp, Zea mays
agctgaccctcgtcatggccgctacctcacggcatctgctatgttccgtgggaagatgagcaccaaggaagtgggtgaacagatgctgaacgtgcagaacaagaactcttcctacttcgtggagtggatccccaacaacgtgaagtcgagtgtgtgtg

SEQ ID NO: 50695 - DNA, 153 bp, Zea mays
ctattttttttatggaagaaaaaagatgtattatctatagaaataaaggataaagagaaacgggggtgcccatcaacgagatagagccgctcgtcatcttcaacgtcctcttcttcttcatcgccgccatcaaccccggcaatggcaggttca

SEQ ID NO: 50696 - DNA, 150 bp, Zea mays
gggcaaagtacagtatttgatgcaatgcaaatctgctgtcagttcagctgaagattggcttaaccctgatgccatacaagaggcatttgaagcgagagcgctcagaatggcggtaaactgtgcccagaacataagccaagctgcaagcca

SEQ ID NO: 50697 - DNA, 150 bp, Zea mays
aacaaacgccggcgcaaactcttgcccgagcacgaaagatctctaattccccataccgtccaccgatcgaacttcacgccagtatcggtatcttccgaaggcgtcgcgcgaggttgtttgagaggagatgaggaagatgagggagtgcat

SEQ ID NO: 50698 - DNA, 148 bp, Zea mays
cagatccctcgacaatggcactccaggcagcctacgagtacctgcagcaggccgtcggccatggcgcgtggtcgtccacgcagacgctaacgctgctgctcatcgccgtacccactgtactactgctgctagcgtccctcgccaagag

SEQ ID NO: 50699 - DNA, 111 bp, Zea mays
agcagattgatagatcaatgatggatgaattgaaagaagtgaagaaggctgttaatcctacagaagttctgcttgtcgttgatgccatgactggccaagaagcagcagcac

SEQ ID NO: 50700 - DNA, 143 bp, Zea mays
tggtgatgtctggtttggctctggaattacactcaagggcaaggtgacaattatcgccaagcctggagtgaagttggagattccagatggagacgtacttgagaacaaggatgtcaatggccctgaggatctttaagcaatgt

SEQ ID NO: 50701 - DNA, 280 bp, Zea mays
ggcgaacgatgaacgcactcgaacagctcttgggatcaagaagggaacagtggacgagtgggtgaggtgtcacgacgcagacctgccgtacacgatcgacctcaagagcgccatcaagtaccaccggaacctgacgtccagaggctaccgcgccctggtgtacagcggcgaccattacctgctggtgccacacctgggcacccaggcatgggtcaggtccctcaacttccccgtcgtcgacgactggagggcgtggcatctcggtggccaacccgcgggt

SEQ ID NO: 50702 - DNA, 143 bp, Zea mays
tcacaaaatggtgcccccggttcaggtctctccgctcatcaagttcggccggtactccgctctgatcctcggcatggcatacggcgccaagcgctacagttacttaaaaccccgggcagaggaggagagaagaatagcagcgg

SEQ ID NO: 50703 - DNA, 281 bp, Zea mays
tctgaatcaaatggctacatatacattgaggctaatggtggtttgaatcaacaacggacatcgatttgcaatgcagttgctgttgctggctttctgaatgcgactcttgtaatcccaaacttccactatcacagcatttggagggatcctagcaaatttagtgatatctatgacgaggattactttatcgaacgcttaaaaaatgatgtccgggtgattgacaaggtgcctgagttcataatggagcgatttggtcacaatctgagcaatgcatttaattt

SEQ ID NO: 50704 - DNA, 281 bp, Zea mays
ctggtgggtgtcccatcttatcatgtgcttgctttgtcgggatggatgatatagcaacaaaggatttctttgattggacttctagcgtacccaaaatggtgcgcgcactttctataattctgagactagcagacgatctccactcgtatgagcgggagcagctaatccctcatgtagcttccacaatcgacacctacatgaaaaagcacaatgtctcaattgaagtggcgcaggaaaacatacacaaactaaaagaagagtcatggaaagatttaaatagc

SEQ ID NO: 50705 - DNA, 197 bp, Zea mays
agggtgagggtcttaaggtcctcggcctgcaggtgagcccgttcgtgctccgcgtgtgcttggcgctgaacatgaaaggaggagttacgagtacgtcgaggaggacgtatccaacaagagtgagctcctgctcaagtccaacccggtgcacaagaaggtgcccgtgctcatccacaacggtaagcccatctgcgagt

SEQ ID NO: 50706 - DNA, 198 bp, Zea mays
  unsure (1)..(198): unsure at all n locations
acggcggcggaaggcgaagtnataggttaaggtnaaggaagtaggcggccaccatggtgaagggacgcacggggcagcgcgtcagctctacgtccggggcaccatcctcggatacaagaggtccaagtcgaaccagcacgagaccacgtcgcttgtgcagatcgagggggtgaacaccaaggaggacgtcgcgtggta

SEQ ID NO: 50707 - DNA, 185 bp, Zea mays
gctgaagccatgggccttgactttctcctatggccgagcccatcaggcctctgctctaaaggcttggggtgggaagaaggagacctgaaggcagcccaggaggagtacatcaagcgagccctggccaacagcgtcgcttgtcaaggaaagtacactccaagtggccagtctggagccgcagccag

SEQ ID NO: 50708 - DNA, 197 bp, Zea mays
gattgacggctccaattggcgcccatggcgaagaaaccaacataaaaaaggaggaagaggagttcagcaccggtcctctctcggtgctcatgatgagcgtcaagaataatacccaggttcttatcaactgccggaacaacaagaagttgcttggtcgcgtgcgagccttcgatcggcactgcaacatggttcttgag

SEQ ID NO: 50709 - DNA, 184 bp, Zea mays
tttggcaatacaacatacggtgacctgcgaaagttcctgtgtgggtattttgataccacaactggaaacaaagagaaacaaggagttattttgagatctctcagtcactgggcgtggacagtccatctcaaatcttattcattcccgatgtcttccaagaagccattgctgctaaaaacgctgg

SEQ ID NO: 50710 - DNA, 191 bp, Zea mays
ctaccatctgtataaccagattgctacaaacaccttggagcgagtgtgctcctctgacacatgctgtcggcaatggttgaaacgtgtttttgtcatcggtttctcaatcattgtttttggcaacaaaattagcacacaaactggaattggcacgtccattgccatagctggtgttgctatgtactcttaca

SEQ ID NO: 50711 - DNA, 187 bp, Zea mays
gaccggcctcctggacgggcccctcaaactgagatccatgttcctgccggaccggtacatcgaccatggccaccgcagaccagatcgaggaggcagggctgacgcgccggcacatcgccgccaccgtgctgtccctgctggggaggccattggaggccatgcagctcaagtgaacgacgacgacgac

SEQ ID NO: 50712 - DNA, 184 bp, Zea mays
gacggcctcctggacggcccctcaaactgagatccatgttcctgccggaccggtacatcgaccatggcgaccgcagaccagatcgaggaggcagggctgacgccgcggcacatcgccgccaccgtgctgtccctgctggggaggccattggaggccatgcagctcaagtgaacgacgacgacga

SEQ ID NO: 50713 - DNA, 180 bp, Zea mays
acgaggttccctcatcaaatggaaggtactgcatggtggaaagagttgttcactaatcagaactggtgacattatccgcaacatgtatcctacccttcctcttccggacaagtgtgcagatgacaagccgtttgtcccaccctaccaagtatcaaaggagaagataaaaagcataggcat

SEQ ID NO: 50714 - DNA, 284 bp, Zea mays
gcgctacttccacaagctccgcaacaagttctactgccccgcggtcaacatcgagcgcctctggtcgatggtgcccgccgacaaggcgcggaagccggcggcgacaaggccccgcagatcgacgtcacgcagttcggctacttcaaggtgctcgggaagggggtgctgctgcccaagcccatcgtcgtctaggccaagctcatctccaaggtcgccgagaagaagatcaaggccgccggcggggccgtcgtgctcaccgcctagttttcagtccttattcgcct

SEQ ID NO: 50715 - DNA, 280 bp, Zea mays
ctccagcgcctccaccttcctcgccgcctcactccctctgagagtcgcagatccgtccggttagacgaagccgcccgcacccatggcctccggtgagctcgcctgcacctacgccgccctcatcctcagcgacgacggcatcgccatcaccgccgagaagatcgccaccatcgtgaaggcggccaacatcaaggtcgagtcctactggccggagctcttcgctaagctcctggagaagcgcagtctcgaggatctaatctctccgtgggatctggtggtg

SEQ ID NO: 50716 - DNA, 267 bp, Zea mays
cacgccgttttccaaatatggctcatgcaacttctggccaaaggggtcacattgagcgtgctgctatcaatgctcctgtacagggcagtgcagctgatgttgctatgtgtgcaatgcttgagatagacaggaatactcgtcttaaggagcttggttggacgctactcttgcaggtgcatgatgaagtgtaactggaagggccttcagagtctgcggagctggccaagtccatagttgttgagtgcatgtctaagcccttctatggca

SEQ ID NO: 50717 - DNA, 270 bp, Zea mays
tacaaatccgtttggatgatgcgcaatattattcacttcaacacattggcaaatcaggctgtggagcgggcagctggtactgatggccaaaagataacatacggtgtcataaaacaccgtttgggcgatctattttatcgcctagtatctcaaaagttcgaggatcctgccgaaggtgaagaagctttggtcggcaaatttaagaaactgtatgatgacctcaccactggtttccgcaatctcgaagacgaggcacggtagaatagtgta

SEQ ID NO: 50718 - DNA, 158 bp, Zea mays
cgcgtgcctctgggtcgccaggttcatgctgagtctggacatgttttgcacttttgcttcccttcctgctaccatctgtgacagaaccgctcgctaatatgggacctgagattagctttttgctgcttgtggtgaggttgcagttttgttctgtgttt

SEQ ID NO: 50719 - DNA, 270 bp, Zea mays
acaacttccaagtgctttacccaagtccgcacatagggaccgaatgtatgttccttttgagcaagtaactcgaaatatcatattctgtctgtcttccaaactgcgctcaatatcaaattggtatatcgatatacgtcttggtgaaagctctactgtttcacccttccttgctttgtcatacatcttttcaccgcttcccttaatggcagaaaacattggaggaacttgccatatctcacccatgaatgatgctgctgcctttctaatatt

SEQ ID NO: 50720 - DNA, 268 bp, Zea mays
gatatgggacactgctggacaagagcgctttcgagcagtgacatctgcttactaccgaggcgctgtgggagctcttctcgtctatgatattagcaggcgtcagactttcgacagtgttggtcgatggctcaatgaactacacactcattccgatatgaatgttgtcacgattctggtgggtaacatcaccgatctgaagcatgcgcgtgaggtgagcaccgcggaaggacaagccctggccgaggctcagggcctcttcttcatggaa

SEQ ID NO: 50721 - DNA, 269 bp, Zea mays
ctattttgggacatgggaaagctgtcagttatgtgaggttcttggatccatacacacttgtctctgcatcaaccgacaacacattgaagatatgggatcttaaccagactaattgcagtggattatctaccgattcttgcagcctgactctgaatggtcataccaatgagaagaattttgtagggctatctgttcatgatggatacataacttgtggctctgaaaccaatgaagtgttttcttactacaaaactttccccatgccaata

SEQ ID NO: 50722 - DNA, 267 bp, Zea mays
gtggagaggaaggcgttatctatggcaagggcttgggcagaggaggaagccaaaaaggcccgggagcatgcacgcgcccttgaggaggcccggaaccaatgggagcgtcaaggaatcagagttgttgtcgaaggagaactgaaggatgacgcctcagctggggtgacatgggctaacgctggcaaagaaaacgcagtcgacgagtctatcaaccaggcagaagctctgctggagaagctcaagacaatgtctggtgagatggaggtg

SEQ ID NO: 50723 - DNA, 266 bp, Zea mays
gaaaccgttcagggacatggccagggctagaaagatgcaggccgtattctgcttggtggacatcgacaagcttaaagatgctgtggcgcacagttccaagtggaggcgctgccgacgttcgtgctgtacaagaacggcatacagaaagggagggtcgttggcgccaaggtggacgacctcagagccgccatcgacagcaacatatgattccatctccgatcgatcgatccattcgtgctgcatgcatacgatcgactaataagaac

SEQ ID NO: 50724 - DNA, 266 bp, Zea mays
cagaaaccttcggactcggaataaagttgtacacaatatgaaaagcatggacaggacaaaggttgaaccagttccgaagctacgcgcaaggtagcttcggctcaacggcagagaaaggaaccaacttaaaggggaaaaggctatttagtcctcgctggattatctttaagtcaatagtaaacataaagggaatgaatgtaattttacacaggctgtgccctgtgcctataaatagatgaacagtacccccgtactgttcacgctaa

SEQ ID NO: 50725 - DNA, 267 bp, Zea mays
gcagcagcggcggcggcgatggcggcctccatgatctcctcgtcagctctggcggtggcgcctcagggcctgccgcccctcggccgccgcgcctcctccttcgccgtcgtctgctccaagaagaagatcaagaccgtcgacgtcgacgccaacgggagaaagggcaagggcaagggcgtgtaccagttcgtcgacaagtacggcgcgaacgtcgacggatacagcccaatctacaacgaggatgactggtctcccaccggcgacgtc

SEQ ID NO: 50726 - DNA, 270 bp, Zea mays
ggtagttctcctgcgtcgtacgaaagaaactgtgatcaatggcaaaccaataataaatttacctcctaagacaattaatctgaataaagtagatttcacacaagatgagcggtcgttttatttgatgctggaagaacgctctcggcaacaattcaaggcatttgctgcggctgggacactcaaacaaaactatgccaacatccttttaatgttgctgcgacttcggcaagcctgtgatcatcctattcttgtaaagggcaatcagtcaga

SEQ ID NO: 50727 - DNA, 260 bp, Zea mays
cctctacagaaggaagcacaaaaagggacagtcggaagaaattcaaaagagccccaccgccgagcagtcaaattccagagggccattactggtgcatctcttgctgatataatggccaagaggaatcagaaacctgaagttagaaaggctcaacgagaacaagttatcagggctgctaaggaagcaaaaacccgtaagcaagcatctaaaaagactgcaatggctgctgctaaggcacctacaaaggcagcacctaagca

SEQ ID NO: 50728 - DNA, 262 bp, Zea mays
ctgggatctaagcaggatcggccaagaacaaacaccagaggatgctgaagatggtcctccagagctcatgttcatccacggaggccataccagcaagatctctgatttctcctggaacccctgcgaggactgggtggttgctagcgtcgctgaagacaacatcctccagatatggcagatggctgagaacatcagccatgacgaagatgatctgccaattagcgatgagccggcaaaaacttcttgaagcaacacagcacaa

SEQ ID NO: 50729 - DNA, 258 bp, Zea mays
cctaggctccctgttcgcggtgtttgcgggagccaaggataacgcagcggtggctgcggtgagtgtggtggccgtcatggcgttcgtgatggccttcaccgtcggcttgggccctctggcgtgggtgtacagctccgagatactgccgctccgacttcgcgggcagggtgccgggctcggcaccgccatgaaccggatcatgagcggcgtgatcaccatgaccttcatctcgctctaccagggcatgaccatggccgg

SEQ ID NO: 50730 - DNA, 283 bp, Zea mays
gtcttcggtcgaagaagttgaggtgcttgatggaagaagtttgagggtgaactctgggccgccaccacccagagatcggtcatcacggtcaccgcaaagacccaggggtgatgccaacagggtctacgtgggtaacctttcctggggagttgacaattcagctctcgcaaacctgttcagtgagcaaggcgaggtactggaagcaaggatcatctatgacagggagagtggaaggtcaagggggtttgggattgtcacgtacggttccgccgaagaagttgag

SEQ ID NO: 50731 - DNA, 274 bp, Zea mays
tgcgtctctcgcgcgttaccaagctctcaagttttctcgcgccgacggcaatggatgaggtcaccgaggccgtgaacaacctcaacatctcgggcgtaggggccgcgggcgttgccggggcggaagggcacaagaagaatcgcatccaggtctccaacactaagaagcccctcttcttctatgtcaacctcgccaagaggtacatgcagctgcacaacgaagtagagctgtcggccctcggcatggccattgcgacggtggtgacagtagcaga

SEQ ID NO: 50732 - DNA, 115 bp, Zea mays
gaagaggacaggtcaacagcttcggggataagcctggtggactcaaggtggttgattcttttgtgccacttgctgagatgttccaatacgtcagtaccctccggggcatgaccaa

SEQ ID NO: 50733 - DNA, 290 bp, Zea mays
gttgatctttggtgatggagaagtcgaaccaaatgaagagcaggtcctgcaaataacccttgagatttgcaaggaggacgtcatttccctgatcgtccacgatctgccttccttgggctggggagtaagaaaagatctggctatctgctggtgcatcttgcttaggcagaaacaggatgaaacttattgctgtgtgcagtatcttgaaaatcatctggagcttttagatttccttgttggttgctacaagaacttggatattgcattgaactgtggaaatatgttaagag

SEQ ID NO: 50734 - DNA, 295 bp, Zea mays
ccaaggccaacaccatgagcgcgctggatgaggtgtaccgcatctcccgcgcgcagaccctcatcgcgctctgcggcacagtcccgggctactggttcaccgtcgcgctcagcgacgtcgtcggccgcttcgccatacagctgctgggcttcttcatgatgtccgtcttcatgctcggcctcgccatcccctaccaccactggaccacgccgggcaaccacatcggcttcgtcgtcatgtacgccttcaccttcttcttcgccaacttcgggatcaacagcgccaccttcatcgt

SEQ ID NO: 50735 - DNA, 156 bp, Zea mays
tgagaggaatgatgtttcatgggacgcgctcttatccgggttcgtcgaaaacgggcttgttgatgcagcacttgacacttttagacaaatggagtccgcaaaaataaagtctaaccagcatacctttgtgaaccttctgaggctctgtggtgatag

SEQ ID NO: 50736 - DNA, 295 bp, Zea mays
tggcgctcctccgccgcatgaacagatatggtcttcttggtgagggacagaacaagcttgattacgtgcttgccctcactgttgagaacttcctccagcgccgcctccagaccatcgtcttcaagaatggcatggccaagtccatccaccatgctcgtgttctgatcaggcagcgccacatctcggtgggaaggcagctcgtcaacatcccgtcgttcatggtcagggtcgaatcagagaagcacatcgacttctccctcaccagccctctgggtggtggcctgccggaagggtg

SEQ ID NO: 50737 - DNA, 270 bp, Zea mays
ggaatctgcaaaggccttatcaggcgtgatagaagctgtcagaccagaagggcctctagcgcttgttgtcggaatggctagtgacaaggagcatcttgcgtttgctgagcagcttctctcaggtcaaaccccagatgtcgtgctactgacagaggcgagtatcgccggaggaagctcccgtgcaatgccagcctcatccctgaaagaagtatggattgccgcggcacgccatcgtgacatcgagtacgtggacatcggtggcatcagtgg

SEQ ID NO: 50738 - DNA, 290 bp, Zea mays
gctgcaactgtcgtcaccccaaagtacacttcactgaagcctctgggagatagggtgcttgtgaagcttggtgccgcagaggagaagacagttggtggcattttgcttccatctactgcccagactaaaccacaaggaggtgaggttgttgtagttggagcaggaaggaccatcggggacaagaaaatagctgtggatatagagactggagcacaagtagtatactcaaagtatgctgggactgaggttgaattcaatgactcaaagcatcttattctcaaagaagacga

SEQ ID NO: 50739 - DNA, 276 bp, Zea mays
cgatgacaatgctcggttgcgtcggcagcatcgcctggctcttctcggtgcccgtctacgaggagaggaagaggtatgggctgctgatggcggctgccctcctggaaggcgcttcggtcggacccctcgtcaagctcgccgtggaatttgacccaagcatcctggtgacggcgttcgtggggactgccatcgcgttcgcgtgcttcaccggcgcggccatggtggccaggcgcagggagtacctctacctgggtgggctgctctcgtcggggctct

SEQ ID NO: 50740 - DNA, 290 bp, Zea mays
gtggatgcaaatcagattgtcactaactgccagttactgaagacaatggatatctccaaaatgaccccaggtgacgcgtcctttactgtaccattcaagctggtagcagagcggaatgattacattcatgctcttgtcgcatactttgacgtgtcgctcaccaaatgccataagctgatgggcttctcaacaggcccgagatcgaaagccactcactggaagcaaactgttctctacctggaggatgttataactatctgtcagggggaaagcctgagtggttccatgac

SEQ ID NO: 50741 - DNA, 285 bp, Zea mays
ttgagcttccagaggacttgccacttaaggaggcacacgccattggagaatctctccaaatcaagattgaggagctacctgaagttgagcgagcattcgttcacctagatttcgaatgtgaccataagccggagcattcaattctcaacaagcttcccagcagccagccttgatccgaacgaatcctgtgtggtagattgtcgtgcagaatctgctgcagttcttgcattggcgtcttgtgctgtatgacaaaactaagagttcaattagttttgtggcggtgag

SEQ ID NO: 50742 - DNA, 269 bp, Zea mays
gtcttcggtcgaagaagttgaggtgcttgatggaagaagtttgagggtgaactctgggccgccaccacccagagatcggtcatcacggtcaccgcaaagacccaggggtgatgccaacagggtctacgtgggtaacctttcctggggagttgacaattcagctctcgcaaacctgttcagtgagcaaggtgaggtactggaagcaaggatcatctatgacagggagagtggaaggtcaagggggtttggttttgtcacgtacggttccg

SEQ ID NO: 50743 - DNA, 100 bp, Zea mays
cagataagcaggagaagacagaagtccctagagtgtggatttctccctgggaatgagaaagtcctgtccctgcttgccctggttaagccagaagtctgga

SEQ ID NO: 50744 - DNA, 280 bp, Zea mays
gatgaaatagaaatagacaccaaatgcttttggtaaaaattaaggagggggaggggcaaaatttactctgcagcagcttgcatgctagacaataatcttgagcatcaacaacaaagacaaccgcagcaactttaggcaggacttcatcaagtttgggtttgagcctagcatgaccaggaacatcaataacatgcataagttttactttatctttctgcagggaaggacaacaggaaagtttagcagaaatatcgcagtcaggatatgcatgttttttcac

SEQ ID NO: 50745 - DNA, 140 bp, Zea mays
accgcattctcgcgtcggcttgcttttaactgaatccagcccaccgcttctcgcacgtcgccatggacgcggtcgattctgtggtggatcccctccgcgacttcgccaaggacagcgtccgcctcgtcaagcgctgccac

SEQ ID NO: 50746 - DNA, 159 bp, Zea mays
gcattttatatgagactcaatgatgatgacaagacggtggctgcaatggatgttcttgtgcctaaggttggtgaattgattggtggaagccaaagggaggaacggttagatgatctgaatatgaggatacttgatgctggcctgcctttggaaccctat

SEQ ID NO: 50747 - DNA, 278 bp, Zea mays
  unsure (1)..(278): unsure at all n locations
tgccttctccacctcatcgccgagacgagatctctcccacacgaggagggcagcagggaagggagagatgggcgggcgggtggatcacgagtactcctacctgttcaagatggtcctcatcggagacagcggcgtcggcaagtccaatatcctctctagcttcacgcgcaaccacttctccctcgactccaagtccaccatcggcgtcgagttcgncaccaagtccctgcagatggacggcaaaacaataaaggctcagatctgggacacagctgggc

SEQ ID NO: 50748 - DNA, 130 bp, Zea mays
gcaagatgaagcccaacatcatctttgtactttccctgctcctcatcttggagaagcaagcagctgtgatgggacaaaaaggtggatcaaaaggccgattaccaagtgaattttcccaatttccacacaa

SEQ ID NO: 50749 - DNA, 269 bp, Zea mays
agcgaacggccggtcgagcgccgccgcccttggctgggtcttcactcagtccttcgccggcgacgagcgtccacacggtgtctactgaaatgagcagacagtagcaagagccactatgctgttcttctcctacttcaaggagctcgtggggaaggaggtgacggtggaactcaagaatgacctggcgatccgcgggacgctccactcggtagaccagtacctcaacatcaagctggaaaacacccgcgttgtcgaccaggacaagtatc

SEQ ID NO: 50750 - DNA, 253 bp, Zea mays
ccgtcacgaaggagggcacggtgacagagctcccgggggccaagttcttccccgacacacaggcgcttgtgcttggggcgctatcgaagctgcctcctattctcactacatagagaaaccttctgtactgttgccatgttacgtttgcgggctgaattggttcaggtttttgctactccgtattatgctactactggtagtgttattgtatggtttcttcctaataatagtatttatagttttggacttaaaa

SEQ ID NO: 50751 - DNA, 265 bp, Zea mays
cgtgaagccccgcgagatccacaacctcttctcccaccgccccgccttcgatcactgcctcctcgagtacaccggccgtggcaaccaggcggttgcttttgtgacgttcttcacccatgaggcggccctgtcggcaatgagttccctaaatggaacaatttttgatccggagagtggcgaccgtttgctcattgagctagctaaatcaacttcacgcagacctcgtggaggtgtcgaaggctaccgagttattgacaaacgggct

SEQ ID NO: 50752 - DNA, 266 bp, Zea mays
caaatatatctccccgcgtccgctagcactagccgccgtccgccgacttcatcgtcgccgtcgtctagacctcttcacgcactggaaaggttaaagtccgacatcaatggcgaacatcatcctgatctcatcatgtgccggaagcagcctggcatcgcgattggccgcctttgcgagaaatgtgatggcaagtgtgttgtctgcgactcgtacgtgcgcccatgtacgcttgtccgggtctgcgacgagtgcaattatggttcgtt

SEQ ID NO: 50753 - DNA, 264 bp, Zea mays
acttgcaagatggcgggtgaaaaagttgagaagccagatactaaagagaagaaacccgaagccaagaaggttgatgctggtggcaaggtgaaaaagggtaacctcaaagctaaaaagcccaagaaggggaagccccattgcagccgcaaccctgtccttgtcagaggaattggcaggtattcccgatctgccatgtattccagaaaggccatgtacaagaggaagtactcagccgctaaatccaaggttgaaaagaaaaagaag

SEQ ID NO: 50754 - DNA, 262 bp, Zea mays
aacaggaacgcaatggcattcatgtttgatggccgaagttcgcggcgagcagacccctgatgaggtgatccaattcggctttagatcccagcattgagtggaatccttgatcgatagttcttttgcatgtgcagctggagatggaggacggcgacgagatcgatgccatgcttcaccagaccggaggcagcgttcctagcaccacctaaaagcatcagtcgcggagcttcgttttgctctccgccctgcgtagtagtaaaca

SEQ ID NO: 50755 - DNA, 265 bp, Zea mays
ctgatacccaggagtctccagcttccaagagaggtcgggtcacagacagcagctatgtctgacataaatcttgactgggttgacaggcgtcagttgcagcgcttggaggaaatgctgattgttgtggatgagaatgataaggttattggtgccgacaccaagaggaattgccatctgaacgaaaacattgagaaagggctgctgcaccgagccttcagcgttgtcatgtttaacaccaagaatcgaatcctgatacagcagaggt

SEQ ID NO: 50756 - DNA, 257 bp, Zea mays
gaaagcagttaaattttatgatggtcttgctaagcagttggtcagtcaaggtcacgtgttagatgtttttgacttctgctctcgatcaggttgggctagctgagatgaaggttgctattgagagaacaggtggccttgttgtcatgtctgaaagttttgggcattccgtattcaaggattctttcaaacgcatttttaaggaagtggacagtctctaagactttctttcaatggcataattgaaataaactgttcaa

SEQ ID NO: 50757 - DNA, 261 bp, Zea mays
ttctatacactgcggaagccggttgcttccacaataaacacattggccggtgctctgtacaaggtcttcagtgcctcgcctgatcaagctaggaatgagatgcgccaggcttgttttgattacttgagcctcggaggcgtcttctcgaacgggcctatcgctttactctctggccttaaccctcggccactgagtttagttgcgcacttctttgctgttgctatctacggtgtcggccgcttgatgctccctcttccttca

SEQ ID NO: 50758 - DNA, 252 bp, Zea mays
ggtagttctcctgcgtcgtacgaaagaaactgtgctcaatggcaaaccaataataaatttacctcctaagacaattaatctgaataaagtagatttcacacaagaggagcgcaagtcttatttgatgctggaagaacgctctcggacaaaattcaaggcatttgctgcggctgggacactcaaacaaaactatgccaacatccttttaatgttgctgcgacttcggcaagcctgtgatcatcctattcttgt

SEQ ID NO: 50759 - DNA, 257 bp, Zea mays
gaggaaagcactacttgcgttgaaggctgaggagaggaaagttgaagttgacaaggatctgcgttctctgcagccactttcaaacaagaaagaaaatgatgaagttttcattaagctgggttctgacaaggataagaagaaggaaaatgctgagcgtgatgagcgtgccaagaagtcggtgagcatcaacgagttcctgaaacctgctgaaggagaaaggtactacggcagccgtggccgtggaaggggccgtgggg

SEQ ID NO: 50760 - DNA, 262 bp, Zea mays
ggcaattgtaataaactatcaagaaggccataaagcagcagctgttcttccagtcctggatttagcccaaaggcagaatgggtggttgcccatctctgctatgaacaaggttgcagaagttttacaagtacctccaatgagagtatatgaagtagcaactttttatacaatgtatatacgaaagccagttggaaagtatcacattcaggtctgcactactacaccctgcatgcttcgaaactctgacagcatactggaggcc

SEQ ID NO: 50761 - DNA, 258 bp, Zea mays
gttgtgttgactcgcaacctcaggaacagacaccatggtgcacctaactgatgctgagaaggctactgttagtggcctgtggggaaaggtgaaccctgataatgttggcgctgaggccctgggcaggctgctggttgtctacccttggacccagaggtacttttctaaatttggggacctgtcctctgcctctgctattatgggtaacccccaggtgaaggcccatggcaagaaggtgataaatgccttcaatgatgg

SEQ ID NO: 50762 - DNA, 251 bp, Zea mays
ctcaactccatggtgctcgccaacaactcggagaacgtgctgctcccgctcaacgagccggtgctagtaaccaagcgccgcagccagatacaaacgttcctggaccaccacggcggccccggcgtgcagcacatggcgctggccagcgacgacgtgctaaggacgctgagggagtgcacgctagctcggccatgggcggcttcgagttcaatggcgcctccaacatcggattattgacggcgtgtagcggc

SEQ ID NO: 50763 - DNA, 256 bp, Zea mays
gtcgggttaatgagcgtacctgtgatgggcatcgcaaccgagtctatagcaacaactgagagcgtatacagtgctgccttggctctgggcattgcgaaccaactcacgaacatactccgggatgttggagaggatgctagaagaggaaggatatatttaccacaagatgagcttgcacaggcacggctctctgatgaggacatcttcaaaggggtcgtcacgaaccggtggagatacttcatgaagaggcagatca

SEQ ID NO: 50764 - DNA, 255 bp, Zea mays
caacgccctggcacgccagacactcatcaacgccggcgggtcttcgagcgcaccgtgttccctgcaaagtacgcgctggggatgtcggcagacgtgtacaagagctggaatttcaacgagcaggctctcccagcagatctcgtcaagagaggtgtggctgtgccggaccagtcaagcccatatggtgtccgactgctgatcaaggactacccctatgccgttgacgggctcgtcatctggtgggcgatcgagcgg

SEQ ID NO: 50765 - DNA, 257 bp, Zea mays
tagtagttctcctgcgtcgtacgaaagaaactgtgatcaatggcaaaccaataataaatttacctcctaagacaattaatctgaataaagtagatttcacacaagaggagcggacgttttatttgatgctggaagaacgctctcggcaacaattcaaggcatttgctgcggctgggacactcaaacaaaactatgccaacatccttttaatgttgctgcgacttcggcaagccagtgatcatcctatcttgtaaaag

SEQ ID NO: 50766 - DNA, 254 bp, Zea mays
gtcgatttgtccgcgagtgcgtactgggtacctggtcaagcttctaacaagtaccttaactacggagctggtataagcgaggtggagattgatcttcttacgggagcaatcactataataaggggcgatcttgtgtacgactgtgggaagagcttgaaccctgcagtggacttaggacagatccaaggctcgtttgtacagggaatcggtttcttcgtatacgaagagtacaccacgaacagcgacggcctgat

SEQ ID NO: 50767 - DNA, 258 bp, Zea mays
ctcatttggtccccggtgtgccgcaacgacatttcctggcactttgagacgttcctggtaggtccagacggtgttccagtgcgcagatacagcaggcgctttcgcaccatcgacatcgaacccgatatagaagccctgctgtccacgcagcctagcaacccctaaggcattcctggtatctgggcttggtgatggctggctgccctccggggggaggtttttccatgacggtgtttcctctaaatttacatggagaaa

SEQ ID NO: 50768 - DNA, 263 bp, Zea mays
ccagattgacggctccaattggcgcccatggcggaagacaccaacataaaacaggaggaagaggagttcagcaccggtccactctcggtgctcatgatgagcgtcaagaataatacccaggttcttatcaactgccggaacaacaagaagttgcttggtcgcgtgcgagccttacgatcggcactgcaacatggttcttgagaacgttcgtgcgatgtggaccgaggtaccaaagaccggtaaaggcaagaagaaggctctcc

SEQ ID NO: 50769 - DNA, 260 bp, Zea mays
gacgcgcactgcgccacgctgctcaagaactgctacgacgcgctgccggaaaatggcaaggtcatcgtcgtcgagtgcgtgctgccggtcaacacggaggccacccccaaggcgcagggcgtgttccacgtcgacatgatcatgctcgcgcacaacccaggcggcaaggagcggtacgagcgcgagttccgcgagctcgccaagggcgccggcttctccgggttcaaggccacctacatctacgccaacgcctgggccat

SEQ ID NO: 50770 - DNA, 259 bp, Zea mays
gcaatcagctcatctgtcagcgccacaggtgaccggaaaaccacggccggcgttcctgcttctctacccggtccgaattgctgaccggatcaacccgagaccttgcaggattatcgatctgattgcggcatgatccgcttcatcctgctgcagaaccggcaggggaagactcgactggccaagtattatgccccgatcgaggactcggaaaagcacaaggttgaatacgaggtacaccggctcgtggtcaatcgggacc

SEQ ID NO: 50771 - DNA, 261 bp, Zea mays
acaacttccaagtgctttacccaagtccgcacatagggaccgaatgtatgttccttttgagcaagtaactcgaaatatcaaattctgtctgtcttccaaactgcgctcaatatcaaattggtatatcgatatacgtcttggtgaaagctctactgtttcacccttccttgctttgtcatacatcttttcaccgccaaccttaatggcagaaaacattggaggaacttgccatatctcacccatgaatgatgctgctgcctt

SEQ ID NO: 50772 - DNA, 259 bp, Zea mays
gggcgcaccgtcaccggggtgaggctgtattgcgtcgacagcaacgcctgctttcgctacgacgggagcaccagaggctaggatatattgcttcatcagtgacagggagccaagatgccggccggagggatctcggtctcggcgacgtccggcgtcgagttcgaggccaagatcacgccgatcgtcatcatctcctgcatcatggctgccacaggcggtttgatgttcggctacgacgtcggcatctcaggtggtgtga

SEQ ID NO: 50773 - DNA, 257 bp, Zea mays
ggagctttatactcagcatttcttgcgatgcatttagcagctggtgtgccagctctaatgtcggcacttgctttggcatacaatgcaaacctctttggagcactaacacactatagtagcgggcaatctgcagtatactttggagcgacgtatgttgaccttccggatgtattcaagctgggttttataacagccgcaatcaatgctgtaatttggggagttgctggtgcattatggtggaaatttttgggtcttta

SEQ ID NO: 50774 - DNA, 259 bp, Zea mays
cctgagggtacatttgtttccatgggtgtgtactctgatggttcatacggtgttccttctggactcatttattcattcccagtaacatgcagtggtggtgaatggaaaatcgttcaaggcctcccgattgatgagttctcaaggaagaagatggatgccactgcccaagagctgacggaggagaagacgcttgacttactcagccttcgagtaaattctaccacacccagagcgcaattgccaccccaatgttttgaat

SEQ ID NO: 50775 - DNA, 251 bp, Zea mays
gctatgaagacgtctcttctggaagtgagattagaagtgtggtgttggctgggaggagattttatgagaaggaagggctccctgctttccctatgggaaaaattgatcaaacacgtatgtggaaggtgggtgacagggtccgttcaaccaggccacaaggtgatcttggcccactgcatcccttcactgctggagtgtatgttgcactaatgatggctcagattgaggtccttaggaagaagggccactct

SEQ ID NO: 50776 - DNA, 259 bp, Zea mays
ctgcgccgcgccaacaagaagccatactcgaggtccattgtgggtgcttccctagaggtgatccagaagaagagggctgagaagcccacggtccgcgatgctgctagagaagctgctcttcgcgagatcaaggagcgcatcaagaagaccaaggatgagaagaaggcgaagaaggcggaggtgaccaagtcccagcaggcgcagacgaagggcgcggtccagaagggttccaagggccccaagttgggtggcggcggtg

SEQ ID NO: 50777 - DNA, 253 bp, Zea mays
cggtgaaccggactgcacttactacctcaggactggattgtgtcgatttggcatgagctgcaggttcaatcatcctccggataggaatctggctattgcctctgccagaatgaagggagaatatcctgagagagtgggacagccagagtgtcagtcttatctgaagaccggaacatgcaagtttggtcctacatgcaaatttcaccatcccagggaaaaggccggaattgcagggagggtgcagctaaacact

SEQ ID NO: 50778 - DNA, 256 bp, Zea mays
tgcgtcgacagcaacgcctgctttcgctacgacgggagcaccagaggctaggatatattgcttcatcagtgacagggagccaagatgccggccggagggttctcggtctcggcgccgatccggcgtcgagttcgaggccaagatcacgccgatcgtcatcatctcctgcatcatggctgccacaggcggtttgatgttcggctacgacgtcggcatctcaggtggtgtgacgtcgatggacgacttcctgggcaag

SEQ ID NO: 50779 - DNA, 254 bp, Zea mays
tgtatttttcccagctcctatcttctcttcgtcgtagtgctgcccttcagcgaggtgctggactggagcaccttctcggtggtgctcgccgagagaagggcataccggcggacctcaagaacttcctgtggcacgccgcacgccacgcccatcaagtacgacttcttccacatgatcctgcactccatctggttgagtagagcgaaccaggtcgagctcgacggctgaactgtgcggtcaagtctctggaacag

SEQ ID NO: 50780 - DNA, 252 bp, Zea mays
cgccgcgccgtgctagcttgctagttgcaagcaccagccgaccaccacacggtagcgcacgcggacaatttaacagcatcaggtttaggccctgctgccgtcgacgagcgcccgggccaccgcacacctgaaagcaatggagatcgtcgccacgcgctccccggcttgctgcgccgccgtgtccttctcccagtcgtacaggcccaaggcgtccaggccgacgaccacgttctacggcgagtcggtgcgggt

SEQ ID NO: 50781 - DNA, 255 bp, Zea mays
tgcgtcgacagcaacgcctgctttcgctacgacgggagcaccagaggctaggatatattgcttcatcagtgacagggagccaagatgccggccggagggttctcggtctcggcgccgtccggacgtcgagttcgaggccaagatcacgccgatcgtcatcatctcctgcatcatggctgccacaggcggtttgaatgttcgctacgacgtcggcatctcaggtggtgtgacgtcgatggacgacttcctgggcaa

SEQ ID NO: 50782 - DNA, 249 bp, Zea mays
caaccagatgaccaaggggttctcaagggtcagggatgggctcgacgatctggctctcgacattcctgatgccagggagaagttcctttcctatgtgcagcgcgcgaagaagagtggatggctcctgcctgggttcggtgtggcatcttcggcttgaacagctgggcagaagagaagtacgtagctgaagcggctcagcaaacccagtttggatgtgtgttttcgtcgttcgtggttgcccttgcgcct

SEQ ID NO: 50783 - DNA, 251 bp, Zea mays
cttcgggctttaagagagaaggagtccaaattaaaggctgcaaggatgaacatttatgtccggagaggtggtccgaaacaccaaactggactcgccaaaatgcgacaccctaggcacacaacttggcgttccaattgaggtctatggaccagaggcgaccatgactgggatctgcacagaagccattgatcgcatcatggccgcgtaaatcacaaatgtggttgttccatttgcagtcacatccgttttgt

SEQ ID NO: 50784 - DNA, 249 bp, Zea mays
ggggcacaaggaattggattatgccggacagagcacatgttctttgcttcagacgagaggattaaggctgtcaggcagatgattatggctcccacgcttgagctgaggcagcaggcgctcgaccgtctcttgccgtatcagaggtcctggaccagaggggagtgggcgagctggtgaagcttgctacagagaggggccgcaaagctaggcctaacttgaaggtgggcatttgtggagaacaggtggaga

SEQ ID NO: 50785 - DNA, 253 bp, Zea mays
ctgactgataagatcacgacaggcacttccttggttagcgggaaggtgaaggagatggaccagaagttccaggtctccgacaagaccaagtctgcactcgctgccgccgagcagaaggtgagcagtgccgggtctgccatcatgaagaacaggtacgtcttcaccggcgcgtcatgggtcaccagcgcattcaacaaggtcgccaagaccgccacggacgtcgggacgatgaccaaggagaagatggccgccg

SEQ ID NO: 50786 - DNA, 250 bp, Zea mays
gtcgggttaatgagcgtacctgtgatgggcatcgcaaccgagtctaaagcaacaactgacagcgtatacagtgctgccttggctctgggaattgcgaaccaactcacgaacatactccgggatgttggagaggatgctagaagaggaaggatatatttaccacaagatgagcttgcacaggcagggctctctgatgaggacatcttcaaaggggtcgtcacgaaccgtggagaaacttcatgaagaggca

SEQ ID NO: 50787 - DNA, 252 bp, Zea mays
gccttctccacctcatcgccgagacgagatctctcccacacgaggagggcagcagggaagggagagatgggcgggcgggtggatcacgagtactcctacctgttcaagatggtcctcatcggagacagcggcgtcggcaagtccaatatcctctcgcgctcacgcgcaaccacttctccctcgactccaagtccaccatcggcgtcgagttcgccaccaagtccctgcagatggacggcaaaacaataaagg

SEQ ID NO: 50788 - DNA, 296 bp, Zea mays
gaattctacaatcacaaggaaggctattgcacaaaatgggatttatgccatcctccttgttttcgaagtcacatcgcttattaactgccctggttgattctcagaataagaaaactgttgagatgcaaaattggtttgagactaaggatcctgagaaagcgaaaatggaaaaagaaaggatgtagggacaacatattcgagcccattcaatccttcaacgcaaaagggaaaaagtgaaccgcaagtacacacaacctgctcggccaaggcgacagctttctcaggatttttggaag

SEQ ID NO: 50789 - DNA, 306 bp, Zea mays
ataaagggaagtttcttttggctgctcgaaggttcagacaaggagcacatacagaatatatcatctcttatgactatgatgatctgcacccaagaagcagttcatatgttggaaagttaagatctgacttcttggggacaaagttcatcatctatgatagccaggcgccatatgacggtgccaaaccttcgaggacccgatccactcgccgctttgcaagcaagcagataagcccacaggtttcaggcggcaattctcgagttgagacaactgacctacaggttcaacttcatgaaatcaagaggg

SEQ ID NO: 50790 - DNA, 304 bp, Zea mays
gattttaacactgacccagaggttagagttatgattatgtcactgaaagctggtaatcttggtctcaacatggtttctgcttgccatgtaattctccttgatctctggtggaacccttatgctgaggaccaggcagttgatagggcacacaggattgggcagactaggcctgttactgtatctcgcttgacggttaaagacactgtggaagatcgtattttagctctgcaggaggaaaagagaaccatggtgaactctgctttcggtgatgacaaagccggcggccatgcgacccggctcaccg

SEQ ID NO: 50791 - DNA, 300 bp, Zea mays
gcagcctttctcacctggaagagaactccttgaaggcttacaaaatgtgcgacgcctttgtggggacctggaaactcgtctccagtgagaacttcgatgattacatgacagaagtgggagttggcttcgccaccaggaaagtggccggtatggccaagcccaacttgatcatcagcgtagaaggggacttggttattatccggtcagagagtacttttaaaaacaccgagatttccttcaaactgggcgtggaattcgatgaaatcaccccagatgacaggaaagtgaagagcatcataa

SEQ ID NO: 50792 - DNA, 302 bp, Zea mays
gcagcacacagccccatcccaatcctagtcgatcttcttcccctcctcaaggaagaaaagaagctgaaccatggggaagagaaagtcagctgctaagccacctcctaagaagcggatggacaagcttgacactgtcttttcctgcccattctgcaaccacgggagtagtgttgagtgccgaattgacatgaagaatctgattggcgaacatcttgtagaatctgtcaggaaaacttcagcacaactgttaatgcactcactgagcctattgatatatatagtgaatggattgatgagtgtga

SEQ ID NO: 50793 - DNA, 298 bp, Zea mays
taaggaaagggttcgtactcatggcgccgccgcagccaaagtcgggccttttcgttggcatcaacaagggtcatgtcgtcaccaagcgcgagctgcctccccgcccgtgccaccgcacagggaaatcaacgaagagggtgtctcatggtcaggggcctgatcagagaggttgctgggtgtgctccttatgagaaccgtatcactgagcttctgaaggttggcaaggacaagcgtgccctgaagcttgctaagagaaagcttggaactctcaagagggcaaagcagaagagagaggaga

SEQ ID NO: 50794 - DNA, 303 bp, Zea mays
cgggccttggaggctgcccgtatgccaagggcgccactggcaacgtcgccacggaggatgtcgtgtacatgctccatggcctggggatcgagctcaacgtcgacctcaacaagctcatggaggctggtgactacatctccaagcatctgggcaggccgctgggttccaagaccgccactgctctccgcaagctgaccgcctgaaaaaaccttttcaagcactcccaagagaaatgtatcggttcgaggtcccatctctcagtcatatgaatgtcctgtagttttactttatgctttttttccg

SEQ ID NO: 50795 - DNA, 300 bp, Zea mays
tgacgggctcgcgaacctcaacatcagccagtgcaccgccctgacgcccccggcggtgcaggccgtctgcgactccttcccggcgctgcacacctgccccgagaggcactccctcatcatcagtggctgcctcagcctcacgtacgtccactgcgcctgcgccctccacccacaccgtgccgggagagccctgatggccaaccatgcgtactaataaacatgttggtggctttgcgctgatagttctcgcgaatggggacgcatgcctggggggtgatggcgtcgtccaggtgtagagga

SEQ ID NO: 50796 - DNA, 280 bp, Zea mays
ttgagatccccagggcagctctggtggctgatgagatagcggagcaggctgcattcttctccttcggaacgaacgatctgacgcagatgacctttgggtacagcagggatgatgtgggaaagttccctaccgtctatcttgctcagggcatcctccaacatgaccccttcgaggtcctggaccagcggggagtgggcgagctggtgaagtttgctacagagaggggccgcaaagctaggcctaccttgaaggtgggcatttgtggagaaccggtggagag

SEQ ID NO: 50797 - DNA, 297 bp, Zea mays
  unsure (1)..(297): unsure at all n locations
ttcagagacagcttctccatcattttcaccagcgacaccaccctgcagcgagccgtcgccaggatcgccggcctgctcggcctcaccatggtgctcaacagcgtgcagcccgtggtatacggggtcgcggttgggggcggatggcagggcctcgtcgcctacatcaacctcggctgctactatatcttcggcctgcccctgggctacttgctcggatacaagttcagctttggagttgggnggatttcgtccggcatgctttgtggtatcaccttcagacgctcatcttgctagtgg

SEQ ID NO: 50798 - DNA, 299 bp, Zea mays
cctgaagcaggggctggtgctgcgcaacccctacatcaccaccctgaacgtgttccaggcctacacgctgaagcggataagggaccccaacttcaaggtgacgccccagccgccgctgtccaaggagttcgccgacgagaacaagcccgccggactggtcaagctgaacccggcgagcgagtacccgcccggcctggaagacacgctcatcctcaccatgaagggcatcgccgccggcatgcagaacactggctaggcggcttctcttcactcacctgcagagtgcaccgcaataatca

SEQ ID NO: 50799 - DNA, 292 bp, Zea mays
gtaaattcggtgcagtgtgcaagttccatcatccccgggtgagatcactgccccctccagattgtgtcttaagtccaatgggtcttccaatacgtccaggtgaagaactgtgcaacttctattctcgttacggcatctgcaagttcggcgtcaactgtaaattcgaccatcctacagtggttgctccaatggtctatgcgtatggtttctccgcgtctgcttcccctgcatccgcttcgactaatgtacctatggcgcgacgcttctgggatcccaacggggtctggatata

SEQ ID NO: 50800 - DNA, 295 bp, Zea mays
gttcagtgcattcagaacaagcccctgtattttgctgatcggctgtatgactccatgaagggcaatgggacgcgagataaggtcctgatcagagtcatggtctcccgcagtgaagtggacatgttgaaaattaggtctgaattcaagagaaagtacggcaagtccctgtactattatatccagcaagacactaagggcgactaccagaaagcgctgctgtacctgtgtggtggagatgactgaagcccgacacggcctgagcgtccagaaatggtgctcaccatgcttccagcta

SEQ ID NO: 50801 - DNA, 291 bp, Zea mays
tccatactgacgttccagctccagatatgggcaccaactcacagacaatggcatggatacttgacgaatactcaaagttccatggttactcacctgctgttgtgacaggaaagcctgtggacctcggaggatcattgggaagagacgccgctactggaaggggagttctgtttgctactgaagctttgcatgcagagcatggctatcgtattgcaagccagcgtttcgtcatacagggattcggtaacgttggttcctgggcagctcgctgatacgtgaagtcggtggcaa

SEQ ID NO: 50802 - DNA, 296 bp, Zea mays
ataccattaccatctcttcgtcgaatgcaaacaacaaccgcccggcttgcccgctgtgtagaggcgatgtgatggggtggttcgtcatcggcgaggctcgctcgcaccttaaccagaagagaagatgctgcgaagagagccgctgctcgtacgtcggcagcttccacgagctccagaggcacacgcagcaaaagcatccggactcgcgcccttccgcgatcgaccctgctcgccgggccgattgggagaacctgcagcggtcttccgacgtggtagatgtcctgagcacaatacac

SEQ ID NO: 50803 - DNA, 294 bp, Zea mays
atcgtcggacgcacggccgcagttccgccatcagccatcgaattcgatggcggccaacttcgggaacaagatcagcaacgccaagctggttcttcttggagatgtaggcgctggcaaatctagcttggttcttaggtttgtcaagggacagtttgttgaattccaggaatcaacaatcggagcagctttcttttcccagaccttagcggtaaatgatgagactgttaagtttgaaatctgggatactgctgggcaagagaggtatcatagcttggcccccatgtattatagggg

SEQ ID NO: 50804 - DNA, 292 bp, Zea mays
cctgagggtgaaccagaagattgaagttcgccctggcattgtcatgaaagatgagactggaaacatcaagtgcaccccaatctactcaaggattgtctcactgtacgctgagcagaatgaactccaatttgctgtcccaggagggcttattggtgtgggaacaaccatggacccaactctaacacgtgctgacagactggttggccaggttcttggtgaagtaggttcactacctgatgtttacgtagagcttgagatcaatttcttcctactccgaaggctgttgggtgtg

SEQ ID NO: 50805 - DNA, 286 bp, Zea mays
gtacgaagtacatggtgatccaaggtgaacctggagttgtcatccgaggaaagaagggcactggaggcattactatcaagaaaactggcatgtccttgattatcggtatctatgatgagccaatgactccagggcaatgcaatatggtggtggagaggctcggcgattacctgatcgaacagggcttctaagtttgtcataatgctattttggtcattgggcacttaagtttgcacctcatttggttctgtaatatgtgggcttgtgcatgtgcttggcgtattgc

SEQ ID NO: 50806 - DNA, 131 bp, Zea mays
cctgcaactgctgatcacatcgatcgacgaccatcgatatgattattatctatctaccttgtggtggtggttgaacaataataagcgaggccgagctggctgccatacataggtattgtgtggtgtgtgtg

SEQ ID NO: 50807 - DNA, 276 bp, Zea mays
gttttcggaagttggtcatttgaaacgctttgctgttcactacgatggttatggccgcccaaatggcactgcagaggtggtgtttacacggaggagcgatgcaattgctgcactgaagcgttataataatgttctacttgatggaaaagctatgaagatagaagtcatcggaaatgacttaggattgcctatgacacatcgtataaatgttgttggggcttctaatggcagagctacaagaacagttgttatgacgcctgagtttagtcaacgtgg

SEQ ID NO: 50808 - DNA, 256 bp, Zea mays
atccaggccagggcctattatggctgggagtggattctttgaggccgtaataagtggaaagggaggacatgctgcacttcctcatcacactatagatccgatattggctgcctcaaatgttattgtgagccttcagcaacttgtttctcgagaagctgatcccttggaatcacaggttgtgacagttggaaagtttcaaggaggtggagccttcaatgtgatccctgattcggtaactataggtggcacttccgag

SEQ ID NO: 50809 - DNA, 271 bp, Zea mays
agtctgccgacagtaggcttctactaagtggaagcaaggattccactctaaaggttgtccacttgacttaagctgtactgttgtgttgttcattggacagcacttactctgtcatatatatatgtatataaaagaaaaactttgtacttttgccgattcaccaaatgaatgcatttcagatctgggatattcgaacacacaagttgaaaatggaattgccgggccacgcggatgaggtgtacacgtggattggagccctgacggtgaaaag

SEQ ID NO: 50810 - DNA, 260 bp, Zea mays
gacggttgcatttgcatctgagttcctgattgtagtatcccagtttcttctgtgagtggaatcgcgaggaagaaggatgtcgtgctgcggaggcaactgcgggtgcagagccggatgcaagtgcggcagcggctgcagagggtgcaagatgtacccggacatggcagagcaggtgaccaccacccagactgtcatcatgggtgttgcaccatccaagggcgggttcgaggcggacgcgaataatgagctcgtcgacccgg

SEQ ID NO: 50811 - DNA, 259 bp, Zea mays
gacaatcatgaagggaaggagttgaccggaccctgcttgtacgtctcaccgactgtgtaggtagattgtcagttggggttccgaagtactctactcatacgtgtgtatgacagtttatttatgaaacaagatacgcattgatcgttatggtgcagcctgggatttcttattataacataatgtatcgtatgtataaacggaccgtcctcagcacggacctaatataagcacgacctgttggcatcacatcagggatggg

SEQ ID NO: 50812 - DNA, 243 bp, Zea mays
ttcagagacagcttctccatcattttcaccagcgacaccaccctgcagcgagccgtcgccaggatcgccggcctgctcggcctcaccatggtgctcaacagcgtgcagcccgtggtttcaggggtcgcggttgggggcggatggcagggcctcgtcgcctacatcaacctcggctgctaatatatcttcggcctgcccctgggctacttgctcggataccagttcagctttggagttggggga

SEQ ID NO: 50813 - DNA, 224 bp, Zea mays
cgatctcacttagctgctgctggtggtggtggtggcctgggcctggctgctgtgtctgtatcgatgtgtccgtattttctccatctcgtctgcatacgctgcaattggtaaggagctagctggcctttcatgtcttccatgctgccatagccatacgagcggccggcaggaagttcgataccccatcgctcgctgaacatgcatgtatgcatggggataacatg

SEQ ID NO: 50814 - DNA, 188 bp, Zea mays
cgcagatgacctttgggtacagcagggatgatgtgggaaagttcattcccgtctatcttgctcagggcattctccaacatgaaccccttcaaggtcctggaccagaggggagtgggcgagctggtgaagcttgctacagagaggggccgcaaagctaggcctaacttgaaggtgggcatttgtggaga

SEQ ID NO: 50815 - DNA, 251 bp, Zea mays
gtttgacaaagggccaagttggagttctccatggatctatgagctgatttgctgcaggacgacgatgggcaagttatcgagacccactccaatcagtgctggactggattaccctggcgttggacctgagcacagtttcttgaaggacatcggacgcgctgaatatgacagcgtgactgatcaggaggcactggatgctttcaagcgcgtctcccgtctggagggcatcatcccggccctggagacctccc

SEQ ID NO: 50816 - DNA, 172 bp, Zea mays
gaccagggcgaggtgaactgcctggctttcaacccgttcaatgaatgggttgttgcaatggttctactgacaagactgtcgaattatttgatcttaggaagattcatacttctctgcacacctttgactgtcacaaagaagaagtttttcaagtggatggagtcaaagaatg

SEQ ID NO: 50817 - DNA, 172 bp, Zea mays
ggctgtaaagcctcgacctgcggcccatccgttctatgattttgaacaagtgatcgactcagatgaagaattggatttaatcgccatggacaacggcacgtcgaagctgtcatgacgactcgccatgtaccttttgcacttagggttgtatttattattatcgctccaattg

SEQ ID NO: 50818 - DNA, 220 bp, Zea mays
gggcttttaagattcccggcagctggtgaaactagagtgagagcatatgctgctgccagaggagtaagatcagatcaaattgtattcacagacgttgccatgaaaaatgagcatatacgacgcagtgccctggacgaccttttcctggacactcccctctgcaatgcacacacaacaggcactgtcatactgtgggctggtctgccaatgatcacccttc

SEQ ID NO: 50819 - DNA, 273 bp, Zea mays
gaattctacaatcacaaggaaggctattgcacaaaatgcgatttatgccatcctccttgttttcgaagtcacatcgcttattaactgccctggttgattctcagaataagaaaactgttaagatgcaaaaatggtttgagactacggatcctgagaaagcgaaaatggaaaaagaaaggattcagggccaaaatattcgagcccattcaatccttcaacgcaaaagggaaaaagtgaaccgcaagtacacacaacctgctcggccaaggcgac

SEQ ID NO: 50820 - DNA, 240 bp, Zea mays
cggctcgagtgctgttcgtgatatgagacagacagttgcggtgggtgtcatcaaagcagtggacaagaaggctgctggagctggcaaggtcaccaagtctgcccagaaagctcagaaggctaaatgaatattatccctaatactgccaccccactcttaatcagtggtggaagaacggtctcagaacactttgtttcaattggccatttaagtttagtagtaaaagactggttaatgata

SEQ ID NO: 50821 - DNA, 275 bp, Zea mays
gctccaggaccttggtatcatccccgatgacagattctgtggctgccttctcagcgtggcagccaacacaccagcggaagaactgggcaaggtgatcagctgcattgagagaagcaacgtccagcttggtgccgtagtgaagctccttgtggacaggagctcctctgaatcttttagagaagcagcccgtgaactgctgaggagctcccgcggcgtggtgaagatgccttactgcaactgcctgatggacctatgcgtgaacctgaaccagatgg

SEQ ID NO: 50822 - DNA, 273 bp, Zea mays
gcgcgtcggcttccgccagcgcccagctggaggtctcgctgttcccttcacgatacgcccccccaaagcggatcaaaccctagatctcgtcttgtcgcaccgttcctccgatcccatcctatccgatcctcatggattcctcccgtccagcctcagctagcagtccgagttcgactacctcttcaagctactccttatcggcgactccggcgtcggcaagagcagcctcctcctccgcttcaccgccgactccttcgatgacctctcccctac

SEQ ID NO: 50823 - DNA, 282 bp, Zea mays
ctcgtcatgatgagattggtgtcagcaatgacctatatgactttctccaggtgttctttaagaagcacccagaatttgcaaagaatgacttctttataactggagaatcttatgctgggcactacattccagcatttgcaagcagagttcaccaaggaaacaaagcaaacgagggcattcatataaacttgaagggattcgctatcggcaacggtctcactgatccagaaatccaatacaaagcctacacagactatgcgctggaaatgaatcttatcacaa

SEQ ID NO: 50824 - DNA, 282 bp, Zea mays
gaaacctctcaaaccctagccgcctcctgcaagtttcagagctcaggaatctgcgccatggcgagtgagacggagaccttcgcatttcaggctgagatcaaccagctgctctcactcatcatcaacaccttctactccaacaaggagatcttcctccgcgagcttatctccaactcttccgatgcgctggacaagatcaggttcgagagtctcactgacaagagcaagctcgatgcgcacctgagcttttcatccaccttgtcccagacaaggccacgaaca

SEQ ID NO: 50825 - DNA, 130 bp, Zea mays; identical to SEQ ID NO: 50748

SEQ ID NO: 50826 - DNA, 272 bp, Zea mays
cctcgacaatggcactccaggcagcctacgagtacctgcagcaggccgtcggccatggcgcgtggtcgtccacgcagacgctgacgctgctgctcatcgccgtacccaccgtactactgctgctagcgtccctcgccaagagcacgtcgtcgtccggtaggggcaagccgccgctccctccctcgcacgacaggcaccctccccatcgtggggcacctacaccacatcgggccccagacccacatctcgctccaggagctggtggccaagta

SEQ ID NO: 50827 - DNA, 276 bp, Zea mays
cagtaacaagtcaaacctcaagttgtatgttaggagagttttcatctctgacgaatttgatgatcttcttcccaagtacctgagctttttgaagggtattgttgactcggacacgctgcccctgaacgtgtcacgagaactgcttcaacaacatagcagtctcaagaccatcaagaagaagctgatccgcaaagcccttgacatgatcaggaaacttgctgaagaagaccctgatgagtacagcaacaaggataagacagatgaagagaaaagcga

SEQ ID NO: 50828 - DNA, 278 bp, Zea mays
ctcatggtggcgctggacaagctctacttcacgccgctaggaagttcatggatgagcgggacgccaagatccgcggtgagctcggcgatgtcaagggcgcctccgaggaggtgaagcagctggaggaccaggcggcggccatcatgaaggcggcgcgcgccgagatcgcggcggcgcttaacaagatgaagaaggagaccaccgcggagctggaggccaagctggacgagggacgcagccgtgtggaggccgagctcgtagaggcgctcgccaacctc

SEQ ID NO: 50829 - DNA, 274 bp, Zea mays
gctccaggaccttggtatcatccccgatgacagattctgtggctgccttctcagcgtggcagcaaacacaccagcggaagaactgggcaaggtgatcagctgcattgagagaagcaacgtccagcttggtgccgtagtgaagctccttgtggacaggagctcctctgaatcttttagagaagcagcccgtgaactgctgaggagctcccgcggcgtggtgaagatgccttactgcaactgcctgatggacctatgcgtgaacctgaaccagatg

SEQ ID NO: 50830 - DNA, 270 bp, Zea mays
agcaaactgagggctctgctcgctggccctcggagcctgcgaaggtcaagctgcttcgggggtaggattgacaggattggagcccagagcggactaggctgcaacagcttccggtaccgaagataacagccaaatctgctcgagcagatcgcaaaagctctcaagcacctgcggagctctcatacagcttggtcgcattgccactgagaggtggtgaataccctcctggagctgcagcttcctgtcttcatctatcacgatcgatgttaa

SEQ ID NO: 50831 - DNA, 267 bp, Zea mays
gctccgtgttgacaagtggtggggtaacaggaaggaactggccactgtcagaaccatctgcagtcatgttcagaacatgatcaagggtgtgacactgggcttccgttacaagatgaggtctgtgtatgctcacttccctatcaacgtcgttattcaggagaatgggtctctggttgaaatccgaaatttcttgggtgaaaaatacatccggagggttcggatgaggacaggtgttgcttgttctgtctctcaagcccagaaggatga

SEQ ID NO: 50832 - DNA, 267 bp, Zea mays
gtgctctctgcagctgacaaaaccaacatcaagaactgctgggggaagattggtggccatggtggtgaatatggcgaggaggccctacagaggatgttcgctgccttccccaccaccaagacctacttctctcacattgatgtaagccccggctctgcccaggtcaaggctcacggcaagaaggttgctgatgccctggccaaagctgcagaccacgtcgaagacctgcctggtgccctgtccactctgagcgacctgcatgcccac

SEQ ID NO: 50833 - DNA, 142 bp, Zea mays
tcgacgtcgagctcgccacccgcctcctccccagggggttcatctggcccgtcgcggcctaccacgagctcatcaatggagacctcgtcgtcgacgacaaagacatcggctactactagctgctgcacctgtgcttgcaatc

SEQ ID NO: 50834 - DNA, 270 bp, Zea mays
agacttttgagtccctgtgtgtgtatcctctagaccagtatgaatgtggctgctccatcattagctgttcgtttgtggatgacaataatgtctattactgtgtgggaactgcatatgttatacctgaagaaaatgaaccaccaaatcacgaatccttgtatttgcagttgaagatggaagtttgcaattaattgtggagaaagaaaccaaaggagcagtttattcgttgaatgcattcaatgggaaattgttggctgctatcaaccagaa

SEQ ID NO: 50835 - DNA, 267 bp, Zea mays
gcaagggcaagggcgtgtaccagttcgtcgacaagtacggcgcgaacgtcgacggatacagcccaatctacaacgaggatgactggtctcccaccggcgacgtctacgtcggtggaaccactaggcttctgacctgggcctcaccctcgctgggatcctcggcggcggcgccctcctcgtctacaacaccagcgccctctccggctaaggatatccaatgcatgcgcttcttgcgattcgtcgactgaaatcagggtgtctgtctat

SEQ ID NO: 50836 - DNA, 263 bp, Zea mays
cggggtgtagagggcggtcggggcggtcgcctgggcagcaggggcagaatgttggctaccagggcacttagcgtaattggcaagagagccatttctacttcggtgtgccttcgggcacatgggagtgttgtgaagagtgaagactatgctctcccatcttatgttgatcggcgtgactaccccttgcctgatgtggcccacgtcaagctgctgtctgccagccagaaggccctgaaggagaaggagaaggccgactggagcag

SEQ ID NO: 50837 - DNA, 266 bp, Zea mays
ggcgaccgctacgctactgagctcctccttcgccatgcccgccgccgcccgtagggcctcctccccttcctccgcctcattgagcttcgccacgtcgcagctcgccggcctctccctctccgccggcgttgcaactccaaccgccgtcgccctcctccccaagaggcagcagctccagcccactgtcgcgcggcgtgtgtgcccgttcacggacaagaagacgaaccgggcgaacaaggtgtcgttttccaaccacaagacgaaga

SEQ ID NO: 50838 - DNA, 263 bp, Zea mays
  unsure (1)..(263): unsure at all n locations
cgtgaatcaactggaattgttgtggttcctggatctggatttagccaagttcctggaacatggcacgtcagatgcacgatcctgccgcaggaagacaaaatccccgcggtgatcacccgcttcaaggctttccatgagacgttcatggctgagtaccgtaagtgnactgttacagtgtctgagtaccatcgtgtagaccgaaacaaaataaagctccactctctctctctctgtctctgtgcgtgtgtgtgaactgatctctg

SEQ ID NO: 50839 - DNA, 265 bp, Zea mays
ctgaagcagacttcccggctggcgctggaggagatcaagctcaagttcatcgacacatcgtccaaatttgggcacggtcgcttccagactaccgatgagaagcagaggttctttggcaagctcaaggcgtaagttgctgcggtgcagcgaagtcccatttctcaaaatcatcaaactgtgatacttttgtttgtaaccttgctgtaccaagttttgtagccggatggtttaggagcatggtccggtctcctatggatcgttccat

SEQ ID NO: 50840 - DNA, 263 bp, Zea mays
gcttttgtgactttggtggatggtgttccctacagcgatgatctacggaaaagcctcgttacgacggtccgcagtcagattggtgcgtttgctgctcctgacaagatccattgggcacctgggctccctaagacacgaagtgggaagatcatgcgaagaatcttaagaaaaatcgcatccaggcaactagatgagctcggcgacacgagcacgcttgctgaccctggtgttgtggaccagctgattgcactcagtgacagcta

SEQ ID NO: 50841 - DNA, 267 bp, Zea mays
agccagacgaccctcttgtccctgagattgctcacatgtacaagacggatcggcctaagtacgaggcgacacccgcagctggacccagaagtacgccatgggatgaaatgttcgacgttactggctaaatgcagacgattgtggtgttgcccatgaaactgttatcggggacgtatgttcttctgttccttgtgcattctccgatccatctctaggatccgagttctagtccaacattaacctaccattgccttgggtaatgagatg

SEQ ID NO: 50842 - DNA, 259 bp, Zea mays
ggcaaaaacaaaaaaggagcgaaatttgattggttcgatatccgataatgacacgagattccgacaactaaaacattacaactatgacaccaaaacggtaatattgagctgacacgagcaaaacggcactagattggcaaggcagtggccacttagaccttgaagcccctgctgttcctccttcctctcgccttctcaaacttcctacccttcgagcgaacataaggcttggtgtggctgtgaggcactcctggtgcag

SEQ ID NO: 50843 - DNA, 265 bp, Zea mays
cagttctatggtgctagtggcgttgaatattccgagcaggctgagaagcagattgagatgtacaccaagcaagggttctccagcctccccatttgcatggcgaagacccagtactcattctcacatgtcccgtccatgaagggcgccccgaccggctttgttctgccgataagagacgtgagggccagcatcggcgctgggttcatctacccgctcgtgggcaccatgagcacgatgcctggccttcccaccagaccctgcttct

SEQ ID NO: 50844 - DNA, 266 bp, Zea mays
gtaaatataagaagagacttggtaataaaattacacaaggatcatcatgcacatctcaaatcatgccaccaccgtaccagcagccaaattacactatactgtaattaatagaagaagcagttctttaatttggatcccggctggggcgtgcggcgtacgtgaagtgtgattagtcgaaggtggccttgccggtgaaattgacgtcgatggggttgacgttcttgccgatgctacggaaattctggccgaggccctgcctgccgggg

SEQ ID NO: 50845 - DNA, 275 bp, Zea mays
ctggcattcgccatcgccagctacgccagcggcctcatggtcaccgtcgtgcaccggaccaccggaggccccgacggacgccccgactggctggcgcaggacctcaaccagggccacgtcgacctctactacctgctcatagccgccatggcggcggtcaacctagtctacttcgtcgcctgcgcgcgctggtacaggttcaagaacccggccgccgccgacgtcgagcagctggagctggagttagagggaaaggccgcagcgcctcctgtctt

SEQ ID NO: 50846 - DNA, 275 bp, Zea mays
tcaccttctacctccatgatggcagcccgcaagccggagaagccgctgaggacgacgaggacatcgggaggataatctgcgactgcatcggcgacgacttctccaactacaacagggccgccatcgagactgtccaaacgggctatggcctcgctgaagtgatctatgccgtgctgaacaacggcgtccaaggccgggtcgctgtcaaacttcgtcgcctgacgatgtccaacgccggagaagaagacgccaccgccattctcgggaggatcgtt

SEQ ID NO: 50847 - DNA, 275 bp, Zea mays
ctcaagcccttttgaggcctggccgcatagacaggaagattgagtttccaaatcctaacgaggactcacgtttcgatattctgaagatccattcaaggaaaatgaacttgatgcgtggtatcgatctgaaaaagatcgcagaaaagatgaatggggcctcaggagctgagctcaaggccgtatgtacagaggctggaatgtttgctctccgtgagagaagggtgcacgttacccaggaggacttcgagatggcagtggccaaggtgatgccgccc

SEQ ID NO: 50848 - DNA, 274 bp, Zea mays
tgcacaactttctcagccagaacctagtaaagacagatcatttgacgcatcttcctcaacaattgggtcagatatgtctgatattgaagatgcgggaccagtgggcaagacaacatcagtttcatctgtttctacagctgcacatgctagaacaatgcggaaggggtcagcggatcatcttgttgtcaacattggttcagagtcagaacgattgattgctgcacaagattcagatgacaaggggcgtataaaatcgctccatacatctggcttc

SEQ ID NO: 50849 - DNA, 277 bp, Zea mays
cgcctttacaggtttatacttggggcagaggatactgtggagccttaggtcatggtgatgagaacgataaaactagcccagaattgatcggcagcttgaagggccaagttgctgtgcaggtatgtgcaaggcagaggaagacgtttgtcctcacggacgagggctcagttgttgcgtttggatggatgggttttgggagtctagggtttcttgaccgaggaacatcagacaaagtaatgaggccccgcgttcttgagagcctgcaggatcactacgt

SEQ ID NO: 50850 - DNA, 274 bp, Zea mays
cacttggggcacatattcaaaggggaggggtttaagacgcctaccaacgagcgacactgtgttaacagcatctcgcttaagttcaatccgtcccccgcggaagcctgacggcagatgaactcccaatctgtaactcaacaacagaataaatttggactttgtttgttgctttcacattgtgtagagagctatgagatcgagtttgtcattcctcggatcatttcgaatatgatgtaaaaaatccaatcaccagtgctggtctttgttgataaat

SEQ ID NO: 50851 - DNA, 273 bp, Zea mays
gctttatcgcggcttaggtctagtgggctgtacactttaagaaggccaatccgtcatggtcaggttcatgactgggatacaatggagagattttggcagcaatgtattttcaattatctacgttgcaatcccgaagagcattatttccttacttacagatagtcctgtcagtacacctgacagtcgtgaatgtacaggagaaataatgttcgaaaccttcaatgtccctggactatatatttccgttcaatctgttctcagcctttctgctgg

SEQ ID NO: 50852 - DNA, 270 bp, Zea mays
ctactacatccatgatgaaaagtctacgtacaaccacgcgttgacgcgcccgtggggtaccatctagggctggacgaaatcctcgtggctcgctggctcgctcggttcgtggtcagctcggctcggatcggatcggctcgtttaaattttttcacgagctgagctaacatcctagctcacttcgttaatgagccagctcggttcgttaacgagccagctcgcgagctaaacgagctaccatattccagcaaaatgaaactatatgcatat

SEQ ID NO: 50853 - DNA, 269 bp, Zea mays
ggggcgacgatcccagatactggatctggcatcccgtcagagaaaccaatgacgccgagatcgtcgaggcagcgtcgctgcagaacgtgtgctggctggaggtgcacgggaggctggagctgtcgcacctcacgccggggtgcagctacgacgtggccttccaggtgatgctcacggagccggcgtacgggtggtcggtgccggtgaacctgcggctcaggttccccgacggcacggctcaggcgcggaaggagaagctgcaggggagg

SEQ ID NO: 50854 - DNA, 259 bp, Zea mays
gatctccgacttcggcatggccaagatcttcgaggacgactccgacgcgattaacacgggccgcgtcgtcgggacctacgggtacatggcgcccgagttcgcgttggacggcgtcttctcggtgaagtcggacgtgttcagtttcggggtcctcctgctggagatacttaagcgggcaacggaacggcgccttgtacctcgaggaaccccagcagtccctcatccaagacgcatggcagctgtggagtgaagaccgcgc

SEQ ID NO: 50855 - DNA, 261 bp, Zea mays
cagaagttcaatttgctgtcggaactgtagcagctctgttcatgtggatcactggtattattaagaggccaaagatttctggagcacagcttgtagccatcctacctctggctattgttcatactatgggcaatctcttcaccaacatgagccttgggaaagttgcagtgtcatttacgcacaccatcaaggctatggagcctttcttttctgttattctttctgcaattttccttggcgagctacctactatttgggtag

SEQ ID NO: 50856 - DNA, 250 bp, Zea mays
gggggctgctgcagacaatatcatcaccacgactgtggcgaacgcggcatccatctcaggacatgttctgtctggtaggacggcccttcagatcggggacagcctgaacatcgataaagcgacactgattatcgtccacacagatgggagcatcgtggagagtatcgggctgaaaggcgcggtagctcacctcatgcaaggtcctcagtctcatccaacccctctggatctcgaccaagaaataggtggc

SEQ ID NO: 50857 - DNA, 258 bp, Zea mays
gagcaccccgacgccgctgcgccctcctctcggtcctgccgtccgtcgaggtaaaaggacagcatggtgagggtcagcgtgctcaatgatgctctcaagtccatgtacaatgctgaaaagatagggaaacgtcaggtcatgatcaggccgtcatccaaggtgatcatcaagttcctgacggtcatgcagcgccatggttacattggcgaattcgagtacgtggatgaccacagagctgggaagatcgtggtggagctg

SEQ ID NO: 50858 - DNA, 252 bp, Zea mays
gctgccgcctccttcttctgccgctcctggtgctgcttgtgtgctcgtttggtgcggacctggtacctcttttgtgaagcggcagctgaggagactccggcgctcgccatggccgacgaaaagcccaaggaaggagtccagactgagaacaacgatcatattaatttgcaggtggcggggcaggatggttctgtggtgcagtttaagattaagaggcatacaccacttagtaaactaatgaaagcctattgt

SEQ ID NO: 50859 - DNA, 208 bp, Zea mays
gtggtttatcgtttcggcacacaatgtgggctgctgcgtacgaggacctatctaggtcgcgcatcaactgttggtgcacatggtgcatatattaaattctcaccaatcattttagatcgaacgtctttagttgatcattcaattgacaaataacgaccttccaggcttccaccactacagagcaccacattggagggtgcttctagcg

SEQ ID NO: 50860 - DNA, 285 bp, Zea mays
cagtgatccctttagcgatatgtcccttgagatagaagacttgattatcccatggagtgagcttgtgctgaaagagaaaattggtgcaggttcttttggtactgtgcaccgtgcggattggactcgttcggatgtcgcagtaaaaattctaatggagcaggacttccatccagagcgtctcaaagaatttttgagagaggttgcaattatgagaagtttgcgcacatccgaacattgttcttcttatgggtgctgtcactcagccacctaacctttcaattgtga

SEQ ID NO: 50861 - DNA, 267 bp, Zea mays
ctctcgactcgtggggaagtttcgctctcgccggcgtcgacagcctagggttcgaggaacgtccgtccgtccgtccggggaaggagcggtagggaggcggagatgatcgaggtggtgctcaacgaccgcctggggaagaaggtgcgggtcaagtgcaacgaggacgacaccatcggcgacctcaagaagctggtggcggcgcagacggggacgcgccccgagaagatccgcatccagaagtggtacaacatctacaaggaccacatc

SEQ ID NO: 50862 - DNA, 281 bp, Zea mays
cacagatcaaatcgctgcaactagctagggtttcgtcgcctcatctctcgtacgatccaaagagagaatacgagggcgacaacaagaggatgatcacgctcaggagctccgacttagaggagttcgaggtggaggaagcggtggccatggagtcgcagactctccgccacatgatcgaggacgactgcgccgacaacggcatcccgctccccaacgtcaactccaggatcctctctaaggtcatcgagtactgcaacagtcacgtccacgccgccgccaaa

SEQ ID NO: 50863 - DNA, 284 bp, Zea mays
cgcatcggaactaggaccgcgaaccgaaggcgcggcgcggcgcggcacggatcgagcgatggcggtggcccctcctacggcggcggcgctggagcagctaagcagcagcaagatgttcgacggcttcaatctccgcttccgccaccagagcgccacccttggctgcgccatgactttctccatctacctgcccccgtccccggcgtccaaccttcccgtgctgtcactggctctcgggtctcacctgcaccgacgagaatttcatcataaagtccggcgcccac

SEQ ID NO: 50864 - DNA, 282 bp, Zea mays
gcgtcaggcagttcaacttcacctcagtcatgccgttcagcttcatgaaggcgcgtctcgagttcctcgacgcggacaagtgcgagtgcaagaacacgctcatcgagggcggcggcatcggcgtcgccatcgacacggcgacgtcgcacatcaaggtggagcccgaggccggcggcgggagtgtggtgaaggtcgagtccacgtacaagactgctgccgggcgtggaggtgaaggacgagatcgccaaggccaaggagtccgtcaccgccatcttcaacggt

SEQ ID NO: 50865 - DNA, 268 bp, Zea mays
gcttgttctatcaatcgctgtcccagaaggtggcaacaactggttctggctcatgaccctgagccccttggcgggagcgtactactggacgaaagcgtcaaggaaagaagagatcaaggtcaagatgatcctatccgatgacgggaaacgtgtacgagatccttgtgcacggcgatgacgtccaggttgagcagatgaggaacgccctcaagttcagcgagacggggatggtctatgtgaagggcatcttgagactgcatgggagttt

SEQ ID NO: 50866 - DNA, 273 bp, Zea mays
cccgcttcttctggtcactccgccaccgtagaatcgcctaccatttggtgcaagccaaaagcgatcagcaattggacaggaaaagaatggcattgaagcagatttccagcaacaagtgctttgggggattgcagaaagtttttgaacatgacagtgttgaactaaactgcaaaatgaaatttgctgtctacttaccaccaaaggcagaaacaggaaagtgccctgcactgtattggctctcaggtttaacttgcacagagcaaattttatatc

SEQ ID NO: 50867 - DNA, 282 bp, Zea mays
gccaactatgctattggaaaggatgttcaggccatgaaggctgtcgttggagaggaggcactctcgtctgaggatctgctttacttagagttccttgacaagtttgagaggaagtttgtgacacaaggagcatatgacacacggaacatcttccagtcactcgatcttgacatggacattgacttcggatcctccctcgcgaacttactccaccgtattccagcaaagaccttggaccagtactatagcagagatgcttcccactgaatcactgatcgttga

SEQ ID NO: 50868 - DNA, 106 bp, Zea mays
tgctggcacagcatttcagctctacagctcgggtatcttcactggaagctgtggaacagcgctggaccatggtgtctcggccgtcggctacggcacagagaacggc

SEQ ID NO: 50869 - DNA, 273 bp, Zea mays
cgaagtaatagttagctgccataacatggttttgaagaacactgatccaaatgcgccaaatgaagtaactgcgataagagaggcttgcaaaaagcttgggaaaattgagctgtcggattgtgaaatttatgcatcttgtgagccatgcccaatgtgttttggtgctgttcatctatcccggattaagaggctggtgtatggagccaaggcagaagactgcaattgccattggatttgatgatttcattgctgatgctctcagaggaactgggt

SEQ ID NO: 50870 - DNA, 273 bp, Zea mays
acgggggtggtctctcaggccaggcccaggcaatttgccttggtattaaaacatggataaataaagatcagcaatgccaacagggttcctctgaagtcggaaggtttgctgacaagggacacccgtatcgttgaaaggaagaaggctggtctcaagaaggcacgcaagcggccccagttctcaaagcgttgaggacgttcacttgttgcattgccacttccagaggcccctttttttttctgtcaactgctgtgcaaaatctgtagtggacac

SEQ ID NO: 50871 - DNA, 272 bp, Zea mays
cgccattccaagcgagatcggaggcagcgacggttacatgccagatatagcttcctcggctcaagaggacgacgatttcgtcaacggggctcaggtcgccggcaagatgggcagcactgactcgctgcagcgggtggtgagcctggagcacctccagaagaggatgtgcggaggcccggcttcatcggggtcgacctcctaggttcctactccatcggatatgataaaggccctgatgcccacggcaagaatatgataaattaacagtttca

SEQ ID NO: 50872 - DNA, 271 bp, Zea mays
gccgccgcgctccggagatgcaggctaaggtcgccaaggatatgcaagatgggaatgcaaccacatctgaaaacaaagaggagatggattctcggtcggtattcgttggaaatgttgactatgcatgcactccagaagaagtgcagcagcatttcaattcttgtggaactgttaacagagtgacaatcctgactgacaagtttgggcaaccaaaaggttttgcttatgtggaatttgttgaagttgaagctgttcaggaagctattaagtt

SEQ ID NO: 50873 - DNA, 267 bp, Zea mays
ccgggggaaggcgttaagatctggttgttggcaataatctacttcatatctggtgttcctggtgcatatgttttgtggtatcgtcctctatataatgcaatgaggactgatagcgcattgaagtttggattgttcttcttgctttacgtgttccacattcttttctgcgtattttctgctgtggctcatcctgttgtatttgaaggaaaatacattggcaggaattttgccagcaattgatcttattagcgtgaatgctttggttgg

SEQ ID NO: 50874 - DNA, 288 bp, Zea mays
gatcattgttcgcatcattgcttgctaatttgaccaattctcaacaattcattcatttgacaagccaaatgatgagactgcactaaggctgatgaatgaatctgcatctttgatgatggagcaataccctgacattgtctttggctatggttttagcaatgagtatagttttgagttccatgagaagagtgaactatattagagacgggaaagcctaatcctttcatcatgttcttcatatttcacttctctttacatgacgaaatggaaagagttcttcccctacac

SEQ ID NO: 50875 - DNA, 281 bp, Zea mays
ttcacgctctgccggattctcatgaccggccggcaggggctcacgaacctggagaagatcggcatcggcctggtcctctccatcgtcggcatggccgccgatgccatatccgagaagaagcgcctcgccgtcgccgccacaagtggcgtagcagggcatgggtcgctgcccatcagcgtgttcatgctgacgccgcagttcctgctggtgggcgcaggcgaggcgttcatctacacggggcagctggacttcttcatcacgacgtcgcacaagagcatgaa

SEQ ID NO: 50876 - DNA, 118 bp, Zea mays
gcggacgcggcggcaagatggcagtgcaaatatccaagaagaggaagtttgtcgctgatggcatcttcaaagctgaactgaatgagtttcttactcgggagctggctgaagatggcta

SEQ ID NO: 50877 - DNA, 246 bp, Zea mays
tattttgaggcatggcagacaactgaggtcgaaatagcgtggtagcttggatctgcacatctatatgattgagggcctggtgtttaggattataatctgcccagattatataacctatcttattttgaactaagtgttagttcaaaataagttagattatataatatggacaaattatattcccaatcaaacaggctatgattggacttactgatacccatttgagtagaactgatcttgacaggt

SEQ ID NO: 50878 - DNA, 270 bp, Zea mays
gtaaaatcaggccacccttcagatcctgcagacagcaggagctgtgatactggcgcctcatgcaaatgttggttgaagaagcatatgacatgcttgtataaccaagcaaaggaaacaaatgctatctggtctgtggtggttgcagctgcactagttggtattgtgattttgggacgttggcacaaagataaattgcaccttaaccagcttaagtggcgctctggctcagcagtgagaggatgatcaacaagtcgtttgtgctgctctgat

SEQ ID NO: 50879 - DNA, 104 bp, Zea mays
attgaagtagaccttgacgaggaggtcgaaatggccgatctcgtacaccatgctcgtgggcgtgtacgcacgcaatgcacagcttcccttcaatggtggcgcag

SEQ ID NO: 50880 - DNA, 273 bp, Zea mays
ggatccccaacaacgtcaagtcgagcgtgtgcgacatcccgcccaggggcctgaagatggcggggaccttcgtggggaactccacctccatccaggagatgttccgcagggtgagcgagcagttcaccgccatgttcaggcgcaaggccttcctgcactggtacaccggcgaggggatggatgagatggagttcactgaggccgagagcaacatgaacgatctggtcgccgagtaccagcagtgacaggacgccaccgccgacgaggagtacg

SEQ ID NO: 50881 - DNA, 121 bp, Zea mays
ttcgtatcctctggatatgagaggagaactagatgacacagctgctttcaaaaacttcaataagtggggcaatattgtgtttcccctagcttttggaagagttctcagtccctccgaaagt

SEQ ID NO: 50882 - DNA, 275 bp, Zea mays
ttaaaaccttggggtaaggagcagtatcacaataattttggctgctacagtttcgtttctcggtccgggtcaagctgccccgtgccaacctttcggaaaagatggcccggcgactggatgacagaatggttttacgtgaagaatgatctaacagtacgagaagatatcaaaggtataattatgcgtcctatttggcaaagcttcgaccttcggaggccgaagttgaaatgtatgaagctgccgaagaatgtcagagggccttcggcgttatctgt

SEQ ID NO: 50883 - DNA, 271 bp, Zea mays
ctgagatctggcgacgtgagaatttgacacagataccgtcaacatatgtcagcataataaatgattgcattattgctaacaaggcagtagtcattgtgaagggactcgatgagtggcctaatgagtaccagcgacaatacggtactattgacctctactggattgtaagagatggaggattgatgcttcttctgtctcagctcctgctgacaaaggagagttttgagagctgtaagatccaagtattctgcatatctgacgaggatacaga

SEQ ID NO: 50884 - DNA, 286 bp, Zea mays
atatatagacctgtctgtctgtctgtctgtctgtctgtcttgacttgatcaggggaaagccagttccggtgcgcgctgagccgcgagctgcacggcagaggccacctcacgtacgtcctcgacggcgacaacctcaggcacgggctgaacagggacctcagcttcggagcagaggaccgcgccgagaacatccgcagagtagcggaagtagcgaactagttcgccgacgctggcctcgtctgcatcgccaggctcatatcgccctacagaagcgaccggagcgcgt

SEQ ID NO: 50885 - DNA, 233 bp, Zea mays
  unsure (1)..(233): unsure at all n locations
atcgccgtcaagtttgctgggctcattagcaagatcgacaggcgatctggcaaggtagttcggaagggagcccaggttcctgaagaacggtgatgctggtatggtgaagatgattcccaccaagcctatggtggtggggacattctccgcgtatcctcccctgggtaggtttgccgtccgcgacagtangcagacggttgctgttggagtcatcaagagtgtggagaataagg

SEQ ID NO: 50886 - DNA, 280 bp, Zea mays
cagatccctcgacaatggcactccaggcagcctacgagtacctgcagcaggccggtcggcatggccgcgtgttcgtccacgcagacgctgacgctgctgctcatcgccgtacccaccgtactactgctgctagcgtccctcgccaagagcacgtcgtcgtccggtaggggcaagccgccgctccctccctcgccgccgggcaccctcgccatcgtggggcacctacaccacatcgggccccagacccacatctcgctccaggagctggtggccaatacgg

SEQ ID NO: 50887 - DNA, 288 bp, Zea mays
tcgtcgacaccttccctggccagtccatcgacttcttcggcgcgctgcgtgccgggtctaagacgacgaggtccgacggtgtggtgagcgagaccggcgtcgagagacatcgccaggaagctcgtcaactccaaggagggcccgcccacgttcgagcagcccgagataacgatcgagcgggggcttggagtacggacacatgctggtggcggagagcgagaacgtcaagcgtgtgcagcttgctgacaagtacctcaacgaggctgctcttcggtgaagccaacgagg

SEQ ID NO: 50888 - DNA, 204 bp, Zea mays
cgcgacaagtccggcgaccacaaggaaaagaaggacaagaaaaagaagaaggagaagaagaagcacggcgagggccacgaccacgacggcggccacagtagcagcagcagcgacagcgactgagatctggtgtcgcagcacaggtgcaacacaagtatgcttgctggatggaggattcataccagctgatgctgatgtagtgtt

SEQ ID NO: 50889 - DNA, 280 bp, Zea mays
agaagctctacgaagctaaggtctgggagaagccatgggagaacctcaaggggctgcaggaattcaagcctgttgaagagggtgctagcgcctaaggatgtctccttctccatgtgcgagcctgaagctcaaagcaaagttgcagaataaggagccatgctcccttgtgtaatttcatatgatgacaaccctattagggcttgtttggttgtgtctgtatcgaagggaattgaaggtgattaattttccttctattctaatagaggggttttaatctcct

SEQ ID NO: 50890 - DNA, 279 bp, Zea mays
tatggccaagttgtaatgttatccactcatccatatggttgccgagttattcagaagggtctagagcattgtgatgatcctaagacacagcaaataatgatggatgagattctccagtctgtttgcttgctagctcaggaccagtatggcaactatgtggttcagcatgttctggaacatggcaagccccatgagagatcagccattattgagaagctaattggccaagttgtgcaaatgagccagcaaaagtttgcctctaatgtcattgagaagtgc

SEQ ID NO: 50891 - DNA, 280 bp, Zea mays
tgaagactgggacagaggaaccaaagagcagcagcagcaccgccaccgcgtcgaccgcgagaccgaagcgaaggccaagtcgctagcgacctgcgcctacgagcacgacgacgacacgcggtggggagacgaggtggggctcaagtacggctgctcggtggaggacgtcatcacggggctggcgatacactgcagagggtgggagtcggtgtacagcaaccccgcgagacggcgttcgtcggcgtcgcgccgaccacgctcgcgcagaccatactgcagc

SEQ ID NO: 50892 - DNA, 277 bp, Zea mays
ccgaaggtgaagaagctttggtcggcaaatttaagaaactgtatgatgacctcagcactggggttcggcaatctcgaagacgaggcacggtgaactagtgtagattctgtgtaaacaaggactgccaaatgttttataagatacataaattgtagattgagatcatctgtaagaattattcccaccgttgcaccatctcttcgccaccactgttttagtcatcggtgcctgatgggcaccctgtttatttcatgtatcatttattgctgtcattgta

SEQ ID NO: 50893 - DNA, 274 bp, Zea mays
tggacatcgacaccactatctccctggaaacgacatggcacgcgatggaagagctggtttccatggggctggtgcgcagcattggaatcagcaactacgacatcttcctcaccagagactgcctggcctacgccaagataaagccggcggtgaaccagatcgagacgcacccctacttccagcgcgactctcttgtcaagttctgccagaagcacgggatctgcgtgaccgcgcacaccccgctgggtggctccaccgccaacgccgagtggtt

SEQ ID NO: 50894 - DNA, 275 bp, Zea mays
ctttggtgcttgctttcattatcaggaagagaaagccattggacgggtgaatcttccccttgcttcagcgtgctacgttggttcagacctttggacagaagaaccatgtctgcctgaaggatgggtccatcacgatcccgccatatgcgcctcctcagaaaatgcagactcaccttatccccccggacacccctcgatccatctttgtgtacttccgaggtctgttctatgacaccggcaatgaccccgagggcggatactacgcaagaggtgct

SEQ ID NO: 50895 - DNA, 274 bp, Zea mays
tcggaccccacgtccccgcgctggccccgctgcccatcggcttcgccgtgttcctggtgcacctcgcaaccatccccatcaccggcaccggcatcaaccccgccaggagcctcggcgccgccatcatctacgacagtccgcacgggtggcacggtcacgtaagtttgtttgcacgacggtgcatgcacatcatatatacatttgccacgtaagtttattagcttctgccgaagattgcaattgacacgctggcattattggatggtgacagtgg

SEQ ID NO: 50896 - DNA, 107 bp, Zea mays
gcaagatgaagcccaacatcatctttgtactttccctgctcctcatcttggagaagcaagcagctgtgatgggacaaaaaggtggatcaaaagggcgattaccaagt

SEQ ID NO: 50897 - DNA, 289 bp, Zea mays
agacaatggtgtccgagctttgttgagggtctgcaccaagcttcggaggtttgctctgtactctgagaccacgagggctctcagatgcacgtctcggctacattggacagtgcagcggtaacatccagtacatgcttctcggtaatgtttgggagactgatgatggattgatcagcttcgcattgggttgcgtaaacctgcgaaagctttaactcaggagttgctgcttcagcgatcgagcactcgcccttgcaatactacatatgtcttccctgaggcacgtatgggt

SEQ ID NO: 50898 - DNA, 157 bp, Zea mays
aaaggagattgctgacattatgctgaaagaagtgtttgacaggctgaaggctaaggagattaatctccaggtcacggagaagttccgagatagagttgttgacgaaggttataacccgagctatggtgccagacctttgcggcgtgctatcatgagg

SEQ ID NO: 50899 - DNA, 286 bp, Zea mays
agcaaaagaactgccactattgttggcgatgtctatatccatccatctgccaaggtgcatcctacttcaaagattggcccaaatgtctctatatcagcaaatgcacgcgttggagctggtgccaggcttatcaattgcataattctggatgatgttgaaattatggaaaatgctgttgttatatattcaatcgtagggtggaaatcatccattggaaaatggtcacgtgtacagggcgaaggtgatcacaatgccaaacttggcattactattcttggtgaagccg

SEQ ID NO: 50900 - DNA, 288 bp, Zea mays
cgtgtcctcacattgatgatcccttcgactgctacctcaacggtcggcgagatctagcttacgagaacgtccgctggcaacccagtggatggcagtatcccaagattgaacccaaccgatatgttggagaggctgagatggaaaagactggtgttcgttggtgattcgctcaataggaacatgtgggaatcccttgtgtgtattttgagaaattctgtcaaagacaagaggaagggttttcgagcatctggcaggcgcgagtttaagacggaaggctcatactctttc

SEQ ID NO: 50901 - DNA, 283 bp, Zea mays
caagagcaacccggagaccggcgaggtcatcggcgtcttcgagagcgtgcagccgtccgacaccgacctcggggccaaggcgcccaaggatgtcaagatccagggggtctggtacgctcagctcgagtgattcgagtgtctaactgctaggtgtccgaccgccgtcatggatcttgggaaggtgtattcataccatggaaaactttggagagcagaggaggaatcgtgtatgtaatgtacttgttaatgcaaattcgggctgtcgcttttttactccgctaaa

SEQ ID NO: 50902 - DNA, 285 bp, Zea mays
gtttccactggagggtcttcggaagcaacttgaagaactagagaaagccaagaccgagaagaagaaggcagcatcaagcgctaccagtggcggcaggcgcggccctgcaaccaagcgcatccgtgcgagcactgccgcccactgcctcctgccaaggcaggtcgtctcactaacaatgcttgcgtgtcttctctcccagctcccaccacattgacccagtctccctcccacgcgtcatacgccaacacctccccgtcccgcacctcatacgccaatacctcccca

SEQ ID NO: 50903 - DNA, 289 bp, Zea mays
ctaagattgaagaggagaaaaggaaaaagagcgcatgactgctgtgaataatattatcgggaccttcctcggacacaacatcgtcgacaatcacgacctacttctataccttgttttgttttcatcttgagtcagtcggtccattgtttgttcccagtctggtgattaaaagtctgcaaattctgtttgttgaattggcagcgatacaaatttggcttctttaagtaaatccggttggcggtacacagcggtattaattcacctgtaactgaatggaataccgtaatgc

SEQ ID NO: 50904 - DNA, 281 bp, Zea mays
ctcgtggatttatcagattacacgactctacaagaacaaggagcatgctgaagttgaatacacgattgggccaatccctgttgacgatgacgtaggaaaggaggttatcacacagttgacagcaaatatgagtacaaacagtacattttatacagattccaatggaagggatttcctcaaaagggtgagaaactacagggaggattgaaaccttcaagtgactcaaccagttgcaggaaattactacccggttaatctcggagtgtacatagtagatgaga

SEQ ID NO: 50905 - DNA, 283 bp, Zea mays
tgtccagcttccatctgcctttgatccgtttgctgaggcaaatgctgaggactctggtgctggtcctggaacgaaggattatgtgcatgtgcgcatccagcagcgcaacggcagaaagagtctgactacagtccagggtctgaagaaagagttcagctataacaagatcctcaaggatctgaagaaggaattctgctgcaatggtactgtagttcaggacccagagctaggccaggtcattcagctccaaggtgatcagcgcaagaatgttgctactttccta

SEQ ID NO: 50906 - DNA, 284 bp, Zea mays
agcgcgctcgacaggctggaggcccacctcgccggctgccgttacctgtgcggggacaggctcacgctggcggacgtctgcctcttcacgacgctcatccgattcgatctcgtctacaacacgctgttcaggtgcaccatcgcggaagctggacgagtaccctagcctccatgcctacacgcgcgacatctaccagatgcccaaggtcgccgagacgtgcgacatggaggccatcatggcaggatacttcaagacactcttccccctcaaccccggcgggatcc

SEQ ID NO: 50907 - DNA, 284 bp, Zea mays
gaccccgagcacgcgcacaggcacaagatcacggaggaggtcgctgccgcggcggccgtcggcgccggcggctacgtattccacgagcaccacgagaagaagaaggaccacaaggacgccgaggaggccagcggcgagaagaagcaccaccacctcttcggctgaccgtagtaccggccggcgcgcgaccgagctagctagctccggcgcacacaaccacacacctgtttaattctgtactgcatgcgtgtgtaatttgatggttcacaataatgagtccctct

SEQ ID NO: 50908 - DNA, 279 bp, Zea mays
atctgggttgctcacaaggaatcatcatggatatcaactaccatttggattgtcttgctgatatgctttggaagcatcacaacatgcggctacattgtcatccaacttttcaaagtatcatatcaagatccaatctaccacgtgctattgaactcccacagcaagtatggaattccaacttcactgtgataattcatcttctatgatcctggttagcttacagttgtctaaacttcagcttgtcatctggtcattgatttccattcataattcacttgt

SEQ ID NO: 50909 - DNA, 280 bp, Zea mays
gacgaagtgaaggaagtcaccgcggcctacgaggtcgaggcgatgccgaccttccacttcgtcaagaacggcaagacggtcgcgaccatcgtgggtgccaagaaggacgagctcctggccctgatcgagaagcatgccgcgcctgcgcctgcgtctgcgtctgcctaaaggagatcagatcagtcgtcgccgtcaataagggccagcacgtattatgattagatgttgtcgttatcagttctggctttgtcgtttgtgggcgattgtgaactagtagtat

SEQ ID NO: 50910 - DNA, 280 bp, Zea mays
cgaggtcaatccctcttttgttcccatgcttgaaagtgctggtcttcattttgttggttgtgacgaaagtcgaaaccggatggagattgtggagctacaagatcatcccttctatgtaggtgttcagttccacccggagttcaaatcaaggcctcgaagaccttcacctccttttacaggtctaataatggcggccactaaacaactgggagcaaattcgaatagctcgaatggcttcgttggagcttctgactaatatggggatctcccgttgctgcag

SEQ ID NO: 50911 - DNA, 278 bp, Zea mays
cttcatgctctcctcctacgcaccggtgatctcttctgcgaaggtcttccacgagcagctgtctgtggcggagatcaccagcagcgcgttcgagccggcttccatgatggtcaagtgcgacccacggcacggcaagtacatggcttgctgcctgatgtaccgcggcgacgtggtgccctaggacgtgaacgccgcggtggccaccatcaagacgaagcgcaccatccagttcgtggactggtgcccgacggggttcaagtgcggcatcaactaccagg

SEQ ID NO: 50912 - DNA, 273 bp, Zea mays
caaaatcccaaccccttgcggagaaaaagtctacaggcaagaaatcagcaggtccggcatctgctgtcagtgaccctgtttctacagttgatgcttcgtatgagaagcttctttcgtccattcccgaattcgctgattttggaaagctttttaagtcatctgcacctgacgaattgactgaagctgagactgaatactcagttaatgttgtgaagcatatttttgatggacatgttgtgctccaatacaactgtaccaatacaattcctgaac

SEQ ID NO: 50913 - DNA, 275 bp, Zea mays
caccgaggagatcgcagaccgcgtcgagaagatgctcgccgtgctcgacaccaacatcctctgggtgaaccctgactgtggtctcaagacacgcaagtacacggaggtcaagcccgccctgaccaacatggtctcggccaccaagctcatccgcacccagcttgccagcgcgaaatgagtcgtttgatagctccatggtctgatagcgcggaatgagccagtttgttttgaataatttgggtgttaccccctgttccatggtgtaagtgttaggt

SEQ ID NO: 50914 - DNA, 273 bp, Zea mays
gccacgatgacctcggcaagcgctgcgctaagtactacgaggccggtgcccgctttgccaagtggcgtgctgttctcaagattggccccaacgagccgtcacagcttgccattgacctgaatgctcagggtctggctcgctacgccatcatctgccaggagaacggtctggtgccatttgttgagcctttgatccttgttgatggccctcatgacattgatcgctgcgcttacgtcactgagacagtccttgctgcctgctacaaggctctca

SEQ ID NO: 50915 - DNA, 278 bp, Zea mays
tattcatgggagaagacagcaaaaataatgagggagagatatgaccctgaaatggatggtagaatccttctaggcaaggttgactgcactgaggaagttgaattgtgtaggagaaaccacatacaaggatacccatccattcgtgttttccgtaaagggtctgatataaaggagaatcagggtcaccatgatcatgaatcatactatggggaacgtgatactgagagtttagtcgcggcaatggaaacatatgttgcaaacatcccaaaagaggctca

SEQ ID NO: 50916 - DNA, 277 bp, Zea mays
aagagacgcacatctatctgtcaagcgacgccgcggcctcgatcagagtcggaggcgaacacccccatggcggcggctggcggcggcgcaggagggaaggtatccttcaagatcatcctcacctccgaccccaagctccctttcaaagtgttcagcgtgcccgatgcggcgccctttaccgcggtgctcaagtacgccgcggaggagttcaaggtcccgccccagaccagcgccatcatcaccaacgatggaattggcatcaacccccagcaaagtg

SEQ ID NO: 50917 - DNA, 274 bp, Zea mays
atgacattgatcgctgcgcttacgtcactgagaccgtccttgctgcctgctacaaggcgctcaacgagcaccatgtcctcctggagggtaccctcctgaagcccaacatggtgactccaggcgccgactccaagaaggtgacccctgaggtgattgctacgtacaccgtccgtaccctccagaggaccgtccctgctgctgtgcctgctgttgtcttcctctctggtggacagagcgaggaggaggccacccgcaacctcaatgccatgaacaa

SEQ ID NO: 50918 - DNA, 269 bp, Zea mays
ggtccgtcgtgctcttcgccagcctgtgcctagccctctcccactacctcctcgagaaagaagccccagagacagagaccatcgcaagcaccatcatctccttcatcatgagcgtcttctggatctcgaccacggccggagagctcctgagctgcctcgccgcggtcggagccatctctcacttccctcccgccattctcggcatgacggtcctggcgtgggggaactccgtgggcgacctcgtcgcggacgtggcgctggcaagggct

SEQ ID NO: 50919 - DNA, 272 bp, Zea mays
tggccacgcagggggagagagcgcaggcgctgctgagctggagggacccgagggcgacggccatcttcatcatgctgtcgctggtggtggccgtggtgctgtacgtgacgcccttccaggtggtggccgtggtgctggggctgtacctgctgcgccatccgcgcttccggagcaagcagccgtcggtgccattcaacttctacaagaggcttccggccaagtccgacatgctgctctagctgcgctgctctgctctgcctgctggaattgga

SEQ ID NO: 50920 - DNA, 264 bp, Zea mays
accgcgcctagactgtgcctgcatccctcatcgctcggctcgatcgctgatcagttctgcggccggcgacgtgtgctagctcacgacgacgacatgggctcggcggtgaagatcgggacgtggggcggcgacggcgggagcccctgcgacatcacggtggcgccgcggcggctggagaacatcaccatccgctggggcaaggtcctcgactggatcgccttctcctaccgggaccagagggggagctgcacaccgccggcccct

SEQ ID NO: 50921 - DNA, 261 bp, Zea mays
tcagaacttcacagtgcaaaactgtatcaagttttcaggacctttggctacaacctcagttgccactaatgcaaaatttgacattagaagccccaagcgtgtgcacatcaaatttgatgaagggattgttggtacaccacagttgaccgactccattgtgctaccagagaagtttgagttatttggccagcacatcgacctgagtccactgaaaggcatattttcttccatcgaaaatcagcatcctcggttgcaaagacc

SEQ ID NO: 50922 - DNA, 260 bp, Zea mays
ccaagcttatggaaaattcgtctaataggcatttgattgagacctggagaacaaatggggctttgtatacttcaccaagtgggtcaaatgatgactggtattggctatatgcagcgatcaaactaaattgtttgcttgtgactaatgatgaaatgagagatcacatattcgagcttctagggccgtctttttttccaaagtggaagcaacgccatcgggtaaagtacacctttaataaggaaaagcggtgcttgtgatgc

SEQ ID NO: 50923 - DNA, 259 bp, Zea mays
acaatcgataatgtcaaagccaagatccaggacaaggagggcattccaccggaccagcagcgcctgatctttgctggcaagcagctggaggatggccgtaccctcgccgactacaacatccagaaggagagcaccctccacctggtgctccgcttgcgaggtggtatgcagatctttgtgaagaccttgactggcaagaccataaccctggaggttgagagctccgacaccatcgaaacgtgaaggcgaagatccagga

SEQ ID NO: 50924 - DNA, 264 bp, Zea mays
gtggggcacctccccggcgtgctcccgctctcctccgccgccatcgccacctccctcgccaacgtctccgggttcagcctcctgatcggactggcaagtgcactggagacgctatgcggccaggcctacggtgcgaacagtcaccataagctcaggcctagacacctacagagcggtcgtcaccctcctggtggtctgcgtccccctctcgctcctctgggtgttcatggacccgctcctggtcctcatatgccaggaccctct

SEQ ID NO: 50925 - DNA, 263 bp, Zea mays
cgaccttgcgctgccccccgcgctgccctggtggacgcgcctcaagatgggccgcatcgcctactggcgcaactccctcgtcgtccgcgtgctcaccatgctccgggtcgcgcccaagggcgtctccgaggtgcacgagatgctctacgagaccgcgcagcacctcacccgcggcggcgagaccggttctctcacgcccatgcacatggtgctcctccgcaagcccgccgccgccgccccaccgaggaggccaactagtgtaa

SEQ ID NO: 50926 - DNA, 131 bp, Zea mays
ccgcaagatgaagcccgacatcatctgtgtagtttccctgcacctcatcttggagaagcaagcagctgtgatgggacaaaaaggtggatcaaaaggccgattaccaagtgaattttcccaatttccacaca

SEQ ID NO: 50927 - DNA, 259 bp, Zea mays
cagactgttgttgtgtgccctggctgccaaactgtcctctgccgacccacaggaggaaaggcaaggctcactgagggctgctctttccgcaggaagggagactagagcggatgtggtcttcaagttttgctctatgccagatactagcgtcatgaactgcctttagctaagattttccatacgttgttctcgagcagctatgtgttgcatgttggctacttccaaacttatatctggtttgctttggattgtgatgaac

SEQ ID NO: 50928 - DNA, 260 bp, Zea mays
gagaaccaaaatggggtgtatctaccagagtgggtctatgagagagtagtcactgggcaggacctcacacttagtaagaaaatagctgatcaggagaaagaaacagtgaggcagctggccattgttgcactctggtgcattcagtggaaccccaaaaacaggccatcaatgacaaaagtggttaagatgttgacaggaaggttacagaatttaccaataccacctcaagccatatcctagcctgaaagacatcctatgcc

SEQ ID NO: 50929 - DNA, 255 bp, Zea mays
gtgttcagcatgccatgcagatcgaagggtgatggtgattacgaactagctagtgatgtgttgatggacgattttctctgggaacggattaaaaagagcgaagtgaattgcgtgcggagaagaaatgcgttgcccatcttacaggagaggggaatgcattctgtgatcttccggaagataccatgctaccaggagaagtgtagtttagttacagaagcaacagcagcggaagcatttgccaatacattagctgag

SEQ ID NO: 50930 - DNA, 253 bp, Zea mays
cgcgccgccaccgccaccgcgaggctgccgttcaagaggtcgtggagatcgggcgcgtggccctggtgaactacggggaggactatggccgtctcgttgtcatcgtcgatgtggtcgaccagaacagggcacttgtggatgcccctgatatggtcaggtgccaggtgaacttcaagcggctctcacttactgacatcaagattgacatcaaacgtgtccccaagaagacagcctgatcaaggcgatggaggaa

SEQ ID NO: 50931 - DNA, 257 bp, Zea mays
gttcggctacgacgtcggcatctcaggtggtgtgacgtcgatggacgacttcctgggcaagttcttcccggcggtgctgcggaagaaactggaggacaaggagagtaactactgcaagtacgataaccagccgctgcagctgttcacgtcgtcgctgtacctcgcggggctgacggccaccaccttcgcctcgtacacgacgcggcgcctcggccggcgcctcaccatgctgtcgccggcgtcttcttcatcgtggg

SEQ ID NO: 50932 - DNA, 177 bp, Zea mays
cgaactcaagccctttgggaagcagctcagggacaaatacgtggagacacagcagcttctcctccagatcgctgggcacaaggatattcttgaaggcgatccattcctgaagcaggggctggtgctgcgcaacccctacatcaccaccctgaacgtgttccaggcctacacgctgaa

SEQ ID NO: 50933 - DNA, 167 bp, Zea mays
ctttatgtcagagcctttctcacgtgtgcttgatgtagatgccatggggagtttttactggctgttgaagcctgatgcaaaataaactatggaactaaggcattgtttgtttctctccatactccatgattatataatccagcttatagattatataagcacctaat

SEQ ID NO: 50934 - DNA, 254 bp, Zea mays
gaggagttctacgtcatcacgtggacgtcccccaaggagcaggtgttcgagatgcccaccggcggcgcgccatcatgcgggagggccccaacctcttgaagctggcgcgcaaggagcagtgcctggcgctcggcaccaggttgcgctccaagtacaagatcacctaccagttctaccgcgtcttccccaacggcgaggtgcagtacctccaccccaaggacggcgtttaccggagaaggtcaaccccggcaggg

SEQ ID NO: 50935 - DNA, 183 bp, Zea mays
gaaactcatttcaagtggcacgagaatatggctgataagtggtgatatggatgcagtgtgctcattcatttcaacacaatatgtgatggacaatacttgggcttcctatagaagcagcttggcgtccatggcacgtcgacaatgaggttcctggctacgtcattgggtataaagggctggtct

SEQ ID NO: 50936 - DNA, 263 bp, Zea mays
gttgatataagtgcaagggatcctggatatattcacgcagcattgactgaaaccagacgggttctgaatgagcttgttctggaacctctgaaagaagagcagtactatgaggttatggagccgttctccatcatgtcacttttgaagagccccatggggttaatggttggttttatagtcttaatggtctttgtgatgcccaagatgatggcgaacttagatcccgaggcgatgaagcaagctcaagaacaaatgaggaacaa

SEQ ID NO: 50937 - DNA, 259 bp, Zea mays
cgcgagcgagagcagcacacactgcacgcagctagctaggagcagcagcagcggcggcgatggcggcctccatgatctcctcgtcagctctggcggtggcgcctcagggcctgccgcccctcggccgccgcgcctcctccttcgccgtcgtctgctccaagaagaagatcaagaccgacaagccctacgggattgggggtggcctgaccgtcgacgtcgacgccaacgggagatcgggcaccggcaacggcgtgtacca

SEQ ID NO: 50938 - DNA, 175 bp, Zea mays
ctcgaatcgtctcgctcgtggctgccctactcgtgctgcttgccctcgccgccgtttcctccacgcgcagccacaaaaggagtccgtggctgacaacgccgggatgttggcaggcggcatcaaggacgtgccggcgaacgagaacgacctccagctccaggagctcgcgcgcttc

SEQ ID NO: 50939 - DNA, 188 bp, Zea mays
gagagggtgtacgtacgtggattgattgatgctgcgagatgcatgtgtgtcttttgtttcacgttgcattgcataggcaagtcgagatgatgagttggcgttgtacactaagatgaaccatgtttgtgcaatagtggtggtttttgtttcctgctggttaattgttgatatccattaatttgtttttc

SEQ ID NO: 50940 - DNA, 280 bp, Zea mays
ctgatttcaacaccatgtatgagctgtacgacccttcgacagtgatgttcttcttccggaacaagcacatcatgattgatctcgggactggaaacaacaacaagatcaactgggccctgaaggacaagcaagagttcatcgacattgtggagaccgtatacagggccgcccggaaaggccgtggtctgctgattgctccaaaggactactccaccaagtaccgttactaagaaggaaggcttcccccttatgacatctatggggattgttaacacgaaaa

SEQ ID NO: 50941 - DNA, 171 bp, Zea mays
atttccatgcataccaacaggtgtcttacatgattttggcgatggtgtctcctgtcactcattctgtgggcaactgtgttaaacgtgttgtggtcattgtaacatcagtgctgttcttcaggacacctgtttctcctatcaactctctcggtactgcgattgcacttgccg

SEQ ID NO: 50942 - DNA, 260 bp, Zea mays
aggagagccccacatgaattcaagattgcttgcctggaggacattaaggcgctctttccttctgattacaatccattttatgctgggtttggtaacagagatactgatgagctcagttacaagaagatgggaatacctaaaggcaagatttttatcatcaacccaaagggtgaagtggctgtcaacagttctgttgatgtgaagtcttatacgtccctacatacccttgtcaatgacatgtttccaccaacaactctggt

SEQ ID NO: 50943 - DNA, 176 bp, Zea mays
gtgggcataatgggatgagaagcatcgtcaaccatttgaaacagagccgtgattttccacgcctaagaattggcattggacgaccgcccgggaagatggatcctgccaatttcgttctccggccttttaacaagaaagagcagcaagagcttgatttgcgttgcataggggcttgg

SEQ ID NO: 50944 - DNA, 203 bp, Zea mays
atatgctaaagaaataaggggcaagcgagaagatgaggctggtgggtttgacgggtggcatcgcatctgggaagagcactgtctctaacctctttagggactctggtgtccccgttgtggatgccgatgtcattgctcgggatgtagtgaggaaaggcaccagaggttggaagaagattgtaaaatacttttagaatgatatt

SEQ ID NO: 50945 - DNA, 280 bp, Zea mays
aagttcaagatcgcagtcctgcccattctgccgtgacaaactgaagaagacctgtcctagtgacctgtggatatatgttgaggaccaagatgtggtcgacatggagacggtgtcgagcgagaacctcagacggctgttcatgtacataagcaagctgcctctgattgtcccagacgtcatcttcagcgtgtatgattcccacatcaaatgatttccgacgcgaccttctcgacgaccttcagccagtgcccagctccagttaatcttatgcccccatgtc

SEQ ID NO: 50946 - DNA, 277 bp, Zea mays
agggtgttcaagtgttcccagagataatggttcctcttgttggaacaccacaggaactggggcatcaagtgactcttatccgccaagttgctgagaaagtgttcgccaatgtgggcaagactatcgggtacaaagttggaacaatgattgagatccccagggaactcctgttgctgattagatagcggacaagctgaattcttctccttcgggaacgaacgacctgacgcagatgacctttgggtacagcagggatgatgtggggaagttcattccc

SEQ ID NO: 50947 - DNA, 195 bp, Zea mays
caagcgatcacgcgacgagctcgaatcggctcagatcagcgcagcacaaaaggagtccgcggctgacaacgccgggatgttggcaggcggcatcaaggacgtgccggcgaacgagaacgacctccagctccaggagctcgcgcgcttcgccgtcaatgagcacaaccaaaaggccaatgctcttctggggttcga

SEQ ID NO: 50948 - DNA, 183 bp, Zea mays
gacgctgcagtgacgggatgcagcaacaaagttccttacgaccctaacctgattaccggcatccaaggcctgaatcagtactggagcaacatcaggtgccccagcaacaacgggcagagcagctggaagaacgcctggaagaaggccggcgcctgctccggcctcagcgagaaagactacttc

SEQ ID NO: 50949 - DNA, 218 bp, Zea mays
aggaaagattgttccatcagaggtgactataaagctgttgcaggaggcaatgataaaaaatgaaaatgacaaattcctgatcgacggatttccaaggaatgaggagaatcgtgcagcatttgagaatgttaccaaaatttctcctgcatttgtgctattctttgactgttctgagaaagagatggagaaacgtctcttggggcgcaatcaggggagag

SEQ ID NO: 50950 - DNA, 265 bp, Zea mays
aatgaaacaaaaggctcttcaggaatgcgatttctattgttcaaaatatgctgagtgtgcacggggaagaacattttctgtggtatggcaatgccgcaaacaagcaaaagagttgaatgagtgccttcatcaatacacaaatgatgcaatcctggaagaaatgaaaggcgtatatgattgagcccaaagagcacaggagatatatcacataagcaaaaatccattgcacaatgtgcatcacgatcaacctgcttgtatgtatact

SEQ ID NO: 50951 - DNA, 274 bp, Zea mays
caaaaatatggtcttgcgtgaattctatgactatgctgctgctgcagaagtcaacagtgagcaccccctggcaaaagcgatagtggagcatgccaaaaagttgcgtccagaaggaaaccacatgtggccggaagcaagggaatttatttcagtaaccgggcaaggcgtcaaggcggaggttagtggctagagtgtcatcgtggggaacaaaggcctcatgctgtcctctggcattggtatccccttggaagcttcagaaatcctcgtggaagag

SEQ ID NO: 50952 - DNA, 274 bp, Zea mays
caagtcgtcgtaggcagcgagcgtctctcctctcccacgcatcgcgcaaaggaagagagagagatcgccgctccccgtctcggcgtcggtggcgggtgccctccctcctcgagcgagatctgtctggtcacagatctatctgacaaaatggtgaagatctgctgcatcggtgctggctatgtcggtggcccaaccatggccgtcattgccctcaagtgcccagacattgaggtcgtcgtcgtcgacatctccaagccccgcattgaggcctgga

SEQ ID NO: 50953 - DNA, 270 bp, Zea mays
caagttcttgcagcctggagcatatgatctggttggttacatagtgtatgagatcgaccagcacccttaccagaatgtattctacaatggcactatcgaggttgttgaggctggaggcttactcagtgttgagtctgtgttcctcatcacccttggatttgcacttcttggtctgtttggattgtgggcatatggccaggttcagcagctctcgaagaaaacaaagaaggcacccaaggtggagctcggaactggaacaactgatgccaa

SEQ ID NO: 50954 - DNA, 270 bp, Zea mays
gaaaaatatagcaagagccatcttgttttcaatgatgatatccagggcacagcatcagtggtccttgcaggtttgttagcagcactcaagatggttggtgggaccctggcagagcagacgtatttgttccttggtgctggggaggctggaactggtattgcagaacttattgctcttgagatttcgaaacagacgaatctccaattgaagagtgccgcaagaaggtttggcatggtggactcaaagggtttgattgttgactctcgtaaa

SEQ ID NO: 50955 - DNA, 263 bp, Zea mays
gaaagatttgtcagctgacctacaaaaagtcacggacgagtacatgaaaaagatcgattccatccagaagcagaaggaacaggaactgatgaaaatctagatcttcaacaagctgagctgactgtgtatgactggtgagtaataaccgcctctgtaaagcatgaacccccgcatatatgttgggggaatgtatctggtgctcatcagagggatatggtgctcacgtgtacatttaacagcagcatcaattttataaagatgtt

SEQ ID NO: 50956 - DNA, 274 bp, Zea mays
cagctcctgcacacccagaacaccagcctcatcaacaccaagaagaagctggagacagacatttcccagatccagggagagatggaggacatcgtccaggaagcccgcaatgcagaagagaaggccaagatagccatcactgacggccccatgattgccgaagagcttaagaaggagcaggacaccagcgcccacctggagcggatgaagaagaacatggagcagacggtgaaggacctgcagcaccgtctggacgaggctgagcagctggcgc

SEQ ID NO: 50957 - DNA, 135 bp, Zea mays
actatactagctcgctgctgccttttgttacaatgtttgtacggtcgcaataaatgtatggtcgtgtttgctcgagagctactcaggtgattttgtcgtgggagcaccaaaagcagaaaagaactgtttttttct

SEQ ID NO: 50958 - DNA, 263 bp, Zea mays
gtcccagaccatgttaacatgagcgagttggtcaagatcatccggcgccgcctgcaactcaaccccacgcaggccttcttcctgctggtgaaccagcacagcatggtgagtgtacacacacccatcgctgacatctatgaacaggagaaggatgaagacggattcctctacatggtctatgcctcccaagaaaccttcggcttctgagtcaagaggaggggtggggggtggcggagtctggtcaaggtcttccccagggaggt

SEQ ID NO: 50959 - DNA, 264 bp, Zea mays
atccgccgccgcagccatccgcttctcttcggttcagctctcgagtttccaggatgaaggtaatagctgcctacctgcttgctgttctgggtggaaacacttccccgactgctgatgatgttaagagcattctggaatcagttggtgctgaagctgatgaagaaaaactagagttcctgctcacagctctcagacaagggcattaacagaagtgattgcagctggaagggaaaggttatcctctgtgccttcaggtggtggtgc

SEQ ID NO: 50960 - DNA, 128 bp, Zea mays
ctcaaatcacccggagagaactcgctcgcgaaggctgaactcatggctcgcgtcttcgttgggaacctggatccgcgtgtcacggcgcgggagattgaggacgagttccgcacgtttggggttctgaa

SEQ ID NO: 50961 - DNA, 270 bp, Zea mays
accatgatgggttcatgaacttcatgcacagggacgaagaggtgaactacttcccttcgaggtttgatcccgcccgtcacgcggagaaggtccccattcctccccgtgttctaacaggctgtcgtgagaagtgcatcattcagaaggagaacaacttcaagcaggctggcgagagatatcgttccttcgaccctgcaaggcaagaccggttcatccagcgatgggttgacgcactgacagaccctcgcgtgacccatgaacaccgtacca

SEQ ID NO: 50962 - DNA, 292 bp, Zea mays
gtacagaaggcactggtcatggcgatggagaagcagaatggcaccagcatcttggtcctgctgcaggagtgtttcggcgaggggctcataaccatcaaccagatgaccaaaggctttgcccgtgtcaaggaaggccttgatgatctgatcctcgacatcccaaatgcccaggagaagtttggagagtatgtggagctggcaacagagcgcggctggctgctgccgaccttcgcctccgttccctgagcatccaccactggcgataccttccttatgtgtacatttgtgccca

SEQ ID NO: 50963 - DNA, 296 bp, Zea mays
gcacacactgcacgcagctagctaggagcagcagcagcggcggcgatggcggcctccatgatctcctcgtcagctctggcggtggcgcctcagggcctgccgcccctcggccgccgcgcctcctccttcgccgtcgtctgctccaagaagaagatcaagaccgacaagccctacgggattgggggtggcctgaccgtcgacgtcgacgccaacgggagaaagggcaagggcaagggcgtgtaccagttcgtcgacaagtacggcgcgaacgtcgacggatacagcccaatctacaa

SEQ ID NO: 50964 - DNA, 288 bp, Zea mays
tgacggggccaaggaactgattttctgcctcgagcccacccatgagggctgcaggggctacaaaagagctgactactgagaattctggaaaacaaggtctgggctctagcagtgtggcacttccgacagagcacgtgaccgtccagggggaagcagccatgtcatctgtctcaatcgacagtggcttcccgcagtcctgggaagaaggaagggttgagggcactggaccggaaggcccctgctctggctccacctaccccaccccatccagctccatcttggaattag

SEQ ID NO: 50965 - DNA, 290 bp, Zea mays
tggactgcggaagttgtttttgcaaggaaagtggatgctttggatgctatcaagagatacaatggtgttctacttgatgggaagccaatgaatttagagctcattggaaacaatgtcgaaccacctcccttgccaccattaatacacaatcgtcctttgcagaactataacgatatccacagcagtgtgcttcaatcccaaagaaatggtcagcgaagagcacctcaagtcaacggtcggggtggacgcgtagtcaaaccagcggtggccgcggacaggggagaggccga

SEQ ID NO: 50966 - DNA, 189 bp, Zea mays
atgtaaatgtatggtcgtctttgctcgagagctactcaggtgattttgtcgtgggagcaccaaaagcagataagaactgttcttttcttctctctctctagattctgacgagtggtggtctgcactcgtcgtaatgtcgtttgcctaaactgattttgatggaacaggaaatcttgctggtcttgccag

SEQ ID NO: 50967 - DNA, 283 bp, Zea mays
ctggacttcgagaatgagatggccaccgctgcctcttcctcctccctggaaaagagctatgagctgcctgacgggcaggtcatcaccatcggcaatgagcgcttccgttgcccggagacgctcttccagccttcctttatcggtatcgccctgcggggatccatgagaccacctacaacagcatcatgaagtgcgacatcgacatcaggaaggacctgtacgccaacaacgtcatgtcagggaggcactaccatgtaccccggtatcgctgaccgcatgcaaa

SEQ ID NO: 50968 - DNA, 281 bp, Zea mays
gtcatcaccaccactattctcaaattggaagagaacctcttcctggccaacttttgtgaaattgaatttggcagggtcaaacggctggagcacacggtccacacgaaactcagtagggcgcttcttaagatggcgcccttcattgagttgtgcaacaaacccaaggttgccaggaatgaccttggtctcacaggcagtgacatcgtagcggaataagcctcgagtcatcctgtcctcccactcactaaggaggatatcaacaagtaacttggttgaagcag

SEQ ID NO: 50969 - DNA, 285 bp, Zea mays
ggaaaaataaacccaatgggacaggtacctgcaattgttgatggaagattcaaactatttgaaagtcatgcgattttgaggtatcttgcatcggttttccctggagtagctgaccactggtatccttctgacttgttcaccagagccaaaattgagtcaatcttggattggcatcactcaaatttgcggcgtggtgcagcaacccttgtaatgcacactgcattggctcccttccttggtcttacgacaagtcatgaggctgtgaaacaagcagagaagcttgtg

SEQ ID NO: 50970 - DNA, 283 bp, Zea mays
aaacaaataaacccaatgggacaggtacatgcaattgttgatggaagattcaaactatttgaacgtcatgcgattttgaagtatcttgcatcggttttccctggagtagctgaccactggtatccttctgacttgttcaccagagccaaaattgcgtcaatcttggattggcatcactcaaatttgcggcgtggtgcagcaacccttgtgatgcacactgcattggatcccttaccttggtattacgacaagtcatgagctgtgaacaagcagagaacttgtg

SEQ ID NO: 50971 - DNA, 277 bp, Zea mays
gacgctttcactgaaacaatgcataaaagtgaattaagaggggattggtggtgctgcgagctctacattcccaagcaggcatacagattagactttgtattctttaatggtgacactgtctatgaaaacaacaatcacaatgattttttcctggaaatagaaagtggcatagatgaacactcatttgaggatttcttggttgaagaaaaacgaaaggaactcgagaggctagctgcagaagaagctgaaaggaaaatacaagctgaggaggagcgga

SEQ ID NO: 50972 - DNA, 282 bp, Zea mays
gcaaaatgccactggccaactcaatgagaacgactgaagcagcttggcaacacagtttgacatccaagaaacaattcccaggttagtgagttgtcctgccattccaaccagaactgcaaaccaagccaatgtatcccatgctgatttctcattcaagcaatcgtcccagtctagcacaccgagaacgagaagaatggagagcccaagcattgcagccacaacactagacacaccaatagcatccccaaaaacccataaggagactgcgagaatcattgtgcc

SEQ ID NO: 50973 - DNA, 280 bp, Zea mays
ggcatcttcgccgtggacggcgacaagtggaggcagcagcggaagatcgccagctacgacttctccacgagggcgctgcgcgacttcagcggctcggtcttcaagaggaacgccgcgaggttcgccggcatcgtctccggcaaggcggcgtccgggcagcccatggagttccagggcctcgcgctcagggcgaccatggactccatcttcaccatcgccttcggcctggacctagacacgctgggcggctcggcggaaaggagccgcttcgccgcggcgt

SEQ ID NO: 50974 - DNA, 282 bp, Zea mays
gcgcggcaacttcacggaggaggaggacgagctcatcatcaagctccacagcctactcggcaacaaatggtccctgatcgctggaaggctgccgggcaggaccgacaacgagatcaagaactactggaacacgcacatccggcggaagctgctgagcagggggatcgacccggtgacacaccgccccatcaacgagcacacgtgccaacataaccatatcgttcgacgactggggccaggggaaggcgctcaagtgccccgacctgaacctggacctctgca

SEQ ID NO: 50975 - DNA, 279 bp, Zea mays
acaatttcagggaaaagcgagcctggccgaacgtctgctccatccgccaacgggattacctcgcacagtgagagaggaagcgagagtgagagcgaaggaagtgacgacaattctcaaaacgattcacactcaaaggacaatgatgggaaggaagatggcaattctcagaacggcatgtcttattcaggatcgcaaggagtggtaaaccaaaccatggcgatgcttccaatgcaaccgggtgcaatggtcggaggagttcctagctccacggcagctaac

SEQ ID NO: 50976 - DNA, 283 bp, Zea mays
gagagccagttgggaatctatgatgggaatcttgactgtttgcgcttgtggtctccaagagatgcactcccagctccgatatcgagtgcgatatactcgtgcgacggtctcttggtttacgctgggttctgcgatggtgctatcggagtcttcgaagcagaatctcttaggctgcgctgccggaatgcttcttccgcttacattccaccttcaatactagcctgtgctggacgggtctacccgttggtagtcgctgcgcaccccatggagactaaccagatcg

SEQ ID NO: 50977 - DNA, 275 bp, Zea mays
atgggagaactatgtcgagggtgagaatgcttcaaatggatccgcacctgaatcgaaacaaaaggaaatcctcaaggttgtcgccacggaagttcttggtggtgggaagttttatgttcagacagtgggtgaccagagggtggcttcaattcaacagcagcttgcatctttgaaactcaaagatgcaccagtcattggtgcctttaatcctgtgaagggagagatagtcctctcacaatttagccttgacaactcctggaacagagctatgattg

SEQ ID NO: 50978 - DNA, 271 bp, Zea mays
tgcagagaatgctagagaggaccttgggatccatcacattgtggttgatgattggaacaaaggagttgatggtgaacaaaatgttgttttgatatccgttcccagtgttcttagcaaggacctggcaccgcccggaaagcacattcttcatgcatatactccagggacagaacctttcagtttgtgggagggactggacaggaaaagtgcagaatatcgaagactgaaggaagaacgttctgaggtgatgtggaaagctgtggagcttgct

SEQ ID NO: 50979 - DNA, 274 bp, Zea mays
ccaatgctggccactggtgggacaatggttgctgctattgacttgttaatcgagtgcggagttactagcaagcagattaaagttatatctgctattgcatcacctcctgccctgcaaaagctcaataacaagttccctgggctcccgtgtacacaggaatgattgatccagaagtaaatgagaaagggtattgttctaaacttatcagctcattgcaaaactcatggagaacatattagtaattattattgctgcataaataccccatttggtt

SEQ ID NO: 50980 - DNA, 282 bp, Zea mays
aggaactgcactgcactcacgacacgactcatccttgcgtttggcaagcgcagatccatccctggggttcccgggcataaccgccaaggtcgaggagctcaagaaggagctgcccaacgtgcacgtcctcgaccagttctccaacagatcgaatcctgaagcgcatgttagatggactgggcctgagatctggaaggacaccgccggtaaggtggacatattcgtggccggttcaggctcgggaggcacggtgtctggcgtcggcaagtacctcaagacgca

SEQ ID NO: 50981 - DNA, 284 bp, Zea mays
actggatgttctgtccgggttgtcagaaattaaggtgggtgtttcttatacccagactgatggacagaagctgcaatccttccctggggatcttgatacccttgagcaagtacaggtcaactatgaggttctgcctgggtggcaaagtgacatttcttctgttcgaagatacgatgaacttccccaagctgcccgcctctatgtggagaggatagaagaacttgttggtgttcccgtgcactacattggtgttggacctggcagagatgctctcatatacaagt

SEQ ID NO: 50982 - DNA, 181 bp, Zea mays
gcatctcgggcggccacatcaacccggccgtcacgttcggcctcttcctggcgcgcaaggtctccctggtgcgcgctctgctgtacatggccgcgcagagcctcggtgctatctgcggcgtcggctcgtcaagggcttccagagcgggttctacgcgcgctacggggcggcgcaatgaggt

SEQ ID NO: 50983 - DNA, 181 bp, Zea mays
accccctcaggaagaaagtgatgcctgccgtcatcgtccgccagcgcaaccgtggcgtcgcaaggatggtgtctacatgtacttcgaagataatgctggagtgattgtgaatcccaagggtgagatgaaaggttctgcaatcactggacctatcggcaaggagtgtgctgacctttggcct

SEQ ID NO: 50984 - DNA, 183 bp, Zea mays
agcccaaggcggaatagaagccagcggagaagaagccggcggcgaggagaaggcggagaagacgaccgcagtaagaagcccaagtccgagaagcgcctgccggcctcgaagtcctccggtaaggagggcggtctagaagaaggggaagaagaaggccaagaagagcgtggagacctacaaatc

SEQ ID NO: 50985 - DNA, 178 bp, Zea mays
agcatcccgatcatgtcgttgtcatcaagtatgtgccgtacgtgggagacagcaagagggctatggacgagtacacctcagagatcttcatgggcggcaagaacaccatacgtgctgcacaacacctgtgaggactcgctcctcgccgcacctatcatccttgatctggtgctcttgg

SEQ ID NO: 50986 - DNA, 174 bp, Zea mays
  unsure (1)..(174): unsure at all n locations
acaagacggcgctgctggacaccatcagggacgcggtccngacatgtggacgccggagatgaaggcggcgtgggaggaggcctacgaccagctggccgccgtcatcaaggaggagatgaagaacgccgccgccgccgaggagcagacgaagaacgccgccaccgccgagaggag

SEQ ID NO: 50987 - DNA, 173 bp, Zea mays
atgtacatctggcactatgggtcaaggaggaagtaccagtttgacctacagaacaaagtatcaatgagatccatcctatctctcggtccaagccttggcatagttcgggttcctggtgttggattgatttacacagagctggtcactggtgtaccctccatcttctccatttt

SEQ ID NO: 50988 - DNA, 167 bp, Zea mays
tgtctatctggaaggcacactgctgaagctcatcattgtcacccctggccatgcttgcacccagaaattttccaatgaggaaattgccatggctatatacacagcacttcgtcgaacagtgccccctgccgtccctggggtcactttcctgtctggagggcagagtg

SEQ ID NO: 50989 - DNA, 290 bp, Zea mays
agcttcggtgcgggtcttggccatggcggtggcctcggggctggattcaagggaggtggtttcggcggaggtgcgggtggtggctttggaggaggcaagggacgtggttttggcggaggtgcaggtggtggcttcggaggtggcggaggttcgggtggtggcatcggtggtggactctagaggtggcgggagcgcggcgcgcgcacgttgagtgcgtgcatgccatgaaattaaaaagcgatacatgggagtgtgtggtacggtatggacattgctagagttacatacat

SEQ ID NO: 50990 - DNA, 285 bp, Zea mays
accaaaaggagttccaaacaacactcagatagaactgcagacacaacccaccgccactatgtctgacgaggacactgaacaagttgaggaggaggcccaggaggaagaagtccaggaggaagccccggaaccagaggagaaaccaagacccaaacttactgctcctaagatcccggaaggagagaaagtagacttcgatgatatccagaagaagcgtcagaacaaggacctcatggagctccaggccctcattgacagccactttgaagctagaaagaaagaaga

SEQ ID NO: 50991 - DNA, 284 bp, Zea mays
agaggctcaaggttggtgacgcgaactgtgaggaaattgacatgcttcatgaggtcacgaagcaaatcgaagggcatactatctgtgcgcttggggatgctgcggcatggcctgtgcaggggcttatcaggcacttcaggccagagttggagcggaggatccgcgagcgagctgaaagggagctgttggcggcttctgcataatgtgtcagccatgttgcccctgtactagtttcctgatttcttcctaccgaaataatacaaactgatggagctcctttctgt

SEQ ID NO: 50992 - DNA, 279 bp, Zea mays
accaagccaaccagccagtcagaagaggaaccggggagcggcactgcagcggccgagggcggacacgcgaggcatggatagataccaaagggtagagaagcctcggaatgacacgccaatcagccagaatgagatcagaatcactactcaggggaggatgaggaactatatcagctatgggatgtcgctgcttgaggaaaatggacatgatgagattagtatcaaggccatgggacgggccataaataagacagttatggttgttgaattgatcaagag

SEQ ID NO: 50993 - DNA, 298 bp, Zea mays
acttcctcacgctcgacgaggccatcaagaccaccaaccgccgcgtcaacgcgctcgagaacgtcgtcaagcccaggatcgagaacaccatcagctacatcaagggggagctcgacgagctcgagcgcgaggacttcttcaggctcaagaagatccagggctacaagaagagggagatcgagcgccagtaggccgccgccaggctatttgcggaggaacagcttgccgaggatctcgcgcttaagaggggtatctccgtgggggctgcggcaaacctgctggttgctggtggggataa

SEQ ID NO: 50994 - DNA, 279 bp, Zea mays
atgggctcaagccgtaggaatgagctgcagggagctgcaatcctgtgtgcgcaccggaagacggtgccgagagaagatggccagctccaacttccgccttgtgatacatgttgctaggaaatatgaaggatgtggccttgacattcaggacctggttcaggatggatgctgtgggttgatgaaaacctttgagaagttcaacccgagcaagggatgcagattcccgacctacgcgtactggtggatacgccagtcgatcaaaaagtccatcttcaagaa

SEQ ID NO: 50995 - DNA, 275 bp, Zea mays
tacgcacgcaccgggacaccagcaacccccaacagcgccactgtccagtgcgcgcgtcaagcttgcttagctagccgccatggcctccctcgccgccgtctccgtgaagcccgtggccatcaagggtctcgccggcagctctatctccggaaggaagctcgccgtcgccaggccgtcggcccgctccatccgcaggccccgcgcaccgccgtggtggccaagtacggcgacaagagcgtctacttcgacctcgacgacatcggcaacaccaccgg

SEQ ID NO: 50996 - DNA, 280 bp, Zea mays
aaaggatatcactggcaaccccagggctctccggaggctgaggaccgcttgtgagagggcgaagaggactctgtcttccactgcccagaccacgattgagattgactcgctgtatgagggcatcgacttctactccaccatcacccgtgccaggtttgaggagctcaacatggatctgttcaggaagtgcatggagcctgttgagaagtgcctgagggatgccaagatggacaagagcaccgtccatgacgttgtacttgttggtggctccactaggatc

SEQ ID NO: 50997 - DNA, 280 bp, Zea mays
cacacagacacagctgacctgccactgccaggaaagtaggtcgaggatgccaagcagcggcttctcggggtccttcaggtcgcccaagatcgacgtcgtcatcgacatgggaaaccccttcctcaaccgcaccgtcgacggcttcctcaagatcggcgccgtcggcgcctgcaaggtggctgccgaggagaccttcgagtgcctccacaggggggatgtttcgaagcacaaggttgagcatgccctgaggaagatgtgcaaggagggcgcatattggggc

SEQ ID NO: 50998 - DNA, 276 bp, Zea mays
cggagggctcgggacgaccatgggctgcactgggcccaagtctgtcattgaagtccgcaatgggtacacattccttgaccttattgtgattcaaattgagtccctgaacaagaagtatggatgcaatgtccctttacttctgatgaactctttcaacacccatgatgacacacagaagattgttgagaagtattccaactccaacatcgaaattcatactttcatttcagagccagtatcctcgcattgttaccgaggacttcttgccacttccca

SEQ ID NO: 50999 - DNA, 281 bp, Zea mays
gtaatgaaagtgaagcatctaggaggattaagactgaacttcttgtgcaaatgcagggtgttggtcataatgatgataaagttcttgttcttgctgccacgaatacgtcatatgctctggaccaggctgtgcggcgaagatttgacaagcgtatctacattccgctacctgacacgaaagcaaggcagcatatgtttaaggtccatctcggggatacaccacacagtttaactgaaagcgatttcgagagcttggcccgtcgaacagatggattttctggt

SEQ ID NO: 51000 - DNA, 277 bp, Zea mays
accaggcaacttcgagcgccactggggcctcttctactacgacggcacgcccaagtacccgctcagcctaggcggcaacgctcctcgctgatgaggccggccaggggcgtcaagtacctggacaagaagtggtgcgtgctcaagacgtcggccagcctcgccgaccagaaggtgggcgacacttcggctacgcctgctgactcgccgactgcaccagcctcggctacaagacctcctgcgccggcctcgacgccaagggcaacgtctcctacgccta

SEQ ID NO: 51001 - DNA, 271 bp, Zea mays
cggtcggaagcaccaccagccaccagcgatgtctggcgaggaggaggagaacgccgcggagctcaagatcggcgaagagttcctcaaggccaagtgcctgatgaactgcgaggtggcgatcatcctggagcacaagtacgagcagatccagcagcacgcgtcgtcggagtcggacccgtcgtcgcaggtgtcgcaggtgttcgagaagtcgctgcagtacgtgaagcgcttcagccgctacaagaaccccgacgccgtgcgccaggtccgc

SEQ ID NO: 51002 - DNA, 273 bp, Zea mays
agatgacacctttgcttgcggcagtctatgttggagcaatgcagaacattttcagtaagagtgcaaaatacagtctgtttgatccttgcaaagagatggcatacattcctttggatgaggatatgaaggtgaaaggtaaagcggctattgatgttgtgtgcaaccccttggggaaatctggaggtgctctgatccagcagttcatgatcctgtcatttggttctctcgcgaactcgacaccctaccttggcggaatactcctggtgattgtcc

SEQ ID NO: 51003 - DNA, 271 bp, Zea mays
aaaaaaaaactgtttgcaggcacaagatttcaggcagcagggcaccaaggtgcggcggaagatgtggctccaaaacatgaagatcaagctgatcgtgctgggcatcatcatcgcgctcatcctcatcatcatcctgtcggtgtgccatggcttcaagtgcggcagaagtgaggagggggacttacggatggccgtgccctgccctgccctgccctggcacctgcgagaaggaggagactacatgtggagttttttttttgcttctttagtc

SEQ ID NO: 51004 - DNA, 267 bp, Zea mays
ctcccttgcgcgcgcgtgatttcatcttcgtccgatcccatcccaccccaacccacctcaccggagcccctctccccctaactcctccggcagctgctccgatcccgaaccgtgattcgctcgatggcggcaaccgcgggcggcaacaagatccgcaacgccaagctggttcttcttggggacgtgggccacggcaagtccagcctggtcctccggtttgtgaaaggccagttcgtcgagttccaggaatccaccatcggcgcggct

SEQ ID NO: 51005 - DNA, 272 bp, Zea mays
cactgacaaaagcggtgtcccacttgttgctcatgaaaaattctccaagcctagagaggttgagaaacttgtactagttccctcgaagaaagacctggggctggcttttaagggcaaccaaaagatggtcctggaagcattggaggctatgagtgagaaggaagcatttgagatgaatcctgaactagacaccaagggggagacaaattttaaagtctgcacacttggaaaagacgtggtgattacaaagaagatggtatcaatcagcatgg

SEQ ID NO: 51006 - DNA, 269 bp, Zea mays
gctgatcttcgactatatgctaaggaaaccacagttaaatatgacaaagtattgttggacgctccatgctctggtctgggagtgctttccaagagggcggacttacgctggaatagacaatttgaaaatttggaagagttgatgtgtttacaagacgagcttcttgattcggcatcaatgttggtaaagccaggtggtatactaatttacagtacgtgttcgattgaccctgaagaaaatgaagagaggattactgcttttgttcagag

SEQ ID NO: 51007 - DNA, 266 bp, Zea mays
gccctccctctcggcggcggcggcgcaagtccccttcatctccggcgcggcaaatggcaggcggcagggttgcacatgctatcctcaagggccccagcgtggtgaaggagatcttcattggactgaccctgggtctgatcgctggaggtatgtggaagatgcaccactggaacgagcagaggaaaactcagatccttctacgacatgcttgacaagggccagatcagcgtcgtcgtcgaggagtagttcctacgtgtcaacactga

SEQ ID NO: 51008 - DNA, 232 bp, Zea mays
gttattattacatggcggcgtcgttattattattattacatgcatgcaatgcaaggagagcgtgcgtacgtggtgcattaattgctgactatactagtacgactcgacgagtgcatcctccttgtgcgtctggatgacgaggtccgaggtggggtaggcgatgcaggtgagcacaaagccctcggcgacctggtcgtcgtcgaggaagctctagtcgaacctgcatggagtt

SEQ ID NO: 51009 - DNA, 264 bp, Zea mays
gcatatttgatggcaatattaaagtcaacaggtatgcacagcaaactgatgcggggcaagataccaagtgccttatcctatcaccaaaggcacttgttaatgtcaagccgaaccttcagattattgctgatgatgtgaagtgtactcatggtgccgccatcagtggtgagcttgatccaaacgagctcttctacttccaggctagaggcatcaacacggaaactgcaacagatgccctgttatacttctttggagcccatgtga

SEQ ID NO: 51010 - DNA, 271 bp, Zea mays
gctatccgtatcaggaagggaaatcaggtttatagtgctgaggataagagagcattggccatgtttaactacgaggagaagtcaaagcgggagcacaaggttatggctgacttgcagcgcttggtggcagagaaccattggccatgatgtgggaccttcacatgatccatttgctactacagatggttgagtaatgatttcttgttcaactagtcacctgtatcaggtgtgctttacctgattgtgtttccttccctacattgtaattagt

SEQ ID NO: 51011 - DNA, 259 bp, Zea mays
ggacaagctgcttgcccttgatcctctggataaagatcatgtggtgaaaatcaataaagcggaagctgagtattggaagaagtcagaagggtatcgcatgggctggagtgatgaaatactgggcttcgattgtggtgggcagcagtgggtttctgaaaactgcttccccactggaaccctagcaaagccaagtatgaaggatcttgattatatagataagctgctgcagttgattgaaaaggaggagatacccgcacct

SEQ ID NO: 51012 - DNA, 264 bp, Zea mays
cgcatggtcaacaacatctacctcaacttcgacgccctccacggcgacaagtggcacggcggcgtccgtgacggcaccgacgtcgtgctctggaagtggtgcgagggcgacaaccagcgctggaagatccagccctactactgaaccaacggatgatatggccatcgcgcccatcgatcgtgcacatgcatgcatacgtactagcagaataacaggggtcttatctcccgaggcgtcttttgcatgcatgccagcagttgcata

SEQ ID NO: 51013 - DNA, 259 bp, Zea mays
aagtccttcgagcaaacaaggtggagtttgagattgtgtcatcggagcgaaccaacattgtggacacccaagctaggttctgctcgtgccgccgatggcaaatttacggcatcccatgcgcacatgccgccgccgcactgctctcatgcggtgaagacccccgcctctatgctgatgactgcttcagtgtgatgaagtaccgagaaacctactcccagccaatatatcctatcccggacaggagccactggaacgattc

SEQ ID NO: 51014 - DNA, 229 bp, Zea mays
gtgagcttcgttcgttcagttcatccgtgttcttgttcgcgaggtcgagagagaggatgtcgtgctgcggaggcaactgtgggtgcggctccggctgcaagtgcggcaacggctgctcagggtgcaacaagatgtacccggacatggctgagcaggtgaccaccaccaccacccaggctctcgtcatgggtgtcgcaccatccaaggggcacgccgagggcgggttcga

SEQ ID NO: 51015 - DNA, 108 bp, Zea mays
gaagcccaacatcatctttgtactttccctgctcctcatcttggagaagcaagcagctgtgatgggacaaaaaggtggatcaaaaggccgattaccaagtgaattttc

SEQ ID NO: 51016 - DNA, 261 bp, Zea mays
tccagaaagagcttcagaaagttgttgaatggcccatcaagcatgctgctgcattttctagacttggaataccaccagtccggggggtgctgttgcatggcccaccagggtgctccaagactactcttgccaaggctgtcgcgcatgctgcccaagcttctttcttttctttgaggttcatcaggaaacaacattttattttacgaaaataacagttcactttccgttgtgtgaagaacatagaacttttagcccacagta

SEQ ID NO: 51017 - DNA, 254 bp, Zea mays
atagaacttgaccttctattattttgtatgtatggtttgcatgggataactggcatgggatatatttatgaacattgatatcgttttgatgcttactcacatggggtaatctgatcttgtaacgcaagatatttttactttggtaatctaatcgtctaacttaagtatgcagtcagtttagaatttaaggtatgatagtcataacaagcttgacaagacatattaacaaagacagattatattagcagttcatg

SEQ ID NO: 51018 - DNA, 254 bp, Zea mays
gggccattggaggttcccctatggtatggaactgcaaggatacgcctacatcctgacacaccctggcactcccgcagtcttctatgaccacatattttcacacttacaaccagagatcgctaaatttatttccattcgacaccgtcaaaagattcattgccgcagcaagatcaagatactaaaggcagagaggagtttatatgcggctgaaattgatgagaaggtaacaatgaaaatcggatcagaacattttg

SEQ ID NO: 51019 - DNA, 254 bp, Zea mays
cttcattctacaacccggccaacgaggccaccatctcgccggcggcggtgcaggccagcggcggcgacgcataccccaagtacgtgttcggcgactacatggacgtgtacgccaagcacaagttccaggccaaggagcccaggttcgaagccgtcaaggatgcagcgcccaagttctctccagcggcataaataaatggaggggaccaattattaaatgcattataatttatttgttgaataaaacagccggag

SEQ ID NO: 51020 - DNA, 257 bp, Zea mays
gcacatttggcatcatttggctatgtttttccgagatgaactgttatcttggtcctggaggcggcctctgggcattccatcagtccctgtcgctgctggaatgatcaacccatcagatttccaacagaaggtggtaaacaatgtggagcatgtcatcagtcgtatcaagtcaatatccgccacattgtctggctgaggaggaggagaatgcaaccgagccacctcagtcggtacaaagaggcgtcaccgagctggtg

SEQ ID NO: 51021 - DNA, 255 bp, Zea mays
  unsure (1)..(255): unsure at all n locations
gatctttggataactccaaaaccgagagctatgtaaagagcctgcagatggaaggaaggtacctccgtgatgtatggtgacacatcacctcaaataagccatagctctagcgtgtggaagtaaagctggctttgcgtgtatgacatgtctaatgccaacccaatcgtcagctttggaatgaagcgtgccattgatgatatactgaaatgagttgatcagtggggccccnntggcatctaactatttattattata

SEQ ID NO: 51022 - DNA, 251 bp, Zea mays
actgccaagcttggttcggcctctactgacctggagaaggctgaggctcagatcggtgtcgatgttcacagtgcgctcaatgctgcattgaccggttaattggtgtcatcttaaattgtctgtcttttagattgagtttaactttgcaaatcctaaataaattatagtccatctaaaacatggacatatgtttcttgttacctgaatcctgcatggatttatttttgtactcgtgaatattttaactctgg

SEQ ID NO: 51023 - DNA, 251 bp, Zea mays
ggcctctcgccctccgcgcggctccacaggagagcaaaaatggcgaccctctccatggtctccgtccccatcgcaccctcctccttgtccctttccacccggggccgcagctcctccgcatccttccccgctaagaaggcaggaatcggtcacggtggcttgcggatccacttacatccgtattggtggtgttgagattccaaaccacaagagggtggagtactcgctgcagtacatacatggcattggac

SEQ ID NO: 51024 - DNA, 279 bp, Zea mays
catttgtgcaaaaggtttgctttggaaatggtagagagaggcatcactccagatttgaggacatatactgcactaattgatagttttggacggtctggccatattactgaagccctggaaatgtttcacgagatgaaaaagttgcaccaaccttcagtttatgtctaccgtgcattgacaatcaacttgaaaaaggctggacattttgaactagcacaaaagctcaccgaggatatgaattcaagtgcttcagagttaataggcccagaagatttcaag

SEQ ID NO: 51025 - DNA, 278 bp, Zea mays
atcccgagcaggaggcggacaaggtaagcagcaatcgcaggaaccctagcgccgccgcacccgcaggaatgggtatcgacctcgtcgccggtgggaggaataagaagaccaagcgcactgcgcccaagtctgacgatgtctacctcaagctcctcgtcaagctctaccgtttcttggtcaggaggaccaagagcaatttcaacgctgtcattctcaagaggcttttcatgagtaaaaccaaccgaccaccaatctccatgcgccgccttgtcaagttt

SEQ ID NO: 51026 - DNA, 91 bp, Zea mays
ggaagtctcttcctacctgaagaaggctggatagaaccctggcaagatgcactttgttcccatctctggtgtcgaaagtgacaacatgatt

SEQ ID NO: 51027 - DNA, 277 bp, Zea mays
gtggcgaagttgaaagagatgaagaggcaggaggagattgagaagaacaagcttgccttggagaggaagaagaggcaggctgagaagcaggcagcaaaagctatgccccgagcacagaaggaagctgagaagaagctgaagaaagaggagaagaaagccaagaagaaatctggtgcagcagacactgatgagccctcagaatcggatgccaagtctgacgaagccatggaagccccagcggaacaagaagtggccccagcttccaccacggtaaaga

SEQ ID NO: 51028 - DNA, 272 bp, Zea mays
ggggagcagagagatctcagtctccgatccgcccaggccagcatggcggaggatgctacgagcagcgacccgtcacgctacgtcaagctcaccaaggaccaggacgcccccgccgaggacatccgccccggcgagctcaacagccagttcacgtcccgcagcagctcgaaggccggaggtgtagcgagtgtggtcaggtcctgcccgagagctactagccgcccgccgacgagccctggaccaccgggatcttcggatgcaccgatgaccca

SEQ ID NO: 51029 - DNA, 273 bp, Zea mays
ctacaaatggcgttgtccaccaaactgtgtcagatgaccttgaaggtgtttctgctatcctgaaatggctcagttatgttcctccatatgttggtggtcctcttcccattatgaaacccctggacccacccgaaagaccagttacatacctccctgagaatgcttgtgatgctcttgcagccatctgtggcattcaggatggtgaagggaggtggttgggtggtatgtttgatagggaaagctttgtggaaacattggaaggttgggcaaaaa

SEQ ID NO: 51030 - DNA, 273 bp, Zea mays
ctcgaccgagcaaatctcacgtacctcggcaactctatcgccggcgacggaatcattaaccttacaaatatgaatgacacctggagcaccggcggtgtggcctacccgccgccggtgcgcctgtgggatcaccgcaccggcaggagagcaagcttcaccaccaacttctcgttcgccatcagcggcgagcgtacctacaaccgtgcggatggcatggccttcttcatcgggtccttccgctcagccgtgccgctagactcaggcggtggtttt

SEQ ID NO: 51031 - DNA, 275 bp, Zea mays
gagcaacaagaatcattaagaaaccagaggaaattgcaggttggtactggtgcccgatccgagaagataaggacgtacaactacaaggataacagagtgacagaccatcgcttaaagatgaactttgagctgacaagcttacttttaggagacatcgaatcggctattcagtcttgtgctacgatggagcagcaggagctgttggaggaaatggccagttccgtgggcgcagtaaacgtatgattcaggcaaattcggcgttgaggccaggccat

SEQ ID NO: 51032 - DNA, 273 bp, Zea mays
agagaccacacagaccccaatatagttgttatgctggttggcaacaaatctgatctccgccatcttgtagcagttcaaaccgacgaaggaaaagcattcgcagagagggaatcgttgtacttcatggagacctctgcgcttgagtcgaccaacgttgagaatgcatttgcagaagtcctagctcagatctaccgtattgtggacaagagagccgttgaagcaggtgaagatgcagcatctgggcctggcaggggcgagaagataaacataaag

SEQ ID NO: 51033 - DNA, 271 bp, Zea mays
gttcgacaaatccacacgaatcctctgattcagagcagggtgttggcattgatcagacgcctgccatggcggatcagttcgtggattcggcgaacaatgtgatcattgaggaggtgaacaagggcctgaacccaggaatggtggttctgcttgtggttgcaagcttcctgctgctcttctttgtggggaactatgcgatgtatgtgtatgcgcagaagacgctcccgccaaagaagaagaagccggtgtcgaagaagaagctgaagaggga

SEQ ID NO: 51034 - DNA, 268 bp, Zea mays
cggtgaccttcgatgatctggggtcacgctaccacacgcactgcgacccaaggctcaatgcctcacagtctctggagatggcatttaacatcgccgagcgccttaggaaaaggaggatggcctcgtcgcctttgtacacgaaccagctgggttccattccatcaatgggtcaaaaagcacaactaggttcactgtcaaggactagtccttgggttttgtttcagctgctgtgtcaaactttgctggcatgcactggtaaactagatag

SEQ ID NO: 51035 - DNA, 267 bp, Zea mays
gacgcgcactggccacgctgctcaagaactgctacgacgcgctgccggaaaatggcaaggtcatcgtcgtcgagtgcgtgctgccggtcaacacggaggccacccccaaggcgcagggcgtgttccacgtcgacatgatcatgctcgcgcacaacccaggcggcaaggagcggtacgagcgcgagttccgcgagctcgccaagggcgccggcttctccgggttcaaggccacctacatctacgccaacgcctgggccatcgagttca

SEQ ID NO: 51036 - DNA, 270 bp, Zea mays
ctcccaaggaggaggaggttctgcagtatgctagagtgcttttggattgcgctacctctgatcctgatggtcgtaagagagcccttctaatcggaggaggaatcgctaacttcacagatgttgcttctacatttagtggcatcattcgggctttaagagagaaggagtccaaattaaaggctgcaaggatgaacatttatgtccggagaggtggtccgaactaccaaactggactcgccaaaatgcgcaccctaggcgccgaacttggcg

SEQ ID NO: 51037 - DNA, 270 bp, Zea mays
gaatggatccctctatgactttctgcacttgtccgacgactacagcaagccgctgacctgggacacccgcgtaaggattgctgttggtacagcttgtgctctggagtacctacatgacgcgtgttcacctccagtgatccacaagaacatcaaggcatccaacgtcttacacatctgctgacctcaaccctcacctcactgactgcggccttgcatacttctatgaggatccaagtcagagcctgggaccagggtacgatcctccagagt

SEQ ID NO: 51038 - DNA, 269 bp, Zea mays
aagaaatcgagcctcactcgatccatcgcctcgccgcagcacacacgaggccggcggcgccatggacatgaagctggacatgtccacgctcgagaccaacttcgccaacctgaccgcctccgccggcgacgacactacttcaccgccgaggcccccgacgtgccgtccatggtgctccccacatgcgacgacttcgacggcttccacgcggccaccaaggatatggtgaagaataagaaggggacgaccacgcttgccttcatcttcga

SEQ ID NO: 51039 - DNA, 262 bp, Zea mays
gtaagatggcggagtacgacttgactagtcgcatcgcgcactttttggatcggcatctagtctttccgcttcttgaatttctctctgtaaaggagatatataatgaaaaggaattattacaaggtaaattggacttcttagtgataccaacatggtagactttgctatggatgtatacaaaaacctttattctgatgatattcctcatgctttgagagagaaaagaaccacagtggttgcacaactgaaacagcttcaggca

SEQ ID NO: 51040 - DNA, 284 bp, Zea mays
gcatcccgatcatgtcgttgtcatcaagtatgtgccgtacgtgggagacagcaagagggctatggacgagtacacctcagagatctcatgggcggcaagaacaccatcgtgctgcacaacacctgtgaggactcgctcctcgccgcacctatcatccttgatctggtgctcttggctgagctcagcaccaggatccagctgaaagcatgagggagaggacaaattccactccttccacccggtggccaccatcctgagctacctcaccaggcacccctggttcc

SEQ ID NO: 51041 - DNA, 251 bp, Zea mays
atccgtttggatgatgcgcaatattattcacttcaacacattggcaaatcaggctgtggagcgggcagctggtactgatggccaaagataacatacggtgtcataaaacaccgtttgggcgatctattttatcgcctagtatctcaaaagttcgaggatcctgccgaaggtgaagcaatctttggtcggcaaatttaagatactgtatgatgacctcaccactggtttccgcaatctcgaagacgaggcac

SEQ ID NO: 51042 - DNA, 289 bp, Zea mays
gctatccgtatcaggaaggaaaatcaggtttatagtgctgaggataagagagcattggccatgtttaactacgaggagaagtcaagcgggagcacaaggtacatggctgacttgcagcgcttggtgcagagaaccattggccatgatgtgggaccttcacatgatccatttgctactacagatggttgagtaatgatttcttgttcaactagtcacctgtatcaggtgtgctttacctgtttgtgtttccttccctacattgtaattagtgtttttgaacttgcctagt

SEQ ID NO: 51043 - DNA, 283 bp, Zea mays
atcgaaacagaaagaacttcaggagctcaaagccgacattgagaaggcaaaggctgaggccaacgtgctaagatttgctgccagacactcagatcagaactggacaacgagaacgcttcacttgtcgcgttgcagcagggagaggctatggcatccgttgctgtttcttcactagaagctgagctcaaccggacgaaacaagagatagaatctgtcaggtccaaggaggcagaggcccaagaaaagatggtggagcttcccatggttttacagcaagcgactc

SEQ ID NO: 51044 - DNA, 282 bp, Zea mays
gggaaatggggggagcatgagctcgactacctgctgttcatcgtccgggacgtgaaggtgcagccgaacccagatgaagtcgctgatgtgaagtacgtgaaccgcgaggagctcaaggagctcatccggaaggctgacgctggcgaggatggggtgaagatctcccctgggttcaggctggtggtggacaacttcctcatgggctggtgggaccatgtcgagaaaggcaccctcggcgaggccgtggacatggagaccatccataagctgaaggagtgaggg

SEQ ID NO: 51045 - DNA, 286 bp, Zea mays
cagcgactcagcgagcgagagcagcacacactgcacgcagctagctaggagcagcagcagcggcggcgatggcgccctccagatctcctcgtcagctctggcggtggcgcctcatggcctgccgcccctcggccgccgcgcctcctccttagccgtcgtctgctccaagaagaagatcaagaccgacaagccctacgggattgggggtggcctgaccgtcgacgtcgacgccaacgggagaacaggcaagggcaacggcgtgtaccagctcgtcgtcaagtacggc

SEQ ID NO: 51046 - DNA, 279 bp, Zea mays
cagggatgtcactgaaaagttacctgcatagcatacggcctagccaactagatacacacactgcaataagctatgcactgacatagctcatgcaatggactgtttacatgccaatggcataatacatagagacctgaaacctgataatttattgcttacagcaaatcgcaagaagctgaaacttactgattttggacttgcacgtgaagaaactgtgactgaaatgatgactgctgaaactgggacttaccgatggatggccccagagctatacagcac

SEQ ID NO: 51047 - DNA, 273 bp, Zea mays
ggggaagccatccatgcaacaccaaggaagacagggattatagttcttggtggaggccttccaaagcatcatatatgaatgccaatatgttccgcaatggtgcagattatgctgtgtatattaacacggctcaagagtttgatggtagcgattctggagcacaccccgatgaagcagtctcatggggcaagattaagggttcagcaaaacctgtaaaggtgcattgcgatgcaagtatcgctttcgcgcttcttgttgcagcaactttgcacg

SEQ ID NO: 51048 - DNA, 275 bp, Zea mays
gtcgggaccgaggtggccaagtacggcgtcggcgacgtggtaggcgtcggggtgatcgttgagtgctgccgcgagtcagcccctgcaaggccaacgttgagcagtactgcaacaagaagatctggtcatacaacgacgtctacactgatggacggcccacgcagggtggattcgcctccatcatggtcgtcgaccagaagtttgtggtgaagatcccggcggtcctggttccggacaaaccggggcggctgctgtgcgctggcgtgacggtgtac

SEQ ID NO: 51049 - DNA, 282 bp, Zea mays
gatatgggacactgctggacaagagcgctttcgagcagtgacatctgcttactaccgaggcgctgtgggagctcttccgtctatgatattaaaaggcgtcagactttacacagtgttggtcgatggctcaatgaactacacactcattccgatatgaatgttgtcacgattctggtgggtaactaaaccgatctgaagcatgcgcgtgaggtgagcaccgcggaaggacaagccctggccgaggctcagggcctcttcttcatggaaacctcagctttggat

SEQ ID NO: 51050 - DNA, 282 bp, Zea mays
cttcccccggccgcacgaaaccctaacgccgccgcttcacaggtaagccgccgccatggtctccggttccggcgtatggcgaagcgatcgtggtggacgcgcgccaccacatgctgggccgcctgtcgtccattattgccaaggaactgctcaatgggcagaaggtggtcgtcgtccgcttcgaggagatctgtatgtcgggtgggctcgtacgccagaagatgaagtacctccgctttctccgcaagcggatgaacaccaagccatcccatgggcccatcc

SEQ ID NO: 51051 - DNA, 281 bp, Zea mays
gcatatttgatggcaatattaaagtcaacaggtatgcacagcaaactgatgcggggcaagaaaccaagtgccttatctatcaccaaaggcacttgttaatgtcaagccgaaccttcagattattgctgatgatgtgaagtgtactcatggtgccgccatcagtggtgagcttgatccaaacgagctcttctacttccaggcttgaggcatcaacacggaaactgcaacagatgccctgttatacttctttggagcccatgtgataaagcgcataccgttta

SEQ ID NO: 51052 - DNA, 245 bp, Zea mays
cccggcaactaagctcaacggctatgctatgcaacttcattgtctttcggatcggagagggtgtacgtacgtggttgattgatgctgcgagatgcatgtgtgtcttttgtttcacgttgcattgcataggcaagtcgagatgatgagttggcgttgtacactaagatgaaccatgtttgtgcaatagtggtggtttttgtttcctgctggttaattgttgatatccattaatttgtttttcttct

SEQ ID NO: 51053 - DNA, 193 bp, Zea mays
cccggcaactaagctcaacggctatgctatgcaacttcattgtctttcggatcggagagggtgtacgtacgtgattgattgatgctgcgagatgcatgtgtgtcttttgtttcacgttgcattgcataggcaagtcgagatgatgagttggcgttgtacactaagatgaaccatgtttgtgcaatagtggtgg

SEQ ID NO: 51054 - DNA, 262 bp, Zea mays
tctggacaagatcaagcagaagctggaagcagcaaacaaggctgtttcaaagattggagagcacatgcaacaaggtggtggtggcggcacgctggcggcagcggcagtggaggagaccagactctagaagctgagtaccaggacgcaaaggaagccaagatgtaggtcgaacctccatcaagtctctagtttttgcatgtgcccatttaggaagtaaacttacctacctccgatttcttatttttctgtgagggttaagagg

SEQ ID NO: 51055 - DNA, 239 bp, Zea mays
acgctatctacctatatccattttagtaggtactcagtcctgtacataaaccctgcagaaaaaagagggttcagttgtttatggaaccctggcaaatttgctttcgcgcacaatgtaaaactcagctagctctgctaagctccccggcgtactcgacacagctgcgatctattattatttgatgtaatggggactgatattgcaacgaccagcaatgttatgctacattcatttcctgg

SEQ ID NO: 51056 - DNA, 239 bp, Zea mays
actcggtcgcttcaccactccactcgccgcaggcgccgggcgccgccgaggggatcggagcaagatgttcttccacatcgtgctggagcggaacatgcagctgcacccacgacacttcgggccgcaactccgcgacaagctcgtttccaagctcatcaaggacgtcgagggcacctgcagcgggcggcacgggttcgttgtggcgatcacgggtgtggaggacttcggcaggggctcat

SEQ ID NO: 51057 - DNA, 222 bp, Zea mays
gagcaccacgcgtctgtcgtccttctgaagtttcggcggcggcgtaggtagcggcggtctcaaccccaggcgagctcggctccggtcacccgtcgatccacgcaaccatgtcgaggaggaagaccagggagcccaaggaggagaacgttacccttggacccactgtccgtgaaggagagtttgtctttggtgttgctcacatctttgcatccttcaatgaca

SEQ ID NO: 51058 - DNA, 264 bp, Zea mays
ctgggctggtaaatagtgtagaagaagggattaaaagggggatattatcagacatcctcgacaagtctcaacctgattggccaattgctgaggctgagatgttggcaaaacttgggttgtggtgtactgccttaaaatgcagggacagacctaaccttgagtcagtggtgcttccagagctcgaaaatatcctgagcagggttactgtttctctcaaactcgaaaatatccttgcaccaagccacttcttctgtccgatattgc

SEQ ID NO: 51059 - DNA, 257 bp, Zea mays
ctcgtcttgtgttgttcggagcgggcagcagcacacagccccatcccaatcctagtcgatcttcttcccctcctcaaggaagaaaagaagctgaaccatggggaagagaaagtcagctgctaagccacctcctaagaagcggatggacaagcttgacactgtcttttcctgcccattctgcaaccacgggagtagtgttgagtgccgaattgacatgaagaatctgattggcgaacatcttgtagactctgtcagga

SEQ ID NO: 51060 - DNA, 260 bp, Zea mays
gtttccatgcataccaacaggtgtcttacatgattttggcgatggtgtctcctgtcactcattctgtgggcaactgtgttaaacgtgttgtggtcattgtaacatcagtgctgttcttcaggacacctgtttctcctatcaactctctcggtactgcgattgcacttgccggagttttcctgtactcacagctcaagcgacttaagcccaagccgaagacggcttaaatagggattgtattttccatctctttgtgttaa

SEQ ID NO: 51061 - DNA, 246 bp, Zea mays
gtcctcttttcaacgacagaaggaagctccccaagatggccgacccaaggctggaagggcggtaccccatgcgcgggctgtaccaagccctggcggtggcttccatgtgcactcagtcggaggccgcttcgcggcactgatcgcggacgtcgtgaccgctctgtcctacctggcgtcccagtcgtatgaccccagcacagctttcgcttcaaggaggcttggtggcagcaagcctggcgagaatgg

SEQ ID NO: 51062 - DNA, 253 bp, Zea mays
gtggatgcaaatcagattgtcagtaactgccagttactgaagacaatggatatctccaaaatgaccccaggtgacgcgtcctttactgtaccattcaagctggtagcagagcggaatgattacattcatgctcttgtcgcatactttgacgtgtcgttcaccctctgtcataagctgatgggcatctcaacaggcccgagatcgaacgctcatcactggaagcgaactggtctctacctggaggatggtataa

SEQ ID NO: 51063 - DNA, 253 bp, Zea mays
gcaagatggcggagtacgacttgactactcgcatcgcgcactttttggatcggcatctagtctttccgcttcttgaatttctctctgtaaaggagatatataatgaaaaggaattattacaaggtaaattggaccttcttagtgataccaacatggtagactttgctatggatgtatacaaaaacctttattctgatgatattcctcatgctttgagagagaaaagaaccacagtggttgcacaactgaaaca

SEQ ID NO: 51064 - DNA, 246 bp, Zea mays
ccggcaagggcccgctcgagaacctcgccgaccacctcgccgaccccgtcaacaacaacgcatgggcctatgacaccaactttgtgcccggcaagtgagggggtggaggcgccaccgcccaccggccaccgctgcggatatctaggtgttcggatgcacgtgagcgcgcactggttccagtttgtaccatgatgtaaattacttaccgtaccagggttcaatcggcaaggaagaattgttgtgtcc

SEQ ID NO: 51065 - DNA, 246 bp, Zea mays
ctaccagcgactcagcgagcgagagcagcacacactgcacgcagactagctaggagcagcagcagcggcggcgatggcggcctccatgatctcctcgtcagctctggcggtggcgcctcagggcctgccgcccctcggccgccgcgcctcctccttcgccgtcgtctgctccaagaagaagatcaagaccgacaagccctacgggattgggggtggcctgaccgtcgacgtcgacgccaacgggag

SEQ ID NO: 51066 - DNA, 252 bp, Zea mays
cggcgatccattccacacaacttcttctagacttgccccagcccgccgcggagttgccagatctgctccggtcacaggagctccgactccgagccctctccaatggcggttaaggtctacgtcgtgtactattccatgtatggacatgttggcaaactagctgaagagatccagaaaggtgcctcgtctgttgaaggtgttgaagctaaaacatggcaggtccctgaaaccctccctgaggaagtgcttgga

SEQ ID NO: 51067 - DNA, 251 bp, Zea mays
gatgtttccgagagaggatcaaatggcaggaaggtcagccacaagacttaaactcggaaattctatatctgagggaactgtgaacaatgagacccttggctacttcattggaagggtctaccttttcttgacacaacttgggattgacaaggatcgtctccgtttccgtcaacacctgccaaatgaaatggctcattatgctgctgattgttggggatgcagagattgaatgctcctatggttggattgag

SEQ ID NO: 51068 - DNA, 236 bp, Zea mays
ccacgttccaccagccggcgccccttttccttctcactccgctggcgccggcgccgccttatccatggcgtcggagaagaagcaatccaacccgatgagggagatcaaggtgcagaagctgatgctcaacatctccgtcggagaaagtggggatcgactcacccgcgccgccaaggtcctggagccaattcaatggccagtcaccaatgttctctaaggctaggtacactgtccgt

SEQ ID NO: 51069 - DNA, 189 bp, Zea mays
ggcgctcctccgccgcatgaacagatatggtcttcttggtgagggacagaacaagcttgattacgtgcttgccctcactgttgagaacttcctccagcgccgcctccagaccatcgtcttcaagaatggcatggccaagtccatccaccatgctcgtgttctgatcaggcagcgacacatcagggtggg

SEQ ID NO: 51070 - DNA, 227 bp, Zea mays
tcgacgccggcgacgagcgcgccaaggagttctcgggcctgctcaagtccaacgaccccgagggcttcaacctcgtcgacgtcctcgcctggggctcgctcggccacatcgtcgcctactacatcctcgccacctcaagcaacggatacgaccccaacttcttctgagcggccggctgcgggcatgttcttgagcctgcctgtattctactccgtgtgtgttgagca

SEQ ID NO: 51071 - DNA, 251 bp, Zea mays
gagaggaatgatgtttcatgggacgcgctcttatccgggttcgtcgaaaacgggcttgttgatgcagcacttgacacttttagacaaatggagtccgcaaaaataaagtctaaccagcatacctttgtgaaccttctgaggctctgtggtgatagaaggtacagagagtacggaaggcaattcctgggccatgcaataagggtccaaaaccagtggatgtagtgctggaaccgagctcatcgatatgtacg

SEQ ID NO: 51072 - DNA, 247 bp, Zea mays
ccgtcttctccgccaccgaccccaagcgcaacgctcgcgactcccacgttccggtgctggcgccgcttccgatcgggttcgctgtgttcatggtgcacctggcgacgatcccgatcactggcaccggtatcaacccggcgaggagcctcggcgccgccgtcgtgtacaacaacagttaagcctggagcgaccagtggatcttctgggtgggcccgttcatcggagcggcgatcgcagcgctatacca

SEQ ID NO: 51073 - DNA, 231 bp, Zea mays
gtcagaaatcacatcaggttctggtagcatgtcaaccacctcagatgcgtcatcgtcatcttcaacatcttcatcatcgaaaaagggcgcaaagacggaatttgaaaaaagactcggggagttcttcaagtaccaaattgaaacagattcttctgtcgcttatggagatgggtttcgagcagtatcgcgagccattgagcggtacggcttgagaagcaccttgatcatatc

SEQ ID NO: 51074 - DNA, 243 bp, Zea mays
ccaaaacagcactcagaaggttcaagaatggatgatggagtacaattctgtgattcctctgacagtgaggatgactgtccagtatgcctggaagaatatgattatgagaatccgaagattgcactgcaatgcaaacataatttccaccttagctgcatttacgagtggatggaaaggagccaggcttgcccggtctgtgcaaagactatgttgttcaacgaggatgaatgaccccgccgatgg

SEQ ID NO: 51075 - DNA, 238 bp, Zea mays
cggcctctgagcagatcgtctctccttgttcgcacagctcgctcagctccttccagcaaccatgtctgaaaaacccgatatggctgagatcgagaaattcgataagtcgaagttgaagaagacagaaacacaagagaaaaatcctctgccttcaaaagaaacaattgaacaagagaagcaagctggcgaatcgtaatgaggcgagcgccgccaatatgcactgtacattccacgagca

SEQ ID NO: 51076 - DNA, 276 bp, Zea mays
cacaaggtgactcagtataagaagggcaaggatagcctgtctgcccagggaaagcgccgttatgaccgcatccagtcaggatatggtggtcaaaccaagcctgtcttccacaagaaggccaagaccaccaagaagattgttctgaagctgcagtgccagagctgcaagcactactcacagcacgccatcaagagatgcaagcattttgagattggtggagacaagaagggcaagggcacatctcttttctaagcttctcgtccacctgtctggttg

SEQ ID NO: 51077 - DNA, 278 bp, Zea mays
cactgtcagggtggttgttcagaattttcatttttggcacgtttgtgcagccatttgctgcccctcttctccttgggacctttgctaacagggttgccattgagggaacatgcccagcatgcaaaaggcgtttcgtgggctaccgcaaccaagtgattcggtgcatgagctgccaaaacattgtatggcaaacaaataacagcccatctggtggtgctagaagttcacgaagctcggaacctgatgtgcatgatgtagaatatgaagagaagtaagaa

SEQ ID NO: 51078 - DNA, 265 bp, Zea mays
caagctcaaaaccctacagtgtggccaaagatagtatgatggatgggaattacagccttcctgacaacgttgcgattgaaactttgcagaatcttgatgatggtaccacactactccgcttggcccatcttttccaagctggcgaggacccgagatattcagaggtagcagaggttgatctgcaaaaggtctttggaaagagaactatcaaggaactgaccgagactaacctctccgcaaatcaaaagaagtcagagatgaagca

SEQ ID NO: 51079 - DNA, 269 bp, Zea mays
tgttgagaagcattttccggggacactgactgccatcagagactggttcagagactacaagatacctgatggaaagcctgccaacaaatttggtctcggcaacaagcccgcaagcaaggaatacgccctgaaggtcattcaagagaccaacgaatcatgggagaaattggtaaagagaaatattcccgctggagagctctcgttggcctgattttggcccatggaagccaccacattcttttgaactgctttcgtgagcatgtcgtttt

SEQ ID NO: 51080 - DNA, 266 bp, Zea mays
ggcgaggagcctcggcgccgccgtcgtgtacaacaacagcaaagcctggagcgaccagtggatcttctgggtgggcccgttcatcggagcggcgatcgcagcgctataccaccagatcgtcctccgcgccacgccaggtggtacggctccttccggagcaacgcctaggaccatctcgtcggcgggctattcagctcttcctcctccgcagtttaaggtgaacggagaaggagagcgcaagggggtacggagcaacgtctaggctc

SEQ ID NO: 51081 - DNA, 216 bp, Zea mays
ctgagttcctgatcgttgtattccagtttcttccgtgagttttgtgggatcgcgaggaagaaggatgtcgtgctgcggaggcaactgcgggtgcggcgccggctgcaagtgcggcagcggctgcggagggtgcaagatgtacccggacatggctgagcaggtgaccaccacccagactctcatcatgggtgttgcaccatccaagggcgggttcgt

SEQ ID NO: 51082 - DNA, 271 bp, Zea mays
gctttgtgaagcggttcatgatggaccagttggtcttttacgaatcaagagcagcagccgctgacccccacagggacatgagactggacatcgacaacatgagctacgaggacctgttggctttgggagaatctatgggcaatgtcaacacaggcttggccgatgagaaaatttcgaagtgcgtgaaagaagtggtctgctgcagttccgaccagatgcaaaccgatcaagatgaccaggatgacgacggaagctgcgtcatctgcctgga

SEQ ID NO: 51083 - DNA, 187 bp, Zea mays
tgcagcaggtgctgccactaggggcctctatcgggtacatcaatttagcaaggttgagatgttcatattctgtcggccagaggagagtggaaaatggcatgaagaacttattacaattgaagaggatctttatgcatcacttggacttcatttcaaaactctggacatggcaactggggatctgggt

SEQ ID NO: 51084 - DNA, 223 bp, Zea mays
gtggaagcctcataatcttaacaggacaagacggtgagaagccgcaacctataggaattatatggggtggtacagctaaccggggaaggttgaaacttaaaagtggctacggtccggagaactggacaagtggagttgatcttggccgccttcttgatctcttggagctagatcttattccaacaagtgaagggctacaagctgccttggaagaacaaaggat

SEQ ID NO: 51085 - DNA, 243 bp, Zea mays
ggtatctgctctggagatggatgggcaattcgacagactagatgagctcatctacgtggagagccatctaagcaacctttcaaccaagttctacggagaggtgacacaacaaatgctaaagcatgcagacttcccaggtagcaacaacaggacaggtctcttccagaccatcattggactgaagattagagacctctatgaacagattgttgctgagagggctagtgtaccagcggaagcagc

SEQ ID NO: 51086 - DNA, 262 bp, Zea mays
ggacttgaaaaagaaagaaagtgctgaaagagaagaacggggcaagaagtccctgagcatcaacgagttcttgaagccagctgaaggcgaaaggtactataaccctagtggccgtggccgtggtaggggccgtggggggttccgtggtggttacaacggcggttatcggggaccagctgctgctccatcgatcgaagaccaggctcagttccctgccctggcctaagcacagctcgtgttctcgctcaagattgtgtcactt

SEQ ID NO: 51087 - DNA, 265 bp, Zea mays
accgtctaccagttctctcatttcctcaactccaatctctatcctatgctcagctactcctccatcatccttgtattgcgccctgatgtctgaaagaagcagatacaatagagtatactatagcggttgttctctaggctgtagcatgcagtggaaactggaaaatgttggggttgctctgttgtcggtagtttacatgcgcatgtcggtatgtgtagctaaagctggtggatctcagttctcagatcggactcgagacggggaa

SEQ ID NO: 51088 - DNA, 279 bp, Zea mays
atttggatgcattgcttgaggattattgagtgagatgtttttcgtttacacaaatgcagtggctgtatatactcggaaacatagggttcatcatccttgaaaggctttaccgctactcactcggcagataactatacatgtacatttgtgacaatcaataggcacgattcagatatctatgtctgcagctgcacagtcatcaaaacgacccaacaaaaagagaagctgtttttttccttgggaagcttcgtaaattttctgtaatgtatcatttagcac

SEQ ID NO: 51089 - DNA, 279 bp, Zea mays
gtcatcaccaccactattctcaaattggaagagaacctcttcctggccaacttttgtgaaattgaatttggcagggtcaaacggctggagcacacggtccacacgaaactcagtagggcgcttcttaagatggcgcccttcattgagttgtgcaacaaacccaaggttgccaggaatgaccttggtctcacaggcagtgacatcgtagcggaataagcctcgagtcatcctgtcctcccactcactaaggaggatatcaacaagtaacttggttgaagc

SEQ ID NO: 51090 - DNA, 277 bp, Zea mays
gctgctcagaactgctgggtgaagaagggaggtgctttcactggtgaagtcagtgctgagatgctcgtcaaccttggtgttccctgggtcattcttggacactctgaaaggagagctctgctgggagaatcaaatgaatttgttggagacaaggttgcgtatgccctgtctcagggactaaaggtcattgcatgtgttggtgagacccttgagcagagggaggctgggtctaccatggatgttgttgctgcacaaacaaaagcaattgctgagaaga

SEQ ID NO: 51091 - DNA, 278 bp, Zea mays
agcaattgcaccgaatggagtgcatggcacaggaacctgtggtttttggggacatattatgccagatgattgatatgattggaccagagaatgagagctattttactctacgggacttaaaacggtgtaaactctcaggaaatatattcaatattcttttcaatctgaacaagttcatggcatttgaaactcgtgatccattcctcattcgccaggaacgtgaaaatccaacgctgactgagtgggatcggtttgcgcatagagaatatattagattg

SEQ ID NO: 51092 - DNA, 271 bp, Zea mays
aaatacttggttgtaagcaagtggtttgctcttcaagctacttcagagattcctggaaatgttgcaaatgttcagaagctgctgtctcaccctgctttcgacctgaggaatcccacaaggtgtactcactaatcgggggattctgtggctcacctgtgaacttccacgcgaaagatggttctgggtacaagttcttgggtgagatcgttttgcagcttgacaagataaaccctcaggtggcctcccgcatggtttcagcattttctcggtg

SEQ ID NO: 51093 - DNA, 275 bp, Zea mays
accgaaccttcactttgttgaagctgttgctcttaagcctccggaagttaccatcgacatggctatgcagcagcagcatgaagctgagcttgctgcagcagctgcacaacctcttcctgatgacgatgatgatctgattgagtagaaaggatcatgagtcatggacttgagcaggagttgtgccttgcacgatttaagttgttctagggtggactctctcttgagttatcattgtctggatcatatttttctccttggacttgttgcaacttttg

SEQ ID NO: 51094 - DNA, 107 bp, Zea mays
tcgtcaccggcaaggtgcccctcgagaacctgctcgaccacctcgacgaccccgtcgccaacaacgcctgggtctacgcaaccaagttcgcaccagggtcttaagct

SEQ ID NO: 51095 - DNA, 278 bp, Zea mays
accgaaccttcactttgttgaagctgttgctcttaagcatccggaagtaaccatcgacatggctatgcagcagcagcatgaagctgagcttgctgcagcagctgcacaacctcttcctgatgacgatgatgatctgattgagtagaaaggatcatgagtcttggacttgagcaggagttgtgccttgcacgatttaagttgttctagggtggactctatcttgagttatcattgtcaggatcatttttttctccttggacttgttgcaacttttgagt

SEQ ID NO: 51096 - DNA, 272 bp, Zea mays
atcctcttgacttcagaatcttgagaaattcagattttcgtgaaattacattggaggtggagggcaaacctgttttgaagtttgcactttgttatggattcaggaacctgcagaatattgttaggaagattaagatgggaaaatgtgaatatcactttattgaagttatggcgtgcccttcaggttgtcttaatgggggaggtcaattgaagcctgttcaaggccaatctgctaaggaacttatccagcaattagagagtgtgtacacacaa

SEQ ID NO: 51097 - DNA, 271 bp, Zea mays
gccagtcagaagaggaaccggggagcggcactgcagcggccgagggcggacacgcgaggcatggatagataccaaagggtagagaagcctcggaatgacacgccaatcagccagaatgagatcagaatcactactcaggggaggatgaggaactatatcagctatgggatgtcgctgcttgaggaaaatggacatgatgagattagtatcaaggccatgggacgggccataaataagacagttatggttgttgaattgatcaagagaaggg

SEQ ID NO: 51098 - DNA, 149 bp, Zea mays
ggagtctgacatgcgtgcgagtcgacgggttcagaaacctgagatgcgcaaggaagctgacgagcgggaggccctcacgggccgcaccgctggccgaccctgatcttctgtgaagggttcgagttggagcacgcctgtcgggacccgaa

SEQ ID NO: 51099 - DNA, 273 bp, Zea mays
gccaacctggtaatggccattatgtccatgtggaccagactgcagccgcgctatgcttccaacatgtggaacgaagcacttaacaagcgacttgggactgagaaactggacctccatgggatcattagggagaccgagagacggggcctgtccttcaaccagctgctcaccgtacctgagcgagacgattgggagtacagcgacggcaagtccacgacgtgcgtcgccttcatcctgtccatgtacaaggcggccggagtcttcgctccctac

SEQ ID NO: 51100 - DNA, 270 bp, Zea mays
gtttagtgcgatcaccaaggtcgtccgtatcccacggctgggctgttattttcttgtaatactgctttcagatgtaatgactattcatttctttttcctggtacggaataccggtagttggatggaaatcggcaacagcattagccatttcggaatagtgagcgcccaagtggacttcattttgctgctttttgccctcacgaatatatacactagagatattttggtctcgtctcggcaactaaccgcacggaaagttatgtaaatcgt

SEQ ID NO: 51101 - DNA, 269 bp, Zea mays
ccaacactcatctccaggcagcaactttttgccagaattgttggcggccttggtggtagagctgctgaggaggtgatatttggagagcctgaggtgaccactggagctgctggtgacttgcagcaaattactggcttagccaagcagatggtggtaacgttcggtatgtctgaaattggtccatggtctctgatggagggtggggcacagagtggggacgtcatcatgcgaatgatggcaaggaactccatgtcagagaagcttgcgga

SEQ ID NO: 51102 - DNA, 271 bp, Zea mays
aggcgagctggtgaagcttgctacagagaggggccgcaaagctaggcctaacttgaaggtgggcatttgtggagaacacggtggagagccttcctctgtggccttcttcgcgaaggctgggctggattacgtttcttgctcccctttcagggttccgattgctaggctagctgcagctcaggtgcttgtctgaggctgcctcctcattggcaaccggattgcatgctgctggtggatgtggtgatcaacagtattattacagagccatgct

SEQ ID NO: 51103 - DNA, 253 bp, Zea mays
acacccctcccaggagccgcccaggtacgtcgccggcgggatgacgacgcgcttcaagaagaaccgcaagaagcgcggccacgtgtccgccgggcacggccgcatcggcaagcaccggaagcatcccggaggtcgcggtaacgccggtggcatgcaccaccaccgcatcctcttcgacaagtaccatcccggctacttcggtaaggtcggcatgcgctacttccacaagctccggaacatattctactgcccc

SEQ ID NO: 51104 - DNA, 243 bp, Zea mays
cggctcgagggcgctgcagctgctcccaaggaagaagagaaggctgcggagcctgaagaggagtcggacgaggaaatgggcttcagcctcttcgacgactagagctgctgttttcgtcaaactgctgcaagtttgggcttttttttttatcatctactagtgctgcctccaatttttagcagcagattatcggcgtgatcgaccatgatatctccctaattttaagtacctgcgtgtgttcag

SEQ ID NO: 51105 - DNA, 298 bp, Zea mays
gagaagtacccggccctggtcaccggcttcttcttcttcatgtggtacttcctcaacgtcatattcaacatcctcaacaagaagatctacaactacttcccatacccatactttgtgtccttgatccatctagtagtgggtgtcgtatactgcctcatcagctggagtgtcggtctcgccaagcgagcgcctatcaatggcacgctcctcaagcttctctttccagtcgccctgtgccatggtattggtcacatcactagcaatgtgtccttcgctgctgttgcagtctcatttgctc

SEQ ID NO: 51106 - DNA, 299 bp, Zea mays
tcgacctgaaaggttcatcccttggacgcacgactgataagccgcagacagagatcgatgagtacactactctcaaggacctcgatctcaacttcatatttcggctgcagaagcattggtaccaagagttccaaagacaggtcgacagggactgtgagttcctggagcaggaaaacatcatggactatagtcttctggttggtgtacattttagggacactagggataggctattgaccggaggttcgttcgatagcgattgcagcagaggatcatcgcctcaattgtcaagaggagac

SEQ ID NO: 51107 - DNA, 294 bp, Zea mays
agagactatgtctggaagacactaaagagtggaaaggttgttcctgggtttggttctggagttctgcgtaagaccgacccacggtattcatgtcaaagggagtttgccctgaagcatttgcccaaggatccacttttccaattggtgtccaagttgtatgaagttgtacctcctatcctcactgagctgggcaaggtcaagaacccatggccaaatgttgatgctcacagtggagttttgctgagacatttggactatctgaagcacggtattacatgtcttgttcggtgtttc

SEQ ID NO: 51108 - DNA, 299 bp, Zea mays
ccggcgtgctcgtgatctcaacccaaggcgtgcctccgctccggtcacccgtcgctccacgcaaccatgtcgaggaggaagaccagggagcccaaggaggagaacatcacccttggacccactgtccgtgaaggagagtatgtctttggtgtcgctcacatctttgcatccttcaatgacaccttcattcatatcactgatttgtctgggagggaaactctggttcggatcaccggtggcatgaaggtgaaggctgaccgtgacgagtcgtcaccttacgctgctatgcttgctgctca

SEQ ID NO: 51109 - DNA, 283 bp, Zea mays
tgcagctgacctgcagaaggctgtagagaaagagtatgagatggctcttcaggacagagtaatggaagagaccaaagagaagaaaaatgctgtggaagcttatgtctatgacatgcgtaacaagctctacgacaggtacaacgattttgtgacacctgaggagaaggaagggttgattggaaagcttcaggaggttgaagattggctatatgaagatggtgaggatgagacaaagggagtctatatttctaaactggaagatcttaagaagattggtgaccca

SEQ ID NO: 51110 - DNA, 97 bp, Zea mays
tgggctatccaatcgggatgtctggagctcggattgttgttcacttggctcatgccttgaagcaaggagaattcggtctggctagtatttgcaatgg

SEQ ID NO: 51111 - DNA, 158 bp, Zea mays
cagcaaatccccaattcctccgagttcgagcgaccatgtcggggcgtggcaagggcgggaagggtctgggcaaaggcggcgccaagcgtcaccgcaaggttctccgcgacaacatccagggcatcacgaagccggcgatccggaggctggcgaggagg

SEQ ID NO: 51112 - DNA, 275 bp, Zea mays
gcgaaaacaagaggatgatcacgctcaggagctccgacttagaggagttcgaggtggaggaagcggtggccatggagtcgcagactctccgccacatgatcgaggacgactgcgccgacaacggcatcccgctccccaacgtcaactccaggatcctctctaaggtcatcgagtactgcaacagtcacgtccacgccgccgccaaacccgctgactccgctgcctccgagggcggcgaggacctcaagagctgggacgcgaattcgtcaagtgga

SEQ ID NO: 51113 - DNA, 291 bp, Zea mays
catcgactgggaagaggttggaaagcagcttgagctggaaggcgtggactccttcaagaagagctttgacagcctactcgtgagcctgcaggagaagggcaacagcctcaagatggcgagtgtgtaaagctgagaagattgggtacctgcgagtgaacgattttactaaataaaatgctagcttgctggctctcctcttagtttttacgctgtacctttgctctcaattttctgagtcggctttgtatcccagcttgccagaacgtcatgtgtagccatgttcatggctgt

SEQ ID NO: 51114 - DNA, 280 bp, Zea mays
ggcttcaggagctactcttccaggttgcagaaaaaatatcggtcctggtggagacaaacgagagggcatacgagttaagaactggtggtactcttgaggggctaccgcccaggcgcaggggcgaggctcaggattcatccaagtggcaggagagctttgtcgcatcacaggggcggcagggtggtggcaaccggtttggatactccggtagaggtgcagcatctggtcaaagtggtggactccagaggggcaggggcaatcatgtttcccgcgggggata

SEQ ID NO: 51115 - DNA, 287 bp, Zea mays
cgttattatccctcagatgtgcgtccttatattcgtcgggaacaacagcgccacgtacttcaacacggcgtcgctggtgacatgcgtccagaacttcccggcgagcaggggcccgatggtgggcatcctgaaggggttcctgggcctgacaagcgccatcctgacgcaagtctacgcggtgacgcgcgcgacagaccaggcctcgctcatcctgatcatcgccgtcggcccgtcgctggtcgccgttgccgtgatgctcgtcgtccggccggtcggaggccacctgc

SEQ ID NO: 51116 - DNA, 282 bp, Zea mays
taaggtcgctcagttaatgagtttgttgatgcctgcaaaaggcaactggggtcaacatcaggattgagtacctcaacagaaggccaggagattatgcagaagtatacagcgacccaacaaagataaacaaggagctcaactggacagctcattataccgatctcaaagagagcctatcagtcgcatggaagtggcataagtcgcatccgcgtggctacgggccaaactaaatatagcctgctgatcaaattcacttaatcggcaatgctattagttctttag

SEQ ID NO: 51117 - DNA, 276 bp, Zea mays
ccgcgacctcgccgtcgccgcagccttggccatgtcgatcttcgagtataatgggtccggggtagatggcatggtggataagaactgtttcgcgatcgccagctaccggcggctgggcgtgcagcttcagaccgtcgcgacggacttccagcgggtgttcaaggtccacgtcaagctttacatcgttctctctgggctcgccagtgacgccgacaccctctaccagcggttggtgttcaggcacgagctgtatcagctgcgggacgagagggacat

SEQ ID NO: 51118 - DNA, 273 bp, Zea mays
cacgaggacatgcttctcgccgcctcgaaagcgctactgatcaggccacacaggacaacttcgagaagggctccatcttcccacccttcaccagcatcagaaagatctctgcgcacatcgctgcagccgtgcccgcaaaagcctacgagctcggtctggcgacccgtctgcctccccccagcgacctggtgaaatatgcagagaactgcatgtacactcccgtctagcgcaactaccggtagtgctgcggggatcaatttggccgtaataaaa

SEQ ID NO: 51119 - DNA, 91 bp, Zea mays
tatcgccattgcagatcacgactggaatcccatggtggttggcatcaagggcgaggtgatggttaactacaagaggcggaagcttgccgtg

SEQ ID NO: 51120 - DNA, 91 bp, Zea mays
agcaggtctgatgtgtacagttacggggttatcctgtgggaacctgttactcagaagataccctgagaaaatctgaactcaatgcaggtca

SEQ ID NO: 51121 - DNA, 139 bp, Zea mays
ctaagattgaagaggagaaaaggaaaaagagcgcatgactgctacggataatattatcgggaccttcctcggacacaacatcgtcgacaatcacgacctacttctataccttgttttgttttcatcttgagtcagtcgg

SEQ ID NO: 51122 - DNA, 271 bp, Zea mays
catcaatgggtccagtgtgaagattgttccaaatggagaaaacttccaatagatgccgtgttgccctccaaatggacctgctttgacaataaatgggatccagaaaggtcttcttgcgaacctgcacaggaaataagtttggaggagcttgcagaactcattcctataaaacctggaaaaaagcccagattgaagatagaatctgatgctattgatgcttcagatgggctggacacgcttgcaaaccttgcaattcttggcgaaggtgaag

SEQ ID NO: 51123 - DNA, 162 bp, Zea mays
tatctcctcttcgcacgagcgcaacaccatccacccaccagttcgaagcggaggcgagcggcaacctgcggcggagatgtcaggcaggggcaagggcggcaaggggctcgggaagggcggcgcgaagctcaccggaaggtgctgcgcgacaacatccagggg

SEQ ID NO: 51124 - DNA, 191 bp, Zea mays
aacgcctgtgcccatccgttcttcgatgagctgcgggaccccaaggcttgcctgcggaacggacggccaatgccaccgttgttcgacttcacagcagccgaactcgaagggctccccgccgagcttgtccaccggatcgttcctgaacacatgaggaaggaagtgaattaggtggacggacgtactgggac

SEQ ID NO: 51125 - DNA, 165 bp, Zea mays
atcgccattcccagagaacgactggaacgccatggtggttggcatcaagggcgaggtgatggttaactacaagaggcggaagcttgccgtggacaactaagattgtggccgcagtctctagatgcttgcttcttgtggattcaattgttttcacatgtttgtcag

SEQ ID NO: 51126 - DNA, 221 bp, Zea mays
atcgaaacagaaagaacttcaggagctcaaagccgacattgagaaggcaaaggctgaggccaacgtgctaagatttgctgccatgacactcagatcagatctggacaacgagaacgcttcacttgtcgcgttgcagcagggagaggctatggcatccgttgctgtttcttcactagaagctgagctcaaccggacgaaacaagagatagaatctgtcaggt

SEQ ID NO: 51127 - DNA, 250 bp, Zea mays
attacgagactgagaatgataagaatgtcctttctgagactggtgacattccgagttggtattgggaaaaattcacatatcagaaaagcaatcattgacaaaaatgctcgcattggagaaaatgtgagtataatcaattttgataatgtccaagaagcagtaagggagacagaaggatattttatcaaaagtggaattgtcacggtgattaaagatgctttaattcctagtggaacaatcatatagagtc

SEQ ID NO: 51128 - DNA, 269 bp, Zea mays
acgacagcagaaagcaaaaacttctgtgagtaaacgtaatctgaatcctgtttggaatgaagagcttaagctgtcagttccccagcactacgggcctctgaaacttcaagtgttcgaccacgacatgctatcgaaggatgacgagatgggtgacgcagagattgacctgcagccgatgatcagtgcagctacagcgtttggcgaccctgatctgctcgcggacatgcagatcggcaagtggctcaggtccccagataatgcgctggcaa

SEQ ID NO: 51129 - DNA, 95 bp, Zea mays
ccttgttctggctgatagtcatgtaccctaagacttgtaacgtcatgttcgtgcttgcgcatcaccgcgagtcgataaaactggttaatgttgga

SEQ ID NO: 51130 - DNA, 232 bp, Zea mays
cacacagacacagctgacctgccactgccaggaaagtaggtcgaggatgggccgcagcggcttctcggggtccttcaggtcgcccaagatcgacgtcgtcatcgacatgggaaaccccttcctcaaccgcaccgtcgacggcttcctcaagatcggcgccgtcggcgctgcaaggtggctgccgaggagaccttcgagtgcctccacaggggggatgtttcgaagcacaagg

SEQ ID NO: 51131 - DNA, 190 bp, Zea mays
acgccggcaaccgccgccatcgatcgatcgcccggaaactgacctctaccggggtctggagccggcgaggaggataagaagcccgcggagggcggcgcccacatcaaccttaaggtcaagggacccgatggcaatgaggtgttctttcgcataaagaggtccacccagctgaagatgctgatgagcgcct

SEQ ID NO: 51132 - DNA, 97 bp, Zea mays
ggccggtatctagctatatccattttagtaggtagtcagtcctgtacataaagcctgcagagagaagagggttcagttgtgtatgcaaccctggcaa

SEQ ID NO: 51133 - DNA, 303 bp, Zea mays
tagatttcacctgaagcgaggaagaccccgtttctttggtcacatggaatggctgacaaagtagtgtgtttgaagctggccaggctggtccaccgtttttgcaaagcgctggtgttaactgtgagttcaaggcatatccagatctgggtcattcgctttcccaagaagagctactttatcttgagtcgtggatcaagagtcgtctaaatgcctctcaagagaaggacggttaactgattccatcatgcttaagtggcatttatttagtatttttattatacgatacacagatcaactacttgt

SEQ ID NO: 51134 - DNA, 295 bp, Zea mays
tgccaacgcactgcattctatgagggaattggtctggacaccaaagaattcgacatgcatgttgggggcgagaccaaccgcacaacggcgaggatcttccctgctgtcctagacgtcgagaacccagagttcaagaggaagcttgacaggatggttgagatcaaccagaagatcattgccgtcggagagtccgacgaaagaacatagtgaagaacctgaagaggattcctcttgtcgcctctctggtgtccgagatcatcgccgcctacctcatgccccccatcgagtctggctc

SEQ ID NO: 51135 - DNA, 99 bp, Zea mays
gctcataaaagctacaatcccatctcccttttttttccagtctagtaaaagttccaaactgctgggggttcaaaactctgttcttcaatacatcatcaa

SEQ ID NO: 51136 - DNA, 288 bp, Zea mays
cacttctccaggtaaggaaagggttcgtactcatggcgccgccgcagccaaagtcgggcgggtcgttggcatcaacaagggtcatgtcgtcaccaagcgcgagctgcctccccgcccgtgccaccgcaaggggaaatcaacgaagagggtgtctatggtcaggggcctgatcagagaggttgctgggtttgctccttatgagaagcgtatcactgagcttctgaaggttggcaaggacaagcgtgccctgaagcttgctaagagaaagcttggaactcacaagagggc

SEQ ID NO: 51137 - DNA, 291 bp, Zea mays
taccaaggaccctctcgatctttcttcgggtagcaaccttggaaggacaggccaagcagcgcggcagcctccaaggctaacgcaaagaaagacaattttcaggtcaagtccggcatatgggcagactcgctgagccggggattgattgatctgaacataactgcaccgaagaaggtgaacctagctgatattggcatcgtcggtggccttagcgatgggtccgatgagaaggccctgccctcttggaccatgggcgccatatccggcctaggaatgtctggtattccaccg

SEQ ID NO: 51138 - DNA, 288 bp, Zea mays
ggctcgagtgcgctgattgggaccgggtggtcgttcctgaagccattcctgcaggagaggagaagaaagtgctcatggtggtgatccctctgcaggttgcagctaacatcgctgctgctgtggtcggcgagactggtcctttcttgcagggatgggtgacatggaaccagatcttcttgtttgttgatgtcgcttgctgctgtgctgtgctcttcccagtggtgtggtcgatgcgcgctctgcgggagtcatccaagacagacggcaaggcagccagaacccttgcca

SEQ ID NO: 51139 - DNA, 285 bp, Zea mays
caggacatcatcaacctcaagccgctcatcgacaagaaggcgtggccgtacgtccgggcgacctccgcctccgggcctcctacctgcgctacgacctcaagaccgtcatcgcttccaagcccaaggaggagaagaagagcctcaaggagctcaccggcaagctcttcagcaccatcgacgatcttgaccatgccgcgaagatcaagagcaccccagaggccgagaaatacttcgcagcaaccaaagatgctcttggcgatgttctcgccaagctaggctagacgc

SEQ ID NO: 51140 - DNA, 286 bp, Zea mays
aggacctcttagatttcagtatctacttggacatcagtgatgaagttaagtttcatggaaaatccagcgggacatggcagagcgtgggcacagccttgaaagcatcaaggccagtatcgaggccaggaaaccagattttgatgcctttattgatccgcagaagcagtatgctgatgctgtgattgaagttctgccgacccagttgattcccgacgacaacgaaggaaaggtgctgcgtgttaagctcatcatgaaagaaggggtgaagaacttcaacccggtttat

SEQ ID NO: 51141 - DNA, 284 bp, Zea mays
accggccgcaagatcatcatcgacacgtacggcggctggggagcccacggcggtggcgccttctccggcaaggaccccaccaaggtggaccgcagcggcgcctacgtggccaggcaggccgccaagagcatcgtggccagcggcctcgcccgccgctgcctcgtgcaggtgtcgtacgccatcggcgtgccggagcacctgtccgtgttcgtcaactcgtacggcaccggcacgatccccgacaaggagatcctcaagatcgtgaaggagaacttcgacttcag

SEQ ID NO: 51142 - DNA, 286 bp, Zea mays
tgtggacgcacaccagcacctgccctcctcgccgtcgctgcctccctccgcggggggatctaccctccgccgccaccatgtcgctgatcgccggggaggacttccagcatatcctgcgtttgctgaacaccaacgtggatgggaagcagaagatcatgttcgccatgacctcaatcaagggtgtcgggcgccgcttctccaacatcgtctgcataaaggccgacatcgacatgaacaagagggccggcgagctgacgcctgatgagctggagcgcctgatgacggt

SEQ ID NO: 51143 - DNA, 292 bp, Zea mays
tgatgcactcccttggcatgttttggcttacatcaggttgacagaggaagacacaacatcatcttctcgtattttcataaaaatattgttccaagaattatcggagcacctgggcatacgcctactcaatgagaggctgaatgatcctaacatgcaaggttcctttgagtctatcttcccaaaggatcatccgaagaatacaaggttctcgatcaccttcttaaggccatggtctggtgggatctcggggagaccctgagggagtacttgaagaacatgccacgtctaataa

SEQ ID NO: 51144 - DNA, 148 bp, Zea mays
cggatgcatccaccacgtgctcacctcgcagccgcaggccgccctacgtgacctggctcagaagcatggcccggtgatgtacctgaagctggggcaggtggacaccgtcgtcatctcctcgccgacggcgcgcaggaggcgctccggg

SEQ ID NO: 51145 - DNA, 151 bp, Zea mays
gccgctacgccgtcttcgacttcgacttcgtcaccgtcgacaactgccagaagagcaagatcttcttcatcgcctggtcaccggcggcgtcgaggatcagggccaagatcctgtacgcgacatcgaagcaacggcccgagcggctgctgga

SEQ ID NO: 51146 - DNA, 291 bp, Zea mays
tgctacgacagggagcgctcctctcacggcggtgcagctgctgtgggtcaacatgatcatggacacgctgggagctctggctctagccacggagcctcccaacgacgacatgatgaagatgcacgcctgtcgggcgcggagagagcttcatcaccaaggtcatgtggcggaacatcgtcgggcagagcttgtaccagctggccgtgcttggagctctcatgtttggccgggaacgtctcctcaacattccatggcgcggactccaaacccgttgtcaatacgctcatattc

SEQ ID NO: 51147 - DNA, 145 bp, Zea mays
atcactacaaggaggcccaaagagtttctgggttcttgatcatggccattgaagcaccgataaacttcgccaactccaactacctgaatgaaaggattaaaagatggatagaggaagaatcttttgaacaggataaacatactga

SEQ ID NO: 51148 - DNA, 291 bp, Zea mays
accaggcggtggcggacgcagtcgccggcctctcgcccctgctggccttctccatactgctcaacagcgtccagccagtgctgtcagatcgtcgctgtcggcgcgggctggcagagcgtcgtcgcctacgttaacatcacttcgtactacctcatcggcatccctcttggagccgtgctgggctacgcgctggggcttcatgtgaagggcatctggatcggcatgcagctcggaacgctggtccagactgttgtgcttctcttcataacgttgaagaccgactgggaaaaa

SEQ ID NO: 51149 - DNA, 288 bp, Zea mays
cgccgtcctcaacagcttctacaacgtcgagggcggacaccgcgccatcgtcttcaaccgcctcgaggggatcaaggacaaggtgtaccccgaaggaactcacctgatgatcccgtggatcgaaaggccgaacatctacgacgtccgcgcccgacccaacctcgtcgagagcacgtccggaatccgcgacctccagatggtgagaattggtcttcgtgtccttactcgacccatgccagaccagctacctaaaatctacaggaacctgggggagaacttcaatgagag

SEQ ID NO: 51150 - DNA, 145 bp, Zea mays
agcactttgggctgacgaccccgggcctccgtggcggcatcctgggcctcggcggcgtgggccacatgggcgtgaaggtagccaaggccatgggccaccacgtgacggtgatcagctcgtcgtccaagaagcgcgcggaggcaat

SEQ ID NO: 51151 - DNA, 282 bp, Zea mays
cgatcccttcacaaagcgccgccgtcgccccatcgaacatggctccgaagaaggataaggccccgcccccgtcgtcgaagcccgccaagtccggcggtggcaagcagaagaagaagaagtggagcaagggatagctaaaggagaaggtgaacaacgcggtgctgttcgaccaggctacctacgacaagctgctctctgaggtgcccaagtacaagcagatcaccccctccatcctatccgagcgcctcaggatcaatggctccctggctcggagggctatca

SEQ ID NO: 51152 - DNA, 141 bp, Zea mays
atcgagggcgacatcaacgacggccgcctcctggccaagctcttcgatgtcgtgcccttcacccacgtgctccacctcgccgcgcaggccggcgtgcgctacgccatggagaacccggcgtcgtacgtgcactccaacgtc

SEQ ID NO: 51153 - DNA, 143 bp, Zea mays
cgagctctttggaccaaacagcatcggtgtgaaccacaacatcctgatcaccaacatcccgctggggtcactcctctatgggcagatcgccgccatggtgtacgacgcgaatggacaaaggatgacactgatggataatcgca

SEQ ID NO: 51154 - DNA, 139 bp, Zea mays
ctcatatactggatccccatctggtacgagctcaagctgctgttcatcgcgtggctcgtgctccccaacttcaggggcgccgccttcatctacgacaagttcgtgcgcgagcagctccggaagcacggcctcaccgccg

SEQ ID NO: 51155 - DNA, 289 bp, Zea mays
aggatgccgtgccacctgcaccccagcagtgcgctatatggccttggctacactcctgactatgtcgtctaccatgagcttgtcctgaccaccaaggagtacatgcagtgcgtcaccgcagttgatccacagtggctagcggagatggggcccatgttcttctctgtgaaggagacagacacctctcttcttgaccacaagaagaggcagaaggaagagaagacggcgatggaggaggagatggagaagctgaggcggcagcaagcagatgccgcgcgcatggagaagg

SEQ ID NO: 51156 - DNA, 138 bp, Zea mays
agtggttacaatgacaagatgagagttctcttaaatgccatactagtgcaaattgtgaaatttgaagttaagccaaacagattttctgcactgaaggaaacttctgtcaaggactaccagaatttcaatttccgacaa

SEQ ID NO: 51157 - DNA, 136 bp, Zea mays
ctggtgatcaatgagcaatgtggttacttgatgcgaacgaaggtttcttcatcagacgaaggtggcgtactgcagggtttgctgttttggatagcctatacttgactggcaagtgagataacaaaaggagcggcgg

SEQ ID NO: 51158 - DNA, 279 bp, Zea mays
agagggctcaagtgctacgagaaccccaagcacaaggtcaccgctgtccccgccgacgaagaagagatctgcggtgccactttcaaggtggtggaaggctctactgtcctgacggcgctgcactgatcggtcatcagctggcggaggcgatgcgatgatgatgcagaactttgtacatgcgttggtggatggtggtgtaacatagtggctgccaacaagtcatgctcatgcaaaccgatgaatctatctctgtatcatcgatctcggttgcttgctagt

SEQ ID NO: 51159 - DNA, 179 bp, Zea mays
tcgaattttgttaactgtatccggtatgctcctgatggtagtaagtttatcactgtgagttctgataagaagggtttgatatatgatggtaaaactggagaaaaaataggagagctttccactgaaggcggtcacacagggagcatatatgctgttagctggaatcctgacagtaaaca

SEQ ID NO: 51160 - DNA, 180 bp, Zea mays
gtgaattacgtgctgaggaagataaagttcagacggtttaggatttagacagtcattatttctactatcgcgatgacttgaccgattctgtgtctatgtttattttggatgatttttactaaagtaattctcatagaaatgggatgagaagttaggcgtttagtagtttgcaccaccttt

SEQ ID NO: 51161 - DNA, 185 bp, Zea mays
aggcccatgggttggcgccggagcatcccggagatctctacttcctcattaagaaggccgtggcgattaggaagcatctggagaggaacaggaaggacaaggactccaaattcagactcattcttgttgagagcaggatccaccgccttgcccgctactacaagcgtaccaagaagctcccaccc

SEQ ID NO: 51162 - DNA, 178 bp, Zea mays
agtgtgttccatctctgttggggtggttggtgatatttgccgtgccttggaaataaaattttgcccttctgtgatcgcattatgactgttcttcttaaggacctatcaagctctatgctcaatcggtctgtgaagcctccgattttctcatgctttggagatattgctcttgctattg

SEQ ID NO: 51163 - DNA, 170 bp, Zea mays
ggtgaaggagctcaagaacggccgcctcgccatgttttccatgttcgacttcggcgtccaggccatcgtcaccggcaagggcccgctcgagaacctcgctgaccacatcgctgacccagtcaacaacaacgcatgggcctacgccaccaacttcgtccccggcaactaag

SEQ ID NO: 51164 - DNA, 172 bp, Zea mays
ctcgacaatggcactccaggcagcctacgagtacctgcagcaggccgtcggcatggcgcgtggtcgtccacgagacgctgacgctgctgctcatcgccgtacccaccgtactactgctgctagcgtccctcgccaagagcacgtcgtcgtccggtaggggcaagccgccgct

SEQ ID NO: 51165 - DNA, 171 bp, Zea mays
ggtcgctccagagggtttgggttcgtctccttcagcaccgcagaggatgcacaggctgcattggagtctttggatggagtggagctggaagggaggtcgcttcgtcttagtctggcagaacagaacccgccacctggttccccgcctagcactgcgcaggcacagcaggaa

SEQ ID NO: 51166 - DNA, 193 bp, Zea mays
actccggcccaccaaccatgccggcggtgcgtcgcgcagaggctcctcgcggcgagcacgaaaatcatcggcgttgggcgcaactacatagcccactccaaggagctcggcaatccggtccccaaggagcccgtcctgttccttaagccgacctcgtcgtttctccacgctggtgtggccaccggcgccgttg

SEQ ID NO: 51167 - DNA, 188 bp, Zea mays
acgactacgtgcagaagatgaccttcgacagctacctctacaagcgcgtcgtgccgggcaacccgctcgacgacatcaagctcgccgtcacaccatcggcagcctcgtcagggccaccgcactgcgccgggagatggagaaggtcaccttgtgagccgccgcccgcgacgtcattgccgtcgaaatgg

SEQ ID NO: 51168 - DNA, 188 bp, Zea mays
agatgctattatggcacggttcaaggttgacgaattttgtaagaactcttagtcaagggctaagaattgcacctcctgaggcacctttactggctatatgttcggcaaaggcctctactttgcagatctagtaagcaagagcgcacaatactgttatgtggataggaataatcctgtaggtttgatgc

SEQ ID NO: 51169 - DNA, 139 bp, Zea mays
actggatcagaaacttaagtatgctaatgatctttcgtcgggtgtgatattcggaagagagcttgtgaactctcctgcaaatgtcctacccctgctgtgcttgcggaggaggcgtcaaagatcgcttctacttacagtg

SEQ ID NO: 51170 - DNA, 187 bp, Zea mays
acaaatgcagcccagcgcaaactatttgatgaactgggaatagttgctgacgacttacctgttgaccagttcatcctccttgggagatgctgttacatggctccttcagatggaaaatggggcgaacacgagttggactacctcctgttcatggttcgtgacgtgaagctcaacccgaatcctgaag

SEQ ID NO: 51171 - DNA, 155 bp, Zea mays
  unsure (1)..(155): unsure at all n locations
agaggagttcgaggagcacgccgagaaggccaagaccctgcctgccaccacgacgtacgagagcaagctcgtcctctacggccttacaagcaggccgccgtcggcnncgtcagcaccggtcgtcctggcatcttcaggcttaaagagagagccaa

SEQ ID NO: 51172 - DNA, 180 bp, Zea mays
cgtgaccatcttcggcgggcgtggccatgccgggacatggggaaaggcactaggtgcagaggtctatgactgcaacaacatgtggagcaggagctgcctggaggcgggctcctcgtataccagatcttctgcgctgctgaagacgctgttgctacctcgcccaaatctgttttccactgc

SEQ ID NO: 51173 - DNA, 171 bp, Zea mays
tggaaagctacaccattgctcttgactttggcagtgattgagctgagtgatattgcctttgctattgactcaataccagcagttttggcgtcacaagggatccacttataatactatcatcaaatatttttgctatttctggtttgcggtcgctctatgtgctcgtttctg

SEQ ID NO: 51174 - DNA, 156 bp, Zea mays
ggcgagaagcacgtccccgtcaacatcgctggaaccaggatttgcgacggcgagtggctctacgccgaccccgatggcatcttgtctccaggacggaactcaccgtgtagacagacacctggttgtatgtgtgtgtgtataaggaatcgagcgctc

SEQ ID NO: 51175 - DNA, 183 bp, Zea mays
  unsure (1)..(183): unsure at all n locations
acgagattgtgcagactctgattgttgatattgagcctgatgagcatgtgaagagagctatgaatgagatcaatgcagctctagggctgaggttggctgccagcgagaaagctgaggcagagaagatattgcagattcaagagagccgaagtgantgaagaatccaagtacttggcgggtctg

SEQ ID NO: 51176 - DNA, 287 bp, Zea mays
cgcggatcggcgagcatgaggcgcggcggcggcggcgggatgatggacgatgaagagagggtgggccatgcggagatcccgaccagtttcggtcccgagctgcgcgcctgcctccgatgccgcctcgtcaagacctacgaccagttcagggagaacggctgcgaaaactgcccgtttctagagatggacagagagcacgacaatctcgccaactgcaccacccccaacttcactggaattatctctctgatggaccccagtaggagctgggcagcccgttggttgag

SEQ ID NO: 51177 - DNA, 281 bp, Zea mays
gtcggttcacttctccaggtaaggaaagggttcgtactcatggcgccgccgcagccaaagtcgggcctcttcgttggcatcaacaagggtcatgtcgtcaccaagcgcgagctgcctccccgcccgtgccaccgcaagtctagatcaacgaagagggtgtgcatggtcaggggcctgatcagagaggttgctgggtttgctccttatgagaagcgtatcactgagcttctgaaggttggcaaggacaagcgtgccctgaagcttgctaagagaaagcttgg

SEQ ID NO: 51178 - DNA, 285 bp, Zea mays
ccgcctcctcctggccaaggttatccgccagctggatactcccagggtggtgcataccctccacccgctcaaggttacccacatggtggtggatatcctccacctggtcaaggttacccccagggtcagggtggtgcatatcctccgcctggttcttaccctccacaaggttcctaccccccagcagagggctcctatccagcacaaggttcctaccccccagcacagggctcatacccagcacaaggttcctattccccagcacagggctcctacccagcacaa

SEQ ID NO: 51179 - DNA, 280 bp, Zea mays
catgatttggggaaagggggccatgagctcagcctctctactggaaatgctggtggaagactggcatgtggtgttgttggcctgactccattgtaggttgctcgccgggtgcccgggttgcagttgcagctacgcacgtacatccttgccttggtggacttttgtcttcaatcgtgttattgggacagtgacctttttgtattacttggattcattccatgcatgtggtatggtgcgtaatagcctttgcaggtcgactgtataaaaagcaatatttagt

SEQ ID NO: 51180 - DNA, 280 bp, Zea mays
tacacttcaggcatcttggtgtcaatgcagttttgctggagccagttttcccattccaccaagtgaagggaccatattttccataccattttttttcacctatgagcttgtatagcagtgaatgctccagtgtttcagctatcaagtctatgaaggatagagtcagaacaatgcacagaaatggaatagaggttctcttggaggttgttttcacgcatactgctgaaggaggggcggagtgtcagatgatatcacttcgaggcatcgatggttcctcgta

SEQ ID NO: 51181 - DNA, 278 bp, Zea mays
ccggtggtggtggctatggtggcggtggctatggtggcggctatggtggtggtagcggtggctatggcggcggcggcagtggtgactatggtggcggcagcggtggatatggtggcaactacggcgacagggctggtggtggctatggtggtggtggtgattatggagttgcaggtggggctgaaagcagttttgctgctggaggtagcgacagctttcgcagcagtaactttgctgacagtggttttggtgaaaaccctgctggtagctttggcgca

SEQ ID NO: 51182 - DNA, 286 bp, Zea mays
ggtatcttcactggaagctgtggaacagcgctggaccatggtgtcacggccgtcggctacgggacagagaacggcaaggactactggatcgtgaagaactcatggggcagcagctggggcgagtccgggtacgtgaggatggagcgcaacatcaaggcgtccagcggcaagtgcggtatcgcggttgagccgtcatacccgttgaaggagggcgccaacccgccgaaccctggccccagcccgccgtccccgaccccggcgcccgccgtgtgcgacaactactact

SEQ ID NO: 51183 - DNA, 123 bp, Zea mays
agcccagggcagacagactaactgagcgcccgctggaaggagtccgcgcccatggcgatcaccaacatggcgtcggccagctcgcggttcatgctggccgcgggcgtgcccagcggcagcagc

SEQ ID NO: 51184 - DNA, 278 bp, Zea mays
agaaaaccatcagaagagtttgcaacatacattaagcagaggggttatgatctccatgatgtggaggcttatggacagatgctcaagaatgctggtttcagtcatgtcattgctgaagaccgaactgaccagttcctcagtgttttacagaaggagctagacaaatttgagaagaacaaagatgatttcctgtctgagtttgcccaggaggattatgacgatatcgtgaatggatggaaggcaaaactgcagaggagctctgctggtgagcagaggtg

SEQ ID NO: 51185 - DNA, 280 bp, Zea mays
cgctccgtggccttagctgtgctcgcgctactctctctttctggcctggaggctatccagcgtactccaaagattcaggtatactcacgtcatccagcagagaatggaaagtcaaatttcctgaattgcaatgtgtctgggtttcatccatccgacattgaagttgacttactgaagaatggagagagaattgaaaaagtggagcattcagacttgtctttcagcaaggactggtctttctatctcttgtactacactgaattcacccccactgaaaaag

SEQ ID NO: 51186 - DNA, 279 bp, Zea mays
cagaccctagccgccatatgtcacgatccactcgagcaccaagccgagggaaggtgaggagcgattgcgcgcggcgtggtgtcggcgaagggcggcgcggtcgcgggcaagaagaaggggtcggtttccttcacgatcgactgcaccaagccagtggaggacaagatcatggaggtcgcctcgctcgagaagttcctgcaggagcgcatcaaggtcgccggcggcaaggctggcaacctcggcgagtccgtcaccatctctcgcgaggagaccaaggtc

SEQ ID NO: 51187 - DNA, 89 bp, Zea mays
aggtataattctttccaatggtcgaagtcggatgctgcttccgatgtaacgaactgtgattctttgggcaagaggtgtactattacagt

SEQ ID NO: 51188 - DNA, 282 bp, Zea mays
atgtgggagaaagtcagtccagcgctacagcgtgcagtgcaaagccagatgagtctaatgagcacaccgttcatcgacaacaatgacctttttgaaactggcagtacaggaggcatgtcaagggctctgattgataggatcccaaagatgaggttcagtgctgcaagcaattgtgacaaggaaactgatagcagctgctgctcagtctgcctgcaggattttggagcacagcaatttgtgagggccctgcctcagtgccaacacatattccatgtgcggtgc

SEQ ID NO: 51189 - DNA, 271 bp, Zea mays
  unsure (1)..(271): unsure at all n locations
agtctctggtgttcagattgccatttctgcatccaacactggtggtgcctgggacaacgccaagaagtacattgaggctggagtttcagagcatgccaggacgcttggcccaaaaggttctgacccttgtatatangtgtcattggtgacaccattggagatcctctcaaggacacgtctggcgcttccctcaacatcctcatcaagcttatggcggttgaatcccttgtcttcgccccttcttcgccgcccatggtggcattctcttcaa

SEQ ID NO: 51190 - DNA, 273 bp, Zea mays
tgctagttcgtgggcaccgacgaccctgccgcgtgcgtcagaagtcagaactcatggccgggtggattagcgtgcaggtgaggagggagaggatcagcgagcggatgcggtacctgcaggagctggtgcccgggtgcagcaaggtcacgggcatcgccggcatgctcgacgagatcatcaactacgtccagtccctgcagaagcaagtcgagttcttgtccatgaagatcgccgcttccaacccggtggtgagcttcgacatcgtcgaggacc

SEQ ID NO: 51191 - DNA, 271 bp, Zea mays
aaacaacaagaggcgggttggccgggttcgtgcttttgatcggcactgtaacatggtgctcgagaacgtgcgggagatgtggacagaggtcaccaagactggcaagggcatgaagaaggctctgactgttgaacatgaagatattgatcaggaagatgttcctcaggggcgactcggtcatgatcgtgctgagggagtgcaagtgatcgcccaagcggaagccaggtgtctgtttggaactgtagcttatgatgtatgttggggatgatta

SEQ ID NO: 51192 - DNA, 275 bp, Zea mays
aggaagtcgaagagcttccgatactggaggcgaacggtaggaggagcgggaagggcacgctgctgtcgctgcggcaggtcggcggcggctggctggcccaggagcccgacgacgtgaccccggaggacgtggccttcacgaacgtgtccgagagggctcacgacgcccgtgagctctcgtgtcgccaagttcgcgtgcctctgcgtcaagcacgtgaagagcaacgccattgtgatcgccaagaacagttgcatgctgggcatgggcagtggcca

SEQ ID NO: 51193 - DNA, 271 bp, Zea mays
aatattcgggatcaactagatgggcttatggaaagagttgagattgagatttgctcaaacaccagtgatttagatgctattaaaaaagctataacatcaggtttcttccatcactctgcacggttgcagagggatggtacatataagactgtcaagaaccctcagaccgtgcatatccatcctagttcaggattagcggaggtacgtccgcggtgggtagtgtaccacgaattagttctcacgacgaaagagtttatgcgccaggtgacgg

SEQ ID NO: 51194 - DNA, 172 bp, Zea mays
cttgattattggtgtctacgacgagccaatgactccagggcaatgcaacatggtggtggagaggctcggcgattacctgatcgagcagggcttctaaaagttcgtcatgttctgttttggtcatttgggcaccaaagtttgcgcctcatttgggtctgtaatccgtgagctc

SEQ ID NO: 51195 - DNA, 274 bp, Zea mays
tgggggcaatgatctccaacctggcattcgtcgtccggaccatcttctccaagaaggggatgaagggcaagtccgtgagcgggatgaactactacgcctgcctctccatcatgtcgctggtgatcctcctgcccttcggcgtcgccatggaggcggccaaggtgtgggcagcgggctggcagacagcagtcgccgagatcggtcccaacttcgtctggtgggtggcggcgcagagcgtggttctaccacctgtacaaccaggtgtgctacatgt

SEQ ID NO: 51196 - DNA, 276 bp, Zea mays
cacttgcctgtccgagtgaacgaacagagactgagcaatctgctgcagtccatactggttggtgggtgtgttggagctatgccagtcatcaggatgatacccacatcggtcctctggggttactttgcctacatggccatcgacagtctaccagggaatcagttctgggagaggatacagcttctgttcattacagaaagccgacgctacaaggttcttgaaggtccccatgcatcgtttgtggagtcagtggttcccaaaacagtaaccatcttc

SEQ ID NO: 51197 - DNA, 275 bp, Zea mays
caccacgggaccttcaggatgaacgcgcttgcgtacttcacgctcctgtcggggttctacatggcgtggaacatcggggcgaacgatgtcgcgaacgccatggggacgtcggttgggtccggagctctgacgctccggcaggcggtgctgaccgccgcggtactcgagttttcacacgctacaccatggggacccatgtcaccagcaccatgcagaagggaatcctggttgcgtctgcgttccaagggaaggactctctgctcttcgctggactc

SEQ ID NO: 51198 - DNA, 281 bp, Zea mays
gcttcaagagctaggtaaacaaaacccacaaattttgcggttgattcaggaaaatcaagctgagtttctccgcttggtgaatgaatctcctgagggtagtcctggagggaacatactaggtcaactggcagctgctgtgacacaaacgctgacagttaccccagaggaacgggaggctatcctgcggctcgagggaatggggttcaaccgtgagcttgtgctagaagttttctttgcatgcaacaaggacgaagagcttacagccaactaccttctggatc

SEQ ID NO: 51199 - DNA, 125 bp, Zea mays
gtatcgggtacaaagttggaacaatgattgagctccccagggacgctctggtggctgatgagatagcggacaggctgaattcttctccttcggaacgaacgacctgacgcagatgaactttgggc

SEQ ID NO: 51200 - DNA, 272 bp, Zea mays
ccacaacacgtcctcgtgatcctagtaccttcttcttggacaagcgttgcgtcgcgatgaacgcgctcgccgccaccacccgcaacttccggcgggcatcgaagctgctcggcctcgactccaagctcgagcagagcctgctcatcccgttccgggagatcaaggtggaatgcaccatccccaaagacgacggcagcttggcgacgttcgtggggttccgcgtgcagcatgataacgcccgcgggccgatgaaaggcggcatccgctatcac

SEQ ID NO: 51201 - DNA, 216 bp, Zea mays
catgtcgatcaggtgctgtcgcttgctactcttgcatttgatggtgcagaaatagttgtgaaggttccatctatctactggtgatacaggactgcgagccacgccgcagagctcacagcggggttctacaacactacgaacagagacggatactctccagtttacagaatgctcaagaagcactctgtgataccttaactcgtctgctacggaccc

SEQ ID NO: 51202 - DNA, 144 bp, Zea mays
gcgctacttccacaagctccgcaacaagttctactgccccgcggtcaacatcgagcgcctctggtcgatggtgcccgccgacaaggcggcggaagccggcggcgacaaggccccgcagatcgacgtcacgcagttcggctactt

SEQ ID NO: 51203 - DNA, 118 bp, Zea mays
tgtgatcttcttctgccgcaacaatggctgggccatcagcactccgactactgaacaattcagaagtgctggagttgtcatccgtggccaggcttatgggatccgtggcatccgagta

SEQ ID NO: 51204 - DNA, 97 bp, Zea mays
ctggatcaaggacatgcggtggagcacgagcatcaaggacgaggaaggttacccggcgttcgcgctggtgaacaaggcgaccggggacgccatcaag

SEQ ID NO: 51205 - DNA, 260 bp, Zea mays
gctcctcacgccgccgccgccgccgccgtcgccgccaccacatccgtagcgcccagccgccggagacgaggaggaagccagcaccagccaccatgggtcgcgtccgcaccaagaccgtgaagaagacctccaggcaggtgatcgagaagtactactcccgcatgaccctcgacttccacaccaacaagaaggtcactggaaaggtctcgatcctccccacgaagcgcctccgcaacaaggttgccggcttcaccaccacc

SEQ ID NO: 51206 - DNA, 276 bp, Zea mays
ctacaaggacttcaacaactacaagtttcgtgtgcctgtgtccggcgccatcatcctagacgacacttatgagaggtgcttgcttgttaaaggatggaaggctagggccagctggagctttcctagtggaaagaggaataaagatgaggaagaccacacatgtgctgttagagaagttctagaggaaactgggtgtgatgtttctaggctattaaatttggatgaatacattgaattttcaattggacaacaagggttaggctctacatcataaca

SEQ ID NO: 51207 - DNA, 271 bp, Zea mays
tgccacgggaccttcaggatgaacgcgctggcgtacttcacgctcctgtcggggttctacatggcgtggaacatcggggcgaacgatgtcgcgaacgccatggggacgtcggttgggtccggagctctgacgctccggcaggcggtgctgaccgccgcggagctcgagttctccggcgcattcgtcatggggacccatgtcaccagcaccatgcagaagggatcctggttgcgtctgcgttccaagggaaggactctctgctcttcgctgg

SEQ ID NO: 51208 - DNA, 291 bp, Zea mays
cacagctgcaaagcatattcgctttccgccaccgcccgatccccacaccgccacccgccgcctctaaccccgctgtcccgtcttgtgctctgacctcaccgctggtcagtgtcagaccgcatggaccccaccgaccagtcgccggaggaggtgtactccgtgtgggcccttccgccggagcccgtccgtgatcgtttccgccgcatcatggagggcctccgcgctgcatacggcggccccgcctttgagccgcacgttaccgtcgtcggtgacttccgcggacgccgctcg

SEQ ID NO: 51209 - DNA, 292 bp, Zea mays
agaagaactcatggcgcagcagctggggcgagtccgggtacgtgaggatggagcgcaacatcaaggcgggcagcggcaagtgcggtatcgcggttgagccgtcatacccgttgaaggagggcgccaacccgccgaaccctggacccagcccgccgtccccgaccccggcgcccgccgtgtgcgacaactactactcgtgccctgacagcaccacctgctgctgtatctacgagtacggtaagtactgcttcgcctggggctgctgcccgctcgagggcgccacctgctgcga

SEQ ID NO: 51210 - DNA, 296 bp, Zea mays
tgaagaactcatggggcagcagctggggcgagtccgggtacgtgaggatggagcgcaacatcaaggcgtccagcggcaagtgcggtatcgcggttgagccgtcatacccgttgaaggagggcgccaacccgccgaaccctggccccagcccgccgtccccgaccccggcgcccgccgtgtgcgacaactactactcgtgccctgacagcaccacctgctgctgtatctacgagtacggtaagtactgcttcgcctggggctgctgcacgctcgagggcgccacctgctgcgacgat

SEQ ID NO: 51211 - DNA, 288 bp, Zea mays
ataccagctcaaggaggcaaggtgagaatactggatatcgtggttggagcaggatcgtcgtcgtgcgaccggaagaacgtggagacgcaatgcttgtttgatctctacatcatgactatcaacggtgtcgagcgagatgagcgagagttgaagaagatcatctttgaagccgggtttacatcttacaagatcatacctgttctgggcactcgatccataattgaagtctgcccatagaaaccaatataattaaggatggcaacagcctcccatcgcccttgcgagtat

SEQ ID NO: 51212 - DNA, 286 bp, Zea mays
atgaccggaaggaaacctgtggaccatacattaccaaggggacagcagagtcttgtgacttgggctaccccaagacttagcgaagacaaggttagacaatgcgttgactcgaggcttggaggggactaccctcctaaagctgttgcgaagtttgcagctgttgccgcgctgtgtgttcagtacgaagcggacttccggccaaacatgagcattgttgtcaaggcgctacagcccctgctgaatgcgcatgcgcgggcgaccaacccttgagaaaaatgctagctca

SEQ ID NO: 51213 - DNA, 291 bp, Zea mays
agcaacttccccacatccgtcactgatccccagccaatgggcaaggtcggcatgtgcttccaccctgatcaagacaggatcatcacagtccgggaatgtgctcggtcacagggctttcctgacagctatgaatttgcgggcaacatccagaacaagcaccggcagattggcaatgccgtgcccccgcctcttgcctatgcacttgggaggaagctgaaggaagccgttgacaagcgtcaggaagccagcgcaggcgtgcctgcaccatgagaagttttccttccatcaaac

SEQ ID NO: 51214 - DNA, 214 bp, Zea mays
taggcaatatgcgatttttctttatgccatgttttgggaaattttgtagctgcctaggcctcgtgctgttgtggtggttcattagtatgaagacgaaggctctgctggctatgggagtcctttttctttttgttagtattttgtttaaaactatgtatgaccgaattatttgtcatccttgactcaattctgctgcaaccagttgtatcgtgcc

SEQ ID NO: 51215 - DNA, 296 bp, Zea mays
cttcgacccgctcggcctggcggccgaccctgagaagaaggagcggctgcagctggcggagatcaagacacgcgcggctcgccatggacgccttcctcggcttcgccgtgcaggccgccgccaccggcaaggggccgctcaacaactgggccacccacctgagcgacccgctccacaccaccatcttcgacacgttcggagggtcctcttaagcccgccattgctccgccccgtccatcgaccggccggaacgtgttcttggattaactacgatctctatgagcctggggatggat

SEQ ID NO: 51216 - DNA, 290 bp, Zea mays
aggtgttcttccttggcacgtactctttgggctctttgtctacatcttagcactggctaatgcagaactcggctttcttgagaagctcactttcctcgagagctcaggtctcgacaaatatggcacagaggcattcttagtgaacttcacagcattggttgtcgtgttatttggtgcctctgttgtggtggctgctatagctccagttcgccttgaagaaccacagggttatgatccaattccagaaaactagtgcaaatgaaatgtacagcgtatgcagttgccaagat

SEQ ID NO: 51217 - DNA, 281 bp, Zea mays
aaaggatacggcccccacagtggttgttaccgccggtacaacacattctcctgggtgcacaatgcacatcttaaagccatgcttgagaagctccgggctaagcaccccaatgtgagaatcatatatggcgattactacactccagtagtccagttcatgcttcagcctgagaagtttggttttgccagacaactgcccagggcatattgtggggcgccatcgactcctgagagagcagcttacaacttcaatgtcacggccaaatgcggtgagcctggtgc

SEQ ID NO: 51218 - DNA, 283 bp, Zea mays
ctagctacaccacctggcgcgggctcgtctccatcgcccgccacccgctccgtcgtcgtcggccccgccgcgccgatcccgaatcgaatggggagcctggcgtccgagaggaaggtggtcgggtgggccgccagggacgccaccggacacctctccccctactcctacaccctcaggaacacaggccctgaagatgtggtggtgaacgtgctctactgcgggatctgccacacggacatcgaccaggccaagaaccagctcgaggcttcaaagtatcctatgg

SEQ ID NO: 51219 - DNA, 126 bp, Zea mays
agatgaagcccagcatcatctttgtactttccctgctcctcatcttggagaagcaagcagcggggatgggacaaaaaggtggatcaaaaggccgattaccaagtgaattttcccaatttccacaca

SEQ ID NO: 51220 - DNA, 287 bp, Zea mays
aattcgcggaacggatgccggtgatccatcatcgcgtgaggttgctttgggtgatccatttcatgttgacatcaccaaactcactgtaggctacctcgatgacgctgagatggaggttgtcgatgttctttcctctaaaggtgtcaagctggtccccttcaagctgaactacactgtggaatcagtccagtccatcctgaacataacgatggacactgatatgcttgcgcacttcgataactggcagcgggaaggacatgatgatgactatgaggcgcaagatcagt

SEQ ID NO: 51221 - DNA, 287 bp, Zea mays
attccagatgttttcaggctgggttttataacagccttggctaacacgttaatctggggagttgttggaaccatctggtggaaatttttgggtctgtactgacagtggcagacatgtggttgaccaaaattttcatttggcactggtcgaattgctcttgctcattgttaggaagggcagaatatctagttaactaccgttgctccctccggtcagctatcgctgaggtgatcagcagttagcaattacgcctgtgtcgtgcagttccttgttttctctttggttcc

SEQ ID NO: 51222 - DNA, 288 bp, Zea mays
cttctcgcttcaaaccaaaccaaaatcggagcggcggacaaaacgatccgtagcctcgcttaccttcgattcagctcgaccagggcactaaccgggaagccaatgccgcgcgagtcgcgagatctgtagcgccaatcggcttcaccggcggcggggtgggcatggaagcgcagaacggctcatgcggaggggcgcccgtggtgctcaacgtgtacgacctgacgcccatgaacaactacctctactggttcggcctcggtattttccactctggaatcgaagttcatg

SEQ ID NO: 51223 - DNA, 285 bp, Zea mays
agcaatcatggatgctcaagcagtcgcagatgcatgttctagcggtcacattgctggatacggtggtgatgtgtggttcccacagccagcaccaaaggatcacccctggcgctacatgcctaaccatgccatgacccctcacatctctgggactacaattgatgcgcactgcggtatgcggatggtgtgagggacatgctggataggtatttcaagggcgaggacttcccggtgcagaactacatcgtcaaggaaggccagcttgccagtcagtaccagtgaccg

SEQ ID NO: 51224 - DNA, 273 bp, Zea mays
aaaagattgatcgccgttctggtaaaaagctggaagatggccctaaattcttgaagtctggtgatgctgccattgttgatatggttcctggcaagcccatgtgtgttgagagcttctcagactatccacctttgggtcgctttgctgttcgtgatatgagacagacagttgcggtcggtgtcatcaaagcagtggacaagaaggctgctagagctggcaaggtcaccaagtctgcccagaaagctcagaaggctaaatgaatattatccctaa

SEQ ID NO: 51225 - DNA, 276 bp, Zea mays
caagaacgaagagatgctgaattccctcaagtacgtccggactggtggtgggttcgagcccaacttcatgctcttcgagaagtgcgaggtgaacggtgcgggggcgcaccctctcttcgccttcctgcgggaggccctgccagctcccagcgacgacgccaccgcgcttatgaccgaccccaagctcatcacctggtctccggtgtgtcgcaacgatgttgcctggaactttgagaagttcctggtgggccctgacggtgtgcccctacgcaggga

SEQ ID NO: 51226 - DNA, 276 bp, Zea mays
gtcagcggggtcccgcttgacgctgacacgaaggccgcgctcatgcagccggcgaaggtgtcgctcgtggtcgacatgctcaacggtggcgcggcggacaccaagatcaactgtgtccgcctcatccgcatcctcatggatgagaggggtttccggccggagacggtggcgagcctgagcctctacgttggtgtcatgcgcctcatccgggacaagcggcatccagacggtgtggtcgcggggctcgagctgcgtaattcgatctgtgcggtgcac

SEQ ID NO: 51227 - DNA, 346 bp, Zea mays
  unsure (1)..(346): unsure at all n locations
ggtgtganagagncngtacgtacggctgcggaatgtcgggctcgaagtgagtgcttgatgcatgagcgtagagagcacaggtgagtggcggtgtgtgntgggtagtgttaatacgcgcgtggatgttgcagatagttctggtgactaaacgcaagttcgattctgcgtcatttacaggggatctcggccgaagtatcagtcatattttaggacgttatcctcagtccaatgtctatgctaccggttggtctcttggagcgaatattcttgtgcgctaaccttgcgaggaaactgataaatgcctttatctggcgcggtctccttgtgcaatccttttaatttggga

SEQ ID NO: 51228 - DNA, 275 bp, Zea mays
ctgacccagaatactaaggtgaaaggagtcctagagattctagcatctgcctcagaatatgcagagcttccgggtcgtcctggtgaggaagaattcattgagaggcttgttcgtcaccagaggttctctatcgagaaacccaagtatggggatccacatgtgaaggccaatgctctgctgcaagcccatttttcaaggcacacagtggtcggaaatctggcagctgatcagcgcgagattctcctttctgctcataggttgctccaggcaatggt

SEQ ID NO: 51229 - DNA, 278 bp, Zea mays
cagaagcgctccgggggagcagctgacacccttgcgcgcccgcatctctctaaccgccggcgccggcgcgggcaacgttcacatggctgcgatgccaccggccttcacgggcaacctgaagaaagcacttgcaggtctgagaagaatcaattgcgatgggcgtcgatggcgcgactttgatgctaagggtcaggtgctgggacgattggcttcccaaatagccgttgtgcttcaaggcaaggataaaccgacctacgcgccacatgtggaaaatggag

SEQ ID NO: 51230 - DNA, 267 bp, Zea mays
catggacatcgtcgtcaaggagtggggcgacgtcttccggggtctaagctcccgtagcgacgtcgccggatggcttggcgcggcggcactggctatctcgaccgcgttcccgcatgtccagtgcagtgtcctggatctcccgcatgtcgccgccaatgctcccgctaacaccagtgtcaagtatattgctggcgacatgtttgagagcattccaccggcagacgccgtctgccttaagtggggtttgcatgactggggcgatgctga

SEQ ID NO: 51231 - DNA, 271 bp, Zea mays
ggaaaggcggagaaaggacaaccctgaggcgatggaggaagacgaatggatgagatcgctgagatcagggcccctcacttcgaggagtcgatgaagtatgctcggcgtagtgtcagtgatgctgatatccgcaagtatcaggcgtttgcccagacattgcagcagtcccgggggttcggcagtgagtgccgcttctcggatcagccggcgacactgggtgctgctgctgcagctgatccgtttgcttctgcgggtactgcggctgatgatg

SEQ ID NO: 51232 - DNA, 274 bp, Zea mays
aggccctggagaaaaagctgaaccaggcccttttggatcttcatgccctgggttctgcccgcacggacccccatctctgtgacttcctggagactcacttcctagatgaggaagtgaagcttatcgagaagctgggtgaccacctgaccaacctccacaggctgggtggcccggaggctgggcggggcgagtatctcttcgaaaggctcactctcaagcacgactaagagcttctgagcccagcgacttctgaagggccccttgcaaagtaata

SEQ ID NO: 51233 - DNA, 274 bp, Zea mays
ggccctggagaaaaagctgaaccaggcccttgtggatcttcatgccctgggttctgcgcgcacggacgcccatctctgtgacttcctggagactcacttcctagatgaggaagtgaaggcttatcaagaagatgggtgaccacctgaccaacctccacaggctgggtggcccggaggctggggcgggcgagtatctcttcgaaaggctcacgctcaagcacgactaagagccttctgagcccagcgacttctgaagggccccttgcaaagtaat

SEQ ID NO: 51234 - DNA, 268 bp, Zea mays
ggtggatccagactccccaagtccaagtaacccaacagatagagaatatcttcattggttggtgacagacatcccggaatcagcaaatgctagctatagtgggttcttccattctgtacttctcaatttaagtactccctatgtcccaaaataaaattcgttttaggtatttattggattcacacaatacttgatgtatgtattttatatatgtgtctagatgtacttcatctatttgaatataaacataaaagtcaagagctaaaac

SEQ ID NO: 51235 - DNA, 267 bp, Zea mays
cacgcagggctacgtcctgatcgacgtgcggaggacaaggacaaggccaaggcaggattgccgcagctgccatcgaacacgaagaacaagctcgtctctgtgccgctggaagaccttccgagcaagctgaaggggcgggtgcgcaaccgaagaaagccgaggcggagatcgccgctctgaagatatcctacctcaagaagatcggaaagggctccaacgtcatcatcatggactcgtacagcgacgtcgccaagactgtggcgaaga

SEQ ID NO: 51236 - DNA, 271 bp, Zea mays
cgtctcgcgtcaaaccaaaccaaaatcggagcggcggagaagaacgatccgtagcctcgcgtacctgcgattcagctcgagcagggcactaaccgggaagccaatgccgcgcgagtcgcgagatctgtagcgccaatcggcttcaccggcggcggggtgggcatggaagcgcagaacggctcctgcggaggggcgcccgtggtgctcaacgtgtacgacctgacgccatgaacaactacctctactggttcggcctcggtattttccactc

SEQ ID NO: 51237 - DNA, 271 bp, Zea mays
caggcttttatgttgaggagagcacttgaagagccactgggtcatgccgctgctatgatcaccgacgtccttgagcatgcagagtccagccatgtaatcactgcttcgcagaagagagccctcctccgagaaatggctctacggctgtcatgaagcaagcgccgctcattcggacgtcgcagaagaacggtttcctgcctctgcctgcacatcggtggttagtacgaggatctgtgatctcaacatgagctcaatcatgttgttagcagaa

SEQ ID NO: 51238 - DNA, 258 bp, Zea mays
ctgaatggcaagctcactgggatgtccttccgcgttcctactgtggctgtctcggttgttgacgtcaccgtcagaatcgggagaggggcctcctattaggatatcaagaaggctattaaggctgcttccgatggtcgcactcaatggtatcatgggttatgtggaggagggtctagtttctaccgacttccgtggtgacagcaggtcgagcatcttcgacgccaaggccgggatcgctctgaacgaccacttcgtcaa

SEQ ID NO: 51239 - DNA, 281 bp, Zea mays
cgacggatacggtctcccctccactgcctcccttgccctattgtcttcttcatctcatcgcatcccatagttgtgccagttggagacgcttctgttgctgaaggagacctacataaactatagtcagccgctaagttaaacaagccacgtgctgggccagaacctagcaggcttaaggatgagtaaaatgatctctgttcaacatgaggcacaacgatatctatctttcaagaatcagtaaactgatatctgctagatgtgcttctctatcttcgtttgtt

SEQ ID NO: 51240 - DNA, 282 bp, Zea mays
ggcagatcctttgactgcactgatgtatgcagtccaagtgatgaattttctcaagatgctggtacaaaagaccctcaaggatagagaggagtcgaccccagaggatgctttgctgccccagaaggacccatctgatgaaaacgggcatcagaagcccaccgtgacacttgattctctcctcgaggaagactccaggcgcccttctttcgccaaggaagagcccctacctgaacagccctggccacagcactgatgacaagtctaacgaaactaacaccgatt

SEQ ID NO: 51241 - DNA, 279 bp, Zea mays
gtcctaccaccaccgctcacctcggtttggctttctcccctcttccgcacccgcttctcgctccggattccggattccctctgctctttccctaacgaaggtcgccatggcggggcgaggtcaggcgatcggctcaggcgccgccaagaaggccacgtccaggagctccaaggctggcctccagatccctgtgggaaggatcgccaggttcctcaaggccggcacatatgccgagagagtcggcgccggcgcccctgtctacctcgctgccgtgctcga

SEQ ID NO: 51242 - DNA, 280 bp, Zea mays
gcctgacagtcaaagggccggtggagtacgtccctgaactgtttgatgagcagaaggaccaggtcgcggtcgagcaaatattgcgggtagtattcttggatgctgagcgcccaagcccacaaatggacaaactcaagcgccactagctgaagcagaagcagcccttgaggcacgcaagacacctccagaggacaatggtccccgtattgttggtgaaggccttgtgattgacgaatggcaggcacgaagagacaggtaccttgctcgccagcagatcgaa

SEQ ID NO: 51243 - DNA, 275 bp, Zea mays
ctaccagcgactcagcgagcgagagcagcacacactgcacgcagctagctaggagcagcagcagcggcggcgatggcggcctccatgatctcctcgtcagctctggcggtggcgcctcagggcctgccgcccctcggccgccgcgcctcctccttcgccgtcgtctgctccaagaagaagatcaagaccgacaagccctacgggattgggggtggcctgaccgtcgacgtcgacgccaacgggagaaagggcaagggcaagggcgtgtaccagtt

SEQ ID NO: 51244 - DNA, 270 bp, Zea mays
gcgccctcttggcttgactggcaataaagttgagatgctatgtgacctatgcaacattacactgaacaaaaatgctgtctttggtgacagcagtgcattatcacctggtggtgtgcgcattggtacacctgctatgacctcaaggggtttggttgagaaggacttcgtgcagattgccgagtaccttcaccgagctgtgaccatctgcttgagcgtccaggcggagcatggcaagattctcaaggacttcaagacaggcttggtgcaaaa

SEQ ID NO: 51245 - DNA, 277 bp, Zea mays
caaaccgcatcctctcatcagcttccttccacattcgtctcgagatctcgccccgtcgccatggacgcgatcgacagcgtggtggatcccctccgcgacttcgccaacgacagcgtccgcctcgtcaagcgctgccacaagcccgaccgcaaggcgttcaccaaggtggcggcgcggacggcggtcgggttcgtcgtcatgggcttcgtcggcttcttcgttaagctcatcttcatccccatcaacaacatcatcgtcggttccggctaggcttaca

SEQ ID NO: 51246 - DNA, 277 bp, Zea mays
ggacttttggcgtcttaacaaagcttgatttaatggacaagggtgcttgacgggaggcaatatcgcttacaacacccgtgggttggaattgtcaatcgctcacaagctgatatcaacaagaatgtcgatatgctctcagcaagacgcaaagaaaaagagtactttgagagtagtcctgaatatggtcagttggcacataaaatgggtgcagagtatcttgccaagcttctgtcacagcatttagaggctgtgatcagggcaaaaattccaagtatta

SEQ ID NO: 51247 - DNA, 279 bp, Zea mays
ctaccagcgactcagcgagcgagagcagcacacactgcacgcagctagctaggagcagcagcagcggcggcgatggcggcctccatgatctcctcgtcagctctggcggtggcgcctcagggcctgccgcccctcggccgccgcgcctcctccttcgccgtcgtctgctccaagaagaagatcaagaccgacaagccctacgggattgggggtggcctgaccgtcgacgtcgacgccaacgggagatagggcaagggcaagggcgtgtaccagttcgtc

SEQ ID NO: 51248 - DNA, 276 bp, Zea mays
gcgccctcttggcttgactggcaataaagttgagatgctatgtgacctatgcaacattacactgaacaaaaatgctgtctttggtgacagcagtgcattatcacctggtggtgtgcgcattggtacacctgctatgacctcaaggggtttggttgagaaggacttcgtgcagattgccgagtaccttcaccgagctgtgaccatctgcttgagcatccaggcggagcatggcaagattctcaaggacttcaagaagggcttggtgcaaaacaagga

SEQ ID NO: 51249 - DNA, 280 bp, Zea mays
ccaaccgcatcctctcatcagcttccttccacattcgtctcgagatctcgccccgtcgccatggacgcgatcgacagcgtggtggatcccctccgcgacttcgccaacgacagcgtccgcctcgtcaagcgctgccacaagcccgaccgcaaggcgttcaccaaggtggcggcgcggacggcgatcgggttcgtcgtcatgggcttcgtcggcttcttcgttaagctcatcttcatccccatcaacaacatcatcgtcggttccggctaggcttacagga

SEQ ID NO: 51250 - DNA, 279 bp, Zea mays
cgacttttggagtcttaacaaagcttgatttaatggacaagggtgcttgacgggaggcaatatcgcttacaacacccgtgggttggaattgtcaatcgctcacaagctgatatcaacaagaatgtcgatatgctctcagcaagacgcaaagaaaaagagtactttgagagtagtcctgaatatggtcacttggcacataacatgggtgcagagtatcttgccaagcttctgtcacagcatttagaggctgtgatcagggcaaaaattccaagtattata

SEQ ID NO: 51251 - DNA, 275 bp, Zea mays
caggaagcaatcatggtgctctctgcagatgacaaaaccaacatcaagaactgctgggggaagattggtggccatggtggtgaatatggcgaggaggccctacagaggatgttcgctgccttccccaccaccaagacctacttctctcacattgatgtaagccccggctctgcccaggtcaaggctcacggcaagaaggttgctgatgccttggccaaagctgcagaccacgtcgaagacctgcctggtgccctgtccactctgagcgacctgca

SEQ ID NO: 51252 - DNA, 272 bp, Zea mays
cttttgtaggtacctggaaacttgtctccagtgaaaactttgatgattatatgaaagacgtatgagtgggctttgccaccatgaaagtggctggcatggccaaacctaacatgatcatcagtgtgaatggggatgtgatcaccattaaatctgagagtacctttaaaaatactgagatttccttcatactgggccaggaatttgacgaatcactgcagatgacaggaaagtcaagagcaccataaccttagatgggggtgtcctggtacatg

SEQ ID NO: 51253 - DNA, 276 bp, Zea mays
cgatccccaacccacatctcaagtccactttggcaatgtctccacggcaacggaagaagatgacaaggatcacacccacaatgaaagagctccagatgatggttgaacatcacctggggcaacagcagcaaggagaggatcctgagggggccgctgagagcacaggaacccaggggtcccggccacctgggatcccagacacagaagtggagtcaaggctgggcacctctgggacagcaaaagactgcagaatgcatccctaaaactcacgagaga

SEQ ID NO: 51254 - DNA, 275 bp, Zea mays
cccggcgcgggtgccgctggactacgtgctcttccgtgttccgtcccaacgccggtgtcgccgacgcccgcacggggctccgctacgacaacatgctgtacgcgcaggtgtggacgccgtgtacgcggccatccaggggctcgggtacacggacgtggaggtcaaggtgtcggagaccaggtggccgtcacgaggcgacgccgacgaacccggcgccacgcccgagtacgcggggacctacatccggaacgtgctgcagcggatcgagatgaagc

SEQ ID NO: 51255 - DNA, 270 bp, Zea mays
aagcccaaaatgggaacgcgacccgctcatatcaacattgtcgtcattggacacgtaggggcgggcacgtccaccactactggccatctgatctataaatgcggtggcatcgacaaaagaaccattgaaaaatttgagaaggaggctgctgagatgggaaagggctccttcaagtattcctgggtcttggataaactgaaagctgagcgtgaacgtggtatcaccattgatatctccttgtggacacccccgaccagcaagtactatgtg

SEQ ID NO: 51256 - DNA, 269 bp, Zea mays
caagaggttgcaggaggatcctccagccggagtcagcggggctccgaccgagaacaacatactggtgtggaacgcggtcattttcgggcctgaagggaccccgtttgaggatggcacatttaaacttacgatagaattcactgcagaatatccaaataaaccacctacagtgagatatgactctcgagatgttccatccaaatgtctatgcagctggtagtatctgactggacatacttcagaaccgatggagtccgacctctgatgtg

SEQ ID NO: 51257 - DNA, 273 bp, Zea mays
gcaacgcgagtgggagcaccaggatctcgggctcggaacgagactgcacggattgttttaagaaaatggcagacaaaccagacatgggggaaatcgccagcttcgataaggccaagctgaagaaaacggagacgcaggagaagaacaccctgccgaccaaagagaccattgagcaggagaagcggagtgaaatttcctaagatcctggaggatttcctacccccgtcctcttcgagaccccagtcgtgatgtggaggaagagccacctgcaag

SEQ ID NO: 51258 - DNA, 274 bp, Zea mays
gaaaggggaagcccgccgccgccccggcccccagcaaccagcagatcgggacctctgttctgcgcaatccatccatggcggaggaatcaggccgtcccttgccaaagtttggtgaatgggatgtcaacgatccggcttccgcagacggatttactgtcatattcaacaaagccagagatgagaagaagggtgggaatggtcaagacacagactcaccttccaaggaccccaggactgagagggtggagtcttatgctgcaaaaccaagcacgaa

SEQ ID NO: 51259 - DNA, 271 bp, Zea mays
cggctcgagaatgcatcatgttttcaggtgaagatggcagaggactcagtgaagcgggtaactggcatgaacacattgttccctgccgtgtctgatatgtcgtccctcagcatgccattcaatggctccccatccgactccgcctctgatgccgccgtacccatccaagatgacctgaacagttacttcgccaatccaagcgagatcggaggcagcaacggttacatgccagatatagcttcctcggctcaagaggacgacgatttcgtca

SEQ ID NO: 51260 - DNA, 274 bp, Zea mays
gctagcgatagtgagagagatatggcaataagtacggctaacagcattgtctctgcgctgaacagctacagcaagctaactggtctagtggtgagcaggaagagatgtgactcgattggcatcccagcactcagttcgtcgttaaaactactctcttggtagaatcaaacagagctttgtattgactgactcccgcttgcctgacatgccaattatttatgctagtgatgcttttacatcattaacaggttactcaagagaagaaatattgggc

SEQ ID NO: 51261 - DNA, 269 bp, Zea mays
gcgggggtggcacttagctccctctctgaggtgcctccctggactggggaagtgcaacccgtctcagagagatggaggtgctctcgggcgcggcccctgggacccctccgatagatctgccctcttgaaaagcaaactgagggctctgctcgctggccctcggagcctgcgaaggtcaagctgacttcgggggtaggattgacaggattggagcccagagcggactaggctgcaacagcttccggtaccgaagataacagccaaatctg

SEQ ID NO: 51262 - DNA, 269 bp, Zea mays
cgagcaaggcacagcagcaggggagtcggagtgacagccgcccgcaggatgccgacactaaacctgagcaccaacgtgccggtggacgcggtggtcgccgccgacatcctcagggactgctccaaggccgtcgccaggatcatcggcaagcccgaatcctatgtcatggtgtcggtcaacgggtcggtgcccatgtcgttcgcggccagcgaagagccggcggcgtacggcgagctcgtgtccatcggcggcatcggccccggcgtcaa

SEQ ID NO: 51263 - DNA, 269 bp, Zea mays
ccgacggtggccaagatgctggtgggcaacaagtgtgacctgggcgacatccgccaggtgcccgtggaggaaggcaaggcgctggccgaggccgagggcctcttcttcatggagacgtcggccctggacgccaccaacgtgaggacggccttcgagatcgtgatcagggagatctacagcaacgtgagccgcaaggtcctgaactcggactcgtacaaggccgagctgtccctcaacagggtgagcatcgacggcgactcaaaagacga

SEQ ID NO: 51264 - DNA, 269 bp, Zea mays
gcaagctacaaagttctgtacatgtggaaaagtatatggatgaggtggagagttcaaaaatttggcttgattctggctcatgttgccttgcactctactcaaaattgagtccacatcaagttttgacgcttcaatcaccaattgcccttccaaaggctgttaagaaccccacagaactggatggattgaggaaggcgcatattcgagatggtgccgctgttgtacagtaccttgcttggctggataatcagatgcaggagaactatgga

SEQ ID NO: 51265 - DNA, 269 bp, Zea mays
cgcgagcggtgctacgacaagccgtggccctccaccaggggcgcgcaacaccagggctggtgctgcgaatgttgctgtgaggccattacctgctctcaaggaaaacgtgaagcgcgtcatgttctactgctaagattgacgctgcgctgatgctgtgagcaagcaattatcgttatggtggtgatgctaggacaccgttatgcaccggtaactttaataccttttgtactgtaactacttgtatggcattggaaactgtttgcgatata

SEQ ID NO: 51266 - DNA, 271 bp, Zea mays
ccggaagcggagacgtgagtcgtcgaccaaccccgtcggtccggcgactccggctgcggcgcggcgtgctagatcgctaccgaccatggtggtggaggagatcgccgagggggtgaaaaacctgcccgttaccggagatgcggcggcttcaggcggagaggggcagaggaggggcggcggcggcagcagcaaccgcatccaggtgtccaacaccaagaagcccctcttcttctacgtcaacctcgccaagaggtatatgcaacagcacgac

SEQ ID NO: 51267 - DNA, 268 bp, Zea mays
gacactactattcaattgcaatcaattaccggaaaaatgagcttgaggagaaaatgctgttgaacttgcacaaaaagaaatggaccgatgggctaattttgaagaggtttgacactcactcgaaaaccaacgagcagactgtccaggaaatgctaaacctagccataaagtacaacaaggcagtgcaggaggaggacgaactgccacctgagaaacttgcgatagcaaatgtgggtcgacaagatgcaaaacagcatttggaagagca

SEQ ID NO: 51268 - DNA, 269 bp, Zea mays
ggtgaacaggacccgtcgccatgggccgtgtgatccgtggacagaggaagggcgccgggtctgtgttccgcgcgcacgtgaagcaccgtaaaggcgctgcgcgctgcgcccgtggatttcgctgagcggcacggctacatcaagggcatcgtcaaggacatcatccacgacccgggccgcggcgcgcccctcgccaaggtggtcttccgggatccgtatcggtttaagaagcggacggagctgttcattgccgccgagggcattcacac

SEQ ID NO: 51269 - DNA, 266 bp, Zea mays
ggaaattctggacactgtgatctttcgggcacctccagtccttcaggcattgggctacagcgcaggtgatgtgtttatcaagagagttgtggctaagggtggggatatcgttgaagtacgtgatggtaacttgattgttaatggagtagttcaggaggaagaatttgtgttggaaccagccgactacgaaatggatccgctgactgtgcctgaaggctatgtctttgtactgggggataacagaaacaacagctttgattcacata

SEQ ID NO: 51270 - DNA, 268 bp, Zea mays
cttgttcaatctatcatgcggaaagctttttgaagggactccacagcagatgtatgcctcactccagaaaattacagctctacccgatgatacaaaagtatactgtgggcatgaatataccttgagtaatgcaaagtttgccttgagtgtagaaccgggaaataaagcattgcaggaatatgctgcaaatgcagctgagctgcgtaataagaatatacccacggtgccaacaacaattggcagggagatggaatgcaatcctttcttg

SEQ ID NO: 51271 - DNA, 266 bp, Zea mays
gctatgaagacgtctcttctggaagtgagattagaagtgtggtgttggctgggaggagattttatgagaaggaagggctccctgctttccctatgggaaaaattgatcaaacacgtatgtggaaggtgggtgaaagggtccgttcaaccaggccacaaggtgatcttggcccactgcatcccttcactgctggagtgtatgttgcactaatgatggctcagattgaggtccttaggaagaagggccactcttactcagagataatt

SEQ ID NO: 51272 - DNA, 266 bp, Zea mays
cctggcggtagttggtgtgtcctcggtttctcggctgctgggtcggtcccgccgacagctggggcggcctatgtcgagtggcgcccatggcgaagagggctcagctcgcatgtggaagactctcagcttcttcgtcgcgctccccggggtggcagttcagcatactgaatgagtacctgaagtcgcaccacggcgagcgagagcgacccgagttcatcgcctacccccatctccgcatcaggatcaagtctttccctgaggagatg

SEQ ID NO: 51273 - DNA, 265 bp, Zea mays
ggagaagggcaactaggtctgggctctagaatccgaactgtttcttctccccatcctgtaccgtgcattgaatcagcactatacagcaaggatcgcccatcagctatgaaaggtaacaaggctgctgaaggacatgtcagtaaagtcttgggaaattgtgtgagggccattgcttgtggaggtcgtcacagtgctgcagtaacagattcaggagctcttcttacatttgggtcggggctgtatggacagtgtggacaagggaata

SEQ ID NO: 51274 - DNA, 268 bp, Zea mays
tgacaacgccgggatgttggcaggcggcatcaaggacgtgccggcgaacgagaacgacctccagctccaggagctcgcgcgcttcgccgtcaatgagcacaaccaaaaggccaatgctcttctggggttcgagacgcttgtgaaggccaagacacaagttgttgctggcacgatgtactatctcactattgaagtgaaggatggcgtagtcaagaagctttatgaagctaaggtctgggagaagccatgggagaacttcaagcagctg

SEQ ID NO: 51275 - DNA, 270 bp, Zea mays
cggtcaccggcaagggcccgctcgagaacctcgctgaccacatcgctgacccagtcaacaacaacgcatgggcctacgccaccacacttcgtccccggcaactaagctcaacggctatgctatgcgacttcattgtctttcggatcggagagggtgtacgtacgtggattgattgatgctgcgagatgcatgtgtgtcttttgtttcacgttgcattgcataggcaagtcgagatgatgagttggcgttgtacactaagatgaaccatgt

SEQ ID NO: 51276 - DNA, 269 bp, Zea mays
catttcgcagagctgaagatcaagcgcctgagaaagaagtttgcccaaaagatgcttcgaaaggcaaggcggaagcttatctatgagaaagcaaagcatcgatcaaaggaatataggcagatgtacagaactgaaattcgaatggcgaggatggcaagaaaagctggcaacttctatgtacctgcagaacccaaattggcgtttgtcatcagaatcagaggtatcaatggagtgagcccaaaggttcgaaaggtgttgcagcttcttcg

SEQ ID NO: 51277 - DNA, 290 bp, Zea mays
ctcctaccaccaccgctcacctcggtttggctttctcccctcttccgcacccgcttctcgctccggattccggattccctctgctctttccctaacgaaggtagccatggcggggagacgtaaggtgatctgttcatgtgccgccaagaaggccacgtccaggagctccaaggctggcctccagatccctgtgggaaggatcgccaggttcctcaacgccggcaagtatgccgagagagtcggcgccggtgcgcctgtcatactcgctgccgtgctcgagtatcttgctg

SEQ ID NO: 51278 - DNA, 300 bp, Zea mays
gaaaactgcagcttccttctcaccttgaagaataatcctagaaaactcacaaaatgtgtgatgcttttgtaggtacctggaaacttgtctccagtgaaaactttgatgattatatgaaagaagtaggagtgggctttgccaccaggaaagtggctggcatggccaaacctaacatgatcatcagtgtgaatggggatgtgatcaccattaaatctgaaagtacctttaaaaatactgagatttccttcatactgggccaggaatttgacgaatcactgcagatgacaggaaagtcaagag

SEQ ID NO: 51279 - DNA, 305 bp, Zea mays
gtcaagagcttggtgatggacgacttctacgcgggtgaaggcacggaccacagcggcgttccaacaaaattggtcacaacaaactgctctctgcacatagctgtctacaaccctgccacaatgtttggaattcatgtcacttctggccccatccacctgatgtattcagagatcccaatagcagtcggtcaggttcggaggtattaccagccgaggaagagccaccggatggtgacggcggtcatccacggcgagaaggtgccgctgtacggcgccgggggcagcctgatgctgtcgacaagcac

SEQ ID NO: 51280 - DNA, 295 bp, Zea mays
catggcggttggcaagaacaagcgccttacgaaaggcggcaaaaagggagccaagaagaaagtggttgatccattttctaagaaagaatggtatgatgtgaaagcacctgctatgttcaatataagaaatattggaaagacgctcgtcaccaggacccaaggaaccaaaattgcatctgatggtctcacagggtcgtgtgtttgaagtgagtcttgctgatttgcagaatgatgaagttgcatttagaaaattcaagctgattactgaagatgttcagggtaaaaactgcctgac

SEQ ID NO: 51281 - DNA, 298 bp, Zea mays
aacggggcttcgaggtggtatatatgaccgagcccattgacgagtactgtgtgcagcagctcaaggaatttgatgggaagagcctggtctcagttaccaaggagggtctggagctgcctgaggatgaggaggagaagaagaagatggaagagagcaaggcaaagtttgagaacctctgcaagttcatgaaagacatcttagataagaaggttgagaaggtgacaatctccaatagacttgtgtcttcaccttgctgcattgtgaccagcacctacggctggacagccaatatggagcg

SEQ ID NO: 51282 - DNA, 300 bp, Zea mays
caaacccatcgcagggcattctcgagcatagcttctctgcctctctctcccctcctctcctctcgtccactcctttgtccacaagcttcgagatggctcagcagcagaaggtggtggtcagggttccaaccatgacagatgacaagatcaagcagaaggccatcgaagctgttgcggacatttacggtattgactccatagcagcggatctgaaggagaacaagatgaccatcataggcgagatggatgcagtagcgattgccaagaagttaaagaagattggacagattgacattgtgt

SEQ ID NO: 51283 - DNA, 301 bp, Zea mays
agagagtctggggatcggggacgaggtgctgctcctgtcggacggcaacggcgagctggcgcgcgccatgggcgtcgagctcgacctctccgacaagcccgtggggctcggcgtccggtcccgccgctacgcgctgctcgcggaggacggcgtggtcaaggtgatcaaactcgaggagggcggcgcattcaccaacagcagcgccgaggacatgctcaacgcgctctgaactcgcgacgccatggttggttcgtctcttccggcaagagttgggttcttttccctgaaaataatcgtgacg

SEQ ID NO: 51284 - DNA, 302 bp, Zea mays
cagatccctcgacaatggcactccaggcagcctacgagtacctgcagcaggccgtcggccatggcgcgtggtcgtccacgcagacgctgacgctgctgctcatcgccgtacccaccgtactactgctgctagcgtccctcgccaagagcacgtcgtcgtccggtaggggcaagccgccgctccctccctcgccgctgggcaccctccccatcgtggggcacctacaccacatcgggccccagacccacatctcgctccaggagctggtggccaagtacgggcacaacgggttcctgttcctc

SEQ ID NO: 51285 - DNA, 298 bp, Zea mays
cgccgccactgtccggccacagcctaacgctcttcgctgtcgttaccggtctcgcgcagggcggccccggttctggtgtttggcgtcggaattaaacaaccaccatgtcgagcaaaaaggcaaagaccaagaccaccaagaagcgccctcagcgtgcaacatccaatgtgtttgccatgtttgactagtcacagattcaggagttcaaagaggccttcaacatgattgatcagaacagagatggcttcatcgacaaggaagatttgcatgatatgcttgcttctctagggaagaatcc

SEQ ID NO: 51286 - DNA, 300 bp, Zea mays
gcgccctcttggcttgactggcaataaagttgagatgctatgtgacctatgcaacattacactgaacaaaaatgctgtctttggtgacagcagtgcattatcacctggtggtgtgcgcattggtacacctgctatgacctcaaggggtttggttgagaaggacttcgtgcagattgccgagtaccttcaccgagctgtgaccatctgcttgagcacccaggcggagcatggcaagattctcaaggacttcaagaagggcttggtgcaaaacaaggacatagagatcctgagggcggaggt

SEQ ID NO: 51287 - DNA, 291 bp, Zea mays
cgaacagtcgttgctacatgcagctgttctggtgtccagtcgctgcagaagagtccacagcgagccccactatccggatttcgccctgcagtgcctgtactgttcctccttttcgggctagtatggtgccacaaaactagagcagattggaggggccaaaatacacttcttattcaaaatttgaataataagtggattttacgtttctccaatccctttcggttttatggctcccaaactagtccatctagtgcgtcggttttacatgtggttcaagtggggtactgtgtg

SEQ ID NO: 51288 - DNA, 299 bp, Zea mays
aacgagcagctggccttctgcccgggcctcatcgtccctggtatctactactccgacgacaagctgctgcagaccaggatcttctcctactccgacacgcagcgccaccgcctcggccccaactacctgctgctaccggccaacgcgcccaagtgcgcacaccacaacaaccactacgacggatccatgaacttcatgcaccgcaccgaggaggtcgactacttcccctccaggtacgacgccgtcaggaacgcgcccaggtacccgatcccgaccgcccacatcgccggccgccgaga

SEQ ID NO: 51289 - DNA, 293 bp, Zea mays
aaacgttgtgacagtgttcagcgcgcctaactattgctaccgatgcgggaacatggctgcgatcctcgaaattggcgagaacatggatcagaacttcctccaattcgacccagctccgcggcagattgagccggacatgacgcgcaagaccccagactactttttgtaatcagcatgctggctttctttcaacttgtctactgcagcgccagcacctgtagatctccttagaaaatggtgtttcctctagccgccttgtacccccatcattcttttggtgtggagatttattg

SEQ ID NO: 51290 - DNA, 285 bp, Zea mays
  unsure (1)..(285): unsure at all n locations
gcgccctcttggcttgactggcaataaagttgagatgctatgtgacctatgcgacattacactgaacaaaaatgctgtctttggtgacagcagtgcattatcacctggtggtgtgcgcattggtacacctgctatgacctcaaggggtttggttgagaaggacttcgtgcagattgccgcatancttcaccgagctgtgaccatctgcttgagcatccacgcggagcatggcaagattctcaaggacttcaagaagggcttggtgcaaaacaaggacatagagaa

SEQ ID NO: 51291 - DNA, 296 bp, Zea mays
aggatccttcataaagaacgacgtcccttattatttttgggccttctttccaaaaggagacctcacaggaccgaagggctttgcgctatcgtcctacagcaacgaagtgagcaccatcgagccgttcctgatcgatgagaagaggataacggccaagtacgtggtgttctgggtctacaagaggctggctgggcaaggcatccttccggtctggaaggaagaggagggggaggaggaggccgcgaagtagtaggttgcgcaggcgcatacgcatacacatacacacacacagggtg

SEQ ID NO: 51292 - DNA, 284 bp, Zea mays
  unsure (1)..(284): unsure at all n locations
cagtcttcccgcgtccgccgattcctcctccttggtcgccgcgtccttggctgccgtctgcgnaatggctacaaacttcctagcacatgagaggatctggttcgacaagttcaaatatgacgacgcagaaaggagattctacgagcagatgaacgggcctgtggcaggtgcctcccgccaggagaacggcgccagcgtgatcctccgtgacattgcgagagccagagagaacatccagaaatccctggctggaagtcaggccccggggcctccagcggcaccag

SEQ ID NO: 51293 - DNA, 298 bp, Zea mays
agcgattggagggtcagagaacttctacagtgcctttcaggctgagcttgcagatgccatccctgtggtcaagacctctattggtggcactagaataataggccgactttgtgttggaaacaagaatggacttctattgccacatactacaaccgaccaagagcttcagcatctgaggaattgcttgcctgatcaagtggtggttcagcgcattgatgagaggttatctgcccttggcaattgcatagcctgcaatgaccatgttgcacttacgcaccctgaccttgacaaggagact

SEQ ID NO: 51294 - DNA, 295 bp, Zea mays
cgggtgcccaggtggcccccatcgtgcggcttgaggaggtactcgtcaccaccggtgaggaggacgaggacgtcctgctcgacatgaaggcgaactgtaccggtttgataaagacgggaatcaatggaaggaacggggcacgggcaccgtcaagcttcacaagaacaaggagaccggcaaggtccgactcgtcatgcgccaggccaagacgcttaagatctgcgcgaaccacctcgtggcccccagcacgagaatgcaggaacatgccggcagcgacaaatcgtgcgtctggcac

SEQ ID NO: 51295 - DNA, 296 bp, Zea mays
agcgggtattggcatgggtttgctcatggttggcacggccagtgaaaaggccacagagatgcttgcttatgctcatgatacccaacacgagaaaattatcaggggtttgtcacttggaattgcattgacagtgtatggcagggaagaagaagctgacacattgattgaacaaatgactagatatcaagatcccatacttcgttatggtggcatgtatgcattggctctagcatacagagggactgcaaataacaaagctatccaccagctgtctgcattttgcggtgtcggacgtg

SEQ ID NO: 51296 - DNA, 291 bp, Zea mays
gcagcacatgggcctggtctcctcccctacccctgccatcgtcgtgaggctcggcaacaacacaccccaccgccgccgagcaactcggtctcggatcgtgtcgtcctccgcctccgacgccgcgccgttcgagaagcccagggccgtggtcaagaaggtcctcgcgcagtcgcagcctgttggtcacggtgccaccgtccgtaggagcatcggcaggcacgagctccgcaacctggacgcgttcctccagctcgacgagttcacagtctccaagcccgccgggtttcccga

SEQ ID NO: 51297 - DNA, 291 bp, Zea mays
  unsure (1)..(291): unsure at all n locations
cgcgccgtgaaggagacgacggggatcgtcggccttgaggtggcgcccaacgcgcgggaggttctcatcgggctctacacgcgtacgctcaaggagatcgaggccgtccccaaagacgagggctaccgcaaggccgttgagtccttcaccaatcaccgcctccagatctgccaggaggaggacgactggaagcgcatcgaggaccgaatcggatgcgggcaagtcgagngactcatcgaggaggccgaggacgagctcaagctcatcgccaaaatgattgaatgggatccg

SEQ ID NO: 51298 - DNA, 287 bp, Zea mays
agcgggtattggcatgggtttgctcatggttggcacggccagtgaaaaggccacagagatgcttgcttatgctcatgatacccaacacgagaaaattatcaggggtttgtcacttggaattgcattgacagtgtatggcagggaagaagaagctgacacattgattgaacaaatgcctagagatcaagatcccatacttcgttatggtggcatgtatgcattggctctagcatacagagggactgcaaataacaaagctatccaccagcttctgcattttgcggtgt

SEQ ID NO: 51299 - DNA, 295 bp, Zea mays
aaaagaaacgggctcagaggcttgtgtccatcaacaatccttttgcgtcttggggatcattgggagaagatattggtgcagcaccacaactgaagagtgctaaattcttctcattggaagaactcaagttatgcaccaatgatttccgagaaattaatgcgattggagctggaggctatggaacggtttaccgaggaaaacttccagatgggcagttagtggcaatcaagagatccaaggaagggtccatgcagggtggccttgagttcaagacagacatagaactcctttccag

SEQ ID NO: 51300 - DNA, 288 bp, Zea mays
agctcgaggttgtggtccggtgccgggaccggcccaagctgctgttcgacaccgtgtgcaccaacacggacatgaagtacgtggtgcaccacggcaccgtgagctcagtcccggcggcggcgcgtaccaggtgtactacatccgccacgtcgatggccacgccatccggtgcgatgtcgagcagcagcgcctcgtgcagtctctggctgccgccatcgagcgacgcaccgccgacggacttgagctggaggtgcggacgggagaccgcgcgggcctgctctcggacat

SEQ ID NO: 51301 - DNA, 293 bp, Zea mays
atcaaaaaatttcttaccgctgcaaccaggcacagctgatatagtcttcagtatctgttataatgctgatagatgggatttactctcaaaatacgcggagagatttgttaaggcaggtgtcaaactgcatcgagctgcatttgacatttggatggactttgctgccaaagttggggattctcaatctatttggcacattaatagtctaagaggcaggtctgtcaaacattatacacttgcaacagggtttgcatgtgcaaaggggtctctgcttgatcggaagccagaaaatg

SEQ ID NO: 51302 - DNA, 292 bp, Zea mays
cgacgtccagcttccatctgcctttgatccgtttgctgaggcaaatgctgaggactctggtgctggtcctggaacgaaggattatgtgcatgtgcgcatccagcagcgcaacggcagaaagagtctgactacagtccagggtctgaagaaagagttcagctataacaagatcctcaaggatctgaagaaggaattctgctgcaatggtactgtagttcaggacccagagctaggccaggtcattcagctccaaggtgaccagcgcaagaatgttgctactttcctagttcag

SEQ ID NO: 51303 - DNA, 294 bp, Zea mays
ctggtgcccaggtggcccccatcgtgcggcttgaggaggtactcgtcaccaccggtgaggaggacgaggacgtcctgctcgacatgaaggcgaactgtaccggtttgataaagacgggaatcaatggaaggaacggggcacgggcaccgtcaagcttcacaagaacaaggagaccggcaaggtccgactcgtcatgcgccaggccaagacgcttaagatctgcgcgaaccacctcgtggcccccaccacgagaatgcaggaacatgccggcagcgacaaatcgtgcgtctggca

SEQ ID NO: 51304 - DNA, 296 bp, Zea mays
gaggcccccagcatggagtccccggagcctgtcaagccggaacagggcttcgtgtggcaggaggccagtgagttcgaggctgacacggcgggttcgaccgtggaacgccacaagaaggcccagctggatcggctggacatcaacgtgcagattgacgactcctatctggtggaggcgggcgaccgccagaagcgctggcagtgccgcatgtgcgagaagtcctacacgtccaagtacaacctggtgacgcacatcctgggccacaacggcatcaagccacactcgtgcccacactg

SEQ ID NO: 51305 - DNA, 290 bp, Zea mays
gaggcccccagcatggagtccccggagcctgtcaagccggaacagggcttcgtgtggcaggaggccagtgagttcgaggctgacacggcgggttcgaccgtggaacgccacaagaaggcccagctggatcggctggacatcaacgtgcagattgacgactcctatctggtggaggcgggcgaccgccagaagcgctggcagtgccgcatgtgcgagaagtcctacacgtccaagtacaacctggtgacgcacatcctgggccacaacggcatcaagccacatcgtgccca

SEQ ID NO: 51306 - DNA, 291 bp, Zea mays
gagagacgcacatctatctgtcaagcgacgccgcggcctcgatcagagtcggaggcgaacacccccatggcggcggctggcggcggcgcaggagggaaggtatccttcaagatcatcctcacctccgaccccaagctccctttcaaagtgttcagcgtgcccgaggcggcgccctttaccgcggtgctcaagtacgccgcggaggagttcaaggtcccgccccagaccagcgccatcatcaccaacgatggaattggcatcaacccccagcaaagtgcaggcaacgtgttt

SEQ ID NO: 51307 - DNA, 185 bp, Zea mays
cacggggctgctgtaaggccgaggttgcggcggaagcggagaccatgttccgagcggcggctccggggcagctccggcgggcggcctcattgctacgatttcagagtaccctggtaatagctgagcatgcaaatgtttccctagcacccattactttaaataccattactgcagccacacgcctt

SEQ ID NO: 51308 - DNA, 288 bp, Zea mays
gatcaagaacggccgcctcgccatgttctccatgttcggcttcttcgtgcaggccatcgtcaccggcaagggtcccgttgagaacctcgccgaccacctcgctgaccctgtcaacaacaacgcctgggcctacgctaccaacttcgtccccggcaagtgagcgagggcatatacatacttgtatgcgtgtaccgtagacatacgtattcgtatatgtactgcaggagatgtaccagtatttgtgaagaagggagcatgggctcagagattgtaccagtagtgtacgta

SEQ ID NO: 51309 - DNA, 289 bp, Zea mays
gaccggctggacaagcggacatggacgtacatcttcggcgcctgctgcgccaccacggtgttcatcccgtccttccacaactaccggatctggtccttcctgggcctcggcatgaccacctacaccgcgtggtacctcgccatcgccgcgctcctcaacggccaggccgaaggcgtggcgcactccggccccaccaagctcgtgctctacttcaccggcgccaccaacatcctctacaccttcggcggccagccgtcacagtcgagatcatgcacgcgatgtggaagct

SEQ ID NO: 51310 - DNA, 290 bp, Zea mays
ctcgccgccgctccgccgtgttgctcgccgacaccgcgccgccgagtgccaaaatgccgttcacgaggttcgtggagatcgggcgagtggcccttgtaaactacggcaaggagtatggccgcctcgtcgtcatcgtcgacgtcgtcgaccagaacagggctcttgttgatgcccccgacatggttcgttgccaaatgaacttcaagcggctttccctgactgacatcaagattgacattaaacgtgtcccaaagaagactacactgatcaaggcaatggaggaagctgat

SEQ ID NO: 51311 - DNA, 289 bp, Zea mays
gtctgctacggacccgagtacacagttcacgagaaggacgacgacgaagcgtttgcggatccggaaggtctaacctggcaggtcatcaacgcggtcgtgggatcagggactaccgctctgtattgagagcgctcttccgtgccgtaatggtgaggcgtattcccgcatcctcgacacggcgaagctagggacgatcctgatcgtcaccatgccgcgtcctttgcgtaccgtcagcagcagcagcccccgctccgagaagcttgcctttcggagctctgcacctacgtaa

SEQ ID NO: 51312 - DNA, 286 bp, Zea mays
gatggctctgaggatgtgggcgagctcagccgccaatgcgctcaagctctcggcgggcggcgcggatcccgggctgctgccttctctatctccaggttcttctccactgttcacgatgggttgaagtacactcagtctcacgaatgggtcaagacgacgggcgacagtcgccaccgttggcatcacggaccatgctcagggccacctgggagaggtggtgttcgtggagctgccggaacccggcacgaaggtggccgcgggaggacccttcggcaacgtggagagc

SEQ ID NO: 51313 - DNA, 288 bp, Zea mays
gggcggcgcgtggtctacgccgagtgacagagacgctcaggctgtgttctcaggatgaccgagtgggagacagcagcaccagcggtggcagagaccccagacatcaagctctttgggaagtggagcaccgatgatgtgcagatcaatgacatttccctgcaggattacattgcagtgaaggagaagtatgccaagtacctgcctcacagtgcagggcggtatgccgccaaacgcttccgcaaagctcagtgtcccattgtggagcgcctcactaactccatgatgatg

SEQ ID NO: 51314 - DNA, 200 bp, Zea mays
aatggattcacattatgtgcattcgagacaggtccaaggaattgtatctctaaagtgaaaatttcctttttcaccacgatgaatgcatgttcatactctctcaccggtaaaaaaaaaaaaaaaaaaaaaaaaaaaaaaaaaaaaaaaaaaaaaaaaaaaaaaaaaaaaaaaataaaaaaaaaaagaactaaaagaagaaa

SEQ ID NO: 51315 - DNA, 287 bp, Zea mays
gcggctcggcgtgcagcttcagaccatcgcgacagacttccagagggtgttcaagatccacgacaagctctacatcggcctctcagggctcgccaccgacgcccagacgctgtaccagcggttggtcttcaggcacaagctgtatcagctgcgcgaggagagggacatgaagcctgagacctttgccagccttgtctctgcgctcctctacgagaagagatttgggccatatttctgccagccagtcattgctggacttggagatgacaacgtaccattcatttgta

SEQ ID NO: 51316 - DNA, 280 bp, Zea mays
cgctaagattgacatgttcaagggtaccatgaggctggtggtggacaagtgggggcggattgaggtgactcagcctgctgatttcaaggtgaaccaagacaacaacatgtcgctggtggagtacgagctggtggatgtggacgaagaggagtgactagaaacgaagtcgggctgtggacatatattttggttatggaggcggtagcgttaggctcctatctagctattgttatcctggaccgctggcgattgggactttgttttaagtttatcttgaaga

SEQ ID NO: 51317 - DNA, 277 bp, Zea mays
caagtgtcccctgctgaagccatgggccttgactttctcctatggccgagccctgcaggcctctgctctaaaggcttggggtgggaagaaggagaacctgaaggcagcccaggaggagtacatcaagcgagccctggccaacagcctcgcttgtcaaggaaagtacactccaagtggccagtactggagccgcagccagtgaatctctcttcatctctaaccatgcctactaaccagagctgatctaaggctgctccatcgacactccaggcccctg

SEQ ID NO: 51318 - DNA, 283 bp, Zea mays
atcaatggatggggaccccccagtacttcgactctttgaggagagagattacaaaaaacataggtatgaacaacagaagaagaaaaagattcagcagaaaagatctgtcgcgaaacgcatgggcttgaaggagctgaaaatgggatacaacattgacatccatgattacagcgtgaggcttaaagctgcaaaaaagtttcttaaagctggcgacaaggttaagataattgtgaacctgaaaggacgggaaaacttgtataaaaaagaagctatcgaactcctt

SEQ ID NO: 51319 - DNA, 284 bp, Zea mays
cgaccttgctagaaaagttgaagtcgatctacttgaagggagaagggcttccgcatgatcgtattgttccaacagttggccttaatattgggcgtattgaagatgcaaatgtaaagcttgttttctgggatctgggaggccagcctggcctacgaacaatatgggagaaatattatgaggaagcccatgctgtaatatatgttatcgactctgcttctgcatcatcatttgaggatgctaaatctgctctcgagaaagttctccgccatgaagatctgcatgga

SEQ ID NO: 51320 - DNA, 277 bp, Zea mays
attggacttgagaatggaaattacacggtcacacttcaatttgcagaggttgactttccagacatgcagtcttggagaagccgagggaggagggttttcgatatctatgtccagggagagcgcaaggagcagaactttgacattagaaaggcagctggagggaaatctttcactgctgttaagaagcagtatgttgttccagtaaccaaaaacttccttgagattcatctcttctgggctggcaagggcacttgttgcattccttataagggatact

SEQ ID NO: 51321 - DNA, 273 bp, Zea mays
ttgatggcgtgatgtctcacagaaagttctccgctcccagacatgggtccctcggcttcctgcctcggaagcgcacagcaggcatcgtgggaaggtgaagagcttccctaaggatgacccgtccaagccggtccacctcacagccttcctgggatacaaggctggcatgactcacatcgtgcgggaagtcgacaggccgggatccaaggtgaacaagaaggaggtggtggaggctgtgaccattgtagagacaccacccatggtcgttgtggg

SEQ ID NO: 51322 - DNA, 279 bp, Zea mays
gcgaacagtgagaaaagtctgcagaaggcagttgcgaaccagcccatcagtgttgcaattgaggctggtggcagagcatttcagctctacaactcgggtatcttcacaggaacctgtggaacagcgttggaccatggtgtcacggccgtcggctacggcacagagaacggcaaggactactggatcgtgaagaactcttggggcagcagctggggcgagtccggctacgtcaggatggagcgcaacatcaaggcgtccagcggcaagtgtggtatcgcc

SEQ ID NO: 51323 - DNA, 280 bp, Zea mays
ggtgctctctgcagatgacaaaaccaacatcaagaactgctgggggaagattggtggccatggtggtgaatatggcgaggaggccctacagaggatgttcgctgccttccccaccaccaagacctgcttctctcacattgatgtaagccccggctctgcccaggtcaaggctcacggcaagaaggttgctgatgccttggccaaagctgcagaccacgtcgaagacctgcctggtgccctgtccactctgagcgacctgcatgcccacaaactgcgtgtg

SEQ ID NO: 51324 - DNA, 275 bp, Zea mays
cctgcagcgccgccagacactccgtagtctgtaccccaagcaccggcgcggcggcggcggctaccatggcagtcgggaagaacaagaggatctccaagggaaagaagggtggtaagaaaaagaccgtcgatcccttctctaagaaggactggtatgacatcaaggccccatcggtcttcagtgtgcgcaacattgggaagactctcgtgtccaggacacagggtaccaggattgcctctgatggtctgaagcacagagtctttgaggtttgtcta

SEQ ID NO: 51325 - DNA, 248 bp, Zea mays
gtgttcactagcaacctcaaacagacaccatggtgcatctgactcctgaggagaagtctgccgttactgccctgtggggcaaggtgaacgtggatgaagttggtggtgaggccctgggcaggctgctggtggtctacccttggacccagaggttctttgagtcctttggggatctgtccactcctgatgctgttatgggcaaccctaaggtgaaggctcatggcaagaacgtgctcggtgcctttagt

SEQ ID NO: 51326 - DNA, 254 bp, Zea mays
gtcggataaggagaagaaggtctttgggatcgtgatccccatgcaggtcctggccatcgtggcctacatcatcatcgagtcccgcgtggaaggcgccacgactacgtgctgtggaaggagattttgttcctggtggacctcatctgctgtggtgccatcctgttccccgtagtctggtctatccgccatctccaggatgcgtctggcacagacgggaaggtggcagtgaacctggccaagctgaagctgttccg

SEQ ID NO: 51327 - DNA, 247 bp, Zea mays
cactgtccagtgcgcgcgtcaagcttgcttagctagccgccatggcctccctcgccgccgtctccgtgaagcccgtggccatcaagggtctcgccggcagctccatctccggaaggaagctcgccgtcgccaggccgtcggcccgctccatccgcaggccccgcgcagccgccgtggtggccaagtacggcgacaagagcgtctactttgacctcgacgacatcggcaacaccaccggacagtggga

SEQ ID NO: 51328 - DNA, 253 bp, Zea mays
gaacgaggccctatgccacgcctgcaacaagacaggtcacttggcacgtgactgccctacttcaggtgctaacgtcaagctatgcaacaaatgctttaaatcaggccacatcgccgttgactgcaccaacgaacgggcctgcaacaactgccgtcagccagggcacatagctcgggagtgcaagaacgacccggtctgcaacctgtgcaatgtctccggccacgtcgcgcgcgtctgcccaaagacgactctg

SEQ ID NO: 51329 - DNA, 132 bp, Zea mays
gcaggacaggccgctaaagtgtgacgagcccatcctcagcaaccgatctggagaccaccgtggcaaattcaaggtggcgtccttccgtaaaaagtatgagctcagggccccggtggctggcacgtgttacca

SEQ ID NO: 51330 - DNA, 238 bp, Zea mays
ataaaagatctttgttggtggtatcccaccatctcttaccgaagataaattaaaggagcacttctcatcgtacgggaaggtggttgagcatcagattatgcttgatcatagcactggacgttcacggggctttggatttgtcacatttgaaagcgcggatgctgttgaaagggttatgtcagaggggagaatgcatgatcttggagagcagcaggttgatattaagaaagctgaacca

SEQ ID NO: 51331 - DNA, 243 bp, Zea mays
cgcggcttgatcctgtaacagggaaaatatatcatttgaagtattctccgccagagaatgaagaaatcgcttcaaggcttacacaaagatttgacgatacagaagaaaaggttaagttgaggctggagacttattaccaaaatatcgagtccttgctatcaacatatgagaacattattgtcaaagtgcaaggagatgccacagtggatgctgtctttgctaagatcgacgagctgctgggtt

SEQ ID NO: 51332 - DNA, 246 bp, Zea mays
atccagccaacgattttctcagatgtccaggacggcatgaagattgctcaggaggagatatttgggcctgtgcagtcgatcctcaagttcaaagacctcaatgaggttatcaagagggcaaacgcgagccagtatggattggccgccggcgtgttcaccaacagcctggacacggccaacactctgacgcgcgcgctcagggccgggaccgtctgggtgaactgcttcgacgtcttcgatgctgcg

SEQ ID NO: 51333 - DNA, 164 bp, Zea mays
atgatatcaaacatctcattcacttacaggagcatttattccaagaaagctatgactgacatggatagcaccaacgtgtatgcttacatctcaataatcgctctaattgtttgcattccacctgcattgatctttgaagggcccaagctaatgcagcatggatt

SEQ ID NO: 51334 - DNA, 240 bp, Zea mays
gctgcccatggcacggttacccgtcatttccgtgtccaccagaaaggaggcgaaaccagcacgaacagcattgcttcgatctttgcatggacaagaggacttgcccacagggcaaagctcgacgacaacgctagactactcgacttcgctctcaaactcgaggctgcttgcgttgagaccgtggagtccgggaagatgactaaagatctggcgattcttgtccatggatcttccagcgtc

SEQ ID NO: 51335 - DNA, 251 bp, Zea mays
  unsure (1)..(251): unsure at all n locations
gcacccggcacaacgtgatcctgggcatcgcccgcggcctgctgtacctccacgaggactcgctgctgaaggtggtccaccgggacctcaaggccagcaacgtgctgctcgaccacaagatgagcccaaagatctccgacttcggcatggccaagatcttcgaggacgacacacacgcgatcaacacgggccgcgtcgtcgggacctacgggtacnatggcgccgagttcgcgttggacggcgtcttctcg

SEQ ID NO: 51336 - DNA, 238 bp, Zea mays
tggagccgccccatgtgttcatcaccgccacggcagctgggaacaggctctacctcttcagtgtaactgcaaacggtctgcagtggaagaggcattacaaagacctcaaacagatagcacaatcatttcgagtcgtgtagggttccaattcctactactactttttttttacagcgcctggctcttgttgatatgattagaggacatgggagacggtaatacggagagaggacaagtg

SEQ ID NO: 51337 - DNA, 284 bp, Zea mays
atttggagcttggagttgatattggttcatcaacggtggcacgaggtgtggtgagcctagtgcttggctacttgaacaatcttgtgatcgaaatggccttcttggtacagggaaacacaaatgaagaactcccggaattcctcctaggtacctgacgactgaattacctggatgcctccaaggcagtgtccatagacgagtgctaggaccccaactgacctcattttttaaagccaagtacaccaaaagacaaaaaaaaaaggctgaatccccattccttgctg

SEQ ID NO: 51338 - DNA, 254 bp, Zea mays
ctcagggccatcggctacagcttcgattacgatgagtaccacgccttcgtccatggaaggctgccgtacgacaacatcaagcctgaccccattctcaagcacattctcaagaacctgcgcatccgcaaactcatattcaccaacggtgacatggtccacgccgtgagagccctcaagaggctgggcctggaggactgcttcgaggggatcatctgcttcgagaccctgaacccgccctgcccgccgcagggaga

SEQ ID NO: 51339 - DNA, 276 bp, Zea mays
gcctgcttctctggcccctggtcctgtcctgttctccagcatggtgtgtctgaagctccctggaggctcctgcatgacagcgctgacagtgacactgatggtgctgagctccccactggctttggctggggacacccgaccacgtttcctgtggcagcctaagagggagtgtcatttcttcaatgggacggagcgggtgcggttcctggacagatacttctataaccaggaggagtccgtgcgcttcgacagcgacgtgggggagtaccgggcggt

SEQ ID NO: 51340 - DNA, 282 bp, Zea mays
caagcgtaaaggtgtgctggaggttactcatgagttgcttgaaagattagaagctcacctaagagcaactgcagaattaatggtcaccgcaaacatgaggggcaacagcgcagaagaagtggcagagagagttcttagccaaacatctatatggggattgcagggcccgactgtaagtcctgtctatcgcagacgtgatggaaaagttgatgtggaatactatgccattaatgtggttgttccacagaagttgctttacaaatctatccaacaactgagatc

SEQ ID NO: 51341 - DNA, 270 bp, Zea mays
accgaggtcgcacgcgtgagacttctccgccgcctccgccgcagacgccgccgcgatgcgctacgtcgcctcctacctgctggctgccctagggggcaactcctcccccagcgccaaggacatcaagaagatcttggacagcgtgggtatcgaggcggacgacgaccggctcaacaaggttatcagtgagctgaatggaaaaaacagtgaagacgtcattgcccagggtattggcaagctctgccagtgtacctgctggtggggctgtag

SEQ ID NO: 51342 - DNA, 277 bp, Zea mays
gcgccttcgggatgcacatgctcgcctgaagaagcggggggttccacttgctgcaaaccaggtgaactacagcctcatatatagaacccctgagttgaatggcgtgaaggcagcctgtgatgagctcggcatcaccttgattgcttattccccgatagcgcaaggtgttctgacaggtaagtacactccagaaaacccccctactggtcctcgagcaaacacatacacccctgagttcctcaccaagctccaaccacttatgaacaggattaaagag

SEQ ID NO: 51343 - DNA, 282 bp, Zea mays
atcctgctggagtttcagatgttaaagctgaatcagcaacatgtctggatcctgatctattcaccaattttttgattcctagttggtttggggatgaaaggcaagggactacaaactgcaatcctttcccactgcctgaaatttatgggacatcccaaagcaaaaagcgttctgctctggaagatatccaaaagatgtttcgggagctgcagcttgatgagaaccggaaaagggaattggcaactgcccttcacgttcagttcaaggattggttatacgctt

SEQ ID NO: 51344 - DNA, 124 bp, Zea mays
gtatcaccatggcggctgggaccctgtacacgtatcctgaaaactggagggccttcaaggctctcatcgctgctcagtacagcggggctcaggtccgcgtgctctccgcacgaccccacttcca

SEQ ID NO: 51345 - DNA, 270 bp, Zea mays
ggaaccggcgatatggctgccgctgtgccccgcgccgcatttctctccccgctgcttccccttctcctgggcttcctgctcctctccgctccgcatggcggcagcggcctgcacaccaagggcgcccttcccctggatacggtcactttctacaaggtcattcccaaaagcaagttcgtcttggtgaagttcgacacccagtacccctacggtgagaagcaggatgagttcaagcgtcttgctgaaaactcggcttccagcgatgatctc

SEQ ID NO: 51346 - DNA, 288 bp, Zea mays
gtgagatggagttcaccgaagctgagagcaacatgaacgatctggtgtccgagtaggagcagtaccaggatgccactgctgatgaggaggcggaatacgaggacgaggaggccatccaagatgagtaagggtggtttgggccctgccacatttggacccttgtatcctttcgttccggggcttgcctatagtttgcttgttgtattcgctcaagttatgcggtatgtagtagtactttcgtgcgtagatgctgtatgctaccacaaagactttgttcacctgcactgc

SEQ ID NO: 51347 - DNA, 267 bp, Zea mays
gtccttaccactgggttccgcaacctagaagatgaggcacggtgaactgactgtagggtctgtgtatgacaataatggctgccaaatgttttataaggtacggaagttgtagattgagaccatgtatgagaattttccccaccgctactcatttctttgccaccactattttagtcatcagtgctggatgggcaccctgtttatttcgacgtaacctttattgctagcattgtaataagcgatggcatgcttgtagttgaatcagta

SEQ ID NO: 51348 - DNA, 206 bp, Zea mays
gagcagtcaagatgtgtgacttcaccgaagaccagaccgcagagttcaaggagggcttccagatagtttgaccgaacaggtgatggcaagatcctgtacagccagtgtggggatgtgatgagggacctgggccagaaccctaccaacgccgaggtgctcaaggtcctggggaacccctagagtgatgagatgcatgtgcaggtgct

SEQ ID NO: 51349 - DNA, 287 bp, Zea mays
tctgttcatagtcagcagctcatttggagcattcctcctgctcatttactgggcgtttataacccctattgtgtatgacttctacaaccatgaaatggagtcaacactgtttgtcgatctttttttcaagttcatacagaacttggcgtttatgggtgccctgcttttcttccttgggatgaagaactcaattccaaaacgtcgctccaagggaaggacaacaaaaaccaagacaaactgatgtcagtggttgtaggaggggaagcaattgggctcattatgtttgc

SEQ ID NO: 51350 - DNA, 279 bp, Zea mays
  unsure (1)..(279): unsure at all n locations
gcaagtatgagaagaaggtgtatgtgctccccaagcaccttgatgagaaggttgctgttctccacttgggcaagcttggtgccaagctgaccaagctcaccaagtctcaggccgactacatcagcgtgccgatcgagggtccctacaagcctgcccactaccggtactaggcagccagcacacggcttgcagctcactcgggccgttgtgtgctacgaagtcccctacnatgacctgtcagttatcttttgcatgcatatgcattatcatatacgcatc

SEQ ID NO: 51351 - DNA, 162 bp, Zea mays
gaagagttcatcgaaaacgcagggtcagttttcttgggccaatggaccccagagagcgtgggcgattatgcgagcgggacgaaccatgtccttccgacctatggactagcaaggatgtacagcggtgtatcgctgaactctttcctcaaatacatcactgtc

SEQ ID NO: 51352 - DNA, 192 bp, Zea mays
cgctgatgctgatgatgcacagtacaacctagatggcacggacgtcgatgggagccgcattaattgttaaatttgctaaaggggttccccgtggttctggtggttcacgtgattacaacggaagaggacctccaccaggaacaggccgttgttttaactgtggagttgatggtcactgggcaagagactgtc

SEQ ID NO: 51353 - DNA, 192 bp, Zea mays
cacatccccaatgggaactggccacccagtactttgctgacagggacatgttctgtacttgccgaagtacctgaggaggatctgaagaggaaatgatggcctgtggaggctcaatccagaccagtgtgaatgctctgtcagcagatgtgctatgtcgatgccaggtgtttgaagagacccagattggaggcg

SEQ ID NO: 51354 - DNA, 190 bp, Zea mays
ctggttgcgaatccggtgactgcagagcggtgctctcgcggcgtggcactgcccattgagatgtcccaaggaccacaggccttgctgcatgaacgaaaggaagcgcgtagagtcacttggcggctacgttgacgacggttacctgaacggtcagctggcagtgaccagagcgctcggtgattggcatctg

SEQ ID NO: 51355 - DNA, 189 bp, Zea mays
acgagacctaatctgattctcaatgctgagaaagagcttgggattgtttgtggaattcaggaccgattggcttaggtttatggtggactgtttatatggattttagccagggtcatatggacaagctgggtcatggcatatacatgccattggatgtcaatctgcttcctcctctatacctcatctatg

SEQ ID NO: 51356 - DNA, 181 bp, Zea mays
gacgacatggtcaaggtcatctcctggtacgacaacgagtggggctaaacccaaagggtcgtcgacttcgctgacatctgggcaaccagtggaagtgaagcgttgcattgtaatagcactttgtaactcctcaccctccacagggctttgggattcaccccgaaatgactcactttcggtg

SEQ ID NO: 51357 - DNA, 185 bp, Zea mays
caaggaggcagatgacttgctggcacaaggaaaatatcttggtcctgtcaaggcttccatatgggcctcaaagatataattgctggaccacactataagaccacttggggctcaaggacgtttaaaaaccaagtccttgatagtgaagcttatgtgtacagaagattgaagtccgctggagcagt

SEQ ID NO: 51358 - DNA, 187 bp, Zea mays
agatgctccaatttcaataaccttggatgacaccaagccagatgggtcactgtctggcatcattgggctgtaattcttgccccgtaaagcttatcgacttgctaagctacataaggaaataaggaagaagaaaatctgtgagctctatgccaaagtgctgggatcccaagaagctttacatccagtg

SEQ ID NO: 51359 - DNA, 181 bp, Zea mays
actgcgaatccggtgactgtcgagctgtattaggaaagcgaggccgagctgttgaactctcctagagaccacaaacccagctgcatagttgaaaggctcacaatcgaaaacctgggtggtaccgtctttgatggctacctcaacggtcagctggctgtagcaagggcaatcggtgattggc

SEQ ID NO: 51360 - DNA, 184 bp, Zea mays
agcatccgaagaagtactcagctcgctacgtgtgctcactggtggctgatttccaccggacgctcatatatggcggggtcgcatgaacccaagggaccatctgcggctggtttatgaggcgaaccctctcagtttccttgctgaacaggctgggggtagagggtcagatggcaagatcagaatc

SEQ ID NO: 51361 - DNA, 181 bp, Zea mays
attcacaaagcattttcagaagtatggagctataactgattctgtgatcatgaaggactagcatattaggatgccccgtggatttggatttgttacattttccgatccgtctgtgcttgacagggttctagaggatgaacatgtcatagatggaaggacggttgaagtcaaaaggactgtt

SEQ ID NO: 51362 - DNA, 184 bp, Zea mays
ccagggccaaggtgtccgagctgatggagatgtactctggaaaggggagagtcgtcatgctaaggtgtcgtcgacatggacatcttcaaggggatcagcctcaagctccttgccatggaggagcttctgcgtcagaccccgagtggcgggggaagctggtgctggtgcaggtggccaacccggc

SEQ ID NO: 51363 - DNA, 284 bp, Zea mays
agcgcgtccagcagtgcgcattcctccaagtctgcgaagtccagcaccccatcctcgcccactggcacgtcatcctcagactcgggaggacatcacatcggcaggggtgagcggcagggccagtggctgcgcaggagaaggctggatggggccatcaacagggtccccgtgggattctaccagagggtgtggaagatcctccagaagtgccacggtctctccatcgatggttatgtcctcccatcctcgacgacccgagatatgacccgcatgatatcaagttt

SEQ ID NO: 51364 - DNA, 162 bp, Zea mays
agctgacagcattcgggccgagatgtctcgctccgtggccttagctgtgctcgcgctactctctctttctagcctggaggctatccagcgtactccaaagattcaggattactcacgtcatccagcagagaatggaaagtcaaatttccggaattgctatgt

SEQ ID NO: 51365 - DNA, 193 bp, Zea mays
acggcaaaaactagatgacaacaacttgtgtggaaacggttctgctaagaaggatgagtcctgtgactgcaactccagctttgagtgcaatatctgtcttgacccagctaaacagcctgtggttacaccctgcggtcacctcttctgttggccatgcgtgtaccagtggcttcatgcacattcaccccagtct

SEQ ID NO: 51366 - DNA, 143 bp, Zea mays
atttccccgtgcttctccgccgtcgaggccgcgtcccagtgcaaagagaccacgactcagatggccagccgctgggtccggcccgaggtgtacccgctgttcgcggcaacgggcgtgtccgtcggcatctgcagatttcagct

SEQ ID NO: 51367 - DNA, 190 bp, Zea mays
ctggttgcgaatgccggtgactgcagatcggtgctctcgcggcgtggcactgccattgagatgtccaaggaccacaggccttgctgcatgaacgaaaggaagcgcgtagagtcacttggcggctacgttgacgacggttacctgaacggtcagctggcagtgaccagagcgctcggtgattggcatctgg

SEQ ID NO: 51368 - DNA, 175 bp, Zea mays
atttatgtcttgttcaggctacatcagatcttatatgagagactactttcagcaaaaactaactcttttaccgctgaaaagaaatggaggaattccaaggatacaaaccctcctgatctatatgcaaagtttatgagtgcgcgttacaacttgctcgatggttcttctgacaaca

SEQ ID NO: 51369 - DNA, 268 bp, Zea mays
caagttcttgcagcctggagcatatgatctggttggttacatagtgtatgagatcgaccagcacccttaccagaatgtattctacaatggcactatcgaggttgttgaggctggaggcttactcagtgttgagtctgtgttcctcatcacccttggatttgcacttcttggtctgtttggattgtgggcatatggccaggttcagcagctctcgaagaaaacaaagaaggcacccaaggtggagctcggaactggaacaactgatgcc

SEQ ID NO: 51370 - DNA, 284 bp, Zea mays
agtgactcttatacgccaagttgctgagaaagtgttcgccaatgtgggcaagactatcgggtacaaagttggaacaatgattgagatccccagggcagctctggtggatgatgagatagcggagaaggctgaattcttctccttcggaacgaacgacctgacgcagatgacctttgggtacagcagggatgatgtgggaaagttcattcccgtctatcttgctcagggcattctccaacatgaccccttcgaggtcctggaccagaggggagtgggcgagctgg

SEQ ID NO: 51371 - DNA, 283 bp, Zea mays
cggaagagttcatcgacaacgcagggtcagtttacttgggccgatggaccccagacagcgtgggcgattatgcgcgcgggacgaaccatgtgcttccgacctatggttacgcaaggatgtacagcggtgtatcgctgaactctttcctcaaatacatcactgtccagtccctaacagaggaagggctgagaaagctggggccgtacgtcgcgcagatggccgaagtggaggggctagaggcgcacaagagagccgttacccttacgctgcaagaggttgaggc

SEQ ID NO: 51372 - DNA, 283 bp, Zea mays
attcctgaccttgggctacggctgaccgttttttgtggtgtactacgtgccatcatgtccgtcctgacgccgctgctgctgcggggcttgacaggatcggcccggaggctcccagtgccgcgcgccaagatccattcgttgccgacggacgggaagcttgggatcatggaattggccgttgggcattactcctgcttcgtgaccttccacctgccagcaggctggatcctgtcacacctggagacctacaggaggccagagtgaaggggtccgttctgtccct

SEQ ID NO: 51373 - DNA, 282 bp, Zea mays
gcgaccgggggggctgattcagctggcgagggaagcgctcgccgtgacgctgcacatgccgctgacgattgagcttgacctgcatcgctgttccggcgatgaaattgttggaggggtccttgacgttcaatcctgcgattgacggccagcacacggaacgacttgttggacaaaatggcgctgaattggaagtggcaatttcatggtcggagtacccttggtaatgcctattattattagccattaattcaagagtgcatttttatatgtatcaatgactaa

SEQ ID NO: 51374 - DNA, 291 bp, Zea mays
cggagttccagttggtggagacaacaacgttgtccacaaggccgaagatgttgtgagcactctgcttgccaagggtttcgtgctaggaaaagacgcggttgacaaggccaaagcgttcgctgagcagcacggcttcacatccacagccggtgctaaggtggcctccatcgacaagaagattgggctgagcaataagattaacacaggcacttcgttggtcagcgggaaggtgaaggagatggaccagaagttccaggtctctgacaagacaaagtcagcgttcgcggctgc

SEQ ID NO: 51375 - DNA, 283 bp, Zea mays
ctcgacgcctctcctcctctcctatcccacacgttcatcgccccctccctccggtctgcgctcccacagcctcacccctgcgcccccgccgattcgcgtcgccctttgttggaaggaacgatggagcagaccttcatcatgatcaagcccgacggcgtccagcggggcctgatcggggacatcatcagtcgcttcgagaagaaagggttctacctcaaggggatgaagttcatgaacgtggagaggtccttcgcgcagagccactacgctgacctttccgaca

SEQ ID NO: 51376 - DNA, 280 bp, Zea mays
cgactatgttccccggtatcgctgatcgtatgagcaaggagatcacttcccatgcacggggcagcatgaagatcaaggtcgtcgcaacacctgagaggaagtacagtgtctggataggagggtcgatcctagcctcgctcagcactttccaacagatgtggatatccaaggaggagtatgatgagtctggcccggcaatcgtccacaggaagtgcttctaggttccgcaagttcctcattgttatctagtctcaagttatgcccccgtcatttctcgcga

SEQ ID NO: 51377 - DNA, 227 bp, Zea mays
cctcctaagataacgtacgtgcactcagaattccgctccagaagtaatacaaaatctatcaacgcggatggtactctgttgtttatagtccctgctgctaaccacccggggtgctggtgctgctggagaggcattgtacctgtccatgcatatatgatatatatatgttgtaacgttgtgaaagcaaacaatcttgggtaccaatgtttgttattctttcgctcgat

SEQ ID NO: 51378 - DNA, 279 bp, Zea mays
gtcttcgaggacctgctcgcgcagggcggcctcgccgaggtcgagaagaagaacgcgcgcaaggacggcgcacactacgacaccatcgatgccagcggagggtactacgtctgccccgtcgacaagtccgtgcgctcgcacatgaacgtgcccttcaccctggccaagggcccggacttcgagaagcagttcatcgccgaggcggccaaggagggcatggtgcagctcaaggggcacaggtctgtcggcggtgtccgcgcctccatctacaatgccatg

SEQ ID NO: 51379 - DNA, 261 bp, Zea mays
cggatgattctagattggtggagttgttcagcgagcatggtaaagtagttgatgccagagttgtctatgaccgagaaactgggcgttcgcggggatttggttttgttactatggcatcgcaggacgaattggatgatgctattgctgcccttgatggacagagtttggatggccgtgccttgcgggtgtctgttgcagaggagcggccacggcgaggtttctaatgaggttgtatcgggtggactgcacgcttgttccatg

SEQ ID NO: 51380 - DNA, 245 bp, Zea mays
ggagcttggctgaaaagctgagctctgaaccagagttcctggagaaccatgtcccaatgcacaaggttccagtcggacagttcaaagtccccaagttcaagatatcctttggatttgaggcatctgagttgctcaaaggtctcgggctccagcttccgtttagtgctgaagcggacctgtcggggttagttgattcaccagagggacggaacttgtctgtttcgtccgtctcgcggcaagtcatt

SEQ ID NO: 51381 - DNA, 263 bp, Zea mays
gcctggaggtgccactcaccatgggaatgatcaaggccgtcattctcgaccttttcggtgccggcagcgagacgtctgcaagtacactccaatgggccatgtcggagctcgtaagcaacccaagagtgatggaaagggcacaggccgaggtacgtgagaagctccaagggaagccaacggtgaccgaagatgacttggtcgacatgaggtacatgaagctcatcatcaaagagaccctaaggatgcatccggtggtgccattg

SEQ ID NO: 51382 - DNA, 265 bp, Zea mays
gtattctaccaccagggccagtgttgtatagccgcatccaggatttttgtggaagaatcaatttatgatgagtttgttcgaaggagtgttgagcgggctaagaagtatatccttggaaatcctctgcaccccaggagtcactcaaggccctcagattgacaaggaacaatatgataaaatacttgacctcattgagagtgggaagaaagaaggggccaaactggaatgtggaggaggcccgtgggggaataaaggctactttgtc

SEQ ID NO: 51383 - DNA, 257 bp, Zea mays
gtgtgtgtgtgtgtgtgtcatatgaacacacagggcctgagatctggaaggacaccgccggtaaggtggacatattcgtggccggttcaggctcgggaggcacggtgtctggcgtcggcaagtacctcaagacgcagaaccccagcgtcaaggtcatctgcgttgagcctgccgagagcccagttgtttcaggcggggaaccaggcagccacaagatccagggaatagggccgggattcataccggaagtgctggac

SEQ ID NO: 51384 - DNA, 262 bp, Zea mays
acagcatcttcgggccctcagcctaaagatgacgacgaaattaaaaagatggccgaagctatcatggatcaggttgtcgatcgactgctgaacgaagctgcagagatagtacttagggaagactaagtgctactgcaaaacacatttgatatatgatttgtgtaatattactgtaatcctgtatgtaatgtcattgttttatgattcaattctttacgatgcatgacactttaaacacgtaccatttttgagtcttcgacga

SEQ ID NO: 51385 - DNA, 176 bp, Zea mays
ctctttacaaggtgtcaaaggatcatttctatcagtttatatggcgcccgagaccgccctcactactgacggccgagaaggaagaagagatctcaaggaacctgaagaagtatagcaagaagtacgaacaagaagaccaggatgcattcaatcagttgagcgaacaggaccgcaag

SEQ ID NO: 51386 - DNA, 204 bp, Zea mays
gataaaggttatttggcatttgaacatataacatgggctccataccagaccaagctgatagacaccgagcttctgacccctgttgagatcgactgggtgaacacgtaccactcagactgccggaagatcttggagcctcatctgaacgagcaggagaagcaatggctgatgaaagctactgagcccgtagctgcaagaggctga

SEQ ID NO: 51387 - DNA, 255 bp, Zea mays
gtaatgcggagatgcaggaagttggtgttggcctatatcccagtatctctttgctcaatcacagctgtgaccccaactgttcgattgtgttcaatgggccccacctcttactacgagcagtccgagacatcgaggtgggagaggagctcaccatctgctacctggatatgctgatgaccagtgaggagcgccggaagcagctgagggaccagtactgctttgaatgtgactgtttccgttgccaaacccaggaca

SEQ ID NO: 51388 - DNA, 253 bp, Zea mays
ctcacaactgtccaacagcgtggtgctgcaatcattaaagcgagaaagttctccagtgctctctcggctgctagctctgcttgtgaccacattcgtgattgggttcttggaacacctgagggtacatttgtttccatgggtgtgtactctgatggttcatacggtgttccttctggactcatttattcattcccagtaacatgcagtggtggtgaatggaaaatcgttcaaggcctcccgattgatgagttct

SEQ ID NO: 51389 - DNA, 254 bp, Zea mays
gataaaggttatttggcatttgaacatataacatgggctccataccagaccaagctgatagacaccgagcttctgacccctgttgagatcgactgggtgaacacgtaccactcagactgccggaagatcttggagcctcatctgaacgagcaggagaagcaatggctgatgaaagctactgagcccgtagctgcaagaggctgagccttttcgtcaacgttgcatgccaccgagcgccaggctcatcttctgcg

SEQ ID NO: 51390 - DNA, 262 bp, Zea mays
gtatcgccaagattactgccaatgatccttccctaagtgtacccggacgcagaaatggttacagcaagcggtcctcggactggagcaccgttccagaagctctggaggacgtcactgcactgttttatgatgaggacaggaatgagatctacaccggcaacagccatgggctggtgcatgtgtggtctaactagatagtagcatgtacatacatcatttcgcccttttgatttgacttggttagctttactgcatgctgtat

SEQ ID NO: 51391 - DNA, 248 bp, Zea mays
gcagtggcagctcggtacgctcagcatcaacatggactaaagcgtgtgatgataatagattttgatgttcaccatggcaatgggacgtcagattcattttatgatgatccagatatcttcttcttgtcaactcaccagcttggaagctaccctggtactggtaagatcaatgaagtcggacagggtgatggtgaaggcacgacactcaaccttcctctgcccggtggcgcaggtgactacgcaatgag

SEQ ID NO: 51392 - DNA, 248 bp, Zea mays
ccgggggtttgggatcctggacgtgggctaccgctcgcaggaggaggcctgggctgctggtggcagcggcgtgctgctcaagaccacaaacggagggaagagctggatgcgcgacaaggctgccgacaacatcgccgccaatctctactccgtcaagttccttgatgacaggaaaggcttcgtgctgggcaacgacggcgtgttgcttcggtatcttggctgacattctatgtatatgtgtgtaccgc

SEQ ID NO: 51393 - DNA, 110 bp, Zea mays
gcgtgacgaggaacttttaccctggcgagaaactacccctgtagcacgacgagctggaatcccagaattcgttgcttgatattcttgatgctgggaaccctgatcccatg

SEQ ID NO: 51394 - DNA, 209 bp, Zea mays
ttggagaggctcggcgattacctgatcgaacagggcttctaagtttgtcatagtgctattttggtgcattgggcacttaggtttgcacctcatttggttctgtaatatgtgggcttgtgcatgtgcttggcgtattgcatgcagtgaataatttatcttcgcgttgggttcgtgacaatgttgggaacggatttgaattggggtttatg

SEQ ID NO: 51395 - DNA, 273 bp, Zea mays
gcggcaaatggcaggcggcagggttgcacatgctaccctcaagggccccagcgtggtgaaggagatcttcattggactgaccctgggtctgatcgctggaggtatgtggaagatgcaccactggaacgagcagaggaaaactagatccttctacgacatgcttgacaagggccagatcagcgtcgtcgtcgaggagtagttcctacgtgtcaacactgaagtttttttttccagatgtttttggaaaactcatctctgaagagcatgacaagt

SEQ ID NO: 51396 - DNA, 276 bp, Zea mays
atcagcacctccaccgactgctccagggtgaactaaaacctagaccacgcgcgacgacggccgcctgatcgatcgaccaaccattccgccgtcgccgccggccggatcatcgatcgtcgtcatgatgatatctatcaatctacgcgtgatgatcgatggctacttgtctactgctatgtactactcagatagactctctccgtgtgtgcacgtacgcttgcatgtgcatggtagcatgtatgtacgacgtcgtccatgtcagtgtgtgtgacgtgt

SEQ ID NO: 51397 - DNA, 257 bp, Zea mays
caacagatcctcacgaatctttcaatcaatgtcagcatgcacgtaatccacgaatacaaaattcttctggagctcatggaatgcgtatgctacagcggcactgaccaaagcagccgcaccgatcaataacctgagctgaacatctggaggaataccaacggcagcacagcaaactactgtcgctctcatgaataccttctgcagattctggaatgcatatatgcactttgcaggacgagcattccacgtgtgctgct

SEQ ID NO: 51398 - DNA, 226 bp, Zea mays
attttgtgttccattctccatacaacaagctcgtgcagaagagttttgctcgactttactacaatgacttcatgcgcaactgcagctatgttgatgatgatgctaaagagaagctccagtccttttcaaatttgactggtgaagagagctaccagagtcgcgacttggaaaaggcctcacaacaggtcgcaaagcacctgtatggcatcaaagttcagccaacgat

SEQ ID NO: 51399 - DNA, 218 bp, Zea mays
gtcagaaggagctgaaggagctgatccagaaggagctcatcattggaacgaagctgcaggatgctgaaattgcaaggctgatggaagacttggaccggaacaaggaccaggaggtgaacttccagtagtatgtgcacttctgggggccttggctttgatctacaatgaagccctcaagggctgacaaaaaatagggaagatggagcacacctctgggg

SEQ ID NO: 51400 - DNA, 160 bp, Zea mays
tgtctccagttgactctcaacagaatgcttcaagtgtttgtgaagaaaaacctatacctgctgaacgccaccgagggtcaagtcacagacaagaagctgtgcagtcaccagtgttttctcctgcccagaaacaaatccaccaaaaatcgctacctctgcc

SEQ ID NO: 51401 - DNA, 269 bp, Zea mays
gtcggatcgagtcctttccagttttaccagggtggcatatacgacggggatggctgtggcacggacatgaaccatgcagtgacggctatcggctacggcgccgatgaccagggaacccagtactggatcctcaagaactcctggggcacaggatggggtgagaacggtttcatgcagatacagatgggcgtcggcgcctgtggtatctccacgatggcctcctacccaactccatgaacacaaatcttcagataaagcgtagtatatac

SEQ ID NO: 51402 - DNA, 271 bp, Zea mays
caactgatgagactcttgtggcccagattaaggaagggttcgaaagcgggaaggatcttgttgtgactgtccagtctgcgatgggggaggagcagatctgcgcgttgaaggatgttggccccaagtaacttccttggctttggagacggaaccctactgtatctcaacttaaatcggaaaagaagtgtatcaccaaaggattgctaccgagacattcacctggcttgagctggcttttgctatagcgtgcaaggggttgctgggtgtcgta

SEQ ID NO: 51403 - DNA, 266 bp, Zea mays
gccagatccacatcaaaccgggggctacggttctctacctcggggctgcctcgggcaccacggtctcccatgtctctgacatcgttggtccggatggtctagtctatgcagctgagttctcccaccgctctggccgtgacctcattaacttggccaagaagaggtccaacatcattcctgtgatcgaggatgctcgacacccacacaaataccgcatgctcatcgcaatggtggatgtgatctttgctgatgtggcccagccagac

SEQ ID NO: 51404 - DNA, 150 bp, Zea mays
ttcttcgaagcctttttcacggtgccgagatggatgtggcgaggcattcttggctcgagcctttcatccgtcgatctcatactatgcgcattctacatgtttgcgatagctccaaatcaattgcgaatgaaccttgcgaggcatctcctc

SEQ ID NO: 51405 - DNA, 252 bp, Zea mays
gtccaggttgattggaggcagcagggtgctgtcactcctgtcaagaaccaaggccaatgtggctgttgctgggcgttctctgcagtaggtgccatggaaggtttgatcatgataacgacaggaaacctggtctccctgtcggagcagcagattctagactgcgacgagtcagacgggaaccagggctgcaacggtggctacatggacaacgccttccagtacgtcatcaacaatggcggcgtcaccactgag

SEQ ID NO: 51406 - DNA, 164 bp, Zea mays
cattaccctaccccaagctgactcaggctacgggaaacaagaccggcgtcccatctggctcgctccgcaagacaaagtaatgatggcgccccgcacgctctatgacgatggcggctcttagcccccttacggaagcaagaggacgtcagcaaggactcaacagc

SEQ ID NO: 51407 - DNA, 256 bp, Zea mays
gtagatcaagcaaaccctaactgccaacgctactataaaatgtttttctcgcctcttctcgctcccgtagccgccgccggcctccaactctaaccccgttgcttccggctcccgcagcgtcgcacgaccttcacagccggttccttcctccgccaccatggggaagacacgtggtatgggagctgggcgcaagcacaagacccaccgcaggaaccagaggtgggctgacaaagcatacaagaagagccacttgggc

SEQ ID NO: 51408 - DNA, 140 bp, Zea mays
gtagcaccccagaggccgagaaatacttcgcagcaaccacagatgctcctggcgatgttctcgccaagctaggctagacgcaagggataataatggccatgtaatttcggacatgtgtttgttcataatggtcccggcaa

SEQ ID NO: 51409 - DNA, 233 bp, Zea mays
gtcacctggtggagacgaggttttgctagctgtaactgggaaagatgctacagctgatttcgaagatattggccacagtgattccgcaagggacatgatggagaagtaccacatcgggcagatagatgcttcaacaatcccagcaaagcgtgctcatgtgcagccccagcaagcacccagccatgcagacaaggataatgacctccccatcaagatcctacagttccttgtgc

SEQ ID NO: 51410 - DNA, 130 bp, Zea mays
gggagaaaatggctgccccagcagtgtccgggctctcccggcaggtgcgatgcttcagtacctctgtggtcagaccatttgccaagcttgtgaggcctcctgttcaggtatacggtattgaaggtcgcta

SEQ ID NO: 51411 - DNA, 222 bp, Zea mays
gcagccgacgccgcaggaagagacgcatcgaggagagcaagcgaggtagcgaccatgagggccaagtggaagaagacgcgcatgcggaggctcaagaggaagcgtagaaagatgaggcagagatccaagtaggcagcagatcgagatggattgtggacgtgatgacatgcgtgggtacatacatttcttcggatgcggtggtgtgcctgtggagagatgtca

SEQ ID NO: 51412 - DNA, 250 bp, Zea mays
atcgatcccactgcatgggaggataagaagtgtaaaggtgaatctagattcccagcgcaggtgaggatccgcgttacgaagctctgcaatgcgttggaagaggattccttcaggccagttttgcaccactatgatcgcccaaagtttcgccttgagctctccatcgggagaacctgtccctgctagacctatgcgcgaaggaaggcctctgagctgttggctgcctcgtgaggttctagtaaatatcaat

SEQ ID NO: 51413 - DNA, 255 bp, Zea mays
cattaccataggctcattcatcgaaacgcaaatcagagagacaggtcaagcaaaaagaattttgatcaaatcaatagaaggtaagatcccttacctgctttgaatttcatcctacctttaaataggatatgctctaagtcttcccatactttcctataatgactgcaacgattttctccattttgcgaattcctattttcatttgagtatattactatcatatacattatctaaatcgatccactttaactaaaa

SEQ ID NO: 51414 - DNA, 252 bp, Zea mays
gatcaaggaggctatcacggcgctcaaggagaggaccggctccagctcgcaagcgatcgccaagtatgtgggggacaagcacggcgcgtctctgccggccaacttcaagaagatgctttccatccagctccgtgggtccgcagccaagggcaagctcgtgaaggtcaaggcttcgtacaagctcgccggacgccgccaagaaggcatccccaagacccaaggctaagccggcaaaggccgccgctgccaaga

SEQ ID NO: 51415 - DNA, 244 bp, Zea mays
catcgacatcacgcgccagagcacagacatcacagtctcaagatgccattttatgcggcacgacaagacaatgctcatcggtgccgaccccacgcacgtcggcgaccgctgcatcagggtcaccatccaccactgcttcttcgacggcacgcgacagaggcacccccgcctccgcttcggaaaggttcacctctacaacaactacacgcgcagctggggcatctacgccgtctgcgcaggcgta

SEQ ID NO: 51416 - DNA, 241 bp, Zea mays
tggcagggtgaggctccaatcgattgtgacgcctttaaccgagtttgaccaccctgagaaaggagatgctctgtacgctatggagctggctctggccctggaaaagctggtcaatgagaagctgcacaacctgcatggtgtggcaacaaggtgcaatgatcctcagctgacagacttcatcgagattgagttcctcgaggagcaagtggaagcccataacagatctccaagtatgtcgccc

SEQ ID NO: 51417 - DNA, 237 bp, Zea mays
ctcggcaccaagaactgcgacttccaggtggagcgctacgtgtacaagcgccgcactgatggtatctacattattaaccttggaaagacctgggacaagcttcagttggccgccagggtcatcgttgccattgagaatccgcaggacattatcgtgcagtctgctaggccctatggccagagggctgtactcaagtttgcgcagtacactggtgcccatgccattgctggcaggcac

SEQ ID NO: 51418 - DNA, 272 bp, Zea mays
cataaccactgttttcagccactcccagactgttgttgtgtgccctggctgccacactgtcctctgccaacccacaggaggaaaggcaaggctcactgagggctgctctttccgcaggaagggagactagagcggatgtggtcttcaagttttgctctatgccagatactagcgtcatgaactgcctttagctaagattttccatccgttgttctcgagcagctatgtgttgcctgttggctcattccaaacttatatctggtttggtttgg

SEQ ID NO: 51419 - DNA, 266 bp, Zea mays
ggacgccgtcgacctgttcgtcgagcggtaccgcgggatgggcatcgacgccgtcgccgggattgaggccaagggcttcgtgttcggcccggcgatcgcgctggctattggcgctaagttcatacctctgcgcaagccaaggaagctcccaggtgaggtgatctccgagaagtacgttctcgagtacgggactgattgcctggagatgcgtgtcggggccatcgagcgatccggcgagcgggtgctggtcatcgacgacctggttg

SEQ ID NO: 51420 - DNA, 259 bp, Zea mays
gggccccctcgagatcctcgccgaccacatcgccgaccccgtcaacaacaacgcctggtgttacgcgaccaacttcgtccccggcaagtgagcgcgggcatgatgcttgcatgcgtgtaccgtagacgtaccgtattcctacgtactgcaggttgcaccagtatttgtgaagggagctgtgcgtgggagccagagattgtaccgctagtgtatttttgtatgcacgctgtggagctgatcaatgactatgctgtaaata

SEQ ID NO: 51421 - DNA, 265 bp, Zea mays
gtcgacggcaagctcgccggctacgacatccccgccgagtccaagatcctcgtcaatgcctggttcctcgccaacgaccccaagaggtgggtgcggcccgacgagttccggcccgagcgcttcctggaggaggagaagtccgtggaggcccacggcaacgacttccgcttcgtgccctttggggtcggccgccggagctgccctgggatcatcctcgcgctgcctatcatcggcatcaccctgggccggctggtgcagaacttcc

SEQ ID NO: 51422 - DNA, 179 bp, Zea mays
gttaggctcattcatcgaaacgcactcagagagaaggtaacgaaaaagattttgatcacatcatagcaggcaggatcccttacctgattatgaattatcatcctacctttaaactcaggatatgactcaaagtcttacccatactttacctataatgactagctacgattcttctccat

SEQ ID NO: 51423 - DNA, 263 bp, Zea mays
gttcatttggacaactgggcactggtgataacctctcaaggaactttccttttgaagtggcatactttaatgcaacacatattgagaagcttgcttatggtatgcgccattctcttgtactactgacagacaattcagtgtatggatttggctcagcaagacgaggacaagttggtaaatgtgcttctaggatccaaaaatcatataatgttcctagactgcttgctggttttcccaattgtcagatagtccatatatatgcc

SEQ ID NO: 51424 - DNA, 243 bp, Zea mays
gtaatcctggagtacttcactgacgaggttttggagctggccgggaacgctcgcacggttctgaaagtagacgcgtatcacacctcgccacctaccgatggccattcgcggagacgaggagctggacacccacatcacgggaaccatcgcaggtggaggcgtcatcccgcacatccaaacgtccctgatcaacacgtcctccaaggcgtgttgcatagggaatgcccattgttagtttacaat

SEQ ID NO: 51425 - DNA, 266 bp, Zea mays
cgagaagagcatctacgactccaacgttaaggacattgatggaaaagatgttcctcttaacaagttcaagaatcaggtgctgctgattgttaacgttgcttctcaatgtgggttgacaacagcaaattacactgaactatctcatatctatgagaagtacaagactcaagggttatcgatcactgcatttccttgcaatcaatttggtgcacaagaacctggatcaaatactcagattaagcagtttgcatgtacaagattcaaag

SEQ ID NO: 51426 - DNA, 151 bp, Zea mays
gtcgtcacagtaccagcgacgagagatcggcattcggctcgacgtcagcttgcaccgagtttacagcatgaccgtgcgcgactcgacatacgcagccatcactcttcgtctgaagacgttactagctcattcgttgcatgccacgaacaac

SEQ ID NO: 51427 - DNA, 259 bp, Zea mays
cgttgctccggtccgctgcgcatcctcacgactggaacttggcgccaccactgccctctaccctctgcaccgctgcaaaaccatttacctggtcaggcatgcccagggcattcacaatgtcgagggggagaaggacttcggcgcgtacatgtcacatgaactgttcgatgctcagctcactcctttgggttggaaccaagtcgatggtctgcgggagcatgtgaagaaaagtgggcttgcagaaacgattgaattagtt

SEQ ID NO: 51428 - DNA, 259 bp, Zea mays
gatacagcctcactctcttcccacctctctctcccctcccctcctcagtcgtcacacacactcagactcagccagtccgctgcctccgcgctcccccaaaacccaccaacgccacgccggaatcctagccttcgccaaccagtcgccatgagagagatcctccacatccaaggcgggagctggcgtaaccagatcggggccaagttctgggaggtgatatgcgacgagcacggcatcgatcacaccggaaagtacgccg

SEQ ID NO: 51429 - DNA, 284 bp, Zea mays
gttggggcttgctccacctgtgccggcaaaatcgagtctggttcggttgaccagtcggatgggtcttccttgatgatgggcagcaggaggaaggttatgtgctgacatgcgtctcctacccaaagtccgactgcgtcatccacatccacaaggaaggcgacctgtactagggatagggattttgcatttggcgaggcgacaaaaatactctcgagtggtgctttgtcaagcaaagctccatctgcgcgccctaccccgttgtgcgaactgtttggcatcaaact

SEQ ID NO: 51430 - DNA, 236 bp, Zea mays
ggacattgatggagcttctaaatcagttagatggattcgatgagcttgggaaggtgaacatgatcatggcaaccaaccggcctgatgtattggatcctgcactccttcgacctggtcggatggacaggaagatcgagatcccactgccgaatgaacaagggaggctggaggtcctcaagattcatgcagctggcatcgcatagcatggggagattgactatgaagctgtagtcaaa

SEQ ID NO: 51431 - DNA, 259 bp, Zea mays
tccaactgtgcggcgcgtccaaaaatacaaaaggcaagcgagcgagctccaagttcggctgctccaatttcactcggcatggctcctcaggcgtgggtcgtggcggagaacggcgaggacctccaacaacccagggaattcctgccgctctctaagcttgaagatgttggcgtgttgtattggcatttggaccctaagaagtctgaaagcgaggaggaactagcaaaaatccgcagagacagaggctacagttacatgg

SEQ ID NO: 51432 - DNA, 275 bp, Zea mays
tgaggtattaggaaaggcattgttcaatggcttgccaaacccttttactgccgcgaggtaccacagcttggtcattgagcaagaaaccttcccacatgatgctttggaggctactgcatggactgaagatggacttatcatggctgctcgccacaagaagtacaaacacatccagggtgtccaattccacccggagagcatcatcacccctgaaggcaagaaaatcatcctcaactttgtcagattcattgaggaactggagaagcagcgttcgt

SEQ ID NO: 51433 - DNA, 276 bp, Zea mays
cgctgcgccgggcatctgcttcatgctcgggcgggacagcgacacggtggcgttcgtccagttcccgcagcgcttcgagggcgtggaccccacggacctgtacgccaaccacaaccgcatcttcttcgacggcacgctccgggcgctggacggcatgcagggccccatctacgtcggcacgggctgcctgttccgccgcatcacgctctacggcttcgacccgccgcggatcaacgtgggcgggccgtgcttcccgtcgctgggcggcatgttcgc

SEQ ID NO: 51434 - DNA, 271 bp, Zea mays
gtaagaccgcgcgggcagtagccaattaataattaatttgatatacctacgacgtaccacggaccagatatatgtatataaaccagccgacttgccagcgtaaatttcgtgagatgcatgggatatcgttggaaggatactgtaaggtttgcacttgtactgtgctctagcctagaattaccagactagagcagcagataacataggccatgcagttttgattttgccctcggaatgtgcacatgtaaattctgagggtattgtttattta

SEQ ID NO: 51435 - DNA, 274 bp, Zea mays
tcgagcgggagctgggcgtgcgggcgctgcgcgtcgtgaacgtgcacgagtgcgtgcccaaggtgcccggcgtgttcttcaacgagtcggcgttcccggagctcgtcctgcgggcggcggacaggctgggcctcggcggcgtgtacacgcacctgggcgtgctgctgcagctggaccacaaggtgtcgccgttcctcaaggagaccctggacctctcgtgctaacacaacctggaggcgcactgcacctgctgcacggcttccgcggctcccgc

SEQ ID NO: 51436 - DNA, 272 bp, Zea mays
ggaaattgcggggttgaaggaaatgttccagatcatggacactgacaacagtggcgcaatcacttatgatgagctaaaagaaggattgagaaaatatggctccacactaaaggacactgagattcgtgatcttatggaagcagctgatattgacaacagtggaacaattgactacatagaattcattgctgcaactttgcatctcaataagctggagcgtgaggtgacatctcgtggcagccttttcatatttcgacaaagatggtagtggc

SEQ ID NO: 51437 - DNA, 196 bp, Zea mays
gtctaatctatgaagttgagataggtctgcgggtgtaggtggatttgtagaggtttttcttcagttggttaggttcgctgttgcctacctcatttgcccctaatcatcatcgccgtaatttatttataataaaaaagatccagcttttcccccaaaaaaaaaaaaaaaaaaaaaaaaaaaaaaaaaaaacaacaga

SEQ ID NO: 51438 - DNA, 259 bp, Zea mays
atagaatctattgctctgaggtcacctggcctcgtctggatctttgcaagttgggttcactgacattcaaagctcccgacaacgtaaaatacccatcaatggacctagcctatgcagctggccgggctgggggcaccatgacaggagttctgagcgctgctaatgagaaggccgtggagttgttcattgacgagaagattagacgtctggacatattcaaggtggtggagcttacatgtaacgcgcatcggaacgagct

SEQ ID NO: 51439 - DNA, 260 bp, Zea mays
gtggatgtattcagctttgccattgttctttgggagctggcaacttcaatggtcccatatgacaacatgacacccttgcaagctgcattaggagtaagacagggattgcgcttggacataccgggcagcgtgcacccaagattgaccaagctgattcgacagtgctggaacgaagatcctgatgcgcgtctgacttttgcagagattactaaagaactccaagatagtctacaccatatcgaggcacccactggagccag

SEQ ID NO: 51440 - DNA, 272 bp, Zea mays
ctctctctctctccttcctgccttctgcctgcgggcggcccatgtccgtggcgcccctcctgccctgcgagctgcttctccagcgaaaaggttgctgcgccttgacgcaccaccgatccaccgccgcccaacccgagcgttctgtccggcagctaggtagcgagctgcgcggtggctgctcccggaagcagggaggggaacagggcagcgaacgcccggcgattgccttgcttgcctgtgtgctccggccggcgcgagttggtcggtcgttc

SEQ ID NO: 51441 - DNA, 281 bp, Zea mays
cagaggtccttttatatgatgaacctacagctgggctcgacccgattgcatcaactgtcgtggaagaccttatacgttctgtgcatatgactggacgggatgcccttggcaagccaggaaaaatagcttcctatgttgttgtgacccatcagcatagcacaataagaagagctgttgataggttgctattttctcatgaggggaaggttgtttgggaaggaatgacacatgagttcacaacatcagctaatccaattgttcaacagtttgcatctggtagt

SEQ ID NO: 51442 - DNA, 283 bp, Zea mays
ccggccaagaagagccgccgcggcccgcgctcccgcagctcgcagtaccgcggcgtcaccttctaccgatgcaccggccgctgggagtcccacatctgggcattgcgggaagcaggtgtacttaggtaggattcgacactgctcatgccgctgcaagggcgtacgaccgagcggcgatcaagttccgcggcgtcgacgccgacataaacttcaacctcagcgactacgatgacgatatgaagcagatgaagagcctgtccaaggcggagttcgttcacgccct

SEQ ID NO: 51443 - DNA, 275 bp, Zea mays
gcccacgttcgagcagcccaagataacgatcgagaagctcttggagtacggacacatgctggtggcggagaggagaacgtcaagcgtgtgcagcttgctgacaagtacctcaacgaggctgctcttggtgaagccaacgaggacgccatgaagactggctccttcttcaagtagaaagcaactctttgcgcattgctagctaggcgcgaggtcggcataggatcgaggaggtgaatatatctattacttggatagttttgtactatctatatata

SEQ ID NO: 51444 - DNA, 274 bp, Zea mays
tagggcaagtgttccgaagatgaacttggatgatgcctttgagcagaagaatgaaatcgccaaagctgtagaaaatgaacttgaaaaggcaatgtctatgtatggatacgagattgtgcagactctgattgttgatattgagcctgatgagcatgtgaagagagctatgaatgagatcaatgcagctgctaggctgaggttggctgccagcgagaaagctgaggcagcgaagatcactgcagatcaagagagccgcagtgctgcagaatccaag

SEQ ID NO: 51445 - DNA, 264 bp, Zea mays
cgtgcggtcttaggaaaggcattgttcaatggcttgccaaacccttttacctgccgcgcggtaccacagcttggtcattgcgcaagaaaccttcccacatgatgctttggacgctactgcatggactgaagatggacttatcatggctgctcgccacaagcagtagaaacacatccagggtgtccaattccacccggagagcacatcacccctgcaggccagcacatcatcctcaagtttgtccgattcattgaggcactggcg

SEQ ID NO: 51446 - DNA, 274 bp, Zea mays
ctgcctctccgtccgtgctagccatggatctaggcgctcccgcccgatggcgcctaccgatacgcctcttgctggtgtcgctcaccgtcctcgtggtcctcaccgcgcgctccagtgctgaagtcatcaccctcaccgaagagaccttctccgacaagataacggagcaggacacggtgtggtttgtgcacttctgcgtcccctggtgtaaacactgcaagcaccttggaacactcatgggcggcactgggcacagttatggacagtgcggcat

SEQ ID NO: 51447 - DNA, 261 bp, Zea mays
tagatttccaacagaaggtggtaaacaatgtggagcatgtcatcagtcgtatcaagtcaatatcgccacattgtctggctgaggaggaggagaatgcaaccgagccacctcagtcggtacaaagaggcgttaccgagctggtggaagcggcattgtcgtccaggaacctgtgcatgatggatccgacgtggcacccatggttctgaaggcatccagcacctctgtagcctgaccaaatgccggcgtgtacagttttcatgt

SEQ ID NO: 51448 - DNA, 309 bp, Zea mays
actaacgaactccgcgtacgcggctccctattcggctcccgggctggactcccggtgaccatccgattcctggaccctcccctgcacgagatccttccagaagggaacatcgaggacattgtacgtgacttatgtgctgagacgggagctaaccaggcggatgccctcgcgcgaattgaaaagctttcagcacgtaaacccgatgcttggcttccgtgggcgctggctccgtatatcgtaccctgcattgccagcgctgcaagctcgcgccatttttgcaagctgctatagacatgaccaaccaggtgt

SEQ ID NO: 51449 - DNA, 269 bp, Zea mays
tcgacaggctgaggagcctcggggcgcggatacaggagatggtcggcgacgttgcggcccacgccgagcgtgcgcggtgcgcgctgacgtggcgcgacccccgcgccacgggcatgtacctgctggcatgcctgttccttgcggtcaccaccctcctggcaccgttccaggcggtggcgctgctgacggggttctacgtgatgcggcacccgacgctccggcagaggctgcccgacgtgccggcgcaacttcttccggcgactgccatg

SEQ ID NO: 51450 - DNA, 273 bp, Zea mays
tgcaagcgagcaatagcgtgagttgttggacaatgtgctgaatgggccatttagcatcacgctgagaaaccgcatacagtgtcatgtaatacgtgacgaggcaaaggatgaaatcgtgtctgaggagccattcttagtgttgaacgaaggtacaatcgaccgaggaatatcatcctaccttaccaactcggaagtctactgtgacagctcttttgttacttgcgtacaaggggatggactaatcatatcaactacatctggaagtacagcata

SEQ ID NO: 51451 - DNA, 268 bp, Zea mays
ttgctgtgaatgaagccttgaatgagctttatgttgaagaggaggactatgcgcgcctccgtgaatcagttgacatgcatgacaactttgaccagataggtcttgcccagaagcttgagaagcatgaattgctggagatgaggaggattgccgcctacatttacaagaaggctggcaggtggaagcaatcgatagctctatcgaagaaagacaacatgtacaaggattgcatggagacatgctcacaatctggtgaccgcgaattgtc

SEQ ID NO: 51452 - DNA, 264 bp, Zea mays
gattcgcggaagggattcattcttttgcttcgtcgagttgcttagtgggttcagagacaacttctgccagaaactggacaacagtgctgttggcattcgaggtacactagccaagttatcacagcttgtagcaaagtatgatggagaactccagcaacatctggaaataactacggaagttaatccccagttctacgcattcagatggataaccttactgctgacccaggaattcaacttcgccgacaccattcacatctggga

SEQ ID NO: 51453 - DNA, 266 bp, Zea mays
caactgatgagactcttgtggcccagattaaggaagggttcgaaagcgggaaggatcttgttgtgactgtccagtctgcgatgggggaggagcagatctgcgcgttgaaggatgttggccccaagtaacttccttggctttggagacggaaccctactgtatctcaacttaaatcggaaaagaagtgtatcaccaaaggattgctaccgagacattcacctggcttgagctggcttttgctatagcgtgcaaggggttgctgggtg

SEQ ID NO: 51454 - DNA, 266 bp, Zea mays
gcaaattcagaagatgcctaaaccatttccaattttgaagataaatccttcaaaaaaggatatagattcttttatggcatcagacttcaagctggttggctatgacccccaccagaagatagagatgaaaatggcagtgtaatggtggcttggctggagccccccatcctatggactcggtggatgtaatcagtaggactggtactacataaaaattaaccggacaccgcactagcttgtttttggtgatggtgctgaatgttcag

SEQ ID NO: 51455 - DNA, 277 bp, Zea mays
aacgaaggcggctacaatggactgacgacacagaccgaaggcctctcgctgaacccgcggagcagcgagaacgagaggagcgcggcacggccggcagcgtcccgccctgccaaacctgaggactcgctcttcaaggacctggtcgacttcgcaaagaccaagccttacgtccccgtcgaaaccggccaacaccgcagacccgctagaacgactcgtgcgatgcatggatggacattgggtcgttcggatattcatttcacaggttagcggcttttag

SEQ ID NO: 51456 - DNA, 269 bp, Zea mays
gtcccttatgtccctcttgaagaaaggttcttgttccgaagggttgggcagaaggactaccacatgttccgcagtgttgcacgctatggttacaaggacgttaggaaagaagaccatggcttctttgagcaacttctggttgagagcctggaaaaatttctcaggagggaagcccaggaaattgcgctggaggcgagcacaatggaggcagagcgtgatgacatatctgttgtatccgaggtgcctcagactcctgcaggtgacgggga

SEQ ID NO: 51457 - DNA, 267 bp, Zea mays
gatcgtagaagttaaacctcagggagttagcaaggggatttccgtggacaagatcatccggaccttggtcagcaaaggggaagtaccagaccttttgatgtgcatcggaaacgatcggtcggacgaggacatgttcgagagcatcaacagagccacctccctttccgagcttcctgccgctccagaagtattcgcctgttccgttggccccaaggccagcaaggcaaactactacgtcgatggctgcgacgaagtaatcagactgct

SEQ ID NO: 51458 - DNA, 264 bp, Zea mays
cgaaaaaggtcagcggttgatcaagaatatccgcccactttttgatggagcggttattgagccatgcttgcttcatggtgatctgtggagcggaaacataagctctgatagcaatggggatcctgtaatattggatcctgcttgctactatggacacaacgaggcagagtttgggatgtcctggtgtgcttgatttggtggggacttctacaacgcctattttcaggtgatgccgaaacagccagggtttgagaagaggaggga

SEQ ID NO: 51459 - DNA, 265 bp, Zea mays
ttttgttactccagtattcactacaatctacatgtattaaggtggattggggtgtaaattagtttaacttacacactagtccatcttaatacatgtgaaggtgaatactagagtaacatgtaatggtgccgtgtttctttgcaccaccttaacactgctgtagcgtttcggaattgctggaaaggcatgcaagctcttgccctcaatgtgtttctagtgccaagtgttagaaataccccctagccctttcttttagtaattgcta

SEQ ID NO: 51460 - DNA, 263 bp, Zea mays
ggaggaacgagcagttctgggtcattggtggtatttctgcgcatttatttgccgtcttccagggtctcctgaaggtgcttgctggtatcgacacgagcttcactgtcacctctaaggccactgacgaagaaggtgattctgccgagctctacatgttcaagtggacaacgcttctgatcccaccaaccactattttgatcatcaacctggtcggcgtggtcgctggcatttcctacgcaatcaatagcggttaccagtcatgg

SEQ ID NO: 51461 - DNA, 264 bp, Zea mays
agaatcgaaatttggagtagatccctcaggatgcatggaactagcaaagcatgtcaaactgaactgcccgaaccttgtgttctctggtctgatgacaattgggatgcttgattactcctcaacccctgagaatttcaaggcgctggctaactgccgggaagaggtgtgcaaggagcttggaatacccgaagagcagtgcgaattgtctatgggcatgtcggctgattttgaacaagcgattgaaatgggaagcacaaatgtaag

SEQ ID NO: 51462 - DNA, 263 bp, Zea mays
cacccggcgacgtactacgaggacatgcagcgctcggtgttctgcctgtgcccgctgggctgggcgccgtggagcccgaggctggtggaggcggtggtgttcggctgcatccccgtgatcgtcgccgacgacatcgtgctgcccttcgcggacgccatcccgtgggaggacatcggcgtgttcgtcgcggaggaggacgtccccaggctcgacaccatcctcacgtccatccccaccgacgtcgtcctgcggaacagcgcctc

SEQ ID NO: 51463 - DNA, 142 bp, Zea mays
ctctatacctgctgctacaaaactactgcaacgcctatatatacatggggtgaggaacatgtgaatgcaagctccggctatcatatacatgtaatatggatacaaactatatatataaatccgccgaggcgccgacaatact

SEQ ID NO: 51464 - DNA, 142 bp, Zea mays
ctctatacctgctgctacaaaactactgcaacgcctatatatacttggggtgaggaacatgtgaatgcaagctccggctatcatatacatgtaatatggatacaaactatatatataaatccgccgaggcgccgacaatact

SEQ ID NO: 51465 - DNA, 264 bp, Zea mays
cggcgggggtggaggcgaccgctcctgctacaactgcggcgaggccggccacatcgcccgcgactgtcccacgtgaggtgtgtccgcgtccgtccagccagccagatcggatcggatcgctccaccacctgctggtctgatggcgccgcccccttctagatctcgcttaaaaaaacatccccctctcgctgtgtgtcggagtaccgctttagttttgccgatccgggcacgagtgcccgctgcctctttcgtaagaggatcccg

SEQ ID NO: 51466 - DNA, 258 bp, Zea mays
gttggctcaagcatgctacatggaacgtgtggatctctctgctcatgggttttatgctacacctaatattgggtttgactggacgattggcaagggaactccattcaattatttcacatatggagctgcatttgcagaagttgagatcgacaccctaactggggatttttacacaaggacagctgatattgttatggatctcggattttcaattaatccagcaattgacattggccagattgaaggagcttttatcca

SEQ ID NO: 51467 - DNA, 255 bp, Zea mays
ggaaggaaatcccgggtagaacaaaagattatataactcacccaaaacgaaatggttaccagagcttgcatgtggccatcgatgtcagtgaacctgggaaggtgaggccattaatggaggtacagatacgcacaaggagatgcataggtttgctgttggtggagaggcatctcactctctctacaagggtggtcttactgatcctggagaggctaaaaggctcaagactattatgttggcggcacggagttagca

SEQ ID NO: 51468 - DNA, 258 bp, Zea mays
aggccccaactacccccagtctcggaagagaactatccagaagcgcaagactccaaagccgtcgccttcctatccatcccttcctcgccgcgggggtcgcctgagatcacataaacaatggtgaaggctgttgctgtgcttggtagcagcgagggtgtcaagggcaccatcttcttcacccaagagggagatggccctaccactgtcactggaagtgtctctggcctcaagcctggcctccatgggttccatgtgcat

SEQ ID NO: 51469 - DNA, 260 bp, Zea mays
caaagaaggagtattcacaatggatagtcacaagccaaagaagtctcttggaagttatgtcagagttcccatcagcaaagcctccacttggtgttttctttgcagctatttgtcctcgcctgcagccaagatactactcaatatcttcctcaccgagaatagcaccaacaaggattcatgtgacaagtgcactagtatatgggccaacccctaccggaagaattcacaaaggagtctgttctacttggatgaagcattcg

SEQ ID NO: 51470 - DNA, 254 bp, Zea mays
aaatggaccatcactgcatttgggtagttaattgtgttggagcaaggaactacaagtattttctcctttttctggtgtatacatttatcgagactgtgctggataccttggtactacttccaaacttcattgaattttttcaagatgaacataggcgttccagctctcctggggatattgctattctatttcttgcttttgttctcaatttagcatttgcgctgagcctcctctgtttcattggcatgcacgcg

SEQ ID NO: 51471 - DNA, 250 bp, Zea mays
ttcacttacaggagcatttattccaagaaagctatgactgacatggatagcaccaacgtgtatgcttacatctcaataatcgctctaattgtttgcattccacctgcattgatctttgaagggcccaagctaatgcagcatggatttagtgatgccattgcaaaagtaggtttgacaaagtttgtcagtgacctattcttggttggactgttctaccatctgtataaccagattgctacaaacaccttgg

SEQ ID NO: 51472 - DNA, 255 bp, Zea mays
gctgctttatggtcggatatttcgagcagttcttgttctttcagagcaaagcaattctgatcttgctgtggaattcatcaacttgacactcgcgtactagtacttgccgatagtgcttgatcggtttggtggtgcccaaggatttctgttccttcaagatcgtatggacttcaattactggtccctcttgaatgctgataaggctaagctctggataacctatcaggtgaaggaatcttggtcgtatgtgtctct

SEQ ID NO: 51473 - DNA, 248 bp, Zea mays
acattttcttgtactccatcaactatcttgtttttgacctcaaaagcttgagtgggccagtgtctgctaccctctacatcggttactcactcttcatggtgattgctatcatgctggcaactggcacagttgggtttatttcttcattctgctttgtccactatcttttctcatcgtctaaagcagattaagtttcttcctgctgaggattcaagtcactcaattgagaggtgagcagaatggacagt

SEQ ID NO: 51474 - DNA, 242 bp, Zea mays
gccacatctcaagcgcaagacctcctcgcggctatggcgaacgtctgatcccgtcgctgaaccgggttctggtggagaagctgctgaagcccagcaagagcgccggcggcatcctcctcccggagaccaccaagcagctgaacgccgctaaagtcgttgctgttggccctggtgatcgtgatagggatggcaagctgatccctgtatctctgagcgaaggcgacactgttctgcttccggag

SEQ ID NO: 51475 - DNA, 247 bp, Zea mays
attggtatagccagaattcagaacctgaatctagattaacaagagctagaaaaggttgcatgtcgttgccagatgtctcatccttctatgtgaagtctgcaaagccatcacaagagcgagcttatggaaacagaactgtgagattcatgttatcgcgcatggaaaaacaggcacaattaccatggccaaaggataggatatgggtgttcaagagtgatccgagattctttggtagtccaatgatgga

SEQ ID NO: 51476 - DNA, 248 bp, Zea mays
attggtatagccagaattcagaacctgaatctagattaccaagagctagaaaaggttgcatgtcgttgccagatgtctcatccttctatgtgaagtctgcaaagccatcacaagagcgagcttatggaaacagaactgtgagattcatgttatcgcgcatggaaaaacaggcacaaagactctggctaaaggataggatatgggtgttcaagagtgatccgagattctttggtagtccaatgatggac

SEQ ID NO: 51477 - DNA, 246 bp, Zea mays
tgcgcggctttctttcccaactccgacgaaggctagctacaccacctggtgcgggctcgtctccatcgcccgccacccgctccgtcgtcgtcgtccccgccgcgccgatacatattcgaatggggcgcctggcgtccgagaggaaggtggtcgggtgggccccagggacgccaccggacacctctccccctactcctacaccctcaggaacacaggccctgaagatgtggtggtgaaggtgctcta

SEQ ID NO: 51478 - DNA, 242 bp, Zea mays
gtttgctgagacatgctctctccatagagcatcgtcctccggtacaactgcacttacagcaatggtttttggaaggtctcttctggtcgctaatgccggtgactgtagggcggttctttcccggtgtggcaccgcagtcgaaatgtccatggaccataggccttgcagtctcagcgaaaaactgcgcgtagaatcgcttggtggctacgtggacgatggctatctgaacggtctgctaggag

SEQ ID NO: 51479 - DNA, 242 bp, Zea mays
ctcgcctgcgctccctcgccgccccagttccccaccccctgctcacccacccgtcccctcctgctcgcccatggctcccatcgctgtcggcgacgccctccccgacggccagctcgggtggttcgacgagaacgaccagctgcagcaggtctccgtccacgcgctcgccgccggcaagaaggtcatcctcttcggcgtccccggcgccttcaccccgacctgcagcaaccagcatgtgccag

SEQ ID NO: 51480 - DNA, 240 bp, Zea mays
gccgtcgccgccctacggttcagatcttcgtcgtcatcttctccccccacgagcacccaaagatggtggtccttcaaccagatcggttcctgagcgagctgacgtgcatgtacgagcggagcacggagaagggctccgtctgggtcaccatgaagcgatcaactctcaagggcaaggcacagttgcggaagatggagaataaggggcaggaggtagagcacaggtgcctcatccgcgcct

SEQ ID NO: 51481 - DNA, 192 bp, Zea mays
ttttaggaagagccgggagtgggttggatcagctacaaaatgaggtgcaagtaactggaaggcttcagcaacaaaaatcttgttgggttaagggtttttgctcgcatcataatgatacactgctagtttatgaatacatcaagaacgggagccttgacactattctatttgatgatagggaaggaaatgcac

SEQ ID NO: 51482 - DNA, 191 bp, Zea mays
cttcatcaatgccatgatatcaaacatctcattcacctacaggagcatttattccaagaaagccctgactgacatggatagcaccaactgtatgcttacatttcaataattgctctcattgtttgcattccgcctgcagtgatctttgaagggccccggctaatgcagcatggattcagtgatgccattgc

SEQ ID NO: 51483 - DNA, 185 bp, Zea mays
gtaagcatgtgaacttccgatgttgccacatgctggatcagtctgaataagtaagtaatgcagctccaaggtggtcagctgcgtctacacaatgagcatgtacgtatggagaaatatctttgaacccattttgtttatgaataagatttgttttttttcgagttaaaaaaaataaaaaagggcgg

SEQ ID NO: 51484 - DNA, 181 bp, Zea mays
gacgacgacagctgctgtacaaggaggagctggagaagatgaaggagatggcgccggacaatttcggctggacttcgcggtagccgggagcagacgaacgcggcgggggagaagatgtacatccagacgcgcatggggagtacagggaggagctgtgggagctgctgaagaaggacaacac

SEQ ID NO: 51485 - DNA, 183 bp, Zea mays
gctgaaatcaggcgcttctacgaggactacaagaagaatgagaacaaggaggttgctgtgaatgactttctaccagcgagcgccgctatgaagccatacagcactctatggacctgtatgctacatacatcgttgagggcctgaggaggtaggattctgatggctaggaaaggtggggaggat

SEQ ID NO: 51486 - DNA, 173 bp, Zea mays
tcactcctcagactcctctccgcacataccctccctacatcgccgtcgccgtcgcatctgccatgaggcgtacaatacgtctcggagttatggagaaggaagcaatccgacgtgatgcggttcgttcaacgcgtgcgctgttgggagtacaggcagcagcgttccatcgtccg

SEQ ID NO: 51487 - DNA, 280 bp, Zea mays
acggcacgcggatatgactacttcaaggcgtcttgctgacaggaagagtgcaaagttccagaagaacatcacaaagaggggttctgtgcctgagaccacggtgaaaaagagcaatgactaccctgttggacctatagttcttggattcttcatttttgtggtcattggatcatccttgttccagataatcaggacagcgacaagcggtgggctggcctgaattcactgagctaaaacccagaatttatctgtcggtaactggggggcagtatctgtgttg

SEQ ID NO: 51488 - DNA, 124 bp, Zea mays
tgacctggcactggctgctgtgtctgtatcgatgtgtccgtattttctccatctcgtctgcatacgctgcaattggtaaggagctagctggcctttcatgtcttccatgctgccatagccatac

SEQ ID NO: 51489 - DNA, 269 bp, Zea mays
gcctattccagttgatcagtttggtttgcagaagttggtcgacgctataacattcatgatgaaccagaggtgaaagtaaggctgtggactggcgaagcatggaatctgaagacggggtgacaggtgctgttagggcattccttagacacctgccatcaaaagctgaggaacagagtctgccgcagtcatcgggcttcctggaattcttaggcccactaagtaaatgtttgggatgttcttagtgcacaaggcatcgttactattcacgg

SEQ ID NO: 51490 - DNA, 220 bp, Zea mays
agtctatgcactactccgtacaagagacatgaccggctcacgctacaaggagtacgggatcccatttgactggctgtcagattctggagtagtttgcaagatcaaagtggcatctgtccagcttgcaaacaagtatatgaagagggttgcctcagaacttgatgcattagaaggcacggagatagagcccaatagagagtttttgcttctccagggtgtg

SEQ ID NO: 51491 - DNA, 290 bp, Zea mays
tagtgacctgactctctgaggctcattttgcagttgttgaaattgtccccgcagtttgcaatcatgtctgaaccaatcagagtccttgtgactggagcagttggtcaaatttcatattcactgctgtacagtattggaaatggatctgtctttggtaaagatcagcctataattcttgtgctgttggatatcacccccatgatgggtgtcctggacggtgtcctaatggaactgcaagactgtgcccttcccctcctgaaagatgtcatcgcaacagttaaagaagacgt

SEQ ID NO: 51492 - DNA, 96 bp, Zea mays
ctatgctgctccagaggtaatatcgggtaaactatatgctggaccagaggtcgatggatggacttgtggggtgattctttatgctcttctttgtgg

SEQ ID NO: 51493 - DNA, 198 bp, Zea mays
cgaagaagtgggaggaggtgcttctgggccttggagtcgaggggagtcgagctggtatcgacgacgcagaggagatcgccccacttgccaaggaaaacgtagccactccgtgagggcttggtggtgcctcggactcggaaacacgcgttggtgataggaagcgtcttctaggatcctcctgggcggccttgtggctgg

SEQ ID NO: 51494 - DNA, 284 bp, Zea mays
ccagcaggtgctgcgatacattgcacacaacaacaaccccagctctgccccagcccgcccacaggagttcccgcatctccctctggtctggtcacaggagttccgagacctctccaatggcggttaagatctacgttgtgtactattccatgtatgggcatgttggcaaactagctgaagagatcaagaaaggtgccttatctgttgaaggtgttgaggctaaaatatggcaggtccctgaaattctctctgaagaagtgcttggaaagatgggcgccccccta

SEQ ID NO: 51495 - DNA, 280 bp, Zea mays
ctgataccatggaacaggaagttactgtactgctatctcgacttagattcatacagtctactctattccacaccgatgtcacgtacctggagttcttggacagggtgcacacctctgagttgaaactgagggcacaaggcctctgggaagttccacatccttggctgaatcttctaataccgaggagctccatccgcagatttgctaaggaagtctttggcaagatcctgaaagatagcaacaatggtcccatattgctttatccagtgaacaaatcaaa

SEQ ID NO: 51496 - DNA, 265 bp, Zea mays
caaaggtttctgggacatgtacgacccagagggctactctttgtggttctgtgactacaagtacaatgatgagaacaccgtctcctttgtgaccctgaagaaggttggtggattcctgcagcggatggacctgtgccgcaagtacgcctttgggaagatgctcgtgataggctctgatgcacccttcaagctgaagggctgtggctcttccgtggcaaggatgttccaaagttggtaatggacgaggtctatgacatggagctct

SEQ ID NO: 51497 - DNA, 273 bp, Zea mays
cgcagaatggctcccgcaaagaagggtggcgagaagaaaaagggccgttctgccatcaacgaagtggtaacccgagaatacaccatcaacattcacaagcgcatccatggagtgggcttcaagaagcgtgcacctcgggcactcaaagagattcggaaatttgccatgaaggagatgggaactccagatgtgcgcattgataccaggctcaacaaagctgtctgggccaaaggaataaggaatgtgccataccgaatccgtgtgcggctgtcc

SEQ ID NO: 51498 - DNA, 270 bp, Zea mays
aagggtgacaagttcaagctcaacaagtcagaactaaaggagctgctgacccgggagctgcccagcttcttggggaaaaggacagatgaagctgctttccagaagctgatgagcaacttggacagcaacagggacaacgaggtggacttccaagagtactgtgtcttcctgtcctgcatcgccatgatgtgtaacgaattcttagaaggcttcccagataagcagcccaggaagaaatgaaaactcctctgatgtggttggggggtctgc

SEQ ID NO: 51499 - DNA, 275 bp, Zea mays
aacgacatacgtttgctaggaagtggtcctcggtgtggtcttggtgaactaatcctaccagaaaatgagcctgggagcagcattatgcctgggaaagttaatccaacccagtgtgaggctctgacaatggtttgtgcacaggttatgggtaatcatgttggtgttacaattggtggtgccaatgggcattttgaactgaatgtttttaagccaatgatcgcagccggattacttcgatcattgaggttgttaggggatgcatccgtgtcctttga

SEQ ID NO: 51500 - DNA, 267 bp, Zea mays
cggctgtcgacagttttgtgaacaagataagactggaggacaacctaacgaaggttcacgtcacccttgcccacaaacgaggccatggtgtgtctgctgtcgcaagctatggcatctaccagcaccaggaagtccccgtgtcattcaacgcattgtactacactgacaagatggccgctctcgaggcacagctgggagcagtaaacgatgagccgatcaattccaggaacgagtggccacatgccactctgtggacggctccaggcg

SEQ ID NO: 51501 - DNA, 266 bp, Zea mays
tattcctcttgttggaacaccacaggaactggggcatcaagtgactcttatccgccaagttgctgagaaagtgttcgccaatgtgggcaagactatcgggtacaaagttggaacaatgattgagatccccagggcagctctggtggctgatgagatagcggacaggctgaattcttctccttcggaacgaacgacctgacgcagatgacctttgggtacagcagggatgatgtgggaaagttcattcccgtctatcttgctcaggg

SEQ ID NO: 51502 - DNA, 271 bp, Zea mays
acagaaccgaccaggctggaagatattgatgtgttagaggaagaacgactgaacacagtaattcagtcagctagataccagcagaccttgaagcgctaccatgataaagccgtgcgacaccgatcctttgcagtgggagacttggtccttcgccgaattctaacgaacgagggacgacacaagctcgtcaccactatgggaaggaccattcatcgtatcagaggtcacacggccgggatcacatcgacttactcagatggacggcacagaa

SEQ ID NO: 51503 - DNA, 270 bp, Zea mays
ctgccccctgcccccctcccatcgtcgccgccctcctcatccaccgcgcgtcgctccgccggcagcccaatgccatgcatccgccagcctctcgcaccacgcgtatcgcgggcccgcccgaccggctcgtggcgagggcgtaccgggcggtccacgactacgactacctattcaaggttgtgctcatttgggactccggcgtcggcaagtccaacctgctctcgcgcttcacgcgcaacgagttcagcctcgagtccaagtccaccatcg

SEQ ID NO: 51504 - DNA, 264 bp, Zea mays
agaaagcccaagacctcatgaatgctgtggagccatcctgcctcaccgtgtagtagttgcacatcaactgtaaggcaattcgccatcccattatctactgcattggcaaccatcagatcagatgccaggaatatatgaaccaacctggtgctcctgtccgatgtctaccatccaccaagaaaccctcttgccattttcaacacaaggcccagcaaaacatgtcccctacaatcgtcaaatcatatcatatgtaatgttgttcaa

SEQ ID NO: 51505 - DNA, 260 bp, Zea mays
agcatggagaagggtatcgaggacattatggtgtcactggctgaaaaatgaggaatcgactggttcgactacaacaagcagctgaagaggggagatcaatggaatgtggaggtctactaaccgctgaattttgcagctgacatgttgtgttgtgcctatctgtaagtgaggccagggtgtactgcgtatataatgtagatagtgagtgtgttctgagtttttttttactattgccgtctctgtttatagattggtataag

SEQ ID NO: 51506 - DNA, 266 bp, Zea mays
aagagtctgaaggttctgctctcctcgaggtatgtgagggatctagctaccctagtggttgcttatggcattagtatcaatctagtcgaagtcacgtggaaatcaaaactcaaggcacagttccctagtccaaatgaatattcatctttcatgggtgatttctcgactgcaactggaattgcaactttcacaatgatgctgttaggccgtattatactacggaaatttggctggggtgtggctgcaaagatcacccccaccgttct

SEQ ID NO: 51507 - DNA, 264 bp, Zea mays
attgctcatggctgcttgtgttccgacggtggatgcggaggaagcatgcgccctcctcagctcttccacacaccactatctggatgtcaggatgtgggaggattttgacaagggccatgtagccggtgctcggaatgttccctactacctctccgtcactccgcatgggaaggagaagaatccccagtttgtggaacaggtttccgcgctctacgccaaggaccaaaacttgattgtgggttgccgctctggcatccggtccaa

SEQ ID NO: 51508 - DNA, 268 bp, Zea mays
gcgccggatcgcgttcacggtgggccttcccatggcgtcgggcgtcgcgagctcaacgtgtacgacgcgctcaagcgcgccagggggtggtggtgccatcgtgggtgccattgctgaccatcctcgtcgccttcggcacgtcggcgctgggtatcgcctacggcacgctgtcggctagctgggaccccgacaaggaagggtcgctgctcggcatcgacgaggcccgggccaactggcccgtgctgtggcaggaagagattgagaagca

SEQ ID NO: 51509 - DNA, 259 bp, Zea mays
tcgctgaacgaccaaggcaacttcctgactgacgaccaaatccttccgttgttgctgggtatctgcagaggccttgaggccattcatgccaaaggttatgcacacatggtcctgaagcccaccaatattttgcttggtgacgaggggcagccggttttaatggacttgggttctatgcatcaagcatgattcccagtggagggatctcgccatgccctagctctacaggactgggcagcccagcggtgcaccatctcct

SEQ ID NO: 51510 - DNA, 269 bp, Zea mays
agaacttccagtacctgcgggagctgccctacggcatcggcctcctcgtctcgctccgggagctggacgtcagctacaactccatcgccgcgctcccggactccatgggctgcctcaccaagctcgccaggttcagcgccgcgggcaacccgctggtgtgcccgcccatggacgtcgtcgagcagagcctcgacgccatgcgcgcctacctcagcgcgcggatgaacggcaccgccaaggccaagaagaagagctgggtgcccaagctg

SEQ ID NO: 51511 - DNA, 269 bp, Zea mays
acgagtggggcgtggacgtggcgctcacgggctcgcagaatgacctgtcgatgccgacggggatgggcatcgtgtgcgccaccccagggcgctggaggcattcaagacggccaggtccgtgcgcgtcttcttcgactggaaggactacctcaggttctacgacatgggcacgtactggccctacacgccctccatccagctcctctacggcctccgcaccgcgctcgacctcatcttcgaggaagggctggacaacgtcgtgaggaggc

SEQ ID NO: 51512 - DNA, 155 bp, Zea mays
cgcagaatggctcccgcaaagaagggtggcgagaagaaaaagggccgttctgccatcaacgaagtgttaacccgagaatacaccatcaacattcacaagcgcatccatggagtgggcttcaataagcgtgcacctcgggcactcaaagagattcg

SEQ ID NO: 51513 - DNA, 253 bp, Zea mays
cctgagcagcagcatgcgttctgccagtttgtcaccggtgctcctcggcttccacatggtggattggctgcccttagccccaagcttactatagttcaggaagcatccttcaagtgctgtgaatacttcaaattcaactggggcagtagagtccgctgatgatgatttgcctagtgtgatgacgtgcgccaattatctgaagctgcccccctactccacaaaagaaatcatgcgcaagaagttgcttcatgcg

SEQ ID NO: 51514 - DNA, 220 bp, Zea mays
cgagagattgagatggcacagaagctattgaactctgacctgggtgagctcatcaacaagatgaaactggcccagcagtatgtcatgaccagcctccagcaagagtacaaaacgcaaatgctgactgctgctcacgccctggctgtggatgccaaacacttactcgaatgtcgttgaccaagcaagactgaaaatgcttgggcagacgagaccacactga

SEQ ID NO: 51515 - DNA, 250 bp, Zea mays
tgtgacagcattcaccctccaggatggttcgtcacactacctcaaggggatccttctgctgctgtgctacattgtgatcggtgcatgcttctttgttacgaggcaacctgcaagtaacaacaatggcgctgggctgtcgctgccaactggcactttgagtgcacaagctgcatgatggttcaagggtcctgcctgatcctgaacaaatgagcatccaaggcagcaacgcagttgtgagtctgaaacaatg

SEQ ID NO: 51516 - DNA, 264 bp, Zea mays
tcgatactcacgatgcgaataatgaccccgagcacgcgcacaggtcgaagatcgatgatgatctcgccgccacggcgccgtttgcgccgggggttacgctatccacgagcaccacgagatagagaaggaccacaatgcgccgatgaggcccccggcggcgagaagaagcaccaccacctcttcggctgatgacctggccggcgagagcagcggtccgtcaccgaccgatcgaccgtcgcgccgcgccgcctgttttcgttgagt

SEQ ID NO: 51517 - DNA, 260 bp, Zea mays
cgagaagcacgaggcgaagaaggaccccgagcacgcgcacaggcacaagatcgatgaggagctcgccgccacggcgccgtgggcgccggcggctacgcttccacgagcaccacgagaaaaagaaggaccacaatgcgccgaggaggcccccggcggcgagaagaagcaccaccagctcttcggctgatgacctggccggcgatagcgccggtccgtcaccgaccgaccgaccgccgcgccgcgccgcccgttttcgttga

SEQ ID NO: 51518 - DNA, 234 bp, Zea mays
tagcgtcgggctctcatctctaatcttcgggttcgcgtcgcagtgtcttccgcccgggctatcaccatgccgaagcagatccacgagatcgaggacttcctgctgactgcggggcggaaggacgcacggtcggtgcggatcaagcgggccaaggacgccgtcaagttcaaggtgcgctgctccaggtacctctacaccctctgcgtccacgacgccgacaaggccaacaagctc

SEQ ID NO: 51519 - DNA, 258 bp, Zea mays
ggttgagttgttgctggaacacggagctgacgtcgacaagcaggacagtaatggctggtcgccaagagatctagctgatcagcaaggccatgatgacattcaggctctcttcaaatcacgaaaagcacacaggaagcatgcctcaaatggcagagtggcacctatgctgatagggagattcaacagtgagcccttgatgccagatatgagccatgaaaacgccagagtacgcagcgaagttgttccgcagaagctcct

SEQ ID NO: 51520 - DNA, 230 bp, Zea mays
tcctgaataacaagcaacagctcatgagagctcgagaagctgcaatttgggagctcgaagaacgacacttaacagagcaaacacgagttgctcacacagcagcttaaagatcagtatttcatgcaaagacatcagctacttaagcgccacgagaaggaaacagagcaaatgcagcgttacaatcaaagacttattgaggaattgaaaaacagacagactcaagacagagc

SEQ ID NO: 51521 - DNA, 256 bp, Zea mays
tcgatcccaggctcacagcacaattttggccacgggattaattatatgacgaaggaaatccagataagccgagacatgtaaaaaggaagactcgggttgtgagtcgctatgtttgtcgggttgagtgatcgaatttttttgtgtgtgctctcaaggagacctctgtgaaacttaataaactccgcacggagttgtgccaaattagaccgaggcgtccgtgaacttgaatcagttcctcgggatgttgtgcctgaga

SEQ ID NO: 51522 - DNA, 201 bp, Zea mays
tcagggggttcatctggggaggaggcgggtggcgagctcgacgtcgatgatgatctccctcatggcgggcttcttctcgccgctgatggcgatgaggtagctcctgccgacccacccgatccacccggcgatgtagaagaagagcaggcccggggtgacgaactcgccccagtgccgctggtcgccgctgacgatgaggtg

SEQ ID NO: 51523 - DNA, 248 bp, Zea mays
cagggggttcatctggggaggaggcgggtggcgatctcgacgtcgatgatgatctccctcatggcgggcttcttctcgccgctgatggcgatgaggtagctcctgccgacccacccgatccacccggcgatgtagaagaatagcaggcccggggtgacgaagtcgccccagtgccgctggtcgccgctgacgatgatgtgcggcaggccgtcggcgccgcagatcatgccgaacttgccgtagttctc

SEQ ID NO: 51524 - DNA, 250 bp, Zea mays
cgccaccgccgaggaaaaccgtgtgctattagccatggtcaaccccaccgtgttcttcgacattgccgtcgacggcgagcccttgggccgcgtctcctttgagctgtttgcagacaaggtcccaaagacagcagaaaattttcgtgctctgagcactggagagaaaggatttggttataagggtacctgctttcacagaattattcgcagggttatgtgtcagggtggtgacttcacacgccataatggc

SEQ ID NO: 51525 - DNA, 253 bp, Zea mays
  unsure (1)..(253): unsure at all n locations
aaccgctggctttccagtgctgttcgtcgccctatatctgttccgttcaaaatcgccttctacacaaacaaccacccgtagacctgagacttctgtcaccaaaattactcttatatatgttgtcttgggcctcatcattgctgccgatgacttgatgtattcctatggcctgttgtancttcctgtattcacatattcgctcatttgcgctagtcagctggccttcaatgctgtcttctcatatgtcctaaat

SEQ ID NO: 51526 - DNA, 298 bp, Zea mays
tagtgaccggggtctctacgctgatatctctggtgcttgccattgtgatcctctgcctgcgcaactacatcagctacatcttcacggagggtgaggaagaatcaaacgcggtggcagatctctgcccactgcttgccatcacgctcgtcctcaacggcatccaacctgttctctcaggtgtcgccgttgggtgtgggtggcaagaattcgtagcctacgtgaacgttggctgctactacatagttggtgttcccctcggcgccatcctcggttttgtcttcaagctcggtgtaaaagg

SEQ ID NO: 51527 - DNA, 284 bp, Zea mays
aagggctggtactcctgggtgctcagcatgctctacggcttcctgctgacgttcggcttcatcaccatgacgccccagctcttcatcaactacaagctcaagtctgtggcccaccttccctggcgcatgctcacctacaaggccctcaacacattcatcgacgacctgttcgcctttgtcatcaagatgcccgttatgtaccggatcggctgcctgcgggacgatgtggttttcttcatctacctctaccaacggtggatctaccgcgtcgaccccacccgagt

SEQ ID NO: 51528 - DNA, 289 bp, Zea mays
aaaaccttcccaaactaatggttctactctgaaacatcaatcagatatgccaccaccaccggctccaccccctcggaacaataatttcaatgggaaggagaaacaaccagtccctgtttctagagaagatgatgatgacatttttgttggagatggagttgactatttagttcctaacaaggaaatgagtcagagccctgtctctgatatggatgaatccccacataaccatcagaagcagtccaatttcactgaaccgctgtatggcccagttccaccatctgaatct

SEQ ID NO: 51529 - DNA, 286 bp, Zea mays
gtgactggcatcataaagtttgatctgcatgctgaaccggaaagtggtgtgaaagaacttgaagtgggaggaaatgtacaaggcatatatgacctgggacctggtagatttggttcagaggcgatttttgttcccaagcatccaggtgtgtccttagaagaagatgacggctatttgatattctttgtacacgacgagaatacagggaaatctgaagtaaatgttatcgatgcaaagacaatgtctgctgatccagttgcggtggttgagcttcctaatagggttc

SEQ ID NO: 51530 - DNA, 281 bp, Zea mays
aagaactacaaggacctgtcgactgcgcttgagaagatgttcagtggcttcagtactggcaaggatggcttatctgagtaccgcaaggatggtgaatatgttctgacttacgaggacaaggatggagattggatgcttgttggcgatgtaccatgggagatgttcgctgactcttgccgcaggctcaggatcatgaaaggatcagatgcaattggacttgaaaggagacataattcatggtccctgcatctgtggtggtagctctcttggctccaagggca

SEQ ID NO: 51531 - DNA, 294 bp, Zea mays
ggcggcgaacggccggtcgagcgccgccgcccttggctgggtcttcactcagtccttcgccggcgacgagcgtcacacctggtgtctactgaactgagcagacagtagcaagagccactatgctgttcttctcctacttcaaggagctcgtggggaaggaggtgacggtggaactcaagaatgacctggcgatccgcgggacgctccactcggtagaccagtacctcaacatcaagctggaaaacacccgcgttgtcgaccaggacaagtatccccacatgctgtcagtgcgga

SEQ ID NO: 51532 - DNA, 291 bp, Zea mays
gagagacgcacatctatctgtcaagcgacgccgcggcctcgatcagagtcggaggcgaacacccccatggcggcggctggcggcggcgcaggagggaaggtatccttcaagatcatcctcacctccgaccccaagctccctttcaaagtgttcagcgtgcccgatgcggcgccctttaccgcggtgctcaagtacgccgcggaggagttcaaggtcccgccccagaccagcgccatcatcaccaacgatggaattggcatcaacccccagcaaagtgcaggcaacgtgttt

SEQ ID NO: 51533 - DNA, 283 bp, Zea mays
cgctgactgcttctctgaggttcgatggtgccctcaatgtggatgtgaacgagttccagaccaacctggttcctttcccgaggatccacttcatgctctcctcctacgcaccggtgatctcttctgcgaaggccttccacgagcagctgtctgtggcggagatcaccagcagcgcgttcgagccgcgcttccatgatggtcaagtgcgacccacggcacggcaagtacatggcttgctgcctgatgtaccgcggcgacgtggtgcccaaggacgtgaacgccg

SEQ ID NO: 51534 - DNA, 273 bp, Zea mays
ggtatgcatacgcatgaggaccatgtatagttagttattattacatggcggcgtcgttattattattattacatgcatgcaatgcaaggagagcgtgcgtacgtggtgcattaattgctgactatactagtacgactcgacgagtgcatcctccttgtgcgtctggatgacgaggtccgaggtggggtaggcgatgcaggtgagcacaaagccctcggcgacctggtcgtcgtcgaggaagctctggtcgaactggttgacggagccggagac

SEQ ID NO: 51535 - DNA, 283 bp, Zea mays
agctacgttggtgatcgcctgctgtcagcggtggtaccgtacgaagaaaccggatggtacgacggccagatgtgggtgaagccaccagaggtgttggcccgtgacaggctcctgggatcttacaaggtgaagccggtggtcaacctgctgaagcagacgctggtgggcaccggcgcgctgctcgtgggcgccgtgtcgctcttcgcgttcgccgcgccggtcgaggacttcctccacgccctgagccagcctccctcctccgccaccgcctcgtccaagccga

SEQ ID NO: 51536 - DNA, 286 bp, Zea mays
cccgagtctccagccaaccgcatccagtccacccccatccccctcgaccccgacaaacccgacccgatggcgcccaaggccgagaagaagccagcggagaagaagccggcggccgaggagaaggcggagaagacgaccgcaggtaagaagcccaagtccgagaagcgcctgccggcctcgaagtcctccggcaaggagggcggcgagaagaaggggaagaagaaggccaagaagagcgtggagacctacaaaatctacatcttcaaggtcctgaagcaggtgcacc

SEQ ID NO: 51537 - DNA, 284 bp, Zea mays
cgcgagtgggagcaccaggatctcgggctcggaacgagactgcacgcattgttttaagaaaatggcagacaaaccagacctgggggaaatcgccagcttcgataaggccaagctgaagaaaacggagacgccggagaagaacaccctgccgaccaaagagaccattgagcaggagaagcggagtgaaatttcctaagatcctggaggatttcctacccccgtcctcttcgagaccccagtcgtgatgtggaggaagagccactgcaagatggacacgagccaca

SEQ ID NO: 51538 - DNA, 277 bp, Zea mays
cgcaactggaagcttcgctgcaatctgccctactcctcttccgccgcctccaacaccgcagacgcagctgccgcgggcgggagcttggacgtgctacgctgctctcatctcgtttccgcgcaggaattgttctcaatggcccgcgtgtatgttggcaacttggattcacgggtgacttctggggaactcgaagatgagtaccgcgtgtttggagttctgcgaagtgtttggattgcacgtataccacctggctttgcatttaaagattttgacgaca

SEQ ID NO: 51539 - DNA, 280 bp, Zea mays
gaaccttggcgagatgatgacgctcggtagaaatgatgccgcggtaacagcaagtttcattgaagggctgaccttggaaggacctctcggacatgctgctcggaagctcgtgtactgcctcagaatgcccacggatgagcaccgggtgaaggttgggatcagctggttcacaaaggctgcgatcgattcgcttgcctccgtgcaaaacgcggtaagtaacacgctcacaggctcatcatgactgtacgggttcttaggtgtatattgcctgcctgaacgg

SEQ ID NO: 51540 - DNA, 268 bp, Zea mays
gtgactggcatcataaagtttgatctgcatgctgaaccggaaagtggtgtgaaagaacttgaagtgggaggaaatgtacaaggcatatatgacctgggacctggtagatttggttcagaggcgatttttgttcccaagcatccaggtgtgtccggagaagaagatgacggctatttgatattctttgaacacgacgagaatacagggaaatctgaagtaaatgttatcgatgcaaagacaatgtctgctgatccagttgcggtggttg

SEQ ID NO: 51541 - DNA, 275 bp, Zea mays
cggctcgagtgcagcgccgcctggatcgagcagccgagcgactaagcgaagactcccttttccccgagcacaagagaaccatggcggcggcggcagtatacggcggcttcaaggggaagcttggcgtcgaggatgcccccgagctgcagctcaaccgcatccgcatcacactctcatccaagaacgtcaagaacttggagaaagtttgtgcggatttggtaaagggagccaaggacaagcatttgagggttaagggacctgttaggatccctact

SEQ ID NO: 51542 - DNA, 275 bp, Zea mays
gggatttacaacttattcgggacatccctgatgaaatcaaggatgcgtcacgtatggtgatcaatgtagaattcaacaagtataggctgacttcttgctaagcatggtgcggtctgctccatccgagaatggttgggtagaaatacaagtcagaccaaatgtaaaacagaattctgatggaacaaatacagaacttttcatattcaggtttgcctgccctggtgagggcctccctgctgacgtcgtccaggatatgttcagcaattcccaatggt

SEQ ID NO: 51543 - DNA, 276 bp, Zea mays
atcaagcaagcagcgagtacatacatactaggcagccaggcagccatggcgcccaccgtgatgatggcctcgtcggccaccgccgtcgctccgttccaggggctcaagtccaccgccagcctccccgtcgcccgccgctcctccagaagcctcggcaacgtcagcaacggcggaaggatccggtgcatgcaggtgtggccggcctacggcaacaagaagttcgagacgctgtcgtacctgccgccgctgtcgacggacgactgctgaagcagtgga

SEQ ID NO: 51544 - DNA, 277 bp, Zea mays
aaaaattccagcataccaggaatcatcaagaagcggccccagctgtgcgggatcagcatgtcagacaatctcaagccgatgatggcttatctggagagcatcggcgtcgacaaggctcagtggagcaaggtgatcacccgcttcccggcgctcctcacgtacagccggaacaaggtgcagacgaccgtgagcttcctcgccgagctaggtgtctccgagaagagcatcggcaagatcctgacgcggtgcccccacatcatgagctacagcgtggacg

SEQ ID NO: 51545 - DNA, 272 bp, Zea mays
actactgcgagaatgaagactattctcagcaatcagactgtcgacattccagaaaatgtcgacattactctgaagggacgcacagttatcgtgaagggccccagaggaaccctgcggagggacttcaatcacatcaatgtagaactcagccttcttggaaagacaaaaaagaggctccgggttgacaaatggtggggtaacagcaaggaactggctaccgttcggactatttgtagtcatgtacagaacatgatcaagggtgttacactggg

SEQ ID NO: 51546 - DNA, 275 bp, Zea mays
agatgaaagcaagataaatacattaaagctagttgacatggaatgcagctacttgacagtagatttcttcaggaagcttccccaggatgttgagaggggtggaaatccaagccactctatttttgatagatataatgactcttatcttagacgcattggacaaactgttctgtcatatgttaatatcgctctatcgaccttgaggaactccatcccaaaatctattgtttattgccaagtgcgagaggccaagcgctcgctgcttcgatcattct

SEQ ID NO: 51547 - DNA, 271 bp, Zea mays
ggcagtactactactggtacctcaccaacgatggcattgagcacctacgcaactacctgaacctcccgtctgagattgtgcctgccacgctcaagaagtctgccaggccactgggccgtccatttggctctggccctcctggtgaccgcccaaggggccctggtcgttttgaagacagaccaaggtttggagacagggatgagtaccgtggtggtcctcgtggtgcttccggtgactttggtggcgataagagtggagctcctgctgagtt

SEQ ID NO: 51548 - DNA, 271 bp, Zea mays
ctcctgtcagttcacggctgatataattgctatgaacaatgctgattttatcatcaccagcacataccaagaaatccctggcctcaagaatactgttggacagtatgagagctatactgcctttactctgcctggtctgtaccgagttgtctctcggatcgatgtcttcgatccaaagttctgtatagtctctcctggagctgacatgtccatatactttccacatactgagaaggccaagcgactcacctctctacatggttcaatcgaa

SEQ ID NO: 51549 - DNA, 269 bp, Zea mays
ggtgatgaatggctttcaaaaccgtaagcccatgaaggggaaagtgttccaggaacctctggttcatgaggtccccagatctgtggattggagagagaaaggctacgtgactcctgtgaagaatcagggtcagtgtggttcttgttgggcttttagtgctactggtgctcttgaaggacagatgctctagaaaactgggaggcttatctcactgagtgagcagaatctggtagactgctctgggcctcaaggcaatgaaggctgcaatg

SEQ ID NO: 51550 - DNA, 269 bp, Zea mays
tacctggacaaggtctcacactctgaggatgactgtctagctttcaaagttcaccaatactttaatgtagagcttatccagcctggagcagtcaaggtctacgcctattacaacctggaggaaagctgtacccggttctaccatccggatctcgaggatggaaagctgaacaagctctgccgtgatgaactgtgccgctgtgctgaggagaattgcttcatacaaaagtcggatgacaaggtcaccctggaagaacggctggacaaggc

SEQ ID NO: 51551 - DNA, 269 bp, Zea mays
tacaattctatggctcttgtagccccacggccagggatggagctggctaatattcaacatcatccaaatcaggctcctgggcctggaggaaaacaacgcacatctagcctggaggcaccaataatgctgcttacaggtcaccagagtgctatctactgcatgaaattcaatcctgcgggaacagtgatagcatcaggttcccatgacaaggatatcttcttatggtatgttcatggtgaatgtacgaactttatggtactgagagggca

SEQ ID NO: 51552 - DNA, 276 bp, Zea mays
ggagaactccagcaacatctggaaataactacggaagttaatccccagttctacgcattcagatggataaccttactgctgacccaggaattcaacttcgccgacaccattcacatctgggacacactattaagtgatcctggtggcccccaggaaaccttgctcagaatatgctgcgcgatgctgatccttgtccggaagcgcctcctggccggcgacttcacctccaacctcaagctcctgcagaattacccaccgacgaacatcagccacctc

SEQ ID NO: 51553 - DNA, 267 bp, Zea mays
cggaaaggtattaaattaaatggggtttgcccgcaccgtataagggcatgttcggttcccgctcaattcatatggattggaggggtttgagtgggattaattccatatcaagtcaaaatccttcataatttttttcaatgctttccaatcccatgaggtataggaataactgaacaaggcctaattgttgcagttttggtcacattcacacagtgtgttatagtagcagtttgtgtgctcgggacactggggaagtttaatgtatcc

SEQ ID NO: 51554 - DNA, 272 bp, Zea mays
actggtgttgaggccaaggacattgagctggtgatgacccaggcatctgtttcaaggcccaaggctgtcaaggccctcaaggcttctaatggggacattgtcactgccatcatggatctgacaacctagggtgatatttctgtccgtgccacttttgttttggagtgctattgcaacttgagtgttatatgtggacctatgcttcgatgatgttacatgattgcttcttgggtcaaggtcattcaaacaaggtttcatctttgctggcttga

SEQ ID NO: 51555 - DNA, 264 bp, Zea mays
gggtaaaactgattattatgctcggaaacgcttggtgatacaagataaaaataaatacaacacacccaaatacaggatgatagttcgtgtgacaaacagagatatcatttgtcagattgcttatgcccgtatagagggggatatgatagtctgcgcacgtatgtacacgaactgccaaaatatggtgtgaaggttggcctgacaaattatgctgcagcatattgtactggcctgctgctggcccgcagcttctcaataggtttg

SEQ ID NO: 51556 - DNA, 263 bp, Zea mays
gtttcttgctcccctttcagggttccgattgctaggctagctgcagctcaggtgcttgtctgaggctgcctcctcgttggcaaccggattgcctgctgctggtggatgtggtgatcaacagtattattacagagccatgctatgtgaacattactagtagcagtgctcataaaagctacaatcccatctcccttttttttccagtcatgtaaaacttccaaactgctccatggttcaaaactctgttcttcaatacatcatca

SEQ ID NO: 51557 - DNA, 262 bp, Zea mays
cccgaccacaccgttcctccgagcccaggagcagccccgcgccaggaggaagtttgttcttttaacaatatgtcgagggaggagaatgtttacatggccaagttggctgagcaggctgaacaggtatgaggagatggttgagtatatggagaaggtggctaagactgtagatgtggaagagctcactgttgaggagcgtaaccttctgtctgttgcatacaagaatgtgattggggctcgccgcgcttcatggcgcattgtt

SEQ ID NO: 51558 - DNA, 265 bp, Zea mays
cggggagacagctggagttggagagattgagggccacggcagcctgggtgtgtctttgcttctcttcaggacgtgaagacgagccagtatccttggtgtgcactcagaagtcctcctgaagttctcagccagaccttctgaagatggagcggtctacccaggagctgtttatcaacttcacagttctcctgatcactgtgctcctcatgtggactcctcgtgaggtcctatcaatactgaggggccatgccacactcccgggagt

SEQ ID NO: 51559 - DNA, 262 bp, Zea mays
ctcccccaccaggatcttcctcgaggagacgtccctggtcgcgcgcccggggctcgccatggacgacatccaggagcgcatggccgcgcgcctcaggcacctgggtatacgcgtccgaagcgtcgaggaggacgagcgctgcgtcatccccatgggagggccgctgcccgtcctgccgcacgcggacgtcggcatcggcggcacggcagggatggtgcacccgtccacgggctacatggtggcgcgcacgcttgccaccgcg

SEQ ID NO: 51560 - DNA, 256 bp, Zea mays
ctctctttccggtgtggagtctggagacgacgtgccgaaatggcacctcgaaaggggaaggaaaagaaggaagaacaggtcatcagcctcggacctcaggtggctgaaggagagaatgtatttggtgtctgccatatctttgcatccttcaatgacacttttgtccatgtcactgatctttctggcaaagacaccatctgccgtgtgactggtgggatgaaggttaaagcagaccgagatgaatcctcaccatatg

SEQ ID NO: 51561 - DNA, 267 bp, Zea mays
cgattttctctgggaacggattaaaaagagcgaagctgaattgcttgctgagaagaaatgcgttgcccatcttacaggagaggggaatgcattctgtgatcttccggaagataccatgctaccaggagaagtgtagtttagttacagaagcaacagcagcggaatgcatttgccaatacattagctgagacttgaaacatctgcttgccagatgcagcaactacttttatatatatatgtgtatattcaataattgtgccacacgaa

SEQ ID NO: 51562 - DNA, 263 bp, Zea mays
gttacctaaacgaaagaaatggcttccacaaaattatctaaagaaccaagcccgagcagaagagtactttgccaagagaaaagctggtgctggtgaatctgatagcggctctgcatagaatttctttgcgatgtactcttctcttgcttttagcatatgcttattactgagcaagacaaattaagacaactaaaaatgttcataacttcttcatccaaactctgacttcgatgatattagacatttcggaaattttatttaaa

SEQ ID NO: 51563 - DNA, 259 bp, Zea mays
gtcagcggggtgccgcttgacgctgacacgaaggccgcgctcatgcagccggcgaaggtgtcgctcgtggtcgacatgctcaacgagggcgcggcggacaccaagatcaactgtgtccgcctcatccgcatcctcatggatgagaggggtttccggccggagacggtggcgagcctgagactcttggttggtgtcatgcgcctcatccgggacaagcggcatccagacggtgtggtcgcggggctcgagctgcttaatt

SEQ ID NO: 51564 - DNA, 260 bp, Zea mays
cgaggattttgacaatgttcaagtccttggagcaaatatgtctgctcttgggctttcacagaaacccatatatacacatggagtcaaggaatcctcaatcagtaattctaacgatggtccagattctatggagacaattcctgatgcagtgcctactgtattcactgagcctcctgtggaggaccaacttgcatggaatactctatggcctgaatcgcacaaactatatggtcatggaaacgagctcttctctatatgct

SEQ ID NO: 51565 - DNA, 261 bp, Zea mays
ggaaaattgttggagttgatttgattagtggtgtcacatgtgatgctccatatgaatggtcggacaagactgattcagaatgggagtttaagagggatccgtcaagtgaaacttttcatgtggttgcctacgactttggtatcaagcataatattttgagacgattgacatcatatggatgcaaaataacagttgttccagcaaattggcctgcttcagaggtactcaatttgaagcctaatggtgttctttttagcaatg

SEQ ID NO: 51566 - DNA, 207 bp, Zea mays
agaccttcgaaaaatgcaaacttacagtaagcaaatggtgctaccttcttggctatctgaggaagatgtcagttaccttgcaagtgtgtactcaaaaactggatttgctggtggagtaaattactatcgctgcttggacctgaactgggaactgatggcgccatggacaggagcaaaggtgcaagttccaaccaagttcatcgttgg

SEQ ID NO: 51567 - DNA, 273 bp, Zea mays
acgaactgcatggacgctgaaggaaagctgcgcccagatcaggactatctgatgcacatcagccaccgctggtcccatgacggcgcgaggcagaccatagcgaactcatgggcgctcaggacggttcaggcgacgctgtcgagcaggacgtggcgtccagtaatgcacactgtgtcgcgttcctcatcaaagacccccaaaaggtgaaaacggtcgatgagatgagggagcggctgaggatgcgtggtctccgctgccacatcatgtactgca

SEQ ID NO: 51568 - DNA, 266 bp, Zea mays
caacagcgccactgtccagtgcgcgcgtcaagcttgcttagctagccgccatggcctccccttccgccgtctccgtgaagcccgtggccatcaagggtctcgccggcagctccatcgccggtaggaagctcgccgtcgccaggccgtcggcccgctccatccgcaggccccgcgcaccgccgtggtggccaagtacggcgacaagagcgtctactttgacctcgacgacatcggcaacaccaccggacagtgggccctctacggct

SEQ ID NO: 51569 - DNA, 180 bp, Zea mays
caaagtagtaaatcaaacaattacaaaagatctgaaggccagaactgtggaaatttccttacggaccgtccgtcgaccaaggtgcaagcagctccaggtggcgactcttcactcggttatctttttagtggcagcaaagatggcaagtgatgtacacctgctgttagtgttcgccatgat

SEQ ID NO: 51570 - DNA, 146 bp, Zea mays
acgcaccagaagcctgacatgggccatgctgtcaatgtgctctctaccctttcggaagtttggaaaccagccgatccggactcggatgacagctacggtatcgaccttaacatgtccctgcctcaggctctgaagagatgggaggc

SEQ ID NO: 51571 - DNA, 264 bp, Zea mays
aattgggctggaagggctacaaccttcaaagcaacagcagacatacttgctcctggcaatctcatatgggctgcatgggcgcctaatggaacagatgaatcaaactatgctggtgaaggatttgcaatggtttctggaactagcatggccacaccgcatttcgctggcattgcagcactaataaagcagaagaacccagagtggagcccctcagcaataaaatctgccatgatgacaacaaccaatacactggacaaagggagt

SEQ ID NO: 51572 - DNA, 271 bp, Zea mays
atacatgcagcaaaaatcttaatgacttccgccttgtcctccttgatagagaagcacatataaccgaattgccactggacaatggggttcgtgctttgcttagaggttgcaccaaactacggaggtttgcattttatgtgagacctggggccctatctgatgttggtcttggctatgttggacaatttagtaagagtattcgttatatgttgcttggtaatgttaattaatctggtaatggaatcatacaattatcaaaaggctgcccaag

SEQ ID NO: 51573 - DNA, 174 bp, Zea mays
atggctctattttggcttctctcagcacttttcagcagatgtggatctccaagggagagtatgacgaaactggtccgggcattgtccacatgaagtgcttctaagtttttttgggaaatttttccaaaaaaaaaaagaagtttctggggaagttcgacatggtacgtaaggcgt

SEQ ID NO: 51574 - DNA, 131 bp, Zea mays
atggcgaagttgaaagatatgaagaggcaggaggagattgagaagaacaagcttgccttggagaggaagaagaggcaggctgagaagcaggcagcaaaatctgtggcccgagcacagaaggaagctgagaa

SEQ ID NO: 51575 - DNA, 153 bp, Zea mays
caagacaggctgcggcaactcgtacgctccatttcctaaaggttgcttctacaccacctccggtgggctgcagagcttcgagcacacggtgcacgaggtcaaggcggtgccacgcgtggacagccaaggccagatgtgcggctccatcttcaa

SEQ ID NO: 51576 - DNA, 234 bp, Zea mays
aagagaagctccagtctttttcaaatttgactggtgaagagagctaccagaatcgcgacttggaaaaggcctcacaacaggtcgcgaacacctccatgacatcaaagttcagccatcgactctgcttccgaaacaaattggtaacatgtatactgcatccctttatgctgcattagcatctgtgctagataacaaccatgatagtctgaatgggcaaagtatggtgatgttctc

SEQ ID NO: 51577 - DNA, 270 bp, Zea mays
ctgctcctcacgccgccgccgccgccgccgtcgccgccaccacatacgtagcgcccagccgccggagaagaggagggagccagcaccagccaccatgggtcgcgtccgcaccaagaccgtgaagaagacctccaggcaggtgatcgagaagtactactcccgcatgaccctcgacttccacaccaacaagaaggtgctggaagaggtctcgatcctcccctcgaagcgcctccgcaacaaggttgccggcttcaccacccacctgatggg

SEQ ID NO: 51578 - DNA, 140 bp, Zea mays
cagcgccactgtccagtgcgcgcgtcaagcttgcttagctagccgacatggcctccctcgccgccgtctccgtgaagcccgtggccatcaagggtctcgcaggcagctccatctccggaaggaagctcgccgtctcaagg

SEQ ID NO: 51579 - DNA, 262 bp, Zea mays
atgaggaacagggcacgaccgtaaggctcaatcgctgaggcatatattgcggacgagtgcttgacattttgctctaaatacatggatgatgtcgaaacaaaatttaatcgggaaccaagaaataaagggttttctaatgaggaagcctataccgttgatgtttttgggcatggagttaattttacctctgcgcctgaactagtgtatgatgatagtgccatggatcaaatggtatggtatgttctgaacaattgtagtcagg

SEQ ID NO: 51580 - DNA, 211 bp, Zea mays
gcagcagcagcagcagcagcagcagcaccagcagcacttgggggaaaagctagaggctagagtcatggatgaccagcgcgacctcatctctaaccatgagcagctgcccatcctgggccagcgtgctagagccccagaaagcaattgcaaccgtggagtcctgtacaccagtgtcactgtcctggtggctctgctcttggctgggcaggca

SEQ ID NO: 51581 - DNA, 249 bp, Zea mays
cagggggttcatctggggaggaggcgggtggcgagctcgacgtcgatgatgatctccctcatggcgggcttcttctcgccgctgatggcgatgaggtagctcctgccgacccacccgatccacccggcgatgtagaagaagagcaggcccggggtgacgaactcgccccagtgccgctggtcgctgctgacgatgaggtgcggcaggccgtcggcgccgcagagcaggccgaacttgccgtagttctcg

SEQ ID NO: 51582 - DNA, 280 bp, Zea mays
atcaaggtggctttttcatgattgggcagaaattctcaaagccatcaagtgaagatacatactactctctgacaagaagcatgctgcacaaactgggtcttgaaaaatatgaaaagaatttcaggaagggtctcctcaacgatcaaacattaccactccttacggacagtgctctgagagatgtgaagatccctcctggacccagacttctcattctcgaccaaattaaaagggaccctggcctggttcgagcaaagtgaagtcacaattgtcaacaatt

SEQ ID NO: 51583 - DNA, 276 bp, Zea mays
agggcatcctgctgaagccgtccatggtgacgcccggcgcggaggccaaggacagggccaccccggagcaggtggccgcgtacaccctcaagctcctccaccgccggatccccccctccgtgcccgggatcatgttcctctccggcgggcagtcggaggtggaggcgacgcagaacctcaacgccttgaaccaggggcccaacccgtggcacgtgtccttctcctacgcgcgggcgctgcagaacacctgcctcaagacctggggcggccagccgg

SEQ ID NO: 51584 - DNA, 275 bp, Zea mays
ggcaggactcgcttcaagctcctcatctcgcgcagggggggtcgcctgagatcacagagacaatggtgaaggcagttgctgtcctcgccggcactgatgtcaagggcaccatcttcttttcacaggagggggatggtccgaccaccgtgactggaagtatctctggcctcaagccagggctccatgggttccatgtgcacgcgcttggcgacaccaccaacggctgcatgtcgactgggccacacttcaatcctgttggcaaggagcatggcgca

SEQ ID NO: 51585 - DNA, 270 bp, Zea mays
gttatgcaatatggacatcatctctaaggtccaacaggtaatctgcttcgcgttccacgacagcaaactgctgatggaaacatgccaggaggccatgaaccttcggaagatcgtgacactcttctacttggattagctccggtagggatctagtctccttttattttgggtccgtggcgtaggctaacgttggggggataaaaagcaagctgaacagtttagttagtttcggaatatattggataggtggtgcggtgaccttctattgga

SEQ ID NO: 51586 - DNA, 257 bp, Zea mays
cacgtgttcaaggccgacctccccggcgtcaagaaggaagaggtcaaggtcgaggtcgaggacggcaacatgctggtcatcagcggccagcgcagcagggagaaggaggacaaggacgacaagtggcaccgcgtcgagcgcagcagcttgccagttcgtcaggcgcttccgcttgccggagaacaccaaggtggatcaggtcaaggctggcctcgagaacggcgtgctcacggtcaccgtgcccaaggcggaggaga

SEQ ID NO: 51587 - DNA, 278 bp, Zea mays
cggctccaacttgatcgacatgagcgtccggtagcagatcgaggagatcgcgtccgagttcgagttgcccgccgtcccgctcgaagtctgaggccggcttgagaaattctttatcgccctcgaagctataggtcctttttctgttgcctctctccctgctctgctattcatctgtatcattctcttgttgttgaatgttttgagtgaatggtgaatgctgcatacctggattttaggattcatatttgaatgaatggtgaatacactgcataccggat

SEQ ID NO: 51588 - DNA, 253 bp, Zea mays
ctccactttcaggcgtactacttgtcagtgcctttccctgttgagaaggcagctacccacaagatcccactctctgaggacacgaagaagaatggggataccgtgtccaagctgataaattatcctgtgagaggcctggtatttgatcgagggaacaccctggacgacctggccactgtggtttctaatgcttgcatttggctgctagacaacaatgtgccttacaatgtgctcagttctgactgtagcaaga

SEQ ID NO: 51589 - DNA, 270 bp, Zea mays
gccgccgcggcccgcgctcccgcagctcgcagtaccgcggcgtcaccttctaccgccgcaccggccgctgggagtcccacatctgggattgcgggaagcaggagtacttaggtggattcgacactgctcatgccgctgcaagggcgtacgaccgagcggcgatcaagttccgcggcgtcgacgccgacataaacttcaacctcagcgactacgacgacgatatgaagcagatgaagagcctgtccaaggaggagttcgttcacgccctgc

SEQ ID NO: 51590 - DNA, 270 bp, Zea mays
cggcgatcggctacggcgccgatgaccagggaacccagtactggatcctcaagaactcctggggcacaggatggggtgagaacggtttcatgcagctacagatgggcgtcggcgcctgtggtatctccacgatggcctcctacccaattccatgaacacaaatcttcagataaagcggcgtatataccagtccattcatatgactgcagaataaagcatggaagattaattacatgcgtgcatcaaggcatgctacgtactgtattaaaa

SEQ ID NO: 51591 - DNA, 268 bp, Zea mays
agaggacggatgcccaaagatacagcttggtaatatgaaaatcgagcttccacttcacctcttatctccagttgctattgccgtagctgctgctggaatagctgccacactggcgtgccatcctctcgaagttatcaaggatcgcttgactatcaaccgagaggtttatccaagcattggccttgccttccgcaggatctataagacggatggtataggtggtttctatgctggcctgtgtccaacgctgattggcatgattccttac

SEQ ID NO: 51592 - DNA, 272 bp, Zea mays
agctcgagcaatccccctctttatttcttgtacgccgtggttgtacatgtcgatacagaaaatgcatcattctctgggcactatatatcatacgtcaaagatatgcagggtacatggttgagaattgatgattcagaggtccaggttgtatcagtgaatcaggttatgtcagaaggtgcatacatgcttttctacttgaggtcttttccccgaccaccaaggatatacatcgagaaggggctgccggttacatccgcaaagcggcacacgtc

SEQ ID NO: 51593 - DNA, 269 bp, Zea mays
ctgaatgcaccaaaatgtgcccaccacaataaccacgatgatgggttcatgaacttcatgcacagggacgaagaggtgaactacttcccttcgaggtttgatcccgcccgtcacgcggagaaggtccccattcctccccgtgttctaacaggctgtcgtgagaagtgcatcattcagaaggagaacaacttcaagcaggctggcgagagatatcgttccttcgaccctgcaatgcaagaccggttcatccagcgatgggttgacgcact

SEQ ID NO: 51594 - DNA, 267 bp, Zea mays
gtttatacgactggaaatccttatggcatagaggaggatatcgtgttcagcatgccatgcagatcgaagggtgatggtgattacgaactagctagtgatgtgttgatggacgattttctctgggaacggattaaaaagagcgaagctgaattgcttgctgagaagaaatgcgttgcccatcttacaggagaggggaatgcattctgtgatcttccggaagataccatgctaccaggagaagtgtagtttagttacagaagcaacagc

SEQ ID NO: 51595 - DNA, 102 bp, Zea mays
gcaagatgaagcccaacatcatctttgtactttccctgctcctcatcttggagaagcaagcagctgtgatgggacaaaaaggtggatcaaaaggccgattat

SEQ ID NO: 51596 - DNA, 262 bp, Zea mays
cgccggcatcatccgtctcgtctcgtctcgtctcgcctctcctctccttttcccccctccctgcacagcgccgctcaccgtcaccgtagtacagcagcgatcgatggctgaggtacacaacgagcggcccgtgatggtgggcgacgtccgggacgcgccggtgggccgcgagaacgacctcgaggccatcgagctcgcgcgcttcgcggtcgccgagcacaacagctagaccaacgcgatgctggaattcgacaagctggtg

SEQ ID NO: 51597 - DNA, 264 bp, Zea mays
ctggtctacaccaacgatcagggggaggtcgtcaaaggagtctgctcgaacttcctctgtgacttgaagccaggcgctgaggtgaagatcacagggccagtgggcaaggagatgctcatgcccaaagaccccaacgcaacaatcatcatgctcgcaacgggtaccggcatcgctccgttccgctccttcttgtggaagatgttcttcgaggagcacgaggactacaagtacaccgggctggcgtggctgttcctgggcgtcccg

SEQ ID NO: 51598 - DNA, 258 bp, Zea mays
agaacaccagcgcggtctctataatacttaggggcgcaaatgactacatgcttgatgagattgaacggtccttgcatgatgccctgtgcattgtgaagagaaccctggaatcaaatatggttgttgctgggggtggtgcagttgaagctgcgctgtcagtttatctggagaaccttgcaacaaccctgggttctcgggaacaattggcaattgctgaatttgctgagtctttgttaatcataccaaaggtactatctg

SEQ ID NO: 51599 - DNA, 261 bp, Zea mays
cgaagatgcgaggagggggagaatataccttcctttggacgagcttgcgcaggcaggtctcacggaagaggacatcttcagagggaaagtgaccggcaagtggagaaggttcatgaagggccagatccagcgtgccaggctcttctttgatgaggcggagaagggcgagaggcatctcgactctgctagcagatggccggtgctcgcgtctctgtggctgtacaggcagatccttgatgccattgaggcaaacgactacaa

SEQ ID NO: 51600 - DNA, 242 bp, Zea mays
caaactatacctactctactctactcttttgtgtttatcatcatcatcattattactcgatcagtcgtatgcatatgattccatcatttcagcatctttatctttcaatcatgcttgtggttactaaatataaaaaaagaagggggaaatttctcatcgtctatgggacgaacgcaggctgcaagcttcggaggatccaacatcgatccagcagcttgggaggacaagaagtgccccggcga

SEQ ID NO: 51601 - DNA, 290 bp, Zea mays
  unsure (1)..(290): unsure at all n locations
cttccacccacccacccactcgcttcagccgcctccgccgcgcgtacaagcaggtggagacaggatgccggctggccacggcctgcgctcgcggacgcgcgacctcttcgcgcgccccttccgcaagaagggctacatcccgctcaccacctacctccgctcctactagatcggtgattacttcgatgncaaggtgaactgcgccgtccacaaggggatgccgcacaagtactaccacggccgcaccggtcgcgtctggtacgtcaccaagcgcgccatcggcgtcgagg

SEQ ID NO: 51602 - DNA, 288 bp, Zea mays
cgagtccacacgccccagcaccacccctgcctctcagtccagtcccccacccaccaccaccactcctcccctcgccgccgcccgttcccgaccgatccggccggatcgccccgccatggaccagtacgagaaggtggagaagatcggggagggcacgtacggggtggtgtacaagggcaaggaccgccacaccaacgagacgatcgcgctcaagaagatccgcctcgagcaggaggacgagggcgtcccctccaccgccatccgcgagatctccctcctcaaggagat

SEQ ID NO: 51603 - DNA, 281 bp, Zea mays
ccgtcttctccgccaccgaccccaagcgcaacgctcgcgactcccacgttccggtgctggcgccgcttccgatcgggttcgctgtgttcatggtgcacctggcgacgatcccgatcactggcaccggtatcaacccggcgaggagcctcggcgccgccgtcgtgtacaacaacagcaaagcctggagcgactggtggatcttctgggtgggcccgttcatcggagcggcgatcgcagcgctataccaccagatcgtcctccgcgccactgccagggggtac

SEQ ID NO: 51604 - DNA, 288 bp, Zea mays
aattggaccaattggctggcattacctagatgacaagaacagtttctatgtggccttggaacgagtttcccatgagtaactgaggggaggggtactcatctccatctccaaagataaacctactccccacaagaactggcctttaatgtggtataactgttccgctgcctcctggcgtggccagtataaatactgagtaccagcatgtccatttgaacatgcagagggttaatcctgcttcctaaagcctcaagtacatgcctcctgcttagttcactttgtatcaca

SEQ ID NO: 51605 - DNA, 282 bp, Zea mays
attcgggctttaagagagaaggagtccaaattaaaggctgcaaggatgaacatttatgtccggagaggtggtccgaactaccaaactggactcgccaaaatgcgcaccctaggcgccgaacttggcgttccaattgaggtctatggaccagaggctgacatgactgggatctgcaaagatgccattgattgcatcatggccgcgtaaatcacaaatgtggttgttccatttgaagtcacatccgtttgtactagacgttccttgtacgtgattgctctggta

SEQ ID NO: 51606 - DNA, 287 bp, Zea mays
cgagtccacacgccccagcaccacccctgcctctcagtccagtcccccacccaccaccaccactcctcccctcgccgccgcccgttcccgaccgatccggccggatcgccccgccatggaccagtacgagaaggtggagaagatcggggagggcacgtacggggtggtgtacaagggcaaggacctccacaccaacgagacgatcgcgctcaagaagatccgcctcgagcaggaggacgagggcgtcccctccaccgccatccgcgagatctccctcctcaaggagt

SEQ ID NO: 51607 - DNA, 282 bp, Zea mays
ctctcttcagccattcaagaaaccttgggctaatgagcacgagcccttgaaaaccttgtatgatgctgttcagtccatcaaacctacagttctgatcgggacatctggagttggaagaacattcacaaaagaaatctttgaggccatgtcttccttcaacgagaggcctatcatcttttcatcgtcaaacccaacctcgcattctgaatgcactgctgaacaagcatatacatggagtcagggccgttcaatctttgccagtggcagtccatttgcccccgt

SEQ ID NO: 51608 - DNA, 282 bp, Zea mays
cttgtcttcacacgaagagaactttgacatgttaaacaggacagatcgacaaaagtaaagcagtcattattgcaaaccctcgcacttctgaattcgaggttgttagaactagcctgatgtcgtgtttattaaaaacactgaaacataatatagaccatccaagacctataaagatttttgaagttggtgatgttgtgatgctggactcgtcacgtgatgttggtgcctctaataatcgcaggcttgcagctttgtactgcaatagggtttctggatttgagg

SEQ ID NO: 51609 - DNA, 280 bp, Zea mays
gttgggatccagcatagggtcactaaggaagacgccatgaagtggttccaggtcaagtacgagggtgtgatcctcaacaaggcccaagccaacacctcctaagcctaagcgtcaccataagatattagaccctcttggtctcttctagtgcttcgagttaatggagtatatctggcggtgggatttgtattagaagaaaatcagatgcattatcatttttgcctgtactggtcctactggagttagttggatccatgtttttgtgtgtgtcgaatacatt

SEQ ID NO: 51610 - DNA, 279 bp, Zea mays
cccacccggcgggctcagagctcctcttcgtgacccagggcaccgtcgccgccggcttcatcagctccggctccaacaccgtctacaccaagacgctgtacgccggcgacatcatggtgttcccccagggcctgctccactaccagtacaacgccggcaccggcgctgccgtaggcctcgtcgccttcagcagccccaaccccggcctgcagatcaccgactttgcgctctttgccaacaacctcccgtccgccgtcgtggagaaggtcaccttcttgg

SEQ ID NO: 51611 - DNA, 277 bp, Zea mays
gccgccgcgtccgcctcgccaagcgcacagccgccgcagcacatctctctctcgatctcagccatggcggaggtggagcagcaacaggacacgccgaagctgttcaaccgctggaccttcgatgatgtccaggtgaacgacatctcgctgaacgactacctcgctgtgacgcgacgaagcacgcgatgtacctgccgcacaccgcggggcgttactccaagaagcggttccgcaaggcgcagtggccgatcgtcgagcgcctcacaaactccctcat

SEQ ID NO: 51612 - DNA, 275 bp, Zea mays
acaagttaaatcatggtgaactggttgagaaaaataactggttacccgaggggcctattaccattggtgttacttcaggtgcctcaactccagataaggttgttgaggatgctcttcagaaggtatttgagatcaagcgtcaggaaattttgcaggttgcataaattttaagcagagatttggtgaagagctgaatagttttggcttggcaaaggttactagaaacgttgcacaggcaaatgtttgtacagtagctaaggatgtaacgagttggg

SEQ ID NO: 51613 - DNA, 141 bp, Zea mays
agcctacaaaagatttaatctaaggcagaatgtgactgtcttgccctggagcatcatgtaaaggaaatcttaaagaggattggtagagatccggagtcaatttcaatagcatatatcaaaacattttgtaaaaattctaga

SEQ ID NO: 51614 - DNA, 290 bp, Zea mays
tagctccgcctcttcgccgctgcccgtttcttcgaaccactccgaagctgccccgccatggacagctccgccactgacggtcgcgatgctatcgccgccaagggccggtgagtcgcctctgcgtcaggtgctgcgagaggaaggccgcgcttaagcggcccaaaaccctataacagaattctctgtttaaagctggtgatcgtgtggcaatcggagcttctggtggtaaagattcaaccgtgcttgcatatgtgttatcggagttaaaccgtcagcacaactatggtctt

SEQ ID NO: 51615 - DNA, 242 bp, Zea mays
acgtgccctccgcgagaaggcttcgggagcaacttgcgttcagaaactcgatggttcgcgggattctgcaagtcacaccaggtatcgcattttgctacgttcttcatcgatgcgatagccgagatatccgtctggagtgctggctagtctgctactcatcacggttgtatatacttagcatataaatcatcacggttgtatgtacttagcaaataaagcagcgtaacgggaatgatgtgtat

SEQ ID NO: 51616 - DNA, 274 bp, Zea mays
agcaccagctgcaagtgctccacctgttgagaaaccatctgctgcaaagactgatgcggccaagcaggtttctgctgtggttaccagccagaccaataactaccacagggctgatggtcagaacactggcaacttcctgacggaccgtccttcaaccaatgtccacgctgctcctatcggtggctcttccctgggctaccttttcggtggcaactgatgcccgtgctggtgggctcaccagagttatcctcccctgcctgctgcgtgctatgtc

SEQ ID NO: 51617 - DNA, 275 bp, Zea mays
atcgcgcggcgaccacccgattcgaagcgtgcggagagaccgaagaagcgggagatatggctcgtaccaagcagactgctcgtaagtccacgggagggaaggctcgcaggaagcagctttccaccaaggctgcccgtaagtctggccccaccactggtggagtgaagaagcctcaccgctacacccctggaactgttgccctccgtgagatccgcaagtatcagaagagcactgagctgtagatcaggaagctgcctgtcagaggctcgtcaggg

SEQ ID NO: 51618 - DNA, 274 bp, Zea mays
taattgtctggacccttggaggaaagaatgtatatgtggaaggatcatgggataactggaaatcgagaatagccatgcaaaaatctgggaaagatcattctcttttgctggtactcccagcatgaggttaccgatacagatttgttgtagatggagaaatgagatgtcttcctggatctcccctgtgaaatcgatgcaatgggcaatgcggttaaccttcttgatgggaatgattatggccctgaaagtgttgagagcgtgggcagagtttgag

SEQ ID NO: 51619 - DNA, 268 bp, Zea mays
cgacaacgcggtggaagaccaccacgctctacaagctccacctcggcgaggccgttatcgcagagctcaccatcggcagcaacgtttaggaggtcgtcttcaagaacctgcgcttcgaggtctgggatctaggagggcaataaagcctgctcacttcgtgggcgacgtactaccggggaacacacgccgggatcgtggtgatcgacagcacggatcgcgcccggatcaacatcatcaaggacgagctgttccggcttttgcatgacgc

SEQ ID NO: 51620 - DNA, 272 bp, Zea mays
cagggggttcatcttgggaggaggcgggtggcgagctcgacgtcgatgatgatctccctcatggcgggcttcgtctcgccgctgatggcgatgaggtagctcctgccgacccacgcgatccacccggcgatgtagaagaagagcaggcccggggtgacgaactcgctctgagtgctgtggtcgccgctgacgatgaggttcggcatgccgtcggcgccgcagagcatgccgaacttgccgtagttctcgaaccgccgctttgtcttctcgat

SEQ ID NO: 51621 - DNA, 250 bp, Zea mays
taattgctaggctagctgcagctcaggtgcttgtctgatgctgcctcctcattggcaaccggattgcctgctgctggtggatgtggggatcaacagtatgattacagagccatgctatgtgaacattactagtagcagtgctcataaaagctacaatcccatgtcctttttttccccagtcatgtagaacttccaaactgctccatggttcagaactctgttcttcaatacatcatcaattatcgattaa

SEQ ID NO: 51622 - DNA, 269 bp, Zea mays
agagatcacttcccttgcaccaagcagcatgaagatcaaggtcgttgcaccgcctgagaggaagtacagtgtctggataggagggtcgatcctagcctcgctcagcactttccaacagatgtggatatcgaatgaggagtacgacgagtctggcccggcaattgttcaccggaagtgcttctagggtttcacaagttcctcgtcgttacctagtcgcaatatgtcactgcatttttcgggagatgtgtgtggcagatttgcatgatacg

SEQ ID NO: 51623 - DNA, 189 bp, Zea mays
gcagcccccaactacccccagcctcggaaggaaccttccagaagcgcaagactctacaggccgtcgccttcccattcttcctcgccgcgggggtcgcctgagatcacataaacaatggtgaaggctgttgctgtgcttggtagcagcgatggtgtcaagggcaccatctttttcacccaagagggagat

SEQ ID NO: 51624 - DNA, 188 bp, Zea mays
gatcctttgatgcttaacagtgtaatactggtacttgccaataagcaagatatgataaggggaaatgacaccaatggaggtgtgtgagggtcttggcctctacgatttgaagaaccgcatctggcacatccaaggctcttgtgcgctcaaaggtgatggcctttatgagggcttggactggctggcaa

SEQ ID NO: 51625 - DNA, 185 bp, Zea mays
tacccgccattgctccgctccgtccatcgatcgaaacgtggtcttgaattaactatgatctccatgagcctggagatggatcaacccgtcgtgcgttgtttcattttgtgatgaatgggagagagggtatgggacaagattgatcaacccgtcgtgcttacgtctcgttaattaggagagctacc

SEQ ID NO: 51626 - DNA, 178 bp, Zea mays
  unsure (1)..(178): unsure at all n locations
ggtgatggtctcccaccggcgacgtctacgcntggaacactgggattctgatctgggccgtcaccctcgtgggatcctcggcggcggcgccatcctcgtctacaacaccagcgccctctccggctaaggatatccaatgcatgcgcttcatgcgattcgtcatgtaaaatcagggtgt

SEQ ID NO: 51627 - DNA, 181 bp, Zea mays
gaaatgttctgaaggaaatgggagtgctggtgaagttaaccatgccatgtcagggtgcaggattttgctgcaacctcaaagtgctcatctcacaccagcgtcttgtgtattttccatctatcgtctgttcattggtgacaattgtcctcagaaatgcattgggacgtggtcggcttgaagg

SEQ ID NO: 51628 - DNA, 186 bp, Zea mays
tcaagacacacccggggctggacgagatcgagcgggagaaggtgtgcagcgtcatgggccccgctcaggctgtcgtacaaggcgcggatgcacgcgtcgcagaaccaagcggctgccgctgcaggccgtgctcagcgtgctctactacgaccagctgaagatccgtagcgcggacggcagcggcgg

SEQ ID NO: 51629 - DNA, 176 bp, Zea mays
gggaaagacgacctcgctagggaagcttgcttacaggtttaagaacgaagtgtcaagtattgatggcagaggtgataccttcagagcagcagctcatgataagctagaagtttgggctgagagaactggttcagagattgtcattgacaatgacaagaaggcacagcctccagcag

SEQ ID NO: 51630 - DNA, 189 bp, Zea mays
aggcggtggaaaagttctgcgtgcatggcatcgggacaaagcttcagcggtacccaagaaatcttttcatgcctagatacagttataacaaatgctgttgtgattgattataccggaatatacaaggctgatatcggtataaaaggtggacttatagttgctattggaaaggctggaaaccctgatgtc

SEQ ID NO: 51631 - DNA, 179 bp, Zea mays
ccccgaacgtgtccgtggtggacctggtgatcaacaccgtgaagactggcatcacggccgacgacgtgaacgcggcgttccgaaggccgccgccgcacgctgcagggcatcctggaggtctgcgacgtgccgctcgtgtccgtcgacttcaggtgctccgacgtgtcctgcaccatcga

SEQ ID NO: 51632 - DNA, 179 bp, Zea mays
gactgctccaggccggcacgctggcgccatggaggagtacgctcgagaaccttgcccgtggggaattgtggatagatctgtggcggacattccaccatgggtgtcattggtggtggagtcttccaggctgtcaagggcttccgcaatgcccctgttggaattcgacaccggttcagagg

SEQ ID NO: 51633 - DNA, 166 bp, Zea mays
aacaaggtgactcagtataagaagggcaaggatagcctgtctgcccagggaaagcgccgttatgaccgaagcagtcaggatatggtggtcagaccaagcctgtcttccacaagaaggccaagaccaccaagaagattgttctgaagctgcagtgccagagctgcaa

SEQ ID NO: 51634 - DNA, 183 bp, Zea mays
aaaggttgttcctggatttggtcatggagttctgcgtaagacagacccacggtattcatgtcaaagggagtttgccctgaagcattgcccgaggatccacttttccaactggtgtccaagttatatgaagtcgtacctccgatcctcactgagctaggaaaggtcaagaacccgtggccgaat

SEQ ID NO: 51635 - DNA, 180 bp, Zea mays
atttcaagtggagttagcacatggctgtatagtggtgacattgatgccgtttgcccagtaacttcaacgctgtattcattagacatcctggggctgaagataaattcatcatggcgggcatggtattctgatgatggtgaggttggaggctatgttgttgagtacaaaggtctgatattt

SEQ ID NO: 51636 - DNA, 179 bp, Zea mays
gaacttccggccagcgcagcattttggcttcctgaccttgggctacggctgacgttttttgtggtgtactccgtgccatcattccgtcctgacgccgctgctgctgcggggcttgacaggctcggcccggcggctcccagtgccggcgccaagatccattcgttgccgccggagggaag

SEQ ID NO: 51637 - DNA, 178 bp, Zea mays
atggggcctttggaggctatggtcacggtggttacggccacgggtatggtggcacggcaagttcaagcatggtcacggcaccacggcaagttcaagcacgggcacggcaagttcaagcatggcaagcacgggcacggcatgttcggcggcggcaagttcaagaagtggaagtgatgtg

SEQ ID NO: 51638 - DNA, 176 bp, Zea mays
aaggtgaactacgccggcgtgtccaccaacaactacgccttggacgaggtctcagaggtgaaatgagtggggccggccgtcaagggctccgcgctagctaccgtgtgattgatttgtagtagttgtgaaatgaggctgtgaactgcatgctgtgctggctagcgtcacaacatcga

SEQ ID NO: 51639 - DNA, 175 bp, Zea mays
  unsure (1)..(175): unsure at all n locations
caagggcaagggcgtgtaccagttcgtcgacaagtacggcgcgaacgtcgacggatacagcccaatctacaacgaggagactggtctcccaccggcgacgtctacgtcatggaaccactgggcttctgatctgggccgtcaccctcgctgggatcctcggcggcggcgncctcct

SEQ ID NO: 51640 - DNA, 175 bp, Zea mays
aaaaattccagcataccaggaatcatcaagaagcggccccagctgtgcgggatcagcatgtcagacaatctcaagcgatgatggcttatctggagagcatcggcgtcgacaaggctcagtggagcaaggtgatcacccgcttcccggcgctcctcacgtacagccggaataaggt

SEQ ID NO: 51641 - DNA, 174 bp, Zea mays
gcgaagtatggcggaggtgcaggtcctggtgcttgatggtcgaggccatctcctgggccgcctggcgcattcgtggctaaacaggtatgctggcccggaaggtggtggtcgtacgctgtgaaggcatcaacatttctggcaatttctacagaaacaagttgaagtacctggctt

SEQ ID NO: 51642 - DNA, 176 bp, Zea mays
agcgaagagagttgttgtggtatcttcagtggcggctgtgttcaataatcctgactggcctaagggcgaggcctttactgaggatagctggtcagatggggaatattgcagaaaaaatgaggaatggtatttcctttctaaaacattggcagaacatgaggcttttgcttatgcag

SEQ ID NO: 51643 - DNA, 171 bp, Zea mays
caccgaccctatggacgagtacctgatgcagtacctgatggactacgaggacaggaagttccagaacgtgtccaagggggcctgaagctgggcaaggactcgaggctcaaggacctcaaggagtcgttcaaggagctgacggagtggtggaagaagaccctggagagcgag

SEQ ID NO: 51644 - DNA, 297 bp, Zea mays
aggggccaacccgtggcacgtgtccttctcctacgcgcgggcgctgcagaacacctgcctcaagacctggggcggccagccggacaaggtcaaggcggcgcaggacgcgctgctgctgcgcgccaaggccaactccctggcgcactcggcaagtacacctccgacggcgaggccgccgaggccaaggagggaatgttcgtcaagaactacagctactaattaatcgcccggccatcacccgggataccgccgcccctccgagagatacgtgtgtactgatcatggttaagcacgtac

SEQ ID NO: 51645 - DNA, 291 bp, Zea mays
caaaaaggacagacggggtttctacttcagatctcataatgaggatcttgaaggactataaccagtatgtcatgaggaatttagcacggggctactcgaggaaagatcttggtgtgagctatgtcaaggagaaacaattgcaagttaatatgaagatcaataaactgcgggagactgtgaaggcacatcaggaaaagttgcaaacagtggcaaagactgctggtttgaatcatgaagaatggcttgctaatgcggatcgctgggttgctggtttcctagagaagtttgagc

SEQ ID NO: 51646 - DNA, 294 bp, Zea mays
ccgacttccttggtgacagcaggtcgagcatcttcgacgccaaggccgggatcgctctgaacgaccacttcgtcaagcttgtctcgtggtacgacaacgagtggggctacagcaaccgcgtcgtcgacctgatccgccacatgttcaagacccagtagagggttttccccctgcttctcatggatggttgctgcttgtgtatgccgagaataaatgtggatgtcgccaggttcatgctgagtctggacatgttttgcacttttgtttccatttctgccatcatctgtggcagat

SEQ ID NO: 51647 - DNA, 283 bp, Zea mays
cagtcaacaacaacgcatgggcctacgccaccaacttcgtccccggcaactaagctcaacggctatgctatgcaacttcattgtctttcggatcggagagggtgtacgtacgtggattgattgatgctgcgagatgcatgtgtgtcttttgtttcacgttgcattgcataggcaagtcgagatgatgagttggcgttgttgactaagatgaaccatgtttgtgcaatagtggtggtttttgtttcctgctggttaaaaaaaaaaaaaaaaaaaaaagggcggc

SEQ ID NO: 51648 - DNA, 298 bp, Zea mays
gtcaagagcttggtgatggacgacttctacgcgggtgaaggcacggaccacagcggcgttccaacaaaattggtcacaacaaactgctctctgcacatagctgtctacaaccctgccacaatgtttggaattcatgtcacttctggccccatccacctgatgtattcagagatcccaatagcagtcggtcaggttcggaggtattaccagccgaggaagagccaccggatggtgacggcggtcatccacggcgagaaggtgccgctgtacggcgccgggggcagcctgatgctgtcga

SEQ ID NO: 51649 - DNA, 291 bp, Zea mays
caggcacgccggcaatgtgctggtgaggaagcttaacggtggcacaggccgctttggttgccagacagagctgttcccaattgatcatggcatgtgcttgccggagaacttggaggacccttacttcgagtggatccattgggctcaggcttctatcccgttctctgaggaagagctcgagtacatcagaaatcttgatccaaggaaagatgtgcagatgctgcgccgggaacttccgatgatacgtgaggcctgcctacatgtactggccctgtgcacaatcttccttaa

SEQ ID NO: 51650 - DNA, 289 bp, Zea mays
attggctatgatggagaaggtcttagggcctctcccagagcatatgattgtcagagctgatcggcgtgctgaaaagtacttcaagcgcggagtaagtgttggactggccagagggagcggcctcacgagagagcatgaaggcagtctggaaattgcctcgtctgcagaaccttgtgatgcaacatgttgatcattctgctggagatctaattgatcttcttcaaggacttcttcggtatgatcctaatgagcgcctgaaagcacatgaagctctacaacaccctttctt

SEQ ID NO: 51651 - DNA, 283 bp, Zea mays
catagtttcttctactacacgacgacaaacatggggaagcctgcgaagatcggagagtggggtggatacgccggcgatcgtcgggatctgatggctactccggaccggctgaccgatgtgaaggtcacggcggacaacagcagctgcatccgctccatctccttcatctacatcggagccgatggcaagccgtacgaggaggggccatggggtttcggccatgctggcacggagtacaagattgatctgtgcaggttcgacgagagcttgacggagatctccg

SEQ ID NO: 51652 - DNA, 284 bp, Zea mays
acaatgaccaaccagggtgttcaagtgttcccagagataatggttcctcttgttggaacaccacaggaactggggcatcaagtgactcttatccgccaagttgctgagaaagtgttcgccaatgtgggcaagactatcgggtacaaagttgtaactatgattgagatccccatggcagctctggtggctcatgagatagcggagcaggctgaattcttctccttcgggacgaacgacctgaagcacatgacctttgggtacagcagggatgatgtgggctagtc

SEQ ID NO: 51653 - DNA, 282 bp, Zea mays
caggactgctcattccggggcctactggcttcaccagacggatctaaagtatttgagacggcaagaagtggaccgtactctttcgacgacatggtcgagatgggcaaagacgctggccacgaactgaaggcgaaggctgggcctggcttcttcgatagccttcaatgaacagaatgtgcggccatgcgcgatttcagttggcaccctttcggttgaaaacgagggccatagtaggttgttgaggggtttgtttttgtttcttctttttttctcctactacta

SEQ ID NO: 51654 - DNA, 270 bp, Zea mays
aacaaatccgtttggatgatgcgcaatattattcacttcaacacattggcaaatcaggctgtggagcgggcagctggtactgatggccaaaagataacatacggtgtcataaaacaccgtttgggcgatctattttatcgcctagtatctcaaaagttcgaggatcctgccgaaggtgaagaagctttggtcggcaaatttaagaaactgtatgatgacctcaccactggtttccgcaatctcgaagacgaggcacggtgaactagtgta

SEQ ID NO: 51655 - DNA, 94 bp, Zea mays
ccagtccaagtggaaaatcttggcatattatacatattgtaataatagacatcgtacaatctgcatgctgtgttgtaataattaattaatatcc

SEQ ID NO: 51656 - DNA, 284 bp, Zea mays
gcattcgagaaggcttctgggaagaaaatccctctggtgttcgctgggcgaagacccggagacgcagagatcgtctacgccgcaactgccaaggcagagaacgagctcaaatggaaggccaagtacgggatcgaggagatgtgcagagatctgtggaactgggcgagcaagaacccgtacgggtacgctgagacacgcgacaacagcaaatgaaccacccatccatgcatcccatcctgcagtaggagcaagcagcagccttatagcctatgctaccataatta

SEQ ID NO: 51657 - DNA, 283 bp, Zea mays
cgggacggcatggcccttggagctgcgtaccatcactacctgcagctcgccggcgaccatggcaccgccacacacgcactgctcctcggcgtacttatcttcctcgtcatccgcctagtatccgcaacgcgaaccggcacaacctcagccaacaaacgtaagcagcaacagcggcttccgctcccgccttcgcccccgggcaagctgcccatcatcggccacctccacctcatcggcgccgagacccacatctcgatccgggacctggacgccaagcacgggc

SEQ ID NO: 51658 - DNA, 278 bp, Zea mays
attggctgcatgaaatctggacctgttgttgctaagaatgactccaagtattatgagccagaccattggaagtttgggactgagggtaacaactactttaggcatgcaacacgtcagttgtatgctgtaaccagggatttagcaacttacatatcagcaaaccggcatatcctgcacaagtattcaaatgaagatgtatcatttggctcttggttgatcgggttggaagttgagcatgttgatgagagaagcctttgctgtggtactcccacagactg

SEQ ID NO: 51659 - DNA, 279 bp, Zea mays
acggcggcggcggagcaaaagcaggcgaaggcgagggtgcgagggaaggtgcaccagccatggtgcacgtcaacttctaccgcaactatggtaagacgttcaagaaaccaaggcgtccttatgagaaggagcgtcttgatgctgaactgaagctggtcggtgagtatgggctgaggtgcaagcgtgagctttggagggtccagtatgcactgagcaggatccgtaatgctgcaaggcacttgctcacccttgacgagaagaaccccgtcgtatctttga

SEQ ID NO: 51660 - DNA, 277 bp, Zea mays
accagctgaagcagcgttgcttgactgggctgtgaatctgatggccgacgtagtccaagaagaacacataaacaagatgaacgatcgcaatattgctatggtcttcgcaccaaatatgactcagatggcagatcctttgactgcactgatgtatgcagtccaagtgatgaattttctcaagatgctggtacaaaagaccctcaaggatagagaggagtcgaccccagaggatgctttgctgccccagaaggacccatctgatgaaaacgggcatcag

SEQ ID NO: 51661 - DNA, 267 bp, Zea mays
ctctctctctgctcctccgcctccgcctgatccatccaagacagggatcgccatgtcggactcggatgagcaccacttcgaatcgaaggccgacgctggggcgtccaagacctacccgcagcaggctggcaccgtccgtaggaacggcttcatcgtcatcaagaaccgtccctgcaaggttgtggaggtttctacctccaagactggtaagcatggccacgccaaattccactttgtcgccatagacatattcaatgggagaaagct

SEQ ID NO: 51662 - DNA, 272 bp, Zea mays
tagcgtttgacaaacagatatatcattggtcagattgcgtatgcccgtatagagggggatatgatagtctgcgagctatgcacacgaactgccaaaatatggtgtgaaggttggcctgacaaattatgctgcagcatattgtactggcctgctgctggcccgcaggcttctcaataggtttggcatggacaagatctatgaaggccaagtggaggtgactggtgatgaatacgatgtgggaagcattgctggtcatccaagtgccttcacct

SEQ ID NO: 51663 - DNA, 272 bp, Zea mays
tgcggcacagcgtcgcagtccgcagatgtcgatcgtggtggcatcggaggtcgcgactgctctcgcgagccgcggcgcggtcgtcgccctcgagtccaccatcatctgcgacggtatgccgtacccgaagaatctccagatggccatggaggtggaggccatcatcagggacaacggggctatccctgcaaccatagccgtcctagacggagtccctcacgtcggccttaacaacgaacaattgaagaggttggctataagtggaaggcaat

SEQ ID NO: 51664 - DNA, 143 bp, Zea mays
caagacctacccgcagcaggctggcaccgtccgtaagaacggcttcatcgtcatcaagaaccgtccctgcaaggttgtggaggtttctacctccaagactggtaagcatggccacgccaaatgccactttgtcgccatagaca

SEQ ID NO: 51665 - DNA, 269 bp, Zea mays
ataagcttcttaatggcgaggctggtccctggacgatccatgttcctaccggggagaagctctacgtttacgacgcggcaatgaaatacaagtcggaaggtcatgacatggtcatcatcgctggctccgagtacggcagtggcagctctcgtgactctgctgccaagggaccaatgctactgggtgtcaagtcggtgattgcaaagagcttcgagcggatccaccggagcaacttggtggggatggggatcattcctctctgctttcaa

SEQ ID NO: 51666 - DNA, 266 bp, Zea mays
tcctgatggtatggatgtcctgaaggtcagggaggttgctaaggaggcaattgagagggcaaggagatgtgaagggccaaccctagtcgagtgtgaaacatacaggttccggggtcactcccttgcagacccagatgagctcaggaagcctgatgagaaaacacactacgccgcaagggattctatcacggccttgaagaagtacatcatagagcagaacctcgcaaccgaatccgagctgaagagcatcgagaagaagatcgacg

SEQ ID NO: 51667 - DNA, 263 bp, Zea mays
gaagaaatggttttggtgtgtgacagccagccctacgcaatcctgaggaaggcaactgcatgcgctttggaaatactgtccctttaatttgctatacatactatccataagacaatgtaggggtacccaggcctctccgggctccaggatgggctatctcgtaaaactcttgcgtgcgtgtatgtatggtgtgagagcattcgcaaagtggacttctggttgtaattcttagtcgtctctctctctcactctttgggttggtc

SEQ ID NO: 51668 - DNA, 264 bp, Zea mays
tagaacctactgatcaatggttaccctgatggaaaaatgagtcagtattttgcaatttggaagccaggagatgttgttgaagtcaaatggcccattgaaaagctcagatacaacccgaacattaaaaaacagattgggatgatcgctggtgggtctggtataacaccaatgctgcagttcgcagggctatcctcaaaaaccctaatgacaacactcaggtctccgtaatttacgccaatgtgtcaccagatgagatattgctca

SEQ ID NO: 51669 - DNA, 216 bp, Zea mays
gcaagtcaaagcagatgccgtaagcttggcaagtagactcgaagccctagaaaagaccaaacgaatgtttctgggtgaaaatttagaagaatgctccattgaagaactgcataatctggaggttaaactggcgaagagccttcacgtcatcagagggaagaagacacaactgctggagcagcagatatccaagctgaaggagaaggagaggacctg

SEQ ID NO: 51670 - DNA, 252 bp, Zea mays
gtcaatgttattctcggtggttacgataaggatggtggcgcctcactgtactacatcgactacattgcgaccttgcacaagatcgacaagggcgcttttgggtacggatcgtatgtctgcctgtctctaatagccaagctgtaccgaccagacatgaccgttgacgaagcggtagacctcgtggatgagtgcattaaggagatccggctgcagctcgttatggcatccgagcactacgtgatcaagatcgtc

SEQ ID NO: 51671 - DNA, 256 bp, Zea mays
cgagatcaatgcagctgctaggctgaggtgggctgccagcgagaaagctgagggaggatgtcatagtgcagatcaagagagccgcagtgatgcagaagtcaaggacttggcgggtctgggtatcacaagacagcgccaggctatagtggatgggctcaatagacactgttcttgctttctctgagaatgtgccttggacctctgcaaaggatgtcatggacatggttctggttaccgagtacttcgacaccatgaa

SEQ ID NO: 51672 - DNA, 167 bp, Zea mays
acaaggaccgagcaaatgatatcttcaagaagattgaagatctcaagtacattaggggaagaaatcaagatgccatattagccgcatgtctatatattgcttgtagacaagaacatcgccctagaactgtgaaagaaatatgttcggttgctaatggggccacgaag

SEQ ID NO: 51673 - DNA, 273 bp, Zea mays
ctcgagccgctcggcgccatctcgttgcccaccgtcggcatggtcgtcccctacggagccttcttcgtccctgccggctccgggaacgccggcgggggacctacgcgaaggacaagctgggcaacgacatcacggtggaggcgtggctcaacacgcacggtcccaacgaccgcacgctcgcgcaggggctcaagggtgaccccacgtacctggtggtggagcaggacaagacgctggccacctacgggatcaacgccgtgtcactcacctcgg

SEQ ID NO: 51674 - DNA, 269 bp, Zea mays
ctgggagagacttcgattgcatcatcgatttcgtatcttgataatggtgttgtttacgttggttcacggtttggcgattcacagctggtgaagctgaacctccaagctgatgcaagtggttcatttgttgaaattcttgaacggtatgttaatcttggaccgattgtggacttctgcgtggttgaccttgataggcagggtcaaggtcaggtggtcacttgttctggggcgtttaaagatggttcccttcgggtggttgtaatggtata

SEQ ID NO: 51675 - DNA, 240 bp, Zea mays
tccaggtctccagcgaagcggctcaggcgcaacgcaacaacacaaggcggcggttatggcctctgctgctgcgacggctacgatggggacggggaaggtggtttgcgtcaccggcgcatcagggtacatcgcgtcctggattgtcaggctcctactcgaccgcggctacaccgtccgcgccaccgtgcgagacaccgctgacccaaagaaaacattgcacctgactgcgttggatggtgc

SEQ ID NO: 51676 - DNA, 266 bp, Zea mays
agagtcctcggacaccatcgacaacgtgaaggccaagatccaggacaaggagggcatcccgccggaccagcagcgcctcatcttcgccggcaaacagctcgaggatggccgcaccctcgccgactacaacatccagaaggagtcgacgctgcacctggtgctccgcctcaggggaggcgccaagaagcgcaagaagaagtggtacaccaagcccaagaagatcaagcacaagcacaagaaggtgaagctggccgtgtccagttcta

SEQ ID NO: 51677 - DNA, 264 bp, Zea mays
aggtgcatttgctgttgcgttttggtaacaggaagaccaagaagaagaccaagacctctaaacctaaatttgagaagataaagaaactttttaagaaaaaggaaaatcaagcccctgcatatgctcttggtgaaattgatgaagctgctccaggagctgaaaatgaaaaggctagtattgtaaatcaacagaagttggaaaagaaatttggccagtcttcagtttttgttgcatccacacttcttgagaatggggaaccctgaa

SEQ ID NO: 51678 - DNA, 263 bp, Zea mays
ctcctatccactgcggctggacgcgtgcgagagacttgaccaagcagcagcagcagggatggcgcctctgaagctgtacgggatgccgctgtcccccaacgtggtgcgcgtggccaccgtgctcaacgagaagggcctcgacttcgagatcgtccccgtcgacctcaccaccggcgcccacaagcagcccgacttcctcgccctcaaccctttcggccagatcccggctctcgtcgacggagacgaagcctcttgagtcccgt

SEQ ID NO: 51679 - DNA, 237 bp, Zea mays
ggaagtggaagtcagggagctgaaggaactagccaacttcttgggaaaaggaaaatacaagatctggttgcacaggtagatcccttaggcaaggttgacacagaagtggaggatttacttctagaaatcgctgatgacttcattggctcggtgactgcatttgcgtgtaccttggcaaagcacaggaaatcatcagttgtcgaagccaaggatgtgttgctgcacttagagaaaaat

SEQ ID NO: 51680 - DNA, 262 bp, Zea mays
gagaacacagtgtcgtgtgtgaccatgaacaaggttggtggcttcctgcagcggatggacctgtgccgcaaatacgcctttggcaagatgcatgtggtaggctctgagccccctttcaaggtcaaggggctctggctcttcaggggctcagaaattcccaagtttgtcatggacgaagtctatgacatggagctttatgagtggaccaaggttgacctctctgatgaggcacagaaggagcgggtcaatgcctgattgagga

SEQ ID NO: 51681 - DNA, 263 bp, Zea mays
aggaagtggaagtcagcgagctgaaggaactagccaacttcttgggaaaaggaaaatacaagatctggttgcacaggtagatcccttaggcaaggttgacccagaagtggaggatttacttctagaaatcgctgatgacttcattggctcggtgactgcatttgcgtgtaccttggcaaagcacaggaaatcatcagttgtcgaagccaaggatgtgttgctgcacttagaaaaaaattggaatttatctatcctggtttctc

SEQ ID NO: 51682 - DNA, 271 bp, Zea mays
cggctcgagtcaagttagaagaagcaccagtgcctgatcgatggcggcccaggctctcctctccggccggcagctgctgggccgccccgtgcagtcggccgtctctaggtcgtcggcgaggaaggcgcccttcgtcgtcagggccagctccagccctccagccaagcaaggtgccgacaggctgcggtggttcgcgtccaagcagtccctctcgtacctcgatggcacgctgcccggcgactatgggcttcgacccgctggcctctcggac

SEQ ID NO: 51683 - DNA, 267 bp, Zea mays
ccaccgtcccgcgcgaggagaaggccgagctcatcggcgagatcgccaagtcgtccgagctgcagccgcacgtcgtcaacttcctcaacgtcgtcgtcgacaacttccgcgcgtccatcgtgccgcagatcgtcgtcgagttcgagaacgtctacaactcgctcacgggcaccgaggtcgccaccgtcacctccgtcgtgcagctcgagtcgcaggacctcgcgcagatcgcgcagcacgtccagaagatgaccgggccaagaacgt

SEQ ID NO: 51684 - DNA, 262 bp, Zea mays
gcaccgctgccgaagtgggatagatggcggcggcggaggcaccggcaccggcaccgcctaggaaaggaaaccgaggaaactacagccatggtggtacggatccgtctggcgcggttcgggtgccggaatcggcccttctaccgggtgatggccgccgatagccgctcccctcgagacggcaagcacctcgaggtcctcggctactataacccgctcccagggaaggatggaggcaagaggatgggcctgaaatcgaccgggt

SEQ ID NO: 51685 - DNA, 262 bp, Zea mays
ctcagaggtgggttggcttctcctccgccactggttcgtgttcagggtctggttcgtgggcgagagggaacgagatggcggcgtccgacgttgagtaccgttgcttcgttggcggcctcgcctgggccaccgacgaccagtccctcaacaacgccttcagcacctacggcgaggtcctcgagtcgaagatcatcctggatcgggtgacgctgaggtcccgcagcttcggcttcgtcagcttctccacggaggacgcatgcgc

SEQ ID NO: 51686 - DNA, 261 bp, Zea mays
taggaggctaaggtgctcggtgttgataccgtgccagtacttgttggaccagtctcgtacctgttgctctcaaagcccgccatgggtgtggagtagggattccctcttcgttcccttcttagcagcatccgcccagtctacaaggaggtcattgctgagttgaaggcagcttgggcttcatggattcagtttgatgagcccactcttgtcctcgaccttgatgctgacaaattggctgcattgtctgctgcatacgagaac

SEQ ID NO: 51687 - DNA, 263 bp, Zea mays
ctcccccaccccgcctacgacctgacgtccttccggttcagacccatcaaggagtccatcgtgtcccgcgagatgacccggcgctacatgacggacatgatcacccacgccgacaccgacgtggtgatcgtgggcgccgggtccgcgggcctgtcctgcgcgtacgagctgtccaaggaccccaccgtgagcgtggccatcgtggagcagtccgtgtccccgggcggcggcgcgtggctgggcgggcagctgtctcggccatg

SEQ ID NO: 51688 - DNA, 262 bp, Zea mays
ccccgcgtccgctgccctagccgccgtccgccgacttcatcgtcgccgtcgtctagacctcttcacgcactggaaaggttaaagtccgacatcaatggcgaacatcatcctgatctcatcatgtgccggaagcagcctggcatcgcgattggccgcctttgcgagaaatgtgatggcaagtgtgttgtctgcgactcgtacgtgcgcccatgtacgcttgtccgggtctgcgacgagtgcaattatggttcttccagggaag

SEQ ID NO: 51689 - DNA, 259 bp, Zea mays
ggcgagtggaagaagaaaagctgccccactttgcttcgcttctccgctccctgccttctttctttcttccgcgattgtgctgtgtccaactcaaacaacaacagcaacaacaaagaaacctccccttcatcgtatccaaactccaccaccaccatcatcgaatcgaaaccgccatgaccaccagcatcgagtacgactatctcttcaagctgctcctcatcggcgactcctccgtcggcaagtcctgcctctcctcggt

SEQ ID NO: 51690 - DNA, 258 bp, Zea mays
atcgcctctcttccccttccctccctccctctccccgcggaccgccagaggcaatttcgccctcgattcgaccccgattcgtccgcccgcgaccgggattccctccgccaagcgcggatctgaacgctgcgctccgtgtcgccgctcgaatccgccatgaagggggccaaatccaagggcgccgccaaggccgatgccaagctggcggtgaagagcaagggggcggagaagcccgccaagggcaggaaaggaaggccg

SEQ ID NO: 51691 - DNA, 259 bp, Zea mays
ctcgagccgaggagagtacgtggaggagcagccatggcttcatcggtggccgccgcggcgagcacattcctgggcacccgcctggcggacccggcgccacagaacgggcgcatcgtggcccggttcgggttcgggttgggcggcaaggcgaaccggctccgaagaaggtggcgaagacatttacctcctctgaccggccgctgtggttccccggcgccgtggcgctcgactacctggacggctcgctggtcgcgactac

SEQ ID NO: 51692 - DNA, 260 bp, Zea mays
cgatgttgttgttggaacacctggccgcataatcaatttgataaatggcggaagctccagttgggagaagttcagtatttggtcctggatgaggctgaccagatgctcgcagtggggtttgaggaagatgtggagacaatattacaacagcttcctgcaggcaggcaaagcatgttgttctctgcgacgatgcctagctgggtgaagaaactgtccagacggtacttgaacaaccctgtgacgattgactggttggcgat

SEQ ID NO: 51693 - DNA, 253 bp, Zea mays
ccctgaacgtgttgtgcatgcacggggagccagtgccaagggtttctttgaggtcactcatgatgtctctcaccttacatgtgctgattttctccgtgctcctggggtccagacacctgttattgtccgtttctctacagttgtgcatgagcgtggaagccctgagaccttgagggatccacgtggttttgctgtcaagttcgacaccagagagggtaactttgacctcgtgggtaacaacatgcctggtttt

SEQ ID NO: 51694 - DNA, 216 bp, Zea mays
caggcattccgtaaacgatgcggagaagctcgtgacgatcggaggccatgtgctgcgcgaaggtgagtggctgtcgctgaatgggtcgactggtgaggtgatccttggaaagcagccgctttccccaccagcccttagtggcgatctgggaactttcatggcctgggtggatgatgttagaaagctcatggtcctggctaacgccgatacgcctga

SEQ ID NO: 51695 - DNA, 257 bp, Zea mays
ggagcgtaagcgaaggagtagcagcagcaggcggcgccgtgtagcggctccccatctcgagcttgccaccatggctagaggattgaagaagcatttgaagaggctcaatgcccccaagcattggatgctggacaagcttggcggagcttttgctcccaagccatcttctggacctcacaagtctagggagtgcctgccactgatcctcatcatcaggaacaggctcaagtatgctcttacataccggaggtcatttc

SEQ ID NO: 51696 - DNA, 262 bp, Zea mays
acaaagagagtatgagaagtccagaaaattgaagggtcatatacaaagaattcgtgagaattatacaaaagatttcaaaaacaaagatgtgacgaggaggcaaatagctgtggcaacataccttatcgataaactagcccttagggctggcaatgaaaaggacgacgatgaagctgatactgttggttgctgtacgctgaaggttgataatgttacatgtatgcctccaaatcagattcagtttgactttcgggtaaagatt

SEQ ID NO: 51697 - DNA, 249 bp, Zea mays
gaggtgatagcaccatgaggcagcctgtgggacccaaacctggcttcatggtcgagggtgctacactcgagacagtcactccgattccttatgatgtggtcaacgatctcaagggcgggtactagagagaattctggtaccttcagcagttcaagcgagtctggcaaactgatctgaatctgttgggataattggctagttcttctgttctggtgttatgaacccatgtggctattgctggtggcgtca

SEQ ID NO: 51698 - DNA, 249 bp, Zea mays
tgtggctaactgttggacctgtattagatggtgatgcagttggcactatcaacttccgggctgatcgcatggttatgctgcgatacactagagtatgcagatgtgaacaactttgactgtgtacgtgtcgccaaaagtcgatatgctgggatgcttcagtatgatggtgagttgaagctgccaagtcgctaccttgtttccccacgagagatagattgaacatctggggagtacttggtgatgatggca

SEQ ID NO: 51699 - DNA, 252 bp, Zea mays
cgcacctcgctccggatcagacgagaaggaaaaacacgcttgtggagtggttcatgaaattcttagcttaacggtggagaagcgcacgttggtggaccacctgacgcacttcagggaggagttcaggttctcgcagtccctgcgcggcatgatcattcgtcacccggacatgttttacgtatcgttcaaaggggatagggactcggtcttcctccgtgaggcgtacaaggactcgcagctggtgagaagaac

SEQ ID NO: 51700 - DNA, 255 bp, Zea mays
atcggcacggtgaatgaattgcaacctgtgcaaattgagtgcttgcctgagggatctgtaagcacagctggaactgcaacggagaacattcagcaagccccgcagagttcaaaagatatccaaagcaagtcccagggtgcttcaacaaggagctgtacaaaggttcataagcaaggagtcgcacttggcaggtcggtggacctctctaaattcaccgactacggcgaactccaagcagagctggaaagatgtttg

SEQ ID NO: 51701 - DNA, 253 bp, Zea mays
agcgtgattgtattcttcgatgaagttgatgctattggtggtgctcgttttgatgatggggtgggtggcgacaatgaggtgcagcgtacaatgttggaaatagtaaaccagcttgatgggtttgatgcaagagggaacatcaaagttctcatggccactaataggcctgataacttggatcctgcacttctgcgtcctggtcgtctggacagaaaggtagaattcgggctacctgacctggaggccgtaccca

SEQ ID NO: 51702 - DNA, 167 bp, Zea mays
cgtgggtgggggaaatgctgcgtctcgggatgctcaggcattcgcgtaaacgatgcggagaagctcggaggccatgtgctgcgcgaaggtgagtggctgtcgctgaatgggtcgactggtgaggtgatctttcatagcctgggtggatgatgttagaaagctcgcga

SEQ ID NO: 51703 - DNA, 181 bp, Zea mays
atatacgtaaacgaacgtgagctcagaatacggcacaagctgggcacaagtgggaggtcatggtggatttgttcttctacagggacccagaggaagcaaaggagaagctgctgttgacccagagtttgccgcaatcactgattaccaaagagcggatcagtggggtgtgctgattggggtg

SEQ ID NO: 51704 - DNA, 166 bp, Zea mays
acaagcaaatagtctgtcagcacctattcgatcttcaggaggttttgtagattcatcaggtgacaagtccaagtagagattaaaggccgcttttcagttacatctgagaatgtcgatcttgcaaaggttcagtaagaaaatctgccagcactggtgattgtttgat

SEQ ID NO: 51705 - DNA, 160 bp, Zea mays
aagcgtccttctttatggacctccgggcacaggaaagacattgttggcacgtgcggttgctcatcagccttcatcagggtgtctggttctgagttggttcagaagtatattggtgagggctcccgaaatttatggatgatattgactctctcggatctgc

SEQ ID NO: 51706 - DNA, 169 bp, Zea mays
acaagcgattgggtttgtcactatgagcactgttgaggcggctgagaaggctgtggagatgttccatgtacaatggaaggcttctgactgtaaataaagcagcacctagaggctcacatgtggccaaacccaagtggatgattctacattggtggagttgttcagaaac

SEQ ID NO: 51707 - DNA, 197 bp, Zea mays
cgaacaagcgcgcgcgtacgtgagctcagccttcgacacaaagcacgagacaatggggcacaaggcattgggttatgccggacagagcacatgttctttgcttgcttaaggctgtcaggcagatgattatggctcccacgcttgagctgaggcagcagacgctcgaagataaatcccggtgaacatccgactcctgg

SEQ ID NO: 51708 - DNA, 165 bp, Zea mays
cagatatagtaccatcaatggatggtcgaagtcaggcaacagttccaacgcatgctagaaaaacattcatgctcaagacaaaggttgttgggtgtgataccagtggagatggcgtaaagctgacacttactctctgggagaaccccatttacttctgggattggt

SEQ ID NO: 51709 - DNA, 165 bp, Zea mays
acaagctcctgaggtaggatgatttctacctgcaagagtatttttattgggagcatggtgggatagttccatataatgcacattgaaagggaattaggcttacacctagttcctaaataattttggtataagttatacaggtgcaaaaggtacacacttacatca

SEQ ID NO: 51710 - DNA, 151 bp, Zea mays
cccaacctcaagggcaagctcaacgggatcgcgctccgggtgcccaccccgaacgtctcctcgtcgtgcaggtctccaagaagaccctcgccgaggaggtgaaccaggcgttcggcgacggtccgtcgacttcaggtgctccggcgtctcc

SEQ ID NO: 51711 - DNA, 162 bp, Zea mays
aaggcctaatgaagatcctcacggaaaggggttattccttcaccacgacggcagaacgggagacataaaggagaagctggcctttgtcgccctagactacgagcaggagctggagaccgctactcacgatcggcgcggagaggttcagatgcccagattccc

SEQ ID NO: 51712 - DNA, 155 bp, Zea mays
acaagcgacgggcacctggtctgggactccatcaggcagtgggcgtccgagtacgtcaacgttccgacgaggccgtggccgccgaccccgagctgagggcgtactgggacgaggtgcgcaacacgattaaaactagtggagacgctgaccaccat

SEQ ID NO: 51713 - DNA, 180 bp, Zea mays
atgagaacaaggtgactattgggtgttcaggggcaattctgcacttgtggctattgagtaatggaagccaacggggtaaaaaggatgcggcaacagcactatttaacttgtgtatttaccagggcaacaaggggaaagctgtaagagctggattggtacctatactactagaactgctca

SEQ ID NO: 51714 - DNA, 188 bp, Zea mays
ggcgacgcgacgccactcttggtcgtctcataggcgacgccatgcatgagaagtttcacgtaagccttcttctttccatcaggcctgatcagggtgttgaccttcttggcctgaatgtcatacatcttcttgacagcagccttgatcttctaatctgccttgaggtcgacaatgaagaccagagtgtt

SEQ ID NO: 51715 - DNA, 183 bp, Zea mays
ggaagtggaagtcagggagctgaaggaactagccaacttcttgggaaaaggaaaatacaagatctggttgcacaggtagatcccttaggcaaggttgacccagaagtggaggatttacttctagaaatcgctgatgacttcattggctcggtgactgcatttgcgtgtaccttggcaaagcac

SEQ ID NO: 51716 - DNA, 184 bp, Zea mays
ggaagtggaagtcagggagctgaaggaactagccaacttcttgggaaaaggaaaatacaagatctggttgcacaggtagatcccttaggcaaggttgacccagaagtggaggatttacttctagaaatcgctgatgacttcattggctcggtgactgcatttgcgtgtaccttggcaaagcaca

SEQ ID NO: 51717 - DNA, 183 bp, Zea mays
gtgatgccagggcagtgggagttcccacacaggccttcgtgggtatttcttcaggcgaccaggtctgggtcgctcgctacattcttgagaggatcacggagatcgccggtgtggtggtgacgttcgacccgaagccgatcccgggcgactggaacggcgccggcgccagcaccaactacagca

SEQ ID NO: 51718 - DNA, 176 bp, Zea mays
agcacctgatccagttggttgctacaaggagatatatcgtgtgttgaagcctggccagtgctttgccgtgtacgagtggtgcattactgatcactatgatcctaacaatgcaacccacaaaaggatcaaggatgaaattgagcttggcaatggccttccagatatcagaatcactc

SEQ ID NO: 51719 - DNA, 191 bp, Zea mays
gttgtttctcttggggcagctgtgcagggtggggttttggcggagacgtgaaagatgtagttctcctggatgttactccattatctcttggtttggagacattgggaggagtgatgacaaagattatccccaggaataccacactgccaacctcaaaatcggaggtattctcaacagctgcagatggacag

SEQ ID NO: 51720 - DNA, 181 bp, Zea mays
cagcaaccggtccaacactttcacgctcaggcgctcagctctagcaatggctgcctccaccatggcgatctcctcaacggcgatggcggtaacccccatcaaggtgggctccttcggcgagggccgcatcaccatgcgcaagaccgtgggcaagcccaaggtggcggcgtccggcagcccc

SEQ ID NO: 51721 - DNA, 188 bp, Zea mays
cttttgacaaaattcgtgtgaacccaggaaattttgctgatcgtcgtgctcaaattgaaaaggctggaatatactgacgacgactaccaaaaagagctagagcatattgagaaggtgttttctccattagtcgagaaatgcaagcagtatggaagagcaatgcgaataggaacaaatcatggtagtct

SEQ ID NO: 51722 - DNA, 192 bp, Zea mays
ctcgatcgcatggcggccgtgatcccaacctccacaagcattggtcgatcagaagctggagggcggcaatcttgccctcgagcgccgatggcttatggtattgagattcgtgtaatccgtgctgtcaagtcaagacgaagccctgttggtaaggtttacttctacgatggcctctacaaggttgttgactac

SEQ ID NO: 51723 - DNA, 191 bp, Zea mays
gcactaatgagatgcaagtgggatgctgagatttcgaccaggcatcatctctctaccaattgattaacttgcatggtaaaacagtttcctccattgtgaacaaagctgagcctcttgaagctcacctgacccttacaccagtaaagagggataatcaacatcaccgtgagacaagcaataccagctcattg

SEQ ID NO: 51724 - DNA, 174 bp, Zea mays
attacggtgatgactgggaaggtctttttgaagctattactggttatggccttggtggttcttctatggctcttttcggccgcgttggtggtggtatttataccaaggctgctgatgttggtgctgaccttgtggggaaggtagaaagaaacattcctgaggacgatccaagaa

SEQ ID NO: 51725 - DNA, 258 bp, Zea mays
acaaacatggggaagcctgcgaagatcggagagtggggtggatacgccggcgatcgtcgggatctgagggctactccggaccggctgatcgaggtgaaggtcacggcggacaacagcagctgcatccgctccatctccttcatctacatcggagccgatggcaaaccgtacgaggaggggccatggggtttcggccatgctggcacggagtacaagattgatctgtgcaggttcgacgagagcttgacggagatctcc

SEQ ID NO: 51726 - DNA, 260 bp, Zea mays
caaaatggcgatatgctcagcgttcttctggactggagagaatcccttccccatcccgatgagcgtgtagagtatgagctctggacaaacagtaatgatgaatgtggtcctaaatgtgatatgcaaatggacttcgtgaggagctttagaggaactgcacaaattcttgagaaaaagggttacactcagtttactcctcattatatcacatggtattgtccagaagcttttgttgatagcaagcaatgcaaatcacagtg

SEQ ID NO: 51727 - DNA, 259 bp, Zea mays
cttctctctctactcctccgcctccgcctgatccatccaagacaccgatcgccatgtcggactcggaggagcaccactacgaatcgaaggccgacgctggggcgtccaagacctacccgcagcaggctggcaccgtccgtaagaacgcttcatcgtcatcaagaaccgtccctgcaaggttgtggaggtttctacctccaagactggtaagcatggccacgccaaatgccactttgtcgccatagacatattcaatggg

SEQ ID NO: 51728 - DNA, 263 bp, Zea mays
caccagatcactggcctcaggcgcaccgccgtgaacgtgcagtgcatggtcttcggcaacatggggaacacttctggcaccggcgtgctcttcactaggaaccccaacaccggagagaagaagctgtatggcgagttcctggtgaacgccagggtgaagatgtggttgccggaataagaaccccagaggaccttgacgccatgaagaacctcatgccacagggctacgacgagcttgttgagaactgcaacatcctggagagc

SEQ ID NO: 51729 - DNA, 260 bp, Zea mays
cctggcgttatcaagaccagacccgaagaagaacatcacgaccctcgtcaaagcggttggagagtgtcgtccactcagggaacttgcaaaccttactctgatcatgggtaacagagatgacatcgacgacatgtctgctggcaatgccagtgtcctcaccacagttctgaagctgattgacaagtatgatctgtacggaagcgtggcgttccctaagcatcacaatcaggctgacgtcccggagatctatcgcctcgcgg

SEQ ID NO: 51730 - DNA, 257 bp, Zea mays
cgaccctagggccaacaactttgatctcatgtatgagcaggtgaaggcgatcaaggaaggccaggcagtcgagaagcccatctacaaccatgtcactggcctcctcgaccctccggagcttatcgcgccaccaaagattttcgtcattgaaggtctgcacccaatgttcgatgagcgagtgagggacctcttagattgcagtatctacttggacatcagtgatgaagttaagtttgcatggacaatccagcgggaca

SEQ ID NO: 51731 - DNA, 254 bp, Zea mays
caactttgcaggcccctggggcgtccacttccggtgccgagagcagcgccgtggagatgggcaccgagaagtccgaagtgtacagcactaacatgacgcaggctatgggagcagcgttgacatatagacatgaactcgggatgactacaatttcatacgcccagacttgattgtaggatcctgcttacagagtccacttgatgttgataagcttcggaagattggtgtcaaaattgtattctgcttgcagcaag

SEQ ID NO: 51732 - DNA, 256 bp, Zea mays
cgaaagatgtgcaggtaatgaatgaaggcccgggtcacatcccaatgcataaaattcctgaaaacatggagaaacagttggagtggtgtaatgaagcgcctttctagacattgggtcctgtgacaactgatattgcacctggtaaatatcacatcacttcagccattggtgctgccaacattggagctcttggcactgcacttctttgctatgtaacaccaaaggagcaccttgggttgcccaatcgtgatgatgt

SEQ ID NO: 51733 - DNA, 252 bp, Zea mays
aaaatcgattgttgagttcgaaaatgctcggattcttgtcactgatcagaagagatcatcgagaaaagaaattaggccgcggttggagcagacaacacagttaagagcaccagttctgataattgcagaggaggtcagtgtggaggcgctggcatcagtagtcataaacaagcttagaggaatgttaaatgttgctgcaatcatagctcctggttttggtgagatgcgtaaagctcttctgcaggacattgc

SEQ ID NO: 51734 - DNA, 253 bp, Zea mays
cgcgtggtttgcgtgccctctccagggcccagattgactctgttctggatcttgcacggtgcacaattgtgtctgagctctccaacaaggatttcgactcatatgtcctttctgagtcaagcttgtttatctatcctctgaagattgtcatcaagacctgtggcactaccaagctcctgctcaccattccaagaatccttgagcttgctgaagagctgtctatgccacttgctgctgtgaagtactcccgtgg

SEQ ID NO: 51735 - DNA, 255 bp, Zea mays
cttgtttaccatgcctccccaaaacacatcctgcgatcctcgaagcctccgccgagcatcgatcatgtcggcctactgcggcaagtacgcggatgagctcatcaagaatgctgcctacatcggcacccctggcaagggtatccttgctgctgatgagtcaactggcaccattggcaagcgcctttccagcatcaatgtcgagaacgtggaggagaaccggcgggctctccgtgagctcctgttctgctgccctgg

SEQ ID NO: 51736 - DNA, 256 bp, Zea mays
ctgaggggttactcccagttcgcgagccggttcaccccgctgaagccgaagccgctgggatccatcctcgacatcgaacgcgccaagggcctctcccccgaccacctcgtcgccgcatgggatgactatcatttaggaaggggtcatataggtgcatctatgaaagcaaaactttaccatctcttggaacaaagatcagcttcatgccgtcactttgttattccgttgtggaagggtagtggatacactactatgt

SEQ ID NO: 51737 - DNA, 252 bp, Zea mays
ctggaagtgagattagaagtgtggtgttggctgggaggagattttatgagaaggaagggctccctgctttccctatgggaaaaattgatcaaacacgtatgtggaaggtgggtgaaagggtccgttcaaccaggccacaaggtgatcttggcccactgcagcccttcactgctggagtgtatgttgcactaatgatggctcagattgaggtccttaggaagaagggccactcttactcagagataattaatg

SEQ ID NO: 51738 - DNA, 253 bp, Zea mays
ccccgcgtccgctagccctagccgccgtccgccgacttcatcgtcgccgtcgtctagacctcttcacgcactggaaaggttaaagtccgacatcaatggcgaacatcatcctgatctcatcatgtgccggaagcagcctggcatcgcgattggccgcctttgcgagaaatgtgatggcaagtgtgttgtctgcgactcgtacgtgcgcccatgtacgcttgtccgggtctgcgacgagtgcaattatggttcg

SEQ ID NO: 51739 - DNA, 247 bp, Zea mays
ctcatggactattctctacttgtgggagtggacaaagagaagcatgaacttgtgtttggcatcattgattatctgaggcaatatacttgggacaaacaactggagacatgggtgaagacttctctggtagtacccaaaaatgtttgaccaactgtaatttcccccaaggaatacaaaaaaaggtgtaggaagttcatggcgaagtactttctgtcagttccagacacatggagtcctgataatccgt

SEQ ID NO: 51740 - DNA, 250 bp, Zea mays
cctaaggttgatgcccttgggagactgccattttcttctgtacggagaccgcgtccactccttgacgttgagccagcttctgcaactgatgatgacaccgttatttcaaagcctcttgatcaggaacctctgctagctgctaggatcacgattgaggatggactctccctattacttgacatagacgatattgaccgcttgcttcagtgtagccagcagcaagatggtggttttgcacttaaaaatagaa

SEQ ID NO: 51741 - DNA, 250 bp, Zea mays
tgaagaacaaggttgcaatgatacacaaggaagccgaagagaagcgagcgatggtggaggcaaaacgcggtgaggaggtcctgaaggccgaggagatggctgccaagtaccgggccaccggccacgctcctaagaagctcatcggttgcttcggagcctaagaaaccttccaagtcagaccgagcagaaagtgaaaaacgtcagccagtgattgcttggtcctctcgctctatcaagtgtgtagtgtgtc

SEQ ID NO: 51742 - DNA, 254 bp, Zea mays
ctgcaatcacaacgaacagaagctctcgatctcaccgacaccgaggaagaagagatcaatggcgtccgagcagggagtcgtgatcgcgtgccacagcaaggctgagttcgacgcccacatgaccaaggcccaggaagccggaagctggtggtcatcgacttcactgccgcctggtgcggtccatgccgcgccatcgccccactgttcgtcgaacacgccaagaagttcactcaggtcgtcttcctgaaggtgga

SEQ ID NO: 51743 - DNA, 249 bp, Zea mays
cggaattcctgtaggcaaacttgctctatacactgctctaggaggagttgacccatcagtttgcttgcctatcacaattgatgttggtacaaataacgagaaactgcttaatgatgagttctacattggactccggcaaaaacgtgcgactggcgaggagtatgatgagcttattgaagagttcatgtctgctgttaagcaattctatggtgagaaagtcctcattcagtttgaggactttgccaatca

SEQ ID NO: 51744 - DNA, 248 bp, Zea mays
ccgacttgtcagaaagacctttgatatgattgaagagattgcggaaaaggaagataaggaggactataagaagttttgggagagctttggcaagtttgtcaagcttggttgcatcgaggacacagggaatcacaagcgccttgctccattgttgcgcttccactcttctaaaaacgagggagatttgataagtcttgatcaatatgtagagagcatgcctgaaagtcaaaaggcaatctactacatcg

SEQ ID NO: 51745 - DNA, 235 bp, Zea mays
agcgaacgtcctgcgctacgtcgccgcggcctgcgccgtcgtcctcgcgctcgccattccggccctcgccggtgaccccgacatgctgcaggacgtctgcccggctgactacgcctccccggtgaagctgaatcggttcgcgtgcaaggcgaacttttcggcggacgacttcttcttcgacgggctgaggaacccgggcaacaccaacaacccggcgggctccgtggtgacggcg

SEQ ID NO: 51746 - DNA, 248 bp, Zea mays
agatggagaacccatacgaaaactaccctataatcgttcagatgacccatacacagtcgcggacaagtggctcctgaaagaaaatctgcctgtgacatatctccaacaggttgtagaatttatactgcagaattctggccagaacaactttgttccagatccatcttttcgggatccctatactggggccaatgcatatgtgcctgggcaaccagcatcatcatccaatggtaatactccggaaccaa

SEQ ID NO: 51747 - DNA, 247 bp, Zea mays
ctccgcagtccgcaggccgggtcactcggcaggcggcacgcaggctagcagcacagcagcagccagagccatcccctctcctcgctacgcttcgcttcctcggcgccgatgcctcctcctcctcctccagcctcgtccgtcccgttccggcgcgcgagctcgcccgagatggcgaacgcgagatcgggtgtcgctatgaacgatgagtgcatgctgaagtttggcgagctgcagtcgaagaggctgc

SEQ ID NO: 51748 - DNA, 246 bp, Zea mays
atgaaatctgctattggcattgggacactgctaatggatggtttgggtgatacaatccgtgtctccctcacagaaccaccagaagaagagattgatccttgccaaaggttggcaaatcttgggacgcaggctgcaaaccttcaaattggggtggctccatttgaagaaaagcacaggcgttattttgatttccagcgtaggagtggtcaattgcctttgcagaaggagggtgaggaagttgactac

SEQ ID NO: 51749 - DNA, 247 bp, Zea mays
cctgtggcatatgtcctgtctggaatgtatggcagtaaaggttatggtttgggatctggtatttctctgttcattgctaccaatatctgtgagaatatcatctggaaggcatttagccccacaaccatcaacagtcgtcgtggtgctgaattcgaaggggctgtcatttcactggtccagctgttgattacgagaaccgataaagtccgtgctcttcgtgaggctttctaccgccagaaccttccaa

SEQ ID NO: 51750 - DNA, 226 bp, Zea mays
acttcggccaccaaatattattctcgtgcatggagaagcaaatgaaatgtccaggcttaaacaaaaacttattactcagtttgatggtacaaatacaaaaattgtgtctcccaagaactgccaatcagtggagatgtacttcacttgtgagaagatggccaagactattggcaggttggcagaacaagtaccagaaggtggagagtcttccagtggcctacttgtc

SEQ ID NO: 51751 - DNA, 249 bp, Zea mays
atgccctgagaacacgtacatctctcgcgagggtgatcctgtgaacgagatgctcttcattatacgcgggaaactagagagctcaacgacaaatggtggccgcagcaacttcttcaactccatcatcctgcgccccggcgatttcgcaggcgaggagctgctcacgtgggccctgctccccaagaccaacgtccacttcccgctctcgacaaggaccgtacggagccacacagaggtggaggccttcgc

SEQ ID NO: 51752 - DNA, 275 bp, Zea mays
gccatgaagaacctcatgccacaggcctacgacgagcttgttgagaactgcaacatcctggagccactacaaggaaatgcaggatatcgagttcactgtccaggaaaacaggctgtggatgttgcagtgcaggacagggaaacgtacgggcaaaagtgccgtgaagatcgccgtggacatggttaacgagggccttgttgagccccgctcagcgatcaagatggtagagtcaggcccctggaccagcttctccatcctcagtttgagaaccgtcg

SEQ ID NO: 51753 - DNA, 279 bp, Zea mays
cgtgtcttcattcccgcggtctctccgccgcctcccagatccggcggccatggcaaggaacccgggctgcaccgtcttcataggtaacttggatgacaaggttcctgagagggttctgtatgaaattcttattcaggtaggtcgtgttgtagacctacacatacctcgtgacaaggaaactagccgaccaaaaggctatgcttttgctgagtatgaaacataggagattgcccaatatgctgttaagctattttctggtcttgttcgcttcataataaa

SEQ ID NO: 51754 - DNA, 270 bp, Zea mays
tggcggctcctggggatacggcggacgcggatccgagtccatcctgctcagcgtccaggggatgatgtgcgacgggtgcgccgcgagcgtgaagcggatcctggagagccaacccgaggttacttctgctaccgttgattttaaggaagcaagcgcagtcgtgtggacaacagatgacgccaaggggacacaaggttggcagaagcagtatggagagaagcttgctaaacaccttggcacttgcggatttgagtctcgccacaaggtaaa

SEQ ID NO: 51755 - DNA, 264 bp, Zea mays
tgttctgtagatgatcctattagggagatggatgacatgcttgttgatgaatatggaagcaatgcaacttttgagatttctggaatattatcatcaaaagtgtttgaagatgatgaagacttccctcaatacaatgggtcatcatcatttgtttcacggcctgttgaaggtgatgtcatacatgaacctgaagataatattgctccagcatctgttgaggaacacattattagagtagatcatgtagctactgatgctgctatg

SEQ ID NO: 51756 - DNA, 274 bp, Zea mays
taaacatttcttcgacattgttatccctggccttagcatgcggttcctaaagcctccttccaatcaagttcatcctaaaattcatggagacaaccgattttatccatacttcaagaattgcataggttcaatagatggaacccatgttccagtatcaatgtcacccgatcaagccgcaccattcaggaataggttgggagtagttgtacttggttccctgcagctgacaggaaatattggtcatatggagacagttctgcacagcgtctgagtg

SEQ ID NO: 51757 - DNA, 265 bp, Zea mays
gcgatcaagatggtagattcaggccacctggaccagcttcttcatcctcagtttgagaacccgtcggcgtacaaggatcaagtcattgccactggtctgccttcctcacctggggctgctgtgggccaggttgtgttcactgctgaggatgctgaagcatggcattcccaagggaaagctgctattctggtaagggcggagaccagccctgaggacgttggtggcatgcacgctgctgtggggattcttacagagagggtggcat

SEQ ID NO: 51758 - DNA, 269 bp, Zea mays
cgactcccggcccgatccgcgctctcctctccgtcgcttcagtcatggcaggaatggcacctgagggttctcagttcgatgctaagcactatgattctaagatgcaggagctgctgagcaccggtgagactgaggagttcttcacttcatatgatgaagtttttgagagttttgatgatatgggcctccaagagaatcttctgagaggcatttatgcttatggttttgagaagccatctgcaattcagcagagaggaatgttcccttct

SEQ ID NO: 51759 - DNA, 268 bp, Zea mays
ggcattgcgcgccagggcaggccatcgtggacgggctcagggacagcgtgctggggttctccgtcaacgagccgggcaccacagccaaggacgtcatggacatggtgctcatcacccagtacttcgacaccatgaaggagatcggcgcgtcgtccaaggcgtcctcggtgttcatcccgcatagcactggagcggtgcgcgacatcgccacgcagatccgcgacggcctcctgcagggatcctctgtcgccaaacataagctgcctgc

SEQ ID NO: 51760 - DNA, 272 bp, Zea mays
ctcgagccgctccaccatcacccgtgccaggtttgaggagctcaacatggacctgttcaggtagtgcatggagcctgttgagaagtgcctgagggatgccaagatggacaagagcaccgtccatgacgttgtacttgttggtggctccactaggatccccagggtgcagcaactgctccaggactgcttcaacggcaaggagctgtgcaagaacatcaaccccgatgaggctgtcgcctatggtgctgctgtccaggctgcatcctgagcgg

SEQ ID NO: 51761 - DNA, 262 bp, Zea mays
gcagatcttgtgaccctccctcagccgcgtcgcgtcgcatcctacgatccaaagctctctatgctcgcagccatggcgaagaactatccgaccgtgagcttcgagtacagcgaggctgtggagaaggccaggcgcaagctccgagccctcatcgccgagaagagctgcgccccgctcatgctccgcctcgcgtggcactccgcggggacgttcgacgtgtcgtcgaggaccggcggtccattcggcacgatgaagctcagtc

SEQ ID NO: 51762 - DNA, 264 bp, Zea mays
cgcagttccccgaccacaccgttcctccgagcccaggagcagccccgcgccaggaggaagtttgttcttttaacaatatgtcgagggaggagaatgtttacatggccaagttggctgagcaggctgaaaggtatgaggagatggttgagtatatggagaaggtggctaagactgtagatgtggaagagctcactgttgaggagcgtaaccttctgtctgttgcatacaagaatgtgattggggctcgccgcgcttatggcgcat

SEQ ID NO: 51763 - DNA, 75 bp, Zea mays
ctgccctgtttgaactgctgtactgtacatgattcttggccgttgccctgtgtaattatgttttggttagctcgt

SEQ ID NO: 51764 - DNA, 173 bp, Zea mays
agagattcctgccaaaaattctatcaagcagaaatagaagaacacgactttatcagcgccgtagagaagtccagaaaacacataaacacctgggtagctgaaaagacagacggtagaattgcggagttgctctctccgggctcagtggatccattgacaaagctggttctggt

SEQ ID NO: 51765 - DNA, 263 bp, Zea mays
gtgatccggagggtcctcttatgctgtatgtttcaaagatgattccagcatctgacaagggcaggttctttgcctttggtcgtgtcttctcagggaccgttgctactggtatgaaagttcggatcatgggtcccaactatgtccctggccagaagaaggacctgtatgtcaagagtgttcagcgtactgatatctggatgggaaagaaacaagagtcagttgaggatgttccttgtggtaacactgttgctatggtggtctgg

SEQ ID NO: 51766 - DNA, 265 bp, Zea mays
gtggtcgtccctcagccgcgtcgcaccgcatcgcattctacgattcgaagctctctctgctcgcagccatggcgaagaattacccaaccgtgagcgccgagtacagcgaggccgtcgagaaggccaggcgcaagctccgcgccctcatcgccgagaagagctgcgcgcccctcatgctccgcctcgcgtggcactccgcggggacgttcgacgtgtcgtcgaggaccggcggtcccttcggtactatgaagtgccggcggaactg

SEQ ID NO: 51767 - DNA, 130 bp, Zea mays
cctccacgagttccttccagaagggaacatcgaggacattgtaagtgaattatgtgctgagaccggagccaaccaggaggatgccctcgcgcgaattgaaaagctttcagaagtagacccgaggcctggc

SEQ ID NO: 51768 - DNA, 252 bp, Zea mays
gtgcctggcgctcggcaccaggttgcgctccaagtacaagatcacctaccagttctaccgcgtcttccccaacggcgaggtgcagtacctccaccccaaggacggcgtctacccggagaaggtcaaccccggcagggagggcgtcggccagaacttccgcagcatcggcaagaacgtcaaccccatcgacgtcaagttcaccggcaaggccaccttcgactaatcacacttcacgtacgccgcacgccccag

SEQ ID NO: 51769 - DNA, 245 bp, Zea mays
gtctccgacatcctactttcgtcctcacgagtcaccgataatccgccggcgctaagatgttggtttatcaagatctcctatctggcgttgagctcctgtcggattcattcacctacaaggagctcgagaacgtcgtcctgtgggaggtcgagggaaagtgggtcacccaatgtcctgttgatgtagacattggtgccaatccatcgccgagtgtggtgaggacgaaacgttgatgacacagcgtg

SEQ ID NO: 51770 - DNA, 256 bp, Zea mays
gtcgttgcgtcctgcctgaactacgcgatcatgacctgggcgaacaagatcctcgggccgtctctggtcgccctctacaacccactccaaccggcatgctctaccttgctctcgaccatgtttcttggaactccaatttacgttggaagtgtgattgggggactcttcatcatcgctgtactttacctggtcacttgggctcgctacaaagaggctcagagcgctcattaatccggttatctgcgacctttcttct

SEQ ID NO: 51771 - DNA, 250 bp, Zea mays
caaatgggttgacgaagatgatgatggtgctgatgtcaacttggatgggatggacttctcgaattttggcggtatgggtggtatgggtggcatgggtgatatggctggcttgggtggtcttggtggcatgggtggaatgggcggtatgggtggtatgggaatggatgattttgaggatgatagtgatgaagaagaagtgtcgaaacctcaagctgccggacttgctgctgaggccgagaagactgagtgg

SEQ ID NO: 51772 - DNA, 260 bp, Zea mays
ccagcccggttctttgcgtgcggttgatctcgtcggaggcccggccgcggttccccaatccgccatcgaattcgatggcggccaacgccgggaataagatccgcaacgccaagctggttcttcttggagatgtgggcgctggcaaatctagcttggttcttcggtttgttaagggacagtttgttgaattccaggagtcaacaattggagcagccttcttttcccagaccttagcggtcaatgatgagctgttaagtttg

SEQ ID NO: 51773 - DNA, 261 bp, Zea mays
tcacaaacaacgccatcagggtcttcaaccagggcaggttctcttctttcattcagctatgggcaacctgtgctgctgtgttcaagttgaccagtcgactgtggccatcagggagcagtttggcaagtttgacagcgtgcttgagccaggatgccactgcatgccttggttcgccggcaagcgtgtagctgggcatctcacactcaggctgcagcaactggatgtgcgctgtgagacaaaaacaaaggaaatgtttttgtg

SEQ ID NO: 51774 - DNA, 259 bp, Zea mays
gtttaccccccccactctgccctcctcccgttccccacccccttcctcctccccagccaatggagatcttcgtggacgatgagacgaagttgacgctgcatgggttgcagcagtactacgtgaaactgaaggacaacgagaagaaccggaagctctttgaccttctggatgtccttgagttcaaccaggtcagttagacgtccagtagggggatgagcattggagcataccagctgtagcagaaacctgatattaagta

SEQ ID NO: 51775 - DNA, 249 bp, Zea mays
tacaagaacagatacgtggatcaatggaacagcatagagaacccagaagtaagattgcacacctacaactatctgacctttgacagacctgacaaaaacaatcaatgaggaaaggattttctattcaataaatggtacttggataactggctagccatatgcagaagactaaaactggaccccttccttaaatcatatgcaaaaatgaattcaagatgggttaagaattaaatgtataaccctaaacta

SEQ ID NO: 51776 - DNA, 252 bp, Zea mays
cgaggtcatcgagttctgcttcggggaggagcacctgtgcttccagactctgcagcgcttcacggccgccacgctggagcacggcatgcacccgccggtctctcccaagcccgagtggcgcaagctcatggacgagatggcggtcgtggccacggaggagtaccgctccgtcgtcgtcaaggagccgcgcttcgtcgagtacttcacatcggctacaccggagaccgagtacgggaggatgaacatcggcag

SEQ ID NO: 51777 - DNA, 186 bp, Zea mays
cggttgaagctatacttaggagaacttttccttctgaaacatcagagcaatccagaaaagccaagaagtcaatctaagaaccttgctgtgctgaacttcacacaatgatacattcactctttgttgaatcctgtgcctcaatggaccttgcctcccggttgctatttgtggtgttaactgtttgtg

SEQ ID NO: 51778 - DNA, 184 bp, Zea mays
gaatgctccttgcatagtgtttgttgatgaaattgatgctgttggaaggcaaagaggtacaggtattggtggtggaaatgatgaaaggaacagactctcaatcaactactaactgagatggatggtttcgagggcaacactggaattattgttattgctgccactaaccgggctgacatcttgg

SEQ ID NO: 51779 - DNA, 181 bp, Zea mays
cttggtgctgcgtctcaggggtggcatgcagatcttcgtgaagacacttactggccaaacgatcacccttgaggtggagtcctcgacaccatcgacaatgtcaaggctaagatccaggacaaggaaggcattccaccagaccagcagcggctcatctttgctggcaacagctggaggatgg

SEQ ID NO: 51780 - DNA, 180 bp, Zea mays
ctcaaagggtttgattgttgactctcgtaaaggctcccttcagccattcaagaaacctggcgcgcatgagcacgagcccttgaaaccttgtatgatgctgttcagtccatcaaacctacagttctgatcgggacatctggagttggaagaacattcacaaaagaaatcattgaggccatg

SEQ ID NO: 51781 - DNA, 180 bp, Zea mays
ggaaggccaagctctggtcacggttcttctgcctctcggtgtatgtgaccatgtacctgaatgactgccaacgcactgcattctatgagggaattggtctggacaccaaagaattcgacatgcatgtgatcatcgagaccaaccgcacaacggcgaggatcttccctgctgtcctagacg

SEQ ID NO: 51782 - DNA, 183 bp, Zea mays
actccaggacatcggcatgatcagcgccgtgccggggatgatggcgctcgacatgaaaaaccgccgaggacgagatcgtgcgcctccgcgcgaggtcgttcccggcatgatcgtcaccggaatggaggtcgccgagattgacggcgcccccaggatgggcccgacgtctggcgccatgatgat

SEQ ID NO: 51783 - DNA, 179 bp, Zea mays
agcggcggcggcggagaaacgcaggcgaaggcgagggtgtgagggaaggagcaccaggggtgtgacgtcaacttctaccgaactatggtaagacgttcaagaaaccaaggcgtccttatgagaaggagcgtcttgatgctgaactgaagctggttggtgagtatgggctgaggtgcaag

SEQ ID NO: 51784 - DNA, 176 bp, Zea mays
caagtttttgaatgacaggtcacaaaggcatgatcacagtcccgcttacttcgggggtctcacaaggacagctcccaagatgctggccgcattgctgggctggaggttctgcgtattataaatgagcctactgccgcatcactagcatatggttttgagaaaaagaacaatgaaac

SEQ ID NO: 51785 - DNA, 177 bp, Zea mays
tcttattggaggcagtgctgatcttgcatcctccaacatgactctgctgaagatgtggggtgactcccagaaggatacactgaagagcgcaatgtccgctttggagtcagagagcacggaatgggcgccatttgcaacggcattgctctgcacagcccagggtttgttccgtactgt

SEQ ID NO: 51786 - DNA, 183 bp, Zea mays
cagcgaggtctacctctcagccaagggagagccattcccctcagaccccaagaagcaggtgggagctagcagtgctggctgtgttaactcgtgggagagccccagggccaagaagtacaggagcatcaaccagatcactggcctcaggggcacgccgtgaacgtgcagtgcatggtgttcggc

SEQ ID NO: 51787 - DNA, 175 bp, Zea mays
caggaaggagcggactggagaagagtcaacatggatgctatctcgattttatcccggcgtggaagacttgattgagaacttagtaagggtgagctaccaaaagatgagtaccactgcatgaatgatcctagtcctagtttccgtggaattccagggagcacatctgctcgaacga

SEQ ID NO: 51788 - DNA, 179 bp, Zea mays
acgccgacaacggcatccctcttcctaacgtcaactccaagatcctatccaaggtaatcgagtactgcaacaagcacgtacatgccgccgagccgcagccgccgcctcgaaggccggttccgacgacgtgggtgccgactccgccaacagcaccgccgcctccggtgaggacctcaaga

SEQ ID NO: 51789 - DNA, 173 bp, Zea mays
ggcagatggtcgaaagatttggattcagtaagaagatcggccaagttgccatggcgggaccctgtggaaacctttcttggggcaacagatgtcaagccagaaggactactctatggcaacagcggatgttgtggacgccgaggtgagggaactcgtggagaaggcctactcta

SEQ ID NO: 51790 - DNA, 174 bp, Zea mays
gtcggctgccgagactggtagtagccggcgcgccgtcaccgtatcctcacatgagatgcgagcagaaaccacaccatctactgacgcccgacgagcagtgtaacattttccttcagccatgggtaaggagaagactcacatcaacattgtggtcattggccatgtcgactctgg

SEQ ID NO: 51791 - DNA, 173 bp, Zea mays
ctcaatattaccaatttactcacagctgttcttcgtcttgctagtcttgctgggggtagtttaaatgctgttgaacggtcggaacatacattgagttaccttcggaagctcctcctgtcattgaggatcataggccaccccctggttggccatcatcaggtgtcatcaagttt

SEQ ID NO: 51792 - DNA, 176 bp, Zea mays
ggaggctcttccgggcgacaatgttggcttcaacgtgaagaacgttgctgtccaggatctcaagcgtgggttcgtggctccaactccaaggatgaccctgccaaggaggctgccagcttcacctcccaggtcatcatcatgaaccaccctgggcagattggcaacggctatgaccc

SEQ ID NO: 51793 - DNA, 288 bp, Zea mays
gaaagatccggcagttgtagcgagggaggctattcaggaagcaacccggaacaaatcagatgttgttctggttgacactgctggacgtatgcaggacaatgagccactcatgagggcactctccaagctaatcaatctcaatagcccagacctggttttatttgttggagaagcattggttggaaacgatgctgtggatcagctcactaaattttaccagaaattagcagacctatctgctgttcccactgctagattgatcgatggtatcctgctcaccaagtttga

SEQ ID NO: 51794 - DNA, 288 bp, Zea mays
cggcactaacgacctgcagccaaccatctaccagcgactcagcgagcgagagcagcacacacgcagctagctaggagcagcagcagagcagcggcgatggcggcctccatgatctcctcgtcagctctggcggtggcgcctcagggcctgccgcccctcggccgccgcgcctcctccttcgccgtcgtctgctccaagaagaagatcaagaccgacaagccctacgggattgggggtggcctgaccgtcgacgtcgacgccaacgggagacagggcaagggcaagggc

SEQ ID NO: 51795 - DNA, 288 bp, Zea mays
ccgctccgccccagcgcatcgcccgccgccacagcgtaccgcgacctcatcgatcaccttcagctttcaatcatggccgacgtcgatgtcgaaccggaggttgccgccggcgctcccaagaagaggacgttccgcaagtacagctaccgcggcgtcgacctagatgcgcttctcgacatgtccacggacgacctcgtccagctcttccccgcgcgcgccaggagaaggttccagaggggtctgaagaggaagcccatggcgctcatcaagaaactgcgcaaggcgaaa

SEQ ID NO: 51796 - DNA, 285 bp, Zea mays
gtttcagaaggtcacaagtgctttgaaagcatgggaagagaccacggcattgaacctagcatggatcactatgcctgcgtagttgatctgcttggaaggtctgggaggtttgcagaggctgagcaattcatcagggacatgcctgtccgtcctgattcaaccatctggggacctcttttagctgcttgccagcttcatgggaatgttgatcttgcagaaaaagctgccaaagaattgtcggccttggaaccggagagtgacatatggagagtatccttgtcaaat

SEQ ID NO: 51797 - DNA, 286 bp, Zea mays
agccgccgtcatgtcgaagcgaggtaggggaagttcagctgggaacaagttccgcatgtcactgggtctaccggtggcggccacggtgaactgcgcggacaacacgggcgccaagaacctctacatcatctccgtcaagggcatcaagggccgcctcaaccgcctcccgtccgcctatgtcggcgacatggtcatggccaccgtaaagaagggaaagcccgacctcaggaagaaagtgatgcccgccgtcatcgtccgccagcgcaagccgtggcgtcgcaaggac

SEQ ID NO: 51798 - DNA, 282 bp, Zea mays
caaagacagcctttgaaacacagggactatgcagttgatcttgattctcgtcttggcaagactcaggtggtgaccccgattgcaccattgaatcagcaggctggatactactgttctgtatgtgaatgtgttgtcaaagattcagccaactatttggatcatataaatggcaagaagcatcagagagcactgggcatgtctatgcgtgttgaaagggcatcacttgaacaggtccagaaaaggtttgaggcacttaagaaaaggaaggatccaagtgccttt

SEQ ID NO: 51799 - DNA, 277 bp, Zea mays
cgtggacgaggtgcgcaccttcgagtgcatgtcacgccatagccagggtccccgcctcctcggccgctttccgaacggccgcgtcgaggagttcatccacgcaaggacattgtcagctgccgggcttcgtgatcctgaaatttcagctctggtggcttccaaactgagggagttccacaaccttgacatgcctggtcacaaatctgtgctcatttgggacagacttaggaactggctcagaactgccaagagcttgtgtccacctgaagaagccaag

SEQ ID NO: 51800 - DNA, 279 bp, Zea mays
ggccctaaaggttattgcctcaaaccttaacgaggaagagatcaaggggctaaagcaaatgttcatgaacatggacacagacaatagtggcacaatcacgtatgaagaactcaaagcaggactagccaaacttggatcaaagctgtcggaagctgaagtaaagcagttgatggaggctgctgatgttgatgggaatggatccatcgacgatgttgagttcatcactgccacaatgcatagacacaagctcgaaagagacgagtatttgtttaaggcatt

SEQ ID NO: 51801 - DNA, 278 bp, Zea mays
caaagtctcaaacgtgcctcttgttgcattgacacacatgtgcaatacaatcgtacatatagtacgttttattcgacaagcagcctctgcatgcaataatagtacaccccccgatttaattggactaatgcatgctgaggatggatcagatggagatgctgctggggatgcccctcccggtgactcccggcttagagaagggcttgagaagctcgtacggcacgatcccgacgccgcagcggttcttgaggtccaggttgttgttgcactcgtcgatg

SEQ ID NO: 51802 - DNA, 275 bp, Zea mays
caaggagagtacgtggaggagcagccatagcttcatcggtggccgccgcggcgaacacattcctgggcacccgcctggcggacccggcgccacagaacgggcgcatcgtggcccggttcgggttcaggttaggcggcaaggcgaacctgctccgaagaaggtggcgaagacatcgacctcctctgaccggccgctgtgattccccggcgccgtggcgcccgactacctagacggctcgctggtcggcgactacgggttcgacccgttcggtctca

SEQ ID NO: 51803 - DNA, 278 bp, Zea mays
ggctggtgcatcgctcctctccccatcctgcacgctcctccgcctgattcccagcgcgtcgcacatctgctgctcgtcgcacttcaagagattcgatcgggttcgccggttcgcgcccgccgccatggcgacttcctcaggaccaaaggaggcgccagcgaataaccctgggctccagaccgaggtcgaccccgccaccaaaggctacttcttgcaacaaacgatgttacgtgtgaaggacccaaaagtgagccttgacttctactcacgtgtgatgg

SEQ ID NO: 51804 - DNA, 261 bp, Zea mays
tgggggacacaacttaatgcggtcagcctcacggaacgcgacagtgcttaattgttggaaatccctgtaacactaatgcgctgatttgtttgaaaaatgccccaaacataccgagcaaaaactttcatgcattgacgaggttggatgaaaatagaacaaagtgccagctggcactaaaagcaggtgtattttatgacaaagtatcaaacgtgactatttaggggaacattcgacgactcaggttcctgattctgaatgcca

SEQ ID NO: 51805 - DNA, 277 bp, Zea mays
gttccatatagcttcctgcaggatggcactcctccttggcttgctgctgctagtagtagcttcgcccgcgatcgctgatgacgactccggtatctactaccagctggctcttatgtggccaggagcatactgcgagcagaccagcgctgggtgctgcaagccgaccaccggcgtctcgccggcgcgcgacttctacataacgggcttcaccgtccttaacgcgaccaccgacgctgcagtgacgggatgcagcaacaaagttccttacgaccctaac

SEQ ID NO: 51806 - DNA, 274 bp, Zea mays
acttgaggggcacgtcctagatcggtggcgcctgcctctcgccgccggtacggtgcctctcgcggtctcgctccccctcgcaggtcttttggtgttttttagttcctccctttgcttcttggaggtgtttgttgccgtctcacccgcagttcttgagcaatggagatggctcgacttatatgtggtggctgccagacattattgctgtatgctcgcagtgcaacaactgtaagatgctcatgttgtgacacagtcaatcttgtcagaccagtga

SEQ ID NO: 51807 - DNA, 272 bp, Zea mays
tcagggagaactatggttgtgaagtcgtttgtttcactgctgatgttggccagggtgccattgaattggaagggttggagaagaaggcaaaagccagtggtgcatgtcagcttgttgtgaaggacctcaaagaagaatttgttagtgaatatatatacccctgcctgcgtgcaggtgcagtttatgaaagaaagtatctgcttgggacttcgatggctaggcctgttattgctaaggcaatggttgatgttgccaaggaagttggtgcggat

SEQ ID NO: 51808 - DNA, 271 bp, Zea mays
ggagattttgggctggcgaagatggtagacatagggaggaatacagtaacaacaggggttcgtggaactatgggccacgtagctcctgagtacataaagacaggaaggccatcagtgaagacagatatctttggttatggtgtcatgctgttagagattgtgacaggagagcgtgcaattgcattccatcctgaccgtagaagaagcaggcgagatcctgctcactgatcaggtcaagctatggatggaagaagggcgactactcgaccta

SEQ ID NO: 51809 - DNA, 267 bp, Zea mays
ctttcgccgagctcctcgaaaccctaggagcgtgcttgaccgacggcggcgaggtgatggcgatggaccctgacgcggtagcaaggccttcgtggagcattactaccgaacgttcgacaccaaccgcgcggcgctggttgggctgtaccaggagacctccatgctcaccttcgagggccagaagttccagggcccctccgccattgccggcaagctcggatctctccctttccaggcctgcgagcatcagatcgtcaccgtagactg

SEQ ID NO: 51810 - DNA, 267 bp, Zea mays
ggtttcgctgccccgattagccacgaagccgcactgtgagatagggacgcggcccgttgtcctcggcttgtacgcaatccttccgtcgctgcgaactgatccctcgtgttcgccatggcccccagcgtcgccgtggaaaacctcaaccccaaggtcttgaaatgtgagtatgcagtccgtggcgagattgtcatccatgctcagcgcttgcagcaacaactacaaacacaaccagggtctcttccttttgatgagatcctgttctgc

SEQ ID NO: 51811 - DNA, 267 bp, Zea mays
gtatcatcaatttttgactgatttttgcaaggagcttactggcatacaacagattcaggtggacagaggtgtgcctctaggtgaagccttactcatgcacgataaatggctagaggacaagggcatcaagaacacaaactttgctattgtgacctggtctaactgggactgccgtataatgctggagtcggaatgcagatttaagagaatcaggaagcccccttattttaacaggtggatcaacttgagggtaccgttccaggaagt

SEQ ID NO: 51812 - DNA, 266 bp, Zea mays
ctcgagccgctccaccatcacccgtgccaggtttgaggagctcaacatggacctgttcaggaagtgcatggagcctgttgagaagtgcctgagggatgccaagatggacaagagcaccgtccatgacgttgtacttgttggtggctccactaggatccccagggtgcagcaactgctccaggacttcttcaacggcaaggagctgtgcaagaacatcaaccccgatgaggctgtcgcctatggtgctgctgtccaggctgccatcc

SEQ ID NO: 51813 - DNA, 268 bp, Zea mays
gtggatttcgcggacgaggaggactaccgcaagggcggcggcggcgagctgctctacgtgcaaatgcagtcaaccaagcccatggaaagccagtccaagatcgcttccaagctatcgcccatatctgatgaaaatacagtgcttgatttggttatcattggttgtggtccagctggtctttctctagcttcagagtcggctaagaaaggtctcactgtaggtctcattgggcctgaccttccattcacaaataactatggtgtgtggg

SEQ ID NO: 51814 - DNA, 270 bp, Zea mays
cccgaagcaaatatgttgttgatatagataagagcattgatatcacaaagatcacaccttcaacaagagtcgctcttcgtaatgatagctatatgctccatctgatcctaccaagcaaagttgatccattggtcaatctcatgaaagttgagaaggttcctgattctacatatgatatgattggaggccttgaccagcaaattaaagagatcaaagaggtcattgagcttccaatcaaacatccggaactatttgagagccttggaattg

SEQ ID NO: 51815 - DNA, 276 bp, Zea mays
cacatacatagtttcttctactacacgacgacaaacatgggagaagcctgcgaagatcggagagtggggtggatacgccggcgatcgtcgggatctgagggctactccggaccggctgaccgaggtgaaggtcacggcggacaacagcagctgcatccgctccatctccttcatctacatcggagccgatggcaagccgtacgaggaggggccatggggtttcggccatgctggcacggagtacaagattgatctgtgcaggttcgacgagagctt

SEQ ID NO: 51816 - DNA, 262 bp, Zea mays
ctcaaagggtttgattgttgactctcgtaaaggctcccttcagccattcaagaaaccttgggcgcatgagcacgagcccttgaaaaccttgtatgatgctgttcagtccatcaaacctacagttctgatcgggaatctggagttggaagaacattcacaaaagaaatcattgaggccatgtcttccttcaacgagaggcctatcatcttttcactgtcaaacccaacctcgcattctgaatgcactgctgaacaagcatata

SEQ ID NO: 51817 - DNA, 266 bp, Zea mays
cagactcggagcaagataggcctagctggttacaagccaagaacaagtagagcggtagagggaaaatatatctggagagggaaacaatggcgggcgaggacggtcttaaggtcctcggcctgcaggtgagcccgttcgtgctccgcgtgtgcttggcgctgaacatgaaaggagtgagttacgagtacgtcaaggaggacatatccaacaagagtgagctcctgctcaagtccaacccggtgcacaagaaggtgcccgagctcatc

SEQ ID NO: 51818 - DNA, 269 bp, Zea mays
gttgttgaaaacattgcaaggaagaatggtatcagtaagagtgagttactcgatagagacgcagatgatcttgctgttcgtattgctcttggtgagacacacgtcattgcagagactaagaaatttctatcaaggtctggagttaatgttgctgcattggaagaacatgcttctaaacgaaatgagaagttcaaaagaagcaattatgtgatattagtaaagaacttgccatttaattctactgaggaagaactcgcgacactgtttca

SEQ ID NO: 51819 - DNA, 261 bp, Zea mays
tgaaggaaggcgacgaggtgtacggcatggtcagcgagaatccgctgcaggggcccaagcagtccggctcgctggcggaatacaccgccgtcgaggagaagctgctggcgctcaagcccaagggcctcgacttcgcgcaggccgccagcctgccgctagccgtcgagaccgccaacgagggcctggagagggcaggaatatccgccggcaagtccgtcctcatcctcggtggcgccggcggtgtcggctcccttgcgatcc

SEQ ID NO: 51820 - DNA, 264 bp, Zea mays
gttctgagcagttgtatcagtcagtgcattcacagattttcacattgccaaaggatacactactttatcctgctcatgactataaaggtttcacggtaagtactgttgaagaggaggctgcctataatgctcgactcacaaaagataaggaaactttcaagacgatcatgaataacttgaatttgtcatatccaaagatgatggatgtagctgtacctgccaatttggtctgcggtatccaggatccaccaccgaagatctgag

SEQ ID NO: 51821 - DNA, 265 bp, Zea mays
tgagacccatcttgtgccgtcttccactgcccccgagtccaaggtcttctatctcaagatgaagggtgattactacagataccttgctgagttcaagactggagctgagagaaaggacgccgctgagaacacgatggtggcatacaaggctgcccaggacattgctctggctgagcttgctccaactcaccctattaggcttggactggcacttaacttctcagtgttctactatgagattctgaactcacctgatcgcgcctgc

SEQ ID NO: 51822 - DNA, 210 bp, Zea mays
gtcgattttgagaaaaccctggggtattggcaacaggacaagtggaatggttccttctctgttaagtggcacattgtcaaggacgtgcctaacaacattctcaaacacatcatcctagagaacaacgagaacaagcctgtcacgaacagccgcgacactcaagagatacacctagaacaaggccttcagatgctcaagatattccaggag

SEQ ID NO: 51823 - DNA, 264 bp, Zea mays
atcttttcctgacaagcttgggaattgataagggccggttgcgcttcaggcagcatctacctaatgagatggctcattatgctgctgactgttgggatgctgagatagagtgctcgtatgggtggatagagtgtgtgggtattgctgatagatctgcatatgatttgaaagctcacactgacaaaagcggtgtcccacttgttgctcatgaaaaattctccaagcctagagaggttgagaaacttgtcatagttccctcgaaga

SEQ ID NO: 51824 - DNA, 265 bp, Zea mays
cccgaaggcaaatatgttgttgatatagataagagcattgatatcacgaggatcacaccttcaacaagagtcgctcttcgtaatgatagctatatgctccatctgatcctaccaagcaaagttgatccattggtcaatctcatgaaagttgagaaggttcctgattctacatatgatatgatgggaggccttgaccagcaaattaaagagatcaaagaggtcattgagcttccaatcaaacatccggaactatttgagagccttg

SEQ ID NO: 51825 - DNA, 261 bp, Zea mays
catgatgccattcgagtcattgtcggcagaaagaattcggcctcttcactgattaagcaaaagttgatttttgctggaactgagaggggaaagttgctaactcttcgccaaagctttcaagagtctctcaatcctccagtattgatttttgttcaaagcaaagagagggccaaggagctttacaaagaactggcctttgatgacattagagttgatgtaattcatgcagatctcagtgagcagcagcgtcaagatgctgtt

SEQ ID NO: 51826 - DNA, 260 bp, Zea mays
gtgcctggcgctcggcaccaggttgcgctccaagtacaagatcacctaccagttctaccgcgtcttccccaacggcgaggtgcagtacctccaccccaaggacggcgtctacccggagaaggtcaaccccgcagggagggcgtcggccagaacttccgcagcatcggcaagaacgtcaaccccatcgacgtcaagttcaccggcaaggccaccttcgactaatcacacttcacgtaagccgcacgccccagcgggatcca

SEQ ID NO: 51827 - DNA, 258 bp, Zea mays
gtggaatggtgggaaggcctgacactgcatcgatggtagaggcaaaatatccagcacttcggttcaagcaacacttgacagcatatgtcgagaagatatacgggataatcagagataacctgaagaaggaataagtccgttcttgacaatgtgcatacaggctccaagagctaaccgtgtgaggccatcacggggatcactaaaaagcatacactctaatgcactagctaggcaagcatcaagtctgcattggcagaa

SEQ ID NO: 51828 - DNA, 262 bp, Zea mays
ggtccctcctgtgtcgcttgtccctaattggattttgcacagaaagctactacaccccttccggaagcaggtgggtgggtccattttatcagccaaacttgcatttgagagaggttgggctattaatgttggtggaggatttcaccattgttcggcagatgaagggggtggattttgtgcatacgctgacatctccctctgcatccattttgcttttgtccgtctaaatatctcaagtgtattgatcatagacctggatgcc

SEQ ID NO: 51829 - DNA, 266 bp, Zea mays
cgaccgcgacggcagcggcatgatcgacgacaaggagctgcagtccgcgctgtccgggtacaaccagagcttcagcctccgcaccgtccacctcctcatgtacctcttcaccaacaccaacgtccgcaagatcggacccaaggaatttacttctgtgttttacagtcttcagaactggagagcaatatttgagaggtttgatcgtgatcgaagtggcaggatcgacatgtcagaactgcgcgatgctcttctcagtctcggatatt

SEQ ID NO: 51830 - DNA, 207 bp, Zea mays
tgcgcctctacatttcttcgctctctgatactccgcctccgcctgatccatccaagacagggatcgccatgtcggactcggaggagcaccacttcgaatcgaaggccgacgctggggcgtccaagacctacccgcagcaggatcgcaccgtccgaaagaacggcttcatcgtcatcaagaaccgtccctgcaaggttgttggaggtt

SEQ ID NO: 51831 - DNA, 139 bp, Zea mays
atccatgactcagcagctgccaggggagtccgacgcggagtacgcagacttctcctccaaggttctgcacttgaaagggacaggcaggacttcgaattcgtgaagacaagcttggctgccaatggatacgatgtggttt

SEQ ID NO: 51832 - DNA, 202 bp, Zea mays
cttgcaatcacaacgaacagaagctctcgatctcaccgacaccgaggaagaagagatcaatggcgtccgagcagggagtcgtgatcgcgtgccacagcaaggctgagttcgacgcccacatgaccaaggcccaggaagccggcaagctggtggtcatcgacttcactgccgcctggtgcggtccatgccgcgccatcgcccc

SEQ ID NO: 51833 - DNA, 235 bp, Zea mays
agggcacacagtgcgagctcatcaagaccaaatatcaactggcgcacatctccgctggagatttgttgcgggcggaatcgctgctggctctgagaatgggaagcgggccaaggaattcatggagaagggccagctcgtgcctgatgagattgtcgttaatatggtgaaggaacgccttcggcaaccagacgctcaagaaaatggttggcttttggacgggtacccaagaagtatt

SEQ ID NO: 51834 - DNA, 250 bp, Zea mays
gccgaaccccccgaagtatggcggagccgcggcggcggcgaagaagacacgggtaacgccgtacgaggtcgcaagaccatcggggagggcatcttcgccaaggtgacgcacgcccacgactcccgcacgggcgccgtccgcgctatcccggtgctcgaccgcagccacgttactccgccacaagatggtcgagcagatcaaacgggagatttcgatttgaagctaatcaaacatcccaacgtggttcagc

SEQ ID NO: 51835 - DNA, 249 bp, Zea mays
ccgaactccatctatctcttccccacgaacgcttgcggcggcggcggaattaggaggcgatggggcactccaacgtctggaactcgcaccccaagaactacgggcccggatcccgcgtctgccgtgtctgtgcgaaccctcatggactgatcaggaattacgggctgatgtgctgcaggcagtgcttccgcagcaatgccaaggacattggcttcaccagtaacgctgaaatcaggtgggaatggacca

SEQ ID NO: 51836 - DNA, 259 bp, Zea mays
gttcttgaggttcatgttgagaagggaatgcaacacagccagaagatccccttccctggtgaagctgatgagcgcctgataccgttactggagacattgtattcgtcctccagcagaaggaccactccaagttcgaaagaacgggtgaagatctcttttaatgagcaaaccctgtctctgaccgaagcacaatgtgggttccaatttgttcttacaatctggacaacaggcagcttctgatcaaatcaaaccccggcga

SEQ ID NO: 51837 - DNA, 152 bp, Zea mays
ctcgtgaagcctccatttatacaggcattacaattgccgagtattttcgtgatatgggctacaacgttagtatgatggctgactccacctcacgatgggctgaggctttgcgtgagatctcagggcgtttggcaaaagtccctgctgaaagg

SEQ ID NO: 51838 - DNA, 231 bp, Zea mays
tctcgagccgcttagtctagcgacactaggtggagtgatgaccacgattatcccacggaatacaaccttgcctacctcaaagtcggacgttttatccaacagactgctgataggccagactagtgtggagatcaatgttctccaaggagacagggagttcgtgagagacaacaagtctcttggtagcttccggcttgatggaatccctcctgccccacgtggtgttccgca

SEQ ID NO: 51839 - DNA, 266 bp, Zea mays
ctcgagcgctatggtcctgtgtggcgtgttgcttgggcccatccaaagtatggcgctatccttgcttcgtgcagttatgatggccgtgtcattatttggaaagacgatgcacgaggcaattggtctcaagtccatgtgttcagtgacaacaagtcatctgtcaactccattgcatgggctccgtatgaggttgggctttgccttgcctgtgcatcttcaggtggaagaatatccatcttgacgatgcgagctgatgggggttggga

SEQ ID NO: 51840 - DNA, 272 bp, Zea mays
ctcgagccgctcgagccgctcggcagtcggcacgcaggctagcagcacagcagcagccaacgccatccacgctcctcgctacgcttcgcttcctcggcgccgattcctcctcctcctcctcgcccctcgtccgtcccgttccggcgcgcgagctcgcccgagatggcgaacgcgagatcgggtgtcgctgtgaacgatgagtgcatgctgaagtttggcgagctgcagtcgaagaggctgcaccgcttcataactttcaagatggacgacaa

SEQ ID NO: 51841 - DNA, 267 bp, Zea mays
ggcaatgctttggaggttcttcgtcaggtggacgagatatttgttcagtctattaaagacgcaggcctgtatgataaaatttggcaagcttttgctgtgttcttgccagtacagacagttggagttcagggtgaccagcgaacccactccacgcgccgttgttttaagggcaatcaccagtgaggatggcatgactgcagattggtactattttgagcatgcattcctggtagatgtggtaaacaagatttgcaacaatgtgcgtgg

SEQ ID NO: 51842 - DNA, 266 bp, Zea mays
gtattttggtgaacctttcttcttcctaattcgtgatggtgaagctttgtcggatatgaaagtacggattcagaagagacttcaagttcctgatgagcagtttctaaagtggaaatttgctcatgttacattcagtaagccagaatacctccaagattcagatattgtaatgaacagattccataaacagagacctgtttatggaggttgggaacaacaccttggattggagcatcagccacaccccaaaaaggtctattaggcaa

SEQ ID NO: 51843 - DNA, 268 bp, Zea mays
ctcgcgagcgcacgcacgtaagcacgttgtcggaagctcaagttagaagacgcaccagtgcctgatcgatggcggcccaggctctcctctccggccggcagctgctgggccgccccgtgcagtcggccgtctctaggtcgtcggcgaggaaggcgcccttcgtcgtcagggccagctccagccctccagccaagcaaggtgccgacagcagctgtggttcgcgtccaagcagtccctctcctacctcgatggcacgctgcccggcgat

SEQ ID NO: 51844 - DNA, 262 bp, Zea mays
ggtggagctgcttccttttgtttacacaccaactgtaggtgaggcctgccagacgtatgggtccatctttggacgaccacagggtctgtatgtcagcctgaaggacaaggcgaaggtcctagaagttctaaggaactggccacataggaacattcaagttatctgtgttactgatggtgagcgaatcttgggacttggagatttgggttgtcaggaatgggaattcctgtaggcaaacttgctctatacactgctctaggag

SEQ ID NO: 51845 - DNA, 262 bp, Zea mays
ctcttctccgagaccctccagctggtccgctccaccaaccgcaaaggcctctcctaccgcctcggcatcccccgcttcgcggacatgagctgggaggagttccgtgcgacccggctcggcgcagccagcaactgctccgccacgcttaccggcaaccaccggatgcgcgccgccgccgttgcgctgccggagacgaaagactggagggcggatgggattgtgagcccagtgaaaaaccagggccactgtggatcatgctgga

SEQ ID NO: 51846 - DNA, 261 bp, Zea mays
ggctactacaagacaggctggaccgagttccagccgcaggtggccaggccgacgttcgcgtcagcgatccagatcggcgacccggtgtccgtcgaccgggccgtggtacgcgctcaaggcgacggacggcattgtcgaggaggcgacggaggaagagctcatgaacgcgatgtcgctcgccgaccgcacggggatgttcgcttgcccgcacaccggggtcgcgctcgccgccctgttcaagctcagggaccagcgcgtcat

SEQ ID NO: 51847 - DNA, 264 bp, Zea mays
cgccgcctggccgctgtactggatcgcgcaggggtgcgtgtgcaccggcgtgtgggtcatcgcgcacgagtgcggccaccacgccttctcggactactcgctcctggacgacgtggtcggcctggtgctgcactcgtcgctcatggtgccctacttctcgtggaagtacagccaccggcgccaccactccaacacggggtccctggagcgcgacgaggtgttcgtgcccaagacgaaggaggcgctgccgtggtacaccccgta

SEQ ID NO: 51848 - DNA, 259 bp, Zea mays
ctccggtcagaccaatcaacaaagtgacgcgagcacgagcatccatcgtttccccttcttccccatcgcgtgccctcgccgcagccatcttccatggcggaccagctcacggacgagcagatcgcggagttcaaggcggccttcagcctcttcgatacggatggcgacggctgcatcactaccaaggagcttggaactgtgatgcgctcccttggccagaaccccactgaagcagagctgcaggacatgatcaacgagg

SEQ ID NO: 51849 - DNA, 258 bp, Zea mays
gcaatttacaagtggttgcgtgattgacagaattatagtcctcggtttacgatccggagtgaagaaggctattattgagcctggaaaccaagaagtagaaattgaatcagggccaattagtttaaggagtggttccagcccagttgtgccaacaatccggaggcccaatgttcgcatcgcagacagttggacaatatggatagcgtaagaggttgtccattcacgtctggagcctgatgtctcttttgtttgctgtca

SEQ ID NO: 51850 - DNA, 259 bp, Zea mays
gtcaaaattgctattgaggctgcaaaaggtatagaatatctgcatgacaaggttcagccttcaatcatccatcgggacatcagatcaagcaatgtactgctgtttgaggatttcaaggcaaaaattgcagactttaatcttttgaaccaagcaccagatatggcagctcgtctccattcaactcgtgtattggggacttttggatatcatgctcctgagtatgctatgactggccagctgacacaaaaagtgatgtcta

SEQ ID NO: 51851 - DNA, 261 bp, Zea mays
ccccaatcgaaggacctagcgagcggcacgtcggcggcgatcggagaagatggtgcgcaaggcgaaggttgagttcgacgagcagccgccggataacttcgacccgaagaacccgtatgccgacccggtggcgatgctcgagtaccgggaacacctggtgcgagagacgtggatccagatcgagaccgccaagatcatccgggagcgcctccgctggtgctaccgcatcgagggcatcaaccaccaccagaagtgccgcca

SEQ ID NO: 51852 - DNA, 261 bp, Zea mays
gaccatggaaaccatctgacatgcctggtttctctcttgatgcacctccaaacctaaggacatcgctaccagaaagaccaacctctgccactaggggcagacctggggcacctagttctagatcttgctctgttgagagtgggccagctggtcgaccaagacggcagtcttgctctccctccagaggaaggactttaagtggcagcgtgcttcagggagctccatgccagcagtgagaaggtcacatctcaatggaggtga

SEQ ID NO: 51853 - DNA, 257 bp, Zea mays
ggccgtgagccccgcggccggctccagtcccggcaagccgccgcgcctggtgggaggccccatggccgccagcgtggaggaggcgggtgtgcggcgtgcactggactttgccgtcgcgcgagtacaacaaagccagcaacgacatgtaccacagccgcgcgctgcaggtggtgcgcgcccgcaagcagatcgtagctggggtgaactattcttggacgtggagctgggccgaaccacgtgtaccgcgacccagccca

SEQ ID NO: 51854 - DNA, 256 bp, Zea mays
gtggacttcaaggagtttgttgcggcaactctccatatccaccagatggcggagtcgactcagaaaggtggggcatacgctgccaagctgctttcagtaagtttgatcttgacggtgatggatatatcacgccggaggaactcagaatgcacactgggttgaagggatctatcgagccgctgctggaggaggccgacatcgacaaagacggcaagataagcctgtccgagttccgcaagctcctacggacagcgag

SEQ ID NO: 51855 - DNA, 257 bp, Zea mays
cgctcaccgtacctcctccgaatccgccgaccgccggcgagcccctcctcctccacgacacgcgcttccccggctatcatggattcagatccatcatcacagaacccaacagatatgactacctttgtccagaacctccttggacagatgcaaacaaggttcgagtccatgtcgcagaacattgtgtcaaagatagatgaaatgggaaccaagattgatgagctcgagcagagcatcaacgatctcaaagctgagat

SEQ ID NO: 51856 - DNA, 263 bp, Zea mays
ggcttccaggcggccaccaaggatatggtgaagaataagaaggggacgaccacgcttgccttcatcttcgacaagggcgtcatcgtcgccgctgattccagggccagcatgggcggttatatatcctcacaaaccgtgaggaaaattattgaaataaatccttacatgctggggacaatggctggaggtgctgctgattgccaattttggcataggaacctaggaaccaagtgtcgtctccatgagctttcacacaagcgaag

SEQ ID NO: 51857 - DNA, 258 bp, Zea mays
cttcagccgcgttctgaccaccatgcggggaacgatgggctatctggcgccagagtggctcgcgggcgcgccggtcaccgccaaggccgacgtgtacagcttcggcctgctcctgttcgagctcatctcgggacgccggaacaacggctcctcggaggcagggtccaactccgctgtgtacttcccggtgcacgccgccgtccagtgcacgcgggggacgtggccgggctgctagacgacaagatcgccggggatgcc

SEQ ID NO: 51858 - DNA, 253 bp, Zea mays
ggcatcgcctggtccttcggcggcatgatcttcgccctcgtctaccgcaccgccggcatctccggcgggcacatcaacccggcggtgaccttcgggctgttcctggcgaggaagttgtccctcaccagggcggtgttttacatcatcatgcagtgcctgggcgccatctgcggcgcgggcgtcgtcaacgggttccagcaggggctgtacatgggcaacggcggcggcgccaacgtcgtcgcgcccggctaca

SEQ ID NO: 51859 - DNA, 246 bp, Zea mays
ctgaactagagcctgctctcaagatacagctcataatttccaccattgtgatgaccattggcattgcactaatcagttggcttggtcttccatacactttcacgattttcaactatggagtccataagatcgtgctaagctggcaattgttcttgtgtgtggcggttggtctctgggctggcctagtcatcggttttgtgactgagtactacacaagcaatgcctacagccctgtacaagatgttg

SEQ ID NO: 51860 - DNA, 252 bp, Zea mays
cgcgctctaattgtttgcattccacctgcattgatctttgaagggcccaagctaatgcagcatggatttagtgatgccattgttcaagtaggtttgacaaagtttgtcagtgacctattcttggttggactgttctaccatctgtataaccagattgctacaaacaccttggagcgagtggctcctactgacacatgctgctggcaatgtgttgaaacgtgtttttgtcatcggtttctcaatcattgtttt

SEQ ID NO: 51861 - DNA, 250 bp, Zea mays
tgcaattaacgccacccccggccaaccgcctgataactacctcttccgccggcgccgccatccccaacatggcgagccaaggggagccctcggcctctgcttccgatccgaaggagaagaaggactactcgacggcgatactagagaggaaagagtcaccgaaccgccttgtcgtcgacgaggccaccaacgacgataactccgtcgtcgcactgcaccctgacaccatggagagcctgcagctcttccg

SEQ ID NO: 51862 - DNA, 248 bp, Zea mays
agcacttaacgccacccccggccaaccgcctgataactacctctgccgccggcgccgccatccccaacatggcgagccaaggggagccctcggcctctgcttccgatccgaaggagaagaaggactactcgacggcgatactagagaggaaaaagtcaccgaaccgccttgtcgtcgacgaggccaccaacgacgataactccgtcgtcgcactgcaccctgataccatggaaaggctgcagttttcc

SEQ ID NO: 51863 - DNA, 272 bp, Zea mays
gcagcgcggaggccgcacgatgcctggagttactgtaaaagacgtgaaccagcaggagttcgtcagagctctggcagccttcctcaaaaagtccgggaagctgaaagtccccgaatgggtggataccgtcaagctggccaagcacaaagagcttgctccctacgatgagaactggttctacacgcgagctgctttcacagcgcggcacctgtacctccggggtggcgctggggttggctccatgaccaagatctatgggggagtcagagaaa

SEQ ID NO: 51864 - DNA, 270 bp, Zea mays
tccatggaacgggtcaccctttttctgaatctggctaatgatcccaccattgaacgtattatcacccctcggattgctctaacaacagcagaatatttggcatatgaatgtgggaagcatgtacttgtcatcttgacagatatgagctcttatgcagacgcacttcgtgaggtttctgcagcccgagaagaggtgccaggtaggcgtggttatcctggatatatgtacctgatctggcaacaatatatgagcgtgctgggcgtattgaag

SEQ ID NO: 51865 - DNA, 269 bp, Zea mays
cagagagggtctacaaatcaatgctacttcctctgatgatggagggcaatagggcaggtgaagccacccaaaaaggattttacaagtatgagggcaagaggaaagcgactcctgatcctgaaattatgaaatatattgaaaaatctaggagcatggcaggagttacaccagatcctgaggtttgctttcataattctgttgactgtgcacgcccttctgttgttcctcgagaaacatgcagtttttcctttttcaaagttcagtgtttt

SEQ ID NO: 51866 - DNA, 271 bp, Zea mays
atccactcccgctgggccatgctcggcgcgctcggctgcgtcttccccgagctgttctcccgcaacggcgtcaagttcggcgaggccgtctggttcaaggccggctcccagatcttcagcgagggcgggctggactaccttggcaaccccagcctgatccaagcggagagcatcctcgccatctgggcctgccaggtcgtgctcatgggcgccgtcgagggctaccgtaattgccggcgggccgctcggcgaggtcgtcgaccgctgtacc

SEQ ID NO: 51867 - DNA, 265 bp, Zea mays
cggtcatgagcctgctcctggcgcgccccaacgtcaagctgttcaacgccgtggccgtggaggacctcatcgtcaggggagggcgcgtcggcggcgtcgtcaccaactgggcgctcgtgtccatgaaccacgacacgcagtcttgcatggacccaaacgtcatggaggccaaggtcgtggtaagctcctgtggccacgagggccctttcggcgcacggcgtcaagaggctccaggacatcggcatgatcagcgccgtgccgagga

SEQ ID NO: 51868 - DNA, 270 bp, Zea mays
aagagcctctcctctctccccggccgccgcccgccgcccgctgccgctgcttgcgcctctctcgcccgcatcgccgcagggttcgcaaagatggcagtgccgctgctgacgcagaagatcgtgaagaagcgggtcaagcagttcaagaggccacacctcgaccgctacaagtgcctcaagccaagttgccgtaggccaagggtatcgactcccgtgtcaggcggaagttcaagggatgcaccttgatgcccaacattggataggctctga

SEQ ID NO: 51869 - DNA, 272 bp, Zea mays
gccgccaccgccacctgccccagcgcgccgccgccgcagccaccatgggtcgcgtccgcaccaagaccgtgaagaagacctccaggcaggtgatcgagaagtactactcccgcatgaccctcgacttccacaccaacaagaaggtgctcgaggaggtctcgattctgccctcgaagcgcctccgcaacaaggtggctggcttcagtacccacctgatgcgccgcatccagcgcggcccagtccgcggcatctcgctcaagctgaggaggagg

SEQ ID NO: 51870 - DNA, 132 bp, Zea mays
gtggattatcgccatccattgagaccctcgacaacatccgcaacttcgaccgtgtccaagaagttcctcatgaaggtccaatgtgtgatcttctgtggtctgatccagatgatcgatgtggttggggtattt

SEQ ID NO: 51871 - DNA, 262 bp, Zea mays
gtcacctggaagagggccgccaccatggaggatgtcctcagggaggctgacgtgataagtctgcatccggtgctggacaagaccacctaccatctgataaaccccgagaggctggccatcatgaagaaggaggctgttcttgtgaacgcaagccgagggcccgtgatcgatgaggccgcgctggtggagcacctcaaggctaaccccatgttccgcgttggcctcgatgtctttgaggatgagccttacatgaaacctggat

SEQ ID NO: 51872 - DNA, 271 bp, Zea mays
  unsure (1)..(271): unsure at all n locations
gtggccgtcgtctcccgttcggaacgccaagccccccctccggcgaaatggcccccaagcgaggtggcagggcgccggtgccggccaagaagaagacggataaagtgacgaaccctctattcgagaagaggccgaagcagttcggcatcggcggcgcgttgccgcccaagaaggacctgcaccggttcgtcaagtggcccaaggtcgtgcgtatccagcggcagcgccgnatcctcaagcagcgcctcaaggtaccaccggcgctcaacca

SEQ ID NO: 51873 - DNA, 267 bp, Zea mays
tcaggaacttatgatatgggacaccaggtccaaattcatctccaagccgagtcacttggtggatgcgcacactgccgaagtcaactgcctctcattcaatccctacagcgaatttattctagccaccggctctgtggataagaccgtagctttatcgatctgcggtaatttaaaattaatactccataccttcgaatctcataaagatgaaattttccaggtccactggtctccacataatgttactattctggcttcagtggtact

SEQ ID NO: 51874 - DNA, 269 bp, Zea mays
gttaaactggagagtacagaatgagattgacatcgtgttagctaaacccattctgccatctgatatatatagagttattcgggacacgttacttgttggattgacagggtactccatacagggacaacctgtttatgcatttggtgtgggtcttagtacttttgacaaggcctcggtgaactactatgtgcaatcacacatacagatgaatgaatatcgagatcgtgttgtcctgccggctgcatcaaagaagtttgggagacagatta

SEQ ID NO: 51875 - DNA, 265 bp, Zea mays
cactggtgttacatttgatgatgttgctggtgtggatgaagcgaagatagacttcatggaggtggttgagttcttgaagaaacctgaaaggttcactgctgttggtgctcgcattcctaaaggtgttctgcttgtcggtcctcctgggactggtaaaactttgcttgccaaggcaattgcaggagaggctggcgtaccatttttctcaatttcaggttctgagtttgtggagatgtttgttggtgttggtgcttccgagtacgtg

SEQ ID NO: 51876 - DNA, 207 bp, Zea mays
ggacgctgttcacaagaagtaccttgaagaagtttcttcatgcaatgtttttgttgtcaaggacaatgttatttctaccccagcaataaaaggaacaatattacctggtatcacaaggaaaagtataattgacgttgctttgagtaaaggcttccaggttgaggagcggcttgtttcagtggatgaactgcttgatgctgatgaggt

SEQ ID NO: 51877 - DNA, 264 bp, Zea mays
gcttgattggaagcccaggcggcctgacatgctcactgacacttttgggtttggccggatcatacatgatggcctcatgttcaagcagaacttctccattaggtcctatgagattggggctgataggacggcatctatagagacaatgtggaccatttgcaggaaacggcacttaatcatgtgaagaccgctgggctgctaggtgatggattcggctccacaccagagatgagtaaacggaacttattctgggtggttagccag

SEQ ID NO: 51878 - DNA, 265 bp, Zea mays
cctcgagggcgtttcctcctccagaggcctgcacgcggggcgcgggccccgtaggctctccatcgaaggcaacattggcctgcactgcccaaagtcttgggcacttgctggatatgatgttccgggagtcagcacgatggtcctacacattccagacattttccttttcgagccgcctgaatgtttaactggagcccttccctgagaaactcttacaggccaggacgccagtacagatctttgagaggtctgtgtacgtgacagg

SEQ ID NO: 51879 - DNA, 262 bp, Zea mays
gagaggattaaggctgtcaggcagatgattatggctcccacgcttgagctgaggcagcaggcgctcgaccgtctcttgccgtatcagaggtctgacttcgaaggcattttccgtgctatggatggactcccggtgaccatccgactcctggaccctcccctccacgagttccttccagaagggaacatcgaggacattgtaagtgaattatgtgcttaaacgggagccaaccaggaggatgccctcgcgcgatttgaaaact

SEQ ID NO: 51880 - DNA, 266 bp, Zea mays
atgaacaacactctgttcctgagatcacaaattctgtgtttgagccatcaagtgtgatggcaaaatgtgatcccaggcatggaaagtacatggcatgctgtttgatgtaccgtggcgacgttgttccaaaagatgtgaatgctgctgtccattcaatcaagaccaagagagcagtgcagtttgttgattggtgccctactggtttcaagtgtgggataaactaccaaccaccaactgtagtcccctggaggggaccggccaaggtg

SEQ ID NO: 51881 - DNA, 211 bp, Zea mays
ctcgagccgctcagtgacattgaagaattcatacttatgccaaatgttgccaaccttcagaatgttggtgaccgtctatatgatgaagaactatatgaagctgcaaagatcatatatgctttcatctcaaactgggctaagctggctgttaccctggttaagctgaagcagtaccaaggtgctgtggatgctgctcgcaaggctaacagtg

SEQ ID NO: 51882 - DNA, 210 bp, Zea mays
accagcgactcagcgagcgagagcagcacacacgcagctagctaggagcagcagcagagcagcggcgatggcggcctccatgatctcctcgtcagctctggcggtggcgcctcagggcctgccgcccctcggccgccgcgcctcctccttcgccgtcgtctgctccaagaagaagatcaagaccgacaagccctacgggattgggggtgg

SEQ ID NO: 51883 - DNA, 259 bp, Zea mays
ggccgaagaagaggagaagcgaacaagcaggcttcgagaacaagactgcagggggagggggaggaccaagcgaaaggggaactagagcaagatgggcggcgcactgctgcttgcgctcctcctcgtctctgctgctgccgcccctcaggtacttggagttggcaatggagacaatcacatgagaatcatccaggaggacatcatcgagacagtcaacaaccatcccagtgctgggtggacagcctcacgtaatcttact

SEQ ID NO: 51884 - DNA, 262 bp, Zea mays
gcacgacgcacgcagagccgcagagatccgtcacactgcaagttttgaaaactgaactgtaagatggcatcagcagagctttcccgtgaggaaaatgtgtacatggcgaactcgccgagcaggcagagaggtacgaggaaatggttgagttcatggagaaggtagcgaaaactgttgactcggaggagctcactgtggaggagcgcaacctcctgtctgttgcatacaagaacgtcattggagcccgccgtgcctatggcgc

SEQ ID NO: 51885 - DNA, 264 bp, Zea mays
caggaagcgtccagggcacctgtactttgagttctttgaagtaggttcaccttatggaagggttcctctcattgacaaggtttatgaactatcccagggctttcctggattgacatcactgaagagtgctgagctttcgcctgttagctggatgtcagttgcctggtaccctatataccacattccttaccagcgcagcgtgaaggacttatctgcatgcttcctaacttaccataccatttcctcctcgtttcactttctcgg

SEQ ID NO: 51886 - DNA, 265 bp, Zea mays
cgcccaccgccgtcgccgcccaaccgcagtaaggaggaaggagcaggaagatgccggcggggcacgggctgcggtcgcggacccgcgacctgttcgcgcggcccttccgcaagaaggggtacatcccactcaccacgtacctgcgcacctacaagatcggcgactacgtcgacgtcaaggttaacggcgccgtgcacaagggcatgccgcacaagttctaccacggccgcaccgggagcgtctggaacgtcaccaacgcgccatc

SEQ ID NO: 51887 - DNA, 217 bp, Zea mays
aaggaggagcgtccgtgtagctgccgtcgtcgcgaccgaggccgcgcagatcgactacagctcaagcgtctcggtgttcccgatggaggcctgcgacctgcttggtggcgacgcgtgcaacgggcccatgttcccggaggccaagcccgcctcggcggcggcggcggcgagcaggagtgtggtcggggtggacagggactacctgtcctacgacgag

SEQ ID NO: 51888 - DNA, 127 bp, Zea mays
tgcaactttgttccaaaagttgctgattttgggcttgccaaactgttcccaagaggcgacactttcgtgccactgagcgctatgcggggaacgataggatatatagctccagagatggtatctcgaa

SEQ ID NO: 51889 - DNA, 286 bp, Zea mays
ctggcgcacatctccgctggagatttgttgcgggcggaaatcgatgctggctctgagaatgggaagcgggccaaggaattcatggagaagggccagctcgtgcctgatgagattgtcgttaatatggtgaaggaacgccttcggcaaccagacgctcaagaaaatggttggcttttggacgggtacccaagaagctattcacagcccatggccttggaaactcttgaaatccggcctgatactttcattctgttagatgttccagatgaactccttgttgaaaggg

SEQ ID NO: 51890 - DNA, 228 bp, Zea mays
ccaggagctgcaccaaggtaatcatgcaaggggtggcggttggcagggcggtggacttgacgaggctagatgggtacgatgacctccgccgcaagttggaggagatgttcgatatcccgggagagctttccgccagcctcaagaaatggaaggtgatctacacagatgacgaggacgatatgatgctggtcggggacgatccatggagtgaattttgcaggatggtaa

SEQ ID NO: 51891 - DNA, 248 bp, Zea mays
ctccgccgccgctccgcctcagcgcatcgcccgccgcgacctcgtcgatcaccttcagctttcaatcatggcggacgtcgatgtcgaaccggaggttgccgccggagctcccaagaagaggacgttccgcaagtacagctaccgcggcgtcgacctagatgcgcttctcgacatgtccacggaccgacttgtccagtttttccccgcgcgcgccaggagaaggttccaagagggtctgaagaggaagc

SEQ ID NO: 51892 - DNA, 176 bp, Zea mays
ctcgagccgctcctctcctgtgttcctccataccccactccccccgcaagagcggcgcgacggcggcaaaggcaaaggcaaaggcaagatgttcgggcgcgcgccgaagaagagcgacaacaccaagtactatgagatcctcggggtgcccaagtcggcgtcccaggacgacctca

SEQ ID NO: 51893 - DNA, 272 bp, Zea mays
agacggcacacacaccacaccacacctcctcgcttccactccgctcgtctgatctctcgtcccgtcctttcgtttcgaagcctcgcgagccccgacgatggccaccgccgcggtgtcgatcgacgagaagctcgacaagcttcgcgccgaggtcgccaagctcgaccagatcagcgagaacgagaagtccgggttcatcagcctcgtgtcacgctacctcagtggggaagcggacagatcgagtggagcaagatccagacccctacggatga

SEQ ID NO: 51894 - DNA, 266 bp, Zea mays
ggagagtacgtggacgagcagccatggcttcatcagtcgccggggggacgagcacattcctgggcacccgcctggcggacccggcgccacagaacgggcgcatcgtggcccggttcgggttcgggttgggcggcaaggcgaacctgctccgaagaaggtggcgaagaacatcgacctcctctgacacggcggtgtggttccaggcgccgtggccccgactacctggacggctcgctggtcggcgactacgggttcgaccgttcggt

SEQ ID NO: 51895 - DNA, 272 bp, Zea mays
gtcctgccggctgcatcaaagaagtttgggagacagattaatacctgcttgaaggttatggatatgactggcctcaagctgtctgcactgagccaaataaagatgttgacgatgattactactgttgatgaccttaattatcctgagaaaacggaaacttattacattgtaaatgctccatatgttttttcagcgtgttggaaggttgtgaagccactcttacaagaaagaactaaaaagaagatccaagtcctgtatggctctgggaggga

SEQ ID NO: 51896 - DNA, 282 bp, Zea mays
tggagaaggtttccagcgatgaatctgataagcttcttaagatggaagacactgtgcacaagcgtgtcattggccaagatgaggctgtggtagcaattagtcgctccatccgccgtgctcgtgtgggtctcaagaaccccaacaggccaattgcaagctttatttttgctggtcccaccggcgttgggaagtctgagcttgcaaaggctcttgcagcctattactttggctctgaggaggctatgatccggcttgatatgagtgcaatcatggagagacaca

SEQ ID NO: 51897 - DNA, 202 bp, Zea mays
gttcctcgtagaggcgctcgacaaccctcgccaccgcctcatggttctacggatggaactggatatacgaaactttatgcagaaccctcagctgcaggagttcgaattccagaactttccgacttcttacctacgctgtgctgctcatcgtgttgcacaacattatggcttagagactatagtggcagatagtttagtagaa

SEQ ID NO: 51898 - DNA, 248 bp, Zea mays
gtccgagctgatggtgcatttataccgtttgctgatgactttgacattacgactgtcagcacatcggttaaaggagttggagtcattggtgatgtaaaggcaattgatttgtcatcctcaattggcagtctcattgggagacaagttgtcaaagttggaagaagttctggtctgacaacaggaactgttgtcgcatacgcacttgagtacaatgatgagaagggaatatgcttcttcactgactttct

SEQ ID NO: 51899 - DNA, 275 bp, Zea mays
acacggcacacacaccacaccacacctcctcgcttccactccgctcgtctgacatctcgtcccgtcctttcctttcgaagcctcgcgagccccgacgatggccaccgccgcggtgtcggtcgacgagaagctcgacaagcttcgcgccgaggtcgccaagctcgaccagatcagcgagaacgagacgtccgggttcatcagcctcgtgtcccgctacctcagtggggaagcggacagatcgagtggagcaagatccagacccctacggatgaggt

SEQ ID NO: 51900 - DNA, 272 bp, Zea mays
tcaagaccgacaagccctacgggattgggggtgacctgaacgtcgacgtcgacgccaacgggagaaagggcaagggcaagggcgtgtaccagttcgaccgacaagtacggcgcgaacgtcgacggatacagcccaatctacaacgaggatgactggtctcccaccggcgacgtctacgtcggtggaaccactgggctcctgacttgggccgtcaccctcgctgggaatctacggcgggggcgccctcctcgtctacaacaccagcgccctct

SEQ ID NO: 51901 - DNA, 275 bp, Zea mays
atgagctcaagttggaagtagctgggctgaaatcgatgtttatcgagagagctcaagctctgattcatggagatctccatactggttctatcatggtgaccgaagttcaactcaagtcattgatccagaatttgggttctatgggccaatgggttttgatattggagccttccttggaaacctgattttggcatactatgcacagaatgggcatgctgatcaagcgaatgatcgtatggcttacaagaaatggatcttgaagacaattgaagagt

SEQ ID NO: 51902 - DNA, 191 bp, Zea mays
gcagtcatggcttgttgggagctcgaacaaactttacaaagccttacaggtgcatctcctggtgagggcactggggcaactatgtctgacgatgaagacaatcaggtggacagtgagagcaacatgtttgatggaaatgaggggtcagatggaatgggatttggcccattaatgttgactgagggtgagag

SEQ ID NO: 51903 - DNA, 252 bp, Zea mays
cagcaacccccaacagcgccactgtccagtgcgcgcgtcaagcttgcttagctagccgccatggcctccctcgccgccgtctccgtgaagcccgtggccatcaatggtctcgccggcagctccatctccggaaggaagctcgtcgtcgccaggccgtcggcccgctccatccgcaggccccgcgcaccgccgtggtggccaagtacggcgacaagagcgtctactttgacctcgacgacatcggcaacacca

SEQ ID NO: 51904 - DNA, 278 bp, Zea mays
cacacatacatagtttcttctactacacgacgacaaacatggggaagcgtgcgaagatcggagagtggggtggatacgccggcgatcgtcgggatctgagggctactccggaccggctgaccgaggtgaaggtcacggcggacaacagcagctgcatccgctccatctccttcatctacatcggagccgatggcaagccgtacgaggaggggccatggggtttcggccatgctggcacggagtacaagattgatctgtgcaggttcgacgagagcttg

SEQ ID NO: 51905 - DNA, 220 bp, Zea mays
cggctcgagcagcaggagagcatcctaggaaaaaagttattaccaactgaccgagcaaaaaaggtagcatctctgtatcaccaaggcaccgccgatcacagaccaaatccctcccccctctggtccatcccacacgtagagcagccggtatttcttcaatccgtgcttgcgcctttttttttccttgtaaagatttcgtttcgctcccttttaactgttg

SEQ ID NO: 51906 - DNA, 270 bp, Zea mays
gtggccgtcgtctcccgttcggaacgccaagccccccctccggcgaaatggcccccaagcgaggtggcagggcgccggtgccggccaagaagaagacggataaagtgacgaaccctctattcgagaagaggccgaagcagttcggcatcggcggcgcgttgccgcccaagaaggacctgcaccggttcgtcaagtggcccaaggtcgtgcgtatccagcggcagcgccgcatcctcaagcagcgcctcaaggtaccaccggcgctcaacc

SEQ ID NO: 51907 - DNA, 203 bp, Zea mays
aagagcctctcctctctccccggccgccgcccgccgcccgctgccgctgcttgcgcctctctcgcccgcatcgccgcagggttcgcaaagatggcagtgccgctgctgacgcagaagatcgtgaagaagcgggtcaagcagttcaagaggccaaacttcgaccgctacaagtgcctcaagccaagctggcgtaggcccaaggg

SEQ ID NO: 51908 - DNA, 276 bp, Zea mays
atacggcacacacaccacaccacacctcctcgcttccactccgctcgtctgacatctcgtcccgtcctttcgtttcgaagcctcgcgagccccgacgatggccaccgccgcggtgtcggtcgacgagaagctcgacaagcttcgcgccgaggtcgccaagctcgaccagatcagcgagaacgagaagtccgggttcatcagcctcgtgtcacgctacctcagtggggaagcggacagatcgagtggagcaagatccagacccctacggatgaggtg

SEQ ID NO: 51909 - DNA, 260 bp, Zea mays
gccgtctgataccactgacctccgtgctttctaccctacatcggtactagaaactggacttgatattctcttcttttgggtagcaaggatggtgatgatgggaatgcaacttggtggtgacgtgccatttcagaaggtttatttacatcctatgattcgggatgcacatggccgatagatgtcaaaatcacttggtaacgttgttgaccctcttgaggtgataaatggcatgtcactggatggtcttctgaaacgtttgg

SEQ ID NO: 51910 - DNA, 269 bp, Zea mays
cccagaccagcagcggctcatcttcgctggcacacagcttgaggacgggcgcacgcttgctgactacaacatccagaaggagagcaccctccaccttgtgctccgactcaggggaggcatgcagatcttcgtgaagaccctgaccggcaatactatcaccctcgaggtggagtcctacgacaccattgacaacgtcaaggccaagatccacgacaaggagggcatccctccagaacagcagcggctcatctttgctgggaagcagcttg

SEQ ID NO: 51911 - DNA, 268 bp, Zea mays
tcgatctacacacatacatagtttcttctactacacgacgacaaacatggggaagcctgcgaagatcggagagtggggtggatacgccggcgatcgtcgggatctgagggctactccggaccggctgaccgaggtgaaggtcacggcggacaacagcagctgcatccgctccatctccttcatctacatcggagccgatggcaagccgtacgaggaggggccatggggtttcggccatgctggcacggagtacaagattgatctgtgc

SEQ ID NO: 51912 - DNA, 274 bp, Zea mays
ggtctctgagtttccaggagaggtctctgtgcttgctttgggacccctgacaaatgtagcattggccatcaaacgagacccttcctttgcaagcaaggtgaataaaatagttgtactgggtggagctttcttcgtggctggaaatgtcaaccctgctgctgaagcaaatattcttggagacccagaagcagctgacatagtttttacttcaggagcagatgtcattgtggttggcattaacataacaacacaagtctgtttgacagatgagggt

SEQ ID NO: 51913 - DNA, 282 bp, Zea mays
cagaagctctgagttttgaggatggatctatggatggttacactatcgcatttgggatcagaaatgtgacgcacattgagaaagctctgtcagaagcttacagggttctaaagcaaggggggaggttcctatgcttggagttgagtcatgtggatgtccctatttttaaagagatttatgatgtttactcgttttctatggttccggctattggagagctggttgctggtgatcggcagtcgtaccaatacttggttgagagcatccgcggtttccgaatca

SEQ ID NO: 51914 - DNA, 281 bp, Zea mays
agcagcggctcatttttgctggcaagcagctcgaggacgggcgcacgctggccgactacaacattcagaaggagagcaccctccacttggtgttgcgtctcaggggcggcatgcagatatttgtgaagactctgactggcaagactatcacccttgaggtcgagtcttctgataccatcgacaatgtcaaggccaagatccaggacaaggagggcatccctccggaccagcagcggctcatttttgccggcaagcagctcgaggacggcgcacgctggccg

SEQ ID NO: 51915 - DNA, 281 bp, Zea mays
agctggagaaggtgtccaagaagcaggaggaggggctcgtcaccaacaagtacaagcccaaggagccgtacgtcgggaggtgcctgctcaacaccaggatcaccggcgaccaagcgcccggggagacgtggcacatggtcttcagcacagaaggcgaggtcccctacagagagggccagtccatcggcgtcatcgcggatggcgaggacaagaacggcaagccgcacaagctcaggctctactccatcgccagcagcgccctcggagatttcggcgactcc

SEQ ID NO: 51916 - DNA, 275 bp, Zea mays
acagactcagagagaacccaccatggtgctgtctcctgccgacaagaccaacgtcaaggccgcctggggtaaggtcggcgcgcacgctggcgagtatggtgcggaggccctggagaggatgttcctgtccttcggcaccaccaagacctacttcccgcacttcgacctgagccacggctctgcccaggttaagggccacggcaagaaggtggccgacgcgctgaccaacgccgtggcgcacgtggacgacatgcccaacgcgcgtccgccctgag

SEQ ID NO: 51917 - DNA, 268 bp, Zea mays
ccccgcgtccgctagccctagccgccgtccgccgacttcatcgtcgccgtcgtctagacctcttcacgcactggaaaggttaaagtccgacatcaatggcgaagatcatcctgatctcatcatgtgccggaagcagcctggcatcgcgattggccgcctttgcgagaaatgtgatggcaagtgtgttgtctgcgactcgtacgtgcgcccatgtacgcttgtccgggtctgcgacgagtgcaattatggttcgttcagggaaggtgtg

SEQ ID NO: 51918 - DNA, 279 bp, Zea mays
gatctttcccccgtcctccctcgccttcgcctcgccggcaggagatttccaccaccaccgccggaccaccccgaccctccttccctctcgcgctatggcccagactgttgtgctcaaggttggcatgtcctgtgagggctgtgttggagctgtcaagcgggtcctgggcaagatggaaggcgtcgagtcctacgacgtagacatcatggaacagaaggtcaccgtgaagggcaatgtgacacctgacgccgtcctgcaaactgttccaagactggcaag

SEQ ID NO: 51919 - DNA, 277 bp, Zea mays
atcgatctacacacatacatagtttcttctactacacgacgacaaacatggggaagcctgcgaagatcggagagtggggtggatacgccggcgatcgtcgggatctgagggctactccggatcggctgatcgaggtgaaggtcacggcggacaacagcagctgcatccgctccatctccttcatctacatcggagccgatggcaaaccgtacgaggaggggccatggggtttcggccatgctggcacggagtacaagattgatctgtgcaggttcga

SEQ ID NO: 51920 - DNA, 270 bp, Zea mays
ctcgagcgaatcggctcgagggcgcaactcatggacgagctggcggtcgtggcgacggaggagtaccgctccgtcgtcgtcaaggagccgcgcttcgtcgagtacttcagatcggctacaccggagaccgagtacgggaggatgaacatcggcagccggccagccaagaggaggcccggcggcggcatcacgaccctgcgcgccatcccctggatcttctcgtggactcagaccaggttccaccttcccgtgtggctgggagtcggcgcc

SEQ ID NO: 51921 - DNA, 274 bp, Zea mays
gctgcatccgctccatctccttcatctacatcggagccgatggcaagccgtacgaggaggggccatggggtttcggccatgctggcacggagtacaagattgatctgtgcaggttcgacgagagcttgacggagatctccgggaccacgggcccagcctacaacattgacaatctggtcaagtctctcaaatttgtcaccaacaaacgtacttacggaccgtacggcagggacgagggcaccccgttccgtgtcaaggtgatgacaacggccac

SEQ ID NO: 51922 - DNA, 272 bp, Zea mays
ccgccgtcgaggccgcgtcccagtgcgaagagaccacgactcagatggccagccgctgggtccggcccgaggtgtacccgctgttcgcggcaacgggcgtggccgtcggcatctgcggatttcagctcttccggaacatcaccggcaacccggaagtcagggtaaacaaggcagggatggcagctggtgtgcttgagaaccatgaggaggggaggcgttacgccatgcatggcctaagaagctttgtgcactacaagacttctgagatcatg

SEQ ID NO: 51923 - DNA, 265 bp, Zea mays
  unsure (1)..(265): unsure at all n locations
gctgagggtcgctgatgaaccttgggtgtgctactggccatcctaactttgtcatgtcctgctcattcactaaccaggtcattgcccaacttgaactgtggaaggagaagagctctggcaagtatgagaagaaggtgtatgtgctccccaagcaccttgatgagaaggttgctgctctccacttgggcaagcttggtgccaagctgaccaagctcaccaagtctcaggccgactacatcagcgtgccgatcgaggtcnctacaag

SEQ ID NO: 51924 - DNA, 263 bp, Zea mays
cgataccctagccccgcctcaccgccggcggtggtggcagcctcagcaccggcacacagcccgccgtacctctcctcgtacgctcccttccggtgtgccgtcgccccctcgaccggtccatcgttcgtcggctcggtagccgccggatcggatcgggatcggccggcgccatgtccaaggccagggtctacaccgacgtcaacgtgctgcgccccaaggtgtactgggactacgaggcgctcaccgttcaatggggtgagcag

SEQ ID NO: 51925 - DNA, 270 bp, Zea mays
caggtgggagtcggtgtgtggtccctggatgcccaaatgcagcatgtggccaaggccgtagcgaccgctgcgtgaggcacggtggcggcaagagatgtaaattcgaagggtgcgcgaagggcgcgcaagggaacaccgatcactgcataaggcacggtgggggaaggcggtgcaggttccaaggatgtacaaagagtgcgcatggacgcacagatttctgcatcaagcatggtgggggcagccggtgcaggttccaagggtgtggcgcga

SEQ ID NO: 51926 - DNA, 270 bp, Zea mays
tctcctccccgatccccaaaatcgaacccaagtcgaaaccctaacctcggccttctcgatgtcggccgccacaaccgccccaacccctgcggtggccaccccgattgcgccgcctccgtcgtacccggcctcctccacgatctccgcctccgttgccgcgtcggtcgatgaagaggacgacctctatggccgcctcaagtcgctccagcgccacatggagttcgtcgagatccaggaggagtacgttaaagacgaacagaagaacctcaa

SEQ ID NO: 51927 - DNA, 270 bp, Zea mays
tgctcgagcgactcggctgagcgggctcgagggcgactctggaccgtcgaccaccacaggacaccttatactacaagcttggaacgaatgcacggcacgtgatcgagaggttcgagaaggaggctgctgatatgaacaagcggtccttcaagtacgcgtgggtgctcgacaagctcaaggctgagcgtgagagaggtatcaccattgatatcgctctgtggaagtttgagaccaccaagtactactgcacggtcattgtgcccctggaca

SEQ ID NO: 51928 - DNA, 266 bp, Zea mays
cgtcgatctacacacatacatagtttcttctactacacgacgacaaacatggggaagcctgcgaagatcggagagtggggtggatacgccggcgatcgtcgggatctgagggctactccggaccggctgaccgaggtgaaggtcacggcggacaacagcagctgcatccgctccatctccttcatctacatcggagccgatggcaagccgtacgaggaggggccatggggtttcggccatgctggcacggagtcaagattgatctg

SEQ ID NO: 51929 - DNA, 262 bp, Zea mays
tgttcctggacgagctgggcgtgggctacgacgaggccgaggactacgtggtggtcaagcacgcggcgctgttcacgtccaccgtgatgagccggctcctggcgcggcccaacgtgaagctgttcaacgccgtggcggtggaggacctgatcgtgcggcgggggcgcgtcggcggcgtggtcaccaactgggcgctcgtgtccatgaaccacgacacgcagtcgtgcatggaccccaacgtcatggaggccaagtggtggtc

SEQ ID NO: 51930 - DNA, 263 bp, Zea mays
gaccctccctcagccgcgtcgcgtcgcatcctacgatccaaagctctctctgctcgcagccatggcgaagaactacccgaccgtgagcgccgagtacagcgaggctgtggagaaggccaggcgcaagctccgagccctcatcgccgagaagagctgcgccccgctcatgctccgcctcgcgtggcactccgcggggacgttcgacgtgtcgtcgaggaccggcggtccattcggcacgatgaagcatcagtcggaattggctc

SEQ ID NO: 51931 - DNA, 262 bp, Zea mays
cggggatgtacaacaaggaggacaacccccgcgtgcccatcatcgtcaccggcaacgacttctccacgctgtacgcgccgctcatccgcgacggccgcatggagaagttctactgggcgcccacccgcgaggaccgcatcggcgtctgcaagggcatcttccgcaccgacggcgtcgacgaggagcacgtcgtccagctggtcgacaccttccctggccagtccatcgacttcttcggcgcgctgcgtgcccgggtctacga

SEQ ID NO: 51932 - DNA, 260 bp, Zea mays
ctgcaggtgaacgcgaggaccgccgccaagaacatcgaggtggaggtcgagaagccgcttggcttagccttgggccagaagcccggtggtggcgtcgtcatcacttctgtggagtctggagggaatgcagccagagccggtctgaaaaccggggaccaggtcctgtacacaagcagcttcttcggagacgagctgtggcctgcggataagcttgggttcaccaagacagccatccaagcgaagtcagactccgtctactt

SEQ ID NO: 51933 - DNA, 254 bp, Zea mays
ggccgcactgtttgacttcaacctgacgctcccggcgatcgcgaccgagttcctgctgctcatggtggcgctggacaagctctacttcacgccgctaggcaagttcatggatgagcgggacgccaagatccgcggtgagctcggcgatgtcaagggcgcctccgaggaggtgaagcagctggaggaccaggcggcggccatcatgaaggcggcgcgcgcgagatcgcggcacgcttaacaagatgagaaggaga

SEQ ID NO: 51934 - DNA, 257 bp, Zea mays
agtggatcgattagtatcgaggaaatgcgtcatgcccttgcaaaggatcttccctggagattgaaaggtccccgtgtgctggagattattcaagcaattgacagcaacactgatgggctcgtggacttcaaggagtttgttgcggcaactctccatatccaccagatggcggagctcgactcagaaaggtggggcatacgctgccaagcgcttccagtaagtttgatcttgacggtgatggtgatatcacgccggag

SEQ ID NO: 51935 - DNA, 257 bp, Zea mays
tcggcgcgcacgcgcttcaaggcctttgtcgtcgtgggcgactgcgacggccacgtcgtgctgggagtcaattgcgccaaggatgtggccaccgccatccgcggcgccatcatcctcgccaagctctccgttgttcccgtcaggagaggctactggggaaacaagatcgggcagccgcacaccgtgccctgcaaggtcaccggcaagtgcgggtccgtcaccgtgcgcatggtgcctgcgcccacgggttctggcat

SEQ ID NO: 51936 - DNA, 235 bp, Zea mays
cgccatcccctggatcttctcgtggactcagaccaggttccaccttcccgtgtggctgggagtcggcgccgcctttaagttcgccatcgacaaggacgtcaggaacttccaggtcctcaaagagatgtacaacgagtggccattctccagggtcacccgggacctgtggagatggttttcgctaagggagaccccggcattgccggcttgtatgacgatctgcttgttggcggaa

SEQ ID NO: 51937 - DNA, 223 bp, Zea mays
gcctaatgaagatcctcacggaaaggggttattccttcaccacgacggcagaacgggaaatcgtgagagacataaaggagaagctggcctttgtcgccctagactacgagcaggagctggagaccgctaagagcagctcctccgtcgagaagagctacgatctgccgatgggcaggtcatcacgatcggcgcggagaggttcagatgccaaaaggtgcttttt

SEQ ID NO: 51938 - DNA, 253 bp, Zea mays
tggcggattacaacatccagaaggagagcactctccacctggtgctccgcctcaggggtggcatgcagatttttgtgaagacattgactggcaagactatcaccttggaggtggagagctctgacaccattgacaatgtgaaggccaagatccaggacaaggagggcattcccccagaccagcagcgtctgatctttgcgggcaagcagctggaggatggccgcactctcgcggactacaacatccagaagga

SEQ ID NO: 51939 - DNA, 181 bp, Zea mays
acggaggtcttccatcccaggcctttgaatacatcatatacaatggtggccttgacactgaaggaatcttaccctgtaccaagtgtgtcagatggaattcttgccaagttgtagagaatgtgagaatgttcggagtccaaggttttggactcggttaacatcacccttggtgctgaggatg

SEQ ID NO: 51940 - DNA, 245 bp, Zea mays
cgcgaggcaaaagcgcaaacgcgaccacagacagagcgcgcttcaaggccttgtgttttggagataacaaggaggagaggaggagatggcggtcactatcacctgggttaaggcgaggcagatcttcgacatccgcggcaaccccaccgtcgaggtggacgtgggcctcagcgacggcagctacgcgaggggggccgtacccatcggcgcatccactggaatatatgaggccttggagttgaggg

SEQ ID NO: 51941 - DNA, 167 bp, Zea mays
gccgtctcccttttgcgtgagaaagaaagagagcgagaagcagtcgccatgtctggcatcatccacaagatcgaggagaagctccacatggggggcgaccacaagaataaggaggaggagcaccacaagaaggccgaggagcaccacaagaaggaggaggggagcac

SEQ ID NO: 51942 - DNA, 249 bp, Zea mays
ttgcaatcacaacgaacagaagctctcgatctcaccgacaccgaggaagaagagatcaatggcgtccgagcagggagtcgtgatcgcgtgccacagcaaggctgagttcgacgcccacatgaccaaggcccaggaagccggcaagctggtggtcatcgactcactgccgcctggtgcggtccatgccgcgccatcgccccactgttcgtcgaacacgccaagaagttcactcaggtcgtcttcctgaag

SEQ ID NO: 51943 - DNA, 221 bp, Zea mays
gccgggcaccaacatactgctcccgaggccgggctatccgaactacgaggcgcgcgcagggctgcacaacctggaagtccgccggttcaatctgatccccgagagagggtgggagattgacatcgacggtctggagtcgatcgccgacaagaacaccaccgccatggtcatcataaaccccaacaacccttgcgggagtgtctacacccgtgagcatttgg

SEQ ID NO: 51944 - DNA, 236 bp, Zea mays
gcaatgaggaccgtgtaacactcatcaaggactaccgtggcaagattgagagggagctcaccaagatctgtgatggcatcctcaagcttctcgaatctcaccttgtgccgtcttccaccgctcccgagtccaaggtcttctatctcaagatgaagggtgctactacagataccttgctgagttcaagactggagctgagagaaggacgctgctgagaacaccatggtggcatacaa

SEQ ID NO: 51945 - DNA, 244 bp, Zea mays
gacgagtccgtgctctggaccgagagccgcgacgtcggcaacggcttccgctgcgtccgcatggtcaacaacatctacctcaacttcgacgccttccacggcgacaaggccctcggcggcgtccatgacggtaccgagatcgtgctctggaagtggtcgagggcgacaaccagcgctggaagatcctcccttggtgaacgaacgaaagatactactagctggtaccctaataataattctgctg

SEQ ID NO: 51946 - DNA, 244 bp, Zea mays
tagcgctcaacgagactgtggaggaattgcccttaaaccttgaagttggtcctattagcatgaccaagtggcaattatttttacagattgagcagtccttccaggttcatcgtagttatggaagtatgcttgaaggcgaggctgatgaactcaagagggtttttcttgaaggaaatccttatcttcttggattgactatggtcgtttctctattacactccctgtttgattttctggccttcaa

SEQ ID NO: 51947 - DNA, 241 bp, Zea mays
tcgccgacaacggcatccctcttcctaacgtcaactccaagatcctatcgaaggtaatcgagtactgcaacaagcacgtacatgccgccgcagccgcagccgccgcctcgaatgccggttccgacgacgtgggtgccgcctccgccaacagcaccgcgcctccggtgaggacctcaagaactgggatgcggacttcgtcaaggtcgaccaggccacgcttttcgacctcatcttggctgca

SEQ ID NO: 51948 - DNA, 168 bp, Zea mays
ccgcatcagaggttgcactttcaaggttcagtagttgtattatgcttgtggcgtatgccagctatctctatgtccaattaagtggacggagcaacatttacagtccaataggcagtgaagaggcgcctattgaggatactgcagaggaagattaagaagctgagattg

SEQ ID NO: 51949 - DNA, 155 bp, Zea mays
tccaagttctaccctgccgacgacgtcaagccccgcgttcccagcacccgcaagcctaagcctaccaagctcaggtcgagcatcacgcctgggacggtgctgatcctcctcgcagggcgcttcatggggaagagagtggtgtttctcaagcagct

SEQ ID NO: 51950 - DNA, 249 bp, Zea mays
ccagatttggccgccgccgccgctgacccaggttgtcttgatggcgcccgctgtagaagccgtgaaggagacaggcaccttccagaaggttcctgccttgaacgataggatactgtcatccatgtccaggaggtctgttgctgcacacccttggcatgatctggagataggtcctggtgctccaaccatattcaactgcgtcattgagataccaggggcagcaaggttagatatgaacttgacaagaaa

SEQ ID NO: 51951 - DNA, 207 bp, Zea mays
ctcggcagtcggcacgcaggctagcagcacagcagcagccagagccatcccctctcctcgctacgcttcgcttcctcggcgccgattcctcctcctcctcctccaccctcgtccgtcccgttccggcgcgcgagctcgcccgagatggcgaacgcgagatcgggtgtcgctgtgaacgatgagtgcatgctgaagtttggcgagctg

SEQ ID NO: 51952 - DNA, 270 bp, Zea mays
aaggagagtacgtggaggagcagccatggcttcatcggtggccgccgcggcgagcacattcctgggcacccgcctggcggacccggcgccacagaacgggcgcatcgtggcccggttcgggttcgggttgggcggcaaggcgaagctgctccgaagaaggtggcgagacatcgacctcctctgaccggccgctgtggtgcccggcgccgtggcgccggactacctggacggttcgctggtcggcgaataggggttcgacccgttgcgtct

SEQ ID NO: 51953 - DNA, 275 bp, Zea mays
ctcacgccgccgccgccgccgccgtcgccgccaccacatccgtagcgcccagccgccggagaagaggagggagccagcaccagccaccatgggtcgcgtccgcaccaagaccgtgaagaagacctccaggcaggtgatcgagaagtactactcccgcatgaccctcgacttccacaccagcaagaaggtgctggaagaggtctcgatcctcccctcgaagcgcctccgcaacaaggttgccggcttcacgacccacctgatgcgccgcatccagc

SEQ ID NO: 51954 - DNA, 179 bp, Zea mays
ggttggaaccggcgcacctgttcctggacgagctgggcgtggcgtacgacgaggccgaggactacgtggtcatcaagcacgccgcgctcttcacgtccacggtcatgagcctgctcctggcgcgccccaacgtgaagctgttcaacgccgtggccgtggaggacctcatcgtcggggga

SEQ ID NO: 51955 - DNA, 259 bp, Zea mays
cgaccctagggccaacaactttgatctcatgtatgagcaggtgaaggcgatcaaggaaggccaggcagtcgagaagcccatctacaaccatgtcactggcctcctcgaccctccggagcttatcgcgccaccaaagattttcgtcattgaaggtctgcacccaatgttcgatgagcgattgagggacctcttagatttcagtatcgacttggacatcagtgatgaagtaaggtttgcatggatattccagcggtacatg

SEQ ID NO: 51956 - DNA, 271 bp, Zea mays
gccgaatctgctgtcgagcagttcaacggttatgcatttcaaggaagacgactcagggtgaactgcgggccaccaccacctagagatgaatccacaccaagagcaccaaggggtggtggtggcggcggcggcggcggctttgtcgattcagctaacaaggtctatgtggggaaccttgcgtggggtgttgacaactcgactctggagaacctgttcagtgagcaatggcaagtgcttgatgcgaaggtcatctacgacagggatagcggca

SEQ ID NO: 51957 - DNA, 275 bp, Zea mays
ggctcgagctggcgaaaattggcaactcagtgaaggattttccagcatgtgcaaggtgaagaatatggggctgcgttttgctgatctcctggatcgattatctttggaatacccttagatgcgggtcaggtgtacctcaccacacccaaaggatttcccagatgagctactgtatttgatgcgggataggtataacatctgcaatcttattcacttaccagcacaaacaggcagtacagcggcgctggaacgaatgcggaggtgttacactcgag

SEQ ID NO: 51958 - DNA, 214 bp, Zea mays
cctacctgtacatacagtatgatgagtttgacaatgctgccaccgactattatgtaccactctcgagatgcatgggatcatatgcagttcaaggatgtttgcgttaaagttgcgaatgttgagctatactacaaggcagttcacttctatttgcaggagcatccggatctcagcaatgatatgcggaatgtgcttgcacttcggttagatcata

SEQ ID NO: 51959 - DNA, 297 bp, Zea mays
atcggtgtggtcgccaaagagttcccgtttgcaggagttcccatctcggggtgtcttggagatcagcatgctgctatgcttgggcagctgtgccagaagggtgaagcgaaaagcacctatggaactggtgccttcatccttcttaacacaggggaagagcctacccaatcctcccatggccttcttagtaccattgcttacaagcttggtccagctgcacccactaactatgctcttgaagggtccattgcaattgcaggcgcagcagttcagtggctgagggcagccttggaatca

SEQ ID NO: 51960 - DNA, 281 bp, Zea mays
ggggaaagcacttaatgcggtcgcctcgcggaacgccaagtcttagttgttggaaatccctgtaacactaatgcgctgatttgtttgaaaaatgccccaaacataccggcaaaaaactttcatgcattgacgaggttggatgaaaatagagcaaagtgccagctggcactaaaagcaggtgtattttatgacaaagtatcaaacgtgactatttgggggaacattcgacgactcaggttcctgatttcttgaatgccaaaattgatggaagaccaggaaag

SEQ ID NO: 51961 - DNA, 277 bp, Zea mays
  unsure (1)..(277): unsure at all n locations
aggagcgtcaccggaagtatgggcccgcggacgncgccagcgggccggagttgtcgacaacagctccgcgttccggatggagcccgaggtgccgctcgtcatccccgaggtcaaccccgaggccatggcgaacgtccgcctcgggcagggggcgattgtggcaaatccgaattgctcgaccatcatctgcctcatggctgccacgccgctccatcgccacgctaaggtgttaaggatggttgtcagcacataccaagcagcaatggtgcgggtgctg

SEQ ID NO: 51962 - DNA, 294 bp, Zea mays
aggctcctggaaacgacccattcaggcctgatcacgaagacgcccgttaaaaacttcttcctctctggatcttacacgaaacaggactacattgacagcatggaaggagcaactctctccggcaggcgaacgtcggcctacatctgcggtgccggggaggagctgctggcgctccgaaagaagctactcatcgacgacggcgagaaggcgctggggaacgttcaagtcctgcacgctagctgaacaacccctcctgcactgcagagaagcttggatcttccaaccacatacatg

SEQ ID NO: 51963 - DNA, 294 bp, Zea mays
cgcgcgcccagcgacattgtgtgccaggcggcgagcagcatctccgccgaccgcgtccccgacatggagaagcggaatctgatgaacctcctcctcctcggcgccatctcgttgcccaccgtcggcatggtcgtcccctacggcgccttcttcgtccctgccggctccgggaacgccggcggcgggacctacgcgaaggacaagctgggcaacgacatcacggtggatgcgtggctcaacacgcacggtcccaacgaccgcacgctcgcgcaggggctcagggtgaccccacgt

SEQ ID NO: 51964 - DNA, 292 bp, Zea mays
aggagcattcgagaagccgaagaaaattcgaagacgaggagcagctacactgcggacggacttcgggcatggagggccagttccaggttggcaaggaggaggtcatccaagcatggtacatggacgacagtgaagaggaccagaggcttcctcatcatcgcgagcccaaagaattcatccctctcgacaaactttccgaactaggaatattaagctggcgcctaaatgctgatgattgggagaatgatgagaacctcaagaaaattcgtgaagccagggttactcttacatg

SEQ ID NO: 51965 - DNA, 265 bp, Zea mays
acaacatctacctcaacttcgacgccttccacggcgacaaggcccacggcggcgtccatgacggtaccgagatcgtgctctggaagtggtgcgagggcgacaaccagcgctggaagatcctcccttggtgaacgaacgaaagaaactactagctggtaccctaataataattctgctggctgcggcgatcccaaaataaaagaggccgggtgcgatgcatctcggacttctcgagtggtgtttgcgtcagacagccagccactgt

SEQ ID NO: 51966 - DNA, 282 bp, Zea mays
aattgttactgaaccacatcatatatggccatctctgaatgatgaacagtggttgaaggttgagtgtgcactaagggacctcatcctttctgattatgcaaagaaaaacaatgttaatacttctgcactgacacaatctgaaatgcgagatatcattcttggagctgaaattgctccagcatcacagcagagggcaacagattgctgaaattgagaaacagtcaagagagactactcagttaactgctgtaaccacaaggacgacgatgtgcacggagatga

SEQ ID NO: 51967 - DNA, 129 bp, Zea mays
cgctgcttcggctacatggtctccaagaagaagtacatctacaccatcgacgacgactgcttcgttgccaaggacccatctggcaaggatatcaatgctcttgagcagcacatcaagaacctcctcagc

SEQ ID NO: 51968 - DNA, 288 bp, Zea mays
ccccgaccgcgtgctgtacctgggcccactgtccggcgagccgccgagctacctgacgggcgagttcccgggcgactacggctgggacaccgcggggctgtcggcggacccggagacgttcgccaagaaccgggagctggaggtgatccactcccgctgggccatgctgggcgcgctcggctgcgtcttcccggagctgctcgcccgcaacggcgtcaagttcggcgaggccgtgtggttcaaggccggctcccagatcttcagctgaggttgactgactacctcggg

SEQ ID NO: 51969 - DNA, 287 bp, Zea mays
acatgaccaaccagggtgttcaagtgttcccagagataatggttcctcttgttggaacaccacaggaactggggcatcaagtgactcttatccgccaagttgctgagaaagtgttcgccaatgtgggcaagactatcgggtacaaagttggaacaatgattgagatccccagggcagctctggtggctgatgagatagcggacaggctgaattcttctccttcggaacgaacgacctgacgcagatgacctttgggtacagcagggatgatggggaaagttcattcc

SEQ ID NO: 51970 - DNA, 287 bp, Zea mays
acccatatccgctcccctacctcgcgagcatctcccgtctccttcgtctcgtctctgctcctcacctctccgcgagccatgggcgagatcaagatcggaatcaacggtttcggaaggatcggcaggctcgttgccagggtcgccctgcagagcgaggatgtcgagctcgtcgccgtcaacgaccccgtcatcaccacggattacatgacctacatgttcaagtacgacaccgtgcacggccaattgaagcacagcgacatcaccctcagaggactcaagacgcttct

SEQ ID NO: 51971 - DNA, 282 bp, Zea mays
ctacaccatggagatcaacgcgctggccagggaggcgctcatcaacgccgacggcatcatcgaggagtccttctggccgggcaagtacgccgtcgagcttagctccgtggcgtacggcgcgacgtggcagttcgacacggaggcgctgcccaacgacctcgtcaagcgcgggctggccgtgcgcggggaggacggggagctggagctcaccatcaaggactacccctacgcccacgacgggctcctggtctgggactccatcaagcagtggcgtccgagtac

SEQ ID NO: 51972 - DNA, 287 bp, Zea mays
cgaggacatgttctgccatgagttccacctcgttgatctcagggtcatggacaactgtctcaaggtcacccagggtgtcgaccatgtctgcaatctcgctgctgatatgggtggcatggggttcatccagtcaaatcactctgtgatcatgtacaacaacaccatgatcagttttaacatgctggaggctgcacgtatcaatggtgtgaagaggttcttctatgcctcgagtgcatgcatttaccctgagttcaagcagctcgacacaaatggagcttgaaggaatc

SEQ ID NO: 51973 - DNA, 286 bp, Zea mays
cctcattctcatccccgacccccgcaccgcagcgtaaaccctagtccccggcggcgaccttgcggcctccgctgcgctctgactggtgcgcgtttagacgaggagctgcggcggccaagaccaatcgaccatggctacccgtatccagtttgagaacaactgtgaaattggtgtgttctccaagctgacaaatgcttactgtctggtagcgattggagggtcagagaacttctacagtgcctttgaggctgagcttgcagatgccatccctgggtcaagactcgat

SEQ ID NO: 51974 - DNA, 285 bp, Zea mays
agagaaattgcacacttgatagattgagtgatattgtggagtgcactgttcctttagagaagcagattgctgaagatgaagaggaagaaattgaaatgttattggaaaattatcttcaacgatgtgaatcatgccatggtcaagcagagagacttctgaattctgcaagagagatggaagactcgatttctgtgaacttaagttctcgacgacttgaagtaagtagagtggagctgctgcttcaagtgggaacattttgcgatgcaataggacattaattgcagg

SEQ ID NO: 51975 - DNA, 284 bp, Zea mays
ctcgagcgaacttaagtatgctaatgatctttcgtcgggtgtgatattcggaaacgagcttgtgaactctcctgcaaatgtccttacccctgctgtgcttgcggaggaggcgtcaaagatcgcttctacttacagtgatgtgttcactgccacagtactagatgtagagaaatgcatagaactaaagatgggttcctacttgggagttgctgcagcttctgctaaccctcctcacttcatccatttgtgctacaaacccactgatgggaagtcaagagaaagct

SEQ ID NO: 51976 - DNA, 140 bp, Zea mays
ccgcgcgtccccggtctccgatcccctcgtcgatgcaaagatgcagatcttcgtcaagaccctcactggaaagactatcaccctctaggtggagtcgtctgagaccattgacaacgtcaaggccaagatccatgacaagg

SEQ ID NO: 51977 - DNA, 278 bp, Zea mays
gtttcagaaggtcacaagtgctttgaaagcatgggaagagaccacggcattgaacctagcatggatcactatgcctgcgtagttgatctgcttggaaggtctgggaggtttgcagaggctgagcaattcatcagggacatgcctgtccgtcctgattcaaccatctggggacctcttttagctgcttgccagcttcatgggaatgttgatcttgcagaaaaagctgccaaagaattgtcggccttggaaccggagagtgacatatgggagtatccttg

SEQ ID NO: 51978 - DNA, 275 bp, Zea mays
cgacgaactcgtcactggtgtgggccgtggctgtacgccgcagagtgaagcgagacgatacgacgatgcgcaagtgggcgctctcctccgcgctcctccttctcttcctcctcaccaccctccccgacccagctaagaagctacaggtgaatgcggaagagagcagcgatgacttagctaacccacccaaggtagaggagaagcttggtgctgtccctcatggcgtgtccaccgactctgaggttgcccatagggtaactgattctatcctagta

SEQ ID NO: 51979 - DNA, 274 bp, Zea mays
aggagaaattgcacacttgatagattgagtgatattgtggagtgcactgttcctttagagaagcagattgctgaagaggaagaggaagaaattgaaatgttattggaaaattatcttcaacgatgtgaatcatgccatggtcaagcagagagacttctgaattctgcaagagagatggaagactcgatttctgtgaacttaagttctcgacgacttgaagtaagtagagtggagctgctgcttcaagtgggaacattttgcgttgcaatagagc

SEQ ID NO: 51980 - DNA, 283 bp, Zea mays
accgaatctgctgtcgagcagttcaacggttatgcatttcaaggaagacaactgagggtgaactgcgggccaccaccacctagagatgaatccacaccaagagcaccaaggggtggtggtggcggcggcggcggcggctttgtcgattcagctaacaaggtctatgtggggaaccttgcgtggggtgttgacaactcgactctggagaacctgttcagtgagcaagggcaagtgcttgatgctaaggtcatctacgacagggatagcggaggtcaagggggtt

SEQ ID NO: 51981 - DNA, 211 bp, Zea mays
gtgagaaggtcgttcaggagaagaaggttcttgaggttcatgttgagaagggaatgcaacacagccagaagatcaccttccctggtgaagctgatgaagcgcctgataccgtcactggagacattgtattcgtcctccagcagaaggaccactccaagttcaaaagaaagggtgaagatctcttttatgagcacaccctgtctctgaccga

SEQ ID NO: 51982 - DNA, 294 bp, Zea mays
caagttgtttctcttctcttgctccgcaaaccagcgcaagccttccctgacagcggcggcgacatggtgctcgaggcgacgatgatctgcatagacaactcggagtggatgcggaacggcgactacgccccgtcgcggttccaggcgcaggccgatgccgtcaacctcatatgcggtgccaagacccagtcgaacccggagaacacagtaggcgtgatgacgatggccgggaagggcgtccgcgtgcttgtcactcccaccagcgacctcgggaagattctcgcctgtatgcac

SEQ ID NO: 51983 - DNA, 298 bp, Zea mays
ggcaggtttatgttcaggtggcactgccagcagaagtgatccgttgacttcagctatgggcaacctgtgctgctgtgttcaagtcgaccagtcgactgtggccatcagggagcagtttggcaagtttgacagcgtgcttgagccaggatgccactgcatgccttggttcgccggcaagcgtgtagctgggcaactcacactcaggctgcagcaactggatgtgcgctgtgagacaaaaacaaaggacaatgttttcgtgaatgtggtggcatctattcagtaccgcgctctggctgac

SEQ ID NO: 51984 - DNA, 298 bp, Zea mays
cgacgaactcgtcactggtgtgggccgtggctgtacgccgcagagtgaagcgagacgagacgacgatgcgcaagtgggcgctctcctccgcgctcctccttctcttcctcctcaccaccctccccgacccagctaagaagctacaggtgaatgcggaagagagcagcgatgacttagctaacccacccaaggtagaggagaagcttggtgctgtccctcatggcctgtccaccgactctgaggttgcccagagggaagctgagtctatctctaggaagactcttaggagctccgccga

SEQ ID NO: 51985 - DNA, 297 bp, Zea mays
caagtttcagatcctcgcatcgtccgcaccttatcctctcgacttcacagcacctgctctcagctcctccctatctcaatggcatccgcgaatgccatctccaccgcctcccccttccggcccctctctcagggcagggcgacgaggtcacagcggttcgtggtgcgtgcgaacgccaaagacattgcctttgaccagaaatccagggcagcgctgcaggccggcgtcgagaagctcgcaaacgccgtcggtgtcaccctcgggccacgagagaggaatgtggtgctcgatgagtac

SEQ ID NO: 51986 - DNA, 133 bp, Zea mays
gcctcaggggccatggcgaagacgagcagatcctggtcctcgatccgcccacagacctcagattcaaaggccccttcacagatgtagtcactacaaatcttaaattgcgaaatccatcggatagaaaagtgtg

SEQ ID NO: 51987 - DNA, 295 bp, Zea mays
cgtgcatgcaggcgaggtcccctacagagagggccagtccatcggcgtcatcgcggatggcgaggacaagaacggcaagccgcacaagctcaggctctactccatcgccagcagcgccctcggagatttcggcgactccaagacggtgtcgctgtgcgtgaagaggctggtctacaccaacgatcagggggaggtcgtcaaaggagtctgctcgaacttcctctgtgacttgaagccaggcgctgaggtgaagatcacagggccagtgggcaaggagatgctcatgcccaaagac

SEQ ID NO: 51988 - DNA, 241 bp, Zea mays
ctgcttcagtgcttggatctagataaaatggacaagaaaccttctaaaatactttgggatgttccttgggaagaagtactttcattggagctagcaaaagctgggtatcagaggccttcacatgtaatcatacatctgaagaattttaggaggtcagagaactttgtaaggcttattaagtgcaacattgacaacgaacgggaacctcaggctctttcactttgctgttcaattcggaaaa

SEQ ID NO: 51989 - DNA, 158 bp, Zea mays
agcaaaactgtttctgatgatgctgagagaagtatgatagttaaactcaagacagaatgtggataccagttcacttccaagctagagggcatgttcactgatatgaaaacctcccaggacaccatgcaagacttctatgccaagaagtctgaggaact

SEQ ID NO: 51990 - DNA, 292 bp, Zea mays
gtgctcataatcccaccggtgtagatcctacggaggaacaatggagagaaatatcccatcagttcaaggtgaaaaaacattttccattctttgacatggcataccaagggtttgccagtggtgatccagagagagatgccaaggcaatccgaattttccttgaagatggacaccaaattggatgtgctcagtcatacgcaaagaacatgggactttatggacagagagcaggatgcctgagtattctgtgtgaggatgagatgcaagcagttgctgtcaagagccaactgca

SEQ ID NO: 51991 - DNA, 230 bp, Zea mays
gggatgctcaggcattcgcgtaaacgatgcggagaagctcgtgacgatcggaggccatgtgctgcgcgaaggtgagtggctgtcgccgaatgggtcgactggtgaggtgatccttggaaagcagccgctttccccaccagcccttagtggcgatctgggaactttcatggcctgggtggatgatgttagaaagctcaaggtcctggctaacgccgatacccctgatgatg

SEQ ID NO: 51992 - DNA, 154 bp, Zea mays
cagtcggctgccgcagactggtagtagccggcgcgccgtcaccgtatcctcagatcagcggcgagcagaaaccacaccactctactgacgcccgacgagcagtgtaacattttccttcagccatgggtaaggagaagactcacatcaacattgt

SEQ ID NO: 51993 - DNA, 173 bp, Zea mays
cagtcggctgccgcagactggtagtagccggcgcgccgtcaccgtatcctcagatcagcggcgagcagaaaccacaccactctactgacgcccgacgagcagtgtaacattttccttcagccatgggtaaggagaagactcacatcaacattgtggtcattggccatgtcgac

SEQ ID NO: 51994 - DNA, 268 bp, Zea mays
caagaatgataagtcagaagaggagcagagcagcagctccgtgaagaaagatgagactaatgtgaagatggagtctgaggggggtgcagatgactctgctgaggagggggacctactggatgatgatgataatgaagatcggggggatgacctgctggagttgatcaaggatgatgaaaaagaggctgaggaaggagaggatgacagagacagcgccaatggcgaggatgactcttaagcacatagtggggtttagaaatcttatccc

SEQ ID NO: 51995 - DNA, 272 bp, Zea mays
ctgcaggtaagaaggtaaggaagagggcgaaatggtgaagcacaacaacgttatccccaacgggcacttcaagaagcactggcagaactatgtcaagacatggttcaaccagcccgcccgcaagcagaggcgccgcatcgctcgtcaaaagaaggctgtgaagatattcccacgcccaactgctggccctcttcgccccattgtgcaatgccagactctcaagtacaacatgaagtcgagggctgggagatgatttacccttgaggagctga

SEQ ID NO: 51996 - DNA, 285 bp, Zea mays
cgccaccaatccggggaggaatcaacctagcggtaagcggactaggcggcggcgaagatagcgccgtcgatgctctcgtcggactttgccaacctcgcttcggaggctgagcgcatggtccgcctaggcgccgactggctacatatggacatcatggatgggcacttcgttcctaacctgactattggggctccggtgatccagagcttgaggaaacataccaaagcatatttggactgccatcttatggtcacaaagccttcagattacgtagaaccatttgga

SEQ ID NO: 51997 - DNA, 252 bp, Zea mays
ggcagggaaagccggcggactcaaaggggttgccctcatcggcggcacgccaacagcacggtcgctggggtcattcacttcttcgaggacccctccaccaggtacaccgaggtgaggggcaaggtcacgggcttgactccgggaaggcatggattccacatccacgtcttcggcgacactaccaatggctgcaactcaaccggtccccattttaaccctcataataaaccccatggagctccatttgacgac

SEQ ID NO: 51998 - DNA, 145 bp, Zea mays
aagcgccttacgaaaggcggcaaaaagggagccaagaagaaagtggttgatccattttctaagaaagattggtatgatgtgaaagcacctgctatgttcaatataagaaatattggaaagacgctcgtcaccaggacccagggaa

SEQ ID NO: 51999 - DNA, 141 bp, Zea mays
cggagtaccaggtgtaccccatcttcaagtacttcgcgaactggtgccaggacgagaataggcacggcgacttcttctctgccctgctcaaggctcagccgcagttcctcaatgactggacggccaagctctggtcacggt

SEQ ID NO: 52000 - DNA, 278 bp, Zea mays
gcaagggtggaaacagagaagaggaactctttgatcaaagcttgggaagagaatgagaagacaaaagctgagaacaaggctgctaagaaagtatccgctattctttcatgggaaaacacaaagaaagcaaacatagaagctgaactgaagaagattgaggaacaactggaaaagaagaaggctgaatatgcagagaagatgaagaacaaggttgcaatgatacacaaggaagccgaagagaagcgagcgatggtggaggcaaaacgcggtgaggaggt

SEQ ID NO: 52001 - DNA, 281 bp, Zea mays
ctgatgcccatgttagcgtcgtcgtatgcgtttcacttcgccacggtgcagttagtggataagtactcggaaatgaagaaaaccaacgatgaggaccttattgctgacgtgcatgttctttcgtctgggttgaaagcctacataacttcatatacagccaagtctataagcgtatgtagagaagcctgtggtggccatggctatgctgctgtaaatcgttttggagctctgcgcaatgaccatgatatattccaaacgtttgagggggacaatactgttct

SEQ ID NO: 52002 - DNA, 285 bp, Zea mays
ggctcgagatggaccccaacgtcatggaggccaaggtcgtggtcagctcctgcggccacgacgggcccttcggcgccaccggcgtcaagaggctccaggacatcggcatgatcagcgccgtgccggggatgaaggcgctcgacatgaacaccgacgaggacgagatcgtgcgcctcacgcgcgaggtcgttcccggcatgatcgtcaccggaatggaggtcgccgagattgacggcgcccccaggatgggcccgacgtttggcgccatgatgatctccggccaga

SEQ ID NO: 52003 - DNA, 281 bp, Zea mays
ttttggctgttggggctgcgatattaggctgttttgctttttcaaaagatttggttatttttcttgaggcaccagtgactgctcagggtgttcggtttttgcagctctcgcctgcggaatttttctttacaacattaaaggtttcaggttattgtggccttttacttggaagtcctatcattttgtatgagatcattgcatttgttatcccaggtttaacaagggacgagcggaaatttcttgggcctattgtgttgggttcttctgttctattctatcta

SEQ ID NO: 52004 - DNA, 282 bp, Zea mays
gtcttttcggtcctcaggcttcatccctgtgcaagtgcagggataattgcttctgatctcccgaggctgcataacctgattcagaggcagagcaagggggcgtgagggagatgagggagatcatcagcatccatatcgggcaggcaggcatccaggtagggaattcttgctgggagctctactgcctcgagcacggtatccagcctgacggcctcatgcccagtgacacctctgtcgggatcgcgagggatgcgttcaacacgttcttcagtgaaacgggcg

SEQ ID NO: 52005 - DNA, 129 bp, Zea mays
gttgagttcatggagaaggtagccaagactgttgactcggaggagctcactgtggaggagcgatacctcttgtctgttgcatacaagagcgtcattggagcccgccgagcctcatggcgcatcatctcc

SEQ ID NO: 52006 - DNA, 220 bp, Zea mays
ggccggcttgcctacctgctcccatccttcccgagggaccgagaaagataagaaaggcggtggtcaacttgtgtcctgaggtgcccgtagaagcccaaggacaagacacaaggagaagagtagatctacatctactccaccgatgagcgcgtctcggttcatcaagtgcgtcaccgtgggggacggtgccgtcggaaagacctgcatgctcatctcatac

SEQ ID NO: 52007 - DNA, 217 bp, Zea mays
cggagcagccattgaaagggcaattcttttttgcttatagaattagaattacgaatagttctcagcgccctgttcagcttctcaaaaggcactggattgttacagatggaaatggaaggacagaaaacatttggggagttggagtagtgggagaacaacctgtcatattcccgaagactggttttgagtactcttctgcatgcccattgagcactcc

SEQ ID NO: 52008 - DNA, 216 bp, Zea mays
ggcaaaggagtttcttaatgagcttcttgcaatctctgatgtaacacatgagaatcttgtcaaactctatggctgctgtgtagaaggaaaccacaggatccttgtctacaattatcttgaaaataatagtcttgcacatacccttctagattcgcgacacagcaacatccagttcaactggagaactcgggtaaatatctgcatcggtgttgccca

SEQ ID NO: 52009 - DNA, 231 bp, Zea mays
gaacaagatagctctcaagttcgacactgtgttttggcccgacgttgaagtgataggtagggtggccccgacgtcaaacgcctgtggctactttctcaaccttaacaaagccacaggaaacccggtcctggtgtgcatggtggccggaaggttcgcgtacgagatcgagaagctgtcggacgaagagtccgtgaacttcgtcatgtcccaactcaggaacatgctgccgca

SEQ ID NO: 52010 - DNA, 262 bp, Zea mays
cgaggagtccttctggccgggcaagtacgccgtcgagcttagctccgtggcgtacggcgcgacgtggcagttcgacacggaggcgctgcccaacgacctcgtcaagcgcgggctggccgtgcgcggggaggacggggagctggagctcaccatcaaggactacccctacgcccacgacgggctcctggtctgggactccatcaagcagtgggcgtccgagtacgtcaacgtctactacaagtccgacgaggccgtggccgcc

SEQ ID NO: 52011 - DNA, 276 bp, Zea mays
ttttaattcccccgccgccgcccctcgccacgctccgccagccgctgccactcgccacgttccaccagccggcgccccttttccttctcactccgctggcgccggcgccgccttatccatggcgtcggagaagaagcaatccaacccgatgagggagatcaaggtgcagaagctggtgctcaacatctccgtcggagagagtggggatcgcctcacccgcgacgccaaggtcctggagcaactgagtggccagtcaccagtgttctctaaggctag

SEQ ID NO: 52012 - DNA, 264 bp, Zea mays
aatcatggcgatatgctcagcgttcttctggactggagagaatcccttcggcatcccgatgagcgtgtagagtatgagttctggacaaacagtaatgatgaatgtggtcctaaatgtgatatgcaaatggacttcgtgaggagctttagaggaactgcacaaattcttgagaaaaagggttacactcagtttactcctcattatatcacatggtattgtccagaagcttttgttgatagccagcaatgcaaatcacagtgcatc

SEQ ID NO: 52013 - DNA, 204 bp, Zea mays
gctgaagctgaacggtggccatgtccaccggacgcacagaggaggccgccgggagcgcggagacggcgtgcgtgacgggcgccggcgggtacatcgcctcgtggctcgtcaagctcctcctctcccgtggctacaccgtccacggcaccgtccgcgacctcagtgacaataaaaccgctcatctgaagcggttagagattgctt

SEQ ID NO: 52014 - DNA, 163 bp, Zea mays
tgggaattcctgtaggcaaacttgctctatacactgctctaggaggaggggacccatcagtttgcttgcctatcacaattgatgttggtacaaataacgagaaactgcttaatgatgagttctacattggactccggcaaaaacgtgcgactggcgaggatta

SEQ ID NO: 52015 - DNA, 182 bp, Zea mays
gatatttctgaggatggatttgtgagccttcttacttcagatggcaagggtaaggatgatcttagactcccaactgatgagactcttgtggcccagattaaggaagggttcgaaagcgggaaggatcttgttgtgactgtccagtctgcgatgggggaggagcagatctgcgcgttgaagga

SEQ ID NO: 52016 - DNA, 202 bp, Zea mays
gtacgcacttcgtgtttggttagacccagaaaaaatggcggctcaaaacctttcggcaacacaggtgatgtcagcattatcggcgaataacgttcaaacagcagcaggtaatgataatggctattttgtgacctataaaaacaaagtagaaactacgacaaaatcggttgaagaattaagcaacttaattgtgacatcaaac

SEQ ID NO: 52017 - DNA, 260 bp, Zea mays
tgaaaatgtctgtacagccaacggtttcccttgggggctttgaaataacaccaacagtggtcttaaggttgaagtgtggttcagggccagtgcatattagtggacagcacttagtagctgtggaggaagatgcagtgtcagaagatgaagaggaggaggatgtgaaactcttaagtatatctggaaagcggtctgcccctggaggtggtagcaaggttccacagaaaaaagtactaattgctgctgatgaagatgatgac

SEQ ID NO: 52018 - DNA, 117 bp, Zea mays
cggctcgagctggtgtagctagaatgatgaagctggtatctccaagaatgggcagacgcgagagcatgcccttctggcttacacactgggtgtgaaagaactaattgtcggtgttaa

SEQ ID NO: 52019 - DNA, 258 bp, Zea mays
ggcggaggtgcaggtcctggtgcttgatggtcgaggccatctcctgggccgcctggcggccatcgtggctaaacaggtactgctgggccggaaggtggtggtcgtacgctgtgaaggcatcaacatttctggcaatttctacagaaacaagttgaagtacctggctttcctccgcaagcggatgaacaccaacccttcccgaggcccctacgacttccgggcccccagccgcatcttctggcggaccgtgcgaggtat

SEQ ID NO: 52020 - DNA, 262 bp, Zea mays
agatggagaacccatacgaaaactaccctataatcgttcagatgacccatacacagtcgcggacaagtggctcctgaaagaaaatctgcctttgacatatcgccaacaggttgtagaatttatactgcagaattctggccagaacaactttgttccagatccatcttttcgggatccctatactggggccaatgcatatgtgcctgggcaaccatcatcatcatccaatggtaatactccggaaccaattttcaagcacata

SEQ ID NO: 52021 - DNA, 259 bp, Zea mays
gacttgatctccttgtctgaacaagagcttgtcgactgtgacacttcgtacaatcaggggtgcaatggaggtctgatggactatgcatttgagttcatcatcaacaatggcggaatcgacaccgagaaggattacccttacaagggcacggacggacggtgtgatgtcaacaggaaaaacgcgaaggttgtcactattgacagctacgaagatgtaccagcgaacgatgagaagagtctgcagaaggcagttgcaaacc

SEQ ID NO: 52022 - DNA, 143 bp, Zea mays
ggcagctgagccggctgcacccggtgtaccgcctgctgcacccggagttccgctacaccatggagatcaacgcgctggccagggaggcgctcatcaacgccgacggcatcatcgaggagtccttctggccgggcaagtacgcc

SEQ ID NO: 52023 - DNA, 259 bp, Zea mays
ctcggcagtcggcacgcaggctagcagcacagcagcagccagaggggtcccctctcctcgctacgcttcgcttcctcggcgccgattcctcctcctcctcctccaccctcgtccgtcccgttccggcgcgcgagctcgcccgagatggcgaacgcgagatcgggtgtcgctgtgaacgatgagtgcatgctgaagtttggcgagctgcagtcgaagaggctgcaccgcttcataactttcaagatggacgacaagttca

SEQ ID NO: 52024 - DNA, 267 bp, Zea mays
gacgagtccgtgctctggaccgagagccgcgacgtcggcaacggcttccgctgcgtccgcatggtcaacaacatctacctcaacttcgacgccttccacggcgacaaggcccacggcggcgtccatgacggtaccgagatcgtgctctggaagtggtgcgagggcgacaaccagcgctggaagatcctcccttggtgaacgaacgaaagaaactactagctggtaccctaataataattctgctggctgcggcgatcccaaaataaa

SEQ ID NO: 52025 - DNA, 141 bp, Zea mays
gtcgggaggtgcctgctcaacaccaggatcaccggcgaccaagcgcccggggagacgtggcacatggtcttcagcacagaaggcgaggtcccctacagagagggccagtccatcggcgtcatcgcggatggcgaggacaag

SEQ ID NO: 52026 - DNA, 198 bp, Zea mays
ggcaagaagatttctgcaacctccatctacttccagagcctgccctataaggtgagctccgacaccgggtacgtcgactacgataagctggaggaaaaggccatggatttccgccccaagcttatcatctgtggcggtagtgcatgccctcgggagtgggattacgccaggttcagggccatcgcagacaagtgcggg

SEQ ID NO: 52027 - DNA, 165 bp, Zea mays
gttgattttgataaaattgctagaaggacccctggtttcaccggtgctgacctccaaaacctcatgaatgaggctgccatccttgctgctcgccgtgatcttaaggaaattagcaaggatgagatctctgatgctcttgagagaatcattgctggccctgagaag

SEQ ID NO: 52028 - DNA, 277 bp, Zea mays
agcagaccgcgatttcgatggccagggcgccctcgattccgcgggaggcgtcgttggcgcggtctaccgccgagcggatgagttgggcgttcaccggtgtggtgaggatggtgcacctgatcgctcgggcagcgaagagcgcggccatgtcggcgatcgggatgaggtgccccggcgcgaggaacgggaagaagaggatgtgcagcggctcatctttgatggccatggctggctgcgcgacggcggctgcgcactgcactcttgcgtattttataag

SEQ ID NO: 52029 - DNA, 277 bp, Zea mays
tgtggatcactggtattattaagaggccaaagatttctggagcacagcttgtagccatcctacctctggctattgttcatactatgggcaatctcttcaccaacatgagccttgggaaagttgcagtgtcatttacgcacaccatcaaggctatggagcctttcttttctgttattccttctgcaattttccttggcgagctacctactatttgggtagtatcctctcttcttccaattgttggtggtgttgcattggcatctcttactgaggcatc

SEQ ID NO: 52030 - DNA, 274 bp, Zea mays
aacgaacggcgatcatttctcccaatatataaagatgcaaaattaagagtcacaagtaactctgaaagaaaatacaaaattaaccaaggtactacaaaggtggctttgatgaggtctcggaatgacacttcgttccttttcagcgtttgccaccgccgccacccaacttggggcctttggaacccttctgaacagcacccttcgtctgcgccttctgggacttggacacctcagccttcttcgccttcttctcatccttggtcttcttgatgcg

SEQ ID NO: 52031 - DNA, 271 bp, Zea mays
ctcgcgctcagctgcccgcctcctcagccagccatgctggagcatctgagctcgctgcccacgcagatggattacaagggccagaagctagctgaacagatgtttcagggaattattcttttttctgcaatagttggatttatctacgggtacgtggctgaactgttcgggtggactgtctatatagttatggccggatttgctttttcatgtttgctgacacttcctccatggcccatctatcgccggcatcctctcaagtggttacctg

SEQ ID NO: 52032 - DNA, 278 bp, Zea mays
caactgccaaggtgccaagcaagtgcagataccttccctgcctcacaaacaacgccatcagggtcttcaaccagggcaggttctcttctttcattcagctatgggcaacctgtgctgctgtgttcaagttgaccagtcgactgtggccatcagggagcagtttggcaagtttgacagcgtgcttgagccaggatgccactgcatgccttggttcgccggcaagcgtgtagctgggcatctcacactcaggctgcagcaactggatgtgcgctgtgaga

SEQ ID NO: 52033 - DNA, 271 bp, Zea mays
acaaagagaagtatgagaagtccagaaaattgaagggtcatatacaaagaattcgtgagaattatacaaaagatttcaaaaacaaagatgtgacgaggaggcaaatagctgtggcaacataccttatcgataaactagcccttagggctggcaatgaaaaggacgacgatgaagctgatactgttggttgctgtacgcgaaggttgataatgttacatgtatgctccaaatcagattcagtttgactttctgggtaaaggatcaataagat

SEQ ID NO: 52034 - DNA, 265 bp, Zea mays
agagactttgcacaagcgtgtcattggccaagatgaggctgtggtagcaattagtcgctccatccgccgtgctcgtgtgggtctcaagaaccccaacaggccaattgcaagctttatttttgctggtcccaccggcgttgggaagtctgagcttgcaaaggctcttgcagcctattactttggctctgaggaggctatgatccggcttgatatgagtgaattcatggagagacacacggtatccaagctgattggttcacctcca

SEQ ID NO: 52035 - DNA, 224 bp, Zea mays
ctcgagccgattcggctcgagggcgatgtcgcgcttcgggcgctacgggcagccgcagaaacgcgaatctttctcgctcctcgtcctcaacgtctccttccgcactacggctgacgacctcttcccgctcttcgatcgctacggcaaggtcttagacatctacatcccgcgcgaccacaggactggggatccgcgaaggttcgcgttcgtgaggtacaattacg

SEQ ID NO: 52036 - DNA, 264 bp, Zea mays
gtggtcgtccctcagccgcgtcgcaccgcatcgcattctacgattcgaagctctctctgatcgcagccatggcgaagaattacccaaccgtgagcgccgagtacagcgaggccgtcgagaaggccaggcgcaagctccgcgccctcatcgccgagaagagctgcgcgcccctcatgctccgcctcgcgtggcactccgcggggacgttcgacgtgtcgtcgaggaccggcggtcccttcggtactatgaagtgcccggcggaac

SEQ ID NO: 52037 - DNA, 265 bp, Zea mays
acggcgtcaagttcggcgaggccgtctggttcaaggccggctcccagatcttcagcgagggcgggctggactaccttggcaacgccagcctgatccacgcgcagagcatcctcgccatctgggcctgccaggtcgtgctcatgggcgccgtcgagggctaccgtattgccggcgggccgctcggcgaggtcgtcgacccgctgtaccctggcggcacttcgaccccctcggcctggccgacgaccccgaggccttcgccgagctc

SEQ ID NO: 52038 - DNA, 219 bp, Zea mays
acgagaagcaaaatgcttttgtgaaattctcagagaagcacagaaatatgctgaatgcattcatccatcaaaaccctggattactggagaagtcattctcgctgatgttaaaaattcctcgcctgattgattttgacaacaaacgtgcatatttccggtctaaaatcaagcatcagtatgatcatcatcatcataatcctgttagatattctgtgcgtc

SEQ ID NO: 52039 - DNA, 263 bp, Zea mays
attggagttgaacaccttctaagggatgtcaaggacacaacaataagcacacttgctacagaggtcactagcaagcttgcagccttaaagggactcgatgcaaggcttagggagatccgaagctatttggatcttgtaattgacgggaagctctcactgaatcacgaaattttgtaccatttgcaggatgtctttaatctccttccaaatttgaacgtaaatgagctaattaaagcttttgcagtgaaaacaaacgacatgat

SEQ ID NO: 52040 - DNA, 221 bp, Zea mays
ggttgtctgagcttcttggcattcaggtgcaaaaagccgacgatgttattggccctgaagttgagaagctggtggcggccttgcccaacggtggggttctgctgcttgagaacgtaagattctacaaggaagaggagaagaatgacccagagtttgcacagaagcttgcctccctagcagatctttatgttaacgatgcatttggaacagcccacagggcg

SEQ ID NO: 52041 - DNA, 263 bp, Zea mays
acgagaagcaaaatgcttttgtgaaattctcagagaagcacagaagattgctgaatgcattcatccatcaaaaccctggattactggagaagtcattctcgctgatgttaaaaattcctcaactgattgattttgacaacaaacgtgcatatttccggtctaaaatcaagcatcagtatgatcatcatcatcataatcctgttagaatttctgtgcgtcgctcatatattcttgaggactcctacaatcagcttaggatgcgc

SEQ ID NO: 52042 - DNA, 247 bp, Zea mays
gatcgctcatcaatcgccagaggagttgttgatcgaggtgagtgaggttgaaaagcacaccatcgtcatggacggcggatactacggcggtcgcgatcagcgctacagcggcgggtactacggcggcggtggcatcgcaacgccggggtacgctccggcggtcccgtacgggatgtcgcaggtgaacatcgagggcaaccgggtgcgggcgggcgctgccgccgcaaccgaccgtgaaggtgtactg

SEQ ID NO: 52043 - DNA, 264 bp, Zea mays
ctcgagccgctatatggagctccaaaagacctggatgatttttgtgaaaaggcacagctggtgaactatgttcagtacagagcacttttggaaggatggacttccttcatgtggacaaagtttacaggtgtcctaatttggaaaacgcagaatccttggactggactaaggggccaattctatgatcacctccaagaccaaacggctgggttttatggttgccgttgtgctgctcaacctattcatgtccaactgaatttggcc

SEQ ID NO: 52044 - DNA, 259 bp, Zea mays
gcgcgggctggccgtgcgcggggaggacggggagctggagctcaccatcaaggactacccctacgcccacgacgggctcctggtctgggactccatcaggcagtgggcgtccgagtacgtcaacgtctactacaagtccgacgaggttgtggctgccgaccccgagctgagggcgttctaggacgaggtgcgcaacgtggggcacggcgacaagaaggacgagccgtggtggcccgtgctggacacccgcgacagcctg

SEQ ID NO: 52045 - DNA, 263 bp, Zea mays
ctcggcagtcggcacgcaggctagcagcacagcagcagccagagccatcccctctcctcgctacgcttcgcttcctcggcgccgattcctcctcctcctcctccaccctcgtccgtcccgttccggcgcgcgagctcgcccgagatggcgaacgcgagatcgggtgtcgctgtgaacgatgagtgcatgctgaagtttggcgagctgcagtcgaagaggctgcaccgcttcataactttcaagatggacgacaagttcaagga

SEQ ID NO: 52046 - DNA, 215 bp, Zea mays
cctctgcccggtatttacgcaactcaagttacaaaagaaatgctggacattaggtcaggcgaacacttgctgtcaacttcactctgcagctgcaccacaccccggacgagagcgtggacgtgaacaacccacgggacgggctactccggatggtgaaaggcctgtctccgaaggtgactacgcttgtggagcaggagtcgcacaccaacacgacc

SEQ ID NO: 52047 - DNA, 256 bp, Zea mays
gggaccctggcagagcagacttatttgttccttggtgctggggaggctggaactggtattgcagaacttattgctcttgagatttcgaaacagacgaatgctccaattgaagagtgccgcaagaaggtttggctggtggactcaaagggtttgattgttgactctcgtaaaggctcccttcagccattcaagaaaccttgggcgcatgagcacgagcccttgaaaaccttgtatgatgctgttcagtccatcaaac

SEQ ID NO: 52048 - DNA, 126 bp, Zea mays
gtcggctactccgactccggcaaggacgccggccgcctgtccgcggcgtggcagctgtacatggcgcaggaggagatagcgcaggtggccaagcgctacggcgtcaagctcaccttcttccacggc

SEQ ID NO: 52049 - DNA, 260 bp, Zea mays
gtcgtccatctacagcagctactgcacctggtaaaggttttggtatgaaattaggcaagacacagaagacaaatcaattccttgagtctttgaaagctgaaggagaagtcattttggaggatgtacaaccaagtgcagtttctacaagatcatctgctcttccaccaagtgaccctgtcacagtgaacatagaagagaagctcaatgttgttgttaaaagagatggtggtattagtaactttgatgttcaaggaacactt

SEQ ID NO: 52050 - DNA, 272 bp, Zea mays
ataaccccgagagagctatagactacctgtattctggaattcctgagaatgtggaggctcagcctgttgcccgagcacctgctgctggccaacaaacaaatcagcaggccgcatcacccgctcagccagcagttgcattgccagtgcagccatcacctgcctctgcagggcctaatgcaaatcctttgaacctttttcctcagggtgttccaagtggtgggtccaacccaggtgttgttccaggtgcaggatctggtgctcttgatgccttg

SEQ ID NO: 52051 - DNA, 272 bp, Zea mays
aaaagacagcctttgaaacacagggactatgaagttgatcttgattctcgtcttggcaagactcaggtggtgaccccgattgcaccattgaatcagcaggctggatactactgttctgtatgtgaatgtgttgtcaaagattcagccaactatttggatcatataaatggcaagaagcatcagagagcactgggcatgtctatgcgtgttgaaagggcatcacttgaacaggtccagaaaaggtttgaggcacttaagaaaaggaaggatcc

SEQ ID NO: 52052 - DNA, 270 bp, Zea mays
acaaaagctgctttagtgtcagttggaattattagggaccctataatgtgcaatggtaaaaatggtggaaagcttactggtaggattattgattctgatatgcatgatgttgcccgtttccttaatcgtattctgggattgtttccagacattcagaatagattatttgaccttttcacaagcatacttgatatagtcattcagaatgcacgaattgaaggacaacttgattctggtattgttgatatcaaagctaaaagtgtcgaaatg

SEQ ID NO: 52053 - DNA, 272 bp, Zea mays
gagaaagctcacagtggagatgttcattgtgttgaatggaatccccttgatgttaactatatcttaactggttctgccgataactctgtccgaatgtgggatcgtcgcaatctgggttcgggaggagctggttctccaattcacaaatttgagggccataaagctgctgttctttgtgttcagtggtcacctgacagagcatctgtttttggaagttctgcagaagatggtttcttaaatgtttgggaccatgagaaggttgggaagaagaa

SEQ ID NO: 52054 - DNA, 267 bp, Zea mays
cgctgaatgggtcgactggtgaggtgatccttggaaagcagccgctttccccaccagcccttagtggcgatctgggaactttcatggcctgggtggatgatgttagaaagctcaaggtcctggctaacgccgatacacctgatgatgcattgactgcgcgaaacaatggggcacaaggaattggattatgccggacagagcacatgttctttgcttcagacgagaggattaaggctgtcaggcagatgattatggctcccacgcttg

SEQ ID NO: 52055 - DNA, 268 bp, Zea mays
aattgagaaggcacaccctgatgtcttcaacatgatgcttcagattttggaagatgggagattgactgacagcaagggaaggacggtggacttcaagaacacactcctgatcaagacctcaaatgtagggagcagtgtcatcgagaagggtggaaggaagatcggatttgaccttgactctgatgagaaggacagtagctacagcaggatcaagagcctggtcatcgaggagatgaagcagtatttccgacctgagttcctcaaccgt

SEQ ID NO: 52056 - DNA, 269 bp, Zea mays
cacatacatagtttcttctactacacgacgacaaacatggggaagcctgcgaagatcggagagtggggtggatacgccggcgatcgtcgggatctgagggctactccggaccggctgatcgaggtgaaggtcacggcggacaacagcagctgcatccgctccatctccttcatctacatcggagccgatggcaaaccgtacgaggaggggccatggggtttcggccatgctggcacggagtacaagattgatctgtgcaggttcgacga

SEQ ID NO: 52057 - DNA, 268 bp, Zea mays
ctggaacctcatcagacaataagttcacttctattgctcttagcaacttctttgctggtgctgctgccggatgtacaaccctggtcctcatctatccgctcgacattgctcacactcgtcttgcagctgatatcgggcgtacagacacccgccagttcagaggcatccgccacttcatccagaccatctacaagaaaaacggcatcagaggcatatacaggggattaccagcatcgctccacgggatggtcgttcaccggggcctgta

SEQ ID NO: 52058 - DNA, 267 bp, Zea mays
atgctccctctgtagtatccactgctttacaggtgcccgaagagattgtggttccagcttctgttgacccaacccaggaaaatgctatagctgcattgcagattctaaaggtgatcgaatcctatgctcaagctggtgaattgtgtacccggcgtgagtatgctcgatggttggtagctgcgagcaattgcctttcaaggaacactttctcaaaagtgtatccagcaatgtatattgataatgtcactgaacttgcatttgacgatg

SEQ ID NO: 52059 - DNA, 269 bp, Zea mays
gtgacagcgtttaacaaagcttagagaaacctccaggagactgctatcatggcagagaagcccaagctccactacttcaatgcacggggcagaatggagtccacccggtggctcctggctgcagatggagtagagtttgaagagaaatttataaaatctgcagaagatttggacaagttaagaaatgatggatatttgatgttccagcaagtgccaatggttgagattgatgggatgaagctggtgcagaccagtgccattctcaacta

SEQ ID NO: 52060 - DNA, 271 bp, Zea mays
agtgacagcatttaacaaagattagagaaacctccaggagactgctaccatggcagagaagcccaagctccactactccaatatacggggcagaatggagtccatccggtggctcctggctgcagctggagtagagtttgaagagaaatttataaaatctgcagaagatttggacaagttaagaaatgatggatatttgatgttccagcaagtgccaatggttgagattgatgggatgaagctggtgcagaccagagccattctcaactac

SEQ ID NO: 52061 - DNA, 269 bp, Zea mays
gtcccggagcccacggtggtcatggcagccagagcgctctgcatgctggggctggtcctggccttgctgtcatccagctctgctgagcgagtacgtgggcctgtctgcaaaccagtgtgccgtgccagccaacgacagggtggactgcggctacccccatgtcacccccaacgactgcaacaaccggggctgctgctttgactccaggatccctggagtgcctaggtgtatcaagccccggcaggaagcagaatgcaccttctgatgca

SEQ ID NO: 52062 - DNA, 271 bp, Zea mays
agcggttctacgtccgagtcgtcgcatcaggtcccctcgattcgccggcgggccaccaaccaagctcatacatctgaattgactagtcaaactcagtgatctctttggggactaatcaaactcaagaactaagtttcatgtctgatctcgacgtccagcttccatctgcttttgatccgtttgcagaggcaaatgctgaggactccagtgctggtgctggatcaaaggactatgtgcacgtgcgtattcagcagcgcaacggaaggaagag

SEQ ID NO: 52063 - DNA, 266 bp, Zea mays
gttcaccccacttgctctctttctccccagtagcaacgaccgcgcgtcctccgccgccgcactaaaccctactccatgtacccaggtctgcgtcgggcccttgccggcgatgagaacccgtcagttccaaagatggctcgtcgtggattgatggaacaggacttaagcaaactggatgtgacgaagcttcaccccctgtcacctgaagttatctcacgccaagcaacaatcaatatgggtaccattggccatgtggctcatggaaa

SEQ ID NO: 52064 - DNA, 266 bp, Zea mays
cagaggtgtctaccaccgagacctcaagccagagaatgtccttgttgatcggaagggcaccatcaagatctctgacttcggcctcagcgctctacctcaacatctcgggagtgacggacttctgcacacaacatgtggcagccccaactacatagctcctgaggttctgcaaaacagaggctatgacggctccttgtcagatctctggtcgtgtggggtgatcctctacgtgatgcttgttggctgccttcccttcgacgacagga

SEQ ID NO: 52065 - DNA, 267 bp, Zea mays
aagagatctcattctccgatccgcccaggccaccatggcggaggatgctacgagcagccacccgtcacgctacgtcaagctcaccaaggaccaggacgcccccgccgaggaaatccgccccggcgagctcaaccagccagttcacgtcccgcagctcgaaggccggaggtgtagcgagtgcggtcaggtcctgcccgagagctacgagccgcccgccgacgagccctggaccaccgggatcttcggatgcaccgatgacccagagac

SEQ ID NO: 52066 - DNA, 264 bp, Zea mays
cacgatattgataagaagaaaaagaggaggaagagcaggagtaatcccatattttttgctgaaccaatgcgagcatcaaattcttttgttggtacagaggagtacattgcaccggagattattaccggagctggccatacgagtgctgtagattggtgggcgctaggaattcttctatatgagatgttatatggttatacacccttcagagggaaaacaagacaaaggacatttgctaatattctgcacaaggatatcagattt

SEQ ID NO: 52067 - DNA, 266 bp, Zea mays
accggccgccgcgcgagcttggtgggttagtgtctcttcttcgcggagacctgtgagaggagccatcatcatggccgccgttgagactgttgtcctcaaggttgctatgtcatgcgagggttgcgcgggggcggtcagaagagtgctctccaagatggaaggagttgaaaccttcgacatagacctcaaggagcagaaggtgacagtcaaaggcaatgtcaagcctgaggacgtcttccagacggtttccaagtcggggaagagga

SEQ ID NO: 52068 - DNA, 259 bp, Zea mays
cctgaaatggcaccagcagagagatcctggcagtaagaaagattattcccagtatgaggaaaacatcacacacctgcaggagcagatagtggatgacaagatgaccaatgctcagattattcttctcattgacaatgccaggatggcagtggatgacttcaacctcaagtatgaaaatgaacactcctttaagaaagacttggaaattgaagtcgagggcctccgaaggaccttagacaacctgaccattgtcacaaca

SEQ ID NO: 52069 - DNA, 266 bp, Zea mays
atgctgtccgcctcaacggtccaaccctccggttcgacgtaggcaccggcgggaaatgaaggtctccgtgaagacgctcaagggatccagcttccatatcgaagtggatcctaccgacaaggttgccgacgtgaaaaaggttatagagagtatacaagagcaggcttcctatcctgctgaccaacaagtgcttatacaccaggggaaggtgctcaaggacgacacaacattggaggaaaaccaagtagttgaaaataattttcttg

SEQ ID NO: 52070 - DNA, 265 bp, Zea mays
caatccccaaggaccttaaccggtgatggggaagatcccatttcaagtggacggtatctgatgcaggagctgatgggcacaggactatcagcgcagagtgtgccggaatggaagatgacatatgggaaggccggaacatatgggcagaagtcgaggctgtcgatccaggagcagagacaaagccttccaatattcaggctgaaaaaggagctgatcagtgctgttaatgacaaccaagttttggtggttatcggtgagactggct

SEQ ID NO: 52071 - DNA, 182 bp, Zea mays
gttctgagcagttgtatcagtcagtgcattcacagattttcacattgccaaaggatacactactttatcctgctcatgactataaaggtttcacggtaagtactgttgaagaggaggctgcctataatgctcgactcacaaaagataaggaaactttcaagacgatcatgaataacttgaat

SEQ ID NO: 52072 - DNA, 265 bp, Zea mays
cggagatgcgcgagggccacaactacgtgccccgcgacgagcagttctcggaggtgaagcagctcaagtacggggccaccacgctgcgctccggcctgcacgcgctgctgccggcgctccgcccgctgctcatcaacaagaaggatctgcgcttcccgcacttccccgccatcgacgacctcttcagcgacggcatcccgctgccggcgcagaccgggttcgacgccatccgcaccgtcgtcccgcgcatggtcaagctggtgga

SEQ ID NO: 52073 - DNA, 261 bp, Zea mays
gtcgttcgagaggcgtcgttccgcgaacacaattataaggagggaggacgtgcggtcgggcgacttcttggcgctctccaagatccggggccggtggggcgggttccagacgctggagaagtgggtcaccggcgccttcgccggccacaccgcggttgtcctcaaagatggtgacgccaacctctgggtcgcagaatcaggctacgaaaataacaagggtgacgagatcattagcatgactccgtgggacgagtggtgggg

SEQ ID NO: 52074 - DNA, 261 bp, Zea mays
atcgtcgtcgtcgacgagccgcgcgggccggcaacgtgtggcgcacgtcttccacccggggagcaacctggccaccaaaggcatgggcgccaacctcttcgaccggccgcagcccaactcccccaccgtctacgactggctctacagcgacgagaccaggagcaaccaccgctagatcgggcgagatggatggacagtgaagaggccatgtttgctggtccttgtggttatctaaaacgcacgcatgctctattatagcta

SEQ ID NO: 52075 - DNA, 263 bp, Zea mays
atcgtacaaagcagactgcccgcaaatcgaccggtagtaaagcacccaggaagcaactggctacaaaagccgctatcaagagtgcgccctctactggaggggtgaagaaacctcatcgttacaggcctggtactgtggcgctccgtgaaattagacgttatcagaagtccagtgtgaatctgattcgcaaacttcccttccagcgtctggtgcgagaaattgctcaggactttaaaacagatctgcgcttccagagcgcagta

SEQ ID NO: 52076 - DNA, 260 bp, Zea mays
ccggtcccgtctgcgtgcgtgcgatcgacgcagaggcgcgggcgctcgcaacaagccgatccgatggccttcatgcgctcccgctcaaatgcatcttctggcaagggagttgctcctaacattagggagacgtttgtcgagctccaaatgaagaagacattccgatatgttatcttcaaaatcgaagaaaagcaaaagcaggtagttgtggagaagacaggggccactactgaaagctatgatgattttctggcctctct

SEQ ID NO: 52077 - DNA, 261 bp, Zea mays
ccgcgccgctggcgccacagtctacagtcccgagctcctcgccgcccgctacggctcccgcgccttcaaggtggcgctccgggcaggggaggtgctgtccaagttggcgtcgttcggggtgaaggtcctactggacgagcggagaggggagtcgtcatcggagaggaggcgcgccagggcggtggagttgcgcaccatcttcactaggctcggcccaaccttcgtcaaaattggacagggcctgtccacgcgccccgacct

SEQ ID NO: 52078 - DNA, 261 bp, Zea mays
agcgaggcaaaagcgcaaacgcgaccacagacagagcgcgcttcaaggcctttttttttgagataacaaggaggagaggaggagatggcggtcacgatcacctgggtgaaggcgaggcatatcttcgacagccgcggcaaccccaccgtcgaggtggacgtgggcctcagcgacggcagctacgcgaggggggccgtacccagcggcgcatccactggaatatatgaggccttggagttgagggatagaggatctgattat

SEQ ID NO: 52079 - DNA, 260 bp, Zea mays
aggtgaagaggatgctcagcttactcagctcttgcgccttggagctggagcatgtgctggtatcatagctatgtctgctacttacccgatggatatggttaggggaaggatcactgttcagacagacaaatctccctaccagtaccgtggtatgtttcatgcactgggtacagtctaccgtgaagaaggctttcgtgctctatacaaagggtggcttccatctgtaatcggagttgttccatatgttggtctcaactttg

SEQ ID NO: 52080 - DNA, 262 bp, Zea mays
gcggcggctgattttttcgacctgggcagactcaagaaggctacggccaaagccttggtggccttctaccccctcgccggccgcctcgtcgacagcgacgatggtaggaaggagatcagctgcaacggcgaaggtgcactctttgttgtcgctcgcgcggatggtgatctcactatcgatgaagtcaagaaattcaagccatcgccagagttgaggaggctgtttattccactcatcgagccatcgtccatcataatggcca

SEQ ID NO: 52081 - DNA, 262 bp, Zea mays
cgtcgatctacacacatacatagtttcttctactacacgacgacaaacatgatcggagagtggggtggatacgccggcgatcgtcgggatctgagggctactccggaccggctgaccgaggtgaaggtcacggcggacaacagcagctgcatccgctccatctccttcatctacatcggagccgatggcaagccgtacgaggaggggccatggggtttcggccatgctggcacggagtacaagattgatctgtgcaggttcg

SEQ ID NO: 52082 - DNA, 258 bp, Zea mays
tcgcccgcgtcgacttcctagggttcgaggaacgtccgtccgtccgtccggggaaggagcaggagggaggcggagatgatcgaggtggtgctcaacgaccgcctggggaagaaggtgcgggtcaagtgcaacgaggacgacaccatcggcgacctcaagaagctggtggcggcgcagacggggacgcgccccgagaagatccgcatccagaagtggtacaacatctacaaggaccacatcaccctcaaggactacgag

SEQ ID NO: 52083 - DNA, 258 bp, Zea mays
catgaaactaatgaaagacagaggattgaaaagcacggtggctttgtgacgacatttcctggtgatgttcctcgggtgaatggtcagctcgctgttgctagggcatttggtgaccaaagcctcaaggcccacttgagctctgaacctgatattagtcatgtaccaataaactcaagtatagagtttgtcatacttgccagtgatggattgtggaaggtaatgaagaaccaggaagccgtcgatctcgtgaagtcaatc

SEQ ID NO: 52084 - DNA, 260 bp, Zea mays
agaatatactgaagttcataaccgaagattgccacttccccaacagcatcgagaaggcaatcagaagtgctttcgtaaaggctgaccatgcgattgcggattctcagtctcttgaccggaattctgggaccacggcgttgacggtccttatatctggcaggacactgcttgtcgcgaatgctggtgactgtagagccgtattaggaaagcgaggccgagcttttgaactctcgagagaccacaaacccagctgcagcgtt

SEQ ID NO: 52085 - DNA, 261 bp, Zea mays
gttcaggagaccatcaagaaacaagtagcaagcatgtatttgtggccgaagacgctagaagtacctataatggatccctcaaaagcatcaaaaaggcctgttggaattctacttgtgaaggttgtgagagcccaaaatctgcggaagaaggatctgctgggtaaatctgacccatacgtgaaacttaagatgtcagatgataaacttccatccaagaagacaactgtaaagcgcagaatctcaatccagagtggggtgaag

SEQ ID NO: 52086 - DNA, 259 bp, Zea mays
cgaaactaagggagacgagcagcctaaaaaccctagcccccgaatcagatcccaccgcccgccggaacgcggaaccctgcccccggccgccatggagatgagcgatgcggagcggctgttcttcttcgagatggcctgcaacaactccgaggtcgcgtacgagcagaaccccaacgacgccgacaacttgacgcgatggggcggagcgctgctggagctatacagatgcgtaacggccccgacagcctcaagctcctcc

SEQ ID NO: 52087 - DNA, 122 bp, Zea mays
ccgcctctcgagtctcgtccacccgtcgtcctcctagctcctctactcgccagtcgccatgggcaagattaagatcggaatcaacggcttcggaaggatcggcaggctcgtggcaagggtcg

SEQ ID NO: 52088 - DNA, 228 bp, Zea mays
cagctccgcaggctgctcatcgccctccctccgcgcccccgatccagatccagatccaggggcttgtcatggcatccaaacgtatcctcaaggaattaaaggacttgcaaaaggaccctccaacatcatgcagtgcaggtcctgctggtgaggatatgttccactggcaggcaaccatcatgggtcctcctgatagtccatatgctggagtgttttcttggtgaacat

SEQ ID NO: 52089 - DNA, 117 bp, Zea mays
ctcgagtctcgtccacccgtcgtcctcctagctcctctattcgccagtcgccatgggcaagattaagatcggaatcaacggcttcggaaggatcggcaggctcgtggccacggtcgc

SEQ ID NO: 52090 - DNA, 258 bp, Zea mays
cacacatacatagtttcttctactacacgacgacaaacatggggaagcctgcgaagatcggagagtggggtggatacgccggcgatcgtcgggatctgagggctactccggaccggctgatcgaggtgaaggtcacggcggacaacagcagctgcatccgctccatctccttcatctacatcggagccgatggcaaaccgtacgaggagggccatggggtttcggccatgctggcacggagtacaagattgatctgtg

SEQ ID NO: 52091 - DNA, 139 bp, Zea mays
ctagctcctctactcgccagtcgccatgggcaagattaagatcggaatcaacggcttcggaaggatcggcaggctcgtggccagggtcgtcctccagagcgaggatgtcgagctcgtcgccgtcaacgaccccttcatc

SEQ ID NO: 52092 - DNA, 257 bp, Zea mays
tcgggaagcctgcggattgccggagagtggggtggatacgccggcgatcgtcgggatctgaagtgtactccggaccggctgatcgaggtgaaggtcacggcggacaacagcagctgcatccgctccatctccttcatctacatcggagccgatggcaaaccgtacgaggaggggccatggggtttcggccatgctggcacggagtacagattgatctgtgcaggttcgacgagagcttgacggagatctccgggacc

SEQ ID NO: 52093 - DNA, 115 bp, Zea mays
ataagaggcactccaacattccagctcacatctcgccatgcttccgtgtgaaggaaggcgaccatgtcatcattggccagtgcaggcccctatcagaaactgtgatgttcaatgt

SEQ ID NO: 52094 - DNA, 208 bp, Zea mays
ctagaaattgatgtaagagatattgatgagaagagaaggaatgatgtcattgagaatgttcgccagtctgcagcacatatttcaaagaaccgtggagtagagctttcagaatttaagatcatcaaccaggacccacctgctctatctgacaaatcagtccgttgacgcaatggaatttgctgcaaacacgttaaacttggtatacaaa

SEQ ID NO: 52095 - DNA, 219 bp, Zea mays
gtccccgacatggagaagcggaagctgatgaacctcctcctcctgggcgccatatcgctgcccaccgtcggcatggtcgtcccctacggcgccttcttcgtccccgccggctccgggaacggcggcggcgggacctacgccaaggacaagctgggcaacgacatcacggtggaggagtggctcaacacgcacggtcccaacgaccgacgctcgcacagg

SEQ ID NO: 52096 - DNA, 238 bp, Zea mays
tggcactgaggcgatagccaagaagctagctgagactacaaccacgaagggtgtcactaccatcatcggcggcggcgactctgttgctgctgtcgagaaggctgggctggccgacaagatgagccacatttcgaccggcggcggtgcgagcttggaactcttggaaggcaagactctacctggtgtccttgccctcgatgacgctagatccgctgctgctgctgctactcaggttctg

SEQ ID NO: 52097 - DNA, 252 bp, Zea mays
ctcgagccgccagctttggcctgtggctgcactgttgttgtcaatctatcagagttaacacatctgatctcattagctgcagcagatcttgctcttcaagctggaataccagcaggtgcactaaatgttgtgatgggcaatgctcctgagataggtgattcattactgcagagtacacaggtcagaaagattacgttcactggacaacagctgttggcaaaaaactgatggctgaatctgcaaatactgtga

SEQ ID NO: 52098 - DNA, 251 bp, Zea mays
ctcgagccgatctagttggattgggttcaaagttgggcttttggacagctgtggtgtgcacggcagctctgtgacttgtgaggaggaagggaggaagaaagcggatccatggcgtcgaagcggatcctcaaggagctcaaggacctgcagaaggatcctcccacctcttgcagcgcaggccctgttgccgaagatatgttctatggcaggcgacgattatggggcaatcagatagcccatactctggtggc

SEQ ID NO: 52099 - DNA, 125 bp, Zea mays
ctttgacctcgacgacatcggcaacaccaccggacagtgggacctctacggctctgacgcgccctcgcactacaacccgctacagagcaagttcttcgagacgttcgcggctccgttcaccaaga

SEQ ID NO: 52100 - DNA, 233 bp, Zea mays
aacgggatcgcgctccgggtgcccaccccgaacgtctccgtcgtcgacctcgtcgtgcaggtctccaagaagaccctcgccgaggaggtgaaccaggcgttccgcgacgccgcggctacatcgagctcacgggcatcctcgaggtctgcgacgtgccgctcgtgtccgtcgacttcaggtgctccgacgtctcctccaccatgcgagctccctcaccatgggtatgggcaacg

SEQ ID NO: 52101 - DNA, 134 bp, Zea mays
ggacccgccagcatccaggtggccctgtcgaggttgtctccctaccttggctcggcccaccgggtcagcgggctcatgatggccaaccacaccagcatctcctcgctcttcgatagaacctgtcgccagtatga

SEQ ID NO: 52102 - DNA, 185 bp, Zea mays
agtattgagcaagaagctcatggttaagatagaggaatccttggacaaccttaatctcttctctatcattacagtgatgtcatttttccttttggcccctgttaccttctttacagaaggtgtcaaaattactcctacatttttgcaatctgctggtctgaatgtaaaccaagtccttacaaggt

SEQ ID NO: 52103 - DNA, 180 bp, Zea mays
agctgagtatgtcgtggagtccaccggtgtcttcactgacaaggacaaggctgctgcatatctgaagggtggtgccaagaaggttgttatctctgccccaagcaaagatgcacccatgtttgttgctggtgtcaatgaggacaagtacacctccgatgttaacattgtttccaatgctag

SEQ ID NO: 52104 - DNA, 185 bp, Zea mays
atgctgcaactggaatagaaaagataagacaggcttatattgagaaagaggatagcaagaagttgaaacagaaacagcgtaggcactgctgcccaagatgggcaaaatggatatagattatcaggttttgcatgacgcgttcttcaaatatcagacaaaacccaagctgtctagtcatggtgatc

SEQ ID NO: 52105 - DNA, 182 bp, Zea mays
tatgcatttgagctgtttagcagaatgcgcagtgaggctcaggtgatgcctgaccatattacttttgttggagtcctatctgcttgtaaccatggaggaatggtacaagaagcaaaagaagtatttgatctgatggtgactgtatattccatcaagccgacagtgcagcattacacctgcct

SEQ ID NO: 52106 - DNA, 183 bp, Zea mays
tgtgcgcctggtgccctacaacccggactttttggacgagtcggtgctgtggacggagagccgcgacgtcggcaatggtttccgaagcgtcctcatggtcaacaacatctacctcaacttcgacgccctccacggcgacaagtggcacggcggcgtccggacggcaccaacgtcgtgctctgg

SEQ ID NO: 52107 - DNA, 182 bp, Zea mays
gcaagctacctgtgacaaaaacgattccaagaaaccacttcttgtcttcctccactggctgtctgtcacttgctctaaaacaatcgcagtcctgcaagttgttgctgttgctcctacccctgcctctgcaattgggtttgagggatatgagaagcgcctcgagatcagcttctatgaggcac

SEQ ID NO: 52108 - DNA, 180 bp, Zea mays
cagaatcctttctcgcacacctaagctagaggatttaggcacaggatcctttttacaaggcaatgacccgctgcatatgccagtttatgtagagctcttgagaactgcacttcactgaagagtatatctggtttttgggatgctccaggcttttatgttcaaggaattttgtcaaattgc

SEQ ID NO: 52109 - DNA, 195 bp, Zea mays
acgcgcgcctcccatctcctccccggcgcctgcgcggctggagcaggaggcggcgtgcgtctctcgatccaggcgcccaggagaagatcgagatgtactcgccggccttctatgccgcctgcactgccggagcaatcgccagctgcgggctcacccacatggccgtcacgcctctcgacctcgtcaagtgcaata

SEQ ID NO: 52110 - DNA, 182 bp, Zea mays
aagagaagaatgagagctcactttgagttcatggagaagctgggggttgacaaatggtgcttccatgatagggatattgcccctgatgggaaaactctcgaagaaacaaatgctaacttggatgagatagttgagctggcaaagcagctccagggtgagaccaatataaagccattgtgggg

SEQ ID NO: 52111 - DNA, 174 bp, Zea mays
cgtgatgctgcaatggatgcaatcagacgagtaacttgggttccttctcaggcacaaaacaggttgttgccatgacctctagccgttctgattggtgtatttcacggcagagaacttggggtgtccctattccagttttttaccatgtggactcacaggaacctcttataactg

SEQ ID NO: 52112 - DNA, 180 bp, Zea mays
gccgcagaccgcgctgccgtggttcaagacggtcgtcatcccgcccgcgggcacctcacaactactgggccgactcctacacgctcttcgtcttcaacatggcgctcatgggcttcgcgagcaccgccgcctccaggactggtacaacccgggctccatgggcaagcagtacttcctcgg

SEQ ID NO: 52113 - DNA, 178 bp, Zea mays
  unsure (1)..(178): unsure at all n locations
ctaattccagcttgaaggcattccaccagccccaagaggcatgccccagatcgaggttattnttgacattgattccatggattgtaaaggtgtcagctagggacaaagccacaggcaaagaacaagaaatcaccatcaagtcttctggtggtttgtcagaggtcgaaattgagaagat

SEQ ID NO: 52114 - DNA, 182 bp, Zea mays
agcctcaaggactacgtgaccaggatgaaggagggacagaatgacatctactatatcactggtgagagcaagaaggcagtggagaactcccccttccttgagaagctgaagaagaggggctatgaggttctgtacatggttgatgccattgacgagtatgctgttggtcagctcaaggagtt

SEQ ID NO: 52115 - DNA, 182 bp, Zea mays
aaacgaaccagcattagattggtctacaagaatgcgaattgctcttggcgctgctgtggtttggagtaccttcatgagcactgcaatcccaagatcatccaccgtgatgtcaaggctgcaaatgtcctgcttgatgggaactttgaagcagtggtaggagattttgggctggcgaagatggt

SEQ ID NO: 52116 - DNA, 179 bp, Zea mays
cggcaactcgacggccaaccgcgccaccctgccggtgaccatggtgcatgttaacttctaccgaactatgggaagactttcaagaagccaaggcgaccgtatgagaaggagcgcctagatgctgagctgaagctggttggtgagtatggcctgcggtgcaagcgcgagctgtggcgcgt

SEQ ID NO: 52117 - DNA, 171 bp, Zea mays
gcgaaagcaacgaggctatcttgctcctgagtacattatgttcggcaaaccaactgcaggtgtgatgtatacagctttggaataatactattggagcttgctagtggcaaaaggccgatagaaaagtcgtgttctgttaagacatatggaattcgaaactgggtgctcccg

SEQ ID NO: 52118 - DNA, 175 bp, Zea mays
gagaggattaaggctgtcaggcagatgattatggctcccacgcttgagctgaggcagcaggcgctcgaccgtctcttgccgtatcagaggtctgacttcgaaggcattttccgtgctatggatggactcccggtgaccatccgactcctggaccctcccctccacgagttccttc

SEQ ID NO: 52119 - DNA, 230 bp, Zea mays
cttccgttctcaaaccaacctaggcaattcgccgcagcctctcaacctcgcgagtcccgacctcacgcagccgccgcacagatggcacccaaggcggagaagaagccggcggccaagaagcccgcggaggaggagcccgcgacagagaaggtggagaaggctccggcggggaagaagcccaaggccgagaagcgcctcccggcgggcaagtccaatgaaggcggcgaggg

SEQ ID NO: 52120 - DNA, 283 bp, Zea mays
ctcgagccccaaagttcaatatagtctctcctggagctgacatgtccatatactttccacataccgagaaggccaagcgactcacctctcttcatggttcaatcgaaaatttgatttatgacccggagcaaaacgatgaacacattgggcatctggatgaccggtcaaagcccatcctcttctccatggcaagactcgacagggtgaagaacataacggggctggtcgaagcttttgccaagtgcgctaagctgagggagctggtaaaccttgtcgtcgttgc

SEQ ID NO: 52121 - DNA, 270 bp, Zea mays
atcccatcccactaccacccatctcgtcgtccgccgattcgatccggttcttccaacccaggggcagtgatggcgacgaagaggagcgtgggcaccctcggcgaggcggatctgaaggggaagaaggtgttcgtgcgcgccgacctcaacgtcccgctcgacgatgcccagaagatcaccgacgacacccgcatccgcgcctccgtccccaccatcaagttcctcctcgagaagggcgccaaggtcatcctcgccagccacctgggtcgt

SEQ ID NO: 52122 - DNA, 226 bp, Zea mays
cggagcctccgagctcgccgtcaaggaggccgcgtggcggctcgcacgctacgccgccatctcacaggacaacgggcttgtgccgatcgtggagccggagatcctgctggacggcgagcacggcatcgagcgcacgttcgaggtggcgcagaaggtgtgggccgaaaccttctacgccatggcggagaacaacgtcatgttcgacggcatcctgccccagccgtcc

SEQ ID NO: 52123 - DNA, 303 bp, Zea mays
tcactaaggtagtaactcggaattcaactcgagaggcggtcgtcctcggcatcttcgatctcttccacttcggccacgcccgcgccctcgagcaggccaagatgctgttccccaacacctatcttctcgtcggatgctgcaacgacgagctaacctaccgctacaagggcaagaccgtcatgacccaggaagagcgatacgaatccctgcggcactgcaagtgggttgatgaggtcattcctgatgcaccgtgggttctcacacaggagtttattgataagcatcagattgactatgttgctc

SEQ ID NO: 52124 - DNA, 148 bp, Zea mays
tggagtcttctgacaccattgacaacgtcaaggccaagatccaggacaaggatggcatccccccggaccagcagcggctcatctttgctggcaagcagctcgatgacgggcgcacacttgccgactacaacatccagaaggagagcac

SEQ ID NO: 52125 - DNA, 278 bp, Zea mays
ctcaaacgcgacggtcgacgccgcggcttctcctcatcctcgtcccctccgtaccgtacctggaagtggtctacacagaaggttaccaaattgtcaagttaaagttggatcattggaacaatgccgccccataagattgagactgggcatcaagatgtggtccatgatattgccatggattactacgggaagcgcctagctacagcctcctctgataacacaataaagatcattggcgtaagtggaacctcacaccagcagcttgctaacttgagtgg

SEQ ID NO: 52126 - DNA, 263 bp, Zea mays
agacatgtccgcgctcgagaccaacttcgccaacctgaccgcctccgacggcgacgacacgtacttctccgacgaggcccccgacgtgccgtccatggtgctccccatctgcgacgacttcgacggcttccaggcggccaccaaggatatggtgaagaataagaaggggacgaccacgcttgccttcatcttcgactagggcgtcatcgtcgccgctgattccagggccagcatgggcggttatatatcctcacaaaccgtga

SEQ ID NO: 52127 - DNA, 286 bp, Zea mays
gcggtgaagctgggcatcgaggggcacgtctccatcgccaacgtgcttgtcgcgatgtactacaagtgcggcactcccggctgcgcccggaggctcttcgagttcatgggcgagcgcgacgtcgtctcatggaccacggtaatgtccatggacagggaggacgccgtctcgctgttcaacggcatgatgcgagatggggtggcgccgaacgaggtcacctttgtggccattctgtcggctatgccaggacactgcccggcaagggaagggcagatggtccacgcgg

SEQ ID NO: 52128 - DNA, 272 bp, Zea mays
ccgttgagaacctcgccgaccacctcgctgaccctgtcaacaacaacgcctgggcctacgctaccaacttcgtccccggcaagtgagcgagggtcaatacatacttgtatgcgtgtaccgtagacatacgtattcgtatatgtactgcaggatatgtaccagtatttgtgaagaagggagcaagggctcagagattgtaccagtagtgtacgtatttgcatgcatgctttggtccttgtggacattatcaatgaaatatgctgtaaattata

SEQ ID NO: 52129 - DNA, 271 bp, Zea mays
atcgctcatcaatcgccagaggagttgttgatcgaggtgagtgaggttgaaaagcacaccatcgtcatggacggcggatactacggcggtcgcgatcagcgctacagcggcgggtactacggcggcggtggcatcgcaacgccggggtacgctccggcggtcccgtacgggatgtcgcaggtgaacatcgagggcaacgggtgcgggcgggcgctgccgccgcagccgaccgtgaaggtgtactgccgcgccaaccccaacaacgccatga

SEQ ID NO: 52130 - DNA, 279 bp, Zea mays
tcgggaagatgtggatcctgaacgggcgccgaaggtccttggtgtagcttgccactctcaccaatcaagttttcatgtctgatctcgacattcagatcccaactgccttcgatcccttcgctgaggccaatgctggggactctggtgcggcagcagggtcaaaggactacgttcacgtgcgcatccagcagcgtaatggtcgcaagatcctgactaccgtccagggattgaagaaggagttcagctacagcaagatcctcaaagatctcaagaaagagt

SEQ ID NO: 52131 - DNA, 271 bp, Zea mays
ccgatacccctgatgatgcattgactgcgcgaaacaatggggcacaaggaattggattatgccggacagagcacatgttctttgcttcagacgagaggattaaggctgtcaggcagatgattatggctcccacgcttgagctgaggcagcaggcgctcgaccgtctcttgccgtatcagaggtctgacttcgaaggcattttccgtgctatggatggactcccggtgaccatccgactcctggaccctcccctccacgagttccttccaga

SEQ ID NO: 52132 - DNA, 267 bp, Zea mays
ccttggccgagagctgctgggtgggaacgggatttttgccgacttccttgtagccaaggcgttatgcgacctggagcccatctactcgtacgagggcacgtacgacatcaacagcctggtgaccggcagggaggtcaccgggatcgcgagcttcaggcccgccgcgccacgaaagcccggctgtgacgtgataacctgtgtccccgtgttgcagggaactggaggcgaataaatcatgatcaggtcgtcgtcgtcgtcgccatcgaa

SEQ ID NO: 52133 - DNA, 269 bp, Zea mays
cctagatccgccgcactcagttccggtgagaccctcctttccagcgaaaatgccgaacctcgagtgccggatgtatgagcagcggttcccggaggtggacgccgcggtgatgatccaggtgaagcacatcgctgacatgggcgcgtacgtatcgttgctcgagtacaacaacatcgagggcatgatcctcttctccgagctctcccgccgtcgtatccgctccatctcctccctcatcaaggttggccgccagtagccgccatcgtgct

SEQ ID NO: 52134 - DNA, 170 bp, Zea mays
ggaagtctcatcttacctcaagaaagttgggtacaaccctgataagattgcatttgttcccatctctggttttgagggttgtctcatgattgagaggtccaccaatcttgactggtacaaaggcccaaccctgcttgaggctcttgatcagatcaccgagcccaagagac

SEQ ID NO: 52135 - DNA, 276 bp, Zea mays
  unsure (1)..(276): unsure at all n locations
gcgttgcgtcttgggggagagagagaagtgggagacccgcgagaggctgccgtgtagggactagggaccgtagagtaagcgacagganaggagggagagggggatggccgggatcgggccgatcaggcaggactgggagccggtggttgtgcggaagaaggcacccaccgccgctgccaagaaggatgagaaggccgtcaacgccgcgcgccgctccggcgcggagatcgagaccatgaagaagttcaacgctggtatgaacaaggcggcgtccag

SEQ ID NO: 52136 - DNA, 268 bp, Zea mays
aggttctacaggacaaaagatacaagaatagggagttacaaataatgcgatcaattgaccattgcaatgtcatttccctgaagcattgtttcttctctaccacaagtagggatgaacttttccttaacttagtcatggagtttgttccagagtcactttatcgcgttctgaaacactacaaagacatgaagcagaggatgccccttatatatgttaaattgtatatgtaccagatattccggggactagcttatattcatactgtacc

SEQ ID NO: 52137 - DNA, 272 bp, Zea mays
aagctcctcaccaagcgtgacgtcttcgcgttcagctacaccacccaagtcgtggtcgttcatcctgctgtcgtgctcgatcgcggtgtgcgtaaacttcagcacgttcctggtgatcggcacgacgtcgcccgtgacgtaccaggtgctgggccacctcaagacgtgtttggtgctctccttcggctacatcatcctcaaagaccccttcagcgcgcgcaacgtggtgggcatcctcatcgccatcttcggcatgggcctctactcctact

SEQ ID NO: 52138 - DNA, 235 bp, Zea mays
gcgccgcgccaacaagaagccatactcgaggtccattgtgggtgcttccctagaggtgatccagaagaagagggctgagaagcccgaggtccgcgatgctgctagagaagctgctcttcgcgagatcaaggagcgcatcaagaagaccaaggatgagaagaaggcgaagaaggcggaggtgaccaagtcccagaaggcgcagacgaagggcgcggtccagaagggttccaagggc

SEQ ID NO: 52139 - DNA, 268 bp, Zea mays
atccgccgctccactccaagtcacacggaggcagccatcgtagcctcgcccgactccgcttcccctgttctttgggcatggagctgatcacaaatgtcaccgagtacgagaagctcgcgaaggagaggctgccgaagatggtgtacgactactacgcctccggcgcagaagatcagtggacgctcaaggagaaccgggaggccttctccagaattctgtttaggccacgggtactgatcgacgtctcacgtatcgacatggccacaaa

SEQ ID NO: 52140 - DNA, 270 bp, Zea mays
gtttagcaaacattcggggtggtggagagtacggggaggagtggcacaaagctggagcacttgcaatgaaacaaaattgttttgatgactttgctgcctgtgctgaattcctcatttctaatggttacaccagttccagacgtttatgtattgaaggcggaagcaatggtggtcttctggttgctgcttccattaatcagaggcctgatctctttggatgtgctctcgctcatgttggcgtcatggacatgctccgttttcacaagttta

SEQ ID NO: 52141 - DNA, 265 bp, Zea mays
tttgtgatgtgtgcccagagaagttgccaaattacgaggctaagataaagaatttctttgaagaacacttgcatactgatgaagagatacgatattgccttgagggtagcggctactttgatgtgagggaccaagatgatcagtggatccgtgtagcggtaaagaaagggggcatgatcgttttgcctgcaggaatgtatcaccgctttacgttggatagtgacaactacatcaaggcaatgcgtctatttgtgggcgagcctgt

SEQ ID NO: 52142 - DNA, 263 bp, Zea mays
cgccctaacccctcacgcaactgcctctttgcggcggcgggaaacactgacacgtcttctctccggttgcgagcacggtcggaggagctagggtttcgtcgcggcgagatgtcggcgtacgacgaggtggagatcgaggacatggagtggaacgcggagctgaaggcgtacacgtacccgtgcccctgcggcgacctcttccagatcacgctcgacgacctccgcctcggggaggagattgcgcgcatgccctcgtgctcctc

SEQ ID NO: 52143 - DNA, 271 bp, Zea mays
acgagttcgagctcaccatggcgctcagcggctgcacctccctctccgaaatcacccgcaagcacatcatcaccgagtccgacaagttcagcgccatcccgtcgcgcttgtagatgaggcaaaatcaatcgcctgctacgccgccggtcgatcggggatagtcagctcgtgcatggatgcatgcatgcgtgctcgatgtcgatgacgatgatgataccatatataatctaggactgcgcatatatatattttgttccagaaatgatcgatc

SEQ ID NO: 52144 - DNA, 267 bp, Zea mays
atgatgatggtaagcgtgtagcagagacgctgatgttcgactatcacaggcagcatggcattgaaatccggattgccaggattttcaacacctatgggcctagtatgaacattgatgatggccgtgttgttagcaacttcattgctcaggctgtgcgcggtgagcccctgactgtccagaggccaggaacacagactaggagtttctgctatgttgccgatatggttgatggtcttattaagctgatgaatggaaacaagactggac

SEQ ID NO: 52145 - DNA, 265 bp, Zea mays
ggagcagctcttcacccttggtgattgggccaaacgcatcccccacttctcaggcctcaccttggaggagcaggtcattctgctccgggcagtgtggaatgaattgctgattgcactcttctcccaccgctcggtttctgtccaggatggcatcctgctggccacaggcctccacgtccacaggagtagcgctcacagcgcgggcgtcggctccatctttgacagagtcctcacagagctggtgtccaagatcaaggacatgcgg

SEQ ID NO: 52146 - DNA, 263 bp, Zea mays
caagaacaagaagcttgttaagaggcttgccaagaagtaccatgctttcttggcatcagaggccatcatcaagcacctttcccgtctccttggtcctggtctcaacaaggcaggcaagttcccgaccctggttactcaccaggaatccctcgagtccaaggtgaacgagactaaggcaaccgtcaagttccagctcaagaaggttctttgcatgggtgttgccgttggcaacttggcgatggaggagaagcagatccagcaga

SEQ ID NO: 52147 - DNA, 263 bp, Zea mays
cgatccccaacaggcaacagcccagccgctgtcgccctcgttccgtagtacggcgccgccagatcgtcagtcaccatgatcatctccaagaagaaccgccgcgagatctgcaaatacctcttccatgagggggtcttgtacgccaagaaggactacaacctggccaagcaccccaagcttgatgtgcccaacttggaggtgattaagctcatgcagagcttcaagtcgaaggagtatgtgagggaaaccttctcatggcagta

SEQ ID NO: 52148 - DNA, 264 bp, Zea mays
caatgaccaaccagggtgttcaagtgttcccagagataatggttcctcttgttggaacaccacaggaactggggcatcaagtgactcttatccgccaagttgctgagaaagtgttcgccaatgtgggcaagactatcgggtacaaagttggaacaatgattgagatccccagggcagctctggtggctgatgagatagcggacaggctgaattcttctccttcggaacgaacgacctgacgcagatgacctttgggtacagcag

SEQ ID NO: 52149 - DNA, 260 bp, Zea mays
atgggtgccgtcgagggctaccgcattgccggcgggccgctcggcgaggtcgtcgacccgctgtaccctggcggcagcttcgaccccctcggcctggccgacgaccccgaggccttcgccgagctcaaggtgaaggagctcaagaacggccgcctcgccatgttttccatgttcggcttcttcgtccaggccatcgtcaccggcaagggcccgctcgagaacctcgctgaccacatcgctgacccagtcaacaacaacgc

SEQ ID NO: 52150 - DNA, 259 bp, Zea mays
cgtcggcccgctccatccgcaggccccgcgcagccgccgtggtggccaagtacggcgacaagagcgtctactttgacctcgacgacatcggcaacaccaccggacagtgggacctctacggttctgacgcgccctcgccctacaacccgctacagagcaagttcttcgagacgttcgcggctccgttcaccaagagaggtctgctgctcaagttcctgctgctgggcggcggctcacttctggcctacgtcagcgcgtc

SEQ ID NO: 52151 - DNA, 260 bp, Zea mays
gtacgcacgcaccgggacaccagcaacccccaacagcgccactgtccagtgcgcgcgtcaagcttgcttagctagccgccatggcctccctcgccgccgtctccgtgaagcccgtggccatcaagggtctcgccggcagctccatctccggaaggaagctcgccgtcgccaggccgtcggcccgctccatccgcaggccccgcgcagcgccgtggtggccaagtacggcgacaagagcgtctactttgacctcgacgaca

SEQ ID NO: 52152 - DNA, 260 bp, Zea mays
ctggaggcatctacttcggcaaacccatgggttttggaacaaatgacaatggatatgacatttggttcaacacacaagtttattcagcttctgagattgatcgtatcgcacgagtcgcatttgaggttgctcgcagagaagaaggagactatgctcggttgacaaagcaaatgtcttggaggcatctatgctttggaggaaaagggtgactgcactagcttcggaattccctgatattgagctctcacacatgtatgttg

SEQ ID NO: 52153 - DNA, 263 bp, Zea mays
gaaaaacgttcactttctcgagcaagtgtcgagggctttcgggaaggacgacgagatcatcgtgggctgccaaagcggcaagaggtctctcatggcggcgaccgagctctgctccgctgtaagctaggggatggccggcccgactccatcacctcctcctcacaaattcgctcttgccgttctgcgactcgatgccagtcaatccaatcactgctaccgtgttttcagggcttcaccgctgtcaccgacatcgccggcggatt

SEQ ID NO: 52154 - DNA, 261 bp, Zea mays
ggctactccgcctccgctctcccccctgctgcgcgctactcgcccgatctcgcggtgctggtagcggtgaaaatatctgagatcgagtgaagctagcttttcatcgatatggcgcttgtactgcatgctggcagtagtaacaaaaatgcattcaaagcactaattgccgcggattacagcggcatcaaggttgagttggtaaaagactttcaaatgggggtttccaacaaaacaccagagttcctcaagatgaaccctatt

SEQ ID NO: 52155 - DNA, 259 bp, Zea mays
cttattctgacaagtccttttgggtggataaccaagcaagggaaagttatacagtagatgatggttctgttccactgtatgaccgggagtttaccttgcactcgactcctctaggtggttcatcaaacactgatagggtggataaggacgattcacgctgcttcaattgtggttcttatagccatgctatgaaggattgcccaaagcctcgggacaatgttgcaattagcaatgcacgaaaacagcataatttgaaaag

SEQ ID NO: 52156 - DNA, 259 bp, Zea mays
gcagcagcagagcagcggcgatggcggcctccatgatctcctcgtcagctctggcggtggcgcctcagggcctgccgcccctcggccgccgcgcctcctccttcgccgtcgtctgctccaagaagaagatcaagaccgacaagccctacgggattgggggtggcctgaccgtcgacgtcgacgccaacgggagaaagggcaagggcaagggcgtgtaccagttcgtcgacaagtacggcgcgaacgtcgacggatacag

SEQ ID NO: 52157 - DNA, 258 bp, Zea mays
gtggctccactaggatccccagggtgcagcagctgctccaggacttcttcaacggcaaggagctgtgcaagaacatcaatcctgatgaggccgttgcctatggtgctgccgtccaggccgctatcctcagtggtgagggcaacgagaaggtgcaggacctgcttctgcttgacgtcactcctctctctctgggtctggagactgccggaggagtgatgaccgtccttatcccgaggaacaccaccatccccaccaaga

SEQ ID NO: 52158 - DNA, 256 bp, Zea mays
ggtcgcggcgacatggccaaacgtaccaagagagtcgggatcgtcggtaaatacgggacccgctatggggcctcgctccggaaaatggtgaagagaattgaaatcagccagcacgccaagtacacttgctctttctgtagcaaaaccaagatgaagagacgagctgtggggatctggcactgtggttcctgcatgaagacagtggctggcggtgcctggacgtacaataccacttccgctgtcacggtaaagtccg

SEQ ID NO: 52159 - DNA, 258 bp, Zea mays
caaactttttgagcccatctacgacgagactgatggggctgatgggtatgtctccgtagaggtgtctcctaggttggcaaatgacactcaaggaactgttgaagcggcaaagtggttacacaaagtggtcaaccgccccaatgtctacataaagatcccagctactgcagaatgtgttccttccatccaggaagttatcgctaatggcattagcgtcaacgtcacgcttattttctcaattgcgagatatgaggctgt

SEQ ID NO: 52160 - DNA, 258 bp, Zea mays
gtacgccgtcgagctcagctccgtggcgtacggcgcgacgtggcagttcgacacggaggcgctgcccaacgacctcatcaagcgcgggctggccgtgcgcggggaggacggggagctggagctcaccatcaaggactacccctacgcccacgacgggctcctggtctgggactccatcaggcagtgggcgtccgagtacgtcaacgtctactacaagtccgacgaggccgtggccgccgaccccgagctgagggcgtt

SEQ ID NO: 52161 - DNA, 262 bp, Zea mays
  unsure (1)..(262): unsure at all n locations
gtgaggagttgtgcaaggtttggggaaaggaaggctggcttggcgagagggcaggtttgctggctatgcgaccctttcgcanagaccaacaaagagtccttccccaactcccaactcaaccccttttggaactatgtgtggtggttggaagcctgtggcgcatccttgtcgctcgtgtccttctcatgcccggcgacgcgtgtttgtggtaacgccctgctgccatctcttttcttctctctgcgaggatttggactggcag

SEQ ID NO: 52162 - DNA, 258 bp, Zea mays
gacctcttagatttcagtatctacttggacatcagtgatgaagttaagtttgcatggaaaatccagcgggacatggcagagcgtgggcacagccttgaaagcatcaaggccagtatcgaggccaggaaaccagattttgatgcctttattgatccgcagaagcagtatgctgatgctgtgattgaagttctgccgacccagttgattcccgacgacaacgaaggaaaggtgctgcgtgttaagctcatcatgaaagaa

SEQ ID NO: 52163 - DNA, 255 bp, Zea mays
gcggacacctcccggagtgcttgaatggagagtttgtcagggttgggcctaatccgaagtttgctcctgttgcggggtatcactggtttgatggagacgggatgattcatgccatgcgtattaaggatggaaaagctacctatgtatcaagatatgtgaagactgcccgcctcaaacaagaggagtattttggtggagcaaagtttatgaagattggagaccttaagggattttttggattgtttatggtccaaa

SEQ ID NO: 52164 - DNA, 255 bp, Zea mays
cagcgactcagcgagcgagagcagcacacactgcacgcagctagctaggagcagcagcagcggcggcgatggcggcctccatgatctcctcgtcagctctggcggtggcgcctcagggcctgccgcccctcggccgccgcgcctcctccttcgccgtcgtctgctccaagaagaagatcaagaccgacaagccctacgggattgggggtggcctgaccgtcgacgtcgacgccaacgggagatagggcaagggca

SEQ ID NO: 52165 - DNA, 247 bp, Zea mays
  unsure (1)..(247): unsure at all n locations
gccccgcccccttctctcagcggcgacgctcgggcgntcctaccctgccccctctccggacccccacgccgtcggcgaagcagccgggcaagagcccgatccagaccccgcgagcaatccttgatatacctgatggctatgattgatgagcctctgtacccaattgctgtactgattgatgagcttaagaatgaggacatccagttgcgtctaaactccattagaagactttcgacaattgcacggg

SEQ ID NO: 52166 - DNA, 255 bp, Zea mays
ggcaaccaaaccttctccgatggccgcgcccgtgtcgcagccgccggtgtccgccagggcgtccacacggtttctcccccgcgggataggcgcgctcccggagtccgctcccacgtccctccggttatccgtcggccgccgtcgccgggccgccagcctagaggtgaaggcatcgggaaatgtgttcgggaactacttccaggttgcaacctatggcgaatcccatggagttggtgttggttgcggtatcagtgg

SEQ ID NO: 52167 - DNA, 257 bp, Zea mays
agccgtcgagctcagctccgtggcgtacggcgcgacgtggcagttcgacacggaggcgctgcccaacgacctcatcaagcgcgggctggccgtgcgcggggaggacggggagctggagctcaccatcaaggactacccctacgctcacgacgggctcctggtctgggactccatcaggcagtgggcgtccgagtacgtcaacgtctactacaagtccgacgaggccgtggccgccgaccccgagctgagggcgttct

SEQ ID NO: 52168 - DNA, 257 bp, Zea mays
cggcgaaccagtgcccgaccatcgacggcggcgtggagtcgttcccgttcaaggccggcaagtaccagatgaagaagctgtgcctggagccgacgtccttcaccgtcaaggcggagggcatcgccaagaacgccccgcccgagttccagaagaccaagctcatgacccttcctcgtgcccagctaccgtggctcctccttcctcgaccccaagggccgcggcggctccaccggctacgacaacgccgtcgcgctccc

SEQ ID NO: 52169 - DNA, 252 bp, Zea mays
aaaacttccttccttactgttctgttcaagtgccaagcgttgtctgcatgaaattagtgttttaagtgtttctattaacattttatgtttctaggtatcattgaggagttggttaagaggcacaggcaaattgatgcagttcatttcatacaagctttcgggctttcagagacattcccccctgcaccactgctgaagacctatattgaggagtttaaggatacaattgaaaataatggggatgcaactgtg

SEQ ID NO: 52170 - DNA, 252 bp, Zea mays
ctcgttgccctcgacaccaagaccggcgccaaggctcttgaggatgctgagaaaaacatacttacattgaggcatacacttgctggtgatggagaagtggaaccaaatcaagagcaggttttgcagatagcccttgagatttgcaaggagggtgttctttccctctttgttcagaatcttccttcattgggttgggaggctagaaaggatcttgtccactgctggtgtattttgttgagacagaaggttgat

SEQ ID NO: 52171 - DNA, 251 bp, Zea mays
gaactgcgggccaccaccacctagagatgaatccacaccaagagcaccaaggggtggtggtggcggtcgcggcggcggctttgtcgattcagctaacaaggtctatgtggggaaccttgcgtggggtgttgacaactcgactctggagaacctgttcagtgagcaagggcaagtgcttgatgctaaggtcatctacgacagggatagcggcaggtcaagggggtttggtttcgtcacctattgctccgcca

SEQ ID NO: 52172 - DNA, 252 bp, Zea mays
ctagggttttgctgctctccgaccccgagctccgaaggccgcagcatcaggcgcggcccccctcgcgtgtgaccgagatggcgctgccgaatcaggggaccgttgattaccccagcttcaagctcgtcatcgtcggcgatggtggaactggtcaaactacatttgtgaagaggcatctcactggagagtttgagaagaaatatgaaccaaccattggtgtggaagttcatccgttggatttcaccactaact

SEQ ID NO: 52173 - DNA, 254 bp, Zea mays
gccatccttgcggtttcacttgctgtgtgcaaagctggagctatggtgaagaagattcctctttaccagcacatcgcaaatcttgctgggaacaaaactctggtgctccctgtacctgcctttaatgtgattaatggagggtcacatgctggaaacaagcttgccatgcaggagttcatgatcctcccaactggtgcctcctcgttcaaggaggccatgaagatgggagttgaggtgtaccacaacctgaagag

SEQ ID NO: 52174 - DNA, 252 bp, Zea mays
atcaagcgcgcggagggggaggcggaagccaagtacctgtccgggctgggcattgcgcgccacggcaggccatcgtggacgggctcagggacagcgtgctggggttctccgtcaacgtgccgggcaccatacgccaaggacgtcatggacatggtgctcatcacccagtacttcgacaccatgaaggagatcggcgcgtcgtccaaggcgtcctcggtgttcatcccgcatggccccggagcggtgcgcgac

SEQ ID NO: 52175 - DNA, 251 bp, Zea mays
ctagggttttgctgctctccgaccccgagctccgaaagccgcagcatcaggcgcggcccccctcgcgtgtgaccgatatggcgctgccgaatcaggggaccgttgattaccccagcttcaagctcgtcatcgtcggcgatggtggaactggtacaactacatttgtgaagaggcatctcactggagagtttgagaagaaatatgaaccaaccattggtgtggaagttcatccgttggatttcaccactaac

SEQ ID NO: 52176 - DNA, 253 bp, Zea mays
  unsure (1)..(253): unsure at all n locations
gggctctcttcgtcgtgcggcaactgcgcgaccgccgacgcccgacggcaggtgccccaggtcttcgtcgaccccttcgcaaggcctcggttccatccttcgccggagganctcgcccgtcaacaggacttgatctactactcactagcggtgtagaggcgaagagaagaacttgaccatgagcagcataggcacaggttacgatttgtctgtcacgactttctccccagatggtcgtgtcttccaggtcgag

SEQ ID NO: 52177 - DNA, 266 bp, Zea mays
ggagcattcgagaagccgaagaaaattcgaagacgaggagcagctacactgcggacggacttcgggcatggagggccagttccaggttggcaaggaggaggtcatccaagcatggtacatggacgacagtgaagaggaccagaggcttcctcatcatcgcgagcccaaagaattcatccctctcgaaaaactttccgaactaggaatattaagctggcgcctacatgctgatgattgggagactgatgagaacctcaagaatattc

SEQ ID NO: 52178 - DNA, 261 bp, Zea mays
gcgcatcagaggttgcactttcaaggttcagtagttgtattatgcttgtggcgtatgcagctatctctatttccaattaagtggacggagcaacatttacagtccaataggcagtgaagaggcgcctattgaggatactgcagaggaagatgaagaagctgagattggcatgtgggaggcagtaacatggcttgcggttttaacactctgggtgtcttttctttctgagtacctagttaacgccattgagggagcatctga

SEQ ID NO: 52179 - DNA, 260 bp, Zea mays
tggccagggaggcgctcatcaacgccgacggcatcatcgaggagtccttctggccgggcaagtacgccgtcgagcttagctccgtggcgtacggcgcgacgtggcagttcgacacggaggcgctgcccaacgacctcgtcaagcgcgggctggccgtacgcggggatgacggggagctggagctcaccatcaaggactacccctacgcccacgacgggctcctggtctgggactccatcaagcagtgggcgtccgagtac

SEQ ID NO: 52180 - DNA, 262 bp, Zea mays
ctggaagcatctacttcggcaaacccaggggttttggaacaaatgacaatggagatgacattgggttcaacacagaagtttattcagcttctgagattgatcgtatcgcacgagtcgcatttgaggttgctcgcaagagaagagggagactatgctcggttgacaaagcaaatgtcttggaagcatctatgctttggatgaaaagggtgactgcactagcttcggaattccctgatattgagctctcacacatgtatgttga

SEQ ID NO: 52181 - DNA, 263 bp, Zea mays
ctaccagcgactcagcgagcgagagcagcacacacgcagctagctaggagcagcagcatagcagcggcgatggcggcctccatgatctcctcgtcagctctggcggtggcgcctcagggcctgccgcccctcggccgacgcgcctcctccttcgccgtcgtctgctccaagaagaagatccagaccgacaagccctacgggattgggggtggcctgaccgtcgacgtcgacgccaacgggagatagggcaagggcaagggcgt

SEQ ID NO: 52182 - DNA, 258 bp, Zea mays
cggcaccgccgccgactttcgtaccgcggcccctaaacccctttcctcgttcccctccgtctctcagttaggcacaatgatgctagctaataagcttggtggtctgctcaagaatgctacgagttcaaatatgtctgtctaccaagcaatcagatgcatgtcatcatccaagctttttgttggagggctttcttatggaaccgatgatcacagtctcagagacgagtttgccaaatatggacaagttattgaagcgag

SEQ ID NO: 52183 - DNA, 256 bp, Zea mays
cttattcaaggttccttgagtatcttgacaatggtagagtgaagaaggttgatttatttgagaatgggacaattgctatcgtggaggccagttctcctgagcttggcaaccgcgtgcagagagtccgtgtgcagcttcctggtctaagccaggagcttcgtcagaagttgagggacaagaacatcgattttgctgctcacagcaaccaggaggaatctggttctcttctgttcaacctgattggaaatttggcatt

SEQ ID NO: 52184 - DNA, 256 bp, Zea mays
caggatattagagcaggtggttaattgtaaggatgaccttgcacagttctacctgatggactgcatcatccaagtgcttccagatgaataccagttacaaacattggagacattattgaatgcatttccccagcttcagccaagtgttgatatcataacagtactctctcaacttatggacagattgtcgaactatgctgcctcaagtcctgaagtgttaccagggttcttgcaagttgaagcttttgctaagttc

SEQ ID NO: 52185 - DNA, 252 bp, Zea mays
cacacatccgcatccctctctcctcggtttcctctcccaccaccaacccccagatcgcagcgatctccgccgccgccctctcagggattccgcgcgacaaagtcaggcgtagaggctccaggaggaggagggaggcgcacagtggcgggtgggggagatgttcctctgggactggttctacggggtgctggcctccctcggcctgtggcagaaggaggccaagatcctcttccttggcctcgacaacgccgg

SEQ ID NO: 52186 - DNA, 258 bp, Zea mays
gctggatgggaagcaacaccgcagcagtcatatgggttcttccggattgagattcttggtgccttggtctccattcagctcatatggctacttgctggcatactggtatatgaggctattgtaaggctcattaacgagagtggcgatgtgcagggctccctcatgtttgctgtgtcggcgtttggactgtttgtcaacattataatggctgtattgctaggccatgaccacgggcacggccatggacacagccatgga

SEQ ID NO: 52187 - DNA, 256 bp, Zea mays
gcctcgggtcaaaccctaagcagggagttgatttatccgctgcagccatgagtaagttgcagtctgagtctgtcaaggatgccatctcccagattgttggggatgccaaggagaagaataggaagttcactgagactgtggaacttcagattggtctgaagaattatgatccacagaaggacaagcgtttcagtggctctgttaagttgcaccatatcccacgtcccaagatgaaggtgtgcatgcttggtgatgc

SEQ ID NO: 52188 - DNA, 249 bp, Zea mays
gtgctcctcaggacgataggaaccttcctgatgtgcacttgggactctatgatgatgttctagtcttcgataatgttgagaagaaagtatatgttatccattgggtcaatgtggaccggcatgcatctgttgaggaagcataccaagatggcaggtcccgactaaacatgttgctatctaaagtgcacaattccaatgtccccacactctctcctggatttgtgaagctgcacacacgcaagtttggta

SEQ ID NO: 52189 - DNA, 131 bp, Zea mays
gcggttcaggatcttctccgagagtctccagctcgtccgctccaccaatcggaaaggcctctcctaccgcctcggcatcaaccgcttcgcggacatgagctgggaggagttccgtgcgacccggctcggcg

SEQ ID NO: 52190 - DNA, 229 bp, Zea mays
ccaagttcccaacgcagaggatcgacccgaatcctccgcaactcgccgacgcgggaccgaccgagccggtcctatcgatcgaggatgtcgtacgcctagtctcttcaagtacatcatcatcggcgacacatgcgtggggaagtcgtgcctgctgctgcagttcacggaccagcgcttccagcccgtgcacgacctcatcatctgcgtcgaattcggcgacgcatgatca

SEQ ID NO: 52191 - DNA, 252 bp, Zea mays
gaaactggtacctacagatggatggcacctgaggtaataaaccataagccgtacgatcacagggcagatatcttcagctttgctgtggttctgtgggagctggtcacttcagagggaatgcggttggagatcccgtcatgggtcaatccacaactgtctaaactgattcagcgttgctgggacgaaaatcctaacctgcgcccctctttctcagagatcactgcagagctggaaggcatgttaagggatcat

SEQ ID NO: 52192 - DNA, 253 bp, Zea mays
gtgaaacagagcttcaactacaacggaggagaatccaagaacgccgtgtgagcttgttagctcaaattgaagatgtacgccgcactagagcgatacaacgttcaagtcggaaaagacatggtggctcgtttggtcaagagcttgtaactgttgcagtcgtcggatatacaaatgctgggaaatctacgcttgtgagtgcactttctgaagctgatttatacagtgatgacaggctgtttgcaacagtagatcc

SEQ ID NO: 52193 - DNA, 254 bp, Zea mays
ctcgagccgcatttattggcaagacagatgaacctctcaattgacaagcgatgcaggatagataatttgtccacaagcatgattgcattatcccaggtgcttatgaaagtgtttaccttatcttcaatatgaagtctgaatgtgtggttgggcctgtctgatctatctagcaggtttagtggtactcgcatcagctaaaccttaaacgtgttgtcttcttaatgtaatataattatacatggttctacgtactt

SEQ ID NO: 52194 - DNA, 254 bp, Zea mays
gtcagatcagtggacaagtaatcttgatctgctcactggacttcgcaaatttgcagatgatgaaaagcttcatgctgagtgggcagcagccaagttatcttgcaagaagcgcctggccaaacatgtgttggatgtgacaggtgttacgattgatccaactagcctttttgatatacagattaagcgcatacatgagtacaagagacagctcctaaacatatggggagctgtttacagatacgagagattaaagg

SEQ ID NO: 52195 - DNA, 269 bp, Zea mays
cacgtacctagtggtggagcatgacaagacgctggccacctacgggatcaacgccgtgtgcactcacctcggctgcgtcgtaccgttgaacggcgctgagaacaagttcatctgcccctgccacggatcccagtacaacaaccagggcaaggtggtccgtggaccggcgcctctgtcgctggccctggttcacgccgacgtcgacgacggcaaggtcctcttcgtcccgtgggtggagaccgacttcaggaccggcgaggacctatggt

SEQ ID NO: 52196 - DNA, 242 bp, Zea mays
acaactgtagtcactcagaatcggcatcgaggaatctccaagaaggtctctctttcgcgcaatgtcatctgctccaagtgcaagggcaagggctctaagtctggtgcttcaatgatgtgccctgggtgccagggctcaggtatgacagtcaccattcgtcagctggggccttccatgatacagcaactgcagcagccttgcaacgagtgcaaggggactgtggagagcattctcgataagga

SEQ ID NO: 52197 - DNA, 129 bp, Zea mays
gggacgtgctgcgggccctgggccagaaccccagcaacgcagaggtgctgcgagtcttgggcaaacccaaacctgaagagatgaattccaagacactggacttcgagatgttcctgcccatcctaaagc

SEQ ID NO: 52198 - DNA, 263 bp, Zea mays
cttcggactaaacttggacaacatgatcttcgtaaaatacaccctaatctgtatgtaattcagactacttatcagatacgaggcatgcacacaataataagggatgctgccacagcaacacatgatttcatatttaaggcgaaccggttaatccaattggttgtcgaacatggtcttggtcatcttcctttccaggaaaagcaggtcatcactccgactgggtctgtttacccttggtgtgagatttcccaaaaggtttgtgg

SEQ ID NO: 52199 - DNA, 238 bp, Zea mays
cgcaattcccccgcgcccgagacgcaaccccgcgccaggagtaagtttgttcttttatcgatattatcgatatggcgagggaggagaatgtctacatggccaagctggctgagcatgccgaaaggtatgaagagatggttgagtatatggagaaggtggctaagactgtagatgtggcagagctcactgttgaggagcgtaacctcttgtcggtcgcataccaagaatgtaattgggg

SEQ ID NO: 52200 - DNA, 252 bp, Zea mays
cagcgagccatcgacacgatcgcgagcgcaagcacgtacgttgtcggaagctccagttagacgaagcaccagtgcctgatcgatggcggcccaagctctcctcaccggccggcagctgctgggccgccccgtgcagtcggccgtctctaggtcgtcggcgaggaaggcgcccttcgtcgtcagggccagctccagccctccagccaagcaaggtgccgacaggcagctgtggttcgcgtccaagcagtccct

SEQ ID NO: 52201 - DNA, 233 bp, Zea mays
atgctcgagccgaatacggctcgagcacttgatgtggccatcaaatagtcagtctgatgatggttgcaacagagccctagatgattgtcagctcctcacatgtgggcaggaagaaaccatccgacgctgggatgttaaatctggcaaatgtcatcatgtttacgagaagtctgccactggtttgatatcatgttccttgttccccgattggaagccattatcttgtttagctg

SEQ ID NO: 52202 - DNA, 259 bp, Zea mays
ctcgcgtctagaattgccgctagatgggggaggtgagcggctcctggtctcttcgatccaatgtaatggtcagctaagaagctacaagtgaatgccgaggagagcagcgatgacttggctaacccaccgaaggtagaggagaagcttggtgctgtccctcatggcctgtccaccgactctgaggttgcccagagggaagccgagtctatctctaggaagactctcaggagctcagccgagaagtttgagttccaagctg

SEQ ID NO: 52203 - DNA, 147 bp, Zea mays
gttttgcatacaacaatttcggatgcaacggaggccttccatcccaggcctttgaatacatcaaatacaatggtggccttgacactgaggcatcttacccttaccaaggtgtcaatggattctgcaagtttaagaatgagaatgttg

SEQ ID NO: 52204 - DNA, 155 bp, Zea mays
ccaggctgttgccaggtgtccttcagaggttcagcactgcaacagcagtagaggagcccatcacgccgtcagtccatgtgaactacacaaagctcctcattaatggcaactttgttgattccgcatccggcaagaccttcccaactctggaccct

SEQ ID NO: 52205 - DNA, 254 bp, Zea mays
gttttgcattcaacaatttcggatgcaacggaggccttccatcccaggcctttgaatacatcaaatacaatggtggccttgacactgaggaatcttacccttaccaaggtgtcaatggaatctgcaagtttaagaatgagaatgttggagtcaaggttttggactcggttaacatcaccctgggtgctgaggatgaactgaaggatgctgttggtctggttcgcccagttagcgttgccttcgaagtgatcact

SEQ ID NO: 52206 - DNA, 246 bp, Zea mays
ccggaaggcaaagcaggagcagaagcgctaccgcaacctgggcaacatcagccggggtggcagtggcggcagtggcaatggtgtggagaagcgcaacggccctgttccgcgcagccgcctggaccccgccaaggtgctgggcaagacgctgtgcccgcgcatccacgaggtgcccctgctgtagccccttctgtgcaagaagatcgcccaggagcggctcacagtcctcctgttcctggaggactg

SEQ ID NO: 52207 - DNA, 221 bp, Zea mays
gttttgcattcaacaatttcggatgcaacggaggcctaccatcccaggcctttgaatacatcaaatacaatggtggccttgacactgaggaatcttacccttaccaaggtgtcaatggaatctgcaagtttaagaatgagaatgttggagtcgaggttttggactcggttaacatcaccccgggtgctgaggatgaactgaaggatgctgttgctcgggtt

SEQ ID NO: 52208 - DNA, 150 bp, Zea mays
ctcgccgtcgacttctgcggttctgccgtctacgcctccaatttggcctctctcccttgcaagtttaagcttcaccttcaaccatgggtaaggagaagtcccacatcaacattgtggtcattggccacgtcgactctggcaagtcgacca

SEQ ID NO: 52209 - DNA, 149 bp, Zea mays
gctgtcggaactgtagcagctctgttcatgtggatcactggtattattaagaggccaaagatttctggagcacagcttgtagccatcctacctctggctattgtccatactatgggcaatctcttcaccaacatgagcctggggaaagt

SEQ ID NO: 52210 - DNA, 250 bp, Zea mays
cgagttccctcccctagccgccgccgccgctcgtctccctgagaggtgccgggatcgaggaactggccgagttctaggtagagaatcggttttgcttgtctcagcacggggtctgctgcgtctggtggtggtgaaggggagaaattcgtgagatctgttccggatcaggcgtgcgagctcgggaatcaggggtttcacacatagcttcgtcgatttgaatttgatgtactaatggagtctaagggtggca

SEQ ID NO: 52211 - DNA, 221 bp, Zea mays
cgcgactcagcgagcgagagcagcacacacgcagctagctaggagcagcagcagagcagcggcgatggcggcctccatgatctcctcgtcagctctggcggtggcgcctcagggcctgccgcccctcggccgccgcgcctcctccttcgccgtcgtctgctccaagaagaagatcaagaccgacaagccctagggatttggggttgccttaccgtcgacgt

SEQ ID NO: 52212 - DNA, 151 bp, Zea mays
aagctcgagcgattcggctcgagcagcggcactggggcgagttcgtcaccccgggcctgatcttcctctacatcgccgggtggctcgggtgggtcggcaggagctacctcatcgccgtcagcggcgagaagaagcccgccatgagggagat

SEQ ID NO: 52213 - DNA, 241 bp, Zea mays
cttggcttcatggtacacaaggtgctagccgccccttggactgggacgccaggatgaggatagcacttgatgctgccaggggattagcatacctccatgaggattcgcagccttgcgtaatccacagggatttcaaagcatctaatatattgcttgagaatgatttccatgctaaagtgtccgattttggtctggcaaaacaggcgccggaaggtcggacgaactatctttctactcgtgt

SEQ ID NO: 52214 - DNA, 267 bp, Zea mays
ggcattatgggtggccatgccgtcaagttgattggatggggaaccagtgatgctggagaagattactggcttctggcaaatcagtggaatagaggctggggcgatgatggatacttcaagatcataaggggcaaaaatgaatgtggcatcgaggagggcgttgttgctggaatgccatccacaaagaatatggttccaaacttcggcggtgccgttggaagagctatagtttaatggttacgtttgcatggcctcaaatgctgttgg

SEQ ID NO: 52215 - DNA, 259 bp, Zea mays
gccatgtgctgcgcgaaggtgagtggctgtcgctgaatgggtcgactggtgaggtgatccttgggaagcagccgctttccccaccagcccttagtggtgatctgggaactttcatggcctgggtggatgatgttagaaagctcaaggtcctggctaacgccgatacccctgatgatgcattgactgcgcgaaacaatggggcacaaggaattggattatgccggacagagcacatgttctttgcttcagacgagaggat

SEQ ID NO: 52216 - DNA, 260 bp, Zea mays
ctcctgcgctgcgccgtccttcacctccgccgccgaatccgagactctgatctcgggttcaccgcagcgcacagagcacccccgactcccgtcccgatccgcgctctcctctacgacgcttcagtcatggcaggaatggcacccgagggttctcagtttgatgctaagcactatgattctaaaatgcaggagctgctgagcactggtgagactgaggagttcttcacttcatatgatgaagtttttgaaagttttgatga

SEQ ID NO: 52217 - DNA, 262 bp, Zea mays
cacagactcagagagaacccaccatggtgctgtctcctgccgacaagaccaacgtcaaggccgcctggggtaaggtcggcgcgcacgctggcgagtatggtgcggaggccctggagaggatgttcctgtccttccccaccaccaagacctacttcccgcacttcgacctgagccacggctctgcccaggttaagggccacggcaagaaggtggccgacgcgctgaccaacgccgtggcgcacgtggacgacatgcccaacgc

SEQ ID NO: 52218 - DNA, 261 bp, Zea mays
gtagattgagtcatgatgccgatgccgatgtgttaatggctgcaattatctcattgggtttgattggtgctggcacaaacaatgccagaatagctgccatgcttcgcaatctttcaagttattactacaaagaagcggctcatctgttttgtgttagaattgctcagggccttgttcacctcggaaagggcttgttgaccctttctccgtaccattctgatagatttcttctttccccgatggcacttggagggcttgtaa

SEQ ID NO: 52219 - DNA, 260 bp, Zea mays
tctcgagccgaatcggctcgagagcgactcagcgagcgagagcagacacacacgcagctagataggagcagcagcagagcaacggcgatggcggcctccatgatctcctcgtcagctctggcggtggcgcctcagggcctgccgcccctcggccgccgcgcctcctccttcgccgtcgtctgctccaagaagaagatcaagaccgagaagccctacgggattgggggtggcctgaccgtcgacgtcgacgccaacgggag

SEQ ID NO: 52220 - DNA, 261 bp, Zea mays
tgttgctgcccgtggtcttgatataccacatgttgatctgattatccattatgaattgccagatgatccagaaacttttgtccatcgttctggacgcactggacgtgctgggaaagcaggaactgcaatcttgatgtttaccagcagccagaaaaggacagttaagtcacttgagcgtgatgttggttgcaactttgagtttataagccctccgtccatagaagaagtgctggagtcatctgctgagcatgtcattgctac

SEQ ID NO: 52221 - DNA, 259 bp, Zea mays
gactcatcgatctacacacatacatagtttcttctactacacgacgacaaacatggggaagcctgcgaagatcggagagtggggtggatacgccggcgatcgtcgggatctgagggctactccggaccggctgatcgaggtgaaggtcacggcggacaacagcagctgcatccgctccatctccttcatctacatcggagccgatggcaaaccgtacgaggaggggccatggggtttcggccatgctggcacggagtac

SEQ ID NO: 52222 - DNA, 257 bp, Zea mays
cttcattgctgataccgtgcatgtgctaaatgaatctatcaagcagaagaagaaaatcctggtcgaaggcggccaagcaactatgctggatattgattttggcacttatccatttgtgacttcttctagcccttcagctggcgggatatgcacaggcctagggattgctccaagggcaattggcgacctgattggagtggtcaaagcttacacatctagagtcggctctggccctttcccaactgaactatttggag

SEQ ID NO: 52223 - DNA, 258 bp, Zea mays
catggtttctgcaagcctgggtgtcctgcaatccgatctcattcagttcaagcccaagctacctacatggaaggttagggcgatctaccaattcgacatggccgtgtacaccaagatcttcctcaagttccccaggaagttctggcctgaagggaaaggaagggagttcttcctctacgccagcagcaggagaggttactacggagtgtggcaggagttcgagaagcagtaccctgacgccaatgtcctcctggtcac

SEQ ID NO: 52224 - DNA, 258 bp, Zea mays
ggcggcccctcattccttcctcccacttctctcgcgctgcgctcgcttacctcgcttcgcattccgttcgagcaggggagcggccgtgagaagggaagggagggaattaaggcaagatgttcatcgagagcttccgcgtcgagagcccccacgtgcggtacggcccgacggagatcgagtcggagtaccggtacgacacgacggagctggtgcacgaggccaaggacggcgcctcccgctgggtcgtcagcaccaagt

SEQ ID NO: 52225 - DNA, 257 bp, Zea mays
tggctctggccctggaaaagctggtcaatgaaaagctgcacaacctgcatggtgtggtaacaaggtgcaatgatcctcagctgacagacttcattcagagtgagttcctcgaggagcaggtggaagccataaacaagatctccaagtatgtcgcccagctgaggagagtgggcaaggggcacggggtgtggcacttcggaggcatgctgcttgaggaagaggcctaaaaagaagaacggacagatgaatgaaggaaa

SEQ ID NO: 52226 - DNA, 260 bp, Zea mays
tgagggactcatgcccagattacatgattaaggctgaggagtgtttaaagcgggagaaggagcgagttggtcactatttgcatattagcagcgaacagaagttattggagaaagtgcaaaatgaattgcttgctcagtatgcaaccccgctgttagagaaggagcattctggatgatctgctttgcatcgcgatgacaaggttgaggatctttctatgatgtagagactcttctccaaaatctcccgtggtctggagcct

SEQ ID NO: 52227 - DNA, 261 bp, Zea mays
gtttcttctactacacgacgacaaacatggggaagcctgcgaagatcggagagtggggtggatacgccggcgatcgtcgggatctgagggctactccggaccggctgatcgaggtgaaggtcacggcggacaacagcagctgcatccgctccatctccttcatctacatcggagccgatggcaaaccgtacgaggaggggccatggggtttcggccatgctggcacggagtacaagattgatctgtgcaggttcgacgaga

SEQ ID NO: 52228 - DNA, 258 bp, Zea mays
atcatggacaactgcgaagagctgatctctgagtggctgagcttcgttaagggtattgttgactctgaggaccttcccctcaatatctctcgtgagactcttcagcagaacaagatcctgaaggtgatcaggaagaaccttgtgaagaagtgtgttgagctcttctttgagattgctgtagaacaaggaggactacaacaagttttacgaggctttctccaagaacctcaagcttggcatccatgaggactcgcagaa

SEQ ID NO: 52229 - DNA, 218 bp, Zea mays
ggcgcgccgtacctcaggaagattgacctcaagacttacaagaactacaaggacctgtcgactgcgcttgagaagatgttcagtggcttcagtactggcaaggatggcttatctgagtaccgcaaggatggtgaatatgttctgacttacgaggacaaggatggagattggatgcttgttggcgatgtaccatgggagatgttcgctgactcttgccg

SEQ ID NO: 52230 - DNA, 254 bp, Zea mays
ggcgttaatatctcccctcccttccctcttctggtctccgccccgctccttgcctccgatccccaattcctccttcggatctcgcattcagcgcagcgcaggtgtgaaggaagggggacgcggaggaagatggggctcgcgttcgggaagctcttcagccggctcttcgccaagaaggagatgcggatcctcatggtcggcctcgacgccgccggtaaaaccaccatcctctacaagctcaagctcggcgagat

SEQ ID NO: 52231 - DNA, 255 bp, Zea mays
ctggtgggtggtgcgcgtgtacgccgtgccgctgctgatcgtgaacgcgtggctggtgctcatcacctacctgcagcacacccacccgtcgctcccccactacgactcgagcgagtgggacaggctgcgcggcgcgctgagccaccatggaccgcgactacggcatcctcaaccgcgtgttccacaacatcacggacacgcacgtcgcgcaccacctcttctccaccatgccgcactaccacgccatggaggcca

SEQ ID NO: 52232 - DNA, 239 bp, Zea mays
ggctcgaggtacccggagaacttctttcttatgaggggcaaccatgagtgcgcatcagtaaatcgcatctatggtttttatgacgagtgcaaacgcagattcagtgtaaagctgtggaaaacattcacagactgttttaactgcttgccagtgtcagcattgatagatgaaaagattctctgtatgcatggtggtctatctccggagttgaacaagcttgagcaaatactcaacctgaa

SEQ ID NO: 52233 - DNA, 251 bp, Zea mays
tgggcatcaaaggagggtgcactggctgaggagaacatgcgtggaatttgctttgaggtatgtgatgtcgttcttcatgctgatgctatccacaggggtggtggtcaggtcattcccactgccaggagggtcatctatgcctctcagctcacggccaagccaaggctgctggagccagtctacctggtggagatccaggccccagaaaatgcacttggtggtatctacggtgttctgaaccagaagagagg

SEQ ID NO: 52234 - DNA, 250 bp, Zea mays
atcgcgagcgcaacacgtacgttgtcggaagctcaagttagaagaagcaccagtgcctgatcgatggcggcccaggctctcctctccggccggcagctgctgggccgccccgtgcagtcggccgtctctaggtcgtcggcgaggaaggcgcccttcgtcgtcagggccagctccagccctccagccaagcaaggtgccgacaggcagctgtggttcgcgtccaagcagtccctctcctacctcgatggca

SEQ ID NO: 52235 - DNA, 256 bp, Zea mays
cagaaaaccctagccgccgccaccgaagcggcctcccaggtaagcaagagcgtccaccccgccgccgccatgaagcgcaatccccgcgtcacgagctctcgccggaagtgccgcaaggcgcacttcacggccccgtcctccgtccgccgcgttctcatgtccgccgggctgtcgacggagctccgccacaagtacaacgtgcgctccatcccgatccgcaaggacgacgaggtgcaggtcgtgcgcggcacctaca

SEQ ID NO: 52236 - DNA, 254 bp, Zea mays
ggagctgcagtcagccctggaggaggccgaggcctccctggagcacgaggagggcaagatcctccgggcccagctggagttcaaccagatcaaggcagagatcgagcggaagctggagagaaggacgaggagatggaacaggccaagcgcaaccatctgcgggtggtggactcgctgcagacctccccgtccgcagagacacgcagtcgcaacgaggccctgagggtgaagaagaagatggaaggagacctcaa

SEQ ID NO: 52237 - DNA, 254 bp, Zea mays
gaagggtatggatgtgtcattcagtggcatattgagctttattgaagctgcggcgattgaaaagcttaaaaataatgagtgcacacctgcggacctatgctactcattgcaggaaactatctttgccatgcttgtcgaaattactgaacgtgccatggcacactgtgattcaaaggacgttcttattgttggtggcgtcggttgttataaacgtttacaggagatgatgaagattatgtgctcagaaagagggg

SEQ ID NO: 52238 - DNA, 251 bp, Zea mays
gtgctgaagctgaacggtggccatgtccaccggacgcacagaggaggccgccgggagcgcggagacggcgtgcgtgacgggcgccggcgggtacatcgcctcgtggctcgtcaagctcctcctctcccgtggctacaccgtccacggcaccgtccgcgacctcagtgacaataaaaccgctcatctgaagcggttagagaatgcttccgaaaacctcaagcttttcaaggctgatgtccttgactacgacg

SEQ ID NO: 52239 - DNA, 250 bp, Zea mays
gccgccatcatgggtcgcatgcatgctcccgggaagggcctgtcccagtcggctttaccctatcgacgcagcgtccccacttggttgaagttgacatctgacgacgtgaaggagcagatttacaaactggccaagaagggccttactccttcacagatcggtgtaatcctgagagattcacatggtgttgcacaagtacgttttgtgacaggcaataaaattttaagaattcttgagtctaagggacttg

SEQ ID NO: 52240 - DNA, 246 bp, Zea mays
gctctgggccctacaactgcaccctgagccggagctgcccagtcgccgcgggaccggggccgttggggtctggacgggggtcgccatgatccgcttcatcctcatccagaaccgggcaggcaagacgcgcctggccaagtggtacatgcagtttgatgatgatgagaaacagaagctgatcgaggaggtgcatgccgtggtcaccgtccgagacgccaaacacaccaactttgtggagttccggaa

SEQ ID NO: 52241 - DNA, 250 bp, Zea mays
gagcagcggcggcggcgcggagagacgcagcggaggtgttcctggtttcggaccccagcggccggatggtgaagtcgtgcctgcagcggatcctcaatagccactgcttcgccagagagaaggaaggggataaacccagcgccaccatccacgccagccgcaccatgccgctcctaagcctgcacagccgcggcggcagcagcagtgagagttccagggtctccctccactgctgtagtaacccgggtcc

SEQ ID NO: 52242 - DNA, 249 bp, Zea mays
ctgaccacctgaggcaagtctttggcaagcagatgggtttgagtgatcaggacattgttgccctctctggtggccacaccttgggaaggtgccacaaagagcggtctggttttgagggggcctggactacgaaccctttggtctttgacaactcttacttcaaggaacttctgagtggcgacaaggagggccttcttcagctcccaagtgacaaagccctgctgagcgagcctgtcttccgccctcttg

SEQ ID NO: 52243 - DNA, 252 bp, Zea mays
tgcttgtcggtcctcctgggacgggtaaaactttgcttgccaaggcaattgcaggagaggctggcgtgccatttttctcaatttcaggttctgaatttgtggagatgtttgttggtgttggagcttccagagttcgtgaccttttcaagaaggccaaggagaatgctccttgcatagtgtttgttgatgaaattgatgctgttggaaggcaaagaggtacaggtattggtggtggaaatgatgaaagggagc

SEQ ID NO: 52244 - DNA, 271 bp, Zea mays; identical to SEQ ID NO: 3279

SEQ ID NO: 52245 - DNA, 269 bp, Zea mays
atcgagccgtgaatgcttaagaaaatatggaaatgcaaatgtctggaagtattttacagacttgtttgattttttgcctctcacagctcttatagaaaatcaggtcttctgtcttcatggtggcctctctccgtcattggacacgttggataatattcgttctcttgatcgcgtacaggaggtcttcatcagagcaatgagtgggaattgcagaatcctgccaaattagttctcagatccaagacatgttcaatcctattcagaagctt

SEQ ID NO: 52246 - DNA, 269 bp, Zea mays
gctctgttgaagtaccgattaccattgaaggagataattgtggacttctacaatgagttgaagggcattacgtctggctatgctacttttgactacgaagattcagaataccaacaagctgatctagttaagatggatatccttctcaatggtcaacctgttgatgctatggcaactatagtgcataaccagaaggctcagcgggttggaaaggatttagtggagaagctcaagaaatttatagaaaggcaaatgtttgagatcaccat

SEQ ID NO: 52247 - DNA, 264 bp, Zea mays
gcacgaccgcgatttcgatggccagggcgccctcgattccgcgggaggcgtcgttggcgcggtctaccgccgagcggatgagttgggcgttcaccggtgtggtgaggatggtgcacctgacgcctcgggcagcgaagagcgcggccatgtcggcgatcgggatgaggtgccccggcgcgaggaacgggaagaagaggatgtgcagcggctcatctttgatggccatggctggctgcgcgacggcggctgcgcactgcactcttg

SEQ ID NO: 52248 - DNA, 257 bp, Zea mays
caacaatttcggatgcaacggaggccttccatcccaggcctttgaatacatcaaataaagaggtggccttgacactgaggaatcttacccttaccaaggtgtcaatggaatctgcaagtttaagaatgagaatgttggagtcaaggttttggactcggttaacatcaccctgggtgctgaggatgaactgaaagatgctgttggtctggttcgcccagttagtgttgccttcgaggtgatcactggtttcaggctgt

SEQ ID NO: 52249 - DNA, 268 bp, Zea mays
gaagcccaaggatggacgcaccacggacgcctactgtgtggccaaatatggaccaaagtgggtgcgcaccaggactattcttgacacgctgaatctcacaatggaatgaccagtatatctgggaggtctttgatccttgctccgtgatcagagtggtggtgtttgacaatggtcaaattgggagcaagaatggcggtggcccaggtcatcggattgtggaggtcacgatacggctctcaacactggcctacggacagagtgtacacgc

SEQ ID NO: 52250 - DNA, 266 bp, Zea mays
gctgatgcttccccggtctcagctatcgggtttgagggctatgagaagcgccttgagatcacattctctgaggcacctgtctttgtggaccctcatgggcgtggtttgcgtgccctctccagggcccagattgactctgttctggatcttgcacggtgcacaattgtgtctgagctctccaacaaggatttcgactcatatgtcctttctgagtcaagcttgtttatctatcctctgaagattgtcatcaagacctgtggcactac

SEQ ID NO: 52251 - DNA, 268 bp, Zea mays
gtccatcggcgtcatcgcggatggcgaggacaagaacggcaagccgcacaagctcaggctctactccatcgccagcagcgccctcggagatttcggcgactccaagacggtgtcgctgtgcgtgaagaggctggtctacaccaacgatcagggggaggtcgtcaaaggagtctgctcgaacttcctctgtgacttgaagccaggcgctgaggtgaagatcacagggccagtgggcaaggagatgctcatgcccaaagaccccaacgca

SEQ ID NO: 52252 - DNA, 226 bp, Zea mays
ctatagcaaccggtccaacactttcacgctcaggcgctcagctctagcaatggctgcctccaccatggcgatctcctccacggcgatggccggtacccccatcaaggtgggctccttcggcgagggccgcatcaccatgcgcaagaccgtgggcaagctcaaggtggcggcttccggcagcccctggtagggcccagaccgggtcaagtacctcggcccttctccg

SEQ ID NO: 52253 - DNA, 269 bp, Zea mays
acgcggagtttgagataattcagattcttatcaaggagtgcaataagattgaaggccacgtccagcagtgcaagcgactggtcctgcaatacattcccctcatcctggtgaacggcgagaagttcctcgagaagaacgatgtttgcgcgctcgtacaggcttgtccagccacccataagaagactttcagctcagtcttgaagggagccttgatgctgagtgacgcttgaaggttggagaagaacacgcaaagcgtttagcagtggttg

SEQ ID NO: 52254 - DNA, 265 bp, Zea mays
cgcgacggaaaccccaaacccaacctcatctcttttctcggcctctaccgccccctcgatcggtcggccggtcagctatgacgccgggaagctcggccgccggatccggcgtcgtcgttcctcggaacttcaggctcctagaagagcttgaacgtggagagaagggcattggagatgggacagtgagctatggaatggatgacgcagatgacatctacatgcgatcatggactggcactattattggccctcataataccgtcca

SEQ ID NO: 52255 - DNA, 263 bp, Zea mays
ccggggttcaacataatgcactcgctgaacgcgtcggaggaggccgacggcgaggagctagtgctggtggcgcccaacgtcctgtccctggagcacgcgctggagcgcatggagctcgtgcactcctgtgtcgagaaggtacgcatcaacctgcgcacgggtgccgtgtcgcgcacccctctctctgcagagaacctcgacttcggcgtaatccatccgggataccttggccggcgcaaccggtacgggtacctcggcatcgg

SEQ ID NO: 52256 - DNA, 254 bp, Zea mays
cgtcgatctacacacatacatagtttcttctactacacgacgacaaacatggggaagcctgcgaagatcggagagtggggtggatacgccggcgatcgtcgggatctgagggctactccggaccggctgaccgaggtgaaggtcacggcggacaacagcagctgcatccgctccatctccttcatctacatcggagccgatggcaagccgtacgaggaggggccatggggtttcggcaatgctggcacggagta

SEQ ID NO: 52257 - DNA, 263 bp, Zea mays
atccagctgtgaaggaagccttcgatgttgcatatgacaatatatatgccttccatgtttcacaaaaaatacctgagaagacagttgaaaatatgaaaggcgtaagatgtaagagaataactagatgcattggttctgttgggctgtatgtcccaggtggcactgcagtcttgccttcaactgcattgatgcttgctgtgcctgcacagattgctggatgcaaaactattgttcttgccacaccacctagccgtgatggcagc

SEQ ID NO: 52258 - DNA, 268 bp, Zea mays
  unsure (1)..(268): unsure at all n locations
ccgacgcctgactccaaaccctttcgcctccgccgccgccgccgccgcctgatagctccagcgccctcgtggtcgngtgcccggctgccgtcctcccgctacgagctaggcatctccttcgccgatccagcatgggtaagacacgtggtatgggagctgggcgcaagctcaagacccacaggaggaaccagaggtgggctgacaaagcctacaagaagagccatcttggcaacgagtggaagataccctttgctggatcatctcacgc

SEQ ID NO: 52259 - DNA, 247 bp, Zea mays
gttgtttctcttggggcagctgtgcagggtggggttttggcacgagacgtgaaagatgtagttcttctggatgttactccattatctcttggcatggagacattgggaggagtgatgacaaagattgtccccaggaataccatactgccaggctcaaaatcggacgtattctcaacagctgcagatggacagacgagcgttgagattagtgttctccagggagaaagagagtttgtcagggacaaca

SEQ ID NO: 52260 - DNA, 262 bp, Zea mays
tgcattaaaaaatacatgccttgcataccttgcgtcattgaatgagccagatttcgttgagcttgcactgcatgagtacaagtctgcgactaacatgacagagcagtttgctgcattagcagcattatcccaaaatccaggccaagttcgtgatgatgccctcttggatttctataacaagtggcagcatgaatacttggttgtaagcaagtggtttgctcttcaagctacttcagagattcctggaaatgttgcaaatgtt

SEQ ID NO: 52261 - DNA, 263 bp, Zea mays
ctgcgaagatcggagagtggggtggatacgccggcgatcgtcgggatctgagggctactccggaccggctgaccgaggtgaaggtcacggcggacaacagcagctgcatccgctccatctccttcatctacatcggagccgatggcaagccgtacgaggaggggccatggggtttcggccatgctggcacggagtacaagattgatctgtgcaggttcgacgagagcttgacggagatctccgggaccacgggcccagcctac

SEQ ID NO: 52262 - DNA, 258 bp, Zea mays
gcgagcggcacgtcggcggcgatcggagaagatggtgcgcaaggcgaaggttgagttcgacgagcagccgccggataacttcgacccgaagaacccgtatgccgacccggtggcgatgctcgagtaccgggaacacctggtgcgagagaagtggatccagatcgagaccgccaagatcatccgggagcgcctccgctggtgctaccgcatcgacggcatcaaccaccaccagaagtgccgccacctcgtcgaccaata

SEQ ID NO: 52263 - DNA, 263 bp, Zea mays
aaacggaccagttttggagtttactgggaggcaaatctgagtactcaggccaaaaaatggtgcgagaactcgaaagtgacccccatctattctcatgcatcctgtcgaaaggcaatttgaaggtcaaagaaatacaccactttactcaagatgatctaatgacagaagatgttttcattctggactgtcacacgagcatatttgtttgggatggtcagcaggtggatgttaaaggcaggttacaagctatggatgctggggag

SEQ ID NO: 52264 - DNA, 266 bp, Zea mays
cgttgaatgtgtttttagtggccatcggttcaaactaacaattcccaaggagacttgtagtatcgccttctcattatctggtgtccgttgtcctggtaaaggcgagccatactcagacgaagctattgctttgatgaggagaaggatacttcaacgagatgtggagatagaggttgaagcagttgataggacaggaacgttcataggttctttgtgggagtccaagaccaacatgggctctgtgcttctggaagctggacttgcca

SEQ ID NO: 52265 - DNA, 262 bp, Zea mays
ccgggacaccagcaacccccaacagcgccactgtccagtgcgcgcgtcaagcttgcttagctagccgccatggcctccctcgccgccgtctccgtgaagcccgtggccatcaagggtctcgccggcagctccatctccggaaggaagctcgccgtcgccaggccgtcggcccgctccatccgcaggccccgcgcagccgccgtggtggccaagtacggcgacaagagcgtctactttgacctcgacgacatcggcaacacca

SEQ ID NO: 52266 - DNA, 258 bp, Zea mays
cacatacatagtttcttctactacacgacgacaaacatggggaagcctgcgaagatcggagagtggggtggatacgccggcgatcgtcgggatctgagggctactccggaccggctgatcgaggtgaaggtcacggcggacaacagcagctgcatccgctccatctccttcatctacatcggagccgatggcaaaccgtacgaagaggggccatggggtttcggccatgctggcacggagtacaagattgatctgtgc

SEQ ID NO: 52267 - DNA, 261 bp, Zea mays
atggtgatgacatcatatacagagactacgtagacatcagtgttgctgttggcacttccaagggccttgtggttcctgttatccgagatgctgataccatgaactttgctgacattgagaaagggataaacaaccttgcaaagaaagcaactgagggggcgctctcaattgatgacatggcaggaggaacattcaccatctccaacggtggtgtctatggaagcctcctcagcacacctatcatcaaccctccacagtcgt

SEQ ID NO: 52268 - DNA, 259 bp, Zea mays
tggaagtggaagtcagggagatgaaggaactagccaacttcttgggaaaaggaaaatacaagatctggttgcacagtaagatcccttaggcaaggttgacccagaagtggaggatttacttctagaaatcgctgatgacttcattggctcggtgactgcatttgcgtgtaccttggcaaagcacaagaaatcatcagttgtcgaagccaaggatgtgtcgctgcacttagaaaaaaattggaatttatctattcctggt

SEQ ID NO: 52269 - DNA, 259 bp, Zea mays
gcaccatctaccagcgactcagcgagcgagagcagcacacactgcacgcagctagctaggagcagcagcagcggcggcgatggcggcctccatgatctcctcgtcagctctggcggtggcgcctcagggcctgccgcccctcggccgccgcgcctcctccttcgccgtcgtctgctccaagaagaagatcaagaccgacaagccctacgggattgggggtggcctgaccgtcgacgtcgacgccaacgggagaaagggc

SEQ ID NO: 52270 - DNA, 247 bp, Zea mays
gcaaaagcaccgtgcttttctaaaagatcatgtagttttcaaagaggccatacatattgagaatggttctgttatttcgaagattcatcaaacatacagaataggctatcttaaggatgttattctgccacgaatattggatgatgccactctagcaagtatttaacacaatgatacattcaaataatgcttctgttatttccatgctaaaggatgatgcaccctttataagtcaactatttgctag

SEQ ID NO: 52271 - DNA, 260 bp, Zea mays
gcgggaggtggcggtgaagcggctcttcttcaacacgcggcagtgggcggagcagttcttcaacgaggtgaagctggtgagccaggtgcagcacaagaacctggtcaagctgctgggctgcagcgtggaggggcccgagagcctgctcgtctacgagtacctctgcaacaccagcctcgaccactacctcttcgacgcgttcaagaagaacgcgctggactgggaccggaggttcgagatcgtgctgggcacggcggagg

SEQ ID NO: 52272 - DNA, 258 bp, Zea mays
ccacgacgggctcctggtctgggactccatcaggcagtgggcgtccgagtacgtcaacgtctactacaagtccgacgaggccgtggccgccgaccccgagctgagggcgttctgggacgaggtgcgcaacgtggggcacggcgacaagaaggacgagccgtggtggcccgtgctggacacccgcgacagcctggtggagacgctgaccaccatcatgtgggtcacctccggccaccactcggccgtcaacttcggcca

SEQ ID NO: 52273 - DNA, 255 bp, Zea mays
ggcgcaccgtcgtcagcatccctaacggcccctccgagctcgccgtcaaggaggccgcgtgggggctcgcacgctacgccgccatctcacaggacaacgggcttgtgccgatcgtggagccggagatcctgctggacggcgagcacggcatcgagcgcacgttcgaggtggcgcagaaggtgtgggccgaaaccttctacgccatggcggagaacaacgtcatgttcgagggcatcctgctgaagccgtccatgg

SEQ ID NO: 52274 - DNA, 315 bp, Zea mays
acaacccaccgcgatgaagtcggctcgaggacgaactcggtgaactctttctcctcgcgcacaccggagcacaatcaaggattccagtccagtcctgccaatggagtgcgttttgggcttggttggccgcgacttcgcggtggtggcggccgacacctccgccgtgcagagtatcctcgtccacaagactgacgaggacaaagtaatggtcctcgactcgcacaagctgttgggcgcttcaggggagcctggtgaccgggtgcagtttacggagttcatacagaagaacctccacctgtaccagttccgcaacac

SEQ ID NO: 52275 - DNA, 279 bp, Zea mays
ggcacattgtgaaggatgttccgaacagtttgctgaagcacatcattctcgagaacaatgaaaacaagccagtgacaaacagcagagatacacatgaggtgaagcttgagcaaggccttcaagtgcttaaggttttcaaggatcatgtgtgcaagacatctatactggatgactttggcttttacgataatcgtgagaagatgatgcaatataggaaagcaaaacagcagcagtcactgaaaaaggtcatcgatgtgaaggtgcctaacgccaccgacg

SEQ ID NO: 52276 - DNA, 274 bp, Zea mays
cgatcgcgagcgcacgcacgtaagcacgttgtcggaagctcaagttagaagaagcaccagtgcctgatcgatggcggcccaggctctcctctccggccggcagctgctgggccgccccgtgcagtcggccgtctctaggtcgtcggcgaggaaggcgcccttcgtcgtcagggccagctccagccctccagccaagcaaggtgccgacaggcagctgtggttcgcgtccaagcagtccctctcctacctcgatggcacgctgcccggcgactat

SEQ ID NO: 52277 - DNA, 281 bp, Zea mays
gtcgtctgctgcggactccgcctccagtttggtctgtttcttgcaagttgatcttgtggtagttcccccaactgtcaccatgcagaacgaggagggtaagactgtggacctctatgtccccaggaagtgctcggccacaaacaggatcatcactgccaaggaccatgcctctgtccagatcaacattggccacttggatgcgaatggcctgtatgatggtcacttcacaacgtttgctctctctgggtttgtccgtgctcagggcgacgcagacagctcct

SEQ ID NO: 52278 - DNA, 275 bp, Zea mays
cagatcttcgtgtccaaccatttgattccagacgatatggagttccaatcaggagatgtgccgaactacacaacttctgatggatcggtgaaaattcaaaaagagagtgaggtgcggctgaagattattggtactcgtgtcgatgctacagaaattttttgcattggcacaataaaggatgattttctgggtgttatcagcgatcctggtgcggcagtgtaaatggtctaagaagcgagattgtactccattgttctgacttctgagtactatcg

SEQ ID NO: 52279 - DNA, 275 bp, Zea mays
attcggactaaacttggacaacatgatcttcgtaaaatacaccctaatctgtatgtaattcagactacttatcagatacgaggcatgcacacaataataagggatgctgccacagcaacacatgatttcatattttatgctgatcggttgattcgattggttgtcgaacatggtcttggtcatcttcctttccaggaaaagcaggtcatcactccgactgggtctgtttacactggtgtggagttctccaaaaggttgtgtggtatctcagtgat

SEQ ID NO: 52280 - DNA, 273 bp, Zea mays
ctcgagccgtgcgtacagaataaattcagatccacatgacataatggcagaggtctacaaaaatggtcctgtagaagttgctttcacagtttacgaggatttcgcacactacaaatctggagtgtacaagcacatcaccggtggcattatgggtggccatgccgtcaagttgattggatggggaaccagtgatgctggagaggattactggcttctggcaaatcagtggaatagaggctggggcgatgatggatacttcaagatcataagggg

SEQ ID NO: 52281 - DNA, 271 bp, Zea mays
accgcaagcttctcactggccgcaagcaaaccgaacgaacccaaccgaagcgagagctgagcaaggcagaggcggcgtgaccggcgatggagcggctgcagcggatctttggcgcctccggcatggggcagccgccgacggactcgccgctgctcgattcctccgagcaggtctacatctcctccctagcgcttctcaagatgctcaagcacgggagggctggggtgcccatggacgtcatgggcctcatgctcggcgagttcgtcgacga

SEQ ID NO: 52282 - DNA, 268 bp, Zea mays
cgttcaagaaaccaaggcgtccttatgagaaggagcgtcttgatgctgaactgaagctggttggtgagtatgggctgaggtgcaagcgtgagtttggagggtccagtatgcactgagcaggatccgtaatgctgcaaggcacttgctcacgcttgacgagaagaacccccgtcgtatctttgagggtgaggcacttcttcgccgcatgaaccgctatgggctgcttgctgagggtcagaacaagcttgattatgttcttgccctcacc

SEQ ID NO: 52283 - DNA, 279 bp, Zea mays
ttgcaatcacaacgaacagaagctctcgatctcaccgacaccgaggaagaagagcatcaatggcgtccgagcagggagtcgtgatcgcgtgccacagcaccgctgagttcgacgcccacatgaccaaggcccacgaagccggcaagctggtggtcatcgacttcactgccgcctggtgcggtccatgccgcgccatcgccccactgttcgtcgaacacgccaagaagttcactcaggtcgtcttcctgaaggtggacgtggacgaagtgaaggaagtca

SEQ ID NO: 52284 - DNA, 272 bp, Zea mays
cgtcgatctacacacatacatagtttcttctactacacgacgacaaacatggggaagcctgcgaagatcggagagtggggtggatacgccggcgatcgtcgggatctgagggctactccggaccggctgaccgaggtgaaggtcacggcggacaacagcagctgcatccgctccatctccttcatctacatcggagccgatggcaagccgtacgaggaggggccatggggtttcggccatgctggcacggagtacaagattgatctgtgcag

SEQ ID NO: 52285 - DNA, 272 bp, Zea mays
ggctacagctcccgtctctccgccgcttgcttggaaaacgaagaaaccctcctccaccaacccaatccagctacatccgtctgggtgaactccagggccaggagcagttcgccgccttcgttcgcatcacctacgcggttcgatccaactggcaggaaggaacgtgatggccaagacgagctcgttcaagctggagcacccccttgagaagaggcagtctgaggctaatcggatcagagagaagtaccctgacagaattccagtgattgttg

SEQ ID NO: 52286 - DNA, 270 bp, Zea mays
cagagagctgcagctctgtaggaagtgacaatctgtttttgttagatagtggtgctcaatacattgatggaactactgacataaccagaacagtgcattttggtgaggcttccccaaggcaaaaggaatgcttcaccagagttttgcagggccatatagctctcgatcaagcagtgttccctgagagaactccaggctttgtgctagatgttctggcacggtcatctctgtggaagattggactggattatagacatggcacaggccatg

SEQ ID NO: 52287 - DNA, 266 bp, Zea mays
ccgggacaccagcaacccccaacagcgccactgtccagtgcgcgcgtcaagcttgcttagctagccgccatggcctccctcgccgccgtctccgtgaagcccgtggccatcaagggtctcgccggcagctccatctccggaaggaagctcgccgtcgccaggccgtcggcccgctccatccgcaggccccgcgcagccgccgtggtggccaagtacggcgacaagagcgtctactttgacctcgacgacatcggcaacaccaccgg

SEQ ID NO: 52288 - DNA, 268 bp, Zea mays
tgaagaacaaggttgcaatgatacacaaggaagccgaagagaagcgagcgatggtggaggcaaaacgcggtgaggaggtcctgaaggccgaggagatggctgccaagtaccgggccaccggccacgctcctaagaagctcatcggttgcttcggagcctaagaaaccttccaagtcagaccgagcagaaagtgaaaaacgtcagccagtgattgcttggtcctctcgctctatcaagtgtgtagtgtgtcttcgaaagtttgtaaagc

SEQ ID NO: 52289 - DNA, 267 bp, Zea mays
ctcgagccgcgcctgtccactttccccgtgcttctccgccgtcgaggccgcgtcccagtgactagagaccacgactcagatggccagccgctgggtccggcccgaggtgtacccgctgttcgcggcaacgggcgtggccgtcggcatctgcggatttcagctcttccggaacatcaccggcaacccggaagtcagggtaaacaaggcagggagggcagctggtgtgcttgagaaccatgaggaggggaggcgttacgccatgcatgg

SEQ ID NO: 52290 - DNA, 268 bp, Zea mays
ccggttagtgctcatcttgaatggaatcttgatggacttctggagaaggtatgggaatacttggatttggttaggatatacacaaaacctaaagggctgaacccagattatgaggatcctgttatcgtatcatctaagaagaaaaccgtggaagatttctgcgacagaatccacaaggacatggtcaaacaatttaaatacgctctggtatggggttccagtgtgaaacataagcctcagagagttggcaaggagcatgagcttgacg

SEQ ID NO: 52291 - DNA, 265 bp, Zea mays
gaaggacccggcgaacgcgcagaggcacaagatcgaggccggcgtggcaacggcggcggcgctgggcgcggcggctacgcgtaccacgagcaccgcgagcagaaggaggcccactacgagagcaggcagcaggagcacagggtgccgcacgggcacgggcacggctactcctactactgcgcctgaaacgactgatcatcccatcgatcgagatatgcatgcagaactcgatatatatacggcccctagcgccgtacacgtgcgt

SEQ ID NO: 52292 - DNA, 265 bp, Zea mays
atcccaaatcctcagcacgatacgatccgccgaattaagttcctgcacgtacgcacgcaccgggacaccagcaacccccaacagcgccactgtccagtgcgcgcgtcaagcttgcttagctagccgccatggcctccctcgccgccgtctccgtgaagcccgtggccatcaagggtctcgccggcagctccatctccggaaggaagctcgccgtcgccaggccgtcggcccgctccatccgcaggccccgcgcagcgccgtggtg

SEQ ID NO: 52293 - DNA, 274 bp, Zea mays
ggaagtggacgtcacggatgtgaaggaactagccaacttcttgggaaaaggacaatacaagatctggttgcacagatagatcccttaggcaaggttgacccagaagtggaggatttacttctagaaatcgctgatgacttcattggctcggtgactgcatttgcgtgtaccttggcaaagcacaggaaatcatcagttgtcgaagccaaggatgtgttgctgcacttagaaaaaaattggactttatctattcctggtttctcaataggggata

SEQ ID NO: 52294 - DNA, 269 bp, Zea mays
gaaggacccggcgaacgcgcagaggcacaagatcgaggccggcgtggcaacggcggcggcgctgggcgcggcggctacgcgtaccacgagcaccgcgagcagaaggaggcccactacgagagcaggcagcaggagcacagggtgccgcacgggcacgggcacggctactcctactactgcgactgaaacgactgatcatcccatcgatcgagatatgcatgcagaactcgatatatatacggcccctagcgccgtacacgtgcgtgcgt

SEQ ID NO: 52295 - DNA, 267 bp, Zea mays
atcccaaatcctcagcacgatacgatccgccgaattaagttcctgcacgtacgcacgcaccgggacaccagcaacccccaacagcgccactgtccagtgcgcgcgtcaagcttgcttagctagccgccatggcctccctcgccgccgtctccgtgaagcccgtggccatcaagggtctcgccggcagctccatctccggaaggaagctcgccgtcgccaggccgtcggcccgctccatccgcaggccccgcgcagcgccgtggtggc

SEQ ID NO: 52296 - DNA, 264 bp, Zea mays
gatccacatcttcccgagcgagttcttggttgacctcttcctcttcggaccacctccaaggctcttggtgtagcttgccactctcaccaatcaagttttcatgtctgatctcgacattcagatcccaactgccttcgatcccttcgctgaggccaatgctggggactctggtgcggcagcagggtcaaaggactacgtacacgtgcgcatccagcagcgtaatggtcgcaagagcctgactaccgtccagggattgaagaagga

SEQ ID NO: 52297 - DNA, 271 bp, Zea mays
ctggcgaggcaaaagcgcaaacgcgaccacagacagagcgcgcttcaaggcctttttttttttgagataacaaggaggagaggtggagatggcggtcacgatcacctgggtgaaggcgaggcagatcttcgacagccgcggcaaccccaccgtcgaggtggacgtgggcctcagcgacggcagctacgcgaggggggccgtacccagcggcgcatccactggaatatatgaggccttggagttgagggatggaggatctgattatcttggc

SEQ ID NO: 52298 - DNA, 263 bp, Zea mays
aagatattgagtttgactgacacatggaaagtggcttttggaggtccatctggaaaatatcgacagtatcatgcggcttaccaagaactcagggctgctggtgttgattttccgcctcgtgaggaaaattcagtcccgttgtttacaccacctcagactcaaccgttaagacatccacatctatatacacctccaggtcaaagctatgaagatgctgctatacaagcttctcttcagtctgcgcctcctgcatctgccctcag

SEQ ID NO: 52299 - DNA, 261 bp, Zea mays
cttctctctctgctcctccgcctccgcctgatccatccaagacagggatcgccatgtcggactcggaggagcaccacttcgaatcgaaggccgacgctggggcgtccaagacctacccgcagcaggctggcaccgtccgtaagaacggcttcatcgtcatcaagaaccgtccctgcaaggttgtggaggtttctacctccaagactggtaagcatggccacgccaaatgccactttgtcgccatagacatattcaatggga

SEQ ID NO: 52300 - DNA, 259 bp, Zea mays
ggatggcccaaagcctatctcgattgttggttcaactggttccataggaacacagacattggacattgttgcggagaatcctgataagttcagagttgttgctcttgctgctggatccaatgtcacgcttctagctgatcaggtcaaaacattcaaacctaagttggttgctgtaagaaacgaatcattagttgatgaattgaaagaagccttggctgattgcgaagagaagccagaaattattcctggggagcaaggt

SEQ ID NO: 52301 - DNA, 253 bp, Zea mays
aaaacttccttccttactgttctgttcaagtgccaagcgttgtctgcatgaaattagtgttttaagtgtttctattaacattttatgtttctaggtatcattgaggagttggttaagaggcacaggcaaattgatgcagttcatttcatacaagctttcgggctttcagagacattcccccctgcaccactgctgaagacctatattgaggagtttaaggatacaattgaaaataatggggatgcaactgtgt

SEQ ID NO: 52302 - DNA, 260 bp, Zea mays
tgagcagaatgttaatttcttagatcactaccttgatgttcctattgacctatccaaggttctatttgtttgcacagcaaacgtaatagagatgataccaaatccattactggataggatggagatcattgctatagctgggtatataactgatgagaagatgcatattgctcgggactatctagagaagaatacaagacaggcttgtggcattaagcctgagcaggttgaagttacagatactgctcttcttgctctca

SEQ ID NO: 52303 - DNA, 241 bp, Zea mays
ttatggtgggagtccagcagtgagctaattgctttcaagactgaaatgaagaaggtgttcaaaatgacagacttagggacactatcatactatctgggtatagaagtgcaccaaggagacaaagggatcagcctttgtcaaacttcctatgtgaaaaagttgctagaaaaggtcggactgagccagtgcaacccatgttcaactccaatggaagctaagctgaaactgtccaaggacagtg

SEQ ID NO: 52304 - DNA, 271 bp, Zea mays
ggggacggtgggggcgctcagcctctcggtggtgtcctccgtctccatcgtcatctgcaacaaggctctcatgagctcccttggcttcaacttcgccactactttgacaagctggcatctcctggttacattctgttctctccatgtggcattatgtatgaagctgtttgagcacaaacctttcgatgcaaggaccgtcatgggattcggagtgctcaatggcatatctattggacttcttaacttgagtctgggtttcaattctgttggt

SEQ ID NO: 52305 - DNA, 278 bp, Zea mays
gtcgcatctcatcccactaccacgcatctcgtcgtccgccgattcgatccggttcttccaacccaggggctgtgatggcgacgaagaggagcgtgggcaccctcggcgaggcggatctgaaggggaagaaggtgttcgtgcgcgccgacctcaacgtccctctcaacgacgcccagaagatcaccgacgacacccgcatccgcgcctccgtccccaccatcaagttcctcctcgagaagggcgccaaggtcatcctcgccagctcactgggtcgtcca

SEQ ID NO: 52306 - DNA, 275 bp, Zea mays
ttcactggaagctgtggaacagcgctggaccatggtgtcacggtcgtcggctacgggacagagaacggcaaggactactggatcgtgaagaactcatggggcagcagctggggcgagtccgggtacgtgaggatggagcgcaacatcaaggcgtccagcggcaagtgcggtatcgcggttgagccgtcatacccgttgaaggagggcgccaacccgccgaaccctggccccagcccgccgtccccgaccccggcgcccgccgtgtgcgacaacta

SEQ ID NO: 52307 - DNA, 273 bp, Zea mays
caaaacttatgactatgttggacgaggtggataggaagtacaaacactattatcatcagatgcaacttgtaatgtcatcgtttaatatggttgctggtgctggagctgccaagccttatactgcagttgccctccagacaatctcacggcatttccgatgtctaaaggatgctatcaatgatcaaattagtgttatccggaagaaacttggagaggatgacaatacatccggcaaagagggcaaactaacccgccttcgttatattgatcagc

SEQ ID NO: 52308 - DNA, 268 bp, Zea mays
gccaggaggccatcgagaacctcggcgcggacgagttcctcatcagccgggacgaggaccagatgaaggcggcgacggggaccatggacggcatcatcgacacggtgtcggcgtggcacccgatcacgccgctgctggcgctgctgaagccgctggggcagatggtggtcgtgggcgcgccgagcaagccgctcgagctgccggcctacgccatcgtgccgggcgggaagggcgtggctgggaacaatgtcggcagcgtcagggactg

SEQ ID NO: 52309 - DNA, 271 bp, Zea mays
ccagactccattctttattcatatgggatttctacaatattcagtgtgatacctgccttctgtaaaaaggagatatcatagtcgctgatgagggtgttcactgggcagtgcaaaatggtctccatctatcaagaagcactgtggtgtacttcaagcacaatgatatggcttcacttgcaagcactttggaaaaacttactcgtggaaataaacgtgctgaaaagattagacgctacattgttgtagaatccatctaccagaattctggcca

SEQ ID NO: 52310 - DNA, 203 bp, Zea mays
ccggttagtgctcatcttgaatggaatcttgatggacttctggagaaggtatgggaatacttggatttggttaggatatacacaaaacctaaagggctgaacccagattatgaggatcctgttatcgtatcatctaagaagaaaaccgtggaagatttctgcgacagaatccacaaggacatggtcaaccaattaaaatacgc

SEQ ID NO: 52311 - DNA, 280 bp, Zea mays
cgaccgaggggacaacgagggttttgggacggacggagggagatttgaaggaggcatcggatggccggagaccagaccatgaggccggtgttctgcggcaacttcgaccacgacacccgccagtacgacctcgagcgcctcttctccaagtacgggcccatcagccggatcgatatgaagttaggctatgctttcatttactttgaagatgagcgtgacgcagaggatgctataaggcgtctcgacaatgtgtcttttgggtacaaccggcgcaggctct

SEQ ID NO: 52312 - DNA, 274 bp, Zea mays
cgaccgaggggacaacgagggttttgggacggacggagggagatttgaaggaggcagcggagggccggagaccagaccatgaggccggtgttctccggcaacttcgaccacgacacccgccagtacgacctcgagcgcctcttctccaagtacgggcccatcagccggatcgacatgaagttaggctatgctttcatttactttgaagatgagcgtgacgcagaggatgctataaggcgtctcgacaatgtgtcttttggttacaaccggcgca

SEQ ID NO: 52313 - DNA, 274 bp, Zea mays
cgcagattactctggaagtcttgtattgcagatgcccatccgagatgcatgccatgttactgttcagagaagtgaccctaccaaacagaagcaatggaagcatacacaggctagacaactagcaaatggaggagcagtaccagtgttacaaattgtatcctttggttctgaattaagtaatcgtgcacctacgtttgacatggacctttctgattttatggatggcgacaaaccaatatcttatgataatgtgaaggaatacttttctcgggat

SEQ ID NO: 52314 - DNA, 268 bp, Zea mays
ccatcctgctggacaaggacaggagcagctcgacaatcctctcgctgaaaaaggctggtcctgagatcactgaacttttaacgcaatgctctatcggcattgctggaactggactggctattctcctgtcagttatgtgctagatgtctaatggcatgaggactccttttgcttctgctcgactgcttagcaccatcgtcggattcggactcttctggctatcctgggcagtcaatggattgcgtgacactatcgcaatcattttcag

SEQ ID NO: 52315 - DNA, 211 bp, Zea mays
ccccgcgtccgctagctctagccgccgtccgccgacttcatcgtcgccgtcgtctagacctcttcacgcactggaaaggttaaagtccgacatcaatggcgaagatcatcctgatctcatcatgtgccggaagcagcctggcatcgcgattggccgcctttgcgagatatgtgatggcaagtgtgttgtctgcgactcgtacgtgcgccca

SEQ ID NO: 52316 - DNA, 270 bp, Zea mays
gtggatagcagcagcgcccggaagaagcagcggggtaatgatggcaagaaaaggggtggtggctttacataactatgcagtctttccccggcacttcaagagtttgtcggcgcctctgagttagccaggacagaggttgtcaagaagctttgggcatatattcgagaaaataatctgcaagaccaaaacaataggaggaagattttgcctgatgagagattgaagaagatcttcaatgtcaattccattgatatgttccaaatgaataaa

SEQ ID NO: 52317 - DNA, 270 bp, Zea mays
gcacctgttcctggacgagctgggcgtgggctacgacgaggccgaggactacgtggtggtcaagcacgcggcgctgttcacgtccaccgtgatgagccggctcctggcgcggcccaacgtgaagctgttcaacgccgtggcggtggaggacctgatcgtgcggcgggggcgcgtcggcggcgtggtcaccaactgggcgctcgtgtccatgaaccacgacacgcagtcgtgcatggaccccaacgtgatggaggccaaggtggtggtcac

SEQ ID NO: 52318 - DNA, 186 bp, Zea mays
agaacatcaacacccagacacatcaacttatagatgctcgatcaaaacctagatttgatggtgcagttcccgagccacgaaaggggattagaagtgggcatgtgcctgggagcaaatgtgttccgtttcctcaggttcttgacagctcacaaaagctattgccttcagatgagctccgtaaacggt

SEQ ID NO: 52319 - DNA, 223 bp, Zea mays
cttctctccttttgctcggtacgcacacaccgcccgtctccgatctccgatcccctcgtcgatccaaagatgcagatcttcgtcaagaccctcactggaaagactatcaccctcgaggtggagtcttctgacaccattgacaacgtcaaggccaagatccaggacaaggagggcatccccccggaccagcagcggctcatctttgctggcaagcagctcgagg

SEQ ID NO: 52320 - DNA, 274 bp, Zea mays
gccgtggtaagaagctccaagaggaatgggctgttccactgaaatctgtggaggacattagtgagcgcttcacaaacttctgtcaagggaaactcacaagcagcccatggtcagaattggacggtcttcaaccagagacaaagattatcgatgaccagttggtgaatattaaccagaagggtttccttacaattaacagccaacctgctgtaaatggagagaaatccgactcgcctactgttggttggggtggtcctggaggctacgtttatca

SEQ ID NO: 52321 - DNA, 270 bp, Zea mays
gttctagatcgcgagctggtcgtgctcccacctctccaccgcctggtcctcctcggcgctcgccagctgcgcctccaccacccgtcggcgctcccccccgcgctcgggtctcctggtgcggtgttccctccgtgagctccgcacccgcatcgactccgtcaggaacacgcagaagatcacggaggccatgaagctggtggccgccgccaaggtccggcgcgcgcaggaggccgtcgtctcctctcgccctttctctgaggcgctggtgga

SEQ ID NO: 52322 - DNA, 269 bp, Zea mays
gtttcttctactacacgacgacaaacatggggaagcctgcgaagatctgagagtggggtggatacgccggcgatcgtcgggatctgatggctactccggaccggctgatcgaggtgaaggtcacggcggacaacagcagctgcatccgctccatctccttcatctacatcggagccgatggcaaaccgtacgaggaggggccatggggtttcggccatgctggcacggagtacaagattgatctgtgcaggttcgacgagagcttgacg

SEQ ID NO: 52323 - DNA, 267 bp, Zea mays
gccgtggtaagaagctccaagaggaatgggctgttccactgaaatctgtggaggacattagtgagcgcttcacaaacttctgtcaagggaaactcacaagcagcccatggtcagaattggacggtcttcaaccagagacaaagattatcgatgaccagttggtgaatattaaccagaagggtttccttacaattaacagccaacctgctgtaaatggagagaaatccgactcgcctactgttggttggggtggtcctggaggctacg

SEQ ID NO: 52324 - DNA, 252 bp, Zea mays
aatctgacatgtttgatcagcgactccaagccaagatacttaatgtggttgatgtttcgtatggtggcgagaacggtttcaaccaagctattgaattatctgctgagattctagcaaatgtgaaattcattcaagaaaagaagttaattggcaagtattttgaagagatcagtcaggatactgggaaatatgtctttggtgttgatgacactctgaaggctcttgaaatgggtgctgtcgagaccctgattg

SEQ ID NO: 52325 - DNA, 201 bp, Zea mays
actcctccttggcttgctgctgctagtagtagcttcgcccgcgatcgctgatgacgactccggtatctactaccagctggctcttatgtggccaggagcatactgcgagcagaccagcgctgggtgctgcaagccgaccaccggcgtctcgccggcgcgcgacttctacataacgggcttcaccgtccttaacgcgaccac

SEQ ID NO: 52326 - DNA, 265 bp, Zea mays
ttcagaagatcatagttggcaggaatggtctactgtcaacacctgctatatctgctgtaattcgtaaaagataagccaatggcggctttatcatgagtgcaagccataatccaggtggaccagacaatgactggggtattaagtttaactacagcagtggacagccagcaccggagacgattactgatcaaatttatggaaacacactatcaatttctgaaatacaaacagcagacattcctgatactgatttgtcctctgttgg

SEQ ID NO: 52327 - DNA, 266 bp, Zea mays
ggctattgcaagagaagttgcttctgtcaccaaactaggtgtagaggttgctattgttgttggcggtggcaatatcttccgtggggcctcttgggctggatgtagtgggcttgaccgctcatctgcggattacatcggcatgctggccactgtgatgaatgctatatttcttcaagcgacgatggagagcatcggaataccgacccgtgtccagactgccttccgtatgtcagaagttgcagaaccatacatacgccgaagagctg

SEQ ID NO: 52328 - DNA, 264 bp, Zea mays
ggcaactggctgaatgtgattgaggagcatcatctgaagtactcggggaactgtcaggtaaacgacatcctggacattggctgctctgttggagtaagcaccagatacctcgccgagaagttcccatcagctcaagctgttgggctcgacctatcaccgtactttcttgctgtggcggcacaaaaggaagaaaaactgtcacggccaaagcctattcgctgggttcatgccaatggtgaagcgaccgggctgtcttcagattca

SEQ ID NO: 52329 - DNA, 266 bp, Zea mays
atggcatgtcacatgtgttagcatgggcaacccccactgtgtcacatttggggcaaacgagttaaagaccttgcagatcgacgatttaaaactcagcgaaattgggcctaaatttgagcatcatgaaatgtttcctgctcgcacaaacacagagtttgtacaggttaaatactcgctcacacctcaaaatgcgagtctgggaacgtggtgctggagcaactcttgcctgtggtactggtgcttgtgcggtggttgttgcagctgtt

SEQ ID NO: 52330 - DNA, 266 bp, Zea mays
  unsure (1)..(266): unsure at all n locations
tcggcgtccaggctcgcgcggttcgccgacgtcctcaccggagccgccggccggaggagccgcatattccgccagttcgatcgtttcttcgattcggttatcgataagcacctcgagccggagaggctgcaggccggcgtgcaggaagacatggtcgacgcactcgacatcatgtgganggaggagcaggcggatggttatgaggctcctcatggattaacgcgtgatcatatcaagggaatcctcatgaacacatttgcaggtgg

SEQ ID NO: 52331 - DNA, 146 bp, Zea mays
ctcgagccgctcggcgccatctcgttgcccaccgtcggcatggtcgtcccctacggcgccttcttcgtccctgccggctccgggaacgccggcggcgggacctacgcgaaggacaagctgggcaacgacatcacggtggaggcgtg

SEQ ID NO: 52332 - DNA, 278 bp, Zea mays
ctagtattacagaacaccataactttaaattcaagtcgttcagtggatcattttttaactgaaaatcatatatccactgttaactatcatggagaggttccagctgaagagagagttgagaacctgaacaagttccgcaatgaagagggggattgtccataattagtatgcactgatctggcagctagaggcctggacctggatgttgaccatgtcatcatgtttgacttcccatcgaattctattgattaccttcacagaaccgggatcattgcacg

SEQ ID NO: 52333 - DNA, 212 bp, Zea mays
gcgccacctacctcggcgccaggaccaggccgcagagggagaggaagctcggcgccaggtaccacgccgccgacaacgaggacctgccggagtccgtcgactggagggccaagggcgccgtcgccgaggtcaaggaccagggcagctgcgggagctgttgggctttctcaacaatagcagctgtggaaggcatcaaccagattgttacgggc

SEQ ID NO: 52334 - DNA, 275 bp, Zea mays
ggtttcttaggctggaccaggtaccattgctgaagccttgataaggggtcttcctataatccttaatgacttcatacctggacaggtttgtgttcctactattattctgcactcatgcagttttattgccataatgtgcatgtgaagtgtatgtctttttctgcatttctgatctccttaataaagggtcttagtgtgtaacgtgtttggatcatatgcgctacttatatatttgtattttgattgaatgcaatatatatgaattaaaggttatt

SEQ ID NO: 52335 - DNA, 273 bp, Zea mays
tgttatcatgcacttcactggctacctgtatgactttccattccttggagatgacagcactatcaccgtggatgacaaccgtgtcgatccactatacaagcatatttttccacccgaagtggcacctcatttgtccttcatcggattgccttggaaagttatccccttcccactgtttgaactccaaagtaagtgggttgctagagttctatcaggacggattaatcttccatccgaagacatggatgatggaatatgtgaaggctttctatt

SEQ ID NO: 52336 - DNA, 273 bp, Zea mays
gtcattggagcaatcgctgctggaaatgctgttgttctgaagccatcagaaatagcgccagtacctcgtcactgttagcaaagctgctacccgagtatgttgacaactcctgcattaaagttgtggagggaagcgttccagaaacaaccgcactcttggaacagagatgggataagatcttctacacaggtaatggaactgtaggacgtatagtgatggcagcagccgcaaagcatctgaccccggtagctctggagcttggtgggaaatccc

SEQ ID NO: 52337 - DNA, 259 bp, Zea mays
cagacgatgaacccggtgaaatcgtcatgattgatattcccattcatagctcaaatgtgatgctctactctaaggagaagagtgtggtaagcagggttggccacaaattcctggaggacgggaccaaggtccgatacctggtcaagaccggtgaagtaatcgacagtgttgagaagtgggtaaaggtttttaaggaaggaaattcggagtaacagttttagcatgaaaacctgcaaaatgctctgaacgctgactgcgt

SEQ ID NO: 52338 - DNA, 256 bp, Zea mays
ctgcgtcactggcaggacgccggcaaggtggagctggtggacgggtcctcctacctgggccagccgctgccgttctccatctcgacgctcatcaggatcgaggtgctcgtgatcggctacatcgagttccagcgcaacgccgagctcgacccggagaagaggctgtaccccggcggctcctacttcgacccgctcggcctggcggccgaccctgagaagaaggagcggctgcagctggcggagatcaagcacgcgc

SEQ ID NO: 52339 - DNA, 274 bp, Zea mays
gcggcggggcggacaaacgcaggcgaaggcgagggtgtgagggaaggagcaccagccatggtgcacgtcaacttctaccgcaactatggtaagacgttcaagaaaccaaggcgtccttatgagaaggagcgtcttgatgctgaactgaagctggttggtgagtatgggctgaggtgcaagcgtgagctttgagagggtccagtatgcactgagcaggatccgtaatgctgcaaggcacttgctcacccttgacgagaagacccccgtcgtatct

SEQ ID NO: 52340 - DNA, 262 bp, Zea mays
gcagttcaagaggccccacctcgaccgctacaagtgccttaagccaagctggcgcaggccaaagggtattgattcccgtgtcaggaggaagttcaagggatgcaccttgatgcccaacattggttatggttctgacaagtcgaccaggcactacctccccagcaagttcaagaagtttgtggtccacaacgtttctgagctggagttgctcatgatgcacaacaggacctactgcgctgaaattgctcacaagtgtccacca

SEQ ID NO: 52341 - DNA, 269 bp, Zea mays
gcttaagaagtctcaagtgatcaggcaacaggagaggatcacgttcacttatgatgttgagtttgtcaagagcgacatcaggtggccatctaggtgggatgtctatctgaagatggaggctggcgccaaggtccactggttctctataatgaactccctcttggtgatcttgttcttggctggaattgtctttgttatattcctcagaactgttaggagggacctgactaggtatgaagagcttgacaaggagcgcaactcagatgatg

SEQ ID NO: 52342 - DNA, 224 bp, Zea mays
gtgtccctctccccttccctccacctcccttgcaattcaagaactggcttccttggaaagacacgtgggattcgtccttgtgttttccctgctggaagagttggatttgtcagaacagtagtggaatgcaaggaatctagaattggaaagcagcccatcgaagttccatcaaatgttactctcacattagaagagcagtttgtcaaagctaagggtccgctggg

SEQ ID NO: 52343 - DNA, 261 bp, Zea mays
atggaatggtgggaaggcctgacactgcatcgattgtagaggcaaaatatccagcacttcggttcaagcaacacttgacagcatatgtcgagaagatatacgggataatcagagataacctgaagaaggaaataagtccgttcttgacaatgtgcatacaggctccaagagctaaccgtgtgaggccatcacggggatcactaaagagctacactctaatgcactagctaggcaagcatcaagtctgcattggcagaacat

SEQ ID NO: 52344 - DNA, 262 bp, Zea mays
ttcgacgtcacccagagcagaatgttctatggacctggtggaccatacgccctattcgccggcaaagacgccagcagagccctagcgaagatgtccttcgagccacaggatctgaccggcgacatcactggcctaggcccgtttgagctcgatgccctgcaggactgggaatacaagttcatgagcaagtacgtgaaggtgggtactgtcacgaagaacgtcaccgttgaagaccgcagcagcgccgcaagcacagcccctg

SEQ ID NO: 52345 - DNA, 272 bp, Zea mays
ctcatctcaagtacgagaagaaccccaagatctaggaggccatcaccgccaagttcaccgagtacctccgccgcgccgaggagatccgggccgtcctcgacgagggcggcgcggggccgggggccaacggaggtgacgcagccgtcgccacgcgcctcaagaccaagggcaaggacggcgacgggggcaacggaggggatgactccgagcagtccaagctcagggcggggctcaactctgccatcatcaccgagaagcccaacgtcaagtgg

SEQ ID NO: 52346 - DNA, 269 bp, Zea mays
ctggaactcctatggacatagtttcctccttgagacgttatgagaaagagagaagggtgcgtgttgctgttatacatggactggcaagaatggcagcaatcatggctaccacctatagaccgtatttgggtgttggtctaggacctttatcgtttttgaccaagttgcggataccacaccctggaagggttggtggcagttcttcatcaagtatggaatgcctgctatgctgagctgggtgcttggtggcatagctcaaagctagaagg

SEQ ID NO: 52347 - DNA, 274 bp, Zea mays
gtgcttctctgttgtctcattgctctggcagaagctcatagcttctcccgaaatgcagatgtctgcagaaagtacatcagctcaccaaggatggaggaaggttgtggatgcactttgtgatgtcgtttcagcctcaccaaccaaggcctcagctgctatcgttctccaggccgagaaggacttgcagccttggattgctagagacgacgaacaaggccagaagatgtggagagtcaaccaacgtatagtgaagcttatagcggagctcatgagg

SEQ ID NO: 52348 - DNA, 269 bp, Zea mays
atggcttcgacccgctgggcctctcggacccggagggcaccgaggggcttcatcgagcccaagtggctggcctatggcgaggtgatcaacggccgctacgccatgctgggcgcggtgggcgccatcgccccggagatcttcggcaagatgggcatcatccccccggagaccgcgctgccgtggttcaagacgggcgtcatcccgcccgcgggcacctacaactactgggccgactcctacacgctcttcgtcttcaacatggcgctcat

SEQ ID NO: 52349 - DNA, 268 bp, Zea mays
ctcgagccgtgggtgggcaacagcacttcatctctcaaacaaaggttatgaggttgcgattgttgataatcttgtccgccgtgcttttgataatcaactcggtcttgattcccttacccccataacctccatccagaatcgtgtccgtagatggaagtctctcactgctaagacaatcctgtcctttattggtgacatatgtgattttgaattcctctcagaaaccttcaagtcttttgagccggatgccgctgtccactttggcgag

SEQ ID NO: 52350 - DNA, 246 bp, Zea mays
cggaggccttgccgtccgcagggcttgctatggtgttcttcgttatgttatggagagtggtgccaagggttgtgaggtgattgtgagtggaaagctcagggcccaaagagccaagtccatgaagttcaaggatggctacatgatctcatctggtcagccagtgaacgagtacattgactcggctgtgagacagttcttctcagacagggtgttctcggtatcaaggtgaagatcatgcttgactgg

SEQ ID NO: 52351 - DNA, 260 bp, Zea mays
tggctgcaattgatgagcttcacaaaggaatttatgacttcttctacctgccaattgatttcaagaacaaatgcaatgttggatatgcgttcattaacatggtatcaccggtgcacattatatccttctaccaggcttttaatggtaagaaatgggagaagttcaacagtgagaaggtagcatctttggcttatgctagaattcaaggacggtctgcactgatatcacattttcaaaattcaagtttgatgaatgaggat

SEQ ID NO: 52352 - DNA, 263 bp, Zea mays
gggcaacctgtgctgctgtgttcaagttgaccagtcgactgtggccatcagggagcagtttggcaagtttgacagcgtgcttgagccaggatgccactgcatgccttggttcgccggcaagcgtgtagctgggcatctcacactcaggctgcagcaactggatgtgcgctgtgagacaaaaacaaaggacaatgtttttgtgaatgtggtggcatctattcagtaccgcgctctggctgacaaagcaatgacgctttctacaa

SEQ ID NO: 52353 - DNA, 272 bp, Zea mays
cggcactaacgacctgcagccaaccatctaccagcgactcagcgagcgagagcagcacacactgcacgcagctagctaggagcagcagcagcggcggcgatggcggcctccatgatctcctcgtcagctctggcggtggcgcctcagggcctgccgcccctcggccgccgcgcctcctccttcgccgtcgtctgctccaagaagaagatcaagaccgacaagccctacgggattgggggtggcctgaccgtcgacgtcgacgccaacgggag

SEQ ID NO: 52354 - DNA, 229 bp, Zea mays
agggtggagaagtaccgcccctcccgcgtcgctgacgtcgtcggaaactccgaagccgtcgcacgcctggaggtcattgcccgcgacggcaacatgcccaacctcatcctctccgggcctccggggaccgggaagacgacgagcatcctggcgctggcgcatgagctcctcgggcccagctatcgtgatgccatactggagctcaatgcctcagatgacaggggtttgg

SEQ ID NO: 52355 - DNA, 228 bp, Zea mays
atcgagccgcatttttgaagctgctatagcaatgaccaaccagggtgttcaagtgttcccagagataatggttcctcttgttggaacaccacaggaactggggcatcaagtgactcttatccgccaagttgctgagaaagtgttcgccaatgtgggcaagactatcgggtacaaagttggaacaatgattgagatccccagggcagctctggtggctgatgagatagc

SEQ ID NO: 52356 - DNA, 230 bp, Zea mays
cctcatctttgatcttggaggtggtacctttgatgtctccctcctcaccattgaggaaggaatctttgaggtcaaggccacagctggtgacacccatcttggtggtgaggactttgacaacaggatggtcaaccacttcgtccaggagttcaagaggaagaacaagaaggatatcactggcaaccccagggctctccggaggctgaggaccgcttgtgagagggcgaaga

SEQ ID NO: 52357 - DNA, 221 bp, Zea mays
aagaccacaccgttactccgagcccaggagcagcaccgcgccaggaggaagtttgttcttttaacaatatgtcgagggaggagaatgtttacatggccaagttggctgagcaggctgaaaggtatgaggagatggttgagtatatggagaaggtggctaagactgtagatgtggaagagctcactgttgaggagcgtaaccttctgtctgttgcatacaag

SEQ ID NO: 52358 - DNA, 225 bp, Zea mays
agagcagggtggtggcccgtgtccccgccacaaggaggagcgtccgtgtagctgccgtcgtcgcgaccgatgccgcgcagatcgactacagctcaagcgtctcggtgttcccgatggaggcctgcgacctgcttggtggcgacgcgtgcaacgggcccatgttcccggaggccaagcccgcatcggcggcggcggcggcgagcaggagtgtggtcggggtggaca

SEQ ID NO: 52359 - DNA, 255 bp, Zea mays
taatcacgagactcagaattcggatcgaggtacgctgatgtggggattcttacagagaggggtggcatgacttcccacgctgctgtggtcgcacgtgggtgggggaaatgctgcgtctcgggatgctcaggcattcgcgtaaacgatgcggagaagctcgtgacgatcggaggccatgtgctgcgcgaaggtgagtagctgtcgctgaatgggtcgactggtgaggtgatccttggaaagcagccgctttcccca

SEQ ID NO: 52360 - DNA, 221 bp, Zea mays
atagaatttactacgagggaggatattgctattgtgctcatcagtcagtatattgccaacatgataaggtttctggtggatagctacaacaagcccgtccctgctattctggagatcccatccaaggaccatccatatgatccagcgcacgactctgtgctctctcgagtgaaatatctgttctctgcagaatcggtggcgtctgataggcgatgaaggca

SEQ ID NO: 52361 - DNA, 220 bp, Zea mays
gttcgttcaaatgataaaggagatcttgtggtaacaaaaggcgatcaatatgatgtaagagatcatactagcagcaaagaggtaagaaaccttggcaagccagtcgatttagcaagccagtactacatagacggtgctgatgaggtcagcttcttgaatataactggtttccgtgactttccaatccaagatttgccaatgctagaggtactgcgttgtg

SEQ ID NO: 52362 - DNA, 232 bp, Zea mays
agactagagagaagaccaattttagttgaggcactgacttaccgagtcggccatcaatcgacatccgatgattcgaccaagtacaggccagttgatgagattgagaattggcgaacagcgagggatccgatttccagatacagaaaatgggttcagggtaatgactggtggtctgatgctgaagaatctgagcataggagcagagtgagaaaagagcttctccaagccatcc

SEQ ID NO: 52363 - DNA, 223 bp, Zea mays
atggattaatcggcaaacatttgggcactcatcatggacgcaggaaatggtttctgttctcaggtttatgagctctcaccagttttcctccaaaaggactggataatggagcagtgggagaaaagctactacataacaacaattgatggatcatccaacgggagctcattggttgtcatgtccaaaggaactccttacacccagcaatcatacaaggttagtg

SEQ ID NO: 52364 - DNA, 223 bp, Zea mays
gtctattatatgcaaaaacgttccaagacttgttccaggatggactaagcacatctgcattggaaggcatgccttcggtgatcaataccgagctaccgatgcagttctgaaggggcctgggaagctgaagctagtttttgagggaaaagaagaacagattgatctggaggtattcaacttcaatggtgctggctaagttgccatgtctatgtacaacaccgac

SEQ ID NO: 52365 - DNA, 220 bp, Zea mays
gctccgtggcgtacggcgcgacgtggcagttcgacacggaggcgctgcccaacgacctcatcaagcgcgggctggccgtgcgcggggaggacggggagctggagctcatcatcaaggactacccctacgcccacgacgggctcctggtctgggactccatcaggcagtgggcgtccgagtacgtcaacgtctactacaagtccgacgaggccgtggccgc

SEQ ID NO: 52366 - DNA, 217 bp, Zea mays
acatgatggagattcaggtcaatggtggtaccattgctgacaaggtggacaacggctacaaattttttgagaaagaggtacctgttgatgctgtcttccagaaggatgagatgattgacatcattggtgtgaccaaaggtaaaggttatgagggcgtggtcactcgttggggtgtcaccgccatcaccgcaaaacccacaggggtctccgcaaggtt

SEQ ID NO: 52367 - DNA, 224 bp, Zea mays
agcacagggcagatatcttcagctttgctgtggttctgtgggagctggtcacttcaaagataccatacagaaatctgacacccttgcaagctgcactgggagtaaggcagggaatgcggttggagatcccgtcataggccaatccacaactgtctaaactgattcagcgttgctgggaagaaaatccaaacctgcgaccctctttctcagagatcactgcagag

SEQ ID NO: 52368 - DNA, 219 bp, Zea mays
caaggatcaagtcattgccactggtctgccagcatcacctggggctgctgtgggccaggttgtgttcactgctgaggatgctgaagcatggcattcccaagggaaagctgctattctggtaagggcggagaccagccctgaggacgttggtagcatgcacgctgctgtggggattcttacagagaggggtggcatgacttcccacgctgctgtggtcgc

SEQ ID NO: 52369 - DNA, 218 bp, Zea mays
caagatcaagaagcttgttaagaggcttgccaagaagtaccatgctttcttggcatcagaggccatcatcaagcagattccccgtctccttggtcctggtctcaacaaggcaggcaagttcccgaccctggttactcaccaggaatccctcgagtccaaggtgaacgagactaaggcaaccgtcaagttccagctcaagaaggttctttgcatgggtg

SEQ ID NO: 52370 - DNA, 216 bp, Zea mays
tttcacgctcagctccagcaatggctgcatccaccatggcgatctcctccacggcgatggccggcacccccatcaaggtgggctccttcggcgagggccgcatcaccatgcgcaagaccgtgggcaagcccaaggtggcggcgtccggcagcccctggtacggccccgaccgcgtcaagtacctcggccccttctccggcgagcccccgagctacc

SEQ ID NO: 52371 - DNA, 216 bp, Zea mays
atgagaacagggctctcaagataatttccgggcttcagaactttgacaggagcagtgttgcatctgttgtcacagctgcagataagggaggtgcaacccatgttgacatagcatgtgacaaggacttagtaaagcttgccatggatcttaccaaccttccgatctgtgtcacatctgtagatccttcagcgttccattctgcagtacaagcaggag

SEQ ID NO: 52372 - DNA, 219 bp, Zea mays
ggatgtcgcaccgtaagttcgagcacccgaggcacggctccctcggcttccttcccaggaagcgctcctcccgccaccgcggcaaggtgaagtcattccccagggatgaccccaagaagccttgccatctgactgccttccttggctacaaggctggcatgactcacattgtccgtgaggttgagaagccaggatccaaactccataagaaggaaactt

SEQ ID NO: 52373 - DNA, 216 bp, Zea mays
agctgctctcgtccctagaaataaagcagctcctccgcggggcggcgaactactacccatcgccaaaaccctagccccgatccggtcgaggagcactacttcatggcatggcgggcacccctagccaggcaagcctcctgctccagaagcagctcaaggatcttgcgaagaaccccgtggatgggttctccgcagggcttgtagacgatagcaacg

SEQ ID NO: 52374 - DNA, 212 bp, Zea mays
attccctcccgacccactatcccaaaaccgtagcgccctcgcctgcacgcagccgccgtcgttgcgagctccccatcttcctccgtcaaccatggcgacccagatcagcaagaagaagaagttcgtcagcgacggcgtgttctacgccgagctcaatgagatgctgacgcgggagctcgcggaggacggctactccggcgtggaggtgcgcg

SEQ ID NO: 52375 - DNA, 215 bp, Zea mays
ccgctccgccccagcgcatcgcccgcagccaaagcgtacctaaaactcatcgatcaccttcagctttcaatcatggccgacgtcgatgtcgaaccggaggttgccgccggcgctcccaagaagcttttgttccgcaagtacagctaccgcggcgtcgacctagatgcgcttctcgacatgtccacggacgacctcgtccagctcttccccgcgcg

SEQ ID NO: 52376 - DNA, 216 bp, Zea mays
cggaagccaaggccagggagcctaacaagagggagatgagcctggaggagaagaacatgctcagggtggggatggagagtttgcccgaagagaagatgcataatgtgctacagattgtgcgcaagaggaacaacaatccggagatgctgggggatgagatcgagcttgatattgatacagtggatgttgagacacagtgggagcttgatcgtttcg

SEQ ID NO: 52377 - DNA, 216 bp, Zea mays
aattgagaaggcacatcctgatgttttcaacatgatgcttcagatattagaagatgggcgattaactgatagcaaggggcgcacagttgacttcaaaaacacactattgatcatgacatctaatgtgggaagcagtgtcattgagaaaggaggccgcaagatcgggtttgaccttgactatgatgagaaagacaccagctataacaggatcaagag

SEQ ID NO: 52378 - DNA, 276 bp, Zea mays
ggtccctcctgtgtcgcttgtccctaattggattgtgtacagatagctactacactccatccggaagcaggtgggtgggtccattttatcagccacacttgtatttgagagaggtgggctattaatgttggtggaggatttcaccattgttctgcagatgaagggggtggattttgtgcatacgctgacatctccctctacatccattttgcttctggccaactaaatatctcaagtgtattgatcatagacctggatgcccaccaatgaaatgga

SEQ ID NO: 52379 - DNA, 268 bp, Zea mays
cacacatacatagtttcttctactacacgacgacaaacatggggaagcctgcgaagatcggagagtggggtggatacgccggcgatcgtcgggatctgagggctactccggacggctgaccgaggtgaaggtcacggcggacaacagcagctgcatccgctccatactccttcatctacatcggagccgatggcaagccgtacgaggaggggccatggggtttcggccatgctggcacggagtacaagattgatctgtgcaggttcga

SEQ ID NO: 52380 - DNA, 269 bp, Zea mays
cgacgaggacatcgggaggatactctgcgactgcatcggcgacgacttctccaactacaacagggccatagtcgagactgtccaaacgggctatggccccgctgaagtgatcttgccgtcctgagcaacggcgtccaaggccgggtcgccgtcaaacttgctcgcccgccggtgtccaaagctggagaagaagacgccaccaccattcttgggaggatcgttgctcgcagcaagctgttcgacgtcggctgcgtgctcttctacaaaga

SEQ ID NO: 52381 - DNA, 273 bp, Zea mays
ttgactcccggtgaccatccgactcctggaccctcccctccacgagttccttccagaagggaacatcgaggacattgtaagtgaattatgtgctgagacgggagccaaccaggagatgccctcgcgcgaattgaaaagctttcagaagtaaacccgatgcttggcttccgtgggtgcaggcttggtatatcgtaccctgaattgacagagatgcaagcccgggccatttttgaagctgctatagcaatgaccaaccagggtgttcaagtgttc

SEQ ID NO: 52382 - DNA, 274 bp, Zea mays
cgtcttcttcatccgcgacggcatcaagttcccggacatggtgcacgcgctcaagcccaacccgcggacgcacatccaggacaactggcgcatcctcgacttcttctcgcaccacccgagagcctgcacatgttctccttcctcttcgacgacgtcggcatccccgccgactaccgccacatggacggatccggggtgcacacgtacacgctcgtcagccgcgccggcaccgtcacctacgtcaagttccactggcgccccaccagcggcgtgc

SEQ ID NO: 52383 - DNA, 276 bp, Zea mays
tgtgaactgggatggtctgagaacaagggagaaagaacgtgtattagtacttgctgcaactaacaggccatttgatcttgatgaggctgttgttaggcggcttccaaggaggttgatggtgaatttgccagatgcatcaaataggagaaaaattcttagtgtaatactagccaaggaagatttggcagacgacgttgatctagaaactatagctaacctgacagaagggtactcaggcagtgatctcaagaatctgtgtgttactgctgcacaccg

SEQ ID NO: 52384 - DNA, 205 bp, Zea mays
ctcgagccgctcctctacaccaagctcgccgatgtcctctccaaggaggcgctcttctacgccgtcaacttcccggacatcgcctacttcggcgccttcgcctacgtgctcctcccgctgcgcgacgccatccaccccactgcgctcgctgatcgcctcctcgcctcgctcgggcccagcttcctcggacccgttgccatcctcc

SEQ ID NO: 52385 - DNA, 262 bp, Zea mays
atttattactgccttccgagctggtgcagtaatgggcttcctgcttgctgccagctgtcttttggttctttacattgctatcaatttgtgtggaatttattacggtgatactgggaaggtctttttgaagctattactggttatggccttggtggttcttctatggctcttttcggccgcgttggtggtggtatttataccaaggctgctgatgttggtgctgaccttgtggggtaggtagaaagaaacattcctgaggacg

SEQ ID NO: 52386 - DNA, 236 bp, Zea mays
ggagttattctttacatacttctatgtggtgtaccgccattttgggcagagacacagcaaggaattttcgatgctgttctgaaaggtgtaattgattttgatttggatcctggcctgtgatctctgagagtgcgaaggatcttataagaagaatgctgaatcctatcccatcagagagcttaacagcacatgaagttctatgtcatccatggatttgtgaccatggagttgctcct

SEQ ID NO: 52387 - DNA, 268 bp, Zea mays
agcgctccggcctgcacacactgctgccggcactccgcccgctgctcatcaacaagaaggatctgcgcttcccgcacttccccgccatcgacgacctcttcagcgacggcatcccgtgccgacgcagaccgggttcgacgccatccgcaccgtcgtcccgcgcatggtcaagctggtggaggacaccaccgaccacgtcctccgcttcgaggtgccggagatgatagagagggaccggttctcgtggttcaaggacgaggagttcgcg

SEQ ID NO: 52388 - DNA, 271 bp, Zea mays
gcaagcaaggctcgataagaagctgacacaggcacaacttgctcagatgataaatgagaagccacaggtgattcaggagtatgaatcaggcaaggcaatccccaaccagcgatcattagcaagctcgagagggccctgggaaccaagttgcgtggcaagaaatagctttcctacgagtttgtgtcccggagcatcataatagggggtagacaaggcaagctgtctgcttatttgtctatgtttggtatctcaagtcctgcggactgtttct

SEQ ID NO: 52389 - DNA, 251 bp, Zea mays
gttctgagcagttgtatcagtcagtgcattcacagattttcacattgccaaatgatacactactttatcctgcacatgactataatggtttcacagtaagtactgttgagaggaagctgcctataatgctcgactcacaaaagataaggaaactttcaagacgatcatgaataacttgaatttgacatatccatatatgatggctgtagctgtatctgccaatttggtctgcggtaaccaggatccaccac

SEQ ID NO: 52390 - DNA, 230 bp, Zea mays
atctgatggagattcaggtcaatggtggtaccattgctgacaaggtggactacggctacaaattttttgagaaagagatccctgttgatgctgtcttccagaaggtgagatgattgacatcattggtgtgaccaaaggtaaaggttatgagggcgtggtcactcgttggggtgtcacccgccttccccgcaaaacccacaggggtctccgcaaagttgcttgtatcggtg

SEQ ID NO: 52391 - DNA, 264 bp, Zea mays
ctccgccacctcgatctactttgagagcctgccgtacaaggtgagcgccgtcacggggtacatcgactacgagaagctcgaggagaaggcacttgacttccgccccagctcatcatctgcggtggcagtgcgtacccgagggaacgggattacgccaagctcagggccgtcgccgacaaggtcggggccctgctgctctgcgacatggcgcacatcagcgggctcgtcgccgcgcaagaagctgcaaatccttttgaatattgt

SEQ ID NO: 52392 - DNA, 261 bp, Zea mays
gcgagcgagagcagcacacactgcacgcagctagctaggagcagcagcagcggcggcgatggcggcctccatgatctcctcgtcagctctggcggtggcgcctcaggcctgccgcccctcggccgccgcgcctcctccttcgccgtcgtctgctccaagaagaagatcaagaccgacaagccctacgggattgggggtggcctgaccgtcgacgtcgacgccaacgggagatagggcaagggcaagggcgtgtaccagttc

SEQ ID NO: 52393 - DNA, 253 bp, Zea mays
ctaccagcgactcagcgagcgagagcagcacacactgcacgcagctagctaggagcagcagcagcggcggcgatggcggcctccttgatctcctcgtcagctctgcggtggcgcctcagggcctgccgcccctcggccgccgcgcctcctccttcgccgtcgtctgctccaagaagaagatcaagaccgacaagccctacgggattgggggtggcctgaccgtcgacgtcgacgccaacgggagatagggcaa

SEQ ID NO: 52394 - DNA, 260 bp, Zea mays
gcgcagaaaaccctagccgccttcccgtccttttcctttcataaaccccaagccgcgccgcaatagctcgccccctacgtacgccgcctctcctgctcctaccgcagtctccctcaggtttagtgttcgcaatggcggccttcaacaagcttggtggccttctaaggcacagtgctctggtgagcggtatcactggtggctcttctcctgcagtgttcgatgctgcacggctcatgtctaccaagctatttattggtggt

SEQ ID NO: 52395 - DNA, 250 bp, Zea mays
ctcgagccgattaaggaatacgacattgttgcccctgatacaaagaatccgctttctgaaccctacccattcaatcttatgttccagacatctttcggcctcactgtcttagcgtggggtatatgcgaccagagacagcacagggccatttttgtaaatatcatggatctatactattgcaatggccaaaagctcccctttgcagctgctcaaattgggcaaactttagaaatgagatctcgccctgaca

SEQ ID NO: 52396 - DNA, 238 bp, Zea mays
cggcaactcgacggccaaccgcgccaccctgccgcggcaccatggtgcatgttaacttctaccgcaactatgggaagactttcaagaagccaaggcggccgttgagaaggagcgcctagatgctgagctgaagctggttggtgagtatggcctgcggtgcaagcgcgagctgtgacgcgtgcagtatgccctgagccgtatcaggaatgcagccaggaatctgctcaccctggatgag

SEQ ID NO: 52397 - DNA, 251 bp, Zea mays
ggcagcgacacgatcgcgagcgcacgcacgtaagcacgttgtcggaagctcaagttagaagaagcaccagtgcctgatcgatggcggcccaggctctcctctccgccggcagctgctgggccgccccgtgcagtcggccgtctctaggtcgtcggcgaggaaggcgcccttcgtcgtcagggccagctccagccctccagccaagcaaggtgccgacagcggctgtggttcgcgtccaagcagtccctctc

SEQ ID NO: 52398 - DNA, 258 bp, Zea mays
gaaagggaggcttggttagctaccatctcattggctatctgcaaggcttttgatcttctcgacatgttaaagaaggaagaagaaatgcttctagctgtaaaggaaggaaggcaaaggacgggaattcatttgctcgtgaaatgctcgacgaacggacaaagaaggctgaagcatggcaccacaaagctgccagtcgtgtggcgtattccaaaccagccgatccgatcacctgtgcaacatttgctcaggatgtcattg

SEQ ID NO: 52399 - DNA, 258 bp, Zea mays
gtcctcgcgcgaattgaaaagctttcagaagtaaacccgatgcttggcttccgtgggtgcaggcttggtatatcgtaccctgaattgacagagatgcaagccgggccatttttgaagctgctatagcaatgaccaaccagggtgttcaagtgttcccagagataatggttcctacttgttggaacaccacaggaactggggcatcaagtgactcttatccgccaagttgctgagaaagtgttcgccaatgtgggcaag

SEQ ID NO: 52400 - DNA, 256 bp, Zea mays
ggcgcgtcggcggcgtggtcaccaactgggcgctcgtgtccatgaaccacgacacgcagtcgtgcatggaccccaacgtcatggaggccaaggtggtggtcgctcctgcggccacgacgggcccttcggcgccaccggcgtcaagaggctccaggacatcggcatgatcagtccgcgtgcccgggatgaaggcgctcgacatgaacgccgccgaggacgagatcgtgcgcctcacgcgcgaagtcgtgcccggcat

SEQ ID NO: 52401 - DNA, 255 bp, Zea mays
gtttatgcgatctccagcaatgacatcagggtcggcaccaacgtcgaggtcgacggcgcgccatggaaagttctagagttcctccacgtcaagcctggaaaggcgctgctttcgtcaggacaaaactgcgtaactatgtaactgggaacacggtcgagaaaaccttccgtgctggaagtacgctacaggaaccatccctttcaaaggagaccaagcaatttacatacaaggatggctcccagttcgtgttcatgg

SEQ ID NO: 52402 - DNA, 254 bp, Zea mays
gtgccgctacggcggcgaggcggcggctggtgatcggggtggggttctgggtgcagggcttccggctcttcccgtggctgggcgtcaatttcttcctcaagacggcatgggcgttgctgcctcctcgctgcagatcctccaggcctccgccaatctgcccatggtcgccaagccgctcattggcctcctctcggatgccgtccccatacgcggccatcgccgcctgccctacgtcgccatcggcgctctcttgc

SEQ ID NO: 52403 - DNA, 257 bp, Zea mays
ctaaagacgaccacgccctccgtgctccagccattccccatgatttcgccgacgaatctcctcccggcgcggaagatcacccctgtctcaaatggcggcgcagacggcgagcccctcttctccctcggtggccgcacggccacggcgactcccttcaggcctccaatctgtgactggtagtgggaaggtttccttggcagccatcactctagatgattaccttccaatgcgaacactgaagtgaagaaccggacatc

SEQ ID NO: 52404 - DNA, 176 bp, Zea mays
  unsure (1)..(176): unsure at all n locations
ggcagactgacacttcaattgatgctgcgaagcantgcaagagcagctgagtgcacaactgcgaaatggtgatgctgtcgactgaggagactgagaagaagatgaaacaggcaacccacaaagatggaagcactaatggttcagcaaaagaaatccctaatgacaagcctgccgtc

SEQ ID NO: 52405 - DNA, 180 bp, Zea mays
gtgcaggcttggtatatcgtaccctgaattgacagagatgcaagcccgggccatttttgaagctgctatagcaatgacgaacagggtgttcaagtgttcccagagataatggttcctcttgttggaacaccacaggaactggggtcatcaagtgactcttatccgccaagttgctgagaa

SEQ ID NO: 52406 - DNA, 181 bp, Zea mays
tgagggtgcccagacccttctggttcaggccattgaggcttttggtgggaagtgcaccctgaggcgctgaaggaggttcccgttgtcctcaaagccctctccgatggagatatcctggacgaggaaaccattgtggactggtacaatgatgctgtcgcagctgggaaggactcccggttgt

SEQ ID NO: 52407 - DNA, 179 bp, Zea mays
caggaactggggcatcaagtgactcttatccgccaagttgctgagaaagtgttcgccaatgtgggcaagactatcgggtacaagttggaacaatgattgagatccccagggcagctctggtggctgatgagatagcggacagggctgaattcttctccttcggaagaacgacctgacgc

SEQ ID NO: 52408 - DNA, 181 bp, Zea mays
caagcatagtacgatttagggtttccttaccttacaagctttttcttccgccgccgcctcagccctcgcatcggctgctgtactctctcacctccttcgccgttgtctaccagatcatctcatggcgtcggagaagaagcagtcgaacccgatgcgggagatgaaggtccagaagctcgtg

SEQ ID NO: 52409 - DNA, 177 bp, Zea mays
ctaccagcaagccggggacgcgataggcgaggatcctggtgaacaacccggacctggtgtcctcggacgcggtggtctccttcaagacggccatctggttctggatgacggcgcagtcgcccaagccgtcgtgccacgagtgatcctcggcagctggacgccgtcgagcgccgacgc

SEQ ID NO: 52410 - DNA, 179 bp, Zea mays
ggaaagggttcgtactcatggcgccgcgcagccaaagtcgggcctctgtcgttaggcatcaacaagggtcatgtcgtcaccagcgcgaatgcctccccgcccgtgccaccgctaggggaaatcaacgataagggtgtctatggtcaggggcctgatcagagaggttgctgggtttgctc

SEQ ID NO: 52411 - DNA, 180 bp, Zea mays
ctgatgacaagtttgggttcattgttatggatggtaatggtactctttttggcacactaagtggcaatacccgtgaagtgcttcacaaattcactgttgacctcccaaagaagcatggtagaggagggcagtctgctctgcgttttgctcggcttcggatggagaaacgccataactatg

SEQ ID NO: 52412 - DNA, 177 bp, Zea mays
tgtgatgtttacagggcgtggtaaacatcctaccatgatcttggaagctgttgcgtcgtatgacctgtggatatggcatgctattttggtctgccaggtagttgcaacgacataaattttcttcaccgttcaaacctttataaaaggcatctgagcggtgacacacctccagtttca

SEQ ID NO: 52413 - DNA, 180 bp, Zea mays
tctggaccctcccctccacgagttccttccagaagggaacatcgaggacattgtaagtgaattatgtgctgagacgggagccaccaggaggatgccctcgcgcgaattgaaaagctttcagaagtaaacccgatgcttggcttccgtgggtgcaggcttggtatatcgtaccctgaattg

SEQ ID NO: 52414 - DNA, 217 bp, Zea mays
gtcgcatgatgcaggaggacggcattcggctcgaggcttgatggaacctccaatgagtggggctggtgcaaacagaagcttggagcaaatgccatccttgacggtttcacttgctgtgtgcaaagctggagctatggtgaagaagattcctctataccagcacatcgtaaatcttatagggaacaaaactctggtgctccctgtgacctgcctttaa

SEQ ID NO: 52415 - DNA, 188 bp, Zea mays
tggaattttcgatgctgttctgaaaggtcgtaatcttattttagatttgggatccctgtgcctgtagatctctgcagagtaacgaaggatcttataagaagaatgctgaatcctatcccatcagagcgcttaacagcacatgaagttctatgtcatccatggatttgtgaccatggagttgctcctga

SEQ ID NO: 52416 - DNA, 177 bp, Zea mays
tcaagttttttatgataaagtcatatagtgaagatgacattcataaaggtatcaaatacaacgtttgggcaagtacacgaatgggaacaataagctggatgctgcataccatgaagctcaaaatttaatggacagtggggaaagatgccctgtcttcctattcttctcggttaacac

SEQ ID NO: 52417 - DNA, 178 bp, Zea mays
aatctataaacaatgcggtgtggagtttgctgcggaatatgtgattcctctcatcttcccattactcacagcacatcatctgaatgttcaacaatttgccaagtatatgctatttgtcaaggacattacaagcaagatcgaagagaagcgtggtgtgactgttacagataatgggaac

SEQ ID NO: 52418 - DNA, 174 bp, Zea mays
ttgatgttgatgtcataacatttggccagtacatgaggccatcaaaacgtcacatgcctgtttctgagtatgttacgcctgaagcttttgagaagtatcgggcccttggtgtcgaaatggggttccgctacgttgcgtctgggccaatggtccggtcttcgtacaaggcaggtg

SEQ ID NO: 52419 - DNA, 172 bp, Zea mays
cttctggagaaccctacatcatgagggtgtttctggattctacaagggaattctaccaaatctccttaaagtggtgctgctgcaagtattacctatctagtttacgaggcgatgaagaaaaatttgtctcttgattaaattgtggagttgttggggggaaaaacagccatca

SEQ ID NO: 52420 - DNA, 174 bp, Zea mays
  unsure (1)..(174): unsure at all n locations
tgccggacaccgtcaacgggtccatccgtgtgacggtgcagggcgatgtcagcgagttctgtctgcgagangagcactgtgcttccagtgntcgcagcgcttcacggccgccacgctggagcacggcatgcacccgccggtctctcccaagcccgagtggcgcaagtcatggac

SEQ ID NO: 52421 - DNA, 173 bp, Zea mays
ctcctatccactgcggcctggacgcgtggagatacttgaccaagcagcagcagcagggatggcgcctctgaagcttacgggatgccgctgtcccccaacgtggtgcgcgtggccaccgtgctcaatcagaagggcctcgacttcgagatcgtccccgtcgacctcaccaccgg

SEQ ID NO: 52422 - DNA, 173 bp, Zea mays
gacttgggaacaaaggtaaaaattgaaggtgacatcaatagatgtgtggcatattacaagatagctctatactacattggcactatgctgatgccatgtataatcttggcgttgcatatggtgaaatgttgaattttgagatggcaattgtcttttacgagcttgcgctgcac

SEQ ID NO: 52423 - DNA, 173 bp, Zea mays
cgtgcgcaccagacctcacaccctgctcgtcaatctaggagacctaatagagataataagcaatgggatcttcagagcccagtacatcgggttgtaacaaacgcggagaaagagaggctatcagtggttctgttctattctatagatcctgagagagaaatccggcccgctga

SEQ ID NO: 52424 - DNA, 170 bp, Zea mays
gtctcactaccagttccttggcatagcgccagagggatcatcgaggagatcaagacggcgtaccggcggctgtccaaggagtaccacccggacacgacgacgctgccgctcaaggtggcgtccagaagttcatccgcctgcgagaggtgtacaacgtgctgagcaaggag

SEQ ID NO: 52425 - DNA, 171 bp, Zea mays
cttgtcggagtattctatccttacaaccgtggtgcactatttactgcattggttgtcatttatgcactcacttcaggaattgctggatacattgctacctctttctattgtcagttggaggggacaaactgggtgaggaacttgctattgacaggatgcctattctgtgga

SEQ ID NO: 52426 - DNA, 176 bp, Zea mays
gtggtgttgggtctctttagacaaactcgggacggttgcttatcctaaaaattcgattgtactgcgtggcatgaaattgatagattcgaagagatattttgagacatgctagccacctacatcaaaaaaatttcatgttttgcacatcataaggatataactgttagcttgattct

SEQ ID NO: 52427 - DNA, 276 bp, Zea mays
ctagtgcctagatcgtgggcggccgctcgcgatctagaagcctatcttcaggcagtgtttctggtcaagacaaccaagagcagcctcatgatggttccaggcctctgagagaagatgacaagaatgggcattatgtttttgctgtcggagataatctcacatctcgctataagatcaatgcaaaaatgggagaaggtacctttggtcaggtgttggagtgttgggataaggaaacaaaagaaatggtggccataaagatatcaggggtcttaagaa

SEQ ID NO: 52428 - DNA, 275 bp, Zea mays
cgcaaatcaaacaacaatgcttaaaggagaaactgaagacattgggaagcttattgaaaagaggatgatgcaaaaatatggagttgaaaatgtaaacgatcacttcatggccttcaatactatttgtgatgccactcaggaaagacaagatgctatgtatcagctggtgaaagagaaagttgaccttattcttgttgttggaggatggaattcaagtagcacctctcatctgcaagaaattggagaactcagtggaatccatcatactggattga

SEQ ID NO: 52429 - DNA, 262 bp, Zea mays
ggcgtttgcggggccggtgctttctcttccttccggccgcggcaatggcgtcggggaacaagaacaagcagaggagcgaggaggagtggcgcgtcgtactctcccctgagcagttccgcatcctccgcctcaagggcaccgagttaccagggacaggagagtacaacaaattctacggtgacggggtttataactgcgctggctgcgggactcccttgaacaagtccgccacaaaatttgattctggctgcggctggctaca

SEQ ID NO: 52430 - DNA, 252 bp, Zea mays
  unsure (1)..(252): unsure at all n locations
ggaaagacttgctgatgatgatgttattctggtgaaaggcacaaagaacaccagcgcggtcgggataatacttagaggcgcaaatgacttcatgcttgatgagattgaccgatcattgcatgatgccctgtgcattgtgaagcgaaccctggaatcaaatatggttgttgctggcggtggtgcagttgaagaccagttatcagtttaccttgagaancttgaaatgatcttgggttctcgggaacaattggc

SEQ ID NO: 52431 - DNA, 260 bp, Zea mays
gccatcgacacgatcgcgagcgcaagcacgtacgttgtcggaagctcaagctagaagacgggccagtgcctgatcgatggcggcccaggctctcctctccggccggcagctgctgggccgccccgtgcagtcggccgtctctaggtcgtcggcgaggaaggcgcccttcgtcgtcagggccagctccagccctccagccaagcaaggtgccgacagcatctgtggttcgcgtccaagcagtccctctcctacctcatggc

SEQ ID NO: 52432 - DNA, 271 bp, Zea mays
ctaccagtaccaccacgtccctcctcgtcgacgatctcgtagcggcggcgcacatggcgagcgacggcgcggcggctacgcagcgaaggttaccccaaagaaggccaatctcctcgacccgcactccatcaagcaccttctcgacgagaccatctccgaggtcgtgaagcgtaagggctacaccgaggacacgcggctgggcaactggaagctggggatcggagccgccgtgattgctgtcgccctcctcgctcattttaccccaagaagt

SEQ ID NO: 52433 - DNA, 266 bp, Zea mays
ctggcggccccgaaggcggaagacggaggcgggctcatgaagacgctgtggctcggctcgctcttcggcctctggtacctgttcaacatctacttcaacatctataacaagcaggtactcaaggttttcccataccctataaacatcacagaagttcaatttgctgtcggaactgtagcagctctgttcatgtggatcactggtattattaagaggccaaagatttctggagcacagcttgtagccatcctactctggctattgtt

SEQ ID NO: 52434 - DNA, 270 bp, Zea mays
gaacttttaacgcaatgctctatcggcattgctggaactggactggctattctcctgtcagttatgtgcaagatgtctaatggcatgaggactccttttgcttctgcccgactgcttagcaccagcgtcggattcggactcttctggctatcctgggtcgtcaatggattgcgtgacaccatcgccagcattttcagaagtcgaagtggcatgaatatcgaggctgccgaggtcgcagtgaaaatagaaaaacgtgtgaacgagatcctc

SEQ ID NO: 52435 - DNA, 226 bp, Zea mays
cgatactcctcaggaggttgaagccgggaaggaaatcatatttacctatgatgtatacggggatgagagtgatatcaagtgggcttctcgctgggacacctacttgttaatgatagatgatcaaattcactggttttctattgtgaactctctcatgatcgtactcttcttatctgggatggtggcaatgcttatgctccgcaccctttatagagatatctctagg

SEQ ID NO: 52436 - DNA, 206 bp, Zea mays
gcggcggggccggcgaagacgtccaagacgcaggacgaggggctggtcaccaataattaggagttcaaggcgccgtacgtcgggaggtgcctgtccaacaccaggatcaccggcgacgacgcgccgggggagacgtggcacatggtcttcagcaccgaaggcgagatcccgtatagagaggggcagtccacggcatcatcgctgat

SEQ ID NO: 52437 - DNA, 246 bp, Zea mays
tggccgtatcaccatgccaggtcgtgctcatgggtgccgtcgaaggctaccgcattggcggtgggccgctcggcgaggtcgtcgacccgctgtaccctggcggcagcatcgcccccctcggcctggccgacgaccccgaggccttcgccgagctcaaggtgaaggagctcaagaacggccgcctcgccatgttttccatgttcggcttcttcgtccaggccatcgtcaccggacaaggcccgctcg

SEQ ID NO: 52438 - DNA, 247 bp, Zea mays
ctttgacgaaggatcgaccatcagctgggtgccttgtggaagacagctcacatgctcttaccctggcatcaaattctcctatggcccggacacttacttcggaaacgaggtatctgttctggagatggatgggcaattcgacagactagatgagctcatctacgtggagagccatctaagcaccctttcacccaagttctccggagaggtgacacaacaaatgctaaagcatgcagacttcccaggt

SEQ ID NO: 52439 - DNA, 249 bp, Zea mays
gggagacccattaccaatgccaagaacaagaaaccagagaggacagccgtgaatatagtctgaatcccctccaaaaacccaccataccgtctcccccatctgcaagaacaagatcaggagagcatcctagggggaagaaacaggagggggaaaaagaagcccagaaagaccaactgaccaaacaaaaaggtggcatctttgtgtcaccgaggcaccgcgattcacagaccaaagcgcgctcctctggtc

SEQ ID NO: 52440 - DNA, 268 bp, Zea mays
cgatctccgatcccctcgtcgatccaagatgcagatcttcgtcaagaccctcacgggaaagactatcaccctcgaggtggagtcttctgacaccattgacaacgtcaaggccaagatccaggacaaggagggtcattcccccggaccagcagcggctcatcttcgctggcacgcagctcgaggatgggcgcactcttgccgactagaacatcccgcggagagcatcctccaccttgtgctccgcctcaggggggtatgccgatcttcg

SEQ ID NO: 52441 - DNA, 170 bp, Zea mays
cgcgcagttcccccgcgcccgagacgcaaccccgcgccaggcgtaagtctgttctgggatcgatattatcgatatggcgcgggaggagaatgtctacatggccaagctggctgagcaggccgaaaggtatgaagagatggttgagtatatggcgaaggtggctaagactg

SEQ ID NO: 52442 - DNA, 226 bp, Zea mays
ccgcagccaggcagccatggcgcccaccgtgatgatggcctcgtcggccaccgccgtcgctccgttccagggcctcaagtccaccgccaggctccccgtcgcccgccgctcctccagaagcctcggcaacgtcagcaacggcggaaggatccggtgcatgcaggtgtggccggcctacggcaacaagatgttcgagacgctgtcgtacctgccgccgttgtcgacg

SEQ ID NO: 52443 - DNA, 170 bp, Zea mays
ccaggatccaaactccataagaaggaaacttgtgaggctgttaccatcattgggggccctcctcttgtcattgttgggcacgtggcatatgtgaagactcctcgtggcctccgcacactcaactctgtttgggcccaacatcttagcgaagaagtgaggagaaggttcta

SEQ ID NO: 52444 - DNA, 275 bp, Zea mays
cgcgactcgaactcaaaccctagagccgcagccccggtcgctccaccgaccccaaatctcaaatcagcgggagggaactcgcacgcgaaggctgaactcatggctcgcgtctacgttgggaacctggatccgcgtgtcacggcgcgggcgatcgaggacgagttccggatgtttggggttctgaggagtgtatgggttgctaggaaaccaccagggtttgccttcattgactttgatgaccgcaggatgcacaagatgccatcgtgaattggatg

SEQ ID NO: 52445 - DNA, 253 bp, Zea mays
cggctcgagcggctcgagaaggaacatggttcaaaagggcatcgtttgggggggtttatcacgtgtcagagtgtcagagtctgtggacaacatcatgcaagagtcacatgagcttgatggtacaacagtagttgttgatcgtgcgactcctaaggatgaagatgtcagacaccccccgagtaggccatctcagggtggctatggtgcatataacgcatacatttcagctgttaccaggtatgtcatctgggtg

SEQ ID NO: 52446 - DNA, 225 bp, Zea mays
gtcctgccggctgcatcaaagaagtttgggagacagattaatacctgcgggaatgttatggatatgactggcctcaagctgtctgcactgagccaaataaagatgttgacgatgattactactgttgatgaccttaattatcctgagaaaacggaaacttattacattgtaaatgctccatatgtttttacagcgtgttggacggttgtgaagccatcttacaag

SEQ ID NO: 52447 - DNA, 266 bp, Zea mays
cctcaagtgcaggtatcacagagggattttcaatgtgcgctggggactgggtagaggtctacagcgaggaaagccaagaatctgcatgggatgctgttgtaacttgctttttcctggatacggcacacaatatcgttgaatacatcgagatcatatcaaaagttctcaaggatggtggggtctggattaacttgggtccccatctgtatcactttgctgattcatatgggccagatgatgatatgtctattgattaagtttggaag

SEQ ID NO: 52448 - DNA, 251 bp, Zea mays
ctatgactgctttgaggcgacgactgctttcaagaaccacaacttgccacttgcgaggataaagaagatcgtgaaggccgatgaagatgttcgcatgatctcagctgaagctgctgtagtctttgcaaaagacgatgagctcttcatactggagctgacacttaggtcgtggatgcacactgaggagaacaagcggcgcaccgtgcaacagagtgacattgcagcagcgatcactaggactgacatttatg

SEQ ID NO: 52449 - DNA, 248 bp, Zea mays
gtccctcaaggttgttgaggttcccttccaagactgggaagcatggccatgccaagtgccacttgtgttgggcttgacgttttcactggtaaggagcttgaggatattggtccttcttctcacaactgtgatgtgccccatgttgatcgcactgagtatcagctgattggcatcactgaagatggatttgtgagcctgtgtgactgacagtggcgacactaagggtgacctcaggcgtccgactgatg

SEQ ID NO: 52450 - DNA, 249 bp, Zea mays
agtgtcttctactacacgacgacaaacagggggacggcctgcgaagatcggagagtggggtggatacgccggcgatcgtcgggatctgagggctactccggaccggctgaccgaggtgaaggtcacggcggacaacagcagctgcatccgctccatctccttcatctacatcggacccgatggcaagccgtgcgaggaggggccatggggtttcggccatgctggcacggagtacaagattgatctgtg

SEQ ID NO: 52451 - DNA, 248 bp, Zea mays
tccagcaccgccgctagaggagagccggcgattcccaggtcccgcgagaatatgccgaagcagatccatgagattaaggacttcctcctcaccgcgaggaggaaggatgcccgctcagtgaagatcaagaggagtaaggatgttgtcaagttcaaggtgcgctgcgccagatacttgtacacgctctgcgtcttcgatgctgagaaggcgaacaagttgaagcagtctcttcccccaggtttgaccgt

SEQ ID NO: 52452 - DNA, 254 bp, Zea mays
cctccctatatcgccgtcgccgtcgtatctgccatgggggcgtacaagtacgtcttggagttatggagaaggaagcaatccgacgtgatgcggttcgttcaacgcgtgcgctgttgggagtacatgcagcagccggctatcgtccgcctcacaaggcccacccgccccgacaaggccgctgcctcggcttcaaggccaagcaggggtatgttgtttaccgcgttcgtgtgaggcgtggtcgcaggaagagcctg

SEQ ID NO: 52453 - DNA, 265 bp, Zea mays
cagctagtcagctacctccatccaccagaccagaccagaccaatggccctgcgcctaccaatctcatcgtcccacgggctggcctccacgccggcgccaatctccacgacgacgtgccggccggccgtcttggcgacggccgcggcccagaagcggagcctgctgctggcgacggcctccgagacgaggggagtcgcgccggtgaggtccagcgggatcgagacgagcacggtgggtctgggatgtgaacgtgtcaccgggcagg

SEQ ID NO: 52454 - DNA, 263 bp, Zea mays
cagacacaagctcggacaaggaggctacggtactgtatacaaaggggtgctacaaccaggtgaagttcatgtagctgtcaagatgctgggcaactcaaactgtaacggagaagagttcatcagtgacgtggccaccattggaaagatccaccatgtcaatgttgtgcgcctcattggattttgctccgaggaaaatatcagggcacttatctatgagttcatgccccgtggatctctcgataagtacatcttctcgtcggaga

SEQ ID NO: 52455 - DNA, 262 bp, Zea mays
ccagcatcctcccgtctccgtcgtctcgtctccgctcctcacctcgccagccatgggcaagatcaagatcggaatcaacggtttcggaaggatcggcaggctcgtggccagggtcgccctgcagagcgaggatgtcgagctcgtcgccgtcaacgaccccttcatcaccacggattacatgacgtacatgttcaagtacgacaccgtgcacggccaatggaagcacagcgacatcgccctcaaggactccaagacgcttctc

SEQ ID NO: 52456 - DNA, 256 bp, Zea mays
tggagagtacgtggaggagcagccatggcttcatcggtggccgccgcggcgagcacattcctgggcacccgcctggcggacccggcgccacagaacgggcgcatcgtggcccggttcgggttcgggttgggcggcaaggcgaacctgctaccgaagaaggtggcgaagacatcgacctcctctgaccggccgctgtggttccccggcgccgtggcgcccgactacctggacggctcgctggtcggcgactacgggt

SEQ ID NO: 52457 - DNA, 264 bp, Zea mays
ataatagatcccttttctagttgtaagcatgaaacccaggaccggtggtatcaactaaaaaagggttctattttttcagattatgaacataccatggaaacatgaagcagggttttacttttatatatgctagcaattgttatctgttgtgttgctttacatttctgttacttactcttttgcaggtaaaatatacagactgtggagttagtcctcaggatctacatcatgtattcacaaagtttgctcatcctcaaagtggag

SEQ ID NO: 52458 - DNA, 255 bp, Zea mays
cagagaccagccctgaggacgttggtggcatgcacgcagctgtggggattcttacagagaggggtggcatgacttcccacgctgctgtggtcgcacgtgggtgggggaaatgctgcgtctcgggatgctcaggcattcgcgtaaacgatgcggagaagctcgtgacgatcggaggccatgtgctgcgcgaaggtgagtggctgtcgctgaatgggtcgactggtgaggtgatccttgggaagcagccgctttccc

SEQ ID NO: 52459 - DNA, 258 bp, Zea mays
gttttcgtgaatgtggtggcatctattcagtaccgcgctctggctgacaaagcaagtgatcgtttctacaaactgagcaacacaaggtctcagatccaagcctacgtctttgacggtacgtagcagtttgtttcttgctagtttgagtgttcatggttgtgactatgtcgtccgtacagtgatcagagcaagcgttcccaagctccatttggacgatgctttcgagcagaaggacgagatcgcaagggcggtggagga

SEQ ID NO: 52460 - DNA, 269 bp, Zea mays
agccgatttcttaaaaatggttttctgctacttgcacgagttattgccgcaacttgttgtgtgacactatccgcttcaatggccgcacggctaggttcaactccaatggctgcattccagatctgcttgcaaacctggttggcttgctcacttcttgccgatggattggcttttgctggacaagccatacttgcaagtgcatttgctcgtaaggactatccgaaggccaccgccacagcttctcgtatcttgcagctggccttggtctt

SEQ ID NO: 52461 - DNA, 260 bp, Zea mays
cagcgagcgagagcagcacacacgcagctagctaggagcagcagcagagcagcggcgatggcggcctccatgatctcctcgtcagctctggcggtggcgcctcagggcctgccgcacctcggccgccgcgcctcctccttcgccgtcgtctgctccaagaagaagatcaagaccgacaagccctacgggattgggggtggcctgaccgtcgacgtcgacgccaacgggagaaagggcaaggtgcaaggcgtgtaccagtt

SEQ ID NO: 52462 - DNA, 255 bp, Zea mays
tctgaagatgacattcgtcaaattccaaaatacaaatttcggaagatggaagagcctgaaaagcagtctgttggtgtgcctggatcttctggtggaataatgatagaatgtggaaccaatcaacctattgaaaaagtacttgcagctgaagatgcggagtgctgcatttgcctctcagcttatgatgatggcgcagagctccgtgaactcccttgtggccaccattttcattgtgtttgcatcgataaatggctg

SEQ ID NO: 52463 - DNA, 219 bp, Zea mays
ggagcacgacgcacgcagagccgcagagatccgtcacactgcaagttttgaaaactgaactgtaatatggcatcagcagagctttcccgtgaggaaaatgtgtacatggcgaactcgccgagcaggcagagaggtacgaggaaatggttgagttcatggagaaggtagcgaaaactgttgactccgaggagctccactgtggaggagcgcaacctcctg

SEQ ID NO: 52464 - DNA, 251 bp, Zea mays
aagagactgagacctattatatagtaaacgctccatacatattctctgcatgttggaaggtcgtgaagcctctgttgcaagagagaacaaggaagaaagttcatgtgttgcgtagctgcgggagagacgagcttctacagatcatggactactcctccctcccccatttctgcagacaggagggctcgggctcatccaaacattcgtcaggcgactccgataactgcttctctctcgaccacccgttccac

SEQ ID NO: 52465 - DNA, 262 bp, Zea mays
ctaccagcgactcagcgagcgagagcagcacacacgcagctagctaggagcagcagcagagcagcggcgatggcggcctccatgatctcctcgtcagctctggcggtggcgcctcagggcctgccgcccctcggccgccgcgcctcctccttcgccgtcgtctgctccaagaagaagatcaagaccgacaagccctacgggattgggggtggcctgaccgtcgacgtcgacgccaacgggagatagggcaagggcaagggcg

SEQ ID NO: 52466 - DNA, 256 bp, Zea mays
cctctctccatctccctgctcctccgcctccttcttgatccagccaagccagggatcgccatgtcggactcggaggagcaccacttcgaatcgaacgccgacgccggagcgtccacgacctacccgcagcaggctggcaccgtccgtaagaacggcttcatacgtcatcaagaaccgcccctgcaaggttgtggagggttctacctcaaagactggtaagcatggccatgccaaatgccactatgttgccatagac

SEQ ID NO: 52467 - DNA, 279 bp, Zea mays
tactcgagcgaatcggctcgagctccgcttcccgctccgatcactctgctccctccccactaccgagcccatggcggactagctcaccgacgaccagatccccgagttcaaggaggccttcagcctcttcgacaaggacggggatggttgcatcacgaccaaggagctgggcactgtcatgcgctcgctggggcaaaatcctacagaggctgagctccaggacatgatcaacgaggtcgatgctgatggcaacggcaccatcgatttcccagagtttct

SEQ ID NO: 52468 - DNA, 280 bp, Zea mays
gctgcctcggtcgatttctaattctcctcgcgagcccaaaccctaaacctaaacctttcacccgccgccgccgccaccaccagcactgccactccgccaccaccgtcccgaagccccctcccagcgccatcgacttcatctcggattgaagcaatgtcgtcggacgatgaggtcagggaggagaaggagctcgacctctcctccaacgacgttgtcaccaagtacaaggctagcgccgaaatcctcaacaacgctctgaagattgttgtgtctcagtgca

SEQ ID NO: 52469 - DNA, 283 bp, Zea mays
atgcgcaggagcagcttcctgagaacaaggatgacatcaactccgcacactcgctcgctgttgaggccacctacatcaaccagaacttctctcagcaggtgctgcaccgcaatggtgagaaggttaactttgacgagcccaacccatttgcttctgagggtgaagaggctgcatctgttggctaccgctaccgccgttggaagttgaatgatgagatcagccttgttgctcgctgtgaggtgcatgctgtcagtgttgatcaaagtggtactcgccagtttat

SEQ ID NO: 52470 - DNA, 279 bp, Zea mays
atcatcgatctacacacatacatagtttcttctactacacgacgacaaacatggggaagcctgcgaagatcggagagtggggtggatacgccggcgatcgtcgggatctgagggctactccggaccggctgatcgaggtgaaggtcacggcggacaacagcagctgcatccgctccatctccttcatctacatcggagccgatggcaaaccgtacgaggaggggccatggggtttcggccatgctggcacggagtacaagattgatctgtgcaggttcg

SEQ ID NO: 52471 - DNA, 276 bp, Zea mays
aaagcacaaccaatggaaacaagaagctcgatgctgcttatcaagaagctcagtcgaagggttctgcgtgccctatattcttgtttttttcagtgaatacaagtgggcagtttgttggtgttgctgaaatgacaggggctgtcgattttgagaaaaccctggggtattggcaacaggacaagtggaatggttccttctctgttaagtggcacattgtcaaggacgtgcctaacaacattctcaaacacatcatcctagagaacaacgagaacaagc

SEQ ID NO: 52472 - DNA, 279 bp, Zea mays
atgcctggcgctcggcaccaggttgcgctccaagtacaagatcacctaccagttctaccgcgtcttccccaacggcgaggtgcagtacctccaccccaaggacggcgtctacccggagaaggtcaaccccggcagggagggcgtcggccagaacttccgcagcatcggcaagaacgtcaaccccatcgacgtcaagttcaccggcaaggccaccttcgactaatcacacttcacgtacgccgcacgccccagccgggatccaaattaaagaacttcttc

SEQ ID NO: 52473 - DNA, 274 bp, Zea mays
tatgcctggagctcggcaccaggttgcgctccaagtacaagatcacctaccagttctaccgcgtcttcaccaacggcgaggtgcagtacctccaccccaaggacggcgtctacccggagaaggtcaaccccggcagggagggcgtcggccagaacttccgcagcatcggcaagaacgtcaaccccatcgacgtcaagttcaccggcaaggccaccttcgactaatcacacttcacgtacgccgcacgccccagccgggatccaaattaaagaac

SEQ ID NO: 52474 - DNA, 276 bp, Zea mays
atgttattatcggcggtgaagctataatggtgtacagggtacttccaacatcgaatcatgacacaactaagctgatccatctaattctccacgggattgcactcgtccttggtgcggttggaatatactttgctttcaaaaatcacaatgagagtgggattgccaatctttacagcctgcactcttggattgggataggaacaattactttgtatggtattcagtggataattggattcgtcacgttcttcttccctggtgctgcgccaaacgtga

SEQ ID NO: 52475 - DNA, 278 bp, Zea mays
atgacatcgactgctccctcgacctcaccggcgcgcgcgagaagaagaaggcggcggaggaggacggcgacaaggacaagaaggacggcggcggccccagcaagcccggcgagaagaaggacaccagcagcaaggtgacgctgtcgggcctgctcaacttcatcgacgggctgtggtcggcgtgcggcggcgagcggatcatcgtgttcaccaccaaccacgtcaagaagctggacccggcgctcatccgcaaagggcgcatggacaaacacatcgag

SEQ ID NO: 52476 - DNA, 276 bp, Zea mays
tatgatgagggtaagcgtgtagcagagacgctgatgttcgactatcacaggcagcatggcattgaaatccggattgccaggattttcaacacctatgggcctaggatgaacattgatgatggccgtgttgttagcaacttcattgctcaggctgtgcgcggtgagcccctgactgtccagaggccaggaacacagactaggagtttctgctatgttgccgatatggttgatggtcatattaagctgatgaatggaaacaagactggaccgattaac

SEQ ID NO: 52477 - DNA, 276 bp, Zea mays
tgacgaactcggtgaactctttctcctcgcgcagaccggagcacaatcaaggattccagtccagtcctgccaatggagtgcgttttgggcttgattggccgcgacttcgcggtggtggcggccgacacctccgccgtgcagagtatcctcgtccacaagactgacgaggacaaagtaatggtcctcgactcgcacaagctgttgggcgcttcaggggagcctggtgaccgggtgcagtttacggagttcatacagaagaacctccacctgtaccag

SEQ ID NO: 52478 - DNA, 277 bp, Zea mays
tatcatgccggggcagtgggagttccaggtcggaccgtccgtcggcatctcttcgggcgatcaggtgtgggttgctcgctacattcttgagaggatcaccgagatcgccaccgccgagaggttgattagagaagcacacaagaaaggtgcaaagattgtactcgttcaggaattgtttgaggggcactatttctgccaagctcaaagactggatttctttcggcgcgctaagccttacaaaggcaatccaactattataaggatgcaacagcttgca

SEQ ID NO: 52479 - DNA, 273 bp, Zea mays
  unsure (1)..(273): unsure at all n locations
ctgacggttgctctagatccgttcatcctggtggttttgtgaggtctaaagcggcgagcgaattagaagatgctggacaagctgtgggacgacgtggtggccgggcctcgcccgnagacgggcctcgagaagctccgcaaggccaccaccgcccgtccgctcgtcatcaacaaagacgcggacggcggcagctacaagcgggcgcagtcgatgccgtcgaccccgacgacgccggtgacgccgtcgtcgtcgtcgtcgtcgacgacgccgcgc

SEQ ID NO: 52480 - DNA, 277 bp, Zea mays
caagaagcagctggagctagcagtgctggctgtgttcaactcgtgggagagccccagggccaagaagtacaggagcatcaaccagatcactggcctcaggagcaccgccgtgaacgtgcagtgcatggtgttcggcaacatggggaacacttctggcaccggcgtgctcttcactaggaaccccaacaccggagagaagaagctgtatggcgagttcctggtgaacgctcagggtgaggatgtggttgccggaataagaccccagaggaccttgacg

SEQ ID NO: 52481 - DNA, 276 bp, Zea mays
acaagttcgtgatgatgccctcttggatttctataacaagtggcagcatgaatacttggttgtaagcaagtggtttgctcttcaagctacttcagagattcctggaaatgttgcaaatgttcagaagctgctgtctcaccctgctttcgacctgaggaatcccaacaaggtgtactcactaatcgggggattctgtggctcacctgtgaacttccacgcgaaagatggttctgggtacaagttcttgggtgagatcgttttgcagcttgacaagat

SEQ ID NO: 52482 - DNA, 275 bp, Zea mays
actgctagcagcatacgactcgaagcgcgatgagctccctccaccggtaatcgtgtgggagtggggctggacaaagagcgcggagacctggaatagccgtgcggcgatgctggccgtgctggctctcctggtgctggaagtgaccaacggcgaagggttcctgcatcaatggggaatcctgcctctgttccgctgagccgacaattctgttcatgatggggtcataattttgctgcagccgaaggaagttttgaacttctgatgctgtatatgaa

SEQ ID NO: 52483 - DNA, 271 bp, Zea mays
aagggcgaaacccacaaaccctctccctcccgtactccggcctacacatccaggggcgatgacgctgggtagctccggcgccggatcgagcgtcgtcgttccccgaaacttcaggctattagaggagctcgagcgtggagagaagggcattggtgatggaacagtgagctatggaatggatgatgccgatgacatctacatgaggtcatggactggtaccatcattggccctcacaatactgtacatgagggtcgcatctaccagctgaag

SEQ ID NO: 52484 - DNA, 272 bp, Zea mays
attcgccaatgtgggcaagactatcgggtacaaagttggaacaatgattgagatccccagggcagctctggtggctgatgagatagcggacaggctgaattcttctccttcggaacgaacgacctgacgcagatgacctttgggtacagcagggatgatgtggggaagttcattcccgtctatcatgctcagggcatcctccaacatgaccccttcgaggtcctggaccagaggggagtgggcgagctggtgaagtttgctacagagagggg

SEQ ID NO: 52485 - DNA, 270 bp, Zea mays
agtggagccgacaccaagatgcagattttcgtgaaaacacttacgggaaagaccatcacactcgaggttgaaccctcggatacaatagaaaatgtagaggccaagatccaggataaggaaggaattcctcctgatcagcagagactgatctttgctggcaagcagctggaagatggacgtactttgtctgactacaatattcaaaaggagtctactcatcatcatgtgttgagacttcgtggtggtgctaagaaaaggaagaagaagtct

SEQ ID NO: 52486 - DNA, 274 bp, Zea mays
agaaatcgattcccccgcatccgatctcttcggtgctagagaaatataggccgccgcctcctcctcattcggtgaaaggtgggcggttagggttgggagatctcttgactcacgacacgagcagcagaattcgtcgagggccgctggttgctgcgagaggtccgggccttcgtgggatcttgaaaattgaatgttctaatggagtccaagggtggcaagaagaagtctagcagtagtcgttcctccctgatgtacgaagctcaccttggctaca

SEQ ID NO: 52487 - DNA, 275 bp, Zea mays
ctctcttctcctctccaaggtccctgccacccacacaaggcttggactcttgggccggccgggggggaagaagacaagacaaacgcagccgccggcatgatggcgatctgcagcgcgcacaccaccaccatctccctgcgctccccatgcacgacgaccgtctcgaacgcggcagctggcttggtgcagaagcaagtcatcttcttgaccagcatcaacaggaggagcggcagcagaaggcgtggaggaggggtgagcaggaccttactccaggt

SEQ ID NO: 52488 - DNA, 274 bp, Zea mays
agctcgaatgtttccgagtgttgaagtatgatgtagaaacagatcctccgagaactaaggatcttgatactgttgctttgcttgatcatctaccatcattgcagcaactccttttccgtcttcttgcttgccagccacaaggagcgtcgtcttacaatgttataatccagcatgcactctcaatggttgctttagagagtattaagatctacactgcgattagtgatggaacaatcaatctagttgacaagttcttcgagatgcaaagaaatga

SEQ ID NO: 52489 - DNA, 266 bp, Zea mays
aaaggtcagccaggagctcaggtccatctggatagacctcctcgccaagtgcgacgcgtcgctggggatgaagattgccacccggctcaacatgaagccaaacatgtgatgcatcatgcttgtgctgaataataatgaagacgcatgcatgtcgtcgccaggaacaaagatcgagaaataatacaagaccagcacgcatgcatgggcatactctatatatatatatgtatagcccgtgcccgtgcccgcctttgtaccaatacaag

SEQ ID NO: 52490 - DNA, 268 bp, Zea mays
atgcagccacgaactcccgttctccatttccagccatggcggtagtcgatcgagctcaccaaggagtacggctacgtcgtgctggtgctggtggcctatgtcttcctcaacctttggatgggcttccaggtcggcaaggcccgcagaaactacaaggtgttctaccccaccatgtacgccatcgagtcggagaacaaggacgccaagctcttcaactgcgtgcagttggggcaccagaactctctagagtggatgcccgttttcttcg

SEQ ID NO: 52491 - DNA, 271 bp, Zea mays
atgaccgtgtgttttcaaacgagatgaacattgcaatcaaagaaactgagaagagctacaatgctttcatgttcagagacgccctgaagtctgggttctatgacctccaattggctagagatgagtacaggctctcttgtggtgcagcaggcatgaaccgtgatctgttgtggcgatttatggatgtccagaccaggcttatcacccccatttgcccacactatgctgagcacgtgtggcagaagatcatgaagaaagaaggctttgcaat

SEQ ID NO: 52492 - DNA, 270 bp, Zea mays
  unsure (1)..(270): unsure at all n locations
atagcaccaaggaccttcggcgcccgttcaggatccacatcttcccgagcgagttcttggttgacctcttcctcttcggaccacctccaaggctcttggtgtagcttgccactctcaccaatcaagttttcatgtctgatctcgacattcagatcccaactgccttcgatcccttcgctgaggccaatgctggggactctggtgcggcacacaagcanaggactacgtacacgtgcgcatccagcagcgtaatggtcgcaagagcctgac

SEQ ID NO: 52493 - DNA, 273 bp, Zea mays
atcggctgccgcagactggtagtagccggcgcgccgtcaccgtatcctcagatcagaggcgagcagaaaccacaccactctactgacgaccgacgagcagtgtaacattttccttcagccatgggtaaggagaagactcacatcaacattgtggtcattggccatgtcgactctggcaagtcgaccaccactggccacctgatctacaagcttggaggtattgacaagcgagtgattgagaggttcgagaaagaggctgccgagatgaacaag

SEQ ID NO: 52494 - DNA, 264 bp, Zea mays
tggagctcaaaaagacctggatgatttttgtaaaaaggcacagctggtgaactatgttcagtacagagcacttttggaaggatggacttccttcatgtggacaaagtttacaggtgtcctaatttggaaaacgcagaatccttggactgaactaaggggccaattctatgatcacctccaagaccaaacggctgggttttatggttgccgttgtgctgctcaacctattcatgtccaactgaatttggccacctattttgtgga

SEQ ID NO: 52495 - DNA, 269 bp, Zea mays
attcgccaatgtgggcaagactatcgggtacaaagttggaacaatgattgagatccccagggcagctctggtggctgatgagatagcggagcaggctgaattcttctccttcggaacgaacgacctgacgcagatgacctttgggtacagcagggatgatgtggggaagttcattcccgtctatcttgctcagggcatcctccaacatgaccccttcgaggtcctggaccagaggggagtgggcgagctggtgaagtttgctacagaga

SEQ ID NO: 52496 - DNA, 267 bp, Zea mays
actgggatgagagagctaaaatccctgatccagatgcagtgaagcctgatgattgggatgaggatgcccccatggaaattgtggatgaggaagccaccaagcctgagggatggttggatgatgaacccgaggagattgatgatcctgaggcagccaagcccgaggactgggacgatgaagaggatggtgaatgggaggcaccaaagattgacaaccccaggtgtgaagaggcacctggatgtggcgagtggaagaggccgatgaagc

SEQ ID NO: 52497 - DNA, 272 bp, Zea mays
gtgatgcttcagccaaactctgggatgtgcgagaaggcatgtgccggcagaccttcactggccacgagtctgacatcaatgccatttgcttctttccaaatggcaatgcatttgccactggctcagacgacgccacctgcaggctgtttgaccttcgtgctgaccaggagctcatgacttactcccatgacaacatcatctgcgggatcacctctgtctccttctccaagtagcgggcgcatcctccttgctgggtacgacgacttcaactg

SEQ ID NO: 52498 - DNA, 267 bp, Zea mays
ctcgagccgctctcggacccggaggcaccgggggcttcatcgagcccaagtggctggcctatggcgaggtgatcaacggccgctacgccatgctgggcgcggtgggcgccatcgccccggagatcttcggcaagatgggcatcatccccccggagaccgcgctgccgtggttcaagacgggcgtcatcccgcccgcgggcacctacaactactgggccgactcctacacgctcttcgtcttcaacatggcgctcatgggcttcgccg

SEQ ID NO: 52499 - DNA, 269 bp, Zea mays
aggcctccagtttcctgttggacgaatccaccgtcagctgaagcaaaggactcaggcaaatggccgcgttggtgccactgcagccgtctactctgccgccatcctggagtacttgactgccgaggttctggagctggctgggaacgctagcaaggatctgaaggtgaagcgtatcacccctcgccacctacagttggccattcgcggagacgaggagctggacaccctcatcaagggcaccatcgcaggtggaggtgtcatcccgcaca

SEQ ID NO: 52500 - DNA, 268 bp, Zea mays
atcgagcgattcggctcgagcagcggcactggggcgagttcgtcaccccgggcctgctcatcctctacatcgcagggtacgatcgggtgggtcggcaggagctacatcatcgccgtcagcggcgagaagaagcccgccatgagggagatcatcatcgacgtcgagctcgccacccgcctcctccacagggggttcatctggcccgtcgcggcctaccgcgagctcatcaacggagacctcgtcgtcgacgacaaggacatcggctact

SEQ ID NO: 52501 - DNA, 271 bp, Zea mays
atgctctacctcgacgctattgatcccaataaggatatcattaactatgtgaattcgccaggagggtcagtgacagctggaatggctatatttgatacaatgaagcatatcaggcctgatgtatccactgtttgtattggactagctgcaagcatgggagcttttctacttagtgctgggaccaaaggaaagcgatacagcttaccaaactcaaggataatgatccatcaacctcttggaggggcccaaggacaggagactgatcttgaga

SEQ ID NO: 52502 - DNA, 267 bp, Zea mays
aaaagttgcaattggggctgctaagggtttatcatttctgcatgatgctgagaaccaagtcatatatcgtgatttcaaggcatcaaacattctccttgactcggagttcaatgcaaagctttcagactttggcttggcaaaagcaggtccaactggggacaggacccatgtttctacacaggtcatgggcacaagaggttatgcagctccagaatatgttgcaacaggttaaaaactatctagattttgagtggacgtcatgaaaaa

SEQ ID NO: 52503 - DNA, 268 bp, Zea mays
cttcctcgcgctcgcgctctcgagtcccgactcacctgcttctacaccatggaggcgcctccatcttctcacttcctagtgttgctcctgctgttcttcccttcgagcggccttgccgcccccatggattttaaccatgaagtgcaagtccttatggtgatcaagagcctcctcaaggacccctatggcgcgctgagaaactgggacaggaactccgtcgatccctgtacctggtccttcatctcctgctcgccggagaatctcgtca

SEQ ID NO: 52504 - DNA, 268 bp, Zea mays
tccgctccttcctccccctatctagctagcctcctccccgacgcgggcgtccactccttccgcctcgggctcaaccgcttcgccgacctcaccaacgacgagtaccgcgccacctacctcggcgtcaggagcaggccgcagagggagaggaggctcggtgacaggtacctggccggcgacaacgaggacctgccggagtccgtcgactggcgggccaagggcgccgtcgcggagatcaaggaccagggcagctgcgggagttgctggg

SEQ ID NO: 52505 - DNA, 260 bp, Zea mays
  unsure (1)..(260): unsure at all n locations
ngctcagcatggctcgtggtcccaagaagcatctgaagcgggtggcagctccaaagcattggatgctggataaattgaccggtgtgtttgctcctcgtccatccaccggtccccacaagttgagagagtgtctccccctcatcattttcctgaggaacagacttaagtatgccctgacaggagatgaagtaaagaagatttgcatgcagcggttcattaaaatcgatggcaaggtccgaactgatataaccctacctgct

SEQ ID NO: 52506 - DNA, 225 bp, Zea mays
ggcagctgagccggctgcacccggtgtaccgcctgctgcacccgcatttcggcaacacactggagataaaggcgctggccagggaggggctcatcaacgccgacggcatcatcgaggagtccttctggccgagcaattacgccgtcgagcttagctccgtggcgtacggcgcgacgtggcagttcgacacggaggcgctgcccaacgacctcgtcaagcgcgggc

SEQ ID NO: 52507 - DNA, 271 bp, Zea mays
ctttgtcaacacccgccgcaaggtggactggctcactgacaagactgaggagcagggaccacaccgtttctgccactcatggtgacatggaccagaacactagagacatcatcattgaggcagtccgggtctggcttcttcccgtgtggctcataacaattgacctgtttgcttcggggtattgatgttcagcaggtgtccctggtcatcaacaatgatcttccaacccagccagagaattacctgcatcgaattggtcgtattggtcgtt

SEQ ID NO: 52508 - DNA, 271 bp, Zea mays
ctgagctgcagtggcaattagaccagaagatccccgctcctgtctctaaagaggggaaagggcaaggatggtggaggctttctgtgctacctggaagctgaccaacagtcagaactttgatgagtacatgaaggctctaggcgtgggctttgccactaggcaggtgggaaatgtgaccaaaccaacggtaattatcagtcaagaaggagacaaagtggtcatcaggactctcagcacattcaagaacacggagattagtttccagctgggg

SEQ ID NO: 52509 - DNA, 212 bp, Zea mays
agccgccgccgctgctcatctcacatccctcgagaagacgcctgctcctcgccgatcgatacgatggccgtcttctccgacctccacaccgccgacggcctcaagtccctcgaggctcacctcgccggcaaaacctatgtgtctggtgactccattactaaggatgacattaaggtcttcgccgcggtgccgtcgaagcctggcgctgagtt

SEQ ID NO: 52510 - DNA, 245 bp, Zea mays
tcggctggcttctcctccccctcttatcaagtcctcctcgggttagggttccttagggttttgtggaggggcgatggcggcggctgatgtggagtaccgttgcttcgtcggcggacttgcctgggccaccaacaacgagtcgtaggagaatgccttcgcctcctacggcgagatcctcaactccaaggtcatcaccgaccgggagacggggagttcccgttgcttcggagtccttacctgactcc

SEQ ID NO: 52511 - DNA, 225 bp, Zea mays
cctgtccactttccccgtgcttctccgccgtcgaggccgcgtcccagtgcgaagagactccgactcagatggccagccgctgggtccggcccgaggtgtacccgctgttcgcggcgacgggcgtggccgtcggcatctgcgggtttcagctcttccggaacatcactggcaacccggaagtcagggtaaacaaggcagggagggcagctggtgtgcttgagaccc

SEQ ID NO: 52512 - DNA, 163 bp, Zea mays
ggagcatggggcactccattggtttcagttgaacgtcctccaggcatcaatgatattggcatcgttgcttggaacatgaagctgtccacgccagaattcccacgtggccgggagattatagttgttgccaatgatgtgacatttaaagctgggtcctttggtc

SEQ ID NO: 52513 - DNA, 190 bp, Zea mays
cgatgggaattatcgtatacttgcttatgaatttgcaaccatgggtccgcttcatgatgttttacatggaagaaaaggcgttcaaggcgcgcacctgtgccctgtgcttgactggatgcagagggtcaaaattgttattgaggctgcaaaaggtataggatatctgcatgaacaggttcagccttcaatc

SEQ ID NO: 52514 - DNA, 260 bp, Zea mays
cccagccgcaaccgcacagagacaggggaggaagctctctacccagcgcatccgagcactccccagccccggatccggacccctgctctgcgcaatccacgcatggcggaggaatcaggccgtcccttgccaaagtttagcgattgggctgttaatgatccagcttctgcagccggattacggtactattcagcaaagccagatacgcgacgaagggtgggaacggccaagacactgactcaccttccaaggacaccagg

SEQ ID NO: 52515 - DNA, 227 bp, Zea mays
gtaacttgaaacttcaatataatgaagctggaaaattatccctgtactccgatagtaagactatggttcaagcaaactttgagcagaaatacaagtattatattggacaggatggaaatggcagtgatcctcaggcttctggagcatacatattccgccctaatggcacagttccaatcagtactgatgggcaggtttctctcacagttctgcgtgggcccatattg

SEQ ID NO: 52516 - DNA, 202 bp, Zea mays
cgcagattactctggaagtcttgtattgcagatgcccatccgagaggcatgtcatgttgctgttcagagaagtgaccctaccaaacagaagcaatggaatgctacacaggctagacaactagccaatcgaggagcgtaacagtgttacaaattgtaacccttcgttctgaattaagttaatcgtgcacctacgtttgacatg

SEQ ID NO: 52517 - DNA, 259 bp, Zea mays
gatttatgacatcttccagcttctgccatccaagattcaggttggagtcttctctgctaccatgccacctgaagcccttgagattacccgcaagttcatgaacaaaccagtgagaattcttgtgaagagagacgactgacccttgagggtatcaagcagttctacgtgaatgtggacaaggaagactggaagctggacacactgtgtgacctgtatgagaccctggccattacccagagtgtcatctttgtcaacaccc

SEQ ID NO: 52518 - DNA, 172 bp, Zea mays
gtcacacacacacacacacacagacaagtggtttccaaagccaagtgtgtgtactagcaaccagctagctcgggcggcagcaggcagccatcatgtcggaggagaagcaccaccacttcttcaaccaccacaagaaggacgaggagcagcccgccggcgagtacgggtactc

SEQ ID NO: 52519 - DNA, 248 bp, Zea mays
ctgaagagctgtctatgcctcttgctgctgtgaagtactcccgcgggacgttcatctttcctggcgcacagccagccccccaccggagcttctccgaggaagttgctgtacttaaccgatactttggagggcctgaagtctggtggcaatgcttatgtgattggagatgcagcaagaccaggacagaagtggcacatctactacgccactgagtacccagagcaagcaatggtcaaccttgagatgta

SEQ ID NO: 52520 - DNA, 249 bp, Zea mays
gcaaagtcatggaggaaaacaacatcgtacaccaggctcgcttcttcaggcggcagacagatagcagcgggaaagagtggtgggtgaccaacaatacctactggaggctgcgggccgagccaggctacgggaacatggatggggccgtgctctggtagccctggccccgggggcaggaggctctggttcctcactcctcctgcctccaccccttaccatggacacatgccttccagttccttggtccct

SEQ ID NO: 52521 - DNA, 155 bp, Zea mays
cacattgggcaccgacagcaaggaggaatacctccattttgacaaggaagatgctcctttcgaggttcatcgtattaatcgcggcggtgaagtgacgtaccatggccctggacagcttgttatgtacccgattatgaatctgcggtaccacaaag

SEQ ID NO: 52522 - DNA, 257 bp, Zea mays
ctaagtttgttggtgcatctatggggaccacagaccttaagattccatcaaacaattccaatggtgctgcacgtacaaatttgccagcaagagcatgttgtgttgtggtagagtatcttgctggaggaactttgaagcaatatttgatatagaatagccgacggaagcttgcttataaagttgtggtccagcttgcattggatttggccagaggattgagctatctgcactccagaaagattgtacatcgggatgtg

SEQ ID NO: 52523 - DNA, 255 bp, Zea mays
  unsure (1)..(255): unsure at all n locations
ctcgagcgattcggctcgagcagcggcactggggcgagttcgtcaccccgggcctgctctacctctacatcgccgggtgagtcgggtgggtcggcaggagctacctcatcgccgtcagcggcgagaagaagcccgccatgagggagatcatcatcgacgtcgagctcgccacccggttttgnnccaagggggtcaatttggcccgtagcggcctacggcgagctcatcaacggagacctcgtcgtcgacgaaaag

SEQ ID NO: 52524 - DNA, 257 bp, Zea mays
gctgttcaacgccgtggccgtggaggacctcatcgtcaggggagggcgcgtcggcggcgtcgtcaccaactgggcgctcgtgtccatgaaccacgacacgcagtcctgcatggaccccaacgtcatggaggccaaggtcgtggtcagctcctgcggccacgacgggcccttcggcgccaccggcgtcaagaggctccaggacatgggcatgatcaacgccgtgccggggataaaggcgctcgacatgaacaccgccg

SEQ ID NO: 52525 - DNA, 254 bp, Zea mays
ggaggctcttcctggtgacaatgttggcttcaacgtgaagaacgttgctgtcaaggatctcaagcgtgggtttgtggcctccaactccaaggatgaccctgccaaggaggctgccagcttcacctcccaggtcatcatcatgaaccaccctgggcagattggcaacggctatgccccagtgctggactgtcacacctcccacattgctgtcaagtttgcttgagctccttaccaagatcgacaggcggtctggc

SEQ ID NO: 52526 - DNA, 251 bp, Zea mays
  unsure (1)..(251): unsure at all n locations
catcgatctacacacatacatagtttcttctactacacgacgtaaanacatgggggaagcctgcgaagatcggagagtggggtggatacgccggcgatcgtcgggatctgagggctactccggaccggctgatcgaggtgaaggtcacggcggacaacagcagctgcatccgctccatctccttcatctacatcggagccgatggcaaaccgtacgagaaagggccatggggtttcggccatgctggcacg

SEQ ID NO: 52527 - DNA, 259 bp, Zea mays
atgacctccatccgggcctcagccgtgtccgcagcactcgccgttcgtggtctcacggcaacacgcttccgtggccgtgatggaaatattttaaattgtactaaatgtctgttgcaatctgaatttctggttgttcagctaagcactggaagttatagggttggccatgttatgaccaaaagggaagagctccatgttgtgaaaccaacaacttcagttgatgacgcccttgagatgctggtgaagcataggactctgg

SEQ ID NO: 52528 - DNA, 268 bp, Zea mays
aaaatgatcatatagctaaactagatgctaagattgccgagcacaacttagaaaatgagaaatttaaatttgctcgtagcatgctttataatgggagacgccctggcatcaaggatggcattggcttccaaaggggagacaatgacaaacttaatgcccctcctaagaacttgtctaactttgttaagggcaaagctcccatgcctcaggataacgagggttacattttataccctgcaggctatcctgagaacaaaattagtaagat

SEQ ID NO: 52529 - DNA, 267 bp, Zea mays
tgcagaaaggcttccagatgctggcggatccccgctccttcgactccaacgccttcacgcttctcctccgggcggcattccagagtctgctggacgcccaggcggacgaggccgtgttagatcatccagactttcaacatatcgacccagttgttttaaaacattgtcatgcagcagctgcaacttacatactagcggcaggaaagcaccgagctgacaagtcaactctaagcacttatctagaagacgtaaatttgacagagagcg

SEQ ID NO: 52530 - DNA, 267 bp, Zea mays
ccatgagcgagctgatggattactccagcaccaggaatgatgtctcgatggctgcttcgaacatcattcctggtgctggagtactccatgagcgagctgctgaacaaccgccacgtcctggccaagctccagaaggaggtgaggacggcgacgcccaacggtcgcatggtgatggaggaggacctgagccggatgccatacctgaaggccaccatcaaggagtccatgcgcatccacccgccggcgccgttcctcctgccgcacttc

SEQ ID NO: 52531 - DNA, 206 bp, Zea mays
ggaagaccaattttagttgaggcactgacttaccgagtcggccatcactcgacatccgatgattcgaccaagtacaggccagttgatgagattgagcattggcgaacagcgagggatccgatttccagatacagaaaatgggttcagggtaatgactcgtggtctgatgctgaagaatctgagctcaggagcagagtgagaaaaga

SEQ ID NO: 52532 - DNA, 261 bp, Zea mays
tgatgcccaacattggttatggaagcaacaagaaaacaaagcacatgctgcccagtggcttccggaagttcctggtccacaacgtcaaggagctggaagtgctgctgatgtgcaacaaatcttactgtgccgagatcgctcacaatgtttcctccaagaaccgcaaagccatcgtggaaagagctgcccaactggccatcagagtcaccaaccccaatgccaggctgcgcagtgaagaaaatggtaggcagctcatgtgca

SEQ ID NO: 52533 - DNA, 261 bp, Zea mays
gcgccaccgccgctcccatcaagcggcgctaaaggtttcctcgcccgcaacgcgatgccgaagaacaagggaaagggaggcaagaaccggaagcggggcaagaacgaggcggacgacgagaagcgggagctggtgttcaaggaggacgggcaggagtacgcgcaggtgacgcggatgctgggcaacggccgctgcgaggcgctctgcatcgacggcaccaagcgcctctgccacatccggggcaagatgcacaagaaggtg

SEQ ID NO: 52534 - DNA, 257 bp, Zea mays
gtgccctcgccgcagccatcttccatggcggaccagctcacggacgagcagatcgcggagttcaaagaggccttcagcctcttcgataaggatggcgacggctgcatcactaccaaggagcttggaactgtgatgcgctcccttggccagaaccccactgaagcagagctgcaggacatgatcaacgaggttgatgctgatggcaatgggaccattgacttcccagagttcctgaacctgatggcaaggaagatgaa

SEQ ID NO: 52535 - DNA, 263 bp, Zea mays
cgtagacgtgcgccgcgagatccagattatgcacacctgtgtggccagcggaacctctctcgccagcaggggcgcgtacgaggcccagctgtgcgcccacatcgttatggagttctgcgcgggcggggagctcttcgaccgtctcatatatcgggggcattacagcgagcgcaaggccgcggatcgcacgcgcattatcgttggggtcgtcgaggcttgccactcgctcggggtaatgcacggtgtctcacgccagagaactt

SEQ ID NO: 52536 - DNA, 251 bp, Zea mays
ctcgactacgacaagctcgtggaccagttcggctgccagcgcatcgacgacgcgctcgtggaccgcatcgcacgcctcaccgcccgaccaccgcactgcttcctccgccgaggcctcttcttcgcccaccgtgatttgaacgagatactggatttgtatgagaacgggcagaagttctacctctacacggggagggggccctcgtcggaggccctgcacctcggccacctctccccttcatgttcacaaaa

SEQ ID NO: 52537 - DNA, 255 bp, Zea mays
cggggatgtacaacaaggaggaccacccccgcgtgcccatcatcgtcaccgacaacgacttctccacgctgtacgcgccgctcatccgcgacggccgcatggagaagttctactgggcgcccacccgcgaggaccgcatcggcgtctgcaagggcatcttccgcaccgacggcgtccccgaggagcacgtcgtccagctggtcgacaccttccctggccagtccatcgacttctcggcgcgctgcgtacccgggt

SEQ ID NO: 52538 - DNA, 124 bp, Zea mays
atggatagcaccaacgtgtatgcttacatctcaataatcgctctaattgtttgcattccacctgcattgatctttgaagggcccaagctaatgcagcatggatttagtgatgccattgcaaaag

SEQ ID NO: 52539 - DNA, 272 bp, Zea mays
ctcgcgtctcccttcccagatccatcgactcgctcgggccgctcctcccgtcgtccccgttcgaatgtgcggcatccggcatgcatgcgagttcattcgacatgaatcccgagtacgactaccttttcaaacttctgcttattggtgattctggtgttgggaaatcatgcttgcttctcagatgtgcagacgattcttatttggacagctatatcagcacaattggggttgatttcaaaattcgcacagtggagcaagatgggaagaccata

SEQ ID NO: 52540 - DNA, 271 bp, Zea mays
ggctctgaggatgtgggcgagctcagccgccaatgcgctcaagctctcggcgggcggcgcggatcccgggctgctgccttctctatctccaggttcttctccactgttcacgatgggttgaagtacactcagtctcacgaatgggtcaagacgacgcgcgacgtcgccaccgttggcatcacggaccatgctcagggccacctgggagaggtggtgttcgtggagctgccggaacccggcacgaaggtggccgcgggaggatccttcggca

SEQ ID NO: 52541 - DNA, 272 bp, Zea mays
ccctgccaaccctaaggtacattatgagactactggtccagagatctgggaggattcaaaggggaaggtggatatattcattggtggaattggaacaggggggacaatatctggtgccggccgttttctcaaggagaaaaatcctggaattaaggttattggtattgagccttctgaaagtaacatactctccggtggaaaacctggtccacataagatccagggaatcggcgcaggatttgttccaaggaacttggatagcgatattcttg

SEQ ID NO: 52542 - DNA, 260 bp, Zea mays
tgatcgctcatcaatcgccagaggagttgttgatcgaggtgagtgaggttgaaaagcacaccatcgtcatggacggcggatactacggcggtcgcgatcagcgctacagcggcgggtactacggcggcggtggcatcgcaacgccggggtacgctccggcggtcccgtacgggatgtcgcaggtgaacatcgagggcaacgggtgcgggctggcgctgccgccgcagccgaccgtgaaggtgtactgccgcgccaaccca

SEQ ID NO: 52543 - DNA, 263 bp, Zea mays
agcgacacgatcgcgagcgcacgcacgtgagcacgttgtcggaagctcaagttagaagaagcaccagtgcctgatcgatggcggcccaggctctcctctccggccggcagctgctgggccgccccgtgcagtcggccgtctctaggtcgtcggcgaggaaggcgcccttcgtcgtcagggccagctccagccctccagccaagctaggtgccgacaggagctgtggttcgcgtccaagcagtccctctcctgcctcgatggca

SEQ ID NO: 52544 - DNA, 266 bp, Zea mays
cgagaaggacttgcagccttggattgctagagatgacgaacaaggtcagaagatgtggagagtcaaccagcgtatagtgaagcttatagctgagcttatgaggaaccatgacagccctgaagcgttggtgatactcgctagtgcctccgaccttctacttcgtgctaccgatggaatgctcgtcgatggtgaagcttgtactttgccacagcttgagcttctggaagtgaccgctcgggctgtccatcttatcatcgaatggggag

SEQ ID NO: 52545 - DNA, 264 bp, Zea mays
gaaagcttcaccgaggaccaggagatgctgataatggcagagaactcctttgactacgttgaaggttttgtcatcataaacaggacaggcgtcctcaacaactggagggcgtccttcaagccacaagacccagtcgaatcaagccattttcagtcggatggaagagtactatactgcctcgagctaaccaagaacttcaatagtgacgacactgataccatggaacaggaagttactgtactgctatctcgacttagattcata

SEQ ID NO: 52546 - DNA, 262 bp, Zea mays
gcacgggcgggctgctccgcaaggcgcaggtggaggagttctacgtcatcacgtggacgtcccccaaggagcaggtgttcgagatgcccaccggcggcgccgccatcatgcgggagggccccaacctcttgaagctggcgcgcaaggagcagtgcctggcgctcggcaccaggttgcgctccaagtacaagatcacctaccagttctaccgcgtcttccccaacggcgaggtgcagtacctccaccccaaggacggcgtcta

SEQ ID NO: 52547 - DNA, 258 bp, Zea mays
aggcaagaaggaagaaaggggtgaccataaggttgcagggtttatatttatgtgcaatgcaaagactaagaaggagtgctaccagaatcgcttgtttgggatgcctggtgggaagattggaatggtcaagaagataaggccaggggtgaagctgttcctgtatgattttgacctcaagcttttgtatggtgtgtacaaggcagcatcacatggggggctaaaccttgtccttggagcatttagtgggaagttccctgc

SEQ ID NO: 52548 - DNA, 260 bp, Zea mays
gcattgtgctcttttgtaggtttctgcagcccgagaagaggtgccaggtaggcgtggttatcctggatatatgtatactgatttggcaacaatatatgagcgtgctgggcgtattgaaggaagaacaggctccattacccagattcctattctaacaatgcctaacgatgatatcacacacccaactcctgaccttactggatacattactgagggacagatatacattgataggcagccatatacagacagatttatcc

SEQ ID NO: 52549 - DNA, 264 bp, Zea mays
ctacgtctcactccactagcagatgcaagcaatccgattatggctcaggttgcatttttatcagccattgtgggttccgatgttgcctcagctgcagcgcaagcagctatttctgcccaatcccgtgttgaccttaatgacggcgagattgaaacttcaataaatagcatcaagcaagaagaatcatctcacacaaatgggctctcagccaacgtgttactgaaagaggcagctgctaatgcacgggcacaactcgagaaggaa

SEQ ID NO: 52550 - DNA, 258 bp, Zea mays
aggcagagttgttgggacattcggttatatggcgccagagtatgcatcacatggtagtgtgtcgcctaagattgacatctttagcttcggcgtcttgatccttgagatcgtgaccaggagaagcaactgcagctctgatgaccacagcactgtgaatctcctaagtgatgtctgggatcactggaagaaagggacgatgccacaaatgcttcaccggtcactggatgagtttgctcgaagccaagcgctgcgatgcat

SEQ ID NO: 52551 - DNA, 250 bp, Zea mays
aacgttacggaaatgctgtcaagtggagggatacaggtttcaaatggtaaggaatatgcactgagcgatgtcatcgataccatcaaacatgctttttggggatcgccacaaattgtttgcaagaggggttcaatcgaagaacttaggttatgcttcgacaaagaattgaagcctcgtgattgccttaccacttctttggcgaatggaagtgtatcaaaaagcaagcactgcccgcgggacatcaccttgc

SEQ ID NO: 52552 - DNA, 259 bp, Zea mays
gtgaagattgttcttactgtcctcagtcatcaagatacaacactggattgaaggcccaaaaattgatgaacaaatatgctgtcttggaagcagcaaaaaaggcaaaagagtctgggagcacccgtttttgcatgggagctgcatggagagaaaccattggcaggaaatcaaacttcaaccagatacttgaatatgtcaaggaaataaggggtatgggcatggaggtctgttgcacactaggcatgatagagaaacaaca

SEQ ID NO: 52553 - DNA, 269 bp, Zea mays
gttcctccacagccttttgtagaacaatattgcttcagagctccttatatttcatcacaactgagagagggattgcagattaaagatagtcaggtgataaatggctctggcagtattacttggactcatggagttgctttgctggaggctggtcaagcattgtcttcacgactagatattcaaggatatcgaatactgcacagggagataaatccaaatattctcatagtactgtttctgatttcaattgtgttggtcatatgtgccat

SEQ ID NO: 52554 - DNA, 254 bp, Zea mays
ctcggcccacgcatctgatgttcctctcccgcatcgtactccgcgacctggattccatcgactctccggcctccatggcgtcctcgaagaaggttgtgacccgtgacgagtgggagctgaagctccgcgacgtcaagatccgcaaggaggacatgaaccgcctcgtcatgaacttcctcgtcaccgagggcttcgtcgacgccgccgacaagtttcgcatcgagtccggcacccagcaggagattgacctagcg

SEQ ID NO: 52555 - DNA, 199 bp, Zea mays
aataagcaagcagcgagtacatacatactaggcagccaggcagccatggcgcccaccgtgatgatagcctcgtcggccaccgccgtcgctccgttccaggggctcaagtccaccgccagcatccccgtcgcccgccgctcctccagaagcctcggcaacgtcagcaacggcggaaggatccggtgcatgcaggtagtgg

SEQ ID NO: 52556 - DNA, 261 bp, Zea mays
gctgcctccgcctctcgagtctcgtccacccgtcgtcctaatagctcctctactcgccagtcgccatgggcaagactaagatcggaatcaacggcttcggaaggatcggcaggctcgtggccagggtcgccctccagagcgaggatgtcgagctcgtcgccgtcaacgaccccttcatcaccacggactacatgacctacatgttcaagtacgacaccgtccacggccactggaagcacagcgacatcacactcaaggact

SEQ ID NO: 52557 - DNA, 251 bp, Zea mays
acaacatctacctcaacttcgacgccttccacggcgacaaggcccacggcggcgtccatgacggtaccgagatcgtgctctggaagtggtgcgagggcgacaaccagagctggaagatcctcccttggtgaacgaacgaaagaaactactagctggtaccctaataataatccggctggctgcggcgatcccataataaaagaggccgggtgcgatgcatctcggacttctcgagtggtgtttgtgtaaga

SEQ ID NO: 52558 - DNA, 254 bp, Zea mays
atctctgcgcacatcgatgcagccgtggctgcaaaagcctacgagctcggtctggcgatccgtctgcatctccccagcgatctggtgaaatatgcagagaactgcatgtacactcccgtctaccgcaactaccggtagtgctgcggggatcaattttgcagtaataaaaatctatcaacgcggatggtactctgttgtttatagtccctgctgctaaccacccttgttgctggtgctgctggagatgcattgta

SEQ ID NO: 52559 - DNA, 247 bp, Zea mays
aatgaccaaccagggtgttcaagtgttcccagagataatggttactcttgttggaacaccacaggaactggggcatcaagtgactcttagccgccaagttgctgagaaagtgttcgccaatgtgggcaagactatagggtacaaagttggaacaaggttaagacccagggggcatctctggggctgatgagaatgcgggaaaggcgaattcttctccttcggaacaaacgacctgacgcagatgacc

SEQ ID NO: 52560 - DNA, 261 bp, Zea mays
gtagcctacaacaggaggccaaggactcctgaggtcacagttgacgagacatggttttatgatccacaaatttgtgaaacaaatcagcaatggtatattttgtccaagacgctggcagaggaggctgcttggaagttctcaagggataatggacttgaaatcgttactataaacccagcgaacgttattggtcccctgctgcagcctacactaaataccagtgctgaagcaatcctgaagttaatcaatgggtatcgtcta

SEQ ID NO: 52561 - DNA, 253 bp, Zea mays
gggtactcagttagctgatgcgaaggatgttatggaagcagttcggactattgggggtgtacgttttcctgtattgaacctataccttaagggatttgaggcagctattgcagctggggcaaaagaaatcgcaatatttgcatcagcttctgaaggattttccaagtcaaacatagactgcaccattaaagagagcattgcccgttataatgacgttgctcttgctgcgaaagagaaagaaattctgtccgag

SEQ ID NO: 52562 - DNA, 246 bp, Zea mays
ggcgacttgatctccttgtctgaacaagagcttgtcgactgtgacacttcgtacaatcaggggtgcaatggaggtctgatggactatgcatttgagttcatcatcaacaatggcggaatcgacaccgagaaggattacccttacaagggcacggacggacggtgtgatgtcaacaggaaaaacgcgaaggttgtcactattgccagctacgaagatgtaccacgaacggatgagaagagtctgcag

SEQ ID NO: 52563 - DNA, 258 bp, Zea mays
accgaatctgctgtcgagcagttcaacggttatgcaattcaaggaagacaactgagagagaactgcgggccaccaccacctagagatgaatccacaccaagagcaccaaggggtggtggtggcggcggcggcgccggtttgtgctttccagctaacaaggtctatgtggggaaccttgcgtggggtgttgacaactcgactctggagaacctgttcagtgagcaagggcaagtgcttgatgctaaggtcatctacgac

SEQ ID NO: 52564 - DNA, 261 bp, Zea mays
tagagcgcctctacatttcttctctctctacacctccgcctccgcctgatccatccaagacagggatcgccatgtcggactcggaggagcaccacttcgaatcgaatgccgacgctggggcgtccaagacctacccgcagcaggctggcaccgtccgtaagaacggcttcatcgtcatcatgaaccgtccctgcaaggttgtggacgtttctacctccaagactgttaagcatggccacgccatattgcactttgtcgcca

SEQ ID NO: 52565 - DNA, 144 bp, Zea mays
aggagctctccttcccggtctcctccgcacgttgcattcgtcccctccatctccggctgcatcgccggcgagcccgacaccgcgaatcggatccgccgacaaggcgagagggaaaagatggggctaaggttaacaagctgttca

SEQ ID NO: 52566 - DNA, 260 bp, Zea mays
aagaagaccatcgccgactacggctctcccgaggagttcctctcccaggtcgactacctgctcggcaggcaggcctacggcggcaagaccgactccgagggcgggttcgagaccggcgccgtggccaccgccaacgtcctggagagctccacccccgtgatcgacggcaagcagtactacgccgtgtccgtgctcaccaggacggcggacggcgacgagggcggcaagcaccagctcatcgcggccaccgtctccgacgc

SEQ ID NO: 52567 - DNA, 249 bp, Zea mays
ctatcgggtacaaagttggaacaatgatgtgtgatccccatgggggttcttgtggctgattatatagcggacatgctgaattcttctccttcggaacgaacgaccttactcagatgatctttgggtacagcatggatgatgtgggaaagttcaatcccgtctatcatgctcagtggattcgccgaatggagccctttcaggtcttggtcagtagtggattggcgagctgttaagctttctacagatagg

SEQ ID NO: 52568 - DNA, 273 bp, Zea mays
cggctcatgtaggatgtgaggctacagctcagctacgccatatgtcgtctcatagctgctcgtgcgaggcgtgcgcgtgagccccgggctgctgccttctctatctccaggttcttctccactgttcacgatgggttgaagtacactcagtctcacgaatgggtcaagacgacgggcgacgtcgccaccgttggcatcacggaccatgctcagggccacctgggagaggtggtgttcgtggagctgccggaacccggcacgaaggtggccgcg

SEQ ID NO: 52569 - DNA, 252 bp, Zea mays
ggcgacttgatctccttgtctgaacaagagcttgtcgactgtgacacttcgtacaatcaggggtgcaatggaggtctgatggactatgcatttgagttcatcatcaacaatggcggaatcgacaccgagaaggattaccttacaagggcacgggacggacggtgtgatgtcaacaggaaaaacgcgatcgttgtcactattgacagctacgagttgtaccagcgaacgatgagagagtctgcagaagcagtt

SEQ ID NO: 52570 - DNA, 287 bp, Zea mays
ggaggggaatccaattgcgatggcctccgactcgggcgatttcggtggggagaacaagtcgttggaaacggcgaggcggctgctggaggagaccttcacgagtgaggcagaggcggaggcgctaccgagcttgccctcggggttctacgacgccttcgtcctgaggggaatccgcgtcgtccaggccctccagcccggcacactcctctgccacttcaacgtgccctccagactactcaactcgggcggcttcctgcacggcggcgcaaccgcctccctcgtggatt

SEQ ID NO: 52571 - DNA, 282 bp, Zea mays
caagaacaagtccatggaaggtctatcggcaaaatctgtggttctgaattttgtgtgtcaactagttgttttcctgtaccttcttgacaatgacacttcatggatgatccttgctagctctggagttggtgtgtgcattgaattttggaagattggaaaggcaatgcatattgaggttgatagaagtggaaaaattcccatgttgaggttccgagaccgtgaatcatatgcacagaataagactaaagagtacgatgccattgcaatgaagtaccttaccta

SEQ ID NO: 52572 - DNA, 284 bp, Zea mays
ctccagctgtgaaggaagccttcgatgttgcatatgacaatatatatgccttccatgtttcacaaaaaatacctgagaagacagttgaaaatatgaaaggcgtaagatgtaagagaataactagatgcattggttctgttgggctgtatgtcccaggtggcactgcagtcttgccttcaactgcattgatgcttgctgtgcctgcacagattgctggatgcaaaactattgttcttgccacaccacctagccgtgatggcagcatatgcaaggaggttctttac

SEQ ID NO: 52573 - DNA, 277 bp, Zea mays
cgatttgttgctttcaaatctgctgaagatgctaaccgagctcttacggagatgaatggcaaaatggttggaagcaagcccctttatgtagctcttgcgcacgtaatagaagacagaaaggcaaagctacaggcacaattttcacaaatgcgtcctgttgcaatggcgccttcagtaggtcctcgcatgcccatgtgtccacctggtgtccctgaagttggtcagcaactgttctatggtcagctaccaccaactttcataaaccctcaggctggat

SEQ ID NO: 52574 - DNA, 281 bp, Zea mays
cggtaaacaaggcagggagggcagctggtgtgcttgagaaccatgaggaggggagacgttacgccatgcatggcctaagaagctttgtgcacgacaagactcctgagatcatgcctgcagttaacaagttcttcactgaccctaagtgaagcatgttgattggcatactactactactacttgctactggggattttacactttgctggcaactcaatatgttggggacatccatgacctctaaaagtactttgagcgcttggtgatgacttggtatatgt

SEQ ID NO: 52575 - DNA, 213 bp, Zea mays
gctgcctcggtcgatttctaattctcctcgcgagcccaaaccctaaacctaaacctttcacccgccgccgccgccaccaccagcactgccactccgccaccaccgtcccgaagccccctcccagcgccatcgacttcatctcggattgaagcaatgtcgtcggacgatgaggtcagggaggagaaggagctcgacctctcctccaacgacgtt

SEQ ID NO: 52576 - DNA, 278 bp, Zea mays
caagctggagctatggtgaagaagattccactttaccagcacatcgcagatcttgctgggaacaagactctggtgctccctgtacctgcctttaatgtgattacatggaaggtcaatgctggatacaagcttgccatgcaggagtacatgatcttcccaactggtgcctcctcgttcaaggaggccatgaacatgggagttgaggtgtaccacaacctggagatcatactcaagaagaggtacggtcaggatgcgacaaacgttggggatgaaggtgg

SEQ ID NO: 52577 - DNA, 281 bp, Zea mays
ctcacttccgcgccgccacccccttcaggtaaggaagaggaggagggcagcctgtcgcaccgtaagttcgagcacccgaggcacggctccctcggcttccttcccaggaagcgctcctcccgccaccgcggcaaggtgaagtcattccccagggatgaccccaagaagccttgccatctcactgccttccttggctacaaggctggcatgactcacattgtccgtgaggttgagaagccaggatccaaactccataagaaggaaacttgtgaggctgttac

SEQ ID NO: 52578 - DNA, 278 bp, Zea mays
agatggtgtgagcagcactgatatcggtgggggatggcagcttgcttggaaatggtcagagaaggaaggtgagaatggtaggaaggaaggtggtttcaaaagagtctacttgcaccaagagggagttcctggctcaagaaggggctcaattgtttcacttcccggtggtggcgatgttcttgagggtagtgagtttgtacatgctgctgctttagtaagtcagtcagcacttttctcaaagggtcttgctgaaccacgcatgtcagatgctgccatgg

SEQ ID NO: 52579 - DNA, 117 bp, Zea mays
cacagatcaagtcagtgacactggtctgccagcctcacctagggctgctgtaggccacgttgtgtttactgctgacgatgctgaagcatggcattctcaagggaaagctgctattct

SEQ ID NO: 52580 - DNA, 277 bp, Zea mays
ctggcccaacggccataattgcccaggtgaacgaagcgatcagggcagacgggatcatcagcacggagtgcaaggaagttgtgagccagtacggagagatgatcctcgacatgctcatcgcacagacggatccacagagggtgtgcagccaggttggtctgtgcgtgttcgatggcgctcgatctgtcagcgaggggattgaatctgttgtcgggaaagaaaacctgggctcagatgtcatgtgctcggcctgtcagatggctgtcgtgtggataga

SEQ ID NO: 52581 - DNA, 281 bp, Zea mays
gcaccccgctgccgcggctcgaacataaaccctagagccgccggcccggtcgcgctagcgcacaaatctcaaatcacccggagagaactcgctcgcgaaggctgaactcatggctcgcgtcttcgttgggaacctggatccgcgtgtcacggcgcgggagattgaggacgagttccgcacgtttggggttctgaagagtgtatgggttgctaggaaaccaccagggtttgccttcattgacttcgatgaccgcaggatgcacaagatgccattcgcgattt

SEQ ID NO: 52582 - DNA, 275 bp, Zea mays
aagaacatcaaccccgatgaggctgtcgcctatggtgctgctgtccaggctgccatcctgagcggtgagggcaatgagaaggtgcaggacctgcttctgctggacgtcacccctctgtccctgggtctggagactgctggaggagttatgacagtgctgatcccgaggaacaccaccatccccaccaagaaggagcaggtattctccacctactcggacaaccagcccggtgtcctgatccaggtctacgagggtgagaggacccggacacgcga

SEQ ID NO: 52583 - DNA, 273 bp, Zea mays
gaaaccaaggcgtccttatgagaaggagcgtcttgatgctgaactgaagctggttggtgagtatgggctgaggtgcaagcgtgactttggagggtccagtatgcactgagcaggatccgtaatgctgcaaggcacttgctcacccttgacgagaagaacccccgtcgtatctttgagggtgaggcacttcttcgccgcatgaaccgctatgggctgcttgctgagggtcagaacaagcttgattatgttcttgccctcaccgctgagaacttc

SEQ ID NO: 52584 - DNA, 225 bp, Zea mays
cggctcgagcatctaccagcgactcagcgagcgagagcagcacacactgcacgcagctagctaggagcagcagcagcggcggcgatggcggcctccatgatctcctcgtcagctctggcggtggcgcctcagggcctgccgcccctcggccgccgcgcctcctccttcgccgtcgtctgctccaagaagaagatcaagaccgacaagccctacgggattgggggt

SEQ ID NO: 52585 - DNA, 276 bp, Zea mays
ctaaaatattagggggtctaaatccaaattatggaaattctgctccgaaagtaatgttctattctgctaggggtcctgaccctgaggacaatacactgtcaaatgctgatatcttgaaaccaaatctagtagcaccgggaagttccatttggggtgcttggagttcagttggattggattctgctgaatttgctggtgaaagtttcgcaatgctctctggcacaagtatggctgcgccccatgtcgctggcctcgccgctctaatcaagcagaagt

SEQ ID NO: 52586 - DNA, 276 bp, Zea mays
gcttcgcccactcgctccagccgcttcaccgcgccgccaccgccaccgcgaggatgccgttcaagaggttcgtggagatcgggcgcgtggccctggtgaactacggggaggactatggccgtctcgttgtcatcgtcgatgtggtcgaccagaacagggcacttgtggatgcccctgatatggtcaggtgccaggtgaacttcaagcggctctcacttactgacatcaagattgacatcaaacgtgtccccaagaagacagccctgatcaaggcga

SEQ ID NO: 52587 - DNA, 272 bp, Zea mays
ggactccaagacgcttctcttcggcgagaagccggtcaccgtctttggcatcaggaaccccgaggagatcccgtggggtgaggctggtgctgagtatgtcgtggagtccaccggtgtcttcactgacaaggacaaggctgctgcacatctgaagggtggtgccaagaaggttgttatctctgccccaagcaaagatgcacccatgtttgttgttggtgtcaatgaggacaagtacacctccgatgttaacattgtttccaatgctagctgca

SEQ ID NO: 52588 - DNA, 276 bp, Zea mays
cgcgaggcacgcacgtaagcacgttgtcggaagctcaagttagaagaagcaccagtgcctgatcgatggcggcccaggctctcctctccggccggcagctgctgggccgccccgtgcagtcggccgtctctaggtcgtcggcgaggaaggcgcccttcgtcgtcagggccagctccagccctccagccaagcaaggtgccgacaggagctgtggttcgcgtccaagcagtccctctcctacctcgatggcacgctgcccggcgactatggcttcga

SEQ ID NO: 52589 - DNA, 180 bp, Zea mays
atccagctgtgaaggaagccttcgatgttgcatatgacaatatatatgccttccatgtttcacaaagaatacctgagaagacagttgaaaatatgaaaggcgtaagatgtaagagaataactagatgcattggttctgttgggctgtatgtcccaggtggcactgcagtcttgccttcaa

SEQ ID NO: 52590 - DNA, 268 bp, Zea mays
gcaccccgctgccgcggctcgaacataaaccctagagccgccggcccggtcgcgtagcgcacaaatctcaaatcacccggagagaactcgctcgcgaaggctgaactcatggctcgcgtcttcgttgggaacctggatccgcgtgtcacggcgcgggagattgaggacgagttccgcacgtttggggttctgaagagtgtatgggttgctaggaaaccaccagggtttgccttcattgacttcgatgaccgcaggatgcacaagatgc

SEQ ID NO: 52591 - DNA, 269 bp, Zea mays
gctcgacgagagtcacacgccgagcaagatctccatccgggccggggatggcttccacaacctaaaggagattagaacggtggagcttgcaaagccagttggatgggtccacatatcattatccgggattgatccacgagaaacattcattcacacatttatgctccaaattgctgttttatccaatcatctgaatgggagggatactcatgtccgacagatcaagatctacgggcaaagaccgaatcctgttccccaccagccgtttc

SEQ ID NO: 52592 - DNA, 271 bp, Zea mays
gccaaccaggaggatgccctcgcgcgaattgaaaagctttcagaagtaaacccgatgcttggcttccgtgggtgcaggcttggtatatcgtaccctgaattgacagagatgcaagcccgggccatttttgaagctgctatagcaatgaccaaccagggtgttcaagtgttcccagagataatggttcctcttgttggaacaccacaggaactggggcatcaagtgactcttatccgccaagttgctgagaaagtgttcgccaatgtgggca

SEQ ID NO: 52593 - DNA, 205 bp, Zea mays
gtgttggtccaccacttccttgctgctatgtgaagcttgtctcatgggaagaaggtggttacaagatttctgattctccgatgccgagaggagaagtcgtggttggcggacacagtataacagaaggttatttcaacaatgaagcaaagacgaacgaagtatacaaggttgatgagaggggcatacgctggttctacactggtga

SEQ ID NO: 52594 - DNA, 298 bp, Zea mays
cttgcgttcgctgtttcgggaccatggacgaaaggattccgccgatcgtccctcttgcaatactcgcagtcccctgctcattcttccccccatcccctcaattctatgaggtattcttcctctgatcgagaaagatatctggctgagttgcttgcagagaggcagaaattggccccatttgtgcaagttcttcctttctgtaccaggctcttgaaccaagagattttgcgcgcatcttctatggcgcctaaccataactttgttgatcctgagagaattgagcatggtagcccattaa

SEQ ID NO: 52595 - DNA, 295 bp, Zea mays
ccgccaccgaggagctgcccatcatgccctgggtcttctccgtcgcaagcggttacaccctcttgagggatccacatcacaacaagggtcttgctttcacggagaaggacatggatgcacaccacttgcgtgggctgcttcctcctgcagttgttcctcaagaactccaaattaagaagatcatgcacaacctgcggcagtaccaggtccctttgcagcgctatatggccatgatggaccttcaggagaggaacgagaggcttttctacaagcttttaattgataacgtggaggg

SEQ ID NO: 52596 - DNA, 293 bp, Zea mays
ctggtttcgctgccccgattcgccacgaagccgcactgtgagagagggacgcggcccgttgtcctcggcttgtacgcaatccttccgtcgctgcgaactgatccctcgtgttcgccatggcccccagcgtcgccgtggaaaacctcaaccccaaggtcttgaaatgtgagtatgcagtccgtggcgagattgtcatccatgctcagcgcttgcagcaacaactacaaacacaaccagggtctcttccttttgatgagatcctgttctgcaacattgggaatcctcaatccctt

SEQ ID NO: 52597 - DNA, 290 bp, Zea mays
ctggtgtcttgggcttcaaagaagcaaaattcggtcgctctttctaccgccgaagccgagtacattgctgcagcattgttgtgcgcaattgctttggatgaggcaaaccctgcgggactacggatacaaattaaccaaagtccctttgctatgtgataatgagagtgcaatcaaaatggccgacaatcctgtcgagcatagccgcactaaacacatagccatccggtatcattttcttagggatcaccaacaaaagggagatatcgagatttcttacattaacactaaag

SEQ ID NO: 52598 - DNA, 283 bp, Zea mays
cgcaggtttatgttcaggtggcactgccagcagaagtgatccgttgacttcagctatgggcaacctgtgctgctgtgttcaagtcgaccagtcgactgtggccatcagggagcagtttggcaagtatgacagcgtgcttgagccaggatgccactgcatgccttggttcgccggcaagcgtgtagctgggcaactcacactcaggctgcagcaactggatgtgcgctgtgagacaataacacaggacaatgttttcgtgaatgcggtggcatctattcagtac

SEQ ID NO: 52599 - DNA, 284 bp, Zea mays
cttaggaaatttttggggatagggactttagaggacgagatgttaaggttgcactcgaactatcatttatggaagcagttcaagggtgcagcaaaacggtcaccttccaaacgtctgtaacatgtgaaatctgtggtggagccggtgtgcctcctggaaccacacctgaaacatgtctatcttgcaggggttcaggatttatattcatgcaaaccgggcccttcaggatgcaatcaacctgcacaaaatgtggtggttctgggaaaactgtgaaggaattctgc

SEQ ID NO: 52600 - DNA, 291 bp, Zea mays
acccgttcgggctcgggaagcccgtggagtacctgcagttcgaactggactcgctggaccagaacctggccaagaacgaggccggcggcatcatcggcacccggttcgagtcctccgacgtcaagtccaccccgctccagccctacagcgaggtgttcggcctccagcggttccgcgagtgcgagctcatccacggccgatgggccatgctcgccaccctcggcgccctcaccgtcgagtggctcaccggcgtcacctggcaggacgctggcaaggtggagctggtggatg

SEQ ID NO: 52601 - DNA, 283 bp, Zea mays
gggctcttcgcggccccgcccccgccgccgccgcgcccagcggaggagcccgagacagagccgctccctcctcccgtgcagatgggggaggtctccgaggaggacctccgccagtacgacggctccgaccctaagaagccgctcctcatggccatcaagggccagatctacgacgtcacccagagcagaatgttctatggacctggcggaccttacgccctgttcgccggcttagatgccagcagagctctagcgaagatgtcgtttgagccacaggacctca

SEQ ID NO: 52602 - DNA, 281 bp, Zea mays
ctcggctacttggaatatttgagaatggagtagttcagtcattcatctatgctcgaacactgtcaccagcagacatgaaagaacctaaaatagcagctgaaattgccaaggagctacgcaaattccatcaagtagacataccagggtctaaagaaccacaattgtggaatgatatattcaagtttttgaagaaagctgcagcattgaagtttgaggataacatgaagcagaagagttatgaaaagctctcatttagagaaatacaagatgaagttcaagaa

SEQ ID NO: 52603 - DNA, 254 bp, Zea mays
ctgccactggccgtatcgagcgtggcaccgtcaagattggtgacacagttgatatcgttggaatccgggacacccggaactgcaccgtgactggcgttgagatgttccagaagaccatggacgatgccatggctggagacaatgtcggactgctgctccgtggtatgcagaaggatgacattgagagaggcatggtgctggaaaagcccggctctatcacaccgcacaccaagtttgagcctgtgtgtatgtgc

SEQ ID NO: 52604 - DNA, 290 bp, Zea mays
cttttggctcggcagctaacgacctgcagccatccatctaccagcgactcagcgagcgagagcagcacacactgcacgcagctagctaggagcagcagcagcggcggcgatggcggcctccatgatctcctcgtcagctctggcggtggcgcctcagggcctgccgcccctcggccgccgcgcctcctccttcgccgtcgtctgctccaagaagaagatcaagaccgacaagccctacgggattgggggtggcctgaccgtcgacgtcgacgccaacgggagatagggca

SEQ ID NO: 52605 - DNA, 282 bp, Zea mays
gccaaccaggaggatgccctcgcgcgaattgaaaagctttcagaagtaaacccgatgcttggcttccgtgggtgcaggcttggtatatcgtaccctgaattgacagagatgcaagcccgggccatttttgaagctgctatagcaatgaccaaccagggtgttcaagtgttcccagaaattatggttcctcttgttggaacaccacaggaactggggcatcaagtgactcttatccgccaagttgctgagaaagtgttcgccaatgtgggcaagactatcggg

SEQ ID NO: 52606 - DNA, 280 bp, Zea mays
atcggatgctacctgctccaagagcacatcaaggcgtcaggtggattcaggaacgccttcaggaagggcaatggtgtgtcgaactccatcggcatcctcctgctcttcatctaccctgtctgggccggtgtgctgcaagtcctgtaggcacccaccattgcctcagtgtttcccctgtgcggtccaggcgtccagctccgttcccgttcgtgcccgtgcaaatgctccctctatggtgatccgtgatcctgtgtcacgagtaggtgatgtttttatgtgt

SEQ ID NO: 52607 - DNA, 274 bp, Zea mays
gtgctagtacgttacctaaggatgaggttgagagaatggtagaagaagccgataagtttgccaaggaggacaaagagaagagagatgcaattgacacaaaaaatcaggccgattctgtggtctaccagactgagaagcaactgaaggagcttggcgataaagtccccgctcccgtgaaagagaaggtggatgtgaagctccaggagctcaaagaggcaatatctggtggatcaacacagagtatgaaggatgccatgtctgctttgaaccagga

SEQ ID NO: 52608 - DNA, 265 bp, Zea mays
tgaagaacgacaccgacctcacggcctctgacctcaaagagctcgtgggtcagtacaaggaggtctacctctcagccaagggagagccattcccctcagaccccaagaagcagctggagctagcagtgctggctgtgttcaactcgtgggagagccccagggccaagaagtacaggagcatcaaccagatcactggcctcaggggcaccgccgtgaacgtgcagtgcatggtgttcggcaacatggggacacttctggcaccggc

SEQ ID NO: 52609 - DNA, 286 bp, Zea mays
tgtgctgagacgggagccaaccaggaggatgccctcgcgcgaattgaaaagctttcagaagtaaacccgatgcttggcttccgtgggtgcaggcttggtatatcgtaccctgaattgacagagatgtcagcccgggccatttttgaagctgctatagcaatgaccaaccagggtgttcaagtgttcccagagataatggttcctcttgttggaacaccacaggaactggggcatcaagtgactcttatccgccatgttgctgagaaagtgttcgccaatgtgggca

SEQ ID NO: 52610 - DNA, 279 bp, Zea mays
gtggttcccagttcgtccttgcagctcggccatgtcctcttcctccctgctcaattcccatggccggtgctctgctcggattctgcccgccaagctcccagccgagtctcctcccatggcttgagcctccctgttgctcgcgtcgtggcctggccccagctccggcccgtcgcggctcctatggcgctcggccatctctgcgcccgtccatggtggttccctgcgcgcctgaattctgctcggttccgtttgcagcgcccctgcgctcgtcgcggtgct

SEQ ID NO: 52611 - DNA, 282 bp, Zea mays
ccagactccattctttattcatatgggatttctacaatattcagtgtgatacctgccttctgtaaaaaggagatatcatagtcgctgatgacggtgttcactgggcagtgcaaaatggtctccatctatcaagaagcactgtggtgtacttcaagcacaatgatatggcttcacttgcaagcactttggaaaaacttactcgtggaaataaacgtgctgaaaagattagacgctacattgttgtagaatccatctaccagaattctggcaaaattgcccctt

SEQ ID NO: 52612 - DNA, 281 bp, Zea mays
cgcttcgctctcacgctcgcgtcaccggagctctccagaaccgaaccccaactgcccaagggcgagcgatccgaacccctcggcggcttcgtcaacgacgccgagaacactttgaggaatggctgaagaggatgtccagccccttgtgtgtgacaatggcactggaatggtcaacaatggtttcgctggtgacgacgcaccgagagctgtctttcctagcattgtaggcaggccacgccacactggtgtgatggtgggcatgggccaaaaggatgcatatg

SEQ ID NO: 52613 - DNA, 257 bp, Zea mays
  unsure (1)..(257): unsure at all n locations
ctcacttccgcgccgccacccccttcaggtaaggaagaggaggaaggcaggatgtcgcaccgtaagttcgagcacccgaggcacggctccctcggcttccttcccaggaagcgctcctcccgccaccgcggcaaggtgaagtcattccccagggatgaccccaagaagccttgccatctcactgttcctcctggctacaaggctggcatgactcacattgtccgcgnagttgagaagccaggatccaaactccataa

SEQ ID NO: 52614 - DNA, 270 bp, Zea mays
gcgggcgaggtgctgtgcgggtaccagccgctggcgatgcgggaccccgaggtgttcgagcggcccgaggagttcgtgccggaacgcttcctcggcgacgagggcgccaggctgctgcagcacctcttctggtccaacgggccggagacggcgcagcccgggcccgggaacaagcagtgcgccgccaaggaggtggtggtggacacggcgtgcatgctgctggccgagctgttccggcgctacgacgacttcgaggtggagggccctcct

SEQ ID NO: 52615 - DNA, 271 bp, Zea mays
agcttgaaggtttctggtgatgtctggtttggttctggaattacgctcaagggcaaggtgacaatcaccgccaagtctggagtgaagttggagattccagacggaactgtatttgaaaacaaggatgtcaatggccctgaggatctttaagctatgcttgccgtcaccagtttttcccaaggacatgtcaataggagctgccaacccaaatcactcccgctgagctctaccttttgtaattctcgtgccgttccgcttccgctgtgagggt

SEQ ID NO: 52616 - DNA, 283 bp, Zea mays
gttgttgtgggcatccaccggtgtcaagaacccagcttatcccgacactctttacatcgacagtctcattggacctgacacggtcaacacgatgcccgaccaagctttgcacgcattcatagaccacggcactgtctcgaggacagttgatgcgaatgtgtccgaggcggaaggtgtatacagcgccttggagaagcttggcattgactggggcgaggtcggaaagcagcttgagctggaaggtgtggactccttcaagaagagctttgacagcctactcgtg

SEQ ID NO: 52617 - DNA, 278 bp, Zea mays
taacaactgagagcaagcaacatgaagaaaagaagcctaccaacatgaatgcatttgatataatctctctatcaactggcttggacctctctggtttatttgaagaatctaacaagaagagagaatccaaattcacatctaccaacacaagctcgacaatcatatcgaagatcgaagatattgcacagaatttgcggttgaatttgacaaaaaaggatggtggcttgttaaagatggaagcttcaaagcccggaaggaaaggggtaatgggtatcgat

SEQ ID NO: 52618 - DNA, 271 bp, Zea mays
cagctcccatatccgctcccctacctctccagcatctcccgtctccgtcgtctcgtctctgctcctcacctcgccgccagccatgggcaagatcaagatcggaatcaacggtttcggaaggatcggcaggctcgtggccagggtcgccctgcagagcgaggatgtcgagctcgtcgccgtcaacgaccccttcatcaccacggattacatgacctacatgttcaagtacgacaccgtgcacggccaatggaagcacagcgacatcaccctc

SEQ ID NO: 52619 - DNA, 269 bp, Zea mays
gcgagagaaacgcgtatacccaggcggcggttgaggaagaggaggagaagaagaagaagatggcttcctccgcatacgcctcatggtccaagcggtggatccgtcccgaggtgtacccgctgttcgtgccgatggccgtggccttgggcatctgctcgtaccagcttgtgcgcaacatcacgggcaaccccgaggtgcgggtgaccaaggagaagagggcggccggcgtcctggacaaccacgacgagggcgagaggtacgctatgcac

SEQ ID NO: 52620 - DNA, 274 bp, Zea mays
tggctgaagggcgtcgagtacgagtacgtcgacgaggacctcgccaacaagagcgccgacctgctccgccacaacccggtgaccaagaaggtgcccgtgctcgtccacgacggcaagccggtcggggagtccaccatcatcgtggagtacatcgacgaggtctggaagggcggctaccccatcatgccgggcgacccctacgagcgcgcccaggcgaggttctgggccaggttcgcggaagacaagtgcaacgctgctctgtacccgatcttca

SEQ ID NO: 52621 - DNA, 268 bp, Zea mays
caacaactgagagcaagcaacatgaagaaaagaagcctaccaacatgaatgcatttgatataatctctctatcaactggcttggacctctctggtttatttgaagaatctaacaagaagagagaatccaaattcacatctaccaacacaagctcgacaatcatatcgaagatcgaagatattgcaaagaatttgcggttgaatttgacaaaaaaggatggtggcttgttaaagatggaagcttcaaagcccggaaggaaaggggtaat

SEQ ID NO: 52622 - DNA, 264 bp, Zea mays
cttgaaggacaagatattcatcaaagcaaccttggctggtcacctgtgtatgttgatgccaaccttggtgtgatgtcgattggtttcatgctgcctaatccagacgatgctgtcatatggaggaggtcccgcaagaatggactgatcaagcattcttaaaggatgtcgattggggaaagattgactatcttgttgtggacgctcctccaggaacatctgatgagcacatctcgatcgtgcactaccttcaagccacaggaatcg

SEQ ID NO: 52623 - DNA, 270 bp, Zea mays
tggccagctccagccctccagccaaacaaagtgccgacagcagctgtggttcacgtccaaacagtccctctcctaacctcgatggcacgctgcccggcgacaattgcttcgacccgctagcgctctcggacccggaggcaccgggggcttcatcgagcccaagtggctggcctacggcgaggtgatcaacggccgctacgccatgctggacacggtgggcgccatcgccccggagatcttcggcaagatgggcatcatcccgccggagac

SEQ ID NO: 52624 - DNA, 269 bp, Zea mays
ttgacggcaaggtgcgcatctgggacagcctctctggagcctgcgccagggagttcagtgggcatgcagatgtagtacagtcgctggccatcactgctgacggcaacaccatggtctccgcctcatcagatggctccgcccgtgtgtttgacatctccatgttcaagtgaaggaaaccgggacggagtacatgtttatgctatggcttgattgtgatgcacgattgatcatggcatgccatggtaatatgcgattgtactactctgctc

SEQ ID NO: 52625 - DNA, 267 bp, Zea mays
gtcagatcagtggacaagtaatcttgatctgctcactggacttcgcaaatttgcagatgatgaaaagcttcatgctgagtgggcagcagccaagttatcttgcaagaagcgcctggcggaacatgtgttggatgtgacaggtgttacgattgatccaactagcctttttgatatacagattaagcgcatacatgagtacaagagacagctcctaaacatattgggagctgtttacagatacaaaaaattaaagggaatgagtgcaga

SEQ ID NO: 52626 - DNA, 267 bp, Zea mays
ctccgacacgccggatgaggccgcggagatgctcgctgacatcaaggccggcgtggaagcccgcagagctcgacggggacgtggtggccgtgccaaagaagcgggacagcgatgaggcgcggatatggaaggagttcatcctgtccccgacacgggcaatgcgtcgcatccacctctcgggcatcggcatgcacttcttccatcaggggtccggcatcgacgccgtggtactgtacagcccgcgcgtgttcaaggccgccggcatca

SEQ ID NO: 52627 - DNA, 258 bp, Zea mays
caatccactcctcttggccgccgcattacctcctcttcgccgctgccgccaccgctccaccgggcagccagccagccatggatgaggagtacgacgtgatcgtgcttggccacggggctcaaggagtgcatcctcagtgcgtctcctttccgtcgacgggcctcaaggttttgcatctggacagaaacgactactatggaggagattcaacctcgctcaaccttaatccgctcttggaaaggttaagaggggaagaca

SEQ ID NO: 52628 - DNA, 267 bp, Zea mays
cgcttatcggttatgttattatcggcggtgaagctataatggtgtacagggtacttccaacatcgaatcatgacacaactaagctgatccatctaattctccacgggattgcactcgtccttggtgcggttggaatatactttgctttcaaaaatcacaatgagagtgggattgccaatctttacagcctgcactcttggattgggataggaacaattactttgtatggtattcagtggataattggattcgtcacgttcttcttcc

SEQ ID NO: 52629 - DNA, 250 bp, Zea mays
tgctgaggatgctgaagcatggcattcccaagggaaagctgctattctggtaatggcggagaccagccctgatgacgttggtggcatgcacgctgctgtggggattcgtacagagaggggtggcatgacttcccacgctgctgtggtcgcactgggatggggaatgctgcgtctcgggatgctcaagcattcgcgtaaacgatgcggagaagctcgtgacgatcggaggccatgtgctgcgcgaaggtga

SEQ ID NO: 52630 - DNA, 266 bp, Zea mays
gccagctccagccctccagccaagcaaggtgccgcagcagctgtggttcgcgtccaaacagtccctctcctacctcgatggcacgctgcccggcgactatggcttcgacccgctaggcctctcggacccggaggcaccgggggcttcatcgagcccaagtggctggcctacggcgaggtgatcaacggccgctacgccatgctgggcgcggtgggcgccatcgccccggagatcttcggcaagatgggcatcatcccgccggagac

SEQ ID NO: 52631 - DNA, 258 bp, Zea mays
ccctacgcccgtttctctctcgtcgcgcaacatcagagcacaagcgaggaacccagtccagtcccgggaatggagtgcgtattgggcgtggttggccgcgacttcgtgctggtagcggccgacacctccgccgtgcagagtattctcgtccacaagaccgacgaggacaaggtgatggtgctcgactcgcaaaagctgatgggcgcttcatgggagcctggtgatcgggtgcaatttacggagttcatacagaagaac

SEQ ID NO: 52632 - DNA, 224 bp, Zea mays
ggctcgagaggcaagcaaggtggtgttcacaacaaacctaaaggacctcttgaggcactccgacccaagcttcagcctacgcaacagaatacccgcgcccgccgaacttcatatgcgtctacggacagtgacgacactttgaatctgtcacccgaggatctggtcacgcaaggagaaacccaccagcatggagaaaccgtcgaggacaagaacaggcataaaca

SEQ ID NO: 52633 - DNA, 258 bp, Zea mays
cgccatggccaccatggcgaagaagagcgtaggggaactcacggaggccgacctcgaggggaagcgcgtctacgtgcgcgccgacctcaacgtgccgctcgacgagaaccagaacatcaccgacgacacccgcatccgggccgccatccccaccatccagtacatcctccgcaaggccgccaaggtcatccactcaagccacttgggtcgccctaagggttttacacccaagtttagcttagctccccttgtaggacg

SEQ ID NO: 52634 - DNA, 255 bp, Zea mays
cgtgttattaacgattcagtaaaacagaatctgaaaagatttcacgaggcagcccggcattctttaattagcacccctgaaaggaagttggctctcattattgatggtagatgcctaatgtacgcactggacccaactcttcgtgttgatcttcttggattgagtctaagttgccactctgttatatctgccgagtttctccgctgcagaaggcacaggttacaagcttagttaggaagggtgctgagaaaataa

SEQ ID NO: 52635 - DNA, 256 bp, Zea mays
gttagaagaagcaccagtgcctgatcgatggcggcccaggctctcctctccggccggcagctgctgggccgccccgtgcagtcggccgtctctaggtcgtcggcgaggaaggcgcccttcgtcgtcagggccagctccagccctccagccaagcaaggtgccgacaggcagctgtggttcgcgtccaagcagtccctctcctacctcgatggcacgctgcccggcgactatggcttcgacccgctgggcctctcgg

SEQ ID NO: 52636 - DNA, 253 bp, Zea mays
cttgctctgtattttgctgcatccagtccacaccttgtaacaggtgtcacactgcttaatgcaacaccgttttggggattctttcccaaccctgctacatctccccgattgtcaaagattttcccatgggctgggacatttccgcttccatcatttgtgaggaaaattactgaagcagtttggcaaagataagtgacccaaaaagtattcaggacatactcaaacaagtacgtaaacaaaagtcaacaaatgt

SEQ ID NO: 52637 - DNA, 256 bp, Zea mays
cgtgcggaaggagtcggagggaaccgaaaactcagggtctcgaatttcctaggagcggaggcgatggctgggaagggaggaaaaggattgctcgccgcgaagacgacggcggccaagtcggcggagaaggacaaggggaagaaggcccccatctcacggtcctcccgcgcgggcctccagtttcctgttggacgaatccaccgtcagctgaagcaaaggactcaggcaaatggccgcgttggtgccactgcagccg

SEQ ID NO: 52638 - DNA, 252 bp, Zea mays
ccgtgcagcgccctccctctacgttcccccatttcctgtgttggcggcgatggcgtcgcacttcgtgcacaacaccggcgccaagatcccctccgtggggctcggcacctggcagtctgaccccggcgtcgttggcaacgctgtctacgccgccgtcaaggcgagttaccgacatatcgattgtgccagagtttacggcaacgaaaaggagattggtttggcgctgaagaagctatttgaagagggtgtagt

SEQ ID NO: 52639 - DNA, 254 bp, Zea mays
gacgatccttgtttgctacctgatggtactgatgcctatgctcttgccaaaaaggctggtcgatacaagcagattaagagaaccgagggagtgtcgacaacagacattgttggacggatgcttctttgtgttagagagagatcatctgatgcacataaccactcgtcactacaaaggcagttcagtagtggacatggtcagaaagttgatgatactggatctggaactggaacaagagtatctcattttcttcc

SEQ ID NO: 52640 - DNA, 254 bp, Zea mays
tggcaagcgatggttgcctacatcaacgtcggatgctactacttcatcggcatacccctcggcgtgctcctcggattcaagttcggtttcgggatcaagggactgtggggaggcatgattgggggtacctcatccaaacacttgctttgatctggatcacgttaaggactgactggaacaaggaggtaatttttaagccaccgtaaatttccttggttaccgtgccgtgtcactgacagatggtcctcaaatcc

SEQ ID NO: 52641 - DNA, 254 bp, Zea mays
cgacatcgacacatcgtcgccacgagcaacagatactccgccggcgttgagatgttggtttatcaggatctcctatctggcgacgagctcctgtcggattcattcacctacaacgagctcgagaacggcgtcctgtgggaggtcgatggaaagtgggtcacccacggtcctgttgatgtggacatggtgccaatccatccgccgacggtggtgaggacgaaagcgttgatgacacagctgtgacggtggttgat

SEQ ID NO: 52642 - DNA, 255 bp, Zea mays
cttgtcggagtattctatccttacaaccgtggtgcactatacactgcattggttgtcatttatgcactcacttcaggaattgctggatacattgctacctctttctattgtcagttggaggggacaaactgggtgaggaacttgctattgacaggatgcctattctgtggacctctcttcctgacttttgcttcttgaacaccgttgctattgcttatagtgcaacagcagcactgccctttggcactatctgtg

SEQ ID NO: 52643 - DNA, 255 bp, Zea mays
cggtgaaccattccggtgacgtcaacacgttcgcggtgcctcggagactagagacagaggagataccacacgtcgtcaatgacttccgggttgccgccagaaacgccatcaaagcaggctttgatggagtggagatccacgcggcaaacgggtacctgttcgatcagttcatgaaggacagcaccaatgaccgagacgactcctacgggggcagcttggagaaccggtgccgtttcacagccgaggtgatggcag

SEQ ID NO: 52644 - DNA, 253 bp, Zea mays
cgacgacatcttcgtcaccgccggaggacgacaagccatcgaggtggtggtctcagtcctcgcgcagccgggcaccaacatactgctcccgaggccgggctatccgaactacgaggcgcgcgcagggctgcacaacctggaagtccgccggttcaatctgatccccgagagagggtgggagattgacatcgacggtctggagtcgatcgccgacaagaacaccaccgccatggtcatcataaaccccaacaac

SEQ ID NO: 52645 - DNA, 254 bp, Zea mays
cttatgggggagtccagcagtgagctaattgctttcaagactgaaatgaagaaggtgttcaaaatgacagacttagggacactatcatactatctgggtatagaagtgcaccaaggcgacaaagggatcagcctttgtcaaacttcctatgtgaaaaagttgctagaaaaggtcggactgagccatgcaacccatgttcaactccaatggaagctaagctgaaactgtccaaggacagtgattcttctcgagtt

SEQ ID NO: 52646 - DNA, 256 bp, Zea mays
caaacctctcaaaccctagccgcctcctgcaagtttcagagctcaggaatctgcgccatggcgagtgagacggagaccttcgcatttcaggctgagatcaaccagctgctctcactcatcatcaacaccttctactccaacaaggagacaatcctccgcgagcttatctccaactcttccgatgcgctggacaagatcaggttcgagagtctcactgacaagagcaagctcgatgcgcagcctgagcttttcatcc

SEQ ID NO: 52647 - DNA, 254 bp, Zea mays
caaatggggaacagactacatcctcaaaaccttcaattcatctgctgacacgatagacaggatcgtcgctcaggtgggtgtaggtgacacctctaaaggcagcagtcagcctaatgaccattactgctggatgagcccagaggacatcgactacaaaaggccagtcaccgagtgtcactcttgctcagatctagcgtctgacatggctgctgccctggctgcagcatccatagtgttcaaggacagcaaaacct

SEQ ID NO: 52648 - DNA, 255 bp, Zea mays
tttttaaagcgacagacttcaattacaaatgcaaatactagagcagttcagcaagtgatgatggaaggaaacacccaaacattacccaggggggccaggacacaaacaaaggtttttcaacaccacaacctggctcgacagccaaacagattcatgcaagcagatcagtattcctcctcctcgtcacgtcatcactgccgccctctgcggcgacctcctcgtagtccttctccagggcggccaggtcctcgcgtg

SEQ ID NO: 52649 - DNA, 253 bp, Zea mays
cccatcgacacgatcgcgagcgcaagcacgtacgttgtcggaagctcaagttagaagacgcaccagtgcctgatcgatggcggcccaggctctcctctccggccggcagctgctgggccgccccgtgcagtcggccgtctctaggtcgtcggcgaggaaggcgcccttcgtcgtcagggccagctccagccctccagccaagcaaggtgccgacagcagctgtggttcgcgtccaagccgtccgtctcctacc

SEQ ID NO: 52650 - DNA, 253 bp, Zea mays
cggcgaccttcggcgtcccgccggccacgcgagctcgccgaaatggtcgcccacaggttccatcagtaccaggtggcgggtcgagcgctgccgaccccaaccgatgagcaccccaagatctaccgcatgaagctctgggccaccaacgaggttcgcgccaagtccaagttctggtacttcctgagacagctcaagaaggtgaagaagagcaatggccagatgcttgccatcaacgagatctttgagcgcaacc

SEQ ID NO: 52651 - DNA, 247 bp, Zea mays
gcgcctaccaatctcatcgtcccacgggctggcctccacgccggcgccaatcaccacgacgacgtgccggccggccgtcttggcgacggccgcggcccagaagaggagcctgctgctggcgacggcctccgagacgaggggagtcgcgccggtgacgtccagcgggatcgatacgagcaggtgggtctgggatgtgaggccgtcaccgggcaggtcacggaggtcaacaaggacaccttctggccca

SEQ ID NO: 52652 - DNA, 248 bp, Zea mays
gggtggcatgacttcccacgctgctgtggtcgcacgtgggtgggggaaatgctgcgtctcgggatgctcaggcattcgcgtaaacgatgcggagaagctcgtgacgatcggaggccatgtgctgcgcgaaggtgagtggctgtcgctgaatgggtcgactggtgaggtgatccttgggaagcgccgctttccccaccagcccttagtggtgatctgggaactttcatggcctgggtggatgatgttag

SEQ ID NO: 52653 - DNA, 251 bp, Zea mays
gcaatttgacgagctgtgtgaggctttatgggagcaagctctaactccagttaaagacgtgctgacacattctggcatgaagatcgatgacatctatgctgtagaactaataggaggagctacccgggttccaaaactgcaggctaagctgcaggaatttctgggtaggcgtggcctggataaacatcttgatgctgatgaagcaattgttctcggagcttcacttcatgctgctaacctgagtgacggga

SEQ ID NO: 52654 - DNA, 252 bp, Zea mays
gtgcctttgaggctgagcttgcagatgccatccctgtggtcaagacctctattggtggcactagaataataggccgactttgtgttggaaacaagaatggacttctattgccacatactacaaccgaccaagagcttcagcatctgaggaattgcttgcctgatcaagtggtggttcagcgcatgatgagaggttatctgcccttggcaattgcatagcctgcaatgaccatgttgcacttacgcaccctga

SEQ ID NO: 52655 - DNA, 251 bp, Zea mays
gaggaatcgagcctggtgttctttatccagctgtctctgttgagcagtttcacgaaccccatgcttataagttgaatttcctatcaatcaaccggtttgagaggaaaaagaatcttgatcttgccatttcagcatttgctttgctccgttctgctgcttggactatacctggtgatgctctacaagaagcaacattaacagtggcaggtggctatgataagcgtctcaaggaaaatgttgaataccttgag

SEQ ID NO: 52656 - DNA, 250 bp, Zea mays
gtcgccgaggtggccaaggtcaacaaccgcttcaagcgcgaggaggtcgtcatcaacggctgggagggcgaccaggtcgagaaggccagcgcgtggctcaagaagtacgagaggaagcttgaggagaagcgtgccaaggcgatggagaaggcgcagaacgaggtggccaaggcgcggcggaaggcggaggagaagcgcgcgtccgcggaggccaagcggggcaccaaggtggcgcgagtgctggagctcg

SEQ ID NO: 52657 - DNA, 250 bp, Zea mays
acgaattccagcttgacggcattccaccagccccaagaggcatgccccagatcgcggttacctttgacattgatgccaatggcattgtaaaggtgtcagctagggacaaagccacaggcacagaacaagaaatcaccatcaagtcttctggtggtttgtcagaggtcgaaattgagaagatggtgaaggaggcagagctacattctcagaaggaccaggaaaggaagtctcttattgatctcaagaactc

SEQ ID NO: 52658 - DNA, 249 bp, Zea mays
ccgccctcgatgagccatccggtcgcatctacgcgcgaggctcccaggacatgaagtgtgtggggatgcagtaccttgaagccatacgccgtctccgttctgcaggatttgttccagatcgagatatctatataacatttgttcctgacgaggagattggtgggcatggcggtgttgaacctttgtttcatccaaggagttcaaagatatgaacgtggcattagtccttgatgaagggcttacctctcc

SEQ ID NO: 52659 - DNA, 251 bp, Zea mays
ccagactccattctttattcatatgggagttctacaatatacagtgtgctacctaccttctgtatcaaggagatatcatagtcgctgatgagggtgttcattgggcagtgcaaaatggtctccatctatcaagaagcactgtggtgtacttcaagcacaatgatatggcttcacttgcaagcactttggaataacttactcgtggatataaacgtgctgaaaagattagacgctacattgtggtagactcc

SEQ ID NO: 52660 - DNA, 247 bp, Zea mays
cagcgactcagcgagcgagagcagcacacactgcacgcagctagctaggagcagcagcagcggcggcgatggcggcctccatgatctcctcgtcagctctggcggtggcgactcagggcctgccgcccctcggccgccgctctcctccttcgccgtcgtctgctccaagaagaagatcaagaccgacaagccctacgggattgggggtggcctgaccgtcgacgtcgacgccaacgggagatagggc

SEQ ID NO: 52661 - DNA, 248 bp, Zea mays
gcgcctaccaatctcatcgtcccacgggctggcctccacgccggcgccaatctccacgacgacgtgccggccggccgtcttggcgacggcgcggcccagaagaggagcctgctgctggcgacggcctccgagacgaggggagtcgcgccggtgacgtccagcgggatcgagacgagcaggtgggtctgggatgtgaggccgtcaccgggcaggtcacggaggtcaacaaggacaccttctggcccatc

SEQ ID NO: 52662 - DNA, 249 bp, Zea mays
ctggtgtcttgggcttcaaagaagcaaaattcggtcgctctttctaccgccgaagccgagtacattgccgcaggccattgttgtgcgcaattgctttggatgaggcaaaccctgcgggactacggatacaaattaaccaaagtccctttgctatgtgataatgagagtgcaatcaaaatggccgacaatcctgtcgagcatagccgcactaaacacatagccatccggtatcattttcttagggatcac

SEQ ID NO: 52663 - DNA, 246 bp, Zea mays
ggctgccgcagactggtagtagccggcgcgccgtcaccgtatcctcagatcagaggcgagcagaaaccacaccactctactgacgcccgacgagcagtgtaacattttccttcagccatgggtaaggagaagactcacatcaacattgtggtcattggccatgtcgactctggcaagtcgaccaccactggccacctgatctacaagcttggaggtattgacaagcgagtgattgagaggttcgag

SEQ ID NO: 52664 - DNA, 248 bp, Zea mays
ccagcgaggtggcttccatctcgcttctgggccgatctcactgagcccccgccgttcttctctccacttcctgcgttctccaaccgccgtcttcgctgataggctacgccgcccgctggcctgcgcgcgccgcagccttaccctgtgtgcaccctgttcctaaccctgcgtgtggccgcgccgactggcttgcgtgcgcccgcgcctccgcctaaccctgctagcttgcgcgcccaacgccagatgcc

SEQ ID NO: 52665 - DNA, 243 bp, Zea mays
ctggtttaacgattgctatcgatctccttgagcctatcaaagcaaagaatccaaagataacatatgcagacctgtatcagcttgctggagtggttgcagtcgaagtgactggggggccaactgttgaatttattcctggcagacgtgattcgtcggtgtgcccccgtgaagggcgtctccagatgctaagaaaggtgcaccacatctgagggacatcttttatcggatgggcttatcggacaa

SEQ ID NO: 52666 - DNA, 246 bp, Zea mays
gtggaaacaatgatgacaagaggccgcccaccccagtgagagatatgaagccagagcaggtccttgctcgtatgcaccacctacagcagctgcttgacaggttccttgcttgccgccccaccggtggggcgaacacagcaggatggtgctggttgcgctgtatcagattgtgagggaagcttccagctctacgccgatatctgcgaggtgctggcggtgctgctggacaggttctttgacatggag

SEQ ID NO: 52667 - DNA, 284 bp, Zea mays
agagaaggaaaaatatccccaaaccctagctcccgatctcgatggcgaaccctcgcgtctacttcgacatgaccgtcggcggcgccccggcgggccggatcgtgatggagctgtacgccaacgaggtgcccaagaccgcggagaacttccggcgctgtgcacgggcgagaagggcgtgggcaagtccgggaagccgctccactacaagggctccaccttccaccgcgtcatccccgagttcatgtgccagggcggcgacttcacccgcggcaacggcaccggcg

SEQ ID NO: 52668 - DNA, 279 bp, Zea mays
gtttgatggactatgcgtttgagttcatcatcaacaacggcggaatcgacaccgaggaggattacccctacaagggcacggacggacggtgtgatgtcaacaggaaaaacgccaaggttgttactatcgacagctatgaagatgtacagcgaacagtgagaaaagtctgcagaaggcagttgcgatccagcccatcagtgttgcaattgaggctggtggcagagcatttcagctctacaactcgggtatcttcacaggaacctgtggaacagcgttgga

SEQ ID NO: 52669 - DNA, 278 bp, Zea mays
cagaggctaagaagcctgaggactgggatgacaaggagtacattcctgaccctgaggacaagaagccagagggctatgatgatattcccaaggaaattcctgaccctgatgctaagaagcctgaggactgggacgatgaggaagtggtgaatggactgcccctaccattcccaacccagaatacaagggaccatggaaacaaaagaaaatcaagaacccgaactaccagggtaaatggaaggcacctatgattgacaacccagattttaaggatgatc

SEQ ID NO: 52670 - DNA, 265 bp, Zea mays
ccagaaggagagcaccctccaccttgttctccgcctcaggggagcgatgcagatcttcgtcaagaccctcactggaaagactatcaccctcgagatggagtcttctgacaccatcgacaacgtcaaggccaagatccaggacaagagggcatccctccggaccagcagcggctcatttttgctggcaagcagctcgaggatggccgcacgctagccgactacaacattcagaaggagagcactctccacgtggtgttgcgtctca

SEQ ID NO: 52671 - DNA, 268 bp, Zea mays
gttccatctgaacggcacttgcacatgggtaagccgatcctaagggacggtggatacccggcagatagcgcgatcacgcgcgtcacccgaaatggtatcgggttaagatttcccgagccgggacgtggcggcagacggcgacgtaggatgtccgcgccgcgcgccttctaacaataacgacaacagcggggccgtggaggcgcccgaccgcctcgtggccgcggtcgcctacctatacccgttcctcgacggtgcgcactacgggcgc

SEQ ID NO: 52672 - DNA, 242 bp, Zea mays
tccatggtacgggtcacccgttttctgaatctggctaatgatcccaggattgaacgtattatcaccccacggattgcactaacagcagtataatatttggcatatgaatgtgggttagcatgtacgtgtcaacttgagagatatgtgctctaggcagacgaacttcgtgaggtttttgcagcccgagaagatgtgccaggtaggcgtggttatcctggatatatgtatccggttctggcaac

SEQ ID NO: 52673 - DNA, 274 bp, Zea mays
gttggagctcgcctaatctctcatgctggcagtctttcaaaccttgctgaagtgtgcagcctccacccttcaaatacttggtgctgagaaggccctattcagagcactgaaaactcgagggaacacaccaaagtatgggcttaattccactcctcctttattggccgtgcttcaactaagaacaagggcagaatggctcgttacctggcaaacaaatgctcgattgcttcacgcattgactgctactcggaggctagcacctctgtctatgggc

SEQ ID NO: 52674 - DNA, 280 bp, Zea mays
gccgaatctgctgtcgagcagttcaacggttatgcatttcaaggaagacaactgaaggtgaactgcgggccaccaccacctagagatgaatccacaccaagagcaccaaggggtggtggtggcggcggcggcggcggctttgtcgttcagctaacaaggtctatgtggggaaccttgcgtggggtgttgacaactcgactctggagaacctgttcagtgagcaagggcaagtgcttgatgctaaggtcatctacgacagggatagcggcaggtcaagggg

SEQ ID NO: 52675 - DNA, 282 bp, Zea mays
ctcgcggtccgacgagaagctgctctccgtgtaccgcgagggcgtcaagtacggcgcgggcatcggccccggtgtctacgacatccactcccccaggatcccgtcggctgaggagatcgccgaccgcatcgacaagatgctggacgtgctggacaccaacatcctctgggtgaaccccgactgcggcctcaagacccgcaagtacacggaggtcaagcccgccctgaccaacatggtctccgccgctaagctcatccgcacccagctcgccagcgccaagtg

SEQ ID NO: 52676 - DNA, 263 bp, Zea mays
gggaagcctgcgaagatcggagagtggggtggatacgccggcgatcgtcgggatctgagggctactccggaccggctgaccgaggtgaaggtcacggcggacaacagcagctgcatccgctccatctccttcatctacatcgagccgatggcaagccgtacgaggaggggccatggggtttcggccatgctggcacggagtacaagattgatctgtgcaggttcgacgagagcttgacgaatatctccgggaccacgggccca

SEQ ID NO: 52677 - DNA, 271 bp, Zea mays
ctccaatccacgataaggcaagataagctagctaggaaggcaagggatccgatggacaaggacgagcccgttcgcgagaacgtggcgggcaacttcggggcggccatgctgatgaggaacaaggacacgagggagctggggccatgaagttcatagagcgaggaaacaggatcgacgagaacgtgttccgcgagatcgtgaaccagcgctccctccgccaccccaacatcatccggttcaaggaggtggtgctgactcgcagcaccttgcg

SEQ ID NO: 52678 - DNA, 272 bp, Zea mays
tccactctccgcttcccgctccgatcgacctgctccctccccaccaccgagcccatggcggaccagctcaccgacgaccagatcgccgagttcaaggaggccttcagcctcttcgacaaggacggggatggttgcatcacaccaaggagctgggcactgtcatgcgctcgctggggcaaaatcctacagaggctgagctccaggacatgatcaacgaggtcgatgctgatggcaacggcaccatcgatttcccagagtttctcaactttatg

SEQ ID NO: 52679 - DNA, 184 bp, Zea mays
tggaaggcaaagaggtacaggtattggtggtggaaatgatgaaagggagcagactctcaatcaactactaactgagatggatggttcgagggcaacactggaattattgttattgctgccactaaccgggctgacatattggattccgctttacttagacctgggcgttttgatagacaggtgt

SEQ ID NO: 52680 - DNA, 186 bp, Zea mays
  unsure (1)..(186): unsure at all n locations
tgtcgggactacctgctgagtttaagcttataaataagtggaggagaagaaacttacgaggattcccctagtaagggtcagcgaacgggagcagcccagcttgagaattcggcggcctcgcaattttnttaattctggaagaaggggtcctcagcgacggaccgggcccaagttctctggaaaggg

SEQ ID NO: 52681 - DNA, 195 bp, Zea mays
gtctcactaccagttccttggcatagcgccagaggcgacatcgaggagatcaagacggcgtaccggcggctgtccaaggagtaccacccggaacgacgacgctgccgctcaaggtggcgtccagaagttcatccgcctgcgagaggtgtacaacgtgctgagcaaggaggagacacggcggttctacgactggac

SEQ ID NO: 52682 - DNA, 181 bp, Zea mays
  unsure (1)..(181): unsure at all n locations
agtcacgctcctgctcgnncttgattgttccaggtattcgcagtcgaccgtgtcctcggagcacgatgaaggttgttgctgcctctctgcttgctgtcctcgctgggaatgccagcccctccgctgaggatttgactgctcttctggagtcagttggctgtgaagttgacaatgaaaggat

SEQ ID NO: 52683 - DNA, 179 bp, Zea mays
ggctggggctgggcaggtgtggtctggctctacagcgtcgtcttctacttccccctggaactgctcaagttcttcatctgcttgtgctcagcggcagggcatgggacaacgtgtataagaacaagaccgccttcaccaccaagaaggactacgggcgggaagagagggaggcgcgtggg

SEQ ID NO: 52684 - DNA, 186 bp, Zea mays
acctctacatttcttctctctctgcatcctccgcctccgcctgatccatccaagacagggatcgccatgtcggactcggaggagcacacttcgaatcgaaggccgacgctggggcgccaagacctacccgcagcaggctggcaccgtccgtaagaacggcttcatcgtcatcaagaaccgtccctg

SEQ ID NO: 52685 - DNA, 134 bp, Zea mays
  unsure (1)..(134): unsure at all n locations
cggccagctcccgcccacgccgccggatctcgcaaagaaggtgttcgagagcatcaagcaggcccaggagacgtgcgccgganccggtgancggcgagtgcgtggccacgcgcgangaggtggaggagctcagc

SEQ ID NO: 52686 - DNA, 181 bp, Zea mays
  unsure (1)..(181): unsure at all n locations
tgtcattggaatggatgttgctgcttctgaattcttcggtgagaaagacaagacttatgatcttaatttcaaggaggagacaacgatggctcaaacaaaatttcaggcgacagcaanagaaacctgtacaagtcctttgtttctgagtaccctatcgagtcgatcgaagacccatttgatc

SEQ ID NO: 52687 - DNA, 189 bp, Zea mays
ggaacgtgatactgttgtttgtgctctacgtgctgcatacaataaccccgagagagctatagactacctgtattctggaattcctagaatgtggaggctcagcctgttgcccgagcacctgctgctggccaacaaacaaatcagcaggccgcatcacccgctcagccagcagttgtattgtcagtgcag

SEQ ID NO: 52688 - DNA, 191 bp, Zea mays
aaaaggataggaatcctcttgtgtcctggccgtcggcgtcgctgcgtcgttccagatttggggaaggaaatccggcaccgagattcagtcgaaaaggacatcattttctagatggcgcgtaccaagcagaccgctcgcaagtccactggaggaaaggctcctaggaagcaactcgctccaaaggcagcccg

SEQ ID NO: 52689 - DNA, 172 bp, Zea mays
ttggcttcggccgagttatcttatctatctatagtatcgtgttaactttcgcttctgtcaccgtgttagtgtccgtctacctttggattaggtgttggtaccccttttgttcgctttggttgctcccgctatgaaacgagacgagagaagaatgagcaaggtttttgttcgc

SEQ ID NO: 52690 - DNA, 222 bp, Zea mays
ttgcgagtagcagcacgatacgtagcagctacggacattacaggctacgaaggctagcagcttgatgacccctacagaccatgtaccttagaccacgcaaactaggtgctcaagacaccgaggtccgcaagagcggaacctaaccctggcacaagcctgatgggaagacccaggtgacagtacgagtaccgcaatgagggtggtgccatggtccccatccgt

SEQ ID NO: 52691 - DNA, 182 bp, Zea mays
cgagagggacttgcagccttggattgctagaggtgacgaacaaggtcagaagatgtggagagtcaaccagcgtatagtgaagcgtatagctgagcttatgaggaaccatgacagccctgaagcgttggtgatactacgactatgcctaccgaccttactattcgtgctaccgatggaatgct

SEQ ID NO: 52692 - DNA, 210 bp, Zea mays
aaggtaaaaccaaccgaccaacaatctccaaacgccgccatgtcaagtttatggaaggcaaggagaagagaaaaacagacatgttgacacagtcacagatgacaaaaggatccaggaggttccagcaatgaaggttactgacctgaggttcacggaaacagcaagggccaggattgacaatgctaatggcgagtgccacacatttaacca

SEQ ID NO: 52693 - DNA, 156 bp, Zea mays
gaaacaatagaagggaaaaaggtcataacccttgacatgggacttcttgttgctggcacaaagtaccgtggagaattcgcagaaagattaaagaagctgatggaggaaataaagccaagtgatgagataatactctttattgatgcagttcacact

SEQ ID NO: 52694 - DNA, 144 bp, Zea mays
tacaaggtgaccaaagggttggctgagatgttcggagatctccgggtccttgatacccctatcgccgagaactacttcactggcatgggagttggagcagcaatgaaggggctgaggcctgttgtggagagcatgaacatgggt

SEQ ID NO: 52695 - DNA, 145 bp, Zea mays
caagcgggtacatcggcgaagacccctgcggtgtcccgaacaacctgatgccctacgtgcagcaagtcgctgttgggaggttacctcacctcacggtctacgggacggactacagcaccaaggatgggactggggtgcgtgatta

SEQ ID NO: 52696 - DNA, 155 bp, Zea mays
tcgccatgtgatgacaaaccttggagagaagttaacagatgaagacgttgatgaaatgatcagggaagcagatattgatggtgatggtcaagtaaactatgaagagtttgtacaaatgatgacagcaaagtgaagaccttgtacagaatgtgtta

SEQ ID NO: 52697 - DNA, 228 bp, Zea mays
tcagatgctgcttctgatgatgatgatgatgatgatgatgaagaagaatctgatgaagaggatgaggaacaaatggaaataagggatagaacagagacaaatcttgtgaatcttagaagaacaatatatttgactattatgtctagtgttgattttgaagaagctggacacaagcttatgaaaattaagcttgagcctggtcaagagatggagcggtgcattatgctt

SEQ ID NO: 52698 - DNA, 146 bp, Zea mays
gcagcacaagaaggatatccatgctgaggctgtcaagaagaggcgccgcgccaccaagaagccatactcgaggtccattgtgggtgcttccctagaggtgatccagaagaagagggctgagaagccgaggtccgcgatgctgctag

SEQ ID NO: 52699 - DNA, 161 bp, Zea mays
tcaccacagactcagagagaacccaccatggtgctgtctcctgccgacaagaccaacgtcaaggccgcctggggtaaggtcggcgcgcacgctggcgagtatggtgcggaggccctggagaggatgttcctgtccttctcaaccaccaagacctacttccc

SEQ ID NO: 52700 - DNA, 228 bp, Zea mays
gtaataaatggatcagctaccacttgagagattttgaaaatagtagaatagagtttttgtgagtttttgttttgtacaaagcttttagtgtctctattgtcaaaagttggcttcttgtggggagaagtgttgattatgggaaatagggggagtttttgaaatccttgatcaatctcttttggaatgactctctttatgcctcaacatgtgtgtttgacatagaaatag

SEQ ID NO: 52701 - DNA, 142 bp, Zea mays
tggcgcgccgtcaccgtatcctcagatcagcggcgagcagaaaccacaccactctactgacgcccgacgagcagtgtaacattttccttcagccatgggtaaggagaagactcacatcaacattgtggtcattggccatgtc

SEQ ID NO: 52702 - DNA, 218 bp, Zea mays
gccttcccttggtatctaaatggcgtcgtcagggccttggcagtgtttgcgtacgcgttctgctgcgcgcccttgatctgggcatctctggtcaagacaatgagctccttgcaggtcctgatcgagagggatgcattcaggctcggagaacctaaccagaatgccgagttcacaaagctatactgaggtggacacgacagatacgtatggttggccac

SEQ ID NO: 52703 - DNA, 186 bp, Zea mays
  unsure (1)..(186): unsure at all n locations
agcgacaactctctaccgtccgagaccccaagcaccagcgcggcggcggcggcggcggcgaccatggctgtcgggaagaacaagaggatctccaagggaaagaagggtggcaagaanaagaccgtcgaccctttctctaagaaggattggtatgacatcaaggcaccgtcggtgttcagtgtgcgc

SEQ ID NO: 52704 - DNA, 225 bp, Zea mays
gcagcagcagcaggcggcgccgaggagcggcatcccactcagtgcttgcaaccatggctaggggattgaagaagcacttgaagaggctcaatgcgcccaagcattggatgctcgacaagcttggcggagttttgctctcaagccatcttctggacctcacaagtccagggagtgccttcctctgatcctcatcatcaggaacaggctcaagtatgctctgaacta

SEQ ID NO: 52705 - DNA, 158 bp, Zea mays
ggaagcttgacaaaggagcagttcttaaagcactttgtgctggttttagggaaactaccgagccagccgtttgcttgagtgatgatatacaaacaaacgagtgcctagagaacaatggtggctgttggccagataaggctgccaacatcactgcatgc

SEQ ID NO: 52706 - DNA, 158 bp, Zea mays
gtccgacgcggccgggtcgggggaggaagcgagcaagaaggtgcggaagccgtacacaatcaccaagtcccgggagagctagacggagcaggagcacgacaagttcctcgaggccctgcagctctttgatcgtgactggaagaagatagaggcttttg

SEQ ID NO: 52707 - DNA, 226 bp, Zea mays
cggtcgagctcggaactggacacctgagcgaggagtcctacaaggacagcactttgatcatgcagctccttcgtgataacttgaccctatggacctctgacatctcggaggaccctgctgaagagattagggaggcgcccaagcgggactcgagtgaggggcataaagccggctttatgtgcctaaaaactagtagctagtgtttgctgctgtcgaatgacactat

SEQ ID NO: 52708 - DNA, 135 bp, Zea mays
ggcgagcatgtggggccattcaacctgggtaaccctggcgagttcaccatgcttgagcttgccaaggttgtccaggacaccatcgaccccaacgcacggatcgagttccggcaggaatcaccaggacgacacgca

SEQ ID NO: 52709 - DNA, 113 bp, Zea mays
tagtggtgttccaatggtggcgatgccgcagtgggcggaccagccgacgacggccaagtatgtggagagcgcgtgggggattggggtgcgcatgcggaaggagtccttggtga

SEQ ID NO: 52710 - DNA, 271 bp, Zea mays
atcctcgtccagcaccagaaggccaagcacttcaagtcccacgtatgccacaagaagctctccaccgcctctggcatggccatacacgtcctccaggtccacaaggagtccgtgaccaaggttcctaatgcaaagcctgatagggagtcaacggagatagagatatttggaatgcagggaattcctgcgcatgtattggctgctcattatggagaagaggaagacccttcaacaaaggtacccaaagtagaagtgcctcaggtaaggcctg

SEQ ID NO: 52711 - DNA, 269 bp, Zea mays
tgctccccaaaccagcgcaaaccctgccctgacaccggcagcgacacgtccaccggcggcgccatggtgctcgaggcaacgatgatctgcatagacaattcggaatggatgcggaacggcgactacgctccgtcgcggttccaggcgcaggccgatgccgtcaacctcatctgcggcgccaagacccagtcgaacccggagaacacggtaggcgtgatgacaatggccgggaagggtgttcgcgtgcttgtcactcccaccagcgacct

SEQ ID NO: 52712 - DNA, 270 bp, Zea mays
atttgattcatcatcaccaaatgggatccttttattccgagaggttagcaagataatcgtggcttacgggtcacgaattctattgcttcctaatggcacagacatttatggaagtaaatacaaaggcatatggatctcactgactgttctttcaagggctttgtgtgggaattatgtcaattttggcgtatttgagctctatggtgacagagcacttgctgatgcccttgatatatctctgaagatgaccctctcagttccattatctga

SEQ ID NO: 52713 - DNA, 273 bp, Zea mays
aacgaacagaagctctcgatctcaccgacaccgaggaagaagagatcaatggcgtccgagcagggagtcgtgatcgcgtgccacagcaaggctgagttcgacgcccacatgaccaaggcccaggaagccggcaagctggtggtcatcgacttcactgccgcctggtgcggtccatgccgcgccatcgccccactgttcgtcgaacacgccaagaagttcactcaggtcgtcttcctgaaggtggacgtggacgaatgaaggaagtcaccgcgg

SEQ ID NO: 52714 - DNA, 272 bp, Zea mays
gagatggcacaaatgatgccccagcactgcatgaggcagatattggtctatcaatgggcattcagggaactgaagttgccaaggagagttctgatattattatcttggatgacaatttcgcatcagtcgtgagggttgtcagatggggtcgttcggtgtatgcaaacatacagaagtttatacaattccaactaacggtcaacgtcgcagctctgataatcaatgtagttgctgccgtcagttctggaaatgtgccgttgaatgctgttcat

SEQ ID NO: 52715 - DNA, 131 bp, Zea mays
ctggaactttgtgaatgactggcttaaaacaacattgtgtctacagtataaaccccagtacatagctgctggttccctttatctggctgcaaagcttcacaatatcaagcttcccttgcatggagcgcatg

SEQ ID NO: 52716 - DNA, 278 bp, Zea mays
agaaacaaggcaggaatgagtttgtcatacgcctgcagccatcagaagccatgtacatgaaactaacggtcaaaaaacccggactggaaatggcaaccgaacagagcgagctggatctatcctatgggatgcggtacaatgacgtaaaaatcccagaagcatacgagcgtctcatcttggacacgataagaggagaccagcagcacttcgttcgccgagatgagctgagggccgcatgggaaatcttcactcctttgcttcacgacatcgatggtggc

SEQ ID NO: 52717 - DNA, 268 bp, Zea mays
tacagcgagaagcctggccacgattttactctgacagcgtcgtttggaagtgtggatgcttcgagctacgacgcgcttgtggttcctggcggacgggctccagagtacctggctctgaacgatttggtcatcagcttggtgaaggccttcgcggagagcggaaagccaatcgcgtcgatctgccacggccagcagatattatccgctgccggagtcctcaaggggaagaagtgcaccgtctacccagccgtgaagctgaacgtgttgc

SEQ ID NO: 52718 - DNA, 188 bp, Zea mays
cgctctgcccggctgcaaggatggcggggaggggtaggctcatcgcagtgatcggagacgaggacacggtgactggtttcctgctgggcggcataggggagcttaacaagaaccgccatcccaatttcctggtggtggagaaggatacaaccatcaatgagatcgaagacactttccggcaatttcta

SEQ ID NO: 52719 - DNA, 269 bp, Zea mays
ctgtaagatggcatcagcagagctttcccgtgaggaaaatgtgtacatggcgaactcgctgagcaggcggagaggtacgaggagatggttgagttcatggagaaggtagccaagactgttgactcggaggagctcactgtggaggagcgaaacctcttgtctgttgcatacaagaacgtcattggagcccgccgcgcctcatggcgcatcatctcctccatcgagcagaaggaggagggccgaggcaatgaggaccgagtaacactcat

SEQ ID NO: 52720 - DNA, 272 bp, Zea mays
gagcattcgtgctgctccgaccccaccgccacaggctcggcggtccggcgatctcgctcaccggcgggaacatgactacttcaaggcgccttgctgacaggaagaccgcaaagttccagaagaacatcaccaggaggggttctgtgcctgaaaccactgtcaagaagggaaatgactaccctgttggccctctagtgcttgggttcttcatctttgtcgtcattggatcatcgttgtttcagatcatcaggacggcaaccagcggcggggtg

SEQ ID NO: 52721 - DNA, 130 bp, Zea mays
ctttccccaactcgatctcgcacctagggtttcgtctcgccgctctcgtcctccgcgaagatgccgaagaacaagggtaagggaggcaagaaccggaagcgaggaaagaacgaggctgactccgacaagc

SEQ ID NO: 52722 - DNA, 268 bp, Zea mays
tacgtagcacagtccattattgccgtctcccttttgcgtgacaaagaaagagagcgagaagcagtcgccatgtctggcatcatccacaagatcgaggagaagctccacatggggggcgaccacaagaataaggaggaggagcaccacaagaaggccgaggagcaccacaagaaggaggagggggagcaccacaagaaggacggcggggagcacaaggaaggcatcgtggagaagatcaaggacaagatcaccggcgagcacggcgaca

SEQ ID NO: 52723 - DNA, 188 bp, Zea mays
cgggaggcgaggcagtacgagctggagggaggcccggtactacatggtgctggcgtgggcggcgagctgtgtggcagtgcttcttcctgggcgcggtgggcgtcatcttctgcgtgcacacgctgctggcgggcatcctcatcgcgtgttcatcccggtgacggaggtggcggccgtcatcttcctgc

SEQ ID NO: 52724 - DNA, 134 bp, Zea mays
ggcgtctgcagaatttatcatcggatgaccgcaagaccatattgttagacattgcagatgctttggaacaaaatgaggatctaattagaactgtcaatgaagctgatgtatctgcagcacaagatgctggatat

SEQ ID NO: 52725 - DNA, 217 bp, Zea mays
gagaaacatattgtgatgaagtggaggtttaaatcttggccagagggacactttgccaccatcaccttgaccttcatcgacaagaacggagagactgagctgtgcatggaaggtcgaggcatccctagccctgaggaagagcggacacgacagggctggcagcggtactactttgagggcattaaacagacctttggctatggcgcacgcttatttt

SEQ ID NO: 52726 - DNA, 263 bp, Zea mays
agacgatgttgcaacatactatctatacatgacttatgtccatcctttcatcttttctcttgcaaccataatacctatgttacctgatgaggtactgtggaaaggaagtgggacactttgtgaaattctgctaatggttcaggcatttaaggctggaggcacacaactatgaatagtgcatcttctaaaatctctcactaaatcagctagctcttctcactaaatcagccagctcttctgcttgtcccatggtcatccagata

SEQ ID NO: 52727 - DNA, 266 bp, Zea mays
cgaagtgaacaagcaaggaagagccatggcgagcgagcacgcggcggggggcgatgctaagcatcaccagaagcagagcctgatggacaaggcgaaggggttcgtcgcggagaagatcgcgcacatccccaagcccgaggccacgctggacggcgtgacgttcaagggcctgagccgggagtgcatcacgctgcacagcagcgtgaacgtgtccaacccctacgaccaccgcctccccatctgcgaggtgacctacacgctccggt

SEQ ID NO: 52728 - DNA, 261 bp, Zea mays
atcggggataatgcggctgcgaacacctatcccaccattcaggtggggtgcactagtggccgggttgagcatgaggcaagcacttccaaaattggagaggatcagctattttatttccagcaaagaggggtagatcatgaaaaggcagttgccgccatgattggtggattctgcagatctgttttcgagcaccttccctatgaattcgcacaggaggtggacgcactcatgaacctgaaactcgagggatcagttggctaa

SEQ ID NO: 52729 - DNA, 263 bp, Zea mays
gacccacctcgtccgcttcgtcctctcgtctactcgcactcgctagctgacgctgcgtgcgccaaacgcagcactgcagcagcaggtccagccgtcgccgttcccacttcccaccactgccacgcgcgccccggctcgagggagggcacgcagacgcggaggagggaggatgagtctcttcgggcttggacggaaccagaagacattccgccccaagaagagcgctccatcaggcagcaagggagcacagctccgtaagcaca

SEQ ID NO: 52730 - DNA, 263 bp, Zea mays
gtttgtactttgggctttcatctcctttcccttggtgcttttgggaactgtcgttggtaggaactggagtggagctcctaacaatccctgccgagtaaagactattccacggcctattcctgagaagaagtggtaccttacaccttctgtcatctcattgatgggtggcctgcttcccttcggtagcatcttcattgagatgtactttgtgttcacatcattctggaactataaggtgtattatgtctatggcttcatgttgc

SEQ ID NO: 52731 - DNA, 160 bp, Zea mays
gtttgtactttgggctttcatctcctttcccttggtgcttttgggaactgtcgttggtaggaactggagtggagctcctaacaatccctgccgagtacagactattccacggcctattcctgagaagaagtggtaccttacaccttctgtcatctcattg

SEQ ID NO: 52732 - DNA, 265 bp, Zea mays
ctcaagggttcagtggagcagatatcacagaaatttgccagcgtgcgtgcaaatatgcaatcagagagaacattgagaaggatattgagagggaaaggcggagaaaggacaaccctgaggcgatggaggaagacgaagtggatgagatcgctgagatcagggcccctcacttcgaggagtcgatgaagtatgctcggcgtagtgtcagtgatgctgatatccgcaagtatcaggcgtttgcccagacattgcagcagtcccgggg

SEQ ID NO: 52733 - DNA, 265 bp, Zea mays
agcaaccacgggcggactcggagcgtcctcctcctcccgtctataaattcccctccttttcttcctccatatataggggccatcagatccaagaagagggaagagcaccaaggaccttcggcgcccgttcaggatccacatcttcccgagcgagttcttggttgacctcttcccccttcggaccacctccaaggctcttggtgtagcttgccactctcaccaatcaagttttcatgtctgatctcgacattcagatcccaactgc

SEQ ID NO: 52734 - DNA, 265 bp, Zea mays
  unsure (1)..(265): unsure at all n locations
cgacaccgtgcacggccaatggaagcacagcgacatcaccctcaaggactccaagacgcttctcttcggcgagaagccggtcaccgtctttggcatcaggaaccccgaggagatcccgtggggtgaggctggtgctgagtatgtcgtggagtccaccggtgtcttcactgacaaggacaaggctgctgcacatctgaagggtggtgcncagaaggttgttatctctgcaccaaacaaagatgcacccatgtttgttgttggtgtc

SEQ ID NO: 52735 - DNA, 270 bp, Zea mays
gaaacaatagaagggaaaaaggtcataacccttgacatgggacttcttgttgctggcacaaagtaccgtggagaattcgaagaaagatttaagaagctgatggaggaaatagagcaaagtgatgagataatactctttattgatgaagttcacactctgataggagcaggagcagcggaaggtgctatagatgctgctaatatcttgaagcctgcgttggccagaggtgaattacagtgcattggagccactacactagatgaatatagg

SEQ ID NO: 52736 - DNA, 178 bp, Zea mays
ggagcagcagcagcaggcggcgccgaggagcggcatcccactcagtgcttgcaaccatggctaggggattgaagaagcacttgaagaggctcaatgcgcccaagcattggatgctcgacaagcttggcggagcttttgctcccaagccatcttctggacctcacaagtccagggagtg

SEQ ID NO: 52737 - DNA, 292 bp, Zea mays
cccgggtgtcggaggagcttcgcgccgcgctctcagcgttccagcagaccttcgtcgtgtccgatgccacccgccctgaccaccccatcctctacgccagcgctggattcttcaacatgacgggctactcctccaatgaggtcgtcggaaggaactgccgcttccttcaaggttctgggaccgaccccgtagagatttccaagatcagacaggctctcgcagctgggtcaaattactgtggccgtatcctcaactacaagaaggatggtacccattctggaactcctaaccg

SEQ ID NO: 52738 - DNA, 303 bp, Zea mays
  unsure (1)..(303): unsure at all n locations
agacaacagatgacaggttcatcataaagcaaatcaagaaaacagagttcgattcatttattaaatttgcacctgattactttaggcatgtttaccattctctggacactggaagccaaacttgccttgccaagatattaggaatatatcaggttaagcagattagacatggcaaagaggtaaagatcgacttgatggtgatggaaaatcttctctttggccaaatatttcacgaatttatgatctcaaaggtgttacttnttcgcgacgcgtcactgactcaaatgatcacgatactgttta

SEQ ID NO: 52739 - DNA, 303 bp, Zea mays
gttcctagatcgcgagcggccgctcgcggtttcacatcccaagtatatgaactgtcacccatattccttcataaggattggattatggagcagtgggagcataactactacatcagtgccatagctggtgcaatgaatgggagttccttggtggtcatgtcaaaaggaactccttacactcagcagtcttacaaagttagtgaatcattcccctacaagtggatcaacaagaaatggaaagaaggttttcatgttacatcaatgacaactgcaggaagccgctagggtgtagttatgtcaagg

SEQ ID NO: 52740 - DNA, 271 bp, Zea mays
tggatatgattattatctatctagcttgtggtggtggttgaacaataataagcgaggccgagctggctgccatacataggtattgtgtggtgtgtgtgagagagagagacacagagttcttcagtttgctatctctctctgccagttggcgtccatcttggtgctcatgtacgtacgtgtgtctacctgcatgttggttgatccgattgcatctgctgtaaccatatatgaattggtccacgatgatatgatttgatactatatatatact

SEQ ID NO: 52741 - DNA, 296 bp, Zea mays
gcaagagatagatctgtccgcggccatggcggcggcggcggcggcggcggagaaggcgtggacgctgcgaggaaagaggaggatgaggagcaggtagtgaatccgtgggaggtgtcggcggggaagggcggcatcgactacgacaagctcgtggaccagttcggctgccagcgcatcgacgacgcgctcgtggaccgcatcgcacgcctcaccgcccgaccaccgcactgcttcttcggcgaggctcttctttggccaaccgtagattgaacgagatactggatttgtatgagaac

SEQ ID NO: 52742 - DNA, 139 bp, Zea mays
cgcgtctgcagaatttatcatcggatgaacgcaagacaatattgttagacattgcagatgctttggaacaaaatgaggatctaattagaactgaaaatgaagctgatgtatctgcagcacaagatgctggatatcagaa

SEQ ID NO: 52743 - DNA, 303 bp, Zea mays
gcaggcttctcatccccatcaacagtgctccatgtgattaacaaaggctcagatgtcctaatgcgatcctccacaacatgtcagaatcgtatagaaagcaaaatctcacagattttcatcttcgcctctatggaagccaatttggacttgaccaatcaccacttaaaaaaagttggctcaaagcatccttaggccttgttcgtttgtgtcggattgatgagtcggaacgaatccgagccggattgcttctttaatttatataaactttgattagccggaatgattccgggtgcaatccgatgt

SEQ ID NO: 52744 - DNA, 104 bp, Zea mays
gtgcctctgggtatcagcataggagaagattctgatgcttcctgtgaatgcaccaaaatgtgcccaccacaataaccaccatgatgggttcatgaacttcatgc

SEQ ID NO: 52745 - DNA, 166 bp, Zea mays
gagctggcgaacctcgtgatcgttgccggtgaccacggcaaggagtccaaggacagggaggagcaggcggagttcaagaagatgtacagcctcatcgacgagtacaagttgaagggccatatacggtggatctcggcgcagatgaaccgcgtccgcaacggggagt

SEQ ID NO: 52746 - DNA, 193 bp, Zea mays
gatggtctggtctacgctgttgagttctctcacaggagtggaagagaccttgtcaacatggcaaagaagaggaccaatgtgatccccattattgaggatgccaggcatccggcaaggtaccggatgttggttggcatggttgatgttatcttctctgatgttgcacagccagaccaggctaggatcttagcac

SEQ ID NO: 52747 - DNA, 299 bp, Zea mays
gcttcggctacatggtctccaagaagaagtacatctacaccatcgacgacgactgcttcgttgccaaggacccatctggcaaggatatcaatgctcttgagcagcacatcaagaacctcctcagcccatccaccccgttgttcttcaacaccctgtacgacccctaccgtgagggtgctgactttgtgcgtggataccccttcagcctcagggagggtgctcacaccgccgtctcgcacggcctgtggctgaacatccctgactatgatgctccacacagctggtcaagccaaggagag

SEQ ID NO: 52748 - DNA, 153 bp, Zea mays
acaccagctgtcccactcaccatggagaagatcctgatcctcctgcttgtcgccctctctgtggcctatgcagctcccggcccccgggggatcattatcaacctggagaacggtgagctctgcatgaatagtgcccagtgtaagagcaattgc

SEQ ID NO: 52749 - DNA, 149 bp, Zea mays
cagccaatcaggtatatataatagactatggactcgcaaagaaatatagggatcttcaaactcataagcacatcccatacagagcgaacaagaacctcactggaactgcacgatatgcgagtgtcaatacccaccttggcgttgaacaa

SEQ ID NO: 52750 - DNA, 164 bp, Zea mays
actgatgttgcagggcgtggtattgatattcctgatgttgcacacgtgattaactatgagatgcctagttcagttgacacatacacacatcgcattggaagaacaggtcgtgctggaaagaagggggtggcaacttcatttttaactttagagaacactgatat

SEQ ID NO: 52751 - DNA, 293 bp, Zea mays
cggaggcacacacacgcaaccagatctcccccaaatccagccgtcggcacctccgcttcaagatgcagatctttgtgaaaaccctgactggcaagactatcaccctcgaggtggagtcgtctgacaccattgacaacgttaaggccaagatccaggacaaggagggcatccccccagaccagcagcggctcatcttcgctggcaaacagcttgaggacgggcgcacgcttgctgactacaacatccagaaggagagcacctccaccttgtgctccgctcaggggaggatgcag

SEQ ID NO: 52752 - DNA, 289 bp, Zea mays
ctcgcgccgccgcctccttcgtcacccagcgctcgagctcctcgctaccctgcgatcgcgcgccgcaacgccaccatgaagttcaacatcgcgaacccttccaccgggtgccaaaagaagctggtaatcgatgacgaccagaagctgcgtgcctattatgaccgaatgatatcccaggaggtcagtggtgatgctctgggtgaggagttcaagggttatgtcttcaagatcatgggtggatgtgacaagcaaggcttcccaatgaagcaaggagttttgacttctggtc

SEQ ID NO: 52753 - DNA, 292 bp, Zea mays
gtcaccggggtgatgctgtattgcgtcgacagctacacctgctttcgctacgactggagcaccagaggctaggatatattgcttcatcagtgacagggagccaagatgccggccggagggttctcggtctcggcgccgtccggcgtcgagttcgaggctaagatcacgccgatcgtcatcatctcctgcatcatggctgccaccggcggtttgatgttcggctacgacgtcggcatctcatgtggtgtgacgtcgatggacgacttcctgggcaagttcttcccggcgtgct

SEQ ID NO: 52754 - DNA, 293 bp, Zea mays
ggggccatcagatagcccatacgctggtggcgtatttttggtcactattcactttccaccggactacccattcaaaccaccgaaggttgcattcaagacgaaggtttaccacccgaatatcaacagcaacgggagcatctgtcttgatatcttgaggagcaatggagccctgcactgacagtttctaaggtcctcctctcaatttgttcccttctgacggacccaaaccctgacgatccgttggtcccagagattgctcacttgtacaagactgatcgcgtgaagtacgaatc

SEQ ID NO: 52755 - DNA, 286 bp, Zea mays
cgcccagtctcgcgtaccgccggctgccaccaccaccaccgccatgatcagcacctcgcgcagggcgctcctcgggttcgccctgggctccgtctccatgggaggtttcgtcctccaccagcgccgcgccatctactgctcaatcgctgagccgatgggtcgtcctacttctaccagcctggtgaaattgccggtcgtagaagttcaactgaactggctcatgtatggaacaaggcggtggacgagactcttgggcgacttgttgtgtaccttagctctcgtggat

SEQ ID NO: 52756 - DNA, 290 bp, Zea mays
agcgcgggctggccgtgcgcggggaggacggggagctggagctcaccatcaaggactacccctacgcccacgacgggctcctggtctgggactccatcaagcagtgggcgtccgagtacgtcaacgtctactacaagtccgacgaggccgtgccgccgaccccgagctgagggcgttctgggacgagttcggcacgttgggcccggcgacaagacagacgagccgtagtggcccgtgctggacacccgcgacagcctggtggagacgctgaccaccatcatgtgggtcac

SEQ ID NO: 52757 - DNA, 288 bp, Zea mays
tggctttgaaagtacgttacagagatagaattagaatacttagaggaaatcatagagagaagacaaatcactcaagtatatggcttctatgatgaatgcttaagaaaatatggaaatgcaaatgtctggacgtattttacagacttgtatgatttatgcctctcacagctcttatagaaaatcaggtcttctgtcttcatggtggcctctctccgtcattggacacgttggataatattcgttctcttgatcgcgtacaggaggttcctcatgaaggacccatgtgtg

SEQ ID NO: 52758 - DNA, 164 bp, Zea mays
aaagccactcacaaaaccacgcttccagaaccttctcgaagctcaccgccgactcctccactcgcaccgatggcgaaggaaccaatgcgcgtgctcgtcactggcgccgcaggcaacttggatatgcgctggttcccatgattgctagggtgttatgcttagtg

SEQ ID NO: 52759 - DNA, 205 bp, Zea mays
cccgccgtcgcatcctcttcgaagttcgaatcgaatcgcgccgggatcacccacctcatggcggacaaggagcctgtcgtagagcggccagaggcgggtgaggaggaggaggacgcctcagccgccgccgccgcgggggaggaggaggacacggcgcccaggtggctcccatcgtgcggcttgaggaagtagccgtcaccaccgg

SEQ ID NO: 52760 - DNA, 286 bp, Zea mays
cctctgttgtggagccttacaacagcgtgctctccactcactcactcctggagcacactgatgtctccatcctgctcgacaacgaggcaatctatgacatctgcaggcgctccctcgacattgagaggcccaataattcaacttgaacggcttgtgtctcaggtgatctcaacgctgactgcttctctgaggttcgatggtgccctcaatgtggatgtgaacgagttccagaccaacctggttccttacccgaggatccacttcatgctctcctcctacgcaccgg

SEQ ID NO: 52761 - DNA, 279 bp, Zea mays
ctgtgctcggagatcgcatcttcccgcggcaaatgggggccgactccgaggacgccgtcaagcagctcagcctcctcatggagcaagtggaggccccgctgaagagatcgtttcagaatatgcaccagggctatcctaaagaaacacggtgcgtttccttaaggctagagagtggaatgtagcaaaggctcataaaatgattgtagaatgtttgaattggaggattcaaaatgaaattgatagtgtgctagagaggcctatagtcccagtagattatac

SEQ ID NO: 52762 - DNA, 281 bp, Zea mays
ggcctccaactccaaggatgaccctgccaaggaggctgccagcttcacctcccaggtcatcatcatgaaccaccctgggcagattggcaacggctatgcccctgtgctggactgccacacctcccacatcgctgtcaagtttgcgagctcattaccaagatcgacaggcgctctggcaaggagcttgagaaggagccaaagttcctgaagaacggtgatgctggtatggtgaagatgatacccaccaagcccatggtggtggagacattctcagcgtatcc

SEQ ID NO: 52763 - DNA, 308 bp, Zea mays
agaaattcttcgtggccattctagttcggatggaagaggggttttggactgcaagttccaccctaaacaaccatggttgttcactgctggcgctgactctgtgattagattatactgcgactaagcattcctccaaggattcatgattttgccaagcaatatgacgtgtagccttttgttgggcctcagtatggtgatgattgctatattctggtatgaagttggattggtacacatgtatgaagccaagagtggtggatcttttgttatggggtcatggctgctctggaaagggacatttaaaacag

SEQ ID NO: 52764 - DNA, 280 bp, Zea mays
gtggttacccagcttacttggctgcacgtttggcatccttttatgaacgtgctggtaaggtaaaatgtctgggaagtccagacaggaatggcagtgtcacaattgttggagccgtctctcctcctggtggtgctttttcagaccctgttacctccgcaaccctcagtattgttcaggtcttctggggtttagataaaaagctcgctcaaaggaagcatttcccatctgtgaattggctcatttcctattcgaaatactccaaggctcttgagtcttttta

SEQ ID NO: 52765 - DNA, 303 bp, Zea mays
cacccatcaacaacgcaccggcaagcatcagcggatcatcatcaagcagatcgaacgaaccccaagacacaaccggccgtcgactagcgcatctccaacgactgaaacaatggcgcaccacttcctgggcaacaagcaccatggaggagaggcggccaaggtgaccgactggcgcaaggaggagaagcaccacaagcacatggagcagctcggccagctcggcgccgtcgctgcaggagcctacgctatgcacgagaagcagaaggcgaataaggacccggagcacgcgcactcgcacaagat

SEQ ID NO: 52766 - DNA, 295 bp, Zea mays
cttgccccggacggctactcctcttgaagacattttcaagtcgatcctctgcttgccttgcctcctaggtttgagatgtttgagggatacatgtatacctgaagacgctatgcttaaggatccaaggaggctttatgcaccaggccggatttatcacatagtcgaaagaagaacgtgcaggtgcggaagatatccaccggtagtcaaaacagctgtgccggtggatggtagatttgagcacatagttctttcctgcaatgccacagcggaccatgccattatttggattgagagg

SEQ ID NO: 52767 - DNA, 305 bp, Zea mays
ctcgctcgtggctgccctactcgtgctgcttgccctcgccgccgtttcctccacgcgcagcacaaaaggagtccgtggctgacaacgccgggatgttggcaggcggcatcaaggacgtgccggcgaacgagaacgacctccagctccaggagctcgcgcgcttcgccgtcaatgagcacaaccaaaaggccaatgctcttctggtgttcgagaagcttgtgaaggccaagacacaagttgttgctggcacgatgtactatctcactattgaagtgaaggatggcgtagtcaagaagctttatgaa

SEQ ID NO: 52768 - DNA, 306 bp, Zea mays
aagcaacgttgtgtatccatcctgacaaggtgcagcaaaagggtgcaaatctccaacagaaatatatcgctgagaaggtttttgatctccttaaggaggcgtggaacaaattcaactctgaagagctcttctaaacagcctcaagactgaacatagcatgacccatcagggtctgcacaaggtactctgggaaggaactcacaagctggagcagcctgaggttggtcggggggaaggggaaccatgaagcgaccaagcgaaacctgaactatggttgtaatcacagttgtttgtttcactccccca

SEQ ID NO: 52769 - DNA, 301 bp, Zea mays
aattcctgttaaggagaaattggttgtcctcaagaaaaatgcagaaccttatgtacagaaggtatcgacaagatcagtggagttttatgagtcatcaatggatgctgtgacacctcacgttgtcaaagttaaagagtttgctcatccctactaccaggaagccaagaagttttctaagccttacattgataaaattgctgagatcactaagccacatgttgagaaagttagaactactctgaagccatacactaagagagcagttcatgcggatggtgtcattcttgggtctgcaaccaca

SEQ ID NO: 52770 - DNA, 293 bp, Zea mays
aggaatttccggtggagcgcggaaggatcggaattccgaagttgggcatggaggcgagcggcgagaaggctgcggtggtgcgacggctgatggaggcgaaggaggtgtccgggaagaccttctcgggaatcgccgccgagacgggtctcaccaacgtctacgtggcgcactgctgcggcgccaggcgcactgcaaggccgacacggtgcccgcgctgagggcggccctgcccacgctcacggacgacctcatcgaactcatgatgcagccgcccttccggtcctaccacccca

SEQ ID NO: 52771 - DNA, 299 bp, Zea mays
cccgcttcccgctccgatcgacctgctccctccccaccaccgagcccatggcggaccagctcaccgacgaccagatcgccgagttcaaggaggccttcagcctcttcgacaaggacggggatggttgcatcacgaccaaggagctgggcactgtcatgcgctcgctggggcaaaatcctacagaggctgagctccaggacatgatcaacgaggtcgatgctgatggcaacggcaccatcgatttcccagagtttctcaaccttatggctcgcaagatgaaggacaccgactctgaggaa

SEQ ID NO: 52772 - DNA, 298 bp, Zea mays
cttcggtagtccctctcctctcgaggtattagcagtcgaccggttcctcggagcacgatgaagtttgttgctgcctacctgcttgctgtcctcgctgggaacgccagcccctccgctgacgatttgactgccattctggagtcagttggctgtgaagttgacaatgaaaagatggaactcctgctgtcccaactgagcggtaaggacatcaccgagctcattgccgcgggcagggagaagtttgcttcagtcccatgtggtggcggcggtgtcgctgttgcggcagctgcacctgctg

SEQ ID NO: 52773 - DNA, 297 bp, Zea mays
aagatgagctccacaggatgctgaacgaggatgagctacgtgatgctgtgctgcttgtttttgccaacaagcaagatcttcccaatgccatgaatgctgctgagattactgacaagcttggattacactccctgcgccagcgacactggtacatccagagcacttgtgccacaactggcgagggtctgtatgagggcctggactggctgtccagcaacattgcgagcaaggcttgaggcctaccttgaatatcaactgcgaactgactaggagctccggatgtatcatggaaactca

SEQ ID NO: 52774 - DNA, 297 bp, Zea mays
cgccactctcacgtctcgcccatcccgccactgctgctctccagagtccaggcgacccaggctgcgcggtcgctcggtgttgttagtcccgatcgccgccagccatggcatccaacggcatcgctcccagagatgtatgtgttgttggtgttgcacgcacccctttgggtggtttccttggtgccttgtcttccttgctcgcaacaaagcttggctctatagcaattgaagctgctctgaaaagagcaaatgtggatccagccctcgtgcaggaggtctttttcggaaacgtcttga

SEQ ID NO: 52775 - DNA, 299 bp, Zea mays
cccgcaacgagttctgcctcgagtccaagtccaccatcggcgtcgagttcgccacccgcaccctccagattgaagggaaaaccatcaaagctcaaatatgggatactgcggggcaagagaggtaccgtgcaatcacaagtgcttactacagaggagccgtgggtgcacttctagtctacgacatcacgaagaagcagacatttgaaaacatacagaggtggctccgcgagctccgtgaccacgcggactccaacatcgtgatcatgatggtcgcaacaagtccgacctgaaccacctga

SEQ ID NO: 52776 - DNA, 280 bp, Zea mays
cagaggctctgtttctggctaggcaagctgctttggcggaggggagcaagcctgctagcaccccaatgctttacagctgtgctctttgtggaaaggagtacagaagctcgaaagctcacgagcagcatcttaactcgcgatcacatcttttgaaagcctctcaggagcccaatgcctctattgctggtatcacgatagtcaagccacttcctgaacgagtctcacgaagagctccatctgcagtagaggaggatcaagacgacgatgaggaagaagagtg

SEQ ID NO: 52777 - DNA, 286 bp, Zea mays
ctgctggcggacgtggagctgcaggcgttgtggaaggaggcgcacgaggtcgggcacgccgacctcaaggacgcgccctggtggcccaagatgcagacggtggccgagctggtcaaggcctgcaccaccatcatctggatcgcgtcggcgctccacgcggccgtcaacttcgggcagtacccgtacgccgggtacctcccgaaccgcccgtccgtcagccggaagccgatgccggcgccgggcagcgacgagtacgcggagctggagcgcaaccggagaaggtgtt

SEQ ID NO: 52778 - DNA, 293 bp, Zea mays
caggaaagtgttcgtcctcatggcgccgccgcagccgaagtcgggcctcttcgtgggcatcaacaagggccatgtcgtcaccaagcgcgagctgcctctgcgcccgtcccaccgcaaggggaaagcaacgaagagggtgtccatggtcaggggcctgatcagagaggttgctggctttgctccttatgagaagcgtatcaccgagcttctgaaggttggcaaggacaagcgcgctctgaagcttgcgaagagaaagcttggaactcacaagatggcaaagaagaagagagagg

SEQ ID NO: 52779 - DNA, 295 bp, Zea mays
cctgctacacggtcgcctgccaagatccatcttcccggttacgccgcctgatcgaagtgaacaagcaaggaagagccatggcgagcgagcacgcggcggggggcgaggctaagcatgaccagaagcagagcctgatggacaaggcgaaggggttcgttgtggagaagatcgcgcacatccccaagcccgaggcgacgctggacggcgtgacgttcaagggcctgagccgggagtgcatcacgctgcacagcagcgttgaacgtgtccaacccctacgaccaccgcctccccatct

SEQ ID NO: 52780 - DNA, 289 bp, Zea mays
agaattcgtttccttgaattgcttggacgtgatgagaacgcctttgaccacctgtactgtgtggcctttcggttgcttgatgctcagtggcttgtgaaacgtgcctcctatatggaattcaatgaggtcttgaaatcaacaagaactcagctggagcgggaactggttctagatgatgtgctggaggtgaaggacctgccgtcctacactatgctggatgagtaagctaaagccgagctgttgaacttggacgctggagaattgactaagctggtctgatggctaatag

SEQ ID NO: 52781 - DNA, 293 bp, Zea mays
atttttcctgacgcggtgtctgctcccacttcccctcctctcccccaggtggcggcagcggcggcggggtagcatttgtgctacgagggcttttgcaatggcggcttcggggttcggcggcggcgaggcgttccggctctcggccgcaccaggggccggcttactgaagctgcacaagggcgacatcaccctctggtccgtcgactgcgccaccgacgccatcgttaatgctgctaatgagcgaatgttaggtggcggaggtcttgatggagctatacatcaagctgctggac

SEQ ID NO: 52782 - DNA, 291 bp, Zea mays
tacagcgagaagcctggccacgattttactctgacagcgtcgtttggaagtgtggatgcttcgagctacgacgcgcttgtggttcctggcggacgggctccagagtacctggctctgaacgataaggtcatcagcttggtgaaggccttcgcggagagcggaaagccaatcgcgtcgatctgccacggccagcagatattatccgctgccggagtcctcaaggggaagaagtgcaccgcatacccagccgtgaagctgaacgtgttgctcggtggcgggacctggctggag

SEQ ID NO: 52783 - DNA, 194 bp, Zea mays
gcaactcatcagcggggtctcggagatccggcacactgcggaccgctggcgcgtgtccctggatgtcaaccacttcgccccggacgagctgacggtcaagaccaaggatatcgtggtggagatcaccggctagcacgaggagcggcaggacgagcatggctacatctcccggtacttcacgctggaatacacgg

SEQ ID NO: 52784 - DNA, 286 bp, Zea mays
gggccaccacgctgcgctccggcctgcacgcgctgctgccggcgctccgcccgctgctcatcaacaagaaggatctgcgcttcccgcacttccccgccatcgacgaactctacagcgacggcatcccgctgccgccgcagaccgggttcgacgccatccgcaccgtcgtcccgcgcatggtcaagctggtggaggacaccaccgaccacgtcctccgcttcgaggtgccggagatgatagagagggaccgggtctcgtggttcaaggacgaggagttcgcgaggca

SEQ ID NO: 52785 - DNA, 282 bp, Zea mays
tagaagcgctggtaggccttggagatgcgggttaggaagagtggagactgctgcacggactcttgaaccatgaacatatttgatcgaaagatcaattttgatgcgcttgtaatattttctcatataaccccgtcaacgcagcagcacctgaagaaggtctatgcaagttttgccctgtgtatgtttgtggcggctgcaggggcctatggtcctatggtcactcatttcattcaggctggccttatgtctgccttgagctccctgatagtgatgatgtggctg

SEQ ID NO: 52786 - DNA, 277 bp, Zea mays
ctcgagccgccatgttcggctgcaccgacgccacgcaggtgtacaaggagctgcaggaggcactcgccgcgtacccggacgccttccaccgcgtcatcggcttcgacaacgtcaggcagacgcagtgcgtcagcttcatcgcctacaagccccccggcagcgagtagagaccgtggctagatcgacccatggccatgcctctgcctgttgatcggatcaccttcttgcattggttcctctctctctctccctcctttttttcccctttatctcatca

SEQ ID NO: 52787 - DNA, 278 bp, Zea mays
tgtcgagccgattcggctcgagccaaaacttcgatcgattgcttaggaagcattggtccatccgttctttgatgaactatgggatccaaacacccgcttaccgaatggtcgttttcttccgcctctcttcaattttaagccccatgagctgaagaacgtgccggcggatttcatggtgaaattggtccctgagcatgcacggaagcaatgtgccttcgtagggtggtgatctctggataagaggatgacggctcgatgattagctgaggaccaagtta

SEQ ID NO: 52788 - DNA, 268 bp, Zea mays
gaaacaatagaagggaaaaaggtcataacccttgacatgggacttcttgttgctggcacaaagtaccgtggagaattcgaagaaagattaaagaagctgatggaggaaatacagcaaagtgatgagataatactctgtattgatgaagttcacactctgataggagcaggagcagcggaaggtgctatagatgctgctaatatcttgaagcctgagttggccagaggttaattacagtgcattggagccactacactagatgaatata

SEQ ID NO: 52789 - DNA, 273 bp, Zea mays
agacgatgttgcaacatactatctatacatgacttatgtccatcctttcatcttttctcttgcaaccataatacctatgttacctgatgaggtactgtggaaaggaagtgggacactttgtgaaattctgctaatggttcaggcattcaaggctggaggcacacaactatgaatagtgcatcttctaaaatctctcactaaatcagctagctcttctcactaaatcagccagctcttctgcttgtcccatcgtcatccagatacttatttggg

SEQ ID NO: 52790 - DNA, 285 bp, Zea mays
ctcgagccgctctccggtggacagagcgaggaggaggccaccctgaatctcaatgccatgaacaagctcagcaccaagaagccatgggccctgtccttctccttcggccgtgccctccaggcgagcaccctcaaggcctgggctggcaaggtggagaacgtggagaaggctagagcggccttcctcgccaggtgcaaggccaactccgaggctaccctcggcacctacaagggtgatgctgccgccgacaccgagagccttcacgtcaaggactacaagtactga

SEQ ID NO: 52791 - DNA, 251 bp, Zea mays
cggctcgagggacgcaattcccgcaggaagcagacaagtatattgatcagcttgcatcagtcagttccgatcgccaatggaactgtcaggactgcacttgacactgggtgcggggtggctagctggggagcttatttgttgaagaggaatgtcttggccatgtcgtttgccccgagagattcacacgaggcacaagtgcagtttgctctggagagaggtgtccctgctgttattggcgtccttggtacaat

SEQ ID NO: 52792 - DNA, 266 bp, Zea mays
actcgagccgattcggctcgaggccttcgtcttcgacggccgcaacatcgtcgactccgagaagctgagggagatcggactcatcgtctactccatcggcaagccgctcgacgcctggctcaaggacatgcccgcggtcgcctaatcccaccccccacacccatggattggattccgggaaggaagaggagagaagctggttgaccgttctttattacagtttgttttttctagctacgctaccgattttctcttgtgtcaggcat

SEQ ID NO: 52793 - DNA, 242 bp, Zea mays
tctagctatagtagctcccttgagaagcatttgagggaggagccatgtctgaggagaagcaccaccaccacctgtttcaccaccgcaagccagaggaggagggcgcctccggcgaggtcgactacgagaagaaggagaagcaccacaagcacatggaagaagctcggcgagctcagcgccatcgccgccggcgcgtacgcccctgcacgagaagccacaggccaagaaagaacccgagaacg

SEQ ID NO: 52794 - DNA, 281 bp, Zea mays
atcggctcacgcactgacgcacatccattaccttctataatacgtctgcggtgtcaaaatttccctctcagccgtgttgctcgccgccgccccgccgtgttgctcgccgacaccgccccgccggcagccaaaatgccgttcaagaggttcgtggagatcgggcgagtggcccttgtaaactacggcaaggagtatggccgcctcgtcgtcatcgtcgacgtcgtcgaccagaacagggctcttgttgatgccccgacatggttcgttgccaaatgaacttc

SEQ ID NO: 52795 - DNA, 274 bp, Zea mays
cagaaaaccctagccgccgacaccgaagcggcctcccaggtaagcaggagcgtccaccccgacgccgtcatgaagcgcaatccccgcgtcacgagctcccgccggaagtgccgcaagggcaactttacggccccgtcctccgtccgccgcgttctcatgtccgccgggctgtcgacggagctccgccacaagtacaacgtgcgctccatcccgatccgcaaggacgacgaggtgcaagtcgtgcgcggcacctacaagggccgcgaggggaagg

SEQ ID NO: 52796 - DNA, 264 bp, Zea mays
ctcgagcgaaacttaacatgatggaaaatgagcaaggggaacttatagagagctttttgcctgttatcgataactttgaaagagcagaaatgcaaataaaggtggaaacagagggagaggagaaaataaataatagctaccagagcattaataagcaatttatcgagattcttaattcattgagtgttgaagatgttgaaactgttggcaaaccatttgatcctatgctgcacgaggctattatgagagaagaatcatcggagt

SEQ ID NO: 52797 - DNA, 266 bp, Zea mays
ctttctcgaggcatctccatcaccacttccttggatcagcgaggaagaactgggccagtacgccgaaaagtttcggaagtctgggttcactggacccctcaactactaccgcatgtgggagacgaattggagacttcttgcaccctggaacgaggccaagattacagtgcccgtcaagttcatagctggtgataaggacatcggtgtccagtcctttggggttgagaagtacatcaagagtggggaattcaagtccactgtcccag

SEQ ID NO: 52798 - DNA, 264 bp, Zea mays
  unsure (1)..(264): unsure at all n locations
ctcgtctccccccacccgcaaccgcnagggagagaaaggggaagcccgccgccgccccggcccccagcaaccagcagatcgggacctctgttctgcgcaatccatccatggcggaggaatcaggccgtcccttgccaaagtttggtgaatgggatgtcaacgatccggcttccgcagacggatttactgtcatattcaacaaagccagagatgagaagacgggtgggaatggtcaagacacagactcaccttccaaggacccca

SEQ ID NO: 52799 - DNA, 148 bp, Zea mays
gtcgtctgctccgggctgctgttctgcgcctccacaaggctttggcctctgttgtaagccatgggtaaggagaagtaccacatcaatgttgtggttattggccatgtcgactctggcaagtcaaccaccaccggccacctgatctaca

SEQ ID NO: 52800 - DNA, 244 bp, Zea mays
atcctggagtgatcatcaccaatatcattcgctatgttgctggaaacagtgcgctgatttcggctctctcccctgtagcaaatcttgttctgaagagcgtgccccggggggctgcaactacttgttacttggcattgcaccctaatgtcaaaggtgtatctggtcaatacttcgctgattgcaatgaagcaacaccgactgctgtcgcgagagactcagagctggcgaagaggctatggtcgtt

SEQ ID NO: 52801 - DNA, 270 bp, Zea mays
aatcaaggacaagtaccctagtatcacttatgcagatttatttcagttggcaagtgctacagcaattgaggaagctggtggcccaaagattccaatgaaatacggacgagttgatgttacaggacctgagcagtgcccccctgaggggaaacttcctgatgctggcccaagttcacctgctgaccacttgagggaggtattctacagaatgggccttaatgacaaggaaattgttgccttgtctggagcacatacacttggaaggtccag

SEQ ID NO: 52802 - DNA, 257 bp, Zea mays
tgccggctagggtttgcagatgacgacggcggcgcgccccacctgggcgccggccaagggcggcaacgagcaagggggcacccgcatcttcggcccctcccagaagtactcgtcccgcgacctcgccgcgcatacctcgctcaagctcagaaaagacggtcaacagacccaagaggagttacagaagaggaatctcagggaggaacttgaggaacgtgagcgcaagcactactcttccaaagataagtcctatgctg

SEQ ID NO: 52803 - DNA, 262 bp, Zea mays
ccaccagtggtgtccattcacgcacctagggttttcgcgccgccgccgccgccgccgccgcagccgcaacaatgccgtcgcacaagaccttccggatcaagaagaagctggcgaagaagatgcgccagaaccgccccatcccctactggatccgcatgcgcactgacaataccatcaggtacaacgccaagcgcaggcactggcgccgcaccaagctcggcttctgagcgtcgggattggccggctgctgcgtcggaaggct

SEQ ID NO: 52804 - DNA, 253 bp, Zea mays
gcctaaagctggacgacgaggacgacgaggaggccaagaagcggcgggaggagcgcaagaagcggttcgaggagctgtgcaaggtgatcaaggacatcctgggcgaccgcgtcgagaaggtggtggtgtcggaccgcatcgtcgactcgccgtgctgcctggtgacgggcgagtacgggtggaccgccaacatggagcggatcatgaaggcgcaggcgctacgtgacaacagcatgagcgcgtacatgtcctc

SEQ ID NO: 52805 - DNA, 262 bp, Zea mays
cccgggtgtcggaggagcttcgcgccgcgctctcagcgttccagcagaccttcgtcgtgtccgatgccacccgccctgaccaccccatcctctacgccagcgctggattcttcaacatgacgggctactcctccaatgaggtcgtcggaaggaactgccgcttccttcaaggttctgggaccgaccccgtagagatttccaagatcagacaggctctcgcagctgggtcaaattactgtggccgtatcctcaactacaagaa

SEQ ID NO: 52806 - DNA, 265 bp, Zea mays
gataaatctgaggcttgtttctctacattcgcagttgccgcctaagagctttcgccttgccaggcttgagagctagtgctgctaaatccttccttggatgtctgatgcgattcaaatccaattcttttgtgctttggttgtagagggttccgtaggtttcggtctaaaatcgtgtgctttgcaagatcagcttcttgtttggacttcgaaactgaaacctggtccaggcaatcggcaaatcatcctgccatcttgcgatactgta

SEQ ID NO: 52807 - DNA, 248 bp, Zea mays
cggctcgaggcagataatcagaaggcatgctactatcacgtgcaagaataaagctttctatctgactgatctcgggagtgaacatggtacctggattaccgacaatgaaggtagacgttaccgcgtgccaccaaacttcacggttcgtttacatccttccgatgtcattgagtttggttacgataagaaggctatgttccgggtgaaggtgctgaacacgctcccatacgaatcagccagaagtggga

SEQ ID NO: 52808 - DNA, 242 bp, Zea mays
tctcgagccgattcggctcgaccaaaacttcgatcgactgcttacgaagcattggtccaaccgttctttgatgaacttagggatccaaacacccgcttaccgaatggtcgttttcttccgcctctcttcaattttaagccccatgagctgaagaacgtgccggcggatttcatggtgaaattggtccctgagcatgcacggaagcaatgtgccttcgtagggtggtgatccctggataagag

SEQ ID NO: 52809 - DNA, 290 bp, Zea mays
aaactctggttcggatcaccggtggcatgaaggtgaaggctgaccgtgacgagtcgtcaccttacgctgctatgcttgctgctcaagacgtcgcacagcgctgcaaggagcttggcattactgcactgcacattaagcttcgcgccaccggaggcaacaagaccaagacccctggacctggtgcccagtctgccctcagggcgcttgctcgttccgggatgaaaatcggacgcattgaggacgttacccggtcccaatgacagcatcgcagaagggggtagaggggagga

SEQ ID NO: 52810 - DNA, 297 bp, Zea mays
cttcgctaaaggaagaagtacacaaactcctcgcagcggcaatgatggatctttccagaaggctgctcggggtaacagcagctcaatatttatccggggctttgataaaaatctttcagaggatgagatccggagctctctcgaacaacattttagtgattgtggtgagatgacaagggtctctatcccgactgatcatgaatctggtgcaataaaaggaatggcttacatagacttcaaggatcaggactctgtgtctaaagcccttgagctcagtggcctgacattggtggtggc

SEQ ID NO: 52811 - DNA, 232 bp, Zea mays
ccgcctctcctgctcctaccgcagctctccctcaggtttagtgttcgcaatggcggccttcaacaagcttggtggccttctaaggcacagtgctctggtgagcggtatcactggtggctcttctcctgcagtgttcaatgctgcacggatcatgtctaaccagctatttattggtggtcttgactggggtgttgatgacgtgaaactaagagaggcatttagcaactttgga

SEQ ID NO: 52812 - DNA, 289 bp, Zea mays
aaactctggttcggatcaccggtggcatgaacggtgaaggcgatcgtgacgagtcgtcaccttacgctgctatgcttgctgctcaagacgtcgcacagcgctgcaaggagcttggcattactgcactgcacattaagcttcgcgccaccggaggcaacaagaccaagacgcctggacctggtgcccagtctgccctcagggagcttgctcgttccgggatgaaaatcggacgcattgaggacgttaccccggtccccactgacagcatcgcagaaagggggtaggaggg

SEQ ID NO: 52813 - DNA, 286 bp, Zea mays
cacatacatagtttcttctactacacgacgacaaacatggggaagcctgcgaagatcggagagtggggtggatacgccggcgatcgtcgggatctgagggctactccggaccggctgatcgaggtgaaggtcacggcggacaacagcagctgcatccgctccatctccttcatctacatcggagccgatggcaaaccgtacgaggaggggccatggggtttcggccatgctggcacggagtacaagattgatctgtgcaggttcgacgagagcttgacgggatctc

SEQ ID NO: 52814 - DNA, 150 bp, Zea mays
  unsure (1)..(150): unsure at all n locations
aattgcggtaccacactataagaccacttggggctcaaggacgtttaaaaaccaagtccttgatagtgaagcttatgtgtacagaagattgaagtccgctggagcagtcctggtagcaaagcttgtcacggggtcnattgcctatgatga

SEQ ID NO: 52815 - DNA, 290 bp, Zea mays
tggctcgcggacaaagtggagggcttaggagcttctgcttcttttatgtctgaacaatctttgctttatttgggattgttgggagagtactctcgtgcaacgaggaaaaggcacaaggttccgtcccactgcatgcgtcaagagcttgtctggttttcttgttctgatttgtcatttgctggtgctcagagccggcttggtttcctcgaaggatcagcaactactcttgattgtggactttgtcacatctgatatcaacttcatagatttttatcaagatggcgctgcaa

SEQ ID NO: 52816 - DNA, 291 bp, Zea mays
cgcgacaatacgagaagcaaacatgtttaccgtgtctgatatattccaccgtactttttcaaatagtctctagtgatccctgaaaagttccagcatatcctgcgagtgctcaacaccaacatcgatgggccggcggaatattacctttgccatcactgccattaagggtgtgggccgaagatatgctcatgtggtgttgaggacagcagacattgacctcaccacgagggcgggagaactcactgaggatgaagtggcacgtgtgatcaccatatgcgatccacgccatac

SEQ ID NO: 52817 - DNA, 221 bp, Zea mays
ggtgaagccgccgccgctgcagtgtccatagccaccgcaggagactgagatggggggttttgtcaagaaccacaagagcaatgcatacttcaagcgtttccaggtgaagttcaagagaaggcgcgctggcaagacagactacagggccaggataaggctgattaaccaagacaaaaacaagtacactacacccaaatacagatttgttgtgcgatttccca

SEQ ID NO: 52818 - DNA, 284 bp, Zea mays
atgagtatgtttattgcctggcaatcgtcaagagcatgaagctcaacattattggacaaaatttcatgactggtcttcgtgttgtgttcgatcgggaaaggaaaattcttggatggaagaaatttaattgtttctcaccttcaacatctgagaactactctccgcaggaagcaaggaacccagctggtgtttcccagttgagaccactgaacaattcagcaccagcagcgttatatgatagcttgctcctgatgcttatcttggtccacctgctgataattagt

SEQ ID NO: 52819 - DNA, 268 bp, Zea mays
  unsure (1)..(268): unsure at all n locations
ggagagaatggttcatgtagccgagcagtacaaggctgaggatgatgcccagagggacagagtggctgccaaaaactcgctagaggcccatgtcttccatgtgaaaggttctttgaaaccaganagccttagggacaagattcccgaagaggacatgcgcaaaatgcaagacaagtgtcgggaagtccttgcctggctggagcacaaccagctggcagagaaggaggagtatgagcatcagaagagggagctggagcaatctgtcgcc

SEQ ID NO: 52820 - DNA, 257 bp, Zea mays
ctcgagccgctcgagccgcaaaaggatatgaactcgtctctggtgggactgacaaccattacgttctggagaatctcaagaataaggggatagatggttcaagggtggagaaggttttagaaagtgtgcatattgcagcaaacaagaacacagttcctggtgatgtttcagctatggtgccaggaggcatcaggatgggaaccccagcccttacgtcgagaggatttgttgaagaagatttcgctaaagttgctgac

SEQ ID NO: 52821 - DNA, 258 bp, Zea mays
ctggcgaccaaattctgccgtctccaccgccgccgcagccagcgtcaccggagggatctgccgtctcccttgctccacgcgatgaacaccgacatcaccgcctcgactaagccggagtacccggtggtggatcggaacccggccttcaccaaggtggtcggcaacttctctgcgctcgactacatgcgcctatccaccatctccgccgtctccgtcaccgttggctacctctccgggatcaagccggggatcgggggc

SEQ ID NO: 52822 - DNA, 279 bp, Zea mays
acgacgcaccgcacactacccgacggtggaactcctcgcccgcgtcgctgctccggtctccgcgctgctagccgccgactgtaataactataacatttcaggtgtgcttctgaagagagatttcgttgaacaggatgaatgcattggcagcaaccagcaggaacttcaagcaggcagctaagctgctgggcctcgactccaagctggagaagagcttgctcattccattcagggagatcaaggttgcatgcacaatcccaaaagatgatggactttggc

SEQ ID NO: 52823 - DNA, 202 bp, Zea mays
agagcacacacacacgaccagatctcccccaaatccacccgtcggcacctccgcttcaagatgcagatctttgtgaaaaccctgactggcaagactatcaccctcgaagtggagtcgtctgacaccattgacaacgttaaggccaagatccaggacaaggagggcatccccccagaccagcagcggctcatctttgctggca

SEQ ID NO: 52824 - DNA, 284 bp, Zea mays
aacatggctccctcgccgcaaccgtcggcaccagggtcatcgtcgtcggcgccggcatgtctgggatctcggcggcgaagaggctgtcggaggccgggataaccgacctgctgattctggaagcgacggaccacatcggcgggcggatgcacaagacgaacttcgccggcatcaacgtcgagttaggcgccaactgggtggagggcgtgaacggcggcacaatgaaccccatctggcccatcgtcaactccaccctcaagctccgcaactccgctccgacttcg

SEQ ID NO: 52825 - DNA, 277 bp, Zea mays
ctcgagccgttttgcacagtcaccgccgcatcgttcagtacaagacagcttattattcattctaccttcctgttgcatgtgcattgctgctggctggtgagaacttggaaaactttgttgatgtaaagaacattctcgttgaaatgggaacatactttcaagttcaggatgactatctagattgttttggtgatcctgaattcattggcaagatcggaactgacattgaagatcacaatgttcctggctaattgtgcaagctcttgacgtgctgctg

SEQ ID NO: 52826 - DNA, 71 bp, Zea mays
tggcaagtccgggaagccgctccactagaagggctccatcttgcaccgcgtcatccccgagttcatgtgcc

SEQ ID NO: 52827 - DNA, 186 bp, Zea mays
ggagcgcacacacacgcaaccagatctcccccaaatccagccgtcggcacctccgcttcaagatgcagctctttgtgaaattactgactggcaagactatcaccctcgaggtggagtcgtctgacaccattgacaacgttaaggccaagatccaggacaaggagggcatccccccagaccagcaga

SEQ ID NO: 52828 - DNA, 292 bp, Zea mays
gcggacacggaggcgaaggaggaggagcagcagcagcagtcggcgcgaggagcggcatcccactcagtgcttgcaaccatggctaggggattgaagaagcacttgaagaggctcaatgcgcccaagcattggatgctcgacaagcttggcggacttttgctcccaagccatcttctggacctcacaagtccagggagtgccttcctctgatcctcatcatcaggaacaggctcaagtatgctctgaactaccgtgaggtcatttctatcctgatgcaacgcatgtacttgtt

SEQ ID NO: 52829 - DNA, 295 bp, Zea mays
ctcccatatccgctcccctacctctccagcatcctcccgtctccgtcgtctcgtctccgctcctcacctcgccagccatgggcaagatcaagatcggaatcaacggtttcggaaggatcggcaggctcgtggccagggtcgccctgcagagcgaggatgtcgagctcgtcgccgtcaacgaccccttcatcaccacggattacatgacgtacatgttcaagtacgacaccgtgcacggccaatggaagcacagcgacatcgccctcaaggactccaagacgcttctcttcggcga

SEQ ID NO: 52830 - DNA, 291 bp, Zea mays
tgtagttctgttcctccccactcactcctgcgcttcctcgccgcgcggttccttctccctgatcctcctttggcttcgcggttcatggcgatgtggagggccgccgctaggagctggtcgaccgggcgctcggctcaagggccgcgcacacgtctacaggcagcaaaaagatagtcggggtgttctacaaggccggggagtatgccgacaagaaccccaacttcgtcggctgcgtcgagggtgcactcggcatccgcggctggctcgagtcgcagggccatcagtacattg

SEQ ID NO: 52831 - DNA, 289 bp, Zea mays
  unsure (1)..(289): unsure at all n locations
aacagcttctcttttcattctacacaatttatttatttgatactccctccgtctcaaaatataattcattttagactaaacatatattcattagttaacctatgaatatagtttgtatgtatatctacattcattatcaattattcgaatgtggacggagaactatattttgggacggagggagtactacttggctttatctgataccatttatttattttgctttctacacaatttctggcgctcnanntcatacaattattcagattattcaactggagttcagtca

SEQ ID NO: 52832 - DNA, 275 bp, Zea mays
cttgccccggacggctactcctcttgaagacattttcaagtcgatcctctgcttgccttgcctcctaggtttgagatgtttgagggatacatgtatacctgaagacgctatgcttaaggatccaaggaggctttatgcaccaggccggatttatcacatagtcgaaagaagaacgtgcaggtgcggaagatatccaccggtagtcaaaacagctgtgccggtggatggtagatttgagcacatagttctttcctgcaatgccacagcggaccatg

SEQ ID NO: 52833 - DNA, 291 bp, Zea mays
agccgctaccgcattattacagagagaacactcctagccatgtctgaaaatggtattggcctgttcccagacgttggctttgcttacattggtgcaaaagcaccaggagggggtgcagttggagtttaccttgggattactggaaaaaggatatcatcacctgctgatgctatgttcataggccttggtactcactatgtaccttctgcaaatttgggttcactcaaggagtccctgctgagtgctaacttcaccaatgatcctcatagagacgttgagtcagttctgaca

SEQ ID NO: 52834 - DNA, 285 bp, Zea mays
gagggaacatactaggtcaactggcagctgctgtgccacaaacgctgacagttaccccagaggaacgggaggctatccagcggctcgagggaatggggttcaaccgtgagcttgtgctagaagttttctttgcatgcaacaaggacgaagagcttacagccaactaccttctggatcatggccacgtctattgctgctgctcgtcaaactcatggccatgagtttgacgagcagcacaatagacgtggggtggatggaggaaaccgaggcagttgcagaacagcg

SEQ ID NO: 52835 - DNA, 289 bp, Zea mays
ctcgcctcgggtcaaaccctaagcagggagttgatttatccgctgcagccatgagtaagttgcagtctgagtctgtcaaggatgccatctcccagattgttggggatgccaaggagaagaataggaagttcactgagactgtggaacttcagattggtctgaagaattatgatccacagaaggacaagcgtttcagtggctctgttaagttgccccatatccctcgtcccaagatgaaggtgtgcatgcttggtgatgcccagcatgttgaggaggccgagaagatggg

SEQ ID NO: 52836 - DNA, 290 bp, Zea mays
tgaacagctcgtccgagaccatgaagaacagcccacaccaggtgctgatcctgtgcctccaggccgctctggtcatgggcgtcttcgccgctttggctaaagaaaatgccctggttgagagcaaggccatcgacatcaacccggggcagctcaagtgctgcaccaactgcaacttctccttctcggggctctacacctgcgacgacgtcaaaaaggactgcgaccccgtctgcaagaagtgcgtcgtcgccgtgcaggcttcttatcgggcaacaacaagttcaggtgca

SEQ ID NO: 52837 - DNA, 284 bp, Zea mays
ctttctcgaggcatctccatcaccacttccttggatcagcgaagtagaactgggccagtacgccgaaaagtttcggaagtctgggttcactggacccctcaactactaccgcatgtgggagacgaattgtgagacttcttgcaccctggaacgaggccaagattacagtgcccgtcaagttcatagctggtgataaggacatcggtgtccagtcctttggggttgagaagtacatcaagagtggggaattcaagtccactgtcccagatcttgaagtcgccgtc

SEQ ID NO: 52838 - DNA, 295 bp, Zea mays
tgcggagggagtcgagccagcgtcgccgcgatggtgttgttggagagcgctcagttctcgacggagctgatcagacttttccagaagtgccggacgtcgggcagcgtctatatcaccttgaagaagtatgacggtcgaaccaaacccattccaaagaaaggtactgtggagggctttgagcccgcagacaacaagtgtctgttaagagctaccgatgggaagaagaagatcagcactgtggtgagctccaaggaagtgaataagtttcagatggcttattcaaacctccttagag

SEQ ID NO: 52839 - DNA, 269 bp, Zea mays
ctcgagccggcggcggtgacgaagctggcgcggttcgtgttcgagctgctgtccgagtctctcggcatgcccagcgaccacctgtacgagatggagtgcacgcagaacctgaacgtggtgtgccagtactacccgccgtgcccggagccgcaccgcaccgtgggcgtcaagaggcacacggaccctggcttcttcaccatcctcctgcaggacggcatgggcggcctgcaggtgcgcctcggcgacgggcagaacggcggctcctgggt

SEQ ID NO: 52840 - DNA, 287 bp, Zea mays
gtgaagcaggacatgcctccgccggggggctatgggcccatcgactacaaacggaacttgccgcgtcgaggactgtcgggctacagcatgctggccatagggattggaaccctgatctacgggcactggagcataatgaagtggaaccgtgagcgcaggcgcctacaaatcgaggacttcgaggctcgcatcgcgctgttgccactgttacaggcagaaaccgaccggaggaccttgcagatgcttcgggagaacctggaggaggaggccatcatcatgaaggacgt

SEQ ID NO: 52841 - DNA, 257 bp, Zea mays
atgacaagctctctcatgactacatgtctatcttgaatctagacaatgaggtcaaaattttggtagatggggaagaaaagaagaaggcgaacttcctttctgctgatgattttgagccagcacttatcccatccaagaccattcctgaccctgatgacaagaagccggaggactgggatgagagagctaaaattcctgatccagatgcagtaaagcctgatgactgggatgaggatgccccgatggaaattgtggat

SEQ ID NO: 52842 - DNA, 286 bp, Zea mays
cgacagtccggacttgaagaaccggaaggggcctgtggaaatgccgtacatgctgctgtaccccaacacgtcggacgttaccggcgagaaggccgaggggcttactgccatgggcattcccaacagcatctccatatgagcctgggcagattgtgtctcgtagtaaattgttgtgctgcgccgtgcgatgtgtttcttcattcgttttgtttttgtcagtctcagggtaggggatggagatcataccatgatctttgtagggttgagagaggagtccacgcttgaa

SEQ ID NO: 52843 - DNA, 263 bp, Zea mays
agcgcgacgtggcagttcgacacggaggcgctgcccaacgacctcgtcaagcgcgggctggccgtgcgcggggaggacggggagctggagctcaccatcaaggactacccctacgcccacgacgggctcctggtctgggactccctcaagcagtgggcgtccgagtacgtcaacgtctactacaagtccgacgaggccgtggccgccgaccccgagctgagggcgttctgggacgaggtccgcaacgtggggcacggcgacaa

SEQ ID NO: 52844 - DNA, 291 bp, Zea mays
tgtaacacctcgtccgcttcgtcctctcgtctactcgcactcgctagctgacgctgcgtgcgccaaaagcagcactgcagcagcaggtccagccgtcgccgttcccacttcccaccactgccacgcgcgccccggatcgagggagggcacgcagacgcggaggagggaggatgagtctcttcgggcttggacggaaccagaagacattccgccccaagaagagcgctccatcaggcagcaagggagcacagctccgtaagcacatagatgccactctcggcagtggaaact

SEQ ID NO: 52845 - DNA, 287 bp, Zea mays
tctactatccagattgtggatctacaagtctttgcatcacctcgcattactctgaagccattggtgcctacatttccttgctttgcaaaaatccttgtctcactcatggagaagccacatgttgactttgggctaaaacttcttggagcagatgtaatggctattcctggtctttacagatttgttcaggagaccatcaagaaacaagtagcaagcatgtatttgtggccgaagacgctagaagtacctataatggatccctcaaaagcatcaaaaaggcctgttgg

SEQ ID NO: 52846 - DNA, 284 bp, Zea mays
cacatacatagtttcttctactacacgacgacaaacatggggaagcctgcgaagatcggagagtggggtggatacgccggcgatcgtcgggatctgagggctactccggaccggctgatcgaggtgaaggtcacggcggacaacagcagctgcatccgctccatctccttcatctacatcggagccgatggcaaaccgtacgaggaggggccatggggtttcggccatgctggcacggagtacaagattgatctgtgcaggttcgacgagagcttgacggagat

SEQ ID NO: 52847 - DNA, 282 bp, Zea mays
ctcgccccagcgacgcggcctcccgtagaccgagcaaggcaacccaccactgagaggcacgcagaggagcaggaagccggagaccaagatgtcgtcggtgttcagcggcgatgagacggcccccttcttcggtttcctcggcgccgccgccgccctcgtcttctcatgcatgggcgcagcgtacgggaccgcgaagagcggcgtcggcgtggcgtcgatgggtgtgatgcggccggagctcgtcatgaagtccatcgtgcccgtggtcatggctggtgtgct

SEQ ID NO: 52848 - DNA, 283 bp, Zea mays
gactgtgctgtccttatcattgactccaccactggtggttttgaggctggtatctccaaggatggccagacctgtgaacatgctctccttgcgttcacccttggagtgaagcagatgatttgctgctgcaacaagatggatgcaaccactcccaaatactccaaggcacgttatgaagagattgtgaaggaagtctcatcctacctcaagaaagttgggtacaaccctgataagattgcctttgttcccatttctggttttgagggtgacaacatgattgaga

SEQ ID NO: 52849 - DNA, 286 bp, Zea mays
cgacaccgtgcacggccaatggaagcacagcgacatcaccctcaaggactccaagacgcttctcttcggcgagaagccggtcaccgtctttggcatcaggaaccccgaggagatcccgtggggtgaggctggtgctgagtatgtcgtggagtccaccggtgtcttcactgacaaggacaaggctgctgcacatctgaagggtggtgccaagaaggttgttatctctgccccaagcaaagatgcacccatgtatgttgttggtgtcaatgaggacaagtacactccg

SEQ ID NO: 52850 - DNA, 289 bp, Zea mays
ctcccatatccgctcccctacctctccagcatcctcccgtctccgtcgtctcgtctccgctcctcacctcgccagccatgggcaagatcaagatcggaatcaacggtttcggaaggatcggcaggctcgtggccagggtcgccctgcagagcgaggatgtcgagctcgtcgccgtcaacgaccccttcatcaccacggattacatgacgtacatgttcaagtacgacaccgtgcacggccaatggaagcacagcgacatcgccctcaaggactccaagacgcttctctt

SEQ ID NO: 52851 - DNA, 283 bp, Zea mays
tggcacgagatcacgcttctcgtcggatcgaacagctagggtttccaagatgttcgggcgcgcgccgaagaagagcgacaacacacggtactacgagatcctcggggtctccaaggacgcgtcccaggatgacctcaagaaggcctaccgcaaggccgccatcaagaaccaccccgacaagggcggcgatcccgagaagttcaaggagctagctcaggcctatgaggtcctcagtgatcctgaaaagcgagagatttatgatcaatatggtgaggatccctca

SEQ ID NO: 52852 - DNA, 282 bp, Zea mays
ggcgtccggcaccatgccggaccccggctggatcgccgccagcggctccaccgcgctggagatccccgccaaggtgccctacgaattcctcgtctccctcgtcagggacgtcggccgggactgggacatcgactacgagctccaggtcgggctcaccgtcgacctccccatcgtcggcaacttcaccatcccgctctccacctctggcgagttcaagctccccaccctcaaggacttgttctgatctagtagtagctcgcttgccttgtgttctgtgcgggc

SEQ ID NO: 52853 - DNA, 280 bp, Zea mays
cgacctcgtccgcgacgccctggccacccctggccccttctccaacaagcttgctgagattgtcaatcatggaaaactggtgtctgatgagatcatcataaatctgctgtcaagacgtctggaagagggagaggaaaagggtgaattggggttcatccttgatggctttcctcgaaccataggacaagcggagatacttgaaggagtcacagacattgatttggtgatcaatctcaaactccgagaagaagctctgcttgcgaaatgccttggcaggagg

SEQ ID NO: 52854 - DNA, 272 bp, Zea mays
cctgaacctggtgtacatctgcgagtgcaatggcctgcccgaggtggccaactactggaagcaggtgatcaagatcaacgactaccagaagagccggttcgtgaaccgcgtcgtgtcgtccatgttcaacaccgttgccggcaagaagatcgccgtcctcggcttcgccttcaagaaggacaccggcgacaccagggagaccccggccatcgatgtctgcaagggcctgctgggtgacaaggcccagatcagcatctacgaccccaggtgac

SEQ ID NO: 52855 - DNA, 280 bp, Zea mays
tggggctgggaggcctggggcacgtcgccgtcaagttcgccaaggcgttcggggccaaggtcaccgtcatcagcacgtcgcctgggaagaagcaggaggcgctcgaccggcttggcgccgacgccttcgtcgtcagcaaggacgccgaagaaatgaaggcggctgcgagcaccatggacggcatcatcaacacggtgtcggcgaacctcaccttggccccgtacatgggcctgctcaagcccaacggcaagatgataatggtcggcctgcccaccaagct

SEQ ID NO: 52856 - DNA, 279 bp, Zea mays
ctagaaatgattacagatgaggaaaagtctgttttccgtaggattggtttacggcttaaggcatatttgctacttggagttcgtggtgtttttgatggtgtaattgaaaatatgcacttgcattggaagcacagggaagttgttaaactaatttcaaagcagaagaccttgtcattcgttgaagagacggcacggcttcttgcatatgagagtggtggtatactagttgcaattgaaagagttccaaagggttatgcactcattttttaccgtgggaag

SEQ ID NO: 52857 - DNA, 284 bp, Zea mays
gaagaatggcaccgaaaacttggaacttccagaggttaaggattatcaaccccgaaaagtagcaggagatgaaattcttgagcaagaagtatatggcatagatccatacacacacaatctactgagtgacattatgcctgctgatcttgagttgtcacctaccgacaagcatatctttattgaggagttgcttctgaatacattgaataagcaagttaggcatttcactggttcgggaaatacccctatgacttacaaccttaggcctgtcattgaagagatcc

SEQ ID NO: 52858 - DNA, 295 bp, Zea mays
ggcttgggctctcgctcctgtcgtacggattcggatcgtatttcaacctgcttcctggttcggaatggtcagctttgctgctaacctacgggtttcctctcacaatcatcggcatggccgtaaagtatgcagaactgaaaccagtaccctgcataacctacgctgatgcctttgctctaagagataagtgtgctacccctattctgaagcaggtcaggagtgatgttacacgttttagatatggtgatgaacaacacttggatgaagcactgcagaggatctttcaatatggttt

SEQ ID NO: 52859 - DNA, 294 bp, Zea mays
gacaagcggaaggaagtcctctctaaaatagaagaggatgttgctaagctcagcggttctgcagccaactaagaagctacaagtgaatgccgaggagagcagcgatgacttggctaacccaccgaagtagaggagaagcttggtgctgtccctcatggcctgtccaccgactctgaggttgcccagagggaagccgagtctatctctaggaagactctcaggagctcagccgagaagtttgagttccaagctgaggtttccagactcatggacatcatcatcaactcactctac

SEQ ID NO: 52860 - DNA, 290 bp, Zea mays
cggctcgaggacatggccttggctgtgaaaaatccatgccatctcaatatggctgcatgcctgatcaaactaaagagattcgatgaagctattgcgcagtgtagcattgttttgacagaagatgaaagtaatgtcaaagcgctgttcaggcgaggaaaagctaaatctgaacttggccagacagaatcagcgagggaagatttcctcaaagcgaagaagtactccccagaagacaaggagatcattcgggagctccgtttgctcgcggaacaagacaaggcactatacca

SEQ ID NO: 52861 - DNA, 292 bp, Zea mays
tctagatcctgctctgttgcgtcctggtagacttgacaggaaaattgagttccctttgccagaccggcgtcagaagaggcttgttttccaagtctgcactgccaaaatgaacctgagtagacgaggttgatttggaagactatgtttccagaccggataagatcagtgctgctgatattgctgctatctgtcaagaagctggcatgcatgctgtccgcaaaaaccgatatgtcatcctccccaaggactttgagaagggctaccgaaccaacgtgaaaaagcctgagacgga

SEQ ID NO: 52862 - DNA, 292 bp, Zea mays
caccccctctgactacagatactacccctaccagtccttccagactccacaacaccccagcttcctcttccaggacaagagggtgtcctggtccctggtctacctccccaccatccagagctgctggaactacggcttctcctgctcctcggacgagctccctgtcctgggcctcaccaagtctggcggctcagatcgcaccattgcctacgaaaacaaagccctgatgctctgcgaagggctcttcgtggcagacgtcaccgatttcgagggctggaaggctgcgattccc

SEQ ID NO: 52863 - DNA, 292 bp, Zea mays
ccaagtttatgaggaaacagctggactgatggttaatgaccctgtattgagaactcgatagcctctttcagttgaattgggacctggaattcttggaaacatttttgacggtatccagcgacctctaaaaaccatcgctattaagtcaggagatgtgtatattcctcgtggtgtttcagttcctgcccttgacaaagatgtattgtgggaatttcagccaacgaagctaggtgttggagatgtcatcacaggtggagatctatacgctactgtttttgagaacacattgatg

SEQ ID NO: 52864 - DNA, 289 bp, Zea mays
cgcacatatgaggactacttggaggggtttcgtgtgtttgataacgaggggaacggcaaagtcatgggagcagagctcagacatgttctcaccacccatggagagaagatgactgaggaggaggtggagaccgttctggcaggacacgaggacagcaacggctgcatcaactacgaggccttcttgaaacacatcctaagcgtctgagtgctgcagatccagtggggtccggacactgggccccgcaggcgaaagcacgttccagccacgaggaggccacctattgttt

SEQ ID NO: 52865 - DNA, 293 bp, Zea mays
cgctgatgacgactccggtatctactaccagctggctcttatgtggccaggagcatactgcgagcagaccagcgctgggtgctgcaagccgaccaccggcgtctcgccggcgcgcgacttctacataacgggcttcaccgtccttaacgcgaccaccgacgctgcagtgacgggatgcagcaacaaagttccttacgaccctaacctgattaccggcatccaaggcctgaatcagtactggagcaacatcaggtgccccagcaacaacgggcagagcagctggaagaacgcct

SEQ ID NO: 52866 - DNA, 292 bp, Zea mays
gcaggttctctgtaaatggaaaacccatttaccatttcatggggacatcaacattcagccagtacactgtggtgcatgatgtcagtgttgcaaagatcaagccacaggcacccttagataaagtctgcctgctcggttgtggtgttcctactggtcttggagcggtgtggaatactgcaaaggttgaatctggctcagttgtagctgtttttggccttggaacagttggacttgcagttgctgagggagcaaaagctgctggtgcttctcgagttattggcattgacatcga

SEQ ID NO: 52867 - DNA, 292 bp, Zea mays
caagccactcccaaacccccgcttccagaaccttctcgaagctccccgccgcctcctccactcgcaccgatggcgaaggaaccaatgcgcgtgctcgtcactggcgccgcaggacaaattggatatgccctggttcccatgattgctaggggcgttatgcttggtgcagaccagcctgttattctgcacatgcttgacattccgccagcagctgaagcccttaatggtgttaagatggagttggttgatgctgcgtttcctcttctgaagggagttgttgctacaactgatg

SEQ ID NO: 52868 - DNA, 291 bp, Zea mays
gcattttgtccatggatattcatccttcaaaggacattgttgcaactgggggtatcgatacaaatgcagtaatctttgatcgttcatctggtcaaatcttgtgcacgcttgctggtcactcaaagaagataaccactttgaagtttattccacgggatcaactctttgtaactggatcagcagataagactgttcgcatctggcaagagaatgagaatggaaactataactgtgtccatacactgaaagatcatactgatgaggttgaagctgttacagtacatgtgactc

SEQ ID NO: 52869 - DNA, 288 bp, Zea mays
gttacaccaaccaggacagaaatcattatcttagccaccagaatgcagaatgttcttggtgtgaagggccggcggattcgggaactgactgctgtagttcagaggaggtttggctttccagagggcagtgtagagctttatgctgaaaaggtggccactagaggtctgtgtgccattgcccaggcagagtctctgcgttacaaactcctaggatggcttgctgtgcggagggcctgctatggtgtgctgcggttcatcatggagagtggggccaaaggctgcgaggtt

SEQ ID NO: 52870 - DNA, 287 bp, Zea mays
cttttctgcgtatctcctgctgtggctcctcctgttgtatttgccggacaatcattggcaggccttttgccagccattgatcttattagcgtgactgccttggttggcatattctactttgttggatttggactgtcctgtctggcatcattgctcagcatctgggtcatccagcaagtgtacatgtacttccgtggaagtggaaaggctgcagagatgaagcgtgatgcgacgaggggtgcaatgagagccgcatttcaagtgtggtgtggtatttttcttgtgat

SEQ ID NO: 52871 - DNA, 291 bp, Zea mays
atcactgatgcgtctctcgccgtgattgggtactatgggaagtcaatcaaagacctgaccctcgctcgcctctctgctgtctgcgagaggggattttgggtgatggccaatgccctcggcctgcagaagctgaggtgtatgactgtcgtctcctgcccgggactcacggatcttgcccttgcatctgtggccaagttcagcccaagcttgaagactgtgaacctcaagaagtgcagcaaggtctcagacggatgcctcaaggaattcgcagaatcatccagggtcctggag

SEQ ID NO: 52872 - DNA, 289 bp, Zea mays
aacgggtacctcaagggcgtcgtcaccgacgtcatccacgaccccggccgtggcgcgccgctcgccaaggtcactttccgccacccattcaggtacaagcaccagaaggagctctttgtcgcagccgagggcatgtacacgggccagttcgtctactgcggtcgccgcgccagcctctccatcggcaacgtgctgcccctccgcgggatccctgagggtgccgtcgtctgcaacgtcgagcaccacgtcggtgaccgcggtgtcttcgccagggcctctggggactacg

SEQ ID NO: 52873 - DNA, 274 bp, Zea mays
ggctcgagcgtgctcgagcaaagcgcctagcaaaagcatacttcccgaggcactcttgcaatccactgagttctgtttgttgagacgcatagagctagctgctagcgtcgacaatgtcgctcgtgaggcgcacaacgtgttcgaccccttctcgatggacctctgggaccccttcgacaccatgttccgctccatcgtcccgtcggcgacctccaccaactctgagactgccgccttcgccagcgcccgcatcgactggaaggagacgcccgag

SEQ ID NO: 52874 - DNA, 287 bp, Zea mays
ctctccttcccggtctcctccgcccgttgccttcgtcccctccatctccggctgcgtcgccggcgagcccgacaccgcgaatcggatccgccgacaaggtgagagggaagagatggggctcacgttcaccaagctgttcagccggctgttcgccaagaaggagatgcggatcctgatggtgggactcgacgccgccggaaagaccaccatcctctacaagctgaagctcggcgagatcgtcaccaccatccccaccatcggattcaatgttgaaactgtggagtaca

SEQ ID NO: 52875 - DNA, 287 bp, Zea mays
tgctgctcaggctgttcaagagttgaatggcaagatattcaatgataaggaactgtatgttggaagagcacagaagaagtctgaaagagagatggagttgaaggagaaatttgaaaagaatgttcaagaggtagctgagaagttccaaaacacaaacttgtatttgaagaacttagaggagaacattgatgatgagaaattgcgtgaactctttgctgagtatggcaatattacttcctgcaaggttatgcgggattcgaatggtgtcagcagaggttctggatttg

SEQ ID NO: 52876 - DNA, 285 bp, Zea mays
agaagaacaaccgttacaagtagcaagatgtacaaagattataagccctaatacggatgatgccaaatatgttataaatgtacaacaaattgcaaagtttgtggttggattgggagataaggtctctccaactgatatcgaggaagggatgagggttggtgttgatcgcaacaagtaccagattcaaatccctctcccaccaaaaattgacccaagtgttaccatgatgactgtggaggaaaagccagatgtgacgtacaatgatgtcggtggctgcaaggagca

SEQ ID NO: 52877 - DNA, 287 bp, Zea mays
cgacatcaaccgcatcctcgggcccaaggcctcctgcatctccttcaaggactccgcctgccgctgcttcggctacatggtctccaagaagaagtacatctacaccatcgacgacgactgcttcgttgccaaggacccatctggcaaggatatcaatgctcttgagcagcacatcaagaacctcctcagcccatccaccccgttgcccttcaacaccctgtacgacccctaccgtgagggtgctgactttgtgcgtggatacccttcagcctcagggagggtgctca

SEQ ID NO: 52878 - DNA, 285 bp, Zea mays
gtcgtggcgggcagtggcggcagaatgttggctaccagggtatttatcctagttggcaagcgagcaatgtccatctctgtgtgtgtacgagctcatgaaagtgttgtgaagagcgaagacttttcgctcccagcttatatggatcggcgtgaccaccccttaccggaggtggcccatgtcaagcacctgtctgtcagccagaaggcactgaaggagaaggagaaggcctcctggagcagcctctccatggatgagaaagtcgagttgtatcgcattaagttcaag

SEQ ID NO: 52879 - DNA, 285 bp, Zea mays
aactacacaagatttttaagctatgcggttcacctgctgatgattattggaagaagtcgaagttgcctcatgcaacagtatttaaaccgcatcatccatatcccagtacccttcgagatgtttttaaagaggtaccagaaaatgccttgagtttactagaaactctcctatcggtggagccctacaagcgtggtactgcatctagtgctctttcttctgagtttttcaggacaaaaccttatgcttgtgaaccatcgagcttgcctaagtacgcacccaacaagg

SEQ ID NO: 52880 - DNA, 285 bp, Zea mays
ggctcgagctaggttttttgattttagccgccgccgctgctcatctcacatccctcgagaagacgcctgctcctcgccgatcgatacgatggccgtcttctccgacctccacaccgccgacggcctcaagtccctcgaggctcacctcgccggcaaaacctatgtgtctggtgactccattactaaggatgacattaaggtcttcgccgcggtgccgtcgaagcctggcgctgagtttcctaatgccgcccgctggtacgagaccgtctctgcggctgtagctca

SEQ ID NO: 52881 - DNA, 285 bp, Zea mays
cagatgtttacagtttcggcatgctggtgttagagatggtgagtggaaggaggaattcagacccaggtatcgagaaccaaaatggggtgtatctaccagagtgggtctatgagagagtagtcactgggcaggacctcacacttagtaagaaaatagctgagcaggagaaagaaacagtgaggcagctggccattgttgcactctggtgcattcagtggaaccccaaaaacaggccatcaatgacaaaggtggttaacatgttgacaggaaggttacagaatctac

SEQ ID NO: 52882 - DNA, 284 bp, Zea mays
gttccgcacgatgatgacgaagacgtccttcctagtccagctccctcgataaagccaatcgatgagccggcgcaatagaagtgttctcctatcaacgcttttcagttgatcgggatggcctcttcccttgacctttctggtttcttcgaggaagaggatgcagcgcaaagaaagattcggttcacttcgacgcacccacccaaggatctatttgacaagatcgagagcgttgtcatggagatgggattcaaagtccataggggggcaggcaagctcaaggtctt

SEQ ID NO: 52883 - DNA, 262 bp, Zea mays
ggatggcgagcatcatctcgttcacgttcagggaggccgtggccgacgtggagtacaaagggttccttatcttcaaggggtggaaggtgatgccgctcttcaggaacatccaccacagcccggactacttccaggatccacacaagttcgacccggctagattccaggtggcgccgcgtccgagcacgttcctgccgtttgggcacggcgtgcacgcgtgcgccgggaacgagctggccaagctcgagatgctcgtgctcat

SEQ ID NO: 52884 - DNA, 284 bp, Zea mays
acaagtcatatctagctatagtagctcccttgagaagcatttgagggaggagccatgtctgaggagaagcaccaccaccacctgtttcaccaccgcaagccagaggaggagggcgcctccggcgaggtcgactacgagaagaaggagaagcaccacaagcacatggagaagctcggcgagctcggcgccatcgccgccggcgcgtacgccctggtgagaacaaaaaaaccaacctcgatctctttgatcgcctgagccatgcatgccatggtccagttcttgat

SEQ ID NO: 52885 - DNA, 282 bp, Zea mays
ctggtggtgcctgggacaacgccaagaagtacattgaggctggagtttcagagcatgccaggacccttggcccaaaaggttctgaccctcacaaggcggctgtcattggtgacaccattggagatcctctcaaggacacgtctggcccttccctcaacatcctcatcaagcttatggcggttgaatcccttgtcttcgcccccttcttcgccgcccatggtggcattctcttcaaatggctctaagccagcgagagacgcaggataaaggccgtagttttgc

SEQ ID NO: 52886 - DNA, 187 bp, Zea mays
tgcgagtgcaacgtcctgcccgaggtggccaactactggaagcaggtgatcaagatcaacgactaccagaagagccggttcgtgaaccgcgtcgtggcctccatgttcaacaccgtcgccggcaagaagatcgccgtcctcggcttcgccttcaagaagacaccggtgacaccagggagaccccggc

SEQ ID NO: 52887 - DNA, 189 bp, Zea mays
cggggctactgaatactgcgtggtgcatggaggagggaagcgctgttccgtgcccggctgcaccaaaagtgcccgtggccgcactgactgctgtgtgaagcacggtggcggcaagcggtgcaaggttgacagctgtggcaagagcgcccaggggagcagcacttctgcaaagcccatggcggagggaag

SEQ ID NO: 52888 - DNA, 182 bp, Zea mays
aaatggaagaccccatggatcgataatccagagtttgaggatgatccagatctttatgtgctgaagcctttgaagtatattggaattgaagtttggcaggtaaaagctggttcagttttcgacaacattctgatttgtgatgaccctgagtatgcagaaaggttgttgaggaaacttggggt

SEQ ID NO: 52889 - DNA, 279 bp, Zea mays
ctcgagccgacgtccggtcagaccaatcaacaaagtgacgcgagcacgagcatccatgcgatccccttcttccccatcgcgtgccctcgccgcagccatcttccatggcggaccagctcacggacgagcagatcgcggagttcaaggaggccttcagcctcttcgataaggatggcgacggctgcatcactaccaaggagcttggaactgtgatgcgctcccttggccagaaccccactgaagcagagctgcaggacatgatcaacgaggttgatgctg

SEQ ID NO: 52890 - DNA, 185 bp, Zea mays
ggtaccttcaccaatcagctccagacctctttcagcgagcctcgcctgctcatccttactgacccaaggactgaccatcagccaatcaaggagtctgctctggggaacatcccgaccattgccttctgcgacactgactctcccatgcgatatgcgatatcggcatcccagccaacaacaagggg

SEQ ID NO: 52891 - DNA, 183 bp, Zea mays
attagttttgctgaacagcaagaatttcatgaagggacgggttaaaactagtggtagcttcgttctgcgaagatttggtgcatttgactttgcgaaaccaggttcaggtaaaggtttgaaaattgaggacctggatttcactgatgaggagatgacatgtatgtggatctccacccgatcaca

SEQ ID NO: 52892 - DNA, 181 bp, Zea mays
gcaagggccaaaaccgtgacagggagaagcttttcctagcaaaccaggaaaagttccatgctggtgcagataagcaatactggaaggcgatatctgaacttatcccacatgagattgctaacatcgagaagagagggagcaggaaagacaaggagaaaagcctgggatcgtggtgatccag

SEQ ID NO: 52893 - DNA, 249 bp, Zea mays
gagcggctgagtcggccttttccgcccgatcccccctccccccgagcgccgctccggctgcaccgcgctcgctccgagtttcaggctcgtgctaagctagcgccgtcgtcgtctcccttcagtcgccatcatgattatctaccgggacctcacagccacgatgagatgttctccgacatctacaagatccgggagatcgcggacgggttgtgcctggaggtggaggggaagatggtcagtaggccagaa

SEQ ID NO: 52894 - DNA, 155 bp, Zea mays
tggtgctggagctgccaagccttatactgcagttgccctccagacaatctcacggcatttccgatgtctaaaggatgctatcaatgatcaaattagtgttatccggaagaaccttggagaggatgacaatacatccggcaaagagggcaactaac

SEQ ID NO: 52895 - DNA, 288 bp, Zea mays
ccactcttcgcctcctttctggagcagctagggttccgtcctcgatccgatccgccgagtgcacaccacctttccccactccaaatcgatagccgccgaggtcgagaagaagatgataaccctcaaaagctccgatggcgaggagtcgaggtggaagaggcggtggcgatggagtcgcagaccatccgccacatgatcgaggatgactgcgccgacaacggtatccctcttcctaacgtcaactccaagatccaatccaaggtaatcgagtactgcaacagcacgtac

SEQ ID NO: 52896 - DNA, 154 bp, Zea mays
ctcctctgctctcccccacctcccggtccggcagcagagagcgggggtgcagagagatcgagatccggaggccgcgagtgggagcgccaccaccagcgactgcggcaatggcgggcacggtgacggtcccggggtcgtcgaccccctccacgcc

SEQ ID NO: 52897 - DNA, 153 bp, Zea mays
agaagaacaaccgttacaagtagcaagatgtacaaagattataagccctaatacggatgatgccaaatatgttataaatgtaaaacaaattgcaaagtttgtggttggattgggagataaggtctctccaactgatatcgaggaaggatgagg

SEQ ID NO: 52898 - DNA, 153 bp, Zea mays
ccgttgtctaccagatcatcccatggcgtcggagaagaagcagtcgaacccgatgcgggagatgaaggtccagaagctcgtgctcaacatctccgtcggcgagagcggtgatcgcctcacccgcgccgccaaggtactggagcagcgagtggc

SEQ ID NO: 52899 - DNA, 271 bp, Zea mays
aataaccttcccagcatatatgaggttgtcacaggaacagccaagaaagagcccaaagaaaaaactcctaaaagcaacagtaagactaacaaatctggctcaaagccctcgcgccatgcggaaccaaactcaagggtcccaaagatgcccctccaaaggacgaggagagtgaagaggaggaaggggaaccacaggaagaccaggagagtgcgctgtgtggcgcatgtggcctaggttatgacgacttctggatctgctgcgacctatgcga

SEQ ID NO: 52900 - DNA, 286 bp, Zea mays
atcgacgaggctgcactgagagaagggctgccgctccgcaaggctgagcatgcattctacttggactgggctgtccactccttcagaatcaccaactgcgaaatccaggacaccacccagatccacacccacatgtgctactccacttcaacgacatcatccactcgatcatcgacatggacgcggacgtgatcaccatcgagaactcgcggtccgacgagaagctgctctccgtgttccgtgagggtgtcaagtacggcgcgggcatcggccccggtgtctacga

SEQ ID NO: 52901 - DNA, 264 bp, Zea mays
gccatcaccgaagcgggagcggacaaaatgaagtttaatacctttgtgcattccgaccgaagcaagaatcgcaaaaggcatttcaatgcaccttcccacattcgaaggaagattatgtcttcccctctttccaaagagctgagacgaagtacaacgtgcgatccatgcccatccgaaaggatgatgaagttcaggttgtacgtggacactataaaggtcagcaaattggcaaagtagtccaggtttacaggaagaaatatgtta

SEQ ID NO: 52902 - DNA, 150 bp, Zea mays
gatcttctgtggtctgatccagatgatcggtgtggctggggtatttctcctcgtggtgctggttataccttcggacaggatatatcagagcagttcaaccataccaatagtctaaggctaattgctagagctcaccagttggtatggagg

SEQ ID NO: 52903 - DNA, 148 bp, Zea mays
gcggatgttgacagaaagaatcaacagactgttgagattcttaaaaggcaaggagcacaattggtggaacttgagaatctttataagcaagaacaggttctacgcaagcgttactataatacaattgaagatatgaaaggaaaataag

SEQ ID NO: 52904 - DNA, 279 bp, Zea mays
tctagatcctgctctgttgcgtcctggtagacttgacaggaaaattgagttccctttgccagaccggcgtcagaagaggcttgttttccaagtctgcactgccaaaatgaacctgagtgacgaggttgatttggaagactatgtttccagaccggataagatcagtgctgctgatattgctgctatctgtcaagaagctggcatgcatgctgtccgcaaaaaccgatatgtcatcctccccaaggactttgagaagggctaccgaaccaacgtgaaaaa

SEQ ID NO: 52905 - DNA, 283 bp, Zea mays
caagcgggtacatcggcgaagacccctgcggtgtcccgaacaacctgatgccctacgtgcagcaagtcgctgttgggaggttacctcacctcacggtctacgggacggactacagcaccaaggatgggactggggtgcgtgattacatccacgttgtcgacctggctgacggccacatatcagctctgaggaagctccacgaagactccgacaaaataggctgtgaagtgtacaacttggggactggaaaggggacgtcggtgttggaaatggtggctgcatt

SEQ ID NO: 52906 - DNA, 289 bp, Zea mays
gtaaccctaatctccctccagaaacagtggactctctaaaaaatatcctgacttctaataacattgatgtcaagaaaatgacggtcacagaccaggtgaactgccccaagctctcgtaaccagtttctacagggaggctgcacccactccatgttacttctgcttcgctttcccctaccccaccccccccccataaagacaaaccaatcaaccacgacaaaggaagttgacctgaacatgtaaccatgccctaccctgttaccttgctagctgcaaaataaacttgttg

SEQ ID NO: 52907 - DNA, 288 bp, Zea mays
ctgacgcagaaggaaggctaacacttgctgatgctttggtctatgcttgcaaccaaggtgttgaaaagattattgatttggcaacgctgaccggcgcttgcgttgtcgcactcgggcctagcattgccgggattttcacgccgagcgacgagcttgccaaggaggttgccgctgcttccgaggtatccggcgagaagttctggagactcccgctggaagagagctactgggagtctatgaagtctggcgtggctgatatggtcaacactggcggcaggcagggaggtt

SEQ ID NO: 52908 - DNA, 279 bp, Zea mays
tggggagttcctccaccaggcagtgaccatctgcctgaacatccagaaggagtacggcaagctcctcaaggacttcaacaagggcctggtgaacaacaaggacatcgagaacctcaaggtccaggtggagaagtttgccgactccttcgacatgcctgggttcacgcttgagagcatgaaatacaaggagtagacatgcctcccatgcgcggcaaggtcctcctgtaccgatgtctttccttgtggtggcgcaggtgccatggcactgcatgccgccac

SEQ ID NO: 52909 - DNA, 284 bp, Zea mays
ccgccggccaaacccaatctgctggtcgctggggcggttccggtggagaaactgagccggtgatccagctcggcgactccgaggtgctcacggagctgtccgggacgatcggcaacgtcgacggccacaccgtcataacctccatcaagttcgtcacaagcctcaagacctacggccctttcggagcatggggggacgggagtgacactccgttcgcgatccccgtgcagcaagggagtgccatcgttggcttcttcgcacgagctggggtctacctcgacgcc

SEQ ID NO: 52910 - DNA, 295 bp, Zea mays
cggctcgaggattttctggcctctctcccagagaatgactgccgatatgcgctgtatgattttgattttgtcaccggggagaatgtgcagaaaagcaagattttcttcattgcctggtccccgtcgacatcccgcatccgtgccaagatgctttactccacctcgaaggaccgcatcaagtatgagctcgacgggttccactacgagatccaggcgaccgacccatccgaggcggacattgaggttctgcgggagcgggctcactgaagctggttcgccttcgaagaagaaggga

SEQ ID NO: 52911 - DNA, 283 bp, Zea mays
tgctccccaaaccagcgcaaaccctgccctgacaccggcagcgacacgtccaccggcggcgccatggtgctcgaggcaacgatgatctgcatagacaattcggaatggatgcggaacggcgactacgctccgtcgcggttccaggcgcaggccgatgccgtcaacctcatctgcggcgccaagacccagtcgaacccggagaacacggtaggcgtgatgacaatggccgggaagggtgttcgcgtgcttgtcactcccaccagcgacctcgggaagattctcg

SEQ ID NO: 52912 - DNA, 285 bp, Zea mays
cacacatacatagtttcttctactacacgacgacaaacatggggaagcctgcgaagatcggagagtggggtggatacgccggcgatcgtcgggatctgagggctactccggaccggctgatcgaggtgaaggtcacggcggacaacagcagctgcatccgctccatctccttcatctacatcggagccgatggcaaaccgtacgaggaggggccatggggtttcggccatgctggcacggagtacaagattgatctgtgcaggttcgacgagagcttgacggaga

SEQ ID NO: 52913 - DNA, 286 bp, Zea mays
ctcgagccgccatgttcggctgcaccgacgccacgcaggtgtacaaggagctgcaggagaccatcgccgcgtacccggacgccttccaccgcgtcatcggcttcgacaacgtcaggcagacgcagtgcgtcagcttcatcgcctacaagccccccggcagcgagtagagaccgtggctagatcgacccatggccatgcctctgcctgttgatcggatcaccttcttgcattggttcctctctctctctccctccttttttttccctttatctcatcatttcttttc

SEQ ID NO: 52914 - DNA, 283 bp, Zea mays
ggacaattgtcagtgtctctgatgatggcgagagcactggtggaggtggaacactgcagatttggcgcatgagtgatttgatctaccgcccagaggatgaagttcttgcagagctggagaatttcaaggctcatttggccagctgtgcaccgaagaattgagtcatgtgggttacctgcggaatgcaatcctgtggaaactgagtaggtgatgtagtttcatggccataagtatgagccccagttgacattgaatctgtcctctgatgctcctagagctgtac

SEQ ID NO: 52915 - DNA, 283 bp, Zea mays
ggactgggacatcgactacgagctccaggtcgggctcaccgtcgacctccccatcgtcggcaacttcaccatcccgctctccacctctggcgagttcaagctccccaccctcaaggacttgttctgatctagtagtagctcgcttgccttgtgttctgtgcgggcgcgcaccagcgatctgtacgacgagcttttgcaaataaacgacgcagctcctctgttctatatatctcagtgaatgcctaagctaaggggatggatggtttaataaataaagagctgg

SEQ ID NO: 52916 - DNA, 284 bp, Zea mays
aactggtgttcatctaactgcttactcaccactaggttcacctggtacaacttggatgaatggtaatgtccttaaagaaccaataatcatctcaatagctgagaaactcgggaaaacttctgcacaagtggctctgcgctggaacattcagatgggtcacagtgttcttccaaagagcacgaatgaagaaaggataaagcaaaaccttgatgtttatgattggtcaattccagatgacttgcttgcaaagttctctgagattaagcaggctaggctacttagag

SEQ ID NO: 52917 - DNA, 252 bp, Zea mays
gcaggttctctgtaaatggaaaacccatttaccatttcatggggacatcaacattcagccagtacactgtggtgcatgatgtcagtgttgcaaagatcaacacacaggcacccttagataaagtctgcctgctcggttgtggtgttcctactggtcttggagcggtgtggaatactgcaaaggttgaatctggctcagttgttgctgtttttggccttggaacagttggacttgcagttgctgagggagcaa

SEQ ID NO: 52918 - DNA, 277 bp, Zea mays
caggaggcgcagaaaatcttcaaagccaaccaccccatggacgcagaagttactaaggccaagcttctggggtttggctctgctactcctggacaatgtggaccccaaccctgagaacttcgtgggggcggggatcatccagactaaagccctgcaggtgggctgtatgcttcggctggagcccaatgcccaggcccagatgtaccggctgaccctgcgcaccagcaaggagcccgtctcccgtcacctgtgtgagctgctggcacacagttctgag

SEQ ID NO: 52919 - DNA, 283 bp, Zea mays
ggtgaagccgccgccgctgcagtgtccatagccaccgcaggagactgagatggggggttttgtcaagacccacaagagcaatgcatacttcaagcgtttccaggtgaagttcaagagaaggcgcgctggcaagacagactacagggccaggataaggctgattaaccaagacaaaaacaagtacaatacacccaaatacagatttgttgtgcgatttaccaacaaggacatcacagcacaaatcatatctgctagtatagcaggtgatatggttcttgcttct

SEQ ID NO: 52920 - DNA, 280 bp, Zea mays
ctcgagccgctctcccccacccgtcgtctccttgtcatccttgcctgcggattggggcggacacggcagtcggcacagcctctcgcttctcccgcgcgcgagccctttctccacggccgcggcatgacgttgccggaggtgaatgccggtgcgacggcgcagaggaagaagaactcaccagagatggagttcttcagcgagtacggcgatgccaacaggtacaagatccaggagatcattggcaaagggagctacggggtcgtctgttcggctattgacc

SEQ ID NO: 52921 - DNA, 280 bp, Zea mays
gcagggtggtggcccgtgtccccgccacaaggaggagcgtccgcgcagctgccgtcgtcgcgaccgaggccgcgcagatcgactacagctcaagcgtctcggtgttcccgatggaggcctgcgacctgcttggtggcgacgcgtgcaacgggcccatgttcccggaagccaagcccgcctcggcggcggcggcggcgagcaggagtgtggtcggggtggacagggactacctgtcctacgagcagccaaagacggtgttcccgggcgaagcgtgcgacga

SEQ ID NO: 52922 - DNA, 281 bp, Zea mays
gcacgagatcacgcttctcgtcggatcgaacagctagggtttccaagatgttcgggcgcgcgccgaagaagagcgacaacacacggtactacgagatcctcggggtctccaaggacgcgtcccaggatgacctcaagaaggcctaccgcaaggccgccatcaagaaccaccccgacaagggcggcgatcccgagaagttcaaggagctagctcaggcctatgaggtcctcagtgatcctgaaaagcgagagatttatgatcaatatggtgacgatgccctc

SEQ ID NO: 52923 - DNA, 280 bp, Zea mays
ctcagaagatgaggaagaggaagaaagtgatgaagacaaaccagatgagacaggctttattacccctgcagacagtggccttatcactcctggaggcttttcatcagtgcctgctggaatggagacccctgaactcattgagctgaggaagaagaagattgaggaggcgatggacggaagtgagacacctcagctcttcactgtgttgccagagaagagaacagccactgttggaggggccatgatgggatcaacccacatttatgacatgtccacggtt

SEQ ID NO: 52924 - DNA, 278 bp, Zea mays
tattgacaatggccccccgatattgcccgaagcctacttggatatctctggaagttctattaaccccagtgagagaacctatccagaggagatgatccaaactgggatatccaccattgatgtcatgaattccattgctcgtggacaaaagattccactgttttctgctgctgggctccctcacaatgaaattgctgctcagatttgtcgtcaggctggtcttgtgaagacattggagaaaggaaagcatgctgagggtggtgaagatgacaactttg

SEQ ID NO: 52925 - DNA, 279 bp, Zea mays
gcgagcgagccaccgcccgagagagagagagagggagagtgagagtggggattcaagtttcaaactcactatcgaggggggataggaaggtggtcactcatcggtccacagctagctcgtcgccccccatggctgactggggccccgtggtgatcgcgacggtgctgttcgtgctgctcacgccgggcctgctgttccagctgccggcgcacggccgaatcgtcggcttcggcaccatgcacaccagcggcctcgccatcctcgtccacgccgtcctct

SEQ ID NO: 52926 - DNA, 277 bp, Zea mays
agcagctgttaggtttatgcgtactattatatccagaaatgatgagcatctcattcgccatgttgtgaagttcaacttgttgaaaccaataattgatatctttgttgacaatggggagaggtacaacatgctacattcaggagtacttgaattgttggaatacatacgaaaggaaaatataaaagctctcactatctatgttattgagtctttctggtatgaacttgtcaagtttgaacacttcgggagtattcaggccttcaaactcaagtatcaa

SEQ ID NO: 52927 - DNA, 275 bp, Zea mays
gctcggcggtattgacaagcgtgtgattgataggatcgagaaagaagccgcggagatgaacaagcggtcattcaagtatgcctgggtgcttgacaagctcaaggccgagcgtgagagaggtatcacaattgatattgctctgtggaagttcgagaccagcaagtactactgcactgtcattgatgcccctggacaccgtgacttcatcaagaatatgcattactggcacttcccaagctgactgcgctgttcttatcattgactccaccactggt

SEQ ID NO: 52928 - DNA, 279 bp, Zea mays
gcgagaccaccccacccattcactcgcctgcgctccctcgccgccccagttccccaccccctgctcacccacccgtcccctcctgctcgcccatggctcccatcgctgtcggcgacgccctccccgacggccagctcgggtggttcgacgagaacgaccagctgcagcaggtctccgtccacgcgctcgccgccggcaagaaggtcatcctcttcggcgtccccggcgccttcaccccgacctgcagcaaccagcatgtgccaggcttcatcacacagg

SEQ ID NO: 52929 - DNA, 277 bp, Zea mays
ggctcgagctaggttttttgattttagccgccgccgctgctcatctcacatccctcgagaagacgcctgctcctcgccgatcgatacgatggccgtcttctccgacctccacaccgccgacggcctcaagtccctcgaggctcacctcgccggcaaaacctatgtgtctggtgactccattactaaggatgacattaaggtcttcgccgcggtgccgtcgaagcctggcgctgagtttcctaatgccgcccgctggtacgagaccgtctctgcggct

SEQ ID NO: 52930 - DNA, 277 bp, Zea mays
accatcaccagctgttgaaataatcccctcaaagagtgttcatccatacaaatatgctggagagaaggttgatgtgcaaggtcttaatattttcaagggtaaagtcagtgtagcagatatgatagttatctcaccttctgaagtagcatcatcaaaatatgatggaactctgaaatactgggagagttccattacccttgtcgacattcttaaaaatgagatccgtgatgggcagttgagcttcaggggcaagcgggttctagagcttggatgtgga

SEQ ID NO: 52931 - DNA, 279 bp, Zea mays
gtgatctgaagaagaatctcatgcaagcaaggctcgataagaagctgacacaggcacaacttgctcagatgataaatgagaagccacaggtgattcaggagtatgaatcaggcaaggcaatccccaaccagcagatcattagcaagctcgagagggccctgggaaccaagttgcgtggcaagaaatagctttcctacgagtttgtgtcccggagcatcataatagggggaagacaaggcaagctgtctgcttattagtctatgtttggtatctcaagtc

SEQ ID NO: 52932 - DNA, 275 bp, Zea mays
agcataccagctcaatcacctcaacctggactggagcgtacatgcttcgcttcaagcagtactttgcagaagccgtagaggagcagaaggatatcatgagacggcatggcgacaagatcgatcatgacatcctggcagagatggatgtcctctaccggtgcatcaaggaggcccttcgtctccacccgccgctgattatgttgcttcgccaatcacacagtgacttcaccgtgacaacaaaggaaggcaaagagtacgacatccccaagggccac

SEQ ID NO: 52933 - DNA, 274 bp, Zea mays
cccaacaccacctcgcctgcgatcttcgtagcctccgtcgcgtcgagcatcgatcatgtcggcctactgcggaaagtacaaggatgagctcatcaagaatgctgcctacattggcacccccggcaagggtatccttgctgctgatgagtccactggcaccattggcaagcgcctttccagcatcaatgtcgagaacgttgaggagaaccgccgtgccctccgtgagctcctattctgctgccctggtgctctccagtacatcagcggtgtgatc

SEQ ID NO: 52934 - DNA, 270 bp, Zea mays
gtgtggctgtacgcctacatcctcaccatcggcggcgcttacaagaactctccgcccaagacgcaggtgcattgccgcgttgatcggtcgggccttatttcaggagcaccttggataagtgttccctatccctttcagtggggtgctccgacgtttgacgccggagaagctttcgctatgatgatgacttcgttcattgctcttgtagagtcaactggcgccttcatcggtgcttcgagatatgcgagtgcaactatgattcctccatcg

SEQ ID NO: 52935 - DNA, 274 bp, Zea mays
ggatcgagttccgcaagaacacccaggacgacccgcacaagcgcaagcccgacatcagccgcgacaaggagttccttgggtgggagccgaagatccccctgcgtgagggccttcccctcatggtctccgacttccgcaagcgcatcttcggcgaccaagacgctgctgccaccaccaccggaaaccagtcaggttaggatgaaggagcgcacatgacatggaaatttttggtggccctgcttctagctgcttggttgctctctccttactgaca

SEQ ID NO: 52936 - DNA, 316 bp, Zea mays
gcaggtgaagaaaagttacataggtgttcatcagcagatagaggcagagatgatcaaggttaccaaaacagaattggagaagttaaaaaacagctatagacaattaataaaagaaatgaattctgccaaagagaaatataaagaagctttagctaaaggttaggcaaaattttaaaaattgtttacttaggtgatttttattcttactgtttgaacgttatctttgtaagtagtggaatgattccatttagagcatttcacatataaaaaactcaaaatcaacccacattggctaattggtcaaaaaaaaaagaaa

SEQ ID NO: 52937 - DNA, 311 bp, Zea mays
tggctcggcgattacctgatcgagcagggcttctaaaagttcgtcatgttctgttttggtcatttgggcaccaaagtttgcgcctcatttggttctgtaatccgtgagctcgtgcatgtacttggcgtattgcatgcagtgaataatttagcttgggtttgtttgttgggggcagtgttggggacggatttggattggggtttatgcttggcatcgcgtcgtatcgaaactcagctgctgtttcgctgagtaatgtacatttccctggtaatggtacttgtggactctgatgcttttatgggaacgagtgc

SEQ ID NO: 52938 - DNA, 298 bp, Zea mays
gccgccgcacgctcgctcgcctccgctccggcagcgagctctatcccccgcgacgagcagcagctgccaccgacgcacgcagaccggggaataaatattggtaatggtagtgtgatatctataagaagtcaagatggtgaagttcacagctgaagagctccgtgctatcatggacaaaaagaacaacattcgtaacatgtctgtcattgctcatgtggcccatggcaagtctacgcttacagattcccttgtggcagctgctgggattattgcccaggaagttgctggtagagttcgc

SEQ ID NO: 52939 - DNA, 305 bp, Zea mays
tagtgctcgcggcaacactcttgctgaagggctcgtggtgagtatctgtttgggaggagcttttgttgggtgcctcttcagcggctccatcgcagatggtcattgggcgacgccgtgcgttccagctcagtgcgctgcctatgattattggtgctgccataagtgctctctccaatagtttggagggtatgctccttggaagatttttggtaggaacagggatgggattgggtccaccagtagcttcactttatataacggaggtttctccttctacagtgaggggtacatatggtagctttgtt

SEQ ID NO: 52940 - DNA, 261 bp, Zea mays
gtacatctaagccacagcaagttgctaggtcctttgatccagcaactgaagcttcctcgtctcatcatcgagacgagtaagcaacatggcggctaatctcaagtgggctcctgttctagccctcgtcgtcgtcgttgctgccatggtctagcaccacgagcgtcggcaacatcgcagtgtactggggccagaacggcaacgactgcagcctggcggacgcctgcaactacgggctctacgcctacgtcaacatcgcgttcc

SEQ ID NO: 52941 - DNA, 300 bp, Zea mays
ctctcccagcctctcttactctccgccgtcgccctgctcgcccgaagcagctgccggcaaaatgggcccgaagagaggcggtagggcgccggtcgccgccaagaagaaggcggtggtgacgaacccgctcttcgagaagaggccgaagcagtttgggatcggcggcgcccttccgcccaagaaggacctccaccgcttcgtcaagtggcccaaggtcgtgcgcatccagcgccagcgccgcatcctcaagcagcgcctcaaagtgccccggcgctcaaccagttcacacgtaccctcgac

SEQ ID NO: 52942 - DNA, 303 bp, Zea mays
cgagaccaagatcgagaacctgggcaatctgctgtacaagaactacggcaccacgatggctggcctcagggccatcggctacagcttcgattacgatgagtaccacgccttcgtccatggaaggctgccgtacgacaacatcaagcctgaccccattctcaagcacattctcaagaacctgcgcatccgcaaactcatattcaccaacggtgacatggtccacgccgtgagagccctcaagaggctgggcctggaggactgcttcgaggggatcatctgcttcgagaccctgaacccgccctg

SEQ ID NO: 52943 - DNA, 302 bp, Zea mays
ggaatcgacaccgaggaggattacccttacaagggcacggacggacggtgtgatgtcaacaggaaaaacgccaaggttgttgctatcgacagctatgaagatgtaccagcgaacagtgagaaaagtctgcagaaggcagttgcgaaccagcccgtcagtgttgcaattgaggctggtggcagagcatttcagctctacaactcgggtatcttcacaggaacctgtggaacagcgttggaccatggtgtcacggccgtcggctacggcacagagaacggcaaggactactggatcgtgaagaa

SEQ ID NO: 52944 - DNA, 300 bp, Zea mays
ggagaagcaaagacacatttggctcactcactcacactcactcgctcatagattgtcctgtccgtccatcatctctagctagcagctacaagtgagagcagcaagcgacaccacaaccagaccaccaccaacgcctagctgtgagaggatgggcaagctgtggacgatcctcactcacctccactcccttgcagggccaacggtgatgctgctgtaccctctgtacgcgtccgtgcgggcgatggagagcccatccaagctggacgacgagcagtggctcgcctactggatcctctactc

SEQ ID NO: 52945 - DNA, 299 bp, Zea mays
gtctgcgcgctcaggttcactgagacagcgagggccaggatcatcaatgctggcggagagtgcctcaccttcgaccagctcgcgctccgtgccccacttgggcaaaacacggttctgctgaggagtcctaagaacgctagggaagctgtcaggcacttcgggcctgcaccaggagtgcctcacagccacaccaagccttatgttcgctcgaagggtaggaagtttgagaaggcgagaggaaggaggaacagcaggggcttcaaggtctaagtggccactgccttgccaatcctagtgcg

SEQ ID NO: 52946 - DNA, 299 bp, Zea mays
cgccacccacccacccacccactcgcttcagccgcctccgccgcgcgtacaagcaggtggagacaggatgccggctggccacggcctgcgctcgcggacgcgcgacctcttcgcgcgccccttccgcaagaagggctacatcccgctcaccacctacctccgcacctacaagatcggcgattacctcgatgtcaaggtgaacgccgccgtccacaaggggatgccgcacaagttctaccacggccgcaccggtcgcgtctggtacgtcaccaagcgcgccatcggcgtcgaggtcaaca

SEQ ID NO: 52947 - DNA, 280 bp, Zea mays
ctcgagcgccccaagtggcactgtttggtgtgttcgatggccacggcgggaaaaacgaggcagagttcgccgcggagaacatgcccaagtttatggccgaggagttcaagaaggtaaacggcggagagatcgaaggagcggtcaagaggggttacctcaagacggacgaggagttcctcaagagggacgagagcgggggcgcgtgctgcgtcacagccgtcctccaaaagggtggactggtcgtctccaacgctggagactgccgtgcggtgctcagccg

SEQ ID NO: 52948 - DNA, 302 bp, Zea mays
gacctgtgagggagacaagaccatcgtgggctccatcaccaacaccaactttggcatctgccatgacgctggacgctccaagcagtgagactgcccagccactcccacacctagcccagaatgctgtaggccactaggcgcaggggcatctctcccctgctccagcgcatctcccgggctggccaactccttgaccagcatatctgttttctgactgcgctcttcacaattaaaggcctcctgcaaaccttcaaaaaagaacgtttatatcctgtgattactctaagcaaggggcgtattaa

SEQ ID NO: 52949 - DNA, 299 bp, Zea mays
gccgcgtggcaggtcgccgaggtggccaaggtcaacaaccgcttcaagcgcgaggaggtcgtcatcaacggctgggagggcgaccaggtcgagaaggccagcgcgtggctcaagaagtacgagaggaagcttgaggagaagcgtgccaaggcgatggagaaggcgcagaacgaggtggccaaggcgcggcggaaggcggaggagaagcgcgcgtccgcggaggccaagcggggcaccaaggtggcgcgagtgctggagctcgccaacttcatgagggccgtggggaaggcgccctccac

SEQ ID NO: 52950 - DNA, 300 bp, Zea mays
ctcgaaccgattcggctcgaggcaccatgccggaccccggctggatcgccgccagcggctaccaccgcgctggagatccccgccaaggtgccctacgacttcctcgtctccctcgtcagggacgtcggccgggactgggacatcgactacgagctccaggtcggactcaccgtcgacctccccatcgtcggcaacttcaccatcccgctctccacctccgccgagttcaagctccccaccctcaaggacttgttctgatctagtagtagctcgcttgccttctgttctgtgcgggcgcgc

SEQ ID NO: 52951 - DNA, 289 bp, Zea mays
gaacagctcgtccgagaccatgaagaacagcccacaccaggtgctgatcctgtgcctccaggccgctctggtcatgggcgtcttcgccgctttggctaaagaaaatgccctggttgagagcaaggccatcgacatcaacccggggcagctcaagtgctgcaccaactgcaacttctccttctcggggctctacacctgcgacgacgtcaaaaaggactgcgaccccgtctgcaagaagtgcgtcgtcgccgtgcacgcctcctactcgggcaacaacaagttcaggtgc

SEQ ID NO: 52952 - DNA, 294 bp, Zea mays
gggaaacaagaagattttgatttgtcagcgtccgggtttacggactgccaaaagaaagatggcttctggattaaacttaatgtcaaccagaccagcttctatagggtgagctatgatgaggaacttgcagcccgacttcgatatgcaattgaaaccaacaaactgggtgcagcagacagatatggtgtacttgatgatgcctatgccctctgtatggctggcaaacaaaagctagtctccttgctgcatttgatttctgtgtacaaggatgagactgagtatactgtgcttgca

SEQ ID NO: 52953 - DNA, 292 bp, Zea mays
atggatattatagatcttgaggatgagacaatagatgctgagatactgaactctatggctgtctcaaatgatcatttcaagactgcacttgggacaagcaacccatctgctctgcgtgaaactgttgttgaagtgccaaatgtctcttgggaagatattggtggcctggaaaatgttaagagggagctacaggagactgttcaatatccagtggagcatccagagaaatttgaaaagtttggcatgtctccttcaaagggtgttttgttttatggccctcctggctgtggca

SEQ ID NO: 52954 - DNA, 297 bp, Zea mays
cgacgtcatacaaggacccttctttgtgatcgttgtggttcacagcctgcatcagtccgatgtcttgaggacaacgcatcactttgccaaaactgtgactggaatgggcatgatgcagaatcaggggcttctgggcataaaaggcaagccataaactgctactcagggtgcccatcatctgcagagctttcgagaatctggtcatttattactgatatcccgactgtagcagctgagcccgactatgaggatggactaagcatgatgacaattgatggcagtgacgttactaatcgt

SEQ ID NO: 52955 - DNA, 313 bp, Zea mays
gcacaagtatttcacttcccggttgcccccggtgatgttattgttgctggcacggatggactttttgacaatctatacaataatgagataagtggtgttatcgttgaagcgctcagggttggacttgaacctcaagttgcggcacaaaaaattgctgccctggctcgacaaagagccacagacaaaaataggcagtcaccatttgcatcggccgcccaagaagctgggtaccggtactacggtgggaagctcgacgacataacggttgtggtgtcgtatgtgaaaaccgcttgattcgagcctttctttttat

SEQ ID NO: 52956 - DNA, 300 bp, Zea mays
aagcgatctgaagtggcttctgatcactcgatatttgttggcgatctagctgctgatgtcactgatgaaatgctgctggagcttttctccagcaagtaccgctcggtgaaaggagctaaagttattattgatgcaaacacaggccgttccaggggctatggatttgtcaggtttggagacgacaacgacaaatctcatgccatgtctgaaatgaatggtgtatattgctctacgaggccaattcgtataggacctgcgactcccagaagatcttcaggtgattctggctcctcgactcct

SEQ ID NO: 52957 - DNA, 287 bp, Zea mays
tggctggagctgcactttccttttcaatgttctttgtaggcttattactctcttcaaatcctgttggggcaagtgatttagtagaagtacctagccagctgttccagggttcattgttgcttggactcattagtagagcaacacttggatacagagctatgcatgctgctacagtttcgatccaccctctagtgattgcaggctggtgtggtttaactactactgcatttaatatgcttcctgttggatgtcttgatggtggaagagcattacagggtgcttttggc

SEQ ID NO: 52958 - DNA, 295 bp, Zea mays
tggacccatggtgcgcagatggttgcgttcaacatgcagggccatgataaagcgctccggttgatgcaagggtttttcagagccaatgggggctgtggttatgttaaaaagcctgacttcttgctaagaacaggtccaaatggggaagtatttgaccccaaggctagtttgccagtgaagaaaaccctcaaggtgaaagtttatatgggagacgggtggcgcatggacttcagtaaaactcatttcgatgccttttcgcctccagatttctatactagggtagggatcgcaggtg

SEQ ID NO: 52959 - DNA, 291 bp, Zea mays
ctcgagccgacgtccggtcagaccaatcaacaaagtgacgcgagcacgagcatccatcgattccccttcttccccatcgcgtgccctcgccgcagccatcttccatggcggaccagctcacggacgagcagatcgcggagttcaaggaggccttcagcctcttcgataaggatggcgacggctgcatcactaccaaggagcttggaactgtgatgcgctcccttggccagaaccccactgaagcagagctgcaggacatgatcaacgaggttgatgctgatggcaatggga

SEQ ID NO: 52960 - DNA, 293 bp, Zea mays
gttccttagggttttgtggaggggcgatggcggcggctgatgtggagtaccgttgcttcgtcggcggacttggctgagccaccagcaacgagtcgctggagaatgccttcgcctcctacggcgagatcctcgactccaaggtcatcaccgaccgggagacggggaggtcccgcggcttcggcttcgttaccttctcctccgagaactccatgctcgacgctatcgagaacatgaacggcaaggagctcgacggccgtaacatcaccgttaaccaggcacagtcccgtggcggc

SEQ ID NO: 52961 - DNA, 298 bp, Zea mays
gttacctgcaataatgacaacagtgttatcagagttgatcttggaaatactgcactatcaagaactttggttccgcaacttggccagctacaaaaacttgcagtacctggagctctacagtaataatatcagtggcactatacctagtgaacttgggaatcttacaaacttggtcagtttggatttgtacttgaacaacttcactggtcccataccagattcattggggaagctattgaagctgcggttcttgcgtcttaacaacaacagccttctggttcaatccaaaatcataact

SEQ ID NO: 52962 - DNA, 297 bp, Zea mays
caagaagagagaatccaaattcacatctaccaacacaagctcgacaatcatatcgaagatcgaagatattgcaaagaatttgcggttgaatttgacaaaaaaggatggtggcttgttaaagatggaagcttcaaagcccggaaggaaaggggtaatgggtatcgatgccgaagtatttgaggttagccccaacttccatcttgtggagataaagaagacgaatggcgacactctagagtatcaaaaggtcctgaaccaagaaatgaggcccgcactcaaggaaatagtgtgggcttg

SEQ ID NO: 52963 - DNA, 290 bp, Zea mays
acatggagaagcgcaggagccgtgagagcctcaacgtggacgtggtcaagtacgagagtggccctgacggaggggaggaagcctagccgcccgtgactctcacactgtctcctgcatgacgggtggcgcctcccgtcgcttcccttctctctccagtgctgcccgctgtgtctagcagcctctaggatcttgtcagagctgcacttctctgtgaactggccattcctttcggtgctgctgtcctttttgggggggttctgatttctgtatacatgtagctttgccagata

SEQ ID NO: 52964 - DNA, 287 bp, Zea mays
gagattctaaaagtgcatggtagcaacaagaaatttgattctgatgtttctcttgatgtcatagcaatgagaacacctgggttcagcggagcagacttggcaaaccttctgaatgaagcagccattctggctggaagacggggaaggacagcaatttcttcaaaagagattgatgattctattgacagaattgtagctggtatggaagggaccgtgatgacagacgggaagagcaaaagtcttgttgcttaccatgaagttgggcatgcaatttgcggaactttgac

SEQ ID NO: 52965 - DNA, 282 bp, Zea mays
gttctgagcaaggaggagacatttctggcctgcacccttggctggtgtattgaatggcttcaagcttattttcttgtgcttgatgatattatggacaactcccagacacggcgtggccagccttgctggtttagagtgccacaggttggtctcattgcagtaaatgatgggattatccttcgcaatcatatctcacgaatccttcaacgccacttcaaaggaaagccatattatgttgatatcattgacttgttcaacgaggttgagttcaagacagcttca

SEQ ID NO: 52966 - DNA, 289 bp, Zea mays
ctttattgatgccacaaggtctggaaatgtttcccgttatattagtcacagttgttccccgaatctcagtacccggttggttttggtagagagcaaagattgccagcttgctcacattggattgtttgctaatcaagatattgccgtaggagaagaactcgcctatgattaccgacaaaagcttgtagcaggcgatggctgcccatgccattgtggaactaccaattgccgaggccgtgtctattgattttgcaggaatacactaactgttcaatgctcggttgcagaa

SEQ ID NO: 52967 - DNA, 296 bp, Zea mays
cgcgccatcgcctctgtctccgagctcgcctgcatctactcggccctcattctgcacgacgatgaggtgacagtcacggccctggccaacgtcaacattgggagcctcatctgcaatgtaggggccggtggacctgctccagcagctggtgctgcaccagcaggaggtcctgccccctccactgctgctgctccagctgaggagaagaaagtggaagcaaagaaagaagaatccgaggagtctgatgatgacatgggctttggtctttttgactaaacctcttttataacatgttc

SEQ ID NO: 52968 - DNA, 294 bp, Zea mays
ttcttgacaatgacacttcatggatgatccttgctagctctggagttggtgtgtgcattgaattttggaagattggaaaggcaatgcatattgaggttgatagaagtggaaaaattcccatgttgaggttccgagaccgtgaatcatatgcacagaataagactaaagagtacgatgccattgcaatgaagtaccttacctatgtacttttcctccttgtggtcggtttctctatctattcacttaagtatgaaaagcacaagagctggtactcatggatactttcttctatga

SEQ ID NO: 52969 - DNA, 292 bp, Zea mays
gcgcctccaccttcctcgccgcctcactccctctgcagaggtcgcagatccgtccggttagacgaagccgcccgcacccatggcctccggtgagctcgcctgcacctacgccgccctcatcctcagcgacgacggcatcgccatcaccgccgagaagatcgccaccatcgtgaaggcggccaacatcaaggtcgagtcctactggccggcgctcttcgctaagctcctggagaagcgcactaatgaggatctaatcctctccgtgggatctggtggtggcgctgctccagtt

SEQ ID NO: 52970 - DNA, 291 bp, Zea mays
caagaaattccctacatctaaatgtagctttttgctaccagaagatgggtgaatacagaaaatccattgaaacatgcaataaggtgctggacacaaatcctgtgcacgcgaaagctctttaccgccgaggaatgtcctacatgttactcggggaatttgatgatgcgaggaatgattttgagaagatgattaccgttgacaagtcatcagaaccggacgctacagctgccctccttaaacttaagcagaaggaacaggaagctgaaaagaaggcgaggaagcagttcaaag

SEQ ID NO: 52971 - DNA, 289 bp, Zea mays
caggcgacgattatggggccatcagatagcccatacgctggtggcgtatttttggtcactattcactttccaccggactacccattcaaaccaccgaaggttgcattcaagacgaaggtttaccacccgaatatcaacagcaacgggagcatctgtcttgatatcttgaaggagcaatggagccctgcactgacagtttctaaggtcctcctctcaatttgttcccttctgacggacccaaaccctgacgatccgttggtcccagagattgctcacttgtacaagactg

SEQ ID NO: 52972 - DNA, 285 bp, Zea mays
ctcgagccggttgatctttccagatatgatcagatataaagggctgacccattttgacgtagacaactttgttgaagaagtgcttgtgaaggatattgactggcttcctagatctcctgagcctatgagtggttcctatatttttgtttgctcccatggaagcagggacaaaaggtgtggtgtttgtggacctgctttgattaaaaggttcaaggaagagataaatgaactgggacttgatgatcaggtggctgtcagtgcatgctcacacgtgggaggtcataa

SEQ ID NO: 52973 - DNA, 288 bp, Zea mays
tgaacgccaaggggacgctcaaccttctcaccggcgccactgccgccgccagcggagggggcagcatcatcaggcagaaaaatactcatgggatcctgaatgcggtgagctgggggcttctgctgcccatgggagccatcttcgcgagatacctcaagacgttcaggtcggctgacccggcgtggttctacctgcacgtcgcttgccagctgctcgggtacggcgtcggggtgtccggctgggcgaccggcatccatctcggaaacctgtccaaggggatcacctact

SEQ ID NO: 52974 - DNA, 288 bp, Zea mays
acggggaggagcagaacggcttgcagatgacgggcctgaatctcatggacaagacgatgcccgtcaggggagcaaggattgcctacagcatctgggatgtggcaggagaccaccagtccgtcgaccacatcccaatcgcgtgcaaggacgccgtggcgatcctgtacatgttcgatctcacgagccgctgcacgcctaataacattgtagattggtacgggaggtcgaggaaatggaataagacggctattccaatcctaatcgggacaaagtttgatgactttgctc

SEQ ID NO: 52975 - DNA, 298 bp, Zea mays
tggaatgcaggaaattggagtcaaggttgcatcaggagcccacctctgggttgtgagaccaatcaatctggggatggatttcttccaatgggaaacataaagtggcctgatttctcatattgggcatctacagtgggagatgagcctggatgcagaactgtctgccttaacaactgctcatgcggtgcgtatgtttacacagctacaacagggtgcctagcctggggtaacgaactaattgacatgcatgagttgcaaacaggggcatatactctaaacctgaagcttcctgcttctg

SEQ ID NO: 52976 - DNA, 296 bp, Zea mays
cagaagcggcggcggcggagcaaacgcaggcgaaggcgaagatgtgagggaaggagcaccagccatggtgcacgtcaacttctaccgcaactatggtaagacgttcaagaaaccaaggcgtccttatgagaaggagcgtcttgatgctgaactgaagctggtcggtgagtatgggctgaggtgcaagcgtgagctttggagggtccagtatgcactgagcaggatccgtaatgctgcaaggcacttgctcacccttgacgagaagaacccccgtcgtatctttgagggtgaggcgc

SEQ ID NO: 52977 - DNA, 301 bp, Zea mays
ccagccgccgccatgtcgaagcgaggcaggggaggttcggcggggaacaagttccgcatgtcgctgggtctgccagtggccgcgacggtgaactgcgcggacaacaccggcgccaagaacctctacatcatctccgtcaagggcatcaagggccgcctcaatcgcctcccgtccgcctgcgttggcgacatggtcatggccaccgtcaagaaggggaagcccgacctcaggaagaaggtgatgcccgccgtcatcgtccgccagcgcaagcgtggcgccgcaaggacggggtctacatgta

SEQ ID NO: 52978 - DNA, 306 bp, Zea mays
ctctctccatctccctgctcctccgcctccttcttgatccagccaagccagggatcgccatgtcggactcggaggagcaccacttcgaatcgaaggccgacgccggagcgtccaagacctacccgcagcaggctggcaccgtccgtaagaacggcttcatcgtcatcaagaaccgcccctgcaaggttgtggaggtttctacctcaaagactggtaagcatggccatgccaaatgccactttgttgccatagacatattcaacgggaaaaagcttgaagatattgttccttcatcacacaactgtg

SEQ ID NO: 52979 - DNA, 303 bp, Zea mays
gtcgatttctaattctcctcgcgagcccaaaccctaaacctatacctttcacccgccgccgccgccaccaccagcactgacactccgccaccaccgtcccgaagccccctcaaagcgccatcgacttcatctcggattgaagcgctgtcgtcggacgatgatgtcagggaggagaaggagctcgacctctcctccaacgacgttgtcaccaagtacaaggctgccgccgaaatcctcaacaacgctctgaagattgttgtgtctcagtgcaagccaaaagtcaagattgttgacctttgcgag

SEQ ID NO: 52980 - DNA, 300 bp, Zea mays
cccagccgcacgaaaccctaacgctgccgccgcttcacaggtaagccgccgccatggtgtccggttccggcgtatgcgcgaagcgatcgtggtggacgcgcgccaccacatgctgggccgcctgtcgtcgattatcgccaaggaactgctcaatgggcagaaggtggtcgtcgtccgctgcgaggagatctgtatgtcgggtgggctcgtacgccagaagatgaagtacctccgctttctccgcaagcggatgaacaccaagccatcccatggacccatccacttccgcgccccgtccaa

SEQ ID NO: 52981 - DNA, 298 bp, Zea mays
cggtgcagcgatctcgcacctgaagacgtgccgttggcgatcgaacacaccctgaatgatctgcagctggatcatcttgacctgtacctgatacactggcccttccagataaagagaggcagcgagctcagtccagagaacttcgtccacctcgacatgcccaagtcctggcaggcaatggagaggctgtacggctcaggcaaggctcgcgcggtaggcgtcacaatttctcgaccaggaaactggccgatctgcttgccgtagcccgtgtccctccagccgttgatcaggtggagtg

SEQ ID NO: 52982 - DNA, 300 bp, Zea mays
taccgagcgtgagatcggtatcacaattgatattgctctgtggaagttcgagaccaccaagtactactgcactgtcattgatgcccctggacaccgtgacttcatcaagaatatgattactggcacttcccaagctgactgcgctgttcttatcattgactccaccactggtggttttgaggctggtatctccaaggatggacagacccgtgagcatgctctccttgctttcacgcttggagtgaagcagatgatttgctgttgcaacaagatggatgccaccacacccaagtactccaa

SEQ ID NO: 52983 - DNA, 301 bp, Zea mays
cagccctccacctgcggctgcgctatggggagaggagcgacgggctggtgacacggcgcgacgcgaggtgcctgggtcagtggtagttagacccgagaggaggctggaccacgcgtggatggtgtactccacgctgaagatgggcagcgctgaggccgatgcgagcgagatgtgcgaggctctgctggccatgctcgttgagattggcaggaagaaattttgctgaccatctggtcatctggagttctccatggttttggttatatatgcacatatatgtcacgcatactacaaatgatag

SEQ ID NO: 52984 - DNA, 298 bp, Zea mays
ataaaaggcctaaggccggttctctggctctctccaaatttccctctgcggactgaggaactgctgccgttgcttgatattcttgcaaacaaggtgaaggcaattcgtcgtttgagggatctacttacaacaaaactccctccagatacatttcctgtcaaggttgccatcccagtcgtgcctacgatcagagtgcttgtgacattcacgaaattcgaggagctacagccgctagaggagttcggcacaccaccttcaagccctgacaaaagcaagagcccagcagtgcagcctcctt

SEQ ID NO: 52985 - DNA, 295 bp, Zea mays
tggagacccccgagggcaggaaagccgtccaggctctcaaggatgtgtatgctcactgggttcccgaagacaggatcctcaccaccaacctgtggtccgctgagctctccaagcttgccgccaatgcgttcttggcacagaggatctcctctgtcaatgccatctccgctctctgcgaggcaaccggagccaatgactctgaggtggcttacgccgtgggcaaggacacgagaattggccccaagttcctgaacgccagtgttgggttcggtggctcatgcttccagaaggacat

SEQ ID NO: 52986 - DNA, 294 bp, Zea mays
ggggctgggaggcctgggccacgtcgccgtcaagttcgccaaggcgttcggggccaaggtcacggtcatcagcacgtcgcctgggaagaagcaggaggcgctcgaccggcttggcgccgacgccttcgtcgtcagcaaggacgccgaagaaatgaaggcggctgcgagcaccatggacggcatcatcaacacggtgtcggcgaacctcaccttggccccgtacatgggcctgctcaagcccaacggcaagatgataatggtcggcctgcccaccaagcctctcgagatcccgcc

SEQ ID NO: 52987 - DNA, 298 bp, Zea mays
ctcgagccgcgcccctgctggaagggcttggagtgcggctccgtacagacgcggatggtatcttctttcgttgggagcagaacacgccgcagaaacgttatatgtgcttccctgttcggagttggagctcccgaagcactggtcattggagtagtcgccttgttggtgttcggccccaagggtctagcagaggtagccaggaatttggggaagactttgcgtgctttccaaccaaccattagagagatacaggatgtatcaagggagttcaggagcactcttgaacgagaaatcggaa

SEQ ID NO: 52988 - DNA, 289 bp, Zea mays
cagggcggctggaggaagccaagaaggttatccaggacatgccgatggagccagacgtcggcgtcctcggtgcgctcttcggcgcgtccaagatacacggcgacgtcgacctgggcgaggcgatcgggtggcgcgtcattgagctggatccccagaacagcgggcgctacgtgttgctggcgaacctcctcgccacggccggccggtgggaggacgtggccagggtccggcggctgatggacgagcggaacgtgagcaaggaagcagggcggtctgtgatcgaggtcca

SEQ ID NO: 52989 - DNA, 290 bp, Zea mays
cctaaggatgcggcggggtggtgagtctatggattcacggccttacttcgttctgggagatctttgggaatctttcagggaatggagtgcttacggggctggtgttccactggtgttaaatgacagtgactctgttattcagtattatgtgccatatctttctgctatccaactatttgcggacctatctagaccagcttcaagaaacagttaattttctcgcttacttaaggcgtcctggggatgaaagtgatggggaatctatggatactagcagtgagagcagcatt

SEQ ID NO: 52990 - DNA, 291 bp, Zea mays
ggttcctcttgttggaacaccacaggaactggggcatcaagtgactcttatccgccaagttgctgagaaagtgttcgccaatgtgggcaagactatcgggtacaaagttggaacaatgattgagatccccagggcagctctggtggctgatgagatagcggagcaggctgaattcttctccttcggaacgaacgacctgacgcagatgacctttgggtacagcagggatgatgtggggaagttcattcccgtctatcttgctcagggcatcctccaacatgaccccttcga

SEQ ID NO: 52991 - DNA, 292 bp, Zea mays
cacatacatagtttcttctactacacgacgacaaacatggggaagcctgcgaagatcggagagtggggtggatacgccggcgatcgtcgggatctgagggctactccggaccggctgatcgaggtgaaggtcacggcggacaacagcagctgcatccgctccatctccttcatctacatcggagccgatggcaaaccgtacgaggaggggccatggggtttcggccatgctggcacggagtacaagattgatctgtgcaggttcgacgagagcttgacggagatctccggga

SEQ ID NO: 52992 - DNA, 292 bp, Zea mays
accacccacatctcagttcatcccggcgtcgtcctcttcccccggcgctactctcccgctccacgttccaaaggaatgctggcgtcccatattgttggataccatcgcatgggccccaagagagagctcaagtttgccttggagtctttctgggatgggaagagcagcgccgatgatttagagaaagttgcctctgacctcaggtctagcatctggaccgccactgtcagaagctggcgacaagtacattcccagcaacaccttctcgtactatgaccaggtccttgatacc

SEQ ID NO: 52993 - DNA, 290 bp, Zea mays
gcaagattaccgatgcaagcctgttcgccatcgctgagagctgcagccagctcgccgagctcgacctttcgaactgcatggtcagcgactacggcgtcgcggtcttggcagcggcaaagcagctcaggctgcgcgtcctctcgctgtccggctgtatgaaggtcacccagaagagacaccctttcctaggcagcatgtcttcgtccttggaggggctgaatctccagttcaacttcattggcaaccacaacatcgcgtccctggagaagcagctctggcggtgcgacatc

SEQ ID NO: 52994 - DNA, 287 bp, Zea mays
caaacatggggaagcctgcgagcatcggagagtggggtggatacgccggcgatcgtcgggatctgagggctactccggaccggctgatcgaggtgaaggtcacggcggacaacagcagctgcatccgctccatctccttcatctacatcggagccgatggcaaaccgtacgaggaggggccatggggtttcggccatgctggcacggagtacaagattgatctgtgcaggttcgacgagagcttgacggagatctccgggaccacgggcccagcctacaacattgac

SEQ ID NO: 52995 - DNA, 289 bp, Zea mays
cgcggagctggaggccaagctggacgagggacgcagccgtgtggaggccgagctcgtagaggcgctcgccaacctcgaggcgcagaaggaggaggctgtcaaggcgctcgacgcccagatcgcctcgctcagtgatgagatcgtcaagaaggtgctcccatccgcgtgatgaaaccaaaccggccctgccttatcctacgactatagttacatgaacatcataaattaatgataattttgaagaaattggccgatgactccgacactgtactcatgaaagattattgga

SEQ ID NO: 52996 - DNA, 285 bp, Zea mays
gtaggctgactatgtgtcgagcgatcaggacctgcttcgctgccgagtcagaacttctggaatctttgagaccaagttccaggtggacaaagtcaatcttccacatgtgtgacgtgagtggccagcgcgatgaacgccgcaagtggatccagtgcttcaacgatgtgactgccatcatcttcgtggtggccagcagcagctacaacatggtcatccgggaggacaatcagaccaaccgcctgcaggaggctctgaacctcttcaagagcatctggataaacagat

SEQ ID NO: 52997 - DNA, 291 bp, Zea mays
gccaagatccatcttcccggttacgccgcctgatcgaagtgaacaagcaaggaagagccatggcgagcgagcacgcggcggggggcgaggctaagcatgaccagaagcagagcctgatggacaaggcgaaggggttcgttgtggagaagatcgcgcacatccccaagcccgaggcgacgctggacggcgtgacgttcaagggcctgagccgggagtgcatcacgctgcacagcagcgtgaacgtgtccaacccctacgaccaccgcctccccatctgcgaggtgacctaca

SEQ ID NO: 52998 - DNA, 288 bp, Zea mays
ctcaagttgtatgttagaagagtgttcatctctgatgaatttgatgaccttcttccgaagtatctcagctttttgaggggtattgttgactcagacacactgccgctgaatgtgtcacgagaaatgctccagcaacataacagtctgaagactatcaagaagaagctgatccgcaaagctcttgacatgattaggaaacttgctgaagaagaccctgatgagtacagcaacaaggataagacagatgaagagaaaaatgagatggaggagaagaagggccagtacgcc

SEQ ID NO: 52999 - DNA, 176 bp, Zea mays
gtatgcaatgaggctccatcataggcaggcttataggtttgtagtatcgttaggacgggcatcttactataacaatataagacacattttgtatatataacacatgtgcatatataagttatcgagatattatatgtttctgttgcaacgcacgagcactgacctataaaagtata

SEQ ID NO: 53000 - DNA, 175 bp, Zea mays
tgcaggttcgacgagagcttgacggagatctccgggaccacgggcccagcctacaacattgacaatctggtcaagtctctcaaattcgtcaccaacaaacgcgcttacggaccgtacggcagggacgagggcaccccgttccgtgtcaaggtgatgaacaacggccacgtcgctg

SEQ ID NO: 53001 - DNA, 280 bp, Zea mays
aagaagaagaaggcgccgtgggaagaagaagacaaggacgaaggcagcaaggtgactctttcggggctcctcaacttcatcgacgggctgtggtcggcgtgcggcggcgagcgcatcatcgtgttcaccaccaaccacaaggacaagctggacccggcgctgatccggcgcggcaggatggacatgcgcatcgagatgtcctactgctgcttccagggcttcaaggtgctcgccaagaactacctgggcgtgcaggagcatgacggcgagctgttcggct

SEQ ID NO: 53002 - DNA, 263 bp, Zea mays
caagtttgaggagctttgcaatgaagacaagattttggtgttctttaagaagctgcttaatgagtggaaccaggaattggatgagatgactgagctagagaagcggacagcaaaggggaagtccatggttgcaacattcaagcagtgtgcacggtatctcagtccgctgtttgagttctgcagaaagaaggttcttcctgatgacatccgtcgagcattgcttgttattgtcaagtgttgcatgaagcgagattatttagcag

SEQ ID NO: 53003 - DNA, 277 bp, Zea mays
gcaagtgccgttaataactttaaaagccttgcccagcagaccttaatccacagagacttgaagccatcaaacatacttcttggtgatgacatgaaggccaaggtggcagactttggattggtcaggcttgcaccagatgatgggaagtgcgtctccatagagacaagacttgctggcacttttgggtaccttgcaccagagtatgcagttactggacgagtgaccacaaaagctgatgtcttcagctttggtgtcatcttgatggaactgattacag

SEQ ID NO: 53004 - DNA, 258 bp, Zea mays
gtcatgctgatatttgggatgggtctctacggcctcttcatcagcaacgctcccgccggtgttcctcctgaatccgaccgtgccctcagcggctcgtcgctgttcggaatgttcgctttgaaggaacgcccgaagtggatgaacatcacctcgcttgacgagctcaagacaaaagtggggcacgtcatcgtgatgattctacttgtgaagatgttcgagaagagcaagatggtgacgatagccacggggctggacctc

SEQ ID NO: 53005 - DNA, 156 bp, Zea mays
caagacattccctacatctaaatgtagctttttgctaccagaagatgggtgaatacagaaaatccattgaaacatgcaataaggtgctggacacacatcctgtgcacgcgaaagctctttaccgccgaggaatgtcctacatgttactcggggaat

SEQ ID NO: 53006 - DNA, 271 bp, Zea mays
ctcgagcgctctccggtggacagagcgaggaggaggccaccctgaatctcaatgccacgaacaagctcagcaccaagaagccatgggccctgtccttctccttcggccgtgccctccaggcgagcaccctcaaggcctgggctggcaaggtggagaacgtggagaaggctagagcggccttcctcgccaggtgcaaggccaactccgaggctaccctcggcacctacaagggtgatgctgccgccgacaccgagagccttcacgtcaagga

SEQ ID NO: 53007 - DNA, 268 bp, Zea mays
caagaaccttcaagcaatgaggcgatttcatcagtctctactttaataactgagaccaacagttcaaagaaaatcaaaggcgatgaccctgctcttatcctttacacaagtggcacaactggtaaacctaaaggagtagttcacacccatgagggcattctttctcaggttcagattctatctgaagcgtggggatatcgaagtgaagaccaatttctgcactgtctcccgctgcaccatgtgcatgggcttttcaatgctctatttg

SEQ ID NO: 53008 - DNA, 267 bp, Zea mays
cacagagcggagcccagaccccaactgcgtcactgtgacggggctcccagagaatgtggaggaagccatcgaccacatcctcaatctggaggaggaatacctagctgacgtggtggacagtgaggcgctgcaggtatacatgaaacccccagcacacgaagaggccaaggcaccttccagaggctttgtggtgcgggacgcacctgggaccgcaagcaccagtaagaaggctcctgacatgagcagctctgaggaatttcccagctt

SEQ ID NO: 53009 - DNA, 270 bp, Zea mays
agaagaggcaagccaggttggctaatgatgcagtattcagcataagaacagtggcctcattctcagctgaagagaaggtcatggagttgtacaagaagaaatgtgaaggtcctctaagaacaggaatcaggacagggattataagtggaatcggttttggagtttcctttttcttgctatttggggtatatgcagctagcttttatgctggtgctcggcttgttgaggacaggaagacaacctttcctaaagttttcagggttttcctag

SEQ ID NO: 53010 - DNA, 268 bp, Zea mays
gctgttcggccgagcgaacgacccacaaccagaagccacccattggcgtacgcgaggcgatcggagcatcccgtcccaagaggagaaactccggccggcgacgcgggggaaaatggggaagacgccggtgcggatgaaggcggtggtgtacgcgctgtcgcccttccagcagaaggtgatgttggggctgtggaaggacatcaccaccaagatccaccacaaggtcaccgagaactggatctccgccacgctcctcctcacccccgtc

SEQ ID NO: 53011 - DNA, 220 bp, Zea mays
gcagcagcagcaggcggcgccgaggagcggcatcccactcagtgcttgcaaccatggctaggggattgaagaagcacttgaagaggctcaatgcgcccaagcattggatgctcgacaagcttggcggacttttgctcccaagccatcttctggacctcacaagtccagggagtgccttcctctgatcctcatcatcaggaacaggctcaagtatgctctg

SEQ ID NO: 53012 - DNA, 263 bp, Zea mays
cgacgacggaaacagtagtgctgccagtagagctctcagaactcgggaaaaaaaatgtcagaggccgccgtgcgtgtgatcggcctatggccagcccgttcgtgatccgcgtcctgatcgccctgaagctgaagggcgtcgagttcgagttcgtggaggaggtggtgggcaggaagagcgagctgctgctgaggtcgaacccggtgcacaagaagatccccgtcctgctccaccacggcaagcccatctccgagtctctgata

SEQ ID NO: 53013 - DNA, 265 bp, Zea mays
cgagaacttgagccgccccaaggccgaggtcgactacatgatgggcttgtccgagtggctgataggcgacaacatcgacaagctctcgaggcaggggatccgactgcaggtgatcggcgacgcgcgaagatgccagcctctctgcggacgcacggcgcaggccgacgaggccacgaggcaaaactcgcagctgcacgtgatgctggccatctgctacagcgggcgatgggacatggtccaggcgtgccgggagctggcccgggag

SEQ ID NO: 53014 - DNA, 243 bp, Zea mays
agctccactgctgtaaccgccattcttgtgaacggcaggaagttatgggtagctaacgttggcgattcaagagctgttcttttgaaaggtggtgagcccatacagatgtcgatagaccatgatccgaatgttgagcgcagtgtaatcgaaaataggggtggttttgtttcaaatatgccaggagatgttccccgagtatatggtcagttggctgtctccagagcttttggagacaggaatcta

SEQ ID NO: 53015 - DNA, 255 bp, Zea mays
catcgatctacacacatacatagtttcttctactacacgacgacaaacatggggaagcctgcgaagatcggagagtggggtggatacgccggcgatcgtcgggatctgagggctactccggaccggctgatcgaggtgaaggtcacggcggacaacagcagctgcatccgctccatctccttcatctacatcggagccgatggcaaaccgtacgaggaggggccatggggtttcggccatgctggcacggagtac

SEQ ID NO: 53016 - DNA, 262 bp, Zea mays
cgaccagcagcgcctcatcttcgccggcaagcagctggaggatggccgcaccctggcggattacaacatccagaaggagagcactctccacctggtgctccgcctcaggggtggcatgcagatttttgtgaagacattgactggcaagaccatcaccttggaggtggagagctctgacaccattgacaatgtgaaggccaagatccaggacaaggagggcattcccccagaccagcagcgtctgatctttgcgggcaagcag

SEQ ID NO: 53017 - DNA, 267 bp, Zea mays
agggttgccttcttgaaaaatgctccagagggtacatatgatgcagtaattgtggattcttctgatccgataggtcctgctcaggagctttttgagaagcctttcttccagtcggtggccagagctttgcggtccaggtggagttgtatgcacccaggcagagagcatatggctacatatgcacatcattgaagatattttcgtcaattgccgccaagttttcaaaggctcagttaactatgcttggacaacagtacctacataccc

SEQ ID NO: 53018 - DNA, 245 bp, Zea mays
aggtgttgtatacagagcaagggataagaagacaagtgagattgttgcattgaagaaggtaaagatggagaaggagcgatcaggtttcccattaacctctcttagggaaataaatatcctcttgtctttccacaatccttcaattgtggatgttaaggaagtagtagttggaagtagtctagatagtatttttatggttatggagtacatggaacatgatcttaaaggtgtcatggagaccatga

SEQ ID NO: 53019 - DNA, 260 bp, Zea mays
agttgaggctgtatgaactggttgaaaacaaggtgaaaggagatggcaactgtcagttccgagcactatcagatcagctttaccaaagtccggatcaccatgaatttgtgaggtcgcagataattaaccagcttaaaactaaccgtgacgcctatgatggatacgttcccatggcatatgatgattacttggagaaagttgcacggaacggtgaatggggtgaccatgtgacgctgcaggctgctgctgacaagtatgga

SEQ ID NO: 53020 - DNA, 262 bp, Zea mays
  unsure (1)..(262): unsure at all n locations
aagcttgccaaggttgtccaggacaccatcgaccccaacgcacggatcgagttccgcaagaacacccaggacgacccgcacaagcgcaagcccgacatcagccgcgccaaggagttccttgggtgggagccgaagatccncctgcgtgagggccttcccctcatggtctccgacttccgcaagcgcatcttcggcgaccaagacgctgctgccaccaccaccggaaaccagcaaggttaggatgaaggagcgcacatgacat

SEQ ID NO: 53021 - DNA, 272 bp, Zea mays
acagagagtagtagactacgacagcgtccgtcgaaccggagggtcggaggcgaagatgaggaagaagctcggcacccggttccccgcggctcgaatcaaaaagataatgcaagcagatgaggatgttggaaagattgcattagcggtgcctgttttagtctcgagggctcttgaattgtttttacaagatttaatggaccggacttatgaaattactcttcaaagcggagcaaagacactgaattccttccacctgaagcaatgtgtgaaga

SEQ ID NO: 53022 - DNA, 282 bp, Zea mays
cggcactaacgacctgcagccaaccatctaccagcgactcagcgagcgagagcagcacacactgcacgcagctagctaggagcagcagcagcggcggcgatggcggcctccatgatctcctcgtcagctctggcggtggcgcctcagggcctgccgcccctcggccgccgcgcctcctccttcgccgtcgtctgctccaagaagaagatcaagaccgacaagccctacgggattgggggtggctgatcgtcgacgtcgacgccaacgggagaaagggcaagg

SEQ ID NO: 53023 - DNA, 301 bp, Zea mays
cttgaaggagtcacagacattgatttggtgatcaatctcaaactccgagaagaagctctgcttgcgaaatgccttggcaggaggatgtgcagccagtgtggagggaacttcaatgtggcctccattgatattgagggtgaagacggcgggcctcgaatgtacatgcccccactgttgcctcctccacagtgtgaatcgaagctgattgctagagcagacgatactgaagaagtggtaaaagagcggctgcgtgtgtaccatgatttgactgaaccagtggaggagttctacagagcacgtg

SEQ ID NO: 53024 - DNA, 286 bp, Zea mays
taggttgggctctcgctcctgtcgtacggattcggatcgtatttcaacctgcttcctggttcggaatggtcagctttgctgctaacctacgggtttcctctcacaatcatcggcattcgccttaaagtatgcagaactgaaaccagtaccctgcataacctacgctgatgcctttgctctaagagaaaagtgtgctacccctattctgaagcaggtcaggagtgatgttacacgttttagatatggtgatgaacaacacttggatgaagcactgcagagaatcttc

SEQ ID NO: 53025 - DNA, 288 bp, Zea mays
  unsure (1)..(288): unsure at all n locations
cttccgtgctcaccttcgagagatcaagttgctgctgcggtagatccccaaccatcatcatgcagaacgaggagggtaagacggtggacctctacgtcnccaggaagtgctcggccacgaataggatcatcactgccaaggatcatgcctctgtccagatcaacattggccacttggatgcgaatggcctgtacgatggtcacttcaccacgtttgctctctctgggtttgtccgtgctcagggtgatgctgacagttcgttggacaggctgtggcagaagaagaagc

SEQ ID NO: 53026 - DNA, 269 bp, Zea mays
gcacctctaagccaaagcaagttgctaggtcctttgaaccagcaactgatgcttcctcgtctcatcatcgagaccagtaatcaacatggcggctaatctcaagtgggctcctgttctagccctcgtcgtcgtcgttgctgccatggttggcaccacgagcgccggcaacatcgcagtgtactggggccagaacggcaacgaaggcaccctaccggacgcctgcaactccgggctctacgcctacgtcaacatcgcgttccacacaacat

SEQ ID NO: 53027 - DNA, 288 bp, Zea mays
agccgccggccggatcatcgatcgtcgtcatgatgatatctatcaatctacgcgtgatgatcgatggctacttgtctactgctatgtactactaaataaaatctctccgtgtgtgcacgtacgcttgcatgtgcatggtagcatgtatgtacgacgtcgtccatgtatgtgtgtgtgacgtgtgagacagagagagagagagagagagagagagacaggatcgatcgagagacggtcatgtccttttggctgtttggtttattcatatcacaacttttgagtgtataa

SEQ ID NO: 53028 - DNA, 258 bp, Zea mays
ggcatcctggccaacgtcgccagcgccggtgagaagctccacgagcggctcgtggctgagattcgaggcgccgtggccgaggccggcggcaaggtcaccctcgcggcggtggagaagatggagctggtcaaatcggtcgtgtagtagtcgctgcgcctagacccgctcgtcaagttccagtacggccacgccaagaaggacctgcaggtccagagccacgacgccgtgttccaggtgaagaagggcgagatgctgttc

SEQ ID NO: 53029 - DNA, 291 bp, Zea mays
gcgctgtacggcacagagcggggcctgcgggcgtccagcgagtcgcgggccaaggtgttggagctcatcacgcagctcgagacgcgcaaccccacgccggcgcctaccgaagcgctgacgctcctcaacggcaagtggatcctcgcgtacacatcattttcccaactgttcccactgttggagtttggaaagctgcctgcgctcgtgaaggtggaggaaatatcacagaccattgattccaagaacttcacagtgcaaaactgtatcaagttttcagggactttggctaca

SEQ ID NO: 53030 - DNA, 293 bp, Zea mays
gttttggctatccgttatgatgcttttggtgaggattcaagttctgcaatgggagttgagaacagagccaaattagaggccaggttgagaactttggaagacagagggataagaaaaataagtggaacaggaaaagcattagcaaaaacagaaaaatatgaacacaaaagttgaagaagaggaagaagaaaaagtggcagaagaagaagaaacatctgtgaagaagaagaagaaaaggggtaaaaagaaacacattaaggaagaaccactttctgaggtagaccatgtaccag

SEQ ID NO: 53031 - DNA, 281 bp, Zea mays
aggaccccgagacggagatgcgcgagggccacaactacgtgccccgcgacgagcagttctcggaggtgaagcagctcacgttcggggccaccacgctgcgctccggcctgcacgcgctgctgcacggcgctccgcccgctgctcatcaacaagaaggatctgcgcttcccgcacttccccgccatcgacgaactctacagcgacggcatcccgctgccgccgcagaccgggttcgacgccatccgcaccgtcgtcccgcgcatggtcaagctggtggagga

SEQ ID NO: 53032 - DNA, 285 bp, Zea mays
atcatcatgaaccaccctgggcagattggcaatggctatgccccagtgctggactgccacacctcccacattgctgtcaagtttgctgagctcataaccaagatcgataggcggtctggcaaggagcttgagaaggagcccaagttcctgaagaatggtgatgccggtatggtgaagatgattcccactaagcccatggtggttgagaccttctctcagtatcctcctctgggtcgttttgctgtccgtgacatgaggcagacggttgctgttggagtcatcaag

SEQ ID NO: 53033 - DNA, 278 bp, Zea mays
  unsure (1)..(278): unsure at all n locations
aacatttcagaaagctcgtcttgcttctcccagcattatattttttgatgaggctgatgccattgcccccaagagaactggccctggtgggaattctagtggcaatgccacagtcggagaaagacttttgtcgactttattgaccgaaatggatggtttagaactggctacgggaattatcgtattgggtgctacgaatcgcccaaatgcaattgatgctgctcttttgcgtccagggcgtttcgataaggtgctgtatgtcncgccaccagatgtgg

SEQ ID NO: 53034 - DNA, 291 bp, Zea mays
cacctgcgccgctgccttctccgttctcgccgtcgcctccgcctccgctgccgccgcgcaggtcagggtcatgtcgatcttcgagtacaacgggagcgccgtggtggcgatggtggggaagacctgcttcgcgatcgccagcgaccgccgcctcggcgtgcagctgcagacgatcgccaccgacttccgacgggtgttcaaggtccacgacaagctctacatcgggctctcggggctcgccaccgacgcccagacgctgtatcagcggctggtgttcatgcacaagttgta

SEQ ID NO: 53035 - DNA, 290 bp, Zea mays
cgcttccgctccgtcgctcgcctcacgcctccggcgccacctccaccatggccccgaagaaggagaaggccccgccgccatcgtccaagccggccaagtccggaggcgggaagcagaagaagaagaagtggagcaagggtaagcagaaggagaaggtcaacaacgctgtgctcttcgaccaggccacctacgataagctgctctccgaggtgcccaagtacaagcagatcaccccatccatcctatctgagcgcctcagggttaatggatccttggcacggagggccatc

SEQ ID NO: 53036 - DNA, 281 bp, Zea mays
cgaaccgcactgtgagatagggacgctgactgttgtctcggcttttagacgcaacttccatcgctgcgagtatccattcgtgttcgtcatggccgccagcgtcaccgtggaaaacctcaaccccaaggtcttaaaatgtgagtatgcagtccgtggggagattgtcatccatgctcagcgcctgcagcaacaactacaaacacaaccagggtctcttccttttgatgagatcctctattaaaatattgggaatccccaatctcttggtcagcaaccagtga

SEQ ID NO: 53037 - DNA, 277 bp, Zea mays
agaatatgatcagcttccacccttcaagccctttaccaaagctcagcttgcaaggctcacaaaggagcagaagaatgcttattttgatgagtatgactacagggttaagcttctccagaagaaacaatggaaggatgagatccgcaggttaaaggagatgaagaagagggggaaaactgatctggatgattatgggtatgctaatatcactggtgaggacgatcaggatcctcctccagagaatgtgtcagttcccttacctgacatggtactgcct

SEQ ID NO: 53038 - DNA, 280 bp, Zea mays
atggttttgcattcaacaatttcggatgcaacggaggccttccatcccaggcctttgaatacatcaaatacaatggtggccttgacactgaggaatcttacccttaccaaggtgtcaatggaatctgcaagtttaagaatgagaatgttggagtcaaggttttggactcggttaacatcaccctgggtgctgaggatgaactgaaggatgctgttggtctggttcgcccagttagcgttgccttcgaggtgatcactggtttcaggctgtacaagagcgg

SEQ ID NO: 53039 - DNA, 292 bp, Zea mays
acgtttctcgcgagccatcgcttctgtaattctcaggcatccggaagaaatggccaagtcgaagaaccatacggcgcacaaccagtcgttcaaggcgcacaagaacggcattaagaaacccaagcgccaccgccagacctccaccaaggggatggaccccaagttcctgaggaacctgaggtattctaggaagggcaacaaaaagagtggtgaggctgaagctgaggagtaggaaggaaagcatggctttgtttcctctgtttttagctcagttcgaccgtttaggactggg

SEQ ID NO: 53040 - DNA, 279 bp, Zea mays
gtagctgatagaccggctggtgaaggagaacagggtggtggccttcatcaaaggatcaaggagcgctccccagtgcgggttctcgcagagggtggtgggtatcctggaagcgcacgccgcggatatcgtgaccgtcgatgtgctcgacgaggagcacaaccacgggctgagagaaaccctcaaggcttacagcagctggccgacgttccctcaggtcttcgacggaggggagctcgtgggaggctgcgatatcgtttcgtccatggctgagagagggga

SEQ ID NO: 53041 - DNA, 282 bp, Zea mays
gttgttcggagcgggcagcagcacacagccccatcccaatcctagtcgatcttcttcccctcctcaaggaagaaaagaagctgaaccatggggaagagaaagtcagctgctaagccacctcctaagaagcggatggacaagcttgacactgtcttttcctgcccattctgcaaccacgggagtagtgttgagtgccgaattgacatgaagaatctgcttggcgaacatcttgtagaatctgtcaggaaaacttcagcacaactgttaatgcactcactgagc

SEQ ID NO: 53042 - DNA, 276 bp, Zea mays
cggctcgagagccactccaaacacttgcgccgccactgcctcacaggtaaggccgccatggtcaccggttcgggcgtgtgcgcgaagcatcgtggtggacgcgcgccaccacatgctgggccgtctctcctcgatcatagccaaggagctgctcaatgggcagaaggtggtcgtcgtccgctgcgaggagatctgcatgtcgagcggcctcgtccgtcagaagatgaagtacctccgcttcctccgcaagctgatgaacaccaagccgtcccacgg

SEQ ID NO: 53043 - DNA, 277 bp, Zea mays
aattgcggtaccacactataagaccacttggggctcaaggacgtttaaaaaccaagtccttgatagtgaagcttatgtgtacagaagattgaagtccgctggagcagtcctggtagcaaagcttgtcacgggctcacttgcctatgatgacatatggtttgggggaaggacacgaaacccctggaacatcgaggaattctctactggctcatcggcaggtccagcggctagcacctctgcaggaatggttccatttgcaattggttcagaaactgca

SEQ ID NO: 53044 - DNA, 275 bp, Zea mays
acaactttgatggccataggttgcgggtggaattagcccatggtggacgaggcacatcttcttttgatcgatctagcagctatagcagtgctggacaacgcggtgcctcaaaacgttctgattaccgtgttatggttactggattaccttcttcagcatcatggcaagatctcaaggaccatatgcggcgagctggtgatgtctgtttcactgatgtgtatcgtgaggctggagcaactattggaatagctgattatactaactatgaagatatg

SEQ ID NO: 53045 - DNA, 272 bp, Zea mays
  unsure (1)..(272): unsure at all n locations
atcatccttatcgataaccgggagagagaattcgggagcatgtacactgactgggatatccttcctcctcgtaagatcaaagatgttaatgcaaaaaagccaaaagactgggatgacagggaatatattgaagatcctgatcaagttaagccagagggatatgattcaattcctanagagatacctgatcccaaggacaaaaagcctgagtcatgggatgacgatgacgatggtacatggaagcctagaatgatacctaatccagaatacaa

SEQ ID NO: 53046 - DNA, 278 bp, Zea mays
ctccggagctcgacaaggacgaccgacgacgcacgcggagatccggcgtactgcaaattttgaaaactgaactgtaagatggcatcagcagagctttcccgtgaggaaaatgtgtacatggcgaactcgctgagcaggcggagaggtacgaggagatggttgagttcatggagaaggtagccaagactgttgactcggaggtagtcactgttcgaggagcgaaacctcttgtctcgttgcatacaagaacgtcattggagcccgccgcgcctcatggc

SEQ ID NO: 53047 - DNA, 268 bp, Zea mays
cacttcacgaagcggcccgaggagatcggcgcgggcgaccatggccacatgttcgggtacgccaccgacgagacccccgagctgatgccgctgagccacgtgctggccaccaagctgggcgcgcgcctcaccgaagcgcgcaagaacggcacctgcgcctggctgacgcccgacggcaagacccaggtgacggtggagtacgtgaacgatggcggcgccatggtgcccgtccgcgtgcacaccgtgctcatctccacacagcacgacg

SEQ ID NO: 53048 - DNA, 285 bp, Zea mays
  unsure (1)..(285): unsure at all n locations
tattcgctaaaggaagaagtacacaaactcctcgcagcggcaatgatggatctttccagaaggctgctcggggtaacagcagctcaatatttatccggggctttgatanaaatctttcagaggatgagatccggagctctctcgaacaacattttagtgattgtggtgagatgacaagggtctctatcccgactgatcatgaatctggtgcaataaaaggaatggcttacatagacttcaaggatcaggactctgtgtctaaagccttgagctcagtggctctga

SEQ ID NO: 53049 - DNA, 278 bp, Zea mays
  unsure (1)..(278): unsure at all n locations
ctccatgaccgttttctggtcgaagacggcgcagagcatgacgtctcgcccaatgaaggggatgctgactggcccagtcacaatcctcaactggtccttcgtccggaatgaccagccgaggtttgagacttgctaccagatcgctcttgcgatcaagaaggaagtcgaggatctcgaggctggtggtattcaggttatccanatcgacgaggctgcactgagagaagggctgccgctccgcaaggctgagcatgcattctacttggactgggctgtca

SEQ ID NO: 53050 - DNA, 274 bp, Zea mays
ctccatcctgctccgcatccagggcgccacccactccgtgctagcgcagtggctcaggctcttcgcctaccagttcctctacctcatcgtcctcttcaccttctccctcctctccaccgccgccgccgtcttcaccgtcgcctcgctctacgccaacaagcccgcgtccatctcctcctcgctcaccgcgctgccccccatcctgccccgcctcctccgcaccttcctctgggtctcgcttctcatgctcgcctaccgactcgtcttcgcgctc

SEQ ID NO: 53051 - DNA, 271 bp, Zea mays
ctacttcacccgcggcaacggcaccggcggcgagtccatctacggcgagaagttccccgacgagaagttcgtgcgcaacataccgcccccggtgtgctctccatggccaacgccgggcccaacaccaacggctcccagttcttcatctgcaccgtcgcgaccccttggctcgacggcaagcacgtcgtcttcggccaggtcgtcgagggcatggacgtcgtcaaagctatcgagaaggtgggcactcgcaacggctccacctccaaggtgg

SEQ ID NO: 53052 - DNA, 285 bp, Zea mays
ggagctgatgtccgcgggtactttgcgtggtcgttcctggacaacttcgagtgggcaatgggctacaccaagaggttcggcatagtctacgtggactacaagaacgggctgtccaggcacccgaaagcatcggcgctgtggttctcgcgcttgctcaagggcgaggctggcactggcacaagctgagcgaactgcacgcagcaagctagcacagaacgtcgttgttattacaatataaatattccacacagctacacgttttctcctgttgttgtatcgtactac

SEQ ID NO: 53053 - DNA, 314 bp, Zea mays
tggaccttcagcactactggtgcacttgaggctgcatatacccaggcaactggcaagcccatctctctctctgagcaacagcttattgactgtggttttgcattcaacaatttcggatgcaacggaggccttccatcccaggcctttgaatacatcaaatacaatggtggccttgacactgaggaatcttacccttaccaaggtgtcaatggaatctgcaagtttaagaatgagaatgttggagtcaaggttttggactcggttaacatcaccctgggtgctgaggatgaactgaaggatgctgttggtctggt

SEQ ID NO: 53054 - DNA, 314 bp, Zea mays
taactaccaagacactattggccgcctccaggatgagattcagaatatgaaggaggaaatggctcgtcaccttcgtgaataccaagacctgctcaatgttaagatggcccttgacattgagattgccacctacaggaagctgctggaaggcgaggagagcaggatttctctgcctcttccaaacttttcctccctgaacctgagggaaactaatctggattcactccctctggttgatacccactcaaaaaggacacttctgattaagacggttgaaactagagatggacaggttatcaacgacacttctcagc

SEQ ID NO: 53055 - DNA, 308 bp, Zea mays
  unsure (1)..(308): unsure at all n locations
gccccatggacgccagcgtggaggaggagngggtgcggcgtgcactggactttgccgtcggcgagtacaacaaagccagcaacgacatgtaccacagccgcgcgctgcaggtggtgcgcgcccgcaagcagatcgtagctggggtgaactacttcttggacgtggagctgggccgaaccacgtgtaccaagacccagcccaacttggacaactgccccttccatgaccagccacatctgaaaagganagcattctgctctttccagatctacgctgtgccttggcagggcacaatgaccttgtcgaaa

SEQ ID NO: 53056 - DNA, 308 bp, Zea mays
gacagggatcgccatgtcggactcggaggagcaccacttcgaatcgaaggccgacgctggggcgtccaagacctacccgcagcaggctggcaccgtccgtaagaacggcttcatcgtcatcaagaaccgtccctgcaaggttgtggaggtttctacctccaagactggtaagcatggccacgccaaatgccactttgtcgccatagacatattcaatgggaaaaagcttgaagatattgttccttcatcacacaactgtgacattccgcatgtgaaccgtactgagtatcagctgattgatatttctg

SEQ ID NO: 53057 - DNA, 304 bp, Zea mays
tctgaaggcttttttttggataccttctctggctggtcctacaacaattgcttctcgacaaaacggccaggggatatcatggctttttccttttactgatggccatccacctcttggctggtcagatactttggcatacattgtgttaccagttcttcttgtcatttcacagtacatatctactcaagtaatgctgccaccacagagcaatgatcctaaccaacaaggtgctcaggctgtaacaaagttcttaccattgctaattggttattttgctctttccgtgccttcaggactaagtctg

SEQ ID NO: 53058 - DNA, 194 bp, Zea mays
tctgcctcactcccgagctctactgactcccaaatgatcgcccaagaagaaaatggccataagtggagtccctgtgctaggatttttcatcatggctgtgctattgagcgctcaggaatcatgggctatcaaagaagaacatgtgatcatccaggccgagttctatctgaatcctgaccaatcaggcgagttta

SEQ ID NO: 53059 - DNA, 313 bp, Zea mays
caaatctaggcttccaagcgagcgaaagcctacctccgccagccgatctaccaacatcctctccgccgattggaggcacctgcgaagatgccgcagcggcactcaaagaacaacaacgacctcgccttcttcacgtacgaggagaagcggaagctcgggtacggcacgcagcgggagcgcctggggaaggactccatcaagcccttcgacgcctgctgcctctgcctcaagccgctcatcgacccgctctgctgccccaagggccataccttctgcaaggagtgcatccttgagtgcctcctcgcccagaaga

SEQ ID NO: 53060 - DNA, 315 bp, Zea mays
gcacaagtatttcacttcccggttgcccccggtgatgttattgttgctggcacggatggactttttgacaatctatacaataatgagataagtggtgttatcgttgaagcgctcagggttggacttgaacctcaagttgcggcacaaaaaattgctgccttggctcgacaaagagccacagacaaaaataggcagtcaccatttgcatcggccgcccaagaagctgggtaccggtactacggtgggaagctcgacgacataacggttgtggtgtcgtatgtgaaaaccgcttgattcgagcctttctttttatta

SEQ ID NO: 53061 - DNA, 303 bp, Zea mays
agttcttgtacttcagagatagatccttggaactcatcgatcaaggtctaagtggtccaattgatgcacaaggattccaaaacgctctatatatgatagacatagggcagaacgatgtaaacgctcttctgtcaaactcgccctatgatcaagttattgccaaattcccaccaattcttgctgagattaaggacgctgtccagactctatatagcaacggtagccgaaacttctggatacatgggacgggggctctgggttgcctgccgcagaagcttgccataccaaggaaaaacgacagcg

SEQ ID NO: 53062 - DNA, 310 bp, Zea mays
cggctcgagataacacttagtaacataggtgccattggtggcaagtttggctctccacttctgaacctacctgaagttgccatcattgcccttgggcggattcaaaagcttcctcgcttcgatgatgacgaaaacgtttacccttcatccataatcaatgttactgttggagccgatcaccgagttgttgacggggccacggttgcaagattctgtaatgaatggaagagcctcgtggagaagccagagctgctcttgttgcatatgcgatgacccagtaatgtaccggtacatactacgacctgaaacg

SEQ ID NO: 53063 - DNA, 305 bp, Zea mays
tacatttcagaaagctcgtcttgcttctcccagcattatattttttgatgaggctgatgccattgcccccaagagaactggccctggtgggaattctagtggcaatgccacagtcggagaaagacttttgtcgactttattgaccgaaatggatggtttagaactggctacgggaattatcgtattgggtgctacgaatcgcccaaatgcaattgatgctgctcttttgcgtccagggcgtttcgataaggtgctgtatgtcccgccaccagatgtggaagggcgacacgagatactacgcatcc

SEQ ID NO: 53064 - DNA, 303 bp, Zea mays
gctgccgatcgccgtccccgaccgcagtgcaggactgaggatgagtgaagaggataaggctgctgcttctgctgagcagcctaagagggcccctaagctcaatgaaaggatcctctcctctctgtccaggaggtccgtagctgctcatccatggcatgatctcgagatcggtcctggtgctcctgctgtattcaatgttgttgttgagatcacaaagggaagcaaagtcaaatacgagcttgacaagaaaactggactgattaaggttgatcgagtcctttactcatcagttgtataccctca

SEQ ID NO: 53065 - DNA, 306 bp, Zea mays
gctccgcctcagcgcgtcgcccgccgccacatcctacagcgacctcatcgatcaccttcaactttcaatcatggcggacgtcgatgtcgaaccggaggttgccgccggcgctcccaagaagaggacgttccgcaagtacagctaccgcggcgtcgacctagatgcgcttctcgacatgtccacggacgacctcgtccagctcttccccgcgcgcgccaggagaaggttccagaggggtctgaagaggaagcccatggcactcatcaagaagctgcgcaaggcgaaaaaggatgctcctgctggtga

SEQ ID NO: 53066 - DNA, 301 bp, Zea mays
ctcctcctcgcctcctctccctagcctccacgacgcaagggagagtgacggaaagcgacgcggcgcgagctgaggagggccaaggggaagaggggaagcaccgcaccaggacccttagttcgccgccgccgcctctgatctccgcgaggttgtcaggattcaatatgtcgaccagcacattcgctacttcctgcacgctgttgggcaatgttagaacaacgcaggcctcccagacagcggtgaagagcccttcgtctctaagcttcttcagccaagttacgaaggttccaagcctgaagac

SEQ ID NO: 53067 - DNA, 298 bp, Zea mays
ggagacggggattccagagagcccctctcgggtagggaagggaaggagaggcgaacggaggcgagatgggggcggccgaatccgtgccggagacctccatacacgaattcaccgtcaaggattgcaacggcaaggaagtgagcctggaaacctacaaggggaaggtcctccttgttgttaacgtcgcctccaaatgtgggttcacggagaccaattacacgcagctgacggagctttatcagaagtacagggacaaagacttcgagatattggcattcccttgcaatcagttcttgcg

SEQ ID NO: 53068 - DNA, 303 bp, Zea mays
gtggcctcacacagtggtttcctcccttccctgtctgtcttccttaaagctggacaataaccccttggtagagatatcatccactgatcttgtgcctctgtccaaacttgaagtacttgatctaagtggcaatgcttcagcacttcctgaaccttctgcagtttctgcattaccacagctgcaagagctttacctaagacgaatgaaactccatgaatttcctaatggtttgctgggcctaaaactgcttaggattcttgacctgagtcagaatcaccttacaactgtgccggagggcatcaa

SEQ ID NO: 53069 - DNA, 307 bp, Zea mays
ctctggtgttcgctgggcgaagacccggagacgcagagatcgtctacgccgcaactgccaaggcagagaaggagctcaaatggaaggccaagtacgggatcgaggagatgtgcagagatctgtggaactgggcgagcaagaacccgtacgggtacgctgggtcacgcgacaacagcaaatgaaccacccatccatgcatcccatcctgcagtaggagcaagcagcagccttatagcctatatgctaccataattagtaactcatcaatcatgcatacataatcagtcagtcatctgattaggaggta

SEQ ID NO: 53070 - DNA, 307 bp, Zea mays
cttggcttatctacagcaacagtgaaactgatagcaccagatggagaggagagaatagcatgttcagttggaacaggtccagttgatgcagcttacaaggctattgaccaaataatccagatcccaactgttctccgagaatatggtatgacctcagtcaccgaaggcatcgacgcaatcgcaacaacccgggtggttgtcaccggagatgtgaccaacaactccaaacatgccttgactggccgcgctttcaaccgctccttcagcgggagcgaggcagcaatggacatcgtcgtctccagtgtca

SEQ ID NO: 53071 - DNA, 304 bp, Zea mays
cggcgatccattccacacaacctacaacacccttgccccagcccgccgcaggagttgccagatctgctccggactacaggagctctgactccgagccctctccaatggcggttaaggtctacgtcgtgtactattccatgtatggacatgttggcaaactagctgaagagatccagaaaggtgcctcgtctgttgaaggtgttgaagctaaaacatggcaggtccctgaaaccctccctgaggaagtgcttggaaagatgggcgcaccccctaagcctgacgtgccagtcatcacgccgcaaga

SEQ ID NO: 53072 - DNA, 270 bp, Zea mays
gctcctctaagccaaagcatgttgctaggtcctttgaaccagcaactgatgcttcctcgtctcatcatcgagaccagtaagcaacatggcggctaatctcaagtgggctcctgttctagccctcgtcgtcgtcgttgctgccatggttggcaccacgagcgccggcaacatcgcagtgtactggggccagaacggcaacgaaggcagcctggcggacgcctgcaactccgggctctacgcctacgtcaacatcgcgttccacacaacata

SEQ ID NO: 53073 - DNA, 302 bp, Zea mays
ctttactcaaagcgttatgaaattgtcaatggtgtggtcgagattgagggtatcacaaaagaaagtgcagctgaaaccccagaggagcaaaaaagtggagatgagacctctgctgagcaaaaagaagaaaaaggtgtaccagctttctggcttaatgcaatgaagaatcatgaaattttagctgaggagatccaggagagggatgaggaagctctcaagtacctcaaggacatcaagtggtacaggatcagcgagccgaagggttttaagcttgaatttcactttggtacgaatatgttctt

SEQ ID NO: 53074 - DNA, 293 bp, Zea mays
gtttaagtctctctccctgtccaagtccgtcgggatcaaggacatctgctccgcacctgcacaacttccggtatgcaaatcactacgttccctggccatcaaggattgcccaggcttcaccgacgccagccttgccgtggtgggcatgatctgccctcagctggagaacgtcaatttgagtggccttagtgcagtcaccgacagcggcttccttccactgataaagagttcaaacagtgggctggtcaacgtcgatttgaacggttgcgagaatctcacggatgcagctgttt

SEQ ID NO: 53075 - DNA, 296 bp, Zea mays
ttgcctacgccatcttttgaagcagctacaagttaggcatacaagtgttcgaggcacaaactgagctgctggggatcaccatggctactttccttgacgtgcccataccaggatccaaataccttccaacccaagcgaatcggcgaaaatggatgctggagacgaagctcaagagcttactcacgcggatcatacagccacggttagcaagcggtgagcacggaaacgatctgctgggcgtgatgctggactcctgcactgagaccaagcaaggagggaagcagcagcaagtggat

SEQ ID NO: 53076 - DNA, 296 bp, Zea mays
ccgctggaccttcgatgatgtccaggtgaacgacatctcgctgaacgactacctcgctgtgaacgcgacgaagcacgcgatgtacctgccgcacaccgcggggcgttactccaagaagcggttccgcaaggcgcagtgcccgatcgtcgagcgcctcacaaactccctcatgatgcacgggcgcaacaacggcaagaaggtcatggctgtccgcatcatcaagcataccctggagatcattcacctgctcaccgatgccaaccccatccaggtcgtcgtcgacgcgatcatcaaca

SEQ ID NO: 53077 - DNA, 182 bp, Zea mays
ggcggacgtaaggcgaaggagtagcagcagcatgcggcgccgagtagcggctccccatctcgagcttgccaccatggctagaggattgaagaagcatttgaagaggctcaatgcccccaagcattggatgctggacaagcttggcggagcttttgctcccaagccatcttctggacctcaca

SEQ ID NO: 53078 - DNA, 297 bp, Zea mays
ggttgcaggaggcaaagaaggatcctgagaaggcaagcaaaattgcttgggatgtggccagaagacgtgctgctggtgagaaggtccatgatgaccccaagctgattaaggagagcttgaagaaggaggaaaagcggcagcagaagcatgctgcgcagtggaaggagaggcagaaaactgtagataagcagaggaaggacaagcagaagaaaaggacagagaacatccgggatcgggcacagcagaagaagatgcgcaagattgagaagcgtgagatcaaacttatgcgccctgggt

SEQ ID NO: 53079 - DNA, 294 bp, Zea mays
catcgatctacacacatacatagtttcttctactacacgacgacaaacatggggaagcctgcgaagatcggagagtggggtggatacgccggcgatcgtcgggatctgagggctactccggaccggctgatcgaggtgaaggtcacggcggacaacagcagctgcatccgctccatctccttcatctacatcggagccgatggcaaaccgtacgaggaggggccatggggtttcggccatgctggcacggagtacaagattgatctgtgcaggttcgacgagagcttgacggag

SEQ ID NO: 53080 - DNA, 293 bp, Zea mays
cgggaaaaacgcggcagagttcgccgcggagaacatgcccaagtttatggccgaggagttgacgaaggtaaacggcggagagatcgaaggagcggtgaagaggggttacctcaagacggacgaggagttcctcaagagggacgagagcgggggcgcgtgctgcgtcacagccgtcctccaaaagggtggactggtcgtctccaacgctggagactgccgtgcggtgctcagccgagcagggaaggcagaggcgctcacctctgaccaccgggcgtccagggaggacgagaagg

SEQ ID NO: 53081 - DNA, 295 bp, Zea mays
catatctagctatagtagctcccttgagaagcatttgagggaggagccatgtctgaggagaagcaccaccaccacctgtttcaccaccgcaagccagaggaggagggcgcctccggcgaggtcgactacgagaagaaggagaagcaccacaagcacatggagaagctcggcgagctcggcgccatcgccgccggcgcgtacgccctgcacgagaagcacaaggccaagaaggacccagagaacgagcacgggcaccgggtcaaggaggaggtggccgccgtcgccgccgtgggct

SEQ ID NO: 53082 - DNA, 289 bp, Zea mays
  unsure (1)..(289): unsure at all n locations
ctcgcccaaaaccgtagcgccctcgcctgctcgccgccgccgtcgttgcgagctccccatcttcctccgttaaccatggcgacccagatcagcaagaagaagaagttcgtcagcgacggcgtgttctacgccgagctacaatgagatgctgacgcgggagctcgcggaggacggctactccggcgtggaggtgcgtgtcacaccgatgcgcacggagatcatcatccgcgcaacgcggacgcagaacgtgctcggcgagaagggccgcaggatcnaggagctcacgtct

SEQ ID NO: 53083 - DNA, 294 bp, Zea mays
gcccagagagacaccagagaacccaccatggccccctttgagcccctggcttctggcatcctgttgttgctgtggctgatagcccccagcagggcctgcacctgtgtcccaccccacccacagacggccttctgcaattccgacctcgtcatcagggccaagttcgtggggacaccagaagtcaaccagaccaccttattccagcgttatgagatcaagatgaccaagatgtataaagggttccaagccttaggggatgccgctgacatccggttcgtctacacccccgccatg

SEQ ID NO: 53084 - DNA, 180 bp, Zea mays
accatcaccagctgttgaaataatcccctcaaagagtgttcatccatacaaatatgctggagagaaggttgatgtgcaaggtcttaatattttcaagggtaaagtcagtgtagcagatatgatagttatctcaccttctgaagtagcatcatcaaaatatgatggaactctgaaatactg

SEQ ID NO: 53085 - DNA, 279 bp, Zea mays
gtcttagcgggtgtatttggcacagcagcaacaggatacatcttgcagcatggttcttgggacaacgtattcgagttatcagtagtgctttatctggtagggactttggtatggaatgtattctcaactggcgagaagattcttgattgaagggtgtatgtacacagtgtgcttacagttcgtagtgacaaactcatttcggatcgacaacttgacccctggacataatacacttcaagataacaaatgtgtcatcgcgcgctcgagaagtatcaacct

SEQ ID NO: 53086 - DNA, 286 bp, Zea mays
gttcgctttgacactgaggtggagctggcgtacttcaaccatggaggcatcctcccttatgtcatccgcaacttggcagctgcgcataactgaggcaagatcacacaccgtttgacccacaatggcagtggcaggctccatgttcccagggctagcgacctggttctcaatgtagtgacatttgtgatggatctaggggtctctttgtcgattcagcccataaataaagtgtgaaataaaagccgcaggtggaggcaggaacctgctgattgagggaacagttttg

SEQ ID NO: 53087 - DNA, 283 bp, Zea mays
ctccttgggaggatgctttacatggctccttcagatggaaaatggggcgaacacgagttggattacctcctgttcatggttcgtgacgtgaagctcaacccgaatcctgaagaggtggccgacgtaaagtacgtgaaccgcgatcagctgaaggagctgctcaggaaagctgatgctggggaagatggcgttaagatgtccccttggttcaggctggtggtggacaattcctcatgggctggtgggatcatgtcgagcaagggactctgcagggggcagcgga

SEQ ID NO: 53088 - DNA, 282 bp, Zea mays
gtcttagcgggtgtatttggcacagcagcaacaggatacatcttgcagcatggttcttgggacaacgtattcgagttatcagtagtgctttatctggtagggactttggtatggaatgtattctcaactggcgagaagattcttgattgaagggtgtatgtacacagtgtgcttacagttcgtagtgacaaactcatttcggatcgacaacttgacccctggacataatacacttcaagataacaaatgtgtcatcgcgcagacgagaagtatcaacctcta

SEQ ID NO: 53089 - DNA, 280 bp, Zea mays
gatcgtcccggtcccaacaacgatcgttgatcctaacactggagaggagaaggaagttgtgatatcagttgatgatgggattaggccagggaccacagcatctggattggcgaaactgaaaccagtttttaaaaaggatggaactacaactgcaggcaattccagtcaagtgagtgatcgtgctggagtagttcttctcatgaaaagatctgtggctctgaagaaagggctgcccattcttggtattttcaggagctttgcagctgttggagtggatcca

SEQ ID NO: 53090 - DNA, 280 bp, Zea mays
cctgcctgcttccctccgtccgtcagatccccgctcgggttgccatggcggaccagctcaccgacgaacagatcgccgagttcaaggaggccttcagcctcttcgacaaggacggcgacggctgcatcaccaccaaggaacttggcactgtgatgcgctcattggggcagaaccctactgaggctgagcttcaggacatgatcaatgaggttgatgctgatggcaatggaaccatcgactttcctgagtttctcaacctgatggcacgcaagatgaagga

SEQ ID NO: 53091 - DNA, 279 bp, Zea mays
ctcagaggaggcatgcagatcttcgtgaagaccctgaccggcaagactatcaccctcgaggtagagtcttcagacaccatcgacaacgtcaaggccaagatccaggacaaggagggcattcccccagaccagcagcggctcatctttgctgggaagcagcttgaggacgggcgcacgctatgccgactacaacatccagaaggagagcaccctccacttggtgctgcgcctcaggggaggcatgcagatcttcgtgaagaccctgaccggcaagactat

SEQ ID NO: 53092 - DNA, 276 bp, Zea mays
accgactctgaggaagagctcaaggaggccttccgtgtgtttgacaaggaccagaacggcttcatctcggccgccgagctccgccatgtcatgacaaatcttggtgagaagctaactgatgaggaggtggacgagatgatccgtgaggctgatgtcgatggtgatggccagatcaactacgaggagtttgtcaaggtcatgatggccaagtgagccacagaaccataatctgaaggcagagaagattatgcattgcatattagtcaagatgcaact

SEQ ID NO: 53093 - DNA, 288 bp, Zea mays
  unsure (1)..(288): unsure at all n locations
gtctcgctcgtggctgccctactcgtgctgcttgccctcgccgccgtttcctccacgcgcaggcnacaaaaggagtccgtggctgacaacgccgggatgttggcaggcggcatcaaggacgtgccggcgaacgagaacgacctccagctccaggagctcgcgcgcttcgccgtcaatgagcacaaccacaaggccaatgctcttctggggttcgagaagcttgtgaaggccaagacacaagttgttgctggcacgatgtactatcacactattgaagtgaaggatggc

SEQ ID NO: 53094 - DNA, 288 bp, Zea mays
accgtacacaccctttccaccgcctcaacagcctagcaagattgatcttgaacttgagaacggtgagtatttcatgagtgacaaaaagaaatcagcaaagaaatggcaagagaagctggacaagcaatctgggagagctgaagaaaataaaagaaaaagagaggctgcatttgttcctccaaaggagaacactgcaggtccatccaaatctgacaagaatgccagtgacaacagtgagatagccgatatagcgaagtcattaaagagaaaggcgaaggaatttagaaa

SEQ ID NO: 53095 - DNA, 284 bp, Zea mays
gatctacacacatacatagtttcttctactacacgacgacaaacatggggaagcctgcgaagatcggagagtggggtggatactacggcgatcgtcgggatctgagggctactccggaccggctgatcgaggtgaaggtcacggcggacaacagcagctgcatccgctccatctccttcatctacatcggagccgatggcaaaccgtacgaggaggggccatggggtttcggccatgctggcacggagtacaagattgatctgtgcaggttcgacgagagcttg

SEQ ID NO: 53096 - DNA, 284 bp, Zea mays
cacgcaattaagaggtgcaagcattttgagattggtggagacaagaagggcaagggaacatctctcttctaagtttctcatcgctcatctcgatgttggatcgaagctgtgggtctactactgttctaaaaactcgtcaaatttcaatgttactagtagttctgaaagcaggtcatgctgtgtatcaaattccaatgcctgacatttgcgctgagtgtgggttgtcttttggctaaatgaagttttgcaccctgaatcttcattgaatgtgttgtgtgtttgtt

SEQ ID NO: 53097 - DNA, 283 bp, Zea mays
ctacaacatccagaaggagagcaccctccacctggtgctccgcctcaggggtggtatgcagatttttgtgaagacattgactggcaagaccatcaccttggaggtggagtcgtctgacacaatcgataatgtcaaagccaagatccaggacaaggagggcattccaccggaccagcagcgcctgatctttgctggcaagcagctggaggatggccgtaccctcgccgactacaacatccagaaggagagcaccctccacctggtgctccgcttgcgaggtggt

SEQ ID NO: 53098 - DNA, 275 bp, Zea mays
acaaattcaacatctacccagagcaaattccatcttggcttgcagactggattcctgtgaaaggcggttaccttataggcaatctgcagccagctcacatggatttcaggtttttctccctagggaatctgtgggcgattgtctcatctcttgctactcaaaggcaagcagagggtattctgaaccttattgaagccaaatgggatgacatagtagccaacatgcctcttaaaatatgttaccctgcactagagtatgaggaatggcgtatcatc

SEQ ID NO: 53099 - DNA, 273 bp, Zea mays
gattgtgatggagtttgcagcaggtggagagctttttgatcggatctgtgatcgtgggcggtttagtgaggatgaggcccggtatttctttcagcagttgatctgtggagtgagctattgccattacatgcaaatatgccatagagatctgaagctggagaatgttctcttggatggcagcccagctccacggcttaagatctgcgattttggctattccaagtcatcagtgttgcattcaagacccaaatcagcagtaggaacgccagcata

SEQ ID NO: 53100 - DNA, 274 bp, Zea mays
gtcgtcacacacactcagcccgtccgctgcctccgcgctcccccaaaacccaccgcctcgccggaatcctagccttcgccaaccagtcgccatgagagagatcctccacatccagggcgggcagtgcggtaaccagatcggggccaagttctgggaggtgatatgcgacgagcacggcatcgaccacaccggcaagtacgccggcgactccgacctccagctcgagcgcatcaacgtctactacaacgaggccagcggcggccgcttcgtcccg

SEQ ID NO: 53101 - DNA, 279 bp, Zea mays
ctcgagccgacgcaccaaccgaggccacaggccaccaccattccttccttgttccttccccagctccgcaggctgctcatcgccctccctccgcgcccccgatccagatccagatccaggggcttgtcatggcatccaaacgtatcctcaaggaattaacaggacttgcaaaaggaccctccaacatcatgcagtgcaggtcctgctggtgaggatatgttccactggcaggcaaccatcatgggtcctcctgatagtccatatgctggaggtgttttc

SEQ ID NO: 53102 - DNA, 77 bp, Zea mays
attcattttcctccggattatccattcaagccacccaaggttgcatttaggactaaagttttccacacaagagacga

SEQ ID NO: 53103 - DNA, 274 bp, Zea mays
attgataaatcatatcattaaattattaaataagttttgaagttgatacttgtgtctatattgagtatgcttttagtcactgtgcgagcagaaggatttacaaaagtggtgttagtggacaacgttgtgatggaagtagcactgctcctccttgcacagggtgggttgaaatgatggctcctgttttctcaagagctgcttggcgttgcatttggtttatgatccagaatgacttgatccatgcatggggtctagatatgcagctaggctactg

SEQ ID NO: 53104 - DNA, 279 bp, Zea mays
gcgtcgcgtcgcatcctacgatccaaagctctctctgctcgcagccatggcgaagaactacccgaccgtgagcgccgagtacagcgaggctgtggagaaggccaggcgcaagcaccgagccctcatcgccgagaagagctgcgccccgctcatgctccgcctcgcgtggcactccgcggggacgttcgacgtgtcgtcgaggaccggcggtccattcggcacgatgaagcatcagtcggaattggctcacggcgctaacgcggggctggacatcgcggt

SEQ ID NO: 53105 - DNA, 278 bp, Zea mays
gtggtattcaggttatccaaatcgacgaggctgcactgagagaagggctgccgctccgcaaggctgagcatgcattctacttggactgggctgtccactccttcagaatcaccaactgcgagatccaggacaccacccagatccacacccacatgtgctactccaacttcaacgacatcatccactcgatcatcgacatggacgcggacgtgatcaccatcgagaactcgcggtccgacgagaagctgctctccgtgttccgtgagggtgtcaagtac

SEQ ID NO: 53106 - DNA, 272 bp, Zea mays
gtcgaagttgcctcatgcaacagtatttaaaccgcatcatccatatcccagtacccttcgagcatgtttttaaagaggtaccagaaaatgccttgagtttactagaaactctcctatcggtggagccctacaagcgtggtactgcatctagtgctctttcttctgagtttttcaggacaaaaccttatgcttgtgaaccatcgagcttgcctaagtacgcacccaacaaggagatggacgcaaagttacgagatgatgcactcagaaggaaa

SEQ ID NO: 53107 - DNA, 277 bp, Zea mays
ccagctggaacccccaaaaccataacgagggtgcccgtcctgctagccggtgtgcttgctgtgcgatcgtttggcatgtgcttgttgaggggttgctaggggattggagaggattgaagggattaaatctcctcctattcaattttgaatagtaggggatttaatccccttcaatccccctcaaaccactagtaaccgaacgtggcctgagggggcgggcgagtctttatattgaatgaaactacataaaatagcatgccgtctctgtcactggcaa

SEQ ID NO: 53108 - DNA, 278 bp, Zea mays
cttgcgcgtacgcgtacacagccccgatccgaatcgtcctcctcgcgaacctcgccgatcccccactcccctcccctcgcttcaagatagcgatctttgtgaagaccctcaccggcaagactatcaccctcgaggtggagtcttctgacaccattgacaatgtcaaggctaagatccaggacaaggcgggcatccctcctgaccagcagcgccttatcttcgccggcaagcagcttgaggacggccgcacacttgctgactacaatatccagaaggag

SEQ ID NO: 53109 - DNA, 277 bp, Zea mays
atcgccgacgacatcgtgctgcccttcgccgacgccatcccgtgggaggagatcgccgtgttcgtgcccgatgacgacgtcctgaggctggacaccatcctcacgtccatccccatggacgagatcctccgcaagcagaggctgctggccaacccgtccatgaagcaggcgatgctgttcccgcagcccgcggagtccgagtgacgccttccatcaggtcctcatagggctggcgcgcaactgccctcagccaaggacgtcttcctcatgctcggcc

SEQ ID NO: 53110 - DNA, 274 bp, Zea mays
cctcgagccgcgcgaaaccctagcctcgagctctatctccggccacagctggtcaggttagcgacgaaggatgagcaggcgctggagccgcacgatctacgtcgggaacctccccggcgacatccgggagagggaggtggaggatctgttctacaagtatggtaaaattgttgacattgacctgaaggtccccccaagaccacctggttatgcttttgttgagtttgaagatcctcgtgatgctgaggaggcattgctggacgggatggataca

SEQ ID NO: 53111 - DNA, 272 bp, Zea mays
atctcaacaacgtcaaaaggattgtcttggaagcagatggttctcaaccatatttgatatctccagagaaagggttgagatccttaataaaaatagtactggaaatggcaaaggagccatcacgactatgtgttgaagaggttcatcgtgtattgttagacatagtcaatgcttccgcaaatgccacaccaggacttgggagatatcctccattcaagcgtgaggttgttgcaatagcatcaaatgcattggagaccttcaaaaacgacgcc

SEQ ID NO: 53112 - DNA, 270 bp, Zea mays
ggaattggcatgccaatgcaaggtctacccataaggagtggatttgatgttgtcccatgccctgaccgtgactcggtcatatcgcgctataaagcgaagaggaagacaagaaggtttgacaggcaggtccggtatgagtcgcgcaaagttcgtgctgatggcaggctcaggatcaaggggcgttttgcaaaggcaaaccagacatgaacctaaatctgaagttatgcactatcctaagcatctttcctcaagaaatatgctaaggccctg

SEQ ID NO: 53113 - DNA, 271 bp, Zea mays
gttgatcgagacttttgtggacaaggcggaagatttgccacatataggaaagcagtttgtaccaccaatgatggatcctgttcttggtgattatgctagaaatgtacccgatgcaagggagtctgaagttctgtaccttgtttgcaacaatcattaacaagtacaaaggggaaatgcttgaggatgtgcctcgtatatttgaggctgttttccagtgcacccttgagatgattactaagaactttgaagattatcctgagcaccgcctcaa

SEQ ID NO: 53114 - DNA, 282 bp, Zea mays
gctatcgcacgctatgttgctcgcttgaaggatgacaaccctctttttgggtcttcccgtattgaacaagcccacgttgagcaatggatggattttgccgcaacagaagttgatcctggtgttgcatggtacttgtatccaaggcttgggtacctcccttatgttagcacaactgaggaaacagctatttcttcattgaagaggtcgcttggtgctctgaacacacaccttgcttcaaacacataccttgttgggcatgctgttactctagctgacattgta

SEQ ID NO: 53115 - DNA, 80 bp, Zea mays
ggcttctcctccccctcttaccaagtcctcctcgggttagggttccttagggttttgtggaggggcgatggcggcggctg

SEQ ID NO: 53116 - DNA, 278 bp, Zea mays
ctgaaagtcactggctttgtcacaagcaccgtgttgaactccaaaccagcacaaaagtttttcaagttaatgcctggcgaagttattcttgcttcacttgatggatttgggaaaatatgggatgctgtggaagtgtctggcaaaaatgtgatgcagacatcctcagttgtgaccacttctgttgtaacacacagatacggtgaacaagcaggtgaagccacacacaattacctccacgctacaggaaatgttctcggagctgcgtgggctgtattcaa

SEQ ID NO: 53117 - DNA, 275 bp, Zea mays
gaggagacgacgaccaagaccatcaccatccagcctgcgcaggctgtcatgctcaagctcgtcctgcacttctggaacgacgacgactgcgtcaagatcctggagctgtgcaggaaggccatcccttcccgcgaagaaggagggaaagtgatcaacattgaactactcctgggcccgaacatggggacggtcatgtacgaggcccagctgctgatggacatgctcatgatggtcaacaccaagggcaggcagcgcggcgaagacgactggcgcca

SEQ ID NO: 53118 - DNA, 281 bp, Zea mays
ggtatccggcaccatgccggaccacggctggaccgccgccagcggctccaccgcgctggagatccccgccaaggtgccctacagtcttcctcgtctccctcgtcagggacgtacgccgggactgggacatcgactacgagctccaggtcgggctcaccgtcgacctccccatcgtcggcaacttcaccatcccgctctccacctctggcgagttcaagctccccaccctcaaggacttgttctgatctagtagtagctcgcttgccttgtgttctgtgcgg

SEQ ID NO: 53119 - DNA, 274 bp, Zea mays
ctacaacatccagaaggagagcaccctccacctggtgctccgcctcaggggtggtatgcagatttttgtgaagacattgactggcaagaccatcaccttggaggtggagtcgtctgacacaatcgataatgtcaaagccaagatccaggacaaggagggcattccaccggaccagcagcgcctgatctttgctggcaagcagctggaggatggccgtaccctcgccgactacaacatccagaaggagagcaccctccacctggtgctccgcttg

SEQ ID NO: 53120 - DNA, 276 bp, Zea mays
tcctcatctcaagtgtgtagacgagagagagagactgagagagcgccatggccagcctccaagtgactcctacttcatcgttcactcagtggaacgagctgaagttcgaaggcctgtacctgttccacacacccctgggccccggcgccaaccaagctcaggtcatagacaacaaggcgccgattggcatcggtgccaccgtagttaacaactgggcagtgtacgacgggccaggtgctgaacgcaaagctcgttgctcgtgcacacggcttgcat

SEQ ID NO: 53121 - DNA, 278 bp, Zea mays
cactatttctgccaagctcaaagactggatttctttcggcgcgctaagccttacaaaggcaatccaactattataaggatgcaacagcttgcaaaggagctggaagttgtcatacctgtcagttttttcgaagaagcaaacaatgcacattataattcggtggctattatcgatgctgatgcggctgatcttggactctatcgcaaatcacacattccagatggaccaggatatcaagagaagttttatttcaaccccggtgacactggctttaaggc

SEQ ID NO: 53122 - DNA, 277 bp, Zea mays
catctatctgtcaagcgacgccgcggcctcgatcagagtcggaggcgaacacccccatggcggcggctggcggcggcgcaggagggaaggtatccttcaagatcatcctcacctccgaccccaagctccctttcaaagtgttcagcgtgcccgaggcggcgccctttaccgcggtactcaagtacgccgcggaggagttcaaggtcccgccccagaccagcgccatcatcaccaacgatggaattggcatcaacccccagcaaagtgcaggcaacgt

SEQ ID NO: 53123 - DNA, 279 bp, Zea mays
gaaaaacctgagaaactggaagcattgattgctgctgttaacagcagtgatagcagtcacattgttcatatccctcctggtgaaaatgccctctctgatgtcctcctaagcactcctatatttactggtgaagaaggtggaatacggttttgatgcttccgcagcagctgccgcagctactggagcatctggatttgaatttggtgtggacccaaacgtagatccagaattggcacttgccctgcggttgtctatggaagaagagcgggcaaggcaaga

SEQ ID NO: 53124 - DNA, 284 bp, Zea mays
gcacctctctccatctccctgctcctccgcctccttcttgatccagccaagccagggatcgccatgtcggactcggaggagcaccacttcgaatcgaaggccgacgccggagcgtccaagacctacccgcagcaggctggcaccgtccgtaagaacggcttcatcgtcatcaagaaccgcccctgcaaggttgtggaggtttctacctcaaagactggtaagcatggccatgccaaatgccactttgttgccatagacatattcaacgggaaaaagcgtgaaga

SEQ ID NO: 53125 - DNA, 259 bp, Zea mays
ggctgctcttcctgcgggcaagcttgatatgctctatgactcagcctttatctgtgaggcagtactcaggtcacttcctccactggcaaagaagtatgcactgcagatgttgtatgtgctggcaccagtgaccgctgcagcaatggaagagtgggtgcttgatgaatatgctgccaagcataaggttgccattgataagcttctacagctcagggtctttgctgaagtgcgcgacagacgacgggacgtgagctacaag

SEQ ID NO: 53126 - DNA, 277 bp, Zea mays
cgtcgccgcctactcgccgctgggagggcagaactgggacgggcggggcaacgccgtgctcgactcggaggtgctcgcggagatagccagggcgagggggaagaccgtggcacaggtggcgctgcgatggatacatgagcagggagtgacgtgcatcgtcaagagctacaacagggagaggctgaagcagaacctcgagatattcgactgggagctgaccgatgacgaccggctcaagatcagccacatcccgcagaggaaggttgtcgaggcgagc

SEQ ID NO: 53127 - DNA, 269 bp, Zea mays
atttggttttgttactctccatcgcaggacgaattggatgatgctattgctgcccttgatggacagagtttggatggccgtgccttgcgggtgaatgttgcagaggagcggccacggcgaggtttctaatgaggttgtatcgggtggactgcacgcttgttccatgggttgggagcatcatagcatgttctgatactggtttagacctgccattctctttccttgtgttgctgagcttctatcatcgtgtcttattgtgaagagggaac

SEQ ID NO: 53128 - DNA, 278 bp, Zea mays
ggaaaccctagccgccatatctcacgatccactcgagcaccaagccgagggaaggtgaggagcgatggcgcgcggcgtggtgtcggcgaagggcggcgcggtcgcgggcaagaagaaggggtcggtttccttcacgatcgactgcaccaagccagtggaggacaagatcatggaggtcgcctcgctcgagaagttcctgcaggagcgcatcaaggtcgccggcggcaaggctggcaacctcggcgactccgtcaccatctctcgcgagaagaccaagg

SEQ ID NO: 53129 - DNA, 276 bp, Zea mays
cgacgactgcggttgggaagggaagacgcctacaaacccctctctacctctcctctgcgaaccacctgccgccggaagccctagagggctcgacccatggatccgccgcagcagccggagcctgtcacctacgtctgcggagattgcggagctgagaacaccgtgaagctagtagacgtcgtccagtgccgtgaatgtggccaccgcatcctctacaagaagcggacccgccggattgtccaatttgaagcacgctgaggagtgacgacaggggaa

SEQ ID NO: 53130 - DNA, 60 bp, Zea mays
gtcctcctcgggttagggttccttagggttttgtggaggggcgatggcggcggctgatgc

SEQ ID NO: 53131 - DNA, 274 bp, Zea mays
gcttgctatggatagaaagagcagagagaaggagatggcctcagtactcctttcttcattgagattagaattgttttcaactgatgacatcattgagggttttgtaatgctcttgcagtcagcagaagacactgcactcgacattgtggatgctcctagtgaacttgctaacttcctagctagggcagtgattgatgaagtattaattccgctcaatttggatgaactcagcattaagcttcggccgaacagcagtggcagccaaactgtccag

SEQ ID NO: 53132 - DNA, 271 bp, Zea mays
gaaaaggcagttgccgccatgattggtggattctgcagatctgttttcgagcaccttccctatgaattcgcacaggaggtggacgcactcatgaacctgaaactcgagggatcagttggctaatttgttggctcagcgatttcgtgtaatactccatgacagccagttagctagaaaatccatgtgtacagcagtacgagaagaataaattacaggataactatacatttcctggctggttgtaatactgaatgttgatgatgtctatggc

SEQ ID NO: 53133 - DNA, 281 bp, Zea mays
gaaaaggcagttgccgccatgattggtggattctgcagatctgttttcgagcaccttccctatgaattcgcacaggaggtggacgcactcatgaacctgaaactcgagggatcagttggctaatttgttggctcagcgatttcgtgtaatactccatgacagccagttagctagaaaatccatgtgtacagcagtacgagaagaataaattacaggataactatacatttcctggctggttgtaatactgaatgttgatgatgtctatggcaattggcaac

SEQ ID NO: 53134 - DNA, 317 bp, Zea mays
attcctgatatgattgcagattcaagcaaatacataaaattgcagaatgtttatcgtgagacagcaaagaaagatgctgctgctgtaggtaatcatgttgccaaattgcttcagtctgttggccaggcaccagagtccatttcagagatagaattaatactgctttgtagcaattctgcatttcttcgagtggtaagatgtcggtctttagctgaagagtatggtttgcatacagtcaacaaagatgacattatttctagcatggacaatccggataatgagatagtcctgtacctaatgttgcgggctgctgatcg

SEQ ID NO: 53135 - DNA, 296 bp, Zea mays
cctaggcggtcggctgtgtcaagatgaagctgaatatctccttccctgccactggctgtcagaaactcatagaagtggatgacgaacgcaagcttcgtacgttctatgagaagcgcatggccacagaagtagctgctgatgctcttggtgaagagtggaagggttatgtggcccggatcagcggtgggaatgacaaacaaggttttcccatgaagcaaggcgttttgacccatggcagagtgcgcctgcttttgagtaaggggcattcttgttatagacctaggagaactggagag

SEQ ID NO: 53136 - DNA, 280 bp, Zea mays
gccaactgacacccaaccatgccagcagacctcagcggtacctggaaccttctcagcagcgataacttcgagggctacatgctggccctgggtattgactttgcaactcgtaagatcgccaagttgctgaagccacagaaagtgattgagcaaaacggggactcctttagcatcaacacgtgcagcagcctgaggaactaccttcttaaattcaaggttggagaagaatttgtggaggacaacaaaggactggataacagaaaatgcatgagcacagtta

SEQ ID NO: 53137 - DNA, 283 bp, Zea mays
gagaaaggaagcagccatgcaagtgctaacgaaacgctaccccaagaattgcctgctgaaggtcatgtatcggtactcggctgtggtgcggaacatggagcaagtggtgatgatccccagccttctgagggatgtggagctgagtgggtacggaggctcggtccaggacggagcccccgatctctatacctacttcaccatgctcaagagcatctgtgtagaagtggaccacgggctgctgccgcgggaggaatggcaggccaaggtggcaggcaatgaaggc

SEQ ID NO: 53138 - DNA, 281 bp, Zea mays
cgccgactctgcaggtctgcgtggagccgcagttgcgggtctctgttccgcaggatggggttcgtgaaagttgtcaagaataaggcctactttaaaagataccaagtgagatttagaaggcggcgagagggtacaactgactactatgcacggaaacgattggtgatccaggacaaaaataagtacaacacaccgaaatacaggatgatagttcgtgtaacgaacagagacatcatctgccagattgcatatgcccgtatagaaggggatatgatcgtctg

SEQ ID NO: 53139 - DNA, 287 bp, Zea mays
gtctcagtcggttgtcgagttccttcggtcccggtcgtgcgtgcctcttgtcccacgcaagtccagcttgtaccatgccggtcaaaggaggtagcaagtgcatcaaatacctgctctttggatttaacttcatcttctggctcgccggcatcgcagtgcttgccattggactatggctgcggttcgactctcagaccaagagcatcttcgagcaagaaactaatcattccagcttctacacaggagtgtacattctgattggagcttgggcctcatgatgctagtgg

SEQ ID NO: 53140 - DNA, 284 bp, Zea mays
aacgccagcgccgcctcttgcttgctgagctccagccgaggagaagggggtaagtaaggaggtgctcataccatggctcgtacaaagcagactgcccgcaaatccactggtggtaaagcacccaggaaacaactggctacaaaagccgctcgcaagagtgcgccctctactggaggggtgaagaaacctcatcgttacaggcctggtactgtagcactccgagaaatcagacgctatcagaagtccactgaacttctgattcgcaagctcgcctttcagcgtct

SEQ ID NO: 53141 - DNA, 274 bp, Zea mays
gccaccatgggccgcgagtttgggaacctgacgcggatacggcatgcgatctcctacagcttgtcgccctttgagcagcgcgcgcttcccgcactagttcagcaaaggcatccccaacgtgctgcgccgcactcgcgagcgcatcctgcgcgtggcgccgccatgtgtactgttctatctgatctacacatggggcaaccaggagtttgcgcagtccaaacggaagaatccagctaagtacgagaatgacaagtgatcagcctgcacctggatg

SEQ ID NO: 53142 - DNA, 283 bp, Zea mays
ggccgactctgcaggtctgcgtggagccgcagttgcgggtctctgttccgcaggattgggttcgtgaaagttgtcaagaataaggcctactttaaaagataccaagtgagatttagaaggcggcgagagggtaaaactgactactatgcacggaaacgattggtgatccaggacaaaaataagtacaacacaccgaaatacaggatgatagttcgtgtaacgaacagagacatcatctgccagattgcatatgcccgtatagaaggggatatgatcgtctgtg

SEQ ID NO: 53143 - DNA, 280 bp, Zea mays
gctgctaggatcgcgacgggaactggaacccgaagtccccgcgcggtccgggcctcgcgccctgaggggaagagcggcccggcccagcgtgctggggtggagaccttgactcaggtcgcttccctagccatgacggacgggattctagggaaggcagccacaatggagattcccatccacggaaatggcgaggctgggcagcttcctgaagacgatgggctggagcaggacctccagcaggtgatggtgtcaggacccaacctcaatggaactagcattg

SEQ ID NO: 53144 - DNA, 279 bp, Zea mays
cgcgcggacgccagcagagctcgagctgctgcagctgctgccgacgccagagtaacctcgatccccgagctccggataccggtgcctcgccatggctgaccagctgaccgaagaacagattgcagagttcaaggaagccttctccctctttgacaaggatggagatggcaccattaccaccaaggagctggggactgtgatgagatcgctggggcaaaaccccactgaggcggaactgcaggacatgatcaatgaggtggatgctgatggcaatgggac

SEQ ID NO: 53145 - DNA, 279 bp, Zea mays
agacccttgaacaacctgcagcagccattgtatctgcactgcccaaagagcctgcaccgccaaaacagcctgaagagcccaagcagtctgcattgcgcgcccatgtgcctcctcagaagaacggggggttctgtgaggtgggcaagaagctggtcatctatttggagcataacctggagaaaaacagcaccaaggaggagatcctggctgcacttgagaagggctgcagcgtcctgccagacccttaccagaagcagtgtgatgaattggtggctgagt

SEQ ID NO: 53146 - DNA, 280 bp, Zea mays
ctaaccgactctacactcatctagccatcatggacatagccatccaccacccctggatccggcgtcccttctttcctttccactccccaagccgcctctttgaccagttcttcggagagcacctgttggagtctgacctcttctctacagccacttccctgagccccttctaccttcggccaccctccttcctgcgggcacctagctggattgacactgggctctcagagatgcgtatggagaaggacaggttctctgtgaacctggacgtgaagcactt

SEQ ID NO: 53147 - DNA, 280 bp, Zea mays
agcagccatgcaagtgctaacgaaacgctaccccaagaattgcctgctgaaggtcatggatcggtactcggctgtggtgcggaacatggagcaagtggtgatgatccccagccttctgacggatgtggagctgagtgggtacggaggctcggtccaggacggagcccccgatctctatacctacttcaccatgctcaagagcatctgtgtagaagtagaccacgggctgctgccgcgggatgaatggcaggccaaggtggcaggcaatgaaggcagtgag

SEQ ID NO: 53148 - DNA, 190 bp, Zea mays
tcttggactagtggaacccatcgcaggtgcagaccataatgggtgaaccccactgatccatgaggatcctagtaacagggggctctggactggtgggcagaggcatccagaaggtggtcgcagatagtgccgctggcctggagatgaatgggtgtttgactcctccaaagatgcagatctgacggatgca

SEQ ID NO: 53149 - DNA, 193 bp, Zea mays
gccatgcaagtgctaacgaaacgctaccccaagaattgcctgctgaaggtcatggatcggtactcggctgtggtgcggaacatggagcaagtggtgatgatccccagccttctgagggatgtagagctgagtgggtacggaggctcggtccatgacggagcccccgatctctatacctacttcaccatgctca

SEQ ID NO: 53150 - DNA, 275 bp, Zea mays
gccatgcaagtgctaacgaaacgctaccccaagaattgcctgctgaatgtcatggatcggtactcggctgtggtgcggaacatggagcaagtggtgatgatccccagccttctgagggatgtggagctgagtgggtacggaggctcggtccaggacggagcctccgatctctatacctacttcaccatgctcaagagcatctatgtagaagtggaccacgggctgctgccgcgggaggaatagcatgccaaggtggcaggcaatgaaggcagtga

SEQ ID NO: 53151 - DNA, 276 bp, Zea mays
cgttgctggcctcaggctcagacacctgctctactccaagcaaatggctgctcttccaatgctgtggaccgggctggtcctcttgggtctcttgggatttccacagaccccagcccagggccatgacacagtgcagcccaactttcaacaagacaagttcctggggcgctggtacagcgcgggcctcgcctccaattcaagctggttccgggagaagaaagagctactgtttatgtgccagacagtggtagctccctccacagaaggcggcctcaa

SEQ ID NO: 53152 - DNA, 276 bp, Zea mays
atgccagcagacctcagcggtacctggaaccttctcagcagcgataacttcgagggctacatgctggccctgggtattgactttgcaactcgtaagatcgccaagttgctgaagccacagatagtgagtgagcaatacggggactcctttagcatcaacacgtgcagcagactgaggaactaccttcttaaattcaacgttggagaagaatttatggaggacaacaaaagactggataacagaatatgcatgagcacagttacctgggagatcgac

SEQ ID NO: 53153 - DNA, 274 bp, Zea mays
agcgcagcatggctcgtggtcccaagaaacatctgaagcgcgtacgctccaaaacactggatgctggataagctgactggcgtgtttgctcctcgtccatccactggtccacacaaactgagggaatgcctgcctctgatcattttcctaaggaacagacttaagtatgccctgactggagatgaagtaaaaaagatttgcatgcagcgattcattaagattgatgggaaagtcaggaccgatataacctaccctgctgggtttatggatgtca

SEQ ID NO: 53154 - DNA, 274 bp, Zea mays
cagaaaggaagcagccatgcaagtgctaacgaaacgctaccccaagaattgcctgctgaaggtcatggatcggtactcggctgtggtgcggaacatggagcaagtggtgatgatccccagccttctgagggatgtggagctgagtgggtacggatcctcggtccaggacggagcccccgatctctatacctacttcaccatgctcaagagcatctgtgtagaagtagaccacgggctgctgccgcgggaggaatggcaggccaaggtggcaggc

SEQ ID NO: 53155 - DNA, 277 bp, Zea mays
gcggttagtcacgtttcgtgcgtgctcattctgccaagatgcctgaggaaacccagacccaagaccaaccaatggaggaagaggaggtcgaaacctttgcctttcaggcagaaattgcccagttaatgtccttgatcatcaacactttctactcgaacaaagagatctttctgagggagctcatttccaactcctcagacgctctggataagatcagatacgagagcttgaccgaccctagtaaactggactcggggaaggagctgcacattaatct

SEQ ID NO: 53156 - DNA, 235 bp, Zea mays
ggacaggaaactggagcgcccatcctgacagacgatgtcagcctgcaggtgttcatggatcatttgaagaagctggctgtgtccagtgcctcttaagctagtagcacagcctagaagtggaagaaaatgctgtcagattgtgctcacattgttgatagtgtcctagcatcattcacctttctgggagattctaataaataacccaaggctttttttatatgtatgtcttcaggta

SEQ ID NO: 53157 - DNA, 277 bp, Zea mays
cttccttgctttgcccacgttgctggcctcaggctcagacacctagctctactccaagcaaatggctgctcttccaatgctgtggaccgggctggtcctcttgggtctcttgggatttccacagaccccagcccagggccatgacacagtgcagcccaactttcaacaagacaagttcctggggcgctggtacagcgcgggcctcgcctccaattcaagctggttccgggagaagaaagagctactgtttatgtgccagacagtggtagctccctcc

SEQ ID NO: 53158 - DNA, 274 bp, Zea mays
gccagccatggggaagatcaccttctacgaggaccgaggcttccagggccgctgctatgagtgcagcagcgactgccccaacctgcagacctacttcagccgctgcaactccgtccgcgtggacagtggctgctggatgctctatgagcgccccaactaccagggccaccagtacttcctgcgacgcggggactaccctgactaccagcagtggctgggtttcagcgactacattcgctcctgccggctcatcccccatacaggttctcacagg

SEQ ID NO: 53159 - DNA, 275 bp, Zea mays
gaggagctgaaatactccccaaaaggggtgctctattctcggggtccggatgactacaaaatccccactgttaccgagataccagaggagttctacctcactatggtgcgctctcgaaaccccatagccatttattcatccaagggattgggtgaggctgggatgttcctggggtcctccgttctgtttgccatatatgatgcagtgaccactgcccgcaaggagagagggctgagcgacatcttccccttgaatagcccagcaacacctgaagt

SEQ ID NO: 53160 - DNA, 274 bp, Zea mays
cccatgcaagtgctaacgaaacgctaccccaagaattgcctgctgaaggtcatggagcggtactcggctgtggtgcggaacatggagcaagtggtgatgatccccagccttctgagggatgtggagctgagtgggtacggaggctcggtccaggacggagcccccgatctctatagctacttcaccatgctcaagagcatctgtgtagaagtagaccacgggctgctgccgcgggaggaatggcaggccaatgtggcaggcaatgaacgcagtg

SEQ ID NO: 53161 - DNA, 272 bp, Zea mays
ctggcgggtgctagcaatggagtcggttgctgcagagagcgctccagctccggagaatgaacactctcaagagaccccggaatcgaacagtagtgtgtacaccaccttcatgaagtctcatcgctgctatgacctgatccccacaagctccaagctggttggatttgatacttcgctgcaggtaaagaaagccttctttgccctggtgactaacggtgttcgtgctgcccctttgtgggatagtaagaagcagagctttgtgggcatgctga

SEQ ID NO: 53162 - DNA, 272 bp, Zea mays
cgacgatcctagttgtcatcatgggccgccgccccgcccggtgttatcgctattgtaagaacaagccatacccaaagtctcgtttctgtcgtggtgtccctgatgctaagatccgcatctttgacttgggacggaagaaagcaaaagtggatgaattcccactttgtggccacatggtgtcagatgaatatgaacaactctcttctgaagcactggaggctgcccgtatttgtgccaacaaatacatggtaaagagttgtggcaaggatggc

SEQ ID NO: 53163 - DNA, 276 bp, Zea mays
cccgacagagaggcaattctattccctaccaacatgaagctgttgctgctgctgctgtgtctgggcctgaccctggtctgtggccatgcagaagaagctagtttcgagagagggaacctcgatgtggacaagctcaatggggattggttttctattgtcgtggcctctgataaaagagaaaagatagaagagaacggcagcatgagagtttttgtgcagcacatcgatgtcttggagaattccttaggcttcacgttccgtattaaggataatgga

SEQ ID NO: 53164 - DNA, 278 bp, Zea mays
agcgacttgatctcgatgtctgaacaagagcttgtcgactgtgagagttcgtacaatcaggggtgcaatggaggtgtgatggactatgcacttgagttcatcatcaacaatggcggaatcgacaccgcctaggattacccttcaaggacacggacggacggtgctatgtgaacaggataaacgcgaaggttgtcactattggacagctacgaagatgtacgagggaacgatgagaagagctctgcagaaagcagttgcacaccagcctgtcagtgtcg

SEQ ID NO: 53165 - DNA, 287 bp, Zea mays
cgacgacggaacggaccacgaaaagatagccagcagcgagagccagcgaggctaccttgctcccgagtacgccgccatgtccggcaaaccaactgcaggcctcgatgtatacagcttcgggatcatactgctggagcttgcgagcggagaaggccagtcgagaagtcgggttctggcaaggcttgtggaatccgaagctgggtgctcccgctcgcaaggcagggcaggtacgacgagattgcggactcaaagctgggcgacaagttctctggacctgagctgagaag

SEQ ID NO: 53166 - DNA, 281 bp, Zea mays
gcggcggagacggaggcgaaggaggaggagcagcagcagcaggcggcgccgaggagcggcatcccactcagtgcttgcaaccatggctaggggattgaagaagcacttgaagaggctcaatgcgcccaagcattggatgctcacaagcttggcggagcttttgctcccaagccatcttctggacctcacaagtccagggagtgccttcctctgatcctcatcatcaggaacaggctcaagtatgctctgaactaccgtgaggtcatttctatcctgatgca

SEQ ID NO: 53167 - DNA, 277 bp, Zea mays
ggttcgcgggtgcggtcggttcggcgcttactgctcgcgggatcctgcgaggtgtctattggactcggcggaagtggagttcagctacgatgccgacaccggcctcgtgtccgtcgatctgcccgtgccggagcaggagcttatcggtggacgctggagattatggtctaggccgtgacgctgtgcgctgacgccattctgagccggacgacattgtcatttgctatgtgcacgagagatagatgtattgtggtgttgttgtataattggtatggag

SEQ ID NO: 53168 - DNA, 276 bp, Zea mays
ttcgaattttaccaagacataagaaatttgagggtgctggaaagaaggctacaatctttgctaacagaatgtggctcgattatgctgatgcggcagctattagcaagggtgaggaagtaacccttatggctcgggggaagctattgttaaagagatcaaggtggagagtggagtaattactgaactagttggagaactgcatcttgaggggtctgtgaaaacaacaaaattgaagatcacatggctagcagatatagaggagctagttcccctttc

SEQ ID NO: 53169 - DNA, 277 bp, Zea mays
gaaaaagaacattttcaagttagctcaaggagaatacatagctccagagaagattgagaatgtctatgctaagtgcaagttcattgctcaatgctttatatatggtaatattcatgctttcatctgagctgaaagcacctcgtgtacatcttaaggttgttgatctggatgcaggtgatagtttcaactcttccctagttgccattgtagcagtcgaaccggatgtgttgaaggcttgggctgcatcagaaggaatccagtacgaggacttgagaca

SEQ ID NO: 53170 - DNA, 279 bp, Zea mays
ctcgtcaagcgcgggctggccgtgcgcggggaggactgggagctggagctcaccatcaaggactacccctacgcccacgacgggctcctggtgtgggactccatcaagcagtgggcgtccgagtacgtcaacgtctactaaactccgacgaggccgtggccgccgaccccgagctgagggcgttctgggacgaggtgcgcaacgtggggcactgcgacaagaaggacgagccgtggtggcccgtgctggacacccgcgacagcctggtggagacgctga

SEQ ID NO: 53171 - DNA, 283 bp, Zea mays
atccattgatcgtttttgtgaaccacctgaagaaggtctaatgtgtgaattactatggagtgaccctcagcctcagcttggaagatgtccaagtaaacgtggtgttgctctttcctttggcgcagatgtgactaagaagtttttcaggaaaataacctggatcttattgtccggtctcatgaagtaaaggatgaaggccatgaaattgaacatgatggaaagcttataacagtcttctctgcgcctaattactgtgaccagatgggcaacaagggtgcattta

SEQ ID NO: 53172 - DNA, 280 bp, Zea mays
ttcgaattttaccaagacataagaaatttgagggtgctggaaagaaggctacaacctttgccaacagaatttggctcgattatgctgatgcggcactattagcaagggtgaggaagtaacccttatggattgggggaatgcattgttaaagagatcaaggtggagagtggagtaattactgaactagttggagaactgcatcttgaggggtctgtgaaaacaacaaaattgaagatcacatggctagcagatatagaggagctagttcccctttcattgg

SEQ ID NO: 53173 - DNA, 260 bp, Zea mays
tctcgagccgattcggctcgaggtgccaattgctattggtgctaccggattggcccctggtttaagattccgaaatgatgttccaaccggcgggcttgccaacgttgctgcaacactgacgaatcttcatggattcgagctcccagcgactatgagacaactctcgtagaagtggttgataactaggaaccaatagatgaatttttataatttgaaaaacaaacagggaaagctgtagattgcagcccccaaaataattg

SEQ ID NO: 53174 - DNA, 274 bp, Zea mays
ttgggttaggaacaggtgatgttctacccaggttggttaaggattaatgcgtatgtaggcgtgctgaccgaggaccctttaactggtcacatgcctcgtcatgggtaagccttgcctcgggcagactaaggccagaatagataacacgaaatgggcgtggagcggtggcgagagtagcgtgtaccctccgtggcaagaggctggacggtggtgtatctgtgctctcggtttgcgtgaacttgatctggtcttaagaacccggtggcgggttgac

SEQ ID NO: 53175 - DNA, 281 bp, Zea mays
gcggcggcgcgggcggacaaggagcaggcggaggaggagttgtgccaagccacaatgggtatctcgcgtgactcgatgcacaagcgccgagccaccggtggaaagcagaaggcctggaggaagaagcgaaagtatgagcttgtcgccagccagccaacaccaagttgtcaagcaataagacagtgaggagggtccgtgttcgtggaggtaatgtgaaatggagggctcttcgccttgatactggtaactactcatggggaagtgaagctgttacccgcaag

SEQ ID NO: 53176 - DNA, 271 bp, Zea mays
ataaaaagctgcgccggttactctgtcattacatacatattgggggttggagacaggcatctggataatcttcttctaactgatgatggacgcctttttcatgttgactttgcttttatccttgggcgagacccaagccatttccgccaccgatgaagttgtgtaaggaaatggttgaggccatgggtggtgcagaaagccaatattacacaaggttcaagtcctactgctgcgaagatacaacattctgaggaatccagcagtctcattt

SEQ ID NO: 53177 - DNA, 276 bp, Zea mays
tctggggcaaagccagtctcaaatcccaggggccaaaggaggagtgggagatcgaccttgcaaagctggagatccgctatgtcatcgctcaggggacgtatggcacggtctaccggggcacctacgatggacaggacgcgcagtgaagcttttggattggggagaagatggttttgccacagaggctgaaactgctgctttacgaacatcatttaagacggaggttgctgtttggcataagctcagctcacctaatgttacaaagtttgttggtgc

SEQ ID NO: 53178 - DNA, 192 bp, Zea mays
cacactcgtagagagaaggaaaaatatcgccaaaccctagatcccgatctcgatggcgaaccctcgcgtcttcttcgacatgaccgtcggcggcgccccggcaggccggatcgtgatggagctgtacgccaacgagtgcccaagaccgcggagaacttccgcgcgctgtgcacgggcgagaagggcgtgggc

SEQ ID NO: 53179 - DNA, 271 bp, Zea mays
ccaggacaaggagggcatcccaccggaccagcagcgcctcatcttcgccgacaagcagctggaggatggccgcaccctggcggattacaacatccataaggagagcactctccacctggtgctccgcctcaggggggcatgcagatttttgtgaagacattgactggcaagactatcaccttggaggtggagagctctgacaccattgacaatgtgaaggccaagatccaggacaaggagggcattcccccagaccagcagcgtctgatct

SEQ ID NO: 53180 - DNA, 148 bp, Zea mays
tgcaaatgtgaccagcaatgtcaaaaactgcacactgtgtctgtgtgcgaacttgtgaaattgacattgagttcaattagctagttggctcgagatttcagttttcatctccatttagaggtaaaaaaaaaagataaaaaaaggggga

SEQ ID NO: 53181 - DNA, 131 bp, Zea mays
gaaaaaagggatcaaggtgttacctgatggtcgggttactaagattcctcaagggatggtgacggaccaatttggaatgattggtctgttaagatatatcagggcagcagagacagacccaggaatggtac

SEQ ID NO: 53182 - DNA, 272 bp, Zea mays
gcgagcgagcgagccaccgcccgagagagagagagagggagagtgagagtggggattcaagtttcaaactcactatcgaggggggataggaaggtggtcactcatcggtccacagctagctcgtcgccccccatggctactggggccccgtggtgatcgcgacggtgctgttcgtgctgctcacgccgggcctgctgttccagctgccggcgcacggccgaatcgtcggcttcggcaccatgcacaccagcggcctcgccatcctcgtccac

SEQ ID NO: 53183 - DNA, 272 bp, Zea mays
tgcaatcacaacgaacagaagctctcgatctcaccgacaccgaggaagaagagatcaatggcgtccgagcagggagtcgtgatcgcgtgccacagcaaggctgagttcgacgcccacatgaccaaggcccaggaaccggcaagctggtggtcatcgacttcactgccgcctggtgcggtccatgccgcgccatcgccctactgttcgtcgaacacgccaagaagttcactcaggtcgtcttcctgaaggtggacgtggacgaagtgaaggaa

SEQ ID NO: 53184 - DNA, 268 bp, Zea mays
tctcgtttcttcctgtgagcgacagtaggtggagctgcgccgctctcaccttcaccggcgacgggcattcacaagtagtgatctcttgactaacggcgtagtggtgactaaagagccttgacaatgagcagctaggcacaggttatgatctgtctgtcaccaccttctctcctgatggccgcgtctttcaggtcgagtatgccacaaaagctgtcgacaacagcgggactgttgttgggatcaagtgcaaagatggcattgttctggg

SEQ ID NO: 53185 - DNA, 271 bp, Zea mays
ggagtttttaagcttgaactctttttacctgaggaatatccaatggctgccccaaaggttaggtttctgacaaagatttatcatcccaacatcgacaagcttggtaggatatgcctcgacattctcaaggacaatggagcccagcacttcagattcgaacagttcttttgagtatacaggctctactgagtgcgccaaatccagacgaccctctttcggataacattgcaaagcactggaaagccaatgaagtagaagctgtcgaaacagc

SEQ ID NO: 53186 - DNA, 274 bp, Zea mays
atccagatgaggactaacctgaaggtggtcgataactccggggccaagcgggtgatgtgcatccagtccctgagggggaagaaaggagcaaggctcggggacatgatcatcggatccgtaaaggaggcccagcctgtggcaaggtcaagaaaggagacgtagtctacggcgtggtcgtccgtgccgccatgaagaaaggacgcagcgatggcagcgaggtccagttcgacgacaacgcggtggtcctcgtgaacaagaagggcgagctgatcgg

SEQ ID NO: 53187 - DNA, 284 bp, Zea mays
  unsure (1)..(284): unsure at all n locations
ccctccagcgcctccaccttcctcgccgcctcactccctctgcagaggtcgcagatccgtccggttagacgaagccgcccgcacccatggcctccggtgagctcgcctgcacctacgccgccctcatcctcagcgacgacggcatcgccatcacgccgagaagatcgccaccatcgtgaaggcggccaacatcaaggtcgagtcctactggccggcgctcttcgctaagctcctggagaagcgcagtntcgaggatctaatcctctccgtgggatctggtggtg

SEQ ID NO: 53188 - DNA, 141 bp, Zea mays
gaatgcaatgaggctccatcataggcaggcttataggtttgtagtatcgttaggacgggcatcttactataacaatataagacacattttgtatatataacacatgtgcatatataagttatcgagatattatatgtttct

SEQ ID NO: 53189 - DNA, 274 bp, Zea mays
cgtgcttgccggcgtttcgcgtacagggaagacgccactgtcgatatacctagctcaaaagggatacaaggtggcaaatgtcccaatcgtgatgggagtggaccttccaaagtccctttttgagatcaaccaggacaaggtttttggactacaataaacccagcgatccttcaggcgattagaaagaccagggccaagactctaggttttgatgggcgtcagagcaattacgctgagatggaccatgtgaggcaggagctggtccatgcgaatc

SEQ ID NO: 53190 - DNA, 279 bp, Zea mays
caccccccaagtctgcaacttcaagttttctcgggactgccacaattctcgtggccagcaagggatgtgcgtcgtcggggctatcaacaactacacggaccagctctacagctacggccagaagacttcgtataacctgacggagagccgatgttcctggcacacttcgtcggcgacgtccaccagccgctgcacgtaggcttcgaagatgacgagggcggtaacaccatcaccgtccactggtaccggaggtaagcaaacctccatcacgtgtgggat

SEQ ID NO: 53191 - DNA, 273 bp, Zea mays
gtcgcggcgggcagtggcggcagtatgttggctaccagggtatttagcctagttggcaagcgagcaatttccacctctgtgtgtgtcacgagctcatgaaagtgttgtgaagagcgaagacttttcgctcccagcttatatggatcggcggaccaccccttgcgagaggtggcccatgtcaagcacctgtctgccagccagaaggcactgaaggcgaaggagaaggcctcctggagcagcctctccatggatgagaaagtcgagttgtatcgc

SEQ ID NO: 53192 - DNA, 276 bp, Zea mays
ctcagctccgccgcttgcccgcttttgctctctccctcccggctctcggcttcttctacacgctaccgtctcacagccgtaaacgcccctcccggatcccgctagttcgccaccgccgcccgccagcccgccgttcgcctcatcatggcgcctcgtcgaccgccacctccgtccacgacttcatcgtcaaggatgcgagcggcaaagacgttgacctcagcacctacaaggggaaggttcttctcattgttaacgtcgcatcccagtgtggcttaa

SEQ ID NO: 53193 - DNA, 278 bp, Zea mays
gaaagatcgtttcaggccctcgaaggtgtagctatggaactggaggactcgctgtatccactgctgagggaagtcagcattggcatagatccttacgtagtctttcaagatgtagattgggcccttcttattggcgctaagccccgaggtccggcatggagcgagctgcgctactggatatcaatggccaaatctttgctgaccaggggaaagcacttaatgcggtcgcctcgcggaacgcaaagtcttagttgttggaaatccctgtaacactaatg

SEQ ID NO: 53194 - DNA, 277 bp, Zea mays
ggatgggcaaggcaggacggtggacttcaggaacactgtgatcatcatgacatcgaacctcggcgccgagcacctcctcgctgggatggtgggcaagaactccatgaaggtcgctcgcgatctggtcatgcaggaggtgaggaggcactccgccctgggctgctgaaccgtctcgacgagatcgtgatcttcgatcctctgtcccacgagcagctgaggaaggtcgctcgccttcagatgaaggatgtggccgtccgtcttgccgaaaggggcatcg

SEQ ID NO: 53195 - DNA, 275 bp, Zea mays
tgctgttcttgtttccccgctctccaagatgtcgtccccgagcaagcgccgcgagatggaccttatgaagctgatgatgagcgactacaaggtcgagatggtgaacgatgggatgcaggaattcttcgtcgaattcaaggggccggcgaaagtatctaccaaggcggtgtctggaaggttagggtagaactgcctgatgcatatccttacaaatccccgtccatcggcttcatcaacaagatttatcacccaaatgtcgatgagatgtctggctc

SEQ ID NO: 53196 - DNA, 276 bp, Zea mays
  unsure (1)..(276): unsure at all n locations
cgtggagtcccccagatagaggtgacctttgacattgatgctaatggtatnctgagcgtgacagccactgacaggagcacaggtaaggctaacaagatcaccatcaccaatgacaagggccggctgagcaaggaggaggtggagaggtggttcatgaagccgagcagtacaaggctgaggatgaggcccagagggacagagtggctgccaaaaactcgctggaggcccatgtcttccatgtgaaaggttctttgcaagaggaaagccttagggaca

SEQ ID NO: 53197 - DNA, 271 bp, Zea mays
ctcgagccgctctgccctagcaccagccatggcgagcgcagcttcttctctgtttccacactcgccgcctccgcgccgctaatcgtcgccacggccaagaaatccggggacgtgtcggagctccagatcggcgtcaagtacaagccgaatcatgcagcattcaagctcacaaaggtgacaaggttaaagttcactaccgtggaaaacttactgatggaacggtttttgattcaagctatgaaagaggtgacccgattgaatttgaattggg

SEQ ID NO: 53198 - DNA, 278 bp, Zea mays
gccaagtacacccagggtttcagcggagagatatcaccgagatctgccagcgtgcgtgcaagtatgccatcagggagaacatcgagaaggacatcgagcgggagaggcgcaggaaggacaacccagaggccatggaggaagacgaggggacgacattgccgagatcatggctgcccacttcgaggagtccatgaagtacgcccgccgcagtgtcagtgatgccgacatccgcaagtaccaggccttcgcccagacactccagcagtcccgtgggtttg

SEQ ID NO: 53199 - DNA, 272 bp, Zea mays
gacaggtgcaagccccactgcctgggctgtttggacgagggcatggactgctgaggagaacaggcatggtgatctgctcaacaagtatatgtacctcactgggagggtggatatgaggcagattgagaagacaattcagtatctattggctctggaatggatcctaggactgagaataatccttatcttggtttcatctacacctccttccaagagcgggcgaccttcatctcacacgggaacactgctcgtcacgccaaggactttggcga

SEQ ID NO: 53200 - DNA, 274 bp, Zea mays
catcaacaacgcaccggcaagcatcagcggatcatcatcaagcagatcgaacgaaccccaagacacaaccggccgtcgactagcgcatctccaacgactgaaacaatggcgcaccacttcctgggcaacaagcaccatggaggaaggcggccaaggtgaccgactggcgcaaggaggagaagcaccacaagcacatggagcagctcggccagctcggcgccgtagctgcaggagcctacgctatgcacgagaagcagaaggcgaagaaggaccc

SEQ ID NO: 53201 - DNA, 270 bp, Zea mays
gcaagagcatcaaccccgacgaggctgtggcgtacggcgccgctgtccaggctgccatcctcagcggcgagggcaacgaaaaggtacaagatctgctcctgctcgacgtcacgccactgtctctcggcctggagactgcaggtgggtcatgacggtgctgatcccgaggaacaccaccatcccgaccaagaaggagcaggtcttctccacgtactccgacaaccagccgggcgtcctgatccaggtgtacgagggtgagcgcgcgaggac

SEQ ID NO: 53202 - DNA, 272 bp, Zea mays
gtcgtctgtaatgacgaagtagtagtcagctgccataacatggttctgaagcacactgaccctactgcgcatgctgaagtaactgcaattagagaggcttgcaaaaagcttgggaaaattgagctctcagactgcgaaatttcgcgtcctgcgagccatgcccaatgtgctttggtgcagttcatctctcccgaatcaagaggctggtttatggggccaaggcagaggctgccatcgccattggatttgatgacttcattgcagatgctctg

SEQ ID NO: 53203 - DNA, 273 bp, Zea mays
  unsure (1)..(273): unsure at all n locations
cgacatgtgggcaggatggtgtgtgaaggtcatctgcgaccacctgagcctgggagtcaagactggcctgccatacatctggcacagcaaggctagcaaccccttcgttaacttgaagaaggaatacaagggcatcttctggaggaggacatcatccccttcttccagaacgtgaccatccccaaggactgcgacaccgtccaaaagtgctacatctacctctctggacaagtgaaggagaagctgggcacgattgacncctactttgtcaag

SEQ ID NO: 53204 - DNA, 272 bp, Zea mays
gagaagacaaaagctgagaacaaggctgctaagaaagtatccgctattctttcatgggaaaacacaaagaaagcaaacatagaagctgaactgaagaagattgaggaacaactggaaaagaagaaggctgaatatgcagagagatgaagaacaaggttgcaatgatacacaaggaagccgaagagaagcgagcgatggtggaggcaaaacgcggtgaggaggtcctgaaggccgaggagatggctgccaagtaccgggccaccggccacgct

SEQ ID NO: 53205 - DNA, 270 bp, Zea mays
gcggcggggacgcggtcgccgtcggctttcgtacaaaacgccatctactccaaccgcatcaccatcttctccaagacttactgcccctactccatgcgtgctaagcacatatttcgagaccttaaggaagatccatatgtgttgaactagatacccgagtggatgggcgtgacattcaaagtgttctcctggacctagttgggcgtcgtactgtgccacaggtgtttgtcaatggacagcatattggtggctcagacgatacagtaaatg

SEQ ID NO: 53206 - DNA, 268 bp, Zea mays
cggtgtggctgtgccgttggtcctgtgcggtcacttagccaagatgcctgaggaaacccagacccaagaccaaccgatggaggaggaggaggttgagacgttcgcctttcaggcagaaattgcccagttgatgtcattgtcatcaatactttctactcgaacaaagagatactttctgagagagctcatttcaaattcatcagatgcattggacaaaatccggtatgaaagcttgacagatcccagtaaattagactctgggaaagag

SEQ ID NO: 53207 - DNA, 262 bp, Zea mays
gctgcgctggatttgccttcaaaacctgagaaaattgcaatagtgggaggtgggtatattgctttggagtttgctggcattttcaatggcttaaagagtgaagtccatgtgtttattcgtcagaagaaagttttaagagatttgatgaagaggttagagattttgtcgctgaacaaatgtctttaaggggcatcacgtttcatacagaacagagccctcaagctataactaaatcaaatgatggtctgttatctttgaagac

SEQ ID NO: 53208 - DNA, 262 bp, Zea mays
ctcggaactggacaccctgagcgaggagtcctacaaggacagcactttgatcatgcagctccttcgtgataacttgaccctatggacctctgacatctcggaggaccctgctgaagagattagggaggcgcccaagcgggctcgagtgaggggcagtaaagccggctttatgtgcctagaaactagtagctagtgtttgctgctgtcgaatgacactatgcaatgtgatctggaacctggtttcttgggtgcgagcttgtag

SEQ ID NO: 53209 - DNA, 271 bp, Zea mays
ggcactccgactgctcgtccgcgcgacgcggtaggggacttaggtacctttgggaggatgcagatgcagaaacccttcgaggacgccacatatgccctcaaggttggtgagctcagcgacatcgtggacactgacagtgggttcacatcatcctggggactgcctgaggaggggatcacactgtcctctcaggctttcagttagtgcttatggcgttctgttagaacctgtatttgtattcctgctgggagcctgagttccattccgtgca

SEQ ID NO: 53210 - DNA, 267 bp, Zea mays
agcttgcttagctagccgccatggcctccctcgccgccgtctccgtgaagcccgtggccatcaagggtctcgccggcagctccatctccggaaggaagctcgccgtcgccaggccgtcggcccgctccatccgcaggcccgcgctccgccgtggtggccaagtacggcgacaagagcgtctactttgacctcgacgacatcggcaacaccaccggacagtgggacctctacggctctgacgcgccctcgccctacaacccgctacag

SEQ ID NO: 53211 - DNA, 268 bp, Zea mays
ggatcagcaagcaggagtacgacgagtcgggcccctccatcgtccaccgcaaatgcttctaaacggactcagcagatgcgtacatttgctgcatgggttaattgagaatagaaatttgcccctggcaaatgcacacacctcatgctagcctcacgaaactggaataagccttcgaaaagaaattgtccttgaagcttgtatctgatatcagcactggattgtagaacttgttgctgattttgcacttgtattgaagttaactgttccc

SEQ ID NO: 53212 - DNA, 284 bp, Zea mays
gtcagacatttagagaaaggaagagttgtcatatttgctgctggaacagggaacccattcttcacgactgatacagctgctgctctccgttgtgccgaaatcaatgcagaggtagtgctgaaagcaacaaatgttgatggtgtgtatgatgcggaccccaggcagaatccaaatgcccgccttctggagactgtgagctatcatgaagttacgacaagagatctctcagtaatggatatgactgctattacactatgccaagaaaacaacattcccattgtcgt

SEQ ID NO: 53213 - DNA, 283 bp, Zea mays
cttttgcatgaagtgtccaggtgcaagatggtaccgtactattcctttttttgtgtgtgtgttgatgagacatcgtaatctcttatatgctttgcattatgtaatgttttctctaaatgttacagtccaacgggatcaaagttggctacgctgttcccaactcatctggaggtggtgctggctcgtcctctcaggctggtggctgctgcagttgagtggtggcagcaagtcatacaaatgcacaaggttctccctgcagtatcttgatgtttgcctatagctg

SEQ ID NO: 53214 - DNA, 282 bp, Zea mays
caacaccttcgaagggcgtcccatttacgtgctgaagttcagcacggggggcagtaagcgtccagccatctggatcgacacgggcatccattcccgggagtgggtcacccaggccagtggggtctggtttgcaaagaagatcactcaagactacgggcaggatgcagctttcaccgccattctcgacaccttggacatcttcctggagatcgtcaccaaccctgatggctttgccttcacgcacagcacgaatcgcatgtggcgcaagactcggtcccacac

SEQ ID NO: 53215 - DNA, 282 bp, Zea mays
ctcccctcttccatagcatagcagagctcgcgcacggcgcaccgcacacctcactgccgctcccttctcgtctcctctcctctcctctcctcggcggatccggcaccgacccaccgcccctctgctcgctccttccgccggaatcgctgctcctctctgtgctgtcgatttgtgcggcgactgttagtttggttcggtcccatccttctgttgatcaatggctgacggtgaggatatccagccacttgtgtgtgacaatggcactggaatggtcaaggctgg

SEQ ID NO: 53216 - DNA, 283 bp, Zea mays
gtgagaagactgcttacattcagccatttgacatggaaacactaggacaagcatttcagctgcgagaaactgcaccagtagacttgccttctgctgaaaaaggtacaccaaccatatctgggaaatccaaggtcaagtccaaggataaagtgaagaaacataagaaacacaaagagaaagatagagacaaggagaaggagcagaagaaacacaaacatcggcataaagatcggagtaaagataaagataaagataaggacaaagacaaagaaaagaaaaagga

SEQ ID NO: 53217 - DNA, 275 bp, Zea mays
ctccggtaaccacacggaggccgcccgcgtcttccagacattcacagacgcccatggcgtcaagcccaacactgagaccttcaatgccatcatcaaatcattcgccgagtctggcaccataaggtccttttactcggttttcgatgaaatgtgcaagaagggcttgaagcccaactccatcacatttaccactgcgctcgctggtttctacaaggaggagaagttcgatgacatcaagaaggtattagagctcatgaagaagaatggatgtggtg

SEQ ID NO: 53218 - DNA, 258 bp, Zea mays
agcacgaggagcggcaggacgagcatggctacatctcccggtgcttcacgcggaaatacacgctgccccccggtgtggaccccacccaagtttcctcctccctgtcccctgagggcacactgaccgtggaggcccccatgcccaagctagccacgcagtccaacgagatcaccatcccagtcaccttcgagtcgcgggcccagcttgggggcccagaagctgcaaaatccgatgagactgccgccaagtaaagcctta

SEQ ID NO: 53219 - DNA, 260 bp, Zea mays
gttggccccaagtaacttacctgccttggaatactgtatctcaaaacctaaatcgaaaaaagaagtgtatcaaggattgctacagagacatccatctggcttgagctggcttttgctatggcaaacacaagtgcagggatcgctgggtgttgcaccgtgtctgcattatctgtggttacattctggaccctgtattttctatggttttatgccccctactgtttagtattaattatcaataaatttgtttgggacggttg

SEQ ID NO: 53220 - DNA, 282 bp, Zea mays
ccacgctcgaagctcctcccgaaccggccgcatcgccgccatggcagccgccgctcctgcaagctccgtgaaggaagtgctgccgtctcccctgacctccgcctccgagccccctccccttttcgatggcaccaccaggttgtacgtggcctatctttgcccgttcgcgcagcgcgcttggattgctagaaactacaagggtctgcaggacaagattaagatagttgccatcgatctcgctgacaggccagcgtggtacaaggagaaggtttatccagaaaa

SEQ ID NO: 53221 - DNA, 274 bp, Zea mays
ctgaccacctgaggcaagtttttggcaagcagatgggcttgagcgatcaggacattgttgccctctctggtggccacaccttgggaaggtgccacaaagagcggtctggtttcgagggggcctggactacaaaccctttggtctttgacaactcttacttcaaggaacttctgagtggtgataaggagggccttcttcagctcccaagtgacaaagccctgctgagcgaccctgttttccgccctcttgtcgagaaatatgctgcggatgagaa

SEQ ID NO: 53222 - DNA, 272 bp, Zea mays
caggataagaacgtgccatatgtgtttgttccatcgaagcaagctcttggccgtgcttgtggtgtgacaagaccggttattgcttgctcagtgaccagtaatgagggtagccagctgaaactacagatacagggtctcaaggactccattgagacgcttctcatctgatctgccgaagacctctcagtgtcatgggcctcatcgacgacttttgtcagaggcttggactggtgaaggtgtcttgtatactttgcgcttttcaaactatattt

SEQ ID NO: 53223 - DNA, 276 bp, Zea mays
gaggataagaacgtgccatatgtgtttgttccatcgaagcaagctcttggccgtgcttgtggtgtgacaagaccggttattgcttgctcagtgaccagtaatgagggtagccagctgaaactacagatacagggtctcaaggactccattgagaagcttctcatctgatctgccgaagacctttcagtgtgatgggcctcatcgacacttttttcagaggcttggactggtgatggtgtcttgtttactttgcgcttttcaaactatatttgaaca

SEQ ID NO: 53224 - DNA, 278 bp, Zea mays
cgccgtcgccgcctcctctccccagcacccggagctcgaccgaacgccgctcaccatgatcatccccaagaagaaccgcaatgagatctgcaagtacctcttcaaggagggcgtgctgtatgccaagaaggactacaacctggcgaacacccgcagatcgatgtgcccaacctccaggtgatcaagctcatgcagagctttaagtccaaggagtatgttagggagaccttctcctggcagtactactactggtatctcaccaacgatggcattgagca

SEQ ID NO: 53225 - DNA, 277 bp, Zea mays
gtcagggacaagatggtgccactggtgcaggtctctccgctcatcaagctcggccgctactccgccctgttcctcggtgtggcctacggagcctcgcgctacaattacctaaaacctcgggcagaagaggagaggaggatagcagcagaagagaagaagaagcaggatgaactgaaacggattgccagagaattggcagaagatgacagcatattaaagtgagtgaccctgcgacccactctttggaccagcagcggatgaataaagcttcctgtgt

SEQ ID NO: 53226 - DNA, 278 bp, Zea mays
gagaagacaaaagctgagaacaaggctgctaagaaagtatccgctattctttcatgggaaaacacaaagaaagcaaacatagaagctgaactgaagaagattgaggaacaactggaaaagaagaaggctgaatatgacgagaagatgaagaacaaggttgcaatgatacacaaggaagccgaagagaagcgagcgatggtggaggcaaaacgcggtgaggaggtcctgaaggccgaggagatggctgccaagtaccgggccacggccacgctcctaag

SEQ ID NO: 53227 - DNA, 277 bp, Zea mays
ttgggttaggaacaggtgatgttctacccaggttggttaaggattaatgcgtatgtaggcgtgctgaccgaggaccctttaactggtcacatgcctcgtcatgggtaagccttgcctcgggcagactaaggccagaataagataacacgaaatgggcgtggagcggtggcgagagtagcgtgtaccctccgtggcaagaggctggacggtggtgtatctgtgctctcggtttgcgtgaacttgatctggtcttaagaaccccggtggcgggttgaca

SEQ ID NO: 53228 - DNA, 277 bp, Zea mays
ttcgcctttgctttcctcgtctacagacaccagatcatcaacgtgtacaatcaggagtacgagagtgctgctgcgttctggcctcaggtgcactcccggataatagctagcctactcatctctcatgtaactctgtttgggttgatgagcacaaaggaagctgcgtactccacccctctgctcatcttcctgcctctgctgacgatctggttccacaaatactgcaagaggcggttcgaaccagctttcagaaagtatcctcttgaggaagcaatgg

SEQ ID NO: 53229 - DNA, 272 bp, Zea mays
gggtgatcgtcaagaacgaccgggcaagagcctctcatgggtccaagacgaagatatcggaagtgatgacatctccagctatcacactatcgtctgacaaaaccgtgatggatgctgctgttctcatgctcaagaagaagatccacagattaccagttgtaaaccaggacgaaaaagtaataggtatagttacccgcgctgatgttcttcgcgtgttggaaggcatgttgaagatttaggagcgcagatacccatgctcggaagccacagcc

SEQ ID NO: 53230 - DNA, 270 bp, Zea mays
gtggggtgagtggtacccaacgggccggtggcgccgcgtccgcaggatagaggcgcggggtgcaggcttgtaaacatataacatacaaatggcttccagaagagctctggtcatcctggctaaaggagcagaggaaatggagacggtcatccctgtagatgtcatgaggcgagctgggattaaggtcaccgttgcaggcctggctggaaaagacccagtacagtgtagccgtgatgtggtcatttgtcctgatgccagccttgaagatgc

SEQ ID NO: 53231 - DNA, 273 bp, Zea mays
  unsure (1)..(273): unsure at all n locations
gagccgccttgctccgaaccttcagctttttgggctttgagattgtgagaccggggcatcccgttgtcccngagagacccgacgcttgcttcatggcctacacgttcgagagagagtcagcgggagaggaggaggagtagggccgcctcggggctgggcatccggcccctggggccaccccttgtcagccgggtgggtaggaatacgtagattgctcatctcgcctgggtttgtccgcatgttgtaatcgtgcaaataaacgctcactccgaa

SEQ ID NO: 53232 - DNA, 274 bp, Zea mays
ctccgctccccctcagtcctcagttcctcacctagcggtagcgtgcgcgcgggagacgtagatggcggcttcggaggcggcagcggcggcggcaacaccggtgacgccgacagaggggacggtgatcgcgatccacagcctggaggagtggagcatccagatcgaggaggccaacagcgccaagaagctggtggtgattgacttcactgcaacatggtgtcctccgtgccgcgccatggctccaatttttgctgatatggccaagaagtcccca

SEQ ID NO: 53233 - DNA, 272 bp, Zea mays
gacgaaggtaaacggcggagagatcgaaggagcggtgaagaggggttaccttaagacggacgaggagttcctcaagagggacgagagcgggggcgcgtgctgcgtcacagccgtcctccaaaagggtggactggtcgtctccaacgctggagactgccgtgcggtgctcagccgagcagggaaggccgaggcgctcacctctgaccaccgggcgtccagggaggacgagaaggaaaggattgagaatctgggtggatttgtggtgaattacc

SEQ ID NO: 53234 - DNA, 275 bp, Zea mays
gacgaaggtaaacggcggagagttcgaaggagcggtgaagaggggttacctcaagacggacgaggagttcctcaagagggacgagatcgggggcgcgtgctgcgtcacagccgtcctccaaaatggtggactggtcgtctccaacgctggagactgccgtgcggtgctcagccgagcagggaaggcagaggcgctcacctctgaccaccgggcgtccagggaggacgagaatgaaaggattgagaatttgggtggatttgtggtgaattaccgtg

SEQ ID NO: 53235 - DNA, 276 bp, Zea mays
accaatcatagcagtggctgatgaagggtggcacattttaatgaataagtcagatgtacttctgttaggcaaccacggttacgataatgcgttacagatatgcatccaatatttttagcccatggtcctgccttcagatagaatttctcaaaagaagccatgaactccacagatttgtacccactactatgccacctcctcaatatcactgccatgccacacaatggatcatcctggaatgtccaggatctgctcaattcagcaatgccaagggtg

SEQ ID NO: 53236 - DNA, 140 bp, Zea mays
tgacgaaggtaaacggcggagagatcgaaggagcggtgaagaggggttacctcaagacggacgaggagttcctcaagagggacgagagcgggggcgcgtgctgcgtcacagccgtcctccaaaagggtggactagtcgtc

SEQ ID NO: 53237 - DNA, 271 bp, Zea mays
cagcgactcagcgagcgagagcagcacacactgcacgcagctagctaggagcagcagcagcggcggcgatggcggcctccatgatctcctcgtcagctctggcggtggcgcctcagggcctgccgcccctcggccgccgcgcctcctccttcgccgtcgtctgctccaagaagaagatcaagaccgacaagccctacgggattgggggtggcctgaccgtcgacgtcgacgccaacgggagaaagggcaagggcaagggcgtgtaccagtt

SEQ ID NO: 53238 - DNA, 271 bp, Zea mays
gcttatcccaagggtagcaagcagatgacaagagaagtggctcctgacaatgtctacaactctgcaagatccgtgaggccaggggtgaatgtgacttggggtttccctgtgcctgctagcagccggtaccttgtgcgtatgcacttctgtgacattgctagcaaggctctgtatgagctctacttcaatatctacgtcaatggtgatcttgcagtcaaggatttcgatctctccagtgcaactggattcttggcctatccttattacattg

SEQ ID NO: 53239 - DNA, 270 bp, Zea mays
gcacgagggtgtcgacatcgtcgtaatcagggagaacaccgagggcgagtactcggggctcgagcacgaggtcgtacccggggtcgttgagagcctcaaggtgatcacaaagttttgctctgagaggattgccaaatatgcattcgagtatgcttaccttaacaaccgaaagaaagtcactgcagtgcataaagcaaacattatgaagcttgccgatggtttgttcttggagtcttgccgtgaagttgcttcaaaatatcctggtattca

SEQ ID NO: 53240 - DNA, 272 bp, Zea mays
gccgcacgcagccatggatttcctgcaggagcaaagcgtcgagaccacagtagccgtcgccgtcgctgtcgccgtcgtcgccgcagggcgccttcctcctccttcgatccaggaagcccacgggctgcttggatcctgagaacttcaggaagttcgaacttgttgaaaagaagcaaataagtcataatgttgccaggttcaagttcgctctaccaactccaacttctgtattgggccttccaatcggtcaacatatcagctgcagaggacaa

SEQ ID NO: 53241 - DNA, 272 bp, Zea mays
gtaccgccgtggatctcgccgtccccgccatgcacgtctcgcacgcgggatcctccgtcgccggcgaggctccgaccaccggggagcaccggatggggactaccatcgtcggggtctgctacgatggcggcgtcgtcctgggcgccgattccaggaccagcactggaatgtatgtagccaaccgtgcttcagacaagattactcaactgacagacaatgtgtatgtctgtcgctctggatctgctgctgatacacaagtcatttcggattat

SEQ ID NO: 53242 - DNA, 267 bp, Zea mays
gtgaggcgcacagcgtgttcgacccattctctgtggacctcttcgaccccttcgacagcatgttccgctccatcgtgccgccgtcgttgtcgtcgtcggcggcctccgagaccgccgccttcgccagcgcccgcatcgactggaaggagacgcccgaggcgcacgtgttcaaggccgacctccccggcgtgaagaaggaggaggtcaaggtggaggtggaggacggcaacgtactgctcatcagcgggcagcgcagcagggagaagg

SEQ ID NO: 53243 - DNA, 268 bp, Zea mays
gtgaggcgcacagcgtgttcgacccattctctgtggacctcttcgaccccttcgacagcatgttccgctccatcgtgccgccgtcgttgtcgtcgtcggcggcctccgagaccgccgccttcgccagcgcccgcatcgactggaaggagacgcccgaggcgcacgtgttcaaggccgacctccccggcgtgaagaaggaggaggtcaaggtggaggtggaggacggcaacgtgactgctcatcagcgggcagcgcagcagggagaagg

SEQ ID NO: 53244 - DNA, 277 bp, Zea mays
cgcgctctgggacgacaaactgaagctgtacatggacagcctcaaggagcccggcgactcggggaagccctactccgcgcggtacatcggcagcctcgtcggcgacttccaccgcactcttctctacggagggatctacgggtaccccagggacaagaagagcaagaacggcaagctgcggcttctctacgagtgcgcccccatgagcttcatcgtcgagcaggccggtggcaagggctctgacggccaccagagaattcttgacatcacacctaca

SEQ ID NO: 53245 - DNA, 262 bp, Zea mays
gtaaaaagtacgaaaagcatgagggaaagcagttttcaatttttgatgcagattatgttgtgttccattctccatacaacaagcttgtacagaaaagctttgctcgtttgtactataatgatttcttgagaaactgcagcacggttgatgaagagtcgagggaaaagttggcaccgtatgcaggcttgtcatctgaagaaagctaccagagtcgcgacttttaaaaggcatctcagcaagttgccaagaacctgtacgagtc

SEQ ID NO: 53246 - DNA, 269 bp, Zea mays
gtgatctctccccacctcccggtccgctagcagatagcgggggccagagagatcgagatccggaggcgctagcgccacccatcagcgtctgctgcaatggcgggcacggtgacggtagcagtgtcgtcgaaacgctccacgccgctgctcaaggacgggctcgacatcgtgatcccgacgatccgcaacctcgacttcctcgagatgtggaggcccttcttccagtcctaccagctcatcatcgtgcaggacggcgacccgaccaagac

SEQ ID NO: 53247 - DNA, 268 bp, Zea mays
cagcaaggccgtggtgcatggcatcctgatgggcgtcccagttccctttcccattcctgatcctgatggttgtaagagtgtaattaactgccctatccaaaaagacaagacctatagctacctgaataaactaccagtgcaaagcgaatatccctctataaaattagtggtggagttgcaacttcaggatgacaaaaaccaaagtctcttctgctgggaaatcccagtacagatcgtttctcatctctaagtgcctcattgagttcgg

SEQ ID NO: 53248 - DNA, 268 bp, Zea mays
atgcgctcgacatgaacaccgccgaggacgagatcgtgcgcctcacgcgcgaggtcgttcccggcatgatcgtcaccggaatggaggtcgccgagattgacggcgcccccaggatgggcccgactcttggcgccatgatgatctccggccagaaggcggcgcacctggcgctcaaggccctgggcaggcccaacgccgtggacgggaccatgtcgccgccgttgcgcgaggagttgatgattgcgtacaaggacgacgaggtcgtgga

SEQ ID NO: 53249 - DNA, 267 bp, Zea mays
gaaaaggcgacggtgcaatgactgcatgtgaggtgctcttattccaccatgaagatatggggatcccatgggagattgcgaagtcggtgtccggcaggggatgtggggctgcgtcaagaggatagagcctggccttcgggcataccaggttgcgaggactgctggagagcctatctcaaaacatgccgccatggcgcatgttaccaccaggttcgatgccgacgagctcgtcacggaagacagcgcggaggccagttcatccagtga

SEQ ID NO: 53250 - DNA, 265 bp, Zea mays
cgacgacgagcttccgcagcccgtgttcgaccgcatcctgcgccggatcgcgttcacggtgggccttcccatggcgtcgggcgcgcgctgctcaacgtgtacgacgcgctcaagcgcggccagggggtggtggtgccgtcgtgggtgccgttgctgaccatcctcgtcgccttcggcacgtcggcgctgggtatcgcctacggcacgctgtcggctagctgggaccccgacaaggaagggtcgctgctcggcatcgacgaggccc

SEQ ID NO: 53251 - DNA, 259 bp, Zea mays
gccatgtcgaagcgaggcaggggaggttcggcggggaacaagttccgcatgtcgctgggtctgccggttgccgcgacggtgaactgcgcggacaacacgggcgccaagaacctctacatcatctccgtcaagggcatcaagggccgcctcaaccgcctcccgtccgcctgcgttggcgacatggtcatggccaccgtcaagaaggggaagcccgacctcaggaagaaggtgatgcccgccgtcatcgtccgccagcgca

SEQ ID NO: 53252 - DNA, 262 bp, Zea mays
cgagaagtactgggacctgtactcgagtgatgacctggagcaggacctcccgggccacctcctcagctacccgatcggtgtcactgccgacggcaccgttactgagctgcccgggatggagaacttccctgacacccgtgcccgcgtcctcggcaacaagtcggactacctcccgcccatcctcaccacataggctgcaggcagcgccatggcttctctcctgtctggcctcagcttggtgcccctctgtttgtgtttgaga

SEQ ID NO: 53253 - DNA, 261 bp, Zea mays
ggaaggctaccctgccatcgtcctcgtcaacaaagccactggagaggctctcaagcattcccttggccagtcacaccctgttcttctgacccgccataatccagactccctggacgagtctgtcctgtggacagagagcagggacgttggggatgggttccgctgcattaggatggtcaacaacatctacctgaactttgatgctttacatggagacaaggaccatggtggtgtgcgcgacgggacggcccttgtgctgtg

SEQ ID NO: 53254 - DNA, 262 bp, Zea mays
aaagattttgataacacgctactcaagttcttggtgagtgatttcaagaaaaccgagggcattgatctgtcaaaggatagattggccctgcaaaggcttcgtgaagctgctgaaaaggcaaaggttgaactttcatcgacttctcagacagaaatcaatctgccattcataacagctgatgctttaggggcaaaacatttgaacattacactgacaaggtcgaaatttgaatctcttgtacacaatctgattgaacggacta

SEQ ID NO: 53255 - DNA, 260 bp, Zea mays
ttaggacagcaaccatgagtgctaccgtgatcagcagggcctcaagagctgctactgctacaaagttgtcctcaaggatgaatcaatcgtcgacagccgcttcatgcacgagaagtttgcgacgagtgactctcctgaagctccgctcgttgtcgctacgccaatgaaagtcagctccttcagtatagcaaatcgacgctgactccgaagctcttttccccagttgtgcagaaataatctgagaagttgcaggtttttgt

SEQ ID NO: 53256 - DNA, 258 bp, Zea mays
aaggtaccttgcaatcacaacgaacagaagctctcgatctcaccgacaccgaggaagaagagatcaatggcgtccgagcagggagtcgtgatcgcgtgccacagcaaggctgagttcgacgcccacatgaccaaggcccaggaagccggcaagctggtggtcatcgacttcactgccgcctggtgcggtccatgccgcgccatcgccccactgttcgtcgaacacgccaagaagttcactcaggtcgtcttcctgaag

SEQ ID NO: 53257 - DNA, 256 bp, Zea mays
gaggagatggcacaggagtacggaagctatctgacagaatctatgattatgcaacatacaatgatttggggaatccagatcggggaaaagagttcatcaggccaatccttggaggtgacaagatcccttacccgcggcgatgtcgaactggtcgcccaccaactgatacaaacatgctagctgagagcagagtagagaaaccgcacaggatatatgtacctcgggatgaggcgtttgaggagctgaagcaaggcgc

SEQ ID NO: 53258 - DNA, 256 bp, Zea mays
atgtaacaagtattacctttccctctacttttaggttactatcaattatctgttggggaacttgggaaagacttatgcagacacagttggagtagtcgatcttggtggtggatctgtccaaatggcatatgctattgcggagaaggatgcagaaaaggctcctaagccatccgatggggaagatgcatatgtgaagaaactgtttctcaaaggaaccacatattatctttatgttcatagttatttgcattatggg

SEQ ID NO: 53259 - DNA, 258 bp, Zea mays
agaatttcttgggcgttcttcggcttcattgtcacaaggttcgagttcgtcaccgtctagtacgactgtgcgagggaggaagaggcgaggagaagatgcagatcttcgtgaagaccctgacggggaagaccatcaccctcgaggtggagagcagcgacaccgtcgacaacgtcaaggccaaaatccaggacaaggaagggattaccccagatcaacagcgactgatattcgctggcaagcagctggaggatggacgca

SEQ ID NO: 53260 - DNA, 258 bp, Zea mays
agcttctcgcttttttaaccacagttgtcaacctaactgtcggctggagaaatggaatcagagggtctgcttatgggcctcaatttgttgctaaaccacttgcacctgataaccctccactgaaggtaagatttattgacaacatcgatcctggtgggattgatcatcaaattgctcaactaggatctcaactggcaactagctactcttgtaattgtcatttctaagaacacttgagggagggggaactgctgaagc

SEQ ID NO: 53261 - DNA, 261 bp, Zea mays
atagaggtgaacacatctttggctcattctgaagccaaaatacttcatgagaagatccataagaaggcttacagtgatgaggaagtcattagaattctcaccacacggagcaaagctcagctacttgcaacattcaatagctacaaggatcagttcactcatgcaatcaacaaggatctgaaagctgaccccaaggatgagtttctttcaacactgcgggcgatcatccggtgcttcacctgccctgacagatacttcgag

SEQ ID NO: 53262 - DNA, 257 bp, Zea mays
caagttttatgaggctttctccaagaacctcaagcttggcatccatgaggactcacagaacaggggcaggattgctgagcttctgagataccactccacgaagagcggtgatgagctgaccagcctcaaggattatgtgacgaggatgaaggagggacagaacgacatctactatatcactggtgagagcaagaaggcagtggagaactcccctttcctggagaagctgaagaagaggggctacgaggtcctgtaca

SEQ ID NO: 53263 - DNA, 251 bp, Zea mays
atcggcattatcctctcgtcccgtgccggccagtcccgcgcagattagaggcacgtttcagatgtcaacaccgtgccgccgacagttgcctggtcgtagctgggtcatgttctatatccatgagacaagaagctggagcactttgagaggcttacttttatgctgtctagttttccatcttctgttgagtcgagaaaacaagaaaggctgtgtagccaagggatgacttttacccttgtgccattcttttc

SEQ ID NO: 53264 - DNA, 258 bp, Zea mays
gcgactcagcgagcgagagcagcacacacgcagctagctaggagcagcagcagagcagcggcgatggcggcctccatgatctcctcgtcagctctggcggtggcgcctcagggcctgccgcccctcggccgccgcgcctcctccttcgccgtcgtctgctccaagaagaagatcaagaccgacaagccctacgggattgggggtggcctgatcgtcgacgtcgacgccaacgggagaaagggcaagggcaagggcgtg

SEQ ID NO: 53265 - DNA, 257 bp, Zea mays
tcatcgatctacacacatacatagtttcttctactacacgacgacaaacatggggaagcctgcgaagatcggagagtggggtggatacgccggcgatcgtcgggatctgagggctactccggaccggctgatcgaggtgaaggtcacggcggacaacagcagctgcatccgctccatctccttcatctacatcggagccgatggcaaaccgtacgaggaggggccatggggtttcggccatgctggcacggagtaca

SEQ ID NO: 53266 - DNA, 253 bp, Zea mays
ctcgagccgcccagaagcttgagaagcatgaattgctggagatgaggaggattgctgcctaagtttacaagaaggcggcaggtggaagcaatccattgctctatcacagaaagataacatgtacaaggattgtatggagacatgctcacaatctggtgaccgtgaactgtcagaggacttgcttgtctatttcatcgagcagggtaagaaagaatgctttgcttcctgcctcttaatttgctacgacctgatc

SEQ ID NO: 53267 - DNA, 292 bp, Zea mays
caaacaatccgcctccgcctccgcctccctagggttttgctctcggctcgtcggatccagttcgggggatcctccatggcgtcgcgtccgtcgctgaagtcgaagcccaagggcaagggcgggaagaaggccaccgctgacgacgaggacgccaccgcggcggcgaccacggtgaggctcatgaaggagtggaccacgtggacgatgaagaaggcgaaggtggtggcgcactacggcttcatccccctcgtcatcgtcatcggcatgaactccgagcccaagccctccgtct

SEQ ID NO: 53268 - DNA, 299 bp, Zea mays
gcctcgggtcaaaccctaagcagggagttgatttatccgctgcagccatgagtaagttgcagtctgagtctgtcaaggatgccatctcccagattgttggggatgccaaggagaagaataggaagttcactgagactgtggaacttcagattggtctggagaattatgatccacagaaggacaagcgtttcagtggctctgttaagttgccccatatccctcgtcccaagatgaaggtgtgcatgcttggtgatgcccagcatgttgaggaggccgagaagatgggacttgactacatg

SEQ ID NO: 53269 - DNA, 299 bp, Zea mays
ttgcagccttggattgctagagatgacgaacatggtcagaagatgtggagagtcaaccagcgtatagtgaagcttatagctgagcttatgaggaaccatgacagccctgaagcgttggtgatactcgctagtgcctccgaccttctacttcgtgctaccgctggaatgctcgtcgatggtgaagcttgtactttgccacagcttgagcttctggaagtgaccgctcgggctgtccatcttaatcatcgaatggggagattcaggtttatcagttgcagatggtctttcaaatctgctga

SEQ ID NO: 53270 - DNA, 284 bp, Zea mays
cgtgctctctctcgaaccttcttccaaagcacccgaaccctagtgatctcggaaccctagccgcgcgcggatctcggcttttccccttcctccacgacagccatggacgaggacttcgagatgcctcccgccggcgccgatgagatgatgggcgacgacgagatgggcgacttcggcggcgacgagggcccggtgatgaacgtgggcgatgagaaagaggtcggcaaggaggggctcaagacgaagctgctcaaagagggcgagggctgggagactccgaggtc

SEQ ID NO: 53271 - DNA, 296 bp, Zea mays
ctggctaacgccgatacccctgatgatgcattgactgcgcgaaacaatggggcacaaggaattggactatgccggacagagcacatgttctttgcttcagacgagaggattaaggctgtcaggcagatgattatggctcccacgcttgagctgaggcagcaggcgctcgaccgtctcttgccgtatcagaggtctgacttcgaaggcattttccgtgctatggatggactcccggtgaccatccgactcctggaccctcccctccacgagttccttccagaagggaacatcgagga

SEQ ID NO: 53272 - DNA, 291 bp, Zea mays
tccgtgattccctagtcctacccagatcggcgcccgacgcaaggccgagcaggcgatggccgcagcggcgtcaatggggcacccttacgcgccagccgagctggaccttccgggtttcgtgccgctgaagctgtcccaggtcgagatcctcgtgtcctacctcggcgcctccgtcttcgttttcctcgccgtctggctcgtctccggaagatgtgttagattatccaagaccgaccgtctgctcatgtgctggtgggcattcacagggttgacccacataatgatcgaggg

SEQ ID NO: 53273 - DNA, 296 bp, Zea mays
tgttgatgctgtcatgacaatccccaagggaaccttgttccccatgtgtggcatgaaccttgccttcgacagggatctcattggccctgctatgtactttggtctcatgggtgatggccagcccatcggtcgctacgacgacatgtgggcaggatggtgtgtgaaggtgtgtggtttctctgatcttgcttctacagctgtttactttgttcccgaaacataatgtacattggcctgatgatgatcttacgactgaaacaataacttaggtcatctgcgaccacctgagcctggga

SEQ ID NO: 53274 - DNA, 296 bp, Zea mays
  unsure (1)..(296): unsure at all n locations
gggcgccaacattcaaatggggcatcagcattgccaacatagccgactttgctaaaccacctgaaaagatatcttaccctcagcaagttgctgttgcatgcactggactcatttggtcaaggtacagcttggttatcacaccgagaaactggaaccttttcagtgttaacgttgcaatggcgggtacaggcctgtatcagctttcacggaagatcaggcaagattacttatccgatgagaaagatgctgcttcacaactggaagcatagataatgacaacaggcanagaataacgg

SEQ ID NO: 53275 - DNA, 119 bp, Zea mays
caccatgtctccgctcgatctggccaagctgaaccacgtggcaagacaacagtctcactttgccatgatgcacggcgggatcggattcgccggaattgactccagctctccagaggtga

SEQ ID NO: 53276 - DNA, 295 bp, Zea mays
ccctccagcgcctccaccttcctcgccgcctcactccctctgcagaggtcgcagatccgtccggttagacgaagccgcccgcacccatggcctccggtgagctcgcctgcacctacgccgccctcatcctcagcgacgacggcatcgccatcaccgccgagaagatcgccaccatcgtgaaggcggccaacatcaaggtcgagtcctactggcccccgctcttcgctaagctcctggagaagcgcacgtctgaggatctaatcctctccgtgggatctggtggtggcgctgctcc

SEQ ID NO: 53277 - DNA, 288 bp, Zea mays
gcaccaccaagccctggctcttatattgtcaagaagatcgttcgcttggaagttcccgtcgactcttaccctaatggccaaggggtaattctctaaagcgagttgaagcatcaactggctgccgtgtttttattagagggaagggttccatcaaagacacagaaaaggaggagaagcttaaaggaaaacctggctatgaacatctgaatgagccactgcatatattgatcgaggctgaattaccagcgaatatcgttgacacaagactgagacaggcacaagaagtca

SEQ ID NO: 53278 - DNA, 293 bp, Zea mays
atcccctcaccacagaatcggcgatgaagaagattgaagataacaacactctggtcttcattgtcgacctcaaggcagacaagaagaagatcaaggctgctgtcaagaagatgtatgacattcaggccaagaaggtcaacaccctgatcagacctgatggaaagaagaaggcttacgtgaagcttacgcctgactatgatgctcttgatgtggccaacaaaatcggcatcatctaaagttactgcgtcaggcatctgctgtgctctatttccatgtgaaaccagagtttttgt

SEQ ID NO: 53279 - DNA, 277 bp, Zea mays
gcggcgggcacgcggtcgccgtcggctttcgtacaaaacgccatctactccaaccgcatcaccatcttctccaagacttactgcccctactccatgcgtgctaagcacatatttcgagaccttaaggaagatccatatgttgttgaactagatacccgagtggatgagcgtgaccttcacagtgttctcctggacctagttgggcgtcgtactgtgccacaggtgtttgtcaatggacagcatattggtggtacagacgatacagtaaatgcgcttt

SEQ ID NO: 53280 - DNA, 293 bp, Zea mays
cctcgttcctgtcgcgcaccacgacctccacttcacatctcccccggcggcggcgcggtcagttgaacaatggcggactccaaggccacctcggcggtcaccctccgcacccgcaagttcatgaccaaccgcctcctggcccgcaagcaattcgtgcttgaggtgatccaccccggccgcgccaacgtctccaaggcggagttgaaggagaggcttgccaaggcgtacgaggtgaaggacccaaacaccatctttgtcttcaagttccgcacccacttcggcaggaggaagtc

SEQ ID NO: 53281 - DNA, 292 bp, Zea mays
ccttattcaatggcttgccaaacccttttacagcggcgaggtaccacagcttagtcattgagaaagaaaccttcccacatgatgctttggaggctaccgcatggactgaagatggactcatcatggctgctcgccacaagaagtacaaacacatccagggtgtccagttccatccggagagcatcatcacccctgaaggcaagaaaatcatcctcaactttgtcagattcattgaggagctggagaagcagcgttcctaatctaggggaggtatatgcgaatgcgacgggtg

SEQ ID NO: 53282 - DNA, 293 bp, Zea mays
agccagtctagcaagcacgacgactaccgcggcgagtatcctcaagaggaggaggagcacaaggaggagttccggcctccgtctcccgccccgtcctacacggagaaggacgtgctctcgtcgatgctgagacggctcggtgagctggagggcagggtgcaggtgctcgagacgaagccgtccgagatgccgtttgagaaggaggagctgctcaacgcagccgtccgccgcgtggacgcgctggaagccgagctgatctccacgaagaaggccctttacgatgctctgatgcg

SEQ ID NO: 53283 - DNA, 293 bp, Zea mays
ggcgcaccgtcaccggggtgaggctgtattgcgtcgacagcaacacctgctttcgctacgacgggagcaccagaggctaggatatattgcttcatcagtgacagggagccaagatgccggccggagggttctcggtctcggcgccgtccggcgtcgagttcgaggctaagatcacgccgatcgtcatcatctcctgcatcatggctgccacaggcggtttgatgttcggctacgacgtcggcatctccagtggtgtgacgtcgatggacgacttcctgggcaagttcttcccg

SEQ ID NO: 53284 - DNA, 285 bp, Zea mays
ggaagttgtctttgcaaggaaagtggatgctttggatgctatcaagagatacaatggtgttctacttgatgggaagccaatgaatctagagctcattggaaacaatgtcgaaccacctcccatgccaccagtaatacacagtcgtcctttgcagaactataatgatatccatagcagtatgcctcaatcccaaagaggtggtcagcgaagagtaccccaaggcaacggtcggggtggacgcgtagtcaaagcagtggtggccggggacaggggaaaggccgaggc

SEQ ID NO: 53285 - DNA, 290 bp, Zea mays
ctcgagccgctccgcgccgccacagccgggcgcgcctccccgatcgagatccaggagataagcctcgttatgatgatcgccatgggaatacacgcttgtatgtaggaagattggcccctcgcacccgttcccgcgacctagaatatcttttcagcaaatatggaagaatacgtgaagtggagttgaagcgtgactatgcattcattgaattcagtgacccccgtgatgctgatgatgcgcagtacaacctagatggcagggaagtcgatggaagccgtattattgttgaa

SEQ ID NO: 53286 - DNA, 287 bp, Zea mays
gtgatctctgtgtgaattttactttatgtgtcatttatactgtatatggatcatgcagactcatacaaatgacgatttggaggaaattagagagctgggttcaggtacttatggggcagtttatcatggtaaatggagaggatgtgatgtcgctgttaatagaataatagcgagtcgctttgtaggcagaccatctgagagagagcgtttgattgcggatttctgcgaatgaagctctgatcctaagctcactccatcatccacatgtggtgtcattttatggtgta

SEQ ID NO: 53287 - DNA, 285 bp, Zea mays
attatggagcctctcaagcagtgggcaagatgatatgtgttggtagacttccacaagacgcgtacacagatgatctaaggcagtactttggcagatttggtcgagtcgtacatgcatatattccaaaggaccccatcagaagcatccaccgaggttttgggtttgtcaccttcgcagatgatgatgtagcagctcgagtagctcgtagaaggcatgaaattctatgccatgatgttgcaatagacacagcggtaccacttgagaatgattcagctgatggtgggt

SEQ ID NO: 53288 - DNA, 267 bp, Zea mays
acaagtccgacgaggccgtggccgccgaccccgagctgagggcgttctgggacgaggtgcgcaacgtggggcacggcgacaagaaggacgagccgtggtggcccgtgctggacacccgcgacaggctggtggagacgctgaccaccatcatgtgggtcacctccggccaccactcggccgtcaacttcgggcagtaccacttcgcgggctacttccccacccggccgaccaccatccggaagaccatgccggtgggaggagggcggg

SEQ ID NO: 53289 - DNA, 287 bp, Zea mays
gaagagcttatcggtgaaatgcctctgaagatatgttatcctgctattgagaaccatgaatggcgaattgtgactggctgtgatccatagaatactagatggagttatcacaatgcaggatcgtggccagtgcttctgtggctgctgactgcagcctgcatcaaaactggacggcaccagattgcaagaagagcaatcgacctagcagagaggaggctgttggaggatggctggccggagtactatgatgggaagcttggtcggtatgttggcaagcaggcgaggaa

SEQ ID NO: 53290 - DNA, 291 bp, Zea mays
cgctgttggaacaaagaggtatgatgctcattcaggaggaaagcgtgagattcaaagaactatgttggagctgctgaatcagctagatggttttgactcgcgtggagatgttaaagttattctagcaacaaaccgcattgaaagtcttgatcctgctttgcttcggccaggccgtatagaccggaagattgaattccctctcccagatattaaaactagaagacgcatcttccagattcacacatcaaaaatgacattagctgacgatgtgaacttggaagagtttgttat

SEQ ID NO: 53291 - DNA, 309 bp, Zea mays
gttcaagggtctgcctggggtgctgtgggtgctcactgattcctacatcgacgtgaagaacaaggactacggaagtgacaagtacgtgaacggcgagataatcccctgcacgtacccgacgtaccagccgaaggagcggaggacgtccaagtacgagagcaggcggtacgagaggcggagagatgggccaccggcggccagcaggaaaccgaggcagcaggcaccagctcagactcagaccgagtcggcgtcttcgtgacgagctctgcaggcattttgtccacgtacctacctacctagaagtagaac

SEQ ID NO: 53292 - DNA, 304 bp, Zea mays
acggtaccaaatgacatgctcatcgcaacagttgctctgtgctactcagtcattgcgcctttgattattccgttcggtgttgcatactttgccctcggttggcttatagcaagaaatcagatgctgagagtttacgttcctagctacgagagctacggacgaatgtagccacacatgcacacgaggatcatcgcggctctgatggtttaccagaccaccatgatcggcttcatctccctgaagaagttcgcctacgcgtccgttctcgtgcccctgcttccagccagcataatcttcgcctacg

SEQ ID NO: 53293 - DNA, 287 bp, Zea mays
gttcaagggtctgcctggggtgctgtgggtgctccctgattcctacatcgacgtgaagaacaaggactacggaggtgacaagtacgtgaacggcgagataatcccctgcacgtacccgacgtaccagccgaaggagcggaggacgtccaagtacgagagcaggcggtacgagaggcggagagatgggccaccggcggccagcaggaaaccgaggcagcaggcaccagctcagactcagaccgagtcggcgtcttcgtgacgagctctgcaggcattttgtccacgta

SEQ ID NO: 53294 - DNA, 303 bp, Zea mays
cctgaccttgacaaggagactgaggagttcattgcagatgtgcttggggtcgaggtgtttaggcagactattgctggaaatatccttgtggggagttactgcgccttctctaacaggggtggtttggttcatccccatacatccgttgaagaccttgacgagctctccacgctcctccaagttcctcttgtcgcaggaactgtgaacagaggaagcgaggtcattgctgcaggcatgacagtgaacgactggactgccttttgtggctcggacacgacagccacggagctctcagtcatcgaa

SEQ ID NO: 53295 - DNA, 304 bp, Zea mays
ctcctgcagagcaagctgctctgggtgccgggataccaaactctgttgtgtgcaccactgttaacaaagtctgtgcatctggcatgaaagctactatgttggcagcacagtcaattcaattgggtatcaatgatattgttgtggctggtggcatggaaagcatgtccaatgccccaaagtacattgctgaagctaggaaggggtctcgttttggtcatgacacacttgttgatgccatgcttaaggatgggctttgggatgtatacaatgattgtgccatgggaatgtgtgccgagctttgtgc

SEQ ID NO: 53296 - DNA, 302 bp, Zea mays
ttcgcgccttgcctctctgccttcctgcctgcttccctccctccgtcagatccccgctcgggttgccatggcggaccagctcaccgacgaacagatcgccgagttcaaggaggccttcagcctcttcgacaaggacggcgacggctgcatcaccaccaaggaacttggcactgtgatgcgctcattggggcagaaccctactgaggctgagcttcaggacatgatcaatgaggttgatgctgatggcaatggaaccatcgactttcctgagtttctcaacctgatggcacgcaagatgaagg

SEQ ID NO: 53297 - DNA, 194 bp, Zea mays
agttcctcttgttagaacaccacaggaactggggcatcaagtgactcttatccgccaagttgctgagaaagtgttcgccaatgtgggcaagactatcgggtacaaagttggaccaatgattgatatccccagggcagctctggtggctgatgagatagcggagcgggctgaattcggctccttcggaacgaacg

SEQ ID NO: 53298 - DNA, 262 bp, Zea mays
gcggcggatgtcatcgcctggtgccgggaccgcatgccgcactacatggtgcccaagacggtggtgctccgcgctgagctgcccaagacctccactgggaagatccagaagtacgtgctgcggaaccttgccaaggagatgggacccacccgaaagggcgccagtagcagcagcaggatgtagggcctgtttggtttgtggctaactatgccacactttgcctaaggttagtcgttcgaattgaagaactaaccttaggcac

SEQ ID NO: 53299 - DNA, 298 bp, Zea mays
gccgcgtccgagcacgttcctgccgtttgggcacggcgtgcacgcgtgctccgggaacgagctggccaagctcctgatgctcgtcctcatccaccacctggtcaccggctacaggtgcgtccatctcctctcagatcctctccatatattcccgcttgtcctatagcttgtggaccaggatgacacatggctggctgctgccgctctccatggggctccggctctgatctctctccgtgcatgctccaaatctcctcctgtctgtatgtatgcctgtatcgatcatgtatatactcct

SEQ ID NO: 53300 - DNA, 289 bp, Zea mays
ctctgaagagatatccgcaaacatgcagcgggcaaggacgaaaatggcggactgggctaaggcgcatgcaaagccttggatccgtcctttggtgatggcagacacgaccaacgagccattgaggttctcacgcacgaggtaacggacttgctaaagaggtcggagaagaggctgcagaagctgtccatgaaagattcgtcagaggactcaaatgtccggataaatgtccagcgttctcttactacagacctgcaaaacctgtcaatggagttccggaaaaagcagtcgt

SEQ ID NO: 53301 - DNA, 294 bp, Zea mays
agtgctctgtccacctctctcgctctgcgccgccgccgccgcactaaggcacgtgctgaggctttcgttggtctcttcgcgcgcgacgagcacggatcgctgtagaaatggctgatggtgaggacatgcagcctcttgtctgccacaatggcactggaatggtcaaggccggttttgctggccatgatgcaccaagggcggttttcgctagcattgttggccgtcctcgccacactggtgtcatggtacggatgggcagaagaaggcatactttggcgatgatgccagtccaag

SEQ ID NO: 53302 - DNA, 290 bp, Zea mays
ggtacttcttctaatgtacccgtgaagcagctggcggctgcataaccacctgcaatgccagaccttttaggtgatttgatgggtatggataatgctattgttcctgttgatgaacctgcagcaccttccggccctccactacctgtcttactgccttcgactacaggtcaagggctgcaaattagtgcacagctaacacggcgtgatggccagatatactatgacatatcttttgagaatggcacccagggtgtcctagacggatttatgattcagtttaacaagaacac

SEQ ID NO: 53303 - DNA, 290 bp, Zea mays
cccacgtctggaccatttgagcatattcctctgagcaactttgagaagaagccgcgcttggaaggtccagagtacaaggctggccatatacgacaccaactgctagaggcaccacgaagataagaactgctagaaagtaacgagcgaacaaggttacgagaaattgggcgatatagatttactaggtctggatctgtaatcctccctgcatagctcttattcgtaactcgctgcctgcacgaaagttggtgtgtgtgttagcagaatgctttctgtccgtgaaagtaaac

SEQ ID NO: 53304 - DNA, 232 bp, Zea mays
tgcaggttcgagagagcttgacggagatcttcgggaccacgggcccagccttcaacattgaccagatggtcaggtctctcagattccttcaccaacaatcgcgcttacggaccgaacggcagtgacgagggcaccccgttccgtggtcaaggtgatgaacaacggcaacgtcgctggcttctttggccgttctggagattgcctggacgcgatcgggctctacgtgaacccc

SEQ ID NO: 53305 - DNA, 290 bp, Zea mays
atggtggaggaggtccgcagacagttcaacaccattcctgggttgatggagggaactgccaagcctgactatgcaacctgtgtgaagatctccactgatgcttccatcaaggagatgattcctcctggtgctctggtcatgctcactcgcctcattgttggaaccctcttcggtgtttcgactctctctggtgttcttgccggtgcactggtttctggagtgcagattggcatctctgcttccaacaccggtggtgcatgggacaatgctaagaagtacattgaggctgg

SEQ ID NO: 53306 - DNA, 303 bp, Zea mays
cgggcaaggggaaggaggtgctcagcggggtcgtgttccagcccttcgaggagatcaagggggagctcgccctcgtgccccagtccccagacaagtcgctcgcgcgccacaagttcgtcgatgactgcgaggccgccctcaacgagcagatcaacgtgagtacaacgcctcgtatgcataccactccctcttcgcctacttcgaccgcgacaacgtggctctcaaaggatttgccaagttcttcaaggaatccagcgacgaggagagggagcacgctgaaaagctcatggagtaccagaacaa

SEQ ID NO: 53307 - DNA, 291 bp, Zea mays
ctcgagccgcgcgctctcctctccgtcgcttcagtcatggcaggaatggcacctgagggctctcagttcgatgctaagcactatgattctaagatgcaggagctgctgagcaccggtgagactgaggagttcttcacttcatatgatgaagttttgagagttttgatgatatgggcctccaagagaatcttctgagaggcatttatgcttatggttttgagaagccatctgcaattcagcagagaggaattgttcccttctgcaagggtcttgatgtcattcagcaagcac

SEQ ID NO: 53308 - DNA, 293 bp, Zea mays
aacgatggtactgagtggaggcagcgtattcagtctgaggcagaacattttgtcgatgtttctgccatgacttccgataatatcgccaagcttatcaatcaagacaaaatacaaattttgataaatcttaatggctacacaaagggtgccagaacgaagtttttgcaatgcagccagcacctatccaagtttcgtacatggggttccctggaacaacgggtgctgcatacatagattacttggtcacagatgagtttgtttctccatctagctatgcacatatatattcagaa

SEQ ID NO: 53309 - DNA, 290 bp, Zea mays
  unsure (1)..(290): unsure at all n locations
gcaaggaggagcccgacctcggcgccgcgctcaaggctgcttccccgacggcatcgacatctacttcgagaacgtatgcggcgccatgctcgacgccgtcctgctcaacatgcgcgtgcacggacggatcgccgtctgcgggctcatccgcagtacaacctggcggacggggagaaggacgccgtgcgcaacctcgccgccgtcatctccaagcgcctccgcctgcaggggttcnatcgagccgaccacaagcacctctacccgcagtacgaggcgtgggtgctgccgta

SEQ ID NO: 53310 - DNA, 286 bp, Zea mays
cctcgttcctgtcgcgcagcacgacctccacttcacatctcccccggcggcggcgcggtcagttgaacaatggcggactccaaggccacctcggcggtcaccctccgcacccgcaagttcatgaccaaccgcctcctggcccgcaagcattcgtgcttgaggtgatccaccccggccgcgccaacgtctccaaggcggagttgaacgagaggcttgccaaggcgtacgaggtgaaggacccaaacaccatctttgtcttcaagttccgcacccacttcggaggagg

SEQ ID NO: 53311 - DNA, 276 bp, Zea mays
agaagactcactttggtggcctcaaagacgaggatcgcattttcaccaacctctatggtctgcatgacccttttctgaaaggcgcgatgaagagaggtgactggtataggaccaaggatttggtgatcaagggggcagactggatagtaatgaaatgaagaaatcaggtcttcggggtcgtggaggtgcaggttttccttctggtctcaaatggtcctttatgcccaaggtttcagatggacgcccttcttatcttgtcgttaatgctgatgagag

SEQ ID NO: 53312 - DNA, 291 bp, Zea mays
actttttccactgtgataaatgtgggtgttgctacagcaatgtcttgaaggattcccaccactgcgtcgaaagagcaatgcatcacaactgccccgtctgctttgagtatctgttcgactccacgaaggacatcagcgtgctgcaatgtggcataccatccatttggagtgcatgaacgagatgagagcacaccatcacttctcatgcccagtgtgctcgaggtccgcctgcgacatgtcggccacatggcggaagctcgacgaggaggtcgcggccacgccgatgcctga

SEQ ID NO: 53313 - DNA, 288 bp, Zea mays
gatccattcaagaaaaatgaacttgatgcgtggcattgatctgaaaaagatcgcggaaaagatgaatggggcctcaggagctgagctcaaggccgtctgcacagaggctggaatgtttgctcttcgtgagagaagggtgcacgttacccagaggacttcgagatggcagtggccaaggtgatgaagaaagacacggagaagaacatgtccctgcgcagctctggaagtgaggctcgtgctacctttcacagccttcgcgaactagtggcagtgcttcatatccatatc

SEQ ID NO: 53314 - DNA, 285 bp, Zea mays
gatccattcaagaaaaatgaacttgatgcgtggcattgatctgaaaaagatcgcggaaaagatgaatggggcctcaggagctgagctcaaggccgtctgcacagaggctggaatgtttgctcttcgtgagagaagggtgcacgttacccaggggacttcgagatggcagtggccaaggtgatgaagaaagacacggagaagaacatgtccctgcgcaactctggaagtgaggctcgtcctacctttcacagcttcccgagctagtggcagtgccttcataccata

SEQ ID NO: 53315 - DNA, 281 bp, Zea mays
gcacgggaatgttactgtcacacctcaccttggtgccagcacagtggaggcacaggaaggggtggctattgagatagctgaagctgtcattggagctctgaaaggggagcttgcagcttctgcagtgaacgcgccgatggtcctgctgaggtgctgtcagagcttgcaccttttgttgtgctcgcagaaaagcttgggcgcttggctgtgcaactagttgctggtggtggtggtatcaagtctgtgaaagtgacctatgcatctgcgcgggcccctgatga

SEQ ID NO: 53316 - DNA, 281 bp, Zea mays
ttagaaatagatgtggatattggctcgtctacagtggcgaatggagtcttggggcttgtgtgcggtgtcataacgacactagttgtcgatatggctttccttgtccaggctaatacatacgacgagctcccagaaaggctgatggggcagttcgtatgtcgcatattgagctgtcatctgcaatagttcccgtgctcgaggattaatcatagtacgcgatactgcatgcattgggcccgaccagattatgccggtctgctgagatcactgacagtgtacac

SEQ ID NO: 53317 - DNA, 287 bp, Zea mays
ctttccccaactcgatctcgcacctagggtttcgtctcgccgcactcgtcctccgcgaagatgccgaagaacaagggtaagggaggcaagaaccggaagcgaggaaagaacgaggctgacgacgacaagcgcgagctcgtcttcaggaagacgggcaggagtacgcgcaggtgacccggatgctcggcaacgggcggtgcgaggccatctgcgtcgatggcacgcgccgcctctgccatatccggggtaagatgcacaagaaggtctggatcgcggctggggacatc

SEQ ID NO: 53318 - DNA, 287 bp, Zea mays
cagcattgtgttctgattcacctgctccaatggctgttctttctgctgctgatgcttccccggtctcagctatcgggtttgagggctatgagaagcgccttgagatcacattctctgaggcacctgtctttgtggaccctcatggcgtggtttgcgtgccctctccagggcccagattgactctgttctggatcttgcacggtgcacaattgtgtccgagctctccaacaaggatttcgactcatatgtcctctctgagtcaagcttgtttatctatccgctgaaga

SEQ ID NO: 53319 - DNA, 286 bp, Zea mays
gttgaatgaggaatctgagggacttttaaagctcccaactgacaaggcactgttatcagatcctgaatttaggcgctacgtggagctctatgcaaaggatgaagatgcgttcttcaaagattatgctgaatcacacaagaaacctctgagcttggcttcacgcctcgcagcacagcaccatccaaatcagatcttccaaccgccgccgtgcttgcacagagtgcctttggggtagcagttgctgcagccgtagttatcgctggctacttgtacgaggcttccaaga

SEQ ID NO: 53320 - DNA, 94 bp, Zea mays
ctgtcacgtgggggccactcgtggggtctcctgctgctgtcagaacgaataagagaagatggaattgtggtgaaacaataaaaatgcatggttt

SEQ ID NO: 53321 - DNA, 281 bp, Zea mays
gcctgcttccagctgcatctctctccgccgagaccgagaggaggaggaggcaagggaggcatccctgacgtacggacggcggccatggggacgcaggcgccggagaactaccccgccgagaaggacgcgaggagcgcgcggagaaggccatcgacgactggctcccgatcacctcgtcgcggaacgccaagtggtggtactccgccttccacaatgtcaccgccattgtcggcgccggcgtgctcagcctgccctacgccatgtccgagcttggctggggc

SEQ ID NO: 53322 - DNA, 280 bp, Zea mays
cgctcagggtgcgttcaagtacggcctctacgagttcttcaagaagacgtacgccgacatggccggccccgagcacgccgccaggtacaagaccctcatctacctggcgggctcggccaccgcggaggttttcgccgactcgcgctctgccccatggaggccgtcaaggtccgggtgcagacgcagcccggcttcgccaggggactcagcgacggcttccccaagatcgtcagggccgagggctacgcagggctattcagaggactggttcctctttggg

SEQ ID NO: 53323 - DNA, 286 bp, Zea mays
gccgccgcagccggtgcctgctccttcccgatccccgaggcaaagctgcgactccgcaaccgccgccatggcgttcgagaagatcaaggtctccaacccaatcgtcgagatggacggtgatgagatgaccagggtattctggcgtctatcaaggacaagcttatcctcccatttctggacctggacatcaagtactatgatttggggatactgcaccgtgaagcaactgatgacaaggtcacagtggaggctgcagaggctactctcaagtacaacgtggctatta

SEQ ID NO: 53324 - DNA, 287 bp, Zea mays
cagcgaaccaactattcgtttgcttttcgtcttcgtcctctctttgcccagttgtcggtcgcccgcgccgtcgtctccgctccgcaggccggcctgcgaaaccctagcgaggcgagcgagagagaaactagcggccatgttcgctacaggaaggctgacccggacctcgaggccggcgggtcctcgctgctgtacccgggaatgacggagagccccgagcttcggtgggcgttcgtccgcaagatctacgtcatcctagccgtccagctcgccatgacggccgcggt

SEQ ID NO: 53325 - DNA, 283 bp, Zea mays
  unsure (1)..(283): unsure at all n locations
gcacagttcattattgccgtctcccttgcacgcgagnaanaaagagagcganaagcagtctccatgtctggcatcctccacaagatcgaggagaagctccacatggggggcgaccacaagaataaggaggaggagcaccacaagaaggccgaggagcaccacaagaaggaggagggggagcaccacaagaaggacggcggggagcacaaggaaggcatcgtggagaagatcaaggcaagatcaccggcgagcacggcgacaagtccggcgaccacaaggagaa

SEQ ID NO: 53326 - DNA, 274 bp, Zea mays
atgctggtattatcgctcctttgttgcaactgcttcaaggagcagagtttgatatcaagaaggaggctgcttgggccatctcaaacgctacctctggtggttcccatgagcaaatcaagtacttggtgtctgagggctgcatcgtgccgctgtgcgaccttcttgtttgccctgatccgagaattgtaacagtttgtctggagggtcttgagaatattcttaaagtagggagcacgacaagaccatgggcgcaacaggtgacattaatgttttc

SEQ ID NO: 53327 - DNA, 270 bp, Zea mays
cttccgtgctcaccttcgagagatcaagttgctgctgcggtagtccccaaccatcatcatgcagaacgaggagggtaagacggtgcagcttcacgtccccaggaagtgctcggccacgaataggatcatcactgccaaggatcatgcctctgtccagatcaacattggccacttggatgcgactggcctgtacgatggtcacttcaccacgtttgctctctctgggttgtccgtgctcagggtgatgctgacagttcgttggacaggtgt

SEQ ID NO: 53328 - DNA, 282 bp, Zea mays
aaaacaatggatccggtgcggaagagcgtgtgcgtgaccggcgctggcggcttcgtcgcgtcggagctggtgaagctcctcctctcccggggccaatacgcggtccgcggcaccgtgcgcgaccctggtgctagcaagaatgcccatctcaaggtgctggaaggagctgaggaaaggttgcagcttctcaaggctgatctgatggactacgacagcattgcatcagcagttgctgctgtgagggtgtcttccatgtagctagccctgtcctttcccatcgac

SEQ ID NO: 53329 - DNA, 272 bp, Zea mays
tcaggttcaagcggaacattaaatcatggatgcgtggtgctcttctgggaagcggctcatttgggatggtgtacgaggggatcagtgatgagggtgcattgtttgctgtgaaggcagtatctttgcttgaccaaggaagcaacgcagaacaatctattgttgcacttgagcagctctaattttgagttttgtgtttatcaggaaattgcactcctcagtcagtttgaacagaaaatatagtccagtattatggaactgacacggtagaatcc

SEQ ID NO: 53330 - DNA, 276 bp, Zea mays
ctcgagcgattcggctcgaggccgcctcaaccgcctcccgtccgcctgcgttggcgacatggtcatggccaccgtcaagaaggggaagcccgacctcaggaagaaggtgatgcccgccgtcatcgtccgccagcgcaagccgtggcgccgcaaggacggtgtctacatgtacttcgaagataatgctggagtgattgtgaatcccaagggtgagatgaaaggttccgcatcactggacctatcggcaaggagtgtgctgatctttggcctaggatt

SEQ ID NO: 53331 - DNA, 273 bp, Zea mays
aggtacgcttccgccgccgtgtcctcctcttttgctgacggctcgatttgcgaaatcacatgttttggtgccctatctggtctccatttcaccgtgtcatatttctgttccttctacagggagttgattgatcgattgcagccatgagtaagttgcattccgagcttctcaaggattgcatctcccagatagttcaggatgccaagaagaataggaagttcactgaactgttgagcttcagattagtctgaagaattatgatccacaaaagga

SEQ ID NO: 53332 - DNA, 270 bp, Zea mays
gccacatataactcagctcatgatgttgctcctggttctgacatcattttcaccgatgatgttagcttccaggtcttctgtgagcatctacaaaggctggctgttcagtcttgaggacctacctgtatgcaaaggttgtacaccctatttgatagttgctcataatgcactgggttcttaggttggagttgtgagaatttcccttttctgtttctctttggccaagttttctgagatcagacaattttttcgggaaactgccctaaagga

SEQ ID NO: 53333 - DNA, 270 bp, Zea mays
ggtgaagccgccgccgctgcagtgtccatagccaccgcaggagactgagatggggggttgtgtcaagacccacaagagcaatgcatacttcaagcgtttccaggtgaagttcaagagaaggcgcgctggcaagacagactacagggccaggataaggctgattaaccaagacaaaaacaagtacaatacacccaaatacagatttgttgtgcgatttgtatccttgattccttaaccatttgttttctttgttctttattcatctggttt

SEQ ID NO: 53334 - DNA, 275 bp, Zea mays
ccgcctccgctccgcctcagcgcatcgccctccgccacagcgtaccgcgacctcatcgatcaccttcaactttcaatcatggcggacgtcgatgtcgaaccggaggttgccgccggcgctcccaagaagaggacgttccgcaagtacagctaccgcggcgtcgacctagatgcgcttctcgacatgtcggcggacgacctcgtccagctcttccccgcgcgcgccagagaaggttccagaggggtctgaagaggaagcccatggcactcatcaag

SEQ ID NO: 53335 - DNA, 260 bp, Zea mays
aaagccggcttggtttcctcgaaggatcagcatctacgcttgattgtagactttgtcgcatctgatatcgacttcctaaatctttatccaagatggcgcttgaaaacattggtgcttcaaacagggatgatgccttctacaggtacaagatgcccagaatgattaccaagatagaaggccgtggtaatggtatcaagacaaatgttgtgaacatggttgacatagaaaagcacttgccaggccagcttcctacacaacca

SEQ ID NO: 53336 - DNA, 271 bp, Zea mays
cgagaagctcaaggtcccggcgctgtccaagatgctgggctccggcgtggccagccacgatggcgagaagtgggtcaagcaccggaggatcctcaaccatgcgttccatcttgagaagctcaagcgcatgctgccggcgttttctacgtgctgcgaggagctggtgagcaggtgggcggcggagtcccttggctccgacggctcgtgcgagctggacgtctggcggagctgcagaacctgacgggagacatcatttctcgcaccgtgttca

SEQ ID NO: 53337 - DNA, 270 bp, Zea mays
tccatccacagcaccgtcgactcttgcatcagagacagcaacagaatagaagtcagcatcggaatctcaatggtgcgggagatagaggaagtcaccggagcagtcatcaagatcatctccgaaaggatccatatgccaatctcatgttgcagcgggaaaaggattgggtctctaaaatccagatgatgcaactgcaaagcactgatccctacctggatgattttattactagaattactttgaaaaactggagaaactgtcagctgctga

SEQ ID NO: 53338 - DNA, 272 bp, Zea mays
tcgtttctcgcgagccatcgcttctgtaattctcaggcatccggaagaaatggccaagtcgaagaaccacacggcgcacaaccagtcgttcaaggcgcacaagaacggcattaagaaacccaagcgccaccgccagacctccaccaaggggatggaccccaagttcctgaggaacctgaggtattctaggaagggcaacaaaaagagtggtgaggctgaagctgggagtaggaaggaaagcatggctttgtttcctctgtttttagctcagt

SEQ ID NO: 53339 - DNA, 82 bp, Zea mays
gtcgccctagcacccgcgacgatcaagaactgtccagtttctcttgcggacagttcccccaactgtcaccatgcagaacgag

SEQ ID NO: 53340 - DNA, 268 bp, Zea mays
cacgctgcgctccggcctgcacgcgctgctgccggcgctccgcccgctgctcatcaacaagaaggatctgcgcttcccgcacttccccgccatcgacgaactctacagcgacggcatcccgctgccgccgcagaccgggttcgacgccatccgcaccgtcgtcccgcgcatggtcgcccctggtggaggacaccaccgaccacgtcctccgcttcgaggtgccggaatgatagagagggaccggttctcgtggttcaaggacgaggag

SEQ ID NO: 53341 - DNA, 267 bp, Zea mays
gccggcgcagaccgggttcgacgccatccgcaccgtcgtcccgcgcatggtcaagctggtggaggacaccaccgaccacgtcctccgcttcgaggtgccggagatgatagagagggaccggttctcgtggttcaaggacgaggagttcgcgaggcagacgatcgcggggctcaacccgctgtgcatccagctgctgactgagttccccatcaagagcaagcggacccggaggtgtacgggccagcggagtccgccatcaccaaggag

SEQ ID NO: 53342 - DNA, 267 bp, Zea mays
cggggcctgatcggggacatcatcagtcgcttcgagaagaaagggttctacctcaaggtgatgaagttcatgaacgtggagaggtccttcgcgcacagcactacgctgacctttccgacaagcctttcttccccgggttggtggagtacatcatttccggccccgtggtggcgatggtgtgggaggggaaggacgtcgtgttgactggccgcaggatcattgggccaccaggccttgggaggcagccccggtaccattcgtggggat

SEQ ID NO: 53343 - DNA, 270 bp, Zea mays
cctcggcgtggtgatgtctggagctatccgcgttcatgacgacatgcttctggcagcatcggaggctctggcccagcaggtcacagaagaaaattttgagaaggacctgatttatcctcccttctcaaacatcaggaagatctctgcccacattgcagccagcgttgcagcaaaggcatatgagggtggtttggcaagtaggcgccctcggccaaaggacctgtgaaatatgcagagagttgcatgtacagccccatctaccgcaactac

SEQ ID NO: 53344 - DNA, 269 bp, Zea mays
aggcactgtcacacagacacagctgacctgccactgccaggaaagtaggtcgaggatgccccgcagcggcttctcggggtccttcaggtcgcccaagatcgacgtcgtcatcgacatgggaaaccccttcctcaaccgcaccgtcgacggcttcctcaagatcggcgccgtcggcgcctgcaaggtggctgccgatgagaccttcgagtgcctccacagggggatgtttcgaagcacaaggttgagcatgccctgaggaagatgtgcaa

SEQ ID NO: 53345 - DNA, 265 bp, Zea mays
cgcatgcatatatatgcatgatatatgctgcaggggaagcctgcgaagatcggagagtggggtggatacgccggcgatcgtcgggatctgagggctactccggaccggctgatcgaggtgaaggtcacggcggacaacagcagctgcatccgctccatctccttcatctacatcggagccgatggcaaaccgtacgaggaggggccatggggtttcggcatgctggcacggagtacaagattgatctgtgcaggttcgacgagag

SEQ ID NO: 53346 - DNA, 265 bp, Zea mays
gcgaggcaaaagcgcaaacgcgaccacagacagagcgcgcttcaagggcgttttttgttgaagataacaaggaggagaggaggagatggcggtcacgatcacctgggggaaggcgaggcagatcttcgacagccgcggcaaccccaccgtcgaggtggacgtgggcctcagcgacggcagctacgcgaggggggccgtacccagcggcgcatccactggatatatgaggccttggagttgagggatggaggatctgattatcttg

SEQ ID NO: 53347 - DNA, 129 bp, Zea mays
gccgccgtctcctccgccacccagcgctcgagctcctcgcgtcctgcgagcgcgcgccgcaacgccaccatgaagttcaacatcgcgaacccttccaccgggtgccagaagaagctggaaatctatgac

SEQ ID NO: 53348 - DNA, 267 bp, Zea mays
gagctcgtcgccaccggccaccgccaccctcgatcacgccgtccgtcgaggtaaggtcagcatggtgagggtcagtgtgctcaacgatgcgctcaagtccatgtacaacgctgagaagattggcaagaggcaggtcatgatcaggccgtcatccaaggtcatcatcaagttcctgacggtcatgcagcgccatggctacattggagagttcgagtacgttgatgaccaccgatcgggcaagattgtggtcgaactcaacgggaggct

SEQ ID NO: 53349 - DNA, 283 bp, Zea mays
cgacgacggaacggaccacgaaaagatagccagcagcgagagccagcgaggctaccttgctcccgagtacgccgccatgtccggcaaaccaactgcaggctgcgatgtatacagcttcgggatcatactgctggagcttgcgagcggcagaaggccagtcgagaagtcgggttctggcaaggcttgtggaatccgaagctgggtgctcccgctcgcaaggcagggcaggtacgacgagattgcggactcaaagctgggcgacaagttctctggacctgagctg

SEQ ID NO: 53350 - DNA, 218 bp, Zea mays
gaaattttcttgggcgttcttcggcttcattgtcacaaggttcgagttcgtcaccgtctagtacgactgtgcgagggaggaagaggcgaggagaagatgcagatcttcgtgaagaccctgacggggaagaccatcaccctcgaggtggagagcagcgacaccgtcgacaacgtcaaggccaaaatccaggacaaggaagggattcccccagatcaaca

SEQ ID NO: 53351 - DNA, 287 bp, Zea mays
atcaaaacacgagggcgtctcccgcaggactggtcactcggcacgcaggcagaggcagcatagcagcagccagctccatccatcctctttcccctcctcgcttcgcttcctcggcggatgcctcctccctcgaccgtccgcgtcccggtccctttccggggggaagtttcgcccgatatggcaaacgcgagatccggtgtcgctgtgaatgacgattgcatgctcaagttcggcgagctgcagtcgaagaggctgcaccgcttcctaactgtcaagatggacgacaa

SEQ ID NO: 53352 - DNA, 277 bp, Zea mays
tgaaaatccacctttaatgccggcaatcatgactcctggtggtgcgcttgatctcgcaactgtactactgggaaatcgtataatcttcattggccaatatattaactcccaggtggcccaacgtgtgatatcacagcttgtaacattggctgcaaccgtggagaggctgatattctgataactcctaactgccctggtggaaagtcccaattcgatcttagcgatttatgattgcatgtcctggataaacccaaagttgggacagtgtgctttggtg

SEQ ID NO: 53353 - DNA, 286 bp, Zea mays
gagaagcgagacgccattgacaccaagaaccaagagaagtcggtcatctaccagaccgagaagcaactgaaggaactaggggacaaggtcccaggtgacgtcaaggggaaagtcgagtcgaagctgcaagagctcaaggatgctgttgctggtggctccacgcagacgatgaaggacgccatgagtgcgttgaaccaggaagtcatgcagatcgggcaggccctctacagccagcagggtgccccaggcgctggacctggtgcagctgatgcttcttctgctggtt

SEQ ID NO: 53354 - DNA, 285 bp, Zea mays
cgacatgtgggcaggatggtgtatgaaggtcatctgcgaccacctgagcctgggagtcaagactggcctgccatacatctggcacagcaaggctagcaaccccttcgttaacttgaagaaggaatacaagggcatcttctggcaggaggacatcatccccttcttccagaacgtgaccatccccaaggagtgcgacaccgtccaaaagtgctacatctacctctctggacaagtgaaggagaagctgggcacgattgactcctactttgtcaagctcggtgacgc

SEQ ID NO: 53355 - DNA, 284 bp, Zea mays
ccgttctccatttccagccatggcggtgtcgatcgagctcaccaaggagtacggctacgtcgttctggtgctggtggcctatgtcttcctcaacctttggatgggcttccaggtcggcaaggcccgcagaaagtacaaggtgttctaccccaccatgtacgccatcgagtcggagaacaaggacgccaagctcttcaactgcgtgcagagggggcaccagaactctctagagtggatgcccgttttcttcgtcatactgctgctgggcggtctgcagcacccga

SEQ ID NO: 53356 - DNA, 217 bp, Zea mays
agagaaactaaaacttgcatcgatcgctcgctcgtcagttctttctgatcatcggtcgcctctctagctagtagctagctacctacctgatcggccatggctgaggagaagaagcaccaccacctgttccaccgccacaaggacggcggcgaggaggaggcgagcgccggcggcgaggtggactacgacaacctggagaagcaccacaagcacctgg

SEQ ID NO: 53357 - DNA, 283 bp, Zea mays
caagaacggtcatgtcgagatcatcgccaatgaccagggtaaccgtatcacaccctcatgggttgccttcaccgatagcgagaggctcatcggtgaggctgccaagaaccaggcagccgtcaaccctgagaggaccatctttgacgtcaagcgtctcatcggaagatagttcgcggacaaggaagtccagagggacatgaaacttgttccctacaatattattagcaaggatggcaagccctacattcaggtcaagatcaaggatgcggagaacaaggtcttc

SEQ ID NO: 53358 - DNA, 120 bp, Zea mays
agagaacccaccatggtgctgtctcctgcccacaagaccaacgtcaaggccgcctggtgtaaggtcggcgcgcacgctggcgagtatggtgcggaggccctggagaggatgttcctgtcc

SEQ ID NO: 53359 - DNA, 279 bp, Zea mays
ccgttctccatttccagccatggcggtgtcgatcgagctcaccaaggagtacggctacgtcgtgctggtgctggtggcctatgtcttcctcaacctttggatgggcttccaggtcggcaaggcccgcagaaagtacaaggtgttctaccccaccatgtacgccatcgagtcggagaacaaggacgccaagctcttcaactgcgtgcagagggggcaccagaactctctagagtggatgcccgttttcttcgtcatactgctgctgggcggtctgcagca

SEQ ID NO: 53360 - DNA, 277 bp, Zea mays
ccccaacagcgccactgtccagtgcgcgcgtcaagcttgcttagctcgccgccatggcctccctcgccgccgtctccgtgaagcccgtggccatcaagggtctcgccggcagctccatctccggaaggtagctcgccgtcgccaggccgtcggcccgctccatccgcaggccccgcgcagccgccgtggtggccaagtacggcgacaagagcgtctactttgacctcgacgacatcggcaacaccaccggacagtgggacctctacggctctgacgc

SEQ ID NO: 53361 - DNA, 287 bp, Zea mays
ctcattcaaggactccgcctgccgctgcttcggctacatggtctccaagaagaagtacatctacaccatcgacgacgactgcttcgttgccaaggacccatctggcaaggatatcaatgctcttgagcagcacatcaagaacctcctcagcccatccactccgtttaaacttcaaaaccctgtacgacccctaccgtgaggggagtgactttgtgcgtggataccccttaagcgtaggggtggttgtcaagcgccggctcccacggcctgtgggtgaacatcctgac

SEQ ID NO: 53362 - DNA, 250 bp, Zea mays
gccaaagctagttgctaggtcctttgaaccagcaactgatgcttcctcgtctcatcatcgagaccagtaagcaacatggcggctaatctcaagtgggctcctgttctagccctcgtcgtcgtcgttgctgccatggttggcaccacgagcgccggcaacatcgcagtgtactggggccagaacggcaacgaaggcagcttggcggacgcctgcaactccgggctctacgcctacgtcaacatcgcgttcc

SEQ ID NO: 53363 - DNA, 281 bp, Zea mays
atttaattagggatgagcagaggtcactctttgttggaagccggtcagatcctaatgattcagcttcttccctatcattgtcctctccacagatatcagaaagacatgctactatcacatgcaagaataaagctttctatctgactgatctcggaagcgaacatggtacctggattaccgacaatgaaggtagacgttaccgcgtgccaccaaacttcccagttcgtttccatccctccgatgtcattgagtttggttccgataagaaggctatgttccgg

SEQ ID NO: 53364 - DNA, 288 bp, Zea mays
agcggcgatggcggcctccatgatctcctcgtcagctctggcggtggcgcctcagggcctgccgcccctcggccgccgcgcctcctccttcgccgtcgtctgctccaagaagaagatcaagaccgacaagccctacgggattgggggtggcctgatcgtcgacgtcgacgccaacgggagatagggcaagggcaagggcgtgtaccagttcgtcgacaagtacggcgcgaacgtcgacggatacagcccaatctacaacgaggatgactggtctcccaccggcgacgt

SEQ ID NO: 53365 - DNA, 280 bp, Zea mays
ccttcccggtctcctgcgcccgttgccttcgtcccctccatctccggctgcgtcgccggcgagcccgacaccgcgaatcggatccgccgacaaggcgagagggaaaagatggggcttacgttcaccaagctgttcagccggctgttcgccaagaaggagatgcggatcctgatggtgggactcgacgccgccggaaagaccaccatcctctacaagctgaagctaggcgagatcgtcaccaccatccccaccatcggattcaatgttgaaactgtggagt

SEQ ID NO: 53366 - DNA, 250 bp, Zea mays
aaaacttgagtcattctatcttccgatctactcaccgtcggttggtgaagtggaggcgatagtgaagcaacttgggttgttcaacatgaatcatgttaaagtatttgagataaattgggacccctacgatgactcagaaggtgatgatgtgcataacaatattgagagcggtgaaaatgttcctaagtgcttacgcgcagttatggagccgctggtcgcaagccaatttggagaacgcatactcgacaag

SEQ ID NO: 53367 - DNA, 264 bp, Zea mays
cgcatgcatatatatgcatgatatatgctgcaggggaagcctgctaagatcggagagtggggtggatacgccggctatcgtcgggatctgagggctactccggaccggctgatcgaggtgaaggtcacggcggacaacagcagctgcatccgctccatctccttcatctacatcggagccgatggcaaaccgtacgaggaggggccatggggtttcggccatgctggcacggagtacaagattgatctgtgcaggttcgacgag

SEQ ID NO: 53368 - DNA, 162 bp, Zea mays
aacaggctgtcgtgagaagtgcatcattcagaaggagaacaacttcaagcaggctggcgagagatatcgttccttcgaccctgcaaggcaagaccggttcatccagcgatgggttgacgcactgacagaccctcgcgtgacccatgaagttctagatcgcga

SEQ ID NO: 53369 - DNA, 282 bp, Zea mays
attggatcaatttcgataattattagtagatctatgagatatgccgcctggaagaggcgaggtaagctgcatcatgtaaaaaagagaaaaaagatgtgacatcctagaggaggaggcctttgccatgatgggtgcgctcgcatggcaggccaggcaataataaaaagatgattattgcgtgccgggggaggagatcgcacgggggttgatgtttttggccccgggttctcctccctcatcttgttccgtgttcctgtatgcgttgcttccgctcctgttggt

SEQ ID NO: 53370 - DNA, 179 bp, Zea mays
cgcgccgccgccgcgtctcctcctgtacaggtaagaaggagacgaagagggcgaaatggtgaagcacaacaacgtcatccccaacgggcacttcaagaagcactggcagaactatgtcaagacatggttcaaccagcccgcccgcaagcagagacgccgcattgctcgtcaaaagaagg

SEQ ID NO: 53371 - DNA, 272 bp, Zea mays
cagggctgatggtcagaacactggcaacttccttacggaccgtccttcaaccaaggtccacgctgctcctggcggtggctcttccctgggctacctgttcggtggcaactgatgcccgtgctggtgcgctcaccaaagttatcctcccctgcctgctgcgtgctatgtctgaatcgtgaacaaccgttgtcatttcatgtgtgtaccccgtgcaatgctttgtgcgcatggttgatttctctgtggcaacttcccgtccctgcatgggttgt

SEQ ID NO: 53372 - DNA, 193 bp, Zea mays
catcaacattgtggtcattggccacgtcgactctggcaagtcgaccaccaccggccacctgatctacaagcttggaggcattgacaagcgtgtaatagagaggtttgagaaggaggctgctgagatgaacaagcggtccttcaagtatgcttgggtgctcgacaagctcaaggctgagcgtgagacgggtatc

SEQ ID NO: 53373 - DNA, 299 bp, Zea mays
cccagcttcaagctcgtcatcgtcggcgatggtggaactggtaaaactacatttgtgaagaggcatctcactggagagtttgagaagaaatatgaaccaaccattggtgtggaagttcatccgttggatttcaccactaactgtggtaagatcaggttctactgctgggataccgcagggcaagagaagtttggtggcctcagggatggatactatatccatggccagtgtgcgatcatcatgtttgatgtaacctcaaggcttacttacaagaatgttcctacgtggcatagggactg

SEQ ID NO: 53374 - DNA, 300 bp, Zea mays
gatttgctgaagaatgctgagagtaacgctgatgtgaaaggcttggacgtggacaacctctatgtttcacacatccaggtgaaccaagcccagaagcagaggcgccgcacctaccgtgctcacggacgcattaacccttacatgtcctccccttgccacattgagctgattctgtcagagaaggaagagcctgtgaagaaagaggctgacaacattgtcgcggcaaggaagcagtgaagtatgttagcctgctgataatggcatcctttcgaagcattatagccgtagctcttttatgta

SEQ ID NO: 53375 - DNA, 125 bp, Zea mays
ctgatctgaagaagaatctcatgccagcaaggctcgataagaagctgacacaggcacaacttgctcagatgataaatgagaagccacaggtgattcaggagtatgaatcaggcaaggcaatcccc

SEQ ID NO: 53376 - DNA, 299 bp, Zea mays
cgtacacagtccattattgccgtctcccttttgcgtgacaaagaaagagagcgagaagcagtcgccatgtctggcatcatccacaagatcgaggagaagctccacatggggggcgaccacaagaataaggaggaggagcaccacaagaaggccgaggagcaccacaagaaggaggagggggagcaccacaagaaggacggcggggagcacaaggaaggcatcgtggagaagatcaaggacaagatcaccggcgagcacggcgacaagtccggcgaccacaaggagaagaaggacaagaa

SEQ ID NO: 53377 - DNA, 296 bp, Zea mays
attggtacgtcaacccgcaggggcacgcatggtggcatgtgcttatgggcctcaactcatactatgcaaacacattcctaatgttctgtcgggctcagcagcgcgggtgggaggcgagaatcacctaccttcttggatttttgccttatgtcaaggtccagaaaccagagaagagggaatgatttgtctctgctgaacactgatgctactcagtccaccgccagtaagctaatgtctatccccaccccaccccccacccaatgtgcgcagacaagttgtggcatttttgtatatgg

SEQ ID NO: 53378 - DNA, 293 bp, Zea mays
gggaagagcaccaaggaccttcggcgcccgttcaggatccacatcttcccgagcgagttcttggttgacctcttcccccttcggaccacctcgtgggctcttggtgtagcttgccactctcaccaatcaagttttcatgtctgatctcgacattcagatcccaactgccttcgatcccttcgctgaggccaatgctggggactctggtgcggcacagggtcaaaggactacgttcacgtgcgcatccagcagcgtaatggtcgcaagagcctgactaccgtccagggattgaa

SEQ ID NO: 53379 - DNA, 290 bp, Zea mays
cggagagagagagagagaagagagagagaagagagagagagagagaggagtcggagacgcgcgagaggctgccgtgtagggaccgtagactcagcgactgcgaaggagggataaggggatggccgggatcggaccgatcaggcaggactgggagccggtcgttgtgcggaagaaggcacccaccgccgccgccaagaaggatgagaaggccgtcaacgccgcgcgccgcgccggtgcggagatcgataccatgaagaagtacaacgctggtacgaacaaggcggcatcca

SEQ ID NO: 53380 - DNA, 133 bp, Zea mays
gtcacaaatgatatattcacaaaagaagatggagaattcttcattccacatggagcgctccctgaagaacgtatacgtgcagtggaaactggaggctgccctcatgcggctattcgcgaagacatcagcataa

SEQ ID NO: 53381 - DNA, 159 bp, Zea mays
gtcacaaatgatatattcacaaaagaagatggagaattcttaattaaacatggagcgctccctgaagaacgtatacgtgcagtggaaactggaggctgccctcatgcggctattcgcgaagacatcagcataaatcttggtcctctggaggagctatcg

SEQ ID NO: 53382 - DNA, 116 bp, Zea mays
catgatgaggttagacaggggctgaaggtgctctcaaactggcccacttaccctcaactgtacataaaaggtgagctggttggcggctcagacatagtgatggagatgcacaagag

SEQ ID NO: 53383 - DNA, 270 bp, Zea mays
gtcaagaaggaggctccaaaggaggcccccaagccaaaggtggttgaggcaccagcagaagaggaagcaccaaagccaaagccaaagaatcctcttgacttgctgccaccaagcaagatggtccttgatgactggaagaggctatactcaaacacaaagactaacttccgggaggttgccatcaaacgtttctgggacatgtacgacccagagggctactctttgtggttctgtgactacaagtacaatgatgagaacaccgtctccttt

SEQ ID NO: 53384 - DNA, 278 bp, Zea mays
ggctcgaggggagccagcaccagccaccatgggtcgcgtccgcaccaagcccgtgaagaagacctccaggcaggtgatcgagaagtactactcccgcatgaccctcgacttccacaccaacaagaaggtgctggaagaggtctcgatcctccccttgaagcgcctccgcaacaaggttgccggcttcaccacccacctgatgcgccgcatccagcggggccccgtccgtggcatctcgctcaagctgcaggaggaggagcgggatcgccgcatggact

SEQ ID NO: 53385 - DNA, 193 bp, Zea mays
acggggaggagcagaacggcttgcagatgacgggcctgaatctcatggacaagacgatgcccgtcaggggagcaaggattgcctacagcatctgggatgtggcaggagaccaccagtccgtcgaccacatcccaatcgcgtgcaaggacgccgtggcgatcctgtacatgttcgatctcacgagccgctgcac

SEQ ID NO: 53386 - DNA, 289 bp, Zea mays
ctcgagcggttgatctttccagatatgatcagatataaagggctgacccattttgacttggacaactttgttgaagaagtgcttgtgaaggatattgactggcttcctagatctcctgagcctatgagtggttcctatatttttgtttgctcccatggaagcagggacaaaaggtgtggtgtttgtggacctgctttgattaaaaggttcaaggaagagataaatgaactgggacttgatgatcaggtggctgtcagtgcatgctcacacgtgggaggtcataagtatg

SEQ ID NO: 53387 - DNA, 290 bp, Zea mays
cagcttattattcattctaccttcctgttgcatgtgcattgctgctggctggtgagaacttggaaaactttgttgatgtaaagaacattctcgttgaaatgggaacatactttcaagttcaggatgactatctagattgttttggtgatcctgaattcattggcaagatcggaactgacattgaagactacaaatgttcctggctagttgtgcaagctcttgagcgtgctgctgagaaccaaaagagcattctgtttgaaaattacggaaagtctgatccagcgtgtgtt

SEQ ID NO: 53388 - DNA, 289 bp, Zea mays
caggcgaccattatggggccatcagatagcccatacgctggtggcgtatttttggtcactattcactttccaccggactacccattcaaaccaccgaagttgcattcaagacgaaggtttaccacccgaatatcaacagcaacgggagcatctgtcttgatatcttgaaggagcaatggagccctgcactgacagtttctaaggtcctcctctcaatttgttcccttctgacggacccaaaccctgacgatccgttggtcccagagattgctcacttgtacaagactga

SEQ ID NO: 53389 - DNA, 294 bp, Zea mays
agccgtctcccttttgcgtgagtaagaaagagagcgagaagcagtcgccatgtctggcatcatccacaagatcgaggagaagctccacatggggggcgaccacaagaataaggaggaggagcaccacaagaaggccgaggagcaccacaagaaggaggagggggagcaccacaagaaggacggcggggagcacaaggaaggcatcgtggagaagatcaaggacaagatcaccggcgagcacggcgacaagtccggcgaccacaaggagaagaaggacaagaagaagaaggataa

SEQ ID NO: 53390 - DNA, 288 bp, Zea mays
agatgtcggcagcggcgcgagttgtgcgaaggggtgaccttcgtgacgggcaacgccaagaagctggaggaggtccgcgccatcctcgagtcttccgtcccattccagtcgctcaagctcgacctgcctgaactgcaaagggagccagagtacatatccaaagagaaagcacgaatcgctgcatctcaggtgaatgggcctgtactggtggaggacacctgcctatgttttaatgcgctcaaaggcctaccaggaccctacataaagtggtttcttgagaagattggg

SEQ ID NO: 53391 - DNA, 288 bp, Zea mays
ctgttggtttagttgtaaatctgccttgcagccgtattatcagtatcaccgtttttgtgtcgcgatggctggcctatctttggaacatccttgggcgttcgccttcggtctcctaggcaacgtcatctccttcatgaccttcctggccccgataccgacgttctaccgcatctacaagagcaagtcgacggaaggtttccagtcggttccctacgtggttgcgctgttcagcgccatgctgtggatcttctacgcactgatcaagtccaatgagaccttcctcatcac

SEQ ID NO: 53392 - DNA, 288 bp, Zea mays
cgagattctaaaagtgcatggtagcaacaagaaatttgattctgatgtttctcttgatgtcatagcaatgagaacacctgggttcagcggacagacttggcaaaccttctgaatgaagcagccattctggctggaagacggggaaggacagcaatttcttcaaaagagattgatgattctattgacagaattgtagctggtatggaagggaccgtgatgacagacgggaagagcaaaagtcttgttgcttaccatgaagttgggcatgcaatttgcggaactttgacg

SEQ ID NO: 53393 - DNA, 288 bp, Zea mays
ctgtggctactcttctaaatgaaatgaagcgccggggcagagactgcagatttggtgttgtcaccatgtgtatcggatctggaatgggggcagcagctgtgttcgagcggggagacgcggtggatggactctccaacgtgagggacatccaggcacatgattttctgtctaaggatgcgaagtagaggcgcagaaaaaacatccatccttgagcagcataagcctgctgcatttgtaatatattcgaaatccgtattttttttcttcacaaacactactctatatacg

SEQ ID NO: 53394 - DNA, 289 bp, Zea mays
ggaaaaaaccgcccagctggaacccccaaaaccataacgagggtgcccgtcctgctagccggtgtgcttgctgtgcgatcgtttggcatgtgcttgttgaggggttgctaggggattggagaggattgatgggattaaatctcctcctattcaattttgaataggaggggatttaatccccttcaatccccctcaaaccactagtaaccgaacgtggcctgagggggcgggcgagtctttatattgaatgaaactacataaaatagcatgccgtctctgtcactggcaa

SEQ ID NO: 53395 - DNA, 288 bp, Zea mays
ctcctccccctcttatcaagtcctcctcgggttagggttcctcagggttttgtggaggggcgatggcggcggctgatgtggagtaccgttgcttcgtcggcggacttgcctgggccaccagcagcgagtcgctggagaatgccttcgcctcctacggcgagatcctcgactccaaggtcatcaccgaccgggagacggggaggtcccgcggcttcggcttcgttaccttctcctccgagaactccatgctcgacgctatcgagaacatgaacggcaaggagctcgacg

SEQ ID NO: 53396 - DNA, 290 bp, Zea mays
cactcgagcgtaaaattgaaacctccaactcgaaggataataaacttgtactcacaagtgcaagccttaagcatgggctcaacatgctgcaaagcatgcaaagtgataacaagagctcgaaaaaatcactgaaggatgttgtcacagagaatgaatttgagaaaaggcttttggtggatgttataccacctaatgacattggagtcacctttgatgatattggagccttggagaatgtaaaggacacattaaaggagctggtgatgctccctttacaaagacctgaattg

SEQ ID NO: 53397 - DNA, 291 bp, Zea mays
acaagatgaaggatgctgaagaaaacccggaaggcccaatccgcatcaggggagaaggccgccatcgcttccgccccttcaggtaccggcatctgggccaattcgccccactaggaggggagcaaactgctgcacagcttcccggggactggttctccattggccacagctcccagtggctctggtactccgtgtacgcaaccaaacaaatcagctggcgcacgaggatgctggtggtatcagactggacacgccgattcatcttcggaagagactcgagttgcatatgat

SEQ ID NO: 53398 - DNA, 287 bp, Zea mays
ggtcgcgggatcaaggagccagagagcgggacgcagcgagcgttccgccagagatcgagaccgtagctagggtttgaggcgccgggctgcggtggacgagatgtcgacgccggcgaggaagcggctgatgcgggacttcaggcgcctgcagcaggacccgcccgccgggatcagcggcgcgccgcacgacaacaacatcatgctctggaacgccgtcatattcgggccggatgatacgccgtgggacggtgggcacgttcaagcttaccttgcagtttacagaagat

SEQ ID NO: 53399 - DNA, 288 bp, Zea mays
ctcgagcgacgtccggtcagaccaatcaacaaagtgacgcgagacgagagcatccatcgcttccccttcttccccatcgcgtgccctcgccgcagccatcttccatggcggaccagctcacggacgagcagatcgcggagttcaaggaggccttcagcctcttcgataaggatggcgacggctgcatcactaccaaggagcttggaactgtgatgcgctcccttggccagaaccccactgaagcagagctgcaggacatgatcaacgaggttgatgctgatggcaatg

SEQ ID NO: 53400 - DNA, 286 bp, Zea mays
tggacccatggtgcgcagatggttgcgttcaacatgcagggccatgataaagcgctccggttgatgcaagggtttttcagagccaatgggggctgtgagtaagataaaaagcctgacttcttgctaagaacaggtccaaatggggaagtatttgaccccaaggctagtttgccagtgaagaaaaccctcaaggtgaaagtttatatgggagacgggtggcgcatggacttcagtaaaactcatttcgatgccttttcgcctccagatttctatactagggtaggga

SEQ ID NO: 53401 - DNA, 285 bp, Zea mays
agtgactcttatccgccaagttgctgagaaagtgttcgccaatgtgggcaagactatcgggtacaaagttggaacaatgattgagatccccagggcagctctggtggctgatgagatagcggacaggctgaattcttctccttcggaacgaacgacctgacgcagatgacctttgggtacagcagggatgatgtgggaaagttcattcccgtctatcttgctcagggcattctccaacatgaccccttcgaggtcctggaccagaggggagtgggcgagctggtg

SEQ ID NO: 53402 - DNA, 287 bp, Zea mays
atcaagaaccgcccctgcaaggttgtggaggtttctacctcaaagactggtaagcatggtcatgccaaatgccactttgttgccatagatatattcaacgggaaaaagctcgaagatattgttccttcgtcacacaactgtgatattccgcatgtgaaccgtactgagtatcagctgattgatatatcagaggatggatttgtgagccttcttacttcagatggcaacacaaaggatgatcttagactcccaactgatgagactcttgtggcccagatcaaggaagg

SEQ ID NO: 53403 - DNA, 289 bp, Zea mays
tagcgacgtcatacaaggacccttctttgtgatcgttgtggtttacagcctgcatcagtccgatgtcttgaggacaacgcatcactttgccaaaactgtgactggaatgggcatgatgcagaatcaggggcttctgggcataaaaggcaagccataaactgctactcagggtgcccatcatctgcagagctatcgagaatctggtcatttattactgatatcccgactgtagcagctgagcccgactatgaggatggactaagcatgatgacaattgatggcagtgacg

SEQ ID NO: 53404 - DNA, 284 bp, Zea mays
cattcctcctccggatttcgcagtcagcggtggtgaaggtagcgggcgcggaggaagatggggctcgcgttcgggaagctcttcagccggctcttctccaagaaggagatgcggattcttatggtcggtctcgacgccgccggtaaaaccaccatcctctacaagctcaagctcggcgagatcgtcacaaccatccccaccatcggtttcaatgttgaaactgttgagtacaagaacattagcttcacggtctgggatgtcgggggtcaggacaagatcagacc

SEQ ID NO: 53405 - DNA, 284 bp, Zea mays
agcagatccatgagattaaggtcttcctcctcaccgcgaggaggaaggatgcccgctcagtgaagatcaagaggagtaaggatgttgtcaagttcaaggtgcgctgctccaagtacttgtacacgcactgcgtcttcgatgctgagaaggcaaacaagttgaagcaatctcttcccccaggtttgaccgtcgaggaggtctgattggatacatggcaacgccgagttgaactacccaagcttctttatcagtagcagagcatgctactctatgtacttttggaa

SEQ ID NO: 53406 - DNA, 284 bp, Zea mays
ctccaaacacttgcgccgcagaacacaaacaggtaaggccgccatggtctccggttcgggcgtgtgcgcgaacatcgacggtcgacgcgcgcaaccacatgctgggccgtctctcctcgatcatagccaaggagctgctcaatgggcagaaggtggtcgtcgtccgctgcgaggagatctgcatgtcgggcggcctcgtccgtcagaagatgaagtacctccgcttcctccgaaagcggatgaatcccaagccgtcccacgagcccatccacttccgcgccccc

SEQ ID NO: 53407 - DNA, 280 bp, Zea mays
gaagtacccaacagaacagacctaaatttgtttctgcattctgccagtcaaattgtggtgatgttagtccaaatgtcctgggaactttctgtatagacactggccttccttgtgacttcaatcacagcacatgcaatgggaagaatgaattatgctatggacgagggccaggatatcctgatgaatttgaaagtactcgtatcattggcaataggcaatttcaaaaggctgtagatctttttagttcagcttctgaagaaatacaaggcaaaattgacta

SEQ ID NO: 53408 - DNA, 280 bp, Zea mays
ggccttgtacacacgacatgtggaacaccaaattatgttgcacctgaggtgctaagtagcaatggatatgacggatctgcagcagacatttggtcgtgtggtgtcattctctatgttttaatggctggttaccttccctttgaggagaacgaccttccacatttgtatgaaaagataactgcagctcagtactcatgcccatattggttctctccaggagccaagtcattgatccagagaatacttgatccaaatccaagaactcgtatcactattgaag

SEQ ID NO: 53409 - DNA, 283 bp, Zea mays
gccgcatctaacgcagttccctccgccgcagcccgaggcaagatggttctccagaacgacattgatctgctcaacccgccggcagaactcgagaagctcaagcacaagaaaaagagactcgtccagtcgcccaactccttcttcatggatgttaagtgccaggggtgcttcagcataaccactgttttcagccactcccagactgttgttgtgtgccctggctgccaaactgtcctctgccaacccacaggaggaaaggcaaggctcactgagggctgctctt

SEQ ID NO: 53410 - DNA, 242 bp, Zea mays
ggttctaatgccgtcaaggattacccttacaagggcacggacggacggtgtgatgtcaacaggaaaaacgccaaggttgttgctaatcgacagctatgaagatgtaccagcgaacagtgagaaaagtctgcagaaggcagttgcgaaccagcccgtcagtgttgcaattgaggctggtggcagagcatttcagctctacaactcgggtatcttcacaggaacctgtggaacagcgttggccc

SEQ ID NO: 53411 - DNA, 281 bp, Zea mays
catcgcttctgatctctcgaggctgcataacctgattcagcggcagagtaagggtgcgtgatggagatgagggagatcatcagcatccatatcgggcaggcaggcatccaggtagggaattcttgctgggagctctactgcctcgagcacggtatccagcctgacggcctcatgcccagtgacacctctgtcgggatcgcgaaggatgcgttcaacacgtacttcagtgaaacgcgcgcagggaagcacgttccaagggccctgtttgtcgacttggagcc

SEQ ID NO: 53412 - DNA, 265 bp, Zea mays
gcacctcttagccaaagcaagttgctaggtcctttgaaccagcaactgaagcttcctcgtctcatcatcgagaccagtaagcaacatggtggctaatctcaagtgggctcctgttctagccctcgtcgtcgtcgttgctgccatggttggcaccacgagcgccggcaacatcgcagtgtactggggccagaacggcaacgaaggcagcctggcggacgcctgcaactccgggctctacgcctacgtcaacatcgcgttccacaca

SEQ ID NO: 53413 - DNA, 279 bp, Zea mays
acgagggagttatgaccatgcaagtgggtgaagttgctcgtatccagtgcacgcctgattatgcttatggagccggcgggttcccagcctggggaattcaaccaaactcagtgcttgtgttcgagattgaagtcctcagtgcccagtaattcgcatctgtcagctatggaaacgttggccatccttctcaagtaatgaaataattccgttgtcacctcatgctacatacagcagattggtgttacgagttaaatcctgtgaaactttagcattctgtaa

SEQ ID NO: 53414 - DNA, 278 bp, Zea mays
cactcatcgatctacacacatacatagtttcttctactacacgacgacaaacatggggaagcctgcgaagatcggagagtggggtggatacgccggcgatcgtcgggatctgagggctactccggaccggctgatcgaggtgaaggtcacggcggacaacagcagctgcatccgctccatctccttcatctacatcggagccgatggcaaaccgtacgaggaggggccatggggtttcggccatgctggcacggagtacaagattgatctgtgcaggt

SEQ ID NO: 53415 - DNA, 275 bp, Zea mays
tgtacacaggatgttatcgataagggtagtagacagcccaacatcactattggcattttggtctccgttgtcatcgtgttcgttaccgttctcttcaagctcctgtttgtaggcaagaaaccagtggtaagttattcccaaccaatgtaatactgctgtcacggttctgaacttgaagagaatgctcagttcactacatttgcttgttccaggcacctgtgaaacctgcagctgaggcgaagaagcccaaggccgcggagacggacggtgctgga

SEQ ID NO: 53416 - DNA, 273 bp, Zea mays
acctttgccatgtctagtttggtcctaccctggtgaatttaaaagcttagatgctgctggtcaagttcgtggttcccttattgaatttccagggattggtgctacatctcctcttctttggttagctagagggtttgtgattctgtctggtccgacaatgccaattatcggtgaaggcgatgaagaggccaatgacagatatgtggaacaactagtaacaagtgcagaggctgcagttgaggaagttgtcaaaagaggggtggctcaccctga

SEQ ID NO: 53417 - DNA, 277 bp, Zea mays
caggaaatgccaaaatgcatatttctgacatccccaaataatccagatggcagtgtaatcaatgatgaggatcttttaaagatacttgatctcccaatacttgtagtgctggatgaagcttatattgagttttcaagccttcagtcaagaatggcatgggttaagaagcatgataatttgattgttctccgaacatttagcaaacgggcaggtttagctggtcttcgtgtgggttatggtgcatttcctctgagcattatcgagtatttgtggcggg

SEQ ID NO: 53418 - DNA, 130 bp, Zea mays
ctcgagcgcgcagctgtaatcgtgatggacaaatgctacggatgtcgttgacgcgagtgctatgctgtcctacttctacaagcatgagagtcgtgggcagtgcacgccttgccgagaggggacaccctgg

SEQ ID NO: 53419 - DNA, 164 bp, Zea mays
tggcaatgaaatactcattgaagatgctattggtaggactggactggatcttaagactgatccaggagttcctactgtttatgctggttttggtgcgcttatgttaacgacctgcattagctatctttcacactctcagatatgggcattgcaagatggaagta

SEQ ID NO: 53420 - DNA, 277 bp, Zea mays
caaatggattggctaaaactgacacaaacacatcctgatctagctgggcttaaggggcagtcaaaccgaagttaatttctttggaagaggttaatcagcacaaagcaggagattgtatttggacagttctcaaaggccgcgtgtactacattgctccatacatgaaatttcatcctggaggtgttgatatgcttatgacagccgctgggaaatactgcactgctttgttcaataaataccatgcttgggtaaatgcagagttcctcctggagaagtg

SEQ ID NO: 53421 - DNA, 292 bp, Zea mays
ctaagatttgtgacattagcaggagtgaatttgacttggtctacaaacgcctaaatgtggtgcttgaagaaaagggggagagtttctataatccttatattcctcaagtgttggaggaattgagtagcaaaggcttgatcaaggagagtgagggtgccagagttaaatttattcaaggtcatcagatccccttgatagtggttaagagtgatggtggcttcaactatgcctcgactgacttggctgccctttggtatcggctcaatgttgagcaggcagagtggatcatata

SEQ ID NO: 53422 - DNA, 188 bp, Zea mays
gcaaggtagaggagtatctactgagtgtgcctcaagacactctgtagttggagttcaaccataggttccaagagcttggcttggggatagggttggggtgacactgtgaacgtgtactcgacacactccacttgcttctcgactttacggaggccccttatcctgccaacttggagaagttcctggga

SEQ ID NO: 53423 - DNA, 250 bp, Zea mays
atggccatagcggacacggtggacatggggcctttggaggctatggtcacggtggttacggccacgggtatggtggccacggcaagttcaagcatggtcacggccaccacggcaagttcaagcacgggcacggcaagttcaagcatggcaagcacgggcacggcatgtttggcggcggcaagttcaagaagtggaagtgatgtgccctccatggttgatcgtcgctgaactcaggcttccaggacatgtg

SEQ ID NO: 53424 - DNA, 163 bp, Zea mays
cagatgtttacagtttcggcatgctggtgttagagatggtgagtggaaggaggaattcagacccaggtatcgagaaccaaaatggggtgtatctaccagagtgggtctatgagagagtagtcactgggcaggacctcacacttagtaagacaatagctgagca

SEQ ID NO: 53425 - DNA, 299 bp, Zea mays
gacgcgaacgcggcattcggactcgaggcagttcggtagtccctctcctctcgaggtattagcagtcgaccggttcctcggagcacgatgaagtttgttgctgcctacctgcttgctgtcctcgctgggaacgccagcccctccgctgacgatttgactgccattctggagtcagttggctgtgaagttgacaatgaaaagatggaactcctgctgtcgcaactgagcggtaaggacatcaccgagctcattgccgcgggcagggagaagtttgcttcagtcccatgtggtggcggcgg

SEQ ID NO: 53426 - DNA, 165 bp, Zea mays
cgacatcaaccgcatcctcgggcccaaggcctcctgcatctgcttcaaggactccgcctgccgctgcttcggctacatggtctccaagaagaagtacatctacaccatcgacgacgactgcttcgttgccaaggacccatctggcaaggatatcaatgctcttga

SEQ ID NO: 53427 - DNA, 155 bp, Zea mays
ctctccttcccggtctcctccgcccgttgccttcgtcccctccatctccggctgcgtcgccggcgagcccgacaccgcgaatcggatccgccgacaaggtgagatggaagagatggggctcacgttcaccaagctgttcagccggctgttcgcca

SEQ ID NO: 53428 - DNA, 277 bp, Zea mays
ccgcgctctcctctccgtcgcttcagtcatggcaggaatggcacctgagggttctcagttcgatgctaagcactatgattctaagatgcaggagctgctgagcaccggtgagactgaggagttcttcacttcatatgatgaagtttttgagagttttgatgatatgggcctccaagagaatcttctgagaggcatttatgcttatggttttgagaagccatctgcaattcagcagagaggaattgttcccttctgcaagggtcttgatgtcattcag

SEQ ID NO: 53429 - DNA, 266 bp, Zea mays
atgtgagcaagtcccagaagacgcagacaaagggtgcggtccagaagggttccaagggccccaagttgggcggcggtggtgggaagcgctgaaagaacttagtgtcgtttctcgacattgcagtcgttccttagccaaagccactttcgtagaacctgtgttgaatttgcgagacttattcaagcgttgcttgtgcgtgctaaataccatggcaagagaacggatttatatttatgcctaagaaaaaatgaccgttcatattctat

SEQ ID NO: 53430 - DNA, 276 bp, Zea mays
ggttacccctaactcccagctccctcgttcaggcgcgctctctctagccggcgacgattgggcgagcggcgccactcaacgccaggtcttcgtgaaaaccatcgccggcgatgagtttcaaccagtctactgtcaaggggcaggccaggtgggagaggcctagggctcgccctcatggcctgacgcagcagaggaggcaggaaataaaggaagcctttgatctgtttgatacagataactctggaaccattgatgcaaaagagctcaatgttgcca

SEQ ID NO: 53431 - DNA, 275 bp, Zea mays
ctgagattgacatgttgtccaagctccgccaccgccatctggtgtcactgattgggtactgcgaggcgaagaatgaaatgatcctggtctacgattacatggcccatggtactctccgtgagcacctgtacaagacccagaagccacctcttacctggaggcagcgtttggatatctgtattggtgcagctcgtgggcttcactaccttcacactggtgacaagcacaccatcatccaccgtgatgtgaagacaacaaacatcctgctggatgag

SEQ ID NO: 53432 - DNA, 252 bp, Zea mays
gcaccacaaggcgaacttaaatggataccttgcataccacactgggcagcccctggataagatcaacgtagatactgaccgtgactacttcatgagcgcgaaagaagcaaaggagtatggccttattgatggagtaatcatgaatcgcctcaaggcccttcaaccacttccagcttccagttagtcatgaagtgtgctagaactccgtcaaacatttctgtagaatcaatgtgtctgttgaaagccctggct

SEQ ID NO: 53433 - DNA, 275 bp, Zea mays
agagcacccagttctgctgacagaagcacctctgaacccaaaggcaaacagagagaagatgacccaaattatgtttgagacattcaatgcaccagcaatgtatgttgctatccaagctgtcctttccctgtatgccagcggtcgcacaacaggtattgtgctcgattctagtgatggtgtgacccacaccgtgccaatctacgagggatacgcgctccctcatgccattcttaggctggatcttgctggtcgtgatctgactgactgcctaatga

SEQ ID NO: 53434 - DNA, 282 bp, Zea mays
cgaggagatggagaagttcctcaagcagccggagacgacgctgctggacatgctgcccacgcagatgcaggccatcaaggtcatgacgacgctggacatcctctcgtcgcactcgcccgacgaggagtacatgggggagttcgcggagccgtcgtggctggcggacatatggtgaaggcggcgttcgagatgttcggcggcatgatgaaggagatcgaggggttcatcgacgagtgcaacaacaacctggacctcaagaaccgctgcggcgccgggatcgtg

SEQ ID NO: 53435 - DNA, 274 bp, Zea mays
gccgcatctaacgcagttccctccgccgcagcccgaggcaagatggttctccagaacgacattgatctgctcaacccgccggcagaactcgagaagctcaagcacaagaaaaagagactcgtccagtcgcccaactccttcttcatggatgttaagtgccaggggtgcttcagcataaccactgttttcagccactcccagactgttgttgtgtgccctggctgccaaactgtcctctgccaacccacaggaggaaagtgcaggctcactgagg

SEQ ID NO: 53436 - DNA, 168 bp, Zea mays
gcaaggagctcggtatcacagcgctgcacattaagcttcgtgccactggaggcaacaagaccaagacccctggacctggtgctcagtctgctctcagggctcttgctcgttctgggatgaaaattggacgcattgaggatgttaccccggttcccactgacagcactc

SEQ ID NO: 53437 - DNA, 108 bp, Zea mays
gcaggttctctgtaaatggacaacccatttaccatttcatggggacatcagcattcagccagtacactgtggtgcatgatgtcactgttgcaaagatcaagccacagg

SEQ ID NO: 53438 - DNA, 279 bp, Zea mays
cgctgatgacgactccggtatctactaccagctggctcttatgtggccaggagcatactgcgagcagaccagcgctgggtgctgcaaggcgaccaccggcgtctcgccggcgcgcgacttctacataacgggcttcaccgtccttaacgcgaccaccgaggctgcagtgccggattgcagcaacaaggttccttacgaccctaacctgattaccggcatccaaggcctgaatcagtactggagcaacatcaggtgccccagcaacaacgggcagatcag

SEQ ID NO: 53439 - DNA, 155 bp, Zea mays
actagatcctgctctgtagagtcctggtagacttgacaggaaaattgagttccctttgccagaccggcgtcagaagaggcttgttttccaagtctgcactgccaaaatgaacctgagtgagcaggttgatttggaagactatgtttccagaccgg

SEQ ID NO: 53440 - DNA, 97 bp, Zea mays
ggctgactgattcacaaaaggagagagctacgcacgtctgccttgattgtgggtacatatacttcctacccaagccttttgacggacagcccgacga

SEQ ID NO: 53441 - DNA, 144 bp, Zea mays
tgtacacaggatgttatcgagaagggagagaaacagcccaacatcactattggcattttggtctccgttgtcatcgtgttcgttaccgttctcttcaagctcctgtttggtggcaagaaaccagtggtaagttattcccaacca

SEQ ID NO: 53442 - DNA, 283 bp, Zea mays
cttctctccttttgctcggaacgcacacacagcgcggtcgcctatctccaatctgctcttcgatccaagatgcagatcttcgtcaagaccctcactggaaagactatcagcctcgatgtggagtcttctgacaccattgacaacgtcaaggccaagatccaggacaaggagggcatgcccccggaccagcagcgactcatcttcgctggcaagcagctcgaagacggtcgcacacttgccgactacaacatccagaaggagagcactctcgagcttgtgctcc

SEQ ID NO: 53443 - DNA, 264 bp, Zea mays
ggcctcacatatatactgccgattccattgggcttcgattccaaatgggacaccaaaaggtctggtggttttcaagaaggaagatttggctacttcatagtgaatgggagccgggtctgcgcgaaccctcacggtctgatcaggaagtacgggctcatgtgctgcaggcagtgcttccgcagcaacgccaaggacattggtttcatcaagtaccgttgaagaggccactgtgctgctgtggagaacttcctacatcaaagaaat

SEQ ID NO: 53444 - DNA, 288 bp, Zea mays
gtgccgcccgtgtggtaccaggcggagaacaagggcatggtgaggacggaggacggccggtgggtgctgccgccgcggcagagggtgctcgacgaccacccggaggacactgaccatcacctccagcggctcggtctcaccgcgtgaagctcagcaatactctgatagtagcgttaattagtgcgtgtggcgttcgcgtacgtgcgcggggcagtcggttactctgttgccgcgcgcggcagctcagtggcgcgttcatggcgtgcatgatgcgggtgacgtgcggga

SEQ ID NO: 53445 - DNA, 275 bp, Zea mays
cgcagtctccctcaggtttagtgttcgcaatggcggccttcaacaagcttggtggccttctaaggcacagttctctggtgagcggtatcactggtggctcttctcctgcagtgttcaatgctgcacggctcatgtctaccaagctatttattggtggtcttgactggggtgttgatgacgtgaaactaagagaagcatttagcagctttggagaggttactgaagcgagggtgatcacagacagggagactgggatgtcaagaggctttggcttt

SEQ ID NO: 53446 - DNA, 276 bp, Zea mays
agatgcactacggaccttgcgggagctgaaattccttcgccatctccggcatgagaatgtcattgctttgaaggatataatgatgccaatacacaggagaagctttaaggatgtgtacttggtatacgaactcatggatactgatttgcaccagataatcaaatcacctcagggcctttccaatgaccactgccagtattttctttttcagttgctccgaggactcaaatatctccattcagcagaaatactccacagagacctaaaacctggaaa

SEQ ID NO: 53447 - DNA, 294 bp, Zea mays
gaaccacaagattcagggatatcattgcagactgttcttgaattaggcccaaccatcccaattttcggagtttgcatgggcctgcagtgcattggggaggcatttggaggaaagattatccgtgctccttctggagtgatgcatgggaaaagctctccagtttattacgacgaggaattaggaaaggccttattcaatggcttgccaaacccttttacagcggcgaggtaccacagcttagtcattgagaaagaaaccttcccacatgatgctttggaggctaccgcatggact

SEQ ID NO: 53448 - DNA, 282 bp, Zea mays
gatttgctgaagaatgctgagagtaacgctgatgtgaaaggcttggacgtggacaacctctatgtttcacacatccaggtgaaccaagcccagaagcagaggcgccgcacctaccgtgctcacggacgcattaacccttacatgtcctccccttgccacattgagctgattctgtcagagaaggaagagcctgtgaagaaagaggctgacaacattgtcgcggcaaggaagcagtgaagtatgttagcctgctgataatggcatcctttcgaagcattatag

SEQ ID NO: 53449 - DNA, 296 bp, Zea mays
ggccgctgcatcgatcccgcgccatccccgcctgcctcccccggcaccgatcgggtttgatcgatggcgtcgaagaggatcctgaaggagttgaaggacctgcagaaggacccgctcacctcctgcagcgcacgtcctgttggtgatgacatgttccattggcaagcgaccatcatggggccttcggacagcccatttgcaggtggggtattcttggtgaacattcacttcccaccggattaccctttcaagccaccaaaggtgtctttccgcaccaaggctttccagccgaacat

SEQ ID NO: 53450 - DNA, 261 bp, Zea mays
gcgagggagacgggagaaccagggagcggaggcgtgcgtgctgcggcctgcggcctgcaggaccagagatcgaggactgagctagggtctgggactgggaggcggagatgtcgacgccggcgaggaagcgcctgatgcgggacttcaagcggttgcagcaggacccgcccgccggcatcagcggcgcgccgcacgacaacaacatcatgctctggaacgccgtcatattcgggccggatgacacgccgtgggacggaggca

SEQ ID NO: 53451 - DNA, 283 bp, Zea mays
cgtgatcaccattgagatctcgcggtccgacgagaagctgctctccgtgttccgcgagggcgtcaagtacggcgcgggcatcggccccggtgtctacgacatccactcccccaggatcccgtcggctgaggagatcgccgaccgcatcgacaagatgctggcggtgctggacaccaacatcctctgggtgaaccccgactgcggcctcaagacccgcaagtacacggaggtcaagcccgccctgaccaacatggtctccgccgctaagctcatccgcacccag

SEQ ID NO: 53452 - DNA, 274 bp, Zea mays
ttggagtttctggttcatcagcgttgtacgtggctaagcagctgaaggagcgtcagatggtgattccaggccatcgtggattcaaaccttcaaatgtaactgaacagatacatcccaaccgctatcagcatttggaggagtgtgcattggcgcgctaactgtcctagctgatttcatgggcgcaattggctcaggaactggcattctgctcgctgtcactatcatataccagtactctgagacattcgagaaggttttttcaaccgagcttggt

SEQ ID NO: 53453 - DNA, 283 bp, Zea mays
gaaaaatcaaatcaggagacggggattccagagagccccgttcgggtagggaagggaaggagaggcgaacggaggcgagatgggggcggccgaatccgtgccggagacctccatacacgaattcaccgtcaaggattgcaacggcaaggaagtgagcctggaaacctacaaggggaaggtcctccttgttgttaacgtcgcctccaaatgtgggttcacggagaccaattacacgcagctgacggagctttatcagaagtacagggacaaagacttcgagatt

SEQ ID NO: 53454 - DNA, 282 bp, Zea mays
aactttatagagatgatcttttggaagacttgctcaaagaacctgatgagctaaccataaagaggaagcagatacgtgaaaatcttaaggtccttcaacaagcttacaaaactttggatgagataccacttgacgcagaggcagtagagaggggtggtggatactccctcgattctgatgcgattggtctaccaagggctcatgggctttcttcatccctccacggattcaatgatggaagctcatcatattcaaccccgaagcagtcaaggtcaaggaggc

SEQ ID NO: 53455 - DNA, 285 bp, Zea mays
agaatttcaggaggattagccacaggacgcaccatcaaaaccacggtcacgttgagaaggacgagtcctggcacccgctaccagagaggctgtacaaaagcctggactttatgactaggaaactgcggttcaccatgccgttccccttgctcgcgttcccgttatacttgtttgcgaggagtccagggaagtcaggatcacacttcaacccaggcagtgatctgttccaacctactgaaaagaatgacatcataacatcgacggcgtcctggctggccatggttg

SEQ ID NO: 53456 - DNA, 286 bp, Zea mays
cacaatctgcctgcttggccctgcttggcgtcaaaggtgccaacagggaatctccggggtccaacgcgaggctcttggccacggtggttgcgggtgcggtcctagctggggagctgtcccttatctctgcgcaggccgctggccatctggtcaagagccacatgatatacaacagatccagcaaggatatgtccaagacccttgcagaggaaacagacaaacccaagatatgctgaataatatcaagtagttgttctatagccctttgggagaaaaggagcagaaa

SEQ ID NO: 53457 - DNA, 282 bp, Zea mays
aggaggtcttgctggaacctctgagaagctgaagatacaggcagacaaagcacaaaaggacctcagcgtgatcgctaccgaggttagtcaggagggacaggaatatctggtgatggcagctcggaactccccagactcgatcaaggatattgcaacaacgttcagggctcttgggagattgaattggccatcagagtatgaggattatcatgtgggcattccgtttggtacctttcttacagtagggggttcctcaacttcatgttgactggaagacctctg

SEQ ID NO: 53458 - DNA, 245 bp, Zea mays
gagagccacaaggttcaggtctagcattggagactgttcttgagttagtgccaagcatcccaatgttcggagtttgcatgggcctgcagtgcattggggaggcatttggaggaaagattatccgtgctccttctggagtgatgcatgggaaaagctctccagcttattacgacgatgaattaggggaggccttagtcaatggctggccatacccttttacagcggcgaggtaccacagcttagtc

SEQ ID NO: 53459 - DNA, 280 bp, Zea mays
agcgccacctagactcggtccccgcagccaccgcctcttccgccgactcagcaacctactcagccgatgcgcctgctaaactgattgacgggaagctcgtggcgaacaagtgagagaagaaatagccgtccaagtcaccaggatgaaggatgtgatcggcattgtgcccggcctggctgtcatccttgttgggtcgaggaaggattctcagacttacgtgcggaacaagaagaaggcgtgcgaacgggtcggtataaagtcgtacgaggtcaacttgcct

SEQ ID NO: 53460 - DNA, 279 bp, Zea mays
gggagggagacgggagaaccagggagcggaggcgtgcgtgctgcggcctgcggcctgcaggaccagagatcgaggactgagctagggtctgggactgggaggcggagatgtcgacgccggcgaggaagcgcctgatgcgggacttcaagcggttgcagcaggacccgcccgccggcatcagcggcgcgccgcacgacaacaacatcatgctctggaacgccgtcatattcgggccggatgacacgccgtgggacggaggcacgttcaagctgactctgc

SEQ ID NO: 53461 - DNA, 282 bp, Zea mays
cgttaacatcacttcgtactacctcatcggcatccctcttggagccgtgctgggctacgcgctggggcttcatgtgaagggcatctggatcggcatgctgctcggaacgctggtccagactgttgtgcttctcttcataacgttgaagaccgactgggaaaaacaggtggaggttgctcaagagaggctgaagagatggtacatggaagagaagagaagactccaggggtccagacgatacccttaggccggttctcagctccactgtgtatctctagtttt

SEQ ID NO: 53462 - DNA, 278 bp, Zea mays
aaccttttgtattgggagttgtggatccacatgattcattatcccatcctgctggggttgcagatgttaaagctgaatcagcaacatgtctggatcctgatctattcaccagttttttgattcctagttggtttggggatgaagggcaagagcctataaactgcaatcctttcccactgcctgatatttatgaggcattccaaagcaaaaagcgttctgctctggaagatatccaaaagatgattcgggagctacagcttgacgagaatcggaaaagg

SEQ ID NO: 53463 - DNA, 281 bp, Zea mays
gcgtacgtagcacagtccattattgccgtctcccttttgcgtgacaaagaaagagagcgagaagcagtcgccatgtctggcatcatccacaagatcgaggagaagctccacatggggggcgaccacaagaataaggaggaggagcaccacaagaaggccgaggagcaccacaagaaggaggagggggagcaccacaagaaggacggcggggagcacaaggaaggcatcgtggagaagatcaaggacaagatcaccggcgagcacggcgacaagtccggcga

SEQ ID NO: 53464 - DNA, 109 bp, Zea mays
ctgacctccggaagcttgcagtgaacctgatccccttcccacgtctgcacttcttcatggttggatttgctccactgacctcgcggggctcccagcagtacggcgttct

SEQ ID NO: 53465 - DNA, 112 bp, Zea mays
gcccggggccagatccatggcttccggatgtctctttggtacgagcacctgggaatgctggaagacgtcttccagcggcccgagagcgtagagtgtagtgcagaaggtgaac

SEQ ID NO: 53466 - DNA, 168 bp, Zea mays
ggagaggagaggagaggagaggttgggtctgggacaccatggctccgatgaagctgtacggggcggtgatgtcgtggaacgtgacgaggtgcgcaacggcgctggaggaggctggctccgactacgagatcgtgcccatcaacttcgccaccgcgagcacaagagccc

SEQ ID NO: 53467 - DNA, 101 bp, Zea mays
ctgtgtaccactgcccgttttgtaatttgtgtcgtcttgggaaaggtcttggtgttgatttctttcattgcatgaaatgcaactgctgtctgggaatgaaa

SEQ ID NO: 53468 - DNA, 206 bp, Zea mays
gtggaaccacgggctcatctccgacgccacgtaccggctgctggacgccagctgcgtgcacgacagcggcgagcacccgtcgccgcggtgcaacgcagcctacgacaaggcgacggcggagccgggcgacatcgacccctacagcatctacacgccacatgcaaccagacgtcgtttacgccgaggaggatgaggctcaagggccg

SEQ ID NO: 53469 - DNA, 118 bp, Zea mays
ctcgagccgattggaaacaacggcaacataattggcattcatcgaaagaatcacattccaagagttggtgatttcaatgagagcacatactacatggagggtaacactgggcatccag

SEQ ID NO: 53470 - DNA, 202 bp, Zea mays
aatccttcaagcgcaagctgcctcctcctcgtcgtccggtcgtgagaagggatggcgggccgtggcaaggctatcggcgctggcgccgcgaagaaggcaacgtcgaggagctccaaggccggactccagttccccgtcggcaggattgccagttcctcaaggcgggcaagtacgcggagcgcgtcggcgccggcgcccccgt

SEQ ID NO: 53471 - DNA, 166 bp, Zea mays
cacacacacacaaccagatctcccccaaatccacccgtcggcacctccgcttcaagatgcagatctttgtgaaaaccctgactggcaagactatcaccctcgaggtggagtcgtctgacaccattgacaacgttaaggccagataccaggaaaggagggcatcccc

SEQ ID NO: 53472 - DNA, 196 bp, Zea mays
ccttcatacagccctacctccccctcatacagccctacctctccctcctacagcccgacatcacctgcttacagcccgacatcaccaggatacagcccaacgtcaccgagctacagccctacatctccgagctacagtcctacatcccgagctacaatccttcatcagccaagtacagcccttcacatgcatactc

SEQ ID NO: 53473 - DNA, 137 bp, Zea mays
gcggctacggcggcggcggcggcggctggagggactgatgtgtggccccatcctggcttcggccgagttatcttatctatctatagtatcgtgttaccgttcgcttctgtcaccgtgttagtgtccgttctaccttt

SEQ ID NO: 53474 - DNA, 110 bp, Zea mays
cggatcacctcgtgtgacgtggacatgcacagtacgagaagcacgaggcaaagaaggacccggagcacgcgcaccgccacaagatcgaggaggaggtcgcggcggcggcg

SEQ ID NO: 53475 - DNA, 303 bp, Zea mays
gaaatccatcgacgaacaactgagaagagctgcgcctgcgcctgcgcctgcgggaaagggagaacatggtggggaagaagaggggtgttatctccccgctggaccatctcgctgggctgctggaggtgcgcgtggtgaggggagtggacctcgccatccgcgacctccgatccagcgacccctacgtcgtccttcgcatcggcaaggcgcagaaagtgaagacgcgagtggtcaagaagagcatcaatccggaatggaacgaagaactcaccctctctattgaagacctgcagttcctattag

SEQ ID NO: 53476 - DNA, 303 bp, Zea mays
tggatatatacaaacatttcagcgatctgacagttgacaatatagcctacgccatctttggaagcagctacaagttaggcaaacaagtgttcgaggcacaaactgagctgctggggatcaccatggctactttccttgacgtgcccataccaggatccaaataccttccaacccaagcgaatcggcgaaaatggatgctggagacgaagctcaagagcttactcacgcggatcatacagccacggttagcaagcggtgagcacggaaacgatctgctgggcgtgatgctggactcctgcactg

SEQ ID NO: 53477 - DNA, 212 bp, Zea mays
gaagatctgctgcatcggtgctggctatgtcggtggcccaaccatggctgtcgttgccctaaagtgcccagacattgaggttgtcgttgttgacatctccaagccccgcattgaggcatggaacagcgacaccctcccgatctacgagcccggcctcgatgatgttgtgaagcagtgcaggggcaggaagctcttcttcagcactgatgttg

SEQ ID NO: 53478 - DNA, 221 bp, Zea mays
cgtatcttgtacaggttgcatcacgaccaaggagctgggaactgtcatgcgttcactggggcaaaaccctacagaggctgagctccaggacatgatcaatgaggtcgatgccgatggcaacggcaccatcgattttccagagtttctgaaccttatggctcgcaagatgaaggacactgactctgaggaagagctcaaggaggcctttcgtgtgtttgaca

SEQ ID NO: 53479 - DNA, 305 bp, Zea mays
  unsure (1)..(305): unsure at all n locations
aagaaacaactcgaagatgctcggtcaaaaggcattgatgttagggccttggtggttatcaatccaggaaatccgactgggcaggttcttgctgaagacaaccaatatgatatagtgaaattctgtaaaaatgagggccttgttcttctagctgatgaggtatatcaagagaacatctatgttgacaacaagaaatttaactctttcaagaagattgcaagatccatgggatacggcgaggatgatctccctctagtatcatttcagtctgtctccanaggatactatggagagtgtggtaaaag

SEQ ID NO: 53480 - DNA, 145 bp, Zea mays
cgcacgcttgccgactacaacatccagtaggagagcaccctccacttggtgctgcgcctcaggggaggcatgcagatcttcgtgaagacctggaccggcaagactatcaccctcgaggtagagtcttcagacaccatcgacaatg

SEQ ID NO: 53481 - DNA, 302 bp, Zea mays
caatttgcaggatcctaacaataagagagagattatatgcaatgatgagctccgattagtttttgagcctgatagcacggacatgttccagatgaataagcttctgtccaagcatatacgtcctctggagagtaaaaatgattcgaaaccagaagcaaagaaattgaagccacagggtgatgaaccaatttcttcagttgaaactgatgttaaccaacttccccttatggtttctgatgcgcttgctaccttttttggtaccggagaaagagaaatggtccattctgaggctgttaagcgtg

SEQ ID NO: 53482 - DNA, 288 bp, Zea mays
caaacgcaggcgaaggcgagggtgtgagggaaggagcaccagccatggtgcacgtcaacttctaccgcaactatggtaagacgttcaagaaaccaaggcgtccttatgagaaggagcgtcttgatgctgaactgaagctggttggtgagtatgggctgaggtgcaagcgtgagctttggagggtccagtatgcactgagcaggatccgtaatgctgccaagcacttgctcacccctgacgagaagaacccccgtcgtatctttgagggtgaggcattcttcgccgcat

SEQ ID NO: 53483 - DNA, 209 bp, Zea mays
ccgtcactcaacacagcacaggcagctcgagagagagagagagagaaagatgtcgtggttcgggcaccaccaccacaaccagccggctcccccggcgtcgggccccaaccaggtgttcaagatcttctgccgcgccaacgagaactactgcctggccgtccgcgacgcgccgtcgtgctggccccggtcaaccccaaggacgaccacca

SEQ ID NO: 53484 - DNA, 148 bp, Zea mays
gaagaccgcggagcggtgatgcagctgtacacggaggcaacagatggctcctacatcgagcacaaggagagcgccatcgtgtggcaccaccacgaggcggatccggacttcggttcctgccaggccaaggaactgctcgaccatctcg

SEQ ID NO: 53485 - DNA, 296 bp, Zea mays
ctttgtcatgtcctgctcattcactaaccaggtcattgcccaacttgaactgtggaaggagaagagctctggcaagtatgagaagaaggtgtatgtactccccaagcaccttgatgagaaggttgctgctctccacttgggcaagcttggtgccaagctgaccaagctcaccaagtctcaggccgactacatcagcgtgccgatcgagggtccctacaagcctgcccactaccggtactaggcacacggcttgcagctcactcgggccgttgtgtgctatgaagttcgctacactg

SEQ ID NO: 53486 - DNA, 252 bp, Zea mays
ggctggcttcagtacccacctgatgcgccgcatccagcgcggcccagtccgcggcatctcgctcaagctgcaggaggaggagcgcgagcgccgcatggacttcgtgccggagaagtccgcgctcgaggtcgaagagatccgcgtcgacaaggagaccatggagatgctcgctgccctcggcatggccgacctgcccggcgttgagcgccaggctgaggtctccaacgcccccgcctacggccgcccgcagta

SEQ ID NO: 53487 - DNA, 121 bp, Zea mays
ctttgtcatgtcctgctcattcactaaccaggtcattgcccaacttgaactgtggaaggagaagagctctggcgagtatgagaagaaggtgtatgtgctccccaagcaccttgatgagaag

SEQ ID NO: 53488 - DNA, 294 bp, Zea mays
gtttgtgtaacattattgaaggcaagattccatctggtcaagacaacatcaaaagtgaagtcaatgaaaatttattctccaactaccctgttcttgatgttggaactggaaatggtcttcttttgcaagcattggctaagcaggggtactacccaaattttctcaatgatgtttaattagcttcctgttggaacgtggattactacgcaggtttacagacttaactggaacagattacagtaaaggagctgttgaacttgcaagaaacctagctgctcgtgatggcttctcttc

SEQ ID NO: 53489 - DNA, 291 bp, Zea mays
ccgaaagcacatagatgccactctcggcagtggaaaccttagggaagctgtgaggttgcctcctggagaggatatcaatgaatggcttgcggtgaatactgtggatttctttaaccaagttaatatgctgtatggcacactcacagaattttgcacacctgagagctgtccgacaatgacagctggcccaaagtacgagtacagatgggctgatggtgtgcagataaagaaacccatagaggtatcagcaccaaaatatgtggagtatctgatggattggattgaaggcca

SEQ ID NO: 53490 - DNA, 299 bp, Zea mays
tccctcccgacccactatcccaaaaccgtagcgccctcgcctgctcgccgccgccgtcgttgcgagctccccatcttcctccgtcaaccatggcgacccagatcagcaagaagaagaagttcgtcagcgacggcgtgttctacgccgagctcaatgagatgctgacgcgggagctcgcggaggacggctactccggcgtggaggtgcgcgtcacaccgatgcgcacggagatcatcatccgcgccacgcgcacgcagaacgtgctcggcgagaagggccgccagatcagggagctcacg

SEQ ID NO: 53491 - DNA, 293 bp, Zea mays
gccaggacctcatctccaggatcttcgtcgccaacccgtccaccaggatcaccatgcccgagatacggagccacccttggttcctgaagaacctcccggccgacctggtggacgacagcgcgacgacgacgagcaagcagtacgaggagcccgagcagccgatgcagggcatggacgagatcatgcagatcctgggcgaggccaccattccggcggcggggtcccgcgggctcaaccagttcctgaacgacggcctggacctcgacgacgacatggaggacctggactcggac

SEQ ID NO: 53492 - DNA, 266 bp, Zea mays
cgacgactgcggttgggaagggaagacgcctacaaacccctctctacctctcctctgcgaaccacctgccgccggaagccctagagggctcgacccatggatccgccgcagcagccggagcctgtcacctacgtctgcggagattgcggagctgagaacaccgtgaagctagtagacgtcgtccagtgccgtgaatgtggccaccgcatcctctacaagaagcgcacccccggattgtccaatttgaagcacgctgaggagtgacg

SEQ ID NO: 53493 - DNA, 167 bp, Zea mays
ctggcttctcctccccctcttatcaagtcctcctcgggttagggttccgtagggttttgtggaggggcgatggcggcggctgatgtggagtaccgttgcttcgtcggcggacttgcctgggccaccagcaacgagtcgctggagaatgccttcgcctcctacggcga

SEQ ID NO: 53494 - DNA, 297 bp, Zea mays
gccaggacctcatctccaggatcttcgtcgccaacccgtccaccaggatcaccatgcccgagatacggagccacccttggttcctgaagaacctcccggccgacctggtggacgacagcgcgacgacgacgagcaagcagtacgaggagcccgagcagccgatgcagggcatggacgagatcatgcagatcctgggcgaggccaccattccggcggcggggtcccgcgggctcaaccagttcctgaacgacggcctggacctcgacgacgacatggaggacctggactcggacgccg

SEQ ID NO: 53495 - DNA, 311 bp, Zea mays
agtcagatattatgcttgtttgcttgttgccatctagtattctagtgtctttttgttgtgctaccagttctgcattcaggctggaatcgctcttggagaattaacttcgctaagcgacctttacgacacccagtcgatagcgctgctattcctgatcggtgttgtttcagtcacaccggcgttgttgggcaaggacgaggcacaagaaaaaccatcagaaatggctgtaggcgcgtcgtgatcaccaatgcaccgagcacctgtacatatcaacatgcagccatgcagtggcttcattagttcagatcgac

SEQ ID NO: 53496 - DNA, 307 bp, Zea mays
tttcttctctctctgctcctccgcctccgcctgatccatccaagacagggatcgccatgtcggactcggaggagcaccacttcgaatcgaaggccgacgctggggcgtccaagacctacccgcagcaggctggcaccgtccgtaagaacggcttcatcgtcatcaagaaccgtccctgcaaggttgtggaggtttctacctccaagactggtaagcatggccacgccaaatgccactttgtcgccatagacatattcaatgggaaaaagcttgaagatattgttccttcatcacacaactgtgacat

SEQ ID NO: 53497 - DNA, 303 bp, Zea mays
gaaggatcggcaggctcgtggccagggtcgccctccagagcgaggatgtcgagctcgtcgccgtcaacgaccccttcatcaccacggactacatgacctacatgttcaagtacgacaccgtccacggccactggaagcacagcgacatcacactcaaggactccaagacccttctcttcggtgacaagccggtcaccgtctttggcatcaggaaccctgaggaaatcccgtggggtgaggctggcgctgagtatgtcgtggagtccaccggcgtcttcactgacaaggacaaggctgctgcac

SEQ ID NO: 53498 - DNA, 307 bp, Zea mays
caaatgttgtctagatcaaatcatgttgctattgtcactgttgatggtagacctgggcctggtgcatatggtattacagctgttattattggagctattggctatttattcataagatggaaggggtggaaactttctgatatgatgtttgtgacgaagcgtggattatctgatgcttgcaatgttgtggggaaacaagtggatcaggtttcagaaagtgttaatgttgcaaggagacatcttgcaggaaggattgatcgtgtagattgtagtttagatgaatgccatgaaattacagaagccacaa

SEQ ID NO: 53499 - DNA, 306 bp, Zea mays
cggcgcacgagctcgcccgagatggcgaacgcgagatcgggtgtcgctgtgaacgatgagtgcatgctgaagtagggcgagctgcagtcgaagaggctgcaccgcttcataactttcaagatggacgacaagttcaaggagatagttgtggaccaggtcggggatcgcgctaccagctacgatgacttcacaaacagcctccctgagaatgactgccgatacgcgatctatgatttcgactttgttactgcagaggatgtccagaagagcaggatcttctatatcctatggtccccatcctccgcc

SEQ ID NO: 53500 - DNA, 301 bp, Zea mays
gttaaacaggacagatgacaaaagtaaagcagtcattattgcaaaccctcgcacttctgaattcgaggttgttagaactagcctgatgtcgtgtttattaaaaacactgaaacataatatagaccatccaagacctataaagatttttgaagttggtgatgttgtgatgctggactcgtcacgtgatgtaggtgcctctaataatcgcaggcttgcagctttgtactgcaatagggtttctggatttgaggaaattatgggattggtggatagtattgtcaaagttgtcagagctccacat

SEQ ID NO: 53501 - DNA, 302 bp, Zea mays
gcagcagccaaaacctacctagccgccgccgcagggggcgcccagtcgccgccaagatgcagatctttgtgaagactctgacggggaagaccatcactttggaggtggagtcctccgacaccattgacaatgtgaaggccaagatccaggacaaggagggcatccccccggaccagcagcggctcatcttcgccggcaagcagctcgaggacggtcgcaccctcgccgactacaacattcagaaggagtccaccctccacctggtgctccgcctccgcggtggcgccaagaagcgtaagaag

SEQ ID NO: 53502 - DNA, 299 bp, Zea mays
gtcgctgaggaggttgtgaagaaggagaccgagctggagatgcagagggaggaccttttgtcgaagcctgagcagatccgggctaagattgtcgaagggcgtgtaaagaagaggcttggagaattcgcgttgttcgaacagccattcatcaagaacgacaaggtcacaataagtgagtggctgaagcaaactatagctacaactggagagaatatgaaggtcaggagatttgcccggtacaacctaggtgaagggctggagaagaaaagccaggattttgctgctgaagttgcagccca

SEQ ID NO: 53503 - DNA, 303 bp, Zea mays
ggcaaactagctgatgagatcaagaaaggtgcggtatctgttgaaggtgttgaggctaaaatatggcaggtccctgaaattctctctgaagaagtgcttggaaagatgggcgcgccccctaagcccgacgtgccagtcatcacaccgcaggaacttgcagaggctgacggtatcctctttgggtttccgacaaggttcggaatgatggcagctcagatgaaggcgttcttcgatgccaccggtgggctctggagggagcagagcctcgctggcaagcctgccggcatgttcttcagcactgga

SEQ ID NO: 53504 - DNA, 297 bp, Zea mays
agaggctatggggtgagaatttctttgaccctgccacaaagaaatggaccaccaagaacacaggttctcctacctgcaagagaggatttgttcagttctgctacgagccaatcaagcaaatcatcaaaacctgcatgaatgaccaaaaggagaaattgtggcccatgttgcaaaagcttaatgttaccatgaaggctgatgagaaggagttgattggcaaagctttgatgaagcgtgttatgcaaacgtggcttccagccagcactgcacttcttgagatgatgatattccaccttc

SEQ ID NO: 53505 - DNA, 299 bp, Zea mays
ctgagctgggactctctgcaaattctagcagcactgcacaggatgctgagaagaaaggtaccaaccaaattggtgatgcagagaaaaaggaagatgctcctgctcctcccgagagcaaggcctccaagaagaagaaaaagaaggataagagttcaaaggagggaaaagaaacacaagaagcacttgatgggtcagaggagactgccagtgcaggacctgatgaagatacttctgctgtggatgtgaaggagcgcttgaagaagatggcatcaatgaagaagaagaaatcgagcagagag

SEQ ID NO: 53506 - DNA, 295 bp, Zea mays
gttggatcacaaggacatggtccatgattctgccatcgactactatggcaagcgccttgccactgcctcttcagacttcaccgtgaagatcgtcaacattggtgctgcaaatgccccatcccaggtccttgcaacgctaagtggccactatggtcctgtgtggcgtgttgcttgggcccatccaaagtatggtgcaatccttgcatcgtgcagttatgatggccgtgtcattatttggaaggaggatgcacgaggcaattggtctcaagtccacgtcttcagtgacaacaagtca

SEQ ID NO: 53507 - DNA, 299 bp, Zea mays
cggacgcacacacacgcaaccaggtctcccccaaatccagccgtcggcacctccgcgtcaagatgcagatctttgtgaaaaccctgactggcaagactatcaccctcgaggtggagtcgtctgacaccattgacaacgttaaggccaagatccaggacaaggagggcatccccccagaccagcagcggctcatcttcgctggcaaacagcttgaggacgggcgcacgcttgctgactacaacatccagaaggagagcaccctccaccttgtgctccgcctcagtggtggcatgcagatc

SEQ ID NO: 53508 - DNA, 293 bp, Zea mays
cgcttctcctccccctcttatcaagtcctcctcgggttagggttccttagggttttgtggaggggcgatggcggcggctgatgtggagtaccgttgcttcgtcggcggacttgcctgggccaccagcaacgagtcgctggagaatgccttcgcctcctacggcgagatcctcgactccaaggtcatcaccgaccgggagacggggaggtcccgcggcttcggcttcgttaccttctcctccgagaactccatgctcgacgctatcgagaacatgaacggcaatgagctcgacg

SEQ ID NO: 53509 - DNA, 305 bp, Zea mays
  unsure (1)..(305): unsure at all n locations
tagacttcggcttccacggcaccttcatcacgggccaggagctcgaggcncaggcggcctgaccgagctccacgtttctcggaggagcaacagaggagccagaccatggatcaggggagaagtcaccagagggagcccagatcagttccccggggtcttcctgtccccccacgcacaccagagttacagttggtagttgctttgcttttcttgtcattatttcatttgacactagtgtaagtaaattgggatagtggcagcttagagagagagagagagtttagtagaaaggcgcccagctcgta

SEQ ID NO: 53510 - DNA, 296 bp, Zea mays
atttcttcggttattgcattaccctggtgaagtacatgagtctgatagtggaaactatggtgcgtcactcactcggactatggtatgataactcttttagtgacagatggcactcctggcctgcagatatgcagggagaaggataggaatccccaactatgggaagatgttcatcatattgatggggcccttattattaatattggtgatttgctagagaggtggacgaattgtgctttcagatcaactttgcatcgtgttgttgcaatcggtaaagagcggtattcggtggcttt

SEQ ID NO: 53511 - DNA, 294 bp, Zea mays
cagtaattaagagctatagccctgaactaattgtacatccaatattagaagaatcttacagtgtaagggttgatgaacgagcatctgtttcttctaagattcttactgaagttgcaaagtggatggagcgctttgattgcattgttgttggtcccggccttggaagggacccctttcttctggaatgtgtgagtaatatcatgaggcacgcacgacaggctaatattccaactgttgtggatggggatggcctatttcttgtaaacaataaccttaatcttgttgaaggaaacc

SEQ ID NO: 53512 - DNA, 295 bp, Zea mays
gccaagttctggtggttgtagattgtttggaattaatatatgctcagctgaggaagaagtattacctgaggttactgctccaggtgttggttatgagcagactgctgcctctgtagagttgaactcggataagctctcacagccatctgatgtcaacaattctgatgccctagcagctagcagtgaacgttcacctcttgaatcccaaagccggcaagtgaggagctgtaccaaggtaattatgcaaggaatggcagtaggaagggctgtagacctgacaaagcttagtggctac

SEQ ID NO: 53513 - DNA, 298 bp, Zea mays
ctccttcccggtctcctccgcccgttgccttcgtcccctccatctccggctgcgtcgccggcgagcccgacaccgcgaatcggatccgccgacaaggcgagagggaaaagatggggcttacgttcaccaagctgttcagccggctgttcgccaagaaggagatgcggatcctgatggtgggactcgacgccgccggaaagaccaccatcctctacaagctgaagctaggcgagatcgtcaccaccatccccaccatcggattcaatgttgaaactgtggagtacaagaacatcagctt

SEQ ID NO: 53514 - DNA, 274 bp, Zea mays
ggctcgacgccatgtctgggaggaagaagacgcgggagcccaaggaacgggaacgtgacgcttggccacgctgtccgcgagggagaacacgtctttggcgttgcgcacatcttcgcctccttcaacgacactttcatccatgtgacggatctgtctggaagggagacgctcgtccgcatcactggtggcatgaaggttaaagctgatcgttatgagtcctcgccttatgctgctatgcttgcctcacaggatgtcgcgcaaagatgcaaggagc

SEQ ID NO: 53515 - DNA, 289 bp, Zea mays
tgcagcccaactgtctatgaacccatgctattagattggatgaggaaccttgaagttggaatccctgaactccttgagagcgacatcaaagtgttgatttatgctggagagtatgacctcatatgtaactggcttgggatctcaaggtgggtaaactctatggaatggtctggaaaggaagcttttgtgtcctcatccgagaagcccttcacagtcgacgggaaagaagctggcgttctaaagagccacggtcctttgagtttcttgaaggttcacgatgctggtcaca

SEQ ID NO: 53516 - DNA, 212 bp, Zea mays
  unsure (1)..(212): unsure at all n locations
ggagatgtggcggcccttcttccagctcgaccacctcatcatcgtgcatgactgcgagtcgaccaagaccatcaaggtgcccgatggcttcgactacgagctctacaacctcaacgacatcaaccgcatcctcgggcccaaggcctcctgcatctcattcaaggactccgcctgccgctgcttcggctacatggttcaagngtagaagtaca

SEQ ID NO: 53517 - DNA, 291 bp, Zea mays
gttcaagggtctgcctggggtgctgtgggtgctccctaattcctacatcgacgtgaagaacaaggactacggaggtgacaagtacgtgaacggcgagataatcccctgcacgtacccgacgtaccagccgaaggagcggaggacgtccaagtacgagagcaggcggtacgagaggcggagagatgggccaccggcggccagcaggaaaccgaggcagcaggcaccagctcagactcagaccgagtcggcgtcttcgtgacgagctctgcaggcattttgtccacgtaccta

SEQ ID NO: 53518 - DNA, 293 bp, Zea mays
agaagcgaaaccgacctttccccctcccccgcattccacctcgcggagatccagtccagccctagggtttcgccagcggcgagccaaactccacgagcgggggaagaggggaaagcagggacgacgagggggcagccatggggcagcagtcgctgatctacgcgttcgtggcccgtggcacggtcatactggccgagtacacggagttcaccggcaacttcaccaccatcgcctcccagtgcctcatgaagctccccgcaagcaacaacaagttcacctacaactgcgacggt

SEQ ID NO: 53519 - DNA, 276 bp, Zea mays
cgctgagtgtcattgtagcttggatcgcgggtattcaaatggatcttgacttcaagctcatagagaccggctctctcttcgtctcagtaatagtgacagcattcaccctccaggatggttcgtcacactacctcaaggggatccttctgctgctgtgctacattgtgatcggtgcatgcttctttgttacgaggcaacctgcaagtaacaacaatggcgctgggctgtcgctgccaactggtactttgagtgcacaagctgcatgattgttcaagg

SEQ ID NO: 53520 - DNA, 273 bp, Zea mays
gcagcaaatgccatttatgttccacctgctcagcaaggcactattgatctccagagtggaatcctccatgctgaagaaaaggattacaagactgcttacagctacttctttgaagcatttgaagctttcagtgcactggaggacccgaaggccatctttagcctgaagtacatgctcttgtgtaagataatggttaaccaagctgacgatgttgcaggaataatctcgtctaaggctggcctaaaatatctgggtcctgatgttgatgctatg

SEQ ID NO: 53521 - DNA, 277 bp, Zea mays
gatggccattacgaaatcatagcagcacatgggaagggtgtgttctcaaaagtcgtgcgggcaaaagatcttaaagcgagtaaagatgatcctgaagaagttgctatcaaaattattcgcaacaaggagacaatgtacaaggctggtaagcaagaggtttcaatactggaaaaacttgcaagtgtggaccgtgaggacaaacgccactgcgtgcggtttatttctagtttcatgtaccggaaccatctttgcttagtttttgaatctctcaatatga

SEQ ID NO: 53522 - DNA, 167 bp, Zea mays
gtcatcccagggcctggtgacaaacccatgattgtagtcaactacaagggcgaggagaagcagtttgctgctgaggagatctcctccatggtcctcatcaagatgaaggagattgctgaagcctaccttggttccaccatcaagaacgcagtggtgacagttccggc

SEQ ID NO: 53523 - DNA, 191 bp, Zea mays
ggcgccgctttggagtttactagggtgctcaaatccaagcggcaggtggtgaccgggaccctgcatgacctgatactggaggcagctgatgctggaaaaaagagtgtgtacagagcaaaggtttgggtgaagccgtgggaagatttcaagtctgtcgtcgagtttcgccttgttggagactctgaatctga

SEQ ID NO: 53524 - DNA, 268 bp, Zea mays
ctcgagccgtttgcttctgaactggagcgctgcaggtacatttgcctcctacatgacggtgagtgctttgactctcgtcttcgtcatcctttgggtaccagagacgaagggaagaacccttgaagagatacagtggtccttccagtgagctccgggattcatatgtacatgcaaatagcgtggcaaatcctccaggatcccaataaaagatatagtgaaatatagcagaagctatttcatttagcattttttatagtttaaatggaat

SEQ ID NO: 53525 - DNA, 203 bp, Zea mays
ctcgaaccttcttccaaagcacctgaaccctagtgatctcggaaccctagccgcgcgcggatctcggcatttccccttcctccacgccagccatggacgaggacttcgagatgcctcccgccggcgccgatgagatgatgggcgacgacgagatgggcgacttcggcggcgacgagggcccggtgatgaaggttggcgaggag

SEQ ID NO: 53526 - DNA, 173 bp, Zea mays
ctcgagccgattcggctcgacccagcgccggcagtcgccgtcatcgatcgatcgccggaaaactaacccctaacgatatctggagccggcgaggaggacaagaagcccgcggagggcggcgccacatcaaccttaaggtcaagggacaggatggcaatgaggtgttctttcgc

SEQ ID NO: 53527 - DNA, 271 bp, Zea mays
gcttgccaagaagctcggcgagctcgatcccttgatgaagcccaagcaggaccggtacgcgctccgcacgtcgccgcagtggcttggcccccagattgaggttatccgcgccgccaccaagtccattgagcgcgagatcaattccgtcaacgacaacccgctcatcgatgtcgcccgaagcaaggctcttcacggtggcaacttccagggcacgcccatcggggtgtccatggacaacacccgtctcgccatcgcagccatcggcaagctc

SEQ ID NO: 53528 - DNA, 273 bp, Zea mays
cacacatacatagtttcttctactacacgacgacaaacatggggaagcctgcgaagatcggagagtggggtggatacgccggcgatcgtcgggatctgagggctactccggaccggctgatcgaggtgaaggtcacggcggacaacagcagctgcatccgctccatctccttcatctacatcggagccgatggcaaaccgtacgaggaggggccatggggtttcggccatgctggcacggagtacaagattgatctgtgcaggttcgacgaga

SEQ ID NO: 53529 - DNA, 270 bp, Zea mays
gaccaatcaacaaagtgacgcgagcacgagcatccatcgtttccccttcttccccatcgcgtgccctcgccgcagccatcttccatggcggaccagctcacggacgagcagatcgcggagttcaaggaggccttcagcctcttcgataaggatggcgacggctgcatcactaccaaggagcttggaactgtgatgcgctcccttggccagaaccccactgaagcagagctgcaggacatgatcaacgaggttgatgctgatggcaatggg

SEQ ID NO: 53530 - DNA, 265 bp, Zea mays
gaaattgcaaacctgtcactagcgaacatacttcgtcgagcacactcttgcaattaatccaccgagttcggtttagtagcatagcatcgacaataaatgtcgctcgtgagtcggcgcagagcaacgtgttcgaccccttctccctcgacctctgggaccccttcgacatgttccgctccatcgtcccgtcggcggcctcctcctgcggcggttccgagaccgccgccttcgccaacgctcgcgtggactggaaggagacgcccga

SEQ ID NO: 53531 - DNA, 115 bp, Zea mays
gagacgagttaaagacttctttaaacattttgatcggcatgcactggatctgttagagaagatgttgactttagatccatcacagaggatatcagcaaaagatgcacttgatgcg

SEQ ID NO: 53532 - DNA, 144 bp, Zea mays
ctgaaagtcactggctttgtcacaagcaccgtgttcaactccaaaccagcacaaaactttgtcaagttaaagcctggcgaagttattcttgcttcacttgatacatttgggaaaatatgggatgctgtggaagtgtctggcaaa

SEQ ID NO: 53533 - DNA, 262 bp, Zea mays
ttcccctccgagcctcagttcgcatccacgcgcgccgccgccgcctcgccggtcgacgctcaccgcgtagcatggcggaacagactgagaaggctttcctcaagcagccaaaggttttcctcagctcaaagaaatctggcaagggtaagaagcctggcaagggcggaaaccgattctggaagagcattggccttggcttcaagactcccagggaagcaatcgaacggacctacattgacaagaaatgcccattcactggaac

SEQ ID NO: 53534 - DNA, 268 bp, Zea mays
ctttcccattgtcttctttgccctccggctcaacttggatgggttgctcttccccacgtcaaggcacatctctcgtgacaacaagagattcgccatcatcaccgtctctctcctcgcagtaatttatcttgctgccattctcataccaagcatctgggacgcgttccagtttactggtgccacagctgctgtcctgattggttttatatttcctgccatggtcatacttagggattcttacggaatcgcgagcaagcgcgacaagatt

SEQ ID NO: 53535 - DNA, 268 bp, Zea mays
tgcgagcttctctcctcttcctctcccacgcaccgcgccaaggaaggcagagagagatcgccgctcctcttctctccgtcggtggtgcggttgaccgccctcctcgagcgatatctcgctgcagtccctcgagatcttttcacagatctatccgacaagatggtgaagatctgctgcatcggtgctggctatgtcggtggcccaaccatggcggtcattgccctcaagtgcccagacattgaggttgtcgttgttgacatctccaagc

SEQ ID NO: 53536 - DNA, 124 bp, Zea mays
gacgatacttcatcgaatatatggtaaattcatggttcatcgaccattcatcaggaaagcaattaacaacatattctacaggtttatattcgaaacagagaaacataatggtgttgcagagttg

SEQ ID NO: 53537 - DNA, 268 bp, Zea mays
aaatggaagaccccatggatcgataatccagagtttgaggatgatccagatctttatgtgctgaagcctttgaagtatattggaattgaagtttggcaggtaaaagctggttcagttttcgacaacattctgatttgtgatgaccctgagtatgcaagaaaggttgttgaggaaacttggggtgcaaatagggaggctgaaaaggaagcttttgaagaagctgaaaaggagaggaaagctagggaggatagggaaggtcaaaaggcaa

SEQ ID NO: 53538 - DNA, 258 bp, Zea mays
ggacaccttgttccccatgtgcggcatgaaccttgccttcgacagggatctcattggccctgccatgtacttcggtctcatgggtgatggccagcccattggtcgctacgacgacatgtgggccggatggtgtgtgaaggtcatctgcgaccacttgagcctgggagtcaagactggtttgccatacatctggcacagcaaggctagcaaccccttcgttaacttgaagaaggagtacaagggcatcttctggcagga

SEQ ID NO: 53539 - DNA, 263 bp, Zea mays
gcggagaaacgcaggcgaaggcgagggtgtgagggaaggagcaccagccatggtgcacgtcaacttctaccgcaactatggttagacgttcaagaaaccaaggcgtccttatgagaaggagcgtcttgatgctgaactgaagctggtcggtgagtatgggctgaggtgcaagcgtgagctttggagggtccagtatgcactgagcaggatccgtaatgctgcaaggcacttgctcacccttgacgagaagaaccccgtcgtat

SEQ ID NO: 53540 - DNA, 263 bp, Zea mays
gttggtgtggcgcacactgtgaccttggtcatcctgttcaccgtgctgtcactgtttgttgaaattccgtacttcaccgctgtggtgcggaagatcgaccagggtggctgggttccacttgtgtttgctgttgccttcctcatcatcatgtatgtatggcactatggtacgctcaagcggtatgagtttgagatgcacagcaaggtgtccatggcatggatcctaggccttggtccaagcctcggtctggtcagggtgcctgg

SEQ ID NO: 53541 - DNA, 291 bp, Zea mays
cagaggcgggttggcttctcctcccccaccggttcgtgttcaggttctggttcgtgggcgagagggaagagatggcggcgtcggacgttgagtaccgttgcttcgttggcggcctcgcctgggccaccgacgaccactccctcaacaacgccttcagcacctacggcgaggtcctcgagtcgaagatcatcctggatcgggagacgcagaggtcccgcggcttcggcttcgtcaccttctccacggaggacgcgatgcgcacgccatcgagggcatgaacggcaaggagct

SEQ ID NO: 53542 - DNA, 292 bp, Zea mays
cagaggcgggttggcttctcctcccccaccggttcgtgttcaggttctggttcgtgggcgagagggaagagatggcggcgtcggacgttgagtaccgttgcttcgttggcggcctcgcctgggccaccgacgaccactccctcaacaacgccttcagcacctacggcgaggtcctcgagtcgaagatcatcctggatcgggagacgcagaggtcccgcggcttcggcttcgtcaccttctccacggaggacgcgatgcgcagcgccatcgagggcatgaacggcaaggagct

SEQ ID NO: 53543 - DNA, 297 bp, Zea mays
gccgcagccaaaccctctccagcagccgtcgtcgccaccgctgcagcgcggaggcgacccccatcgccgccaagatgcagatcttcgtgaagacctctgacggggaaaaccatcacgttggaggtggagtcctcggacaccatcgacaacgtgaaggccaagatacaggacaaggagggcatcccgccggaccagcagcggctcatcttcgccggcaagcagctcgaggacggccgcaccctcgccgactacaacatccagaaggagtccaccctgcacctggtgctccgcctccga

SEQ ID NO: 53544 - DNA, 193 bp, Zea mays
  unsure (1)..(193): unsure at all n locations
cttgttcagtgagacgggggatgacaagcatgtgccccgggcagtgtttgtagacttggaacccacagtcattgatgaagttcgcactggcacctaccgccagctcttgcacactgagtaagataggaacangcaaggaagatgctgccaataactatgcccgagggcactacaccattggcaaggagatcat

SEQ ID NO: 53545 - DNA, 262 bp, Zea mays
agagatggctgagcaaattgcaagtaaccctgtgttcaaccagatggctgaacagcttcagaaaagtgctcagggtgctggagaacagggtattcctgcattggatcctcaacagtatatggaaacaatgcaacaagtcatgcaaaaccctcagtttgtgtcaatggcagagcgtcttgggaatgcccttatgcaggatcctgctatgtccagtatgcttgagaacttgaccagtccagctcataaggagcagtttgaggag

SEQ ID NO: 53546 - DNA, 299 bp, Zea mays
ctgccctcagctggagaacgtcaatttgaagtggccttagtgcagtcaccgacagcggcttccttccactgataaagagttcaaacagtgggctggtcaacgtcgatttgaacggttgcgagaatctcacggatgcagctgtttccgccttggttaaggcccacggcgcttcccttgcgcacctcagtctcgagggatgcagcaagattaccgatgcaagcatgttcgccatctctggtatgtgcagccagctcgctgagctcgacctttcgaactgcatggtcagcgactacggcgtc

SEQ ID NO: 53547 - DNA, 289 bp, Zea mays
ccgcgctgcgcctccgcgaccagctgggagtcctcggcgcgctcacctccgccggcgtcaagcccgacggcggctactacacgctgagccagatcaagggcgccatccgccagggcaccggcttcgagccctacgtggagtgcaaccgcgacgaggccggcaacagccagctctaccagctctacttctgcgtcgacgccgccggcgacagcttcgtcgactgccccgtcctccccagcggcaggccctgtggcaaccggatcgagttcccggctttctaagctaactc

SEQ ID NO: 53548 - DNA, 284 bp, Zea mays
tccagacgctgctccccatgtcgcccaagggcgagatctgcgacgtcaacggcgtctgcgtggacgccacggaggacgagctcttccgcctcaccaccaaggaggggaagctcaccgtggagcgcgagaaggtgaagatcgagacgcagcccttctcccccgtggtgcagttcgagcaggaccccgtgcagatccaggacgcgctgctcccgctctacctcaacagccagatcctccgtgcactgcaggagtcgctcgccagcgagctcgccgcccggatgagc

SEQ ID NO: 53549 - DNA, 291 bp, Zea mays
  unsure (1)..(291): unsure at all n locations
caaaaatgctggagctgatgcggctctatgtaacaattcacactgatcatgaaggcgggaatgtcagtgctcatactggtcatctggttgggactgctctgtcagatccttatctttctttcgcagcggctctaaatgggctagctgggccactgcatggccttgcaaatcaggaaatcattntatggatcatatctgtaatttatgaaacttggagttgtgttaccacagatcaactcaaagactatgtctggaagacactgaaagagtggaaaggttgttcctgggttt

SEQ ID NO: 53550 - DNA, 293 bp, Zea mays
ggacactggccctggctgcagtggcgattctggtgggcggcacgattgcgctggtgctcacggcggggacgtggaaggccaagataaagaagtcgcaggagaagatctgtaacaaggggtgggagtgctcggggagcaagtactgctgcaacgacaccatcaccgacttcttcaaggtgtaccagttcgagaacctcttcgccaagcgcaacacccccgtcgcgcacgccgtcgggttctgggactaccaggccttcatcaccgccgcggccctcttcgagccccaggggttc

SEQ ID NO: 53551 - DNA, 287 bp, Zea mays
tacggctacggcggcggcggcggcggctggagggactgatgtgtggccccatcctggcttcggccgagttatcttatctatctatagtatcgtgttaccgttcgcttctgtcaccgtgttagtgtccgttctacctttggattaggtgttggtaccccttttgttcgctttggttgctcccgctatgaaacgagacgagagaagaatgagcaaggtttttgttcgcatctattgttgtccaatgatattgatatattgttcccctgtctgttgctggattgttgtgt

SEQ ID NO: 53552 - DNA, 286 bp, Zea mays
gcgagcgagagcagcacacactgcacgcagctagctaggagcagcagcagcggcggcgatggcggcctccatgatctcctcgtcagctctggcggtggcgcctcagggcctgccgcccctcggccgccgcgcctcctccttcgccgtcgtctgctccaagaagaagatcaagaccgacaagccctacgggattgggggtggcctgaccgtcgacgtcgacgccaacgggagaaagggcaagggcaagggcgtgtaccagttcgtcgacaagtacggcgcgaacgtc

SEQ ID NO: 53553 - DNA, 283 bp, Zea mays
caagaatcctatcaatccatacggtaaggcaaagaagatggcagaggacatcatcctagattttacaaaatcaaagaagcaatcagacatggctgtaatgatcttaagatacttcaatgtgattggatcggacccagaggggcgactaggagaagctccaaggccagagctacgcgagcatggacggatatccggtgcttgctttgatgcggctttgggaatcattccagggctaaaggttcgtggaactgattactccactgcagatggaacttgtattagg

SEQ ID NO: 53554 - DNA, 278 bp, Zea mays
gcgtccgcctcgtcaagcgctgccacaagcccgaccgcaaggagttcaccaaggtggcggcgcggacggcgatcgggttcgtcgtcatgggcttcgtcggcttcttcgttaagctcatcttcatccccatcaacaacatcatcgtcggttccggctaggcttacaggagtacagggcgactagcatgggagtagtgcaatacttttgggagcaatagataacgaggatcctggtctttcgaatagtattgttaatgaatttttcgttcggttgtgttt

SEQ ID NO: 53555 - DNA, 296 bp, Zea mays
tctttccgaacggccgcgtcgaggagttcatccacgcaaggaacattgtcagctgccgaccttcgtgatcctgagatttcagctctggtggcttccaaactgagggagttccacaaccttgacatgccgggtcccagatctgtgctcatttgggacagacttaggaactggctcagaactgccaagagcttgtgtccacctgaagaagccaaggaatttcggttggacggtctggagaaccaggttactgcattggagaacgagtgttcaggtgattaccagtggattggtttctg

SEQ ID NO: 53556 - DNA, 284 bp, Zea mays
gtcgccgatgaggcgccgggaggagcgtccccttcgtcttcctagagagggttagggaagacttcatgcagcggtatgggtccagtatcgatgaggaggggcagcacccgctcgctgatgatgctgatgaggatgactttctgttcgaagaccggttcagcattgcctacaaccttgaccgtgaattcggcccgaggttgaaggaccatatgcagtattgtgttaatcatccagaggaaattaacaagctctccaaggtgaaagcccacctatcggatgtcaaa

SEQ ID NO: 53557 - DNA, 273 bp, Zea mays
cccggagctcgtcctgcgggcggcggacaggctgggcctcggcggcgtgtacacgcacctgggcgtgctgctgcagctggaccacaaggtgtcgccgttcctcaaggagaccctggacctctcgtgctaccacaacctggaggcgcacctgcacctgctggacggcttccgcggctccggcgcggggttcgagccccgcgggagggaccccgcgctggtgaacaagtccaccgacttcctaccggaggaccacatggtgccgcccgtgtggta

SEQ ID NO: 53558 - DNA, 278 bp, Zea mays
cttgcgcgtacgcgtacacagccccgatacgaatcgtcctccacgcgagcctcgccgatcccccactcccctcccctcgcttcaagatgcagatctttgtgaagaccctcaccggcaagactatcaccctcgatgtggagtcttctgacaccattgagaatgtcaaggctaagatccaggacaaggagggcatccctcctgaccagcagcgccttatcttcgccggcaagcagcttgaggacggtcgcacacttgctgactacaacatccagaaggag

SEQ ID NO: 53559 - DNA, 282 bp, Zea mays
cgaactgatgattcgttattactctcacaacaatgattacttggaaatctgccgttgttacaaggctatttatgatattccagcaataaaagaggatccaacaaagtggataccgattcttaggaagatctgttggtacttggtgctagcacctcatgatcctatgcaatcaagccttctcaatgctacactagaggataaaaacctttcagaaatcccaaatttcaggttattactgaagcagctggtcaccatggaggtgatacagtggacaagtctgtg

SEQ ID NO: 53560 - DNA, 221 bp, Zea mays
cttcgctcgtactcgtgcgcctcgcttcgcttttcctccgcacccatgtctgacaaacccgatatggctgagatcgagaaattcgataagtcgaaactgaagaagacagagacgcaagagaaaaatccactgccttccaaagaaacgattgaacaggagaagcaagcaggcgaatcgtaatgaggcgtgcgccgccaatatgcactgtacattccacaagc

SEQ ID NO: 53561 - DNA, 293 bp, Zea mays
gacgggaactggaggaactgagcggtggggcccgcgcggccaagttatcctgttcgctaccgtgttgtttaccctagtccagagtgtttatcttcgttcgtctcgtgtttgttgttgcccatctgtgtttttgattgaaggtcgctctgtgtcagttgttagtgctgtgttcatcctcggctccagcagacccatgcatcaaccagcatggactgcggatcgatgggtgctgttacccccgtcaggctttattctaagttaaatcctaaggaaaaaaatggtgcttcttggtg

SEQ ID NO: 53562 - DNA, 284 bp, Zea mays
ctcaagatggcttaaccgtttcagaatggatgaaaaagcagggtgttcctgatcgggtgaacgatgaggtttttattgcaatgtccaaggcactcaatttcataaatcctgatgagctatctatgcagtgcattttgattgctttgaaccgatttcttcaggagaagcatggttctaaaatggcattcttggatggtaatccgcctgaaagctatgcatgcctattgttgatcacattcggtctaggggtggagaggtccgcctgaattctcgtattaaaaaga

SEQ ID NO: 53563 - DNA, 273 bp, Zea mays
cacaaagagatacaggaaagcaaactctcacgcttgtatttgtggaaaccaagaggggcgctgattcattggaaagctggttgtgcatgaatgggtttccagctacttctattcatggagatagaaaccagcaggaaagagaatatgctctgaggtccttcaagagtgggcaaactcctattatagttgcaactgatgtggcagctcggggcctcgacattcctcatgttgctcatgttgtcaactttgatctccccaatgatattgatgact

SEQ ID NO: 53564 - DNA, 273 bp, Zea mays
gctatgaagtacatcccgagggggctcaagattgacgagaatgtggcgagggagatcataaaccaccgctcgttgcggcaccccaacatcatccgcttcaaggaggtcgtgctcacgcccacgcacctcgctatcgtcatggagtacgccgccggcgcgagcttttcgacaggatctgcagcgccgggaggttcagcgaggacgaggcgaggtatttcttccagcagcttatctgcggtgtcagctactgccacttcatggtgagaacaccaa

SEQ ID NO: 53565 - DNA, 265 bp, Zea mays
aaactttttaagaaaaaggaaaatcaagcccctgcatatgctcttggtgaaattgatgaagccgctccaggagctgaaaatgaaaaggctagtattgtaaatcaacagaaattggaaaagaaatttggccagtcttcagtttttgttgcatccacacttcttgagaatggtggaaccctgaagagtgccagtccagcttctcatctgaaggaagctatacatgtcatcagttgtggatatgaagacaaaacaggctggggaaaag

SEQ ID NO: 53566 - DNA, 205 bp, Zea mays
ctttccgaacggccgcgtcgaggagttcatccacgcaaggaaattgtcagctgccgaccttcgtgatcctgaaatttcagctctggtggcttccagactgagggagttccacaaccttgacatgcctggtcccagatctgtgctcatttgggacagacttaggaactggctcagaactgccaagagcttgtgtccacctgaagaa

SEQ ID NO: 53567 - DNA, 297 bp, Zea mays
ctgaaggcagtgataggaggaattttactaaatcgtgttagtagtggcatatagagtaggatcgcaacgtcaacgccgacgtcgacaacaacaagtcagtgggggtagtcactagattgctccgccacatcaagacctaggactatatatcagagtattcaattatccgatccacttacctccagctcatgggaaaggtgcaaaaatttgtggaggcaattcaaagctaaaactgaatatacagttgctcaagcgataactgctcaggaagcagataagaggaacacaactggctgc

SEQ ID NO: 53568 - DNA, 268 bp, Zea mays
gggaggccctgccccatcctgacgagcgcgtggagtatgaattctggcccaattgccatgatgaatgtggcccaaagtgcgatagccaaattgacttcgtcaagagcttcaaaggagcagcacaggtacttggagaacgacggctacacggagttcacgcccgattacattagcctggtactgcccagcagccttcattctgagcaagcagtgcaagtcccagtgcatcatgctggggggtactgtgcaccgacccaaacaggtttta

SEQ ID NO: 53569 - DNA, 288 bp, Zea mays
gcagccatggcgaagaactacccgaccgtgagcgccgagtacagcgaggctgtggagaaggccaggcgcaagcaccgagccctcatcgccgagaagagctgcgccccgctcatgctccgcctcgcgtggcactccgcggggacgttcgacgtgtcgtcgagtaccggcggtccattcggcacgatgaagcatcagtcggaattggctcacggcgctaacgcggggctggacatcgcggtgcggctgctcgagcccatcaaggaggagttcccaatccctcttacgccg

SEQ ID NO: 53570 - DNA, 285 bp, Zea mays
gttcctagtgtgctgtcagcacttgctttggcattcaacacaaatctgttcggtgcaatcactcattatagtagtgggcaggctgcagtatacttcggagccgggtatatggagcttccagatgttttcaggctgggttttataacagccttggctaacacgttaatctggggagttgttggaaccatctggtggaaatttttgggtctgtactgacagtggcagacatgtggttgaccaaaactttcatttggcactggtcgaattgctcttgtcattgttagg

SEQ ID NO: 53571 - DNA, 273 bp, Zea mays
tctcgagcgaatcggctcgaggctcgaggacggtcgcaccctagccgactacaacatcatgaaggagtccacactccaactggtgctccgcctccgcggcggcgccaagaagcgtaagaagaagacgtacaccaagcccaagaagatcaagcacaagcacaagaaggtcaagctctccgtgctgcagttctataaggtggacgacaccactagcaaggtgacccgcctccgcaatgagtgccccaacacagagtgcggcgcgggcgtcttcat

SEQ ID NO: 53572 - DNA, 292 bp, Zea mays
cacccacccacccactcgcttcagccgcctccgccgcgcgtacaagcaggtggagacaggatgccggctggccacggcctgcgctcgcggacgcgcgacctcttcgcgcgccccttccgcaagaagggctacatcccgctcaccacctacctccgcacctacaagatacggcgatactccgatgtcaaggtgaactgtgccgtccacaaggggatgctgcacaagctctaccacggccgcaccggtcgcgtctggaacgtcaccaagcgcgccatcggcgtgaggtcaacaa

SEQ ID NO: 53573 - DNA, 292 bp, Zea mays
cctgaccttactggatacattactgagggacagatatacattgataggcagctccataacagacagatttatccacctattaatgtcctgccatctctttcacgattgatgaagagtgctattggtgagggcatgacacgtcgagaccattcggatgtatctaatcagctttatgccaactatgctattggaaaggatgttcaggccatgaaggctgtcgttggagaggaggcactctcgtctgaggatctgctttacttagagttccttgacaagtttgagaggaagtttg

SEQ ID NO: 53574 - DNA, 277 bp, Zea mays
tgcaggaagagggttggacttacgggattcaactgccggtgtgggaacttgtactgcgcactccaccgctactccgacaagcacgactgcaagttcgactaccggactgctgccagggacgccattgccaaggctaatccggtggtgaaggagacaagctcgacaagatctagggggggttccctacggttgggtatcaggaagattgtaaaccgcggtaactcgtcatgcggaactgctgccttgccccccgcgcctttctcttccatgtttgctg

SEQ ID NO: 53575 - DNA, 268 bp, Zea mays
ggaagaagaagaggatgcaatcaggggggcaggtagctcgagcgcgcgctccacctgcgccgacgcgatgcgggccaagtggaagaagaagaggatgcggaggctcaagaggaagcgccggaaaatgaggcagagatctaagtaggcgcatcttgtgaccgaggatggcgagcttctcctgcaccatggctgtgacgcgttgggatgattgtctccctttgtagacgtgctttgctgtagacgtaggcgatgtaaaccgtcctttttg

SEQ ID NO: 53576 - DNA, 282 bp, Zea mays
gcaccatcgtcttccttgtctctgccttcccgctagctcggttcttgctgtgctagcctctgttcatccacacccgcgcgcgtcaatgggggagtacaacggcggcgtgagcacatcgtggaccattgggtcggcgcacggggggatggcgccacccacgcggcccaaaataaagatcatccacatcatcgcgccggagatcatcaagaccgacgtcgcgcacttccgggacctcgtgcagcggctcaccggcaagcctgcttcctgtgccgcagcagcacg

SEQ ID NO: 53577 - DNA, 268 bp, Zea mays
cgcacgcttgccgactacaacatccagaaggagagcaccctccacttggtgctgcgcctcaggggaggcatgcagatcttcgtgaagaccctgaccggcaagactatcacccttgaggtggagtcttcagacaccatcgacaacgtcaaggccaagatccaggacaaggagggcatcccaccggaccagcagcgtttgatcttcgctggcaagcagctggaggatggccgcacccttgcggattacaacatccagaaggagagcacct

SEQ ID NO: 53578 - DNA, 279 bp, Zea mays
agacaacccggcgtattcagtcgtcaagcagtacttcgtcaacccagacgacaccgtcacgcagaagatcgttgttcacaagaccagcgccaggggcacccacttccggcgcgctgggccacgtgcagcgggtgtacttccagcccgacgaggtgaacgccgccatcgtcacctgcggcgggctctgccccgggttgaacaccgtcatccgtgagcttgtctgcggcctgtatgacatgtacggcgtcaccagtgtcgttggcatagagggtgatacaa

SEQ ID NO: 53579 - DNA, 279 bp, Zea mays
accgaattccctgctattcctctcccctcgcctcctcgtctccccctaggggatcgtcggagaggaatcgcaaagagggccgtctcatccgagttaaggaagccatggagcacaaggaggctgggtgccaggcccccgagggacccatcctctgcatcaataactgtggcttcttcggcagcgcggcgaccatgaacatgtgctccaagtgccacaaggagatgataacgaagcaggatcaggccaagctggctgcctcctctatcgaagcatcgtgaa

SEQ ID NO: 53580 - DNA, 273 bp, Zea mays
gagaggattgctggagctgatgtacctatgccctatgctgccaaccttgagagaatggctgttccgcaggtcgatgacattgtgcgggcggcaaagcgggcctgctacagggcagtaccaatggcagcagctgcctgattggtggacaagcctttctgttttccttccatcggctttcgctctctagccagaaacatgtagtattcataaggcgcaggcaaattggccggaacccagactccaagcgagctaattttgtagatcgccatggtg

SEQ ID NO: 53581 - DNA, 200 bp, Zea mays
ctggggatcgacttggcaaagttgcaatagttgacaatactccacaggttttccagttgcaagtggataacggcataccgattaagagctggtttgatgacccctcagatcaggaactgatcgagttgctcccgttcttggagagcctcgtggattcagaggacgtgaggccaataatttcaaagacctttcatgaccaa

SEQ ID NO: 53582 - DNA, 270 bp, Zea mays
  unsure (1)..(270): unsure at all n locations
cgctgttgcaggaagaaattattagaatgtgcaggagcatggtgaaggctgttattgttgctacaaatatgctcgaaagtatgattgttcatccaactccaacccgagcagaagtttcagacattgctatagctgtccgagagggtgctgatgcagttatgctttcaggagaaactgcacatgggaaatttcccttgaaagctgttaaggtcatgcacactgttgccctgagaaccgaggcaactattcctggtgggganacactgcaga

SEQ ID NO: 53583 - DNA, 272 bp, Zea mays
gaagaagtttgagggtgactctgggccgccaccacccagagatcggtcatcaccgtcaccgcaaagacccaggggtgatgccaacagggtctacgtgggtaacctttcctggggagttgacaattcagctctcgcaaacctgttcagtgagcaaggtgaggtactggaagcaaggatcatctatgacagggagagtggaaggtcaagggggtttggttttgtcacgtacggttctgccgaagaggttgagaatgcaatatctaatctcgatg

SEQ ID NO: 53584 - DNA, 274 bp, Zea mays
cgcagacggggaagcggaccaacatgccagtggcccggagctgggtttgtcgcaaaacttatgtgaccccgcggagacccttcgagaaatctcgtctcgaccaagagctgaagctgatcggcgagtatgggctccggaacaaacgtgaggtctggagggtcaaatttaccctggccaagatccgcaaggccgcccgggaactgctgacgcttgatgagaaggacccacggcgtctgttcgaaggcaacgccctgctgcggcggtggtccgcatt

SEQ ID NO: 53585 - DNA, 278 bp, Zea mays
cttctgcactgacacaatctgaaatgcgagatatcattcttggcgctgaaattgctccaccatcacagcagaggcaacagattgctgaaattgagaaacagtcaagagagactactcagttaactgctgtaaccacaaggacgacgaatgtgcacggagatgaactcattatcacaaccacaagtccatatgagcaacaagcattcgcatcgaagactgattggcgtgtcagagccatctctgccacaaacttgtatctacgtgtaaacacatttatg

SEQ ID NO: 53586 - DNA, 273 bp, Zea mays
attttaaaattcggacagtagagcaagatgggaagaccataaaacttcaaatttgggatactgctgggcaagagcgcttcaggaccatcactagcagctactaccgtggagctcatggaatcattattgtatatgacgtgacagaccaagaaagcttcaataatgtgaagcaatggttaaatgaaattgatcgttatgcaagtgacaatgttaacaagctccttgttgggaacaagagcgacctaactgccaacaaagttgtggcaactgaga

SEQ ID NO: 53587 - DNA, 273 bp, Zea mays
ttctctgtctgtagtgaggatcaggaagctattcaggcacagaaaatttggaagaaagccatcatgcttgtatggagagctgcagctaatcataggtatgccaatgtcttcctgcagcctgttacagatgacatagcacctggctaccacagcattgtgcagaggcctatggatttgtcaactattaagaaaaacatagaaaatggactgatccgaagcacagctgaatttcagcgtgacattatgctgatgtttcagaatgcgtaatgtaca

SEQ ID NO: 53588 - DNA, 267 bp, Zea mays
ccacctcgccggcgtcgcctcggggatagctggatctcgccgctcgacttcgtgttgtcgtgggggccgttgctgtaccaggtgtcccgggtggacgagaagggcctgcagcagtgcaacagcgtggcggccaagatcaaggagcatctggagaaggggcagttcgcggacgccgaggcctcgtggtcggagctggagggcgtcgtcctcggcagctccaaatccgtcaacttctaaaactttctcaaggacgaagcgtcggggacg

SEQ ID NO: 53589 - DNA, 272 bp, Zea mays
ctcgagccgctcgagccgcacagaagaagtctgaaagagagatggagttgaaggagaaatttgaaaagaaacgttcaagaggtagctgagaagttccaaaacacaaacttgtatttgaagaacttagaggagaacattgatgatgagaaattgcgtgaagtctttgctgagtatggcaatattacttcctgcaaggttatgcgggattcgaatggtgtcagcagaggttctggatttgttgctttcaaatctgctgaagatgctaacgagct

SEQ ID NO: 53590 - DNA, 270 bp, Zea mays
gagcttgccaaggtcgtccaggacaccatcgaccccaacgcacggatcgagttccgcaagaacacccaggacgacccgcacaagcgcaagcccgacatcagccgcgccaaggagttccttgggtgggagccgaagatccccctgcgtgagggccttcccctcatggtctccgacttccgcaagcgcatcttcggcgaccaagacgctgctgccaccacattcggaaaccagcaaggttaggataaaggagcgcacatgactggaaatttt

SEQ ID NO: 53591 - DNA, 268 bp, Zea mays
caaaacagacgtcggctccaattgaagagtgccgcaagaagatttggttggtggactcaaagggtttgattgttgactctcgtaaaaactccgttcagtcattcaaaaaaccttgggcacatgagcatgagcccttgacaaccttgtacgatgctgttcagtccatcaaacctacagttctgattgggacgtctggagttggaagaacattcacaaaagaagttgttgaggccatggcttccttcaatgagaggcctatgacttttca

SEQ ID NO: 53592 - DNA, 274 bp, Zea mays
ggctgccaacatcactgcatgcaaggatacattccgtggaagagtttgcgagtgtccagttgtgaaaggcgtcaaatttgttggcgatggctatactcactgtgaagcttccggatctggtcggtgtgaaattaacaacggagggtgctggaaagataccaagaatggtcggacatactctgcctgtactgatgatggctgcagatgccctgacggattcaagggtgatggcaagcacaaatgtgaagatgttgatgaatgtaagaaaggactg

SEQ ID NO: 53593 - DNA, 277 bp, Zea mays
gtttaccattcctccccaaaacacatcctgcgatcctcgaagcctccgccgagcatcgatcatgtcggcctactgcggcaagtacgcggatgagctcatcaagaatgctgcctacatcggcacccctggcaagggtatccttgctgctgatgagtcaactggcaccattggcaagcgcctttccagcatcaatgtcgagaacgtggaggagaaccggcgggctctccgtgagctcctgttctgctgccctggtgccctccagtacacagcggtgtga

SEQ ID NO: 53594 - DNA, 306 bp, Zea mays
agcaagcagacacagggacaggcaggcagcgagtgcaaccgcgagagcgatcagcgctgggctccttcttctcgaccttagtgacgccccctccgcccgccgccgacgacccgaactgcgccgtggtggccgcgcactccaaggccacctacgacgagcagtgggcggcccacaagagcagcagcaagctgatggtgatcgacttctcggcgtcctggtgcgggccctgccgcttcatcgagccggccttcaaggagctggcctcccgcttcaccgatgccatcttcatcaaggtcgacgtcgacg

SEQ ID NO: 53595 - DNA, 338 bp, Zea mays
  unsure (1)..(338): unsure at all n locations
gtgagctctcgangncgctcnaactcggaactcgatctcgacgacgatngttgagtatatggagaaggtggctaagactgtagatgtggatgatgtcactgtttangagcataaccttctgtcgggtgcatacgagaatgtgattggggctcgccgcgcgtcatggcgcattgtttcttccattgaacaaaaggaggagtcccgtaagaacgaagagcatgtgaaccttatcaaggaatatcgtggcaagatcgaggctgaactgagcaatatctgtgatggaatcttgaagctgcttgactcccacctagtgccttcttctactgctgctgaatcaa

SEQ ID NO: 53596 - DNA, 300 bp, Zea mays
cgaacagaagctctcgatctcaccgacaccgaggaagaagagatcaatggcgtccgagcagggagtcgtgatcgcgtgccacagcaaggctgagttcgacgcccacatgaccaaggcccaggaagccggcaagctggtggtcatcgacttcactgccgcctggtgcggtccatgccgcgccatcgccccactgttcgtcgaacacgccaagaagttcactcaggtcgtcttcctgaaggtggacgtggacgagtgaaggaagtcacgcggcctacgaggtcgaggcgatgccgaccttcc

SEQ ID NO: 53597 - DNA, 308 bp, Zea mays
ctcgagccgcgtcaggcccttctccgtcaacgagcacccagcacatatcctgagcccctccacacctcaacgatggcgggattcagaagccttgcacccaagaccaggaacctggtggtggctgggggcctgtcggccttcgtgctcggggtctactactacaccatgagagccgtgggaggcacggacgagctgcaggtggcgatcgacaagtttgaggagatgacgaagaaggacgctgccagaaactccagcacaggaggatcgtaaacgcggcgcccttctcgtctctgtactgaacctggatc

SEQ ID NO: 53598 - DNA, 307 bp, Zea mays
tgatcgagctcttcctgcaggtgtattgcagacagggcccgatgcccagagggtgcccatagtagccttggcctctataggacatgctcatctagctggtttcaggagttcctatcagactgagattgggcagaccctggacctcctcacagccccccagggcaatgtggatcttgtcagattcactgaaaagaggtacaaatctattgtcaagtacaagacagctttctactccttctaccttcctatagctgcagccatgtacatggcaggaattgatggcgagaaggagcacgccaatgccaag

SEQ ID NO: 53599 - DNA, 299 bp, Zea mays
ccaccctgcacctggtgctcggtcttagacgtgggatgcagatacccgtgaagaccctgactggtatgaccatcactctcgaagtggagccgagtgacaccattgagaatgtcaaggcaaagatccaagacaaggaaggcatccctcctgaccagcagaggttgatctttgctgggaaacagctggaagatggacgcaccctgtctgactacaacatccagaaagagtccaccctgcacctggtgctccgtcttagaggtgggatgcagatcttcgtgaagacctgactggtaagacca

SEQ ID NO: 53600 - DNA, 304 bp, Zea mays
  unsure (1)..(304): unsure at all n locations
ctcacgttcggggccaccacgctgcgctccggcctgcacgcgctgctgccggcgctccgcccgctgctcatcaacaagaaggatctgcgcttcccgcacttccccgccatcgacgaactctacagcgacggcatcccgctgccgccgcagaccgggttcgacgccatccgcaccgtcgtcccgcgcatgttcaagctggtcgaggacaccaccgaccacgtcctccgcttcgaggtgccggagatgctagagagggaccggttctcgtggttcaaggacgaggagttcgcgangcagacgatcg

SEQ ID NO: 53601 - DNA, 301 bp, Zea mays
aggctattgaggctatcccagagctgaaggcctatcttggcgctcggttctcccttagggatggtgacaagccccacgagatggtcttctaaaccgagttttggagttcggaggaagtcgctttggctgtgctctcttgtgacaagccccacgagatggtctcccagagctgaaggcctaccttgtttcattctgcttgaagtctgtcaaatattatgagaagatctaagaaagttttatcggtattggtggttcagcatggcgttatctgcttttggttctttgtgtaggtcaatgttgt

SEQ ID NO: 53602 - DNA, 172 bp, Zea mays
gggacttggcaaaggctcagcatcaaagcacccagattgccatagatgctgtttacaaccacaggatggtaacctcctttggatgttcatcaaaggttcttcagctattcgagcatgcgcaagatgaacccatgaaaaaagcaaggtagaaatcatgggtagcagggatcac

SEQ ID NO: 53603 - DNA, 134 bp, Zea mays
tatgcatgcgatgtgtcagttcggtcggtgctatgctcgttgggatttgattgtcggaaataaaacatgggtgatgaatgtgtaccctccctaatctatgaagttgagaaagccctgcgggtgtaggtggattc

SEQ ID NO: 53604 - DNA, 300 bp, Zea mays
cggcgccggcgtgctcgtgatctcaacccaaggcgtgcctccgctccggtcacccgtcgctccacgcaaccatgtcgaggaggaagaccagggagcccaaggaggagaacgtcacccttggacccactgtccgtgaaggagagtatgtctttggtgtcgctcacatctttgcatccttcaatgacaccttcattcatatcactgatttgtctgggagggaaactctggttcggatcaccggtggcatgaaggtgaaggctgaccgtgacgagtcgtcaccttacgctgctatgcttgctg

SEQ ID NO: 53605 - DNA, 294 bp, Zea mays
ggagatggttgagtatatggagaaggtggctaagactgtagatgtggaagagctcactgttgaggagcgtaaccttctgtctgttgcatacaagaatgtgattggggctcgccgcgcttcatggcgcattgtttcttccattgaacaaaaggaggagtcccgtaagaacgaagagcatgtgaaccttatcaaggaatatcgtggcaagatcgaggctgaactgagcaatatctgtgatggaatcttgaagctgcttgactcccacctagtgccttcttctactgctgctgaatc

SEQ ID NO: 53606 - DNA, 333 bp, Zea mays
gcgaggcacgaggctcggattcagctcgagctcgagacgcgtcaggcgcttctccgtcaacgagcacccagcacatatcctgagcccctccacacctcaacgatggcgggattcagaagccttgcacccaagaccaggaacctggtggtggctgggggcctgtcggccttcgtgctcggggtctactactacaccatgagagccgtgggaggcacggacgagctgcaggtggcgatcgacaagtttgatgagatgacgaagaaggacgctgccagatactccagcacaggaggatcgtaaacgcggcgcacttctcgtctctgtactgaactg

SEQ ID NO: 53607 - DNA, 302 bp, Zea mays
cgccgtctgccttctgcgcctccatttcggcctctgtcccttgcaagttcaatctcacctccaaccatgggtaaagagaagtcccacatcaacattgtggttattggccatgtcgactctggcaagtcgaccaccacaggacaccttatctacaagcttggaggcattgacaagcgtgtgatcgagaggtttgagaaggaggctgctgaaatgaacaagcggtccttcaagtacgcgtgggtgctcgacaagctcaaggctgagcgtgagagcggtatcaccattgatattgctctgtggaa

SEQ ID NO: 53608 - DNA, 301 bp, Zea mays
tagccaccatggacatcgccatccaccacccctggatccgccgccccttctttcctttccactcccccagccgcctctttgaccagttcttcggagagcacctgacggagtctgatcttttcccgacgtctacttccctgagtcccttctaccttcggccaccctccttcctgcgggcacccagctggtttgacactggactctcagagatgcgcctggagaaggacaggttctctgtcaacctggatgtgaagcacttctccccagaggaactcaaagttaaggtgttgggagatgtgat

SEQ ID NO: 53609 - DNA, 295 bp, Zea mays
aggaaaggtaaaaatgatcatggccacaaatcgacctgatgttctggacccggcgctcctgcgtcctggacgtttagataggaagattgaaattccgctacccaacgagcaatcaagaatggaagttctaaaaatccatgcagccggtatcgccaagcatggggagattgattatgaagcagtcgtgaaactagctgaaggtttcaatggggctgatcttcggaacgtgtgcaccgaagctggcatggctgcaattcgtgcagagagagattacgtagtccacgaagacttcatg

SEQ ID NO: 53610 - DNA, 296 bp, Zea mays
agcggcggcgttgcggtgcgggctgctgcccgtggacccgtgggcgccgacgatggactcccagagcgtggcgtcgcagctcttcgccgtctcgctcttcccctacctgggattcctctacttcatgaccaggtccaagaccgcgcccgggctcacgctcttcggtttctacttcctcctcgtcttcgtcggcgccaccatacctgctgggatttacgcaaaagttcattatggtacctcactgtccaacgttgactggctgcacgggggcgctgaatcgctgctgactctcacca

SEQ ID NO: 53611 - DNA, 298 bp, Zea mays
tcacgatccactcgagcaccaagccgagggaaggtgaggagcgatggcgcgcggcgtggtgtcggcgaagagcggcgcggtcgcgggcaagaagaaggggtcggtttccttcacgatcgactgcaccaagccagtggaggacaagatcatggaggtcgcctcgctcgagaagttcctgcaggagcgcatcaaggtcgccggcggcaaggctggcaacctcggcgactccgtcaccatctctcgcgagaagaccaaggtcaccgtcacctctgacggacccttctccaagaggtacctg

SEQ ID NO: 53612 - DNA, 216 bp, Zea mays
  unsure (1)..(216): unsure at all n locations
ncaaagatgttctgaagaaagagtttccaagaggtgtagatatcatatatgacgctgtaggtggggaaatgtttgacttgtgcttgaatgcacttgcagtccatgggcatctcattataattggtatgatctcccagtatcaaggagaggatggctggaagccaaagaactacactggactatgtgagaagattctagctaaaagtcaaactgtgg

SEQ ID NO: 53613 - DNA, 297 bp, Zea mays
gccgtccgccttgcccttcacgaaggcttggtcctcctccttgtatctccactccccccttcacagatccgttcctccagctagggttagcgttcctctgcagcgatggcgatcaagcggaccaaggcggagaagaagatcgcgtacgacaatatgctgtgcagcctgctcgatgagtacaccaaggtgctcatcgccctcgccgacaacgtcggttgcaagcagctccaggacatccgccggggcctcaggggcgactcggtggtgctcatggggaagaacagctcatcaggcgct

SEQ ID NO: 53614 - DNA, 149 bp, Zea mays
taaaacatgattttggtaatgacaaggagttctattccttttatgatcagtgttttgagaccaaggaagggaagtatacttacaaggtctgtgcatataagacagcatcacaggctgaagggcacagttctaccaacctggggcggtgg

SEQ ID NO: 53615 - DNA, 297 bp, Zea mays
caacaagatatcaacaagaatgtggacatgattgctgctaggcgtagagagcgagagtattttgcatctacaccagaatataagcacatggcttctaggatgggatctgaatatttaggaaagatgctttcaaagcatttggaacaagtgatcaaatcaaggattccggggatccaatctcttataacaaagacaattgcagagctggaaactgaacttaatcggcttggaaagcccattgctactgcatgctggggggaagctgtacacgatcatggaaatatgccgtatgtttga

SEQ ID NO: 53616 - DNA, 269 bp, Zea mays
gcttcaaccaggaacaagggcagaatggctcgtaatcctggcaaacaaatgctcgattgcttcacgcattgactgctactcggaggctagtacctctgtctttgggcaaaagttgcgcgagcaagtcgaggagagactggaattctatgacaagggtgttgcgcctcgtaaacatcttgatgtgatgagagctgctattgacagtatggtcaatgacaccttaatggatgatgatggtacggcagataatgtgaaggcggatacatctg

SEQ ID NO: 53617 - DNA, 293 bp, Zea mays
acctcgcctgcgatcttcgtagcctccgtcgcgtcgagcatcgatcatgtcggcctactgcggaaagtacaaggatgagctcatcaagaatgctgcctacattggcacccccggcaagggtatccttgctgcagatgagtccactggcaccattggcaagcgcctttccagcatcaatgtcgagaacgttgaggagaaccgccgtgccctccgtgagctcctattctgctgccctggtgctctccagtacatcagcggtgtgatcctcttcgaggagaccctgtaccagaaga

SEQ ID NO: 53618 - DNA, 296 bp, Zea mays
aggattatggattcaaaggcactgaggaaaaaggttttctatgggggagttgatcatgctttgagaaaagaggtctggaaattcttgttggggtatcatgaatatgattcaacatatgctgagagggaataccttgctgtcatgaaacgagcagaatatgaagtcataaaatctcagtggaagagtatctcagccacccaagctaaaagattcaccaagtttagggaaagaaaaggcctaattgacaaagatgtggtgagaacagataggtccattccctattatgaaggagatga

SEQ ID NO: 53619 - DNA, 295 bp, Zea mays
tcgttggcgtttcccgtgttcttcttcctcgcagcggcggagttcgcggcggggacgcggtcgccgtcggctttcgtacaaaacgccatctactccaaccgcatcaccatcttctccaagacttatcgcccctactccacgcgtgctaagcacatatttcgagaccttaaggaagatccatatgttgttgaactagatacccgagtggatgggcgtgacattcaaagtgttctcctggacctagttgggcgtcgtactgtgccacaggtgtttgtcaatggacagctccagaaac

SEQ ID NO: 53620 - DNA, 293 bp, Zea mays
ccaaatactgttggagcggtatttcccccagccgagtttttttttgtttagtttttttctcgggtccctttcagatggaggaacaaacaccgaaccaaagaaacaatctggtggttcaaaagcgaagacagctgaggctattacggttgcaaaattggatattagagtgggacttatcagaaaagcagagaagcatccagatgctgattccctttacgtggaggagattgatgttggagaggacacaccaagaccagtggtcagtggcctcgtcaagttcatacctctcgaag

SEQ ID NO: 53621 - DNA, 182 bp, Zea mays
  unsure (1)..(182): unsure at all n locations
aagtgagggagtatcttttgatccacaagagtctggtgccaatacagcagctgagctttcaactgctgagaaacaagagctccagaataagatggcgatgactatgancaatgtggatgaggtggatcggaagtacaacactattatcatcggatgcaacttgtaatgtcatcgtttgatat

SEQ ID NO: 53622 - DNA, 306 bp, Zea mays
ctcgagccgcgctccgatcgacctgctccctccccaccaccgagcccatggcggaccagctctccgacgaccagatcgccgagttcaaggaggccttcagcctcttcgacaaggacggggatggttgcatcacgaccaaggagctgggcactgtcatgcgctcgctggggcaaaatcctacagaggctgagctccaggacatgatcaacgaggtcgatgctgatggcaacggcaccatcgatttcccagagtttctcacccttatggctcgcaagatgaaggacaccgactctgaggaagagctca

SEQ ID NO: 53623 - DNA, 298 bp, Zea mays
ggcggggaacaagttccgcatgtcgctgggtctgccggttgccgcgacggtgaactgcgcggacaacacgggcgccaagaacctctacatcatctccgtcaagggcatcaagggccgcctcaaccgcctcccgtccgcctgcgttggcgacatggtcatggccaccgtcaagaaggggaagcccgacctcaggaagaaggtgatgcccgccgtcatcgtccgccagcgcaagccgtggcgccgcaaggacggtgtctacatgtacttcgaagataatgctggagtgattgtgaatccc

SEQ ID NO: 53624 - DNA, 301 bp, Zea mays
cactggccgtcttcgccgtcctcgtagctctgccactgggcaaagcgcacgaggaggaggaggaggaagggcttgaactcgaagccagcaggaggcggtggccgtgctgcgaccagtgcggcatttgcacctaggtcgcagccgccgatatgcgagtgcagggacacgtcgacgaccggctgccacccggcttgcaaggcgtgcgccctgtccatctccgacggcctcttcgtgtgcaaggacaagatcgtcaacttctgcaagcgccgctgcacccgtcgtactgatgatgatgatgcgt

SEQ ID NO: 53625 - DNA, 308 bp, Zea mays
aggtcgagctcgagcgatttaggcaaagactgcccgtttttgtagagttgtatgattggtggaagagattaaggaatcgttgctgcaaggagtcaaagaagattttcgatggactcctcatctctttctggtggaatatatggttagaaagaaataacagaatctttcatagacttcaaagatctgctatccaggttatgcaattggtgaaagatcaaattgtgagttttagtgtatgcaattggtgaaagatcaaattgtgagttttagtgtatgttagattgagttagtgtatgtttttctctttt

SEQ ID NO: 53626 - DNA, 212 bp, Zea mays
cccaaaagcagcagcaagagcaataaagctggcccaaaaccgccacgccagccagaacccaactcaaggggttcgaagatgccacctccgaaggatgaggatgacagcggaggcgaggaagaggaggaagaggaagatcacgaaaacacgctgtgtggttcttgtggtgacaactacggacaggatgagttctggatatgctgtgatgcgtg

SEQ ID NO: 53627 - DNA, 305 bp, Zea mays
ggcttactttgaggggacaaggtacggtcatctaacagcaaacatcgcggagtcgctgaattcctggatactggatgcctctggccttcctatagttcagatgatggaatgcatccgtcgccagctgatgacttggttcaacgagcgacgcgaacaagcatgcagtggaacacaatcctcgtgcctgcagccgagcgtcgtgttcaggaggccattgagcgtgcacggggttaccaggtggcccgggccaacgaggcggaattcgaggtcatctcagctcacgagggaacaaacgttgtggacat

SEQ ID NO: 53628 - DNA, 304 bp, Zea mays
ggccttcttgatacaatggtgaagctgacaatgatagctcgtgtcactgacggccttccactggcagaagggttggatgatgggcgagatctgaaggatgctgatttctataagcagcaagctaaacttcttttcaagaacttgtcaaaagggcatcatgaagcttcacggatgtcaattgagacagggccctactatttccactacattattgaggtcagagtatgttatctgactatgtgtgaccgctcttatccgaagaaacttgcattccagtacctagaagatctgaaaaatgaatttg

SEQ ID NO: 53629 - DNA, 163 bp, Zea mays
caagagatgtatgcttgctggccagaatgatggctgcaaacttgtacatcgatcagattgaagagctgatgtttgagctctctatgtggcgctgcaacgatgagcttcgcgttcgtgccgaagagctccacagttcgtctggttccaaagttaccaagtatta

SEQ ID NO: 53630 - DNA, 301 bp, Zea mays
cagccagctgacccctcacactcacctagccaccatggacatcgccatccaccacccctggatccgccgccccttctttcctttccactcccccagccgcctctttgaccagttcttcggagagcacctgttggagtctgatcttttcccgacgtctacttccctgagtcccttctaccttcggccaccctccttcctgcgggcacccagctggtttgacactggactctcagagatgcgcctggagaaggacaggttctctgtcaacctggatgtgaagcacttctccccagaggaactc

SEQ ID NO: 53631 - DNA, 301 bp, Zea mays
actgaatttacaatcaagcaagggtggttgcatactggtgatattggatactttgatgagggagtgacagcttttcgtagttgatagacttaaagaactgattaagtacaaaggttttcagattgcacctgccgagcttgaagggctacttctgtcacatccagaaattctggatgctgttgttatcccgttccccgatgctgaagctggtgaagttcctattgcttacgtcgtaaggtcctctgagagttctttgactgaagttgatgtccagaaatttattgaaaagcaggtcgcatac

SEQ ID NO: 53632 - DNA, 298 bp, Zea mays
ataggttcctgctggagtggattctggaagcaggctgagggtccgatctgagggtaatgctggccggcgaggaggccttcctggggacctttatgtcttcattgatgttctctctgatcctgttcttaagcgagatgggacaaacattctctacacatgcaaggtttcttacattgatgcaatccttgggacaaccgtcaaagtccccactgttgatggaacggttgaccttaagataccctcagggactcagccaggcacaactctggtgatgtccaagaaaggtgtcccgcttctc

SEQ ID NO: 53633 - DNA, 295 bp, Zea mays
gctagcggtgtccggtccggcgcccccctatttcctctcgcagcctcttctccccaaaccctaatcttgctcctgcctatctctgctccaatccgtcggtggagcggcggcgatggaggggaaggaggaaggtcggatcttcgtgggcggcctgtcgtggcaaacggacgagcgcaacttcaggacgcctttggtcgcttcggcaaggtcgtcgatgttcagatcatgctggagaggcacacaaaccgccacaggggctttggcttcgtgacattcgaagatcgaagggcagttg

SEQ ID NO: 53634 - DNA, 118 bp, Zea mays
tatggagctggccaagtcggtggtgtgggagtcgctgcgcctggacccgcccgtcaagttccagtacgggcacgccaagaaggacctgctggtggagagccacgacgcggtgttccag

SEQ ID NO: 53635 - DNA, 302 bp, Zea mays
  unsure (1)..(302): unsure at all n locations
tgcagcccaactgtctatgaggccatgctattagattggatgaggaaccttgaagttggaatccctgaactccttgagagcgacatcanagtgttgatttatgctggagagtatgacctcatatgtaactggcttgggaactcaaggtgggtaaactctatggaatggtctggaaaggaagcttttgtgtcctcatccgagaagcccttcacagtcgacgggaaagaagctggcgttctaaagagccacggtcctttgagtttcttgaaggttcacgatgctggtcacatggtacctatgga

SEQ ID NO: 53636 - DNA, 296 bp, Zea mays
gggctggcttctcctccccctcttatcaagtcctcctcgggttagggttccttagggttttgtggatgggcgatggcggcggctgatgtggagtaccgttgcttcgtcggcggacttgcctgggccaccagcaacgagtcgctggagaatgccttcgcctcctacggcgagatcctcgactccaaggtcatcaccgaccgggagacggggaggtcccgcggcttcggcttcgttaccttctcctccgagaactccatgctcgacgctatcgagaacatgaacggcaaggagctcga

SEQ ID NO: 53637 - DNA, 295 bp, Zea mays
ggcttccagtcggttccctacgtggttgcgctgttcagcgccatgctgtggatcttctacgcactgatcaagtccaacgagaccttcctcatcaccatcaacgccgccggctgcgtcatcgagaccatctacgtcgtcatgtacttcgtctacgcgcccaagaaagccaagctgttcacggccaagatcatggtcctcctcaatggcggcgtctttggggtcatcctcctgctcacccttctcctcttcaagggtagtaagcgcgttgtgctgcttggctggatctgcgtcggct

SEQ ID NO: 53638 - DNA, 294 bp, Zea mays
agatggttcaaaaaagactataaaccaccacgttttgaacaaggtgaaggtgttagccttgacgacattgatgctgcattcaatgattcagaggaccgtcttgtggcagagaaaagagagaaaccagaatccatgaacgcatttgctcttatttcgaggtcgcagggtttcaaccttggaaatttgtttgagaaggagatgatgggaatggtaaagagggaaacatctttcacgtctcaatgcacagcacaggagatcatgacaaaaatagaggatgcatgtgggccactcggt

SEQ ID NO: 53639 - DNA, 298 bp, Zea mays
cacatacatagtttcttctactacacgacgacaaacatggggaagcctgcgaagatcggagagtggggtggatacgccggcgatcgtcgggatctgagggctactccggaccggctgatcgaggtgaaggtcacggcggacaacagcagctgcatccgctccatctccttcatctacatcggagccgatggcaaaccgtacgaggaggggccatggggtttcggccatgctggcacggagtacaagattgatctgtgcaggttcgacgagagcttgacggagatctccgggaccacgg

SEQ ID NO: 53640 - DNA, 296 bp, Zea mays
gggtcaagctcgtggtcttacgtggtttatcccgatggatgacccaacactcatctccaggcagcaactttttgccagaattgttggcggccttggtggtagagctgctgaggaggtcatatttggagagcctgaggtgaccactggagctgctggtgacttgcagcaaattactggcttagccaagcagatggtcctgacattcggtatgtctgaaattggtccatggtctctgatggagggtggagcgcagagtggggacgtcatcatgagaatgatggcaaggaactccatgt

SEQ ID NO: 53641 - DNA, 291 bp, Zea mays
accagactcaggacacggaggtcgtggagtccaggcctgcaggggatggaaccttccagaagtgggcggctgtgtgtggtgcattctggacaggggttgagatacacgtgccatgtgcagcatgagggtttgcccaagcccctcaccctgagatgggagccgtcttcccagtccaccatccccatcgtgggcatcattgctggcctggttctctttggagctgtgatcactggagctgtggtcgctgctgtgatgtggaggaggaagagctcagatagaaaaggagggagc

SEQ ID NO: 53642 - DNA, 81 bp, Zea mays
  unsure (1)..(81): unsure at all n locations
ttttcagaccctgttacctccgcaaccctcagtattgttcaggtcttctgggggttagataaaaagctcgctcanaggaag

SEQ ID NO: 53643 - DNA, 292 bp, Zea mays
cacatccaaaagacaacgggtcctcgacaggcacctggatttcatggccagggtgatggagggtaacattgtgctgggctgtggagatgccacgtggaggtcctacgttctgtgtttcgtcaacttgctggtcagcttcgtgcccgcgtgggtccctgaagtgaagctaaatacgctgcagaaactggcatctgggcttcggagatggcacgagggcgatcttgccctctctttgcttgagctagggggatccaagaccgtgacttcagtagttgaatctcttctgcggtga

SEQ ID NO: 53644 - DNA, 297 bp, Zea mays
ctcccaagggcatgctggcccgaggcacgtaccacaacaagtccttcttcaccgacgatgacaagcaagaccacctcagctgggagtggaacctgtcgattaagaaggagtggacagaatgaatgcatcaacccctttccccacccttgccacctggaagaattctctcaggcgtgttcagcaccctgtccctcctccctgtccacagctgggtctctcttcaacactgccacatttccttattgatgcatcttttcccaccctgtcactcaacgtggtccctagaacaagaggctt

SEQ ID NO: 53645 - DNA, 289 bp, Zea mays
attctcctcccgagccttctcttccttcacgcctctttgccgcagcgtcgggttggtcgtcgtttgctgtttgttccgagatcaccggagccagccagccagccagatgcagagatgaggtggtcggcgttcctgtgggaggccgcgtcaggtcgccgcccgtgggtttccaacgtcctcctcgtcgtggcagccgccagtagcggaggtctcgtcgcgtacgccgactccggatcagatgctgctgtcgagcagccgcagcttcctccgaggaagaaggtcgtggtgc

SEQ ID NO: 53646 - DNA, 114 bp, Zea mays
gtcgtctcccgtttgcgtgaccaagatagagagcgagatgcagtcgccatgtctggcatcatccacaagatcgaggagaagctccacatggggggagtccacaagaataaggag

SEQ ID NO: 53647 - DNA, 288 bp, Zea mays
tgacaattcataatggggatgaaccatatgcatgtaaggactgtggaagggctttattcggggctctgtactgatgcaacatcagaggattcaagctggtgataaagcctataaatgtgaagaatgtgggaatgcctttatccgtggctcacaacttactcagcaccagagaattcacaccaatgaaaagccctatgaatgtaaggaatgtggaaagatgtttagtcatggctcacaacttactcaacatcagagaatacacactggtgagaaaccctatcaatgtaa

SEQ ID NO: 53648 - DNA, 286 bp, Zea mays
cagtgttgtgtcctagcgccgccgccgccccaactcgccttgcgtgactgaaagctcgtcggcttccgtccacgcgagaagcgagagcatggacacccaggtgaagcttgctgttgtggtgaaggtgatgggcaggaccggctccaggggtcaggtgacccaggtcagagttaagttcttggatgaccagaaccggctcatcatgaggaatgtcaaggggcccgtccgcgagggtgacatcctcaccctgctcgagtccgagagggaggccaggaggctgcgctga

SEQ ID NO: 53649 - DNA, 287 bp, Zea mays
ccagctcctgactgtacatgtgctgtggagtttcttggtgatgaaaactatgatgtctcatgcaattgcaagttcagtttttgctggaattgcactgaggaagctcatcgaccagtgaactgcgagactgtttctaagtggatattaaagaatagtgcagaatctgaaaatatgaactggatactggctaattctaagccctgtccgaagtgcaaacgaccaatagagaaaaaccagggatgcatgcatatgacatgcacccctccttgtaaattcgaattttgctg

SEQ ID NO: 53650 - DNA, 266 bp, Zea mays
ccggttgcgctccgccgccatcgcttcaagcagcgaaccctagccgccctcagcgacggattgcagatctcccagccatgacgttcaagcggaggaacggcggacgcaacaagcacgggcgcggccacgtcaagtacatacgctgctccaactgcgccaagtgctgtccaaaggataaggctatcaagcggttcttggtgaggaacattgttgagcaggctgctgtgagggacgtgcaggaggcttgtgtgcatgatggatatgtt

SEQ ID NO: 53651 - DNA, 267 bp, Zea mays
ccgatctcgatggcgaaccctcgcgtcttcttcgacatgaccgtcggcggcgccccggcgggccggatcgtgatggagctgtacgccaacgaggtgcccaagaccgcggagaacttccgcgcgctgtgcacgggcgagaagggcgtgggcaagtccgggaagccgctccactacaagggctccaccttccaccgcgtcatccccgagttcatgtgccagggcggcgacttcacccgcggcaacggcaccggcggcgagtccatctac

SEQ ID NO: 53652 - DNA, 264 bp, Zea mays
gggaggcgctcatcaacgccgaccgcatcatcgaggagtccttctggccgggcaagtacgccgtcgagcttagctccgtggcgtacggcgcgacgtggcagttcgacacggaggcgctgcccaacgacctcgtcaagcgcgggctggccgtgcgcggggaggacggggagctggagctcaccatcaaggactacccctacgcccacgacgggctcctggtctgggactccatcaagcagtgggcgtccgagtacgtcaacgtct

SEQ ID NO: 53653 - DNA, 269 bp, Zea mays
aagaaataccagaggtatgagaagaggcactccaacattcctgctcacatctctccatgcttccgtgtgaaggaaggtgaccatgtcatcattggccagtgcaggcccctgtcaaaaactgtgaggttcaatgtcgttaaagtcattccagctggatccgcagctgctggaaagaaggccttcacagcagcctgagtttatagactatgttccatgagtagtctatagaatgatgtctttttaattcaaaagaaatctctcttctaggg

SEQ ID NO: 53654 - DNA, 267 bp, Zea mays
gtgaggcctgcctacatgtactggccctgtgcacaatcttccttaaggaggctgcagctttcggactctgcttggccgagataggcgagatgatgaccagggagttcagagggatggaggaggaaccaagccagctggagcttatgtgtatggaggccaggaagagagtagcagagtgggagcccttctctgccacagctgaacatggagaagataccgatttccagttctcggtggatatgctaggagaatacagtgatgtagtgc

SEQ ID NO: 53655 - DNA, 264 bp, Zea mays
ggctcgaggtcatatctagctatagtagctcccttgagaagcatttgagggaggagccatgtctgaggagaagcaccaccaccacctgtttcaccaccgcaagccagaggaggagggcgcctccggcgaggtcgactacgagaagaaggagaagcaccacaagcacatggagaagctcggcgagctcggcgccatcgccgcggcggcgtacgccctgcacgagaagcacaaggccaagaaggacccagagaacgagcacgggca

SEQ ID NO: 53656 - DNA, 264 bp, Zea mays
cgcgtgtgactcatgaattgaagctctcgatctcaccgacaccgaggaagaagagatcaatggcgtccgagcagggagtcgtgatcgcgtgccacagcaaggctgagttcgacgcccacatgaccaaggcccaggaagccggcaagctggtggtcatcgacttcactgccgcctggtgcggtccatgccgcgccatcgccccactgttcgtcgaacacgccaagaagttcactcaggtcgtcttcctgaaggtggacgtggacg

SEQ ID NO: 53657 - DNA, 218 bp, Zea mays
ggagctcgacaaggacgaccgacgacgcacgcggagatccggcgtactgcaaattttgaaaactgaactgtaagatggcatcagcagagctttcccgtgatgaaaatgtgtacatggcgaactcgctgagcaggcggagaggtacgaggagatggttgagttcatggagaaggtagccaagactgttgactcggaggagctcactgtggaggagcgaa

SEQ ID NO: 53658 - DNA, 261 bp, Zea mays
cgacgcgccgtcactgaatcctcagatcacggctagccttaatcacgccactctgctgactcccggcgagcagtgtaacattttccttcagccatgggcaaggagaagactcacatcaacattgtggtcattggacatgtcgactctggcaagtcgaccaccactggccacctgatctacaagctcggcggtattgacaagcgtgtgattgagaggttcgagaaagaggccgcggagatgaacaagcggtcattcaagtat

SEQ ID NO: 53659 - DNA, 265 bp, Zea mays
tccaagtgcaagggcaagggctcgaagtctggtgcttcaatgaggtgccacgagtgccagggctcaggtatgaaagtcaccattcgtcagctccgggccttccatgatacagcagatgcagcagccttgcaacgagtgcaaggggactggggagagcatcaacgagcaggaccgctgcccagggtgcaagggtgagaaggtcgttcaggagaagaaggttcttgaggttcatgttgagaagggaatgcaacacagccagaagatc

SEQ ID NO: 53660 - DNA, 144 bp, Zea mays
ctcgagccgcgcgccgttcctgtacccggaactggagtgggacttccggctgccgctcgtgaagagcatcaacgtcagtggacacaagtatggtctggtctacgccggcatcgggtggtgcatctggaggaccaaggcggacct

SEQ ID NO: 53661 - DNA, 259 bp, Zea mays
ggcacctgggcagctgaagcccgtggatgggctgcaggagctgtgcggatggatggaaggccgcgacctgaagcgcgcggcggtgacgaacgccccgagggcgaacgccgagctgatgctgtcgctgctggggctcaccgacttcttcccggtgctcgtcatcgggagcgagtgcgaccgggccaagccgttccctgacccgtacctcaaggcgctccagctcatcgacgcatcgcctcaacacaccttcatatttgaa

SEQ ID NO: 53662 - DNA, 262 bp, Zea mays
ggaatacaagggcatcttctggcaggaggacatcatccccttcttccagaacgtgaccattcccaaggattgcgacaccgtccagaagtgctacatctacctctctggacaggtgaaggagaagcttggcaagatcgacccctactttgctaagctcggtgacgccatggtcacctggatcgaggcctgggatgagctgaacccggctggccccgctgccgggaaagacaaggccaagtagatgggagtccctgggggtgca

SEQ ID NO: 53663 - DNA, 256 bp, Zea mays
gagatagggacaggctgaattcttctccttcggaacgaacgacctgacgcagatgacctttgggtacagcagggatgatgtgggaaagttcattcccgtctatcttgctcagggcattctccaacatgaccccttcgaggtcctggaccagaggggagtgggcgagctggtgaagcttgctacagagaggggccgcaaagctaggcctaacttgaaggtgtgcatttgtggagaacacggtggagagccttcctct

SEQ ID NO: 53664 - DNA, 262 bp, Zea mays
gccgcgtggcaggtcgccgaggtggccaaggtcaacaaccgcttcaagcgcgaggaggtcgtcatcaacggctgggagggcgaccaggtcgagaaggccagcgcgtggctcaagaagtacgagaggaagcttgaggagaagcgtgccaaggcgatggagaaggcgcagaacgaggtggccaaggcgcggcggaaggcggaggagaagcgcgcgtccgcggaggccaagcggggcaccaaggtggcgcgaatgctggagctcg

SEQ ID NO: 53665 - DNA, 258 bp, Zea mays
gtcccttcttcacctcttgttgggctgcttcaggacaaaatcaataactggagggagacagctcttatattgacatccatccttttcgctgcagttgtgttctggttcattggcatatttgtccctagcgtcgaccgtttcaacgaagagagcgagtatggccttactgccgccgagagatcaagtctcaggccactgcttggtgaaaacgagctacggacatcggactaaaatctgcgcaatccataaccatttatt

SEQ ID NO: 53666 - DNA, 259 bp, Zea mays
ctcgagccgctcgagccgctcgagccgattcggctcgagaggagatcatacacgagtgcaaactgttcttcctcgctggccacgacaacacagcccttctcctcacgtggtccgtgacatttgctcagcatataccccgagtggcaagaaaggctccggaaggaggtcttgagggagttcgggagggacgctcctaaccccaacgcgctcaacagattgaaagagatgacaatggtgttgttcgagaccttgaggctct

SEQ ID NO: 53667 - DNA, 256 bp, Zea mays
ctggtgcctgagcttgggaaattggagcatctgcagtacctggaactttacaagaacagcattcaaggaacaatcccttctgagcttggtaatttgaagaatctaataagcttggacttgtacaagaacaacatttcggggacaatacctccttcccttggaaagttgaaatcccttgtattcctgcggctcaatggcaatcatttgactgggccgatcccaagggaactttctggaatatctagtctcaaagttg

SEQ ID NO: 53668 - DNA, 255 bp, Zea mays
ccgcctctcctgctcctaccgcagctctccctcaggtttagtgttcgcaatggcggccttcaacaagcttggtggccttctaaggcacagtgctctggtgagcggtatcactggtggctcttctcctgcagtgttcaatgctgcacggctcatgtctaccaagctatttattggtggtcttgactggggtgttgatgacgtgaaactaagagaagcatttagcagctttggagaggttactgaagcgagggtgat

SEQ ID NO: 53669 - DNA, 258 bp, Zea mays
ctccagcagctgcaggagatgggcatcattgatgtcgatcccaagggtggacggcgcatcacctcccagggaaggcgtgatctggaccaggtggctggaagggttgctgttgaagcttgagcaatctcatatttggtttctatgatgtcatgtttgattgttgagatggctacactttatttgcactttggattaggatttttgtgttaagagaactcaaggcattctagctatggttcacactgtattttccctgag

SEQ ID NO: 53670 - DNA, 260 bp, Zea mays
cgaacaaccaattctcatccatgccattcaattttggttctcacttaactggtatttcccttctcatggcttccggaaacaatttgtccggagaaattccacaatcaatctgtgaagcaacaagccttatgctccttgatctctccaataataatcggcttggctccatcccttcttgtttaatggaggatatgagtaacctcaatgtattaaatttgaaaggaaatcaacttcatggaagattaccaaatagcctaaag

SEQ ID NO: 53671 - DNA, 214 bp, Zea mays
aactctggttcggatcaccggtggcatgaaggtgaaggctgaacgtgacgagtcgtcaccttacgctgctatgcttgctgctcaagacgtcgcacagcgctgcaaggagcttggcattactgcactgcacattaagcttcgcgccaccggatgcaacaagaccaagacccctggacctggtgcccagtctgccctcagggcacttgctcgttcc

SEQ ID NO: 53672 - DNA, 255 bp, Zea mays
ctcgagccgccatgttcggctgcaccgacaccaagcaggtgtacaaggagctgcaggagtacatcgccgcgtacccggacgccttccaccgagtcatcggcttcgacaacgtcaggcagacgcagtgcgtcagcttacatcgcctactagccccccggcagcgagtagagtccgtggctagatagacccatggccatgcatctgcatgttgatcggatcaccttcttgcattggttcctactaatcactcccccc

SEQ ID NO: 53673 - DNA, 252 bp, Zea mays
gtcacatctgaaggtgaaactgcaaagtgcaagaaggtggtctgtgatccttcgtatttaccaaacaaggttaggaagattggtagagttgttcgtgcaattgctatcatgagccacccaatccctaatacaaatgagtcccactcggttcaaattattttgcctcagaaacaacttggacgtagatcagacatgtatgttttctgttgttcatacacgcacaatgttgcgccaagagggaagttcattgca

SEQ ID NO: 53674 - DNA, 253 bp, Zea mays
cgcaatttaagcacatacttggagtgaaaccagcaccacagaatgcactaagcaatgttcctgtcaaaacttattcaagatcactggaacttccaaaagagtttgacgctagatctgcatggtcccgttgcagcacaattgggaacatacttgatcaaggtcactgtggctcttgttgggcttttggtgctgtggagtgcctccaggaccgtttttgcattcacctcaacatgagcattttactttcagtcaa

SEQ ID NO: 53675 - DNA, 257 bp, Zea mays
gaggtgccaggtaggcgtggttatcctggatatatgtatactgatttggcaacaatatatgagcgtgctgggcgtattgaaggaagaacaggctccattacccagattcctattctaacaatgcctaacgatgatatcacacacccaactcctgaccttactggatacattactgagggacagatatacattgataggcagctccataacagacagatttatccacctattaatgtcctgccatctctttcacgatt

SEQ ID NO: 53676 - DNA, 296 bp, Zea mays
gcgaccctcttccaggcacggagctgaaggagatctggagagtcgcccctgccccacagaacgacgggtatcagtacacacactttgcgcacaaaataaacagcttcaacacggcacctaagaagctgttggcatctgattcccggctgaggcccgatagatatgccctcgagaagggcgacatgtccaagtctggctcagaaaagagcaggctggaggagcagcagagagccgagaaaaggactcgagaggccaagggcgagcagttcactccgcgatggttcaacgtgacggat

SEQ ID NO: 53677 - DNA, 282 bp, Zea mays
caaacgcgcaaccctagcctcgagctctatctccggccacagctggtcaggttagcgacgaaggatgagcaggcgctggagcctcacgatctacgtcgggatactccccggcgacatccgggagagggaggtggaggatctgttctacaagtatggtaaaattgttgacattgacctgaaggtccccccaagaccacctggttatgctttcgttgagtttgaagatcctcgtgatgctgaggaggcaattgctggacgggctggatacaacgctgatggaca

SEQ ID NO: 53678 - DNA, 287 bp, Zea mays
gaccaacctgaacggcgccttctgcagcgagcgcgcgctctccttcgccgcgccgtctggccagaccgcctggagctactacaaggttatgatcccccttggcaagatcgcgacggtggagccggtgacgatgaaggagagcccgccggagaagtacgtccacgtcgtcaccgtcgactcccacgacttctggttcatgggcttcgtcagctacgacaaggccgtgcacaacctcgtcgaggccgtctcccagcacggcgtcgccactgccggcggcaagtgacgag

SEQ ID NO: 53679 - DNA, 282 bp, Zea mays
gtcgtcatcaacggctgggagggcgaccaggtcgagaaggccagcgcgtggctcaagaagtacgagaggaagcttgaggagaagcgtgccaaggcgatggagaaggcgcagaacgaggtggccaaggcgcggcggaaggcggaggagaagcgcgcgtccgcggaggccaagcggggcaccaaggtggcgcgagtgctggagctcgccaacttcatgagggccgtggggagggcgccctccaccaagcgctccttcttctgaacccaccggcctcttcttcac

SEQ ID NO: 53680 - DNA, 289 bp, Zea mays
gatatggccatggaggtggtgaaggatacggctctgggtctggcttttgtggtggtgctgccggcggcggcgcgtggacatggtggcggtggtggtggtggccaaggtgggtctggctatggctctggttcaggatatggatcaggtgaaggatacggacaaggtggtgctcatggaggaggctatggaagcggtggtggcggtggtggcggcggtggtcaaggtggtggtcgctctggctatggatctggatccggctccggttatggacgcggcaacgacaacggac

SEQ ID NO: 53681 - DNA, 288 bp, Zea mays
cgcgtgtgactcttgaattgaagctctcgatctcaccgacaccgaggaagaagagatcaatggcgtccgagcagggagtcgtgatcgcgtgccacagcaaggctgagttcgacgcccacatgaccaaggcatcaggaagccggcaagctggtggtcatcgacttcactgccgcctggtgcggtccatgccgcgccatcgccccactgttcgtcgcacacgccaagaagttcactcaggtcgtcttcctgaaggtggacgtggacgaatgaaggaagtcaccgcggcct

SEQ ID NO: 53682 - DNA, 288 bp, Zea mays
gacgcggacgtcggaacggggatcgtcggcgcgccggcgtgcggggacgtcatgaagctgcagatccgcgtcgacgaggggtccggcaggatcgtcgacgcgcgcttcaagaccttcggctgcggctccgccatcgcgtcctcctccgtcgcttccgaatgggtcaagggcaagcaagtagaggaagtggtagccatcaagaacaccgagattgcgaacacctgtctcttccaccagtgaagctccactgcagcatgctcgctgaggacgcaatcaaggccgccgtga

SEQ ID NO: 53683 - DNA, 284 bp, Zea mays
gtctcctccgcccgttgccttcgtcccctccatctccggctgcgtcgccggcgagcccgacaccgcgaatcggatgcgccgacaaggcgagagggaaaagatggggcttacgttcaccaagctgttcagccggctgttcgccaagaaggagatgcggatcctgatggtgggactcgacgccgccggaaagaccaccatcctctacaagctgaagctaggcgagatcgtcaccaccatccccaccatcggattcaatgttgaaactgtggagtacaagaacatca

SEQ ID NO: 53684 - DNA, 283 bp, Zea mays
tctgtctttgcttccttcatatgaaggaaaatctgtactagagcttggtgctggaataggccgtttcactggagaactcgctaaaacagctacgaatgttcttgctctggattttattgatagtgcaattaataagaatgaaagcattaatggtcactacaagaatgcatcctttatgtgtgctgatgtgacatcccaggacctagtgcttcaagctaactccatcgatctgatattttcaaattggttattgatgtatctttcagatgaagaggttgaacag

SEQ ID NO: 53685 - DNA, 275 bp, Zea mays
ccccggcagccgcaaacgccttcgccgtcgcgtcccgctcctccgcccgcccgacgcgacccctaggacctggagagagaggtcggcatggctgccgcagtggtcgacgacgctggtatggacgccgtccagaagcgcctcatgttcgaagacgaatgcattttggtggacgagcaggacaatgttgttggccatgagtcacagtacaactgccatttgatggaaaagattgattctgagaatctgctacatagggcattcagtgtgttcctttt

SEQ ID NO: 53686 - DNA, 280 bp, Zea mays
gtttttcatccgccttcgcctccaaccgcgtgcgctccacgcctcctccaggaaagcgagagcttctgcataagaacaacaaatcaaaagcgtgatcagctcggtgccaacaaaacctcaacaaccaagtttcatgtctgatctcgacgtccagcttccatctgcctttgatccgtttgctgaggcaaatgctgaggactctggtgctggtcctggcacgaaggattatgtgcatgtgcgcatccagcagcgcaacggcagaaagagtctgactacagtc

SEQ ID NO: 53687 - DNA, 279 bp, Zea mays
ctcgggtcaaaccctaagcagggagttgatttatccgctgcagccatgagtaagttgcagtctgagtctgtcaaggatgccatctcccagattgttggggatgccaaggagaagaataggaagttcactgagactgtggaacttcagattggtctgaagaattatgatccacagaaggacaagcgtttcagtggctctgttaagttgccccatatccctcgtcccaagatgaaggtgtgcatgcttggtgatgcccagcatgttgaggaggccgagaag

SEQ ID NO: 53688 - DNA, 278 bp, Zea mays
cggctcgaggggctgtgggtgatgtaacaaaccggattaatttaacacctgttgcattgatggaggcaacttgctttgctaaaactgtgtttggtggccagcaagttaagcctgatcacagagatgttccttgtgctgttttctccattccaccactatctgtagtgggcctcagcgaagaacaggccttggaggaagctaatggtgatattcttgttttcatctcatcattcaacccaatgaagaacagcatatccaagcgccaggagaagactatc

SEQ ID NO: 53689 - DNA, 288 bp, Zea mays
ctttgtcatgtcctgctcattcactaaccaggtcattgcccgacttgaactgtggaaggagaagagctctggcaagtatgagaagaaggtgtatgtgctccccaagcaccttgatgagaaggttgctgctctccacttgggcaagcttggtgccaagctgaccaagctcaccaagtctcaggccgactacatcagcgtgccgatcgagggtccctacaagcctgcccactaccggtactaggcacacggcttgcagctcactcgggccgttgtgtgctatgaagttcg

SEQ ID NO: 53690 - DNA, 292 bp, Zea mays
  unsure (1)..(292): unsure at all n locations
atntgactctgcctctggcacctacactctctacttaattanttggagatgctatgtaagaagtaacccacatcctgctgaacatggtgcgactgaatgttgtcatcaagatccctgaagaagaagctccctcgactgtcttgtctcagaagtcattcactccaaaacaggaaattcagcacctgttccgctagcctgagaattgactccccaccgtggtgtccaatacattcactgccctgatcctccgcagnctgcttctgctcttcgctctgtggatccggattggtgc

SEQ ID NO: 53691 - DNA, 278 bp, Zea mays
ctgtcattgaagaaattcaaaggtccgcggaggatagtggtgacaaacgaaatttgaagatgtgcttggggatgctaaagtccatgagaaatcgctgtgatcagaactttgttgcttatagaaagggtcttggtgttgtttgcaacaaaaaaggtggattcggtgtagatgactttgttgttgaattctttggggaggtttacccttcttggagatggtacgaaaagcaagatggtattaaacatatacaaaacaacattgaagatcaagctcctgag

SEQ ID NO: 53692 - DNA, 280 bp, Zea mays
gtatgatcgccgatgtctccaagtctgacaagatcgttgtcgagaagtccaccgtccctgtcaagaccgctgaggctattgagaagatcttgacccacaacagcaagggcatcaactaccagatcctctccaacccggagttccttgcagagggcactgctattgaggacctgttcaagcctgacagagtgctcatcggtggccgggagacccccgagggcaggaaagccgtccaggctctcaaggatgtgtatgctcactgggttcccgaggacaggat

SEQ ID NO: 53693 - DNA, 277 bp, Zea mays
gcaactttcagatgccaaccaacagttcagtactgcagtcacagacaacagaatcctcaaatccgatgtagaagcgttaagaattaaggtaaagatggcagaggatatggtagcgagaagtgctgtatcgtgtggcctaggcgaccttggcctggcaccatacgtgaactcaaggaagatgtgccaagctttgaatgtgctcacagggttggatttactagggagtgatgcgttcaggggtccaaccgcagtacacgagtacagaactcacagtaca

SEQ ID NO: 53694 - DNA, 279 bp, Zea mays
aggagagcggcgtggagcagaactgttggctcttctaccccaacatgcagcacgtctaccccatcagcttctgaagaaccgttaaccgtaccgatccaagctagctgctagctggccctggtggtggctccgaccgacgacggacgacgacgatcgacctgcagccgtatgtgtcgatccggccgtatacagatgatagtacgtagcatgtatgtatatatatggtatatgtgggcttgctttgcgaccgctgggagtgagtatccgatccaattggta

SEQ ID NO: 53695 - DNA, 272 bp, Zea mays
tcatcgatctacacacatacatagtttcttctactacacgacgacaaacatggggaagcctgcgaagatcggagagtggggtggatacgccggcgatcgtcgggatctgagggctactccggaccggctgatcgaggtgtaggtcacggcggacaacagcagctgcatccgctccatctccttcatctacatcggagccgatggcaaaccgtacgaggaggggccatggggtttcggccatgctggcacggagtacaagattgatctgtgca

SEQ ID NO: 53696 - DNA, 277 bp, Zea mays
  unsure (1)..(277): unsure at all n locations
gggaaacaaagccggtgaagattatgatggtggccgggacttggatgactttgtcaagttcattaatgagaagtgtggcaccagccgggatccaaagggccacctgaatcaagaggctgggcttgtgccaagcttgaatcctcttgtgaaggagtttctcaatgctgctgatgactagcggaaggaagtcctctctaaaatagaagaggatgttgctaagctcagcggttctgcagccaagcatggaaagatatatgtgacagctgcanagaagatc

SEQ ID NO: 53697 - DNA, 273 bp, Zea mays
ctcgagcgtgatggccaaggcacattgtgcatgggggcaaagcagctggaggagttcagagagaaccagttgtcgacctcggcatgttccaacaggactcaggtctcagcctgcaacatgaagctcaagtatgctccatatgttgaactgcctggtggtatggcgttgcaaggcgctactttggtggctatcaaaccctcacctgagggaagcaatggaagccaccctaaccgcaaggaagccgaagattcgtctttggagcattcgatgggc

SEQ ID NO: 53698 - DNA, 274 bp, Zea mays
gctaattggtgctgccgcctacatcgaatgcagttcaaaaacccagcagaacataaaagcagtgtttgacgcagcaattaaggtggttctccagccaccaaagcaaaagaagaggaagaagaaggtgcagaagggatgcaccattttgtaactacaaacggtagagggcaacagtctggctgcggcgctgctgccaatgataaccatcgcctccttgctgtataatatatcgcctgatcatgccaccagcatgcacaagggagatggtggtttt

SEQ ID NO: 53699 - DNA, 276 bp, Zea mays
gcctaaagctggacgacgaggacgacgaggaggccaagaagcggcgggaggaacgcaagaagcggttcgaggagctgtgcaaggtgatcaaggacatcctgggcgaccgcgtcgagaaggtggtggtgtcggaccgcatcgtcgacttcgccgtgctgcctggtgacgggcgagtacgggtggaccgccaacatggagcggatcatgaaggcgcaggcgctacgtgacagcagcatgagcgcgtacatgtcctccaagaagaccatggagatcaac

SEQ ID NO: 53700 - DNA, 163 bp, Zea mays
gataaatctgaggcttgtttctctacattcgcagttgccgcctaagagctttcgccttgtcaggcttgagagatagtgctgctaaatccttccttggatgtctgatgcgattgcaatccaattcttctgtgctttggttgtagagggtctcgtaggtttcggt

SEQ ID NO: 53701 - DNA, 277 bp, Zea mays
ggaaaagccaggtcacagtcccttgtttggatatgacttctggtaccagcctcgccacaagacgatgatcagttcgtcatggggagcccctgcagcgttcaggacaggtttcgatcttcaacatgtccaggatggcctgtatggaaggcacctgcatgtgtacgactggcctggcggtgagctcaagcagacacttgatctaggtgacactggactacttccccttgaggtgaggtttttacatgatccatcaaaggacactggctatgttggctgt

SEQ ID NO: 53702 - DNA, 275 bp, Zea mays
ctcgcgtgccagatcgtcgtgggcagcctcatcggcgccaagttcggcttctccggcgtcgcggagatccccaaggcgtacgcaccatcgtcgtgctcttcatctgcgcctacgtggccggcttcgcctggtcctggggccccctcggctggctggtgcccagcgagatcttcccgctggagatccgctcggcggggcacagcatcaacgcctccgtcaacatgctctgcaccttcatcatcgcgcaggccttcctccccatgctctgccgcttc

SEQ ID NO: 53703 - DNA, 276 bp, Zea mays
tctcgagcgaatcggctcgagccgcccgccggcaagcgaaagctaagcgagcctatcgagccatggagaaggcgatctatcggtagcgggtcctcctggcgcaccttctcccctcctcctctaccatctcctcgcagcctcagcttgcgtgcctacaggacgccaatatgcatggccaagcgaggaggcttcaaggacacctacccagaggacctcctcactgttgttctcatggttcccttcccttcaaggtcaaccaccagtgttcatctgggg

SEQ ID NO: 53704 - DNA, 272 bp, Zea mays
caacgggcgctacctcaagacggcggcctacggcactttggaagggacgaccctgacttcacctgggaggtggtgaagccactcaagtcggagaaaccttctgcctaaggcggcctttttttttcagtaagaagcttttggtggtctgctgtgcttaatcatgcttttatatggcttctacatgttgtggttctttcttgatctgcaccgcgcttatcgtttgtgttgtactgccctaataagtggtgcttatgaggactgtttctggtttt

SEQ ID NO: 53705 - DNA, 275 bp, Zea mays
aaactctggttcggatcaccggtggcatgaaggtgaaggctgaccgtgacgagtcgtcaccttacgctgctatgcttgctgctcaagacgtcgcacagcgctgcaaggagcttggtcttactgcactgcacattaagcttcgcgccaccggaggcaacaagaccaagacccctggacctggtgcccagtctgccctcagggcgcttgctcgttccgggatgaaaatcggacgcattgaggacgttaccccggtccccactgacagcactcgcaga

SEQ ID NO: 53706 - DNA, 269 bp, Zea mays
gagaacttgtgtctctacggccttcccaacggtagctgggaggtctcgccgccggggacgaggttcctccggagttgcccgagccggcgctcggcatcaactttgcgcgcgacggcgtgcagcgccgcgactggctctcactcgtcgcggtccactctgactcgtggctcatctcagtcgccttcttctacggcgcccgcctcaacgccaacgaccggaagcgcttattcagcatgatcagtgatcttccttctgtctttgaagcattt

SEQ ID NO: 53707 - DNA, 270 bp, Zea mays
cacatacatagtttcttctactacacgacgacaaacatggggaagcctgcgaagatcggagagtggggtggatacgccggcgatcgtcgggatctgagggctactccggaccggctgatcgaggtgaaggtcacggcggacaacagcagctgcatccgctccatctccttcatctacatcggagccgatggcaaaccgtacgaggaggggccatggggtttcggccatgctggcacggagtacaagattgatctgtgcaggttcgacgag

SEQ ID NO: 53708 - DNA, 278 bp, Zea mays
ctgagaaccaaaagagcattctgtttgaaaattacggaaagtctgatccagcgtgtgttgcaaaggtgaaggacttgtacaaagagcttaaactggaggaggttttccatgagtacgagagggagagttacaacaagctgattgccgacatcgaggcccagccgagcaaggcagtccaaactgttttgaagtccttccttcacaagatctacaagagggacaagtagacccagatcgtcgacaagctgctccatcgacgcttgcatcaatcaaattac

SEQ ID NO: 53709 - DNA, 281 bp, Zea mays
cagagagcgcccaccatggtgctgtctcctggcggcaagaccgacgtcaaggccgcctggggtaaggtcggcgcgcacgctggcgagtatggtgcggaggccctggagacgatgttcctgtccttccgcaccaccaagacctacttcgcgcacttcggcctgagccacggctctgcccacgttaagggccacggcaagaaggtggccgacgcgctgaccaacgccgtggcgcacgtggacgacatgcccaacgcgctgtccgccctgagcgacctgcacgc

SEQ ID NO: 53710 - DNA, 202 bp, Zea mays
cgtcaacataggcaccatcggccatgtcgaccacggaaagaccactctcaccgccgcgctcaccatggtgctcgcctccgtcggcggcacgcgcctaagaagtacgacgagatcgacgccgcccccgaggagcgcgcccgcggtatcaccatcatcaccgccaccgtcgagtacgagaccgagacccgccactacgcacacg

SEQ ID NO: 53711 - DNA, 265 bp, Zea mays
catcgtcgaaaccctagcccagcctcgccgccggcacgccggatcggtcggtgccatgtccaaggccagggtctacgccgacgtcaacgtgctgcgccccaaggagtactgggattacgaggcgctcaccgttcaatggggtgagcaggatgactatgaagttgtcaggaaggtcgggagccctgaatacagtgaagtatttgagggtattaatgttaacaataatgagaaatgcatcattaagatcctcaagcctgtgaagaaa

SEQ ID NO: 53712 - DNA, 271 bp, Zea mays
gggagggagacgggagaaccagggagcggaggcgtgcgtgctgcggcctgcggctgcaggaccagagatcggggactgagctagggtctgggactgggaggcggagatgtcgacgccggcgaggaagcgcctgatgcgggacttcaagcggttgcagcaggacccgcccgccggcatcagcggcgcgccgcacgacaacaacatcatgctctggaacgccgtcatattcgggccggatgacacgccgtgggacggaggcacgttcaagctg

SEQ ID NO: 53713 - DNA, 270 bp, Zea mays
gcgcccccgcgagccagccccggcgaagtcgacagcaccaagcatggcggacacacaggcgtcacccgcggtgacgctccgcatgcgcaagttcatgaccaaccgcctcctctcccgcaagcagttcgtgctcgaggttctccaccccggccgcgccaacgtctctaaggcggactcaaggagaggctggctaagatgtacgaggtgccggatcccaactgcatcttcgtcttcaagttccgcacccacttcggaggcggcaagtctacc

SEQ ID NO: 53714 - DNA, 269 bp, Zea mays
ctgaagagctgatcctcaccggcgtcgccatcgtaatcgccttggacagcggcaccagaacctctgcctccgcaggtgcttgctggtatcattacaatctggtagttttagtggttgggcttgacttcctactattcagaaacacagtaccgagaagtctttaggtggggtcaaagatggtgtcgctgaagttgcaaaagcgccttgccgcgagctacctcaagtgtgggaaaggcaaggtgtggcttgacccaaatgaagttagtgag

SEQ ID NO: 53715 - DNA, 269 bp, Zea mays
caaacacttgcgccgccactgcctcacaggtaaggccgccatggtctccggttcgggcgtgtgcgcgaacatccggtggtggacgcgcgccaccacatgctgggccgtctctcctcgatcatagccaaggagctgctcaatgggcagaaggtggtcgtcgtccgctgcgacgagatctgcatgtcgggcggcctcgtccgtcagaagatgaagtacctccgcttcctccgcaagcggatgaacaccaagccgtcccacgggcccatcca

SEQ ID NO: 53716 - DNA, 271 bp, Zea mays
ggcaaataaaatgcagtcagacgatcaacggatgggagatgatgatcccgttcggcttcttagcagcaaccggggtgcgagtcgcaaatgagctcggcgcagggagcggcataggtgcgcgcttcgccatcgtggtgtccatcacgacgtccgtggtgatcggcctcgtcttctggtgcctcatcctctacttcgacgacaagatcgcgcttctcttcacgtccagcgcggtcgtgctcgacgccgtgcaccacctgtccgtgctgctcgc

SEQ ID NO: 53717 - DNA, 271 bp, Zea mays
gaatgaggaagctaggctgcttgcactaattgaaggtgtaattgctgcaaatatatttgattgggggtctcgagcttgtgtagaactttatcacaagggaactataatagaaatctatcgcatgagtcgcaagaagatgcaacgtccttggcggattgatgactttgacatgttcaaaaagagaatgcttactgataggaaggaccaatcatacaaaagagcactgctttttgttgataactcaggtgctgatgtggtccttggaatgctt

SEQ ID NO: 53718 - DNA, 273 bp, Zea mays
actggctacacttacattatgccaaagaacatattgaagaaattcatatgcgtacagatctgcgtacacaaatcgctggattcttatatgggctgagtccacaggacaatcctcaagtcaaagagattaggtgtatagccatccctccgcagcatggaacacaccagatggtgactctgccatcaaatcttcctgaacatgagttccttaatgatcttgaacccttgggatggatgcatacacagccaaatgaagctccacagctatcaccac

SEQ ID NO: 53719 - DNA, 266 bp, Zea mays
tgtatttggccttaaagaatcgccggtagctgcaggcttcactgtacctcttatcatccttactcttttgtaaaaccagtactgcagaaaccggcttcttccattattcaagacttttccagcacaggatttaatcgacatggacatggaagatgaacgatcaggaagaatggatgaaattcaccacggacttcattctgcttattgccagttcgctgacactgtagatgtgcccttggataaaattgaaatcgttggtggggatg

SEQ ID NO: 53720 - DNA, 265 bp, Zea mays
ggagttgagagtgaccattggttttggtggtgttgttctcagccctgttggaacacagtgtgtatccaaggactatcatcctattgtgcaaagaaaaggatttgctgtggttgattgttcctgggcacgtttaagtgatgtcccttttgtgaaactacgttgcggtgctcctcgtctcttaccatggttggtagcagcaaatcctgtgaactatggccgcccatgtgaactgtcatgtgtggaagctttatcagcagccctcata

SEQ ID NO: 53721 - DNA, 267 bp, Zea mays
gaaatactgttggagcggtatttcccccagccgagtttttttttgtttagtttttttctcgggtccctttcagatggaggaacaaaaaaggaaccaaagaaacaatctggtggttcaaaagcgaagacagctgaggctattacggttgcaaaattggatattagagtgggacttatcagaaaagcagagaagcatccagatgctgattccctttacgtggaggagattgatgttggagaggacacaccaagaacagtggtcagtggc

SEQ ID NO: 53722 - DNA, 272 bp, Zea mays
gatcgatacaatgtatctgatctggtgttcgcccatttttatccgatgacttcttgcagtggagctgggccgtcggtacttcccgaactgctcgcaggtgctggacaagttcctggaggacgatctgccggaaggtctggaccagttctacctccagaggggcacagccgatgagcagaaggtgaagaggatgcgcttctgcgagctgaaagaggacgtgctgaaggcgtttagcaaggacaaggcggagggcagcgtgttctcgggcctgt

SEQ ID NO: 53723 - DNA, 277 bp, Zea mays
taagcaaggcgatacgttgaaacccttaaccctcttccacctcgaagcggcgcgaggagggagagtgtgagtggactcaggaggcggcgggcgaaatgaagcttaacgtcaagaccctcaagggcaccaacttcgagatcgaggcgagccccgatgcgtcggttgctgaggtgaagaggatcatcgaaactactcagggtcagagtacctacccagcagaccagcaaatgctcatataccaagggaaaattctgaaggatgagaccactttggaaag

SEQ ID NO: 53724 - DNA, 248 bp, Zea mays
gctcgacgctatcgagaacatgaacggcaaggagctcgacggccgtaacatcaccgttaaccaggcccagtcccgtggcggtggcggtggcggcggtggctacggcggcggcggcggcagctggagccactgatgtatgcgcccatacctggcatcagccgaatcatcttatctatcgctactatcgtgttaacgttcgcttctgtcaccgtgttagtgtcagtactacctatggaatacgtgttagt

SEQ ID NO: 53725 - DNA, 268 bp, Zea mays
cgttagactaggttaggctagggtgtcgaccagctcgcggaaatggtggccttcaggttccatcagtaccaggtggtggggcgcgcgctgccgacgcccggcgacgagcaccccaagatctaccgcatgaagctctgggccaccaacgaagtccgcgccaagagcaagttctggtacttcctgaggaagttgaagaaggttaagaagagcaacggtcaggtcctggccatcaacgagatcttcgagcgtaacccgacgacgatcaaga

SEQ ID NO: 53726 - DNA, 265 bp, Zea mays
gaggtgccaggtaggcgtggttatcctggatatatgtatactgatttggcaacaatatatgagcgtgctgggcgtattgaaggaagaacaggctccattacccagattcctattctaacaatgcctaacgatgatatcacacacccaactcctgaccttactggatacattactgagggacagatatacattgataggcagctccataacagacagatttatccacctattaatgtcctgccatctctttcacgattgatgaaga

SEQ ID NO: 53727 - DNA, 265 bp, Zea mays
ggatacatgagtgaagatgactggaggtggcatatgtatgacactgataagggaagcgattggctgggtgatcaggattctattcagtatatgtgcagagaggcaccacaagctgttatagaactgtgataactattgactagcaattactcgaactgaagtgggaaagatatcatcaacgtggctctggagggcagagcttagattttggcaaaggtggacaagcctaccgttgtgcctgcgctgctgacacaacaggacatgc

SEQ ID NO: 53728 - DNA, 241 bp, Zea mays
gcggcggcggcggctggagggtctgatgtgtggccccatcctggcttcggccgagttatcttatctatctatagtatcgtgttaccgttcgcttctgtcaccgtgttagtgtccgttctacctttggattaggtgttggtaccccttttgttcgctttggttgctcccgctatgaaacgagacgagagaagaatgagcaaggtttttgttcgcatctattgttgtccaatgatattgatat

SEQ ID NO: 53729 - DNA, 271 bp, Zea mays
gataaatctgaggcttgtttctctacattcgcagttgccgcctaagagctttcgccttgtcaggcttgagagctagtgctgctaaatccttccttggatgtctgatgcgattcaaatccaattcttttgtgctttggttgtagagggttccgtaggtttcggtctaaaatcgtgtgctttgcaagatcagcttcttgtttggacttcgaaactgaaacctggtccaggcaatcggcaaatcatcctgccatcttgcgatactgtatccaag

SEQ ID NO: 53730 - DNA, 275 bp, Zea mays
ctctatgttgccttcacgatgttcatagccatcaccttccccttcttcggtgggctgctcggtttcttcggcgggttcgccttcgcgccgaccacctatttccttccctgcgtcatgtcgctcgcaatctacaagcccaaaaggttcagcctctcctggctgaccaactggatctgcatcattcttggggtgctcctgatgattctgtcgcccatcggagggctccggcaaataataatggacgcgaaaacctaccagttctactcgtgagctct

SEQ ID NO: 53731 - DNA, 274 bp, Zea mays
gagaagcaaagacacatttggctcactcactcacactcactcgctcatagattgtcctgtccgtccatcatctctagctagcagctacaagtgagagcagcaagcgacaccacaaccagaccaccaccaacgcctagctgtgagaggatgggcaagctgtggacgatcctcactcacctccactcccttgcagggccaacggtgatgctgctgtaccctctgtacgcgtccgtgcgggcgatggagagcccatccaagctggacgacgagcagt

SEQ ID NO: 53732 - DNA, 102 bp, Zea mays
gtcactgagaccgtccttgctgcctgctacaaggcgctcaacgagcaccatgtcctcctggagggtaccctcctgaagcccaacatggtgactccaggctcc

SEQ ID NO: 53733 - DNA, 271 bp, Zea mays
gcaatcgctatcaaaggccgcaaaagcagcgaggctcgagaaattcgaggtgccagcgaagatcgtgctgttgcctgaaccgtggacgccggagtccgggctggtgaccgcagcgcttaaactgaagagggagcaaataaaggccaaattcaaagacgatctggacaagctctaccactgaagaagggacagatgacggtttaatttgcacctactgcttccagacgcttgcggtgccaaaagctgcctggatggaacttttactgacctg

SEQ ID NO: 53734 - DNA, 267 bp, Zea mays
cgagctcgtcagctccgagctcgacgcaaagtcgggcgtggagaagacgcgggtgacggcgtacgcgcacaagacgctgcgggagggccactacgaggcggagttcaaggtgccggcgtcgttcgggccggtgggcgcggtgctggtggagaacgagcaccacaaggaggtcttcatcaaggagatcaagctcgtcaccggcggcgacacagcaccgccgtcaccttcgactgcaactcctgggtgcactccaagttcgacaacccg

SEQ ID NO: 53735 - DNA, 264 bp, Zea mays
gtttcaccctgaattcaagtcaaggcccggcaagccatctccgcttttcttaggattggtagcagcgtcatcaggccagcttgaccacttgctccaacgtggccttaccagttcagcaggcagagacatctgcggcaaagggggagcgcagaaaccaaaagcttgccagaacgggcatgtcatgaagccactgaatggcctggtgcacgggcactattcagcgactcgctgcaatggcgtcattcccatctagcaggctgtttt

SEQ ID NO: 53736 - DNA, 267 bp, Zea mays
atttttcatatcctcactcgccgccgccgccgctcgtccctcgccccatcgcgatggcccggatcaaggtgcacgagctagtcgggggaagagcaaggcggatctgcaagcgcagcttaaggagtttaagtcggagctctccctgctacgcgtagcaaggtcaccggcggggctcccaacaagctctccaagatcaaggttgtgcgcacctccatcgcgcgcgtgctgaccgtcatctcgcagaagcagatgtcggcgctgcgtgag

SEQ ID NO: 53737 - DNA, 267 bp, Zea mays
ccgtcgccggcaagaagatcgccgtcctcggcttcgccttcaagaaagacaccggtgacaccagggagaccccggccattgacgtctgcaagggcctgctgggcgacaaggcccagatcagcatctacgacccccaggtgacggaggaccagatccagcgggacatggccatgaacaagttcgactgggaccacccgatgcacctggaaccgacgagccccacggccattaagcaggtgagctgcgtgtgggacgcgtacgaggcca

SEQ ID NO: 53738 - DNA, 267 bp, Zea mays
cattccactccgacattcacgtcccagctgtcgggagcaggcaatggcgccggatctaagcgaacacgccgccgcagttccagcccgtggcgcctacctcgccggcgtcggtgtcgcggtcctcctcgctgcctccttcctcccagtagccgagtcgtcctgcgtgcgagataactcattggtgagagacataagccaaatgccgcaaagcagctatgggattgaaggattgtcacatataacagttgctggtgcgctcaatcatgg

SEQ ID NO: 53739 - DNA, 261 bp, Zea mays
ggaagggcgagatgctgttcggctaccagccgtgcgccaccaaggacccccgcgtgttcggcgacaccgccggggacttcgtgcccgaccgcttcctcggcgaggagggcagcaagctgctgcagtacgtgtactggtccaacggccgtgagaccgagaaccccagcgtcgacaacaagcagtgccccgggaagaacttcgtggtgctggtcggcaggctcctcctcgtcgagctcttcctccgctacgacacattcaccg

SEQ ID NO: 53740 - DNA, 261 bp, Zea mays
gccgtctcccttttgcgtgacaaagaaagagagcgagaagcagtcgccatgtctggcatcatccacaagatcgaggagaagctccacatggggggcgaccacaagaataaggaggaggagcaccacaagaaggccgaggagcaccacaagaaggaggagggggagcaccacaagaaggacggcggggagcacaaggaaggcatcgtggagaagatcaaggacaagatcaccggcgagcacggcgacaagtccggcgaccac

SEQ ID NO: 53741 - DNA, 260 bp, Zea mays
ggcaaatgccttaccatatgcatataaacctggagcttttggaagccacacacttgatctgtgcgatgctgattgaagtccccaatatggctgccagcacctatgacaagcggagacctatgagcaaaacattccgaagcttcttgaagtgagtgaaaggcagacatttgttgggccgcctgagaatgtgagggaccatgtaatggctgccacaagagccctcaacaagggtgatcaccaaaaggctttcagtgtcataa

SEQ ID NO: 53742 - DNA, 259 bp, Zea mays
caaggttttcattggtttgattgttggagccatgcttccctattggttctctgccatgaccatgaagagtgttggaagtgccgccctaaagatggtggaggaggtccgcagacagttcaacaccattcctgggttgatggagggaactgccaagcctgactatgcaacctgtgtgaagatctccactgatgcttccatcaaggagatgattcctcctggtgctctggtcatgctcactcccctcattgttggaaccctc

SEQ ID NO: 53743 - DNA, 261 bp, Zea mays
agctcctcatctcaagtgtgtagacgagacagagatacactgagagagcgccatggccagcctccaagtcactcctacttcggcgttcactgagtggaacgagctgaagttcgaaggcctgtacctgttccacacgcccctgggctctcgcgccaaccaagctcgggtcatagacaacaaggcgccgattggcatcggtgccaccgtagttaacaactggacagtgtatgacgggccagggccgaacgcaaagctggttgc

SEQ ID NO: 53744 - DNA, 260 bp, Zea mays
cgcgccgccgccgcgtctcctcctgtacaggtaagaaggagaggaagagggcgaaatggtgaagcacaacaacgtcatccccaacgggcacttcaagaagcactggcagaactatgtcaagacatggttcaaccagcccgcccgcaagcagagacgccgcattgctcgtcaaaagaaggctgtgaagatattcccccgcccgactgctggtcctctacgccccattgttcaatgccagactttaaagtacaacatgaagt

SEQ ID NO: 53745 - DNA, 252 bp, Zea mays
acgaggacctgccggagtccgtcgactggagggccaagggcgccgtcgccgaggtcaaggaccagggcagctgcgggagctgttgggctttctcaacaatagcagctgtgcaaggcatcaaccagattgttacaggcgacttgatctccttgtctgaacaagagcttgtcgactgtgacacttcgtacaatcaggggtgcaatggaggtctgatggactatgcatttgagttcatcatcaacaatggcggaa

SEQ ID NO: 53746 - DNA, 252 bp, Zea mays
ggcaacggttcataggcagggatcacaggtgtggggcggtgaaaatggcttcgagcgtttgatgcgttttgctcattccatggtgaaactgattgacttctctcctggtgagaggtatttggtcacatacagcagccatgagcccagcaaccctagagacacacatagagttgtcctgaatatatttgatgtaaggactgggaaagtgatgcgagactttaagggaagcgctgatgattttactactggcgg

SEQ ID NO: 53747 - DNA, 263 bp, Zea mays
gcaaaaatgggagacgcaatactccctggtagcttgaatctgactgttggtgggacaaacgatggcgagtactggattgatctccctgatgatgacaggaaggagctcgtcagagctggcaatctgaagagcgctgagctatacgctcatgtgaagccagctcatggagggaccttcactgacattgcaatgtgggtgttctgcccgttcaacgggcctgtcaccatcaaagttgggtttgcgagtttcgctctgcagaaggt

SEQ ID NO: 53748 - DNA, 287 bp, Zea mays
catcgtcttcaacgacaactcatacagaagagcagcagcaacatatgcagaagctactaccacaacgacttcaataccaagagcagctacatttacagcaacagatgacgcaacaaatacaacagcaacaacaatctctataccagcaacatcaacaaatgcagcatcaacagcaactgtggcaacaaatacaacaacagaagcatcagttgcaacacatggatccccaacaacaacagctgttgtctcagatggtgggtacagaattaggcagtgatgatgcacaa

SEQ ID NO: 53749 - DNA, 279 bp, Zea mays
gcggcgagagagaagtcagaggtcatggagcgagggcagtggccgagatcacgccggaagaagctgtcggggataagaaggaggttgttgaggagaagtccgcggcgttctggacgacaatagcgccgaacgtggacgattacagctcgtcggtggcgcggctgatcgcccggggatcggggcagctagtgaggggcatcatctggtgcggtgacatcacggtagggggcctgcggcgtggggaagaagtgatgaagaagagcgtgggtcccagcgaag

SEQ ID NO: 53750 - DNA, 270 bp, Zea mays
caagtactcccaaaaagactggtgtcaagctatgagaaaattgacacattcgtggtacctaggtcatctaaaaagctctatgaagacaatgaatatgctctctacactataacactgtttgctaaggttgttgacaattttaaggtccgtgctcgcgagaagggttttcaggtccgtgattttgagtacagtcctgaagcacaggaaagtcggaagcaggagatggagaagctactgcaagaccaagaagccatgaggaccactctcttc

SEQ ID NO: 53751 - DNA, 270 bp, Zea mays
acagcacgaagaggaggtcaggtggaggtcgaggacggcaacgtccttcagatcagcggcgagcgcaacaaggagcaggaggagaagacggacacctggcaccgcgtggagcggagcagcgggagattcctgcgcaggttccgactgcccgagaacgccaagacggagcagatcagggccgccatggagaacggcgtgcttacagtcactgtgcccaaggaggacgccaagaagcctgaagtgaagtccattcagatctccggctgacct

SEQ ID NO: 53752 - DNA, 289 bp, Zea mays
atcgagcgtttctgtcaccaaaaaccaataccatgtcagagttgtcacaggatattgaagatgatttctaatatagttcgaagagatataattgttagggacagtaagcaactccaccattttaaggatggaagttgttcgtgtggagatgaaggttttggatgaagttcttgcagaggggaggcaagcttaattatgttgcatatacggatatacccttgtgctattattcatcttgtacacgttcatcctgtaatacaatgccatggcgatacaatgcagcaatact

SEQ ID NO: 53753 - DNA, 272 bp, Zea mays
aactttatagagatgatctttggaagacttgctcaaagaacctgatgagctaaccataaagaggaagcagatacgtgaaaatcttaaggtccttcaacaagcttacaaaactttggatgagataccacttgacgcagaggcagtagagaggggtggtggatactccctcgattctgatgcgattggtctaccaagggctcatgggctttcttcatccctccacggattcaatgatggaagctcatcatattcaaccccgaagcagcaaggtc

SEQ ID NO: 53754 - DNA, 269 bp, Zea mays
gcggcgaaggagaagtcagggtcatggacgcgagggcagtggccgagatcacgccggaagaagctgtcggggataagaaggaggttgttgaggagaagtccgcggcgttctggacgacaatagcgccgaacgtggacgattacagctcgtcggtggcgcggctgatcgcccggggatcggggcagctagtgaggggcatcatctggtgcggtgacatcacggcggggggcctgcggcgtggggaagaagtgatgaagaagaggtgggtc

SEQ ID NO: 53755 - DNA, 271 bp, Zea mays
gtattgcaaagagggcatgagaagaaagcactggaggtgtttgaggagatgtctcagaaaggggtgcgtgcaactgcagtgacctacacgtcattgatatatgttttttccaggaaagggcaagttcaggagacggataggttgtttaacgtggctgtgaagaagggcatcaggcctgacgttgtcatgtacaatgctctgatcaatagccactgcacaggtggtgatatggaaagagcatatgagatcatggcagagatggagagaagag

SEQ ID NO: 53756 - DNA, 273 bp, Zea mays
agtgactcttatccgccagttgctgagaaagtgttcgccaatgtgggcaagactatcgggtacaaagttggaacaatgattgagatccccagggcagctctggtggctgatgagatagcggacaggctgaattcttctccttcggaacgaacgacctgacgcagatgacctttgggtacagcagggatgatgtgggaaagttcattcccgtctatcatgctcagggcattctccaacatgaccccttcgaggtcctggaccagagggagtggg

SEQ ID NO: 53757 - DNA, 269 bp, Zea mays
gacgccggggtacgcccggcggtcccgtacgggatgtcgcaggtgaacatcgagggcaacgggtgcgggcaggcgctgccgcagcagccgaccgtgaaggtgcactgccgcgccaaccccaactacgccatgagcatccgcgacgggaaggtggtgctggcgccggcgaaccccaaggacgactaccagcactggatcaacgacatgcggtggagcacgagcatcaaggacgaggaaggttacccagcgttcgcgcaggtgacaaggcg

SEQ ID NO: 53758 - DNA, 263 bp, Zea mays
tgggaacgtgatacattgttcgtgctctacgtgctgcatacaataaccctgagagagctatagactacctgtattctggaattcctgagaatgtggaggctcagcctgtagcccgagcacctgctgctggccaacaaacaaatcagcaggccgcatcacccgctcagccagcagttgcattgccagtgcagccatcacctgcctctgcagggcctaatgcaaatccgttgaacctttttactcagggtgttccaagtggtggt

SEQ ID NO: 53759 - DNA, 263 bp, Zea mays
atttcacatatcatcacatgacaggtaatacaataggaaaactatacgcaaggacggatgagattggtgtccacctggcgatcacggttgatcacaccacgagcgtgacggtgcgcgatcgtgacagcaaggaccagatccgcgtggatgtggacgaggtggcctcggtggtgaaggaagtgacggacgggcagagcacctgggctgacatcatgtggaggtacccagctcacacggcctcagccgccgacgaggatgggcac

SEQ ID NO: 53760 - DNA, 287 bp, Zea mays
cgctcgagccgaatcggctcgagccgcccgccggcaagcgaaagctcagcgagccaacctaaccatggagaaggcgatctaccggtaacgggtcctcctggcgcaccttctcccctcctcctctaccatctcctcgcagcctcagcttgcgtgcctacaggacgcgaatatgcaaggccaagcgaggaggcttcaaggacacctacccagaggacctcctcactgttgttctcatggttccactcacttcaaggtcaatcaccagtgttcatctgggtacaggcagt

SEQ ID NO: 53761 - DNA, 265 bp, Zea mays
gtctggacaacacctgctgtagccatcctctctaccgtaagtcagagttgattgaggaaaattgtgcaggggtgagaaatgcagcccagcgcaaactatttgatgaactgggaatagttgctgacgaattacctgttgaccagttcatcctccttgggaggatgctttacatggctccttcagatggaaaatggggcgaacacgagttggattacctcctgttcatggttcgtgacgtgaagctcaacccgaatcctaagaggtg

SEQ ID NO: 53762 - DNA, 237 bp, Zea mays
gtggacaagacagcctcaaggtgacggcgcccgacggcctcaagggcaactacgagtgcgccattggcaaattcgggatggcccagtacggcggcaacatggtcggcttcatcgcctaccccaaggccaacaggaaggcctgcaagagcttcgacgacttagacatctcctacaaggccaagtcgggggagttcaccaccttcctgctcgacgacatgggagattgctacttcgcaa

SEQ ID NO: 53763 - DNA, 257 bp, Zea mays
ggcgagcatgtgaggccattcaacctgggtaaccctggcgagttcaccatgcttgagcttgccaaggttgtccaggacaccatcgaccccaacgcacggatcgagttccgcaagaacacccaggacgacccgcacaagcgcaacccgacatgagccgcgccaaggagttccttgggtgggagccgaagatccccctgcgtgagggccttcccctcatggtctacgacttccgcaagcgcatcttcggcgaccaagac

SEQ ID NO: 53764 - DNA, 274 bp, Zea mays
  unsure (1)..(274): unsure at all n locations
tccaaacacttgcgccgccactgcctcacaggtaaggcgccatggtctccggttcgggcgtgtgcgcgaagcatccngtcgtggacgcgcgccaccacatgctgggccgtctctcctcgatcatagccaaggagctgctcaatgggcagaaggtggtcgtcgtccgctgcgaggagatctgcatgtcgggcggcctcgtccgtcagaagatgaagtacctccgcttcctcgccaagcggatgaacaccaagccgtcccacgggcccatccactt

SEQ ID NO: 53765 - DNA, 292 bp, Zea mays
tttggccgcaggaatccaccatcggcgcggctttcttctccagaccctggcggtgaacgacgagacggtcaagttcgagatatgggacacggcggggcaggagcggtaccacagcttggctcccatgtattaccggggcgctgcggctgccatagttgtctacgacatcacgaacgcggcctcttttacgcgtgcgaagaaatgggttcaagaacttcaagcacaaggaaactcgaatacaatagtggctcttgccgggaacaagctgatttgttagatacgaggcaggtgt

SEQ ID NO: 53766 - DNA, 288 bp, Zea mays
gctaaataaagatacttcagaacttatatggagggctaacattgtaaaactacttgatattgtcagagatgatgaatcaaagacacctagtctgatctttgaacatgtcaacaacactgacttcaaagtactctaccctgcgttatctgattatgatgtcagatactatatttttgaattattgaaggcactagattactgtcattcacgtggtataatgcaccgagatgtcaaaccccacaatgtcatgattgaccatgaaaaacgtcagcttcgtcttattgatgg

SEQ ID NO: 53767 - DNA, 292 bp, Zea mays
ccgaggaacaccaccatcccgaccaagaaggagcagtcttctccacgtactccgacaaccagccgggcgtcctgatccaggtgtacgagggtgagcgcgcgaggaccaaggacaacaacctcctcggcaagttcgaactctccggcatccctcctgcgccccgcggcgtgccccagatcacggttaacttcgacatcgatgccaacggcatcctcaacgtctctgccgacgacaagaccaccggccagaagaacaagatcacgatcaccaacgacaagggccggcttagcag

SEQ ID NO: 53768 - DNA, 255 bp, Zea mays
aaagccggcttcgtttcctcgaatgatcagcactactctctattgtggactttgtcgcagctgatatcaacttcataaatctttatccaagatggcgctggaaaacattggtgcttcaaacagtgatgatggcttctacaggtacaagatgcgcagaatgattactcaagatagaaggccgtagtaatggtatcaagcacaatgttgtgttcatggttgacatagcaagagcacttgccaggccagcttccacac

SEQ ID NO: 53769 - DNA, 280 bp, Zea mays
gccaaccctaggcagttcaaggtgccggactggtcctcaacaggaagaacgattacaaggatggaaggttctcacaggtcgtgtccaacgccctcgacatgaagctcagggacgacctcgagaggctcaagaagatcaggaaccaccgtggtctgcgtcactactggggcctccgtgttcgtggccagcacaccaagaccactggcaagcgtggaaaactgttggtgcctcaagaagcgataagctacatatctatcgacaaatctcagatgtactagtg

SEQ ID NO: 53770 - DNA, 288 bp, Zea mays
gccaaccctaggcagttcaaggtgccggactggttcctcaacttgaagaaggattacaaggatggaaggttctcacaggtcgtgtccaacgccctcgacatgaagctcatggacgacctcgagaggctcaagaagatcaggaaccaccgtggtctgcgtcactactggggcctccgtgttcgtagccagcacaccaagaccactggcaggcgtggaaaaactgttggtgtctccaagaagcgataagctacatatctatcgacaatctcagatactatagtgttggtc

SEQ ID NO: 53771 - DNA, 280 bp, Zea mays
  unsure (1)..(280): unsure at all n locations
ctcgagccgcttttgctcggaacgcacacaccgcaatcnccgatctccgatcccctcgtcaatccaaagatgcagatcttagtcaagaccatcactggaaagactatcaccctcgaggtggagtcttctgacaccattgacaacgtccaggccaagatccaggacaaaaagggcatcccccggaccagcagcggctcatctttgctggcagcagctcgaggatgggcgcacactggcagatacatcatccagaaggagagcactctccactggtgctcgc

SEQ ID NO: 53772 - DNA, 283 bp, Zea mays
cagaggcgggttggcttctcctcccccaccggttcgtgttcaggttctggttcgtgggcgagagggaagagatggcggcgtcggacgttgagtaccgttgcttcgttggcggcctcgcctgggccaccgacgaccactccctcaacaacgccttcagcacctacggcgaggtcctcgagtcgaagatcatcctggatcgggagacgcagaggtcccgcggcttcggcttcgtcacgttctccacggaggacgcgatgcgcacgccatcgagggcatgaacggc

SEQ ID NO: 53773 - DNA, 283 bp, Zea mays
gtgcgggcgcgaggagtcgacgggaagacaggaattatgagtgaaacagggcacactgtacaagtcactaacctctcgagcagagtatctgaaagtgctcttcatgagttcttttcgttctctggtcctattcagcatatagaacttatcagatcagaaggatacggtgccactgcttatgtgacattcaaggaacgctttgccttggaaactgcagtattgctcagtggggctactattgtggatcagccagtatgcataacctattggggacacctgagga

SEQ ID NO: 53774 - DNA, 285 bp, Zea mays
tgagcacccgcttcgaggctcttgggtggcacacgatctgggttaagaatgggaacaccggatatgatgacatccgcgcaccattaaggaggcgaaggcagttactgacaagcccaccttgatgaaggtgactaccaggatcggttttggttctccaacaaaggccaattcatacagtgttgcatggagtgcactgggtgccaaagaggttgaagcaaccaggcagaaccttgggtgggcctaatgacacattctttgtaccagaggacgtcaagagtcactgga

SEQ ID NO: 53775 - DNA, 266 bp, Zea mays
aaataaaagtaattgatcttgggagcagcgctttgagacagatcatctatgttcatatgtgcaatcacgatcttaccgtgcacctgaagttatactgggcttgccttatgaccaaaagatagatgtatggtcacttggttgtatattagcagagctttgcaccggaaatgtacttttcccaaatgattctcctgcaacattacttgctcgtgtgatgggtatcattggctccatagaacaagctatgcttgcacagggacgcgaca

SEQ ID NO: 53776 - DNA, 283 bp, Zea mays
gcgcctagcaaaagcatacttcccgaagcatcttgcaatccactgagttctgtttgttgagacgcatagagctagctgctagcgtcgacaatgtcgctcgtgaggcgcacaacgtgttcgaccccttctctatggacctctgggaccccttcgacaccatgttccgctccatcgtcccgtcggcgacctccaccaactctgagactgccgccttcgccagcgcccgcatcgactggaaggagacgcccgaggcgcatgtgttcaaggccgactccccggcgtc

SEQ ID NO: 53777 - DNA, 274 bp, Zea mays
acctttgccatgtctagtttggtctacccttatgaatttaaaagcaaagatgctgctggtcaagttcgtggttcccctaatgaatttccagggattggtgctacatctcctcttctttggttagctagagggtttgtgattctgtctggtccgacaatcccaattatcggtgaaggcgattaagaggccaatgacagatatgtggaacaactagtaacaagtgcagaggctgcagttgaggaagttgtcaaaagagtggtggctcaccctgata

SEQ ID NO: 53778 - DNA, 276 bp, Zea mays
ttggtgcagcttcctggtctaagccaggacttcttcacctgttgagggagaagaacatcgattttgctgctcacagcaaccaggaggactctggttatcttctgttcaaccttattggaaatttggcattcccgcttatccttatcggtggtctgtttttactttcaagaagggcacagggtggcctcggtggacccaatggtcctggctttccccttggtgttggtcatctagggccaagttccagaggacccaacaatggtgttacatttgatg

SEQ ID NO: 53779 - DNA, 285 bp, Zea mays
catcgatctacacacatacatagtttttctactacacgacgacaaacatggggaagcctgcgaagatcggagagtggggtggatacgccggcgatcgtcgggatctgagggctactccggaccggctgatcgaggtgaaggtcacggcggacaacagcagctgcatccgctccatctccttcatctacatcggagccgatggcaaaccgtacgaggaggggccatggggtttcggccatgctggcacggagtacaagattgatctgtgcaggttcgacgagactt

SEQ ID NO: 53780 - DNA, 283 bp, Zea mays
cgtgcacaaacagctattcattaatatgatccctcatcaataccagctgcagttaggagggcgggtctctctctcccattggtggcaaaacccttggtggcgaagtcccatgagctatctctggcttatgatccaacttcactgaccaaacttgagccccctttagttcttcaggaatttgttaaccatggtggcgtcatgtttaaggtgtacattgttggggatgcaataagggttgtacgtcggttttcacttccaaatgttgagaaggtgatctgtcgat

SEQ ID NO: 53781 - DNA, 281 bp, Zea mays
actggctacacttacattatgccaaagacatattgaagaaattcatatgcgtagagatctgcgtacacaaatcgctggattcttatatgggctgagtccacaggacaatcctcaagtcaaagagattaggtgtatagccatccctccgcagcatggaacacaccagatggtgactctgccatcaaatcttcctgaacatgagttccttaatgatcttgaacccttgggatggatgcatacacagccaaatgaagctccacagctatcaccacaggacctga

SEQ ID NO: 53782 - DNA, 204 bp, Zea mays
gacgcctgctgcccaggtcttcgccggcgacgagcactccaccagacgagaggggattccaagatgccgagggccaccagcgacgcaacctcctgatccagtccctcggcaaggcgtacgctgccacaccaacaaatctcaagattattgacctctacgtgggttttgcggttgccactgcccttattcaggttgcttacatgg

SEQ ID NO: 53783 - DNA, 112 bp, Zea mays
ctcgagcgaattcggctcgaccaggacaaagagggcatccctccagaccagcagcgtctgatcttcgctggcaagcagctggaggatggccgcaccctagcagactacaaca

SEQ ID NO: 53784 - DNA, 208 bp, Zea mays
gcggcggctacggaggcggtggcggctacggcggtcggcgcgagggtggtggtggcggctacggcggctggagggactgatgtgtgggcccatcctggcttcggccgagttatcttatctatctatagtatcgtgttaccgttcgcttctgtcaccgtgttagtgtccgttctacctttggattaggtgttggtacccctgttgttcc

SEQ ID NO: 53785 - DNA, 262 bp, Zea mays
cttctctctctgctcctccgcctccgcctgatccatccaagacagggatcgccatgtcggactcggaggagcaccacttcgaatcgaaggccgacgctggggcgtccaagacctacccgcagcaggctggcaccgtccgtaagaacggcttcatcgtcatcaagaaccgtccctgcaaggttgtggaggtttctacctccaagactggtaagcatggccacgccaaatgccactttgtcgccatagacatattcaatgggaa

SEQ ID NO: 53786 - DNA, 210 bp, Zea mays
catcagtctacccatcagtatgcaaaatgataagatcatattgcatgagtccatcttcacacactggttggacaagggttattgttgaaaagccctttggaaaggatttgaacactgcagaggaactgagtactgaacttgggcagttgtttcaagaagaacaactctatagaattgaccactatttaggaaaagagcttgtccaaaact

SEQ ID NO: 53787 - DNA, 274 bp, Zea mays
cactcatcgatctacacacatacatagtttcttctactacacgacgacaaacatggggaagcctgcgaagatcggagagtggggtggatacgccggcgatcgtcgggatctgagggctactccggaccggctgatcgaggtgaaggtcacggcggacaacagcagctgcatccgctccatctccttcatctacatcggagccgatggcaaaccgtacgaggaggggccatggggtttcggccatgctggcacggagtacaagattgatctgtgc

SEQ ID NO: 53788 - DNA, 168 bp, Zea mays
tgaagaggcactccaacattcctgctcacatctctccatgcttccgtgtgaaggaaggtgaccatgtcatcattggccagtgcaggcccctgtcaaaaactgtgaggttcaatgtcgttaaagtcattccagctggatccgcagctgctggaaagaaggccttcacag

SEQ ID NO: 53789 - DNA, 108 bp, Zea mays
agctggtgagccactggctgcacacgcactgatgcgtggagccctacatcatcgccgccaaccggcagctaagccggctgcacccggtgtaccgcctgcatgacccgc

SEQ ID NO: 53790 - DNA, 169 bp, Zea mays
gcaatcactatcgaaggccgcgaaacagcgaggctggagagattcgaggtgccggcgaagatcgagctgctgcctgagccgtggacgcctgagtccgggctggtgacggcggcgcttaagctgaagagggagcagataaaggccagattcaaagacgatctggacaagc

SEQ ID NO: 53791 - DNA, 275 bp, Zea mays
gcgccatccctcactctcctccgaagccatcgtccacgtcccagcctccccggactctaggggcagaagctgcagcgtcgagatggtgaaggggcgcacggggcagcgcgtgaggctctacgtccggggcaccgtccttggatacaagcggtccaagtcgaaccagtacgagactacgtcgctggtgcagatcgagggggtgaacaccaaggaggacgtcgcgtggtactgcgggaagcggatggcctacatctacaaggccaagaccaagagca

SEQ ID NO: 53792 - DNA, 171 bp, Zea mays
ctctccttttgctcggaacgcacacaccgcccgtccccgatctccgatcccctcgtcgatccaaagatgcagatcttcgtcaagaccctcactggaaagactatcaccctcgaggtggagtcttctgacaccattgacaacgtcaaggccaagatccaggacaaggagggc

SEQ ID NO: 53793 - DNA, 195 bp, Zea mays
cttgggtgagagcgaagtccgtgaagcacatcttgccaaatctatgtactttataagggtcggtgagaaggaaaaggccctggaacagcttaaagtcactgaaggaaaaactgtagctgttggccaaaagatggatcttgtgttccacactttgcagattctttttttctacatggattttgctctgatatcaaa

SEQ ID NO: 53794 - DNA, 273 bp, Zea mays
aagcagattctaatggcaaatggtacatttcaagtggcttaaacccgacgtttgacacattcgattgtaagcttcacgagtttcatgtcgagggagacaaattgatcgcgaacatcacatggagagtccgcaccccagactctggcttctttaccaggtcaccgtgcagcgttttgtgcaggacctatcgcagcccggcatactctacaaccatgacaatgagttcctgcactatcaagatgactggtacattatctaatccaaggttgagaa

SEQ ID NO: 53795 - DNA, 289 bp, Zea mays
ggaacaggtgatgttctacgcaggttgattaaggattgaatgcgtatgtagacttgatagagcaaggactatcttagctagccgcataccctggaaatgggacagggtaagctttgcctcgggcagactaaggccagaataagataacacgaaatgggcgtggagcggtggcgggatagcgtgtaccctctgtggcaagaggctggacggtggtgtatctgtgctctcgatttgcgtgaacctgatctggtcttaagaaccctggggtcgagttgacatatgcaaggat

SEQ ID NO: 53796 - DNA, 276 bp, Zea mays
atcaaggatttcggagtgacgtaccgagaagttccgcttgtagcagatggtggacttgattgcgatgctccttgcttgctccatcaggccggaaactgggtgtgccttcatacagagatcgtgtggatactcgtggcgcaagagcttaagtgcagcagatattcacaaagcataggtttgatcaagatgcaaaatccaaactgcatggtgatggttgataattgctatggtgaatttgttgagatatcggaacctgcaatggtgggagcagacttg

SEQ ID NO: 53797 - DNA, 280 bp, Zea mays
caccgctcccgatacaacatccagaaagagtacaccctgcacctggtgctccgtctcagaggtgggatgcaaatactcgtgaagaccctgactggtaagaccatcaccctcgaggtggagcccagtgacaccatcgagaatgtcaaggcaaagatccaagataaggaaggcactcccatgcatcagcagaggttgatctttgctgggaaacagctggaagatggacgcaccctgtctgactacaacatccagaaagagtccactctgaacttggtcctgc

SEQ ID NO: 53798 - DNA, 281 bp, Zea mays
cgactcaactgtgtcagggtacttgcaaacagtgacaaaggttctgccttgccttactgtggagccatggctgcaaagatacgcgtggtgatgaagtcttttatgagccaaagcaaccaggtcgcagggcttctgccattcacaaagaaggtcggactacctgaatcgcggcattgtacaccgtgctgcggtcgccgcatatcgataaagaagtccagggaacagttctcgatgcatgtcaagaaacagtttgtggaactgacagccaaaccgcacgagct

SEQ ID NO: 53799 - DNA, 268 bp, Zea mays
gagcatgcaaccaaacgtgctcgcaccaataattgcggagtattcaggaggtgctgtgaactgtgatgcttaccatatgactgacccgagatctgatggtcttggtgtttcatcttgcatccagcacagtctcgaagatgctggtgtggctcctgaggaggtcactagattaatgctcatgcaacatcaaccttgcttggtgatctggtagaggtgaatgccatcaagcaagtcttcaaggacccatctgggatcaaaataaatgcaa

SEQ ID NO: 53800 - DNA, 280 bp, Zea mays
gtacaagattggtggtatcggaactgctccagttggtcgtgtggagactggtgtcatcaagcctggaatggttgtaaccttcggtccaactggcctgaccactgaggtgaagtctgttgagatgcaccacgaggctctccaggaggcccttcctggtgacaatgttgcttcaatgtgaagaacgttgctgtgaaggatctcaaacgtgggtacgtggcctccaactctaaggatgaccctgccaaggaggctgctagcttcacctcccaagtcatcatca

SEQ ID NO: 53801 - DNA, 274 bp, Zea mays
ctcactcgctgcagccaaaccctctccagcagccgtcgtcgccaccgctgcagcgcggaggcgacccccatcgccgccaagatgcagatcttcgtgaagaccctgacggggaaaaccatcacgttggaggtggagtcctcggacaccatcgacaacgtgaaggcaagatacaggacaaggagggcatcccgccggaccagcagcggctcatcttcgccggcaagcagctcgaggacggccgcaccctcgccgactacaacatccagaaggagtc

SEQ ID NO: 53802 - DNA, 272 bp, Zea mays
ccaagaacctcctgcagacggcacggccgggcacgcacgtcccaccgtctccacggagatcctctcgtcgcagtactacgtcggtacggagcgcgccatgctgctgcccaactgcctcttccgcatgggcgctgcggccatgatcctttccaactccccggaccgcgcgcggtacaggctcacccgcctggtgcgcaccgtgacggccgctcgggacgccgactaccggtgtgtgttccaggacgacgacgacaagggcaacaccgggatcc

SEQ ID NO: 53803 - DNA, 274 bp, Zea mays
ggcgttcaatactaactatcgggacacaggaatatttggcatttatactattgctccgcctgacaccctgcaagaattgtcacggttaataatggcggagtttagaagacttgcatcccaggtgtcagaaacagaggttgcccgtgcccgcaatcagctgaaacttctctgttacttcacattgatggatccactgcagttactgagaataatggtcgccagatgctaacttatgggcgagtcatgccgttcctagagctttttgcacgcattg

SEQ ID NO: 53804 - DNA, 266 bp, Zea mays
ggaagattgaaattccgctacccaacgagcaatcaagaatggaagttctaaaaatccatgcagctggtattgccaagcatggggaaattgattatgaagcagtcgtgaaactagctgaaggtttcaatggtgctgatcttcggaacgtgtgcactgaactggtatggctgcaattcgtgcagagagagattatgtagtccacgaagacttcatgaaggctgtgcggaagctaaatgatgcgaaaaagctggaatcaagtgcgcatt

SEQ ID NO: 53805 - DNA, 267 bp, Zea mays
cacacatacatagtttcttctactacacgacgacccacatggggaagcctgcgaagatcggagagtggggtggatacgccggcgatcgtcgggatctgagggctactccggaccggctgatcgaggtgaaggtcacggcggacaacagcagctgcatcgctccatctccttcatctacatcggagccgatggcaaaccgtacgaggaggggccatggggtttcggccatgctggcacggagtacaagattgatctgtgcaggttcga

SEQ ID NO: 53806 - DNA, 293 bp, Zea mays
taccgctacagcgagaaccggaatcgtcgagacatctcccatcacccgctgcaccaacgttcgatgagcgtgtgcgggatctgctagatttcagcatctacctggatatcagcaacgaggtgaagcttgcatggaaaattcagagagacatgggagagcgtggtgggcacagccttgagagcacaaggcctccatcgaggcgaggaagcccgacttcgaagcttacattgagcagcagaagcagtacgcggacgccgtgatagaggtcctgccgacgcagctgatcccgggcg

SEQ ID NO: 53807 - DNA, 112 bp, Zea mays
cgaggttggccccaagtaacttacctgcattggaatactgtatctccaaacacagatcgaaaaaagaagtgtatcaaggattgctacagagacatccatctggcttgagctg

SEQ ID NO: 53808 - DNA, 265 bp, Zea mays
gcccgacaggtgaagcgccgccgctgcagtgtccatagccaccgcaggagactgagatggggggttttgtcaagaatccacaagagcaatgcatacttcaagcgtttccaggtgaagttcaagagaaggcgcgctggcaagacagactacagggcaggataaggctgattaaccaagacaaaaacaagtacaatacacccaaatacagatttgttgtgcgatttacccacaaggacatcacagcacaaatcatatctgctagtat

SEQ ID NO: 53809 - DNA, 266 bp, Zea mays
cgacagaacttggaaaactttgttgatgtaaagaacattctcgttgaaatgggaacatactttcaagttcaggatgactatctagattgttttgatgatcctgaattcattggcaagatcggaactgacattgaagactacaaatgttcctggctagtgtgcaagctcttgagcgtgcacctgagaaccaaaagagcattctgtttgaaaattacggaaagtctgatccagcgtgtgttgcaaaggtgaaggacttgtacaaagag

SEQ ID NO: 53810 - DNA, 258 bp, Zea mays
ggcgcggctctagtcgccagtacccaccacgctccaaaccctcgcatccgattcgcgtctgcggcagaggggatggctgcggaagcgagcacggcgggtgcggcgtcggcagccgaggcgaagccttcgccgtcctcttcacgtgcctcggaatatttgcaggagtcctgctgctgaagctgtgtttcggaccctcgtaagcaagcgtgggcttgactccaagtttccaatagactctgctggtaccatcgggtatca

SEQ ID NO: 53811 - DNA, 258 bp, Zea mays
aacgcaccccaccaacccatacccataccagaggctctctgactttacttctcagcggtagatcggctgagcgagcgagcgagcgaggcacacgggtagaaaagcaagatgtcggacggcacggcgacctgcatcgacatcatcctcgcctcatcctgccgccgctcggggtccacttcaagttcggctgcggggttgagttctggatctgccttatcctcaccttcttcggctacctccccggcatcatctacgccg

SEQ ID NO: 53812 - DNA, 292 bp, Zea mays
cttctctcagcgtcaccatggtggtaatgaatggtctagcatatgctctcaagtagcatctacagcgcgtagtacaggggcatgacgccaggtcctcatcaggccgtgttccaaagtcatcgttcggttcctaactgtgatgatgaagaattgctacattggtgaattcgagatcattgatgatcacagagctgggaagattgttgtgaacctcacaggaaggttgaacaagtgtggagttataagccctagatttgatgttcaactcaaagacctagagaagtggcagaac

SEQ ID NO: 53813 - DNA, 285 bp, Zea mays
ctgggttcttcaggcagccgctggaagccaagaaggagtgcgcgcagcaggccggcagcatcgaatgctacggccaggccttcgtcgtgtcggaggaccagaagctggactgggcggacatgctcttcctcatcgtgcggccgagggaggccagggacatgcgcttctggccgacgcgcactgagtccttcagggattccgtggacgcgtactccttggaagcttcgaagctagcgtaccgcctgctggagttcatggcaaggggcgtgggtgccgacccggcgt

SEQ ID NO: 53814 - DNA, 284 bp, Zea mays
ccgcgcgatccttggtctcttcgcccgtgaggagaggcgcgacaatggctgggatacgcgggccgaccaacctggagaaggagcagatgtttggtatggcggagaaggagatcgagtacagggttgatcttttcaacaggcttacaaagacctgttttgagaagtgcgttgaaaaaaggtataaagaagctgagctcagtatgggtgagaacagttgcattgatcgatgtgtttcaaagtattggcaggtgactaatttagtaggtcagatgcttgggaaccag

SEQ ID NO: 53815 - DNA, 285 bp, Zea mays
tattgcttagcgataagtcggaatcggtcgggacgcctgatgccagtcttgcggcgagacatcaccagagatagggttccaagtgcgagggcatcagcgagcaactcctgatccagtccctcggcaaggcgtacgctgccacaccaacaaatctcaagattattgacctctacttgggttttgcggttgccactgcccttattcaggttgcttacatgggattggttgggtcgtttcccttcaactccttcctctcaggagtcctttcatgcataggaactgcag

SEQ ID NO: 53816 - DNA, 243 bp, Zea mays
caaccatctaccagcgactcagcgagcgagagcagcacacactgcacgcagctagctaggagcagcagcagcgtgcggcgatggcggcctccatgatctcctcgtcagctctggcggtggcgcctcagggcctgccgcccctcggccgccgcgcctcctccttcgccgtcgtctgctccaagaagaagatcaagaccgacaagccctacgggattgggggttgcctgaccgtcgacgtcgacg

SEQ ID NO: 53817 - DNA, 275 bp, Zea mays
cccagcttcaatctcgtcatcgtcggcgatggtggaactggtataactacatttttgaagaggcatctcactggagagtttgagaagaaatatgaaccaaccattggtgtggaagttcatccgttggatttcaccactaactgtggtaagatcaggttctactgctgggataccgcagggcaagagaagtttggtggcctcagggatggatactatatccatggccagtgtgcgatcatcatgttttatgtaacctcaaggcttacttacaagaa

SEQ ID NO: 53818 - DNA, 335 bp, Zea mays
attcatttagcgcacgagctcggaatcggtcgaggaatcctgatgtggagaaggattgcccaaccattatccactttgttctggccaacatcaacttcagaaagtacaaggccccaggtgttctgagggaaaccaaggaagagaaagaaatagctgactttgacattttcgatgaccccgaatcgccattttcaaccttcaacttccagtatccaaatcaagcattcaaaaggctacatgatctgatgtacttcaacacactgaacaacattgatgtgataaaggatgccattgttgagagcattgaatacagaagacagaacccatctcgttgc

SEQ ID NO: 53819 - DNA, 298 bp, Zea mays
catcgatctacacacatacatagtttcttctactacacgacgacaaacatggggaagcctgcgaagatcggagagtggggtggatacgccggcgatcgtcgggatctgagggctactccggaccggctgatcgaggtgaaggtcacggcggacaacagcagctgcatccgctccatctccttcatctacatcggagccgatggcaaaccgtacgaggaggggccatggggtttcggccatgctggcacggagtacaagattgatctgtgcaggttcgacgagagcttgacggagatct

SEQ ID NO: 53820 - DNA, 294 bp, Zea mays
cagagtccaaggtttcaaggccattaccttggaggctagcgactactgttttccgtgttaaagaggatgttcgacctatattctgggtcaacagaccaaagagctatcttaaaaggacattagtttgggatgagtatccccatggacggtggggtgattctcggaacccatcatatggagcacttactgaccaccagttcacaagaccacgaggccgtggtaagaagctccaagatgaatgggctgttccactgaaatctgtggaggacattagtgagcgcttcacaaacttct

SEQ ID NO: 53821 - DNA, 289 bp, Zea mays
gcagaagacccggaaactccggggccacgtgagccacggccacggtcgcatcggtaagcaccgcaagcacccaggaggccgggggaatgctggaggcatgcaacaccacaggatcaactttgacaaatatcatccaggttacttcggcaaagttggcatgaggcattaccacttgaagaggaaccagagcttctgcccaactgtcaacctggataaattatggacgttggtcagcgagcagacacgggtcaatgcagcaaaaaacaagaatggagttgctcccatcatt

SEQ ID NO: 53822 - DNA, 294 bp, Zea mays
aaagatacgaatctcttaaaggggtcgaccccaagtttctgaggaacatgcgctttgccaagaagcacaacaagaaaggcctgaagaagatgcaggccaacaatgccaaggcagtgagtgcacgagcagaggccatcaaggccctcgtgaagcctcaggctgtcaagcccaagatgccaaagggctccagccgcaaactcagccgtctggctttcatcgctcaccccaagcttgggaagaagattcgaagctacatggccaagggtcgtaggctctggcaaccaaagcccaagg

SEQ ID NO: 53823 - DNA, 251 bp, Zea mays
atacgacgcagcagccatccgcttcttctcttcggttcagctctcgagtttccaggatgaaggtaatagctgactacctgcttgctgttctgggtggaaacacttcgccgactgctgatgatgttaagagcattctggaatcagttggtgctgaagctgatgaagataaactagagttcctgctcacagaactcaaagacaaggacataacagaagtgattgcagctggaaggggaaggttatcctctgtg

SEQ ID NO: 53824 - DNA, 292 bp, Zea mays
ttctccttcgtctccgtcatggtcctcatcggcctcaccgcataccagcttatctgtctgtcagatttggagtatgatcatatcaacccatatgattcatcgtctcgcatcaacgctgtggtgctgatagaatactcactccaaggggccctgtgtgcttctttcctcttgacattgcattggttcccgtttctagtcatgacaccagtaacatactaccatgtcaaactgtatttggctcggaaacatcttgtagatgtcactgaaatttttagacaattaagtgacgaga

SEQ ID NO: 53825 - DNA, 276 bp, Zea mays
cacagcagcagccatggcggccgagccggagaagcaggcggcccccgcggcacacgagacggccgtgcacatcgtgtacgttgaccgccccgaggacgccgaccctgaggagttccacatccgcaccctcacccccgtcctcggcagcgaacagaaggccagggacgcagtgctctaccactacaagaacgcccgccagcggcttctccgcgaactcaccccccagcaggtgcaggatctcaaggagcaacaggtgttctacaggttgtgccgagc

SEQ ID NO: 53826 - DNA, 281 bp, Zea mays
ggcacacggaccctggcttcttcaccatcctcctgcaggacggcatgggcggcctgcaggtgcgcctcggcaacaacgggcagagcggcggctgctgggtggacatcgctccccggcctggggcgctcatggtcaacatcggtgagcttctgcagctcgtgaccaatgaccggttcaggagcgtggagcaccgggtgccagccaacaagagcagcgacacggcgagggtctccgtggcgtccttcttcaacacggacgtgaggaggtccgagaggatgtac

SEQ ID NO: 53827 - DNA, 285 bp, Zea mays
tcttagtgtggctgcagtggtccacactactctctgagtttcgccatgacgatcaaagacgacaagaagatgaaggatgccggaaagtcggccaaaaaagacaaggacccagtaaataaatctggtggcaaggccaaaaagaagaagtggtccaaaggcaaagttcgggacaagctgaacaatctcgtcctgtttgacaaagctacttacgacaaactttgtaaggaagttcccaactataagcttattactccagctgtggtctccgagagactgaagattcga

SEQ ID NO: 53828 - DNA, 290 bp, Zea mays
tcgggatatgcggcttgatgtggataatatgtcctatgaggaattgctcgcactaggtgaacgcattgggtacgtaaacacaggacttagtgaggaaaaaatcctaagtaacttaaaacaacggaaatatgtcttaatatcattggaagatcctccaacaggtgttgaaccatgttgtatttgccagtaagactacgcggaaggcgaggacttgggcagactggactgtggtcacgacttccacaccgcatgcatcaaacaatggctggttataaaaaatgtgtgcccaa

SEQ ID NO: 53829 - DNA, 285 bp, Zea mays
gtaagatcagaggcgagctgatgcgtgcgatcctcctcgactctactgatgccgaacctcagggacgtggactgggcaatggagacaatcacatgagattcagccaggacgacatcattgagacagtcaacaaccatcccagtgctgggtggacagccacacgtaatccttactttgcaaactataccattgcgcaatttaagcacatacttggagtgaaaccagcaccacagaatgcactaagcaatgttcctgtcaaaacttattcaagatcactggaacttc

SEQ ID NO: 53830 - DNA, 286 bp, Zea mays
cgagcgtctcctcaagttgcagaacgaacgcgggggccgtgcactcttccaggatgtgcagaagccatctcaagatgagtggggtaaaaccctggaggccatggaagctgccttgaccctggagcagaacctgaaccaggccctcttggatctgcacgccctgggctctgcccgcacagaccctcacctctgtgacttcttggaaagccacttcctggataaggaggtgaagctcatcaagaagatgggcaaccacctgaccaacctccgtagggtggcagggcca

SEQ ID NO: 53831 - DNA, 286 bp, Zea mays
gacagacgcagagacgcatatgctacaatactgcattcatgaagtgaatatgtttgcggcgcgatcacggcagctcaaagcattcgtcaggcaggatcaacaagagacctagtaattctcgtcgacgacaccataagtgaccaccaccgcaaggggctcggaatctgcggggtggaaggtcacgatactacagcggatccggaaccccaaagccgcgcgcgacgcctacaacgagtgggactacagcaaattccggctgtggcagctcacggattacgacaaggtc

SEQ ID NO: 53832 - DNA, 287 bp, Zea mays
caacgaacaaaagctctcgatctcaccgacaccgaggaagaagagatcaatggcgtccgagcagggagtcgtgatcgcgtgccacagcaaggctgagttcgacgcccacatgaccaaggcccaggaagccggcaagctggtggtcatcgacttcactgccgcctggtgcggtccatgccgcgccatcgccccactgttcgtcgaacacgccaagaagttcactcaggtcgtcttcctgaaggtggacgtggacgaagtgaaggaagtcaccgcggcctacgaggtcg

SEQ ID NO: 53833 - DNA, 284 bp, Zea mays
atctcaaatggccagtgtctcgaagatcctgaaggagctggtacctcagaacctcacacgcctgatggtcctcagatgcattgacaaagagcctccttctggaatgtgacaaacacaagaataagtcagtggccgaggccaaggtggaattcctgaagcggatctaccgatggcctacctttggatctgccttctttgaggtgaagcaaacctctgagcctgactacccagacatcctcctcattgccatcaaccgacatgggttagtgctcatccacgccaag

SEQ ID NO: 53834 - DNA, 284 bp, Zea mays
gattatggaactgatccagccatcacgtctcttcttaatactctggatatcttcctgctgcctggcaccaatcccgatggatatgtgttctcccaaaccaccaatcgaatgtggagaaagacccgttctaaaaggtcaggaagcggctgtgtcggtgtggatcctaatcggaactgggatgcaaatttcggaggacctggagccagtatcagcccttgctctgactcataccacggacgcaagcccaactctgaagttgaagtggaatccatagtggacttcat

SEQ ID NO: 53835 - DNA, 280 bp, Zea mays
cgctctgccctgattcagatcctcgccatgtcttctcacaagactttcagaatcaagcgattcctggcaaagaaacaaaagcaaaatcgtcctattcctcaatggattcggatgaaaactggtaacaaaatcaggtacaactctaagagaagacactggaggagaacgaagctgggtctataaggagtcacactacggccagactgaggatttctactgaatcaccgtcatcgatcagtccgaccagatggatttcaacattttaaactagagatttact

SEQ ID NO: 53836 - DNA, 287 bp, Zea mays
caactacaagggaatctggaagcatcaggagatacccaaccctgacgtactttcgagcattgacaggcctgattttgctccaattgctgctattgggattgagatatggacaatgcaggctggcatcctgtccgacactatcttgattactgatgatgacaaagttgccacctccattctcgagaagacctggaagcccaagtatgatgtcgagaaggacaaggagaaggctgacgaacgctgctgctggtgcagatggtctttctgacttccagacgaactttttg

SEQ ID NO: 53837 - DNA, 267 bp, Zea mays
gctgttcccactaaatttctctcggtgcttccacattctgatgagaataggatcgtctcgctcccggctaacctggatttcatgatcttcaaccaccgtggaagagcgctgccgtcagactcagacctgaaactccatacatagacatgtccagaatccagatcttttttctttattttctgtaaggccttgttcggttattcctattacacatggattagatgagattggcaaaaattaaaaatacatttgacttgcttgagattt

SEQ ID NO: 53838 - DNA, 304 bp, Zea mays
gagaagtgcaaggaagcaggcggccaccatggtgaagggacgcacgggacagcgcgtcaggctctacgtccggggcaccatcctcggatacaagaggtccaagtcgaaccagtacgagaccacgtcgctcgttcagatcgagggggtgaacaccaaggaggacgtcgcgtggtacgctggcaagcgcatggcgtacatctacaaggctaagaccaagagcagcgagacccgctacaggtgcatctggggcaaggtcacccgcccgcacggcaactcgggcgtcgtccgcgccaagttcaagtcc

SEQ ID NO: 53839 - DNA, 301 bp, Zea mays
tgccagaggtaacctgtgaagatggttcgctactcccttgacccagaaaaccccacgaaatcatgcaagtcaagaggctcaaaccttcgtgttcactttaagaacacccgggaaactgcccaggccatcaagggtatgcatatccgcaaagccaccaagtatctgaaggatgtcactttaaagaagcagtgtgtgccattccggcggtataatggtggagtcggtaggtgcgcccaggccaaacagtggggctggacacagggacggtggccaaaacagagtgctgctttttgctgcacat

SEQ ID NO: 53840 - DNA, 158 bp, Zea mays
cggctcgagcgacaagccctacgggattgggggtcttgatcttcttcttggagcagacgacagcgaaggaggatgcgcggaaatgctgcgtctcgggatgcacaggcattcgcgtaaacgatgcggagaagctcgtgacgatcggaggccatgtgctt

SEQ ID NO: 53841 - DNA, 156 bp, Zea mays
tgatatactctacgaatgctatgaagatgtggcctctggaagtgaaatccggagcgtggtgttggctcggcggaggttttatgagaaagagggcctcccagcttttccgatgggcagcatcgaccaaactcgcatgtggaaggttggtgaaaaggt

SEQ ID NO: 53842 - DNA, 292 bp, Zea mays
agacccccgaagcgcacgtgttcaaggcggacgtgccggggctgaggaaggaggaggtcaaggtggcagtcgaggacggcaacgtcctgcagatcagcggcgaagacaacaaggagcacgaggagaagaacgacaggtggcaccgggtggagcgcacagcggcaagttccttcgcaggttcagactgccggacaacgccaaggcagaccagatcaaggcgtccatggagaacggcgtgctcaccgtcaccgggcccaaggaggaagcaaggaggacgacgtcaagaacgtcc

SEQ ID NO: 53843 - DNA, 299 bp, Zea mays
cattgttgcagagaaacctgtggctgagtgtgcacaactgattgagcaactagaagatcagatttccatcatcattcgagaccaaagggtggaaagagaagcgagaaaagctgaaatggaaattgcaaaggcagaaaatatgatagctcataaggatgagatatactcacggccaaagagaacctggtttgctactgaaagggaaaagaagcttttggtagcagctgctaaagagtctttgggtcaaggtaagagtacctctggagttattagtgctaacaggctgaagacctccgtct

SEQ ID NO: 53844 - DNA, 260 bp, Zea mays
cggcggacttgcctgggccaccagcaacgagtcgctggagaatgccttcgcctcctacggcgagatcctcgactccaaggtcatcaccgaccgggagacggggaggtcccgcggcttcggcttcgttaccttctcctccgagaactccatgtccgacgctatcgagaacatgaacggcaaggagctcgacggccgtaacatcaccgttaaccaggcccagtcccgtggcggcggcggcggcggctgcagctgctgatgtt

SEQ ID NO: 53845 - DNA, 266 bp, Zea mays
ctcccctgttcggttttaggagacctgcgccgctcctccggccacgcgagcacgccgaaatggtcgcccacaggttccatcagtaccaggtggtgggtacgcgcgctgccgaccccgaccgatgagcaccccaagatctaccgcatgaagctctgggccactaacgaggttcgcgccaagtcgaagttcaggtacttcctgagaaagctgaagaaggtgaagaagagcaatggccagatgctcgccatcaacgagatcttcgagcg

SEQ ID NO: 53846 - DNA, 198 bp, Zea mays
gccatccagactgaggaagacccggaaactccggggccacgtgagccacggccacggtcgcatcggtaagcaccgcaagcacccaggaggccgcgggaatgctggaggcatgcatcaccacaggatcaactttgacaaatatcatccaggttacttcggcaaagttggcatgaggcattaccacttgaaggggagcca

SEQ ID NO: 53847 - DNA, 293 bp, Zea mays
gacgcgtgcaacgggcgcatgttcccggaagccaagcccgactcggcggcggcggcggcgagcaggagtgtggtcgtggtggacagggactacctgtcctacgacgagccaaagacggtgttcccgggcgaggcgtgcgacgacctcggcggcgagttctgcgaggcgccgtaccaggacggcgtctccagggagctggcgcacgcctgaagaccctgatccatccatgtatgtccaccacgctatgtacgtatgtgtagcagatggtttacatctacgtgttagaccaactc

SEQ ID NO: 53848 - DNA, 295 bp, Zea mays
aacgcgccaaggcgctggagaagacgcagagcgacggcgccaaggcgcggcgcaaggcggaggagaagcgggcgtcggcggaggccaagcggggcctcaagctggccaaggacctggagctcgccaacttcatgaaggccgtcggcagggtgcccaccaagggctccttcttctagccagccgactaccgctaccacctccgtctctccctgcctgcgtgtcatcgatgtacgctcgctgctgcatccgagaacctaactgtaaagaaaaaaattgtaagctgtatacgtactac

SEQ ID NO: 53849 - DNA, 298 bp, Zea mays
caacgaacaaaagctctcgatctcaccgacaccgaggaagaagagatcagtggcgtccgagcagggagtcgtgatcgcgtgccacagcaaggctgagttcgacgcccacatgaccaaggcccaggaagccggcaagctggtggtcatcgacttcactgccgcctggtgcggtccatgccgcgccatcgccccactgttcgtcgaacacgccaagaagttcactcaggtcgtcttcctgaaggtggacgtggacgaagtgaaggaagtcaccgcggcctacgaggtcgaggcgatgccg

SEQ ID NO: 53850 - DNA, 264 bp, Zea mays
gccgctgaggtcctggagcttgctgggaacgcagcgaaggataacaagaagacccggatcgttgccgcgtcacatacagctcgacgtgcgcaacgacgaggagctgaccaagctgcttggtggtgtcaacatcgcgagctgcggctttatgcccaacatacaccagcagctcgtccccaagaaggctggctcgtccaaggcttccaccgtcgatgacgatgaaaactgaagctgcacactggagaaggcattcgctaccgtctt

SEQ ID NO: 53851 - DNA, 290 bp, Zea mays
atggccatagcggacacggtggacatggggcctttggaggctatggtcacggtggttacggccacgggtatggtggccacggcaagttcaagcatggtcacggccaccacggacaagttcaagcacgggcacggcaagttcaagcatggcaagcacgggcacggcatgtttggcggcggcaagttcaagaagtgacagtgatgtgccctccatggttgatcgtagctgaactcagacttccaggacatgtgttgcctgtaataccttttcagcgttactcatccttcatc

SEQ ID NO: 53852 - DNA, 295 bp, Zea mays
gggacaaacaattggaaacatgggtgaagacttctctggtagtaccaagaatgtttcaccaactgtaatttcccccaaggaatacaaaaaaaggtttaggaagttcatggcaaagtacttcctgtcagttccagacacatggagctctgataattcatctaatccatgcaaatcctttggtcagagcaatcacaagttagcggaagtccacaatggtgatagcctgcttcagcacccaaatgaagctgaggggtgtgtctaatcacgtgcaggacttcctggcattttttaagcc

SEQ ID NO: 53853 - DNA, 291 bp, Zea mays
taccgccgccccgccgtgttgctcgccgacaccgccccgccggcagccaaaatgccgttacagaggttcgtggagatcgggcgagtggcccttgtaaactacggcaacgagtatggccgcctcgtcgtcatcgtcgacgtcgtcgaccagaacagggctcttgttgatgcccccgacatggttcgttgccaaatgaacttcaagcggctttccctgactgacatcaagattcacattaaacgtgtcccaaagaagactacactgatcaaggcaatgtaggaagctgatgtg

SEQ ID NO: 53854 - DNA, 286 bp, Zea mays
gtctcttgcttctaagagccggagaaagcgtttgcgtgcacagaggagggacgctttccggagctgcggaggcacgaacaatggacacccagaaagatgttcaaccaccaaagcagcagccaatgatatatatttgtggagagtgtcacaccgaaaatgaaataaaatccagggatccaatcagatgcagagaatgtggatacagaataatgtacaagaaaaggactaagagattggtggtttttgatgctcgatgaaacagtggagttgaggaatgtcttcatac

SEQ ID NO: 53855 - DNA, 285 bp, Zea mays
ctttttaacaagagaactcaagcaattgctgccatgccggggaagccagtccttcacaacttcgatggcagggggagaatggagcccatccggtggctcctggctgcagctggagtagactttgaagaacaatttctgaaaactcgggatgacatggccaggctaaggaatgctaggagtttgatgtgaccagcaagtgcccatggtggagattgatgggatgaagctggtgcagaccagagccattctcaactacattgccaacagatacaacctctatgggaa

SEQ ID NO: 53856 - DNA, 287 bp, Zea mays
gcagctggcttcactgctcaggtgattatcctgaaccatccaggccagatcagtgctggctatgcccctgttctggactgccacacggcccacatagcatgcaagtttgccgagcttaaagagaagatcgatcgtcgttctggtaagaagctggaagatggccccaaattcttgaagtctggtgatgctgccattgttgacatggtccctggcaagcccatgtgtgttgaaagcttctctgattaccctccacttggtcgttttgctgttcgtgacatgaggcagac

SEQ ID NO: 53857 - DNA, 320 bp, Zea mays
cggctcgagagaagagcggcggcgcgggcggacaaggagcaggcggaggaggagttgtgccaagccacaatgggtatctcgcgtgactcgatgcacaagcgccgagccaccggtggaaagcagaaggcctggaggaagaagcgaaagtatgagcttggtcgccagccagccaacaccaagttgtcaagcaataagacagtgaggagggtccgtgttcgtggaggtaatgtgaaatggagggctcttcgccttgatactggtaactactcatggggaagtgaagctgttacccgcaagacccgtatcctcgacgtggtcta

SEQ ID NO: 53858 - DNA, 322 bp, Zea mays
tcgatctcgagccgctcgagccgattcggctcgagaaggaattcagtgccccccgtgatgctgatgatgcgactacaacctagatggcagggaagtcgatggaagccgtattattgttgaatttgctcaaggagttcctcgtggttctggtggttcacgtgagtacatgggaagaggacctccaccaggaacaggtcgttgttttaactgtggaatggatggtcactgggcaagggactgcaaggctggtgactggaagaacagatgctaccgctgtggtgaatcgggccatatagagagaaattcccaaacatccaaagaa

SEQ ID NO: 53859 - DNA, 315 bp, Zea mays
cagcgatccgaagctcaatcaattcactcaaacctcttccccaaatcttcgattagattctcgttgacaagaagactagaaccgaacctgaccatgtcgctgatccgccgcagcaacgtgttcgatcccttctccctcgacctctgggacccctttgagggcttccccttcggctccggcagcagcagcagtctcttcccctcgttcccgcggaccagctcggagaccgcggccttcgctggcgcgcggatcgactggaaggagactccagaggcgcacgtgttcaaggccgacgtaccggagctgaagaaggag

SEQ ID NO: 53860 - DNA, 308 bp, Zea mays
tgtcaattcgccaccatgaacgtggtctttgctgtgaagcagtatatttccaaaatgatagaagacagcggacccggcatgaaggtacttctcatggataaagagacgactggtatagtgagcatggtctacacacagtcagagattcttcagaaggaagtatacctcttcgaacgaattgattctcaaaatcgagagatcatgaaacacctaaaagcaatttgtttccttcgacctacaaaggtactacacaaatcagctgccacctccacaggccaatgcagagtatgatccgaaagcgttagaag

SEQ ID NO: 53861 - DNA, 300 bp, Zea mays
ctccggtccgttccgctccttcctccccctatctagctagccttcccgttcctgcatcgcggcggagataggcgcctccaccacgccgacgcgggcgtccactccttccgcctcgggctcaaccgcttcgccgacctcaccaacgacgagtaccgcgccacctacctcggcgtcaggagcaggccgcagagggagaggaggctccgtgacaggtacctggccggcgacaacgaggacctgccggagtccgtcgactggcgggccaacggcgccgtcgcggagatcaaggaccagggcagc

SEQ ID NO: 53862 - DNA, 310 bp, Zea mays
attggcgccaacgagccgtcacagcttgccattgacctgaatgctcagggtctggctcgctacgccatcatctgccaggagaacggtctggtgccaattgttgagcctgagatccttgttgatggccctcatgacattgatcgctgcgcttacgtcactgagacagtccgtgctgcctgctacaaggctctcaacgagcaccatgtcctcctgtagggtaccctcctgaagcccaacatggtgactcctgggtccgactctaagatagtgacacctgaggtgatcgccagtacacgtccgtacccccaga

SEQ ID NO: 53863 - DNA, 303 bp, Zea mays
ggcccgcgcagatgatcttgacacgagacttctccgtgcaatgatcaccaagggattgattgaaccaatctccagcgtttttgtcaatctggtaaatgccgacttcaccgcaaagcagaggggagttcgcatcacggaggagaggatcctactggacggctcacctgaaacacctatcgattacattcaagttcagattgccaatgtcgagtccaaatttcccagtgcgatatctgagactggagagatcactgtggagggcagagtgaaggatggtgttcctcatctaacaaaggttggagc

SEQ ID NO: 53864 - DNA, 315 bp, Zea mays
ccgaggaacaccaccatcccgaccaagaaggagcaggtcttctccacgtactccgacaaccagccgggcgtcctgatccaggtgtacgagggtgagcgcgcgaggaccaaggacaacaacctcctcggcaagttcgaactctccggcatccctcctgctccccgcggcgtgccccagatcacggttaccttcgacatcgatgccaacggcatcctcaacgtctctgccgaggacaagaccaccggccagaagaacaagatcacgatcaccaacgacaagggccggcttagcaaggaggagatcgagaagatggtg

SEQ ID NO: 53865 - DNA, 310 bp, Zea mays
ccgtctcgtccccgtccagtccacctttccctcttcctctccgactccgccgccggcggaaccccaaccggcgaggatggggaacatcttcgtgaagaagcccaagattaccgaagtggacagggccatcctcaccctcaagacgcagcgccgcaagctcgcccagttccagcagcagcttgagaaggtaattgaagcagaaaaggaagctgcacggcagttggttcaacagaagaagagagaccgagctttgattgcactgaaggagaagaaagtcaggaagagctgttgaaccagttggcacatggca

SEQ ID NO: 53866 - DNA, 310 bp, Zea mays
cgtcatccgctgcaacgacgcgggcgtggacttcctccacgccgtcgcacccggcctgtcgcttgacgactttctcgtccctgacgccgacgtgccgaccaagcacacaaaggacctgttccccatggaccggaccgtgagctacgaggggcaccgtcgcccgctcacgtcgttccaggtcaccgcactcggagacggcaccgtctttatcggcatcgtcgccaaccacgccgtcgtggacggcacctctttttggcaattcttcaatacctgggcggccatctgccgcggcgagtcccccaaactgccg

SEQ ID NO: 53867 - DNA, 307 bp, Zea mays
ggggcggctggaactggtattgcagaacttattgctcttgagatttcgaaacagacgaatgctccaattgaagagtgccgcaagaaggtttggctagtggactcaaagggtttgattgttgactctcgtaaaggctcccttcagccattcaagaaaccttgggcgcctgagcacgagcccttgaaaaccttgtatgatgctgttcagaccatcaaacctacagttctgatcgggacatctggagttggaaaaacattcacaaaagcaatcattgaggccatgtcttccttcaacgagagagctatca

SEQ ID NO: 53868 - DNA, 292 bp, Zea mays
tcacaacagattgtaatacggtgatgatttgtgctcctgcgctgtaggtgatggcaagaatgcccatcttaagacactggaagatgccggggagaggttgcagttggtcaaggctgacatgctggactatggcagcgttgcgtccgcggtcgcccgctgtcagggtgtcttccatgtcgcgagccctgtcccctccggcaaatcctccaaccctgaggaagatgtcatagctcctgctgtaactggcacactgaatgtgttgaaagcttgctatgaggccaaagcgaagaga

SEQ ID NO: 53869 - DNA, 303 bp, Zea mays
ctcattttggtcatgaaagatggtaaactagcacaggcaggacaatacaatgaaattcttggttcaggagacgagttcatggagttagttggtgcacacaaggatgctctcgcagaattggacacaataggtgctgcaaacagaagcaacgagggatccccttccagaggtacagcaaaacttaccagatctctatcatcagctgaaaagaaagataaacaggacgaagggaacaatcagagtgggcagctggtgcaggacggagaaagagaacaaggcaagggtgggttttaggtctactgg

SEQ ID NO: 53870 - DNA, 306 bp, Zea mays
gcctcgggtcaaaccctaagcagggagttgatttatccgctgcagccatgagtaagttgcagtctgagtctgtcaaggatgccatctcccagattgttggggatgccaaggagaagaataggaagttcactgagactgtggaacttcagattggtctgaagaattatgatccacagaaggacaagcgtttcagtggctctgttaagttgccccatatccctcgtcccaagatgaaggtgtgcatgcttggtgatgcccagcatgttgaggaggccgagagatgggacttgactacatggatgttga

SEQ ID NO: 53871 - DNA, 303 bp, Zea mays
accaaactccactgtctccaactctccatcgcgtctgctacgcctctcctgcaggacgaccaatggcttccaggaagttcttcgtgggtggcaactggaaatgcaacggtactggcgaggacgtgaagaagatcgtcaccgtgctcaaccaagccgaggtgccctctgaagacgtcgtcgaggtggtggtgagtccgcctttcgtttttctgcagcaggtcaaggggctgctgcggctggacttcgccgtcgcagcgcagaactgctgggtgcgcaaggcggcgccttcacggcgagatcagt

SEQ ID NO: 53872 - DNA, 308 bp, Zea mays
gccaccgcccgagagagagagagagggagagtgagagtggggattcaagtttcaaactcactatcgaagggggataggaaggtggtcactcatcggtccacagctagctcgtcgccccccatggctgactggggccccgtggtgatcgcgacggtgctgttcgtgctgctcacgccgggcctgctgttccagctgccggcgcacggccgaatcgtcggcttcggcaccatgcacaccagcggcctcgccatcctcgtccacgccgtcctctacttcgcgctcatcaccatcttcctcatcgccatcgg

SEQ ID NO: 53873 - DNA, 301 bp, Zea mays
ggacaggtcattcagctccagggtgatcagaggaagaacgtctcgaatttcctcgtccaggccggcattgtgaagaaggagcacatcaagattcatggtttctgagcaaccgccgggtccatagcaaaccaaccctgcatgcagggccagcttattatatataatatctgaggtggagcatatctatctggctgtgtactgcaagcaggcctagtacgccgcctgcgcgttcctcctattacacatataggcccctccctgcgtgtatgcttgttaccgtcgtgtcgaaccttgtactacg

SEQ ID NO: 53874 - DNA, 284 bp, Zea mays
accaaactccactgtctccaactctccatcgcgtctgctacgcctctcctgcaggacgaccaatggcttccaggaagttcctcgtgggtggcaactggaaatgcaacggtactggcgaggacgtgaagaagatcgtcaccgtgctcaaccaagccgaggtgccctctgaagacgtcgtcgaggtggtggtgagtccgcctttcgtttttctgcagcaggtcaaagggctgctgcggctggacttcgccgtcgcagcgcagaactgctgggtgcgcaaggaggcg

SEQ ID NO: 53875 - DNA, 308 bp, Zea mays
cattgtcctctgcggtaataaggttgatgtgaagaacaggcaggtcaaagccaagcaggttactttccacaggaagaagaatctgcagtactatgaaatttctgccaagagcaactacaactttgagaaacctttcctgtaccttgcaaggaagctggctggtgatccgaaccttcactttgttgaagctgttgctcttaagcctccggaagttaccatcgacatggctatgcagcagcagcatgaagctgagcttgctgcagcagctgcacaacctcttcctgatgacgatgatgatctgattgagt

SEQ ID NO: 53876 - DNA, 301 bp, Zea mays
caactttaagagcagcattcatgggagactctggcggaccgctactgtgtgctggtgtggctcatggtattgtatcttatgggcatccagatgcaaagccccctgcaatcttcacccgagtctccacatatgtgccctggattaatgcagtcattaatacaagtagctgaaaagcctgacctgcttgagacaccctccaagcctgagttcatctggtaacttttggttttaacacagcctgtttccagcatgtgtctcagcctgtccctagcctgtctccagctgtctctaagaggccctc

SEQ ID NO: 53877 - DNA, 296 bp, Zea mays
ggcgtctgaaggcaagatgggtcaccagcagctctactggagtcacccgcggaagttcggccagggttctcgctcttgccgcgtctgctctaaccgccacggtctgatccgtaaatacgggctgaacatgtgccgacagtgcttccgtcagtacgcgaaggacataggcttcattaagttggactaagcgacctgaatggatgattcgactgtctacccaatgaaaccaactgtctaccctgtgataccaatcatgctagtctttgtgcacacagaataaaaaactgaaggcctct

SEQ ID NO: 53878 - DNA, 86 bp, Zea mays
cgagtacgacgagtacaagaaggaggagtagcagcacaagcacaagcagcacctcggcgaggccggcgccatcgccgtcggcgcct

SEQ ID NO: 53879 - DNA, 280 bp, Zea mays
ccatgtactagaattattcagtttcactccacatcgtgatgttttatttttacttttgtcgtgctataacggatagcgctcctcgttggcgccactggcgggtggttctgcctctggtctggtgtgtttatgtgtggtcacacttgccagccagcagaggcgcctgcttgtacctagattactgtttccattgtcgtcatcatcggctaacattgtcataatgtcagtttgggtaatgttagcttaagtacttattgtgttctgtaaaaaaaaaacacag

SEQ ID NO: 53880 - DNA, 253 bp, Zea mays
gtctggcttccctctggctcctctcctgcttctccgatgtgggggccgcctttggctgcggggtccccgccatccaccctgtgctcagcggccggtccaggatcgtgaatggggaggacgccgtccccggctcctagccctagcaggtgtccctgcaggacaaaaccggcttccacttctgcgggggctccctcatcagcgaggacttggtggtcaccgctgcccactgcggggtcacgacctccgacgtggt

SEQ ID NO: 53881 - DNA, 281 bp, Zea mays
catgaatccactcctgatccttacctttgtggcagctgctcttgctgccccctttgatgatgatgacaagatcgttgggggctacaactgtgaggagaattctgtcccctaccaggtgtccctgaattctggctaccacttctgtggtggctccctcatcaacgaacagtgggtggtatcagcaggccactgctaacaagtcccgcatccaggtgagactgggagagcacaacatcgaagtcctgaaggggattacgcagttcatcaatgcagccaagatc

SEQ ID NO: 53882 - DNA, 156 bp, Zea mays
caagagatggaatgccctcctgttgcgcaatgatattgccctcatcaagcttacagagcatgtggagctgagtgacaccatccaggtgacctgcctaccagagaaggactccctgctctccaaggactacccctgctatgtcaccggttggggccg

SEQ ID NO: 53883 - DNA, 289 bp, Zea mays
gcggcaaagctgttggacctgtattagatgatgatgcagttgtcactatcaacttccgggctgatcgcatggttatgcttgcgcaagcactagagtatgcagattttaacaactttgaccgtgtacgtgtccccaaaattcgatatgctgggatgcttcagtcatgatggtgagttgaagcttccaagtcgctaccttgtttccccaccagagatagatagaaatctagggagtacttggtgaagcatggcatccgcacctttgcttgcagtgagacaggaaatgtggc

SEQ ID NO: 53884 - DNA, 293 bp, Zea mays
gtcgccctcaaattcgttccgtccaggcaaggcagaaatcgagcagccaaggagaggagaagatggctcgtacgaagcagaccgcccgcaagtccaccggaggcaaggccccgcgcaagcagctcgccaccaaggcggcgaggacgtctgcgccgacgaccggcggcgtgaagaagccccacaggtacaggcccgggacggtagctctgcgcgagatccgcaagtaccagaagagcacgagactgctgatccgagaagttacccttccagcgcctggtccgtgagatcgctca

SEQ ID NO: 53885 - DNA, 287 bp, Zea mays
ctcagccatgaggaccatcgccatccttgctgccattctcctggtggccctgcaggcccaggctgagtcactccaggaaagagctgatgaggctacaacccagaagcagtactggggaagacaaccaggaccttgctatctcctttgcaggaaatggactctctgctcttagaacctcaggttctcaggcaagcgccacctgctattgccgaaccggccgttgtgctacccgtagatcactctccgaggtgtatgaaatcagtggccgcctctacagactctgctgt

SEQ ID NO: 53886 - DNA, 289 bp, Zea mays
cagaaattttatatagacactggtgatgccagtacttttgcacgttggaggtataaggtatctgtcacactgtctggcaaacaggttacaggacacatactagtttctatgttcggaaataaaggaaactctacgccgtataaactttccaagggcactctcacaccagatcatactccattccaatgaatctgactacgatgtggatattggggacttccagctggttaaatttatttggtataccaatgtgatcaacccactttacctagagtgggagcatccaaga

SEQ ID NO: 53887 - DNA, 270 bp, Zea mays
gcaaaatgccataaacactgagatgtatcatgagattatgcatgcacttaaaactgacagcaaggatgtctcaatcatcactgttttaccaggcaatagtgactattacagtagtgagcatgatctgactaacttcactaatattccccctagtggagtagcggagaacagctaggcataatgccgttttactaagggaatttgtggactgttttatagattttcctaagcctctgattgcagtggtcaatggtccagctataggcatct

SEQ ID NO: 53888 - DNA, 286 bp, Zea mays
gttgctgctcagcctgaccctaagcctggttctcctcggctcctcctggggctgcagcattcctgccatcaaaccggcactgagcttcagccagaggattgtcaacggggagaatgcagtgttgggctcctggccctggcaggtgtccctgcaggacagcagcggcttccacttctgcggtggttctctcatcagccagtcctgggtggtcactgctgcccactgcaatgtcagccctggccgccattttgttgtcctgggcgagtatgaccgatcatcaaacgca

SEQ ID NO: 53889 - DNA, 284 bp, Zea mays
ctatggtgctgccgtccaggccgctatcctcagtggtgagggcaccgagaaggtgcaggactgcttctagttgacgtcactcctctctctctgggtctggagactgccggaggagtgatgaccgtccttatcccgaggaacaccaccatccccaccaagaaggagcaggtgttctccacctactcggacaaccagcctggtgtgttgatccaggtgtacgagggtgagaggacccggactcgcgacaacaactgcttgggaagttcgagctctccggcatccca

SEQ ID NO: 53890 - DNA, 204 bp, Zea mays
tgcagatctttgtgaagaccctgactggacaaaccataaccctggaggttgagagctcggacaccatcgacaatgtgaaggcgaagatccaggacaaggcaggcatccccccggaccagcagcgtcagatcttcgccggcacacaactgaaggatagccgcaccctagcagactacaacatccaaaaggagagcaacctacacc

SEQ ID NO: 53891 - DNA, 262 bp, Zea mays
aagacatgcagaggggtccatacagcgttattctggattcccgtcgtaacttaaagggaaattttcacaatgtccggagcccttagatgtcctacaaatgaaggagacggatatccttaagttacctgcagcaggaacccacttaggtggcaccaatcttgacttccagatggaacagtaacatctataaaaggaaaagtgatggcatctatatcataaatctcaagaggacctgggagaagcttctgctggcagctcgtgc

SEQ ID NO: 53892 - DNA, 253 bp, Zea mays
aagattgtctcagaacttcctccaattcaacccagctccgcggcagattacgccggacatgacgcgcaagaccccagactactttttgtaatcagcatagctggctttctttcaacttgtctactgcagcgccagaacctgtagatctccttagaaaatgatgtttcctctagccgccttgtacccccatcattcttttagtatagagattttattaccgcttctcagaacattgaggttgttgaacgtacat

SEQ ID NO: 53893 - DNA, 238 bp, Zea mays
tgagtccactcctgatccttacctttgtggcagctgctcttgctgccccctttgatgatgatgacaagatcgttgggggctacaactgtgaggcgaattctgtcccctaccaggtgtccctgcattctggctaccacttctgtggtggctccctcatcaacgaacagtgggtggtatcagcaggccactgctacaagtcccgcatccaggtgagactgggagagcacaacatcgaagt

SEQ ID NO: 53894 - DNA, 281 bp, Zea mays
ggccaccaccattccttccccaactctgcaggctgctcgtcgccctccctccacgccggacgcgccccgatccagatccaggggcgtaacatggcatcaaaacgtatcctcaaggaattaaaggccctgcaaaaggaccctccaacggcatgcagtgctggtcctgctggtgaggatatgttccactgccacccaaccatcataggtcctcctgatagtccatatgctggaggtattttcttagtgaacattcatttccccccggactgaactttcaagcc

SEQ ID NO: 53895 - DNA, 289 bp, Zea mays
gttgcctcaggctatggcccaccttcctctcactcttccagccgcgttgtccatggtgaggatgcggtcccctacagctggccctggcaggtttccctgcagtatgagacaagtggaagcttctaccacacgtgtggcggtagcgtcatcgcccccgattgggttgtgactgccggccactgcatctcgagggatctgacctaccaggtggtgttgggtgagtacaaccttgctgtgaaggagggccccgagcaggtgatccccatcaactctgaggagctgtttgtgc

SEQ ID NO: 53896 - DNA, 202 bp, Zea mays
caatcagatacggaagacctcttatgatcagcaccaacaggtccgccaaatccggcagaagatgatggacatcatgacccgagaggtgcagacaaatgacttgaaagacgtggtcaataaattgattccagacagcattgagaaggacatagaaaaggcttgccaatctatttatcctctccatgatgtcttcgttagaaaa

SEQ ID NO: 53897 - DNA, 283 bp, Zea mays
ctcgagccgaatcggctcgagtgagggtaatcttggagcctcggtctggtggcaattcatcggattggggccctagggcttcccacaggacacatgaaattattcaagctatgtggaaggaaatcccgggtagaacaaaagattatataactcacccaaaacgaaatggttaccagagcttgcatgtggccatcgatgtcagtgaacctgggaaggtgaggccattaatggaggtacagatacgcaccaaggagatgcataagtttgctgttagtggagaggc

SEQ ID NO: 53898 - DNA, 242 bp, Zea mays
gcggataaaacagaatgggggaaagagatcagatggatatatagctctgttactgaagatattttaactggtttcaagatacatacaagaggttagatatccatctactgcatgccacttcggccttgcttccagggttctgctccaattaatctttctaatcgtgctccccaagtgttacgctgggctcttgattcagttgacattctacttagcagacactgtcctatctggtatggtta

SEQ ID NO: 53899 - DNA, 272 bp, Zea mays
aagtgccaatccactcgtactcccaaatgatgatctacccttactcatatgcttacaaactcggtgagaacaatgctgtattgaatgccctggctatagctactgtgaaagaaattgcctcactgcacggcaccaagtacacatatggcccgggagctacaacaatctatcctactgctgggggctctgacgactgagcttatgacaaaggaatcagatattccttccactataaactaagaaatacaagaccatatggctttctccatcca

SEQ ID NO: 53900 - DNA, 90 bp, Zea mays
gccgtacgcattgcccttcacgaaggcttggtcctcctccttggatctccactccgcccttcacagatccgttcctccagctagggttag

SEQ ID NO: 53901 - DNA, 256 bp, Zea mays
cattaaccctcgttcctgtcgcgcgccacgacctccacttcacatctcccccgacggcggcgcggtcaattgaacaatagcggactccaaggccacctcggcgatcaccctccgcacccgcaagttcatgaccaaccgcctcctggcccgcaagcacttcgtacttgaggtgatccaccacggccgcgccaacgtctccaaggcagagttgaaggcgaggcttgccaaggcgtacgaagtgaaggacccaaacacc

SEQ ID NO: 53902 - DNA, 282 bp, Zea mays
ctggggcaggaggatcaccgacgtgatgatctatgccgaggccagtggcgtctcctcctgcatgggtgactctggaggccccctggtctgccagaaggacggagcctggaccctagtgggcattgtgtcctgaggcagccgcacctgctctaccaccacgcccgctgtgtacgcccgtatcgccaagctcataccctgggtgcagaagatcctggccgccaactgcagccgcagctcctgccacccctgccttaagatttcccattaaatgcatctgtttag

SEQ ID NO: 53903 - DNA, 270 bp, Zea mays
tgaatctacttctgatccttacctttgttgcagctgctgttgctgccccctttgatgatgatgacaagatcgttgggggctacatctgtgaggagaattctgtcccctaccaggtgtccttgaattctggctaccacttctgcggtggctccctcatcagcgaacagtgggtggtgtcagcaggtcactgctacaagtcccgcatccaggtgagactgggagagcacaacagcgaagtcctggaggggaatgaacagttcatcaatgcgg

SEQ ID NO: 53904 - DNA, 274 bp, Zea mays
agcttctgtccgcacccaatcacctaaaatggaaatgattgactcattgtttaagccacgggaagctgaagctgatggtctgatccgggagtgtctgattaacttctacaccagttctgggaagagaaagcctgaccaagttatcatattcagggacggtgttagcgaaagtcagtttaatcaggtgctgaacattgagttgcaacaaatcatcgaggcttgcaaatttcttgatgagaaatggaatcccacattcacgttgattattgcccag

SEQ ID NO: 53905 - DNA, 285 bp, Zea mays
gactcgactcctgatccttgcctttatgggagctgctatagctgtccccgttgatgatgatgacaagattgttgggggctacacctgtgaggagaattctgtccccgaccaggtgtccttgaattctggctcccacttctaaggtggctccctcatcagcgaccagtgggtggtgtcagcaggtcactgctacaagccccacatccaggtgagactgggagagcacaatatcgaagtcctggaggggaatgagcagttcatcaatgcagccaagatcatccgcca

SEQ ID NO: 53906 - DNA, 277 bp, Zea mays
tcgaaaccctaggagcgtgcttgaccggcggcggcgaggtgatggcgatggaccctgacgcggtacgaaggccttcgtggagcattactaccgaacgttcgacaccaaccgcacggcgctggttgggctgtaccaggagacctccatgctcaccttcgagggccagaagttccagggcccctccgccattgccggcaagctcggatctctccctttccaggcctgcgagcatcagatcgtcaccgtagactgccagccatcgggtccccaggaggca

SEQ ID NO: 53907 - DNA, 277 bp, Zea mays
cctgcccctgctggcgctgctggccctctggggacctgacccagccgcagcctttgtgaaccaacacctgtgcggctcacacctggtggaagctctctacctagtgtgcggggaacgaggcttcttctacacacccaagacccggcgggaggcagaggacctgcaggtggggcaggtggagctgggcgggggccctggtgcaggcagcctgcagcccttggccctggaggggtccctgcagaagcgtggcattgtagaacaatgctgtaccagcatc

SEQ ID NO: 53908 - DNA, 271 bp, Zea mays
cagaactcatgatgctccggctgctcagttccctcctccttgtggccgttgcctcaggctatggcccaccttcctctcactcttccagccgcgttgtccatggtgaggatgcggtcccctacagctggccctggcaggtttccctgcagtatgagaaaagtggaagcttctaccacacgtgtggcggtagctcatcgcccccgattgggttgtagatgccggccactgcatctcgagggatctgacctaccaggtggtgttaggtgagtac

SEQ ID NO: 53909 - DNA, 284 bp, Zea mays
ctcgagccgctcgagccgctcagctcccatatccgctcccctacctctccagcatctcccgtctccgtcgtatcgtctctgctcctcacctcgccgccagccatgggcaagatcaagatcggaatcaacggtttcggaaggatcggcaggctcgtggccagggtcgccctgcagagcgaggatgtcgagctcgtcgccgtcaacgaccccttcatcaccacggattacatgacctacatgttcaagtacgacaccgtgcacggccaatggaagcacagcgacat

SEQ ID NO: 53910 - DNA, 111 bp, Zea mays
ggtagccttatcatttcaaaaggcttctagtgcggatgcctaccaaggtgctccacatcaccaccaggaagtctccctgtggagaaggtaccaacacctgggatcgctttg

SEQ ID NO: 53911 - DNA, 297 bp, Zea mays
cagaacactggtctcgggcccgagaagacctcctttttccaggctttaggtatcaccactaaaatctccaggggcaccattgaaatcctgagtgatgtgcagctgatcaagactggagacaaagtgggagccagcgaagcacgctgctgaacatgctcaacatctcccccttctcctttgggctggtcatccagcaggtgttcgaacttggcagtatctacaaccctgaagtgcttgatatcacagaggaaactctgcattctcgcttcctggagggtgtcagcaatgttgccattg

SEQ ID NO: 53912 - DNA, 269 bp, Zea mays
gcgccctcctctcggtcctgccgtccgtcgaggtaaaaggacagcatggtgagggtcagcgtgctcaatgatgctctcaagtccatgtacaatgctgaaaagatagggaaacgtcaggtcatgatcaggccgtcatccaaggtgatcatcaagttcctgacggtcatgcagcgccatggctacattggcgagttcgagtacgtggatgaccacagagctgggaagatcgtggtggagctgaatggaagactgaataaatgtggtgttat

SEQ ID NO: 53913 - DNA, 290 bp, Zea mays
gcgcgatgccgttctcctcggcgcccgcgacgagacccagctccgacgccgagctactcagcgtcatcgactccgagatcaagtacgccgaggactgcgatgaccacgacagggttgaggagattccagaaaatttccctttcaaaatcagcgacgagaaggggacgaatgcagtcacccttaaaagaacagagaagggtgagcagattgaggttgtggttcacatgcccagccttgtcactggagatgagcctgatcatgaccgtgatggtgaggatgaggacacggcg

SEQ ID NO: 53914 - DNA, 291 bp, Zea mays
  unsure (1)..(291): unsure at all n locations
cggagctctccttcccggtctcctccgcccgttgccttcgtcccctccatctccggctgcgtcgccggcgagcccgacaccgcgaatcggatccgccgacaaggtgagagggaagagatggggctcacgttcaccaagctgttcagccggctgttcgccaagaaggagatgcggatcctgatggtgggactcgacgccgccggaaagaccaccatcctctacaagctgaagctcggcgagatcgtcaccaccatcnccaccatcggattcaatgttgaaactgtggagtac

SEQ ID NO: 53915 - DNA, 292 bp, Zea mays
ggagttcaagagaaagaacaagaaggatatcactggcaacccgagggctctccggaggctgaggacctcttgtgagagggccaagagaactctgtcttccactgcccagaccaccattgagattgactcgctgtacgagggcattgacttctactccaccatcacccgtgccaggtttgaggagctcaacatggacctgttcaggaagtgcatggagcctgttgagaagtgcctgagggatgccaagatggacaagagcagcgtccatgatgttgtccttgttggtggctcc

SEQ ID NO: 53916 - DNA, 285 bp, Zea mays
ggagcagctgaagctggaggcggagcttggcaacatgaaggagctgatggaggacttcaagaacaagtatgaggatgagatcagtaagcgtacagagatggagaacgaatttgtcctcatcaagaaggatgtggatgaagcttacatgaacaaggtagagctggagtctcgcctggaagggctgaccgacgagatcaacttcctcaggcagctatatgaagaggagatccgggagctgcagtcacagatctcggacacatctgtggtgctgtccatggacaacag

SEQ ID NO: 53917 - DNA, 297 bp, Zea mays
cggctcgagcggctcgacgtacgacccctccatcctcgccaccgcctccgtcgacaagtccatacgcgtctaggacgtgcgcgcgccgcgggcgcccatcgcgcagatcgctggacacggctacgccgttaagcgggtccgtttctcgccgcaccgccagggcatgctcatgtcatgctcctacgacatgactgtctgcatgtgggactaccgcgccgaggatgctctgctcgccaggtacaatcaccacacggagttcgttgccggcatcgacatgagcgtcctcgtcgatggctt

SEQ ID NO: 53918 - DNA, 294 bp, Zea mays
ctcatgatgctccggctgctcagttccctcctccttgtggccgttgcctcaggctatggcccaccttcctctcgcccttccagccgcgttgtcaatggtgaggatgcggtcccctacagctggccctggcaggtttccctgcagtatgagaaaagtggaagcttctaccacacgtgtggcggtacctcatcgcccccgagtgggttgtgactgccggccactgcatctcgagctcctggacctaccaggtggtgttgggcgagtacgaccgtgctgtgaaggagggccccgagc

SEQ ID NO: 53919 - DNA, 219 bp, Zea mays
cagttgtgtcctgtgcaactgctttgatgcttgttcatatcatccccgacttattgagcgtgaaaactagagagttgttcatgaagaataaagctgaagagcttgacagagagatgggactgataaggacgcaggaggagaccggtagacatgttaggatgcttacacatgaaatcagaagtactcttgacaggcatatccttttgaagactactcttg

SEQ ID NO: 53920 - DNA, 172 bp, Zea mays
gtgccagttcatacaaagattgttgatccaaaaactggtgaggaaaagaagatcgtaatctcagcagatgatggaatccgagtggatacttctcttgcagtcctgtacaaaactcaaaccagcattttcaaaggatggcagtactactgctgggaatgcagccaagtgagcg

SEQ ID NO: 53921 - DNA, 268 bp, Zea mays
cattaaccctcgttcctgtcgcgcaccacgacctccacttcacatctcccccggcggcggcgcggtcagttgaacaatggcggactccaaggccacctcggcggtcaccctccgcacccgcaagttcatgaccaaccgcctcctggcccgcaagcaattcgtgcttgaggtgatccaccccggccgcgccaacgtctccaaggcggagttgaaggagaggcttgccaaggcgtacgaggtgaaggacccaaacaccatctttgtcttc

SEQ ID NO: 53922 - DNA, 124 bp, Zea mays
atggcttccctctggctcctctcctgcttctcccttgtgggggccgcctttggctgaggggtccccgccatccaccctgtgctcagcggcctgtccaggatcgtgaatggagaggacgccgtcc

SEQ ID NO: 53923 - DNA, 264 bp, Zea mays
actgcttccgagatctctccccacctcccggtccgctagcagatagcgggggccagagcgatcgagatccggaggcgctagcgccacccatcagcgtctgcggcaatggcgggcacggtgacggtcccggggtcgtcgaaaccctccacgccgctgctcaaggacgagctcgacatcgtgatcccgacgatccgcaacctcgacttcctcgagatgtggaggcccttcttccagcactaccacctcatcatcgtgcaggacggc

SEQ ID NO: 53924 - DNA, 90 bp, Zea mays
ctcgctttggatcgattggtttcgtaactggtgagggactgagggcctcggagtggattgatttgggattctgttcaaagatttgcggag

SEQ ID NO: 53925 - DNA, 290 bp, Zea mays
gcgatactagctagtccctaccaaagcatacttcctgaaacactcttgcaatccactgagttctgtttgttgagacgcatagagctagagtcgacaatgtcgctcgtgaggcgcagcaacgtgttcgaccccttctccatggacctctgggaccccttcgacaccatgttccgctccatcgtcccgtcggcgacctccaccaactccgagactgccgccttcgccagcgcccgcatcgactggaaggagacgcccgaggcgcacgtgttcaaggccgacctccccagcgt

SEQ ID NO: 53926 - DNA, 290 bp, Zea mays
  unsure (1)..(290): unsure at all n locations
gttcacttctccaggaaagggttcgtactcatggcgccgccgcagccaaagtcgggcctcttcgttggcatcaacaagggtcatgtcgtcaccaagcgcgagcagcctccccgcccgtgccaccgcaaggggaaatcaacgaagagggtgtctatggtcaggggcctgatcagagaggttgctgggtttgctccttatgagaagcgtatcactgagcttctgaaggttggcaaggacaagcgtgccctgaagcttgctcagagaaagcttngaactcacaagagggcaaa

SEQ ID NO: 53927 - DNA, 283 bp, Zea mays
agagagttctacccgctgtttggccttggtgccaatgtggccctcatcttctctgggcgcacggtgaaatatttctcaaacatgaggaagaatttgggtcctggagtggatggttgggcaatttcgttgaaggccatgatgagcatagtggttgtactgggtcttgtcatcaccggtatctatttgggagtgaacaagtttgttattgataactcatctgatgccgtggttgagcggaaaaagaaggacaagcaaaagttcagcatgggtgagagcatgaagg

SEQ ID NO: 53928 - DNA, 267 bp, Zea mays
caaaactcatgatgctccggctgctcagttccctcctccttgtggccgttgcctcaggctatggcccaccttcctctcgcccttccagccgcgttgtcaatggtgaggatgcggtcccctacagctggccctggcaggtttccctgcagtatgagaaaagtggaagcttctaccacacgtgtggcggtagcatcatcgcccccgattgggttgtgactgccggccactgcatctcgagggatctgacctaccaggtggtgttgggtg

SEQ ID NO: 53929 - DNA, 286 bp, Zea mays
tagggttttactgctctccgaccccgagctccgaaggccgcagcatcaggcgaggcccccctcgcgtgtgaccgagatggcgctgccgaatcaggggaccgttgattaccccagcttcaagctcgtcatcgtcggcgatggtggaactggtaaaactacatttgtgaagaggcatctcactggagagtttgagaagaaatatgaaccaaccattggtgtggaagttcatccgttggatttcaccactaactgtggtaagatcaggttctactgctgggataccgca

SEQ ID NO: 53930 - DNA, 288 bp, Zea mays
cggcgaccgaggcggccaaggctgcaccggcgcaggagcagcaggccaacggcaacggcaacggcgagcagaagacgcgccactccgaggtcggccacaagagcctgctcaagagcgacgacctgtaccagtacatcctggacacgagcgtgtacccgcgggagccggagagcatgaaggagctgcgcgagatcaccgccaagcacccatggaacctgatgaccacctccgccgacgagggcacattcctcaacatgctcatcaagctcatcggcgccaagaagacca

SEQ ID NO: 53931 - DNA, 266 bp, Zea mays
ggctttgctagattcccctgtgcctcttacaacgtcttcactgcaaacaagtgtttaccttgtccaagtggcagctgcccacagatgggtcactatgctgatagatatcctgggaaaacaaatgatgtgggccagaaattttatctagacactggtgatgccagtaattttgcacgttggaggtcataaggtatctgtcacactgtctggaaacaaggttacaggacacatcctagtatctttgttcgagaataaaggaaactcta

SEQ ID NO: 53932 - DNA, 285 bp, Zea mays
tccaacgggacctggccatgaacaagttcgactgggaccacacgatgcacctgcagacaacgagccccacggccattaagcaggtgcgctacgtgtaggacgcgtacgatgccaccaagggcgcccacgaggtgtgcatcctgaccgagtgggacgagttcaagaccctggactaccagtagatcttcgacaacatgcagaagcccgccttcgtcttcgacagccgcaacatcgtcgacccggacaagctgcgggagatcggcttcatcgtctactccatcggca

SEQ ID NO: 53933 - DNA, 283 bp, Zea mays
gtttgatattgatgcaaatggtatcctctcagttgctgccattgataagggcactggaaagaaacaggacatcaccatcactggtgctagtacgctacctaaggatgaggttgagagaatggtagaagaagccgataagtttgccaaggaggacaaagagaagagagatgcaatcgacaccaaaaaccaggcggactcagtggtctaccagactgagaagcaactgaaggagcttggcgacaaagtccccgctcctgtgaaagagaaggtggatgtgaagctc

SEQ ID NO: 53934 - DNA, 283 bp, Zea mays
agcctccaccctccagcgcctccaccctcctcgccgcctcactccctctgaggtcgcagatccgtccggttagacgaagccgcccgcacccatggcctccggtgagctcgcctgcacctacgccgccctcatcctcagcgacgacggcatcgccatcaccgccgagaagatcgccaccatcgtgaaggcggccaacatcaaggtcgagtcctactggccggcgctcttcgctaagctcctggagaagcgcatgttgaggatctaatcctctccgttggatctg

SEQ ID NO: 53935 - DNA, 271 bp, Zea mays
acggctcacattgcatgcaagtttgctgagctgacggtaacgattgatcgacgttctggtaaaaagctggaagatggccctagattcttgaagtctggtgatgctgccattgttgatatggttcctggcaagcccatgtgtgttgagagcttctcagactatcgagctttgggtcgctttgctgttcgtgatatgagacagacagttgcggtgagtgtcatcatagcagtggtacagaaggctgctggagctggcaaggtcaccaagtctg

SEQ ID NO: 53936 - DNA, 265 bp, Zea mays
cagatttgttgtgcgatttaccaacaaggacatcacagcacaaatcatctctgctagtatagcaggtgatatggttcttgcttctgcttactcgcatgagttgccacgatatggtcttgaagttagtctgaccaactatgcagctgcctactgcactggccttctgttggctcgccgtgtgctcaagacccgtggtttagataaggaatatgagggcaatgttgaggccactggtgaggacttctctgttgagccagctgatgag

SEQ ID NO: 53937 - DNA, 281 bp, Zea mays
tgctgttgtttccatgggtgacatagaagctgctattcaggaagtcttccaggcacctcatattcaagtgatgaaattgcccaaagtttggaaaagttatactggttgccatggttcatgagctgtacaaaagtggactaggtgaaataatgtttgataagttagcaacaacagttttctcctggtgccatgccaacagagaactattgcctggatacgacactctcttgaaaatttgttgcaagcttggtgaaagcaagatcatcctctgtgaagagggt

SEQ ID NO: 53938 - DNA, 285 bp, Zea mays
gacggaactgccacgatgctgccactttggagtctttcactgctgctgggagcagtaacaggaaaagaagtttgctacgagagactcggatctttcagtgatgactccccatggtcaggaattacggaaagacccctccatatattgccttggtctccaaaagatgtcaacacccgcttcctcctatatactaatgagaacccaaacaactttcaagaagttgccgcagattcatcaagcatcagtggctccaatttcaaaacaaatagagaaactcgctttatt

SEQ ID NO: 53939 - DNA, 277 bp, Zea mays
ccatgataaggacgctgctgctgtccactttggtggctggagccctcagttgtggggacaccacttacccaccttatgtgactagggtggttggcggtgaagaagcgaggcccaacagctggccctggcaggtctccctgcagtacagctccaatggcaagtggtaccacacctgcggagggtccctgatagccaacagctgggtcctgacggctgcccactgcatcagctcctccaggacctaccgcgtggggctgggccggcacaacctctacgt

SEQ ID NO: 53940 - DNA, 282 bp, Zea mays
tgctgttgtttccatgggtgacatagaagctgctattcaggaagtcttccaggcacctcatattcaagtgatgaaattgcccaaagtttggaaaagttatactggttgccatggttcatgagctgtacaaaagtggactaggtgaaataatgtttgataagttagcaacaacagttttctcctggtgccatgccaacagagaactattgcctggatacgacactctcttgaaaatttgttgcaagcttggtgaaagcaagatcatcctctgtgaagagggta

SEQ ID NO: 53941 - DNA, 279 bp, Zea mays
caaaactcatgatgctccggctgctcagttccctcctccttgtggccgttgcatcaggctatggcgcaccttcctctcgcccttccagccgcgttgtcaatggtgaggatgcggtcccctacagctggccctggcaggtttccctgcaatatgaaaagagtagtatcttctaccacatttgtggaggcagcaaaaccgcaacggttgagagaaactacaggacaatgcatgtagagctcctggaactaccaggtggtgttgggcgagtacgaccgtgct

SEQ ID NO: 53942 - DNA, 256 bp, Zea mays
ataacgaattaccctcggtgccctccctctcggcggcggcggcgcaagtccccttcatctccggcgcggcaaatggcaggctgcagggttgcacatgctaccctcaagggccccagcgtggtgaaggagatcttcattggactgaccctgggtcaatcgctggaggtatgtggaagatgcaccactggaacgagcagaggaaaactaagatccttctacgacatgcttgacataggcagatcgtcgtcgtcgtcga

SEQ ID NO: 53943 - DNA, 185 bp, Zea mays
ttgccgccaacgtcgcctggcggccgtctgcagctccgcgcctctgctcggaagttggtgaaggtttcttgaagctgagaagatggtgctgaagacagaactctgccgcttcagcggccagaagatttatcctgggaaaggcctccgatgtatccgtgctgattctcaggtttcctttttggcaa

SEQ ID NO: 53944 - DNA, 238 bp, Zea mays
attgaagcaggtgatcaagatcaacgactaccagaagagccggttcgtgaaccgcgtcgtgtcgtccatgttcgacaccgttgccggcaagaagatcgccgtcctcggcttcgccttcaagaaggacaccggcgacaccaggtatactccggccatcgatgtctgctacggcctgctggggtgcaaggcccagatcagcatatacgacccccaggtggacgggggccagatccagcgg

SEQ ID NO: 53945 - DNA, 266 bp, Zea mays
tgatctgacctaccaggtggtgttgggtgagtacaaccttgctgtgaaggagggccccgagcaggtgatccccatcaactctgaggagctgtttatgcatccactctggaaccgctcgtgtgtagctgttagcaatgacatcgccctcatcaagctctcaggcagcgcccagctacggagatgccggccagctggcgtcactacctcccgctggtgacatccttcccaacaagacacgctgctacatcaccggctgaggccgtctc

SEQ ID NO: 53946 - DNA, 271 bp, Zea mays
ttacatataccacccaggctactttgggaaagctggtatgaatcattaccacttaaagaggaaccagagcttctgctcaactgtcaaccttgacaaattgtagactttggtcagtgaacagacacgggtgaatgctgctaaaaacaagactggggctgctcccatcattgatgtggtgcgatcgggctactacaaagttctgggaaagggaaagctcccaaagcagcctgatctcgtgaaggccaaattcttcagcagaagagctgaggag

SEQ ID NO: 53947 - DNA, 114 bp, Zea mays
attgtgggctacgtggaaacccctcgaggcctccggaccttcaagactgtctttgctgagcacatcagtgatgaatgcaagatgcgtttctataagaattggcataaatctaag

SEQ ID NO: 53948 - DNA, 185 bp, Zea mays
catgatgctccggctgctcagttccctcctccttgtggccgttgcctcaggctatggcccaccttcctctcgcccttccagccgcgttgtcaatggtgaggatgcggtcccctacagctggccctggcaggtttcgctgcagtatgagaaaagtggaagcttctgacacacgtggtagcggtagc

SEQ ID NO: 53949 - DNA, 266 bp, Zea mays
ctatgataaggacgctgctgctgtccactttggtggctggagccctcagttgtggggagcccacttacccaccttatgtgactagggtggttggcgatgaagaagcgaggctcaacagctggccctagcaggtctccctgcagtacagctccaatggcaagtggtaccacacctgcggagggtccctgatagccaacagctgggtcctgacggctgcccactacttcagctcctccaggacctaccgcgtggggctgggccggcac

SEQ ID NO: 53950 - DNA, 144 bp, Zea mays
ccacggacccagtgccaactctgaagttgaagtgaaatccatagtggacttcatcaagagtcatggaaaagtcaaggccttcattaccctccacagctattcccagctgctgatgttcccctatgggtacagatgtaccaagtt

SEQ ID NO: 53951 - DNA, 205 bp, Zea mays
caccatgataaggacgctgctgctgtccactttggtggctggagccctcagttgtggggaccccacttacccaccttatgtgactagggtggttggcggtgaagaagcgaggcccaacagctggccctggcacgtctccctgcagtacagctccaatggcgagtggtaccacacctgcggagggtccctgatagccaacagctgg

SEQ ID NO: 53952 - DNA, 125 bp, Zea mays
atctgttccatgggccactcaacgccaacaggactatcacatgggttgattggtcaagaggaggcccgcacccagcaagttatggtgccacagacatcacagaagacttcatccaggccatcagg

SEQ ID NO: 53953 - DNA, 231 bp, Zea mays
ccattcctcccaacaccacctcgcctgcaatcttcgtagcctccgtcgcgtcgagcatcgatcatgtcggcctactgcggaaagtacaaggatgagctcatcaagaatgctgcctacattggcacccccggcaagggtatccttgctgctgatgagtccactggcaccattggcaagcgctttccagcatcaatgtcgagaacgttgaggagaacgccgtgccctcgtgag

SEQ ID NO: 53954 - DNA, 276 bp, Zea mays
  unsure (1)..(276): unsure at all n locations
gcaagatccccgacccggagtccaccgacaacgctgagttcaagatcgtgctcaccatcatccgcgacgggctcaaggctgacnccaagaagtaccgcaagatgaaggagaggcttgtcggcgtctctgaggagaccaccacgggtgtcaagaggctctaccagatgcaggagaccggcgccctcctcttccctgccattaacgtcaacgattccgtcaccaagagcaagtttgacaacctgtatggttgccgccactcgctccctgatggtctga

SEQ ID NO: 53955 - DNA, 274 bp, Zea mays
ctcatgatgctccggctgctcagttccctcctccttgtggccgttgcctcaggctatggcccaccttcctctcgcccttccagccgcgttgtcaatggtgaggatgcggtcccctacagctggccctggcaggtttccctgcagtatgagaaaagtggaagcttctaccacacgtgtggcggtacctcatcgcccccgactgggttgtgactgccggccactgcatctcgagctcctggacctaccaggtggtgttgggcgagtacgaccgtgc

SEQ ID NO: 53956 - DNA, 223 bp, Zea mays
tgaaggagagcactctccacctggtgctccgcctccgtggtggtcagtaagccatggttcatttaagctgctgctgtacctgggtatctgcgtcgtctggtgccctctggtgtacctctatatggatgtcgtcgtctaataaacatctgtggtttgtgtgtcatgaatcgtggttgtggcttcgttggtttaatggacctgttgtgtcctctgtgttgtaccc

SEQ ID NO: 53957 - DNA, 278 bp, Zea mays
ctgcagaatggctcccgcaaagaagggtggcgagaagaaaaagggccgttctgccatcaacgaagtggtaacccgagaatacaccatcaacattcacaagcgcatccatggagtgggcttcaagaagcgtgcacctcgggcactcaaagagattcggaaatttgccatgaaggagatgggaactccagatgtgcgcactgacaccaggctcaacaaagctgtctgggccaaaggaataaggaatgtgccataccgaatccgtgtgcggctgtccagaa

SEQ ID NO: 53958 - DNA, 278 bp, Zea mays
tgaatccactcctgatccttacctttgtggcagctgctcttgctgcaccctttgatgatgatgacaagatcgttgggggctacaactgtgatgagaattctgtcccctaccaggtgtccctgaattctagctaccacttctgtggtggctccctcatcaacgaacagtgggtggtatcagcaggccactgctacaagtcccgcatccaggtgatactgggacagcacaacatccgaagtcctggaggggaatgagcagttcatcaatgcacccaagat

SEQ ID NO: 53959 - DNA, 238 bp, Zea mays
tgtgttggatcaccacttccttgctgctatgtgaagcttgtctcatgggaagaaggtggttacaagatttctgattctccgatgccgagaggagaggtcgtggttggcggacacagtataacaaaaggttatttcaacaatgaagcaaagacgaacgaagtatacaaggttgatgagaggggcatacgctggttctacactggtgatattggtcagttccatcctgatgggtgccttg

SEQ ID NO: 53960 - DNA, 277 bp, Zea mays
agccgaagatggcggaggtgcaggtcctggtgcttgatggtcgaagccatctcctggggcgcctggacggcatcgtggctaaacaggtactgctgggccggaaggtggtggtcgtacgctgtgaaggcatcaacatttctggcaatttctacagagcaaagttgaagtacgtggacttcctccgcaagcgtgtgaacaccaatccttcccgaggcccctaccacttccgggcccccagccgcatcttctggcggacgtgcgaggtatgctgccccac

SEQ ID NO: 53961 - DNA, 113 bp, Zea mays
gctgctgtggccacaatcaagaccaagcgcaccatccagttcgtggactggtgcccgactggcttcaagtgcggaatcaactaccagcctcccagcgtcgtccccggcggtga

SEQ ID NO: 53962 - DNA, 273 bp, Zea mays
gacctaccaggtggtgttgggcgagtacgaccgtgctgtgcaggagggccccgagcaggtgatccccatcaactctggggacctctttgtgcatccactctggaaccgctcgtgtgtggcctgtcgcaatgacatcgccctcatcaagctctcacgcagcgcccagctgggagacgccgtccagctcgcctcactccctcccgctggtgacatccttcccaacgagacaccctgctacatcaccggctggggccgtctctatagcaacgggcc

SEQ ID NO: 53963 - DNA, 272 bp, Zea mays
tccagcgggacctggccatgaacaagttcgactgggaccacccgatgcacctgcagccgacgagccccacggccattaagcaggtgagctgcgtgtgggacgcgtacgaggccaccaagggcgcccacggggtgtgcatcctgaccgagtgggacgagttcaagaccctggactaccagaagatcttcgacaacatgcagaagcccgccttcgtcttcgacggccgcaacatcgtcgacccggagaagctgagggagatcggcttcatcgtc

SEQ ID NO: 53964 - DNA, 272 bp, Zea mays
gccgtccgccttgcccttcacgaaggcttggtcctcctccttgtatctccactccccccttcacagatccgttcctccagctagggttagcgttcctctgcagcgatggcgatcaagcggaccaaggcggcgaagaagatcgcttacgataagatgctatgcagcctgctccgatgagtacaccaatgtgctcatcgcccttcccgacaacgtcggttgcacgcagctccaggacatccgccggggcctcaagggcgactcggtggtgctca

SEQ ID NO: 53965 - DNA, 113 bp, Zea mays
tccagcgggacctggccatgaacaagttcgactgggaccacccgatgcacctgcagccgacgagccccacggccattaagcaggtgagctgcgtgtgggacgcgtacgaggcc

SEQ ID NO: 53966 - DNA, 253 bp, Zea mays
gtttgtgcgcgcacgcaaatgtatttgcattattcctgatagcatctattcgttggccagatgattagagagctgaaaatatgttaagaacaataccatagagagaagttcctcagtgctctcgcagcttaaggagcaaacagcaacactttacttcgttttttatactttattatagccgcactgtttattactcgggctacatttgtgaacagcgactgtaatattttttactctatatcgtagtgagatg

SEQ ID NO: 53967 - DNA, 268 bp, Zea mays
gaagaaggtgggcgccaacctccaggagtcggagatctacgcgctgatgcaagctgcggacgtggacaacaacggcacgatcgactacggcgagttcatcgcggccacgctgcacctgaacaaggtggagcgggaggaccacctgttcgcggcgttccagtacttcgacaaggacggcagcggatacatcaccgccgacgagctgcaggtggcgtgcgaggagttcggcctgggcgacgtccagctggaggacgtgatcggggaggtc

SEQ ID NO: 53968 - DNA, 109 bp, Zea mays
tggcaagacaatcacccttgaggtggagtcttcggataccattgacaatgtcaaggccaagatccaggacaaggagggcatcccacccgaccagcagcgcctcatcttc

SEQ ID NO: 53969 - DNA, 269 bp, Zea mays
  unsure (1)..(269): unsure at all n locations
caccatgataaggacgctgctgctgtccactttggtggctggagccctcagttgtggggagcccacttacccaccttatgtgactagggtggttggcggtgaagaagcgaggcccaacagctggccctggcaggtctccctgcagtacagctccaatggcaagtggtaccacacctgcggagggtccctgatagccaacagctgggtcctgacggctgcccactgcatcagctcctccangacctaccgcgtggggctgggccggcaca

SEQ ID NO: 53970 - DNA, 271 bp, Zea mays
gactcagccaacagagattgttgatttgcctcttaagcaagagattcattgcagctcagcatggctcagaccagctcatacttcatgctgatctcctgcctgatgtttctgtctcagagccaaggccaagaggcccagacagagttgccccaggcccggatcagctgcccagaaggcaccaatgcctatcgctcctactgctactactttaatgaagaccgtgagacctgggttgatgcagatctctattgccagaacatgaattcgggca

SEQ ID NO: 53971 - DNA, 269 bp, Zea mays
  unsure (1)..(269): unsure at all n locations
cggcacagcatgcggtggttgctggtgttgagtgtcctgaacggggctgtctttggcaaggaggactttgaggggactcangtgctccgaatctctgtagccgatgaggcccaggtaaggaaggtgaaggagctggaggacctggagcatctgcagctggacttctggcggggccctgcccaccctggctcccccatcgacgtccgagtgcccttccccagcatccaggcggtcaagatctttctggagtcccacggcatcagctatga

SEQ ID NO: 53972 - DNA, 268 bp, Zea mays
  unsure (1)..(268): unsure at all n locations
ctccgatccccaattcctccttcggatctcgcattcagcgcagcgcacngtgtgaaggaagggggacgcggaggaagatggggctcgcgttcgggaagctcttcagccggctcttcgccaagaaggagatgcggatcctcatggtcggcctcgacgccgccggtaaaaccaccatcctctacaagctcaagctcggcgagatcgtcaccaccatccacaacatgggtcacagtgtaaacgtggagtgcagagcatagcttcacgtctg

SEQ ID NO: 53973 - DNA, 223 bp, Zea mays
tgaggccatctatgacatctgccgccgctcccttgacattgagcgcccaacctacaccaacctcaacaggcttgtgtcccaggtcatctcatccctgactgcttccctgaggttcgatggtgctctgaacgttgatgtgaacgagttccagaccaacctggtgccctaccctaggatcgacttcatgctttcgtcctacgctccagtcatttctgctgagaag

SEQ ID NO: 53974 - DNA, 253 bp, Zea mays
gtccgacgagcggtggggcgagtcgccgtgcgcgttcgtgacgctcaaggacggagcagcagccgacgggtcggacgaggcggcgctggccaacgacatcatgcgcttctgccgggagaggatgccggggtactgggtgcccaagtcggtcatcttcgggccgctgcgcaagacggctacggggaagatcaagaagcacgagctgagggccagagccaaagagctcggccctgtgtagaagagcaggatgtga

SEQ ID NO: 53975 - DNA, 265 bp, Zea mays
gcttccctccctccgtgagatccccgctcgggttgccatggcggaccagctcaccgacgaacagatcgccgagttcaaggaggccttcagcctcttcgacaaggacggcgacggctgcatcaccaccaaggaacttggcactgtgatgcgctcattggggcagaaccctactgaggctgagcttcaggacatgatcaatgaggttgatgctgatggcaatggaaccatcgactttcctgagtttctcaacctgatggcgcgcaag

SEQ ID NO: 53976 - DNA, 263 bp, Zea mays
cacaatgttggcactcttggttctggtgactgtggccctggcatctgctcatcatggtggtgagcatttgaaggcgagaaggtgttccgtgttaacgttgaagatgaaaatcacattaacataatccgcgagttggccagcacgacccagattgacttctggaagccagattctgtcacacaaatcaaacctcacagtacagttgacttccgtgttaaagcagaagatactgtcactgtggagaatgttctaaagcagaatga

SEQ ID NO: 53977 - DNA, 105 bp, Zea mays
catgattaggaccctgctgctgtccactttggtggctggagccctcagttgtggggtttccacttacgcgcctgatatgtctaggatgcttggaggtgaagaagc

SEQ ID NO: 53978 - DNA, 267 bp, Zea mays
gatgaaactccttgtgctagctgtgctgctcacagtggccgccgccgacagcggcatcagccctcgggccgtgtggcagttccgcaaaatgatcaagtgcgtgatcccggggagtgaccccttcttggaatacaacaactacggctgctactgtggcttggggggctcaggcacccccgtggatgaactggacaagtgctgccagacacatgacaactgctatgaccaggcgaagaagctggacagctgtaaatttctgctggacaa

SEQ ID NO: 53979 - DNA, 251 bp, Zea mays
  unsure (1)..(251): unsure at all n locations
ctccggctgctcagttccctcctccttgtggccgttgcctcaggctatggcccagcttcctctcactcttccagccgcgttgtccatggtgaggatgcggtcccctacagctgttcctggcaggtttccctgcagtatgagaanagtggaagcttctaccacacgtgtggcggtatccccatcgnccccgattgggttgtgactgccggccactgcatctcgagggatctgacctaccagtggtgttgggt

SEQ ID NO: 53980 - DNA, 220 bp, Zea mays
tgcctctcgctccagccgcttcacagcgccgccgctcgactctacgaccgccgcgagaatgccgttcaagaggttcgtggagatcgggcgcgtggccctggtgaactacggcaaagactatggccgtctcgtcgtcatcgtcgatgtggtcgaccagaacagggcacttgtggacgcccctgatatggtcaggtgccagattaacttcaaacggctctca

SEQ ID NO: 53981 - DNA, 255 bp, Zea mays
gcaattccccggcgacaacgacgtcgcggaagtagacgcggcccgcgacggagaggtggaccgccgtgacgtgggcaagatgaagcacgggtgcgagcattaccggcggaggtgcaagatcgtggcaccgtgctgcaaccaggtgttcccctgccgccactgccacaacgaggctacggcttccggagatcggcatacaatatgtcgtcaggatgttgaaaaagtagtttgcctactctgtgaaacaaaacagcc

SEQ ID NO: 53982 - DNA, 253 bp, Zea mays
ccatgctggagatgaggaagatcgccgcctacatttacaagacggctggcaggtggaagcagtcgattgctctatcgaagaaagacaacatgtacaaggactgcatggagacatgctcacaatctggcgaccgtgaactgtcagaggacttgctcgtgtatttcattgagcagggataagacagaatgttttgcttcttgcctcttcatttgctgctggtgatccggccggatgtcgctcttgagcttgcatg

SEQ ID NO: 53983 - DNA, 255 bp, Zea mays
aaatgctggagatgaggaggatcgccgcctacatttacaagaaggctggcaggtggaagcagtcgattgctctatcgaagaaagacaacatgtacaaggactgcatggagacatgctcacaatctggcgaccgtgaactgtcagaggacttgctcgtgtatttcattgagcagggtaagaaagaatgttttgcttcttgcctcttcatttgctacgacctgatccggccggatgtcgctcttgagcttgcatgga

SEQ ID NO: 53984 - DNA, 256 bp, Zea mays
gctcgcctcgggtcaaaccctaagcagggagttgatttatccgctgcagccatgagtaagttgcagtctgagtctgtcaaggatgccatctcccagattgttggggatgccaaggagaagaataggaagttcactgagactgtggaacttcagattggtctgaagaattatgatccacagaaggacaagcgtttcagtggctctgttaagttgccccatatccctcgtcccaagatgaaggtgtgcatgcttggtg

SEQ ID NO: 53985 - DNA, 249 bp, Zea mays
gggtaaacaaggcagggagggcagctggtgtgcttgagaaccatgaggaggggagacgttacgccatgcatggcctaagaagctttgtgcacgacaagactcctgagatcatgcctgcagttaacaagttcttcactgaccctaagtgaagcatgttgattggcatactactactactacttgctactggggattttacactttgctggcaattcattatgtgggggacatccaggactctaaaaagtt

SEQ ID NO: 53986 - DNA, 250 bp, Zea mays
cagaccctgaccggcaagactatcaccctcgaggtagagtcttcagacaccatcgacaacgtcaaggccaagatccaggacaaggagggcattcccccagaccagcagcggctcatctttgctgggaagcagcttgaggacgggcgcacgcttgccgactacaacatccagaaggagagcaccctccacttggtgctgcgcctcaggggaggcatgcagatcttcgtgaagaccctgaccggcaagacta

SEQ ID NO: 53987 - DNA, 252 bp, Zea mays
aggagctcgagaacggcgtcctgtgggaggtcgagggaaagtgggtcacccaaggtcctgttgatgtagacattggtgccaatccatccgccgagggtggtgaggacgaaagcgttgatgacacagccgtgaaggtggttgatattgttgacacattccgtctacaggagcaacctccttttgacaagaaatcatttgtctcttacattaaaaaatacatcaagaatctcactgctgtgttggagccagaga

SEQ ID NO: 53988 - DNA, 251 bp, Zea mays
cagatcttgtgaccctccctcagccgcgtcgcgtcgcatcctacgatccaaagctctctctgctcgcagccatggcgaagaactacccgaccgtgagcgccgagtacagcgaggctgtggagaaggccaggcgcaagctccgagccctcatcgccgagaagagctgcgccccgctcatgctccgcctcgcgtggcactccgcggggacgttcgacgtgtcgtcgaggaccggcggtccattcggcacgatg

SEQ ID NO: 53989 - DNA, 246 bp, Zea mays
ccttgcctccgatccccaattcctccttcggatctcgcattcagcgcggcaggtgtgaaggaagggggacgcggaggaagatggggctcgcgttcgggaagctcttcagccggctcttcgccaagaaggagatgcggatcctcatggtcggcctcgacgccgccggtaaaaccaccatcctctacaacctcaagctcggcgagatcgtcaccaccatccccaccatcggtttcaatgttgaaactg

SEQ ID NO: 53990 - DNA, 250 bp, Zea mays
ggagtctggagtcggacggaatcgaaaaggcgaaaactcagtgtctcgagtttcctcggagcggaggcgatggctgggaagggagggaaaggcttgctcgccgcgaagactacggcggccaagtccgccgagaaggacaaggggaagaaggccccaatctcacgctcctcccgcgccggcctccagttccctgttggacgtatccaccgtcagctgaagcagaggactcaggcaaatggtcgtgttggtg

SEQ ID NO: 53991 - DNA, 247 bp, Zea mays
gcgccggcaaccgccgccatcgatcgatcgcccggaaactgacctctaccgatgtctggagccggcgaggaggataagaagcccgcggagggcggcgcccacatcaaccttaaggtcaagggacaggatggcaatgaggtgttctttcgcataaagaggtccacccagctgaagaagctgatgaacgcctattgcgaccgatagtctgtggacatgaatgccattgcattcctgtttgatggccgca

SEQ ID NO: 53992 - DNA, 250 bp, Zea mays
ctcgattccgctgctctctccctcttcctctcccccgcggcggagcactaaaccctaggcctcgccgtcgtcggaggcgccgccgcgatgtcgcactttggaaggacgggtccgccggacatccgcgacaccttctcgctgctcgtcctcaacatcagcttccgaaccacggccgacgaccttttcccgctcttcgagcgctgcggcaaggtcgtcgacgtcttcatcccgagggaccgcagaccgggga

SEQ ID NO: 53993 - DNA, 248 bp, Zea mays
ccttgcctccgatccccaattcctccttcggatctcgcattcagcgcaggcagagtgtgaaggaagggggacgcggaggaagatggggctcgcgttcgggaagctcttcagccggctcttcgccaagaaggagatgcggatcctcatggtcggcctcgacgccgccggtaaaaccaccatcctctacaagctcaagctcggcgagatcgtcaccaccatccccaccatcggtttcaatgttgaaactg

SEQ ID NO: 53994 - DNA, 250 bp, Zea mays
ggctcatcggcggacctcacggcgacgctggcctcactggccggaagatcatcatcgacacctacggtggctggggagcccacggcgggggcgccttctccggcaaggacccgaccaaggtggaccgcagcggggcctacgtcgcgaggcaggctgccaaaagcatcgtcgccgccggcctaacccgccgcgccattgtccaggtctcctacgccatcgggtaacccgagcccctttcggtgttcgtgga

SEQ ID NO: 53995 - DNA, 247 bp, Zea mays
gcgaaaccgacctttccccctcccccgcattccacctcgcggagatccagtccagccctagggtttcgccagcgggagccaaactccacgagcgggggaagaggggaaagcagggacgacgagggggcagccatggggcagcagtcgctgatctacgcgttcgtggcccgtggcacggtcatactggccgagtacacggagttcaccggcaacttcaccaccatcgcctcccagtgcctcatgaagc

SEQ ID NO: 53996 - DNA, 245 bp, Zea mays
catttctgcatccccctcccgccgcgccgcctcaccgccgccggagacgatgggtcgcgtgatccgcgcgcacgtaagggtgcggggtccgtgttcaagtcccacacccaccaccgcaagggccccgcccgcttccgctccctcgacttcggcgagcgcaacgggtacctcaagggcgtcgtcaccgacgtcatccacgaccccggccgtggcgcgccgctcgccaaggtcactttccgccaccc

SEQ ID NO: 53997 - DNA, 240 bp, Zea mays
ctcgacaacgtcaaggccaagatccaggacaaggagggcatccctccggaccagcagcggctcatttttgctggcaagcagctcgaggacgggcgcacgctggccgactacaacattcagaaggagagcaccctccacttggtgttgcgtctcaggggcggcatgcagatatttgtgaagactctgactggcaagactatcacccttgaggtcgagtcttctgataccatcgacaatgtc

SEQ ID NO: 53998 - DNA, 244 bp, Zea mays
ggcgacgaaaccctcgccagtccccaactcgaacctcagtcaggcagcgtgaggagggagagttcaaggaccgaggcggcgtcgggcgagatgaagcttaacgtcaagaacctcaagggcaccaacttcgagatcgaggcgagccccgatgcatcggttgctgatgtgaagaggatcattgagaccactcaaggtcagagtacctaccgggcggaccagcaaatgctcatataccaagggaaaa

SEQ ID NO: 53999 - DNA, 243 bp, Zea mays
gcgagatcgacatcatcctggctgaggttgatctgccggtctccaagtgcttcaagatgctcaagtacattgccaggaacaaggacctgcgccacatccccatcatcatgatgtccaacagagacgaggtgtctgttgttgtcaagtgcttgaggcttggtgcggctgagtacctggtgaagccgctgcgcacgaatgagctgctgaacctttggactcatgtgtggcggcggagacggatgg

SEQ ID NO: 54000 - DNA, 269 bp, Zea mays
tcgagcgaatcggctcaggccacgcgcgccccagatcgagggaggacacgcagacgcggaggagggaggatgagtctcttcgggcttggacggaaccagaagacattccgccccaagaagagcgctccatcaggcagcaagggagcacagctccgtaagcacatagatgccactctcggcagtggataccttagggaagctgtgaggttgcctcctggagaggatatcaatgaatggcttgctgtcaataccgtggatttctttaacca

SEQ ID NO: 54001 - DNA, 270 bp, Zea mays
ccgtgtccgcgtccagtgtgtccgctactccgctccccctcagtcctcagttcctcacctagcggtagcgtgcgcgcgggagacgtagatggcggcttcggaggcggcagcggcggcggcaacaccggtgacgccgacagaggggacggtgatcgcgatccacagcctggaggagtggagcatccagatcgaggaggccaacagcgccaagaagctggtggtgattgacttcactgcaacatggtgtcctccgtgccgcgccatggctcc

SEQ ID NO: 54002 - DNA, 259 bp, Zea mays
gcgcctgcaggaagagggttggacttacgggattcaactgccggtgtgggaacttgtactgcgcactccaccgctactccgacaagcacgactgcaagttcgactaccggactgctgccagggacgccattgccaaggctaatccggtggtgaaggcagacaagctcgacaagatctagggggggttccctacggttgggtatcaggaagattgtaaaccgcggtaactcgtcatgcggaactgctgccttgccccccg

SEQ ID NO: 54003 - DNA, 270 bp, Zea mays
cccaccttgcccgcgcatcctccgtgcggccgtcgcggtttcttcgctggatctgcgcccgatcaccggcgggttcgcgctattcagcatggctgctgcctcctccgccacctccgtccacgacttcaccgtcaaggatgctagcgggaaagatgtggaccttagcacctataaggggaaggttctgctcatagtcaatgttgcatctcagtgtggcttaaccaattccaactacacagagctgagccagttgtatgagaagtacaagga

SEQ ID NO: 54004 - DNA, 270 bp, Zea mays
tgcagcgccgccagacactccgtagtctgtaccccaagcaccggcgcggcggcggcggctaccatggcagtcgggaagaacaagaggatctccaagggaaagaagggtggtaagaaaaagaccgtgaatcccttctctaagaaggactggtatgacatcaaggccccatcggtcttcagtgtgcgcaacattgggaagactctcgtgtccaggacacagggtaccaggattgcctctgatggtctgaagcacagagtctttgaggtttgt

SEQ ID NO: 54005 - DNA, 265 bp, Zea mays
tcgggcgtcaacgtgcagccctactcgggctcccccgcgaacttcgccgcctacaccgcgctgcccaacccgcacgaccggatcatggggctcgacctatccctccggcggacacctcactctcgggtactacacggccggcggtaagaagatctccgccacctcgatctactatgcgagtctgccgtacaaggtgagcgccgcgacggggtacatcgactacgagaagctcgaggagaaggcattgacttccgccccagctcat

SEQ ID NO: 54006 - DNA, 259 bp, Zea mays
cttcatatcactgatttgtctgggagggaaactctggttcggatcaccggtggcatgaaggtgaaggctgaccgtgacgagtcgtcaccttacgctgctatgcttgctgctcaagatgtcgcacagcgctgcaaggagcttggcattactgcactgcacattaagcttcgtgccaccggaggcaacaagaccaagacccctggacctggtgcccagtctgccctcagggcgcttgctcgttccgggatgaaatcggacg

SEQ ID NO: 54007 - DNA, 263 bp, Zea mays
  unsure (1)..(263): unsure at all n locations
caaggaccttcggcgccggttcaggatccacatcttcccaagggagttcttggttgacctcttcccctttcggacaacctcaaaggctcttggtgtagcttgccattctcaccaattcagttttcatgtctgatctcgacattcagatcccaactgcctacgatcccttcgctgaggccaatgctggggactctggtgcggcacanggtcaaaggactacgttcacgtgcgcatccagcagcgtaatggtcgcaagagcctga

SEQ ID NO: 54008 - DNA, 272 bp, Zea mays
cgacatcgtcacatcgtccccacgagcaaccgataatccgccggcgttgagatgttggtttatcaggatctcctatctggcgacgagctcctgtcggattcattcacctacaaggagctcgagaacggcgtcctgtgggaggtcgagggaaagtgggtcacccaaggtcctgttgatgtggacattggtgccaatccatccgccgagggtggtgaggacgaaagcgttgatgacacagctgtgaaggtggttgatattgttgacacattccg

SEQ ID NO: 54009 - DNA, 268 bp, Zea mays
cttcatatcactgatttgtctgggagggacactctggttcggatcaccggtggcatgaaggtgaaggctgaccgtgacgagtcgtcaccttacgctgctatgcttgctgctcaagatgtcgcgcagcgctgcaaggagcttggcattactgcactgcacattaagcttcgtgccaccggaggcaacaagaccaagacccctggacctggtgcccagtctgccctcagggcgcttgctcgttccgggatgaaaatcggacgcattgagg

SEQ ID NO: 54010 - DNA, 266 bp, Zea mays
ggactccaaggccacctcggcggtcacccaccgcacccgcaagttcatgaccaaccgcctcctggcccgcaagcacttcgtgcttgaggtgatccaccccggccgcgccaacgtctccaaggcggagttgaaggagaggcttgccaaggcgtacgaggtgaaggaccccaacaccatctttgtcttcaagttccgcacccacttcggaggaggaaagtccactggtttcggcctcatctacgacaacctcgaggctgccaagaagt

SEQ ID NO: 54011 - DNA, 268 bp, Zea mays
ctcgctccccacaacccgccgccgcccacgccgccgcctgtaccagcggcgtcaagatgagtcggcaccctgaagtgaagtgggctcagaggatcgacaaggtttacatcactgtacagttacctgatgccaaggacgctaaggtcaatttggaaccagatggtgtcttcacattctctggcagtgttggtacaaacttatatgaattgacactagatctgaatgacaaagtaaacgttgaggctagcaaaataagtgtgggtgtcag

SEQ ID NO: 54012 - DNA, 265 bp, Zea mays
gtgctagtacgttacctaaggatgaggttgagagactggtagaagaagccgataagtttgccaaggaggacaaagagaagagagatgcaattgacacaaaaactcaggccgattctgtggtctaccagactgagaagcaactgacggagcttggcgataaagtccccgctcccgtgaaagagaagctggatgtgaagctccaggagctcaaagaggcaatatctggtggatcaacacagagtatgaaggatgccatgtctgcttt

SEQ ID NO: 54013 - DNA, 267 bp, Zea mays
cgcgttattctctctccgccgccactctcctcccattcaccggcatcgccaattccatagcgtcctccgaccactctgctgagagcgagaagagatggcaggcaaaggtgatgggtcggcactcggcatcgctctcggcagacgtaatcttacgtcggcgtctggcagcacgaccgtgtcgagatcttcgccaacgaccatggtaaccgcaccacactctcgtacgtcgccttcaccgactctgagcgcctcatcggagatgcggcc

SEQ ID NO: 54014 - DNA, 300 bp, Zea mays
gtacgtgagctcggcatccggattcagctcaaggctctctgcgaggcaaccggagccaatgtctctgaggtggcttacgccgtgggcaaggacacgagacttggccccaagttcctgaacgccatgttgggttcggtggctcatgcttccagaaggacatcctgaacctagtgtacatctgcgagtgcaacgacctgcccgaggtggccaactactggaagcaggtgatcaagatcaacgactaccagaagagccggttcgtgaaccgcgtcgtggcctccatgttcaacaccgtcgccg

SEQ ID NO: 54015 - DNA, 264 bp, Zea mays
ggactccaaggccacctcggcggtcaccctccgcacccgcaagttcatgaccaaccgcctcctggcccgcaagcacttcgtgcttgaggtgatccaccccggccgcgccaacgtctccaaggcggagttgaaggagaggcttgccaaggcgtacgaggtgaaggaccccaacaccatctttgtcttcaagttccgcacccacttcggaggaggaaagtccactggtttcggcctcatctacgacaacctcgaggctgccaagaa

SEQ ID NO: 54016 - DNA, 262 bp, Zea mays
ccgagtcctccctcgcctctcaaccactcatcatcgccttcgcaggcatcgccctctcgccgggccgtccgattccgccatggcttccgatgagagcacaaattcaaaaccagagaagccatcttcagcagctggtgcaggcctccccaatccgtttgatttttcttctatgagcaacttgctcaatgacccatcgataagagagatggctgagcaaattgcaagtgcacctgtgttcaaccagatggctgaacagcttcag

SEQ ID NO: 54017 - DNA, 266 bp, Zea mays
cccagccaccgccgctagaagaagagctcggcgattcccaggtcccgcgagaatatgccgaagcagatccatgagattaaggccttcctcctcaccgcgaggaggtcagatgcccgctcagtgaagatcaagaggagtaaggatgttgtcaagttcaaggtgcgctgctccaagtacttgtacacgctctgcgtcttcgatgctgagaaggcaaacaagttgaagcaatctcttccgccaggtttgaccgtcgaggaggtctgatt

SEQ ID NO: 54018 - DNA, 266 bp, Zea mays
ctcggatgctacctgctccaagagcacatcaaggcgtcaggtggattcaggaacgccttcaggaagggcaatggtgtgtcgaactccatcggcatcctcctgctcttcatctaccctgtctgggccggtgtgctgcaagtcctgtcggcacccaccattgcctcagtgtttcccctgtgcggtccaggcgtccagctccgttcccgttcgtgcccgtgcaaatgctccctctatggtgatccgtgatcctgtgtcacgagtaggtg

SEQ ID NO: 54019 - DNA, 262 bp, Zea mays
gtgctagtacgttacctaaggatgaggttgagagaatggtagaagaagccgataagtttgccaaggaggacaaagagaagagagatgcaattgacacaaaaaatcaggccgattctgtggtctaccagactgagaagcaactgaaggagcttggcgataaagtccccgctcccgtgaaagagaaggtggatgtgaagctccaggagctcaaagaggcaatatctggtggatcaacacagagtatgaaggatgccatgtctgc

SEQ ID NO: 54020 - DNA, 263 bp, Zea mays
atttcgattcttcccctctatctccaggtatacccatcggagcagcactgacaaaaattctccagatatggcaagcaaaaggattcagaaggaactcatggatctgcaaaaggacccaccgacatcatgcagtgcagggcctgctggagaggatctattccactggcaggccacaatcatgggtcctagtgacagcccctatgcaggcggggttttctttattaatatccattttcctcctgactacccctttaagcctccaa

SEQ ID NO: 54021 - DNA, 269 bp, Zea mays
cccaattcctccatcggatctcgcattcagcgcaggcaggtgtgaaggaagggggacgcggaggaagatggggctcgcgttcgggaagctcttcagccggctcttcgccaagaaggagatgcggatcctcatggtcggcctcgacgccgccggtaaaaccaccatcctctacaagctcaggctcggcgagatcgtcaccaccatccccaccatcggtttcaatgttgaaactgttgagtacaagaacattagcttcactgtctgggatg

SEQ ID NO: 54022 - DNA, 262 bp, Zea mays
gccagacatgattcagtggaaactattgatatatgtgagattgatcaactagttattgatgtttgcaaagaattctttccaaacttatccattggattcaaagatcctcgtgtccgacttcatgttggtgatgctgttgatttcctgaggaattctcccgaaggaaaatatgatgctattattgtagattcatcagatccaattgggccagcacaggcactcgtggagaaaccgtttattcagacaattgctcagagctttg

SEQ ID NO: 54023 - DNA, 259 bp, Zea mays
gagcacagctccgtaagcacatagatgccactctcggcagtggaaaccttagggaagctgtgaggttgcctcctggagaggatatcaatgaatggcttgctgtgaataccgtggatttctttaaccaagttaatatgctgtatggcacgctcacagaattctgcacacctgagagctgcccaacaatgacagctggcccaaagtatgagtacagatgggctgatggtgtgcagataaagaaacccatagaggtatcagc

SEQ ID NO: 54024 - DNA, 199 bp, Zea mays
caactcgccgtctgccttctgcggctccatttcggcctctgtccctcgcaagttcaatctcacctccaaccatgggtaaagagaagtcccacatcaacattgtggttattggtcatgtcgactctggcaagtcgaccaccacaggacaccttatctacaagcttggaggcattgacaagcgtgtgatcgagaggttcga

SEQ ID NO: 54025 - DNA, 263 bp, Zea mays
gatcaacaacctgagcttctgcagaaactgtctgaaggacgctttactctcaggcttatgtatgagcagttccaaaacattctgaaaatgggtcctattggacaggtcttctcactgttgcctgggtttagcgccgaactaatgccaaaaggacatgagaaggaaagccaggctaagattaagcgctacatgacaatgatggattccatgactgatgcagagcttgacagcacaaatcctaagctgatgactgaatcacggat

SEQ ID NO: 54026 - DNA, 266 bp, Zea mays
cttccaccttccaccacaagcgccgcccagccggtgcctgctccttcccgatccccgaggcaaagctgcgactccgcaaccgccgccatggcgttcgagaagatcaaggtctccaacccaatcgtcgagatggacggtgatgagatgaccagggtattctggcagtctatcaaggacaagcttatcctcccatttctggacctggacatcaagtactatgatttggggatactgcaccgtgaagcaactgatgacaaggtcacagt

SEQ ID NO: 54027 - DNA, 250 bp, Zea mays
ctagtcccctgctccattctcagccgccgccaatcccttcccgtgctccgcaaccgctgagtgagcagaagagatggccggcaagggcgatggcccggctatcggcatcgatctcggcacgacgtactcttgcgtcggcgtgtggcagcacgaccgcgtcgagatcattgccaacgaccagggtaaccgcaccacgccctcgtacgtcgacttcgccgactccgagcgcctcatcggagatgcggccaag

SEQ ID NO: 54028 - DNA, 258 bp, Zea mays
cccagatccatcgactcgctcgggccgcacctcccgtcgtcaccgttcgaaagtgcggcaccggcaagcacgcgatttggctcgacatgaatcccgagtacgactaccttatcaaacttctgcttattggtgattctggtgttgggaaatcatgcttgcttctcagatttgcagacgattcttatttggacagctatatcagcacaattggggttgatttcaaaattcgcacagtggagcaagatgggaagaccataa

SEQ ID NO: 54029 - DNA, 262 bp, Zea mays
caaatggggaacagactacatcctcaaaaccttcaattcatctgctgacacgatagacaggatcgtcgctcaggtgggtgtaggtgacacttctaaggcagcagtcagcccaatgaccattactgctggatgagaccagaggacttcgattacaaaaggccagtcaccgagtgtcactcttgctcagatctagcgtctgacatggctgttgccctggctgcaagttccatagtgtttcaggaccgcaaaacctactccgaca

SEQ ID NO: 54030 - DNA, 282 bp, Zea mays
gcaggacctggaatcttgggagtcaatcttggcaagaacaagactagtgaagatgctgctgctgattatgtgcaaggggttcatacattgtcacaatatgctgattacttggtcataaatatttcttccccaaatactcctggtcttcgcaaattacaaggtagaaaacaactgaaagatcttgtgaagaaggtgcaagctgcacgagatgagatgcagtgggctgaagatggacctccaccattgcttgtgaagattgcaccagacttgtctaagcaggat

SEQ ID NO: 54031 - DNA, 273 bp, Zea mays
gccgtttcggactactaccaatttgatgatttgctgactgatgaagagaaggcactcaggaagaaggtccgaggtatcatggaaaaggaaatcgcgcccattatgactgagtactgggagaaggctgaattcccattccatgccattcccagccttgccagtcttggtttagctggtggtacaataaaggggtatgggtgccctggactctcgcttacagctagtgctatttcgatagcagaggttgcacgggtcgatgcgagctgctccaca

SEQ ID NO: 54032 - DNA, 187 bp, Zea mays
ctgcaagaatctccttcaggagtatgctcagaagatgaattacgccattccatcttatatttgcactaaacaagcttcgggtgtagctcctttcgtatgcagtgttgagattggtggcatcctatacattggtgctgcagctaggacaaagaaggaggcagagataaaagctgcccgaactgctctt

SEQ ID NO: 54033 - DNA, 196 bp, Zea mays
ggagagcactctccacctggtgctccgcctccgcggtggtcagtaagccatgggtcatttaagctgctgctgtacctgggtatctgcgtcgtctggtgccctctggtgtacctctatatggatgtcgtcgtctaataaacatctgtggtttgtgtgtcatgaatcgtggttgtggcttcgttggtttaatggacct

SEQ ID NO: 54034 - DNA, 139 bp, Zea mays
ctttgcaaagctttctgaagcattgtacgtggcagagcagaaggaccgggaggcagtgcagatgcgctccaaggttcagagggaacttatgctgaaggagaaggagagaaaggagcaagagctaagggcacttgcacag

SEQ ID NO: 54035 - DNA, 195 bp, Zea mays
caatcttccacctcaacccgtctgtccgcttcgtcatcggcggacctcacggcgacgctggcctcactggccggaagatcatcatcgacacctacggtggctcggggagcccacggcgggggcgccttctccggcaaggacccgaccaaggtggaccgcagcggggcctacgtcgcgatgcaggctgccaagagc

SEQ ID NO: 54036 - DNA, 276 bp, Zea mays
caaggagattgggtggatctatgggtcggtgacagaggatatcctgacggggttcaagatgcactgccgggggtggaagtccgtgtactgcacgccgacacggccggcgttcaaagggtcggcgcccatcaacttgtctgatcgtctccaccaggtgctgcgttgggcgctggggtccgtggagatcttcatgagccgccactgcccgctctggtacgcctacggcggccggctcaagtggctggagcgcttcgcctacaccaacaccatcgtgta

SEQ ID NO: 54037 - DNA, 277 bp, Zea mays
accaagtatatcaggcgggtgctgctgctccgatatcctcaactgataagccaatatcatcaagatggaggatactgatgcccgatggatcctatggcaagtatccaactccgaggcgcctagccacatccgagataccagaaattgttgagcaataccgtcaagcagccataaacgccatcaaagcaggtttcgatggcatcgagatccatggcgcccatggctacctcatcgatcagttcctcaagggcggtatcaacgaccggactgacgagta

SEQ ID NO: 54038 - DNA, 108 bp, Zea mays
cacggctgcaacccacggctgttaactgccgcaagaagaagtgtggccacagcaaccagctgagggcaaagaagaagatcaagaactgaagcttgccaaatcggttcc

SEQ ID NO: 54039 - DNA, 270 bp, Zea mays
agacaagcccctgcgtctcccccttcaggatgtgtacaagattggtggtattggaactgtccctgttggacgtgttgagactggtgtcattaagcctgatatggttgttacttttgggcctactggtcttactactgaggttaagtccgttgagatgcaccatgaggctctccaggaggcccttctcggtgacaatgttggcttcaacgtgaagaatgttgctgtgaaggatctgaagcgtgggtatgtggcctccaactccaaggatga

SEQ ID NO: 54040 - DNA, 104 bp, Zea mays
tgtgcgaaccgagcagaccacagcaagaagcgtagtcgtcgccggaaggaaaggcgcggagaagatgtcgtggcatgcgtacgtcgatgagcacctgatgtgcg

SEQ ID NO: 54041 - DNA, 274 bp, Zea mays
gcatgtcatgcgcagttgcctacttatgcttataggaggaactttagcttttttcatggtgttaacagagtatatacttatttcagcaacaagtgccataaccgtcacaatagctggagtagtaaaagaatctgtaaccattttgcttgcggtattttatttccatgatgaatttacttggttgaaaggggttggtcttttcaccattatggttggtgttagcttattcaattggtacaagtatgagaaattcaaaaggggtcatatagatgag

SEQ ID NO: 54042 - DNA, 267 bp, Zea mays
gtcacagagagacctgttaatgctgttgacatctctcccactcatgatactgtggttctaggaggtggtcaggatgcaatgaatgtgactatgactgaccgccgtgctggtaaattcgaggctaaattctaccacaagattttgcaagaggaaattggtggtgttaaagggcattttgggccaattaatgctttggcatttaatcctgatgggcggacttttcaagtggtggtgaagatggatatgtaaggctgcatcattttgatt

SEQ ID NO: 54043 - DNA, 271 bp, Zea mays
agagagctatgtgatcaagtgctggccctttctgagtacagagcccagctgtatgactatttaagaagcaggatgaacactattgcaccaaatttgacagcactggtgggtgaattagttggtgctcgccttattgcacatggtggaagtttgttaaatttggccaagcagcctggtagcacaattcagatacttggtgcagagaaggctttattcagagctctaaagacaaagcattctacacctaagtatggcctcatctaccatgcat

SEQ ID NO: 54044 - DNA, 269 bp, Zea mays
ggaaaccctagccgccatatctcacgatccactcgagcaccaagccgagggaaggtgaggagcgatggcgcgcggcgtggtgtcggcgaagggcggcgcggtcgcgggcaagaagaaggggtcggtttccttcacgatcgactgcaccaagccagtggaggacaagatcatggaggtcgcctcgctcgagaagttcctgcaggagcgcatcaaggtcgccggcggcaaggctggcaacctcggcgactccgtcaccatctctcgcgaga

SEQ ID NO: 54045 - DNA, 162 bp, Zea mays
aacgcacccagcacagacagaagaccctcgccggacgctcgctctcgccggggacaactcaatcccgaggccaggatggcccgctacgatcgcgcgatcaccgtgttctcacccgacggccacctcttccaggtcgagtacgccctcgaggccgtccgcaag

SEQ ID NO: 54046 - DNA, 189 bp, Zea mays
agcttgaaggtttctggtgatgtctggtttggttctggaattacgctcaagggcaaggtgacaatcaccgccaagtctggagtgaagttggagattccagacggagctgtatttgaaaacaaggatgtcaatggccctgaggatctttaagctatgcttgccgtcaccagtttttcccaaggacatgtc

SEQ ID NO: 54047 - DNA, 269 bp, Zea mays
atcgactacaatgacaagatcatctacactttccatgacgactcgactatggataagccaagcagaggtggacggtacaccgtgtaagtcgcacacgaagatggtcgttgttcggactggacagaagctgagagtggagttttgtgctgagatcggcaccagctttcatttaatacagcctcagcttacctgaggcaattttcgcacctgttatgatgttgttttgctctcagataggtttatgtagcacaagaaagatatgttggaga

SEQ ID NO: 54048 - DNA, 133 bp, Zea mays
cgccgacgtactacgaggacatgcagcgcgccatcttctgcctgtgcccgctgggctgggcgccgtggagcccgcgcctggtggaggccgtggtgttcggctgcatccccgtcatcatcgccgacgacatcgt

SEQ ID NO: 54049 - DNA, 158 bp, Zea mays
ggcggtcctgagggaggcgcgcgacgtgacagagactacggggatcgtgggccttgaggtggtggctaacgcgcgagaggttctggtagggctctacgagcgcacgcgcaaagagatcaaggtcgtccccgaagacgagggttaccgcaaggccgttg

SEQ ID NO: 54050 - DNA, 223 bp, Zea mays
caaggagattgggtggatctatgggtcggtgacagaggatatcctgacggggttcaagatgcactgccgggggtggaagtccgtgtactgcacgccgacacggccggcgttcaaggggtcggcgcccatcaacttgtctgatcgtctccaccaggtgctgcgttgggcgctggggtccgtggagatcttcatgagccgccactgcccgctctagtacgcctac

SEQ ID NO: 54051 - DNA, 194 bp, Zea mays
cacaacccagtcgctcaaaaccctagagctctcgcctgctcgcctccgccgccggagcgagctccccatcttcatccgtcaaccatggcgacccagatcagcaagaagaagaagttcgtcagcgacggtgttttctacgccgagctccatgagatgctgacgcgggagctggcggaggatggctactctggcgt

SEQ ID NO: 54052 - DNA, 170 bp, Zea mays
ggccgtacccttgcggattacaacatccagaaggagagcaccctccacttggtgctgcgtctcaggggcggcatgcagatcttcgtgaagacacttactggcaagacaatcacccttgaggtggagtcctcggacaccattgacaacgtcaaggccaagatccaggacaa

SEQ ID NO: 54053 - DNA, 207 bp, Zea mays
caaatggggaacagactacatcctcaaaaccttcaattcatctgctgacacgatagacaggatcgtcgctcaggtgggtgtaggtgacacctctaaaggcagcagtcagcctaatgaccattactgctggatgagaccagaggacatcgactacaaaaggccagtcaccgagtgtcactcttgctcagatctaacgtctgacatggc

SEQ ID NO: 54054 - DNA, 213 bp, Zea mays
ggcagaggacgaggaggtcaagaagaaggtggacgccaagaacgcgctcgagaattatgcgtacaacatgaggaacaccatcaaggacgacaagatcgcctccaagctccccgctgaggacaagaagaagatcgaagatgccgttgacggcgccatcagctggctggacagcaaccagctggctgaggtggaggagttcgaagacaagatgaa

SEQ ID NO: 54055 - DNA, 189 bp, Zea mays
tagcacatctattgttgagtttgaaaatgctcggattcctatcactgatcagaagatatcatcgataaaagacattattcctctgttggagcagacaacacagttaagagcaccacttcttataattgcagaggatgtaagtgccgaggcgctggcaacattagtcataaacaagcttagaggaatttt

SEQ ID NO: 54056 - DNA, 281 bp, Zea mays
agagcgagcaccagcaaaccaaacaagcagaccaccttctccacccggccggccttcgtcttcctccgatccccaggccccagccactccccgtacaagccaaagagacacagtaggtaggcaggcagttcatcgtcgatcgagcaagatgtcggactggggccccgtggtgatcgggctggtgctgttcgtgctgctctcgccggggctgctcgtccagctccccggccgccaccacttggtggagttcggcaacctgaagaccagcgccgtctccatcg

SEQ ID NO: 54057 - DNA, 202 bp, Zea mays
cggaggggttactcccaattcgcgagcgggttcaccccgctgaagccgaagccgctgggctccatcctcgacatcgaacgcgccaagggcctctcccccgaccacctcgtcgccgcatgggatgactatcatttaggaaggggtcatataggtgcatctatgaaagctaaactttaccatctcttggaacaaagatcagctt

SEQ ID NO: 54058 - DNA, 235 bp, Zea mays
gcaagatggcgtcccatattgttggataccctcgcatgggccccaagagggagctcaagtttgccttggagtctttctgggatgggaagagcagcgccgaggatttggagaaagttgccactgacctgaggtctagcatctggaagcaaatgtcagacgctaggatcaagtacattccctgcaatcccttctcgtactacgaccaggttcttgataccacggccatgcttggcgc

SEQ ID NO: 54059 - DNA, 281 bp, Zea mays
cctcgccttccgaggaaactcaccagcccaccacagacccgagcggaagacgccatgtccgggcgcggtaagggtggcaaggggctcggcaagggcggcgcgaagcgtcaccggaaggtgctgcgcgacaacatccagggcatcaccaagccggcgatccggcggctggcgaggaggggcggcgtcaagcgcatctcggggctcatctacgaggagacccgcggcgtgctcaagatcttcctcgagaacgtcatccgcgacgccgtcacctacactgagca

SEQ ID NO: 54060 - DNA, 281 bp, Zea mays
cgaagacaaaaatgcaacttggtgtccaagttctcgtaactgatccaagagaacttgagacgattcgtcagagagaatctgacataacaaaggagcggatcgatacaattctcaagtctggagctaatgttgtgttgaccactaagggaattgatgatatgtccttgaagtactttgttgaggctggagctattgcagtaaggcgtgtgcgcaaggcagatttgcgccatgttgccaaagccactggtgcaactatggtgagtacatttgcagacatggag

SEQ ID NO: 54061 - DNA, 282 bp, Zea mays
gggtttttgattttagccgccgccgctgctcatctcacatccctcgagaagacgcctgctcctcgccgatcgatacgatggccgtcttctccgacctccacaccgccgacggcctcaagtccctcgaggctcacctcgccggcaaaacctatgtgtctggtgactccattactaaggatgacattaaggtcttcgccgcggtgccgtcgaagcctggcgctgagtttcctaatgccgcccgctggtacgagaccgtctctgcggctgtagcctcaagattcc

SEQ ID NO: 54062 - DNA, 265 bp, Zea mays
cgccgccgccgctgctcatctcacatccctcgagaagacgcctgctcctcgccgatcgatacgatggccgtcttctccgacctccacaccgccgacggcctcaagtccctcgaggctcacctcgccggcaaaacctatgtgtctggtgactccattactaaggatgacattaaggtcttcgccgcggtgccgtcgaagcctggcgctgagtttcctaatgccgcccgctggtacgagaccgtctctgcggctgtagcctcaagat

SEQ ID NO: 54063 - DNA, 276 bp, Zea mays
cacaacacaactcgtaggcagcgagcgtctctcctcttcctctcccacgcaccgcgccaaggaaggcagagagagatcgccgctcctcttctctccgtcggtggtgcggttgaccgccctcctcgagcgagatttcgctgcagtccctcgagatctggtcacagatctatccgacaagatggtgaagatctgctgcatcggtgctggctatgtcggtggcccaaccatggcggtcattgccctcaagtgcccagacattgaggttgtcgttgttga

SEQ ID NO: 54064 - DNA, 277 bp, Zea mays
gtgcccccaacctgttccaattggggcgctagcactgcacttcctaacgccccaccagatcagcagagacttatgcttggtgagaacctgtatcctcttgttgaacagctggaacgtgagcaggctgccaaggtcactggcatgcttttggagatggatcagacggaggttcttcacctgctggagtcgccagatgctctgaaagccaaggttgctgaagccatggaggtcctccgctctgcccagcatctccagcagagcaatgtttctactgagc

SEQ ID NO: 54065 - DNA, 160 bp, Zea mays
gccgcgtctcccacacggccgccgtccttgccttcatgcgttccccgcgtagagtttagggttttgtcgccgccatggcgatcctctcggcgctcgtcaccgaggtgttcatccccgtcgccgccgtcatcggcatcgccttcgccgtcgtgcagtgggt

SEQ ID NO: 54066 - DNA, 277 bp, Zea mays
cggaaggcatctgtcgagcgacgaccggactatgcgcctcaaagaaggatacatcaaggagggcagcaccgtgagcgtgatgggcgtcgttcagaggaacgagaacgtgctgctgatcgttcctccagccgagcccatctccactggctgccagtggggcaagtgtgtcctcccgaccagcctcgagggccttgtcctgagatgcgaggacacgtctggcctggacgtgataccggtctagctagagaggttggttctggcgaatcctctggcgcgg

SEQ ID NO: 54067 - DNA, 280 bp, Zea mays
gtctgtgcgaaggcgaccattccttcttcgctccttcgccgccgctatggttaagtactcgcaggagccgggcaaccctaccaaatcggccaaggccatgggaagggacctgagggtccacttcaagaacacaagggagacagcttttgcgcttcgcaagctgcctttgaccaaggctaagcgataccttgaggatgttattgctcacaagcaggcaattcccttccggagatactgtggaggtgttggtcgcaccgcacaagcaaagtctcgccactcc

SEQ ID NO: 54068 - DNA, 275 bp, Zea mays
tgaggttcatgttgagaagggaatgcaacacagccagaagatcaccttccctggtgaagctgatgaagcgcctgataccgtcactggagacattgtattcgtcctccagcagaaggaccactccaagttcaaaagacagggtgaagatctcttttatgagcacaccctgtctctgaccgaagctctatgtgggttccaatttgttcttacacatctggacaacaggcagcttctgatcaaatcagaccccggcgaagttgttaaacctgaccaat

SEQ ID NO: 54069 - DNA, 274 bp, Zea mays
ctgtgccgcctccgacatcctactttcgtcctcacgagtgaccgataatccgccggcgctaagatgttggtttatcaagatctcctatctggcgacgagctcctgtcggattcattcacctacaaggagctcgagaacggcgtcctgtgggaggtcgagggaaagtgggtcacccaaggtcctgttgatgtagacattggtgccaatccatccgccgagggtggtgaggacgaaagcgttgatgacacagccgtgaaggtggttgatattgttg

SEQ ID NO: 54070 - DNA, 281 bp, Zea mays
tggggcgtcaacgtgcagccctactcgggctcccccgccaacttcgccgcctacaccgcgctgctcaacccgcacgaccggatcatggggctcgaccttccctccggcggacacctcactcacgggtactacacggccggcggtaagaagatctccgccacctcgatctactttgagagcctgccgtacaaggtgagcgccgcaacggggtacatcgactacgagaagctcgaggagaaggcacttgacttccgccccaagctcatcatctgcggtggcag

SEQ ID NO: 54071 - DNA, 259 bp, Zea mays
cggataggtagcaccggagcaggtagaacgctgcacaatccccttcgccgccgccaagatggtgaacgttcctaagaccaagaagacgtactgcaagaacaaagagtgcaagatgcacacactccacaaggtgactcagtataagaagggcaaggatagcctgtctgcccagggaaagcgccgttatgaccgcaagcagtcaggatatggtggtcagaccaagcctgtcttccacaagaaggccaagaccaccaagaag

SEQ ID NO: 54072 - DNA, 275 bp, Zea mays
gagaagccaactcagactcagccaacagagattgttgatttgcctcttaagcaagagattcattgcagctcagcatggctcagaccagctcatacttcatgctgatctcctgcctgatgtttctgtctcagagccaaggccaagaggcccagacagagttgccccaggcccggatcagctgcccagaaggcaccaatgcctatcgctcctactgctactactttcatgaagaccgtgagacctgggttgatgcagatctctattgccagaacatg

SEQ ID NO: 54073 - DNA, 230 bp, Zea mays
gtgggtggtatcagcaggccactgctacaagtcccgcatccaggtgagactgggagagcacaacatcgaagtcctggaggggaatgagcagttcatcaatgcagccaagatcatccgccacccccaatacgacaggaagactctgaacaatgacatcatgttaatcaagcgctcctcacgtgcaggaatcaacgcccgcgtgtccaccatctctctgcccaccgcccctg

SEQ ID NO: 54074 - DNA, 146 bp, Zea mays
agcttacctctggctcctctcctgcttctcccttgtgggggccgcctttggctgcagggtccccgccatccaccctgtgctcagcggcctgtccaggatcgtgaatggggaggacgccgtccccggctcctggccctggcaggtgt

SEQ ID NO: 54075 - DNA, 274 bp, Zea mays
tcctatcatcacaaaactcatgatgctccggctgctcagttccctcctccttgtggccgttgcctcaggctatggcccaccttcctctcgcccttccagccgcgttgtcaatggtgaggatgcggtcccctacagctggccctggcaggtttccctgcagtatgagaaaagtggaagcttctaccacacgtgtggcggtagctcatcgcccccgattgggttgtgactgccggccactgcatctcgagggatctgacctaccaggtggtgttgg

SEQ ID NO: 54076 - DNA, 109 bp, Zea mays
cccctccagccactggcacgaagtcgtcatctctggctggggcaacactgcgagctctggcgccgactacgcctcgagctgcagtgcctggacgctcctgtgctgagcc

SEQ ID NO: 54077 - DNA, 283 bp, Zea mays
ctcggccaggtctccctctccccggctctccgccttcctcttccagtccccgcgcgcgagatcgccgccccgtgtgggccctagatcccgatggcctcgcgccgccgcaccctgctcaaggtcatcatcctcggcgatagtggggttgggaagacttccttgatgaaccaatatgtgaacaagaagttcagcaatcagtacaaggctacgatcggcgcggatttcctcaccaaggaggtgcagttcgaggacaggctcttcactctgcaaatatgggacactg

SEQ ID NO: 54078 - DNA, 124 bp, Zea mays
gaggtgatcagcaccaagaggcagcctgtgggacccaaacctggcttcatggtcgatggtgctacactcgagacagtcactcctattccttatgatgtggtcaacgatctcaagggcggttact

SEQ ID NO: 54079 - DNA, 269 bp, Zea mays
ctgaagtttggcgagctgcagtcgaagaggctgcaccgcttcataactttcaagatggacgacaagttcaaggagatagttgtggaccaggtcggggatcgcgctaccagctacgatgacttcacaaacagcctccctgagaatgactgccgatacgcgatctatgatttcgactttgttactgcagaggatgtccagaagagcaggatcttctatatcctatggtccccatcctccgccaaggtgaagagcaatatgctttatgcaag

SEQ ID NO: 54080 - DNA, 277 bp, Zea mays
ctcgagccgctcgcccgcatcgccgcagggttcgcaaagatggcagtgccgctgctgacgatcagaagatcgtgaagaagcgggtcaagcagttcaagaggccacacctcgaccgctacaagtgcctcaagccaagctggcgtaggcccaagggtattgactcccgcgtcaggcggaagttcaagggatgcaccttgatgcccaacattggatacggctctgacaagaagacgaggcactaccttcccaacaagttcaagaagtttgtcgttcacaa

SEQ ID NO: 54081 - DNA, 219 bp, Zea mays
gacaagtgcttcccgtgtccagatcaaggttgcccacagatgggtcactatgctgataaatttgctggcaggacaagtgaagagcagcagaaattcttcttgaacacaggagaggctagcaatttcgctcgctggagatatggggtttccatcacactgtctggaagaacagccactggtcagatcaaagttgctttgtttggaaataagggaaacact

SEQ ID NO: 54082 - DNA, 273 bp, Zea mays
gcgccgagcgatgggcatctctcgggacaactggcacaagcgccgcaaaaccgggggcaagagaaagccctaccacaagaagcggaagtatgagttggggcgcccagctgccaacaccaagattggcccccgccgcatccacacagtccgtgtgcggggaggtaacaagaaataccgtgccctgaggttggacgtggggaatttctcctggggctcagagtgttgtactcgtaaaaccaggatcatcgatgttgtctacaatgcatctaataa

SEQ ID NO: 54083 - DNA, 279 bp, Zea mays
tgccgtacaagtccggcgagcggcagaagcttgtggacgccgggtaccgcatcgtgggcaacatgggcgaccagtggagcgacctcatcggcgcgccggagggcgaccgcccttcaaggtgcccgaccccatgtactacgtcggctgagtgagacatggcacctactccaaataaagctccaatgttcgtcttattaattggcgtcttgtggtggctgtactggcgaccaaaccattgggaatgcagaacattgttcgtcataattcatcccgagtgaa

SEQ ID NO: 54084 - DNA, 283 bp, Zea mays
ctcatttattttctgcaataaaggaaaatggataccagcttctatttctgagtgcacgcgctatttcacaagcccacatcacaagacagtttcttttcaacctaaagcaggacggcaaagcacttcctgatggccctgttgttatatctccagatggtctcttcccgtcactttacagagaagtcatcagaagagctccgcatgaattcaagatttcgtgtctagaggccatcaaagatttatttccacacgactcatatccggggtatgctggatttggaaa

SEQ ID NO: 54085 - DNA, 185 bp, Zea mays
cagcattcgggccgagatgtctcgctccgtggccttagctgtgctcgcgctactctctctttctggcctggaggctatccagcgtactccaaagattcaggtttactcacgtcatccagcagagaatggagagtcaaatttcctgaattgctatgtgtctgggtttcatccatccgacattgaag

SEQ ID NO: 54086 - DNA, 269 bp, Zea mays
ccgaatggacagccgcctcgccatcgccgcgctcctcctgctcgcctccgcctcctccgctgccgcggacggcgggaaggtggccgtggcgctgtactacgagtcgctgtgcccctactcggcgcgcttcgtggtgaaccacctcgccaaggtcttcgcggacggcctccgcgaggtcgtggacctcacgctcgtcccctacggcaacgcccggatccaccccggcggagagatctcgtgccagcatggtccgtacgagtgtctgctca

SEQ ID NO: 54087 - DNA, 267 bp, Zea mays
  unsure (1)..(267): unsure at all n locations
gagattgttgatttgcctcttaagcaagcgattcattgcagctcaacatggctcataccagctcatacttcatgctgatctcctgcctgatgtttctatctcagtgccaaggccaagaggcccagacagagttgccccaggcccggatcagcttcccagaaggcaccaatgcctatgcgctcctactgctantactttaatgcagaccgtgagacctgggttgatgccgatctctattgccagaacatgaattcgggcaacctggtg

SEQ ID NO: 54088 - DNA, 264 bp, Zea mays
catgaatccactcctgatccttacctttgtggcagctgctcttgctgccccctttgatgatgatgacaagatcgttgggggctacaactgtgaggagaattctgtcccctaccaggtgtccctgaattctggctaccacttctgtggtggctccctcatcaacgaacagtgggtagtatcagcaggccactgctacaagtcccgcatccaggtgagactgggagaacacaacatcgaagtcctggaggggaatgagcagttcat

SEQ ID NO: 54089 - DNA, 121 bp, Zea mays
ctcaacatggacctgttcaggaagtgcatggagcctgttgagaagtgcctgagggatgccaagatggacaagagcagcgtccatgatgttgtccttgttggtggctccactaggatcccca

SEQ ID NO: 54090 - DNA, 167 bp, Zea mays
tgattatattcaagacgacttcaacctttgtggtctcagcagccaagttccttattatgattatgctctcgatctcattttagatatcgagtcatctcatggtgatatgttcactgaggaacaaaatgagctcgtagaatcagctgcagagatgctttatggtctga

SEQ ID NO: 54091 - DNA, 268 bp, Zea mays
caaagggcctttattgttgttcggcgtacgcgaccagtgaggtgcggttggccagccagcggcgagccaaaccgagcgtacgccatggatcgcgagtcgggctccaagcccggcagcggcggtgccgctccgcccagaatgaggctattgaccggcgggagcgtctccgccgcctggccctcgagaccatcgacctcgccaaggatccctatttcatgcgcaaccacctcggcagctatgagtgcaagctgtgcctgacgctgcacaa

SEQ ID NO: 54092 - DNA, 160 bp, Zea mays
gaagcctccaccctccagcgcctccaccttcctcgccgcctcactccctctgaggtcgcagatccgtccggttagacgaagccgcccgcacccatggcctccggtgagctcgcctgcacctacgccgccctcatcctcagcgacgacggcatcgccatca

SEQ ID NO: 54093 - DNA, 265 bp, Zea mays
agatcggcaaggccaatcccgagcagtggtgcgaaacctcgagcgctcgcgccggtgaccataacaaagaggaagccgcggtagcactggtagcggcagcagtaagggggagatgtcgtcggcgttcagcggcgatgagaccgcccctttcttcggcttccttggcgcctccgctgcgctcgtcttctcatgcatgggggcggcgtacgggacagccaagagtggcgtcggcgtggcgtccatgggtgtcatgcgcccagagctc

SEQ ID NO: 54094 - DNA, 179 bp, Zea mays
cgttgctcgcctcgggtcaaaccctaagcagggagttgatttatccgctgcagccatgagtaagttgcagtctgagtctgtacaggatgccatctcccagattgttggggatgccaaggagaagaataggaagttcactgagactgtggaacttcagattggtctgaagaattatgatc

SEQ ID NO: 54095 - DNA, 261 bp, Zea mays
gccggatcttgaagagcttactggtgtaaatacaacttgggtatccaccttgatggctcaacatttacttgctgctgcagaccgttatgcattggagagattaaagttgctctgtgagcttaagctgtgtgaagatgttgcaataaacacagtggcaaatactttggcactggctgaacagcaccactgctatcagctaaaaactgtttgcttaaaatttgtggctctgcctgagaatttgaaagctgtcatgcaaaccga

SEQ ID NO: 54096 - DNA, 261 bp, Zea mays
cagagattgttgatttgcctcttaagcaagagattcattgcagctcagcatggctcagaccagctcatacttcatgctgatctcctgcctgatgtttctgtctcagagccaaggccaagaggcccagacagagttgccccaggcccggatcagctgcccagaaggcaccaatgcctatcgctcctactgctactactttaatgaagaccgtgagacctgggttgatgcagatctctattgccagaacatgaattcgggcaa

SEQ ID NO: 54097 - DNA, 257 bp, Zea mays
ccggctgctcagttccctcctccttgtggccgttgcctcaggctatggcccaccttcctctcgcccttccagccgcgttgtcaatggtgaggatgcggtcccctacagctggccctggcaggtttccctgcagtatgagaaaagtggaagcttctaccacacgtgtggcggtacctcatcgcccccgactgggttgtgactgccggccactgcatctcgagctcctggaactaccaggtggtgttgggcgagtacga

SEQ ID NO: 54098 - DNA, 265 bp, Zea mays
tgaatccactcctgatccttacctttgtggcagctgctcttgctgccccctttgatgatgatgacaagatcgttgggggctacaactgtgaggagaattctgtcccctaccaggtgtccctgaattctggctaccacttctgtggtggctccctcatcaacgaacagtgggtggtatcagcaggccactgctacaagtcccgcatccaggtgagactgggagagcacaacatcgaagtcctggaggggaatgagcagttcatcaa

SEQ ID NO: 54099 - DNA, 221 bp, Zea mays
ccggaagaaccttgtgaagaagtgtgttgagctcttctttgagattgctgaaaacaaggaggactacaacaagttttatgaggctttctccaagaacctcaagcttggcatccatgaggactcgcagaacaggggcaagattgctgggcttctgaggatacactccacgaagagcggtgatgagctgaccagcctcaaaggattatgtggccgagatgaag

SEQ ID NO: 54100 - DNA, 265 bp, Zea mays
ggcctgccagatatcagaagcactcggcaatgtctccaggcagtaaaagacgccgggtttgaggttgtttgggataaggatcttgctgaagattctcccttgccttggtacttgcccttggatccaagccgattctccctgagtagcttccgtttgacctctgtgggacgcatgattacccgcacaatggtcaaggccctggagtacgttggtcttgctccgcagggcagtgagagggtctctaatttcctggagaaggctgcag

SEQ ID NO: 54101 - DNA, 267 bp, Zea mays
cagattagtcagcaaggatgggaaaagtaaagggattgcttatattgaatttaagacagaagctgatgcagagaaaacctttgaagaaaagcagggaacagagatcgatgggcgatctatttccctgtactatactggagagaaggtcaaaatcaagactatagaggtggaaagaatagcacttggagtggtaagaaattaggcttgttacaaggtttcagaattggtggagggaactcctttgtgtctttgtatttcataagttta

SEQ ID NO: 54102 - DNA, 271 bp, Zea mays
cgttcatcttctatacagtcctcacaagtgtcatcacattggatcgtgtatctctgaaacaaaaggtggtagatgcaccagaaatcctggctgtaattggcaaagtacctcacctctccgagtttctcaactccctgtacaactgccagtataagtcgttcttcgttgcattttctggtctgacagagcaaatcaagttagaccgttatcttcagcctcatttccgctactacatgagggaagtgcgcaccgtggtatactcacagttctt

SEQ ID NO: 54103 - DNA, 274 bp, Zea mays
aggagagggagggtttcctcaaagagacccaaacccaagcagagaacactagcgttccctcaccagggcgtccatcccagcagccatggcgatggcgtacaagatggcgacggaggggatgaacgtgaaggaggagtgccagcgctggttcatggagatgaagtggaagaaggtgcaccgcttcgtggtgtacaagatcgacgagcggtcgcgcgccgtgctggtggacaaggtgggcggccccggggaagggtacgaggagctcgtggccgcg

SEQ ID NO: 54104 - DNA, 132 bp, Zea mays
gcttctaaggatctcaaagtaaagcgtatcactccgcgtcacttgcagcttgcaatccgtggtgatgaagagttggattctcttatcaaggctaccatagctgggggtggtgtgatccctcacatccacaaa

SEQ ID NO: 54105 - DNA, 235 bp, Zea mays
  unsure (1)..(235): unsure at all n locations
ctcgagcgctgtgcttggcgtataaggatgtggatggtctcgacgacgacgacgatgatgcagatagcccaacaagtggtttcactctaatctgcatttttggcatcaaggatcccttgcgcccaggagtcaaggacgctgtggaggcctgtacgtctgctggcatcgtcgtgagaatggtgaccggtgacaacatcaatacagccanagctatagccaaagagtgtgggatact

SEQ ID NO: 54106 - DNA, 226 bp, Zea mays
cttcaattcttgtggaactgtcaacagagttacaatcctgactagacaagtttgggcaaccaaaaggttttgcttacgtgatatttgttgaagttgaagctgttcatgaagctatcaagttgaacgagtcagagttgcacggtcgccaactcaaggtggcaccgaagaggactaacgttcctgggatgaagcaaccccgcggtcgaggttacaatccgtgccatcg

SEQ ID NO: 54107 - DNA, 258 bp, Zea mays
tgacatcctgctgatcaagctctcctcacctgccgtcatcaattcccgcgtgtccgccatctctctgcccactgccggtccagctgctggcaccgagtccctcaagaccggctggggcaacattctgagttctggtgccgatacccagacgagctgcagtgcctggatgctcctgtgctgagccaggctgagtgtgaagcctcctaccctggaaagattaccaacaacatgttctgtgtgggcttcctcgagggaggc

SEQ ID NO: 54108 - DNA, 266 bp, Zea mays
aaactcatgatgctccggctgctcagttccctcctccttgtggccgttgcctcaggctatggcccaccttcctctcgcccttccagccgcgttgtcaatggtgaggatgcggtcccctacagctagccctggcaggtgtcctgcagtatgagaaaagtggaagcttctaccacacgtgtggcggtagcctcatcgcccccgactgggttgtgactgccggccactgcatctcgagctcctggacctaccaggtggtgttgggcgag

SEQ ID NO: 54109 - DNA, 270 bp, Zea mays
caagacaacccgtcagcccctctcgtttttcatccgccttcgcctccaaccgcgtgcgctccacgcctcctccaggaaagcgagagcttctgcataagaacaacaaatcaaaagcgtgatcagctcggtgccaacaaaacctcaacaaccaagtttcatgtctgatctcgacgtccagcttccatctgcctttgatccgtttgctgaggcaaatgctgaggactctggtgctggtcctggaacgaaggattatgtgcatgtgcgctccag

SEQ ID NO: 54110 - DNA, 270 bp, Zea mays
ctcgccctcgctcctccgccgccgccgccgccgcatcaagcccccgccccgccgtcgcctgaggtagacaccaatccgccgccatggggcgtatgcacagccgcgggaagggtatctcatcgtcggcgcttccctacaagaggacgcctcctacctggcttaagaccgctgcctccgacgtggaggagatgatcacaaaggcagcgaagaagggacagatgccgtcgcagatcggcgtcctgctccgtgaacaacacggtaatccccctt

SEQ ID NO: 54111 - DNA, 257 bp, Zea mays
cgccagacactccgtagtctgtaccccaagcaccggcgcggcggcggcggctaccatggcagtcgggaagaacaagaggatctccaagggaaagaagggtggtaagaaaaagaccgtcgatcccttctctaagaaggactggtatgacatcaaggccccatcggtcttcagtgtgcgcaacattgggaagactctcgtgtccaggacacagggtaccaggattgcctctgatggtctgaagcacagagtctttgagg

SEQ ID NO: 54112 - DNA, 259 bp, Zea mays
cttttgaagaagcccgagcagcaggattcaccgaagagagtgggacgctgggtgatatatgggagactgtatcaaacagtgatcttgttttgctactgatatctgattctgctcaggctgataactacgagaaaattttctcgcacatgaaaccaaacagtattcttggtttgtcacatggatttctccatggacatttgcaatctctgggttttgatttccctaaaagcatcagtgtgattgctgtatgccccaaggg

SEQ ID NO: 54113 - DNA, 264 bp, Zea mays
cacacacacacacacagacaagtggtttccaaagccaagtgtgtgtactagcaaccagctagctcgggcggcagcaggcagccatcatgtcggaggagaagcaccaccacttcttcaaccaccacaagaaggacgaggagcagcccgccggcgagtacgggtactccgagaccgaggtggtcaccgccaccggcgagtggcgagtacgagaggtacaagaaggaggagaaggagcacaagcacaagcagcacctcggcgaggcc

SEQ ID NO: 54114 - DNA, 267 bp, Zea mays
ctcagaaggttcactctaggtcccgtgcaagaagggcacatgaggccaagcagaagggaaggcactctggatatggcaagcgcaggggtaccagggaggctaggctccccaccaagattctgtggatgaggaggatgcgtgttctgaggcgcctgctccgcaagtaccgtgggccaggaagatcgacaagcacgtgtatcatgacatgtacatgaaggtcaagggtcatatgtttaagaacaagagggtgcttatggcgagtatcca

SEQ ID NO: 54115 - DNA, 243 bp, Zea mays
gatgagggactgctctccagagagccaaacccaagcagagaacactagcgttccctcaccagggcgtcgatcccagcagccatggcgatggcgtacaagatggcgacggaggggatgaacgtgaaggaggagtgccagcgctggttcatggagatgaagtggaagaaggtgcaccgcttcgtggtgtacaagatcgacgagcggtcgcgcgccgtgctggtggacaaggtgggcggccccggg

SEQ ID NO: 54116 - DNA, 249 bp, Zea mays
cacaccagctgtcccactcaccatggagaagatcctgatcctcctgcttgtcgccctctctgtggcctatgcagctcctggcccccgggggatcattatcaacctgacgctctatgggatttactacaagtgtcctgtgagcgtggcctgacctgtgagggagacaagaccatcgtgggctccatcaccaacaccaactttggcatctgccatgacgctggacgctccaagcagtgacaatgcccaccc

SEQ ID NO: 54117 - DNA, 264 bp, Zea mays
atcaaacgcactctccttcgccgccgtatcaaacgcactctccttcgccgccgtatcaaacgcactctcctccgccgccgcccgaggcaagatggttctccagaacgacatcgaccttctcaacccgccggcagagctcgagaagctcaagcacaagaagaagcgcctcgtccagtcccccaactcattcttcatggatgtcaagtgccagggatgcttcagcataaccacggttttcagccactcccagactgttgttgtgtg

SEQ ID NO: 54118 - DNA, 252 bp, Zea mays
gcagaccaacggggctgttcctgatgtcctgcagcagggccggttgctggttgtggactatgccacctgctccagctctgcctggtggggcagcagcgtgaaaaccagtatgatctgtgctgggggtgatggcgtgatctccagctgcaacggagactctggcgggccactgaactgtcaggcatctgacggccggtggcaggtgcacggcatcgtcagcttcgggtctcgcctcggctgcaactactacca

SEQ ID NO: 54119 - DNA, 262 bp, Zea mays
gcggcatggggctctgggactcgctcctcaactggctccggagcttgtttttcaagcaagaaatggagctctccctcgttgggttgcagaatgctgggaagacgtcgctggtcaatgctgttgctacaggtggctaagcgaggacatgattccaacggtaggcttcaatatgcggaaggtcaccaagggaaatgtcacgattaagctttgggatcttggtgggcagcggagattccgcactatgtgggagcgctattgccgt

SEQ ID NO: 54120 - DNA, 266 bp, Zea mays
gcgcactccaaggcgcccttcgtcaccgtcgccggccagcagcagcgcttctgccagcagtgcagcaggtttcatctgctcgaggagttcgacgaggtgaagcgaactgcaggaagcgcctcgacggacacaaccggcgccgccgcaagccgcagccggatcctctcaaccctgctgccggcttgtttggcaatcaccaccatggaggagtgacaaggttcacatcgtacccacaccgcttcaccaaatccatcgcaaagcccgaa

SEQ ID NO: 54121 - DNA, 264 bp, Zea mays
gcatggcgctcgtattgcatagtggggctggaaacaagaatgccttcaaagcacttattgctgcagaatacagtgggatcaaggtttagttgaccaaggattttgagatgggtgtctccaacaagacccctgagtttcttaagatgaacccccttgggaaggttcctgttctggagactcctgatggccctgttttagagagtaatgctatcgcacgctatgttgctcgcttgaaggatgacaccctctttttgggtcttcccg

SEQ ID NO: 54122 - DNA, 254 bp, Zea mays
atcctgggaaaacaaatgatgtgggccagtaattttatctagacactggtgatgccagtacttttgcacgttggaggtataaggtatctgtcacactgtctggaaaaaaggttacaggacacatactagtttctatgttcggaaataaaggaaactctaagcagtatgaaattttcaagggcactctcaaaccagatagtactcattccaatgaatttgactcagatgtggatgttggggacttgcagatggtt

SEQ ID NO: 54123 - DNA, 252 bp, Zea mays
tgaatccactcctgatccttacctttgtggcagctgctcttgctgccccctttgatgatgatgacaagatcgttgggggctacaactgtgaggatcattctgtcccctaccaggtgtccctgaattctggctaccacttctgtggtggctccctcatcaacgaacagtgggtcgtatcagcaggccactgctacaagtcccgcatccaggtgagactgggagagcacaacatcgacgtcctggaggggaatg

SEQ ID NO: 54124 - DNA, 252 bp, Zea mays
accagctgtcccactcaccatggagaacaacacaatcctcctgcttgtcgccctctctgtggcctatgcagctcctggcccccgggggatcattatcaacctggagaacggtgagctctgcatgaatagtgcccgtgtaagagcaattgctgccagcattcaagtgcgctgggcctggcccgctgcacatccatggccagcgagaaccgcgcctgctctgtcaagacgctctatgggattgactacaagtgt

SEQ ID NO: 54125 - DNA, 259 bp, Zea mays
ggagtcctcagacaccattgacaacgtcaaggccaagatccaggacaaggagggcattccaccggaccagcagcggctgatcttcgccggcaagcagctggaggatggtcgcaccttggctgactacaacatccagaaggagagcaccctccacctggtgctccgcctcaggggtggtatgcagatttttgtgaagacatggactggcaagaccatcaccttggaggtggagtcgtctgacacaatcgatagtgtcaag

SEQ ID NO: 54126 - DNA, 248 bp, Zea mays
agatgctcttgctgccccctttgatgatgatgacaagatcgttgggggctacaactgtgaggagaattctgtcccctaccaggtgtccctgaattctggctaccacttctgtggtggctccctcctcaacgaacatgggtggtatcagtaggccactgctacaagtcccgcatcacagtgagactgggagagcacaacatcgaagtcctggagaggaatgagcagttcatcaatgcagccaagatcat

SEQ ID NO: 54127 - DNA, 212 bp, Zea mays
tgatgctccggctgctcagttccctcctccttgtggccgttgcctcaggctatggcccaccttcctctcactcttccagccgcgttgtccatggtgaggatgcggtcccctacagctggccctgacaggtttccctgcagtatgagaacagtggaagcttctaccacacgtgtggcggtacctcatctgccccgattgggttgtgagtgccg

SEQ ID NO: 54128 - DNA, 259 bp, Zea mays
tccactcctgatccttacctttgtggcaggtgctcttgctgccccctttgatgatgatgacaagatcgttgggggctacaactgtgaggagaattctgtcccctactcggtgtccctgaattctagctaccacttctgtggtggctccctcatcaacgaacagtgggtggtatcagcaggccactgctacaagtcccgcatccaggtgagactgggagagcacaacatcgaagtcctggaggggaatgagcagttcatc

SEQ ID NO: 54129 - DNA, 254 bp, Zea mays
gtcaactatggaggaagcactggttatggaagagagtatcgggagagactattgaacaaatggggtattgttgatgttgatgattgctgcggctgtgcgagattcctggtggagagtgggaaagtagatgggcagcgcctttgtattactggtagatcagcaggtggatacactactttagcttcacttgcattcagagacacgttcaaggctggagcttctctctatggtgttggggacttgactctgttgag

SEQ ID NO: 54130 - DNA, 188 bp, Zea mays
acattctgcaccgtcctagaatattgcagtggcaaggatcttgatgcagtccttaaagccacaccaattcttccagaaaaagaagcaagaatcataattgttcaaatatttcagggcctggtttatctaaacaagaggggccaaaagatcattcactacgatctaaaccctggcaatgttctctttga

SEQ ID NO: 54131 - DNA, 131 bp, Zea mays
gttggaaaacagttcaacttctgtagtccagaaaccgtcagggaggaagttctgctcaccctcacaccgtgttaggagactactgttatttgaccaatgaattgacttctaataaaatctagtggtgatgc

SEQ ID NO: 54132 - DNA, 261 bp, Zea mays
ttttgattttagccgccgccgctgctcatctcacatccctcgagaagacgcctgctcctcgccgatcgatacgatggccgtcttctccgacctccacaccgccgacggcctcaagtccctcgaggctcacctcgccggcaaaacctatgtgtctggtgactccattactaaggatgacattaaggtcttcgccgcggtgccgtcgaagcctggcgctgagtttcctaatgccgcccgctggtacgagaccgtctctgcggc

SEQ ID NO: 54133 - DNA, 303 bp, Zea mays
tgtccactttccccgtgcttctccgccgtcgaggccgcgtcccagtgcgaagagactccgactcagatggccagccgctgggtccggcccgaggtgtacccgctgttcgcggcgactggcgtggccgtcggcatctgcgggtttcagctcttccggaacatactggcaacccggaagtcagggtacacaaggcagggagggcagctggtgtgcttgagaaccatgaggacgggagacgttacgccatgcatggcctaacgagctttgtgcacgacaagactcctgagatcatgcctgcagtta

SEQ ID NO: 54134 - DNA, 203 bp, Zea mays
cgcgctgcctatcatcggcatcaccctgggccggctggtgcagaacttccagctgctgccgccgccggggctggacaagatcgacaccacggagaagcccggccagttcagcaaccagatcgccaagcatgccaccatcgtctgcaagcccctcgaggctagaaatcactgcctgtttcctgcacgcgcccccgcagatgaag

SEQ ID NO: 54135 - DNA, 295 bp, Zea mays
aaccttgctgtgaaggagggccccgagcaggtgatccccatcaactctgaggagctgtttgtgcatccactctggaaccgctcgtgtgtggctctgtggcaatgacatcgccctcatcaagctctcacgcagcgcccagctgggagatgccgtccagtcgcctcactccctcccgctggtgacatccttcccaacaagacaccctgctacatcaccggctggggccgtctctataccaatgggccactcccagacaagctgcagcaggcccggctgcccgtggtggactataagc

SEQ ID NO: 54136 - DNA, 295 bp, Zea mays
gcttggcgaccgcctcagcccgccgccaggagagttcaggagagtttcgagaagctgaaatggctcctaaagctgctcctgccaagaagggtgatgccaagacccaggccttgaaggttgccaaggctgtgaagtctgggtcagtaaagaagaccagaagatccgcacgtccgtgacatttcaccgccccaagaccctgaagaaggctagggaccccaagtacccaagaatcagcactaccggaaggaacaagcttgatcagtaccagattctcaagtatcccctcaccacagaa

SEQ ID NO: 54137 - DNA, 293 bp, Zea mays
gatgctccggctgctcagttccctcctccttgtggccgttgcctcaggctatggcccaccttcctctcgcccttccagccgcgttgtcaatggtgaggatgcggtcccctacagctggccctggcaggtttccctgcagtatgagaaaagtggaacttctaccacacgtgtggcggtagcctcatcgcccccgactgggttgtgactgccggccactgcatctcgagctcctggacctaccaggtggtgttgggcgagtacgaccgtgctgtgaaggagggctccgagcaggt

SEQ ID NO: 54138 - DNA, 294 bp, Zea mays
gtgcgaaccaagcagaccacagcaagaagcgtagtcgtcgccggaaggaaaggcgcggagcaagatgtcgtggcaggcgtacgtcgatgagcacctgatgtgcgagatcgaaggacaacatctcagcgccgccgccatcgtcggtcacgacggcacgcttgggcgcagtccgagagcttccccgagttaaagcctgaggaggttgctggtatcataaaggactttgatgatcctggtactcttgcaccaactggtcttttcgatggaggtacaaagtacatggtgatccaaggt

SEQ ID NO: 54139 - DNA, 293 bp, Zea mays
tcatgatgctccggctgctcagttccctcctccttgtggccgttgcctcaggctatggcccaccttcctctcactcttccagccgcgttgtccatggtgaggatgcggtcccctacagctggccctggcaggtttccctgcagtatgagtaaagtgaagcttctaccacacgtgtggcggtagcttcatcgcccccgattgggttgtgactgccggccactgcatctcgagggatctgacctaccaggtggtgttgggtgagtacaacttgctgtgaaggagggccccgagca

SEQ ID NO: 54140 - DNA, 286 bp, Zea mays
catgaatccactcgtgatccttacctttgtggcagctgctcttgctgccccctttgatgatgatgacaagatcgttgggggctacaactgtgaggagaattctgtcccctaccaggtgtcccttaattctggctaccacttctgtggtggctccctcacaacgaacagtgggtggtatcagcaggccactgctacaactcccgcatccaggtgagactgggagagcacaacatcgaagtcctggaggactctgagcagttcatcgatgcagccaagatcatccgcc

SEQ ID NO: 54141 - DNA, 291 bp, Zea mays
actacttctaccaaatattccggaacagggccgaggcaagggcccttgagcgatccaggagagggcttggcgatgggtctgtcgggatgctccagtctctcactgtcgctgccctgtctggctgtgtcaatgtactgctcacaaacccgatttggttgttgttacacggatgcaaactcacagaaaggcaaacaaacagcaaagacctcagggtttgaattgtgctcttgataagccccttgaagctgctacagctgaaaacgctccatacaaaacaattgatgtttttca

SEQ ID NO: 54142 - DNA, 276 bp, Zea mays
tgaatccactcctgatccatacctttgtggcagctgctcttgctgccccctttgatgatgatgacaagatcgttgaggggctacaactgtgaggagaattctgtcccctaccaggtgtccctgaattctggctaccacttctgtggtggctccccatcaacgaacagtgggtggtatcagcaggccactgctacaagtcccgcatccaggtgagactgggagagcacaacatcgaagtcctttaggggaatgagcagttcatcaatgcagccaaga

SEQ ID NO: 54143 - DNA, 184 bp, Zea mays
cctaaccatgttgggcatcactgtcctcgctgcgctcttagcctgtgcctccagctgtggggatgccagcttcccgtgcaacctatccgcccgagtggtgggaggagaggatgctcggctccacagctgggcctggcagatctccctccagtactcaagaacgacacgtggaggcatacgtgtg

SEQ ID NO: 54144 - DNA, 289 bp, Zea mays
gaggacgccgtccccggctcctggccctggcaggtgtccctgcaggacaaaaccggcttccacttctgcgggggctccctacatcagcgaggactgggtggtcaccgctgcccactgcggggtcaggacctccgacgtggtcgtggctggggagttgaccagggctctgacgaggagaacatccaggtcctgaagatcgccaaggtcttcaagaaccccaagttcagcattctgaccgtgaacaatgacatcacccagctgaagctggccacacctgcccgcttctccc

SEQ ID NO: 54145 - DNA, 299 bp, Zea mays
ccagcaggcagatcagatacatccatccattcgcggaccggaaggaaaggaaagggttgaactatgagcgccgtggcggtttcgtcgtcgctgaacccggacgcgccgctcttcatcccggcggcgctgctgcaggtggaggacttctcgccgcagtgtgggacctcatcaccaccactgcctggttccgcgaccactggtcccgcgagcgcgcccacctggacgagatggccgagcagatcgacgcggccggcctcctccccgacgacgaggactcttctacgacgaccagctcgagc

SEQ ID NO: 54146 - DNA, 292 bp, Zea mays
catcgcgaatattttgcagaagagcatgataggagggccagagctggcatagactatgattcatcctatgggaaggctcgtccaaatgatacaattctgaagctacagaggacagcaccatattacaagaggaacagagctcatgtttgcagttctttgtgcgaggtgaatgtacaagaggagctgagtgcccttatcgtcatgagatgcctgaaactggggagttatctacagcagaacattaaagatcgctactatggagttaatgatccagttgcactgagacttttga

SEQ ID NO: 54147 - DNA, 289 bp, Zea mays
gcagagccttccttctggtgaaagcaaggatgatagtgccgtgcctgatagagcacagttcaatagagacgatttccctgttcagtatgatgctgcaaagttctttgtcattaaatcgtacagtgaggatgacatccacaagagtgtaaaaacaatgtgtgggcaagcacaaccaatggaaataagaagctcgatgctgcttatcaagaagctcagtcgaagggttctgcgtgccctatattcttgtttttctcagtgaatacaagtgggcagtttgttggtgttgctg

SEQ ID NO: 54148 - DNA, 230 bp, Zea mays
ggagtacgtccggcgatggctaccggagctggcaaggctgccaacggaatggatacaccatccctgggatgcacccgagtctgtgcttcaggctgcaagagttgagctaggatctaactacccacgccccattgtcgagttagatgcagccattccaggttgcaggatgccctgtccgagatgtgggaacttgagtgcacctctcgtgctgccatggagaaacgaatgga

SEQ ID NO: 54149 - DNA, 290 bp, Zea mays
cacgactgggcttatgaccaaggaatcagatattccttcacctttgaacttcgagatacaggcagatatggctttctccttccagaatcccagatccgggctacctgcgaggagaccttcctggcaatcaagtatgttgccagctacgtcctggacacctgtactagttgagaaagctgatggccttgtttcaaaattctcatttttcatttctattcgttctcgaattcttattttggtttgcctggatgtcttgcagatcccaatctttcttttaagcttctgggtct

SEQ ID NO: 54150 - DNA, 293 bp, Zea mays
ggggaggttcggctgggaacaagttccgcatgtcactgggtctaccggtggcggccacggtgaactgcgcggacaacacgggcgccaagaacctctacatcatctccgtcaagggcatcaagggccgcctcaaccgcttcccgtccgcctgttcggcgacatggtcatggccaccgtaaagaagggaaagcccgacctcaggaagaaagtgatgcccgccgtcatcgtccgccagcgcaagccgtggcgtcgcaaggacggtgtctacatgtacttcgaagataatgctggag

SEQ ID NO: 54151 - DNA, 272 bp, Zea mays
cgccgccgccgctgctcatctcacatccctcgagaagacgcctgctcctcgccgatcgatacgatggccgtcttctccgacctccacaccgccgacggcctcaagtccctcgaggctcacctcgccggcaaaacctagtgtctggtgactccattactaaggatgacattaacgtcttcgccgcggtgccgtcgaagcctggcgctgagtttcctaatgccgcgcgctggtacgagaccgtctctgcggctgtagcctcaagattccctggt

SEQ ID NO: 54152 - DNA, 278 bp, Zea mays
ctcccacggacacaccatgataaggacgctgctgctgaccactttggtggctgacgaggctaagttgtcgggaccccacttacccaccttatgtgactagggtggttggcggtgaagaagcgaggcccaacagctggccctggcaggtctcctgcagtacagctccaatggcaagtggtaccacacctgcggagggtccctgatagccaacagctgggtcctgacggctgcccactgcatcagctcctccaggacctaccgcgtggggctgggccggc

SEQ ID NO: 54153 - DNA, 285 bp, Zea mays
ctgcagtccatttgctactactccgcgcccaaaaccaagcccacgctcaatagcctcgacgaggtcgacccggagctgctcaagaccttcgaccgcctcggcatcccgtccaccgagcagaagcgcctctccaacgtcgccgttgacgcgtcatcgactccacctccatcgccaccacccaccgcgaaggctacatggccaagggcgtcatcttctgctccatctccgaggccatccgcgagtacccggaccttatcaggcgttacctgggcagcgtcgtaccgc

SEQ ID NO: 54154 - DNA, 293 bp, Zea mays
gggtgaaccccgactgcggcctcaagacccgcaagtacacggaggtcaagcccgccctgaccaacatggtctccgccgctaagctcatccgcacccagctcgccagcgccaagtgagcaccttttttttgcctttttcgtttccgaggaggggtcgtcgatgccaatttgtttccaataaacagggctgtgcccgccgttctgatgtactccgtctgtggttaggttagtagttctcttgatctcgccctcacgcggtacctggcttactactctctgtgtggccgtttctga

SEQ ID NO: 54155 - DNA, 285 bp, Zea mays
cttgactgcaagatgaaactccttgtgctagctgtgctgctcacagtggccgccgccgacagcggcatcagccctcgggccgtgtggcagttccgcaaaatgatcaagtgcgtgatcccggggagtgaccccttcttggaatacacaacttcggctgctactgtggctttgggggctcaggcacccccgtggatgaactggacaagtgctgccagacacatgacaactgctatgaccaggccaagaagctggacagctgtaaatttctgctggacaacccgtaca

SEQ ID NO: 54156 - DNA, 285 bp, Zea mays
ggtactttcaactcccccgaagaagctgccagagcttacgacgccgaggcacgcaggatccgcggcaagaaggctaaagtcaacttcccggatgaggttcctacggcggtttctcagaagcgccgtgctgctgggcctgcctctcgaaagcgcctaagatggacgttgaggaggagaagccgatcatcaagctcgcagtgaacaatatgaccaactcaaacgcatatcactaccctgccgtcgtcggccacaacatcatacccgagccatacatgcagactcaga

SEQ ID NO: 54157 - DNA, 285 bp, Zea mays
tgcaagatgaaactccttgtgctagctgtgctgctcacagtggccgccgccgacagcggcatcagccctcgggccgtgtggcagttccgcaaaatgatcaagtgcgtgatcccggggagtgaccccttcttggaatacaacaactacggctgctactgtggcttggggggctcaggcacccccgtggatgaactggacaagtgctgccagacacatgacaactgctatgaccaggccaagaagctggacagctgtaaatttctgctggacaacccgtacacccac

SEQ ID NO: 54158 - DNA, 280 bp, Zea mays
gcagatcactgtccttctgccatggccctgtggatgcgcctcctgcccctgctggcgctgctggccctctggggacctgacccagccgcagcctttgtcaaccaacacctgtgcggctcacacctggtggaagctctctacctaggtgcggggaacgaggcttcttctacacacccaagacccgccgggaggcagaggacctgcaggtggggcaggtggagctgggcggggagcctggtgcaggcagcctgcagcccttggccctggaggggtcctgcag

SEQ ID NO: 54159 - DNA, 279 bp, Zea mays
cgcaaggctgctatcaagaaccactccgacaagggcggtgaccccgagaagttcaaggagctcgcacaagcctatgaggttttgagtgatccagagaaacgtgagatttatgatcagtatggtgaagatgcccttaaggaaggatgggcggtggaggatcccatgttgatccttttgacatcttctcatcattttttggaccctcttttggaggaggtggtgggagcagcaggggaagaaggcaaaggaggggagaagatgtagtccacccacttaaag

SEQ ID NO: 54160 - DNA, 281 bp, Zea mays
gcgccggcaaccgccgccatcgatcgatcgcccggaaactgacctctaccgatgtctggagccggcgaggaggataagaagcccgcggagggcggcgcccacatcaaccttaaggtcaagggacaggatggcaatgaggtgttcttcgcataaagaggtccacccagctgaagaagctgatgaacgcctattgctaccggtagtttgtggacatgaatgctcttgcattcctgtttgatggccgcaggttcgcggcgagcagacccctgatgagctggaga

SEQ ID NO: 54161 - DNA, 285 bp, Zea mays
ccatgaatctacttctgatccttacctttgttgcagctgctgttgctgccccctttgatgatgatgacaagatcgttgggggctacatctgtgaggagaattacgtcccctaccaggtgtcctacaattctggctaccacttctgggtggctccctcatcagcgaacagtgggtggtgtcagcaggtcactgctacaagtcccgcatccaggtgagactgggagagcacaacatcgaagtcctggaggggaatgaacagttcatcaatgcagccaagatcatccg

SEQ ID NO: 54162 - DNA, 285 bp, Zea mays
cgaaggggatgcagttgaactgtctgttgagtccgtgctgtatgtgggtgccatcttggaacaaggggacacctcccggtttaacctggtgttgaggaactgctatgccacccccactgaagacaaggctgaccttgtgaagtatttatcatcagaaacagctgctcaaatcaacgtgattccaccatccacgtggaggagaatgggcagtcctcggaaagccggttctcagttcagatgttcatgtttgctggacattatgacctagttttcctgcattgtgag

SEQ ID NO: 54163 - DNA, 275 bp, Zea mays
cctgaatccactcctgatccctacctttgtggcagctgctcttgctgccctcgattgatgatgatgccaagatcgatgtggggctacaactgtgaggagaattctagtcccctaccaggtgtcactgaattctggctaactattcgtggtggctccctcatcaacgaaacagtgggtggtatcagcaggccactgctataagtcccacatccaggtgagactgagagatctcaacttcgaagtcctggaagggaatgatcaggtcatgaatgcag

SEQ ID NO: 54164 - DNA, 276 bp, Zea mays
tgatgaccttgatctttttggtgatgaaactgaggaggacaagatggcagctgatgagcgtgccgccgctgccaaggcctcttctaaaaagaaagaaagtggtaaatcctccgtccttatggatgtcaaaccatgggacgtgagactgatatgaagaagctggaggaggctgtccgcagtgtccagatggagggtctgacttggggagcatcaaagcttgtgcctgttggatacggcatcaagaagatgactatcatgttgacaattgtcgacgat

SEQ ID NO: 54165 - DNA, 281 bp, Zea mays
ctgacggaactgccacgatgctgccactttggactctttcactgctgctgggagcagtagcaggaaatgaagtttgctacgaaagactcggctgcttcagtgatgactccccatggtcaggaattacggaaagacccctccaatattgctcttggtctaccaaaagatgtcaacacccgcttcctcctatatactaatgagaacccaaacaactttcaagaagttgccgcagattcatcaagcatcagtggctccaatttcaaaacaaatagaaaaactcg

SEQ ID NO: 54166 - DNA, 275 bp, Zea mays
gttcggagcgcacacacacgcaaccagatctcccccaaatccagccgtcggcacctccgcttcaagatgcagatctttgtgaaaaccctgactggcaagactatcaccctcgaggtggagtcgtctgacaccattgacaacgtaaggccaagatccaggacaaggagggcatccccccagaccagcagcggctcatcttcgctggcaaacagcttgaggatgggcgcacgcttgctgactacaacatccagaaggagagcacctacaccttgtgc

SEQ ID NO: 54167 - DNA, 249 bp, Zea mays
cgagaactactgcctggccgtccgcgacggcgccgtcgtgctggccccggtcaaccccaaggacgaccaccagcactggtactaggacatgcgcttcagcacccaggtcaaggacgagaacggcatgccggcgttcgcgctcgcaacaaggcaatcgactcagccatcaagcactccctcggccagtcccacccggtcaagctcgagccttacaacccggaccatgaggacgagtcggtgctgtggacc

SEQ ID NO: 54168 - DNA, 285 bp, Zea mays
ggtcaagcaggcagagtctgcacctcctattccgaaaaaggctgctccttctaaggagccaaaggcaaaggatgtcaagaaggaggctccaaaggaggcccccaagccaaaggtggttgaggcaccagcagaagaggaagcaccaagccaaagccaaataatcctcttgacttgctgccaccaaacaagatggtccttgatgactggaagaggctatactcaaacacaaagactaacttccgggaggttgccatcaaaggtttctgggacatgtacgacccagag

SEQ ID NO: 54169 - DNA, 193 bp, Zea mays
agcgttgcctcaggctatggcccaccttcctctcgcccttccagccgcgttgtcaatggtgagcgatgcggtcccctacagctggcctggcaggtttccctgcagtatgagaaaagtggaagcttctaccacacgtgtgccggtagctcatcgcccccgactgggttgtgactgccggccactgcatctcgag

SEQ ID NO: 54170 - DNA, 187 bp, Zea mays
ctcgactggagctcttccacggccgcggtggagatggcggcgaatctggaggacgtgccgtcactggatctgatgcacgagctgctccgccgcatgaagtgaagctccaagcccgacaagcgcctcatcctcatcggtccacctggctctggaaagggaactcagtctcctattatacaggatgaat

SEQ ID NO: 54171 - DNA, 179 bp, Zea mays
agagctcaggagggtccgccgtgagtacaaggcaaaaaagatctctgaggaggcatacgtcactgccatcaaggaggaaatcaacaaggtcgttaagctccaagaagagcttgacattgatgtgcttgtgcatggcgagcctgagagaaacgatatggttgagtacttcggtgagcagc

SEQ ID NO: 54172 - DNA, 186 bp, Zea mays
cagatgctactgtggatgatctcattgacgttatcgaagggaaccgtaagtacataaagtgcgtctacgtatataacaagatcgatgttgttggtatcgatgacgttgataatcttgctcggcaaccaaattcactagtgatcagctgcaatttgaagctgaacttggacagactacttgcgagaa

SEQ ID NO: 54173 - DNA, 180 bp, Zea mays
tcctgacggaactgccacgatgctgccactttggactctttcaatgctgctgggagagtagcaggaaaagaagtttgctacgaaagactcggctgcttcagtgatgactccccatggtcaggaattacggaaagacccctccatatattgccttggtctccaaaagatgtcaacacccgc

SEQ ID NO: 54174 - DNA, 174 bp, Zea mays
ctcgttcagtaacggagagtacgtgaaggctgggctggatgagctagagcattggtgcttttggatgactgaagagtacgcagatctgcatgggacgagctgaagcatatcaggcaggcagtgaccctcttgatacttgacgacaagcatagccggagtctcgcggagatcaca

SEQ ID NO: 54175 - DNA, 178 bp, Zea mays
caaaactcatgatgctccggctgctcagttccctcctccttgtggccgtgctcaggctatggccaccttcctctcgcccttccagccgcactgtcaatggtgaggatgcggtcccctacagctggccctggcaggtttccctgcagtatgagaaaagtggaagcttctaccacacgtg

SEQ ID NO: 54176 - DNA, 187 bp, Zea mays
ccctaagcagggagttgatttatccgctgcagccatgagtaagttgcagtctgagtctgtcaaggatgccatctcccagattgttggggatgccaaggagaagaataggaagttcactgagactgtggaacttcagattggtctgaagaattatgatccacagaaggacaagcgtttcagtggctct

SEQ ID NO: 54177 - DNA, 176 bp, Zea mays
caatttcgagcctgcggagctcgcctggaagcctgcccaagctgcagctcaacccctacagctggtcaaaggtctcgaacatcatgtacctagactctcctgccggtgtggggatgtcgtactcgctgaacagatcggattatgtaacaggtgacctgaaaaccgcagctgacgcc

SEQ ID NO: 54178 - DNA, 169 bp, Zea mays
tctcgttccatttccccatctcccagatccaattcgcgagttctccctcctctgcggccatggcgctctctgtggagaagacctcgtctggacgggagtacaaggtcaaggatctctcgcaggcggacttcgcgctcgagattgagctggccgaggtcgaaatgcccgg

SEQ ID NO: 54179 - DNA, 171 bp, Zea mays
ctcagaaggttcactctaggtcccgtgcaagaagggcacatgaggccaagcagaagggaaggcatctggatatggcagcgcggggtacagggaggctaggctccccaccaagattctgtggatgaggaggatgcgtgttctgaggcgcctgcctgcgaagtaccgtgggcc

SEQ ID NO: 54180 - DNA, 177 bp, Zea mays
agtcgcagaccgggagtagccgacgcgccgtcactgaatcctcagatcacggctagccgaaatcacgacactctgctgactcccggcgagcagtgtaacattttccttcagccatgggcaaggagaagactcacatcaacattgtggtcattggacatgtcgactctggcaagtcga

SEQ ID NO: 54181 - DNA, 173 bp, Zea mays
  unsure (1)..(173): unsure at all n locations
ggagccttcaatgtgatccctgattcggtaactataggtggcaccttccgagcctttctgaaagagagttttaatcaattgaagcagcggattgaagaggtgattgtgtctcaagctagcgtgcagctngcagcctgtntgggactttcctcagcaaggaccgtcctttcttc

SEQ ID NO: 54182 - DNA, 183 bp, Zea mays
cgagcgaatgggcatctctcgggacaactggcacaagcgccgcaaaaccgggggcaacagaaagccctaccacaagaagcggaagtatgagttggggcgcccagctgccaacaccaagattggcccccgccgcatccacacagtccgtgtgcgtggaggtaacaagaaataccgtgccctgag

SEQ ID NO: 54183 - DNA, 170 bp, Zea mays
cccaacaccacctcgcctgcgctcttcgtagcctccgtcgcgtcgagcatcgatcatgtcggcctactgcggaaagtacaaggatgagctcatcaagaatgctgcctacattggcacccccggcaagggtatccttgctgctgatgagtccactggcaccattggcaagc

SEQ ID NO: 54184 - DNA, 172 bp, Zea mays
gggtaaacaaggcagggagggcagctggtgtgcttgagaaccatgaggaggggagacgttacgccatgcatggcctaagaagctttgtgcacgacaagactcctgagatcatgcctgcagttaacaagttcttcactgaccctaagtgaagcatgttgattggcatactact

SEQ ID NO: 54185 - DNA, 168 bp, Zea mays
cacaaaactcatgatgctccggctgctcagttccctcctccttgtggccgttgcctcaggctatggaccaccttcctctcactcttccagccgcgttgtccatggtgaggatgcggtcccctacagctggccctggcaggtttccctgcagtatgagaaaagtggaag

SEQ ID NO: 54186 - DNA, 168 bp, Zea mays
gggaacatctggaacattagacaggatgctgatcttctggacaatcacacttgtctggctgggagcagccaaaggaaaagaagtttgctatgaggacctcgggtgcttttctgacactgagccctggggggtgacagcaatcaggcccctgaaaattctcccctggag

SEQ ID NO: 54187 - DNA, 170 bp, Zea mays
acacagagcacatcaaaagttcccaaagagggcttgctctctcttcacctgctctgttctacagcacactaccagaagacagcagatatgaaaagcatttactttgtggctggattatttgtaatgctggtacaaggcagctggcaacgttcccttcaagacacagagga

SEQ ID NO: 54188 - DNA, 170 bp, Zea mays
atcatcgccaacgaccagggtaaccgcaccacaccctcgtacgtcgccttcaccgactccgagcgcctcatcggagatgcggccaagaaccaggtcgccatgaaccccatcaacaccgtctttgatgccaagcgtctcattggcaggaggtttagtgatgcctctgccca

SEQ ID NO: 54189 - DNA, 166 bp, Zea mays
gtgagatccaagtgacagagcttctcgataagttagacttttatgttctgcctgtgctcaatattgatggctacactacacctggaccaagagccgattttggagatagactcgctcgacccatcctggatctagctgacttggcacagaccccaacagaaatttt

SEQ ID NO: 54190 - DNA, 169 bp, Zea mays
cctagatccgccgcactcagttccggtgagaccctcctttccagcgaaaatgccgaacctcgagtgccggatgtatgagcagcggttcccggaggtggacgccgcggtgatgatccaggtgaagcacatcgctgacatgggcgcgtacgtctcgttgctcgagtacaac

SEQ ID NO: 54191 - DNA, 167 bp, Zea mays
ggcaccatggctttcctctggctcctctcctgctgggccctcctgggtaccaccttcggctgcggcggtccccgccatcccaccctgtgctcagcggcctgtccaggatcgtgaatggggaggacgccgtcccggctcctggccctggcaggtgtccctgcaggaca

SEQ ID NO: 54192 - DNA, 167 bp, Zea mays
cttctacgacgtgccagcggggcggcgggacggccgcgtgtccaacgagacggaggccaacgacaacctgctggggccggacagcacggcggagatcctcatcgacggcttcgggaagaagaacctgagcatcgaggacatggtggtcctgtccggctcccacacca

SEQ ID NO: 54193 - DNA, 269 bp, Zea mays
gctgtatgcccagatcgaggctcaaacagtttacggagcccttcatgctttggagacatttagtcaactgagcagctttgacttcaatgcaaacctgatcgaacttcattcagctccatggactatcctggacgctcccagattcccttaccgagggttctcatcgatacttcaaggcactatcttcctgtcccagtgataaaaggtgtgatcgactcaatgaccttcagcaagctgaacgttcttccattgcataatctggacgagca

SEQ ID NO: 54194 - DNA, 284 bp, Zea mays
ccgacatcgtcccttcgtccccacgagcaaccgataatccgccggcgttgagatgttggtttatcaggatctcctatctggcgacgagctcctgtcggattcattcacctacaaggagctcgagaacggcgtcctgtgggaggtcgagggaaagtgggtcacccaaggtcctgttgatgtggacattggtgccaatccatccgccgagggtggtgaggacgaaagcgttgatgacacagctgtgaaggtggttgatattgttgacacattccgtctacaggagc

SEQ ID NO: 54195 - DNA, 242 bp, Zea mays
accgcacctaccattctggagaggagaggaacagagccaagaaacaagcccggaagatggcaggcggcggggtggtgaagcacatcctgctggcaagcttcaaggaggacgtgacgcaggagcgcctggacgagctcatccgcggatacgccgcgctcgtcggcgtggtcccctccatgaaggccttccactggggaactgatgtgagcatagaaaacatgcatcaagggttcacgcacgtc

SEQ ID NO: 54196 - DNA, 239 bp, Zea mays
gcaatccaatctagaagctcccctctccctccctccctctctctctctctcttcgccgtccgaagctccgcacgcaatctaatcgacacctcagcgagatgggccgcaagttcgtcgtcggtggcaactggaaatgcaatggaaccacagatcaggtcgagaagattgtcaaaaccctgaatgaaggacaagttccccttcagatgtgctcgaggtcgttgtcaaccctccttatgtcg

SEQ ID NO: 54197 - DNA, 282 bp, Zea mays
gaagaccagttcccctctcctgatcgtcctgttcctcacagcagcagccatggcggccgagccggagaagcaggcggcccccgcggcacaggagacggccgtgcacatcgtgtacgttgaccgccccgaggacgccgaccctgaggagttccacatccgcaccctcacccccgtcctcggcagcgaacagaaggccagggacgcagtgctctaccactacaagaacgccgccagcggcttctccgcgaagtcgaccccccagcaggtcaaggatctcaagga

SEQ ID NO: 54198 - DNA, 162 bp, Zea mays
ggaacagccaagcccgactacgcaacctgtgtgaagatctccactgatgcttccatcaaggagatgattcctccgggcgctctggtcatgctgactcccctcatcgttggaaccctctttggcgtcgagactctctccggcgttcttgctgaggccctggtt

SEQ ID NO: 54199 - DNA, 258 bp, Zea mays
gcctgagcggaccagtttctgctacactctaccttggctattccctgatcatggcccttgcaatcatgctctccactggcgccattggtttcctgctctccttctacttcgtccactacctcttctcgtctgttaagattgattagaggtgtgccccgctgcctctttctgcaatagagtcatctgatcatggtaatagttaccctcttagaaatactacacaataaatcaagtggaaaaagtggatatttggcaacg

SEQ ID NO: 54200 - DNA, 265 bp, Zea mays
gaggcctctcaagcgagagctatcccaagctccaggatttctataactccaccagttacgttgatgagcttctatgggcagcgagttggctctaccacgccacaggcgaccagacgtatctcagctatgtaactgtacagaacgggaaaagttatgctgattggggaaggccaacatggttcagttgggatgacaaaaatccaggcacacaggtgcttttgtccagactacatttcttcgggtccaaacagagatctaatgccga

SEQ ID NO: 54201 - DNA, 278 bp, Zea mays
gtttgcactgccaaaatgaacctgagcgatgaggttgatttggaagattatgtttccagaccggataagatcagtgctgctgatattgctgctatctgccaagaggctggcatgcatgctgtccgcaaaaaccgatatgtcatcctccccaaggactttgaaaagggctaccgaaccaacgtgaagaagcccgagacagactttgatttctacaaatgagtcaacccagagtgttgaactcgtttctttctgcaaatgagtcaacccagagtgttgaa

SEQ ID NO: 54202 - DNA, 268 bp, Zea mays
gagcgcgttctccgtctccgtctccgtccgcccggcgtaaagaaaagcctccctcaccacagccgccacgccatggccgaggagaccgacaccaggcctgcctccgcgagctcccgaggccgccccgcgcccgaggacgacgacagggaggagggcgagatcaccgacatcgcctgcgctccttccccgcccgccacgcacccgctcgagcaatcctggaccttctggttcgacaacccgcagaccaagtccaagcaggcgcctgggg

SEQ ID NO: 54203 - DNA, 279 bp, Zea mays
ggaaaagattgatcgccgttctggtaaaaagctggaagatggccctaaattcttgaagtctggtgatgctgccattgttgatatggttcctggcaagcccatattctttttggagcttctcagactatccacctttgggtcgctttgctgttcgtgatatgagacagacagttgcggtgggtgtcatcaaagcagtggacaagaaggctgctggagctggcaaggtcaccaagtctgcccagaaagctcagaaggctaaattgatatgatctctaatac

SEQ ID NO: 54204 - DNA, 248 bp, Zea mays
cgatgtcgaagcgaggacgtggtgggtcctctggtgcgaaattcctgatttccttgggacttccggtaggagctgtaatcaattgtgctgacaacacaggagccaaaaacctgtatatcatctccgtgaaagggatcaagggacggctgaacagatttcccgctgctggtatgggtgacatggtgatggccacagtcaagaacggcaaaccatagctcagaaatatagtgcatccagcagtggtcatt

SEQ ID NO: 54205 - DNA, 268 bp, Zea mays
agcacacaccagctcgccggagatcacacgaagatacaagaccgtgctcctcgacgccgcccgacatggcggacgccgcctctggccgcggccacgtcgtctaccctccccgctccgccgaggacatcttcaaggactaccgcgcccgccggtccgccatcctccgcgccctcactcacgaggtcgaggacttctacgcgcagtgcgatccagacaaggagaactgtgcctgtacggctacgcgaacgaggcgtgggaggtggcgctg

SEQ ID NO: 54206 - DNA, 263 bp, Zea mays
gaagcttccaaccacctggaagtatgagtcaaccacagcgagcactctggtggcctaagtgtggtatcctccgagagcttgttctagatatgaatttgtgtcatgcttcttatgtctcgatccggttacatggacaacggagctcatcttttgttatgtttaccgtgagaatcccgtagaccattttggggttttgaattgtctgttaaacgtaacatgcatatgttttgaagcctagggtgagctttaacttcaccgaagag

SEQ ID NO: 54207 - DNA, 269 bp, Zea mays
gggttttcgcgccgccgccgccgccgcttcgtcgtctccgccgcagcgatgccgtcgcacaagaccttccggatcaagaagacgctggcgaagaagatgcgccagaaccgccccatcccctactggatccgcatgcgcacggacaacaccatcaggtacaacgccaagcgcaagcactggcgccgcaccaagctcggcttctgagcgcgcggatcggccggctcctgcgtcggaattctaggggctctacctttcctttggttttatcg

SEQ ID NO: 54208 - DNA, 249 bp, Zea mays
agccgccaccaggtgcagagtctttcgtcatctcttctccggcgaagaacccccagtcgcccaccagatcacttgttaaactttgttgaggggtgatggcggtttctttcgcaaacctcaactccgaggcagggcttaacaagcttgatgagtaccttctcactcgcagctacatcactggctaccaagcttccaaggatgacttggctgtctacactgccttttcggctgctccctcgtcccagtata

SEQ ID NO: 54209 - DNA, 251 bp, Zea mays
caaggaccttcggcgcccgttcaggatccacatcttcccgagcgagttcttggttgacctcttcccccttcggaccacctccaaggctcttggtgtagcttgccactctcaccaatcaagttttcatgtctgatctcgacattcagatcccaactgccttcgatcccttcgctgaggccaatgctggggactctggtgcggcacagggtcaaaggactacgttcacgtgcgcatccacagcgtaatgtcgc

SEQ ID NO: 54210 - DNA, 253 bp, Zea mays
ctccaaacacctacctctctacgaactacctgccgccggaaaaccctagagcgctcgaccatggatccgcagcagccggagcctgtcagttacctctgcggagattgcggactgagaacaccctgaagcccggagatgtcatccagtgccgtgaatgtggctaccgcatcctctacaagaagcggacccgccggattgtccaatatgaagcgcgctgaagagtgaagacaagggaaacactgaagatggttga

SEQ ID NO: 54211 - DNA, 273 bp, Zea mays
gcattcgggccgagatgtctcgctccgtggccttagctgtgctcgcgctactctctctttctggcctggaggctatccagcgtactccaaagattcaggtttactcacgtcatccagcagagaatggaaagtcaaatttcctgaattgctatgtgtctgggtttcatccatccgacattgaagttgacttaccgaagaatggagagagaattgaaaaagtggagcattcacacttgtctttcagcaaggcctggtctttctatctcttgtact

SEQ ID NO: 54212 - DNA, 229 bp, Zea mays
attttacaggttaaggacttgatgtgcctctgtgacaacgcatttaccagagaccagattctgaccaaggaaaaggccatcctggacatgctccattggaacctgacggttccaacaatgtacatgttcattgttaggtacctgaaagccgcaatgtgtgacacagagcttgagaacatgacattcttctactccgagctggcattggtccatacgcgatgctggttta

SEQ ID NO: 54213 - DNA, 186 bp, Zea mays
gtgttggtccaccacttccttgctgctatgtgaagcttgtctcatgggaagaaggtggttacaagatttctgattctccgatgccgagaggagaggtcgtggttggcggacacagtataacaaaaggttatttcaacaatgaagcaaagacgaacgaagtatacaaggttgatgagaggggcatac

SEQ ID NO: 54214 - DNA, 285 bp, Zea mays
gccagcagaagaagggatgcagcagccgatgcacatgcagccgcaggccggcgatagcccagctgccggaatcaccacggagcagatccaaaagtatctggatgagaataagcagcttattttggctattttggaaaatcagaacctaggaaaattggcagaatgtgctcagtatcaatcacaacttcagaagaacctcttgtatctcgctgcaatcgcagatgccccaacgcagactgctgtaagccgcactcagatggcgccgcctagtggatctcctggagt

SEQ ID NO: 54215 - DNA, 281 bp, Zea mays
actaactcgacccaagatttaataaagtcaaggtacccaaaaacaaacccatgggatataatgcttggcatgaacctctgggggaccatatataatgctgtaattatgtttgttgcgccattactattcagtaactggccatatgcaaatggttttgaggcattgagattttgcaaggagaacccagaggtggcctgggacattttcctattctgcctatgtggcgccgtggggcagaacttcatcttcttaaccatcagccggtttggctctcttactaa

SEQ ID NO: 54216 - DNA, 175 bp, Zea mays
gaaattggtagcagaagcagctgggtatggttcacagttggttttgtttccggaagtctttgttggtggctacccacatggatctacctttggactggttgtcggcaatcgcactgccaagggaaaggaagactttcagaagtatcacgcttctgccatagatgtgcctggtcca

SEQ ID NO: 54217 - DNA, 273 bp, Zea mays
caaagctcaaggaatttgcaaaggatttgccacctgagctcaaaggactggctatagtcaactgcgcaagattcgtatgttaaacaattcgtttgcgaggtcagaggcctctgaggagcagaaaccacctagcggggatgatgatgtataccatttcataaactacgttccagtggatggtgtcctgtacgagctcgatgggctaaaggaaggaccaataagcctagggaaatgcccaggtggtgttggtgatgcagggtggtggcttaggct

SEQ ID NO: 54218 - DNA, 275 bp, Zea mays
  unsure (1)..(275): unsure at all n locations
ggagatcccgtggggtgaggctggtgctgagtatgtcgtggagtccaccggtgtcttcactgacaaggacaaggctgctgcacatctgaagggtggtgccaagaaggttgttatctctgccccaagcaaagatgcgcccatgtttgttgttggtcaatgaggacaagtacacctccgatgttaacattgtttccaatgctagctgcaccacaaaactgccttgctccccttgctaaggtcatcatgacaanttgggcatattgagggctgatgac

SEQ ID NO: 54219 - DNA, 280 bp, Zea mays
caattcctccttcggatctcgcattcagcgcacgcacggtgtgaaggaagggggacgcggaggaagatggggctcgcgttcgggaagctcttcagccggctcttcgccaagaaggagatgcggatcctcatggtcggcctcgacgccgccggtaaaaccaccatcctctacaagctcaagctcggcgagatcgtcaccaccatccccaccatcggtattcaatgttgaaactgttgagtacaagaacattagcttcactgtctgggatgtcgggggtcag

SEQ ID NO: 54220 - DNA, 195 bp, Zea mays
ccaggacaaggagggcattccaccggaccagcagcgcctgatctttgctggcaagcagctggaggatggccgtaccctcgccgactacaacatccagaaggagagcaccctccacctggtgctccgcttgcgaggtggtatgcagatctttgtgcagaccttgactggcaagcccataaccctggaggttgagag

SEQ ID NO: 54221 - DNA, 276 bp, Zea mays
ctcagcttgaccctgcaccacacatctcggctaaagtgaacaactccagcctgataggtttaggctacactcagcctctaaagccaggtattaaactgacactgtcagctcttctggatggcaagaccgtcaatgctggtggccacaagcttcgcacaggactggactttcaagcataaatgaatactgtacaattgtgtaattttaaactattttgcagcatagctaccttcagactttagtgtatctttcaatgttgtatgtctgggatgcaag

SEQ ID NO: 54222 - DNA, 278 bp, Zea mays
cgttccggcggccgagccaggtttgctcgggtcttcgtgccagcgacgatgcaggacaagcgtgggttcgatgacgccggcgacgggcgccctgatgccaagcggctgcgcgctccggctctggccagtgttattgttgaagcgctaaaggtggatagactgcagaggctctgctcatcattggaaccaattcttcgtagagtagtcagtgaagaagtggagcgcgcactgggcaaacttggccctgcaacaatcggtggaaggccttccccaaagcg

SEQ ID NO: 54223 - DNA, 278 bp, Zea mays
cggctcttcgcggccccgcccgcgccgccgccgcgcccacgggaggcgcccgagacagagccgctccctcctcccgtgcagatgggggaggtctccgaggcggacctccgccagtacgacggctccgaccctaagaagccgctcctcatggccatcaagggccagctctacgacgtcacccagagcagaatgttctatggacctggcggaccttacgccctgttcgccggcaaagatgccagcagagctctagcgaagatgtcgtttgagccacagga

SEQ ID NO: 54224 - DNA, 281 bp, Zea mays
gcaaactgtcaggacggtaccggcggcactgcgggctcggcttcagtgaggtagaagatcatgatggagaaggtgatgtggctggggatgacgatgaggacgactctcctgatgctgagagtccagatgactcggacagcgattctgagtctgagaaggaggagtctgcagaagagctccacgctgctgcgcatcctgacgacacagaagacccgaagagcaaaaaagatgcgaagagcagttataagatgatgttcgtcaagtccagtggctcataacca

SEQ ID NO: 54225 - DNA, 240 bp, Zea mays
gctctatctctttcgccgagctcctcgaaaccctaggagcgtgcttgaccggcggcggcgaggtgatggcgatggaccctgacgcggtacgaaggccttcgtggagcattactagcgaacgttcgacaccaaccgcgcggcgctggttgggctgtaccaggagacctccatgctcaccttcgaggggccgacgttccagggcccctcggccattgcggcaaactcggatctctccctttc

SEQ ID NO: 54226 - DNA, 270 bp, Zea mays
cgggccatggcatggcatggagaccgccgatcctgcccgtgcattcgtgaaggacgtcaagcgaatcattatcaaggtgggcacggctgttgtcactggcatgactggccgattggccatggggaggctcggttctctctgtgaacaggtgaagcaactgaattttcaagggtatgaggtgattctggtaacctcaggagctgttggtgttgggaggcagaggctccaataccgtaaacttatccatagcagcttcgcagatctgcaaaa

SEQ ID NO: 54227 - DNA, 261 bp, Zea mays
cccgtcaccgcggcaaggtgaagtcattccctagggatgaccccaagccgccttgccatctcactgccttccttggctacaaggctggcatgactcacattgtccgtgaggttgagaagccaggatccaaactccataagaaggaaacttgtgaggctgttaccatcattgaaacccctcctcttgtcattgttgggctcgtggcatatgtgaagactcctcgtggcttccgcacactcaactctgtttgggcgcaacatc

SEQ ID NO: 54228 - DNA, 258 bp, Zea mays
gccgccgagtcgcgcggcggcggaggcttgggtgcgttcaagattcaacttcacccgtaagccaccgccatggcctaggaaggcattgctgctggaggtgtaatggacgtcaatactgcgttacaagaggttctgaagactgacctcatccacgatggcctagcaggtggaattcgcgaagctgccaaagccttatacaagcgccaagcccatctttctgtgcgtgcctccgactgttgatgagcctatgtatgtcaa

SEQ ID NO: 54229 - DNA, 271 bp, Zea mays
ccgcaagcaaatcctcctatctccaagcctccaatctgtgaacggtgaaccccaatcgaatgacgccgacgggagcctcctcctcccggctcccccattcgtctctatctccgatgtgcggctccgtacagacgcggatggtctcttctttcgttgggagcagaacacgccgcagaaacgttatatgtgcttccctgttcggagttggagctcccgaagcactggtcattggagtagtcgccttgttggtgttcggccccaagggtctagc

SEQ ID NO: 54230 - DNA, 272 bp, Zea mays
ccaagccacagcatgcatcttggagtcctagcaactgcatctcatgccatctccactggaactctcttttctgttttctacaaacccagaacaagtagatctgaatttgtcgttagtgtaaacaagtacctcgaagctaagaatcacaagatgtctgttggtatgaggtttaaaatgagatttgagggtgatgaatcccctgaaagaagattcagtgggacaattattggtatgggatgcatgccagctaactccacatctccatgggctaa

SEQ ID NO: 54231 - DNA, 273 bp, Zea mays
ggacctgcttctgcttgacgtcactcctctctctctgggtctggcgactgccggaggagtgatgaccgtccttatcccgaggaacaccaccatccccaccaagaaggagcaggtgttctccacctactcggacaaccagcctggtgtgttgatccaggtgtacgagggtgagaggacccggacccgcgacaacaacctgcttgggaagttcgagctctccggcatcccaccggctcctcgtggtgtcccccagatcacggtctgcttcgacat

SEQ ID NO: 54232 - DNA, 225 bp, Zea mays
cgataaggctgtgtggaaatatcgtaaggcagctcatcgatcacaaatgtggctggcttttcaaagaacctgttgatccagatctatatgggattccagactactttgatgttatccgcagtccaatggatttgggcactattaagaataaactcacaaaacagaaatatgtaagcattgaggagtttgcagcagatgtgaggctaacattttcaaatgctatga

SEQ ID NO: 54233 - DNA, 264 bp, Zea mays
cttttatactccaatctttatttaaccatctaatctgccagtttagcgttttccaccaactcggggagccgaaactttcacaggcttcacaatcttttgcttaggtgctgcctttgtaggtgccttagcagcagccattgcagtctttttagatgcttgcttagccttttttgcttccttagcagccctgatagcttgttctcgttgagcctttctaacttccggtttctgattcctcttggccattatatcagcaacagatgc

SEQ ID NO: 54234 - DNA, 259 bp, Zea mays
cagacaagggagtggagagtgttttcgacatcatggagatggaggatgaagaacggaacgcgttgcttcagctgactgacagccagattgcagatgtggctcgcttttgtaaccgctaccctaatatcgaactatcttatgaggtggtagataaggacagcatccgcagtggcgggccagttgtggtgctggtgcagctggagcgagaggaggaactcacaggccctgtcattgcgcctctcttcccgcagaaacgtga

SEQ ID NO: 54235 - DNA, 267 bp, Zea mays
ccagccgccgccatgtcgaagcgaggcaggggaggttcggcggggaacaagttccgcatgtcgctgggtctgccggttgccgcgacggtgaactgcgcggacaacacgggcgccaagaacctctacatcatctccgtcaagggcatcaagggccgcctcaaccgcctcccgtccgcctgcgttggcgacatggtcatggccaccgtcaagaaggggaagcccgacctcaggaagaaggtgatgcccgccgtcatcgtccgccagcgc

SEQ ID NO: 54236 - DNA, 272 bp, Zea mays
gctcccacttcccctcctctcccccaggtggcggcagcggcggcggggtagcatttgtgctacgagggcttttgcaatggcggcttcggggttcggcggcggcgaggcgttccggctctcggccgcaccaggggccggcttactgaagctgcacaagggcgacatcaccctctggtccgtcgactgcgccaccgacgccatcgttaatgctgctaatgagcgaatgttaggtggcggaggtgttgatggagctatacatcaagctgctggac

SEQ ID NO: 54237 - DNA, 256 bp, Zea mays
cagccgtcctccaaaagggtggactggtcgtctccaacgctggagactgccgtgcggtgctcagccgagcagggaaggcagaggcgctcacctctgaccaccgggcgtccagggaggatgagaaggaaaggatcgagaatttgggtggatttgtggtgaattaccgtggaacatggcgagtccaggggtatctggcattgacaattcccgatgtgggtagacactgccacagagacctagacgctcctggttgacc

SEQ ID NO: 54238 - DNA, 267 bp, Zea mays
cggtggtattggaactgtaccggttggtcgtgtggagactggtgtcatcaagcctggtatggtagtcacctttggtccaactggcctgactactgaggtgaagtctgttgagatgcaccatgaggcgcttcaggaggctcttccgggcgacaatgttggcttcaacgtgaagaacgttgctgtcaaggatctcaagcgtgggttcgtggcctccaactccaaggatgaccctgccaaggaggctgccagcttcacctcccaggtcat

SEQ ID NO: 54239 - DNA, 247 bp, Zea mays
cgcttgaaggtttctggtgatgtctggtttggttctggaattacgctcaagggcaaggtgacaatcaccgccaagtctggagtgaagttggagattccagacggagctgtatttgaaaacaaggatgtcaatggccctgaggatctttaagctatgcttgccgtcaccagtttttcccaaggacatgtcaataggagctgccaacccaaatcactcccgctgagctctaccttttgtaattctcgtg

SEQ ID NO: 54240 - DNA, 266 bp, Zea mays
tgttaagggacgcaccgaggaggggagcttcggcctggccttgcctggcgggctgcttgtcggcgccgtgctggtgtgcgttcttgtctctgtcaatctgctaggactgctcgtgcagagtgtcctctactacgagcgcacgccttccacagccagcagattgaccgcactgcattgtatgagcaccttggaggctaccttggggagtacgtgccactcaagagcaatatccagatggagaacctttgagagttggagcataggac

SEQ ID NO: 54241 - DNA, 266 bp, Zea mays
ccgaagacgttcggccaagggaccaaggtggacatgaaacgaactgtggctgcaccatctgtcttcatcttcccgccatctgatgagcagttgacatctggaactgcctctgttgtgtgcctgctgaataacttctatcccagagaggccaaagtacagtggaaggtggataacgccctccaatcgggtaactcccatgagagtgtcacagagcaggacagcaaggacagcacctacagcctcagcagcaccctgacgctgagcaa

SEQ ID NO: 54242 - DNA, 256 bp, Zea mays
caagggtgagctcctcagtttcttgattgagatcacggccgacatctttggtatcaaggatgacaagggtgaaggctacctggtcgacaaggtcctggacaagaccgggatgaagggaactgggaaatggacagtccagcaggctgctgagctttctgtagctgctcctacaatcgaggcgtccttggactccaggttcctcaccgtcttaaaggacgaccgcgttgaggcttccaaaatcttccaaggtggatat

SEQ ID NO: 54243 - DNA, 249 bp, Zea mays
ctcgtatcgcacgagtcgcatttgaggttgctcgcaagagaagagggagactatgctcggttgacaaagcaaatgtcttggaggcatctatgctttggaggaaaagggtgactgcactagcttcggaattccctgatattgagctctcacacatgtatgttgataatgctgcgatgcagcttgttaggaatcctaagcagtttgacacaattgtcacaaacaatatttttggtgacatattatctgatg

SEQ ID NO: 54244 - DNA, 263 bp, Zea mays
cagacttctgctgcagcgcctccgccgccgccgccgcatctaacgcattccctccgccgcagcccgaggcaagatggttctccagaacgacattgatctgctcaacccgccggcagaactcgagaagctcaagcacaagaaaaagagactcgtccagtcgcccaactccttcttcatggatgttaagtgccaggggtgcttcagcataaccactgttttcagccactcccagactgttgttgtgtgccctggctgccaaactg

SEQ ID NO: 54245 - DNA, 271 bp, Zea mays
ctcccctctccctccctccctctctctctctctcttcgccgaccgaagctccgcacccaatctaatcgacacctcaccgagatgggccgcaagttcttcgtcggtggcaactggaaatgcaatggaaccacagatcaggtcgagaagattgtcaaaaccctgaatgaaggacaggttcccccttcagatgttgtcgaggtcgttgtcagccctccttatgtcttccttcctgtggtcaagagccagctgcgccaagagttccatgttgctg

SEQ ID NO: 54246 - DNA, 269 bp, Zea mays
ccacccaccagaagccaagatgtccagcaagcgggccaaagccaagaccaccaagaagcggccacagcgggccacatccaatgtcttcgcaatgtttgaccagtcccagatccaggagtttaaggaggctttcaacatgattgaccagaaccgtgatggcttcattgacaaggaggacctgcacgacatgctggcctcgctggggaagagacccacagacgaatacctggagggcatgatgagcgaggccccggggcccatcaacttca

SEQ ID NO: 54247 - DNA, 269 bp, Zea mays
acaaagcctcagatctcagtcgcctgcgccgccgcttcgttcgtgtggaggggagaagacaggaaatggcggcgactgagggcgtgctcttggggatgggcaaccccctcctcgacatctccgccgtcgtcgatgacgccttcctgacaaagtatgacatcaagctgaacaatgctattctcgctgaggagaagcacttgcctatgtatgacgagttggctagcaagagcaatgttgaatatttgccggaggagccacccagaactcta

SEQ ID NO: 54248 - DNA, 268 bp, Zea mays
gaccgggagtagtcgacgcgccgtcactgaatcctcagatcacggctagccgtaatcacgccactctgctgactcccggcgagccatgggcaaggagaagactcacatcaacattgtggtcattggacatgtcgactctggcaagtcgaccaccactggccacctgatctacaagctcggcggtattgacaagcgtgtgattgagaggttcgagaaagaggccgcggagatgaacaagcggtcattcaagtatgcctgggtgcttgac

SEQ ID NO: 54249 - DNA, 257 bp, Zea mays
gaagcttccacccacctggaagtatgagtcaaccacagcgagcactctggtggcctaagtgtggtatcctccgacagcttgttctagatatgaatttgtgtaatgcttcttatgtctcgatccggttaaatggacaacggacctcatctttttttatgtttaccttgagaatcccgtaaaccattttggggttttgaattgtctgttaaacgtaacatgcatatgttttgaagcctagggtgagcttttacttcacc

SEQ ID NO: 54250 - DNA, 272 bp, Zea mays
cttgaaggacaagatattcatcaaagcaaccttggctggtcacctgtgtatgttgagtccaaccttggtgtgatgtcgattggtttcatgctgcctaatccagacgatgctgtcatatggaggggtccccgcaagaatggactgatcaagcagttcttaaaggatgtcgattggggggagattgactatcttgttgtggacgctcctccaggaacatctgatgagcacatctcgatcgtgcaataccttcaagccacaggaatcgatggcgc

SEQ ID NO: 54251 - DNA, 275 bp, Zea mays
ccttgacgggcagcccgggcagcgaccatgtttgacgtgacgcggctgccgtacgtagcgctcgatgtgctctgcgtgttgctggctggaatgccttttgcaattcttacttcaaggcataccctcttccaacgaggagtattctgtaatgatgaggtccatcacgtacccttagaaagaagacacgataccttatgcgttattaggtggaataatcattccattcaggattatcggtattatgcttggtagaaccatgtccgtatactgtaacc

SEQ ID NO: 54252 - DNA, 281 bp, Zea mays
gcaccaaggaccttcggcgcccgttcaggatccacatcttcccgagcgagttcttggttgacctcttcctcttcggaccacctccaaggctcttggtgtagcttgccactctcaccaatcaagttttcatgtctgatctcgacattcagatcccaactgccttcgatcccttcgctgaggccaatgctggggactctggtgcggcagcagggtcaaaggactacgtacacgtgcgcatccagcagcgtaatggtcgcaagagcctgactaccgtccaggga

SEQ ID NO: 54253 - DNA, 272 bp, Zea mays
cgagctcctcgcgtcctgcgagcgcgctccgcaacgtcaccatgaagttcaacatcgcgaacccttccaccgggtgccaaaagaagctggaaatcgatgacgaccagaagctgcgtgccttttatgaccgaaggatatcccaggaggtcagtggtgatgctctgggtgaggagttcaagggttatgtcttcaggatcatgggtggatgtgataagcaaggcttcccaatgaagcaaggagtgttgacttctggtcgtgttcgtcttctgctc

SEQ ID NO: 54254 - DNA, 247 bp, Zea mays
ctccgacacgccggaggaggccgcggagaggctcgctgacatcaaggccgccgccggcatcccgcaggagctcgacggcgacgtggtggccgtgccaaagaagcgggacagcgaggaggcgcgggtgtggaaggagctcatcctgtccccgaccccggccatgcgtcgcatcctcatctccggcatcgccatcaattcttccaacaagcgtccgggcatgaagccgtggtgctgtacacccgcgcgt

SEQ ID NO: 54255 - DNA, 273 bp, Zea mays
ggttgacaagggtttggttccattgcctggatccaacaatgaatcatggtgccaaggtcttgatggtttggcttcaaggtgtgctgagtactataagcagggggcgcgcttcgcaaagtggaggactgttgttagcatcccttgtggtccatctgcattagcagtcaaggaagcagcatggggacttgctcgatatgctgctattgctcaggataatggtttagtgccaattgtggagccagagattcttcttgatggagaccatgggatcga

SEQ ID NO: 54256 - DNA, 276 bp, Zea mays
gaggaaatgaagaaaaacgctcaagctgcaggagttactgctcattactacgaggatgagactgctcctactggcacatgtgctgtatgtgttgttggtggtgaaaggtcattgattgcaaatctgtcagcggcaaactgttacaaatctgagcatctaaagagaccagagaactgggcactagttgaaaaggcaaaatacatctacattgctggatttttccttacagtgtcgcctgattctatccagctagttgctgagcatgctgcagcaaat

SEQ ID NO: 54257 - DNA, 277 bp, Zea mays
ctttgaggtcaaggccacagctggtgacacccatcttggtggagaggactttgacaacaggatggtcaaccacttcgtccaggagttcaagaggaagaacaagaaggatatcactggcaaccccagggctctccggaggctgaggaccgcttgtgagagggcgaagaggactctgtcttccactgcccagaccacgattgagattgactcgctgtatgagggcatcgacttctactccaccatcacccgtgccaggtttgaggagctcaacatggac

SEQ ID NO: 54258 - DNA, 264 bp, Zea mays
gcttaattctatgaatctgttattgtacatggctccaattgctgttattttcttgcttcctgcaactatctttatggaggataatgttgttggcatcacaattcagcttgcaaagaaggatttcacgattgtttggttgctactgttcaattcttgcttgtcatattttgtcaatttgaccaatttcttggtgaccaaacatactagcgcactgactctacaggttctcggaaatgcaaagggtgccgtggcagtcgtcatctc

SEQ ID NO: 54259 - DNA, 265 bp, Zea mays
ccgacgcctccggctgcgtccgcgtctggcgccgctacggcgaccgcgcgctcaaggccgagtttcgccccctctcgggacgcgtcgacgacctccgctggtccccggacggcttacgcatcgttgtctccggggacggcaagggcaagtccttcgtccgcgcattcgtatgggactctggcagcacagttggtgagtttgatgggcactcaaagagggttctgagctgtgacttcaagccaacacgtccatttcgcattgtgac

SEQ ID NO: 54260 - DNA, 266 bp, Zea mays
ggccgtacccttgcggattacaacatccagaaggagagcaccctccacttggtgctgcgtctcaggggcggcatgcagatcttcgtgaagacacttactggcaagacaatcacccttgaggtggagtcctcggacaccattgacaacgtcaaggccaagatccaggacaaggagggcatcccaccggaccaacagcgcctgatcttcgccggcaagcagctggaggatggtcgcactcttgcggattacaacatccagaaggagag

SEQ ID NO: 54261 - DNA, 268 bp, Zea mays
cccataatgctttacaatccggctaagatccctgcattctctagggagtgccttagacaaaaggtcgccgttgttaccgtggcgtttccagcaacacctcttcttcttgctagggcacgcatctgcatttcggcttcacacactagggaggatttgatgaaagcccttgatgttatcagcagagttggtgatcttgtgggcatcaaatacttccctgcagaaccaccaaagattgctgaagctggtcatgataagctggagtaggagc

SEQ ID NO: 54262 - DNA, 268 bp, Zea mays
gcgagctcccttgtccccgcgtcacactcgcgcccaagcaagcggttgactgcaaaggaagcctcccctgatggctctcgtgacctcgggctcgggtgccgaccaggtgatcgccgaggtggcgatgaacggcggcgccgacccaagtgcaaccaccgtgcgtgctactgtcgtgcaggcgtccaccatcttccacgacacgcccgccactcttgataaagcagagagattgatagcagaggctgctgggtatggttcacagttagtt

SEQ ID NO: 54263 - DNA, 262 bp, Zea mays
gctctctgcgaggcaaccggagccaatgtctctgaggtggcttacgccgtgggcaaggacacgagaattggccccaagttcctgaacgccagtgttgggttcggtggctcatgcttccagaaggacatcctgaacctggtgtacatctgcgagtgcaacgacctgcccgaggtggccaactactggaagcaggtgatcaagatcaacgactaccagaagagccggttcgtgaaccgcgtcgtggcctccatgttcaacaccg

SEQ ID NO: 54264 - DNA, 264 bp, Zea mays
ccctgacgctcgacgcctctcctcctctcctcccccacccgtccatcgcccctccctccggtctgcgctcccacagcctcacccctgcgcccccgccgattcgcgtcgccctttgttggaaggaacgatggagcagaccttcatcatgatcaagcccgacggcgtccagcggggcctgatcggggacatcatcagtcgcttcgagaagaaagggttctacctcaaggggatgaagttcatgaacgtggagaggtccttcgcgca

SEQ ID NO: 54265 - DNA, 261 bp, Zea mays
ggtggcccaaccatggccgtcattgccctcaagtgcccagacattgaggtcgtcgtcgttgacatctccaagccccgcattgaggcctggaacagtgacaccctgccaatctacgagcctggtctcgatgctgttgtgaagcagtgcaggggcaggaacctcttcttcagcactgatgttgagaagcacgtcgctgaggctgacattatctttgtctcggtgaacacccccaccaagacccgtgggcttggagctggcaag

SEQ ID NO: 54266 - DNA, 267 bp, Zea mays
gaaaatcaagaagttttctaagccttacattgatcaaattgctgagattactaaaccacatgttgagaaaattagaactactctgaagccatacactaagagagcagttcatgcatatgggtcatttctcaagtcggcaaccacataccatcgacaggctcaagcaagcatcatggactaccttcaccagcgtgatataacaaaatcattggcaactaaggagttagtttggttcctggcttctgctttgctggctctgcctgtctt

SEQ ID NO: 54267 - DNA, 271 bp, Zea mays
ccaacgcgctcggcgcttcgccacccaaaaaggaaaaccaaccaccactcgcagcaccctccgactcagcctgcgtcacagctgccgattcgaaagccctcgtcctgacacctcgcaaaagcctagctccaaccaccatgaagggctaggccatcgcctccaagaaggatgagggcaggctccgggccggcggcggcggcgccataaagcgtaagaaggtcgtcgcgagcgtcatgctgaagcgcgctccctccgccttcttcgtcttcat

SEQ ID NO: 54268 - DNA, 266 bp, Zea mays
ccgaacccagacacaagtcttcactccttcctgcgagccctgaggaagccttctttccccagacatggccaacaagggtccttcctatggcatgagccgcgaagtgcagtccaaaatcgagaagaagtatgacgaggagctggaggagcggctggtggagtggatcatagtgcagtgtggccctgatgtgggccgcccagaccgtgggcgcttgggcttccaggtctggctgaagaatggcgtgattctgagcaagctggtgaaca

SEQ ID NO: 54269 - DNA, 263 bp, Zea mays
gagaagtgcatcattcagaaggagaacaacttcaagcaggctggcgagagatatcgttccttcgaccctgcaaggcaagaccggttcatccagcgatgggttgacgcactgacagaccctcgcgtgacccatgaacaccgtaccatttggatctcctactggtcccagtgcgacgccgctcttggccagaagctggcttctaggctgaacctgaagccgagcatgtaagatcgacgaggaagaaagcaggcaccggtggccaa

SEQ ID NO: 54270 - DNA, 262 bp, Zea mays
tttcatcgtccagcgcatatgatgatcagttcaagcagctcatttcggctggaaaggacgcggagagcgcttactgggaactcgttataaaggatatccaagatgcgtgcaaactttttgagcccatctacgatgagactgatggggctgatgggtatgtctccgtagaggtgtctcctaggttggcaaatgacactcaaggaactgttgaagcggcaaagtggttacacaaagtggtcaaccgccccaatgtctacataaa

SEQ ID NO: 54271 - DNA, 262 bp, Zea mays
cccagacacaagtcttcactccttcctgcgagccctgaggaagccttctttccccagacatggccaacaagggtccttcctatggcatgagccgcgaagtgcagtccaaaatcgagaagaagtatgacgaggagctggaggagcggctggtggagtggatcatagtgcagtgtggccctgatgtgggccgcccagaccgtgggcgcttgggcttccaggtctggctgaagaatggcgtgattctgagcaagctggtgaacag

SEQ ID NO: 54272 - DNA, 265 bp, Zea mays
ttcgccgttgtctaccagatcatcccatggcgtcggagaagaagcagtcgaacccgatgcgggagatgaaggtccagaagctcgtgctcaacatctccgtcggcgagagcggtgatcgcctcacccgcgccgccaaggtactggagcagctgagtggccagtcaccggtattctccaaggcaaggtacactgtgaggtcgtttgggatccggcgcaatgagaagatcgcatgctaatttgacggtgcggggtgagaaggcaatgc

SEQ ID NO: 54273 - DNA, 272 bp, Zea mays
ctccaatggcagaccttgtttatgaagttgaactcattggatttgatgatgttaaagagggtaaatcccgaagtgacatgacagttgaagagaggattgcagctgcagacaggagaaagattgagggcaatgcatatttcaaagaaaagaagcttgaggaggccatgcagcaatatgaaatggcgattgcatacatgggagatgatttcatgtttcaattatttggaaagtacagagacatggccttggctgtgaaaaatccatgccatctc

SEQ ID NO: 54274 - DNA, 253 bp, Zea mays
ctcgagtctcgtccacccgtcgtcctcctagctcctctactcgccagtcgccatgggcaagattaagatcggaatcaacggcttcggaaggatcggcaggctcgtggccagggtcgccctccagagcgaggatgtcgagctcgtcgccgtcaacgaccccttcatcaccacggactacagtacctacatgttcagtacgacaccgtccacggccactggaagcacagcgacatcacactcaaggactccaaga

SEQ ID NO: 54275 - DNA, 254 bp, Zea mays
ctcgagtctcgtccacccgtcgtcctcctagctcctctactcgccagtcgccatgggcaagattaagatcggaatcaacggcttcggaaggatcggcaggctcgtggccagggtcgccctccagagcgaggatgtcgagctcgtcgccgtcaacgaccccttcatcaccacggactacatgacctacatgttcaagtacgacaccgtccacggccactggaagcacagcgacatcacactcaaggactccaaga

SEQ ID NO: 54276 - DNA, 261 bp, Zea mays
cacgtccctcgccttcgccgccgaatccgagactccgatctcgggttcaccgcagcgcacagagcagccccgactcccggcccgatccgcgctctcctctccgtcgcttcagtcatggcaggaatggcacctgagggttctcagttcgatgctaagcactatgattctaagatgcaggagctgctgagcaccggtgagactgaggagttcttcacttcatatgatgaagtttttgagagttttgatgatatgggcctccaa

SEQ ID NO: 54277 - DNA, 293 bp, Zea mays
cgccgacaagtgctcgtacaagaacggcgacgtgtccggcgtcgtggaccagtggagcaagtggacggcgaggtaccccaagagccagctttacgtggggctcgccgcggccgagagcggcgtgccggaccacgcgccgccccccgttgaggtcacctcaaatacctctactacgatctgctgcccaaggtgcagaaggcgcccaactatggtggcgtcatggtctggaataggttcaccgacaacaggaccggatacagcggcgccgtcaagggctgggcggcttgcagcta

SEQ ID NO: 54278 - DNA, 288 bp, Zea mays
gcgacgacgactacccgagcttcgtgttcggcaactacatggaggtgtacgtcaagcagaagttccagcctaaggcgcccagatttgaagccatggccacgacgacgaccaagtgatgacctagcagcgactcagcgagagcctaaataaatattaattcacagtcgtcaagttaatcttgtggttatacggtacgggcggggcttgtacttatgtaggttgctaagtcttaagtgtgtagtttaattaacgtgtgtgtggaatgtacgcgtcatacaaatgtgttgg

SEQ ID NO: 54279 - DNA, 282 bp, Zea mays
caagaccaagcgcaccatccagttcgtggactggtgcccgactggcttcaagtgcggaatcaactaccagcctcccagcgtcgtccccggcggtgacctggccaaggtgcagcgtgccgtgtgcatgatctccaactccaccagtgttgtgaggtcttctcccgcatttgacacaagttcgacctcatgtacggcaaggggacttcgtgcacgggtacgtccgtgagggtatggaagaaggcgagttctccgaggctcgtgaagatctcgctgcgctccaga

SEQ ID NO: 54280 - DNA, 284 bp, Zea mays
caaaggcaaccaaaccatctcgactcgtggggaagtttcgctctcgcccgcgtcgacttcctagggttcgaggaacgtccgtccgtccgtccggggaaggagcaggagggaggcggagatgatcgaggtggtgctcaacgaccgcctgggaagaaggtgcgggtcaagtgcaacgaggacgacaccatcggcgaacctcagaagctggtggccgcgcaaatcgggaacccgccccgagaagatccgcatccagaagtggtacaacatctacaaggaccacatca

SEQ ID NO: 54281 - DNA, 127 bp, Zea mays
cgacatcgtcccttcgtccccacgagcaaccgataatccgccggcgttgagatgttggtttatcaggatctcctatctggcgacgagctcctgtcggattcattcacctacaaggagctcgagaacg

SEQ ID NO: 54282 - DNA, 291 bp, Zea mays
aggaattctgcaaggcatgcagaggaaacaaagttgtgcctggaaggaaatcagaccgccttgacatactgcctggtttggataatgaggataccataaaggtggttcgatcaggtggagaagacccagatggccgtccaggtgatctttatggaccctcgaggttcgtgaggatcctgttttccgaagagagaaaggtgatattcatgttgatgctgtcctgaatgtgactcaggcaattttgggagggacagttcaagtcccaactctcagtggagacgttgttctaaa

SEQ ID NO: 54283 - DNA, 251 bp, Zea mays
gaagcttcgacccacctggaagtatgagtcaaccacagcgagcactctggtggcctaagtgtggtatcctccgacagcttgttctagatatgaatttgtgtaatgcttcttatgtctcgaccgggttaaatggacaacggacctcattttttttatgtttaccttgagaatcccgcaaaccattttggggttttgaattgtctgttaaacgtaacatgcatatgttttgacgcgtagggggttttttcacc

SEQ ID NO: 54284 - DNA, 262 bp, Zea mays
gaaacctctcaaaccctagccgcctcctgcaagtttcagagctcaggaatctgcgccatggcgagtgagacggagaccttcgcatttcaggctgagatcaaccagctgctctcactcatcatcaacaccttctactccaacaagggatcttcctccgcgagcttatctccaactcttccgatgcgctggacaagatcaggttcgagagtctcactgacaagagcaagctcgatgggcacgctgagcttttcatccacttgtc

SEQ ID NO: 54285 - DNA, 283 bp, Zea mays
aatcgcgaatattttgcagaagagcatgataggagggccagagctggcatagactatgattcatcctatgggaaggctcgtccaaatgatacaattctgaagctacagaggacagcaccatattacaagaggaacagagctcatgttgcagtttctttgtgcgaggtgaatgtacaagaggagctgagtgcccttatcgtcatgagatgcctgaaactggggagttatctcagcagaacattaaagatcgctactatggagttaatgatccagttgcactgaa

SEQ ID NO: 54286 - DNA, 272 bp, Zea mays
ggaaaaggtcccggagagctgagcagtcaagatgtgtgacttcaccgaagaccagaccgcagagttcaaggacgccttccagctgtttgaccgaacaggtgatggcaagatcctgtacagccagtgtggggatgtgatgagggccctgggccaaaccctaacaacgccgatgtgctcaaagtcctggggaaccccaagagtgatgagatgaatgtgaaggtgctggactttgagcagtttctgctcatgctggagacagtggccatgaacaa

SEQ ID NO: 54287 - DNA, 289 bp, Zea mays
agccagtggtagaaacccaaaggagcattgtgatgcaatttcaagttcatataggacgctctgggctgacttagacatagtatatgacgagtctattcgcacaacggatcgtaagcatgaggctgttgtgaacgaattctattccagtgtgtaaacaatggcgacatatatagagctgattatgaaggactttattgtgtgagctgtgaagagtacaaggatgaaaaagagctattggagaacaattgttgccctgtgcatctgaaggcttgtgttgaaagaaaagaag

SEQ ID NO: 54288 - DNA, 288 bp, Zea mays
gagagattggagggaggcccctgcccaaggcaagagaaaccgcggcgcgcggagagggaggaagggcagacgcagacgcagacgggcgaacaagatgagggagatcatcagcatccacatcggccaggccgggatccaggtcggcaacgctgctgggagctctactgcctcgagcacggcatcgagcacgatggcaccatgcccagtgattcctcggttggcgtcgcacatgatgccttcaacacgttcttcagcgagactggttccggcaagcatgtgcccagggcc

SEQ ID NO: 54289 - DNA, 172 bp, Zea mays
ggcgaggcaaaagcgcaaacgcgaccacagacagagcgcgcttcaaggcctttattttttgagataacaaggaggagaggaggagatggcggtcacgatcacctgggtgaaggcgaggcagatcttcgacagccgcggcaaccccacgtcgaggtggacgtgggcctcagcg

SEQ ID NO: 54290 - DNA, 270 bp, Zea mays
atgatttgctgttgcaacaagatggatgccaccacacccaagtactccaaggcccgttatgatgagattgtgaaggaagtctcttcctacctgaagaaggttggatacaaccctgacaagatccacttcgttcccatctctggttcgaaggtgacaacatgattgagcagtccaccaaccttgactggtacaagggcccaacctacttgaggctttggacttgatcaatgagccgaagagccttcagacaagccctgcgtctcccctaca

SEQ ID NO: 54291 - DNA, 275 bp, Zea mays
attttattgattttgagtatgggtcatacagctaccgtggttatgacattgcaaatcatttcaatgagtatgcaggatttgattgtgactataatttgtaagttttctccatgtcaatgaaatactcaaaagcaattacggtgtcatgtttttagtcagcagtattcatttgattgtgtatttaggtacccagataaagatgcccagtatcacttcttcaggaattatctacaccctgatagacctagtgaggtatgtgaaacaaaaccaattga

SEQ ID NO: 54292 - DNA, 286 bp, Zea mays
  unsure (1)..(286): unsure at all n locations
atcgactcggtggaggacgatgttgtcatgaagctgtggcggcctaccatgaagctgctcctagtgactcttggagatcaagggtgcaagtactatgccagggatttccatggcgctgtgccttccttcaaagtacaacaagttgatcaactggcgcaggtgacgcgttcgttggtgctctgctccaaaggatcgttaaagatccatcctcgctacaagatgagaagaagcttgtggagtcgattaaattcgctaacgcgtgcggaangatcaccaccacgaagaa

SEQ ID NO: 54293 - DNA, 283 bp, Zea mays
gtccgtcctctccggtcggcgagagcaagaagagatcccgcgccgtcctcttctccaccgccacctccacccatggcggcctccaccttcagcggcgacgagacggcgcccttcttcggcttcctcggcgccgcgccgcgctcgtctctcctgcatgggcgccgcctacgggacggccaagagcggcgtcggcgtcgcctccatgggcgtcatgcgccccgagctcgtcatgaagtccatcgtccccgtcgtcatggcgggagtactcggcatctacggcctc

SEQ ID NO: 54294 - DNA, 283 bp, Zea mays
gatccgcaggcgcagcgtggcgatcgttgtcctctacagccatgtattcggctcctggcagagacttggggatggaaccgcacagagccgcgggccctttgcagctgcgattttcgccctacgttttcaacggaggtactatactggaattgctggagaagattttgcaattgttgcttctgatactcgattgagtgaagggttttcaattcatacacgggatagccccaaatgttacaaattaacaggcaaaacagtcattcgatgcagcggttttcatgga

SEQ ID NO: 54295 - DNA, 280 bp, Zea mays
cctggagatgcggtggagcggggtgagcatcgaggagtggtggaggaacgagcagttctgggtcatcggcggcgtgtccgcgcatctcttcgccgtcgtgcagggcctgctcaaggtcctcgccgggatcgacaccaacttcacgtcacctccaaggccaccggcgacgaggacgacgagttcgccgagctctacgccttcaagtggaccacactcctcatcccgcccaccacgctgctcatcatcaacgtcatcggcgtcgtggcgggcatctccgacg

SEQ ID NO: 54296 - DNA, 255 bp, Zea mays
atctcgcagcctcttctccccaaaccctaatcttgctcctgcctatctctgctccaatccgtcggtggagcggcggcgatggaggggaaggaggaaggtcggatcttcgtgggcggcctgtcgtggcaaacggacgagcgcaacttcaagaacgctttggtcgcttcggcaaagtcgtcgatgttcagatcatgctggagaggcacataaccgccacaagggctttggcttcgtgacattcggagatcgaagggc

SEQ ID NO: 54297 - DNA, 268 bp, Zea mays
gctgtatgcccagatcgaggctcaaacagtttacggagcccttcatgctttggagacatttagtcaactgtgcagctttgacttcaatgcaaacctgatcgaacttcattcagctccatggactatcctggaggctcccaattcccttaccgagggctcctcatcgatacttcaaggcactatcttcctgtcccagtgataaaaggtgtgttcgactcaatgaccttcagcaagctgaacgttcttcattggcatatcgtggacgagc

SEQ ID NO: 54298 - DNA, 279 bp, Zea mays
gaaaatcaagaagttttctaagccttacattgatcaaattgctgagattactaaaccacatgttgagaaaattagaactactctgaagccatacactaagagagcagttcatgcatatgggtcatttctcaagtcggcaacccataccatcgacaggctcaagcaagcatcatggactaccttcaccagcgtgatataacaaaatcattggcaactaaggagttagtttggttcctggcttctgctttgctggctctgactgtcttcattatatacagg

SEQ ID NO: 54299 - DNA, 281 bp, Zea mays
gccggcgttgagatgttggtttatcaggatctcctatctggcgatgagctcctgtcggattcattcacctacaaggagctcgagaacggcgtcctgtgggaggtcgagggaaagtgggtcacccaaggtcctgttgatgtggaattggtgccaatccatccgccgagggtggtgaggacgaaagcgttgatgacacagctgtgaaggtggttgatattgttgacacattccgtctacaggagcaacctccttttgacaagaaatcatttgtgtcttacatc

SEQ ID NO: 54300 - DNA, 254 bp, Zea mays
ccaggacaaggagggcattccaccggaccagcagcgcctgatctttgctggcaagcagctggaggatggccgtaccctcgccgactacaacatccagaaggagagcaccctccacctggtgctccgcttgcgaggtggtatgcagtctttgcgaagaccttgactggcaagaccataaccctggatgttgagagctccgacaccatcgacaacgggaaggcaaagatgcaggacaaagagggcatccccccaga

SEQ ID NO: 54301 - DNA, 276 bp, Zea mays
cttgggctaggctttcaagaaatctctgttgggaatgcaacaccagtgtggtataacatggtgaaacaaggtctcatcagcgaccctgttttctctttctggtttaaccgacatgctgatgaaggagaaggtggtgaaatttgtttggtggaatggattctagccactacaagggtgatcacacgtttgtcccagtcactcggaagggatactggcagttcaacatgggtgatgtcctggttgatggaaagtccactgggttttgtgccggtggct

SEQ ID NO: 54302 - DNA, 272 bp, Zea mays
ttcgccgttgtctaccagatcatcccatggcgtcggagaagaagcagtcgaacccgatgcgggagatgaaggtccagaagctcgtgctcaacatctccgtcggcgagagcggtgatcgcctcacccgcgccgccaaggactggagcagctgagtggccagtcaccggtattctccaaggcaaggtacactgtgaggtcgtttgggatccggcgcaatgagaagatcgcatgctatgtgacggtgcggggtgagaaggcaatgcagctgctgg

SEQ ID NO: 54303 - DNA, 275 bp, Zea mays
cgcatgcatgtcgtcgccaggaacaaagatcgagaaataatacaagaccagcacgcatgcatgggcatactctatatatatatatgtatagcccgtgcccgtgcccgcctttgtaccaatacaagccaaaccaagtggagtgtataatattaataatgcggtatcaccataaatgaacccctgcctgctacctgaagatggatgtgtatcgagttatcaaattaaggcacagcagcagaaactatatgtattgcataagaatactcgtctcgata

SEQ ID NO: 54304 - DNA, 279 bp, Zea mays
ataaaaggcttcgcggcccagggctcacttggcgctgagaacgcgggtccacgcgtgtgatcgtccgtgcgtctagcctttgcccacgcagctttcagtcatggcctccggtaacgcgcgcatcggaaagccagcccctgactcaaggccacagcggtggttgatggcgccttcaaagaggtgaagctgtcggactacaaagggaagtacgtggtcctctttttctaccctctggacttcacttttgtgtgccccaccgagatcatcgcgttcagcaac

SEQ ID NO: 54305 - DNA, 273 bp, Zea mays
  unsure (1)..(273): unsure at all n locations
gcttgcatcaagtgggcttgtggttctgtacatcaccattaatgtatttaagttgtattacggtgatgactggnagggtctttttgagtctatcactggctatggccttggtgggtcgtccatggctctctttggaaggttggtggaggcatctacacaaaggctgctgacgttggtgctgatcttgttggaaaggtcgagaggaacattcctgaggatgatcctaggaacccagctgtgattgctgataatgtcggtgacaatgttggtgac

SEQ ID NO: 54306 - DNA, 274 bp, Zea mays
  unsure (1)..(274): unsure at all n locations
gaggagatcccgtggggtgaggctggtgctgagtatgtcgtggagtccaccggtgtcttcactgacaaggacaaggctgctgcacatctgaagggtggtgccaagaaggttgtnatctctgccccaagcaaagatgccccatgtttgttgttggtcaatgaggacaagtacacctccgatgttaacattgtttccaatgctagctgcaccacaaaatgccttgctcccccttgctaanggtcatnnnngncaantttggnattattgagggctt

SEQ ID NO: 54307 - DNA, 259 bp, Zea mays
ctcgagccgcttctgacaccattgacaacgtcaaggccaagatccaggacaaggagggcaaccccccggaccagcagcggctcatctttgctggcaagcagctcgaggacgggcgcacacttgcagactacacctcaagaagagagcaccctccaacttggtcctcgccctcaggggtggcatgcagatcttcgtcaagaccctcactggaaagactatcaccctcgaggtggagtcttctgacaccatcgacaacgtc

SEQ ID NO: 54308 - DNA, 146 bp, Zea mays
gtcccggagagctgagcagtcaagatgtgtgacttcaccgaagaccagaccgcagagttcaaggaggccttccagctgtttgaccgaacaggtgatggcaagatcctgtacagccagtgtgggattgtgatgaggagcctggacca

SEQ ID NO: 54309 - DNA, 267 bp, Zea mays
cttgcctccatgccctcccccaatcgcctccgactccacctcccctccccggtctctgagagagggagcccggacccggagaccgccagcaagcgcgaggcagaggaggagcatggcggccccgccgtcgaggtcgcgggcgactacgaccacctgattaagctcctgctcatcggcgacaagagagttggaaagagttgcttgctgctgcggttctctgatgacacattcacgacaagttttatcaccaccatcggcattgatttc

SEQ ID NO: 54310 - DNA, 284 bp, Zea mays
atcgactacaatgacaagatcatctacactttccatgacgactcgagaagggataagccaagcagaggtggacggtacaccgtgtaagtcgcacacgaagatggtcgttgttcggactggacagaggctgagagtggagttttgtgctgagatcggcaccagctttcatttaatacagcctcagcttacctgaggcaattttcgcacctgttatgatggtgtgttgctctcagataggtttatgtagcacaagaaagatatgttggagacgttgacgattttgt

SEQ ID NO: 54311 - DNA, 284 bp, Zea mays
cgcatggcgctcgtattgcatagtggggctggaaacaagaatgccttcaaagcacttattgctgcagaatacagtgggatcaaggttgcgttgaccaaggattttgagatgggtgtctccaacaagacccctgagtttcttaagatgaacccccttgggaaggttcctgttctggagactcctgatggccctgtttttgagagtaatgctatcgcacgctatgttgctcgcttgaaggatgacaaccctctttttgggtcttcccgtattgaacaagccacgtt

SEQ ID NO: 54312 - DNA, 276 bp, Zea mays
cgggcctcgctgcaaatttggaccgggccaaggctggactgctggagcgtgtgaaggagctacaggccgagcaggaggaccgggctttaaggagttttaagctgagtgtcactgtagaccccaaataccatcccaagattatcgggagaaagggggcagtaattacccaaatccggttggagcatgacgtgaacatccagtttcctgataaggacgatgggaaccagccccaggaccatattaccatcacagggtacgaaaagaacacagaagctg

SEQ ID NO: 54313 - DNA, 280 bp, Zea mays
aaatattcagcaatcactggtgaaagctaatcttgctagctatgtaaagctagtagttccctgcaatgctgatgcttatcagagtgcttctgttccatctcaaggagtattcaggactgaattgactcagctaatgacccagctggctgcttttctgagttctagtggggctccatttgtcgtcaatatctatccattcctcagtctttatcaaaattcagatttcccacaagattatgcgttctttgaaggatctactcacccagtagtagatggtccg

SEQ ID NO: 54314 - DNA, 282 bp, Zea mays
ctgcgccgtccttcacctccgccgccgaatccgagactctgctctcgggttcaccgcagcgcacagagcacccccgactcccgtcccgatccgcgctctcctctacgacgcttcagtcatggcaggaatggcacccgagggttctcagtttgatgctaagcactatgattctaaaatgcaggagctgctgagcactggtgagactgaggagttcttcacttcatatgatgaaggttttgaacattttgatgaaatgggcttcaagagatcttttgagaggca

SEQ ID NO: 54315 - DNA, 284 bp, Zea mays
gcagtcgaagcaagtgtcaccgagactgccactaggcaactacaacgtcgctacggtcacgtatgagctcaccgtcctgcgcaacagggggccaaggagaatgcagtgcaccatgcactcgataccagccgagtgcatccaggagggcgggaaggccccaacccctaccggtaccgtccagccgcttgacgagccagtgcccaccttacctagtaccaccaaggggaaggaagtggccgtacaattttcttcgacgagcctcagcgccgatctatctggacctg

SEQ ID NO: 54316 - DNA, 179 bp, Zea mays
ctccagcattacaccaaagccttggaacttgacgacgaggatatttcctatctgactaaccgagcagcagtctacattgagatgggaaagtacgatgaatgcatcaaggactgtgctaaggctgtggagaggggaagagaacttcgtgctgatttcaagatgctttcaagggcactgac

SEQ ID NO: 54317 - DNA, 286 bp, Zea mays
gaacaacaagccgctgtcgccgagctacaagtacagccggaagatcccggtgaagacgtccaagtcggagtccatcagcaaggacatggtccggcgcggcttccgcttcgtcggacccactgtcatccactccttcatggaggcggtcgggctcaccaacgaccacctcgtctcgtgcccgcgccaccgcgtctgctcctcctcctccgccgccgcccgcgttaataataactgattctgctgacgaccatcaagcaaaacacaagagggaattatctaaggacaa

SEQ ID NO: 54318 - DNA, 282 bp, Zea mays
cgctgcttcaagaaaccaccgagagcccaaccgcacaggcaggagagagagcagggagccagggacagtagcgtggggccggggagcaacgatggaggggaaggaggaggacgtgcgcctgggcgccaacaagttctcggagcgtcagccatcggcacggcggcgcagggcccggcgccggggacgacgacaaggactacaaggagcccccgccggcgccgctgttcgagcccggggagctcaagtcctggtccttctaccgcgcgggcatcgcgagttcgt

SEQ ID NO: 54319 - DNA, 281 bp, Zea mays
gcgatatggcacatatcagtgggcttgttgcagcaaaggaatgtcgtagccctttcgactactgtgacgttgttacgtcaactactcacaagaatcttaggggccctagaggtggtataatattcttcaggaaagggaaaaatttaaggacacgagctggatctttttctcaaggagatgagaatgaatacgacttcgaggataggataacattttggtgtttttccttcaatgcaagggggacccataataatcatattgctgcttggctattactctga

SEQ ID NO: 54320 - DNA, 280 bp, Zea mays
ccaatctattgctcaaggtttctgtcaaaggaaacaatggcaatgagtcttctgttactgttcggttgtatggaccaaatacagacttggtgattgatcggaaaagggaattgcaggcgataccgtatctctcagctgcagggttcggggctcggctgcttggaatgtttgacaatggagtagttcagtcattcatctatgctcgaacactgtcacctgcagacatgaaagaacctaaaatagcagctgaaattgccaaggagctacgcaaatttcatca

SEQ ID NO: 54321 - DNA, 276 bp, Zea mays
ctcggaggaggccaaggtgcaacttccttcggtcgtcccgaatccgggttcatccgacaccagccgcctccaccatgccgccgaagttcgaccccaacgagatcaaagtcgtatacctgaggtgcacggagggaagtcggtgccacttctgccctggcccccaagatcggccccctgggtccgtctccaaaaaaagttggtgatgacattgccaaggcaacgggtgactggaagggcctgaggattacagtgaactgaccattcagaacagacagg

SEQ ID NO: 54322 - DNA, 275 bp, Zea mays
tgcagatctttgtgaagaccctgactggaaaaaccataaccctggaggttgagagctcggacaccatcgacaatgtgacggcgaagatccaggacaaggagggcatccccccggaccagcagcgtctgatcttcgccggcaaacagctggaggatggccgcaccctagcagactacaacatccaaaaggagagcaccctccaccttgtgctccgtctccgtggtggtcagtaagtcatgggtcgtttaagctgccgatgtgcctgcgtcgtctgg

SEQ ID NO: 54323 - DNA, 274 bp, Zea mays
gaacagagcgaggcgacgcgcggcacctcttctccggcgaagggaaatggcaaccgttccaggggatctgatctggcaggttgtgaggaagaacaactccttccttgtgaagcagttcggcaacggcaatgccaaggtgcagttcaccaaggagccgaacaacctctacaacatccactccttcaaacactcgggtttggcgaacaagaagactgtgacgatccagccagctgcaaaggactcggctgtggtcctctctactaccaagaccaag

SEQ ID NO: 54324 - DNA, 281 bp, Zea mays
gaggaacgggctctgggcttggttctctcctcctggagcgcctgtctgttgactatggcaagaagtccaagctcggtttcaccgtgtacccatccccccaggtgtccacatccgtggttgagccatacaacagtgtcctgtccacccactctctcctcgagcacactgatgttgctgtcctgctcgacaatgaggccatctatgacatctgccgccgctcccttgacattgagcgcccaacctacaccaacctcaacaggcttgtgtcccaggtcatctca

SEQ ID NO: 54325 - DNA, 287 bp, Zea mays
gctgctgtggccacaatcaagaccaagcgcaccatccagttcgtggactggtgcccgactggcttcaagtgcggaatcaactaccagcctcccagcgtcgtccccggcggtgacctggccaaggtgcagcgtgcagtgtgcatgatctccaactccaccagtgttgtggaggtcttctcccgcattgaccacaagttcgacctcatgtacgccaagcgcgccttcgtgcactggtacgtcggtgagggtatggaggagggcgagttctccgatgctcgtgaggatct

SEQ ID NO: 54326 - DNA, 281 bp, Zea mays
gattgacaagcacatgtatcatgacatgtacatgaaggtcaaaggtaacgccttcaagaacaagagggtgcttatggagagtatccacaagtccaaggctgagaaggccagagagaagacactttctgaccagtttgaggccaagcgcgccaagagcaaggcgagccgtgagaggaagatcgctaggagggaggagaggttggcccagggtccacgagaaataacaccacctgtctcatccacagctccagctactggggcacgaagaaagcaagaagtga

SEQ ID NO: 54327 - DNA, 266 bp, Zea mays
ctacttcattgaagctccccttacacaccatgattccacagtctgcaaggtggttgtctactccggtgttgtgaaggcagatgccaagacacttagattcaaggataaggtgttgaaaaagggtgggttgtggagagatatatatggtattgatgaaaagagggttgctagcttggtaagggaggataaagtggacatacttgtggaacttactggtcacacagcaaataataagttagggacaatggcatgccgacctgctccta

SEQ ID NO: 54328 - DNA, 279 bp, Zea mays
ccgaaagcacccgcaccaatctctgcgtctcttcgtcttcggctgcgcggcgagcggcagagcggaggagcttgaggagatgttgtccggcgacatccccccgagccagaccatctacctcaacaacctcaacgagaaggtcaagacagaagaagtgaagagatcgctttatgccttgtgctcacagtatggaaggatactggatgtggtggccctgaaaacacaaaaactgagcgggcaagcatgggtggcgtttcacgaaattacagctgctaccaa

SEQ ID NO: 54329 - DNA, 271 bp, Zea mays
gcctcaccctgccgccggcgccccccaacccacgccaggacgccatcgacctccacaaggccttcaaagggtttggatgtgacagtacaacagtgataaacatacttactcatcgcgattcggtgcagcgtggactcattcaacaggaatacagggctatgtatcatgaggaactctcccaccgtatttcatctgaactcagtggaaaccacaagacagctatgtcgctgtggattcttgatcctgctggacgtgatgcaactgttttgag

SEQ ID NO: 54330 - DNA, 275 bp, Zea mays
ggagcattggagtaattgcatatattttgctttgtggaagccgccctttctgggcacgaactgagtcaggaatttttcgagctgtcctaaaagcagagcctagttttgatgaaattccatggcctaccctttctgctgaggcgaaagactttgtaagaaggctactcaataaggattaccgtaagcggatgactgctgcacaagccctctgccatccatggatccgtggcacacaggaagttaagattaatctagacatgataatctacaggctt

SEQ ID NO: 54331 - DNA, 282 bp, Zea mays
  unsure (1)..(282): unsure at all n locations
catatgagcagctgtcctctgaagccctggaggctgcccgaatttgtgccaataagtacatggtaaaaagttgtggcaaagatggcttccatatccgggtgcggctccaccccttccacgtcatccgcatcaacaagatgttgtcctgtgctggggctgacaggctccaaacaggcatgcgaggtgcctttggaaagccccagggcactgtggccagggttcacattggccaagttatcatgtccatccngcacaagctgcagaacaaggagcatgtgattg

SEQ ID NO: 54332 - DNA, 268 bp, Zea mays
cacaattcgcaccacattattgtcttgtgttgcccgcaacccaaagcggatcaaaccctagatctcgtccccgttcctccgatcctcatggattcctcctcctcctcgtccagcctgagccagcagcccgagttcgattacctcttcaagctgctgcttatcggcgactccggcgtcggcaagagcagcctcctcctccgtttcaccgccgactcctttgaggacctttcccccaccataggtgttgacttcaaggtgaagatggtta

SEQ ID NO: 54333 - DNA, 100 bp, Zea mays
gcggacatacatacaactagatctcccccaaatccattcgtcggcatctccgcttcaagatgcagatctttgtgaagaccctgactggcaagactatcac

SEQ ID NO: 54334 - DNA, 303 bp, Zea mays
gattgacaagcacatgtatcatgacatgtacatgaaggtcaaaggtaacgccttcaagaacaagagggtgcttatggagagtatccacaagtccaaggctgagaaggccagagagaagacactttctgaccagtttgaggccaagcgcgccaagagcaaggcgagccgtgagaggaagatcgctaggagggaggagaggttggcccagggtccacgagaaataacaccacctgtctcatccacagctccagctactggggcaccgaagaaagcaaagaagtgaagtattgaaataaagctgta

SEQ ID NO: 54335 - DNA, 299 bp, Zea mays
agatcggcaaggccaatcccgagcagtggtgcgaaacctcgagcgctcgcgccggtgaccataacaaagaggaagccgcggtagcactggtagcggcagcagtaagggggagatgtcgtcggcgttcagcggcgatgagaccgcccctttcttcggcttccttggcgcctccgctgcgctcgtcttctcatgcatgggggcggcgtacgggacagccaagagtggcgtcggcgtggcgtccatgggtgtcatgcgcccagagctcgtcatgaagtccatcgtgcccgtggtcatggctg

SEQ ID NO: 54336 - DNA, 162 bp, Zea mays
ggaatctttgagaccaagttccaggtggacaaagtcaacttccacatgtttgacgtgggtggccagcgcgatgaacgccgcaagtggatccagtgcttcaacgatgtgactgccatcatcttcgtggtggctagcagcatctacgacatgggcatccgggat

SEQ ID NO: 54337 - DNA, 296 bp, Zea mays
gctatagctagccagccatcctactgtcacacacacacacacacacagacaagtggtttccaaagccaagtgtgtgtactagcaaccaggcagctcgggcggcagcaggcagccatcatgtcggaggagaagcaccacaacttctccacccacaacaaaaggacgcggagcagcccgccggcgagtacgggtactccgagaccgaggtggtcaccgccaccggcgagggcgagtacgagaggtaccagaaggaggagaaggagcacaagcaccagcagcacctcggcgaggacggc

SEQ ID NO: 54338 - DNA, 295 bp, Zea mays
tctatgtcagtttctccattgctgcaatgtacggcatcgcagttgccgctcttggtatgctgagcacaatcgcaactggtcttgctattgatgcttatggtcccatcagtgacaatgctggtggtattgctgagatggctggaatgagtcacagaatccgtgagagaactgatgctcttgatgctgctggcaacaccactgccgctattggaaagggatttgccattggttcagctgctcttgtgtctctggcgctttttggtgcctttgtcagcagagctggagtgaaggttgt

SEQ ID NO: 54339 - DNA, 291 bp, Zea mays
gcatgctcctcctagctggtctgggcatgctctgctggattgcccaagatgatgggaggcactcctttggccactccggaggattcatctgtccgtttgttcccttgctgccggtaatgtgtatcctcataaatacatacttgttaataaatcttggtggcggcacgtggatgcgagtgggggtgtggctagtgatgggggtgttcgtctacatttactatggccgcacccacagctcgttgacggatgtcgtgtatgtccctgtggccgatgcgaatgagatatacgggt

SEQ ID NO: 54340 - DNA, 220 bp, Zea mays
  unsure (1)..(220): unsure at all n locations
gccaaaccctacataggcgccgccgcagganncccccgcatcgtcgccaaagatgcagatctttgtgaagactctgacggggaagaccatcactttggaggtagagtcctcggacaccatcgacaatgtgaaggccaagatccaggacaaggagggcatccccccggaccagcagcggctcatcttcgccggcaagcagctcgaggacggtcgcaccctc

SEQ ID NO: 54341 - DNA, 227 bp, Zea mays
gtttgtgcgcgcacgcaaatgtatttgcattattcctgatagcatctattcgttggccagatgattagagagctgaaaatatgttaagaacaataccatagagagaagttcctcagtgctctcgcagcttaaggagcaaacagcaacactttacttcgtttttaatacttaattatacccgcactgtttattactcgggctacttttgtgaacagcgactgtaatat

SEQ ID NO: 54342 - DNA, 154 bp, Zea mays
ccagcatggatgacatctacaaggctgcggtagagcagctgacagaagagcagaaaaatgagttcaaggcagccttcgacatcttcgtgctgggcgctgaggatggctgcatcagcaccaaggagctgggcaaggtgatgaggatgctgggcca

SEQ ID NO: 54343 - DNA, 292 bp, Zea mays
gagcaggaggcggacaaggtaagcagcaatcgcaggaaccctagcgccgccgcacccgcaggaatgggtatcgacctcgtcgccggtgggaggaataagaagaccaagcgcactgcgcccaagtctgacgatgtctacctcaagctcctcgtcaagctctaccgtttcttggtcaggaggaccaagagcaatttcaacgctgtcattctcaagaggcttttcatgagtaaaaccaaccgacaccaatctccaatgcgccgccttgtcaagtttatggaaggaaaggagaaga

SEQ ID NO: 54344 - DNA, 297 bp, Zea mays
ccaggcggccccactcactccgctgttgatatttcgtttggttctcctttccgtcttgtccgtcgccgaggccttcttcccctcgctccccagctccagcaggcagatcagatccatccaaccacgaacaggaaggaaggtagaaggcttaaggggctgaggttgacccttgagtcctgtcgcggtctcgtcgtcgctgaacccgaacgcgccgctcttcatcccggcggcgctgctgcaggtggaggacttctcgccgcagtggtgggacctcatcaccaccaccgcctggttccg

SEQ ID NO: 54345 - DNA, 242 bp, Zea mays
tccggctcgagcccgcaacaatcggttctccagcccatagcacgcagccaagaaccgcatccagcaccccagcatcgatctcaacttcttcaacgccccgctggaggtgaccgaggagaacttcttagagatctgcgatgagctgggagtgaagcggccatcttctgtgaaagtattctcaggcaaaagtgagcgcagtcctctggactgctttagtgggaatccagagcgatgccctggag

SEQ ID NO: 54346 - DNA, 297 bp, Zea mays
cacaaaactctcgctccctctcgcagacgcgcctaggtctagctagggtctggtctcgctgccccgctgcgcgctcattcacaagcttctagacgttccgaggaggaggggaggtacccgccgccgcagccaacgcgtcgactaaggtccagcgtatcatgacccagcccatcaacctcatcttccggttcctacagagcaaagcgcgcatccagatctggctcttcgagcagaaggacctccggattgagggtcgcattatcggattcgatgagtacatgaacttggtcctcgaag

SEQ ID NO: 54347 - DNA, 292 bp, Zea mays
cagttgtgtcctgtgcaactgctttgatgcttgttcatatcatccccgacttattgagcgtgaaaactagagagttgttactgaagaataaagctgaagagcttgacagagagatgggactgataaggacgcaggaggagaccggtagacatgttaggatgcttacacatgaaatcagaagtactcttgacaggcatatcattttgaagactactcttgttgagctaggaaggaccttgggtctggaggaatgtgcattgtggatgccatctcgaagtggttcaagccttca

SEQ ID NO: 54348 - DNA, 112 bp, Zea mays
cctcgtcggatgatgatggcatgggcggaaggaggaagaagggacatcaaggagacgatcagagagaagctgcccggtggccacaatgacgaccagcacgctacggcgacga

SEQ ID NO: 54349 - DNA, 227 bp, Zea mays
cgccaccacacgcggatcgaattaggctctccgagtctccggttccctcctctcggcggcggctcaggtccctctaccatctccggcgtggcgcttggcgtctgacctcaacaagcaagaaagcaaatggcaggcgacagggttgcgcatgacccctctagcgccactattgtgaagaagaacttcaatggactgaccctgggtctgatcgcgggaggcatgtggaa

SEQ ID NO: 54350 - DNA, 297 bp, Zea mays
ctcaacgtcaccgcaactccgcaagtccgcaacctcctccttcccaccccttctcacgcgattcaagcggttcccattcggagccctaatcctctctttccatactcgtggacgccaccaccaccggcaggggaagcggaaggggagcacctcgggccaggcaagatggtgcttgcgcagctgggcgggagcatctcctccgccctggcgcagatgagcaacgccacggtgatcgatgagaaggtgctcaacgactgcctcaacgagatctcgcgcgctctcctacaggcccgatgt

SEQ ID NO: 54351 - DNA, 160 bp, Zea mays
gcttgtacgatcttatgatggtgatcacatttgctatgatcactttgctttccggacatttggggtcaatggttatggtataaactcactttctgattttttcactgattttggttatttacctcgcgaagaactcagatttccagctaaaaagcttagg

SEQ ID NO: 54352 - DNA, 287 bp, Zea mays
aagcatttaaacctgctcttaatattgctgaggtagacgaaatatttgatgtacccctggagatgttcctcaaggatgagaacaggacatcggaggagcgagaaaagatgggccagacattcacagttcattacttcacttatgagaacggaatccagaagtacttaatctggggtctgaccgcccgcatcttgatccatgctgcttcagttgtatacgagcgaccgccagactttacagagcgaagagcacattttaaattgccaatgttcacaaaggactgctct

SEQ ID NO: 54353 - DNA, 282 bp, Zea mays
ctcgagccgctcgcccgcatcgccgcagggttcgcaaagatggcagtgccgctgctgacacagaagatcgtgaagaagcgggtcaagcagttcaagaggccacacctcgaccgctacaagtgcctcaagccaagctggcgtaggcccaagggtattgactcccgcgtcaggcggaagttcaagggatgcaccttgatgcccaacattggatacggctctgacaagaagacgaggcactaccttcccaacaagttcaagaagtttgtcgttcacaacgtctct

SEQ ID NO: 54354 - DNA, 150 bp, Zea mays
ccgaacccagacacaagtcttcactccttcctgcgagccctgaggaagccttctttccccagacatggccaacaagggtccttcctatggcatgagccgcgaagtgcagtccaaaatcgagaagaagtatgacgaggagctggaggagcg

SEQ ID NO: 54355 - DNA, 291 bp, Zea mays
cgcacccttgcggactataacatccaaaaggagtctacgctccacctcgtgcttaggctccgcggtggaatcattgagccctctctgcaggcgctcgctcgcaagtacaaccaggacaagatgatctgccgcaaatgctatgcacgactgcaccctagggctgtcaactgccttcagaagaagtgtggtcacagcaaccagctgagggccaagaagaagatcaagaactgaggtgctgctcctagtcagtttcatggacaatgttgggctgtattgctgtgtggttgttga

SEQ ID NO: 54356 - DNA, 275 bp, Zea mays
ccgaaagcacatagatgccactctcggcagtggaaaccttagggaagctgtgaggttgcctcctggagaggatatcaatgaatggcttgcggtgaatactgtggatttctttaaccaagttaatatgctgtatggcacactcacagaattttgcacacctgagagctgtccgacaatgacagctggcccaaagtacgagtacagatgggctgatggtgtgcagataaagaaacccatagaggtatcagcaccagaatatgtggagtatctgatgg

SEQ ID NO: 54357 - DNA, 151 bp, Zea mays
gggacctggaattcttggaaacatttttgacggtatccagcggcctctaaaaaccatcgctattaagtcaggagatgtgtatattcctcgtggtgtttcagttcctgcccttgacatcgatgtattgtgggaatttcagccaacaaagcta

SEQ ID NO: 54358 - DNA, 289 bp, Zea mays
gggtttttgattttagccgccgccgctgctcatctcacatccctcgagaagacgcctgctcctcgccgatcgatacgatggccgtcttctccgacctccacaccgccgacggcctcaagtccctcgaggctcacctcgccggcaaaacctatgtgtctggtgactccattactaaggatgacattaaggtcttcgccgcggtgccgtcgaagcctggcgctgagtttcctaatgccgcccgctggtacgagaccgtctctgcggctgtagcctcaagattccctggtaa

SEQ ID NO: 54359 - DNA, 151 bp, Zea mays
tccagttccactccgcctccgctgccggtcgccgactccgaaactccgacagtccgaccacaaggtcttgtgcgggatccacagaaggatgagtgaagaggataagactgctgcttctgctgagcagccgaagagggcccctaagctcaat

SEQ ID NO: 54360 - DNA, 149 bp, Zea mays
gagaaggcgtccgtctccaaggagctcaacgccaagcacaagaagatattggaaggtcttctacggcatcctgagaatagagaatgcgcagactgcaagtcaaagggtcctcgatgggcaagtgtgaatctagggatctttatatgcat

SEQ ID NO: 54361 - DNA, 267 bp, Zea mays
  unsure (1)..(267): unsure at all n locations
ttttgcactttattactgtcagcaacgatacaactggcctccggagctaagttttggccaggggagcaagctggagatcacacgaactgtggctgcaccatctgtcttcatcttacccgacatctgatgagcagttgaaatctaganattcctctgttgtgtgcctgctgaataacttctatccctgatatgacaaagtacagtggaaggtacataacgccctccaatcgggtaactcccaggagagtgtcacagagcaggacagca

SEQ ID NO: 54362 - DNA, 155 bp, Zea mays
aataaagcagctcctccgcggggcggcgaactgctactcatcgccaaaaccctagccccgatccggtcgaggagcactacttcttggcatggcgggcacccctagccaggcaagcctcctgctccagaagcagctcaaggatcttgcgaagaacc

SEQ ID NO: 54363 - DNA, 277 bp, Zea mays
actacttctaccaaatattccggaacagggccgaggcaagggcccttgagcgatccaggagagggcttggcgatgggtctgtcgggatgctccagtctctcactgtcgctgccctgtctggctgtgtcaatgtactgctcacaaacccgatttgggttgttgttacacggatgcaaactcacagaaaggcaaacaaacagcaaagacctcagggtttgaattgtgctcttgataagccccttgaagctgctacagctgaaaacgctccatacaaaac

SEQ ID NO: 54364 - DNA, 110 bp, Zea mays
atccgttgctcatctcagcagcaccggatccgtcacactgcaagttttgatcactgaactgtaagatggcatcagcagagctttcccgtgaggaaaatgtgtacatggcg

SEQ ID NO: 54365 - DNA, 274 bp, Zea mays
gtcagatattatgcttgtttgcttgttgccatctagtattctagtgtcgtattgttgtgctaccagttctgcattcaggctggaatcgctcttggagaattaacttcgctaagcgacctttacgacacccagtcgatagcgctgctattcctgatcggtgttgtttcagtcacaccggcgttgttgggcaaggacgaggcacaagaaacaccatcaaaaatggctgtaggcgcgtcgtgatcaccaatgcaccgagcacctgtacatatcaaca

SEQ ID NO: 54366 - DNA, 277 bp, Zea mays
cacgcaccaaacaccaccaccaaagaaggcgagaacgctccccttcccctccagtctccaggaccgtctcctcgcctgctcatctaccgctgctccccttctctgggctcggagaatcggagagaagcgcgcgcgaccatggcgtccagcgcctctcggttcatcaagtgcgtcacggtcggcgacggtgccgtgggcaagacatgtatgctcatctgctacaccagcaacaagttccccactgactacatacctacggtgttcgacaatttcagtg

SEQ ID NO: 54367 - DNA, 273 bp, Zea mays
gcatggcgctcgtattgcatagtggggctagaaacaagaatgccttcaaagcacttattgctgcagaatacagtgggatcaaggttgagttgatcaaggattttgagatgggtgtctccaacaagacccctgagtttcttaagatgaaccccctatgggaaggttcctgttctggagactcctgatgggcctgtatttgagagtaatgctatcgcacgctatgttgctcgcttgaaggatgacaaccctctctatgggatctccgtattgaac

SEQ ID NO: 54368 - DNA, 274 bp, Zea mays
ccgtccttcacctccgccgccgaatccgagactctgatctcgggttcaccgcagcgcacagagcacccccgactcacgtcccgatccgcgctctcctctacgacgcttcagtcatggcaggaataccacccgagggttctcagtttgatgctaagcactatgattctaaaatgcaggagctgctgagcactggtgagactgaggagttcttcacttcatatgatgaagtttttgaaagttttgatgacatgggccttcaagagatcttttgaga

SEQ ID NO: 54369 - DNA, 179 bp, Zea mays
gcctccaccctccagcgcctccaccctcctcgccgcctcactccctctgaggtcgcagatccgtccggttagacgaagccgcccgcacccatggcctccggtgagctcgcctgcacctacgccgccctcatcctcagcgacgacggcatcgccatcaccgccgagaagatcgccaccat

SEQ ID NO: 54370 - DNA, 272 bp, Zea mays
gcggggagccccgcttcatcgcagtgggctacgtggacgacacccagttcgtgaggttcgacagcgacgccgcgagtccgaggatggcgccccgggcgcatggatagagcaggaggggccggagtattgggaccgggagacacagatctccaagaccaacacacagacttaccgagagagcctgcggaacctgcgcggctactacaaccagagcgaggccgggtctcacaccctccagaggatgtacggctgcgacgtggtgccggacgggc

SEQ ID NO: 54371 - DNA, 271 bp, Zea mays
gggagcagaagccaaccggctcgtccgcccgttgcctgtcgtcgctatggccgccgtggaggtgtgcgtgaaggccgccgcggggaaccccgacacgctcggcgattgcccgttctcgcagagggtgctgctcacgctggaggagaagaaggtcccgtacgaggtgaagctcgtcgacctcggcaacaagcccgaatggtttctgaacatcagcccagagggtaaggtgcctgtgttcaacggtggagatggcaaatgcattctgattctg

SEQ ID NO: 54372 - DNA, 272 bp, Zea mays
cgcccttcgtgccgcccatcgtggtggagatcgcgtacctgcgcaccaggtccaccagcgcgcccaggtcgaacttgcgcatgatcacgatggtggagcccgcgcgcaggccggccagcagcaccgagttcagcgcgtagatgtggaacagcggcagcaggcacagcaccacgcggctcgagcgaaccgctgcggcagcgtcccgcttctggtttgcttgcctgttgccccccagatcttgccaactaattggaggcagccgactgatctcc

SEQ ID NO: 54373 - DNA, 162 bp, Zea mays
gacgcacgcagagccgcagagatccgtcacactgcaagttttgaaaactgaactgtaagatggcatcagcagagctttcccgtgaggaaaatgtgtacatggcgaactcgccgagcaggcagagaggtacgaggaaatggttgagttcatggagaaggtagc

SEQ ID NO: 54374 - DNA, 268 bp, Zea mays
ggcctgccagatatcagaagcactcggcaatgtctccaggcagtaaaagacgccgggtttgaggttgtttgggataaggatcttgctgaagattctcccttgccttggtacttgcccttggatccaagccgattctccctgagtagcttccgtttgacctctgtgggacgcatgattacccgcacaatggtcaaggccctggagtacgttggtcttgctccgcagggcagtgagagggtctctaatttcctggagaaggtgcagaagg

SEQ ID NO: 54375 - DNA, 266 bp, Zea mays
gccacctccatcctcgaatcgttccccaccatggcgtcgcagggatcctccgtcttcgccgcactcgagcaggccccggaggaccccatcctcggagtgaccgttgcctacaacaaggatcccagccccgtgaaggtcaacctcggggtcggcgcctaccggaccgaggaagggaagcccctagtgctgaacgtggtcaggcgcgccgagcaaatgttgatcaataatccgtcacgtgtcaaggagtacctaccaatcacggtctg

SEQ ID NO: 54376 - DNA, 208 bp, Zea mays
caaatcgagaaatggtccaaatttttcgatttgtgcgtgtcatccttgcgccgtcatcgatcgatcgccggaaaactaacccctaacgatgtctggagccggcgaggaggacaagaagcccgcggagggcggcgcccacatcaaccttaaggtcaagggacaggatggcaatgaggtgttctttcgcataaagaggtccacccagctg

SEQ ID NO: 54377 - DNA, 266 bp, Zea mays
gtgcagaaatggcacctcgaaaggggaaggaaaagaaggaagaacaggtcatcagcctcggacctcaggtggctgaccgagagaatgtatttggtctctgccatatctttgcatccttcaatgacatctttgtccatgtcactgatctttctggcaaggaaaccatctgccgtgtgactggtgggatgaaggtaaaggcagaccgagatgaatcctcaccatatgctgttatgttggctgcccaggatgtggcccagaggtgcaag

SEQ ID NO: 54378 - DNA, 271 bp, Zea mays
ggagtcctcagacaccattgacaacgtcaaggccaagatccaggacaaggagggcattccaccggaccagcagcggctgatcttcgccggcaagcagctggaggatggtcgcaccttggctgactacaacatccagaaggagagcaccctccacctggtgctccgcctcaggggtggtatgcagatttttgtgaagacattgactggcaagaccatcaccttggaggtggagtcgtctgacacaatcgataatgtcaaagccaagatccag

SEQ ID NO: 54379 - DNA, 270 bp, Zea mays
gggcttcaatgtcaagaatgtgtctgtcaaggatgttcgtcgtggcaacgttgctggtgacagcaaaaatgacccaccaatggaagcagctggcttcactgctcaggtgattatcctgaaccatccaggccaaataagcgccggctatgcccctgtattggattgccacacggctcacattgcatgcaagtttgctgagctgaaggaaaagattgatcgccgttctggtaaaaagctggaagatggccctaaattcttgaagtctggtga

SEQ ID NO: 54380 - DNA, 269 bp, Zea mays
tcgtggtgtgttcttgactccgctgctcgccatgtcttcgcacaagactttcaggattaagcgattcctggccaagaaacaaaagcacaatcgtcccattccccagtggattcggatgaaaactggaaataaaatcaggtacaactccaaaaggagacattggagaagaaccaagctgggtctataaggaattgcacatgagatggcacacatatttatgcggtctgaaggtcacgatcatgttaccatatcaagctgaaaatgtcacc

SEQ ID NO: 54381 - DNA, 267 bp, Zea mays
gctagttttcagtggattagctagcttggcaatatatatttaactaataaggcggcggtggcatggacgcgatcagcagcctgctgctgcaggagggctggaggaagggcccgtggacggcgctggaggacaggctgctcaccgagtacgtgcagcagcacggcgagggcagctggaactccgtcgccaagctcacagggctgcgccggagcgggaagagctgccggctgcggtgggtgaactacctccggccggacctcaagcggg

SEQ ID NO: 54382 - DNA, 265 bp, Zea mays
cggcaatgggctggtaccacctgctggaagaggtagcgaagaggtttaagctggcgacaggagcgttccagctcaaatacaaggacgacgaggacgagtgggtgatcctggcgaacgacgccgacctccaggagtgcgtggacgtcctggactcgatcggctcgcgcagcgtgaagctgcaggtgcgcgacctcccctgcctcgtcagcagctcgggcagcagcagctgctgcttgcaggtggaaggaagcgcctactcatgacg

SEQ ID NO: 54383 - DNA, 264 bp, Zea mays
ccatcatggcgcaggatcaaggtgaaaaggagaaccccatgcgggaacttcgcatccgcaaactctgtctcaacatctgtgttggggagagtggagacagactgacgcgagcagccaaggtgttggagcagctcacagggcagacccctgtgttttccaaagctagatacactgtcagatcctttggcatccggagaaatgaaaagattgctgtccactgcacagttcgaggggccaaggcagaagaaatcttggagagggtct

SEQ ID NO: 54384 - DNA, 269 bp, Zea mays
cagggttatggttttgttgagtttacaagccgtgcagctgcagaacgagttcttcagacatacaatggacaaatgatgccaaatgttgacttgacatttcggctgaattgggccagtgctggtgaaaagcgcgatgatactcctgaatatactatttttgttggggatttggctgcagatgttacagattacttgttacaagagacattcagggttcattatccctctgtcaagggtgcaaaagttgtgactgataattgacaatgcgc

SEQ ID NO: 54385 - DNA, 274 bp, Zea mays
tagggttttgctgctctccgaccccgagctccgaaggccgcagcatcaggcgaggcccccctcgcgtgtgaccgagatggcgctgccgaatcaggggaccgttgattaccccagcttcaagctcgtcatcgtcggcgatggtggaactggtaaaactacatttgtgaagaggcatctcactggagagtttgagaagaaatatgaaccaaccattggtgtggaagttcatccgttggatttcaccactaactgtggtaagatcagttctactgct

SEQ ID NO: 54386 - DNA, 260 bp, Zea mays
gcgctctccacttcgtcaagtaccagggcctcggcaatgacttcattatggtggacaacagggattcgtcggtgccgaaggtgacgccggaggaggccgcgaactgtgcgaccgaaacttcggcattggtgccgacggcgtcatcttcgtcatgccaggggtcaatgatgccgactacaccatgaggatcttcaactctgacggcagcgagccagagatgtgtggtaatggagtccgttgctttgctcagtttataggtg

SEQ ID NO: 54387 - DNA, 267 bp, Zea mays
gagggccgccgcaacttcaattaccgacgcagacgcccagaaaaccctaaaccacaagatggcaaagtgacaaaagcagccgatctaccagctgagtattcgtccgctcccgaggctgagcagggcggggctgagtaaatgccggcttaccatctctaccatcatccggtttagtcatccaacaagaagaaatatgaaattccagcaataagaaatgaacaaaagattggagctgaagacctaaagtgcttgctatttgcccgttga

SEQ ID NO: 54388 - DNA, 264 bp, Zea mays
ctgtgcagcagatctgaggtcccgggcgaccgtgaagcagcttcaatcgtcggcatggcgctcgtattgcatagtggggctggaaacaagaatgccttcaaagcacttattgctgcagaatacagtgggatcaaggttgagttgaccaaggattttgagatgggtgtctccaacaagacccctgagtttcttaagatgaacccccttgggaaggttcctgttctggagactcctgatggccctgtttttgagagaatgctatcg

SEQ ID NO: 54389 - DNA, 264 bp, Zea mays
agaccagcaccatggcggttggcaagaacaagcgccttacgaaaggcggcaaaaagggagccaagaagaaagtggttgatccattttctaagaaagattggtatgatgtgaaagcacctgctatgttcaatataagaaatattggaaagacgctcgtcaccaggacccaaggaaccaaaattgcatctgatggtctcaagggtcgtgtgtttgaagtgagtcttgctgatttgcagaatgatgaagttgcatttagaaaattca

SEQ ID NO: 54390 - DNA, 263 bp, Zea mays
cagtcccgatccgaagctgtgcctcgtaccatttcgatccaatggcgccgacgtcgaagctgtcgacgggcatcaagcgcgcttcgcggtcgcacgcgtaccatcgccgtgggctgtgggccatcaaggccaagaacggcggcgccttccccaaggccgacaaggccgccgccgccgtggaacccaagttctaccctgccgacgacgtcaagccccgcgttcccagcacccgcaagcctaagcctaccaagttaggtcgagca

SEQ ID NO: 54391 - DNA, 263 bp, Zea mays
caccttgtctctgaccgaagcactatgtgggttccaatttgttcttacacatctggacaacaggcagcttctcatcaaatcagaccctggtgaagttgttaaacctgaccaattcaaggcgattaacgatgaggggatgccaatttaccagaggcctttcatgaagggggagctgtacatccatttcacggtggagttccccgactcgctggcaccagagcagtgccaaggctctcgagacagtacttccaccaaggcttcat

SEQ ID NO: 54392 - DNA, 174 bp, Zea mays
attcgaggctctctggccagggcagcccttcaggagctccttagtaaaggacttatcaaactggtttcaaagcacagagctcaagtaatttacaccagaaataccaagggtggagatgctccagctgctggtgaagatgcatgaataggtccaaccagctgtacatttggaaaa

SEQ ID NO: 54393 - DNA, 291 bp, Zea mays
aaaaaatccccattcgttccccttctcgcctccacgagccttcacaaattgccctctcagatcttctcctaatcttactcaagccctagccaaatcccagacccatcccagccctagcgacaccaaccagctcgccagcgaccatggggaacccggagaagctgatgaatcagatcttcgacctcaagttcacctccaagtcgctgcagcggcaggcgcgcaagtgcgagaaggaggagaaggagcaggagcttcaaggtcaagaaggcgatcgagataggcaacatggac

SEQ ID NO: 54394 - DNA, 288 bp, Zea mays
ctcgagccgctcgagccggtttgacgcaagcagggacggggctgatgtccgtgggtacttcgcgtggtagattcctggacaacttcgagtgggctatgggctacaccaagaggttcggcatagtctacgtcgattacaaggacgggctctccaggcaccccaaggcatcggccctctggttctcgcgcctcctcaagggcgaggctgccgaaaaagctatagctagagatggcacatagactgagggaacagtccgcggcaagtacagaacattacatacacacattt

SEQ ID NO: 54395 - DNA, 159 bp, Zea mays
ggctcgtggtcccaagaagcatctgaagcgggtctcagctccaaagcattggatgctggataaattgaccggtgtgtttgctcctcgtccatccagcggtccctagaagttgagagagtgtctccccgtcatcattttcctgaggaccagagttaagta

SEQ ID NO: 54396 - DNA, 194 bp, Zea mays
  unsure (1)..(194): unsure at all n locations
atattttacatntttcgctccatgatgcgttatctgggtctggaaacccaaaccctcaaggatggcctggcgcatgggggaaccagcctgctggggcagggggctacccaggggcttcctatcctggggcctaccccgggcaggcacccccaggggcttatcctggacaggcacctccaggcgcctaccctgga

SEQ ID NO: 54397 - DNA, 158 bp, Zea mays
gcgcgaggtcgggcatgccgacctcaaggacgagcactggtggcccaagatgcagacggtgctcggagctcgtgaaggcctgcaccaccatcatctggatcgcgtcggcgctacacgccgccgtcaacttcgggcagtacccgtactgcgggtaacac

SEQ ID NO: 54398 - DNA, 172 bp, Zea mays
gttgttcggagcgcacacacacacaaccagatctcccccaaatccacccgtcggcacctccgcttcaagatgcagatctttgtgaaaaccctgactggcaagactatcaccctcgaggtggagtcgtctgacaccattgacaacgttaaggccaagatccaggacaaggagg

SEQ ID NO: 54399 - DNA, 203 bp, Zea mays
ccaatctagaagcacccctctccctctctctctcttcgccgtccgaagctccgcaccccaatctaatcgacacctcaccgagatgggccgcaagttcttcgtcggtggcaactggaaatgcaatggaaccacagatcaggtcgagaagattgtcaaaaccctgaatgaaggacaggttcccccttcagatgttgtggaggtcg

SEQ ID NO: 54400 - DNA, 107 bp, Zea mays
cagagctcagaaaaaaggtacatccagcagtggtcattcgacaacgaaagtcataccgtagaaaagatggcgtgtttctttattttgaagataatgcaggagtcata

SEQ ID NO: 54401 - DNA, 148 bp, Zea mays
caagcttccaaggatgacttggctgtctacacttcgttttcgtctgctccctcgtccaagtatatcaacgtagcaaggtggtttaatcacattgatgcgctcgtgaggctgagcggaattactgcagagggccaaggtgtgaaggtta

SEQ ID NO: 54402 - DNA, 245 bp, Zea mays
cgacgtaaagcttctgcatgagatgggtgtcgatgcctaccggatgtcgattgcctggcctcgacttatcccagatggtcggggagccgtgaatccgaaggggctggagtactacaacaatctcatagatgagctccttagctacggaatacagcctcacgtgacgatataccatttcgatttcccacaggctcttcaggacgagtacagcgggctgatcagtcccagattcatagatgacttca

SEQ ID NO: 54403 - DNA, 238 bp, Zea mays
cggtgctcctggacgccgttccgggggtggccaactccactgagaagctggcgccggccaacaacaactcggcgcgaaggttcccggtggtggacaaagtgaaggcggcgctggaggacgcctgccccggcgtcgtctcctgcgccgacatcctcgccctcgccgcagagatctcggtcgaactgtccggaggccaaagtgggcagtgcttcttgggaggctagacagcaagaaggcc

SEQ ID NO: 54404 - DNA, 225 bp, Zea mays
  unsure (1)..(225): unsure at all n locations
gcaagggctacaagatggtgactgatggaactgagaaccaccttgttctctgggatctccgcccccttggcttgactggaaacaaggtcgaaaagctatgtgatctttgccacatcacattgaacaagaatgctgtcttcggtgacagcagtgcattgtctncgggtggtgtccgcattggcgcgccagcgatgacctcgaggggtctactggagaaggatttcg

SEQ ID NO: 54405 - DNA, 272 bp, Zea mays
ctggcgaacgaattggtgcaaggtttttgttgactagcacaagtgaagtttatggtgatccgcttgagcatccacagaaggagtcatactgggggcacgttaatcctataggtgttaggagctgttacgatgaggggaagagaacagcagagactttaactatggactatcatcgtggtggtggtgttgaggtgcgtattgcccgtattttcaatacatatggtcctcgtatgtgcctcgacgatggtcgtgtggtcagcattttgttgcac

SEQ ID NO: 54406 - DNA, 279 bp, Zea mays
tttgagtgaagctcttcctggggacaatgtgggcttcaatgtcaagaatgtgtctgtcaaggatgttcgtcgtggcaacgttgctggtgacagcaaaaatgacccaccaatggaagcagctggcttcactgctcaggtgattatcctgaaccatccgggccaaataagcgccggctatgcccctgtaattggattgccacacggctcacattgcatgcaagtttgctgagctgaaggaaaagattgatcgccgttctggtaaaaagctggaagatggcc

SEQ ID NO: 54407 - DNA, 222 bp, Zea mays
gggcaacagcaggttcacttacactgttcttgtagatggctgctctaaaaagacaaatgaatggggaaagacaatcattgaatacaaaacaaataagccatcacgcctgcccttccttgatattgcacctttggacatcggtggtgctgaccaggaattctttgtggacattggcccagtctgtttcaaataaatgaactcaatctaaattaaaaaagaaag

SEQ ID NO: 54408 - DNA, 217 bp, Zea mays
gggagacctctcccacctcctcgccatcatcttgctactgctcaaaatctggaagtcccgctcgtgcgccggaatttcagggaagagccaggtcctgtttgctgtggtgttcactgcccgatatctggacctcttcaccaactacatctcactctacaacacgtgtatgaaggtggtctaaatagcctgctccttcaccacggtctggttgatttat

SEQ ID NO: 54409 - DNA, 264 bp, Zea mays
cgcgaagaacatctcgtggcggccttttcatatttcgacaaagatggtagtggctatatcacagtggatgaactacagcaagcttgcaaagagcataacatgccggactgttttcttgatgatgtcatcaacgaagctgatcaggataacgatggccgcattgactatggagagtttgttgccatgatgaccaagggcaatatgggagtcggtcgacggacaatgagaaacagcttgaatatcagcatgagggacgcacctgtg

SEQ ID NO: 54410 - DNA, 278 bp, Zea mays
gcaagatccccgacccggagtccaccgacaacgctgagttcaagatcgtgctcaccatcatccgcgacgggctcaaggctgaccccaagaagtaccgcaagatgaaggagaggcttgtcggcgtctctgaggagaccaccacgggtgtcaagaggctctaccagatgcaggagaccggcgccctcctcttccctgccattaacgtcaacgattccgtcaccaagagcaagtttgacaaactgtatggttgccgctactcgctccctgatggtctgatg

SEQ ID NO: 54411 - DNA, 175 bp, Zea mays
cgaacctgtttaagatgcttctcaagtaccggcctgaagacaaggctgcgaagaaggagaggcttctgaagagggcccaagctgagaatgaaggaaaaactgttgagtcgaagaaaccaattgttgtgaagtatggccttaaccatgtgacttacctcattgagcagaacaaggt

SEQ ID NO: 54412 - DNA, 217 bp, Zea mays
ccctgccgcctcaccgcctctctcaatctgataccgcagatccgtcgtccggtgagtggaagccgcacgaacccatggcctccggcgagcttgcctgcacctacgccgctctcatcctcagcgacgatggcatcgccatcaccgccgagaagatcgccacgatcgtgaaggcggccaacatcaaggtcgagtcctactggccggccctcttcgccaa

SEQ ID NO: 54413 - DNA, 151 bp, Zea mays
ggcttgctgacttggttgatcgtactgatgttcctgtaccggagaagcctgacactgaagatgaaaccttgctaaagaactggaaatggcacttgagggcagccaagaagaagaacagtgaaaggcattctcagagatgtgatgttgaact

SEQ ID NO: 54414 - DNA, 272 bp, Zea mays
attgacaagcgtgtgatcgagaggtttgagaaggaggccgctgaaatgaacaagcggtcctttaagtatgcttgggtgcttgacaagctcaaggctgagcgtgagaggggtatcaccattgatattgctctgtggaagtttgagaccaccaagtactattgcaccgttattgatgcccctggacaccgtgactttatcaagaacatgatcactggtacctcccaggctgactgtgctgtccttatcattgactccaccactggtggttttga

SEQ ID NO: 54415 - DNA, 270 bp, Zea mays
tctcgtttcttcctgtgagcgacactggtggagctgcgccgctctcaccttcaccggcgacgggcattcacaagtagtgatctcttgactaacggcgtagtggtgactaaagagccttgacaatgagcagcataggcacaggttatgatctgtctgtcaccaccttctctcctgatggccgcgtctttcaggtcgagtatgccacaaaagctgtcgacaacagcgggactgttgttgggatcaagtgcaaagatggcattgttctgggtg

SEQ ID NO: 54416 - DNA, 160 bp, Zea mays
cttgtttcaagagcgttctgctaatctacacttttattttctggatcactggcgttaccttcttgcagttggactttggggtaaggtgagcctggagaattacttttctcttataaatgagaatggcaccaatgtccccttcgtgctcattgctactggt

SEQ ID NO: 54417 - DNA, 163 bp, Zea mays
ttctcagccgccgccaatcccttcccgtgctccgcaaccgctgagtgagaagaagagtggccggcaagggcgatggccgtctatcggcatcgatctcggcacacgtactcttgcgtcggcgtgtggcagcacgaccgcgtgcagatcattgccaacgaccagg

SEQ ID NO: 54418 - DNA, 166 bp, Zea mays
tcctgttcgacagtcagccgcatcttcttttgcgtcgccagccgagccacatcgctcagacaccatggggaaggtgaaggtcggagtcaacggatttggtcgtattgggcgcctggtcaccagggctgcttttaactctggtaaagtggatattgttgccatcaat

SEQ ID NO: 54419 - DNA, 136 bp, Zea mays
ggataagaaggatgaggagggtaaggttgaggatgttgatgatgaaaaggaagaaaggctaagaagaagaagaagatcaaggaggtttctcatgagtggcaattggtaaacaagcagatgccaatctggttgagga

SEQ ID NO: 54420 - DNA, 158 bp, Zea mays
agcgtggggcacctccctcaaaaaggcctacaccttcgacaccgttgaggagttctgagcatgtatgatcagatttttcgtccaagcaagttgtctgggagtgctgatttcactctattcaaggctggagtagagccaaaatgggaagacccagagtg

SEQ ID NO: 54421 - DNA, 164 bp, Zea mays
gttctacaagaactggtgcaagagcaagaagaaggctttcacaaagtatgctctcaatatgaaaatgatgctggcaagaaggaaattcagctgcagcttgagaagatgaagaaatatgcttctgttatccgtgtcattgctcatacccagattgggaagatgag

SEQ ID NO: 54422 - DNA, 163 bp, Zea mays
gatccggcaagatggcagaagtagagcagaagaagaagcggaccttccgcaagtatccctaccgcggcgtggacctcgaccagctgctggacatgtcctacgagcagctgatgcagctgtacagtgcgcgccgcccggcgggctgaaccggggcctgcgggga

SEQ ID NO: 54423 - DNA, 163 bp, Zea mays
cagggacataaaggagaagcttgcctacgttgcccttgattatgaacaggagctgggactgccaggagcagctcctctgtcgagaagagctacgagatgcctgatggtcaggtcatcaccattgggtcagaaaggtttaggtgccccgaggtgctgttccaac

SEQ ID NO: 54424 - DNA, 99 bp, Zea mays
cttctctcatttctcaccaccgccgccgctaccccctttcgacaacaccatgaggagtgcatctacgatcacatcggccaggcggtatccaggtcggaa

SEQ ID NO: 54425 - DNA, 165 bp, Zea mays
cgcggaagcgtaagagctggcgaaactccctggcgacactgcttctaccttaaaagctggtggcaagctcattctaagtggccgtacccaaccgaggaagacaaggctcgactggtgcaggaaacagggctacaactgaagcagatcaataactggtttatcaac

SEQ ID NO: 54426 - DNA, 162 bp, Zea mays
cttgtttcattgattcttgaagagatcgagcttcttttgcaccacaaggtcgagatgtcttgcaactgcggtggcaactgcaagtgcgaacccctgcaactgctgatcacatcgatcgacgaccatggatatgattattatctatctagcttgtggtggtgg

SEQ ID NO: 54427 - DNA, 150 bp, Zea mays
gttacgttgccggtgtcttctgtgctattgtttctcactcggctgacaaccttggtctttcctgaacaatgccaagggagctacagtgggagatgctgataagaagcttggtgtctggggtctcttcactagaggacttcctcttcgtat

SEQ ID NO: 54428 - DNA, 163 bp, Zea mays
  unsure (1)..(163): unsure at all n locations
cagcagcagacacctccgccacctccaccctcgaatcgttccccaccatggcgtgctcggatcctccgtcttcgccgcactcgagcaggccccggaggaccccatcctcggtctcancgttgcctacaacaaggatcccagccccgtgaaggtcaacctcggg

SEQ ID NO: 54429 - DNA, 160 bp, Zea mays
caccttcgtctgcccgaccgagattactgcgtttagtgacagatacgaggaattgagaagttgaacactgaggttcttggtgtttccattgacagtgtgttctcccaccttgcatgggtgcagacagacaggaagtcgggtgggctcggcgatcttaaat

SEQ ID NO: 54430 - DNA, 158 bp, Zea mays
gcagagactacaatgtggacatggtgccaaagtttatgatggcaaatgggaattggttcgaaccctcatccacactgatgtgacaaagtacttgtcattcaaagctgttgatgggagctatgttttcagcaaagggaagatttacaaggtccctgcca

SEQ ID NO: 54431 - DNA, 160 bp, Zea mays
ggctggaaagcaccaagatgctgacattgaagacttcaaagctaagaagaagaactgcaagaaattgttcaaccaattatcagcaaactctatggaagtgcaggccctcccccaactggtgaagaggatacagcagaaaaagatgagttgtagacactga

SEQ ID NO: 54432 - DNA, 162 bp, Zea mays
cattatcgcaagaatgcatttgatgctggagaagatggacttggaaaaaatgctcattctcttaagaagggatgcgattgcttgggctacataaaatattttgatgcacatttcacaaacttcactggtggtgtggagacaattgagaactgtgtttgtttg

SEQ ID NO: 54433 - DNA, 155 bp, Zea mays
ggatatctgtgagttcctgaaccatgtggaggacgggctgaaggaccactacgacatccggatgctgaccttcatcatggttgcccggctggccaccctgtgtcctgcacctgtcctgcagagggtggaccgactcattgagccactaagggcca

SEQ ID NO: 54434 - DNA, 160 bp, Zea mays
tctggatcttgcacggtgcacaattgtgtccgagctctccaacaaggatttcgactcatatgtcctctctgagtcaagcttgtttatctatcctctgaagattgtcatcaagacctgtggcactaccaagctcctgctcaccattccaagaatccttgag

SEQ ID NO: 54435 - DNA, 92 bp, Zea mays
gttcctgttgggcgtgttgagactggtatcatcaagcctggtatggtgttacctttggtcctagtggccttactactgaggtgaagtctgtt

SEQ ID NO: 54436 - DNA, 154 bp, Zea mays
ggggtttcttcttttaatctgggactttgttgttgttggacgaatgattcccttcgatcggttagctttaatctgtctcgttagtgtgtcgtgttcgtgtagcaccatgccacagctacgccatgccgtgtgctctgtcacgtgggggccactc

SEQ ID NO: 54437 - DNA, 158 bp, Zea mays
gcctgttgtatcgattgagcgagcagttttctaccgtgagaaggcagcgggatgtactctccgttatccggtgcatttgctcagacatgtgtggaggtcatctacaccatcttacaggggatactgtacacagtcatcatatatgcgatgatcggata

SEQ ID NO: 54438 - DNA, 131 bp, Zea mays
caagaaagctattaaggctgcttccgagggtccactcaagggtatcatgggttatgtggaagaggatctggtttctaccgacttccttggtgacagcaggtcgagcatcttcgacgccaaggccgggatct

SEQ ID NO: 54439 - DNA, 262 bp, Zea mays
gaggcgtcgtcgtttgatctgctgccggagtgcgagaggaagaggaagaggagcgccggagttgtaaagatgttcctggtggactggttctatggggtgctggcatcgcttgggctgtggcagaaggaggctaagatcctcttccttggcctcgacaacgccggcaagaccaccctcctccacatgctgaaggacgagcggctcgtacagcaccagccgacgcagtaccccacgcagaagagttgagcatcggcaggatcaa

SEQ ID NO: 54440 - DNA, 259 bp, Zea mays
gagagaaggtcaaatatccccaaaccctagctccgatctcgatggcgaaccctcgcgtcttcttcgacatgaccgtcggcggcgcaccagcgggccggatcgtgatggagctgtacgccaacgaggtgcccaagaccgcggagaacttccgcgcgctgtgcacggacgagaagggcgtgggcaagtccgggaagccgctgcactacaagggctccaccttccaccgcgtcatcccgagttcatgtgccagggcggcgac

SEQ ID NO: 54441 - DNA, 263 bp, Zea mays
gtctaagttaggctagggttcgaccagctagcgaaatggtggccttcaggttccatcagtaccaggtggtggggcgcgcgctgccgacgcccggcgatgagcaccccaagatctaccgcatgaagctctgggccaccaacgaggtccgcgccaagagcaagttctggtacttcttgaggaagttgaagaaggttaagaagagcaacggccaggtcctggccatcaacgagatcttgagcgtaacccgacgacaatcaagaact

SEQ ID NO: 54442 - DNA, 261 bp, Zea mays
cgccaagcagtacgccgaggagtacgatgcccaggagaaggaactggtacagcttaagcgtgaggcccgtttgaagggtggtttctatgtcagccctgaggcaaagctgctatttgtggtccgcatccgtggtatcaatgccatgcaccctaagaccaggaagatattgcagcttctgcgtttgaggcagatcttcaatggagtgttcctgaaagtcaacaaagcaaccattacatgcttcgcagggttgaaccttatgtt

SEQ ID NO: 54443 - DNA, 258 bp, Zea mays
aatctactgcatgccaccacgaccttgtttcaagggttctgcaccaatcaatctttccgatcgtcttaatcaggttctccgttgggctcttgggtcagtggaaattctgcttagtagacattgtcctatctggtatggttacaatggacgattgaagctttttgagaggctggcttacatcaacactattgtatatccaatcacatccattccgcttattgcctattgtgtgttcccgctatctgcctccttaccaat

SEQ ID NO: 54444 - DNA, 239 bp, Zea mays
aaccttctctcctgtcaacagcggccagcctcccaactacgagatgctcaaggaggagcaggaagtggctatgctgggggtgccccacaaccctgctcccccgatgtccaccgtgatccacatccgcagcgagacctccgtgcctgaccatgtggtctggtccctgttcaacaccctcttcatgaacacctgctgcctgggcttcatagcattcgcgtactccgtgaagtctagggaca

SEQ ID NO: 54445 - DNA, 212 bp, Zea mays
gccgccgcttgtgctgcagccatgtctctagtgatccctgaaaagttccagcatattttgcgagtactcaacaccaacatcgatgggcggcggaaaatagcctttgccatcactgccattaagggtgtgggccgaagatatgctcatgtggtgttgaggaaagcagacattgacctgcaccaagagggcgggagaactcactgaggatgagg

SEQ ID NO: 54446 - DNA, 263 bp, Zea mays
ctcgagccgtgttgaaggtgttgaggctaaatatggcaggtccctgaaattctctctgacagaagtgcttggaaagatgggcgcgccccctaagcccgacgtgccagtcatcacaccgcaggaacttgcagaggctgacggtatcctctttgggtttccgacaaggttcggaatgatggcagctcagatgaaggcgttcttcgatgccaccggtgggctctggagggagcagacctcgctggcaagcctgccggcatgttctt

SEQ ID NO: 54447 - DNA, 266 bp, Zea mays
aaccttctctcctgtcaacagcggccagcctccaactacgagatgctcaaggaggagcaggaagtggctatgctgggggtgccccacaaccctgctcccccgatgtccaccgtgatccacatccgcagcgagacctccgtgcctgaccatgtggtctggtccctgttcaacaccctcttcatgaacacctgctgcctgggcttcatagcattcgcgtactccgtgaagtctagggcaggaagatggttggcgacgtgaccggggcc

SEQ ID NO: 54448 - DNA, 142 bp, Zea mays
gtcgacaaggtctgtagtatagtgaaggagcagctggctcttcccgatgggactgctatcactggtgaatcaaaattcgccgaacttggtgctgattcactggatacggttgagattgtgatgggcctcgaggaggcgttca

SEQ ID NO: 54449 - DNA, 259 bp, Zea mays
cgagcccatggcggaccagctcaccgacgaccagatcgccgagttcaaggaggccttcagcctcttcgacaaggacggggatggttgcatcacgaccaaggagctgggcactgtcatgcgctcgctggggcaaaatcctacagaggctgagctccaggacatgatcaacgaggtcgatgctgatggcatcggcaccatcgatttcccagagtttctcaaccttatggctccaagatgaaggacaccgactctgaggaag

SEQ ID NO: 54450 - DNA, 245 bp, Zea mays
gtttttgagggacaagaagagcaagttgagctggaggtgttcaacttcactggtgccggaggagttgccttatcaatgtagaacactgacgagtccatccatgcctttgctgacgcgtctatggccactgcttatgaaaagatatggccattgtatctgagcaccacaaacactatgttgaagaaatatgatggcaggttcaaggacattttccaggaggtgtatgaactggttggacaaccaaa

SEQ ID NO: 54451 - DNA, 121 bp, Zea mays
ggcacgacgagcagaggcccccccccggagctgtgcggagcaattgacggcgggataccgggcggaagacgactacgactacctcttcaaggtggtactaatcggcgactccggtgtcggc

SEQ ID NO: 54452 - DNA, 176 bp, Zea mays
cagctctccctcaggtttagtgttcgaaatggcggccttcaacaagcttggtggccttctaaggcacagtgctctggtgaacggtatcactggtggctcttctcctgcagtgttcaatggtgcacggctcatgtctaccaaactattgattggtggtcttgactggggtgttgatg

SEQ ID NO: 54453 - DNA, 257 bp, Zea mays
ccctactgctgctacacaagaccctgagactgacctgcaggacgaaaccatgaagagcctgatccttcttgccatcctggccgccttagcggtagtaactttgtgttatgaatcacatgaaagcatggaatcttatgaacttaatcccttcattaccaggagaaatgcaaataccttcatatcccctcagcagtgatggagagctaaagtccaagagaggatccgagacgctctaagcttgtcaaggagttcattag

SEQ ID NO: 54454 - DNA, 187 bp, Zea mays
gacaagcacatgtatcatgacatgtacatgaaggtcaaaggtaacgccttcaagaacaagagggtgcttatggagagtatccacaagtccaaggctgacaaggccagagagaagacactttctgaccagtttgaggccaagcgcgccaagagcaaggcgagccgtgagaggaagatcgctaggaggg

SEQ ID NO: 54455 - DNA, 251 bp, Zea mays
ttttgattaccttacgctatcagcatcattaatggtcaagtcctctgtgttcatggcggtctttctcctgatgtacgtactattgatcagatacgaacaattgatcgcaattgtgaaattccccatgaaggtcctttctgcgaccttatgtggagtgaccctgaggagatagagacatgggctgttagtccccgtggagcaggttggctgtttggatcgcgcgtccagcagagttgcactttgttaacggt

SEQ ID NO: 54456 - DNA, 219 bp, Zea mays
cgacgtcaggcatatgtcgcgggaacgtacgccatcctggccaacaaggaggtgatcgccgtcaaccaagatccgctcggcgtgcaggggaagaaggtgcggatggagggcagcagcgagatctgggccgctccgctctccgagtaccggacggcggtgctgctcctgaaccggcacgcaaaggacgagcctacatcacgcgcactgggacgactgggc

SEQ ID NO: 54457 - DNA, 251 bp, Zea mays
gtttttgagggataagaagagcaagctgagctggaggtgttcaacttcactggtgccggaggagttgccttatcaatgtacaacactgacgagtccatccatgcctttgctgacgcttctatggccactgcttatgcaaagaaatggccattgtactcttagcaccaaaaacactattttgaagaaatatgatggcaggttcaaggacattttccaggaggtgtatgagctggttggaaaaccgaatttga

SEQ ID NO: 54458 - DNA, 248 bp, Zea mays
ctctcccactcgccttcctcaccgcagctctcccggctcggtcgacttcgccacctccgtcctccccccgcgctcggtcgctcgccacctgctctcccctccctccacgttgctcgcgcccgcgcttatataagtgcaggaggagctcatggcggacgctccggcgagccctgagggcggaggcgggagccacgagcttccggagccccaggggcgccggaggtggaccggtggcagcgtcagggagc

SEQ ID NO: 54459 - DNA, 255 bp, Zea mays
gtgatgttcaagaaccaactgaaccgaggatgaccttgacattatgcttggcaataaaaagaagaaaaagaagaatgttaagttcccagatgaggatgaaatactagagaaagatgaagctctagaagatgaagacaacaaaaaagatgatggtatctcattcagtaatcagacaggccctgcttgggcaggctcagaaagagactacacatacgaggagctgctgatcgagtgttcaacatcatgagggaaaag

SEQ ID NO: 54460 - DNA, 106 bp, Zea mays
ggacaagcctcagccgccacctgagggccgtcttcctgatgccaccaagggttctgaccacctgaggcaagtctttggcaagcagatgggtttgagtgatcaggac

SEQ ID NO: 54461 - DNA, 257 bp, Zea mays
ggagtccacacaggcagacttgaccttgaccagatagtcttcaagatgctcaacttaggcggaggcgcaaaatgtggagcctgtgaaaagaccgtctaccatgcagaagaaatccagtgcaatggaaggagtttccacaagacgtgtttccactgcatggcctgcaggaaggctcttgacagcacgacagtcgcggctcatgagtcggagatctactgcaaggctggctatgggcgcagatgatgggcccaaaggat

SEQ ID NO: 54462 - DNA, 208 bp, Zea mays
cttcacagttacctcaaaggcatctgatgaggatggcgactttgatgagctatatgtgttcaagtggaccagtttgctcatccctccgaccactgttcttgtcattaacctggtcggaatggtggcaggaatttcgtatgccattaacagcggctaccaatcctggggtccgctctttggaaagctgttctcccgaacctgggtgatc

SEQ ID NO: 54463 - DNA, 253 bp, Zea mays
ctggcccgaacatggttgtagacatgtgcaagggagtgcagtatctcaatgaaatcaaggattctgttgtggctggtttccagtgggcatcaaaggagggtgcactggctgaggagaacatgcgtggaatttgctttgaggtctgtgatgtcgttcttcatgctgatgctatccacaggggtggtggtcaggtcattcccactgccaggagggtcatctatgctctcagctcacggccaagccaaggctgctg

SEQ ID NO: 54464 - DNA, 234 bp, Zea mays
taagagtgatgtatatagttttcgggttgttcttcttgagctgttgactgggaggaaacctgtcgaccatacattgccaaggggacagcagagtcttgtgacctgggctacaccaagacttagcgaagacaaggttagacagtgtgttgactcaagacttggaggggactatcctcctaaagctgttgcgaagtttgcggctgtcgccgccttgtgtgtgcatacgaagcggac

SEQ ID NO: 54465 - DNA, 251 bp, Zea mays
cctcgcgccaccgtcgccgccgctgcagcgagccaccgccctgccgtcgcctgaggtagacaccaagccaccgccatggggcgtatgcacagccgcgggaagggtatctcttcatcggcgctgccgtacaagaggactcctccgatctggctcaagacagctaccaccgaggtggaggagatgattaccaaggctgcgaagaagggccagatgccgtcgcagatggtgttctgctccgtgaccagcacggc

SEQ ID NO: 54466 - DNA, 195 bp, Zea mays
caaagaacgatccttggtgaaacctatacccactggttgagcaactggaaccaaaccaagcggcaaaggtcactggaatgcttttggagatggatcagactgaggtcctccacctgattgagtcccctgatgccctcaagtcaaaggttgctgaggcgatggatgttctccacaatgtggcccatagagcaaaac

SEQ ID NO: 54467 - DNA, 277 bp, Zea mays
agcatggccacttcaccaagcgccccgaggagataggagctggtgaccagggacacatgttcgggtatgcgaccgatgagacccctgagttgatgcccctcagccatgtccttgcaaccaagctaggtgctcgtctcaccgaggtccgcaagaacggaacctgcccctggctcaggcctgatgggaagacccaggtgacagtcgagtaccgcaatgagggtggtgccatggtccccatccgtgtccacaccgtcctcatctccacccagcacgacga

SEQ ID NO: 54468 - DNA, 277 bp, Zea mays
ctacactcccggcggcggcgcaggagcagcagcacccgaggatgcgtgaagttcctcaagcccggcaaggccgtgatcctcctgcagggccggttcgccggcaggaaggcggtgatcgtgcgcgtgttcgaggagggcacccgcgaccgcccctacggccactgcctcgtcgccggcctcgccaagtaccccaagaaggtggtccgcagggactcggccaagaagacggcaccgaagtcgcgcgtcaagtgcttcatcaagctcgtcaacttcaccc

SEQ ID NO: 54469 - DNA, 156 bp, Zea mays
aagcttgccaaggaggttgccgctgcttccgaggtatccggcgagaagttctggagactgccgctggaagagagctactgggagtctatgaagtctggcgtggctgatatggtcaacactggcggcaggcagggaggttctattaccgccgcgctg

SEQ ID NO: 54470 - DNA, 185 bp, Zea mays
agagactgagatggggggttttgtcaagacccacaagaccaatgcgtacttcaagcgtttccaggtgaagttcaagagaaggcgcgctggcaagacagactacagggccaggataaggctgattaaccaagacaaaaacaagtacaatacacccaaatacagattagttgtgccgatttaccagc

SEQ ID NO: 54471 - DNA, 233 bp, Zea mays
gagagtgttggagagggtgtgactgacgtagctccgggcgaccatgtccttcctgtgttcactggggagtgcaaggagtgtgcccactgcaagtcggcagagagcaacatgtgtgatctgctcaggatcaacaccgaccgcggtgtgatgattgccgatggcaagtcgcggttttcaatcaatgggaagcctatctaccactttgttgggacttcaaccttcagcgagtacac

SEQ ID NO: 54472 - DNA, 271 bp, Zea mays
cagaaaacccagccgccgccgcatcggcctcccatgtaagcaggaccgtccaccccagccgccgccatgaagcgcaacccccgtgtcacgagctcccgccggaagtgccgcaaggggcacttcacggccccgtcctccgtccggcgcgtgctcatgtccgcggcgctatcgacggagctccgccacaagtacaatgtgcgttccatcccgatccgcaacgacgacgacgtgcaggtcgtgcgctgcacctacaagggccgtgaggccaaag

SEQ ID NO: 54473 - DNA, 275 bp, Zea mays
tatggatgatgaatatgtgataattggatccgctaacatcaaccagagatccatggaaggaactagagatacagagattgcaatggctgcataccaaccccagcatacatgggcaaatatgctttctgctcctcgtggacagaacaacatgggaagaagtgatgatgacagtccatcgccgccaagaggtcacatgagaagaactcgcagcccaagtccttgtggtagttatggaggccatggcaagcgccccacaactaatcttatggtgacga

SEQ ID NO: 54474 - DNA, 270 bp, Zea mays
caacgatggggatgtcgccgtgctgcgagaaggcgcacacgaacaagggcgcgtggaccaaggaggaggacgaccgtctggtggcgtgcatcaaggcgcacggcgaagggtgctggcgctcccttcccaacgccgccggacttgtgcgctgcggcaagatctgccgcctccagtggatcaactacctgcggcccgacctcaagcgcggcaacttcacggaggaagaggacgagctcatcatcaagctccacagcctactcggcaacaaat

SEQ ID NO: 54475 - DNA, 272 bp, Zea mays
ctcgagccgcgacccactcgcccaaaaccgtagcgccctcgcctgctcgccgccgccgtcgatgcgagctccccatcttcctccgttaaccatggcgacccagatcagcaagaagaagaagttcgtcagcgacggcgtgttctacgccgagctcaatgagatgctgacgcgggagctcgcggaggacggctactccggcgtggaggtgcgtgtcacaccgatgcgcacggagatcatcatccgcgcaacgccacgcagaacgtgctcggcga

SEQ ID NO: 54476 - DNA, 271 bp, Zea mays
cactaccctccggtgatgaggaggaacgtcgggtccaggctgccgaccttcacggacgaggaggcggcgcgagttagggggtctttcgacttcgtcggattcaaccactacatcgtcgtctacgtcaaggctgaccttggccgcctagacgaccaagtgcgagactacatgggcgatgcagccgtgaagtatgacatgccgtttctcaagtcacgcaaccagttcccgttcggcgccttgacgagcgacttcatgacgtccaccccctggg

SEQ ID NO: 54477 - DNA, 266 bp, Zea mays
accttgactagctccgatctggtacgagatggccggcaagatgaaggagttagacggcgccagcctgccaagatcttcattggcgggctctccaaggatacaagcatgagtacattcaaagaacattttgggaagtatggggatataattgatgctgtcataatgaaggaccgctacacacaaaagcccagaggctttggctttattacttttgctgatcccactgttgttgacagagtgattgaggatgaacatgttatcaatgg

SEQ ID NO: 54478 - DNA, 267 bp, Zea mays
ctggtgccagattggatggtgcggaaatgcttgcctgtagcctggcaactcattttgtcccgtcaaagaggttgccattgcttgaggaatcgcttaaaaagctggacacgtccagtacttttgctgtgtcgggtattatcgaccagttttcacagaggccattagtgaaagatagcagctctttaaataggatggaaaccatcaacaaatgcttctccaaaaggacagttgaagagatcatagatgctcttgaacaagaaatctcaa

SEQ ID NO: 54479 - DNA, 268 bp, Zea mays
acagcccagccaagcactgtcaggaatcctgtgaagcagctccagctatgtgtgaagaagaggacagcactgccttggtgtgtgacaatggctctgggctctgtaaggccggctttgctggggacgatgctcccagggctgttttcccatccattgtgggacgtcccagacatcagggggtgatggtgggaatgggacaaaaagacagctacgtgggtgacgaagcacagagcaaaagaggaatcctgaccctgaagtacccgataga

SEQ ID NO: 54480 - DNA, 267 bp, Zea mays
ggagcacaagcacaagcagcacctcggcgaggccggcgccatcgccgccggcgccttcgcactctacgagaagcacgaggcgaagaaggaccccgagcacgctgataggcagcagatcacggaggaggtacgctgccgcgacggccgtcggcgccggcggctacgtattccacgagcaccacgagaagaagaaggaccacaaggacgccgaggaggccagcggcgataagaagcaccaccacctcttcggctgaccgtagtaccggc

SEQ ID NO: 54481 - DNA, 271 bp, Zea mays
gcgccgagagtttcaaggagttccacgccaacaacatccgtgacaccttccgcgtccttctccagatgggcgtcgtgctcatgttcggtggccagatgccggtcgtcaaggtggggaggatggctggccagttcgccaagccaaggtctgagccgttcgaggagaaggacggagttaagctgccgagctccaggggcgacaacgtcaacggcgacgacttcaccgagaagagccgcgtgccggacccgcagaggatgatccgcgcctacgc

SEQ ID NO: 54482 - DNA, 231 bp, Zea mays
gggtttttgattttagccgccgccgctgctcatctcacatccctcgagaagacgcctgctcctcgccgatcgatacgatggccgtcttctccgacctccacaccgccaacggcctcaagtccctcgaggctcacctcgccggcaaaacctatgtgtctggtgactccattactaaggatgacattatagtcttcgccgcggtgccgtcgaagcctggcgctgagtttccta

SEQ ID NO: 54483 - DNA, 265 bp, Zea mays
cacagttctggaggatggttgcacgaaacacactggggaatggagcaaaacagtctttgaatatcgaacacgcaaggctgtgagactacctattgtagatattgcaccctatgacattggtggtcctgatcaagaatttggtgtggacgttggccctgtttgctttttataaaccaaactctatctgaaatcccaacaaaaaaaatttaactccatatgtgttcctcttgttctaatcttgtcaaccagtgcaagtgaccgacaa

SEQ ID NO: 54484 - DNA, 267 bp, Zea mays
gtctactgcgaggctgggacacactggggcccgctgtcggtctcccgtcctccgacatcttgtctggaacttccgcctggcagtctccagtaggagtggagctctgtgcggcgtagtttggtggaaaaacgggccttgcgtcggcctcacccccagtgtttgtgtttcagaatgaagactattctcagcaatcagactgtcgacattccagaaaatgtcgacattactctgaagggacgcacagttatcgtgaagggccccagagga

SEQ ID NO: 54485 - DNA, 268 bp, Zea mays
ggcaagccttttgttgatgtcctcaaggagggaggcgtcctccctggcatcaaggttgacaagggcaccattgaggttgttggcactgataaggagaccaccacccaaggccatgacgaccttggcaagcgctgcgccaagtactacgaggcaggtgcccgctttgccaagtggcgcgctgttctcaagattggccctaatgagccatcacagcttgccatcgacctgaacgctcagggtctagctcgctacgccatcatctgccagg

SEQ ID NO: 54486 - DNA, 267 bp, Zea mays
ccagctcgcacatgccgtgacttgagactcagccacccagagtggagcagtggttactactggattgaccctaaccaaggatgcactatggatgctatcaaagtatactgtgattccactactggcgaaacctgtatccgggcccaacctgaaaacatcccagccaagaactggtataggagctccaaggacaagaaacacgtctggctaggagaaactatcaatgctggcagccagtttgaatataatgtagaaggagtgacttcc

SEQ ID NO: 54487 - DNA, 168 bp, Zea mays
ccgccgcagtcttcgccaccatgccgccctacaccgtggtctatttcccagttcgaggccgctgcgcggccctgcgcatgctgctggcagatcagggtcagagctggaaggaggatgtggtgaccgtcgagacgtagcatgacggctcactcaaagcctcctgcctat

SEQ ID NO: 54488 - DNA, 193 bp, Zea mays
atttgctcggaacgcacacacagcccggtccccgatctccgatcccctcgtcgatccaagatgcagatcttcgtcaagagactcactggaaagactatcaccctcgacgtggagtcttctgacaccattgacaacgtcaaggccaagatccaggacaaggatggcattcccccggaccatcagtggctcatct

SEQ ID NO: 54489 - DNA, 262 bp, Zea mays
gtgaaaagcaagtgggagaatagctcatggggcaagaagctgattgttcagaagaggagagcatcactcaatgactttgacaggttcaaggtcatgttggcgaagatcaagaggggcggtgccattaggcaagagcttgctaagcttaaaaaggtggctgctgctgcttagattgctttggtggttcctctattcgatctcttgaaatgtaatgcacgaattactttgacagttagcttgtcaagatgtcaattttaaactg

SEQ ID NO: 54490 - DNA, 263 bp, Zea mays
attgtggtagattgacagcaacactgatgggctcgtggacttcaaggagtttgttgcggcaactctccatatccaccagatggcggactcgactcagaaaggtggggcatacgctgccaagctgctttcagtaagtttgatcttgacggtgatggatatatcacgccggaggaactcagaatggtaattttctactcctgttttgtttccatgttgcttcaccaacgaatgcacagttcacataacccttattatcatcactg

SEQ ID NO: 54491 - DNA, 270 bp, Zea mays
tgggaggacaagaagtgccccggcgagtcgcgcttccctgcgcaggtgcgggtggcaacgcggaagatctacgacccgctggaggacgacgccttccgccccatcctgcaccactacgacgggcccaagttccggctcgagctctccgtcaccgaggccctcgcgctcctcgacatcttcgccgacaaggacgacgcctgatccccatcggatctgtcgtcgggccactcgaagctcggatgcatgaatgaatgaatgaatgaatgaaca

SEQ ID NO: 54492 - DNA, 217 bp, Zea mays
gtcggccggaagcagaagcggcagaagggctccgaggcggcggcgcggctccccgccgtggcgccgctctcaaagtgccgccttcgcctactcaagctcgaacgcgtcaaggactaccttctcatggaagaggagttcgttgccagccaggagcgcctgcgccccagcgaggataagacggaggaggaccgatccaaggtcgacgacctccgcggca

SEQ ID NO: 54493 - DNA, 155 bp, Zea mays
ggcgtgctcgtgatctcaacccaaggcgtgcctccgctccggtcacccgtcgctccacgcaaccatgtcgaggaggaagaccagggagcccaaggaggagaacgtcacccttggacccactgtccgtgaaggagagtatgtctttggtgtcgctc

SEQ ID NO: 54494 - DNA, 172 bp, Zea mays
agactgttgacctctttgaaggcaaagacatggcagcagtgcagaggaccctgatggctttgggcagcttggcagtgaccaagaatgatgggcactaccgtggagatcccaactggtttatgaagaaagcgcaggagcataagagggaattcacagggagccagctgcaggg

SEQ ID NO: 54495 - DNA, 157 bp, Zea mays
acctctccgacaagatctggaacaacgggcccatcagcttccagctgcagtggttccagcaggtcacctccgccgtgtgcgggcaggactgcaagagctacctggccaactcgctgttcgtgttcggcgatttcgggggcaacgactacaacgccat

SEQ ID NO: 54496 - DNA, 204 bp, Zea mays
acggtgacatccatggtcaatacagtgatcttctaaggctttttgaatatggaggttttcctcctgaagccaattatctattcttaggtgattatgttgatcgaggcaaacaaagtttggagactatatgccttcttcttgcttacaaaatcaagtaccctgagaacttttttcttctgaggggcaatcatgaatgtgcctcaa

SEQ ID NO: 54497 - DNA, 134 bp, Zea mays
acatcccgtcgcatcccatcccactaccacccatctcgtcgtccgccgattcgatccggttcttccaacccaggggctgtgatggcgacgaagaggagcgtgggcaccctcggcgatgcggatctgaaggggaa

SEQ ID NO: 54498 - DNA, 183 bp, Zea mays
agccatcttccagtaattcgccaaaatgacgaacacaaagggaaagaggagaggcacccgatatatgttctctaggccttttagaaaacatggagttgttcctttggccacatatatgcgaatctataagaaaggtgatattgtagacatcaagggaatgggtactgttcaaaaagggatgcc

SEQ ID NO: 54499 - DNA, 197 bp, Zea mays
agaggagaaccggcgggctctccgtgagctcctgttctgctgccctggtgccctccagtacatcagcggtgtgatcctcttcgaggagaccctctaccagaagaccaaggattgcaagccttttgtcgatgtcctcaaggagggaggcgtcctccctggcatcaaggtcgacaagggcaccattgaggttgttggca

SEQ ID NO: 54500 - DNA, 201 bp, Zea mays
ggaggagaaccggcgggctctccgtgagctcctgttctgctgccctggtgccctccagtacatcagcggtgtgatcctcttcgaggagaccctctaccagaagaccaaggatggcaagccttttgtcgatgtcctcaaggagggaggcgtcctccctggcatcaaggtcgacaagggcaccattgaggttgttggcaccga

SEQ ID NO: 54501 - DNA, 283 bp, Zea mays
ctcgagccgctctaggttttttgattttagccgccgccgctgctcatctcacatccctcgagaagacgcctgctcctcgccgatcgatacgatggccgtcttctccgacctccacaccgccgacggcctcaagtccctcgaggctcacctcgccggcaaaacctatgtgtctggtgactccattactaaggatgacataaaggtcttcgccgcggtgccgtcgaagcctggcgctgagtttcctaatgccgcccgctggtacgagaccgtctctgcggctgta

SEQ ID NO: 54502 - DNA, 163 bp, Zea mays
ctcgagccgctctaggttttttgattttagccgccgccgctgctcatctcacatccctcgacaagacgcctgctcctcgccgatcgatacgatggccgtcttctccgacctccacaccgccgacggcctcaagtccctcgaggctcacctcgccggcaaaacc

SEQ ID NO: 54503 - DNA, 280 bp, Zea mays
gcagtcgcagcaacgatggggaggtcgccgtgctgcgagaaggcgcacacgaacaagggcgcgtggaccaaggaggaggacgaccgtctggtggcgtacatcaaggcgcacggcgaagggtgctggcgctcccttaccaaggccgccggacttgtgcgctgcggcaagagctgccgcctccggtggatcaactacctaaggcccgacctcaagcgcggcaacttcacggaggaggaggacgagctcatcatcaagctccacagcctactcggcaacaaat

SEQ ID NO: 54504 - DNA, 249 bp, Zea mays
gcaaagggcatggtggcggtaagaggtgcctctttgagggaggtgggatgtgcccaaagagcgtccatggtggaaccagcttctgtgttgcgcatggaggggacaaacgctgatctgttcccgggtgcaccaagagtgcccgcggtcgacctgattgctgtgtgaagcacggtggtggcaagcgttgcaggttcgatgggtgtgacaagagcgcacaggggagcactgacttctgcaaggctcatggag

SEQ ID NO: 54505 - DNA, 200 bp, Zea mays
gctccatccatcctctttcccctcctcgcttcgcttcctcggcggattcctcctccctcgaccgtccccgtccccgtccccttccggcgcgcaagctcgcccgagatggcaaacgcgagatcgggtgtcgctgtgaatgacgagtgcatgctcaagttcggcgagctgcagtcgaagaggctgcaccgcttcctaacttt

SEQ ID NO: 54506 - DNA, 138 bp, Zea mays
ccgaacaagcaatccgaattctctgcgatttctctagatctcgaccacccctactagttttggttcctcctttcgttcgagagagcgtttctagtggcaatggcgaagagcgagggtccggcgatcgggatcgacctc

SEQ ID NO: 54507 - DNA, 198 bp, Zea mays
agaacatactcccgctgaagcgcagagaagtagataagaataatatggggttcagtgaggcacaggaagagctcgtcctccgttcatggaaagccatgaagagcgactccgagtcgactgctcttaagttcttccacaggatctttgagatcgcgccgggtgccaagcagatgttctccttcctgcgcgacgccggcg

SEQ ID NO: 54508 - DNA, 159 bp, Zea mays
catgggtccctcggcttcctgcctcggaagcgcacagcaggcatcgtgggaaggtgaagagcttccctaaggatgacccgtccaagccggtccacctcacagccttcctgggatacaaggctggcatgactcacatcgtgcgggaagtcgaaaggccgg

SEQ ID NO: 54509 - DNA, 115 bp, Zea mays
accagcaggagatggaaccttccagaagtgggcagctgtggtggtgccttctggagaagagcagatatacacgtgccatgtgcagcacgatgggctgccggagcccctcaccctg

SEQ ID NO: 54510 - DNA, 221 bp, Zea mays
gcacaaccgtctgtacatggaagcgcgccccctggaggagggtcttgctgaggcaattgatgatggccgcattggcccacgtgatgatcctaaggtgcgctcccagatcctctctcaagagtttgggtgggacaaggatcttgccaagaagatttggtgcttcggacctgagaccaccggcccaaacatggttgttgatatgtgcaagggagtgcagtatc

SEQ ID NO: 54511 - DNA, 195 bp, Zea mays
cgagcagtacgtgtgggagtcccaagcgggcgggtcgttcactgttacacgtgacacgtcaggggagcagcttggcaggggcactaagatcacactgttccttaaggacgatcagctggagtaccttgaggagcgtcgcctcaaggatctggtcaacaagcactctgagttcatcagctaccccatttcctgtgg

SEQ ID NO: 54512 - DNA, 160 bp, Zea mays
ctcgagccgccgtgaaacagccgtttgaatttggctgcgggtggagaacgtttgtcaggggatccggccaagaaggaggcccgcctgttacgatggtgtccatgagtttcaagcggaaccgcagtgaccggttctacagcacccggtgctgcggctgttg

SEQ ID NO: 54513 - DNA, 198 bp, Zea mays
cagtgttgtgtcctagcgccgccgccgccccaactcgccttgcgtgactgaaagctcgtcggcttccgtccacgcgagaagcgagagcatggacacccaggtgaagcttgctgttgtggtgaaggtgatgggcaggaccggctccaggggtcaggtgacccaggtcagagttaagttcttggatgggcagaaccggct

SEQ ID NO: 54514 - DNA, 192 bp, Zea mays
atgaaatgcatgtttattctgaaacttctaactagttgtacaactaatccgtgacaaattaccagattaattttactttatttcttcaggcctgggtttttcgatgacttcaaatttgggatcttcaaatttgaaggtgggaaatgtattcatgtctgcattaccaaacatttgcttgagcttaaaaagctc

SEQ ID NO: 54515 - DNA, 190 bp, Zea mays
gctagccaagcggctcgttgaggtgtcgttcgcggaccgcccttcttcgccagcactggcacggaggccaacgaggcggccatcaaattctcccgcaagttccagcgggccgcacacccggagagcggcgacccgcccacggagttcctggcgttcacagcagcttccacggccggaccatgggcgccgt

SEQ ID NO: 54516 - DNA, 193 bp, Zea mays
gggttttcgcgccgccgccgccgccgcttcgtcgtctccgccgcagcgatgccgtcgcacaagaccttccggatcaagaagaagctggcgaagacgatgcgccagaaccgccccatcccctactggatccgcatgcgcacggacaacaccatcaggtacaacgccaagcgcaggcactggcgccgcaccaagc

SEQ ID NO: 54517 - DNA, 147 bp, Zea mays
gcaataactgtgtggaacggtttgatcatcactgtccatgggtcggccagtgcataggactgcgtaattatcggttcttctatatgtttgtatctcgacgacattgctctgcctctatgtatttgccctctgttgggtgtatgtgat

SEQ ID NO: 54518 - DNA, 194 bp, Zea mays
gggttttcgcgccgccgccgccgccgcttcgtcgtctccgccgcagcatgccgtcgcacaagaccttccggatcaagaagaagctggcgagaagatgcgccagaaccgccccatcccctactggatccgcatgcgcacggacaacaccatcaggtacaacgccaagcgcaggcactggcgccgcaccaagcccg

SEQ ID NO: 54519 - DNA, 190 bp, Zea mays
tgcgccgctgggcctgcaggtctctgtcgagcagcggacgccggtctctgttccgcagatcggggtttgttaaagttgttaagaataaggcctactttaagagataccaagtgaaatttagaagacgacgagagggtaaaactgattattatgctcggaaacgcttggtgatacaagataaaaataaata

SEQ ID NO: 54520 - DNA, 191 bp, Zea mays
gtgttggtccaccacttccttgctgctatgtgaagcttgtctcatgggaagaaggtggttacaagatttctgattctccgatgccgagaggagaggtcgtggttggcggacacagtataacaaaaggttatttcaacaatgaagcaaagacgaacgaagtataccaggttgatgagaggggcatacgctgg

SEQ ID NO: 54521 - DNA, 189 bp, Zea mays
gagaagtgcatcattcagaaggagaacaacttcaagcaggctggcgagagatatcgttccttcgaccctgcaagcaagaccggttcatcagcgatgggttgacgcactgacagaccctcgcgtgacccatgaacaccgtaccatttggatctcctactggtcccagtgcgacgccgctcttggccagaa

SEQ ID NO: 54522 - DNA, 187 bp, Zea mays
tgaacttacagatatatttctgaggagattaaagaggtacaatcctgttctagaagctgttattacatatactgaagatttagcatacaacaagccaaggaggcagatgacttgctggcacaaggaaaatatcttggtcctttgcatggcattccatatggcctcaaagatataattgcggtaccac

SEQ ID NO: 54523 - DNA, 188 bp, Zea mays
aagagggaacatcaaagttctcatggccactaataggcctgatacattggatcctgcacttctgcgtcctggtcgtctggacagaaaggtagaagtgcagcgtacaatgttggaaatagtaaaccagcttgatgggtttgatgcaagagggaacatcaaagttctcatggccactaataggcctgata

SEQ ID NO: 54524 - DNA, 187 bp, Zea mays
gcctgagcggaccagtttctgctacactctaccttggctattccctgatcatggcccttgcaatcatgctctccactggcgccatggtttcctgctctccttctacttcgtccactacctcttctcgtctgttaagattgattagaggtgtgccccgctgcctctttctgcaatagagtcatctgat

SEQ ID NO: 54525 - DNA, 187 bp, Zea mays
cgcctctcgagtctcgtccacccgtcgtcctcctagctcctctactcgccagtcgccatgggcaagattaagatcggaatcaacgcttcggaaggatcggcaggctcgtggccagggtcgccctccagagcgaggatgtcgagctcgtcgccgtcaacgaccccttcatcaccacggactacatgac

SEQ ID NO: 54526 - DNA, 188 bp, Zea mays
cgccgaagctgttcaaccgctggaccttcgatgatgtccaggtgaacgacatctcgctgaacgactacctcgctgtgaacgcgacgagcacgcgatgtacctgccgcacacctggggcgttactccaagaagcggttccgcaagcgcagtgcccgatcgtcgagcgcctcacaaattccctcatgatg

SEQ ID NO: 54527 - DNA, 186 bp, Zea mays
agatccaagaagagggaagagcaccaaggaccttcggcgcccgttcaggatccacatcttcccgagcgagttcttggttgacctcttcccccttcggaccacctccaaggctcttggtgtagcttgccactctcaccaatcaagttttcatgtctgatctcgacattcagatcccaactgccttcg

SEQ ID NO: 54528 - DNA, 181 bp, Zea mays
aggatggcgtgcctacctctgaaatacagctgcatcttgatatactcgatgctaactggacaagtcagtcatgagagctttactatattattatttctggcggacaatggtttctgaggacagcggtctactgggagaacggtgcagtggttggtggtcataattctcagaacaagaacgt

SEQ ID NO: 54529 - DNA, 174 bp, Zea mays
atcgtatcgcacgagtcgcatttgaggttgctcgcaaggaagagggagactatgctcggttgacaaagcaaatgtcttggaggcatctatgctttggaggaaaagggtgactgcactagcttcggaattccctgatattgagctctccacatgtatgttgataatgctgcgatg

SEQ ID NO: 54530 - DNA, 185 bp, Zea mays
gggcgtacgcggacacagccccgatccgaatcgtcctcctcgcgagcctcgtcgatcccccactcccctcccctcgcttcaaatgcagatctttgtgaagaccctcaccggcaagactatcaccctcgaggtggagtcttctgacaccattgacaatgtcaaggctaagatccaggacaaggagg

SEQ ID NO: 54531 - DNA, 178 bp, Zea mays
caaatatgtgttaataataatagaaataaatgtccaacaacgatagactggattaagaaaatgtggcacgtatacactatagatactatgtcagccataaaaaatgatgagttcatgtcctttgtagggacatggatgaagctggaaaccatcattctcagcaaactatcccaaggac

SEQ ID NO: 54532 - DNA, 280 bp, Zea mays
ggtcaagcaggcagagtctgcacctcctattccgaaaaaggctgctccttctaaggagccaaaggcaaaggatgtcaagacggaggctccaaaggaggcccccaagccaaaggtggttgaggcaccagcagaagaggaagcaccaaagccaacgccaaagaatcctcttgacttgctgccaccaagcaagatggtccttgatgactggcagaggctatactcaaacacaaagactaacttccgggaggttgccatcaaaggtttctgggacatgtacgac

SEQ ID NO: 54533 - DNA, 272 bp, Zea mays
ctcgccccctcgttcgccgcctctcctgctcctaccgcagctctccctcaggtttagtgttcgcaatggcggccttcaacaagcttggtggccttctaaggcacagtgctctggtgagcggtatcactggtggctcttctcctgcagtgttcaatgctgcacggctcatgtctaccaagctatttattggtggtcttgactggggtgttgatgacgtgaaactaagagaagcatttagcagctttggagaggttactgaagcgagggtgatc

SEQ ID NO: 54534 - DNA, 273 bp, Zea mays
cgactcccgagcacaggccgccgctcgctcgctcgctgcagctacgcacgcccgcgcctgctcctccccttagcttccacaaggctcgactcggccggcggcgatggcgcggaagaagatccgggagtacgactccaagcgcctcctccgggagcacctcaagcgcctcgccggcatcgacctccagatcctctccgcgcaggtcacacagtcaacggatttcactgagcttgcaaaccaggagccgctcagctcatctatgcagttggttgt

SEQ ID NO: 54535 - DNA, 272 bp, Zea mays
ctttgccacatcacattgaacaagactgctgtcttcggtgacagcagtgcattgtctccgggtggtgtccgcattggcgcgccacaatgacctcgaggggtctactggagacggatttcgagccgattggggagttcctccaccaggcagtgaccatctgcctgaacatccagaaggagtacggcaacgtcctcacggacttcaacaagggcctggtgaacaacaaggacatcgagaacctcaaggtccaggtggagaagtttgccgactcc

SEQ ID NO: 54536 - DNA, 271 bp, Zea mays
cggggatctattttatcgcctagtatcccaaaagttcgaggatcctgcagaaggcgaagaagctttggtcggcaagtttaagaaactgtacgacgaccttaccactgggttccgcaacctagaagatgagccacggtgaactgctgtagcttgtgtgtaagacaataatggctgccaaatggtttataaggtacggaagttgtagattgagaccatgtatgagaattttccccaccgctactcatagctttgccaccactattttagtcat

SEQ ID NO: 54537 - DNA, 269 bp, Zea mays
gtgtccttggatattgtcttctgcccatgatcctactttccagctttgcagtgatattttctttgcaaggcatggtaggaatcattctcactgctgggattattggatggtgtagtttttctgcttccaaaatatttatttctgcattagccatggaaggacagcaacttttagtagcatatccttgcgctttgttatatggagtctttgccctgatttccgtcttttgaaaattatctgggatgtggacatcagtgggccagatgtac

SEQ ID NO: 54538 - DNA, 275 bp, Zea mays
catcctctcgctcgccaggcgacgcagccgccgttgctgctgccgcgtccacagaatggggggtttcgtgaagacccataagaccaatgcgtatttcaaacgtttccaagtgaaattcaagagaaggcgggctggcaagacagactacagggccaggataaggctgattaaccaagacaaaaacaagtacaacacacccaaatacagatttgttgtgcgatttaccaacaaggacatcactgcacaaatcatatctgctagtatagcgggtgata

SEQ ID NO: 54539 - DNA, 275 bp, Zea mays
aggagctcgagaacggcgtcctgtgggaggtcgagggaaagtgggtcacccaaggtcctgtagatgtagacattggtgccaatccatccgccgagggtggtgaggacgaaagcgttgatgacacagccgtgaaggtggttgatattgttgacacattccgtctacaggagcaacctccttttgacaagaaatcatttgtctcttacattaaaaaatacatcaagaatctcactgctgtgttggagccagagaaagcggatgagttcaaaaagggt

SEQ ID NO: 54540 - DNA, 271 bp, Zea mays
gccgcaccccccattcgaacgccggagctcgacaaggacgaccgacgacgcacgcggagatccggcgtactgcaaattttgaaaactgaactgtaagatggcatcagcagagctttcccgtgaggcaaatgtgtacatggacgaactcgctgagcaggcggagaggtacgaggagatggttgagttcatggagaaggtagccaagactgttgactcggaggagctcactgtggaggagcgaaacctcttgtctgttgcatacaagaacgtc

SEQ ID NO: 54541 - DNA, 272 bp, Zea mays
cgagatcgccgctcctcttctctccgtcggtggtgcggttgaccgccctcctcgagcgagatctcgctgcagtccctcgagatctggtcacagatctatccgacaagatggtgaagatctgctgcatcggtgctggctatgtcggtggcccaaccatggctgtcattgccctaacgtgcccagatcttgaggttgtcgttgttgacatctccaagccccgcattgaggcatggaacagcgacaccctcccgatctacgagcccggcctcgat

SEQ ID NO: 54542 - DNA, 271 bp, Zea mays
ccgctttcctagcatgaagagtgtcttcaattgctaatagaaagcaatcgtattccggaagcagcattgatggccagatcttatcttcctagcaaagtccctgagattgtagcgttgtggaaaaaggatctccagaaggtaaacccaaaagcagcggagtccctggctgatcctaatgagtacccaaacttatttgaagactggcagattgctactgaatgtagaagctgctgttgctccgaaaagggttatctatccaccggctgaggag

SEQ ID NO: 54543 - DNA, 271 bp, Zea mays
cggcgggcgctgtccggagcgcctggtggcctgggtgatgtgcggggagctggagcgagcgggcagctgcagctgcgccggcacagggctgcaggtcgtgtcaagagaagagactcgggacggcacggaatggggtcgatcgctcgccacggcagtttgatgtgcgcgcgcgtatatatacaaacgagcttgggcgtggcctgtggcaactggaatcgtgtcgtgtcatgcactatacggcgccagtgacagtgatgccggcgacgcgctt

SEQ ID NO: 54544 - DNA, 265 bp, Zea mays
ctctctcttgctcgcactcgcggagatcgaagagaagcgcaggaggccccagcactagcgccgccccgccgccgcatcagacatcgcgctggccgctcgcctcgtctcgcgctcccgtcagctatattcggttcaagccactttggggaatggaggtgtcactcaagttcgctcctttgccaaggatgcagctccagctgaccgtcctcctgtcagtggggatgatctcctgaagggcatattctttgaggtaaagaagaagttt

SEQ ID NO: 54545 - DNA, 201 bp, Zea mays
  unsure (1)..(201): unsure at all n locations
gccatgatcatgangngtgtnggaatcgcnntcctgaaagatggtggancnngttcgcaggcagtntcancaccagtccngggtttatggntngaacantcaaggccgactacgcanccngtgtganagnctccncngatggcttccatcaaggagatgatncctccgggngcnctggaanatgctgactccactcatcgg

SEQ ID NO: 54546 - DNA, 143 bp, Zea mays
cccctgtagaagatggcagcatccatgattccatcttctacagggtgggtgcaatcaagagtgaacttcagaacttgcttctttattttgccccccttcaccacgagctttttcataggagccatggcggtatgggacgttag

SEQ ID NO: 54547 - DNA, 268 bp, Zea mays
ctccagctggagagccattcgtgggcgtaggacgagagagagaggatcggagcagtacgcggcggcggcggcgtgtgggagatggcgcgcgagaggcgggagatacggcggatagagagcgcggcggcgcagcaggtgaccttctccaagcgccggcgcgggctgttcaagaaggcggaggagctcgccgtgctgtgcgacgccgacgtcgcgctcgtcgtgttctccgccaccggcaggctctcgcagttcgcgagctccagtgtga

SEQ ID NO: 54548 - DNA, 263 bp, Zea mays
ccctgacgctcgacgcctctcctcctctcctcccccacccgtccatcgcccctccctccggtctgcgctcccacagcctcacccctgcgcccccgccgattcgcgtcgccctttgttggaaggaacgatggagcagaccttcatcatgatcaagcccgacggcgtccagcggggcctgatcggggacatcatcagtcgcttcgagaagaaagggttctacctcaaggggatgaagttcatgaacgtggagaggtccttcgcgc

SEQ ID NO: 54549 - DNA, 265 bp, Zea mays
agcgcctgagctccagcaataatggccgagaagggcgtgaaggtgttggggatgtgggcgagccccatggtgatcagggtggagtgggcgctgcggctgaagggcgtcgagtacgagtacgtcgacgaggacctcgccaacaagagcgccgacctgctccgccacaacccggtgaccaagaaggtgcccgtgctcgtccacgacggcaagccggtcgcggagtccaccatcatcgtggagtccatcgacgaggtctggaagggcg

SEQ ID NO: 54550 - DNA, 267 bp, Zea mays
caacaagatactggcgcagaggagcaatgcccggcatggatgccttcgctgctgtgtcactactcgccacactctttctggttcgtgcggcactgcccatcctccggcggcggctgcggacgccatgacgccgacggactattggcgagcggtgcttcctgagaccccgatgccccgagccatactcgacctattgaccacatctacaggtgaggaaggctcaaggaaggtcaccacgtcaaatgggtaccaaggccatgacttaag

SEQ ID NO: 54551 - DNA, 266 bp, Zea mays
cataactgatgcttcacttgctgtgattggctactacgggaaggccatcactgacctttcacttactcgtcttgctactgttggtgagaggggtttctgggtgatggctaatgctgctggcctgcagaatctcaggtgcatgagtgttacctcttgccctggagtcactgatcttgcgctcgcttctattgccaagttctgcccaagcttgaagaagctttacctgaggaagtgcggacatgtgtcggatgctggccttaaggctt

SEQ ID NO: 54552 - DNA, 261 bp, Zea mays
ggagaagtgcggtggacatggatggtgtgcatgtgatgggaagggatacattttatcagatgctgatgcactgccttccatcaggggaggttggatcaggtgaacggcaaggggagcagcgtgctctgccattccgagtattaccatgggaagcagaggtgcatgctgcactatttgtgcatcgtgtctcagggcttcacagggggatttatttcctggtgagaaatgaggagcactttgatgcgttgcagcgtgctatga

SEQ ID NO: 54553 - DNA, 267 bp, Zea mays
ccagagttcaatttgaggaaacctccatccttccactatgatttgcttctcttaggcttcctgacgttaatgtgtggccttattggtatccctccatcaaatggtgtcattccacaatcacccatgcacacgaagagtttggctactctcaagcatcagctgcttcgtaaccggctagtagccactgcgtgaaagagcatgagccagaatgcgagcttgagccaactgtatggcagcatgcaggatgcttatcagcagatgcagaca

SEQ ID NO: 54554 - DNA, 264 bp, Zea mays
gggatatgttgtctaccgtgtccgtgtgaagcgtggtggcaggaagaggcctgtgcccaagggtattgtctatggcaagcccaagcaccagggtatcacccagctcaagttccagaggaacaagaggtctgtcgctgaggagagagctggacgtaagcttggtggactgagggttcttaactcctactgggtgaatgaggatagtacctacaagtacttcgagatcatccttgtggacgttgcccacaaagccatcaaaaccga

SEQ ID NO: 54555 - DNA, 267 bp, Zea mays
tgaacttttgccccgtaacagtgcaaaggtttcagtgtttgattcagttgtacaaggaggagatgctgtttgggaaggtttacgtatatatgctggaaaagtattcaaattagatgaacatttggacagattgtttgattctgcaaaagctatggccttcagcaatgtgcctactcgtgattccattgcggatgccatctttaagactctgattgcaaatggaatgttcaacaatgctcatataaggctcacgctcacccgtgggaa

SEQ ID NO: 54556 - DNA, 263 bp, Zea mays
cagggaccagaaccccattagtggcaaggaagacagtgttccgagcatccgtggctctaacgccaacagctccttctagaacaggctctgtgcagacacctccagatttggaaagttctgaggaagttgatgcagctgaaggagccccagaagttgtcggacctaaatctgaagtggacgaagggcatggaaaactcccatcaatgccagctgctgaggaaatgcataaacctgtggagcaagatgcagttgcagcaagtcat

SEQ ID NO: 54557 - DNA, 263 bp, Zea mays
gccaaatcctttggcatacgtgatggccttcaacaatctctctttaagtttttctttgcttgagtattccggaagtaaaagcacattaaagcaagtatgagatgtaggtaacctttctgtgtctgggccatttttggctataatcatctttaattttcctagtcctcccacaggtgctctgtctgtgcccgttgtaaactgcaagaagagtacttttctgttcatctgtaaatgaatgaacgatttcccagaactccctaatc

SEQ ID NO: 54558 - DNA, 261 bp, Zea mays
caattcctccttcggatctcgcattcagcgcacgcaggtgtgaaggaagggggacgcggaggaagatggggctcgcgttcgggaagctcttcagccggctcttcgccaagaaggagatgcggatcctcatggtcggcctcgacgccgccggtaaaaccaccatcctctacaagctcaagctacggcgagatcgtcaccaccatccccaccatcggtttcaatgttgaaactgttgagtacaagaacattagcttcactgtc

SEQ ID NO: 54559 - DNA, 264 bp, Zea mays
gttccagcccttcgaggagatcaagggggagctcgccctcgtgccccagtccccagacaagtcgctcgcgcgccacaagttcgtcgatgactgcgaggccgccctcaacgagcagatcaacgtggagtacaacgcctcgtatgcataccactccctcttcgcctatttcgaccgcgacaacgtggctctcaaaggatttgccaagttcttcaaggaatccagcgacgaggagagggagcacgctgaaaagctcatggagtacca

SEQ ID NO: 54560 - DNA, 265 bp, Zea mays
cagcaccccaggtttccacagctgtagttgagccctacaactccatcctcaccacccacaccaccctggagcactctgattgtgccttcatggtagacaatgaggccatctatgacatctgtcgtagaaacctcgatatcgagcgcccaacctacactaaccttaaccgccttattagccagattgtgtcctccatcactgcttccctgagatttgatggagccctgaatgttgacctgacagaattccagaccaacctggtgcc

SEQ ID NO: 54561 - DNA, 268 bp, Zea mays
cagcaatcttgcaatccacccctcgaaagaaaacctcaatcaacaccagaagctctcgatcccaccgaggaagaagaagagagaggaatggcgtccgaggagggagtcgtgatcgcctgccacaccaaggccgacttcgacgcccacatggccaaggccaaggaggccggcaagctggtgatcattgacttcacggcctcctggtgcggcccctgccgcttcatcgcgccactgttcgtcgagcacgccaagaagttcacccaggctg

SEQ ID NO: 54562 - DNA, 270 bp, Zea mays
gtcccgcgggtctgtctcttgcttcaacagtgtttggacggaacagatccggggactctcttccagcctccgaacgccctccgatttcctctccgcttgtaagctccgggaccatcttctcggccatctcctgcttctgggacctgccagctacgtttgtgtggttagctccttcttgccaaccaaccatgagctcccagattcgtcagaattattccaccgacgtggaggcaaacagtcacagcctggtcaatttgtacctgcaggcct

SEQ ID NO: 54563 - DNA, 277 bp, Zea mays
agaacagccaagcccgactacgcaacctgtgtgaagatctccactgatgcttccatcaaggagatgattcctccgggcgctctggtcatgctgactcccctcatcgttggaaccctctttggcgtcgagactctctccggcgttcttgctggtgcactggtttctggagtgcagatcgccatctctgcttccaacaccggcggtgcatgggacaatgccaagaagtacatcgaggctggtgccagcgagcacgcgaggaccctcggtcccaagggat

SEQ ID NO: 54564 - DNA, 279 bp, Zea mays
ggagcacgagcagcgcctggacgccctgcaggggcgccatggaaggccatcgggtcctcagaggcagaccaggatggcctggccagcacggtgaggagcctgggcgagacccagctggtgctctaccatgacgtggaggagctgaagaggagtgtgggcgagctccccagcaccgtggaatcactccagaaggtgcaggagcaggtgcacacgctgctcagtcaggaccaagcccaggccgcccgatagccatctcaggacttcctggacagactttct

SEQ ID NO: 54565 - DNA, 280 bp, Zea mays
agtgaatgcaaactggaaactaccttgcatgtttctggatagacagcgtggagaaaggatcaggaacatctctaaatcttgattggaagatagggattgctgcaaaggactgggatactattgctaagaaagagaatattgagggcgtagaactagagcttaggaaacttgaagctgcagtcgagtccatccatcataacttgctgtatctcaaagcaagggaagctgacatgcgaacagtgagcgagagaacgaattctagagttgcctggttcagcat

SEQ ID NO: 54566 - DNA, 281 bp, Zea mays
gccggaccagcagcgactaatcttcgcggggaagcagctcgaagacggccgcaccttggccgactacaacatccagaaggagtccacccttcaccttgttcttcgccttcgcggtggcatcattgaaccttccctccaggcgctcgcccgcaagtacaaccaggacaagatgatctgccgcaagtgctatgcacgcctgcaccccagggctgttaactgccgcaagaagaagtgtggccacagcaaccagctgagggcaaagaagaagatcaagaactgaa

SEQ ID NO: 54567 - DNA, 281 bp, Zea mays
gctcgctccccgctctggagtctgccatcatggatgttctcgcagaagcaaatggcacctttgccttaaaccttttgaaaacgctgggtaaagacaactcgaagaatgtgtttttctcacccatgagcatgtcctgtgccctggccatggtctacatgggggcaaagggaaacaccgctgcacagatggcccagatactttctttcaataaaagtggcggtggtggagacatccaccagggcttccagtctcttctcaccgaagtgaacaagactggcacg

SEQ ID NO: 54568 - DNA, 274 bp, Zea mays
gccaagttggctgagcaggctgaaaggtatgaggagatggttgagtatatggagaaggtggctaagactgtagatgtggaagagctcactgttgaggagcgtaaccttctgtctgttgcatacaagaatgtgattggggctcgccgcgcttcatggcgcattgtttcttccattgaacaaaaggaggagtcccgtaagaacgaagagcatgtgaaccttatcaaggaatatcgtggcaagatcgaggctgaactgagcaatatctgtgatggaa

SEQ ID NO: 54569 - DNA, 276 bp, Zea mays
ttcgcctcctttctggagcagctagggttccgtcctcgatccgatccgccgagtgcacaccacctttccccactccgatcgaatcgatggccgccgagggcgagaagaagatgataaccctcaaaagctccgatggcgaggagttcgaggtggaagaggcggtggcgatggagtcgcagaccatccgccacatgatagaggatgactgcgccgacaacggtatccctcttcctaacgtcaactccaagatcctatccaaggtaatcgagtactgca

SEQ ID NO: 54570 - DNA, 273 bp, Zea mays
gtattctcttcgtggatgaagcttacaggttgataccaatgcaaaaatccgatgacaaggattatggtttagaagccttggaggagataatgtctgtaatggacagtggcaagatagttgtcgtatttgcggggtactgtgagccaatgaagcgagtcatcgcctcgaatgatggcttctgcaggcgggtcacgaaattcatctatttcgatgatttcagtacgacagaactagcagagatcctacatatgaagatgaagatcccaagtgact

SEQ ID NO: 54571 - DNA, 277 bp, Zea mays
gcctgaaggatctgcaggaggacttcatgggtggtgctgaaattattgtttcccctcccgtcgtctccttccgtgaaacggttcttgagaagtcctgccgtactgtcatgagcaagtctcccaacaagcacaaccgtctgtacatggaagcgcgccccttggaggagggtctcgctgaggccatcgatgacggccgtattggcccacgtgatgatccgaaggtgcgctcccagatcctctctcaggagtttgggtgggacaaggacctggccaagaa

SEQ ID NO: 54572 - DNA, 280 bp, Zea mays
accggtctcctccgcccgttgccttcgtcccctccatctccggctgcgtcgccggcgagcccgacaccgcgaatcggatccgccgacaaggtgagagggaagagatggggctcacgttcaccaagctgttcagccggctgttcgccaagaaggagatgcggatcctgatggtgggactcgacgccgccggaaagaccaccatcctctacaagctgaagctcggcgagatcgtcaccaccatccccaccatcggattcaatgttgaaactgtggagtacaa

SEQ ID NO: 54573 - DNA, 274 bp, Zea mays
acgggggcggcaagcaaccacgggcggactcggagcgtaatcctcctcccgtctataaattcccctccttttcttcctccatatataggggccatcagatccaagaagagggaagagcaccaaggaccatcggcgcccgttcaggaggcacatcttcccgagcgagttcttggttgacctcttcctcttcggaccacctccaaggctcttggtgtagcttgccactctcaccaatcaagttttcatgtctgatctcgacattcagaatccaact

SEQ ID NO: 54574 - DNA, 279 bp, Zea mays
gagcagcgtgcccggcttcaaggtcgacaccgtcgacaccaccggcgccggcgacgccttcgtcggctccctcctcgtcaacgtcgccaaggacgactccatcttccacaacgaggagaagctccgcgaggctctcaagttctccaacgcctgcgaggccatctgcaccaccaagaagggcgacacaccggcgctgcccacggtcgccaccgcccaggacctcatcgccaaggccaactagatggccgcacgccccgccgttccaccacgtcactgtcc

SEQ ID NO: 54575 - DNA, 276 bp, Zea mays
tgaacttttgccccgtaacagtgcaaaggtttcagtgtttgattcagttgtacaaggaggagatgctgtttgggaaggtttacgtatatatgatggaaaagtattcaaattagatgaacatttggacagattgtttgattctgcaaaagctatggccttcagcaatgtgcctactcgtgattggattaaggatgccatctttaagactctgattgcaaatggaatgttcaacaatgctcatataaggctcacgctcacccgtgggaaaaaggtgac

SEQ ID NO: 54576 - DNA, 274 bp, Zea mays
cacacacacacacacacagacaagtggtttccaaagccaagtgtgtgtactagcaaccagctagctcgggcggcagcaggcagccatcatgtcggaggagaagcaccaccacttcttcaaccaccacaagaaggacgaggagcagcccgccggcgagtacgggtactccgagaccgaggtggtcaccgcacccggcgagggcgagtacgagaggtacaagaaggaggagaaggagcacaagcacaagcagcacctcggcgaggccggcgccatc

SEQ ID NO: 54577 - DNA, 276 bp, Zea mays
ccgctgttaggttctaccaggagaccttcggcgtccctccggccacgcgagctcgccgaaatggtcgcccacaggttccatcagtaccaggtggtgggtcgcgcgctgccgaccccaaccgatgagcaccccaagatctaccgcatgaagctctgggccaccaacgaggttcgcgccaagtccaagttctagtacttcctgagaaagctcaagaaggtgaagaagagcaatggccagatgcttgccatcaacgagatctttgagcgcaacccgacc

SEQ ID NO: 54578 - DNA, 277 bp, Zea mays
gccctagggatgaagctcctaaggaagaaggatgtaactgattacaagtataccattgccatgttgggctatgctgatgaggacaagacaactgttctggagctgacgtacaactatggagtcacagaatacagcaagggcaatgtcatatgctcaggttgccattggcaccaatgatgtgtacaagagcgccgaggcggttgatctggcgaccaaagaactaggtggcaagattttgcggcagcagggcctctacctgggatcaacactaagatcg

SEQ ID NO: 54579 - DNA, 270 bp, Zea mays
gtacaagggggcgctggcgctgggcctggcgaaccagctcaccaacatcctcagggacgtcggcgaggacgccaggaggggacggatctacctcccgcaggacgagctggagatggcggggctctccgacgccgacgtcctggacggccgcgtcaccgacgagtggaggggcttcatgaggggccagatcgcgagggccagagccttcttcaggcaggcggaggaaggcgccaccgagctcaaccaggagagccgatggccggtgtggtc

SEQ ID NO: 54580 - DNA, 276 bp, Zea mays
aacgggcccatcagcttccagctgcagtggttccagcaggtcacctccgccgtgtgcgggcaggactgcaagagctacctggccaactcgctgttcgtgttcggcgagttcgggggcaacgactacaacgccatgctgttcggcaactacaacgcggaccaggccagcacgtacacgccgcagatcgtgagcgccatcgcggccggcgtggagaagctgctggccatgggcgccacggacgtggaggtgccgggggtgctccccatcggctgcttc

SEQ ID NO: 54581 - DNA, 277 bp, Zea mays
tgcacttagtgaagctattagctcgagccttttggagtggaatatgaaggacaggctattcactatcacattggataatgatacctcttcccatgatatttacagtgcaaatcttagggatcacctgtccaataagaacaacctcatgcttaagggacagctgtttgttgtgaggtgttatgcacatatcctcaatgtagttgctcaggatgtaattgcttcaattcatggtgtgatttacaacatccgtgagagtatcaagttcatagaagcttct

SEQ ID NO: 54582 - DNA, 269 bp, Zea mays
ctgcagtccatttgctactactccgcgcccaaaaccaagcccaagctcaatagcctcgacgaggtcgacccggagctgctcaagaccttcgaccgcctcggcatcccgctcaccgagcagaagcgcctctccaacgtcgccgttgacgccgtcatcgactccacctccatcgccaccacccaacgcgaagcctcatggccaagggcgtcatcttctgctccatctccgaggccatccgcgagtacccggaccttatcaggcgttacctg

SEQ ID NO: 54583 - DNA, 265 bp, Zea mays
ctcgagtggagctcttccacggccgcggtggagatggcggcgaatctggaggacgtgccgtcactggatctgatgcacgagctgctccgccgcatgaagtgcagctccaagcccgacaagcgcctcatcctcatcggtccacctggctctgataagggaactcagtctcctattatcaaggatgaatattgcttgtgccatttagccactggtgacatgctgagggctgctgtggcggccaagacacctctaggtatcaaagcta

SEQ ID NO: 54584 - DNA, 265 bp, Zea mays
ggccgcttcgccggcgacacatattccaggtcggttggttttggcacttcggaccggcggccatggcttccgacggcatcggccccagagatgtatgtgttgttggagttgcacgcaccccactgggcggtttccttggtgccttgtctcccttgcctgctacgaaacttggctctatagtaattcaagctgctctggaaagagcaaacgtggatccagccctcgtgcaggaggtctactttggaaacgtattgagtgctaattt

SEQ ID NO: 54585 - DNA, 272 bp, Zea mays
gcggatcctcatggtcggcctcgacgccgccggtaaaaccaccatcctctacaagctcaagctcggcgagatcgtcaccacaatccccaccatcggtttcaatgttgaaactgttgagtacaagaacattagcttcactgtctgctatgtcgggggtcaggacaagatcagacctctttggaggcattacttccagaacacccagggtcttatctttgttgtggacagcaatgaccgtgaccgtgttgttgaagccagagatgagctccaca

SEQ ID NO: 54586 - DNA, 270 bp, Zea mays
acagtttgctcaaagaagcttactacagaggatgtagtgaatttccggaatgcagtggctaaggactactacttccagatgtactatgatgatctcccactgtggggcttcattggtaaagttgagaagggaggcaaggccgatccgagcgagtggaagtactacctgtacaggcacatcatcttcgatatcctgtacaacaacgaccgggtgattgaaatcaatgtgcacactgatcagagtgcattggttgacctgacggacgataag

SEQ ID NO: 54587 - DNA, 271 bp, Zea mays
agagatcgccgctcctcttctctccgtcggtggtgcggttgaccgccctcctcgagcgagatctcgctgcagtccctcgagatctggtcacagatctatccgacaagatggtgaagatctgctgcatcggtgctggctatgtcggtggcccaaccatggctgtcattgccctaaagtgcccagacatagaggttgtcgttgttgacatctccaagccccgcattgaggcatagaacagcgacaccctcccgatctacgagcccggcctcga

SEQ ID NO: 54588 - DNA, 266 bp, Zea mays
gcatgtcatgcgcagttgcctacttatgcttataggaggaactttagcttttttcatggtgttaacagagtatatacttatttcagcaacaagtgccataaccgtcacaatagctggagtagtaaaagaatctgtaaccattttgcttgcggtattttatttccatgatgaatttacttggttgaaaggggttggtcttttcaccattatggttggtgttagcttattcaattggtacaagtatgagaaattcaaaaggggtcata

SEQ ID NO: 54589 - DNA, 268 bp, Zea mays
ggcaagggagatgcctgtgaccacgatgatgacaacgatggcattcctgatgacaaggacaactgcagactcgtgcccaatcccgaccagaaggactctgacggcgatggtcgaggtgattcctgcaaagatgattttgaccatgacagtgtgccagacatcgatgacatctgtcctgagaatgttgacatcagtgagaccgacttccgccgattccagatgattcctctggaccccaaagggacatcccaaaatgaccctaactggg

SEQ ID NO: 54590 - DNA, 269 bp, Zea mays
cgctccgatcgacctgctccctccccaccaccgagcccatggcggaccagctcaccgacgaccagatcgccgagttcaaggaggccttcagcctcttcgacaaggacggggatggttgcatcacgaccaaggagctgggcactgtcatgcgctcgctggggcaaaatcctacagaggctgagctccaggacatgatcaacgaggtcgatgctgatggcaacggcaccatcgatttcccagagtttctcaaccttatggctcgcaagatg

SEQ ID NO: 54591 - DNA, 273 bp, Zea mays
gaagaaccgcaatgagatctgcaagtacctcttcaaggagggcgtgctgtatgccaagaaggactacaacctggcgaacacccgcagatcgatgtgcccaacctccaggtgatcaagctcatgcagagctttaagtccaaggagtatgttagggagaccttctcctggcagtactactactggtatctcaccaacgatggcattgagcacctacgcaactacctgaacctcccgtctgagatcgtgcctgccacgctcaagaagtctgccaag

SEQ ID NO: 54592 - DNA, 160 bp, Zea mays
gaagaagttcgtcagcgacggcgtgttctacgccgagctcaatgagatgctgacgcgggagctcgcggaggacggctactccggcgtggaggtgcgtgtcacaccgatgcgcacggagatcatcatccgcgcaacgcgacgcagaacgtgctcggcgaaa

SEQ ID NO: 54593 - DNA, 186 bp, Zea mays
agcgcctgagctccagcaataatggccgagaagggcgtgaaggtgttggggatgtgggcgagccccatggtgatcagggtggagtgggcgctgcggctgaagggcgtcgagtacgagtacgtcgacgaggacctcgccaacaagagcgccgacctgctccgccacaacccggtgaccaagaaggtg

SEQ ID NO: 54594 - DNA, 269 bp, Zea mays
cttcctcctccagtgctgtcatcgccgccgccaccccggtttacttcgtaagcccgtcgtcctccgtccgcgactctgcgcgagaagcgagagtatggacacccaagtgaagcttgctgttgtggtgaaggtgatgggaaggaccggctccaggggtcaggttacccaggtcagagtgaagttcttggttgaccagaaccgtctcatcatgaggaacgtcaagggaccggttcgcgagggagacatcctcacactgctcgagtccgaga

SEQ ID NO: 54595 - DNA, 270 bp, Zea mays
gggcggacaaggagcaggcggaggaggagctgtgccaagccacaatgggtatctcgcgtgactcgatgcacaagcgccgggccaccggtggaaagcagaaggcctggaggaagaagcgaaagtatgagcttggtcgccagccagccaacaccaagttgtcaagcaataagacagtgaggagggtccgtgttcgtggaggtaatgtgaaatggagggctcttcgccttgatactggtaactactcatggggaagtgaagctgttacccgca

SEQ ID NO: 54596 - DNA, 164 bp, Zea mays
ttacgctcaagtacccgattgagcacggtattgtgagcaactgggatgacatggagaaaatctggcatcatactttctacaacgagcttcgtgttgccccagaggagcaccctgtgttgctcaccgaggctcctttgaacccaaaggccaacagggagaagatg

SEQ ID NO: 54597 - DNA, 198 bp, Zea mays
gcttcggcttcggcttctcccatggtacctcctggaagcagaacgcccatacagcttcctcctgagatccctgccaatttgcttcacatgcatgaacattacagtagccaccacggttgcagctgttctcctcaaactgcctacaggttgcttcacggaagtcggtcacaggagaatactcaacaattatagggcggc

SEQ ID NO: 54598 - DNA, 266 bp, Zea mays
gaaactgaggcaaagatctttgccaaagtcagaggatgggagactgagaatattgaggagattgctttgaagatctctcaacttcctttggcttcaggcaagcaaaagaggattgctgtgattactcaaggtgctgatccagtggttgttgctgaggatgggaaggtgaaaacgttccctgtgatcctattgcccaaggagaagcttgttgacaccaacggcgcaggtgatgctttcgttggaggcttcctctcacagttggttct

SEQ ID NO: 54599 - DNA, 267 bp, Zea mays
gaaactgaggcaaagatctttgccaaagtcagaggttgggagactgagaatattgaggagattgctttgaagatctctcaacttcctttggcttcaggcaagcaaaagaggattgctgtgattactcaaggtgctgatccagtggttgttgctgaggatgggaaggtgaaaacgttccctgtgatcctattgcccaaggagaagcttgttgacaccaacggcgcaggtgatgctttcgatggaggcttcctctcacagttggttcta

SEQ ID NO: 54600 - DNA, 143 bp, Zea mays
cataactgatgcttcacttgctgtgattggatactacgggaaggccatcactgacctttcacttactcgtcttgctactgttggtgagaggggtttctgggtgatggctaatgctgctggcctgcagaatctcaggtgcatga

SEQ ID NO: 54601 - DNA, 272 bp, Zea mays
gagttttctgacgatggtggcgcaagagcggcgctaacactcgcgggaaccatacttggctgctatcctgtcagagttttgccttctaaaacagcaattctacctgtcaacccgaaatttcttcctcagactgatgatgagaaagaaatggtatcaaggactgtatattgtactaacatagacaagaaggttacggaggaggatgtaaagggtttcttccagcaagcctgcgggaaggtttctcggctgaggctccttactgacatagtaca

SEQ ID NO: 54602 - DNA, 196 bp, Zea mays
gaacttccttccggtggttggggagaaagctatttgtcatctcaagaccaggtttacaccaatctcaaaggcaaccggcctcatgcagtgaacactagttgggccatgctggcgctgattgatgcaggccaggccgagagagatccaacgcctctacaccgagcagcaaaggttttgaccaacttgcaatcacatg

SEQ ID NO: 54603 - DNA, 192 bp, Zea mays
cgacagctatgtgatcaagtgctggcactttctgagtacagagcccagctgtatgactatttaagaagcaggatgaacactattgcaccaaatttgacagcactggtgggtgaattagttagtgctcgccttattgcacatggtggaagtttgttaaatttggccaagcagcctggtagcacaattcagata

SEQ ID NO: 54604 - DNA, 252 bp, Zea mays
gaatgggagagcttgatctaaaagcattttcaaaggcatgccaaaaggagcgtacagaaaatgcagaagttactgctgcctttctttgttcaaagtgggaggctgaaataaaaaatcctgactggcacccttttagggtcgtcacaattgatggaaaggagatggcaataatcgaggatgatgcaaagcttcgagcactcaaagaagaacatggagaagaaatctatgcaatggtgacaaaggcgctgcttg

SEQ ID NO: 54605 - DNA, 211 bp, Zea mays
gcagcagcaagcggccccggctggtgtggacgccgcagctgcacaagcggttcgtggacgtggtggcgcacctggggatgaagaacgcggtgcccaagaccatcatgcagctgatgaacgtggaagggctgacgcgggagaacgtggccagccacctgcagaagtaccgcctctacgtcaagcggatgcagggcctctccgacgagggccc

SEQ ID NO: 54606 - DNA, 182 bp, Zea mays
gtctgtctgtcgctctcgcgctcagacgactgggccgccgccgcttggtgctgaggctttggttggtctcttcggcggcgacgagcacccaccagcagttctgtagaaatggctgatggtgaggacatccagcctcttgtctgcgacaatggcaccggaatggtcaaagctggttttgctgg

SEQ ID NO: 54607 - DNA, 103 bp, Zea mays
gaaaattatggagcttcaagagacccacctgagaagcaggcacccatgtgcacagtccattcttttccacacaacatcggagagaacatgacgtgggcccgtt

SEQ ID NO: 54608 - DNA, 262 bp, Zea mays
gtcactcggcagtcggcacgcaggctagcagcacagcagcagccagagccatcccctctcctcgctacgcttcgcttcctcggcgccgattcctcctcctcctcctccaccctcgtccgtcccgttccggcgcgcgagcacgcccgagatggcgaacgcgagatcgggtgtcgctgtgaacgatgagtgcatgctgaagtttggcgagctgcagtcgaagaggctgcaccgcttcataactttcaagatggacgacaagttc

SEQ ID NO: 54609 - DNA, 187 bp, Zea mays
tgcgggcagctggtactgacggccataagataacatacagtgtcataaagcatcggttgggggatctattttatcgcctagtatcccaaaagttcgaggatcctgcagaaggcgaagaagctttggtcggcaagtttaagaaactgtacgacgaccttaccactgggttccgcaacctagaagatga

SEQ ID NO: 54610 - DNA, 184 bp, Zea mays
cacacaacatggggcctcaggatggcatggttggtgctcgacggcagcctcccgcaccagaagctgctcccgccgccgtccgacttacccaaatgttagattagactcttcctccatctctatcctgccggtcgcttcaaattaaagggaattgtgaattagacatgtttgttttttttgacta

SEQ ID NO: 54611 - DNA, 267 bp, Zea mays
ctcgagccgcagctttgaccgcctcccctcccctcctctcctgtgttcctccataccccaatccccccgcaggagcggcgcgtcggcggcaaaggcaaaggcaaaggcaagatgttcgggcgcgcgccgaagaagagcgacaacaccaagtactatgagatcctcggagtgcccaagtcggcgtcccaggacgacctcaagaaggcctaccgcaaggccgctatcaagaaccaccccgacaagggcggtgaccccgagaagttcaag

SEQ ID NO: 54612 - DNA, 179 bp, Zea mays
gggatatgttgtctaccgtgtccgtgtgaagcgtggtggcaggaagaggcctgtgcccaagggtattgtctatggcaagcccaagcaccagggtatcacccagctcaagttccagaggaacaagaggtctgtcgctgaggagagagctggacgtaagcttggtggactgagggttctta

SEQ ID NO: 54613 - DNA, 261 bp, Zea mays
gctgggcctgcaggtctctgtcgagcagcggacgccggtctctgttccgcagatggggtttgttaaagttgttaagaataaggcctactttaagagataccaagtgaaatttagaagacgacgagagggtaaaactgattattatgctcggaaacgcttggtgatacaagataaaaataaatacaatacacccaaatacaggatgatagttcgtgtgacaaacagagatatcatttgtcagattgcttatgcccgtataga

SEQ ID NO: 54614 - DNA, 185 bp, Zea mays
ctcgagccacgataatccgccggcgttgagatgttggtttatcaggatctcctatctggcgacgagctcctgtcggattcattcacctacaaggagctcgagaacggcgtcctgtgggaggtcgagggaaagtaggtcacccaaggtcctgttgatgtggacattggtgccaatccatccgccga

SEQ ID NO: 54615 - DNA, 290 bp, Zea mays
gcgcttcgccttccccagcgacggcatcatcatgctcactgacgaccagaaggacccgttccgggtgcccaccaaggacaacatccggatggcgatgcagtggctggtgcaggggtgcagcagcggcgactccctggtgttccacttctctgggctgggcgcgcaggtcgccgacgcggactgcgacgagcaggacgggtacgacgaggccatctgcccggtggactcgttccagaagggcgccatcctggacgacgagatcaacgagacaatcgtccggccgctggtgc

SEQ ID NO: 54616 - DNA, 280 bp, Zea mays
ccaagcactgactcacccttggttacgagatgaacaaaggcaaattccattggacatactcattttcagattagttaagcagtatctccgtgctactcctcttaaacgtttggcattaaaggcactatctaaggctttaagcgaggatgaacttttgtatcttaggttgcagtttaagctgcttgaacccagagatgggttcgtgtcactcgacaactttcggacggctctgacaagatactcaactgacgccatgagagaatccagggttcttgagttt

SEQ ID NO: 54617 - DNA, 281 bp, Zea mays
agagatcgccgctcctcttctctccgtcggtggtgcggttgaccgccctcctcgagcgagatctcgctgcagtccctcgagatctggtcacagatctatccgacaagatggtgaagatctgctgcatcggtgctggctatgtcggtggcccaaccatggctgtcattgccctaaagtgcccagacattgaggttgtcgttgttgacatctccaagccccgcattgaggcatggaacagcgacaccctcccgatctacgagcccggcctcgatgatgttgtg

SEQ ID NO: 54618 - DNA, 288 bp, Zea mays
ctcgagctcgaatcggctcgagggtgggcggcaagcaaccacggacggactcggagcgtacgtcctcctcccgtctataacattcccctccttttcttcctccatatataggggccatcagatccaagaagagggaagagcaccaaggaccttcggcgcccgttcaggatccacatcttcccgagcgagttcttggttgacctcttcctcttcggaccacctccaaggctcttggtgtagcttgccactctcaccaatcaagttttcatgtctgatctcgacattcag

SEQ ID NO: 54619 - DNA, 286 bp, Zea mays
ccgttctggagcgtgccgacggggaggcgcgacggcaccgtgtccatcaagcaggaggcgctggaccagatccccgcgcccaccatgaacttcacccaactcctccagtccttccagaacaagagcctcaacctcgccgacctcgtctggctctcaggggctcacacgatcggcatctcccaatgcaactccttcagcgagcgcctgtacaacttcacggggcgcggcgggcccgacgacgcggacccgtcgctggacccgctgtacgccgcgaagttgcggctca

SEQ ID NO: 54620 - DNA, 250 bp, Zea mays
ctctgctcccggctcccccacggtactccagccgctaccctgcgattccgccagtacgccaccaccaccgagcctggactaccgccgccgcccttcgccgatatcttcagcggcgaacagcgcccaccagatcccgcccctgcgatggagtccgtggtgaacccgaaggcatacccgctggctgatgcgcactgacgatgggtatcctcgatatcatccagcaggccgccaactacaaacagcttaagag

SEQ ID NO: 54621 - DNA, 280 bp, Zea mays
cgttctggagcgtgccgacggggaggcgcgacggcaccgtgtccatcaagcaggaggcgctggaccagatccccgcgcccaccatgaacttcacccaactcctccagtccttccagaacaagagcctcaacctcgccgacctcgtctggctctcaggggctcacacgatcggcatctcccaatgcaactccttcagcgagcgcctgtacaacttcacggggcgcggcgggcccgacgacgcggacccgtcgctggacccgctgtacgccgcgaagttgcg

SEQ ID NO: 54622 - DNA, 266 bp, Zea mays
ctcgagccgctacggcggtcggcgcgagggtggtggtggcggatacggcggcggcggcgccggctggagggactgatgtgtggccccatcctggcttcggccgagttatcttatctatctatagtatcgtgttaccgttcgcttctgtcaccgtgttagtgtccgttctacctttggattaggtgttggtaccccttttgttcgctttggttgctcccgctatgaaacgagacgagagaagaatgagcaaggtttttgttcgcatc

SEQ ID NO: 54623 - DNA, 108 bp, Zea mays
cggcgttcgagtaccacggcacggactcgcgcttcaaccgcgtgttcaacgagggcatgaagaaccactcggtgatcatcaccaagaagctgctggacttccacacaa

SEQ ID NO: 54624 - DNA, 279 bp, Zea mays
caccgtcctcatctccacccagcacgacgagacagtgaccaatgatgagatcgctgctgacctgaaggagcatgtcatcaagcctgtcatccctgagcagtaccttgacgagaagaccatcttccaccttaacccatctggccgctttgtcattggtggacctcacggcgatgctggcctcactggccgcaagatcatcattgacacctacggtggctggggagcccatggtggtggcgctttctccggcaaggacccaaccaaggttgaccgcagcgg

SEQ ID NO: 54625 - DNA, 280 bp, Zea mays
tctcgccttccgaggaaactcaccagcccaccacagacccgagcggaagaagccatgtccgggcgcggtaagggtggcaaggggctcggcaagggcggcgcgaacgtcaccggaaggtgctgcgcgacaacatccagggcatcaccaagccggcgatccggcggctggcgaggaggggcggcgtcaagcgcatctcggggctcatctacgaggagacccgcggcgtgctcaagatcttcctcgagaacgtcatccgcgacgccgtcacctacactgagca

SEQ ID NO: 54626 - DNA, 277 bp, Zea mays
ccatgttcaacaccgtcgccggcaagaagatcgccgtcctcggcttcgccttcaagaaagacaccggtgacaccagggagaccccggccattgacgtctgcataggcctgctgggcgacaaggcccagatcagcatctacgacccccaggtgacggaggaccagatccagcgggacctggccatgaacaagttcgactgggaccacccgatgcacctgcaaccgacgagccccacggccattaagcaggtgagctgcgtgtgggacgcgtacgaggc

SEQ ID NO: 54627 - DNA, 278 bp, Zea mays
gtttaggatgagatttgaaggtgaagaagcggcagagcaaagattcactggcacaatagttggaatatgtgtttctgatccatctggctgggctgactcaaaatggcgttcccttaaggtgagatgggatgaagcttcttctgttcctcgtcctgaaagagtttctccttggcaaatagaacctgctgttagcccatctcctgtgaaccctcttccagtcagattcaagaggtctcgttcaagtgttaatgcctcaccatctgatgtgtctactgtaa

SEQ ID NO: 54628 - DNA, 278 bp, Zea mays
cggtgacacagggagaccccggccattgacgtctgcaagggcctgctgggcgacaaggcccagatcagcatctacgacccccaggtgacggaggaccagatccagcgggacctggccatgaacaagttcgactgggaccacccgatgcacctgcaaccgacgagccccacggccattaagcaggtgagctgcgtgtgggacgcgtacgaggccaccaagggcgcccacggggtgtgcatcctgaccgagtgggacgagttcaagaccctggactacca

SEQ ID NO: 54629 - DNA, 281 bp, Zea mays
gatcgacgcacgcagccgcgacccatcgcgacctgacccgaccctcccgaggccgccagccttatcctctccgcctccgcctcccgccgtcccccgcgacccatcgcaagcgcgagtagaagacatggcctcgacgttcggtgccacttctacagttggccttatggctgctccaacggggaagaatgtgcgccttcagaggagggctaacttcagagtaaaagcggctaaggagctgtacttcaacaaggatgggtcagctatcaagaagctccagactg

SEQ ID NO: 54630 - DNA, 279 bp, Zea mays
ctcaacacagcacaggcagctcgagagagagagagagagatagatgtcgtggttcgggcaccaccaccacaaccagccggctcccccggcgtcgggccccaaccatgtgttcaagatcttctgccgcgccaacgagaactactgcctggccgtccgcgacggcgccgtcgtgctggccccggtcaaccccaaggacgaccaccagcactggtacatggacatgcgcttcagcaacctggtcaaggacgaggaaggcatgccggcgttcgcgctcgtcaa

SEQ ID NO: 54631 - DNA, 275 bp, Zea mays
gctgcgggctatatcggacagtttgtcatcaagcctttgtttggattcctttttggcactcttgcggttgcagttcttaacctcccagctgctctaggcgctggcataatgttggtttcatgcgtgagcggagcacaactttcaaactatgcaactttcttgacggatccacatatggctcctctcagcattgttatgacatcattgtcaacagctactgcagtttttgtcaccccaacattatcttactttcttattggccagaaattacctgt

SEQ ID NO: 54632 - DNA, 274 bp, Zea mays
atcagctgcaatttgaagctgaacttggacagactacttgcgagaatgtgggaggagatgggcctagtgagggtgtatacaaagccacagggccagcagcctgatttcacagacccagttgttctttccaccgacagaggtggctgcacggtggaggacttctgcaatcatatccatagaagtttgctcaaggacgtgaagtatgtgctcgtatggggaaccagcgcaaggcactatccacagcattgcggcctcggccatggccttaacgacg

SEQ ID NO: 54633 - DNA, 276 bp, Zea mays
atccctcacccccttcccaaggtattacattggcacacacttatttcctgaggttcttctgaatgatattgctggtccggatggggattcattacttttgagtataaagcttgctgtggatgtattagttgtttcctgtccttgtgcacttggattagctacacctacagctatcttaataggaacttccctaggtgctaaaagagggttactggttagaggaggtgatgttttagagcgtttggctggaatagatactcttgtgcttgataaaac

SEQ ID NO: 54634 - DNA, 149 bp, Zea mays
ccgtccgccccgtcccgcattcgtatcctctcctcactctcgccgccgccgcttcccctgcgccccgagccaagatgaatgttgaaaagctcaagaagatggcaggtgctgtgcgcactggggggaagggtagcatgcgcaggaagaag

SEQ ID NO: 54635 - DNA, 282 bp, Zea mays
ctcttccacggccgcggtggagatggcggcgaatctggaggacgtgccgtcactggatctgatgcacgagctgctccgccgcatgaagtgcagctccaagcccgacaagcgcctcatcctcatcggtccacctggctctggaaagggaactcagtctcctattatcaaggatgaatattgcttgtgccatttagccactggtgacatgctgagggctgctgtggcggccaagacacctctaggtatcaaagctaaagaagctatgaataagggagagcttgt

SEQ ID NO: 54636 - DNA, 277 bp, Zea mays
gtttaaatcagagattgctgttttgaccaaggttcgtcaccggaaccttgtttcgctgctgggctactgccttgatggcaatgagaggattcttgtgtatgagtacatgccacaggggacactgagccaacacctgtttgagtggtcagagaacaatttgcgaccattggaatggtaaaagcggcttagtattgcacttgatgttgcaaggggcgttgagtaccttcacagccttgcccagcagacctttatccacagagacttgaagccatcaaac

SEQ ID NO: 54637 - DNA, 273 bp, Zea mays
agatgtcgaagcgagggcgtggaggttcggctggtaacaagttccggatgtcactgggtctaccagtggcagctactgtgaactgtgccgataacactggagccaagaacctgtacatcatttctgtgaagggaatcaagggtcgccttaacaggcttccttctgcctgtgttggtgacatggttatggcaaccgtgaagaagggaaagcctgaccttagaaagaaggtgatgccagctgttattgtgaggcagcgcaagcatggcgccgaaa

SEQ ID NO: 54638 - DNA, 275 bp, Zea mays
cgcacttacagatatatgtctgaggagattaaagcggtacaatcctgttctagaagctgttattacatatactgaagatttagcatacaaacaagccaaggaggcagatgacttgctggcacaaggagaatatcttggtcctttgcatggcattccatatggcctcaaagatataattgcggtaccacactataagaccacttggggctcaaggacgtttaaataccaagtccttgatagtgaagcttatgtgtacagatgattgaagtccgctg

SEQ ID NO: 54639 - DNA, 271 bp, Zea mays
gggttttggtctcgccgcgcacgcctcctgaagcttctagacgttcgaggaggaggaggaggaggggaggctcccgccgccgccgtagccatggcgtccaccaaggtgcagcgtatcatgacccagcccatcaacctcatcttccgtttcctccagagcaaagcgcgcatccagatctggctcttcgagcagaaggacctccggattgagggtcgcatcatcggattcgatgagtacatgaacttggtcctcgaagatgctgaggaaatca

SEQ ID NO: 54640 - DNA, 270 bp, Zea mays
ggacctgcttctgcttgacgtcactcctctctctctgggtctggagactgccggaggagtgatgaccgtccttatcccgaggaacaccaccatccccaccaagaaggagcaggtgttctccacctactcggacaaccagcctggtgtgttgatccaggtgtacgagggtgagaggacccggaccgccgacaacaacctgcttgggaagttcgagctctccggcatcccaccggctcctcgtggtgtcccccagatcacggtctgcttcga

SEQ ID NO: 54641 - DNA, 276 bp, Zea mays
gtcactggagacattgtattcgtcctccagcagaaggatcactccaaattcaaaagaaagggtgaagatctcttctatgagcacaccttgtctctgaccgaagcactatgtgggttccaatttgttcttacacatctggacaacaggcagcttctcatcaaatcagaccctggtgaagttgttaaacctgaccaattcaaggcgattaacgatgaggggatgccaatttaccagaggcctttcatgaaggggaagctgtacatccatttcacggtg

SEQ ID NO: 54642 - DNA, 271 bp, Zea mays
gtccagctgatgatccacggtgctgatgctttcccattcaccgaggagagacttgaggagctacagaagaagctggatgagatggcgaaggggtggcctcagaagctgaagcatgagctgcatgacgagcacgaacttgtcctgctgcgccgtggtacgtaccgctgtgatggttgtgacgagatgggcagcagctggtcctacaggtgcgacgagtgtgactttgacctgcaccccaagtgcgcgttgggtgaggaaaagatgagtgagg

SEQ ID NO: 54643 - DNA, 275 bp, Zea mays
ggtcaagcaggcagagtctgcacctcctattccgaaaaaggctgctccttctaaggagccaaaggcaaaggatgtcaagaaggaggctccaaaggaggcccccaagccaaaggtggttgaggcaccagcagaagaggaagcaccaaagccaaagccaaagaatcctcttgacttgctgccaccaagcaagatggtccttgatgactggacgaggctatactcaaacacaaagactaacttccgggaggttgccatcaaaggtttctgggacatgt

SEQ ID NO: 54644 - DNA, 265 bp, Zea mays
cagtcaacggatttcactgagcttgcaaaccaggagccgtggctctcatctatgaagttggttgtgaaacctgacatgctctttgggaaacgtgggaagagtgggcttgtggccctcaacctagatcttgcccaagttcgccaatttgtcaaggagcggttgggagttgaggtcgagatgggtggctgcaaagctccaattacaaccttcatagttgaaccatttgtgccacatgaccaagagtactacctttcgattgtatctg

SEQ ID NO: 54645 - DNA, 271 bp, Zea mays
ctccaatggcagaccttgtttatgaagttgaactcattggatttgatgatgttaaagagggtaaatcccgaagtgacatgacagttgaagagaggattgcagctgcagacaggagaaagattgagggcaatgcatatttcaaagaaaagaagcttgaggaggccatgcagcaatatgaaatggctttagcatacatgggagatgatttcatgtttcaattatttggaaagtacagagacatggccttggctgtgaaaaatccatgccatct

SEQ ID NO: 54646 - DNA, 270 bp, Zea mays
cctcgttcctgtcgcgcagcacgacctccacttccgcatctcccccggcgtcggcgcggtcagttgaaccatggcggactccaaggccacctcggcggtcaccctccgcacccgcaagttcatgaccaaccgcctcctggcccgcaagcaattcgtgcttgaggtgatccatcccggccgcgccaacgtctccaaggcggagttgaaggagaggcttgccaaggcgtacgaggtgaaggaccccaacaccatctttgtcttcaagttccg

SEQ ID NO: 54647 - DNA, 282 bp, Zea mays
gagagattggagggaggcccctgcccaaggcaagagaaaccgcggcgcgcggagagaggaggaagggcagacgcagacgcagacgggcgaacaagatgagggagatcatcagcatccacatcggccaggccgggatccaggtcggcaacgctgctgggagctctactgcctcgagcacggcatcgagcacgatggcaccatgcccagtgattcctcggttggcgtcgcacatgatgccttcaacacgttcttcagcgagactggttccggcaagcatgtgcc

SEQ ID NO: 54648 - DNA, 276 bp, Zea mays
cgcttcctcccgttagactagggtaggctacggtgtcgaccagctcgcggaaatggtggccttcaggttccatcagtaccaggtggcggggcgcgcgctgccgacgcccggcgacgcgcaccccaagatctaccgcatgaggctctggcgaccaacgaagtccgcgccacgagcaagttctggtacttcctgaggtagctgaagaagggtaagcagagcaacggtcaggtcctggccatcaacgagatcttcgagcgtaacccgacgacgctcaag

SEQ ID NO: 54649 - DNA, 277 bp, Zea mays
gaaagggagagagacactcgtcccccgtaccgtggcggaggcagacgtggtggttacaggaatgttgagtttggtgatgactctgagaggccaccacggagaaactatgagcgccacagcgggactggccatggctatgagatgaaggtgatggcgcagggcgtgggaactggggcactgccactgatgagcttattgcccaggatgcagaggactctccgaagatggaggatgctgctcctgttgctgagaaacaaggtgagcagatcgatgcccc

SEQ ID NO: 54650 - DNA, 280 bp, Zea mays
acaaagcctcagatctcagtcgcctgcgccgccgcttcgttcgtgtggaggggagaagacaggaaatggcggcgactgagggcgtgctcttggggatgggcaaccccctcctcgacatctccgccgtcgtcgatgacgccttcctgacaagtatgacatcaagctgaacaatgctattctcgctgaggagaagcacttgcctatgtatgacgagttggctagcaagagcaatgttgaatatattgccggaggagccacccagaactctatcagggttgcc

SEQ ID NO: 54651 - DNA, 277 bp, Zea mays
cacaaaaatgcccagaagcatttgaacgtttagggatccgaccccctagaggattgctaatgataggaccgccaggatgcagcaagactttgatggctcgtgctgcagcttctgaagcaaaattgaatttcctggctgttaagggtccgaacttttcagcaagtgggtcggtgactcagaaaaggcagtgagatcgctatttgcaaaggcgcgggctaatgcaccagcaatattattttttgatgaaatagatgggcttgcagtaactcgtgggcaa

SEQ ID NO: 54652 - DNA, 282 bp, Zea mays
aaacctacaccacaaccagacccaaaacctggaccacaaccagacccaaaaccagaacccaaacctacaccacaaccaggcccagagccgaaacccaagctagcgcctcaacctgagccaaaacccacgccgcaaccagatccgaaaccgagccaaaaccaacaccacaaccacccttcccacagcccgagcctcaaccagatcccaaaccccaacccgaaccatacaagttagatcctcgatcagatcctaaaccccaacccgaaccatccaagccagacc

SEQ ID NO: 54653 - DNA, 234 bp, Zea mays
ctatatttgaaaggggaatggctacatgctttgcttatgggcagactggaagtggaaaaactcatactatgggtggtgacttttcaggaaagaaccaagattgttctaaaggaatttatgcattagcagctcgagatgtctttttaagctaaagaagccaaactataagaagctagaacttcaagtatatgcaaccttctttgaaatttatagtggaaaggtgtttgacttgct

SEQ ID NO: 54654 - DNA, 269 bp, Zea mays
ggcatatgaaaatttattactacagtgttttcaccattaatatttatgatcttggacttaccttcttgcctttgtatagggctaaaagagaaacattggctactttgacaaccttaaagcggactccaggaatatcacaacagcatgacctttgcgaccaaatccagcaaccataagttcatcatgttcctcaataaagttcaagcaaccgtcattgggtacaaaggctgtgattttcttgccattcttgatcagctggacccttacac

SEQ ID NO: 54655 - DNA, 282 bp, Zea mays
acgctctccctctccacctctttcctccccatccccgccgccgcgaggaccaccgcccgcaccctacgctccgtcgtcccctcccaggggatgcgctgctcgatgcgcaagaaggggttgcacccggagatctacgaggacgcgaaggttactgcaacggcgagctggtgctggtgacggggggcaccaagccggagtacacggtggacgtgtggtccggaaaccacccctactacgtcggcgacacctcggcgctcgtggtcatggacagccagatcgaga

SEQ ID NO: 54656 - DNA, 279 bp, Zea mays
aggtgacagtcgagtaccgcaatgagggtggtgccatggtccccatgcgtgtccacaccgtcctcatctccacccagcacgacgagacagtgaccaatgatgagatcgctgctgacctgaaggagcatgtcatcaagcctgtcatcctgagcagtaccttgacgagaagaccatcttccaccttaacccatctggccgctttgtcattggtggacctcacggcgatgctggcctcactggccgcaagatcatcattgacacctacggtggctggggagc

SEQ ID NO: 54657 - DNA, 277 bp, Zea mays
aggtgacagtcgagtaccgcaatgagggtggtgccatggtccccatacgtgtccacaccgtcctcatctccacccagcacgacgagacagtgaccaatgatgagatcgctgctgacctgaaggagcatgtcatcaagcctgtcatcctgagcagtaccttgacgagaagaccatcttccaccttaacccatctggccgctttgtcattggtggacctcacggcgatgctggcctcactggccgcaagatcatcattgacacctacggtggctgggga

SEQ ID NO: 54658 - DNA, 273 bp, Zea mays
ctgcattttatccttcctggtgctctgtccacctctctcgctctgggccgccgccgccgccctaagccacgtgctgaggctttcgttggtctcttcgccggcgacgagcacccagcagttctgtagaaatggctgatggtgaggaatccagcctcttgtctgcgacaatggcactggaatggtcaaggctggttttgctggcgatgatgcaccaagggcggttttccctagcattgttggccgtcctcgccacactggtgtcatggtagggat

SEQ ID NO: 54659 - DNA, 275 bp, Zea mays
caatttcgagcctgggagctcgcctggaagcctgcccaagctgcagctcaacccctacagctggtcaaaggtctcgaacatcatgtacctagactctcctgccggtgtggggatgtcgtactcgctgaacagatcggattatgtacaggtgacctgaaaaccgcagctgacgcccacaaattcctgtcgaagtggttcgagttgtaccccgagtttcagttgaacccgttctacatctcgggggagtcgtacgcaggggtctacatccccacgat

SEQ ID NO: 54660 - DNA, 272 bp, Zea mays
ctcaacccgtccggaaggtgatcttggcccgctccatgccttcactgctggagtgtacattgccctgatgatggctcagattgagatcctgaggaagaaggggcactcctactctgagatcatcaacgagagcgtgattgagtcggtggactcgctgaacccgttcatgcacgcccgtggggtcgccttcatggtggacaactgctccacaacggctcgcctgggatccaggaagtgggcgcctcgcttcgactacatcctgacgcagcagg

SEQ ID NO: 54661 - DNA, 274 bp, Zea mays
cagagagcctacacatgttcaccttcctctttgacgatgttggcatcccactcaactacaggcacatggagggctttggtgtcaatacctacaccttgatcaacagggatggaaagcctcaccttgtgaaattccattggaagctacttgtggtgtgaaatgcttgctcgacaatgaagctgtgactgttggaggcacctgccacagccatgcgacgaaggatctatatgattccatcgcagctgggaattaccctgaatggaagctctacatc

SEQ ID NO: 54662 - DNA, 277 bp, Zea mays
ctgctcctcacgccgccgccgccgccgccgccgccgtcgccgcgcccacatccgtagcgcccagccgccggagaagaggagggagccagcaccagccaccatgggtcgcgtccgcaccaagaccgtgaagaagacctccaggcagtgatcgagaagtactactcccgcatgaccctcgacttccacaccaacaagaaggtgctggaagaggtctcgatcctcccctcgaagcgcctccgcaacaaggttgccggcttcaccacccacctgatgcgcc

SEQ ID NO: 54663 - DNA, 279 bp, Zea mays
gagtgctcctgcctcctatgggcctttgatccggggcttcgtggatcttgggaagaggaggtgtggtgggcgcctcggcggcgatctggcggggaggatatggccagcgggaaggagccgatcgaagtcaggtttcgtctcttcgacgcacggatatcgggcctacgaagtacgatccctccaccacggtctcctcgctcaaggagttcatcctcgctcggtggccgcaagataaggatatagctccaaaaactgttaatgacttgaagcttatcaatg

SEQ ID NO: 54664 - DNA, 274 bp, Zea mays
gtgaatggtgagaggctgggcacctacatgggccataccggagctgtgtggtgtgtggacgctgactgggacaccaagcatgtcctcactggctcagctgacaacagctgtcgtctctgggactgtgaaacaggaaagcagctgcccttctcaagaccaattcggctgtccggacctgcggttttgactttgggggcaacatcatcatgttctccacggacaagcagatgggctaccagtgctttgtgagcttttttgacctgcgggatccgag

SEQ ID NO: 54665 - DNA, 273 bp, Zea mays
gtctcaccggacattgttctgtacactataatgatccgtgggtgtgcggaggctggaagaaccaatgatgcatttgcgttctttgacgagatgaaagagaaaggttttactcctgataccttctgctacaacacgctgctgaagccctctgtgatgctggtgatctggatggagctcgctcgtagatgtcagagatggtgcggaataatgtagtcctagacatccatacatatactaccatgataattgggttgtgcaaagaacagcttgtag

SEQ ID NO: 54666 - DNA, 275 bp, Zea mays
aggggacgtccgtgttggaaatggtggctgcattcgagaaggcttctgggaagaaaatccctctggtgttcgctgggcgaagacccggagacgcagagatcgtctacgccgcaactgccaaggcagagaaggagctcaaatggaaggccaagtacgggatcgaggagatgtgcagagatctgtggaactgggcgagcaagaacccgtacgggtacgctgggtcacgcgacaacagcaaatgaaccacccatccatgcatcccatcctgcagtagg

SEQ ID NO: 54667 - DNA, 269 bp, Zea mays
aaagggtactattatctggcccaccagggtccgagatctaccaagaattactggttaaggcacttaccaaatcctttggtgctaagctgcttgtcatagattattcactgctgtctggtgggcagccttcaaagtcaaaggatcaaaaccatacaaaaaaggtgatagggtgaggtacattggtcctattcaatcatcagggtttatgtttgagggacagagagctcctgattatggttcacagggtgaagtgaggcttacttttgcgg

SEQ ID NO: 54668 - DNA, 278 bp, Zea mays
aggaattctgcaaggcatgcagaggaaacaaagttgtgcctggaaggaaatcagtccgccttgacatactgcctggtttggataatgaggataccataaaggtggttcgatcaggtggagaagacccagatggccgtccaggtgatctttatgtgaccctcgaggttcgtgaggatcctgttttccgaagagagaaaggtgatattcatgttgatgctgtcctgaatgtgactcaggcaattttgggagggacagttcaagtcccaactctcagtgga

SEQ ID NO: 54669 - DNA, 274 bp, Zea mays
  unsure (1)..(274): unsure at all n locations
cgcaagatgttcggcttcgggcaccacggccaccacggccagaacgcgccgtcgcacggcggcgtgcagcagcccaccttcaagatcttctgcaaggccgacgaggggtactgcctcaccgtccgcgacggcaacgtggtgcggcccccgctttnccgcgcgacgagcaccagcactggtacaaggacatgcgcttcagcacccaggtcaaggacgaggaaggcaaccctgcgttcgcgctcgtcaacaaggccactgggctccgccatcaagc

SEQ ID NO: 54670 - DNA, 268 bp, Zea mays
tctgtctcccgacgccgccgctaggtttgcgcctttgcctgcatcactcgctcattcggagcccctctcttcgccggcgtcgtaagaagagatggcagagcgtttgacccgtatcgccatagttagcgaggacaagtgcagcccaagaagtgccgccaggagtgcaagaagagctgccccgtcgtcaagactgggaagctttgcattgaagtgacttcggcgtcgaaactcgctttcatttctgaggaactgtgcatcggttgtggta

SEQ ID NO: 54671 - DNA, 271 bp, Zea mays
ccggtagggacgaggcgctggaagtcgtgacgccagaggcggggacgatggaggtggatggcgatgatcccatcagcaagaagaagatgaggcaaatgaggaacagagattccgcgatgaaatccagggagaggaagaagcgtacataaaggacttggagacaaagagcaagcacttggaggcagagtgccgtcgcctcagctacgcacttcagtgctacgcagctgagaacatggcactgcgccagagcttgctgaaggataggcctctt

SEQ ID NO: 54672 - DNA, 272 bp, Zea mays
cagaaaacccagccgccgccgcatcggcctcccaggtaagcagtagcgtccaccccagccgccgccatgaagcgcaacccccgcgtcacgagctcccgccggaagtgccgcaagggcacttcacggccccgtcctccgtcgccgcgtgctcatgtccgcggcgctatcgacggagctccgccacaagtacaatgtgcgttccatcccgatccgcaaggacgacgaggtgcaggtcgtgcgcggcacctacaagggccgtgagggcaaagtgg

SEQ ID NO: 54673 - DNA, 269 bp, Zea mays
tgatgatgtgatgaagcttgattttggaacacatatagatggttacattgttgattgtgcatttactgttgcattcaatcctatgtttgatccattgcttcaagcaacgagagatgccacaaatactggaatcaaggaactgggatagatgcacggcttggtgatgtcggtgctgcaatccaagaagttatggaatcctatgaggttgaaatcaatgggaaagttttccaagttaaaagtgttcggaacctcaatggacacagcatcgg

SEQ ID NO: 54674 - DNA, 271 bp, Zea mays
caaaaacaggcaaatgtaaatttggtgccgtttgcaagttcaatcacccaaagctagaagatattaagacatcatctttgattgcaaaggaaaccatatatagagcaacaactgatgcagcagcgcacattggtgggacaatgattctgttcccgcaaagacacatgcaccaattgccccagccgaggcacataatgcaaaggggcttccaataagaccaggtgaagtggattgctcgttttatatgaagacaggcagctgcaaatatggt

SEQ ID NO: 54675 - DNA, 269 bp, Zea mays
ggttagggtgctgaggatgaactgaaggatgctgttggtctggttcgcccagttagcgttgccttcgaggtgatcactggtttcaggctgtacaagagcggagtttacactagcgaccattgtggaactacaccgatggatgtgaaccacgctgttctggctgttggctacggtgtcgaagatggtgtcccctactggctcatcaagaactcatggggcgctgactggggcgatgagggttacttcaagatggaaatgggcaagaacat

SEQ ID NO: 54676 - DNA, 269 bp, Zea mays
aaatcttgtgagaaagtgtggaaattgtcatcattgccgaaggtggttcaagtgacaaaggttcctagaatggcagtgtggcctaagatatttaaagcatcagaacccagtggtgacaatattggcctatatttcttccccctgaaatgaggcacgatgaagaactagatcaactagttaatgaagtcatggataaagatttgatcttgcgagctattattggtgaagctgagatgctgatattcccgtctgttctactacctgaaaga

SEQ ID NO: 54677 - DNA, 266 bp, Zea mays
gcacaaccgtctgtacatggaagcgcgccccctggaggagggtcttgctgaggcaattgatgatggccgcattggcccacgtgatgatcctaaggtgcgctcccagatcctctctcaagagtttgggtgggacaaggatcttgccaagaagatttggtgcttcggacctgagaccaccggcccaaacatggttgttgatatgtgcaagggagtgcagtatctcaatgaaatcaaggattctgttgtggctggtttccagtgggcat

SEQ ID NO: 54678 - DNA, 267 bp, Zea mays
ctaacccatttagtcatctcacagaaggagaacttgaagagtataagaggacaatcgaacgtaaacaacaaggcctagaagaaaaccatgagctgttttccaagagcttcatctccatggaagtgcctgtcatggtataaatggcaaggatgatatgcatgatgttgaagatgagcttgctaagcgagtgagtaggttaagcacaagtacaaccatagaaaacatcgagattactattaagtctccagagaaaatcgaagaagtcct

SEQ ID NO: 54679 - DNA, 268 bp, Zea mays
gggtttttgattttagccgccgccgctgctcatctcacatccctcgagaagacgcctgctcctcgccgatcgatacgatggccgtcttctccgacctccacaccgccgacggcctcaagtccctcgaggctcacctcgcggcaaaacctatgtgtctggtgactccattactaaggatgacattaaggtcttcgccgcggtgccgtcgaagcctggcgctgagtttcctaatgccgcccgctggtacgagaccgtctctgcggctgta

SEQ ID NO: 54680 - DNA, 268 bp, Zea mays
cgcctgcctctcctcctccagagctcgtcgccaccggccaccgccaccctcgatcacgccgtccgtcgaggtaaggtcagcatggtgagggtcagtgtgctcaacgatgcgctcaagtccatgtacaacgctgagaaattggcaagaggcaggtcatgatcaggccgtcatccaaggtcatcatcaagttcctgacggtcatgcagcgccatggctacattggagagttcgagtacgttgatgaccaccgatcgggcaagattgtggt

SEQ ID NO: 54681 - DNA, 267 bp, Zea mays
cctcgttcctgtcgcgcaccacgacctccacttccacatctcccccggcgtcggcgcggtcagttgaaccatggcggactccaaggccacctcggcggtcaccctccgcacccgcaagttcatgaccaaccgcctctggcccgcaagcaattcgtgcttgaggtgatccaccccggccgcgccaacgtctccaaggcggagttgaaggagaggcttgccaaggcgtacgaggtgaaggaccccaacaccatctttgtcttcaagttc

SEQ ID NO: 54682 - DNA, 270 bp, Zea mays
ccgaaacagcacatcgctctctcgatctcagccatggcggaggtggagcagccccaggacgcggtgaagctcttcaaccgctggaccttcgacgatgtccaggtgaacgatatctcgctgaacgactacctggctgtgctgcggcgaacacgcgacattcctgccgcactccgcggggcgctactccaagaagcggttccgcaaggcgcagtgcgccatcgtcgagcgcctcaccaactcgctcatgatgcacgggcgcaacaacggcaa

SEQ ID NO: 54683 - DNA, 273 bp, Zea mays
gcagactgctcgtaagtccaccggtgggaaagccccccgcaaacagctggccacgaaagccgctaggaaaagcgatccctctaccggcggggtgaagaagcctcatcgctacaggtccgggaacgtggcgcttcgagagttcgtcgttatcagatgtcgaccgagctgctcatccggaagctgcccttccagaggttggtgagggagatcgcgcaggatttcataaccgacctgaggtttcagagcgcagccatcggtgcgctgcaggaggct

SEQ ID NO: 54684 - DNA, 280 bp, Zea mays
gcgggccgccagaggcaatttcgccctcgattcgaccccgattcgtccgcccgcgaccgggattccctccgccaagcgcggatctgaacgctgcgctccgtgtcgccgctcgaatccgccatgaagggggccaaatccaagggcgccgccaaggccgatgccaagctggcggtgaagagcaagggggcggagaagcccgccaagggcaggaaagggaaggccggcaaggaccccaacaagcctaagagggctcccagcgctttcttcgtgttcatggagg

SEQ ID NO: 54685 - DNA, 279 bp, Zea mays
cttgggaagtggatatgtagcccatctatgctaacctctcggtttgctcttgctgcgtccggactaaatggagtcatctatacatctggtggctatgatggaaacatgtacttgaaatcagcagaaaggtatgatccaagggagggcttctgggtccggcttccaagtatgagtactaggagaggatcccacacctttactgtccttggagacaccctatatgctatgggagggtatgatggggacaaaatggtttctagcgttgagatctatgatcct

SEQ ID NO: 54686 - DNA, 279 bp, Zea mays
tggaccgctcctccgtcttctcgcgtgagcacgtgccgccggccgtctccgctgtcacctccctgccagttatcgacatgtctcgcagccgcgacgaggtccgccgcgctatcctcgacgccggcatggagttcggcttcttcctggtggtggagcacggcatcccagaggaggtgatgcgcgacatgctggaggtgtgcgaggagttcttccagctgccggcggcgagcaaggcgtacatgtactcggaggacagtcagagacccaaccggatcttct

SEQ ID NO: 54687 - DNA, 285 bp, Zea mays
tgctgagggtcgcctgatgaaccttgggtgtgctactggccatcctagctttgtcatgtcctgctcattcactaaccaggtcattgcccaacttgaactgtggaaggagaagagctctggcaagtatgagaagaaggtgtatgtgctccccaagcaccttgatgagaaggttgctgctctccacttgggcaagcttggtgccaagctgaccaagctcaccaagtctcaggccgactacatcagcgtgccgatcgagggtccctacaagcctgcccactaccggta

SEQ ID NO: 54688 - DNA, 285 bp, Zea mays
gtcatctcatccctgactgcttccctgaggttcgatggtgctctgaacgttgatgtgaacgagttccagaccaacctggtgccctaccctaggatccacttcatgctttcgtcctacgctccagtcatttctgctgagaaggcctaccacgagcagctgtccgtggccgaaatcaccaacagcgccttcgagccatcctccatgatggccaagtgcgacccccgccatggcaagtacatggcatgctgcctcatgtaccgtggtgatgtggttcccaaggacgtg

SEQ ID NO: 54689 - DNA, 281 bp, Zea mays
ctcgagagtgtgtctctttgtgaagctattctttgcatttagagagattgtccatctttatcccgttctcaaaggtttggttggaaggcaaaagcaggacaccaacgattgtcatcgtctggtccattctgctggcttcaatcttctcgctcctttgggttcggattgatcctttccttgtgaaggatgatggtccgcttcttgaggagtgtggtttggattgcaactaggatgtcagtgcatcagctcccccaatctgcatatgcttgaagtatattttc

SEQ ID NO: 54690 - DNA, 278 bp, Zea mays
aaccctagccctcgcgccgccgccgccgtgcccagcgctcgagctcctcgcctgccgcgagctcgcgccgcaacgccaccatgaagttcaacatcgcgaacccgtctaccgggtgccagaagaagctggaaatcgatgacgaccagaaactacgtgccttttatgaccgaaggatctcccaggaggtcagtggtgatgctctgggtgaggagtttaagggttatgtcttcaagatcatgggtggatgtgacaaacaaggcttcccaatgaagcaagga

SEQ ID NO: 54691 - DNA, 278 bp, Zea mays
gtgacatggaccagaacactagagacatcatcatgagggagttccggtctggctcctcccgtgtgctcatcaccaccgacctgcttgctcgtggtattgatgttcagcaggtgtccctggtcatcaactatgatctccccacccagccagagaattacctgcatcgcattggtcgtagtggtcgtttcggtaggaagggtgttgccatcaactttgtgacccgcgacgacgagcggatgctgttcgacatccagaagttctacaacgtgttgattgag

SEQ ID NO: 54692 - DNA, 274 bp, Zea mays
gctgagggtcgcctgatgaaccttgggtgtgctactggccatcctagctttgtcatgtcctgctcattcactaaccaggtcattgcccaacttgaactgtggaaggagaagagctctggcaagtatgagaagaaggtgtatgtgctccccaagcaccttgatgagaaggttgctgctctccacttgggcaagcttggtgccaagctgaccaagctcaccaagtctcaggccgactacatcagcgtgccgatcgagggtccctacaagcctgccc

SEQ ID NO: 54693 - DNA, 278 bp, Zea mays
tccgccgtcgaggccgcgtcccagtgcgaagagaccacgactcagatggccagccgctgggtccggaccgaggtgtacccgctgttcgcggcaacgggcgtggccgtcggcatctgcggatttcagctcttccggaacatcaccggcaacccggaagtcagggtaaacaaggcagggagggcagctggtgtgcttgagaaccatgaggaggggaggcgttacgccatgcatggcctaagacgctttgtgcacgacaagactcctgagatcatgcctgc

SEQ ID NO: 54694 - DNA, 274 bp, Zea mays
ggggcccctctttgggaagctattctttgcattttgggtgattgtccatctttatccctttctcaaaggtttggttggaaggcaaaacaggacaccaacgattgtcatcgtctggtccattctgctggcttcaatcttctcgctcctttgggttcggattgatcctttccttgcgaaggatgatggtccgcttcatgaggagtgtggtttggattgcaactaggatgtcagtgcatcagctcccccaatctgcatatgcttgaagtatattttc

SEQ ID NO: 54695 - DNA, 274 bp, Zea mays
ctcctccacaacacgctcctcacctcgcggcgactcttgccaggcattcctccgcgaaaaacgcatccgctccaaggggagttgatcgagaagcgttggtggacatgggtcagatccagtactccgagaagtacttcgacgacacctacgagtacaggcacgtcgtcctcccgcccgaggtcgccaagctcctccccaagaaccgtctcctgtccgagaacgagtggcgcgcgatcggagtgcagcagagccgcgggtgggtgcactacgcgat

SEQ ID NO: 54696 - DNA, 277 bp, Zea mays
ttttgattaccttacgctatcagcaatcattaatggtcaagtcctctgtgttcatggcggtctttctcctgatgtacgtactattgatcagatacgaacaattgatcgcaattgtgaaattccccatgaaggtcctttctgcgaccttatgtggagtgaccctgaggagatagagacatgggctgttagtccccgtggagcaggttggctgtttggatcgcgcgtcacagcagagttcaactttgttaacggtatcgagctagtttgccgggctcac

SEQ ID NO: 54697 - DNA, 143 bp, Zea mays
tgaaaaagaagatcaaggaggtttctcatgagtggtcattggtcaacaagcagaagcccatatggatgaggaagccagaagaaatcacaaaagaagaatatgctgccttctataagagcttgacaaatgactgggaggagcat

SEQ ID NO: 54698 - DNA, 251 bp, Zea mays
gaagttggcgtgcagctgggagatgtagactaagttggtcatgatgcagtagctactcaaatgcagtcggcttgtcctggctcttgccctcatcctggttctggaatcctcagttcaaggttatcctacgcagagagccaggtaccaatgggtgcgctgcaatccagacagtaattctgcaaactgccttgaaagaaaaggatcaatgttcgaactatttccaggtgaatccaacaagatcccccgtctga

SEQ ID NO: 54699 - DNA, 268 bp, Zea mays
cgccgccggatgtgttctacaacgagtcggaggcccgcaagtacaccacctcctcccgtatcatcgaaatccagtctaggatttccgagagggcgctggagttgcttgctctccccaacgatggcgtccccaagctacttctcgacataggatgtggttctggacttagtggtgagacattgacggagcatggccaccactggattggctacgatatttcaaagtctatgctcgatgttgccttggagcgtgaaacggaaggagacct

SEQ ID NO: 54700 - DNA, 276 bp, Zea mays
cgaagatttgcaagttcttgtgatcatatcgagaccgcctgctaagatatttttatatgatgattggagcatgcctcatacagccgcggtactgaaattccccttcgtctgggatgaggactgcttcgaagcagcaaaagacgaactctaggtcacaagtgtttcctgcaatttatctgcttcatccatgatcctgctggtgctggactactacaattctcagcactagttgtaataaagccagtgagcttgtcatggataattctgtattgtggc

SEQ ID NO: 54701 - DNA, 268 bp, Zea mays
cagcactagagtatagggccaacgatgcagagaagaaggtggaagtactgaatgaaaagcttaatacaatccaaaaggaaagtgatgagaaaaaacgcaaaatcaagaagacagaacgtgctcttaaagtcgctgaggaggaattaatgaggttgcagttagaagtaactgctaaatcaaaacagctgtcagatgttcatggagcatggttaccaccttggctaatggcacaatatgctcgttatgcggaggttgtctcaggtcactg

SEQ ID NO: 54702 - DNA, 263 bp, Zea mays
gcaccttcaaaatcaagtccggattccaagaagagcaaggatgacgatgattctgatgaggacgagactgatgattctgatgaggatgagacggacgattctgatgagggtttatcttctgaagaaggcgatgatgattcaagtgatgaagatgataccagtgacgatgaggaggaagacactccaactcctaagaagcctgaggtaggcaagaagagagctgctgaaagttccgtgctgaaaactcctctatctgataagaa

SEQ ID NO: 54703 - DNA, 267 bp, Zea mays
tgccggtcaacacggaggccacccccaaggcgcagggcgtcttccacgtcgacatgatcatgctcgcgcacaaccccggcggcaaggagcggtacgagcgcgagttccgcgagctcgcaaagggcgccggcttctccgggttcaaggccacctacatctacgccaacgcctgggccatcgagttcatcaagtgaaccaccgtcgccgcgatgagatggcatggctgccacatgctttgcttgcttggtcctcgtatcgtacgtcgcc

SEQ ID NO: 54704 - DNA, 268 bp, Zea mays
ttttgttttttcaaatgtttattttatatacaaagaattatcatggtttttcattgagtagatgccccggataatcctctgaaggaagagcatttagttcaacttaatgaaaccgatatccttcgcgtactgacggaaacactggcggcacatattgaggccatatttccggatcagaccgtgccggtttgaacagacacgacaagagcgagaaccctggccgaattttcgcgggtggctccagtacagctgctggtgacccatcttg

SEQ ID NO: 54705 - DNA, 279 bp, Zea mays
cgctcgagccgaatcggctcgacccatccaccgcaaacgccaaaacgccggcacacaactacacaagccgctggcaaagacggcctcctccttggtcctcatcgcagcggccctgcttgcgctggcctcgtcgtggcagcaggccatcgcctacgatcctagccccctccaggacttctgtgtcgcagaacagaactcgcctgttcgcgtcaacgggttccctagcaaggacccgatggcggtcaccccggacgacttcttcaacgcggcgatgatcat

SEQ ID NO: 54706 - DNA, 274 bp, Zea mays
atgaactccgtgtggcgcctgaagagcaccctgtgctgctgacggaagccccactcaaccccaaagctaacagggagaagatgacccaaatcatgtttgagaccttcaatgttcctgccatgtatgtcgccatccaggctgtgctttccctgtacgccagtgggcgtacaactggtattgtgttggactctggtgatggtgtcagccacaccgtgccaatctacgaaggttatgcccttcctcatgccatcctgcgtcttgacttgctgggcgt

SEQ ID NO: 54707 - DNA, 276 bp, Zea mays
cgacaaaaccagaccaccaaacaagtgccagcgccctctcgcagtcgcctcaatggagagcaccttcatcatgatcaagcctgacggcgtccagaggggcctcattggtgagatcatcagccgttttgagaagaagggcttctacctcaaggccttgaagcttgtcaacgtggagaggtcgtttgccgagaagcactacgccgatctcgcctccaagcccttcttccagggcctcgtggactacatcatctctggccctgtggtggccatggtctg

SEQ ID NO: 54708 - DNA, 273 bp, Zea mays
ccttctggagcgtgccgacggggaggcgcgacggcaccgtgtccatcaagcaggaggcgctggaccaaatccccgcgcccaccatgaacttcacccaactcctccagtccttccagaacaagagcctcaacctcgccgacctcgtctggctctcaggggctcacacgatcggcatctcccaatgcaactccttcagcgagcgcctgtacaacttcacggggcgcggcgggcccgacgacgcggacccgtcgctggacccgctgtacgccgcga

SEQ ID NO: 54709 - DNA, 273 bp, Zea mays
gcaaagtctggcttgaccccaatgaagtcagcgagatctccatggctaactcccgccagaacatccggaagttggttaaggatgggtttatcatcaggaagcctcagaaggttcactctaggtcccgtgcaagaagggcacatgaggccaagcagaagggaaggcactctggatatggcaagcgcaggggtaccagggaggctaggctccccaccaagattctgtggatgaggaggatgcgtgttctgaggcgcctgctccgcaagtaccgtg

SEQ ID NO: 54710 - DNA, 273 bp, Zea mays
ggctaccgacagccacagcctcgcagagagggtgagaagggagaggatcagccagaggatgaaggtaccttcaggacctggtgccaggatgcaacaaggtgatcggcaaggcgctcatgctcgacgagatcataaactacgtgcagtcgctgcaacggcaggtcgagttcctctccatgaagctcgcaaccgtcaacccactggacctgagcaacctgcccacgctcctacaaaaagatgtaagtgcctgcggcgcttcggcaagctcggtct

SEQ ID NO: 54711 - DNA, 271 bp, Zea mays
gaaaaagaagatcaaggaggtttctcatgagtggtcattggtcaacaagcagaagcccatatggatgaggaagccagaagaaatcacaaaagaagaatatgctgccttctataagagcttgacaaatgactgggaggagcatctggctgtgaagcacttctctgtggagggtcaactggagttcaaggctgttctctttgttcctaagagggccccctttgatctctttgacaccaagaagaagcaaaacaacatcaagctctatgtgcgc

SEQ ID NO: 54712 - DNA, 270 bp, Zea mays
ctcgagccgcgcctcgggtcaaaccctaagcagggagttgatttatccgctgcagccatgagtaagttgcagtctgagtctgtcaaggatgccatctcccagattgttggggatgccaaggagaagaataggaagttcactgagactgtggaacttcagattggtctgaagaattatgatccacagaaggacaagcgtttcagtggctctgttaagttgccccatatccctcgtcccaagatgaaggtgtgcatgcttggtgatgcccag

SEQ ID NO: 54713 - DNA, 269 bp, Zea mays
ccggggtcgatgtacccgccatccgaggcattggcaactacggcggcatcatggtgtgggaccgctttaacgacgtgcagaacaactacagcagccaggtgaagggcagcgtctgatgggcatacgaagcttcaagctacagcacctagccatgcatatatatatagtggctattcgtcaagttatcggactagatatacaaattaatataataagagcggatcatcgggagacagacgcatgtcagctattgtctcgttttctaagca

SEQ ID NO: 54714 - DNA, 264 bp, Zea mays
ccgctccggttcagacttcacctccttgaatgtttccgacatgagcgccgagtcgataaggaggacgcagtaccccagcttcactgaccgcccgtctaacctgagggtgttctcctttgctgaattgaagagtgccaccctcaacttcagccggtctctcatggttggcgagggtggctttggctgtgtgtacaggggtgtcatcaagacctccgacgaaccgaacgaacgaatcgagatcgctgttaagcagttgaatcgtaa

SEQ ID NO: 54715 - DNA, 273 bp, Zea mays
cttcaactttggtgtgcagaagacggtgtataactggcaattattcctatgcgtggcagttggtctgtgggcaggactagttattggatttgttacggagtattacacaagcaatgcatacagtcctgtacaggatgttgctgattcctgcagaactggagctgctacgaatgtcatctttggccttgctctgggatataaatccgtcattatccctatttttgctattgcttttagtatttttctcagcttcagccttgctgccatgtacgg

SEQ ID NO: 54716 - DNA, 268 bp, Zea mays
ttctctgactgttgtgaaatgtcgttttttatttaggttgaaactgttgatgactatgacgagtattgtcactatgtagccgggctagttggttatggactttccaggctcttttatgctgctgggacagaagatctggctccagactcactatcaaattcaatgggtctctttttacagaaaactaatataattagggattatttggaggacataaatgagataccaaagtcccgcatgttctggcctcgagagatatggagtaaat

SEQ ID NO: 54717 - DNA, 267 bp, Zea mays
gtcttctcccgcattgaccacaagttcgacctcatgtacgccaagcgcgccttcttgcactggtacgtcggtttgggtatggacgagggcgagttctccgaggctcgtgaggctctggctgcgctcgagtaggactacgaggaggtcggtgctgagttcttccagggtgaggacggcgacgagggtgccgagtactagacgctctactggcgcggcgtcgtcgggcttgtgtgccaccttaatcctgtgatctgccctgagtggctc

SEQ ID NO: 54718 - DNA, 270 bp, Zea mays
cgctgtccgtgcaccagctcgtggagaacgccgacgagtgcatggtccttgacaacgaggcgctctatgatatctgcttccgcaccctcaagctcaccaacccttcatttggtgacctgaaccatctgatctcggcgacgatgagcggcgtgacgtgctgcctgcggttcccgggccagctgaactcggacctccgcaagctggcggtgaacctgatcccgttcccgcggctgcacttcttcatggtggggttcgacccgctgacgtccc

SEQ ID NO: 54719 - DNA, 267 bp, Zea mays
cgttctctaaccttggctcccgctccctccgcagagcatctcaacaccgccttgaggaccccccaactcgccggctgcagccatggtgaaatattcgacggagccaaccaaccccaccaagtcaaccaaggccatgggcgtgacctacgtgttcacttcaagaacacccgtgagacagcttttgcccttaggaagttgtcactcaccaaggccaaaaggtaccttgaggatgtgattgcccacaagcaggccatcccgttccgcagt

SEQ ID NO: 54720 - DNA, 265 bp, Zea mays
cagggttttgctgctctccgaccccgagctccgaaggccgcagcatcaggcgaggcccccctcgcgtgtgatcgagatggcgctgccgaatcaggggaccgttgattaccccagcttcaagctcgtcatcgtcggcgatggtggaactggtaaaactacatttgtgaagaggcatctcactggagagtttgagaagaaatatgaaccaaccattggtgtggaagttcatccgttggatttcaccactaactgtggtaagatcagg

SEQ ID NO: 54721 - DNA, 269 bp, Zea mays
acatcccgtcgcatcccatcccactaccacccatctcgtcgtccgccgattcgatccggttcttccaacccaggggctgtgatggcgacgaagaggagcgtgggcaccctcggcgaggcggatctgaaggggaagaaggtttcgtgcgcgccgacctcaacgtccctctcgacgacgccctcaagatcaccgacgacacccgcatccgcgcctccgtccccaccatcaagttcctcctcgagaagggcgccaaggtcatcctcgccagc

SEQ ID NO: 54722 - DNA, 269 bp, Zea mays
caaagaattcctttaaagctaaggtcaagtcactcatagaaattcttgtgaagaaatgcggtttagacgctgtgaaggctgtgatgcctgaggagcatatgaaattgctcacgaatattaggaagattaatgagcgaaaaatgcgaaaggcaaaatcttctgaggatggggatgccatgtctatggcctcaggagctacaaggcaaagtaggtggaatcacacacaaatgttttcggactttggaagtgatgatgaatcagatggtcct

SEQ ID NO: 54723 - DNA, 269 bp, Zea mays
gagcaccctccacttggtgctgcgtctcagaggtggcatgcagatcttcgtgaagacacttactggcaagacgatcacccttgaggtggagtcctcagacaccattgacaacgtcaaggccaagatccaggacaaggagggcattccaccggtaccagcagcggctgatcttcgccggcaagcagctggaggatggtcgcaccttggctgactacaacatccagaaggagagcaccctccacctggtgctccgcctcaggggtggtatg

SEQ ID NO: 54724 - DNA, 269 bp, Zea mays
atccccaagcaaacaaacagggtagaggtagagggagaggagaggagaggagaggagaggagaggttgggtctgggacaccatggctccgatgaagctgtacggggcggtgatgtcgtggaacgtgacgaggtgcgcaacggcgctggaggaggctggctccgactacgagatcgtgctcatcaacttcgccaccgccgagcacaagagccccgagcacctcgtccgcaacccgtttggtcaggttccagctctgcaggatggtgactt

SEQ ID NO: 54725 - DNA, 264 bp, Zea mays
ctcgacgcccatccgctccaccgtcctcagcctggtctggcagcccaacaatgtgctgctggctgccggctcctgtgacttcaagtgtcggatcttttcagcctacatcaaggaggtggaggaacggccggcacccacccgtgagactctacataacgctttggggaactgatgttcgaatccagcagtagctgcggctgggtacatggcgtctgtttctcagccagcgggagccgcgtggctgtaggtaagccacgacagcac

SEQ ID NO: 54726 - DNA, 263 bp, Zea mays
gtgccgtgctggggcttgctccacctgtgccggcaaaatcgagtctggttcggttgaccagtcggatgggtccttccttgatgacgggcagcaggaggaaggctatgtgctgacatgcgtctcctacccaaagtccgactgcgtcatccacacccacaaggaaggcgacctgtactagggctagggctttccaatttggcgagggacaaaaaatgctctcgagtggtgtgttgtcaagcaaagctcctccatctgcgccctac

SEQ ID NO: 54727 - DNA, 265 bp, Zea mays
  unsure (1)..(265): unsure at all n locations
ctcgagccgctcgagccgcaagctatgggtgatgccatgaagggcgttacaaaggcaatggctcaaatgaaccangcagctaaatctgccagggttgcagaggataatgcaagagtttgagcggcagaacgagaggatggagatggtgagcgaagtgatgggagatgccatagatgatgctttggaaggagatgaggaggaagaagaaactgaggagcttgtgaatcaagtacttgatgaaattggcattgatatcaaccaagag

SEQ ID NO: 54728 - DNA, 262 bp, Zea mays
gccgtctcccttttgcgtgagaaagaaagagagcgagaagcagtcgccatgtctggcatcatccacaagatcgaggagaagctccacatggggggcgaccacaagaataaggaggaggagcaccacaagaaggccgaggagcaccacaagaaggaggagggggagcaccacaagaaggacggcggggagcacaaggaaggcatcgtggagaagatcaaggacaagatcaccggcgagcacggcgacaagtccggcgaccaca

SEQ ID NO: 54729 - DNA, 264 bp, Zea mays
gtgccagttcatacaaagattgttgatccaaaaactggtgaggaaaagaagatcgtaatctcagcagatgatggaatccgagtggatacttctcttgcagtcctgtcaaaactcaaaccagcattttcaaaggatggcagcactactgctgggaatgcaagccaagtgagcgatggcgctggggccgtcttgctaatgagacgggatgttgctatgaaaaagggtcttccagttcttggtgtctttaggacctttgccgctgtt

SEQ ID NO: 54730 - DNA, 263 bp, Zea mays
ctcgagccgctattttgggtgttgttggacatgagtatttccacaactggactgggtatagagtaacttgccgtgattggttccagctaaccctgaaagaaggactgaccgttttcagggatcaggagttctcttcagatcttggctgtcgtacggtaaaacgtattgctgatgtctccaaacttagcatctatcaattcccacaggacgccgggcctatggcacatcctatccgtccccattcttatatcaagatggacaac

SEQ ID NO: 54731 - DNA, 258 bp, Zea mays
agcggagcatttctccagcatcagaggtgacgacggccagaggtcgctcgacgcagtggtaaaaacggccggcaaggaggccttccagtgggggttggcagccggagtctactctgggctcacgtacgcgctcgggagcgccaggggatgccacgactggaagaacagcgccatcgcaggcgccatcgctggggcggcggtagcactcacgggtgacgccggcggccactccgacaacctcgtcaactttgccatcac

SEQ ID NO: 54732 - DNA, 259 bp, Zea mays
cggctaagcaaggttacggtcggctacacgcgtcagctcgagcggctgaggatttttggtccgcacgctcctgctcctgactcaccgctgttcgctctcgccgaggaacaagtcggtcaggaagcccgcgcgcagcagccatggcttttaaggataccggaaaaacacccgtggagccggatgtggcaattcaccgaattcggatcagactaataagccgtaacgtaaaatccttggaaaaggtgtgtgctgacttggt

SEQ ID NO: 54733 - DNA, 302 bp, Zea mays
attcccttgtccaagtggaggctgcccacagatgggtcactatgctgatagatatcctgggaaaacaaatgatgtgggccagaaattttatctagacactggtgatgccagtaattttgcacgttggaggtataaggtatctgtcacactgtctggaaaaaaggttacaggacacatactagtttctttgttcggaaataaaggaaactctaagcagtatgaaattttcaagggcactctcaaaccagatagtactcattccaatgaatttgactcagatgtggatgttggggacttgcaga

SEQ ID NO: 54734 - DNA, 300 bp, Zea mays
tacagctgctggcaccgagtccctcatctccggctggggcaacactctgagttctggtgccgactacccagacgagctgcagcgcctggatgctcctgtgctgagccaggctgagtgtgaagcctactaccctggaaagattaccaacaacatgttctgtgtgggcttcctcgagggaggcaaggattcctgccagggtgattctggtggccctgtggtctccaatggagagctccaaggaattgtctcctggggctatggctgtgcccagaagaacaggcctggagtctacaccaaggt

SEQ ID NO: 54735 - DNA, 297 bp, Zea mays
caacgctctctaccgtccgagaccccaagcaccagcgcggcggcgggggcggcggcgaccatggatgtcggaaagaacaagaggatctccaagggaaagaagggtggcaagaaaaagaccgtcgaccctttctctaagaaggattggtatgacatcaaggcaccgtcggtgttcagtgtgcgcaacatcgggaagactctcgtatccaggacacagggtaccaggattgcttctgagggtctgaagcacagagtctttgaggtttgcctagctgatcttcagggcgacgaggatcaa

SEQ ID NO: 54736 - DNA, 303 bp, Zea mays
cccacagccattattactgaaatcaacgaaaagatcggtgctgctggtgtagtcagccaggagtgcaagactgttgtttctcaatacggacaacagatcctagatcttctgctagctgagacgcaaccagcgaagatctgttctcaggttggcctgtgcacttttgatggcactcacggtgttagcactggaattcgtagcgtagtggatgacaaagctgggaaatcaaatggtggtctcaagagtgatccaatgtgcaatgcctgtgagatggctgtggtatggatgcagaaccaactggcc

SEQ ID NO: 54737 - DNA, 301 bp, Zea mays
caagaagagggaagagcaccaaggaccttcggcgcccgttcaggatccacatcttcccgagcgagttcttggttgacctcttcctcttcggaccacctccaaggctcttggtgtagcttgccactctcaccaatcaagttttcatgtctgatctcgacattcagatcccaactgccttcgatcccttcgctgaggccaatgctggggactctggtgcggcagcagggtcaaaggactacgtacacgtgcgcatccagcagcgtaatggtcgcaagagcctgactaccgtccagggattgaa

SEQ ID NO: 54738 - DNA, 297 bp, Zea mays
gcagggcaggcagcacgtggtggatcacgccacgtgctccaggattgactggtggggcttcagggtgaagaaaaccatggtgtgcgctgggggcgatggcgtcatctcagcctgcaatggggactccggtggcccactgaactgccagttggagaacggttcctgggaggtgtttggcatcgtcagctttggctcacggcggggctgcaacacccgcaagaagccggtagtctacacccgggtgtccgcctacatcgactggatcaacgagagaatgcagctgtgatttgttgctgg

SEQ ID NO: 54739 - DNA, 303 bp, Zea mays
  unsure (1)..(303): unsure at all n locations
atcgccaccaggtgcagagtctttcgtcatctcttctccggcgaagaacccccagtcgcccaccagatcacttgttaaactttgttgaggggtgatggcggtttctttcgcaaacctcagctccgaggcagggcttaaaaagcttgatgagtaccttctcactcgcagctacatcactggctaccaagcttccaaggatgacttgggcgnctacacttcgttttcgtctgctccctcgtccaagtatatcaacgtagcaaggtggtttaatcacattgatgcgctcgtgatgctgagcggaat

SEQ ID NO: 54740 - DNA, 302 bp, Zea mays
aaccaaacgaatgtttctgggtgaaaatttagaagaatgctccattgaagaactgcataatctggaggttaaactggcgaagagccttcacgtcatcagagggaagaagacacaactgctggagcagcagatatccaagctgaaggagaaggagaggaccctgctccaagacaacaaagagttgcgggattagcagcgcaacctccagtctccaccggaggcgccaccggacctgaaccgctgtgtccctccttggccgcgtagctgccggcaccgagcaatgacatggacgtggagacgga

SEQ ID NO: 54741 - DNA, 296 bp, Zea mays
gccgccaccaggtgcagagtctttcgtcatctcttctccggcgaagaacccccagtcgcccaccagatcacttgttaaactttgttgaggggtgatggcggtttctttcgcaaacctcagctccgaggcagggcttaaaaagcttgatgagtaccttctcactcgcagctacatcactggctaccaagcttccaaggatgacttggctgtctacacttcgttttcgtctgctccctcgtccaagtatatcaacgtagcaaggtggtttaatcacattgatgcgctcgtgaggctga

SEQ ID NO: 54742 - DNA, 295 bp, Zea mays
agctgaaggacctgcagaaggacccccccacatcatgcagtgcaggtcctgctggtgaggacatgtttcattggcaagcaacaattatgggaccacctgacagtccctatgctggaggtgtttttttagtgaacattcatttcccgccagattaccccttcaaacctccaaaggtttctttcaagacaaaggtcttccatcctaatatcaacagcaatggaagtatatgccttgacattctcaaagagcagtggagccctgctttgacaatttctaaggtcctgctctccatctg

SEQ ID NO: 54743 - DNA, 273 bp, Zea mays
  unsure (1)..(273): unsure at all n locations
acaattacaactttgagaagcccttcctttacctcgctaggaagctggcaggggatcagaaccttcactttgttgaagctgttgctctgaagccaccagaagtgcagattgatatggccctgcagcagcagcatgaagctgagcttgcagctgccgctgcgcagcccctccccgatgancgtagagacctgatcgcttagatatgttatacatggcccttgttgatgactcttgttacaaatctgtggtggttcaatccttgttagtgttagg

SEQ ID NO: 54744 - DNA, 140 bp, Zea mays
gagtaggcgccagaacaggacgcccaccgttgttgtcatctggtccattctgctggcctccatcttctccctgctctgggtcaggatcgaccctttcatcgtcaggaccaagggcccggacatcaggcagtgtgggatca

SEQ ID NO: 54745 - DNA, 254 bp, Zea mays
agcacgttatgatgagattgtgaaggaagtctcatcttacctcaagaaagttgggtacaaccctgataagattgcatttgttcccatctctggttttgagggtgacaacatgattgagaggtccaccaaccttgactggtacaaaggcccaaccctgcttgaggctcttgatcagatcaccgagcccaagagaccctcagacaagcccctgcgtctccccctccaggatgtgtacaggttgggtggtattggaa

SEQ ID NO: 54746 - DNA, 290 bp, Zea mays
cagccgtcgtctgctgcggactccgcctccagtttggtctgtttcttgcaagttgatcttgtggtagttccccagtctgtcaccatgcagaacgaggagggtaagactgtggacctctatgtccccaggaagtgctcggccacaaacaggatcattactgccaaggaccatgcctctgtccagatcaacattggccacttggatgcgaatggcctgtatgatggtcacttcacaacgtttgctctctctgggtttgtccgtgctcagggcgacgcagacagctccttgga

SEQ ID NO: 54747 - DNA, 270 bp, Zea mays
gctgctactgtggcttggggggctcaggcacccccgtggatgaactggacaagtgctgccagacacatgacaactgctatgaccaggccaagaagctggacagctgtatatgtctgctggccaacccgtacacccacacctattcatactcatgctctggctcggcaagttcctgtagcagcaaaaacaaagagtgtgatgccttcatttgcaactggcgaccgcaacgctgccatctggttttcgaaagctccatataacaaggcacac

SEQ ID NO: 54748 - DNA, 284 bp, Zea mays
  unsure (1)..(284): unsure at all n locations
attaagccctggttctaccagcacgctcagacggcgctgaagaggggcgagtttgtggagtacatcccgacgagggagtactaccaccggcacacccggtgcctgtactgggatgggaagctgatcctgcccttcggcgaccagttctggttcaggttcctgctgggctggctgatgccaccgaagtgtccctgcagtangcgcccagggcgaggctatcaggaactactaccacgactaccatgtgatccaggacatgctggtgccgctgtacaatgttgggg

SEQ ID NO: 54749 - DNA, 289 bp, Zea mays
atgccggccactgcatctcgagggatctgacctaccaggtggtgttatgtgagtacaaccttgctgtgaaggagggccccgagcaggtgatccccatcaactctgaggagctgtttgtgcatccactctggaaccgctcgtgtgtggcctgtggcaatagacatcgccctcatcaagctctcacgcagcgcccagctgggagatgccgtccagctcgcctcactccctcccgctggtgacatctttccaacaagacagctgctacatcaccggtggggcgtctctatac

SEQ ID NO: 54750 - DNA, 279 bp, Zea mays
catgaatctacttctgatccttacctttgttgcagctgctgttgctgccccctttgatgatgatgacaagatcgttgggggctacatctgtgaggagaattctgtcccctaccaggtgtccttgaattctggctaccacttctgcggtggctccctcatcagcgaacagtcggtggtgtcagcaggtcactgctactagtcccgcatccaggtgagactgggagagcacaacatcgcagtcctggacgggaatgtacattcatcaatgcagccaagatc

SEQ ID NO: 54751 - DNA, 286 bp, Zea mays
attctttgaggtaaagaagaagtttgagacagctcttggtgttcttaaaaaggaaaagatcactattgatccagatgacccagcggcagtttctcgttatgcccaagtcatgaagactgtaagggaaaaggcggatcttctctctgattctcaaaggattaaatataccattgagaccttcaccaagggcatccctgatgcacggacttacttgaatactcttcaacagctcagaataaagagtggtcttatagatcatcttggaattgagcctttgatgatggaa

SEQ ID NO: 54752 - DNA, 285 bp, Zea mays
ctgctccattctcagccgccgccaatcccttcccgtgctccgcaaccgctgagtgagaagaagagatggccggcaagggcgatggcccggctatcggcatcgatctcggcacgacgtactcttgcgtcggcgtgtggcagcacgaccgcgtcgagatcattgccaacgaccagggtaaccgcaccacgccctcgtacgtcgccttcaccgactccgagcgcctcatcggagatgcggccaagaaccaggtcgccatgaaccccatcaacaccgtctttgatgcca

SEQ ID NO: 54753 - DNA, 280 bp, Zea mays
attctttgaggtaaagaagaagtttgagacagctcttggtgttcttaaaaaggaaaagatcactattgatccagatgacccagcggcagtttctcgttatgcccaagtcatgaagaaagtaagggaaaaggcggatcttctctctgattctcaaaggattaaatataccattgagacttcaccaagggcatccctgatgcacggacttacttgaatactcttcaacagctcagaatgactgagtggtcttatagatcatcttggaattgagcctttgatg

SEQ ID NO: 54754 - DNA, 288 bp, Zea mays
ttgatggatacaggtttcaaatggtaaggaatatgcactgagcgatgtcatcgataccatcaaacatgctttatgggggatcaccacaaattgtttgcaagatgggttcaatcgaagaacttaggttatgcttcgacaaagaattgaagcctcgtgattgccttaccacttctttggcgaatggaagtgtatcaaaaagcaagcactgcccgcggtacatcaccttgccaacgtatgatcaccttgtgcttgccacattcactgtagagatcatgacacagttcgatg

SEQ ID NO: 54755 - DNA, 291 bp, Zea mays
atgggaacatcaaggccttcatctccatccacagctactcccagctcctcctgcaccgctatggctacaaaacagaaccagtccctgaccaggatgagctggatcagctttccaaggctgctgtgacagccctggcctctctctacgggaccaagttcaactatggcagcatcatcaaggcaatttatcaagccagtggaagcactattgactggacctacagccagggcatcaagtactccttcaccttcgagctccgggacactgggcgctatggcttcctgctgccag

SEQ ID NO: 54756 - DNA, 293 bp, Zea mays
cgccctccttcaacgggtatgacggctcaaccgcgataccgcacttgccgctggacgccttgatgttgcgctccatcctcacgtacccggccccggcgcccgccgtgtgcgacaactactactcgtgccctgacagcaccacctgctgctgcatctacgagtacggcaagtactgcttcgcctggggctgctgcccgctcgagggcgccacctgctgcgacgatcactacagctgctgcccccatgactaccccatctgcaacgtcaggcagggaacctgcctcatgggcaag

SEQ ID NO: 54757 - DNA, 116 bp, Zea mays
cgccctccttcaacgggtatgacggctcaaccgcgataccgcacttgctcgtggacgccttgatgttgcgctccatcctcacgtacacggccccggcgcccgccgtgtgcgacaac

SEQ ID NO: 54758 - DNA, 258 bp, Zea mays
ggggtttcttcttttaatctgggactttgttgttgttggacgaatgaattcccttcgatcggttagctttaatctgtctcgttagtgtgtcgtgttcgtgtagcaccatgccacagctacgccatgccgtgtgctctgtcacgtgggggcacactcctgggggtctcctgctgctgtcagaacggattagaggagattggaatggtcgtgaacaataaaaatgcatggtttaaattgtcctggtggtggtgctaaaaa

SEQ ID NO: 54759 - DNA, 287 bp, Zea mays
ctttttgttgttcctgcaatccgtcttctctctggctggtcaaaacctcatctgcaaagagtacatgtgcgcatatcacatcctttaagagcagacccacatcgtacagagtttcaccgtgcagcaattagatgggtgcttgatgatggatctggtccgactggttttgttgctgagagtactggccatcaggctattagccgtcttcttagtatgaaatctgctaatgccctgctggaaataccatccactggacaaatattggcagctgggacatctatccagcc

SEQ ID NO: 54760 - DNA, 284 bp, Zea mays
tacttcggcttcggcttctcccatggtacctcctggaagcagaacgcccatacagcttcctcctgagatccctgccaatttgcttcacatgcatgaaattacagtagccaccacggttgcagctgttctcctcaaactgcctacaggtagcttcacggaagtcggtcacaggagaatactcaacaattatagggcggccatagtaaaagcgcccctgaagagcattgtaagctgcggctgcttgctcttcctccctgaactggacatagacattcccaatcatg

SEQ ID NO: 54761 - DNA, 312 bp, Zea mays
gattagcgtagtcactctgaattcggctggaacatgaatctacttctgatccttacctttgttgcagctgctgttgctgcaccctttgatgatgatgacaagatcgttgggggctacatctgtgaggagaattctgtcccctaccaggtgtccttgaattctggctaccacttctgcggtggctccctcatcagcgaacagtgggtggtgtcagcaggtcactgctacaagtcccgcatccaggtgagactgggagagcacaacatcgaagtcctggaggggaatgaacagttcatcaatgcggccaagatc

SEQ ID NO: 54762 - DNA, 291 bp, Zea mays
cttaaccctcgttcctctagccgtctcgcgcaccacagcctccaacttctcctccgacggcggtgcggctagctcaaccatggcggactccaaggccacctcggcggtcaccctccgcactcgcaagttcatgaccaaccgcctgctggcccgcaaacaatttgtgcttgaggttatccaccccggccgcgccaacgtctccaaggcggagttgaaggagaggttgccaagatgtacgaagtgaaggaccccagcaccatcttcgtcgtcaagttccggcaccaagtcggg

SEQ ID NO: 54763 - DNA, 123 bp, Zea mays
taagagtgatgtatatagttttggggttgttcttcttgaactgttgactgggaggaaacctgtcgaccatacattgccaaggggacagcagagtcttgtgacctgggctacaccacggacttt

SEQ ID NO: 54764 - DNA, 281 bp, Zea mays
cttaaccctcgttcctctagccgtctcgcgcaccacagcctccacttctcctccgacggcggtgcggctagctcaaccatggcggactccaaggccacctcggcggtcaccctccgcactcgcaagttcatgaccaaccgcctgctggcccgcaaacaatttgtgcttgaggttatccaccccggccgcgccaacgtctccaaggcggagttgaaggagaggcttgccaagatgtacgaggtgaaggaccccaacaccatcttcgtcttcaagttccgcac

SEQ ID NO: 54765 - DNA, 279 bp, Zea mays
cccctggtgattggagccatatcattaagcaaattgggatgtttactttcactgggctgaatagcgaacaagtcgcattcatgaggcaggaataccacatttatatgacatctgatgggaggatcagcatggccggtttgagcatgaggactgtgccccatcttgcagatgccatacacgctgcagttactcaactgaaatgaggatagtatcgcagctttcgtgaataaaacctgaatcacccacaacaatgttctaagtactcagccagtggtattt

SEQ ID NO: 54766 - DNA, 262 bp, Zea mays
actgtttgtgcatccactctggaaccgctcgtgtgtggcctgtggcaatgacatcgccctcatcaagctctcacgcagcgcccagctgtgagatgccgtccagctcgcctcactcactcccgctggtgacatccttcccaacaagacacccttctacatcaccagctggggccgtctctataccaatgggccactccgagacaagctgcagcaggcgcggctacccgtaggtgactataagcatggcggcaggtggaactgg

SEQ ID NO: 54767 - DNA, 276 bp, Zea mays
gtagcaaggtggtttaaccacattgatgcgctcgtgaggctgagcggaattactgcagagggccaaggtgtgaaggttgaatcctcagcagttccttcagccccaactccagatgttgctgaagcacaggccccagttgctgaggaggacgacgacgatgatgttgacctttttggtgaggagaccgaagatgagaagaaggctgctgaagagcgtgctgcagctgccaaggcttctggcaagaagaaagaatctgggaagtcatcagttttactt

SEQ ID NO: 54768 - DNA, 278 bp, Zea mays
acctgatgaaccttgggtgtgctactggccatcctagctttgtcatgtcctgctcattcactaaccaggtcattgcccaacttgaactgtggaaggagaagagctctggcaagtatgagaagaaggtgtatgtgctccccaagcaccttgatgagaaggttgctgctctccacttgggcaagcttggtgccaagctgaccaagctcaccaagtctcaggccgactacatcagcgtgccgatcgagggtccctacaagcctgcccactaccggtactag

SEQ ID NO: 54769 - DNA, 278 bp, Zea mays
  unsure (1)..(278): unsure at all n locations
catgaatctacttctgatccttacctctgttgcagctgctgttgctgccccctttgatgatgatgacaagatcgctggngggctacatctgggaggacgatgctgtcccctaccaggtgtacttgtagtctggctaccacttctgcggtggctcccgcatcagcgagcagtggatggtgtcatcaggtcactgctacaagtcccgcatccaggtgatacttggagagtacagcatcgaagtcctggaggggaatcatcagttcatcaatgcgggcaag

SEQ ID NO: 54770 - DNA, 275 bp, Zea mays
agatggtgcaagggctgctctgaatctgtcaggaactgtgctcggatattatcctgtcagggctctgccatcgaaaactgccattgcaccagtcaatccaacattcctacccaggtctgatgatgaacgggaaatgtgtgcgaggactatttactgcacaaacattgacaagaaggtcactcaggcagatctgaaattgttctttgagtctatatgtggagaggtctttcggctgaggttgcttggtgactaccatcattctactcgcatcgctt

SEQ ID NO: 54771 - DNA, 274 bp, Zea mays
agcaactggcgttggtccagtatagtaccttgctgtcagttgcatggacgggctgacggacgagcagaggctcgcgatccaggaggccttctcgctcttcgacaagaacggcgacggatgcatcaccatggaagagctggccgcagtcactcgctccctcggtctcgacccgagcgatcaggagctcaatgatatgatgagcgaggtcgatacggacggcaatgggatcatcgatttccaggagttctgaagcctcattgcccggaagatgaag

SEQ ID NO: 54772 - DNA, 276 bp, Zea mays
acgaatggaaagaatgccttgcactttgctgcccggcaggggcatgtggaaatcgtgaaggctttgctagatgctgatacccagcttgctcggaggactgataagaaaggccagactgctctacacatggcagtaaaaggtactaacccggaagttgttcaagcgcttgtgaatgccgatccggcaatagtcatgctacctgacagaaatggcaacttagctctgcatgttgcaaccagaaagaaaagatcagagattgtaaacgtgcttctgctt

SEQ ID NO: 54773 - DNA, 274 bp, Zea mays
cttcgagatacaggcagatatggctttctccttccagaatcccaactccgggctacctgcgaggataccttcctggcaatcaagtatgttgccagctacgtcctggaacacctgtactagttgagagagctgatggccttgtttcaaaattctcatttttcatttcttttctttcttgaatgcttattttggtttgcctggatgttttgcagatcccaatctttcttttaagcttctgggtctattaaactaggtagatcttttcgtattgatc

SEQ ID NO: 54774 - DNA, 283 bp, Zea mays
cacaagtccagggagtgccttcctctgatcctcatcatcaggaacaggctcaagtatgctctgaactaccgtgaggtcatttctatcctgatgcaacgccatgtacttgttgatggcaaggtcaggactgacaagacctaccctgctgggttcatggatgtcatttccatccctaagacaatggagaactacaggctgctttatgacaccaagggccgcttccgtcttcacccaatcagggatgaggatgccaagttcaagctctgcaaggtgaggtccgttc

SEQ ID NO: 54775 - DNA, 286 bp, Zea mays
aatggaagtaaaggttgaggatgttcatgcaaaggaagagaaagaaaagaagagaaagaagatcaaggaggtttctcatgagtggtcattggtcaacaagcagaagcccatatggatgaggaagccagaagaaatcacaaaagaagaatatgctgccttctataagagcttgacaaatgactgggaggagcatctggctgtgaagcacttctctgtggagggtcaactggagtccaaggctgttctctttggttcctaagagggccccctttgtatctctttgaca

SEQ ID NO: 54776 - DNA, 280 bp, Zea mays
tgagagacggaaagggggagatgagccggagcctggggatcccggtgaagttgctccatgaggcagcgggtcatgtggtgacggtggagctcaagaccggcgaagtgtaccgggggtccatcgtcgagtgcgaggataactggaattgccagctcgagaacattaccttcaccgccaaggatgggaaggtttcgcagctggagcacgtcttcatcagaggaagcagagtgagatttatgattatacctgatatgctcaagaacgctcccatgttcaagcg

SEQ ID NO: 54777 - DNA, 280 bp, Zea mays
ctgacttcttgaggtcagaatggcggcagtggagcatcgtcattcaccaggattgccctactggccctacctcacagctgaaactttaaaaaacaggatgggccaccagccacctcctccaagtcaacaacattctataattgataactccctgagcctcaagacaccttccgagtgtgtgctctatccccttccaccctcagcggatgataatctcaagacacctcccgagtgtctgctcactccccttcaaccctcagctctaccctcagcggatgat

SEQ ID NO: 54778 - DNA, 274 bp, Zea mays
cccaaatcagagaactggttgaacttcccctgcgtcacccccagcttttcaagtctattggtgtgaagccaccaaagggaatattgctgtatgggcctcctggctctggcaagacccttattgctagagctgtagctaatgagacaggtgctttcttctttttgatcaatggaccagaaatcatgtcaaagctagcaggagaaagtgaaagcaatctcagaaaggcatttgaagaagctgagaaaaatgcaccttcaatcatttttattgatga

SEQ ID NO: 54779 - DNA, 273 bp, Zea mays
tgaatccactcctgatccttacctttgtggcagctgctcttgctgccccctttgatgatgatgacaagatcgttgggggctacaactgtgaggagaattctgtcccctaccaggtgtccctgaattctggctaacacttctgtggtggctccctcatcaacgaacagtgggtggtatcagcaggccactgctacaagtcccgcatccaggtgatactgggagagcacaacatcgaagtcctggaggggaatgagcagttcatcaatgcagcca

SEQ ID NO: 54780 - DNA, 272 bp, Zea mays
actcagccaacagagattgttgatttgcctcttaagcatcacgattcattgcagctcagcatggctcagaccagctcatacttcatgctgatctcctgcctgatgtttctgtctcagagccaaggcaaagaggcccagacagagttgccccaggcccggatcagctgcccagaaggcaccaatgcctatcgctcctactgctactactttaatgaagaccgtgagacctgggttgatgcagatctctattgccagaacatgaattcgggcaa

SEQ ID NO: 54781 - DNA, 259 bp, Zea mays
gtaaatttgcgagaggttaatcagatgtgccctttcaatagaggcgcttttccagacagtcttgcaattgctaaagagggtgagctttcaattggaagtattgatgatatccagaagcttcatatccgcacaatcacccttaatgaacaagcacgtcgacatttgccaccaggagcaatcgtagacactagcattttgcagtttcaagtataaccagagtgtggacgaaagtgagactcacttaatacgtatgctagat

SEQ ID NO: 54782 - DNA, 277 bp, Zea mays
cccaatacgccttttggatttttttaacggtcagagatgccagatgtgcctccggtctgatcctttgctgaaggtgatggagcgactggctaatccgggggtgcggcgggtgttcatagtagaagctgggagcaaacgtgtggagggtattatatcactgagtgatattttcaagttcttgctgagcttgtgataagagaagaggagcatgacggacatttgtttgtgatcaatagtaagaaaacagcagggtatgtgaagcaagctgccatggatc

SEQ ID NO: 54783 - DNA, 277 bp, Zea mays
ccagctttgaccgcctcccctccccgccgctcctgccgctccataccccacccccccgcaggagcggcgcggcggcggcggcggcaaagccaaaggcaagatgttcgggcgcgcgccgaagaagagcgacaacaccaagtactacgagatcctcggggtgcccaagtcggcgtcccaggacgacctcaagaaggcctaccgcaaggcagctatcaagaaccaccccgacaagggcggtgaccccgagaagttcaaggagctcgcacaagcctatgag

SEQ ID NO: 54784 - DNA, 271 bp, Zea mays
gcggcatggcttccctctggctcctctcctgcttctcccttgtgggggccgcctttggctgcggggtccccgccatccaccctgtgctcagcggcctgtccaggatcgtgaatggggaggacgccgtccccggctcctggccctggcaggtgtccctgcaggacaaaaccggcttccacttctgcgggggctccctcatcagcgaggactgggtggtcaccgctgcccactgcggggtcaggacctccgacgtggtcgtggctggggagtt

SEQ ID NO: 54785 - DNA, 271 bp, Zea mays
tgactgcaagatgaaactccttgtgctagctgtgctgctcacagtggccgccgccgacagcggcatcagccctcgggccgtgtggcagttccgcaaaatgatcaagtgcgtgatcccggggagtgaccccttcttggaatacaacaactacggctgctactgtggcttggggggctcaggcacccctctcaatgaactggacaagtgctgccagacacatgacaactgctatgaccaggccaagaagctggacagctgtaaatttctgctg

SEQ ID NO: 54786 - DNA, 272 bp, Zea mays
gctccatccatcctctttcccctcctcgcttcgcttcctcggcggattcctcctccctcgaccgtccccgtccccgtccccttccggcgcgcaagctcgcccgagatggcaaacgcgagatcgggtgtcgctgtgaatgacgagtgcatgctcaagttcggcgagctgcagtcgaagaggctgcaccgcttcctaactttcaagatggacgacaagttcaaggagatcgttgtggaccaggtcggggatcgcgctaccagctacgaggactt

SEQ ID NO: 54787 - DNA, 305 bp, Zea mays
cttagatggtaatgggagtaaggcaaagaaaatgtctcagaagaacagtactagtgacggctttgcttctgctaaagtgagtgctgggacaagtagtttgaggaagaccagtggtagtgcgacgatgagtacacgggctgatttcactgagagtgggaagagtagatgtgccgtgtgagcacggccagtgacattagcgacgagagctcgtgcagcagcatgagcagtgccaccacaaagccacacaaggggaatgattcaaggtgggaggcgatccatgttgtgaagtccagggataatgttct

SEQ ID NO: 54788 - DNA, 300 bp, Zea mays
catgcctgaagacatcaccaagggaactcagtccctacccacagcctctgcctccaagtttcccagctctggcccggtgacccctcagccaacagccctaacatttgccaagtcttcctgggcccggcaggagagcctgcaggagcgcaagcaagcactatagaatacgcaagaaggagattcacagagagacgagcccaggaggctgactgagctcaaaggaacaggatggcacccagagccgcaggacggagactgggggcagccctcacccaactcacaacaggctggatgggtggg

SEQ ID NO: 54789 - DNA, 297 bp, Zea mays
catgaatccactcctgatccttacctttgtggcagctgctcttgctgccccctttgatgatgatgacaagatcgttgggggctacaactgtgcggagaattctgtcccctaccaggtgtccctgaattctggctaccacttctgtggtggctccctcataacgaacagtgggtggtatcagcaggccactgctacaagtcccgcatccaggtgagactgggagagcacacatcgaagtcctggaggggaatgagcagttcatcaatgcagccaagatcatccgccaaccccaatacg

SEQ ID NO: 54790 - DNA, 300 bp, Zea mays
ggctcatttcctattcgaaatactccaaggcccttgagtctttttacgagaaattcgatccagatttcattgatattaggacaaaagcacgtgaggtgttgcagagggaggacgatctgaatgaaattgtgcagcttgttggtaaagatgcgctggcagaactgacaagattacgctggagacagcaaagcttttgagagaagattatttggcacaaaatgcattcaccccatatgataagttctgcccattctacaaatccgtttggatgatgcgcaacattattcacttcaacacatt

SEQ ID NO: 54791 - DNA, 300 bp, Zea mays
gtagcctcatcgcccccgattgggttgtgactgccggccactgcatctcgagggatctgacctaccaggtggtgttgggtgagtacaaccttgctgtgaaggagggccccgagcaggtgatccccatcaactctgaggagctgtttgtgcatccactctgaaccgctcgtgtgtggcctgtggcaatgacatcgccctcatcaagctctcacgcagcgcccagctgggagatgccgtccagctcgcctcactccctcccgctggtgacatccttcccaacaagacaccctgctacatcac

SEQ ID NO: 54792 - DNA, 295 bp, Zea mays
cacgctgcatcagaagaggccatcaagcagatcactgtccttctgccatagccctgtggatgcgcctcctgcccctgctggcgctgctggccctctggggacctgacccagccgcagcctttgtgaaccaacacctgtgcggctcacacctggtggaagctctctacctagtgtgcggggaacgaggcttcttctacacacccaagacccgccgggaggcagaaggacctgcaggtggggcaggtggagctgggcggaggacctggtgcaggcagactgcagctcttggccctgg

SEQ ID NO: 54793 - DNA, 227 bp, Zea mays
cagcggcatggcttccctctggctcctctcctgcttctcccttgtgggggccgcctttggctgcggggtccccgccatccaccctgtgctcagcggcctgtccaggatcgtgaatggggaggacgccgtccccggctcctggccctggcaggtgtccctgcagacaaaaccggcttcgcattctgcgggggctccctcatcagagaggactgggtggtcaccgctgc

SEQ ID NO: 54794 - DNA, 305 bp, Zea mays
gcaagatgaaactccttgtgctagctgtgctgctcacagtggccgccgccgacagcggcatcagccctcgggccgtgtggcagttccgcaaaatgatcaagtgcgtgatcccggggagtgaccccttcttggaatacaacaactacggctgctactgtggcttgggggctcaagcacccccgtggatgaactggacaagtgctgccagacacatgacaactgctatgaccaggccaagaagctggacagctgtaaatttctgctggacaacccgtacacccacacctattcatactcatgctctg

SEQ ID NO: 54795 - DNA, 273 bp, Zea mays
cgacaaaaccagaccaccaaacaagtgccagcgccctctcgcagtcgcctcaatggagagcaccttcatcatgatcaagcctgacggcgtccagaggggcctcattggtgagatcatcagccgtcttgagaagaagggcttctacctcaaggccttgaagctttcaacgtggagaggtcgtttgctcagaagcactacgccgatctcgcctccaagcccttcttccagggcctcgtggactacatcatctctggccctgtggtggccatggtc

SEQ ID NO: 54796 - DNA, 295 bp, Zea mays
cgagcgccggagctcgacaaggacgaccgacgacgcacgcggagatccggcgtactgcaaattttgaaaactgaactgtaagatggcatcagcagagctttcccgtgaggcaaatgtgtacatggcgaactcgctgagcaggcggagaggtacgagggatggttgagttcatggagaaggtagccaagactgttgactcggaggagctcactgtggaggagcgaaacctcttgtctgttgcatacaagaacgtcattggagcccgccgcgcctcatggcgcatcatctcctccat

SEQ ID NO: 54797 - DNA, 244 bp, Zea mays
tgaatccagtcctgatccttgcctttgtcggagctgctgttgctgtcccctctgacgatgatgacaagattgttgggggctacacctgtgcggagaattctcgcccctaccaggtgtccctgaattctggctcccacttctgcggtggctccctcatcgcgaacagtgggtggtatcagcagctcactgctacaagacccgcatccaggtgagactgggagagcacaacatcaaagtcctggag

SEQ ID NO: 54798 - DNA, 178 bp, Zea mays
cgagtaatgtcaagctaccgttggccaagacagtttcaaaatggacacgatgttaatgattgggttgggccaccaaataataatggagtaattaaagaagctactattaatccagacactacttgtggcaatgactgggtctgtgaacatcgatggcgcaaataaggatcatggttat

SEQ ID NO: 54799 - DNA, 296 bp, Zea mays
aaccaattcgcttctccgtcaacttcacttcctcgtcgacatcccggagccgctcgagtcgctacaccacgaggtcgaactcgccgtcgtcatctcccggcgtgggcgcgacgttcccgaggcgtccgacatggactttgttggaggttatgcacttgcttggacatgacagcaagggaccgtcagtctgttgctaagtctgcaggccttccatggactttggctaaaggacaagacaccttcaccccaattagtgcagtagttccaaaatcacttgtcactaatcccgatgatct

SEQ ID NO: 54800 - DNA, 254 bp, Zea mays
cgacaaaaccagaccaccaaacaagtgccagcgccctctcgcagtcgcctcaatggagagcaccttcatcatgatcaagcctgacggcgtccagaggggcctcattggtgagatcatcagccgttttgagaagaagggcttctacctcaaggccttgaacttgtcaacgtggagaggtcgtttgtcgagaagcactacgccgatctcgcctccaagtccttcttccagggccccgtggattgcatcatctctgg

SEQ ID NO: 54801 - DNA, 288 bp, Zea mays
cttgcagtggtgcaggtcttttcggtcctcaggcttcatccctgtgcaagtgcagggataattggttctgatctcccgaggctgcataacctgattcagaggcagagcaagggggcgtgagggagatgagggagatcatcagcatccatatcgacgcagcaggcatccaggtagggaattcttgctgggagctctactgcctcgagcacggtatccagcctgacggcctcatgcccagtgacacctctgtcgggatcgcgacggatgcgtgcaacacgttcttcagtg

SEQ ID NO: 54802 - DNA, 298 bp, Zea mays
cgagactgagatggggggttttgtcaagacccacaagaccaatgcgtacttcaagcgtttcccggtgaagttcaagagaaggcgcgctggcaagacagactacagggccacgataaggctgattaaccaagacaaaaacaagtacaatacacccaaataagatttgttgtgcgatttaccaacaaggacatcacagcacaaatcatctctgctagtatagcaggtgatatggttcttgcttctgcttactcgcatgagttgccacgatatggtcttgaagttggtctgaccaactatg

SEQ ID NO: 54803 - DNA, 288 bp, Zea mays
gtcttgggcctcatcattgctgccgatgacttgatgtattcctatggcctgttgtaccttcctgtatcaacatattcgctcatttgcgctagtcagctggccttcaatgctgtcttctcatatgtcctaaatgctcaaaagttcaccccattcattttcactcagtaattctccttaccttttccgctgcgcttcttggagttgacgaagattctcagggtaccatgggtttatcgcgtgggaagtacctattgggtttcgcattgaccctaggagcctcggccacat

SEQ ID NO: 54804 - DNA, 208 bp, Zea mays
ggagatcctcacaatattgcacagatgtagcaaaagcattggatgctcctattttccatgttaacggtgatgatttggaggctgttgttcatgtctgtgagctcgccgcagaatggcgttagacatttcattcagatgtagtggtggacattgtatctaccggcgatttggccataatgaaactgatgagccgtccttcacccaacct

SEQ ID NO: 54805 - DNA, 289 bp, Zea mays
gtggcgcgctgttctcaagattggccctaatgagccatcacagcgtgccatcgacctgaacgctcagggtctggctcgctatgccatcatctgccatgcgaatagtctgctgccaattgttgagcctgagatccttgttgatggccctcatgacatgatcgctgcgcttacgtcactgagaccgtccttgctgcctgctacaaggcgctcaacgagcaccatgtcctcctagagggtaccctcctgaagcccaacatggtgactccaggctccgactccaagaaggtga

SEQ ID NO: 54806 - DNA, 143 bp, Zea mays
gcttcgtgcgccaggagctcggctgcgtgttcctcaccggcgagaagctcaagtcccccggcgaggagtgcaacaaggtgttcctcggcatcagccagggcaagctcgtcgaccccatgctcgagtgcctcaaggagtgggac

SEQ ID NO: 54807 - DNA, 246 bp, Zea mays
acaccgagcccgactgcccaaccccgatccggcgatccgtctccttcttttcctcctttctgccgtccccgatcactcgcaaccatggcggcggcagcaggcggaggcgcggtgcgtgctctgtcccagaaggagcaggacatacagatgatgctcccgccgacgtccaccttggcaccaagaactgcgatttccagacggagcgctatgtctttcagcgccgttccgacggcatctacatcatca

SEQ ID NO: 54808 - DNA, 287 bp, Zea mays
accagctgtcccactcaccatggagaagatcctgatcctcctgcttgtcgccctctctgtggcctatgcagctcctggcccccgggggatcgggatcaacctggagaacggtgagctctgcatggctagtgcccagtgtaagagcaattgctgcagcattcaagtgcgctgggcctggcccgctgcacatccatggccagcgagaacagcgagtgctctgtcaagacgctctatgggatttactacaagtgtccctgtgagcgtggcctgacctgtgagggagaaaa

SEQ ID NO: 54809 - DNA, 288 bp, Zea mays
ggcgatgtcgcgcttcgggcgctccgggcagccggagaaccgcgaatctttctccctcctcgtcctcaacgtctccttccgcactacggctgacgacctcttcccgctcttcgatcactacggcaaggtcttagacatctacatcccgcgcgacacaggactggggatccgcgatggttcgcgttcgtgaggtacaattacgaggatgaggcgcaggatgccattgacgggcttgatgggatgaggtttgatgggcgtgcgctcatggtgcagtttgccaaatacgga

SEQ ID NO: 54810 - DNA, 287 bp, Zea mays
catgaatctacttctgatccttacctttgttgcagctgctgttgctgccccctttgatgatgatgacaagatcgttgggggctacatctgtgaggagaattctgtcccctaccaggtgtccttgaattctggctaccacttctgcggtggctcctcatcagcgaacagtgggtggtgtcagcaggtcactgctacaagtcccgcatccaggtgagactgggagagcacaacatcgaagtcctggaggggaatgaacagttcatcaatgcagccaagatcatccgcca

SEQ ID NO: 54811 - DNA, 212 bp, Zea mays
gcctggaatcagatgggcccaacatgacagagaatggcctggaagatgaatcaagacctcagcgtcgtaatcgcagccgccgccgccgtaaccgtggtaatcggactgatggctctatcagtggagaccgccagccagtgactgtggctgactattctcacgagcagagtctcagagccgccagaggcccaccctggaacgcactaaaccct

SEQ ID NO: 54812 - DNA, 297 bp, Zea mays
gccgggaaggcattgttgaagtgccaaagataatttatggagtgcatgacgaagcgaaggacaaagcttttgagttggagttgagctggatctgtgatgaatcgaaccgtcagcatcagaaggttccaaatgaactgttggagcaggccaaagctgtgctcaggcagctcttgaggagatggatgctgactaagaaacaggacgatttgcccagacttggtgtttttggtgctgttgaaatctccgatccctttgggggtgaccactggacatggccaatttgtcacaatttattat

SEQ ID NO: 54813 - DNA, 295 bp, Zea mays
cgccgctgttccccgcaacctaccgccgcaatctcgtccgacccggcgcgtcgtcccctccagatctccgtcgccctctccaggtagcagaaactgttctgctgcagtctgacagcgtggagggcttaggagcttctgcttcttttatgtctgacaatctttgctttatttgggattgttgggagagtactctcgtgcaactaggaaaaggcacaaggttccgtcccactgcatgcgtcaagagactgtctggttttcttggttctgatttgtcatttgctggtgctcaaagccg

SEQ ID NO: 54814 - DNA, 271 bp, Zea mays
cgcgagctcaccgtgtggtcccggcaaggcaaggcgggcaagacgcacaagttctctgccggaacctacccgcgcctggaggagtaccgccggggcatcttaggagactggtccaacgctatctccgcgctctactgcaggtgcagctgatcattgctggtctctcatctgcagcttccacagagtgccaagcccctcactcagcccatccctgggctctgctccggggccccaagaaccaggaggaggagcgttctgcctgccccctccc

SEQ ID NO: 54815 - DNA, 287 bp, Zea mays
ggcgtcggaggtggaggacgaggcggcgacgcagctgctcgccaacggtgcagccgacgtccgccggaggaaggaccaggcgaaggcaattctgtccacgcaggccgtcaggatcgccaccaaggccgagcagcatgagcgcttcatctttaggtcacacacttgctgggtgttcttggatttgggggattttgctatctcttgggtgccagaccacaggatatgccatatgtgtcctgcctgttctatgtcatatttgttccgctccgctggatttactaccgcta

SEQ ID NO: 54816 - DNA, 287 bp, Zea mays
cgagctcctcgcgtcctgcgagcgcgctccgcaacgtcaccatgaagttcaacatcgcgaacccttccaccgggtgccaaaagaagctggacatcgatgacgaccagaagctgcgtgccttttatgaccgaaggatatcccaggaggtcatggtgatgctctgggtgaggagttcaagggttatgtcttcaagatcatgggtggatgtgataagcaaggcttcccaatgaagcaaggagttttgacttctggtcgtgttcgacttctgctccatagaggcactccct

SEQ ID NO: 54817 - DNA, 145 bp, Zea mays
ggcacgacgagcagaggcccccccccggagcggcgcggagcaatgagcggcgggataccgggcggaggacgactacgactacctcttcaaggtggtactgatcggcgactccggcgtcggcaagtccaatctgctctcacgcttc

SEQ ID NO: 54818 - DNA, 287 bp, Zea mays
cgcccttccagccgcgttgtcaatggtgaggatgcggtcccctacagctggccctggcaggtttccctgcagtatgagaaaagtggaagcttctaccacacgtgtggcggtacctcatcgcccccgactgggttgtgactgccggccactcatctcgagctcctggacctagcacgtcgtgttgggcgagtacgaccgtgctgtgaaggagggccccgagcaggtgatccccatcaactctggggacctctttgtgcatccactctggaaccgctcgtgtgtcgcct

SEQ ID NO: 54819 - DNA, 192 bp, Zea mays
cggcgacatgcagctcatcgccgaagcgtacgacgtgctccgcaggctcgggggcctgtccaactccgagatcgccgacgtcttcgcggagtggaacaggggggagctcgagagcttcctggtccagatcatcgccgacattttcatcgtgctgacccgttagactggagctggatcggcggtcaggacgct

SEQ ID NO: 54820 - DNA, 287 bp, Zea mays
cttcaatgatgctgtcaatgggtttccagatgacggttggtcactgatgagcagtgacggtgctgaggatgttactattgctatcaactcttctccaaacaaacttattggtcctcatgtcaactcttcccagctgtttactgcgatcggggtggcatcctgtgtgctaaggcatcaatgctgcttcagaatgtgccacctgccctactagtacgatttctgagggagcatcgctccgaatgggctgatcctggtgttgatgcttattctgccgctgctctgagggc

SEQ ID NO: 54821 - DNA, 293 bp, Zea mays
gcatggcttccctctggctcctctcctgcttctcccttgtgggggccgcctttggctgcggggtccccgccatccaccctgtgctcagcggcctgtccaggatcgtgaatggggaggacgccgtccccggctcctggccctggcaggtgtccctgaggacaaaaccggcttccacttctgggggggctccctcatcagcgaggactgggtggtcaccgctgcccactgcggggtcaggacctccgacgtggtcgtggctggggagtttgaccagggctctgacgaggagaaca

SEQ ID NO: 54822 - DNA, 280 bp, Zea mays
ctagcatccgcagttcccccgcgcccgagacgcaaccccgcgccaggcgtaagtttgttcttttatcgatattatcgatatggcgagggaggagaatgtctacatggccaagctggctgagcaggccgaaaggtatgaagagatggtgagtatatggagaaggtggctaagactgtagatgtggaagagctcactgttgaggagcgtaacctcttgtcggtcgcatacaagaatgtgattggggctcgccgtgcttcatggcgcattgtctcttctattg

SEQ ID NO: 54823 - DNA, 283 bp, Zea mays
ccggggtcgatgtacccgccatccgaggcattggcaactacggcggcatcatggtgtgggaccgctttaacgacgtgcagaacaactacagcagccaggtgaagggcagcgtctgatgggcatacgaagcttcaagctacagcactagccatgcatatatatatagtggctattcgtcaagttatcggactagatatacaaattaatataataagagcggatcatcgggagacagacgcatgtcagctattgtctcgttttctaagcaacgagcgagagctgc

SEQ ID NO: 54824 - DNA, 283 bp, Zea mays
cgagctcgagccctcgcccgctcagtcacaaagcctcagatctcagtcgcctgcgccgccgcatcgtgcgtgtggaggggagaagacaggaaatggcggcgactgagggcgtgctcttggggatgggcaaccccctcctcgacattccgccgtcgtcgatgacgccttcctgacaaagtatgacatcaagctgaacaatgctattctcgctgaggagaagcacttgcctatgtatgacgagttggctagcaagagcaatgttgaatatattgccggaggagcc

SEQ ID NO: 54825 - DNA, 279 bp, Zea mays
catgactccactcctgatccttacctttgtggcagctgctcttgctgccccctttgatgatgatgacaagatcgttgggggctacaactgtgaggagaattctgtcccctaccaggtgtccctgaattctggctaccacttctgtgtggctcccgcatcaacgaacagtgggtggtatcagcaggccactgctacaagtcccgcatccaggtgagactgggagagcacaacatcgaagtcctggaggggaatgagcagttcatcaatgcagccaagatc

SEQ ID NO: 54826 - DNA, 279 bp, Zea mays
gttgcctttggtgccgctgtgcagggaagcatcttgagcggcgagggtggtgacgagaccaaagatatcctcctccttgatgtggctcccctcaccctgggtatcgagaccgtcggtggagtcatgaccaagttgggcccgaggacactgtcatcccgaccaagaagtcgcaggtgttcaccacctaccaggaccagcagaccactgtctccatccaggtctttgagggtgagcgcagtatgaccaaggactgccgtcttctcggcaagttcgacctca

SEQ ID NO: 54827 - DNA, 280 bp, Zea mays
ggagatcctcacaatattgcacagatgtagcaaaagcattggatgctcctattttccatgttaacggtgatgatttggaggctgttgttcatgtctgtgagctcgccgcagaatggcgtcagacatgtcattcagatgtagtggtggacattgtatgctaccggcgatttggccattatgaaattgatgagccgtccttcacccaacctaagatgtacaaggtgattaggaccatccaagtgcgctagagatgtatcgaaggaagttgctagagttctgg

SEQ ID NO: 54828 - DNA, 286 bp, Zea mays
atgagatccgcaagtaccagaagagcatgagttgctgattaggaagctgccgttccagaggcttgtgagggagattgctcaggatttcaagacggatctgcgcttccagagccatgccgtgcttgctctgcaggaggcagcagaggcctacctggttggtctcttcgaagataccaatctgtgcgcgatccatgccaagcgcgtgaccatcatgcacaaggacattcagctgcaagaaggatccgtggcgagagggcgtgagtctgtcgacgggaagtagaactct

SEQ ID NO: 54829 - DNA, 290 bp, Zea mays
tgtttctgccatgacttccgataatatcggcaagcttatcaatcaagaccaaataccaattttgataaatcttaatggctacacaaagggtgccaggaacgaaatttttgcaatgcagccagcacctatccaagtttcgtacatggggttccctggaacaacgggtgctgcatacatagattacttggtcacagatgagtttgtttctccatctagctatgcacatatatattcagaaaagctcgtccatttgcctcattgctattttgtcaatgactacaagcagaaaa

SEQ ID NO: 54830 - DNA, 289 bp, Zea mays
gaagaccagttcccctctcctgatcgtctgttcctcacagcagcagccatggcggccgagccggagaagcaggcggcccccgcggcacaggagacggccgtgcacatcgtgtacgttgaccgccccgaggacgccgaccctgaggagttccacatccgcaccctcacccccgtcctcggcagcgaacagaaggccagggacgcagtgctctaccactacaagaacgccgccagggcttctccgcgaactcaccccccagcaggtcaaggatctcaaggagcaaccaggt

SEQ ID NO: 54831 - DNA, 292 bp, Zea mays
  unsure (1)..(292): unsure at all n locations
acacagggtagtgctacaagtcccgcattcaggcacagactgngagagcacaacatcgaagtcctggaggggaatgagcagttcatcaatgcagccaagatcatccgcgacccccaatacgacaggaagactctgaacaatgacatcatgttaatcaagctctcctcacgtgcagtaatcaacgcccgcgtgtccaccatctctctgctcaccgctcctccagccactggcacgaatctccatactctggctggggcaacactgcgagctctggcgccgactacccagacga

SEQ ID NO: 54832 - DNA, 287 bp, Zea mays
agcaggatgtcacaacaacccgactcaagaagggcggcaacaggttccatcaagaccgccgcatacggccactttggccgtgacgacgccgacttcacctgggaggtggtcaagcccctaaagaaggcatccgcttaagaatgtattgggaagttcactggacatgaggttcatcttcgtctggctctgctgatacctgcaaggattgctgctgctgctgccgcccctggattgtgtttgatcagtgactggctgctctgctccatagaagatgaatgaagagagag

SEQ ID NO: 54833 - DNA, 287 bp, Zea mays
agtttctgccatgacttccgataatatcgccaagcttatcaatcaagacaaaatacaaattttgataaatcttaatggctacacaaagggtgccaggaacgaaatttttgcaatgcagccagcacctatccaagtttcgtacatggggttccctggaacaacgggtgctgcatacatagattacttggtcacagatgagtttgtttctccatctagctatgcacatatatatcagaaaagctcgtccatttgcctcattgctattttgtcaatgactacaagcagaa

SEQ ID NO: 54834 - DNA, 204 bp, Zea mays
agcgagaagaagatgataaccctcaaaagctccgatggcgaggagttcgaggtggaagaggcggtggcgatggagtcgcagaccatccgccacatgatcgaggatgactgcgccgacaacggtatccctacttcctaacgtcaactccaagatcctatccaaggtaatcgagtactgcaacaagcacgtacatgccgccgccgc

SEQ ID NO: 54835 - DNA, 281 bp, Zea mays
  unsure (1)..(281): unsure at all n locations
agnatgaacagttcatcaatgcggccaagatcatccgccaccccaaatacaacagccggactctggacaatgacatcctgctgatcaagctctcctcacctgccgtcatcaattcccgcgtgtccgccatctctctgcgcactgcacctccagctgctggcaccgagtctctcagctccggctggggcaacactctgagttctggtgccgactacccagacgagctgagtgcctggatgctcctgtgctgagccagctcagtgcgaacctcctacctggaa

SEQ ID NO: 54836 - DNA, 289 bp, Zea mays
gcggccaccaggtgcagagtctttcgtcatctcttctccggcgaagaacccccagtcgctcaccagatcacttgttaaactttgttgaggggtgatggcggtttctttcgcaaacctcagctccgaggcagggcttaataagcttgatgagtaccttctcactcgcagctacatcactggctaccaagcttccaaggttgatttggctgtctacacttcgttttcgtctgctcctcgtccaagtatatcaacgtagcaaggtggtttaatcacattgatgcgctcgtga

SEQ ID NO: 54837 - DNA, 99 bp, Zea mays
taacctccagcccggaatcgaggcaatggcgctcgccaaggccaaggagatcgttgcctccgctaccgctcgtcgtcttcagcaaaacttcctgtcctt

SEQ ID NO: 54838 - DNA, 268 bp, Zea mays
aaaactggaagcattgatcgctgctgttaacagcagtgatagcagtcacattgttcatgcctcctggtgaaatgctctctctgatgtctctaagcactcctatattattggtgaagaaggtggaagtggttttgctgcttccgcagcagctgccgtagctactggagcatctggatttgaatttggtgtggacccaaatgtagatccagagttggcactcgcctgcggttgtctatggaagaagaacgagcaaggcaagatgctattg

SEQ ID NO: 54839 - DNA, 244 bp, Zea mays
atgcggcggaggatgatgagcagcagcagcaggcggcgccgaggaacggcatcccactcagtgcttgcaaccatggctaggggattgaagaagcacttgaagaggctcaatgcgcccaagcattggatgctcgacaagcttggcggagcttttgctcccaagccatcttctggacctcagaagtccagggagtgccttcctctgatcctcatcatcaggaacaggtcaagtatgctctgaacta

SEQ ID NO: 54840 - DNA, 280 bp, Zea mays
cccaaatacaacagccggacctggacaatgacatcctgctgatcaagctctcctcacctgccgtcatcaattcccgcgtgtccgccatctctctgcccactgcccctccagctgctggcaccgagtccctcatctccggctggggcaacactctgagttctggtgccgactacccagacgagctgcagtgcctggatgctcctgtgctgagccaggctgagtgtaagcctcctaccctggaaagattaccagcaacatgttctgtgtgggcttcctcgag

SEQ ID NO: 54841 - DNA, 101 bp, Zea mays
tcgtgactgagctggtttcatggaccagttgtgttctcgttacccaaaactatcgtgcggcacatctggcttaatcatgaataaatgtggtgtttgcactt

SEQ ID NO: 54842 - DNA, 282 bp, Zea mays
agcacacccaccaactgacctgacccacgagggatccgcagatgaagatcattccggtcccttgcctggatgacaactatgcctacttaatcgtggacgagagcaccaagaaggcagcggccgttgaccctgtggaaccggagaaggttctcaaggcggccggcgaggtcggcgcctacgtcgactgcgttctcaccacccatcaccactgggatcatgctggtggaatgagaagatgaggctgcaggtgccagggataaaggtatttggaggatccctgga

SEQ ID NO: 54843 - DNA, 199 bp, Zea mays
actgaattgtatgtgatcaatggtcaatacgaaaaggcactttctctttatgctgatctcctgaagccagaagtattcgagtttattgagaaatacaacttgcatgatgccattcatgataagattgtcaatcttatgatagtggacaataaaagaacagttcacctactgatccaacatcgtgataccattcccccat

SEQ ID NO: 54844 - DNA, 183 bp, Zea mays
gctgctcagttccctccccttgtggccgttgcctcaggctatggcccaccttcctctcactcttccagccgcgttgtccatggtgaggatgcggtcccctacagctggccctggcaggtttccctgcagtatgagaaaagtggaagcttctaccacacgtgtggcggtagctcatcgcccccg

SEQ ID NO: 54845 - DNA, 279 bp, Zea mays
agaagatgtgtctgatgaagctgtcgctgctttggataaaatagaagacgccctcgggaaattcaacgagggtccattctcccttggtcagttcagtctggtatgtcactggacactaggaatcctcctctttgcagcatggttcaaaatcaaatctctattagaaagagttcagttcatgaatgtgggcttcggttgtcatgtggctttgtcgtccgtgatggtaatttcactacaggtggacattgcgtatgtaccattcatcgagaggtttcagat

SEQ ID NO: 54846 - DNA, 280 bp, Zea mays
atacgagtacatgtggacatggcgtggatgtactacgccacgggcaacaacagctacctcaccttcgccaccgacccgcggctgctcaagaacgccaaggccttcttcaacatcctcgaattctccgtgttcagctgggacaacaagctcccgggcgcccagctgctgctgtcgcggctgcgcatgttcctcaaccccggctacccgtacgaggagtcgctcgcggctaccacaacgccaccagcctcaacatgtgcatgtacttcccgcgcttcgccgc

SEQ ID NO: 54847 - DNA, 78 bp, Zea mays
caagaagacccgtgtgaagctccctccggctccaagaaggttatctcctcagccaacagagctgtggttggtgtggtg

SEQ ID NO: 54848 - DNA, 276 bp, Zea mays
cgggggttgctggtgttgagtgtcctgttgggggctgtctttggcaaggaggactttgtggggcatcaggtgctccgaatctctgtagccgatgaggcccaggtacagaaggtgaaggagctggaggacctggagcacctgcagctggacttctggcgggggcctgcccaccctggctcccccatcgacgtgcgagtgcccttccccagcatccaggcggcaagatctttctggagtcccacggcatcagctatgagacgatgatcgaggacgtgc

SEQ ID NO: 54849 - DNA, 279 bp, Zea mays
gcaaagcaagtgaaggcaatgctgttgcaattggaaactatctcatgagcaagggctacaagatggtgactgatggaactgagaaccaccttgttctctgggatctccgcccccttggcttgactggaaacaaggtcgaaaagctatgtgatctttgccacatcacattgaacaagaatgctgtcttcggtgacagcagtgcattgtctccgggtggtgtccgcttggcgcgccacaatgacctcgaggggtctactggagaaggatttcgagcagatt

SEQ ID NO: 54850 - DNA, 280 bp, Zea mays
agcgaaggcgaccattccttcttcgctccttcgccgccgctatggttaagtactcgcaggagccgggcaaccctaccaaatcggccaaggccatgggaagggacctgagggtccacttcaagaacacaagggagacagcttttgcgcttcgcaagctgcctttgaccaaggctaagcgataccttgaggatgttattgctcacaagcaggcaattcccttccggagatactgtggaggtgttggtcgcaccgcacaagcaaagtctcgccactcccatgg

SEQ ID NO: 54851 - DNA, 202 bp, Zea mays
atccttgactagctccgatctggtacgagatggccggcaagatgaaggagttagacggcgccagcctgccaagatcttcattggcgggctctccaaggatacaagcatgagtacattcaaagaacattttgggaagtatggggatataattgatgctgtcataatgaaggaccgctacacacaaaagcccagaggctttggc

SEQ ID NO: 54852 - DNA, 167 bp, Zea mays
ctttcctctggctcctctcctgctgggccctcctgggtaccaccttcggctgcggtggtccccgccatccaccctgtgctcagcggcctgtccaggatcgtgaatggggaggacgccgtccccggctcctggccctggcaggtgtccctgcaggacaaaaccggctt

SEQ ID NO: 54853 - DNA, 140 bp, Zea mays
gccagttggtcgtgtggagactggtgtcatcaagcctggtatggttgtcacctttggtccaactggcctgactactgaggtgaagtctgttgagctgcaccatgaggctcttcaggaggcccttcctggtgacaatgttg

SEQ ID NO: 54854 - DNA, 203 bp, Zea mays
cgactctagccgcctcttcagctcgccatggatcccaactgctcctgcgccgccggtgactcctgcacctgcgccggctcctgcaaatgcaaagagtgcaaatgcagctcctgcaagaaaagctgctgctcctgctgccctgtgggctgtgccaagtgtgcccagggctgcatctgcaaaggggcgtcggacaagtgcagctg

SEQ ID NO: 54855 - DNA, 205 bp, Zea mays
aggtttgcaaagaagatcactcaagactacgggcaggatgcagctttcaccgccattctcgacaccttggacatcttcctggagatcgtcaccaaccctgatggctttgccttcacgcacagcacgaatcgcatgtggcgcaagactcggtcccacacagcaggctccctctgtattggcgtggaccccaacaggaactgggacg

SEQ ID NO: 54856 - DNA, 120 bp, Zea mays
gttgctgtcaaggatctcaagcgtgggttcgtggcctccaactccaaggatgaccctgccaaggaggctgccagcttcacctcccaggtcatcatcatgaaccaccctgggcagattggc

SEQ ID NO: 54857 - DNA, 139 bp, Zea mays
ctgtgatgaaacttactgtggacctgccgcagagtctgaaaaggagaccaaggccctggctgatttcatccgcaacaaactctcttccatcaaggcagatctgcggatccactcgtactgccaaatgatgatctaccct

SEQ ID NO: 54858 - DNA, 199 bp, Zea mays
aaaggtcccggagagctgagcagtcaagatgtgtgacttcaccgaagaccagaccgcagagttcaaggaggccttccagctgtttgaccgaacaggtgatggcaagatcctgtacagccagtgtggggatgtgatgagggccctgggccagaaccctaccaacgccgaggtgctcaaggtcctggggcaccccaagagt

SEQ ID NO: 54859 - DNA, 276 bp, Zea mays
ccaagaagagggaagagcaccaaggaccttcggcgcccgttcaggatccacatcttcccgagcgagttcttggttgacctcttcccccttcggaccacctccaaggctcttggtgtagcttgccactctcaccaatcaagttttcatgtctgatctcgacattcagatcccaactgccttcgatcccttcgctgaggccaatgctggggactctggtgcggcacagggtcaaaggactacgttcacgtgcgcatccagcagcgtaatggtcgcaag

SEQ ID NO: 54860 - DNA, 173 bp, Zea mays
tggaactccatccaaatctccaaagggaacgacattgccctgctcaaactggctaaccccgtcgcgctcaccgacaagatccagctagcctgcctccctcctgccggcaccattctacccaacaactacccctgctacgtcacgggctggggaaggctgcagaccaacggggc

SEQ ID NO: 54861 - DNA, 277 bp, Zea mays
agaccctaccttgcttcctatggtgtggagaatccaatctatgctgtcctacaacttgcacaaacaaccatgagaagtgaactcgggaagataaccttagataagacttttgaggagagagatgcattaaatgagaaaattgtgagtgccatcaatgaagcagccacagattggggcctgaagtgtatccgctatgagatcagggacataaatcctccagcagggattaggcaggctatggagatgcaggctgaggcagaaaggaaaaaacgcgctc

SEQ ID NO: 54862 - DNA, 160 bp, Zea mays
gcagattcatcctgatgatgcatttggggagcaaatgattagaaatcttgagagtagaggatgcccccttctcggtataaatgctacaccaaccctgagtcacaaggagaaactttttcttggcaatggatggcagagagccgttgcatgggatatgctg

SEQ ID NO: 54863 - DNA, 275 bp, Zea mays
gccctcattcgaagtcgacggcacccgtcttctctccgcactcgaaaccccatccttgactagctccgatctggtacgagatggccggcaagatgaaggcgttagacggcgccagcctgccaagatcttcattggcgggctctccaaggatacaagcatgagtacattcaaagaacattttgggaagtatggggatataattgatgctgtcataatgaaggaccgctacacacaaaagcccagaggctttggctttattacttttgctgatccca

SEQ ID NO: 54864 - DNA, 275 bp, Zea mays
ctttttattgtcactgaactactgcgagcaaatctatacgagtttcagaaatataatcaagaatctggtggtgaggtgtattttactttgcctaggatacaggttatagctcggcaatgtttggaggccttggtttacttgcaccgtctgaggatcattcattgtgacctaaagccagaaaatattcttatcaagagctacagtagatgtgaaattaaagtcattgatctgggaagtagttgcttcttgacagacaacttatgtctctatgtcca

SEQ ID NO: 54865 - DNA, 277 bp, Zea mays
agcaatgtagggataacgagctgtcaaatattgagataattgtagccgacatcagcaagtttgagatggagcgctcttttgacaggatcgtatctatagagatgtttgagcacatgaaaaactacaagtcacttcttaagaagatatccaggtggatgaaagaggatggcctactattcgttcacctcttctgccacaaagcatttccatatcactttgaggataaaaacgatgatgactggatcacgaggtatttcttcactggaggaacaatgcc

SEQ ID NO: 54866 - DNA, 189 bp, Zea mays
tggcagaggcgctcacctctgaccaccgggcgtccagggaggacgagaaggaaaggattgagaatttgggtggatttgtagtgaattaccgtggaacatggcgagtccagggctccctggcagtgtctaggggcattggggatggacacctaaagcagtgggttgtggctgacccagacaccacgacgc

SEQ ID NO: 54867 - DNA, 274 bp, Zea mays
gttcggagcgggcagcagcacacagccccatcccaatcctagtcgatcttcttcccctcctcaaggaagaaaagaagctgaaccatggggaagagaaagtcagctgctaagccacctcctaagaagcggatggacaagcttgacactgtcttttcctgcccattctgcaaccacgggagtagtgttgagtgccgaattgacatgaagaatctgattggcgaacatcttgtagaatctgtcaggaaaacttcagcacaactgtgatgcactcact

SEQ ID NO: 54868 - DNA, 252 bp, Zea mays
caaagctgctctcgtccctagaaataaagcagctcctccgcggggcggcgaactgctactcatcgccaaaaccctagccccgatccggtcgaggagcactacttcttggcatggcgggcacccctagccaggcaatcctcctgctccagaagcagctcaaggatcttgcgaagaaccccgtggatgggttctccgcagggcttgtagacgatagcaacgtcttcgagtggcaggtcaccatcatcggcccgc

SEQ ID NO: 54869 - DNA, 273 bp, Zea mays
cttctcttcggttcagctctcgagtttccaggatgaaggtaaaagctgcctacctgcttgctgttctgggtggaaacacttccccgactgctgatgatgttaagagcattctggaatcagttggtgctgaagctgatgaagaaaaactagagttcctgctcacagaactcaaagacaaggacataacagaagtgattgcagctggaagggaaaggttatcctctgtgccttcaggtggtggtgcaattgacatgggagctccagcagctgtag

SEQ ID NO: 54870 - DNA, 275 bp, Zea mays
caattttgaatgttgttgctgttcattcaactctcgatcttccttttgaccacaatatgtatagccagaaccttactgttcagaatttcttcaattcatcagttcctgtttctgtgcaagcaaccttcccctacaagttcgttgtgagcaagttcttgcagcctggagcatatgatctggttggttacatagtgtatgagatcgaccagcacccttaccagaatgtattctacaatggcactatcgaggttgttgaagctggaggcttactcagt

SEQ ID NO: 54871 - DNA, 274 bp, Zea mays
ctcgaacatttcaaaattgcaccatccgaatctgaatgagcttgtgggctattgcatggaacatggccagcacttgcttgtgtatgatttccacaggaatggatcacttcatgatctactccacctttcagatgagtacagcaagccacttagctggaacactcgtatcaagatcgcactcggctctgcccgtgcactggagtaccttcatgaaatatgttctccatccatcatccataagaatttcaagtcgtcaaacattttgctggactca

SEQ ID NO: 54872 - DNA, 159 bp, Zea mays
gagctcgtgaaggcctgcaccaccatcatctggatcgcgtcggcgctacacgccgccgtcaacttcgggcagtacccgtactgcgggtaccacccgaaccggccgtccgtgagccggcggcccatgccggtgccgggctccgacgcgtacaaagagctg

SEQ ID NO: 54873 - DNA, 217 bp, Zea mays
cctggcccccgggggatcattatcaacctggagaacggtgagctctgcatgaatagtgcccagtgtaagagcaattgctgccagcattcaagtgcgctgggcctggcccgctgcacatccatggccagcgagaacagcgagtgctctgtcaagacgctctatgggatttactacaagtgtccctgtgagcgtggcctgacctgtgagggagacaaga

SEQ ID NO: 54874 - DNA, 271 bp, Zea mays
gtgcggtgcagttttcaactgacctctggacgcagaacttcagccatgaaggtaacaggcatctttcgtctcagtgccttggccctgttgagtctatctggtaacactggagctgactccctgggaagagaggccaaatgttacaatgaacttaatggatgcaccaagatatatgaccctgtctgtgggactgatggaaatacttatcccaatgaatgcgtgttatgttttgaaaatcggaaacgccagacttctatcctcattcaaaaat

SEQ ID NO: 54875 - DNA, 198 bp, Zea mays
gaggtgatcagcaccaagaggcagcctgtgggacccaaacctggcttcatggtcgagggtgctacactcgagacagtcactcctattccttatgatgtggtcaacgatctcaagggcggttactagagagaattcttgtaccttcagcagttcaaacgagctggcaaacttatctgaatcttttttgataattggcta

SEQ ID NO: 54876 - DNA, 270 bp, Zea mays
gtcgacacattcctcttcacctcggagtctgtgaacgagggacaccctgacaagctctgtgaccaggtctcagatgccgttcttgacgcttgccttgctgaggaccctgacagcaaggttgcttgtgagacctgcaccaagaccaacatggtcatggtctttggtgagatcaccaccaaggccaattgttgactacgagaagattgtcagggagacctgccgcaacattggttttgtgtcaaacgatgttgggcttgacgccgaccactg

SEQ ID NO: 54877 - DNA, 193 bp, Zea mays
tatgacaccagtgaggggatgaaggtatgcacctattaccatttggtgtccatgcctgctattctcctaattgaccccgtcaccgggcaaaaagtacatgcttggcatggaatggttcacccagaccgtttactcgaggatttactaccttacctggataaaggtccgaaggggcaccatgcagctcaacctc

SEQ ID NO: 54878 - DNA, 242 bp, Zea mays
aaatcggctgattctgcatctggaaactgccttcatcttgaaagaaaagctccaggtcccttctccagccacccagccccaagatggtgatgctgctgctgctgctttccgcactggctggcctcttcggtgcggcagagggacaagcatttcatcttgggaagtgcccaatcctccggtgcaggagaattttgacgtgaataagtatctcggaagatggtacgaaattgagaagatcccaa

SEQ ID NO: 54879 - DNA, 263 bp, Zea mays
agcagaagggaggctccaagacctcatcaacaattcagagcaccccatctgggaagaggtataagtttgtggccaccgggcatgggaagtatgagaaggtgcttgtggaagggggcccggctccctaggcgtcccatctcgcttcctgggtctgcaggtccagccggctggcaccctccatgtacccaggggagattccagccagacacccgccccccggccctggctaagaagttgcttcctgttgccagcatgacctacct

SEQ ID NO: 54880 - DNA, 291 bp, Zea mays
ggcagctgctcttgctgccccctttgatgatgatgacaagatcgttgggggctacaactgtgaggagaattctgtcccctaccaggtgtccctgaattctggctaccacttctgtggtggctccctcatcaacgaacagtgggtggtatcagcaggccactgctacaagtcccgcatccaggtgagactcggagagcacaacatcgaagtcctggaggggaatgagcagttcatcaatgcagccaagatcatccgccacccccaatacgacaggaagactctgaacaatga

SEQ ID NO: 54881 - DNA, 290 bp, Zea mays
gttggtgcagtcgggataaattgcacacctccaagatttattcatggactgatactctccattcgaaaggtcacagacaagcctattctgatatatcccaacagtggtgaaagatatgatggtgaaaaaaaggagtgggtggaatccactggtgtgtcagatggtgattttgtttcgtacgtaaatgaatggtgcaaagatggggctgcgcttatcgggggctgctgcaggacaactccaaacactatcagggccatacacagaactcttaaccaaggctgccacaagca

SEQ ID NO: 54882 - DNA, 214 bp, Zea mays
gaaccaacacctgtgcggctcacacctggtggaagctctccacctagtgtgcggggaacgaggcttcttctacacacccaagacccgccgggaggcagaggacctgcaggtggggcaggtggagctcggcgggggccctggtgcaggcagcctgcagcccttggccctggaggggtccctgcagaagcgtggcattgtgcaacagatgcgtacc

SEQ ID NO: 54883 - DNA, 169 bp, Zea mays
cgcaattggaactggtaaagttgccaccccagctcaggctcaggaagtgcacgcctccctgagggattggctaaagaccaatgccagccctgaggttgctgaatctactaggatcatctacggaggctctgtaactgctgcgaactgcaaagagctagcagcacagcct

SEQ ID NO: 54884 - DNA, 230 bp, Zea mays
caagtacaatgatgagaacaccgtctcctttgtgaccctgaacaaggttggtggattcctgcagcggatggacctgtgccgcaagtacgcctttgggaagatgctcgtgataggctctgagccacccttcaagctgaagggcctttggctcttccgtggccaggatgttcccaagtttgtaatggacgaggtctatgacatggagctctacgagtggaccaaggtggaat

SEQ ID NO: 54885 - DNA, 145 bp, Zea mays
gctagcaaaggctctggcagcctactactttggctcagaggaggctatgattaggcttgacatgagtgagttcatggagagacatactgtctccaagctctattggatcacctccaggttatgttgggtacactgagggaggcca

SEQ ID NO: 54886 - DNA, 237 bp, Zea mays
cgcttctctatttggagatgttgttccaactaagctggagcagccatttatattgaggacgccagatatgtcagccatgcatcatgactcttcgcatgacctcaaaactcttggatctaaactgaaggatatagttggggtcgcagatacttccctggaagtaagatacattacccgtcacatctgatcacttgtcgcagagcgtggagcacgcttggctgccgcagtatatatagc

SEQ ID NO: 54887 - DNA, 106 bp, Zea mays
ggagccctcagttgtggggaccccacttacccaccttatgtgactagggtggttagcggtgaagaagcgaggcgcaacagctgtccctggcaggtctccctgcagt

SEQ ID NO: 54888 - DNA, 286 bp, Zea mays
gttgctgagcagcctgaccctaagcctggttctcctcggctcctcctggggctgcagcattcctgccatcaaaccggcactgagcttcagccagaggattgtcaacggggagaatgaagtgttgggctcctggccctggcaggtgtccctgcaggacagcagcggcttccacttctgcggtggttctctcatcagccagtcctgggtggtcactgctgcccactgcaatgtcagccctggccgccattttgttgtcctgggcgagtatgaccgatcatcaaacgca

SEQ ID NO: 54889 - DNA, 288 bp, Zea mays
ctctgctctcccccacctcccggtccggcagcagagagcggggactgcagagagatcgagatccggaggccgcgagtgggagcgccaccaccagcgactgcggcaatggcgccccccgtgacggtcccggggtcgtcgaccccctccacgccgctgctcaaggacgagctcgacatcgtgatcccgacgatccgcaacctcgacttcctggagatgtggcggcccttcttccagccctaccacctcatcatcgtgcaggacggcgacccgaccaagaccatcaaggtg

SEQ ID NO: 54890 - DNA, 291 bp, Zea mays
cacgaaaggatattcttgaagcttacaggttagctgtaaggggagatgctgtcagtgcatttggtgggatagttgcattcaacacgactattgacgaggatcttgcgaaggaaattcgtgagttcaggagtactacagatggtgagacgcggatgttctatgagatagtggttgctcccggctatacggagaagggtcttgaggttctcagaggcaagtccaaggcactgaggatactcgaggcgaagagaagtggaaaagggatgctttcacttaggcaggtgagtggtg

SEQ ID NO: 54891 - DNA, 170 bp, Zea mays
caaatccccaaagcctccgacccccttcctctctccctccgccgccgctgcgcacgcagggaacaagcgacatgggcgtctacacctttgtgtgccgcaacaacggcggcgagtggaccgccaagcagcactccggcgagatcgaggctaccgccgctaccccatacgag

SEQ ID NO: 54892 - DNA, 275 bp, Zea mays
ctcgggtcgaaccctaagcagggagttgatttatccgctgcagccatgagtaagttgcagtctgagtctgtcaaggatgccatctcccagattgttggggatgccaaggagaagaataggaagttcactgagactgtggaacttcagattggtctgaagaattatgatccacagaaggacaagcgtttcagtggctctgttaagttgccccatatccctcgtcccaagatgaaggtgtgcatgcttggtgatgcccagcatgttgaggaggccga

SEQ ID NO: 54893 - DNA, 286 bp, Zea mays
ggcggaggtgcaggtcctggtgcttgatggtcgaggccatctcctgggccgcctggcggccatcgtggctaaacaggtactgctgggccggaaggtggtggtcgtacgctgtgaaggcatcaacatttctggcaatttctacagaaacaagttgaagtacctggctttcctccgcaagcggttgtataaccaacccttcccgaggcccctaccacttccgggcccccagccgcatcttctggcggaccgtgcgaggtatgctgccccacaaaaccaagcgaggcca

SEQ ID NO: 54894 - DNA, 282 bp, Zea mays
cgcctgtcgcagagcttcgagtacaactacggcgacttcatccccgtgctccgccccttcctccgcggctacctcaaccgctgccacgacctcaagacgcgccgcatgaaggtcttcgaggacaacttcgtacaggagcgcaagaaggtgatggctcagactggtgagatccggtgcgccatggatcacatcctcgaggccgagaggaagggcgagatcaaccacgacaacgtcctctacatcgtcgagaacatcaacgtcgcagcgatcgagacgacgctg

SEQ ID NO: 54895 - DNA, 172 bp, Zea mays
cgcggcatggcttccctctggctcctctcctgcttctcccttgtgggggccgcctttggctgcggggtcacctccatccaccccgtgctcagcggcctgtccaggatcgtgcatggggaggacgccgtccccggctcctggccctggcaggtgtccctgcaggacaaaaccg

SEQ ID NO: 54896 - DNA, 280 bp, Zea mays
tgcgcctctacatttcttctctctctgctcctccgcctccgcctgatccatccaagacaggtgtcgccatgtcggactcggaggagcaccacttcgaatcgaaggccgacgctggggcgtccaagacctacccgcagcaggctggcaccgtccgtaagaacggcttcatcgtcatcaagaaccgtccctgcaaggttgtggaggtttctacctccaagactggtaagcatggccacgccaaatgccactttgtcgccatagacatattcaatgggaaaaa

SEQ ID NO: 54897 - DNA, 281 bp, Zea mays
gctgctagctgtgtgggctattgtggagctgatttgaaggcattatgtacagaagcagctattagagcatttagagagaagtatcctcaggtctacactagtgatgacaagtttgtcattgatgttgattcggtcagtgtcgagaagtaccactttttggaagctatgtctacaataactcctgctgctcacaggggatctattgtgcattcaaggccactttcaacagttatcgctccatgtctgaagagtcatcttgagaaaataatggaacatatttc

SEQ ID NO: 54898 - DNA, 282 bp, Zea mays
ccgctccggttcagacttcacctccttgaatgtttccgacatgagcgccgagtcgataaggaggacgcagtaccccagcttcactgaccgcccgtctaacctgagggtgttctcctttgctgaattgaagagtgccaccctcaacttcagccggtctctcatggttggcgagggtggctttggctgtgtgtacaggggtgtcatcaagacctccgacgaaccgaacgaacgaatcgagatcgctgttaagcagttgaatcgtaaaggacttcaggggcagaa

SEQ ID NO: 54899 - DNA, 236 bp, Zea mays
ccactctggaaccgctcgtgtgtggcctgtggcaatgacatcgccctcatcaagctctcattcagcgcccagctgggagatgccgtccagctcgcctcactccctcccgctggtgacatccttcccaacaagacaccctgctacatcaccggctggggccgtctctataccaatgggccactcccagacaagctgcagcaggcccggctgcccgtggtggactataagcactgctc

SEQ ID NO: 54900 - DNA, 285 bp, Zea mays
caacgagtttggggtacccccctcacctgccaatttcatccagccagggaagcagccgctctcgtccatgtgccagacgatcatggtgggccaggacggccaggtccggatggtggtgggagctgatgggggcacacagatcaccacggccactgcactggccatcatctacaacctctggttcggctcacacgtgaagcgggccgtggaggagccccggctgcacaaccagcttctgcccaacgtcacgacagtgcagagaaacattgaccaggcagtgactgg

SEQ ID NO: 54901 - DNA, 280 bp, Zea mays
tgaggagtcctacccttaccaaggtgtcaacggaatctgccagttcaaggctgagaatgttggagtcaaggttttggactcggttaacatcaccctgggtgctgaggatgaactgaaggatgctactggtctggttcgcccggttagtgttgccttcgaggtgataagtggtttcaggctgtacaagagcggagtctacactagtgatcactgcggaactacaccgatggatgtgaaccacgctgttctggctgttggctatggtgtcgagaatggtgtc

SEQ ID NO: 54902 - DNA, 134 bp, Zea mays
ggctccctcatcagcgaacagtgggtggtgtcagcaggtcactgctacaagtcccgcatccaggtgagactgggagagcacaacatcgaagtcctggaggggaatgaacagtttatcaatccggccaagatcat

SEQ ID NO: 54903 - DNA, 281 bp, Zea mays
aacgtcgccttctgcagcgaccgcccgctctccttcgccgcgccgtctggccagaccgcctggagctactacaaggttatgatcccccttggcaagatcgcgacggtggagccggtgacgatgaaggagagcccgccggagaagtacgtccacgtcgtcaccgtcgactcccacgacttctggttcatgggcttcgtcagctacgacaaggccgtgcacaacctcgtcgaggccgtctcccagcacggcgtcgccactgccggcggcaagtgacgaggcga

SEQ ID NO: 54904 - DNA, 107 bp, Zea mays
gctctaaggcctaccaccttcagaagtcgacctgtggcaaatgtggctaccctgccaagcgtcagatgccatataactggagtgccaaggctaaaagacgaaatacc

SEQ ID NO: 54905 - DNA, 266 bp, Zea mays
cgcgcatcgtttctggacaacactacagggatcttgtgaagacataggatggttgcaaagaactcgggcatcacttcgttcagttgatgggacaggtcgcttcaaggagattttgcatgagataaggaatggcgtgcattgcccgcctgatacactgatttacttatttattcctggcctttttagcaaccacagtccactttacttcaccaatacgaaacgattcttttcaaaaatgggattggcttgccatattgcgaaaattc

SEQ ID NO: 54906 - DNA, 168 bp, Zea mays
atgatgctccggctgctcagttccctcctccttgtggccgttgcctcaggctatgggccaccttcgtctcactcttcgagccgcgttgtccatggtgaggaagcggtcccctacagctggccctggcaggtttccctgcagtatgagaaaagtggaagcttctaccac

SEQ ID NO: 54907 - DNA, 278 bp, Zea mays
ctctgtgattctcttaatgaacagtgccagccttcttgctcaagaagtcaagtccgcagtgaagtaccggccatcgacctagcccgggttctagatttggggcccatcactcggagaggtgcacagtctcccggtgtcatgaatggaacccctagcactgcagggttcctggtggcctggcctatggtcctcctgactgtcctcctggcttggctgttctgacagctccgctgagcatctggccttgaagtttgtgttcttccctctggcaatggctc

SEQ ID NO: 54908 - DNA, 278 bp, Zea mays
gcatggcttccctctggctcctctcctgcttctcccctgtgggggccgcctttggctgcagggtgccgccatccaccctgtgctcagcggcctgtccaggatcgtgaatggggaggacgccgtccccggaccctggccctggcacgtgtcgctgcaggacaaaaccggcttccacttctgcgggggctccctcatcagcgaggactgcgtggtcaccgctgcccactgcggggtcaggacctccgacgtggtcgtggctggggagtttgaccagggct

SEQ ID NO: 54909 - DNA, 282 bp, Zea mays
aacaactacggctgctactgtggcttggggggctcaggcaccccgatggatgaactggacaagtgctgccagacacatgacaactgctatgaccaggccaagaagctggacagctgtaaatttctgctggacaacccgtacacccacacctattcatactcatgctctggctcggcaatcacctgtagcagcaaaaacaaagagtgtgaggccttcatttgcaactgcgaccgcaacgctgccatctgcttttcaaaagctccatataacaaggcacacaag

SEQ ID NO: 54910 - DNA, 270 bp, Zea mays
tcgggcgcgtggccctggtgaactacggcaaagactatggccgactcgtcgtcatcgtcgatgtggtcgaccagaacagggcacttgtggacgcccctgatatggtcaggtgccagattaacttcaaacggctctcacttactgacatcaagattgacatcaaacgcgttcccaagaagtcaaccctgatcaaggctatggaggaagctgacgtgaagacgaagtgggaaaacagctcatggggcaagaagctgattgtccagaagagga

SEQ ID NO: 54911 - DNA, 277 bp, Zea mays
cagctttccaaggctgctgtgacagccctggcctctctctacgggaccaagttcaactatggcagcatcatcaaggcaatttatcaagccagtggacgcactattgactggacctacagccagggcatcaagtactccttcaccttcgagctccgggacactgggcgctatggcttcctcctgccagcctcccagatcatccccacagccaaggagacgtggctggcgcttctgaccatcatggagcacaccctgaatcacccctactgagctgacc

SEQ ID NO: 54912 - DNA, 278 bp, Zea mays
tccgtctctaaccctacagcgacgacgagagcgaggccatgaaggggaagaagccggtcaaggagctcaagctcaccgtgccggcgcaggataccccggtagacaagttcctgacggcaagtggacacgtacaaggatggtgagctgaggctcaatcagagcggcttgcggcttatctctgaggaaaacagggatgaagatgaatctacagagctgaaggtggaagatgtgcagttatcaatggatgatcttgagcagattctagtcattggcaaagg

SEQ ID NO: 54913 - DNA, 273 bp, Zea mays
ctttttattgtcactgaactactgcgagcaaatctatacgagtatcagaaatataatcaagaatctggtggtgaggtgtattttactttgcctaggatacaggttatagctcggcaatgtttggaggccttggtttacttgcaccgtctgaggatcattcattgtgacctaaagccagaaaatattcttatcaagagctacagtagatgtgaaattaaagtcattgatctgggaagtagttgcttcttgacagacaacttatgtctctatgtc

SEQ ID NO: 54914 - DNA, 274 bp, Zea mays
ggagatttgggttctcagggaatgggaattcctgtaggcaaacttgctctatacactgctcttggaggagttcgtccatcagcttgttagcctatcacaatcgatgttggcacaaataatgagaaactacctaatgatgagttttacattggactccggcaaaaacgtgcaactggcgaggagtatcatgagcttatggaagagttcatggctgctgttaagcaaatctacggcgagaaagtcctcattcagtttgaggacttcgcgaatcata

SEQ ID NO: 54915 - DNA, 277 bp, Zea mays
cctgcatctccatccacagctactcccagctcctcatgtatccctatggctacaaaacagaaccagtccctgaccaggatgagctggatcagctttccaaggctgctgtgacaggtcccgactctctctacgggaccaagttcaactatggcagcatcatcaaggcaatttatcaagccagtggaagcactattgactggacctacagccagggcatcaagtactccttcaccttcgagctccgggacactgggcgctatggcttcctgctgccagc

SEQ ID NO: 54916 - DNA, 272 bp, Zea mays
gtcgacacattcctcttcacctcggagtctgtgaacgagggacaccctgacaagctctgtgaccaggtctcagatgccgttcttgacgcttgccttgctgaggaccctgacagcaaggttgcttgtgagacctgcaccaagaccaacatggtcatggtctttggtgagatcaccaccaaggccattgttgactacgagaagattgtcagggagacctgccgcaacattggttttgtgtcaaacgatgttgggcttgacgccgaccactgcaa

SEQ ID NO: 54917 - DNA, 276 bp, Zea mays
ccaacagagattgttgatttgcctcttaagcaagagattcattgcagctcagcatggctcagaccagctcatacttcatgctgatctcctgcctgatgtttctgtctcagagccacggccaagaggctcagacagagttgccccaggcccggatcagctgcccagaaggcaccaatgcctatcgctcctactgctactactttaatgaagaccgtgagacctgggttgatgcagatctctattgccagaacatgaattcgggcaacctggtgtctg

SEQ ID NO: 54918 - DNA, 276 bp, Zea mays
caaagaaagataccatgtcatatgggtcacaagatgacgaggaatctagaaaaatcagcatctcatatcggtctaatggtgagaacgactcaagaacgtccaccacatcatatgggtcccaaggtaaggagatcctaagaaaggtcaccacgtcatgtgataggtaccacagttgtgaagatgatgcgcggaaggccaccgcatcacatagagctgaaggtaagcaggacatgaagaagatcagcatatcatatggatctcatcgaagtggggagc

SEQ ID NO: 54919 - DNA, 273 bp, Zea mays
tcgatgttaatgcaggcctggttcttgctccacccgtgagcttgcacagcaaattgagaaagttatgcgcgcacttggtgactaccctggtgttaaagtccatgcatgcgttggaggaacatctgttcgtgaggaccacaggattctcgccagtggtgtgcatgttgttgttggtacacctggtcgtgtgtttgacatgctgcgtagacagtccctccgccctgataacatcaagatgtttgttcttgatgaagctgatgaaatgctttctcg

SEQ ID NO: 54920 - DNA, 268 bp, Zea mays
tgatcaagaacaatgcctccactgactatgacctatctgacaagagcatcaaccctctgggtggctttgtccactatggtgaagtgaccaatgactttgtcatgctgaaaggctgtgtggtgggaaccaagaagcgggtgctcaccctccgcaagtccttgctggtgcagacgaagcggcgggctctggagaagattgaccttaagttcattgacaccacctccaagtttggccatggccgcttccagaccatggaggagaagaaagc

SEQ ID NO: 54921 - DNA, 269 bp, Zea mays
acgcaacgctgccgtcaaggaccattcaaattaccaaaactgggatgtacaatatgtactttatacattgtgatccttcacttgctagtttggaaatcgaggggaaaaccatatggaaaaatcctactgggtatcttccaggtcggatggcgcctcttaagaacttttttggactgatgtcttttgcatttgttgtgcttgggatctactggttttatcagtacatgaaatcttggaaagaggttcttccacttcagaactgtattact

SEQ ID NO: 54922 - DNA, 264 bp, Zea mays
gacggaacatctggaacattagacaggatgatgatcttctggacaatcacacttttcctgctgagagcagccaaaggaaaagaagtatgctatgaggacctcgggtgcttttctgacactgagccatgaggcgggacagcaatcaggcccctgaaaattctcccctggagccctgagaagataggcacccgcttcctgctgtacaccaatgaaaacccaaacaactttcaaattctcctcctctctgatccatcaacaattgag

SEQ ID NO: 54923 - DNA, 196 bp, Zea mays
aagacccctgacaagctgcagcaggcagccctgtccctcctgtccaatgccgtatgcaagaagtcctggggcaggaggatcaccgacgtgatgatctgtgccggggccagtggcgtctcctcctgcatgggcgactctggcggaactgtggtctgccaaaatgatggagcctggaccctggtgggcgttgtgtcct

SEQ ID NO: 54924 - DNA, 282 bp, Zea mays
cctcactgtcagaatccataagggggcctcttacgaggtaatcaagacatgtactcaaagctgcttctgagggcccactcaagggtattatgggctacgtggaggatgatctggattccatcgagttcaccggtgacatcaggtcgagcatcttcgacgccaatgccgggattgccctgaacgaccacttcatcaagctcgtctcttggtacgacaacgagtggggctacagcaatcgcgtcgtcgacctgatccgccacatgttcaatactcagtagagag

SEQ ID NO: 54925 - DNA, 290 bp, Zea mays
ccctcgttcctctagccgtctcgcgcaccacagcctccatttctcctccgacggcggtgcggctagctcaaccatggcggactccaaggccacctcggcggtcaccctccgcactcgcaagttcatgaccaaccgcctgctggcccgcaaacaatttgtgcttgaggttatccaccccggccgcgccaccgtctccaaggcggagttgaaggagaggcttgccaagatgtacgaggtgaaggacccaacaccacttcgtcttcaagtccgcacccattcggtggaggcaa

SEQ ID NO: 54926 - DNA, 272 bp, Zea mays
gccaacagagattgttgatttgcctcttaagcaagagattcattgcagctcagcatggctcagaccagctcatacttcatgctgatctcctgcctgatgtttctgtctcagagccaaggccaagatgcgcagacagagttgccccaggcccggatcagctgcccagaaggcaccaatgcctatcgctcctactgctactactttaatgaagaccgtgagacctgggttgatgcagatctctattgccagaacatgaattcgggcaacctggt

SEQ ID NO: 54927 - DNA, 236 bp, Zea mays
gaagtacaatttgaactgctagatgcgagttgattctgctggagttcgagcattaaacattgcagaagggataactgatgtaaacaagaacttcagtttgtttggtttgatgaatataactcgtcgtgttgggatgggaaaaagattggtgaacagatggatgaaagaacctctattagatgttaatgagattaataagcgactagagatggttcaggcttttgtagaagatccag

SEQ ID NO: 54928 - DNA, 317 bp, Zea mays
  unsure (1)..(317): unsure at all n locations
gctgcagcgtacgcagcgcacgataccgctcgatccccgtcgagctacaggaagactctgaaccatgacatcatgttactcaagctctcctcacgtgcagtaatcaacgcccgcgtgtccaccatctctctgcccaccgcccctccagccactggcacgaaggctnccatctctggctggggcaacactgcgagctctggcgccgactacccagacgagctgcagtgcctggacgctcctgtgctgagccacgctaagtgtgaagcctcctaccctggaaagattaccagcaacatgttctgtgtgggcttccttga

SEQ ID NO: 54929 - DNA, 270 bp, Zea mays
tactgcagccatttgctactactccgcgcccaaaaccaagcccaagctctatagcctcgacgaggtcgacccggagctgctcaagaccttcgaccgcctcggtatcccgctcaccgagcagaagcgcctctccaacgtcgccgttgacgccgtcatcgactccacctccatcgccatcagccatcgcgaagcctcatggccaaaggcgtcatcttctgctccatctccgaggccatccgcgagtacccggaccttatcaggcgttacctg

SEQ ID NO: 54930 - DNA, 255 bp, Zea mays
ctggcacgaatcttcaatctctggctggggcaacactgcgagctatggcgccgactacccagacgagctgcagtgcctggatgctcctgtgctgagccaggctaagtgtgaagcctcctaccctggagatattaccagcaacatgttctgtgtgggcttccttgagggaggcaaggattcatgtcagggtgattctcgtggccctgtggtctgcaatggacagctccaaggagttgtctcctggggtgatggctg

SEQ ID NO: 54931 - DNA, 261 bp, Zea mays
cggctcctcctggggctgcggcattcctgccatcaaaccggcactgagcttcagccagaggattgtcaaccgggagaatgcagtgttgggctcctggccctggcaggtgtccctgcaggacagcagcggcttccacttctgcggtggttctctcatcagccagtcctggctggtcactgctgcccactgcaatgtcagccctggccgccattttgaagtcctgggcgagtatgaccgatcatcaaacgcagagcgcttgca

SEQ ID NO: 54932 - DNA, 266 bp, Zea mays
ggtttttgattttagccgccgccgctgctcatctcacatccctcgagaagacgcctgctcctcgccgatcgatacgatggccgtcttctccgacctccacaccgccgacggcctcaagtccctcgaggctcacctcgccggcaaaacctatgtgtctggtgactccattactaaggatgacattaaggtcttcgccgcggtgccgtcgaagcctggcgctgagtttcctaatgccgcccgctggtacgagaccgtctctgcggctg

SEQ ID NO: 54933 - DNA, 262 bp, Zea mays
ctctggctcctctcctgcttctcccttgtgggggccgcctttggctgccgggtccccgccatccaccctgtgctcagcggcctgtccaggatcgtgaatggggaggacgccgtccccggctcctggccctggcaggtgtccctgcaggacaaaaccggcttccacttctgcgggggctccctcatcagcgaggactgggtggtcaccgctgcccactgcggggtcaggacctccgacgtggtcgtggctggggagtttgacc

SEQ ID NO: 54934 - DNA, 261 bp, Zea mays
tgctccggctgctcagttccctcctccttgtggccgttgcctcaggctatggcccaccttcctctcactcttccagccgcgttgtccatggtgaggatgcggtcccctacagctggccctggcaggtttccctgcagtatgagaaaagtggaagcttctaccacacgtgtggcggtagctcatcgcccccgattgggttgtgactgccggccactgcatctcgagggatctgacctaccaggtggtgttgggtgagtacaa

SEQ ID NO: 54935 - DNA, 270 bp, Zea mays
cactattgctattttctatggatcgttagctgccataccatttggtacgatggtggttgttttcatcctgtgggccttcatctctttccctcttgcacttttgggaactgttgtcggtagaaattggagtggtgctccaaacaatccctgtagggtgaagactattcctcgccctattcctgagaagaaatggtacctcacaccatctgtcattgcgcttatgggaggactgcttccttttggtagtatctttattgagatgtactttgt

SEQ ID NO: 54936 - DNA, 277 bp, Zea mays
tgcggtacctgctgtagtcacgagggacgggcggcggcctggtcggcagagagtagcctgcaacattcggccgtggttacgatgagtttacccctcaatcccaaacctttcctcaatggactaacaggaaagccagtgatggtgaaacttaagtggggaatggagtacaagggctatctggtatctgtagatggctacatgaacatgcagcttgcaaatacagaagaatacatagatggagctttgtctggacatctgggtgaagttttaataaggt

SEQ ID NO: 54937 - DNA, 267 bp, Zea mays
  unsure (1)..(267): unsure at all n locations
atccgcaggacggntcactcggcacgcaggctagcagcacagcagcagccagagccatcccctctcctcgctacgcttcgcttcctcggcgccgattcctcctcctcctcctccaccctcgtccgtccccttacggcgcacgagctcgcccgagatggcgaacgcgagatcgggtgtcgctgtgaacgatgagtgcatgctgaagtttggcgagctggcagtcgaagaggctgcaccgcttcataactttcaagatggacgacaagt

SEQ ID NO: 54938 - DNA, 267 bp, Zea mays
ccggaaggaaaggcgcggagcaagatgtcgtggcaggcgtacgtcgatgagcacctgatgtgcgagatcgaaggacaacatctcagcgccgccgccatcgtcggtcacgacggcagcgcttgggcgcagtccgagagcttccccgagttaaagcctgaggaggttactggtatcataaaggactttgatgaacctggtactcttgcaccaactggtcttttcgttggaggtacaaagtacatggtgatccaaggtgaacctggagtt

SEQ ID NO: 54939 - DNA, 185 bp, Zea mays
ccgccatccaccctgtgctcagcggcctgtccaggatcgtgaatggcgaagacgccgtccccggatcctggctctggcaggtgtccctgcaggacaaaaccggcttccacttctgcgggggctccctcatcagcgaagactgggtggtcaccgctgtccactgccgggtcaggatctccgacgtg

SEQ ID NO: 54940 - DNA, 246 bp, Zea mays
tggctattggaactggtaaagttgccaccccagctcaggctcaggaagtgcacgcctccctgagggattggctaaagaccaatgccagccctgaggttgctgaatctactaggatcatctacggaggctctgtaactgctgcgaactgcaaagagctagcagcacagcctgatgtcgatggttttcttgtcggtggagcttctttgaagcctgagttcatcgacatcatcaacgcggccaccgtga

SEQ ID NO: 54941 - DNA, 249 bp, Zea mays
tcgacattcagatcccaactgccttcgatcccttcgctgaggccaatgctggcggatctggtgcggcacagggtcaaaggactacgttcacgtgcgcatccagcagcgtaatggtcgcaagagcctgactaccgtccagggattgaagaatgagttcagctacagcaagatcctcaaagatctcaagagagagttctgctgcaatggtacagtggtccaggacccaggactttgacacgtcattcagct

SEQ ID NO: 54942 - DNA, 261 bp, Zea mays
gcgctgtgagacaaaaacaaaggacaatgtttttgtgaatgtggtggcatctattcagtaccgcgctctggctgacaaagcaagtgacgctttctacaaactgaccaacacaaggtcccagatccaagcctacgtctttgacgtgatcagagcaagcgttcccaagctccatttggacgatgctttcgagcagaaggacgagatcgcaagggcggtggacgaagagcttgagaaggccatgtcggcttatggctttgagat

SEQ ID NO: 54943 - DNA, 264 bp, Zea mays
cagagtttttaatgctaaagcaattgggtgacatacttggtttaactcgcaaagaagctcaagatgttcacattaagtttgcagagaaagcttttgtgcaacaggcggaagtaattcttgctgatgggaaattaacagaggctaaggctgaccagcttgctaagattcaaaagcaggtcggtttgcctactgaacatgcacagaaaatcattaagggtattacaactacaaagttatcttctgcaattgaagcctctgttgctc

SEQ ID NO: 54944 - DNA, 264 bp, Zea mays
gccaacaatgattgttgatttgcctcttaagcaagagattcattgcagctcagcatggctcagaccagctcatacttcatgctgatctcctgcctgatgtttctgtctcagagccaaggccaagaggcccagacagagttgccccaggcccgatatcagctgcccagaaggcaccaatgcctatcgttcctactgctactactttaatgaagaccgtgagacctgggttgatgcagatctctattgccagaacatgaattcggg

SEQ ID NO: 54945 - DNA, 141 bp, Zea mays
gtcggacgggcgcggagacgcttctggaaggaacgccgcgatggctgcgcagggagagccccaggtccagttcaaacttgtattggttggtgatggtggtactggaaaaacgaccttcgtgaaacgtcatttgactggtga

SEQ ID NO: 54946 - DNA, 263 bp, Zea mays
aagccatggagcacaaggaggctgggtgccaggcccccgagggacccatcctctgcatcaataactgtggcttcttcggcagcgcggcgaccatgaacatgtgctccaagtgccacaaggagatgataacgaagcaggatcaggccaagctggctgcctcctctatcgacagcatcgtgaacggcagcgacgccgtcatggagccggttgttgctggcagcaacacggtagtagctgttgctcaagttgagttgcaaacaatg

SEQ ID NO: 54947 - DNA, 259 bp, Zea mays
caccaggtgcactcacctgctcctgcctataagtgtgccccatcccatcccgatggtcagccagtcctgagcacctaaccatgctgggcatcactgtcctcgctgcgctcttggcctgtgcctccagctgtggggtgcccagcttcccgctcaacctatccgcccgagtggtgggaggagaggatgcacggccccacagctggccctggcagatctccctccagtacctcaagaacgacacgtggaggcatacgtgtgg

SEQ ID NO: 54948 - DNA, 262 bp, Zea mays
gccaacagagattgttgatttgcctcttaagcaagagattcattgcagctcagcatggctcagaccagctcatacttcatgctgatctcctgcctgatgtttctgtctcagagccaaggccaagaggcccagacagagttgccccaggcccggatcagctgcccagaaggcaccaatgcctatcgctcctactgctactactttaatgaagaccgtgagacctgggttgatgcagatctctattgccagaacatgaattcgg

SEQ ID NO: 54949 - DNA, 259 bp, Zea mays
gttgtgtaatgctgactatgcatttcactgtgcaattggtgtcacaacatctcttctattggaaaaaccccaaggagcagaaagccatacttattattgtgctgatggctccactatacgctatctcttccttcgtgggtcttcttgatatccagggtagcaagacatttttcacattcttagatgctgttaaagaatgctatgaggcactggtgattgctaagtttatggcattgatgtacagctacttgaatatatc

SEQ ID NO: 54950 - DNA, 260 bp, Zea mays
gagattcatctctgtgattctcttaatgaacagtgccagccttcttgctcaagaagtcaagtccgcagtgaagtaccggccatcgatctagcccgggttctagatttggggcccatcactcggagaggtgcacagtctcccggtgtcatgaatggaacccctagcactgcagggttcctggtggcctggcctatggtcctcctgactgtcctcctggcttggctgttctgagagctccgctgagcatctggccttgaagt

SEQ ID NO: 54951 - DNA, 259 bp, Zea mays
cttgactacatggatgttgaggctctcaagaaaatgaacaagaacaagaagcttgttaagaggcttgccaagaagtaccatgctttcttggcatcagaggccatcatcaagcagattccccgtctccttggtcctggtctcaacaaggcaggcaagttcccgaccctggttactcaccaggaatccctcgagtccaaggtgaacgagactaaggcaaccgtcaagttccagctcaagaaggtcctttgcatgggtgtcg

SEQ ID NO: 54952 - DNA, 227 bp, Zea mays
gagcggccatcagggacgtccaggaagcatgcgtctatgatggctacgtcctcccgaagctgtacgccaaggtgcaccactgcgtctcgtgcgcgatccacgctcacatcgtccgcgtccgatcccgtgacaagcgcagggaccgcaagccgccggagcgcttcaggcgcagggaggataggcctgctggtggacaaggaggccccgccctggtcctggtgctgctg

SEQ ID NO: 54953 - DNA, 256 bp, Zea mays
  unsure (1)..(256): unsure at all n locations
catgaatccactcctgatccctacctttgtggcagctgctcttgctgccccctttgatgatgatgacaagatcgttgggggctacaactgtgaggagaattctgtcccctaccaggtgtccctgaattctggctaccacttctgtggtggctccctcatcaacgaacagtgggtggtatcagcaggccactgctaccagtcnctcatccaggtgagactgggagagcacaacatcgaagtcctggaggggaatgag

SEQ ID NO: 54954 - DNA, 259 bp, Zea mays
cctcactgtcagaatcgagaagggggcctcttacgaggaaatcaagaaagctattaaggctgcttctgagggcccactcaagggtattatgggctacgtggaggaggatctggtttccaccgacttcaccggtgacagcaggtcgagcatcttcgacgccaaggccgggattgccctgaacgaccacttcatcaagctcgtctcttggtacgacaacgagtggggctacagcaaccgcgtcgtcgacctgatccgccaa

SEQ ID NO: 54955 - DNA, 248 bp, Zea mays
tcgcccccgattgggttgtgactgccggccactgcatctcgagggatctgacctaccaggtggtgttgggtgagtacaaccttgctgtgaaggagggcatcgagcaggtgatccccatcaactctgaggagctgtttgtgcatccactctggaaccgctcgtgtgtggcctgtggcaatgacatcgtctgcatcaagctctcacgcagcgcccagctgggagatgccgtccagctcgcctcactccct

SEQ ID NO: 54956 - DNA, 260 bp, Zea mays
cttggagagggtgtgactgacgtagctccgggcgaccatgtccttcctgtgttcactggggagtgcaaggagtgtgcccactgcaagtcggcagagagcaacatgtgtgatctgctcaggatcaacaccgaccgcggtgtgatgattgccgatggcaagtcgcggttttcaatcaatgggaagcctatctaccactttgttgggacttccaccttcagcgagtacaccgtcatgcatgtgggttgtgttgcaaagatcaa

SEQ ID NO: 54957 - DNA, 258 bp, Zea mays
gggacttgatggtcaggtggctgtcagtgcatgctcacacgtgggaggtcataagtatgcaggaaatgtcatcattttcagttctgatgccaagggagaagtgatgggtcattggtatggttatgttgtccccgacgatgtgcctgttttgctgcataaacatattggacaaggagaagttgtggaccgtctatggaggggacagatgggtttatctgaggagcagcagaagcaagctctcgagcttcggagcatgac

SEQ ID NO: 54958 - DNA, 254 bp, Zea mays
caggtgttaaccagtctgataataagcggcagtatgagcttgatgttgaccgcataatgcggggggaagactcacgaactacactgatgataaagaatatcccaaataagtatacctccaagatgctcttggctgctattgatgaaagtcataagggcacttatgattttatttacttgccaattgattttaagaataaatgtaatgtcggctatgctttcatcaacatgaccaatcctcagcatatcattccg

SEQ ID NO: 54959 - DNA, 251 bp, Zea mays
gtggtagagttagcagctgggcatgcattaacttctcaacttcatagcaagatggtgctgccgggagtttctgtcatgaattggctttgacgtgccgagtatcaggaatggattttgtacttgaacctgtgctgtcaccttgctatgcaaggcctgaacttgttgaaagagcactaaagggacgctatcaagatgcgatgaacatactcgggcctcagggccgagaactcgacttgctgattgttatactg

SEQ ID NO: 54960 - DNA, 257 bp, Zea mays
gtttacaaatccgggaccgtcggaaggttgctcgacatcactagattcagcagctacgacgagctccgtagcgaggtggggcgtctgtttggcctcgagggccagctggaagaccctttgagatcaggctggcagcttgtatttgttgacagggaggacgatgtccttctggttggcgatgacccatggcaggaattcgtgaacagtgtgtcctgtataaagatactttcaccggaggaggtccagcggatgggcaa

SEQ ID NO: 54961 - DNA, 253 bp, Zea mays
caagacccggtccaaggtatctggaagcctctgtgttggtgcggacctaaccggaactgggatgcaggttttggaggacctggagccagcagcaacccttgctctgattcataccacggacccagtgccaaccctgaagttgaagtgaaatccatagtggacttcatcaagagtcatggaaaagtcaaggccttcattaccctccacagctattcccagctgctgatgttcccctatgggtacaaatgtacca

SEQ ID NO: 54962 - DNA, 248 bp, Zea mays
aggtgaaccatgccaatgaacgcgctggtgggatacgcgggggtggtggattcggatctagtggtggttatggtggtggaggtggatatcctactggtgggtatggcggtggtggatatcgttctggtggtggttatagttctgggggttatgctgccaatggttacggtgttggatctggcagtggcaactacagcaatgcatcaggtggtggatattcaggcagtgatggttacggcaatggagct

SEQ ID NO: 54963 - DNA, 252 bp, Zea mays
  unsure (1)..(252): unsure at all n locations
ggccttccgggaagggaaggtggccagcctgatcggcgtggagggcggccactccattgacagcagtatgggcgtcctgcgggcactctatcagctgggcatgcggtacctgaccctcacccacagctgcaacacgccctgggctgacaactggctggtggacacgggagacagcgagccccagagccaaggcttgtcaccctttgggcagcgtgtggtgaaggagctgaaccgtctgngggtcctcatcga

SEQ ID NO: 54964 - DNA, 253 bp, Zea mays
cagactcgtctgctgcagctcctcctccgccgccgtatcaaacgcactctcctccgccgccgcccgaggcaagatggttctccagaacgacatcgaccttctgaacccgccggcagagctcgagaaactcaagcacaagaagaagcgcctcgtccaatcccccaactccttcttcatggatgtcaagtgccagggatgcttcagcataaccacggttttcagccactcccagactgttgttgtgtgcccaggc

SEQ ID NO: 54965 - DNA, 253 bp, Zea mays
tgaatccagtcctgatccttacctttgtggcagctgctcttgctgccccctttgatggtgatgacaagatcgttgggggctacaactgtgaggagaattctgtcccctaccaggtgtccctgaattctggctaccacttctgtggtggctccctcatcaacgaacagtgggtggtatcagcaggtcactgctactagtcccgcatccaggtgatacttggagagcacaacatcgaagtcctggaggggaatga

SEQ ID NO: 54966 - DNA, 254 bp, Zea mays
cttctcgctgcgggctgttgccttgcctccgtcccctcccctcgtcgcctccgactccacctcccctccccggtctctgagagagggagcccggacccggagaccgccagcaagcgcgaggcagaggaggagcatggcggccccgccgtcgaggtcgcggggcgactacgaccacctgattaagctcctgctcatcggcgacacggagttggaaagagttgcttgctgctgcggttctctgatgacacattcac

SEQ ID NO: 54967 - DNA, 249 bp, Zea mays
ttcacaagctgttggaatcccttcagttgctcaaatattcaaagttcacagtgaagccttctttcgggataattggagtagcgtcttcagggatctgtcctccatgcgacgattagttgttgccacggaggtgttctgtcatccgaccagttaactggacatatatgaagatgggcctatccgtttggttagatgtgcccttagatgctcttgctaggcgtattactaaagtgggaccgcttctcgtcc

SEQ ID NO: 54968 - DNA, 279 bp, Zea mays
aataggaccgagcaaatgatatcttcaagaaaattgaagatctcaagtctattaggggaagaaatcaagatgccatattagccgcatgtctatatattgcttgtagacaagaagatcgagcttagaactgtgaaagaaatatgttcggttgctaatggggccacgaagaaagaaattggcagagccaaagaatttatagtgaaacaactggaagttgagatggggcaatctatggagatgggaaccttcatgctggagattttctgaggcgtgctgttc

SEQ ID NO: 54969 - DNA, 295 bp, Zea mays
atccgaattcccaggcaggcaggtcggcgaggagggcaggaagaccgaagaccgagcagtgcggaggctcgggacgggaacgggacaggacctcaaaatctcagatccttcctgcccgcccgcccgtgcccgtcgacgcgtcgttcttgccggccgcgccccacctccgccctctccacctccagggggatcggatacgccacaggctgcgcgatggtgctgtgggtcttcggctacggctccctcatctggaaccccggcttcgacttcgacgacaaaatcctcggcttcatca

SEQ ID NO: 54970 - DNA, 299 bp, Zea mays
tgaggacaggcctgactcctcgttgggctgatcttgatataaaccagcatgtcaataatgttaaatacattgcgtggattcttgagagtgcaccgattactatttttgagaatcatgagctggccagcattgtgctggattacaaaagggagtgtgtccgcgatagtgtgctgcagtcacacacctctgtccatgaggattgcaacattgagtctggagaaacaaccttgcactgtgagcatgtgctgagccttgaatcaggtccgaccatagtgaaggcccggaccatgtggaggcct

SEQ ID NO: 54971 - DNA, 289 bp, Zea mays
accgctttcccgttccccaccccgaccgactgctccccctcccccgcaccagcctcaagccctcaaggcctcaaggcatcgccggcgccgcaacttcgctgaggaagcccgctgccctgcccggatccgatggccaacagcaacctcccgcggcggatcatcaaggagactcagcggctgctcagcgagccagcaccggggatcagcgcgtcgccctcggaggagaacatgcgctacttcaacgttatgatcctgggccggcgcagtcgccctatgaaggtggagtttt

SEQ ID NO: 54972 - DNA, 287 bp, Zea mays
ataaccctagcgccggcgcctccacttcgttttcctcactctctcctccagctcagggtccggcggcgaagggaaggcaagatgtacaccgcgaggaagaagatccagaaggagaagggtcttgagccctccgagttcgaggactccgttgcccaggctttctttgatctggagaacgggaaccaggagctcaagagcgacctcaaggacctgtacatcaacaatgctatccagatggatgttaccaggagtaggaaggctgttgtcaatcacgtcccataccgcct

SEQ ID NO: 54973 - DNA, 293 bp, Zea mays
accgtatcaaggtgcacgagctccgggggaagagcaagacggacctgcaggcgcagtcaaggagctgaagtctgaagtcaccctcctccgcgtaaccaaggtcaccggcggcgcacccaacaagctctccaagatcaaggtggtgcgcacctctatcgcgcgcgtgctcacagtgatctcgcagaagcagaagtcggcgttgctggatgcgtacaagaagaagatcctgctccccatcgacctccgtactaagaagacccgtgccatccgccgccgtctgtacaagcaccagc

SEQ ID NO: 54974 - DNA, 295 bp, Zea mays
cgcccttcgtgccgcccatcgtggtggagatcgcgtacctgcgcaccaggtccaccagcgcgcccaggtcgaacttgcgcatgatcacgatggtggagcccgcgcgcaggccggccagcagcaccgagttcagcgagtagatgtggaacagcggcagcaggcacagcaccacgcggctcgagcgaaccgctgcggcacggtcccgcttctggtttgcttgcctgttgccccccagatcttgccaactaattggaggcagccgagctgatctcccaatccgcaacgagccgtctcg

SEQ ID NO: 54975 - DNA, 300 bp, Zea mays
atggaaatgatattgatgaatctgcagaacgcattagcgataaacgaattatcgagtggaagctgacattgcatcgcattgggcttgacgttttacgaactgatcggaccatggtagtttatgagaacaaagtggatcttgccaaattatgggatattctagccgtgtatgcatggattgacaaagatgttggttactcgccaaggagatgagtgatttatgctcaccaatgatagttccactagaggatgaagcagatgccatttggtgctttgagaaattgatgcgtagattgcgagg

SEQ ID NO: 54976 - DNA, 295 bp, Zea mays
accgccgccgctgcagtgtccatagccaccgcaggagactgagatggggggttttgtcaagacccacaagaccaatgcgtacttcaagcgtttccaggtgaagttcaagagaaggcgcgctggcaagacagactacagggccaggataaggctgattaaccaagacaaaaacaagtacaatacacccaaatacagatttgttgtgcgatttaccaacaaggacatcacagcacaaatcatctctgctagtatagcaggtgatatggttcttgcttctgcttactcgcatgagttg

SEQ ID NO: 54977 - DNA, 286 bp, Zea mays
gacccgagagtttcaaggagttccacgccaacaacatccgggagcccttccgcgtcgttctccagatgggcgtcgtgctcatgttcggtggccagatgccggtcgtcaaggtggggaggatggctggccagttcgccaagccaaggtctgagccgttcgaggagaaggacggagttaagctgccgagctacaggggcgacaacgtcaacggcgacgacttcaccgagaagagccgcgtgccggacccgcagaggatgatccgcgcctacagcacatcggtggcgac

SEQ ID NO: 54978 - DNA, 287 bp, Zea mays
gcagccgctgcttttcgttcgtcttcatcctacgcgagggcgaaacccagaaaccctctccctcctgtactccggccgacacatccaggggcgatgacgctgggtagctccggcgccggatcgagcgtcgtcgttcctcgaaacttcaggctattagaggagctcgagcgtggagagaagggcattggtgatgggacagtgagctatggaatggatgatgctgatgacatctacatgcggtcataggatggtaccatcattggccctcacaatactgtacatgaggg

SEQ ID NO: 54979 - DNA, 289 bp, Zea mays
agcgcctctacatttcttctctctctgctcctccgcctccgcctccgcctgatccatccaagacagggatcgacatgtcggactcggaggagcaccacttcgaatcgaaggccgacgctggggcgtccaagacctacccgcagcaggctggcaccgtccgtaagaacggcttcatcgtcatcaagaaccgtccctgcaaggttgtggaggtttctaccatccaagaccggtaagcatggccaagtcagatacgcatttgtcgccatagacatcttcaatgggaaaaagc

SEQ ID NO: 54980 - DNA, 279 bp, Zea mays
actgaatcagaggtcttctacctcaagatgaagggtgactatcacaggtatcttgcggaatttcagactggtcctgagaggaaggaatctgctgagagcacgatgatggcctacaaggctgctcaggacattgcgctggctgagctggcacctacccatccgataaggcttgggcttgctcttaacttctcagtgttctattatgagattctgaactccccagacaaagcttgcaaccttgcaaagcaggcgtttgatgaagctatctcccagttagac

SEQ ID NO: 54981 - DNA, 289 bp, Zea mays
atcactacctaggtggtgaaaactatgtgttctggggtggaagagagggttacaaactcttctgaatactgatatgaagagagaacttgaccatctggctaactttcatcaagctgctgttgactacaagaagaagattggattcaacggaacactattgatagagcctaaaccacaggaaccaacaaaacaccagtatgactgggatgttgcgactacgtttgcttttctacagaagtacggtcttacaggagagttcaagattaatgttgagtgcaaccatgctact

SEQ ID NO: 54982 - DNA, 292 bp, Zea mays
gccggctgagctgccggttcgcggcaatgatgtagggctccacgcagcagtgcgtgcgcaccagtggctcaccagctggtggtaacccgtgtaccgcctcctgcacccgcacttccgctacaccatggagatcaacgcgctggccagggaggcgctcatcaacgccgacggcatcatcgaggagtccttctggccgggcaggtacgccgtcgagctcagctcagcggcatacggcgccacgtggcagttcgacacggaggcgctgcccaacgacctcgtcaagcgtgggctc

SEQ ID NO: 54983 - DNA, 218 bp, Zea mays
atacctgatccagttggttgctacaaggagatatatcgtgtgttgaagcctggccagtgctttgccgtgtacgagtggtgcattacggatcactatgatcctaacaatgcaacccacaaaaggatcaaggatgaaattgagcttggcaatggcctgccagatatcagaagcactcggcaatgtctccaggcagtaaaagacgccgggtttgaggttgt

SEQ ID NO: 54984 - DNA, 275 bp, Zea mays
attgacccacgacttaggtaccggtggaaatccaaatttgggagagcaggctgctgatgaatcaagatgaaccatagccactgccctgagggattcagatcttgttttcataacagctggtatgggagagggcgctgctccaagtgttgcccagatatcaaaggaagctggttatcttactgttggtgttgtcacctatccattcaatttcgagggccgtaagcgctctttacaggtagcatattgcgaggtgaggcatcgtcgctcccatgtgc

SEQ ID NO: 54985 - DNA, 285 bp, Zea mays
cgccctccttcaacgggtatgacggctcaaccgcgataccgcacttgccgctggacgccttgatgttgcgctccatcctcacgtacccggccccggcgcccgccgtgtgcgacaactactactcgtgccctgacagcaccacctgctgctgcatctacgagtacggcaagtactgcttcgcctggggctgctgcccgctcgagggcgccacctgctgcgacgatcactacagctgctgcacccatgactaccccatctgcaacgtcaggcaggggacctgcctca

SEQ ID NO: 54986 - DNA, 277 bp, Zea mays
ggcaaagagatcaatggtgctggtatcaatgctagctttgctgttcaccaggatgttgatggaagggcaacagatgtagctctagggtggtcagtagctttaggatctcctttcacatttgctactactctagagcaggagtaccggagtgacatttttggcgagcgaggtattttgcttggtgctgtccatggcatggtggaggctcttttcaggagatacacagaacaaggaatggacgaggactcagcatataagaatactgtagagagcatca

SEQ ID NO: 54987 - DNA, 249 bp, Zea mays
tatggatgatgaatatgtgataattggatccgctaacatcaaccagagatccatggaaggaactagagatacagagattgcaatggctgcataccaaccccagcatacatgggcaaatatgctttctgctcctcgtggacagaacaacatgggaagaagtgatgatgacagtccatcgccgccaagaggtcacatgagaagaactcgcagcccaagtacttgtggtagttatggagggcatggcaagcg

SEQ ID NO: 54988 - DNA, 285 bp, Zea mays
agaagatgatgagcaggaggcaaacaagaagaaggacggaggcctatccaataagaagaagaagctggaacgcaggatgaagattgcagacctcaaacagatatgcaacagacctgacgtcgtggaggtctgggatgcaactgctgcagatccaaaattgcttgtatatctcaaggcgtaccgaaatacagtacctgtccctaggcaatggtctcagaagcgcaagttcttgcaggggaagagaggtattgagaaacagcctttccagcttcctgacttcattgc

SEQ ID NO: 54989 - DNA, 280 bp, Zea mays
atcggtgtaatcggctggggctcgcagggtcctgcgcaagctcagaacttgagagactcacttgttgaggcaaagtcagatattgttgttaagattggtctccggaaaggttctaaatcttttgaagaagcccgagcagcaggattcaccgaagagagtgggacgctgggtgatatatgggagactgtatcaaacagtgatcttgttttgctactgatatctgattctgctcaggctgataactacgagaaaattttctcgcacatgaaaccaaacagta

SEQ ID NO: 54990 - DNA, 283 bp, Zea mays
atggtgatcagcaccaagaggcagcctgtgggacccaaacctggcttcatggtcgagggtgctacactcgagacagtcactcctattccttatgatgtggtcaacgatctcaagggcggttactagagagaattcttgtaccttcagcagttcaaacgagctggcaaacttatctgaatcttttttgataattggctagttcttctgttctggtgttatgaacccatgtggctattgctgttggcgtcaaaggatttttttattgccaaaaaaaaaaagaaaa

SEQ ID NO: 54991 - DNA, 282 bp, Zea mays
gcggcaaagctgttggacctgtattagatggtgatgcagttgtcactatcaacttccgggctgatcgcatggttatgcttgcgaaagcactagagtatgcagattttaacaactttgaccgtgtacgtgtccccaaaattcgatatgctgggatgcttcagtatgatggtgagttgaagcttccaaggcgctaccttgtttccccaccagagatagatagaacatctggggggtacttggtgaagaatggcatccgcacctttgcttgcagtgatgcagtga

SEQ ID NO: 54992 - DNA, 288 bp, Zea mays
aatttacgtatatgcccgtgtcccggttcctttccccatccacaactctgattattgcttgatccttgagagagagaggaagacgagagctagaagcgaaggagcaaagcagttcttcagctaggcaggagggcacaggaaggaggagatggcgtcaaagaggattcagaaggagctcaaggatctgcagaaggaccctcccacctcgtgcagtgcaggtcctgttggtgaagacatgttccactggcaggcaacaataatgggtccatctggatacccagattctgg

SEQ ID NO: 54993 - DNA, 284 bp, Zea mays
ctcgagccgaatcggctcgaggccacgcgcgccccggatcgaggggcggcacgcagacgcggcggagggaggatgagtctagtcgggcttggacggaaccagaagacattccgccccaagaagagcgctccatcaggcagcaagggagcacagctccgtaagcacatagatgccactctcggcagtggaaaccttagggaagctgtgaggttgcctcctggagaggatatcaaagagtggcttgctgtcaataccgtggatttctttaaccaagttaatatgct

SEQ ID NO: 54994 - DNA, 279 bp, Zea mays
ggacgtcaagggtggcctcgtcggcggctactacgacgctggcgacaacatcaagttccacttctcgatggccttctccatgacgctgctgagctggtcggtgatcgagtacagcgccaagtacaaggccatgggggagtatgaccatgtcagggagcagatagtcggtgccccacttgatgagctccctgacatggtcatactcccccatggccttgtcagggagctcatcaagtggggcaccgactatatgctactcaccttcaactcctctgcttc

SEQ ID NO: 54995 - DNA, 210 bp, Zea mays
cacttctctgggctgctttcctcgtgtgaagataattcatacatctgccaaagtacacgggcaaatatacatccctgagatcaattggattctgatgatactgtgcttagctgtaaccattggtttcaggaacacaaaacacttggggaatgcatcaggattggctgttataaccgtcatgctggtgacaacgtgtctgatgtccctggt

SEQ ID NO: 54996 - DNA, 283 bp, Zea mays
ggccgttcgagtacgggagaacgcatgtggtgaggcccaagggcacgcacaaggccaccattgtctggctccatggacttggggacaatggagccagctggtctcaactactggaaactcttccccttcctaatataaaatggatatgccccactgcaccttcaagacccgtgtcagtgtttggcgggttcccctccacagagtggtttgatgatgctcgatcttctgaggatgctcctgatgacattgagggaatcgatgcctcagcagcacatgttgcgaa

SEQ ID NO: 54997 - DNA, 147 bp, Zea mays
atccccaagcaaacaaacagggtagaggtagagggatagtagaggagaggagatgagatgagacgttgggtctgggacaccatggctccgatgaagttgtacggggcggtgatgtcgtggaacgtgacgaggtgcgcaacggcgctg

SEQ ID NO: 54998 - DNA, 280 bp, Zea mays
gcccgggcgtcctgatccaggtgtacgagggtgagcgcgcgaggaccaaggacaacaacctcctcggcaagttcgaactctccggcatccctcctgctccccgcggcgtgccccagatcacggttaccttcgacatcgatgccaacggcatcctcaacgtctctgccgaggacaagaccaccggccagaagaacaagatcacgatcaccaacgacaagggccggcttagcaaggaggagatcgagaagatggtgcaggaggctgagaagtacaaggcaga

SEQ ID NO: 54999 - DNA, 138 bp, Zea mays
cgagtccgccgcagccatccgcttcttctcttcggttcagctctcgaggatgaaggtaatagctgcctacctgcttgctgttctgggtggaaacacttccccgactgctgatgatgttaagagcattctggaatcagt

SEQ ID NO: 55000 - DNA, 279 bp, Zea mays
atgcctcccccacccgtccatcgcccctccctccggtctgctctcccacagcctcacccctgcgcccccgccgattcgcgtcgccctttgttggaaggaacgatggagcagaccttcatcatgatcaagcccgacggcgtccagcggggcctgatcggggacatcatcagtcgcttcgagaagaaagggttctactccaaggggatgaagttcatgaacgtggagaggtccttcgcgcacagcactacgctgacctttccgacaagctttcttccccgg

SEQ ID NO: 55001 - DNA, 284 bp, Zea mays
tggggcgtcaacgtgcagccctactcgggctcccccgccaacttcgccgcctacaccgcgctgctcaacccgcacgaccggatcatgtggctcgaccttccctccggcggacacctcactcacgggtactacacggccggcggtaagaagatctccgccacctcgatctactttgagagcctgccgtacaaggtgagcgccgcaacggggtacatcgactacgagaagctcgaggagaaggcacttgacttccgccccaagctcatcatctgcggtggcagtgc

SEQ ID NO: 55002 - DNA, 280 bp, Zea mays
ctcccttcgtgccgcccatcgtggtggagatcgcgtacctgcgcaccaggtccaccagcgcgcccaggtcgaacttgcgcatgatcacgatggtggagcccgcgcgcaggccggccagcagcaccgagttcagcgagtagatgaggaacagcggcagcaggcacagcaccacgcggctcgagcgaaccgctgcggcacgcgacccgcttctggtttgcttgcctgttgccccccagatcttgccaactattggaggcaccgactgatctcccatcccgca

SEQ ID NO: 55003 - DNA, 285 bp, Zea mays
gttttgtagaaggtgtctccgacgttctccatcaccacccacctgatgaccgtggtgatgctcgtcatatggaagaagcacatcgtctacgtcctcctcttctacgtggtgttcggcctcacggagatgatctacctctcgtccatcctagtccaagttcatccagggcggctacctccccttctgcttcgcgctggtcctcatgacgctgatggcgacgtggcactacgtccacgtgaagcggtactggtacgagctggaccacatcgtgcccaccaaccagat

SEQ ID NO: 55004 - DNA, 284 bp, Zea mays
tttgagaccaccaagtattactgcaccgtcattgatgcccctggacaccgtgacttcatcaagaacatgatcactggtacctcccagtctgactgtgctgtccttatcattgactccaccactggtggttttgaggctggtatctccaaggatggccagacccgtgagcatgctctccttgcgttcactcttggagtgaagcagatgatttgctgctgcaacaagatggatgcaacgactcccaaatactccaaggcgcgttatgatgagattgtgaaggaagt

SEQ ID NO: 55005 - DNA, 286 bp, Zea mays
atgaagatctcttttatgagcacaccctgtctctgaccgaagctctatgtgggttccaatttgttcttacacatctggacaacaggcagcttctgatcaaatcaaaccccggcgaagttgttaaacctgaccaattcaaggcgataaacgacgaggggatgcctatttaccagaggcccttcatgaaggggaagctctacattcatttcacagtggagttccccgactcgctggcgccagagaggcaagggtctctcgagtcggtacttccgccaaagccttcgtc

SEQ ID NO: 55006 - DNA, 288 bp, Zea mays
tcgatgaagctgtacggggcggtgatgtcgtggaacgtgacgaggtgcgcaacggcgctggaggaggctggctccgactacgagatcgtgcccatcaacttcgccaccgccgagcacaagagccccgagcacctcgtccgcaacccgtttggtcaggttccagctctgcaggatggtgacttgtacctcttcgaatcacgcgcaatctgcaagtacgctgctcgcaaaaacaagccagagccgttgagggaaggaaacctcgaggaggcagcaatggtggatgtttgg

SEQ ID NO: 55007 - DNA, 281 bp, Zea mays
tggcttctcctccccctcttaccaagtcctcctcgggttagggttccttagggttttgtggaggggcgatggcggcggctgatgtggagtaccgttgcttcgtcggcgggcttgcctgggtccaccagcaacgagtcgctggagaatgccttcgcctcctacggcgagatcctcgactccaatgtcatcaccgaccgggagacggggaggtctcgcggcttcggcttcgttaccttctcctccgagaactccatgctcgacgctatcgagaacatgaacgg

SEQ ID NO: 55008 - DNA, 282 bp, Zea mays
cacaatctttcgcgctcctaccggctaccgccgcggcttccttctctacccttccctcgcgccgccgccaccgcaagagtatctcaactccgcctcgagacctccccccctcgctggtctcagccatggtgaaatattcgacggagccgtccaaccccaccaagtccgctaaggccatgggccgtgacctacgtgttcacttcaagaacacacgtgagacagcttttgcccttaggaagttgtcactcaccaaggccaaaagttaccttgaggatgtgatcg

SEQ ID NO: 55009 - DNA, 281 bp, Zea mays
gcatctcggcgtaccacggcagcccgctggtggcgccgtgggcgtccatcgccaacacggccgtgggattcgtcatgttcatctacgtcatcgtgccgctctgctactggcagatcaacacgttcgacgcccgcaggttccccatcttctccaaccagctcttcacggcgtcgggcttgaagtacgacaccaccaaggtgctcaccaaggacttcgacctcaacgtcgccgcctacgacaactacgggaagctctaccttagcccgctcttcgtcatctcc

SEQ ID NO: 55010 - DNA, 282 bp, Zea mays
cccgcagccgccctagcacccgcgacgagcaggatctgcccagttgctcttgcggtagttcccccaactgtcaccatgcagaacgaggagggtaagactgtggacctctatgtccccaggaagtgctcggccacaaacaggatcatcactgccaaggaccatgcctctgtccagatcaacattggccacttgtgtgcgaatggcctgtatgatggtcacttcacaacgtttgctctctctgggtttgtccgtgctcagggtgacgcagacagctccttggac

SEQ ID NO: 55011 - DNA, 283 bp, Zea mays
ctttattttaaaaggcatgatgggcaagctgtcacttgtgaagacttctatgcagccatgtgtgatgcaaataatgcacaactgccaaactttttacaatggtactctcaagcaggtacgcctatagtcaaggtggcatcttcatatgatcctagttctcagacattctctttgaaacttagccaagaagtaccacccactcctggccagccggttaaggagcctatgttcatacctgttgctgttggacttgttgactctactggaaaagatatgcccctca

SEQ ID NO: 55012 - DNA, 282 bp, Zea mays
  unsure (1)..(282): unsure at all n locations
tttgganatcacccaaaagtcttcaccctatctggcttgaacgttaggtgctaccgctattatgatcctgcaacatgcagccttcacttcgaaggactcctggaagacctcggttctgctccttcaggttcaattgtactgctgcatgcctgtgctcacaaccctactggagtagatcctaccatcgaacagtgggaacagattaggcagctgatgagatcaaaatcactgcttccgttctttgacagtgcctatcaaggctttgcaagtggaagtcttgac

SEQ ID NO: 55013 - DNA, 279 bp, Zea mays
ctgacaacactaagagagatgaatatctcaagagattgatgagccttcctaatcagaagtgggcagaaattattggacaggcaagccaaagcattgatatcttgaagaaccaagatgttatcagatcagttctcaacattctacagacaatcacaagtgttgcgagctcccttggaccacacttcttcccacagatttctctaatattcttggacatgctaacagtctacagaatgtacagcgagcttgtatcaagcacgatcgctgaaggaggaccat

SEQ ID NO: 55014 - DNA, 277 bp, Zea mays
ctggaagtgagattagaagtgtggtgttggctgggaggagattttatgagaaggaagggctccctgctttccctatgggaaaaattgatcaaacacgtatgtggaaggtgggtgaaagggtccgttcaaccaggccacaaggtgatcttggcccactgcatcccttcactgctggagtgtatgttgcactaatgatggctcagattgaggtccttaggaagaagggccactcttactcagagataattaatgagagcctgatcgagtccgtggactc

SEQ ID NO: 55015 - DNA, 273 bp, Zea mays
ctcaaagtgcagtggaggtttctttgagttatggaataaccttgggggtgaatctataattggaacagaaagcattaaaagggtattacctgttggggatcgtttgttggattggtgtgagaggactctggtcatgggggtccttaatttgacaccagacagctttagtgatggaggtaagtttctagaagtgggagctgccatttctcaggctaagtcattaatctcagaaggtgcagatatcattgatattggtgctcaatctaccaggcc

SEQ ID NO: 55016 - DNA, 276 bp, Zea mays
ttcacagctggtcgccggaagggtagctgcttcttggaagtcggccgccgcgagatcggctcttcattcccccgcgtctcttcccgccgaatcagcacgttccgagcatatagtgtcgtctatgtctcagtatggaaaattgcatggtcatgaaggctgtgttaataccgtaagcttcaaccctgctggagacctccttgtgtctggttcggacgacacaaacatcatactatgggactggctttctaaaactacaaagcttgtttacccttctgg

SEQ ID NO: 55017 - DNA, 280 bp, Zea mays
gagttcaactatgcctcgactgacttggctgccctttggtatcggctcaatgttgagcaggcagagtggatcatatacgtgacagatgttggtcagcagcagcactttgacatgtttttcagtgctgcaaagatggctggttggctgccaggtccaaacgaaaagaagtttccgaaaacaagccatgttggatttggtctagttcttggttcagatggcaagcggttccgaacgcgcagtactgaggttgttcgattggtagagctacttgatgaggcta

SEQ ID NO: 55018 - DNA, 246 bp, Zea mays
tcggcttctcctccccctcttatcaagtcctcctcgggttagggttccttagggttttgtggagcggcgatggcggcggctgatgtggagtaccgttgcttcgtcggcggacttgcctgggccaccagcaacgagtcgctggagaatgccttcgcctcctacggcgagatcctcgactccaaggtcatcaccgaccgggagacggggaggtcccgcggcttcggcttcgttaccttctcctccgag

SEQ ID NO: 55019 - DNA, 274 bp, Zea mays
atacgacttaggagctggaacgacatctaggagctttacgacagaagagatctctaaacattccacaagggaggactgttggatcattatcaaggacaaggtctatgatgtcactccttatgtagaggaacatccaggcggagatgccattctaaataatgctgggggtgattccacggagggcttttttgggccacagcatggcactagggtcttcgatatcatcgaggatttctgcatcggtcagttgaaggcttcatgatgatgacaggat

SEQ ID NO: 55020 - DNA, 264 bp, Zea mays
ccttgccaccaagcttggtgctcgtctcacggaggttcgcaagaatggaacctgcccctggctcaggcccgatgggaagacccaggtgacagtggagtaccgcaacgagggtggcgccatggttcccatccgtgtgcacacagtcctcatctctacccagcacgacgagacagtcaccaacgacgagattgctgctgacctgaaggagcacgtcatcaagccagtcatccccgagcagtacctcgacgagaagacaatcttcca

SEQ ID NO: 55021 - DNA, 273 bp, Zea mays
cacaaaaatgcccagaagcatttgaacgtttagggatccgaccccctagaggattgctaatgataggaccgccaggttgcagcaagactttgatggctcgtgctgcagcttctgaagcaaaattgaatttcctggctgttaagggcccggacctttcaacaaattgggccggtgactcagaaaaggcagtgagatcgctatttgcaaaggcgcgggctaatgcaccagcaatattattttttgatgatatagatgggcttgcagtaactcgtg

SEQ ID NO: 55022 - DNA, 272 bp, Zea mays
cgcacatctatctgtcaagcgacgccgcggcctcgatcagagtcggaggcgaacacccccatggcggcggctggcggcggcgcaggagggaaggtatccttcaagatcatcctcacctccgaccccaagctccctttcaaagtgttcagcgtgcccgatgcggcgcccgttaccgcggtgctcaagtacgccgcggaggagttcaaggtcccgccccagtccagcgccatcatcaccaacgatggaattggcatcaacccccagcaaagtgc

SEQ ID NO: 55023 - DNA, 270 bp, Zea mays
atgccgctgagccacgtgctggccaccaagctgggcgcgcgcctcaccgaggtgcgcaagaacggcacctgcgcctggctgaggcccgacggcaagacccaggtgacggtggagtacgtgaacgagggcggcgccatggtgcccgtccgcgtgcacaccgtgctcatctccacccagcacgacgtgctcgtcaccaactacgagatcgccgccgacctcaaggagcacgtcatcaagcccgtgatccctgagaagtcctcgacgagaaga

SEQ ID NO: 55024 - DNA, 275 bp, Zea mays
gtcagatccatcgactcgctcgggccgcccctcccgtcgtccccgttcgaaggtgcggcagccggcaggcgagcgatttgatgtgacatgaatcccgagtacgactaccttttcaaacttctgcttattggtgattctggtgttgggaaatcatgcttgcttctcagatttgcagacgattcttatttggacagctatatcagcacaattggggttgatttcaaaattcgcacagtggagcaagatgggaagaccataaaacttcaaatttggga

SEQ ID NO: 55025 - DNA, 277 bp, Zea mays
ggagcaggtagaacgctgcacaatccccttcgccgccgccaagatggtgaacgttcctaagaccaagaagacgtactgcaagaacaaagagtgcaagaagcacacactccacaaggtgactcagtataagaagggcaaggatagcctgtctgcccagggaaagcgccgttatgaccgcaagcagtcaggatatggtggtcagaccaagcctgtcttccacaagaaggccaagaccaccaagaagattgttctgaagctgcagtgccagagctgcaag

SEQ ID NO: 55026 - DNA, 277 bp, Zea mays
tcgagaagctgcgtcgtggcctgaccctgtccgtcctctccggtcggcgagagcaagaagagatcccgcgccgtcctcttctccacctccacctccacccatggcggcctccaccttcagcggcgacgagacggcgccctacttcggcttcctcggcgccgccgccgcgctcgtcttctcctgcatgggcgccgcctacgggacggccaagagcggcggcggcgtcgcctccatgggcgtcatgcgccccgcgctcgtcatgaagtccatcgtcccc

SEQ ID NO: 55027 - DNA, 264 bp, Zea mays
ttgggtcaaaccctaagcagggagttgatttatccgctgcagccatgagtaagttgcagtctgagtctgtcaaggatgccatctcccagattgttggggatgccaaggagaagaataggaagttcactgagactgtggaacttcagattggtctgaagaattatgatccacagaaggacaagcgtttcagtggctctgttaaattgccccatatccctcgtcccaagatgaaggtgtgcatgcttggtgatgcccagcatgttg

SEQ ID NO: 55028 - DNA, 276 bp, Zea mays
tctcgcgtgattccgcatcccgttcgcgagcgcgacacacgctgacagctcacggctgaccttcccgagtcccgacggcctccagctccatcttgattcttgaggcgaagccccggtgcgtaagagtctgccatggccagcgagaataaggtctttgggttcgcggaagtcgccaagcacaacgtcaccaaggactgctggatcatcatcgccggcaaggtgtatgacgtcactccgtttatggatgagcatcctggtggagccgaagttttgcta

SEQ ID NO: 55029 - DNA, 272 bp, Zea mays
ctgggagatacagagaggagagggagggtttcctcaaagagacccaaacccaagcagagaacactagcgttccctcaccagggcgtccatcccagcagccatggcgatggcgtacaagatggcgacggaggggatgaacgtgaaggaggagtgccagcgctggttcatggagatgaagtggaagaaggtgcaccgcttcgtggtgtacaagatcgacgagcggtcgcgcgccgtgctggtggacaaggtgggcggccccggggaagggtacg

SEQ ID NO: 55030 - DNA, 269 bp, Zea mays
ctggccaccaagggcatgggcgccaacctcttcgaccggccgcctcccaactcccccaccgtctacgactggctctacagcgacgagaccaggagcaaccaccgctagatcgggcgagatggatggacagtgaagaggccatgtttgctggtccttgtggttatctaaaacgcacgcatgctctattatagctagtcatcactatatatatacttgtgtttgtgtattgttgttcttgttctgctggtgtctccgccgtttaatttgac

SEQ ID NO: 55031 - DNA, 269 bp, Zea mays
ctcgcgctcacggctgtcggatccgggcagacctccctagggatcaaagctgccaacggtgtagtgattgccaccgagaagaaactgccttctattttagtggatgaaacatctgtgcaaaagattcaggcactaacaccaaatattggagttgtctatagtgggatgggtccagattttcgtgttctggtgagaaaaagtcgaaagcaggcacagcagtattatcggttgtacaaggagcatatacctgtaacacagcttgtgcggga

SEQ ID NO: 55032 - DNA, 126 bp, Zea mays
cggcattcggctcgaggtttacaaatccgggaccgtcggaaggttgctcgacatcactagattcagcagctacgacgagctccgtagcgaggtggggcgtctgtgtggcctcgagggccagctgga

SEQ ID NO: 55033 - DNA, 269 bp, Zea mays
gggacttgatggtcaggtggctgtcagtgcatgctcacacgtgggaggtcataagtatgcaggagatgtcatcattttcagttctgatgccaagggagaagtgatgggtcattggtatggttatgttgtccccgacgatgtgcgagctttgctgcataaacatattggacaaggagaagttgtggaccgtctatggaggggacagatgggtttatctgaggagcagcagaagcaagactctcgagcttcggagcatgacaaatggtggc

SEQ ID NO: 55034 - DNA, 271 bp, Zea mays
cgcctccactcctcgcgccgctgccgcatctcctctacaggtaagatggagagaaagagggcgaaatggtgaagcacaacaacgtcatccccaacgggcacttcaagaagcactggcagaactatgtcaagacatggttcaaccagcccgcccgcaagcagaggcgccgcatcgcacgcccaaagaaggctgtgaagatattcccacgaccaactgctggccctcttcgtcccattgttcaatgccagactctcaagtacaacatgaagtc

SEQ ID NO: 55035 - DNA, 163 bp, Zea mays
ctgaagctggtggcatggtaaaagatgccgcaggaaacgatttggatttttgcaaaggtagatatcttgatcgtgacagaggaattattgctacaaacacgcagttaatgccactagttctaaaggcggttcaagaggctatgaaggaggaacagtaggctgc

SEQ ID NO: 55036 - DNA, 259 bp, Zea mays
gttggccgcaccctggcggattacaacatccagaaggagagcactctccacctggtgctccgcctcaggggtggcatgcagatttttgtgaagacattgactggcaagactatcaccttggaggtggagagctctgacaccagtgacaatgtgaaggccaagatccaggacaaggagggcattcccccagaccagcagcgtctgatctttgcgggccagcagctggaagagggccgcactctcgcggacaccacatcca

SEQ ID NO: 55037 - DNA, 263 bp, Zea mays
gccgacaacgcgaaggccgcggcggcgcatgcgaggccggagtcgtcgcaggaggaggctgaggagtggaaggaggccgagggggacgtcgccgaagtcgaccgcgccgccaccaatggcgccggcgaggggggcgtgcccacagacaggccgatccgggtctacgccgacggcatctacgacctcttccacttcggccacgccaagtcgctggagcaggccaagacgtcgtttccaaacacatatcttcttgttggatgctg

SEQ ID NO: 55038 - DNA, 280 bp, Zea mays
tgtgcatgaatccaaattataccgagtttaaattcccgcaaatcaaagctcacccatggcataagatattccataaaaggatgcctgctgaagcggtagatctcgtgtccaggcttctgcagtactcaccaaaacttcggtcgactgctttggaagcattggtccatccgttctttgatgaacttcgggatccaaacacccgcttaccgaatggtcgttttcttccgcctctcttcaattttaagccccatgagctgaagaacgtgccggcggatttcat

SEQ ID NO: 55039 - DNA, 277 bp, Zea mays
gcgcgcactctccaggcgtctgccaatccgaaacgaaacccacccgtaggcaaaccaggactgagattgagcggagagcagcacagtcatggcggggcaggaggtggcgaacaagcgggtggtactgaagcgctacgtgacggggttcccggcgcggacgacatggaggtggtcaccggcaccgcgcgcgtggccgtgccgccggggtcgacggccatggtgctcagctacctctacgtgtcgtgcgacccttacatgcgcggccgtatgaccaagc

SEQ ID NO: 55040 - DNA, 280 bp, Zea mays
tctcctccacctcgctgtcttccaccacggctgctcgtcggcgagggcacacagacgcgccggcgacatggtggggagcatgagcaccgacgataactcgatgatagagcggttccagcggtggaaggcagcccgtggccgtgtccatcgagtccggcggcgacaacttccagcactacaagaagggagtgtacaacgggccctgcgggatcaacctcaaccacggcgtcaccgtcgtcggctacggccaggaggcggccggcggcgacaggtactggat

SEQ ID NO: 55041 - DNA, 278 bp, Zea mays
gtcgtgttcagggtagcagcagtcaagtatgccgacaaccggatgctcggatggcgtccgttcaaagatggagtgccagggccctacttgtggaaatcatacaaggagatctacgacgaggtgctgcaacaggctctgcgttgcagaagctgggagtgcagccaggttcccgggtgaggatctacggaacagtttgtcctcagtggatagtggcaatgcaggcttgcaatggctatagtctagtctgtgtcccactgtacgatactttaggtgcggga

SEQ ID NO: 55042 - DNA, 256 bp, Zea mays
atccccaagcaaacaaacagggtagaggtagagggagaggagaggagaggagaggagaggagaggttgggtctgggacaccatggctccgatgaagctgtacggggcggtgatgtcgtggaacgtgacgaggtgcgcaacggcgctggaggaggctggctccgactacgagatcgttcctgtgcaattcgccaccgccgagcacaagagccccgagcacctcgtccgcaacccgtttggtcaggttccactctgca

SEQ ID NO: 55043 - DNA, 274 bp, Zea mays
gagctcgggtcaaaccctaagcagggagttgatttatccgctgcagccatgagtaagttgcagtctgagtctgtcaaggatgccatctcccagattgttggggatgccaaggagaagaataggacgttcactgagactgtggaacttcagattggtctgaagaattatgatccacagaaggacaagcgtttcaatggctctgttaagttgccccatatccctcgtcccaagatgaaggtgtgcatgcttggtgatgcccagcatgttaggggag

SEQ ID NO: 55044 - DNA, 179 bp, Zea mays
gtaatctattgttgagttcgaaaatgctcggattcttgtcactgatcagaagatatcatcgataaaagagattattcctctgttggagcagacaacacagttaagagcaccacttcttataattgcagaggatgtaagtggcgaggcgctggcaacattagtcataaacaagcttagag

SEQ ID NO: 55045 - DNA, 256 bp, Zea mays
ctccccctcctcgctcgcactccgctcgtctgacatctcctcccgtcctttcctttctgaggctcgcgaaccccgacgatggccgccaccgcggtgtcggtcgacgagaagctcgacaagcttcgcgccgaggtcgccaaactcaaccagatcagcgagaacgagaagtccgggttcatcagcctcgtgtcacgttacctcagtggggagacggagcagatcgagtgagaccagatccagaccccgacggataagg

SEQ ID NO: 55046 - DNA, 275 bp, Zea mays
cggaggggttactcccagttcgcgagcgggttcaccccgctgaagccgaagccgctgggatccatcctcgacatcgaacgcgccaagggcctctcccccgaccacctcgtcgccgcatgggatgactatcatttaggaaggggtcatataggtgcatctatgaaagcaaaactttaccatctcttggaacaaagatcagcttcatgccgtcactttgttattccgttgtggaagggaagtggctacactaactatgttcatgcaagtccagatgc

SEQ ID NO: 55047 - DNA, 272 bp, Zea mays
gtcccctgctccattctcagccgccgccaatcccttcccgtgctccgcaaccgctgagtgagaagaagagatggccggcaagggcgatggcccggctatcggcatcgatctcggcacgacgtactcttgcgtcggcgtgtggcagcacgaccgcgtcgagatcattgccaacgaccatggtcaccgcaccacgcactcgtacgtcgccttcaccgactctgagcgcctcatcggagatgcggccaagaacaggtcgccatgaccccatcaac

SEQ ID NO: 55048 - DNA, 270 bp, Zea mays
cttgactacatggatgttgaggctctcaagaaaatgaacaagaactagaagcttgttaagaggcttgccaagaagtaccatgctttcttggcatcagaggccatcatcaagcagattccccgtctccttggtcctggtctcaacaaggcaggcaagttcccgaccctggttactcaccaggaatccctcgagtccaaggtgaacgagactatggcaaccgtcaagttccagctcaagaaggtcctttgcatgggtgtcgccgtcggcaac

SEQ ID NO: 55049 - DNA, 274 bp, Zea mays
cttctacctcaccgtctacggcacctccaacagcgccgactacgacgcgctcggctgcctcaagaagttcaacgacctctccaccaaccacaacgcccagctgcaggcccagatctccgccctccaggccaagtacaagtcggcgcgcatcatgtacgccgacttctactccgccgtctacgacatggtcaagaaccccggcagctacgggttcagctcggtgttccaggcgtgctgcggctcggggggcggcaagtacaactaccagaacagc

SEQ ID NO: 55050 - DNA, 271 bp, Zea mays
ctcgaacatttcaaaattgcaccatccgaatctgaatgagcttgtgggctattgcatggaacatggccagcacttgcttgtgtatgatttccacaggaatggatcacttcatgatctactccacctttcagatgagtacagcaagccacttagctggaacactcgtatcaagatcgcactcggctctgcccgtgcactggagtaccttcatgaaatatgttctccatccatcatccataagattttcaagtcgtccaacattttgctggac

SEQ ID NO: 55051 - DNA, 273 bp, Zea mays
cgccactaccaccaccgcaagcgacgacggggggatgtttctgcgacggatgctgaccggcggaggtggcctggcggcgctgagggcggcgcgcgccgtgaaggagacgacggggatcgtcggccttgaggtggcgcccaacgcgcgggaggttctcatcgggctctacacgcgtacgctcaaggagatcgaggccgtccccaaagacgagtgctaccgaaatgccgttgagtcctgcaccaatcaccgcctccagatctgcgaggagggggg

SEQ ID NO: 55052 - DNA, 271 bp, Zea mays
gtcgccgccgcgcgtacaagcaggagcagcaaggatgccggctggccacgggctgcgctcgcggacgcgcgacctgttcgcgcgccccttccgcaagacgggctacatcccgctcaccacctacctccgcacctacaagctcggcgactacgtcgacgtcaaggtgaacggcgccgtccacaaggggatgccgcacaagttttaccacggccgcaccggtcgcgtctggaacgtcaccaagcgcgccatcggcgtcgacataaacaagcag

SEQ ID NO: 55053 - DNA, 271 bp, Zea mays
gtcggaagctctcaaggacatggctattgctgagctgagcaagggactaaagagacaggacgagaggttgagcagtatggagaaacaacttgagcagaagaatctagaagtgaaaagactacataacgagcgcacagaagcattgtccgcacagttcgctgcagaggcaacacttcgaaggatccactcttctaaaaaagctgaggaatcagttccattcgacgccatcatagcgcccttggagtcagacataagataatacagacatgag

SEQ ID NO: 55054 - DNA, 259 bp, Zea mays
ctcgatcgctcatcaatcgccagaggagttgttgatcgaggtgagtgaggttgaaaagcacaccatcgtcatggacggcggatactacggcggtcgcgatcagcgctacagcggcgggtactacggcggcggtggcatcgcaacgccggggtacgctccggcggtcccgtacgggatgtcgcaggtgaacatcgagggcaacgggtgcgggcgggcgctgccgccgcagccgaccgtcaaggtgtactgccgcgccaac

SEQ ID NO: 55055 - DNA, 268 bp, Zea mays
  unsure (1)..(268): unsure at all n locations
ctctccgtatccggcggcggaagcggaagcgnaagcggaaggaagtaggcggccaccatggtgaagggacgcacggggcagcgcgtcaggctctacgtccggggcaccatcctcggatacaagaggtccaagtcgaaccagtacgagaccacgtcgcttgtgcagatcgagggggtgaacaccaaggaggacgtcgcgtggtacgctggcaagcgcatggcgtacatctacaaggccaagaccaagagcagtgagacccgctacaggt

SEQ ID NO: 55056 - DNA, 264 bp, Zea mays
gtatttgtcaaggagcggttgggagttgaggtcgagatgggtggctgcaaagctccaattacaaccttcatagttgaaccatttgtgccacatgaccgtgagtactacctttcgattgtatctgatcggcttggcaacaccattagtttctcagaatgtggaggtattgagatcgaggagaactcggacaaggttaagactatctttcttcccacatttaagcaatggacacctgacgcagatgctccagtgattgccaccctg

SEQ ID NO: 55057 - DNA, 272 bp, Zea mays
gtcccctgctccattctcagccgccgccaatcccttcccgtgctccgcaaccgctgagtgagaagaagagatggccggcaagggcgatggcccggctatcggcatcgatctcggcacgacgtactcttgcgtcggcgtgtggcagcacgaccgcgtcgagatcattgccaacgaccagggtaaccgcaccacgccctcgtacgtcgccttcaccgactccgagcgcctcatcggagatgcggccaagaaccaggtcgccatgacacccatca

SEQ ID NO: 55058 - DNA, 271 bp, Zea mays
gtctattgctattttctatggatcgttagctgccataccatttggtacgatggtggttgttttcatcctgtgggccttcatctctttccctcttgcacttttgggaactgttgtcggtagaaattggagtggtgctccaaacaatccctgtagggtgaagactattcctcgccctattcctgagaagaaatggtacctcacaccatctgtcattgcgcttatgggaggactgcttccttttggtagtatctttattgagatgtactttgtc

SEQ ID NO: 55059 - DNA, 232 bp, Zea mays
tttgacaccagtgaggggaggtaggtatgcacctattaccatttggtgtccatgcctgctattctcctaattgaccccgtcaccgggcaaaaagtacatgcttggaatggaatggttcacccagaccgtttactcgaggatttactaccttacctggataaaggtccgaaggggcaccatgcagctcaacctcaaaagcgcccaaggacagttgatcaggaagcttctacgg

SEQ ID NO: 55060 - DNA, 267 bp, Zea mays
ctccgcagtccgcaggaccagtcactcggcagtcggcacgcaggctatcagcacagcagcagccagagccatcccctctcctcgctacgcttcgcttcctcagcgccattgcctcctcgtcctcctccaccctcgtccgtcccgttccggcgcgcgagctcgcccgagatggcgaacgcgagatcgggtgtcgctgtgaacgatgagtgcatgctggaatttggcgagctgcagtcgaagagctgcaccgcttcataactttcaaga

SEQ ID NO: 55061 - DNA, 268 bp, Zea mays
gtgccctgagaacacgtacatctctcgcgagggtgatcctgtgaacgagatgctcttcattatacgcgggaaactagagagctcaacgacaaatggtggccgcagcaacttcttcaactccatcatcctgcgccccggcgatttcgcaggcgaggagctgctcacgtgggccctgctccccaagaccaacgtccacttcccgctctcgacaaggaccgtacggagccacacagaggtggaggccttcgctctacgggctgaggactga

SEQ ID NO: 55062 - DNA, 252 bp, Zea mays
gggagttagtggaaccatattcacgaatcgatagtgctaaaggtgttgcacttcttgctgtggtgattcttatcctttcaaacgtggcctctaatgttcctacagtcctattgctcggtacaagagtggctgcatcagcggcttcgatttctcatggttcagagaggaaagcctggctcatccttgcatgggtcagcaccgtggctgggaacctcaccctcctaggctctgcggcgaatctgattgtctgcg

SEQ ID NO: 55063 - DNA, 255 bp, Zea mays
ataggacactttggatatgaagaagagattgatcagctggaagagggataaacaagctcttgatggctgaggtagtgaaactgaggcaggagcaccaaaatactagatcagatctacaggccatggaagagaaattacgagacaccgaagcagaagcagcagcagatgatggcattcatggcacgagtcatgcagaaccctgatttcatgcgtcactagatctcccagcgggagatgaggaaggactcgaggatc

SEQ ID NO: 55064 - DNA, 247 bp, Zea mays
cagacttctgctgcagcgcctccgccgccgccgccgcatctaacgcagttccctccgacgcaagccgaggaacgatggtgctccaggacgacattgatctgctcaacccgccggcagaactcgagaagctcaagcacaaggggaagagactcgtccagtcgcccaactccttcgtcatggatgttaagtgccaggggtgcttcagcataaccactgttttcagcgactcccagactgttggtgtgtg

SEQ ID NO: 55065 - DNA, 251 bp, Zea mays
aaagggtaggctcactgtccaatttcaaggagaagaaggaattgatgctggtgggctgacaagggaatggtaccagtcgatatcacgagtcattgttgacaagagtgcccttctgtttacgacagtcgggaatgatttgacgtttcaaccgaatcctaattctgtgtatcaaactgagcacctctcatacttcaaatttgttggacgagtggttggcaaagctctcttcgatggtcagcttttagatgccc

SEQ ID NO: 55066 - DNA, 252 bp, Zea mays
ctggccaccaagggcatgggcgccaacctcttcgaccggccgcaacccaactcccccaccgtctacgactggctctacagcgacgagaccaggagcaaccaccgctagatcgggcgagatggatggacagtgaagaggccatgtttgctggtccttgtggttatctaaaacgcacgcatgctctattatagctagtcatcactatatatatacttgtgtttgtgtattgttgttcttgttctgctggtgtcc

SEQ ID NO: 55067 - DNA, 248 bp, Zea mays
tgatgctgtcatgacaatccccaagggaaccttgttccccatgtgcggcatgaaccttgccttcgacagggatctcattggccctgccatgtacttcggtctcatgggtgatggccagcccattggtcgctacgacgacatgtgggccgggtggtgtgtgaaggtcatctgcgaccacttgagcctggtagtcaagactggcttaccatacatctggcacagcaaggctagcagaccccttcgttaat

SEQ ID NO: 55068 - DNA, 242 bp, Zea mays
ggtacctgaacatgctgggacttgcaagagagttggagctaggattttgttgacatcaacatctgaagtttatggtgatccacttgagcatcctcaaaccgaggcctactggggcaatgttaacccaattggagtcaggagttgttatgatgagggtaagcgtgtagcagagacgctgatgttcgactatcacaggcagcatggcattgaaatccgaattgccaggattttcaacacctatg

SEQ ID NO: 55069 - DNA, 240 bp, Zea mays
cgcctccactcctcgcgccgtgccgcatctcctctacaggtaagaaggagagaaagattgcgatatggtgaagcacaacaacgtcatccccaacgggcacttcaagaaacactggcataactatgtcaagacatggttcaaccagaccgcccgcaagcagaggcgccgcatcgcacgtcaaaagaaggctgtgaagatattcccacgaccaactgctggccctcgtcatcccattgtaca

SEQ ID NO: 55070 - DNA, 240 bp, Zea mays
gggacggacccgcgcttcaacgcgtgttcaacgagggcatgaagaaccactcggtgatcatcaccaagaagctgctggacttctacacgggcttcgatggcgtgtcgacgctggtggacgtgggcggcggcgtggagcccacgctgcacgccatcacgtcccgccacccgcacaggtccggggtcaacttcgacctgccgcacgtcatctccgaggcgcctacgttccccagcgtgcggc

SEQ ID NO: 55071 - DNA, 237 bp, Zea mays
aggctgtcgagtttgctgacgcgagcccgcatccgccgcgcagcagctgttggagaacgtgtttgccgagcccaaaggcttaggtatcggccccgatggtaagtacaggtgcgaggatcccaagttcacccaaggcaccgcccaagtttaaggaggttaatctgcgctctgtaccactgtacttgggttctctagttttgtcgatccagtgtcatgttaaggatactgtatgcataa

SEQ ID NO: 55072 - DNA, 240 bp, Zea mays
  unsure (1)..(240): unsure at all n locations
atcaaaccaacaacttaaaaccgttaaactggtaaacttgtgccattgcattgaaccaccaaaatgccatttactattgcaacagggctgctgcatatacccttcttaatatgaacaacaaagctattgaggactgcctgaagntcattgaaattgaccctcactacagcaaagcatatagccgactcggatctgcttattttgctatggggaattatcacgatgctctgtacaagggat

SEQ ID NO: 55073 - DNA, 195 bp, Zea mays
aacggatagcgctcctcgttggcgccactggcgggtggttctgcctctggtctggtgtgtttgtgtgtggtcacacttgccagccagcagaggcgcctgcttgtacctagattactgtttccattgtcgtcatcatcggctaacattgtcataatgtcagtttgggtaatgttagattaagtaattattgtgtcc

SEQ ID NO: 55074 - DNA, 244 bp, Zea mays
gtcatcaaggcgctcaaggagcccgagagggaccgcaagaaggtcaagaacatcaagcacagcggcaacatcagtctcgacgatgtcatcgagattgccaggaccatgaggcccaggtccatggccaaggaaatgtccggcagcgtcaaggagattctcggcacctgcgtcaaggtcggcttgcaccgttaaaggaaagacacccaagagccttacaacaggagattgacgacggcgaggtgga

SEQ ID NO: 55075 - DNA, 254 bp, Zea mays
ctcgagccggtcctggcatccgcagagagtttgttccgtccaggcaacaaaaagcgttgccccgccgcgcagaggaagaagagagcagaggaggatggctcgtacgaagcagaccgcccgcaagtccacgggaggcaaggccccccgcaagcagttcgccaccaaggcggcgagaaattgggcccgacgaccggcggcgtgaagaagcccacagtacagcccggaacgttgcgttcggaattccaaatacaaaa

SEQ ID NO: 55076 - DNA, 258 bp, Zea mays
gttaaacctcagggagttagcaaggggatttccgtggacaagatcatccggaccttggtcagcaaaggggaagtaccagaccttttgatgtgcatcggaaacgatcggtcggacgaggacatgttcgagagcatcaacagagccacctccctttccgagcttcctgccgctccagaagtactcgcctgttccgttggccccaaggccagcaaggcaaactactacgtcgatggctgctgacgagtacagctgctgaag

SEQ ID NO: 55077 - DNA, 267 bp, Zea mays
ctcgagccgcgccgacaaaaccagaccaccaaacaagtgccagcggctctcgcagtcgcagcaatggagagcaccttcatcatgatcaagcctgacggcgtccagaggggcctcattggtgagatcatcagctgttttgagaagaagggcttctacctcaaggccttgaagcttgtcaacgtggagaggtcgtttgccgagaagcactacgccgatctcgcctccaagcccttcttccagggcctcgttgatacatcatctctggcc

SEQ ID NO: 55078 - DNA, 264 bp, Zea mays
gtgctgctggacaggttctttgacatggagtatgcggagtgcgtgaggcttttgaggcatatgctagtactgcaaagcagattgatgagctctctgcattctattcatggtgtaaagatactggagttgcaaggtcatctgagtacccagaggtgcagcgtgtcactgataagttgctggagacgcttcaagagttcatgagggaccgggcaaagaggcctaagagcccaccacgggagcctgaacctgagcctgttaaggaag

SEQ ID NO: 55079 - DNA, 208 bp, Zea mays
gtcgagaacgtggcggagaaccggcgggctctccgtgagctcctcgtctgctgccctggtgcccttcagtacatcagcggtgtgatcctcttcgaggagaccctcttacagaagaccaagggtggcaaacctctttggcgaagtcccccaagaaggaagcgtccttcctgggatcaaagtcgacaaagggaccatttaaggtgtttgg

SEQ ID NO: 55080 - DNA, 266 bp, Zea mays
ccgcgtccgctagctctagccgccgtccgccgacttcatcgtcgccgtcgtctagacctcttcacgcactggaaaggttaaagtccgacatcaatggcgaacatcatcctgatctcatcatgtgccggaagcagcctggcatcgcgattggccgcctttgcgagaaatgtgatggcaagtgtgttgtctgcgactcgtacgtgcgcccatgtacgcttgtgcgggtctgcgacgagtgcaattatggtcgttccagggcaagtgtg

SEQ ID NO: 55081 - DNA, 249 bp, Zea mays
gtcgagaacgtggaggagaaccggcgggctctccgtgagctcctgttctgctgccctggtatccctcagtacatcagcggtgtgatcctcttcgaggagaccctctaccagaagaccaaggatggcaagccttttgtcgatgtcctcaaggagggaggcgtcctccctggcatcaaggtcgccaagggcaccattgcggttgttggcaccgacaaggacaccaccacacgaggccaagatgaactcggc

SEQ ID NO: 55082 - DNA, 265 bp, Zea mays
gctgaggtcatcatcagatttgaaatatttaaagtggatacaaactatttcagcaatgcagacaattaagtgtgttgttgtgggcgatggtgctgttggtaaaacatgtctcctgatatcctacacaacaaacaaatttccatcggaatatgtaccgactgtttttgacaactatgcagtcacagttatgattggtggagaaccatatactcttggactttttgatactgcagggcaagaggattatgacagattacgaccgctg

SEQ ID NO: 55083 - DNA, 267 bp, Zea mays
ataatgacaagccccttcacagatgcttccactcgcaaattcttcgaaacccgtagatactttggcctagaccctgaccaagtgacatttttccaacaaggcacacttccatgcgtctctgccgatggtagatttattatggagacaccatatagggtagcgaaggctcctgacggcaacggtggagttaatgctgcgcttaaatccaaaaaacctattgaaaacattggttccgcgggaagtaaaatactagactgctacggagtc

SEQ ID NO: 55084 - DNA, 264 bp, Zea mays
ggtcccgcgggtctgtctcttgcttcaacagtgtttggacggacagatccggggactctcttccagcctccgaccgccctccgatttcctctccgcttgcaacctccgggaccatcttctcggccatctcctgcttctgggacctgccagcaccgtttttgtggttagctccttcttgccaaccaaccatgagctcccagattcgtcagaattattccaccgacgtggaggcagccgtcaacagccggtcaatttgtacctgca

SEQ ID NO: 55085 - DNA, 265 bp, Zea mays
gcttcattgacatcttcgcgcggccggccgcgggcttcgtggcggggcttgaggacggtgcggccctactccgtctacctcttcagcttctccatgttcttcaacggcctcgcggacctggcgggctctacggcgggcgactacggcggcctcgtggccttctgcatctactttggcatctcctacggcatggttagggccctgcagttcgaggtgctccatggcatcgtgtgcacgcacaagttctcagtgccattggcctggt

SEQ ID NO: 55086 - DNA, 263 bp, Zea mays
cgcatctgcttccagagccccccgccgccgctgcgccctcctctcggtcctgccgtccgtcgaggtaaaaggacagcatggtgagggtcagcgtgctcaatgatgctctcaagtccatgtacaatgctgaaaagatagggaaacgtcaggtcatgatcaggccgtcatccaaggtgatcatcaagttcctgacggtcatgcagcgccatggttacattggcgagttcgagtacgtggatgaccacaggctgggaagatcgtgg

SEQ ID NO: 55087 - DNA, 265 bp, Zea mays
gcccaattgaatatggacatgtgcttctcattcctcgtgttctggaccgcctgcctcagaggattgatccagagagcttcttgcttgcactgcaaatggcagccgagggaggtagcccatacttcaggcttggttacaatagcttgggtgcgtttgccaccatcaatcacctccactttcaggcgtactacttgtcagtgcctttccctgttgagaaggcagctacccacaagatcccactctctgaggacacgaagaagaatgg

SEQ ID NO: 55088 - DNA, 259 bp, Zea mays
gtggtagagttagcagctgggcatgcattaacttctcacggaatgtgcaagatggtgctgccgggagtttctgtcatgaattggctttgatgtgccgagtatcaggaatggattttgtacttgaacctgtgctgtcaccttgctatgcaaggcctgaacttgttgaaagagcactaaagggacgctatcaagatgcgatgaacatactcgggcctcagggccgagaactcgacttgctgattgtttactgcctgacaat

SEQ ID NO: 55089 - DNA, 256 bp, Zea mays
ctgggcttcactgtgtacccatctccccaggtgtcaacctctgatgtggagccttacaacagcgtgctctccactcactcactcctggagcacactgatgtctccatcctgctcgacaacgaggccatctatgacatctgcaggcgctccctcgacaataagaggccataaaccaactttgaatcgccttggtgtctcaggtgatctcatcgctgactgcttctctgaggttctatggactctaaatgtggatgtg

SEQ ID NO: 55090 - DNA, 259 bp, Zea mays
tgccgccgccgtttcgcgcaccgtaccctagccctcgtcagcggcggcttcgagctcatccagccatgacgttcaagcggaggaatggcggacgcaacaagcacgggcgaggccacgtcaagtacatccgctgctccaactgcgccaagtgctgccccaaggataaggctatcaagcggttcttggtgaggaacattgttgagcaggctgccgtgagagatgtgcaggaggcctgtgtacatgatgatatgttctaccc

SEQ ID NO: 55091 - DNA, 147 bp, Zea mays
aaggattcggagtctgtggttgtgcggataactggatgcctaatggatgcgctagaccatatatggcagagcttggtttcgtcggtgatggcccaaaaagttaccagatctggctgggtggaacaccaaaccagagtacgctagcag

SEQ ID NO: 55092 - DNA, 107 bp, Zea mays
ttccgtccccaaatcgaccgagcgaattcaccacagcttctcaccaccgctatcttcgatggcacccaaggcggacaagatgccggcggcgaagaagcctgcagagg

SEQ ID NO: 55093 - DNA, 214 bp, Zea mays
gggcctggcccgctgcacatccatggccagcgagaacaggagtgctctgtcaagacgctctatgggatttactacaagtgtcactgtacagcgtggcctgacctgtgagggagacaagaccatcgtgggctcaatcacaagcacaaactttggcatctgccatgacgctggacgctccaagcagtgagactgcccacccactcccacacctagc

SEQ ID NO: 55094 - DNA, 262 bp, Zea mays
gtgaagatctcttttatgagcacaccctgtctctgaccgaagctctatgtgggttccaatttgttcttacacatctggacaacaggcagcttctgatcaaatcaaaccccggcgaagttgtcaacgctgaccaattcaaggcgataaacgacgaggggatgcctatttaccagaggcccttcatgaaggggaagctctacattcatttcacagtggagttccccgactcgctggcgccagagcatgcaaggctctcgagtcg

SEQ ID NO: 55095 - DNA, 254 bp, Zea mays
gcccccgcgagccagctccggcgaagtcgacagcaccaagcatggcggacacgaaggcgtcacccgcggctgagctccgcacgcgcaagttcatgaccaaccgcctcctctcccgcaagcagttcgtgctcgaggttctccaccccggccgcgccaacgtctctaaggcggagctcaaggagaggctggctaagatgtacgaggtgaaggatcccaactgcatcttcgtcttcaagttccgcaccacttcggag

SEQ ID NO: 55096 - DNA, 154 bp, Zea mays
ttcggccaggtctccctctccccggctctccgccttcctcttccagtacccgcgcgcgagatcgccgcaccgtgtgggcactagatcgcgatggcctcgcgccgccgcaccctgctcaaggtcatcatcctcggcgatagtggggttgggaaga

SEQ ID NO: 55097 - DNA, 238 bp, Zea mays
gtctgatggaggacccggacaagcgcgaccaggttcggcgggagcatgtctacaagatgaaggagcggtgcgagcgcactaaggcggcgtggagcctccctctgcgcccctacggcttctggaccttcgaccgcttcaactcgcagctctcctgggatccccagatcagccaggccgccggccgtcgggacccctacgacgacctcattcgcacgccactctggctcgcggcggtttc

SEQ ID NO: 55098 - DNA, 265 bp, Zea mays
cagcccctcctcgctcgcactccgctcgactgacatctcctcccgtcctttcgtttctgaggctcgcgaaccccgacgatggccgccaccgcggtgtcggtcgacgagaagctcgacaagcttcgcgccgaggtcgccaaactcaaccagatcagcgagaacgagaagtccgggttcatcagcctcgtgtcacgttacctcagtggggaggcggagcagatcgagtggagctagatccagaccccgaccgcatgagtggtggtgc

SEQ ID NO: 55099 - DNA, 255 bp, Zea mays
ccatgacgctccggctgatcagttccctcctccttgtggccgttgcctcaggctatggcccagcttcctctcgcccttccagccgcgttgtcaatggtgaggatgcggtcccctacagctggccctggcaggtttccctgcagtatgcgaaaagtggaagcttctaccacacgtgtggcggaagctccctcgcccgcgcgtgggttgtgactgccggccactgcatctcgagggatctgacctaccacgtggtgt

SEQ ID NO: 55100 - DNA, 277 bp, Zea mays
tgttaactgtaaaagacgtgaaccagcaggagttcgtcagagctctggcagccttcctcaacaagtacgggaagctgaaagtccccgaatgggtggataccgtcaagctggccaagcacaaagagcttgctccctacgatgagaactggttctacacgcgagctgcttccacagcgcggcacctgtacctccggggtgagcgcgcgggttggctccatgaccaagatctatgggggacgtcagagaaacggcgtcatgcccagccacttcagccgag

SEQ ID NO: 55101 - DNA, 279 bp, Zea mays
cacaccagctgtcccactcaccatggagaagatcctgatcctcctgcttgtcgccctctctgtggcctatgcagctcctggcccccgggggatcattatcaacctggagaacggtgagctctgcatgaatagtgcccagtgtaagagaattgctgccagcattcaagtgcgctgggcctggccagctgcacatccatggccagcgagaacagcgagtgctctgtcaagacgctctatgggatttactacaagtgtccctgtgagcgtggcctgacctgt

SEQ ID NO: 55102 - DNA, 281 bp, Zea mays
actcaatcacgatgggtttgctgcatatccctgcacttcatacaagtactttgagtctgacaagtgcaacccgtgtccagatcaaggatgcccacagatgggtcactatgctgataaatttgctagcaggacaagtgaagagcagcagaaattcttcttgaacacaggagaggctagcaatttcgctcgctggagatatggggtttccatcacactgtctggaagaacagccactggtcagatcaaagttgctttgtttggaaataagggaaacactcacc

SEQ ID NO: 55103 - DNA, 286 bp, Zea mays
tggattggccacccaagatttgagctcatccgtcatgatgtcaccgagccgcttcttgtggaagttgaccagatctatcaccttgcttgccctgcttcaccaatcttctacaagcacaaccctgttaagaccatcaagacaaatgttattggtaccctgaacatgctaggacttgcaaagagagttggagctaggattttgttgacatcaacctctgaagtttatggtgatccacttgagcatcctcaaactgaggcctactggggcaatgttaacccgattggtg

SEQ ID NO: 55104 - DNA, 268 bp, Zea mays
actggagggcggcacggcgaccggagcggtacgagcagcaatttatccgtgtgcagccccaaactggaaagaagatgctaattaaagtgaagacgctgaccggaaaggagattgagattgacattgaacctacagacaagatggagcgaatcaaggagcgtgtggaggagaaagagggaatccccccacaacagcagaggctcatctacagtggcaagcagatgaatgatgagaagacagcagctgattacaagattttaggtggttc

SEQ ID NO: 55105 - DNA, 283 bp, Zea mays
tagaagaggtagaaccatgtctatcgggaccaaaacggcctcacgatcgagtgacattgaagaatatgaagtctgactggctttcttgcttggatagcgatgtaggattcaagggttttgcagtcaccaaagagtcacaaggcaaagttgcagaatttttgttccacgggactcctgcaaagataacgcatggtgatgttgtaattgcagcaataaccagttgcacaaacacatcagatcctaatgtaatgctgggagctgctttggttgccaagaaggcttg

SEQ ID NO: 55106 - DNA, 273 bp, Zea mays
  unsure (1)..(273): unsure at all n locations
caggcaggcaggtcggcgaggagggcaggaagaccgaagaccgagccgtgcgncggttcntgacgggaacgggacaggacctcaaaatctcagatccttcctgcccgcccgcccgtgcccgtcgacgcgtcgttcttgccggccgcgccccacctccgccctctactcctccagggggatcggatacgccacaggctgcgcgatggtgctgtgggtcttcggctacggctccctcatctggaaccccggcttcgacttcgacgacaaaatcct

SEQ ID NO: 55107 - DNA, 266 bp, Zea mays
ataatatactgctggatgcggagtataacgcaaagctctctgatattgggcttgcgaaagacggacctgtaggtgataaaactcatgtttctactcgagtaatgggaacctatggatatgcagcaccagaatatgtcatgactggtcatctgacatcaaagagtgatgtctacagcttcggggtagtgcttcttgagatgatgtcagggcgcaggtcgatggacaagaaccgcccgaacggggagcacaacctggtggaatgggcg

SEQ ID NO: 55108 - DNA, 267 bp, Zea mays
aggcagggagccaggcctggcgagcggggtgtgtcgcgatgccggagctggcagtgcagaaggtggtggtccaccccctggtgctgctcagtgtggtggatcatttcaaccgaatcggcaaggttggaaaccagaagcgtgttgttggtgtgcttttggggtcatggcaaaagaaagtacttgatgtatcgaacagttttgcagctccttttgatgaagatgacaaagacgattctgtatggtttttagaccatgattatttggaaa

SEQ ID NO: 55109 - DNA, 267 bp, Zea mays
atataaagctacagatttgggatacagcgggccaagaacgcttccgtactattaccactgcgtactaccgtggagctatgggtatcttgctggtttatgatgtcaccgatgaatcttctttcaacaacatccgaaactggattcggaacattgagcaacatgcctctgataatgtcaacaaaattttggtgggcaacaaggccgatatggacgaaagcaagagggccgtacctactgcgaaaggacaagcacttgctgatgagtatg

SEQ ID NO: 55110 - DNA, 265 bp, Zea mays
ggaagatctatctaaagaacctcaggttgaaagagagctgatgcttataaaactaaatgttgaacctgatcagcgtcctgaggtcatggttttagttgatattttcagagcaaaagttgttgatatatctgagaaaacacttaccatggaggtagctggagatcctggcaaaattgctgcagtgcagaggaatctatggaaatttggaatcaaagaaatttgcaggacaggaaaaattgctttgagacgtgaaaggattggtgca

SEQ ID NO: 55111 - DNA, 277 bp, Zea mays
cggcctccgggcacctcccacggaccacggtcccaccgcatcggaactcggaaggcgaacgatggcgccgcgcggatcgagcgatggcggcggcgttggagcaactgagcagcagcaaaatgttcgacggcttcaacctccggttccgccaccagagcgccaccctcggctgcgcaatgaccttctccatctacctggccccgtccccggcggccaacatatccgtgctgtactggctctcgggcctcacctgtaccgacgagaatttcatcatgaa

SEQ ID NO: 55112 - DNA, 308 bp, Zea mays
tccatgtacgaggctcgggcttcagctcgagcgcggccttcccggccggatccacgttgctgcggtcttctcggctagatccgccaaccctttggccggatcgccgacttcatggctggattcgtcgctgccgtggccttcccggccggatccggctattccccgtcttttctgccacgggcgcggacaccatgaccggcgcacacgcgtgcgctgtcgtcggcctccctggcggggctcgttgaggcccggatgatcgaagacgcaggaaggtcggcctgccggtgcccttttgctgtgtcgccctg

SEQ ID NO: 55113 - DNA, 265 bp, Zea mays
attctccggaagaccctaggtggtggaatgagacaggttggagttctctgtgctgctgctcatgttgccgttcatgacaatgtgggaaagcttgcagatgaccacagaaaggctaaagctttggcagacggactgaataaaatcgaacagttcagagtggattcagcatcagtccagaccaatatggtattcttggacattgtggattcacgcatatcatctaacaagctgtgccaggttctgggaacgcacaatgtgctcgcaa

SEQ ID NO: 55114 - DNA, 264 bp, Zea mays
gagcgacagagagagagagaccgacgcgccggcagatcccaagctcaccggagagggggaagagggcgaccgaaggcggcgatgggtttcatcatggacttcgcggagaatctgatcctccgtctgatggaggacccgacaagcgcgaccaggttcggcgggagcatgtctacaagatgaaggagcggtgcgagcgcactaaggcggcgtggagcctccctctgcgcccctacggcttctggaccttcgaccgcttcaactcgc

SEQ ID NO: 55115 - DNA, 267 bp, Zea mays
cactggcctcctccactcgctccgcaacgtgccgtacccgctcacctggatcgtcgtcgaggcaggcggcaccaccaacgccaccgcgtcaatgcttgcgcgctctggcctcactgtcgtccacatccccttccctgaccgcatgcccaccgagtgggccgaccgccacgctactgagaaccggatgcgcctccacgccctacgcgtgatccgtgagaggaagatggatggtgtagttgttttcgcggacgacagcaatgttcatac

SEQ ID NO: 55116 - DNA, 265 bp, Zea mays
cagtaccccagagctcatatttggggctactgagtatacaacagctattgacgtgtggtctgctggttgtgtacttgctgagcttcttctaagtcagcctgtttttcctggggacagtggtgtcgatcagcttgttgaaattattaaggttctaggtactccaacacgagatgaaattaagcgcatctctccaaactacaccgaatttaagtttccgcaaatcaaagctcacccatggcacaaaatcttccacaaaagaatgcca

SEQ ID NO: 55117 - DNA, 278 bp, Zea mays
ccgtgtccgcgtccagtgtgtccgctactccgctccccctcagtcaacagttcctcacctagcggtagcgtgcgcgcgggagacgtagatggcggcttcggaggcggcagcggcggcggcaacaccggtgacgccgacagaggggacggtgatcgcgatccacagcctggaggagtggagcatccagatcgaggaggccaacagcgccaagaagctggtggtgattgacttcactgcaacatggtgtcctccgtgccgcgccatggctccaatttttg

SEQ ID NO: 55118 - DNA, 263 bp, Zea mays
acaaaaattccccaatcctctcgtctccgcggcgaagatgtcggggcgcggcaagggcggcaagggcctgggcaagggcggcgcgaagcgtcaccggaaggtgctgcgcgacaacatccaggggatcacgaagccggcgatccggaggctggcgcggcggggcggcgtgaagcgcatctcggggctcatctacgaggagacccgcggcgtgctcaagatcttcctggagaacgtcatccgcgacgccgtcacctacaccgagc

SEQ ID NO: 55119 - DNA, 263 bp, Zea mays
ggctttttgattttagccgccgccgctgctcatctcacatccctcgagaagacgcctgctcctcgccgatcgatacgaaggccgtcttctccgacctccacaccgccgacggcctcaagtccctcgaggctcacctcgccggcaaaacctatgtgtctggtgactccattactaatgccgacattaaggtcttcgccgcggtgccgtcgaagcctggcgctgagtttcctaatgccgcccgctggtacgagaccgtctctgcg

SEQ ID NO: 55120 - DNA, 262 bp, Zea mays
  unsure (1)..(262): unsure at all n locations
gcagccgcttatgctgcaaccatgtctctactgatccctgaaaagttccaccatatactccaccgcncaacaccgagggaatgggcggcggaaaatagcctttgccatcactgccattaagggcgtgggccgaagatatgctcatgtggtgttgaggaaagcagacattgacctcaccaagagggcgggagaactcactgaggatgaggtggaacgtgtgatcaccattatgcagaatccacgccagtacaagatcccagac

SEQ ID NO: 55121 - DNA, 277 bp, Zea mays
gttcgagcgcagaggcgctcacctctgaccaccgggcgtccagggaggacgagaaggaaaggattgagaatttgggtggatttgtggtgaattaccgtggaacatggcgagtccagggctccctggcagtgtctaggggcattggggatggacacctaaagcagtgggttgtggctgacccagacaccacgacgctcctggttgaccagcagtgcgagttcttgatacttgcttctgatggcctctgggataagatcgacaatcaggaggcggtaga

SEQ ID NO: 55122 - DNA, 264 bp, Zea mays
atatcccccatctcttcgactcctttctggagcagctagggttccgtcctcgatccgatccgccgagtgcacaccacctttccccactccgatcgaatcgatggccgccgagggcgagaagaagatgataaccctcaaaagctccgatggcgaggagttcgaggtggaagaggcggtggcgatggagtcgcagaccatccgccacatgatcgaggatgactgcgccgacaacggcatccctcttcctaacgtcaactccaagat

SEQ ID NO: 55123 - DNA, 261 bp, Zea mays
  unsure (1)..(261): unsure at all n locations
atggcaaggagctcgagaaggagcccaagttcctgaagaacggcgaggctggtatagtgaagatgattcccagaaagcctatgatggtggagacattctccgcgtatcctcccctgggtagatttgccgtccgcgacatgaggcagacggttgctgttggagtcatcaagagtgtggtgtagacgaantcaaccggcgccaaggtgaccaaagcggctgccaagaagaaatgatgcgataccgtagtctgcttttgcagtg

SEQ ID NO: 55124 - DNA, 260 bp, Zea mays
agtggcccaaccatggccgtcattgccctcaagtgcccagacattgaggtcgtcgtcgttgacatctccaagccccgcattgaggcctggaacagtgacaccctgccaatctacgagcctggtctcgatgatgttctgaagcagtgcaggggcaggaacctcttcttcagcactgatgttgagaagcacgtcgctgaggctgacattatctttgtctcggtgaacacccccaccaagacccgtgggcttggagctggcaa

SEQ ID NO: 55125 - DNA, 262 bp, Zea mays
ctccgcagtccgcagaccggtcactcggcagtcggcacgcaggctagcagcacagcagcagccagagccatcccctctcctcgctacgcttcgcttcctcggcgccgattcctcctcctcctcctccaccctcgtccgtcccgttccggcgcgcgagctcgcccgagatggcgaacgcgagatcgggtgtcgctgtgaacgatgagtgcatgctgaagtttggcgagctgcagtcgaagaggctgcaccgcttcataacttt

SEQ ID NO: 55126 - DNA, 240 bp, Zea mays
acagcggctgcagcgctctcgtcttctgcggctctcggtgccctctccttttcgtttccggaaacatggcctccggtgtggctgtctctgatggtgtcatcaaggtgttcaacgacatgaaggtgcggaagtcttcaacgccagaagaggtgaagaagcgcaagaaggcggtgctcttctgcctgagtgaggacaagaagaacatcatcctggatgagggcaaggagatcctggtgggcg

SEQ ID NO: 55127 - DNA, 272 bp, Zea mays
gtcggcgctccacgcggccgtcaacttcgggcagtacccgtacgccgggtacctcccgaaccgcccgtccgtcagccggaagccgatgccggcgccgggcagcgacgagtacgcggagctggagcgcaagccggagaaggtgttcctgcgcaccatcaccagccagttccaggcgctcgtcggcatctcgctgctggagatcctgtctagccactcctccgacgaggtgtacctcggccagcgcgacaccaaggagtggacgtcggacgcca

SEQ ID NO: 55128 - DNA, 293 bp, Zea mays
tgcagcagtgaactcgaggccgctccgccacctcgccactcgcctcttctcgctctcgccaccgggccaggtgaagggaccatccgatcggctccgtcatggctggagctgctgctctcaatgagggtatcctttcttccgtgtccgagaaaaatgttgctgctcacccatggcatgatttggagataggaccagaggctcctgaagtgttcaattgtgtggttgagattcctagaggcagcaaggttaagtatgagttggacaagatatctggtctgatcaaggtggatcgt

SEQ ID NO: 55129 - DNA, 307 bp, Zea mays
agtagctcggaattggttcactcgagtgctattttgggtgttgttggacatgagtatttccacaactggactgggtttagagtaacttgccgtgagttgtttccagctaaccctgaaagtaggactgaccgttttcagggatcaggagttctcttcagatcttggctgtcgtacggtaaaacgtattgctgatgtctccaaacttagaatctatcaattcccacatgatgccgggcctatagcacatcctatccgtccccattcttatatcaagatggacaacttctatactgttacggtttacgag

SEQ ID NO: 55130 - DNA, 256 bp, Zea mays
aggttgatgcagatctctattgccagaacatgaattcgggcaacctggtgtctgtgctcacccaggccgaaggtgcctttgtggcctcactgattaaggagagtggcactgatgacttcaatgtctggattggcctccatgaccccaaaaagaaccgccgctggcactggagcagtgggtccctggtctcctacaagtcctggggcattggagccccaagcagtgttaatcctggctactgtgtgagcctgacctc

SEQ ID NO: 55131 - DNA, 274 bp, Zea mays
  unsure (1)..(274): unsure at all n locations
gatggacaagagcagcgtccatgatgttgtccttgtagttagctcnactaggatccccagggagcagctgctgcaccctggggatctagtatagcacaacnagacttcttcaacggcaaggagctgtgcaagaacatcaatcctgatgaggccgttgcctatggtgctgccgtccagatcgctatcctcagtggtgagggcaacgagaaggtgcaggacctgcttctgcttgacgttactcctctctctctgggtctggagatgccggaggagt

SEQ ID NO: 55132 - DNA, 289 bp, Zea mays
gtgacatggaccagaacactagagacatcatcatgagggagttccggtctggctcctcccgtgtgctcatcaccaccgacctgcttgctcgtggtattgatgttcagcaggtgtccctggtcatcaactatgatctccccacccagccagagaattacctgcatcgcattggtcgtagtggtacgtttcggtaggaagggtgttgccatcaactttgtgacccgcgacgacgagcggatgctgttcgacatccagaagttctacaacgtgttgattgaggagctgcctg

SEQ ID NO: 55133 - DNA, 286 bp, Zea mays
tcaagattagagcagctgagcacttgtcaatttggaaggccttgttgaagacaccagcatcaattgttctgattatctactgttttctttgtgtatggtttgtgggtggtttatctgtcttccatttgtacctgatgggcactaaccagacaacatacgagaatttcaggtatcgctatgaccggcgcgataatccatataacagaggtactctgaacaattttctagagatattctgcaccgctatccccccttcgacgaacaatttccgggcaagggtgacagt

SEQ ID NO: 55134 - DNA, 281 bp, Zea mays
acgcgctgcacggcggcaacttccagggcacccgatcggcgtgtccatggacaacgcccgcctcgccgtcgccaacatcggcaagctcatgttcgcccagttctccgagctggtcaacgagttctacaacaacgggctgacctccaacctggcgggcagccgcaacccgagcctggactacgggttcaagggcaccgagatcgccatggcgtcctactgctccgagctccagtacctggccaaccccatcaccaaccacgtccagatcgcggagagcacaa

SEQ ID NO: 55135 - DNA, 283 bp, Zea mays
tgggaggacaagaagtgccccggcgagtcgcgcttccctgcgcaggtgcgggtggcaacgcggaagatctacgacccgctggaggaggacgccttccgccccatcctgcaccactacgacgggcccaagttccggctcgagctctccgtcaccgaggccctcgcgctcctcgacatcttcgccgacaaggacgacgcctgatccccatcggatctgtcgtcgggccactcgaagctcggatgcatgaatgaatgaatgaatgaatgaacaaacaataataacg

SEQ ID NO: 55136 - DNA, 275 bp, Zea mays
  unsure (1)..(275): unsure at all n locations
agccgccgccgcagccaaaaaaaaaacccctaaacccccaatccatggcgtcgagcagcactgaccttgccgacgacggcttcgcggcgccgcgacttttctcgcagggtgtatcctacacatacgacgacgttatcttcctcccgggctacatcggcttccccgccgacgccaccgacctctccacccgccactcccgccgcataccgctatccatcccctgcgtcgcgtctccgatggtcnatgtctccgaggccgctatggccgcggccatg

SEQ ID NO: 55137 - DNA, 284 bp, Zea mays
cagggacataaaggagaagcttgcctacgttgcccttgattatgaacaggagctggagactgccaggagcagctcctctgtcgagaagagctacgagatgcctgatggtcaggtcatcaccattgggtcagaaaggtttatgtgccccgaggtgctgttccaaccatcccttgttggcatggaatcgcctggcgtccatgaggccacgtacaactccatcatgaagtgtgatgttgatatcaggaaggatttgtatggtaacgttgtcctcagtgggggatcta

SEQ ID NO: 55138 - DNA, 288 bp, Zea mays
cgcgttgctcttccagtccgcgcgcgcgagatcgccgccccgtgtgggccctagatcccgatggcctcgcgccgacgcaccctgctcaaggtcatcatgctcggcgatagtggggttaggaagacttccttgatgaaccaatatgtgaacaagacgttcagcaatcagtacaaggctacgatcggcgcggatttcctcaccaaggaggtgcagttcgaggacaggctcttcactctgcgaatatgggacactgctggccaggaaaggtttcagagtctcggcgttgca

SEQ ID NO: 55139 - DNA, 286 bp, Zea mays
aaggactagcccacatcactggtggtggctttactgacaatatcccaagagtattcccctctggatgcggggcaaaaatttttactgggtcatgggaaatacctccaatcttcagttggcttcaacaggctggaaacattgatgatgcagagatgcggcgaacattcaatatgggcattcgaatggttcttgtggtaagtcgagagtcagcagacagaattattgaagacacccatggatccagtcctgcttatcgcattggagaggtgattgagggtgatggggt

SEQ ID NO: 55140 - DNA, 285 bp, Zea mays
ggaggcctacacgccgccgcttgtgctgcagccatttctctagtgatccctgaaaagttccagcatattttgcgagtactcaacaccaacatcgatgggcggcggaaaatagcctttgccatcactgccattaagggtgtgggccgaagatatgctcatgtggtgttgaggaaagcagacattgacctcaccaagagggcgggagaactcactgaggatgaggtggaacgtgtgatcaccattatgcagaatccacgccagtacaagatcccagactggttcttg

SEQ ID NO: 55141 - DNA, 284 bp, Zea mays
gcgagaaagagcgcgccgcctgcacgactggactggagcggccgggtgccctggaggcccctgggaattgcagtccttgcgcaggtggagagtgagcccttatgagaaaactcaagactcagaaacaataaaggttacagagatgaaattgacagagcctgaatttcaggttatgattctgtatggtttctttggtgctgcattagacctgaactctgattgaaaattcttccacgctcgctacattcttaaactttatctccaatatgaatttccagatgcct

SEQ ID NO: 55142 - DNA, 281 bp, Zea mays
gacaaagttgagaaggtggtggtgtctgatcgcgttgtggactcaccgtgctgccttgtgactggcgagtatggctggaccgccaacatggagaggatcatgaaggcacaggccctgagggactcgagcatggcgggctacatgtcgagcaaaaagacaatggagatcaacccagagaaccctatcatgttaaagctccgcaagcgtgccgaggctgacaagaatgacaagtcagtcaaggatctcgtgatgctgctgttcgagactgctctcctgacctc

SEQ ID NO: 55143 - DNA, 247 bp, Zea mays
cagacttctgctgcagcgcctccgccgccgccgccgcatctaacgcagttccctccgccgcagcccgaggcaagatggttctccagaacgacattgatctgctcaacccgccggcagaactcgagaagctcaagcacaagaaaaagagactcgtccagtcgcccaactccttcttcatggatgttcagtgccaggggtgcttcagcataaccactgttttcagccactcccagactgttgttgtgtg

SEQ ID NO: 55144 - DNA, 282 bp, Zea mays
ggactttgagaccgatgtcgtcttcctggtgcccaccgagattgccctagcccagcacagagccaatgccaagagtgccaagacctacgcctacctgttttcccatccctctcggatgcgcgtctaccccaaatgggtgggggccgaccatgcagatgacattcagtacgttttcgggaagcccgtcgccacccccacgggctaccggccccaagacaggacagtctctaaggccatgatcgcctactggaccaactttgccaaaacaggggaccccaacat

SEQ ID NO: 55145 - DNA, 280 bp, Zea mays
tgccgccgtcatgtcgaagcgaggtaggggaggttcggctgggaacaagttccgcatgtcactgggtctaccggtggcggccacggtgaactgcgcggacaacacgggcgccaagaacctctacatcatctccgtcaagggcatcaagggccgcctcaaccgcctcccgtccgcctgtgtcggcgacatggtcatggccaccgtaaagaagggaaagcccgacctcaggaagaaagtgatgcccgccgtcatcgtccgccagcgcaaccgtggcgtcgca

SEQ ID NO: 55146 - DNA, 122 bp, Zea mays
ggccatttcaatgccagaacaggaaaaacagttgaggcatgagacacattaccgttatgtcaggagccatgacgtcgcttattggtcaaagagcttcatcatagacttggacagggtttgta
